United States Patent Application Publication US 2005/0118625 A1 - sequence listing, part 12

SEQ ID NO: 268478 - DNA, 25 bp, Probe Sequence
ggacctagaaagaagaggggcagct

SEQ ID NO: 268479 - DNA, 25 bp, Probe Sequence
ggagcccgtaagaaagagtagtcag

SEQ ID NO: 268480 - DNA, 25 bp, Probe Sequence
ggacccgtgaaggcaatgatttata

SEQ ID NO: 268481 - DNA, 25 bp, Probe Sequence
ggagccgaggaagatagatcacttg

SEQ ID NO: 268482 - DNA, 25 bp, Probe Sequence
ggactctgggatcaaaggctctttc

SEQ ID NO: 268483 - DNA, 25 bp, Probe Sequence
ggacctgcatcctaaatgggctgtt

SEQ ID NO: 268484 - DNA, 25 bp, Probe Sequence
ggagcctgcctcttgaagagggggt

SEQ ID NO: 268485 - DNA, 25 bp, Probe Sequence
ggaccgacatttcagacgggtagag

SEQ ID NO: 268486 - DNA, 25 bp, Probe Sequence
ggaccaacttgtctgaaggggagag

SEQ ID NO: 268487 - DNA, 25 bp, Probe Sequence
ggaccatttttcagaatcaagaggg

SEQ ID NO: 268488 - DNA, 25 bp, Probe Sequence
ggacctgttgatgctagttcagagt

SEQ ID NO: 268489 - DNA, 25 bp, Probe Sequence
ggagcttgtgttgcgagctctggag

SEQ ID NO: 268490 - DNA, 25 bp, Probe Sequence
ggagcactggtatatgagcttgtgg

SEQ ID NO: 268491 - DNA, 25 bp, Probe Sequence
ggagcctggataaacagtgctttgg

SEQ ID NO: 268492 - DNA, 25 bp, Probe Sequence
ggacctgccaaagcgtgcaaggggc

SEQ ID NO: 268493 - DNA, 25 bp, Probe Sequence
ggaccgccacgtgacagaaggggta

SEQ ID NO: 268494 - DNA, 25 bp, Probe Sequence
ggacctctgggttgggatcaggggt

SEQ ID NO: 268495 - DNA, 25 bp, Probe Sequence
ggaccctgtggcaccaagtggggtc

SEQ ID NO: 268496 - DNA, 25 bp, Probe Sequence
ggacccatgtagattcgcagatggc

SEQ ID NO: 268497 - DNA, 25 bp, Probe Sequence
ggagcgactgtcgagatcgcctagt

SEQ ID NO: 268498 - DNA, 25 bp, Probe Sequence
ggagcaggcttgtggcagcctgatt

SEQ ID NO: 268499 - DNA, 25 bp, Probe Sequence
ggagcagggtagggaccgtgtacag

SEQ ID NO: 268500 - DNA, 25 bp, Probe Sequence
ggagccttgtagggaggcctctaca

SEQ ID NO: 268501 - DNA, 25 bp, Probe Sequence
ggagctctgtgggttaactcctggg

SEQ ID NO: 268502 - DNA, 25 bp, Probe Sequence
ggagcttatgggtagaagaccatgt

SEQ ID NO: 268503 - DNA, 25 bp, Probe Sequence
ggagcttatccagtcaaaaatagta

SEQ ID NO: 268504 - DNA, 25 bp, Probe Sequence
ggcacttacaaataccaagagtagt

SEQ ID NO: 268505 - DNA, 25 bp, Probe Sequence
ggactgttggaagcctcataggtag

SEQ ID NO: 268506 - DNA, 25 bp, Probe Sequence
ggagctttggagaacttgctttgat

SEQ ID NO: 268507 - DNA, 25 bp, Probe Sequence
ggagcgtatggaggactttactgat

SEQ ID NO: 268508 - DNA, 25 bp, Probe Sequence
ggagctacttgagggtctggactat

SEQ ID NO: 268509 - DNA, 25 bp, Probe Sequence
ggagcctcctgaaggtggaagctat

SEQ ID NO: 268510 - DNA, 25 bp, Probe Sequence
ggagcaacccaggcgctggaagact

SEQ ID NO: 268511 - DNA, 25 bp, Probe Sequence
ggagcaacactcgtagcgagcaaca

SEQ ID NO: 268512 - DNA, 25 bp, Probe Sequence
ggagcagactctcatcatgcaaatt

SEQ ID NO: 268513 - DNA, 25 bp, Probe Sequence
ggagcacatctttgatcatctaatc

SEQ ID NO: 268514 - DNA, 25 bp, Probe Sequence
ggagcatcactggtatcttcatgac

SEQ ID NO: 268515 - DNA, 25 bp, Probe Sequence
ggagcacatgccattctggcagttt

SEQ ID NO: 268516 - DNA, 25 bp, Probe Sequence
ggagcacatgttactgcttcatttt

SEQ ID NO: 268517 - DNA, 25 bp, Probe Sequence
ggagaagtctcaatttcatgttcca

SEQ ID NO: 268518 - DNA, 25 bp, Probe Sequence
ggagcaatgttgctatcggttcaaa

SEQ ID NO: 268519 - DNA, 25 bp, Probe Sequence
ggagcaggacagctatcgctttaca

SEQ ID NO: 268520 - DNA, 25 bp, Probe Sequence
ggacctgagaggactgcacttttca

SEQ ID NO: 268521 - DNA, 25 bp, Probe Sequence
ggacctcatggtggcacagttttcc

SEQ ID NO: 268522 - DNA, 25 bp, Probe Sequence
ggagcgctcaagggcagcggatttg

SEQ ID NO: 268523 - DNA, 25 bp, Probe Sequence
ggagcacttgaggtcaggagtttga

SEQ ID NO: 268524 - DNA, 25 bp, Probe Sequence
ggagcaagtgcagggtggaggtggc

SEQ ID NO: 268525 - DNA, 25 bp, Probe Sequence
ggagctgaggacagggactggcggc

SEQ ID NO: 268526 - DNA, 25 bp, Probe Sequence
ggagctgaggacagggactggcggc

SEQ ID NO: 268527 - DNA, 25 bp, Probe Sequence
ggagcgtgatgtgctggaacgggag

SEQ ID NO: 268528 - DNA, 25 bp, Probe Sequence
ggacctggattcttgaaggcagtgg

SEQ ID NO: 268529 - DNA, 25 bp, Probe Sequence
ggagctctgagaatccagtccggta

SEQ ID NO: 268530 - DNA, 25 bp, Probe Sequence
ggagctctgagaacagtctccttca

SEQ ID NO: 268531 - DNA, 25 bp, Probe Sequence
ggagctctgatatatatctggtaca

SEQ ID NO: 268532 - DNA, 25 bp, Probe Sequence
ggagcttcatgatagccttgtgaca

SEQ ID NO: 268533 - DNA, 25 bp, Probe Sequence
ggagctgagctataggctcttcatc

SEQ ID NO: 268534 - DNA, 25 bp, Probe Sequence
ggagcttggatatgtgcgtggcatg

SEQ ID NO: 268535 - DNA, 25 bp, Probe Sequence
ggagcctgagtttgtcaatgtgtgt

SEQ ID NO: 268536 - DNA, 25 bp, Probe Sequence
ggagctacaaattctcagatggcga

SEQ ID NO: 268537 - DNA, 25 bp, Probe Sequence
ggagcttgcagtgagctgagatccc

SEQ ID NO: 268538 - DNA, 25 bp, Probe Sequence
ggagcaggcagtcatattatcaccc

SEQ ID NO: 268539 - DNA, 25 bp, Probe Sequence
ggagcatggatgcctatatgagtac

SEQ ID NO: 268540 - DNA, 25 bp, Probe Sequence
ggagctcgaggccatgagcagatat

SEQ ID NO: 268541 - DNA, 25 bp, Probe Sequence
ggagcacgaggccatgaagctggtg

SEQ ID NO: 268542 - DNA, 25 bp, Probe Sequence
ggagccagaagactgattggagggc

SEQ ID NO: 268543 - DNA, 25 bp, Probe Sequence
ggagccagaaattggtggaggaggc

SEQ ID NO: 268544 - DNA, 25 bp, Probe Sequence
ggagcagcggaaacagatgaagggg

SEQ ID NO: 268545 - DNA, 25 bp, Probe Sequence
ggacgagtacaggagcatgagcacg

SEQ ID NO: 268546 - DNA, 25 bp, Probe Sequence
ggagctgcaggaggagagcggtctg

SEQ ID NO: 268547 - DNA, 25 bp, Probe Sequence
ggagcatgtaattgaggccctgcgc

SEQ ID NO: 268548 - DNA, 25 bp, Probe Sequence
ggagctgagatacgagggcctgatg

SEQ ID NO: 268549 - DNA, 25 bp, Probe Sequence
ggagcagttacaagggcctgcatca

SEQ ID NO: 268550 - DNA, 25 bp, Probe Sequence
ggagctgttagcttcagggctcctg

SEQ ID NO: 268551 - DNA, 25 bp, Probe Sequence
ggagcaggggcgtcagggatcctgc

SEQ ID NO: 268552 - DNA, 25 bp, Probe Sequence
ggagcgggaggtgatcgacttcgcc

SEQ ID NO: 268553 - DNA, 25 bp, Probe Sequence
ggagcagagtggttaaggactttca

SEQ ID NO: 268554 - DNA, 25 bp, Probe Sequence
ggagcagatacgacaaaggtctttt

SEQ ID NO: 268555 - DNA, 25 bp, Probe Sequence
ggagctggacatgactccgtttttg

SEQ ID NO: 268556 - DNA, 25 bp, Probe Sequence
ggagctggagatgaactcggacctc

SEQ ID NO: 268557 - DNA, 25 bp, Probe Sequence
ggagctggagctctacaaggacgga

SEQ ID NO: 268558 - DNA, 25 bp, Probe Sequence
ggagctgagcctcaccaaggaagag

SEQ ID NO: 268559 - DNA, 25 bp, Probe Sequence
ggagcggactcgatcagagcgtgaa

SEQ ID NO: 268560 - DNA, 25 bp, Probe Sequence
ggacgaggatggctacaggatgaag

SEQ ID NO: 268561 - DNA, 25 bp, Probe Sequence
ggacgaggactccagcctggatgaa

SEQ ID NO: 268562 - DNA, 25 bp, Probe Sequence
ggacggtgaacggccatgtgttaat

SEQ ID NO: 268563 - DNA, 25 bp, Probe Sequence
ggacatgatgctaagagccctgggt

SEQ ID NO: 268564 - DNA, 25 bp, Probe Sequence
ggcagctgtccaaggacctgttggt

SEQ ID NO: 268565 - DNA, 25 bp, Probe Sequence
ggaacccaagtagctttgtggcttc

SEQ ID NO: 268566 - DNA, 25 bp, Probe Sequence
ggacccacgagttttttgaggccat

SEQ ID NO: 268567 - DNA, 25 bp, Probe Sequence
ggcacccaagggcagttagaggctc

SEQ ID NO: 268568 - DNA, 25 bp, Probe Sequence
ggacggaaggtcagttgccatggtt

SEQ ID NO: 268569 - DNA, 25 bp, Probe Sequence
ggacctgaaggtattggcctgttca

SEQ ID NO: 268570 - DNA, 25 bp, Probe Sequence
ggaccacaagagatttggcctcctt

SEQ ID NO: 268571 - DNA, 25 bp, Probe Sequence
ggagctacaaagatctcttcctgtt

SEQ ID NO: 268572 - DNA, 25 bp, Probe Sequence
ggagcattcacatgtgactctgtcc

SEQ ID NO: 268573 - DNA, 25 bp, Probe Sequence
ggagcaagagcaagatcaccgtgac

SEQ ID NO: 268574 - DNA, 25 bp, Probe Sequence
ggagcaagagcaagatcaccgtgac

SEQ ID NO: 268575 - DNA, 25 bp, Probe Sequence
ggagccagcgtcaactacgatgact

SEQ ID NO: 268576 - DNA, 25 bp, Probe Sequence
ggagctatggtctcataatgacaat

SEQ ID NO: 268577 - DNA, 25 bp, Probe Sequence
ggagcactattcacacagaacacat

SEQ ID NO: 268578 - DNA, 25 bp, Probe Sequence
ggagcacatcaaatacaagagacaa

SEQ ID NO: 268579 - DNA, 25 bp, Probe Sequence
ggagcatgcattccaggcaggagac

SEQ ID NO: 268580 - DNA, 25 bp, Probe Sequence
ggagcatgcatggaaggcctgaata

SEQ ID NO: 268581 - DNA, 25 bp, Probe Sequence
ggagaatatgagtgccatgcatcca

SEQ ID NO: 268582 - DNA, 25 bp, Probe Sequence
ggagcacatagagattcacccatgt

SEQ ID NO: 268583 - DNA, 25 bp, Probe Sequence
ggagcagtagacttctcacatcttt

SEQ ID NO: 268584 - DNA, 25 bp, Probe Sequence
ggacctcacagatctaatcagtata

SEQ ID NO: 268585 - DNA, 25 bp, Probe Sequence
ggaccatatatatcttgacagtgta

SEQ ID NO: 268586 - DNA, 25 bp, Probe Sequence
ggaccactcaataagtaatgtagaa

SEQ ID NO: 268587 - DNA, 25 bp, Probe Sequence
ggaccactcagaagatgggatgtgt

SEQ ID NO: 268588 - DNA, 25 bp, Probe Sequence
ggaccactcgaagatggcattgaca

SEQ ID NO: 268589 - DNA, 25 bp, Probe Sequence
ggactgccttgattgacatggggaa

SEQ ID NO: 268590 - DNA, 25 bp, Probe Sequence
ggagctgcatttatgagcactgtag

SEQ ID NO: 268591 - DNA, 25 bp, Probe Sequence
ggagctgtgttactagcactatata

SEQ ID NO: 268592 - DNA, 25 bp, Probe Sequence
ggacggatctagctcctgtatatat

SEQ ID NO: 268593 - DNA, 25 bp, Probe Sequence
ggacggctcaggatactgtgtgact

SEQ ID NO: 268594 - DNA, 25 bp, Probe Sequence
ggagcggtcagtgacgcgatggagc

SEQ ID NO: 268595 - DNA, 25 bp, Probe Sequence
ggagcgtcctgagacagcgaggacc

SEQ ID NO: 268596 - DNA, 25 bp, Probe Sequence
ggacgacttgagcccaagagttcca

SEQ ID NO: 268597 - DNA, 25 bp, Probe Sequence
ggacgcaatgggccgttagcgttac

SEQ ID NO: 268598 - DNA, 25 bp, Probe Sequence
ggaccagagcggcgttcaggagctc

SEQ ID NO: 268599 - DNA, 25 bp, Probe Sequence
ggagctgcgcagcgggaatgagcgg

SEQ ID NO: 268600 - DNA, 25 bp, Probe Sequence
ggaccatcggagagcagtgcagcgt

SEQ ID NO: 268601 - DNA, 25 bp, Probe Sequence
ggacctcggagtcgcaggagaactg

SEQ ID NO: 268602 - DNA, 25 bp, Probe Sequence
ggacctggtggtcatagatgaagat

SEQ ID NO: 268603 - DNA, 25 bp, Probe Sequence
ggagctctggggtttgagagaggga

SEQ ID NO: 268604 - DNA, 25 bp, Probe Sequence
ggacctgacgagttggtggcatggg

SEQ ID NO: 268605 - DNA, 25 bp, Probe Sequence
ggacttgccaggagttgtctgcgag

SEQ ID NO: 268606 - DNA, 25 bp, Probe Sequence
ggacttctactgcagtacatctacg

SEQ ID NO: 268607 - DNA, 25 bp, Probe Sequence
ggaccattaatgtgctacttaccag

SEQ ID NO: 268608 - DNA, 25 bp, Probe Sequence
ggaccttagtgatcaggtggcacct

SEQ ID NO: 268609 - DNA, 25 bp, Probe Sequence
ggagcgattaggggcaggggacacc

SEQ ID NO: 268610 - DNA, 25 bp, Probe Sequence
ggagcagtcaagagccaaggagaaa

SEQ ID NO: 268611 - DNA, 25 bp, Probe Sequence
ggagcgatgcgacaggcatgatgga

SEQ ID NO: 268612 - DNA, 25 bp, Probe Sequence
ggacgacgggagctgcatgaaagcc

SEQ ID NO: 268613 - DNA, 25 bp, Probe Sequence
ggagcgggctgctgagagctaaacc

SEQ ID NO: 268614 - DNA, 25 bp, Probe Sequence
ggagcgggctgctgagagctaaacc

SEQ ID NO: 268615 - DNA, 25 bp, Probe Sequence
ggagcctgaggatgaggtcaacact

SEQ ID NO: 268616 - DNA, 25 bp, Probe Sequence
ggagccggaacaagcagtggacctg

SEQ ID NO: 268617 - DNA, 25 bp, Probe Sequence
ggaccgtgtggaacaggaacagctg

SEQ ID NO: 268618 - DNA, 25 bp, Probe Sequence
ggacggcaatgtatcaggaacacag

SEQ ID NO: 268619 - DNA, 25 bp, Probe Sequence
ggacgaggagccggtggagtccagg

SEQ ID NO: 268620 - DNA, 25 bp, Probe Sequence
ggacgaggagccggtggagtccagg

SEQ ID NO: 268621 - DNA, 25 bp, Probe Sequence
ggacggagcgagtgtggaacctgat

SEQ ID NO: 268622 - DNA, 25 bp, Probe Sequence
ggagctagacgagaatggagacggg

SEQ ID NO: 268623 - DNA, 25 bp, Probe Sequence
ggagctcaacgtgacggtggtgacg

SEQ ID NO: 268624 - DNA, 25 bp, Probe Sequence
ggagctctacaaggacggaggcgtt

SEQ ID NO: 268625 - DNA, 25 bp, Probe Sequence
ggagctctacaatgaagtgaaggtg

SEQ ID NO: 268626 - DNA, 25 bp, Probe Sequence
ggagctgtacaaggttgtgcagggg

SEQ ID NO: 268627 - DNA, 25 bp, Probe Sequence
ggagcatttcaaggtggccagagaa

SEQ ID NO: 268628 - DNA, 25 bp, Probe Sequence
ggagctcttctaggtaaagctgaga

SEQ ID NO: 268629 - DNA, 25 bp, Probe Sequence
ggagctcttctaggtaaagctgaga

SEQ ID NO: 268630 - DNA, 25 bp, Probe Sequence
ggagctcttattcataattgtagca

SEQ ID NO: 268631 - DNA, 25 bp, Probe Sequence
ggagctcttcttaaattctactgca

SEQ ID NO: 268632 - DNA, 25 bp, Probe Sequence
ggagcctttgtcaagatgtctggtt

SEQ ID NO: 268633 - DNA, 25 bp, Probe Sequence
ggaaatgattgagaattcttgccta

SEQ ID NO: 268634 - DNA, 25 bp, Probe Sequence
ggactagaggcataatttcctgcta

SEQ ID NO: 268635 - DNA, 25 bp, Probe Sequence
ggaccaggacatacagtttctccca

SEQ ID NO: 268636 - DNA, 25 bp, Probe Sequence
ggaccaatggataagtctatgcatc

SEQ ID NO: 268637 - DNA, 25 bp, Probe Sequence
ggaccattggatcgatattatatgc

SEQ ID NO: 268638 - DNA, 25 bp, Probe Sequence
ggagctttctggcatgtgattattt

SEQ ID NO: 268639 - DNA, 25 bp, Probe Sequence
ggagctattgcggtcaagtctcatt

SEQ ID NO: 268640 - DNA, 25 bp, Probe Sequence
ggagctattagttaatctatcttcc

SEQ ID NO: 268641 - DNA, 25 bp, Probe Sequence
ggaccactagttcatcctaattctc

SEQ ID NO: 268642 - DNA, 25 bp, Probe Sequence
ggacccgtgtcacatcgtgaatatt

SEQ ID NO: 268643 - DNA, 25 bp, Probe Sequence
ggacccgtatctatgcaaagaattg

SEQ ID NO: 268644 - DNA, 25 bp, Probe Sequence
ggactcggctctcaggaaatatgtt

SEQ ID NO: 268645 - DNA, 25 bp, Probe Sequence
ggagcgagacttcaaggactcagtt

SEQ ID NO: 268646 - DNA, 25 bp, Probe Sequence
ggagcgagacttcaaggactcagtt

SEQ ID NO: 268647 - DNA, 25 bp, Probe Sequence
ggagctaacatcacaaggtgctggt

SEQ ID NO: 268648 - DNA, 25 bp, Probe Sequence
ggagctggttcccagaggattgtct

SEQ ID NO: 268649 - DNA, 25 bp, Probe Sequence
ggactgagcgtccgcagaggtgacc

SEQ ID NO: 268650 - DNA, 25 bp, Probe Sequence
ggagctggggcaagcagagggactg

SEQ ID NO: 268651 - DNA, 25 bp, Probe Sequence
ggacggagcagcttgcagatggaca

SEQ ID NO: 268652 - DNA, 25 bp, Probe Sequence
ggagctaagcagtcacatatggaag

SEQ ID NO: 268653 - DNA, 25 bp, Probe Sequence
ggagctaatcattgcatgtgcatgg

SEQ ID NO: 268654 - DNA, 25 bp, Probe Sequence
ggcagctaacaacttgctggctggc

SEQ ID NO: 268655 - DNA, 25 bp, Probe Sequence
ggagctgtacagattgccatcatag

SEQ ID NO: 268656 - DNA, 25 bp, Probe Sequence
ggacttatactgatcccaagttaaa

SEQ ID NO: 268657 - DNA, 25 bp, Probe Sequence
ggagcttaattgatctcacttgttt

SEQ ID NO: 268658 - DNA, 25 bp, Probe Sequence
ggagctatgacactttttattggat

SEQ ID NO: 268659 - DNA, 25 bp, Probe Sequence
ggagctagcaataattggttctggc

SEQ ID NO: 268660 - DNA, 25 bp, Probe Sequence
gatgataatatcaagacacctgccg

SEQ ID NO: 268661 - DNA, 25 bp, Probe Sequence
ggagctgtaaaaaggctgtctgtga

SEQ ID NO: 268662 - DNA, 25 bp, Probe Sequence
ggagctggagaacagacttctgatt

SEQ ID NO: 268663 - DNA, 25 bp, Probe Sequence
ggagcaggttcaccagctttatgat

SEQ ID NO: 268664 - DNA, 25 bp, Probe Sequence
ggacgagggcgaggaatttgatgac

SEQ ID NO: 268665 - DNA, 25 bp, Probe Sequence
ggactctgggctgctggaataggac

SEQ ID NO: 268666 - DNA, 25 bp, Probe Sequence
ggagcctttcatcctggaagggtca

SEQ ID NO: 268667 - DNA, 25 bp, Probe Sequence
ggagcccctcatgctgagatggaag

SEQ ID NO: 268668 - DNA, 25 bp, Probe Sequence
ggagcccctcatgctgagatggaag

SEQ ID NO: 268669 - DNA, 25 bp, Probe Sequence
ggagccctccagacataaggaggcc

SEQ ID NO: 268670 - DNA, 25 bp, Probe Sequence
ggagccctccagacataaggaggcc

SEQ ID NO: 268671 - DNA, 25 bp, Probe Sequence
ggagcccctgcgacagaagttggct

SEQ ID NO: 268672 - DNA, 25 bp, Probe Sequence
ggagcctcatctgcaatgtaggggc

SEQ ID NO: 268673 - DNA, 25 bp, Probe Sequence
ggaccatcactgagagtcaggagtt

SEQ ID NO: 268674 - DNA, 25 bp, Probe Sequence
ggagcagatccgagagctggtggag

SEQ ID NO: 268675 - DNA, 25 bp, Probe Sequence
ggagctgtcccctagtgagggactg

SEQ ID NO: 268676 - DNA, 25 bp, Probe Sequence
ggagctggtacagtagtgttggact

SEQ ID NO: 268677 - DNA, 25 bp, Probe Sequence
ggagctggttcttagatttggcatc

SEQ ID NO: 268678 - DNA, 25 bp, Probe Sequence
ggagctggttcttagatttggcatc

SEQ ID NO: 268679 - DNA, 25 bp, Probe Sequence
ggagcatgtttcacagtggctggac

SEQ ID NO: 268680 - DNA, 25 bp, Probe Sequence
ggagctgtaccaggagtggctggag

SEQ ID NO: 268681 - DNA, 25 bp, Probe Sequence
ggagctgtcgccatgaaggtcgagc

SEQ ID NO: 268682 - DNA, 25 bp, Probe Sequence
ggagcttagccaatgtgggagcagc

SEQ ID NO: 268683 - DNA, 25 bp, Probe Sequence
ggagctgtaatcaattgtgctgaca

SEQ ID NO: 268684 - DNA, 25 bp, Probe Sequence
ggagctggacaacatttgacaccaa

SEQ ID NO: 268685 - DNA, 25 bp, Probe Sequence
ggagctgaccaaacttcagaacaat

SEQ ID NO: 268686 - DNA, 25 bp, Probe Sequence
ggactctcaattacatccaaacagt

SEQ ID NO: 268687 - DNA, 25 bp, Probe Sequence
ggagctctatcaaatctcccagaga

SEQ ID NO: 268688 - DNA, 25 bp, Probe Sequence
ggagcttcatcatgattgcctgaga

SEQ ID NO: 268689 - DNA, 25 bp, Probe Sequence
ggagctggaaaactgatctgagaat

SEQ ID NO: 268690 - DNA, 25 bp, Probe Sequence
ggagcatggatacctctggcatgag

SEQ ID NO: 268691 - DNA, 25 bp, Probe Sequence
ggagcatgagacatcctggaagcag

SEQ ID NO: 268692 - DNA, 25 bp, Probe Sequence
ggagcggagcttgcagtgagccgag

SEQ ID NO: 268693 - DNA, 25 bp, Probe Sequence
ggcaggagactcccctagggagctt

SEQ ID NO: 268694 - DNA, 25 bp, Probe Sequence
ggaaggcacccctgaggggctgtat

SEQ ID NO: 268695 - DNA, 25 bp, Probe Sequence
ggaaggcacccctgaggggctgtat

SEQ ID NO: 268696 - DNA, 25 bp, Probe Sequence
ggaccgagaacctgggctaggatag

SEQ ID NO: 268697 - DNA, 25 bp, Probe Sequence
ggacccgaacactgatcgctgggtg

SEQ ID NO: 268698 - DNA, 25 bp, Probe Sequence
ggagcccataacataacagaggaag

SEQ ID NO: 268699 - DNA, 25 bp, Probe Sequence
ggagctctcaaacacaaagcccaac

SEQ ID NO: 268700 - DNA, 25 bp, Probe Sequence
ggagctgaaagacacagacgccgct

SEQ ID NO: 268701 - DNA, 25 bp, Probe Sequence
ggcagccaaagggcacagaaccctg

SEQ ID NO: 268702 - DNA, 25 bp, Probe Sequence
ggaccgcaatggcagcgggacgctg

SEQ ID NO: 268703 - DNA, 25 bp, Probe Sequence
ggaccaagtgaccaccgtgaagtgc

SEQ ID NO: 268704 - DNA, 25 bp, Probe Sequence
ggaccaaggtcgtcacgttaacaca

SEQ ID NO: 268705 - DNA, 25 bp, Probe Sequence
ggaccagatggctttactgataaat

SEQ ID NO: 268706 - DNA, 25 bp, Probe Sequence
ggagccattggctgtgaagctgcag

SEQ ID NO: 268707 - DNA, 25 bp, Probe Sequence
ggactgcatcggtggacactggtat

SEQ ID NO: 268708 - DNA, 25 bp, Probe Sequence
ggacgacggtggcacctttgaggtt

SEQ ID NO: 268709 - DNA, 25 bp, Probe Sequence
ggacgacaggttcatctctatttaa

SEQ ID NO: 268710 - DNA, 25 bp, Probe Sequence
ggacgacacctctggtttttcaata

SEQ ID NO: 268711 - DNA, 25 bp, Probe Sequence
ggactactcctctgatggttttagt

SEQ ID NO: 268712 - DNA, 25 bp, Probe Sequence
ggagctatttcttaacatgctttta

SEQ ID NO: 268713 - DNA, 25 bp, Probe Sequence
ggagctgtgtccaataaagttcttg

SEQ ID NO: 268714 - DNA, 25 bp, Probe Sequence
ggagcttgtcaccattggacagtct

SEQ ID NO: 268715 - DNA, 25 bp, Probe Sequence
ggagctttcacttgggacaacaaca

SEQ ID NO: 268716 - DNA, 25 bp, Probe Sequence
ggagcatttacttggccttaaatcc

SEQ ID NO: 268717 - DNA, 25 bp, Probe Sequence
ggaatttggctgtggagtaagaggg

SEQ ID NO: 268718 - DNA, 25 bp, Probe Sequence
ggaaggtcgtactgcggaagggcgt

SEQ ID NO: 268719 - DNA, 25 bp, Probe Sequence
ggacggattcttgcgggaagcgcgg

SEQ ID NO: 268720 - DNA, 25 bp, Probe Sequence
ggaatgggccttgaggagcccgggg

SEQ ID NO: 268721 - DNA, 25 bp, Probe Sequence
ggaatcagtcatgtaaaccccggga

SEQ ID NO: 268722 - DNA, 25 bp, Probe Sequence
ggaatcagtcatgtaaaccccggga

SEQ ID NO: 268723 - DNA, 25 bp, Probe Sequence
ggaccggctgaagaacctaccgaca

SEQ ID NO: 268724 - DNA, 25 bp, Probe Sequence
ggacgagagtaagaactcccactaa

SEQ ID NO: 268725 - DNA, 25 bp, Probe Sequence
ggacgacgtgaatggcatccggcac

SEQ ID NO: 268726 - DNA, 25 bp, Probe Sequence
ggaccaggagattcagaccctgaag

SEQ ID NO: 268727 - DNA, 25 bp, Probe Sequence
ggaccaggagattcagaccctgaag

SEQ ID NO: 268728 - DNA, 25 bp, Probe Sequence
ggacttgggatatacagttccagtt

SEQ ID NO: 268729 - DNA, 25 bp, Probe Sequence
ggaccggtatgagatcaattccctg

SEQ ID NO: 268730 - DNA, 25 bp, Probe Sequence
tggacgggtataaagccccgcctgc

SEQ ID NO: 268731 - DNA, 25 bp, Probe Sequence
ggagcggcggctaaagaccacgccc

SEQ ID NO: 268732 - DNA, 25 bp, Probe Sequence
ggagctccaaggacaagaacacgtc

SEQ ID NO: 268733 - DNA, 25 bp, Probe Sequence
ggagcccaaggccaagagaccaaaa

SEQ ID NO: 268734 - DNA, 25 bp, Probe Sequence
ggactacacattcaggaggcacaaa

SEQ ID NO: 268735 - DNA, 25 bp, Probe Sequence
ggagccagtcatcaaggaagacaag

SEQ ID NO: 268736 - DNA, 25 bp, Probe Sequence
ggagccaatgcagaaggcaccacag

SEQ ID NO: 268737 - DNA, 25 bp, Probe Sequence
ggagccgatgcctagtgaactcaag

SEQ ID NO: 268738 - DNA, 25 bp, Probe Sequence
ggcggggacgagaaacactgacctt

SEQ ID NO: 268739 - DNA, 25 bp, Probe Sequence
ggcggggacgagaaacactgacctt

SEQ ID NO: 268740 - DNA, 25 bp, Probe Sequence
ggcggggacgagaaacactgacctt

SEQ ID NO: 268741 - DNA, 25 bp, Probe Sequence
ggactgggacccatgaacattcctt

SEQ ID NO: 268742 - DNA, 25 bp, Probe Sequence
ggactgggactcttcagaaattctg

SEQ ID NO: 268743 - DNA, 25 bp, Probe Sequence
ggagcgggaataacaaattttcatc

SEQ ID NO: 268744 - DNA, 25 bp, Probe Sequence
ggacaggttatcaacgaaacttctc

SEQ ID NO: 268745 - DNA, 25 bp, Probe Sequence
ggacaggtgtactatacatgcaact

SEQ ID NO: 268746 - DNA, 25 bp, Probe Sequence
ggagctgtgtctacgattcaaagtg

SEQ ID NO: 268747 - DNA, 25 bp, Probe Sequence
ggagccagttattattgccacagtg

SEQ ID NO: 268748 - DNA, 25 bp, Probe Sequence
ggagctagattcatatcctaagtaa

SEQ ID NO: 268749 - DNA, 25 bp, Probe Sequence
ggagctagaatcactcctagagaag

SEQ ID NO: 268750 - DNA, 25 bp, Probe Sequence
ggaccacagagcacatcctgaaaga

SEQ ID NO: 268751 - DNA, 25 bp, Probe Sequence
ggaccacggtgttctcagaggagaa

SEQ ID NO: 268752 - DNA, 25 bp, Probe Sequence
ggactttggggactcagggcaaagg

SEQ ID NO: 268753 - DNA, 25 bp, Probe Sequence
ggacatttggggaaagggctccttg

SEQ ID NO: 268754 - DNA, 25 bp, Probe Sequence
ggacatttggggaaagggctccttg

SEQ ID NO: 268755 - DNA, 25 bp, Probe Sequence
ggacctggtggcaaatggggccctt

SEQ ID NO: 268756 - DNA, 25 bp, Probe Sequence
ggacctggagaggaatgacggctcg

SEQ ID NO: 268757 - DNA, 25 bp, Probe Sequence
ggacctgggcagtggaatggctagg

SEQ ID NO: 268758 - DNA, 25 bp, Probe Sequence
ggacctgggactggtgttggatggc

SEQ ID NO: 268759 - DNA, 25 bp, Probe Sequence
ggacctggggcgactggaggaagcc

SEQ ID NO: 268760 - DNA, 25 bp, Probe Sequence
ggaccttaactcacgtgtgaagcca

SEQ ID NO: 268761 - DNA, 25 bp, Probe Sequence
ggactggttttcacattagaagaca

SEQ ID NO: 268762 - DNA, 25 bp, Probe Sequence
ggagctggagttttccaaagacaaa

SEQ ID NO: 268763 - DNA, 25 bp, Probe Sequence
ggactcgatgagtttccaccgaaat

SEQ ID NO: 268764 - DNA, 25 bp, Probe Sequence
ggacgcgagaacttctaccaaaact

SEQ ID NO: 268765 - DNA, 25 bp, Probe Sequence
ggacgctggaaagtcggccaagaaa

SEQ ID NO: 268766 - DNA, 25 bp, Probe Sequence
ggacgtgcaaaagtctagccttgcc

SEQ ID NO: 268767 - DNA, 25 bp, Probe Sequence
ggaccgctataaggccagtcggact

SEQ ID NO: 268768 - DNA, 25 bp, Probe Sequence
ggaccaattacaatgacagatacga

SEQ ID NO: 268769 - DNA, 25 bp, Probe Sequence
ggaccaattacaatgacagatacga

SEQ ID NO: 268770 - DNA, 25 bp, Probe Sequence
ggagccaagaacagccagataaaac

SEQ ID NO: 268771 - DNA, 25 bp, Probe Sequence
ggagccgaaacaagccaacggcggg

SEQ ID NO: 268772 - DNA, 25 bp, Probe Sequence
ggacatcggaaaaccagggagacga

SEQ ID NO: 268773 - DNA, 25 bp, Probe Sequence
ggacatcggaaaaccagggagacga

SEQ ID NO: 268774 - DNA, 25 bp, Probe Sequence
ggagctcgagaacttcagcttggag

SEQ ID NO: 268775 - DNA, 25 bp, Probe Sequence
ggagccatgagatgtagccttgtag

SEQ ID NO: 268776 - DNA, 25 bp, Probe Sequence
ggagccatcatatgtcacagtgttc

SEQ ID NO: 268777 - DNA, 25 bp, Probe Sequence
ggagctcagattttaaggctgtagc

SEQ ID NO: 268778 - DNA, 25 bp, Probe Sequence
ggagctagactgccttgaggctgct

SEQ ID NO: 268779 - DNA, 25 bp, Probe Sequence
ggactggagggcataggtgctggcg

SEQ ID NO: 268780 - DNA, 25 bp, Probe Sequence
ggagctcaaggtgctagtggctgac

SEQ ID NO: 268781 - DNA, 25 bp, Probe Sequence
ggagctcaatgtcaccgtggtgacc

SEQ ID NO: 268782 - DNA, 25 bp, Probe Sequence
ggaccagctgtggaccgtggatagc

SEQ ID NO: 268783 - DNA, 25 bp, Probe Sequence
ggagcgagtgtggaacctgatcaga

SEQ ID NO: 268784 - DNA, 25 bp, Probe Sequence
ggagctgagtgggatcagcaccacg

SEQ ID NO: 268785 - DNA, 25 bp, Probe Sequence
ggagctcctgaggatggatctgcag

SEQ ID NO: 268786 - DNA, 25 bp, Probe Sequence
ggagcgcttcaggcagaattcacac

SEQ ID NO: 268787 - DNA, 25 bp, Probe Sequence
ggagcgcttcgatgagagcggcaag

SEQ ID NO: 268788 - DNA, 25 bp, Probe Sequence
ggagctccgatgtgaggggcaaggc

SEQ ID NO: 268789 - DNA, 25 bp, Probe Sequence
ggagctccgatgtgaggggcaaggc

SEQ ID NO: 268790 - DNA, 25 bp, Probe Sequence
ggactccttgcgggaggccaatgag

SEQ ID NO: 268791 - DNA, 25 bp, Probe Sequence
ggagctctgttttgaggaccaatgc

SEQ ID NO: 268792 - DNA, 25 bp, Probe Sequence
ggagctctgttttgcttagaaataa

SEQ ID NO: 268793 - DNA, 25 bp, Probe Sequence
ggagctctgatctgtgctttgaaaa

SEQ ID NO: 268794 - DNA, 25 bp, Probe Sequence
ggaccatgaggtagctttggccaat

SEQ ID NO: 268795 - DNA, 25 bp, Probe Sequence
ggagccatgaggacagttgtgtgcc

SEQ ID NO: 268796 - DNA, 25 bp, Probe Sequence
ggagctgctgggaaatgtggacctg

SEQ ID NO: 268797 - DNA, 25 bp, Probe Sequence
ggagctcttggatatcattggccat

SEQ ID NO: 268798 - DNA, 25 bp, Probe Sequence
ggagccttggcatcatcgtatgcaa

SEQ ID NO: 268799 - DNA, 25 bp, Probe Sequence
ggacgttgtgattctctgtgatgct

SEQ ID NO: 268800 - DNA, 25 bp, Probe Sequence
ggactgtgaattttggtgatgtaaa

SEQ ID NO: 268801 - DNA, 25 bp, Probe Sequence
ggagctggtattaggggagacaccc

SEQ ID NO: 268802 - DNA, 25 bp, Probe Sequence
ggagctggtgctataggtgaccatc

SEQ ID NO: 268803 - DNA, 25 bp, Probe Sequence
ggagctggtcaccaagatcgaccac

SEQ ID NO: 268804 - DNA, 25 bp, Probe Sequence
ggagctgtgtaccatcgaagaaacc

SEQ ID NO: 268805 - DNA, 25 bp, Probe Sequence
ggagctgtgtaccatcgaagaaacc

SEQ ID NO: 268806 - DNA, 25 bp, Probe Sequence
ggagcctgaaccagaggaagagatc

SEQ ID NO: 268807 - DNA, 25 bp, Probe Sequence
ggagcgctaccttagggataagacc

SEQ ID NO: 268808 - DNA, 25 bp, Probe Sequence
ggaccttgcactcaagtgaggagac

SEQ ID NO: 268809 - DNA, 25 bp, Probe Sequence
ggaccttgcactcaagtgaggagac

SEQ ID NO: 268810 - DNA, 25 bp, Probe Sequence
ggacttcgcagacatcggctggaat

SEQ ID NO: 268811 - DNA, 25 bp, Probe Sequence
ggacttcagctgagtatagttcaac

SEQ ID NO: 268812 - DNA, 25 bp, Probe Sequence
ggacccagcctgagatggtcccatc

SEQ ID NO: 268813 - DNA, 25 bp, Probe Sequence
ggacccagtgtgcgatggctgcaca

SEQ ID NO: 268814 - DNA, 25 bp, Probe Sequence
ggagccagggaccaatggccagcat

SEQ ID NO: 268815 - DNA, 25 bp, Probe Sequence
ggagccagaggctgcagtgaaccat

SEQ ID NO: 268816 - DNA, 25 bp, Probe Sequence
ggagctgatgggtgcattaactgca

SEQ ID NO: 268817 - DNA, 25 bp, Probe Sequence
ggacttcatggctgaaacaccaaag

SEQ ID NO: 268818 - DNA, 25 bp, Probe Sequence
ggaccaaggacagaaccgagaagag

SEQ ID NO: 268819 - DNA, 25 bp, Probe Sequence
ggaccacagaacagaaacaagagaa

SEQ ID NO: 268820 - DNA, 25 bp, Probe Sequence
ggagcctcatcttacgagaaaaaga

SEQ ID NO: 268821 - DNA, 25 bp, Probe Sequence
ggagcctctatattccagataaata

SEQ ID NO: 268822 - DNA, 25 bp, Probe Sequence
ggagcctacatgtttcctgatacaa

SEQ ID NO: 268823 - DNA, 25 bp, Probe Sequence
ggacctgacagcattccaataaagc

SEQ ID NO: 268824 - DNA, 25 bp, Probe Sequence
ggagcctaagagttaccctaagaca

SEQ ID NO: 268825 - DNA, 25 bp, Probe Sequence
ggacgcataatcattaccttaaagc

SEQ ID NO: 268826 - DNA, 25 bp, Probe Sequence
tggacacgaacaaaaccttacccag

SEQ ID NO: 268827 - DNA, 25 bp, Probe Sequence
ggacgcttaagaaaccgagaccact

SEQ ID NO: 268828 - DNA, 25 bp, Probe Sequence
ggacctcataaggaaatctacccct

SEQ ID NO: 268829 - DNA, 25 bp, Probe Sequence
ggacctcataaggaaatctacccct

SEQ ID NO: 268830 - DNA, 25 bp, Probe Sequence
ggagcccaaggaggaatctcccacc

SEQ ID NO: 268831 - DNA, 25 bp, Probe Sequence
ggagcccaaggaggaatctcccacc

SEQ ID NO: 268832 - DNA, 25 bp, Probe Sequence
ggactgctcagaggggcgattccct

SEQ ID NO: 268833 - DNA, 25 bp, Probe Sequence
ggagcgtgaagggggcattcagcac

SEQ ID NO: 268834 - DNA, 25 bp, Probe Sequence
ggacgtgccagaccaggaacagagc

SEQ ID NO: 268835 - DNA, 25 bp, Probe Sequence
ggagcggtcagagcaggatggccag

SEQ ID NO: 268836 - DNA, 25 bp, Probe Sequence
ggagctggtgcaaggagaagcgtca

SEQ ID NO: 268837 - DNA, 25 bp, Probe Sequence
ggagctgaggttgacatcacaggca

SEQ ID NO: 268838 - DNA, 25 bp, Probe Sequence
ggagctgactttgacatcacaggga

SEQ ID NO: 268839 - DNA, 25 bp, Probe Sequence
ggaccactcgctggaacacagatgc

SEQ ID NO: 268840 - DNA, 25 bp, Probe Sequence
ggaccctacagctgccaagatgctg

SEQ ID NO: 268841 - DNA, 25 bp, Probe Sequence
ggacctgtgaagtcagttaagctct

SEQ ID NO: 268842 - DNA, 25 bp, Probe Sequence
ggaccattgcttgcatgttaacttt

SEQ ID NO: 268843 - DNA, 25 bp, Probe Sequence
ggaccattgcttgcatgttaacttt

SEQ ID NO: 268844 - DNA, 25 bp, Probe Sequence
ggacagttgatcagctttacctatg

SEQ ID NO: 268845 - DNA, 25 bp, Probe Sequence
ggacattccactggtttctgtctat

SEQ ID NO: 268846 - DNA, 25 bp, Probe Sequence
ggactgctagttggtatgcttttgt

SEQ ID NO: 268847 - DNA, 25 bp, Probe Sequence
ggagctgaagttaactgattatcgt

SEQ ID NO: 268848 - DNA, 25 bp, Probe Sequence
ggagctgaatggcataggatttcta

SEQ ID NO: 268849 - DNA, 25 bp, Probe Sequence
ggacggaggcgttgcgattattgac

SEQ ID NO: 268850 - DNA, 25 bp, Probe Sequence
ggactggtgaggattatcatttgaa

SEQ ID NO: 268851 - DNA, 25 bp, Probe Sequence
ggactggttggttttgccattttgt

SEQ ID NO: 268852 - DNA, 25 bp, Probe Sequence
ggactaggggcagtgttaattttga

SEQ ID NO: 268853 - DNA, 25 bp, Probe Sequence
ggcactaggggagccgaattctaca

SEQ ID NO: 268854 - DNA, 25 bp, Probe Sequence
ggactagggtaatctgacttctcac

SEQ ID NO: 268855 - DNA, 25 bp, Probe Sequence
ggacttgggccaataaggattccac

SEQ ID NO: 268856 - DNA, 25 bp, Probe Sequence
ggaattggttcacttaactcccagc

SEQ ID NO: 268857 - DNA, 25 bp, Probe Sequence
ggaatggaaaccatagagcccacgg

SEQ ID NO: 268858 - DNA, 25 bp, Probe Sequence
ggactggagagagaaaggctacgtg

SEQ ID NO: 268859 - DNA, 25 bp, Probe Sequence
ggactggagagagaaaggctacgtg

SEQ ID NO: 268860 - DNA, 25 bp, Probe Sequence
ggaccaagagaggcccaggctactg

SEQ ID NO: 268861 - DNA, 25 bp, Probe Sequence
ggacttcgagatcgcagccaagtac

SEQ ID NO: 268862 - DNA, 25 bp, Probe Sequence
ggactcggatttcacaagcatgacc

SEQ ID NO: 268863 - DNA, 25 bp, Probe Sequence
ggactggattggccaaacatcagac

SEQ ID NO: 268864 - DNA, 25 bp, Probe Sequence
ggactctttggccatgaaaaactcc

SEQ ID NO: 268865 - DNA, 25 bp, Probe Sequence
ggaccttgttgctaaacaatatccc

SEQ ID NO: 268866 - DNA, 25 bp, Probe Sequence
ggagccttgatcgtacctaattcca

SEQ ID NO: 268867 - DNA, 25 bp, Probe Sequence
ggaccattcatggaagctgctaaat

SEQ ID NO: 268868 - DNA, 25 bp, Probe Sequence
ggaccaatagcaaacttatcagtac

SEQ ID NO: 268869 - DNA, 25 bp, Probe Sequence
ggaaagtagcaccacttgacggcta

SEQ ID NO: 268870 - DNA, 25 bp, Probe Sequence
ggactacaggtaagtctcatagtat

SEQ ID NO: 268871 - DNA, 25 bp, Probe Sequence
ggacccgtatgtttccagttttgat

SEQ ID NO: 268872 - DNA, 25 bp, Probe Sequence
ggactacttattttgctggttctct

SEQ ID NO: 268873 - DNA, 25 bp, Probe Sequence
ggactttcctacttgcagtacatct

SEQ ID NO: 268874 - DNA, 25 bp, Probe Sequence
ggacgtactttgtctgactacaata

SEQ ID NO: 268875 - DNA, 25 bp, Probe Sequence
ggacgaacctgatctcttatactag

SEQ ID NO: 268876 - DNA, 25 bp, Probe Sequence
ggaccaaagcgatctcttctgagga

SEQ ID NO: 268877 - DNA, 25 bp, Probe Sequence
ggaccataattaacatcacttagtg

SEQ ID NO: 268878 - DNA, 25 bp, Probe Sequence
ggaccatacaccgtgatccttattg

SEQ ID NO: 268879 - DNA, 25 bp, Probe Sequence
ggaaaaatcctcaacctggtttctg

SEQ ID NO: 268880 - DNA, 25 bp, Probe Sequence
ggaccaactcaagaccttgttttgc

SEQ ID NO: 268881 - DNA, 25 bp, Probe Sequence
tgggcaaactaagccgattttccgg

SEQ ID NO: 268882 - DNA, 25 bp, Probe Sequence
tgggcaaactactccctacttaagg

SEQ ID NO: 268883 - DNA, 25 bp, Probe Sequence
ggaaaaaactacagatacttgcaac

SEQ ID NO: 268884 - DNA, 25 bp, Probe Sequence
ggaaaaaacattgaagacgtcattg

SEQ ID NO: 268885 - DNA, 25 bp, Probe Sequence
ggacccctgaatccaaaaccaattg

SEQ ID NO: 268886 - DNA, 25 bp, Probe Sequence
ggacacccagacagaaaacacgaat

SEQ ID NO: 268887 - DNA, 25 bp, Probe Sequence
ggaccccagagaggaaaaagtgact

SEQ ID NO: 268888 - DNA, 25 bp, Probe Sequence
ggactaaagagctgaaaccaaccta

SEQ ID NO: 268889 - DNA, 25 bp, Probe Sequence
ggactctgaagggtatggacctacg

SEQ ID NO: 268890 - DNA, 25 bp, Probe Sequence
ggacgaggaggacatgggacttgcg

SEQ ID NO: 268891 - DNA, 25 bp, Probe Sequence
ggacagagtgtgggcttaggtttgg

SEQ ID NO: 268892 - DNA, 25 bp, Probe Sequence
ggaccaggtcaagggacgttctgtg

SEQ ID NO: 268893 - DNA, 25 bp, Probe Sequence
ggagccaagatatgtggactctctc

SEQ ID NO: 268894 - DNA, 25 bp, Probe Sequence
ggagccaaaatcatactgctgctgt

SEQ ID NO: 268895 - DNA, 25 bp, Probe Sequence
ggagcgcaaagaagctacagcctgg

SEQ ID NO: 268896 - DNA, 25 bp, Probe Sequence
ggacgaaagacacagtgcactcaga

SEQ ID NO: 268897 - DNA, 25 bp, Probe Sequence
ggaccaaggatgacgatgtgcctct

SEQ ID NO: 268898 - DNA, 25 bp, Probe Sequence
ggaccaagtgagggtgtactctgat

SEQ ID NO: 268899 - DNA, 25 bp, Probe Sequence
ggacctaatagctgttccttaggcc

SEQ ID NO: 268900 - DNA, 25 bp, Probe Sequence
ggacctatcaacagtgttgccttcc

SEQ ID NO: 268901 - DNA, 25 bp, Probe Sequence
ggacctgaacacaggtgagccaatg

SEQ ID NO: 268902 - DNA, 25 bp, Probe Sequence
ggactcatgaccacagtccatgcca

SEQ ID NO: 268903 - DNA, 25 bp, Probe Sequence
ggactcatgaccacagtccatgcca

SEQ ID NO: 268904 - DNA, 25 bp, Probe Sequence
ggactcatgaccacagtccatgcca

SEQ ID NO: 268905 - DNA, 25 bp, Probe Sequence
ggaccatttgcactgagtccagcca

SEQ ID NO: 268906 - DNA, 25 bp, Probe Sequence
ggagccatttgcaaggatgcaacgg

SEQ ID NO: 268907 - DNA, 25 bp, Probe Sequence
ggagcgctttcagggctaaggtgaa

SEQ ID NO: 268908 - DNA, 25 bp, Probe Sequence
ggacgtttctgcatttggactgaaa

SEQ ID NO: 268909 - DNA, 25 bp, Probe Sequence
ggagcctttctggatttggatgtgg

SEQ ID NO: 268910 - DNA, 25 bp, Probe Sequence
ggagcgctttgggtccaggaatggc

SEQ ID NO: 268911 - DNA, 25 bp, Probe Sequence
ggactgctctggaattccgagtgtg

SEQ ID NO: 268912 - DNA, 25 bp, Probe Sequence
ggagcgcatcagtgttctctgaggt

SEQ ID NO: 268913 - DNA, 25 bp, Probe Sequence
ggacgacgtggcatctgaggtgtac

SEQ ID NO: 268914 - DNA, 25 bp, Probe Sequence
ggacctgctattctctgaggggacc

SEQ ID NO: 268915 - DNA, 25 bp, Probe Sequence
ggacctgtcttggactgtgggagac

SEQ ID NO: 268916 - DNA, 25 bp, Probe Sequence
ggacctgtcttggactgtgggagac

SEQ ID NO: 268917 - DNA, 25 bp, Probe Sequence
ggacgatagcttggagggatggaga

SEQ ID NO: 268918 - DNA, 25 bp, Probe Sequence
ggagcgtgggaggcgggagtggagt

SEQ ID NO: 268919 - DNA, 25 bp, Probe Sequence
ggagcgtgggaggcgggagtggagt

SEQ ID NO: 268920 - DNA, 25 bp, Probe Sequence
ggacgttcaacatggtgaggggcta

SEQ ID NO: 268921 - DNA, 25 bp, Probe Sequence
ggacggtcatgaaggagcgggggtg

SEQ ID NO: 268922 - DNA, 25 bp, Probe Sequence
ggacagtgttaagggctgctcgggg

SEQ ID NO: 268923 - DNA, 25 bp, Probe Sequence
ggacgttctagcaggtcatcggtgc

SEQ ID NO: 268924 - DNA, 25 bp, Probe Sequence
ggacgttctgtgggcagtagccctg

SEQ ID NO: 268925 - DNA, 25 bp, Probe Sequence
ggactggtggtggagtctcacctgg

SEQ ID NO: 268926 - DNA, 25 bp, Probe Sequence
ggacatggtattgtgtctacaccca

SEQ ID NO: 268927 - DNA, 25 bp, Probe Sequence
ggactgaggttctatgccttcaacc

SEQ ID NO: 268928 - DNA, 25 bp, Probe Sequence
ggaccagaggtattgcatttaaaat

SEQ ID NO: 268929 - DNA, 25 bp, Probe Sequence
ggacgcaaagctgtcatcgtgaaga

SEQ ID NO: 268930 - DNA, 25 bp, Probe Sequence
ggagcgagacgtgatcacgagggag

SEQ ID NO: 268931 - DNA, 25 bp, Probe Sequence
ggagcgggcgatggatgactacagt

SEQ ID NO: 268932 - DNA, 25 bp, Probe Sequence
ggacgacttgatcgtgactagagat

SEQ ID NO: 268933 - DNA, 25 bp, Probe Sequence
ggaccaaatgtgccatactaatgat

SEQ ID NO: 268934 - DNA, 25 bp, Probe Sequence
ggagcccactgtgtactcagatgag

SEQ ID NO: 268935 - DNA, 25 bp, Probe Sequence
ggagcccagtgtcaagtctgctgga

SEQ ID NO: 268936 - DNA, 25 bp, Probe Sequence
ggaccgcatgttggagattttggaa

SEQ ID NO: 268937 - DNA, 25 bp, Probe Sequence
ggactggagctttttctttgtgaat

SEQ ID NO: 268938 - DNA, 25 bp, Probe Sequence
ggactgaagaattatttttgcatgt

SEQ ID NO: 268939 - DNA, 25 bp, Probe Sequence
ggactgtaaatgttttatttgtaag

SEQ ID NO: 268940 - DNA, 25 bp, Probe Sequence
ggacctgtttgaattttttctgtag

SEQ ID NO: 268941 - DNA, 25 bp, Probe Sequence
ggaccagttgtgttcaatttactct

SEQ ID NO: 268942 - DNA, 25 bp, Probe Sequence
ggaccagaatgttttgttgttcttt

SEQ ID NO: 268943 - DNA, 25 bp, Probe Sequence
ggagccaaatttaagcctgtttcct

SEQ ID NO: 268944 - DNA, 25 bp, Probe Sequence
ggagcctaatgttaaccctgcttca

SEQ ID NO: 268945 - DNA, 25 bp, Probe Sequence
ggaccacaggtaaagctcctgttgg

SEQ ID NO: 268946 - DNA, 25 bp, Probe Sequence
ggaccacagcgataatcttcttaga

SEQ ID NO: 268947 - DNA, 25 bp, Probe Sequence
ggactgctcggatgatctttcttag

SEQ ID NO: 268948 - DNA, 25 bp, Probe Sequence
ggactgctcaaatgatcctatttgt

SEQ ID NO: 268949 - DNA, 25 bp, Probe Sequence
ggacctcaagatcaaatgacctgtg

SEQ ID NO: 268950 - DNA, 25 bp, Probe Sequence
tgcgacccacgtctacatgtacgtg

SEQ ID NO: 268951 - DNA, 25 bp, Probe Sequence
ggacccagttcctcatgtaagggag

SEQ ID NO: 268952 - DNA, 25 bp, Probe Sequence
ggactccgtttactaccacagggag

SEQ ID NO: 268953 - DNA, 25 bp, Probe Sequence
ggacttcttcctatacaagggaggc

SEQ ID NO: 268954 - DNA, 25 bp, Probe Sequence
ggacttgctagcccaaagaaggagg

SEQ ID NO: 268955 - DNA, 25 bp, Probe Sequence
ggacctctaccaaaacatatgatac

SEQ ID NO: 268956 - DNA, 25 bp, Probe Sequence
ggacctctaccaaaacatatgatac

SEQ ID NO: 268957 - DNA, 25 bp, Probe Sequence
ggacctctaccaaaacatatgatac

SEQ ID NO: 268958 - DNA, 25 bp, Probe Sequence
ggacctcaaaataagccatgctgct

SEQ ID NO: 268959 - DNA, 25 bp, Probe Sequence
ggacctgctgacttgaatgccagcc

SEQ ID NO: 268960 - DNA, 25 bp, Probe Sequence
ggagccatgtgtgagatacctgccc

SEQ ID NO: 268961 - DNA, 25 bp, Probe Sequence
ggagccactgctcggaaatatgccc

SEQ ID NO: 268962 - DNA, 25 bp, Probe Sequence
ggagccatgacaagaacaaagccac

SEQ ID NO: 268963 - DNA, 25 bp, Probe Sequence
ggacctgctcattgatgacaaggac

SEQ ID NO: 268964 - DNA, 25 bp, Probe Sequence
ggacagcaccttggtgccagtgatc

SEQ ID NO: 268965 - DNA, 25 bp, Probe Sequence
ggaccccttccagcagagctggagg

SEQ ID NO: 268966 - DNA, 25 bp, Probe Sequence
ggagcccgttcggtctgaggaaggc

SEQ ID NO: 268967 - DNA, 25 bp, Probe Sequence
ggaccaccttcatgttagttgggta

SEQ ID NO: 268968 - DNA, 25 bp, Probe Sequence
ggacgaccagtcaggacgtgtgggc

SEQ ID NO: 268969 - DNA, 25 bp, Probe Sequence
ggaccagccaacacagacagtggtg

SEQ ID NO: 268970 - DNA, 25 bp, Probe Sequence
ggactacgagtcatacacatggcgg

SEQ ID NO: 268971 - DNA, 25 bp, Probe Sequence
ggacagggagtctgatccatcccat

SEQ ID NO: 268972 - DNA, 25 bp, Probe Sequence
ggacagggagacagcaaccatcgcc

SEQ ID NO: 268973 - DNA, 25 bp, Probe Sequence
ggacaggcaaagagaagcttcctca

SEQ ID NO: 268974 - DNA, 25 bp, Probe Sequence
ggacgtcgacagaagcaaaacctag

SEQ ID NO: 268975 - DNA, 25 bp, Probe Sequence
ggacctcttaattactagacctcag

SEQ ID NO: 268976 - DNA, 25 bp, Probe Sequence
ggacctgcgtgaatacactcaagcc

SEQ ID NO: 268977 - DNA, 25 bp, Probe Sequence
ggacctgcgtgaatacactcaagcc

SEQ ID NO: 268978 - DNA, 25 bp, Probe Sequence
ggaccatgagaacatcgtcatcgcc

SEQ ID NO: 268979 - DNA, 25 bp, Probe Sequence
ggaccatgagaacatcgtcatcgcc

SEQ ID NO: 268980 - DNA, 25 bp, Probe Sequence
ggaccaaattcagcgtcatacatgt

SEQ ID NO: 268981 - DNA, 25 bp, Probe Sequence
ggagccaaaaacctgtatatcatct

SEQ ID NO: 268982 - DNA, 25 bp, Probe Sequence
ggaccaatccaaggcgaatgacctc

SEQ ID NO: 268983 - DNA, 25 bp, Probe Sequence
ggaccacttcattacagtggacgct

SEQ ID NO: 268984 - DNA, 25 bp, Probe Sequence
ggacacaggccaaactggagactcg

SEQ ID NO: 268985 - DNA, 25 bp, Probe Sequence
ggacactgcctaaaagggtctcaag

SEQ ID NO: 268986 - DNA, 25 bp, Probe Sequence
ggacactgcctaaaagggtctcaag

SEQ ID NO: 268987 - DNA, 25 bp, Probe Sequence
ggacatgcttccaaaaggggctgct

SEQ ID NO: 268988 - DNA, 25 bp, Probe Sequence
ggaagcatacccagggtggccttta

SEQ ID NO: 268989 - DNA, 25 bp, Probe Sequence
tggaaaaaaatgtgcagtggcctct

SEQ ID NO: 268990 - DNA, 25 bp, Probe Sequence
ggaccaaaaccaggctggtgcccga

SEQ ID NO: 268991 - DNA, 25 bp, Probe Sequence
ggaccaatttccaagctggctgacc

SEQ ID NO: 268992 - DNA, 25 bp, Probe Sequence
ggaccaattacctgctgatgagtgc

SEQ ID NO: 268993 - DNA, 25 bp, Probe Sequence
ggactcaagatagcccgagagagcc

SEQ ID NO: 268994 - DNA, 25 bp, Probe Sequence
ggactataagcactgctccaggtgg

SEQ ID NO: 268995 - DNA, 25 bp, Probe Sequence
ggactggagcagatgtccattgggc

SEQ ID NO: 268996 - DNA, 25 bp, Probe Sequence
ggactgtgagacttaccatacggcc

SEQ ID NO: 268997 - DNA, 25 bp, Probe Sequence
ggacgatgtgagcaaccagacctcc

SEQ ID NO: 268998 - DNA, 25 bp, Probe Sequence
ggacatcaatgaccagatccagaac

SEQ ID NO: 268999 - DNA, 25 bp, Probe Sequence
ggactctcatacaactctgcatgaa

SEQ ID NO: 269000 - DNA, 25 bp, Probe Sequence
ggactaatatcaatatccagaaact

SEQ ID NO: 269001 - DNA, 25 bp, Probe Sequence
ggacgaatgcatccttcgaacaagc

SEQ ID NO: 269002 - DNA, 25 bp, Probe Sequence
ggaccattgtgcgtttcaacaggcc

SEQ ID NO: 269003 - DNA, 25 bp, Probe Sequence
ggcactgctttcatttaattgggct

SEQ ID NO: 269004 - DNA, 25 bp, Probe Sequence
ggcactgctttcatttaattgggct

SEQ ID NO: 269005 - DNA, 25 bp, Probe Sequence
ggactgtttatgacctactggctcc

SEQ ID NO: 269006 - DNA, 25 bp, Probe Sequence
ggactgttgctatccaagcgtttgg

SEQ ID NO: 269007 - DNA, 25 bp, Probe Sequence
ggactttccagtaatagctttcttg

SEQ ID NO: 269008 - DNA, 25 bp, Probe Sequence
ggactttgtcagtacaagctctgcc

SEQ ID NO: 269009 - DNA, 25 bp, Probe Sequence
ggactcctccatcatcagagtctga

SEQ ID NO: 269010 - DNA, 25 bp, Probe Sequence
ggaccactcctgaatgagacttaat

SEQ ID NO: 269011 - DNA, 25 bp, Probe Sequence
ggaccctccaattagaagtacacac

SEQ ID NO: 269012 - DNA, 25 bp, Probe Sequence
ggaccccaagaaggacgtcctcatc

SEQ ID NO: 269013 - DNA, 25 bp, Probe Sequence
ggaccccaagaaggacgtcctcatc

SEQ ID NO: 269014 - DNA, 25 bp, Probe Sequence
ggaccccaagaatactggccatatt

SEQ ID NO: 269015 - DNA, 25 bp, Probe Sequence
ggaccatcccaaaagacaagccatg

SEQ ID NO: 269016 - DNA, 25 bp, Probe Sequence
ggaccatggcacttaaaaactctat

SEQ ID NO: 269017 - DNA, 25 bp, Probe Sequence
ggacctggagacgaaagagactgtc

SEQ ID NO: 269018 - DNA, 25 bp, Probe Sequence
ggaccgaggacgagagggctgtttc

SEQ ID NO: 269019 - DNA, 25 bp, Probe Sequence
ggaccagaagatctcaatcgggctt

SEQ ID NO: 269020 - DNA, 25 bp, Probe Sequence
ggaccagaagatcgtcctggagctg

SEQ ID NO: 269021 - DNA, 25 bp, Probe Sequence
ggaccagaagtctctctgggcaggt

SEQ ID NO: 269022 - DNA, 25 bp, Probe Sequence
ggaccagacttcaacggggagtgtg

SEQ ID NO: 269023 - DNA, 25 bp, Probe Sequence
ggactcagggtgaagcgtgggaggg

SEQ ID NO: 269024 - DNA, 25 bp, Probe Sequence
ggaccagtggaggtgccagggaggc

SEQ ID NO: 269025 - DNA, 25 bp, Probe Sequence
ggaccctggatggatgtagggcagg

SEQ ID NO: 269026 - DNA, 25 bp, Probe Sequence
ggacctttgatggaacagatgggag

SEQ ID NO: 269027 - DNA, 25 bp, Probe Sequence
ggactctttgtggaacatgggcctt

SEQ ID NO: 269028 - DNA, 25 bp, Probe Sequence
ggacttttgggaagagattccttca

SEQ ID NO: 269029 - DNA, 25 bp, Probe Sequence
ggacttttgatagaaattcagctac

SEQ ID NO: 269030 - DNA, 25 bp, Probe Sequence
ggactctttattagaacaatcaatc

SEQ ID NO: 269031 - DNA, 25 bp, Probe Sequence
ggaccttatttggcatataaaattt

SEQ ID NO: 269032 - DNA, 25 bp, Probe Sequence
ggacctgtattatcctgaatacact

SEQ ID NO: 269033 - DNA, 25 bp, Probe Sequence
ggaccttaagaagctgattgcagcc

SEQ ID NO: 269034 - DNA, 25 bp, Probe Sequence
ggaccttacagaggcggctatggcg

SEQ ID NO: 269035 - DNA, 25 bp, Probe Sequence
ggacctggaccagtgtagagatggc

SEQ ID NO: 269036 - DNA, 25 bp, Probe Sequence
ggaccatgtgaccatgttaacattc

SEQ ID NO: 269037 - DNA, 25 bp, Probe Sequence
ggacctgcgggcttagatcaatctc

SEQ ID NO: 269038 - DNA, 25 bp, Probe Sequence
ggaccgcgggtatgacaaggcagac

SEQ ID NO: 269039 - DNA, 25 bp, Probe Sequence
ggacttcgggaacaaggagctgctc

SEQ ID NO: 269040 - DNA, 25 bp, Probe Sequence
ggacttcgggaacaaggagctgctc

SEQ ID NO: 269041 - DNA, 25 bp, Probe Sequence
ggacttgggcagagcaaggtgatct

SEQ ID NO: 269042 - DNA, 25 bp, Probe Sequence
ggacttgtcctcagcagctggtaat

SEQ ID NO: 269043 - DNA, 25 bp, Probe Sequence
ggacttgtcctccaatgtcaataac

SEQ ID NO: 269044 - DNA, 25 bp, Probe Sequence
ggacttttcccattgacgtacaatg

SEQ ID NO: 269045 - DNA, 25 bp, Probe Sequence
ggacattgtgtagcctatggtaagt

SEQ ID NO: 269046 - DNA, 25 bp, Probe Sequence
ggacacttgtttcattggaaggtta

SEQ ID NO: 269047 - DNA, 25 bp, Probe Sequence
ggaccttgcttaaatttgatactct

SEQ ID NO: 269048 - DNA, 25 bp, Probe Sequence
ggacccttgtaaattgtcatacgcc

SEQ ID NO: 269049 - DNA, 25 bp, Probe Sequence
ggacctccatgttatttccaatgac

SEQ ID NO: 269050 - DNA, 25 bp, Probe Sequence
ggactctaattgtctttccttgaca

SEQ ID NO: 269051 - DNA, 25 bp, Probe Sequence
ggacattagtgtattattcgtacag

SEQ ID NO: 269052 - DNA, 25 bp, Probe Sequence
ggacttgaattcagtgcttgggaag

SEQ ID NO: 269053 - DNA, 25 bp, Probe Sequence
ggacggcttctctgtgttgatgagg

SEQ ID NO: 269054 - DNA, 25 bp, Probe Sequence
ggaccagtctcctactgttatgttc

SEQ ID NO: 269055 - DNA, 25 bp, Probe Sequence
ggacagaccacgcacgtgatttgtc

SEQ ID NO: 269056 - DNA, 25 bp, Probe Sequence
ggacagtcctgatgacatgtttcgt

SEQ ID NO: 269057 - DNA, 25 bp, Probe Sequence
ggacaatcagtgtagtgtttacaat

SEQ ID NO: 269058 - DNA, 25 bp, Probe Sequence
ggacctcagtcggcttaatcagagt

SEQ ID NO: 269059 - DNA, 25 bp, Probe Sequence
ggacctcagtcggcttaatcagagt

SEQ ID NO: 269060 - DNA, 25 bp, Probe Sequence
ggaccacagtcagcgtgaagcagtt

SEQ ID NO: 269061 - DNA, 25 bp, Probe Sequence
ggaccaagatatgttgtgggttgtc

SEQ ID NO: 269062 - DNA, 25 bp, Probe Sequence
ggaccagagattttcctaggattct

SEQ ID NO: 269063 - DNA, 25 bp, Probe Sequence
ggaccggattttctggagacggcag

SEQ ID NO: 269064 - DNA, 25 bp, Probe Sequence
ggaccggaaacccttgaacagagag

SEQ ID NO: 269065 - DNA, 25 bp, Probe Sequence
ggaccggataacaatttcacacagg

SEQ ID NO: 269066 - DNA, 25 bp, Probe Sequence
ggacggataaacaatttcacaccag

SEQ ID NO: 269067 - DNA, 25 bp, Probe Sequence
ggacggataacaatttcacacagga

SEQ ID NO: 269068 - DNA, 25 bp, Probe Sequence
ggacgtgactacttatgtgtactgg

SEQ ID NO: 269069 - DNA, 25 bp, Probe Sequence
ggactgtcctacttgcagtacatct

SEQ ID NO: 269070 - DNA, 25 bp, Probe Sequence
ggactgtcctcactgtcagtggagc

SEQ ID NO: 269071 - DNA, 25 bp, Probe Sequence
ggacctccatgacgtcaagggtgga

SEQ ID NO: 269072 - DNA, 25 bp, Probe Sequence
ggacttccatacgtcaatgggtgga

SEQ ID NO: 269073 - DNA, 25 bp, Probe Sequence
ggacttacagttccaattggctgga

SEQ ID NO: 269074 - DNA, 25 bp, Probe Sequence
ggaattcattttccacgttctagca

SEQ ID NO: 269075 - DNA, 25 bp, Probe Sequence
ggaacttttccagatgtatcgaatt

SEQ ID NO: 269076 - DNA, 25 bp, Probe Sequence
ggcaagtttccctaagtttgagttg

SEQ ID NO: 269077 - DNA, 25 bp, Probe Sequence
ggacatgtttacggaaatcaaagtt

SEQ ID NO: 269078 - DNA, 25 bp, Probe Sequence
ggaagccttccctcaaaaagatgcc

SEQ ID NO: 269079 - DNA, 25 bp, Probe Sequence
ggaagccttccctcaaaaagatgcc

SEQ ID NO: 269080 - DNA, 25 bp, Probe Sequence
ggacccttcccactacataataggg

SEQ ID NO: 269081 - DNA, 25 bp, Probe Sequence
ggaccctggacccagaggcagatac

SEQ ID NO: 269082 - DNA, 25 bp, Probe Sequence
ggaccgacaacaggagaggaatagc

SEQ ID NO: 269083 - DNA, 25 bp, Probe Sequence
ggacgctgcatatagagaaggccta

SEQ ID NO: 269084 - DNA, 25 bp, Probe Sequence
ggacctgctgacaaaggagcgcctc

SEQ ID NO: 269085 - DNA, 25 bp, Probe Sequence
ggaccatgtggtaaggaactcagcc

SEQ ID NO: 269086 - DNA, 25 bp, Probe Sequence
ggaccagtggtttccagtcatgagc

SEQ ID NO: 269087 - DNA, 25 bp, Probe Sequence
ggaccagatctgctatctcagaaag

SEQ ID NO: 269088 - DNA, 25 bp, Probe Sequence
ggacccactctttcattgaaaggtg

SEQ ID NO: 269089 - DNA, 25 bp, Probe Sequence
ggactccctcaataatgaggaggag

SEQ ID NO: 269090 - DNA, 25 bp, Probe Sequence
tggagcctgcctcttgaagaggggg

SEQ ID NO: 269091 - DNA, 25 bp, Probe Sequence
ggactcatccatttgtgaggaggac

SEQ ID NO: 269092 - DNA, 25 bp, Probe Sequence
ggactaccatgccatgtggagaata

SEQ ID NO: 269093 - DNA, 25 bp, Probe Sequence
ggactggccatgaagtgaggagatg

SEQ ID NO: 269094 - DNA, 25 bp, Probe Sequence
ggactgggctggatgagagagcaca

SEQ ID NO: 269095 - DNA, 25 bp, Probe Sequence
ggactggagctaatgggaacactgg

SEQ ID NO: 269096 - DNA, 25 bp, Probe Sequence
ggactgggttctcaagacacgacca

SEQ ID NO: 269097 - DNA, 25 bp, Probe Sequence
ggactgttgttcaataaaccagagc

SEQ ID NO: 269098 - DNA, 25 bp, Probe Sequence
ggacgtctttgttcagaagggatca

SEQ ID NO: 269099 - DNA, 25 bp, Probe Sequence
ggaccgtgtctcaaagaagtggcat

SEQ ID NO: 269100 - DNA, 25 bp, Probe Sequence
ggaccagttccactgagaagtgaac

SEQ ID NO: 269101 - DNA, 25 bp, Probe Sequence
ggaccatggtcaggtagcatcagta

SEQ ID NO: 269102 - DNA, 25 bp, Probe Sequence
ggacctttcacactgagcatagaga

SEQ ID NO: 269103 - DNA, 25 bp, Probe Sequence
ggactttagcatgcagagcagcaaa

SEQ ID NO: 269104 - DNA, 25 bp, Probe Sequence
ggactttctctgtcatatgcacaag

SEQ ID NO: 269105 - DNA, 25 bp, Probe Sequence
ggactttgcagcacattaatatgtc

SEQ ID NO: 269106 - DNA, 25 bp, Probe Sequence
ggactctcacagatatgataaatgg

SEQ ID NO: 269107 - DNA, 25 bp, Probe Sequence
ggactcatcatatggctgctacaat

SEQ ID NO: 269108 - DNA, 25 bp, Probe Sequence
ggactctgcattaactctataatgt

SEQ ID NO: 269109 - DNA, 25 bp, Probe Sequence
tggtccgtcataacccaaggtacca

SEQ ID NO: 269110 - DNA, 25 bp, Probe Sequence
ggaccaggcataatgcccagattgt

SEQ ID NO: 269111 - DNA, 25 bp, Probe Sequence
ggacgcagcaatctgaaatcatctc

SEQ ID NO: 269112 - DNA, 25 bp, Probe Sequence
ggacgacagatcgagacaccatctc

SEQ ID NO: 269113 - DNA, 25 bp, Probe Sequence
ggactgcacagttcatggaggctgc

SEQ ID NO: 269114 - DNA, 25 bp, Probe Sequence
ggacatggagtgcatggatggcgcc

SEQ ID NO: 269115 - DNA, 25 bp, Probe Sequence
ggactggcagatgtggtttgcagcc

SEQ ID NO: 269116 - DNA, 25 bp, Probe Sequence
ggacctgggaaggtttgcagcactt

SEQ ID NO: 269117 - DNA, 25 bp, Probe Sequence
ggacctggcgaaggcagtggcaact

SEQ ID NO: 269118 - DNA, 25 bp, Probe Sequence
ggaccggatgaagcaggagatccta

SEQ ID NO: 269119 - DNA, 25 bp, Probe Sequence
ggaccaggagcatcactggtatctt

SEQ ID NO: 269120 - DNA, 25 bp, Probe Sequence
ggactgcatgggaagcacggaatat

SEQ ID NO: 269121 - DNA, 25 bp, Probe Sequence
ggacattgtcgcaagtcacagaatt

SEQ ID NO: 269122 - DNA, 25 bp, Probe Sequence
ggacactgactctgtacaggatggg

SEQ ID NO: 269123 - DNA, 25 bp, Probe Sequence
ggactcaactatatacagtatggcg

SEQ ID NO: 269124 - DNA, 25 bp, Probe Sequence
ggacataaattttgtcgcttgggac

SEQ ID NO: 269125 - DNA, 25 bp, Probe Sequence
ggacataatgcgagttaacgtggac

SEQ ID NO: 269126 - DNA, 25 bp, Probe Sequence
ggacagactgaatggtattcgacga

SEQ ID NO: 269127 - DNA, 25 bp, Probe Sequence
ggaccttaacatctgcattggacaa

SEQ ID NO: 269128 - DNA, 25 bp, Probe Sequence
ggaccttaatcatttgcattttgga

SEQ ID NO: 269129 - DNA, 25 bp, Probe Sequence
ggaccatggaacacagcatctttgg

SEQ ID NO: 269130 - DNA, 25 bp, Probe Sequence
tggaccggaagcaccaaatgctggt

SEQ ID NO: 269131 - DNA, 25 bp, Probe Sequence
tggaccggaagcaccaaatgctggt

SEQ ID NO: 269132 - DNA, 25 bp, Probe Sequence
ggaccaggaagacggattgctgctg

SEQ ID NO: 269133 - DNA, 25 bp, Probe Sequence
ggaccggaagcaccaaatgctggtg

SEQ ID NO: 269134 - DNA, 25 bp, Probe Sequence
ggacccagaacatgtagagctggtg

SEQ ID NO: 269135 - DNA, 25 bp, Probe Sequence
ggacccagaaaaccacactggctcc

SEQ ID NO: 269136 - DNA, 25 bp, Probe Sequence
ggaccgtgagggtccccatgatgtc

SEQ ID NO: 269137 - DNA, 25 bp, Probe Sequence
ggactcttggaggatacccagtgtc

SEQ ID NO: 269138 - DNA, 25 bp, Probe Sequence
ggaccttggagacaggcctttcagg

SEQ ID NO: 269139 - DNA, 25 bp, Probe Sequence
ggaccttgggcctgcggaaggcagg

SEQ ID NO: 269140 - DNA, 25 bp, Probe Sequence
ggaccctgggggccagtgaaggaag

SEQ ID NO: 269141 - DNA, 25 bp, Probe Sequence
ggaccatctgaatggagcagccaag

SEQ ID NO: 269142 - DNA, 25 bp, Probe Sequence
ggacttctgcaatgctgaccaagaa

SEQ ID NO: 269143 - DNA, 25 bp, Probe Sequence
ggactgaatctaatgcttccaaaaa

SEQ ID NO: 269144 - DNA, 25 bp, Probe Sequence
ggactgaatctaatgcttccaaaaa

SEQ ID NO: 269145 - DNA, 25 bp, Probe Sequence
ggactgaatctaatgcttccaaaaa

SEQ ID NO: 269146 - DNA, 25 bp, Probe Sequence
ggactgtcactgtggacgccaaaat

SEQ ID NO: 269147 - DNA, 25 bp, Probe Sequence
ggactccactgatgagaggcatata

SEQ ID NO: 269148 - DNA, 25 bp, Probe Sequence
ggactccacgagtgtggcaacagca

SEQ ID NO: 269149 - DNA, 25 bp, Probe Sequence
ggaaacacggctatgaccaaaggga

SEQ ID NO: 269150 - DNA, 25 bp, Probe Sequence
ggaaacctatctttaccaactacag

SEQ ID NO: 269151 - DNA, 25 bp, Probe Sequence
ggaaaccatgatgtttacatttcac

SEQ ID NO: 269152 - DNA, 25 bp, Probe Sequence
ggacagatgctattactttgccttt

SEQ ID NO: 269153 - DNA, 25 bp, Probe Sequence
ggacaggccagttattggctcatct

SEQ ID NO: 269154 - DNA, 25 bp, Probe Sequence
ggaaggccttttatttctcagtaca

SEQ ID NO: 269155 - DNA, 25 bp, Probe Sequence
ggacagaccattcctttttcacaaa

SEQ ID NO: 269156 - DNA, 25 bp, Probe Sequence
ggacagatctgtgcctactttatta

SEQ ID NO: 269157 - DNA, 25 bp, Probe Sequence
ggacagtggtctttcctgttgatca

SEQ ID NO: 269158 - DNA, 25 bp, Probe Sequence
ggacagctttaattcacttgttcag

SEQ ID NO: 269159 - DNA, 25 bp, Probe Sequence
ggaccttctcacttcaattgtttat

SEQ ID NO: 269160 - DNA, 25 bp, Probe Sequence
ggaccttgtctaaaatttctttgtg

SEQ ID NO: 269161 - DNA, 25 bp, Probe Sequence
ggaccttgagctaatagatctttta

SEQ ID NO: 269162 - DNA, 25 bp, Probe Sequence
ggacgagtagcttctgacatgtgtg

SEQ ID NO: 269163 - DNA, 25 bp, Probe Sequence
ggactgtgtactgcatgaatgaggc

SEQ ID NO: 269164 - DNA, 25 bp, Probe Sequence
ggactgtggactgagtgcatagcac

SEQ ID NO: 269165 - DNA, 25 bp, Probe Sequence
ggactgtggtcctgaaagcagcaag

SEQ ID NO: 269166 - DNA, 25 bp, Probe Sequence
ggactcggctatttaaagcaccagt

SEQ ID NO: 269167 - DNA, 25 bp, Probe Sequence
ggacctgatatttaacaagcactca

SEQ ID NO: 269168 - DNA, 25 bp, Probe Sequence
ggacttcaataattacggctgccaa

SEQ ID NO: 269169 - DNA, 25 bp, Probe Sequence
ggactccatgaatatcaaagcccat

SEQ ID NO: 269170 - DNA, 25 bp, Probe Sequence
ggaccctgagaactctcatgagccc

SEQ ID NO: 269171 - DNA, 25 bp, Probe Sequence
ggacgacatgaaccactgctactcc

SEQ ID NO: 269172 - DNA, 25 bp, Probe Sequence
ggacgacatcagtgtgctctgcact

SEQ ID NO: 269173 - DNA, 25 bp, Probe Sequence
ggaccgcattgatgtccagcagctg

SEQ ID NO: 269174 - DNA, 25 bp, Probe Sequence
ggactcacagctgactccaagctgc

SEQ ID NO: 269175 - DNA, 25 bp, Probe Sequence
ggactctgcactgaatggctgacct

SEQ ID NO: 269176 - DNA, 25 bp, Probe Sequence
ggactctgcactgaatggctgacct

SEQ ID NO: 269177 - DNA, 25 bp, Probe Sequence
ggacttgcatgtgatgtgcctgaat

SEQ ID NO: 269178 - DNA, 25 bp, Probe Sequence
ggactcagtgagttgatgtctgtat

SEQ ID NO: 269179 - DNA, 25 bp, Probe Sequence
ggacatcgtgcacatcagcatcttc

SEQ ID NO: 269180 - DNA, 25 bp, Probe Sequence
ggactcaggatcgcagatccggggc

SEQ ID NO: 269181 - DNA, 25 bp, Probe Sequence
ggacctggatctggcattggagggg

SEQ ID NO: 269182 - DNA, 25 bp, Probe Sequence
ggaccgctgcaagcagctggaggag

SEQ ID NO: 269183 - DNA, 25 bp, Probe Sequence
ggaccgctgcaagcagctggaggag

SEQ ID NO: 269184 - DNA, 25 bp, Probe Sequence
ggacccagacatggagctgcgggaa

SEQ ID NO: 269185 - DNA, 25 bp, Probe Sequence
ggacctagaatggtgtgccagagca

SEQ ID NO: 269186 - DNA, 25 bp, Probe Sequence
ggacagctgaggatgggcctagcag

SEQ ID NO: 269187 - DNA, 25 bp, Probe Sequence
ggactgtgatacagagccctagcct

SEQ ID NO: 269188 - DNA, 25 bp, Probe Sequence
ggactggaaggactgagcccagcca

SEQ ID NO: 269189 - DNA, 25 bp, Probe Sequence
ggactggaagagaaagctcactccc

SEQ ID NO: 269190 - DNA, 25 bp, Probe Sequence
ggacgagggagaggtgcccttgctc

SEQ ID NO: 269191 - DNA, 25 bp, Probe Sequence
ggacgagggctttggcgactggtcc

SEQ ID NO: 269192 - DNA, 25 bp, Probe Sequence
ggacgatgggcttgagggcctgttt

SEQ ID NO: 269193 - DNA, 25 bp, Probe Sequence
ggactagaggctttcggctttttgg

SEQ ID NO: 269194 - DNA, 25 bp, Probe Sequence
ggactgaactgtatctccttttgtt

SEQ ID NO: 269195 - DNA, 25 bp, Probe Sequence
ggactttcttatgtcctgtaagact

SEQ ID NO: 269196 - DNA, 25 bp, Probe Sequence
ggactagccttatttgcaagtgaag

SEQ ID NO: 269197 - DNA, 25 bp, Probe Sequence
ggactccaatcttttccaggaaagc

SEQ ID NO: 269198 - DNA, 25 bp, Probe Sequence
ggactaaatgctcttccttcagagg

SEQ ID NO: 269199 - DNA, 25 bp, Probe Sequence
ggactaaaactacctctgttgaggc

SEQ ID NO: 269200 - DNA, 25 bp, Probe Sequence
ggactaacaagcttcacttttatga

SEQ ID NO: 269201 - DNA, 25 bp, Probe Sequence
ggacttgccataactactttattga

SEQ ID NO: 269202 - DNA, 25 bp, Probe Sequence
ggacttccaagagtactgtgtcttc

SEQ ID NO: 269203 - DNA, 25 bp, Probe Sequence
ggaattcctaggccactggctggac

SEQ ID NO: 269204 - DNA, 25 bp, Probe Sequence
ggaagtcctaggatttgaggagcga

SEQ ID NO: 269205 - DNA, 25 bp, Probe Sequence
ggaattcccggtattatgagtccac

SEQ ID NO: 269206 - DNA, 25 bp, Probe Sequence
ggaaacccaggtcggtctgattcca

SEQ ID NO: 269207 - DNA, 25 bp, Probe Sequence
ggaccctagaggagagctttataca

SEQ ID NO: 269208 - DNA, 25 bp, Probe Sequence
ggaccgcttggctatggactttggt

SEQ ID NO: 269209 - DNA, 25 bp, Probe Sequence
ggaacgttacttcattcctgtgtcc

SEQ ID NO: 269210 - DNA, 25 bp, Probe Sequence
ggaattaaacagctttcctcactcc

SEQ ID NO: 269211 - DNA, 25 bp, Probe Sequence
ggactttaatagtattatccccatc

SEQ ID NO: 269212 - DNA, 25 bp, Probe Sequence
ggactgatggaaatacttatcccaa

SEQ ID NO: 269213 - DNA, 25 bp, Probe Sequence
ggacatatgcgagtgaacttgagcc

SEQ ID NO: 269214 - DNA, 25 bp, Probe Sequence
ggactaagtatgacacttgactcag

SEQ ID NO: 269215 - DNA, 25 bp, Probe Sequence
ggaaatagtatggattgtaaagtca

SEQ ID NO: 269216 - DNA, 25 bp, Probe Sequence
ggacaaaattcttagtaatgagtat

SEQ ID NO: 269217 - DNA, 25 bp, Probe Sequence
ggacagttcacaatctagtaatagc

SEQ ID NO: 269218 - DNA, 25 bp, Probe Sequence
ggacatgttcaagctcgaagagtgt

SEQ ID NO: 269219 - DNA, 25 bp, Probe Sequence
ggacacattagaactcacacggggg

SEQ ID NO: 269220 - DNA, 25 bp, Probe Sequence
ggacagttatttaaacgagtggccg

SEQ ID NO: 269221 - DNA, 25 bp, Probe Sequence
tctgaatgttatctccaaccaggag

SEQ ID NO: 269222 - DNA, 25 bp, Probe Sequence
ggactgttatagccacaaccagagg

SEQ ID NO: 269223 - DNA, 25 bp, Probe Sequence
ggactatatatactccaggccaata

SEQ ID NO: 269224 - DNA, 25 bp, Probe Sequence
ggactcagaagttcaagctaaatat

SEQ ID NO: 269225 - DNA, 25 bp, Probe Sequence
ggacgcacacagtatttgtcaaatt

SEQ ID NO: 269226 - DNA, 25 bp, Probe Sequence
ggacccaggacattttgatgagatc

SEQ ID NO: 269227 - DNA, 25 bp, Probe Sequence
ggaccctggtattactatgagacaa

SEQ ID NO: 269228 - DNA, 25 bp, Probe Sequence
ggacttctggactacatatagaaaa

SEQ ID NO: 269229 - DNA, 25 bp, Probe Sequence
ggaccctgatgagaagatagcatac

SEQ ID NO: 269230 - DNA, 25 bp, Probe Sequence
ggaccctgtcatgagaatgaatcca

SEQ ID NO: 269231 - DNA, 25 bp, Probe Sequence
ggacatcacttacaaattcacccac

SEQ ID NO: 269232 - DNA, 25 bp, Probe Sequence
ggactcacttagcacgagaaatcac

SEQ ID NO: 269233 - DNA, 25 bp, Probe Sequence
ggactgacctaaacgtggaatgcat

SEQ ID NO: 269234 - DNA, 25 bp, Probe Sequence
ggactaccgagagcttggactacac

SEQ ID NO: 269235 - DNA, 25 bp, Probe Sequence
ggactaccggaagaaggccatcaag

SEQ ID NO: 269236 - DNA, 25 bp, Probe Sequence
ggacccgggcaagaatgagacctac

SEQ ID NO: 269237 - DNA, 25 bp, Probe Sequence
ggacccgcaggctgcaaggagcaac

SEQ ID NO: 269238 - DNA, 25 bp, Probe Sequence
ggacccctgagcttgcagagatgaa

SEQ ID NO: 269239 - DNA, 25 bp, Probe Sequence
ggacactatggacttcaggcatgca

SEQ ID NO: 269240 - DNA, 25 bp, Probe Sequence
ggaaaaggactcagtgcataagatg

SEQ ID NO: 269241 - DNA, 25 bp, Probe Sequence
ggaaatgggccactttatatactgt

SEQ ID NO: 269242 - DNA, 25 bp, Probe Sequence
ggacttgagggactgcttactacta

SEQ ID NO: 269243 - DNA, 25 bp, Probe Sequence
ggacttgagggccagttattgcctc

SEQ ID NO: 269244 - DNA, 25 bp, Probe Sequence
ggacttaagctgggtttgctcacct

SEQ ID NO: 269245 - DNA, 25 bp, Probe Sequence
ggacttaagctgggtttgctcacct

SEQ ID NO: 269246 - DNA, 25 bp, Probe Sequence
ggacgaaagcgaggcggtctgcagc

SEQ ID NO: 269247 - DNA, 25 bp, Probe Sequence
ggacgagaagagccaaggtccgcct

SEQ ID NO: 269248 - DNA, 25 bp, Probe Sequence
ggacagaaattccaaagccacccaa

SEQ ID NO: 269249 - DNA, 25 bp, Probe Sequence
ggactatgatgtaagcaaagccctg

SEQ ID NO: 269250 - DNA, 25 bp, Probe Sequence
ggactagattggactgtatcaacat

SEQ ID NO: 269251 - DNA, 25 bp, Probe Sequence
ggactagacctgcttcatgaatctc

SEQ ID NO: 269252 - DNA, 25 bp, Probe Sequence
ggactggactgccttgattgacatg

SEQ ID NO: 269253 - DNA, 25 bp, Probe Sequence
ggactctggccatcatgttgacagc

SEQ ID NO: 269254 - DNA, 25 bp, Probe Sequence
ggactgggcccaattggatgcgggg

SEQ ID NO: 269255 - DNA, 25 bp, Probe Sequence
ggactggtgatgagtagagacgggg

SEQ ID NO: 269256 - DNA, 25 bp, Probe Sequence
ggacggcagagttgatagtgacgag

SEQ ID NO: 269257 - DNA, 25 bp, Probe Sequence
ggacaggattggctcagatgacccc

SEQ ID NO: 269258 - DNA, 25 bp, Probe Sequence
ggacagtgataggcccaaggtcccc

SEQ ID NO: 269259 - DNA, 25 bp, Probe Sequence
ggacagtgacggcgagtttctgccc

SEQ ID NO: 269260 - DNA, 25 bp, Probe Sequence
ggactgtaggcacaagcgatttggc

SEQ ID NO: 269261 - DNA, 25 bp, Probe Sequence
ggacgcaatggccgtagcgtttacg

SEQ ID NO: 269262 - DNA, 25 bp, Probe Sequence
ggacgcgagcagatgaacgaacaga

SEQ ID NO: 269263 - DNA, 25 bp, Probe Sequence
ggaccgtgcagctgaacgcagagaa

SEQ ID NO: 269264 - DNA, 25 bp, Probe Sequence
ggacgcttgagccagaatctcagga

SEQ ID NO: 269265 - DNA, 25 bp, Probe Sequence
ggacagcattaacgagctgcccgag

SEQ ID NO: 269266 - DNA, 25 bp, Probe Sequence
ggactcattaaattgactcccatgt

SEQ ID NO: 269267 - DNA, 25 bp, Probe Sequence
ggactttatcaaatggtccagatga

SEQ ID NO: 269268 - DNA, 25 bp, Probe Sequence
ggacattgttaaatagtccctgctt

SEQ ID NO: 269269 - DNA, 25 bp, Probe Sequence
ggacttgtgctactatattttttta

SEQ ID NO: 269270 - DNA, 25 bp, Probe Sequence
ggactttgattgcacattgttgttt

SEQ ID NO: 269271 - DNA, 25 bp, Probe Sequence
ggactaggaatggcacattttcact

SEQ ID NO: 269272 - DNA, 25 bp, Probe Sequence
ggacttaaatgaactttgatctctg

SEQ ID NO: 269273 - DNA, 25 bp, Probe Sequence
ggacatttgcactgactttatccag

SEQ ID NO: 269274 - DNA, 25 bp, Probe Sequence
ggactttggtggtatctttcacaca

SEQ ID NO: 269275 - DNA, 25 bp, Probe Sequence
ggactgttggaggagagttagccca

SEQ ID NO: 269276 - DNA, 25 bp, Probe Sequence
ggactgttggaggagagttagccca

SEQ ID NO: 269277 - DNA, 25 bp, Probe Sequence
ggcaggttcgaggcgattcgagctc

SEQ ID NO: 269278 - DNA, 25 bp, Probe Sequence
ggcagcttgtagtgagttgcggtca

SEQ ID NO: 269279 - DNA, 25 bp, Probe Sequence
ggactgagcttgtggtgtgctttgc

SEQ ID NO: 269280 - DNA, 25 bp, Probe Sequence
ggactcactttgctcatgttattgt

SEQ ID NO: 269281 - DNA, 25 bp, Probe Sequence
ggactcagtgtcctctctgagtata

SEQ ID NO: 269282 - DNA, 25 bp, Probe Sequence
ggactctgggcgtcatgtactacaa

SEQ ID NO: 269283 - DNA, 25 bp, Probe Sequence
ggactgcttgagcccaggagttgaa

SEQ ID NO: 269284 - DNA, 25 bp, Probe Sequence
ggactgattgaggccgggagctaga

SEQ ID NO: 269285 - DNA, 25 bp, Probe Sequence
ggacttgtcatgcacaagcgatgct

SEQ ID NO: 269286 - DNA, 25 bp, Probe Sequence
ggacttacaggaaaggcatctgagc

SEQ ID NO: 269287 - DNA, 25 bp, Probe Sequence
ggacttcaagcgaaaggcacgcagc

SEQ ID NO: 269288 - DNA, 25 bp, Probe Sequence
ggacttcgagcaggagatggccacc

SEQ ID NO: 269289 - DNA, 25 bp, Probe Sequence
ggacaccgctgctggtgtccagctc

SEQ ID NO: 269290 - DNA, 25 bp, Probe Sequence
ggaaaactcagtgcagtccagtgcc

SEQ ID NO: 269291 - DNA, 25 bp, Probe Sequence
ggacgacacgcagttcgtgcggttc

SEQ ID NO: 269292 - DNA, 25 bp, Probe Sequence
ggacgacacgcagttcgtgcggttc

SEQ ID NO: 269293 - DNA, 25 bp, Probe Sequence
ggcattgtccagatttgtcgtgtta

SEQ ID NO: 269294 - DNA, 25 bp, Probe Sequence
ggactgtacctttattcgtgtctct

SEQ ID NO: 269295 - DNA, 25 bp, Probe Sequence
ggacttactattcttgtttatattt

SEQ ID NO: 269296 - DNA, 25 bp, Probe Sequence
ggacttacatttcctggtttaacat

SEQ ID NO: 269297 - DNA, 25 bp, Probe Sequence
ggcactaaatttctcagtcttttac

SEQ ID NO: 269298 - DNA, 25 bp, Probe Sequence
ggcactaaatttctcagtcttttac

SEQ ID NO: 269299 - DNA, 25 bp, Probe Sequence
ggaaaaataccgtgtctgttaagca

SEQ ID NO: 269300 - DNA, 25 bp, Probe Sequence
ggaacaaaagccagttctgttttat

SEQ ID NO: 269301 - DNA, 25 bp, Probe Sequence
ggaaagcatatacacttttttcttt

SEQ ID NO: 269302 - DNA, 25 bp, Probe Sequence
ggacaaatatcctcactttctatct

SEQ ID NO: 269303 - DNA, 25 bp, Probe Sequence
ggacttagacctcacatattaatgt

SEQ ID NO: 269304 - DNA, 25 bp, Probe Sequence
ggactttaccttgatatatgtatat

SEQ ID NO: 269305 - DNA, 25 bp, Probe Sequence
ggacttcattctgacgtatgttagt

SEQ ID NO: 269306 - DNA, 25 bp, Probe Sequence
ggacaccatctggcgaggtcattta

SEQ ID NO: 269307 - DNA, 25 bp, Probe Sequence
ggacacccagtgagcttcagtaaag

SEQ ID NO: 269308 - DNA, 25 bp, Probe Sequence
ggaaccttatgacttacgtaatcga

SEQ ID NO: 269309 - DNA, 25 bp, Probe Sequence
ggacacctggtatgcgactgggatc

SEQ ID NO: 269310 - DNA, 25 bp, Probe Sequence
ggaaccttccaacaagacgatccac

SEQ ID NO: 269311 - DNA, 25 bp, Probe Sequence
ggaaccctttggaggacagatgcta

SEQ ID NO: 269312 - DNA, 25 bp, Probe Sequence
ggacaggccgttggttggccaggat

SEQ ID NO: 269313 - DNA, 25 bp, Probe Sequence
ggactcctcttaatgtttccaaatg

SEQ ID NO: 269314 - DNA, 25 bp, Probe Sequence
ggactcgactggtgtttgatcacga

SEQ ID NO: 269315 - DNA, 25 bp, Probe Sequence
ggacttatctgcgaacttatgacac

SEQ ID NO: 269316 - DNA, 25 bp, Probe Sequence
ggacgtgtttattaattgcacccca

SEQ ID NO: 269317 - DNA, 25 bp, Probe Sequence
ggacttggttagtaactggcagcct

SEQ ID NO: 269318 - DNA, 25 bp, Probe Sequence
ggactctcgtgcagaaaatgtagcc

SEQ ID NO: 269319 - DNA, 25 bp, Probe Sequence
ggacccaactggtaagattggccct

SEQ ID NO: 269320 - DNA, 25 bp, Probe Sequence
ggactcccctggacacagaggtgcc

SEQ ID NO: 269321 - DNA, 25 bp, Probe Sequence
ggactccccttggaggatctgtgca

SEQ ID NO: 269322 - DNA, 25 bp, Probe Sequence
ggacccaccgtgtagacacacgaca

SEQ ID NO: 269323 - DNA, 25 bp, Probe Sequence
ggacgacacctataatgagaccccc

SEQ ID NO: 269324 - DNA, 25 bp, Probe Sequence
ggacaacaccttcaaagacaggccc

SEQ ID NO: 269325 - DNA, 25 bp, Probe Sequence
ggacccacacttaaagagagatttc

SEQ ID NO: 269326 - DNA, 25 bp, Probe Sequence
ggacccaccagagcacaagagaagg

SEQ ID NO: 269327 - DNA, 25 bp, Probe Sequence
ggacgctcccgggagacgaatgagg

SEQ ID NO: 269328 - DNA, 25 bp, Probe Sequence
ggaagccggtccgaggggtgaagct

SEQ ID NO: 269329 - DNA, 25 bp, Probe Sequence
ggaagggctatcctgggggtgaact

SEQ ID NO: 269330 - DNA, 25 bp, Probe Sequence
ggaaggtcttcattgttgggggagc

SEQ ID NO: 269331 - DNA, 25 bp, Probe Sequence
ggacaggtcctgggtgagggtggga

SEQ ID NO: 269332 - DNA, 25 bp, Probe Sequence
ggacaggtcctgggtgagggtggga

SEQ ID NO: 269333 - DNA, 25 bp, Probe Sequence
tgggaagcccaaggttgggttgaat

SEQ ID NO: 269334 - DNA, 25 bp, Probe Sequence
tggaaacccaggtttgggagtgtga

SEQ ID NO: 269335 - DNA, 25 bp, Probe Sequence
ggacaccgcacagattttccgagtg

SEQ ID NO: 269336 - DNA, 25 bp, Probe Sequence
ggacacacaaatttggttgggagtt

SEQ ID NO: 269337 - DNA, 25 bp, Probe Sequence
ggacgcaaagaagggtacgacagac

SEQ ID NO: 269338 - DNA, 25 bp, Probe Sequence
ggacagcaatagaaggggacctgcg

SEQ ID NO: 269339 - DNA, 25 bp, Probe Sequence
ggacgaagagtccaggagaccctgt

SEQ ID NO: 269340 - DNA, 25 bp, Probe Sequence
ggacgaagctgatatcggaccctgg

SEQ ID NO: 269341 - DNA, 25 bp, Probe Sequence
ggacacagggacacgttccctggaa

SEQ ID NO: 269342 - DNA, 25 bp, Probe Sequence
ggacaaaggcaaaccgtctaatgta

SEQ ID NO: 269343 - DNA, 25 bp, Probe Sequence
ggaagaccagaattcccttgaattg

SEQ ID NO: 269344 - DNA, 25 bp, Probe Sequence
ggaacataccaaaccctagaaatgt

SEQ ID NO: 269345 - DNA, 25 bp, Probe Sequence
ggaaccccaatgagccttgggtcat

SEQ ID NO: 269346 - DNA, 25 bp, Probe Sequence
ggaaacgcctagatccttagatgaa

SEQ ID NO: 269347 - DNA, 25 bp, Probe Sequence
ggaaacacgctagtgaccattaggc

SEQ ID NO: 269348 - DNA, 25 bp, Probe Sequence
ggaaaccctcgtacaaatggcatgt

SEQ ID NO: 269349 - DNA, 25 bp, Probe Sequence
ggaaaccctcgtacaaatggcatgt

SEQ ID NO: 269350 - DNA, 25 bp, Probe Sequence
ggaaaaccggtgaatctgggcttat

SEQ ID NO: 269351 - DNA, 25 bp, Probe Sequence
ggaagaacctatacaactgtgttta

SEQ ID NO: 269352 - DNA, 25 bp, Probe Sequence
ggactgaaccctaagatttgtacta

SEQ ID NO: 269353 - DNA, 25 bp, Probe Sequence
ggactagatcaccttagtttgattc

SEQ ID NO: 269354 - DNA, 25 bp, Probe Sequence
tgtaaggtactgaatacttaatatg

SEQ ID NO: 269355 - DNA, 25 bp, Probe Sequence
ggacagttactggacgttaatgaac

SEQ ID NO: 269356 - DNA, 25 bp, Probe Sequence
ggaagttttggagtttgcaaccaca

SEQ ID NO: 269357 - DNA, 25 bp, Probe Sequence
ggaaaatatagtatgttgaaccaca

SEQ ID NO: 269358 - DNA, 25 bp, Probe Sequence
ggaagaagaagtcttacaccactcc

SEQ ID NO: 269359 - DNA, 25 bp, Probe Sequence
ggacagataaagtcgttccaacttc

SEQ ID NO: 269360 - DNA, 25 bp, Probe Sequence
ggcaagagaactttgtaccccttct

SEQ ID NO: 269361 - DNA, 25 bp, Probe Sequence
ggaagtgatctcaaagtaccggatt

SEQ ID NO: 269362 - DNA, 25 bp, Probe Sequence
ggaagttgctgaactgtaccccaaa

SEQ ID NO: 269363 - DNA, 25 bp, Probe Sequence
ggaagttgctgaactgtaccccaaa

SEQ ID NO: 269364 - DNA, 25 bp, Probe Sequence
ggaacgacagtacttcagtccaaaa

SEQ ID NO: 269365 - DNA, 25 bp, Probe Sequence
ggaacataagtacaccattggaaag

SEQ ID NO: 269366 - DNA, 25 bp, Probe Sequence
ggacatttgaacagactttggaaac

SEQ ID NO: 269367 - DNA, 25 bp, Probe Sequence
ggacaagtacataagactttaaaga

SEQ ID NO: 269368 - DNA, 25 bp, Probe Sequence
ggacaagatagattaatagcctaaa

SEQ ID NO: 269369 - DNA, 25 bp, Probe Sequence
ggacagggaatctagtgaccaacaa

SEQ ID NO: 269370 - DNA, 25 bp, Probe Sequence
ggacggaaacatcagcaccaaagaa

SEQ ID NO: 269371 - DNA, 25 bp, Probe Sequence
ggactggataaccaacctccagagg

SEQ ID NO: 269372 - DNA, 25 bp, Probe Sequence
ggactaggagcagaagcctgccaga

SEQ ID NO: 269373 - DNA, 25 bp, Probe Sequence
ggacgagctggtggaacactacaaa

SEQ ID NO: 269374 - DNA, 25 bp, Probe Sequence
ggacgagtggctggaggccatcaag

SEQ ID NO: 269375 - DNA, 25 bp, Probe Sequence
ggactggatccaggagacgatgaag

SEQ ID NO: 269376 - DNA, 25 bp, Probe Sequence
ggacgagacagaggagccagatgta

SEQ ID NO: 269377 - DNA, 25 bp, Probe Sequence
ggacaggcaccaggagctatcagga

SEQ ID NO: 269378 - DNA, 25 bp, Probe Sequence
ggactggctaaggacgatcagctga

SEQ ID NO: 269379 - DNA, 25 bp, Probe Sequence
ggacatggcgaaccggatcagtgcc

SEQ ID NO: 269380 - DNA, 25 bp, Probe Sequence
ggacatggagagccaccggaatgcc

SEQ ID NO: 269381 - DNA, 25 bp, Probe Sequence
ggacagctggggcccgagagatggt

SEQ ID NO: 269382 - DNA, 25 bp, Probe Sequence
ggacagtggggtacattgtgggctt

SEQ ID NO: 269383 - DNA, 25 bp, Probe Sequence
ggactgggtggaaacttgatgcttt

SEQ ID NO: 269384 - DNA, 25 bp, Probe Sequence
ggactggctgtgcaataagtgtggc

SEQ ID NO: 269385 - DNA, 25 bp, Probe Sequence
ggactgagtgagaaaacgctgagga

SEQ ID NO: 269386 - DNA, 25 bp, Probe Sequence
ggacgagatggagttcaccgaggcc

SEQ ID NO: 269387 - DNA, 25 bp, Probe Sequence
tggaaagaaactatccgagggaaga

SEQ ID NO: 269388 - DNA, 25 bp, Probe Sequence
ggaaatgcaaaaatgcccggggcca

SEQ ID NO: 269389 - DNA, 25 bp, Probe Sequence
tgagaaatgcaatacccggggtgtt

SEQ ID NO: 269390 - DNA, 25 bp, Probe Sequence
ggactatgactttcaacgggactat

SEQ ID NO: 269391 - DNA, 25 bp, Probe Sequence
ggactttcttacttgggcagtacat

SEQ ID NO: 269392 - DNA, 25 bp, Probe Sequence
ggacatactgtgtacttggaacgcc

SEQ ID NO: 269393 - DNA, 25 bp, Probe Sequence
ggactcattgctgattggaacacca

SEQ ID NO: 269394 - DNA, 25 bp, Probe Sequence
ggactcttgtgctttcatacgcacc

SEQ ID NO: 269395 - DNA, 25 bp, Probe Sequence
ggacgtgcatgtcttctgcacagac

SEQ ID NO: 269396 - DNA, 25 bp, Probe Sequence
ggacagtcatgtctgcttacaggtg

SEQ ID NO: 269397 - DNA, 25 bp, Probe Sequence
ggacagcttgtagtttgccaggatt

SEQ ID NO: 269398 - DNA, 25 bp, Probe Sequence
ggacagcttgtagtttgccaggatt

SEQ ID NO: 269399 - DNA, 25 bp, Probe Sequence
ggacagcttgtagtttgccaggatt

SEQ ID NO: 269400 - DNA, 25 bp, Probe Sequence
ggactgttgcccagtgtaagatctg

SEQ ID NO: 269401 - DNA, 25 bp, Probe Sequence
ggactgtgggatctgattacagacg

SEQ ID NO: 269402 - DNA, 25 bp, Probe Sequence
ggactgttgctgtattgattaggaa

SEQ ID NO: 269403 - DNA, 25 bp, Probe Sequence
ggactttgtgaaaatgtgcctggaa

SEQ ID NO: 269404 - DNA, 25 bp, Probe Sequence
ggacttattcaacctgtcctttcag

SEQ ID NO: 269405 - DNA, 25 bp, Probe Sequence
ggctcctctaaacatttgctgttca

SEQ ID NO: 269406 - DNA, 25 bp, Probe Sequence
ggactccgccaatattatctgtcca

SEQ ID NO: 269407 - DNA, 25 bp, Probe Sequence
ggactacctcagctatgctgtcttc

SEQ ID NO: 269408 - DNA, 25 bp, Probe Sequence
ggactacagtagctcacgttacagg

SEQ ID NO: 269409 - DNA, 25 bp, Probe Sequence
ggacaagaatccttcaagaaacagg

SEQ ID NO: 269410 - DNA, 25 bp, Probe Sequence
ggacaagcatttcatcttgggaagt

SEQ ID NO: 269411 - DNA, 25 bp, Probe Sequence
ggaaagcgttaagtcggtaagctag

SEQ ID NO: 269412 - DNA, 25 bp, Probe Sequence
ggaaactttgactggagttgaggaa

SEQ ID NO: 269413 - DNA, 25 bp, Probe Sequence
ggaaagtcaacatagtggttaggaa

SEQ ID NO: 269414 - DNA, 25 bp, Probe Sequence
ggacatcagacaacaccagtgcttc

SEQ ID NO: 269415 - DNA, 25 bp, Probe Sequence
ggaaagtcagacagaggcttcaggt

SEQ ID NO: 269416 - DNA, 25 bp, Probe Sequence
ggaaagtcagacagaggcttcaggt

SEQ ID NO: 269417 - DNA, 25 bp, Probe Sequence
ggaaagtcagacagaggcttcaggt

SEQ ID NO: 269418 - DNA, 25 bp, Probe Sequence
ggactgatgtcatcttgagctcttc

SEQ ID NO: 269419 - DNA, 25 bp, Probe Sequence
ggactgagatgcaggatttcttcac

SEQ ID NO: 269420 - DNA, 25 bp, Probe Sequence
ggacgtgatgctgggctgtgtttac

SEQ ID NO: 269421 - DNA, 25 bp, Probe Sequence
ctggcaggtttccctgcagtatgag

SEQ ID NO: 269422 - DNA, 25 bp, Probe Sequence
ggactgtggcattcactgtccttga

SEQ ID NO: 269423 - DNA, 25 bp, Probe Sequence
ggactgctgctatcaggatacctga

SEQ ID NO: 269424 - DNA, 25 bp, Probe Sequence
ggacatgttcatcctagaatcctgt

SEQ ID NO: 269425 - DNA, 25 bp, Probe Sequence
ggacatgttcatcttattcttagga

SEQ ID NO: 269426 - DNA, 25 bp, Probe Sequence
ggacattttccaggcttgttaggat

SEQ ID NO: 269427 - DNA, 25 bp, Probe Sequence
ggacattaccctggtggctcaaagc

SEQ ID NO: 269428 - DNA, 25 bp, Probe Sequence
ggactttccacctggtcatatactc

SEQ ID NO: 269429 - DNA, 25 bp, Probe Sequence
ggactttccacctggtcatatactc

SEQ ID NO: 269430 - DNA, 25 bp, Probe Sequence
ggactttccaacttggcagtaaatc

SEQ ID NO: 269431 - DNA, 25 bp, Probe Sequence
ggactttcctacttggcagtacatc

SEQ ID NO: 269432 - DNA, 25 bp, Probe Sequence
ggactttcctacttggcagtacatc

SEQ ID NO: 269433 - DNA, 25 bp, Probe Sequence
ggactttcctacttggcagtacatc

SEQ ID NO: 269434 - DNA, 25 bp, Probe Sequence
ggactttcctacttggcagtacatc

SEQ ID NO: 269435 - DNA, 25 bp, Probe Sequence
ggactttcctacttggcagtacatc

SEQ ID NO: 269436 - DNA, 25 bp, Probe Sequence
ggactttcctacttggcagtacatc

SEQ ID NO: 269437 - DNA, 25 bp, Probe Sequence
ggactttcctacttggcagtacatc

SEQ ID NO: 269438 - DNA, 25 bp, Probe Sequence
ggactttcctacttggcagtacatc

SEQ ID NO: 269439 - DNA, 25 bp, Probe Sequence
ggactttcctacttggcagtacatc

SEQ ID NO: 269440 - DNA, 25 bp, Probe Sequence
ggactttcctacttggcagtacatc

SEQ ID NO: 269441 - DNA, 25 bp, Probe Sequence
ggactttcctacttggcagtacatc

SEQ ID NO: 269442 - DNA, 25 bp, Probe Sequence
ggactttcctacttggcagtacatc

SEQ ID NO: 269443 - DNA, 25 bp, Probe Sequence
ggactttcctacttggcagtacatc

SEQ ID NO: 269444 - DNA, 25 bp, Probe Sequence
ggactttcctacttggcagtacatc

SEQ ID NO: 269445 - DNA, 25 bp, Probe Sequence
ggactttcctacttggcagtacatc

SEQ ID NO: 269446 - DNA, 25 bp, Probe Sequence
ggactttcctacttggcagtacatc

SEQ ID NO: 269447 - DNA, 25 bp, Probe Sequence
ggactttcctacttggcagtacatc

SEQ ID NO: 269448 - DNA, 25 bp, Probe Sequence
ggacttcctaactggcagtacatct

SEQ ID NO: 269449 - DNA, 25 bp, Probe Sequence
ggacttcctgaagaagcacaacctc

SEQ ID NO: 269450 - DNA, 25 bp, Probe Sequence
ggactttgaagatatcacccacctc

SEQ ID NO: 269451 - DNA, 25 bp, Probe Sequence
ggactgaagcaactgtacatccaca

SEQ ID NO: 269452 - DNA, 25 bp, Probe Sequence
ggactaacagtggctcgactgcaga

SEQ ID NO: 269453 - DNA, 25 bp, Probe Sequence
ggacatgatgagcgacctgacgcgg

SEQ ID NO: 269454 - DNA, 25 bp, Probe Sequence
ggactgatgagggcactccatctat

SEQ ID NO: 269455 - DNA, 25 bp, Probe Sequence
ggactatcaggagtccactgcctcc

SEQ ID NO: 269456 - DNA, 25 bp, Probe Sequence
ggactacaggagatgctgtcactta

SEQ ID NO: 269457 - DNA, 25 bp, Probe Sequence
ggactacgataatgtgtactatgac

SEQ ID NO: 269458 - DNA, 25 bp, Probe Sequence
ggcactaaacaatagtactagaggt

SEQ ID NO: 269459 - DNA, 25 bp, Probe Sequence
ggaacactccaatcagaaaaaggtt

SEQ ID NO: 269460 - DNA, 25 bp, Probe Sequence
ggaaactctgaaaccaaaaatacat

SEQ ID NO: 269461 - DNA, 25 bp, Probe Sequence
ggaaacacgttgtcactaaacagac

SEQ ID NO: 269462 - DNA, 25 bp, Probe Sequence
ggaaaacgtgtctctttaaagctgc

SEQ ID NO: 269463 - DNA, 25 bp, Probe Sequence
ggaaaactattctcctgtatcaaga

SEQ ID NO: 269464 - DNA, 25 bp, Probe Sequence
ggacatctattttacccttatccca

SEQ ID NO: 269465 - DNA, 25 bp, Probe Sequence
ggacatctattttacccttatccca

SEQ ID NO: 269466 - DNA, 25 bp, Probe Sequence
ggacattttaaaaacctgtacacag

SEQ ID NO: 269467 - DNA, 25 bp, Probe Sequence
ggacatatgtccgaaaccctgaaca

SEQ ID NO: 269468 - DNA, 25 bp, Probe Sequence
ggaaatgaaccatgatcccaatcca

SEQ ID NO: 269469 - DNA, 25 bp, Probe Sequence
ggcagggaagtcagacctgacaccc

SEQ ID NO: 269470 - DNA, 25 bp, Probe Sequence
tggaaggaaggcacacactacgttc

SEQ ID NO: 269471 - DNA, 25 bp, Probe Sequence
ggacagaacagggcccctgggatta

SEQ ID NO: 269472 - DNA, 25 bp, Probe Sequence
ggacagcaacagggacaacgaggtg

SEQ ID NO: 269473 - DNA, 25 bp, Probe Sequence
ggactgattcaccgcaagactgtgg

SEQ ID NO: 269474 - DNA, 25 bp, Probe Sequence
ggacatagtccttgtaagcttccct

SEQ ID NO: 269475 - DNA, 25 bp, Probe Sequence
ggactcagtgttttaatgctgtgtt

SEQ ID NO: 269476 - DNA, 25 bp, Probe Sequence
ggactcctgtgtcacatactgtgtt

SEQ ID NO: 269477 - DNA, 25 bp, Probe Sequence
ggactcctgcagaagtcaactgtgt

SEQ ID NO: 269478 - DNA, 25 bp, Probe Sequence
ggactcctggaaggcacagagaagg

SEQ ID NO: 269479 - DNA, 25 bp, Probe Sequence
ggactcgcctaatacaaacatgtgt

SEQ ID NO: 269480 - DNA, 25 bp, Probe Sequence
ggactctcctactggcagtacatgt

SEQ ID NO: 269481 - DNA, 25 bp, Probe Sequence
ggactctactacgtggatgaacatg

SEQ ID NO: 269482 - DNA, 25 bp, Probe Sequence
ggacatctattaaagtgattgacaa

SEQ ID NO: 269483 - DNA, 25 bp, Probe Sequence
ggacatgtgccaataaggcttccaa

SEQ ID NO: 269484 - DNA, 25 bp, Probe Sequence
ggactctactttgggtcccagatgt

SEQ ID NO: 269485 - DNA, 25 bp, Probe Sequence
ggacttacatttagatgacccaggc

SEQ ID NO: 269486 - DNA, 25 bp, Probe Sequence
ggacatttgcacttggagaacactt

SEQ ID NO: 269487 - DNA, 25 bp, Probe Sequence
ggacttgctgacttgctaattcatt

SEQ ID NO: 269488 - DNA, 25 bp, Probe Sequence
ggacttggagctactttcatcctta

SEQ ID NO: 269489 - DNA, 25 bp, Probe Sequence
ggacattggagatgccatcctcttt

SEQ ID NO: 269490 - DNA, 25 bp, Probe Sequence
ggacagggtctacatcaactattac

SEQ ID NO: 269491 - DNA, 25 bp, Probe Sequence
ggacaggtgttatttaaacattcta

SEQ ID NO: 269492 - DNA, 25 bp, Probe Sequence
ggacatactggttttaatacctgct

SEQ ID NO: 269493 - DNA, 25 bp, Probe Sequence
ggacttatggactttcctacttgcg

SEQ ID NO: 269494 - DNA, 25 bp, Probe Sequence
ggacatttggattgttcccacttct

SEQ ID NO: 269495 - DNA, 25 bp, Probe Sequence
ggacagagattatgttcaccagccc

SEQ ID NO: 269496 - DNA, 25 bp, Probe Sequence
ggacagagtgtatacatgcacctga

SEQ ID NO: 269497 - DNA, 25 bp, Probe Sequence
ggacagggataattcatgaggcttt

SEQ ID NO: 269498 - DNA, 25 bp, Probe Sequence
ggacagtggaggatccaggtcttgg

SEQ ID NO: 269499 - DNA, 25 bp, Probe Sequence
ggaattgcgggccttcaagttattg

SEQ ID NO: 269500 - DNA, 25 bp, Probe Sequence
ggacacggaggctcttagcttaagc

SEQ ID NO: 269501 - DNA, 25 bp, Probe Sequence
ggacacgagcattaacatttgaaaa

SEQ ID NO: 269502 - DNA, 25 bp, Probe Sequence
ggaaatggtcttactttcaaatgac

SEQ ID NO: 269503 - DNA, 25 bp, Probe Sequence
ggaaaggactcgcctaatacaaaca

SEQ ID NO: 269504 - DNA, 25 bp, Probe Sequence
tggggactacactctaatagccaag

SEQ ID NO: 269505 - DNA, 25 bp, Probe Sequence
ggctgcacctaccaactcaaagtgc

SEQ ID NO: 269506 - DNA, 25 bp, Probe Sequence
ggctgcccacagcaatttaagttac

SEQ ID NO: 269507 - DNA, 25 bp, Probe Sequence
ggcatagcccagacagacttaggga

SEQ ID NO: 269508 - DNA, 25 bp, Probe Sequence
ggacatcaatgaccatttgtttcct

SEQ ID NO: 269509 - DNA, 25 bp, Probe Sequence
ggacatcttgtcattttttttcttt

SEQ ID NO: 269510 - DNA, 25 bp, Probe Sequence
ggaacactgtttgacttttatttga

SEQ ID NO: 269511 - DNA, 25 bp, Probe Sequence
ggaattgcttttgtcgaggttttgg

SEQ ID NO: 269512 - DNA, 25 bp, Probe Sequence
ggaattttttgtgaagctattaaat

SEQ ID NO: 269513 - DNA, 25 bp, Probe Sequence
ggaaagtttccagtacactgaaaca

SEQ ID NO: 269514 - DNA, 25 bp, Probe Sequence
ggaaagctaggcccttgcctaagaa

SEQ ID NO: 269515 - DNA, 25 bp, Probe Sequence
ggaaatgtagatgttattttagtct

SEQ ID NO: 269516 - DNA, 25 bp, Probe Sequence
ggaacagtcaacctttctagtagtt

SEQ ID NO: 269517 - DNA, 25 bp, Probe Sequence
ggaaaatattactcctattactgtg

SEQ ID NO: 269518 - DNA, 25 bp, Probe Sequence
ggaaaatattactcctattactgtg

SEQ ID NO: 269519 - DNA, 25 bp, Probe Sequence
ggaagaactcttcgagggaaacttg

SEQ ID NO: 269520 - DNA, 25 bp, Probe Sequence
ggaaaacttttcattacatacttgt

SEQ ID NO: 269521 - DNA, 25 bp, Probe Sequence
ggaaaacttttcattacatacttgt

SEQ ID NO: 269522 - DNA, 25 bp, Probe Sequence
ggaaaacgttttaagttgtcatgtg

SEQ ID NO: 269523 - DNA, 25 bp, Probe Sequence
ggaagacctttgagaacctgggtgt

SEQ ID NO: 269524 - DNA, 25 bp, Probe Sequence
ggaaaccaagtgcaactcctgggtt

SEQ ID NO: 269525 - DNA, 25 bp, Probe Sequence
ggaaacacaagaagaaacgcctggt

SEQ ID NO: 269526 - DNA, 25 bp, Probe Sequence
ggaaacacaagaagaaacgcctggt

SEQ ID NO: 269527 - DNA, 25 bp, Probe Sequence
ggacaacaagagcgaaactctgtct

SEQ ID NO: 269528 - DNA, 25 bp, Probe Sequence
ggacacagaagatgtggtcaggttt

SEQ ID NO: 269529 - DNA, 25 bp, Probe Sequence
ggaaaagggttgtctgcgtgttctc

SEQ ID NO: 269530 - DNA, 25 bp, Probe Sequence
ggaaaagattgatcgccgttctggt

SEQ ID NO: 269531 - DNA, 25 bp, Probe Sequence
ggaaaagattgatcgccgttctggt

SEQ ID NO: 269532 - DNA, 25 bp, Probe Sequence
ggaaagaaaacagccgacttcgaca

SEQ ID NO: 269533 - DNA, 25 bp, Probe Sequence
ggaaatggaaacaccgttgtcagca

SEQ ID NO: 269534 - DNA, 25 bp, Probe Sequence
ggaaggaaaacctacaattgtagag

SEQ ID NO: 269535 - DNA, 25 bp, Probe Sequence
ggaaggagttcacagaagcggtgga

SEQ ID NO: 269536 - DNA, 25 bp, Probe Sequence
ggaaaagttggtcaggcgcagtggc

SEQ ID NO: 269537 - DNA, 25 bp, Probe Sequence
ggaaaagtaggctgtcctctgggct

SEQ ID NO: 269538 - DNA, 25 bp, Probe Sequence
ggaatcgaaaggtgtcccagtacat

SEQ ID NO: 269539 - DNA, 25 bp, Probe Sequence
ggcacccaacagctgggggagttcc

SEQ ID NO: 269540 - DNA, 25 bp, Probe Sequence
ggactcgcataacgtgcgcagaaga

SEQ ID NO: 269541 - DNA, 25 bp, Probe Sequence
ggacatccatgccaagtgcgaactg

SEQ ID NO: 269542 - DNA, 25 bp, Probe Sequence
ggactcgcagtcaggggcagctgac

SEQ ID NO: 269543 - DNA, 25 bp, Probe Sequence
ggactcgatcttggagggtgcagcc

SEQ ID NO: 269544 - DNA, 25 bp, Probe Sequence
ggacatcttcctggagatcgtcacc

SEQ ID NO: 269545 - DNA, 25 bp, Probe Sequence
ggactctgttcttggcaaggacact

SEQ ID NO: 269546 - DNA, 25 bp, Probe Sequence
ggactagttcggcgaggagactggc

SEQ ID NO: 269547 - DNA, 25 bp, Probe Sequence
ggacttgtctccctctgagggaggc

SEQ ID NO: 269548 - DNA, 25 bp, Probe Sequence
ggacttgtctccctctgagggaggc

SEQ ID NO: 269549 - DNA, 25 bp, Probe Sequence
ggaattttcctgtggtggaggcaag

SEQ ID NO: 269550 - DNA, 25 bp, Probe Sequence
ggaactatacagattggagttggaa

SEQ ID NO: 269551 - DNA, 25 bp, Probe Sequence
ggaaacacagtgattggaattggag

SEQ ID NO: 269552 - DNA, 25 bp, Probe Sequence
ggaacaactgggcctgggatggggc

SEQ ID NO: 269553 - DNA, 25 bp, Probe Sequence
ggaacacagctctgggggaatggtg

SEQ ID NO: 269554 - DNA, 25 bp, Probe Sequence
ggacaaccttctagcggggaggtga

SEQ ID NO: 269555 - DNA, 25 bp, Probe Sequence
ggacaatatttcactttgtgggata

SEQ ID NO: 269556 - DNA, 25 bp, Probe Sequence
ggacagtttgtcattaaggagtact

SEQ ID NO: 269557 - DNA, 25 bp, Probe Sequence
ggacagtttggccgtaaagatgtgg

SEQ ID NO: 269558 - DNA, 25 bp, Probe Sequence
ggacagatattaccgtcaacagtgt

SEQ ID NO: 269559 - DNA, 25 bp, Probe Sequence
ggacaagcattgtttggaaagttca

SEQ ID NO: 269560 - DNA, 25 bp, Probe Sequence
ggacacagcattgttggttttgcca

SEQ ID NO: 269561 - DNA, 25 bp, Probe Sequence
ggacagcagactgccggtaacgcgc

SEQ ID NO: 269562 - DNA, 25 bp, Probe Sequence
ggacaggtctgtgcggctgtccatc

SEQ ID NO: 269563 - DNA, 25 bp, Probe Sequence
ggacagttctatggaggcgacagct

SEQ ID NO: 269564 - DNA, 25 bp, Probe Sequence
ggaagtttttggactaagccttcag

SEQ ID NO: 269565 - DNA, 25 bp, Probe Sequence
ggactttttaagcctaatgaaatct

SEQ ID NO: 269566 - DNA, 25 bp, Probe Sequence
ggactcaatttgagccttcaaactt

SEQ ID NO: 269567 - DNA, 25 bp, Probe Sequence
ggactaatcttcaactcctacatac

SEQ ID NO: 269568 - DNA, 25 bp, Probe Sequence
ggactacaaatccctccaggatatc

SEQ ID NO: 269569 - DNA, 25 bp, Probe Sequence
ggactaaagtgggctctaagatcta

SEQ ID NO: 269570 - DNA, 25 bp, Probe Sequence
ggacataaagtgagcttgtacatcc

SEQ ID NO: 269571 - DNA, 25 bp, Probe Sequence
ggacagaacgtcctcttgtgtataa

SEQ ID NO: 269572 - DNA, 25 bp, Probe Sequence
ggaaaacgtcacgctgaatatatga

SEQ ID NO: 269573 - DNA, 25 bp, Probe Sequence
ggaaataccttccaatgctattgag

SEQ ID NO: 269574 - DNA, 25 bp, Probe Sequence
ggaaccatgccttcataattctaga

SEQ ID NO: 269575 - DNA, 25 bp, Probe Sequence
ggaacctgcctatattttagtgctg

SEQ ID NO: 269576 - DNA, 25 bp, Probe Sequence
ggaacacacctatgtatttacgtca

SEQ ID NO: 269577 - DNA, 25 bp, Probe Sequence
ggaatacatcagaaggttttaccat

SEQ ID NO: 269578 - DNA, 25 bp, Probe Sequence
ggacaaatgtgcttggttttactat

SEQ ID NO: 269579 - DNA, 25 bp, Probe Sequence
ggacaaatgtgcttggttttactat

SEQ ID NO: 269580 - DNA, 25 bp, Probe Sequence
ggaaaaggtatagatgtccactact

SEQ ID NO: 269581 - DNA, 25 bp, Probe Sequence
ggaatttggaaacggtaagtctgct

SEQ ID NO: 269582 - DNA, 25 bp, Probe Sequence
ggaacttagaaacggttgcctctgc

SEQ ID NO: 269583 - DNA, 25 bp, Probe Sequence
ggaacttagaaacggttgcctctgc

SEQ ID NO: 269584 - DNA, 25 bp, Probe Sequence
ggaactaggacccttgtgtcctgtc

SEQ ID NO: 269585 - DNA, 25 bp, Probe Sequence
ggacactcaggacagcttggtttat

SEQ ID NO: 269586 - DNA, 25 bp, Probe Sequence
ggacacatagaacacactatttgta

SEQ ID NO: 269587 - DNA, 25 bp, Probe Sequence
ggactctgaagtgaaccatgtggtt

SEQ ID NO: 269588 - DNA, 25 bp, Probe Sequence
ggacatggccctttacatagtggtt

SEQ ID NO: 269589 - DNA, 25 bp, Probe Sequence
ggacagtggccttagagctattgag

SEQ ID NO: 269590 - DNA, 25 bp, Probe Sequence
ggacatgaagtttggtgcatcttgg

SEQ ID NO: 269591 - DNA, 25 bp, Probe Sequence
ggacagttttgctttgcctgtggag

SEQ ID NO: 269592 - DNA, 25 bp, Probe Sequence
ggacagtgcctttaaccaagcgagg

SEQ ID NO: 269593 - DNA, 25 bp, Probe Sequence
ggacagaactttccccaattacagg

SEQ ID NO: 269594 - DNA, 25 bp, Probe Sequence
ggacatcgtcttctccaaagtcaag

SEQ ID NO: 269595 - DNA, 25 bp, Probe Sequence
ggacagcttctttgcccaaaatgca

SEQ ID NO: 269596 - DNA, 25 bp, Probe Sequence
ggacagctaattgccaccatgaaag

SEQ ID NO: 269597 - DNA, 25 bp, Probe Sequence
ggacagtaaggtccatccatgacct

SEQ ID NO: 269598 - DNA, 25 bp, Probe Sequence
ggacagtagatggacttctcagaac

SEQ ID NO: 269599 - DNA, 25 bp, Probe Sequence
ggacagccagagctttctatgtact

SEQ ID NO: 269600 - DNA, 25 bp, Probe Sequence
ggacagggaggaatcctggctcagc

SEQ ID NO: 269601 - DNA, 25 bp, Probe Sequence
ggacatcggctggaatgactggatc

SEQ ID NO: 269602 - DNA, 25 bp, Probe Sequence
ggacatcggctggaatgactggatc

SEQ ID NO: 269603 - DNA, 25 bp, Probe Sequence
ggacatccaggcactgaaggcagcc

SEQ ID NO: 269604 - DNA, 25 bp, Probe Sequence
ggacatccagtccctttgatagata

SEQ ID NO: 269605 - DNA, 25 bp, Probe Sequence
ggacatagacctccagattgtaaat

SEQ ID NO: 269606 - DNA, 25 bp, Probe Sequence
ggacttgagcctctgttctgaagag

SEQ ID NO: 269607 - DNA, 25 bp, Probe Sequence
ggactcagaccctgagcctgaaggg

SEQ ID NO: 269608 - DNA, 25 bp, Probe Sequence
ggacatcaacaaattacctggggag

SEQ ID NO: 269609 - DNA, 25 bp, Probe Sequence
ggacaaagaattcacctgcagggca

SEQ ID NO: 269610 - DNA, 25 bp, Probe Sequence
ggaaaatgaactcacccacgatatc

SEQ ID NO: 269611 - DNA, 25 bp, Probe Sequence
ggacaaagacgtgcactcaaccttc

SEQ ID NO: 269612 - DNA, 25 bp, Probe Sequence
ggacagatggacagacagccaccct

SEQ ID NO: 269613 - DNA, 25 bp, Probe Sequence
ggaaatgcctcaagtacacactcca

SEQ ID NO: 269614 - DNA, 25 bp, Probe Sequence
ggacatagctcttgtgaacctttaa

SEQ ID NO: 269615 - DNA, 25 bp, Probe Sequence
ggacaagcttgcgaacacatctgtt

SEQ ID NO: 269616 - DNA, 25 bp, Probe Sequence
ggactacatggtgactgccagtgcc

SEQ ID NO: 269617 - DNA, 25 bp, Probe Sequence
ggactatggcaaggagtctcaggcc

SEQ ID NO: 269618 - DNA, 25 bp, Probe Sequence
ggaaatagaacctctaggcaccctc

SEQ ID NO: 269619 - DNA, 25 bp, Probe Sequence
ggacacatgaaacctcctaatgacc

SEQ ID NO: 269620 - DNA, 25 bp, Probe Sequence
ggacacattcaaccctggagagttc

SEQ ID NO: 269621 - DNA, 25 bp, Probe Sequence
ggaaattcaatcactgggagctcaa

SEQ ID NO: 269622 - DNA, 25 bp, Probe Sequence
ggaaattcaatgcattggtcacact

SEQ ID NO: 269623 - DNA, 25 bp, Probe Sequence
ggaacaacaggccttattccactgc

SEQ ID NO: 269624 - DNA, 25 bp, Probe Sequence
ggaactcctgcccaggatttcactg

SEQ ID NO: 269625 - DNA, 25 bp, Probe Sequence
ggacagctccaaggagttgtctcct

SEQ ID NO: 269626 - DNA, 25 bp, Probe Sequence
ggaactaccaagcatgtggctcctg

SEQ ID NO: 269627 - DNA, 25 bp, Probe Sequence
ggaaatcattgaaggtctggatccc

SEQ ID NO: 269628 - DNA, 25 bp, Probe Sequence
ggaaatcttacagcacgtgccatcc

SEQ ID NO: 269629 - DNA, 25 bp, Probe Sequence
ggaaaggattcctagagggatcagc

SEQ ID NO: 269630 - DNA, 25 bp, Probe Sequence
ggaaatccttcctgcgaggtcaggg

SEQ ID NO: 269631 - DNA, 25 bp, Probe Sequence
ggaaacagttcctcggagtggagag

SEQ ID NO: 269632 - DNA, 25 bp, Probe Sequence
ggaaacagttcctcggagtggagag

SEQ ID NO: 269633 - DNA, 25 bp, Probe Sequence
ggaaacagttcctcggagtggagag

SEQ ID NO: 269634 - DNA, 25 bp, Probe Sequence
ggacagtcagccctaaaggagggag

SEQ ID NO: 269635 - DNA, 25 bp, Probe Sequence
ggacagatggaccaaaagatgggtg

SEQ ID NO: 269636 - DNA, 25 bp, Probe Sequence
ggacatgagccaggtcaagcagcaa

SEQ ID NO: 269637 - DNA, 25 bp, Probe Sequence
ggacagatggcactgattagatcaa

SEQ ID NO: 269638 - DNA, 25 bp, Probe Sequence
ggcatcaggctgcttggacatgaaa

SEQ ID NO: 269639 - DNA, 25 bp, Probe Sequence
ggacatagtcgtggatcactacaag

SEQ ID NO: 269640 - DNA, 25 bp, Probe Sequence
ggactactcggccatgatcaagcac

SEQ ID NO: 269641 - DNA, 25 bp, Probe Sequence
ggactattcagggagctgcaaatgc

SEQ ID NO: 269642 - DNA, 25 bp, Probe Sequence
ggacttctgcagctatgcgcaatgt

SEQ ID NO: 269643 - DNA, 25 bp, Probe Sequence
ggacttcatgcaagttggcagtggt

SEQ ID NO: 269644 - DNA, 25 bp, Probe Sequence
ggacttcatcttctacagtgtgctg

SEQ ID NO: 269645 - DNA, 25 bp, Probe Sequence
ggacttcatcttctacagtgtgctg

SEQ ID NO: 269646 - DNA, 25 bp, Probe Sequence
ggacttcagactcatcagagactct

SEQ ID NO: 269647 - DNA, 25 bp, Probe Sequence
ggacttagcctaacagatgagctgt

SEQ ID NO: 269648 - DNA, 25 bp, Probe Sequence
ggacatcaagcctatcaagacagag

SEQ ID NO: 269649 - DNA, 25 bp, Probe Sequence
ggacatcaagtggtgaagtcaggcc

SEQ ID NO: 269650 - DNA, 25 bp, Probe Sequence
ggacacaagtctccagaacggccat

SEQ ID NO: 269651 - DNA, 25 bp, Probe Sequence
ggacacaacaccaaaaaggcttctt

SEQ ID NO: 269652 - DNA, 25 bp, Probe Sequence
ggacacaacaccaaaaaggcttctt

SEQ ID NO: 269653 - DNA, 25 bp, Probe Sequence
ggacacaacaccaaaaaggcttctt

SEQ ID NO: 269654 - DNA, 25 bp, Probe Sequence
ggacacaacaccaaaaaggcttctt

SEQ ID NO: 269655 - DNA, 25 bp, Probe Sequence
ggacacagaactaaaactactactt

SEQ ID NO: 269656 - DNA, 25 bp, Probe Sequence
ggacaagagaaataaggcctacttc

SEQ ID NO: 269657 - DNA, 25 bp, Probe Sequence
ggacaagagaaataaggcctacttc

SEQ ID NO: 269658 - DNA, 25 bp, Probe Sequence
ggaaagaaataccaaccctgcaata

SEQ ID NO: 269659 - DNA, 25 bp, Probe Sequence
ggaaaggaaacagcatccggcgcag

SEQ ID NO: 269660 - DNA, 25 bp, Probe Sequence
ggaaaccaaagagttctcaccaagc

SEQ ID NO: 269661 - DNA, 25 bp, Probe Sequence
ggaaatgcgaagtagttgctatagc

SEQ ID NO: 269662 - DNA, 25 bp, Probe Sequence
ggacatcaggggttatcatctataa

SEQ ID NO: 269663 - DNA, 25 bp, Probe Sequence
ggaatacttgggttcctatgaagtt

SEQ ID NO: 269664 - DNA, 25 bp, Probe Sequence
ggaaatttggtgtcaacctggagat

SEQ ID NO: 269665 - DNA, 25 bp, Probe Sequence
ggaaatttggagaagttgcggcaga

SEQ ID NO: 269666 - DNA, 25 bp, Probe Sequence
ggaaatgttggcagtagatgctcca

SEQ ID NO: 269667 - DNA, 25 bp, Probe Sequence
ggaaattggattccaagatccatca

SEQ ID NO: 269668 - DNA, 25 bp, Probe Sequence
ggaaagtggattttagccccagcag

SEQ ID NO: 269669 - DNA, 25 bp, Probe Sequence
ggacagactttctaatgaacccaat

SEQ ID NO: 269670 - DNA, 25 bp, Probe Sequence
ggacaactttcatattactaatctc

SEQ ID NO: 269671 - DNA, 25 bp, Probe Sequence
ggacaacttgtatctttctagcagc

SEQ ID NO: 269672 - DNA, 25 bp, Probe Sequence
ggacaatataccagcttttgcagca

SEQ ID NO: 269673 - DNA, 25 bp, Probe Sequence
ggaaataacctactatctagcaata

SEQ ID NO: 269674 - DNA, 25 bp, Probe Sequence
ggacagcaaaccattattgcatgca

SEQ ID NO: 269675 - DNA, 25 bp, Probe Sequence
ggacagaaagccaagtggactcaac

SEQ ID NO: 269676 - DNA, 25 bp, Probe Sequence
ggacaccaagtggaaggcccaagca

SEQ ID NO: 269677 - DNA, 25 bp, Probe Sequence
ggaaccaaggaaagctcggctggac

SEQ ID NO: 269678 - DNA, 25 bp, Probe Sequence
ggaactagcggaattactggaggaa

SEQ ID NO: 269679 - DNA, 25 bp, Probe Sequence
ggacagcggggaggtacgagaggac

SEQ ID NO: 269680 - DNA, 25 bp, Probe Sequence
ggacattggtggtttagagagagat

SEQ ID NO: 269681 - DNA, 25 bp, Probe Sequence
ggacatatggtttatctggcaagac

SEQ ID NO: 269682 - DNA, 25 bp, Probe Sequence
ggaaatgttttaatgccagggcctg

SEQ ID NO: 269683 - DNA, 25 bp, Probe Sequence
ggaaatgtttcctgcagcattaggt

SEQ ID NO: 269684 - DNA, 25 bp, Probe Sequence
ggacaacttctcggtgactcaagtg

SEQ ID NO: 269685 - DNA, 25 bp, Probe Sequence
ggacaccatttgggctagtttctgt

SEQ ID NO: 269686 - DNA, 25 bp, Probe Sequence
ggacaatttgtgggccatttaattc

SEQ ID NO: 269687 - DNA, 25 bp, Probe Sequence
ggacacttttcaatgcgtatttttc

SEQ ID NO: 269688 - DNA, 25 bp, Probe Sequence
ggacattttctcatgcatcttccta

SEQ ID NO: 269689 - DNA, 25 bp, Probe Sequence
ggacatatgtctccttttatgcctt

SEQ ID NO: 269690 - DNA, 25 bp, Probe Sequence
ggacatatgtctccttttatgcctt

SEQ ID NO: 269691 - DNA, 25 bp, Probe Sequence
ggaaagattccgactggatgcctgg

SEQ ID NO: 269692 - DNA, 25 bp, Probe Sequence
ggacaagatccgacatcgtgtcccg

SEQ ID NO: 269693 - DNA, 25 bp, Probe Sequence
ggaaaagccagagtactttcccctg

SEQ ID NO: 269694 - DNA, 25 bp, Probe Sequence
ggaaaactagatgcctgtaagggtg

SEQ ID NO: 269695 - DNA, 25 bp, Probe Sequence
ggaaacatgtagagtcctaagtttg

SEQ ID NO: 269696 - DNA, 25 bp, Probe Sequence
ggaaaatgcaagcgccctgaacttt

SEQ ID NO: 269697 - DNA, 25 bp, Probe Sequence
ggaaacagaagctcaccagaacaag

SEQ ID NO: 269698 - DNA, 25 bp, Probe Sequence
ggaaatctggactgacaaggataag

SEQ ID NO: 269699 - DNA, 25 bp, Probe Sequence
ggaagacggacgtggaggatcccca

SEQ ID NO: 269700 - DNA, 25 bp, Probe Sequence
ggaaaccagaagtctgtcaggatcc

SEQ ID NO: 269701 - DNA, 25 bp, Probe Sequence
ggacaactctccttttgatggacct

SEQ ID NO: 269702 - DNA, 25 bp, Probe Sequence
ggacattctcaatgttgtgaaaggc

SEQ ID NO: 269703 - DNA, 25 bp, Probe Sequence
ggcagcagtgaaccagttgtccaag

SEQ ID NO: 269704 - DNA, 25 bp, Probe Sequence
ggcagtaataaactctgttacagaa

SEQ ID NO: 269705 - DNA, 25 bp, Probe Sequence
ggacttaagagaatttgcctcagaa

SEQ ID NO: 269706 - DNA, 25 bp, Probe Sequence
ggacactcaagacttttgactgcca

SEQ ID NO: 269707 - DNA, 25 bp, Probe Sequence
ggacattgcaacttttgtggcagac

SEQ ID NO: 269708 - DNA, 25 bp, Probe Sequence
ggacagaaatcattatcttagccac

SEQ ID NO: 269709 - DNA, 25 bp, Probe Sequence
ggacaattcatctccattatgcctc

SEQ ID NO: 269710 - DNA, 25 bp, Probe Sequence
ggacattcgcaatgccatcatggcc

SEQ ID NO: 269711 - DNA, 25 bp, Probe Sequence
ggacttcgcagatgtcacattgccc

SEQ ID NO: 269712 - DNA, 25 bp, Probe Sequence
ggacatacgagatccagttctctca

SEQ ID NO: 269713 - DNA, 25 bp, Probe Sequence
ggcacaacaggctgccgattttgcc

SEQ ID NO: 269714 - DNA, 25 bp, Probe Sequence
aggataacctagcaattatagagct

SEQ ID NO: 269715 - DNA, 25 bp, Probe Sequence
ggacaggctacaatacaggtcagag

SEQ ID NO: 269716 - DNA, 25 bp, Probe Sequence
ggacagttatgaaacgagtcagctg

SEQ ID NO: 269717 - DNA, 25 bp, Probe Sequence
ggaagtttacaagaataccccagag

SEQ ID NO: 269718 - DNA, 25 bp, Probe Sequence
ggaaggttctaataataaagccagg

SEQ ID NO: 269719 - DNA, 25 bp, Probe Sequence
ggaaggtttcatcttcaaaaccaga

SEQ ID NO: 269720 - DNA, 25 bp, Probe Sequence
ggacacgaaccttattaaaactcag

SEQ ID NO: 269721 - DNA, 25 bp, Probe Sequence
ggacaccaacctcttgagcaatatc

SEQ ID NO: 269722 - DNA, 25 bp, Probe Sequence
ggacaacaaccatggtgagactcca

SEQ ID NO: 269723 - DNA, 25 bp, Probe Sequence
ggaaaaggccgaggtgcttaccagt

SEQ ID NO: 269724 - DNA, 25 bp, Probe Sequence
ggaacaagtgggggtgcttacgatc

SEQ ID NO: 269725 - DNA, 25 bp, Probe Sequence
ggaagaggctgaggaaccctacgaa

SEQ ID NO: 269726 - DNA, 25 bp, Probe Sequence
ggaaacttctggaacccaatctgaa

SEQ ID NO: 269727 - DNA, 25 bp, Probe Sequence
ggaaatttggatcaaggaagctaaa

SEQ ID NO: 269728 - DNA, 25 bp, Probe Sequence
ggaaatttggatgaagggagctaga

SEQ ID NO: 269729 - DNA, 25 bp, Probe Sequence
ggaaagggctatgtgggagagtcag

SEQ ID NO: 269730 - DNA, 25 bp, Probe Sequence
ggacaagggcttctgaggccagcca

SEQ ID NO: 269731 - DNA, 25 bp, Probe Sequence
ggacaagttgatgtggggccagcca

SEQ ID NO: 269732 - DNA, 25 bp, Probe Sequence
ggacatgatgtgtatttgggctcca

SEQ ID NO: 269733 - DNA, 25 bp, Probe Sequence
ggacagggttctaggagctcctggg

SEQ ID NO: 269734 - DNA, 25 bp, Probe Sequence
ggacaggagttcttgagaccttgtg

SEQ ID NO: 269735 - DNA, 25 bp, Probe Sequence
ggacaggtggtaaagacacttgtgg

SEQ ID NO: 269736 - DNA, 25 bp, Probe Sequence
ggacaccttgtaaagaagccttgaa

SEQ ID NO: 269737 - DNA, 25 bp, Probe Sequence
ggacacttactcaacagaagcacct

SEQ ID NO: 269738 - DNA, 25 bp, Probe Sequence
ggacactacacccagcaatagagac

SEQ ID NO: 269739 - DNA, 25 bp, Probe Sequence
ggacagtcagccctgaactcaagtc

SEQ ID NO: 269740 - DNA, 25 bp, Probe Sequence
ggacacctgtcacaagctcaagtac

SEQ ID NO: 269741 - DNA, 25 bp, Probe Sequence
ggacaggcttcagcatcagcaaaaa

SEQ ID NO: 269742 - DNA, 25 bp, Probe Sequence
ggacagtgcttctgacaggaatgga

SEQ ID NO: 269743 - DNA, 25 bp, Probe Sequence
ggacagtgactctcagcagtgttta

SEQ ID NO: 269744 - DNA, 25 bp, Probe Sequence
ggacaggcaccttgcagagcaactt

SEQ ID NO: 269745 - DNA, 25 bp, Probe Sequence
ggacaagcacatagcaagctgaact

SEQ ID NO: 269746 - DNA, 25 bp, Probe Sequence
ggaaatgcatctggaggctaagtat

SEQ ID NO: 269747 - DNA, 25 bp, Probe Sequence
ggacaaagctggcgctcaaggtcac

SEQ ID NO: 269748 - DNA, 25 bp, Probe Sequence
ggacataagcattgggccatagttt

SEQ ID NO: 269749 - DNA, 25 bp, Probe Sequence
ggacatagcagatatgctcctcatt

SEQ ID NO: 269750 - DNA, 25 bp, Probe Sequence
ggacatgcacagtagaattccattg

SEQ ID NO: 269751 - DNA, 25 bp, Probe Sequence
ggacatcatatctataatgcccttc

SEQ ID NO: 269752 - DNA, 25 bp, Probe Sequence
ggacacgaatgaagcctccttcagt

SEQ ID NO: 269753 - DNA, 25 bp, Probe Sequence
ggacatggaagaggcctctctctgc

SEQ ID NO: 269754 - DNA, 25 bp, Probe Sequence
ggacaggagaatggcacactttcaa

SEQ ID NO: 269755 - DNA, 25 bp, Probe Sequence
ggacaggagaatgatgcaccagcaa

SEQ ID NO: 269756 - DNA, 25 bp, Probe Sequence
ggacagggataggtaccacaaagat

SEQ ID NO: 269757 - DNA, 25 bp, Probe Sequence
ggacacgggagagaccagcatgcta

SEQ ID NO: 269758 - DNA, 25 bp, Probe Sequence
ggacattcaggaggcaagtcaatct

SEQ ID NO: 269759 - DNA, 25 bp, Probe Sequence
ggacattacacagcatacgcaactc

SEQ ID NO: 269760 - DNA, 25 bp, Probe Sequence
ggacactaccattatgacactactc

SEQ ID NO: 269761 - DNA, 25 bp, Probe Sequence
ggacatgaaccataaccatactacc

SEQ ID NO: 269762 - DNA, 25 bp, Probe Sequence
ggacaaatttaatcttactggactc

SEQ ID NO: 269763 - DNA, 25 bp, Probe Sequence
ggaaaacttcaatatctctcggatc

SEQ ID NO: 269764 - DNA, 25 bp, Probe Sequence
ggaaacaaacgatatatctcatggc

SEQ ID NO: 269765 - DNA, 25 bp, Probe Sequence
ggaacactatacctattattcggcg

SEQ ID NO: 269766 - DNA, 25 bp, Probe Sequence
ggaaacttagcttttgatgtctcca

SEQ ID NO: 269767 - DNA, 25 bp, Probe Sequence
ggaaatagtagtttcatgccctcac

SEQ ID NO: 269768 - DNA, 25 bp, Probe Sequence
ggaacggttggatcagccgatgaca

SEQ ID NO: 269769 - DNA, 25 bp, Probe Sequence
ggcaacggttgctccaaaagtcaaa

SEQ ID NO: 269770 - DNA, 25 bp, Probe Sequence
ggcaaaggggcatgatccagggtcc

SEQ ID NO: 269771 - DNA, 25 bp, Probe Sequence
ggcaacagggagtttccttattcac

SEQ ID NO: 269772 - DNA, 25 bp, Probe Sequence
ggcagggaaaatatcctctacctga

SEQ ID NO: 269773 - DNA, 25 bp, Probe Sequence
ggaaaaaattcagcgtcgacctcat

SEQ ID NO: 269774 - DNA, 25 bp, Probe Sequence
ggaaagaagagtgacgttgtctaag

SEQ ID NO: 269775 - DNA, 25 bp, Probe Sequence
ggaaagaggagaggcacccgatata

SEQ ID NO: 269776 - DNA, 25 bp, Probe Sequence
ggaaagaggagaggcacccgatata

SEQ ID NO: 269777 - DNA, 25 bp, Probe Sequence
ggaaaggggcacgggcatgtgaaat

SEQ ID NO: 269778 - DNA, 25 bp, Probe Sequence
ggacaccagggctcggtggacacaa

SEQ ID NO: 269779 - DNA, 25 bp, Probe Sequence
ggacaccgtgaggacaagtgaggcc

SEQ ID NO: 269780 - DNA, 25 bp, Probe Sequence
ggacaccgggagcagcagagaagcc

SEQ ID NO: 269781 - DNA, 25 bp, Probe Sequence
ggacaattgggagggcagcaggcag

SEQ ID NO: 269782 - DNA, 25 bp, Probe Sequence
ggacaaatggcgttcagcagcgggt

SEQ ID NO: 269783 - DNA, 25 bp, Probe Sequence
ggacatgaatggttccccacaggat

SEQ ID NO: 269784 - DNA, 25 bp, Probe Sequence
ggacatgaaggagtcccgccaggtg

SEQ ID NO: 269785 - DNA, 25 bp, Probe Sequence
ggacaacaggaagctccagagcggc

SEQ ID NO: 269786 - DNA, 25 bp, Probe Sequence
ggacaccccaaattccagaatggct

SEQ ID NO: 269787 - DNA, 25 bp, Probe Sequence
ggacaccccaaattccagaatggct

SEQ ID NO: 269788 - DNA, 25 bp, Probe Sequence
ggaaagtcaaatttcctgaattgct

SEQ ID NO: 269789 - DNA, 25 bp, Probe Sequence
ggacaacccacatatccaaattgac

SEQ ID NO: 269790 - DNA, 25 bp, Probe Sequence
ggacagaccaaaaatcaacctatca

SEQ ID NO: 269791 - DNA, 25 bp, Probe Sequence
ggacaacatagtaataccctctctc

SEQ ID NO: 269792 - DNA, 25 bp, Probe Sequence
ggacaacctcttagagtctctctct

SEQ ID NO: 269793 - DNA, 25 bp, Probe Sequence
ggacacacttcggcgagtgcttaac

SEQ ID NO: 269794 - DNA, 25 bp, Probe Sequence
ggacacaatcaccccaggttgagat

SEQ ID NO: 269795 - DNA, 25 bp, Probe Sequence
ggaaaacaagtccacgttgagatgc

SEQ ID NO: 269796 - DNA, 25 bp, Probe Sequence
ggaaatgactccccagcgtggagac

SEQ ID NO: 269797 - DNA, 25 bp, Probe Sequence
ggaaagccccagggcactgtgacca

SEQ ID NO: 269798 - DNA, 25 bp, Probe Sequence
ggaaaacctatggaacctactgcaa

SEQ ID NO: 269799 - DNA, 25 bp, Probe Sequence
ggacacatactttgaatacctttca

SEQ ID NO: 269800 - DNA, 25 bp, Probe Sequence
ggacactaactgggttccatgtgat

SEQ ID NO: 269801 - DNA, 25 bp, Probe Sequence
ggacacgaactggagattaacgtac

SEQ ID NO: 269802 - DNA, 25 bp, Probe Sequence
ggacatcaaacatagctaaatccta

SEQ ID NO: 269803 - DNA, 25 bp, Probe Sequence
ggacatgtccctaagataaaccaga

SEQ ID NO: 269804 - DNA, 25 bp, Probe Sequence
ggacatatggccagaggaaagaaga

SEQ ID NO: 269805 - DNA, 25 bp, Probe Sequence
ggacatgaggatataagaacaggca

SEQ ID NO: 269806 - DNA, 25 bp, Probe Sequence
ggacatgacggaaaagcttgctgat

SEQ ID NO: 269807 - DNA, 25 bp, Probe Sequence
ggacatcctggacgacagtggctac

SEQ ID NO: 269808 - DNA, 25 bp, Probe Sequence
ggacacactgaggacaatgcggcta

SEQ ID NO: 269809 - DNA, 25 bp, Probe Sequence
ggacagcactgacagcgagtggccc

SEQ ID NO: 269810 - DNA, 25 bp, Probe Sequence
ggacagacatagcccaaggaggcac

SEQ ID NO: 269811 - DNA, 25 bp, Probe Sequence
ggacagccaagctcagcggatggcc

SEQ ID NO: 269812 - DNA, 25 bp, Probe Sequence
ggacagcacagacttcaccagcacc

SEQ ID NO: 269813 - DNA, 25 bp, Probe Sequence
ggacatgcaagacaatgctgctgcc

SEQ ID NO: 269814 - DNA, 25 bp, Probe Sequence
ggacagcaggaccagatctgctatc

SEQ ID NO: 269815 - DNA, 25 bp, Probe Sequence
ggacagctgtgatgagttgatacca

SEQ ID NO: 269816 - DNA, 25 bp, Probe Sequence
ggacactgcatgttgatgttgaatc

SEQ ID NO: 269817 - DNA, 25 bp, Probe Sequence
ggacactgatgtcatcctcatgtgc

SEQ ID NO: 269818 - DNA, 25 bp, Probe Sequence
ggacacaggatgttcagtctgcagc

SEQ ID NO: 269819 - DNA, 25 bp, Probe Sequence
ggacacagtgattgcctgggacttc

SEQ ID NO: 269820 - DNA, 25 bp, Probe Sequence
ggacaagacatctctgggttctgac

SEQ ID NO: 269821 - DNA, 25 bp, Probe Sequence
ggacaagtcacattcatggggttca

SEQ ID NO: 269822 - DNA, 25 bp, Probe Sequence
ggacacagtagccaatggggtgagc

SEQ ID NO: 269823 - DNA, 25 bp, Probe Sequence
ggacatctatgccatcggggtgggc

SEQ ID NO: 269824 - DNA, 25 bp, Probe Sequence
ggacactgtccaagggagtggcccc

SEQ ID NO: 269825 - DNA, 25 bp, Probe Sequence
ggacactgtccatgaagcactgagc

SEQ ID NO: 269826 - DNA, 25 bp, Probe Sequence
ggacacttcctgaatggcatcagtg

SEQ ID NO: 269827 - DNA, 25 bp, Probe Sequence
ggacagcagaacgctggcatcagct

SEQ ID NO: 269828 - DNA, 25 bp, Probe Sequence
ggacagagacagagcgtgcacacgt

SEQ ID NO: 269829 - DNA, 25 bp, Probe Sequence
ggacaagacaaccggaagcttctat

SEQ ID NO: 269830 - DNA, 25 bp, Probe Sequence
ggaatagacaaggacggccattttc

SEQ ID NO: 269831 - DNA, 25 bp, Probe Sequence
ggaaaacagcatgtgggtatttgtc

SEQ ID NO: 269832 - DNA, 25 bp, Probe Sequence
ggaaagaatgcgtgctggttttgtt

SEQ ID NO: 269833 - DNA, 25 bp, Probe Sequence
ggaaaaatcaacgtggcctttgagt

SEQ ID NO: 269834 - DNA, 25 bp, Probe Sequence
ggaaaacaaacctggctgtatgtgg

SEQ ID NO: 269835 - DNA, 25 bp, Probe Sequence
ggaaatcacatatctcataaggaat

SEQ ID NO: 269836 - DNA, 25 bp, Probe Sequence
ggaaatagatcgttatgccagtgaa

SEQ ID NO: 269837 - DNA, 25 bp, Probe Sequence
ggacaagcagatgggctaccagtgc

SEQ ID NO: 269838 - DNA, 25 bp, Probe Sequence
ggacacagagacagtacctgtaatg

SEQ ID NO: 269839 - DNA, 25 bp, Probe Sequence
ggacatcagaacatgcttccatata

SEQ ID NO: 269840 - DNA, 25 bp, Probe Sequence
ggaaaaactactcctcattatcatc

SEQ ID NO: 269841 - DNA, 25 bp, Probe Sequence
ggaaaagcaaaccagaatcttattt

SEQ ID NO: 269842 - DNA, 25 bp, Probe Sequence
ggaaataaaacctactgatttgtat

SEQ ID NO: 269843 - DNA, 25 bp, Probe Sequence
tggaaatttaaatagtagtctggaa

SEQ ID NO: 269844 - DNA, 25 bp, Probe Sequence
ggaaatcttcagcaacgtcagttgg

SEQ ID NO: 269845 - DNA, 25 bp, Probe Sequence
ggaaacttaagatgcagtaattatg

SEQ ID NO: 269846 - DNA, 25 bp, Probe Sequence
ggaacagttccgtaagctctttatt

SEQ ID NO: 269847 - DNA, 25 bp, Probe Sequence
ggaacgttctatgaatttcgtactt

SEQ ID NO: 269848 - DNA, 25 bp, Probe Sequence
ggaacgtttgatgggactctccctt

SEQ ID NO: 269849 - DNA, 25 bp, Probe Sequence
ggaatggttgttgttttccactgag

SEQ ID NO: 269850 - DNA, 25 bp, Probe Sequence
ggaaggtgtttcattttggtgtgca

SEQ ID NO: 269851 - DNA, 25 bp, Probe Sequence
ggaagggtcgttttgatgtcaggtg

SEQ ID NO: 269852 - DNA, 25 bp, Probe Sequence
ggaagggtcgttttgatgtcaggtg

SEQ ID NO: 269853 - DNA, 25 bp, Probe Sequence
ggaactggtagtcttgtttgggtga

SEQ ID NO: 269854 - DNA, 25 bp, Probe Sequence
ggacacaggtttcttctatcttgtt

SEQ ID NO: 269855 - DNA, 25 bp, Probe Sequence
ggacagtggtttcattcataggtat

SEQ ID NO: 269856 - DNA, 25 bp, Probe Sequence
ggacagttgatttccaacatgaggt

SEQ ID NO: 269857 - DNA, 25 bp, Probe Sequence
ggaaatatgttctccacgggtagtg

SEQ ID NO: 269858 - DNA, 25 bp, Probe Sequence
ggaaatgattcttttaccctgtagt

SEQ ID NO: 269859 - DNA, 25 bp, Probe Sequence
ggaaatctagtcatcttccctgtga

SEQ ID NO: 269860 - DNA, 25 bp, Probe Sequence
ggacaatgacaagtacatcgccctg

SEQ ID NO: 269861 - DNA, 25 bp, Probe Sequence
ggaacaatgaactcatctgccctag

SEQ ID NO: 269862 - DNA, 25 bp, Probe Sequence
ggaaacaatccatatgcgaccacag

SEQ ID NO: 269863 - DNA, 25 bp, Probe Sequence
ggacaacaataatcacaacaacgaa

SEQ ID NO: 269864 - DNA, 25 bp, Probe Sequence
ggaagtcataaatattagatacgaa

SEQ ID NO: 269865 - DNA, 25 bp, Probe Sequence
ggaattatgttatactagactccat

SEQ ID NO: 269866 - DNA, 25 bp, Probe Sequence
ggaaatgtgttagcctcagacacta

SEQ ID NO: 269867 - DNA, 25 bp, Probe Sequence
ggacaagagtctgagccgaacacca

SEQ ID NO: 269868 - DNA, 25 bp, Probe Sequence
ggacaagagtctgagccgaacacca

SEQ ID NO: 269869 - DNA, 25 bp, Probe Sequence
ggacaaagcacggaagctgtacacc

SEQ ID NO: 269870 - DNA, 25 bp, Probe Sequence
ggaactcagccaatagccatgtaac

SEQ ID NO: 269871 - DNA, 25 bp, Probe Sequence
ggaaatcacccaaggcttgcaacaa

SEQ ID NO: 269872 - DNA, 25 bp, Probe Sequence
ggaaactcacactcgcttaataaaa

SEQ ID NO: 269873 - DNA, 25 bp, Probe Sequence
ggacaaactcactcagtaaaacata

SEQ ID NO: 269874 - DNA, 25 bp, Probe Sequence
ggaaagcaacgaaaataataaatat

SEQ ID NO: 269875 - DNA, 25 bp, Probe Sequence
ggaaaggcaggagaaagatagacat

SEQ ID NO: 269876 - DNA, 25 bp, Probe Sequence
ggaacatgccaggagcacaaagaaa

SEQ ID NO: 269877 - DNA, 25 bp, Probe Sequence
ggacacagctcggtggaagatgcga

SEQ ID NO: 269878 - DNA, 25 bp, Probe Sequence
ggacagagtgccctggggcatccac

SEQ ID NO: 269879 - DNA, 25 bp, Probe Sequence
ggacagtgtgccctgatctggataa

SEQ ID NO: 269880 - DNA, 25 bp, Probe Sequence
ggacaggtgcctcattagcttacta

SEQ ID NO: 269881 - DNA, 25 bp, Probe Sequence
ggcatcaggtgtttagtaggttcca

SEQ ID NO: 269882 - DNA, 25 bp, Probe Sequence
ggaagaggtataagtttgtggccac

SEQ ID NO: 269883 - DNA, 25 bp, Probe Sequence
ggaataacttacctttgtgctccac

SEQ ID NO: 269884 - DNA, 25 bp, Probe Sequence
ggaaaactgtcgccagttgtgcact

SEQ ID NO: 269885 - DNA, 25 bp, Probe Sequence
ggacaagactgctctagattggccc

SEQ ID NO: 269886 - DNA, 25 bp, Probe Sequence
ggacaacacatgtgaggagtaccac

SEQ ID NO: 269887 - DNA, 25 bp, Probe Sequence
ggacaatgcctcttaaagtactgct

SEQ ID NO: 269888 - DNA, 25 bp, Probe Sequence
ggacaatcttattcctattactgtg

SEQ ID NO: 269889 - DNA, 25 bp, Probe Sequence
ggacaagcagtcccttaatattgag

SEQ ID NO: 269890 - DNA, 25 bp, Probe Sequence
ggacaagcacttttttatgatgtac

SEQ ID NO: 269891 - DNA, 25 bp, Probe Sequence
ggaaatgccgcccatttaagtacag

SEQ ID NO: 269892 - DNA, 25 bp, Probe Sequence
taaattggccctctaggcagtaggc

SEQ ID NO: 269893 - DNA, 25 bp, Probe Sequence
taagactgggtcctttggagttact

SEQ ID NO: 269894 - DNA, 25 bp, Probe Sequence
ggaagctgaggtgatttggggtaat

SEQ ID NO: 269895 - DNA, 25 bp, Probe Sequence
ggaaatgaggtgtatgtatggatct

SEQ ID NO: 269896 - DNA, 25 bp, Probe Sequence
ggcaagtgggctgatggggtccgcc

SEQ ID NO: 269897 - DNA, 25 bp, Probe Sequence
ggacagtgggatgtggtgttccaca

SEQ ID NO: 269898 - DNA, 25 bp, Probe Sequence
ggacaggcggccctggatgtttatc

SEQ ID NO: 269899 - DNA, 25 bp, Probe Sequence
tggacgcaatggccgtagcgtttac

SEQ ID NO: 269900 - DNA, 25 bp, Probe Sequence
ggacaagtgcagcctgtcagtttta

SEQ ID NO: 269901 - DNA, 25 bp, Probe Sequence
ggacaactgcagccagagactctct

SEQ ID NO: 269902 - DNA, 25 bp, Probe Sequence
ggacacagcgcaccagaagctaaag

SEQ ID NO: 269903 - DNA, 25 bp, Probe Sequence
ggacacaggcacgactgcttgaaag

SEQ ID NO: 269904 - DNA, 25 bp, Probe Sequence
ggaaattacatattgctgtgccaag

SEQ ID NO: 269905 - DNA, 25 bp, Probe Sequence
ggacaaatcagttctctgtgaccag

SEQ ID NO: 269906 - DNA, 25 bp, Probe Sequence
ggaaaacattactgtcacgcagggt

SEQ ID NO: 269907 - DNA, 25 bp, Probe Sequence
ggaagtacttatcaggtagcagagg

SEQ ID NO: 269908 - DNA, 25 bp, Probe Sequence
ggaaatgttctaaaggtggtgaggc

SEQ ID NO: 269909 - DNA, 25 bp, Probe Sequence
ggaactgtgtagacaaggtaccagg

SEQ ID NO: 269910 - DNA, 25 bp, Probe Sequence
ggaactgtgtagacaaggtaccagg

SEQ ID NO: 269911 - DNA, 25 bp, Probe Sequence
ggaacatatgtagagcacttaatgg

SEQ ID NO: 269912 - DNA, 25 bp, Probe Sequence
ggaacttggagttgcacttaacctt

SEQ ID NO: 269913 - DNA, 25 bp, Probe Sequence
ggaaattagtcctagtgttaccaag

SEQ ID NO: 269914 - DNA, 25 bp, Probe Sequence
ggcaaagtagtccaggtttacagga

SEQ ID NO: 269915 - DNA, 25 bp, Probe Sequence
ggaaaatatgcccaggttaccaaca

SEQ ID NO: 269916 - DNA, 25 bp, Probe Sequence
ggacaagattgacaggtatgcccag

SEQ ID NO: 269917 - DNA, 25 bp, Probe Sequence
ggaaagcttgggtgtgatcttcagt

SEQ ID NO: 269918 - DNA, 25 bp, Probe Sequence
ggaaagcttgggtgtgatcttcagt

SEQ ID NO: 269919 - DNA, 25 bp, Probe Sequence
ggaaatgtttgtttggtctccatgc

SEQ ID NO: 269920 - DNA, 25 bp, Probe Sequence
ggaaagggtcacgtggtcccatgtt

SEQ ID NO: 269921 - DNA, 25 bp, Probe Sequence
ggaaatatggtatgaggtcgccact

SEQ ID NO: 269922 - DNA, 25 bp, Probe Sequence
ggaaattgactgtgaggactggatc

SEQ ID NO: 269923 - DNA, 25 bp, Probe Sequence
ggaaattcatggttggctacgaaat

SEQ ID NO: 269924 - DNA, 25 bp, Probe Sequence
ggaagattatggtgtgccacgcttt

SEQ ID NO: 269925 - DNA, 25 bp, Probe Sequence
ggaagattatgtcttcccctctttc

SEQ ID NO: 269926 - DNA, 25 bp, Probe Sequence
ggaagatatttgcttaccccttaga

SEQ ID NO: 269927 - DNA, 25 bp, Probe Sequence
ggaacattgttggaaacccttccag

SEQ ID NO: 269928 - DNA, 25 bp, Probe Sequence
ggaaaatgtgatgaaaccctatgta

SEQ ID NO: 269929 - DNA, 25 bp, Probe Sequence
ggaaaaggttaataattcatgccaa

SEQ ID NO: 269930 - DNA, 25 bp, Probe Sequence
ggaaaacgtatcacctttcccagat

SEQ ID NO: 269931 - DNA, 25 bp, Probe Sequence
ggaagacaagttgaccgtgtcccgt

SEQ ID NO: 269932 - DNA, 25 bp, Probe Sequence
ggaaaagacttgctccagtctcctc

SEQ ID NO: 269933 - DNA, 25 bp, Probe Sequence
ggcaagtaacttctgacttactgtc

SEQ ID NO: 269934 - DNA, 25 bp, Probe Sequence
tggaaggaactttcggctataattc

SEQ ID NO: 269935 - DNA, 25 bp, Probe Sequence
ggaaaagacaccttgcctataatta

SEQ ID NO: 269936 - DNA, 25 bp, Probe Sequence
ggaaataaattctagtctctcctta

SEQ ID NO: 269937 - DNA, 25 bp, Probe Sequence
ggaaatcaaagttggagttgcttac

SEQ ID NO: 269938 - DNA, 25 bp, Probe Sequence
ggaaatccaaattctgtggtgcttt

SEQ ID NO: 269939 - DNA, 25 bp, Probe Sequence
ggaaatgaaccgccttggtgcttct

SEQ ID NO: 269940 - DNA, 25 bp, Probe Sequence
ggaactaaccagtccttgatgttgt

SEQ ID NO: 269941 - DNA, 25 bp, Probe Sequence
ggaactaaccagtccttgatgttgt

SEQ ID NO: 269942 - DNA, 25 bp, Probe Sequence
ggaactaaccagtccttgatgttgt

SEQ ID NO: 269943 - DNA, 25 bp, Probe Sequence
ggaacaaacgttggttgtgtgtgtg

SEQ ID NO: 269944 - DNA, 25 bp, Probe Sequence
ggaaaatgccccagtcctgggtgcc

SEQ ID NO: 269945 - DNA, 25 bp, Probe Sequence
ggaacaggcccgagtactaaaggag

SEQ ID NO: 269946 - DNA, 25 bp, Probe Sequence
ggaacggcctggtgacactaagagc

SEQ ID NO: 269947 - DNA, 25 bp, Probe Sequence
ggaacggctttggcagacagtaacg

SEQ ID NO: 269948 - DNA, 25 bp, Probe Sequence
ggacacgttgctactggaaatgcaa

SEQ ID NO: 269949 - DNA, 25 bp, Probe Sequence
ggacagcttttttaaaggcaatgtg

SEQ ID NO: 269950 - DNA, 25 bp, Probe Sequence
ggacagagacctttgtaaccaatgg

SEQ ID NO: 269951 - DNA, 25 bp, Probe Sequence
ggcaaaactctacttaatccaatgg

SEQ ID NO: 269952 - DNA, 25 bp, Probe Sequence
ggaaatatcttcccatatataactg

SEQ ID NO: 269953 - DNA, 25 bp, Probe Sequence
ggaactttgccagcattgatgaacg

SEQ ID NO: 269954 - DNA, 25 bp, Probe Sequence
ggaactgtttatgattattactgga

SEQ ID NO: 269955 - DNA, 25 bp, Probe Sequence
ggaactcctctaaaaattacagtat

SEQ ID NO: 269956 - DNA, 25 bp, Probe Sequence
ggaactccctgaaaagctaaagctc

SEQ ID NO: 269957 - DNA, 25 bp, Probe Sequence
ggaacccccaaatcgatggagtcac

SEQ ID NO: 269958 - DNA, 25 bp, Probe Sequence
ggacacccctcgaaggagagggcgc

SEQ ID NO: 269959 - DNA, 25 bp, Probe Sequence
ggacacgctcatcagccaggagagc

SEQ ID NO: 269960 - DNA, 25 bp, Probe Sequence
ggacaaccacaaggcagacatcagc

SEQ ID NO: 269961 - DNA, 25 bp, Probe Sequence
ggaaatatacgaacagccacagcta

SEQ ID NO: 269962 - DNA, 25 bp, Probe Sequence
ggaaaaactggctacccaatatggc

SEQ ID NO: 269963 - DNA, 25 bp, Probe Sequence
ggacaaaactggtccaagaatttga

SEQ ID NO: 269964 - DNA, 25 bp, Probe Sequence
ggacaaaccgagtgcaatgaatgat

SEQ ID NO: 269965 - DNA, 25 bp, Probe Sequence
ggacaacactcggaagatcataata

SEQ ID NO: 269966 - DNA, 25 bp, Probe Sequence
ggaaatacgtggtaattcattataa

SEQ ID NO: 269967 - DNA, 25 bp, Probe Sequence
ggaaatggttactcattctgtataa

SEQ ID NO: 269968 - DNA, 25 bp, Probe Sequence
ggaaatggtttttagtgcgtatatt

SEQ ID NO: 269969 - DNA, 25 bp, Probe Sequence
ggaaaggttctttacatggcagaat

SEQ ID NO: 269970 - DNA, 25 bp, Probe Sequence
ggacaaggttctggaaagagaccag

SEQ ID NO: 269971 - DNA, 25 bp, Probe Sequence
ggcaaacgtccacaaaggtcacagg

SEQ ID NO: 269972 - DNA, 25 bp, Probe Sequence
ggcaaacctcacgcaaggcgaagac

SEQ ID NO: 269973 - DNA, 25 bp, Probe Sequence
ggacagaccacaggaaaggggaatg

SEQ ID NO: 269974 - DNA, 25 bp, Probe Sequence
ggacaaccaattccaggggaagtgg

SEQ ID NO: 269975 - DNA, 25 bp, Probe Sequence
ggaaagtaagggggcgtgaagcttg

SEQ ID NO: 269976 - DNA, 25 bp, Probe Sequence
ggacaagataaacggagctggtggc

SEQ ID NO: 269977 - DNA, 25 bp, Probe Sequence
ggcaccaatggaacaggttggggag

SEQ ID NO: 269978 - DNA, 25 bp, Probe Sequence
ggaacactgtgaaagttacttgggg

SEQ ID NO: 269979 - DNA, 25 bp, Probe Sequence
ggaaactgcaaatgtccccttgatg

SEQ ID NO: 269980 - DNA, 25 bp, Probe Sequence
ggaaactgcaaatgtccccttgatg

SEQ ID NO: 269981 - DNA, 25 bp, Probe Sequence
ggaaactgcaaatgtccccttgatg

SEQ ID NO: 269982 - DNA, 25 bp, Probe Sequence
ggaatgacaaaataccccaaataat

SEQ ID NO: 269983 - DNA, 25 bp, Probe Sequence
ggcaaaccttatgacccacagaatt

SEQ ID NO: 269984 - DNA, 25 bp, Probe Sequence
ggaaaccttccagccaacatgaaga

SEQ ID NO: 269985 - DNA, 25 bp, Probe Sequence
ggaaacctggcctgacagacaagca

SEQ ID NO: 269986 - DNA, 25 bp, Probe Sequence
ggaagtccatctcatcgaaaacaca

SEQ ID NO: 269987 - DNA, 25 bp, Probe Sequence
ggaagctaaatgataaaaacacatg

SEQ ID NO: 269988 - DNA, 25 bp, Probe Sequence
ggaaattcacagactaaaccaggag

SEQ ID NO: 269989 - DNA, 25 bp, Probe Sequence
ggaaatagtccagtaagatctcatg

SEQ ID NO: 269990 - DNA, 25 bp, Probe Sequence
ggaagacttcgagacgattgatgca

SEQ ID NO: 269991 - DNA, 25 bp, Probe Sequence
ggaaagttcagatagagattaccat

SEQ ID NO: 269992 - DNA, 25 bp, Probe Sequence
ggaaagttgcgttacctgtcactat

SEQ ID NO: 269993 - DNA, 25 bp, Probe Sequence
ggaacatttccattacctggaatac

SEQ ID NO: 269994 - DNA, 25 bp, Probe Sequence
ggaacaattgagtaaccatggacac

SEQ ID NO: 269995 - DNA, 25 bp, Probe Sequence
ggaacaattggactgattcatgcta

SEQ ID NO: 269996 - DNA, 25 bp, Probe Sequence
ggaaatcaaggacttcctgctcaca

SEQ ID NO: 269997 - DNA, 25 bp, Probe Sequence
ggacaatcatgtgcacttcccaaaa

SEQ ID NO: 269998 - DNA, 25 bp, Probe Sequence
ggacagaagctccagcatttgccca

SEQ ID NO: 269999 - DNA, 25 bp, Probe Sequence
ggacaatgagaccaatatagcccaa

SEQ ID NO: 270000 - DNA, 25 bp, Probe Sequence
ggaagattgaggataagcccaacaa

SEQ ID NO: 270001 - DNA, 25 bp, Probe Sequence
ggacagcattgatgattctacccaa

SEQ ID NO: 270002 - DNA, 25 bp, Probe Sequence
ggaacaaatgtgatctgaccacaaa

SEQ ID NO: 270003 - DNA, 25 bp, Probe Sequence
ggacacaaaggacctcctcaaggag

SEQ ID NO: 270004 - DNA, 25 bp, Probe Sequence
ggaacaggaacgccttctcaaggag

SEQ ID NO: 270005 - DNA, 25 bp, Probe Sequence
ggaataagactcggtctccaaaaga

SEQ ID NO: 270006 - DNA, 25 bp, Probe Sequence
ggaaaacacgccttgtcctgaagaa

SEQ ID NO: 270007 - DNA, 25 bp, Probe Sequence
ggaaagacacctctgtctgggaaga

SEQ ID NO: 270008 - DNA, 25 bp, Probe Sequence
ggacacaaaccttctagcttggaaa

SEQ ID NO: 270009 - DNA, 25 bp, Probe Sequence
ggacaagaacacgtctggctaggag

SEQ ID NO: 270010 - DNA, 25 bp, Probe Sequence
ggaaagaaactggtggtgatcaaag

SEQ ID NO: 270011 - DNA, 25 bp, Probe Sequence
ggaaaagacattgttcatgttaatg

SEQ ID NO: 270012 - DNA, 25 bp, Probe Sequence
ggaaaaggcctgaattatgctctta

SEQ ID NO: 270013 - DNA, 25 bp, Probe Sequence
ggacagcgcagctctattaagctgt

SEQ ID NO: 270014 - DNA, 25 bp, Probe Sequence
ggacacagcacatgtttcagagagc

SEQ ID NO: 270015 - DNA, 25 bp, Probe Sequence
ggacaccaacaaatctaagccctcc

SEQ ID NO: 270016 - DNA, 25 bp, Probe Sequence
ggacactaacaattctacaccaaat

SEQ ID NO: 270017 - DNA, 25 bp, Probe Sequence
ggacaccaactaatgctgactccac

SEQ ID NO: 270018 - DNA, 25 bp, Probe Sequence
ggacagcgggtaagagtctccacac

SEQ ID NO: 270019 - DNA, 25 bp, Probe Sequence
ggacagctggcgaaacttccaagcc

SEQ ID NO: 270020 - DNA, 25 bp, Probe Sequence
ggacactgggaatatattctacctg

SEQ ID NO: 270021 - DNA, 25 bp, Probe Sequence
ggaacgcctgaagattttctattgc

SEQ ID NO: 270022 - DNA, 25 bp, Probe Sequence
ggaactggcgggtattctggtcatt

SEQ ID NO: 270023 - DNA, 25 bp, Probe Sequence
ggaaatgggagggtccggagcagct

SEQ ID NO: 270024 - DNA, 25 bp, Probe Sequence
ggaaatgctgggcaatgctcgggcc

SEQ ID NO: 270025 - DNA, 25 bp, Probe Sequence
ggacaaatcccctactggggccatt

SEQ ID NO: 270026 - DNA, 25 bp, Probe Sequence
ggaaactccacatcctgtgggacct

SEQ ID NO: 270027 - DNA, 25 bp, Probe Sequence
ggaaactccacatcctgtgggacct

SEQ ID NO: 270028 - DNA, 25 bp, Probe Sequence
ggacaataccaagagctggggaagc

SEQ ID NO: 270029 - DNA, 25 bp, Probe Sequence
ggaaatacctacatgatgggcccaa

SEQ ID NO: 270030 - DNA, 25 bp, Probe Sequence
ggaaacaccaactgatgtagaccaa

SEQ ID NO: 270031 - DNA, 25 bp, Probe Sequence
ggaaccccaaagggataattcatca

SEQ ID NO: 270032 - DNA, 25 bp, Probe Sequence
ggaatcctgtaatgtagaaactgca

SEQ ID NO: 270033 - DNA, 25 bp, Probe Sequence
ggaacctgtatatctattttggaac

SEQ ID NO: 270034 - DNA, 25 bp, Probe Sequence
ggaacccttctgattgtcttagaca

SEQ ID NO: 270035 - DNA, 25 bp, Probe Sequence
ggaacttttgagatgatccctaaca

SEQ ID NO: 270036 - DNA, 25 bp, Probe Sequence
ggaacttttattaaagcctgagact

SEQ ID NO: 270037 - DNA, 25 bp, Probe Sequence
ggaagctttacatagaaccttaggt

SEQ ID NO: 270038 - DNA, 25 bp, Probe Sequence
ggaaatgtctactgaggaccctggg

SEQ ID NO: 270039 - DNA, 25 bp, Probe Sequence
ggacaagctctatttttcatccctg

SEQ ID NO: 270040 - DNA, 25 bp, Probe Sequence
ggaaatgtggagtattttggactgg

SEQ ID NO: 270041 - DNA, 25 bp, Probe Sequence
ggaagactgtaattattgtgggtca

SEQ ID NO: 270042 - DNA, 25 bp, Probe Sequence
ggaaagtgttcagttgttggcttca

SEQ ID NO: 270043 - DNA, 25 bp, Probe Sequence
ggaactgtgatcttttgtcttttca

SEQ ID NO: 270044 - DNA, 25 bp, Probe Sequence
ggaactggcacttattttctgacca

SEQ ID NO: 270045 - DNA, 25 bp, Probe Sequence
ggaaagtcctgtttttgatgagcac

SEQ ID NO: 270046 - DNA, 25 bp, Probe Sequence
ggaaacaccgagtctctgtataatc

SEQ ID NO: 270047 - DNA, 25 bp, Probe Sequence
ggaaatgaatcctcctgataacatc

SEQ ID NO: 270048 - DNA, 25 bp, Probe Sequence
ggacaagagatcacaccagagtaca

SEQ ID NO: 270049 - DNA, 25 bp, Probe Sequence
ggacaattgtcttaccaggctgatc

SEQ ID NO: 270050 - DNA, 25 bp, Probe Sequence
ggaatgattgtctcatcggcactaa

SEQ ID NO: 270051 - DNA, 25 bp, Probe Sequence
ggaatagtttcctgtcctgagacga

SEQ ID NO: 270052 - DNA, 25 bp, Probe Sequence
ggaatggttgtctggtatctgaact

SEQ ID NO: 270053 - DNA, 25 bp, Probe Sequence
ggaacgattccaagttacgaagctc

SEQ ID NO: 270054 - DNA, 25 bp, Probe Sequence
ggaactgttccatataagagagact

SEQ ID NO: 270055 - DNA, 25 bp, Probe Sequence
ggaactgtcaactcaggcgagaatg

SEQ ID NO: 270056 - DNA, 25 bp, Probe Sequence
ggaaatgcaaactgggctggaagat

SEQ ID NO: 270057 - DNA, 25 bp, Probe Sequence
ggaactgattacagtggctggagct

SEQ ID NO: 270058 - DNA, 25 bp, Probe Sequence
ggaaattgtgccagtggtccagctg

SEQ ID NO: 270059 - DNA, 25 bp, Probe Sequence
ggaaatcatgtggcggtgtccgtgg

SEQ ID NO: 270060 - DNA, 25 bp, Probe Sequence
ggacacagactggcttggtcgcagt

SEQ ID NO: 270061 - DNA, 25 bp, Probe Sequence
ggacacagatggggatggggcgttg

SEQ ID NO: 270062 - DNA, 25 bp, Probe Sequence
ggacacacttcccatagaccgtgtc

SEQ ID NO: 270063 - DNA, 25 bp, Probe Sequence
ggacacataaccttattcctggtct

SEQ ID NO: 270064 - DNA, 25 bp, Probe Sequence
ggaacaaatcactctttctggttct

SEQ ID NO: 270065 - DNA, 25 bp, Probe Sequence
ggaacaaccacgaaagtcaggttct

SEQ ID NO: 270066 - DNA, 25 bp, Probe Sequence
ggaaacaatcctagagagctcagag

SEQ ID NO: 270067 - DNA, 25 bp, Probe Sequence
ggaaagcttatggatggtgctcaga

SEQ ID NO: 270068 - DNA, 25 bp, Probe Sequence
ggacaagatctatgaaggccaagtg

SEQ ID NO: 270069 - DNA, 25 bp, Probe Sequence
ggacaagatctatgaagccaagtgg

SEQ ID NO: 270070 - DNA, 25 bp, Probe Sequence
ggaacagctctttggacactaggaa

SEQ ID NO: 270071 - DNA, 25 bp, Probe Sequence
ggacaagctcttctaacatgatgga

SEQ ID NO: 270072 - DNA, 25 bp, Probe Sequence
ggaacctcctttgagcatagagtta

SEQ ID NO: 270073 - DNA, 25 bp, Probe Sequence
ggaacctgacgtagctgcaaaggac

SEQ ID NO: 270074 - DNA, 25 bp, Probe Sequence
ggaaccctcaacatgcaagactgac

SEQ ID NO: 270075 - DNA, 25 bp, Probe Sequence
ggaaatctccagggtgcatggacta

SEQ ID NO: 270076 - DNA, 25 bp, Probe Sequence
ggaaatgctccgctagcaatcgcat

SEQ ID NO: 270077 - DNA, 25 bp, Probe Sequence
ggaaatctcctccataggacacagg

SEQ ID NO: 270078 - DNA, 25 bp, Probe Sequence
ggaaatctcctccataggacacagg

SEQ ID NO: 270079 - DNA, 25 bp, Probe Sequence
ggaaatgctctgaaaatggacaggg

SEQ ID NO: 270080 - DNA, 25 bp, Probe Sequence
ggaaagctgctttataggaagagaa

SEQ ID NO: 270081 - DNA, 25 bp, Probe Sequence
ggacaatggccttagagctattgag

SEQ ID NO: 270082 - DNA, 25 bp, Probe Sequence
ggaaaggcatctgagcagtgaggag

SEQ ID NO: 270083 - DNA, 25 bp, Probe Sequence
ggaaatggagtttgcagtaatgagc

SEQ ID NO: 270084 - DNA, 25 bp, Probe Sequence
ggaatagggaactgtaatggccact

SEQ ID NO: 270085 - DNA, 25 bp, Probe Sequence
ggaaagtggacctgtgtctgtgtct

SEQ ID NO: 270086 - DNA, 25 bp, Probe Sequence
ggaaaggaacacggttctgagccca

SEQ ID NO: 270087 - DNA, 25 bp, Probe Sequence
ggaacagggaactgtcctacactgc

SEQ ID NO: 270088 - DNA, 25 bp, Probe Sequence
ggaaatctggatttccacctaccgc

SEQ ID NO: 270089 - DNA, 25 bp, Probe Sequence
ggaaatcgtagctatcatcacctcc

SEQ ID NO: 270090 - DNA, 25 bp, Probe Sequence
ggacaacacgcagtatgctcaccat

SEQ ID NO: 270091 - DNA, 25 bp, Probe Sequence
ggaaagcaggctgagtccctggggc

SEQ ID NO: 270092 - DNA, 25 bp, Probe Sequence
ggaaagggcaccatcttcatgggga

SEQ ID NO: 270093 - DNA, 25 bp, Probe Sequence
ggaaatgaggaccatcactgtatgg

SEQ ID NO: 270094 - DNA, 25 bp, Probe Sequence
ggaaatggggcttacactatgatgt

SEQ ID NO: 270095 - DNA, 25 bp, Probe Sequence
ggaaaggacttatccatcaatataa

SEQ ID NO: 270096 - DNA, 25 bp, Probe Sequence
ggaaagcagacattgacctcaccaa

SEQ ID NO: 270097 - DNA, 25 bp, Probe Sequence
ggaaacagtacagtcgctagtcaag

SEQ ID NO: 270098 - DNA, 25 bp, Probe Sequence
ggaaacgtttatcatgaatcaacag

SEQ ID NO: 270099 - DNA, 25 bp, Probe Sequence
ggaaacagattctaggatgtacaaa

SEQ ID NO: 270100 - DNA, 25 bp, Probe Sequence
ggaagactgatgttcatgggtaaaa

SEQ ID NO: 270101 - DNA, 25 bp, Probe Sequence
ggaagactgatgttcatgggtaaaa

SEQ ID NO: 270102 - DNA, 25 bp, Probe Sequence
ggaaatctatgctcagaggctggaa

SEQ ID NO: 270103 - DNA, 25 bp, Probe Sequence
ggaacatgcttgtaaactgcgtaac

SEQ ID NO: 270104 - DNA, 25 bp, Probe Sequence
ggaaagcttgaaaaccattgataaa

SEQ ID NO: 270105 - DNA, 25 bp, Probe Sequence
ggaacacaagtaacacctcagatag

SEQ ID NO: 270106 - DNA, 25 bp, Probe Sequence
ggaacaatactatcacctagtggat

SEQ ID NO: 270107 - DNA, 25 bp, Probe Sequence
ggaacaattgtaaacctgacatggt

SEQ ID NO: 270108 - DNA, 25 bp, Probe Sequence
ggaaatttgatagacttgactgtgt

SEQ ID NO: 270109 - DNA, 25 bp, Probe Sequence
ggaaagattcataccccgatggagt

SEQ ID NO: 270110 - DNA, 25 bp, Probe Sequence
ggaaaatcactcgaatccgggagac

SEQ ID NO: 270111 - DNA, 25 bp, Probe Sequence
ggaacaacaatggcacatccgtgga

SEQ ID NO: 270112 - DNA, 25 bp, Probe Sequence
ggaaaggctgtggccacctgatgac

SEQ ID NO: 270113 - DNA, 25 bp, Probe Sequence
ggacaaggtgatactctgagctgtg

SEQ ID NO: 270114 - DNA, 25 bp, Probe Sequence
ggacaaggagtttccagctgctggc

SEQ ID NO: 270115 - DNA, 25 bp, Probe Sequence
ggaaactcagtttctgcactgctga

SEQ ID NO: 270116 - DNA, 25 bp, Probe Sequence
ggcaaatctagcagcggcagcagta

SEQ ID NO: 270117 - DNA, 25 bp, Probe Sequence
ggcttgttacaggcgagaaattatg

SEQ ID NO: 270118 - DNA, 25 bp, Probe Sequence
ggcacgtttcccgggaagatctgaa

SEQ ID NO: 270119 - DNA, 25 bp, Probe Sequence
ggaacttcacccggatgaaattgac

SEQ ID NO: 270120 - DNA, 25 bp, Probe Sequence
ggaacttcctcgcagcaaatgacca

SEQ ID NO: 270121 - DNA, 25 bp, Probe Sequence
ggaaaacttcaacgcaattgcaaca

SEQ ID NO: 270122 - DNA, 25 bp, Probe Sequence
ggaaaactgagctctatttcataca

SEQ ID NO: 270123 - DNA, 25 bp, Probe Sequence
ggaaactcttgtttacttatgagca

SEQ ID NO: 270124 - DNA, 25 bp, Probe Sequence
ggaaacctcatgaactgatagttag

SEQ ID NO: 270125 - DNA, 25 bp, Probe Sequence
ggacaaggccattaagaaattcgtc

SEQ ID NO: 270126 - DNA, 25 bp, Probe Sequence
ggaatctggccatgaaaacctcttt

SEQ ID NO: 270127 - DNA, 25 bp, Probe Sequence
ggaactggagcaaatatccccattg

SEQ ID NO: 270128 - DNA, 25 bp, Probe Sequence
ggaaaggactcagtgtcctctctga

SEQ ID NO: 270129 - DNA, 25 bp, Probe Sequence
ggaaaggattcttggacctctacca

SEQ ID NO: 270130 - DNA, 25 bp, Probe Sequence
ggaaaggattcttggacctctacca

SEQ ID NO: 270131 - DNA, 25 bp, Probe Sequence
ggaaaggattcttggacctctacca

SEQ ID NO: 270132 - DNA, 25 bp, Probe Sequence
ggaaagggttcagtggcaccttcca

SEQ ID NO: 270133 - DNA, 25 bp, Probe Sequence
ggaaagggtcttagtcactgcctcc

SEQ ID NO: 270134 - DNA, 25 bp, Probe Sequence
ggaaagggtcttagtcactgcctcc

SEQ ID NO: 270135 - DNA, 25 bp, Probe Sequence
ggaagcggaactgctgtgccttaac

SEQ ID NO: 270136 - DNA, 25 bp, Probe Sequence
ggaagggagttggtgtgctattttt

SEQ ID NO: 270137 - DNA, 25 bp, Probe Sequence
ggcaagggggctgttggatttccat

SEQ ID NO: 270138 - DNA, 25 bp, Probe Sequence
ggaacgaaagctctatggttaccag

SEQ ID NO: 270139 - DNA, 25 bp, Probe Sequence
ggcaccgaacagcgttgaattaact

SEQ ID NO: 270140 - DNA, 25 bp, Probe Sequence
ggcccttagaggacttgaaatatac

SEQ ID NO: 270141 - DNA, 25 bp, Probe Sequence
ggccaaaaggagacttgtaaatagc

SEQ ID NO: 270142 - DNA, 25 bp, Probe Sequence
ggccgaccaggtgctagtaggaagc

SEQ ID NO: 270143 - DNA, 25 bp, Probe Sequence
ggcgacgccggtaattgtagggacg

SEQ ID NO: 270144 - DNA, 25 bp, Probe Sequence
ggcgactccggtattaagctctgcc

SEQ ID NO: 270145 - DNA, 25 bp, Probe Sequence
tgacgaccctggacatcgtcagagc

SEQ ID NO: 270146 - DNA, 25 bp, Probe Sequence
ggaacaagattaaggcctggcagaa

SEQ ID NO: 270147 - DNA, 25 bp, Probe Sequence
ggaacatctgcatttggttctagca

SEQ ID NO: 270148 - DNA, 25 bp, Probe Sequence
ggaacttcatttgtcttaccttggt

SEQ ID NO: 270149 - DNA, 25 bp, Probe Sequence
ggaaattatttctccataccttgtg

SEQ ID NO: 270150 - DNA, 25 bp, Probe Sequence
ggaaatgttttcccacagttctagg

SEQ ID NO: 270151 - DNA, 25 bp, Probe Sequence
ggaaattcttgtgcgcacacttgat

SEQ ID NO: 270152 - DNA, 25 bp, Probe Sequence
ggaacatttggggagcacccagagg

SEQ ID NO: 270153 - DNA, 25 bp, Probe Sequence
ggaagttctgggatcaccaaggatt

SEQ ID NO: 270154 - DNA, 25 bp, Probe Sequence
ggaaggatccaggttcgcttccgtt

SEQ ID NO: 270155 - DNA, 25 bp, Probe Sequence
ggaaggaattgcgggccttcaagtt

SEQ ID NO: 270156 - DNA, 25 bp, Probe Sequence
ggaatagaatttaagcctaaaggct

SEQ ID NO: 270157 - DNA, 25 bp, Probe Sequence
ggaaagattttcaagggagcaaact

SEQ ID NO: 270158 - DNA, 25 bp, Probe Sequence
ggaaagatgtttaacgtcactaatt

SEQ ID NO: 270159 - DNA, 25 bp, Probe Sequence
ggaaatggtttccatctgtactttg

SEQ ID NO: 270160 - DNA, 25 bp, Probe Sequence
ggaaatagacttttatgaactcttt

SEQ ID NO: 270161 - DNA, 25 bp, Probe Sequence
ggaaaaactgtatataagctttggg

SEQ ID NO: 270162 - DNA, 25 bp, Probe Sequence
ggaagaacggtctcagaactgtttg

SEQ ID NO: 270163 - DNA, 25 bp, Probe Sequence
ggaagaccggtctcagaactgtttg

SEQ ID NO: 270164 - DNA, 25 bp, Probe Sequence
ggcggaggggtggaaaatcagttgt

SEQ ID NO: 270165 - DNA, 25 bp, Probe Sequence
ggcaggaaggacggggaccttctgt

SEQ ID NO: 270166 - DNA, 25 bp, Probe Sequence
ggcaacggtgacttgagtacttttg

SEQ ID NO: 270167 - DNA, 25 bp, Probe Sequence
ggaaaggatgtgctgacttttttcc

SEQ ID NO: 270168 - DNA, 25 bp, Probe Sequence
ggaaaggggtgaccttttgctgtgc

SEQ ID NO: 270169 - DNA, 25 bp, Probe Sequence
ggcaaagggggttttgtgctgctgg

SEQ ID NO: 270170 - DNA, 25 bp, Probe Sequence
ggaaggtgggccacttcctgatgag

SEQ ID NO: 270171 - DNA, 25 bp, Probe Sequence
ggcaagggggtagctatccgacatg

SEQ ID NO: 270172 - DNA, 25 bp, Probe Sequence
ggaaggggaaagccttcacgtcaga

SEQ ID NO: 270173 - DNA, 25 bp, Probe Sequence
ggaaggggaaagccttcacgtcaga

SEQ ID NO: 270174 - DNA, 25 bp, Probe Sequence
ggaaggggcaagacgtggcctgtag

SEQ ID NO: 270175 - DNA, 25 bp, Probe Sequence
tggaaggaacggatgggcctctagt

SEQ ID NO: 270176 - DNA, 25 bp, Probe Sequence
ggaaggaacggatgggcctctagtg

SEQ ID NO: 270177 - DNA, 25 bp, Probe Sequence
ggaaggaggcggggatggggtcgtg

SEQ ID NO: 270178 - DNA, 25 bp, Probe Sequence
ggaattaggggggagatggtccctg

SEQ ID NO: 270179 - DNA, 25 bp, Probe Sequence
ggaaccgaggcagggaaggatccca

SEQ ID NO: 270180 - DNA, 25 bp, Probe Sequence
ggaactctgcaagcaggtgaggtcc

SEQ ID NO: 270181 - DNA, 25 bp, Probe Sequence
ggaacttcaaggtccagactgtctc

SEQ ID NO: 270182 - DNA, 25 bp, Probe Sequence
ggaagcctattcgcaggatttctca

SEQ ID NO: 270183 - DNA, 25 bp, Probe Sequence
ggaaactcatcctcagagaggttca

SEQ ID NO: 270184 - DNA, 25 bp, Probe Sequence
ggcaaagctaggcagaagaggattc

SEQ ID NO: 270185 - DNA, 25 bp, Probe Sequence
ggaaaaagcacaagaagcgtgagac

SEQ ID NO: 270186 - DNA, 25 bp, Probe Sequence
ggaaaacaccagtatagaatagaca

SEQ ID NO: 270187 - DNA, 25 bp, Probe Sequence
ggaaattaccatggactaagagaaa

SEQ ID NO: 270188 - DNA, 25 bp, Probe Sequence
ggaaactacctggattgtagggagg

SEQ ID NO: 270189 - DNA, 25 bp, Probe Sequence
ggaaagccacttccttgaatggagg

SEQ ID NO: 270190 - DNA, 25 bp, Probe Sequence
ggaaacctgcctttgtatgtggaag

SEQ ID NO: 270191 - DNA, 25 bp, Probe Sequence
ggaaaactccattgtgtgttgctgg

SEQ ID NO: 270192 - DNA, 25 bp, Probe Sequence
ggaaagccaccagggtgggtggcga

SEQ ID NO: 270193 - DNA, 25 bp, Probe Sequence
ggaacagaatcctggggcttgcaaa

SEQ ID NO: 270194 - DNA, 25 bp, Probe Sequence
ggaaagactccttgaagtgttgcaa

SEQ ID NO: 270195 - DNA, 25 bp, Probe Sequence
ggaaaagctcctctagttagctgaa

SEQ ID NO: 270196 - DNA, 25 bp, Probe Sequence
ggaaaatatcctctacctgatggta

SEQ ID NO: 270197 - DNA, 25 bp, Probe Sequence
ggaaagaagttgctaagtgtgctta

SEQ ID NO: 270198 - DNA, 25 bp, Probe Sequence
ggaaaaagcatctgtcaaataggaa

SEQ ID NO: 270199 - DNA, 25 bp, Probe Sequence
ggaaagaagcaccagtcaagttgtg

SEQ ID NO: 270200 - DNA, 25 bp, Probe Sequence
ggaaagacagcctgtacaccatgtc

SEQ ID NO: 270201 - DNA, 25 bp, Probe Sequence
ggaaatgatagtcaactcagccttc

SEQ ID NO: 270202 - DNA, 25 bp, Probe Sequence
ggaaagatttcgaacaatcacctcc

SEQ ID NO: 270203 - DNA, 25 bp, Probe Sequence
ggaaagtttagagcaatctgaccct

SEQ ID NO: 270204 - DNA, 25 bp, Probe Sequence
ggaaatttgctatgctcttcgagct

SEQ ID NO: 270205 - DNA, 25 bp, Probe Sequence
ggaaatgctaattcagctcctccag

SEQ ID NO: 270206 - DNA, 25 bp, Probe Sequence
ggaaatgctaattcagctcctccag

SEQ ID NO: 270207 - DNA, 25 bp, Probe Sequence
ggaaatcatagtccccactctatga

SEQ ID NO: 270208 - DNA, 25 bp, Probe Sequence
ggaaatctaggggcctgtatatccc

SEQ ID NO: 270209 - DNA, 25 bp, Probe Sequence
ggaactccaggtactgctgtttcac

SEQ ID NO: 270210 - DNA, 25 bp, Probe Sequence
ggaaaccacagcaacctgtattcat

SEQ ID NO: 270211 - DNA, 25 bp, Probe Sequence
ggaaaacaggcaaacttatctcact

SEQ ID NO: 270212 - DNA, 25 bp, Probe Sequence
ggaaaacaggcaaacttatctcact

SEQ ID NO: 270213 - DNA, 25 bp, Probe Sequence
ggaaaacaggcaaacttatctcact

SEQ ID NO: 270214 - DNA, 25 bp, Probe Sequence
ggaaacagagcgatactctgtctca

SEQ ID NO: 270215 - DNA, 25 bp, Probe Sequence
ggcaacagtacgagactctgttcca

SEQ ID NO: 270216 - DNA, 25 bp, Probe Sequence
ggaacaacaggggctcctgttccat

SEQ ID NO: 270217 - DNA, 25 bp, Probe Sequence
ggaaagacaagggcccatgctctta

SEQ ID NO: 270218 - DNA, 25 bp, Probe Sequence
ggaaaggaagatgcctgtcctctcc

SEQ ID NO: 270219 - DNA, 25 bp, Probe Sequence
ggaaaggaagatgcctgtcctctcc

SEQ ID NO: 270220 - DNA, 25 bp, Probe Sequence
ggaaaggaagatgcctgtcctctcc

SEQ ID NO: 270221 - DNA, 25 bp, Probe Sequence
ggaaagaacaggtcgtgtctcctcc

SEQ ID NO: 270222 - DNA, 25 bp, Probe Sequence
ggaaagaaagatacctgctcatcgt

SEQ ID NO: 270223 - DNA, 25 bp, Probe Sequence
ggaaatcaagagaacctacaggtgt

SEQ ID NO: 270224 - DNA, 25 bp, Probe Sequence
ggaaatcagacagtacctggcacag

SEQ ID NO: 270225 - DNA, 25 bp, Probe Sequence
ggaaataaactcaagctgatgcttc

SEQ ID NO: 270226 - DNA, 25 bp, Probe Sequence
ggaaaggccccaagcaatgatctcc

SEQ ID NO: 270227 - DNA, 25 bp, Probe Sequence
ggaaaggcctgggagcagtgcttcc

SEQ ID NO: 270228 - DNA, 25 bp, Probe Sequence
ggaaatggttatgagatggctgtgc

SEQ ID NO: 270229 - DNA, 25 bp, Probe Sequence
ggaaatgtttcaacgtgcgcaagcg

SEQ ID NO: 270230 - DNA, 25 bp, Probe Sequence
ggcacagtgggtaacgaccaatggg

SEQ ID NO: 270231 - DNA, 25 bp, Probe Sequence
ggaagtaccttaggacacatggggt

SEQ ID NO: 270232 - DNA, 25 bp, Probe Sequence
ggctttactttagttcgctgtaggc

SEQ ID NO: 270233 - DNA, 25 bp, Probe Sequence
ggcttcttcgttgctgtaattgaac

SEQ ID NO: 270234 - DNA, 25 bp, Probe Sequence
ggcttcttcgttgctgtaattgaac

SEQ ID NO: 270235 - DNA, 25 bp, Probe Sequence
ggcttcttcgttgctgtaattgaac

SEQ ID NO: 270236 - DNA, 25 bp, Probe Sequence
ggcaccttcgaaagttaattgaact

SEQ ID NO: 270237 - DNA, 25 bp, Probe Sequence
ggcaccctcgtatgttttgaaagtt

SEQ ID NO: 270238 - DNA, 25 bp, Probe Sequence
ggaatcctggttttgttgccaaaat

SEQ ID NO: 270239 - DNA, 25 bp, Probe Sequence
ggaaccttttgatggggccaatgtc

SEQ ID NO: 270240 - DNA, 25 bp, Probe Sequence
ggaagcctcattttggggaccaaga

SEQ ID NO: 270241 - DNA, 25 bp, Probe Sequence
ggaatcttctgtttagggccttaag

SEQ ID NO: 270242 - DNA, 25 bp, Probe Sequence
ggaactgtgggctttgggagctttc

SEQ ID NO: 270243 - DNA, 25 bp, Probe Sequence
ggaaagctgtggcattggtcaaggt

SEQ ID NO: 270244 - DNA, 25 bp, Probe Sequence
ggaaagagctgggaggcttcacaga

SEQ ID NO: 270245 - DNA, 25 bp, Probe Sequence
ggaaagagctgggaggcttcacaga

SEQ ID NO: 270246 - DNA, 25 bp, Probe Sequence
ggaaagagctgggaggcttcacaga

SEQ ID NO: 270247 - DNA, 25 bp, Probe Sequence
ggaaaagctgggaagcctccgtgtg

SEQ ID NO: 270248 - DNA, 25 bp, Probe Sequence
ggaaaatgagaaatcaccttcgttg

SEQ ID NO: 270249 - DNA, 25 bp, Probe Sequence
ggaaaagagggttcctctccttgtg

SEQ ID NO: 270250 - DNA, 25 bp, Probe Sequence
ggaaagaagggatgaccgcgtttgt

SEQ ID NO: 270251 - DNA, 25 bp, Probe Sequence
ggaaatggatgaggaagaactgctt

SEQ ID NO: 270252 - DNA, 25 bp, Probe Sequence
ggaaagttggctgcaacagctgtgg

SEQ ID NO: 270253 - DNA, 25 bp, Probe Sequence
ggaaagcgtgccaatcaacatgctg

SEQ ID NO: 270254 - DNA, 25 bp, Probe Sequence
ggaacagcatgtccaaatcgatgtg

SEQ ID NO: 270255 - DNA, 25 bp, Probe Sequence
ggaaagccaccaagatgctgacatt

SEQ ID NO: 270256 - DNA, 25 bp, Probe Sequence
ggaaagaaccctactgacatgcatg

SEQ ID NO: 270257 - DNA, 25 bp, Probe Sequence
ggaactgtaatggccactgaagcac

SEQ ID NO: 270258 - DNA, 25 bp, Probe Sequence
ggaactgaaatgaaccagacacact

SEQ ID NO: 270259 - DNA, 25 bp, Probe Sequence
ggaaagacaagcatctcaaccacag

SEQ ID NO: 270260 - DNA, 25 bp, Probe Sequence
ggaaagtcctgcataacaacactgg

SEQ ID NO: 270261 - DNA, 25 bp, Probe Sequence
ggcgaaccacctgaacaaactggcc

SEQ ID NO: 270262 - DNA, 25 bp, Probe Sequence
ggaaagcccctggatgaaacactta

SEQ ID NO: 270263 - DNA, 25 bp, Probe Sequence
ggaaagcccatttgtgtacacagtc

SEQ ID NO: 270264 - DNA, 25 bp, Probe Sequence
ggaacactccattgtggctagcagc

SEQ ID NO: 270265 - DNA, 25 bp, Probe Sequence
ggaagccatagatgctggctgggtt

SEQ ID NO: 270266 - DNA, 25 bp, Probe Sequence
ggaagactatgatcgactgcggcct

SEQ ID NO: 270267 - DNA, 25 bp, Probe Sequence
ggaactctgaaaataagcggcccgt

SEQ ID NO: 270268 - DNA, 25 bp, Probe Sequence
ggaacctgattgatgatcacagtct

SEQ ID NO: 270269 - DNA, 25 bp, Probe Sequence
ggaacactttgatgcaagccatgtg

SEQ ID NO: 270270 - DNA, 25 bp, Probe Sequence
ggaacacttttacactgttggtggg

SEQ ID NO: 270271 - DNA, 25 bp, Probe Sequence
ggaacacttttacactgttgatggg

SEQ ID NO: 270272 - DNA, 25 bp, Probe Sequence
ggaaagcggctaaaactttcattgg

SEQ ID NO: 270273 - DNA, 25 bp, Probe Sequence
ggaaatggggacaaactggctctct

SEQ ID NO: 270274 - DNA, 25 bp, Probe Sequence
ggaaaggaaagcaagtctgcagttc

SEQ ID NO: 270275 - DNA, 25 bp, Probe Sequence
ggaacagaaagcctagacatgcagc

SEQ ID NO: 270276 - DNA, 25 bp, Probe Sequence
ggaacagcaggaggctgaactacag

SEQ ID NO: 270277 - DNA, 25 bp, Probe Sequence
ggaaacctggcagtgataccatcaa

SEQ ID NO: 270278 - DNA, 25 bp, Probe Sequence
ggaaagctgctgccaagaaagactg

SEQ ID NO: 270279 - DNA, 25 bp, Probe Sequence
ggaaagagtgccagtcagcagtcat

SEQ ID NO: 270280 - DNA, 25 bp, Probe Sequence
ggaaagggccatgggcagagggctg

SEQ ID NO: 270281 - DNA, 25 bp, Probe Sequence
ggaaactgaggtgcgggtgcgcggg

SEQ ID NO: 270282 - DNA, 25 bp, Probe Sequence
ggaaactttggtggtggtcgtggag

SEQ ID NO: 270283 - DNA, 25 bp, Probe Sequence
ggaaactttggtggtggtcgtggag

SEQ ID NO: 270284 - DNA, 25 bp, Probe Sequence
ggaagcctttgctagggtgtcttgt

SEQ ID NO: 270285 - DNA, 25 bp, Probe Sequence
ggaactgctctttgagggtggattt

SEQ ID NO: 270286 - DNA, 25 bp, Probe Sequence
ggaactatgtctggaaggctgtggt

SEQ ID NO: 270287 - DNA, 25 bp, Probe Sequence
ggaactatgtctggaaggctgtggt

SEQ ID NO: 270288 - DNA, 25 bp, Probe Sequence
ggaacagcaggtgacaggcctagct

SEQ ID NO: 270289 - DNA, 25 bp, Probe Sequence
ggaacagcaggtgacaggcctagct

SEQ ID NO: 270290 - DNA, 25 bp, Probe Sequence
ggaaagctgtgtgagaggcactctc

SEQ ID NO: 270291 - DNA, 25 bp, Probe Sequence
ggaaagctgttctataggcacatca

SEQ ID NO: 270292 - DNA, 25 bp, Probe Sequence
ggaacactgtagtataccccaaagt

SEQ ID NO: 270293 - DNA, 25 bp, Probe Sequence
ggaacatgttattatactcttctta

SEQ ID NO: 270294 - DNA, 25 bp, Probe Sequence
ggaactggtctgtatgaaggacttg

SEQ ID NO: 270295 - DNA, 25 bp, Probe Sequence
ggaactggtcgaatgaggcacctaa

SEQ ID NO: 270296 - DNA, 25 bp, Probe Sequence
ggaaagtgtccaatcagatccccaa

SEQ ID NO: 270297 - DNA, 25 bp, Probe Sequence
ggaaaggtgacatcattcaccccat

SEQ ID NO: 270298 - DNA, 25 bp, Probe Sequence
ggaaggggaagatttccaccaactg

SEQ ID NO: 270299 - DNA, 25 bp, Probe Sequence
ggaagggattggtttggcaagaact

SEQ ID NO: 270300 - DNA, 25 bp, Probe Sequence
ggaagagggtaatctggaagagttt

SEQ ID NO: 270301 - DNA, 25 bp, Probe Sequence
ggaaagtgatgtccctctgaaaact

SEQ ID NO: 270302 - DNA, 25 bp, Probe Sequence
ggaaaggatggatcctcgggacctc

SEQ ID NO: 270303 - DNA, 25 bp, Probe Sequence
ggaaagggatattcacctgggactg

SEQ ID NO: 270304 - DNA, 25 bp, Probe Sequence
ggaaaggggagagcctgctggcacc

SEQ ID NO: 270305 - DNA, 25 bp, Probe Sequence
ggaaaggggatgcagagccctgccc

SEQ ID NO: 270306 - DNA, 25 bp, Probe Sequence
ggaaagggactaaggctcctcaggc

SEQ ID NO: 270307 - DNA, 25 bp, Probe Sequence
ggaaagggtcattagtgctcccgcc

SEQ ID NO: 270308 - DNA, 25 bp, Probe Sequence
ggaaagtgagtatgcggctgcaccc

SEQ ID NO: 270309 - DNA, 25 bp, Probe Sequence
ggaaagtgagaaacttgctcaaata

SEQ ID NO: 270310 - DNA, 25 bp, Probe Sequence
ggaaaatccaaagttatgcagaaaa

SEQ ID NO: 270311 - DNA, 25 bp, Probe Sequence
ggaaaaccacatttgtgacgcaaaa

SEQ ID NO: 270312 - DNA, 25 bp, Probe Sequence
ggaaaaccacatttgtgacgcaaaa

SEQ ID NO: 270313 - DNA, 25 bp, Probe Sequence
ggaaaaccacatttgtgacgcaaaa

SEQ ID NO: 270314 - DNA, 25 bp, Probe Sequence
ggaaaaacactcttggcacgagcca

SEQ ID NO: 270315 - DNA, 25 bp, Probe Sequence
ggaaccaaaatctctgccagagcta

SEQ ID NO: 270316 - DNA, 25 bp, Probe Sequence
ggaaccagaacaggacataaagtga

SEQ ID NO: 270317 - DNA, 25 bp, Probe Sequence
ggaacgcggaaggatcataacggag

SEQ ID NO: 270318 - DNA, 25 bp, Probe Sequence
ggaactgggagacgtacaagcaagg

SEQ ID NO: 270319 - DNA, 25 bp, Probe Sequence
ggaacaggtagactttcaactattg

SEQ ID NO: 270320 - DNA, 25 bp, Probe Sequence
ggaacagttagacttgccacgttgg

SEQ ID NO: 270321 - DNA, 25 bp, Probe Sequence
ggaaagcttaaaaggcctgcatgag

SEQ ID NO: 270322 - DNA, 25 bp, Probe Sequence
ggaacatcttacagggcttgtgtcc

SEQ ID NO: 270323 - DNA, 25 bp, Probe Sequence
ggaacatctaagaggacagtgcttc

SEQ ID NO: 270324 - DNA, 25 bp, Probe Sequence
ggaacaaaacggccagcaatgttag

SEQ ID NO: 270325 - DNA, 25 bp, Probe Sequence
ggaagctgagacaagaggatcaatt

SEQ ID NO: 270326 - DNA, 25 bp, Probe Sequence
ggaacttgctcgggttcaattaaag

SEQ ID NO: 270327 - DNA, 25 bp, Probe Sequence
ggaacacattgggggtctcattgaa

SEQ ID NO: 270328 - DNA, 25 bp, Probe Sequence
ggaacgactgtgggtcttgcattta

SEQ ID NO: 270329 - DNA, 25 bp, Probe Sequence
ggaaagccatttggcctgtgtctta

SEQ ID NO: 270330 - DNA, 25 bp, Probe Sequence
ggaaagcatcactatacggtgactt

SEQ ID NO: 270331 - DNA, 25 bp, Probe Sequence
ggaaacatcacaaaactgagcactc

SEQ ID NO: 270332 - DNA, 25 bp, Probe Sequence
ggaaaccacatgacacaagcagagc

SEQ ID NO: 270333 - DNA, 25 bp, Probe Sequence
ggaaaccaatgacaaagcagagctt

SEQ ID NO: 270334 - DNA, 25 bp, Probe Sequence
ggaaactacagccaaacgcagagca

SEQ ID NO: 270335 - DNA, 25 bp, Probe Sequence
ggaacacctagctaacaggagagag

SEQ ID NO: 270336 - DNA, 25 bp, Probe Sequence
ggaaacttgaagaacagagaccaga

SEQ ID NO: 270337 - DNA, 25 bp, Probe Sequence
ggaaccctacgaagaagccacagag

SEQ ID NO: 270338 - DNA, 25 bp, Probe Sequence
ggaaacccactgagatcgactggag

SEQ ID NO: 270339 - DNA, 25 bp, Probe Sequence
ggaaaccccagtgtagagcaggatt

SEQ ID NO: 270340 - DNA, 25 bp, Probe Sequence
ggaataccccagttgtgaaagtact

SEQ ID NO: 270341 - DNA, 25 bp, Probe Sequence
ggaacctaccagttggccatgatgt

SEQ ID NO: 270342 - DNA, 25 bp, Probe Sequence
ggaacataaaccttgctgtacatga

SEQ ID NO: 270343 - DNA, 25 bp, Probe Sequence
ggaaacacaaatttcatggagctgt

SEQ ID NO: 270344 - DNA, 25 bp, Probe Sequence
ggaaacacaaatttcatggagctgt

SEQ ID NO: 270345 - DNA, 25 bp, Probe Sequence
ggaaacaaagcgttctgcgcgtctt

SEQ ID NO: 270346 - DNA, 25 bp, Probe Sequence
ggaaacaaagtcttacgctctctga

SEQ ID NO: 270347 - DNA, 25 bp, Probe Sequence
ggaaaccaagtctataagacatctt

SEQ ID NO: 270348 - DNA, 25 bp, Probe Sequence
ggaaaagaaccctactgacatgcat

SEQ ID NO: 270349 - DNA, 25 bp, Probe Sequence
ggaaacagtcaagtgtacttcacac

SEQ ID NO: 270350 - DNA, 25 bp, Probe Sequence
ggaaacagtacagctatttctcatc

SEQ ID NO: 270351 - DNA, 25 bp, Probe Sequence
ggaaaatggcacaactttacctctg

SEQ ID NO: 270352 - DNA, 25 bp, Probe Sequence
ggaaaatggcagacaatttttcgct

SEQ ID NO: 270353 - DNA, 25 bp, Probe Sequence
ggaagggagagcagacttcttctgg

SEQ ID NO: 270354 - DNA, 25 bp, Probe Sequence
ggaatggtagtcacactgtcttgaa

SEQ ID NO: 270355 - DNA, 25 bp, Probe Sequence
ggaattgctagatagtgttttgaaa

SEQ ID NO: 270356 - DNA, 25 bp, Probe Sequence
ggaactgccaaatgaccttggacca

SEQ ID NO: 270357 - DNA, 25 bp, Probe Sequence
ggaatcgccaaatattactgatacc

SEQ ID NO: 270358 - DNA, 25 bp, Probe Sequence
ggaatcgccaaatattactgatacc

SEQ ID NO: 270359 - DNA, 25 bp, Probe Sequence
ggaaccaaaagaatcaagctgaacc

SEQ ID NO: 270360 - DNA, 25 bp, Probe Sequence
ggaaacaaacagagccagcagaaca

SEQ ID NO: 270361 - DNA, 25 bp, Probe Sequence
ggaaaataacagggtctatgagaga

SEQ ID NO: 270362 - DNA, 25 bp, Probe Sequence
ggaacaataattgggcttatacatg

SEQ ID NO: 270363 - DNA, 25 bp, Probe Sequence
ggaacataaatggagagcttcttag

SEQ ID NO: 270364 - DNA, 25 bp, Probe Sequence
ggaacacacttgggagcagtcctat

SEQ ID NO: 270365 - DNA, 25 bp, Probe Sequence
ggaaaagcttggcaggtgccctcgt

SEQ ID NO: 270366 - DNA, 25 bp, Probe Sequence
ggaaaagtgtaccaaggccctgcaa

SEQ ID NO: 270367 - DNA, 25 bp, Probe Sequence
ggaaaagctgctttcaaggccacca

SEQ ID NO: 270368 - DNA, 25 bp, Probe Sequence
ggaaaagctgctttcaaggccacca

SEQ ID NO: 270369 - DNA, 25 bp, Probe Sequence
ggaaaagctgctttcaaggccacca

SEQ ID NO: 270370 - DNA, 25 bp, Probe Sequence
ggaaacctgattaacacatgctcac

SEQ ID NO: 270371 - DNA, 25 bp, Probe Sequence
ggaacactttttgaactcattctgg

SEQ ID NO: 270372 - DNA, 25 bp, Probe Sequence
ggaaccatttgtaacaacttctagt

SEQ ID NO: 270373 - DNA, 25 bp, Probe Sequence
ggaacaactggaacctgactatttt

SEQ ID NO: 270374 - DNA, 25 bp, Probe Sequence
ggaagccacttgaacgtgtcctttt

SEQ ID NO: 270375 - DNA, 25 bp, Probe Sequence
ggaaccagcctcatttgattccttc

SEQ ID NO: 270376 - DNA, 25 bp, Probe Sequence
ggcaacgccaacaatttctacacct

SEQ ID NO: 270377 - DNA, 25 bp, Probe Sequence
ggaacccaaggttccatagtcctca

SEQ ID NO: 270378 - DNA, 25 bp, Probe Sequence
ggaacacggaggataaagtcagcca

SEQ ID NO: 270379 - DNA, 25 bp, Probe Sequence
ggaaccagtgatgcctcaaagacag

SEQ ID NO: 270380 - DNA, 25 bp, Probe Sequence
ggaaccatgctaagccatgaccagt

SEQ ID NO: 270381 - DNA, 25 bp, Probe Sequence
ggaactgcagctgtgcagcagacgc

SEQ ID NO: 270382 - DNA, 25 bp, Probe Sequence
ggaactgcagctgtgcagcagacgc

SEQ ID NO: 270383 - DNA, 25 bp, Probe Sequence
ggaactgatgcatctgagcattctg

SEQ ID NO: 270384 - DNA, 25 bp, Probe Sequence
ggaacagagcaagtcactctcgatt

SEQ ID NO: 270385 - DNA, 25 bp, Probe Sequence
ggaacaacagcaatcctaatgtctg

SEQ ID NO: 270386 - DNA, 25 bp, Probe Sequence
ggaaacactcaggacgaatgtgctg

SEQ ID NO: 270387 - DNA, 25 bp, Probe Sequence
ggaaacagctatgaccattaggcct

SEQ ID NO: 270388 - DNA, 25 bp, Probe Sequence
ggaaacagctatgaccattaggcct

SEQ ID NO: 270389 - DNA, 25 bp, Probe Sequence
ggaaacagctatgagccatagccta

SEQ ID NO: 270390 - DNA, 25 bp, Probe Sequence
ggaaggactcatgaccacagtccat

SEQ ID NO: 270391 - DNA, 25 bp, Probe Sequence
ggaacaacatatgacgcactctccc

SEQ ID NO: 270392 - DNA, 25 bp, Probe Sequence
ggaacaaataccaacatccatccaa

SEQ ID NO: 270393 - DNA, 25 bp, Probe Sequence
ggaaaacatactcataggcaccaac

SEQ ID NO: 270394 - DNA, 25 bp, Probe Sequence
ggaagaccatgaaaatacgcccagt

SEQ ID NO: 270395 - DNA, 25 bp, Probe Sequence
ggaagcgagggataaggcccagttc

SEQ ID NO: 270396 - DNA, 25 bp, Probe Sequence
ggaaaagggcaaaatcgcttcagtt

SEQ ID NO: 270397 - DNA, 25 bp, Probe Sequence
ggaaacgcgtcagaatcgcctggag

SEQ ID NO: 270398 - DNA, 25 bp, Probe Sequence
ggaattcctgtagacatccactgcc

SEQ ID NO: 270399 - DNA, 25 bp, Probe Sequence
ggaatccacgaagactccactaacc

SEQ ID NO: 270400 - DNA, 25 bp, Probe Sequence
ggaactcctgcaataacttcatcta

SEQ ID NO: 270401 - DNA, 25 bp, Probe Sequence
ggaacaactcacagcacattctgct

SEQ ID NO: 270402 - DNA, 25 bp, Probe Sequence
ggaaacagcaacacaggctgcgctg

SEQ ID NO: 270403 - DNA, 25 bp, Probe Sequence
ggaaactgcaattacatgcctgtct

SEQ ID NO: 270404 - DNA, 25 bp, Probe Sequence
ggaaacggaccaatgtctgtgtgtg

SEQ ID NO: 270405 - DNA, 25 bp, Probe Sequence
ggaacacgaagtgtgtctcatttga

SEQ ID NO: 270406 - DNA, 25 bp, Probe Sequence
ggaacaggccgtgcgagcactttca

SEQ ID NO: 270407 - DNA, 25 bp, Probe Sequence
ggaacgtgtccaacgaggtggtcaa

SEQ ID NO: 270408 - DNA, 25 bp, Probe Sequence
ggaacgtgtcagagggagctggtac

SEQ ID NO: 270409 - DNA, 25 bp, Probe Sequence
ggaacagggtgaggggcagggtgac

SEQ ID NO: 270410 - DNA, 25 bp, Probe Sequence
ggaaggagaaattggccagtaggat

SEQ ID NO: 270411 - DNA, 25 bp, Probe Sequence
ggaaaagaaacacgcacttagtctc

SEQ ID NO: 270412 - DNA, 25 bp, Probe Sequence
ggaagaacagaatggctctctttca

SEQ ID NO: 270413 - DNA, 25 bp, Probe Sequence
ggaaaagtgcaatgcgtgttgtaca

SEQ ID NO: 270414 - DNA, 25 bp, Probe Sequence
ggaaacctgagatgcagtgggccaa

SEQ ID NO: 270415 - DNA, 25 bp, Probe Sequence
ggaatgcaagggaccaggggccaag

SEQ ID NO: 270416 - DNA, 25 bp, Probe Sequence
ggaacgagagcgagagcgggaccga

SEQ ID NO: 270417 - DNA, 25 bp, Probe Sequence
ggaaccagagcctgtctggggagga

SEQ ID NO: 270418 - DNA, 25 bp, Probe Sequence
ggaacccacggagtgctggtgggag

SEQ ID NO: 270419 - DNA, 25 bp, Probe Sequence
ggaagttcaggggcccaggaagagc

SEQ ID NO: 270420 - DNA, 25 bp, Probe Sequence
ggaaactgggcggccaggggatgac

SEQ ID NO: 270421 - DNA, 25 bp, Probe Sequence
ggaaactggagggcagggatggagc

SEQ ID NO: 270422 - DNA, 25 bp, Probe Sequence
ggaagccggacggcagggatgggcc

SEQ ID NO: 270423 - DNA, 25 bp, Probe Sequence
ggaaccggacatcaaggatctggcc

SEQ ID NO: 270424 - DNA, 25 bp, Probe Sequence
ggaacggagacaaatatctggggcc

SEQ ID NO: 270425 - DNA, 25 bp, Probe Sequence
ggaacagtagaaaaccatatgggga

SEQ ID NO: 270426 - DNA, 25 bp, Probe Sequence
ggaacagataaaaccattagaagaa

SEQ ID NO: 270427 - DNA, 25 bp, Probe Sequence
ggaaaataccaatgcatgggaagaa

SEQ ID NO: 270428 - DNA, 25 bp, Probe Sequence
ggaagaaacaaatctggccactgca

SEQ ID NO: 270429 - DNA, 25 bp, Probe Sequence
ggaagaagaacatccgtgccaccga

SEQ ID NO: 270430 - DNA, 25 bp, Probe Sequence
ggaaacacatactgaagctgccacc

SEQ ID NO: 270431 - DNA, 25 bp, Probe Sequence
ggaaaactcgctcaagctgtcatgt

SEQ ID NO: 270432 - DNA, 25 bp, Probe Sequence
ggaacaacgcgccagacgtgtgagt

SEQ ID NO: 270433 - DNA, 25 bp, Probe Sequence
ggaaaagccagccggcagtgaagag

SEQ ID NO: 270434 - DNA, 25 bp, Probe Sequence
ggaagagagtagggccagtgaaggc

SEQ ID NO: 270435 - DNA, 25 bp, Probe Sequence
ggaagaggtaccacaggaagccgcc

SEQ ID NO: 270436 - DNA, 25 bp, Probe Sequence
ggaaaaggaccaagatggcggccgc

SEQ ID NO: 270437 - DNA, 25 bp, Probe Sequence
ggaacaaggttaaagccgagccagc

SEQ ID NO: 270438 - DNA, 25 bp, Probe Sequence
ggaacacaggctttgaaacgaggca

SEQ ID NO: 270439 - DNA, 25 bp, Probe Sequence
ggaaaacgcaccaaaactgagaact

SEQ ID NO: 270440 - DNA, 25 bp, Probe Sequence
ggaacaactgccggtgatactggta

SEQ ID NO: 270441 - DNA, 25 bp, Probe Sequence
ggaacaacctctgtgaaggagcaag

SEQ ID NO: 270442 - DNA, 25 bp, Probe Sequence
ggaaaacgcttcaaagaggcaaata

SEQ ID NO: 270443 - DNA, 25 bp, Probe Sequence
ggaaacagtcttcaacagaggaaag

SEQ ID NO: 270444 - DNA, 25 bp, Probe Sequence
ggaaacagttgtcagaagacatcat

SEQ ID NO: 270445 - DNA, 25 bp, Probe Sequence
ggaacagctgtgatcgatggagaat

SEQ ID NO: 270446 - DNA, 25 bp, Probe Sequence
ggaacacatagaactgatggaggct

SEQ ID NO: 270447 - DNA, 25 bp, Probe Sequence
ggaacagctaggaccattaggccta

SEQ ID NO: 270448 - DNA, 25 bp, Probe Sequence
ggaacaccggcaagagtatcgccaa

SEQ ID NO: 270449 - DNA, 25 bp, Probe Sequence
ggaactcactggaaagtgacgcgca

SEQ ID NO: 270450 - DNA, 25 bp, Probe Sequence
ggaaccaagtgaaactacggatata

SEQ ID NO: 270451 - DNA, 25 bp, Probe Sequence
ggaacccagattagaatccaggttt

SEQ ID NO: 270452 - DNA, 25 bp, Probe Sequence
ggaaggaagagtaacactatgtttt

SEQ ID NO: 270453 - DNA, 25 bp, Probe Sequence
ggaagttatcaggacacctatttta

SEQ ID NO: 270454 - DNA, 25 bp, Probe Sequence
ggaagttataggtgcccatgttgat

SEQ ID NO: 270455 - DNA, 25 bp, Probe Sequence
ggaactttgggcagagatcatgtta

SEQ ID NO: 270456 - DNA, 25 bp, Probe Sequence
ggaacaggggacatagctgtgctat

SEQ ID NO: 270457 - DNA, 25 bp, Probe Sequence
ggaacagctatgaccattaggccta

SEQ ID NO: 270458 - DNA, 25 bp, Probe Sequence
ggaacagctatgaccattaggccta

SEQ ID NO: 270459 - DNA, 25 bp, Probe Sequence
ggaatcagttgcccatttggctatc

SEQ ID NO: 270460 - DNA, 25 bp, Probe Sequence
ggaacagatctgtgcattttgtgac

SEQ ID NO: 270461 - DNA, 25 bp, Probe Sequence
ggaacatgcaggtgatttgggaagt

SEQ ID NO: 270462 - DNA, 25 bp, Probe Sequence
ggaacagctggaagtctctggtgca

SEQ ID NO: 270463 - DNA, 25 bp, Probe Sequence
ggaagctctcgggtttggagcagcc

SEQ ID NO: 270464 - DNA, 25 bp, Probe Sequence
ggaactcaagcgggtctcagagcag

SEQ ID NO: 270465 - DNA, 25 bp, Probe Sequence
ggaacatctcatcagtgtccagaag

SEQ ID NO: 270466 - DNA, 25 bp, Probe Sequence
ggaaacatcacctgtccaagttcaa

SEQ ID NO: 270467 - DNA, 25 bp, Probe Sequence
ggaacagacccaggacacagagctt

SEQ ID NO: 270468 - DNA, 25 bp, Probe Sequence
ggaacacaccaagctacagatgctc

SEQ ID NO: 270469 - DNA, 25 bp, Probe Sequence
ggaacactgcactcttaagcttccg

SEQ ID NO: 270470 - DNA, 25 bp, Probe Sequence
ggaacatatcccacgaacattcccc

SEQ ID NO: 270471 - DNA, 25 bp, Probe Sequence
ggaacaacctcatctgaagctgtca

SEQ ID NO: 270472 - DNA, 25 bp, Probe Sequence
ggaaaacctcacttgaaggcccagg

SEQ ID NO: 270473 - DNA, 25 bp, Probe Sequence
ggaaaacctcacttgaaggcccagg

SEQ ID NO: 270474 - DNA, 25 bp, Probe Sequence
ggaagaatttcctctgaagcaccgg

SEQ ID NO: 270475 - DNA, 25 bp, Probe Sequence
ggaagaatttcctctgaagcaccgg

SEQ ID NO: 270476 - DNA, 25 bp, Probe Sequence
ggaacagattttattgactgcctcg

SEQ ID NO: 270477 - DNA, 25 bp, Probe Sequence
ggaacagagattttttatcaccttt

SEQ ID NO: 270478 - DNA, 25 bp, Probe Sequence
ggaaacagattcatgtctaaaagtt

SEQ ID NO: 270479 - DNA, 25 bp, Probe Sequence
ggaaaaatatgcatgctttaattgc

SEQ ID NO: 270480 - DNA, 25 bp, Probe Sequence
ggaaaataacattctttgcattgta

SEQ ID NO: 270481 - DNA, 25 bp, Probe Sequence
ggaaaattcagttgttgtgcctcat

SEQ ID NO: 270482 - DNA, 25 bp, Probe Sequence
ggaataattggttttatcgcagatt

SEQ ID NO: 270483 - DNA, 25 bp, Probe Sequence
ggcaaaatcgagtttaaagactgat

SEQ ID NO: 270484 - DNA, 25 bp, Probe Sequence
ggaacattccgtataacggcattgt

SEQ ID NO: 270485 - DNA, 25 bp, Probe Sequence
ggaatcgtccctatatcagggcctg

SEQ ID NO: 270486 - DNA, 25 bp, Probe Sequence
ggaactttcctaagaaaccgctgat

SEQ ID NO: 270487 - DNA, 25 bp, Probe Sequence
ggaagctgttcctttgaaagccaag

SEQ ID NO: 270488 - DNA, 25 bp, Probe Sequence
ggaagcagtccctggagaaggcatg

SEQ ID NO: 270489 - DNA, 25 bp, Probe Sequence
ggaagcgttggcagcaaagggagat

SEQ ID NO: 270490 - DNA, 25 bp, Probe Sequence
ggaagcgttggcagcaaagggagat

SEQ ID NO: 270491 - DNA, 25 bp, Probe Sequence
ggcaagtggtggcgcttatggtagc

SEQ ID NO: 270492 - DNA, 25 bp, Probe Sequence
ggcagagcaccttcggttaacttgc

SEQ ID NO: 270493 - DNA, 25 bp, Probe Sequence
ggaagcacatctttcagattcacac

SEQ ID NO: 270494 - DNA, 25 bp, Probe Sequence
ggaagcacatctttcagattcacac

SEQ ID NO: 270495 - DNA, 25 bp, Probe Sequence
ggaacaattttctattaagttggtg

SEQ ID NO: 270496 - DNA, 25 bp, Probe Sequence
ggaacaatttctttcttcactgtgg

SEQ ID NO: 270497 - DNA, 25 bp, Probe Sequence
ggaacaatttctttcttcactgtgg

SEQ ID NO: 270498 - DNA, 25 bp, Probe Sequence
ggaactatcattaccattgtcctgg

SEQ ID NO: 270499 - DNA, 25 bp, Probe Sequence
ggaacatatcttgcctcatgaagct

SEQ ID NO: 270500 - DNA, 25 bp, Probe Sequence
ggaacatatcttgcctcatgaagct

SEQ ID NO: 270501 - DNA, 25 bp, Probe Sequence
ggaacagccataatcctctgaatga

SEQ ID NO: 270502 - DNA, 25 bp, Probe Sequence
ggaacccaaatccattaatatttat

SEQ ID NO: 270503 - DNA, 25 bp, Probe Sequence
ggaacctggtacatccagtcacttt

SEQ ID NO: 270504 - DNA, 25 bp, Probe Sequence
ggaatactaattatccattcctttt

SEQ ID NO: 270505 - DNA, 25 bp, Probe Sequence
ggaaaaatgtctagtgccagtcctt

SEQ ID NO: 270506 - DNA, 25 bp, Probe Sequence
ggaaaagcttccatgacagcatcac

SEQ ID NO: 270507 - DNA, 25 bp, Probe Sequence
ggaaaatgatcagagcagaggacac

SEQ ID NO: 270508 - DNA, 25 bp, Probe Sequence
ggaaaagtcaatcgatgcagcaaac

SEQ ID NO: 270509 - DNA, 25 bp, Probe Sequence
ggaatgcacagttgacttgggaagc

SEQ ID NO: 270510 - DNA, 25 bp, Probe Sequence
ggaagcacagggtcctgtttcacat

SEQ ID NO: 270511 - DNA, 25 bp, Probe Sequence
ggaagagcctggtctcagttaccaa

SEQ ID NO: 270512 - DNA, 25 bp, Probe Sequence
ggaatagccctgtctagggcaaact

SEQ ID NO: 270513 - DNA, 25 bp, Probe Sequence
ggaacagcacatttctagaggaata

SEQ ID NO: 270514 - DNA, 25 bp, Probe Sequence
ggaacacactcatcgatatgtaaat

SEQ ID NO: 270515 - DNA, 25 bp, Probe Sequence
ggaagcagcctcttaataaaagtac

SEQ ID NO: 270516 - DNA, 25 bp, Probe Sequence
ggaagacacttacctaacaagtact

SEQ ID NO: 270517 - DNA, 25 bp, Probe Sequence
ggaaaacctatcctcaggaagcttc

SEQ ID NO: 270518 - DNA, 25 bp, Probe Sequence
ggaagagaactgacccaggtagtga

SEQ ID NO: 270519 - DNA, 25 bp, Probe Sequence
ggaaggaagcgtagccggattatga

SEQ ID NO: 270520 - DNA, 25 bp, Probe Sequence
ggcaaaggtggtcagcggattaaac

SEQ ID NO: 270521 - DNA, 25 bp, Probe Sequence
ggaagttgtggatatcagggtataa

SEQ ID NO: 270522 - DNA, 25 bp, Probe Sequence
ggaagcacggaatatagggttagat

SEQ ID NO: 270523 - DNA, 25 bp, Probe Sequence
ggaacgccagaacaaggagcttaag

SEQ ID NO: 270524 - DNA, 25 bp, Probe Sequence
ggaacagacgaagatgcagtagcca

SEQ ID NO: 270525 - DNA, 25 bp, Probe Sequence
ggaagcgaaatattacagtagtgca

SEQ ID NO: 270526 - DNA, 25 bp, Probe Sequence
ggaacatggaattttataagctgaa

SEQ ID NO: 270527 - DNA, 25 bp, Probe Sequence
ggaacatggaattttataagctgaa

SEQ ID NO: 270528 - DNA, 25 bp, Probe Sequence
ggaacatggaattttataagctgaa

SEQ ID NO: 270529 - DNA, 25 bp, Probe Sequence
ggaacctgactattttaaggacatg

SEQ ID NO: 270530 - DNA, 25 bp, Probe Sequence
ggaaccgaccatattacaacaggtg

SEQ ID NO: 270531 - DNA, 25 bp, Probe Sequence
ggaacgttccagattactcttggtg

SEQ ID NO: 270532 - DNA, 25 bp, Probe Sequence
ggaagatttgcccatttacactttt

SEQ ID NO: 270533 - DNA, 25 bp, Probe Sequence
ggaagatttgcccatttacactttt

SEQ ID NO: 270534 - DNA, 25 bp, Probe Sequence
ggaagtttgtcgctgatggcatctt

SEQ ID NO: 270535 - DNA, 25 bp, Probe Sequence
ggaatatttgccattagtgattacc

SEQ ID NO: 270536 - DNA, 25 bp, Probe Sequence
ggaaaatctccattgtatgtgcatt

SEQ ID NO: 270537 - DNA, 25 bp, Probe Sequence
ggaaaattgcactattgcacatcat

SEQ ID NO: 270538 - DNA, 25 bp, Probe Sequence
ggaaaacgcagatttgcatgcaaga

SEQ ID NO: 270539 - DNA, 25 bp, Probe Sequence
ggaaaatggtagatgctgcacaaag

SEQ ID NO: 270540 - DNA, 25 bp, Probe Sequence
ggaaaagcagcccttggccagaagt

SEQ ID NO: 270541 - DNA, 25 bp, Probe Sequence
ggaaaatgcaacatctcgcaagcgc

SEQ ID NO: 270542 - DNA, 25 bp, Probe Sequence
ggaaaatcatagcttacagatggta

SEQ ID NO: 270543 - DNA, 25 bp, Probe Sequence
ggaaaatcaagaggctacacttata

SEQ ID NO: 270544 - DNA, 25 bp, Probe Sequence
ggaactaataagccttcacttgtca

SEQ ID NO: 270545 - DNA, 25 bp, Probe Sequence
ggaacaactctatcattccctatct

SEQ ID NO: 270546 - DNA, 25 bp, Probe Sequence
ggaacaatttcattataacgtgatc

SEQ ID NO: 270547 - DNA, 25 bp, Probe Sequence
ggaacttccacattatacatttgat

SEQ ID NO: 270548 - DNA, 25 bp, Probe Sequence
ggaactcttcaacaagatccgcaag

SEQ ID NO: 270549 - DNA, 25 bp, Probe Sequence
ggaactatccaaaagagacagggag

SEQ ID NO: 270550 - DNA, 25 bp, Probe Sequence
ggaacttggaatcagcccaacgatc

SEQ ID NO: 270551 - DNA, 25 bp, Probe Sequence
tggaattggaaatcgcctgaaccca

SEQ ID NO: 270552 - DNA, 25 bp, Probe Sequence
ggaattggagaaaggccccaaccag

SEQ ID NO: 270553 - DNA, 25 bp, Probe Sequence
ggaaccggaaagcctgccagaaaag

SEQ ID NO: 270554 - DNA, 25 bp, Probe Sequence
ggaaccgaagaagctctgcgtacaa

SEQ ID NO: 270555 - DNA, 25 bp, Probe Sequence
ggaagccggaacaaattcgtagcaa

SEQ ID NO: 270556 - DNA, 25 bp, Probe Sequence
ggaagttggatacactttgtgactt

SEQ ID NO: 270557 - DNA, 25 bp, Probe Sequence
ggaactctgtattgtatcacttgta

SEQ ID NO: 270558 - DNA, 25 bp, Probe Sequence
ggaacatctgggttatgcctttttt

SEQ ID NO: 270559 - DNA, 25 bp, Probe Sequence
ggaacaatgtggtatggctaatttc

SEQ ID NO: 270560 - DNA, 25 bp, Probe Sequence
ggaacagtttgcctggagacatttc

SEQ ID NO: 270561 - DNA, 25 bp, Probe Sequence
ggaacagtttgcctggagacatttc

SEQ ID NO: 270562 - DNA, 25 bp, Probe Sequence
ggaacactttgcctggagacatttc

SEQ ID NO: 270563 - DNA, 25 bp, Probe Sequence
ggaacacttgctactggataatcgt

SEQ ID NO: 270564 - DNA, 25 bp, Probe Sequence
ggaaaatgtgctattgagattccag

SEQ ID NO: 270565 - DNA, 25 bp, Probe Sequence
ggaacaagacccggacattccaggc

SEQ ID NO: 270566 - DNA, 25 bp, Probe Sequence
ggaaaagaccttgacatattcctga

SEQ ID NO: 270567 - DNA, 25 bp, Probe Sequence
ggaagttgacctaaacatgtaacca

SEQ ID NO: 270568 - DNA, 25 bp, Probe Sequence
ggaagttcagccatcagaagtacct

SEQ ID NO: 270569 - DNA, 25 bp, Probe Sequence
ggaagttggcacttagcaggctacc

SEQ ID NO: 270570 - DNA, 25 bp, Probe Sequence
ggaagaatggacttggggattccac

SEQ ID NO: 270571 - DNA, 25 bp, Probe Sequence
ggaagaatgtattcggcaccttccc

SEQ ID NO: 270572 - DNA, 25 bp, Probe Sequence
ggaagaggtcttatgaggctttcct

SEQ ID NO: 270573 - DNA, 25 bp, Probe Sequence
ggaagaagttccatggcgttttgta

SEQ ID NO: 270574 - DNA, 25 bp, Probe Sequence
ggaaaatcgttcagtcgtcgtatta

SEQ ID NO: 270575 - DNA, 25 bp, Probe Sequence
ggaagaaggtttgatagccttttca

SEQ ID NO: 270576 - DNA, 25 bp, Probe Sequence
ggaaaaggtataggcttgccttgct

SEQ ID NO: 270577 - DNA, 25 bp, Probe Sequence
ggaaaatggttctactgcatccttt

SEQ ID NO: 270578 - DNA, 25 bp, Probe Sequence
ggaaaaggtgtgtgctgacttgata

SEQ ID NO: 270579 - DNA, 25 bp, Probe Sequence
ggaaaatgccttgctatatctgtaa

SEQ ID NO: 270580 - DNA, 25 bp, Probe Sequence
ggaacaatccttgccagagtgggct

SEQ ID NO: 270581 - DNA, 25 bp, Probe Sequence
ggaacacacctttatggctggggct

SEQ ID NO: 270582 - DNA, 25 bp, Probe Sequence
ggaagccctttgttgtgcgagggtg

SEQ ID NO: 270583 - DNA, 25 bp, Probe Sequence
ggaagctggcttctgggagaggagt

SEQ ID NO: 270584 - DNA, 25 bp, Probe Sequence
ggaatggtgttggggaaagtgcatg

SEQ ID NO: 270585 - DNA, 25 bp, Probe Sequence
ggaagcggtgggccagaacgactgc

SEQ ID NO: 270586 - DNA, 25 bp, Probe Sequence
ggaactgtgtgtgtcctacacaatg

SEQ ID NO: 270587 - DNA, 25 bp, Probe Sequence
ggaagctttatcgatatataccaac

SEQ ID NO: 270588 - DNA, 25 bp, Probe Sequence
ggaacttttactttctacaacagct

SEQ ID NO: 270589 - DNA, 25 bp, Probe Sequence
ggaagtttctgcattccttcaacag

SEQ ID NO: 270590 - DNA, 25 bp, Probe Sequence
ggaagccattccgagattttaaaat

SEQ ID NO: 270591 - DNA, 25 bp, Probe Sequence
ggaactcttccagatagattaagac

SEQ ID NO: 270592 - DNA, 25 bp, Probe Sequence
ggaactgttctacaaggctgatgga

SEQ ID NO: 270593 - DNA, 25 bp, Probe Sequence
ggaaggctttttaagggatgtgaca

SEQ ID NO: 270594 - DNA, 25 bp, Probe Sequence
ggaagtgcttttctactaaggcctc

SEQ ID NO: 270595 - DNA, 25 bp, Probe Sequence
ggaacgccttctcaaggagggattc

SEQ ID NO: 270596 - DNA, 25 bp, Probe Sequence
ggaacagccttatagagagagggag

SEQ ID NO: 270597 - DNA, 25 bp, Probe Sequence
ggaacccatggatacagagggccaa

SEQ ID NO: 270598 - DNA, 25 bp, Probe Sequence
ggaattgcccaattgaaaggccaaa

SEQ ID NO: 270599 - DNA, 25 bp, Probe Sequence
ggaactccacaattgatgagggtga

SEQ ID NO: 270600 - DNA, 25 bp, Probe Sequence
ggaacgcagccttagacatcaggtg

SEQ ID NO: 270601 - DNA, 25 bp, Probe Sequence
ggaacagagtcatccagccaatggg

SEQ ID NO: 270602 - DNA, 25 bp, Probe Sequence
ggaacagcagagtttctgccaagga

SEQ ID NO: 270603 - DNA, 25 bp, Probe Sequence
ggaacacacagggtggcacaagtac

SEQ ID NO: 270604 - DNA, 25 bp, Probe Sequence
ggaacacacagggtggcacaagtac

SEQ ID NO: 270605 - DNA, 25 bp, Probe Sequence
ggaacacacagggtggcacaagtac

SEQ ID NO: 270606 - DNA, 25 bp, Probe Sequence
ggaacaccgtcaggaacttgtacat

SEQ ID NO: 270607 - DNA, 25 bp, Probe Sequence
ggaacaccattctgataccagaaca

SEQ ID NO: 270608 - DNA, 25 bp, Probe Sequence
tggaaactacttgaagccgcccatc

SEQ ID NO: 270609 - DNA, 25 bp, Probe Sequence
tggaaactacttgaagccgcccatc

SEQ ID NO: 270610 - DNA, 25 bp, Probe Sequence
tggaaactacttgaagccgcccatc

SEQ ID NO: 270611 - DNA, 25 bp, Probe Sequence
ggaacactacaaaaaggcgcccatc

SEQ ID NO: 270612 - DNA, 25 bp, Probe Sequence
ggaagactattaaaggacagtcctg

SEQ ID NO: 270613 - DNA, 25 bp, Probe Sequence
ggaaaataattgaaggcactgaagt

SEQ ID NO: 270614 - DNA, 25 bp, Probe Sequence
ggcagcaaaagttggaagcctggag

SEQ ID NO: 270615 - DNA, 25 bp, Probe Sequence
ggcatagcaaggaggaacgggagga

SEQ ID NO: 270616 - DNA, 25 bp, Probe Sequence
ggaagccggggagggcagttgagga

SEQ ID NO: 270617 - DNA, 25 bp, Probe Sequence
ggaacaggggtatgacagtgagaaa

SEQ ID NO: 270618 - DNA, 25 bp, Probe Sequence
ggaacactgaggaatggtcctagca

SEQ ID NO: 270619 - DNA, 25 bp, Probe Sequence
ggaagcctgaagaagccagccttga

SEQ ID NO: 270620 - DNA, 25 bp, Probe Sequence
ggaagcctgggaagtgcccagtgac

SEQ ID NO: 270621 - DNA, 25 bp, Probe Sequence
ggaacctgattaaggaccagatcac

SEQ ID NO: 270622 - DNA, 25 bp, Probe Sequence
ggaacctattcacaacagatacaaa

SEQ ID NO: 270623 - DNA, 25 bp, Probe Sequence
ggaacccagctctaatacattccaa

SEQ ID NO: 270624 - DNA, 25 bp, Probe Sequence
ggaactacactcttgagcaatacca

SEQ ID NO: 270625 - DNA, 25 bp, Probe Sequence
ggaagtggactctggaaacgacatt

SEQ ID NO: 270626 - DNA, 25 bp, Probe Sequence
ggaatatatgccttatggaaacgaa

SEQ ID NO: 270627 - DNA, 25 bp, Probe Sequence
ggaacaatgccacatggacagaggt

SEQ ID NO: 270628 - DNA, 25 bp, Probe Sequence
ggaacacatgctctgatgcgaaggg

SEQ ID NO: 270629 - DNA, 25 bp, Probe Sequence
ggaacatagcgaatccgaatggatc

SEQ ID NO: 270630 - DNA, 25 bp, Probe Sequence
ggaacttggaatgcaagctggatgc

SEQ ID NO: 270631 - DNA, 25 bp, Probe Sequence
ggaactgggccagcagagcatgttg

SEQ ID NO: 270632 - DNA, 25 bp, Probe Sequence
ggaacagagcgcgaacggcttctaa

SEQ ID NO: 270633 - DNA, 25 bp, Probe Sequence
ggaacaagcagtgaatgtggatcta

SEQ ID NO: 270634 - DNA, 25 bp, Probe Sequence
ggaagaagagctgaacctgcctatc

SEQ ID NO: 270635 - DNA, 25 bp, Probe Sequence
ggaagaagttctcacttgccaatat

SEQ ID NO: 270636 - DNA, 25 bp, Probe Sequence
ggaagaagttcgccatggagccaga

SEQ ID NO: 270637 - DNA, 25 bp, Probe Sequence
ggaagaagttcgccatggagccaga

SEQ ID NO: 270638 - DNA, 25 bp, Probe Sequence
ggaagacagtcttcgatcggcacaa

SEQ ID NO: 270639 - DNA, 25 bp, Probe Sequence
ggaagaaggcttcatctcagaaaag

SEQ ID NO: 270640 - DNA, 25 bp, Probe Sequence
ggcacgggagtaaattcagcattaa

SEQ ID NO: 270641 - DNA, 25 bp, Probe Sequence
ggcagggtagtaagttccctggaat

SEQ ID NO: 270642 - DNA, 25 bp, Probe Sequence
ggaagagctagatagtgcccctgga

SEQ ID NO: 270643 - DNA, 25 bp, Probe Sequence
ggaatgactggatcattgctccctc

SEQ ID NO: 270644 - DNA, 25 bp, Probe Sequence
ggaatgactggatcattgctccctc

SEQ ID NO: 270645 - DNA, 25 bp, Probe Sequence
ggaacagatgccagatcagtgccct

SEQ ID NO: 270646 - DNA, 25 bp, Probe Sequence
ggaacagagccacgaatctgccttt

SEQ ID NO: 270647 - DNA, 25 bp, Probe Sequence
ggaacagagagacacactgccacca

SEQ ID NO: 270648 - DNA, 25 bp, Probe Sequence
ggaacagaagtttatgtgtccaaat

SEQ ID NO: 270649 - DNA, 25 bp, Probe Sequence
ggaagatagcagattgttttcaaaa

SEQ ID NO: 270650 - DNA, 25 bp, Probe Sequence
ggaagaaggcactgttaccatagaa

SEQ ID NO: 270651 - DNA, 25 bp, Probe Sequence
ggaagattagctctttacgatggaa

SEQ ID NO: 270652 - DNA, 25 bp, Probe Sequence
ggaagcaataagccattctaagagc

SEQ ID NO: 270653 - DNA, 25 bp, Probe Sequence
ggaaccgtgtacatctaagagccct

SEQ ID NO: 270654 - DNA, 25 bp, Probe Sequence
ggaacggggacacttacaaattgct

SEQ ID NO: 270655 - DNA, 25 bp, Probe Sequence
ggaaccagtggaatctttaatcttg

SEQ ID NO: 270656 - DNA, 25 bp, Probe Sequence
ggaactgagttgagcttctttcgct

SEQ ID NO: 270657 - DNA, 25 bp, Probe Sequence
ggaactagaatgtgtgactctgtgg

SEQ ID NO: 270658 - DNA, 25 bp, Probe Sequence
ggaactagaaggctgtttgaacttt

SEQ ID NO: 270659 - DNA, 25 bp, Probe Sequence
ggaatctttaatcttgttaatactt

SEQ ID NO: 270660 - DNA, 25 bp, Probe Sequence
ggaactggagaacattgtgccaata

SEQ ID NO: 270661 - DNA, 25 bp, Probe Sequence
ggaacttggtaggaactgccaaatg

SEQ ID NO: 270662 - DNA, 25 bp, Probe Sequence
ggaagcagtggttgagatcacgcca

SEQ ID NO: 270663 - DNA, 25 bp, Probe Sequence
ggaacactgacctagacatgtccag

SEQ ID NO: 270664 - DNA, 25 bp, Probe Sequence
ggaaccgagcactcatcagggagga

SEQ ID NO: 270665 - DNA, 25 bp, Probe Sequence
ggaaccgacgagtcctgaggagaga

SEQ ID NO: 270666 - DNA, 25 bp, Probe Sequence
ggaaccaccgagtgctgaaggatga

SEQ ID NO: 270667 - DNA, 25 bp, Probe Sequence
ggaagcccccaagagatgaggacag

SEQ ID NO: 270668 - DNA, 25 bp, Probe Sequence
ggaacacctccaggaaatgagagaa

SEQ ID NO: 270669 - DNA, 25 bp, Probe Sequence
ggaacattcctctgtaatagtgaac

SEQ ID NO: 270670 - DNA, 25 bp, Probe Sequence
ggaaccgtctctatagatagaaaat

SEQ ID NO: 270671 - DNA, 25 bp, Probe Sequence
ggaacccttgctatagtagtgacaa

SEQ ID NO: 270672 - DNA, 25 bp, Probe Sequence
ggaagcgcattgttttagtttccca

SEQ ID NO: 270673 - DNA, 25 bp, Probe Sequence
ggaaggcaagtttgttgacgtcaac

SEQ ID NO: 270674 - DNA, 25 bp, Probe Sequence
ggaagaattgacccttgaaggaatc

SEQ ID NO: 270675 - DNA, 25 bp, Probe Sequence
ggaagagcttacattatgacccaat

SEQ ID NO: 270676 - DNA, 25 bp, Probe Sequence
ggaagagtctacaatgttacccagc

SEQ ID NO: 270677 - DNA, 25 bp, Probe Sequence
ggaagagtctacaatgttacccagc

SEQ ID NO: 270678 - DNA, 25 bp, Probe Sequence
ggaagattctgagacatttcgcctg

SEQ ID NO: 270679 - DNA, 25 bp, Probe Sequence
ggaagattctgagacatttcgcctg

SEQ ID NO: 270680 - DNA, 25 bp, Probe Sequence
ggaagatgcccatgactggtcagct

SEQ ID NO: 270681 - DNA, 25 bp, Probe Sequence
ggaatgctgcccatggcataggcac

SEQ ID NO: 270682 - DNA, 25 bp, Probe Sequence
ggaacttcctacaatgatgcagcac

SEQ ID NO: 270683 - DNA, 25 bp, Probe Sequence
ggaacgctttttagctgcatgcatg

SEQ ID NO: 270684 - DNA, 25 bp, Probe Sequence
ggaacagcctggatttctgcatatg

SEQ ID NO: 270685 - DNA, 25 bp, Probe Sequence
ggaacatgcttgcagtatctctccc

SEQ ID NO: 270686 - DNA, 25 bp, Probe Sequence
ggaagctcagtgctgtagtccaact

SEQ ID NO: 270687 - DNA, 25 bp, Probe Sequence
ggaagcatatgtcattccccatatg

SEQ ID NO: 270688 - DNA, 25 bp, Probe Sequence
ggaatgatcagtgcaatccccaatc

SEQ ID NO: 270689 - DNA, 25 bp, Probe Sequence
ggaatgaagaagctctcctacatcc

SEQ ID NO: 270690 - DNA, 25 bp, Probe Sequence
ggaagaaaagccaacactagacctt

SEQ ID NO: 270691 - DNA, 25 bp, Probe Sequence
ggaagggactgctaacaagaacgct

SEQ ID NO: 270692 - DNA, 25 bp, Probe Sequence
ggaacttgatcctatacagaaactc

SEQ ID NO: 270693 - DNA, 25 bp, Probe Sequence
ggaacttgtacattacgtatttgct

SEQ ID NO: 270694 - DNA, 25 bp, Probe Sequence
ggaaccagtacatttggtctaactc

SEQ ID NO: 270695 - DNA, 25 bp, Probe Sequence
ggaacctgatattttcgtgaaacct

SEQ ID NO: 270696 - DNA, 25 bp, Probe Sequence
ggaacttgtggctgtcgagaaacct

SEQ ID NO: 270697 - DNA, 25 bp, Probe Sequence
ggaactttggctggtctgtatcatt

SEQ ID NO: 270698 - DNA, 25 bp, Probe Sequence
ggaacttttctcctgcatgtgtata

SEQ ID NO: 270699 - DNA, 25 bp, Probe Sequence
ggaacgatttgaggtgctgggcatt

SEQ ID NO: 270700 - DNA, 25 bp, Probe Sequence
ggaacagcattgaggagcggcgcat

SEQ ID NO: 270701 - DNA, 25 bp, Probe Sequence
ggaagcgattgcaggcagttcaggc

SEQ ID NO: 270702 - DNA, 25 bp, Probe Sequence
ggaaggtggcttgagttcaggagtt

SEQ ID NO: 270703 - DNA, 25 bp, Probe Sequence
ggaaggtggaatgaattggagattt

SEQ ID NO: 270704 - DNA, 25 bp, Probe Sequence
ggaagcgtggggtagcagatggagt

SEQ ID NO: 270705 - DNA, 25 bp, Probe Sequence
ggaagggcgggaggattgagaaggg

SEQ ID NO: 270706 - DNA, 25 bp, Probe Sequence
ggaactgctcgtagaaggaagaagg

SEQ ID NO: 270707 - DNA, 25 bp, Probe Sequence
ggaacctcaaagaagtgtatacaga

SEQ ID NO: 270708 - DNA, 25 bp, Probe Sequence
ggaagacttacgatgcatgtataca

SEQ ID NO: 270709 - DNA, 25 bp, Probe Sequence
ggaacagcttcagcttcagtgatga

SEQ ID NO: 270710 - DNA, 25 bp, Probe Sequence
ggaacagtacattttagtctgattt

SEQ ID NO: 270711 - DNA, 25 bp, Probe Sequence
ggaacgccacatttgcggacgattg

SEQ ID NO: 270712 - DNA, 25 bp, Probe Sequence
ggaacctcatccttggaacttgtga

SEQ ID NO: 270713 - DNA, 25 bp, Probe Sequence
ggaagtccaggcttggattgcctaa

SEQ ID NO: 270714 - DNA, 25 bp, Probe Sequence
ggaagtccaggcttggattgcctaa

SEQ ID NO: 270715 - DNA, 25 bp, Probe Sequence
ggaactccagatgtgcgcattgaca

SEQ ID NO: 270716 - DNA, 25 bp, Probe Sequence
ggaacatctcagcttctgcagtgaa

SEQ ID NO: 270717 - DNA, 25 bp, Probe Sequence
ggaatgtccagagttctcgaagaaa

SEQ ID NO: 270718 - DNA, 25 bp, Probe Sequence
ggaacgtgcgaagtctaaagaaaag

SEQ ID NO: 270719 - DNA, 25 bp, Probe Sequence
ggaacttcagagcttattggaaata

SEQ ID NO: 270720 - DNA, 25 bp, Probe Sequence
ggaactggagtgcatctttaaggag

SEQ ID NO: 270721 - DNA, 25 bp, Probe Sequence
ggaactggcactccaaactaagggc

SEQ ID NO: 270722 - DNA, 25 bp, Probe Sequence
ggaactggagatactaatttagggg

SEQ ID NO: 270723 - DNA, 25 bp, Probe Sequence
ggaacttgagcatctgcagatattg

SEQ ID NO: 270724 - DNA, 25 bp, Probe Sequence
ggaactttgagagtcaatgtcttca

SEQ ID NO: 270725 - DNA, 25 bp, Probe Sequence
ggaacctgtcaagtagttttcaact

SEQ ID NO: 270726 - DNA, 25 bp, Probe Sequence
ggaacttggcaaatgagtttcgctg

SEQ ID NO: 270727 - DNA, 25 bp, Probe Sequence
ggaacctggagcaagagatttcttt

SEQ ID NO: 270728 - DNA, 25 bp, Probe Sequence
ggaaccacaccaatgatatttttct

SEQ ID NO: 270729 - DNA, 25 bp, Probe Sequence
ggaagccgcactcagttatggcttc

SEQ ID NO: 270730 - DNA, 25 bp, Probe Sequence
ggaagccagactacactgcttacgt

SEQ ID NO: 270731 - DNA, 25 bp, Probe Sequence
ggaactgctttgacttcagtacgct

SEQ ID NO: 270732 - DNA, 25 bp, Probe Sequence
ggaactgctgtgccttaacttggct

SEQ ID NO: 270733 - DNA, 25 bp, Probe Sequence
ggaacatgaattctcagacattgtg

SEQ ID NO: 270734 - DNA, 25 bp, Probe Sequence
ggaagaagattagtgccatcattga

SEQ ID NO: 270735 - DNA, 25 bp, Probe Sequence
ggaagaagatcaacgcctcactgaa

SEQ ID NO: 270736 - DNA, 25 bp, Probe Sequence
ggaagcacagcaaacgtcgagtgag

SEQ ID NO: 270737 - DNA, 25 bp, Probe Sequence
ggaagcaactcagcgctagagatga

SEQ ID NO: 270738 - DNA, 25 bp, Probe Sequence
ggaagtacacagggtgaacataaaa

SEQ ID NO: 270739 - DNA, 25 bp, Probe Sequence
ggaagtaaagctctcctcagcaaat

SEQ ID NO: 270740 - DNA, 25 bp, Probe Sequence
ggaactcgaagtctcttctcaaaca

SEQ ID NO: 270741 - DNA, 25 bp, Probe Sequence
ggaactgctgaagtaacttcttact

SEQ ID NO: 270742 - DNA, 25 bp, Probe Sequence
ggaacctgatcagatacatctataa

SEQ ID NO: 270743 - DNA, 25 bp, Probe Sequence
ggaactgctataaatacatcaacaa

SEQ ID NO: 270744 - DNA, 25 bp, Probe Sequence
ggaacttgtcataaaatcgatcagt

SEQ ID NO: 270745 - DNA, 25 bp, Probe Sequence
ggaagttgctgagaaatggggtgga

SEQ ID NO: 270746 - DNA, 25 bp, Probe Sequence
ggaactgttgaaccaattgggtgga

SEQ ID NO: 270747 - DNA, 25 bp, Probe Sequence
ggaactgttgaaccagtcagatgga

SEQ ID NO: 270748 - DNA, 25 bp, Probe Sequence
ggaagtgctaaacatgctgaaggaa

SEQ ID NO: 270749 - DNA, 25 bp, Probe Sequence
ggaacttcaacactattaatgagag

SEQ ID NO: 270750 - DNA, 25 bp, Probe Sequence
ggaagccctacaccattaagaagcc

SEQ ID NO: 270751 - DNA, 25 bp, Probe Sequence
ggaataatctaccctgactaaagct

SEQ ID NO: 270752 - DNA, 25 bp, Probe Sequence
ggaatgacctatggcttactgaatg

SEQ ID NO: 270753 - DNA, 25 bp, Probe Sequence
ggaagcactgttggagctactgcaa

SEQ ID NO: 270754 - DNA, 25 bp, Probe Sequence
ggaacattcagtgcaccactggact

SEQ ID NO: 270755 - DNA, 25 bp, Probe Sequence
ggaagattgagagcccaaggtttaa

SEQ ID NO: 270756 - DNA, 25 bp, Probe Sequence
ggaacttgtgtccctaatgtgttta

SEQ ID NO: 270757 - DNA, 25 bp, Probe Sequence
ggaatcttcctggcacttagtgttt

SEQ ID NO: 270758 - DNA, 25 bp, Probe Sequence
ggaacttcagcaagcagtaggtttt

SEQ ID NO: 270759 - DNA, 25 bp, Probe Sequence
ggaagccaggcatgcaacagatttt

SEQ ID NO: 270760 - DNA, 25 bp, Probe Sequence
ggaaccactctatcaagtattatac

SEQ ID NO: 270761 - DNA, 25 bp, Probe Sequence
ggaactcctgttgctaaatatgaag

SEQ ID NO: 270762 - DNA, 25 bp, Probe Sequence
ggaactttggtgcctgaacattaag

SEQ ID NO: 270763 - DNA, 25 bp, Probe Sequence
ggaacctgggaggcagaagtctaca

SEQ ID NO: 270764 - DNA, 25 bp, Probe Sequence
ggaactgctcgttacagaagaccag

SEQ ID NO: 270765 - DNA, 25 bp, Probe Sequence
ggaatgttagcttacagaagtcact

SEQ ID NO: 270766 - DNA, 25 bp, Probe Sequence
ggcaagttactcacatctttcagcc

SEQ ID NO: 270767 - DNA, 25 bp, Probe Sequence
ggaagattcctactccatttgcaag

SEQ ID NO: 270768 - DNA, 25 bp, Probe Sequence
ggaagattctatatcctgatggtag

SEQ ID NO: 270769 - DNA, 25 bp, Probe Sequence
ggaagttgatcaatcccgaggctgc

SEQ ID NO: 270770 - DNA, 25 bp, Probe Sequence
ggaaggcgtcaatcctacgggatca

SEQ ID NO: 270771 - DNA, 25 bp, Probe Sequence
ggaaggttattacctaatggagatc

SEQ ID NO: 270772 - DNA, 25 bp, Probe Sequence
ggaaggagtgttttctacaggatcc

SEQ ID NO: 270773 - DNA, 25 bp, Probe Sequence
ggcaatggaagactggttacatgga

SEQ ID NO: 270774 - DNA, 25 bp, Probe Sequence
ggaacgagaggagtggaagctggac

SEQ ID NO: 270775 - DNA, 25 bp, Probe Sequence
ggaagaagagggagaggtggagcaa

SEQ ID NO: 270776 - DNA, 25 bp, Probe Sequence
ggaagaagagggagagatggagcaa

SEQ ID NO: 270777 - DNA, 25 bp, Probe Sequence
ggaagagaagagagcgactggacaa

SEQ ID NO: 270778 - DNA, 25 bp, Probe Sequence
ggaacccaggtcgagatgggacatt

SEQ ID NO: 270779 - DNA, 25 bp, Probe Sequence
ggaagccctggattcagtgagtgaa

SEQ ID NO: 270780 - DNA, 25 bp, Probe Sequence
ggaaccggtgaactgtgtgatgcca

SEQ ID NO: 270781 - DNA, 25 bp, Probe Sequence
ggaactgtggttttgtggaatgcac

SEQ ID NO: 270782 - DNA, 25 bp, Probe Sequence
ggcatgaaggttttttggagtactc

SEQ ID NO: 270783 - DNA, 25 bp, Probe Sequence
tggtgatcccgtttttggcagtaac

SEQ ID NO: 270784 - DNA, 25 bp, Probe Sequence
ggaaccatactatcaaatggcgaca

SEQ ID NO: 270785 - DNA, 25 bp, Probe Sequence
ggaacctaataaaagcgcctgaagc

SEQ ID NO: 270786 - DNA, 25 bp, Probe Sequence
ggaactctaaaaacaagcaatttgc

SEQ ID NO: 270787 - DNA, 25 bp, Probe Sequence
ggaatgtctaacttaaatagctttg

SEQ ID NO: 270788 - DNA, 25 bp, Probe Sequence
ggaagcttgaacctgaattgcattt

SEQ ID NO: 270789 - DNA, 25 bp, Probe Sequence
ggaagaggtacccacagctctcttc

SEQ ID NO: 270790 - DNA, 25 bp, Probe Sequence
ggaagtttgaaccacagccatcagt

SEQ ID NO: 270791 - DNA, 25 bp, Probe Sequence
ggaagtttgagtaacccacagaaca

SEQ ID NO: 270792 - DNA, 25 bp, Probe Sequence
ggaatgttgtagttacctactgagt

SEQ ID NO: 270793 - DNA, 25 bp, Probe Sequence
ggaatgaggttgttagcctgatgca

SEQ ID NO: 270794 - DNA, 25 bp, Probe Sequence
ggaatgaggttgttagcctgatgca

SEQ ID NO: 270795 - DNA, 25 bp, Probe Sequence
ggaagcagcactaaaagcactctga

SEQ ID NO: 270796 - DNA, 25 bp, Probe Sequence
ggaagcagcactaaaagcactctga

SEQ ID NO: 270797 - DNA, 25 bp, Probe Sequence
tggaaaactaagcacctattttgga

SEQ ID NO: 270798 - DNA, 25 bp, Probe Sequence
tggaaaactacctaacctttctgag

SEQ ID NO: 270799 - DNA, 25 bp, Probe Sequence
tgggaaagattgttaaccctattgg

SEQ ID NO: 270800 - DNA, 25 bp, Probe Sequence
tggtacaaggtgttcgacccttcct

SEQ ID NO: 270801 - DNA, 25 bp, Probe Sequence
tggctaacacggtgaaaccccgtct

SEQ ID NO: 270802 - DNA, 25 bp, Probe Sequence
tggctaacacggtgaaaccccgtct

SEQ ID NO: 270803 - DNA, 25 bp, Probe Sequence
tggctaacacggtgaaaccccgtct

SEQ ID NO: 270804 - DNA, 25 bp, Probe Sequence
ggaatccacggatgaaaccacagga

SEQ ID NO: 270805 - DNA, 25 bp, Probe Sequence
ggaaccctggtggtccaccattgga

SEQ ID NO: 270806 - DNA, 25 bp, Probe Sequence
ggaacgtgtggtcaccattatgcag

SEQ ID NO: 270807 - DNA, 25 bp, Probe Sequence
ggcagtcggggtcaacttgggaaga

SEQ ID NO: 270808 - DNA, 25 bp, Probe Sequence
ggaatctgtgggaccaagcactggg

SEQ ID NO: 270809 - DNA, 25 bp, Probe Sequence
ggaactatgggaccaagctgggggt

SEQ ID NO: 270810 - DNA, 25 bp, Probe Sequence
ggaagctgaaagtccccgaatgggt

SEQ ID NO: 270811 - DNA, 25 bp, Probe Sequence
ggaagctgaaagtccccgaatgggt

SEQ ID NO: 270812 - DNA, 25 bp, Probe Sequence
ggaagctgaaagtccccgaatgggt

SEQ ID NO: 270813 - DNA, 25 bp, Probe Sequence
ggaaggaaatggcaccgtcatgggt

SEQ ID NO: 270814 - DNA, 25 bp, Probe Sequence
ggaaggaaatggcaccgtcatgggt

SEQ ID NO: 270815 - DNA, 25 bp, Probe Sequence
ggaagagaaagatccgaggcggtgt

SEQ ID NO: 270816 - DNA, 25 bp, Probe Sequence
ggaagtggacagggcggagggtttg

SEQ ID NO: 270817 - DNA, 25 bp, Probe Sequence
ggaagccaaacggagcggggttctg

SEQ ID NO: 270818 - DNA, 25 bp, Probe Sequence
ggaactgacaacaaagcggggtttg

SEQ ID NO: 270819 - DNA, 25 bp, Probe Sequence
ggaactgtcaacaaacactctgtgg

SEQ ID NO: 270820 - DNA, 25 bp, Probe Sequence
ggaacgtcaacaggagcaacttgta

SEQ ID NO: 270821 - DNA, 25 bp, Probe Sequence
ggcaaggtcgcctaagggctttatt

SEQ ID NO: 270822 - DNA, 25 bp, Probe Sequence
ggcaatgcgagagataaaggacttc

SEQ ID NO: 270823 - DNA, 25 bp, Probe Sequence
ggaactaatgctgaaatggcaccac

SEQ ID NO: 270824 - DNA, 25 bp, Probe Sequence
ggaagctacactcaaagacactccc

SEQ ID NO: 270825 - DNA, 25 bp, Probe Sequence
ggaaccaaccaacaaacatgccatc

SEQ ID NO: 270826 - DNA, 25 bp, Probe Sequence
ggaaccaacccaaatcaatgataga

SEQ ID NO: 270827 - DNA, 25 bp, Probe Sequence
ggaagcacaacggctaatgaagaag

SEQ ID NO: 270828 - DNA, 25 bp, Probe Sequence
ggaagcgtagccggattatgaaatg

SEQ ID NO: 270829 - DNA, 25 bp, Probe Sequence
ggaagagcaaccagttactatgagt

SEQ ID NO: 270830 - DNA, 25 bp, Probe Sequence
ggaagctgaaccacggactgtggtg

SEQ ID NO: 270831 - DNA, 25 bp, Probe Sequence
ggaaggggctgatgcgaactggggc

SEQ ID NO: 270832 - DNA, 25 bp, Probe Sequence
ggaaggtgcctgtgcagacattgcc

SEQ ID NO: 270833 - DNA, 25 bp, Probe Sequence
ggaagagtgacctggcatcttggaa

SEQ ID NO: 270834 - DNA, 25 bp, Probe Sequence
ggaagtgaaacttgtcagcttgtgg

SEQ ID NO: 270835 - DNA, 25 bp, Probe Sequence
ggaagctggaatttgcccttctgtt

SEQ ID NO: 270836 - DNA, 25 bp, Probe Sequence
ggaagctgagggctggcacttcttc

SEQ ID NO: 270837 - DNA, 25 bp, Probe Sequence
ggaatggtggtgcgtgcctgtaatc

SEQ ID NO: 270838 - DNA, 25 bp, Probe Sequence
ggaatgggagccatggcaggtcata

SEQ ID NO: 270839 - DNA, 25 bp, Probe Sequence
ggaactgggcatatgggagccattg

SEQ ID NO: 270840 - DNA, 25 bp, Probe Sequence
ggaactgctaacatgcaagagcaca

SEQ ID NO: 270841 - DNA, 25 bp, Probe Sequence
ggaagcatgtttacaccaatgccaa

SEQ ID NO: 270842 - DNA, 25 bp, Probe Sequence
ggaagcatttatgaccttctacagt

SEQ ID NO: 270843 - DNA, 25 bp, Probe Sequence
ggaatgttccaatcgtattacagag

SEQ ID NO: 270844 - DNA, 25 bp, Probe Sequence
ggaagactctaatctctattcgaag

SEQ ID NO: 270845 - DNA, 25 bp, Probe Sequence
ggaagactaaagcctgcatactaaa

SEQ ID NO: 270846 - DNA, 25 bp, Probe Sequence
ggaagatttggaacctcactgaaaa

SEQ ID NO: 270847 - DNA, 25 bp, Probe Sequence
ggaagaggatggatccccttctagt

SEQ ID NO: 270848 - DNA, 25 bp, Probe Sequence
ggaagacaagggtcccaggtgtaga

SEQ ID NO: 270849 - DNA, 25 bp, Probe Sequence
ggaagaaacacttcaccgtggctca

SEQ ID NO: 270850 - DNA, 25 bp, Probe Sequence
ggaataaacctggcgtcagcattta

SEQ ID NO: 270851 - DNA, 25 bp, Probe Sequence
ggaatctaccctgcagatattctaa

SEQ ID NO: 270852 - DNA, 25 bp, Probe Sequence
ggaagctatcaggaccaattacaat

SEQ ID NO: 270853 - DNA, 25 bp, Probe Sequence
ggaagaatcgcgtccagaatcccta

SEQ ID NO: 270854 - DNA, 25 bp, Probe Sequence
ggaatagttgagccccaagtcctga

SEQ ID NO: 270855 - DNA, 25 bp, Probe Sequence
ggaatactaaggactgaagccacta

SEQ ID NO: 270856 - DNA, 25 bp, Probe Sequence
ggaattaagaggatacacacgtttg

SEQ ID NO: 270857 - DNA, 25 bp, Probe Sequence
ggaactgacagcagtgcttacatca

SEQ ID NO: 270858 - DNA, 25 bp, Probe Sequence
ggaagcgagcagaggctccacaggc

SEQ ID NO: 270859 - DNA, 25 bp, Probe Sequence
ggaagcgagatcgtggctggactgg

SEQ ID NO: 270860 - DNA, 25 bp, Probe Sequence
ggaagcgagatcgtggctggactgg

SEQ ID NO: 270861 - DNA, 25 bp, Probe Sequence
ggaagccaaggcagctgatgaaggg

SEQ ID NO: 270862 - DNA, 25 bp, Probe Sequence
ggaaccaaagctctcatggatgagg

SEQ ID NO: 270863 - DNA, 25 bp, Probe Sequence
ggaaccatcaacctctctgagttcc

SEQ ID NO: 270864 - DNA, 25 bp, Probe Sequence
ggaagattaggactcctgagttgcc

SEQ ID NO: 270865 - DNA, 25 bp, Probe Sequence
ggaagactcatgcagctggggttgg

SEQ ID NO: 270866 - DNA, 25 bp, Probe Sequence
ggaagagaatgatgctaggtttgtg

SEQ ID NO: 270867 - DNA, 25 bp, Probe Sequence
ggaagagaaataatgggttggctga

SEQ ID NO: 270868 - DNA, 25 bp, Probe Sequence
ggaagagcaccatatccttttgctg

SEQ ID NO: 270869 - DNA, 25 bp, Probe Sequence
ggaagacccattacatcgttggcta

SEQ ID NO: 270870 - DNA, 25 bp, Probe Sequence
ggaaggttcattcgcataggtgtga

SEQ ID NO: 270871 - DNA, 25 bp, Probe Sequence
ggaaggttcacaccaggagcgatcc

SEQ ID NO: 270872 - DNA, 25 bp, Probe Sequence
ggaaggttctagggtgaggcacctc

SEQ ID NO: 270873 - DNA, 25 bp, Probe Sequence
ggaaccttcttgtggaagcagccaa

SEQ ID NO: 270874 - DNA, 25 bp, Probe Sequence
ggaaccatccttatggagacacaca

SEQ ID NO: 270875 - DNA, 25 bp, Probe Sequence
ggcaacctacaaaatgggagaaaat

SEQ ID NO: 270876 - DNA, 25 bp, Probe Sequence
ggaattcaagaaaagcctggctaaa

SEQ ID NO: 270877 - DNA, 25 bp, Probe Sequence
ggaacgcctgaaacaggtgctgctc

SEQ ID NO: 270878 - DNA, 25 bp, Probe Sequence
ggaagaagcttaggcagggctctct

SEQ ID NO: 270879 - DNA, 25 bp, Probe Sequence
ggaagccgcctagtgcagagaggtt

SEQ ID NO: 270880 - DNA, 25 bp, Probe Sequence
ggaagcggttgactcacgggatttc

SEQ ID NO: 270881 - DNA, 25 bp, Probe Sequence
ggaaggaggggcaacatggaaagtc

SEQ ID NO: 270882 - DNA, 25 bp, Probe Sequence
ggaagcgggaggagctgagcaacgt

SEQ ID NO: 270883 - DNA, 25 bp, Probe Sequence
ggaacggatatggtttcatcaacag

SEQ ID NO: 270884 - DNA, 25 bp, Probe Sequence
ggaagctggtcagttttacagtgag

SEQ ID NO: 270885 - DNA, 25 bp, Probe Sequence
ggaagaggtcagtttgttcctggct

SEQ ID NO: 270886 - DNA, 25 bp, Probe Sequence
ggaagggacacctgtgttcgtgcat

SEQ ID NO: 270887 - DNA, 25 bp, Probe Sequence
ggaaggtccaggtgaatctcgtcat

SEQ ID NO: 270888 - DNA, 25 bp, Probe Sequence
ggaagtgccaaggatggatacggtt

SEQ ID NO: 270889 - DNA, 25 bp, Probe Sequence
ggaagtccaggccaaaactgtcctt

SEQ ID NO: 270890 - DNA, 25 bp, Probe Sequence
ggaagccaaggtcaccatgctgata

SEQ ID NO: 270891 - DNA, 25 bp, Probe Sequence
ggaacctgagtgcctcagtcatcgc

SEQ ID NO: 270892 - DNA, 25 bp, Probe Sequence
ggaagcgtgtggactgcagcttctg

SEQ ID NO: 270893 - DNA, 25 bp, Probe Sequence
ggaagaatgatggatctgctgtgtc

SEQ ID NO: 270894 - DNA, 25 bp, Probe Sequence
ggaagaatatgccctggttccagct

SEQ ID NO: 270895 - DNA, 25 bp, Probe Sequence
ggaacctgagcacctggtatacaga

SEQ ID NO: 270896 - DNA, 25 bp, Probe Sequence
ggaaccaagcatccacggatactga

SEQ ID NO: 270897 - DNA, 25 bp, Probe Sequence
ggaagccaagaatctggtgagcgaa

SEQ ID NO: 270898 - DNA, 25 bp, Probe Sequence
ggaagcgcaaaatcattgcggtcta

SEQ ID NO: 270899 - DNA, 25 bp, Probe Sequence
ggcactccaaactaagggcttctag

SEQ ID NO: 270900 - DNA, 25 bp, Probe Sequence
ggaaccacgatctacaaggaatttg

SEQ ID NO: 270901 - DNA, 25 bp, Probe Sequence
ggaaccaggagcaagagaggcagct

SEQ ID NO: 270902 - DNA, 25 bp, Probe Sequence
ggaaccgtcaaaggagcagcagcaa

SEQ ID NO: 270903 - DNA, 25 bp, Probe Sequence
ggaagctgggaagcagacagacaag

SEQ ID NO: 270904 - DNA, 25 bp, Probe Sequence
ggaagcgggattccaagctggcact

SEQ ID NO: 270905 - DNA, 25 bp, Probe Sequence
ggaagcttgggttcaagcgtcactc

SEQ ID NO: 270906 - DNA, 25 bp, Probe Sequence
ggaagttgggattggaatgagcctc

SEQ ID NO: 270907 - DNA, 25 bp, Probe Sequence
ggaagggaggaacactgcactctta

SEQ ID NO: 270908 - DNA, 25 bp, Probe Sequence
ggaacgtgaagaaatacagacttta

SEQ ID NO: 270909 - DNA, 25 bp, Probe Sequence
ggaagccatgaattagaactacatt

SEQ ID NO: 270910 - DNA, 25 bp, Probe Sequence
ggaagctctcactaaaacaatcctg

SEQ ID NO: 270911 - DNA, 25 bp, Probe Sequence
ggaagcctctcatagaaattgcctc

SEQ ID NO: 270912 - DNA, 25 bp, Probe Sequence
ggaagcctgcttataaatcatgttg

SEQ ID NO: 270913 - DNA, 25 bp, Probe Sequence
ggaagcagctgtctaaaatgcagtg

SEQ ID NO: 270914 - DNA, 25 bp, Probe Sequence
ggaacctggccatgcaaagcaaggg

SEQ ID NO: 270915 - DNA, 25 bp, Probe Sequence
ggaagaccgccaaagaacatctgag

SEQ ID NO: 270916 - DNA, 25 bp, Probe Sequence
ggaagaccgccaaagaacatctgag

SEQ ID NO: 270917 - DNA, 25 bp, Probe Sequence
ggaagagggccatcaaactcattgt

SEQ ID NO: 270918 - DNA, 25 bp, Probe Sequence
ggaagagggccatctgcctgaatgt

SEQ ID NO: 270919 - DNA, 25 bp, Probe Sequence
ggaagctggcaggatttgccgggta

SEQ ID NO: 270920 - DNA, 25 bp, Probe Sequence
ggcaaggcccggatccgggtacaga

SEQ ID NO: 270921 - DNA, 25 bp, Probe Sequence
ggaaggccgaggatgggggcccagc

SEQ ID NO: 270922 - DNA, 25 bp, Probe Sequence
ggaagcccgagtactggaggcagta

SEQ ID NO: 270923 - DNA, 25 bp, Probe Sequence
ggaaggccgttcagagaggctagag

SEQ ID NO: 270924 - DNA, 25 bp, Probe Sequence
ggaagtccgggcacatggcggagag

SEQ ID NO: 270925 - DNA, 25 bp, Probe Sequence
ggaagctcccggaaagagcagaggg

SEQ ID NO: 270926 - DNA, 25 bp, Probe Sequence
ggaagatcagccctgggatagtgct

SEQ ID NO: 270927 - DNA, 25 bp, Probe Sequence
ggaaggcagtccaagggcaggtggg

SEQ ID NO: 270928 - DNA, 25 bp, Probe Sequence
ggaagtcgttcaaagagccttagga

SEQ ID NO: 270929 - DNA, 25 bp, Probe Sequence
ggaagaagattcatacgcctctact

SEQ ID NO: 270930 - DNA, 25 bp, Probe Sequence
ggaagagcatgaacttagccccaag

SEQ ID NO: 270931 - DNA, 25 bp, Probe Sequence
ggaagaatatctatcagccaacaaa

SEQ ID NO: 270932 - DNA, 25 bp, Probe Sequence
ggaagtacatctatagccaaattga

SEQ ID NO: 270933 - DNA, 25 bp, Probe Sequence
ggaagtagcatctacatttacttaa

SEQ ID NO: 270934 - DNA, 25 bp, Probe Sequence
ggaatggagttatttgtctctataa

SEQ ID NO: 270935 - DNA, 25 bp, Probe Sequence
ggaagggtgaatttgacctctctga

SEQ ID NO: 270936 - DNA, 25 bp, Probe Sequence
ggaaggggaaataatccttgcaggg

SEQ ID NO: 270937 - DNA, 25 bp, Probe Sequence
ggaagctgagagttattacaccaga

SEQ ID NO: 270938 - DNA, 25 bp, Probe Sequence
ggaagagaagacaatgcccatcaag

SEQ ID NO: 270939 - DNA, 25 bp, Probe Sequence
ggaagaggcagattctccctcaaag

SEQ ID NO: 270940 - DNA, 25 bp, Probe Sequence
ggaaggggaatcgcgggaagctggc

SEQ ID NO: 270941 - DNA, 25 bp, Probe Sequence
ggcagagagtggtactacgggaacg

SEQ ID NO: 270942 - DNA, 25 bp, Probe Sequence
ggaagagcgggaatccgtgggccca

SEQ ID NO: 270943 - DNA, 25 bp, Probe Sequence
ggaatggcggagaccacactggtcc

SEQ ID NO: 270944 - DNA, 25 bp, Probe Sequence
ggaatggactggatcacctgactcc

SEQ ID NO: 270945 - DNA, 25 bp, Probe Sequence
ggaaggcacttttcggatgatccct

SEQ ID NO: 270946 - DNA, 25 bp, Probe Sequence
ggaaggctgagttgacggtgttgcc

SEQ ID NO: 270947 - DNA, 25 bp, Probe Sequence
ggaagtgctgatgtcacgtgggtta

SEQ ID NO: 270948 - DNA, 25 bp, Probe Sequence
ggaatatagggttagatgtgtgtta

SEQ ID NO: 270949 - DNA, 25 bp, Probe Sequence
ggaatccaagtgaatagtcagtttc

SEQ ID NO: 270950 - DNA, 25 bp, Probe Sequence
ggaagcaaaggcgaatgctccttgt

SEQ ID NO: 270951 - DNA, 25 bp, Probe Sequence
ggaagaaagccagagctgtctagtt

SEQ ID NO: 270952 - DNA, 25 bp, Probe Sequence
ggaagaaggatagaagacagcagta

SEQ ID NO: 270953 - DNA, 25 bp, Probe Sequence
ggaataaggagaacaggacagacta

SEQ ID NO: 270954 - DNA, 25 bp, Probe Sequence
ggaataaggagaacaggacagacta

SEQ ID NO: 270955 - DNA, 25 bp, Probe Sequence
ggcgtagtgggatatggccaactcg

SEQ ID NO: 270956 - DNA, 25 bp, Probe Sequence
ggcgtagtgggatatggccaactcg

SEQ ID NO: 270957 - DNA, 25 bp, Probe Sequence
ggaatatgtaagacttggctcatag

SEQ ID NO: 270958 - DNA, 25 bp, Probe Sequence
tgcgaaattccggatttccttgggt

SEQ ID NO: 270959 - DNA, 25 bp, Probe Sequence
ggaagattcaggaattcctctctgg

SEQ ID NO: 270960 - DNA, 25 bp, Probe Sequence
ggaagttcgaaggggctgtcgtgtg

SEQ ID NO: 270961 - DNA, 25 bp, Probe Sequence
ggaatgttcagaggtggccgtggtg

SEQ ID NO: 270962 - DNA, 25 bp, Probe Sequence
ggaagtgaaacggagccagcggctg

SEQ ID NO: 270963 - DNA, 25 bp, Probe Sequence
ggaagctgatacctgaagcactccc

SEQ ID NO: 270964 - DNA, 25 bp, Probe Sequence
ggaagctgtacaccatcatgaactc

SEQ ID NO: 270965 - DNA, 25 bp, Probe Sequence
ggaagctctagctcagtggcagctc

SEQ ID NO: 270966 - DNA, 25 bp, Probe Sequence
ggaagcctgatggggtgcagacaca

SEQ ID NO: 270967 - DNA, 25 bp, Probe Sequence
ggaaggctgtggtccaaggccattt

SEQ ID NO: 270968 - DNA, 25 bp, Probe Sequence
ggaatgactcgtttaaggcctattt

SEQ ID NO: 270969 - DNA, 25 bp, Probe Sequence
ggaatgacccggaagaggtcttatg

SEQ ID NO: 270970 - DNA, 25 bp, Probe Sequence
ggaattcccagtaagtgcgggtcat

SEQ ID NO: 270971 - DNA, 25 bp, Probe Sequence
ggaattccctacttgcactgggttc

SEQ ID NO: 270972 - DNA, 25 bp, Probe Sequence
ggaatctccccaggatgactgaaga

SEQ ID NO: 270973 - DNA, 25 bp, Probe Sequence
ggaaccagcccacgtatgagaaatg

SEQ ID NO: 270974 - DNA, 25 bp, Probe Sequence
ggaaccatggagggtgtagaagaga

SEQ ID NO: 270975 - DNA, 25 bp, Probe Sequence
ggcgaccatggagaggaaactggag

SEQ ID NO: 270976 - DNA, 25 bp, Probe Sequence
ggcagcaccttagggagggactggg

SEQ ID NO: 270977 - DNA, 25 bp, Probe Sequence
ggaaccttccagaagtgggcggctg

SEQ ID NO: 270978 - DNA, 25 bp, Probe Sequence
ggaaccttccagaagtgggcagctg

SEQ ID NO: 270979 - DNA, 25 bp, Probe Sequence
ggaaccttccagaagtgggcagctg

SEQ ID NO: 270980 - DNA, 25 bp, Probe Sequence
ggaagcttttccaagtgtgagcgcc

SEQ ID NO: 270981 - DNA, 25 bp, Probe Sequence
ggaagcttgttccaagggagcatga

SEQ ID NO: 270982 - DNA, 25 bp, Probe Sequence
ggaagcgaattcatctccgagctga

SEQ ID NO: 270983 - DNA, 25 bp, Probe Sequence
ggcaagagaataagacttcgtctca

SEQ ID NO: 270984 - DNA, 25 bp, Probe Sequence
ggaagaagaccgtttctgcttcaga

SEQ ID NO: 270985 - DNA, 25 bp, Probe Sequence
ggaagaaccccaattatgatctcta

SEQ ID NO: 270986 - DNA, 25 bp, Probe Sequence
ggaataaacccaacttgatcatgat

SEQ ID NO: 270987 - DNA, 25 bp, Probe Sequence
ggaagacaccccttcagataatgat

SEQ ID NO: 270988 - DNA, 25 bp, Probe Sequence
ggaatgacccttttgtgtctatgat

SEQ ID NO: 270989 - DNA, 25 bp, Probe Sequence
ggaagaaccatctctatgactagag

SEQ ID NO: 270990 - DNA, 25 bp, Probe Sequence
ggaagaatcctggacttggctagcc

SEQ ID NO: 270991 - DNA, 25 bp, Probe Sequence
ggaagtaatgctgagcctgcgaggc

SEQ ID NO: 270992 - DNA, 25 bp, Probe Sequence
ggaagctacacatcagcgttctgag

SEQ ID NO: 270993 - DNA, 25 bp, Probe Sequence
ggaagctgacagaagcagcgttcct

SEQ ID NO: 270994 - DNA, 25 bp, Probe Sequence
ggaagctacagattcagtgtgtggt

SEQ ID NO: 270995 - DNA, 25 bp, Probe Sequence
ggaatgctactcttttgtggtttac

SEQ ID NO: 270996 - DNA, 25 bp, Probe Sequence
ggaatgctcaccacatgttggtcga

SEQ ID NO: 270997 - DNA, 25 bp, Probe Sequence
ggaagaatccaactgatgagtatct

SEQ ID NO: 270998 - DNA, 25 bp, Probe Sequence
ggaagacatccagtgtacctacgga

SEQ ID NO: 270999 - DNA, 25 bp, Probe Sequence
ggaatagtacacccaccaacgaggg

SEQ ID NO: 271000 - DNA, 25 bp, Probe Sequence
ggaatattattacaccaaggaggag

SEQ ID NO: 271001 - DNA, 25 bp, Probe Sequence
ggaatttatattcaccaatttcagg

SEQ ID NO: 271002 - DNA, 25 bp, Probe Sequence
ggaatctatttacccttgcttttgg

SEQ ID NO: 271003 - DNA, 25 bp, Probe Sequence
ggaatctattgtgtttttcttctgc

SEQ ID NO: 271004 - DNA, 25 bp, Probe Sequence
ggaatagtttggaccttgtgcctcc

SEQ ID NO: 271005 - DNA, 25 bp, Probe Sequence
ggaatagtttggaccttgtgcctcc

SEQ ID NO: 271006 - DNA, 25 bp, Probe Sequence
ggaatggtttgagcatcatggtcac

SEQ ID NO: 271007 - DNA, 25 bp, Probe Sequence
ggaatggtttgagcatcatggtcac

SEQ ID NO: 271008 - DNA, 25 bp, Probe Sequence
ggaatggtctgtcacaatctgctcc

SEQ ID NO: 271009 - DNA, 25 bp, Probe Sequence
ggaaggtctataacagtcacccttg

SEQ ID NO: 271010 - DNA, 25 bp, Probe Sequence
ggaagtttatcttggatacccttga

SEQ ID NO: 271011 - DNA, 25 bp, Probe Sequence
ggaatatttttgagatatccctttg

SEQ ID NO: 271012 - DNA, 25 bp, Probe Sequence
ggaagtttgttgaaggtctccctat

SEQ ID NO: 271013 - DNA, 25 bp, Probe Sequence
ggaagcctcttgcagaggactcccc

SEQ ID NO: 271014 - DNA, 25 bp, Probe Sequence
ggaagctgcctacacagaacatcac

SEQ ID NO: 271015 - DNA, 25 bp, Probe Sequence
ggaagtctctgaccaagccattagc

SEQ ID NO: 271016 - DNA, 25 bp, Probe Sequence
ggaagactctgaacaatgacatcat

SEQ ID NO: 271017 - DNA, 25 bp, Probe Sequence
ggaagcccatgatcatctacaaggg

SEQ ID NO: 271018 - DNA, 25 bp, Probe Sequence
ggaagcaatgcagacacgagaagga

SEQ ID NO: 271019 - DNA, 25 bp, Probe Sequence
ggaagaagcgcttcatcggcatacg

SEQ ID NO: 271020 - DNA, 25 bp, Probe Sequence
ggaaggagcgaggcactggtgacgt

SEQ ID NO: 271021 - DNA, 25 bp, Probe Sequence
ggaaggagaatcgctggaacctggg

SEQ ID NO: 271022 - DNA, 25 bp, Probe Sequence
ggaagcactgattcccagttagggg

SEQ ID NO: 271023 - DNA, 25 bp, Probe Sequence
ggaagcagagagggccagatttgtg

SEQ ID NO: 271024 - DNA, 25 bp, Probe Sequence
ggaagccatcaggagcctgagtttt

SEQ ID NO: 271025 - DNA, 25 bp, Probe Sequence
ggaatgtcactggtgcccaggtgta

SEQ ID NO: 271026 - DNA, 25 bp, Probe Sequence
ggcaattaggattgcccaggagtcc

SEQ ID NO: 271027 - DNA, 25 bp, Probe Sequence
ggaagtatttggaccacagagttgg

SEQ ID NO: 271028 - DNA, 25 bp, Probe Sequence
ggaagtatttagatccagattctac

SEQ ID NO: 271029 - DNA, 25 bp, Probe Sequence
ggcaaaagtaaattccatacctcca

SEQ ID NO: 271030 - DNA, 25 bp, Probe Sequence
ggaagatcattgtaattcaaatcca

SEQ ID NO: 271031 - DNA, 25 bp, Probe Sequence
ggaagtcatcatcctgaacaacaaa

SEQ ID NO: 271032 - DNA, 25 bp, Probe Sequence
ggaagtacatcattgaactcaacca

SEQ ID NO: 271033 - DNA, 25 bp, Probe Sequence
ggcaattagcgatatagcataccca

SEQ ID NO: 271034 - DNA, 25 bp, Probe Sequence
ggcaattcggtcaattgtcactgtc

SEQ ID NO: 271035 - DNA, 25 bp, Probe Sequence
ggaattcggttagtactcatttgta

SEQ ID NO: 271036 - DNA, 25 bp, Probe Sequence
ggaattgctgctctttaccaaagaa

SEQ ID NO: 271037 - DNA, 25 bp, Probe Sequence
ggaatacttggctatattcaaaaaa

SEQ ID NO: 271038 - DNA, 25 bp, Probe Sequence
ggaaggtggtgcttacatccttaaa

SEQ ID NO: 271039 - DNA, 25 bp, Probe Sequence
ggaagatggccagtcaacttctgaa

SEQ ID NO: 271040 - DNA, 25 bp, Probe Sequence
ggaagatggacagcatatgttcctg

SEQ ID NO: 271041 - DNA, 25 bp, Probe Sequence
ggaattgtgctccaaatgtctactg

SEQ ID NO: 271042 - DNA, 25 bp, Probe Sequence
ggaataggtatgaaatgtctacgtg

SEQ ID NO: 271043 - DNA, 25 bp, Probe Sequence
ggaagaggtgaggcctgttagcttg

SEQ ID NO: 271044 - DNA, 25 bp, Probe Sequence
ggaagagatggggaggataccttaa

SEQ ID NO: 271045 - DNA, 25 bp, Probe Sequence
ggaagatctgggggaggaagttcaa

SEQ ID NO: 271046 - DNA, 25 bp, Probe Sequence
ggaagatctggctgaaggattattc

SEQ ID NO: 271047 - DNA, 25 bp, Probe Sequence
ggaagcagggatcagggagtgtggc

SEQ ID NO: 271048 - DNA, 25 bp, Probe Sequence
ggaagactggttacatggaggggat

SEQ ID NO: 271049 - DNA, 25 bp, Probe Sequence
ggaagaatgtttcgtgccatgggta

SEQ ID NO: 271050 - DNA, 25 bp, Probe Sequence
ggaagagctttgaaggcctgaggtc

SEQ ID NO: 271051 - DNA, 25 bp, Probe Sequence
ggaagaatgcttaaggatgtgattg

SEQ ID NO: 271052 - DNA, 25 bp, Probe Sequence
ggaagaacttaagcatatactgtgt

SEQ ID NO: 271053 - DNA, 25 bp, Probe Sequence
ggaagaaatctatcacccagtcatg

SEQ ID NO: 271054 - DNA, 25 bp, Probe Sequence
ggaagaggcctatgattgacagaca

SEQ ID NO: 271055 - DNA, 25 bp, Probe Sequence
ggaagggcctgaggattacagtgaa

SEQ ID NO: 271056 - DNA, 25 bp, Probe Sequence
ggaagggcctgggcttgaatgtgac

SEQ ID NO: 271057 - DNA, 25 bp, Probe Sequence
ggaagcttactgttctgctaaatga

SEQ ID NO: 271058 - DNA, 25 bp, Probe Sequence
ggaatatttggagctgtgcaaatgt

SEQ ID NO: 271059 - DNA, 25 bp, Probe Sequence
ggaattttgcagttcaatgagaaga

SEQ ID NO: 271060 - DNA, 25 bp, Probe Sequence
ggcaacttccagtgcaaggacgtcc

SEQ ID NO: 271061 - DNA, 25 bp, Probe Sequence
ggcaacttcaagttcggacagcggc

SEQ ID NO: 271062 - DNA, 25 bp, Probe Sequence
ggaagttcagagttctaggagtgga

SEQ ID NO: 271063 - DNA, 25 bp, Probe Sequence
ggaaggtgaggtgtgagggaggaga

SEQ ID NO: 271064 - DNA, 25 bp, Probe Sequence
ggaatggtgatagtaatagggaggg

SEQ ID NO: 271065 - DNA, 25 bp, Probe Sequence
ggaagtggcaatataaggggatgag

SEQ ID NO: 271066 - DNA, 25 bp, Probe Sequence
ggaagctaagtatacgctgcggtgg

SEQ ID NO: 271067 - DNA, 25 bp, Probe Sequence
ggaagctgaagaaaaagcgccagtg

SEQ ID NO: 271068 - DNA, 25 bp, Probe Sequence
ggaaggatcataacggagcccggag

SEQ ID NO: 271069 - DNA, 25 bp, Probe Sequence
ggaagtggcagttgcagtgagccga

SEQ ID NO: 271070 - DNA, 25 bp, Probe Sequence
ggaagtggcagttgcagtgagccga

SEQ ID NO: 271071 - DNA, 25 bp, Probe Sequence
ggaagcagaggttgcagtgagctgg

SEQ ID NO: 271072 - DNA, 25 bp, Probe Sequence
ggaagaggatgccatgcagaactgc

SEQ ID NO: 271073 - DNA, 25 bp, Probe Sequence
ggaatgggtcctcgaatcatcgtgc

SEQ ID NO: 271074 - DNA, 25 bp, Probe Sequence
ggaagtgtggcctgaataccccacc

SEQ ID NO: 271075 - DNA, 25 bp, Probe Sequence
ggaagtgtggcctgaataccccacc

SEQ ID NO: 271076 - DNA, 25 bp, Probe Sequence
ggaagtgtggcctgaataccccacc

SEQ ID NO: 271077 - DNA, 25 bp, Probe Sequence
ggaaggatggacggaaacctcgact

SEQ ID NO: 271078 - DNA, 25 bp, Probe Sequence
ggaagagtgccagcgaaaccacgag

SEQ ID NO: 271079 - DNA, 25 bp, Probe Sequence
ggaaggacacagcagtattggacgg

SEQ ID NO: 271080 - DNA, 25 bp, Probe Sequence
ggaaggacgctcaaatactggactg

SEQ ID NO: 271081 - DNA, 25 bp, Probe Sequence
ggaaggatcccaaatacagagaatg

SEQ ID NO: 271082 - DNA, 25 bp, Probe Sequence
ggaagaacctttaatcagagaagta

SEQ ID NO: 271083 - DNA, 25 bp, Probe Sequence
ggaagaatccttggtttcaagtaag

SEQ ID NO: 271084 - DNA, 25 bp, Probe Sequence
ggaagaacactatgtggctgccgtg

SEQ ID NO: 271085 - DNA, 25 bp, Probe Sequence
ggaagactgggttgcagggactgtg

SEQ ID NO: 271086 - DNA, 25 bp, Probe Sequence
ggaagtctgggaatgaggagattga

SEQ ID NO: 271087 - DNA, 25 bp, Probe Sequence
ggcaacaccggattcagtggcattg

SEQ ID NO: 271088 - DNA, 25 bp, Probe Sequence
ggaagaccaggaaagtgccatagac

SEQ ID NO: 271089 - DNA, 25 bp, Probe Sequence
ggaagatccaggaagagtcactgag

SEQ ID NO: 271090 - DNA, 25 bp, Probe Sequence
ggaagaccgagaagcaccagctaga

SEQ ID NO: 271091 - DNA, 25 bp, Probe Sequence
ggaagcaggaagtgacagccataga

SEQ ID NO: 271092 - DNA, 25 bp, Probe Sequence
ggaagatgtacggagacatggcatg

SEQ ID NO: 271093 - DNA, 25 bp, Probe Sequence
ggaagatcaagcgcatggcaggcat

SEQ ID NO: 271094 - DNA, 25 bp, Probe Sequence
ggaagctaatctgcttagtctattt

SEQ ID NO: 271095 - DNA, 25 bp, Probe Sequence
ggaagcaaatggttgtaactttgta

SEQ ID NO: 271096 - DNA, 25 bp, Probe Sequence
ggaaggaaggatatcaacgtgtgta

SEQ ID NO: 271097 - DNA, 25 bp, Probe Sequence
ggaagagactggtttgactcgtgct

SEQ ID NO: 271098 - DNA, 25 bp, Probe Sequence
ggaagcagatctcttgtgtggcgga

SEQ ID NO: 271099 - DNA, 25 bp, Probe Sequence
ggaagcagtattatctgcggtgggg

SEQ ID NO: 271100 - DNA, 25 bp, Probe Sequence
ggcaacgtgaattctctcaggggtc

SEQ ID NO: 271101 - DNA, 25 bp, Probe Sequence
tggagacttagggcaccaggggttt

SEQ ID NO: 271102 - DNA, 25 bp, Probe Sequence
ggcaagcctagggaccagggtgagg

SEQ ID NO: 271103 - DNA, 25 bp, Probe Sequence
ggaagcttgatggcaatcctggaag

SEQ ID NO: 271104 - DNA, 25 bp, Probe Sequence
ggaagcatctgacaacctgatatat

SEQ ID NO: 271105 - DNA, 25 bp, Probe Sequence
ggaagcacacagcaatcccaaaacc

SEQ ID NO: 271106 - DNA, 25 bp, Probe Sequence
ggaatacaagggcccacaaccaggc

SEQ ID NO: 271107 - DNA, 25 bp, Probe Sequence
ggaatacaaaactcacaccgacagc

SEQ ID NO: 271108 - DNA, 25 bp, Probe Sequence
ggcaattgaaaaaccaacctacact

SEQ ID NO: 271109 - DNA, 25 bp, Probe Sequence
ggaagatgaaccaccacaagtaccg

SEQ ID NO: 271110 - DNA, 25 bp, Probe Sequence
tggaatctaaccacttaaggacctt

SEQ ID NO: 271111 - DNA, 25 bp, Probe Sequence
ggaagcaggaccagtaagggacctt

SEQ ID NO: 271112 - DNA, 25 bp, Probe Sequence
ggcaaggtacctctcaagagggcct

SEQ ID NO: 271113 - DNA, 25 bp, Probe Sequence
ggaataatacctccaaaaggctgtt

SEQ ID NO: 271114 - DNA, 25 bp, Probe Sequence
ggaagaaaattccaatatgatgttt

SEQ ID NO: 271115 - DNA, 25 bp, Probe Sequence
ggaagtagaagtcatatgttgtctt

SEQ ID NO: 271116 - DNA, 25 bp, Probe Sequence
ggaagggaagggtatatagattgta

SEQ ID NO: 271117 - DNA, 25 bp, Probe Sequence
ggcacagatgtaaggtttataactg

SEQ ID NO: 271118 - DNA, 25 bp, Probe Sequence
ggcactattaggaagtttaaatgtg

SEQ ID NO: 271119 - DNA, 25 bp, Probe Sequence
ggcatggattaatagagttggagtt

SEQ ID NO: 271120 - DNA, 25 bp, Probe Sequence
ggcagtattaaatggtattacttcc

SEQ ID NO: 271121 - DNA, 25 bp, Probe Sequence
ggcaaattacactgtccttactgct

SEQ ID NO: 271122 - DNA, 25 bp, Probe Sequence
ggcaacaatgaccttttattttctg

SEQ ID NO: 271123 - DNA, 25 bp, Probe Sequence
ggcaacaatgaccttttattttctg

SEQ ID NO: 271124 - DNA, 25 bp, Probe Sequence
ggcaacaatgaccttttattttctg

SEQ ID NO: 271125 - DNA, 25 bp, Probe Sequence
ggaagataatcgatagtcatgtttt

SEQ ID NO: 271126 - DNA, 25 bp, Probe Sequence
ggaagaatcatgggctggtatttgt

SEQ ID NO: 271127 - DNA, 25 bp, Probe Sequence
ggaagagatcattgccgaggactat

SEQ ID NO: 271128 - DNA, 25 bp, Probe Sequence
ggaagtatgtagccagaagagttag

SEQ ID NO: 271129 - DNA, 25 bp, Probe Sequence
ggcacttggggggaaagttgagacg

SEQ ID NO: 271130 - DNA, 25 bp, Probe Sequence
ggcacctgggagagtaagtccagca

SEQ ID NO: 271131 - DNA, 25 bp, Probe Sequence
ggcaagactgggacgtctagtccac

SEQ ID NO: 271132 - DNA, 25 bp, Probe Sequence
ggaagaggaggacgtgccagaccag

SEQ ID NO: 271133 - DNA, 25 bp, Probe Sequence
ggaaggagcagtgaagccaagccag

SEQ ID NO: 271134 - DNA, 25 bp, Probe Sequence
ggcaagcagatgggcgaatcctacg

SEQ ID NO: 271135 - DNA, 25 bp, Probe Sequence
ggaatcttgagtcaatccctcagta

SEQ ID NO: 271136 - DNA, 25 bp, Probe Sequence
ggaattttagctatgccctcatgtc

SEQ ID NO: 271137 - DNA, 25 bp, Probe Sequence
ggaagtctctaggttctgagctctg

SEQ ID NO: 271138 - DNA, 25 bp, Probe Sequence
ggaagatgccttacgtctgatcttg

SEQ ID NO: 271139 - DNA, 25 bp, Probe Sequence
ggaagatccattagttctttgggga

SEQ ID NO: 271140 - DNA, 25 bp, Probe Sequence
ggcaaaccatttcttaaagttgatg

SEQ ID NO: 271141 - DNA, 25 bp, Probe Sequence
ggcaagacccttctctagaatttcc

SEQ ID NO: 271142 - DNA, 25 bp, Probe Sequence
tggaatcccaatctatctaaatttc

SEQ ID NO: 271143 - DNA, 25 bp, Probe Sequence
tgaaatcgacctgtttaataattta

SEQ ID NO: 271144 - DNA, 25 bp, Probe Sequence
ggaatggacctggtgtaacacactt

SEQ ID NO: 271145 - DNA, 25 bp, Probe Sequence
ggaatggacccagtgatacaaacct

SEQ ID NO: 271146 - DNA, 25 bp, Probe Sequence
ggaatgggccagagtccaaagcagc

SEQ ID NO: 271147 - DNA, 25 bp, Probe Sequence
ggaaggagcctgagctgctggaacc

SEQ ID NO: 271148 - DNA, 25 bp, Probe Sequence
ggaagagcagggtgtgctgcactca

SEQ ID NO: 271149 - DNA, 25 bp, Probe Sequence
ggaagagcagcacagcctgctccac

SEQ ID NO: 271150 - DNA, 25 bp, Probe Sequence
ggaagagcagcacagcctgctccac

SEQ ID NO: 271151 - DNA, 25 bp, Probe Sequence
ggaagacagaattgctcctgcatgc

SEQ ID NO: 271152 - DNA, 25 bp, Probe Sequence
ggaagagaaaatgcctgctgttgta

SEQ ID NO: 271153 - DNA, 25 bp, Probe Sequence
ggaagagcaaatgcctcctgttgtc

SEQ ID NO: 271154 - DNA, 25 bp, Probe Sequence
ggaatacaagatggttgccgggtca

SEQ ID NO: 271155 - DNA, 25 bp, Probe Sequence
ggaagaaagatgactgatgtggtag

SEQ ID NO: 271156 - DNA, 25 bp, Probe Sequence
ggaagagccagagctgtgcagggag

SEQ ID NO: 271157 - DNA, 25 bp, Probe Sequence
ggaaggatcagcacagggagaggtc

SEQ ID NO: 271158 - DNA, 25 bp, Probe Sequence
ggaagagaagtgaacggcagagtga

SEQ ID NO: 271159 - DNA, 25 bp, Probe Sequence
ggaagaagctgttcacggtgtgata

SEQ ID NO: 271160 - DNA, 25 bp, Probe Sequence
ggaagaactgcttaatggtgatgat

SEQ ID NO: 271161 - DNA, 25 bp, Probe Sequence
ggaaggcactgaaacagaggactat

SEQ ID NO: 271162 - DNA, 25 bp, Probe Sequence
ggaaggcacagagaagggagctata

SEQ ID NO: 271163 - DNA, 25 bp, Probe Sequence
ggaaggatccagacatacacggctt

SEQ ID NO: 271164 - DNA, 25 bp, Probe Sequence
tggatgcacgcacatgccaatgcac

SEQ ID NO: 271165 - DNA, 25 bp, Probe Sequence
ggcatgctccagacataaatagctc

SEQ ID NO: 271166 - DNA, 25 bp, Probe Sequence
ggcacccacaacatgtaccgggaat

SEQ ID NO: 271167 - DNA, 25 bp, Probe Sequence
ggcacggccgagatgtacacgaaga

SEQ ID NO: 271168 - DNA, 25 bp, Probe Sequence
tgaccacgccgaatccggaagaaga

SEQ ID NO: 271169 - DNA, 25 bp, Probe Sequence
tgaccacctggaagtaacaagtagc

SEQ ID NO: 271170 - DNA, 25 bp, Probe Sequence
tgagcaagttggaagtttaattagc

SEQ ID NO: 271171 - DNA, 25 bp, Probe Sequence
ggaagtgttgtacttaccagtagga

SEQ ID NO: 271172 - DNA, 25 bp, Probe Sequence
ggaaggcttgtgtgtcctcagttaa

SEQ ID NO: 271173 - DNA, 25 bp, Probe Sequence
ggaagattctttgtcctcagttccc

SEQ ID NO: 271174 - DNA, 25 bp, Probe Sequence
ggaagatgatcgatcccagcacagt

SEQ ID NO: 271175 - DNA, 25 bp, Probe Sequence
ggaagagctgccaaagccaactgat

SEQ ID NO: 271176 - DNA, 25 bp, Probe Sequence
ggaagaggtaaaccatgtctgcagc

SEQ ID NO: 271177 - DNA, 25 bp, Probe Sequence
ggaagagtctaacctgtctctgcaa

SEQ ID NO: 271178 - DNA, 25 bp, Probe Sequence
ggaagaggcagctggtgttctgcaa

SEQ ID NO: 271179 - DNA, 25 bp, Probe Sequence
ggaaggctgcacaggtgactatcca

SEQ ID NO: 271180 - DNA, 25 bp, Probe Sequence
ggaatggcagcatggtagcacctcc

SEQ ID NO: 271181 - DNA, 25 bp, Probe Sequence
ggaatttcagaggtcatgccctccc

SEQ ID NO: 271182 - DNA, 25 bp, Probe Sequence
ggcacctacaaggttgtgccctcca

SEQ ID NO: 271183 - DNA, 25 bp, Probe Sequence
ggcaactacctggaaatggcctcca

SEQ ID NO: 271184 - DNA, 25 bp, Probe Sequence
ggaattatctctgaacatacctgta

SEQ ID NO: 271185 - DNA, 25 bp, Probe Sequence
ggaatttcccactaaagtcagtcca

SEQ ID NO: 271186 - DNA, 25 bp, Probe Sequence
ggaatttcctcaaaagagtcgatgt

SEQ ID NO: 271187 - DNA, 25 bp, Probe Sequence
ggaatttccactctgaggcttcaga

SEQ ID NO: 271188 - DNA, 25 bp, Probe Sequence
ggaattctacaatgaggcctccaat

SEQ ID NO: 271189 - DNA, 25 bp, Probe Sequence
ggaattgcagaaacagggccgccag

SEQ ID NO: 271190 - DNA, 25 bp, Probe Sequence
ggaagtatgagttggggcgcccagc

SEQ ID NO: 271191 - DNA, 25 bp, Probe Sequence
ggaagtatgagttggggcgcccagc

SEQ ID NO: 271192 - DNA, 25 bp, Probe Sequence
ggaaggtggcaatgggacccagctc

SEQ ID NO: 271193 - DNA, 25 bp, Probe Sequence
ggaaggtagaagtgggcagatcgct

SEQ ID NO: 271194 - DNA, 25 bp, Probe Sequence
ggaagttggcaaagatgtgtcagat

SEQ ID NO: 271195 - DNA, 25 bp, Probe Sequence
ggaatgttaataaatttcagtttag

SEQ ID NO: 271196 - DNA, 25 bp, Probe Sequence
ggaatgacttatacgttttgttttg

SEQ ID NO: 271197 - DNA, 25 bp, Probe Sequence
ggaagacagtgtacagttctccatt

SEQ ID NO: 271198 - DNA, 25 bp, Probe Sequence
ggaagatagatgttagatcctagag

SEQ ID NO: 271199 - DNA, 25 bp, Probe Sequence
ggaagatagatgttcatattgaagc

SEQ ID NO: 271200 - DNA, 25 bp, Probe Sequence
ggaagagatgtgtctaaaacagcat

SEQ ID NO: 271201 - DNA, 25 bp, Probe Sequence
ggaagactgttctaaaatcactttt

SEQ ID NO: 271202 - DNA, 25 bp, Probe Sequence
ggaagacgaggattaaatttcattt

SEQ ID NO: 271203 - DNA, 25 bp, Probe Sequence
ggaagacataggctaaatttctcca

SEQ ID NO: 271204 - DNA, 25 bp, Probe Sequence
ggaatcctaagacaaattactctga

SEQ ID NO: 271205 - DNA, 25 bp, Probe Sequence
ggaatccggaataaatactacctgg

SEQ ID NO: 271206 - DNA, 25 bp, Probe Sequence
ggaatccggaataaatactacctgg

SEQ ID NO: 271207 - DNA, 25 bp, Probe Sequence
ggaagagggaaccaatataacctgg

SEQ ID NO: 271208 - DNA, 25 bp, Probe Sequence
ggaagatggagaaccgtgattaccg

SEQ ID NO: 271209 - DNA, 25 bp, Probe Sequence
ggaagatcgaaagtgcgaatctgac

SEQ ID NO: 271210 - DNA, 25 bp, Probe Sequence
ggaagtcagaagcttaagtgaccat

SEQ ID NO: 271211 - DNA, 25 bp, Probe Sequence
ggaagtgattaggttaaggatgttg

SEQ ID NO: 271212 - DNA, 25 bp, Probe Sequence
ggaagtgatctatcctgccaggagg

SEQ ID NO: 271213 - DNA, 25 bp, Probe Sequence
ggaagtgacatgggtattgcaggca

SEQ ID NO: 271214 - DNA, 25 bp, Probe Sequence
ggaagtgactgtgggatgtttgcct

SEQ ID NO: 271215 - DNA, 25 bp, Probe Sequence
ggaaggtttgtacgttctgtgctgg

SEQ ID NO: 271216 - DNA, 25 bp, Probe Sequence
ggaaggaggtgtgcgtggcttctgg

SEQ ID NO: 271217 - DNA, 25 bp, Probe Sequence
ggaagacggattgctgctgggtcat

SEQ ID NO: 271218 - DNA, 25 bp, Probe Sequence
ggaagagctttcgttgctggtgttt

SEQ ID NO: 271219 - DNA, 25 bp, Probe Sequence
ggaagagcatgtatttgcttttgag

SEQ ID NO: 271220 - DNA, 25 bp, Probe Sequence
ggaagattctttacgttgttgtgct

SEQ ID NO: 271221 - DNA, 25 bp, Probe Sequence
ggaagtacttttggcattttactgt

SEQ ID NO: 271222 - DNA, 25 bp, Probe Sequence
ggaaggagctttggccatatatttt

SEQ ID NO: 271223 - DNA, 25 bp, Probe Sequence
ggaagaggtcttgcagatacttgac

SEQ ID NO: 271224 - DNA, 25 bp, Probe Sequence
ggcagacttgttgcctgtacaagaa

SEQ ID NO: 271225 - DNA, 25 bp, Probe Sequence
ggcaattctgacactcttaaaatga

SEQ ID NO: 271226 - DNA, 25 bp, Probe Sequence
ggaattctacacctcctttaagatt

SEQ ID NO: 271227 - DNA, 25 bp, Probe Sequence
ggaattttcccttcgcttgaatatt

SEQ ID NO: 271228 - DNA, 25 bp, Probe Sequence
ggcactgatttccctaggtttaact

SEQ ID NO: 271229 - DNA, 25 bp, Probe Sequence
ggcacagtctaccggaaatttaaat

SEQ ID NO: 271230 - DNA, 25 bp, Probe Sequence
ggcacagtctcatgttaacttgaaa

SEQ ID NO: 271231 - DNA, 25 bp, Probe Sequence
ggcatatggcattttctaacttagg

SEQ ID NO: 271232 - DNA, 25 bp, Probe Sequence
ggctacttcctttaacgaagtgcct

SEQ ID NO: 271233 - DNA, 25 bp, Probe Sequence
ggcgacttcctcattagggacagcg

SEQ ID NO: 271234 - DNA, 25 bp, Probe Sequence
ggcagtattcccacagaggggtagc

SEQ ID NO: 271235 - DNA, 25 bp, Probe Sequence
ggaatcccacctgctcaggtggcta

SEQ ID NO: 271236 - DNA, 25 bp, Probe Sequence
ggcaatgccaccatgatacaggggc

SEQ ID NO: 271237 - DNA, 25 bp, Probe Sequence
ggaaggccatcaaatgcctgagggc

SEQ ID NO: 271238 - DNA, 25 bp, Probe Sequence
ggaagatggccaaaacacagcctgc

SEQ ID NO: 271239 - DNA, 25 bp, Probe Sequence
ggcactagtgacaaggactcagact

SEQ ID NO: 271240 - DNA, 25 bp, Probe Sequence
ggaatctgtgtcaatgagccctgaa

SEQ ID NO: 271241 - DNA, 25 bp, Probe Sequence
ggaatcctattatgagcccaaaagg

SEQ ID NO: 271242 - DNA, 25 bp, Probe Sequence
ggaattcaatcctcatgtgccaaaa

SEQ ID NO: 271243 - DNA, 25 bp, Probe Sequence
ggaatctaagcacaatgcattcaaa

SEQ ID NO: 271244 - DNA, 25 bp, Probe Sequence
ggaatgccaagaccaggaccaacag

SEQ ID NO: 271245 - DNA, 25 bp, Probe Sequence
ggaatgcaaagaccagaacaaacag

SEQ ID NO: 271246 - DNA, 25 bp, Probe Sequence
ggaatgtatctgagagtccaaacag

SEQ ID NO: 271247 - DNA, 25 bp, Probe Sequence
ggcacagtagtaaagctgcctgccc

SEQ ID NO: 271248 - DNA, 25 bp, Probe Sequence
ggaagtagaaataagcctccctaga

SEQ ID NO: 271249 - DNA, 25 bp, Probe Sequence
ggaagtaaacttgggtcacctgatc

SEQ ID NO: 271250 - DNA, 25 bp, Probe Sequence
ggaatttattttgagccacgctgtg

SEQ ID NO: 271251 - DNA, 25 bp, Probe Sequence
ggaatattattctcaactcacgttt

SEQ ID NO: 271252 - DNA, 25 bp, Probe Sequence
ggaatcaaattttaacatgagcttt

SEQ ID NO: 271253 - DNA, 25 bp, Probe Sequence
ggcaaaatgagaagggacgtgcttt

SEQ ID NO: 271254 - DNA, 25 bp, Probe Sequence
ggaataatggggagcaggaggtctg

SEQ ID NO: 271255 - DNA, 25 bp, Probe Sequence
ggaatatctggggtccaagggattg

SEQ ID NO: 271256 - DNA, 25 bp, Probe Sequence
ggaatgagcggggatgccgcgggca

SEQ ID NO: 271257 - DNA, 25 bp, Probe Sequence
ggaatgagcggggatgccgcgggca

SEQ ID NO: 271258 - DNA, 25 bp, Probe Sequence
ggaatggctgggtaggacagggaac

SEQ ID NO: 271259 - DNA, 25 bp, Probe Sequence
ggaaggctgaggagggcggatcaca

SEQ ID NO: 271260 - DNA, 25 bp, Probe Sequence
ggaagttctggcactggggaacaaa

SEQ ID NO: 271261 - DNA, 25 bp, Probe Sequence
ggaattactcgcagctggttgaaga

SEQ ID NO: 271262 - DNA, 25 bp, Probe Sequence
ggaataacattgctatggctttgga

SEQ ID NO: 271263 - DNA, 25 bp, Probe Sequence
ggaatggaactactgtactttgcca

SEQ ID NO: 271264 - DNA, 25 bp, Probe Sequence
ggaattatactgggtgcactcattt

SEQ ID NO: 271265 - DNA, 25 bp, Probe Sequence
ggaatgttcttgggtgctcagagtt

SEQ ID NO: 271266 - DNA, 25 bp, Probe Sequence
ggaagtcatcttggagcgtatggag

SEQ ID NO: 271267 - DNA, 25 bp, Probe Sequence
ggaagatgctcttgggacactgcaa

SEQ ID NO: 271268 - DNA, 25 bp, Probe Sequence
ggaagtactagccggacatcatgag

SEQ ID NO: 271269 - DNA, 25 bp, Probe Sequence
ggaagtatatgccggagacatctgt

SEQ ID NO: 271270 - DNA, 25 bp, Probe Sequence
ggaatgcagtggcgggatctcagct

SEQ ID NO: 271271 - DNA, 25 bp, Probe Sequence
ggaataatgccaccagagactgagt

SEQ ID NO: 271272 - DNA, 25 bp, Probe Sequence
ggaataatgccaccagagactgagt

SEQ ID NO: 271273 - DNA, 25 bp, Probe Sequence
ggaatccagcctgagcaacagagca

SEQ ID NO: 271274 - DNA, 25 bp, Probe Sequence
ggaatccgcctgcagaggacagagc

SEQ ID NO: 271275 - DNA, 25 bp, Probe Sequence
ggaataccttgtagcaggacatgag

SEQ ID NO: 271276 - DNA, 25 bp, Probe Sequence
ggaaggcgctatgccaggactgatg

SEQ ID NO: 271277 - DNA, 25 bp, Probe Sequence
ggaaggcgcttcaccatcaagataa

SEQ ID NO: 271278 - DNA, 25 bp, Probe Sequence
ggaaggtgcccagcctggagaaggt

SEQ ID NO: 271279 - DNA, 25 bp, Probe Sequence
ggaaggagcagccaggcgtgggaag

SEQ ID NO: 271280 - DNA, 25 bp, Probe Sequence
ggaagataaccaagcgtgtgaaggc

SEQ ID NO: 271281 - DNA, 25 bp, Probe Sequence
ggaattagagacaggtgagggacac

SEQ ID NO: 271282 - DNA, 25 bp, Probe Sequence
ggaagttagatgaattgtacggcac

SEQ ID NO: 271283 - DNA, 25 bp, Probe Sequence
ggaagggagagttctttgctgcccc

SEQ ID NO: 271284 - DNA, 25 bp, Probe Sequence
ggaaggagagagatgcctcaggctt

SEQ ID NO: 271285 - DNA, 25 bp, Probe Sequence
ggaaggcagaagttgcagtgagctg

SEQ ID NO: 271286 - DNA, 25 bp, Probe Sequence
ggaaggcaagtggccagtgctgcca

SEQ ID NO: 271287 - DNA, 25 bp, Probe Sequence
ggaaggcaagtggccagtgctgcca

SEQ ID NO: 271288 - DNA, 25 bp, Probe Sequence
ggaagtcagtgtggcgattcctcag

SEQ ID NO: 271289 - DNA, 25 bp, Probe Sequence
ggaagatatcgctctattctccagt

SEQ ID NO: 271290 - DNA, 25 bp, Probe Sequence
ggaagtcatccagtctattcacaga

SEQ ID NO: 271291 - DNA, 25 bp, Probe Sequence
ggcaagtcttgcttcaaatgcaaga

SEQ ID NO: 271292 - DNA, 25 bp, Probe Sequence
ggcaagtttgccaattccgaagtgg

SEQ ID NO: 271293 - DNA, 25 bp, Probe Sequence
ggaatcgatcatgctttcttcaagg

SEQ ID NO: 271294 - DNA, 25 bp, Probe Sequence
ggaatctatttgatgtctggaagcc

SEQ ID NO: 271295 - DNA, 25 bp, Probe Sequence
ggcaactaaatggtgtttgtagcat

SEQ ID NO: 271296 - DNA, 25 bp, Probe Sequence
ggcaacaaactgggatctagtgcaa

SEQ ID NO: 271297 - DNA, 25 bp, Probe Sequence
ggcaacttcatttggcttgtgtgca

SEQ ID NO: 271298 - DNA, 25 bp, Probe Sequence
ggcaagcagctgcatatggcctggg

SEQ ID NO: 271299 - DNA, 25 bp, Probe Sequence
ggaatgcagtggtgcgatctcggct

SEQ ID NO: 271300 - DNA, 25 bp, Probe Sequence
ggaatgagtgttgggcactgggcat

SEQ ID NO: 271301 - DNA, 25 bp, Probe Sequence
ggaagattatcgctgcactgtagca

SEQ ID NO: 271302 - DNA, 25 bp, Probe Sequence
ggaatgttccagcgactggacaagc

SEQ ID NO: 271303 - DNA, 25 bp, Probe Sequence
ggaattcccgggatggaaagagctg

SEQ ID NO: 271304 - DNA, 25 bp, Probe Sequence
ggaattcccgggatcacaactgtgt

SEQ ID NO: 271305 - DNA, 25 bp, Probe Sequence
ggaattcccgggatatcttcttcat

SEQ ID NO: 271306 - DNA, 25 bp, Probe Sequence
ggaattcccgggattacatctccaa

SEQ ID NO: 271307 - DNA, 25 bp, Probe Sequence
ggaattcccgggatctagtcacagc

SEQ ID NO: 271308 - DNA, 25 bp, Probe Sequence
ggaagtgcccagtgacttatggcca

SEQ ID NO: 271309 - DNA, 25 bp, Probe Sequence
ggaaggccaatgtcgggtagatgac

SEQ ID NO: 271310 - DNA, 25 bp, Probe Sequence
ggaaggagcgatttgggattgtcac

SEQ ID NO: 271311 - DNA, 25 bp, Probe Sequence
ggcaaggacgttagtgtcatgttag

SEQ ID NO: 271312 - DNA, 25 bp, Probe Sequence
ggcaagaacgttggctgcctgcagg

SEQ ID NO: 271313 - DNA, 25 bp, Probe Sequence
ggcaagaggagcaggtggtcaggca

SEQ ID NO: 271314 - DNA, 25 bp, Probe Sequence
ggcccaggaaggaggtcaagcatct

SEQ ID NO: 271315 - DNA, 25 bp, Probe Sequence
ggcacaaggaagttttacaccatct

SEQ ID NO: 271316 - DNA, 25 bp, Probe Sequence
ggaagggagatgtctgattctaaat

SEQ ID NO: 271317 - DNA, 25 bp, Probe Sequence
ggaagtgtagatcctattcgagata

SEQ ID NO: 271318 - DNA, 25 bp, Probe Sequence
ggaagtgtagatcctattcgagata

SEQ ID NO: 271319 - DNA, 25 bp, Probe Sequence
ggaatctgaagttgctatatctgag

SEQ ID NO: 271320 - DNA, 25 bp, Probe Sequence
ggaatctgaagttgctatatctgag

SEQ ID NO: 271321 - DNA, 25 bp, Probe Sequence
ggaatctgaagttgctatatctgag

SEQ ID NO: 271322 - DNA, 25 bp, Probe Sequence
ggaatctgaagttgctatatctgag

SEQ ID NO: 271323 - DNA, 25 bp, Probe Sequence
ggaatctgaagttgctatatctgag

SEQ ID NO: 271324 - DNA, 25 bp, Probe Sequence
ggaatccagatgccagatattcgga

SEQ ID NO: 271325 - DNA, 25 bp, Probe Sequence
ggaatcacagaaatgatattctgca

SEQ ID NO: 271326 - DNA, 25 bp, Probe Sequence
ggaagtcaaagagttattcacatta

SEQ ID NO: 271327 - DNA, 25 bp, Probe Sequence
ggaagttaaacttctgctcctctca

SEQ ID NO: 271328 - DNA, 25 bp, Probe Sequence
ggaagttgatattccactctacccc

SEQ ID NO: 271329 - DNA, 25 bp, Probe Sequence
ggaaggttatacctctcattaccca

SEQ ID NO: 271330 - DNA, 25 bp, Probe Sequence
ggaataatttccccacattcacaaa

SEQ ID NO: 271331 - DNA, 25 bp, Probe Sequence
ggaagttgtatctccagcttacaga

SEQ ID NO: 271332 - DNA, 25 bp, Probe Sequence
ggaatgaggttctaccactctggaa

SEQ ID NO: 271333 - DNA, 25 bp, Probe Sequence
ggaagtagtacaactcattgctgga

SEQ ID NO: 271334 - DNA, 25 bp, Probe Sequence
ggaagtggtcgaagctcacgtggac

SEQ ID NO: 271335 - DNA, 25 bp, Probe Sequence
ggaagtggtggaatctatcgagaag

SEQ ID NO: 271336 - DNA, 25 bp, Probe Sequence
ggaaggtgtgattctctgaggaaag

SEQ ID NO: 271337 - DNA, 25 bp, Probe Sequence
ggaagtgcttaggtgtggagctaat

SEQ ID NO: 271338 - DNA, 25 bp, Probe Sequence
ggaagtgttcatgtgcagtgtgctc

SEQ ID NO: 271339 - DNA, 25 bp, Probe Sequence
ggaagtgttgcagaggtgtgcatca

SEQ ID NO: 271340 - DNA, 25 bp, Probe Sequence
ggaatgtgttcagaagctgctgcct

SEQ ID NO: 271341 - DNA, 25 bp, Probe Sequence
ggaagtgggaggcagctctccagtt

SEQ ID NO: 271342 - DNA, 25 bp, Probe Sequence
ggaaggtgtgggaactggcgaggct

SEQ ID NO: 271343 - DNA, 25 bp, Probe Sequence
ggaatgggtaggacaagtggaaata

SEQ ID NO: 271344 - DNA, 25 bp, Probe Sequence
ggcttggccggtacaggtgtgagaa

SEQ ID NO: 271345 - DNA, 25 bp, Probe Sequence
ggccatggccgctcaagggaaagac

SEQ ID NO: 271346 - DNA, 25 bp, Probe Sequence
ggcagcttcctacagtagaaaacca

SEQ ID NO: 271347 - DNA, 25 bp, Probe Sequence
ggcactaagtgacattgagataacc

SEQ ID NO: 271348 - DNA, 25 bp, Probe Sequence
ggcacccagtgtcttaaggaaccat

SEQ ID NO: 271349 - DNA, 25 bp, Probe Sequence
ggccccagttcgtagaacgaattat

SEQ ID NO: 271350 - DNA, 25 bp, Probe Sequence
ggccccagttcgtagaacgaattat

SEQ ID NO: 271351 - DNA, 25 bp, Probe Sequence
ggcacagcgtttgggaaacaagact

SEQ ID NO: 271352 - DNA, 25 bp, Probe Sequence
ggcaactttatgcgaaatccaaatc

SEQ ID NO: 271353 - DNA, 25 bp, Probe Sequence
ggaatttccagctgctaatccacaa

SEQ ID NO: 271354 - DNA, 25 bp, Probe Sequence
ggcaattgtaactccatctaatcaa

SEQ ID NO: 271355 - DNA, 25 bp, Probe Sequence
ggaatggtggactttcacaaatatc

SEQ ID NO: 271356 - DNA, 25 bp, Probe Sequence
ggaaggtggagtatagaagaatatc

SEQ ID NO: 271357 - DNA, 25 bp, Probe Sequence
ggaaggtagcagtattaattaattt

SEQ ID NO: 271358 - DNA, 25 bp, Probe Sequence
ggaaggagcagacattaatatccat

SEQ ID NO: 271359 - DNA, 25 bp, Probe Sequence
ggaatgtatgcatctctatatatat

SEQ ID NO: 271360 - DNA, 25 bp, Probe Sequence
ggaagtcatacagtcatcaatcata

SEQ ID NO: 271361 - DNA, 25 bp, Probe Sequence
ggaatgcctacatcatgattgccat

SEQ ID NO: 271362 - DNA, 25 bp, Probe Sequence
ggaatgcctttggcaatagccttga

SEQ ID NO: 271363 - DNA, 25 bp, Probe Sequence
ggaatggcttaagtatagctttgca

SEQ ID NO: 271364 - DNA, 25 bp, Probe Sequence
ggaatgtgttgatgtgcacagctaa

SEQ ID NO: 271365 - DNA, 25 bp, Probe Sequence
ggaattgcttgatttagattaaact

SEQ ID NO: 271366 - DNA, 25 bp, Probe Sequence
ggaatctcctacttaatatatgacc

SEQ ID NO: 271367 - DNA, 25 bp, Probe Sequence
ggaattcctcacagattaaccagta

SEQ ID NO: 271368 - DNA, 25 bp, Probe Sequence
ggaatgccccacaagtgttaccatg

SEQ ID NO: 271369 - DNA, 25 bp, Probe Sequence
ggaagtccagaacgtagtgagcctt

SEQ ID NO: 271370 - DNA, 25 bp, Probe Sequence
ggaaggcacagggcgatcaagggct

SEQ ID NO: 271371 - DNA, 25 bp, Probe Sequence
ggcaaagtcagagcccacaggtgcc

SEQ ID NO: 271372 - DNA, 25 bp, Probe Sequence
ggcaagggcaacaaaccatggattt

SEQ ID NO: 271373 - DNA, 25 bp, Probe Sequence
ggcaagtaattcacaccaggccaat

SEQ ID NO: 271374 - DNA, 25 bp, Probe Sequence
ggaagtaatgttccaaatatgcaca

SEQ ID NO: 271375 - DNA, 25 bp, Probe Sequence
ggaattactatgaccaacttatatt

SEQ ID NO: 271376 - DNA, 25 bp, Probe Sequence
ggaatataaactgtacacataatta

SEQ ID NO: 271377 - DNA, 25 bp, Probe Sequence
ggcaaagcaacatcttccctaaata

SEQ ID NO: 271378 - DNA, 25 bp, Probe Sequence
ggcaaaatacaatttcatttaacaa

SEQ ID NO: 271379 - DNA, 25 bp, Probe Sequence
ggaatgatgaaatagtctttaataa

SEQ ID NO: 271380 - DNA, 25 bp, Probe Sequence
ggaatgaatgaatagccagataaaa

SEQ ID NO: 271381 - DNA, 25 bp, Probe Sequence
ggaatgggaatgtggcaacacaaca

SEQ ID NO: 271382 - DNA, 25 bp, Probe Sequence
ggaataggagattagagaaatatgc

SEQ ID NO: 271383 - DNA, 25 bp, Probe Sequence
ggaatgaggcaaaggacacagtagc

SEQ ID NO: 271384 - DNA, 25 bp, Probe Sequence
ggaagtgcctaaggacagagctgac

SEQ ID NO: 271385 - DNA, 25 bp, Probe Sequence
ggaagtgctctcggcggaagtgatc

SEQ ID NO: 271386 - DNA, 25 bp, Probe Sequence
ggaagtgggacggatgatgagtgat

SEQ ID NO: 271387 - DNA, 25 bp, Probe Sequence
ggaagtgatgggtctgatgctagga

SEQ ID NO: 271388 - DNA, 25 bp, Probe Sequence
ggaaggtgcctattttagagaactt

SEQ ID NO: 271389 - DNA, 25 bp, Probe Sequence
ggaatggtctctttgatttaaaata

SEQ ID NO: 271390 - DNA, 25 bp, Probe Sequence
ggaagtgctctttatgtatctaaca

SEQ ID NO: 271391 - DNA, 25 bp, Probe Sequence
ggaagtgctctttatgtatctaaca

SEQ ID NO: 271392 - DNA, 25 bp, Probe Sequence
ggaatggtctcttttatcctatcac

SEQ ID NO: 271393 - DNA, 25 bp, Probe Sequence
ggaagtgttcatttacacacctctc

SEQ ID NO: 271394 - DNA, 25 bp, Probe Sequence
ggcacaagtttgctgatgcccttct

SEQ ID NO: 271395 - DNA, 25 bp, Probe Sequence
ggaataggctatggatgtgatactt

SEQ ID NO: 271396 - DNA, 25 bp, Probe Sequence
ggaatcagtccagatgtgagttttt

SEQ ID NO: 271397 - DNA, 25 bp, Probe Sequence
ggcagcaataccacattggttcttg

SEQ ID NO: 271398 - DNA, 25 bp, Probe Sequence
ggaataccatgaaatattgatttag

SEQ ID NO: 271399 - DNA, 25 bp, Probe Sequence
ggcaacatacatccataattgttta

SEQ ID NO: 271400 - DNA, 25 bp, Probe Sequence
ggcaagcttctgtacctttgttata

SEQ ID NO: 271401 - DNA, 25 bp, Probe Sequence
ggaattcatatgcaccttagttaaa

SEQ ID NO: 271402 - DNA, 25 bp, Probe Sequence
ggaatacttgtacctgtcatttaac

SEQ ID NO: 271403 - DNA, 25 bp, Probe Sequence
ggaattcttgtacgcagttttcttt

SEQ ID NO: 271404 - DNA, 25 bp, Probe Sequence
ggaattcttgtgtgctgctttccat

SEQ ID NO: 271405 - DNA, 25 bp, Probe Sequence
ggcagaattagttactctttcctct

SEQ ID NO: 271406 - DNA, 25 bp, Probe Sequence
ggcagaattggcaccattacccagg

SEQ ID NO: 271407 - DNA, 25 bp, Probe Sequence
ggaatctgaggcatcctctgactcc

SEQ ID NO: 271408 - DNA, 25 bp, Probe Sequence
ggaatgtgatgaaatgccactccat

SEQ ID NO: 271409 - DNA, 25 bp, Probe Sequence
ggaatgatgttttgcaccttattga

SEQ ID NO: 271410 - DNA, 25 bp, Probe Sequence
ggaagtgagtggacagcctttgtgt

SEQ ID NO: 271411 - DNA, 25 bp, Probe Sequence
ggaaggacagcgcagctctattaag

SEQ ID NO: 271412 - DNA, 25 bp, Probe Sequence
ggaagtgaatggagactgatctcaa

SEQ ID NO: 271413 - DNA, 25 bp, Probe Sequence
ggaagggagagtgagcgcatgctga

SEQ ID NO: 271414 - DNA, 25 bp, Probe Sequence
ggaatgggaggcaaatgcctgctat

SEQ ID NO: 271415 - DNA, 25 bp, Probe Sequence
ggaaggagagaggatacacatgtaa

SEQ ID NO: 271416 - DNA, 25 bp, Probe Sequence
ggaattcaggatgcatacagctgta

SEQ ID NO: 271417 - DNA, 25 bp, Probe Sequence
ggaatctgacgcggatgcggcatgt

SEQ ID NO: 271418 - DNA, 25 bp, Probe Sequence
ggcacaagacgtgagcagcagattg

SEQ ID NO: 271419 - DNA, 25 bp, Probe Sequence
ggcacctggggctcatggattggcc

SEQ ID NO: 271420 - DNA, 25 bp, Probe Sequence
ggcaccgtgtacttcgtgcaagtgc

SEQ ID NO: 271421 - DNA, 25 bp, Probe Sequence
ggctgacagtctcagtttgccagtc

SEQ ID NO: 271422 - DNA, 25 bp, Probe Sequence
ggaatattactaaccaagctgcgaa

SEQ ID NO: 271423 - DNA, 25 bp, Probe Sequence
ggaattgttctttatcaagggtagc

SEQ ID NO: 271424 - DNA, 25 bp, Probe Sequence
ggaattcttttaagcaatgcaggta

SEQ ID NO: 271425 - DNA, 25 bp, Probe Sequence
ggaattttatgtcatgctaaggtat

SEQ ID NO: 271426 - DNA, 25 bp, Probe Sequence
ggaatcttaatgcttatagggctga

SEQ ID NO: 271427 - DNA, 25 bp, Probe Sequence
ggaatagtgattcattatctgggaa

SEQ ID NO: 271428 - DNA, 25 bp, Probe Sequence
ggaattgtttcaagttgctggagaa

SEQ ID NO: 271429 - DNA, 25 bp, Probe Sequence
ggaatgtttagaaagctgcctgata

SEQ ID NO: 271430 - DNA, 25 bp, Probe Sequence
ggaatgttttgaccgagtctgcgag

SEQ ID NO: 271431 - DNA, 25 bp, Probe Sequence
ggaattgttgtattccttctgcagc

SEQ ID NO: 271432 - DNA, 25 bp, Probe Sequence
ggaatattccgattcattcctgccc

SEQ ID NO: 271433 - DNA, 25 bp, Probe Sequence
ggaatattccgattcattcctgccc

SEQ ID NO: 271434 - DNA, 25 bp, Probe Sequence
ggaatcactctgcatgatgaacctg

SEQ ID NO: 271435 - DNA, 25 bp, Probe Sequence
ggaatcacattcttagcacacctac

SEQ ID NO: 271436 - DNA, 25 bp, Probe Sequence
ggaatcacattcttagcacacctac

SEQ ID NO: 271437 - DNA, 25 bp, Probe Sequence
ggaatgatctattgagagccctctc

SEQ ID NO: 271438 - DNA, 25 bp, Probe Sequence
ggaatgcacaattgaggctacagcc

SEQ ID NO: 271439 - DNA, 25 bp, Probe Sequence
ggaatcacagaatggtccagcactt

SEQ ID NO: 271440 - DNA, 25 bp, Probe Sequence
tccaatccagacagtttcccttggc

SEQ ID NO: 271441 - DNA, 25 bp, Probe Sequence
tccactatacagggtccacccttta

SEQ ID NO: 271442 - DNA, 25 bp, Probe Sequence
taccctaatgaggacgcccctaaat

SEQ ID NO: 271443 - DNA, 25 bp, Probe Sequence
tgaccactaaggggcccccttggtg

SEQ ID NO: 271444 - DNA, 25 bp, Probe Sequence
tgagtaggaaactgtcccctagggg

SEQ ID NO: 271445 - DNA, 25 bp, Probe Sequence
ggcttgtaaatgtgacaccccgggg

SEQ ID NO: 271446 - DNA, 25 bp, Probe Sequence
tggtttgacaggtgaaacgggggag

SEQ ID NO: 271447 - DNA, 25 bp, Probe Sequence
tgttctcgtaggtgaaccccaggtc

SEQ ID NO: 271448 - DNA, 25 bp, Probe Sequence
ttcttcactaaattaaaaacggctg

SEQ ID NO: 271449 - DNA, 25 bp, Probe Sequence
tgtaccacccaatgaaaaaaggatc

SEQ ID NO: 271450 - DNA, 25 bp, Probe Sequence
ggcaaacctcactagggaaataatg

SEQ ID NO: 271451 - DNA, 25 bp, Probe Sequence
ggcacagaccccaacagaaattttg

SEQ ID NO: 271452 - DNA, 25 bp, Probe Sequence
ggaaggccctgaagagaaacgtgag

SEQ ID NO: 271453 - DNA, 25 bp, Probe Sequence
ggcaaggccaagttgaacaccggat

SEQ ID NO: 271454 - DNA, 25 bp, Probe Sequence
ggcgttgagtgagaacaatccggct

SEQ ID NO: 271455 - DNA, 25 bp, Probe Sequence
ggcagtcgaagagacaaggccagag

SEQ ID NO: 271456 - DNA, 25 bp, Probe Sequence
ggcagccgacggcaaaggtgtcgtg

SEQ ID NO: 271457 - DNA, 25 bp, Probe Sequence
ggcacctgtcggcagactggtgact

SEQ ID NO: 271458 - DNA, 25 bp, Probe Sequence
ggcacctgtcaaaagagcagtggtt

SEQ ID NO: 271459 - DNA, 25 bp, Probe Sequence
ggcagggctaaaaaggtattattat

SEQ ID NO: 271460 - DNA, 25 bp, Probe Sequence
ggcggcctgaaaaaggaactgttca

SEQ ID NO: 271461 - DNA, 25 bp, Probe Sequence
ggccgccattaaacaggttctgacc

SEQ ID NO: 271462 - DNA, 25 bp, Probe Sequence
ggccaccaggttggagggcctacca

SEQ ID NO: 271463 - DNA, 25 bp, Probe Sequence
ggcaaagggtgcagggagttgagcc

SEQ ID NO: 271464 - DNA, 25 bp, Probe Sequence
ggcaacagtactggttgggttgacc

SEQ ID NO: 271465 - DNA, 25 bp, Probe Sequence
ggcaacctacccaaggagtctgtgc

SEQ ID NO: 271466 - DNA, 25 bp, Probe Sequence
ggcaacctacccaaggagtctgtgc

SEQ ID NO: 271467 - DNA, 25 bp, Probe Sequence
ggcaaacaaccaggtcggcctggcc

SEQ ID NO: 271468 - DNA, 25 bp, Probe Sequence
ggaaggaatatctgttggctctggt

SEQ ID NO: 271469 - DNA, 25 bp, Probe Sequence
ggaaggaatttatgatgcctgcagg

SEQ ID NO: 271470 - DNA, 25 bp, Probe Sequence
ggaaggagcatcttaggaactgctg

SEQ ID NO: 271471 - DNA, 25 bp, Probe Sequence
ggaaggcatgtctattgtgattttg

SEQ ID NO: 271472 - DNA, 25 bp, Probe Sequence
ggaatgccatgaacaaggtcttctg

SEQ ID NO: 271473 - DNA, 25 bp, Probe Sequence
ggaatgctgaaatgaggcctcttgg

SEQ ID NO: 271474 - DNA, 25 bp, Probe Sequence
ggaatgtaatactggagctttaaga

SEQ ID NO: 271475 - DNA, 25 bp, Probe Sequence
ggaatgaagaactgtggcctaattg

SEQ ID NO: 271476 - DNA, 25 bp, Probe Sequence
ggaatgatggaacttggggcccaag

SEQ ID NO: 271477 - DNA, 25 bp, Probe Sequence
ggaatagtgaactggggccatgtca

SEQ ID NO: 271478 - DNA, 25 bp, Probe Sequence
ggaaggtcaactcgaggagcacatt

SEQ ID NO: 271479 - DNA, 25 bp, Probe Sequence
ggaatgctgtttttgaggtaatatt

SEQ ID NO: 271480 - DNA, 25 bp, Probe Sequence
ggaatctttatctgagctgcttgtc

SEQ ID NO: 271481 - DNA, 25 bp, Probe Sequence
ggaatgtttatgtagactttgcatt

SEQ ID NO: 271482 - DNA, 25 bp, Probe Sequence
ggcaatacatttgcaagtatctaat

SEQ ID NO: 271483 - DNA, 25 bp, Probe Sequence
ggcaaaattttgctgttattatagt

SEQ ID NO: 271484 - DNA, 25 bp, Probe Sequence
ggcaaaattttccactctgagtaaa

SEQ ID NO: 271485 - DNA, 25 bp, Probe Sequence
ggcaaaattagtcgccttcgtcgag

SEQ ID NO: 271486 - DNA, 25 bp, Probe Sequence
ggcaaaacaggtacctttggggcat

SEQ ID NO: 271487 - DNA, 25 bp, Probe Sequence
ggaataagccattacctttggacct

SEQ ID NO: 271488 - DNA, 25 bp, Probe Sequence
ggcaataaccatcagcctatctgta

SEQ ID NO: 271489 - DNA, 25 bp, Probe Sequence
ggaatgcaatcacccagcaagtcct

SEQ ID NO: 271490 - DNA, 25 bp, Probe Sequence
ggaatcattcacgacacagaaacca

SEQ ID NO: 271491 - DNA, 25 bp, Probe Sequence
ggaatcatcatcgcaggctgggacc

SEQ ID NO: 271492 - DNA, 25 bp, Probe Sequence
ggaatcattaaacctgagtgacttg

SEQ ID NO: 271493 - DNA, 25 bp, Probe Sequence
ggaatttaaaccatgtcacagctgt

SEQ ID NO: 271494 - DNA, 25 bp, Probe Sequence
ggaatcttatgaacttaatcccttc

SEQ ID NO: 271495 - DNA, 25 bp, Probe Sequence
tgtaactgcatttgacctaaccact

SEQ ID NO: 271496 - DNA, 25 bp, Probe Sequence
ggaaggcatttacgctgacatccct

SEQ ID NO: 271497 - DNA, 25 bp, Probe Sequence
ggaaggatctctgagttctctcctg

SEQ ID NO: 271498 - DNA, 25 bp, Probe Sequence
ggaaggatgttcagttcacctctgg

SEQ ID NO: 271499 - DNA, 25 bp, Probe Sequence
ggctgaaagttgggttcaccttggg

SEQ ID NO: 271500 - DNA, 25 bp, Probe Sequence
ggaattagttggttatccatttgca

SEQ ID NO: 271501 - DNA, 25 bp, Probe Sequence
ggaattttatagtcatatttattga

SEQ ID NO: 271502 - DNA, 25 bp, Probe Sequence
ggaatattttggacaatgtttcatt

SEQ ID NO: 271503 - DNA, 25 bp, Probe Sequence
ggaatgatgttccctgcaattacca

SEQ ID NO: 271504 - DNA, 25 bp, Probe Sequence
ggaatatgcaacaactcctgtaccc

SEQ ID NO: 271505 - DNA, 25 bp, Probe Sequence
ggaatatgcaacaactcctgtaccc

SEQ ID NO: 271506 - DNA, 25 bp, Probe Sequence
ggaatatgcaacaactcctgtaccc

SEQ ID NO: 271507 - DNA, 25 bp, Probe Sequence
ggaatagaccattttctctgacctc

SEQ ID NO: 271508 - DNA, 25 bp, Probe Sequence
ggaatgagcctctttgatctcttcc

SEQ ID NO: 271509 - DNA, 25 bp, Probe Sequence
ggaatagctggctttattggcaccc

SEQ ID NO: 271510 - DNA, 25 bp, Probe Sequence
ggaatggcttgctggggagcccatc

SEQ ID NO: 271511 - DNA, 25 bp, Probe Sequence
ggaatcatctggctggagaggccca

SEQ ID NO: 271512 - DNA, 25 bp, Probe Sequence
ggcactcattgcttgtggacggacc

SEQ ID NO: 271513 - DNA, 25 bp, Probe Sequence
ggcagcacttaaatttcgaacctaa

SEQ ID NO: 271514 - DNA, 25 bp, Probe Sequence
tggcaatttaatataccccctacaa

SEQ ID NO: 271515 - DNA, 25 bp, Probe Sequence
ggaatcgtaataaaccacgccatga

SEQ ID NO: 271516 - DNA, 25 bp, Probe Sequence
ggaatggaattatcactactgtatc

SEQ ID NO: 271517 - DNA, 25 bp, Probe Sequence
ggaaggagcatttctctttgctgtt

SEQ ID NO: 271518 - DNA, 25 bp, Probe Sequence
ggcaagggttgactctttgttttat

SEQ ID NO: 271519 - DNA, 25 bp, Probe Sequence
ggaataggagtactggtttttcata

SEQ ID NO: 271520 - DNA, 25 bp, Probe Sequence
ggaatggagagcacggtctgaatct

SEQ ID NO: 271521 - DNA, 25 bp, Probe Sequence
ggaatggagtgcacggtctgaatct

SEQ ID NO: 271522 - DNA, 25 bp, Probe Sequence
ggcaagaaggccgggcatctattct

SEQ ID NO: 271523 - DNA, 25 bp, Probe Sequence
ggcaatgatacgacactggttcttg

SEQ ID NO: 271524 - DNA, 25 bp, Probe Sequence
ggaataccagaagtgctgctttttt

SEQ ID NO: 271525 - DNA, 25 bp, Probe Sequence
ggaatactcgaacggtactctttgc

SEQ ID NO: 271526 - DNA, 25 bp, Probe Sequence
ggaatacacaggcagagtacccctg

SEQ ID NO: 271527 - DNA, 25 bp, Probe Sequence
ggaatgtataggcagagaagctctt

SEQ ID NO: 271528 - DNA, 25 bp, Probe Sequence
ggcacatgaaatgggccacaacttt

SEQ ID NO: 271529 - DNA, 25 bp, Probe Sequence
ggcaacagatctggaacctcagcct

SEQ ID NO: 271530 - DNA, 25 bp, Probe Sequence
ggcacctgagctgtgacctgatgcc

SEQ ID NO: 271531 - DNA, 25 bp, Probe Sequence
ggcactcttgtcattgctgtcagcc

SEQ ID NO: 271532 - DNA, 25 bp, Probe Sequence
ggcagcccatatccctgagaatgcc

SEQ ID NO: 271533 - DNA, 25 bp, Probe Sequence
ggcactacaaccttggtggcacagt

SEQ ID NO: 271534 - DNA, 25 bp, Probe Sequence
ggcaacaagacctcggtgcagttcc

SEQ ID NO: 271535 - DNA, 25 bp, Probe Sequence
ggcaccaaaatcacgggactttcca

SEQ ID NO: 271536 - DNA, 25 bp, Probe Sequence
ggcaccaaaatcacgggactttcca

SEQ ID NO: 271537 - DNA, 25 bp, Probe Sequence
ggcaccaaaatcacgggactttcca

SEQ ID NO: 271538 - DNA, 25 bp, Probe Sequence
ggcaccaaaatcaacgggactttcg

SEQ ID NO: 271539 - DNA, 25 bp, Probe Sequence
ggcaccaaaatgcaacgggactctc

SEQ ID NO: 271540 - DNA, 25 bp, Probe Sequence
ggcaccaagtaaggaagggaactct

SEQ ID NO: 271541 - DNA, 25 bp, Probe Sequence
ggcacaccgaaagaaagcagtactg

SEQ ID NO: 271542 - DNA, 25 bp, Probe Sequence
ggcacagccagaaacgaccaagaac

SEQ ID NO: 271543 - DNA, 25 bp, Probe Sequence
ggcacagcacttatcagaccaggcc

SEQ ID NO: 271544 - DNA, 25 bp, Probe Sequence
ggcacagcacttatcagaccaggcc

SEQ ID NO: 271545 - DNA, 25 bp, Probe Sequence
ggcaagccagtcaaaaacgcccgga

SEQ ID NO: 271546 - DNA, 25 bp, Probe Sequence
ggcacacagcgaagtaaaccccaac

SEQ ID NO: 271547 - DNA, 25 bp, Probe Sequence
ggcacccgtagaaagacctcagtac

SEQ ID NO: 271548 - DNA, 25 bp, Probe Sequence
ggcaccactggataaacctggttca

SEQ ID NO: 271549 - DNA, 25 bp, Probe Sequence
ggcaccatcttatgaaaagggtcca

SEQ ID NO: 271550 - DNA, 25 bp, Probe Sequence
ggcacctcttgatgcctaagcaggt

SEQ ID NO: 271551 - DNA, 25 bp, Probe Sequence
ggcaccttttgcacataacatgctt

SEQ ID NO: 271552 - DNA, 25 bp, Probe Sequence
ggaattattgacacaagagctgatc

SEQ ID NO: 271553 - DNA, 25 bp, Probe Sequence
ggaattcattccgcatggactctgg

SEQ ID NO: 271554 - DNA, 25 bp, Probe Sequence
ggaataggacactcaagacttttga

SEQ ID NO: 271555 - DNA, 25 bp, Probe Sequence
ggaatgggaccttctaatctctcat

SEQ ID NO: 271556 - DNA, 25 bp, Probe Sequence
ggaatgggacctttgacagcagacc

SEQ ID NO: 271557 - DNA, 25 bp, Probe Sequence
ggctaggagaccttgggcagtacct

SEQ ID NO: 271558 - DNA, 25 bp, Probe Sequence
ggcaaggtgactctggacgtgacca

SEQ ID NO: 271559 - DNA, 25 bp, Probe Sequence
ggcacaggctacgtgttgagcgtgg

SEQ ID NO: 271560 - DNA, 25 bp, Probe Sequence
ggcaagatcctgcctgttggtggca

SEQ ID NO: 271561 - DNA, 25 bp, Probe Sequence
ggcaacatcgctcggttggaactta

SEQ ID NO: 271562 - DNA, 25 bp, Probe Sequence
ggaattccccgaaggcacagattaa

SEQ ID NO: 271563 - DNA, 25 bp, Probe Sequence
ggaattcccggtgcagcagaatgga

SEQ ID NO: 271564 - DNA, 25 bp, Probe Sequence
ggaatgtcccagggtagctgagctg

SEQ ID NO: 271565 - DNA, 25 bp, Probe Sequence
ggcactgtcgtcatggtgactgggg

SEQ ID NO: 271566 - DNA, 25 bp, Probe Sequence
ggcacatgttgttctcattgaccgt

SEQ ID NO: 271567 - DNA, 25 bp, Probe Sequence
ggcatgattgtcactgatgagcccg

SEQ ID NO: 271568 - DNA, 25 bp, Probe Sequence
ggcaatgcattattgtgtagccacg

SEQ ID NO: 271569 - DNA, 25 bp, Probe Sequence
ggcagccactgaggatgacatccgt

SEQ ID NO: 271570 - DNA, 25 bp, Probe Sequence
ggcatccaactgctgaatgccgtct

SEQ ID NO: 271571 - DNA, 25 bp, Probe Sequence
ggcaccaccgacaagatctttctgg

SEQ ID NO: 271572 - DNA, 25 bp, Probe Sequence
ggcaccccgggattattatcagata

SEQ ID NO: 271573 - DNA, 25 bp, Probe Sequence
ggcacccaagagcaagacttctacg

SEQ ID NO: 271574 - DNA, 25 bp, Probe Sequence
ggcaacaagaacaactaccttcggg

SEQ ID NO: 271575 - DNA, 25 bp, Probe Sequence
ggcaacgagaacactatctcaagca

SEQ ID NO: 271576 - DNA, 25 bp, Probe Sequence
ggcacccgatatatgttctctaggc

SEQ ID NO: 271577 - DNA, 25 bp, Probe Sequence
ggcacccgatatatgttctctaggc

SEQ ID NO: 271578 - DNA, 25 bp, Probe Sequence
ggcacctgggaaatgaggcccacag

SEQ ID NO: 271579 - DNA, 25 bp, Probe Sequence
ggcaaagggaagcactgcagcccag

SEQ ID NO: 271580 - DNA, 25 bp, Probe Sequence
ggaatgacaggaatggcctcctccc

SEQ ID NO: 271581 - DNA, 25 bp, Probe Sequence
ggaatgacaggaatggcctcctccc

SEQ ID NO: 271582 - DNA, 25 bp, Probe Sequence
ggaatgagcaggagcagccgcttgg

SEQ ID NO: 271583 - DNA, 25 bp, Probe Sequence
ggaatagcatcgacatcacgagaag

SEQ ID NO: 271584 - DNA, 25 bp, Probe Sequence
ggaatcggagtcaacggaagcgttt

SEQ ID NO: 271585 - DNA, 25 bp, Probe Sequence
ggaattgtagtcaacggtcagcttg

SEQ ID NO: 271586 - DNA, 25 bp, Probe Sequence
ggaattgggagccatcatatgtcac

SEQ ID NO: 271587 - DNA, 25 bp, Probe Sequence
ggaattagaatccacaatatatcac

SEQ ID NO: 271588 - DNA, 25 bp, Probe Sequence
ggaatgcaaaaggcacaatgatgta

SEQ ID NO: 271589 - DNA, 25 bp, Probe Sequence
ggaatgcagacacagaccttgtatc

SEQ ID NO: 271590 - DNA, 25 bp, Probe Sequence
ggcaaaatcagctaacacgaaacct

SEQ ID NO: 271591 - DNA, 25 bp, Probe Sequence
ggcaaaaagacgtcaggccaccctc

SEQ ID NO: 271592 - DNA, 25 bp, Probe Sequence
ggcaagaagactgaggagccgcccc

SEQ ID NO: 271593 - DNA, 25 bp, Probe Sequence
ggcagtcaataagaggtccggcacg

SEQ ID NO: 271594 - DNA, 25 bp, Probe Sequence
ggcgttatggggatttcttcatccg

SEQ ID NO: 271595 - DNA, 25 bp, Probe Sequence
ggcaattgtggaggtgttctctact

SEQ ID NO: 271596 - DNA, 25 bp, Probe Sequence
ggaatgtctgcctgatgtagtctag

SEQ ID NO: 271597 - DNA, 25 bp, Probe Sequence
ggaatgcttcacatatgtcctcaag

SEQ ID NO: 271598 - DNA, 25 bp, Probe Sequence
ggaatgtacacaagatgcggaaatg

SEQ ID NO: 271599 - DNA, 25 bp, Probe Sequence
ggaatgtaatcaactgggagaatgt

SEQ ID NO: 271600 - DNA, 25 bp, Probe Sequence
ggaatgggacagtcacagggaagtg

SEQ ID NO: 271601 - DNA, 25 bp, Probe Sequence
ggaatccgaagtcctgggactgcgg

SEQ ID NO: 271602 - DNA, 25 bp, Probe Sequence
ggaatccgagatgtgaggagcactc

SEQ ID NO: 271603 - DNA, 25 bp, Probe Sequence
ggaatgccagacgctggggatgctg

SEQ ID NO: 271604 - DNA, 25 bp, Probe Sequence
ggaatccattggcttgagacacatg

SEQ ID NO: 271605 - DNA, 25 bp, Probe Sequence
ggcaaaatggagctcgaggccatga

SEQ ID NO: 271606 - DNA, 25 bp, Probe Sequence
ggaattcatggacgacacgagccga

SEQ ID NO: 271607 - DNA, 25 bp, Probe Sequence
ggcaatgaattacgaaggcagtcca

SEQ ID NO: 271608 - DNA, 25 bp, Probe Sequence
ggcaccaataagtaaggcagggagg

SEQ ID NO: 271609 - DNA, 25 bp, Probe Sequence
ggcagtacccatgaggacagggtgg

SEQ ID NO: 271610 - DNA, 25 bp, Probe Sequence
ggcactaccctgaagaactgtaggc

SEQ ID NO: 271611 - DNA, 25 bp, Probe Sequence
ggcaccaggcttctgaagctgctag

SEQ ID NO: 271612 - DNA, 25 bp, Probe Sequence
ggaattcgttacaaacatgtatgag

SEQ ID NO: 271613 - DNA, 25 bp, Probe Sequence
ggcaattcagtggactataataata

SEQ ID NO: 271614 - DNA, 25 bp, Probe Sequence
ggcacaatatgggcactttaaatga

SEQ ID NO: 271615 - DNA, 25 bp, Probe Sequence
ggcaaattcgtcttttgcgaatggc

SEQ ID NO: 271616 - DNA, 25 bp, Probe Sequence
ggcaaaatccccagagccaaggcag

SEQ ID NO: 271617 - DNA, 25 bp, Probe Sequence
ggcaaacataccgggagccataccg

SEQ ID NO: 271618 - DNA, 25 bp, Probe Sequence
ggaattctacctggagaccagagct

SEQ ID NO: 271619 - DNA, 25 bp, Probe Sequence
ggcagagttaccggtgaggcagatg

SEQ ID NO: 271620 - DNA, 25 bp, Probe Sequence
ggaattatagacctctagtagctga

SEQ ID NO: 271621 - DNA, 25 bp, Probe Sequence
ggaatcttcataggtcatattgaaa

SEQ ID NO: 271622 - DNA, 25 bp, Probe Sequence
ggaatctatgatgctatctttgata

SEQ ID NO: 271623 - DNA, 25 bp, Probe Sequence
ggaatactatcacctcttatataga

SEQ ID NO: 271624 - DNA, 25 bp, Probe Sequence
ggaatcacaatccctagtgtataaa

SEQ ID NO: 271625 - DNA, 25 bp, Probe Sequence
ggaatgataatccttttgtatactt

SEQ ID NO: 271626 - DNA, 25 bp, Probe Sequence
ggaatataacttgtgtcttgatttg

SEQ ID NO: 271627 - DNA, 25 bp, Probe Sequence
ggaatattccaaactgaactacttg

SEQ ID NO: 271628 - DNA, 25 bp, Probe Sequence
ggcactatatcctaactgtaggact

SEQ ID NO: 271629 - DNA, 25 bp, Probe Sequence
ggaatattccactatttgcagaggc

SEQ ID NO: 271630 - DNA, 25 bp, Probe Sequence
ggaattcctagctagcttcagagcc

SEQ ID NO: 271631 - DNA, 25 bp, Probe Sequence
ggaattacatatcgggacatggccc

SEQ ID NO: 271632 - DNA, 25 bp, Probe Sequence
ggaattacaatagttggcatggctt

SEQ ID NO: 271633 - DNA, 25 bp, Probe Sequence
ggcacttaccaagttggatattttg

SEQ ID NO: 271634 - DNA, 25 bp, Probe Sequence
ggcacattacacttctgtggattta

SEQ ID NO: 271635 - DNA, 25 bp, Probe Sequence
ggcacgaagaacagtgagattgtca

SEQ ID NO: 271636 - DNA, 25 bp, Probe Sequence
ggcaaaacaaatgtaatgttgcaga

SEQ ID NO: 271637 - DNA, 25 bp, Probe Sequence
ggaatgaataaagccctgaatgaat

SEQ ID NO: 271638 - DNA, 25 bp, Probe Sequence
ggcaatgatataaaacctggaatgt

SEQ ID NO: 271639 - DNA, 25 bp, Probe Sequence
ggaatataacaattcagcttaattc

SEQ ID NO: 271640 - DNA, 25 bp, Probe Sequence
ggaattcatccacatactatatttc

SEQ ID NO: 271641 - DNA, 25 bp, Probe Sequence
ggaattcatccacatactatatttc

SEQ ID NO: 271642 - DNA, 25 bp, Probe Sequence
ggaatatctcttgatatagaatttt

SEQ ID NO: 271643 - DNA, 25 bp, Probe Sequence
ggaatcccaatctatctaaatttca

SEQ ID NO: 271644 - DNA, 25 bp, Probe Sequence
ggaatcaccccatttcagagttatc

SEQ ID NO: 271645 - DNA, 25 bp, Probe Sequence
ggaatcctcctgtttgctgagatta

SEQ ID NO: 271646 - DNA, 25 bp, Probe Sequence
ggaatgactctgtctttgcatggaa

SEQ ID NO: 271647 - DNA, 25 bp, Probe Sequence
ggaattgctctgtcataataagtca

SEQ ID NO: 271648 - DNA, 25 bp, Probe Sequence
ggaatatctcattgcaggaaaggcc

SEQ ID NO: 271649 - DNA, 25 bp, Probe Sequence
ggaatatctcattgcaggaaaggcc

SEQ ID NO: 271650 - DNA, 25 bp, Probe Sequence
ggcacatttctttggaaggtactta

SEQ ID NO: 271651 - DNA, 25 bp, Probe Sequence
ggcacatgcttcttggagaacctga

SEQ ID NO: 271652 - DNA, 25 bp, Probe Sequence
ggaatgcttatggtagcgatgactg

SEQ ID NO: 271653 - DNA, 25 bp, Probe Sequence
ggaatgctgtcgggactgagcaggc

SEQ ID NO: 271654 - DNA, 25 bp, Probe Sequence
ggaatgcaggctgtactatctgcga

SEQ ID NO: 271655 - DNA, 25 bp, Probe Sequence
ggaatgcagcctgaattataccacc

SEQ ID NO: 271656 - DNA, 25 bp, Probe Sequence
ggcagcaggcgcgcaaattacccac

SEQ ID NO: 271657 - DNA, 25 bp, Probe Sequence
ggcagcaggcgcgcaaattacccac

SEQ ID NO: 271658 - DNA, 25 bp, Probe Sequence
ggcaggcgaggataagctaacgatg

SEQ ID NO: 271659 - DNA, 25 bp, Probe Sequence
ggcaaggagaaggaagtaccctggg

SEQ ID NO: 271660 - DNA, 25 bp, Probe Sequence
ggcaggggatcctcagtatagccgg

SEQ ID NO: 271661 - DNA, 25 bp, Probe Sequence
ggcattcgcagtgcccagtgatggc

SEQ ID NO: 271662 - DNA, 25 bp, Probe Sequence
ggaatcgcagatcagcgcagagatt

SEQ ID NO: 271663 - DNA, 25 bp, Probe Sequence
ggaatccagtgcttccacagagatt

SEQ ID NO: 271664 - DNA, 25 bp, Probe Sequence
ggcaatccctgtagccgcagagaat

SEQ ID NO: 271665 - DNA, 25 bp, Probe Sequence
ggcaatgctgaaatgatccgccaga

SEQ ID NO: 271666 - DNA, 25 bp, Probe Sequence
ggcacaggctatcatctatccatga

SEQ ID NO: 271667 - DNA, 25 bp, Probe Sequence
ggcacagagttagcactccataccc

SEQ ID NO: 271668 - DNA, 25 bp, Probe Sequence
ggcacagagttagcactccataccc

SEQ ID NO: 271669 - DNA, 25 bp, Probe Sequence
ggcaagagatcatatcctcagacca

SEQ ID NO: 271670 - DNA, 25 bp, Probe Sequence
ggcaagaaaactaccagtctctacc

SEQ ID NO: 271671 - DNA, 25 bp, Probe Sequence
ggcataaacggcaccagtaccaaca

SEQ ID NO: 271672 - DNA, 25 bp, Probe Sequence
ggcaaaccgatgatctaaaccaacc

SEQ ID NO: 271673 - DNA, 25 bp, Probe Sequence
ggcagtcacctattactaaactcag

SEQ ID NO: 271674 - DNA, 25 bp, Probe Sequence
ggcacttgccaattaaaatagctgc

SEQ ID NO: 271675 - DNA, 25 bp, Probe Sequence
ggcacttctccagcatatgtaagtg

SEQ ID NO: 271676 - DNA, 25 bp, Probe Sequence
ggcacggtgcctgtaattattaaac

SEQ ID NO: 271677 - DNA, 25 bp, Probe Sequence
ggcacctgtgaagccctttaaacac

SEQ ID NO: 271678 - DNA, 25 bp, Probe Sequence
ggcacggaaacccatatttagtact

SEQ ID NO: 271679 - DNA, 25 bp, Probe Sequence
ggcacttgccattccaaaatattat

SEQ ID NO: 271680 - DNA, 25 bp, Probe Sequence
ggcacttgacattttaattgtctta

SEQ ID NO: 271681 - DNA, 25 bp, Probe Sequence
ggcaatatgaaaccttttgtgcttc

SEQ ID NO: 271682 - DNA, 25 bp, Probe Sequence
ggcaagataaagcctatttctcatt

SEQ ID NO: 271683 - DNA, 25 bp, Probe Sequence
ggcaagattaacatgctactgttta

SEQ ID NO: 271684 - DNA, 25 bp, Probe Sequence
ggcaaatcgtaaggaagctgtttct

SEQ ID NO: 271685 - DNA, 25 bp, Probe Sequence
ggcaccatctaatagcgggttactt

SEQ ID NO: 271686 - DNA, 25 bp, Probe Sequence
ggcagtagtatttacgtggttagtc

SEQ ID NO: 271687 - DNA, 25 bp, Probe Sequence
ggcatctagttcttgggttttctgt

SEQ ID NO: 271688 - DNA, 25 bp, Probe Sequence
ggcactcagcagttttggttatttt

SEQ ID NO: 271689 - DNA, 25 bp, Probe Sequence
ggcactcaaattcatgactagtttt

SEQ ID NO: 271690 - DNA, 25 bp, Probe Sequence
ggcacaaatctttacgtatttgttt

SEQ ID NO: 271691 - DNA, 25 bp, Probe Sequence
ggcagagaacagcaacccaatggtt

SEQ ID NO: 271692 - DNA, 25 bp, Probe Sequence
ggcaggaaccgagtctccagtgagg

SEQ ID NO: 271693 - DNA, 25 bp, Probe Sequence
ggcaatgaagccaagtctggaaagg

SEQ ID NO: 271694 - DNA, 25 bp, Probe Sequence
ggcaaggtcctaggcatggagaaac

SEQ ID NO: 271695 - DNA, 25 bp, Probe Sequence
ggcaatgcttccacagcgtaaatac

SEQ ID NO: 271696 - DNA, 25 bp, Probe Sequence
ggcaatgtttgccacatcgtgccat

SEQ ID NO: 271697 - DNA, 25 bp, Probe Sequence
ggcaattttgcaatcttggcattgg

SEQ ID NO: 271698 - DNA, 25 bp, Probe Sequence
ggaatttctgatacctccagtgggc

SEQ ID NO: 271699 - DNA, 25 bp, Probe Sequence
ggaatttctgagatcccatggaggt

SEQ ID NO: 271700 - DNA, 25 bp, Probe Sequence
ggaattccaggactctcaatggggg

SEQ ID NO: 271701 - DNA, 25 bp, Probe Sequence
ggcaacccagctgttcattggaggt

SEQ ID NO: 271702 - DNA, 25 bp, Probe Sequence
ggcaaaccactcttcaagtggtggc

SEQ ID NO: 271703 - DNA, 25 bp, Probe Sequence
ggcacaggaccggctgaagggcggc

SEQ ID NO: 271704 - DNA, 25 bp, Probe Sequence
ggcacaggaccggctgaagggcggc

SEQ ID NO: 271705 - DNA, 25 bp, Probe Sequence
ggcacaggatactgcaaatgtccag

SEQ ID NO: 271706 - DNA, 25 bp, Probe Sequence
ggcaaggtcatccctgagctgaacg

SEQ ID NO: 271707 - DNA, 25 bp, Probe Sequence
ggcaatgcggctgcactggtggaag

SEQ ID NO: 271708 - DNA, 25 bp, Probe Sequence
ggcaaagggccagtgatgtgacaag

SEQ ID NO: 271709 - DNA, 25 bp, Probe Sequence
ggaatcagaaccagatgacacatga

SEQ ID NO: 271710 - DNA, 25 bp, Probe Sequence
ggaatagccaccgagatgctcagag

SEQ ID NO: 271711 - DNA, 25 bp, Probe Sequence
ggaattgcactgtggcagcatcaga

SEQ ID NO: 271712 - DNA, 25 bp, Probe Sequence
ggaatatacatagacatgcatatac

SEQ ID NO: 271713 - DNA, 25 bp, Probe Sequence
ggaatacacatacaaacacacaata

SEQ ID NO: 271714 - DNA, 25 bp, Probe Sequence
ggaatatcctgacctgacaaagaaa

SEQ ID NO: 271715 - DNA, 25 bp, Probe Sequence
ggaatagcctgaactcaaacagatg

SEQ ID NO: 271716 - DNA, 25 bp, Probe Sequence
ggaatacgtgcacccaaaactggac

SEQ ID NO: 271717 - DNA, 25 bp, Probe Sequence
ggcaattcccaaggcaaaacaagtc

SEQ ID NO: 271718 - DNA, 25 bp, Probe Sequence
ggcaattcccaaggcaaaacaagtc

SEQ ID NO: 271719 - DNA, 25 bp, Probe Sequence
ggaatatgccctgcgtaaactggat

SEQ ID NO: 271720 - DNA, 25 bp, Probe Sequence
ggcaaacacgctgcgatacggcggt

SEQ ID NO: 271721 - DNA, 25 bp, Probe Sequence
ggcaagaaccagtgtttagcgcggg

SEQ ID NO: 271722 - DNA, 25 bp, Probe Sequence
ggcaaaacacgatgttctgacattg

SEQ ID NO: 271723 - DNA, 25 bp, Probe Sequence
ggcaaatccctggtggaatacttgg

SEQ ID NO: 271724 - DNA, 25 bp, Probe Sequence
ggcaagtcctcagctgaacaatctt

SEQ ID NO: 271725 - DNA, 25 bp, Probe Sequence
ggcaggctcctaaattaatgtcagt

SEQ ID NO: 271726 - DNA, 25 bp, Probe Sequence
ggcaaccctatcaagaggatccagt

SEQ ID NO: 271727 - DNA, 25 bp, Probe Sequence
ggcaccacctagatgcatacatcca

SEQ ID NO: 271728 - DNA, 25 bp, Probe Sequence
ggcaccctgcaagtaatcaacacat

SEQ ID NO: 271729 - DNA, 25 bp, Probe Sequence
ggcacatgccgaagatactcaagag

SEQ ID NO: 271730 - DNA, 25 bp, Probe Sequence
ggcacagcccaggcatagacgagct

SEQ ID NO: 271731 - DNA, 25 bp, Probe Sequence
ggcacattctaccatcagacaagtc

SEQ ID NO: 271732 - DNA, 25 bp, Probe Sequence
ggcacctgatataatctgccaggct

SEQ ID NO: 271733 - DNA, 25 bp, Probe Sequence
ggcacaatcaataacttcaggctgg

SEQ ID NO: 271734 - DNA, 25 bp, Probe Sequence
ggcaaatgcagtcaaccagggatgg

SEQ ID NO: 271735 - DNA, 25 bp, Probe Sequence
ggcaatagaggaggacggggtgctt

SEQ ID NO: 271736 - DNA, 25 bp, Probe Sequence
ggcaatcgggattactgttctggtt

SEQ ID NO: 271737 - DNA, 25 bp, Probe Sequence
ggaatcagagccttacttatgtaat

SEQ ID NO: 271738 - DNA, 25 bp, Probe Sequence
ggaatcagagactccttgagacccc

SEQ ID NO: 271739 - DNA, 25 bp, Probe Sequence
ggaatcacaagctccgggtggataa

SEQ ID NO: 271740 - DNA, 25 bp, Probe Sequence
tggagacccggggggtgggatggag

SEQ ID NO: 271741 - DNA, 25 bp, Probe Sequence
tgggcaaccagtgttggggaaggag

SEQ ID NO: 271742 - DNA, 25 bp, Probe Sequence
tgttcccaagggacttggaaaggag

SEQ ID NO: 271743 - DNA, 25 bp, Probe Sequence
ttcccaacagggtcccgataactcg

SEQ ID NO: 271744 - DNA, 25 bp, Probe Sequence
ttaccttcaaggaaagaattaccag

SEQ ID NO: 271745 - DNA, 25 bp, Probe Sequence
tgtaccttaaaacaacctatttgct

SEQ ID NO: 271746 - DNA, 25 bp, Probe Sequence
tgtcaccctaacttcgtattttttg

SEQ ID NO: 271747 - DNA, 25 bp, Probe Sequence
tgccgccctaacttccaaatttggg

SEQ ID NO: 271748 - DNA, 25 bp, Probe Sequence
ggcaacttatcgttccaaagattgg

SEQ ID NO: 271749 - DNA, 25 bp, Probe Sequence
ggaatttatgctttctcaagatgtt

SEQ ID NO: 271750 - DNA, 25 bp, Probe Sequence
ggaatttatgctttctcaagatgtt

SEQ ID NO: 271751 - DNA, 25 bp, Probe Sequence
ggaatttgacattgtccaaaccttt

SEQ ID NO: 271752 - DNA, 25 bp, Probe Sequence
ggcacatttaatacccaatttcttc

SEQ ID NO: 271753 - DNA, 25 bp, Probe Sequence
ggaatttaattgccaagtgctttct

SEQ ID NO: 271754 - DNA, 25 bp, Probe Sequence
ggaattcaattccacacatggtttg

SEQ ID NO: 271755 - DNA, 25 bp, Probe Sequence
ggcagttccatttccatatgggttg

SEQ ID NO: 271756 - DNA, 25 bp, Probe Sequence
ggcaatttagattcactgatgtcct

SEQ ID NO: 271757 - DNA, 25 bp, Probe Sequence
ggcaacactggattcagtgcaggtt

SEQ ID NO: 271758 - DNA, 25 bp, Probe Sequence
ggcacagactgcaaataggcatgct

SEQ ID NO: 271759 - DNA, 25 bp, Probe Sequence
ggcactgcattcatcaagtgcatgc

SEQ ID NO: 271760 - DNA, 25 bp, Probe Sequence
ggcactttcttatcgagatagtcac

SEQ ID NO: 271761 - DNA, 25 bp, Probe Sequence
ggcagccgtccttctaatgaagaca

SEQ ID NO: 271762 - DNA, 25 bp, Probe Sequence
ggcccagttccattaatgtaattag

SEQ ID NO: 271763 - DNA, 25 bp, Probe Sequence
ggcccagccttatgaactgaattct

SEQ ID NO: 271764 - DNA, 25 bp, Probe Sequence
ggcagccgcacactatgagcaacat

SEQ ID NO: 271765 - DNA, 25 bp, Probe Sequence
ggcactccatctatgcgagagcttc

SEQ ID NO: 271766 - DNA, 25 bp, Probe Sequence
ggcacgttgctcatcagcaaggtgc

SEQ ID NO: 271767 - DNA, 25 bp, Probe Sequence
ggcaggtggtgcataaaagttaaag

SEQ ID NO: 271768 - DNA, 25 bp, Probe Sequence
ggcagccggctcataaaggttcatt

SEQ ID NO: 271769 - DNA, 25 bp, Probe Sequence
ggcagaaggactgctaagtcttcag

SEQ ID NO: 271770 - DNA, 25 bp, Probe Sequence
ggcagcagaggattggcataaaact

SEQ ID NO: 271771 - DNA, 25 bp, Probe Sequence
ggcagcagggtctggtcataatcca

SEQ ID NO: 271772 - DNA, 25 bp, Probe Sequence
ggcagagtgtgcttggagtcagaga

SEQ ID NO: 271773 - DNA, 25 bp, Probe Sequence
ggcacagctcagtatggagtcacca

SEQ ID NO: 271774 - DNA, 25 bp, Probe Sequence
ggcatggccttccgtgtccccactg

SEQ ID NO: 271775 - DNA, 25 bp, Probe Sequence
ggcagactcagtgctgtgtggcgcc

SEQ ID NO: 271776 - DNA, 25 bp, Probe Sequence
ggcaaagcagatgtgcctgggcaca

SEQ ID NO: 271777 - DNA, 25 bp, Probe Sequence
ggcactgataatgtgtgggctctga

SEQ ID NO: 271778 - DNA, 25 bp, Probe Sequence
ggcaccataacatggggccaaatac

SEQ ID NO: 271779 - DNA, 25 bp, Probe Sequence
ggcaccatttattttacacaaaggc

SEQ ID NO: 271780 - DNA, 25 bp, Probe Sequence
tgtgttcgacgttttatcaaaggcc

SEQ ID NO: 271781 - DNA, 25 bp, Probe Sequence
tgtgttcgacgttttatcaaaggcc

SEQ ID NO: 271782 - DNA, 25 bp, Probe Sequence
tgtggggaagtcttcttaaaggaag

SEQ ID NO: 271783 - DNA, 25 bp, Probe Sequence
tggcctggaagcctgttcagaaagg

SEQ ID NO: 271784 - DNA, 25 bp, Probe Sequence
ggctctgtaatgctaacaagaagtc

SEQ ID NO: 271785 - DNA, 25 bp, Probe Sequence
ggcactggacttcaagcgaaaggca

SEQ ID NO: 271786 - DNA, 25 bp, Probe Sequence
ggcaccatccttaagggagaaggtc

SEQ ID NO: 271787 - DNA, 25 bp, Probe Sequence
ggcaagcatcttaagaggggcaagc

SEQ ID NO: 271788 - DNA, 25 bp, Probe Sequence
ggcaagccataatgaggcccatcct

SEQ ID NO: 271789 - DNA, 25 bp, Probe Sequence
ggcacgccagaaggatgccgcagac

SEQ ID NO: 271790 - DNA, 25 bp, Probe Sequence
ggcaccgagacttatgcttcagtcc

SEQ ID NO: 271791 - DNA, 25 bp, Probe Sequence
ggcacccaactgcagatatcgggcc

SEQ ID NO: 271792 - DNA, 25 bp, Probe Sequence
ggcagcccccatcttcaagggctgc

SEQ ID NO: 271793 - DNA, 25 bp, Probe Sequence
ggcacccattctgtacagggagtga

SEQ ID NO: 271794 - DNA, 25 bp, Probe Sequence
ggcatgctacttgcctacagtgggg

SEQ ID NO: 271795 - DNA, 25 bp, Probe Sequence
ggcaggattcagcacaacactgggg

SEQ ID NO: 271796 - DNA, 25 bp, Probe Sequence
ggcagcgcaacactgaaaccgagga

SEQ ID NO: 271797 - DNA, 25 bp, Probe Sequence
ggcaggaaaagaatacgtggaacac

SEQ ID NO: 271798 - DNA, 25 bp, Probe Sequence
ggcacgagaacaactacgtgatgaa

SEQ ID NO: 271799 - DNA, 25 bp, Probe Sequence
ggcacgagataaaaatggcttccaa

SEQ ID NO: 271800 - DNA, 25 bp, Probe Sequence
ggcacagtgataggaaaggccacca

SEQ ID NO: 271801 - DNA, 25 bp, Probe Sequence
ggcactggttcagaagcgccattac

SEQ ID NO: 271802 - DNA, 25 bp, Probe Sequence
ggcactggttcagaatgcacaaagc

SEQ ID NO: 271803 - DNA, 25 bp, Probe Sequence
ggcagctgagattcgaaagcaccat

SEQ ID NO: 271804 - DNA, 25 bp, Probe Sequence
ggcagcgaggaggagttaccattga

SEQ ID NO: 271805 - DNA, 25 bp, Probe Sequence
ggcagaggaatgggttagccctaat

SEQ ID NO: 271806 - DNA, 25 bp, Probe Sequence
ggcgatgaacgtcttacaactcagt

SEQ ID NO: 271807 - DNA, 25 bp, Probe Sequence
ggcagagccatactttttaccatag

SEQ ID NO: 271808 - DNA, 25 bp, Probe Sequence
ggcagcccattgtgtttgaaattcc

SEQ ID NO: 271809 - DNA, 25 bp, Probe Sequence
ggcaccgttgctttctaaagactcc

SEQ ID NO: 271810 - DNA, 25 bp, Probe Sequence
ggcaccttatgtttaaatcagattc

SEQ ID NO: 271811 - DNA, 25 bp, Probe Sequence
ggcaacttcagtacttcctatatct

SEQ ID NO: 271812 - DNA, 25 bp, Probe Sequence
ggcacattacagatcttaaatatgc

SEQ ID NO: 271813 - DNA, 25 bp, Probe Sequence
ggcacaaccaaaatcccactgatgc

SEQ ID NO: 271814 - DNA, 25 bp, Probe Sequence
ggcacacagagacagaccaactggc

SEQ ID NO: 271815 - DNA, 25 bp, Probe Sequence
ggcacataaggcacctgggctggaa

SEQ ID NO: 271816 - DNA, 25 bp, Probe Sequence
ggcaaagggcattccttgagctgta

SEQ ID NO: 271817 - DNA, 25 bp, Probe Sequence
ggcacaaccagcttcctggagttac

SEQ ID NO: 271818 - DNA, 25 bp, Probe Sequence
ggcacaagccatgaagggtgtcacc

SEQ ID NO: 271819 - DNA, 25 bp, Probe Sequence
ggcacatcaactgcgaagttatcct

SEQ ID NO: 271820 - DNA, 25 bp, Probe Sequence
ggcaccaaatcccatatattcttct

SEQ ID NO: 271821 - DNA, 25 bp, Probe Sequence
ggcaagtttggccagactgacttca

SEQ ID NO: 271822 - DNA, 25 bp, Probe Sequence
ggcaagtttggccagactgacttca

SEQ ID NO: 271823 - DNA, 25 bp, Probe Sequence
ggcaatttagagcaactactccttg

SEQ ID NO: 271824 - DNA, 25 bp, Probe Sequence
ggaatattaactatgtatgtctctt

SEQ ID NO: 271825 - DNA, 25 bp, Probe Sequence
ggcaatctttccactgattattctt

SEQ ID NO: 271826 - DNA, 25 bp, Probe Sequence
ggaatttcctaatgactatccgtca

SEQ ID NO: 271827 - DNA, 25 bp, Probe Sequence
ggcagttaccattaaaccatctccc

SEQ ID NO: 271828 - DNA, 25 bp, Probe Sequence
ggcagttcaagcaaagaaggcacac

SEQ ID NO: 271829 - DNA, 25 bp, Probe Sequence
ggcaattagagatcgaagcctccta

SEQ ID NO: 271830 - DNA, 25 bp, Probe Sequence
ggcacagggaaaagtagcctctctg

SEQ ID NO: 271831 - DNA, 25 bp, Probe Sequence
ggcaaggagaaacaagtcacatcgt

SEQ ID NO: 271832 - DNA, 25 bp, Probe Sequence
tggaaggttaatcgaaaccatcctt

SEQ ID NO: 271833 - DNA, 25 bp, Probe Sequence
ggcaggtgttcataaaagccctttg

SEQ ID NO: 271834 - DNA, 25 bp, Probe Sequence
ggcagttttactgaaaggtgcttta

SEQ ID NO: 271835 - DNA, 25 bp, Probe Sequence
ggcaacacgtttgcaaaggttttat

SEQ ID NO: 271836 - DNA, 25 bp, Probe Sequence
ggcacacagcaggctttcaagaagt

SEQ ID NO: 271837 - DNA, 25 bp, Probe Sequence
ggcaacacttcaatgctcatagaaa

SEQ ID NO: 271838 - DNA, 25 bp, Probe Sequence
ggcaagagcttcactcaaaaatcac

SEQ ID NO: 271839 - DNA, 25 bp, Probe Sequence
ggcaaatttgtagcatttattcact

SEQ ID NO: 271840 - DNA, 25 bp, Probe Sequence
ggcaaaatgttaatagttttccctg

SEQ ID NO: 271841 - DNA, 25 bp, Probe Sequence
ggcaaaatgttaatagttttccctg

SEQ ID NO: 271842 - DNA, 25 bp, Probe Sequence
ggcaactgaatatgtatggtttccg

SEQ ID NO: 271843 - DNA, 25 bp, Probe Sequence
ggcaatgctggaaaatttttatccc

SEQ ID NO: 271844 - DNA, 25 bp, Probe Sequence
ggcaatgcagggagacccttatctc

SEQ ID NO: 271845 - DNA, 25 bp, Probe Sequence
ggcaatgcgggcacacgctcttaca

SEQ ID NO: 271846 - DNA, 25 bp, Probe Sequence
ggcacacattgggtcacgccattac

SEQ ID NO: 271847 - DNA, 25 bp, Probe Sequence
ggcaagcaggagggccgaaatatcg

SEQ ID NO: 271848 - DNA, 25 bp, Probe Sequence
ggcacggcgagagcctaagaacatt

SEQ ID NO: 271849 - DNA, 25 bp, Probe Sequence
ggcacaggaggatctctaaagcagt

SEQ ID NO: 271850 - DNA, 25 bp, Probe Sequence
ggcaaggggcatatgccaaggcagg

SEQ ID NO: 271851 - DNA, 25 bp, Probe Sequence
ggcaagtggattattcggctgcgga

SEQ ID NO: 271852 - DNA, 25 bp, Probe Sequence
ggcaagtacattctgtgctgcctgc

SEQ ID NO: 271853 - DNA, 25 bp, Probe Sequence
ggcaagtacattctgtgctgcctgc

SEQ ID NO: 271854 - DNA, 25 bp, Probe Sequence
ggcaatgtactgttttgtgttgatc

SEQ ID NO: 271855 - DNA, 25 bp, Probe Sequence
ggcatgcagaacattcttgtggtac

SEQ ID NO: 271856 - DNA, 25 bp, Probe Sequence
tggaggcaacttctggtggtttttt

SEQ ID NO: 271857 - DNA, 25 bp, Probe Sequence
ggcagccacagcttgggtgtgtgtt

SEQ ID NO: 271858 - DNA, 25 bp, Probe Sequence
ggcacattcctttgggtatgttaac

SEQ ID NO: 271859 - DNA, 25 bp, Probe Sequence
ggaattcctcttggacaagtttgag

SEQ ID NO: 271860 - DNA, 25 bp, Probe Sequence
ggcaaagcacttttgacaagttgtg

SEQ ID NO: 271861 - DNA, 25 bp, Probe Sequence
ggcaaacactctttggatagcgatg

SEQ ID NO: 271862 - DNA, 25 bp, Probe Sequence
ggcaaacttccactgtttctatggc

SEQ ID NO: 271863 - DNA, 25 bp, Probe Sequence
ggcaagatctgtttttgctttgtgt

SEQ ID NO: 271864 - DNA, 25 bp, Probe Sequence
ggaattgctggattgtcacttttgg

SEQ ID NO: 271865 - DNA, 25 bp, Probe Sequence
ggcaatatggagtcagtcctgcatt

SEQ ID NO: 271866 - DNA, 25 bp, Probe Sequence
ggcacattatagccttcttgcactt

SEQ ID NO: 271867 - DNA, 25 bp, Probe Sequence
ggcaatatcatcaccacacgcactt

SEQ ID NO: 271868 - DNA, 25 bp, Probe Sequence
ggcagatgtccttaacccattaatc

SEQ ID NO: 271869 - DNA, 25 bp, Probe Sequence
ggcagggctcaatgatgcccattaa

SEQ ID NO: 271870 - DNA, 25 bp, Probe Sequence
ggcaggaacacattgaagactaaga

SEQ ID NO: 271871 - DNA, 25 bp, Probe Sequence
ggcaggattcacttatgggtaaaag

SEQ ID NO: 271872 - DNA, 25 bp, Probe Sequence
ggcagactcaccaggggtagggaga

SEQ ID NO: 271873 - DNA, 25 bp, Probe Sequence
ggaattctcactggggcgaaggagt

SEQ ID NO: 271874 - DNA, 25 bp, Probe Sequence
ggcagatgactcactgtgggggggt

SEQ ID NO: 271875 - DNA, 25 bp, Probe Sequence
ggcagagtgccttctgaagtgaggg

SEQ ID NO: 271876 - DNA, 25 bp, Probe Sequence
ggcaatgaccgctaaaggaggcgat

SEQ ID NO: 271877 - DNA, 25 bp, Probe Sequence
ggcaagcctggctgtagtagcgagt

SEQ ID NO: 271878 - DNA, 25 bp, Probe Sequence
ggcacagcctggctgtggcctaacc

SEQ ID NO: 271879 - DNA, 25 bp, Probe Sequence
ggcaatgacttgtattggcctacca

SEQ ID NO: 271880 - DNA, 25 bp, Probe Sequence
ggcaagaaatgcattgcagccaaaa

SEQ ID NO: 271881 - DNA, 25 bp, Probe Sequence
ggcaagaaatgcattgcagccaaaa

SEQ ID NO: 271882 - DNA, 25 bp, Probe Sequence
ggcagccacacgatgggccaagaag

SEQ ID NO: 271883 - DNA, 25 bp, Probe Sequence
ggcagccacacgatgggccaagaag

SEQ ID NO: 271884 - DNA, 25 bp, Probe Sequence
ggcactttggggggccaagacaggc

SEQ ID NO: 271885 - DNA, 25 bp, Probe Sequence
ggcactttgggcttggctagatcac

SEQ ID NO: 271886 - DNA, 25 bp, Probe Sequence
ggcaaggagaggttactggacccca

SEQ ID NO: 271887 - DNA, 25 bp, Probe Sequence
ggctacaacagagtttttacctgaa

SEQ ID NO: 271888 - DNA, 25 bp, Probe Sequence
tggccaaaaaatgcttcttcctgaa

SEQ ID NO: 271889 - DNA, 25 bp, Probe Sequence
ggcacatacaaaacctacattctct

SEQ ID NO: 271890 - DNA, 25 bp, Probe Sequence
ggcacataacactccaatgatagtt

SEQ ID NO: 271891 - DNA, 25 bp, Probe Sequence
ggcactcaagcctgagaggaagctc

SEQ ID NO: 271892 - DNA, 25 bp, Probe Sequence
ggcaccagagggcggcagagagcca

SEQ ID NO: 271893 - DNA, 25 bp, Probe Sequence
ggcaccagagggtccaagacaagac

SEQ ID NO: 271894 - DNA, 25 bp, Probe Sequence
ggcgacagggtctacaagaacgagt

SEQ ID NO: 271895 - DNA, 25 bp, Probe Sequence
ggcagaaggggaaagtggaggagct

SEQ ID NO: 271896 - DNA, 25 bp, Probe Sequence
ggcaacagagggcggtggagaggcc

SEQ ID NO: 271897 - DNA, 25 bp, Probe Sequence
ggcaaatggggctgggggagccaca

SEQ ID NO: 271898 - DNA, 25 bp, Probe Sequence
ggaattctgggctgccaggaaacga

SEQ ID NO: 271899 - DNA, 25 bp, Probe Sequence
ggcacttcggccacgggatagaaga

SEQ ID NO: 271900 - DNA, 25 bp, Probe Sequence
ggcacttggatcgggggtgtagaca

SEQ ID NO: 271901 - DNA, 25 bp, Probe Sequence
ggcagtctggaaagggggttctcag

SEQ ID NO: 271902 - DNA, 25 bp, Probe Sequence
ggcagtcgaaccatggtgaactcca

SEQ ID NO: 271903 - DNA, 25 bp, Probe Sequence
ggcagttgtaccatgcattaagagc

SEQ ID NO: 271904 - DNA, 25 bp, Probe Sequence
ggcaggcagatcacaagcttaggag

SEQ ID NO: 271905 - DNA, 25 bp, Probe Sequence
ggcagagaatgggggtctcgcaggc

SEQ ID NO: 271906 - DNA, 25 bp, Probe Sequence
ggcacaagtgcaggcgtttggaggc

SEQ ID NO: 271907 - DNA, 25 bp, Probe Sequence
ggcaactctgtgggtgtgggggccc

SEQ ID NO: 271908 - DNA, 25 bp, Probe Sequence
ggcaactctgtgggtgtgggggccc

SEQ ID NO: 271909 - DNA, 25 bp, Probe Sequence
ggcaactctgtgggtgtgggggccc

SEQ ID NO: 271910 - DNA, 25 bp, Probe Sequence
ggcgaactgtagagtgcagggaccc

SEQ ID NO: 271911 - DNA, 25 bp, Probe Sequence
ggcaaacttattaggctaggaccag

SEQ ID NO: 271912 - DNA, 25 bp, Probe Sequence
ggcaaacttatctcactgaatgagc

SEQ ID NO: 271913 - DNA, 25 bp, Probe Sequence
ggcaaacttatctcactgaatgagc

SEQ ID NO: 271914 - DNA, 25 bp, Probe Sequence
ggcaaacttatctcactgaatgagc

SEQ ID NO: 271915 - DNA, 25 bp, Probe Sequence
ggcaaatcttactatactatgaaaa

SEQ ID NO: 271916 - DNA, 25 bp, Probe Sequence
ggcaaattctaccaagcaacgataa

SEQ ID NO: 271917 - DNA, 25 bp, Probe Sequence
ggcaaacatcaaccaatgggtgaag

SEQ ID NO: 271918 - DNA, 25 bp, Probe Sequence
ggcaaaataactcatagtggagagg

SEQ ID NO: 271919 - DNA, 25 bp, Probe Sequence
ggcagaagaggacttttgggaagag

SEQ ID NO: 271920 - DNA, 25 bp, Probe Sequence
ggcaaggaggactttgtggggcatc

SEQ ID NO: 271921 - DNA, 25 bp, Probe Sequence
ggcaagtggaaatcagtgggcctgc

SEQ ID NO: 271922 - DNA, 25 bp, Probe Sequence
ggcaatgtggagggccagtggtttc

SEQ ID NO: 271923 - DNA, 25 bp, Probe Sequence
ggcaagggagaagtcagaggctgat

SEQ ID NO: 271924 - DNA, 25 bp, Probe Sequence
ggcacatgggtggacacggatctgc

SEQ ID NO: 271925 - DNA, 25 bp, Probe Sequence
ggcagcagccgggatcgatggtggc

SEQ ID NO: 271926 - DNA, 25 bp, Probe Sequence
ggcaagccatggttgctgggctgta

SEQ ID NO: 271927 - DNA, 25 bp, Probe Sequence
ggcaagttgcagctgctggtggcca

SEQ ID NO: 271928 - DNA, 25 bp, Probe Sequence
ggcaatggtgcgcctgctggaagat

SEQ ID NO: 271929 - DNA, 25 bp, Probe Sequence
ggcagtcacggcgtctgatgaagaa

SEQ ID NO: 271930 - DNA, 25 bp, Probe Sequence
ggcaaacaggcagttggccagagag

SEQ ID NO: 271931 - DNA, 25 bp, Probe Sequence
ggcaatcaacagtcttacacagaga

SEQ ID NO: 271932 - DNA, 25 bp, Probe Sequence
ggcacaacacagctaacacaaggcc

SEQ ID NO: 271933 - DNA, 25 bp, Probe Sequence
ggcagaatccaagggtccaagacca

SEQ ID NO: 271934 - DNA, 25 bp, Probe Sequence
ggcaggatccaagcagatcagccca

SEQ ID NO: 271935 - DNA, 25 bp, Probe Sequence
ggcaagcaccaagtcagtttccaaa

SEQ ID NO: 271936 - DNA, 25 bp, Probe Sequence
ggcaacaacagattctcttggctca

SEQ ID NO: 271937 - DNA, 25 bp, Probe Sequence
ggcaagagtcagacctcttctctga

SEQ ID NO: 271938 - DNA, 25 bp, Probe Sequence
ggcaatagtagtagctgtctcttag

SEQ ID NO: 271939 - DNA, 25 bp, Probe Sequence
ggcagaaacacaagcggctctatga

SEQ ID NO: 271940 - DNA, 25 bp, Probe Sequence
ggcaaacatcataaggagctacaga

SEQ ID NO: 271941 - DNA, 25 bp, Probe Sequence
ggcaatcaccacgagaagcccaaga

SEQ ID NO: 271942 - DNA, 25 bp, Probe Sequence
ggcaagaccagcaagaagatcacca

SEQ ID NO: 271943 - DNA, 25 bp, Probe Sequence
ggcaagccactcataatgttgtcat

SEQ ID NO: 271944 - DNA, 25 bp, Probe Sequence
ggcaagctcaatgtacatcttattt

SEQ ID NO: 271945 - DNA, 25 bp, Probe Sequence
ggcagacataggggcatatgctgta

SEQ ID NO: 271946 - DNA, 25 bp, Probe Sequence
ggctagcatgctcatggcaatctgt

SEQ ID NO: 271947 - DNA, 25 bp, Probe Sequence
ggcaagctctgaatagctgtcagtt

SEQ ID NO: 271948 - DNA, 25 bp, Probe Sequence
ggcaaacatgaaactgatcatattt

SEQ ID NO: 271949 - DNA, 25 bp, Probe Sequence
ggcaaacagcacactaatcctggag

SEQ ID NO: 271950 - DNA, 25 bp, Probe Sequence
ggcacagacccaacacaaggcgggg

SEQ ID NO: 271951 - DNA, 25 bp, Probe Sequence
ggcacgactgcttgaaagaggcggc

SEQ ID NO: 271952 - DNA, 25 bp, Probe Sequence
ggcaacacctatgaagggcgtccca

SEQ ID NO: 271953 - DNA, 25 bp, Probe Sequence
ggcaccaagtacaaagtgggaccaa

SEQ ID NO: 271954 - DNA, 25 bp, Probe Sequence
ggcaccaagtacacatatggcccgg

SEQ ID NO: 271955 - DNA, 25 bp, Probe Sequence
ggcaagcaaataacttgaggtcggg

SEQ ID NO: 271956 - DNA, 25 bp, Probe Sequence
ggcagggaactgcttgaaccgggga

SEQ ID NO: 271957 - DNA, 25 bp, Probe Sequence
ggcaggagaatggcgtgaacccggg

SEQ ID NO: 271958 - DNA, 25 bp, Probe Sequence
ggcaggagaatggcgtgaacccggg

SEQ ID NO: 271959 - DNA, 25 bp, Probe Sequence
ggcaggagaatggcgtgaacccggg

SEQ ID NO: 271960 - DNA, 25 bp, Probe Sequence
ggcaggagaatggcctgaacccggg

SEQ ID NO: 271961 - DNA, 25 bp, Probe Sequence
ggcaacaagataccagatccccttg

SEQ ID NO: 271962 - DNA, 25 bp, Probe Sequence
ggcaaccaaatcgaatctctcattt

SEQ ID NO: 271963 - DNA, 25 bp, Probe Sequence
ggcaaccagactgcagattcatgct

SEQ ID NO: 271964 - DNA, 25 bp, Probe Sequence
ggcaagcggattgctttgcactcag

SEQ ID NO: 271965 - DNA, 25 bp, Probe Sequence
ggcacatctggagttcttctccagc

SEQ ID NO: 271966 - DNA, 25 bp, Probe Sequence
ggcacattggatgagtatcttgcaa

SEQ ID NO: 271967 - DNA, 25 bp, Probe Sequence
ggcacattgtattacttactgcaag

SEQ ID NO: 271968 - DNA, 25 bp, Probe Sequence
ggcaatctgtgttcaaaagctctca

SEQ ID NO: 271969 - DNA, 25 bp, Probe Sequence
ggcaagtggttcgacaagcgctgcc

SEQ ID NO: 271970 - DNA, 25 bp, Probe Sequence
ggcaatctaggtcccaagactgcac

SEQ ID NO: 271971 - DNA, 25 bp, Probe Sequence
ggcaatcttaaaccaatgactcacc

SEQ ID NO: 271972 - DNA, 25 bp, Probe Sequence
ggcacagttaaatgaaacactcaca

SEQ ID NO: 271973 - DNA, 25 bp, Probe Sequence
ggcacagttatgaagtttccccaca

SEQ ID NO: 271974 - DNA, 25 bp, Probe Sequence
ggcaagggataactcttctaacaca

SEQ ID NO: 271975 - DNA, 25 bp, Probe Sequence
ggcaagggctaaaggctgcaacaaa

SEQ ID NO: 271976 - DNA, 25 bp, Probe Sequence
ggcaaatggctacaggacagcatca

SEQ ID NO: 271977 - DNA, 25 bp, Probe Sequence
ggcactataccacaggtgcagatgg

SEQ ID NO: 271978 - DNA, 25 bp, Probe Sequence
ggcactgtggccaagaggtgcttga

SEQ ID NO: 271979 - DNA, 25 bp, Probe Sequence
ggcacatggggaggaggttctaata

SEQ ID NO: 271980 - DNA, 25 bp, Probe Sequence
ggcactgtgggaagcctttgctagg

SEQ ID NO: 271981 - DNA, 25 bp, Probe Sequence
ggcactgtgggaagcctttgctagg

SEQ ID NO: 271982 - DNA, 25 bp, Probe Sequence
ggcactgggtgaaaaggtcggagga

SEQ ID NO: 271983 - DNA, 25 bp, Probe Sequence
ggcactggcggtcaagtgtggagga

SEQ ID NO: 271984 - DNA, 25 bp, Probe Sequence
ggcagtgggaggcaaatgggatggt

SEQ ID NO: 271985 - DNA, 25 bp, Probe Sequence
ggcaaaggatggcaagaggatcttg

SEQ ID NO: 271986 - DNA, 25 bp, Probe Sequence
ggcaacttgtgtcagagttactctg

SEQ ID NO: 271987 - DNA, 25 bp, Probe Sequence
ggcaactgtgggcaataatatggca

SEQ ID NO: 271988 - DNA, 25 bp, Probe Sequence
ggcaacaaaagccaaaattgacaaa

SEQ ID NO: 271989 - DNA, 25 bp, Probe Sequence
ggcccactaaggcaaaatagcccca

SEQ ID NO: 271990 - DNA, 25 bp, Probe Sequence
ggcacagcactatgtggggaacgcc

SEQ ID NO: 271991 - DNA, 25 bp, Probe Sequence
ggcacagcctaactatggagaccca

SEQ ID NO: 271992 - DNA, 25 bp, Probe Sequence
ggcactactaactgaaggccacagg

SEQ ID NO: 271993 - DNA, 25 bp, Probe Sequence
ggcacttctgaaaggcacaaggcca

SEQ ID NO: 271994 - DNA, 25 bp, Probe Sequence
ggcacatccgtggaggacggccaga

SEQ ID NO: 271995 - DNA, 25 bp, Probe Sequence
ggcaccgccatggaaaaagctcagc

SEQ ID NO: 271996 - DNA, 25 bp, Probe Sequence
ggcaaaaagtgacaaagctcgctat

SEQ ID NO: 271997 - DNA, 25 bp, Probe Sequence
ggcaagtaaagcaaacaagtgtgta

SEQ ID NO: 271998 - DNA, 25 bp, Probe Sequence
ggcaagattgaagacacaggaggca

SEQ ID NO: 271999 - DNA, 25 bp, Probe Sequence
ggcaagctctatcaccaaggagcca

SEQ ID NO: 272000 - DNA, 25 bp, Probe Sequence
ggcaacatctgacaccaggaacctt

SEQ ID NO: 272001 - DNA, 25 bp, Probe Sequence
ggcacctcagtaactcatggtacct

SEQ ID NO: 272002 - DNA, 25 bp, Probe Sequence
ggcactgtcagttcctatgtgcccc

SEQ ID NO: 272003 - DNA, 25 bp, Probe Sequence
ggcaagccttgatcatagttcatac

SEQ ID NO: 272004 - DNA, 25 bp, Probe Sequence
ggcaactcctggtcatggtgatatt

SEQ ID NO: 272005 - DNA, 25 bp, Probe Sequence
ggcaactcctggtcatggtgatatt

SEQ ID NO: 272006 - DNA, 25 bp, Probe Sequence
ggcagacacagccctatgggtcatg

SEQ ID NO: 272007 - DNA, 25 bp, Probe Sequence
ggcaaatcacccagggtcacacaat

SEQ ID NO: 272008 - DNA, 25 bp, Probe Sequence
ggcaagaaatccctaggacacacag

SEQ ID NO: 272009 - DNA, 25 bp, Probe Sequence
ggcaaagaaacccggaggagcagca

SEQ ID NO: 272010 - DNA, 25 bp, Probe Sequence
ggcagggacaactgggaggatgagc

SEQ ID NO: 272011 - DNA, 25 bp, Probe Sequence
ggcagctggaatttaaggagggaca

SEQ ID NO: 272012 - DNA, 25 bp, Probe Sequence
ggcagatgctaattataaggcatta

SEQ ID NO: 272013 - DNA, 25 bp, Probe Sequence
ggcagaatgcagtgtaagactgtac

SEQ ID NO: 272014 - DNA, 25 bp, Probe Sequence
ggcaaatatgcttgttatgaactac

SEQ ID NO: 272015 - DNA, 25 bp, Probe Sequence
ggcaacaaatagttatagcctatct

SEQ ID NO: 272016 - DNA, 25 bp, Probe Sequence
ggcaaaattaccgaatgccattttt

SEQ ID NO: 272017 - DNA, 25 bp, Probe Sequence
ggcaaagactatcccaaggttattt

SEQ ID NO: 272018 - DNA, 25 bp, Probe Sequence
ggcaagattcttgccaagagaatta

SEQ ID NO: 272019 - DNA, 25 bp, Probe Sequence
ggcaaagttcgggacaagctcaata

SEQ ID NO: 272020 - DNA, 25 bp, Probe Sequence
ggctaccgtctgggacagtatacta

SEQ ID NO: 272021 - DNA, 25 bp, Probe Sequence
ggcacatgccctgtggacagttact

SEQ ID NO: 272022 - DNA, 25 bp, Probe Sequence
ggcaagtcacatgttatcacctact

SEQ ID NO: 272023 - DNA, 25 bp, Probe Sequence
ggcagagtctctgcgttacaaactc

SEQ ID NO: 272024 - DNA, 25 bp, Probe Sequence
ggcagagttcaggcagtaatgtgag

SEQ ID NO: 272025 - DNA, 25 bp, Probe Sequence
ggcacgctatgaggcagctaactgg

SEQ ID NO: 272026 - DNA, 25 bp, Probe Sequence
ggcagccattgcagagtcaggggta

SEQ ID NO: 272027 - DNA, 25 bp, Probe Sequence
ggcagcgcatgtatgttggggtttc

SEQ ID NO: 272028 - DNA, 25 bp, Probe Sequence
ggcaagcttcattggtagcaagttt

SEQ ID NO: 272029 - DNA, 25 bp, Probe Sequence
ggcagcagtcacataattaagtttt

SEQ ID NO: 272030 - DNA, 25 bp, Probe Sequence
ggcactgtcttttttctagcctatt

SEQ ID NO: 272031 - DNA, 25 bp, Probe Sequence
ggcattagctaaacttccacttcat

SEQ ID NO: 272032 - DNA, 25 bp, Probe Sequence
ggcattagctaaacttccacttcat

SEQ ID NO: 272033 - DNA, 25 bp, Probe Sequence
ggcagtagcatagaggatccatttc

SEQ ID NO: 272034 - DNA, 25 bp, Probe Sequence
ggcagaagcagccaaggaccgattc

SEQ ID NO: 272035 - DNA, 25 bp, Probe Sequence
ggcagaataggcaagcccaatattt

SEQ ID NO: 272036 - DNA, 25 bp, Probe Sequence
ggcagggggcatatacactacttgg

SEQ ID NO: 272037 - DNA, 25 bp, Probe Sequence
ggcaggagggcctgactttctttgg

SEQ ID NO: 272038 - DNA, 25 bp, Probe Sequence
ggcagggggcttgagatattccttt

SEQ ID NO: 272039 - DNA, 25 bp, Probe Sequence
ggcaggggagtgccaaggttgtcct

SEQ ID NO: 272040 - DNA, 25 bp, Probe Sequence
ggcatgggaatgtagcaagtcttgt

SEQ ID NO: 272041 - DNA, 25 bp, Probe Sequence
ggcacttgtggaagatattctctgt

SEQ ID NO: 272042 - DNA, 25 bp, Probe Sequence
ggcacctggcgtgagtttcatgtat

SEQ ID NO: 272043 - DNA, 25 bp, Probe Sequence
ggcacgaggggaacatcttcatgat

SEQ ID NO: 272044 - DNA, 25 bp, Probe Sequence
ggcaccatggggagactgtcctgcc

SEQ ID NO: 272045 - DNA, 25 bp, Probe Sequence
ggcacagaaggggctgagtgactcc

SEQ ID NO: 272046 - DNA, 25 bp, Probe Sequence
ggcaaccaggaaggcactgatctgc

SEQ ID NO: 272047 - DNA, 25 bp, Probe Sequence
ggcaacacagtgagacctgtctcca

SEQ ID NO: 272048 - DNA, 25 bp, Probe Sequence
ggcacagatagtgataccttctcat

SEQ ID NO: 272049 - DNA, 25 bp, Probe Sequence
ggcaagaaagcattcactccttcat

SEQ ID NO: 272050 - DNA, 25 bp, Probe Sequence
ggcacagaaagggcaaccattctaa

SEQ ID NO: 272051 - DNA, 25 bp, Probe Sequence
ggcagaaaactggcagtgcacctct

SEQ ID NO: 272052 - DNA, 25 bp, Probe Sequence
ggcagacaatgattgaagctcacgt

SEQ ID NO: 272053 - DNA, 25 bp, Probe Sequence
ggcagagcataagtacatccaggtt

SEQ ID NO: 272054 - DNA, 25 bp, Probe Sequence
ggcagagcataagtacatccaggtt

SEQ ID NO: 272055 - DNA, 25 bp, Probe Sequence
ggcagagcataagtacatccaggtt

SEQ ID NO: 272056 - DNA, 25 bp, Probe Sequence
ggcagctcataagagtctcaatgga

SEQ ID NO: 272057 - DNA, 25 bp, Probe Sequence
ggcagcaagaaggtgaggcatcagg

SEQ ID NO: 272058 - DNA, 25 bp, Probe Sequence
ggcaacagacagaatcactgctgca

SEQ ID NO: 272059 - DNA, 25 bp, Probe Sequence
ggcagcatcagacgtactcgtcata

SEQ ID NO: 272060 - DNA, 25 bp, Probe Sequence
ggcttaccttgttcaaagaggagct

SEQ ID NO: 272061 - DNA, 25 bp, Probe Sequence
ggcaggtcctcagtaaaatctattg

SEQ ID NO: 272062 - DNA, 25 bp, Probe Sequence
ggcaggccatatttaacaagttcga

SEQ ID NO: 272063 - DNA, 25 bp, Probe Sequence
ggcaccttgttttcacaactaggat

SEQ ID NO: 272064 - DNA, 25 bp, Probe Sequence
ggcaacttcttctgcattaggaaga

SEQ ID NO: 272065 - DNA, 25 bp, Probe Sequence
ggcaacgtgttatgatgatgggaag

SEQ ID NO: 272066 - DNA, 25 bp, Probe Sequence
ggcaacgtgttatgatgatgggaag

SEQ ID NO: 272067 - DNA, 25 bp, Probe Sequence
ggcaacgtgttatgatgatgggaag

SEQ ID NO: 272068 - DNA, 25 bp, Probe Sequence
ggcagacttctttaagcagtgtggg

SEQ ID NO: 272069 - DNA, 25 bp, Probe Sequence
ggcagtgttttgcagactttgggga

SEQ ID NO: 272070 - DNA, 25 bp, Probe Sequence
ggcaggttctagagacttaagggga

SEQ ID NO: 272071 - DNA, 25 bp, Probe Sequence
ggcatggtacggagatgtttcacga

SEQ ID NO: 272072 - DNA, 25 bp, Probe Sequence
ggcagaaacggttcacattccatta

SEQ ID NO: 272073 - DNA, 25 bp, Probe Sequence
ggcaaagctcaagtccacatttctt

SEQ ID NO: 272074 - DNA, 25 bp, Probe Sequence
ggcagcaacatccctaacatgttcg

SEQ ID NO: 272075 - DNA, 25 bp, Probe Sequence
ggcagaaattcactcagagcttcca

SEQ ID NO: 272076 - DNA, 25 bp, Probe Sequence
ggcacagaagtcaataagctgggca

SEQ ID NO: 272077 - DNA, 25 bp, Probe Sequence
ggcacaagcgtcagatccaagagca

SEQ ID NO: 272078 - DNA, 25 bp, Probe Sequence
tggcataaggacagataatcaaagg

SEQ ID NO: 272079 - DNA, 25 bp, Probe Sequence
ggcacaagcagacaaaatcaacatg

SEQ ID NO: 272080 - DNA, 25 bp, Probe Sequence
ggcagaagagcacaagaaccagact

SEQ ID NO: 272081 - DNA, 25 bp, Probe Sequence
ggcaacaagagcgaaactccgtctc

SEQ ID NO: 272082 - DNA, 25 bp, Probe Sequence
ggcaacctggtgaaacccagtcttt

SEQ ID NO: 272083 - DNA, 25 bp, Probe Sequence
tggctacctgggacgagtcctgttt

SEQ ID NO: 272084 - DNA, 25 bp, Probe Sequence
tggtatcggagggcggtcctggaac

SEQ ID NO: 272085 - DNA, 25 bp, Probe Sequence
tggtccgtaggagccactatgagga

SEQ ID NO: 272086 - DNA, 25 bp, Probe Sequence
tcccatagtaacgcccataagggac

SEQ ID NO: 272087 - DNA, 25 bp, Probe Sequence
tggcccagtacaagaccttaaggga

SEQ ID NO: 272088 - DNA, 25 bp, Probe Sequence
ggctaagtacccacttaagagctat

SEQ ID NO: 272089 - DNA, 25 bp, Probe Sequence
ggctataattccgccaaagtggctt

SEQ ID NO: 272090 - DNA, 25 bp, Probe Sequence
ggcataaggttcgggaagaggttgt

SEQ ID NO: 272091 - DNA, 25 bp, Probe Sequence
ggcataggccttagcagtaacgggt

SEQ ID NO: 272092 - DNA, 25 bp, Probe Sequence
ggcataggccttagcagtaacgggt

SEQ ID NO: 272093 - DNA, 25 bp, Probe Sequence
ggcagaggcaggaaactaactggtg

SEQ ID NO: 272094 - DNA, 25 bp, Probe Sequence
ggcagaggcaggaaactaactggtg

SEQ ID NO: 272095 - DNA, 25 bp, Probe Sequence
ggcagggagtgtaccacacagggcc

SEQ ID NO: 272096 - DNA, 25 bp, Probe Sequence
ggcagcaatgggtaacacacagagg

SEQ ID NO: 272097 - DNA, 25 bp, Probe Sequence
ggcacatcattggaatacaggaagt

SEQ ID NO: 272098 - DNA, 25 bp, Probe Sequence
ggcactgctcattaatcctgggagt

SEQ ID NO: 272099 - DNA, 25 bp, Probe Sequence
ggccgccatactacgggaactacga

SEQ ID NO: 272100 - DNA, 25 bp, Probe Sequence
ggccgccatactacgggaactacga

SEQ ID NO: 272101 - DNA, 25 bp, Probe Sequence
ggccgccatactacgggaactacga

SEQ ID NO: 272102 - DNA, 25 bp, Probe Sequence
ggcaccaaatcaacgggactttcca

SEQ ID NO: 272103 - DNA, 25 bp, Probe Sequence
ggcaccaaatcaacgggactttcca

SEQ ID NO: 272104 - DNA, 25 bp, Probe Sequence
ggcaccaaatcaacgggactttcca

SEQ ID NO: 272105 - DNA, 25 bp, Probe Sequence
ggcaccaaatcaacgggactttcca

SEQ ID NO: 272106 - DNA, 25 bp, Probe Sequence
ggcaccaaatcaacgggactttcca

SEQ ID NO: 272107 - DNA, 25 bp, Probe Sequence
ggcaccaaatcaacgggactttcca

SEQ ID NO: 272108 - DNA, 25 bp, Probe Sequence
ggcaccaaatcaacgggactttcca

SEQ ID NO: 272109 - DNA, 25 bp, Probe Sequence
ggcaccaaatcaacgggactttcca

SEQ ID NO: 272110 - DNA, 25 bp, Probe Sequence
ggcaccaatatcaacgggactttcc

SEQ ID NO: 272111 - DNA, 25 bp, Probe Sequence
ggcagcctgattcggggctgacctt

SEQ ID NO: 272112 - DNA, 25 bp, Probe Sequence
ggcagcctgcaaacaggtgcgtcgg

SEQ ID NO: 272113 - DNA, 25 bp, Probe Sequence
ggcagcgatagaagcctttgtctgt

SEQ ID NO: 272114 - DNA, 25 bp, Probe Sequence
ggcagcagaagtaggcgtatgggat

SEQ ID NO: 272115 - DNA, 25 bp, Probe Sequence
ggcaaaggtgtcgtggtggtcatta

SEQ ID NO: 272116 - DNA, 25 bp, Probe Sequence
ggcaacagtgcgacgggtggacatt

SEQ ID NO: 272117 - DNA, 25 bp, Probe Sequence
ggcagcacagggtgtatgtagaata

SEQ ID NO: 272118 - DNA, 25 bp, Probe Sequence
ggcacatcagtggggtgaatttaag

SEQ ID NO: 272119 - DNA, 25 bp, Probe Sequence
ggcacaatgatgtataagaatttga

SEQ ID NO: 272120 - DNA, 25 bp, Probe Sequence
ggcaaagattgttagatcagataaa

SEQ ID NO: 272121 - DNA, 25 bp, Probe Sequence
ggcaaagtcgatgtgaagacagaca

SEQ ID NO: 272122 - DNA, 25 bp, Probe Sequence
ggcagcaattaaggtcacagaaatc

SEQ ID NO: 272123 - DNA, 25 bp, Probe Sequence
ggcagattttaactccagaagcact

SEQ ID NO: 272124 - DNA, 25 bp, Probe Sequence
ggcagcatctacaaccctgaagtgc

SEQ ID NO: 272125 - DNA, 25 bp, Probe Sequence
ggcagcttacaagagcctattccct

SEQ ID NO: 272126 - DNA, 25 bp, Probe Sequence
ggcacaagcaaagaggcttcttcct

SEQ ID NO: 272127 - DNA, 25 bp, Probe Sequence
ggcagaccataaatcaacttcttgc

SEQ ID NO: 272128 - DNA, 25 bp, Probe Sequence
ggcagaatctaaatcacactatttt

SEQ ID NO: 272129 - DNA, 25 bp, Probe Sequence
ggcagtatctctctgcctatttatt

SEQ ID NO: 272130 - DNA, 25 bp, Probe Sequence
ggcacttcctgaggttcattaccac

SEQ ID NO: 272131 - DNA, 25 bp, Probe Sequence
tgtattttcatagcctttcccaggt

SEQ ID NO: 272132 - DNA, 25 bp, Probe Sequence
tgttgttttagagttcttccctgga

SEQ ID NO: 272133 - DNA, 25 bp, Probe Sequence
tggttttttggcaaaatccccagag

SEQ ID NO: 272134 - DNA, 25 bp, Probe Sequence
ggctacgctttgaggaagccccaga

SEQ ID NO: 272135 - DNA, 25 bp, Probe Sequence
ggcaacaaacgtagtgcaacccggt

SEQ ID NO: 272136 - DNA, 25 bp, Probe Sequence
ggcaaaaatcgttgtcacatcagtg

SEQ ID NO: 272137 - DNA, 25 bp, Probe Sequence
ggcagaaagggccttccaagtgggg

SEQ ID NO: 272138 - DNA, 25 bp, Probe Sequence
ggcaccaatggtatcttcaagggag

SEQ ID NO: 272139 - DNA, 25 bp, Probe Sequence
ggcacttatggtttttaatcttgaa

SEQ ID NO: 272140 - DNA, 25 bp, Probe Sequence
ggcacttagtgtttctatgttattg

SEQ ID NO: 272141 - DNA, 25 bp, Probe Sequence
ggcaaaattgtgaccatatgtgtat

SEQ ID NO: 272142 - DNA, 25 bp, Probe Sequence
ggcaaagtttgacgagtgtgtgctg

SEQ ID NO: 272143 - DNA, 25 bp, Probe Sequence
ggcaaagcttgtaagcagtctttgg

SEQ ID NO: 272144 - DNA, 25 bp, Probe Sequence
ggcagaaggcactcagcagttttgg

SEQ ID NO: 272145 - DNA, 25 bp, Probe Sequence
ggcacataggccttctgaatttcat

SEQ ID NO: 272146 - DNA, 25 bp, Probe Sequence
ggcaaaagctcactcatgttcttat

SEQ ID NO: 272147 - DNA, 25 bp, Probe Sequence
ggcagaacgcaagtgcattttttca

SEQ ID NO: 272148 - DNA, 25 bp, Probe Sequence
ggcagaacctaggcttggaattcac

SEQ ID NO: 272149 - DNA, 25 bp, Probe Sequence
ggcaaactctattctggtgagcatt

SEQ ID NO: 272150 - DNA, 25 bp, Probe Sequence
ggcaccaccatgtaccctggcattg

SEQ ID NO: 272151 - DNA, 25 bp, Probe Sequence
ggcaaaacatataccacccatagtg

SEQ ID NO: 272152 - DNA, 25 bp, Probe Sequence
ggcaaaatcattactgcagatccca

SEQ ID NO: 272153 - DNA, 25 bp, Probe Sequence
ggcagagaacaattccaaaccactg

SEQ ID NO: 272154 - DNA, 25 bp, Probe Sequence
ggcaaacacacatcactaaacaatc

SEQ ID NO: 272155 - DNA, 25 bp, Probe Sequence
ggcaaacagcaatgatcttccaata

SEQ ID NO: 272156 - DNA, 25 bp, Probe Sequence
ggcaaaagtcatttcttccctatat

SEQ ID NO: 272157 - DNA, 25 bp, Probe Sequence
ggcaaagcagaatctgttgtcctta

SEQ ID NO: 272158 - DNA, 25 bp, Probe Sequence
ggcactagatgatcaatgtatatcc

SEQ ID NO: 272159 - DNA, 25 bp, Probe Sequence
ggcacagaatatgcactgtccatca

SEQ ID NO: 272160 - DNA, 25 bp, Probe Sequence
ggcagcaaacatccttgttctgatg

SEQ ID NO: 272161 - DNA, 25 bp, Probe Sequence
ggcagatgaagtccttgactgtcag

SEQ ID NO: 272162 - DNA, 25 bp, Probe Sequence
ggcagcatggagccaaggtctgtcc

SEQ ID NO: 272163 - DNA, 25 bp, Probe Sequence
ggcacttgagtatggttgcatgtcc

SEQ ID NO: 272164 - DNA, 25 bp, Probe Sequence
ggcactacactagggaatttgctcc

SEQ ID NO: 272165 - DNA, 25 bp, Probe Sequence
ggcacaatgaccaggcagatatctc

SEQ ID NO: 272166 - DNA, 25 bp, Probe Sequence
ggcacatatacaccgtgcaatacta

SEQ ID NO: 272167 - DNA, 25 bp, Probe Sequence
ggcactgccaagacattcaaacaaa

SEQ ID NO: 272168 - DNA, 25 bp, Probe Sequence
ggcactcatcaagttctcaagagaa

SEQ ID NO: 272169 - DNA, 25 bp, Probe Sequence
ggcactgccatatttctgggagcac

SEQ ID NO: 272170 - DNA, 25 bp, Probe Sequence
ggcactgccatatttctgggagcac

SEQ ID NO: 272171 - DNA, 25 bp, Probe Sequence
ggcagctcctagtgactggacatgc

SEQ ID NO: 272172 - DNA, 25 bp, Probe Sequence
ggcagctcagtaccgagaggcgatg

SEQ ID NO: 272173 - DNA, 25 bp, Probe Sequence
ggcagctctgatcaggaaagtgagg

SEQ ID NO: 272174 - DNA, 25 bp, Probe Sequence
ggcacagtgacgtgaaagtctacaa

SEQ ID NO: 272175 - DNA, 25 bp, Probe Sequence
ggcacaccaagataccattcatcaa

SEQ ID NO: 272176 - DNA, 25 bp, Probe Sequence
ggcagaccgagatgaatcctcacca

SEQ ID NO: 272177 - DNA, 25 bp, Probe Sequence
ggcagaaatgagcagttcgctcctc

SEQ ID NO: 272178 - DNA, 25 bp, Probe Sequence
ggcaaagagagtcgcatctcagtgc

SEQ ID NO: 272179 - DNA, 25 bp, Probe Sequence
ggcacaaacagcatgatcacgtgct

SEQ ID NO: 272180 - DNA, 25 bp, Probe Sequence
ggcacaaccataatgatcagtatga

SEQ ID NO: 272181 - DNA, 25 bp, Probe Sequence
ggcacataccactgtcatcatagac

SEQ ID NO: 272182 - DNA, 25 bp, Probe Sequence
ggcagaggctcatagcacctcagac

SEQ ID NO: 272183 - DNA, 25 bp, Probe Sequence
ggcagaggctgataagaacgacaag

SEQ ID NO: 272184 - DNA, 25 bp, Probe Sequence
ggcagatgagcttacaagtattgaa

SEQ ID NO: 272185 - DNA, 25 bp, Probe Sequence
ggcagatgagcttacaagtattgaa

SEQ ID NO: 272186 - DNA, 25 bp, Probe Sequence
ggcacacacttacgagtattcagaa

SEQ ID NO: 272187 - DNA, 25 bp, Probe Sequence
ggcacaacttcagagcattcatcac

SEQ ID NO: 272188 - DNA, 25 bp, Probe Sequence
ggcacaccattttgatcattaaccc

SEQ ID NO: 272189 - DNA, 25 bp, Probe Sequence
ggctaccttttgttaaatctgcact

SEQ ID NO: 272190 - DNA, 25 bp, Probe Sequence
ggcttctgcattactattaactctg

SEQ ID NO: 272191 - DNA, 25 bp, Probe Sequence
ggcagttcatatactcgctggacct

SEQ ID NO: 272192 - DNA, 25 bp, Probe Sequence
ggcatgttggtagtgccggacttcc

SEQ ID NO: 272193 - DNA, 25 bp, Probe Sequence
ggcgtgggatacggttttgactcac

SEQ ID NO: 272194 - DNA, 25 bp, Probe Sequence
ggcactgggaaactcttttgcccaa

SEQ ID NO: 272195 - DNA, 25 bp, Probe Sequence
ggcactggtggcaagtccatctatg

SEQ ID NO: 272196 - DNA, 25 bp, Probe Sequence
ggcactgggcatcaatcagccttgt

SEQ ID NO: 272197 - DNA, 25 bp, Probe Sequence
ggcactgggcattcagaaaaggttc

SEQ ID NO: 272198 - DNA, 25 bp, Probe Sequence
ggcagcatgccggtgtaaaatcgtt

SEQ ID NO: 272199 - DNA, 25 bp, Probe Sequence
ggcagaccagggatgtaatgttttt

SEQ ID NO: 272200 - DNA, 25 bp, Probe Sequence
ggcacccacggaaggacatgctgtc

SEQ ID NO: 272201 - DNA, 25 bp, Probe Sequence
ggcacattagggtgggcgtgctgcg

SEQ ID NO: 272202 - DNA, 25 bp, Probe Sequence
ggcacttcacggtcgtgggagacga

SEQ ID NO: 272203 - DNA, 25 bp, Probe Sequence
ggcactgtcagacacggagcagaga

SEQ ID NO: 272204 - DNA, 25 bp, Probe Sequence
ggcactgttaccatagaagatgaca

SEQ ID NO: 272205 - DNA, 25 bp, Probe Sequence
ggcacttttccagtgaaagcaggcc

SEQ ID NO: 272206 - DNA, 25 bp, Probe Sequence
ggcagtgtttcaggctaaccaggaa

SEQ ID NO: 272207 - DNA, 25 bp, Probe Sequence
ggcgttttctgagcatacctggaaa

SEQ ID NO: 272208 - DNA, 25 bp, Probe Sequence
ggcagtttggtggcatgctacttgc

SEQ ID NO: 272209 - DNA, 25 bp, Probe Sequence
ggcactatctgtaccatcatacaac

SEQ ID NO: 272210 - DNA, 25 bp, Probe Sequence
ggcagcttctgcatgctgattatga

SEQ ID NO: 272211 - DNA, 25 bp, Probe Sequence
ggcagccctgcaagctaaagctttg

SEQ ID NO: 272212 - DNA, 25 bp, Probe Sequence
ggcagccgtttcttaacatgttgag

SEQ ID NO: 272213 - DNA, 25 bp, Probe Sequence
ggcagcacgtatttaatactttcat

SEQ ID NO: 272214 - DNA, 25 bp, Probe Sequence
ggcagcttttttatcagccttgctt

SEQ ID NO: 272215 - DNA, 25 bp, Probe Sequence
aattgattctaaagttcttttgtat

SEQ ID NO: 272216 - DNA, 25 bp, Probe Sequence
ggccgtctcagaagggtacaaggat

SEQ ID NO: 272217 - DNA, 25 bp, Probe Sequence
ggcacgtggaggaggctcaacaggt

SEQ ID NO: 272218 - DNA, 25 bp, Probe Sequence
ggcactggcagggagggtaagggct

SEQ ID NO: 272219 - DNA, 25 bp, Probe Sequence
ggcactggggctagggtcacagccc

SEQ ID NO: 272220 - DNA, 25 bp, Probe Sequence
ggcagctgacggtgacttcaagatc

SEQ ID NO: 272221 - DNA, 25 bp, Probe Sequence
ggcacgatggtgggcacttgtagtc

SEQ ID NO: 272222 - DNA, 25 bp, Probe Sequence
ggcaaatgagtttcgctgttatgtg

SEQ ID NO: 272223 - DNA, 25 bp, Probe Sequence
ggcaaattatatcagctgttgtgct

SEQ ID NO: 272224 - DNA, 25 bp, Probe Sequence
ggcagacagtaacgtcagttgatgc

SEQ ID NO: 272225 - DNA, 25 bp, Probe Sequence
ggcactctgtagtcttcagtgctac

SEQ ID NO: 272226 - DNA, 25 bp, Probe Sequence
ggcacatagtaggcattcgtgatga

SEQ ID NO: 272227 - DNA, 25 bp, Probe Sequence
ggcacatgagaaggatgacgggatt

SEQ ID NO: 272228 - DNA, 25 bp, Probe Sequence
ggcactaagatgccagccacggact

SEQ ID NO: 272229 - DNA, 25 bp, Probe Sequence
ggcactaagatgccagccacggact

SEQ ID NO: 272230 - DNA, 25 bp, Probe Sequence
ggcagccaagatctgagctcaggac

SEQ ID NO: 272231 - DNA, 25 bp, Probe Sequence
ggcagccaagacatacagcagcccc

SEQ ID NO: 272232 - DNA, 25 bp, Probe Sequence
ggcagacagatggcctggaaacctc

SEQ ID NO: 272233 - DNA, 25 bp, Probe Sequence
ggcagccataggagcgaacactgct

SEQ ID NO: 272234 - DNA, 25 bp, Probe Sequence
ggcagccttggcagcaaattcagac

SEQ ID NO: 272235 - DNA, 25 bp, Probe Sequence
ggcagccagggcttacctgtacact

SEQ ID NO: 272236 - DNA, 25 bp, Probe Sequence
ggcaccaagttttccattactttca

SEQ ID NO: 272237 - DNA, 25 bp, Probe Sequence
ggcactgaagttgtccaggaaattc

SEQ ID NO: 272238 - DNA, 25 bp, Probe Sequence
ggcacaggtgttgcaccagggactt

SEQ ID NO: 272239 - DNA, 25 bp, Probe Sequence
ggcacagggtattgcccagggtgcc

SEQ ID NO: 272240 - DNA, 25 bp, Probe Sequence
ggcacaaggttcttccatggtcgcc

SEQ ID NO: 272241 - DNA, 25 bp, Probe Sequence
ggcatgagggacctctcgggatgtg

SEQ ID NO: 272242 - DNA, 25 bp, Probe Sequence
ggcacagtgggcattcatggagatt

SEQ ID NO: 272243 - DNA, 25 bp, Probe Sequence
ggcagtgctggagattcagggcaat

SEQ ID NO: 272244 - DNA, 25 bp, Probe Sequence
ggcagcagctggaggctcagcgtgc

SEQ ID NO: 272245 - DNA, 25 bp, Probe Sequence
ggcacagggcaaggatcagaggccc

SEQ ID NO: 272246 - DNA, 25 bp, Probe Sequence
ggcactgaaagaggacatgagcggc

SEQ ID NO: 272247 - DNA, 25 bp, Probe Sequence
ggcactaccagactgacatggccag

SEQ ID NO: 272248 - DNA, 25 bp, Probe Sequence
ggcacaacctggtatatcgcatgcg

SEQ ID NO: 272249 - DNA, 25 bp, Probe Sequence
ggcacgagctcgggtgaggagctgg

SEQ ID NO: 272250 - DNA, 25 bp, Probe Sequence
ggcatcaggggctggatggagccgg

SEQ ID NO: 272251 - DNA, 25 bp, Probe Sequence
ggcattgggaccatgggtgccggag

SEQ ID NO: 272252 - DNA, 25 bp, Probe Sequence
ggcagcgggaccatgaggtacagcg

SEQ ID NO: 272253 - DNA, 25 bp, Probe Sequence
ggcaggcgggcccatgaagaaagcc

SEQ ID NO: 272254 - DNA, 25 bp, Probe Sequence
ggcacctgtagcctgtgaagaaacc

SEQ ID NO: 272255 - DNA, 25 bp, Probe Sequence
ggcacagcgtagatctggaaagagc

SEQ ID NO: 272256 - DNA, 25 bp, Probe Sequence
ggctacgtgactcctgtgaaggatc

SEQ ID NO: 272257 - DNA, 25 bp, Probe Sequence
ggctacgtgactcctgtgaaggatc

SEQ ID NO: 272258 - DNA, 25 bp, Probe Sequence
ggcttctgtagtcttagtggtacct

SEQ ID NO: 272259 - DNA, 25 bp, Probe Sequence
ggcttcttttgtcctaggtacgcca

SEQ ID NO: 272260 - DNA, 25 bp, Probe Sequence
tgacttcaaggtcacgaggttcccc

SEQ ID NO: 272261 - DNA, 25 bp, Probe Sequence
tggttaccagtctgggaattccccg

SEQ ID NO: 272262 - DNA, 25 bp, Probe Sequence
tggttaccaggctcagcattatgtc

SEQ ID NO: 272263 - DNA, 25 bp, Probe Sequence
ggcttcaaattctcatgctttactt

SEQ ID NO: 272264 - DNA, 25 bp, Probe Sequence
ggcttccattttctgtgttttgtaa

SEQ ID NO: 272265 - DNA, 25 bp, Probe Sequence
ggcttccattctagttcttttacca

SEQ ID NO: 272266 - DNA, 25 bp, Probe Sequence
ggcattattctaaactttcgtatcc

SEQ ID NO: 272267 - DNA, 25 bp, Probe Sequence
ggcagttttatcacgtttgaatcta

SEQ ID NO: 272268 - DNA, 25 bp, Probe Sequence
ggcgtgtgttacagcagtttgcaga

SEQ ID NO: 272269 - DNA, 25 bp, Probe Sequence
ggcagctgtattctggagtctggat

SEQ ID NO: 272270 - DNA, 25 bp, Probe Sequence
ggcactgtacgagtgaggcctgtga

SEQ ID NO: 272271 - DNA, 25 bp, Probe Sequence
ggcactgctactgtgaggagggctg

SEQ ID NO: 272272 - DNA, 25 bp, Probe Sequence
ggcagctctaccaggcaaggtgttt

SEQ ID NO: 272273 - DNA, 25 bp, Probe Sequence
ggctggctacacaatcgaatggttt

SEQ ID NO: 272274 - DNA, 25 bp, Probe Sequence
ggcaggtaaaatcattgtgcttgtg

SEQ ID NO: 272275 - DNA, 25 bp, Probe Sequence
ggcaggtaagaaagtactcattgtc

SEQ ID NO: 272276 - DNA, 25 bp, Probe Sequence
ggcgacttaacaagtgatccttctt

SEQ ID NO: 272277 - DNA, 25 bp, Probe Sequence
ggcagcagatgtaacagggaccatg

SEQ ID NO: 272278 - DNA, 25 bp, Probe Sequence
ggcactgactactgggcattcatga

SEQ ID NO: 272279 - DNA, 25 bp, Probe Sequence
ggcattgccaacgaagccttcatta

SEQ ID NO: 272280 - DNA, 25 bp, Probe Sequence
ggcaggacaattcacagttcttgag

SEQ ID NO: 272281 - DNA, 25 bp, Probe Sequence
ggcagtgactttgacgtctttgccc

SEQ ID NO: 272282 - DNA, 25 bp, Probe Sequence
ggcactacttacagtaatttgctac

SEQ ID NO: 272283 - DNA, 25 bp, Probe Sequence
ggcactgcctgtaaggtcgagtgtg

SEQ ID NO: 272284 - DNA, 25 bp, Probe Sequence
ggcactggtgctggattttatgttg

SEQ ID NO: 272285 - DNA, 25 bp, Probe Sequence
ggcatctggttactggttattttaa

SEQ ID NO: 272286 - DNA, 25 bp, Probe Sequence
ggcagctgtttaaatgtttttctat

SEQ ID NO: 272287 - DNA, 25 bp, Probe Sequence
ggcacatgtttaagaggaataccta

SEQ ID NO: 272288 - DNA, 25 bp, Probe Sequence
ggcatgttttcaggaggatatatca

SEQ ID NO: 272289 - DNA, 25 bp, Probe Sequence
ggcacatttgccagaggataactga

SEQ ID NO: 272290 - DNA, 25 bp, Probe Sequence
ggcatcatgtctgttagggaaagca

SEQ ID NO: 272291 - DNA, 25 bp, Probe Sequence
ggcacatctcccacttggagagaga

SEQ ID NO: 272292 - DNA, 25 bp, Probe Sequence
ggcacaggctgccttttggagggag

SEQ ID NO: 272293 - DNA, 25 bp, Probe Sequence
ggcagatgagctggtcatttcgcct

SEQ ID NO: 272294 - DNA, 25 bp, Probe Sequence
ggcagcaggcgatcatgttagtctt

SEQ ID NO: 272295 - DNA, 25 bp, Probe Sequence
ggcagcaggcgatcatgttagtctt

SEQ ID NO: 272296 - DNA, 25 bp, Probe Sequence
ggcagaggcgaactgtagagtgcag

SEQ ID NO: 272297 - DNA, 25 bp, Probe Sequence
ggcactgagcagtacgtgagtgtgc

SEQ ID NO: 272298 - DNA, 25 bp, Probe Sequence
ggcactgagggatctgagtaggtct

SEQ ID NO: 272299 - DNA, 25 bp, Probe Sequence
ggcactgagggatctgagtaggtct

SEQ ID NO: 272300 - DNA, 25 bp, Probe Sequence
ggcactggtgtttctagatagtgaa

SEQ ID NO: 272301 - DNA, 25 bp, Probe Sequence
ggcactaggtgcagctgggaatcaa

SEQ ID NO: 272302 - DNA, 25 bp, Probe Sequence
ggcactcagcttagccaggtggaaa

SEQ ID NO: 272303 - DNA, 25 bp, Probe Sequence
ggcactagaatagcactgttgcaaa

SEQ ID NO: 272304 - DNA, 25 bp, Probe Sequence
ggcatgcatagctaaaacttgtaaa

SEQ ID NO: 272305 - DNA, 25 bp, Probe Sequence
ggcagagactgatcggctgcgcgaa

SEQ ID NO: 272306 - DNA, 25 bp, Probe Sequence
ggcaggagtgagtgcctcgtgatcc

SEQ ID NO: 272307 - DNA, 25 bp, Probe Sequence
ggcagaggtgcaagacctagtcccc

SEQ ID NO: 272308 - DNA, 25 bp, Probe Sequence
ggcatggtggcacatgcctactccc

SEQ ID NO: 272309 - DNA, 25 bp, Probe Sequence
ggcatggtggcccatgcctgtagcc

SEQ ID NO: 272310 - DNA, 25 bp, Probe Sequence
ggcactgatgggctcacatatacga

SEQ ID NO: 272311 - DNA, 25 bp, Probe Sequence
ggcactgatgttctatcaactcgat

SEQ ID NO: 272312 - DNA, 25 bp, Probe Sequence
ggcagcattcttcgaaaaccgcatt

SEQ ID NO: 272313 - DNA, 25 bp, Probe Sequence
ggcacttaccaaaatgacatcgctt

SEQ ID NO: 272314 - DNA, 25 bp, Probe Sequence
ggcctggactaaattgattttacgt

SEQ ID NO: 272315 - DNA, 25 bp, Probe Sequence
ggccgggttttcatcattaagagct

SEQ ID NO: 272316 - DNA, 25 bp, Probe Sequence
ggccgaagttgcctcttttaggaat

SEQ ID NO: 272317 - DNA, 25 bp, Probe Sequence
ggcaccacatttcttatattaaaag

SEQ ID NO: 272318 - DNA, 25 bp, Probe Sequence
ggcactctgcttgggttatcaatac

SEQ ID NO: 272319 - DNA, 25 bp, Probe Sequence
ggcactctgcaatggatatatggat

SEQ ID NO: 272320 - DNA, 25 bp, Probe Sequence
ggcagatctcaaggccatcaattat

SEQ ID NO: 272321 - DNA, 25 bp, Probe Sequence
ggcagttgctatccacatgcaagct

SEQ ID NO: 272322 - DNA, 25 bp, Probe Sequence
ggcagatattgtacaatgcatggct

SEQ ID NO: 272323 - DNA, 25 bp, Probe Sequence
ggcagatcatggtagcagcagcggg

SEQ ID NO: 272324 - DNA, 25 bp, Probe Sequence
ggcagcgatggctactacgtggcgc

SEQ ID NO: 272325 - DNA, 25 bp, Probe Sequence
ggcacgcatgtgtaccagtggactt

SEQ ID NO: 272326 - DNA, 25 bp, Probe Sequence
ggcagatgcagttttctgtgggctt

SEQ ID NO: 272327 - DNA, 25 bp, Probe Sequence
ggctgatcagttggtctatcggttt

SEQ ID NO: 272328 - DNA, 25 bp, Probe Sequence
ggcatacttgtgtgtctgggttgtt

SEQ ID NO: 272329 - DNA, 25 bp, Probe Sequence
ggcatttaggccaatatgggtgttc

SEQ ID NO: 272330 - DNA, 25 bp, Probe Sequence
ggcagtgtagccgacgatggggtat

SEQ ID NO: 272331 - DNA, 25 bp, Probe Sequence
ggcagtatagacgaggtggacaaac

SEQ ID NO: 272332 - DNA, 25 bp, Probe Sequence
ggcgcagataacggagggaaggatt

SEQ ID NO: 272333 - DNA, 25 bp, Probe Sequence
ggcagaccgactgcaggtagcagga

SEQ ID NO: 272334 - DNA, 25 bp, Probe Sequence
ggcagagggagtgagcaggggagaa

SEQ ID NO: 272335 - DNA, 25 bp, Probe Sequence
ggcatggtggccaaagccgatggaa

SEQ ID NO: 272336 - DNA, 25 bp, Probe Sequence
ggcataggcagggaaccgagcagca

SEQ ID NO: 272337 - DNA, 25 bp, Probe Sequence
ggcagaggggcacactctggagacc

SEQ ID NO: 272338 - DNA, 25 bp, Probe Sequence
ggcagatgtggatgcgatcctggca

SEQ ID NO: 272339 - DNA, 25 bp, Probe Sequence
ggcagagtctaagtgttctgagctg

SEQ ID NO: 272340 - DNA, 25 bp, Probe Sequence
ggcagtacctacagtcttgctgttt

SEQ ID NO: 272341 - DNA, 25 bp, Probe Sequence
tggcttactttgagtttggttttct

SEQ ID NO: 272342 - DNA, 25 bp, Probe Sequence
ggctcagacttcagcgttggggctg

SEQ ID NO: 272343 - DNA, 25 bp, Probe Sequence
ggcactgcctgaaggcgagtgtggg

SEQ ID NO: 272344 - DNA, 25 bp, Probe Sequence
ggcagtggctgtgggggtgtaagaa

SEQ ID NO: 272345 - DNA, 25 bp, Probe Sequence
ggcagctgcggtggggagctataaa

SEQ ID NO: 272346 - DNA, 25 bp, Probe Sequence
ggcagtgctggcttggccattaaat

SEQ ID NO: 272347 - DNA, 25 bp, Probe Sequence
ggcaggcatggcggcgcctgaaaga

SEQ ID NO: 272348 - DNA, 25 bp, Probe Sequence
ggcacctgagacccaatgagaatca

SEQ ID NO: 272349 - DNA, 25 bp, Probe Sequence
ggcacgtgaatggccaggatcagat

SEQ ID NO: 272350 - DNA, 25 bp, Probe Sequence
ggcagaggagcaggccaggcaagag

SEQ ID NO: 272351 - DNA, 25 bp, Probe Sequence
ggcagagaagcatcgaggccgagct

SEQ ID NO: 272352 - DNA, 25 bp, Probe Sequence
ggcagagaatgcttgtaccctggct

SEQ ID NO: 272353 - DNA, 25 bp, Probe Sequence
ggcagcaagagctggacaacctgct

SEQ ID NO: 272354 - DNA, 25 bp, Probe Sequence
ggcaggaggatgggcacaacaggct

SEQ ID NO: 272355 - DNA, 25 bp, Probe Sequence
ggcaggaaatgcatcaaaagactta

SEQ ID NO: 272356 - DNA, 25 bp, Probe Sequence
ggcagaaggcagacatcaatacaaa

SEQ ID NO: 272357 - DNA, 25 bp, Probe Sequence
ggcagaaggcagacatcaatacaaa

SEQ ID NO: 272358 - DNA, 25 bp, Probe Sequence
ggcagaagcctcctataacaaaggg

SEQ ID NO: 272359 - DNA, 25 bp, Probe Sequence
ggcagaatcccccaaagaaccaggg

SEQ ID NO: 272360 - DNA, 25 bp, Probe Sequence
ggcgaactacgccaagtgtgaaagt

SEQ ID NO: 272361 - DNA, 25 bp, Probe Sequence
ggcagtacattccaagggtgatcat

SEQ ID NO: 272362 - DNA, 25 bp, Probe Sequence
ggcagaatttgccacaggaaatgac

SEQ ID NO: 272363 - DNA, 25 bp, Probe Sequence
ggcagccagttttgcaggagattca

SEQ ID NO: 272364 - DNA, 25 bp, Probe Sequence
ggcagctccgtgttcagtggaatca

SEQ ID NO: 272365 - DNA, 25 bp, Probe Sequence
ggcagctgcggtccatcttggtcaa

SEQ ID NO: 272366 - DNA, 25 bp, Probe Sequence
ggcactgttgcctatcagaagtcaa

SEQ ID NO: 272367 - DNA, 25 bp, Probe Sequence
ggcactgattctccatgcaaaatga

SEQ ID NO: 272368 - DNA, 25 bp, Probe Sequence
ggcagctgttgcagcatccagttca

SEQ ID NO: 272369 - DNA, 25 bp, Probe Sequence
ggcactgctcgcagaaggaacacag

SEQ ID NO: 272370 - DNA, 25 bp, Probe Sequence
ggcagtgtcctacagctgactgaag

SEQ ID NO: 272371 - DNA, 25 bp, Probe Sequence
ggcagtcaccttcattggcaatagc

SEQ ID NO: 272372 - DNA, 25 bp, Probe Sequence
ggcagccacgttcaaaaagagcatg

SEQ ID NO: 272373 - DNA, 25 bp, Probe Sequence
ggcagcgccagcgcgacgagaaaga

SEQ ID NO: 272374 - DNA, 25 bp, Probe Sequence
ggcagcaccgcagggacagatatta

SEQ ID NO: 272375 - DNA, 25 bp, Probe Sequence
ggcataccgataggcttatattcaa

SEQ ID NO: 272376 - DNA, 25 bp, Probe Sequence
ggcatcacggaagccttaacagcag

SEQ ID NO: 272377 - DNA, 25 bp, Probe Sequence
ggcattcgaggagccctttgaactt

SEQ ID NO: 272378 - DNA, 25 bp, Probe Sequence
ggcaccgagagatcgtacgggactt

SEQ ID NO: 272379 - DNA, 25 bp, Probe Sequence
tggcccggaaaccggggatgccctg

SEQ ID NO: 272380 - DNA, 25 bp, Probe Sequence
ggctcccgcaaagaagggtggcgag

SEQ ID NO: 272381 - DNA, 25 bp, Probe Sequence
tgtcccccaagagaccgtggaagga

SEQ ID NO: 272382 - DNA, 25 bp, Probe Sequence
tgtggccccaaagtacccattaaag

SEQ ID NO: 272383 - DNA, 25 bp, Probe Sequence
tgtggccccaaagtacccattaaag

SEQ ID NO: 272384 - DNA, 25 bp, Probe Sequence
tgaagtccttaagagaacttagaat

SEQ ID NO: 272385 - DNA, 25 bp, Probe Sequence
tgtttccttaaggaaatccttgttg

SEQ ID NO: 272386 - DNA, 25 bp, Probe Sequence
tgtttagactgaaggaagacgtttt

SEQ ID NO: 272387 - DNA, 25 bp, Probe Sequence
tgtagtaatgcctggaaacttggtg

SEQ ID NO: 272388 - DNA, 25 bp, Probe Sequence
tgtcgtatgacctagtaaactttgt

SEQ ID NO: 272389 - DNA, 25 bp, Probe Sequence
ggcagaattgcccttaagacttttt

SEQ ID NO: 272390 - DNA, 25 bp, Probe Sequence
ggcagctatctgcactctaaactgc

SEQ ID NO: 272391 - DNA, 25 bp, Probe Sequence
ggcagcatttgccaatggaaagctc

SEQ ID NO: 272392 - DNA, 25 bp, Probe Sequence
ggcatctatgtgcaggaaatggcca

SEQ ID NO: 272393 - DNA, 25 bp, Probe Sequence
ggcatgctgataccatcccaatagc

SEQ ID NO: 272394 - DNA, 25 bp, Probe Sequence
ggcagttttcatccacagaagcgtt

SEQ ID NO: 272395 - DNA, 25 bp, Probe Sequence
ggcagttcttcaagcagctgcccag

SEQ ID NO: 272396 - DNA, 25 bp, Probe Sequence
ggcactgtcttcagagatctctggc

SEQ ID NO: 272397 - DNA, 25 bp, Probe Sequence
ggcactgcatctggcgatcagactc

SEQ ID NO: 272398 - DNA, 25 bp, Probe Sequence
ggcactgatcctgaaactgaagacc

SEQ ID NO: 272399 - DNA, 25 bp, Probe Sequence
ggctatggccatgcagtactaagga

SEQ ID NO: 272400 - DNA, 25 bp, Probe Sequence
ggcgcaagcctcactattacttgaa

SEQ ID NO: 272401 - DNA, 25 bp, Probe Sequence
ggcaccaggcaaacgaataaagata

SEQ ID NO: 272402 - DNA, 25 bp, Probe Sequence
ggcagcctggcacaagtgaagaaga

SEQ ID NO: 272403 - DNA, 25 bp, Probe Sequence
ggcagccttcagaggtactgataaa

SEQ ID NO: 272404 - DNA, 25 bp, Probe Sequence
ggcacctgtcaactggagtgctctc

SEQ ID NO: 272405 - DNA, 25 bp, Probe Sequence
ggcacctgcatttgttgagtttcca

SEQ ID NO: 272406 - DNA, 25 bp, Probe Sequence
ggcagccagcattcattgtaagttc

SEQ ID NO: 272407 - DNA, 25 bp, Probe Sequence
ggcagacacttcatgtaagagacac

SEQ ID NO: 272408 - DNA, 25 bp, Probe Sequence
ggcatgacaagtaaagaaagacaga

SEQ ID NO: 272409 - DNA, 25 bp, Probe Sequence
ggcagccaggccaaggacaaggagc

SEQ ID NO: 272410 - DNA, 25 bp, Probe Sequence
ggcagtctagcctgggcaacagagc

SEQ ID NO: 272411 - DNA, 25 bp, Probe Sequence
ggcagtctagcctgggcaacagagc

SEQ ID NO: 272412 - DNA, 25 bp, Probe Sequence
ggcagtccactcaagagaccacaga

SEQ ID NO: 272413 - DNA, 25 bp, Probe Sequence
ggcagcaaattcagacaagtcagta

SEQ ID NO: 272414 - DNA, 25 bp, Probe Sequence
ggcagaagtgtgagactgatgtcaa

SEQ ID NO: 272415 - DNA, 25 bp, Probe Sequence
ggcagcaaggtcgtagctgtgttaa

SEQ ID NO: 272416 - DNA, 25 bp, Probe Sequence
ggcagcaaggaacccaggtcgagat

SEQ ID NO: 272417 - DNA, 25 bp, Probe Sequence
ggcaccagctaacacggatctgaga

SEQ ID NO: 272418 - DNA, 25 bp, Probe Sequence
ggcaccagaaccaacaagattgaga

SEQ ID NO: 272419 - DNA, 25 bp, Probe Sequence
ggcttcagcatcagcaaaaattaca

SEQ ID NO: 272420 - DNA, 25 bp, Probe Sequence
tggtttgaaaacacaattcccaaat

SEQ ID NO: 272421 - DNA, 25 bp, Probe Sequence
tcgtcgtcaagatagacaaacccta

SEQ ID NO: 272422 - DNA, 25 bp, Probe Sequence
ggcatcgtagagtgaacacaaccca

SEQ ID NO: 272423 - DNA, 25 bp, Probe Sequence
ggcatctggagtctgaaggacccta

SEQ ID NO: 272424 - DNA, 25 bp, Probe Sequence
ggcagctgaagatgatgaggatgac

SEQ ID NO: 272425 - DNA, 25 bp, Probe Sequence
ggcagctgagatcagaagggaccag

SEQ ID NO: 272426 - DNA, 25 bp, Probe Sequence
ggcatagagaccaaagggaccagac

SEQ ID NO: 272427 - DNA, 25 bp, Probe Sequence
ggcaggcagcacacagagggaccta

SEQ ID NO: 272428 - DNA, 25 bp, Probe Sequence
ggcaccaccaggagtggagcctgcg

SEQ ID NO: 272429 - DNA, 25 bp, Probe Sequence
ggcaccatccaaatgctgttgaacc

SEQ ID NO: 272430 - DNA, 25 bp, Probe Sequence
ggcacctctaagatactgatggctc

SEQ ID NO: 272431 - DNA, 25 bp, Probe Sequence
ggcagctactagcattatctgtggc

SEQ ID NO: 272432 - DNA, 25 bp, Probe Sequence
ggcagtacatcaagtgtatcatatg

SEQ ID NO: 272433 - DNA, 25 bp, Probe Sequence
ggcagtcacatcttgctgataacca

SEQ ID NO: 272434 - DNA, 25 bp, Probe Sequence
ggcagtagtcatggcagactcccgg

SEQ ID NO: 272435 - DNA, 25 bp, Probe Sequence
ggcaggagaatggcatgaacccgga

SEQ ID NO: 272436 - DNA, 25 bp, Probe Sequence
ggcaggtggatcacaaggccaggag

SEQ ID NO: 272437 - DNA, 25 bp, Probe Sequence
ggcaggtggatttcttggcccacca

SEQ ID NO: 272438 - DNA, 25 bp, Probe Sequence
ggcaggtggatttcttggcccacca

SEQ ID NO: 272439 - DNA, 25 bp, Probe Sequence
ggcaggaggatcacttgagcccagg

SEQ ID NO: 272440 - DNA, 25 bp, Probe Sequence
ggcaggagagtcacttgaaccgggg

SEQ ID NO: 272441 - DNA, 25 bp, Probe Sequence
ggcaggagaatcgcctgaacccagg

SEQ ID NO: 272442 - DNA, 25 bp, Probe Sequence
ggcaggagaattgcttgaacccaag

SEQ ID NO: 272443 - DNA, 25 bp, Probe Sequence
ggcaggagaattgcttgaacccagg

SEQ ID NO: 272444 - DNA, 25 bp, Probe Sequence
ggcaggagaattgcttgaacccagg

SEQ ID NO: 272445 - DNA, 25 bp, Probe Sequence
ggcaggagaattgcttgaactcagg

SEQ ID NO: 272446 - DNA, 25 bp, Probe Sequence
ggcatggacaaagcttgacacatca

SEQ ID NO: 272447 - DNA, 25 bp, Probe Sequence
ggcatggactcggatttcacaagca

SEQ ID NO: 272448 - DNA, 25 bp, Probe Sequence
ggcaggattgagtccttgcaacaga

SEQ ID NO: 272449 - DNA, 25 bp, Probe Sequence
ggcagagtcagatttctccaacaat

SEQ ID NO: 272450 - DNA, 25 bp, Probe Sequence
ggcagctgctggatatgttcaacaa

SEQ ID NO: 272451 - DNA, 25 bp, Probe Sequence
ggcagccatgtatataccaaagcac

SEQ ID NO: 272452 - DNA, 25 bp, Probe Sequence
ggcagcagcgtgaaaaccagtatga

SEQ ID NO: 272453 - DNA, 25 bp, Probe Sequence
ggcatcgcaatgtaagactcgggat

SEQ ID NO: 272454 - DNA, 25 bp, Probe Sequence
ggctggaaacaatctcttggttccc

SEQ ID NO: 272455 - DNA, 25 bp, Probe Sequence
ggcgtaaacatgcacgggtgtcccc

SEQ ID NO: 272456 - DNA, 25 bp, Probe Sequence
ggctgataaacccggggtgacctca

SEQ ID NO: 272457 - DNA, 25 bp, Probe Sequence
ggctaataatccataggtcgaccta

SEQ ID NO: 272458 - DNA, 25 bp, Probe Sequence
ggcttaaatccagttttcaatcttc

SEQ ID NO: 272459 - DNA, 25 bp, Probe Sequence
ggcttaggaaccaaatcaactttct

SEQ ID NO: 272460 - DNA, 25 bp, Probe Sequence
ggctttgtgtagctactaacttctt

SEQ ID NO: 272461 - DNA, 25 bp, Probe Sequence
ggcttttaaaatacccatcttgctt

SEQ ID NO: 272462 - DNA, 25 bp, Probe Sequence
ggctttagacctttatcctattgtt

SEQ ID NO: 272463 - DNA, 25 bp, Probe Sequence
ggcattttactgatcttctgttctt

SEQ ID NO: 272464 - DNA, 25 bp, Probe Sequence
ggcttttactgttcctcaagcctta

SEQ ID NO: 272465 - DNA, 25 bp, Probe Sequence
ggcagttgatatttgacctaagctt

SEQ ID NO: 272466 - DNA, 25 bp, Probe Sequence
ggcagcttttctatgccatgactgc

SEQ ID NO: 272467 - DNA, 25 bp, Probe Sequence
ggcagctatttccacatggctgcct

SEQ ID NO: 272468 - DNA, 25 bp, Probe Sequence
ggcagctgttgatgccagtgtcctc

SEQ ID NO: 272469 - DNA, 25 bp, Probe Sequence
ggcagtgttgaaaggtgtccacagc

SEQ ID NO: 272470 - DNA, 25 bp, Probe Sequence
ggctgtggcttatggtgtccaacgc

SEQ ID NO: 272471 - DNA, 25 bp, Probe Sequence
tggctgggcttcacttgtaaggtta

SEQ ID NO: 272472 - DNA, 25 bp, Probe Sequence
ggctgggtttggccatacaaggttg

SEQ ID NO: 272473 - DNA, 25 bp, Probe Sequence
ggcattggtttacctgccaggtgtg

SEQ ID NO: 272474 - DNA, 25 bp, Probe Sequence
ggcattgaggttgaccacacgggcc

SEQ ID NO: 272475 - DNA, 25 bp, Probe Sequence
ggcatctggagacaacaaacaaacc

SEQ ID NO: 272476 - DNA, 25 bp, Probe Sequence
ggcatctggagacaacaaacaaacc

SEQ ID NO: 272477 - DNA, 25 bp, Probe Sequence
ggcaccagggctaagcaattaaacc

SEQ ID NO: 272478 - DNA, 25 bp, Probe Sequence
ggcggaggcgctcaattaaaagcct

SEQ ID NO: 272479 - DNA, 25 bp, Probe Sequence
ggcggagatcgaattagtaatacac

SEQ ID NO: 272480 - DNA, 25 bp, Probe Sequence
ggcgggtaaattaggaatctgcact

SEQ ID NO: 272481 - DNA, 25 bp, Probe Sequence
ggcagagtgagatattatggaagct

SEQ ID NO: 272482 - DNA, 25 bp, Probe Sequence
ggcagcttgaaactgagatgtgaac

SEQ ID NO: 272483 - DNA, 25 bp, Probe Sequence
ggcagacagagaattggagtgaaga

SEQ ID NO: 272484 - DNA, 25 bp, Probe Sequence
ggcaggcggatcatgaggtcaggag

SEQ ID NO: 272485 - DNA, 25 bp, Probe Sequence
ggcgagcgtgccatgacaaaggata

SEQ ID NO: 272486 - DNA, 25 bp, Probe Sequence
ggcgagcgtgccatgacaaaggata

SEQ ID NO: 272487 - DNA, 25 bp, Probe Sequence
ggcagaggttttgatgtaggatttt

SEQ ID NO: 272488 - DNA, 25 bp, Probe Sequence
ggctagggtagtggtatgaggttta

SEQ ID NO: 272489 - DNA, 25 bp, Probe Sequence
ggctttaggagcagtgggagggtac

SEQ ID NO: 272490 - DNA, 25 bp, Probe Sequence
ggcatttggtagagcttgggggtgt

SEQ ID NO: 272491 - DNA, 25 bp, Probe Sequence
ggctcttcctagagtagccatgccg

SEQ ID NO: 272492 - DNA, 25 bp, Probe Sequence
ggcatttcctaacggcaggcatggc

SEQ ID NO: 272493 - DNA, 25 bp, Probe Sequence
ggcatttcctaacggcaggcatggc

SEQ ID NO: 272494 - DNA, 25 bp, Probe Sequence
ggcaggatggcttggggctgcctgg

SEQ ID NO: 272495 - DNA, 25 bp, Probe Sequence
ggcaggatgcctggggacagttcag

SEQ ID NO: 272496 - DNA, 25 bp, Probe Sequence
ggcagttcactgtggacagtttgac

SEQ ID NO: 272497 - DNA, 25 bp, Probe Sequence
ggcagcttcctgataaagcgtgctg

SEQ ID NO: 272498 - DNA, 25 bp, Probe Sequence
ggcacctgccatggagagaggggcc

SEQ ID NO: 272499 - DNA, 25 bp, Probe Sequence
ggcagtgacaatgaggaggaggaca

SEQ ID NO: 272500 - DNA, 25 bp, Probe Sequence
ggcagccatctacaggaggaccagc

SEQ ID NO: 272501 - DNA, 25 bp, Probe Sequence
ggcagccatctatggtaccactgaa

SEQ ID NO: 272502 - DNA, 25 bp, Probe Sequence
ggcagcctcttagtgctattcattg

SEQ ID NO: 272503 - DNA, 25 bp, Probe Sequence
ggcagcctgtgaatcatttctcatg

SEQ ID NO: 272504 - DNA, 25 bp, Probe Sequence
ggcagccatgctggcctgtgcccag

SEQ ID NO: 272505 - DNA, 25 bp, Probe Sequence
ggcagaatgctagctctgagccagt

SEQ ID NO: 272506 - DNA, 25 bp, Probe Sequence
ggcagaatgctagctctgagccagt

SEQ ID NO: 272507 - DNA, 25 bp, Probe Sequence
ggcagcagagcaacactctgtctca

SEQ ID NO: 272508 - DNA, 25 bp, Probe Sequence
ggcagtagcatcgatgtgctgtgga

SEQ ID NO: 272509 - DNA, 25 bp, Probe Sequence
ggcatgtgatatgatgctcggctga

SEQ ID NO: 272510 - DNA, 25 bp, Probe Sequence
ggcatggacatcgagcgggtgaaca

SEQ ID NO: 272511 - DNA, 25 bp, Probe Sequence
ggcaggtatcactagaggtcaagag

SEQ ID NO: 272512 - DNA, 25 bp, Probe Sequence
ggcaggttatgcgagatggaaatgg

SEQ ID NO: 272513 - DNA, 25 bp, Probe Sequence
ggcaggctttgccctggatgagggc

SEQ ID NO: 272514 - DNA, 25 bp, Probe Sequence
ggcagtatttcagctggctggagga

SEQ ID NO: 272515 - DNA, 25 bp, Probe Sequence
ggcagattttaagtgctgtggggct

SEQ ID NO: 272516 - DNA, 25 bp, Probe Sequence
ggcagatcacttgaggccaggagtt

SEQ ID NO: 272517 - DNA, 25 bp, Probe Sequence
ggcagcttctgtggaacgagggttt

SEQ ID NO: 272518 - DNA, 25 bp, Probe Sequence
ggcagaggagtgcagaggagggtct

SEQ ID NO: 272519 - DNA, 25 bp, Probe Sequence
ggcagtgggcttaatgagagggatc

SEQ ID NO: 272520 - DNA, 25 bp, Probe Sequence
ggcagttggctgggataacatggca

SEQ ID NO: 272521 - DNA, 25 bp, Probe Sequence
ggcagcctggtggagaacaacgaac

SEQ ID NO: 272522 - DNA, 25 bp, Probe Sequence
ggcagctttgagggtcacatactga

SEQ ID NO: 272523 - DNA, 25 bp, Probe Sequence
ggcatcttctggcttgactggatgg

SEQ ID NO: 272524 - DNA, 25 bp, Probe Sequence
ggcagcgggtggctgagctggaggc

SEQ ID NO: 272525 - DNA, 25 bp, Probe Sequence
ggcttgcggtgggtgacccagagcc

SEQ ID NO: 272526 - DNA, 25 bp, Probe Sequence
ggctctgaaaagggcttccagtccc

SEQ ID NO: 272527 - DNA, 25 bp, Probe Sequence
ggctctacgacacacttaatactgt

SEQ ID NO: 272528 - DNA, 25 bp, Probe Sequence
ggcttcaaagaagctattgattctg

SEQ ID NO: 272529 - DNA, 25 bp, Probe Sequence
ggctttaggctagctgttaaatatg

SEQ ID NO: 272530 - DNA, 25 bp, Probe Sequence
ggctttgaccgtgtccgaaatgctg

SEQ ID NO: 272531 - DNA, 25 bp, Probe Sequence
ggctctttccgaggtcggacagcag

SEQ ID NO: 272532 - DNA, 25 bp, Probe Sequence
ggctttccggcagaacgcatccact

SEQ ID NO: 272533 - DNA, 25 bp, Probe Sequence
ggcttattcaggggactccttagtc

SEQ ID NO: 272534 - DNA, 25 bp, Probe Sequence
ggctataaaggtaggtctgttaact

SEQ ID NO: 272535 - DNA, 25 bp, Probe Sequence
ggcttcaagaggagggcactagggc

SEQ ID NO: 272536 - DNA, 25 bp, Probe Sequence
ggcttccaggacagagcatgctcat

SEQ ID NO: 272537 - DNA, 25 bp, Probe Sequence
ggcttctcggaaaatgctgggcccc

SEQ ID NO: 272538 - DNA, 25 bp, Probe Sequence
ggcttttctgaaacggcgaggacca

SEQ ID NO: 272539 - DNA, 25 bp, Probe Sequence
ggcatttttgaaagtgttgagtggc

SEQ ID NO: 272540 - DNA, 25 bp, Probe Sequence
ggcagtgctgttgttgttgtggggc

SEQ ID NO: 272541 - DNA, 25 bp, Probe Sequence
ggcagtgctgttgttgttgtggggc

SEQ ID NO: 272542 - DNA, 25 bp, Probe Sequence
ggcagtgtgtcccagtttgaggagt

SEQ ID NO: 272543 - DNA, 25 bp, Probe Sequence
ggcagtcagatctgaggatctgagg

SEQ ID NO: 272544 - DNA, 25 bp, Probe Sequence
ggcagccagatcatgaggtcaggag

SEQ ID NO: 272545 - DNA, 25 bp, Probe Sequence
ggcagcatcaacagcacagacagcg

SEQ ID NO: 272546 - DNA, 25 bp, Probe Sequence
ggcagatcaagcgccagaatggaga

SEQ ID NO: 272547 - DNA, 25 bp, Probe Sequence
ggcagtgtatgctcatacttggaca

SEQ ID NO: 272548 - DNA, 25 bp, Probe Sequence
ggcagatgttgcagtgagcggagat

SEQ ID NO: 272549 - DNA, 25 bp, Probe Sequence
ggcagatacatcaatgggcgtggat

SEQ ID NO: 272550 - DNA, 25 bp, Probe Sequence
ggcagtacatcaatgggcgtggata

SEQ ID NO: 272551 - DNA, 25 bp, Probe Sequence
ggcagacccatcttggcaatggata

SEQ ID NO: 272552 - DNA, 25 bp, Probe Sequence
ggcagatccaagctaatatgagaag

SEQ ID NO: 272553 - DNA, 25 bp, Probe Sequence
ggcagtctacgacaaggatgaagtc

SEQ ID NO: 272554 - DNA, 25 bp, Probe Sequence
ggcagttactgactttccatcaaat

SEQ ID NO: 272555 - DNA, 25 bp, Probe Sequence
ggcagttttatctgcttcaaaatgc

SEQ ID NO: 272556 - DNA, 25 bp, Probe Sequence
ggcaggcttttctgttgaagagtgg

SEQ ID NO: 272557 - DNA, 25 bp, Probe Sequence
ggcagtgtccgtggttgctaaagat

SEQ ID NO: 272558 - DNA, 25 bp, Probe Sequence
ggcagttgcctatgtttagcaaatt

SEQ ID NO: 272559 - DNA, 25 bp, Probe Sequence
ggcagttgtgctagtttctaggaat

SEQ ID NO: 272560 - DNA, 25 bp, Probe Sequence
ggcagttgctacatttgcagggatt

SEQ ID NO: 272561 - DNA, 25 bp, Probe Sequence
ggcagggaatgcaattctcagagaa

SEQ ID NO: 272562 - DNA, 25 bp, Probe Sequence
ggcagtgggacaatcgccagagggt

SEQ ID NO: 272563 - DNA, 25 bp, Probe Sequence
ggcagggtgccaaccatgcagaggc

SEQ ID NO: 272564 - DNA, 25 bp, Probe Sequence
ggcagcttgctgaattcacgatggg

SEQ ID NO: 272565 - DNA, 25 bp, Probe Sequence
ggcagattctgtttgcaagatccac

SEQ ID NO: 272566 - DNA, 25 bp, Probe Sequence
ggcagatcatgcggggagatgacct

SEQ ID NO: 272567 - DNA, 25 bp, Probe Sequence
ggcagatcagccaggatgtcaagct

SEQ ID NO: 272568 - DNA, 25 bp, Probe Sequence
ggcagtatcctccagagagcaagtg

SEQ ID NO: 272569 - DNA, 25 bp, Probe Sequence
ggcagaatcccacagaagcagagtt

SEQ ID NO: 272570 - DNA, 25 bp, Probe Sequence
ggcagatactaaattaagcataggt

SEQ ID NO: 272571 - DNA, 25 bp, Probe Sequence
ggcagacacaacctgtacagattga

SEQ ID NO: 272572 - DNA, 25 bp, Probe Sequence
ggcatgagaataccttaatactgag

SEQ ID NO: 272573 - DNA, 25 bp, Probe Sequence
ggcagagaagagacccctttagaag

SEQ ID NO: 272574 - DNA, 25 bp, Probe Sequence
ggcagaaatggactccttttgggtc

SEQ ID NO: 272575 - DNA, 25 bp, Probe Sequence
ggcatggacttatcgtagttgggga

SEQ ID NO: 272576 - DNA, 25 bp, Probe Sequence
ggcatgaggtaatggttttggtggc

SEQ ID NO: 272577 - DNA, 25 bp, Probe Sequence
ggcagcagggaatttgtcttgttgg

SEQ ID NO: 272578 - DNA, 25 bp, Probe Sequence
ggcagagggcagtatggctttgctg

SEQ ID NO: 272579 - DNA, 25 bp, Probe Sequence
ggcatgacggagatgaattactaca

SEQ ID NO: 272580 - DNA, 25 bp, Probe Sequence
ggcagagctgtggctcgaattccca

SEQ ID NO: 272581 - DNA, 25 bp, Probe Sequence
ggcagagttgtctgaatccttcctg

SEQ ID NO: 272582 - DNA, 25 bp, Probe Sequence
ggcaggtttcttggcagccattttt

SEQ ID NO: 272583 - DNA, 25 bp, Probe Sequence
ggcaggaaccaagccctttatttat

SEQ ID NO: 272584 - DNA, 25 bp, Probe Sequence
ggcagagaagcctgaactctttact

SEQ ID NO: 272585 - DNA, 25 bp, Probe Sequence
ggcagcatgacgacggagacctttg

SEQ ID NO: 272586 - DNA, 25 bp, Probe Sequence
ggcagcatactgaccagtggctttt

SEQ ID NO: 272587 - DNA, 25 bp, Probe Sequence
ggcaggagcatgatgagctgagctt

SEQ ID NO: 272588 - DNA, 25 bp, Probe Sequence
ggcatggcagcgagcacagacatgg

SEQ ID NO: 272589 - DNA, 25 bp, Probe Sequence
ggcatggagctaacatcacaaggtg

SEQ ID NO: 272590 - DNA, 25 bp, Probe Sequence
ggcaggagatcaaaacgtggagtac

SEQ ID NO: 272591 - DNA, 25 bp, Probe Sequence
ggcaggaatctatccattgaactaa

SEQ ID NO: 272592 - DNA, 25 bp, Probe Sequence
ggcaggaaaatcgcttgaacccagg

SEQ ID NO: 272593 - DNA, 25 bp, Probe Sequence
ggcaggaaaatcactcgaatccggg

SEQ ID NO: 272594 - DNA, 25 bp, Probe Sequence
ggcaggggaatcatcttgaatccgg

SEQ ID NO: 272595 - DNA, 25 bp, Probe Sequence
ggcagaggggatgtctggcttgcct

SEQ ID NO: 272596 - DNA, 25 bp, Probe Sequence
ggcatgggaagagcactggtgtggg

SEQ ID NO: 272597 - DNA, 25 bp, Probe Sequence
ggcatgggaagagcactggtgtggg

SEQ ID NO: 272598 - DNA, 25 bp, Probe Sequence
tggcaggaagagtccggttctggga

SEQ ID NO: 272599 - DNA, 25 bp, Probe Sequence
ggcataaagcaggccggtccgagga

SEQ ID NO: 272600 - DNA, 25 bp, Probe Sequence
ggcatcccaagtccagcgtgaaggg

SEQ ID NO: 272601 - DNA, 25 bp, Probe Sequence
ggcatcccaagtccagcgtgaaggg

SEQ ID NO: 272602 - DNA, 25 bp, Probe Sequence
ggcttcgggtccagcagaagggcac

SEQ ID NO: 272603 - DNA, 25 bp, Probe Sequence
ggcttccgtttgtacgaagcgcctc

SEQ ID NO: 272604 - DNA, 25 bp, Probe Sequence
ggctgtccagtttattaaaatgcct

SEQ ID NO: 272605 - DNA, 25 bp, Probe Sequence
ggctaccacaaaattaacaactctg

SEQ ID NO: 272606 - DNA, 25 bp, Probe Sequence
tggtactaaaactatgaaacttcat

SEQ ID NO: 272607 - DNA, 25 bp, Probe Sequence
ggctagttcaaagatagactcttct

SEQ ID NO: 272608 - DNA, 25 bp, Probe Sequence
ggcattgttacttttaacagcttac

SEQ ID NO: 272609 - DNA, 25 bp, Probe Sequence
ggcattttacactatgaagacattc

SEQ ID NO: 272610 - DNA, 25 bp, Probe Sequence
ggctaggttcagtagatgagacatt

SEQ ID NO: 272611 - DNA, 25 bp, Probe Sequence
ggcatagccttaacatttgaagtaa

SEQ ID NO: 272612 - DNA, 25 bp, Probe Sequence
ggcagtgcgtaaaccttgaaaatga

SEQ ID NO: 272613 - DNA, 25 bp, Probe Sequence
ggcaggtggccaataattgcaaaat

SEQ ID NO: 272614 - DNA, 25 bp, Probe Sequence
ggcaggggtctttgagtcacataga

SEQ ID NO: 272615 - DNA, 25 bp, Probe Sequence
ggcagtctgagggtatggtaaatga

SEQ ID NO: 272616 - DNA, 25 bp, Probe Sequence
ggcaggtggggcttggatcagtaag

SEQ ID NO: 272617 - DNA, 25 bp, Probe Sequence
ggcagtggggaccttattgatgaaa

SEQ ID NO: 272618 - DNA, 25 bp, Probe Sequence
ggcagtggaggaagtctctttaaga

SEQ ID NO: 272619 - DNA, 25 bp, Probe Sequence
ggcagtgacatgtttgtcattttaa

SEQ ID NO: 272620 - DNA, 25 bp, Probe Sequence
ggcagaatagtaggtcatctcctct

SEQ ID NO: 272621 - DNA, 25 bp, Probe Sequence
ggcagattggtaggcgtgcctgcct

SEQ ID NO: 272622 - DNA, 25 bp, Probe Sequence
ggcagttggccagagagcctggtgc

SEQ ID NO: 272623 - DNA, 25 bp, Probe Sequence
ggcagtctgttagagagcagtactt

SEQ ID NO: 272624 - DNA, 25 bp, Probe Sequence
ggcagttcattgaggcagctctact

SEQ ID NO: 272625 - DNA, 25 bp, Probe Sequence
ggcagatgctgcctgaggagcagtt

SEQ ID NO: 272626 - DNA, 25 bp, Probe Sequence
ggcagagctgacaaggaaggtttcg

SEQ ID NO: 272627 - DNA, 25 bp, Probe Sequence
ggcagtgaccaaggaggaatttcag

SEQ ID NO: 272628 - DNA, 25 bp, Probe Sequence
ggcattagccaatggagtttccaga

SEQ ID NO: 272629 - DNA, 25 bp, Probe Sequence
ggctagtgtaatttttgttccaaca

SEQ ID NO: 272630 - DNA, 25 bp, Probe Sequence
ggcttattagctgtaatggcccaga

SEQ ID NO: 272631 - DNA, 25 bp, Probe Sequence
ggcttttggctcgcagagaggggat

SEQ ID NO: 272632 - DNA, 25 bp, Probe Sequence
ggctttaggggctacagagtcgagg

SEQ ID NO: 272633 - DNA, 25 bp, Probe Sequence
ggcttctgcatgcctggtaaagtcc

SEQ ID NO: 272634 - DNA, 25 bp, Probe Sequence
ggctatttggatgacaaagctacta

SEQ ID NO: 272635 - DNA, 25 bp, Probe Sequence
ggcttttagcaatccacttgcatta

SEQ ID NO: 272636 - DNA, 25 bp, Probe Sequence
ggctacttaacatcgacttcgttca

SEQ ID NO: 272637 - DNA, 25 bp, Probe Sequence
ggcatttccaaatcagagttagttg

SEQ ID NO: 272638 - DNA, 25 bp, Probe Sequence
ggcagtgttacctcatgatgtcata

SEQ ID NO: 272639 - DNA, 25 bp, Probe Sequence
ggcatgtgtatgttcccagttcaac

SEQ ID NO: 272640 - DNA, 25 bp, Probe Sequence
ggcatctgtatgagcccagagtcct

SEQ ID NO: 272641 - DNA, 25 bp, Probe Sequence
ggcatcatgttgaagcaccgaaaga

SEQ ID NO: 272642 - DNA, 25 bp, Probe Sequence
ggcatgcatctgtgagctttagatc

SEQ ID NO: 272643 - DNA, 25 bp, Probe Sequence
ggcatgcacatctggaattaaggtc

SEQ ID NO: 272644 - DNA, 25 bp, Probe Sequence
ggcatgagcaccgcaatttacagaa

SEQ ID NO: 272645 - DNA, 25 bp, Probe Sequence
ggcatgtgcagacccattttgatca

SEQ ID NO: 272646 - DNA, 25 bp, Probe Sequence
ggcatgtgcagacccattttgatca

SEQ ID NO: 272647 - DNA, 25 bp, Probe Sequence
ggcagtcagagcatcatgctttgag

SEQ ID NO: 272648 - DNA, 25 bp, Probe Sequence
ggcaggcaggcaaagctaggcagaa

SEQ ID NO: 272649 - DNA, 25 bp, Probe Sequence
ggcaggaggacatcttggcagtgct

SEQ ID NO: 272650 - DNA, 25 bp, Probe Sequence
ggcaggcactactcatcgagaggta

SEQ ID NO: 272651 - DNA, 25 bp, Probe Sequence
ggcagtgacagaatccaaagaggga

SEQ ID NO: 272652 - DNA, 25 bp, Probe Sequence
ggcagtgcaaatatccaagaagagg

SEQ ID NO: 272653 - DNA, 25 bp, Probe Sequence
ggcaggcaaagagccagccaatgtg

SEQ ID NO: 272654 - DNA, 25 bp, Probe Sequence
ggcagagaccgagccagaaaggcac

SEQ ID NO: 272655 - DNA, 25 bp, Probe Sequence
ggcagaacctggtccatgaggtgtg

SEQ ID NO: 272656 - DNA, 25 bp, Probe Sequence
ggcagaagccttcctcaagaaagct

SEQ ID NO: 272657 - DNA, 25 bp, Probe Sequence
ggctgaagctttgcccaaacaatcc

SEQ ID NO: 272658 - DNA, 25 bp, Probe Sequence
ggcgaacttgccgtaacctaaattg

SEQ ID NO: 272659 - DNA, 25 bp, Probe Sequence
ggctgacccgctctaatatgtaaat

SEQ ID NO: 272660 - DNA, 25 bp, Probe Sequence
tggcagtttcttctagaattaaata

SEQ ID NO: 272661 - DNA, 25 bp, Probe Sequence
ggcgttcgcttagcagcaactacaa

SEQ ID NO: 272662 - DNA, 25 bp, Probe Sequence
ggcatttccttaccacatatatact

SEQ ID NO: 272663 - DNA, 25 bp, Probe Sequence
ggcatgattattaaccacactcttt

SEQ ID NO: 272664 - DNA, 25 bp, Probe Sequence
ggcatggctgggaactgcagacctg

SEQ ID NO: 272665 - DNA, 25 bp, Probe Sequence
ggcatggctttaactggcatggctg

SEQ ID NO: 272666 - DNA, 25 bp, Probe Sequence
ggcattttcttggctggcaagcttt

SEQ ID NO: 272667 - DNA, 25 bp, Probe Sequence
ggctttattggcagaaggtgtcatt

SEQ ID NO: 272668 - DNA, 25 bp, Probe Sequence
ggctgtttcccaatgtcaagttatt

SEQ ID NO: 272669 - DNA, 25 bp, Probe Sequence
ggcatgtttcaattactcaagtagg

SEQ ID NO: 272670 - DNA, 25 bp, Probe Sequence
ggcatttccaaatgtctgactcgtg

SEQ ID NO: 272671 - DNA, 25 bp, Probe Sequence
ggcttatccaaccagtctagttatg

SEQ ID NO: 272672 - DNA, 25 bp, Probe Sequence
ggctttggcaactgactagttcccc

SEQ ID NO: 272673 - DNA, 25 bp, Probe Sequence
ggctttgagacatgctactgaattt

SEQ ID NO: 272674 - DNA, 25 bp, Probe Sequence
ggcagggaacaggctactgtccttc

SEQ ID NO: 272675 - DNA, 25 bp, Probe Sequence
ggcagggaacaggctactgtccttc

SEQ ID NO: 272676 - DNA, 25 bp, Probe Sequence
ggcagggaaaagccatctattcttc

SEQ ID NO: 272677 - DNA, 25 bp, Probe Sequence
ggcagggaaaagccatctattcttc

SEQ ID NO: 272678 - DNA, 25 bp, Probe Sequence
ggcaggcgcaaactcgattttctac

SEQ ID NO: 272679 - DNA, 25 bp, Probe Sequence
ggcaggctaagatggtttcccacca

SEQ ID NO: 272680 - DNA, 25 bp, Probe Sequence
ggcgtcagaatttaggttcctgccc

SEQ ID NO: 272681 - DNA, 25 bp, Probe Sequence
ggcgctgcaggaagaatgccttcca

SEQ ID NO: 272682 - DNA, 25 bp, Probe Sequence
ggcatgtagggggagccattctgtc

SEQ ID NO: 272683 - DNA, 25 bp, Probe Sequence
ggcaggaggttgggaattcttgctg

SEQ ID NO: 272684 - DNA, 25 bp, Probe Sequence
ggcatggaggtgggtgcttgtagtt

SEQ ID NO: 272685 - DNA, 25 bp, Probe Sequence
ggcagagcaaggtgatcttgcctgt

SEQ ID NO: 272686 - DNA, 25 bp, Probe Sequence
ggcagagatggaacgatctacctat

SEQ ID NO: 272687 - DNA, 25 bp, Probe Sequence
ggcagaaggagagatcatttgtcat

SEQ ID NO: 272688 - DNA, 25 bp, Probe Sequence
ggctagcaaagggatttgtttatct

SEQ ID NO: 272689 - DNA, 25 bp, Probe Sequence
ggctacatttggcttctgtactggc

SEQ ID NO: 272690 - DNA, 25 bp, Probe Sequence
ggctactgggggaacaagatcggca

SEQ ID NO: 272691 - DNA, 25 bp, Probe Sequence
ggcattctgggagcattaggtcttc

SEQ ID NO: 272692 - DNA, 25 bp, Probe Sequence
ggcatcttgggaagtaaatgttctt

SEQ ID NO: 272693 - DNA, 25 bp, Probe Sequence
ggcatcctgtggtgtccatgaggta

SEQ ID NO: 272694 - DNA, 25 bp, Probe Sequence
ggcatcctgagacagttgcacagtg

SEQ ID NO: 272695 - DNA, 25 bp, Probe Sequence
ggcatccaggagcagtggagagagt

SEQ ID NO: 272696 - DNA, 25 bp, Probe Sequence
ggcatggagagagagcggaaagtga

SEQ ID NO: 272697 - DNA, 25 bp, Probe Sequence
ggcatgaaggatgaccgtcgggaca

SEQ ID NO: 272698 - DNA, 25 bp, Probe Sequence
ggcttaccttgttcaaagaggagct

SEQ ID NO: 272699 - DNA, 25 bp, Probe Sequence
ggctttcctcaattcaaagggtgtt

SEQ ID NO: 272700 - DNA, 25 bp, Probe Sequence
ggcttgtgttaatgaaagttcagtt

SEQ ID NO: 272701 - DNA, 25 bp, Probe Sequence
ggcttgctcggataaaactttgtat

SEQ ID NO: 272702 - DNA, 25 bp, Probe Sequence
ggctttagaaaatcaatctttttgt

SEQ ID NO: 272703 - DNA, 25 bp, Probe Sequence
tggttttgtttctcgatcttttgtt

SEQ ID NO: 272704 - DNA, 25 bp, Probe Sequence
tggttttgttttgttgccaacgagg

SEQ ID NO: 272705 - DNA, 25 bp, Probe Sequence
ggctattttgttagtcccacaaagg

SEQ ID NO: 272706 - DNA, 25 bp, Probe Sequence
ggctccccagtaaatgcccgaaatg

SEQ ID NO: 272707 - DNA, 25 bp, Probe Sequence
ggcttcccagataagcagcccagga

SEQ ID NO: 272708 - DNA, 25 bp, Probe Sequence
ggcatcgaccgagacagctatagaa

SEQ ID NO: 272709 - DNA, 25 bp, Probe Sequence
ggcattgtccaagaagtctaataac

SEQ ID NO: 272710 - DNA, 25 bp, Probe Sequence
ggcttcccaatgtagagttaaacag

SEQ ID NO: 272711 - DNA, 25 bp, Probe Sequence
tggcttttaattaccattaccacga

SEQ ID NO: 272712 - DNA, 25 bp, Probe Sequence
ggcatcttataactgctcactttcc

SEQ ID NO: 272713 - DNA, 25 bp, Probe Sequence
ggcattctacaagggcactgtcccc

SEQ ID NO: 272714 - DNA, 25 bp, Probe Sequence
ggcatgtccagcctggagcagctgg

SEQ ID NO: 272715 - DNA, 25 bp, Probe Sequence
ggcagatcttgccttgtcagagatg

SEQ ID NO: 272716 - DNA, 25 bp, Probe Sequence
ggcatgcagctcgtcatcttaagag

SEQ ID NO: 272717 - DNA, 25 bp, Probe Sequence
ggcatcagtagcatctgtaacagca

SEQ ID NO: 272718 - DNA, 25 bp, Probe Sequence
ggcatcagtagcatctgtaacagca

SEQ ID NO: 272719 - DNA, 25 bp, Probe Sequence
ggctgcagggcagtgaaacccacgc

SEQ ID NO: 272720 - DNA, 25 bp, Probe Sequence
ggctaggtatggtgtctcacacctg

SEQ ID NO: 272721 - DNA, 25 bp, Probe Sequence
ggctattgttaatgcagtaccctgc

SEQ ID NO: 272722 - DNA, 25 bp, Probe Sequence
ggctatcgttgagaagcttcgcttc

SEQ ID NO: 272723 - DNA, 25 bp, Probe Sequence
ggcttcgtgattaaaatgctcctaa

SEQ ID NO: 272724 - DNA, 25 bp, Probe Sequence
ggctttgtcatttaccctttgagag

SEQ ID NO: 272725 - DNA, 25 bp, Probe Sequence
ggcatttcttaggacacctttggat

SEQ ID NO: 272726 - DNA, 25 bp, Probe Sequence
ggcatttctaaagcttttgggcact

SEQ ID NO: 272727 - DNA, 25 bp, Probe Sequence
ggcttgtttaaggttcttgctgccc

SEQ ID NO: 272728 - DNA, 25 bp, Probe Sequence
ggcttggtttaccccataatctaat

SEQ ID NO: 272729 - DNA, 25 bp, Probe Sequence
ggcattcgtattgcgccgctagagg

SEQ ID NO: 272730 - DNA, 25 bp, Probe Sequence
ggcttggttctcagatggtcaggga

SEQ ID NO: 272731 - DNA, 25 bp, Probe Sequence
ggcttgagggcctgtttgaggatat

SEQ ID NO: 272732 - DNA, 25 bp, Probe Sequence
ggcatctggggatacatttatggat

SEQ ID NO: 272733 - DNA, 25 bp, Probe Sequence
ggcatggggagattggatttgtgga

SEQ ID NO: 272734 - DNA, 25 bp, Probe Sequence
ggcagggagagcatgggcaatggag

SEQ ID NO: 272735 - DNA, 25 bp, Probe Sequence
ggcagttacatcaatgggcgtggga

SEQ ID NO: 272736 - DNA, 25 bp, Probe Sequence
ggcatctaatctactggattgtggt

SEQ ID NO: 272737 - DNA, 25 bp, Probe Sequence
ggcattagccatcctgagtttctgc

SEQ ID NO: 272738 - DNA, 25 bp, Probe Sequence
ggcttcccataccttattgcaggaa

SEQ ID NO: 272739 - DNA, 25 bp, Probe Sequence
ggcattccttgagctgtacgggaag

SEQ ID NO: 272740 - DNA, 25 bp, Probe Sequence
ggcttgctctttgcagtgaatggga

SEQ ID NO: 272741 - DNA, 25 bp, Probe Sequence
ggctatgcttttgaccaggtagatg

SEQ ID NO: 272742 - DNA, 25 bp, Probe Sequence
ggcattgttatcatagaaggtgaca

SEQ ID NO: 272743 - DNA, 25 bp, Probe Sequence
ggcattgtggatataaaactgttgg

SEQ ID NO: 272744 - DNA, 25 bp, Probe Sequence
ggcagttttttgtaagactctgtgg

SEQ ID NO: 272745 - DNA, 25 bp, Probe Sequence
ggcattgcttttatagattcttgat

SEQ ID NO: 272746 - DNA, 25 bp, Probe Sequence
ggcatactttataggactcattctg

SEQ ID NO: 272747 - DNA, 25 bp, Probe Sequence
tggctaccgttcggactatttgtag

SEQ ID NO: 272748 - DNA, 25 bp, Probe Sequence
ggctccctattcatggtattttaag

SEQ ID NO: 272749 - DNA, 25 bp, Probe Sequence
ggctgcccctgtaaggtttcaatgc

SEQ ID NO: 272750 - DNA, 25 bp, Probe Sequence
ggctcctccttagagttcacagaac

SEQ ID NO: 272751 - DNA, 25 bp, Probe Sequence
ggctttcagttcttggatctaaaac

SEQ ID NO: 272752 - DNA, 25 bp, Probe Sequence
ggcttctagtctggtgttctgagta

SEQ ID NO: 272753 - DNA, 25 bp, Probe Sequence
ggcttctctgtttgggtagcgtaag

SEQ ID NO: 272754 - DNA, 25 bp, Probe Sequence
ggctacctgccatgtggttagcgac

SEQ ID NO: 272755 - DNA, 25 bp, Probe Sequence
ggcataaggccatttatgttcagca

SEQ ID NO: 272756 - DNA, 25 bp, Probe Sequence
ggctcaaggaagcttgttccaaggg

SEQ ID NO: 272757 - DNA, 25 bp, Probe Sequence
ggctaaggaagagtgtttcactcac

SEQ ID NO: 272758 - DNA, 25 bp, Probe Sequence
ggcttcgtgaaggagttctcccaca

SEQ ID NO: 272759 - DNA, 25 bp, Probe Sequence
ggcttcagtgtacagcaaccaaaat

SEQ ID NO: 272760 - DNA, 25 bp, Probe Sequence
ggcatttttaaatcccagacagtgg

SEQ ID NO: 272761 - DNA, 25 bp, Probe Sequence
ggctttattgaatccatgcccaagg

SEQ ID NO: 272762 - DNA, 25 bp, Probe Sequence
ggcttctaccaacctgatgagcccc

SEQ ID NO: 272763 - DNA, 25 bp, Probe Sequence
ggcttcaagaaaccgtcatgcccgc

SEQ ID NO: 272764 - DNA, 25 bp, Probe Sequence
ggcttccaaaagagctctggtcatc

SEQ ID NO: 272765 - DNA, 25 bp, Probe Sequence
ggctatcctaaactggtttatctcc

SEQ ID NO: 272766 - DNA, 25 bp, Probe Sequence
ggcttccaaatctgatgctacttct

SEQ ID NO: 272767 - DNA, 25 bp, Probe Sequence
ggcttacatccttcgattactattc

SEQ ID NO: 272768 - DNA, 25 bp, Probe Sequence
ggcatctacaccaatgtttacaaat

SEQ ID NO: 272769 - DNA, 25 bp, Probe Sequence
ggcattcctctgagtttacaagcag

SEQ ID NO: 272770 - DNA, 25 bp, Probe Sequence
ggcttcttgcttatttaaactgtgc

SEQ ID NO: 272771 - DNA, 25 bp, Probe Sequence
ggcattcttgttatttaacacggga

SEQ ID NO: 272772 - DNA, 25 bp, Probe Sequence
ggcttatctttgtgtcaaaacggag

SEQ ID NO: 272773 - DNA, 25 bp, Probe Sequence
ggcttatctttgtgtcaaaacggag

SEQ ID NO: 272774 - DNA, 25 bp, Probe Sequence
ggcattgttatttaatcataaacgg

SEQ ID NO: 272775 - DNA, 25 bp, Probe Sequence
ggcattaaactggaatctcaaaggg

SEQ ID NO: 272776 - DNA, 25 bp, Probe Sequence
tggattaatacccctcgaagacaag

SEQ ID NO: 272777 - DNA, 25 bp, Probe Sequence
ggctattaacacccagtacagacat

SEQ ID NO: 272778 - DNA, 25 bp, Probe Sequence
ggcatttagatcattcctgtaggct

SEQ ID NO: 272779 - DNA, 25 bp, Probe Sequence
ggcatctgtaaattctgttgtaggt

SEQ ID NO: 272780 - DNA, 25 bp, Probe Sequence
ggcatcctgtactgtgtctggaagc

SEQ ID NO: 272781 - DNA, 25 bp, Probe Sequence
ggcatttgctactgtgtctggttaa

SEQ ID NO: 272782 - DNA, 25 bp, Probe Sequence
ggcatggtagcagggctgtctggtt

SEQ ID NO: 272783 - DNA, 25 bp, Probe Sequence
ggcatggctggggagcagtttattc

SEQ ID NO: 272784 - DNA, 25 bp, Probe Sequence
ggcaggagtgagggaatgttaatct

SEQ ID NO: 272785 - DNA, 25 bp, Probe Sequence
ggcaggagctgatgggtgcattaac

SEQ ID NO: 272786 - DNA, 25 bp, Probe Sequence
ggcaggatctgatggtctctgtgat

SEQ ID NO: 272787 - DNA, 25 bp, Probe Sequence
ggcagtgccttacacatgcttgatt

SEQ ID NO: 272788 - DNA, 25 bp, Probe Sequence
ggcagtgccttacacatgcttgatt

SEQ ID NO: 272789 - DNA, 25 bp, Probe Sequence
ggcagtggatttcatcaactatcat

SEQ ID NO: 272790 - DNA, 25 bp, Probe Sequence
ggcagggcatcattcagtaattagc

SEQ ID NO: 272791 - DNA, 25 bp, Probe Sequence
ggcaggcacagctacgcaaaataca

SEQ ID NO: 272792 - DNA, 25 bp, Probe Sequence
ggcatcagcaaccactcaaatatcc

SEQ ID NO: 272793 - DNA, 25 bp, Probe Sequence
ggcatatctacacaccaatatcctg

SEQ ID NO: 272794 - DNA, 25 bp, Probe Sequence
ggctattacttcttcaattccatga

SEQ ID NO: 272795 - DNA, 25 bp, Probe Sequence
ggcatttgacagttcattattccta

SEQ ID NO: 272796 - DNA, 25 bp, Probe Sequence
ggcatctctgacaccaatcagatct

SEQ ID NO: 272797 - DNA, 25 bp, Probe Sequence
ggcatctgtgagagcctgtccatca

SEQ ID NO: 272798 - DNA, 25 bp, Probe Sequence
ggcatgcattagctcactttcattt

SEQ ID NO: 272799 - DNA, 25 bp, Probe Sequence
ggcatcttagtggacgattgttctc

SEQ ID NO: 272800 - DNA, 25 bp, Probe Sequence
ggcagtgtagatccaggtgtctgtt

SEQ ID NO: 272801 - DNA, 25 bp, Probe Sequence
ggcatcttagacaaggttctggtcc

SEQ ID NO: 272802 - DNA, 25 bp, Probe Sequence
ggcttcatcgacaaggaagatttgc

SEQ ID NO: 272803 - DNA, 25 bp, Probe Sequence
tggcattcatgctctagtagttcct

SEQ ID NO: 272804 - DNA, 25 bp, Probe Sequence
ggcattcagcacatcagctggtcct

SEQ ID NO: 272805 - DNA, 25 bp, Probe Sequence
ggcatcatcatctgtgcactggcca

SEQ ID NO: 272806 - DNA, 25 bp, Probe Sequence
ggcatatgcatatcctgctactgca

SEQ ID NO: 272807 - DNA, 25 bp, Probe Sequence
ggctgacttccttgctacagcaagc

SEQ ID NO: 272808 - DNA, 25 bp, Probe Sequence
ggcaggcattcttagctgagacacc

SEQ ID NO: 272809 - DNA, 25 bp, Probe Sequence
ggcagtgttctgtgtgcaggcaagc

SEQ ID NO: 272810 - DNA, 25 bp, Probe Sequence
ggcagtgttctgtgtgcaggcaagc

SEQ ID NO: 272811 - DNA, 25 bp, Probe Sequence
ggcagtgtgatggagggcagggcag

SEQ ID NO: 272812 - DNA, 25 bp, Probe Sequence
ggcaggtgtcagaggcagaggaaaa

SEQ ID NO: 272813 - DNA, 25 bp, Probe Sequence
ggcaggagtcaaggccactagaaaa

SEQ ID NO: 272814 - DNA, 25 bp, Probe Sequence
ggcaggagctaaggatcacccaagt

SEQ ID NO: 272815 - DNA, 25 bp, Probe Sequence
ggcagtgaagaagtatccccacctc

SEQ ID NO: 272816 - DNA, 25 bp, Probe Sequence
ggcatgcagaagcctgtaccaacac

SEQ ID NO: 272817 - DNA, 25 bp, Probe Sequence
ggctaaaactggacaaagaccgcaa

SEQ ID NO: 272818 - DNA, 25 bp, Probe Sequence
ggctaacaatcttcaaatacccaaa

SEQ ID NO: 272819 - DNA, 25 bp, Probe Sequence
ggcattaaaccacatcatggaccaa

SEQ ID NO: 272820 - DNA, 25 bp, Probe Sequence
ggcattgtttaaccactgagagccc

SEQ ID NO: 272821 - DNA, 25 bp, Probe Sequence
ggcattgcattgaaaatacaaatca

SEQ ID NO: 272822 - DNA, 25 bp, Probe Sequence
ggcatctacttctgtcagcagaagt

SEQ ID NO: 272823 - DNA, 25 bp, Probe Sequence
ggcagtactcagtggaagggtgata

SEQ ID NO: 272824 - DNA, 25 bp, Probe Sequence
ggcttgactggatggaaggagactt

SEQ ID NO: 272825 - DNA, 25 bp, Probe Sequence
ggctatgatgcttactgcgtcaacg

SEQ ID NO: 272826 - DNA, 25 bp, Probe Sequence
ggctatcatctatccatgaaaccca

SEQ ID NO: 272827 - DNA, 25 bp, Probe Sequence
ggcttctcttacctggacatcagcc

SEQ ID NO: 272828 - DNA, 25 bp, Probe Sequence
ggctttatcctgacatggacccaga

SEQ ID NO: 272829 - DNA, 25 bp, Probe Sequence
ggcatgtttataatctgtaccacta

SEQ ID NO: 272830 - DNA, 25 bp, Probe Sequence
ggcatgtttaacatccagcactgta

SEQ ID NO: 272831 - DNA, 25 bp, Probe Sequence
ggctggtgtaacaccagtaatccca

SEQ ID NO: 272832 - DNA, 25 bp, Probe Sequence
ggctgagtgtaaagcctcctaccct

SEQ ID NO: 272833 - DNA, 25 bp, Probe Sequence
ggctaagtgtgaagcctcctaccct

SEQ ID NO: 272834 - DNA, 25 bp, Probe Sequence
ggctcagggctaatgcgccctgaag

SEQ ID NO: 272835 - DNA, 25 bp, Probe Sequence
ggctcagggctgagaacttgggcac

SEQ ID NO: 272836 - DNA, 25 bp, Probe Sequence
ggcttgggccgtgacttaggcagag

SEQ ID NO: 272837 - DNA, 25 bp, Probe Sequence
ggcataggcacctgtggttaagctt

SEQ ID NO: 272838 - DNA, 25 bp, Probe Sequence
ggctaggaccagaggtattgcattt

SEQ ID NO: 272839 - DNA, 25 bp, Probe Sequence
ggctaaagccgcaggtgaagatgtc

SEQ ID NO: 272840 - DNA, 25 bp, Probe Sequence
ggcttcgaggtcaggctgtagattg

SEQ ID NO: 272841 - DNA, 25 bp, Probe Sequence
ggcttccacttcggtgcagtaattc

SEQ ID NO: 272842 - DNA, 25 bp, Probe Sequence
ggcttcctcaccagtaatatgtctc

SEQ ID NO: 272843 - DNA, 25 bp, Probe Sequence
ggctctcttaccagggagatttgct

SEQ ID NO: 272844 - DNA, 25 bp, Probe Sequence
ggcttttcaccgaggaggagctggc

SEQ ID NO: 272845 - DNA, 25 bp, Probe Sequence
ggcatttgttcctgaacaggagggc

SEQ ID NO: 272846 - DNA, 25 bp, Probe Sequence
ggcattttgttctgcaacagtgcat

SEQ ID NO: 272847 - DNA, 25 bp, Probe Sequence
ggcttttgttgctgcgcaaagttga

SEQ ID NO: 272848 - DNA, 25 bp, Probe Sequence
ggcttttcttcagcacagacatttg

SEQ ID NO: 272849 - DNA, 25 bp, Probe Sequence
ggccccttcagaccaagaatttgac

SEQ ID NO: 272850 - DNA, 25 bp, Probe Sequence
ggctacctttgacaaagctttcttc

SEQ ID NO: 272851 - DNA, 25 bp, Probe Sequence
ggcatacctaggttagaaatgtcct

SEQ ID NO: 272852 - DNA, 25 bp, Probe Sequence
ggcaggtctgtggttataaattctc

SEQ ID NO: 272853 - DNA, 25 bp, Probe Sequence
ggcatggttgctctattggactacc

SEQ ID NO: 272854 - DNA, 25 bp, Probe Sequence
ggcaggttgatgctgatgggaccat

SEQ ID NO: 272855 - DNA, 25 bp, Probe Sequence
ggcaggagtgtgcaagcagtgactt

SEQ ID NO: 272856 - DNA, 25 bp, Probe Sequence
ggcagtggagggacgagtgcctcat

SEQ ID NO: 272857 - DNA, 25 bp, Probe Sequence
ggcagtggaggcgtcgatgaccaca

SEQ ID NO: 272858 - DNA, 25 bp, Probe Sequence
ggcaggtgaggagggtgagccgcgc

SEQ ID NO: 272859 - DNA, 25 bp, Probe Sequence
ggcagggatgggagtggctgaagcc

SEQ ID NO: 272860 - DNA, 25 bp, Probe Sequence
ggcagggagcgtatgttggtgagtt

SEQ ID NO: 272861 - DNA, 25 bp, Probe Sequence
ggcagtgtagggagttgtgggtagt

SEQ ID NO: 272862 - DNA, 25 bp, Probe Sequence
tgggtttagggcatcttagagttga

SEQ ID NO: 272863 - DNA, 25 bp, Probe Sequence
ggcatgtttgagtgttcttagggat

SEQ ID NO: 272864 - DNA, 25 bp, Probe Sequence
ggcttttggttgttcctcagttaga

SEQ ID NO: 272865 - DNA, 25 bp, Probe Sequence
ggctaggatgagctgactcccttag

SEQ ID NO: 272866 - DNA, 25 bp, Probe Sequence
ggctcaggatgagatcccagcactg

SEQ ID NO: 272867 - DNA, 25 bp, Probe Sequence
ggcatctggtaggcatcacgagctg

SEQ ID NO: 272868 - DNA, 25 bp, Probe Sequence
ggcatcggagaagtgcagctgctgc

SEQ ID NO: 272869 - DNA, 25 bp, Probe Sequence
ggcaggcagagcagctactgacttt

SEQ ID NO: 272870 - DNA, 25 bp, Probe Sequence
ggcatgccagaggtctacaactttg

SEQ ID NO: 272871 - DNA, 25 bp, Probe Sequence
ggcatgcacatgagttgaaattctt

SEQ ID NO: 272872 - DNA, 25 bp, Probe Sequence
ggcatgcacatgagttgaaattctt

SEQ ID NO: 272873 - DNA, 25 bp, Probe Sequence
ggcatggtgtggtatagcatcctca

SEQ ID NO: 272874 - DNA, 25 bp, Probe Sequence
ggcatatgcgagcaaagcattctca

SEQ ID NO: 272875 - DNA, 25 bp, Probe Sequence
ggcattcaaggaaatctctgtcaaa

SEQ ID NO: 272876 - DNA, 25 bp, Probe Sequence
ggcatccaaaggctcctgagacaca

SEQ ID NO: 272877 - DNA, 25 bp, Probe Sequence
ggcattaggtggctccaagtaccat

SEQ ID NO: 272878 - DNA, 25 bp, Probe Sequence
ggcttaggtggcaccatggctcagc

SEQ ID NO: 272879 - DNA, 25 bp, Probe Sequence
ggcttgggaggaccatggggcacaa

SEQ ID NO: 272880 - DNA, 25 bp, Probe Sequence
ggcttggagagtctctggagcccag

SEQ ID NO: 272881 - DNA, 25 bp, Probe Sequence
ggcattgcaggcttagtcgtggcta

SEQ ID NO: 272882 - DNA, 25 bp, Probe Sequence
ggcatggcagggacaatggtgggca

SEQ ID NO: 272883 - DNA, 25 bp, Probe Sequence
ggcatggcagggacaatggtgggca

SEQ ID NO: 272884 - DNA, 25 bp, Probe Sequence
ggcatgaaatggccaactgtggctg

SEQ ID NO: 272885 - DNA, 25 bp, Probe Sequence
ggcatgacatctgggtcatctgtcc

SEQ ID NO: 272886 - DNA, 25 bp, Probe Sequence
ggcatgaatcactgtgctcagccac

SEQ ID NO: 272887 - DNA, 25 bp, Probe Sequence
ggcatgaatcactgtgctcagccac

SEQ ID NO: 272888 - DNA, 25 bp, Probe Sequence
ggcatgccataaaggccagctatgt

SEQ ID NO: 272889 - DNA, 25 bp, Probe Sequence
ggcatcagcatcgaaggggctggag

SEQ ID NO: 272890 - DNA, 25 bp, Probe Sequence
ggcatagacgagctggcgttggacc

SEQ ID NO: 272891 - DNA, 25 bp, Probe Sequence
ggcatgatagggctggtgacctcac

SEQ ID NO: 272892 - DNA, 25 bp, Probe Sequence
ggcatttgtggaccgtactccacca

SEQ ID NO: 272893 - DNA, 25 bp, Probe Sequence
ggctttgctgggacataacatccag

SEQ ID NO: 272894 - DNA, 25 bp, Probe Sequence
ggcttgacatgctgtattccacgag

SEQ ID NO: 272895 - DNA, 25 bp, Probe Sequence
ggcattcaatgaggtaatacaagac

SEQ ID NO: 272896 - DNA, 25 bp, Probe Sequence
ggcattcgatgcgtgtttaatgatg

SEQ ID NO: 272897 - DNA, 25 bp, Probe Sequence
ggcatctgtgctgaatgtcttatat

SEQ ID NO: 272898 - DNA, 25 bp, Probe Sequence
ggcattatgcagtaaccattgtcat

SEQ ID NO: 272899 - DNA, 25 bp, Probe Sequence
ggcattactctgcactatagccatt

SEQ ID NO: 272900 - DNA, 25 bp, Probe Sequence
ggcttactctaagaatttcattagt

SEQ ID NO: 272901 - DNA, 25 bp, Probe Sequence
ggctacagcctaattattttccttt

SEQ ID NO: 272902 - DNA, 25 bp, Probe Sequence
ggccaaccatttcttattcaaatct

SEQ ID NO: 272903 - DNA, 25 bp, Probe Sequence
tgagctaaattccctgttaaaacct

SEQ ID NO: 272904 - DNA, 25 bp, Probe Sequence
ggcttgtgtgtcctcagttaaaact

SEQ ID NO: 272905 - DNA, 25 bp, Probe Sequence
ggcatatggagtgtccttattgcta

SEQ ID NO: 272906 - DNA, 25 bp, Probe Sequence
ggctatggggattcccaaagctgac

SEQ ID NO: 272907 - DNA, 25 bp, Probe Sequence
ggctagttgtgacatccaaagtgac

SEQ ID NO: 272908 - DNA, 25 bp, Probe Sequence
ggctggtttacgagcaggacaggcc

SEQ ID NO: 272909 - DNA, 25 bp, Probe Sequence
ggctttttccagagtgctaaggcca

SEQ ID NO: 272910 - DNA, 25 bp, Probe Sequence
ggctttttccagacagctcaatctc

SEQ ID NO: 272911 - DNA, 25 bp, Probe Sequence
ggcatcttatcagcaacagaagact

SEQ ID NO: 272912 - DNA, 25 bp, Probe Sequence
ggcatattccagggtcagagacact

SEQ ID NO: 272913 - DNA, 25 bp, Probe Sequence
ggcatattccaaagcattgcaagac

SEQ ID NO: 272914 - DNA, 25 bp, Probe Sequence
ggcgaatcgataatcattgcatagt

SEQ ID NO: 272915 - DNA, 25 bp, Probe Sequence
ggcaggtctgattggcaagaatgct

SEQ ID NO: 272916 - DNA, 25 bp, Probe Sequence
ggcatcttctaccgcaagaagctga

SEQ ID NO: 272917 - DNA, 25 bp, Probe Sequence
ggcatttctatgcaggcagcacagc

SEQ ID NO: 272918 - DNA, 25 bp, Probe Sequence
ggcattcctattttgcagttcagaa

SEQ ID NO: 272919 - DNA, 25 bp, Probe Sequence
ggcaggcttatttatctgttgcact

SEQ ID NO: 272920 - DNA, 25 bp, Probe Sequence
ggcatgatacttacatttgttgttc

SEQ ID NO: 272921 - DNA, 25 bp, Probe Sequence
ggcattcctctcaatgttgtgtgtt

SEQ ID NO: 272922 - DNA, 25 bp, Probe Sequence
ggcattctgatgggaacttgtgtgt

SEQ ID NO: 272923 - DNA, 25 bp, Probe Sequence
ggcattccagctgagacactgtgat

SEQ ID NO: 272924 - DNA, 25 bp, Probe Sequence
ggcatatgcccagtacatgacctta

SEQ ID NO: 272925 - DNA, 25 bp, Probe Sequence
ggcatatgcccagtacatgacctta

SEQ ID NO: 272926 - DNA, 25 bp, Probe Sequence
ggcattgctccagtggatggtatat

SEQ ID NO: 272927 - DNA, 25 bp, Probe Sequence
ggcattcgctcctgagcggaatcct

SEQ ID NO: 272928 - DNA, 25 bp, Probe Sequence
ggcatgctgtgctcggacggaaagc

SEQ ID NO: 272929 - DNA, 25 bp, Probe Sequence
ggcatgtgcggctgaactgagaagg

SEQ ID NO: 272930 - DNA, 25 bp, Probe Sequence
ggcaggcccaagtatctggtggtga

SEQ ID NO: 272931 - DNA, 25 bp, Probe Sequence
ggcaggcccaggaatggctgggtag

SEQ ID NO: 272932 - DNA, 25 bp, Probe Sequence
ggcaggcatccagtgaagtggctga

SEQ ID NO: 272933 - DNA, 25 bp, Probe Sequence
ggcaggcatcaaggatatgaggttc

SEQ ID NO: 272934 - DNA, 25 bp, Probe Sequence
ggcaggatccagggatgggtgcctg

SEQ ID NO: 272935 - DNA, 25 bp, Probe Sequence
ggcatagacctgaccaaggtgccag

SEQ ID NO: 272936 - DNA, 25 bp, Probe Sequence
ggcattggctgtttacaagtgccag

SEQ ID NO: 272937 - DNA, 25 bp, Probe Sequence
ggcatctgaggtgtacaaggctgta

SEQ ID NO: 272938 - DNA, 25 bp, Probe Sequence
ggcattggctgcggtcgcaaaggat

SEQ ID NO: 272939 - DNA, 25 bp, Probe Sequence
ggcttgagttctgcgcacgcaggat

SEQ ID NO: 272940 - DNA, 25 bp, Probe Sequence
ggcttgaacttgcccacagttgaac

SEQ ID NO: 272941 - DNA, 25 bp, Probe Sequence
ggcttgataatacttaggtgtgatt

SEQ ID NO: 272942 - DNA, 25 bp, Probe Sequence
ggcatcttgaaaattcaggttcatt

SEQ ID NO: 272943 - DNA, 25 bp, Probe Sequence
ggcatcattctaacttcaggaacaa

SEQ ID NO: 272944 - DNA, 25 bp, Probe Sequence
ggcatgcatttaatcctctgcctgc

SEQ ID NO: 272945 - DNA, 25 bp, Probe Sequence
ggcatgaatgtatctgtctgctcgg

SEQ ID NO: 272946 - DNA, 25 bp, Probe Sequence
ggcatgattccaactggctgcatat

SEQ ID NO: 272947 - DNA, 25 bp, Probe Sequence
ggcatatggcacaggcctgcaatcc

SEQ ID NO: 272948 - DNA, 25 bp, Probe Sequence
ggcttggagctctgggaatcacagc

SEQ ID NO: 272949 - DNA, 25 bp, Probe Sequence
ggctcaggatactgtgtgactactg

SEQ ID NO: 272950 - DNA, 25 bp, Probe Sequence
ggctcagtcaataaaggatccgggc

SEQ ID NO: 272951 - DNA, 25 bp, Probe Sequence
ggcatcgtactgaaatgaaacgtgt

SEQ ID NO: 272952 - DNA, 25 bp, Probe Sequence
ggcatggaactcaagattcctcctt

SEQ ID NO: 272953 - DNA, 25 bp, Probe Sequence
ggcttaaatgcaatattcctggtat

SEQ ID NO: 272954 - DNA, 25 bp, Probe Sequence
ggcttaacctgcatgttctggttgt

SEQ ID NO: 272955 - DNA, 25 bp, Probe Sequence
ggcttcacacttatcttatggcttg

SEQ ID NO: 272956 - DNA, 25 bp, Probe Sequence
ggcattactgttgttaagcactgtg

SEQ ID NO: 272957 - DNA, 25 bp, Probe Sequence
ggcatctagccatgcttaaacattt

SEQ ID NO: 272958 - DNA, 25 bp, Probe Sequence
ggcatcggcaccatcattggacatg

SEQ ID NO: 272959 - DNA, 25 bp, Probe Sequence
ggcatgctggcagattgcagggttg

SEQ ID NO: 272960 - DNA, 25 bp, Probe Sequence
ggcatgctgtggttgctgagggatg

SEQ ID NO: 272961 - DNA, 25 bp, Probe Sequence
ggcatcatgttgaccgagctggaga

SEQ ID NO: 272962 - DNA, 25 bp, Probe Sequence
ggcatagggacccatcattgatgac

SEQ ID NO: 272963 - DNA, 25 bp, Probe Sequence
ggctacgtattccacattgaaagca

SEQ ID NO: 272964 - DNA, 25 bp, Probe Sequence
ggcttcgtgtctgactttgaggagc

SEQ ID NO: 272965 - DNA, 25 bp, Probe Sequence
ggcttcctacatgcaatttgcatag

SEQ ID NO: 272966 - DNA, 25 bp, Probe Sequence
ggcattcctgaatccattgagaatg

SEQ ID NO: 272967 - DNA, 25 bp, Probe Sequence
ggcattcttagctgcgggaggcagc

SEQ ID NO: 272968 - DNA, 25 bp, Probe Sequence
ggcatttgttgctatcggggactac

SEQ ID NO: 272969 - DNA, 25 bp, Probe Sequence
ggcattgggacatcaggggaacaag

SEQ ID NO: 272970 - DNA, 25 bp, Probe Sequence
ggctagaccaaccagtgggaaactg

SEQ ID NO: 272971 - DNA, 25 bp, Probe Sequence
tcggaccaggaccaggaagtaactt

SEQ ID NO: 272972 - DNA, 25 bp, Probe Sequence
tccaaccaggacccggagaacaagg

SEQ ID NO: 272973 - DNA, 25 bp, Probe Sequence
tgtccctcaggctgggggaaaacag

SEQ ID NO: 272974 - DNA, 25 bp, Probe Sequence
ggctcttcggcatacgggcaaaaag

SEQ ID NO: 272975 - DNA, 25 bp, Probe Sequence
ggctttcggctttttgggacagcaa

SEQ ID NO: 272976 - DNA, 25 bp, Probe Sequence
ggctattcaggcactacgagcaacg

SEQ ID NO: 272977 - DNA, 25 bp, Probe Sequence
ggctactaacaagtgtcgagtcccc

SEQ ID NO: 272978 - DNA, 25 bp, Probe Sequence
ggctattaaccagggtggccttaca

SEQ ID NO: 272979 - DNA, 25 bp, Probe Sequence
ggcttttactagtgtgggctctttt

SEQ ID NO: 272980 - DNA, 25 bp, Probe Sequence
ggctaatctccttaagtcggccttc

SEQ ID NO: 272981 - DNA, 25 bp, Probe Sequence
ggctagcaattgcaaagtcaggctt

SEQ ID NO: 272982 - DNA, 25 bp, Probe Sequence
ggctatgccacttgaaaacaatttg

SEQ ID NO: 272983 - DNA, 25 bp, Probe Sequence
ggcattgccgttctaagcagttacc

SEQ ID NO: 272984 - DNA, 25 bp, Probe Sequence
ggcatacgtgttcacaggcagagta

SEQ ID NO: 272985 - DNA, 25 bp, Probe Sequence
ggcatccgggctggacggaagaatg

SEQ ID NO: 272986 - DNA, 25 bp, Probe Sequence
ggctcctacctggtctggaaagagc

SEQ ID NO: 272987 - DNA, 25 bp, Probe Sequence
ggctgtataactcttacagtagtct

SEQ ID NO: 272988 - DNA, 25 bp, Probe Sequence
ggctaatcacactctgtaagtcaat

SEQ ID NO: 272989 - DNA, 25 bp, Probe Sequence
ggcttacaagtccttaatttatcaa

SEQ ID NO: 272990 - DNA, 25 bp, Probe Sequence
ggcttacaatgtgcactgaatcgtt

SEQ ID NO: 272991 - DNA, 25 bp, Probe Sequence
ggcttacaatgtgcactgaatcgtt

SEQ ID NO: 272992 - DNA, 25 bp, Probe Sequence
ggctggaaatatgaacaggcctttg

SEQ ID NO: 272993 - DNA, 25 bp, Probe Sequence
ggcatggaaatttaaagcaggttct

SEQ ID NO: 272994 - DNA, 25 bp, Probe Sequence
ggcatgtgctaagtgtaacacaggc

SEQ ID NO: 272995 - DNA, 25 bp, Probe Sequence
ggcatgaaacaggacaacacaaggt

SEQ ID NO: 272996 - DNA, 25 bp, Probe Sequence
ggcataatgccagtacagacttagg

SEQ ID NO: 272997 - DNA, 25 bp, Probe Sequence
ggcatgtatgccctgcgagaacggc

SEQ ID NO: 272998 - DNA, 25 bp, Probe Sequence
ggcatgaacccggaaggcagagctt

SEQ ID NO: 272999 - DNA, 25 bp, Probe Sequence
ggctgaactccgaggacacttttgt

SEQ ID NO: 273000 - DNA, 25 bp, Probe Sequence
ggctaaatccgcagcaaactgccgt

SEQ ID NO: 273001 - DNA, 25 bp, Probe Sequence
ggctagaatctccaggaaatgttgg

SEQ ID NO: 273002 - DNA, 25 bp, Probe Sequence
ggcattgagactgacagtggtattg

SEQ ID NO: 273003 - DNA, 25 bp, Probe Sequence
ggcattcgacttactgttgctgaag

SEQ ID NO: 273004 - DNA, 25 bp, Probe Sequence
ggcatatcaactttgccatatctgc

SEQ ID NO: 273005 - DNA, 25 bp, Probe Sequence
ggcatcatataatttgctagtcatc

SEQ ID NO: 273006 - DNA, 25 bp, Probe Sequence
ggcatgattatgtgctgaatgtaca

SEQ ID NO: 273007 - DNA, 25 bp, Probe Sequence
ggcatattccattgcaaatgaccac

SEQ ID NO: 273008 - DNA, 25 bp, Probe Sequence
ggctatatcctaaatggtctgactg

SEQ ID NO: 273009 - DNA, 25 bp, Probe Sequence
ggcttacactatgatgtttgagtcg

SEQ ID NO: 273010 - DNA, 25 bp, Probe Sequence
ggcattcctgttgatgtagtagtca

SEQ ID NO: 273011 - DNA, 25 bp, Probe Sequence
ggcttcacgcctgacgagatgagcc

SEQ ID NO: 273012 - DNA, 25 bp, Probe Sequence
ggcatatccaaagactgagatcaga

SEQ ID NO: 273013 - DNA, 25 bp, Probe Sequence
ggcatcctcaaacatctggagcctg

SEQ ID NO: 273014 - DNA, 25 bp, Probe Sequence
ggctacaatacacactggaacaact

SEQ ID NO: 273015 - DNA, 25 bp, Probe Sequence
tggctcccaagcctacctaaaacaa

SEQ ID NO: 273016 - DNA, 25 bp, Probe Sequence
ggctcggaggaccctggaaaacaga

SEQ ID NO: 273017 - DNA, 25 bp, Probe Sequence
ggcctagggagggctcgaagtcgcg

SEQ ID NO: 273018 - DNA, 25 bp, Probe Sequence
ggctcttgggggggactagatcctg

SEQ ID NO: 273019 - DNA, 25 bp, Probe Sequence
ggccagtagtggtggacttgcccga

SEQ ID NO: 273020 - DNA, 25 bp, Probe Sequence
ggcatcctgaatggttagacttccc

SEQ ID NO: 273021 - DNA, 25 bp, Probe Sequence
ggcatccaggatgggtacctatcac

SEQ ID NO: 273022 - DNA, 25 bp, Probe Sequence
ggcatgcccaacagtaactgtcagc

SEQ ID NO: 273023 - DNA, 25 bp, Probe Sequence
ggcattatgcccagtacagtgacac

SEQ ID NO: 273024 - DNA, 25 bp, Probe Sequence
ggcattatgcccagtacaggacctt

SEQ ID NO: 273025 - DNA, 25 bp, Probe Sequence
ggcattatgcccagtacatgacctt

SEQ ID NO: 273026 - DNA, 25 bp, Probe Sequence
ggcattatgcccagtacatgacctt

SEQ ID NO: 273027 - DNA, 25 bp, Probe Sequence
ggcattatgcccagtacatgacctt

SEQ ID NO: 273028 - DNA, 25 bp, Probe Sequence
ggcattatgcccagtacatgacctt

SEQ ID NO: 273029 - DNA, 25 bp, Probe Sequence
ggcattatgcccagtacatgacctt

SEQ ID NO: 273030 - DNA, 25 bp, Probe Sequence
ggcattatgcccagtacatgacctt

SEQ ID NO: 273031 - DNA, 25 bp, Probe Sequence
ggcattatgcccagtacatgacctt

SEQ ID NO: 273032 - DNA, 25 bp, Probe Sequence
ggcattatgcccagtacatgacctt

SEQ ID NO: 273033 - DNA, 25 bp, Probe Sequence
ggcattatgcccagtacatgacctt

SEQ ID NO: 273034 - DNA, 25 bp, Probe Sequence
ggcattatgcccagtacatgacctt

SEQ ID NO: 273035 - DNA, 25 bp, Probe Sequence
ggcattatgcccagtacatgacctt

SEQ ID NO: 273036 - DNA, 25 bp, Probe Sequence
ggcattatgcccagtacatgacctt

SEQ ID NO: 273037 - DNA, 25 bp, Probe Sequence
ggcattatgccgcagtacatgacct

SEQ ID NO: 273038 - DNA, 25 bp, Probe Sequence
ggcttacctgtacactgacttgaga

SEQ ID NO: 273039 - DNA, 25 bp, Probe Sequence
ggcttacctgtacactgacttgaga

SEQ ID NO: 273040 - DNA, 25 bp, Probe Sequence
ggcgttcgagtaccctatcttgaac

SEQ ID NO: 273041 - DNA, 25 bp, Probe Sequence
ggctttcgagtatatcctgtacaac

SEQ ID NO: 273042 - DNA, 25 bp, Probe Sequence
ggcttaccaaaaatcaatctccaac

SEQ ID NO: 273043 - DNA, 25 bp, Probe Sequence
ggcttcattaaactgacacttctca

SEQ ID NO: 273044 - DNA, 25 bp, Probe Sequence
ggcttcgttctcttaacatactcag

SEQ ID NO: 273045 - DNA, 25 bp, Probe Sequence
ggcttcgttctcttaatatactcag

SEQ ID NO: 273046 - DNA, 25 bp, Probe Sequence
ggcttgagatcttttaagaactgca

SEQ ID NO: 273047 - DNA, 25 bp, Probe Sequence
ggctagggtgattgtaagaactctg

SEQ ID NO: 273048 - DNA, 25 bp, Probe Sequence
ggctatcttggacatacagtaattg

SEQ ID NO: 273049 - DNA, 25 bp, Probe Sequence
ggctaatggcccaaacattatatag

SEQ ID NO: 273050 - DNA, 25 bp, Probe Sequence
ggctttgcccgatgatcaaatgaag

SEQ ID NO: 273051 - DNA, 25 bp, Probe Sequence
ggcttcagtctcttcgtaacagaac

SEQ ID NO: 273052 - DNA, 25 bp, Probe Sequence
ggcttcattgtctcagttgatggca

SEQ ID NO: 273053 - DNA, 25 bp, Probe Sequence
ggcatacgtgtcgtagtctgtgtcg

SEQ ID NO: 273054 - DNA, 25 bp, Probe Sequence
ggctacagtgtctggccttgggaag

SEQ ID NO: 273055 - DNA, 25 bp, Probe Sequence
ggcatacagatagtagaccgttgga

SEQ ID NO: 273056 - DNA, 25 bp, Probe Sequence
ggcatccaattctacactcagttaa

SEQ ID NO: 273057 - DNA, 25 bp, Probe Sequence
ggcatacagctgtccactgtgactt

SEQ ID NO: 273058 - DNA, 25 bp, Probe Sequence
ggctagcacaatacctaactcatgt

SEQ ID NO: 273059 - DNA, 25 bp, Probe Sequence
ggcatagctaataacaaccacacat

SEQ ID NO: 273060 - DNA, 25 bp, Probe Sequence
ggctcagctaataaaggcgcacatg

SEQ ID NO: 273061 - DNA, 25 bp, Probe Sequence
ggcatatgctagtcgatagagcggc

SEQ ID NO: 273062 - DNA, 25 bp, Probe Sequence
ggcatatgccagacagactagggac

SEQ ID NO: 273063 - DNA, 25 bp, Probe Sequence
ggcatcatccaaggaatagactcct

SEQ ID NO: 273064 - DNA, 25 bp, Probe Sequence
ggcatgaccaaggaagagtgtctgc

SEQ ID NO: 273065 - DNA, 25 bp, Probe Sequence
ggcattgcactagtctgaggtggcc

SEQ ID NO: 273066 - DNA, 25 bp, Probe Sequence
ggcattgcactagtctgaggtggcc

SEQ ID NO: 273067 - DNA, 25 bp, Probe Sequence
ggcattcctagccgagtgtgacaca

SEQ ID NO: 273068 - DNA, 25 bp, Probe Sequence
ggcattgctaaggtcctgtgacagc

SEQ ID NO: 273069 - DNA, 25 bp, Probe Sequence
ggcattggcatacttgcccttacag

SEQ ID NO: 273070 - DNA, 25 bp, Probe Sequence
ggcttaacagttggcatcgtactga

SEQ ID NO: 273071 - DNA, 25 bp, Probe Sequence
ggcattcaagccttctgcaaggact

SEQ ID NO: 273072 - DNA, 25 bp, Probe Sequence
ggcttcaagacacccaaggaggcta

SEQ ID NO: 273073 - DNA, 25 bp, Probe Sequence
ggcttgcaggacctgaagcaacagg

SEQ ID NO: 273074 - DNA, 25 bp, Probe Sequence
ggcttgctatgtaagtagaacgtgg

SEQ ID NO: 273075 - DNA, 25 bp, Probe Sequence
ggcatctctattagatctttagggg

SEQ ID NO: 273076 - DNA, 25 bp, Probe Sequence
tggcatgtcaaatgcatcctctaga

SEQ ID NO: 273077 - DNA, 25 bp, Probe Sequence
ggctgctgagcactgagcagcgctc

SEQ ID NO: 273078 - DNA, 25 bp, Probe Sequence
ggctcatgaagcatcgagctccaag

SEQ ID NO: 273079 - DNA, 25 bp, Probe Sequence
ggcttgagacacatgacccaaacat

SEQ ID NO: 273080 - DNA, 25 bp, Probe Sequence
ggcattaaaaattcccgcaaactat

SEQ ID NO: 273081 - DNA, 25 bp, Probe Sequence
ggcattaaaaattcccgcaaactat

SEQ ID NO: 273082 - DNA, 25 bp, Probe Sequence
ggcattaaaaattcccgcaaactat

SEQ ID NO: 273083 - DNA, 25 bp, Probe Sequence
ggcatacatgaaatattcgcaggaa

SEQ ID NO: 273084 - DNA, 25 bp, Probe Sequence
ggcataaatatttttgacagcagaa

SEQ ID NO: 273085 - DNA, 25 bp, Probe Sequence
ggcatcatgaatttatattcccacc

SEQ ID NO: 273086 - DNA, 25 bp, Probe Sequence
ggcttgaatctgtattacccagaag

SEQ ID NO: 273087 - DNA, 25 bp, Probe Sequence
ggctgagatgctctttaaccaaagg

SEQ ID NO: 273088 - DNA, 25 bp, Probe Sequence
ggctgagctcgatttttacctaaat

SEQ ID NO: 273089 - DNA, 25 bp, Probe Sequence
ggcccccaattcgtacgtggagaag

SEQ ID NO: 273090 - DNA, 25 bp, Probe Sequence
ggctccccatcatcgtactagggag

SEQ ID NO: 273091 - DNA, 25 bp, Probe Sequence
ggctccaaccaaaacgctttgaagt

SEQ ID NO: 273092 - DNA, 25 bp, Probe Sequence
ggccagtaaccaaacatcctggaag

SEQ ID NO: 273093 - DNA, 25 bp, Probe Sequence
ggcttattacaaatatatacggacg

SEQ ID NO: 273094 - DNA, 25 bp, Probe Sequence
ggcttttagcagcatgtacccaaag

SEQ ID NO: 273095 - DNA, 25 bp, Probe Sequence
ggctttaaggtttagctccacatca

SEQ ID NO: 273096 - DNA, 25 bp, Probe Sequence
ggcttaactttttagctgccagaag

SEQ ID NO: 273097 - DNA, 25 bp, Probe Sequence
ggcttccctgtctgtagagccaggg

SEQ ID NO: 273098 - DNA, 25 bp, Probe Sequence
ggcttgaggatgaggtgctaccagg

SEQ ID NO: 273099 - DNA, 25 bp, Probe Sequence
ggcttggactagaactggaccatgg

SEQ ID NO: 273100 - DNA, 25 bp, Probe Sequence
ggctacgacctgtacagtgcctatg

SEQ ID NO: 273101 - DNA, 25 bp, Probe Sequence
tgtctaagtacgcacggccggtaca

SEQ ID NO: 273102 - DNA, 25 bp, Probe Sequence
ggctatattacaaaccccaagtaca

SEQ ID NO: 273103 - DNA, 25 bp, Probe Sequence
ggcattagctaaaaccttccatgtc

SEQ ID NO: 273104 - DNA, 25 bp, Probe Sequence
ggcatagttaaaaccttgctagcca

SEQ ID NO: 273105 - DNA, 25 bp, Probe Sequence
ggcttgtattaaaccactgaacaat

SEQ ID NO: 273106 - DNA, 25 bp, Probe Sequence
ggctttttaggaagctctgcaacag

SEQ ID NO: 273107 - DNA, 25 bp, Probe Sequence
ggcttttatttcagtgccatacatg

SEQ ID NO: 273108 - DNA, 25 bp, Probe Sequence
ggcattttgtaatagtgctaagcat

SEQ ID NO: 273109 - DNA, 25 bp, Probe Sequence
ggcttttgtaaattcatccaggtca

SEQ ID NO: 273110 - DNA, 25 bp, Probe Sequence
ggcttgtaatcacagcacttaggga

SEQ ID NO: 273111 - DNA, 25 bp, Probe Sequence
ggcttgagtaacatcatctttggga

SEQ ID NO: 273112 - DNA, 25 bp, Probe Sequence
ggcttggaattcacactgatctggg

SEQ ID NO: 273113 - DNA, 25 bp, Probe Sequence
tggtttaatttttagtagcaggtca

SEQ ID NO: 273114 - DNA, 25 bp, Probe Sequence
ggcttaatttttggaattcggccag

SEQ ID NO: 273115 - DNA, 25 bp, Probe Sequence
ggctgtggattttatggaaaccctc

SEQ ID NO: 273116 - DNA, 25 bp, Probe Sequence
ggctgtggattttatggaaaccctc

SEQ ID NO: 273117 - DNA, 25 bp, Probe Sequence
ggcgggactttcagagatccgcctc

SEQ ID NO: 273118 - DNA, 25 bp, Probe Sequence
ggcggtgactttaatgaattcccag

SEQ ID NO: 273119 - DNA, 25 bp, Probe Sequence
ggcggcgtctgtattaaacaccgtg

SEQ ID NO: 273120 - DNA, 25 bp, Probe Sequence
ggcgtcagtagaatattataaccca

SEQ ID NO: 273121 - DNA, 25 bp, Probe Sequence
ggcttcactcatgaaatttacttca

SEQ ID NO: 273122 - DNA, 25 bp, Probe Sequence
ggcattcgtgatgacttttaatgaa

SEQ ID NO: 273123 - DNA, 25 bp, Probe Sequence
ggcttgcagtaccactttgataaaa

SEQ ID NO: 273124 - DNA, 25 bp, Probe Sequence
ggctaatctacatttatcaataaaa

SEQ ID NO: 273125 - DNA, 25 bp, Probe Sequence
ggctgagtctgttttatcaatcaca

SEQ ID NO: 273126 - DNA, 25 bp, Probe Sequence
ggctggggtactttacattcaataa

SEQ ID NO: 273127 - DNA, 25 bp, Probe Sequence
ggcatttggtagatatcctttatta

SEQ ID NO: 273128 - DNA, 25 bp, Probe Sequence
ggcattttgtagatgtggtttgact

SEQ ID NO: 273129 - DNA, 25 bp, Probe Sequence
ggcatttctatctattgtggcttta

SEQ ID NO: 273130 - DNA, 25 bp, Probe Sequence
ggcatcttcttggaatgtggctttt

SEQ ID NO: 273131 - DNA, 25 bp, Probe Sequence
ggcttttcatgtatgtagattttag

SEQ ID NO: 273132 - DNA, 25 bp, Probe Sequence
ggctgacttcagagtggacttgtgt

SEQ ID NO: 273133 - DNA, 25 bp, Probe Sequence
ggctgacttcagagtggacttgtgt

SEQ ID NO: 273134 - DNA, 25 bp, Probe Sequence
ggcttccactgcagtgcagacgggc

SEQ ID NO: 273135 - DNA, 25 bp, Probe Sequence
ggcttcctctgatatgcaagtggtg

SEQ ID NO: 273136 - DNA, 25 bp, Probe Sequence
ggcttctgcctactgagcaaggttg

SEQ ID NO: 273137 - DNA, 25 bp, Probe Sequence
ggctcatagtctcctggagggataa

SEQ ID NO: 273138 - DNA, 25 bp, Probe Sequence
ggctcaggtcttaggggtgtcatgc

SEQ ID NO: 273139 - DNA, 25 bp, Probe Sequence
tggcatcacgttgaggccagtctca

SEQ ID NO: 273140 - DNA, 25 bp, Probe Sequence
ggcatcaacatttctggcaatttct

SEQ ID NO: 273141 - DNA, 25 bp, Probe Sequence
ggctcacatgtttcagtctgttgtc

SEQ ID NO: 273142 - DNA, 25 bp, Probe Sequence
ggcatacattatgcaatcttcctgc

SEQ ID NO: 273143 - DNA, 25 bp, Probe Sequence
ggcattttgcatgccattctccatc

SEQ ID NO: 273144 - DNA, 25 bp, Probe Sequence
ggcattttgacaacatggcttctcc

SEQ ID NO: 273145 - DNA, 25 bp, Probe Sequence
ggcatcagtatgtcactctggtccc

SEQ ID NO: 273146 - DNA, 25 bp, Probe Sequence
ggcatatgtcagtttgtgtatctac

SEQ ID NO: 273147 - DNA, 25 bp, Probe Sequence
ggcattaattgcctctgtctctgag

SEQ ID NO: 273148 - DNA, 25 bp, Probe Sequence
ggcttgaatgtgactctgttgagac

SEQ ID NO: 273149 - DNA, 25 bp, Probe Sequence
ggcttgaaggcaatcatggagcatg

SEQ ID NO: 273150 - DNA, 25 bp, Probe Sequence
ggcttggtcagcagcatggagttcc

SEQ ID NO: 273151 - DNA, 25 bp, Probe Sequence
ggctgccgatcagagctgtgagtta

SEQ ID NO: 273152 - DNA, 25 bp, Probe Sequence
ggcttcagagtttctgggttactgg

SEQ ID NO: 273153 - DNA, 25 bp, Probe Sequence
ggcttctatgttttgggttgatgct

SEQ ID NO: 273154 - DNA, 25 bp, Probe Sequence
ggcttcttattcgggtgtgagtctt

SEQ ID NO: 273155 - DNA, 25 bp, Probe Sequence
ggcattttttccagagtggtgcagt

SEQ ID NO: 273156 - DNA, 25 bp, Probe Sequence
ggctttatctttcgacagtggtggc

SEQ ID NO: 273157 - DNA, 25 bp, Probe Sequence
ggctttacattgcagataggaagga

SEQ ID NO: 273158 - DNA, 25 bp, Probe Sequence
ggcttctggcttccataagaagaaa

SEQ ID NO: 273159 - DNA, 25 bp, Probe Sequence
ggcttctggctagaacccgaaacaa

SEQ ID NO: 273160 - DNA, 25 bp, Probe Sequence
ggcttttgcagtggacatcccagaa

SEQ ID NO: 273161 - DNA, 25 bp, Probe Sequence
ggctttatcaggtatcatcaacagg

SEQ ID NO: 273162 - DNA, 25 bp, Probe Sequence
ggcttgtatgcctcatagcagggga

SEQ ID NO: 273163 - DNA, 25 bp, Probe Sequence
ggcttgaaggccctgatgggtggac

SEQ ID NO: 273164 - DNA, 25 bp, Probe Sequence
ggctcgagaaacctatgggctgccc

SEQ ID NO: 273165 - DNA, 25 bp, Probe Sequence
ggcttgtgaacagctctacaatccc

SEQ ID NO: 273166 - DNA, 25 bp, Probe Sequence
ggcttctgcaaaagctcttcttcct

SEQ ID NO: 273167 - DNA, 25 bp, Probe Sequence
ggcttatatacaatgcttctttcct

SEQ ID NO: 273168 - DNA, 25 bp, Probe Sequence
ggctttatgtccattttaccactgt

SEQ ID NO: 273169 - DNA, 25 bp, Probe Sequence
ggctttatgtccattttaccactgt

SEQ ID NO: 273170 - DNA, 25 bp, Probe Sequence
ggctaagtgtccattatttaccttg

SEQ ID NO: 273171 - DNA, 25 bp, Probe Sequence
ggctataattacatatttcattccc

SEQ ID NO: 273172 - DNA, 25 bp, Probe Sequence
ggcttaagtatagctttgcattacc

SEQ ID NO: 273173 - DNA, 25 bp, Probe Sequence
ggcttagaggtgtctgcctatgctt

SEQ ID NO: 273174 - DNA, 25 bp, Probe Sequence
ggcttcaggagaacctgctggctgt

SEQ ID NO: 273175 - DNA, 25 bp, Probe Sequence
ggcatataggaagcacgctggtgct

SEQ ID NO: 273176 - DNA, 25 bp, Probe Sequence
ggcattgaaataacacccagagcat

SEQ ID NO: 273177 - DNA, 25 bp, Probe Sequence
ggcttaaaaatccatgcacaatcaa

SEQ ID NO: 273178 - DNA, 25 bp, Probe Sequence
ggcttaaagactgcatgcccaagag

SEQ ID NO: 273179 - DNA, 25 bp, Probe Sequence
ggcttggaaactgggcggccagggg

SEQ ID NO: 273180 - DNA, 25 bp, Probe Sequence
ggcttgtagaagggacggctcagtg

SEQ ID NO: 273181 - DNA, 25 bp, Probe Sequence
ggcttgcctgaagggagtggctctg

SEQ ID NO: 273182 - DNA, 25 bp, Probe Sequence
ggctaccatggctggactggcagct

SEQ ID NO: 273183 - DNA, 25 bp, Probe Sequence
ggcttctatgcctaagaccaactgc

SEQ ID NO: 273184 - DNA, 25 bp, Probe Sequence
ggcatttatgccccagtacatgacc

SEQ ID NO: 273185 - DNA, 25 bp, Probe Sequence
ggcattgtattccaaagacgacaat

SEQ ID NO: 273186 - DNA, 25 bp, Probe Sequence
ggcatatgtgtaccaaagggtcatg

SEQ ID NO: 273187 - DNA, 25 bp, Probe Sequence
ggcttgtgtacctcagtggtttttg

SEQ ID NO: 273188 - DNA, 25 bp, Probe Sequence
ggctatggatgtgatacttggtatt

SEQ ID NO: 273189 - DNA, 25 bp, Probe Sequence
ggcttccatgtctgactgtgagttt

SEQ ID NO: 273190 - DNA, 25 bp, Probe Sequence
ggcttgacatgtgcaattgtgaggg

SEQ ID NO: 273191 - DNA, 25 bp, Probe Sequence
ggcttctcagatgtatttcaaggac

SEQ ID NO: 273192 - DNA, 25 bp, Probe Sequence
ggctcctcatgtggtgatttaacag

SEQ ID NO: 273193 - DNA, 25 bp, Probe Sequence
ggctccaactcagtgtttaaggcac

SEQ ID NO: 273194 - DNA, 25 bp, Probe Sequence
ggctcctttagcactataagggcag

SEQ ID NO: 273195 - DNA, 25 bp, Probe Sequence
ggctcccttactactggaatgcaga

SEQ ID NO: 273196 - DNA, 25 bp, Probe Sequence
ggcttcaggtacaactggccacaga

SEQ ID NO: 273197 - DNA, 25 bp, Probe Sequence
ggcttaggtctcactgacagcatgc

SEQ ID NO: 273198 - DNA, 25 bp, Probe Sequence
ggctaagtgtccattgatggatgct

SEQ ID NO: 273199 - DNA, 25 bp, Probe Sequence
ggcattgggatcaatgttgatgagg

SEQ ID NO: 273200 - DNA, 25 bp, Probe Sequence
ggcattgctgcgcagatttgcaggg

SEQ ID NO: 273201 - DNA, 25 bp, Probe Sequence
ggcattggctgcaagagcctcgatg

SEQ ID NO: 273202 - DNA, 25 bp, Probe Sequence
ggcttgtgcagcaatggccaagatc

SEQ ID NO: 273203 - DNA, 25 bp, Probe Sequence
ggctcagtctgaatctgcccagagc

SEQ ID NO: 273204 - DNA, 25 bp, Probe Sequence
ggctcagttgcaggctgacagaaga

SEQ ID NO: 273205 - DNA, 25 bp, Probe Sequence
ggcattgcttcggcatatgcaaatg

SEQ ID NO: 273206 - DNA, 25 bp, Probe Sequence
ggcattgccgtggtcatgatatttg

SEQ ID NO: 273207 - DNA, 25 bp, Probe Sequence
ggctagctccgtaatgaatgttgtc

SEQ ID NO: 273208 - DNA, 25 bp, Probe Sequence
ggctaatttattacaatgttgtaca

SEQ ID NO: 273209 - DNA, 25 bp, Probe Sequence
ggctaagttttggacatcgatttca

SEQ ID NO: 273210 - DNA, 25 bp, Probe Sequence
ggctaggtagttcaatcctctgtcc

SEQ ID NO: 273211 - DNA, 25 bp, Probe Sequence
ggctatttaggacaacttatgactc

SEQ ID NO: 273212 - DNA, 25 bp, Probe Sequence
ggctaagtgggacattagtaactgc

SEQ ID NO: 273213 - DNA, 25 bp, Probe Sequence
ggctcacgttggacgctatttagac

SEQ ID NO: 273214 - DNA, 25 bp, Probe Sequence
ggctcactggtcacggatttgtgtc

SEQ ID NO: 273215 - DNA, 25 bp, Probe Sequence
ggcatttggtgctgtggcagatttg

SEQ ID NO: 273216 - DNA, 25 bp, Probe Sequence
ggctttgtggagtggaggtgggggt

SEQ ID NO: 273217 - DNA, 25 bp, Probe Sequence
ggctttggggatgatgaggcttgca

SEQ ID NO: 273218 - DNA, 25 bp, Probe Sequence
ggcttctaccggaagcggcagtgcc

SEQ ID NO: 273219 - DNA, 25 bp, Probe Sequence
ggctgtgctatccctgtacgcctct

SEQ ID NO: 273220 - DNA, 25 bp, Probe Sequence
ggctgtgctatccctgtacgcctct

SEQ ID NO: 273221 - DNA, 25 bp, Probe Sequence
ggctggatactagttacatgattct

SEQ ID NO: 273222 - DNA, 25 bp, Probe Sequence
ggctgagtaatggctaagtgtccat

SEQ ID NO: 273223 - DNA, 25 bp, Probe Sequence
ggctagtacttgatagattccttgt

SEQ ID NO: 273224 - DNA, 25 bp, Probe Sequence
ggctaaatatctgttgcatgtactt

SEQ ID NO: 273225 - DNA, 25 bp, Probe Sequence
ggctaggaactggagtgcatcttta

SEQ ID NO: 273226 - DNA, 25 bp, Probe Sequence
ggctcgtgttgcggagactttaccc

SEQ ID NO: 273227 - DNA, 25 bp, Probe Sequence
ggctctgatgtggtcagtgaccttg

SEQ ID NO: 273228 - DNA, 25 bp, Probe Sequence
ggcttgatgctggtactttcggaac

SEQ ID NO: 273229 - DNA, 25 bp, Probe Sequence
ggcattataggtgtttccacatgaa

SEQ ID NO: 273230 - DNA, 25 bp, Probe Sequence
ggctttaggtggcttttcagagcat

SEQ ID NO: 273231 - DNA, 25 bp, Probe Sequence
ggctttcgagggcctgtaaatatct

SEQ ID NO: 273232 - DNA, 25 bp, Probe Sequence
ggcattgtgggtctttgaagttgct

SEQ ID NO: 273233 - DNA, 25 bp, Probe Sequence
ggcattgtgcctattgtggaacctg

SEQ ID NO: 273234 - DNA, 25 bp, Probe Sequence
ggctttggcttttatagatcatcct

SEQ ID NO: 273235 - DNA, 25 bp, Probe Sequence
ggctttggacttcctcagtgagccc

SEQ ID NO: 273236 - DNA, 25 bp, Probe Sequence
ggcttgtgtacccaatgggcagctg

SEQ ID NO: 273237 - DNA, 25 bp, Probe Sequence
ggcttattaccatgagactgccagc

SEQ ID NO: 273238 - DNA, 25 bp, Probe Sequence
tggtttggatcctgaagaacgaaaa

SEQ ID NO: 273239 - DNA, 25 bp, Probe Sequence
ggcttcgacacctgcggacaggaaa

SEQ ID NO: 273240 - DNA, 25 bp, Probe Sequence
ggcttcgcaaccaggatgcaaggtc

SEQ ID NO: 273241 - DNA, 25 bp, Probe Sequence
ggcttccaacaaaaaccagagtcac

SEQ ID NO: 273242 - DNA, 25 bp, Probe Sequence
ggcttcagatactcaaaccacttag

SEQ ID NO: 273243 - DNA, 25 bp, Probe Sequence
ggctcctgagactcacaaaccattt

SEQ ID NO: 273244 - DNA, 25 bp, Probe Sequence
ggcttatgagaatcacaactgtatg

SEQ ID NO: 273245 - DNA, 25 bp, Probe Sequence
ggctgtggaagaggccaatcctatg

SEQ ID NO: 273246 - DNA, 25 bp, Probe Sequence
ggcttaaatgtagcaatctctgcgt

SEQ ID NO: 273247 - DNA, 25 bp, Probe Sequence
ggctcatggcaagaaagtgctcggt

SEQ ID NO: 273248 - DNA, 25 bp, Probe Sequence
ggctctggaagtgaagatgcctcca

SEQ ID NO: 273249 - DNA, 25 bp, Probe Sequence
ggctaggtagtgaaagatttgctca

SEQ ID NO: 273250 - DNA, 25 bp, Probe Sequence
ggcttgcttagattactatatttca

SEQ ID NO: 273251 - DNA, 25 bp, Probe Sequence
ggcttgttactttatactcatatcc

SEQ ID NO: 273252 - DNA, 25 bp, Probe Sequence
ggctgtttacttatttgtatccttt

SEQ ID NO: 273253 - DNA, 25 bp, Probe Sequence
ggctttcttttttatttcatcactt

SEQ ID NO: 273254 - DNA, 25 bp, Probe Sequence
ggctttttgctttggtgcatttcag

SEQ ID NO: 273255 - DNA, 25 bp, Probe Sequence
ggcattgtttgcattgtgtttatta

SEQ ID NO: 273256 - DNA, 25 bp, Probe Sequence
ggcattgtttgcattgtgtttatta

SEQ ID NO: 273257 - DNA, 25 bp, Probe Sequence
ggcattgtttgcttgtgtttattaa

SEQ ID NO: 273258 - DNA, 25 bp, Probe Sequence
ggctatttcgacctgtttcttagaa

SEQ ID NO: 273259 - DNA, 25 bp, Probe Sequence
ggcttttcagagcctgggtgcgggc

SEQ ID NO: 273260 - DNA, 25 bp, Probe Sequence
ggctttggagcaggctaggctgggg

SEQ ID NO: 273261 - DNA, 25 bp, Probe Sequence
ggctgtgggaggggcaagctacggc

SEQ ID NO: 273262 - DNA, 25 bp, Probe Sequence
ggctgggacggctcaagtaccaggc

SEQ ID NO: 273263 - DNA, 25 bp, Probe Sequence
ggccggacgagggagagtccctgac

SEQ ID NO: 273264 - DNA, 25 bp, Probe Sequence
ggctgctgcgtatgtgaaagtccct

SEQ ID NO: 273265 - DNA, 25 bp, Probe Sequence
ggcttgtgcagagatgataagtacc

SEQ ID NO: 273266 - DNA, 25 bp, Probe Sequence
ggctttgcacagaagtatgctctac

SEQ ID NO: 273267 - DNA, 25 bp, Probe Sequence
ggctttactgataaattctaccaac

SEQ ID NO: 273268 - DNA, 25 bp, Probe Sequence
ggcttaacagatccaattccagaaa

SEQ ID NO: 273269 - DNA, 25 bp, Probe Sequence
ggcttagggccctgtcaggaaacac

SEQ ID NO: 273270 - DNA, 25 bp, Probe Sequence
ggctgtagggctgcattataaaata

SEQ ID NO: 273271 - DNA, 25 bp, Probe Sequence
ggcttcctgcgtgtgtaaaagtcga

SEQ ID NO: 273272 - DNA, 25 bp, Probe Sequence
ggctcacactgagaatgtaagaact

SEQ ID NO: 273273 - DNA, 25 bp, Probe Sequence
ggctacctggcaacatagaaaattt

SEQ ID NO: 273274 - DNA, 25 bp, Probe Sequence
ggctaccctgcaattaagaatcatt

SEQ ID NO: 273275 - DNA, 25 bp, Probe Sequence
ggctcaaccaatataggatatagta

SEQ ID NO: 273276 - DNA, 25 bp, Probe Sequence
ggctctcccagtatattgactgatg

SEQ ID NO: 273277 - DNA, 25 bp, Probe Sequence
ggctctacatcgtcactgagtacat

SEQ ID NO: 273278 - DNA, 25 bp, Probe Sequence
ggctcatgcctgtaatctcagtaca

SEQ ID NO: 273279 - DNA, 25 bp, Probe Sequence
ggctcatgcctgtaatctcagtaca

SEQ ID NO: 273280 - DNA, 25 bp, Probe Sequence
ggctcagagagggtctagttaacag

SEQ ID NO: 273281 - DNA, 25 bp, Probe Sequence
ggcgcacatagggtgtaactcgaaa

SEQ ID NO: 273282 - DNA, 25 bp, Probe Sequence
ggctgcgtacagtgtttcacgtaga

SEQ ID NO: 273283 - DNA, 25 bp, Probe Sequence
ggcttgtaatacccttcacatggaa

SEQ ID NO: 273284 - DNA, 25 bp, Probe Sequence
ggcttgcataatttgctttccatga

SEQ ID NO: 273285 - DNA, 25 bp, Probe Sequence
ggcttcatcgtaactgcttctagag

SEQ ID NO: 273286 - DNA, 25 bp, Probe Sequence
ggcttctcagatatggcttgcaaaa

SEQ ID NO: 273287 - DNA, 25 bp, Probe Sequence
ggcttcctgacatttgtggcataaa

SEQ ID NO: 273288 - DNA, 25 bp, Probe Sequence
ggctcgcactttactggacataaag

SEQ ID NO: 273289 - DNA, 25 bp, Probe Sequence
ggctcgcaaatctttgatacggccg

SEQ ID NO: 273290 - DNA, 25 bp, Probe Sequence
ggcttgagccattattgctaaggcc

SEQ ID NO: 273291 - DNA, 25 bp, Probe Sequence
ggcttaccagcatttgagaaggctc

SEQ ID NO: 273292 - DNA, 25 bp, Probe Sequence
ggctacacctgcaacgtgaaggctc

SEQ ID NO: 273293 - DNA, 25 bp, Probe Sequence
ggctacacctgcaacgtgaaggctc

SEQ ID NO: 273294 - DNA, 25 bp, Probe Sequence
ggctacaggtgctaagcaaaagtca

SEQ ID NO: 273295 - DNA, 25 bp, Probe Sequence
ggctaagttatacccaaagctcact

SEQ ID NO: 273296 - DNA, 25 bp, Probe Sequence
ggctcaaatttattccccagctact

SEQ ID NO: 273297 - DNA, 25 bp, Probe Sequence
ggctcagactttatccagacactgg

SEQ ID NO: 273298 - DNA, 25 bp, Probe Sequence
ggctaatctttttgccagtgaaggc

SEQ ID NO: 273299 - DNA, 25 bp, Probe Sequence
ggcttgatttgtttagactgaagga

SEQ ID NO: 273300 - DNA, 25 bp, Probe Sequence
ggcttttctgtcttcatatcagata

SEQ ID NO: 273301 - DNA, 25 bp, Probe Sequence
ggcttatttgcttttccagatttta

SEQ ID NO: 273302 - DNA, 25 bp, Probe Sequence
ggcttggtcttatttgcacagtttt

SEQ ID NO: 273303 - DNA, 25 bp, Probe Sequence
ggcttgtttttcttgcatggtttgg

SEQ ID NO: 273304 - DNA, 25 bp, Probe Sequence
ggcttgtttttcttgcatggtttgg

SEQ ID NO: 273305 - DNA, 25 bp, Probe Sequence
ggcttaatttgtgatatcatgttct

SEQ ID NO: 273306 - DNA, 25 bp, Probe Sequence
ggctctggattttgctgttagtact

SEQ ID NO: 273307 - DNA, 25 bp, Probe Sequence
ggcttggaatattggcctttattgg

SEQ ID NO: 273308 - DNA, 25 bp, Probe Sequence
ggcttggctgcaaaacactttattg

SEQ ID NO: 273309 - DNA, 25 bp, Probe Sequence
ggcttggctgcaaacactttattga

SEQ ID NO: 273310 - DNA, 25 bp, Probe Sequence
ggcttggcggaatatctctttgaca

SEQ ID NO: 273311 - DNA, 25 bp, Probe Sequence
ggcttccccaaggatttattgacat

SEQ ID NO: 273312 - DNA, 25 bp, Probe Sequence
ggctccggaaaggcgtttgggatgc

SEQ ID NO: 273313 - DNA, 25 bp, Probe Sequence
ggctcccaaagctcggataggagac

SEQ ID NO: 273314 - DNA, 25 bp, Probe Sequence
ggcttaacagagatcgaaatggaca

SEQ ID NO: 273315 - DNA, 25 bp, Probe Sequence
ggcttcaaaggaacttggtggcatc

SEQ ID NO: 273316 - DNA, 25 bp, Probe Sequence
ggcattggggagttttagatggact

SEQ ID NO: 273317 - DNA, 25 bp, Probe Sequence
ggcattggggagtggcattgccaac

SEQ ID NO: 273318 - DNA, 25 bp, Probe Sequence
ggctttgcggagaaggttccacctt

SEQ ID NO: 273319 - DNA, 25 bp, Probe Sequence
ggctttggtgcggggtacacaagag

SEQ ID NO: 273320 - DNA, 25 bp, Probe Sequence
ggctttggtgcggggtacacaagag

SEQ ID NO: 273321 - DNA, 25 bp, Probe Sequence
ggcttgggcctggtagaagtttgac

SEQ ID NO: 273322 - DNA, 25 bp, Probe Sequence
ggcttaggcctatagattgatttac

SEQ ID NO: 273323 - DNA, 25 bp, Probe Sequence
ggctttgctgccaatagtttcttct

SEQ ID NO: 273324 - DNA, 25 bp, Probe Sequence
ggcttcatgagtagctgagtttcct

SEQ ID NO: 273325 - DNA, 25 bp, Probe Sequence
ggctataggacgcagctgttgccat

SEQ ID NO: 273326 - DNA, 25 bp, Probe Sequence
ggctaagaactgcactgctttgttt

SEQ ID NO: 273327 - DNA, 25 bp, Probe Sequence
ggctaaatgaagcactgctgtattt

SEQ ID NO: 273328 - DNA, 25 bp, Probe Sequence
ggctacgtgaaggaacactttgcct

SEQ ID NO: 273329 - DNA, 25 bp, Probe Sequence
ggcttctggaatgattgctttctgg

SEQ ID NO: 273330 - DNA, 25 bp, Probe Sequence
ggctttggatatcctgagccctttg

SEQ ID NO: 273331 - DNA, 25 bp, Probe Sequence
ggctatattgataggctgagctgac

SEQ ID NO: 273332 - DNA, 25 bp, Probe Sequence
ggctaatggcacaactgtccacgta

SEQ ID NO: 273333 - DNA, 25 bp, Probe Sequence
ggctcactgagtaaccatcccagta

SEQ ID NO: 273334 - DNA, 25 bp, Probe Sequence
ggctaaagttgatctgaacaaaagt

SEQ ID NO: 273335 - DNA, 25 bp, Probe Sequence
ggctagaagggactctgaacggcaa

SEQ ID NO: 273336 - DNA, 25 bp, Probe Sequence
ggctatcggcctaatcttagccctg

SEQ ID NO: 273337 - DNA, 25 bp, Probe Sequence
tggcttttctccagattagcacctg

SEQ ID NO: 273338 - DNA, 25 bp, Probe Sequence
ggctttttgtctagataacctcttt

SEQ ID NO: 273339 - DNA, 25 bp, Probe Sequence
ggcttgttttcttaatatgcttctt

SEQ ID NO: 273340 - DNA, 25 bp, Probe Sequence
ggcttgttaacagattgtttcatgt

SEQ ID NO: 273341 - DNA, 25 bp, Probe Sequence
ggcttatctaattaactgtgtttgg

SEQ ID NO: 273342 - DNA, 25 bp, Probe Sequence
ggctctgacttataactgctgtatc

SEQ ID NO: 273343 - DNA, 25 bp, Probe Sequence
ggcttatgtctataatcctgacact

SEQ ID NO: 273344 - DNA, 25 bp, Probe Sequence
ggctgtttcgaaagagcctgccagg

SEQ ID NO: 273345 - DNA, 25 bp, Probe Sequence
ggctacaccagaaagaccaacaggg

SEQ ID NO: 273346 - DNA, 25 bp, Probe Sequence
ggcggcgcctgaaagacaaacagct

SEQ ID NO: 273347 - DNA, 25 bp, Probe Sequence
ggcgggcccatgaagaaagcccctc

SEQ ID NO: 273348 - DNA, 25 bp, Probe Sequence
ggctggccaccagaaaaaaatcctg

SEQ ID NO: 273349 - DNA, 25 bp, Probe Sequence
ggctggccaacatggtaaaaccctg

SEQ ID NO: 273350 - DNA, 25 bp, Probe Sequence
ggctgggcaacatggcaaaatccta

SEQ ID NO: 273351 - DNA, 25 bp, Probe Sequence
ggctggtccaacacagattctgcct

SEQ ID NO: 273352 - DNA, 25 bp, Probe Sequence
ggctacacacaaaccagtatcgctc

SEQ ID NO: 273353 - DNA, 25 bp, Probe Sequence
ggctacttcaatgcacagaaccagc

SEQ ID NO: 273354 - DNA, 25 bp, Probe Sequence
ggctcctccactgaaaactactaaa

SEQ ID NO: 273355 - DNA, 25 bp, Probe Sequence
ggctaaccactttaaagctattctt

SEQ ID NO: 273356 - DNA, 25 bp, Probe Sequence
ggctatatatcctttaatcacattt

SEQ ID NO: 273357 - DNA, 25 bp, Probe Sequence
ggctttactctgaaacatcacacat

SEQ ID NO: 273358 - DNA, 25 bp, Probe Sequence
ggcttgtgtttgtacattgcacaga

SEQ ID NO: 273359 - DNA, 25 bp, Probe Sequence
ggctttcagtagtacatatatgcaa

SEQ ID NO: 273360 - DNA, 25 bp, Probe Sequence
ggcttatgaaaggagtgcaatgcag

SEQ ID NO: 273361 - DNA, 25 bp, Probe Sequence
ggctctaggttgggatcaatcctga

SEQ ID NO: 273362 - DNA, 25 bp, Probe Sequence
ggcttaagtgtgcctggcaaccaaa

SEQ ID NO: 273363 - DNA, 25 bp, Probe Sequence
ggctttgatgggctacattcctaga

SEQ ID NO: 273364 - DNA, 25 bp, Probe Sequence
ggcttcttgggggaatattgtcaac

SEQ ID NO: 273365 - DNA, 25 bp, Probe Sequence
ggcttgctctgggacttttatgctc

SEQ ID NO: 273366 - DNA, 25 bp, Probe Sequence
ggcttctgtggatattctatgacct

SEQ ID NO: 273367 - DNA, 25 bp, Probe Sequence
ggctacttgtgtaagcctcgacctg

SEQ ID NO: 273368 - DNA, 25 bp, Probe Sequence
ggcttctctttttgcaagggcctct

SEQ ID NO: 273369 - DNA, 25 bp, Probe Sequence
ggctttctcttacaattgaactgct

SEQ ID NO: 273370 - DNA, 25 bp, Probe Sequence
ggctttctcttacaattgaactgct

SEQ ID NO: 273371 - DNA, 25 bp, Probe Sequence
ggctttccagtacatcattgataac

SEQ ID NO: 273372 - DNA, 25 bp, Probe Sequence
ggctcttgcaaggtaacatctgtaa

SEQ ID NO: 273373 - DNA, 25 bp, Probe Sequence
ggctcttgacacttagccgctgtct

SEQ ID NO: 273374 - DNA, 25 bp, Probe Sequence
ggctctgaagctggtagccctgatc

SEQ ID NO: 273375 - DNA, 25 bp, Probe Sequence
ggcttgaggctggtagcttctatgt

SEQ ID NO: 273376 - DNA, 25 bp, Probe Sequence
ggctgccaggtggtcagcgtgttta

SEQ ID NO: 273377 - DNA, 25 bp, Probe Sequence
ggctctcttgaagtcaggagttcca

SEQ ID NO: 273378 - DNA, 25 bp, Probe Sequence
ggctctgtgcagtcactggaggttg

SEQ ID NO: 273379 - DNA, 25 bp, Probe Sequence
ggctatgctgctttgggcaggtgga

SEQ ID NO: 273380 - DNA, 25 bp, Probe Sequence
tggttatctcgttggggaggaaaag

SEQ ID NO: 273381 - DNA, 25 bp, Probe Sequence
tggctttttgtctggggctggaata

SEQ ID NO: 273382 - DNA, 25 bp, Probe Sequence
tggttttctttggaggtgctaagtg

SEQ ID NO: 273383 - DNA, 25 bp, Probe Sequence
ggcttattctttggagatgtctagg

SEQ ID NO: 273384 - DNA, 25 bp, Probe Sequence
ggctatattatattccatttaatgg

SEQ ID NO: 273385 - DNA, 25 bp, Probe Sequence
ggctaactatatttgctttttgcta

SEQ ID NO: 273386 - DNA, 25 bp, Probe Sequence
ggctactttattttggtatggctga

SEQ ID NO: 273387 - DNA, 25 bp, Probe Sequence
ggctccctcttaaagtgtagagtgt

SEQ ID NO: 273388 - DNA, 25 bp, Probe Sequence
ggctacatactttgcagagttcagg

SEQ ID NO: 273389 - DNA, 25 bp, Probe Sequence
ggcttcagatttaaggctgacagga

SEQ ID NO: 273390 - DNA, 25 bp, Probe Sequence
ggctctcagacgaagaggcgagaaa

SEQ ID NO: 273391 - DNA, 25 bp, Probe Sequence
ggctctgctgtcacaaggagagcag

SEQ ID NO: 273392 - DNA, 25 bp, Probe Sequence
tggccgtaccactggcatcgtgatg

SEQ ID NO: 273393 - DNA, 25 bp, Probe Sequence
ggctcttaccagtgaatcgtgctgt

SEQ ID NO: 273394 - DNA, 25 bp, Probe Sequence
ggctttgggcagaaggattgtgcag

SEQ ID NO: 273395 - DNA, 25 bp, Probe Sequence
ggctttggatggcactggtgtgcac

SEQ ID NO: 273396 - DNA, 25 bp, Probe Sequence
ggcgtggtggcagacatggttacct

SEQ ID NO: 273397 - DNA, 25 bp, Probe Sequence
ggctgtcggtcagacatcatttccc

SEQ ID NO: 273398 - DNA, 25 bp, Probe Sequence
ggcttcagagtagatatctctgcca

SEQ ID NO: 273399 - DNA, 25 bp, Probe Sequence
ggcttagatctcaaattcatcttga

SEQ ID NO: 273400 - DNA, 25 bp, Probe Sequence
ggcttatattcaaaacatcttagtc

SEQ ID NO: 273401 - DNA, 25 bp, Probe Sequence
ggctctaattcacagtgctctttct

SEQ ID NO: 273402 - DNA, 25 bp, Probe Sequence
ggctcgtcaatcacagtattttcaa

SEQ ID NO: 273403 - DNA, 25 bp, Probe Sequence
ggcttctcaccaagatggattttct

SEQ ID NO: 273404 - DNA, 25 bp, Probe Sequence
ggctttcatacaaatagactgttca

SEQ ID NO: 273405 - DNA, 25 bp, Probe Sequence
ggcttataagcgatcatgtttctcc

SEQ ID NO: 273406 - DNA, 25 bp, Probe Sequence
ggctttagcagctttgcatttcctg

SEQ ID NO: 273407 - DNA, 25 bp, Probe Sequence
ggcttagtcagcttagcatcatgtc

SEQ ID NO: 273408 - DNA, 25 bp, Probe Sequence
ggctctagctacttggactattcag

SEQ ID NO: 273409 - DNA, 25 bp, Probe Sequence
ggctaatgtcacttgctattaccag

SEQ ID NO: 273410 - DNA, 25 bp, Probe Sequence
ggctacatgtatgattggaacagca

SEQ ID NO: 273411 - DNA, 25 bp, Probe Sequence
ggctttttatgagtaacacacacca

SEQ ID NO: 273412 - DNA, 25 bp, Probe Sequence
ggctattgcttatgccactcacaga

SEQ ID NO: 273413 - DNA, 25 bp, Probe Sequence
ggctctatttgctgtcactcaagca

SEQ ID NO: 273414 - DNA, 25 bp, Probe Sequence
ggctcaaatatccagtgtctcaaca

SEQ ID NO: 273415 - DNA, 25 bp, Probe Sequence
ggctcagtcacacctttgctgaaac

SEQ ID NO: 273416 - DNA, 25 bp, Probe Sequence
ggctctgtcaacagcttgctgaagg

SEQ ID NO: 273417 - DNA, 25 bp, Probe Sequence
ggctttaaactgttgtgccagtgct

SEQ ID NO: 273418 - DNA, 25 bp, Probe Sequence
ggctttggcaactatggtgctcagg

SEQ ID NO: 273419 - DNA, 25 bp, Probe Sequence
ggctttggcaactatggtgctcagg

SEQ ID NO: 273420 - DNA, 25 bp, Probe Sequence
ggctattgagcatgcagattttgca

SEQ ID NO: 273421 - DNA, 25 bp, Probe Sequence
ggctttggaagagctcttctagccc

SEQ ID NO: 273422 - DNA, 25 bp, Probe Sequence
ggcttatggagccagtttcctatct

SEQ ID NO: 273423 - DNA, 25 bp, Probe Sequence
ggctctgggaggtatgtacccatct

SEQ ID NO: 273424 - DNA, 25 bp, Probe Sequence
ggccttgctgggtttagaccttatg

SEQ ID NO: 273425 - DNA, 25 bp, Probe Sequence
ggcttagctgaagttctaaccttcc

SEQ ID NO: 273426 - DNA, 25 bp, Probe Sequence
ggcttcccagagttctatggtcttc

SEQ ID NO: 273427 - DNA, 25 bp, Probe Sequence
ggctttctcaggacctagttgctac

SEQ ID NO: 273428 - DNA, 25 bp, Probe Sequence
ggctttctcaggacctggttgctac

SEQ ID NO: 273429 - DNA, 25 bp, Probe Sequence
ggcttactcagagatttgattgctc

SEQ ID NO: 273430 - DNA, 25 bp, Probe Sequence
ggcttcactgcaggtaatgcctttc

SEQ ID NO: 273431 - DNA, 25 bp, Probe Sequence
ggctcaacagaaataacctttacac

SEQ ID NO: 273432 - DNA, 25 bp, Probe Sequence
ggctaaagaatctcaatctcttgaa

SEQ ID NO: 273433 - DNA, 25 bp, Probe Sequence
ggctgataaagcactttctctctga

SEQ ID NO: 273434 - DNA, 25 bp, Probe Sequence
ggctatccatggactcttgtttatg

SEQ ID NO: 273435 - DNA, 25 bp, Probe Sequence
ggctttaggatgcctcagtgcttat

SEQ ID NO: 273436 - DNA, 25 bp, Probe Sequence
ggccttcaagacctcgtcttatttc

SEQ ID NO: 273437 - DNA, 25 bp, Probe Sequence
ggccttgaacaactggtttatctac

SEQ ID NO: 273438 - DNA, 25 bp, Probe Sequence
ggctcatgtggaaaaggacttcatt

SEQ ID NO: 273439 - DNA, 25 bp, Probe Sequence
ggctcatgtagataaggtaggcatt

SEQ ID NO: 273440 - DNA, 25 bp, Probe Sequence
ggctcctcagcctaagactatggct

SEQ ID NO: 273441 - DNA, 25 bp, Probe Sequence
ggctccagagcctgatagacattgt

SEQ ID NO: 273442 - DNA, 25 bp, Probe Sequence
ggcttcaggtgcccagagatcaggt

SEQ ID NO: 273443 - DNA, 25 bp, Probe Sequence
ggcttcacggtgaaaatgcactgct

SEQ ID NO: 273444 - DNA, 25 bp, Probe Sequence
ggctctagcgttcgaacgcactgat

SEQ ID NO: 273445 - DNA, 25 bp, Probe Sequence
ggctcaatctggtgcagagaaatgt

SEQ ID NO: 273446 - DNA, 25 bp, Probe Sequence
ggctcagtaatgtgcgagaaagtga

SEQ ID NO: 273447 - DNA, 25 bp, Probe Sequence
ggctcagcaacgtgaaataacgcaa

SEQ ID NO: 273448 - DNA, 25 bp, Probe Sequence
ggctcagagtcgaggaaccatctgc

SEQ ID NO: 273449 - DNA, 25 bp, Probe Sequence
ggctccgcacggagaacgagctgca

SEQ ID NO: 273450 - DNA, 25 bp, Probe Sequence
ggctcataactggaggaaggcacca

SEQ ID NO: 273451 - DNA, 25 bp, Probe Sequence
ggctgaaacagcccgaggacagccc

SEQ ID NO: 273452 - DNA, 25 bp, Probe Sequence
tgggaaaaacaaactgacactccaa

SEQ ID NO: 273453 - DNA, 25 bp, Probe Sequence
ggctgagtagaagatcctaccccaa

SEQ ID NO: 273454 - DNA, 25 bp, Probe Sequence
ggctgaacagactcagtctacctcc

SEQ ID NO: 273455 - DNA, 25 bp, Probe Sequence
ggctgaaatgactagcagataaaca

SEQ ID NO: 273456 - DNA, 25 bp, Probe Sequence
ggctgataacatgaccagacagaca

SEQ ID NO: 273457 - DNA, 25 bp, Probe Sequence
ggctgaaattccacacactgagcag

SEQ ID NO: 273458 - DNA, 25 bp, Probe Sequence
ggcttctttgacaagcacatctggc

SEQ ID NO: 273459 - DNA, 25 bp, Probe Sequence
ggctctgccttaaacacacattgca

SEQ ID NO: 273460 - DNA, 25 bp, Probe Sequence
ggctctacctcaagtacagcaggcc

SEQ ID NO: 273461 - DNA, 25 bp, Probe Sequence
ggcttcactggcaggaagcggccgc

SEQ ID NO: 273462 - DNA, 25 bp, Probe Sequence
ggctttctgagcaggaagcgagcag

SEQ ID NO: 273463 - DNA, 25 bp, Probe Sequence
ggctacactgacaggaagctcaagt

SEQ ID NO: 273464 - DNA, 25 bp, Probe Sequence
ggctacaatacaggtcagagacaat

SEQ ID NO: 273465 - DNA, 25 bp, Probe Sequence
ggctacaaatacgtgggaatgatcc

SEQ ID NO: 273466 - DNA, 25 bp, Probe Sequence
ggctccaaacaggcatgcgaggtgc

SEQ ID NO: 273467 - DNA, 25 bp, Probe Sequence
ggctttaatacgtgagcgtgctaaa

SEQ ID NO: 273468 - DNA, 25 bp, Probe Sequence
ggctttaatacgtgagcgtgctaaa

SEQ ID NO: 273469 - DNA, 25 bp, Probe Sequence
ggctttctgaactttgcgcgttaag

SEQ ID NO: 273470 - DNA, 25 bp, Probe Sequence
ggcttttaattttgccagctaagga

SEQ ID NO: 273471 - DNA, 25 bp, Probe Sequence
ggctttgaaataacaccaccagtgg

SEQ ID NO: 273472 - DNA, 25 bp, Probe Sequence
ggctttagttatacagcccaagctg

SEQ ID NO: 273473 - DNA, 25 bp, Probe Sequence
ggctttgaggtagcacgctgcaagt

SEQ ID NO: 273474 - DNA, 25 bp, Probe Sequence
ggctttgggtgatacctggggagtc

SEQ ID NO: 273475 - DNA, 25 bp, Probe Sequence
ggctggtcgggaatacctgggaagt

SEQ ID NO: 273476 - DNA, 25 bp, Probe Sequence
ggctggtgcccgagggcaggaacgt

SEQ ID NO: 273477 - DNA, 25 bp, Probe Sequence
ggctggtctaccaggtagttgggga

SEQ ID NO: 273478 - DNA, 25 bp, Probe Sequence
ggctgggttccaggttatggggaga

SEQ ID NO: 273479 - DNA, 25 bp, Probe Sequence
ggctgacctttccagttttgaggag

SEQ ID NO: 273480 - DNA, 25 bp, Probe Sequence
ggctacacaatcgaatggtttgagg

SEQ ID NO: 273481 - DNA, 25 bp, Probe Sequence
ggctacatctatgccaggggtgccc

SEQ ID NO: 273482 - DNA, 25 bp, Probe Sequence
ggctgacattctccagagtggtgac

SEQ ID NO: 273483 - DNA, 25 bp, Probe Sequence
ggcgaatgtcatacacatgagatgg

SEQ ID NO: 273484 - DNA, 25 bp, Probe Sequence
ggctcagatgtgtccaagcaagctg

SEQ ID NO: 273485 - DNA, 25 bp, Probe Sequence
ggctcagcagtgttgactgccgggc

SEQ ID NO: 273486 - DNA, 25 bp, Probe Sequence
ggctggagagattgacgccaaggtt

SEQ ID NO: 273487 - DNA, 25 bp, Probe Sequence
ggctgtggctgtcagcccataggtt

SEQ ID NO: 273488 - DNA, 25 bp, Probe Sequence
ggcgaggctgtggagaaaagggtga

SEQ ID NO: 273489 - DNA, 25 bp, Probe Sequence
ggctaagtgtggtacagggagttga

SEQ ID NO: 273490 - DNA, 25 bp, Probe Sequence
ggctacactgagcaccaggtggtct

SEQ ID NO: 273491 - DNA, 25 bp, Probe Sequence
ggctcacgggtgttcatgtgtgttc

SEQ ID NO: 273492 - DNA, 25 bp, Probe Sequence
ggctcaccgagtggtcagtagtcac

SEQ ID NO: 273493 - DNA, 25 bp, Probe Sequence
ggctcaccgagtggtcagtagtcac

SEQ ID NO: 273494 - DNA, 25 bp, Probe Sequence
ggctcaggcggagaagtactctcaa

SEQ ID NO: 273495 - DNA, 25 bp, Probe Sequence
ggctgggggagccacaaatcttcaa

SEQ ID NO: 273496 - DNA, 25 bp, Probe Sequence
ggctgggggagccacaaatcttcaa

SEQ ID NO: 273497 - DNA, 25 bp, Probe Sequence
ggctgggagggtagaatgccattcc

SEQ ID NO: 273498 - DNA, 25 bp, Probe Sequence
tggctgtgggggagaaggttctaca

SEQ ID NO: 273499 - DNA, 25 bp, Probe Sequence
ggctgtggggagtgtttttgtatca

SEQ ID NO: 273500 - DNA, 25 bp, Probe Sequence
ggctttggcaggtgattctcagttt

SEQ ID NO: 273501 - DNA, 25 bp, Probe Sequence
ggctgttggggtttctggagaatta

SEQ ID NO: 273502 - DNA, 25 bp, Probe Sequence
ggctttattgtttattgctggttta

SEQ ID NO: 273503 - DNA, 25 bp, Probe Sequence
ggctttattttagtctccttttcag

SEQ ID NO: 273504 - DNA, 25 bp, Probe Sequence
ggctgtttggttttccactattctc

SEQ ID NO: 273505 - DNA, 25 bp, Probe Sequence
ggctctttggtgttggagcctttcc

SEQ ID NO: 273506 - DNA, 25 bp, Probe Sequence
ggctcatgttggagcatggatgcct

SEQ ID NO: 273507 - DNA, 25 bp, Probe Sequence
ggctatgtggacagcaagagtcgtt

SEQ ID NO: 273508 - DNA, 25 bp, Probe Sequence
ggctagctgtactgacagcagtgag

SEQ ID NO: 273509 - DNA, 25 bp, Probe Sequence
ggcttactgagctgtccagtggagg

SEQ ID NO: 273510 - DNA, 25 bp, Probe Sequence
ggctcaacttgacgataatgtggat

SEQ ID NO: 273511 - DNA, 25 bp, Probe Sequence
ggctattttcgcaatatgtgaggat

SEQ ID NO: 273512 - DNA, 25 bp, Probe Sequence
ggctactaccgcctcatgatgagcc

SEQ ID NO: 273513 - DNA, 25 bp, Probe Sequence
ggctactaagtgactcatgggcgag

SEQ ID NO: 273514 - DNA, 25 bp, Probe Sequence
ggctgaaaagagccacattgtccag

SEQ ID NO: 273515 - DNA, 25 bp, Probe Sequence
ggctaaagatgacctctctggtgct

SEQ ID NO: 273516 - DNA, 25 bp, Probe Sequence
ggctaaagatgacctctctggtgct

SEQ ID NO: 273517 - DNA, 25 bp, Probe Sequence
ggctattcaagatctctggcagtgg

SEQ ID NO: 273518 - DNA, 25 bp, Probe Sequence
ggctttcaagagtctagggtcagag

SEQ ID NO: 273519 - DNA, 25 bp, Probe Sequence
ggctctacgagaagcggggtcaggc

SEQ ID NO: 273520 - DNA, 25 bp, Probe Sequence
ggctctgattggaggcttgaggccc

SEQ ID NO: 273521 - DNA, 25 bp, Probe Sequence
ggctaagcaagtaggttgaggtccc

SEQ ID NO: 273522 - DNA, 25 bp, Probe Sequence
ggctgaacagttcgggtggactgtc

SEQ ID NO: 273523 - DNA, 25 bp, Probe Sequence
ggctgaaatgcctgtatgtttcgtc

SEQ ID NO: 273524 - DNA, 25 bp, Probe Sequence
ggctgagaatcacggtatgtgtgtg

SEQ ID NO: 273525 - DNA, 25 bp, Probe Sequence
ggctaaaagggctagtgggattact

SEQ ID NO: 273526 - DNA, 25 bp, Probe Sequence
ggccacaaaccacagtagtattagc

SEQ ID NO: 273527 - DNA, 25 bp, Probe Sequence
ggctcgaagggccggtagttcgaga

SEQ ID NO: 273528 - DNA, 25 bp, Probe Sequence
ggctagaggtgtgtggggttctcca

SEQ ID NO: 273529 - DNA, 25 bp, Probe Sequence
ggctatgaggtggttgggcttgact

SEQ ID NO: 273530 - DNA, 25 bp, Probe Sequence
ggctcagctggggatggtgtttgac

SEQ ID NO: 273531 - DNA, 25 bp, Probe Sequence
ggctacatcagggtgcgattctatg

SEQ ID NO: 273532 - DNA, 25 bp, Probe Sequence
ggctgacacagcactcaatactatc

SEQ ID NO: 273533 - DNA, 25 bp, Probe Sequence
ggctgacagcacagtaacgtgcata

SEQ ID NO: 273534 - DNA, 25 bp, Probe Sequence
ggctatcacatttgtgtccgatgag

SEQ ID NO: 273535 - DNA, 25 bp, Probe Sequence
ggctcattcatttctctaacagcag

SEQ ID NO: 273536 - DNA, 25 bp, Probe Sequence
ggctcatagaaacctaatcagatgg

SEQ ID NO: 273537 - DNA, 25 bp, Probe Sequence
ggctcataatgagggctctaacttg

SEQ ID NO: 273538 - DNA, 25 bp, Probe Sequence
ggcttttagagacccagacttggtt

SEQ ID NO: 273539 - DNA, 25 bp, Probe Sequence
ggcttatttatctgttgcacttggt

SEQ ID NO: 273540 - DNA, 25 bp, Probe Sequence
ggcgtatccttctacttatttagat

SEQ ID NO: 273541 - DNA, 25 bp, Probe Sequence
ggcgtatcttccagttcaatgataa

SEQ ID NO: 273542 - DNA, 25 bp, Probe Sequence
ggctatttctccaatgtacaataaa

SEQ ID NO: 273543 - DNA, 25 bp, Probe Sequence
ggctttatgctcaaatgtcatagtc

SEQ ID NO: 273544 - DNA, 25 bp, Probe Sequence
ggcttttgtctcatctcatgattca

SEQ ID NO: 273545 - DNA, 25 bp, Probe Sequence
ggcttttgtgcattatctagatact

SEQ ID NO: 273546 - DNA, 25 bp, Probe Sequence
ggctgcttctgttaactgaagcctg

SEQ ID NO: 273547 - DNA, 25 bp, Probe Sequence
ggctttgctgttgttgggacatggc

SEQ ID NO: 273548 - DNA, 25 bp, Probe Sequence
ggctttctcttaattggcagatgtt

SEQ ID NO: 273549 - DNA, 25 bp, Probe Sequence
ggctcaagatcaatctttacagatt

SEQ ID NO: 273550 - DNA, 25 bp, Probe Sequence
ggctcaaatgaacttctaaaatcac

SEQ ID NO: 273551 - DNA, 25 bp, Probe Sequence
ggctcagggtaggtgctcagaaaat

SEQ ID NO: 273552 - DNA, 25 bp, Probe Sequence
ggctcaaagctagtatccagataaa

SEQ ID NO: 273553 - DNA, 25 bp, Probe Sequence
ggctcataacatagtatcctcattg

SEQ ID NO: 273554 - DNA, 25 bp, Probe Sequence
ggctcttagcagcttccagattgac

SEQ ID NO: 273555 - DNA, 25 bp, Probe Sequence
ggcgatgtcagcggatgtcacgagc

SEQ ID NO: 273556 - DNA, 25 bp, Probe Sequence
ggctgctgccaagtactacgatgcc

SEQ ID NO: 273557 - DNA, 25 bp, Probe Sequence
ggctggctcaagaagcacgcgtact

SEQ ID NO: 273558 - DNA, 25 bp, Probe Sequence
ggctgctgcatatgaatacatggct

SEQ ID NO: 273559 - DNA, 25 bp, Probe Sequence
ggctctgatgccttgaattggtttt

SEQ ID NO: 273560 - DNA, 25 bp, Probe Sequence
ggctctctctgccagaattgtgtgc

SEQ ID NO: 273561 - DNA, 25 bp, Probe Sequence
ggctgccacatgtgattctgatgga

SEQ ID NO: 273562 - DNA, 25 bp, Probe Sequence
ggctggactcatcgatggtgcctac

SEQ ID NO: 273563 - DNA, 25 bp, Probe Sequence
ggctgggcatcaatgacatggtcac

SEQ ID NO: 273564 - DNA, 25 bp, Probe Sequence
ggctgtgcgctaagtggcagacgct

SEQ ID NO: 273565 - DNA, 25 bp, Probe Sequence
ggctgatgctgtacaggtacaggct

SEQ ID NO: 273566 - DNA, 25 bp, Probe Sequence
ggctgttgtctcggaaaggtcacta

SEQ ID NO: 273567 - DNA, 25 bp, Probe Sequence
ggctttgagtctggcgtgaggcgcc

SEQ ID NO: 273568 - DNA, 25 bp, Probe Sequence
ggctcaggagcccaggtgggcggac

SEQ ID NO: 273569 - DNA, 25 bp, Probe Sequence
ggctgagggcgttaggggctgtgcc

SEQ ID NO: 273570 - DNA, 25 bp, Probe Sequence
ggctgacaccgttggggatgatgac

SEQ ID NO: 273571 - DNA, 25 bp, Probe Sequence
ggcggagcttgcagtgagctgagat

SEQ ID NO: 273572 - DNA, 25 bp, Probe Sequence
ggctgcagcctactcagtggtcagc

SEQ ID NO: 273573 - DNA, 25 bp, Probe Sequence
ggctcaggcagcttcagaggtgacc

SEQ ID NO: 273574 - DNA, 25 bp, Probe Sequence
ggctcgccgcaggagaaggattcgc

SEQ ID NO: 273575 - DNA, 25 bp, Probe Sequence
ggctcgacgcattggggatgttgtc

SEQ ID NO: 273576 - DNA, 25 bp, Probe Sequence
ggctgtgacacaatagggactctat

SEQ ID NO: 273577 - DNA, 25 bp, Probe Sequence
ggctagatctcctagctgagactta

SEQ ID NO: 273578 - DNA, 25 bp, Probe Sequence
ggctgaagtgcagtggcgcagtctt

SEQ ID NO: 273579 - DNA, 25 bp, Probe Sequence
ggctggagtgcagtggtgcagtctt

SEQ ID NO: 273580 - DNA, 25 bp, Probe Sequence
ggctcatgctgggattgtgcagtgc

SEQ ID NO: 273581 - DNA, 25 bp, Probe Sequence
ggctctctggattagtgcgggtata

SEQ ID NO: 273582 - DNA, 25 bp, Probe Sequence
ggctgtcaggtttgatctcagtgta

SEQ ID NO: 273583 - DNA, 25 bp, Probe Sequence
ggctcacaggaaagtgtctgcagta

SEQ ID NO: 273584 - DNA, 25 bp, Probe Sequence
ggctaagatgcacagtgtctgctct

SEQ ID NO: 273585 - DNA, 25 bp, Probe Sequence
ggctgcattgagctatggtcgtgcc

SEQ ID NO: 273586 - DNA, 25 bp, Probe Sequence
ggctcagaagcgagggctgtgcaca

SEQ ID NO: 273587 - DNA, 25 bp, Probe Sequence
ggctcaatgaccaggtgatgaacat

SEQ ID NO: 273588 - DNA, 25 bp, Probe Sequence
ggctgaggcaccagggctaagcaat

SEQ ID NO: 273589 - DNA, 25 bp, Probe Sequence
ggctcagtgcacgtttggcaatagt

SEQ ID NO: 273590 - DNA, 25 bp, Probe Sequence
ggctatggacgtctccaatcagctg

SEQ ID NO: 273591 - DNA, 25 bp, Probe Sequence
ggctcacgcctgtaatcccagcact

SEQ ID NO: 273592 - DNA, 25 bp, Probe Sequence
ggctccccagaattcctagactggg

SEQ ID NO: 273593 - DNA, 25 bp, Probe Sequence
ggctatcccagagccgtgaactttg

SEQ ID NO: 273594 - DNA, 25 bp, Probe Sequence
ggctgtaccatatagctgtcaactt

SEQ ID NO: 273595 - DNA, 25 bp, Probe Sequence
ggctgcatcaccaagttggagacct

SEQ ID NO: 273596 - DNA, 25 bp, Probe Sequence
ggctgcagagccaaaagtgaaccga

SEQ ID NO: 273597 - DNA, 25 bp, Probe Sequence
ggctgcagaacatggaggtcaccga

SEQ ID NO: 273598 - DNA, 25 bp, Probe Sequence
ggctcagtgacacggagacatcctc

SEQ ID NO: 273599 - DNA, 25 bp, Probe Sequence
ggctctgataaccatgaggcttctc

SEQ ID NO: 273600 - DNA, 25 bp, Probe Sequence
ggctctgatgattccagagcctgta

SEQ ID NO: 273601 - DNA, 25 bp, Probe Sequence
ggctcaatgtctcatacctgtaatc

SEQ ID NO: 273602 - DNA, 25 bp, Probe Sequence
ggctctagactgttactcttaagct

SEQ ID NO: 273603 - DNA, 25 bp, Probe Sequence
ggctcaagggagtcaccttcaatgt

SEQ ID NO: 273604 - DNA, 25 bp, Probe Sequence
ggctatacggagacatctcttcaag

SEQ ID NO: 273605 - DNA, 25 bp, Probe Sequence
ggctttgcaagggctctgtgacaag

SEQ ID NO: 273606 - DNA, 25 bp, Probe Sequence
ggctttgctcgagctgtgcggaacc

SEQ ID NO: 273607 - DNA, 25 bp, Probe Sequence
ggctttgtggcatctctggaagagc

SEQ ID NO: 273608 - DNA, 25 bp, Probe Sequence
ggctatggctctgattctagaagac

SEQ ID NO: 273609 - DNA, 25 bp, Probe Sequence
ggctatggctgtgcccagaagaaca

SEQ ID NO: 273610 - DNA, 25 bp, Probe Sequence
ggctagccatgtgcagaggattgaa

SEQ ID NO: 273611 - DNA, 25 bp, Probe Sequence
ggctgcacaagagccttgattgaag

SEQ ID NO: 273612 - DNA, 25 bp, Probe Sequence
ggcgcagccagtgtctttggaaaca

SEQ ID NO: 273613 - DNA, 25 bp, Probe Sequence
ggctattagtgctacatttggtcaa

SEQ ID NO: 273614 - DNA, 25 bp, Probe Sequence
ggctttcatgtgtgtacttgacaac

SEQ ID NO: 273615 - DNA, 25 bp, Probe Sequence
ggctataataatttacattgccacc

SEQ ID NO: 273616 - DNA, 25 bp, Probe Sequence
ggctttcacaaattaagtgccaggc

SEQ ID NO: 273617 - DNA, 25 bp, Probe Sequence
ggctctaatcaccaaaagcagctga

SEQ ID NO: 273618 - DNA, 25 bp, Probe Sequence
ggctaccataccaagaagagagggc

SEQ ID NO: 273619 - DNA, 25 bp, Probe Sequence
ggctgaccaggcgacaggtaggggc

SEQ ID NO: 273620 - DNA, 25 bp, Probe Sequence
ggctcccaaggaggtgtagcaggtg

SEQ ID NO: 273621 - DNA, 25 bp, Probe Sequence
ggctcccacaggatcagaggctggg

SEQ ID NO: 273622 - DNA, 25 bp, Probe Sequence
ggctcactatttttagagggggaca

SEQ ID NO: 273623 - DNA, 25 bp, Probe Sequence
ggcccattcgtcctggaaagggact

SEQ ID NO: 273624 - DNA, 25 bp, Probe Sequence
ggcccattcgtcctggaaagggact

SEQ ID NO: 273625 - DNA, 25 bp, Probe Sequence
ggctcttgagcctctgggaatggga

SEQ ID NO: 273626 - DNA, 25 bp, Probe Sequence
ggctatcatgactaagtgctagaat

SEQ ID NO: 273627 - DNA, 25 bp, Probe Sequence
ggctgatgatggtgcttatgagaat

SEQ ID NO: 273628 - DNA, 25 bp, Probe Sequence
ggctctacagcggctgaatgaggaa

SEQ ID NO: 273629 - DNA, 25 bp, Probe Sequence
ggctctccgcgtgagatgatcagag

SEQ ID NO: 273630 - DNA, 25 bp, Probe Sequence
ggctctacagcgttgcagaacatga

SEQ ID NO: 273631 - DNA, 25 bp, Probe Sequence
ggctgctaactacacagattgggag

SEQ ID NO: 273632 - DNA, 25 bp, Probe Sequence
ggctataccacagaacattggctgg

SEQ ID NO: 273633 - DNA, 25 bp, Probe Sequence
ggctaaccacagcagagggcagatg

SEQ ID NO: 273634 - DNA, 25 bp, Probe Sequence
ggctacagccctgcagaagctggag

SEQ ID NO: 273635 - DNA, 25 bp, Probe Sequence
ggctacagccctgcagaagctggag

SEQ ID NO: 273636 - DNA, 25 bp, Probe Sequence
ggctgacgccttgagtcgagggcat

SEQ ID NO: 273637 - DNA, 25 bp, Probe Sequence
ggcgattcctcagggatctagaact

SEQ ID NO: 273638 - DNA, 25 bp, Probe Sequence
ggctgaatcctcaggattgagtcag

SEQ ID NO: 273639 - DNA, 25 bp, Probe Sequence
ggctgtgacctcggtgaaagccgac

SEQ ID NO: 273640 - DNA, 25 bp, Probe Sequence
ggctgtgacctcggtgaaagccgac

SEQ ID NO: 273641 - DNA, 25 bp, Probe Sequence
ggcgtggcctctgatgaatgcacac

SEQ ID NO: 273642 - DNA, 25 bp, Probe Sequence
ggctcagagctttgtcacttgccac

SEQ ID NO: 273643 - DNA, 25 bp, Probe Sequence
ggctgcgacttattgcagttgccgc

SEQ ID NO: 273644 - DNA, 25 bp, Probe Sequence
ggctgcggtgagccgagattgcgcc

SEQ ID NO: 273645 - DNA, 25 bp, Probe Sequence
ggctgagatgctggacaaatcgccc

SEQ ID NO: 273646 - DNA, 25 bp, Probe Sequence
ggctgaatcacggaatgcacacgac

SEQ ID NO: 273647 - DNA, 25 bp, Probe Sequence
ggctgacacgcgtaagctagggcct

SEQ ID NO: 273648 - DNA, 25 bp, Probe Sequence
ggctacttggtagtgtcagcgggca

SEQ ID NO: 273649 - DNA, 25 bp, Probe Sequence
ggctcctcggattgaaagtgtggag

SEQ ID NO: 273650 - DNA, 25 bp, Probe Sequence
ggctctctcccataagactgtgagc

SEQ ID NO: 273651 - DNA, 25 bp, Probe Sequence
ggctccttggcagcaatggctgtat

SEQ ID NO: 273652 - DNA, 25 bp, Probe Sequence
ggctcactcagacacattgggacaa

SEQ ID NO: 273653 - DNA, 25 bp, Probe Sequence
ggctcccagaggtttagcaacaatc

SEQ ID NO: 273654 - DNA, 25 bp, Probe Sequence
ggctgcttaggggcttaaaagctcc

SEQ ID NO: 273655 - DNA, 25 bp, Probe Sequence
tggctgtttgggacctgaagggcgt

SEQ ID NO: 273656 - DNA, 25 bp, Probe Sequence
ggctactataggtccagaagtcctt

SEQ ID NO: 273657 - DNA, 25 bp, Probe Sequence
ggctcactggatggaccagcacttc

SEQ ID NO: 273658 - DNA, 25 bp, Probe Sequence
ggctgcactggtggaagaagcgatc

SEQ ID NO: 273659 - DNA, 25 bp, Probe Sequence
ggctgcgcagtgaagaaaatgagta

SEQ ID NO: 273660 - DNA, 25 bp, Probe Sequence
ggctggcctacatcatcttggtagg

SEQ ID NO: 273661 - DNA, 25 bp, Probe Sequence
ggctggttgcaaatcctggaatagg

SEQ ID NO: 273662 - DNA, 25 bp, Probe Sequence
tggtgggttttcaggcaatagagga

SEQ ID NO: 273663 - DNA, 25 bp, Probe Sequence
tggctttgttgttgggctaaaaggt

SEQ ID NO: 273664 - DNA, 25 bp, Probe Sequence
ggccttgtggctggggccaactatg

SEQ ID NO: 273665 - DNA, 25 bp, Probe Sequence
ggccttgtggctggggccaactatg

SEQ ID NO: 273666 - DNA, 25 bp, Probe Sequence
ggctttggcagagaacgcaactcag

SEQ ID NO: 273667 - DNA, 25 bp, Probe Sequence
ggctttggcagacagtaacgtcagt

SEQ ID NO: 273668 - DNA, 25 bp, Probe Sequence
tgtgtttggccacatggaaccaggc

SEQ ID NO: 273669 - DNA, 25 bp, Probe Sequence
tgtcttaagcaacagccccaaatgc

SEQ ID NO: 273670 - DNA, 25 bp, Probe Sequence
ggctatgaaaagggccaaccagatg

SEQ ID NO: 273671 - DNA, 25 bp, Probe Sequence
ggctacaaagagggcaaaccgtgca

SEQ ID NO: 273672 - DNA, 25 bp, Probe Sequence
ggctaacatggtgaaaccctgtctg

SEQ ID NO: 273673 - DNA, 25 bp, Probe Sequence
ggctaatgtggcataaaccctgtct

SEQ ID NO: 273674 - DNA, 25 bp, Probe Sequence
ggctacttgtataataacccttgtc

SEQ ID NO: 273675 - DNA, 25 bp, Probe Sequence
ggctacatctgtgtatactgtcctg

SEQ ID NO: 273676 - DNA, 25 bp, Probe Sequence
ggctcacctgctgttgagccttgtg

SEQ ID NO: 273677 - DNA, 25 bp, Probe Sequence
ggctgccacttggttatgttgtgtg

SEQ ID NO: 273678 - DNA, 25 bp, Probe Sequence
ggctgtgccgtgagttttgctggca

SEQ ID NO: 273679 - DNA, 25 bp, Probe Sequence
ggctagcaaggaagattcgttcaga

SEQ ID NO: 273680 - DNA, 25 bp, Probe Sequence
ggctgaaggaatatcatcgtctcca

SEQ ID NO: 273681 - DNA, 25 bp, Probe Sequence
ggctgaaggaatcattcacgacaca

SEQ ID NO: 273682 - DNA, 25 bp, Probe Sequence
ggctaactgattacatttatatcca

SEQ ID NO: 273683 - DNA, 25 bp, Probe Sequence
ggctaactgattacatttatatcca

SEQ ID NO: 273684 - DNA, 25 bp, Probe Sequence
ggctagatgatatttgcaacctgtc

SEQ ID NO: 273685 - DNA, 25 bp, Probe Sequence
ggctcaggaagatgctcagcgtctc

SEQ ID NO: 273686 - DNA, 25 bp, Probe Sequence
ggctgaagaaagcctaggtctctta

SEQ ID NO: 273687 - DNA, 25 bp, Probe Sequence
ggcgaatgacctctaagtatgttga

SEQ ID NO: 273688 - DNA, 25 bp, Probe Sequence
ggctgcaagaccaaggaagttatag

SEQ ID NO: 273689 - DNA, 25 bp, Probe Sequence
ggctgaagtccgacgtctttgatgc

SEQ ID NO: 273690 - DNA, 25 bp, Probe Sequence
ggctgtcagcccataggtttgtcag

SEQ ID NO: 273691 - DNA, 25 bp, Probe Sequence
ggctgtgccttcataggtcatctag

SEQ ID NO: 273692 - DNA, 25 bp, Probe Sequence
ggctgatggttgagcagtttctgaa

SEQ ID NO: 273693 - DNA, 25 bp, Probe Sequence
ggctcacatgttcacagtgcagctc

SEQ ID NO: 273694 - DNA, 25 bp, Probe Sequence
ggctcacatgttcacagtgcagctc

SEQ ID NO: 273695 - DNA, 25 bp, Probe Sequence
ggctcaagtaccaggcacctgacat

SEQ ID NO: 273696 - DNA, 25 bp, Probe Sequence
ggctcgaattcctgagcagcggaca

SEQ ID NO: 273697 - DNA, 25 bp, Probe Sequence
ggctactagaactgaccaggacagc

SEQ ID NO: 273698 - DNA, 25 bp, Probe Sequence
ggctcagtagaagcagacggtgtgc

SEQ ID NO: 273699 - DNA, 25 bp, Probe Sequence
ggctcattaggggagatgggggtct

SEQ ID NO: 273700 - DNA, 25 bp, Probe Sequence
tggcatctgcaatggggacgggggc

SEQ ID NO: 273701 - DNA, 25 bp, Probe Sequence
tggccgagaagctggactgggcccg

SEQ ID NO: 273702 - DNA, 25 bp, Probe Sequence
ggcgacgatgaccggactgtgtgcc

SEQ ID NO: 273703 - DNA, 25 bp, Probe Sequence
ggctgactatgtgccgagcgatcag

SEQ ID NO: 273704 - DNA, 25 bp, Probe Sequence
ggctactatgatgcctatctgaagc

SEQ ID NO: 273705 - DNA, 25 bp, Probe Sequence
ggctactgtgaggctcttctaacac

SEQ ID NO: 273706 - DNA, 25 bp, Probe Sequence
ggctagcatatgggcactttacaga

SEQ ID NO: 273707 - DNA, 25 bp, Probe Sequence
ggctgaatatcagtgctgtttgtaa

SEQ ID NO: 273708 - DNA, 25 bp, Probe Sequence
ggctgaacagcagattactgacaga

SEQ ID NO: 273709 - DNA, 25 bp, Probe Sequence
ggctgacacgcgagattctgagaga

SEQ ID NO: 273710 - DNA, 25 bp, Probe Sequence
ggctacaggacagcatcatcagtga

SEQ ID NO: 273711 - DNA, 25 bp, Probe Sequence
ggctgtcagagccaggctctgcctg

SEQ ID NO: 273712 - DNA, 25 bp, Probe Sequence
ggctgttagctaacttgcacaggga

SEQ ID NO: 273713 - DNA, 25 bp, Probe Sequence
tggctgtcgggtattcatcgggaga

SEQ ID NO: 273714 - DNA, 25 bp, Probe Sequence
ggctggacacagatttctcgggagc

SEQ ID NO: 273715 - DNA, 25 bp, Probe Sequence
ggctgatggaagatggtccgtgccc

SEQ ID NO: 273716 - DNA, 25 bp, Probe Sequence
ggctgaggaagacagatctttctgc

SEQ ID NO: 273717 - DNA, 25 bp, Probe Sequence
ggctgagaacgggaagcttgtcatc

SEQ ID NO: 273718 - DNA, 25 bp, Probe Sequence
ggctgggactgggcacagtggttca

SEQ ID NO: 273719 - DNA, 25 bp, Probe Sequence
ggcggagaggtggaccgcgtggact

SEQ ID NO: 273720 - DNA, 25 bp, Probe Sequence
ggctggtaagtgtcagccctaccct

SEQ ID NO: 273721 - DNA, 25 bp, Probe Sequence
ggcggcaaggttacctgtagctcct

SEQ ID NO: 273722 - DNA, 25 bp, Probe Sequence
ggctccaaaatcatccgaggtcctg

SEQ ID NO: 273723 - DNA, 25 bp, Probe Sequence
ggctacatagaaaaatccacccctt

SEQ ID NO: 273724 - DNA, 25 bp, Probe Sequence
ggctccagaacgaagatccacactt

SEQ ID NO: 273725 - DNA, 25 bp, Probe Sequence
ggctcaagtacacacatgaccagct

SEQ ID NO: 273726 - DNA, 25 bp, Probe Sequence
ggctaattgacagtatttctcagca

SEQ ID NO: 273727 - DNA, 25 bp, Probe Sequence
ggctacatgtacttttaccgcagga

SEQ ID NO: 273728 - DNA, 25 bp, Probe Sequence
ggctcaaggccgattcacaggagga

SEQ ID NO: 273729 - DNA, 25 bp, Probe Sequence
ggctgacagacctcccggaaggagg

SEQ ID NO: 273730 - DNA, 25 bp, Probe Sequence
ggctgaagaacaaccgcaggtcgaa

SEQ ID NO: 273731 - DNA, 25 bp, Probe Sequence
ggctaaaacaattctgagaggaaat

SEQ ID NO: 273732 - DNA, 25 bp, Probe Sequence
ggctgaagttcaattcggtaaaaat

SEQ ID NO: 273733 - DNA, 25 bp, Probe Sequence
ggctgaaggatgatgtcccggaaga

SEQ ID NO: 273734 - DNA, 25 bp, Probe Sequence
ggccaaggaatttggcctgtaaaat

SEQ ID NO: 273735 - DNA, 25 bp, Probe Sequence
ggctccaagttcaaggaggtcaaga

SEQ ID NO: 273736 - DNA, 25 bp, Probe Sequence
ggcgaaggtagcagtaagccaagat

SEQ ID NO: 273737 - DNA, 25 bp, Probe Sequence
ggcggaggttgcggttagccgagat

SEQ ID NO: 273738 - DNA, 25 bp, Probe Sequence
ggctggaggttgaccagttcctgga

SEQ ID NO: 273739 - DNA, 25 bp, Probe Sequence
ggctaaactagcagatgttcctgga

SEQ ID NO: 273740 - DNA, 25 bp, Probe Sequence
ggctagaagctaggggtcccagtga

SEQ ID NO: 273741 - DNA, 25 bp, Probe Sequence
ggcgcaagagtagcggtccaagcct

SEQ ID NO: 273742 - DNA, 25 bp, Probe Sequence
ggctgccaggaaacgatttgggcct

SEQ ID NO: 273743 - DNA, 25 bp, Probe Sequence
ggctggatggaaactacttgaagcc

SEQ ID NO: 273744 - DNA, 25 bp, Probe Sequence
ggcgtaggacgaccatcttgaagat

SEQ ID NO: 273745 - DNA, 25 bp, Probe Sequence
ggcgtagtagtgcctacctatagtc

SEQ ID NO: 273746 - DNA, 25 bp, Probe Sequence
ggctgctagtggagtgaccttaccc

SEQ ID NO: 273747 - DNA, 25 bp, Probe Sequence
ggctaagtgtaaagcctcctaccct

SEQ ID NO: 273748 - DNA, 25 bp, Probe Sequence
ggctaagtgtagaagctcatgcctg

SEQ ID NO: 273749 - DNA, 25 bp, Probe Sequence
ggctcgagggagtgacagctctgtg

SEQ ID NO: 273750 - DNA, 25 bp, Probe Sequence
ggctccgaggactgcacagtcatgg

SEQ ID NO: 273751 - DNA, 25 bp, Probe Sequence
ggctcttatccctgcacatgtagag

SEQ ID NO: 273752 - DNA, 25 bp, Probe Sequence
ggctgttttctctgaatgtcttggt

SEQ ID NO: 273753 - DNA, 25 bp, Probe Sequence
ggctgtttttcctaattttggcatg

SEQ ID NO: 273754 - DNA, 25 bp, Probe Sequence
tggaatttgttccaacttaatggct

SEQ ID NO: 273755 - DNA, 25 bp, Probe Sequence
tggagttaggtcctcacttggggga

SEQ ID NO: 273756 - DNA, 25 bp, Probe Sequence
ggcgttggagaggaagttgggggag

SEQ ID NO: 273757 - DNA, 25 bp, Probe Sequence
ggcgttgatacggttgactccggga

SEQ ID NO: 273758 - DNA, 25 bp, Probe Sequence
ggcgtggatacggttgactcacggg

SEQ ID NO: 273759 - DNA, 25 bp, Probe Sequence
ggcgtggatacgggtttgactcacg

SEQ ID NO: 273760 - DNA, 25 bp, Probe Sequence
ggctgtggatagcggtttgactcac

SEQ ID NO: 273761 - DNA, 25 bp, Probe Sequence
ggctggagaaggggctgcttaaacc

SEQ ID NO: 273762 - DNA, 25 bp, Probe Sequence
ggctggtaatactgtctgtgaaata

SEQ ID NO: 273763 - DNA, 25 bp, Probe Sequence
ggctggctattgagaactggaaaga

SEQ ID NO: 273764 - DNA, 25 bp, Probe Sequence
ggctggctggatcgggtaggtaaga

SEQ ID NO: 273765 - DNA, 25 bp, Probe Sequence
ggctgtgggggtctgagtctagagc

SEQ ID NO: 273766 - DNA, 25 bp, Probe Sequence
ggctgggagggacttcagttagcat

SEQ ID NO: 273767 - DNA, 25 bp, Probe Sequence
ggctctgtgggctgtcatagttaat

SEQ ID NO: 273768 - DNA, 25 bp, Probe Sequence
ggctgtgactggtgacggtgtgaat

SEQ ID NO: 273769 - DNA, 25 bp, Probe Sequence
ggcgtgttggtgtgcgcctgtaatc

SEQ ID NO: 273770 - DNA, 25 bp, Probe Sequence
ggctggttcagggggtcagttatca

SEQ ID NO: 273771 - DNA, 25 bp, Probe Sequence
ttcggtgagcggtggtggtttattc

SEQ ID NO: 273772 - DNA, 25 bp, Probe Sequence
tgtctggtccttcggggtgttaatg

SEQ ID NO: 273773 - DNA, 25 bp, Probe Sequence
tggtttacttgccggaggtgctaca

SEQ ID NO: 273774 - DNA, 25 bp, Probe Sequence
ggctctgtccattgaaggggtctga

SEQ ID NO: 273775 - DNA, 25 bp, Probe Sequence
ggctctgtatgtcctcaggggactg

SEQ ID NO: 273776 - DNA, 25 bp, Probe Sequence
ggctgcgtgtagagatggaggactg

SEQ ID NO: 273777 - DNA, 25 bp, Probe Sequence
ggctccgaggtggagctgagacact

SEQ ID NO: 273778 - DNA, 25 bp, Probe Sequence
ggctgcgcaagtacaactacacgct

SEQ ID NO: 273779 - DNA, 25 bp, Probe Sequence
ggctcagcaagtgccatgctacagc

SEQ ID NO: 273780 - DNA, 25 bp, Probe Sequence
ggctcagaagagcctctgtccagcc

SEQ ID NO: 273781 - DNA, 25 bp, Probe Sequence
ggctgctgaagcccacggcctgcac

SEQ ID NO: 273782 - DNA, 25 bp, Probe Sequence
ggctgtgagcagacccggacagcca

SEQ ID NO: 273783 - DNA, 25 bp, Probe Sequence
ggctgagagcgagctccgtagtgcc

SEQ ID NO: 273784 - DNA, 25 bp, Probe Sequence
ggctgaggcagagctgcttgaaccc

SEQ ID NO: 273785 - DNA, 25 bp, Probe Sequence
ggctgggagcatgtgtgtgcactgt

SEQ ID NO: 273786 - DNA, 25 bp, Probe Sequence
ggctgaagagcattcatcgtgaggg

SEQ ID NO: 273787 - DNA, 25 bp, Probe Sequence
ggctcatgtagcctcactggagggc

SEQ ID NO: 273788 - DNA, 25 bp, Probe Sequence
ggctcagataaggcagctaagggca

SEQ ID NO: 273789 - DNA, 25 bp, Probe Sequence
ggctgagcaactgggctgtagggca

SEQ ID NO: 273790 - DNA, 25 bp, Probe Sequence
ggctccacactggcagaggagtggg

SEQ ID NO: 273791 - DNA, 25 bp, Probe Sequence
ggctctccaggtggggagggcacag

SEQ ID NO: 273792 - DNA, 25 bp, Probe Sequence
ggctctccaggtggggagggcacag

SEQ ID NO: 273793 - DNA, 25 bp, Probe Sequence
ggctctccaggtggggagggcacag

SEQ ID NO: 273794 - DNA, 25 bp, Probe Sequence
ggctcttagcagtgggcagtgagcc

SEQ ID NO: 273795 - DNA, 25 bp, Probe Sequence
ggctgcatctgcaaaggggcatcgg

SEQ ID NO: 273796 - DNA, 25 bp, Probe Sequence
ggctgcatctgttggtgtccaaggc

SEQ ID NO: 273797 - DNA, 25 bp, Probe Sequence
ggctctgctgtgtagatgccacaac

SEQ ID NO: 273798 - DNA, 25 bp, Probe Sequence
ggctgctgctattagagcccatcct

SEQ ID NO: 273799 - DNA, 25 bp, Probe Sequence
ggctgtgactgatgaccacatccgg

SEQ ID NO: 273800 - DNA, 25 bp, Probe Sequence
ggctggtaggcaaagccatccagaa

SEQ ID NO: 273801 - DNA, 25 bp, Probe Sequence
ggctcttgggaaggcagcatctcac

SEQ ID NO: 273802 - DNA, 25 bp, Probe Sequence
ggctcttggacacacagtgtcttcc

SEQ ID NO: 273803 - DNA, 25 bp, Probe Sequence
ggcgttggacaggcttcagtcattg

SEQ ID NO: 273804 - DNA, 25 bp, Probe Sequence
ggctgatttggaagtctattcttgc

SEQ ID NO: 273805 - DNA, 25 bp, Probe Sequence
ggctgtaaggcattttcatctttcc

SEQ ID NO: 273806 - DNA, 25 bp, Probe Sequence
ggctggggagcacttaattcttccc

SEQ ID NO: 273807 - DNA, 25 bp, Probe Sequence
ggctggggagcacttaattcttccc

SEQ ID NO: 273808 - DNA, 25 bp, Probe Sequence
ggctggttgctggttagattttctg

SEQ ID NO: 273809 - DNA, 25 bp, Probe Sequence
ggctcagttgtgtttgtatttcctt

SEQ ID NO: 273810 - DNA, 25 bp, Probe Sequence
ggctcatgaatttttctgtttgtca

SEQ ID NO: 273811 - DNA, 25 bp, Probe Sequence
ggctcagattattcttactccttac

SEQ ID NO: 273812 - DNA, 25 bp, Probe Sequence
ggctaattatgtcaacatgctttat

SEQ ID NO: 273813 - DNA, 25 bp, Probe Sequence
ggctgtattaatcacgcgatgttga

SEQ ID NO: 273814 - DNA, 25 bp, Probe Sequence
ggctgtgatatattttcctagtggt

SEQ ID NO: 273815 - DNA, 25 bp, Probe Sequence
ggcgaaatttgagtccatggctgag

SEQ ID NO: 273816 - DNA, 25 bp, Probe Sequence
ggctgtatccatggactcctggaag

SEQ ID NO: 273817 - DNA, 25 bp, Probe Sequence
ggctgtggccgggtgacggcagagt

SEQ ID NO: 273818 - DNA, 25 bp, Probe Sequence
ggctgggcaggtggtgacgatctgg

SEQ ID NO: 273819 - DNA, 25 bp, Probe Sequence
ggctgagctgagcctcgtattgtcc

SEQ ID NO: 273820 - DNA, 25 bp, Probe Sequence
ggcgacgtggacaataatgtgcacc

SEQ ID NO: 273821 - DNA, 25 bp, Probe Sequence
ggcgagctgggattaaggtcaccgt

SEQ ID NO: 273822 - DNA, 25 bp, Probe Sequence
tggcagagtaggcacgggaaccggc

SEQ ID NO: 273823 - DNA, 25 bp, Probe Sequence
ggcggtggtcgagaccagaacggcc

SEQ ID NO: 273824 - DNA, 25 bp, Probe Sequence
ggcggaggttgagcaactacactgc

SEQ ID NO: 273825 - DNA, 25 bp, Probe Sequence
ggctggaggaaaacagtacaactgt

SEQ ID NO: 273826 - DNA, 25 bp, Probe Sequence
ggctggactaacagtggctcgactg

SEQ ID NO: 273827 - DNA, 25 bp, Probe Sequence
ggcggacattcagactgagcgtgcc

SEQ ID NO: 273828 - DNA, 25 bp, Probe Sequence
ggctggtcttcaggcttgaagtcca

SEQ ID NO: 273829 - DNA, 25 bp, Probe Sequence
ggctggttatcaggcagtgaaacgt

SEQ ID NO: 273830 - DNA, 25 bp, Probe Sequence
ggctctcattataagcaatacaaag

SEQ ID NO: 273831 - DNA, 25 bp, Probe Sequence
ggctctcgtctggcggaacaatgag

SEQ ID NO: 273832 - DNA, 25 bp, Probe Sequence
ggctccctcatcaacgaacagtggg

SEQ ID NO: 273833 - DNA, 25 bp, Probe Sequence
ggctcaaattcttcgaaagtggttg

SEQ ID NO: 273834 - DNA, 25 bp, Probe Sequence
ggctgaaatttctgaaagcaagcat

SEQ ID NO: 273835 - DNA, 25 bp, Probe Sequence
ggctgaaagtctctgaagacctgat

SEQ ID NO: 273836 - DNA, 25 bp, Probe Sequence
ggctgtagtgttgtaacctgctgca

SEQ ID NO: 273837 - DNA, 25 bp, Probe Sequence
ggctggacgttcctaagcagagctc

SEQ ID NO: 273838 - DNA, 25 bp, Probe Sequence
ggctggggagatgctgggcagacac

SEQ ID NO: 273839 - DNA, 25 bp, Probe Sequence
ggcgtgggaatgtgggaacagtgac

SEQ ID NO: 273840 - DNA, 25 bp, Probe Sequence
ggcgttcaggagctcgtgaagcaag

SEQ ID NO: 273841 - DNA, 25 bp, Probe Sequence
ggctgttggagactctgcctacagc

SEQ ID NO: 273842 - DNA, 25 bp, Probe Sequence
ggctgtctgtgagcagcacttgaca

SEQ ID NO: 273843 - DNA, 25 bp, Probe Sequence
ggctctctgcaaggcagcctaatgc

SEQ ID NO: 273844 - DNA, 25 bp, Probe Sequence
ggctctggctatgatgcttactgcg

SEQ ID NO: 273845 - DNA, 25 bp, Probe Sequence
ggctcaggccatgggtgtatatgga

SEQ ID NO: 273846 - DNA, 25 bp, Probe Sequence
ggctcagttcatgtggatcatcagg

SEQ ID NO: 273847 - DNA, 25 bp, Probe Sequence
ggctcatggtctgggggatgcaggc

SEQ ID NO: 273848 - DNA, 25 bp, Probe Sequence
ggctcaggtgtgggtgggaggggcc

SEQ ID NO: 273849 - DNA, 25 bp, Probe Sequence
ggctcaggtgtgggtgggaggggcc

SEQ ID NO: 273850 - DNA, 25 bp, Probe Sequence
ggctcaggtgtgggtgggaggggcc

SEQ ID NO: 273851 - DNA, 25 bp, Probe Sequence
ggctcaatggaggggtctggggacc

SEQ ID NO: 273852 - DNA, 25 bp, Probe Sequence
ggctgcaaggagcggggtcgtgacc

SEQ ID NO: 273853 - DNA, 25 bp, Probe Sequence
ggctgcaaggagcggggtcgtgacc

SEQ ID NO: 273854 - DNA, 25 bp, Probe Sequence
ggctcaaggaaggcgggtcacgagg

SEQ ID NO: 273855 - DNA, 25 bp, Probe Sequence
ggctgcttggaagcctggacgtgac

SEQ ID NO: 273856 - DNA, 25 bp, Probe Sequence
ggcgtggccagagagcggaagtgcc

SEQ ID NO: 273857 - DNA, 25 bp, Probe Sequence
ggcggccgatagcgagtgtcagggc

SEQ ID NO: 273858 - DNA, 25 bp, Probe Sequence
ggcggctcagcagcgagaactagag

SEQ ID NO: 273859 - DNA, 25 bp, Probe Sequence
ggctggcaagccgaagactatcaca

SEQ ID NO: 273860 - DNA, 25 bp, Probe Sequence
ggctgagaacgagaagctgcaccag

SEQ ID NO: 273861 - DNA, 25 bp, Probe Sequence
ggctggtactggtgcagcgaccagg

SEQ ID NO: 273862 - DNA, 25 bp, Probe Sequence
ggctgggaattgcgcatgtgaactt

SEQ ID NO: 273863 - DNA, 25 bp, Probe Sequence
ggctgggaactgcgcttgcaaaata

SEQ ID NO: 273864 - DNA, 25 bp, Probe Sequence
ggctgagtttcgcacttgattttca

SEQ ID NO: 273865 - DNA, 25 bp, Probe Sequence
ggctgagatgtctccatctctatct

SEQ ID NO: 273866 - DNA, 25 bp, Probe Sequence
ggctgcagtgtgctacatttgtgct

SEQ ID NO: 273867 - DNA, 25 bp, Probe Sequence
ggctgcttgtttttttattgccaaa

SEQ ID NO: 273868 - DNA, 25 bp, Probe Sequence
ggctctttcctcttttgtttgagag

SEQ ID NO: 273869 - DNA, 25 bp, Probe Sequence
ggccttccctggccttgagtagaaa

SEQ ID NO: 273870 - DNA, 25 bp, Probe Sequence
ggctgttacttgctttgagttggaa

SEQ ID NO: 273871 - DNA, 25 bp, Probe Sequence
ggctgttagtttttagtgagtgctg

SEQ ID NO: 273872 - DNA, 25 bp, Probe Sequence
ggctgtaagcttcggtcattgcctc

SEQ ID NO: 273873 - DNA, 25 bp, Probe Sequence
ggctgtgaagtcttccacaggcccc

SEQ ID NO: 273874 - DNA, 25 bp, Probe Sequence
ggctggaggacatcagcgaggaccc

SEQ ID NO: 273875 - DNA, 25 bp, Probe Sequence
ggctgataggagctcaggagggcgc

SEQ ID NO: 273876 - DNA, 25 bp, Probe Sequence
ggctgttggatctgcggatgaggag

SEQ ID NO: 273877 - DNA, 25 bp, Probe Sequence
ggctctgtgaacttcggacaagaac

SEQ ID NO: 273878 - DNA, 25 bp, Probe Sequence
ggctgctgtaacctccagaagcaaa

SEQ ID NO: 273879 - DNA, 25 bp, Probe Sequence
ggctgcggcaaaacctacacaaaga

SEQ ID NO: 273880 - DNA, 25 bp, Probe Sequence
ggctgggagaagatttgccaatggt

SEQ ID NO: 273881 - DNA, 25 bp, Probe Sequence
ggcggttgaaatagtcccacatgtg

SEQ ID NO: 273882 - DNA, 25 bp, Probe Sequence
ggctgtgatgaaattgcattcccca

SEQ ID NO: 273883 - DNA, 25 bp, Probe Sequence
ggctgtggatggaaattcgcccgct

SEQ ID NO: 273884 - DNA, 25 bp, Probe Sequence
ggctgatagagtgagtcctctccct

SEQ ID NO: 273885 - DNA, 25 bp, Probe Sequence
ggcgatatcggtttcatcctcgcct

SEQ ID NO: 273886 - DNA, 25 bp, Probe Sequence
ggctgctcagcggttataacaggcc

SEQ ID NO: 273887 - DNA, 25 bp, Probe Sequence
ggctccagctgtggctacaacatag

SEQ ID NO: 273888 - DNA, 25 bp, Probe Sequence
ggctccagtgtggtggcctatgaag

SEQ ID NO: 273889 - DNA, 25 bp, Probe Sequence
ggctctcaggtttaacttgcacaga

SEQ ID NO: 273890 - DNA, 25 bp, Probe Sequence
ggcccaggtttctctggaaagctcc

SEQ ID NO: 273891 - DNA, 25 bp, Probe Sequence
ggcccacttttgtcatttaatagct

SEQ ID NO: 273892 - DNA, 25 bp, Probe Sequence
ggctgaatcttctccatttgttgag

SEQ ID NO: 273893 - DNA, 25 bp, Probe Sequence
ggctgaactctgtaccatttggaag

SEQ ID NO: 273894 - DNA, 25 bp, Probe Sequence
ggcggacggtcagcattgaggtagg

SEQ ID NO: 273895 - DNA, 25 bp, Probe Sequence
ggcgggtggatcacttgaggtcagg

SEQ ID NO: 273896 - DNA, 25 bp, Probe Sequence
ggcggagggatttgttcgtgttgac

SEQ ID NO: 273897 - DNA, 25 bp, Probe Sequence
ggcggagggatttgttcgtgttgac

SEQ ID NO: 273898 - DNA, 25 bp, Probe Sequence
ggcgtacggcgttgtacggtggatg

SEQ ID NO: 273899 - DNA, 25 bp, Probe Sequence
tccgccggggtacaggtgtggatct

SEQ ID NO: 273900 - DNA, 25 bp, Probe Sequence
tcttccggggtgagacgggcaagga

SEQ ID NO: 273901 - DNA, 25 bp, Probe Sequence
tcccttgaggggagcacgtggctgg

SEQ ID NO: 273902 - DNA, 25 bp, Probe Sequence
ggctctggagaacgggacagtggct

SEQ ID NO: 273903 - DNA, 25 bp, Probe Sequence
ggctgtgagagcaagatgtaaagat

SEQ ID NO: 273904 - DNA, 25 bp, Probe Sequence
ggctctgcagaacatatcaaaatag

SEQ ID NO: 273905 - DNA, 25 bp, Probe Sequence
ggctctcgaagctcataaaattcaa

SEQ ID NO: 273906 - DNA, 25 bp, Probe Sequence
ggctgctcgacaaccaattgaattg

SEQ ID NO: 273907 - DNA, 25 bp, Probe Sequence
ggctctaggtcagcaagtgaatgtg

SEQ ID NO: 273908 - DNA, 25 bp, Probe Sequence
ggctgctagggaagctttgaaatgt

SEQ ID NO: 273909 - DNA, 25 bp, Probe Sequence
ggctggctctggtgtttacaagctg

SEQ ID NO: 273910 - DNA, 25 bp, Probe Sequence
ggctggcaagcgagcattaccacct

SEQ ID NO: 273911 - DNA, 25 bp, Probe Sequence
ggctggactggcaacaatgttccca

SEQ ID NO: 273912 - DNA, 25 bp, Probe Sequence
ggctggactgaggttcaggtctccc

SEQ ID NO: 273913 - DNA, 25 bp, Probe Sequence
ggctgaactgcatgtatatggctcc

SEQ ID NO: 273914 - DNA, 25 bp, Probe Sequence
ggctgcctgctatgtatttgcaagg

SEQ ID NO: 273915 - DNA, 25 bp, Probe Sequence
ggctcctgtctgactattccaggat

SEQ ID NO: 273916 - DNA, 25 bp, Probe Sequence
ggctcctggatgacatttccagccg

SEQ ID NO: 273917 - DNA, 25 bp, Probe Sequence
ggctccaatgagatcctcaagcaca

SEQ ID NO: 273918 - DNA, 25 bp, Probe Sequence
ggctcgagaagcattcatcattact

SEQ ID NO: 273919 - DNA, 25 bp, Probe Sequence
ggctgcagtgagccatgttcacacc

SEQ ID NO: 273920 - DNA, 25 bp, Probe Sequence
ggctgcagtgagctatgatcacgcc

SEQ ID NO: 273921 - DNA, 25 bp, Probe Sequence
ggctgcagtgagttatgatcgcacc

SEQ ID NO: 273922 - DNA, 25 bp, Probe Sequence
ggctggggaaagactccctggaggg

SEQ ID NO: 273923 - DNA, 25 bp, Probe Sequence
ggctgggcgagtatctcttcgaaag

SEQ ID NO: 273924 - DNA, 25 bp, Probe Sequence
ggctgttggagtttctgtttagggc

SEQ ID NO: 273925 - DNA, 25 bp, Probe Sequence
ggctgtagggtgtgtggttaaggta

SEQ ID NO: 273926 - DNA, 25 bp, Probe Sequence
ggctggaaggtgtggatttaaggct

SEQ ID NO: 273927 - DNA, 25 bp, Probe Sequence
ggctcgaaagactggacttattact

SEQ ID NO: 273928 - DNA, 25 bp, Probe Sequence
ggcctacgagaaaatccttttcact

SEQ ID NO: 273929 - DNA, 25 bp, Probe Sequence
ggcccaggacaaaattcttagtaat

SEQ ID NO: 273930 - DNA, 25 bp, Probe Sequence
ggcgcctggacagtgatcatcttgt

SEQ ID NO: 273931 - DNA, 25 bp, Probe Sequence
ggctccatgaccaagatctatgggg

SEQ ID NO: 273932 - DNA, 25 bp, Probe Sequence
ggctccatgaccaagatctatgggg

SEQ ID NO: 273933 - DNA, 25 bp, Probe Sequence
ggctctgcagatgctaagtggtggg

SEQ ID NO: 273934 - DNA, 25 bp, Probe Sequence
ggctctaagatctaagatggcccgg

SEQ ID NO: 273935 - DNA, 25 bp, Probe Sequence
ggctccaactattatgtgcgcatcc

SEQ ID NO: 273936 - DNA, 25 bp, Probe Sequence
ggctcctatgtattagatcagattt

SEQ ID NO: 273937 - DNA, 25 bp, Probe Sequence
ggctctcttgtgtacttattgttta

SEQ ID NO: 273938 - DNA, 25 bp, Probe Sequence
ggctctttgtgtattatgattcagt

SEQ ID NO: 273939 - DNA, 25 bp, Probe Sequence
ggctctcttcttaaaagcaccatat

SEQ ID NO: 273940 - DNA, 25 bp, Probe Sequence
ggctcttctttgaaatgaggtcatt

SEQ ID NO: 273941 - DNA, 25 bp, Probe Sequence
ggctctctctttctagaggtgctac

SEQ ID NO: 273942 - DNA, 25 bp, Probe Sequence
ggctcgctatttcatctgggtggag

SEQ ID NO: 273943 - DNA, 25 bp, Probe Sequence
ggctgcgatattagatttccttgta

SEQ ID NO: 273944 - DNA, 25 bp, Probe Sequence
ggctgcttttagtttctcttaatca

SEQ ID NO: 273945 - DNA, 25 bp, Probe Sequence
ggctctgtcaaatcttttacctgcc

SEQ ID NO: 273946 - DNA, 25 bp, Probe Sequence
ggctcttcagaaacttgaatactta

SEQ ID NO: 273947 - DNA, 25 bp, Probe Sequence
ggctgtaccaatcctctaatatgaa

SEQ ID NO: 273948 - DNA, 25 bp, Probe Sequence
ggctgctacaaaccttcaatttaaa

SEQ ID NO: 273949 - DNA, 25 bp, Probe Sequence
ggctgtccacgtacttaatttactt

SEQ ID NO: 273950 - DNA, 25 bp, Probe Sequence
ggccctgaagtacacagttttcttg

SEQ ID NO: 273951 - DNA, 25 bp, Probe Sequence
ggcccctaatatcccagtttaatat

SEQ ID NO: 273952 - DNA, 25 bp, Probe Sequence
ggcccctaacattcctttggaaatg

SEQ ID NO: 273953 - DNA, 25 bp, Probe Sequence
ggccccaaggatgccggggaaacag

SEQ ID NO: 273954 - DNA, 25 bp, Probe Sequence
ggctctcacaggatccggagggaaa

SEQ ID NO: 273955 - DNA, 25 bp, Probe Sequence
ggctccgtggagagggactggcaga

SEQ ID NO: 273956 - DNA, 25 bp, Probe Sequence
ggctccgggagaagaaggcggcgtt

SEQ ID NO: 273957 - DNA, 25 bp, Probe Sequence
ggctccggtgagtctggagtccggt

SEQ ID NO: 273958 - DNA, 25 bp, Probe Sequence
ggctctgggtggtgggaagcagggg

SEQ ID NO: 273959 - DNA, 25 bp, Probe Sequence
ggccagggggaaggaaaggtgagtg

SEQ ID NO: 273960 - DNA, 25 bp, Probe Sequence
ggccagggggaaggaaaggtgagtg

SEQ ID NO: 273961 - DNA, 25 bp, Probe Sequence
ggctctggagggaagtgtaggttag

SEQ ID NO: 273962 - DNA, 25 bp, Probe Sequence
ggctctctatgggcgcttgtatgag

SEQ ID NO: 273963 - DNA, 25 bp, Probe Sequence
ggctcctgtggaggtcgtatgtgaa

SEQ ID NO: 273964 - DNA, 25 bp, Probe Sequence
ggctctcagtaaagatgtgtttcta

SEQ ID NO: 273965 - DNA, 25 bp, Probe Sequence
ggctgacaggaagactgatgttcat

SEQ ID NO: 273966 - DNA, 25 bp, Probe Sequence
ggctgccagggaagaaccattcatt

SEQ ID NO: 273967 - DNA, 25 bp, Probe Sequence
ggctgcaatgtggaggaagccttct

SEQ ID NO: 273968 - DNA, 25 bp, Probe Sequence
ggctgctattgcaggaggccacact

SEQ ID NO: 273969 - DNA, 25 bp, Probe Sequence
ggctctatgctggtgactggacaca

SEQ ID NO: 273970 - DNA, 25 bp, Probe Sequence
ggctgctacagcgtgacgctggcac

SEQ ID NO: 273971 - DNA, 25 bp, Probe Sequence
ggctgcaagcagtgacagtgcccag

SEQ ID NO: 273972 - DNA, 25 bp, Probe Sequence
ggctgcaagcagtgacagtgcccag

SEQ ID NO: 273973 - DNA, 25 bp, Probe Sequence
ggctgcaagcagtgacagtgcccag

SEQ ID NO: 273974 - DNA, 25 bp, Probe Sequence
ggctgtgaaaggtttttcctgaggt

SEQ ID NO: 273975 - DNA, 25 bp, Probe Sequence
ggctggatacggttgacttcacggg

SEQ ID NO: 273976 - DNA, 25 bp, Probe Sequence
ggcgtgatagcggtctgacttcacc

SEQ ID NO: 273977 - DNA, 25 bp, Probe Sequence
ggctgtgtacagttatactttttta

SEQ ID NO: 273978 - DNA, 25 bp, Probe Sequence
ggcgtaacgtaaagtgtattctgta

SEQ ID NO: 273979 - DNA, 25 bp, Probe Sequence
ggctgttaggaataatgttgctctg

SEQ ID NO: 273980 - DNA, 25 bp, Probe Sequence
ggctgatctgaggtaaactttgaag

SEQ ID NO: 273981 - DNA, 25 bp, Probe Sequence
ggctctctgagcaaaacacctgtaa

SEQ ID NO: 273982 - DNA, 25 bp, Probe Sequence
ggctgctgtgaggaaaacctgccat

SEQ ID NO: 273983 - DNA, 25 bp, Probe Sequence
ggctgtggaacaaaacacgctgcag

SEQ ID NO: 273984 - DNA, 25 bp, Probe Sequence
ggctgtggtgaccgcaacaagccag

SEQ ID NO: 273985 - DNA, 25 bp, Probe Sequence
ggctgtggaacaggccagcaacctc

SEQ ID NO: 273986 - DNA, 25 bp, Probe Sequence
ggctgggcaacagtacgagactctg

SEQ ID NO: 273987 - DNA, 25 bp, Probe Sequence
ggctgggcaacagtacgagactctg

SEQ ID NO: 273988 - DNA, 25 bp, Probe Sequence
ggctgggcaacagtacgagactctg

SEQ ID NO: 273989 - DNA, 25 bp, Probe Sequence
ggctgggaaggcacagaatcgctga

SEQ ID NO: 273990 - DNA, 25 bp, Probe Sequence
ggctgggaaggcacagaatcgctga

SEQ ID NO: 273991 - DNA, 25 bp, Probe Sequence
ggctggagaaatctcacaatcatgg

SEQ ID NO: 273992 - DNA, 25 bp, Probe Sequence
ggcgctaggaatcaaagactgtctc

SEQ ID NO: 273993 - DNA, 25 bp, Probe Sequence
ggcggggaagctaagaactgcattc

SEQ ID NO: 273994 - DNA, 25 bp, Probe Sequence
ggctgatagagatcaaagtcccttc

SEQ ID NO: 273995 - DNA, 25 bp, Probe Sequence
ggcgatgacatttctaagctacagc

SEQ ID NO: 273996 - DNA, 25 bp, Probe Sequence
ggctgatgacatcacaaagacagag

SEQ ID NO: 273997 - DNA, 25 bp, Probe Sequence
ggctggtcaggatatacaaggtaaa

SEQ ID NO: 273998 - DNA, 25 bp, Probe Sequence
tggctcatgtcaaacgtaaaggtca

SEQ ID NO: 273999 - DNA, 25 bp, Probe Sequence
ggctctgccaggtctggaaagtctt

SEQ ID NO: 274000 - DNA, 25 bp, Probe Sequence
ggctctgacgaggcagtggagagtt

SEQ ID NO: 274001 - DNA, 25 bp, Probe Sequence
ggctctgtggaggaggccatactcc

SEQ ID NO: 274002 - DNA, 25 bp, Probe Sequence
ggctctgtggaggaggccatactcc

SEQ ID NO: 274003 - DNA, 25 bp, Probe Sequence
ggctctgtaaggacgccttgatgct

SEQ ID NO: 274004 - DNA, 25 bp, Probe Sequence
ggctcgtggggaagcggctgagcct

SEQ ID NO: 274005 - DNA, 25 bp, Probe Sequence
ggctcgtggggaagcggctgagcct

SEQ ID NO: 274006 - DNA, 25 bp, Probe Sequence
ggctctggtgtttacaagctggact

SEQ ID NO: 274007 - DNA, 25 bp, Probe Sequence
ggccatagtttgttaatctcaacta

SEQ ID NO: 274008 - DNA, 25 bp, Probe Sequence
ggctgcaatttgttttatgcttatt

SEQ ID NO: 274009 - DNA, 25 bp, Probe Sequence
ggctgcaatttgttttatgcttatt

SEQ ID NO: 274010 - DNA, 25 bp, Probe Sequence
ggctgccttctgcatttatttgcct

SEQ ID NO: 274011 - DNA, 25 bp, Probe Sequence
ggctgtcattcatgtgattgatttg

SEQ ID NO: 274012 - DNA, 25 bp, Probe Sequence
ggcggatcatgaggtcaggagatcg

SEQ ID NO: 274013 - DNA, 25 bp, Probe Sequence
ggctgccaggaattcaggatgcata

SEQ ID NO: 274014 - DNA, 25 bp, Probe Sequence
ggctccagtgacaatcgtgtgatta

SEQ ID NO: 274015 - DNA, 25 bp, Probe Sequence
ggctgactggaccatagttgttcac

SEQ ID NO: 274016 - DNA, 25 bp, Probe Sequence
ggctggcatggaaatagaaatactc

SEQ ID NO: 274017 - DNA, 25 bp, Probe Sequence
ggctggcattgaggtccaggaaatc

SEQ ID NO: 274018 - DNA, 25 bp, Probe Sequence
ggctgccattatgggcacgtcagaa

SEQ ID NO: 274019 - DNA, 25 bp, Probe Sequence
ggctgctcttatggagccgagatcc

SEQ ID NO: 274020 - DNA, 25 bp, Probe Sequence
ggctgctcttatggagccgagatcc

SEQ ID NO: 274021 - DNA, 25 bp, Probe Sequence
ggctgctgaacgtcagccggatcat

SEQ ID NO: 274022 - DNA, 25 bp, Probe Sequence
ggctgccttttggagggagggctgg

SEQ ID NO: 274023 - DNA, 25 bp, Probe Sequence
ggccctgttgggtggaatggttaag

SEQ ID NO: 274024 - DNA, 25 bp, Probe Sequence
ggcccagtctggagggttcggggcg

SEQ ID NO: 274025 - DNA, 25 bp, Probe Sequence
ggcccagatcatcgggggccacgag

SEQ ID NO: 274026 - DNA, 25 bp, Probe Sequence
ggctccagatcaaagcggccaagga

SEQ ID NO: 274027 - DNA, 25 bp, Probe Sequence
ggctcgagatcttcgcgggaagaag

SEQ ID NO: 274028 - DNA, 25 bp, Probe Sequence
ggcccagaccacgtgggacagaact

SEQ ID NO: 274029 - DNA, 25 bp, Probe Sequence
ggctcctgaccattctgaagaagat

SEQ ID NO: 274030 - DNA, 25 bp, Probe Sequence
ggctcctgcaaatgcaaagagtgca

SEQ ID NO: 274031 - DNA, 25 bp, Probe Sequence
ggctccttataccaaagatgctggc

SEQ ID NO: 274032 - DNA, 25 bp, Probe Sequence
ggctcctttgccaataagcatggcc

SEQ ID NO: 274033 - DNA, 25 bp, Probe Sequence
ggctcctggtgcctctattgaagac

SEQ ID NO: 274034 - DNA, 25 bp, Probe Sequence
ggctcctggtgcctctattgaagac

SEQ ID NO: 274035 - DNA, 25 bp, Probe Sequence
ggctccgtatcagcatcagtgacag

SEQ ID NO: 274036 - DNA, 25 bp, Probe Sequence
ggctcctgtatcacatacggaggtc

SEQ ID NO: 274037 - DNA, 25 bp, Probe Sequence
ggctccatcttcattacggaactca

SEQ ID NO: 274038 - DNA, 25 bp, Probe Sequence
ggctcctaactcattgggaacaact

SEQ ID NO: 274039 - DNA, 25 bp, Probe Sequence
ggctcccatccctatggaggaacaa

SEQ ID NO: 274040 - DNA, 25 bp, Probe Sequence
ggctcccttcattagaattgtaaca

SEQ ID NO: 274041 - DNA, 25 bp, Probe Sequence
ggctgggtgacctggattatctaca

SEQ ID NO: 274042 - DNA, 25 bp, Probe Sequence
ggctgggtcagcaaccgaattctag

SEQ ID NO: 274043 - DNA, 25 bp, Probe Sequence
ggctgggtcagcaaccgaattccag

SEQ ID NO: 274044 - DNA, 25 bp, Probe Sequence
ggctggtgctcacagctgtaatccc

SEQ ID NO: 274045 - DNA, 25 bp, Probe Sequence
ggcgaagacaaacggatgcacccgt

SEQ ID NO: 274046 - DNA, 25 bp, Probe Sequence
ggctgccagacatacgctggagcca

SEQ ID NO: 274047 - DNA, 25 bp, Probe Sequence
ggctcctacatctacgagaagcccc

SEQ ID NO: 274048 - DNA, 25 bp, Probe Sequence
ggcggtagctgattctggaagcaac

SEQ ID NO: 274049 - DNA, 25 bp, Probe Sequence
ggcggtagctgattctggaagcaac

SEQ ID NO: 274050 - DNA, 25 bp, Probe Sequence
ggcggaagtgatcgctgtgtgaatc

SEQ ID NO: 274051 - DNA, 25 bp, Probe Sequence
ggctggagtggagtggtatgatctt

SEQ ID NO: 274052 - DNA, 25 bp, Probe Sequence
ggctggtatgcggtggtgtgatcgt

SEQ ID NO: 274053 - DNA, 25 bp, Probe Sequence
ggctgagtactgggcagtctcatct

SEQ ID NO: 274054 - DNA, 25 bp, Probe Sequence
ggctgaaggctgctgcaagtcattg

SEQ ID NO: 274055 - DNA, 25 bp, Probe Sequence
ggctgtggtgctctgagatctcaat

SEQ ID NO: 274056 - DNA, 25 bp, Probe Sequence
ggctgatggtcatggagatccgcaa

SEQ ID NO: 274057 - DNA, 25 bp, Probe Sequence
ggctgtgttctggggatgcgtaaga

SEQ ID NO: 274058 - DNA, 25 bp, Probe Sequence
ggctgctgttcggcagcgatggcta

SEQ ID NO: 274059 - DNA, 25 bp, Probe Sequence
ggctgctgtgaaagaggctggctac

SEQ ID NO: 274060 - DNA, 25 bp, Probe Sequence
ggctgctgctgagaaggcagtgacc

SEQ ID NO: 274061 - DNA, 25 bp, Probe Sequence
ggctgtctgctgaaattgaggatgt

SEQ ID NO: 274062 - DNA, 25 bp, Probe Sequence
ggctgcagcgagagattgaggagct

SEQ ID NO: 274063 - DNA, 25 bp, Probe Sequence
ggctgctcgatgctgtgaggagact

SEQ ID NO: 274064 - DNA, 25 bp, Probe Sequence
ggctgtcactcggctaagcagattg

SEQ ID NO: 274065 - DNA, 25 bp, Probe Sequence
ggcgtcctcgtggaagtgacatcgt

SEQ ID NO: 274066 - DNA, 25 bp, Probe Sequence
ggcgccaccagcggaagtacaggcg

SEQ ID NO: 274067 - DNA, 25 bp, Probe Sequence
ggcgcccagcagggaatattcctaa

SEQ ID NO: 274068 - DNA, 25 bp, Probe Sequence
ggccacgaggggaaattgacgaaca

SEQ ID NO: 274069 - DNA, 25 bp, Probe Sequence
tggcccgaagggtagcaatgattga

SEQ ID NO: 274070 - DNA, 25 bp, Probe Sequence
tggtccaacagtcgtatcctggtga

SEQ ID NO: 274071 - DNA, 25 bp, Probe Sequence
ggctccaacatgaacacttcttgta

SEQ ID NO: 274072 - DNA, 25 bp, Probe Sequence
ggcccaacaaccagtttgacacaga

SEQ ID NO: 274073 - DNA, 25 bp, Probe Sequence
ggcgtcaagaacctagtttatctct

SEQ ID NO: 274074 - DNA, 25 bp, Probe Sequence
ggcgtgaacacagaaggttttgact

SEQ ID NO: 274075 - DNA, 25 bp, Probe Sequence
ggctggggaagaacaggtgtgttga

SEQ ID NO: 274076 - DNA, 25 bp, Probe Sequence
ggctggggccatatgatgggtgatg

SEQ ID NO: 274077 - DNA, 25 bp, Probe Sequence
ggctccgggagccatgatgggtggt

SEQ ID NO: 274078 - DNA, 25 bp, Probe Sequence
ggctcctgcaggatcatgcagctgg

SEQ ID NO: 274079 - DNA, 25 bp, Probe Sequence
ggctgcctgcggatgaaggaccagt

SEQ ID NO: 274080 - DNA, 25 bp, Probe Sequence
ggctgcaagtgagtgtggacgacca

SEQ ID NO: 274081 - DNA, 25 bp, Probe Sequence
ggctgcacgcatttcggaagaatat

SEQ ID NO: 274082 - DNA, 25 bp, Probe Sequence
ggctgccccagattggcagcaaaaa

SEQ ID NO: 274083 - DNA, 25 bp, Probe Sequence
ggctgtactggatgagctcaaacaa

SEQ ID NO: 274084 - DNA, 25 bp, Probe Sequence
ggctggactgtgggatctgattaca

SEQ ID NO: 274085 - DNA, 25 bp, Probe Sequence
ggctgaggcatgggagtctaagaca

SEQ ID NO: 274086 - DNA, 25 bp, Probe Sequence
ggctgcaggcacagaggaacgaact

SEQ ID NO: 274087 - DNA, 25 bp, Probe Sequence
ggctgcagagcctggggcagcagag

SEQ ID NO: 274088 - DNA, 25 bp, Probe Sequence
ggcgaggacaccgtggtgcatgagg

SEQ ID NO: 274089 - DNA, 25 bp, Probe Sequence
ggcgggaaatcgtgtgagcagtgat

SEQ ID NO: 274090 - DNA, 25 bp, Probe Sequence
ggcgggagaactcactgaggatgag

SEQ ID NO: 274091 - DNA, 25 bp, Probe Sequence
ggctggggaagtgcttaggtgtgga

SEQ ID NO: 274092 - DNA, 25 bp, Probe Sequence
ggctgtgatgagtgtccttgcaggg

SEQ ID NO: 274093 - DNA, 25 bp, Probe Sequence
ggctggtagagccttctagaggttc

SEQ ID NO: 274094 - DNA, 25 bp, Probe Sequence
ggctgctgtcaaggttgtgaacgtc

SEQ ID NO: 274095 - DNA, 25 bp, Probe Sequence
ggctgctgtcatttgtggtgttggc

SEQ ID NO: 274096 - DNA, 25 bp, Probe Sequence
ggctgtttgatgctgagtgagctgc

SEQ ID NO: 274097 - DNA, 25 bp, Probe Sequence
ggctgcgtagcagttgagtgatgct

SEQ ID NO: 274098 - DNA, 25 bp, Probe Sequence
ggctgcattccagtatggtatcaaa

SEQ ID NO: 274099 - DNA, 25 bp, Probe Sequence
ggctgcattccagtatggtatcaaa

SEQ ID NO: 274100 - DNA, 25 bp, Probe Sequence
ggctgccccatcgtgtatataaatg

SEQ ID NO: 274101 - DNA, 25 bp, Probe Sequence
ggctgccacttttcggatagcaatc

SEQ ID NO: 274102 - DNA, 25 bp, Probe Sequence
ggctgccacgaccaagtgacagcaa

SEQ ID NO: 274103 - DNA, 25 bp, Probe Sequence
ggcgtacaagcacagcgacatcacg

SEQ ID NO: 274104 - DNA, 25 bp, Probe Sequence
ggctccaagtgcctgtggacatacg

SEQ ID NO: 274105 - DNA, 25 bp, Probe Sequence
ggctccacaggacttacctacaaaa

SEQ ID NO: 274106 - DNA, 25 bp, Probe Sequence
ggctgccttggtctaggtgaaaaaa

SEQ ID NO: 274107 - DNA, 25 bp, Probe Sequence
tggctccggcggcttggggaaagcc

SEQ ID NO: 274108 - DNA, 25 bp, Probe Sequence
ggccctgcagttagtttgcgggaac

SEQ ID NO: 274109 - DNA, 25 bp, Probe Sequence
ggcgcctaggttgtgttgagagggg

SEQ ID NO: 274110 - DNA, 25 bp, Probe Sequence
ggcgaggacgaagagggaaggggtg

SEQ ID NO: 274111 - DNA, 25 bp, Probe Sequence
ggctgggagttaggagggagagcag

SEQ ID NO: 274112 - DNA, 25 bp, Probe Sequence
ggctgggggcgaagacacgaagcag

SEQ ID NO: 274113 - DNA, 25 bp, Probe Sequence
ggctgggcccagtgaaaaggaggaa

SEQ ID NO: 274114 - DNA, 25 bp, Probe Sequence
ggccggcccacgtggtagtgggaga

SEQ ID NO: 274115 - DNA, 25 bp, Probe Sequence
ggcctggccctaggggtatcaggcg

SEQ ID NO: 274116 - DNA, 25 bp, Probe Sequence
ggcggggactaatgtgtaaggctta

SEQ ID NO: 274117 - DNA, 25 bp, Probe Sequence
ggcgccaagactcaggggatcggct

SEQ ID NO: 274118 - DNA, 25 bp, Probe Sequence
ggccctccaagccaggttgaggtct

SEQ ID NO: 274119 - DNA, 25 bp, Probe Sequence
ggcggatgccaagaagtgtggggcc

SEQ ID NO: 274120 - DNA, 25 bp, Probe Sequence
ggctggacctccgagagctggaggg

SEQ ID NO: 274121 - DNA, 25 bp, Probe Sequence
ggctgtatccctgcaggatggggag

SEQ ID NO: 274122 - DNA, 25 bp, Probe Sequence
ggctgtgctaccccaagaagaggaa

SEQ ID NO: 274123 - DNA, 25 bp, Probe Sequence
ggctgagcaacagaaaaaggcggcc

SEQ ID NO: 274124 - DNA, 25 bp, Probe Sequence
ggctgagctggagaaatcgggggct

SEQ ID NO: 274125 - DNA, 25 bp, Probe Sequence
ggctgatggtgtgaactcgggccag

SEQ ID NO: 274126 - DNA, 25 bp, Probe Sequence
ggctgagacagtgaatttgggctgc

SEQ ID NO: 274127 - DNA, 25 bp, Probe Sequence
ggctgagaagtaaccatggacgtca

SEQ ID NO: 274128 - DNA, 25 bp, Probe Sequence
ggctggggttatgtctcaatgagca

SEQ ID NO: 274129 - DNA, 25 bp, Probe Sequence
ggctgaggcgggtggatcacttgag

SEQ ID NO: 274130 - DNA, 25 bp, Probe Sequence
ggctgaggtgggaggatcacttgag

SEQ ID NO: 274131 - DNA, 25 bp, Probe Sequence
ggctgaggtgggaggattgcttgag

SEQ ID NO: 274132 - DNA, 25 bp, Probe Sequence
ggcggctgggaagtggaggttgtag

SEQ ID NO: 274133 - DNA, 25 bp, Probe Sequence
ggcgtgtgggaagggatgctttctc

SEQ ID NO: 274134 - DNA, 25 bp, Probe Sequence
ggcgtgatggtgggcgcctgtaatc

SEQ ID NO: 274135 - DNA, 25 bp, Probe Sequence
ggcgtgatggtgggcgcctgtaatc

SEQ ID NO: 274136 - DNA, 25 bp, Probe Sequence
ggcgtggtgttgcatgccagtaatc

SEQ ID NO: 274137 - DNA, 25 bp, Probe Sequence
ggcgcagtggttcatgccagtaatc

SEQ ID NO: 274138 - DNA, 25 bp, Probe Sequence
ggcctatggcttcatcatcaaaatg

SEQ ID NO: 274139 - DNA, 25 bp, Probe Sequence
ggccgggcgtaccacaaatataagg

SEQ ID NO: 274140 - DNA, 25 bp, Probe Sequence
ggccagatcttgatgcccaacattg

SEQ ID NO: 274141 - DNA, 25 bp, Probe Sequence
ggctgcagacgtttgccagcaactg

SEQ ID NO: 274142 - DNA, 25 bp, Probe Sequence
ggctgaccagaactgcacgcaagag

SEQ ID NO: 274143 - DNA, 25 bp, Probe Sequence
ggctgaccaactgactgaagagcag

SEQ ID NO: 274144 - DNA, 25 bp, Probe Sequence
ggctgtccactagaccagtgagcgc

SEQ ID NO: 274145 - DNA, 25 bp, Probe Sequence
ggctgcttccgagaaattgatgagc

SEQ ID NO: 274146 - DNA, 25 bp, Probe Sequence
ggctgctaacaaggacaactggaat

SEQ ID NO: 274147 - DNA, 25 bp, Probe Sequence
ggctgcgcaacaagtccaatgagga

SEQ ID NO: 274148 - DNA, 25 bp, Probe Sequence
ggctgaccacaagggctatgggacc

SEQ ID NO: 274149 - DNA, 25 bp, Probe Sequence
ggctgctcccaaggacgatgggttc

SEQ ID NO: 274150 - DNA, 25 bp, Probe Sequence
ggctgtgtacaaggacctggtgctc

SEQ ID NO: 274151 - DNA, 25 bp, Probe Sequence
ggcggtcacaacaagcgtgcagagc

SEQ ID NO: 274152 - DNA, 25 bp, Probe Sequence
ggcggatgacatgctgaagagaggc

SEQ ID NO: 274153 - DNA, 25 bp, Probe Sequence
ggctgtagatgaactgagcaggcag

SEQ ID NO: 274154 - DNA, 25 bp, Probe Sequence
ggctgtggatagtgatgaggaggtg

SEQ ID NO: 274155 - DNA, 25 bp, Probe Sequence
ggctgtggatagtgatgaggaggtg

SEQ ID NO: 274156 - DNA, 25 bp, Probe Sequence
ggctgaggacaggggagggagtgaa

SEQ ID NO: 274157 - DNA, 25 bp, Probe Sequence
ggctggatatccgtgtggggaaaat

SEQ ID NO: 274158 - DNA, 25 bp, Probe Sequence
ggctggaaccatggagggtgtagaa

SEQ ID NO: 274159 - DNA, 25 bp, Probe Sequence
ggctggaatccaagagtggggagtg

SEQ ID NO: 274160 - DNA, 25 bp, Probe Sequence
ggcgagaaccaaggagtaggagtga

SEQ ID NO: 274161 - DNA, 25 bp, Probe Sequence
ggcccaactcgaggccaaggtgcga

SEQ ID NO: 274162 - DNA, 25 bp, Probe Sequence
ggcccagagacatgggccagggcca

SEQ ID NO: 274163 - DNA, 25 bp, Probe Sequence
tgtacgcggccttcgactgcacggc

SEQ ID NO: 274164 - DNA, 25 bp, Probe Sequence
tggactcggtctttgaggagccgct

SEQ ID NO: 274165 - DNA, 25 bp, Probe Sequence
ggcccgcgacttagtagaacgctgc

SEQ ID NO: 274166 - DNA, 25 bp, Probe Sequence
ggctgtctgaacttttgaaaccttg

SEQ ID NO: 274167 - DNA, 25 bp, Probe Sequence
ggctgcttgaacctttggatgcaaa

SEQ ID NO: 274168 - DNA, 25 bp, Probe Sequence
ggctgctcgaacagattgcgagcac

SEQ ID NO: 274169 - DNA, 25 bp, Probe Sequence
ggctgctccaggagcacagcggcat

SEQ ID NO: 274170 - DNA, 25 bp, Probe Sequence
ggctgcagcacacgggcaaatagct

SEQ ID NO: 274171 - DNA, 25 bp, Probe Sequence
ggctgcatgacactggaggtcaacc

SEQ ID NO: 274172 - DNA, 25 bp, Probe Sequence
ggctgctctcctggagtgacaactg

SEQ ID NO: 274173 - DNA, 25 bp, Probe Sequence
ggctgttttgtgactgttacattgt

SEQ ID NO: 274174 - DNA, 25 bp, Probe Sequence
ggctgtttttgagcttctcattgtg

SEQ ID NO: 274175 - DNA, 25 bp, Probe Sequence
ggcgctttttagacttccaagctag

SEQ ID NO: 274176 - DNA, 25 bp, Probe Sequence
ggctgctcttttttttccagagata

SEQ ID NO: 274177 - DNA, 25 bp, Probe Sequence
ggctggattttatttatctggcaag

SEQ ID NO: 274178 - DNA, 25 bp, Probe Sequence
ggctgtttttattctgcaggtaagt

SEQ ID NO: 274179 - DNA, 25 bp, Probe Sequence
ggctgtttgctttttgaccatatca

SEQ ID NO: 274180 - DNA, 25 bp, Probe Sequence
ggcgttgcgattattgaccagtgga

SEQ ID NO: 274181 - DNA, 25 bp, Probe Sequence
ggcgtctcgtttttggctaattgat

SEQ ID NO: 274182 - DNA, 25 bp, Probe Sequence
ggcgtcccatttatgtgctgaagtt

SEQ ID NO: 274183 - DNA, 25 bp, Probe Sequence
ggcgctcgccatgtatttagcagag

SEQ ID NO: 274184 - DNA, 25 bp, Probe Sequence
ggcgccgacagtatttactcatatc

SEQ ID NO: 274185 - DNA, 25 bp, Probe Sequence
ggccaggaaagatttcgaacaatca

SEQ ID NO: 274186 - DNA, 25 bp, Probe Sequence
tggccttaaagaatatgcaaacaat

SEQ ID NO: 274187 - DNA, 25 bp, Probe Sequence
ggcctggaattggatacaactcaac

SEQ ID NO: 274188 - DNA, 25 bp, Probe Sequence
ggcctggccaatgtccagttgtatg

SEQ ID NO: 274189 - DNA, 25 bp, Probe Sequence
tggcccggccagataagatttcagg

SEQ ID NO: 274190 - DNA, 25 bp, Probe Sequence
ggccactcccaggtaaaatccaggg

SEQ ID NO: 274191 - DNA, 25 bp, Probe Sequence
ggcgccatcgccaagtaagaaagtg

SEQ ID NO: 274192 - DNA, 25 bp, Probe Sequence
ggcgctcatcaagtagctgctggat

SEQ ID NO: 274193 - DNA, 25 bp, Probe Sequence
ggcgctatgccaggactgatgagat

SEQ ID NO: 274194 - DNA, 25 bp, Probe Sequence
ggcgcctctaagcctgaggggatag

SEQ ID NO: 274195 - DNA, 25 bp, Probe Sequence
ggcgccctgaagatgcatattcgga

SEQ ID NO: 274196 - DNA, 25 bp, Probe Sequence
ggcggctcatgaagaggctctgccc

SEQ ID NO: 274197 - DNA, 25 bp, Probe Sequence
ggctgtccatattgaatgttgaccc

SEQ ID NO: 274198 - DNA, 25 bp, Probe Sequence
ggcgttgcttactatgtggacctgc

SEQ ID NO: 274199 - DNA, 25 bp, Probe Sequence
ggcgattcttgtgatgcagggcctc

SEQ ID NO: 274200 - DNA, 25 bp, Probe Sequence
ggcgttttgtaatcagagtcttaaa

SEQ ID NO: 274201 - DNA, 25 bp, Probe Sequence
ggcgtttatttctgcagggctgaaa

SEQ ID NO: 274202 - DNA, 25 bp, Probe Sequence
ggcgtctgtgcagttgggggaggca

SEQ ID NO: 274203 - DNA, 25 bp, Probe Sequence
ggctgagcatgtgtgggtgggagtc

SEQ ID NO: 274204 - DNA, 25 bp, Probe Sequence
ggctgcaattggtggagggagctct

SEQ ID NO: 274205 - DNA, 25 bp, Probe Sequence
ggctgcagagtgtcacggagatggg

SEQ ID NO: 274206 - DNA, 25 bp, Probe Sequence
ggctgcagatgaggccttggatgct

SEQ ID NO: 274207 - DNA, 25 bp, Probe Sequence
ggcgctgatgaccccggacaccgac

SEQ ID NO: 274208 - DNA, 25 bp, Probe Sequence
ggcctgcacggagctgggcatccgc

SEQ ID NO: 274209 - DNA, 25 bp, Probe Sequence
ggcctcatcctagagaggcccctgg

SEQ ID NO: 274210 - DNA, 25 bp, Probe Sequence
ggcgtcctctagtggactcgagtga

SEQ ID NO: 274211 - DNA, 25 bp, Probe Sequence
ggctgtgttctcaggatgaccgagt

SEQ ID NO: 274212 - DNA, 25 bp, Probe Sequence
ggctggggcagcatcgaaccagagg

SEQ ID NO: 274213 - DNA, 25 bp, Probe Sequence
ggcggcaggtgcaggaactgcaggg

SEQ ID NO: 274214 - DNA, 25 bp, Probe Sequence
ggctgacctgtcagggatcacaggg

SEQ ID NO: 274215 - DNA, 25 bp, Probe Sequence
ggctgtctgcatgaggaggtgccag

SEQ ID NO: 274216 - DNA, 25 bp, Probe Sequence
ggctggatcagtaggagaagctgag

SEQ ID NO: 274217 - DNA, 25 bp, Probe Sequence
ggctgaggcaggagagtcacttgaa

SEQ ID NO: 274218 - DNA, 25 bp, Probe Sequence
ggctgaggcaggggaatcatcttga

SEQ ID NO: 274219 - DNA, 25 bp, Probe Sequence
ggctgggcatggtggctcatgcctg

SEQ ID NO: 274220 - DNA, 25 bp, Probe Sequence
ggctggcatgcatgttggcatgaac

SEQ ID NO: 274221 - DNA, 25 bp, Probe Sequence
ggctgtcaagacgtgtcatgtacat

SEQ ID NO: 274222 - DNA, 25 bp, Probe Sequence
ggctgtgagagaggctgcgagtaaa

SEQ ID NO: 274223 - DNA, 25 bp, Probe Sequence
ggctgtggcactgggctgagtggaa

SEQ ID NO: 274224 - DNA, 25 bp, Probe Sequence
ggctgttgcacagggcttctataga

SEQ ID NO: 274225 - DNA, 25 bp, Probe Sequence
ggctgagctgaatgatgtcactcat

SEQ ID NO: 274226 - DNA, 25 bp, Probe Sequence
ggctgggaaggattcactctcttta

SEQ ID NO: 274227 - DNA, 25 bp, Probe Sequence
tggcgaaccggatcagtgcctttgg

SEQ ID NO: 274228 - DNA, 25 bp, Probe Sequence
ggccaacctggcaaggtaattgagg

SEQ ID NO: 274229 - DNA, 25 bp, Probe Sequence
ggccaaacggtgcaacagaagggta

SEQ ID NO: 274230 - DNA, 25 bp, Probe Sequence
ggcgcaagacggaccagagcgaaag

SEQ ID NO: 274231 - DNA, 25 bp, Probe Sequence
ggcgagcagagctgcatccagtgga

SEQ ID NO: 274232 - DNA, 25 bp, Probe Sequence
ggcggcagcagctcaatgagtgcct

SEQ ID NO: 274233 - DNA, 25 bp, Probe Sequence
ggcggccagatccacatctggatct

SEQ ID NO: 274234 - DNA, 25 bp, Probe Sequence
ggctgtaaggcattttcatctttcc

SEQ ID NO: 274235 - DNA, 25 bp, Probe Sequence
ggctgtaatggcctttcttatactc

SEQ ID NO: 274236 - DNA, 25 bp, Probe Sequence
ggctgtaatggcctttcttatactg

SEQ ID NO: 274237 - DNA, 25 bp, Probe Sequence
ggcgtgaatagcgttttgactcacg

SEQ ID NO: 274238 - DNA, 25 bp, Probe Sequence
ggcgctgagtacgtcgtggagtcca

SEQ ID NO: 274239 - DNA, 25 bp, Probe Sequence
ggctggagggagacgtgggtccacc

SEQ ID NO: 274240 - DNA, 25 bp, Probe Sequence
ggctggagggagacgtgggtccacc

SEQ ID NO: 274241 - DNA, 25 bp, Probe Sequence
ggctgggtaggacagggaacacctt

SEQ ID NO: 274242 - DNA, 25 bp, Probe Sequence
ggctggacttgcggggaggaaactc

SEQ ID NO: 274243 - DNA, 25 bp, Probe Sequence
tggtcccctgcccaggaggaaagtt

SEQ ID NO: 274244 - DNA, 25 bp, Probe Sequence
ggccgcaagccccaaatggaaaact

SEQ ID NO: 274245 - DNA, 25 bp, Probe Sequence
ggccctgaatgcacaaatgggaaac

SEQ ID NO: 274246 - DNA, 25 bp, Probe Sequence
ggccctgtgtgggacagggtacgcc

SEQ ID NO: 274247 - DNA, 25 bp, Probe Sequence
tgggccatttaattcagggccccca

SEQ ID NO: 274248 - DNA, 25 bp, Probe Sequence
ggcccatcaaaattcaggtgcaaac

SEQ ID NO: 274249 - DNA, 25 bp, Probe Sequence
ggccacaatctgtaaaagtcgatac

SEQ ID NO: 274250 - DNA, 25 bp, Probe Sequence
ggctgacaatcctggaaatctgttc

SEQ ID NO: 274251 - DNA, 25 bp, Probe Sequence
ggctggccacagtggaaattctgcc

SEQ ID NO: 274252 - DNA, 25 bp, Probe Sequence
ggcgcccaagggcaaagtgggcacg

SEQ ID NO: 274253 - DNA, 25 bp, Probe Sequence
ggccccacttaccaaaggaggacag

SEQ ID NO: 274254 - DNA, 25 bp, Probe Sequence
ggccccggctgaaaaacgtggacag

SEQ ID NO: 274255 - DNA, 25 bp, Probe Sequence
ggcccacgctggggaaagcgggaag

SEQ ID NO: 274256 - DNA, 25 bp, Probe Sequence
ggcctccctccggaaaatggtgaag

SEQ ID NO: 274257 - DNA, 25 bp, Probe Sequence
ggcctgtcccaagcgagaggggaga

SEQ ID NO: 274258 - DNA, 25 bp, Probe Sequence
ggcgtgaaccgagctgagggaggat

SEQ ID NO: 274259 - DNA, 25 bp, Probe Sequence
ggctgtgagcaaccacttgagaagg

SEQ ID NO: 274260 - DNA, 25 bp, Probe Sequence
ggctgtgcacagttcaccgagaagc

SEQ ID NO: 274261 - DNA, 25 bp, Probe Sequence
ggcggcagcagctacagcgaaatgg

SEQ ID NO: 274262 - DNA, 25 bp, Probe Sequence
ggcggcagcagctacagcgaaatgg

SEQ ID NO: 274263 - DNA, 25 bp, Probe Sequence
ggcggagactgacaaactggaagat

SEQ ID NO: 274264 - DNA, 25 bp, Probe Sequence
ggcgaagaccagtactatctgcggg

SEQ ID NO: 274265 - DNA, 25 bp, Probe Sequence
ggcgacagagccagactgtctcaaa

SEQ ID NO: 274266 - DNA, 25 bp, Probe Sequence
ggcgacaagtcaatattctgtagga

SEQ ID NO: 274267 - DNA, 25 bp, Probe Sequence
ggctgtcaaggcctacttgtgggac

SEQ ID NO: 274268 - DNA, 25 bp, Probe Sequence
ggcgatccagtgatgagtcggggac

SEQ ID NO: 274269 - DNA, 25 bp, Probe Sequence
ggctgttcgctgaaggaggaggaga

SEQ ID NO: 274270 - DNA, 25 bp, Probe Sequence
ggctgtgcccgtaaggggaagtacg

SEQ ID NO: 274271 - DNA, 25 bp, Probe Sequence
ggcgtgcaccggtagagggcacagg

SEQ ID NO: 274272 - DNA, 25 bp, Probe Sequence
ggctgtgctcaaagggagcggccag

SEQ ID NO: 274273 - DNA, 25 bp, Probe Sequence
ggcgttacagcgcaacagcagcctg

SEQ ID NO: 274274 - DNA, 25 bp, Probe Sequence
ggctgtttcagccaggaaggccaaa

SEQ ID NO: 274275 - DNA, 25 bp, Probe Sequence
ggctgatcctggaagagctaggcca

SEQ ID NO: 274276 - DNA, 25 bp, Probe Sequence
ggctgtgcccagaagagaaggcctg

SEQ ID NO: 274277 - DNA, 25 bp, Probe Sequence
ggctgtgcccagaagaacaggcctg

SEQ ID NO: 274278 - DNA, 25 bp, Probe Sequence
ggctgtgcccagaagaacaggcctg

SEQ ID NO: 274279 - DNA, 25 bp, Probe Sequence
ggctgtgcccagaagaacaggcctg

SEQ ID NO: 274280 - DNA, 25 bp, Probe Sequence
ggcgatcctaatcatgtcacggatg

SEQ ID NO: 274281 - DNA, 25 bp, Probe Sequence
ggcgatccataaggagggctgtgtg

SEQ ID NO: 274282 - DNA, 25 bp, Probe Sequence
ggcgatcctacagatacaagttgct

SEQ ID NO: 274283 - DNA, 25 bp, Probe Sequence
ggccctctaacctatgcaggtttcc

SEQ ID NO: 274284 - DNA, 25 bp, Probe Sequence
ggcccgaaagccgtaggataacata

SEQ ID NO: 274285 - DNA, 25 bp, Probe Sequence
ggccgcggggctctccagaacatca

SEQ ID NO: 274286 - DNA, 25 bp, Probe Sequence
ggcccgggccgagaagaaggctgct

SEQ ID NO: 274287 - DNA, 25 bp, Probe Sequence
ggccctgggtgtctacaataggctc

SEQ ID NO: 274288 - DNA, 25 bp, Probe Sequence
ggccctttgtgctgaacaccaaatc

SEQ ID NO: 274289 - DNA, 25 bp, Probe Sequence
ggccctgatgggtggaccaccagcc

SEQ ID NO: 274290 - DNA, 25 bp, Probe Sequence
ggccctgatgggtggaccaccagcc

SEQ ID NO: 274291 - DNA, 25 bp, Probe Sequence
ggcgccagtgggtggaggagttctt

SEQ ID NO: 274292 - DNA, 25 bp, Probe Sequence
ggctgtgcgggacagatgcatggag

SEQ ID NO: 274293 - DNA, 25 bp, Probe Sequence
ggctgtgccaggagtacatgtgaga

SEQ ID NO: 274294 - DNA, 25 bp, Probe Sequence
ggcggcctttgttaagcagcgaggg

SEQ ID NO: 274295 - DNA, 25 bp, Probe Sequence
ggctgtcctttttataatgcagagt

SEQ ID NO: 274296 - DNA, 25 bp, Probe Sequence
ggctgtgttggcttgaagaatcaga

SEQ ID NO: 274297 - DNA, 25 bp, Probe Sequence
ggctgtctgtacttgtgaaacattg

SEQ ID NO: 274298 - DNA, 25 bp, Probe Sequence
ggctgttggcatttctgtaaactgc

SEQ ID NO: 274299 - DNA, 25 bp, Probe Sequence
tggcgttggataccagtaaaaggga

SEQ ID NO: 274300 - DNA, 25 bp, Probe Sequence
tgaggtaggtaggcaggaaaacggg

SEQ ID NO: 274301 - DNA, 25 bp, Probe Sequence
tgacttcaagggacggaaacatcag

SEQ ID NO: 274302 - DNA, 25 bp, Probe Sequence
ggcctacagcggagagaacactttt

SEQ ID NO: 274303 - DNA, 25 bp, Probe Sequence
ggccatctacgagccaaagactttc

SEQ ID NO: 274304 - DNA, 25 bp, Probe Sequence
ggcgtctacaacggcaagaccttca

SEQ ID NO: 274305 - DNA, 25 bp, Probe Sequence
ggccctataaatgcagagaccttgc

SEQ ID NO: 274306 - DNA, 25 bp, Probe Sequence
ggccctagctaataaacctgtaagc

SEQ ID NO: 274307 - DNA, 25 bp, Probe Sequence
ggccctttaaatataggctgtttca

SEQ ID NO: 274308 - DNA, 25 bp, Probe Sequence
ggccctattgaattttcagggacca

SEQ ID NO: 274309 - DNA, 25 bp, Probe Sequence
ggcggctttgtttgttcgtgaggcc

SEQ ID NO: 274310 - DNA, 25 bp, Probe Sequence
ggcggcctgtgcaggtgattggggc

SEQ ID NO: 274311 - DNA, 25 bp, Probe Sequence
ggcgcgccatggagttactgaaggt

SEQ ID NO: 274312 - DNA, 25 bp, Probe Sequence
ggcgggctcaaattcttcgaaagtg

SEQ ID NO: 274313 - DNA, 25 bp, Probe Sequence
ggcggagtcgatctcccaaaaggag

SEQ ID NO: 274314 - DNA, 25 bp, Probe Sequence
ggcgcgactcggctgcaaaaaaaaa

SEQ ID NO: 274315 - DNA, 25 bp, Probe Sequence
ggccacactgatgttctaaaaaaaa

SEQ ID NO: 274316 - DNA, 25 bp, Probe Sequence
tggcccttccttatcctaggaaaag

SEQ ID NO: 274317 - DNA, 25 bp, Probe Sequence
ggccctgatcttaactcctcaggga

SEQ ID NO: 274318 - DNA, 25 bp, Probe Sequence
ggcccgagtaaatcgtcggatgcag

SEQ ID NO: 274319 - DNA, 25 bp, Probe Sequence
ggcctcggcctaaaggtctggaggg

SEQ ID NO: 274320 - DNA, 25 bp, Probe Sequence
ggcctcggcctaaaggtctggaggg

SEQ ID NO: 274321 - DNA, 25 bp, Probe Sequence
ggccctgaccgatacttgggcgggc

SEQ ID NO: 274322 - DNA, 25 bp, Probe Sequence
ggcgcctgaagcgtgaacttcgtgg

SEQ ID NO: 274323 - DNA, 25 bp, Probe Sequence
ggctgtgcgaacggaagctcttcat

SEQ ID NO: 274324 - DNA, 25 bp, Probe Sequence
ggctgtggttcagtgatactttgaa

SEQ ID NO: 274325 - DNA, 25 bp, Probe Sequence
ggcgaggttccaatatcatttgtgg

SEQ ID NO: 274326 - DNA, 25 bp, Probe Sequence
ggcccgttctcaatgagctgttggg

SEQ ID NO: 274327 - DNA, 25 bp, Probe Sequence
ggcccgttctcaatgagctgtcggg

SEQ ID NO: 274328 - DNA, 25 bp, Probe Sequence
ggcgccgttatcaggaccatgcggc

SEQ ID NO: 274329 - DNA, 25 bp, Probe Sequence
ggcgcaggtaacagaccgcaggggc

SEQ ID NO: 274330 - DNA, 25 bp, Probe Sequence
ggcgaggatttcctgaccaagagcc

SEQ ID NO: 274331 - DNA, 25 bp, Probe Sequence
ggcgtgatatgcacctgcaacggag

SEQ ID NO: 274332 - DNA, 25 bp, Probe Sequence
ggcgcagtggtagctgcaagggcag

SEQ ID NO: 274333 - DNA, 25 bp, Probe Sequence
ggccgagttgctggccaatgtggcc

SEQ ID NO: 274334 - DNA, 25 bp, Probe Sequence
ggccgggagctagagattggcctgg

SEQ ID NO: 274335 - DNA, 25 bp, Probe Sequence
ggcccgaaggcaacagagggcggtg

SEQ ID NO: 274336 - DNA, 25 bp, Probe Sequence
ggcctcgtggccattggcaggaggg

SEQ ID NO: 274337 - DNA, 25 bp, Probe Sequence
ggcccgtgagtcattgtaagcacag

SEQ ID NO: 274338 - DNA, 25 bp, Probe Sequence
ggcggcaggagtatttcaagatatt

SEQ ID NO: 274339 - DNA, 25 bp, Probe Sequence
ggctgtaggagtcgtcgtccatgaa

SEQ ID NO: 274340 - DNA, 25 bp, Probe Sequence
ggcggaagagcggcataaagcaggc

SEQ ID NO: 274341 - DNA, 25 bp, Probe Sequence
ggctggagagttgatacctgcagtc

SEQ ID NO: 274342 - DNA, 25 bp, Probe Sequence
ggctggggaatttggctccagatcc

SEQ ID NO: 274343 - DNA, 25 bp, Probe Sequence
ggctggggagtttgaccagggctct

SEQ ID NO: 274344 - DNA, 25 bp, Probe Sequence
ggctggcccactttggtatgggctt

SEQ ID NO: 274345 - DNA, 25 bp, Probe Sequence
ggctggccactgagggtagggtgtg

SEQ ID NO: 274346 - DNA, 25 bp, Probe Sequence
ggcggagcacttgaggtcaggagtt

SEQ ID NO: 274347 - DNA, 25 bp, Probe Sequence
ggcggatcacttgaggctcaggagt

SEQ ID NO: 274348 - DNA, 25 bp, Probe Sequence
ggcggatcacttgaggtcagaaatt

SEQ ID NO: 274349 - DNA, 25 bp, Probe Sequence
ggcgtaagtgttcgggcaggaatct

SEQ ID NO: 274350 - DNA, 25 bp, Probe Sequence
ggcgctgaaggtagcgaccgtcgcc

SEQ ID NO: 274351 - DNA, 25 bp, Probe Sequence
ggcctggaggctatccagcgtactc

SEQ ID NO: 274352 - DNA, 25 bp, Probe Sequence
ggccgaaggtttccattggacctgc

SEQ ID NO: 274353 - DNA, 25 bp, Probe Sequence
ggcccaaagtagagcagctggacct

SEQ ID NO: 274354 - DNA, 25 bp, Probe Sequence
ggcccacaagtacagaccagagaca

SEQ ID NO: 274355 - DNA, 25 bp, Probe Sequence
ggcccacaagtacagaccagagaca

SEQ ID NO: 274356 - DNA, 25 bp, Probe Sequence
ggcgcccacagtgatgatgtcgaga

SEQ ID NO: 274357 - DNA, 25 bp, Probe Sequence
ggcccacgcacagactgacagaatg

SEQ ID NO: 274358 - DNA, 25 bp, Probe Sequence
ggcccacgcacagactgacagaatg

SEQ ID NO: 274359 - DNA, 25 bp, Probe Sequence
ggcccctgccatcaacagaataggg

SEQ ID NO: 274360 - DNA, 25 bp, Probe Sequence
ggccttccctgtcagaagggggttg

SEQ ID NO: 274361 - DNA, 25 bp, Probe Sequence
ggccttccctgtggccacaggaagt

SEQ ID NO: 274362 - DNA, 25 bp, Probe Sequence
ggccttctctttacagactgaaaag

SEQ ID NO: 274363 - DNA, 25 bp, Probe Sequence
ggcccctggtatggacactgaaagg

SEQ ID NO: 274364 - DNA, 25 bp, Probe Sequence
tccccagtaaatgcccgaaatgatt

SEQ ID NO: 274365 - DNA, 25 bp, Probe Sequence
tcctcaaaaagtccgggaagctgaa

SEQ ID NO: 274366 - DNA, 25 bp, Probe Sequence
tcctcaaaaagtccgggaagctgaa

SEQ ID NO: 274367 - DNA, 25 bp, Probe Sequence
tccgacagaacgaggggacgtaacg

SEQ ID NO: 274368 - DNA, 25 bp, Probe Sequence
tcatcggggtcctggggacgaagac

SEQ ID NO: 274369 - DNA, 25 bp, Probe Sequence
tccaggggtccaagggaacaggaga

SEQ ID NO: 274370 - DNA, 25 bp, Probe Sequence
ggccgggatccaaggtgaacaagaa

SEQ ID NO: 274371 - DNA, 25 bp, Probe Sequence
ggcgcaggatatccaggttacagaa

SEQ ID NO: 274372 - DNA, 25 bp, Probe Sequence
ggcgggtattctggtcattgaggag

SEQ ID NO: 274373 - DNA, 25 bp, Probe Sequence
ggcgggcttgaaggccctgatgggt

SEQ ID NO: 274374 - DNA, 25 bp, Probe Sequence
ggcgggcttgaaggccctgatgggt

SEQ ID NO: 274375 - DNA, 25 bp, Probe Sequence
ggcggggtgaagaagcctcatcgct

SEQ ID NO: 274376 - DNA, 25 bp, Probe Sequence
ggctgtcgcctgacagcatacctca

SEQ ID NO: 274377 - DNA, 25 bp, Probe Sequence
ggctgtggccagaagaacatgcctg

SEQ ID NO: 274378 - DNA, 25 bp, Probe Sequence
ggctggccctgcaaagcatgcagcc

SEQ ID NO: 274379 - DNA, 25 bp, Probe Sequence
tggctggcttcaaaatatagtcatt

SEQ ID NO: 274380 - DNA, 25 bp, Probe Sequence
ggctggcttctgaagaatccctgat

SEQ ID NO: 274381 - DNA, 25 bp, Probe Sequence
ggctgtcttgctcaattggccagac

SEQ ID NO: 274382 - DNA, 25 bp, Probe Sequence
ggcgtctttgcatttctgcgaaaga

SEQ ID NO: 274383 - DNA, 25 bp, Probe Sequence
ggcgatcttgtgtctactctaggac

SEQ ID NO: 274384 - DNA, 25 bp, Probe Sequence
ggcgatcttgtgtctactctaggac

SEQ ID NO: 274385 - DNA, 25 bp, Probe Sequence
ggcgtttgaatctagcctaggcaac

SEQ ID NO: 274386 - DNA, 25 bp, Probe Sequence
ggcgctccatgatttagcctgaggc

SEQ ID NO: 274387 - DNA, 25 bp, Probe Sequence
ggcgagcctgagctcatggacgtgc

SEQ ID NO: 274388 - DNA, 25 bp, Probe Sequence
ggctggtctcagctagagtctgatg

SEQ ID NO: 274389 - DNA, 25 bp, Probe Sequence
ggctgggcctgactgaggccattga

SEQ ID NO: 274390 - DNA, 25 bp, Probe Sequence
ggctgggctaggaatggccttggag

SEQ ID NO: 274391 - DNA, 25 bp, Probe Sequence
ggcgggcaaggatgactatgtgaag

SEQ ID NO: 274392 - DNA, 25 bp, Probe Sequence
ggcgggcagaggtgatgtctgggag

SEQ ID NO: 274393 - DNA, 25 bp, Probe Sequence
ggcgggcagtgaacgagtgtgggga

SEQ ID NO: 274394 - DNA, 25 bp, Probe Sequence
ggcgttactgttggacttgggcaga

SEQ ID NO: 274395 - DNA, 25 bp, Probe Sequence
ggcgtgtacgttgggagttcaaaat

SEQ ID NO: 274396 - DNA, 25 bp, Probe Sequence
ggcgtgtacggtgcgagttctatat

SEQ ID NO: 274397 - DNA, 25 bp, Probe Sequence
ggcgtgtacggtgggaggtctatat

SEQ ID NO: 274398 - DNA, 25 bp, Probe Sequence
ggcgtgtacggtgggaggtctatat

SEQ ID NO: 274399 - DNA, 25 bp, Probe Sequence
ggcgtgtacggtgggaggtctatat

SEQ ID NO: 274400 - DNA, 25 bp, Probe Sequence
ggcgtgtacggtgggaggtctatat

SEQ ID NO: 274401 - DNA, 25 bp, Probe Sequence
ggcgtgtacggtgggaggtctatat

SEQ ID NO: 274402 - DNA, 25 bp, Probe Sequence
ggcgtgtacggtgggaggtctatat

SEQ ID NO: 274403 - DNA, 25 bp, Probe Sequence
ggcgtgtacggtgggaggtctatat

SEQ ID NO: 274404 - DNA, 25 bp, Probe Sequence
ggcgtgtacggtgggaggtctatat

SEQ ID NO: 274405 - DNA, 25 bp, Probe Sequence
ggcgtgtacggtgggaggtctatat

SEQ ID NO: 274406 - DNA, 25 bp, Probe Sequence
ggcgtgtacggtgggaggtctatat

SEQ ID NO: 274407 - DNA, 25 bp, Probe Sequence
ggcgtgtacggtggtgaggtctata

SEQ ID NO: 274408 - DNA, 25 bp, Probe Sequence
ggcgtgttgagtgccaaggatcttg

SEQ ID NO: 274409 - DNA, 25 bp, Probe Sequence
ggcgagttaagtccagcaggttctg

SEQ ID NO: 274410 - DNA, 25 bp, Probe Sequence
ggccaacaaagtccaggagttgtgg

SEQ ID NO: 274411 - DNA, 25 bp, Probe Sequence
ggcctcacacccagagggtagggca

SEQ ID NO: 274412 - DNA, 25 bp, Probe Sequence
tggcgtgaacccaggaggtggaggt

SEQ ID NO: 274413 - DNA, 25 bp, Probe Sequence
ggcggcaggcccaggaatggctggg

SEQ ID NO: 274414 - DNA, 25 bp, Probe Sequence
ggcggaggcgccattgaaagcatgg

SEQ ID NO: 274415 - DNA, 25 bp, Probe Sequence
ggctggggcgacgtggacaataatg

SEQ ID NO: 274416 - DNA, 25 bp, Probe Sequence
ggctggggccacttggatgagaacg

SEQ ID NO: 274417 - DNA, 25 bp, Probe Sequence
ggccaggcccaaaggatagaagtgt

SEQ ID NO: 274418 - DNA, 25 bp, Probe Sequence
ggctgtggaccgagagatagaggga

SEQ ID NO: 274419 - DNA, 25 bp, Probe Sequence
ggctgggatctagcgagagagatgc

SEQ ID NO: 274420 - DNA, 25 bp, Probe Sequence
ggcgggtccataagaagatgaggtc

SEQ ID NO: 274421 - DNA, 25 bp, Probe Sequence
ggcgtttgtcatcagaatcagaggt

SEQ ID NO: 274422 - DNA, 25 bp, Probe Sequence
ggcgcatttccacaaagaggtcttc

SEQ ID NO: 274423 - DNA, 25 bp, Probe Sequence
ggccttcacgcataaaggcagtcgt

SEQ ID NO: 274424 - DNA, 25 bp, Probe Sequence
ggccttaccagttgtcaggagtctg

SEQ ID NO: 274425 - DNA, 25 bp, Probe Sequence
tggccatcgagcagttcgaaggtct

SEQ ID NO: 274426 - DNA, 25 bp, Probe Sequence
ggcccagaaagcaggaatggcttgc

SEQ ID NO: 274427 - DNA, 25 bp, Probe Sequence
tggccaacaacgaaggacttttctc

SEQ ID NO: 274428 - DNA, 25 bp, Probe Sequence
tggctcaaaacgatctgaccacctc

SEQ ID NO: 274429 - DNA, 25 bp, Probe Sequence
tggctcgactgcagatcactgacca

SEQ ID NO: 274430 - DNA, 25 bp, Probe Sequence
tggcatcttcatcggaaccatccaa

SEQ ID NO: 274431 - DNA, 25 bp, Probe Sequence
ggccttttggaacatctcagaattc

SEQ ID NO: 274432 - DNA, 25 bp, Probe Sequence
ggccttagatgaaaccttcgacttc

SEQ ID NO: 274433 - DNA, 25 bp, Probe Sequence
ggcgcttcgagagattcgtcgttat

SEQ ID NO: 274434 - DNA, 25 bp, Probe Sequence
ggccattaagaaattcgtcattcga

SEQ ID NO: 274435 - DNA, 25 bp, Probe Sequence
ggcccaaatatactatcttataggg

SEQ ID NO: 274436 - DNA, 25 bp, Probe Sequence
tggcccgaacattctacgtattagt

SEQ ID NO: 274437 - DNA, 25 bp, Probe Sequence
ggccgagaacagtccactttggaaa

SEQ ID NO: 274438 - DNA, 25 bp, Probe Sequence
ggccgtgtccaaagactttgcgtaa

SEQ ID NO: 274439 - DNA, 25 bp, Probe Sequence
ggccgtgttgcaatctacaaagcct

SEQ ID NO: 274440 - DNA, 25 bp, Probe Sequence
ggcctggtggacacaggaagcctac

SEQ ID NO: 274441 - DNA, 25 bp, Probe Sequence
ggcgcggtggagggaaacgcctccg

SEQ ID NO: 274442 - DNA, 25 bp, Probe Sequence
ggcgaagtgaaggagacaccgttcc

SEQ ID NO: 274443 - DNA, 25 bp, Probe Sequence
ggcgacacgaaggatttgctgctgc

SEQ ID NO: 274444 - DNA, 25 bp, Probe Sequence
ggcggagcaggaggctcttactggt

SEQ ID NO: 274445 - DNA, 25 bp, Probe Sequence
ggcgtatatgtatctcttatcaagt

SEQ ID NO: 274446 - DNA, 25 bp, Probe Sequence
ggcgagccagtgtggttgtagagat

SEQ ID NO: 274447 - DNA, 25 bp, Probe Sequence
ggctggcagaggcgaactgtagagt

SEQ ID NO: 274448 - DNA, 25 bp, Probe Sequence
ggcggagcaggatgaactgtctcag

SEQ ID NO: 274449 - DNA, 25 bp, Probe Sequence
ggcgagcgaggctgaaggagccggg

SEQ ID NO: 274450 - DNA, 25 bp, Probe Sequence
ggcgagtgggtaaaggcagccaggc

SEQ ID NO: 274451 - DNA, 25 bp, Probe Sequence
ggcgggaggctgaggctgacaagcc

SEQ ID NO: 274452 - DNA, 25 bp, Probe Sequence
ggcggcggttgcaggcaagaagcct

SEQ ID NO: 274453 - DNA, 25 bp, Probe Sequence
ggcgggcagaagagcacaagaacca

SEQ ID NO: 274454 - DNA, 25 bp, Probe Sequence
ggcggaagaacaagtccatcagacc

SEQ ID NO: 274455 - DNA, 25 bp, Probe Sequence
ggctggtaaacaactgcccatcagc

SEQ ID NO: 274456 - DNA, 25 bp, Probe Sequence
ggctggtatcgatgactgctacacc

SEQ ID NO: 274457 - DNA, 25 bp, Probe Sequence
ggcggtatacagttgctgcaagacc

SEQ ID NO: 274458 - DNA, 25 bp, Probe Sequence
ggcgtaatgcacttatccacaaatc

SEQ ID NO: 274459 - DNA, 25 bp, Probe Sequence
ggcgacagtgcctaagacagaaatt

SEQ ID NO: 274460 - DNA, 25 bp, Probe Sequence
ggcgacagtgcctaagacagaaatt

SEQ ID NO: 274461 - DNA, 25 bp, Probe Sequence
ggcgcactgctttgaaacctatagt

SEQ ID NO: 274462 - DNA, 25 bp, Probe Sequence
tgggttaatcaagaccagaagttca

SEQ ID NO: 274463 - DNA, 25 bp, Probe Sequence
ggcggtcaattagaagaggtgattc

SEQ ID NO: 274464 - DNA, 25 bp, Probe Sequence
ggcgggtttatccaaagggatggct

SEQ ID NO: 274465 - DNA, 25 bp, Probe Sequence
ggcgttggttcaccaggacgtgatg

SEQ ID NO: 274466 - DNA, 25 bp, Probe Sequence
ggcgaaggagtggactggagcgtaa

SEQ ID NO: 274467 - DNA, 25 bp, Probe Sequence
ggcgggggatgggtggactgtatga

SEQ ID NO: 274468 - DNA, 25 bp, Probe Sequence
ggcgggggatgggtggactgtatga

SEQ ID NO: 274469 - DNA, 25 bp, Probe Sequence
ggcgggggatgggtggactgtatga

SEQ ID NO: 274470 - DNA, 25 bp, Probe Sequence
ggcgttgggataggtatgactggct

SEQ ID NO: 274471 - DNA, 25 bp, Probe Sequence
ggccttgaagagtaattgactggat

SEQ ID NO: 274472 - DNA, 25 bp, Probe Sequence
ggcctcgaagggattcctggagcag

SEQ ID NO: 274473 - DNA, 25 bp, Probe Sequence
ggcctccaggggttccttgtggagg

SEQ ID NO: 274474 - DNA, 25 bp, Probe Sequence
ggccatttagggatcgtggggacgg

SEQ ID NO: 274475 - DNA, 25 bp, Probe Sequence
ggccattatatctgtgatgcctatg

SEQ ID NO: 274476 - DNA, 25 bp, Probe Sequence
tggctttgattcttgcagtttgcat

SEQ ID NO: 274477 - DNA, 25 bp, Probe Sequence
ggcctagatctcttatttagcattt

SEQ ID NO: 274478 - DNA, 25 bp, Probe Sequence
ggcccgatagcttatttagctgacc

SEQ ID NO: 274479 - DNA, 25 bp, Probe Sequence
ggcccaggattttcattggctgacc

SEQ ID NO: 274480 - DNA, 25 bp, Probe Sequence
ggcccaagtatctggtggtgaacgc

SEQ ID NO: 274481 - DNA, 25 bp, Probe Sequence
ggcccaagcaggtgggagtggacac

SEQ ID NO: 274482 - DNA, 25 bp, Probe Sequence
ggcccaccagagctgtggagagggg

SEQ ID NO: 274483 - DNA, 25 bp, Probe Sequence
ggcccagctcaacattggcaatgtg

SEQ ID NO: 274484 - DNA, 25 bp, Probe Sequence
tggcgatagtaatattggacatggc

SEQ ID NO: 274485 - DNA, 25 bp, Probe Sequence
ggcgaggtacaagctgagatcaaga

SEQ ID NO: 274486 - DNA, 25 bp, Probe Sequence
ggcgggcagatcacaaagtcaggag

SEQ ID NO: 274487 - DNA, 25 bp, Probe Sequence
ggcgggcagaccatgaggtcaggag

SEQ ID NO: 274488 - DNA, 25 bp, Probe Sequence
ggctggggcccttgagtgataggaa

SEQ ID NO: 274489 - DNA, 25 bp, Probe Sequence
ggctggggccgaacagagaagagag

SEQ ID NO: 274490 - DNA, 25 bp, Probe Sequence
tggctgggacccaactataccaagg

SEQ ID NO: 274491 - DNA, 25 bp, Probe Sequence
ggcgggaagcctatgtaagcaagag

SEQ ID NO: 274492 - DNA, 25 bp, Probe Sequence
ggcgggattcggaggaacctgagtg

SEQ ID NO: 274493 - DNA, 25 bp, Probe Sequence
ggctggttttggacagcgacaccgg

SEQ ID NO: 274494 - DNA, 25 bp, Probe Sequence
ggcgcgtttgtgtatatctgcctcc

SEQ ID NO: 274495 - DNA, 25 bp, Probe Sequence
ggccgttgggactttgatacccagg

SEQ ID NO: 274496 - DNA, 25 bp, Probe Sequence
ggccgttgggactttgatacccagg

SEQ ID NO: 274497 - DNA, 25 bp, Probe Sequence
ggccgtggaggggcttaacgggcag

SEQ ID NO: 274498 - DNA, 25 bp, Probe Sequence
ggcctgttaagtgttaactatggaa

SEQ ID NO: 274499 - DNA, 25 bp, Probe Sequence
tggctttttattgttttgttggtga

SEQ ID NO: 274500 - DNA, 25 bp, Probe Sequence
tggttattttatgtttcagtcccta

SEQ ID NO: 274501 - DNA, 25 bp, Probe Sequence
ggcgcttttattaattgttgtccta

SEQ ID NO: 274502 - DNA, 25 bp, Probe Sequence
ggcctgtaccttttagtatgaccta

SEQ ID NO: 274503 - DNA, 25 bp, Probe Sequence
ggcggcccctggagatgattgagcc

SEQ ID NO: 274504 - DNA, 25 bp, Probe Sequence
ggcgttcagccacccgagattgagc

SEQ ID NO: 274505 - DNA, 25 bp, Probe Sequence
ggcgtgggcatcagccaggattgcc

SEQ ID NO: 274506 - DNA, 25 bp, Probe Sequence
ggcctgggactaccaggcctgcacc

SEQ ID NO: 274507 - DNA, 25 bp, Probe Sequence
ggccgggacatggcgaaccggatca

SEQ ID NO: 274508 - DNA, 25 bp, Probe Sequence
ggcgtgggcaatgtgacaccagcac

SEQ ID NO: 274509 - DNA, 25 bp, Probe Sequence
ggcgttgtcaatatgtaccacatga

SEQ ID NO: 274510 - DNA, 25 bp, Probe Sequence
ggcgcatatgcatattttccctgca

SEQ ID NO: 274511 - DNA, 25 bp, Probe Sequence
ggccatcagtatttattgcctccgt

SEQ ID NO: 274512 - DNA, 25 bp, Probe Sequence
ggcgcacagtgtgggttgcgggtgc

SEQ ID NO: 274513 - DNA, 25 bp, Probe Sequence
ggcgaagtggtgatgtgttggtctc

SEQ ID NO: 274514 - DNA, 25 bp, Probe Sequence
ggcccagatgggttgttacgtccct

SEQ ID NO: 274515 - DNA, 25 bp, Probe Sequence
ggcccatatgggagacttcagtctc

SEQ ID NO: 274516 - DNA, 25 bp, Probe Sequence
ggcccagagggaaactaaacatgcc

SEQ ID NO: 274517 - DNA, 25 bp, Probe Sequence
ggcccaggggcccagtaaagtgcat

SEQ ID NO: 274518 - DNA, 25 bp, Probe Sequence
ggcctaagccccgatgtaaaatgta

SEQ ID NO: 274519 - DNA, 25 bp, Probe Sequence
tggccccgccggatgtataaatgta

SEQ ID NO: 274520 - DNA, 25 bp, Probe Sequence
ggcccaggtcgtcattaaggagtga

SEQ ID NO: 274521 - DNA, 25 bp, Probe Sequence
ggcggcgttaggtttgagagaagga

SEQ ID NO: 274522 - DNA, 25 bp, Probe Sequence
tggcggtggaaatttcggaccagga

SEQ ID NO: 274523 - DNA, 25 bp, Probe Sequence
ggccggggaaatggcggcttcagga

SEQ ID NO: 274524 - DNA, 25 bp, Probe Sequence
ggcctgggggaagcaggatttgtgc

SEQ ID NO: 274525 - DNA, 25 bp, Probe Sequence
ggcctttgttaagcagcgagggcgc

SEQ ID NO: 274526 - DNA, 25 bp, Probe Sequence
ggcgcttccttgagtaggtgggctc

SEQ ID NO: 274527 - DNA, 25 bp, Probe Sequence
ggccttccgggaaaggatggatcct

SEQ ID NO: 274528 - DNA, 25 bp, Probe Sequence
ggccggctggggacaaggtgtgagc

SEQ ID NO: 274529 - DNA, 25 bp, Probe Sequence
ggccgtgagcaggtgggccgttgag

SEQ ID NO: 274530 - DNA, 25 bp, Probe Sequence
ggcctggacgaggaggcctctgggc

SEQ ID NO: 274531 - DNA, 25 bp, Probe Sequence
tggctatgcgtctgaagggtttggg

SEQ ID NO: 274532 - DNA, 25 bp, Probe Sequence
tggccatggtaccggggacttggga

SEQ ID NO: 274533 - DNA, 25 bp, Probe Sequence
ggcctggtccatctggagttttgag

SEQ ID NO: 274534 - DNA, 25 bp, Probe Sequence
ggcctggccatataggagggtgggt

SEQ ID NO: 274535 - DNA, 25 bp, Probe Sequence
ggccattggtactgggcaggattgg

SEQ ID NO: 274536 - DNA, 25 bp, Probe Sequence
ggccttgggattcagagcgaagttg

SEQ ID NO: 274537 - DNA, 25 bp, Probe Sequence
ggccgcgggacggatgaacaatgtt

SEQ ID NO: 274538 - DNA, 25 bp, Probe Sequence
ggcggcaaaacctatcatcaactgt

SEQ ID NO: 274539 - DNA, 25 bp, Probe Sequence
ggctggactaattcaatcaagatca

SEQ ID NO: 274540 - DNA, 25 bp, Probe Sequence
ggcgacagctacatcattctgtaca

SEQ ID NO: 274541 - DNA, 25 bp, Probe Sequence
ggcgacagtgcaagactctgtctcc

SEQ ID NO: 274542 - DNA, 25 bp, Probe Sequence
ggcccaatcttgtcattgtgcagcc

SEQ ID NO: 274543 - DNA, 25 bp, Probe Sequence
ggcccaggctaagttagccctcacc

SEQ ID NO: 274544 - DNA, 25 bp, Probe Sequence
ggccgcatggatgttgctgagccct

SEQ ID NO: 274545 - DNA, 25 bp, Probe Sequence
ggccgcatggatgttgctgagccct

SEQ ID NO: 274546 - DNA, 25 bp, Probe Sequence
ggccgaggactttgattgcacattg

SEQ ID NO: 274547 - DNA, 25 bp, Probe Sequence
ggcgcagatgcagctgaagtactac

SEQ ID NO: 274548 - DNA, 25 bp, Probe Sequence
ggcgcagagcaactatcagggcatg

SEQ ID NO: 274549 - DNA, 25 bp, Probe Sequence
tggctgcaggaaatagatcgttatg

SEQ ID NO: 274550 - DNA, 25 bp, Probe Sequence
tggcgtggcagaatacctctttgac

SEQ ID NO: 274551 - DNA, 25 bp, Probe Sequence
tggctgatgtcaagttctctttcca

SEQ ID NO: 274552 - DNA, 25 bp, Probe Sequence
ggctggaatggaactcctcactagc

SEQ ID NO: 274553 - DNA, 25 bp, Probe Sequence
ggccgttagttatctattactagtg

SEQ ID NO: 274554 - DNA, 25 bp, Probe Sequence
ggcctgttgagttgtttttagtgac

SEQ ID NO: 274555 - DNA, 25 bp, Probe Sequence
ggccagagtggcattatgtttttac

SEQ ID NO: 274556 - DNA, 25 bp, Probe Sequence
tggagcaaggacaggtttgcttaca

SEQ ID NO: 274557 - DNA, 25 bp, Probe Sequence
ggcgcgatatgaacgttttgttaag

SEQ ID NO: 274558 - DNA, 25 bp, Probe Sequence
tgggccgttagcgttacgttggagg

SEQ ID NO: 274559 - DNA, 25 bp, Probe Sequence
ggccctgtttgcaattcacgttgcc

SEQ ID NO: 274560 - DNA, 25 bp, Probe Sequence
ggcgctccattaaatagccgtagac

SEQ ID NO: 274561 - DNA, 25 bp, Probe Sequence
ggcgctcaattaaaagcctatcagt

SEQ ID NO: 274562 - DNA, 25 bp, Probe Sequence
ggcgccagtgaaataccactacctt

SEQ ID NO: 274563 - DNA, 25 bp, Probe Sequence
ggcgccagtgaattaataaggcctt

SEQ ID NO: 274564 - DNA, 25 bp, Probe Sequence
ggcgccggattttaaatagcgtatt

SEQ ID NO: 274565 - DNA, 25 bp, Probe Sequence
ggcctcggcatgtttcaataaagtt

SEQ ID NO: 274566 - DNA, 25 bp, Probe Sequence
ggcccagtctgtttcaaataaatga

SEQ ID NO: 274567 - DNA, 25 bp, Probe Sequence
ggcgtctgtgtttcgcaaaagttgg

SEQ ID NO: 274568 - DNA, 25 bp, Probe Sequence
ggcggctgtgttgcctatgtagaga

SEQ ID NO: 274569 - DNA, 25 bp, Probe Sequence
ggccctgtctagtcccaggaaagta

SEQ ID NO: 274570 - DNA, 25 bp, Probe Sequence
ggccctgttgagtctatctggtaac

SEQ ID NO: 274571 - DNA, 25 bp, Probe Sequence
ggccctggcaagtcagtcttagaac

SEQ ID NO: 274572 - DNA, 25 bp, Probe Sequence
ggccactccaaatttgcaacagttc

SEQ ID NO: 274573 - DNA, 25 bp, Probe Sequence
ggccacccgaggaagcagtattatc

SEQ ID NO: 274574 - DNA, 25 bp, Probe Sequence
ggcccagccgagggtggatttatct

SEQ ID NO: 274575 - DNA, 25 bp, Probe Sequence
ggcccatgcacgtttattatttatt

SEQ ID NO: 274576 - DNA, 25 bp, Probe Sequence
ggcgaatgctccttgtgttatattt

SEQ ID NO: 274577 - DNA, 25 bp, Probe Sequence
tggctaattgcctgttcttttccag

SEQ ID NO: 274578 - DNA, 25 bp, Probe Sequence
ggcgacatacctttcttttagccaa

SEQ ID NO: 274579 - DNA, 25 bp, Probe Sequence
ggccacaattctttcttctggggcc

SEQ ID NO: 274580 - DNA, 25 bp, Probe Sequence
ggcctagtattctcttcgggcaaag

SEQ ID NO: 274581 - DNA, 25 bp, Probe Sequence
ggcctatgtttctggcttgggcttt

SEQ ID NO: 274582 - DNA, 25 bp, Probe Sequence
tggcgtaggcttttcggtggagttc

SEQ ID NO: 274583 - DNA, 25 bp, Probe Sequence
ggcctacgtgaagcggtggctttgg

SEQ ID NO: 274584 - DNA, 25 bp, Probe Sequence
tggccggggaaatggcggcttcagg

SEQ ID NO: 274585 - DNA, 25 bp, Probe Sequence
tggtcagggcctggaagtaccttag

SEQ ID NO: 274586 - DNA, 25 bp, Probe Sequence
ggccacggagggaggatcacttgag

SEQ ID NO: 274587 - DNA, 25 bp, Probe Sequence
ggccgaggtgggaggattgcttgag

SEQ ID NO: 274588 - DNA, 25 bp, Probe Sequence
ggccgaggtgggaggattgcttgag

SEQ ID NO: 274589 - DNA, 25 bp, Probe Sequence
ggcccaaggtggagtattcagaaga

SEQ ID NO: 274590 - DNA, 25 bp, Probe Sequence
ggcccagaactgcatttgattaaag

SEQ ID NO: 274591 - DNA, 25 bp, Probe Sequence
ggcccagataatgagctgagattca

SEQ ID NO: 274592 - DNA, 25 bp, Probe Sequence
ggccgcagagaagactatgttggtg

SEQ ID NO: 274593 - DNA, 25 bp, Probe Sequence
ggcccagatgacggaagtgtggtgg

SEQ ID NO: 274594 - DNA, 25 bp, Probe Sequence
ggccgcattgacaagaagatcgagt

SEQ ID NO: 274595 - DNA, 25 bp, Probe Sequence
ggccgcctgcaggatgagattcaga

SEQ ID NO: 274596 - DNA, 25 bp, Probe Sequence
ggcctgcaccagaagatgtctgcat

SEQ ID NO: 274597 - DNA, 25 bp, Probe Sequence
ggcccaggaaagatctgcatccata

SEQ ID NO: 274598 - DNA, 25 bp, Probe Sequence
ggcccagcatgagaacttcaggaaa

SEQ ID NO: 274599 - DNA, 25 bp, Probe Sequence
ggcctagcagatgaagcttgccagc

SEQ ID NO: 274600 - DNA, 25 bp, Probe Sequence
ggcgatgcacaacagattatacggc

SEQ ID NO: 274601 - DNA, 25 bp, Probe Sequence
ggccatggccataggtgaggggcct

SEQ ID NO: 274602 - DNA, 25 bp, Probe Sequence
ggcctggactggacatgagagcccc

SEQ ID NO: 274603 - DNA, 25 bp, Probe Sequence
ggcctggactggacatgagagcccc

SEQ ID NO: 274604 - DNA, 25 bp, Probe Sequence
tggcctggagggcaggtgccctctg

SEQ ID NO: 274605 - DNA, 25 bp, Probe Sequence
ggcctggcaggtagcaagggcccag

SEQ ID NO: 274606 - DNA, 25 bp, Probe Sequence
ggcggtgcatggcagcacagccgcc

SEQ ID NO: 274607 - DNA, 25 bp, Probe Sequence
tggcaagtggtaccacacctgcgga

SEQ ID NO: 274608 - DNA, 25 bp, Probe Sequence
ggcgatctggaacagcacgtggtgg

SEQ ID NO: 274609 - DNA, 25 bp, Probe Sequence
ggcgacacgagagagacgggcggtg

SEQ ID NO: 274610 - DNA, 25 bp, Probe Sequence
ggcgctcccatctcagacgatgggc

SEQ ID NO: 274611 - DNA, 25 bp, Probe Sequence
ggcgatcctgcttccaaagatcagg

SEQ ID NO: 274612 - DNA, 25 bp, Probe Sequence
ggcgatgcgtgcgacgacgacatcg

SEQ ID NO: 274613 - DNA, 25 bp, Probe Sequence
ggcgatggggacgatggacagagac

SEQ ID NO: 274614 - DNA, 25 bp, Probe Sequence
ggcgagtgcaagaccagagacaacc

SEQ ID NO: 274615 - DNA, 25 bp, Probe Sequence
ggcgttctcagcagcagcaagtacc

SEQ ID NO: 274616 - DNA, 25 bp, Probe Sequence
ggccgccatcagggacaagtaccgg

SEQ ID NO: 274617 - DNA, 25 bp, Probe Sequence
ggcgcccacaatatccagagacggg

SEQ ID NO: 274618 - DNA, 25 bp, Probe Sequence
ggcccactcgtttctagaactgtga

SEQ ID NO: 274619 - DNA, 25 bp, Probe Sequence
ggccgaacattttcagaaatctttc

SEQ ID NO: 274620 - DNA, 25 bp, Probe Sequence
ggcgctagacatgtacagaggtttt

SEQ ID NO: 274621 - DNA, 25 bp, Probe Sequence
ggcggagaagattacaatggctatt

SEQ ID NO: 274622 - DNA, 25 bp, Probe Sequence
ggcgtagtaatcaatcacatgagta

SEQ ID NO: 274623 - DNA, 25 bp, Probe Sequence
ggcgctggctcagtcaataaaggat

SEQ ID NO: 274624 - DNA, 25 bp, Probe Sequence
ggccgccatgcactcaataaagaat

SEQ ID NO: 274625 - DNA, 25 bp, Probe Sequence
ggccccagaccaatgaacgatgata

SEQ ID NO: 274626 - DNA, 25 bp, Probe Sequence
ggccccatggtattggatgctttaa

SEQ ID NO: 274627 - DNA, 25 bp, Probe Sequence
ggccccattgtaatcgaatcccaaa

SEQ ID NO: 274628 - DNA, 25 bp, Probe Sequence
ggccattacgtcacttatgccaaaa

SEQ ID NO: 274629 - DNA, 25 bp, Probe Sequence
ggccttcaagttattgggctcagtg

SEQ ID NO: 274630 - DNA, 25 bp, Probe Sequence
ggccttgggttcattcaagctcacg

SEQ ID NO: 274631 - DNA, 25 bp, Probe Sequence
ggccaggggtggccatgtaagtccc

SEQ ID NO: 274632 - DNA, 25 bp, Probe Sequence
ggccaggcggtactgcagaagagta

SEQ ID NO: 274633 - DNA, 25 bp, Probe Sequence
ggccattgcttctaacagtaagatc

SEQ ID NO: 274634 - DNA, 25 bp, Probe Sequence
ggccattcattctggcttcaaactt

SEQ ID NO: 274635 - DNA, 25 bp, Probe Sequence
ggccgtttcagtcttcaatctgttt

SEQ ID NO: 274636 - DNA, 25 bp, Probe Sequence
ggccgttccagtgctgatcattggc

SEQ ID NO: 274637 - DNA, 25 bp, Probe Sequence
ggccgttccagtgctgatcattggc

SEQ ID NO: 274638 - DNA, 25 bp, Probe Sequence
ggccgtacacgtgtgacatctgcca

SEQ ID NO: 274639 - DNA, 25 bp, Probe Sequence
ggcgcagtggcacatgcctgtaatc

SEQ ID NO: 274640 - DNA, 25 bp, Probe Sequence
ggcccatgaggcatgcatttaatcc

SEQ ID NO: 274641 - DNA, 25 bp, Probe Sequence
ggcccaagtcattgtttttctcgcc

SEQ ID NO: 274642 - DNA, 25 bp, Probe Sequence
ggcccacaagtatcactaagctcgc

SEQ ID NO: 274643 - DNA, 25 bp, Probe Sequence
ggcccaagagtgacaagcatacaca

SEQ ID NO: 274644 - DNA, 25 bp, Probe Sequence
ggcgcgaacactggaatgcatatac

SEQ ID NO: 274645 - DNA, 25 bp, Probe Sequence
ggcgtgagaagccatgagcagcaaa

SEQ ID NO: 274646 - DNA, 25 bp, Probe Sequence
ggcgtgcaatatctgccagcagaac

SEQ ID NO: 274647 - DNA, 25 bp, Probe Sequence
ggcgtgcaaagactccagaattgga

SEQ ID NO: 274648 - DNA, 25 bp, Probe Sequence
ggcgtgctcaagtatcggtacgaga

SEQ ID NO: 274649 - DNA, 25 bp, Probe Sequence
ggcgtctaagtcaggcagaagagag

SEQ ID NO: 274650 - DNA, 25 bp, Probe Sequence
ggccctacttccaggatggatgcat

SEQ ID NO: 274651 - DNA, 25 bp, Probe Sequence
ggccagttttaccaggaggtgctct

SEQ ID NO: 274652 - DNA, 25 bp, Probe Sequence
ggccacttcgtctgaggaaggctca

SEQ ID NO: 274653 - DNA, 25 bp, Probe Sequence
ggccagccatcgatggggatcgaca

SEQ ID NO: 274654 - DNA, 25 bp, Probe Sequence
ggccgccacgagagggcaggagagc

SEQ ID NO: 274655 - DNA, 25 bp, Probe Sequence
ggccaggtggagaatttagggagca

SEQ ID NO: 274656 - DNA, 25 bp, Probe Sequence
tggacaggtgaaccttcggggacca

SEQ ID NO: 274657 - DNA, 25 bp, Probe Sequence
tggagcggctgcaatgccttaacga

SEQ ID NO: 274658 - DNA, 25 bp, Probe Sequence
ggcgctgccgcgcagcttgaacgac

SEQ ID NO: 274659 - DNA, 25 bp, Probe Sequence
ggccgcatgcggcaatttgacgacc

SEQ ID NO: 274660 - DNA, 25 bp, Probe Sequence
ggcccagctggttattgactctgac

SEQ ID NO: 274661 - DNA, 25 bp, Probe Sequence
ggcgcctctttctttgacatagaag

SEQ ID NO: 274662 - DNA, 25 bp, Probe Sequence
ggccctcttgttctaactgaagttc

SEQ ID NO: 274663 - DNA, 25 bp, Probe Sequence
ggccctcttgttctaactgaagttc

SEQ ID NO: 274664 - DNA, 25 bp, Probe Sequence
ggcccacttgggcagtacatcaagt

SEQ ID NO: 274665 - DNA, 25 bp, Probe Sequence
ggcctacttgtgggacaacaaccag

SEQ ID NO: 274666 - DNA, 25 bp, Probe Sequence
ggcctttaaggtcaaacacaagagg

SEQ ID NO: 274667 - DNA, 25 bp, Probe Sequence
tggctccttccacaaaccaaaaagc

SEQ ID NO: 274668 - DNA, 25 bp, Probe Sequence
tggttcccatcaaaattccatgaaa

SEQ ID NO: 274669 - DNA, 25 bp, Probe Sequence
tggttaaccaacctgtccaatacaa

SEQ ID NO: 274670 - DNA, 25 bp, Probe Sequence
tggtttaagaaccggaggcaaagag

SEQ ID NO: 274671 - DNA, 25 bp, Probe Sequence
tggctttcaaaaccgtaagcccagg

SEQ ID NO: 274672 - DNA, 25 bp, Probe Sequence
tggctttcacaatcttataacctag

SEQ ID NO: 274673 - DNA, 25 bp, Probe Sequence
ggccttgacaaagtgtaaaccgcat

SEQ ID NO: 274674 - DNA, 25 bp, Probe Sequence
ggcctgatgaaactatgggaccctt

SEQ ID NO: 274675 - DNA, 25 bp, Probe Sequence
ggccctatattatggtgacacctat

SEQ ID NO: 274676 - DNA, 25 bp, Probe Sequence
ggcccatcttaatgcctacagcacc

SEQ ID NO: 274677 - DNA, 25 bp, Probe Sequence
ggcctttctgaatgttatctccaac

SEQ ID NO: 274678 - DNA, 25 bp, Probe Sequence
ggcgctacattggggtgatgatgct

SEQ ID NO: 274679 - DNA, 25 bp, Probe Sequence
ggcgctaattgttgtgataatttgt

SEQ ID NO: 274680 - DNA, 25 bp, Probe Sequence
ggcgctggagtgagatgggatttgg

SEQ ID NO: 274681 - DNA, 25 bp, Probe Sequence
ggcgcagttgtgtagcagttgagta

SEQ ID NO: 274682 - DNA, 25 bp, Probe Sequence
ggcgcaccggattgcagaaggtaca

SEQ ID NO: 274683 - DNA, 25 bp, Probe Sequence
ggcgatgtccagaaagaatgcgtgc

SEQ ID NO: 274684 - DNA, 25 bp, Probe Sequence
ggccaaccatgagacacatcgccaa

SEQ ID NO: 274685 - DNA, 25 bp, Probe Sequence
ggcctgggaggggcaatcctcaaat

SEQ ID NO: 274686 - DNA, 25 bp, Probe Sequence
ggccgtggtggatgatgacgccaac

SEQ ID NO: 274687 - DNA, 25 bp, Probe Sequence
ggcctgggcgtatgcagaggccgcc

SEQ ID NO: 274688 - DNA, 25 bp, Probe Sequence
ggcgctggggtatcagtgagggcgg

SEQ ID NO: 274689 - DNA, 25 bp, Probe Sequence
ggcctggcgtttcaggagagagggg

SEQ ID NO: 274690 - DNA, 25 bp, Probe Sequence
ggccagggtttacccagtgggacag

SEQ ID NO: 274691 - DNA, 25 bp, Probe Sequence
ggccacgggcttgggtagtggaaag

SEQ ID NO: 274692 - DNA, 25 bp, Probe Sequence
ggcccctggtctgtgaattaaatgg

SEQ ID NO: 274693 - DNA, 25 bp, Probe Sequence
ggcccagttttcaggcatgtagaat

SEQ ID NO: 274694 - DNA, 25 bp, Probe Sequence
ggcccagttcttacaggatatcagt

SEQ ID NO: 274695 - DNA, 25 bp, Probe Sequence
ggcccaaacctgacatggacaagca

SEQ ID NO: 274696 - DNA, 25 bp, Probe Sequence
ggcctaaggttgacaagatgcaaga

SEQ ID NO: 274697 - DNA, 25 bp, Probe Sequence
ggcctaaccttgacctatgatggaa

SEQ ID NO: 274698 - DNA, 25 bp, Probe Sequence
ggcctacacagcagtccttgatggc

SEQ ID NO: 274699 - DNA, 25 bp, Probe Sequence
ggcctaacaggagtgcccattggca

SEQ ID NO: 274700 - DNA, 25 bp, Probe Sequence
ggccgacagcaacgtggtcttggac

SEQ ID NO: 274701 - DNA, 25 bp, Probe Sequence
ggccgacagcaacgtggtcttggac

SEQ ID NO: 274702 - DNA, 25 bp, Probe Sequence
ggccgacagcaacgtggtcttggac

SEQ ID NO: 274703 - DNA, 25 bp, Probe Sequence
ggccgaggaaggcattgctgctgga

SEQ ID NO: 274704 - DNA, 25 bp, Probe Sequence
ggccggccaatggacagtcagtgga

SEQ ID NO: 274705 - DNA, 25 bp, Probe Sequence
ggcctcccatatgggcctgagttgt

SEQ ID NO: 274706 - DNA, 25 bp, Probe Sequence
ggccctgcactgtcagagactgaat

SEQ ID NO: 274707 - DNA, 25 bp, Probe Sequence
ggccccgtgatcaaggtgaacagca

SEQ ID NO: 274708 - DNA, 25 bp, Probe Sequence
ggcccaggaatcggagcgaagcaga

SEQ ID NO: 274709 - DNA, 25 bp, Probe Sequence
ggccctgcaactgggacgaagctga

SEQ ID NO: 274710 - DNA, 25 bp, Probe Sequence
ggccactgccaaggcgacaagtcaa

SEQ ID NO: 274711 - DNA, 25 bp, Probe Sequence
ggcctctcacacaagcgatgtaaaa

SEQ ID NO: 274712 - DNA, 25 bp, Probe Sequence
ggccccacctagttgcaaaggacac

SEQ ID NO: 274713 - DNA, 25 bp, Probe Sequence
ggccctcatctctgtggaaaagata

SEQ ID NO: 274714 - DNA, 25 bp, Probe Sequence
ggccctgatcagcaagtaaaaatag

SEQ ID NO: 274715 - DNA, 25 bp, Probe Sequence
ggccctgccacgattaaagactgag

SEQ ID NO: 274716 - DNA, 25 bp, Probe Sequence
ggcctagcaacgcttgtaggactca

SEQ ID NO: 274717 - DNA, 25 bp, Probe Sequence
ggccccatcatcctggtggggaata

SEQ ID NO: 274718 - DNA, 25 bp, Probe Sequence
ggccgcagacacaggagtgggagaa

SEQ ID NO: 274719 - DNA, 25 bp, Probe Sequence
ggccaggtgcacaggttggaaatgc

SEQ ID NO: 274720 - DNA, 25 bp, Probe Sequence
ggcctgggactttttgtgagttcat

SEQ ID NO: 274721 - DNA, 25 bp, Probe Sequence
ggccggcatttgtattggggttgca

SEQ ID NO: 274722 - DNA, 25 bp, Probe Sequence
ggccggatattctgtggggacgtgg

SEQ ID NO: 274723 - DNA, 25 bp, Probe Sequence
ggcctgttgttctgggatggccgtg

SEQ ID NO: 274724 - DNA, 25 bp, Probe Sequence
ggcctttgttcgggaggtgctgggc

SEQ ID NO: 274725 - DNA, 25 bp, Probe Sequence
ggcctttattcctgaatcttggcta

SEQ ID NO: 274726 - DNA, 25 bp, Probe Sequence
ggcctttttgattaaattcctgctc

SEQ ID NO: 274727 - DNA, 25 bp, Probe Sequence
ggccatttggtacataatccagcac

SEQ ID NO: 274728 - DNA, 25 bp, Probe Sequence
ggccttcgacctttataccagaggg

SEQ ID NO: 274729 - DNA, 25 bp, Probe Sequence
ggccctctaggcagtaggcaaggag

SEQ ID NO: 274730 - DNA, 25 bp, Probe Sequence
ggcccactgggcagtacatcaagtg

SEQ ID NO: 274731 - DNA, 25 bp, Probe Sequence
ggcccactgggcaggacatcaagtg

SEQ ID NO: 274732 - DNA, 25 bp, Probe Sequence
ggcccacagcggggaggccaagagg

SEQ ID NO: 274733 - DNA, 25 bp, Probe Sequence
tgagccccggggtgtgctaaagagg

SEQ ID NO: 274734 - DNA, 25 bp, Probe Sequence
ggccctagggagcagttacaagggc

SEQ ID NO: 274735 - DNA, 25 bp, Probe Sequence
ggcccctggtgtgcaggaaccgggc

SEQ ID NO: 274736 - DNA, 25 bp, Probe Sequence
ggcccctggtgtgtggcaaaggccg

SEQ ID NO: 274737 - DNA, 25 bp, Probe Sequence
tggctcccgggactttgggaggccg

SEQ ID NO: 274738 - DNA, 25 bp, Probe Sequence
ggccttcgggagctgggaagagcac

SEQ ID NO: 274739 - DNA, 25 bp, Probe Sequence
ggcgcccagtggtagtgagggagag

SEQ ID NO: 274740 - DNA, 25 bp, Probe Sequence
ggcccaaggatgtcggagggagaaa

SEQ ID NO: 274741 - DNA, 25 bp, Probe Sequence
tggccccaggaagcgaaggaacaaa

SEQ ID NO: 274742 - DNA, 25 bp, Probe Sequence
tggccccaggaagcgaaggaacaaa

SEQ ID NO: 274743 - DNA, 25 bp, Probe Sequence
ggcccctggaactggagggagtgaa

SEQ ID NO: 274744 - DNA, 25 bp, Probe Sequence
ggccctggagtacttggaggggctg

SEQ ID NO: 274745 - DNA, 25 bp, Probe Sequence
ggccctaaattcttgaagtctggtg

SEQ ID NO: 274746 - DNA, 25 bp, Probe Sequence
ggcccaagaactttggtgtggtctg

SEQ ID NO: 274747 - DNA, 25 bp, Probe Sequence
ggcgcagaggaagttcggtgtggtc

SEQ ID NO: 274748 - DNA, 25 bp, Probe Sequence
ggcgagacccagatgctggtgggct

SEQ ID NO: 274749 - DNA, 25 bp, Probe Sequence
ggcgaggttcatcatggaggcaggt

SEQ ID NO: 274750 - DNA, 25 bp, Probe Sequence
ggcgagtgtccttcaggaggtggct

SEQ ID NO: 274751 - DNA, 25 bp, Probe Sequence
ggcgacttcctaatggcacagaact

SEQ ID NO: 274752 - DNA, 25 bp, Probe Sequence
ggcgacgacccattcgaacgtctgc

SEQ ID NO: 274753 - DNA, 25 bp, Probe Sequence
ggcgcaaatccctcaggaagcttga

SEQ ID NO: 274754 - DNA, 25 bp, Probe Sequence
ggcgatgaaggtgatactggacttg

SEQ ID NO: 274755 - DNA, 25 bp, Probe Sequence
ggccagtaggatgtacataggtgtg

SEQ ID NO: 274756 - DNA, 25 bp, Probe Sequence
ggcctgcaaggagaactattgtctt

SEQ ID NO: 274757 - DNA, 25 bp, Probe Sequence
ggcctagggagccgcaccttgtcat

SEQ ID NO: 274758 - DNA, 25 bp, Probe Sequence
ggcctggggatgtccccaatgctgt

SEQ ID NO: 274759 - DNA, 25 bp, Probe Sequence
ggcctggtgggcgagatcatcaagc

SEQ ID NO: 274760 - DNA, 25 bp, Probe Sequence
ggcctagggcgtggagctatgggtc

SEQ ID NO: 274761 - DNA, 25 bp, Probe Sequence
ggcccgggccatcgccattgctgcg

SEQ ID NO: 274762 - DNA, 25 bp, Probe Sequence
ggccgcgggctcagctaccgcggcc

SEQ ID NO: 274763 - DNA, 25 bp, Probe Sequence
ggcctgcgagggaggaacgggccgc

SEQ ID NO: 274764 - DNA, 25 bp, Probe Sequence
ggccgcgagtttgggaatctgacgc

SEQ ID NO: 274765 - DNA, 25 bp, Probe Sequence
ggccatctgagtacttgaccttaag

SEQ ID NO: 274766 - DNA, 25 bp, Probe Sequence
ggcctgctgtgtacatctgagcatc

SEQ ID NO: 274767 - DNA, 25 bp, Probe Sequence
ggcctgcatgactaccatgacatca

SEQ ID NO: 274768 - DNA, 25 bp, Probe Sequence
ggccatctagcattccatacaaaat

SEQ ID NO: 274769 - DNA, 25 bp, Probe Sequence
ggccacggaccacataataatagaa

SEQ ID NO: 274770 - DNA, 25 bp, Probe Sequence
ggccaccgtccgaataacagacagc

SEQ ID NO: 274771 - DNA, 25 bp, Probe Sequence
ggcccacagccttggaaacagacct

SEQ ID NO: 274772 - DNA, 25 bp, Probe Sequence
ggcccaagtcggaaacagagcatgt

SEQ ID NO: 274773 - DNA, 25 bp, Probe Sequence
ggccctcagatccttagtattgtgt

SEQ ID NO: 274774 - DNA, 25 bp, Probe Sequence
ggcctattgtgacttacttatctgt

SEQ ID NO: 274775 - DNA, 25 bp, Probe Sequence
ggccttccatgaccaacttaatgtg

SEQ ID NO: 274776 - DNA, 25 bp, Probe Sequence
ggcctacacagacagaaatgtattt

SEQ ID NO: 274777 - DNA, 25 bp, Probe Sequence
ggccgaaaaggatatgcagtatgct

SEQ ID NO: 274778 - DNA, 25 bp, Probe Sequence
ggcccaaaagctgttgcactacctc

SEQ ID NO: 274779 - DNA, 25 bp, Probe Sequence
ggcccagaagaggtttcccatctgc

SEQ ID NO: 274780 - DNA, 25 bp, Probe Sequence
ggcctgaaggaactattgccctctg

SEQ ID NO: 274781 - DNA, 25 bp, Probe Sequence
ggcgagacagtgagtggatccgctc

SEQ ID NO: 274782 - DNA, 25 bp, Probe Sequence
tggctggcaactctgaagtcatcct

SEQ ID NO: 274783 - DNA, 25 bp, Probe Sequence
ggcgctgaagtgcctgaagtgatca

SEQ ID NO: 274784 - DNA, 25 bp, Probe Sequence
ggccgagcaggcctgcaaggagaag

SEQ ID NO: 274785 - DNA, 25 bp, Probe Sequence
ggcgagaggcgaggctgagcgaaag

SEQ ID NO: 274786 - DNA, 25 bp, Probe Sequence
tggcgggcagaggactaccacaaat

SEQ ID NO: 274787 - DNA, 25 bp, Probe Sequence
ggcgatggctacgtggacacagaaa

SEQ ID NO: 274788 - DNA, 25 bp, Probe Sequence
ggcgcagagtccgtgtgagactgct

SEQ ID NO: 274789 - DNA, 25 bp, Probe Sequence
ggcgcaggcccaggaatggctgggt

SEQ ID NO: 274790 - DNA, 25 bp, Probe Sequence
ggccagcacaccgggatggatggag

SEQ ID NO: 274791 - DNA, 25 bp, Probe Sequence
ggccgcatgacggtcaataaggacg

SEQ ID NO: 274792 - DNA, 25 bp, Probe Sequence
ggccctgaccaggaagacaggtggg

SEQ ID NO: 274793 - DNA, 25 bp, Probe Sequence
ggccttgacccacaggacgtgtggt

SEQ ID NO: 274794 - DNA, 25 bp, Probe Sequence
ggcccaggagccatgaggacagttg

SEQ ID NO: 274795 - DNA, 25 bp, Probe Sequence
ggcgccgacaggatgggcaagtgtc

SEQ ID NO: 274796 - DNA, 25 bp, Probe Sequence
ggccctgatcacgttgggcatctgc

SEQ ID NO: 274797 - DNA, 25 bp, Probe Sequence
ggcgcctgtcacgtgtgagacatag

SEQ ID NO: 274798 - DNA, 25 bp, Probe Sequence
ggcctcttcacggattactacggcc

SEQ ID NO: 274799 - DNA, 25 bp, Probe Sequence
ggcctctaactggatccaggccagt

SEQ ID NO: 274800 - DNA, 25 bp, Probe Sequence
ggcgctgatgaaggagatcgaggcg

SEQ ID NO: 274801 - DNA, 25 bp, Probe Sequence
ggcgctatgcaaggagcgggcgcgc

SEQ ID NO: 274802 - DNA, 25 bp, Probe Sequence
ggcgctgctcctggacgaaggcagc

SEQ ID NO: 274803 - DNA, 25 bp, Probe Sequence
ggcgctgctgcgtgtgaaacgccta

SEQ ID NO: 274804 - DNA, 25 bp, Probe Sequence
ggccctgtgcaggctgaaaaccatg

SEQ ID NO: 274805 - DNA, 25 bp, Probe Sequence
ggcctatgatcatttcacaaaccac

SEQ ID NO: 274806 - DNA, 25 bp, Probe Sequence
ggcctctacttctaaacactaatgg

SEQ ID NO: 274807 - DNA, 25 bp, Probe Sequence
ggcccattttgttgtactgttatgg

SEQ ID NO: 274808 - DNA, 25 bp, Probe Sequence
ggccctgttttgagattgtttgttc

SEQ ID NO: 274809 - DNA, 25 bp, Probe Sequence
ggcccatgtaatacttgattttctg

SEQ ID NO: 274810 - DNA, 25 bp, Probe Sequence
ggccctatgaaattctgcacttttc

SEQ ID NO: 274811 - DNA, 25 bp, Probe Sequence
ggccctggtagatttgacttgctct

SEQ ID NO: 274812 - DNA, 25 bp, Probe Sequence
ggcgcctggtcaccagggctgcttt

SEQ ID NO: 274813 - DNA, 25 bp, Probe Sequence
ggcgctgctgctacaacggatgcgc

SEQ ID NO: 274814 - DNA, 25 bp, Probe Sequence
ggccctgctagatagagatgcgctc

SEQ ID NO: 274815 - DNA, 25 bp, Probe Sequence
ggccgctgcaggagatgcatgtccc

SEQ ID NO: 274816 - DNA, 25 bp, Probe Sequence
ggccccagataccatgatgctgagc

SEQ ID NO: 274817 - DNA, 25 bp, Probe Sequence
ggccccagataccatgatgctgagc

SEQ ID NO: 274818 - DNA, 25 bp, Probe Sequence
ggccgtgcataaggctgtgctgacc

SEQ ID NO: 274819 - DNA, 25 bp, Probe Sequence
ggccgtgcaataaatatctgccgtg

SEQ ID NO: 274820 - DNA, 25 bp, Probe Sequence
ggccagtcccagatgaagcctatgg

SEQ ID NO: 274821 - DNA, 25 bp, Probe Sequence
ggcccgcctctgatgaaatcaaggc

SEQ ID NO: 274822 - DNA, 25 bp, Probe Sequence
ggccctgcctgaagtgcgagaaatg

SEQ ID NO: 274823 - DNA, 25 bp, Probe Sequence
ggccctgccattttatgagcagaac

SEQ ID NO: 274824 - DNA, 25 bp, Probe Sequence
ggccctccattgtttgtcatgaaat

SEQ ID NO: 274825 - DNA, 25 bp, Probe Sequence
ggccaccgctagtgcttgtggagat

SEQ ID NO: 274826 - DNA, 25 bp, Probe Sequence
ggccacctgtactgttggccatgtc

SEQ ID NO: 274827 - DNA, 25 bp, Probe Sequence
ggcccctggagatgattgagccgcg

SEQ ID NO: 274828 - DNA, 25 bp, Probe Sequence
ggccctctaggaggaaagcccagag

SEQ ID NO: 274829 - DNA, 25 bp, Probe Sequence
ggcgcctctgcaagggcagaacact

SEQ ID NO: 274830 - DNA, 25 bp, Probe Sequence
ggcgctcttcatccgggagaagtac

SEQ ID NO: 274831 - DNA, 25 bp, Probe Sequence
ggcctatttgactccaaggtagcag

SEQ ID NO: 274832 - DNA, 25 bp, Probe Sequence
ggccctgtggtctccaatggagagc

SEQ ID NO: 274833 - DNA, 25 bp, Probe Sequence
ggccctgtggtctccaatggagagc

SEQ ID NO: 274834 - DNA, 25 bp, Probe Sequence
ggccctgtggtctgcaatggacagc

SEQ ID NO: 274835 - DNA, 25 bp, Probe Sequence
ggccctgtggtctgcaatggacagc

SEQ ID NO: 274836 - DNA, 25 bp, Probe Sequence
ggcccagtcagttatgcaattacac

SEQ ID NO: 274837 - DNA, 25 bp, Probe Sequence
ggcccaggctcttcaagaatacaac

SEQ ID NO: 274838 - DNA, 25 bp, Probe Sequence
ggcccagagtgacaacgcatacaca

SEQ ID NO: 274839 - DNA, 25 bp, Probe Sequence
ggcccaagctactaagacaatgaag

SEQ ID NO: 274840 - DNA, 25 bp, Probe Sequence
ggcctatttaggtgacactatagaa

SEQ ID NO: 274841 - DNA, 25 bp, Probe Sequence
ggcctatttaggtgacactatagaa

SEQ ID NO: 274842 - DNA, 25 bp, Probe Sequence
ggcctttataggaccaatgctgatt

SEQ ID NO: 274843 - DNA, 25 bp, Probe Sequence
tggccctggggggccattcgattcg

SEQ ID NO: 274844 - DNA, 25 bp, Probe Sequence
ggccacttgaggccagcgattcgag

SEQ ID NO: 274845 - DNA, 25 bp, Probe Sequence
ggcctttgaagctctggccagggat

SEQ ID NO: 274846 - DNA, 25 bp, Probe Sequence
ggccctgcgtggtgggctatgggat

SEQ ID NO: 274847 - DNA, 25 bp, Probe Sequence
ggccctggtggagcatggctgggcg

SEQ ID NO: 274848 - DNA, 25 bp, Probe Sequence
ggccctgagaggtctcagctcttgg

SEQ ID NO: 274849 - DNA, 25 bp, Probe Sequence
ggcccagagggaggccatctcagtc

SEQ ID NO: 274850 - DNA, 25 bp, Probe Sequence
ggccctgagtgtgagtatccctgcc

SEQ ID NO: 274851 - DNA, 25 bp, Probe Sequence
ggccacatacctgggtggccttcca

SEQ ID NO: 274852 - DNA, 25 bp, Probe Sequence
ggccgcaacagcaggggcgatatcc

SEQ ID NO: 274853 - DNA, 25 bp, Probe Sequence
ggccaaccagatgctgggcgatctc

SEQ ID NO: 274854 - DNA, 25 bp, Probe Sequence
ggccaagcaagaggtggtagaacca

SEQ ID NO: 274855 - DNA, 25 bp, Probe Sequence
ggccaggcaaagcgcctttacacag

SEQ ID NO: 274856 - DNA, 25 bp, Probe Sequence
tgggcagaacgagcccttccaaaaa

SEQ ID NO: 274857 - DNA, 25 bp, Probe Sequence
tggggaccaagaacctgtacaagga

SEQ ID NO: 274858 - DNA, 25 bp, Probe Sequence
ggcctaccaccaagctggtacaagg

SEQ ID NO: 274859 - DNA, 25 bp, Probe Sequence
ggccagaccacagactacttatagg

SEQ ID NO: 274860 - DNA, 25 bp, Probe Sequence
ggcctagcatacgtacacattttat

SEQ ID NO: 274861 - DNA, 25 bp, Probe Sequence
ggccacgcaatcaataatttaccat

SEQ ID NO: 274862 - DNA, 25 bp, Probe Sequence
ggcccgcaataaaagcaacacccct

SEQ ID NO: 274863 - DNA, 25 bp, Probe Sequence
ggcccaaacaataccaatctgccca

SEQ ID NO: 274864 - DNA, 25 bp, Probe Sequence
ggcccaggaaatactcaacagcaga

SEQ ID NO: 274865 - DNA, 25 bp, Probe Sequence
ggcccaaggaattcgcaagatggcg

SEQ ID NO: 274866 - DNA, 25 bp, Probe Sequence
ggcccctgggattagccaggtgggc

SEQ ID NO: 274867 - DNA, 25 bp, Probe Sequence
ggccctggggtgtgtaggatgcgcc

SEQ ID NO: 274868 - DNA, 25 bp, Probe Sequence
ggccctcagagtgctctgtaggagc

SEQ ID NO: 274869 - DNA, 25 bp, Probe Sequence
ggcctctaagtatctgtaccatgga

SEQ ID NO: 274870 - DNA, 25 bp, Probe Sequence
ggccataaattattataagcctgaa

SEQ ID NO: 274871 - DNA, 25 bp, Probe Sequence
ggcctttattaaaaactgagtgact

SEQ ID NO: 274872 - DNA, 25 bp, Probe Sequence
ggccatatttaacaagttcgatgag

SEQ ID NO: 274873 - DNA, 25 bp, Probe Sequence
ggccgaggttgacaaggtcacaggc

SEQ ID NO: 274874 - DNA, 25 bp, Probe Sequence
ggccgccagggagaagggccaggcc

SEQ ID NO: 274875 - DNA, 25 bp, Probe Sequence
ggccccgtgccagaggggaagaggc

SEQ ID NO: 274876 - DNA, 25 bp, Probe Sequence
ggcccagagtccccaggggaggagg

SEQ ID NO: 274877 - DNA, 25 bp, Probe Sequence
ggcctctcgtccacgaggggagaaa

SEQ ID NO: 274878 - DNA, 25 bp, Probe Sequence
tggccccacccaatcaagggaagaa

SEQ ID NO: 274879 - DNA, 25 bp, Probe Sequence
ggccccaattcaaccaggcggaaca

SEQ ID NO: 274880 - DNA, 25 bp, Probe Sequence
ggcccaatgaataatccgccagaac

SEQ ID NO: 274881 - DNA, 25 bp, Probe Sequence
ggcgccaaaatcaatgagatccgtc

SEQ ID NO: 274882 - DNA, 25 bp, Probe Sequence
ggcgccaaaatcaatgagatccgtc

SEQ ID NO: 274883 - DNA, 25 bp, Probe Sequence
ggccagctaaacatgcttcatcgtc

SEQ ID NO: 274884 - DNA, 25 bp, Probe Sequence
tgggcgtacggcgttgtacggtgga

SEQ ID NO: 274885 - DNA, 25 bp, Probe Sequence
ggccccatcggtgtgtaaggtggcc

SEQ ID NO: 274886 - DNA, 25 bp, Probe Sequence
ggcccctcgtgtgtaaggacgtagc

SEQ ID NO: 274887 - DNA, 25 bp, Probe Sequence
tggcccctctttgtaaggccttgta

SEQ ID NO: 274888 - DNA, 25 bp, Probe Sequence
ggccaccttggcacaaaagccttgt

SEQ ID NO: 274889 - DNA, 25 bp, Probe Sequence
ggcccccgagcaagatgcagaagcc

SEQ ID NO: 274890 - DNA, 25 bp, Probe Sequence
ggcccacagggcactgaggggcaac

SEQ ID NO: 274891 - DNA, 25 bp, Probe Sequence
ggcccacatggcctccaaggagtaa

SEQ ID NO: 274892 - DNA, 25 bp, Probe Sequence
ggcctcataagctcacagaaagtaa

SEQ ID NO: 274893 - DNA, 25 bp, Probe Sequence
ggcccataacattctcagggagtct

SEQ ID NO: 274894 - DNA, 25 bp, Probe Sequence
ggccctcagaaagcgtgtggtttta

SEQ ID NO: 274895 - DNA, 25 bp, Probe Sequence
ggccctagacaatacgatggaacgt

SEQ ID NO: 274896 - DNA, 25 bp, Probe Sequence
ggccctcggcagagacacaggaagc

SEQ ID NO: 274897 - DNA, 25 bp, Probe Sequence
ggcccttgccatatgatactggacc

SEQ ID NO: 274898 - DNA, 25 bp, Probe Sequence
ggcccttcgagcatggaggggcact

SEQ ID NO: 274899 - DNA, 25 bp, Probe Sequence
ggcccttcgagcatggaggggcact

SEQ ID NO: 274900 - DNA, 25 bp, Probe Sequence
ggccctctggacaagtggcgggccc

SEQ ID NO: 274901 - DNA, 25 bp, Probe Sequence
ggccctgcatgtcagatggcgtggt

SEQ ID NO: 274902 - DNA, 25 bp, Probe Sequence
ggcccgcagtgtggaggaggagtga

SEQ ID NO: 274903 - DNA, 25 bp, Probe Sequence
ggcccgcaagctgcaggagctggcc

SEQ ID NO: 274904 - DNA, 25 bp, Probe Sequence
ggccctgcaagggcgtggtggcttc

SEQ ID NO: 274905 - DNA, 25 bp, Probe Sequence
ggcctctccagggcacatctggagt

SEQ ID NO: 274906 - DNA, 25 bp, Probe Sequence
ggccatctccaggaaattggctcta

SEQ ID NO: 274907 - DNA, 25 bp, Probe Sequence
ggccatcttagacagttggtgtaat

SEQ ID NO: 274908 - DNA, 25 bp, Probe Sequence
ggccgcattacagagaaggtttcag

SEQ ID NO: 274909 - DNA, 25 bp, Probe Sequence
ggcccattgacagatgagaggtctg

SEQ ID NO: 274910 - DNA, 25 bp, Probe Sequence
ggcccagctcaaacagaaggtcatg

SEQ ID NO: 274911 - DNA, 25 bp, Probe Sequence
ggccccatcattaaacgggctgcgt

SEQ ID NO: 274912 - DNA, 25 bp, Probe Sequence
tcctgccctttagatctgggcacca

SEQ ID NO: 274913 - DNA, 25 bp, Probe Sequence
ggcctcctttatgatgtgcatgtcc

SEQ ID NO: 274914 - DNA, 25 bp, Probe Sequence
ggcctcattctttgaacatcgactc

SEQ ID NO: 274915 - DNA, 25 bp, Probe Sequence
ggccatttttcattacatcgactcc

SEQ ID NO: 274916 - DNA, 25 bp, Probe Sequence
ggccttattatccatcacaggagtc

SEQ ID NO: 274917 - DNA, 25 bp, Probe Sequence
ggccttcttaagttccagagtgcta

SEQ ID NO: 274918 - DNA, 25 bp, Probe Sequence
ggccttttcaagcagtggatggaga

SEQ ID NO: 274919 - DNA, 25 bp, Probe Sequence
ggccttggccttggatttgatggag

SEQ ID NO: 274920 - DNA, 25 bp, Probe Sequence
ggccttgaccgcagatttcggaaac

SEQ ID NO: 274921 - DNA, 25 bp, Probe Sequence
ggccttcacccatgtagcagggaag

SEQ ID NO: 274922 - DNA, 25 bp, Probe Sequence
ggcctcctgaaatgatagcagggag

SEQ ID NO: 274923 - DNA, 25 bp, Probe Sequence
ggccccgaggaaggatgcggtgagc

SEQ ID NO: 274924 - DNA, 25 bp, Probe Sequence
ggcctccagggatccatgggggagt

SEQ ID NO: 274925 - DNA, 25 bp, Probe Sequence
ggcctccaggatcaactgtgggcaa

SEQ ID NO: 274926 - DNA, 25 bp, Probe Sequence
ggccccgctgataaaaatgtggctg

SEQ ID NO: 274927 - DNA, 25 bp, Probe Sequence
ggccccactttcaagaatcagacag

SEQ ID NO: 274928 - DNA, 25 bp, Probe Sequence
ggcccacctcctaagaacaacatgg

SEQ ID NO: 274929 - DNA, 25 bp, Probe Sequence
ggcctgcagcttcctgatggaatgc

SEQ ID NO: 274930 - DNA, 25 bp, Probe Sequence
ggcccagattcacttgaagcagaag

SEQ ID NO: 274931 - DNA, 25 bp, Probe Sequence
ggcccaagatctctgctcagagaag

SEQ ID NO: 274932 - DNA, 25 bp, Probe Sequence
ggcctcagagtctctgatcaagcag

SEQ ID NO: 274933 - DNA, 25 bp, Probe Sequence
ggcctcaaggacttgaaagcatcca

SEQ ID NO: 274934 - DNA, 25 bp, Probe Sequence
ggcccggggctgaaacagcccgagg

SEQ ID NO: 274935 - DNA, 25 bp, Probe Sequence
ggccctggcgtgaaacaatgcaccg

SEQ ID NO: 274936 - DNA, 25 bp, Probe Sequence
ggccctgagcgcatggacacaggca

SEQ ID NO: 274937 - DNA, 25 bp, Probe Sequence
ggccatctatggggtaccccaagtc

SEQ ID NO: 274938 - DNA, 25 bp, Probe Sequence
tggccatctatggggtaccccaagt

SEQ ID NO: 274939 - DNA, 25 bp, Probe Sequence
ggcccatttgaagaccaggaagttg

SEQ ID NO: 274940 - DNA, 25 bp, Probe Sequence
ggcccagtcgaaggcccaggatggc

SEQ ID NO: 274941 - DNA, 25 bp, Probe Sequence
ggccgtgtggaatgcccaggaggcc

SEQ ID NO: 274942 - DNA, 25 bp, Probe Sequence
ggccggtggaatggctttgggggca

SEQ ID NO: 274943 - DNA, 25 bp, Probe Sequence
ggccgtgttggtggcctctgaaggg

SEQ ID NO: 274944 - DNA, 25 bp, Probe Sequence
ggcctggactggaagcgttgacatt

SEQ ID NO: 274945 - DNA, 25 bp, Probe Sequence
ggccggatcggtactgtatcaagtc

SEQ ID NO: 274946 - DNA, 25 bp, Probe Sequence
ggcctgtttgggacgaacagagctc

SEQ ID NO: 274947 - DNA, 25 bp, Probe Sequence
ggccatgttatgggatctcaacgaa

SEQ ID NO: 274948 - DNA, 25 bp, Probe Sequence
ggccatgttgagctacttcaagccg

SEQ ID NO: 274949 - DNA, 25 bp, Probe Sequence
tggcctttgcacatactttactttc

SEQ ID NO: 274950 - DNA, 25 bp, Probe Sequence
ggcccgtatcgaacttttgttctca

SEQ ID NO: 274951 - DNA, 25 bp, Probe Sequence
ggcccaggtctgagttttaacatca

SEQ ID NO: 274952 - DNA, 25 bp, Probe Sequence
ggcctcaggtttattggcgataatc

SEQ ID NO: 274953 - DNA, 25 bp, Probe Sequence
ggcctcaaaaatattgggcagttgc

SEQ ID NO: 274954 - DNA, 25 bp, Probe Sequence
ggcccccaacagattgggagtgaca

SEQ ID NO: 274955 - DNA, 25 bp, Probe Sequence
ggcctcccaaggtgctgggattaca

SEQ ID NO: 274956 - DNA, 25 bp, Probe Sequence
ggcctcccaaagatgctagtattat

SEQ ID NO: 274957 - DNA, 25 bp, Probe Sequence
ggcccagtagaaattgacagtattt

SEQ ID NO: 274958 - DNA, 25 bp, Probe Sequence
ggcccagattgaggtggtgccttct

SEQ ID NO: 274959 - DNA, 25 bp, Probe Sequence
ggccaagtgtacaatgggtcccaat

SEQ ID NO: 274960 - DNA, 25 bp, Probe Sequence
ggccaagttacagtcaatgggccgt

SEQ ID NO: 274961 - DNA, 25 bp, Probe Sequence
tggccaagttacagtcaatgggccg

SEQ ID NO: 274962 - DNA, 25 bp, Probe Sequence
tggccaagttggcgtgccaggtgtc

SEQ ID NO: 274963 - DNA, 25 bp, Probe Sequence
tggcaaagctttctctcggaagtca

SEQ ID NO: 274964 - DNA, 25 bp, Probe Sequence
tggaaggcgttgtcccaggacgagc

SEQ ID NO: 274965 - DNA, 25 bp, Probe Sequence
ggccaggaggcttcaagaggagggc

SEQ ID NO: 274966 - DNA, 25 bp, Probe Sequence
ggccagtcacgtttaggtggggcgt

SEQ ID NO: 274967 - DNA, 25 bp, Probe Sequence
ggccagtacaatcaatgggcgtgga

SEQ ID NO: 274968 - DNA, 25 bp, Probe Sequence
ggcccagaggatcacggggctgcga

SEQ ID NO: 274969 - DNA, 25 bp, Probe Sequence
ggcctcagggtgcacacaggatggc

SEQ ID NO: 274970 - DNA, 25 bp, Probe Sequence
ggcctgcgttgacatcaacgagtgt

SEQ ID NO: 274971 - DNA, 25 bp, Probe Sequence
ggcctgcgttgacatcaacgagtgt

SEQ ID NO: 274972 - DNA, 25 bp, Probe Sequence
ggcctgtgtggatatggcaccaatt

SEQ ID NO: 274973 - DNA, 25 bp, Probe Sequence
ggcctgggcagatctcgcccaggtc

SEQ ID NO: 274974 - DNA, 25 bp, Probe Sequence
tgtgctcgggatgccttccgagttt

SEQ ID NO: 274975 - DNA, 25 bp, Probe Sequence
tggctgtgggaaggtgtcctgtgtc

SEQ ID NO: 274976 - DNA, 25 bp, Probe Sequence
tggccgtggaacggtgacggccacc

SEQ ID NO: 274977 - DNA, 25 bp, Probe Sequence
ggccgggaacaacaatggcacatcc

SEQ ID NO: 274978 - DNA, 25 bp, Probe Sequence
tggcggtggacaaaagcaaccctac

SEQ ID NO: 274979 - DNA, 25 bp, Probe Sequence
tggctggggccaaagaaagaccttg

SEQ ID NO: 274980 - DNA, 25 bp, Probe Sequence
tggagttggtctaggacattggttt

SEQ ID NO: 274981 - DNA, 25 bp, Probe Sequence
ggcctttttaagtattgcagtctaa

SEQ ID NO: 274982 - DNA, 25 bp, Probe Sequence
ggccttatgttaaaatcatgcactt

SEQ ID NO: 274983 - DNA, 25 bp, Probe Sequence
ggcctggatttatgctataatatat

SEQ ID NO: 274984 - DNA, 25 bp, Probe Sequence
ggcctgaagttctgtgatagacctt

SEQ ID NO: 274985 - DNA, 25 bp, Probe Sequence
ggcctacaggcgtgtaagacagctt

SEQ ID NO: 274986 - DNA, 25 bp, Probe Sequence
ggccccatggcttgatgtgaagaca

SEQ ID NO: 274987 - DNA, 25 bp, Probe Sequence
ggccctctgtgttaagaataacgtg

SEQ ID NO: 274988 - DNA, 25 bp, Probe Sequence
ggccctctggtacagaagatgtcgt

SEQ ID NO: 274989 - DNA, 25 bp, Probe Sequence
ggcccttggtggcagcaatagagca

SEQ ID NO: 274990 - DNA, 25 bp, Probe Sequence
ggccccgagatgccgagcaagaaga

SEQ ID NO: 274991 - DNA, 25 bp, Probe Sequence
ggcccggagctgccgaaatgtgttc

SEQ ID NO: 274992 - DNA, 25 bp, Probe Sequence
ggcccggatcatcaatgggattatc

SEQ ID NO: 274993 - DNA, 25 bp, Probe Sequence
ggccctgggctggaatcaggaatat

SEQ ID NO: 274994 - DNA, 25 bp, Probe Sequence
tggcccgggctgggacagtgggcag

SEQ ID NO: 274995 - DNA, 25 bp, Probe Sequence
ggcccctggtgtgcaaggtgaatgg

SEQ ID NO: 274996 - DNA, 25 bp, Probe Sequence
ggcccctggtgtgcaaggtgaatgg

SEQ ID NO: 274997 - DNA, 25 bp, Probe Sequence
ggcccctggtgtgcaaggtgaatgg

SEQ ID NO: 274998 - DNA, 25 bp, Probe Sequence
ggcctcctgggatccgaggatatag

SEQ ID NO: 274999 - DNA, 25 bp, Probe Sequence
ggccaccgggcatgggaagtatgag

SEQ ID NO: 275000 - DNA, 25 bp, Probe Sequence
ggccacctggagacggtgattttgg

SEQ ID NO: 275001 - DNA, 25 bp, Probe Sequence
tggccacctggagacggtgattttg

SEQ ID NO: 275002 - DNA, 25 bp, Probe Sequence
ggccatgccttgccaaaggtgacat

SEQ ID NO: 275003 - DNA, 25 bp, Probe Sequence
ggcctgtgcttgaacctgaggcact

SEQ ID NO: 275004 - DNA, 25 bp, Probe Sequence
ggcctgtgcttgtcacgagaggtac

SEQ ID NO: 275005 - DNA, 25 bp, Probe Sequence
ggccattggggagcagatggtacaa

SEQ ID NO: 275006 - DNA, 25 bp, Probe Sequence
ggccatgatggagtcaccgtggtcc

SEQ ID NO: 275007 - DNA, 25 bp, Probe Sequence
ggccatgacgtggaggcctactgcc

SEQ ID NO: 275008 - DNA, 25 bp, Probe Sequence
ggccccatgatgaagccaaatctga

SEQ ID NO: 275009 - DNA, 25 bp, Probe Sequence
ggccccataagacacacacatgagc

SEQ ID NO: 275010 - DNA, 25 bp, Probe Sequence
tggccaagcacttcaaacctcatgg

SEQ ID NO: 275011 - DNA, 25 bp, Probe Sequence
ggccagtgactaccaacgtttggac

SEQ ID NO: 275012 - DNA, 25 bp, Probe Sequence
ggccagtactgtgacagcctgtatg

SEQ ID NO: 275013 - DNA, 25 bp, Probe Sequence
ggccactccattgacagcagtttgg

SEQ ID NO: 275014 - DNA, 25 bp, Probe Sequence
ggccattcctgtatcacgagactgg

SEQ ID NO: 275015 - DNA, 25 bp, Probe Sequence
ggccactggtggaaccatgaacgct

SEQ ID NO: 275016 - DNA, 25 bp, Probe Sequence
ggccctgggagatagcatggacgtg

SEQ ID NO: 275017 - DNA, 25 bp, Probe Sequence
ggcccttggaagtagctggagctgc

SEQ ID NO: 275018 - DNA, 25 bp, Probe Sequence
ggccgttcagaacgggcgcagagcc

SEQ ID NO: 275019 - DNA, 25 bp, Probe Sequence
ggccctaatgaaggctgtggcaact

SEQ ID NO: 275020 - DNA, 25 bp, Probe Sequence
ggccctgagaaagtccggagactac

SEQ ID NO: 275021 - DNA, 25 bp, Probe Sequence
ggccctgagaaggtgggggcctctc

SEQ ID NO: 275022 - DNA, 25 bp, Probe Sequence
ggccctgataagcggctggtgacgc

SEQ ID NO: 275023 - DNA, 25 bp, Probe Sequence
ggcccatgataagtgttctgttgac

SEQ ID NO: 275024 - DNA, 25 bp, Probe Sequence
ggccaatgtccagttgtatgttcag

SEQ ID NO: 275025 - DNA, 25 bp, Probe Sequence
ggccttgtcctcagccagttaaaat

SEQ ID NO: 275026 - DNA, 25 bp, Probe Sequence
ggccttgatttcaggtttggataat

SEQ ID NO: 275027 - DNA, 25 bp, Probe Sequence
ggccatgtgtacgcggtgtttgaaa

SEQ ID NO: 275028 - DNA, 25 bp, Probe Sequence
ggccactgaaacagaattcctgaga

SEQ ID NO: 275029 - DNA, 25 bp, Probe Sequence
ggccccaaagctcatattcgtaagc

SEQ ID NO: 275030 - DNA, 25 bp, Probe Sequence
tggcccgaaacacatattatttgac

SEQ ID NO: 275031 - DNA, 25 bp, Probe Sequence
ggccccaacacacgtttaatatcat

SEQ ID NO: 275032 - DNA, 25 bp, Probe Sequence
ggccccaatcatctgtttttaaaca

SEQ ID NO: 275033 - DNA, 25 bp, Probe Sequence
ggccccaatcatctgtttttaaaca

SEQ ID NO: 275034 - DNA, 25 bp, Probe Sequence
tggcccacaaatctgtaatttgaaa

SEQ ID NO: 275035 - DNA, 25 bp, Probe Sequence
tggcccccacatgtaaatgtgcgaa

SEQ ID NO: 275036 - DNA, 25 bp, Probe Sequence
ggccccacacaggcatgagggatgg

SEQ ID NO: 275037 - DNA, 25 bp, Probe Sequence
ggcctgcctgacatggaggctgtgg

SEQ ID NO: 275038 - DNA, 25 bp, Probe Sequence
ggccgcatctgtgaagcagagaggg

SEQ ID NO: 275039 - DNA, 25 bp, Probe Sequence
ggccctctatgagcagaagacacgt

SEQ ID NO: 275040 - DNA, 25 bp, Probe Sequence
ggccagtgccaaggaggagaacgtc

SEQ ID NO: 275041 - DNA, 25 bp, Probe Sequence
ggcctggtccagttggagaccgtca

SEQ ID NO: 275042 - DNA, 25 bp, Probe Sequence
ggcctggccaggtctgagatgaggc

SEQ ID NO: 275043 - DNA, 25 bp, Probe Sequence
ggccaacgagagtgaggaggtccgg

SEQ ID NO: 275044 - DNA, 25 bp, Probe Sequence
ggccaaatcaatttgaggagggagc

SEQ ID NO: 275045 - DNA, 25 bp, Probe Sequence
tggccagatctacattaggaaaagt

SEQ ID NO: 275046 - DNA, 25 bp, Probe Sequence
ggcctgcctaggttggtggaacagt

SEQ ID NO: 275047 - DNA, 25 bp, Probe Sequence
ggccgtagcggcttgttggataagt

SEQ ID NO: 275048 - DNA, 25 bp, Probe Sequence
ggccgagagccgcggggagaaggcc

SEQ ID NO: 275049 - DNA, 25 bp, Probe Sequence
ggccggagtattgggaagaggagac

SEQ ID NO: 275050 - DNA, 25 bp, Probe Sequence
ggccgtgtgatccgtggacagagga

SEQ ID NO: 275051 - DNA, 25 bp, Probe Sequence
tggccaggtgtcttgtggacacgga

SEQ ID NO: 275052 - DNA, 25 bp, Probe Sequence
tggcgcaggatcaaggtgaaaagga

SEQ ID NO: 275053 - DNA, 25 bp, Probe Sequence
ggccggtcagagctacacattgaga

SEQ ID NO: 275054 - DNA, 25 bp, Probe Sequence
ggccaggtgcaggttgggaatgagg

SEQ ID NO: 275055 - DNA, 25 bp, Probe Sequence
ggccatcttagtgggtgtgaagtgg

SEQ ID NO: 275056 - DNA, 25 bp, Probe Sequence
ggccatattagcagcggttattcgg

SEQ ID NO: 275057 - DNA, 25 bp, Probe Sequence
ggcctttagcctctgaatgatacca

SEQ ID NO: 275058 - DNA, 25 bp, Probe Sequence
ggcctttagcacagtatcagtacca

SEQ ID NO: 275059 - DNA, 25 bp, Probe Sequence
ggccttgtggcagtattgacgttcc

SEQ ID NO: 275060 - DNA, 25 bp, Probe Sequence
ggcctcagtcgactttgatggcttc

SEQ ID NO: 275061 - DNA, 25 bp, Probe Sequence
ggccatcagacgttactatttttat

SEQ ID NO: 275062 - DNA, 25 bp, Probe Sequence
ggccatcagatgtaaacaagtcctt

SEQ ID NO: 275063 - DNA, 25 bp, Probe Sequence
ggccatagcttccaatacaagcaca

SEQ ID NO: 275064 - DNA, 25 bp, Probe Sequence
ggccattcttgcttagacagtcagc

SEQ ID NO: 275065 - DNA, 25 bp, Probe Sequence
tggcctccttggaagtcagtcgtag

SEQ ID NO: 275066 - DNA, 25 bp, Probe Sequence
ggccggccatgtaagatcgtcgaga

SEQ ID NO: 275067 - DNA, 25 bp, Probe Sequence
ggccttccagacagtcgtgctggac

SEQ ID NO: 275068 - DNA, 25 bp, Probe Sequence
ggcctctacagaattggcttcatag

SEQ ID NO: 275069 - DNA, 25 bp, Probe Sequence
ggcctctactagagagtctgccaga

SEQ ID NO: 275070 - DNA, 25 bp, Probe Sequence
ggccctgaccagtaggtgctcaata

SEQ ID NO: 275071 - DNA, 25 bp, Probe Sequence
ggccaaatgtcacaagcttcaatat

SEQ ID NO: 275072 - DNA, 25 bp, Probe Sequence
ggccaacatggcaaaaccctactaa

SEQ ID NO: 275073 - DNA, 25 bp, Probe Sequence
ggccaacatggcaaaaccctactaa

SEQ ID NO: 275074 - DNA, 25 bp, Probe Sequence
ggccgaattgacaaacccatcttga

SEQ ID NO: 275075 - DNA, 25 bp, Probe Sequence
ggccaagatctgtgaacctactgtc

SEQ ID NO: 275076 - DNA, 25 bp, Probe Sequence
ggccaagattgggaactgcccattc

SEQ ID NO: 275077 - DNA, 25 bp, Probe Sequence
ggccacaagattgaattccgtctct

SEQ ID NO: 275078 - DNA, 25 bp, Probe Sequence
ggccacagtgatgggtttaagtacc

SEQ ID NO: 275079 - DNA, 25 bp, Probe Sequence
ggcctctggtgggtttcaagttgag

SEQ ID NO: 275080 - DNA, 25 bp, Probe Sequence
ggcctgcatgggtgacttcacattt

SEQ ID NO: 275081 - DNA, 25 bp, Probe Sequence
ggccgcagtgagtcaggctgggagg

SEQ ID NO: 275082 - DNA, 25 bp, Probe Sequence
ggccgagagtaaatgtggggaccta

SEQ ID NO: 275083 - DNA, 25 bp, Probe Sequence
ggccgagagtggggatgggcgcacc

SEQ ID NO: 275084 - DNA, 25 bp, Probe Sequence
ggccgagcgggaaatcgtgcgtgac

SEQ ID NO: 275085 - DNA, 25 bp, Probe Sequence
ggccgagcgggaaatcgtgcgcgac

SEQ ID NO: 275086 - DNA, 25 bp, Probe Sequence
ggccaacatggtaaacgctgtccct

SEQ ID NO: 275087 - DNA, 25 bp, Probe Sequence
ggccaccagggaaatgacatgtacg

SEQ ID NO: 275088 - DNA, 25 bp, Probe Sequence
ggccccgtggatggagacaaagagc

SEQ ID NO: 275089 - DNA, 25 bp, Probe Sequence
ggccaccggtgacgacaagaagcgc

SEQ ID NO: 275090 - DNA, 25 bp, Probe Sequence
ggcctacctgggcacacagaagagc

SEQ ID NO: 275091 - DNA, 25 bp, Probe Sequence
ggcctaccacgcctatcagaagtgg

SEQ ID NO: 275092 - DNA, 25 bp, Probe Sequence
ggcctggtctaagtatcagacagtc

SEQ ID NO: 275093 - DNA, 25 bp, Probe Sequence
ggcctggtacaagatcactgactct

SEQ ID NO: 275094 - DNA, 25 bp, Probe Sequence
ggcctggtgacataccaagactctg

SEQ ID NO: 275095 - DNA, 25 bp, Probe Sequence
ggccatcgtggctaaacaggtactg

SEQ ID NO: 275096 - DNA, 25 bp, Probe Sequence
ggccactggcaccataacatggggc

SEQ ID NO: 275097 - DNA, 25 bp, Probe Sequence
ggccactgtcagcaaagcctggaga

SEQ ID NO: 275098 - DNA, 25 bp, Probe Sequence
ggccactttgagaacctgcagaaat

SEQ ID NO: 275099 - DNA, 25 bp, Probe Sequence
ggccagcttctataccaagtatgat

SEQ ID NO: 275100 - DNA, 25 bp, Probe Sequence
ggcctttctataaaccagtggatgc

SEQ ID NO: 275101 - DNA, 25 bp, Probe Sequence
ggccttgccttcagggagttgacag

SEQ ID NO: 275102 - DNA, 25 bp, Probe Sequence
ggccaggccctcatgggaagtgact

SEQ ID NO: 275103 - DNA, 25 bp, Probe Sequence
ggccgttctctcgtgggagacgcag

SEQ ID NO: 275104 - DNA, 25 bp, Probe Sequence
ggccgtcctgagggggaagtgagaa

SEQ ID NO: 275105 - DNA, 25 bp, Probe Sequence
ggcccgctgggagggtacatggatg

SEQ ID NO: 275106 - DNA, 25 bp, Probe Sequence
ggcccctttatctgtacatagtgac

SEQ ID NO: 275107 - DNA, 25 bp, Probe Sequence
tggttcctttgatagccattcagtg

SEQ ID NO: 275108 - DNA, 25 bp, Probe Sequence
tgggtccctgggtgacatgtcagat

SEQ ID NO: 275109 - DNA, 25 bp, Probe Sequence
tgggtccctgggtgacatgtcagat

SEQ ID NO: 275110 - DNA, 25 bp, Probe Sequence
tggcgtttctgtgttcagagtagta

SEQ ID NO: 275111 - DNA, 25 bp, Probe Sequence
ggcctctcttcttatccaaataaat

SEQ ID NO: 275112 - DNA, 25 bp, Probe Sequence
ggcctcatctctatttcaattttat

SEQ ID NO: 275113 - DNA, 25 bp, Probe Sequence
ggccttcatgttattcagaattgtt

SEQ ID NO: 275114 - DNA, 25 bp, Probe Sequence
tggcgttcagccacccgagattgag

SEQ ID NO: 275115 - DNA, 25 bp, Probe Sequence
ggccttagcagtaacgggtagcagc

SEQ ID NO: 275116 - DNA, 25 bp, Probe Sequence
ggccttagcagtaacgggtagcagc

SEQ ID NO: 275117 - DNA, 25 bp, Probe Sequence
ggcctgtctcagattgggattaaca

SEQ ID NO: 275118 - DNA, 25 bp, Probe Sequence
ggccagtctcagttgggaaaaacac

SEQ ID NO: 275119 - DNA, 25 bp, Probe Sequence
ggcctggtcctatagccaaaatcac

SEQ ID NO: 275120 - DNA, 25 bp, Probe Sequence
ggcctgagttgtgaagcgcaacccc

SEQ ID NO: 275121 - DNA, 25 bp, Probe Sequence
ggccggttacaaccatgacaagctc

SEQ ID NO: 275122 - DNA, 25 bp, Probe Sequence
ggccgccttgaccgcaagatagagt

SEQ ID NO: 275123 - DNA, 25 bp, Probe Sequence
ggcccctggagccagatggcaagag

SEQ ID NO: 275124 - DNA, 25 bp, Probe Sequence
ggccccgagaggcagtgcactgggc

SEQ ID NO: 275125 - DNA, 25 bp, Probe Sequence
tggccctggggtcatagcttgggct

SEQ ID NO: 275126 - DNA, 25 bp, Probe Sequence
tggctcctgacgctaagagcttcgt

SEQ ID NO: 275127 - DNA, 25 bp, Probe Sequence
ggccactgactgctctagtattaga

SEQ ID NO: 275128 - DNA, 25 bp, Probe Sequence
tggccttggcttgctcggataaaac

SEQ ID NO: 275129 - DNA, 25 bp, Probe Sequence
tggccgtggcaatttctcgaaataa

SEQ ID NO: 275130 - DNA, 25 bp, Probe Sequence
ggccgaatcttccttcaggatatca

SEQ ID NO: 275131 - DNA, 25 bp, Probe Sequence
ggccgtctagaactggcatggttca

SEQ ID NO: 275132 - DNA, 25 bp, Probe Sequence
ggccgagtggagactggtgttctca

SEQ ID NO: 275133 - DNA, 25 bp, Probe Sequence
ggccgatgggaatggtctgtcacaa

SEQ ID NO: 275134 - DNA, 25 bp, Probe Sequence
tggccggggaaccggctacaccaag

SEQ ID NO: 275135 - DNA, 25 bp, Probe Sequence
tgaccgaggttatggttccccaaga

SEQ ID NO: 275136 - DNA, 25 bp, Probe Sequence
tgacctggtgttattttagccccaa

SEQ ID NO: 275137 - DNA, 25 bp, Probe Sequence
ggccaagtgcctaattttaacccag

SEQ ID NO: 275138 - DNA, 25 bp, Probe Sequence
ggcctagagcactgactgttaacac

SEQ ID NO: 275139 - DNA, 25 bp, Probe Sequence
ggccgaagccagcagtgtctaaacc

SEQ ID NO: 275140 - DNA, 25 bp, Probe Sequence
ggcctgggccagtgagactgaaatc

SEQ ID NO: 275141 - DNA, 25 bp, Probe Sequence
ggcctgggccacccagagtgaaact

SEQ ID NO: 275142 - DNA, 25 bp, Probe Sequence
ggccgggactgctacagaggagaac

SEQ ID NO: 275143 - DNA, 25 bp, Probe Sequence
ggccgggtctgccctaaggataaat

SEQ ID NO: 275144 - DNA, 25 bp, Probe Sequence
ggcctgtggcctgttcaaggcagaa

SEQ ID NO: 275145 - DNA, 25 bp, Probe Sequence
ggcctgtggcctgttcaaggcagaa

SEQ ID NO: 275146 - DNA, 25 bp, Probe Sequence
ggccattgcagcatccttagatggg

SEQ ID NO: 275147 - DNA, 25 bp, Probe Sequence
ggccattgccatatttattcggtgg

SEQ ID NO: 275148 - DNA, 25 bp, Probe Sequence
tggccattgccatatttattcggtg

SEQ ID NO: 275149 - DNA, 25 bp, Probe Sequence
tggccattcctttttgtataggcta

SEQ ID NO: 275150 - DNA, 25 bp, Probe Sequence
ggcctgtcctgtgaagtgagggctg

SEQ ID NO: 275151 - DNA, 25 bp, Probe Sequence
tgcctcgtccgggaaatcggggctg

SEQ ID NO: 275152 - DNA, 25 bp, Probe Sequence
tcctctgaacggagttcaaaggctg

SEQ ID NO: 275153 - DNA, 25 bp, Probe Sequence
tactaaacgggcaattcaaaactgg

SEQ ID NO: 275154 - DNA, 25 bp, Probe Sequence
tggcaaaagggacttcaaggaagtg

SEQ ID NO: 275155 - DNA, 25 bp, Probe Sequence
tggcatctacggggttttgaacagg

SEQ ID NO: 275156 - DNA, 25 bp, Probe Sequence
tggctcttgttgggcttttagtgca

SEQ ID NO: 275157 - DNA, 25 bp, Probe Sequence
tggctcttgttgggcttttagtgca

SEQ ID NO: 275158 - DNA, 25 bp, Probe Sequence
tggctcttgttgggcttttagtgca

SEQ ID NO: 275159 - DNA, 25 bp, Probe Sequence
ggccttgggcccaacattggtgaaa

SEQ ID NO: 275160 - DNA, 25 bp, Probe Sequence
ggcctctgtcgtgtcacattgatgg

SEQ ID NO: 275161 - DNA, 25 bp, Probe Sequence
ggccttctcagtatcattcgattgc

SEQ ID NO: 275162 - DNA, 25 bp, Probe Sequence
ggcctgatatcatggtcatttgtag

SEQ ID NO: 275163 - DNA, 25 bp, Probe Sequence
ggcctgcaggcatggtgtggtatag

SEQ ID NO: 275164 - DNA, 25 bp, Probe Sequence
ggccggtgaaggtcctggacagcag

SEQ ID NO: 275165 - DNA, 25 bp, Probe Sequence
ggccaggggagggcatctggaccag

SEQ ID NO: 275166 - DNA, 25 bp, Probe Sequence
ggccgtgaggaagatccgcagcctc

SEQ ID NO: 275167 - DNA, 25 bp, Probe Sequence
ggccgtggaggaggtcggctcagcc

SEQ ID NO: 275168 - DNA, 25 bp, Probe Sequence
ggccggtgggaggtgcatggcatcg

SEQ ID NO: 275169 - DNA, 25 bp, Probe Sequence
ggccaggttgggggcagtgttgtgg

SEQ ID NO: 275170 - DNA, 25 bp, Probe Sequence
ggccaggctctatgggaggaatgag

SEQ ID NO: 275171 - DNA, 25 bp, Probe Sequence
ggccaggctctatgggaggaatgag

SEQ ID NO: 275172 - DNA, 25 bp, Probe Sequence
ggcctcgctaattgaatgtggaaag

SEQ ID NO: 275173 - DNA, 25 bp, Probe Sequence
ggccgcctatgattgaatggaaaga

SEQ ID NO: 275174 - DNA, 25 bp, Probe Sequence
ggccgctgctaatcagatgcgcaac

SEQ ID NO: 275175 - DNA, 25 bp, Probe Sequence
ggccgctgctaatcagatgcgcaac

SEQ ID NO: 275176 - DNA, 25 bp, Probe Sequence
ggccgctgctaatcagatgcgcaac

SEQ ID NO: 275177 - DNA, 25 bp, Probe Sequence
ggccatctgccaagagacagcgacc

SEQ ID NO: 275178 - DNA, 25 bp, Probe Sequence
ggccgctgtttgtacagacagcctg

SEQ ID NO: 275179 - DNA, 25 bp, Probe Sequence
tggccagtggtttcatcaatcatgc

SEQ ID NO: 275180 - DNA, 25 bp, Probe Sequence
ggccagtggtaagattgcagctgct

SEQ ID NO: 275181 - DNA, 25 bp, Probe Sequence
ggccgtggtacggatgaagcgtgcc

SEQ ID NO: 275182 - DNA, 25 bp, Probe Sequence
ggccgaggatgctgctaaacttgct

SEQ ID NO: 275183 - DNA, 25 bp, Probe Sequence
ggccgagagagctcaatccattgcc

SEQ ID NO: 275184 - DNA, 25 bp, Probe Sequence
ggccgatgaagtaaccctggacgac

SEQ ID NO: 275185 - DNA, 25 bp, Probe Sequence
tggagatgaaagcgatcccggccga

SEQ ID NO: 275186 - DNA, 25 bp, Probe Sequence
tggagtggaaacccacgaagcctac

SEQ ID NO: 275187 - DNA, 25 bp, Probe Sequence
tggaatgtcaccaaccaagggccta

SEQ ID NO: 275188 - DNA, 25 bp, Probe Sequence
tggagcagtcaagagccaaggagaa

SEQ ID NO: 275189 - DNA, 25 bp, Probe Sequence
ggccagacaagtacccaagcaggaa

SEQ ID NO: 275190 - DNA, 25 bp, Probe Sequence
tggccgccaagattcaacaccttga

SEQ ID NO: 275191 - DNA, 25 bp, Probe Sequence
ggccagcctcggtaacaggatgaga

SEQ ID NO: 275192 - DNA, 25 bp, Probe Sequence
ggccaccatcgctggaatgggggac

SEQ ID NO: 275193 - DNA, 25 bp, Probe Sequence
tggcccacacgttgtatttggttga

SEQ ID NO: 275194 - DNA, 25 bp, Probe Sequence
ggccaacagttagaaatcgtatgtc

SEQ ID NO: 275195 - DNA, 25 bp, Probe Sequence
ggccatactttagtacttctgtata

SEQ ID NO: 275196 - DNA, 25 bp, Probe Sequence
ggcctttctcgagtttctgattata

SEQ ID NO: 275197 - DNA, 25 bp, Probe Sequence
ggccttcctatggctgtacaattac

SEQ ID NO: 275198 - DNA, 25 bp, Probe Sequence
ggcctatccattggggatactgcaa

SEQ ID NO: 275199 - DNA, 25 bp, Probe Sequence
ggccgaacatcaagggatcatatgc

SEQ ID NO: 275200 - DNA, 25 bp, Probe Sequence
ggccagaatgcattggtagagctac

SEQ ID NO: 275201 - DNA, 25 bp, Probe Sequence
ggcctagcaccattgctgagcaaac

SEQ ID NO: 275202 - DNA, 25 bp, Probe Sequence
ggcctagctatttgatgagaagacc

SEQ ID NO: 275203 - DNA, 25 bp, Probe Sequence
ggcctagcaaggcaagaaagcagca

SEQ ID NO: 275204 - DNA, 25 bp, Probe Sequence
ggcctactcaggtaaaaaatcagtg

SEQ ID NO: 275205 - DNA, 25 bp, Probe Sequence
ggccttgcttgggaaaacctgcagg

SEQ ID NO: 275206 - DNA, 25 bp, Probe Sequence
ggccttgtgtcctttaatcactgca

SEQ ID NO: 275207 - DNA, 25 bp, Probe Sequence
tggcctcggcatgtttcaataaagt

SEQ ID NO: 275208 - DNA, 25 bp, Probe Sequence
tgaacacggattatccccaaaccct

SEQ ID NO: 275209 - DNA, 25 bp, Probe Sequence
tgccccaggaaatgtctccaaaccc

SEQ ID NO: 275210 - DNA, 25 bp, Probe Sequence
ggccgcatggaagagtcccagaacg

SEQ ID NO: 275211 - DNA, 25 bp, Probe Sequence
ggccgcaggaagaagaactcagata

SEQ ID NO: 275212 - DNA, 25 bp, Probe Sequence
ggccgaggcaggaagatcacttgag

SEQ ID NO: 275213 - DNA, 25 bp, Probe Sequence
ggccgagatgagcggatagcttgag

SEQ ID NO: 275214 - DNA, 25 bp, Probe Sequence
ggccaagaagcatccaagcttgatc

SEQ ID NO: 275215 - DNA, 25 bp, Probe Sequence
tggctacagaaaagcccctttcttc

SEQ ID NO: 275216 - DNA, 25 bp, Probe Sequence
tggctccagacctaggttttttctc

SEQ ID NO: 275217 - DNA, 25 bp, Probe Sequence
ggccaagcttctggggtttggctct

SEQ ID NO: 275218 - DNA, 25 bp, Probe Sequence
ggccaggttctgggtgtagggccca

SEQ ID NO: 275219 - DNA, 25 bp, Probe Sequence
ggccaggttctgggtgtagggccca

SEQ ID NO: 275220 - DNA, 25 bp, Probe Sequence
ggccagctggttggttgttgggcat

SEQ ID NO: 275221 - DNA, 25 bp, Probe Sequence
tggcctgggttcaatagttggcttc

SEQ ID NO: 275222 - DNA, 25 bp, Probe Sequence
tggcctaggcctaaagagaggtcct

SEQ ID NO: 275223 - DNA, 25 bp, Probe Sequence
ggcctgtggcctgaatgatagtatt

SEQ ID NO: 275224 - DNA, 25 bp, Probe Sequence
ggcctgggcgctgatgaaggagatc

SEQ ID NO: 275225 - DNA, 25 bp, Probe Sequence
ggcctgtggcctatggaatatgtcc

SEQ ID NO: 275226 - DNA, 25 bp, Probe Sequence
ggcctgaagtctagcttggatatat

SEQ ID NO: 275227 - DNA, 25 bp, Probe Sequence
ggcctgctcaggctgattggattga

SEQ ID NO: 275228 - DNA, 25 bp, Probe Sequence
ggccaccatggccatggatggaatg

SEQ ID NO: 275229 - DNA, 25 bp, Probe Sequence
ggccatcctggttttgcagagatca

SEQ ID NO: 275230 - DNA, 25 bp, Probe Sequence
ggcctgcctggtaagataagatagt

SEQ ID NO: 275231 - DNA, 25 bp, Probe Sequence
ggccacctactccaagagtaagttc

SEQ ID NO: 275232 - DNA, 25 bp, Probe Sequence
ggccacctcaatagcagaagtactc

SEQ ID NO: 275233 - DNA, 25 bp, Probe Sequence
tggccactccagcatggcacattac

SEQ ID NO: 275234 - DNA, 25 bp, Probe Sequence
tggccacaaagccattgtatgtagc

SEQ ID NO: 275235 - DNA, 25 bp, Probe Sequence
tggccaataaagctggtgctgtctt

SEQ ID NO: 275236 - DNA, 25 bp, Probe Sequence
tggccagcaaaaactgtgggaagat

SEQ ID NO: 275237 - DNA, 25 bp, Probe Sequence
ggccaaagatgaacattgtccacca

SEQ ID NO: 275238 - DNA, 25 bp, Probe Sequence
ggccatcaccgaagcgggagcggcc

SEQ ID NO: 275239 - DNA, 25 bp, Probe Sequence
ggccaatgcccaggggctgagggca

SEQ ID NO: 275240 - DNA, 25 bp, Probe Sequence
ggccacagaggcggggcagaaagcc

SEQ ID NO: 275241 - DNA, 25 bp, Probe Sequence
ggcctgcaggtttgggcaggttcca

SEQ ID NO: 275242 - DNA, 25 bp, Probe Sequence
ggccatgaagtgaggagatggttat

SEQ ID NO: 275243 - DNA, 25 bp, Probe Sequence
ggcctagatgtgggagaatgtgaaa

SEQ ID NO: 275244 - DNA, 25 bp, Probe Sequence
ggcctctcatgtggcagccacatgt

SEQ ID NO: 275245 - DNA, 25 bp, Probe Sequence
ggccatgtgcattggagccattgta

SEQ ID NO: 275246 - DNA, 25 bp, Probe Sequence
ggccatggtgggccgcttgaatgag

SEQ ID NO: 275247 - DNA, 25 bp, Probe Sequence
ggccaatgggaccgaggacgagagg

SEQ ID NO: 275248 - DNA, 25 bp, Probe Sequence
ggcctgtgggaacagggctggtgcg

SEQ ID NO: 275249 - DNA, 25 bp, Probe Sequence
ggccttcgtgtacagcgacggccag

SEQ ID NO: 275250 - DNA, 25 bp, Probe Sequence
ggccttctgatgcaaatgcaaagga

SEQ ID NO: 275251 - DNA, 25 bp, Probe Sequence
ggcctttgctggacagatgaagagt

SEQ ID NO: 275252 - DNA, 25 bp, Probe Sequence
ggcctgtgcactgggcagatcaaga

SEQ ID NO: 275253 - DNA, 25 bp, Probe Sequence
ggcctgatgcactcacaacacggcc

SEQ ID NO: 275254 - DNA, 25 bp, Probe Sequence
ggccagcacaccaagaccactggcc

SEQ ID NO: 275255 - DNA, 25 bp, Probe Sequence
ggcctgacatcacttaccaggagcc

SEQ ID NO: 275256 - DNA, 25 bp, Probe Sequence
ggcctactagctagagtctggagac

SEQ ID NO: 275257 - DNA, 25 bp, Probe Sequence
ggcctccaatctgcaggtggccatc

SEQ ID NO: 275258 - DNA, 25 bp, Probe Sequence
ggccatcaagatggacgggcgctac

SEQ ID NO: 275259 - DNA, 25 bp, Probe Sequence
ggccatcaaagccaactgttctgat

SEQ ID NO: 275260 - DNA, 25 bp, Probe Sequence
tggctctaattcacagtgctctttc

SEQ ID NO: 275261 - DNA, 25 bp, Probe Sequence
ggccagagttgcaaagatcttttcc

SEQ ID NO: 275262 - DNA, 25 bp, Probe Sequence
ggcctgaggtggtttctcttgagac

SEQ ID NO: 275263 - DNA, 25 bp, Probe Sequence
ggccagaggggcttacacgatatcc

SEQ ID NO: 275264 - DNA, 25 bp, Probe Sequence
ggccaaggtttgagctgcaattacg

SEQ ID NO: 275265 - DNA, 25 bp, Probe Sequence
ggccaaagggtcagaactacagcaa

SEQ ID NO: 275266 - DNA, 25 bp, Probe Sequence
ggccaaagaggtgctgaaaaaatat

SEQ ID NO: 275267 - DNA, 25 bp, Probe Sequence
ggccaaaggcttagttgtgaaaaat

SEQ ID NO: 275268 - DNA, 25 bp, Probe Sequence
ggccaatgggcttgcgtttcaagaa

SEQ ID NO: 275269 - DNA, 25 bp, Probe Sequence
ggccagagagcggaagtgcccggaa

SEQ ID NO: 275270 - DNA, 25 bp, Probe Sequence
ggcctggggcacaagagcaaagaga

SEQ ID NO: 275271 - DNA, 25 bp, Probe Sequence
ggcctgtgggagaatgagccagaga

SEQ ID NO: 275272 - DNA, 25 bp, Probe Sequence
ggcctctagtgacagatccagagac

SEQ ID NO: 275273 - DNA, 25 bp, Probe Sequence
ggcctctccaagatgattcaaacac

SEQ ID NO: 275274 - DNA, 25 bp, Probe Sequence
ggccttccagcatgtgggcaaagcc

SEQ ID NO: 275275 - DNA, 25 bp, Probe Sequence
ggccttccagcatgtgggcaaagcc

SEQ ID NO: 275276 - DNA, 25 bp, Probe Sequence
ggcctgatcacctgggagccagaac

SEQ ID NO: 275277 - DNA, 25 bp, Probe Sequence
ggcctgacagccaggctgaggccac

SEQ ID NO: 275278 - DNA, 25 bp, Probe Sequence
ggccagcaacgcttgtagaactcac

SEQ ID NO: 275279 - DNA, 25 bp, Probe Sequence
ggccatgaactcactggatttccat

SEQ ID NO: 275280 - DNA, 25 bp, Probe Sequence
ggccatacattgacacgatctcttc

SEQ ID NO: 275281 - DNA, 25 bp, Probe Sequence
ggccacaattaaggactcattaact

SEQ ID NO: 275282 - DNA, 25 bp, Probe Sequence
tggccacaattaaggactcattaac

SEQ ID NO: 275283 - DNA, 25 bp, Probe Sequence
tggctgaaactgaggcccatcctca

SEQ ID NO: 275284 - DNA, 25 bp, Probe Sequence
tggctccaaatggggcccatggcct

SEQ ID NO: 275285 - DNA, 25 bp, Probe Sequence
ggcctcaatattggagcgccagttc

SEQ ID NO: 275286 - DNA, 25 bp, Probe Sequence
tggcctcaatatgtgccgccagtgt

SEQ ID NO: 275287 - DNA, 25 bp, Probe Sequence
ggcctggatgcagttctggtcagag

SEQ ID NO: 275288 - DNA, 25 bp, Probe Sequence
ggccatcttcatgtgctgcttgaag

SEQ ID NO: 275289 - DNA, 25 bp, Probe Sequence
ggccatacctggtttgtgaatgtat

SEQ ID NO: 275290 - DNA, 25 bp, Probe Sequence
tggccatactgcccaaggtaattta

SEQ ID NO: 275291 - DNA, 25 bp, Probe Sequence
tggccacacagttccagagctaagg

SEQ ID NO: 275292 - DNA, 25 bp, Probe Sequence
tggccaatgccatcatcggccacta

SEQ ID NO: 275293 - DNA, 25 bp, Probe Sequence
ggccaaataacctgctagctaggca

SEQ ID NO: 275294 - DNA, 25 bp, Probe Sequence
ggccttttagacttggactgaggca

SEQ ID NO: 275295 - DNA, 25 bp, Probe Sequence
tggccttttagacttggactgaggc

SEQ ID NO: 275296 - DNA, 25 bp, Probe Sequence
ggccatttggagacttgggtctgga

SEQ ID NO: 275297 - DNA, 25 bp, Probe Sequence
ggcctgttggtgatttggatgctgt

SEQ ID NO: 275298 - DNA, 25 bp, Probe Sequence
ggccttgtgtgtatgtgtgtgtgtg

SEQ ID NO: 275299 - DNA, 25 bp, Probe Sequence
tggcccttggtctatggttgtttag

SEQ ID NO: 275300 - DNA, 25 bp, Probe Sequence
ggccacttggttggtgacttgctat

SEQ ID NO: 275301 - DNA, 25 bp, Probe Sequence
ggccactgtaggggtaatgctttga

SEQ ID NO: 275302 - DNA, 25 bp, Probe Sequence
ggccacagttgaggggaactttgcc

SEQ ID NO: 275303 - DNA, 25 bp, Probe Sequence
ggcctcattatgtggagcaacttcg

SEQ ID NO: 275304 - DNA, 25 bp, Probe Sequence
ggccatattagcagtgaaacatttt

SEQ ID NO: 275305 - DNA, 25 bp, Probe Sequence
tggcctatatatcagggaccacatt

SEQ ID NO: 275306 - DNA, 25 bp, Probe Sequence
tggcctaatgagcaatgttctcaat

SEQ ID NO: 275307 - DNA, 25 bp, Probe Sequence
ggcctataatgcccgtttcatatgt

SEQ ID NO: 275308 - DNA, 25 bp, Probe Sequence
ggcctctaacctgtgatgtcacact

SEQ ID NO: 275309 - DNA, 25 bp, Probe Sequence
ggcctggcacaagaagatctacatc

SEQ ID NO: 275310 - DNA, 25 bp, Probe Sequence
ggcctgccaaaacagcattgatcat

SEQ ID NO: 275311 - DNA, 25 bp, Probe Sequence
ggcctccaaagacttcatatgctcc

SEQ ID NO: 275312 - DNA, 25 bp, Probe Sequence
ggccatcaccaaaatggagcagcca

SEQ ID NO: 275313 - DNA, 25 bp, Probe Sequence
ggcctcttgagaaatggatgctgtc

SEQ ID NO: 275314 - DNA, 25 bp, Probe Sequence
ggcctgctttgaaatgcttgtctgc

SEQ ID NO: 275315 - DNA, 25 bp, Probe Sequence
ggcctgctttgaaatgcttgtctgc

SEQ ID NO: 275316 - DNA, 25 bp, Probe Sequence
ggcctggagtgaagtgactgatcct

SEQ ID NO: 275317 - DNA, 25 bp, Probe Sequence
ggcctgaggtattgtgaagattagt

SEQ ID NO: 275318 - DNA, 25 bp, Probe Sequence
ggcctgatggcttagaggactctga

SEQ ID NO: 275319 - DNA, 25 bp, Probe Sequence
ggcctgatggcttagaggactctga

SEQ ID NO: 275320 - DNA, 25 bp, Probe Sequence
tggctccaggcgtcaggaagcccaa

SEQ ID NO: 275321 - DNA, 25 bp, Probe Sequence
tggctgactccggaggtcagcccca

SEQ ID NO: 275322 - DNA, 25 bp, Probe Sequence
tggcgggctcagtctgaatctgccc

SEQ ID NO: 275323 - DNA, 25 bp, Probe Sequence
ggccaggcacagtggctcatgcctg

SEQ ID NO: 275324 - DNA, 25 bp, Probe Sequence
ggccaggctgataggagctcaggag

SEQ ID NO: 275325 - DNA, 25 bp, Probe Sequence
tggccgcagtgagtcaggctgggag

SEQ ID NO: 275326 - DNA, 25 bp, Probe Sequence
ggcctgtggcctagatgtgggagaa

SEQ ID NO: 275327 - DNA, 25 bp, Probe Sequence
ggcctggtgactccatgatggacga

SEQ ID NO: 275328 - DNA, 25 bp, Probe Sequence
ggccagggactcctggagcaggcac

SEQ ID NO: 275329 - DNA, 25 bp, Probe Sequence
ggccagggactcctggagcaggcac

SEQ ID NO: 275330 - DNA, 25 bp, Probe Sequence
ggccatggctgtgcctggaagaaca

SEQ ID NO: 275331 - DNA, 25 bp, Probe Sequence
ggccatggctgtgcctggaagaaca

SEQ ID NO: 275332 - DNA, 25 bp, Probe Sequence
ggccaaggtcctggaaataccatac

SEQ ID NO: 275333 - DNA, 25 bp, Probe Sequence
ggccaaggtcctggaaataccatac

SEQ ID NO: 275334 - DNA, 25 bp, Probe Sequence
ggcctgagaccctgaaacagctcat

SEQ ID NO: 275335 - DNA, 25 bp, Probe Sequence
ggcctagacctctggaattgagatt

SEQ ID NO: 275336 - DNA, 25 bp, Probe Sequence
ggcctagacctctggaattgagatt

SEQ ID NO: 275337 - DNA, 25 bp, Probe Sequence
ggccaagaactcattgcaaaacatt

SEQ ID NO: 275338 - DNA, 25 bp, Probe Sequence
ggccaaggattgatgtccagagttt

SEQ ID NO: 275339 - DNA, 25 bp, Probe Sequence
ggcctaaagagaggtcctggtgttg

SEQ ID NO: 275340 - DNA, 25 bp, Probe Sequence
ggcctaagaagggtacagctgtgtt

SEQ ID NO: 275341 - DNA, 25 bp, Probe Sequence
ggcctactagagtctgaacagctgt

SEQ ID NO: 275342 - DNA, 25 bp, Probe Sequence
ggcctcgggagggcagaagctgtcc

SEQ ID NO: 275343 - DNA, 25 bp, Probe Sequence
ggcctcgagctgaggtggaatgagg

SEQ ID NO: 275344 - DNA, 25 bp, Probe Sequence
ggcctatgaggcaggtctgattggc

SEQ ID NO: 275345 - DNA, 25 bp, Probe Sequence
ggccttaggctatgaataacccaca

SEQ ID NO: 275346 - DNA, 25 bp, Probe Sequence
ggccttagctcttagccaaacacct

SEQ ID NO: 275347 - DNA, 25 bp, Probe Sequence
ggcctgctgagtgaagccacaaata

SEQ ID NO: 275348 - DNA, 25 bp, Probe Sequence
ggccatctgagtgtgacaagagaaa

SEQ ID NO: 275349 - DNA, 25 bp, Probe Sequence
ggccagtgctgcttcttgcaaaaaa

SEQ ID NO: 275350 - DNA, 25 bp, Probe Sequence
ggccagctctgcatttgacaaatgc

SEQ ID NO: 275351 - DNA, 25 bp, Probe Sequence
ggcctgcatcatctttggcagacag

SEQ ID NO: 275352 - DNA, 25 bp, Probe Sequence
ggcctatgcacaatttatagcaaga

SEQ ID NO: 275353 - DNA, 25 bp, Probe Sequence
ggcctatgccatttctgttgtagtt

SEQ ID NO: 275354 - DNA, 25 bp, Probe Sequence
ggcctagcattcttctttggaaatc

SEQ ID NO: 275355 - DNA, 25 bp, Probe Sequence
tggcctcaggtttattggcgataat

SEQ ID NO: 275356 - DNA, 25 bp, Probe Sequence
tggccaagaggtgcttgaggtcaat

SEQ ID NO: 275357 - DNA, 25 bp, Probe Sequence
ggccaaggtcagccttattgaaagg

SEQ ID NO: 275358 - DNA, 25 bp, Probe Sequence
tggccaatggattcctttatgagca

SEQ ID NO: 275359 - DNA, 25 bp, Probe Sequence
ggccacattgtaggtcttgagcact

SEQ ID NO: 275360 - DNA, 25 bp, Probe Sequence
ggccaatatataatgttgtgacatc

SEQ ID NO: 275361 - DNA, 25 bp, Probe Sequence
ggcctagctttcatttgacacacag

SEQ ID NO: 275362 - DNA, 25 bp, Probe Sequence
ggccaaatgttcgagctataccaag

SEQ ID NO: 275363 - DNA, 25 bp, Probe Sequence
ggccaacatggtgaattatctctac

SEQ ID NO: 275364 - DNA, 25 bp, Probe Sequence
ggccaatatggtgaaaccccatctc

SEQ ID NO: 275365 - DNA, 25 bp, Probe Sequence
ggccaacatggtaaaaccctgtctc

SEQ ID NO: 275366 - DNA, 25 bp, Probe Sequence
tgtacaacagacttaagacccgttc

SEQ ID NO: 275367 - DNA, 25 bp, Probe Sequence
tggaaagcaaagtcaaaacccagtt

SEQ ID NO: 275368 - DNA, 25 bp, Probe Sequence
ggccaagaaagacaaagacccagtg

SEQ ID NO: 275369 - DNA, 25 bp, Probe Sequence
ggccaagaggaatcagaaacctgaa

SEQ ID NO: 275370 - DNA, 25 bp, Probe Sequence
tggcctcaagttaccaggtagcctg

SEQ ID NO: 275371 - DNA, 25 bp, Probe Sequence
ggcctacgtaggacaggaacctgga

SEQ ID NO: 275372 - DNA, 25 bp, Probe Sequence
ggcctccgtggggagataacacagg

SEQ ID NO: 275373 - DNA, 25 bp, Probe Sequence
ggcctgcacaggtcgtgaggaaaag

SEQ ID NO: 275374 - DNA, 25 bp, Probe Sequence
ggccatgacagttctggatggaaac

SEQ ID NO: 275375 - DNA, 25 bp, Probe Sequence
ggcctgcacagtcttgaggccgacc

SEQ ID NO: 275376 - DNA, 25 bp, Probe Sequence
ggccatccgtagagcgggaaccttc

SEQ ID NO: 275377 - DNA, 25 bp, Probe Sequence
ggccatccagggacctgaggactcc

SEQ ID NO: 275378 - DNA, 25 bp, Probe Sequence
ggccactgaagcacgtgagagaccc

SEQ ID NO: 275379 - DNA, 25 bp, Probe Sequence
tggccgcatggaaccttgagaaccc

SEQ ID NO: 275380 - DNA, 25 bp, Probe Sequence
tggcagccttttccttagaacacca

SEQ ID NO: 275381 - DNA, 25 bp, Probe Sequence
ttggcctttttgcgggaccagattt

SEQ ID NO: 275382 - DNA, 25 bp, Probe Sequence
ttggcctttttgcgggaccagattt

SEQ ID NO: 275383 - DNA, 25 bp, Probe Sequence
tggtcctttttcgggagttagatgt

SEQ ID NO: 275384 - DNA, 25 bp, Probe Sequence
tgtgtttttccctgtttgtagcaag

SEQ ID NO: 275385 - DNA, 25 bp, Probe Sequence
tgtgtttttccctgtttgtagcaag

SEQ ID NO: 275386 - DNA, 25 bp, Probe Sequence
tgtaggttaccttctggttgaagaa

SEQ ID NO: 275387 - DNA, 25 bp, Probe Sequence
tcgggttcctcgtggtatgggacac

SEQ ID NO: 275388 - DNA, 25 bp, Probe Sequence
tcgggcttaccagaactgggtgaag

SEQ ID NO: 275389 - DNA, 25 bp, Probe Sequence
tggggctttccagggaatgaagaag

SEQ ID NO: 275390 - DNA, 25 bp, Probe Sequence
tggagcctttccttcgaagattagg

SEQ ID NO: 275391 - DNA, 25 bp, Probe Sequence
tgggccacttccaatcggataggat

SEQ ID NO: 275392 - DNA, 25 bp, Probe Sequence
tggctgccaactattttgaggatgt

SEQ ID NO: 275393 - DNA, 25 bp, Probe Sequence
tggccaagaccactttcgacgaggc

SEQ ID NO: 275394 - DNA, 25 bp, Probe Sequence
ggccaagagctacaatgagcagcgc

SEQ ID NO: 275395 - DNA, 25 bp, Probe Sequence
ggccaggcagtacaggctgatcgtc

SEQ ID NO: 275396 - DNA, 25 bp, Probe Sequence
ggccaggagttgtgactcacagctg

SEQ ID NO: 275397 - DNA, 25 bp, Probe Sequence
ggccaggtgtggtgactcacacttg

SEQ ID NO: 275398 - DNA, 25 bp, Probe Sequence
ggccatggtggaagaactcatccgt

SEQ ID NO: 275399 - DNA, 25 bp, Probe Sequence
ggccatgcctggagacatatcactc

SEQ ID NO: 275400 - DNA, 25 bp, Probe Sequence
ggccatcaggtggtactacaccaag

SEQ ID NO: 275401 - DNA, 25 bp, Probe Sequence
ggccagtggtttctcaaccagggga

SEQ ID NO: 275402 - DNA, 25 bp, Probe Sequence
ggccagtggtttcatcaatcatgcc

SEQ ID NO: 275403 - DNA, 25 bp, Probe Sequence
ggccaggactttgagaccagccagg

SEQ ID NO: 275404 - DNA, 25 bp, Probe Sequence
ggccaggattctcaacctaacagag

SEQ ID NO: 275405 - DNA, 25 bp, Probe Sequence
ggccaggtacatccagacactgaag

SEQ ID NO: 275406 - DNA, 25 bp, Probe Sequence
ggccatagaccatacatacgatcag

SEQ ID NO: 275407 - DNA, 25 bp, Probe Sequence
ggccatagaccatacatacgatcag

SEQ ID NO: 275408 - DNA, 25 bp, Probe Sequence
tggccaaggtcatccatgacaactt

SEQ ID NO: 275409 - DNA, 25 bp, Probe Sequence
tggccaaacctacaacaatccttgc

SEQ ID NO: 275410 - DNA, 25 bp, Probe Sequence
ggccacaaactgttcaacacacaca

SEQ ID NO: 275411 - DNA, 25 bp, Probe Sequence
ggccacaaactgttcaacacacaca

SEQ ID NO: 275412 - DNA, 25 bp, Probe Sequence
ggccaaggaggaatcggagaagcag

SEQ ID NO: 275413 - DNA, 25 bp, Probe Sequence
ggccaagcaagatttcctgaagacg

SEQ ID NO: 275414 - DNA, 25 bp, Probe Sequence
ggccagacagtatacccaaactttt

SEQ ID NO: 275415 - DNA, 25 bp, Probe Sequence
ggcctaaaagcctcacagatactct

SEQ ID NO: 275416 - DNA, 25 bp, Probe Sequence
ggccttaagtcttctccacatggcc

SEQ ID NO: 275417 - DNA, 25 bp, Probe Sequence
ggccaggatcagattgtgcccggcc

SEQ ID NO: 275418 - DNA, 25 bp, Probe Sequence
ggccaggaggtgttcatggccgcct

SEQ ID NO: 275419 - DNA, 25 bp, Probe Sequence
tggcgagtggggtgagtgctctgca

SEQ ID NO: 275420 - DNA, 25 bp, Probe Sequence
tggcggagacggagggcatgctcag

SEQ ID NO: 275421 - DNA, 25 bp, Probe Sequence
ggccagaacggcaagagtgtccagt

SEQ ID NO: 275422 - DNA, 25 bp, Probe Sequence
ggccagaggcactgacagttgccag

SEQ ID NO: 275423 - DNA, 25 bp, Probe Sequence
ggccagggccaaatagctatgcaga

SEQ ID NO: 275424 - DNA, 25 bp, Probe Sequence
tggccagggactatgcagccatcgt

SEQ ID NO: 275425 - DNA, 25 bp, Probe Sequence
ggccagagttcagggcagcctggct

SEQ ID NO: 275426 - DNA, 25 bp, Probe Sequence
ggccacagtccaagaggccagcgtg

SEQ ID NO: 275427 - DNA, 25 bp, Probe Sequence
ggccactgtccaggcaaatgccagg

SEQ ID NO: 275428 - DNA, 25 bp, Probe Sequence
ggccacagtcctgggaagtcagatg

SEQ ID NO: 275429 - DNA, 25 bp, Probe Sequence
tggcctgagctcccggaaaagattg

SEQ ID NO: 275430 - DNA, 25 bp, Probe Sequence
tggcctatacccggcaaattatgtg

SEQ ID NO: 275431 - DNA, 25 bp, Probe Sequence
tgaccttgaaccggaacctgagtga

SEQ ID NO: 275432 - DNA, 25 bp, Probe Sequence
ggccttgaacgagtgcgggctggtg

SEQ ID NO: 275433 - DNA, 25 bp, Probe Sequence
ggcctatcacagttagcagtggggt

SEQ ID NO: 275434 - DNA, 25 bp, Probe Sequence
ggcctatgacaggtcaccgtgtgta

SEQ ID NO: 275435 - DNA, 25 bp, Probe Sequence
tggccctgccagataaatgtgtgtg

SEQ ID NO: 275436 - DNA, 25 bp, Probe Sequence
ggccactctctggccgaagtggcgc

SEQ ID NO: 275437 - DNA, 25 bp, Probe Sequence
tggcacactttggcctggggaagga

SEQ ID NO: 275438 - DNA, 25 bp, Probe Sequence
ggccatttttctgggggtaggatga

SEQ ID NO: 275439 - DNA, 25 bp, Probe Sequence
ggccatgtcttcatcagtggctgga

SEQ ID NO: 275440 - DNA, 25 bp, Probe Sequence
ggccatgtttcaatcgaatggagcc

SEQ ID NO: 275441 - DNA, 25 bp, Probe Sequence
ggcctcttaaaggacagcgagctac

SEQ ID NO: 275442 - DNA, 25 bp, Probe Sequence
ggccttgtcaaagacacctgctcat

SEQ ID NO: 275443 - DNA, 25 bp, Probe Sequence
ggccttgtcaaagacacctgctcat

SEQ ID NO: 275444 - DNA, 25 bp, Probe Sequence
tggccgcttcattcaagaacctaca

SEQ ID NO: 275445 - DNA, 25 bp, Probe Sequence
tggcctgaatattatactactctaa

SEQ ID NO: 275446 - DNA, 25 bp, Probe Sequence
tggcctttctgaatgttatctccaa

SEQ ID NO: 275447 - DNA, 25 bp, Probe Sequence
tggcgtatatcttggttcatcttca

SEQ ID NO: 275448 - DNA, 25 bp, Probe Sequence
tggcgtacactctcatattgtctat

SEQ ID NO: 275449 - DNA, 25 bp, Probe Sequence
ggccacactgtcaacatttgttaga

SEQ ID NO: 275450 - DNA, 25 bp, Probe Sequence
ggccacatgtcaagccaattgtttg

SEQ ID NO: 275451 - DNA, 25 bp, Probe Sequence
ggccatgatgcttacaggttttgtg

SEQ ID NO: 275452 - DNA, 25 bp, Probe Sequence
ggccaatctgaaggccttcgttgga

SEQ ID NO: 275453 - DNA, 25 bp, Probe Sequence
ggccaatgcaagtggttcagttgag

SEQ ID NO: 275454 - DNA, 25 bp, Probe Sequence
ggccttcagatggggtgctcatctt

SEQ ID NO: 275455 - DNA, 25 bp, Probe Sequence
ggccttcatggagtggatgctgcct

SEQ ID NO: 275456 - DNA, 25 bp, Probe Sequence
ggccttcatggagtggatgctgcct

SEQ ID NO: 275457 - DNA, 25 bp, Probe Sequence
ggccttgcaatgttgtgagtcccag

SEQ ID NO: 275458 - DNA, 25 bp, Probe Sequence
ggccaggccatgttatgggatctca

SEQ ID NO: 275459 - DNA, 25 bp, Probe Sequence
ggccagcagcctgatttagcagcta

SEQ ID NO: 275460 - DNA, 25 bp, Probe Sequence
ggcctcagcctatgtctgagcagga

SEQ ID NO: 275461 - DNA, 25 bp, Probe Sequence
ggcctacctcattttgcgcatggcc

SEQ ID NO: 275462 - DNA, 25 bp, Probe Sequence
tggctttagacattctcgccatggc

SEQ ID NO: 275463 - DNA, 25 bp, Probe Sequence
tggtcaaagtcattgcccacggcaa

SEQ ID NO: 275464 - DNA, 25 bp, Probe Sequence
tggcaaattccatggcaccgtcaag

SEQ ID NO: 275465 - DNA, 25 bp, Probe Sequence
tggcgaatgtaaacgtccgcgcggt

SEQ ID NO: 275466 - DNA, 25 bp, Probe Sequence
tggctgttgaaggccgtgggccgga

SEQ ID NO: 275467 - DNA, 25 bp, Probe Sequence
tggcgttacagcgcaacagcagcct

SEQ ID NO: 275468 - DNA, 25 bp, Probe Sequence
tggcctctatgcactcagcaagagc

SEQ ID NO: 275469 - DNA, 25 bp, Probe Sequence
tggccttcatatcccgaaaccaaaa

SEQ ID NO: 275470 - DNA, 25 bp, Probe Sequence
tggccctctacctgaagaccaaggg

SEQ ID NO: 275471 - DNA, 25 bp, Probe Sequence
ggccacctacccgagagatcgtagg

SEQ ID NO: 275472 - DNA, 25 bp, Probe Sequence
ggccacctacctgcaggaggtgctg

SEQ ID NO: 275473 - DNA, 25 bp, Probe Sequence
ggccaccatcatcggcgagtgggta

SEQ ID NO: 275474 - DNA, 25 bp, Probe Sequence
tggccatgcgcaagctggtgcgctc

SEQ ID NO: 275475 - DNA, 25 bp, Probe Sequence
tggcggcacatgccatatgctcagc

SEQ ID NO: 275476 - DNA, 25 bp, Probe Sequence
ggccagcagcttgtgatgatgccaa

SEQ ID NO: 275477 - DNA, 25 bp, Probe Sequence
ggccagccagattatgatgcagcac

SEQ ID NO: 275478 - DNA, 25 bp, Probe Sequence
ggccaccatgtttaccgttgataaa

SEQ ID NO: 275479 - DNA, 25 bp, Probe Sequence
tggccacagataaatcctagttaaa

SEQ ID NO: 275480 - DNA, 25 bp, Probe Sequence
tgtgcctagactggacctaattata

SEQ ID NO: 275481 - DNA, 25 bp, Probe Sequence
tggctgccaggtggtcagcgtgttt

SEQ ID NO: 275482 - DNA, 25 bp, Probe Sequence
tggctaaggaggtcgcttctcatcg

SEQ ID NO: 275483 - DNA, 25 bp, Probe Sequence
ggccactagaggtctgtgtgccatt

SEQ ID NO: 275484 - DNA, 25 bp, Probe Sequence
ggccagcatcagggacagctttgct

SEQ ID NO: 275485 - DNA, 25 bp, Probe Sequence
ggccatggcagtgacatgtttgtca

SEQ ID NO: 275486 - DNA, 25 bp, Probe Sequence
ggccatgcagaaggacctcatcgtc

SEQ ID NO: 275487 - DNA, 25 bp, Probe Sequence
ggccatatgtgagacccacagctga

SEQ ID NO: 275488 - DNA, 25 bp, Probe Sequence
tggccacatggtgaaaccctgtctc

SEQ ID NO: 275489 - DNA, 25 bp, Probe Sequence
tggccacaagattgaattccgtctc

SEQ ID NO: 275490 - DNA, 25 bp, Probe Sequence
ggccacaacattatgattattcctt

SEQ ID NO: 275491 - DNA, 25 bp, Probe Sequence
ggccaaagcaaacggtttctcctgt

SEQ ID NO: 275492 - DNA, 25 bp, Probe Sequence
ggccaacaccagggttgtattctat

SEQ ID NO: 275493 - DNA, 25 bp, Probe Sequence
tggccgcccaagggtttaagctact

SEQ ID NO: 275494 - DNA, 25 bp, Probe Sequence
tggcccacaaactctttaacaactt

SEQ ID NO: 275495 - DNA, 25 bp, Probe Sequence
tggtccttaagctttactaaacatg

SEQ ID NO: 275496 - DNA, 25 bp, Probe Sequence
tggcttcttaatcttttcacaaata

SEQ ID NO: 275497 - DNA, 25 bp, Probe Sequence
tggcatacctacattttccttgaga

SEQ ID NO: 275498 - DNA, 25 bp, Probe Sequence
tggctacagttccataggttttaac

SEQ ID NO: 275499 - DNA, 25 bp, Probe Sequence
ggccacactcttagaggtctcttca

SEQ ID NO: 275500 - DNA, 25 bp, Probe Sequence
tggccacgcaactgagaatctcttc

SEQ ID NO: 275501 - DNA, 25 bp, Probe Sequence
tggcctgcagaataggaaagtccta

SEQ ID NO: 275502 - DNA, 25 bp, Probe Sequence
tggttgcccaaatatgaggtccata

SEQ ID NO: 275503 - DNA, 25 bp, Probe Sequence
tggcttccaaactgcagattgacat

SEQ ID NO: 275504 - DNA, 25 bp, Probe Sequence
tgggtctcaaaaacactaggaactt

SEQ ID NO: 275505 - DNA, 25 bp, Probe Sequence
tggcagttattattacctaggtacc

SEQ ID NO: 275506 - DNA, 25 bp, Probe Sequence
tggcattttgcctgatagtgggtga

SEQ ID NO: 275507 - DNA, 25 bp, Probe Sequence
tgaccattaggcctatttaggtgac

SEQ ID NO: 275508 - DNA, 25 bp, Probe Sequence
tgaccattaggcctatttaggtgac

SEQ ID NO: 275509 - DNA, 25 bp, Probe Sequence
tggctttctacacatttaggctgta

SEQ ID NO: 275510 - DNA, 25 bp, Probe Sequence
tggtaattccatcttaaggtgtcag

SEQ ID NO: 275511 - DNA, 25 bp, Probe Sequence
tggcataaaccctttgaagttcctt

SEQ ID NO: 275512 - DNA, 25 bp, Probe Sequence
tgaaaaacgactatggtcttccctt

SEQ ID NO: 275513 - DNA, 25 bp, Probe Sequence
tgcaaaaactgtcaggagggacccg

SEQ ID NO: 275514 - DNA, 25 bp, Probe Sequence
taagaaactgttgcaaggaaggtgg

SEQ ID NO: 275515 - DNA, 25 bp, Probe Sequence
tcgagagtacttttcctgggagggg

SEQ ID NO: 275516 - DNA, 25 bp, Probe Sequence
tcgagagtacttttcctgggagggg

SEQ ID NO: 275517 - DNA, 25 bp, Probe Sequence
tggtgcagtaattttccggggaaag

SEQ ID NO: 275518 - DNA, 25 bp, Probe Sequence
tggggaagaaggtccgcgttaaatg

SEQ ID NO: 275519 - DNA, 25 bp, Probe Sequence
tggctagggcaacactctgagctct

SEQ ID NO: 275520 - DNA, 25 bp, Probe Sequence
ggccagctggaacatgtgcagccct

SEQ ID NO: 275521 - DNA, 25 bp, Probe Sequence
ggccagctacaacatgggcagcaac

SEQ ID NO: 275522 - DNA, 25 bp, Probe Sequence
ggccagtacatcacagtgtatcata

SEQ ID NO: 275523 - DNA, 25 bp, Probe Sequence
ggccttcatcatagactggtatata

SEQ ID NO: 275524 - DNA, 25 bp, Probe Sequence
ggccttctctgaaaatgtatgaaca

SEQ ID NO: 275525 - DNA, 25 bp, Probe Sequence
ggccaacatctgtaaatgtaatacc

SEQ ID NO: 275526 - DNA, 25 bp, Probe Sequence
ggccaccactgtttagaatgaccct

SEQ ID NO: 275527 - DNA, 25 bp, Probe Sequence
tggccccactgatatatgcaaaccc

SEQ ID NO: 275528 - DNA, 25 bp, Probe Sequence
tggccccacctagttgcaaaggaca

SEQ ID NO: 275529 - DNA, 25 bp, Probe Sequence
tggcccagaggctcaaaaaggacac

SEQ ID NO: 275530 - DNA, 25 bp, Probe Sequence
ggccaagggcataatataatactag

SEQ ID NO: 275531 - DNA, 25 bp, Probe Sequence
ggccagaagacatgattttaatgag

SEQ ID NO: 275532 - DNA, 25 bp, Probe Sequence
ggccactatgactgcacttatggtg

SEQ ID NO: 275533 - DNA, 25 bp, Probe Sequence
ggccacatatatgcgaatctataag

SEQ ID NO: 275534 - DNA, 25 bp, Probe Sequence
tggccagtgcaagcgtgacttgaag

SEQ ID NO: 275535 - DNA, 25 bp, Probe Sequence
tggccgtgtggatgtagctgtcaac

SEQ ID NO: 275536 - DNA, 25 bp, Probe Sequence
tggccttggggtaggtgacaatccc

SEQ ID NO: 275537 - DNA, 25 bp, Probe Sequence
ggccaatgtgggctggaacaactcc

SEQ ID NO: 275538 - DNA, 25 bp, Probe Sequence
ggccattatggcccagtacaagacc

SEQ ID NO: 275539 - DNA, 25 bp, Probe Sequence
tggccttgctccacaggacataggc

SEQ ID NO: 275540 - DNA, 25 bp, Probe Sequence
ggccatcgaacaccggaatgaggct

SEQ ID NO: 275541 - DNA, 25 bp, Probe Sequence
tggcctccaacccggttgatgtggt

SEQ ID NO: 275542 - DNA, 25 bp, Probe Sequence
ggccaagaagactgcgttggtggtc

SEQ ID NO: 275543 - DNA, 25 bp, Probe Sequence
ggccaaaggctgcgaggttgtggtg

SEQ ID NO: 275544 - DNA, 25 bp, Probe Sequence
ggccacaactgtgaggttagaagtg

SEQ ID NO: 275545 - DNA, 25 bp, Probe Sequence
ggccaagacaggcggctgggaagtg

SEQ ID NO: 275546 - DNA, 25 bp, Probe Sequence
ggccagacaagacgactgtcaggaa

SEQ ID NO: 275547 - DNA, 25 bp, Probe Sequence
ggccagtaacatcgtcatgctgagg

SEQ ID NO: 275548 - DNA, 25 bp, Probe Sequence
ggccagcgagaatgccatcgtgtgg

SEQ ID NO: 275549 - DNA, 25 bp, Probe Sequence
ggccagcgcatatacaacagggcaa

SEQ ID NO: 275550 - DNA, 25 bp, Probe Sequence
tggctcccagataccaccggagaaa

SEQ ID NO: 275551 - DNA, 25 bp, Probe Sequence
tggccatccgtgaatccatcgagag

SEQ ID NO: 275552 - DNA, 25 bp, Probe Sequence
ggccatagtgtttgtcatctatgat

SEQ ID NO: 275553 - DNA, 25 bp, Probe Sequence
ggccaatatctttgattgctgtgca

SEQ ID NO: 275554 - DNA, 25 bp, Probe Sequence
tggccttggctttgattcttgcagt

SEQ ID NO: 275555 - DNA, 25 bp, Probe Sequence
tggccttggctttgattcttgcagt

SEQ ID NO: 275556 - DNA, 25 bp, Probe Sequence
tggcctttcttatactgtagaatat

SEQ ID NO: 275557 - DNA, 25 bp, Probe Sequence
tggcctgtgtcttataattccaaaa

SEQ ID NO: 275558 - DNA, 25 bp, Probe Sequence
tgtccatgcttcccttttaacataa

SEQ ID NO: 275559 - DNA, 25 bp, Probe Sequence
tggccatttcagccactttcaagat

SEQ ID NO: 275560 - DNA, 25 bp, Probe Sequence
ggccacattcagttcttatcaaaga

SEQ ID NO: 275561 - DNA, 25 bp, Probe Sequence
ggccaactcagcttttgtggagcga

SEQ ID NO: 275562 - DNA, 25 bp, Probe Sequence
ggccacactatctacacttggagac

SEQ ID NO: 275563 - DNA, 25 bp, Probe Sequence
ggccaacgtcaacattgggagcctc

SEQ ID NO: 275564 - DNA, 25 bp, Probe Sequence
tggccaacctaaaattatgtgtgtc

SEQ ID NO: 275565 - DNA, 25 bp, Probe Sequence
ggccacactcagttaataatggggc

SEQ ID NO: 275566 - DNA, 25 bp, Probe Sequence
ggccacctctttaaaagggcagctg

SEQ ID NO: 275567 - DNA, 25 bp, Probe Sequence
ggccaactatttagtaagcccggat

SEQ ID NO: 275568 - DNA, 25 bp, Probe Sequence
tggccacagctgttcatatttaccc

SEQ ID NO: 275569 - DNA, 25 bp, Probe Sequence
ggccagcagtggtctttgaagcacc

SEQ ID NO: 275570 - DNA, 25 bp, Probe Sequence
ggccaagtcagaacttcgagcagcc

SEQ ID NO: 275571 - DNA, 25 bp, Probe Sequence
ggccatgaacgagctgtggagagcc

SEQ ID NO: 275572 - DNA, 25 bp, Probe Sequence
ggccagtcaggggtgaggagagccc

SEQ ID NO: 275573 - DNA, 25 bp, Probe Sequence
ggccaggcctgtgggagaatgagcc

SEQ ID NO: 275574 - DNA, 25 bp, Probe Sequence
tggctgaggcaccagggctaagcaa

SEQ ID NO: 275575 - DNA, 25 bp, Probe Sequence
tggctacgacgacttcaactgcaac

SEQ ID NO: 275576 - DNA, 25 bp, Probe Sequence
ggccattgacttcatagactccatc

SEQ ID NO: 275577 - DNA, 25 bp, Probe Sequence
tggccaatgcctataaaatgcccat

SEQ ID NO: 275578 - DNA, 25 bp, Probe Sequence
ggccagtcctaaaagagctcctgaa

SEQ ID NO: 275579 - DNA, 25 bp, Probe Sequence
tggctcagtcaataaaggatccggg

SEQ ID NO: 275580 - DNA, 25 bp, Probe Sequence
tggtcttaaacatgagggagcgtgg

SEQ ID NO: 275581 - DNA, 25 bp, Probe Sequence
tgagtttcttactcgggagctggct

SEQ ID NO: 275582 - DNA, 25 bp, Probe Sequence
tgcagttagtttgcgggaactcagc

SEQ ID NO: 275583 - DNA, 25 bp, Probe Sequence
tggaaagtttccagtacactgaaac

SEQ ID NO: 275584 - DNA, 25 bp, Probe Sequence
tggaaggttctagtttaatccaaat

SEQ ID NO: 275585 - DNA, 25 bp, Probe Sequence
tggaagtttccagccgcaatttgaa

SEQ ID NO: 275586 - DNA, 25 bp, Probe Sequence
tggaagtttcagaacccactttggg

SEQ ID NO: 275587 - DNA, 25 bp, Probe Sequence
tggaaggttattacctaatggagat

SEQ ID NO: 275588 - DNA, 25 bp, Probe Sequence
taggaacttcagagcttattggaaa

SEQ ID NO: 275589 - DNA, 25 bp, Probe Sequence
tggaaaatgtcaacctttgtaagaa

SEQ ID NO: 275590 - DNA, 25 bp, Probe Sequence
tggaccagtggagcctttctgacaa

SEQ ID NO: 275591 - DNA, 25 bp, Probe Sequence
tggacgtactttgtctgactacaat

SEQ ID NO: 275592 - DNA, 25 bp, Probe Sequence
tggaaacctttgttcaaattcaata

SEQ ID NO: 275593 - DNA, 25 bp, Probe Sequence
tggcctcatccttgtatttaattaa

SEQ ID NO: 275594 - DNA, 25 bp, Probe Sequence
tggcctcatccttgtatttaattaa

SEQ ID NO: 275595 - DNA, 25 bp, Probe Sequence
tggcgctcagcagatatttgaagct

SEQ ID NO: 275596 - DNA, 25 bp, Probe Sequence
tggccatctgatggactggtgtcct

SEQ ID NO: 275597 - DNA, 25 bp, Probe Sequence
tggcatgatattcagcatggtcctc

SEQ ID NO: 275598 - DNA, 25 bp, Probe Sequence
tggcatgacatctgggtcatctgtc

SEQ ID NO: 275599 - DNA, 25 bp, Probe Sequence
tggcaaacttgggtttacctgcctg

SEQ ID NO: 275600 - DNA, 25 bp, Probe Sequence
tggtaacttggtaaaaggctgcctt

SEQ ID NO: 275601 - DNA, 25 bp, Probe Sequence
tgggtccttttaagcactggtaatt

SEQ ID NO: 275602 - DNA, 25 bp, Probe Sequence
tgtgaattctttatccctgggaact

SEQ ID NO: 275603 - DNA, 25 bp, Probe Sequence
tggaacccacttaccgtgtggttct

SEQ ID NO: 275604 - DNA, 25 bp, Probe Sequence
tggaatcactccttttgggtttttg

SEQ ID NO: 275605 - DNA, 25 bp, Probe Sequence
tggccaagttattttacctttgtct

SEQ ID NO: 275606 - DNA, 25 bp, Probe Sequence
ggccaagattctgttacctgtaatt

SEQ ID NO: 275607 - DNA, 25 bp, Probe Sequence
ggccaagacgtggatgttcctgctc

SEQ ID NO: 275608 - DNA, 25 bp, Probe Sequence
ggccagagcactttgatttccagcc

SEQ ID NO: 275609 - DNA, 25 bp, Probe Sequence
ggccagtgagctttacttgccgtgt

SEQ ID NO: 275610 - DNA, 25 bp, Probe Sequence
ggccagtgtcgttattatccttgtg

SEQ ID NO: 275611 - DNA, 25 bp, Probe Sequence
ggccactgaggagtttcttcctgtt

SEQ ID NO: 275612 - DNA, 25 bp, Probe Sequence
tggccttggagcattatctttagtt

SEQ ID NO: 275613 - DNA, 25 bp, Probe Sequence
tggcttagagtcttttctttgaagt

SEQ ID NO: 275614 - DNA, 25 bp, Probe Sequence
tggctagggtctacttctactgtat

SEQ ID NO: 275615 - DNA, 25 bp, Probe Sequence
tggctggggagcacttaattcttcc

SEQ ID NO: 275616 - DNA, 25 bp, Probe Sequence
tggcagagggaatgactaaaatgtc

SEQ ID NO: 275617 - DNA, 25 bp, Probe Sequence
tggcgaggaactcaataaagtgctt

SEQ ID NO: 275618 - DNA, 25 bp, Probe Sequence
tgggggagcctttacaaagagtctt

SEQ ID NO: 275619 - DNA, 25 bp, Probe Sequence
tggctggtggctcctaaacacagag

SEQ ID NO: 275620 - DNA, 25 bp, Probe Sequence
tggctgttgtgctttccaagcgcca

SEQ ID NO: 275621 - DNA, 25 bp, Probe Sequence
tggcttttttcaatcatagcactat

SEQ ID NO: 275622 - DNA, 25 bp, Probe Sequence
tggcctttggctaccataccaagaa

SEQ ID NO: 275623 - DNA, 25 bp, Probe Sequence
tggcgcgattgggacagtcgccagg

SEQ ID NO: 275624 - DNA, 25 bp, Probe Sequence
tggcggcttgtgcagcaatggccaa

SEQ ID NO: 275625 - DNA, 25 bp, Probe Sequence
ggccacgctgagcacgaaggcaaac

SEQ ID NO: 275626 - DNA, 25 bp, Probe Sequence
ggccatccagagcaagaacagcagc

SEQ ID NO: 275627 - DNA, 25 bp, Probe Sequence
tggccatccgggacagtgagcgaca

SEQ ID NO: 275628 - DNA, 25 bp, Probe Sequence
tggcctacgaaggcgtgcgggcagc

SEQ ID NO: 275629 - DNA, 25 bp, Probe Sequence
ggccatccgagaggcctatgaggca

SEQ ID NO: 275630 - DNA, 25 bp, Probe Sequence
ggccaccggaggactggagcagtcc

SEQ ID NO: 275631 - DNA, 25 bp, Probe Sequence
ggccactgggcatgtatggaggtgt

SEQ ID NO: 275632 - DNA, 25 bp, Probe Sequence
ggccactggtgctgagtcagaggga

SEQ ID NO: 275633 - DNA, 25 bp, Probe Sequence
ggccaaggcagctgaaaggctggac

SEQ ID NO: 275634 - DNA, 25 bp, Probe Sequence
ggccaagagaaagtaagggagacag

SEQ ID NO: 275635 - DNA, 25 bp, Probe Sequence
tggcgaaaaatccaaagggcaaaga

SEQ ID NO: 275636 - DNA, 25 bp, Probe Sequence
tggccttaaatcctcagtggataaa

SEQ ID NO: 275637 - DNA, 25 bp, Probe Sequence
tggcctcccaacgtgctgggattat

SEQ ID NO: 275638 - DNA, 25 bp, Probe Sequence
tggcactccaaactaagggcttcta

SEQ ID NO: 275639 - DNA, 25 bp, Probe Sequence
tggtttcaaccctggatgctttcaa

SEQ ID NO: 275640 - DNA, 25 bp, Probe Sequence
tggtgtccgaaccaggggctgtaat

SEQ ID NO: 275641 - DNA, 25 bp, Probe Sequence
tggctggcggagtccatcaggactg

SEQ ID NO: 275642 - DNA, 25 bp, Probe Sequence
tggcatgagggacctctcgggatgt

SEQ ID NO: 275643 - DNA, 25 bp, Probe Sequence
tggctcaggggcttctatgggatcc

SEQ ID NO: 275644 - DNA, 25 bp, Probe Sequence
ggccaagaggcacctttggcccaca

SEQ ID NO: 275645 - DNA, 25 bp, Probe Sequence
ggccaagggagatgttacagcccag

SEQ ID NO: 275646 - DNA, 25 bp, Probe Sequence
ggccaagaaggatgtccacatgcct

SEQ ID NO: 275647 - DNA, 25 bp, Probe Sequence
ggccaagaaggatgtccacatgcct

SEQ ID NO: 275648 - DNA, 25 bp, Probe Sequence
ggccaagaaggatgtccacatgcct

SEQ ID NO: 275649 - DNA, 25 bp, Probe Sequence
ggccaagaagggccttactccttca

SEQ ID NO: 275650 - DNA, 25 bp, Probe Sequence
ggccaaaagggggctgacctggagc

SEQ ID NO: 275651 - DNA, 25 bp, Probe Sequence
ggccagaaatgttcggtgatccggg

SEQ ID NO: 275652 - DNA, 25 bp, Probe Sequence
ggccatgaactttcatgaggtcctg

SEQ ID NO: 275653 - DNA, 25 bp, Probe Sequence
tggccatgaactttcatgaggtcct

SEQ ID NO: 275654 - DNA, 25 bp, Probe Sequence
tggcaaatatctcatctgccggccc

SEQ ID NO: 275655 - DNA, 25 bp, Probe Sequence
ggccacattgatgactacagtgccc

SEQ ID NO: 275656 - DNA, 25 bp, Probe Sequence
ggccaataaggtgccagctgctgcc

SEQ ID NO: 275657 - DNA, 25 bp, Probe Sequence
ggccaacagataatttctgctgctg

SEQ ID NO: 275658 - DNA, 25 bp, Probe Sequence
ggccaacagataatttctgctgctg

SEQ ID NO: 275659 - DNA, 25 bp, Probe Sequence
ggccaatacaaattgagatctgctg

SEQ ID NO: 275660 - DNA, 25 bp, Probe Sequence
tggccgaacatcaagggatcatatg

SEQ ID NO: 275661 - DNA, 25 bp, Probe Sequence
tggcgcgaacactggaatgcatata

SEQ ID NO: 275662 - DNA, 25 bp, Probe Sequence
tggctcaaatcccgatgcaatctta

SEQ ID NO: 275663 - DNA, 25 bp, Probe Sequence
tggctaattcgcccagaatatataa

SEQ ID NO: 275664 - DNA, 25 bp, Probe Sequence
tggttttttccagagttagatcctc

SEQ ID NO: 275665 - DNA, 25 bp, Probe Sequence
tggaatgttttgtgggtatttcacc

SEQ ID NO: 275666 - DNA, 25 bp, Probe Sequence
tggccttctttgtggtacaaatcaa

SEQ ID NO: 275667 - DNA, 25 bp, Probe Sequence
tggcaacctttgtgttacagattaa

SEQ ID NO: 275668 - DNA, 25 bp, Probe Sequence
tggcatccctttttcataaattatt

SEQ ID NO: 275669 - DNA, 25 bp, Probe Sequence
tggcaaagcttatccaattttatgc

SEQ ID NO: 275670 - DNA, 25 bp, Probe Sequence
tggcaaaattagtcgccttcgtcga

SEQ ID NO: 275671 - DNA, 25 bp, Probe Sequence
tggaaatcttagcctgccttagcca

SEQ ID NO: 275672 - DNA, 25 bp, Probe Sequence
tggcacaggcattatctctgcaatt

SEQ ID NO: 275673 - DNA, 25 bp, Probe Sequence
tggctgtggcatctgctctgaaaca

SEQ ID NO: 275674 - DNA, 25 bp, Probe Sequence
tggctgtggcatctgctctgaaaca

SEQ ID NO: 275675 - DNA, 25 bp, Probe Sequence
tggcttggcatcttttagctcagga

SEQ ID NO: 275676 - DNA, 25 bp, Probe Sequence
tggcttgccctcttagtagcattga

SEQ ID NO: 275677 - DNA, 25 bp, Probe Sequence
tggcatatgccatttctgggaaatg

SEQ ID NO: 275678 - DNA, 25 bp, Probe Sequence
tggcgctgcactcaatgcggaaagc

SEQ ID NO: 275679 - DNA, 25 bp, Probe Sequence
tggcctgatgatccacagcggagac

SEQ ID NO: 275680 - DNA, 25 bp, Probe Sequence
tggcctgatgatccacagcggagac

SEQ ID NO: 275681 - DNA, 25 bp, Probe Sequence
ggccaagctgcccagcgagatgagc

SEQ ID NO: 275682 - DNA, 25 bp, Probe Sequence
ggccacaatgaccagtcacaatggt

SEQ ID NO: 275683 - DNA, 25 bp, Probe Sequence
ggccagacagaccttcacagatgcc

SEQ ID NO: 275684 - DNA, 25 bp, Probe Sequence
ggccagactgacctcagagagatca

SEQ ID NO: 275685 - DNA, 25 bp, Probe Sequence
ggccaactgatggccggctgtcatt

SEQ ID NO: 275686 - DNA, 25 bp, Probe Sequence
ggccaagtgccaggtggcttcagca

SEQ ID NO: 275687 - DNA, 25 bp, Probe Sequence
ggccaggagccattggaggtcactc

SEQ ID NO: 275688 - DNA, 25 bp, Probe Sequence
ggccagggaagtggatgtctcctcc

SEQ ID NO: 275689 - DNA, 25 bp, Probe Sequence
ggccaggtggaatatgacccatctc

SEQ ID NO: 275690 - DNA, 25 bp, Probe Sequence
ggccagaaggactgacaccacagat

SEQ ID NO: 275691 - DNA, 25 bp, Probe Sequence
ggccagggagaactacagctacgaa

SEQ ID NO: 275692 - DNA, 25 bp, Probe Sequence
tggccatgggagcagtaatgatagc

SEQ ID NO: 275693 - DNA, 25 bp, Probe Sequence
tggcctcttgagcagtggctggtcc

SEQ ID NO: 275694 - DNA, 25 bp, Probe Sequence
tggcgacaccagccaggtgctggtc

SEQ ID NO: 275695 - DNA, 25 bp, Probe Sequence
tggcgataacagtcatgtggagatg

SEQ ID NO: 275696 - DNA, 25 bp, Probe Sequence
ggccaagagcagcctgtggatgatg

SEQ ID NO: 275697 - DNA, 25 bp, Probe Sequence
ggccaagagcagcctgtggatgatg

SEQ ID NO: 275698 - DNA, 25 bp, Probe Sequence
ggccaagatcaaggctcgagatctt

SEQ ID NO: 275699 - DNA, 25 bp, Probe Sequence
tggccacgtaaccactgcatatgtt

SEQ ID NO: 275700 - DNA, 25 bp, Probe Sequence
tggccaagtaacaaccaagctctct

SEQ ID NO: 275701 - DNA, 25 bp, Probe Sequence
tggccaagttcaatgcctcacagct

SEQ ID NO: 275702 - DNA, 25 bp, Probe Sequence
tggcctccttcaatgaccagagcac

SEQ ID NO: 275703 - DNA, 25 bp, Probe Sequence
tggcccttctcaagaccaattcggc

SEQ ID NO: 275704 - DNA, 25 bp, Probe Sequence
tggcctcctctaatgactttgggga

SEQ ID NO: 275705 - DNA, 25 bp, Probe Sequence
tggcctcctctaatgactttgggga

SEQ ID NO: 275706 - DNA, 25 bp, Probe Sequence
tggcccgttggttttctgagcaggg

SEQ ID NO: 275707 - DNA, 25 bp, Probe Sequence
tggcccgttatgccagtatctgcca

SEQ ID NO: 275708 - DNA, 25 bp, Probe Sequence
tggcccgttatgccagtatctgcca

SEQ ID NO: 275709 - DNA, 25 bp, Probe Sequence
tggcccgttatgccagtatctgcca

SEQ ID NO: 275710 - DNA, 25 bp, Probe Sequence
tggccaagttatcatgtccatccac

SEQ ID NO: 275711 - DNA, 25 bp, Probe Sequence
tggccagagcatctcgtgtggacca

SEQ ID NO: 275712 - DNA, 25 bp, Probe Sequence
tggccatgaacgcctttggagacat

SEQ ID NO: 275713 - DNA, 25 bp, Probe Sequence
tggccatgaacacctttggagacat

SEQ ID NO: 275714 - DNA, 25 bp, Probe Sequence
tggccatcaacaagagctttgacca

SEQ ID NO: 275715 - DNA, 25 bp, Probe Sequence
tggccacaacattatgattattcct

SEQ ID NO: 275716 - DNA, 25 bp, Probe Sequence
tggccaaacacttggtgcatttctt

SEQ ID NO: 275717 - DNA, 25 bp, Probe Sequence
tggccaggagtggctggtttttctg

SEQ ID NO: 275718 - DNA, 25 bp, Probe Sequence
tggcggacatggacgagcttttttc

SEQ ID NO: 275719 - DNA, 25 bp, Probe Sequence
tggcggactgtgacgccacgtgaca

SEQ ID NO: 275720 - DNA, 25 bp, Probe Sequence
tggcttgactggatggaaggagact

SEQ ID NO: 275721 - DNA, 25 bp, Probe Sequence
tggcttcaagtgtgggtggacagtc

SEQ ID NO: 275722 - DNA, 25 bp, Probe Sequence
tggcttcggcggagcaggatgaact

SEQ ID NO: 275723 - DNA, 25 bp, Probe Sequence
tggccaaggcggagcgcgtgagctc

SEQ ID NO: 275724 - DNA, 25 bp, Probe Sequence
tggctgaagagggtgtgccggcgcc

SEQ ID NO: 275725 - DNA, 25 bp, Probe Sequence
ggccacacagtgggtgctgggcctc

SEQ ID NO: 275726 - DNA, 25 bp, Probe Sequence
ggccacacagtggcactggagtctc

SEQ ID NO: 275727 - DNA, 25 bp, Probe Sequence
tggcttcacgtggcaggaaggccct

SEQ ID NO: 275728 - DNA, 25 bp, Probe Sequence
tggctttcggggggaagctctgagc

SEQ ID NO: 275729 - DNA, 25 bp, Probe Sequence
tggttcccgggtaagagttgactct

SEQ ID NO: 275730 - DNA, 25 bp, Probe Sequence
tggaccccgagctgttgaggtactt

SEQ ID NO: 275731 - DNA, 25 bp, Probe Sequence
tggaccctcaacttcttcagaagac

SEQ ID NO: 275732 - DNA, 25 bp, Probe Sequence
tggcccggccaaagtctaggcagaa

SEQ ID NO: 275733 - DNA, 25 bp, Probe Sequence
tggcccgatggcaaactctatggag

SEQ ID NO: 275734 - DNA, 25 bp, Probe Sequence
ggccacagcaggaaatccctggggc

SEQ ID NO: 275735 - DNA, 25 bp, Probe Sequence
tggcccaggaaaaacctgtgggttg

SEQ ID NO: 275736 - DNA, 25 bp, Probe Sequence
tggctcctgtgaaaaagcttgtggt

SEQ ID NO: 275737 - DNA, 25 bp, Probe Sequence
ggccactggtaaaactctgcagctt

SEQ ID NO: 275738 - DNA, 25 bp, Probe Sequence
tggccagtttaaaacttatgctatc

SEQ ID NO: 275739 - DNA, 25 bp, Probe Sequence
tggacagtttaaagcttttattcgt

SEQ ID NO: 275740 - DNA, 25 bp, Probe Sequence
tggccagatcctcatagctttatgt

SEQ ID NO: 275741 - DNA, 25 bp, Probe Sequence
tggccgtccttcagattgaagctga

SEQ ID NO: 275742 - DNA, 25 bp, Probe Sequence
tggccgtcctgagggggaagtgaga

SEQ ID NO: 275743 - DNA, 25 bp, Probe Sequence
tggccgcgatctatgggggtgtaga

SEQ ID NO: 275744 - DNA, 25 bp, Probe Sequence
tggccgctactcttggggagaggga

SEQ ID NO: 275745 - DNA, 25 bp, Probe Sequence
tggccaccgctcagtgggaatggtc

SEQ ID NO: 275746 - DNA, 25 bp, Probe Sequence
tggctccgcgtcggtagacattgtt

SEQ ID NO: 275747 - DNA, 25 bp, Probe Sequence
tggcggcaggtctgaccacattttt

SEQ ID NO: 275748 - DNA, 25 bp, Probe Sequence
tggaggtttgtcctctccatttttc

SEQ ID NO: 275749 - DNA, 25 bp, Probe Sequence
tggtggttatttctaaatttttgag

SEQ ID NO: 275750 - DNA, 25 bp, Probe Sequence
tgtgtttttcttctgccaatttact

SEQ ID NO: 275751 - DNA, 25 bp, Probe Sequence
tgtgtttttcttctgccaatttact

SEQ ID NO: 275752 - DNA, 25 bp, Probe Sequence
tggtttattcttccgcggagttaag

SEQ ID NO: 275753 - DNA, 25 bp, Probe Sequence
tggttaaccttattgggaatggata

SEQ ID NO: 275754 - DNA, 25 bp, Probe Sequence
tggctttacattgcagataggaagg

SEQ ID NO: 275755 - DNA, 25 bp, Probe Sequence
tggctctctacctacgtagcagaca

SEQ ID NO: 275756 - DNA, 25 bp, Probe Sequence
tggtctgtttccaggtcagaaacca

SEQ ID NO: 275757 - DNA, 25 bp, Probe Sequence
tggaatttccccaattcaagaacct

SEQ ID NO: 275758 - DNA, 25 bp, Probe Sequence
tggaagtcttttcaccaaaccctga

SEQ ID NO: 275759 - DNA, 25 bp, Probe Sequence
tggaaggttatacctctcattaccc

SEQ ID NO: 275760 - DNA, 25 bp, Probe Sequence
tggcagagccttaagacctcaaacc

SEQ ID NO: 275761 - DNA, 25 bp, Probe Sequence
tggagtgccttaatttttaaccagt

SEQ ID NO: 275762 - DNA, 25 bp, Probe Sequence
tggcaaccacaaatctttccaactc

SEQ ID NO: 275763 - DNA, 25 bp, Probe Sequence
tggaaccacggaattactctgcctc

SEQ ID NO: 275764 - DNA, 25 bp, Probe Sequence
tggcaacccagcttcattagatgtc

SEQ ID NO: 275765 - DNA, 25 bp, Probe Sequence
ggccagcccatggtgttgtgtacac

SEQ ID NO: 275766 - DNA, 25 bp, Probe Sequence
tggccactccatgtgtcatttacac

SEQ ID NO: 275767 - DNA, 25 bp, Probe Sequence
tggccctggctaatgccttataatt

SEQ ID NO: 275768 - DNA, 25 bp, Probe Sequence
tggccagaagcctgctcttataatg

SEQ ID NO: 275769 - DNA, 25 bp, Probe Sequence
tggccagtgacgtgtgcttctgaga

SEQ ID NO: 275770 - DNA, 25 bp, Probe Sequence
tggccagagcaggccggtttggcac

SEQ ID NO: 275771 - DNA, 25 bp, Probe Sequence
tggcccaggacacagtttggctcat

SEQ ID NO: 275772 - DNA, 25 bp, Probe Sequence
tggacctggacccagtttacgtcca

SEQ ID NO: 275773 - DNA, 25 bp, Probe Sequence
tgggctcttaccaagtttaaacaca

SEQ ID NO: 275774 - DNA, 25 bp, Probe Sequence
tgggctcgtaacagaatttaccttc

SEQ ID NO: 275775 - DNA, 25 bp, Probe Sequence
tggctctagctacttggactattca

SEQ ID NO: 275776 - DNA, 25 bp, Probe Sequence
tggctttgctaccagttccatatga

SEQ ID NO: 275777 - DNA, 25 bp, Probe Sequence
tggcctgtgaagggagcccatatgt

SEQ ID NO: 275778 - DNA, 25 bp, Probe Sequence
tggctctctcaagccatgaccacat

SEQ ID NO: 275779 - DNA, 25 bp, Probe Sequence
tggccactgcagccagtggaccgca

SEQ ID NO: 275780 - DNA, 25 bp, Probe Sequence
tggcatcctgagacagttgcacagt

SEQ ID NO: 275781 - DNA, 25 bp, Probe Sequence
tggcattcttacctcgctagatggt

SEQ ID NO: 275782 - DNA, 25 bp, Probe Sequence
tggctctgttaacttcttcaggaac

SEQ ID NO: 275783 - DNA, 25 bp, Probe Sequence
tggcctgtgaacgtcttctagataa

SEQ ID NO: 275784 - DNA, 25 bp, Probe Sequence
tggcctggaactggtgttaagccag

SEQ ID NO: 275785 - DNA, 25 bp, Probe Sequence
tggcctggtacttgctgttagggca

SEQ ID NO: 275786 - DNA, 25 bp, Probe Sequence
tggcctggtacttgctgttagggca

SEQ ID NO: 275787 - DNA, 25 bp, Probe Sequence
tggccttttttctttgagtgctgca

SEQ ID NO: 275788 - DNA, 25 bp, Probe Sequence
tggccgtttttactatctgatccac

SEQ ID NO: 275789 - DNA, 25 bp, Probe Sequence
tggcatttttgtgacttcccagcac

SEQ ID NO: 275790 - DNA, 25 bp, Probe Sequence
tggcatattcctgggagttcacgga

SEQ ID NO: 275791 - DNA, 25 bp, Probe Sequence
tggtaaatcgggtttccagagtttg

SEQ ID NO: 275792 - DNA, 25 bp, Probe Sequence
tgataaaacgggttgggccagagtc

SEQ ID NO: 275793 - DNA, 25 bp, Probe Sequence
tggaagaaagggttggtcccctcag

SEQ ID NO: 275794 - DNA, 25 bp, Probe Sequence
tggaaggaagggtattgactctgag

SEQ ID NO: 275795 - DNA, 25 bp, Probe Sequence
tggccggctggggatatatagaaga

SEQ ID NO: 275796 - DNA, 25 bp, Probe Sequence
tggccggtgggcctcttgaaggccc

SEQ ID NO: 275797 - DNA, 25 bp, Probe Sequence
tggccttggcggctatttttgccac

SEQ ID NO: 275798 - DNA, 25 bp, Probe Sequence
tggcaggtgccgggttacttatccc

SEQ ID NO: 275799 - DNA, 25 bp, Probe Sequence
tggcccgcgctggagtttcaatacc

SEQ ID NO: 275800 - DNA, 25 bp, Probe Sequence
tggcctggcctgaatattatactac

SEQ ID NO: 275801 - DNA, 25 bp, Probe Sequence
tggcctgaggtattgtgaagattag

SEQ ID NO: 275802 - DNA, 25 bp, Probe Sequence
tggccattggtactgggcaggattg

SEQ ID NO: 275803 - DNA, 25 bp, Probe Sequence
tggccactgggacttctcatggatt

SEQ ID NO: 275804 - DNA, 25 bp, Probe Sequence
tggccggggagttcatcagggcctc

SEQ ID NO: 275805 - DNA, 25 bp, Probe Sequence
tggccttgggagatcctggccagcc

SEQ ID NO: 275806 - DNA, 25 bp, Probe Sequence
tggccttggtggagctggtgccagc

SEQ ID NO: 275807 - DNA, 25 bp, Probe Sequence
ggccacatggtgaactctgtgtcta

SEQ ID NO: 275808 - DNA, 25 bp, Probe Sequence
ggccacaggtctaggctggctttgc

SEQ ID NO: 275809 - DNA, 25 bp, Probe Sequence
ggccaaggtcaagcctgtgttgcca

SEQ ID NO: 275810 - DNA, 25 bp, Probe Sequence
tggccgatgatgtaaccctgcatga

SEQ ID NO: 275811 - DNA, 25 bp, Probe Sequence
tggcccagtttatggtgcagaatgg

SEQ ID NO: 275812 - DNA, 25 bp, Probe Sequence
tggccaagtacttccagtcgaatgc

SEQ ID NO: 275813 - DNA, 25 bp, Probe Sequence
tggcccctaatgtcctggcaattgc

SEQ ID NO: 275814 - DNA, 25 bp, Probe Sequence
tggcacctcattaagatgctgggca

SEQ ID NO: 275815 - DNA, 25 bp, Probe Sequence
ggccactgcagcggagatgggagca

SEQ ID NO: 275816 - DNA, 25 bp, Probe Sequence
tggctctcagacgaagaggcgagaa

SEQ ID NO: 275817 - DNA, 25 bp, Probe Sequence
tggcctcagagtcaaccatgacgca

SEQ ID NO: 275818 - DNA, 25 bp, Probe Sequence
tggccactggtggaaccatgaacgc

SEQ ID NO: 275819 - DNA, 25 bp, Probe Sequence
tggaactggtcctcgtaatgcagcc

SEQ ID NO: 275820 - DNA, 25 bp, Probe Sequence
tggctggggtccccgaagatctcag

SEQ ID NO: 275821 - DNA, 25 bp, Probe Sequence
tggctgggagcttgccaggaaccca

SEQ ID NO: 275822 - DNA, 25 bp, Probe Sequence
tggctggggctttagccaagccacc

SEQ ID NO: 275823 - DNA, 25 bp, Probe Sequence
tggcagtgtgccagaagcccagtca

SEQ ID NO: 275824 - DNA, 25 bp, Probe Sequence
tggcagtgtgccagaagcccagtca

SEQ ID NO: 275825 - DNA, 25 bp, Probe Sequence
tggcagtacatcaatgggcgtggat

SEQ ID NO: 275826 - DNA, 25 bp, Probe Sequence
tggcagacatcgcaacgctgaggat

SEQ ID NO: 275827 - DNA, 25 bp, Probe Sequence
tggaggactgtatgggcaagttgca

SEQ ID NO: 275828 - DNA, 25 bp, Probe Sequence
tggcaggccatatacaaacagttcg

SEQ ID NO: 275829 - DNA, 25 bp, Probe Sequence
tggcgagcctgggatcaccagagct

SEQ ID NO: 275830 - DNA, 25 bp, Probe Sequence
tggcgcagccgagcatggaagaggg

SEQ ID NO: 275831 - DNA, 25 bp, Probe Sequence
tggcggccatgcactggatggatgg

SEQ ID NO: 275832 - DNA, 25 bp, Probe Sequence
tggccagccagtacggatggtctgg

SEQ ID NO: 275833 - DNA, 25 bp, Probe Sequence
tggccccagattggtatcttctatg

SEQ ID NO: 275834 - DNA, 25 bp, Probe Sequence
tggccatccctctaaatgttctagg

SEQ ID NO: 275835 - DNA, 25 bp, Probe Sequence
tggcttcctttcattgtcttaggcc

SEQ ID NO: 275836 - DNA, 25 bp, Probe Sequence
tggcttctttttcatgtttcatcta

SEQ ID NO: 275837 - DNA, 25 bp, Probe Sequence
tggcgtatccttctacttatttaga

SEQ ID NO: 275838 - DNA, 25 bp, Probe Sequence
ggccaattcttggtagttctcttgg

SEQ ID NO: 275839 - DNA, 25 bp, Probe Sequence
ggccaagccgggcagattacctgag

SEQ ID NO: 275840 - DNA, 25 bp, Probe Sequence
ggccaaccgcgagaagatgacccag

SEQ ID NO: 275841 - DNA, 25 bp, Probe Sequence
ggccaaccgcgagaagatgacccag

SEQ ID NO: 275842 - DNA, 25 bp, Probe Sequence
ggccaaccacgatagagaagtcctg

SEQ ID NO: 275843 - DNA, 25 bp, Probe Sequence
tggcaaacccagtactaaagtcgct

SEQ ID NO: 275844 - DNA, 25 bp, Probe Sequence
ggccaaagccacattacaagctgcc

SEQ ID NO: 275845 - DNA, 25 bp, Probe Sequence
tggccaacgaccatgtcagacacag

SEQ ID NO: 275846 - DNA, 25 bp, Probe Sequence
tggccaccgactatgagaactatgc

SEQ ID NO: 275847 - DNA, 25 bp, Probe Sequence
ggccaacggtctggacaacgagctc

SEQ ID NO: 275848 - DNA, 25 bp, Probe Sequence
ggccaatgggtttaagtctcatctc

SEQ ID NO: 275849 - DNA, 25 bp, Probe Sequence
tggccgcagggtaatagagttctct

SEQ ID NO: 275850 - DNA, 25 bp, Probe Sequence
tggccaagaagtatgatgcgttttt

SEQ ID NO: 275851 - DNA, 25 bp, Probe Sequence
tggccgagaagtacgagtgggacgt

SEQ ID NO: 275852 - DNA, 25 bp, Probe Sequence
tggccgaccagaaccaggtgtgggt

SEQ ID NO: 275853 - DNA, 25 bp, Probe Sequence
tggccgaaagcaacctggtgcttcg

SEQ ID NO: 275854 - DNA, 25 bp, Probe Sequence
tggcaccaaatcaacgggactttcc

SEQ ID NO: 275855 - DNA, 25 bp, Probe Sequence
tggcaccaaatcaacgggactttcc

SEQ ID NO: 275856 - DNA, 25 bp, Probe Sequence
tggcacctagatcgacgggactttc

SEQ ID NO: 275857 - DNA, 25 bp, Probe Sequence
tggcccatggtgccaggttagttcc

SEQ ID NO: 275858 - DNA, 25 bp, Probe Sequence
ggccaaggtgctagtgtatgagttg

SEQ ID NO: 275859 - DNA, 25 bp, Probe Sequence
tggccaaggtgctagtgtatgagtt

SEQ ID NO: 275860 - DNA, 25 bp, Probe Sequence
tggccatgaagtgaggagatggtta

SEQ ID NO: 275861 - DNA, 25 bp, Probe Sequence
tggctcatgtagataaggtaggcat

SEQ ID NO: 275862 - DNA, 25 bp, Probe Sequence
tggaatttgtggctgatgaaggcat

SEQ ID NO: 275863 - DNA, 25 bp, Probe Sequence
tggcctttgtggaagagaaagcccc

SEQ ID NO: 275864 - DNA, 25 bp, Probe Sequence
tggcctcttatcgatgaattaagca

SEQ ID NO: 275865 - DNA, 25 bp, Probe Sequence
tggccctgattccatcagctgaaag

SEQ ID NO: 275866 - DNA, 25 bp, Probe Sequence
tggcctctttgccatcttgtgaagg

SEQ ID NO: 275867 - DNA, 25 bp, Probe Sequence
tggctctctttcaacaattgacatg

SEQ ID NO: 275868 - DNA, 25 bp, Probe Sequence
tggcgtttgtcatcagaatcagagg

SEQ ID NO: 275869 - DNA, 25 bp, Probe Sequence
tggccacctgtctgcaagagaggcg

SEQ ID NO: 275870 - DNA, 25 bp, Probe Sequence
tggccaggctgtctgcatgaggagg

SEQ ID NO: 275871 - DNA, 25 bp, Probe Sequence
tggcgcagctttctgtgtgatgcag

SEQ ID NO: 275872 - DNA, 25 bp, Probe Sequence
tggcgcagctttctgtgtgatgcag

SEQ ID NO: 275873 - DNA, 25 bp, Probe Sequence
tggcgcagctttctgtgtgatgcag

SEQ ID NO: 275874 - DNA, 25 bp, Probe Sequence
tggccgctagtgactcagtggcaga

SEQ ID NO: 275875 - DNA, 25 bp, Probe Sequence
tggcccataggtacattggaaaatg

SEQ ID NO: 275876 - DNA, 25 bp, Probe Sequence
tggcgccgttggcatcgtagagtga

SEQ ID NO: 275877 - DNA, 25 bp, Probe Sequence
tggacacttctgtggcgtggcagaa

SEQ ID NO: 275878 - DNA, 25 bp, Probe Sequence
tggacactttctccagatggaaaac

SEQ ID NO: 275879 - DNA, 25 bp, Probe Sequence
tggaactgtattagataaaatcact

SEQ ID NO: 275880 - DNA, 25 bp, Probe Sequence
tggaggctggcaagggaaagtttca

SEQ ID NO: 275881 - DNA, 25 bp, Probe Sequence
tggagcgtatggaggactttactga

SEQ ID NO: 275882 - DNA, 25 bp, Probe Sequence
tggagcgtaactgccacttaagcgg

SEQ ID NO: 275883 - DNA, 25 bp, Probe Sequence
tggaagtcggtggcctcttaaagga

SEQ ID NO: 275884 - DNA, 25 bp, Probe Sequence
tggcaagtttgtgacatctaagaag

SEQ ID NO: 275885 - DNA, 25 bp, Probe Sequence
tggaagttcaggggcccaggaagag

SEQ ID NO: 275886 - DNA, 25 bp, Probe Sequence
tggagagttctgaggccggagtaac

SEQ ID NO: 275887 - DNA, 25 bp, Probe Sequence
tggcgattctctgagggcaggggga

SEQ ID NO: 275888 - DNA, 25 bp, Probe Sequence
tggcagttcactgtggacagtttga

SEQ ID NO: 275889 - DNA, 25 bp, Probe Sequence
tggcctgtgcctttggaagctgagg

SEQ ID NO: 275890 - DNA, 25 bp, Probe Sequence
tggcctactgcctgcagaagtgcaa

SEQ ID NO: 275891 - DNA, 25 bp, Probe Sequence
tggctctacagcgttgcagaacatg

SEQ ID NO: 275892 - DNA, 25 bp, Probe Sequence
tggcttgaccacacagcacagatga

SEQ ID NO: 275893 - DNA, 25 bp, Probe Sequence
tggctggaccacgtggacaggatcc

SEQ ID NO: 275894 - DNA, 25 bp, Probe Sequence
tggctggaaacctggcagtgatacc

SEQ ID NO: 275895 - DNA, 25 bp, Probe Sequence
tggctggaacagcactggcaggcag

SEQ ID NO: 275896 - DNA, 25 bp, Probe Sequence
tggccagtacatcacatgggcgtgg

SEQ ID NO: 275897 - DNA, 25 bp, Probe Sequence
tggccatgcaaagcaagggcacagg

SEQ ID NO: 275898 - DNA, 25 bp, Probe Sequence
tggccagagagcggaagtgcccgga

SEQ ID NO: 275899 - DNA, 25 bp, Probe Sequence
tggccatgactggcgaagtctccct

SEQ ID NO: 275900 - DNA, 25 bp, Probe Sequence
tggccatgactggcgaagtctccct

SEQ ID NO: 275901 - DNA, 25 bp, Probe Sequence
tggccaggtggaatatgacccatct

SEQ ID NO: 275902 - DNA, 25 bp, Probe Sequence
tggccgaggactttgattgcacatt

SEQ ID NO: 275903 - DNA, 25 bp, Probe Sequence
tggcccaggagttatgtgtccataa

SEQ ID NO: 275904 - DNA, 25 bp, Probe Sequence
tggccctggggttcttcagagaaca

SEQ ID NO: 275905 - DNA, 25 bp, Probe Sequence
tggcctcataggggatttcataaaa

SEQ ID NO: 275906 - DNA, 25 bp, Probe Sequence
tggcattataggtgtttccacatga

SEQ ID NO: 275907 - DNA, 25 bp, Probe Sequence
tggtacaagccatgtttcccaaact

SEQ ID NO: 275908 - DNA, 25 bp, Probe Sequence
tggctggcaagctttttttaaaatt

SEQ ID NO: 275909 - DNA, 25 bp, Probe Sequence
tggctgtgaagtgtttgcctacccc

SEQ ID NO: 275910 - DNA, 25 bp, Probe Sequence
tggcttcaagtggtactgaccgccg

SEQ ID NO: 275911 - DNA, 25 bp, Probe Sequence
tggcattgggtggtggctacctgca

SEQ ID NO: 275912 - DNA, 25 bp, Probe Sequence
tggctgggagtggtggctcatgcct

SEQ ID NO: 275913 - DNA, 25 bp, Probe Sequence
tggctggagcagcgagtctgtcgat

SEQ ID NO: 275914 - DNA, 25 bp, Probe Sequence
tggcgatgtcagcggatgtcacgag

SEQ ID NO: 275915 - DNA, 25 bp, Probe Sequence
tggccattcgcaacgagttctgcca

SEQ ID NO: 275916 - DNA, 25 bp, Probe Sequence
tggccaggccatgctgggaagccac

SEQ ID NO: 275917 - DNA, 25 bp, Probe Sequence
tggccatggactgctctggaattcc

SEQ ID NO: 275918 - DNA, 25 bp, Probe Sequence
tggctgcgacctttctggaataaca

SEQ ID NO: 275919 - DNA, 25 bp, Probe Sequence
tggctgcgtccctttacagaatgac

SEQ ID NO: 275920 - DNA, 25 bp, Probe Sequence
tggccagctctgcatttgacaaatg

SEQ ID NO: 275921 - DNA, 25 bp, Probe Sequence
tggccatgttgaatttcgcataaaa

SEQ ID NO: 275922 - DNA, 25 bp, Probe Sequence
tggccagatgaaatgctgccgcaat

SEQ ID NO: 275923 - DNA, 25 bp, Probe Sequence
tggctctgtgcaatatcccatcaca

SEQ ID NO: 275924 - DNA, 25 bp, Probe Sequence
tggctcttgattttgtctgccacag

SEQ ID NO: 275925 - DNA, 25 bp, Probe Sequence
tggcgcttgcatcttgtcagtagca

SEQ ID NO: 275926 - DNA, 25 bp, Probe Sequence
tggcctcttcacagtcatctgagaa

SEQ ID NO: 275927 - DNA, 25 bp, Probe Sequence
tggcctgtgcccaggctggagctga

SEQ ID NO: 275928 - DNA, 25 bp, Probe Sequence
tggccatgatccggtgagctgggaa

SEQ ID NO: 275929 - DNA, 25 bp, Probe Sequence
tggccaatctgtactcatgtgggga

SEQ ID NO: 275930 - DNA, 25 bp, Probe Sequence
tggccacatctcactcattttgtga

SEQ ID NO: 275931 - DNA, 25 bp, Probe Sequence
tggcccatcaatagccatctctgtt

SEQ ID NO: 275932 - DNA, 25 bp, Probe Sequence
tggccatcctcattggcttgtgtct

SEQ ID NO: 275933 - DNA, 25 bp, Probe Sequence
tggccatcctcattggcttgtgtct

SEQ ID NO: 275934 - DNA, 25 bp, Probe Sequence
tggccgtctacaatctttgtctgga

SEQ ID NO: 275935 - DNA, 25 bp, Probe Sequence
tggctggtctgtatcattattttga

SEQ ID NO: 275936 - DNA, 25 bp, Probe Sequence
tggctgctgtctactacggcagttt

SEQ ID NO: 275937 - DNA, 25 bp, Probe Sequence
tggcctgtcattcagaggctgctct

SEQ ID NO: 275938 - DNA, 25 bp, Probe Sequence
tggccatgtcttcatcagtggctgg

SEQ ID NO: 275939 - DNA, 25 bp, Probe Sequence
tggctgatttataagcagtacttgg

SEQ ID NO: 275940 - DNA, 25 bp, Probe Sequence
tggctgaagtccgacgtctttgatg

SEQ ID NO: 275941 - DNA, 25 bp, Probe Sequence
tggctgccttctgcatttatttgcc

SEQ ID NO: 275942 - DNA, 25 bp, Probe Sequence
tgtgtcctgtttcttgactttcaat

SEQ ID NO: 275943 - DNA, 25 bp, Probe Sequence
tggcctctgctgttatttactttac

SEQ ID NO: 275944 - DNA, 25 bp, Probe Sequence
tggcctctctgagatttcctagagt

SEQ ID NO: 275945 - DNA, 25 bp, Probe Sequence
tggcctgctgaaggacttcctgaag

SEQ ID NO: 275946 - DNA, 25 bp, Probe Sequence
tggcctctacaccatttatctgaat

SEQ ID NO: 275947 - DNA, 25 bp, Probe Sequence
tggcatcccatctggtttcagagtc

SEQ ID NO: 275948 - DNA, 25 bp, Probe Sequence
tggcagcccatgttgatgtttcggc

SEQ ID NO: 275949 - DNA, 25 bp, Probe Sequence
tggccgccagaaggtatgtagtgct

SEQ ID NO: 275950 - DNA, 25 bp, Probe Sequence
tggcctccagagggctagatgtgga

SEQ ID NO: 275951 - DNA, 25 bp, Probe Sequence
tggcctgcgcagagattggctgtgg

SEQ ID NO: 275952 - DNA, 25 bp, Probe Sequence
tggccagcggggaagtgatgatcag

SEQ ID NO: 275953 - DNA, 25 bp, Probe Sequence
tggcccagggcatactggatgcagg

SEQ ID NO: 275954 - DNA, 25 bp, Probe Sequence
tggccagagggctgtctggacctgg

SEQ ID NO: 275955 - DNA, 25 bp, Probe Sequence
tggccagaggtgtgtgcgcgagacc

SEQ ID NO: 275956 - DNA, 25 bp, Probe Sequence
tggccacgtctgaggcggctgtggc

SEQ ID NO: 275957 - DNA, 25 bp, Probe Sequence
tggccctgagcgagtggagtctgcc

SEQ ID NO: 275958 - DNA, 25 bp, Probe Sequence
tggcaatctagaccggtagcagcgc

SEQ ID NO: 275959 - DNA, 25 bp, Probe Sequence
tggaaccaggcagagatcaaccccg

SEQ ID NO: 275960 - DNA, 25 bp, Probe Sequence
tggctcccaggaaagtgctgtgccc

SEQ ID NO: 275961 - DNA, 25 bp, Probe Sequence
tggctggcgagtggggtgagtgctc

SEQ ID NO: 275962 - DNA, 25 bp, Probe Sequence
tggcggcgaacgcggagagcacgcc

SEQ ID NO: 275963 - DNA, 25 bp, Probe Sequence
tggcggcagtcccaggggagagaca

SEQ ID NO: 275964 - DNA, 25 bp, Probe Sequence
tggctgcgcttctaggcgggaagcc

SEQ ID NO: 275965 - DNA, 25 bp, Probe Sequence
tggctgctattgcaggaggccacac

SEQ ID NO: 275966 - DNA, 25 bp, Probe Sequence
tggctgcgtagccatcagcaggacc

SEQ ID NO: 275967 - DNA, 25 bp, Probe Sequence
tggctgcaggagacatcggcgagct

SEQ ID NO: 275968 - DNA, 25 bp, Probe Sequence
tggctgcagagtgtcacggagatgg

SEQ ID NO: 275969 - DNA, 25 bp, Probe Sequence
tggctaactcctgccaggcagtgcc

SEQ ID NO: 275970 - DNA, 25 bp, Probe Sequence
tggcagaaactcgttagccagtcca

SEQ ID NO: 275971 - DNA, 25 bp, Probe Sequence
tggagagaacccttacaaattcgaa

SEQ ID NO: 275972 - DNA, 25 bp, Probe Sequence
tggaaaccgacgtagcaaattatgg

SEQ ID NO: 275973 - DNA, 25 bp, Probe Sequence
tggagcaagccctgacccaataaag

SEQ ID NO: 275974 - DNA, 25 bp, Probe Sequence
tggagcaagccctgacccaataaag

SEQ ID NO: 275975 - DNA, 25 bp, Probe Sequence
tggcccccacaatggcacaataaag

SEQ ID NO: 275976 - DNA, 25 bp, Probe Sequence
tggccacagccatagttcaaattta

SEQ ID NO: 275977 - DNA, 25 bp, Probe Sequence
tggcccagccagagctataattgtt

SEQ ID NO: 275978 - DNA, 25 bp, Probe Sequence
tggcaccgtcaaggctgagaacggg

SEQ ID NO: 275979 - DNA, 25 bp, Probe Sequence
tggcaccgtcaaggctgagaacggg

SEQ ID NO: 275980 - DNA, 25 bp, Probe Sequence
tggcctcgggagggcagaagctgtc

SEQ ID NO: 275981 - DNA, 25 bp, Probe Sequence
tggccattggcaggagggacctggc

SEQ ID NO: 275982 - DNA, 25 bp, Probe Sequence
tggcctcaggaatggtggcctggca

SEQ ID NO: 275983 - DNA, 25 bp, Probe Sequence
tggcccaggtattgagggcctcccc

SEQ ID NO: 275984 - DNA, 25 bp, Probe Sequence
tggccactggtcttgaaggcccacc

SEQ ID NO: 275985 - DNA, 25 bp, Probe Sequence
tggcgacaggcccatatgcaggccc

SEQ ID NO: 275986 - DNA, 25 bp, Probe Sequence
tggcgatcagactctgagcactgcc

SEQ ID NO: 275987 - DNA, 25 bp, Probe Sequence
tggccatgcagaaagcatccctcac

SEQ ID NO: 275988 - DNA, 25 bp, Probe Sequence
tggcacagaatatgcactgtccatc

SEQ ID NO: 275989 - DNA, 25 bp, Probe Sequence
tggcctgacaaattatgctgcagca

SEQ ID NO: 275990 - DNA, 25 bp, Probe Sequence
tggctaaaacaattctgagaggaaa

SEQ ID NO: 275991 - DNA, 25 bp, Probe Sequence
tggctgaaccaagttcgtgtcgaaa

SEQ ID NO: 275992 - DNA, 25 bp, Probe Sequence
tggcatggatcttacccgtgacaaa

SEQ ID NO: 275993 - DNA, 25 bp, Probe Sequence
tggctgaagctttgcccaaacaatc

SEQ ID NO: 275994 - DNA, 25 bp, Probe Sequence
tggctacaatttccctgatcctagc

SEQ ID NO: 275995 - DNA, 25 bp, Probe Sequence
tgttaatttacctgtttgactttat

SEQ ID NO: 275996 - DNA, 25 bp, Probe Sequence
tgtaaagttacctgctgttagcttt

SEQ ID NO: 275997 - DNA, 25 bp, Probe Sequence
tgtctacgttggctgactttagttt

SEQ ID NO: 275998 - DNA, 25 bp, Probe Sequence
tggctacgtatgtcttccttcatac

SEQ ID NO: 275999 - DNA, 25 bp, Probe Sequence
tggcacctgtgattgtactcttatc

SEQ ID NO: 276000 - DNA, 25 bp, Probe Sequence
tggcacccagattaactgttaaaaa

SEQ ID NO: 276001 - DNA, 25 bp, Probe Sequence
tggaccttgtcagaatgtttaaaaa

SEQ ID NO: 276002 - DNA, 25 bp, Probe Sequence
tgcggccttaactctgtattaaaaa

SEQ ID NO: 276003 - DNA, 25 bp, Probe Sequence
tgtgcccttaactacgaactgaatt

SEQ ID NO: 276004 - DNA, 25 bp, Probe Sequence
tttgcacctaaatcgacgggacttt

SEQ ID NO: 276005 - DNA, 25 bp, Probe Sequence
tgggcaccaaaatcaacgggacttt

SEQ ID NO: 276006 - DNA, 25 bp, Probe Sequence
tggcaccaaaatcaaacgggacttt

SEQ ID NO: 276007 - DNA, 25 bp, Probe Sequence
tggccgaataaaaaataacacctct

SEQ ID NO: 276008 - DNA, 25 bp, Probe Sequence
tggccagaaattaggaatcttcccc

SEQ ID NO: 276009 - DNA, 25 bp, Probe Sequence
tggctcaaacttgtaatcctcactc

SEQ ID NO: 276010 - DNA, 25 bp, Probe Sequence
tggtccaccattggataaaccacta

SEQ ID NO: 276011 - DNA, 25 bp, Probe Sequence
tggctaacacagtgaaaccccttct

SEQ ID NO: 276012 - DNA, 25 bp, Probe Sequence
tggctaactggcagaaccacgcatc

SEQ ID NO: 276013 - DNA, 25 bp, Probe Sequence
tggctcacgcctgtaatcccagcac

SEQ ID NO: 276014 - DNA, 25 bp, Probe Sequence
tggcacacacctgtagtcccaggta

SEQ ID NO: 276015 - DNA, 25 bp, Probe Sequence
tggcaaaggctgttaatagtagtta

SEQ ID NO: 276016 - DNA, 25 bp, Probe Sequence
tggaagtttgttgtagtatgcctca

SEQ ID NO: 276017 - DNA, 25 bp, Probe Sequence
tggaaggtgcttttaaatcaccaca

SEQ ID NO: 276018 - DNA, 25 bp, Probe Sequence
tggaaaaggttaataattcatgcca

SEQ ID NO: 276019 - DNA, 25 bp, Probe Sequence
tggaaccagttcatttagccagcca

SEQ ID NO: 276020 - DNA, 25 bp, Probe Sequence
tggagcctaattgttaggtagccct

SEQ ID NO: 276021 - DNA, 25 bp, Probe Sequence
tggacctttttccttggtagaactg

SEQ ID NO: 276022 - DNA, 25 bp, Probe Sequence
tggacctggttgtctttggtcgggc

SEQ ID NO: 276023 - DNA, 25 bp, Probe Sequence
tggaatctacatgtcttgggggcgg

SEQ ID NO: 276024 - DNA, 25 bp, Probe Sequence
tggacttggccagtaggcctgggga

SEQ ID NO: 276025 - DNA, 25 bp, Probe Sequence
tgtactggccctgatcacgttgggc

SEQ ID NO: 276026 - DNA, 25 bp, Probe Sequence
tggaagtacctgtaccactgtggcc

SEQ ID NO: 276027 - DNA, 25 bp, Probe Sequence
tggaagtacctgtaccactgtggcc

SEQ ID NO: 276028 - DNA, 25 bp, Probe Sequence
tggcaaggagcggcccgaagtggtc

SEQ ID NO: 276029 - DNA, 25 bp, Probe Sequence
tggaagaatccccacgaacgcgata

SEQ ID NO: 276030 - DNA, 25 bp, Probe Sequence
tggaataacttacctgtcaccttgt

SEQ ID NO: 276031 - DNA, 25 bp, Probe Sequence
tggcaaaatcctatctctactcaag

SEQ ID NO: 276032 - DNA, 25 bp, Probe Sequence
tggctcaagatcctggtggcgacca

SEQ ID NO: 276033 - DNA, 25 bp, Probe Sequence
tggctcaagatcctggtggcgacca

SEQ ID NO: 276034 - DNA, 25 bp, Probe Sequence
tggctcaggatgtgtgttgagacag

SEQ ID NO: 276035 - DNA, 25 bp, Probe Sequence
tggccatgtggctagtgtgtggatc

SEQ ID NO: 276036 - DNA, 25 bp, Probe Sequence
tggctatgtgcctggtcatgagatt

SEQ ID NO: 276037 - DNA, 25 bp, Probe Sequence
tggctgatgtgggaactcatggttc

SEQ ID NO: 276038 - DNA, 25 bp, Probe Sequence
tggcgtggtggcagacatggctacc

SEQ ID NO: 276039 - DNA, 25 bp, Probe Sequence
tggcatgggggcagccgctgcccct

SEQ ID NO: 276040 - DNA, 25 bp, Probe Sequence
tggcagtgtatggggccagctacca

SEQ ID NO: 276041 - DNA, 25 bp, Probe Sequence
tggaggcttggatggaaacacggta

SEQ ID NO: 276042 - DNA, 25 bp, Probe Sequence
tggactgttcaagcaaaaaaggtaa

SEQ ID NO: 276043 - DNA, 25 bp, Probe Sequence
tggcattgttcaatccagatgtttg

SEQ ID NO: 276044 - DNA, 25 bp, Probe Sequence
tggaagattagcccagtgcggtggc

SEQ ID NO: 276045 - DNA, 25 bp, Probe Sequence
tggaatatccctcagcctggtgagg

SEQ ID NO: 276046 - DNA, 25 bp, Probe Sequence
tggaaatccaaattgcctgaacatg

SEQ ID NO: 276047 - DNA, 25 bp, Probe Sequence
tggaaaacacaaaactaaagatggc

SEQ ID NO: 276048 - DNA, 25 bp, Probe Sequence
tggaaaatcactaaagcctgacagt

SEQ ID NO: 276049 - DNA, 25 bp, Probe Sequence
tggaaccaaataataactgacgctt

SEQ ID NO: 276050 - DNA, 25 bp, Probe Sequence
tggacaaaaataattatgccccatg

SEQ ID NO: 276051 - DNA, 25 bp, Probe Sequence
tggaaaatgacatttccatttgcct

SEQ ID NO: 276052 - DNA, 25 bp, Probe Sequence
tggaggaaccaaaccttcagcctct

SEQ ID NO: 276053 - DNA, 25 bp, Probe Sequence
tgggaaggtagagccccagactctg

SEQ ID NO: 276054 - DNA, 25 bp, Probe Sequence
tggagaaaatgacgacccacgacca

SEQ ID NO: 276055 - DNA, 25 bp, Probe Sequence
tggaaagacgctcgtcaccaggacc

SEQ ID NO: 276056 - DNA, 25 bp, Probe Sequence
tggcaagtggccttatgccgggacc

SEQ ID NO: 276057 - DNA, 25 bp, Probe Sequence
tggcaagcgggatggcaaggcccca

SEQ ID NO: 276058 - DNA, 25 bp, Probe Sequence
tgggacgaaaaggcagtcacccgca

SEQ ID NO: 276059 - DNA, 25 bp, Probe Sequence
tggcacagccaagagcggtaccggc

SEQ ID NO: 276060 - DNA, 25 bp, Probe Sequence
tggacactagaacacgcttcctgtc

SEQ ID NO: 276061 - DNA, 25 bp, Probe Sequence
tggcacatttaggaacagttacatt

SEQ ID NO: 276062 - DNA, 25 bp, Probe Sequence
tggctatcttggacatacagtaatt

SEQ ID NO: 276063 - DNA, 25 bp, Probe Sequence
tggactgcaactacatacatggaat

SEQ ID NO: 276064 - DNA, 25 bp, Probe Sequence
tggtctgcagaccatccagaggaat

SEQ ID NO: 276065 - DNA, 25 bp, Probe Sequence
tggcagtagatgctccaaggagaca

SEQ ID NO: 276066 - DNA, 25 bp, Probe Sequence
tggcctcagggtcctaatggcagca

SEQ ID NO: 276067 - DNA, 25 bp, Probe Sequence
tggcctcagagtctctgatcaagca

SEQ ID NO: 276068 - DNA, 25 bp, Probe Sequence
tggctacagactcctggaacagcag

SEQ ID NO: 276069 - DNA, 25 bp, Probe Sequence
tggctttgagattctgtaactgcag

SEQ ID NO: 276070 - DNA, 25 bp, Probe Sequence
tggctgctgtgatcttctaaggggc

SEQ ID NO: 276071 - DNA, 25 bp, Probe Sequence
tggctgggacacaatcaaaggagga

SEQ ID NO: 276072 - DNA, 25 bp, Probe Sequence
tggctggtgaagaacagctggggta

SEQ ID NO: 276073 - DNA, 25 bp, Probe Sequence
tggctggtgaagaacagctggggta

SEQ ID NO: 276074 - DNA, 25 bp, Probe Sequence
tggctttggctggccactgagggta

SEQ ID NO: 276075 - DNA, 25 bp, Probe Sequence
tggcctttggcacctgggagagtaa

SEQ ID NO: 276076 - DNA, 25 bp, Probe Sequence
tggactttgccgtcggcgagtacaa

SEQ ID NO: 276077 - DNA, 25 bp, Probe Sequence
tggactggctccgcacggagaacga

SEQ ID NO: 276078 - DNA, 25 bp, Probe Sequence
tggcaatttccctggtggcaacaga

SEQ ID NO: 276079 - DNA, 25 bp, Probe Sequence
tggaatttggcctgggcgtatgcag

SEQ ID NO: 276080 - DNA, 25 bp, Probe Sequence
tggaattctgcagctaacccttcca

SEQ ID NO: 276081 - DNA, 25 bp, Probe Sequence
tggactttcgttgaccatgctgtcc

SEQ ID NO: 276082 - DNA, 25 bp, Probe Sequence
tggaccttttataaccttgttctct

SEQ ID NO: 276083 - DNA, 25 bp, Probe Sequence
tggacaagttacttaccctgtttct

SEQ ID NO: 276084 - DNA, 25 bp, Probe Sequence
tggaaaccataattcaacttttctt

SEQ ID NO: 276085 - DNA, 25 bp, Probe Sequence
tggaatccttctgtaactttggtaa

SEQ ID NO: 276086 - DNA, 25 bp, Probe Sequence
tggtatcctggcacaataattttat

SEQ ID NO: 276087 - DNA, 25 bp, Probe Sequence
tggaaccatacatctttatatttat

SEQ ID NO: 276088 - DNA, 25 bp, Probe Sequence
tggacagaccacgcacgtgatttgt

SEQ ID NO: 276089 - DNA, 25 bp, Probe Sequence
tggggtctacacggaggttgtgttt

SEQ ID NO: 276090 - DNA, 25 bp, Probe Sequence
tggcgccctgaagggagttgtggat

SEQ ID NO: 276091 - DNA, 25 bp, Probe Sequence
tggcgcctcggaggcgttcagctgc

SEQ ID NO: 276092 - DNA, 25 bp, Probe Sequence
tggcctgcgggaggctgtgtacact

SEQ ID NO: 276093 - DNA, 25 bp, Probe Sequence
tggcttgtgaggacgcgtccacagg

SEQ ID NO: 276094 - DNA, 25 bp, Probe Sequence
tggcctgctgaggtcaggctccact

SEQ ID NO: 276095 - DNA, 25 bp, Probe Sequence
tggctgctggagtacatgtgttcac

SEQ ID NO: 276096 - DNA, 25 bp, Probe Sequence
tggctgctggagtacatgtgttcac

SEQ ID NO: 276097 - DNA, 25 bp, Probe Sequence
tggctgcaaacccagtgctgtgagg

SEQ ID NO: 276098 - DNA, 25 bp, Probe Sequence
tggctgagccctcaggctctgagag

SEQ ID NO: 276099 - DNA, 25 bp, Probe Sequence
tggctatgccctgagatcagcgcta

SEQ ID NO: 276100 - DNA, 25 bp, Probe Sequence
tggctgctctccaaactatgccaag

SEQ ID NO: 276101 - DNA, 25 bp, Probe Sequence
tggttgctcacgaatgtcccaacta

SEQ ID NO: 276102 - DNA, 25 bp, Probe Sequence
tggcattgatttatgttccagacaa

SEQ ID NO: 276103 - DNA, 25 bp, Probe Sequence
tggctgggttcagtgattcacgcct

SEQ ID NO: 276104 - DNA, 25 bp, Probe Sequence
tggctgcattgttgcactgtagcag

SEQ ID NO: 276105 - DNA, 25 bp, Probe Sequence
tggcattatgcgccacgtacatgac

SEQ ID NO: 276106 - DNA, 25 bp, Probe Sequence
tggctgtgctcaccattgatgagaa

SEQ ID NO: 276107 - DNA, 25 bp, Probe Sequence
tggctggcatgcatgttggcatgaa

SEQ ID NO: 276108 - DNA, 25 bp, Probe Sequence
tggcttgcagaaaatccagaaaatg

SEQ ID NO: 276109 - DNA, 25 bp, Probe Sequence
tggctgtagtaacccagtggaatga

SEQ ID NO: 276110 - DNA, 25 bp, Probe Sequence
tggcgtcttcaccaccatggagaag

SEQ ID NO: 276111 - DNA, 25 bp, Probe Sequence
tggcctcgctaggcccaggagagga

SEQ ID NO: 276112 - DNA, 25 bp, Probe Sequence
tggcatgctacttgcctacagtggg

SEQ ID NO: 276113 - DNA, 25 bp, Probe Sequence
tggcatggcagcgagcacagacatg

SEQ ID NO: 276114 - DNA, 25 bp, Probe Sequence
tggcatgcagcacacacggctgctc

SEQ ID NO: 276115 - DNA, 25 bp, Probe Sequence
tggctcaccgagaagatgcatgctc

SEQ ID NO: 276116 - DNA, 25 bp, Probe Sequence
tggtaccggtagccggctggtaccg

SEQ ID NO: 276117 - DNA, 25 bp, Probe Sequence
tttaaagggaactgtactactcgca

SEQ ID NO: 276118 - DNA, 25 bp, Probe Sequence
tttaactcgagaccttttcaacttg

SEQ ID NO: 276119 - DNA, 25 bp, Probe Sequence
tgcttaacgtggtgcttttaatgct

SEQ ID NO: 276120 - DNA, 25 bp, Probe Sequence
tggtcaccagggctgcttttaactc

SEQ ID NO: 276121 - DNA, 25 bp, Probe Sequence
tggtcaccagggctgcttttaactc

SEQ ID NO: 276122 - DNA, 25 bp, Probe Sequence
tggttccagcgctggttttgaccgc

SEQ ID NO: 276123 - DNA, 25 bp, Probe Sequence
tggcatttatggctgctttttcccc

SEQ ID NO: 276124 - DNA, 25 bp, Probe Sequence
tggctgttgaggcgctgcttcagcc

SEQ ID NO: 276125 - DNA, 25 bp, Probe Sequence
tggcagatagaggcaactcccaggc

SEQ ID NO: 276126 - DNA, 25 bp, Probe Sequence
tggcaacagagtgagactccgtctc

SEQ ID NO: 276127 - DNA, 25 bp, Probe Sequence
tggacacagacggcaactcctttga

SEQ ID NO: 276128 - DNA, 25 bp, Probe Sequence
tggacacaccagctacttcagatcc

SEQ ID NO: 276129 - DNA, 25 bp, Probe Sequence
tggacatccgcaaagacctgtacgc

SEQ ID NO: 276130 - DNA, 25 bp, Probe Sequence
tggaacagacaatgcctatgtggct

SEQ ID NO: 276131 - DNA, 25 bp, Probe Sequence
tggcccacagagagccttgctgaga

SEQ ID NO: 276132 - DNA, 25 bp, Probe Sequence
tggcccacaggaaatacttaatgaa

SEQ ID NO: 276133 - DNA, 25 bp, Probe Sequence
tgtgcaccaacatgcttggttaatt

SEQ ID NO: 276134 - DNA, 25 bp, Probe Sequence
tgtggcacatttttttttaattttg

SEQ ID NO: 276135 - DNA, 25 bp, Probe Sequence
tggtaattttttttgccagttgatt

SEQ ID NO: 276136 - DNA, 25 bp, Probe Sequence
tggctgaacttcatttatcgagtca

SEQ ID NO: 276137 - DNA, 25 bp, Probe Sequence
tggctacattacctttgtgctgttc

SEQ ID NO: 276138 - DNA, 25 bp, Probe Sequence
tggctcctctaaacatttgctgttc

SEQ ID NO: 276139 - DNA, 25 bp, Probe Sequence
tggcttcattaaactgacacttctc

SEQ ID NO: 276140 - DNA, 25 bp, Probe Sequence
tggcccagctcaaacagaaggtcat

SEQ ID NO: 276141 - DNA, 25 bp, Probe Sequence
tggcccctgcacaagacaacagaat

SEQ ID NO: 276142 - DNA, 25 bp, Probe Sequence
tggcgcctacaacatcaaagactcc

SEQ ID NO: 276143 - DNA, 25 bp, Probe Sequence
tggagtttcagtctccaactctcag

SEQ ID NO: 276144 - DNA, 25 bp, Probe Sequence
tggaatcttggccgtccaggttatg

SEQ ID NO: 276145 - DNA, 25 bp, Probe Sequence
tggaaggctgggttaaagttatggt

SEQ ID NO: 276146 - DNA, 25 bp, Probe Sequence
tgaaagggttgtaaaatgttggcgt

SEQ ID NO: 276147 - DNA, 25 bp, Probe Sequence
tgaaacgtgggtaaggatttagcat

SEQ ID NO: 276148 - DNA, 25 bp, Probe Sequence
tggagaagtgggcttcagatttaag

SEQ ID NO: 276149 - DNA, 25 bp, Probe Sequence
tggaaatgtcgactatatgagattg

SEQ ID NO: 276150 - DNA, 25 bp, Probe Sequence
tggaactggctacttggacattgaa

SEQ ID NO: 276151 - DNA, 25 bp, Probe Sequence
tggaacttgtcataaaatcgatcag

SEQ ID NO: 276152 - DNA, 25 bp, Probe Sequence
tggcactattacacaaaatcaattg

SEQ ID NO: 276153 - DNA, 25 bp, Probe Sequence
tggattactacaaccacaacctgga

SEQ ID NO: 276154 - DNA, 25 bp, Probe Sequence
tggaacctccataaaaacctgaaag

SEQ ID NO: 276155 - DNA, 25 bp, Probe Sequence
tggaactgaccaattaacagcccaa

SEQ ID NO: 276156 - DNA, 25 bp, Probe Sequence
tggtaaacactttaacttctaaatg

SEQ ID NO: 276157 - DNA, 25 bp, Probe Sequence
tggttgctagcacttaaaatttaag

SEQ ID NO: 276158 - DNA, 25 bp, Probe Sequence
tggtttagggtgaaggctttgggtg

SEQ ID NO: 276159 - DNA, 25 bp, Probe Sequence
tgtgttaaggggtcggctaagtggg

SEQ ID NO: 276160 - DNA, 25 bp, Probe Sequence
tggttaactggactgacctaaacgt

SEQ ID NO: 276161 - DNA, 25 bp, Probe Sequence
tggagtaaatggttggctctacggg

SEQ ID NO: 276162 - DNA, 25 bp, Probe Sequence
tggcagaacttgaagggttactgac

SEQ ID NO: 276163 - DNA, 25 bp, Probe Sequence
tggcttgagttcaggagttcaagac

SEQ ID NO: 276164 - DNA, 25 bp, Probe Sequence
tggctccaactcagtgtttaaggca

SEQ ID NO: 276165 - DNA, 25 bp, Probe Sequence
tgtgtacaacttttgttagtaccaa

SEQ ID NO: 276166 - DNA, 25 bp, Probe Sequence
tgtgtaacctcatttggggggccaa

SEQ ID NO: 276167 - DNA, 25 bp, Probe Sequence
tgatgacacccctcgaaggggccca

SEQ ID NO: 276168 - DNA, 25 bp, Probe Sequence
tggcacccccttaaattttgcctca

SEQ ID NO: 276169 - DNA, 25 bp, Probe Sequence
tggagccacccaaaatttcaagcac

SEQ ID NO: 276170 - DNA, 25 bp, Probe Sequence
tggacaccccatgcaatttgagaac

SEQ ID NO: 276171 - DNA, 25 bp, Probe Sequence
tggccctcatccttcagaatgtgga

SEQ ID NO: 276172 - DNA, 25 bp, Probe Sequence
tggccctattcatgctcatatgtat

SEQ ID NO: 276173 - DNA, 25 bp, Probe Sequence
tggccctaccaaaatcatatattaa

SEQ ID NO: 276174 - DNA, 25 bp, Probe Sequence
tggccctgacaagtatgatcataca

SEQ ID NO: 276175 - DNA, 25 bp, Probe Sequence
tggccctggcaagattgaaggatgt

SEQ ID NO: 276176 - DNA, 25 bp, Probe Sequence
tggagcccgagggcctgacaggttc

SEQ ID NO: 276177 - DNA, 25 bp, Probe Sequence
tggcagaacgaacaccacattttga

SEQ ID NO: 276178 - DNA, 25 bp, Probe Sequence
tggagtaggaatcaggacatccctg

SEQ ID NO: 276179 - DNA, 25 bp, Probe Sequence
tggaataggacactcaagacttttg

SEQ ID NO: 276180 - DNA, 25 bp, Probe Sequence
tggaatagtatcctccaggtttttc

SEQ ID NO: 276181 - DNA, 25 bp, Probe Sequence
tggaatatgtcctccaggctttgct

SEQ ID NO: 276182 - DNA, 25 bp, Probe Sequence
tggactatgggctccagtttacctc

SEQ ID NO: 276183 - DNA, 25 bp, Probe Sequence
tggcgctagggctcggttgtgaaat

SEQ ID NO: 276184 - DNA, 25 bp, Probe Sequence
tggcagcgggacgctggatctggag

SEQ ID NO: 276185 - DNA, 25 bp, Probe Sequence
tggctcggagatccgtgactctgtg

SEQ ID NO: 276186 - DNA, 25 bp, Probe Sequence
tggcgcttgagcaccgcatcggctg

SEQ ID NO: 276187 - DNA, 25 bp, Probe Sequence
tggcactttatagccacggctgcac

SEQ ID NO: 276188 - DNA, 25 bp, Probe Sequence
tggacattaaacaccactgcgcagc

SEQ ID NO: 276189 - DNA, 25 bp, Probe Sequence
tggacttagggcaccttgagcctga

SEQ ID NO: 276190 - DNA, 25 bp, Probe Sequence
tggacttggggattccactggtgtg

SEQ ID NO: 276191 - DNA, 25 bp, Probe Sequence
tggacttgcccgaatctacgtgtcc

SEQ ID NO: 276192 - DNA, 25 bp, Probe Sequence
tggacgttcccaaaatcctgtccag

SEQ ID NO: 276193 - DNA, 25 bp, Probe Sequence
taacttgacccaggagttcttccgg

SEQ ID NO: 276194 - DNA, 25 bp, Probe Sequence
tgaacttgaccgagggattcgccgt

SEQ ID NO: 276195 - DNA, 25 bp, Probe Sequence
tgaacttgcccacagttgaacacaa

SEQ ID NO: 276196 - DNA, 25 bp, Probe Sequence
tggagttccaagtgcttcccataat

SEQ ID NO: 276197 - DNA, 25 bp, Probe Sequence
tggagtatagaagaatatccttgga

SEQ ID NO: 276198 - DNA, 25 bp, Probe Sequence
tggaggaagaaccagtacgtcagta

SEQ ID NO: 276199 - DNA, 25 bp, Probe Sequence
tggaggactaaatgtagatgtcttt

SEQ ID NO: 276200 - DNA, 25 bp, Probe Sequence
tggacaactacactaaaagtacttg

SEQ ID NO: 276201 - DNA, 25 bp, Probe Sequence
tggatcaacgaccggatacggcctc

SEQ ID NO: 276202 - DNA, 25 bp, Probe Sequence
tgtagtatccacagtgcccgagttc

SEQ ID NO: 276203 - DNA, 25 bp, Probe Sequence
tggagttcaacaaggtgtcggtgct

SEQ ID NO: 276204 - DNA, 25 bp, Probe Sequence
tggagccctacaaggagtggagtgc

SEQ ID NO: 276205 - DNA, 25 bp, Probe Sequence
tggagcccttcagggctggaaccag

SEQ ID NO: 276206 - DNA, 25 bp, Probe Sequence
tggagctccgaatgtgcttaagtgg

SEQ ID NO: 276207 - DNA, 25 bp, Probe Sequence
tggagctcctggaaggtaaagtcct

SEQ ID NO: 276208 - DNA, 25 bp, Probe Sequence
tggaactgagagagcccaacgtcct

SEQ ID NO: 276209 - DNA, 25 bp, Probe Sequence
tggaagtgggatccaggcctggtcc

SEQ ID NO: 276210 - DNA, 25 bp, Probe Sequence
tggaagtgggatccaggcctggtcc

SEQ ID NO: 276211 - DNA, 25 bp, Probe Sequence
tggaagtgggatccaggcctggtcc

SEQ ID NO: 276212 - DNA, 25 bp, Probe Sequence
tggagcgggagatcgatgggggcct

SEQ ID NO: 276213 - DNA, 25 bp, Probe Sequence
tggatgggaagtttacggccaccaa

SEQ ID NO: 276214 - DNA, 25 bp, Probe Sequence
tggaggtacttcttcaagtccaccg

SEQ ID NO: 276215 - DNA, 25 bp, Probe Sequence
tggaagcctttctattcattcctca

SEQ ID NO: 276216 - DNA, 25 bp, Probe Sequence
tgtagggatgcctttctagtcctat

SEQ ID NO: 276217 - DNA, 25 bp, Probe Sequence
tggctggttgccttaatatgtccca

SEQ ID NO: 276218 - DNA, 25 bp, Probe Sequence
tggcagtgttacaacgtagctccca

SEQ ID NO: 276219 - DNA, 25 bp, Probe Sequence
tggctgtttacaagtgccagtccat

SEQ ID NO: 276220 - DNA, 25 bp, Probe Sequence
tggctctctggattagtgcgggtat

SEQ ID NO: 276221 - DNA, 25 bp, Probe Sequence
tggctcactggtccggaggttatgt

SEQ ID NO: 276222 - DNA, 25 bp, Probe Sequence
tggctactgagtcatgatccttgct

SEQ ID NO: 276223 - DNA, 25 bp, Probe Sequence
tggcaagcttgccagtgtacctgct

SEQ ID NO: 276224 - DNA, 25 bp, Probe Sequence
tggcaagcttgccagtgtacctgct

SEQ ID NO: 276225 - DNA, 25 bp, Probe Sequence
tggacagctttaattcacttgttca

SEQ ID NO: 276226 - DNA, 25 bp, Probe Sequence
tggactccctggttcagtatttaat

SEQ ID NO: 276227 - DNA, 25 bp, Probe Sequence
tggactagccgggttgtatttggaa

SEQ ID NO: 276228 - DNA, 25 bp, Probe Sequence
tggactcgggggtattttggtcaca

SEQ ID NO: 276229 - DNA, 25 bp, Probe Sequence
tggaccggaagtctgcattctttca

SEQ ID NO: 276230 - DNA, 25 bp, Probe Sequence
tggaaagtaagtctcgctcttgcca

SEQ ID NO: 276231 - DNA, 25 bp, Probe Sequence
tggaacgggagttcttcttcagcgt

SEQ ID NO: 276232 - DNA, 25 bp, Probe Sequence
tggaaaggccagtactgttttagtt

SEQ ID NO: 276233 - DNA, 25 bp, Probe Sequence
tggaataagccaattttacgtcggt

SEQ ID NO: 276234 - DNA, 25 bp, Probe Sequence
tggaatcgaggctgtgtgtccgtca

SEQ ID NO: 276235 - DNA, 25 bp, Probe Sequence
tggctataagcggggtctccggaac

SEQ ID NO: 276236 - DNA, 25 bp, Probe Sequence
tggcttagcaggggtgctggcctgg

SEQ ID NO: 276237 - DNA, 25 bp, Probe Sequence
tggaaagtgacgcgcatggacgggg

SEQ ID NO: 276238 - DNA, 25 bp, Probe Sequence
tgggaactcacgtggggagcggtgg

SEQ ID NO: 276239 - DNA, 25 bp, Probe Sequence
tggtctaccaggtagttggggaggg

SEQ ID NO: 276240 - DNA, 25 bp, Probe Sequence
tggtaacctccggtttgtggacagg

SEQ ID NO: 276241 - DNA, 25 bp, Probe Sequence
tggaaagacacctctgtctgggaag

SEQ ID NO: 276242 - DNA, 25 bp, Probe Sequence
tggaattaccccctagtgatggaat

SEQ ID NO: 276243 - DNA, 25 bp, Probe Sequence
tggaaatatctcagttagtgacaga

SEQ ID NO: 276244 - DNA, 25 bp, Probe Sequence
tggcaagtattctctccatggagtg

SEQ ID NO: 276245 - DNA, 25 bp, Probe Sequence
tggcaggtattttctcacatcctgt

SEQ ID NO: 276246 - DNA, 25 bp, Probe Sequence
tggcactgttctaatcattcaccag

SEQ ID NO: 276247 - DNA, 25 bp, Probe Sequence
tggacgtagtgatgcttctccatgg

SEQ ID NO: 276248 - DNA, 25 bp, Probe Sequence
tggacgtggggaatttctcctgggg

SEQ ID NO: 276249 - DNA, 25 bp, Probe Sequence
tggacgtggggaatttctcctgggg

SEQ ID NO: 276250 - DNA, 25 bp, Probe Sequence
tggacgtggggaatttctcctgggg

SEQ ID NO: 276251 - DNA, 25 bp, Probe Sequence
tgggttgggtgttgattatggtagg

SEQ ID NO: 276252 - DNA, 25 bp, Probe Sequence
tggcgggggggtaattcgtcacatg

SEQ ID NO: 276253 - DNA, 25 bp, Probe Sequence
tggcagagggcgctttaacttcaaa

SEQ ID NO: 276254 - DNA, 25 bp, Probe Sequence
tggcagggacatgtttgcctctgtg

SEQ ID NO: 276255 - DNA, 25 bp, Probe Sequence
tggcaggaaccgagtctccagtgag

SEQ ID NO: 276256 - DNA, 25 bp, Probe Sequence
tggcgtgatacgtttgactccggga

SEQ ID NO: 276257 - DNA, 25 bp, Probe Sequence
tggaatatgagactcttaccctggg

SEQ ID NO: 276258 - DNA, 25 bp, Probe Sequence
tggcgagatgtgtctctcaatcctg

SEQ ID NO: 276259 - DNA, 25 bp, Probe Sequence
tggcaaatgttgtctctcattgccg

SEQ ID NO: 276260 - DNA, 25 bp, Probe Sequence
tgtgctactgattgtttcattgcga

SEQ ID NO: 276261 - DNA, 25 bp, Probe Sequence
tggctgtctgttaagctcatctggg

SEQ ID NO: 276262 - DNA, 25 bp, Probe Sequence
tggctgtgtttgcagcctgctctag

SEQ ID NO: 276263 - DNA, 25 bp, Probe Sequence
tggcgatttatgcagctggcctggc

SEQ ID NO: 276264 - DNA, 25 bp, Probe Sequence
tggcgtctgcttcagggacatgagc

SEQ ID NO: 276265 - DNA, 25 bp, Probe Sequence
tggctctgctctccaagaggaagga

SEQ ID NO: 276266 - DNA, 25 bp, Probe Sequence
tggctcttctgcccaattggaggaa

SEQ ID NO: 276267 - DNA, 25 bp, Probe Sequence
tggcttctctaggctcttctaggaa

SEQ ID NO: 276268 - DNA, 25 bp, Probe Sequence
tggcttcctctgatgctgacaaggt

SEQ ID NO: 276269 - DNA, 25 bp, Probe Sequence
tggcaatccactaggctgccgagtg

SEQ ID NO: 276270 - DNA, 25 bp, Probe Sequence
tggacataagcattgggccatagtt

SEQ ID NO: 276271 - DNA, 25 bp, Probe Sequence
tggcagcagaagtaggcgtatggga

SEQ ID NO: 276272 - DNA, 25 bp, Probe Sequence
tggcagcgagggacagcttctgcgg

SEQ ID NO: 276273 - DNA, 25 bp, Probe Sequence
tggcgtgaggcgccggaatgctggc

SEQ ID NO: 276274 - DNA, 25 bp, Probe Sequence
tggcgtgatatgcacctgcaacgga

SEQ ID NO: 276275 - DNA, 25 bp, Probe Sequence
tggctgatttcatccgcaacaaact

SEQ ID NO: 276276 - DNA, 25 bp, Probe Sequence
tggcatttccacctgccaaacaact

SEQ ID NO: 276277 - DNA, 25 bp, Probe Sequence
tggcttctacaccaaagtgctcaac

SEQ ID NO: 276278 - DNA, 25 bp, Probe Sequence
tggcttcctagcctaagctgggatc

SEQ ID NO: 276279 - DNA, 25 bp, Probe Sequence
tggcatttctaccagtcctgggtca

SEQ ID NO: 276280 - DNA, 25 bp, Probe Sequence
tggcatttgtagcaacctggatgga

SEQ ID NO: 276281 - DNA, 25 bp, Probe Sequence
tggcatctgttgcaacacgggggca

SEQ ID NO: 276282 - DNA, 25 bp, Probe Sequence
tggcatcgtgatggactccggtgac

SEQ ID NO: 276283 - DNA, 25 bp, Probe Sequence
tggagctggaggttctgcgctatac

SEQ ID NO: 276284 - DNA, 25 bp, Probe Sequence
tggcaaggaggctcaggtgcttcca

SEQ ID NO: 276285 - DNA, 25 bp, Probe Sequence
tggcttcagggcacagacttcatgc

SEQ ID NO: 276286 - DNA, 25 bp, Probe Sequence
tggctacagagagtccaaccacact

SEQ ID NO: 276287 - DNA, 25 bp, Probe Sequence
tggctaaagactttgccacactcat

SEQ ID NO: 276288 - DNA, 25 bp, Probe Sequence
tgtgcagaaaaaattgccagcaatt

SEQ ID NO: 276289 - DNA, 25 bp, Probe Sequence
tggaatacaagactcgtgatgcaaa

SEQ ID NO: 276290 - DNA, 25 bp, Probe Sequence
tggaatataaactgtacacataatt

SEQ ID NO: 276291 - DNA, 25 bp, Probe Sequence
tggaaaaaacattgaagacgtcatt

SEQ ID NO: 276292 - DNA, 25 bp, Probe Sequence
tggaaaacccataaaggccgctctc

SEQ ID NO: 276293 - DNA, 25 bp, Probe Sequence
tggaagggtgcgataaggccgggcg

SEQ ID NO: 276294 - DNA, 25 bp, Probe Sequence
tggacagcgtgggtatcgaggcgga

SEQ ID NO: 276295 - DNA, 25 bp, Probe Sequence
tggacagcgtgggtatcgaggcgga

SEQ ID NO: 276296 - DNA, 25 bp, Probe Sequence
tggcactgcactggcttgtagaggc

SEQ ID NO: 276297 - DNA, 25 bp, Probe Sequence
tggcacgcactgccactataaggct

SEQ ID NO: 276298 - DNA, 25 bp, Probe Sequence
tggctccatctgcattacgcaggaa

SEQ ID NO: 276299 - DNA, 25 bp, Probe Sequence
tggctcctcggattgaaagtgtgga

SEQ ID NO: 276300 - DNA, 25 bp, Probe Sequence
tggctgcaatccgaaagaagctggt

SEQ ID NO: 276301 - DNA, 25 bp, Probe Sequence
tggctgaatgaccagataaatcttt

SEQ ID NO: 276302 - DNA, 25 bp, Probe Sequence
tggctaatagtctcaaatgtgtatg

SEQ ID NO: 276303 - DNA, 25 bp, Probe Sequence
tggcaagtagtctctaaaatattct

SEQ ID NO: 276304 - DNA, 25 bp, Probe Sequence
tggcttgttacaggcgagaaattat

SEQ ID NO: 276305 - DNA, 25 bp, Probe Sequence
tggcattttgaaggagttactctct

SEQ ID NO: 276306 - DNA, 25 bp, Probe Sequence
tggcatctggtttggtggttttctt

SEQ ID NO: 276307 - DNA, 25 bp, Probe Sequence
tggctttgttgggtgagcttgtttg

SEQ ID NO: 276308 - DNA, 25 bp, Probe Sequence
tggctatctttgggggcctttattc

SEQ ID NO: 276309 - DNA, 25 bp, Probe Sequence
tggcattttagcagaggctgttcca

SEQ ID NO: 276310 - DNA, 25 bp, Probe Sequence
tggcttatttgtcagcgatttacaa

SEQ ID NO: 276311 - DNA, 25 bp, Probe Sequence
tgtgcattgcattatggacagcact

SEQ ID NO: 276312 - DNA, 25 bp, Probe Sequence
tggcatatactgactgactgcaata

SEQ ID NO: 276313 - DNA, 25 bp, Probe Sequence
tggcatcatataatttgctagtcat

SEQ ID NO: 276314 - DNA, 25 bp, Probe Sequence
tggcagcctcttagtgctattcatt

SEQ ID NO: 276315 - DNA, 25 bp, Probe Sequence
tggcatcgcatcgtggtgtgtcaat

SEQ ID NO: 276316 - DNA, 25 bp, Probe Sequence
tggcatcgcatcgtggtgtgtcaat

SEQ ID NO: 276317 - DNA, 25 bp, Probe Sequence
tggcatggccgtgggtctaattgtg

SEQ ID NO: 276318 - DNA, 25 bp, Probe Sequence
tggcatgagacagtggtgcaagtat

SEQ ID NO: 276319 - DNA, 25 bp, Probe Sequence
tggagagagagcggaaagtgagtat

SEQ ID NO: 276320 - DNA, 25 bp, Probe Sequence
tggaaggcgatgcacaacagattat

SEQ ID NO: 276321 - DNA, 25 bp, Probe Sequence
tggacgacagagtgaaagctctgtc

SEQ ID NO: 276322 - DNA, 25 bp, Probe Sequence
tggacagaccaataaacctgtagat

SEQ ID NO: 276323 - DNA, 25 bp, Probe Sequence
tggaaaaatcaacgtggcctttgag

SEQ ID NO: 276324 - DNA, 25 bp, Probe Sequence
tggaaaggactcagtgtcctctctg

SEQ ID NO: 276325 - DNA, 25 bp, Probe Sequence
tggaaacgcgtcagaatcgcctgga

SEQ ID NO: 276326 - DNA, 25 bp, Probe Sequence
tggaagacgtacgcatactccatcg

SEQ ID NO: 276327 - DNA, 25 bp, Probe Sequence
tggaagacgtacgcatactccatcg

SEQ ID NO: 276328 - DNA, 25 bp, Probe Sequence
tggaaggggatcgcaacatctggat

SEQ ID NO: 276329 - DNA, 25 bp, Probe Sequence
tggacgcggatctgtcaacatgggt

SEQ ID NO: 276330 - DNA, 25 bp, Probe Sequence
tggacagggattggtgggcttgggg

SEQ ID NO: 276331 - DNA, 25 bp, Probe Sequence
tggaagcggctaagggacggttggg

SEQ ID NO: 276332 - DNA, 25 bp, Probe Sequence
tggaatgctccctggtgaggtactg

SEQ ID NO: 276333 - DNA, 25 bp, Probe Sequence
tggcagtcttccagtgtggtgttcc

SEQ ID NO: 276334 - DNA, 25 bp, Probe Sequence
tggcaccagatcaacgggactttcc

SEQ ID NO: 276335 - DNA, 25 bp, Probe Sequence
tggaaaactgcaggatggactcttg

SEQ ID NO: 276336 - DNA, 25 bp, Probe Sequence
tggaaacagcactaaggcagtttgc

SEQ ID NO: 276337 - DNA, 25 bp, Probe Sequence
tggataacccagcccgagttatgcc

SEQ ID NO: 276338 - DNA, 25 bp, Probe Sequence
tggaaatgcccacagggcttgccgc

SEQ ID NO: 276339 - DNA, 25 bp, Probe Sequence
tggagaagatcctgaaggcccgaga

SEQ ID NO: 276340 - DNA, 25 bp, Probe Sequence
tggaacaaccactgagctacggaga

SEQ ID NO: 276341 - DNA, 25 bp, Probe Sequence
tggcaaaatccccagagccaaggca

SEQ ID NO: 276342 - DNA, 25 bp, Probe Sequence
tggcaaggcatctcgagggggtggc

SEQ ID NO: 276343 - DNA, 25 bp, Probe Sequence
tggcaagacactccaagtttggcat

SEQ ID NO: 276344 - DNA, 25 bp, Probe Sequence
tggctaccacttctgtggtggctcc

SEQ ID NO: 276345 - DNA, 25 bp, Probe Sequence
tggtaccagcgtgtgtaccagtccc

SEQ ID NO: 276346 - DNA, 25 bp, Probe Sequence
tggtagccctggggtagcctgtagt

SEQ ID NO: 276347 - DNA, 25 bp, Probe Sequence
tggaagccctgggagataacctggc

SEQ ID NO: 276348 - DNA, 25 bp, Probe Sequence
tggaaccctggtggtccaccattgg

SEQ ID NO: 276349 - DNA, 25 bp, Probe Sequence
tggaaatgccagtgcagttcaccct

SEQ ID NO: 276350 - DNA, 25 bp, Probe Sequence
tggaaataagtgccctttctcttat

SEQ ID NO: 276351 - DNA, 25 bp, Probe Sequence
taagaaacagttctttgtcagtttc

SEQ ID NO: 276352 - DNA, 25 bp, Probe Sequence
taggacccaattctatagccctttc

SEQ ID NO: 276353 - DNA, 25 bp, Probe Sequence
tggggaccaaatgttacctgtgttt

SEQ ID NO: 276354 - DNA, 25 bp, Probe Sequence
tgtggaaccaccattggacctatct

SEQ ID NO: 276355 - DNA, 25 bp, Probe Sequence
tggaattagaccatttggcctttga

SEQ ID NO: 276356 - DNA, 25 bp, Probe Sequence
tggctgcttaggacgttttcgttta

SEQ ID NO: 276357 - DNA, 25 bp, Probe Sequence
tggctctgtggcgagccatttgtcc

SEQ ID NO: 276358 - DNA, 25 bp, Probe Sequence
tggcttgggatattcatgtttccac

SEQ ID NO: 276359 - DNA, 25 bp, Probe Sequence
tggttaataaacagtacctgctctc

SEQ ID NO: 276360 - DNA, 25 bp, Probe Sequence
tggttaaaataagggcactactaca

SEQ ID NO: 276361 - DNA, 25 bp, Probe Sequence
tggggaggttacagaggctgacttc

SEQ ID NO: 276362 - DNA, 25 bp, Probe Sequence
tgtgggggtccatttgggtacgtct

SEQ ID NO: 276363 - DNA, 25 bp, Probe Sequence
tgttttggactctctgtggtccctt

SEQ ID NO: 276364 - DNA, 25 bp, Probe Sequence
tggctatgtggagcactcggttcgc

SEQ ID NO: 276365 - DNA, 25 bp, Probe Sequence
tggttggggccaggcatggtggctc

SEQ ID NO: 276366 - DNA, 25 bp, Probe Sequence
tggcatctggggttcaaggtggctc

SEQ ID NO: 276367 - DNA, 25 bp, Probe Sequence
tggctgcggtcgcaaaggataccct

SEQ ID NO: 276368 - DNA, 25 bp, Probe Sequence
tggctgcccttgaaaaggaggcgca

SEQ ID NO: 276369 - DNA, 25 bp, Probe Sequence
tggcatccctagaaaactgcatgaa

SEQ ID NO: 276370 - DNA, 25 bp, Probe Sequence
tggatcccggcagaagctatgaaag

SEQ ID NO: 276371 - DNA, 25 bp, Probe Sequence
tggctcccaggaacagccttataga

SEQ ID NO: 276372 - DNA, 25 bp, Probe Sequence
tgggctgccaggaaacgatttgggc

SEQ ID NO: 276373 - DNA, 25 bp, Probe Sequence
tggagtgaagaaaacgttaggaaag

SEQ ID NO: 276374 - DNA, 25 bp, Probe Sequence
tggagtctacacaaaagttattaac

SEQ ID NO: 276375 - DNA, 25 bp, Probe Sequence
tggagttgacacccctgttgactcc

SEQ ID NO: 276376 - DNA, 25 bp, Probe Sequence
tggaactgacccaggctggacttgc

SEQ ID NO: 276377 - DNA, 25 bp, Probe Sequence
tggaattgaacctgacattttctgg

SEQ ID NO: 276378 - DNA, 25 bp, Probe Sequence
tggacattgcccatggataattctc

SEQ ID NO: 276379 - DNA, 25 bp, Probe Sequence
tggacttcagccaacaggattcctg

SEQ ID NO: 276380 - DNA, 25 bp, Probe Sequence
tggacttcagccaacaggattcctg

SEQ ID NO: 276381 - DNA, 25 bp, Probe Sequence
tggactaagccttcaggaggtggag

SEQ ID NO: 276382 - DNA, 25 bp, Probe Sequence
tggacagacagacttcgggaggact

SEQ ID NO: 276383 - DNA, 25 bp, Probe Sequence
tggcaaactggcttgggggcgatgc

SEQ ID NO: 276384 - DNA, 25 bp, Probe Sequence
tggcagccattgggtgtgggggcag

SEQ ID NO: 276385 - DNA, 25 bp, Probe Sequence
tggcaggcagtgtgcgtgggttgca

SEQ ID NO: 276386 - DNA, 25 bp, Probe Sequence
tggaggggcccagtgagaatgtcag

SEQ ID NO: 276387 - DNA, 25 bp, Probe Sequence
tggaggctggcctgtgtggatatgg

SEQ ID NO: 276388 - DNA, 25 bp, Probe Sequence
tggaagtagctgttggggtctggtg

SEQ ID NO: 276389 - DNA, 25 bp, Probe Sequence
tggaagtatctgctatgggactatt

SEQ ID NO: 276390 - DNA, 25 bp, Probe Sequence
tggaagttccttagggacttgccca

SEQ ID NO: 276391 - DNA, 25 bp, Probe Sequence
tggatagtcccttttgcggaatccc

SEQ ID NO: 276392 - DNA, 25 bp, Probe Sequence
tggtgagtctcccccgggagatatc

SEQ ID NO: 276393 - DNA, 25 bp, Probe Sequence
tggtgttcaccaacgtgggagactt

SEQ ID NO: 276394 - DNA, 25 bp, Probe Sequence
tgttctggattcccgtcgtaactta

SEQ ID NO: 276395 - DNA, 25 bp, Probe Sequence
tggcttggattgccctttgtgactt

SEQ ID NO: 276396 - DNA, 25 bp, Probe Sequence
tggcttggatctcgtttttaacccg

SEQ ID NO: 276397 - DNA, 25 bp, Probe Sequence
tggctttgttcttttcttaagctcc

SEQ ID NO: 276398 - DNA, 25 bp, Probe Sequence
tggcttctgtggatattctatgacc

SEQ ID NO: 276399 - DNA, 25 bp, Probe Sequence
tggaatagctggctttattggcacc

SEQ ID NO: 276400 - DNA, 25 bp, Probe Sequence
tggcaaactcagctttcaccagacc

SEQ ID NO: 276401 - DNA, 25 bp, Probe Sequence
tggcagaaatacctttcgactctcc

SEQ ID NO: 276402 - DNA, 25 bp, Probe Sequence
tggcaggccaaccttgacagattcc

SEQ ID NO: 276403 - DNA, 25 bp, Probe Sequence
tggcatagcccatgttaagtcctcc

SEQ ID NO: 276404 - DNA, 25 bp, Probe Sequence
tggcatgagccacagtttcttgact

SEQ ID NO: 276405 - DNA, 25 bp, Probe Sequence
tggtagctgcagcagcccttggaat

SEQ ID NO: 276406 - DNA, 25 bp, Probe Sequence
tggtcatgccatgagcagccttatg

SEQ ID NO: 276407 - DNA, 25 bp, Probe Sequence
tggtcatgccatgagcagccttatg

SEQ ID NO: 276408 - DNA, 25 bp, Probe Sequence
tggctagcatatgggcactttacag

SEQ ID NO: 276409 - DNA, 25 bp, Probe Sequence
tggcaatgcaactgacttatttcca

SEQ ID NO: 276410 - DNA, 25 bp, Probe Sequence
tggcattcaggcccctatattttct

SEQ ID NO: 276411 - DNA, 25 bp, Probe Sequence
tggttaattggcattatttcctaaa

SEQ ID NO: 276412 - DNA, 25 bp, Probe Sequence
tggttaattactcaagttcctttca

SEQ ID NO: 276413 - DNA, 25 bp, Probe Sequence
tggcttgactcaagtccacgtttcc

SEQ ID NO: 276414 - DNA, 25 bp, Probe Sequence
tggcttggccaagattctgttacct

SEQ ID NO: 276415 - DNA, 25 bp, Probe Sequence
tggcattgtgaatgccattctttta

SEQ ID NO: 276416 - DNA, 25 bp, Probe Sequence
tggcattgctaattgagcagtccat

SEQ ID NO: 276417 - DNA, 25 bp, Probe Sequence
tggctcagctcatcatacagaccac

SEQ ID NO: 276418 - DNA, 25 bp, Probe Sequence
tggcatcagctatcttagctcctcc

SEQ ID NO: 276419 - DNA, 25 bp, Probe Sequence
tggcatcagctatcttagctcctcc

SEQ ID NO: 276420 - DNA, 25 bp, Probe Sequence
tggcatgcggtttaagctccatgac

SEQ ID NO: 276421 - DNA, 25 bp, Probe Sequence
tggcactgctgttacagatcccgac

SEQ ID NO: 276422 - DNA, 25 bp, Probe Sequence
tgtgcccatgatggacacacccaag

SEQ ID NO: 276423 - DNA, 25 bp, Probe Sequence
tggactcatgacaaataccaagggg

SEQ ID NO: 276424 - DNA, 25 bp, Probe Sequence
tggacatcgatttcaactaagagtt

SEQ ID NO: 276425 - DNA, 25 bp, Probe Sequence
tggacattgacttcccgcataaggc

SEQ ID NO: 276426 - DNA, 25 bp, Probe Sequence
tggaatgtactattttgtaatgtct

SEQ ID NO: 276427 - DNA, 25 bp, Probe Sequence
tggactcgactgctttctaaatctc

SEQ ID NO: 276428 - DNA, 25 bp, Probe Sequence
tggaattgctcttgattgttaaagt

SEQ ID NO: 276429 - DNA, 25 bp, Probe Sequence
tggataggtcgggtgttaaagttgt

SEQ ID NO: 276430 - DNA, 25 bp, Probe Sequence
tggaaggtgcggggttctgacaagc

SEQ ID NO: 276431 - DNA, 25 bp, Probe Sequence
tggacaggaaggagtgttacacact

SEQ ID NO: 276432 - DNA, 25 bp, Probe Sequence
tggaaggaggcgcactttcctcctg

SEQ ID NO: 276433 - DNA, 25 bp, Probe Sequence
tggaaggaggcgcactttcctcctg

SEQ ID NO: 276434 - DNA, 25 bp, Probe Sequence
tgtactgagggaaactaacctcacc

SEQ ID NO: 276435 - DNA, 25 bp, Probe Sequence
tggactggagcgtaactgccactta

SEQ ID NO: 276436 - DNA, 25 bp, Probe Sequence
tggacgaggccgaattggactacct

SEQ ID NO: 276437 - DNA, 25 bp, Probe Sequence
tggcatggttgctctattggactac

SEQ ID NO: 276438 - DNA, 25 bp, Probe Sequence
tggcagggatcgttgcactggactc

SEQ ID NO: 276439 - DNA, 25 bp, Probe Sequence
tggcttgagtcagctgcagggcagt

SEQ ID NO: 276440 - DNA, 25 bp, Probe Sequence
tggttgcagaacttcgtgaatgtat

SEQ ID NO: 276441 - DNA, 25 bp, Probe Sequence
tggcaccagaaacatctacattgat

SEQ ID NO: 276442 - DNA, 25 bp, Probe Sequence
tggaacaagatacattgcagtgtca

SEQ ID NO: 276443 - DNA, 25 bp, Probe Sequence
tggcaaagagagtcgcatctcagtg

SEQ ID NO: 276444 - DNA, 25 bp, Probe Sequence
tggcagtgaggagcccatcgtgcca

SEQ ID NO: 276445 - DNA, 25 bp, Probe Sequence
tggaagagtggctccacggtcaggc

SEQ ID NO: 276446 - DNA, 25 bp, Probe Sequence
tggacgtggagtcccacgtgtccgg

SEQ ID NO: 276447 - DNA, 25 bp, Probe Sequence
tggaagaagaggacccgtggcgctc

SEQ ID NO: 276448 - DNA, 25 bp, Probe Sequence
tggaaggcacagaacacctggggct

SEQ ID NO: 276449 - DNA, 25 bp, Probe Sequence
tggacacttcacaatacgctgagaa

SEQ ID NO: 276450 - DNA, 25 bp, Probe Sequence
tggaactgtacagggcctggtactt

SEQ ID NO: 276451 - DNA, 25 bp, Probe Sequence
tggaacctaagaccctgaattcttt

SEQ ID NO: 276452 - DNA, 25 bp, Probe Sequence
tggcaacagctttgccactcgactt

SEQ ID NO: 276453 - DNA, 25 bp, Probe Sequence
tggcacaatcacagctcactggacc

SEQ ID NO: 276454 - DNA, 25 bp, Probe Sequence
tggctatcatgccaactactgcgag

SEQ ID NO: 276455 - DNA, 25 bp, Probe Sequence
tggcatgatcttgactcactgcaac

SEQ ID NO: 276456 - DNA, 25 bp, Probe Sequence
tggaacttaattactgcgtccccat

SEQ ID NO: 276457 - DNA, 25 bp, Probe Sequence
tggaatcggtgacacccatgaccct

SEQ ID NO: 276458 - DNA, 25 bp, Probe Sequence
tggaactggggttcctaactccaat

SEQ ID NO: 276459 - DNA, 25 bp, Probe Sequence
tggaaaggtctgaaacttcctccct

SEQ ID NO: 276460 - DNA, 25 bp, Probe Sequence
tggaacgttctatgaatttcgtact

SEQ ID NO: 276461 - DNA, 25 bp, Probe Sequence
tggaaatttaaacgacttcctcacg

SEQ ID NO: 276462 - DNA, 25 bp, Probe Sequence
tggcaatgtggggaacgacgccctc

SEQ ID NO: 276463 - DNA, 25 bp, Probe Sequence
tggcagatgaggcgggcctcgacct

SEQ ID NO: 276464 - DNA, 25 bp, Probe Sequence
tggcagaaggggagcccgagggacc

SEQ ID NO: 276465 - DNA, 25 bp, Probe Sequence
tggagaacgagtatggccggctgac

SEQ ID NO: 276466 - DNA, 25 bp, Probe Sequence
tggagagaagaattaagcactttaa

SEQ ID NO: 276467 - DNA, 25 bp, Probe Sequence
tggaagaggagattaccaagtttga

SEQ ID NO: 276468 - DNA, 25 bp, Probe Sequence
tggcatgacatgcagactaccactg

SEQ ID NO: 276469 - DNA, 25 bp, Probe Sequence
tggcatgacaaaagctacagagagg

SEQ ID NO: 276470 - DNA, 25 bp, Probe Sequence
tggcagacagagaattggagtgaag

SEQ ID NO: 276471 - DNA, 25 bp, Probe Sequence
tggcaccaaatttctgagctacaag

SEQ ID NO: 276472 - DNA, 25 bp, Probe Sequence
tggcaccacaggcatttgctactgt

SEQ ID NO: 276473 - DNA, 25 bp, Probe Sequence
tggcatctacgcctatggttttgag

SEQ ID NO: 276474 - DNA, 25 bp, Probe Sequence
tggcttctcctttggcatgtttaat

SEQ ID NO: 276475 - DNA, 25 bp, Probe Sequence
tgtgccccctaaacacatttactgg

SEQ ID NO: 276476 - DNA, 25 bp, Probe Sequence
tgtaacacctacaccattatcttgg

SEQ ID NO: 276477 - DNA, 25 bp, Probe Sequence
tgtaacacctacaccattatcttgg

SEQ ID NO: 276478 - DNA, 25 bp, Probe Sequence
tgtacaaccccaacaaaatcttcgg

SEQ ID NO: 276479 - DNA, 25 bp, Probe Sequence
tggagaaccccaataataacccgat

SEQ ID NO: 276480 - DNA, 25 bp, Probe Sequence
tggagaaccattgtcatatacccgg

SEQ ID NO: 276481 - DNA, 25 bp, Probe Sequence
tggaacccatgattcctaaacccgg

SEQ ID NO: 276482 - DNA, 25 bp, Probe Sequence
tggattttttatgtacaaccctgac

SEQ ID NO: 276483 - DNA, 25 bp, Probe Sequence
tggacatttgtttagtaaatccctt

SEQ ID NO: 276484 - DNA, 25 bp, Probe Sequence
tggaaagctttctgtaactactagt

SEQ ID NO: 276485 - DNA, 25 bp, Probe Sequence
tggaggagggttgtaaaagcatatt

SEQ ID NO: 276486 - DNA, 25 bp, Probe Sequence
tggggcagggtgtttagaattttct

SEQ ID NO: 276487 - DNA, 25 bp, Probe Sequence
tggcaagaagtttttggatcttttt

SEQ ID NO: 276488 - DNA, 25 bp, Probe Sequence
tggcacaataattttatggttatgt

SEQ ID NO: 276489 - DNA, 25 bp, Probe Sequence
tggacaattaacttatgttcgcagt

SEQ ID NO: 276490 - DNA, 25 bp, Probe Sequence
tggagaaatgaccgtatgtcaccaa

SEQ ID NO: 276491 - DNA, 25 bp, Probe Sequence
tggagaaaggaggctacgccccagt

SEQ ID NO: 276492 - DNA, 25 bp, Probe Sequence
tggaaaagcagtccggagacccctt

SEQ ID NO: 276493 - DNA, 25 bp, Probe Sequence
tggaacaagtaaaggcaaccccctg

SEQ ID NO: 276494 - DNA, 25 bp, Probe Sequence
tggaacaagtaaaggcaaccccctg

SEQ ID NO: 276495 - DNA, 25 bp, Probe Sequence
tggacccagtagagaaagcccttcg

SEQ ID NO: 276496 - DNA, 25 bp, Probe Sequence
tgataaccgtggcgaaagtcttgtt

SEQ ID NO: 276497 - DNA, 25 bp, Probe Sequence
tggcaacacgtttgcaaaggtttta

SEQ ID NO: 276498 - DNA, 25 bp, Probe Sequence
tggaccactgcctgaaaggtttgta

SEQ ID NO: 276499 - DNA, 25 bp, Probe Sequence
tggacacctgcctgaaggactgcat

SEQ ID NO: 276500 - DNA, 25 bp, Probe Sequence
tggacaccatctggcgaggtcattt

SEQ ID NO: 276501 - DNA, 25 bp, Probe Sequence
tggcacctcctggcaagaagtgtgc

SEQ ID NO: 276502 - DNA, 25 bp, Probe Sequence
tggcaactgtgggcaataatatggc

SEQ ID NO: 276503 - DNA, 25 bp, Probe Sequence
tggaacctgtggcagcacatggccc

SEQ ID NO: 276504 - DNA, 25 bp, Probe Sequence
tggagaccttgaacgaaggccggct

SEQ ID NO: 276505 - DNA, 25 bp, Probe Sequence
tgtgatgaacttttccaatggggaa

SEQ ID NO: 276506 - DNA, 25 bp, Probe Sequence
tggattcagttgagccaaagtggaa

SEQ ID NO: 276507 - DNA, 25 bp, Probe Sequence
tggtatactatcatcctggaggggt

SEQ ID NO: 276508 - DNA, 25 bp, Probe Sequence
tggaaaattgttgtggtgtgtggta

SEQ ID NO: 276509 - DNA, 25 bp, Probe Sequence
tggagaacggttcctgggaggtgtt

SEQ ID NO: 276510 - DNA, 25 bp, Probe Sequence
tggaagactggttacatggagggga

SEQ ID NO: 276511 - DNA, 25 bp, Probe Sequence
tggcaacactggattcagtgcaggt

SEQ ID NO: 276512 - DNA, 25 bp, Probe Sequence
tggcaccctggacccagtagagaaa

SEQ ID NO: 276513 - DNA, 25 bp, Probe Sequence
tggcattactggtcacttggaagaa

SEQ ID NO: 276514 - DNA, 25 bp, Probe Sequence
tggcagatatggtatggatcgtaaa

SEQ ID NO: 276515 - DNA, 25 bp, Probe Sequence
tggaatgtacacaagatgcggaaat

SEQ ID NO: 276516 - DNA, 25 bp, Probe Sequence
tggaatgttctgtgccggatatatg

SEQ ID NO: 276517 - DNA, 25 bp, Probe Sequence
tggaactctctgggctcagactatc

SEQ ID NO: 276518 - DNA, 25 bp, Probe Sequence
tggagagctacgggcatgcagaagt

SEQ ID NO: 276519 - DNA, 25 bp, Probe Sequence
tggagaggaccagcagaaaccatct

SEQ ID NO: 276520 - DNA, 25 bp, Probe Sequence
tggaaggtgacagcgattccctgtg

SEQ ID NO: 276521 - DNA, 25 bp, Probe Sequence
tggacaaggcaagcgtccggcatgg

SEQ ID NO: 276522 - DNA, 25 bp, Probe Sequence
tggaaagggatccatctccaggcag

SEQ ID NO: 276523 - DNA, 25 bp, Probe Sequence
tggaaagggatccatctccaggcag

SEQ ID NO: 276524 - DNA, 25 bp, Probe Sequence
tggcaaatttgcatgagctcctgga

SEQ ID NO: 276525 - DNA, 25 bp, Probe Sequence
tggcaaatttgcatgagctcctgga

SEQ ID NO: 276526 - DNA, 25 bp, Probe Sequence
tggaaattctttggctacttaacta

SEQ ID NO: 276527 - DNA, 25 bp, Probe Sequence
tggcaattccataatcctagttcga

SEQ ID NO: 276528 - DNA, 25 bp, Probe Sequence
tggcaagtcagccttcgctatgatg

SEQ ID NO: 276529 - DNA, 25 bp, Probe Sequence
tggcagtgataccatcaagcctgat

SEQ ID NO: 276530 - DNA, 25 bp, Probe Sequence
tggcatttatcgactacctgctacc

SEQ ID NO: 276531 - DNA, 25 bp, Probe Sequence
tggcaggatcctggtatccgctaac

SEQ ID NO: 276532 - DNA, 25 bp, Probe Sequence
tggcagcgaacactttcaccattac

SEQ ID NO: 276533 - DNA, 25 bp, Probe Sequence
tggcacgagaacaactacgtgatga

SEQ ID NO: 276534 - DNA, 25 bp, Probe Sequence
tggcacgagcaagatccggcctgat

SEQ ID NO: 276535 - DNA, 25 bp, Probe Sequence
tggcacgagcaaggtggcggtgcag

SEQ ID NO: 276536 - DNA, 25 bp, Probe Sequence
tggcaggagcctggatggctggcgg

SEQ ID NO: 276537 - DNA, 25 bp, Probe Sequence
tggcatggtctgtgcaggcagcagc

SEQ ID NO: 276538 - DNA, 25 bp, Probe Sequence
tggaagtctgatagcgtctctgcac

SEQ ID NO: 276539 - DNA, 25 bp, Probe Sequence
tggcaactctgaagtcatcctgcca

SEQ ID NO: 276540 - DNA, 25 bp, Probe Sequence
tggaatccagaatcatgatcccact

SEQ ID NO: 276541 - DNA, 25 bp, Probe Sequence
tggcaaccaaatcgaatctctcatt

SEQ ID NO: 276542 - DNA, 25 bp, Probe Sequence
tggcaggcactgtggacacccagtt

SEQ ID NO: 276543 - DNA, 25 bp, Probe Sequence
tggaggagatgctggtccccaggaa

SEQ ID NO: 276544 - DNA, 25 bp, Probe Sequence
tggcaaatgcagttgagtccccgag

SEQ ID NO: 276545 - DNA, 25 bp, Probe Sequence
tggaaaggcttgatcgtgctcacag

SEQ ID NO: 276546 - DNA, 25 bp, Probe Sequence
tggcagagcaacacttcgtctcaga

SEQ ID NO: 276547 - DNA, 25 bp, Probe Sequence
tggcagacaatttttcgctccatga

SEQ ID NO: 276548 - DNA, 25 bp, Probe Sequence
tggcactaatctggtgtcactctct

SEQ ID NO: 276549 - DNA, 25 bp, Probe Sequence
tggcaggaggtggttcagtctgtcc

SEQ ID NO: 276550 - DNA, 25 bp, Probe Sequence
tggcagtgagggtttctgtgctgtc

SEQ ID NO: 276551 - DNA, 25 bp, Probe Sequence
tggcagttcggctagatttctgtct

SEQ ID NO: 276552 - DNA, 25 bp, Probe Sequence
tggcagcttcggggacaatctggtc

SEQ ID NO: 276553 - DNA, 25 bp, Probe Sequence
tggacttgccaggagttgtctgcga

SEQ ID NO: 276554 - DNA, 25 bp, Probe Sequence
tggactccacggatgcgtgggcaga

SEQ ID NO: 276555 - DNA, 25 bp, Probe Sequence
tggacttaaggattgctgggccacc

SEQ ID NO: 276556 - DNA, 25 bp, Probe Sequence
tgggctttcagtgctgtgggggccc

SEQ ID NO: 276557 - DNA, 25 bp, Probe Sequence
tgggttactgcttcttcaagaacca

SEQ ID NO: 276558 - DNA, 25 bp, Probe Sequence
tggagcccacgttctcaaaaactca

SEQ ID NO: 276559 - DNA, 25 bp, Probe Sequence
tggatgaccttttccgaaagaccaa

SEQ ID NO: 276560 - DNA, 25 bp, Probe Sequence
tggagaacttttccgaacacacttc

SEQ ID NO: 276561 - DNA, 25 bp, Probe Sequence
tggaacatctttaccaccaacgttt

SEQ ID NO: 276562 - DNA, 25 bp, Probe Sequence
tggaacatctttaccaccaacgttt

SEQ ID NO: 276563 - DNA, 25 bp, Probe Sequence
tggcagatcatgatttccagcccac

SEQ ID NO: 276564 - DNA, 25 bp, Probe Sequence
tggcagcactgacctttgaggccaa

SEQ ID NO: 276565 - DNA, 25 bp, Probe Sequence
tggcagctgattccatgtctgggat

SEQ ID NO: 276566 - DNA, 25 bp, Probe Sequence
tggcaggattcacttatgggtaaaa

SEQ ID NO: 276567 - DNA, 25 bp, Probe Sequence
tggcatggatgtttaagatgttaat

SEQ ID NO: 276568 - DNA, 25 bp, Probe Sequence
tggaatgttaataaatttcagttta

SEQ ID NO: 276569 - DNA, 25 bp, Probe Sequence
tggactgtaaatgttttatttgtaa

SEQ ID NO: 276570 - DNA, 25 bp, Probe Sequence
tggaatctaaaggttttatcactta

SEQ ID NO: 276571 - DNA, 25 bp, Probe Sequence
tggaactagaaggctgtttgaactt

SEQ ID NO: 276572 - DNA, 25 bp, Probe Sequence
tggcaatagtgccagcctgtcttgt

SEQ ID NO: 276573 - DNA, 25 bp, Probe Sequence
tggagggtgcaatcatttatgttat

SEQ ID NO: 276574 - DNA, 25 bp, Probe Sequence
tggaggtcttttaatctgatgttct

SEQ ID NO: 276575 - DNA, 25 bp, Probe Sequence
tggacttcgtgatttttgttttgca

SEQ ID NO: 276576 - DNA, 25 bp, Probe Sequence
tggaccacttaactttgtgacttgt

SEQ ID NO: 276577 - DNA, 25 bp, Probe Sequence
tggataatgctttactttctgtgtt

SEQ ID NO: 276578 - DNA, 25 bp, Probe Sequence
tggagaagttccagtcctgtctgag

SEQ ID NO: 276579 - DNA, 25 bp, Probe Sequence
tggacaatttccattcatgacggtg

SEQ ID NO: 276580 - DNA, 25 bp, Probe Sequence
tggacagtgggcttttcatgcctct

SEQ ID NO: 276581 - DNA, 25 bp, Probe Sequence
tggacatttggtattctgccctcca

SEQ ID NO: 276582 - DNA, 25 bp, Probe Sequence
tggaatttggttactccactgccat

SEQ ID NO: 276583 - DNA, 25 bp, Probe Sequence
tggcaattatagctactcccatccc

SEQ ID NO: 276584 - DNA, 25 bp, Probe Sequence
tggcaatctaatctggcatgtctca

SEQ ID NO: 276585 - DNA, 25 bp, Probe Sequence
tggatctctcaagcagagcattctt

SEQ ID NO: 276586 - DNA, 25 bp, Probe Sequence
tggagcatcgcgtaaggcttcttgc

SEQ ID NO: 276587 - DNA, 25 bp, Probe Sequence
tggacattggcccagtctgtttcaa

SEQ ID NO: 276588 - DNA, 25 bp, Probe Sequence
tggaattcacactgatctgggttaa

SEQ ID NO: 276589 - DNA, 25 bp, Probe Sequence
tggaattgcagatgcattctggcct

SEQ ID NO: 276590 - DNA, 25 bp, Probe Sequence
tggaaggcgggcacagagccatctt

SEQ ID NO: 276591 - DNA, 25 bp, Probe Sequence
tggacaggcgggaacatggccaccg

SEQ ID NO: 276592 - DNA, 25 bp, Probe Sequence
tggacaggcgggaacatggccaccg

SEQ ID NO: 276593 - DNA, 25 bp, Probe Sequence
tggcacaggtggctttggcacaact

SEQ ID NO: 276594 - DNA, 25 bp, Probe Sequence
tggcaccggggtggatgcagcagta

SEQ ID NO: 276595 - DNA, 25 bp, Probe Sequence
tggaccgggtggctagtgctacaaa

SEQ ID NO: 276596 - DNA, 25 bp, Probe Sequence
tggacctggagaagggacctacgga

SEQ ID NO: 276597 - DNA, 25 bp, Probe Sequence
tggtacaaggaccaggagcccctgg

SEQ ID NO: 276598 - DNA, 25 bp, Probe Sequence
tggaaacagagagcaggggccctcc

SEQ ID NO: 276599 - DNA, 25 bp, Probe Sequence
tggaaacatgtgtcgtggaggccga

SEQ ID NO: 276600 - DNA, 25 bp, Probe Sequence
tggaaggagaggcctgcagggctcg

SEQ ID NO: 276601 - DNA, 25 bp, Probe Sequence
tggaagggcacaggtgcggggctgg

SEQ ID NO: 276602 - DNA, 25 bp, Probe Sequence
tggaaggacacaggttgccagagcc

SEQ ID NO: 276603 - DNA, 25 bp, Probe Sequence
tggtactgggcaggattggcaacac

SEQ ID NO: 276604 - DNA, 25 bp, Probe Sequence
tggagacggcgagactgcgtcaacc

SEQ ID NO: 276605 - DNA, 25 bp, Probe Sequence
tggactgggatgaccgctggatcaa

SEQ ID NO: 276606 - DNA, 25 bp, Probe Sequence
tggcactgtggttcctgcatgaaga

SEQ ID NO: 276607 - DNA, 25 bp, Probe Sequence
tggcactgctcacatgaccagatgg

SEQ ID NO: 276608 - DNA, 25 bp, Probe Sequence
tggcactgcatacaatctgaggcct

SEQ ID NO: 276609 - DNA, 25 bp, Probe Sequence
tggaagatcatggacctggtgcccc

SEQ ID NO: 276610 - DNA, 25 bp, Probe Sequence
tggaaccagcagacggggctatgcc

SEQ ID NO: 276611 - DNA, 25 bp, Probe Sequence
tggacgtcacgaaggagccgatccc

SEQ ID NO: 276612 - DNA, 25 bp, Probe Sequence
tgagactgactccaaggccacaaac

SEQ ID NO: 276613 - DNA, 25 bp, Probe Sequence
tgagactgactccaaggccacaaac

SEQ ID NO: 276614 - DNA, 25 bp, Probe Sequence
tggacacccgcatgtgtaacaacag

SEQ ID NO: 276615 - DNA, 25 bp, Probe Sequence
tggcaacccagctgttcattggagg

SEQ ID NO: 276616 - DNA, 25 bp, Probe Sequence
tggcagagcccacgtttcatagcca

SEQ ID NO: 276617 - DNA, 25 bp, Probe Sequence
tggcaccctgcaagtaatcaacaca

SEQ ID NO: 276618 - DNA, 25 bp, Probe Sequence
tggactcgctgaagagagactacgc

SEQ ID NO: 276619 - DNA, 25 bp, Probe Sequence
tggcagctgcaaacgggcgctgacc

SEQ ID NO: 276620 - DNA, 25 bp, Probe Sequence
tggcagcgtagtggggctgccaggc

SEQ ID NO: 276621 - DNA, 25 bp, Probe Sequence
tggacttggctcgggctgtgagaga

SEQ ID NO: 276622 - DNA, 25 bp, Probe Sequence
tggcagcaggctccctgagtgatga

SEQ ID NO: 276623 - DNA, 25 bp, Probe Sequence
tggatgtggcgctgaagatgctgca

SEQ ID NO: 276624 - DNA, 25 bp, Probe Sequence
tggaattgtgcccatgcagatccct

SEQ ID NO: 276625 - DNA, 25 bp, Probe Sequence
tggaatgcattcactcagcatcccc

SEQ ID NO: 276626 - DNA, 25 bp, Probe Sequence
tggagaatatgagtgccatgcatcc

SEQ ID NO: 276627 - DNA, 25 bp, Probe Sequence
tggaagacgactccatgcagcaact

SEQ ID NO: 276628 - DNA, 25 bp, Probe Sequence
tggaaagctgaaacccatatgcaaa

SEQ ID NO: 276629 - DNA, 25 bp, Probe Sequence
tggaaactgaacaacctgctcctga

SEQ ID NO: 276630 - DNA, 25 bp, Probe Sequence
tggaaacagcaaagacagtcgccga

SEQ ID NO: 276631 - DNA, 25 bp, Probe Sequence
tggaagagcactactggatgtcagc

SEQ ID NO: 276632 - DNA, 25 bp, Probe Sequence
tggaaaattccatgctgtgcgctgg

SEQ ID NO: 276633 - DNA, 25 bp, Probe Sequence
tggaagaatcctggacttggctagc

SEQ ID NO: 276634 - DNA, 25 bp, Probe Sequence
tggaagatggacgtactttgtctga

SEQ ID NO: 276635 - DNA, 25 bp, Probe Sequence
tggaagtgcctcttatgtttttttc

SEQ ID NO: 276636 - DNA, 25 bp, Probe Sequence
tggaactgtcattctattttctgta

SEQ ID NO: 276637 - DNA, 25 bp, Probe Sequence
tggacacatcctttatgctcttatt

SEQ ID NO: 276638 - DNA, 25 bp, Probe Sequence
tggacctctgcttatcggattagtt

SEQ ID NO: 276639 - DNA, 25 bp, Probe Sequence
tggagcacttgttccgggatggtgt

SEQ ID NO: 276640 - DNA, 25 bp, Probe Sequence
tggcagccgtggtggtggtggatat

SEQ ID NO: 276641 - DNA, 25 bp, Probe Sequence
tggcagccgtggtggtggtggatat

SEQ ID NO: 276642 - DNA, 25 bp, Probe Sequence
tggcaccgtcgatctacgggatctt

SEQ ID NO: 276643 - DNA, 25 bp, Probe Sequence
tggcacgcgaaagtcaacgggactt

SEQ ID NO: 276644 - DNA, 25 bp, Probe Sequence
tggcaccaaaatcaacgggactttc

SEQ ID NO: 276645 - DNA, 25 bp, Probe Sequence
tggcaccaaaatcaacgggactttc

SEQ ID NO: 276646 - DNA, 25 bp, Probe Sequence
tggcaccaaaatcaacgggactttc

SEQ ID NO: 276647 - DNA, 25 bp, Probe Sequence
tggcaccaaaatcaacgggactttc

SEQ ID NO: 276648 - DNA, 25 bp, Probe Sequence
tggcaccaaaatcaacgggactttc

SEQ ID NO: 276649 - DNA, 25 bp, Probe Sequence
tggcaccaaaatcaacgggactttc

SEQ ID NO: 276650 - DNA, 25 bp, Probe Sequence
tggcaccaaaatcaacgggactttc

SEQ ID NO: 276651 - DNA, 25 bp, Probe Sequence
tggcaccaaaatcaacgggactttc

SEQ ID NO: 276652 - DNA, 25 bp, Probe Sequence
tggcaccaaagtaaacgcagagagt

SEQ ID NO: 276653 - DNA, 25 bp, Probe Sequence
tggaccaagtgaccaccgtgaagtg

SEQ ID NO: 276654 - DNA, 25 bp, Probe Sequence
tggacctagtaggccatcagtagca

SEQ ID NO: 276655 - DNA, 25 bp, Probe Sequence
tggacatcaggttgactctaaatca

SEQ ID NO: 276656 - DNA, 25 bp, Probe Sequence
tgtgaacaggtcaagaataacactt

SEQ ID NO: 276657 - DNA, 25 bp, Probe Sequence
tggaacacgtataggtgcaacctgt

SEQ ID NO: 276658 - DNA, 25 bp, Probe Sequence
tggaacctttggttcagggcttagg

SEQ ID NO: 276659 - DNA, 25 bp, Probe Sequence
tggatcaccttagggtcaggggctg

SEQ ID NO: 276660 - DNA, 25 bp, Probe Sequence
tggtccttcaagcctgtatggtttg

SEQ ID NO: 276661 - DNA, 25 bp, Probe Sequence
tggactcaatcatggcttgtggtct

SEQ ID NO: 276662 - DNA, 25 bp, Probe Sequence
tggactatgtgatgggaggctgtca

SEQ ID NO: 276663 - DNA, 25 bp, Probe Sequence
tggactggctgacggagaaaatgag

SEQ ID NO: 276664 - DNA, 25 bp, Probe Sequence
tggaattctgagcagcaccacagtg

SEQ ID NO: 276665 - DNA, 25 bp, Probe Sequence
tggaatttcacgacagcacagactg

SEQ ID NO: 276666 - DNA, 25 bp, Probe Sequence
tggaagttgcagtgagctgagatcg

SEQ ID NO: 276667 - DNA, 25 bp, Probe Sequence
tggaagtcatcttggagcgtatgga

SEQ ID NO: 276668 - DNA, 25 bp, Probe Sequence
tggaaacctagccagcttcacgatt

SEQ ID NO: 276669 - DNA, 25 bp, Probe Sequence
tggaaaggccagcagccttccagtg

SEQ ID NO: 276670 - DNA, 25 bp, Probe Sequence
tggcaaggtcaccaagtctgcccag

SEQ ID NO: 276671 - DNA, 25 bp, Probe Sequence
tggcaaggtcaccaagtctgcccag

SEQ ID NO: 276672 - DNA, 25 bp, Probe Sequence
tggcaaggtcaccaagtctgcccag

SEQ ID NO: 276673 - DNA, 25 bp, Probe Sequence
tggcaagagatcatatcctcagacc

SEQ ID NO: 276674 - DNA, 25 bp, Probe Sequence
tggcaagatcacaaacccacacaca

SEQ ID NO: 276675 - DNA, 25 bp, Probe Sequence
tggcaacagagcgagactccatctc

SEQ ID NO: 276676 - DNA, 25 bp, Probe Sequence
tggaactagcaggacatcacttaca

SEQ ID NO: 276677 - DNA, 25 bp, Probe Sequence
tggaagctgcagtctacaccttcac

SEQ ID NO: 276678 - DNA, 25 bp, Probe Sequence
tggagcactgaccagaacacttcgc

SEQ ID NO: 276679 - DNA, 25 bp, Probe Sequence
tggagcaccagccagacaacatcaa

SEQ ID NO: 276680 - DNA, 25 bp, Probe Sequence
tggagctgtcatcactcaacaaaaa

SEQ ID NO: 276681 - DNA, 25 bp, Probe Sequence
tggagatggcacaactagaaactaa

SEQ ID NO: 276682 - DNA, 25 bp, Probe Sequence
tggactggactaccagaaggagaca

SEQ ID NO: 276683 - DNA, 25 bp, Probe Sequence
tggactggccatgaagtgaggagat

SEQ ID NO: 276684 - DNA, 25 bp, Probe Sequence
tggactgacctaaacgtggaatgca

SEQ ID NO: 276685 - DNA, 25 bp, Probe Sequence
tggacttcctgatattgttgataca

SEQ ID NO: 276686 - DNA, 25 bp, Probe Sequence
tggacttcctgatattgttgataca

SEQ ID NO: 276687 - DNA, 25 bp, Probe Sequence
tggaggcctctgtaacgttaccctc

SEQ ID NO: 276688 - DNA, 25 bp, Probe Sequence
tggaggcctttatcttctacaacca

SEQ ID NO: 276689 - DNA, 25 bp, Probe Sequence
tggaacagtgtttactttaaatcct

SEQ ID NO: 276690 - DNA, 25 bp, Probe Sequence
tggaacagtgctccttatgtaaact

SEQ ID NO: 276691 - DNA, 25 bp, Probe Sequence
tggacgagtgctcactagcagaaaa

SEQ ID NO: 276692 - DNA, 25 bp, Probe Sequence
tggagaaacccacagcagatgcaga

SEQ ID NO: 276693 - DNA, 25 bp, Probe Sequence
tggaagaacctttaatcagagaagt

SEQ ID NO: 276694 - DNA, 25 bp, Probe Sequence
tggacacccagttcatcgacgagaa

SEQ ID NO: 276695 - DNA, 25 bp, Probe Sequence
tggaagtgcgcagtccacgacagaa

SEQ ID NO: 276696 - DNA, 25 bp, Probe Sequence
tggatgtgacgagcccagaaccact

SEQ ID NO: 276697 - DNA, 25 bp, Probe Sequence
tggactactagtcctcaggaccgcc

SEQ ID NO: 276698 - DNA, 25 bp, Probe Sequence
tggactcaagagccctcagcagtcc

SEQ ID NO: 276699 - DNA, 25 bp, Probe Sequence
tggactgggatgccgctagtgaggc

SEQ ID NO: 276700 - DNA, 25 bp, Probe Sequence
tggttgatcctgccagtagcatatg

SEQ ID NO: 276701 - DNA, 25 bp, Probe Sequence
tggaatatgccccattagccaggcc

SEQ ID NO: 276702 - DNA, 25 bp, Probe Sequence
tggaatcagaaccagatgacacatg

SEQ ID NO: 276703 - DNA, 25 bp, Probe Sequence
tggaacgagactcatacacagtcag

SEQ ID NO: 276704 - DNA, 25 bp, Probe Sequence
tggcaactgggtccttacagctgcc

SEQ ID NO: 276705 - DNA, 25 bp, Probe Sequence
tggagctggtagcgcttacgatgcc

SEQ ID NO: 276706 - DNA, 25 bp, Probe Sequence
tggaggcagccagggcttacctgta

SEQ ID NO: 276707 - DNA, 25 bp, Probe Sequence
tggaggtaattggctaaccagccaa

SEQ ID NO: 276708 - DNA, 25 bp, Probe Sequence
tggacgaaatcgactccatcggctc

SEQ ID NO: 276709 - DNA, 25 bp, Probe Sequence
tggacgaccactttgccaaagctct

SEQ ID NO: 276710 - DNA, 25 bp, Probe Sequence
tggatcgaaacctgccagacatgat

SEQ ID NO: 276711 - DNA, 25 bp, Probe Sequence
tggaagaaagcctgccagcggttcc

SEQ ID NO: 276712 - DNA, 25 bp, Probe Sequence
tggacgagggccctcaagggtcatc

SEQ ID NO: 276713 - DNA, 25 bp, Probe Sequence
tggaagctagtgctttagggatatt

SEQ ID NO: 276714 - DNA, 25 bp, Probe Sequence
tggacagctcaggtctgtttgtaaa

SEQ ID NO: 276715 - DNA, 25 bp, Probe Sequence
tggacaggcaccttcgggatcaaag

SEQ ID NO: 276716 - DNA, 25 bp, Probe Sequence
tggaagacctcctgtagatataaga

SEQ ID NO: 276717 - DNA, 25 bp, Probe Sequence
tggaaacactcctctggatgtgatt

SEQ ID NO: 276718 - DNA, 25 bp, Probe Sequence
tggaataattccactgattgtgata

SEQ ID NO: 276719 - DNA, 25 bp, Probe Sequence
tggaatattcccatcatcacagaaa

SEQ ID NO: 276720 - DNA, 25 bp, Probe Sequence
tggaaaacaccagtatagaatagac

SEQ ID NO: 276721 - DNA, 25 bp, Probe Sequence
tggagcaattcaccaattgtaataa

SEQ ID NO: 276722 - DNA, 25 bp, Probe Sequence
tggagcaatctcgcagtgcagtggt

SEQ ID NO: 276723 - DNA, 25 bp, Probe Sequence
tggacaacattgacagtgcctctgt

SEQ ID NO: 276724 - DNA, 25 bp, Probe Sequence
tggaccacttgaccatcacatttca

SEQ ID NO: 276725 - DNA, 25 bp, Probe Sequence
tggaacgatctacctatgttacaga

SEQ ID NO: 276726 - DNA, 25 bp, Probe Sequence
tggagacaccattcacttttactgc

SEQ ID NO: 276727 - DNA, 25 bp, Probe Sequence
tggaggacacaatggacgtagcgcg

SEQ ID NO: 276728 - DNA, 25 bp, Probe Sequence
tgtagcaggataacaggtcttacga

SEQ ID NO: 276729 - DNA, 25 bp, Probe Sequence
tggagaggaatgacggctcggccga

SEQ ID NO: 276730 - DNA, 25 bp, Probe Sequence
tggagctgggtgacgactgtagcct

SEQ ID NO: 276731 - DNA, 25 bp, Probe Sequence
tggaatgggtccgggacacacttcc

SEQ ID NO: 276732 - DNA, 25 bp, Probe Sequence
tgagacttaaccgtgtccaactttt

SEQ ID NO: 276733 - DNA, 25 bp, Probe Sequence
tggagcttaaccatgcctccattgg

SEQ ID NO: 276734 - DNA, 25 bp, Probe Sequence
tggactggcaacaatgttcccaatg

SEQ ID NO: 276735 - DNA, 25 bp, Probe Sequence
tggacagtcatcggatgtcagcccg

SEQ ID NO: 276736 - DNA, 25 bp, Probe Sequence
tggaagctatccaagagcccactgt

SEQ ID NO: 276737 - DNA, 25 bp, Probe Sequence
tggaagctccacaaagcagcagcct

SEQ ID NO: 276738 - DNA, 25 bp, Probe Sequence
tggaactgcacaaactggccactga

SEQ ID NO: 276739 - DNA, 25 bp, Probe Sequence
tggaacaacagatgctgcgcaccat

SEQ ID NO: 276740 - DNA, 25 bp, Probe Sequence
tggaagcaacgttctttccattcac

SEQ ID NO: 276741 - DNA, 25 bp, Probe Sequence
tggaagaagcttgcttcccctacac

SEQ ID NO: 276742 - DNA, 25 bp, Probe Sequence
tggaagaggcagattctccctcaaa

SEQ ID NO: 276743 - DNA, 25 bp, Probe Sequence
tggaagaggtgacgtccgcaccttc

SEQ ID NO: 276744 - DNA, 25 bp, Probe Sequence
tggtagtgtggttgctcacgcaagt

SEQ ID NO: 276745 - DNA, 25 bp, Probe Sequence
tggaatgtgttgatgtgcacagcta

SEQ ID NO: 276746 - DNA, 25 bp, Probe Sequence
tgagcgtgctgactgaatgtgcccg

SEQ ID NO: 276747 - DNA, 25 bp, Probe Sequence
tggatggctgaaacatggacccaaa

SEQ ID NO: 276748 - DNA, 25 bp, Probe Sequence
tggatgacttggaccgagccagcaa

SEQ ID NO: 276749 - DNA, 25 bp, Probe Sequence
tggtgctcaaaggccggccatgtaa

SEQ ID NO: 276750 - DNA, 25 bp, Probe Sequence
tggatgctaacaggggcgccgtaaa

SEQ ID NO: 276751 - DNA, 25 bp, Probe Sequence
tggagtcagagcgagaagcccggag

SEQ ID NO: 276752 - DNA, 25 bp, Probe Sequence
tggatgtcagcgaagagggcacgga

SEQ ID NO: 276753 - DNA, 25 bp, Probe Sequence
tggaatgcactgaataaagcacgtg

SEQ ID NO: 276754 - DNA, 25 bp, Probe Sequence
tggaacctggctaactgcaagctga

SEQ ID NO: 276755 - DNA, 25 bp, Probe Sequence
tggagacactgagaacgccaagggc

SEQ ID NO: 276756 - DNA, 25 bp, Probe Sequence
tggagaccgaggcatacctggggcc

SEQ ID NO: 276757 - DNA, 25 bp, Probe Sequence
tggagaccactgaggacctggtggc

SEQ ID NO: 276758 - DNA, 25 bp, Probe Sequence
tggaagcctgtgagaaccggcggaa

SEQ ID NO: 276759 - DNA, 25 bp, Probe Sequence
tggaacggtttgactcacggggatt

SEQ ID NO: 276760 - DNA, 25 bp, Probe Sequence
tggaacgggagtttcagcgggtcac

SEQ ID NO: 276761 - DNA, 25 bp, Probe Sequence
tggagagggggttgtctttctacac

SEQ ID NO: 276762 - DNA, 25 bp, Probe Sequence
tggatagggtggggtctccatctac

SEQ ID NO: 276763 - DNA, 25 bp, Probe Sequence
tggaaggagtggctgctctccaaac

SEQ ID NO: 276764 - DNA, 25 bp, Probe Sequence
tggaaggatggggactctctcaagg

SEQ ID NO: 276765 - DNA, 25 bp, Probe Sequence
tggaagggggcaagccgctcatgtc

SEQ ID NO: 276766 - DNA, 25 bp, Probe Sequence
tggaatgaggaggagccccactggc

SEQ ID NO: 276767 - DNA, 25 bp, Probe Sequence
tggacataggagggcccgagcagga

SEQ ID NO: 276768 - DNA, 25 bp, Probe Sequence
tggacacagaggtgcccatggagcg

SEQ ID NO: 276769 - DNA, 25 bp, Probe Sequence
tggaaatgcggaagcccatctggtg

SEQ ID NO: 276770 - DNA, 25 bp, Probe Sequence
tgagaagacggtcgaacttgactat

SEQ ID NO: 276771 - DNA, 25 bp, Probe Sequence
tgagaagacggtcgaacttgactat

SEQ ID NO: 276772 - DNA, 25 bp, Probe Sequence
tggaagacgtcttgtagtgctacat

SEQ ID NO: 276773 - DNA, 25 bp, Probe Sequence
tggaagacgtcttgtagtgctacat

SEQ ID NO: 276774 - DNA, 25 bp, Probe Sequence
tggaagaggatcttgctgtcctggc

SEQ ID NO: 276775 - DNA, 25 bp, Probe Sequence
tggagagggaccgctacatgagccc

SEQ ID NO: 276776 - DNA, 25 bp, Probe Sequence
tggacactggacacactagttccca

SEQ ID NO: 276777 - DNA, 25 bp, Probe Sequence
tggaccttgaacccaaattcccaag

SEQ ID NO: 276778 - DNA, 25 bp, Probe Sequence
tggtccctggaaacaaatccgccta

SEQ ID NO: 276779 - DNA, 25 bp, Probe Sequence
tggtccttggtctcaaggctctgga

SEQ ID NO: 276780 - DNA, 25 bp, Probe Sequence
tggacctggcgagcacaaagcctgg

SEQ ID NO: 276781 - DNA, 25 bp, Probe Sequence
tggacctggcgagcacaaagcctgg

SEQ ID NO: 276782 - DNA, 25 bp, Probe Sequence
tggaggtgggggtgaatggtgggga

SEQ ID NO: 276783 - DNA, 25 bp, Probe Sequence
tggaggtggtgcggaaggtggagag

SEQ ID NO: 276784 - DNA, 25 bp, Probe Sequence
tggagagggtatctatgcagggaag

SEQ ID NO: 276785 - DNA, 25 bp, Probe Sequence
tggagacggtgattttgggcctatt

SEQ ID NO: 276786 - DNA, 25 bp, Probe Sequence
tggagagtttgttttgctaccaata

SEQ ID NO: 276787 - DNA, 25 bp, Probe Sequence
tggaagtttgcttctctgagcctca

SEQ ID NO: 276788 - DNA, 25 bp, Probe Sequence
tggaaggagctctctgtgacctagc

SEQ ID NO: 276789 - DNA, 25 bp, Probe Sequence
tggagagtggtcggcaccacctaga

SEQ ID NO: 276790 - DNA, 25 bp, Probe Sequence
tggaagatgaagtccagccacccaa

SEQ ID NO: 276791 - DNA, 25 bp, Probe Sequence
tggaaatagcagtagggcactccta

SEQ ID NO: 276792 - DNA, 25 bp, Probe Sequence
tggagacggcgatggagaccctcat

SEQ ID NO: 276793 - DNA, 25 bp, Probe Sequence
tggaacgaagtaggagtgcaactca

SEQ ID NO: 276794 - DNA, 25 bp, Probe Sequence
tggaacgaagtatgagtgcaactca

SEQ ID NO: 276795 - DNA, 25 bp, Probe Sequence
tggaagccatgaattagaactacat

SEQ ID NO: 276796 - DNA, 25 bp, Probe Sequence
tggataccgcagctaggaataatgg

SEQ ID NO: 276797 - DNA, 25 bp, Probe Sequence
tggttgccgggtcatgttaattggg

SEQ ID NO: 276798 - DNA, 25 bp, Probe Sequence
tggtggacttggggtcctaagtggg

SEQ ID NO: 276799 - DNA, 25 bp, Probe Sequence
tggatcggttggtgccactgaatgg

SEQ ID NO: 276800 - DNA, 25 bp, Probe Sequence
tggacaagttcgtcctgcctatgag

SEQ ID NO: 276801 - DNA, 25 bp, Probe Sequence
tggactgagttccctggattatgga

SEQ ID NO: 276802 - DNA, 25 bp, Probe Sequence
tggtcacagttttgggttcaggcta

SEQ ID NO: 276803 - DNA, 25 bp, Probe Sequence
tggtcacagttttgggttcaggcta

SEQ ID NO: 276804 - DNA, 25 bp, Probe Sequence
tggtcaccttgctgggtagagccta

SEQ ID NO: 276805 - DNA, 25 bp, Probe Sequence
tggtgaccctgctggagaagctggc

SEQ ID NO: 276806 - DNA, 25 bp, Probe Sequence
tggacagtcctgcggaaatgtgtct

SEQ ID NO: 276807 - DNA, 25 bp, Probe Sequence
tggaagtactcaatctgaaagatgt

SEQ ID NO: 276808 - DNA, 25 bp, Probe Sequence
tggacatgtacctgcagaataataa

SEQ ID NO: 276809 - DNA, 25 bp, Probe Sequence
tggacagtacctttcaatgattaat

SEQ ID NO: 276810 - DNA, 25 bp, Probe Sequence
tggaggtcaccaattgcttttcagt

SEQ ID NO: 276811 - DNA, 25 bp, Probe Sequence
tggactgaaccagatgattgtcata

SEQ ID NO: 276812 - DNA, 25 bp, Probe Sequence
tggactgcctccaagatatcagcca

SEQ ID NO: 276813 - DNA, 25 bp, Probe Sequence
tggaccctgccacatatggacagtt

SEQ ID NO: 276814 - DNA, 25 bp, Probe Sequence
tggacccagaacatgtgggcgcctt

SEQ ID NO: 276815 - DNA, 25 bp, Probe Sequence
tggagcacccaagtgtgacgagccc

SEQ ID NO: 276816 - DNA, 25 bp, Probe Sequence
tggacaaccggaatgatctggcccc

SEQ ID NO: 276817 - DNA, 25 bp, Probe Sequence
tggaaactctgattcgactggccac

SEQ ID NO: 276818 - DNA, 25 bp, Probe Sequence
tggaaacatcgcgaggagggacccc

SEQ ID NO: 276819 - DNA, 25 bp, Probe Sequence
tggaaaaccggtgtggcagctctca

SEQ ID NO: 276820 - DNA, 25 bp, Probe Sequence
tggacatggacggcgtcctggccga

SEQ ID NO: 276821 - DNA, 25 bp, Probe Sequence
tggagctggacgggcagtctgtgaa

SEQ ID NO: 276822 - DNA, 25 bp, Probe Sequence
tggacggagatcgagttcatgtaca

SEQ ID NO: 276823 - DNA, 25 bp, Probe Sequence
tggatctgaagactagtaataaact

SEQ ID NO: 276824 - DNA, 25 bp, Probe Sequence
tggacgacagtccatggttaccctt

SEQ ID NO: 276825 - DNA, 25 bp, Probe Sequence
tggacgacagtggctacgtgagcgc

SEQ ID NO: 276826 - DNA, 25 bp, Probe Sequence
tggacagccaggactccattgactc

SEQ ID NO: 276827 - DNA, 25 bp, Probe Sequence
tggacattgtggccaccatgtggct

SEQ ID NO: 276828 - DNA, 25 bp, Probe Sequence
tggactctgaggcatcctatccata

SEQ ID NO: 276829 - DNA, 25 bp, Probe Sequence
tggactctgaggcatcctatccata

SEQ ID NO: 276830 - DNA, 25 bp, Probe Sequence
tggactctgaggcatcctatccata

SEQ ID NO: 276831 - DNA, 25 bp, Probe Sequence
tggactcaggggtcctatttaagga

SEQ ID NO: 276832 - DNA, 25 bp, Probe Sequence
tggacttggggtcctaagtggggag

SEQ ID NO: 276833 - DNA, 25 bp, Probe Sequence
tggacttggcggatcttacagagca

SEQ ID NO: 276834 - DNA, 25 bp, Probe Sequence
tggacgtggcctatgcctatggcaa

SEQ ID NO: 276835 - DNA, 25 bp, Probe Sequence
tggacgttcctaagcagagctcgca

SEQ ID NO: 276836 - DNA, 25 bp, Probe Sequence
tggaaatttccaagagactcacaaa

SEQ ID NO: 276837 - DNA, 25 bp, Probe Sequence
tggaagatccccagacacatgctaa

SEQ ID NO: 276838 - DNA, 25 bp, Probe Sequence
tggaaactccacatcacaattctcc

SEQ ID NO: 276839 - DNA, 25 bp, Probe Sequence
tggtagactaccctaacagtgccaa

SEQ ID NO: 276840 - DNA, 25 bp, Probe Sequence
tggaaactactccgggagctctcac

SEQ ID NO: 276841 - DNA, 25 bp, Probe Sequence
tggaacactaccgggagatcttcga

SEQ ID NO: 276842 - DNA, 25 bp, Probe Sequence
tggagaatgcgagccgggtgttcca

SEQ ID NO: 276843 - DNA, 25 bp, Probe Sequence
tggagaagtgggccggaggctccgc

SEQ ID NO: 276844 - DNA, 25 bp, Probe Sequence
tggagcaaggggactggagcctgtc

SEQ ID NO: 276845 - DNA, 25 bp, Probe Sequence
tggacaagcgggacgtggacttcct

SEQ ID NO: 276846 - DNA, 25 bp, Probe Sequence
tggagacggggaggtggacttccag

SEQ ID NO: 276847 - DNA, 25 bp, Probe Sequence
tggaggcgttggtcctggaagctga

SEQ ID NO: 276848 - DNA, 25 bp, Probe Sequence
tggagactttggtggttcgtaggga

SEQ ID NO: 276849 - DNA, 25 bp, Probe Sequence
tggagtttgtagtgggtggtttgta

SEQ ID NO: 276850 - DNA, 25 bp, Probe Sequence
tggatacttgggttgtgggggctct

SEQ ID NO: 276851 - DNA, 25 bp, Probe Sequence
tggaggcatacgtgtggcgggactt

SEQ ID NO: 276852 - DNA, 25 bp, Probe Sequence
tggagatgtactgagtctggggttt

SEQ ID NO: 276853 - DNA, 25 bp, Probe Sequence
tggaagcctctgtgttggtgtggat

SEQ ID NO: 276854 - DNA, 25 bp, Probe Sequence
tggaagcttccatttttgtgtcaaa

SEQ ID NO: 276855 - DNA, 25 bp, Probe Sequence
tggaacttcacattggtttccccac

SEQ ID NO: 276856 - DNA, 25 bp, Probe Sequence
tggagatcttatatggtagtcccat

SEQ ID NO: 276857 - DNA, 25 bp, Probe Sequence
tggagccaagatatgtggactctct

SEQ ID NO: 276858 - DNA, 25 bp, Probe Sequence
tggagccatgggggttggccactac

SEQ ID NO: 276859 - DNA, 25 bp, Probe Sequence
tggacctggctggccgggacctgac

SEQ ID NO: 276860 - DNA, 25 bp, Probe Sequence
tggacctggctggatgagccgccac

SEQ ID NO: 276861 - DNA, 25 bp, Probe Sequence
tggaccgtggatagcacagcggcct

SEQ ID NO: 276862 - DNA, 25 bp, Probe Sequence
tggactgctgtggactccactgatg

SEQ ID NO: 276863 - DNA, 25 bp, Probe Sequence
tggagctgctattgcatcaacctct

SEQ ID NO: 276864 - DNA, 25 bp, Probe Sequence
tggagtgctatgcagacctgtctgt

SEQ ID NO: 276865 - DNA, 25 bp, Probe Sequence
tggactggctgccagccagcgacgg

SEQ ID NO: 276866 - DNA, 25 bp, Probe Sequence
tggagttgctccgcagatacttgga

SEQ ID NO: 276867 - DNA, 25 bp, Probe Sequence
tggagaggtcacggagatgcccgcc

SEQ ID NO: 276868 - DNA, 25 bp, Probe Sequence
tggagggtaggggatctgcttccca

SEQ ID NO: 276869 - DNA, 25 bp, Probe Sequence
tggacagcttcaaggaattgtctcc

SEQ ID NO: 276870 - DNA, 25 bp, Probe Sequence
tggacaagctgcgggactttgtggc

SEQ ID NO: 276871 - DNA, 25 bp, Probe Sequence
tggaacagtgcgagtgcttcggggg

SEQ ID NO: 276872 - DNA, 25 bp, Probe Sequence
tggagacagaggtggcttccgtggt

SEQ ID NO: 276873 - DNA, 25 bp, Probe Sequence
tggagacagaggtggcttccgtggt

SEQ ID NO: 276874 - DNA, 25 bp, Probe Sequence
tggagacagaggtggcttccgtggt

SEQ ID NO: 276875 - DNA, 25 bp, Probe Sequence
tggggatggggtcatcccagggctg

SEQ ID NO: 276876 - DNA, 25 bp, Probe Sequence
tggggatggggtcatcccagggctg

SEQ ID NO: 276877 - DNA, 25 bp, Probe Sequence
tggggatggggtcatcccagggctg

SEQ ID NO: 276878 - DNA, 25 bp, Probe Sequence
tggggtgggggccaaaaggacagag

SEQ ID NO: 276879 - DNA, 25 bp, Probe Sequence
tggaaaggactccggaaaggccaag

SEQ ID NO: 276880 - DNA, 25 bp, Probe Sequence
tggaacgtgtcccaggtactggcca

SEQ ID NO: 276881 - DNA, 25 bp, Probe Sequence
tggaacaggtccgactttcgaggca

SEQ ID NO: 276882 - DNA, 25 bp, Probe Sequence
tggataatgcttccgccttccaagg

SEQ ID NO: 276883 - DNA, 25 bp, Probe Sequence
tggagacagtttccatcattccagc

SEQ ID NO: 276884 - DNA, 25 bp, Probe Sequence
tggaaagtcttggagctccacaccc

SEQ ID NO: 276885 - DNA, 25 bp, Probe Sequence
tggacaaactgacagtcacctccca

SEQ ID NO: 276886 - DNA, 25 bp, Probe Sequence
tggatcagtaagtctggttcccgcc

SEQ ID NO: 276887 - DNA, 25 bp, Probe Sequence
tgttttagagttcttccctggaatc

SEQ ID NO: 276888 - DNA, 25 bp, Probe Sequence
tggttgtcgggacattccactggtt

SEQ ID NO: 276889 - DNA, 25 bp, Probe Sequence
tggtgattcgggttttggccaagtt

SEQ ID NO: 276890 - DNA, 25 bp, Probe Sequence
tggaggtcaggtctttgaggccagc

SEQ ID NO: 276891 - DNA, 25 bp, Probe Sequence
tggaggtgggtgcttgtagttccag

SEQ ID NO: 276892 - DNA, 25 bp, Probe Sequence
tggagaaggcgtcttgctttgtcac

SEQ ID NO: 276893 - DNA, 25 bp, Probe Sequence
tgaggaaacgatctccctattccct

SEQ ID NO: 276894 - DNA, 25 bp, Probe Sequence
tcggaaaagtttgccttccaagccg

SEQ ID NO: 276895 - DNA, 25 bp, Probe Sequence
tggaaacaagtttgtccgtccactc

SEQ ID NO: 276896 - DNA, 25 bp, Probe Sequence
tggaaaaacccattccttccaagct

SEQ ID NO: 276897 - DNA, 25 bp, Probe Sequence
tggaaacaatcatcagatccttgcc

SEQ ID NO: 276898 - DNA, 25 bp, Probe Sequence
tggaaaagcacttgccatctctgtc

SEQ ID NO: 276899 - DNA, 25 bp, Probe Sequence
tggaaaggcacttgcctctgcactt

SEQ ID NO: 276900 - DNA, 25 bp, Probe Sequence
tggaaatgtgttagcctcagacact

SEQ ID NO: 276901 - DNA, 25 bp, Probe Sequence
tggagaagctttacgatcaggacaa

SEQ ID NO: 276902 - DNA, 25 bp, Probe Sequence
tggagaagctttacgatcaggacaa

SEQ ID NO: 276903 - DNA, 25 bp, Probe Sequence
tggatatacttctggtcagtagcca

SEQ ID NO: 276904 - DNA, 25 bp, Probe Sequence
tggatatgacccccaaagtcaccag

SEQ ID NO: 276905 - DNA, 25 bp, Probe Sequence
tggagatgacccccttagaagatgg

SEQ ID NO: 276906 - DNA, 25 bp, Probe Sequence
tggaggctcccttcattagaattgt

SEQ ID NO: 276907 - DNA, 25 bp, Probe Sequence
tggagcctctgtggccttaaatgtg

SEQ ID NO: 276908 - DNA, 25 bp, Probe Sequence
tggacaatctcaggttctcagaatt

SEQ ID NO: 276909 - DNA, 25 bp, Probe Sequence
tggaaaccaggaactctggagttca

SEQ ID NO: 276910 - DNA, 25 bp, Probe Sequence
tgaaagcccaggcacttcgggacaa

SEQ ID NO: 276911 - DNA, 25 bp, Probe Sequence
tgtacgcccagggaaagcggcgtta

SEQ ID NO: 276912 - DNA, 25 bp, Probe Sequence
tggacgccacaggggcaagagggtg

SEQ ID NO: 276913 - DNA, 25 bp, Probe Sequence
tgtggactcaagtggaaagaaatgc

SEQ ID NO: 276914 - DNA, 25 bp, Probe Sequence
tgtgtcattaagtgcagaaataact

SEQ ID NO: 276915 - DNA, 25 bp, Probe Sequence
tggtactcaagggaaactacagcca

SEQ ID NO: 276916 - DNA, 25 bp, Probe Sequence
tggatacccaagaggcatccacacc

SEQ ID NO: 276917 - DNA, 25 bp, Probe Sequence
tggatccatcaatgatccctctgcc

SEQ ID NO: 276918 - DNA, 25 bp, Probe Sequence
tggacgcacatttgatgcccagata

SEQ ID NO: 276919 - DNA, 25 bp, Probe Sequence
tggactgttctttccgcagatatcc

SEQ ID NO: 276920 - DNA, 25 bp, Probe Sequence
tggactgttgccacagtgcagtgac

SEQ ID NO: 276921 - DNA, 25 bp, Probe Sequence
tggactggtgtcctatggagatatt

SEQ ID NO: 276922 - DNA, 25 bp, Probe Sequence
tggacaggcggccctggatgtttat

SEQ ID NO: 276923 - DNA, 25 bp, Probe Sequence
tggagcggggcgccagtgaattaat

SEQ ID NO: 276924 - DNA, 25 bp, Probe Sequence
tggacgagcgtccgcatgctaatcg

SEQ ID NO: 276925 - DNA, 25 bp, Probe Sequence
tggagagctgtgaccgcatcaaaca

SEQ ID NO: 276926 - DNA, 25 bp, Probe Sequence
tggaaagagtgccagtcagcagtca

SEQ ID NO: 276927 - DNA, 25 bp, Probe Sequence
tggacacagaggtgctgaccatcaa

SEQ ID NO: 276928 - DNA, 25 bp, Probe Sequence
tggaaatgaaccatgatcccaatcc

SEQ ID NO: 276929 - DNA, 25 bp, Probe Sequence
tggaaaacatccagatccctgacgc

SEQ ID NO: 276930 - DNA, 25 bp, Probe Sequence
tggttacaactctgaacctatcctc

SEQ ID NO: 276931 - DNA, 25 bp, Probe Sequence
tggttcgaggtgtacaacgccacgc

SEQ ID NO: 276932 - DNA, 25 bp, Probe Sequence
tggtcctggggaccattcataccca

SEQ ID NO: 276933 - DNA, 25 bp, Probe Sequence
tggagccaggagcgttatcaacgca

SEQ ID NO: 276934 - DNA, 25 bp, Probe Sequence
tggacgaggcggcgtacaagcacag

SEQ ID NO: 276935 - DNA, 25 bp, Probe Sequence
tggacgaaggaacaacacacacaca

SEQ ID NO: 276936 - DNA, 25 bp, Probe Sequence
tgggcaaagggaagtaacagacaca

SEQ ID NO: 276937 - DNA, 25 bp, Probe Sequence
tggaaatcatggcaactacacagga

SEQ ID NO: 276938 - DNA, 25 bp, Probe Sequence
tggagaatactgcaactatcctctg

SEQ ID NO: 276939 - DNA, 25 bp, Probe Sequence
tggaaacgtggaactatctcttttt

SEQ ID NO: 276940 - DNA, 25 bp, Probe Sequence
tggaaaagtgttccttgctctcttg

SEQ ID NO: 276941 - DNA, 25 bp, Probe Sequence
tggaaatagtgactcttgcccttct

SEQ ID NO: 276942 - DNA, 25 bp, Probe Sequence
tggttatttactcatgtgccttcaa

SEQ ID NO: 276943 - DNA, 25 bp, Probe Sequence
tggagtatttaccggtgtgctgccc

SEQ ID NO: 276944 - DNA, 25 bp, Probe Sequence
tggtctttcgcactcaggtgatgga

SEQ ID NO: 276945 - DNA, 25 bp, Probe Sequence
tggtatgcttacctgggcttgtgta

SEQ ID NO: 276946 - DNA, 25 bp, Probe Sequence
tggtatgcttacctgggcttgtgta

SEQ ID NO: 276947 - DNA, 25 bp, Probe Sequence
tggtctttacctaggctgtgtttcc

SEQ ID NO: 276948 - DNA, 25 bp, Probe Sequence
tggatttttggtgggcattattcta

SEQ ID NO: 276949 - DNA, 25 bp, Probe Sequence
tggatgacatttccagccgcatttt

SEQ ID NO: 276950 - DNA, 25 bp, Probe Sequence
tggataatcttgccccagattctag

SEQ ID NO: 276951 - DNA, 25 bp, Probe Sequence
tggtttcttgctagccaaatcattg

SEQ ID NO: 276952 - DNA, 25 bp, Probe Sequence
tggagatgtcctctccactttatcc

SEQ ID NO: 276953 - DNA, 25 bp, Probe Sequence
tggagaccctcatcaacgtgttcca

SEQ ID NO: 276954 - DNA, 25 bp, Probe Sequence
tggacgccctgcacaaggtgggcca

SEQ ID NO: 276955 - DNA, 25 bp, Probe Sequence
tggatgcccgtcaccaagttgggcc

SEQ ID NO: 276956 - DNA, 25 bp, Probe Sequence
tggagcccctgcgacagaagttggc

SEQ ID NO: 276957 - DNA, 25 bp, Probe Sequence
tggagaacctgcgcatgaagcttcc

SEQ ID NO: 276958 - DNA, 25 bp, Probe Sequence
tggagaaccggatgaagcagctctc

SEQ ID NO: 276959 - DNA, 25 bp, Probe Sequence
tggaaagccaggacacaacgctgct

SEQ ID NO: 276960 - DNA, 25 bp, Probe Sequence
tggaaagccaggacacaacgctgct

SEQ ID NO: 276961 - DNA, 25 bp, Probe Sequence
tggataagccagccaactgcaccaa

SEQ ID NO: 276962 - DNA, 25 bp, Probe Sequence
tggaaacagcggctcttcatcatca

SEQ ID NO: 276963 - DNA, 25 bp, Probe Sequence
tggaaacagcggctcttcatcatca

SEQ ID NO: 276964 - DNA, 25 bp, Probe Sequence
tggaaacagcggctcttcatcatca

SEQ ID NO: 276965 - DNA, 25 bp, Probe Sequence
tggaaacagcggctcttcatcatca

SEQ ID NO: 276966 - DNA, 25 bp, Probe Sequence
tggagggggagactcttcacacatt

SEQ ID NO: 276967 - DNA, 25 bp, Probe Sequence
tggagggggcaagctttgctccttc

SEQ ID NO: 276968 - DNA, 25 bp, Probe Sequence
tggagggggaatgtgtgctggccag

SEQ ID NO: 276969 - DNA, 25 bp, Probe Sequence
tggaggcggtagtggtcgtgcctgt

SEQ ID NO: 276970 - DNA, 25 bp, Probe Sequence
tggacgtgaccatgggaactgcctg

SEQ ID NO: 276971 - DNA, 25 bp, Probe Sequence
tggacatctgcggcgagggaactcc

SEQ ID NO: 276972 - DNA, 25 bp, Probe Sequence
tggacacagcagtccgcggaattcc

SEQ ID NO: 276973 - DNA, 25 bp, Probe Sequence
tgaccaaagccaggtgggttccctt

SEQ ID NO: 276974 - DNA, 25 bp, Probe Sequence
tggacacaactggggagcgttctcc

SEQ ID NO: 276975 - DNA, 25 bp, Probe Sequence
tggacacaactggggagcgttctcc

SEQ ID NO: 276976 - DNA, 25 bp, Probe Sequence
tggaaatcctctaggaggctcctcc

SEQ ID NO: 276977 - DNA, 25 bp, Probe Sequence
tggaaatacctcaaagctgctccct

SEQ ID NO: 276978 - DNA, 25 bp, Probe Sequence
tggacacacgctgcatagagctctc

SEQ ID NO: 276979 - DNA, 25 bp, Probe Sequence
tggacacacgccatgaggtcacggc

SEQ ID NO: 276980 - DNA, 25 bp, Probe Sequence
tggacaccagctgggggatccaggg

SEQ ID NO: 276981 - DNA, 25 bp, Probe Sequence
tggacaccagcagcggtgtcctgct

SEQ ID NO: 276982 - DNA, 25 bp, Probe Sequence
tggtcaccagcatcgggcagctggt

SEQ ID NO: 276983 - DNA, 25 bp, Probe Sequence
tggagattgcgcacgagaagctgag

SEQ ID NO: 276984 - DNA, 25 bp, Probe Sequence
tggactctgcctggtgatagactga

SEQ ID NO: 276985 - DNA, 25 bp, Probe Sequence
tggactctgcctgggctggagtcta

SEQ ID NO: 276986 - DNA, 25 bp, Probe Sequence
tggactctgcctgggctggagtcta

SEQ ID NO: 276987 - DNA, 25 bp, Probe Sequence
tggactctgcctgggctggagtcta

SEQ ID NO: 276988 - DNA, 25 bp, Probe Sequence
tggactcgatcttggagggtgcagc

SEQ ID NO: 276989 - DNA, 25 bp, Probe Sequence
tggacacagtgcccgtgtcggagcc

SEQ ID NO: 276990 - DNA, 25 bp, Probe Sequence
tgtgctaccagcccggaaagacact

SEQ ID NO: 276991 - DNA, 25 bp, Probe Sequence
tgtgataaccgtggcgaaagtcttg

SEQ ID NO: 276992 - DNA, 25 bp, Probe Sequence
tgatgtaacggtttaatacctttga

SEQ ID NO: 276993 - DNA, 25 bp, Probe Sequence
tgtgttaaggtatatattctatttg

SEQ ID NO: 276994 - DNA, 25 bp, Probe Sequence
tggtcaaaggttaaatttatctcta

SEQ ID NO: 276995 - DNA, 25 bp, Probe Sequence
tggtatgtagagcttagatttccct

SEQ ID NO: 276996 - DNA, 25 bp, Probe Sequence
tggttggcgtccttgtatttaccca

SEQ ID NO: 276997 - DNA, 25 bp, Probe Sequence
tggttagttcaatttttgatcccct

SEQ ID NO: 276998 - DNA, 25 bp, Probe Sequence
tggttatttaaagagaattccctat

SEQ ID NO: 276999 - DNA, 25 bp, Probe Sequence
tggtattcttaagggaacttccaca

SEQ ID NO: 277000 - DNA, 25 bp, Probe Sequence
tggttttgaacattgtaagttccta

SEQ ID NO: 277001 - DNA, 25 bp, Probe Sequence
tggttaaaatcatgtttgtggccga

SEQ ID NO: 277002 - DNA, 25 bp, Probe Sequence
tggttataataagttttgtggttcg

SEQ ID NO: 277003 - DNA, 25 bp, Probe Sequence
tggttagctctttgttttggggtgc

SEQ ID NO: 277004 - DNA, 25 bp, Probe Sequence
tggtcattccttttagtggggcctt

SEQ ID NO: 277005 - DNA, 25 bp, Probe Sequence
tggatctccctttaaagtgacccta

SEQ ID NO: 277006 - DNA, 25 bp, Probe Sequence
tggattcccttatacagtgtccgat

SEQ ID NO: 277007 - DNA, 25 bp, Probe Sequence
tggattcccttatacagtgtccgat

SEQ ID NO: 277008 - DNA, 25 bp, Probe Sequence
tggatctccgtaaacacatttttgt

SEQ ID NO: 277009 - DNA, 25 bp, Probe Sequence
tggttacagtcaaaatcatcttcga

SEQ ID NO: 277010 - DNA, 25 bp, Probe Sequence
tggaaatcccatcaccatcttccag

SEQ ID NO: 277011 - DNA, 25 bp, Probe Sequence
tggagaatccactcacgttcataag

SEQ ID NO: 277012 - DNA, 25 bp, Probe Sequence
tgtgtatatacctcaagttcaagtt

SEQ ID NO: 277013 - DNA, 25 bp, Probe Sequence
tggagttaccttggtgttcccattg

SEQ ID NO: 277014 - DNA, 25 bp, Probe Sequence
tggactctactttgggtcccagatg

SEQ ID NO: 277015 - DNA, 25 bp, Probe Sequence
tggatcttttgacgtggttcacgtg

SEQ ID NO: 277016 - DNA, 25 bp, Probe Sequence
tggatgtctttgctgcagtcttctc

SEQ ID NO: 277017 - DNA, 25 bp, Probe Sequence
tggatgtctttgctgcagtcttctc

SEQ ID NO: 277018 - DNA, 25 bp, Probe Sequence
tggatgtctttgctgcagtcttctc

SEQ ID NO: 277019 - DNA, 25 bp, Probe Sequence
tggagctattttccaggcttctgct

SEQ ID NO: 277020 - DNA, 25 bp, Probe Sequence
tggaggaagattcccctttgtagcc

SEQ ID NO: 277021 - DNA, 25 bp, Probe Sequence
tggaggaagtggcaccaagctcccc

SEQ ID NO: 277022 - DNA, 25 bp, Probe Sequence
tggaggagtggactagccggtcccc

SEQ ID NO: 277023 - DNA, 25 bp, Probe Sequence
tggaggaggagtgagccggatgccc

SEQ ID NO: 277024 - DNA, 25 bp, Probe Sequence
tggaggtggagttcaggagagagga

SEQ ID NO: 277025 - DNA, 25 bp, Probe Sequence
tggaggtggaaattggcagaactac

SEQ ID NO: 277026 - DNA, 25 bp, Probe Sequence
tggagggtcaaatttaccctggcca

SEQ ID NO: 277027 - DNA, 25 bp, Probe Sequence
tggagggtcaaatttaccctggcca

SEQ ID NO: 277028 - DNA, 25 bp, Probe Sequence
tggaggagttgttgttaggccgtcc

SEQ ID NO: 277029 - DNA, 25 bp, Probe Sequence
tggggcctcaatctaaggccttccc

SEQ ID NO: 277030 - DNA, 25 bp, Probe Sequence
tggggcctcaatctaaggccttccc

SEQ ID NO: 277031 - DNA, 25 bp, Probe Sequence
tgggtcccaatgatcaatacaagtt

SEQ ID NO: 277032 - DNA, 25 bp, Probe Sequence
tggttggcaaagaccggtcaagttt

SEQ ID NO: 277033 - DNA, 25 bp, Probe Sequence
tggtcgggaatacctgggaagtttg

SEQ ID NO: 277034 - DNA, 25 bp, Probe Sequence
tggtcgggaggagcgaggggcccgc

SEQ ID NO: 277035 - DNA, 25 bp, Probe Sequence
tggttgggccggggctgaggaggcc

SEQ ID NO: 277036 - DNA, 25 bp, Probe Sequence
tggttgctggatttggtcgcaaagg

SEQ ID NO: 277037 - DNA, 25 bp, Probe Sequence
tggagtgtgtatgttcccagtgaca

SEQ ID NO: 277038 - DNA, 25 bp, Probe Sequence
tggagaggctgaggttgcgccacta

SEQ ID NO: 277039 - DNA, 25 bp, Probe Sequence
tggacatggcagttgttgctccacc

SEQ ID NO: 277040 - DNA, 25 bp, Probe Sequence
tggagccatcagtgtgtatcagccc

SEQ ID NO: 277041 - DNA, 25 bp, Probe Sequence
tgtccacatcagggtttacttcccc

SEQ ID NO: 277042 - DNA, 25 bp, Probe Sequence
tggacacacagtgtcttcctgtttc

SEQ ID NO: 277043 - DNA, 25 bp, Probe Sequence
tggaccacagtgacttatttgtagt

SEQ ID NO: 277044 - DNA, 25 bp, Probe Sequence
tggtaactgcatacttgttgtttgg

SEQ ID NO: 277045 - DNA, 25 bp, Probe Sequence
tgtgttacttttattatttggatgt

SEQ ID NO: 277046 - DNA, 25 bp, Probe Sequence
tggtatcaaagtactttacttgggt

SEQ ID NO: 277047 - DNA, 25 bp, Probe Sequence
tggagtaatggtacttttattcttt

SEQ ID NO: 277048 - DNA, 25 bp, Probe Sequence
tggatgatccacgtttttgtttttt

SEQ ID NO: 277049 - DNA, 25 bp, Probe Sequence
tggtttacttctttagcatttttat

SEQ ID NO: 277050 - DNA, 25 bp, Probe Sequence
tggtttgttactgtagcacttttta

SEQ ID NO: 277051 - DNA, 25 bp, Probe Sequence
tggtatatttcctctaggttttgct

SEQ ID NO: 277052 - DNA, 25 bp, Probe Sequence
tggttcttctacttcttttatttct

SEQ ID NO: 277053 - DNA, 25 bp, Probe Sequence
tggacttacatttccttttttacat

SEQ ID NO: 277054 - DNA, 25 bp, Probe Sequence
tggacacaaactatcctttctccac

SEQ ID NO: 277055 - DNA, 25 bp, Probe Sequence
tggatacacacataacctccttcca

SEQ ID NO: 277056 - DNA, 25 bp, Probe Sequence
tggacaacatagtaataccctctct

SEQ ID NO: 277057 - DNA, 25 bp, Probe Sequence
tggaccatatacaaacaacactctt

SEQ ID NO: 277058 - DNA, 25 bp, Probe Sequence
tggaggatctgacaacaaactgatt

SEQ ID NO: 277059 - DNA, 25 bp, Probe Sequence
tggaccatggaggagacaagaagta

SEQ ID NO: 277060 - DNA, 25 bp, Probe Sequence
tggagcacaatgtaagacaaaagga

SEQ ID NO: 277061 - DNA, 25 bp, Probe Sequence
tggagcctgtcccagaacaagagcg

SEQ ID NO: 277062 - DNA, 25 bp, Probe Sequence
tggacagctttcctaacaagagatt

SEQ ID NO: 277063 - DNA, 25 bp, Probe Sequence
tggacagttcgcttctacacaagaa

SEQ ID NO: 277064 - DNA, 25 bp, Probe Sequence
tggagatttcctttacagatataca

SEQ ID NO: 277065 - DNA, 25 bp, Probe Sequence
tggagtcagagtattcatcgaaaag

SEQ ID NO: 277066 - DNA, 25 bp, Probe Sequence
tggagtcagagtattcatcgaaaag

SEQ ID NO: 277067 - DNA, 25 bp, Probe Sequence
tgggtgatctgcttttatctaaatg

SEQ ID NO: 277068 - DNA, 25 bp, Probe Sequence
tggactgttgccaccatgtattcat

SEQ ID NO: 277069 - DNA, 25 bp, Probe Sequence
tggactgcgtctaggtcatgtgatt

SEQ ID NO: 277070 - DNA, 25 bp, Probe Sequence
tggagtactccagtgtcatgtcata

SEQ ID NO: 277071 - DNA, 25 bp, Probe Sequence
tggtatacccaggtcatttcctcac

SEQ ID NO: 277072 - DNA, 25 bp, Probe Sequence
tggactatccgaagagatccacccc

SEQ ID NO: 277073 - DNA, 25 bp, Probe Sequence
tggacttcgagcaagagatggccac

SEQ ID NO: 277074 - DNA, 25 bp, Probe Sequence
tggacgtggatgaggctggcaccga

SEQ ID NO: 277075 - DNA, 25 bp, Probe Sequence
tggagcagtcggccgacggacataa

SEQ ID NO: 277076 - DNA, 25 bp, Probe Sequence
tggagcatggctgggcgacagcgtc

SEQ ID NO: 277077 - DNA, 25 bp, Probe Sequence
tggagcaggctaggctggggctcat

SEQ ID NO: 277078 - DNA, 25 bp, Probe Sequence
tggactgagaagcatcgaggctata

SEQ ID NO: 277079 - DNA, 25 bp, Probe Sequence
tggactagctacctggacataatat

SEQ ID NO: 277080 - DNA, 25 bp, Probe Sequence
tggacagacaaccgtgacatcagca

SEQ ID NO: 277081 - DNA, 25 bp, Probe Sequence
tggacagcacaagccatggaagccc

SEQ ID NO: 277082 - DNA, 25 bp, Probe Sequence
tggacggcaagtccgtctagctcac

SEQ ID NO: 277083 - DNA, 25 bp, Probe Sequence
tggaccagaagtctctctgggcagg

SEQ ID NO: 277084 - DNA, 25 bp, Probe Sequence
tggacctgaagatcatccagcccga

SEQ ID NO: 277085 - DNA, 25 bp, Probe Sequence
tggatcaggaaggtcaccggccgat

SEQ ID NO: 277086 - DNA, 25 bp, Probe Sequence
tggatgaggcagagtaccgggacat

SEQ ID NO: 277087 - DNA, 25 bp, Probe Sequence
tggaggcgcacaaataccggaacac

SEQ ID NO: 277088 - DNA, 25 bp, Probe Sequence
tggaccccaagttcctgaggaacat

SEQ ID NO: 277089 - DNA, 25 bp, Probe Sequence
tggaccccaaggacatcgatgatga

SEQ ID NO: 277090 - DNA, 25 bp, Probe Sequence
tggacagcaccttggtgccagtgat

SEQ ID NO: 277091 - DNA, 25 bp, Probe Sequence
tggactgatcctattcacagcttcc

SEQ ID NO: 277092 - DNA, 25 bp, Probe Sequence
tggatcagatccccttcaaggacat

SEQ ID NO: 277093 - DNA, 25 bp, Probe Sequence
tggagcaattcttcttctgcaacct

SEQ ID NO: 277094 - DNA, 25 bp, Probe Sequence
tggagcaattcttcttctgcaacct

SEQ ID NO: 277095 - DNA, 25 bp, Probe Sequence
tggagaatggctggtctcctactcc

SEQ ID NO: 277096 - DNA, 25 bp, Probe Sequence
tggagaatggctggtctcctactcc

SEQ ID NO: 277097 - DNA, 25 bp, Probe Sequence
tggaggagagctttgtgcctgttgc

SEQ ID NO: 277098 - DNA, 25 bp, Probe Sequence
tggatgggtattaaactcttcaggc

SEQ ID NO: 277099 - DNA, 25 bp, Probe Sequence
tggttactaatcacctcttctgtca

SEQ ID NO: 277100 - DNA, 25 bp, Probe Sequence
tggaccttatataacatactttgta

SEQ ID NO: 277101 - DNA, 25 bp, Probe Sequence
tggaccggagtctgctgagtttata

SEQ ID NO: 277102 - DNA, 25 bp, Probe Sequence
tggaccgggacattgccctgatgaa

SEQ ID NO: 277103 - DNA, 25 bp, Probe Sequence
tggagcgggtgtttgtgcgcatgga

SEQ ID NO: 277104 - DNA, 25 bp, Probe Sequence
tggagcgtgtggaaggtgcccagca

SEQ ID NO: 277105 - DNA, 25 bp, Probe Sequence
tggaggaggaaacgtccagcaccga

SEQ ID NO: 277106 - DNA, 25 bp, Probe Sequence
tggatggggacacggtcacatcctc

SEQ ID NO: 277107 - DNA, 25 bp, Probe Sequence
tggaggtgcgcagtggactcacagc

SEQ ID NO: 277108 - DNA, 25 bp, Probe Sequence
tggagagagccagtctgatccagaa

SEQ ID NO: 277109 - DNA, 25 bp, Probe Sequence
tggagaaggacttcagcagcatgaa

SEQ ID NO: 277110 - DNA, 25 bp, Probe Sequence
tggagacaggctggactcagctaca

SEQ ID NO: 277111 - DNA, 25 bp, Probe Sequence
tggagaacgctggcagtcacctcca

SEQ ID NO: 277112 - DNA, 25 bp, Probe Sequence
tggagtccactggcgtcttcaccac

SEQ ID NO: 277113 - DNA, 25 bp, Probe Sequence
tgtgcagtctttaggacttcccatc

SEQ ID NO: 277114 - DNA, 25 bp, Probe Sequence
tggttgctctattggactaccgtga

SEQ ID NO: 277115 - DNA, 25 bp, Probe Sequence
tggttttctgaccacgactttgcag

SEQ ID NO: 277116 - DNA, 25 bp, Probe Sequence
tggtatcaccgaggaaaccttgccc

SEQ ID NO: 277117 - DNA, 25 bp, Probe Sequence
tggatttccagacaacatccggccc

SEQ ID NO: 277118 - DNA, 25 bp, Probe Sequence
tggaggacaaactgaaccggcacct

SEQ ID NO: 277119 - DNA, 25 bp, Probe Sequence
tggaggaacagaaacaaccccagtt

SEQ ID NO: 277120 - DNA, 25 bp, Probe Sequence
tgagaggggacaaaacccaccttgt

SEQ ID NO: 277121 - DNA, 25 bp, Probe Sequence
tggagtttaatgccaaccacccttt

SEQ ID NO: 277122 - DNA, 25 bp, Probe Sequence
tggatttttagcaaaaatgcccttt

SEQ ID NO: 277123 - DNA, 25 bp, Probe Sequence
tggttttcgaaactaatcaaatatt

SEQ ID NO: 277124 - DNA, 25 bp, Probe Sequence
tgggtttccttattgaaaaatcagt

SEQ ID NO: 277125 - DNA, 25 bp, Probe Sequence
tggactttatatatctaaacataca

SEQ ID NO: 277126 - DNA, 25 bp, Probe Sequence
tggactttgctcactaaagtttgaa

SEQ ID NO: 277127 - DNA, 25 bp, Probe Sequence
tggacttttcaactactttctctac

SEQ ID NO: 277128 - DNA, 25 bp, Probe Sequence
tggactttgtcatggcactcatcta

SEQ ID NO: 277129 - DNA, 25 bp, Probe Sequence
tggacctactaggtgactgctgctg

SEQ ID NO: 277130 - DNA, 25 bp, Probe Sequence
tggacctgcatggtgttggtggctt

SEQ ID NO: 277131 - DNA, 25 bp, Probe Sequence
tggagccgctgtggacaggtttctg

SEQ ID NO: 277132 - DNA, 25 bp, Probe Sequence
tggatgccagcgtgtaggtatctcc

SEQ ID NO: 277133 - DNA, 25 bp, Probe Sequence
tggaccccaagaacatgtttgccat

SEQ ID NO: 277134 - DNA, 25 bp, Probe Sequence
tggaccctggtgggcattgtgtcct

SEQ ID NO: 277135 - DNA, 25 bp, Probe Sequence
tggactcttcagtctggagggtcct

SEQ ID NO: 277136 - DNA, 25 bp, Probe Sequence
tggaccttgcagccgcaatggattc

SEQ ID NO: 277137 - DNA, 25 bp, Probe Sequence
tggacctcatggcccacatggcctc

SEQ ID NO: 277138 - DNA, 25 bp, Probe Sequence
tgtgagccaccttggcaagtgcctg

SEQ ID NO: 277139 - DNA, 25 bp, Probe Sequence
tgtagctgccgtccagaagtcggca

SEQ ID NO: 277140 - DNA, 25 bp, Probe Sequence
tggactgcgctggacgatagcttgg

SEQ ID NO: 277141 - DNA, 25 bp, Probe Sequence
tggatccctggggaagctgctttgt

SEQ ID NO: 277142 - DNA, 25 bp, Probe Sequence
tggatgccctggaggacagcttgga

SEQ ID NO: 277143 - DNA, 25 bp, Probe Sequence
tggatgccctggaggacagcttgga

SEQ ID NO: 277144 - DNA, 25 bp, Probe Sequence
tggatgtccttgtgagtcactctgg

SEQ ID NO: 277145 - DNA, 25 bp, Probe Sequence
tggagtcctttatctaccagagcct

SEQ ID NO: 277146 - DNA, 25 bp, Probe Sequence
tggagtcttctttcaaaccagtggg

SEQ ID NO: 277147 - DNA, 25 bp, Probe Sequence
tggggacgttcctaaacactgaggg

SEQ ID NO: 277148 - DNA, 25 bp, Probe Sequence
tggaggccgtgtccaaagactttgc

SEQ ID NO: 277149 - DNA, 25 bp, Probe Sequence
tggaggccgaacgtcaggagcgggc

SEQ ID NO: 277150 - DNA, 25 bp, Probe Sequence
tggactccgacgaccagtggggaga

SEQ ID NO: 277151 - DNA, 25 bp, Probe Sequence
tggagcaccggatccgtgaggagca

SEQ ID NO: 277152 - DNA, 25 bp, Probe Sequence
tggagagaagcactacagttgtcaa

SEQ ID NO: 277153 - DNA, 25 bp, Probe Sequence
tggagaatgacactcggcagaggcg

SEQ ID NO: 277154 - DNA, 25 bp, Probe Sequence
tggatatcatacatggtcagagaag

SEQ ID NO: 277155 - DNA, 25 bp, Probe Sequence
tggagtctgcactgtgtatggcaaa

SEQ ID NO: 277156 - DNA, 25 bp, Probe Sequence
tggactcatccatttgtgaggagga

SEQ ID NO: 277157 - DNA, 25 bp, Probe Sequence
tggactgctgtacatcaaggacaga

SEQ ID NO: 277158 - DNA, 25 bp, Probe Sequence
tggactctctagcaacatcaatcaa

SEQ ID NO: 277159 - DNA, 25 bp, Probe Sequence
tggtcatcttgacccccaaagagcc

SEQ ID NO: 277160 - DNA, 25 bp, Probe Sequence
tgagacatagtacaccccaatggcc

SEQ ID NO: 277161 - DNA, 25 bp, Probe Sequence
tggagcataggtcacacgccagagg

SEQ ID NO: 277162 - DNA, 25 bp, Probe Sequence
tggagcagaatttatcacacacaaa

SEQ ID NO: 277163 - DNA, 25 bp, Probe Sequence
tggactgattttgcctcacattaaa

SEQ ID NO: 277164 - DNA, 25 bp, Probe Sequence
tggattacttttgctcaattaaata

SEQ ID NO: 277165 - DNA, 25 bp, Probe Sequence
tggagtactgtttcttccttcaaac

SEQ ID NO: 277166 - DNA, 25 bp, Probe Sequence
tggagtacggcttccaggttaaggt

SEQ ID NO: 277167 - DNA, 25 bp, Probe Sequence
tggagtgacggaactgcagtgcctt

SEQ ID NO: 277168 - DNA, 25 bp, Probe Sequence
tggtagaaccacttggctgctcatt

SEQ ID NO: 277169 - DNA, 25 bp, Probe Sequence
tggaggagttccttgatctgtatat

SEQ ID NO: 277170 - DNA, 25 bp, Probe Sequence
tggagagattcatattcatttgtat

SEQ ID NO: 277171 - DNA, 25 bp, Probe Sequence
tggagagaatcatgcctacctggac

SEQ ID NO: 277172 - DNA, 25 bp, Probe Sequence
tggataacatgctgacataggctta

SEQ ID NO: 277173 - DNA, 25 bp, Probe Sequence
tggtagaccttacagcagccagagg

SEQ ID NO: 277174 - DNA, 25 bp, Probe Sequence
tggtaggccctataaatgcagagac

SEQ ID NO: 277175 - DNA, 25 bp, Probe Sequence
tggtttccctcggaggatccagacc

SEQ ID NO: 277176 - DNA, 25 bp, Probe Sequence
tggttctcacttccaacttaggacc

SEQ ID NO: 277177 - DNA, 25 bp, Probe Sequence
tggattaactttccctgatgccgac

SEQ ID NO: 277178 - DNA, 25 bp, Probe Sequence
tggatggaaactacttgaagccgcc

SEQ ID NO: 277179 - DNA, 25 bp, Probe Sequence
tggaggcaacactctagcttgcacc

SEQ ID NO: 277180 - DNA, 25 bp, Probe Sequence
tggagacaggcctgaagctggccct

SEQ ID NO: 277181 - DNA, 25 bp, Probe Sequence
tggagacgtcactgaagcggctgca

SEQ ID NO: 277182 - DNA, 25 bp, Probe Sequence
tggagactgctcgggaagctgtggt

SEQ ID NO: 277183 - DNA, 25 bp, Probe Sequence
tggagactgacttgtgactgcgggc

SEQ ID NO: 277184 - DNA, 25 bp, Probe Sequence
tggagattaacgtactgtggctgca

SEQ ID NO: 277185 - DNA, 25 bp, Probe Sequence
tggagtacttccaacagttgctgac

SEQ ID NO: 277186 - DNA, 25 bp, Probe Sequence
tggagtcctgccgtagcatgattgc

SEQ ID NO: 277187 - DNA, 25 bp, Probe Sequence
tggagatcttgctgctcatggttga

SEQ ID NO: 277188 - DNA, 25 bp, Probe Sequence
tggatatttgaggccatgcttaata

SEQ ID NO: 277189 - DNA, 25 bp, Probe Sequence
tggatgagttggtcctttcagctta

SEQ ID NO: 277190 - DNA, 25 bp, Probe Sequence
tggagagtcgtgttcagcatctatg

SEQ ID NO: 277191 - DNA, 25 bp, Probe Sequence
tggagatgtcctttgcattgcttgg

SEQ ID NO: 277192 - DNA, 25 bp, Probe Sequence
taacttacctgtttgttaggaaatg

SEQ ID NO: 277193 - DNA, 25 bp, Probe Sequence
tggacctacgtgaatgtgtgtcagg

SEQ ID NO: 277194 - DNA, 25 bp, Probe Sequence
tggagctgcaaaatccggtgtaggc

SEQ ID NO: 277195 - DNA, 25 bp, Probe Sequence
tggagataatacggcaggctgtacc

SEQ ID NO: 277196 - DNA, 25 bp, Probe Sequence
tggagaaatcgggggctcgacgcat

SEQ ID NO: 277197 - DNA, 25 bp, Probe Sequence
tggagagcttttggggctcgaccat

SEQ ID NO: 277198 - DNA, 25 bp, Probe Sequence
tggaggttcttttgagtcacacaca

SEQ ID NO: 277199 - DNA, 25 bp, Probe Sequence
tggaccattctgatccagttcacca

SEQ ID NO: 277200 - DNA, 25 bp, Probe Sequence
tggagatccctggtccagaattcca

SEQ ID NO: 277201 - DNA, 25 bp, Probe Sequence
tggagcagccttagtccagttgctc

SEQ ID NO: 277202 - DNA, 25 bp, Probe Sequence
tggtgcatcttcaaaatgagtccta

SEQ ID NO: 277203 - DNA, 25 bp, Probe Sequence
tggagcccttaatgattgatctgat

SEQ ID NO: 277204 - DNA, 25 bp, Probe Sequence
tggagagcactagaagtggtttcct

SEQ ID NO: 277205 - DNA, 25 bp, Probe Sequence
tggaggcggaggagtgcgggatcct

SEQ ID NO: 277206 - DNA, 25 bp, Probe Sequence
tggaggcggaggagtgcgggatcct

SEQ ID NO: 277207 - DNA, 25 bp, Probe Sequence
tggaggtccaggagatgggtcccac

SEQ ID NO: 277208 - DNA, 25 bp, Probe Sequence
tgtacttcgccgagagggtgacctc

SEQ ID NO: 277209 - DNA, 25 bp, Probe Sequence
tgtagttacaggttggggaacactt

SEQ ID NO: 277210 - DNA, 25 bp, Probe Sequence
tgtagtaacagactcttgtggaaga

SEQ ID NO: 277211 - DNA, 25 bp, Probe Sequence
tggatggaacagatctctgggaaag

SEQ ID NO: 277212 - DNA, 25 bp, Probe Sequence
tggatgcagcggttttcatggagac

SEQ ID NO: 277213 - DNA, 25 bp, Probe Sequence
tggatgcgctgccgtattttgatca

SEQ ID NO: 277214 - DNA, 25 bp, Probe Sequence
tggagcagcgttcttttatctccgt

SEQ ID NO: 277215 - DNA, 25 bp, Probe Sequence
tggatgactgttactcttttttcag

SEQ ID NO: 277216 - DNA, 25 bp, Probe Sequence
tggaggatttctctgttattctgca

SEQ ID NO: 277217 - DNA, 25 bp, Probe Sequence
tggagtatttccgtaaactgcccac

SEQ ID NO: 277218 - DNA, 25 bp, Probe Sequence
tggagattttacgttaactggccca

SEQ ID NO: 277219 - DNA, 25 bp, Probe Sequence
tggaggtttgacattcacctgcctc

SEQ ID NO: 277220 - DNA, 25 bp, Probe Sequence
tggaggttgatccaatgctcacccc

SEQ ID NO: 277221 - DNA, 25 bp, Probe Sequence
tggagggagtctgggctccctccta

SEQ ID NO: 277222 - DNA, 25 bp, Probe Sequence
tggagggagtgaaggtccccttgga

SEQ ID NO: 277223 - DNA, 25 bp, Probe Sequence
tggaccacagagttggatccctcat

SEQ ID NO: 277224 - DNA, 25 bp, Probe Sequence
tggacctaacattcgatctcattca

SEQ ID NO: 277225 - DNA, 25 bp, Probe Sequence
tggtcctgaagcactaccttcagag

SEQ ID NO: 277226 - DNA, 25 bp, Probe Sequence
tggacctcaacaccaaggattacaa

SEQ ID NO: 277227 - DNA, 25 bp, Probe Sequence
tggacctgaacacaggtgagccaat

SEQ ID NO: 277228 - DNA, 25 bp, Probe Sequence
tggaggtcgagaccagcctgaccaa

SEQ ID NO: 277229 - DNA, 25 bp, Probe Sequence
tggaggctgtagtgatccataatca

SEQ ID NO: 277230 - DNA, 25 bp, Probe Sequence
tggagccctagctttgcataaatca

SEQ ID NO: 277231 - DNA, 25 bp, Probe Sequence
tggacctctggtttatgataatcat

SEQ ID NO: 277232 - DNA, 25 bp, Probe Sequence
tggacctcgttttgctcaaatatgc

SEQ ID NO: 277233 - DNA, 25 bp, Probe Sequence
tggagcctggtttgcactaaaacag

SEQ ID NO: 277234 - DNA, 25 bp, Probe Sequence
tggacctgtgatgatgcctcaagca

SEQ ID NO: 277235 - DNA, 25 bp, Probe Sequence
tggtcctgagatgagctgtgagcct

SEQ ID NO: 277236 - DNA, 25 bp, Probe Sequence
tggagcctgcagctagcagtgggcc

SEQ ID NO: 277237 - DNA, 25 bp, Probe Sequence
tggagcgcagcctggaggaggcacg

SEQ ID NO: 277238 - DNA, 25 bp, Probe Sequence
tggagcgcagcctggaggaggcacg

SEQ ID NO: 277239 - DNA, 25 bp, Probe Sequence
tggagcggcagctttgagggtcaca

SEQ ID NO: 277240 - DNA, 25 bp, Probe Sequence
tggagaaagcactgtggcagtcaca

SEQ ID NO: 277241 - DNA, 25 bp, Probe Sequence
tggagacagcagtgcggggcttcag

SEQ ID NO: 277242 - DNA, 25 bp, Probe Sequence
tggagactgagctgcatggtagttg

SEQ ID NO: 277243 - DNA, 25 bp, Probe Sequence
tggagtctggaggctgttagctaac

SEQ ID NO: 277244 - DNA, 25 bp, Probe Sequence
tgtgagctctggtctgcagtcatca

SEQ ID NO: 277245 - DNA, 25 bp, Probe Sequence
tggagctcgaggccatgagcagata

SEQ ID NO: 277246 - DNA, 25 bp, Probe Sequence
tggagctgcttgtgatgcacatgga

SEQ ID NO: 277247 - DNA, 25 bp, Probe Sequence
tggaggctcagcaagtgccatgcta

SEQ ID NO: 277248 - DNA, 25 bp, Probe Sequence
tggagtgtcagcagctatagtgaag

SEQ ID NO: 277249 - DNA, 25 bp, Probe Sequence
tggaggtcaccagcatgatgataat

SEQ ID NO: 277250 - DNA, 25 bp, Probe Sequence
tggagtgatgcagccacatggcaag

SEQ ID NO: 277251 - DNA, 25 bp, Probe Sequence
tggagtgtgatggcaaggtcaacat

SEQ ID NO: 277252 - DNA, 25 bp, Probe Sequence
tggagtgtgatggcaaggtcaacat

SEQ ID NO: 277253 - DNA, 25 bp, Probe Sequence
tggagtctacaccagagtaactaag

SEQ ID NO: 277254 - DNA, 25 bp, Probe Sequence
tggaggctatccagcgtactccaaa

SEQ ID NO: 277255 - DNA, 25 bp, Probe Sequence
tggggctcccagtaggagctctcaa

SEQ ID NO: 277256 - DNA, 25 bp, Probe Sequence
tggagtcagccttgaaggacctcaa

SEQ ID NO: 277257 - DNA, 25 bp, Probe Sequence
tggagcatcctacgcaaggacatcc

SEQ ID NO: 277258 - DNA, 25 bp, Probe Sequence
tggagactcagaagtaggacatgcc

SEQ ID NO: 277259 - DNA, 25 bp, Probe Sequence
tggacctgctgacatagtggatgga

SEQ ID NO: 277260 - DNA, 25 bp, Probe Sequence
tggagtggctatcctaggcagggct

SEQ ID NO: 277261 - DNA, 25 bp, Probe Sequence
tggaggatgcttaaatggcagaggc

SEQ ID NO: 277262 - DNA, 25 bp, Probe Sequence
tggaggcatctctgacaccaatcag

SEQ ID NO: 277263 - DNA, 25 bp, Probe Sequence
tggaggattacttcatgcgcaatgc

SEQ ID NO: 277264 - DNA, 25 bp, Probe Sequence
tggaggtggcacctgcatcacctcc

SEQ ID NO: 277265 - DNA, 25 bp, Probe Sequence
tggatgtggggcatcatccgcatct

SEQ ID NO: 277266 - DNA, 25 bp, Probe Sequence
tggatgtggcagctgattccatgtc

SEQ ID NO: 277267 - DNA, 25 bp, Probe Sequence
tggagatggggttaccttcgtggtc

SEQ ID NO: 277268 - DNA, 25 bp, Probe Sequence
tggagtacagtttacatcttcacgg

SEQ ID NO: 277269 - DNA, 25 bp, Probe Sequence
tggagtcaccttacagatatagagc

SEQ ID NO: 277270 - DNA, 25 bp, Probe Sequence
tggagtgcaatccttacttgagaac

SEQ ID NO: 277271 - DNA, 25 bp, Probe Sequence
tggaggcgatttcacttgcctacgc

SEQ ID NO: 277272 - DNA, 25 bp, Probe Sequence
tggagagggtcctcgttgctacagt

SEQ ID NO: 277273 - DNA, 25 bp, Probe Sequence
tggagggccccatctgatgttatat

SEQ ID NO: 277274 - DNA, 25 bp, Probe Sequence
tggagatgcccattctacttttgaa

SEQ ID NO: 277275 - DNA, 25 bp, Probe Sequence
tggagattctcgatacttcctgtgg

SEQ ID NO: 277276 - DNA, 25 bp, Probe Sequence
tggattgttctagtactgtattggg

SEQ ID NO: 277277 - DNA, 25 bp, Probe Sequence
tggatccctttctctgaatggagag

SEQ ID NO: 277278 - DNA, 25 bp, Probe Sequence
tggatttccgtctctggtgtagctg

SEQ ID NO: 277279 - DNA, 25 bp, Probe Sequence
tggtgattccggtttttgtcagtac

SEQ ID NO: 277280 - DNA, 25 bp, Probe Sequence
tggtgttccggtcattgctgatgga

SEQ ID NO: 277281 - DNA, 25 bp, Probe Sequence
tgtgtctgccctttagaagctaaga

SEQ ID NO: 277282 - DNA, 25 bp, Probe Sequence
tggatctgccagttgttgaagttaa

SEQ ID NO: 277283 - DNA, 25 bp, Probe Sequence
tggtgatgctgccattgttgatatg

SEQ ID NO: 277284 - DNA, 25 bp, Probe Sequence
tggtgatgctgccattgttgatatg

SEQ ID NO: 277285 - DNA, 25 bp, Probe Sequence
tggagatgcccactttgatgatgat

SEQ ID NO: 277286 - DNA, 25 bp, Probe Sequence
tggagagcgacagtaggctgcatct

SEQ ID NO: 277287 - DNA, 25 bp, Probe Sequence
tggagagatgacggaggccatgcca

SEQ ID NO: 277288 - DNA, 25 bp, Probe Sequence
tggagaagacctgagacatcccggc

SEQ ID NO: 277289 - DNA, 25 bp, Probe Sequence
tggagtagggctgagactggggtgg

SEQ ID NO: 277290 - DNA, 25 bp, Probe Sequence
tggagtcaccctgagaagggtgacc

SEQ ID NO: 277291 - DNA, 25 bp, Probe Sequence
tggagtcggcgcgcaaagcgaaagc

SEQ ID NO: 277292 - DNA, 25 bp, Probe Sequence
tggagctcatggtgctcaacgtgcc

SEQ ID NO: 277293 - DNA, 25 bp, Probe Sequence
tggagctctgggaatcacagcccac

SEQ ID NO: 277294 - DNA, 25 bp, Probe Sequence
tggagctggcggaactcaagacacg

SEQ ID NO: 277295 - DNA, 25 bp, Probe Sequence
tggagctggggtgtgggatgcacgg

SEQ ID NO: 277296 - DNA, 25 bp, Probe Sequence
tggatccggagggtggaggacgggg

SEQ ID NO: 277297 - DNA, 25 bp, Probe Sequence
tggtcacgagggggaccgtctgtgg

SEQ ID NO: 277298 - DNA, 25 bp, Probe Sequence
tggtcaggaggggggaggctgaggg

SEQ ID NO: 277299 - DNA, 25 bp, Probe Sequence
tgggcacgaggaggcatgggggacg

SEQ ID NO: 277300 - DNA, 25 bp, Probe Sequence
tggagctatgggtcgtggcggaatc

SEQ ID NO: 277301 - DNA, 25 bp, Probe Sequence
tggtcattctgatctgggggaacac

SEQ ID NO: 277302 - DNA, 25 bp, Probe Sequence
tggtatttgaacagacttgaacagt

SEQ ID NO: 277303 - DNA, 25 bp, Probe Sequence
tggttttgaccgccacattaccatt

SEQ ID NO: 277304 - DNA, 25 bp, Probe Sequence
tgagttgttgttgggaaagggcttt

SEQ ID NO: 277305 - DNA, 25 bp, Probe Sequence
tggttttttcgaagagagagttcat

SEQ ID NO: 277306 - DNA, 25 bp, Probe Sequence
tgaggtacttgctgggacggattct

SEQ ID NO: 277307 - DNA, 25 bp, Probe Sequence
tgggaaattcaaggagccataatcc

SEQ ID NO: 277308 - DNA, 25 bp, Probe Sequence
tggagattattattggagcctaatt

SEQ ID NO: 277309 - DNA, 25 bp, Probe Sequence
tggagaggattacttgaccccagga

SEQ ID NO: 277310 - DNA, 25 bp, Probe Sequence
tggagcggatacatcaaccaccagc

SEQ ID NO: 277311 - DNA, 25 bp, Probe Sequence
tggagatggaaaatcacaccacctg

SEQ ID NO: 277312 - DNA, 25 bp, Probe Sequence
tggagatgctcataccaacaccgtg

SEQ ID NO: 277313 - DNA, 25 bp, Probe Sequence
tggagatgtagctactccaccacgg

SEQ ID NO: 277314 - DNA, 25 bp, Probe Sequence
tggatattccattctccacgatgca

SEQ ID NO: 277315 - DNA, 25 bp, Probe Sequence
tggatagcagcctagacccagaacc

SEQ ID NO: 277316 - DNA, 25 bp, Probe Sequence
tggagaagccgaaaccagagagcct

SEQ ID NO: 277317 - DNA, 25 bp, Probe Sequence
tggagctcagtgctagaccaggtcc

SEQ ID NO: 277318 - DNA, 25 bp, Probe Sequence
tggtcatcaagcacaaccggttcac

SEQ ID NO: 277319 - DNA, 25 bp, Probe Sequence
tggataccagtaaaagggaatgcac

SEQ ID NO: 277320 - DNA, 25 bp, Probe Sequence
tgggaagcgttatggggaagactct

SEQ ID NO: 277321 - DNA, 25 bp, Probe Sequence
tgggaagcctttgctagggtgtctt

SEQ ID NO: 277322 - DNA, 25 bp, Probe Sequence
tggtgttttttcctatgggtgttat

SEQ ID NO: 277323 - DNA, 25 bp, Probe Sequence
tggatttgctttcagttggttttca

SEQ ID NO: 277324 - DNA, 25 bp, Probe Sequence
tggatttgtattcatatattgtcaa

SEQ ID NO: 277325 - DNA, 25 bp, Probe Sequence
tggtagaatcgacattctggtcaac

SEQ ID NO: 277326 - DNA, 25 bp, Probe Sequence
tggattcagtgcaggtttggataca

SEQ ID NO: 277327 - DNA, 25 bp, Probe Sequence
tggattattgtctgtctttatagca

SEQ ID NO: 277328 - DNA, 25 bp, Probe Sequence
tggatttgttattcattggtataca

SEQ ID NO: 277329 - DNA, 25 bp, Probe Sequence
tggagtatgttttgctatgtaataa

SEQ ID NO: 277330 - DNA, 25 bp, Probe Sequence
tggaggattttagagatgcctgaac

SEQ ID NO: 277331 - DNA, 25 bp, Probe Sequence
tggagagaactttgacagtgcacga

SEQ ID NO: 277332 - DNA, 25 bp, Probe Sequence
tggaggtccttcccagagagaaagg

SEQ ID NO: 277333 - DNA, 25 bp, Probe Sequence
tggagactctcaacaccaagcagaa

SEQ ID NO: 277334 - DNA, 25 bp, Probe Sequence
tggagaccagtcccacaagatgaca

SEQ ID NO: 277335 - DNA, 25 bp, Probe Sequence
tggagtccattgaccacagtgtcac

SEQ ID NO: 277336 - DNA, 25 bp, Probe Sequence
tggtacaatgggcgcgttcagccaa

SEQ ID NO: 277337 - DNA, 25 bp, Probe Sequence
tggatataagtgatttggccaccaa

SEQ ID NO: 277338 - DNA, 25 bp, Probe Sequence
tggtttcgtggctgtcccaacaaaa

SEQ ID NO: 277339 - DNA, 25 bp, Probe Sequence
tggtttcagtttctcccagacatac

SEQ ID NO: 277340 - DNA, 25 bp, Probe Sequence
tggttatggttataccgcaccaccg

SEQ ID NO: 277341 - DNA, 25 bp, Probe Sequence
tggatttgagtcctaacactctccc

SEQ ID NO: 277342 - DNA, 25 bp, Probe Sequence
tggatggtcgtgcggaactgctcca

SEQ ID NO: 277343 - DNA, 25 bp, Probe Sequence
tggatggtcgccagcagtaccatgc

SEQ ID NO: 277344 - DNA, 25 bp, Probe Sequence
tggatggtcgccagcagtaccatgc

SEQ ID NO: 277345 - DNA, 25 bp, Probe Sequence
tggagtgtacaccatctttgccatc

SEQ ID NO: 277346 - DNA, 25 bp, Probe Sequence
tggagtgtacaccatctttgccatc

SEQ ID NO: 277347 - DNA, 25 bp, Probe Sequence
tggagtgtacaccatctttgccatc

SEQ ID NO: 277348 - DNA, 25 bp, Probe Sequence
tggagtgtacaccatctttgccatc

SEQ ID NO: 277349 - DNA, 25 bp, Probe Sequence
tggaggccaaccagatgctgggcga

SEQ ID NO: 277350 - DNA, 25 bp, Probe Sequence
tggaggaccccagatggcaggaacc

SEQ ID NO: 277351 - DNA, 25 bp, Probe Sequence
tggaggcatcctggcgggaaggacc

SEQ ID NO: 277352 - DNA, 25 bp, Probe Sequence
tggaggcatcatgtctgttagggaa

SEQ ID NO: 277353 - DNA, 25 bp, Probe Sequence
tggatggagcgctaccttagggata

SEQ ID NO: 277354 - DNA, 25 bp, Probe Sequence
tggtccaggctgtcgttaatgatga

SEQ ID NO: 277355 - DNA, 25 bp, Probe Sequence
tggtcacagggtggttttggtttag

SEQ ID NO: 277356 - DNA, 25 bp, Probe Sequence
tggtcgcaaaggtcatgctgttggt

SEQ ID NO: 277357 - DNA, 25 bp, Probe Sequence
tggtaggatcagccctcattttgtt

SEQ ID NO: 277358 - DNA, 25 bp, Probe Sequence
tggagggatagccaccatttttcag

SEQ ID NO: 277359 - DNA, 25 bp, Probe Sequence
tggagggatagccaccatttttcag

SEQ ID NO: 277360 - DNA, 25 bp, Probe Sequence
tggaggctgctagactcctatcttc

SEQ ID NO: 277361 - DNA, 25 bp, Probe Sequence
tggagggctagcaaggccttctcat

SEQ ID NO: 277362 - DNA, 25 bp, Probe Sequence
tggaggcaattgccagaccttctca

SEQ ID NO: 277363 - DNA, 25 bp, Probe Sequence
tggaggccattgtgtgagcctatca

SEQ ID NO: 277364 - DNA, 25 bp, Probe Sequence
tggaggcctcatttgtacctcctgc

SEQ ID NO: 277365 - DNA, 25 bp, Probe Sequence
tggagtgactatatggatgcccccc

SEQ ID NO: 277366 - DNA, 25 bp, Probe Sequence
tggagtgactatatggatgcccccc

SEQ ID NO: 277367 - DNA, 25 bp, Probe Sequence
tggagtggtgtttggtgccagccta

SEQ ID NO: 277368 - DNA, 25 bp, Probe Sequence
tggagtggtgtttggtgccagccta

SEQ ID NO: 277369 - DNA, 25 bp, Probe Sequence
tggagtggtgtttggtgccagccta

SEQ ID NO: 277370 - DNA, 25 bp, Probe Sequence
tcggttatttaggtccagcagctac

SEQ ID NO: 277371 - DNA, 25 bp, Probe Sequence
tggagttaactacatccgcactgac

SEQ ID NO: 277372 - DNA, 25 bp, Probe Sequence
tggagttaagcttactgcccaggtg

SEQ ID NO: 277373 - DNA, 25 bp, Probe Sequence
tggatgacttgacaacagccctgga

SEQ ID NO: 277374 - DNA, 25 bp, Probe Sequence
tggtgactggaattaaactgctgaa

SEQ ID NO: 277375 - DNA, 25 bp, Probe Sequence
tgggaccaagaacacccatgaaccc

SEQ ID NO: 277376 - DNA, 25 bp, Probe Sequence
tggtcaccaatgagtacccgacccg

SEQ ID NO: 277377 - DNA, 25 bp, Probe Sequence
tggatccacgaaaaactccgcacct

SEQ ID NO: 277378 - DNA, 25 bp, Probe Sequence
tggatcccagtacctgaatcctgaa

SEQ ID NO: 277379 - DNA, 25 bp, Probe Sequence
tggtcaacatgttctctgaacttga

SEQ ID NO: 277380 - DNA, 25 bp, Probe Sequence
tggatatagccttttaacctgcaaa

SEQ ID NO: 277381 - DNA, 25 bp, Probe Sequence
tggatggaggcttgtctatccctca

SEQ ID NO: 277382 - DNA, 25 bp, Probe Sequence
tggaggaggcttttgtctcatctca

SEQ ID NO: 277383 - DNA, 25 bp, Probe Sequence
tggagagctggtttattttctgccc

SEQ ID NO: 277384 - DNA, 25 bp, Probe Sequence
tggaggcttggaaacgcttcctctc

SEQ ID NO: 277385 - DNA, 25 bp, Probe Sequence
tggagagcttcacaaatgcccctcc

SEQ ID NO: 277386 - DNA, 25 bp, Probe Sequence
tggagagcttcacaaatgcccctcc

SEQ ID NO: 277387 - DNA, 25 bp, Probe Sequence
tggagactttggtatttgccctggc

SEQ ID NO: 277388 - DNA, 25 bp, Probe Sequence
tggatgactgtcaggatgttgcttc

SEQ ID NO: 277389 - DNA, 25 bp, Probe Sequence
tggaggtgcatgaggacttcttcct

SEQ ID NO: 277390 - DNA, 25 bp, Probe Sequence
tggagggcatgttcagagcttttca

SEQ ID NO: 277391 - DNA, 25 bp, Probe Sequence
tggagttcagtttagcacatgttca

SEQ ID NO: 277392 - DNA, 25 bp, Probe Sequence
tggtttagttgctagaagtcatgag

SEQ ID NO: 277393 - DNA, 25 bp, Probe Sequence
tggtttagtctgcagtctccgagac

SEQ ID NO: 277394 - DNA, 25 bp, Probe Sequence
tggatatacgttaattatccgggca

SEQ ID NO: 277395 - DNA, 25 bp, Probe Sequence
tggatagcggtttgactcacgggga

SEQ ID NO: 277396 - DNA, 25 bp, Probe Sequence
tggatagcggtttgactcacgggga

SEQ ID NO: 277397 - DNA, 25 bp, Probe Sequence
tggatagcggtttgactcacgggga

SEQ ID NO: 277398 - DNA, 25 bp, Probe Sequence
tggatagcggtttgactcacgggga

SEQ ID NO: 277399 - DNA, 25 bp, Probe Sequence
tggatagcggtttgactcacgggga

SEQ ID NO: 277400 - DNA, 25 bp, Probe Sequence
tggagggcgacttcctcattaggga

SEQ ID NO: 277401 - DNA, 25 bp, Probe Sequence
tggagggagacccagcatagccagg

SEQ ID NO: 277402 - DNA, 25 bp, Probe Sequence
tggatgaggacacctcacttccaga

SEQ ID NO: 277403 - DNA, 25 bp, Probe Sequence
tggagtgagaagtctccgctgctcg

SEQ ID NO: 277404 - DNA, 25 bp, Probe Sequence
tggagagggatggcctcagtgaagc

SEQ ID NO: 277405 - DNA, 25 bp, Probe Sequence
tggagagagaggtatcacaggatag

SEQ ID NO: 277406 - DNA, 25 bp, Probe Sequence
tggagatcagcatgggccacgtagc

SEQ ID NO: 277407 - DNA, 25 bp, Probe Sequence
tggagatgggattggcctgcgttgt

SEQ ID NO: 277408 - DNA, 25 bp, Probe Sequence
tggagagggaggccggcctcatgcc

SEQ ID NO: 277409 - DNA, 25 bp, Probe Sequence
tggaggttgtgtcagagccattccg

SEQ ID NO: 277410 - DNA, 25 bp, Probe Sequence
tggaggtttctgccagtggctacac

SEQ ID NO: 277411 - DNA, 25 bp, Probe Sequence
tggaggaggtctgtgggctgaactc

SEQ ID NO: 277412 - DNA, 25 bp, Probe Sequence
tggagaggagtcttcgtccgatacc

SEQ ID NO: 277413 - DNA, 25 bp, Probe Sequence
tggagaggatgtctctgtccgcatt

SEQ ID NO: 277414 - DNA, 25 bp, Probe Sequence
tggagaggatgtctctgtcgcattc

SEQ ID NO: 277415 - DNA, 25 bp, Probe Sequence
tggatgacgtgtccttgacacatct

SEQ ID NO: 277416 - DNA, 25 bp, Probe Sequence
tggtcagtctgtgttgcatcaatct

SEQ ID NO: 277417 - DNA, 25 bp, Probe Sequence
tgttcttggcccatcatgacattgg

SEQ ID NO: 277418 - DNA, 25 bp, Probe Sequence
tgtttctggcatcctaaatcaacgg

SEQ ID NO: 277419 - DNA, 25 bp, Probe Sequence
tgtttcttggcaccaaatcaccggg

SEQ ID NO: 277420 - DNA, 25 bp, Probe Sequence
tggttttggacagcgacaccggctg

SEQ ID NO: 277421 - DNA, 25 bp, Probe Sequence
tggtgttttgtaccggcacgggata

SEQ ID NO: 277422 - DNA, 25 bp, Probe Sequence
tggtgctttggatactcggatggag

SEQ ID NO: 277423 - DNA, 25 bp, Probe Sequence
tggatggctgaggaaactctgggct

SEQ ID NO: 277424 - DNA, 25 bp, Probe Sequence
tggttgtgcgcttaacgtgagggtg

SEQ ID NO: 277425 - DNA, 25 bp, Probe Sequence
tggttgtggcatgacatctgggtca

SEQ ID NO: 277426 - DNA, 25 bp, Probe Sequence
tggatatcggtcacatgccaggtcc

SEQ ID NO: 277427 - DNA, 25 bp, Probe Sequence
tggattctggtccgagccagtgact

SEQ ID NO: 277428 - DNA, 25 bp, Probe Sequence
tggatgtgctggtgggcacacaggc

SEQ ID NO: 277429 - DNA, 25 bp, Probe Sequence
tggatctgctgtttgaagcgcagca

SEQ ID NO: 277430 - DNA, 25 bp, Probe Sequence
tggattctctcgtatagcagcatga

SEQ ID NO: 277431 - DNA, 25 bp, Probe Sequence
tggattctctcatcaaggctacaat

SEQ ID NO: 277432 - DNA, 25 bp, Probe Sequence
tggatgccccttgatgggaacatca

SEQ ID NO: 277433 - DNA, 25 bp, Probe Sequence
tggaggccctatttgggaacactgc

SEQ ID NO: 277434 - DNA, 25 bp, Probe Sequence
tggaggcccaatttgacaaacccct

SEQ ID NO: 277435 - DNA, 25 bp, Probe Sequence
tggagggccgggaagcaaaccgtgc

SEQ ID NO: 277436 - DNA, 25 bp, Probe Sequence
tggaggaccgggagctttgggtgac

SEQ ID NO: 277437 - DNA, 25 bp, Probe Sequence
tggaggaccgggagctttgggtgac

SEQ ID NO: 277438 - DNA, 25 bp, Probe Sequence
tggaggaccgggagctttgggtgac

SEQ ID NO: 277439 - DNA, 25 bp, Probe Sequence
tggaggacaatgcccatgttttggg

SEQ ID NO: 277440 - DNA, 25 bp, Probe Sequence
tggtcagcaaagacctttttggcac

SEQ ID NO: 277441 - DNA, 25 bp, Probe Sequence
tgggcaaaacattccttttggaagt

SEQ ID NO: 277442 - DNA, 25 bp, Probe Sequence
tggtcaacaacaagccctttgggga

SEQ ID NO: 277443 - DNA, 25 bp, Probe Sequence
tggtaacatataaaactttgtagga

SEQ ID NO: 277444 - DNA, 25 bp, Probe Sequence
tggatggaacatacaaattttgttt

SEQ ID NO: 277445 - DNA, 25 bp, Probe Sequence
tggttaactccttgtgttttctctc

SEQ ID NO: 277446 - DNA, 25 bp, Probe Sequence
tggttgacccctggattaaagtcct

SEQ ID NO: 277447 - DNA, 25 bp, Probe Sequence
tggttcacagcagcccttataagct

SEQ ID NO: 277448 - DNA, 25 bp, Probe Sequence
tggttaacgccttcatttatagatg

SEQ ID NO: 277449 - DNA, 25 bp, Probe Sequence
tgtgtctaaaacagcatcttaaagc

SEQ ID NO: 277450 - DNA, 25 bp, Probe Sequence
tggttaaagaattccactataaact

SEQ ID NO: 277451 - DNA, 25 bp, Probe Sequence
tggttaggaagaatcaatatcatga

SEQ ID NO: 277452 - DNA, 25 bp, Probe Sequence
tggttgcgcgtagttgctaacagca

SEQ ID NO: 277453 - DNA, 25 bp, Probe Sequence
tggttgacgtagtgctcgaacgcca

SEQ ID NO: 277454 - DNA, 25 bp, Probe Sequence
tggttacagtaactctcgctacagc

SEQ ID NO: 277455 - DNA, 25 bp, Probe Sequence
tggattacttaaccactgctgtccc

SEQ ID NO: 277456 - DNA, 25 bp, Probe Sequence
tggataactaaacacatggagcttc

SEQ ID NO: 277457 - DNA, 25 bp, Probe Sequence
tggtcagaatccggatactgggttc

SEQ ID NO: 277458 - DNA, 25 bp, Probe Sequence
tggatgggatcctgtacacggtgct

SEQ ID NO: 277459 - DNA, 25 bp, Probe Sequence
tggatgatggattgtggataactct

SEQ ID NO: 277460 - DNA, 25 bp, Probe Sequence
tggagatggaagatgtgtgacatgt

SEQ ID NO: 277461 - DNA, 25 bp, Probe Sequence
tcgtctgagagaatggctgataatg

SEQ ID NO: 277462 - DNA, 25 bp, Probe Sequence
tggtctagagtcagcttacatccct

SEQ ID NO: 277463 - DNA, 25 bp, Probe Sequence
tggtctcagaatcacttttcccatc

SEQ ID NO: 277464 - DNA, 25 bp, Probe Sequence
tggatcaaaagcaaccttgtcccgc

SEQ ID NO: 277465 - DNA, 25 bp, Probe Sequence
tggtactaaggtgctcagtccttgc

SEQ ID NO: 277466 - DNA, 25 bp, Probe Sequence
tggtactaataatcttgtttctgaa

SEQ ID NO: 277467 - DNA, 25 bp, Probe Sequence
tggtacgatttgattcctgttggaa

SEQ ID NO: 277468 - DNA, 25 bp, Probe Sequence
tggatccgaattgttttaaggcaac

SEQ ID NO: 277469 - DNA, 25 bp, Probe Sequence
tcagtcccgtgaggtccgttaggaa

SEQ ID NO: 277470 - DNA, 25 bp, Probe Sequence
tcgtggaggtggtttcggtgggaat

SEQ ID NO: 277471 - DNA, 25 bp, Probe Sequence
tcgtggaggtggtttcggtgggaat

SEQ ID NO: 277472 - DNA, 25 bp, Probe Sequence
tggatggggtttttctgactaaaat

SEQ ID NO: 277473 - DNA, 25 bp, Probe Sequence
tggaggtattttctctgcaccaaga

SEQ ID NO: 277474 - DNA, 25 bp, Probe Sequence
tggagtgtttcttctcgacaccaaa

SEQ ID NO: 277475 - DNA, 25 bp, Probe Sequence
tggatgggttacttgcccaccagaa

SEQ ID NO: 277476 - DNA, 25 bp, Probe Sequence
tggatttgttacttgattcacctac

SEQ ID NO: 277477 - DNA, 25 bp, Probe Sequence
tggtttcttgccttgatgtactgga

SEQ ID NO: 277478 - DNA, 25 bp, Probe Sequence
tggttccctgctttggtgtaggggt

SEQ ID NO: 277479 - DNA, 25 bp, Probe Sequence
tgtttcattcctttgggtaagccag

SEQ ID NO: 277480 - DNA, 25 bp, Probe Sequence
tgtgtccatcctggggggtaagccc

SEQ ID NO: 277481 - DNA, 25 bp, Probe Sequence
tggttagcaccgcaggtgtagagaa

SEQ ID NO: 277482 - DNA, 25 bp, Probe Sequence
tggtccacctggcatagttaaaacc

SEQ ID NO: 277483 - DNA, 25 bp, Probe Sequence
tggtctgcacctcttcaggttaaca

SEQ ID NO: 277484 - DNA, 25 bp, Probe Sequence
tggaggccctggatgaggtcttcac

SEQ ID NO: 277485 - DNA, 25 bp, Probe Sequence
tggtggtcttggacgtggtttcagt

SEQ ID NO: 277486 - DNA, 25 bp, Probe Sequence
tggggttcattgggctagggtagtg

SEQ ID NO: 277487 - DNA, 25 bp, Probe Sequence
tggtttttcagcacttgggattggg

SEQ ID NO: 277488 - DNA, 25 bp, Probe Sequence
tggtttttcaggtactgggagccgg

SEQ ID NO: 277489 - DNA, 25 bp, Probe Sequence
tggttgtttcccttgcatgggacga

SEQ ID NO: 277490 - DNA, 25 bp, Probe Sequence
tggagttcttcccattgaggtccta

SEQ ID NO: 277491 - DNA, 25 bp, Probe Sequence
tggagtgctctctcagcactgggat

SEQ ID NO: 277492 - DNA, 25 bp, Probe Sequence
tggagtgtgtctcatgctttcagat

SEQ ID NO: 277493 - DNA, 25 bp, Probe Sequence
tggaggtgctgcactggttgctgat

SEQ ID NO: 277494 - DNA, 25 bp, Probe Sequence
tggaggcgtgatcctgggtgtggcc

SEQ ID NO: 277495 - DNA, 25 bp, Probe Sequence
tggaggatgagtctgtggatgtggc

SEQ ID NO: 277496 - DNA, 25 bp, Probe Sequence
tggaggatggttggttgtggcgagc

SEQ ID NO: 277497 - DNA, 25 bp, Probe Sequence
tggaggggcttaacgggcagctgcc

SEQ ID NO: 277498 - DNA, 25 bp, Probe Sequence
tggagggtgccttatgggccctcct

SEQ ID NO: 277499 - DNA, 25 bp, Probe Sequence
tggagtgcagtcgtgtgattggcct

SEQ ID NO: 277500 - DNA, 25 bp, Probe Sequence
tggagtgcagtggcgtgatctcggc

SEQ ID NO: 277501 - DNA, 25 bp, Probe Sequence
tggagtgcagtggcgtgatctcggc

SEQ ID NO: 277502 - DNA, 25 bp, Probe Sequence
tggagtgcagtggtgcagtcttggc

SEQ ID NO: 277503 - DNA, 25 bp, Probe Sequence
tggagtgcagtggtgcgatctcggc

SEQ ID NO: 277504 - DNA, 25 bp, Probe Sequence
tggagtggccgtggcaatttctcga

SEQ ID NO: 277505 - DNA, 25 bp, Probe Sequence
tggatgctggctcgggaagttctgc

SEQ ID NO: 277506 - DNA, 25 bp, Probe Sequence
tggatgctggctcgggaagttctgc

SEQ ID NO: 277507 - DNA, 25 bp, Probe Sequence
tggatgctggctcgggaagttctgc

SEQ ID NO: 277508 - DNA, 25 bp, Probe Sequence
tggagggcgctcatcaagtagctgc

SEQ ID NO: 277509 - DNA, 25 bp, Probe Sequence
tggattagccacatcgaggagtgcg

SEQ ID NO: 277510 - DNA, 25 bp, Probe Sequence
tggatccaggacatcgagggagcca

SEQ ID NO: 277511 - DNA, 25 bp, Probe Sequence
tggaggaggagcaggggcgtggagg

SEQ ID NO: 277512 - DNA, 25 bp, Probe Sequence
aaccaggttttgtgaggaatgcatt

SEQ ID NO: 277513 - DNA, 25 bp, Probe Sequence
tggaggcggcacaggtggcagtgta

SEQ ID NO: 277514 - DNA, 25 bp, Probe Sequence
tggaggagacagatggtactttacc

SEQ ID NO: 277515 - DNA, 25 bp, Probe Sequence
tggggagaagatgagtacttgaaat

SEQ ID NO: 277516 - DNA, 25 bp, Probe Sequence
tggaggagcggtgagaacatggaac

SEQ ID NO: 277517 - DNA, 25 bp, Probe Sequence
tggaggagcggtgagaacatggaac

SEQ ID NO: 277518 - DNA, 25 bp, Probe Sequence
tggagggcaggatagagccaccgcc

SEQ ID NO: 277519 - DNA, 25 bp, Probe Sequence
tggaggggctgatcagtgcccgtgt

SEQ ID NO: 277520 - DNA, 25 bp, Probe Sequence
tggtgggttagtggtcctcaggatg

SEQ ID NO: 277521 - DNA, 25 bp, Probe Sequence
tggtgtaattttgtcctctctgtgt

SEQ ID NO: 277522 - DNA, 25 bp, Probe Sequence
tggtgtatatctgctgcgatcctac

SEQ ID NO: 277523 - DNA, 25 bp, Probe Sequence
tggatctagcattggcacagacccc

SEQ ID NO: 277524 - DNA, 25 bp, Probe Sequence
tggatttgcattacattgaccccag

SEQ ID NO: 277525 - DNA, 25 bp, Probe Sequence
tggtttatattcatgctgccctaga

SEQ ID NO: 277526 - DNA, 25 bp, Probe Sequence
tggtttttgaccctcccatagaaga

SEQ ID NO: 277527 - DNA, 25 bp, Probe Sequence
tggtacttgatagcctcttaaggaa

SEQ ID NO: 277528 - DNA, 25 bp, Probe Sequence
tgcgtaccagttccacttaaatggt

SEQ ID NO: 277529 - DNA, 25 bp, Probe Sequence
tggtacccttggtcttcaaaggcca

SEQ ID NO: 277530 - DNA, 25 bp, Probe Sequence
tggtctttcttggtattaaaggcca

SEQ ID NO: 277531 - DNA, 25 bp, Probe Sequence
tggtcagttttgattcttaacccca

SEQ ID NO: 277532 - DNA, 25 bp, Probe Sequence
tggtgattttcagacccttaaccct

SEQ ID NO: 277533 - DNA, 25 bp, Probe Sequence
tggttttcagcagagctccttaaat

SEQ ID NO: 277534 - DNA, 25 bp, Probe Sequence
tggttcttaggcagatactctagat

SEQ ID NO: 277535 - DNA, 25 bp, Probe Sequence
tggtccagttggagaccgtcaacct

SEQ ID NO: 277536 - DNA, 25 bp, Probe Sequence
tggtctccttggaaatccgtctagt

SEQ ID NO: 277537 - DNA, 25 bp, Probe Sequence
tggtcgagcgatggatttccgtctc

SEQ ID NO: 277538 - DNA, 25 bp, Probe Sequence
tggttaggttgagtcttccttgccc

SEQ ID NO: 277539 - DNA, 25 bp, Probe Sequence
tgtgaaagctttccatacccttggc

SEQ ID NO: 277540 - DNA, 25 bp, Probe Sequence
tgtgaaagctttccatacccttggc

SEQ ID NO: 277541 - DNA, 25 bp, Probe Sequence
tgtgaaactttctgaagccttgtca

SEQ ID NO: 277542 - DNA, 25 bp, Probe Sequence
tggattagccagaaaaagccttata

SEQ ID NO: 277543 - DNA, 25 bp, Probe Sequence
tggttagccatagatcattcctttc

SEQ ID NO: 277544 - DNA, 25 bp, Probe Sequence
tggttctttctcaacattgccattt

SEQ ID NO: 277545 - DNA, 25 bp, Probe Sequence
tggtttgggctccacattgcaatgt

SEQ ID NO: 277546 - DNA, 25 bp, Probe Sequence
tggtttctcactgcatataagagtt

SEQ ID NO: 277547 - DNA, 25 bp, Probe Sequence
tggtcttccacagtcatgttgaggt

SEQ ID NO: 277548 - DNA, 25 bp, Probe Sequence
tggttctgccacaggttcagagcct

SEQ ID NO: 277549 - DNA, 25 bp, Probe Sequence
tggtctcccaggtgaggcaagccat

SEQ ID NO: 277550 - DNA, 25 bp, Probe Sequence
tggtctcccaggtgaggcaagccat

SEQ ID NO: 277551 - DNA, 25 bp, Probe Sequence
tggtccaaaggatagaagcatctaa

SEQ ID NO: 277552 - DNA, 25 bp, Probe Sequence
tggtcactcaagccatcacaaactc

SEQ ID NO: 277553 - DNA, 25 bp, Probe Sequence
tggatcactcgagctcaacagttcg

SEQ ID NO: 277554 - DNA, 25 bp, Probe Sequence
tggatacccatgactgcaagaatac

SEQ ID NO: 277555 - DNA, 25 bp, Probe Sequence
tggtatccagtttgcatagtatcac

SEQ ID NO: 277556 - DNA, 25 bp, Probe Sequence
tgtgtcaggcagttgtgctagtttc

SEQ ID NO: 277557 - DNA, 25 bp, Probe Sequence
tggatgcagagctttacctcttagc

SEQ ID NO: 277558 - DNA, 25 bp, Probe Sequence
tggatcagactgcttgcactcaggg

SEQ ID NO: 277559 - DNA, 25 bp, Probe Sequence
tggatggcactggtgtgcacctgga

SEQ ID NO: 277560 - DNA, 25 bp, Probe Sequence
tggtcatgccaggcatgatcagccg

SEQ ID NO: 277561 - DNA, 25 bp, Probe Sequence
tggtcatgacgagtgcagcagctgc

SEQ ID NO: 277562 - DNA, 25 bp, Probe Sequence
tggatcatgaggtccaggtgttcga

SEQ ID NO: 277563 - DNA, 25 bp, Probe Sequence
tggtagcatgtgtccagatgttggc

SEQ ID NO: 277564 - DNA, 25 bp, Probe Sequence
tggatcagatcgtccactgggtgca

SEQ ID NO: 277565 - DNA, 25 bp, Probe Sequence
tggatcaatggtgccacggagcaca

SEQ ID NO: 277566 - DNA, 25 bp, Probe Sequence
tggatcaaggacaccatcgcagcca

SEQ ID NO: 277567 - DNA, 25 bp, Probe Sequence
tggtcaagaactgggtcccgacggc

SEQ ID NO: 277568 - DNA, 25 bp, Probe Sequence
tggataacaaactgtcccatacgtt

SEQ ID NO: 277569 - DNA, 25 bp, Probe Sequence
tggtataaagaatctcccagccagg

SEQ ID NO: 277570 - DNA, 25 bp, Probe Sequence
tggtttgtggattccctcaaccaga

SEQ ID NO: 277571 - DNA, 25 bp, Probe Sequence
tggtttggccagacagtatacccaa

SEQ ID NO: 277572 - DNA, 25 bp, Probe Sequence
tggtgttgcccagcaggaaaccaac

SEQ ID NO: 277573 - DNA, 25 bp, Probe Sequence
tggttccacccagttgaaagacaac

SEQ ID NO: 277574 - DNA, 25 bp, Probe Sequence
tggtgcccaactattgtaagaaata

SEQ ID NO: 277575 - DNA, 25 bp, Probe Sequence
tggggaataggagattagagaaata

SEQ ID NO: 277576 - DNA, 25 bp, Probe Sequence
tggaggagtcggggtctcagcagaa

SEQ ID NO: 277577 - DNA, 25 bp, Probe Sequence
tggaggcacgtgtggatctcatcga

SEQ ID NO: 277578 - DNA, 25 bp, Probe Sequence
tggaggccctgatgtttgatcgctc

SEQ ID NO: 277579 - DNA, 25 bp, Probe Sequence
tggaggactgtgtgatctccatcct

SEQ ID NO: 277580 - DNA, 25 bp, Probe Sequence
tggatttctgcttcagttaatcaac

SEQ ID NO: 277581 - DNA, 25 bp, Probe Sequence
tggatgttgctatcggtgtctctac

SEQ ID NO: 277582 - DNA, 25 bp, Probe Sequence
tggatgctttcaactggtgcgtcca

SEQ ID NO: 277583 - DNA, 25 bp, Probe Sequence
tggatgctattctattctgctgccc

SEQ ID NO: 277584 - DNA, 25 bp, Probe Sequence
tggttttcacatacagcagctctat

SEQ ID NO: 277585 - DNA, 25 bp, Probe Sequence
tggatgtttatcacagtgctgtttg

SEQ ID NO: 277586 - DNA, 25 bp, Probe Sequence
tggatgtcattgctgtcgggttagg

SEQ ID NO: 277587 - DNA, 25 bp, Probe Sequence
tggttctagggtgggtttacagctt

SEQ ID NO: 277588 - DNA, 25 bp, Probe Sequence
tggtttagggctgcgtgctcaagag

SEQ ID NO: 277589 - DNA, 25 bp, Probe Sequence
tggtttcacgcctcaggcaattaga

SEQ ID NO: 277590 - DNA, 25 bp, Probe Sequence
tgtgtttccacctacgggatcatca

SEQ ID NO: 277591 - DNA, 25 bp, Probe Sequence
tgggacccaccgtgtagacacacga

SEQ ID NO: 277592 - DNA, 25 bp, Probe Sequence
tggtggtccaccattggataaacca

SEQ ID NO: 277593 - DNA, 25 bp, Probe Sequence
tcgggccagacctcgaaaaatctcc

SEQ ID NO: 277594 - DNA, 25 bp, Probe Sequence
tggggtacccttgataaaccatctc

SEQ ID NO: 277595 - DNA, 25 bp, Probe Sequence
tggggtagagccagaacaagacctc

SEQ ID NO: 277596 - DNA, 25 bp, Probe Sequence
tggaggtagacgagaggcccacgga

SEQ ID NO: 277597 - DNA, 25 bp, Probe Sequence
tggaggaagacgaggtggccctggg

SEQ ID NO: 277598 - DNA, 25 bp, Probe Sequence
tggaggaacaagaccgtggctgccc

SEQ ID NO: 277599 - DNA, 25 bp, Probe Sequence
tggaggactcagaccctgagcctga

SEQ ID NO: 277600 - DNA, 25 bp, Probe Sequence
tggaggagtcagtgcctcactccag

SEQ ID NO: 277601 - DNA, 25 bp, Probe Sequence
tggaggagtgagtccctatgctgac

SEQ ID NO: 277602 - DNA, 25 bp, Probe Sequence
tggaggatgaggccactctgggcca

SEQ ID NO: 277603 - DNA, 25 bp, Probe Sequence
tggaggatagagccagctgtctgac

SEQ ID NO: 277604 - DNA, 25 bp, Probe Sequence
tggaggctaaggtgtgcagatcact

SEQ ID NO: 277605 - DNA, 25 bp, Probe Sequence
tggatggccaatgagcctgtctcct

SEQ ID NO: 277606 - DNA, 25 bp, Probe Sequence
tggatggccgtgaatgggtgcccac

SEQ ID NO: 277607 - DNA, 25 bp, Probe Sequence
tggatgtgccgggaatggggcgccc

SEQ ID NO: 277608 - DNA, 25 bp, Probe Sequence
tggattccaagacgctggggcagca

SEQ ID NO: 277609 - DNA, 25 bp, Probe Sequence
tgtcaacgcaaaggcaccagtcacg

SEQ ID NO: 277610 - DNA, 25 bp, Probe Sequence
tgtccaggcaaatgccaggccttgt

SEQ ID NO: 277611 - DNA, 25 bp, Probe Sequence
tgtccacaacaatgcagggttctgc

SEQ ID NO: 277612 - DNA, 25 bp, Probe Sequence
tggtacaagacaaaggagatcctgc

SEQ ID NO: 277613 - DNA, 25 bp, Probe Sequence
tggtccaagacctgggtcagttctt

SEQ ID NO: 277614 - DNA, 25 bp, Probe Sequence
tgggccaaggtctgggacctgtctt

SEQ ID NO: 277615 - DNA, 25 bp, Probe Sequence
tgggccaaggtctgggacctgtctt

SEQ ID NO: 277616 - DNA, 25 bp, Probe Sequence
tgggcaacagggaggtaccttcctt

SEQ ID NO: 277617 - DNA, 25 bp, Probe Sequence
tgggcactgcagcgttggaacgtga

SEQ ID NO: 277618 - DNA, 25 bp, Probe Sequence
tggtctctgagtcatgttaatcgat

SEQ ID NO: 277619 - DNA, 25 bp, Probe Sequence
tggatcctggatatgatagcatcat

SEQ ID NO: 277620 - DNA, 25 bp, Probe Sequence
tggtttgcaatattgatggatgtct

SEQ ID NO: 277621 - DNA, 25 bp, Probe Sequence
tggtggataatatggtagttctatt

SEQ ID NO: 277622 - DNA, 25 bp, Probe Sequence
tgtgtgccagactaaggggtttgta

SEQ ID NO: 277623 - DNA, 25 bp, Probe Sequence
tgggcctgcggaaggcagggtagta

SEQ ID NO: 277624 - DNA, 25 bp, Probe Sequence
tggtttcagtgacggcggcggaacc

SEQ ID NO: 277625 - DNA, 25 bp, Probe Sequence
tggtcttcagcgccctgggcgctgc

SEQ ID NO: 277626 - DNA, 25 bp, Probe Sequence
tggatgcttgactcacgaggtgccc

SEQ ID NO: 277627 - DNA, 25 bp, Probe Sequence
tggtctcgatctgacctcgtgatcc

SEQ ID NO: 277628 - DNA, 25 bp, Probe Sequence
tggtccgcattggggtgctggatga

SEQ ID NO: 277629 - DNA, 25 bp, Probe Sequence
tggtcgtattgggcgcctggtcacc

SEQ ID NO: 277630 - DNA, 25 bp, Probe Sequence
tgtgtagaacggggctggtccactc

SEQ ID NO: 277631 - DNA, 25 bp, Probe Sequence
tggtaaacattggcttgcctcccat

SEQ ID NO: 277632 - DNA, 25 bp, Probe Sequence
tgggaaaagtggtgaatcccaccca

SEQ ID NO: 277633 - DNA, 25 bp, Probe Sequence
tggaggaaaaggtgacttctgcccc

SEQ ID NO: 277634 - DNA, 25 bp, Probe Sequence
tggaggcgaagagccgacttggccc

SEQ ID NO: 277635 - DNA, 25 bp, Probe Sequence
tggaggctgttagctaacttgcaca

SEQ ID NO: 277636 - DNA, 25 bp, Probe Sequence
tggtagcttaagatgacaacattca

SEQ ID NO: 277637 - DNA, 25 bp, Probe Sequence
tggtatttaatgctgatctactata

SEQ ID NO: 277638 - DNA, 25 bp, Probe Sequence
tggtttcatcaatcatgcctattta

SEQ ID NO: 277639 - DNA, 25 bp, Probe Sequence
tggtcttggagcttctgactagttc

SEQ ID NO: 277640 - DNA, 25 bp, Probe Sequence
tggtcttggatgagcaacgatttgc

SEQ ID NO: 277641 - DNA, 25 bp, Probe Sequence
tgggttggctgaaaatggatttggg

SEQ ID NO: 277642 - DNA, 25 bp, Probe Sequence
tgggcttaggtttgggactagaggg

SEQ ID NO: 277643 - DNA, 25 bp, Probe Sequence
tggttctagcttttgggaaaacgtg

SEQ ID NO: 277644 - DNA, 25 bp, Probe Sequence
tggtgtgtttcgtgggaacaactgg

SEQ ID NO: 277645 - DNA, 25 bp, Probe Sequence
tggtttttcttttgaccaccagctg

SEQ ID NO: 277646 - DNA, 25 bp, Probe Sequence
tggtgttgctttttaaccttcctgg

SEQ ID NO: 277647 - DNA, 25 bp, Probe Sequence
tggtttcatttagcagactttacta

SEQ ID NO: 277648 - DNA, 25 bp, Probe Sequence
tggtattctgtatactctccttact

SEQ ID NO: 277649 - DNA, 25 bp, Probe Sequence
tgtacattccaaaaactctaaactt

SEQ ID NO: 277650 - DNA, 25 bp, Probe Sequence
tgtttataaaacacttgagaacttt

SEQ ID NO: 277651 - DNA, 25 bp, Probe Sequence
tgtttagtaaatcccttcagtattt

SEQ ID NO: 277652 - DNA, 25 bp, Probe Sequence
tggttgatgttaaggccctccattt

SEQ ID NO: 277653 - DNA, 25 bp, Probe Sequence
tggttggtctgaagtccttgcaaga

SEQ ID NO: 277654 - DNA, 25 bp, Probe Sequence
tggatatggagtatgttttgctatg

SEQ ID NO: 277655 - DNA, 25 bp, Probe Sequence
tggatggggctggcatgttttcttt

SEQ ID NO: 277656 - DNA, 25 bp, Probe Sequence
tggattggggcagtctttgtgcgtt

SEQ ID NO: 277657 - DNA, 25 bp, Probe Sequence
tggtctgttgtatctctagtcagtt

SEQ ID NO: 277658 - DNA, 25 bp, Probe Sequence
tggttgaatgatttcccactcaggg

SEQ ID NO: 277659 - DNA, 25 bp, Probe Sequence
tggattgagaagtctcccatctcgc

SEQ ID NO: 277660 - DNA, 25 bp, Probe Sequence
tggatataccgggacctcatgcagc

SEQ ID NO: 277661 - DNA, 25 bp, Probe Sequence
tggattaccaaaatcactctgcagc

SEQ ID NO: 277662 - DNA, 25 bp, Probe Sequence
tggttcatgccagtaatcccagcac

SEQ ID NO: 277663 - DNA, 25 bp, Probe Sequence
tggttcatgccagtaatcccagcac

SEQ ID NO: 277664 - DNA, 25 bp, Probe Sequence
tggtgctcagcaccttgtgggagcc

SEQ ID NO: 277665 - DNA, 25 bp, Probe Sequence
tggatgtagggcaggggcccgggct

SEQ ID NO: 277666 - DNA, 25 bp, Probe Sequence
tggttgaggaggagctggaccgggc

SEQ ID NO: 277667 - DNA, 25 bp, Probe Sequence
tggttgaggaggagctggaccgggc

SEQ ID NO: 277668 - DNA, 25 bp, Probe Sequence
tggtcgtgccaaaaagggccgcggc

SEQ ID NO: 277669 - DNA, 25 bp, Probe Sequence
tggtggcccaatggaagtggcctgg

SEQ ID NO: 277670 - DNA, 25 bp, Probe Sequence
tggtatgccgcatctggagggccat

SEQ ID NO: 277671 - DNA, 25 bp, Probe Sequence
tggttcggatttggggtggattttg

SEQ ID NO: 277672 - DNA, 25 bp, Probe Sequence
tggttgggagtcctgggtggagggg

SEQ ID NO: 277673 - DNA, 25 bp, Probe Sequence
tggtcttggacgtggtttcagtggg

SEQ ID NO: 277674 - DNA, 25 bp, Probe Sequence
tggtgttggcaaatagtttacggtt

SEQ ID NO: 277675 - DNA, 25 bp, Probe Sequence
tggtgttgggcgagtacgaccgtgc

SEQ ID NO: 277676 - DNA, 25 bp, Probe Sequence
tggtgttgggtgagtacaaccttgc

SEQ ID NO: 277677 - DNA, 25 bp, Probe Sequence
tgggggacttgatgtcccccttcga

SEQ ID NO: 277678 - DNA, 25 bp, Probe Sequence
tggtgggcacttgtagtcccagcta

SEQ ID NO: 277679 - DNA, 25 bp, Probe Sequence
tggtcttgacttgtcatattccccc

SEQ ID NO: 277680 - DNA, 25 bp, Probe Sequence
tggtttgactatttctgtatgtctc

SEQ ID NO: 277681 - DNA, 25 bp, Probe Sequence
tggtttgcactgtctattaaatatc

SEQ ID NO: 277682 - DNA, 25 bp, Probe Sequence
tggtgcttgcagttttaaatattgt

SEQ ID NO: 277683 - DNA, 25 bp, Probe Sequence
tggtttcccttgtatctatttgtgg

SEQ ID NO: 277684 - DNA, 25 bp, Probe Sequence
tggtaaccacttgttatatgttagc

SEQ ID NO: 277685 - DNA, 25 bp, Probe Sequence
tggtcccaacttgttcttgatttcc

SEQ ID NO: 277686 - DNA, 25 bp, Probe Sequence
tggtgccttacttttatcttaattt

SEQ ID NO: 277687 - DNA, 25 bp, Probe Sequence
tggttttatccatgtctctagcaat

SEQ ID NO: 277688 - DNA, 25 bp, Probe Sequence
tggatggtgtctcctttactaaata

SEQ ID NO: 277689 - DNA, 25 bp, Probe Sequence
tggtggttctgctgttacgtttgaa

SEQ ID NO: 277690 - DNA, 25 bp, Probe Sequence
tggttatttcaacttcacctcggca

SEQ ID NO: 277691 - DNA, 25 bp, Probe Sequence
tggtgttttatacgcttcctcgtac

SEQ ID NO: 277692 - DNA, 25 bp, Probe Sequence
tggtttctcttaggactttgcccac

SEQ ID NO: 277693 - DNA, 25 bp, Probe Sequence
tggtttccatctgtactttggtcct

SEQ ID NO: 277694 - DNA, 25 bp, Probe Sequence
tgtatctaaactgtacttgtacccc

SEQ ID NO: 277695 - DNA, 25 bp, Probe Sequence
tgtttgcaaattgtccaacccaccc

SEQ ID NO: 277696 - DNA, 25 bp, Probe Sequence
tggtggccaaggttccaaccaagtt

SEQ ID NO: 277697 - DNA, 25 bp, Probe Sequence
tggggccaatggagaaatgcagcat

SEQ ID NO: 277698 - DNA, 25 bp, Probe Sequence
tggaggccacaggagcagaaacatg

SEQ ID NO: 277699 - DNA, 25 bp, Probe Sequence
tggatcctcactgggaaacatcagg

SEQ ID NO: 277700 - DNA, 25 bp, Probe Sequence
tggtactatccacaaatcatgcagt

SEQ ID NO: 277701 - DNA, 25 bp, Probe Sequence
tggttttccacttaacgcaatttat

SEQ ID NO: 277702 - DNA, 25 bp, Probe Sequence
tggattttccaccaaattctgaatt

SEQ ID NO: 277703 - DNA, 25 bp, Probe Sequence
tggatgtactccaggaaatagaaaa

SEQ ID NO: 277704 - DNA, 25 bp, Probe Sequence
tggatgtaattcaggcaggaaaaga

SEQ ID NO: 277705 - DNA, 25 bp, Probe Sequence
tggatgtatatcagtggagaaaatg

SEQ ID NO: 277706 - DNA, 25 bp, Probe Sequence
tggtgctgtacctttgagaacttcc

SEQ ID NO: 277707 - DNA, 25 bp, Probe Sequence
tggtttaccattgatgacttcgcct

SEQ ID NO: 277708 - DNA, 25 bp, Probe Sequence
tggatttgatccatttcctctctac

SEQ ID NO: 277709 - DNA, 25 bp, Probe Sequence
tggttatgctgaagttccttcctca

SEQ ID NO: 277710 - DNA, 25 bp, Probe Sequence
tggtatatgatgtggtcagcccctg

SEQ ID NO: 277711 - DNA, 25 bp, Probe Sequence
tggttcatgggggagcagtcccctc

SEQ ID NO: 277712 - DNA, 25 bp, Probe Sequence
tggatcctggcagcgaggagaccca

SEQ ID NO: 277713 - DNA, 25 bp, Probe Sequence
tggatcctggcagcgaggagaccca

SEQ ID NO: 277714 - DNA, 25 bp, Probe Sequence
tggatggatgtagggcaggggcccg

SEQ ID NO: 277715 - DNA, 25 bp, Probe Sequence
tggatgaattatttgcatgggtgca

SEQ ID NO: 277716 - DNA, 25 bp, Probe Sequence
tggattgacaaaatcatgaggctca

SEQ ID NO: 277717 - DNA, 25 bp, Probe Sequence
tggtctgaattgaatggagtctgca

SEQ ID NO: 277718 - DNA, 25 bp, Probe Sequence
tggtcatgactgaagtccagatcca

SEQ ID NO: 277719 - DNA, 25 bp, Probe Sequence
tggtgcgatgatgggcctggcaaca

SEQ ID NO: 277720 - DNA, 25 bp, Probe Sequence
tgtcgggactgagcaggcaatggcc

SEQ ID NO: 277721 - DNA, 25 bp, Probe Sequence
tgtagcggaaggaattgcgggcctt

SEQ ID NO: 277722 - DNA, 25 bp, Probe Sequence
tgtctgttagggaaagcaggagcct

SEQ ID NO: 277723 - DNA, 25 bp, Probe Sequence
tggggctagggtcacagcccctaac

SEQ ID NO: 277724 - DNA, 25 bp, Probe Sequence
tggggaaagcgggaagcgctcgctc

SEQ ID NO: 277725 - DNA, 25 bp, Probe Sequence
tgggatggagcccgaaggcgtcatc

SEQ ID NO: 277726 - DNA, 25 bp, Probe Sequence
tggttgaggcgcggaagctggaggc

SEQ ID NO: 277727 - DNA, 25 bp, Probe Sequence
tggtccatgggcgggtgtggagtca

SEQ ID NO: 277728 - DNA, 25 bp, Probe Sequence
tggatccagcgtcagtgtgtcgatg

SEQ ID NO: 277729 - DNA, 25 bp, Probe Sequence
tggtctcagcttcatttccgtgaag

SEQ ID NO: 277730 - DNA, 25 bp, Probe Sequence
tggatgctctctatttagcggagaa

SEQ ID NO: 277731 - DNA, 25 bp, Probe Sequence
tggtgctctctatctgtttaagaca

SEQ ID NO: 277732 - DNA, 25 bp, Probe Sequence
tggatgcacctttctgtctaaatgc

SEQ ID NO: 277733 - DNA, 25 bp, Probe Sequence
tggatgacacttgtgatctctttgc

SEQ ID NO: 277734 - DNA, 25 bp, Probe Sequence
tggtgaatgactggtgtgccttctg

SEQ ID NO: 277735 - DNA, 25 bp, Probe Sequence
tggtgaatgactggtgtgccttctg

SEQ ID NO: 277736 - DNA, 25 bp, Probe Sequence
tggtgaatgtctgttcagctcttct

SEQ ID NO: 277737 - DNA, 25 bp, Probe Sequence
tggtaatggctttcctgtctttgta

SEQ ID NO: 277738 - DNA, 25 bp, Probe Sequence
tggtatatgcctttactacttttaa

SEQ ID NO: 277739 - DNA, 25 bp, Probe Sequence
tggttttcttcaagatatctttaaa

SEQ ID NO: 277740 - DNA, 25 bp, Probe Sequence
tggttcctgtgcatatgtattttca

SEQ ID NO: 277741 - DNA, 25 bp, Probe Sequence
tggttgctttctattttttcttggg

SEQ ID NO: 277742 - DNA, 25 bp, Probe Sequence
tggatccttttcataccttatttgg

SEQ ID NO: 277743 - DNA, 25 bp, Probe Sequence
tgagaaattgaatgtaccttattta

SEQ ID NO: 277744 - DNA, 25 bp, Probe Sequence
tggataaatcaatggacctggtttt

SEQ ID NO: 277745 - DNA, 25 bp, Probe Sequence
tggatataacttgggcacctcctga

SEQ ID NO: 277746 - DNA, 25 bp, Probe Sequence
tggatatcagacattgaccaccaca

SEQ ID NO: 277747 - DNA, 25 bp, Probe Sequence
tggtacacaagtgcagccagctcaa

SEQ ID NO: 277748 - DNA, 25 bp, Probe Sequence
tggatccatcggatcatccccaaac

SEQ ID NO: 277749 - DNA, 25 bp, Probe Sequence
tggatccatcggatcatccccaaac

SEQ ID NO: 277750 - DNA, 25 bp, Probe Sequence
tggattcatcagcatttggaccaat

SEQ ID NO: 277751 - DNA, 25 bp, Probe Sequence
tggatttcatcgtggctgcatccaa

SEQ ID NO: 277752 - DNA, 25 bp, Probe Sequence
tggatatggcaccaattctaccctg

SEQ ID NO: 277753 - DNA, 25 bp, Probe Sequence
tggattggatctttagccaccctga

SEQ ID NO: 277754 - DNA, 25 bp, Probe Sequence
tggtttaatattagccccggatctc

SEQ ID NO: 277755 - DNA, 25 bp, Probe Sequence
tggatttctatgttatgccggtggt

SEQ ID NO: 277756 - DNA, 25 bp, Probe Sequence
tggataactagaataaccgatgcag

SEQ ID NO: 277757 - DNA, 25 bp, Probe Sequence
tggataaatcacaccacctgacagg

SEQ ID NO: 277758 - DNA, 25 bp, Probe Sequence
tggtagaataagcccacctgcaacc

SEQ ID NO: 277759 - DNA, 25 bp, Probe Sequence
tggattgtaatccagacactctgaa

SEQ ID NO: 277760 - DNA, 25 bp, Probe Sequence
tggatttgttagaccactctgtcaa

SEQ ID NO: 277761 - DNA, 25 bp, Probe Sequence
tggtgttttagatgatactgtcaaa

SEQ ID NO: 277762 - DNA, 25 bp, Probe Sequence
tggtgtttacagtgctgcaaattac

SEQ ID NO: 277763 - DNA, 25 bp, Probe Sequence
tgagttgttttctctaacagtccac

SEQ ID NO: 277764 - DNA, 25 bp, Probe Sequence
tggttgtttttatcatagtgtacac

SEQ ID NO: 277765 - DNA, 25 bp, Probe Sequence
tggttggttttatccatgtctctag

SEQ ID NO: 277766 - DNA, 25 bp, Probe Sequence
tggttttttcataactgcagtcctt

SEQ ID NO: 277767 - DNA, 25 bp, Probe Sequence
tggtcgtttttgatgctcgatgaat

SEQ ID NO: 277768 - DNA, 25 bp, Probe Sequence
tggtcagctatttttggttgcataa

SEQ ID NO: 277769 - DNA, 25 bp, Probe Sequence
tggtagctctatttagcagttgtcc

SEQ ID NO: 277770 - DNA, 25 bp, Probe Sequence
tggatcctgattgtcaggttttcca

SEQ ID NO: 277771 - DNA, 25 bp, Probe Sequence
tggatacatagataaggtttctctc

SEQ ID NO: 277772 - DNA, 25 bp, Probe Sequence
tggatccaaagtcagtctcttctct

SEQ ID NO: 277773 - DNA, 25 bp, Probe Sequence
tggttaaaagcaagtcatagttctg

SEQ ID NO: 277774 - DNA, 25 bp, Probe Sequence
tggttaccagtgtgtcaggcaatct

SEQ ID NO: 277775 - DNA, 25 bp, Probe Sequence
tggttttcggaactgaggccatgat

SEQ ID NO: 277776 - DNA, 25 bp, Probe Sequence
tggtctactctatcacaaggccagt

SEQ ID NO: 277777 - DNA, 25 bp, Probe Sequence
tggtctgacgtctgtaatcccagca

SEQ ID NO: 277778 - DNA, 25 bp, Probe Sequence
tggttgatcctcttgtactgggaga

SEQ ID NO: 277779 - DNA, 25 bp, Probe Sequence
tggtgggcctagatcactggtgtga

SEQ ID NO: 277780 - DNA, 25 bp, Probe Sequence
tggtagcacagctgcaaccgttgga

SEQ ID NO: 277781 - DNA, 25 bp, Probe Sequence
tggtatcactgttgacccttgtgga

SEQ ID NO: 277782 - DNA, 25 bp, Probe Sequence
tggatattctatgacctctgtcggt

SEQ ID NO: 277783 - DNA, 25 bp, Probe Sequence
tggatattgtattaccctgggtatt

SEQ ID NO: 277784 - DNA, 25 bp, Probe Sequence
tggatttgttattcacacaagtgtt

SEQ ID NO: 277785 - DNA, 25 bp, Probe Sequence
tgggcatatgtgtaccaaagggtca

SEQ ID NO: 277786 - DNA, 25 bp, Probe Sequence
tgggaagcgatggatcacaaggtta

SEQ ID NO: 277787 - DNA, 25 bp, Probe Sequence
tgggaatggcagactccggtcatta

SEQ ID NO: 277788 - DNA, 25 bp, Probe Sequence
tggataaagagcaccgcccagtgga

SEQ ID NO: 277789 - DNA, 25 bp, Probe Sequence
tggtgcgaaggcacccgacatacag

SEQ ID NO: 277790 - DNA, 25 bp, Probe Sequence
tggatttcatagtttctctgtcagt

SEQ ID NO: 277791 - DNA, 25 bp, Probe Sequence
tggtttctagacttgtgctgatcgt

SEQ ID NO: 277792 - DNA, 25 bp, Probe Sequence
tggttttcagtcttgctgagactct

SEQ ID NO: 277793 - DNA, 25 bp, Probe Sequence
tggattctgctacagtcaggactta

SEQ ID NO: 277794 - DNA, 25 bp, Probe Sequence
tggattatctacagtgagcagactt

SEQ ID NO: 277795 - DNA, 25 bp, Probe Sequence
tggatacattacagcagacatggaa

SEQ ID NO: 277796 - DNA, 25 bp, Probe Sequence
tggtcaccatcagagtactggaata

SEQ ID NO: 277797 - DNA, 25 bp, Probe Sequence
tggtcaccatgtgtctatctgaagg

SEQ ID NO: 277798 - DNA, 25 bp, Probe Sequence
tggatctccaatgttttggggatgc

SEQ ID NO: 277799 - DNA, 25 bp, Probe Sequence
tggttaggataatttgtggagtggc

SEQ ID NO: 277800 - DNA, 25 bp, Probe Sequence
tggtgggaaaaaaggcagcagctac

SEQ ID NO: 277801 - DNA, 25 bp, Probe Sequence
tggtgggaaaaaaggcagcagctac

SEQ ID NO: 277802 - DNA, 25 bp, Probe Sequence
tggtgttcggcaaaaggacctccac

SEQ ID NO: 277803 - DNA, 25 bp, Probe Sequence
tggtttctgttatagcagtccccac

SEQ ID NO: 277804 - DNA, 25 bp, Probe Sequence
tggtttcggatagtaggctctccct

SEQ ID NO: 277805 - DNA, 25 bp, Probe Sequence
tggtttcggatagtaggctctccct

SEQ ID NO: 277806 - DNA, 25 bp, Probe Sequence
tgagtcctcccaatttcagactccc

SEQ ID NO: 277807 - DNA, 25 bp, Probe Sequence
tggtcctgtccagtgtatctttcac

SEQ ID NO: 277808 - DNA, 25 bp, Probe Sequence
tggtcactgcatcttgtatcgatta

SEQ ID NO: 277809 - DNA, 25 bp, Probe Sequence
tggtcaggatcatttgctctcttta

SEQ ID NO: 277810 - DNA, 25 bp, Probe Sequence
tggtcatagcatctatctcctttgc

SEQ ID NO: 277811 - DNA, 25 bp, Probe Sequence
tggtatatactttctcctactctag

SEQ ID NO: 277812 - DNA, 25 bp, Probe Sequence
tgggaatagcttatccaatcattga

SEQ ID NO: 277813 - DNA, 25 bp, Probe Sequence
tggtacacctctttacgtatatgat

SEQ ID NO: 277814 - DNA, 25 bp, Probe Sequence
tggtacacctctttacgtatatgat

SEQ ID NO: 277815 - DNA, 25 bp, Probe Sequence
tggatacatactgatttcttactga

SEQ ID NO: 277816 - DNA, 25 bp, Probe Sequence
tggtacaagcaccttatctatcaca

SEQ ID NO: 277817 - DNA, 25 bp, Probe Sequence
tggtcctctgagcttactatacatc

SEQ ID NO: 277818 - DNA, 25 bp, Probe Sequence
tggtcacactaataacatcaacatc

SEQ ID NO: 277819 - DNA, 25 bp, Probe Sequence
tggttcatcttcaaaatcagagact

SEQ ID NO: 277820 - DNA, 25 bp, Probe Sequence
tggttcatgcttctactgtgacact

SEQ ID NO: 277821 - DNA, 25 bp, Probe Sequence
tggtctcagcatgttgactgggatt

SEQ ID NO: 277822 - DNA, 25 bp, Probe Sequence
tggtcatatgacctgatactgggta

SEQ ID NO: 277823 - DNA, 25 bp, Probe Sequence
tggtgctgtcagatcatagttggta

SEQ ID NO: 277824 - DNA, 25 bp, Probe Sequence
tggtgcatttgcttgtaatacagtt

SEQ ID NO: 277825 - DNA, 25 bp, Probe Sequence
tggtgcattgtctgtcatgaatact

SEQ ID NO: 277826 - DNA, 25 bp, Probe Sequence
tggtctggcctgcacagacatccta

SEQ ID NO: 277827 - DNA, 25 bp, Probe Sequence
tggtgcgagctggcacccacatcct

SEQ ID NO: 277828 - DNA, 25 bp, Probe Sequence
tggtcgatgctcgactcattcactg

SEQ ID NO: 277829 - DNA, 25 bp, Probe Sequence
tggtgcgacactgtgcattgcatta

SEQ ID NO: 277830 - DNA, 25 bp, Probe Sequence
tggtcatatactctgcagctgttag

SEQ ID NO: 277831 - DNA, 25 bp, Probe Sequence
tggtcatatactctgcagctgttag

SEQ ID NO: 277832 - DNA, 25 bp, Probe Sequence
tggtctgctacctgaggtctcaggt

SEQ ID NO: 277833 - DNA, 25 bp, Probe Sequence
tggataggagcctgctggtcacagc

SEQ ID NO: 277834 - DNA, 25 bp, Probe Sequence
tggtcggaagattgctggactcgct

SEQ ID NO: 277835 - DNA, 25 bp, Probe Sequence
tggtcctggaatcagagactccttg

SEQ ID NO: 277836 - DNA, 25 bp, Probe Sequence
tggtccttgtcaccaaggtctccag

SEQ ID NO: 277837 - DNA, 25 bp, Probe Sequence
tggtgccttgtttaatggtctgaca

SEQ ID NO: 277838 - DNA, 25 bp, Probe Sequence
tggtgtgcggttaccagtttataaa

SEQ ID NO: 277839 - DNA, 25 bp, Probe Sequence
tggtggccttatgtcagttgtctac

SEQ ID NO: 277840 - DNA, 25 bp, Probe Sequence
tggttgtttagggcagtcttatctg

SEQ ID NO: 277841 - DNA, 25 bp, Probe Sequence
tggtccctgctagggagctattgat

SEQ ID NO: 277842 - DNA, 25 bp, Probe Sequence
tggtcaccgccaggactgaatgtta

SEQ ID NO: 277843 - DNA, 25 bp, Probe Sequence
tggtaggagcacgagagccactgct

SEQ ID NO: 277844 - DNA, 25 bp, Probe Sequence
tggtcagggactacctcatggctga

SEQ ID NO: 277845 - DNA, 25 bp, Probe Sequence
tggtagagggcttccatgtggatga

SEQ ID NO: 277846 - DNA, 25 bp, Probe Sequence
tggtcaaggacacccaggccatgaa

SEQ ID NO: 277847 - DNA, 25 bp, Probe Sequence
tggtcatcggaaaaccccattcaca

SEQ ID NO: 277848 - DNA, 25 bp, Probe Sequence
tggtcataggaaactaccggacgca

SEQ ID NO: 277849 - DNA, 25 bp, Probe Sequence
tggattgagaacactgctaaggaca

SEQ ID NO: 277850 - DNA, 25 bp, Probe Sequence
tggttggttttcctaagacatactt

SEQ ID NO: 277851 - DNA, 25 bp, Probe Sequence
tggttggtgttgtgtttaaagtgtt

SEQ ID NO: 277852 - DNA, 25 bp, Probe Sequence
tggtgggtcgtaagtttaggaggtg

SEQ ID NO: 277853 - DNA, 25 bp, Probe Sequence
tggggtgtctgtgttatttgtgggg

SEQ ID NO: 277854 - DNA, 25 bp, Probe Sequence
tggggttccttttattagtgctttg

SEQ ID NO: 277855 - DNA, 25 bp, Probe Sequence
tgaggcggtcctgttattaccattt

SEQ ID NO: 277856 - DNA, 25 bp, Probe Sequence
tgggagctgaccttttattccctac

SEQ ID NO: 277857 - DNA, 25 bp, Probe Sequence
tgggagaaaattttcacgacctact

SEQ ID NO: 277858 - DNA, 25 bp, Probe Sequence
ttggtttaatattagccccggatct

SEQ ID NO: 277859 - DNA, 25 bp, Probe Sequence
ttggggaacttgtgtccctaatgtg

SEQ ID NO: 277860 - DNA, 25 bp, Probe Sequence
tgggggaggttgtttccactaggag

SEQ ID NO: 277861 - DNA, 25 bp, Probe Sequence
tgggggaggttgtttccactaggag

SEQ ID NO: 277862 - DNA, 25 bp, Probe Sequence
tgggtggcagaaatggttccttccg

SEQ ID NO: 277863 - DNA, 25 bp, Probe Sequence
tggtgttgaaagttcttcctggagc

SEQ ID NO: 277864 - DNA, 25 bp, Probe Sequence
tggtctaagaatgacgatgccttca

SEQ ID NO: 277865 - DNA, 25 bp, Probe Sequence
tggttccatcaagactgtgcaccca

SEQ ID NO: 277866 - DNA, 25 bp, Probe Sequence
tggttctcagaaccatttcacccag

SEQ ID NO: 277867 - DNA, 25 bp, Probe Sequence
tggattgatcacattgtttgaccca

SEQ ID NO: 277868 - DNA, 25 bp, Probe Sequence
tggtgaaatccttgatgtcgacaaa

SEQ ID NO: 277869 - DNA, 25 bp, Probe Sequence
tggtacatcacagcaattagaaaga

SEQ ID NO: 277870 - DNA, 25 bp, Probe Sequence
tggtcctgcaccaaactacaaagat

SEQ ID NO: 277871 - DNA, 25 bp, Probe Sequence
tggtgtctcctttactaaataagaa

SEQ ID NO: 277872 - DNA, 25 bp, Probe Sequence
tggtatctcctctaagtaaggaaga

SEQ ID NO: 277873 - DNA, 25 bp, Probe Sequence
tggtaatcctgctcagtacgagagg

SEQ ID NO: 277874 - DNA, 25 bp, Probe Sequence
tggtatatcttcatcagtgacgagg

SEQ ID NO: 277875 - DNA, 25 bp, Probe Sequence
tggtatcatttcctagtgactcggc

SEQ ID NO: 277876 - DNA, 25 bp, Probe Sequence
tgggcaatgtaggggtactccacct

SEQ ID NO: 277877 - DNA, 25 bp, Probe Sequence
tggtgactggaatgggacccacgtg

SEQ ID NO: 277878 - DNA, 25 bp, Probe Sequence
tggtgagatcagcatcgggactcca

SEQ ID NO: 277879 - DNA, 25 bp, Probe Sequence
tggtatagcatcctcaaggacacca

SEQ ID NO: 277880 - DNA, 25 bp, Probe Sequence
tggtgatgcatgacccaagctaatc

SEQ ID NO: 277881 - DNA, 25 bp, Probe Sequence
tggtgtcagataccagtgctactgc

SEQ ID NO: 277882 - DNA, 25 bp, Probe Sequence
tggtgctctaggctgtgctgagccc

SEQ ID NO: 277883 - DNA, 25 bp, Probe Sequence
tggtctccaggcaggtgagcgacga

SEQ ID NO: 277884 - DNA, 25 bp, Probe Sequence
tggttctgcatggcaggaagcagga

SEQ ID NO: 277885 - DNA, 25 bp, Probe Sequence
tggtggcatgcggggaggaagaggt

SEQ ID NO: 277886 - DNA, 25 bp, Probe Sequence
tggtgccatcgtagcctaaaagcgt

SEQ ID NO: 277887 - DNA, 25 bp, Probe Sequence
tggtccctgttgttctaaagctaaa

SEQ ID NO: 277888 - DNA, 25 bp, Probe Sequence
tggttcctcttacttcaatttgaac

SEQ ID NO: 277889 - DNA, 25 bp, Probe Sequence
tggtacgttataacatcaattatag

SEQ ID NO: 277890 - DNA, 25 bp, Probe Sequence
tggtacatattttgacatgcatata

SEQ ID NO: 277891 - DNA, 25 bp, Probe Sequence
tggtgagtactcctgacaacatata

SEQ ID NO: 277892 - DNA, 25 bp, Probe Sequence
tggtaatactctgacaacactgaaa

SEQ ID NO: 277893 - DNA, 25 bp, Probe Sequence
tggtgtacctctgccaaactgacac

SEQ ID NO: 277894 - DNA, 25 bp, Probe Sequence
tggtgtcactctctaaatgaccaaa

SEQ ID NO: 277895 - DNA, 25 bp, Probe Sequence
tggtagcacattcctatatttccag

SEQ ID NO: 277896 - DNA, 25 bp, Probe Sequence
tggtactcaatctcaactcatctca

SEQ ID NO: 277897 - DNA, 25 bp, Probe Sequence
tggttctcagatggtcagggactac

SEQ ID NO: 277898 - DNA, 25 bp, Probe Sequence
tgggttcgatggtagggaatacgga

SEQ ID NO: 277899 - DNA, 25 bp, Probe Sequence
tgggttcttgagcgtgggtagggat

SEQ ID NO: 277900 - DNA, 25 bp, Probe Sequence
tgggtgttaggatcctggtgaggga

SEQ ID NO: 277901 - DNA, 25 bp, Probe Sequence
tggtatattagatcccatgggaggc

SEQ ID NO: 277902 - DNA, 25 bp, Probe Sequence
tggttagaagctttccatgcctagg

SEQ ID NO: 277903 - DNA, 25 bp, Probe Sequence
tggttagaagctttccatgcctagg

SEQ ID NO: 277904 - DNA, 25 bp, Probe Sequence
tggggaggactatccaggcattgtg

SEQ ID NO: 277905 - DNA, 25 bp, Probe Sequence
tgggtgcgggttaccagcactggga

SEQ ID NO: 277906 - DNA, 25 bp, Probe Sequence
tgggtcgaggcggacgccatagggc

SEQ ID NO: 277907 - DNA, 25 bp, Probe Sequence
tgggtcaactgggcatcactaaggt

SEQ ID NO: 277908 - DNA, 25 bp, Probe Sequence
tgggtaacaggcctcaagcaagtct

SEQ ID NO: 277909 - DNA, 25 bp, Probe Sequence
tggggcgacgtggacaataatgtgc

SEQ ID NO: 277910 - DNA, 25 bp, Probe Sequence
tggtgggcatgtgggacgtttctgc

SEQ ID NO: 277911 - DNA, 25 bp, Probe Sequence
tggtgggtgccagaagcttatcaaa

SEQ ID NO: 277912 - DNA, 25 bp, Probe Sequence
tggtaggctaatcacactctgtaag

SEQ ID NO: 277913 - DNA, 25 bp, Probe Sequence
tggtggtatgaaaacattcctagtg

SEQ ID NO: 277914 - DNA, 25 bp, Probe Sequence
tgtggacttaactcattcttggctg

SEQ ID NO: 277915 - DNA, 25 bp, Probe Sequence
tgggacgtttctgcatttggactga

SEQ ID NO: 277916 - DNA, 25 bp, Probe Sequence
tgggacgtttctgcatttggactga

SEQ ID NO: 277917 - DNA, 25 bp, Probe Sequence
tggtacctggtgggattggtgagct

SEQ ID NO: 277918 - DNA, 25 bp, Probe Sequence
tggtacctagtgtgtgtctgatgcc

SEQ ID NO: 277919 - DNA, 25 bp, Probe Sequence
tggtactattatgtgggtgatgcct

SEQ ID NO: 277920 - DNA, 25 bp, Probe Sequence
tggtttattctcaggagttgcttgt

SEQ ID NO: 277921 - DNA, 25 bp, Probe Sequence
tggtttgtttcttgggattttctgt

SEQ ID NO: 277922 - DNA, 25 bp, Probe Sequence
tggtttggtttggtgttttctgatt

SEQ ID NO: 277923 - DNA, 25 bp, Probe Sequence
tggttgtgtgtgtgtgtgttttctt

SEQ ID NO: 277924 - DNA, 25 bp, Probe Sequence
tggttgtgttgtagggttgcaggtt

SEQ ID NO: 277925 - DNA, 25 bp, Probe Sequence
tggttgcttctggtgggatcattgg

SEQ ID NO: 277926 - DNA, 25 bp, Probe Sequence
tggttaatccactgtcagatctgga

SEQ ID NO: 277927 - DNA, 25 bp, Probe Sequence
tggtgtgaacccggaagtcggaggt

SEQ ID NO: 277928 - DNA, 25 bp, Probe Sequence
tggtggacaccgcaaagaagaactt

SEQ ID NO: 277929 - DNA, 25 bp, Probe Sequence
tggggaggctccaaaaggacaagat

SEQ ID NO: 277930 - DNA, 25 bp, Probe Sequence
tgagttaccctaagacagggcagtt

SEQ ID NO: 277931 - DNA, 25 bp, Probe Sequence
tggtttgttcattaaagcaggcagt

SEQ ID NO: 277932 - DNA, 25 bp, Probe Sequence
tggtgtttgctcactaagcagggtc

SEQ ID NO: 277933 - DNA, 25 bp, Probe Sequence
tggtgtttgccatcaaggcggaaga

SEQ ID NO: 277934 - DNA, 25 bp, Probe Sequence
tggttatggtcctagaggtggcaag

SEQ ID NO: 277935 - DNA, 25 bp, Probe Sequence
tggtcagctggggcgagggctgtgc

SEQ ID NO: 277936 - DNA, 25 bp, Probe Sequence
tggtcagctggggcgagggctgtgc

SEQ ID NO: 277937 - DNA, 25 bp, Probe Sequence
tggtccagcgcaaggaggggctgct

SEQ ID NO: 277938 - DNA, 25 bp, Probe Sequence
tggtgacaggcagcagggtggcgac

SEQ ID NO: 277939 - DNA, 25 bp, Probe Sequence
tggtgatcgacatcccggagtgacc

SEQ ID NO: 277940 - DNA, 25 bp, Probe Sequence
tggtgacgtcaagctcctgaagcac

SEQ ID NO: 277941 - DNA, 25 bp, Probe Sequence
tggtgaagtgcccaccacatgaacc

SEQ ID NO: 277942 - DNA, 25 bp, Probe Sequence
tggtgtggtcactgtaagaacctgg

SEQ ID NO: 277943 - DNA, 25 bp, Probe Sequence
tggtgtggctggtcgtaaacagttt

SEQ ID NO: 277944 - DNA, 25 bp, Probe Sequence
tggtggtgctaatgttaatggtatt

SEQ ID NO: 277945 - DNA, 25 bp, Probe Sequence
tggtgtttaacacttaaacagtata

SEQ ID NO: 277946 - DNA, 25 bp, Probe Sequence
tggtgttagtgatgctggagaagag

SEQ ID NO: 277947 - DNA, 25 bp, Probe Sequence
tggtcttcaatggttagcagaaggg

SEQ ID NO: 277948 - DNA, 25 bp, Probe Sequence
tggtctcatcaaggtgaacgggcgg

SEQ ID NO: 277949 - DNA, 25 bp, Probe Sequence
tggtctgccaggtgaacggtgcctg

SEQ ID NO: 277950 - DNA, 25 bp, Probe Sequence
tggtggcacgagcaagatccggcct

SEQ ID NO: 277951 - DNA, 25 bp, Probe Sequence
tgtgtctgtctattttgatccggcc

SEQ ID NO: 277952 - DNA, 25 bp, Probe Sequence
tggtttataatcttgcacgaggcac

SEQ ID NO: 277953 - DNA, 25 bp, Probe Sequence
tggtctttaactacctgcatgccac

SEQ ID NO: 277954 - DNA, 25 bp, Probe Sequence
tggtgttggtaaatccagagaatct

SEQ ID NO: 277955 - DNA, 25 bp, Probe Sequence
tggtccctgtggtactcagagtatc

SEQ ID NO: 277956 - DNA, 25 bp, Probe Sequence
tggtccctgtggtactcagagtatc

SEQ ID NO: 277957 - DNA, 25 bp, Probe Sequence
tggtcccagtaaccaagagttgatt

SEQ ID NO: 277958 - DNA, 25 bp, Probe Sequence
tggtctgccgattaaaagagctcat

SEQ ID NO: 277959 - DNA, 25 bp, Probe Sequence
tggtatcagcacttcaagacagagc

SEQ ID NO: 277960 - DNA, 25 bp, Probe Sequence
tggtgcagtgatttctagccaggcg

SEQ ID NO: 277961 - DNA, 25 bp, Probe Sequence
tggtcatggatgcatatgagcctga

SEQ ID NO: 277962 - DNA, 25 bp, Probe Sequence
tggtcaggatatttggattagccag

SEQ ID NO: 277963 - DNA, 25 bp, Probe Sequence
tggtctaattgatggtcgcctcacc

SEQ ID NO: 277964 - DNA, 25 bp, Probe Sequence
tggttcaatttacgactgcctatcg

SEQ ID NO: 277965 - DNA, 25 bp, Probe Sequence
tggttaatttttcctgcatgttctg

SEQ ID NO: 277966 - DNA, 25 bp, Probe Sequence
tggtgatgatttttactctagtgac

SEQ ID NO: 277967 - DNA, 25 bp, Probe Sequence
tggtaatgcttgtagaatctttatt

SEQ ID NO: 277968 - DNA, 25 bp, Probe Sequence
tggttagctttaattgttctgtatt

SEQ ID NO: 277969 - DNA, 25 bp, Probe Sequence
tggggaacttgatctgtactgtaat

SEQ ID NO: 277970 - DNA, 25 bp, Probe Sequence
tggtagcccctgaactatcagctta

SEQ ID NO: 277971 - DNA, 25 bp, Probe Sequence
tggtggcatgctacttgcctacagt

SEQ ID NO: 277972 - DNA, 25 bp, Probe Sequence
tggtagcctactgcactgagaactt

SEQ ID NO: 277973 - DNA, 25 bp, Probe Sequence
tggtagccattggccacatgcgaca

SEQ ID NO: 277974 - DNA, 25 bp, Probe Sequence
tggtcaccatgaaccacattgtgca

SEQ ID NO: 277975 - DNA, 25 bp, Probe Sequence
tggtcaccagcagtaccatgtctca

SEQ ID NO: 277976 - DNA, 25 bp, Probe Sequence
tggtcatcgcagtggccattgccac

SEQ ID NO: 277977 - DNA, 25 bp, Probe Sequence
tggtggcagcagtgatcctctgaac

SEQ ID NO: 277978 - DNA, 25 bp, Probe Sequence
tggtaatgagggatcctgcaagcaa

SEQ ID NO: 277979 - DNA, 25 bp, Probe Sequence
tggttatgcggcggatccgaaaaga

SEQ ID NO: 277980 - DNA, 25 bp, Probe Sequence
tggtttggagctgatcgcttctccc

SEQ ID NO: 277981 - DNA, 25 bp, Probe Sequence
tggtttggagctgatcgcttctccc

SEQ ID NO: 277982 - DNA, 25 bp, Probe Sequence
tggttagcgactcatggactcatcc

SEQ ID NO: 277983 - DNA, 25 bp, Probe Sequence
tggtgtgaagcactccatgaacccc

SEQ ID NO: 277984 - DNA, 25 bp, Probe Sequence
tggtctgagacagggaacccctctg

SEQ ID NO: 277985 - DNA, 25 bp, Probe Sequence
tggtaggaactgccaaatgaccttg

SEQ ID NO: 277986 - DNA, 25 bp, Probe Sequence
tggtgggaacgactttgagatcttt

SEQ ID NO: 277987 - DNA, 25 bp, Probe Sequence
tgtaggaaaccctatggggtttatg

SEQ ID NO: 277988 - DNA, 25 bp, Probe Sequence
ttaggaagcccacaaggttctgggc

SEQ ID NO: 277989 - DNA, 25 bp, Probe Sequence
ttcgggtccacagctgaggttgccg

SEQ ID NO: 277990 - DNA, 25 bp, Probe Sequence
ttcgggtccacagctgaggttgccg

SEQ ID NO: 277991 - DNA, 25 bp, Probe Sequence
tgtaggtgtaaaagttggtgtccga

SEQ ID NO: 277992 - DNA, 25 bp, Probe Sequence
ttgggggaacgagttggcgtccgca

SEQ ID NO: 277993 - DNA, 25 bp, Probe Sequence
taggggtggaccccagaggtttgag

SEQ ID NO: 277994 - DNA, 25 bp, Probe Sequence
tggtcgggagacagcatcagggtta

SEQ ID NO: 277995 - DNA, 25 bp, Probe Sequence
tgggcagtagtatttacgtggttag

SEQ ID NO: 277996 - DNA, 25 bp, Probe Sequence
tgtgggtagactgtgactaggttca

SEQ ID NO: 277997 - DNA, 25 bp, Probe Sequence
tgcgagggcaacggcaacaacttcc

SEQ ID NO: 277998 - DNA, 25 bp, Probe Sequence
tcggggaatttcactagcccctttg

SEQ ID NO: 277999 - DNA, 25 bp, Probe Sequence
tgcgggtaactttttgaccgccttg

SEQ ID NO: 278000 - DNA, 25 bp, Probe Sequence
tgggagtatacttactttcccttat

SEQ ID NO: 278001 - DNA, 25 bp, Probe Sequence
tgggcattatcattggatgtttccc

SEQ ID NO: 278002 - DNA, 25 bp, Probe Sequence
tggtttcatcagctgtttttcccaa

SEQ ID NO: 278003 - DNA, 25 bp, Probe Sequence
tggtttcatcagctgtttttcccaa

SEQ ID NO: 278004 - DNA, 25 bp, Probe Sequence
tggtttctgcttccatatatttccc

SEQ ID NO: 278005 - DNA, 25 bp, Probe Sequence
tggtttctctaccataagggccacc

SEQ ID NO: 278006 - DNA, 25 bp, Probe Sequence
tggtgtgcatccactggaagggccc

SEQ ID NO: 278007 - DNA, 25 bp, Probe Sequence
tggtgtgcatccactggaagggccc

SEQ ID NO: 278008 - DNA, 25 bp, Probe Sequence
tggtgatggtcttgctggatgggga

SEQ ID NO: 278009 - DNA, 25 bp, Probe Sequence
tggtgtggattctgttgaaggagag

SEQ ID NO: 278010 - DNA, 25 bp, Probe Sequence
tggtgcttagtctttgtaagggctc

SEQ ID NO: 278011 - DNA, 25 bp, Probe Sequence
tggtgacttgaccttgccaagacct

SEQ ID NO: 278012 - DNA, 25 bp, Probe Sequence
tggtgacggaggtggcaatgacatc

SEQ ID NO: 278013 - DNA, 25 bp, Probe Sequence
tggtcctagaggtggcaagaaggat

SEQ ID NO: 278014 - DNA, 25 bp, Probe Sequence
tgagtcccagaggttacccaaggca

SEQ ID NO: 278015 - DNA, 25 bp, Probe Sequence
tggtccagtggcttaacccacagtc

SEQ ID NO: 278016 - DNA, 25 bp, Probe Sequence
tggtgagcagtgtccttatccaccc

SEQ ID NO: 278017 - DNA, 25 bp, Probe Sequence
tggtgagcagtgtccttatccaccc

SEQ ID NO: 278018 - DNA, 25 bp, Probe Sequence
tggtgtatgctgtgctttcctcagc

SEQ ID NO: 278019 - DNA, 25 bp, Probe Sequence
tggtgtctgccatatctttgcatcc

SEQ ID NO: 278020 - DNA, 25 bp, Probe Sequence
tggtgttggctctatttgctgtcac

SEQ ID NO: 278021 - DNA, 25 bp, Probe Sequence
tggtgctcgtgtatttcgatcctca

SEQ ID NO: 278022 - DNA, 25 bp, Probe Sequence
tgggcattgtgcttatttttccttc

SEQ ID NO: 278023 - DNA, 25 bp, Probe Sequence
tgggggtttaatatgtccaactcct

SEQ ID NO: 278024 - DNA, 25 bp, Probe Sequence
tgggtgttagctcaattcccaacat

SEQ ID NO: 278025 - DNA, 25 bp, Probe Sequence
tggggttctggaacttaccccagtg

SEQ ID NO: 278026 - DNA, 25 bp, Probe Sequence
tggggagtctttggttgacccctgg

SEQ ID NO: 278027 - DNA, 25 bp, Probe Sequence
tgggtcatttttatgtacctttggg

SEQ ID NO: 278028 - DNA, 25 bp, Probe Sequence
tggggtattgttgtttctgctattg

SEQ ID NO: 278029 - DNA, 25 bp, Probe Sequence
tggtggtttatccttgtatctctgc

SEQ ID NO: 278030 - DNA, 25 bp, Probe Sequence
tggttttatgagacttgttcctttt

SEQ ID NO: 278031 - DNA, 25 bp, Probe Sequence
tggtgttttctgacttttacaaaat

SEQ ID NO: 278032 - DNA, 25 bp, Probe Sequence
tggtcctttcttatgtcctcataaa

SEQ ID NO: 278033 - DNA, 25 bp, Probe Sequence
tggtcccttgacattgacaaaagca

SEQ ID NO: 278034 - DNA, 25 bp, Probe Sequence
tggtaccatctgtgctttcacaaaa

SEQ ID NO: 278035 - DNA, 25 bp, Probe Sequence
tggtacctctgcagtctctatacca

SEQ ID NO: 278036 - DNA, 25 bp, Probe Sequence
tggggccctgccattttatgagcag

SEQ ID NO: 278037 - DNA, 25 bp, Probe Sequence
tgggacgccccagtttactggggtg

SEQ ID NO: 278038 - DNA, 25 bp, Probe Sequence
tggggggcccagatcatcgggggcc

SEQ ID NO: 278039 - DNA, 25 bp, Probe Sequence
tgggagggtccgacctggaggacca

SEQ ID NO: 278040 - DNA, 25 bp, Probe Sequence
tggtgaagggggacctggtacccag

SEQ ID NO: 278041 - DNA, 25 bp, Probe Sequence
tgggaagaagacccgtgggaaacag

SEQ ID NO: 278042 - DNA, 25 bp, Probe Sequence
tgggcaaaagtttagggagggacag

SEQ ID NO: 278043 - DNA, 25 bp, Probe Sequence
tgggtagggtagagggagggagagc

SEQ ID NO: 278044 - DNA, 25 bp, Probe Sequence
tgggagagggggcctagggcgtgga

SEQ ID NO: 278045 - DNA, 25 bp, Probe Sequence
tggtgaaggaagaagtggggtggaa

SEQ ID NO: 278046 - DNA, 25 bp, Probe Sequence
tggtgatggggggaatggtattgga

SEQ ID NO: 278047 - DNA, 25 bp, Probe Sequence
tgggtggacgtggttggtgattggc

SEQ ID NO: 278048 - DNA, 25 bp, Probe Sequence
tggggaacggctttggcagacagta

SEQ ID NO: 278049 - DNA, 25 bp, Probe Sequence
tggggaaagccaaagaagacctagg

SEQ ID NO: 278050 - DNA, 25 bp, Probe Sequence
tggtgggcaagtcatagaagtcgaa

SEQ ID NO: 278051 - DNA, 25 bp, Probe Sequence
tgagggggggtaggataacatgata

SEQ ID NO: 278052 - DNA, 25 bp, Probe Sequence
tggtcggtgggtttgaggcctatga

SEQ ID NO: 278053 - DNA, 25 bp, Probe Sequence
tggtcaggctggcttctgatgttca

SEQ ID NO: 278054 - DNA, 25 bp, Probe Sequence
tggtcaggctgtggtgctctgagat

SEQ ID NO: 278055 - DNA, 25 bp, Probe Sequence
tggtcataggccttctctgaaaatg

SEQ ID NO: 278056 - DNA, 25 bp, Probe Sequence
tggtcatggagaccttgaacgaagg

SEQ ID NO: 278057 - DNA, 25 bp, Probe Sequence
tggtctgtggggttagagcccagag

SEQ ID NO: 278058 - DNA, 25 bp, Probe Sequence
tgcgtttgaggggccggactcagga

SEQ ID NO: 278059 - DNA, 25 bp, Probe Sequence
tggtgtttacaagctggactcaggg

SEQ ID NO: 278060 - DNA, 25 bp, Probe Sequence
tgatgttttagcgatcccggtcgga

SEQ ID NO: 278061 - DNA, 25 bp, Probe Sequence
tgaggacttgggtcctcggtcttac

SEQ ID NO: 278062 - DNA, 25 bp, Probe Sequence
tgggtttggagttcttggctttaat

SEQ ID NO: 278063 - DNA, 25 bp, Probe Sequence
tggtttctgggagctggttcttaga

SEQ ID NO: 278064 - DNA, 25 bp, Probe Sequence
tggtttctgggagctggttcttaga

SEQ ID NO: 278065 - DNA, 25 bp, Probe Sequence
tggtctttgggaggagtctagtaca

SEQ ID NO: 278066 - DNA, 25 bp, Probe Sequence
tggtatttgggtgaatgttgttgct

SEQ ID NO: 278067 - DNA, 25 bp, Probe Sequence
tggtactttggataatgatcgcctt

SEQ ID NO: 278068 - DNA, 25 bp, Probe Sequence
tggtacttcagctaagacaccctct

SEQ ID NO: 278069 - DNA, 25 bp, Probe Sequence
tggggctctcagtaaggaacttgga

SEQ ID NO: 278070 - DNA, 25 bp, Probe Sequence
tgggggctcagatgggacaagaagc

SEQ ID NO: 278071 - DNA, 25 bp, Probe Sequence
tggtgtggattattgggccaaaaga

SEQ ID NO: 278072 - DNA, 25 bp, Probe Sequence
tgggggttattctaccaacaaacag

SEQ ID NO: 278073 - DNA, 25 bp, Probe Sequence
tggtggtggtgaatccccagaccaa

SEQ ID NO: 278074 - DNA, 25 bp, Probe Sequence
tggtgggtctcaatccttaacatat

SEQ ID NO: 278075 - DNA, 25 bp, Probe Sequence
tggggagtatccaacttagggtcaa

SEQ ID NO: 278076 - DNA, 25 bp, Probe Sequence
tggggcctggcagtgggtagggtag

SEQ ID NO: 278077 - DNA, 25 bp, Probe Sequence
tgggccctatgactgtggtctgggc

SEQ ID NO: 278078 - DNA, 25 bp, Probe Sequence
tgtggcccgaatcgtgtttggttcc

SEQ ID NO: 278079 - DNA, 25 bp, Probe Sequence
tgtggcccgaatcgtgtttggttcc

SEQ ID NO: 278080 - DNA, 25 bp, Probe Sequence
tgtggcccgaatcgtgtttggttcc

SEQ ID NO: 278081 - DNA, 25 bp, Probe Sequence
tggtccctgtattaggttagcttcc

SEQ ID NO: 278082 - DNA, 25 bp, Probe Sequence
tggtgacctgtttaaatttgtgtac

SEQ ID NO: 278083 - DNA, 25 bp, Probe Sequence
tgggtagatttaaaatgtttcgact

SEQ ID NO: 278084 - DNA, 25 bp, Probe Sequence
tggggactcctcttaatgtttccaa

SEQ ID NO: 278085 - DNA, 25 bp, Probe Sequence
tggggaatcccaaaatgatctccga

SEQ ID NO: 278086 - DNA, 25 bp, Probe Sequence
tggtggagaccgactacgaccagta

SEQ ID NO: 278087 - DNA, 25 bp, Probe Sequence
tggtggtaacgcttatcaacacagc

SEQ ID NO: 278088 - DNA, 25 bp, Probe Sequence
tgggttaacctcacacaagcacaga

SEQ ID NO: 278089 - DNA, 25 bp, Probe Sequence
tgggtaggggacacgagagcacgcc

SEQ ID NO: 278090 - DNA, 25 bp, Probe Sequence
tcgagctaagttcttgggagacccg

SEQ ID NO: 278091 - DNA, 25 bp, Probe Sequence
tggtcccagcttcttgggaggctga

SEQ ID NO: 278092 - DNA, 25 bp, Probe Sequence
tggtctccagcaagggattcgggcg

SEQ ID NO: 278093 - DNA, 25 bp, Probe Sequence
tggtcccagagatgtgttgcaggga

SEQ ID NO: 278094 - DNA, 25 bp, Probe Sequence
tggtgtccgagaagtcaggcacgta

SEQ ID NO: 278095 - DNA, 25 bp, Probe Sequence
tggtgattctagatgtccgggttcc

SEQ ID NO: 278096 - DNA, 25 bp, Probe Sequence
tgagaacacaacagtccgggtgccc

SEQ ID NO: 278097 - DNA, 25 bp, Probe Sequence
tggtgaagcaggcgtcggagggccc

SEQ ID NO: 278098 - DNA, 25 bp, Probe Sequence
tggtgaagcaggcgtcggagggccc

SEQ ID NO: 278099 - DNA, 25 bp, Probe Sequence
tggtcccagcggttcagctgaggta

SEQ ID NO: 278100 - DNA, 25 bp, Probe Sequence
tggtcctcagtgtcaccagatggtc

SEQ ID NO: 278101 - DNA, 25 bp, Probe Sequence
tggtccacaccaactatgatgagta

SEQ ID NO: 278102 - DNA, 25 bp, Probe Sequence
tggtcccagccagtttggtgctgac

SEQ ID NO: 278103 - DNA, 25 bp, Probe Sequence
tggtcacacagggccttgtgtgcca

SEQ ID NO: 278104 - DNA, 25 bp, Probe Sequence
tggtaaaaccctgtctctactgaaa

SEQ ID NO: 278105 - DNA, 25 bp, Probe Sequence
tgggacagaaccctactttttgtag

SEQ ID NO: 278106 - DNA, 25 bp, Probe Sequence
tgatggacgaatgccttttccggtg

SEQ ID NO: 278107 - DNA, 25 bp, Probe Sequence
tgaggacgagggctacttccaggag

SEQ ID NO: 278108 - DNA, 25 bp, Probe Sequence
tggtgttgatgggtttcttcgggaa

SEQ ID NO: 278109 - DNA, 25 bp, Probe Sequence
tgggtgtaggaactccggggagaat

SEQ ID NO: 278110 - DNA, 25 bp, Probe Sequence
tgggctgtagtgattcctggggcca

SEQ ID NO: 278111 - DNA, 25 bp, Probe Sequence
tgggttcaggcattatttggggggt

SEQ ID NO: 278112 - DNA, 25 bp, Probe Sequence
tgggagatcttcactttagggggct

SEQ ID NO: 278113 - DNA, 25 bp, Probe Sequence
tggtgcagatttatccccagagggg

SEQ ID NO: 278114 - DNA, 25 bp, Probe Sequence
tggtgagagtctcactgctccaggg

SEQ ID NO: 278115 - DNA, 25 bp, Probe Sequence
tggtgcggtaccagtgcacagaggg

SEQ ID NO: 278116 - DNA, 25 bp, Probe Sequence
tagtctgcagtctccgagacgggga

SEQ ID NO: 278117 - DNA, 25 bp, Probe Sequence
tgtgattcaggtccccaggggggac

SEQ ID NO: 278118 - DNA, 25 bp, Probe Sequence
tggtctcatcgtctcggggggagac

SEQ ID NO: 278119 - DNA, 25 bp, Probe Sequence
tggtgctccgtcttagaggtgggat

SEQ ID NO: 278120 - DNA, 25 bp, Probe Sequence
tgggatcccttttatgtatacttta

SEQ ID NO: 278121 - DNA, 25 bp, Probe Sequence
tgggactttttgtgagttcattaaa

SEQ ID NO: 278122 - DNA, 25 bp, Probe Sequence
tgggacctttagtggtggccattta

SEQ ID NO: 278123 - DNA, 25 bp, Probe Sequence
tgtgggactttgtgggtactatttt

SEQ ID NO: 278124 - DNA, 25 bp, Probe Sequence
tgggggtgaatggtggggaaaagat

SEQ ID NO: 278125 - DNA, 25 bp, Probe Sequence
tgggtggccggctggggatatatag

SEQ ID NO: 278126 - DNA, 25 bp, Probe Sequence
tgggtccaccaggcttctggaaaag

SEQ ID NO: 278127 - DNA, 25 bp, Probe Sequence
tgggtccaccaggcttctggaaaag

SEQ ID NO: 278128 - DNA, 25 bp, Probe Sequence
tggtgtttacccatctggaaagagg

SEQ ID NO: 278129 - DNA, 25 bp, Probe Sequence
tgaggttctaccactctggaaaatt

SEQ ID NO: 278130 - DNA, 25 bp, Probe Sequence
tggtgtcctttgatgcctaaaaatt

SEQ ID NO: 278131 - DNA, 25 bp, Probe Sequence
tgggtaccggcgcatcatcaaaaat

SEQ ID NO: 278132 - DNA, 25 bp, Probe Sequence
tgggttctccagcgacaaggctaag

SEQ ID NO: 278133 - DNA, 25 bp, Probe Sequence
tggtgttcagtctggacaaccgcga

SEQ ID NO: 278134 - DNA, 25 bp, Probe Sequence
tggtgaagattacggtaacggccac

SEQ ID NO: 278135 - DNA, 25 bp, Probe Sequence
tgggagcgactacggtaacggcttc

SEQ ID NO: 278136 - DNA, 25 bp, Probe Sequence
tggggacagccacagacggggcttc

SEQ ID NO: 278137 - DNA, 25 bp, Probe Sequence
tggtggaaccagcagacggggctat

SEQ ID NO: 278138 - DNA, 25 bp, Probe Sequence
tggtgagaagggccggcggattcgg

SEQ ID NO: 278139 - DNA, 25 bp, Probe Sequence
tgggagagacgcgatcgccgatttc

SEQ ID NO: 278140 - DNA, 25 bp, Probe Sequence
tgggttgacggcagccgctggaact

SEQ ID NO: 278141 - DNA, 25 bp, Probe Sequence
tgggtcagatcggcaacacggggcc

SEQ ID NO: 278142 - DNA, 25 bp, Probe Sequence
tgggtcagaatggcggcagcggagc

SEQ ID NO: 278143 - DNA, 25 bp, Probe Sequence
tggtgacagatcacggctcgtgcgt

SEQ ID NO: 278144 - DNA, 25 bp, Probe Sequence
tgggactattgctgtgatcgtcttt

SEQ ID NO: 278145 - DNA, 25 bp, Probe Sequence
tgggacctgagctttaggcctggta

SEQ ID NO: 278146 - DNA, 25 bp, Probe Sequence
tgggaccgcagtttggtcctgggga

SEQ ID NO: 278147 - DNA, 25 bp, Probe Sequence
tggtccctggtactggggtgaccga

SEQ ID NO: 278148 - DNA, 25 bp, Probe Sequence
tcgtcccgaatccgggttcatccga

SEQ ID NO: 278149 - DNA, 25 bp, Probe Sequence
tggtcccagacagcggggatccgga

SEQ ID NO: 278150 - DNA, 25 bp, Probe Sequence
tggtcaccaacaccagggagaataa

SEQ ID NO: 278151 - DNA, 25 bp, Probe Sequence
tgtgtacatctaccgcgggagattt

SEQ ID NO: 278152 - DNA, 25 bp, Probe Sequence
tggtgactgtggcagcgggagttcc

SEQ ID NO: 278153 - DNA, 25 bp, Probe Sequence
tggtgacggtgatcgtgctgcagta

SEQ ID NO: 278154 - DNA, 25 bp, Probe Sequence
tggtggcaggattccagagccgcta

SEQ ID NO: 278155 - DNA, 25 bp, Probe Sequence
tggtcagagagttcgcagtggggag

SEQ ID NO: 278156 - DNA, 25 bp, Probe Sequence
tggtcagaggtaagatgggagggct

SEQ ID NO: 278157 - DNA, 25 bp, Probe Sequence
tggtgaaggctatctggggcaggca

SEQ ID NO: 278158 - DNA, 25 bp, Probe Sequence
tggtgacacctatatgaacacagtt

SEQ ID NO: 278159 - DNA, 25 bp, Probe Sequence
tgggcactttacagaatccagttgt

SEQ ID NO: 278160 - DNA, 25 bp, Probe Sequence
tgggccagtcccagatgaagcctat

SEQ ID NO: 278161 - DNA, 25 bp, Probe Sequence
tgggaaatacctaagaagcacctta

SEQ ID NO: 278162 - DNA, 25 bp, Probe Sequence
tgggtttacttcaaaatccctcagc

SEQ ID NO: 278163 - DNA, 25 bp, Probe Sequence
tggtgcttattttcctaactccatc

SEQ ID NO: 278164 - DNA, 25 bp, Probe Sequence
tggtgatttataacctacccaaagt

SEQ ID NO: 278165 - DNA, 25 bp, Probe Sequence
tggtgcaactataacaccacccgca

SEQ ID NO: 278166 - DNA, 25 bp, Probe Sequence
tggtgaacattttgcacacccaccc

SEQ ID NO: 278167 - DNA, 25 bp, Probe Sequence
tccaaatccttagcagcccaaactt

SEQ ID NO: 278168 - DNA, 25 bp, Probe Sequence
tgcgggaacttcgcatccgcaaact

SEQ ID NO: 278169 - DNA, 25 bp, Probe Sequence
tggtggggcttgtttcctgaaacca

SEQ ID NO: 278170 - DNA, 25 bp, Probe Sequence
tggtggggcttgtttcctgaaacca

SEQ ID NO: 278171 - DNA, 25 bp, Probe Sequence
tggtggggcccagtgtactgaaata

SEQ ID NO: 278172 - DNA, 25 bp, Probe Sequence
tggtgacttcccagaactggacatt

SEQ ID NO: 278173 - DNA, 25 bp, Probe Sequence
tggtgtgtgtcctggaactagagcc

SEQ ID NO: 278174 - DNA, 25 bp, Probe Sequence
tggtctatctcattgggaacctgat

SEQ ID NO: 278175 - DNA, 25 bp, Probe Sequence
tggtcgcagtgactgtggtgtcctt

SEQ ID NO: 278176 - DNA, 25 bp, Probe Sequence
tggtgtcaggggtggtcctatgccc

SEQ ID NO: 278177 - DNA, 25 bp, Probe Sequence
tggtgaagaggaagcggacccgccc

SEQ ID NO: 278178 - DNA, 25 bp, Probe Sequence
tgggtagagtgatgcggaccctcct

SEQ ID NO: 278179 - DNA, 25 bp, Probe Sequence
tggggacttgtagggatgcctttct

SEQ ID NO: 278180 - DNA, 25 bp, Probe Sequence
tgggttccatgtgattgccctttca

SEQ ID NO: 278181 - DNA, 25 bp, Probe Sequence
tgggagtccatagaatactgtttcc

SEQ ID NO: 278182 - DNA, 25 bp, Probe Sequence
tggtgggctatgggatatactattt

SEQ ID NO: 278183 - DNA, 25 bp, Probe Sequence
tggtgcgggcactgcaagcagctag

SEQ ID NO: 278184 - DNA, 25 bp, Probe Sequence
tggtgcgggcactgcaagcagctag

SEQ ID NO: 278185 - DNA, 25 bp, Probe Sequence
tggtcgggcagccgcacactatgag

SEQ ID NO: 278186 - DNA, 25 bp, Probe Sequence
tggtgcaagtcaaggacatctatgc

SEQ ID NO: 278187 - DNA, 25 bp, Probe Sequence
tggtgcaattgaggagatatgccag

SEQ ID NO: 278188 - DNA, 25 bp, Probe Sequence
tggtgcacacgagagaagccgccac

SEQ ID NO: 278189 - DNA, 25 bp, Probe Sequence
tgggaaaactagtcccaccagcttc

SEQ ID NO: 278190 - DNA, 25 bp, Probe Sequence
tgggaaaatctattcctgccaccac

SEQ ID NO: 278191 - DNA, 25 bp, Probe Sequence
tggggaagaagtcctcattccgcac

SEQ ID NO: 278192 - DNA, 25 bp, Probe Sequence
tggggtgagaatggctacttccgga

SEQ ID NO: 278193 - DNA, 25 bp, Probe Sequence
tgggaatgaggttctaccactctgg

SEQ ID NO: 278194 - DNA, 25 bp, Probe Sequence
tggtaagagagttgtcactactaga

SEQ ID NO: 278195 - DNA, 25 bp, Probe Sequence
tggtccgacagtttgatgttcacaa

SEQ ID NO: 278196 - DNA, 25 bp, Probe Sequence
tggtgcaccatctttgggcttacag

SEQ ID NO: 278197 - DNA, 25 bp, Probe Sequence
tggtgacagctgacctgaggctcaa

SEQ ID NO: 278198 - DNA, 25 bp, Probe Sequence
tggtgatcagtgtcctactgtccgt

SEQ ID NO: 278199 - DNA, 25 bp, Probe Sequence
tggtgactgtgccttactgtacatg

SEQ ID NO: 278200 - DNA, 25 bp, Probe Sequence
tggtgcactgagctgtaacttcttc

SEQ ID NO: 278201 - DNA, 25 bp, Probe Sequence
tggtgcactgagctgtaacttcttc

SEQ ID NO: 278202 - DNA, 25 bp, Probe Sequence
tggtgcactgagctgtaacttcttc

SEQ ID NO: 278203 - DNA, 25 bp, Probe Sequence
tggtgcactgaactccaacgatgcc

SEQ ID NO: 278204 - DNA, 25 bp, Probe Sequence
tggtgaagaagcatgcggcgcagcg

SEQ ID NO: 278205 - DNA, 25 bp, Probe Sequence
tggtgaagaagctcagcctgtctgc

SEQ ID NO: 278206 - DNA, 25 bp, Probe Sequence
tggtgcaacaaagatgcctcgcagc

SEQ ID NO: 278207 - DNA, 25 bp, Probe Sequence
tgggtgagaaaggtcctggtccgcg

SEQ ID NO: 278208 - DNA, 25 bp, Probe Sequence
tggggagaggtcaccatagtcaccg

SEQ ID NO: 278209 - DNA, 25 bp, Probe Sequence
tggggataagtcattcaactctatg

SEQ ID NO: 278210 - DNA, 25 bp, Probe Sequence
tggggagcaacttttccaccaaagc

SEQ ID NO: 278211 - DNA, 25 bp, Probe Sequence
tggggagatactggttcaaataaac

SEQ ID NO: 278212 - DNA, 25 bp, Probe Sequence
tgtgtctgaaactgtctgacataaa

SEQ ID NO: 278213 - DNA, 25 bp, Probe Sequence
tggtgtgaaactcggctgtattaat

SEQ ID NO: 278214 - DNA, 25 bp, Probe Sequence
tggtggagaacgcggtgctcaaggc

SEQ ID NO: 278215 - DNA, 25 bp, Probe Sequence
tggggcaggcatgggactggcccag

SEQ ID NO: 278216 - DNA, 25 bp, Probe Sequence
tggggggttggatagcatcctcttt

SEQ ID NO: 278217 - DNA, 25 bp, Probe Sequence
tggggagtgttggatccacatcccg

SEQ ID NO: 278218 - DNA, 25 bp, Probe Sequence
tgtgtggacttaagttgcaccccag

SEQ ID NO: 278219 - DNA, 25 bp, Probe Sequence
tggtggcagcatggacagtggccct

SEQ ID NO: 278220 - DNA, 25 bp, Probe Sequence
tggggagctgcagcagctggcccag

SEQ ID NO: 278221 - DNA, 25 bp, Probe Sequence
tggtggactatgaacactgctccag

SEQ ID NO: 278222 - DNA, 25 bp, Probe Sequence
tggtggactataagcactgctccag

SEQ ID NO: 278223 - DNA, 25 bp, Probe Sequence
tggtgaaatatagtgcattctgagg

SEQ ID NO: 278224 - DNA, 25 bp, Probe Sequence
tggtgaatgttcaatctgtgtaaga

SEQ ID NO: 278225 - DNA, 25 bp, Probe Sequence
tggtgacattctcctcaggatccaa

SEQ ID NO: 278226 - DNA, 25 bp, Probe Sequence
tggtgatcatttaagcaggatccaa

SEQ ID NO: 278227 - DNA, 25 bp, Probe Sequence
tggtgatttcagcaagctacagcaa

SEQ ID NO: 278228 - DNA, 25 bp, Probe Sequence
tggtgcattacagagaggagaaaca

SEQ ID NO: 278229 - DNA, 25 bp, Probe Sequence
tggtgaggaagaggatggagatgaa

SEQ ID NO: 278230 - DNA, 25 bp, Probe Sequence
tggtggtgagatagcaattcagcga

SEQ ID NO: 278231 - DNA, 25 bp, Probe Sequence
tggggctggatcaagggcaaaaact

SEQ ID NO: 278232 - DNA, 25 bp, Probe Sequence
tggggctgagacaacacggaaaggt

SEQ ID NO: 278233 - DNA, 25 bp, Probe Sequence
tgggttaactaagaatgggcgtcca

SEQ ID NO: 278234 - DNA, 25 bp, Probe Sequence
tgggttcaaaggacagttgggctgt

SEQ ID NO: 278235 - DNA, 25 bp, Probe Sequence
tggggtatattgcagggtggagtgt

SEQ ID NO: 278236 - DNA, 25 bp, Probe Sequence
tggggtccaggtcgggtgtggactg

SEQ ID NO: 278237 - DNA, 25 bp, Probe Sequence
tgggttccaggttatggggagaaga

SEQ ID NO: 278238 - DNA, 25 bp, Probe Sequence
tgggttccagggtgacgtgaagggg

SEQ ID NO: 278239 - DNA, 25 bp, Probe Sequence
tgggtatcgaggcggacgacgaccg

SEQ ID NO: 278240 - DNA, 25 bp, Probe Sequence
tgggtatcgaggcggacgacgaccg

SEQ ID NO: 278241 - DNA, 25 bp, Probe Sequence
tgggtatcgaggcggacgacgaccg

SEQ ID NO: 278242 - DNA, 25 bp, Probe Sequence
tgggtaaggggcggaggactgccca

SEQ ID NO: 278243 - DNA, 25 bp, Probe Sequence
tggggacaagctgcgggtactcccc

SEQ ID NO: 278244 - DNA, 25 bp, Probe Sequence
tggggcacagatgcctgggttgctg

SEQ ID NO: 278245 - DNA, 25 bp, Probe Sequence
tggtggcaaggccagctggggtgca

SEQ ID NO: 278246 - DNA, 25 bp, Probe Sequence
tggtgcctctggacagcatggggaa

SEQ ID NO: 278247 - DNA, 25 bp, Probe Sequence
tggtgtctgtggacgacggtggcac

SEQ ID NO: 278248 - DNA, 25 bp, Probe Sequence
tggtggctgtaggagtcgtcgtcca

SEQ ID NO: 278249 - DNA, 25 bp, Probe Sequence
tgggcctgtaaggccgttgttaccg

SEQ ID NO: 278250 - DNA, 25 bp, Probe Sequence
tgggccgtggattacggtttgactc

SEQ ID NO: 278251 - DNA, 25 bp, Probe Sequence
tgggccgcgagtttgggaatctgac

SEQ ID NO: 278252 - DNA, 25 bp, Probe Sequence
tgggcttggctttgtgaggaactga

SEQ ID NO: 278253 - DNA, 25 bp, Probe Sequence
tggggtggcgtttgggaacttgtgc

SEQ ID NO: 278254 - DNA, 25 bp, Probe Sequence
tggggtggcgtttgggaacttgtgc

SEQ ID NO: 278255 - DNA, 25 bp, Probe Sequence
tgggaagtgggatgggaagttagga

SEQ ID NO: 278256 - DNA, 25 bp, Probe Sequence
tgggccaggggattaattagtacgg

SEQ ID NO: 278257 - DNA, 25 bp, Probe Sequence
tggtgccatggctgttagtttttag

SEQ ID NO: 278258 - DNA, 25 bp, Probe Sequence
tggtgccgcagtttgtagtgtttta

SEQ ID NO: 278259 - DNA, 25 bp, Probe Sequence
tgaggtcaggaactgttggttttta

SEQ ID NO: 278260 - DNA, 25 bp, Probe Sequence
tggggtggagaacttattttttcat

SEQ ID NO: 278261 - DNA, 25 bp, Probe Sequence
tgggcctgggactttttgtgagttc

SEQ ID NO: 278262 - DNA, 25 bp, Probe Sequence
tggtccatagtacccattaggactt

SEQ ID NO: 278263 - DNA, 25 bp, Probe Sequence
tggtcgatagaatccccagtgtgcc

SEQ ID NO: 278264 - DNA, 25 bp, Probe Sequence
tggtcttgaaggcccaccatgggcc

SEQ ID NO: 278265 - DNA, 25 bp, Probe Sequence
tggtctttgaagcacctgtggtgcc

SEQ ID NO: 278266 - DNA, 25 bp, Probe Sequence
tggtcggatgaacacgtgggctcca

SEQ ID NO: 278267 - DNA, 25 bp, Probe Sequence
tggggtgtcagaccctaggacccca

SEQ ID NO: 278268 - DNA, 25 bp, Probe Sequence
tggtggcttaagctttgaaaccaca

SEQ ID NO: 278269 - DNA, 25 bp, Probe Sequence
tggggattaagtttctaatacatga

SEQ ID NO: 278270 - DNA, 25 bp, Probe Sequence
tggggattttggagtatgtacatga

SEQ ID NO: 278271 - DNA, 25 bp, Probe Sequence
tggggtctgtgggctagttaaaata

SEQ ID NO: 278272 - DNA, 25 bp, Probe Sequence
tgggggtgggatcaatcttaggaaa

SEQ ID NO: 278273 - DNA, 25 bp, Probe Sequence
tgggggtggaccgaatttggcaaga

SEQ ID NO: 278274 - DNA, 25 bp, Probe Sequence
tggggcagggcacgagttatttaaa

SEQ ID NO: 278275 - DNA, 25 bp, Probe Sequence
tggggagaacagcgtcttttacctg

SEQ ID NO: 278276 - DNA, 25 bp, Probe Sequence
tggggacacaaaccttttatacaat

SEQ ID NO: 278277 - DNA, 25 bp, Probe Sequence
tggggcaaaagcattgtttctcaaa

SEQ ID NO: 278278 - DNA, 25 bp, Probe Sequence
tggggaaaagaacgttgtacacaca

SEQ ID NO: 278279 - DNA, 25 bp, Probe Sequence
tgggggactgtgctagctttacccc

SEQ ID NO: 278280 - DNA, 25 bp, Probe Sequence
tgggggggaggtgaggtaccagcct

SEQ ID NO: 278281 - DNA, 25 bp, Probe Sequence
tgggggtggctggtgccagtatgac

SEQ ID NO: 278282 - DNA, 25 bp, Probe Sequence
tgggggtggctggtgccagtatgac

SEQ ID NO: 278283 - DNA, 25 bp, Probe Sequence
tgggtagcttggtgccattatcctg

SEQ ID NO: 278284 - DNA, 25 bp, Probe Sequence
tgggtggctcatgttgaatttcact

SEQ ID NO: 278285 - DNA, 25 bp, Probe Sequence
tgggttgcagactgccaacttctct

SEQ ID NO: 278286 - DNA, 25 bp, Probe Sequence
tggtgcttagtaaccgactttcctc

SEQ ID NO: 278287 - DNA, 25 bp, Probe Sequence
tgtcgattaagaccggagcttgtcc

SEQ ID NO: 278288 - DNA, 25 bp, Probe Sequence
tctggaataaagccccctagttgcc

SEQ ID NO: 278289 - DNA, 25 bp, Probe Sequence
tgggtaaaactggccttagtcgctc

SEQ ID NO: 278290 - DNA, 25 bp, Probe Sequence
tgagcgtaaaaggccctctaaccta

SEQ ID NO: 278291 - DNA, 25 bp, Probe Sequence
tggtgtacaagaccctttacagccc

SEQ ID NO: 278292 - DNA, 25 bp, Probe Sequence
tggtgtgataaaccccatttcaccc

SEQ ID NO: 278293 - DNA, 25 bp, Probe Sequence
tggtggaaggaggcgcactttcctc

SEQ ID NO: 278294 - DNA, 25 bp, Probe Sequence
tggtggaaggaggcgcactttcctc

SEQ ID NO: 278295 - DNA, 25 bp, Probe Sequence
tggtggtagggaggctttttcttat

SEQ ID NO: 278296 - DNA, 25 bp, Probe Sequence
tgtaggggaggggctcctttccata

SEQ ID NO: 278297 - DNA, 25 bp, Probe Sequence
tgtgggggaagtagtccgggccatg

SEQ ID NO: 278298 - DNA, 25 bp, Probe Sequence
tggggatggggaggtcctgtgggag

SEQ ID NO: 278299 - DNA, 25 bp, Probe Sequence
tggggaggggtattcttcatgcagg

SEQ ID NO: 278300 - DNA, 25 bp, Probe Sequence
tggtgaatggcaagtattctctcca

SEQ ID NO: 278301 - DNA, 25 bp, Probe Sequence
tggtgatgctggaaatgactcccca

SEQ ID NO: 278302 - DNA, 25 bp, Probe Sequence
tggtgcctggacttgagtctcaccc

SEQ ID NO: 278303 - DNA, 25 bp, Probe Sequence
tggtgatgggagtggttcaggcctg

SEQ ID NO: 278304 - DNA, 25 bp, Probe Sequence
tggtggctggtgtggctaatgccct

SEQ ID NO: 278305 - DNA, 25 bp, Probe Sequence
tggtggctggtgtggctaatgccct

SEQ ID NO: 278306 - DNA, 25 bp, Probe Sequence
tggtggtgggcagctgtagtcccag

SEQ ID NO: 278307 - DNA, 25 bp, Probe Sequence
tggtggtggaagcctgtagtcccag

SEQ ID NO: 278308 - DNA, 25 bp, Probe Sequence
tggtggtggaagcctgtagtcccag

SEQ ID NO: 278309 - DNA, 25 bp, Probe Sequence
tggtggcggtaattttgtccatcaa

SEQ ID NO: 278310 - DNA, 25 bp, Probe Sequence
tggtgctgggtacttcttgttgcat

SEQ ID NO: 278311 - DNA, 25 bp, Probe Sequence
tggtctgtactccttggatttgcat

SEQ ID NO: 278312 - DNA, 25 bp, Probe Sequence
tgagtggtcgacttatggctttgca

SEQ ID NO: 278313 - DNA, 25 bp, Probe Sequence
tggtgagtggaatttgacattgtcc

SEQ ID NO: 278314 - DNA, 25 bp, Probe Sequence
tgggatgtggactgtggcaactctc

SEQ ID NO: 278315 - DNA, 25 bp, Probe Sequence
tggggtgagctatgagccacctgga

SEQ ID NO: 278316 - DNA, 25 bp, Probe Sequence
tggtgggcactaaggccctgtcgac

SEQ ID NO: 278317 - DNA, 25 bp, Probe Sequence
tgggctggactgtgggatctgatta

SEQ ID NO: 278318 - DNA, 25 bp, Probe Sequence
tgggtgagacgaatgtctttgttct

SEQ ID NO: 278319 - DNA, 25 bp, Probe Sequence
tggtgatgtgacaactgtttcctcc

SEQ ID NO: 278320 - DNA, 25 bp, Probe Sequence
tggtgtctcacacctgtaatcccag

SEQ ID NO: 278321 - DNA, 25 bp, Probe Sequence
tggtggctcacgcctgtaatcccag

SEQ ID NO: 278322 - DNA, 25 bp, Probe Sequence
tggtgtgtacctgtaatctcagcta

SEQ ID NO: 278323 - DNA, 25 bp, Probe Sequence
tggtgatattcctggagtccgcttt

SEQ ID NO: 278324 - DNA, 25 bp, Probe Sequence
tggtgtttcctttgagtttatttct

SEQ ID NO: 278325 - DNA, 25 bp, Probe Sequence
tgggttttttaggatgttgcatttc

SEQ ID NO: 278326 - DNA, 25 bp, Probe Sequence
tgggttttctcattgtctttttgca

SEQ ID NO: 278327 - DNA, 25 bp, Probe Sequence
tgggttgttcaggttttctgttgac

SEQ ID NO: 278328 - DNA, 25 bp, Probe Sequence
tgggtttctgagtctgctttttgag

SEQ ID NO: 278329 - DNA, 25 bp, Probe Sequence
tggtgtttcttgttcattgactttg

SEQ ID NO: 278330 - DNA, 25 bp, Probe Sequence
tggtgtattttgctactgttgatat

SEQ ID NO: 278331 - DNA, 25 bp, Probe Sequence
tggtgtataactctagagcttgaat

SEQ ID NO: 278332 - DNA, 25 bp, Probe Sequence
tgggtaaatgtcttagtgtctagtg

SEQ ID NO: 278333 - DNA, 25 bp, Probe Sequence
tgcaggtaaagtgtaccccgtccac

SEQ ID NO: 278334 - DNA, 25 bp, Probe Sequence
tggggtcaagtacatccccagtcgt

SEQ ID NO: 278335 - DNA, 25 bp, Probe Sequence
tggggtcagaaatgcatcctccagc

SEQ ID NO: 278336 - DNA, 25 bp, Probe Sequence
tggggacagaaccgtcactcagatc

SEQ ID NO: 278337 - DNA, 25 bp, Probe Sequence
tgggtaacatattgagatcctcgat

SEQ ID NO: 278338 - DNA, 25 bp, Probe Sequence
tggggaaccttgtacccatgtggtg

SEQ ID NO: 278339 - DNA, 25 bp, Probe Sequence
taggtggttcttcagtccaggttct

SEQ ID NO: 278340 - DNA, 25 bp, Probe Sequence
tcaggtttgcctctaaccaggtgtc

SEQ ID NO: 278341 - DNA, 25 bp, Probe Sequence
tggggattactacagaaaggtgctc

SEQ ID NO: 278342 - DNA, 25 bp, Probe Sequence
tggggatctacttggaggaatggga

SEQ ID NO: 278343 - DNA, 25 bp, Probe Sequence
tgggttcttctgggaagaaggaaag

SEQ ID NO: 278344 - DNA, 25 bp, Probe Sequence
tgagtgttacctggggaaagggcta

SEQ ID NO: 278345 - DNA, 25 bp, Probe Sequence
tggtgtatacctagaggactcaggc

SEQ ID NO: 278346 - DNA, 25 bp, Probe Sequence
tgggatttcgtttggcaccagtcac

SEQ ID NO: 278347 - DNA, 25 bp, Probe Sequence
tggggctcatggattggccccgacc

SEQ ID NO: 278348 - DNA, 25 bp, Probe Sequence
tgggggcttcagaatgggccctgaa

SEQ ID NO: 278349 - DNA, 25 bp, Probe Sequence
tgggtggttgccaacagtcccatgc

SEQ ID NO: 278350 - DNA, 25 bp, Probe Sequence
tgggttgttggtgagaccccaggct

SEQ ID NO: 278351 - DNA, 25 bp, Probe Sequence
tgggagttgatgctcaggtccccag

SEQ ID NO: 278352 - DNA, 25 bp, Probe Sequence
tggtgcctgttggatcaggttccca

SEQ ID NO: 278353 - DNA, 25 bp, Probe Sequence
tggtgccaattggtcgtggtcagcg

SEQ ID NO: 278354 - DNA, 25 bp, Probe Sequence
tggtggaactgcctcacgggagagg

SEQ ID NO: 278355 - DNA, 25 bp, Probe Sequence
tggtgctgaagtcggcggtggaggc

SEQ ID NO: 278356 - DNA, 25 bp, Probe Sequence
tggtgcagaagctggccgaccagtc

SEQ ID NO: 278357 - DNA, 25 bp, Probe Sequence
tgggcaaacacgctgcgatacggcg

SEQ ID NO: 278358 - DNA, 25 bp, Probe Sequence
tggggaacatgggggctatgctggg

SEQ ID NO: 278359 - DNA, 25 bp, Probe Sequence
tggtggtgacggtgatcgtgctgca

SEQ ID NO: 278360 - DNA, 25 bp, Probe Sequence
tggtgttagggggatgagcatgctg

SEQ ID NO: 278361 - DNA, 25 bp, Probe Sequence
tggggtagggtgatggcagtgctcc

SEQ ID NO: 278362 - DNA, 25 bp, Probe Sequence
tggggtagggtgatggcagtgctcc

SEQ ID NO: 278363 - DNA, 25 bp, Probe Sequence
tggggatgaaggcacaggcgtctcc

SEQ ID NO: 278364 - DNA, 25 bp, Probe Sequence
tggggtagagcttgacagggttcct

SEQ ID NO: 278365 - DNA, 25 bp, Probe Sequence
tggggtgagacttgagcagaacagg

SEQ ID NO: 278366 - DNA, 25 bp, Probe Sequence
tggtggagcagtcaagagccaagga

SEQ ID NO: 278367 - DNA, 25 bp, Probe Sequence
tggtgggcagctgtagtcccagcta

SEQ ID NO: 278368 - DNA, 25 bp, Probe Sequence
tggtgctcacagctgtaatcccagc

SEQ ID NO: 278369 - DNA, 25 bp, Probe Sequence
tggtgttgcatgccagtaatcccag

SEQ ID NO: 278370 - DNA, 25 bp, Probe Sequence
tggtggcgcatgcctgtaattccag

SEQ ID NO: 278371 - DNA, 25 bp, Probe Sequence
tggtggcatgcacctgtaatcccag

SEQ ID NO: 278372 - DNA, 25 bp, Probe Sequence
tggtggcacatgcctgtattcccag

SEQ ID NO: 278373 - DNA, 25 bp, Probe Sequence
tggtggcacatgcctgtaatcccag

SEQ ID NO: 278374 - DNA, 25 bp, Probe Sequence
tggtggcacatgcctgtaatcccag

SEQ ID NO: 278375 - DNA, 25 bp, Probe Sequence
tggtgctgacatggcttctatcaca

SEQ ID NO: 278376 - DNA, 25 bp, Probe Sequence
tggtgctaatgtactttcactttta

SEQ ID NO: 278377 - DNA, 25 bp, Probe Sequence
tggtgcttttcacttgtgttttaaa

SEQ ID NO: 278378 - DNA, 25 bp, Probe Sequence
tgggataaatcgatgtgtgttaaga

SEQ ID NO: 278379 - DNA, 25 bp, Probe Sequence
tgggaataactgttcgtttgagggg

SEQ ID NO: 278380 - DNA, 25 bp, Probe Sequence
tggggtgagctctgggtttaggggc

SEQ ID NO: 278381 - DNA, 25 bp, Probe Sequence
tgggatggatcgtgggttttggtgg

SEQ ID NO: 278382 - DNA, 25 bp, Probe Sequence
tgagtcaagtcctagggttttttgg

SEQ ID NO: 278383 - DNA, 25 bp, Probe Sequence
tgggaagtcctggcacagtttttgt

SEQ ID NO: 278384 - DNA, 25 bp, Probe Sequence
tggggatgccttggtttttactgct

SEQ ID NO: 278385 - DNA, 25 bp, Probe Sequence
tggggcacctctggtttgtgctatt

SEQ ID NO: 278386 - DNA, 25 bp, Probe Sequence
tggggacagtgcgtgatttctcagt

SEQ ID NO: 278387 - DNA, 25 bp, Probe Sequence
tggggcacaggctatcatctatcca

SEQ ID NO: 278388 - DNA, 25 bp, Probe Sequence
tggtggatacgctcttgatctcaac

SEQ ID NO: 278389 - DNA, 25 bp, Probe Sequence
tggtggtatctgaggtgaccacatc

SEQ ID NO: 278390 - DNA, 25 bp, Probe Sequence
tgtgttgttgccatggtaatcctgc

SEQ ID NO: 278391 - DNA, 25 bp, Probe Sequence
tgggggagccacttctaaggctgct

SEQ ID NO: 278392 - DNA, 25 bp, Probe Sequence
tgtgggaagcctttgctagggtgtc

SEQ ID NO: 278393 - DNA, 25 bp, Probe Sequence
tggggatctgggttctagagggcat

SEQ ID NO: 278394 - DNA, 25 bp, Probe Sequence
tggtgggacggagtccatcgtggct

SEQ ID NO: 278395 - DNA, 25 bp, Probe Sequence
tggggcgaaggagtggactggagcg

SEQ ID NO: 278396 - DNA, 25 bp, Probe Sequence
tggggccatcaggagctaacggaga

SEQ ID NO: 278397 - DNA, 25 bp, Probe Sequence
tggggcagcaccgtgaagacgaata

SEQ ID NO: 278398 - DNA, 25 bp, Probe Sequence
tggtggagagctcggaagccgccat

SEQ ID NO: 278399 - DNA, 25 bp, Probe Sequence
tggtggagttcagtacagcctggct

SEQ ID NO: 278400 - DNA, 25 bp, Probe Sequence
tggtggggcacagtagcgcacacct

SEQ ID NO: 278401 - DNA, 25 bp, Probe Sequence
tggtgaggaaccaaggccacctctg

SEQ ID NO: 278402 - DNA, 25 bp, Probe Sequence
tggtggtataaaattcccctcgcgt

SEQ ID NO: 278403 - DNA, 25 bp, Probe Sequence
tggtggatgtaaataaccccattct

SEQ ID NO: 278404 - DNA, 25 bp, Probe Sequence
tggtggattcttaatgacccttttt

SEQ ID NO: 278405 - DNA, 25 bp, Probe Sequence
tggtgagtttttaacatgcatctat

SEQ ID NO: 278406 - DNA, 25 bp, Probe Sequence
tggtgatgcttttgcttctgagatt

SEQ ID NO: 278407 - DNA, 25 bp, Probe Sequence
tggtgacattgttcttctgtgttcc

SEQ ID NO: 278408 - DNA, 25 bp, Probe Sequence
tggtgcacgttatggtgtttctccc

SEQ ID NO: 278409 - DNA, 25 bp, Probe Sequence
tggtgaccataagaatgtccctccc

SEQ ID NO: 278410 - DNA, 25 bp, Probe Sequence
tgggaacatcagttcctgtcctctt

SEQ ID NO: 278411 - DNA, 25 bp, Probe Sequence
tggtgtgactaattccttacctctc

SEQ ID NO: 278412 - DNA, 25 bp, Probe Sequence
tggtgtgactaggccacaccaactc

SEQ ID NO: 278413 - DNA, 25 bp, Probe Sequence
tggtgttgccgcgccatctgccacc

SEQ ID NO: 278414 - DNA, 25 bp, Probe Sequence
tgggtggtgccaatccattggccct

SEQ ID NO: 278415 - DNA, 25 bp, Probe Sequence
tgggggtcacagagcatgttctcgc

SEQ ID NO: 278416 - DNA, 25 bp, Probe Sequence
tggggcttacactatgatgtttgag

SEQ ID NO: 278417 - DNA, 25 bp, Probe Sequence
tggtggtttcactatattgtgtcag

SEQ ID NO: 278418 - DNA, 25 bp, Probe Sequence
tgggaaatacacatttgctgctcac

SEQ ID NO: 278419 - DNA, 25 bp, Probe Sequence
tgggtgagtacaaccttgctgtgaa

SEQ ID NO: 278420 - DNA, 25 bp, Probe Sequence
tgggtgagaggctacagtgtgtata

SEQ ID NO: 278421 - DNA, 25 bp, Probe Sequence
tggtgatttgcctacagtgatgttt

SEQ ID NO: 278422 - DNA, 25 bp, Probe Sequence
tggtgcaaatgccaacaggaagttt

SEQ ID NO: 278423 - DNA, 25 bp, Probe Sequence
tggtgaattgcaaccaacaatattt

SEQ ID NO: 278424 - DNA, 25 bp, Probe Sequence
tggtgcaaggagaagcgtcatttta

SEQ ID NO: 278425 - DNA, 25 bp, Probe Sequence
tggtgaaggagttgcccagctcatt

SEQ ID NO: 278426 - DNA, 25 bp, Probe Sequence
tggtgaattgaatcctgcagctctg

SEQ ID NO: 278427 - DNA, 25 bp, Probe Sequence
tggtgaatcaggtacctgctgcctg

SEQ ID NO: 278428 - DNA, 25 bp, Probe Sequence
tggtgatcctgatctgcttcagtgc

SEQ ID NO: 278429 - DNA, 25 bp, Probe Sequence
tggtgatcgttggggatggtgcctg

SEQ ID NO: 278430 - DNA, 25 bp, Probe Sequence
tggtgacgatctgggctgcaggagc

SEQ ID NO: 278431 - DNA, 25 bp, Probe Sequence
tggtgacgatctgggctgcaggagc

SEQ ID NO: 278432 - DNA, 25 bp, Probe Sequence
tggtgatcattgggttcaggagttg

SEQ ID NO: 278433 - DNA, 25 bp, Probe Sequence
tgggacattgcaggtccgcaaaggc

SEQ ID NO: 278434 - DNA, 25 bp, Probe Sequence
tgggcacacatcagacaccaaacgg

SEQ ID NO: 278435 - DNA, 25 bp, Probe Sequence
tggggcacagacccaacacaaggcg

SEQ ID NO: 278436 - DNA, 25 bp, Probe Sequence
tggtgacaggacgctgaccgtggag

SEQ ID NO: 278437 - DNA, 25 bp, Probe Sequence
tggtggaggagcatttccgcaggag

SEQ ID NO: 278438 - DNA, 25 bp, Probe Sequence
tggtgggaagcagtgtcaccgcgtg

SEQ ID NO: 278439 - DNA, 25 bp, Probe Sequence
tggggctgcgggaacagcctgcgta

SEQ ID NO: 278440 - DNA, 25 bp, Probe Sequence
tggggctgcgggaacagcctgcgta

SEQ ID NO: 278441 - DNA, 25 bp, Probe Sequence
tgggggtgtggatagcagcctgtac

SEQ ID NO: 278442 - DNA, 25 bp, Probe Sequence
tgggagggagtagaactttgactct

SEQ ID NO: 278443 - DNA, 25 bp, Probe Sequence
tgggaagtggtacaacctggccatc

SEQ ID NO: 278444 - DNA, 25 bp, Probe Sequence
tgggactggcctttgaagctctggc

SEQ ID NO: 278445 - DNA, 25 bp, Probe Sequence
tggtgatcggttttggcagttacat

SEQ ID NO: 278446 - DNA, 25 bp, Probe Sequence
tggtgatccgttttggcagtacatc

SEQ ID NO: 278447 - DNA, 25 bp, Probe Sequence
tggtgatgcggttttggcagtacat

SEQ ID NO: 278448 - DNA, 25 bp, Probe Sequence
tggtgatgcggttttgccagtacat

SEQ ID NO: 278449 - DNA, 25 bp, Probe Sequence
tggtgatcgtttttgccagtacatc

SEQ ID NO: 278450 - DNA, 25 bp, Probe Sequence
tggtgatcggttttgccagtacatc

SEQ ID NO: 278451 - DNA, 25 bp, Probe Sequence
tggtgatcggttttgccagtacatc

SEQ ID NO: 278452 - DNA, 25 bp, Probe Sequence
tggtgatcggttttgccgtacatca

SEQ ID NO: 278453 - DNA, 25 bp, Probe Sequence
tggtgacggatgtggcctttctacc

SEQ ID NO: 278454 - DNA, 25 bp, Probe Sequence
tgggtcagggttagtctgtctccct

SEQ ID NO: 278455 - DNA, 25 bp, Probe Sequence
tggtgacagtggaatctttgtctct

SEQ ID NO: 278456 - DNA, 25 bp, Probe Sequence
tggtgaagctgagtttctgtccaat

SEQ ID NO: 278457 - DNA, 25 bp, Probe Sequence
tggtgtagtacaaatattcaaacga

SEQ ID NO: 278458 - DNA, 25 bp, Probe Sequence
tgggtattacaattgaatcatgaga

SEQ ID NO: 278459 - DNA, 25 bp, Probe Sequence
tgggtttggaaacttgcatgaaaat

SEQ ID NO: 278460 - DNA, 25 bp, Probe Sequence
tggggcttcagaaggcttgaataaa

SEQ ID NO: 278461 - DNA, 25 bp, Probe Sequence
tggtggccaagtaacttgggaaaag

SEQ ID NO: 278462 - DNA, 25 bp, Probe Sequence
tgggctccaagtgtctcgatgtgga

SEQ ID NO: 278463 - DNA, 25 bp, Probe Sequence
tgggctggaagggtgcccaggccat

SEQ ID NO: 278464 - DNA, 25 bp, Probe Sequence
tgggggacagatggtccctgtcctg

SEQ ID NO: 278465 - DNA, 25 bp, Probe Sequence
tggtgaggacgagggctacttccag

SEQ ID NO: 278466 - DNA, 25 bp, Probe Sequence
tggtgggggatggagtgtcttccga

SEQ ID NO: 278467 - DNA, 25 bp, Probe Sequence
tggtgagggagtgagtgctctgcac

SEQ ID NO: 278468 - DNA, 25 bp, Probe Sequence
tggtggagctggtccagccttcaac

SEQ ID NO: 278469 - DNA, 25 bp, Probe Sequence
tggtggcagggcctagctgctacaa

SEQ ID NO: 278470 - DNA, 25 bp, Probe Sequence
tggtggcagggcatgaggacagcaa

SEQ ID NO: 278471 - DNA, 25 bp, Probe Sequence
tggtggcagggcatgaggacagcaa

SEQ ID NO: 278472 - DNA, 25 bp, Probe Sequence
tggggagcggtctatgtgaccaaat

SEQ ID NO: 278473 - DNA, 25 bp, Probe Sequence
tggggctgggtcagcaaccgaattc

SEQ ID NO: 278474 - DNA, 25 bp, Probe Sequence
tgagggtggtgacacaaccccttcc

SEQ ID NO: 278475 - DNA, 25 bp, Probe Sequence
tgggaggtgtgccagaaagtccccc

SEQ ID NO: 278476 - DNA, 25 bp, Probe Sequence
tgggagggtgctatcagttctgtcc

SEQ ID NO: 278477 - DNA, 25 bp, Probe Sequence
tgggagggtgctatcagttctgtcc

SEQ ID NO: 278478 - DNA, 25 bp, Probe Sequence
tggtggtgtgacgcctgtatattcc

SEQ ID NO: 278479 - DNA, 25 bp, Probe Sequence
tggggatgtgatcccctggattccc

SEQ ID NO: 278480 - DNA, 25 bp, Probe Sequence
tgtgggggtcgatcatgaatgtccg

SEQ ID NO: 278481 - DNA, 25 bp, Probe Sequence
tgggggattctatgtacagctctgc

SEQ ID NO: 278482 - DNA, 25 bp, Probe Sequence
tgggggaatctaatcaaagtacttt

SEQ ID NO: 278483 - DNA, 25 bp, Probe Sequence
tgggggtgctcttccaaggatattt

SEQ ID NO: 278484 - DNA, 25 bp, Probe Sequence
tggtgggtcctgtctcatagagaag

SEQ ID NO: 278485 - DNA, 25 bp, Probe Sequence
tgggactggccttctcaaggaagcc

SEQ ID NO: 278486 - DNA, 25 bp, Probe Sequence
tgggcctggaatatacacaaacatc

SEQ ID NO: 278487 - DNA, 25 bp, Probe Sequence
tgggctggaggtagtaacaggatcc

SEQ ID NO: 278488 - DNA, 25 bp, Probe Sequence
tgggtggaatgatgccacctggacc

SEQ ID NO: 278489 - DNA, 25 bp, Probe Sequence
tggtgtgtggagcacccaggcagac

SEQ ID NO: 278490 - DNA, 25 bp, Probe Sequence
tggtggggcagcaccgtgaagacga

SEQ ID NO: 278491 - DNA, 25 bp, Probe Sequence
tggtggtggagagctcggaagccgc

SEQ ID NO: 278492 - DNA, 25 bp, Probe Sequence
tggtggtgctgctgtttgaaaccgc

SEQ ID NO: 278493 - DNA, 25 bp, Probe Sequence
tggtggttcatactcttcaaacact

SEQ ID NO: 278494 - DNA, 25 bp, Probe Sequence
tggtgggtccagtttccagagcacc

SEQ ID NO: 278495 - DNA, 25 bp, Probe Sequence
tggggcctagaagttacagagcatc

SEQ ID NO: 278496 - DNA, 25 bp, Probe Sequence
tgggtgctcatagagttgcccagcc

SEQ ID NO: 278497 - DNA, 25 bp, Probe Sequence
tgggtgctcatagagttgcccagcc

SEQ ID NO: 278498 - DNA, 25 bp, Probe Sequence
tgggttcaactaaagcgccagcctg

SEQ ID NO: 278499 - DNA, 25 bp, Probe Sequence
tggggtcaaggaattcgccagcctt

SEQ ID NO: 278500 - DNA, 25 bp, Probe Sequence
tggggtcaacagttttcctatgctt

SEQ ID NO: 278501 - DNA, 25 bp, Probe Sequence
tggggtcagaagattctcctggcca

SEQ ID NO: 278502 - DNA, 25 bp, Probe Sequence
tgggttcaaatgattctcctgcctc

SEQ ID NO: 278503 - DNA, 25 bp, Probe Sequence
tgggttcaagtgattttcctgcctc

SEQ ID NO: 278504 - DNA, 25 bp, Probe Sequence
tgggttcaagtagtattaccaccct

SEQ ID NO: 278505 - DNA, 25 bp, Probe Sequence
tggggacacttaaatctaccctctt

SEQ ID NO: 278506 - DNA, 25 bp, Probe Sequence
tgggaacccatgaaattgaccccca

SEQ ID NO: 278507 - DNA, 25 bp, Probe Sequence
tgggccctcgagaaataataccctc

SEQ ID NO: 278508 - DNA, 25 bp, Probe Sequence
tgggcccaggggaagcaaagacctc

SEQ ID NO: 278509 - DNA, 25 bp, Probe Sequence
tgggcccgaggcgcaagaggaagat

SEQ ID NO: 278510 - DNA, 25 bp, Probe Sequence
tgggtggccggcgacaagatggcag

SEQ ID NO: 278511 - DNA, 25 bp, Probe Sequence
tggggcgctcaagaatatgctggcc

SEQ ID NO: 278512 - DNA, 25 bp, Probe Sequence
tggtgtcccgtccaatgatgtagcc

SEQ ID NO: 278513 - DNA, 25 bp, Probe Sequence
tgggatctctccagatatggtcgct

SEQ ID NO: 278514 - DNA, 25 bp, Probe Sequence
tgggtcttctcaggaccgtagtgcc

SEQ ID NO: 278515 - DNA, 25 bp, Probe Sequence
tgggtctgacaaggacccgtgtcac

SEQ ID NO: 278516 - DNA, 25 bp, Probe Sequence
tggtgtctatattgggccatccttc

SEQ ID NO: 278517 - DNA, 25 bp, Probe Sequence
tggtgtccatgaggtaccacagctc

SEQ ID NO: 278518 - DNA, 25 bp, Probe Sequence
tggtgtacactgttactcagatcta

SEQ ID NO: 278519 - DNA, 25 bp, Probe Sequence
tggtgtccactgggaccagcatgca

SEQ ID NO: 278520 - DNA, 25 bp, Probe Sequence
tgtcgctcgggctgagattgcatca

SEQ ID NO: 278521 - DNA, 25 bp, Probe Sequence
tgggcatccgcctggataatgcttc

SEQ ID NO: 278522 - DNA, 25 bp, Probe Sequence
tgggatctggaaaggctagcatatt

SEQ ID NO: 278523 - DNA, 25 bp, Probe Sequence
tgggtctctcaaaggacagccacgg

SEQ ID NO: 278524 - DNA, 25 bp, Probe Sequence
tgggtctgcatctgcttactgaagg

SEQ ID NO: 278525 - DNA, 25 bp, Probe Sequence
tgggcctcatcatcgttcgaaggct

SEQ ID NO: 278526 - DNA, 25 bp, Probe Sequence
tggggcctcattctggcaaagctgg

SEQ ID NO: 278527 - DNA, 25 bp, Probe Sequence
tggggctgtcttatgaaaatataga

SEQ ID NO: 278528 - DNA, 25 bp, Probe Sequence
tggggctgttatatgtgccaatgtg

SEQ ID NO: 278529 - DNA, 25 bp, Probe Sequence
tggggcatcttagagcatccacagt

SEQ ID NO: 278530 - DNA, 25 bp, Probe Sequence
tggggacctgacaggccacagtgac

SEQ ID NO: 278531 - DNA, 25 bp, Probe Sequence
tggtggacctcatggcccacatggc

SEQ ID NO: 278532 - DNA, 25 bp, Probe Sequence
tggtggacacaggaagcctacccaa

SEQ ID NO: 278533 - DNA, 25 bp, Probe Sequence
tggtggtatcgtcaactgtgccatc

SEQ ID NO: 278534 - DNA, 25 bp, Probe Sequence
tggtggatacagacgaactccctct

SEQ ID NO: 278535 - DNA, 25 bp, Probe Sequence
tggggtcatcaaggaccttgcctct

SEQ ID NO: 278536 - DNA, 25 bp, Probe Sequence
tggggagttaagacctggcagctct

SEQ ID NO: 278537 - DNA, 25 bp, Probe Sequence
tgtggaagttagttttctggcccgt

SEQ ID NO: 278538 - DNA, 25 bp, Probe Sequence
tgggaattattacctctcagggccg

SEQ ID NO: 278539 - DNA, 25 bp, Probe Sequence
tggtggttatggtcctagaggtggc

SEQ ID NO: 278540 - DNA, 25 bp, Probe Sequence
tgggctttaggggctacagagtcga

SEQ ID NO: 278541 - DNA, 25 bp, Probe Sequence
tgggcttaaggctctgataaccatg

SEQ ID NO: 278542 - DNA, 25 bp, Probe Sequence
tgggcttagattgcctagcagcacc

SEQ ID NO: 278543 - DNA, 25 bp, Probe Sequence
tgggtttatctcaaggcagcagcct

SEQ ID NO: 278544 - DNA, 25 bp, Probe Sequence
tgggtgtctacaataggctcagtcc

SEQ ID NO: 278545 - DNA, 25 bp, Probe Sequence
tgggtgttggagagtatcagcagcc

SEQ ID NO: 278546 - DNA, 25 bp, Probe Sequence
tggggttgggggcacagcagcccca

SEQ ID NO: 278547 - DNA, 25 bp, Probe Sequence
tggggaagggggctgagcagctccc

SEQ ID NO: 278548 - DNA, 25 bp, Probe Sequence
tggggacgtggagggtggcacggtc

SEQ ID NO: 278549 - DNA, 25 bp, Probe Sequence
tggggggccaggggggcaatgagcc

SEQ ID NO: 278550 - DNA, 25 bp, Probe Sequence
tggtgggccgagaggcaggaagcag

SEQ ID NO: 278551 - DNA, 25 bp, Probe Sequence
tggggtgggagtaacagggcagaaa

SEQ ID NO: 278552 - DNA, 25 bp, Probe Sequence
tggggtgggacccagaggggaggct

SEQ ID NO: 278553 - DNA, 25 bp, Probe Sequence
tgggtgtggggactgggattggggt

SEQ ID NO: 278554 - DNA, 25 bp, Probe Sequence
tgggtggttttgctggatgtttggt

SEQ ID NO: 278555 - DNA, 25 bp, Probe Sequence
tgggtagtgctttgtgctggtttct

SEQ ID NO: 278556 - DNA, 25 bp, Probe Sequence
tgggaaggagcttcctggtttcttg

SEQ ID NO: 278557 - DNA, 25 bp, Probe Sequence
tgggatatgggcaggggacgtcttc

SEQ ID NO: 278558 - DNA, 25 bp, Probe Sequence
tgggaaggcctcttggagaccttac

SEQ ID NO: 278559 - DNA, 25 bp, Probe Sequence
tggggtagcctctggaattttgcca

SEQ ID NO: 278560 - DNA, 25 bp, Probe Sequence
tggggtggcttatggcttctttatc

SEQ ID NO: 278561 - DNA, 25 bp, Probe Sequence
tggggctgtttttgagcttctcatt

SEQ ID NO: 278562 - DNA, 25 bp, Probe Sequence
tggggctgtttttgagcttctcatt

SEQ ID NO: 278563 - DNA, 25 bp, Probe Sequence
tggtggcttgtcttgaggatttcat

SEQ ID NO: 278564 - DNA, 25 bp, Probe Sequence
tcgtactgatgggctaggtagttca

SEQ ID NO: 278565 - DNA, 25 bp, Probe Sequence
tcgaccaaggccaggacgtggaggt

SEQ ID NO: 278566 - DNA, 25 bp, Probe Sequence
tggggaagacgcagaaggtgaaggt

SEQ ID NO: 278567 - DNA, 25 bp, Probe Sequence
tgggggagaccaagaacgttaacat

SEQ ID NO: 278568 - DNA, 25 bp, Probe Sequence
tgggtggccacgtgaagcgtaaaca

SEQ ID NO: 278569 - DNA, 25 bp, Probe Sequence
tgttggtggcctctgaagggaacca

SEQ ID NO: 278570 - DNA, 25 bp, Probe Sequence
tgtatgttcccctgattttgaatcc

SEQ ID NO: 278571 - DNA, 25 bp, Probe Sequence
tgggcttccccaaggatttattgac

SEQ ID NO: 278572 - DNA, 25 bp, Probe Sequence
tgggcttccccaaggatttattgac

SEQ ID NO: 278573 - DNA, 25 bp, Probe Sequence
tgtggtaacctccggtttgtggaca

SEQ ID NO: 278574 - DNA, 25 bp, Probe Sequence
tgggactatcggcggtttgtggcca

SEQ ID NO: 278575 - DNA, 25 bp, Probe Sequence
tgaaacgcccggggttggcgctgaa

SEQ ID NO: 278576 - DNA, 25 bp, Probe Sequence
tgataaacccggggtgacctcatga

SEQ ID NO: 278577 - DNA, 25 bp, Probe Sequence
tgaagaaatcacgcctggacgccaa

SEQ ID NO: 278578 - DNA, 25 bp, Probe Sequence
tggtggacacacgccatgaggtcac

SEQ ID NO: 278579 - DNA, 25 bp, Probe Sequence
tggtggacctgccaccatcacaata

SEQ ID NO: 278580 - DNA, 25 bp, Probe Sequence
tggtggtcctgcaccaaactacaaa

SEQ ID NO: 278581 - DNA, 25 bp, Probe Sequence
tggggtcctcacggagaagaacacc

SEQ ID NO: 278582 - DNA, 25 bp, Probe Sequence
tgggttgttcaagaaagcctcattc

SEQ ID NO: 278583 - DNA, 25 bp, Probe Sequence
tgtggttgttacagaataagtctaa

SEQ ID NO: 278584 - DNA, 25 bp, Probe Sequence
tgaggggtccacagaaaagtatttc

SEQ ID NO: 278585 - DNA, 25 bp, Probe Sequence
tccctggatcgagaacataattagt

SEQ ID NO: 278586 - DNA, 25 bp, Probe Sequence
tgtggctggtcgtaaacagttttgt

SEQ ID NO: 278587 - DNA, 25 bp, Probe Sequence
tgggctttagtctggcagtgtatgg

SEQ ID NO: 278588 - DNA, 25 bp, Probe Sequence
tggggataagaaaggcagctgtgag

SEQ ID NO: 278589 - DNA, 25 bp, Probe Sequence
tggggcataacgatgaggcgctggc

SEQ ID NO: 278590 - DNA, 25 bp, Probe Sequence
tggggaaatcaggtgcagcggccat

SEQ ID NO: 278591 - DNA, 25 bp, Probe Sequence
tggggattacaggcatgcaccacca

SEQ ID NO: 278592 - DNA, 25 bp, Probe Sequence
tgggtattgccaaatgcccatgccc

SEQ ID NO: 278593 - DNA, 25 bp, Probe Sequence
tgggatttgctattgcagctgccgt

SEQ ID NO: 278594 - DNA, 25 bp, Probe Sequence
tgggatccaggaacacatcgatctg

SEQ ID NO: 278595 - DNA, 25 bp, Probe Sequence
tggggccagtgcacacagacagtgc

SEQ ID NO: 278596 - DNA, 25 bp, Probe Sequence
tggggcacgtcagcaagagggagaa

SEQ ID NO: 278597 - DNA, 25 bp, Probe Sequence
tggggcgcttgcccaggagagggac

SEQ ID NO: 278598 - DNA, 25 bp, Probe Sequence
tgggcactgtgtaccaggatgagga

SEQ ID NO: 278599 - DNA, 25 bp, Probe Sequence
tgtggccgtggtacggatgaagcgt

SEQ ID NO: 278600 - DNA, 25 bp, Probe Sequence
tgtggcacgtgaatattatataggt

SEQ ID NO: 278601 - DNA, 25 bp, Probe Sequence
tgggcaccttcaatgtgatccgcct

SEQ ID NO: 278602 - DNA, 25 bp, Probe Sequence
tgggcaacattaagagttaccctgg

SEQ ID NO: 278603 - DNA, 25 bp, Probe Sequence
tgggtaactagccatttcttcctga

SEQ ID NO: 278604 - DNA, 25 bp, Probe Sequence
tggggcaattaccttttgatcctca

SEQ ID NO: 278605 - DNA, 25 bp, Probe Sequence
tggtggatttgatccatttcctctc

SEQ ID NO: 278606 - DNA, 25 bp, Probe Sequence
tgggtgttttgagctgcttccatat

SEQ ID NO: 278607 - DNA, 25 bp, Probe Sequence
tgggtcattttgaactgctccttca

SEQ ID NO: 278608 - DNA, 25 bp, Probe Sequence
tgggacattagtaactgcacactat

SEQ ID NO: 278609 - DNA, 25 bp, Probe Sequence
tgggcagctgtacatggtgcaccat

SEQ ID NO: 278610 - DNA, 25 bp, Probe Sequence
tgggagtgcgagagctctgcaccag

SEQ ID NO: 278611 - DNA, 25 bp, Probe Sequence
tggggccagatgagccagcattcca

SEQ ID NO: 278612 - DNA, 25 bp, Probe Sequence
tggtggccaggatgctcagctggcc

SEQ ID NO: 278613 - DNA, 25 bp, Probe Sequence
tggggccctgcatttatgaggcacc

SEQ ID NO: 278614 - DNA, 25 bp, Probe Sequence
tggggcctgtgaataaagctgcaga

SEQ ID NO: 278615 - DNA, 25 bp, Probe Sequence
tgggtgcctgtaatcccaggtactt

SEQ ID NO: 278616 - DNA, 25 bp, Probe Sequence
tgggatcacttttccctgtctaaac

SEQ ID NO: 278617 - DNA, 25 bp, Probe Sequence
tgccgatacttccggccgaataaac

SEQ ID NO: 278618 - DNA, 25 bp, Probe Sequence
tgggaacttcagggcggtttcaacg

SEQ ID NO: 278619 - DNA, 25 bp, Probe Sequence
tggggactctcaagagcctgtgttc

SEQ ID NO: 278620 - DNA, 25 bp, Probe Sequence
tggggatgcatccaaagtggttgtc

SEQ ID NO: 278621 - DNA, 25 bp, Probe Sequence
tggggacatcagcaatgttcttcac

SEQ ID NO: 278622 - DNA, 25 bp, Probe Sequence
tggggatcagagcagacttctccac

SEQ ID NO: 278623 - DNA, 25 bp, Probe Sequence
tggggacacactggactgttcccat

SEQ ID NO: 278624 - DNA, 25 bp, Probe Sequence
tgggggcaactggccatttgccaat

SEQ ID NO: 278625 - DNA, 25 bp, Probe Sequence
tggggatcaactccagataagaact

SEQ ID NO: 278626 - DNA, 25 bp, Probe Sequence
tggggaccatgtcaatatagctgtc

SEQ ID NO: 278627 - DNA, 25 bp, Probe Sequence
tggggaacatgtcagcaaacgcctc

SEQ ID NO: 278628 - DNA, 25 bp, Probe Sequence
tgggagcgactgctacggaagcttc

SEQ ID NO: 278629 - DNA, 25 bp, Probe Sequence
tggggtgaacggtgctggcagttcg

SEQ ID NO: 278630 - DNA, 25 bp, Probe Sequence
tgtgagggtacacatccgggttctg

SEQ ID NO: 278631 - DNA, 25 bp, Probe Sequence
tgggggtgacaccccatgtggttgt

SEQ ID NO: 278632 - DNA, 25 bp, Probe Sequence
tgggctgggaccagactttgttctc

SEQ ID NO: 278633 - DNA, 25 bp, Probe Sequence
tgggctgggaccagactttgttctc

SEQ ID NO: 278634 - DNA, 25 bp, Probe Sequence
tgggctgggaccagactttgttctc

SEQ ID NO: 278635 - DNA, 25 bp, Probe Sequence
tgggctgggaccagactttgttctc

SEQ ID NO: 278636 - DNA, 25 bp, Probe Sequence
tgggcagggaccgccaatggtgccc

SEQ ID NO: 278637 - DNA, 25 bp, Probe Sequence
tgggggctgacgggcaagaggtgca

SEQ ID NO: 278638 - DNA, 25 bp, Probe Sequence
tggggccaagctgagaagagtccaa

SEQ ID NO: 278639 - DNA, 25 bp, Probe Sequence
tgggaccaactgggatccagatcca

SEQ ID NO: 278640 - DNA, 25 bp, Probe Sequence
tgggaaaggcctgcattctgatcct

SEQ ID NO: 278641 - DNA, 25 bp, Probe Sequence
tggggaattgctgctctttaccaaa

SEQ ID NO: 278642 - DNA, 25 bp, Probe Sequence
tgtgagggtttgccagttttcccca

SEQ ID NO: 278643 - DNA, 25 bp, Probe Sequence
tgtggaaggggagctcggtccacca

SEQ ID NO: 278644 - DNA, 25 bp, Probe Sequence
tggggggcagggagtgtaccacaca

SEQ ID NO: 278645 - DNA, 25 bp, Probe Sequence
tggggctctgagggaaattgaggcc

SEQ ID NO: 278646 - DNA, 25 bp, Probe Sequence
tggggagtgatggtagcgttggtgc

SEQ ID NO: 278647 - DNA, 25 bp, Probe Sequence
tggggagtggaggaggtctgtgggc

SEQ ID NO: 278648 - DNA, 25 bp, Probe Sequence
tgggggaggagttgtgtctcgtctt

SEQ ID NO: 278649 - DNA, 25 bp, Probe Sequence
tgaggagggcaagtttgtccggctg

SEQ ID NO: 278650 - DNA, 25 bp, Probe Sequence
tgggaactgaagactagtccatagg

SEQ ID NO: 278651 - DNA, 25 bp, Probe Sequence
tgggacgtagcgacggtccatcagc

SEQ ID NO: 278652 - DNA, 25 bp, Probe Sequence
tgggacgaaagcttggctccaaagc

SEQ ID NO: 278653 - DNA, 25 bp, Probe Sequence
tgggcagggtcagcaggcccaaacc

SEQ ID NO: 278654 - DNA, 25 bp, Probe Sequence
tgggaatggactgagtgccccacca

SEQ ID NO: 278655 - DNA, 25 bp, Probe Sequence
tgggagtgaggggttacctccctgc

SEQ ID NO: 278656 - DNA, 25 bp, Probe Sequence
tgggggtgggttaacctcacacaag

SEQ ID NO: 278657 - DNA, 25 bp, Probe Sequence
tggggagtttgtttggcaccaaaat

SEQ ID NO: 278658 - DNA, 25 bp, Probe Sequence
tgggatttgtttttggcaccaaaat

SEQ ID NO: 278659 - DNA, 25 bp, Probe Sequence
tgggagtttgtttctggcatcctaa

SEQ ID NO: 278660 - DNA, 25 bp, Probe Sequence
tgggagtttgttttggcaccttatc

SEQ ID NO: 278661 - DNA, 25 bp, Probe Sequence
tgggagtttgttttggcaccaaatc

SEQ ID NO: 278662 - DNA, 25 bp, Probe Sequence
tgggagtttgttttggcaccaaatc

SEQ ID NO: 278663 - DNA, 25 bp, Probe Sequence
tgggagttcgttttggcaccaaaat

SEQ ID NO: 278664 - DNA, 25 bp, Probe Sequence
tgggagtttgttttggcaccaaaat

SEQ ID NO: 278665 - DNA, 25 bp, Probe Sequence
tgggagtttgttttggcaccaaaat

SEQ ID NO: 278666 - DNA, 25 bp, Probe Sequence
tgggagtttgttttggcaccaaaat

SEQ ID NO: 278667 - DNA, 25 bp, Probe Sequence
tgggagtttgttttggcaccaaaat

SEQ ID NO: 278668 - DNA, 25 bp, Probe Sequence
tgggagtttgttttggcaccaaaat

SEQ ID NO: 278669 - DNA, 25 bp, Probe Sequence
tgggagtttgttttggcaccaaaat

SEQ ID NO: 278670 - DNA, 25 bp, Probe Sequence
tgggagtttgttttggcaccaaaat

SEQ ID NO: 278671 - DNA, 25 bp, Probe Sequence
tgggagtttgttttggcaccaaaat

SEQ ID NO: 278672 - DNA, 25 bp, Probe Sequence
tgggagtttgttttggcaccaaaat

SEQ ID NO: 278673 - DNA, 25 bp, Probe Sequence
tggggatttgtttcttggcaccaaa

SEQ ID NO: 278674 - DNA, 25 bp, Probe Sequence
tgggggttgtaaattggcatggaaa

SEQ ID NO: 278675 - DNA, 25 bp, Probe Sequence
tgggactttccaacttggcagtaaa

SEQ ID NO: 278676 - DNA, 25 bp, Probe Sequence
tgggcctgtctcagattgggattaa

SEQ ID NO: 278677 - DNA, 25 bp, Probe Sequence
tgggcccatattggtttgtgttaaa

SEQ ID NO: 278678 - DNA, 25 bp, Probe Sequence
tgggcaagagatgcgcttatgtata

SEQ ID NO: 278679 - DNA, 25 bp, Probe Sequence
tgggcacaggtcggccctgtgaagc

SEQ ID NO: 278680 - DNA, 25 bp, Probe Sequence
tgggctaggaatggccttggaggct

SEQ ID NO: 278681 - DNA, 25 bp, Probe Sequence
tgggtgcagtgaatggccagcgggt

SEQ ID NO: 278682 - DNA, 25 bp, Probe Sequence
tggggaggcagcgttcagggagatt

SEQ ID NO: 278683 - DNA, 25 bp, Probe Sequence
tggggacgaggcttgaggtgggctc

SEQ ID NO: 278684 - DNA, 25 bp, Probe Sequence
tgtggagacgggttagtggggcttt

SEQ ID NO: 278685 - DNA, 25 bp, Probe Sequence
tggggtactggcagagctgtggctc

SEQ ID NO: 278686 - DNA, 25 bp, Probe Sequence
tgtggagtgacggaactgcagtgcc

SEQ ID NO: 278687 - DNA, 25 bp, Probe Sequence
tgggtgagcatggccaacgcaggca

SEQ ID NO: 278688 - DNA, 25 bp, Probe Sequence
tgggtggaggcagccagggcttacc

SEQ ID NO: 278689 - DNA, 25 bp, Probe Sequence
tgggtggaggcagccagggcttacc

SEQ ID NO: 278690 - DNA, 25 bp, Probe Sequence
tgggtggatgacgacaagaacttta

SEQ ID NO: 278691 - DNA, 25 bp, Probe Sequence
tgggatggtaggtcaaaattgtatt

SEQ ID NO: 278692 - DNA, 25 bp, Probe Sequence
tggggcagtgggtcccagattggct

SEQ ID NO: 278693 - DNA, 25 bp, Probe Sequence
tgggccaggtgcacctaaaggctga

SEQ ID NO: 278694 - DNA, 25 bp, Probe Sequence
tgagtccgggaccctaagaaggcct

SEQ ID NO: 278695 - DNA, 25 bp, Probe Sequence
tggggcggagacgctaaccgccctt

SEQ ID NO: 278696 - DNA, 25 bp, Probe Sequence
tgggtaggaaccgtagactcgctca

SEQ ID NO: 278697 - DNA, 25 bp, Probe Sequence
tgggtaggaaccgtagactcgctca

SEQ ID NO: 278698 - DNA, 25 bp, Probe Sequence
tgggtgaggagattcccaccttcca

SEQ ID NO: 278699 - DNA, 25 bp, Probe Sequence
tgggtgacaggagttacaggttcta

SEQ ID NO: 278700 - DNA, 25 bp, Probe Sequence
tggggccggagtatctatttctaca

SEQ ID NO: 278701 - DNA, 25 bp, Probe Sequence
tggggtggggctgttgatatttcat

SEQ ID NO: 278702 - DNA, 25 bp, Probe Sequence
tggggtttggtggccatgttttcta

SEQ ID NO: 278703 - DNA, 25 bp, Probe Sequence
tgggcgttggatatcgtttgactca

SEQ ID NO: 278704 - DNA, 25 bp, Probe Sequence
tgtgtggtttgttttgtttgcccct

SEQ ID NO: 278705 - DNA, 25 bp, Probe Sequence
tgtgtggtttgttttgtttgcccct

SEQ ID NO: 278706 - DNA, 25 bp, Probe Sequence
tggggttagatgtgagcgtccctcc

SEQ ID NO: 278707 - DNA, 25 bp, Probe Sequence
tggggtctgtggtgagagtcctgta

SEQ ID NO: 278708 - DNA, 25 bp, Probe Sequence
tggggactatagtgcaacctatttg

SEQ ID NO: 278709 - DNA, 25 bp, Probe Sequence
tggggaaatagatcagccactttta

SEQ ID NO: 278710 - DNA, 25 bp, Probe Sequence
tgggagacaatttcacatggacttt

SEQ ID NO: 278711 - DNA, 25 bp, Probe Sequence
tgggtgtgcctttcactgagcaaat

SEQ ID NO: 278712 - DNA, 25 bp, Probe Sequence
tgggggtcattttgtgtgacagata

SEQ ID NO: 278713 - DNA, 25 bp, Probe Sequence
tgggaggtcatgcctgatctgtact

SEQ ID NO: 278714 - DNA, 25 bp, Probe Sequence
tgggaggtcatgcctgatctgtact

SEQ ID NO: 278715 - DNA, 25 bp, Probe Sequence
tgggaggtcatgcctgatctgtact

SEQ ID NO: 278716 - DNA, 25 bp, Probe Sequence
tgggagattcatgcccttatctagc

SEQ ID NO: 278717 - DNA, 25 bp, Probe Sequence
tggggacaatggccacttactacct

SEQ ID NO: 278718 - DNA, 25 bp, Probe Sequence
tgggttgaattgcactttctacctt

SEQ ID NO: 278719 - DNA, 25 bp, Probe Sequence
tggggtaatgaaacttttagcctag

SEQ ID NO: 278720 - DNA, 25 bp, Probe Sequence
tgggagtattaaagtatttacacca

SEQ ID NO: 278721 - DNA, 25 bp, Probe Sequence
tgggatgatttttagttgttacact

SEQ ID NO: 278722 - DNA, 25 bp, Probe Sequence
tggggtttctgctgatgtactccac

SEQ ID NO: 278723 - DNA, 25 bp, Probe Sequence
tggggtttcactatgatgactacaa

SEQ ID NO: 278724 - DNA, 25 bp, Probe Sequence
tggggtgtctctcacagctaataaa

SEQ ID NO: 278725 - DNA, 25 bp, Probe Sequence
tgggtgttatcacctagctgaatgt

SEQ ID NO: 278726 - DNA, 25 bp, Probe Sequence
tggggttggctccatgaccaagatc

SEQ ID NO: 278727 - DNA, 25 bp, Probe Sequence
tggggttggctccatgaccaagatc

SEQ ID NO: 278728 - DNA, 25 bp, Probe Sequence
tgaggggaggctacatttcacaacc

SEQ ID NO: 278729 - DNA, 25 bp, Probe Sequence
tgggatgggccgctttcagaagccc

SEQ ID NO: 278730 - DNA, 25 bp, Probe Sequence
tgggtgaagcgaagttctaaccctc

SEQ ID NO: 278731 - DNA, 25 bp, Probe Sequence
tgggcgcaagcacagtgattgaatc

SEQ ID NO: 278732 - DNA, 25 bp, Probe Sequence
tggggctcagagtgttgtactcgta

SEQ ID NO: 278733 - DNA, 25 bp, Probe Sequence
tgggactcggtaggtggagccccag

SEQ ID NO: 278734 - DNA, 25 bp, Probe Sequence
tgggaccacgaagagaggcccgcac

SEQ ID NO: 278735 - DNA, 25 bp, Probe Sequence
tgggatcagcaccacgtaaggggcc

SEQ ID NO: 278736 - DNA, 25 bp, Probe Sequence
tgggccagaccgctaggagcggccc

SEQ ID NO: 278737 - DNA, 25 bp, Probe Sequence
tgggccagaccgctaggagcggccc

SEQ ID NO: 278738 - DNA, 25 bp, Probe Sequence
tgggccaagcccagaagtggtccgc

SEQ ID NO: 278739 - DNA, 25 bp, Probe Sequence
tgggcccaggccaggaggggccctg

SEQ ID NO: 278740 - DNA, 25 bp, Probe Sequence
tgggtccagagcctcgtgagaggtc

SEQ ID NO: 278741 - DNA, 25 bp, Probe Sequence
tgggaccatgagcccgtgaagccaa

SEQ ID NO: 278742 - DNA, 25 bp, Probe Sequence
tgggatcagctaccgtggtaccatc

SEQ ID NO: 278743 - DNA, 25 bp, Probe Sequence
tgggtggaactggaggtcattacgt

SEQ ID NO: 278744 - DNA, 25 bp, Probe Sequence
tgggcagggacggggtacagaggat

SEQ ID NO: 278745 - DNA, 25 bp, Probe Sequence
tggggcttggctccaagttcaagga

SEQ ID NO: 278746 - DNA, 25 bp, Probe Sequence
tgggtgggagctccttttaggtaga

SEQ ID NO: 278747 - DNA, 25 bp, Probe Sequence
tgttctgagggtctgcatcttaggg

SEQ ID NO: 278748 - DNA, 25 bp, Probe Sequence
tgggctgtgggtttcagcttgaagg

SEQ ID NO: 278749 - DNA, 25 bp, Probe Sequence
tggggtgggcatttgatgcgggagg

SEQ ID NO: 278750 - DNA, 25 bp, Probe Sequence
tggggttggcctttgcatgggaggc

SEQ ID NO: 278751 - DNA, 25 bp, Probe Sequence
tggggtctgctggcgaacggcagaa

SEQ ID NO: 278752 - DNA, 25 bp, Probe Sequence
tggggtcatcatcaacactgccagt

SEQ ID NO: 278753 - DNA, 25 bp, Probe Sequence
tggggtccattgaagagctgcgagg

SEQ ID NO: 278754 - DNA, 25 bp, Probe Sequence
tggggtccattgaagagctgcgagg

SEQ ID NO: 278755 - DNA, 25 bp, Probe Sequence
tgggtgccctccagagaggggctgc

SEQ ID NO: 278756 - DNA, 25 bp, Probe Sequence
tgggtgccctccagagaggggctgc

SEQ ID NO: 278757 - DNA, 25 bp, Probe Sequence
tgggtgtcctcacaggagtgagggc

SEQ ID NO: 278758 - DNA, 25 bp, Probe Sequence
tgggtgtcctatcccatatggagaa

SEQ ID NO: 278759 - DNA, 25 bp, Probe Sequence
tggggtctctttgttgtgggatgag

SEQ ID NO: 278760 - DNA, 25 bp, Probe Sequence
tgggccctttgtgtttgaggatgct

SEQ ID NO: 278761 - DNA, 25 bp, Probe Sequence
tgggtcctttggagttactgcagtt

SEQ ID NO: 278762 - DNA, 25 bp, Probe Sequence
tgggggtgttggtgctgtaagaggt

SEQ ID NO: 278763 - DNA, 25 bp, Probe Sequence
tgggcgggtggtgggccaaggagga

SEQ ID NO: 278764 - DNA, 25 bp, Probe Sequence
tgggggggtcacaccagagagaggc

SEQ ID NO: 278765 - DNA, 25 bp, Probe Sequence
tggggttgcaatgactcccaagggc

SEQ ID NO: 278766 - DNA, 25 bp, Probe Sequence
tgggacttttatgctcccagaggcc

SEQ ID NO: 278767 - DNA, 25 bp, Probe Sequence
tgggacttcttcactccaaaattgt

SEQ ID NO: 278768 - DNA, 25 bp, Probe Sequence
tgaggatttcttactccgaagaaat

SEQ ID NO: 278769 - DNA, 25 bp, Probe Sequence
tgggttacttgcccaccagaaacag

SEQ ID NO: 278770 - DNA, 25 bp, Probe Sequence
tgagcagtttttgaccaagaatcag

SEQ ID NO: 278771 - DNA, 25 bp, Probe Sequence
tgagagttattacagccagaaagtg

SEQ ID NO: 278772 - DNA, 25 bp, Probe Sequence
tgtggttactagtgccaaaaatgct

SEQ ID NO: 278773 - DNA, 25 bp, Probe Sequence
tgggattcctttagaaaccgctgcc

SEQ ID NO: 278774 - DNA, 25 bp, Probe Sequence
tgggaagaccctagaaaccctgcca

SEQ ID NO: 278775 - DNA, 25 bp, Probe Sequence
tgggaatacacgagacctccgtaca

SEQ ID NO: 278776 - DNA, 25 bp, Probe Sequence
tgggagaacagggggccctgttatt

SEQ ID NO: 278777 - DNA, 25 bp, Probe Sequence
tgtggcaaacggggagcccttgccc

SEQ ID NO: 278778 - DNA, 25 bp, Probe Sequence
tgggcttagcgtgagcaggcacttc

SEQ ID NO: 278779 - DNA, 25 bp, Probe Sequence
tggggtaggagcagcaagatttgct

SEQ ID NO: 278780 - DNA, 25 bp, Probe Sequence
tgggcaagttgacagaggttctgct

SEQ ID NO: 278781 - DNA, 25 bp, Probe Sequence
tgggaaggcgcacgcagaggatccc

SEQ ID NO: 278782 - DNA, 25 bp, Probe Sequence
tgtggacatggccaggcttggtccc

SEQ ID NO: 278783 - DNA, 25 bp, Probe Sequence
tgtggaaggctagcttgccagggcc

SEQ ID NO: 278784 - DNA, 25 bp, Probe Sequence
tggggacctgaactgtcctggaggc

SEQ ID NO: 278785 - DNA, 25 bp, Probe Sequence
tgggggccattacgtcacttatgcc

SEQ ID NO: 278786 - DNA, 25 bp, Probe Sequence
tgggggccattaattactctgcgcc

SEQ ID NO: 278787 - DNA, 25 bp, Probe Sequence
tgtggggcacacattgggtcacgcc

SEQ ID NO: 278788 - DNA, 25 bp, Probe Sequence
tgggcccacacagttaaccagccca

SEQ ID NO: 278789 - DNA, 25 bp, Probe Sequence
tgggcaacaatagcgaacctccatc

SEQ ID NO: 278790 - DNA, 25 bp, Probe Sequence
tgggcacaaaatgggcccttgcctc

SEQ ID NO: 278791 - DNA, 25 bp, Probe Sequence
tctggaaggcgtgagccacttcttc

SEQ ID NO: 278792 - DNA, 25 bp, Probe Sequence
tgtaggcaggttaatcctccacttc

SEQ ID NO: 278793 - DNA, 25 bp, Probe Sequence
tgtatgaaggcttttggtctccctg

SEQ ID NO: 278794 - DNA, 25 bp, Probe Sequence
tgtatgaaggcttttggtctccctg

SEQ ID NO: 278795 - DNA, 25 bp, Probe Sequence
tgtatgaaggcttttggtctccctg

SEQ ID NO: 278796 - DNA, 25 bp, Probe Sequence
tgggaaagctttaggcaccagcctg

SEQ ID NO: 278797 - DNA, 25 bp, Probe Sequence
tggggtattatttgtgactctcctg

SEQ ID NO: 278798 - DNA, 25 bp, Probe Sequence
tgggcctttattcctgaatcttggc

SEQ ID NO: 278799 - DNA, 25 bp, Probe Sequence
tgggactgttacctacacatgcatc

SEQ ID NO: 278800 - DNA, 25 bp, Probe Sequence
tggggtgtttcactcaagagccact

SEQ ID NO: 278801 - DNA, 25 bp, Probe Sequence
tgggggagctttcagacacccccaa

SEQ ID NO: 278802 - DNA, 25 bp, Probe Sequence
tgggagggatttcagatgcccctgc

SEQ ID NO: 278803 - DNA, 25 bp, Probe Sequence
tgtgaaggttttgggcatccacccc

SEQ ID NO: 278804 - DNA, 25 bp, Probe Sequence
tgtgtagaatttctagatcccccga

SEQ ID NO: 278805 - DNA, 25 bp, Probe Sequence
tgttaacctttctaaccttcacgat

SEQ ID NO: 278806 - DNA, 25 bp, Probe Sequence
tgcttagcccctggtaaccattatt

SEQ ID NO: 278807 - DNA, 25 bp, Probe Sequence
tgtgtcaaccctgtttccttaaaag

SEQ ID NO: 278808 - DNA, 25 bp, Probe Sequence
tcagaaaacctccttaccgagaaca

SEQ ID NO: 278809 - DNA, 25 bp, Probe Sequence
tcagaaaacctccttaccgagaaca

SEQ ID NO: 278810 - DNA, 25 bp, Probe Sequence
tgggtcaatgcctgtaatccgaaaa

SEQ ID NO: 278811 - DNA, 25 bp, Probe Sequence
tgggtcagcagcaaggtgaactcaa

SEQ ID NO: 278812 - DNA, 25 bp, Probe Sequence
tgggtaacatagctagaccacatct

SEQ ID NO: 278813 - DNA, 25 bp, Probe Sequence
tgggctaggtagttcaatcctctgt

SEQ ID NO: 278814 - DNA, 25 bp, Probe Sequence
tgggcatcaagggaatccatccttc

SEQ ID NO: 278815 - DNA, 25 bp, Probe Sequence
tgggccagaggctaaaaccccagga

SEQ ID NO: 278816 - DNA, 25 bp, Probe Sequence
tgtggccgagtgtaacaaccatata

SEQ ID NO: 278817 - DNA, 25 bp, Probe Sequence
tgtggcgacggataaggcctgaact

SEQ ID NO: 278818 - DNA, 25 bp, Probe Sequence
tgtggctgtcgagaaacctttaata

SEQ ID NO: 278819 - DNA, 25 bp, Probe Sequence
tgtgtccccagtacaaactttagaa

SEQ ID NO: 278820 - DNA, 25 bp, Probe Sequence
tgggacccatgaacattcctttggt

SEQ ID NO: 278821 - DNA, 25 bp, Probe Sequence
tgggttctatgctcagaacttgggt

SEQ ID NO: 278822 - DNA, 25 bp, Probe Sequence
tggggatgctggtacaagttgtggg

SEQ ID NO: 278823 - DNA, 25 bp, Probe Sequence
tggggatgctggtacaagttgtggg

SEQ ID NO: 278824 - DNA, 25 bp, Probe Sequence
tgggcggcatggtgcaagttgaata

SEQ ID NO: 278825 - DNA, 25 bp, Probe Sequence
tgggcttcagatttaaggctgacag

SEQ ID NO: 278826 - DNA, 25 bp, Probe Sequence
tgggcatccccagtgacggaaaggg

SEQ ID NO: 278827 - DNA, 25 bp, Probe Sequence
tgggcatcataagctggggaaagag

SEQ ID NO: 278828 - DNA, 25 bp, Probe Sequence
tgggaagagcatttggtggctaaag

SEQ ID NO: 278829 - DNA, 25 bp, Probe Sequence
tgggtaacataatctggccatacag

SEQ ID NO: 278830 - DNA, 25 bp, Probe Sequence
tggggtacaagctgcatgggcgcac

SEQ ID NO: 278831 - DNA, 25 bp, Probe Sequence
tgggccaaaatctatctgtacgcac

SEQ ID NO: 278832 - DNA, 25 bp, Probe Sequence
tgggccagggtcatgcctatataag

SEQ ID NO: 278833 - DNA, 25 bp, Probe Sequence
tgggccagggtcatgcctatataag

SEQ ID NO: 278834 - DNA, 25 bp, Probe Sequence
tgggcacagtggttcatgcctgtaa

SEQ ID NO: 278835 - DNA, 25 bp, Probe Sequence
tgggaattctgggctgccaggaaac

SEQ ID NO: 278836 - DNA, 25 bp, Probe Sequence
tgggaattagccctggcctgaaagt

SEQ ID NO: 278837 - DNA, 25 bp, Probe Sequence
tgggaagtatggctgctgcccaatg

SEQ ID NO: 278838 - DNA, 25 bp, Probe Sequence
tgggaaatggctgtgctcccaacat

SEQ ID NO: 278839 - DNA, 25 bp, Probe Sequence
tgggcaaagggcattccttgagctg

SEQ ID NO: 278840 - DNA, 25 bp, Probe Sequence
tgggtatgggacattcctctgatcc

SEQ ID NO: 278841 - DNA, 25 bp, Probe Sequence
tgggatcatgctagtcacttcctgc

SEQ ID NO: 278842 - DNA, 25 bp, Probe Sequence
tgggatcaggatgcacttaccctgc

SEQ ID NO: 278843 - DNA, 25 bp, Probe Sequence
tgggaaagatcacactacatgcctg

SEQ ID NO: 278844 - DNA, 25 bp, Probe Sequence
tgggaacgagactagccctggtggg

SEQ ID NO: 278845 - DNA, 25 bp, Probe Sequence
tgggagggactatggccagttggga

SEQ ID NO: 278846 - DNA, 25 bp, Probe Sequence
tgggggtggctgtggacagaagctg

SEQ ID NO: 278847 - DNA, 25 bp, Probe Sequence
tgcggagttggtccttaaaactggg

SEQ ID NO: 278848 - DNA, 25 bp, Probe Sequence
tgggatctataccaattaaacattt

SEQ ID NO: 278849 - DNA, 25 bp, Probe Sequence
tgggagataactccttcagtcatct

SEQ ID NO: 278850 - DNA, 25 bp, Probe Sequence
tgtggaaaagccgtctcctttgact

SEQ ID NO: 278851 - DNA, 25 bp, Probe Sequence
tgggaaataggatgtccatttgtac

SEQ ID NO: 278852 - DNA, 25 bp, Probe Sequence
tgggagagaaagttttgcttgtaac

SEQ ID NO: 278853 - DNA, 25 bp, Probe Sequence
tgtggggtaagtgtgatgtcgatgg

SEQ ID NO: 278854 - DNA, 25 bp, Probe Sequence
tgggtggaaaaatcaacgtggcctt

SEQ ID NO: 278855 - DNA, 25 bp, Probe Sequence
tgggcggaatacattcacacagtaa

SEQ ID NO: 278856 - DNA, 25 bp, Probe Sequence
tgggggaaaagtagctccagctcaa

SEQ ID NO: 278857 - DNA, 25 bp, Probe Sequence
tgggggaatggtgtcatccacctcg

SEQ ID NO: 278858 - DNA, 25 bp, Probe Sequence
tgggaggacatggggtaccacctac

SEQ ID NO: 278859 - DNA, 25 bp, Probe Sequence
tgggaggccagagagataccgccgg

SEQ ID NO: 278860 - DNA, 25 bp, Probe Sequence
tgggtggctaaggcagatagactgc

SEQ ID NO: 278861 - DNA, 25 bp, Probe Sequence
tgggatcaataagcatgtcagactg

SEQ ID NO: 278862 - DNA, 25 bp, Probe Sequence
tgggataatcagcagcgtaactacc

SEQ ID NO: 278863 - DNA, 25 bp, Probe Sequence
tgggattttagaggtggacatgatc

SEQ ID NO: 278864 - DNA, 25 bp, Probe Sequence
tgggatcatgttaagtagaagtagc

SEQ ID NO: 278865 - DNA, 25 bp, Probe Sequence
tgggtgaaatgtggtctgagcagtc

SEQ ID NO: 278866 - DNA, 25 bp, Probe Sequence
tgggtatccatggtgacaagagtca

SEQ ID NO: 278867 - DNA, 25 bp, Probe Sequence
tgggcaagagatgggacaagcagtc

SEQ ID NO: 278868 - DNA, 25 bp, Probe Sequence
tgggagatgagaatgtacggctgtg

SEQ ID NO: 278869 - DNA, 25 bp, Probe Sequence
tgggagcggagcaactcggtggaga

SEQ ID NO: 278870 - DNA, 25 bp, Probe Sequence
tgggagggccaaggcgggcagatca

SEQ ID NO: 278871 - DNA, 25 bp, Probe Sequence
tgggggccctgagcgggaggagaag

SEQ ID NO: 278872 - DNA, 25 bp, Probe Sequence
tgggtaacctgatcgtggagagtga

SEQ ID NO: 278873 - DNA, 25 bp, Probe Sequence
tgggattaacagcagtgtggagact

SEQ ID NO: 278874 - DNA, 25 bp, Probe Sequence
tgggattacagccggtggtcatgcc

SEQ ID NO: 278875 - DNA, 25 bp, Probe Sequence
tgggattacagccggtggtcatgcc

SEQ ID NO: 278876 - DNA, 25 bp, Probe Sequence
tgggattacaggcatgggccaccac

SEQ ID NO: 278877 - DNA, 25 bp, Probe Sequence
tgggattacaggcgtgagccaccgt

SEQ ID NO: 278878 - DNA, 25 bp, Probe Sequence
tgggattacaggcgtgagccaccgt

SEQ ID NO: 278879 - DNA, 25 bp, Probe Sequence
tgggattacaggcgtgagccaccgt

SEQ ID NO: 278880 - DNA, 25 bp, Probe Sequence
tgggattacaggcgtgagccaccgc

SEQ ID NO: 278881 - DNA, 25 bp, Probe Sequence
tgggatcggaggccgtgagcctccc

SEQ ID NO: 278882 - DNA, 25 bp, Probe Sequence
tgggtgagaaggtgtggctgccccg

SEQ ID NO: 278883 - DNA, 25 bp, Probe Sequence
tgggtgggagtgttgagcatctgtc

SEQ ID NO: 278884 - DNA, 25 bp, Probe Sequence
tgggttggggcttgaagtgcatcag

SEQ ID NO: 278885 - DNA, 25 bp, Probe Sequence
tgggtgtgtgaggttcaggcccagt

SEQ ID NO: 278886 - DNA, 25 bp, Probe Sequence
tgggattgctgacgctgtcattgcc

SEQ ID NO: 278887 - DNA, 25 bp, Probe Sequence
tgggtgtggtggctcatacctgtaa

SEQ ID NO: 278888 - DNA, 25 bp, Probe Sequence
tgggtggtgggcccatggcagagaa

SEQ ID NO: 278889 - DNA, 25 bp, Probe Sequence
tgggtgtggtgtcacatgccagtaa

SEQ ID NO: 278890 - DNA, 25 bp, Probe Sequence
tgggtgggctgtcaagacgtgtcat

SEQ ID NO: 278891 - DNA, 25 bp, Probe Sequence
tgggggacagctgaggatgggccta

SEQ ID NO: 278892 - DNA, 25 bp, Probe Sequence
tgtgggggcactgtgggaagccttt

SEQ ID NO: 278893 - DNA, 25 bp, Probe Sequence
tgggctaggtcagttcggaaacttg

SEQ ID NO: 278894 - DNA, 25 bp, Probe Sequence
tgggctgcggggatgctgcaaaact

SEQ ID NO: 278895 - DNA, 25 bp, Probe Sequence
tgggccttgaagagtaattgactgg

SEQ ID NO: 278896 - DNA, 25 bp, Probe Sequence
tgggcgtgaatagcgttttgactca

SEQ ID NO: 278897 - DNA, 25 bp, Probe Sequence
tgggcgtggatagcggtttgactca

SEQ ID NO: 278898 - DNA, 25 bp, Probe Sequence
tgggcgtggatagcggtttgactca

SEQ ID NO: 278899 - DNA, 25 bp, Probe Sequence
tgggcgtggatagcggtttgactca

SEQ ID NO: 278900 - DNA, 25 bp, Probe Sequence
tgggcgtggatagcggtttgactca

SEQ ID NO: 278901 - DNA, 25 bp, Probe Sequence
tgggcgtggatagcggtttgactca

SEQ ID NO: 278902 - DNA, 25 bp, Probe Sequence
tgggcgtggatagcggtttgactca

SEQ ID NO: 278903 - DNA, 25 bp, Probe Sequence
tgggcgtggatagcggtttgactca

SEQ ID NO: 278904 - DNA, 25 bp, Probe Sequence
tgggcgtggatagcggtttgactca

SEQ ID NO: 278905 - DNA, 25 bp, Probe Sequence
tgggcgtggatagcggtttgactca

SEQ ID NO: 278906 - DNA, 25 bp, Probe Sequence
tgggcgtggatagcggtttgactca

SEQ ID NO: 278907 - DNA, 25 bp, Probe Sequence
tgggcgtggatagcggtttgactca

SEQ ID NO: 278908 - DNA, 25 bp, Probe Sequence
tgggcgtggatagcggtttgactca

SEQ ID NO: 278909 - DNA, 25 bp, Probe Sequence
tgggcgtggatagcggtttgactca

SEQ ID NO: 278910 - DNA, 25 bp, Probe Sequence
tgggcgtggatagcggtttgactca

SEQ ID NO: 278911 - DNA, 25 bp, Probe Sequence
tgggcgtggatagcggtttgactca

SEQ ID NO: 278912 - DNA, 25 bp, Probe Sequence
tgggcgtggatagcggtttgactca

SEQ ID NO: 278913 - DNA, 25 bp, Probe Sequence
tgggcgtggatagcggtttgactca

SEQ ID NO: 278914 - DNA, 25 bp, Probe Sequence
tgggcgtggatagcggtttgactca

SEQ ID NO: 278915 - DNA, 25 bp, Probe Sequence
tgggcgtggatagcggtttgactca

SEQ ID NO: 278916 - DNA, 25 bp, Probe Sequence
tgggcgtggatagcggtttgactca

SEQ ID NO: 278917 - DNA, 25 bp, Probe Sequence
tgggcgtggatagcggtttgactca

SEQ ID NO: 278918 - DNA, 25 bp, Probe Sequence
tgggcgtggatagcggtttgactca

SEQ ID NO: 278919 - DNA, 25 bp, Probe Sequence
tgggcgtggatagcggtttgactca

SEQ ID NO: 278920 - DNA, 25 bp, Probe Sequence
tgggcgtggatagcggtttgactca

SEQ ID NO: 278921 - DNA, 25 bp, Probe Sequence
tgggcgtggatagcggtttgactca

SEQ ID NO: 278922 - DNA, 25 bp, Probe Sequence
tgggcgtggatagcggtttgactca

SEQ ID NO: 278923 - DNA, 25 bp, Probe Sequence
tgggcgtggatagcggtttgactca

SEQ ID NO: 278924 - DNA, 25 bp, Probe Sequence
tgggcgtggatagcggtttgactca

SEQ ID NO: 278925 - DNA, 25 bp, Probe Sequence
tgggcgtggatagcggtttgactca

SEQ ID NO: 278926 - DNA, 25 bp, Probe Sequence
tgggcgtggatagcggtttgactca

SEQ ID NO: 278927 - DNA, 25 bp, Probe Sequence
tgggcgtggatagcggtttgactca

SEQ ID NO: 278928 - DNA, 25 bp, Probe Sequence
tgggcgtggatagcggtttgactca

SEQ ID NO: 278929 - DNA, 25 bp, Probe Sequence
tgggcgtggatagcggtttgactca

SEQ ID NO: 278930 - DNA, 25 bp, Probe Sequence
tgggcgtggatagcggtttgactca

SEQ ID NO: 278931 - DNA, 25 bp, Probe Sequence
tgggcgtggatagcggtttgactca

SEQ ID NO: 278932 - DNA, 25 bp, Probe Sequence
tgggcgtggatagcggtttgactca

SEQ ID NO: 278933 - DNA, 25 bp, Probe Sequence
tgggcgtggatagcggtttgactca

SEQ ID NO: 278934 - DNA, 25 bp, Probe Sequence
tgggcgtggatagcggtttgactca

SEQ ID NO: 278935 - DNA, 25 bp, Probe Sequence
tgggcgtggatagcggtttgactca

SEQ ID NO: 278936 - DNA, 25 bp, Probe Sequence
tgggcgtggatagcggtttgactca

SEQ ID NO: 278937 - DNA, 25 bp, Probe Sequence
tgggcgtggatagcggtttgactca

SEQ ID NO: 278938 - DNA, 25 bp, Probe Sequence
tgggcgtggatagcggtttgactca

SEQ ID NO: 278939 - DNA, 25 bp, Probe Sequence
tgggcgtggatagcggtttgactca

SEQ ID NO: 278940 - DNA, 25 bp, Probe Sequence
tgggcgtggatagcggtttgactca

SEQ ID NO: 278941 - DNA, 25 bp, Probe Sequence
tgggcgtggatagcggtttgactca

SEQ ID NO: 278942 - DNA, 25 bp, Probe Sequence
tgggcgtggatagcggtttgactca

SEQ ID NO: 278943 - DNA, 25 bp, Probe Sequence
tgggcgtggatagcggtttgactca

SEQ ID NO: 278944 - DNA, 25 bp, Probe Sequence
tgggcgtggatagcggtttgactca

SEQ ID NO: 278945 - DNA, 25 bp, Probe Sequence
tgggcgtggatagcggtttgactca

SEQ ID NO: 278946 - DNA, 25 bp, Probe Sequence
tgggcgtggatagcggtttgactca

SEQ ID NO: 278947 - DNA, 25 bp, Probe Sequence
tgggcgtggatagcggtttgactca

SEQ ID NO: 278948 - DNA, 25 bp, Probe Sequence
tgggcgtggatatcggtttgactca

SEQ ID NO: 278949 - DNA, 25 bp, Probe Sequence
tgggcgtggatatcggtttgactca

SEQ ID NO: 278950 - DNA, 25 bp, Probe Sequence
tgggcgtggataccggttttgactc

SEQ ID NO: 278951 - DNA, 25 bp, Probe Sequence
tgggcgtggatagcggttttgactc

SEQ ID NO: 278952 - DNA, 25 bp, Probe Sequence
tgggcgtggatagcggttgactcaa

SEQ ID NO: 278953 - DNA, 25 bp, Probe Sequence
tgggcgtggatacggtttgactcac

SEQ ID NO: 278954 - DNA, 25 bp, Probe Sequence
tgggcgtggatacggtttgactcac

SEQ ID NO: 278955 - DNA, 25 bp, Probe Sequence
tgggcgtggatacggtttgactcac

SEQ ID NO: 278956 - DNA, 25 bp, Probe Sequence
tgggtaggtgacctgcttggatcta

SEQ ID NO: 278957 - DNA, 25 bp, Probe Sequence
tgggtgctgtagtctgtgttggtac

SEQ ID NO: 278958 - DNA, 25 bp, Probe Sequence
tgggtgcttcatttgtgttcagtct

SEQ ID NO: 278959 - DNA, 25 bp, Probe Sequence
tgggctgcctcatgactttaatcag

SEQ ID NO: 278960 - DNA, 25 bp, Probe Sequence
tgggctgcgacatggatttcgacat

SEQ ID NO: 278961 - DNA, 25 bp, Probe Sequence
tgggctgcagacaagaaagggactg

SEQ ID NO: 278962 - DNA, 25 bp, Probe Sequence
tgtggtcacctgaaacagaaacatg

SEQ ID NO: 278963 - DNA, 25 bp, Probe Sequence
tgctgcgtcctatgtaaagtacttg

SEQ ID NO: 278964 - DNA, 25 bp, Probe Sequence
tgggatactcaagatatttactcat

SEQ ID NO: 278965 - DNA, 25 bp, Probe Sequence
tgggagatgtaagtgatttaattca

SEQ ID NO: 278966 - DNA, 25 bp, Probe Sequence
tgggctagtccagtgtctatattta

SEQ ID NO: 278967 - DNA, 25 bp, Probe Sequence
tgggctagtccagtgtctatattta

SEQ ID NO: 278968 - DNA, 25 bp, Probe Sequence
tgggataaccacttcctatctgtat

SEQ ID NO: 278969 - DNA, 25 bp, Probe Sequence
tgggtagcaccatttctttcatgtt

SEQ ID NO: 278970 - DNA, 25 bp, Probe Sequence
tgggcgacagagcaagacttcgtgt

SEQ ID NO: 278971 - DNA, 25 bp, Probe Sequence
tgggtgacagagcaagaccccgtcc

SEQ ID NO: 278972 - DNA, 25 bp, Probe Sequence
tgggtgacagagcaagactcccgtc

SEQ ID NO: 278973 - DNA, 25 bp, Probe Sequence
tgggtgacagagcgagattcgtctc

SEQ ID NO: 278974 - DNA, 25 bp, Probe Sequence
tgggtgacagagtgagatctgcctc

SEQ ID NO: 278975 - DNA, 25 bp, Probe Sequence
tgggtgactttgcagatctgctcac

SEQ ID NO: 278976 - DNA, 25 bp, Probe Sequence
tgggtgcacagtagctgcaactccc

SEQ ID NO: 278977 - DNA, 25 bp, Probe Sequence
tgggtgcctgtggaaagctcctggc

SEQ ID NO: 278978 - DNA, 25 bp, Probe Sequence
tgggtgctgctgatgtaatacctgg

SEQ ID NO: 278979 - DNA, 25 bp, Probe Sequence
tgggcctctagtgacagatccagag

SEQ ID NO: 278980 - DNA, 25 bp, Probe Sequence
tgggcccaagtttgatgtttatgag

SEQ ID NO: 278981 - DNA, 25 bp, Probe Sequence
tgggactcaattcaggctatgtatg

SEQ ID NO: 278982 - DNA, 25 bp, Probe Sequence
tgggtcagatttcagagttcaggag

SEQ ID NO: 278983 - DNA, 25 bp, Probe Sequence
tgggtcgactcttcatgtgggagga

SEQ ID NO: 278984 - DNA, 25 bp, Probe Sequence
tgggtctattcttcattagctcagt

SEQ ID NO: 278985 - DNA, 25 bp, Probe Sequence
tgggatgtattgtttccactcgtgt

SEQ ID NO: 278986 - DNA, 25 bp, Probe Sequence
tgtaggtttggtaggcctcactgct

SEQ ID NO: 278987 - DNA, 25 bp, Probe Sequence
tgtggaggtggagtatggcccctgt

SEQ ID NO: 278988 - DNA, 25 bp, Probe Sequence
tgggaggagggcaaggcccagccga

SEQ ID NO: 278989 - DNA, 25 bp, Probe Sequence
tgggagtgagttcattgaccagtca

SEQ ID NO: 278990 - DNA, 25 bp, Probe Sequence
tgggaggtgtgtggaataaattatt

SEQ ID NO: 278991 - DNA, 25 bp, Probe Sequence
tgggagaattgttgcaaagtagtga

SEQ ID NO: 278992 - DNA, 25 bp, Probe Sequence
tgggaaacgtcccttgtcaggagac

SEQ ID NO: 278993 - DNA, 25 bp, Probe Sequence
tgggaagagttcgctgtgccagtgg

SEQ ID NO: 278994 - DNA, 25 bp, Probe Sequence
tgggaaagctaaggtgggcagattg

SEQ ID NO: 278995 - DNA, 25 bp, Probe Sequence
tgggaacctaagcgtgggtggccaa

SEQ ID NO: 278996 - DNA, 25 bp, Probe Sequence
tgggcagaacataccgggtggtccc

SEQ ID NO: 278997 - DNA, 25 bp, Probe Sequence
tgggtcacacaaacttggtggtcct

SEQ ID NO: 278998 - DNA, 25 bp, Probe Sequence
tgtgattccacacatcttcttggtc

SEQ ID NO: 278999 - DNA, 25 bp, Probe Sequence
tgtcctccaagttacttttttcgat

SEQ ID NO: 279000 - DNA, 25 bp, Probe Sequence
tgtccctcctgatgtattttttttc

SEQ ID NO: 279001 - DNA, 25 bp, Probe Sequence
tgtggccctgggatatggttttttc

SEQ ID NO: 279002 - DNA, 25 bp, Probe Sequence
tgtgttgtagggttgcaggtttttt

SEQ ID NO: 279003 - DNA, 25 bp, Probe Sequence
tgtgggtgggaggtagtgccttctt

SEQ ID NO: 279004 - DNA, 25 bp, Probe Sequence
tgtggggaggttacagaggctgact

SEQ ID NO: 279005 - DNA, 25 bp, Probe Sequence
tgtggggagcagctacagtatggat

SEQ ID NO: 279006 - DNA, 25 bp, Probe Sequence
tgggagaagggatatgttgtgagca

SEQ ID NO: 279007 - DNA, 25 bp, Probe Sequence
tgggacacagagacagtacctgtaa

SEQ ID NO: 279008 - DNA, 25 bp, Probe Sequence
tgtggagagcgacagtaggctgcat

SEQ ID NO: 279009 - DNA, 25 bp, Probe Sequence
tgggagatgcgtagggggtcataag

SEQ ID NO: 279010 - DNA, 25 bp, Probe Sequence
tgggagtgctgattgctcgggtcaa

SEQ ID NO: 279011 - DNA, 25 bp, Probe Sequence
tgggtgccttgactcagatggtgca

SEQ ID NO: 279012 - DNA, 25 bp, Probe Sequence
tgggctgttgtgtctggagcctgca

SEQ ID NO: 279013 - DNA, 25 bp, Probe Sequence
tgtggctgacatggactgctggcct

SEQ ID NO: 279014 - DNA, 25 bp, Probe Sequence
tgggcatagcattagctgcttcctc

SEQ ID NO: 279015 - DNA, 25 bp, Probe Sequence
tgggcatagcattagctgcttcctc

SEQ ID NO: 279016 - DNA, 25 bp, Probe Sequence
tgggaagcatatgtcattccccata

SEQ ID NO: 279017 - DNA, 25 bp, Probe Sequence
tgggatactcacacattcccacatt

SEQ ID NO: 279018 - DNA, 25 bp, Probe Sequence
tgaggatttctcaacccttactttc

SEQ ID NO: 279019 - DNA, 25 bp, Probe Sequence
tgggacatgttaaactttgatttgt

SEQ ID NO: 279020 - DNA, 25 bp, Probe Sequence
tgaggccatcgtgaagtttgttttg

SEQ ID NO: 279021 - DNA, 25 bp, Probe Sequence
tgggaactctactagatgtggtttt

SEQ ID NO: 279022 - DNA, 25 bp, Probe Sequence
tgggatatttaaggattgtgtgttc

SEQ ID NO: 279023 - DNA, 25 bp, Probe Sequence
tgggtaattataggcttgttttctt

SEQ ID NO: 279024 - DNA, 25 bp, Probe Sequence
tgggtttagaccttatgctttttgt

SEQ ID NO: 279025 - DNA, 25 bp, Probe Sequence
tgggttaggggctttgctgtaagtt

SEQ ID NO: 279026 - DNA, 25 bp, Probe Sequence
tgggctttggggtcattattaagta

SEQ ID NO: 279027 - DNA, 25 bp, Probe Sequence
tctgtgtattggtggctaacttagt

SEQ ID NO: 279028 - DNA, 25 bp, Probe Sequence
tcttacttggtggccatgtacttgg

SEQ ID NO: 279029 - DNA, 25 bp, Probe Sequence
tgataacttcgaagccatagggtgg

SEQ ID NO: 279030 - DNA, 25 bp, Probe Sequence
tgtctacctgctaagtcaagggttc

SEQ ID NO: 279031 - DNA, 25 bp, Probe Sequence
tgttacctggaaactaagtggatta

SEQ ID NO: 279032 - DNA, 25 bp, Probe Sequence
ttggcaccgtcgatctacgggatct

SEQ ID NO: 279033 - DNA, 25 bp, Probe Sequence
tgggcacccattctgtacagggagt

SEQ ID NO: 279034 - DNA, 25 bp, Probe Sequence
tgggcatccaccccagaaagtggga

SEQ ID NO: 279035 - DNA, 25 bp, Probe Sequence
tgggagccctcacaggcaagggggc

SEQ ID NO: 279036 - DNA, 25 bp, Probe Sequence
tgggaggattgcttgaggccaggag

SEQ ID NO: 279037 - DNA, 25 bp, Probe Sequence
tgggagaatagcttgaacctgggaa

SEQ ID NO: 279038 - DNA, 25 bp, Probe Sequence
tgggcagagaacttggacttccaga

SEQ ID NO: 279039 - DNA, 25 bp, Probe Sequence
tgggaagaatgcgtggactctgcct

SEQ ID NO: 279040 - DNA, 25 bp, Probe Sequence
tgggatccaatttgtagcttcctgc

SEQ ID NO: 279041 - DNA, 25 bp, Probe Sequence
tgggatacgctatgaactctcaccg

SEQ ID NO: 279042 - DNA, 25 bp, Probe Sequence
tgggaaagctcataaccctcatctc

SEQ ID NO: 279043 - DNA, 25 bp, Probe Sequence
tgggagaggctgattaccttcacct

SEQ ID NO: 279044 - DNA, 25 bp, Probe Sequence
tgggaaagtgacatcagcgtccacc

SEQ ID NO: 279045 - DNA, 25 bp, Probe Sequence
tgtgtatcaaggacgacgttccccc

SEQ ID NO: 279046 - DNA, 25 bp, Probe Sequence
tgtgtaataggcagatcgacttctc

SEQ ID NO: 279047 - DNA, 25 bp, Probe Sequence
tgtgtacaattctgaagacactcat

SEQ ID NO: 279048 - DNA, 25 bp, Probe Sequence
tgggacataacatccagaagtcatt

SEQ ID NO: 279049 - DNA, 25 bp, Probe Sequence
tgggaaacaaacgatatatctcatg

SEQ ID NO: 279050 - DNA, 25 bp, Probe Sequence
tgggagcacaatgcccacatcatct

SEQ ID NO: 279051 - DNA, 25 bp, Probe Sequence
tgggagacgcaggcacaactcttta

SEQ ID NO: 279052 - DNA, 25 bp, Probe Sequence
tgggagtctgctacaccatttttga

SEQ ID NO: 279053 - DNA, 25 bp, Probe Sequence
tgggaggcttgagccattattgcta

SEQ ID NO: 279054 - DNA, 25 bp, Probe Sequence
tgggaggcttatctcactgagtgag

SEQ ID NO: 279055 - DNA, 25 bp, Probe Sequence
tgggagtttctgcctgcaatcaaag

SEQ ID NO: 279056 - DNA, 25 bp, Probe Sequence
tgggagctaatcattgcatgtgcat

SEQ ID NO: 279057 - DNA, 25 bp, Probe Sequence
tgggacctgatgacttcattgtggc

SEQ ID NO: 279058 - DNA, 25 bp, Probe Sequence
tgggaggtagtgccttcttggcatt

SEQ ID NO: 279059 - DNA, 25 bp, Probe Sequence
tgtggggtattgttgtttctgctat

SEQ ID NO: 279060 - DNA, 25 bp, Probe Sequence
tgggcagaatgaagtatgtttgttt

SEQ ID NO: 279061 - DNA, 25 bp, Probe Sequence
tgggaaatgactccatttctattgt

SEQ ID NO: 279062 - DNA, 25 bp, Probe Sequence
tgggacttactaggtttgaatgcgg

SEQ ID NO: 279063 - DNA, 25 bp, Probe Sequence
tgggactcgactggtgtttgatcac

SEQ ID NO: 279064 - DNA, 25 bp, Probe Sequence
tgggatcttgttggatgcacttaga

SEQ ID NO: 279065 - DNA, 25 bp, Probe Sequence
tgggaatgtgggaacagtgacagca

SEQ ID NO: 279066 - DNA, 25 bp, Probe Sequence
tgggatacatggatctggcctcaag

SEQ ID NO: 279067 - DNA, 25 bp, Probe Sequence
tgtgtgtcctggaactagagcccat

SEQ ID NO: 279068 - DNA, 25 bp, Probe Sequence
tgtttacccatagtagggccattta

SEQ ID NO: 279069 - DNA, 25 bp, Probe Sequence
tgttcccccaggaagggcctggtgg

SEQ ID NO: 279070 - DNA, 25 bp, Probe Sequence
tgttcccccaggaagggcctggtgg

SEQ ID NO: 279071 - DNA, 25 bp, Probe Sequence
tttcccccccaagcacagaggggag

SEQ ID NO: 279072 - DNA, 25 bp, Probe Sequence
tttcccgtcccctgagagggatgag

SEQ ID NO: 279073 - DNA, 25 bp, Probe Sequence
tgtgtctccccctctaagaggagga

SEQ ID NO: 279074 - DNA, 25 bp, Probe Sequence
tgtgttggtagcctccaaggagctg

SEQ ID NO: 279075 - DNA, 25 bp, Probe Sequence
tgtctggtgcccaatcccaggaagt

SEQ ID NO: 279076 - DNA, 25 bp, Probe Sequence
tgtcttggaaccaccagtctagtcc

SEQ ID NO: 279077 - DNA, 25 bp, Probe Sequence
tgtttgaggaccatacaggctgtat

SEQ ID NO: 279078 - DNA, 25 bp, Probe Sequence
tgtagaggggccaataaacatgaaa

SEQ ID NO: 279079 - DNA, 25 bp, Probe Sequence
tgtaagtgctcgccagaaacccaga

SEQ ID NO: 279080 - DNA, 25 bp, Probe Sequence
tgggagtgtagccacagaacccacc

SEQ ID NO: 279081 - DNA, 25 bp, Probe Sequence
tgggagagtagcaaggaccccgctg

SEQ ID NO: 279082 - DNA, 25 bp, Probe Sequence
tgggatctgacaagaggaccccgct

SEQ ID NO: 279083 - DNA, 25 bp, Probe Sequence
tgggcagctgaccaaggagctaccc

SEQ ID NO: 279084 - DNA, 25 bp, Probe Sequence
tgggatgctcaccaaagatccacca

SEQ ID NO: 279085 - DNA, 25 bp, Probe Sequence
tgggatgtattatctgcacagaccc

SEQ ID NO: 279086 - DNA, 25 bp, Probe Sequence
tgggatgctggtcagctgacagcca

SEQ ID NO: 279087 - DNA, 25 bp, Probe Sequence
tgggcagtgcgtgggagcacagccg

SEQ ID NO: 279088 - DNA, 25 bp, Probe Sequence
tgggaagcgtgtagaccacggccat

SEQ ID NO: 279089 - DNA, 25 bp, Probe Sequence
tgggaggtgctgtggacagggctcc

SEQ ID NO: 279090 - DNA, 25 bp, Probe Sequence
tgggccctgtgtgggacagggtacg

SEQ ID NO: 279091 - DNA, 25 bp, Probe Sequence
tgggcactggtttggccaagtgtac

SEQ ID NO: 279092 - DNA, 25 bp, Probe Sequence
tgggccatagtttgttaatctcaac

SEQ ID NO: 279093 - DNA, 25 bp, Probe Sequence
tgggaaagttagctcttcccagacc

SEQ ID NO: 279094 - DNA, 25 bp, Probe Sequence
tgggaaagctggtttgttcctgacc

SEQ ID NO: 279095 - DNA, 25 bp, Probe Sequence
tgggaactgctttgcatttctccta

SEQ ID NO: 279096 - DNA, 25 bp, Probe Sequence
tgggcaacttcttctgcattaggaa

SEQ ID NO: 279097 - DNA, 25 bp, Probe Sequence
tgggaccttctaatctctcatgaat

SEQ ID NO: 279098 - DNA, 25 bp, Probe Sequence
tgggacctcatttgcaatcttataa

SEQ ID NO: 279099 - DNA, 25 bp, Probe Sequence
tgggcaccacatttcttatattaaa

SEQ ID NO: 279100 - DNA, 25 bp, Probe Sequence
tgggccaacactttctcataaaaat

SEQ ID NO: 279101 - DNA, 25 bp, Probe Sequence
tgtggaagaacctttaatcagagaa

SEQ ID NO: 279102 - DNA, 25 bp, Probe Sequence
tgggagtacccatggttaggatata

SEQ ID NO: 279103 - DNA, 25 bp, Probe Sequence
tgtggaggaccctgagtatgccgtc

SEQ ID NO: 279104 - DNA, 25 bp, Probe Sequence
tgatggaaaccttaaggtgatcttc

SEQ ID NO: 279105 - DNA, 25 bp, Probe Sequence
tgggaagatgccttacgtctgatct

SEQ ID NO: 279106 - DNA, 25 bp, Probe Sequence
tgggaagctgccgtagcttcagcca

SEQ ID NO: 279107 - DNA, 25 bp, Probe Sequence
tgggcaaagcacggatcctgcacaa

SEQ ID NO: 279108 - DNA, 25 bp, Probe Sequence
tgggcaagaacgccatgacgcgcaa

SEQ ID NO: 279109 - DNA, 25 bp, Probe Sequence
tgggaaggacagccgctggctgcca

SEQ ID NO: 279110 - DNA, 25 bp, Probe Sequence
tgggaatgatcctcagtgtgctcac

SEQ ID NO: 279111 - DNA, 25 bp, Probe Sequence
tgggagacatgccactagctgagct

SEQ ID NO: 279112 - DNA, 25 bp, Probe Sequence
tgggagatcattcccagtgacccct

SEQ ID NO: 279113 - DNA, 25 bp, Probe Sequence
tgtgggccatttaattcagggcccc

SEQ ID NO: 279114 - DNA, 25 bp, Probe Sequence
tgtgggccttgcaaactgcagtcag

SEQ ID NO: 279115 - DNA, 25 bp, Probe Sequence
tgggcactttcttatcgagatagtc

SEQ ID NO: 279116 - DNA, 25 bp, Probe Sequence
tgggcagtcctgtttcagaagattc

SEQ ID NO: 279117 - DNA, 25 bp, Probe Sequence
tgtgggacctgggccatagtcattc

SEQ ID NO: 279118 - DNA, 25 bp, Probe Sequence
tgtgggacctgggccatagtcattc

SEQ ID NO: 279119 - DNA, 25 bp, Probe Sequence
tgggagagacttgggtcagacttag

SEQ ID NO: 279120 - DNA, 25 bp, Probe Sequence
tgggatggcactgggcattcagaaa

SEQ ID NO: 279121 - DNA, 25 bp, Probe Sequence
tgggaggccgaggcaggcagatcac

SEQ ID NO: 279122 - DNA, 25 bp, Probe Sequence
tgggaggccgaggcaggcagatcac

SEQ ID NO: 279123 - DNA, 25 bp, Probe Sequence
tgggaagccgaggccggtagatcac

SEQ ID NO: 279124 - DNA, 25 bp, Probe Sequence
tgggaagccaaggtgagaagttcac

SEQ ID NO: 279125 - DNA, 25 bp, Probe Sequence
tgggagtccaaggtgggcggatcac

SEQ ID NO: 279126 - DNA, 25 bp, Probe Sequence
tgggaggccaaggcgggtggatcac

SEQ ID NO: 279127 - DNA, 25 bp, Probe Sequence
tgggaggccaagacgggcggatcac

SEQ ID NO: 279128 - DNA, 25 bp, Probe Sequence
tgggaggccaaggcgggcagatcac

SEQ ID NO: 279129 - DNA, 25 bp, Probe Sequence
tgggaggccaaggcaggcggatcac

SEQ ID NO: 279130 - DNA, 25 bp, Probe Sequence
tgggaggccgaggtgagcggatcac

SEQ ID NO: 279131 - DNA, 25 bp, Probe Sequence
tgggaggccgaggtgagcggatcac

SEQ ID NO: 279132 - DNA, 25 bp, Probe Sequence
tgggaggcggagcttgcagtgagcc

SEQ ID NO: 279133 - DNA, 25 bp, Probe Sequence
tgggagggggcacgaagagcactgg

SEQ ID NO: 279134 - DNA, 25 bp, Probe Sequence
tgggagcaagggcgagtggccggtc

SEQ ID NO: 279135 - DNA, 25 bp, Probe Sequence
tgggaaaggccaagctgctgggtgg

SEQ ID NO: 279136 - DNA, 25 bp, Probe Sequence
tgggagaagagccacgagcatgcgg

SEQ ID NO: 279137 - DNA, 25 bp, Probe Sequence
tgggaggtgcatggcatcggcagcc

SEQ ID NO: 279138 - DNA, 25 bp, Probe Sequence
tgggcagagtgcggcagctcatgcc

SEQ ID NO: 279139 - DNA, 25 bp, Probe Sequence
tgggagcagtgcttcctctgctccc

SEQ ID NO: 279140 - DNA, 25 bp, Probe Sequence
tgggatgacatcttcacctgatgcc

SEQ ID NO: 279141 - DNA, 25 bp, Probe Sequence
tgggatgttctggcagctgtgtcat

SEQ ID NO: 279142 - DNA, 25 bp, Probe Sequence
tgggctctgtcaacagcttgctgaa

SEQ ID NO: 279143 - DNA, 25 bp, Probe Sequence
tgggctctatcttcactgtgatacc

SEQ ID NO: 279144 - DNA, 25 bp, Probe Sequence
tgggcatcgagatcatcgggaccct

SEQ ID NO: 279145 - DNA, 25 bp, Probe Sequence
tgggccgccaggtgaatgagcccca

SEQ ID NO: 279146 - DNA, 25 bp, Probe Sequence
tgggccgccaggtgaatgagcccca

SEQ ID NO: 279147 - DNA, 25 bp, Probe Sequence
tgggacccatggtcgcatggagccc

SEQ ID NO: 279148 - DNA, 25 bp, Probe Sequence
tgggcccctggaactggagggagtg

SEQ ID NO: 279149 - DNA, 25 bp, Probe Sequence
tgtggtctccagcaagggattcggg

SEQ ID NO: 279150 - DNA, 25 bp, Probe Sequence
tgtggtcccactaatctgtgactgc

SEQ ID NO: 279151 - DNA, 25 bp, Probe Sequence
tgggctttcactatattgccatgct

SEQ ID NO: 279152 - DNA, 25 bp, Probe Sequence
tgggctttgcacaggtctggtgctc

SEQ ID NO: 279153 - DNA, 25 bp, Probe Sequence
tgggcggatcacaaggtcaggagat

SEQ ID NO: 279154 - DNA, 25 bp, Probe Sequence
tgggcagaatctggaggtgcagctg

SEQ ID NO: 279155 - DNA, 25 bp, Probe Sequence
tgggagccatcatatgtcacagtgt

SEQ ID NO: 279156 - DNA, 25 bp, Probe Sequence
tgtggatcctcataggcagtgtcct

SEQ ID NO: 279157 - DNA, 25 bp, Probe Sequence
tgggcatccttggaggcagctgcca

SEQ ID NO: 279158 - DNA, 25 bp, Probe Sequence
tgggcatcacgtaagcagcacacta

SEQ ID NO: 279159 - DNA, 25 bp, Probe Sequence
tgtggtccgtaggagccactatgag

SEQ ID NO: 279160 - DNA, 25 bp, Probe Sequence
tgggcctctctatgggcagtatgat

SEQ ID NO: 279161 - DNA, 25 bp, Probe Sequence
tgggccatcttcaagggactcatca

SEQ ID NO: 279162 - DNA, 25 bp, Probe Sequence
tgggccatcctcacatgtgacaaag

SEQ ID NO: 279163 - DNA, 25 bp, Probe Sequence
tgggccattcttgcttagacagtca

SEQ ID NO: 279164 - DNA, 25 bp, Probe Sequence
tgggcctgtcctgtgaagtgagggc

SEQ ID NO: 279165 - DNA, 25 bp, Probe Sequence
tgggcatgctgtggttgctgaggga

SEQ ID NO: 279166 - DNA, 25 bp, Probe Sequence
tgggagcagtccatgcatgacagcc

SEQ ID NO: 279167 - DNA, 25 bp, Probe Sequence
tgggcactgggcatcaatcagcctt

SEQ ID NO: 279168 - DNA, 25 bp, Probe Sequence
tgggcaacgagcaaaactccatctc

SEQ ID NO: 279169 - DNA, 25 bp, Probe Sequence
tgtgatgaacccaaagcccacacca

SEQ ID NO: 279170 - DNA, 25 bp, Probe Sequence
tgtggatgaccacatgcacctcatc

SEQ ID NO: 279171 - DNA, 25 bp, Probe Sequence
tgggagagaccattgcatcgctgtc

SEQ ID NO: 279172 - DNA, 25 bp, Probe Sequence
tgggagagactagtgcacctcagca

SEQ ID NO: 279173 - DNA, 25 bp, Probe Sequence
tgggaggcaataggccaccatgcct

SEQ ID NO: 279174 - DNA, 25 bp, Probe Sequence
tgggaagccataagcccttgattct

SEQ ID NO: 279175 - DNA, 25 bp, Probe Sequence
tgggcagagttcatcttcttgacct

SEQ ID NO: 279176 - DNA, 25 bp, Probe Sequence
tgggagatgttcagccttagtccct

SEQ ID NO: 279177 - DNA, 25 bp, Probe Sequence
tgtgggatgttcagcactgtccctt

SEQ ID NO: 279178 - DNA, 25 bp, Probe Sequence
tgggagtgttgagcatctgtccccc

SEQ ID NO: 279179 - DNA, 25 bp, Probe Sequence
tgggccttgtcgatctgttcagccc

SEQ ID NO: 279180 - DNA, 25 bp, Probe Sequence
tgggcattctgtgcctgtggtgacc

SEQ ID NO: 279181 - DNA, 25 bp, Probe Sequence
tgggcttattcccttggagatccgc

SEQ ID NO: 279182 - DNA, 25 bp, Probe Sequence
tgggcagttacctgggcaagcccgg

SEQ ID NO: 279183 - DNA, 25 bp, Probe Sequence
tgggcagttacctgggcaagcccgg

SEQ ID NO: 279184 - DNA, 25 bp, Probe Sequence
tgggcagttacctgggcaagcccgg

SEQ ID NO: 279185 - DNA, 25 bp, Probe Sequence
tgggcgatctcatcaaggtgacgcc

SEQ ID NO: 279186 - DNA, 25 bp, Probe Sequence
tgggcaggctcttcaagtgtggccc

SEQ ID NO: 279187 - DNA, 25 bp, Probe Sequence
tgggcagggccgaaggatgcccacg

SEQ ID NO: 279188 - DNA, 25 bp, Probe Sequence
tgggctgggccagtggggccaatgc

SEQ ID NO: 279189 - DNA, 25 bp, Probe Sequence
tgggctggggttgggggcacagcag

SEQ ID NO: 279190 - DNA, 25 bp, Probe Sequence
tgggagcagcggtttggggagcaga

SEQ ID NO: 279191 - DNA, 25 bp, Probe Sequence
tgggagcgtgggaggcgggagtgga

SEQ ID NO: 279192 - DNA, 25 bp, Probe Sequence
tgggagcgtgggaggcgggagtgga

SEQ ID NO: 279193 - DNA, 25 bp, Probe Sequence
tgggagtgggaggatgcgcaggggt

SEQ ID NO: 279194 - DNA, 25 bp, Probe Sequence
tgggcaggtggtgacgatctgggct

SEQ ID NO: 279195 - DNA, 25 bp, Probe Sequence
tgggcaggtggtgacgatctgggct

SEQ ID NO: 279196 - DNA, 25 bp, Probe Sequence
tgggcaggtggtggcactgagcccc

SEQ ID NO: 279197 - DNA, 25 bp, Probe Sequence
tgggagatgtggccacactgacttc

SEQ ID NO: 279198 - DNA, 25 bp, Probe Sequence
tgtggagtgtgggcagcgtggttca

SEQ ID NO: 279199 - DNA, 25 bp, Probe Sequence
tgtgcttgtgggggttgggtagtgt

SEQ ID NO: 279200 - DNA, 25 bp, Probe Sequence
tgtgttgttgttttagtggggttgg

SEQ ID NO: 279201 - DNA, 25 bp, Probe Sequence
tgggagttttttggtgtgtctgttt

SEQ ID NO: 279202 - DNA, 25 bp, Probe Sequence
tgggagtcatggctctggtgtttgc

SEQ ID NO: 279203 - DNA, 25 bp, Probe Sequence
tgggcactgaggcttggcttgaagc

SEQ ID NO: 279204 - DNA, 25 bp, Probe Sequence
tgggagagatcccctggcttgcaga

SEQ ID NO: 279205 - DNA, 25 bp, Probe Sequence
tgtggagtacgctttggactgagaa

SEQ ID NO: 279206 - DNA, 25 bp, Probe Sequence
tgtgtggtaatgagggatcctgcaa

SEQ ID NO: 279207 - DNA, 25 bp, Probe Sequence
tgtgtgttcgacagtgaatattcaa

SEQ ID NO: 279208 - DNA, 25 bp, Probe Sequence
tgtggttggcaagatattactgaaa

SEQ ID NO: 279209 - DNA, 25 bp, Probe Sequence
tgggcattacggatatctttgatga

SEQ ID NO: 279210 - DNA, 25 bp, Probe Sequence
tgtacattttggctagtttttcccg

SEQ ID NO: 279211 - DNA, 25 bp, Probe Sequence
tgtgaactctttctttggtattcca

SEQ ID NO: 279212 - DNA, 25 bp, Probe Sequence
tgtgacgttggtcttcttttactca

SEQ ID NO: 279213 - DNA, 25 bp, Probe Sequence
tgtgacgtacagttcttttacccaa

SEQ ID NO: 279214 - DNA, 25 bp, Probe Sequence
tgtgacccacagaacattgtaaatg

SEQ ID NO: 279215 - DNA, 25 bp, Probe Sequence
tgctgaccaaatgcctggtaccaga

SEQ ID NO: 279216 - DNA, 25 bp, Probe Sequence
tgtgattacacacacgagccaccac

SEQ ID NO: 279217 - DNA, 25 bp, Probe Sequence
tgctattggccatcactaccaacca

SEQ ID NO: 279218 - DNA, 25 bp, Probe Sequence
tgtcatgtaccatcaataaagtacc

SEQ ID NO: 279219 - DNA, 25 bp, Probe Sequence
tgtggtgacagatccgaaagccccc

SEQ ID NO: 279220 - DNA, 25 bp, Probe Sequence
tgtttggaaacctacaaggcctcac

SEQ ID NO: 279221 - DNA, 25 bp, Probe Sequence
tgtgctcggaaatcccaaagctccc

SEQ ID NO: 279222 - DNA, 25 bp, Probe Sequence
tgtgacggtccctgtagaagtctcc

SEQ ID NO: 279223 - DNA, 25 bp, Probe Sequence
tgtacgtcccagcaaaagagctctg

SEQ ID NO: 279224 - DNA, 25 bp, Probe Sequence
tgtcacctttaccaaagatatccat

SEQ ID NO: 279225 - DNA, 25 bp, Probe Sequence
tgtgcccttttaaacgatgtggtaa

SEQ ID NO: 279226 - DNA, 25 bp, Probe Sequence
tgggcctatttgtaatgccagtgtg

SEQ ID NO: 279227 - DNA, 25 bp, Probe Sequence
tgggcctatttgtaatgccagtgtg

SEQ ID NO: 279228 - DNA, 25 bp, Probe Sequence
tgggcttatttttaacactgctgaa

SEQ ID NO: 279229 - DNA, 25 bp, Probe Sequence
tgggctgttactgctaaatctcagt

SEQ ID NO: 279230 - DNA, 25 bp, Probe Sequence
tgggctttggcagcagacacatctg

SEQ ID NO: 279231 - DNA, 25 bp, Probe Sequence
tgtggaattgccacagcagccagct

SEQ ID NO: 279232 - DNA, 25 bp, Probe Sequence
tgtggaattgccacagcagccagct

SEQ ID NO: 279233 - DNA, 25 bp, Probe Sequence
tgtggaattgccacagcagccagct

SEQ ID NO: 279234 - DNA, 25 bp, Probe Sequence
tgtggacctgccgcagagtctgaaa

SEQ ID NO: 279235 - DNA, 25 bp, Probe Sequence
tgtgggtctggtgaagctgagaaac

SEQ ID NO: 279236 - DNA, 25 bp, Probe Sequence
tgtgtgcgagggtctaagtagggtc

SEQ ID NO: 279237 - DNA, 25 bp, Probe Sequence
tgtgtgcgagggtctaagtagggtc

SEQ ID NO: 279238 - DNA, 25 bp, Probe Sequence
tgtgtacaggcgtctacaatcccag

SEQ ID NO: 279239 - DNA, 25 bp, Probe Sequence
tgggacacaggacttatctcacaca

SEQ ID NO: 279240 - DNA, 25 bp, Probe Sequence
tgggcaacggacgaattaagcggcg

SEQ ID NO: 279241 - DNA, 25 bp, Probe Sequence
tgggcaacaaacgtagtgcaacccg

SEQ ID NO: 279242 - DNA, 25 bp, Probe Sequence
tgggcatcaatcagccttgtctacc

SEQ ID NO: 279243 - DNA, 25 bp, Probe Sequence
tgggcagttgcattacctgtctacc

SEQ ID NO: 279244 - DNA, 25 bp, Probe Sequence
tgggctggatgtaacttgtgtcttc

SEQ ID NO: 279245 - DNA, 25 bp, Probe Sequence
tgtggtagggtaatcttgtttgaaa

SEQ ID NO: 279246 - DNA, 25 bp, Probe Sequence
tgggaaggattcactctctttagcc

SEQ ID NO: 279247 - DNA, 25 bp, Probe Sequence
tgggcaaggtgttgtctgactttat

SEQ ID NO: 279248 - DNA, 25 bp, Probe Sequence
tgggcagtcttttgtgtcagtgtct

SEQ ID NO: 279249 - DNA, 25 bp, Probe Sequence
tgggctgtcaagacgtgtcatgtac

SEQ ID NO: 279250 - DNA, 25 bp, Probe Sequence
tgtggctcatcatacggactgtacc

SEQ ID NO: 279251 - DNA, 25 bp, Probe Sequence
tgtggccactggtcttgaaggccca

SEQ ID NO: 279252 - DNA, 25 bp, Probe Sequence
tgggcaccatgggcctgaaggccac

SEQ ID NO: 279253 - DNA, 25 bp, Probe Sequence
tgggcaccatgggcctgaaggccac

SEQ ID NO: 279254 - DNA, 25 bp, Probe Sequence
tgtggaccacctggtggcaggccaa

SEQ ID NO: 279255 - DNA, 25 bp, Probe Sequence
tgtggaccacctggtggcaggccaa

SEQ ID NO: 279256 - DNA, 25 bp, Probe Sequence
tgggcccagctttggggggccagtc

SEQ ID NO: 279257 - DNA, 25 bp, Probe Sequence
tgggccaggtcttgaaggctgtcca

SEQ ID NO: 279258 - DNA, 25 bp, Probe Sequence
tgggctagctgtactgacagcagtg

SEQ ID NO: 279259 - DNA, 25 bp, Probe Sequence
tgggctacactgagcaccaggtggt

SEQ ID NO: 279260 - DNA, 25 bp, Probe Sequence
tgggctacaaggacccagcctgaga

SEQ ID NO: 279261 - DNA, 25 bp, Probe Sequence
tgggctacatcagggtgcgattcta

SEQ ID NO: 279262 - DNA, 25 bp, Probe Sequence
tgggctccattctgtagcattgcca

SEQ ID NO: 279263 - DNA, 25 bp, Probe Sequence
tgggcaatttctatatcaggacagc

SEQ ID NO: 279264 - DNA, 25 bp, Probe Sequence
tgggaatggtctctgatctggatgc

SEQ ID NO: 279265 - DNA, 25 bp, Probe Sequence
tgggaatgtgtgccggaatatcagc

SEQ ID NO: 279266 - DNA, 25 bp, Probe Sequence
tgggactttggtcccagacagcggg

SEQ ID NO: 279267 - DNA, 25 bp, Probe Sequence
tgggaacttgggacgccagaggggc

SEQ ID NO: 279268 - DNA, 25 bp, Probe Sequence
tgggacagtttgctcctgggggagc

SEQ ID NO: 279269 - DNA, 25 bp, Probe Sequence
tgtgagtcgtttcccctatggggaa

SEQ ID NO: 279270 - DNA, 25 bp, Probe Sequence
tgtggggttagagcccagagcaaga

SEQ ID NO: 279271 - DNA, 25 bp, Probe Sequence
tgtggggcttagagacattgtgaaa

SEQ ID NO: 279272 - DNA, 25 bp, Probe Sequence
tgtgggcaataatatggcatttaag

SEQ ID NO: 279273 - DNA, 25 bp, Probe Sequence
tgggcgagatcatcaagcgcttcga

SEQ ID NO: 279274 - DNA, 25 bp, Probe Sequence
tgggcaggatcatgcctcagtgcag

SEQ ID NO: 279275 - DNA, 25 bp, Probe Sequence
tgggcagtgctgagagctcagtgga

SEQ ID NO: 279276 - DNA, 25 bp, Probe Sequence
tgggcgctgatgaaggagatcgagg

SEQ ID NO: 279277 - DNA, 25 bp, Probe Sequence
tgggactcagccttcagacagagag

SEQ ID NO: 279278 - DNA, 25 bp, Probe Sequence
tgggactgcggcttgcagatcctga

SEQ ID NO: 279279 - DNA, 25 bp, Probe Sequence
tgtggatatttctccatcctaaaaa

SEQ ID NO: 279280 - DNA, 25 bp, Probe Sequence
tgtgtagagttctcctttctcgaaa

SEQ ID NO: 279281 - DNA, 25 bp, Probe Sequence
tgtgtaagaggctgacttttccaaa

SEQ ID NO: 279282 - DNA, 25 bp, Probe Sequence
tgtaaggagctgagttcttaaagac

SEQ ID NO: 279283 - DNA, 25 bp, Probe Sequence
tgtaactgcctctgttttaggagta

SEQ ID NO: 279284 - DNA, 25 bp, Probe Sequence
tgtaactgcggccggtttagtgacc

SEQ ID NO: 279285 - DNA, 25 bp, Probe Sequence
tgtggtacggggctgttggagactc

SEQ ID NO: 279286 - DNA, 25 bp, Probe Sequence
tgtggggtggggctgttgatatttc

SEQ ID NO: 279287 - DNA, 25 bp, Probe Sequence
tgggaagggatgctttctctttgtc

SEQ ID NO: 279288 - DNA, 25 bp, Probe Sequence
tgggacagggctgttcatctacttc

SEQ ID NO: 279289 - DNA, 25 bp, Probe Sequence
tgggacgacaggttcatctctattt

SEQ ID NO: 279290 - DNA, 25 bp, Probe Sequence
tgggaagcacatagatacatcttac

SEQ ID NO: 279291 - DNA, 25 bp, Probe Sequence
tgggcacaacttcagagcattcatc

SEQ ID NO: 279292 - DNA, 25 bp, Probe Sequence
tgggaagagcttccagcagtcccat

SEQ ID NO: 279293 - DNA, 25 bp, Probe Sequence
tgtggatgggttggtcagtccctcc

SEQ ID NO: 279294 - DNA, 25 bp, Probe Sequence
tgggaaggtgtcctgtgtcactccc

SEQ ID NO: 279295 - DNA, 25 bp, Probe Sequence
tgggactgtgttgctgtaccttagc

SEQ ID NO: 279296 - DNA, 25 bp, Probe Sequence
tgtggttgtgttgagtattgttttt

SEQ ID NO: 279297 - DNA, 25 bp, Probe Sequence
tgtggttgttgatcttttttttcct

SEQ ID NO: 279298 - DNA, 25 bp, Probe Sequence
tgtgtgtgtgttgtttttcgtgttt

SEQ ID NO: 279299 - DNA, 25 bp, Probe Sequence
tgtggatgtggtggtctgcaccctg

SEQ ID NO: 279300 - DNA, 25 bp, Probe Sequence
tgggctgtgccaagtgtgcccaggg

SEQ ID NO: 279301 - DNA, 25 bp, Probe Sequence
tgtggctgtgccaggagtacatgtg

SEQ ID NO: 279302 - DNA, 25 bp, Probe Sequence
tgtggtgtgcacatgtggccagagg

SEQ ID NO: 279303 - DNA, 25 bp, Probe Sequence
tgtgtcataaagctgtcctgggcca

SEQ ID NO: 279304 - DNA, 25 bp, Probe Sequence
tgtggaaaaggtctcaggctctcag

SEQ ID NO: 279305 - DNA, 25 bp, Probe Sequence
tgggcaaacaggcagttggccagag

SEQ ID NO: 279306 - DNA, 25 bp, Probe Sequence
tgtgacatctaagaagaatgggcag

SEQ ID NO: 279307 - DNA, 25 bp, Probe Sequence
tgtggcctgaaaacaccatgtgtgc

SEQ ID NO: 279308 - DNA, 25 bp, Probe Sequence
tgtggcctgaagagccagagctagc

SEQ ID NO: 279309 - DNA, 25 bp, Probe Sequence
tgggcttaacacccaggtgatgggt

SEQ ID NO: 279310 - DNA, 25 bp, Probe Sequence
tgggcatttgatgcgggaggtgggt

SEQ ID NO: 279311 - DNA, 25 bp, Probe Sequence
tgtgagcttcttattggcaggggag

SEQ ID NO: 279312 - DNA, 25 bp, Probe Sequence
tgggcattcttagctgcgggaggca

SEQ ID NO: 279313 - DNA, 25 bp, Probe Sequence
tgggctcttcccagagtggcagagc

SEQ ID NO: 279314 - DNA, 25 bp, Probe Sequence
tgggcttgctcaactggagtggtac

SEQ ID NO: 279315 - DNA, 25 bp, Probe Sequence
tgggctctctcattcttggagtgaa

SEQ ID NO: 279316 - DNA, 25 bp, Probe Sequence
tgggcttctatgtgctggacagtca

SEQ ID NO: 279317 - DNA, 25 bp, Probe Sequence
tgggcggccaggggatgacagtatg

SEQ ID NO: 279318 - DNA, 25 bp, Probe Sequence
tgggcggaaggaggtgtgcgtggct

SEQ ID NO: 279319 - DNA, 25 bp, Probe Sequence
tgggctgaaattccgagctgcggtt

SEQ ID NO: 279320 - DNA, 25 bp, Probe Sequence
tgtgttggaattatcatggcggctt

SEQ ID NO: 279321 - DNA, 25 bp, Probe Sequence
tgtattaaaattgctgtccgtcttc

SEQ ID NO: 279322 - DNA, 25 bp, Probe Sequence
tgtttgacgtttgagtgccggcttt

SEQ ID NO: 279323 - DNA, 25 bp, Probe Sequence
tgtgtggacctaattgactgcttgt

SEQ ID NO: 279324 - DNA, 25 bp, Probe Sequence
tgtgtgatgtcctctgatatttcct

SEQ ID NO: 279325 - DNA, 25 bp, Probe Sequence
tgtggagctcagccctgagctgtcc

SEQ ID NO: 279326 - DNA, 25 bp, Probe Sequence
tgtggagacaggcctgaagctggcc

SEQ ID NO: 279327 - DNA, 25 bp, Probe Sequence
ttggaacggcggccactggttttca

SEQ ID NO: 279328 - DNA, 25 bp, Probe Sequence
tgtggagaaggccgggtatgtttta

SEQ ID NO: 279329 - DNA, 25 bp, Probe Sequence
tgtatgaggagggggaaatttgtat

SEQ ID NO: 279330 - DNA, 25 bp, Probe Sequence
ttggcgggggggtaattcgtcacat

SEQ ID NO: 279331 - DNA, 25 bp, Probe Sequence
ttggcgggggggtaattcgtcacat

SEQ ID NO: 279332 - DNA, 25 bp, Probe Sequence
tgtccctggcgggtaaattaggaat

SEQ ID NO: 279333 - DNA, 25 bp, Probe Sequence
ttgctagggagggtaaagggagact

SEQ ID NO: 279334 - DNA, 25 bp, Probe Sequence
tgtgctggaggatgcttaaatggca

SEQ ID NO: 279335 - DNA, 25 bp, Probe Sequence
tgtgttgagtaacaaaatcctgtct

SEQ ID NO: 279336 - DNA, 25 bp, Probe Sequence
tgtgtaagtaaagcacctcctggta

SEQ ID NO: 279337 - DNA, 25 bp, Probe Sequence
tgtttaataactcaccttctctatc

SEQ ID NO: 279338 - DNA, 25 bp, Probe Sequence
tgtttaataactcaccttctctatc

SEQ ID NO: 279339 - DNA, 25 bp, Probe Sequence
tgagtagtataagccacctattttt

SEQ ID NO: 279340 - DNA, 25 bp, Probe Sequence
tgtggttatatagccctttatttaa

SEQ ID NO: 279341 - DNA, 25 bp, Probe Sequence
tgtggagttgacatccctattgact

SEQ ID NO: 279342 - DNA, 25 bp, Probe Sequence
tgtgcttattggccatttgtttgac

SEQ ID NO: 279343 - DNA, 25 bp, Probe Sequence
tgtgatatattctgatgtatgggtg

SEQ ID NO: 279344 - DNA, 25 bp, Probe Sequence
tgtgtgaacacacaggcatgcgtgt

SEQ ID NO: 279345 - DNA, 25 bp, Probe Sequence
tgtgtgtacgagggggcgtgcgtga

SEQ ID NO: 279346 - DNA, 25 bp, Probe Sequence
tgtgattacaggtagaggccttcta

SEQ ID NO: 279347 - DNA, 25 bp, Probe Sequence
tgtggtatcaggtaagcaggcattt

SEQ ID NO: 279348 - DNA, 25 bp, Probe Sequence
tgtgggtcaatatactggagttcag

SEQ ID NO: 279349 - DNA, 25 bp, Probe Sequence
tgggcttcttattaccggatatatt

SEQ ID NO: 279350 - DNA, 25 bp, Probe Sequence
tgtcaggtttccctcctggataatc

SEQ ID NO: 279351 - DNA, 25 bp, Probe Sequence
tgtgggtttctctgttgtagacatc

SEQ ID NO: 279352 - DNA, 25 bp, Probe Sequence
tgtggtgttttaagttgctgtggac

SEQ ID NO: 279353 - DNA, 25 bp, Probe Sequence
tgggctgttacttgctttgagttgg

SEQ ID NO: 279354 - DNA, 25 bp, Probe Sequence
tgtgggattacagctttgggatgac

SEQ ID NO: 279355 - DNA, 25 bp, Probe Sequence
tgtgggattgacggtggtgctgagg

SEQ ID NO: 279356 - DNA, 25 bp, Probe Sequence
tgtgggtcagatttcagagttcagg

SEQ ID NO: 279357 - DNA, 25 bp, Probe Sequence
tgtgggcatagcattagctgcttcc

SEQ ID NO: 279358 - DNA, 25 bp, Probe Sequence
tgtgggatatctcatcagccttgat

SEQ ID NO: 279359 - DNA, 25 bp, Probe Sequence
tgtcgtgtatccgaacctgttgtct

SEQ ID NO: 279360 - DNA, 25 bp, Probe Sequence
tgtgctttccctgaactgggacctt

SEQ ID NO: 279361 - DNA, 25 bp, Probe Sequence
tgtctttttacctacgcagtgaaat

SEQ ID NO: 279362 - DNA, 25 bp, Probe Sequence
tgtgtatggactcccaactgcttta

SEQ ID NO: 279363 - DNA, 25 bp, Probe Sequence
tgtgttgctgtaccttagctgtgtt

SEQ ID NO: 279364 - DNA, 25 bp, Probe Sequence
tgtgttttgcagttaccatctcatc

SEQ ID NO: 279365 - DNA, 25 bp, Probe Sequence
tgtggatgttgcttttgcacctacg

SEQ ID NO: 279366 - DNA, 25 bp, Probe Sequence
tgtggattgtgtcctatgcgctcat

SEQ ID NO: 279367 - DNA, 25 bp, Probe Sequence
tgggcatggagtcctgtggcatcca

SEQ ID NO: 279368 - DNA, 25 bp, Probe Sequence
tgtgtgcatgcacgggcgttgtgcc

SEQ ID NO: 279369 - DNA, 25 bp, Probe Sequence
tgtggcgagccgagatcgtgccatt

SEQ ID NO: 279370 - DNA, 25 bp, Probe Sequence
tgggcaatatggagtcagtcctgca

SEQ ID NO: 279371 - DNA, 25 bp, Probe Sequence
tgggaatagctgggctgagacctac

SEQ ID NO: 279372 - DNA, 25 bp, Probe Sequence
tgtgtgaaagcaacgtagcgccccg

SEQ ID NO: 279373 - DNA, 25 bp, Probe Sequence
tgtgtgggacagggtacgcccagcc

SEQ ID NO: 279374 - DNA, 25 bp, Probe Sequence
tgtgatggggtcaaggactgcccca

SEQ ID NO: 279375 - DNA, 25 bp, Probe Sequence
tgtgaggggcatccaggtctaggcc

SEQ ID NO: 279376 - DNA, 25 bp, Probe Sequence
tgggccagtgcggggtggaggccct

SEQ ID NO: 279377 - DNA, 25 bp, Probe Sequence
tgtggcagcatgtgtggggacggct

SEQ ID NO: 279378 - DNA, 25 bp, Probe Sequence
tgtgcccagggtgggtgtctggcac

SEQ ID NO: 279379 - DNA, 25 bp, Probe Sequence
tgtcccacctgggttcatgggcata

SEQ ID NO: 279380 - DNA, 25 bp, Probe Sequence
tgtggctcccagagctttgaccaga

SEQ ID NO: 279381 - DNA, 25 bp, Probe Sequence
tgggctggatagcgtttgactcacg

SEQ ID NO: 279382 - DNA, 25 bp, Probe Sequence
tgggcaggaaccgtgggatcgccag

SEQ ID NO: 279383 - DNA, 25 bp, Probe Sequence
tgggcgggtcagttgaggtcaggag

SEQ ID NO: 279384 - DNA, 25 bp, Probe Sequence
tgggctggtgtctttgaggtcagta

SEQ ID NO: 279385 - DNA, 25 bp, Probe Sequence
tgggctggcgcttgtttgatgacag

SEQ ID NO: 279386 - DNA, 25 bp, Probe Sequence
tgggctgcagcgagagattgaggag

SEQ ID NO: 279387 - DNA, 25 bp, Probe Sequence
tgggctgtgctgatagtgctgaggg

SEQ ID NO: 279388 - DNA, 25 bp, Probe Sequence
tgggctttggaatcatgagtggagt

SEQ ID NO: 279389 - DNA, 25 bp, Probe Sequence
tgggctcgtgggaaagaggaagggg

SEQ ID NO: 279390 - DNA, 25 bp, Probe Sequence
tgcgggcttcggaaagttccagggt

SEQ ID NO: 279391 - DNA, 25 bp, Probe Sequence
tgtgggtaccaggaagtcctaggat

SEQ ID NO: 279392 - DNA, 25 bp, Probe Sequence
tgaaggctacaagaagaccaaggaa

SEQ ID NO: 279393 - DNA, 25 bp, Probe Sequence
tgtaggttctcccaaaccaagtata

SEQ ID NO: 279394 - DNA, 25 bp, Probe Sequence
tgtgggttgctagaaacccacccgg

SEQ ID NO: 279395 - DNA, 25 bp, Probe Sequence
tgtggttttgcagacaaccctgtcc

SEQ ID NO: 279396 - DNA, 25 bp, Probe Sequence
tgtggtctccttggaaatccgtcta

SEQ ID NO: 279397 - DNA, 25 bp, Probe Sequence
tgtggtcctctttgatatctttgtc

SEQ ID NO: 279398 - DNA, 25 bp, Probe Sequence
tgtggcctttctgaatgttatctcc

SEQ ID NO: 279399 - DNA, 25 bp, Probe Sequence
tgggctcttttacctcatatatccc

SEQ ID NO: 279400 - DNA, 25 bp, Probe Sequence
tgtgacgcgttatgcctatgtactc

SEQ ID NO: 279401 - DNA, 25 bp, Probe Sequence
tgtacggtgcgagttctatataagc

SEQ ID NO: 279402 - DNA, 25 bp, Probe Sequence
tgtacagggtaactctacagaagtt

SEQ ID NO: 279403 - DNA, 25 bp, Probe Sequence
tgttagggattccttccaatagtta

SEQ ID NO: 279404 - DNA, 25 bp, Probe Sequence
tgtgtacgtgttattccaagccttt

SEQ ID NO: 279405 - DNA, 25 bp, Probe Sequence
tgtggacatcgtcttctccaaagtc

SEQ ID NO: 279406 - DNA, 25 bp, Probe Sequence
tgggctgcacgcatttcggaagaat

SEQ ID NO: 279407 - DNA, 25 bp, Probe Sequence
tgggctgccgcagcttcagaagtaa

SEQ ID NO: 279408 - DNA, 25 bp, Probe Sequence
tgggctcctgagactcacaaaccat

SEQ ID NO: 279409 - DNA, 25 bp, Probe Sequence
tgtggatctatctcatcaaacaaca

SEQ ID NO: 279410 - DNA, 25 bp, Probe Sequence
tgtgagaatagctgactgtcccaat

SEQ ID NO: 279411 - DNA, 25 bp, Probe Sequence
tgagaaaccggcagttcccaagcca

SEQ ID NO: 279412 - DNA, 25 bp, Probe Sequence
tgtgaaactcggctgtattaatcac

SEQ ID NO: 279413 - DNA, 25 bp, Probe Sequence
tgtaagactccgtttaatttccaga

SEQ ID NO: 279414 - DNA, 25 bp, Probe Sequence
tgtccagactaccctcaagtttaca

SEQ ID NO: 279415 - DNA, 25 bp, Probe Sequence
tgtccaggatggccctgacaagtat

SEQ ID NO: 279416 - DNA, 25 bp, Probe Sequence
tgtgctcagtgagggccgatgaaga

SEQ ID NO: 279417 - DNA, 25 bp, Probe Sequence
tgtgctcagtgaggaggcagtaaat

SEQ ID NO: 279418 - DNA, 25 bp, Probe Sequence
tgtacagttggggagtacattcttc

SEQ ID NO: 279419 - DNA, 25 bp, Probe Sequence
tgtgaagttgggagtgaggacattc

SEQ ID NO: 279420 - DNA, 25 bp, Probe Sequence
tgtgaaatagtggttgtggaacagt

SEQ ID NO: 279421 - DNA, 25 bp, Probe Sequence
tgtgaacaggtactttgggaaatga

SEQ ID NO: 279422 - DNA, 25 bp, Probe Sequence
tgtgtaccgtgacatgctaggcgaa

SEQ ID NO: 279423 - DNA, 25 bp, Probe Sequence
tgtgaaccttggcattgagcctccc

SEQ ID NO: 279424 - DNA, 25 bp, Probe Sequence
tgtggactcaagtccttacctcttc

SEQ ID NO: 279425 - DNA, 25 bp, Probe Sequence
tgtggccacaactgctgtggccccc

SEQ ID NO: 279426 - DNA, 25 bp, Probe Sequence
tgggcatcaaactgagacccccatc

SEQ ID NO: 279427 - DNA, 25 bp, Probe Sequence
tgtggaagacaagtcagacccccca

SEQ ID NO: 279428 - DNA, 25 bp, Probe Sequence
tgtggagacggattacaccttccca

SEQ ID NO: 279429 - DNA, 25 bp, Probe Sequence
tgtggagacggattacaccttccca

SEQ ID NO: 279430 - DNA, 25 bp, Probe Sequence
tgtggagaatgagattccccccacc

SEQ ID NO: 279431 - DNA, 25 bp, Probe Sequence
tgggcaggctgggattcctgccccc

SEQ ID NO: 279432 - DNA, 25 bp, Probe Sequence
tgtgtgcagggggatttctcctggc

SEQ ID NO: 279433 - DNA, 25 bp, Probe Sequence
tgtggacgtgcctttgtcttcaggc

SEQ ID NO: 279434 - DNA, 25 bp, Probe Sequence
tgtgtacaattctgtgacattcagg

SEQ ID NO: 279435 - DNA, 25 bp, Probe Sequence
tgtggatttctatgttatgccggtg

SEQ ID NO: 279436 - DNA, 25 bp, Probe Sequence
tgtggtttttatatatgcactttgc

SEQ ID NO: 279437 - DNA, 25 bp, Probe Sequence
tgtgtgtctgttaaatgaatgtcat

SEQ ID NO: 279438 - DNA, 25 bp, Probe Sequence
tgtggtctgctttataagatggcca

SEQ ID NO: 279439 - DNA, 25 bp, Probe Sequence
tgttttcatttataagtggaagcta

SEQ ID NO: 279440 - DNA, 25 bp, Probe Sequence
tttggtctattctaaaggaccagta

SEQ ID NO: 279441 - DNA, 25 bp, Probe Sequence
tgttggttttcggaactgaggccat

SEQ ID NO: 279442 - DNA, 25 bp, Probe Sequence
tgttaagtgttctggacaaggccaa

SEQ ID NO: 279443 - DNA, 25 bp, Probe Sequence
tgtttagttctaaataagggcacaa

SEQ ID NO: 279444 - DNA, 25 bp, Probe Sequence
tgtcttccttccacacatagaggca

SEQ ID NO: 279445 - DNA, 25 bp, Probe Sequence
tgtctttctaccctctaatttaaca

SEQ ID NO: 279446 - DNA, 25 bp, Probe Sequence
tccatactaaaccagtttgttaact

SEQ ID NO: 279447 - DNA, 25 bp, Probe Sequence
tccatccaaatacactttctggaac

SEQ ID NO: 279448 - DNA, 25 bp, Probe Sequence
tgccatccgaaaccttaccgaagac

SEQ ID NO: 279449 - DNA, 25 bp, Probe Sequence
tgtctcctttgtctgttcctaagac

SEQ ID NO: 279450 - DNA, 25 bp, Probe Sequence
tgtcactcaacgtggtccctagaac

SEQ ID NO: 279451 - DNA, 25 bp, Probe Sequence
tgtccaaaccagagcttcctcaaga

SEQ ID NO: 279452 - DNA, 25 bp, Probe Sequence
tgtgcaccaaacaaagtctgcctga

SEQ ID NO: 279453 - DNA, 25 bp, Probe Sequence
tgagcacgaaggcaaaccctactgc

SEQ ID NO: 279454 - DNA, 25 bp, Probe Sequence
tgtgacccaggaaaacatcctcctc

SEQ ID NO: 279455 - DNA, 25 bp, Probe Sequence
tgtgacttgggctaaaggccccctt

SEQ ID NO: 279456 - DNA, 25 bp, Probe Sequence
tgtgccttggaaaggaggccctccc

SEQ ID NO: 279457 - DNA, 25 bp, Probe Sequence
tgtgtcctggaactagagcccatcc

SEQ ID NO: 279458 - DNA, 25 bp, Probe Sequence
tgtgatgcctgttgagtcagatgct

SEQ ID NO: 279459 - DNA, 25 bp, Probe Sequence
tgtgagccgtgtcgtatgacctagt

SEQ ID NO: 279460 - DNA, 25 bp, Probe Sequence
tgtggtctgatcagttaatttgtat

SEQ ID NO: 279461 - DNA, 25 bp, Probe Sequence
tgtggatcttgcaccaacatctggt

SEQ ID NO: 279462 - DNA, 25 bp, Probe Sequence
tgggcatcttggagcaactggctga

SEQ ID NO: 279463 - DNA, 25 bp, Probe Sequence
tgtggcctggacacaaccagcacag

SEQ ID NO: 279464 - DNA, 25 bp, Probe Sequence
tgtggcctggacacaaccagcacag

SEQ ID NO: 279465 - DNA, 25 bp, Probe Sequence
tgtggctctggacacgggagacaag

SEQ ID NO: 279466 - DNA, 25 bp, Probe Sequence
tgtggcgcgctactttgggataaag

SEQ ID NO: 279467 - DNA, 25 bp, Probe Sequence
tgtgtgtcctataatggggaataaa

SEQ ID NO: 279468 - DNA, 25 bp, Probe Sequence
tgtgtgactttcaatgcctgtccga

SEQ ID NO: 279469 - DNA, 25 bp, Probe Sequence
tgggccagctaaacatgcttcatcg

SEQ ID NO: 279470 - DNA, 25 bp, Probe Sequence
tgggctcataaacatgcctgctctc

SEQ ID NO: 279471 - DNA, 25 bp, Probe Sequence
tgtgaccaaagacgatgccatgctc

SEQ ID NO: 279472 - DNA, 25 bp, Probe Sequence
tgtgaccaaggacatgacactggaa

SEQ ID NO: 279473 - DNA, 25 bp, Probe Sequence
tgtgaagccggccaagaccgtcaac

SEQ ID NO: 279474 - DNA, 25 bp, Probe Sequence
tgtggaccaagccaaatgccggcct

SEQ ID NO: 279475 - DNA, 25 bp, Probe Sequence
tgtggacactgagaacatccgccgt

SEQ ID NO: 279476 - DNA, 25 bp, Probe Sequence
tccaccagctgagaattcgtccgct

SEQ ID NO: 279477 - DNA, 25 bp, Probe Sequence
tcccaacgaccgaacgatccagaat

SEQ ID NO: 279478 - DNA, 25 bp, Probe Sequence
tccacaacggactgggtcgctatgt

SEQ ID NO: 279479 - DNA, 25 bp, Probe Sequence
ttacaactggacaggcggccctgga

SEQ ID NO: 279480 - DNA, 25 bp, Probe Sequence
tgaaaagccaaatggaggcgtctag

SEQ ID NO: 279481 - DNA, 25 bp, Probe Sequence
taaaacaaaaactcggcatgaacct

SEQ ID NO: 279482 - DNA, 25 bp, Probe Sequence
tgaatagagaaataaccgggaacca

SEQ ID NO: 279483 - DNA, 25 bp, Probe Sequence
tatggggaaaaatccgtggaactga

SEQ ID NO: 279484 - DNA, 25 bp, Probe Sequence
tttgggaaaagttgacgaggctaat

SEQ ID NO: 279485 - DNA, 25 bp, Probe Sequence
ttcgggaaggagttcacagaagcgg

SEQ ID NO: 279486 - DNA, 25 bp, Probe Sequence
tgagcggctacacaatctacgacac

SEQ ID NO: 279487 - DNA, 25 bp, Probe Sequence
tgatgggctatcttacctagtaacc

SEQ ID NO: 279488 - DNA, 25 bp, Probe Sequence
tgtggaaatcttagcctgccttagc

SEQ ID NO: 279489 - DNA, 25 bp, Probe Sequence
tgtgggcaaagggcattccttgagc

SEQ ID NO: 279490 - DNA, 25 bp, Probe Sequence
tgtgggaaaacacaccttggaattc

SEQ ID NO: 279491 - DNA, 25 bp, Probe Sequence
tgtggggaaaatcatcactgtggag

SEQ ID NO: 279492 - DNA, 25 bp, Probe Sequence
tgtgggtggaaaaatcaacgtggcc

SEQ ID NO: 279493 - DNA, 25 bp, Probe Sequence
tgtgggggaacagcatgcagcccgc

SEQ ID NO: 279494 - DNA, 25 bp, Probe Sequence
tgtggtggaaaaggctgagcaacag

SEQ ID NO: 279495 - DNA, 25 bp, Probe Sequence
tgtggcccaaaactgctccaaagaa

SEQ ID NO: 279496 - DNA, 25 bp, Probe Sequence
tgtaccaactctaggcccaaagtag

SEQ ID NO: 279497 - DNA, 25 bp, Probe Sequence
tgtggctaactctcctaccaaggag

SEQ ID NO: 279498 - DNA, 25 bp, Probe Sequence
tgtggtgtttgctcactaagcaggg

SEQ ID NO: 279499 - DNA, 25 bp, Probe Sequence
tgtgtgctttacacaccaagcaatg

SEQ ID NO: 279500 - DNA, 25 bp, Probe Sequence
tgtgattatccagacattaaacatg

SEQ ID NO: 279501 - DNA, 25 bp, Probe Sequence
tgtgttcatctgtgacattaaaagt

SEQ ID NO: 279502 - DNA, 25 bp, Probe Sequence
tgtgtatactttataaattagtccc

SEQ ID NO: 279503 - DNA, 25 bp, Probe Sequence
tgtgtatattttataagatgtcctt

SEQ ID NO: 279504 - DNA, 25 bp, Probe Sequence
tgtgtcatttacacacaagaccctt

SEQ ID NO: 279505 - DNA, 25 bp, Probe Sequence
tgtgtattatacaaatcactatcgc

SEQ ID NO: 279506 - DNA, 25 bp, Probe Sequence
tgtgtaagcatgtttacctgttggc

SEQ ID NO: 279507 - DNA, 25 bp, Probe Sequence
tgtggatcatgcctttaccagtgtg

SEQ ID NO: 279508 - DNA, 25 bp, Probe Sequence
tgtggacatcccttcacgggagaag

SEQ ID NO: 279509 - DNA, 25 bp, Probe Sequence
tgtggacatcccttcacgggagaag

SEQ ID NO: 279510 - DNA, 25 bp, Probe Sequence
tgtggacatcccttcacaggagaag

SEQ ID NO: 279511 - DNA, 25 bp, Probe Sequence
tgtgggccacgagcaggaggaaggt

SEQ ID NO: 279512 - DNA, 25 bp, Probe Sequence
tgtggtgctacgtggaagtgaatgg

SEQ ID NO: 279513 - DNA, 25 bp, Probe Sequence
tgggctccacactggcagaggagtg

SEQ ID NO: 279514 - DNA, 25 bp, Probe Sequence
tgggctcgcagccagtaggagggca

SEQ ID NO: 279515 - DNA, 25 bp, Probe Sequence
tgggctcagctccagggagaggcca

SEQ ID NO: 279516 - DNA, 25 bp, Probe Sequence
tgtggtcgtggacgtggtcagccac

SEQ ID NO: 279517 - DNA, 25 bp, Probe Sequence
tgtgaatcgtgggtgggatggccgc

SEQ ID NO: 279518 - DNA, 25 bp, Probe Sequence
tgtggaagtttccaggaggcctgtc

SEQ ID NO: 279519 - DNA, 25 bp, Probe Sequence
tgtggaagtttccaggaggcctgtc

SEQ ID NO: 279520 - DNA, 25 bp, Probe Sequence
tgtggccagtctaccatggggccca

SEQ ID NO: 279521 - DNA, 25 bp, Probe Sequence
tgtggggtgcatgcctggaatccca

SEQ ID NO: 279522 - DNA, 25 bp, Probe Sequence
tgtggcgtgggtggcagaggatccc

SEQ ID NO: 279523 - DNA, 25 bp, Probe Sequence
tgtacgtggattgggctggagccag

SEQ ID NO: 279524 - DNA, 25 bp, Probe Sequence
tgtggtgtggcatgtgagctggtcc

SEQ ID NO: 279525 - DNA, 25 bp, Probe Sequence
tgtgggaggctcgggctgagccatg

SEQ ID NO: 279526 - DNA, 25 bp, Probe Sequence
tgtgggagggtgggcagggaggggt

SEQ ID NO: 279527 - DNA, 25 bp, Probe Sequence
tgtgtcttggggtggggaggggcac

SEQ ID NO: 279528 - DNA, 25 bp, Probe Sequence
tgtgtgtttgggcgaggggtgagtg

SEQ ID NO: 279529 - DNA, 25 bp, Probe Sequence
tgtggaatgagcagaggtggggtgg

SEQ ID NO: 279530 - DNA, 25 bp, Probe Sequence
tgtgtgaaggctgggtggggtgggt

SEQ ID NO: 279531 - DNA, 25 bp, Probe Sequence
tgtgatgacatggtgctgattctgg

SEQ ID NO: 279532 - DNA, 25 bp, Probe Sequence
tgtgactctgtgatgtatcatgata

SEQ ID NO: 279533 - DNA, 25 bp, Probe Sequence
tgtgtccagctcagtatctgcaaca

SEQ ID NO: 279534 - DNA, 25 bp, Probe Sequence
tgtgtgccactgtttgcttcaacag

SEQ ID NO: 279535 - DNA, 25 bp, Probe Sequence
tgtgtgccactgatggagctccaag

SEQ ID NO: 279536 - DNA, 25 bp, Probe Sequence
tgtgtgtatcttcagacatccatga

SEQ ID NO: 279537 - DNA, 25 bp, Probe Sequence
tgtggtgatcttttccaccagcacc

SEQ ID NO: 279538 - DNA, 25 bp, Probe Sequence
tgtggatgtttccaagcctgacctc

SEQ ID NO: 279539 - DNA, 25 bp, Probe Sequence
tgtgagttcgtgtacaccgaccatt

SEQ ID NO: 279540 - DNA, 25 bp, Probe Sequence
tgtgaattccaataccggctatgtt

SEQ ID NO: 279541 - DNA, 25 bp, Probe Sequence
tgtaacttcacttgacgcacgttag

SEQ ID NO: 279542 - DNA, 25 bp, Probe Sequence
tgtcaaaatagtccaccagtgattc

SEQ ID NO: 279543 - DNA, 25 bp, Probe Sequence
gtattaatccccatcattactggta

SEQ ID NO: 279544 - DNA, 25 bp, Probe Sequence
tgctcaaaaacctgccacgaagagg

SEQ ID NO: 279545 - DNA, 25 bp, Probe Sequence
tgtcaaactgacaccccgtagacag

SEQ ID NO: 279546 - DNA, 25 bp, Probe Sequence
tgtgatactctgctaccccagaaaa

SEQ ID NO: 279547 - DNA, 25 bp, Probe Sequence
tgtgccacctggtgccgacaagaaa

SEQ ID NO: 279548 - DNA, 25 bp, Probe Sequence
tgtcaagacttgtggcgaactagaa

SEQ ID NO: 279549 - DNA, 25 bp, Probe Sequence
tgtgcaggtcttcggacgcaagaag

SEQ ID NO: 279550 - DNA, 25 bp, Probe Sequence
tgtgaggcacattacagcaccaaga

SEQ ID NO: 279551 - DNA, 25 bp, Probe Sequence
tgtgatgtatcatgatagtcacaaa

SEQ ID NO: 279552 - DNA, 25 bp, Probe Sequence
tgtgcaccatattggagtacctaca

SEQ ID NO: 279553 - DNA, 25 bp, Probe Sequence
tgtgggcatatgtaggtctcctgtc

SEQ ID NO: 279554 - DNA, 25 bp, Probe Sequence
tgagggtggaatttccctggttaag

SEQ ID NO: 279555 - DNA, 25 bp, Probe Sequence
tgtgggatggaatctcattgtggtt

SEQ ID NO: 279556 - DNA, 25 bp, Probe Sequence
tgtggcgggactttgattgctagca

SEQ ID NO: 279557 - DNA, 25 bp, Probe Sequence
tgtgaagggagcccatatgtgccag

SEQ ID NO: 279558 - DNA, 25 bp, Probe Sequence
tgtggagatgttgccttgaccagcc

SEQ ID NO: 279559 - DNA, 25 bp, Probe Sequence
tgtgtatgcttatgcctgggcaact

SEQ ID NO: 279560 - DNA, 25 bp, Probe Sequence
tgtggagctgtgaactgccggaagt

SEQ ID NO: 279561 - DNA, 25 bp, Probe Sequence
tgtgtgatggtgcactccagggcat

SEQ ID NO: 279562 - DNA, 25 bp, Probe Sequence
tgtgtaggtaaccagatggctcttt

SEQ ID NO: 279563 - DNA, 25 bp, Probe Sequence
tgtgtatgtgtaccacagtttaatt

SEQ ID NO: 279564 - DNA, 25 bp, Probe Sequence
tgtgtcagtctctcctttatgaatt

SEQ ID NO: 279565 - DNA, 25 bp, Probe Sequence
tgtggcagcactgacctttgaggcc

SEQ ID NO: 279566 - DNA, 25 bp, Probe Sequence
tgtggcagactcagtgctgtgtggc

SEQ ID NO: 279567 - DNA, 25 bp, Probe Sequence
tgtggcgcacttcaaggggcagtgg

SEQ ID NO: 279568 - DNA, 25 bp, Probe Sequence
tgtggtgttccatcaggtactgtgt

SEQ ID NO: 279569 - DNA, 25 bp, Probe Sequence
tgtggtctggcctaggttaagtgtg

SEQ ID NO: 279570 - DNA, 25 bp, Probe Sequence
tgtggttggatctaacactaactgt

SEQ ID NO: 279571 - DNA, 25 bp, Probe Sequence
tgtgccattttatatcaggaacttg

SEQ ID NO: 279572 - DNA, 25 bp, Probe Sequence
tgtggtgtcttacaaggcaggcctt

SEQ ID NO: 279573 - DNA, 25 bp, Probe Sequence
tgtggagctctcaggaagggccctg

SEQ ID NO: 279574 - DNA, 25 bp, Probe Sequence
tgtgcgcacccagggagagttgccc

SEQ ID NO: 279575 - DNA, 25 bp, Probe Sequence
tgtggatgacccagaggcattccca

SEQ ID NO: 279576 - DNA, 25 bp, Probe Sequence
tgtggttgactctgaggatctgccc

SEQ ID NO: 279577 - DNA, 25 bp, Probe Sequence
tgtgggtacctgaagctgacgccca

SEQ ID NO: 279578 - DNA, 25 bp, Probe Sequence
tgtaggtgaccacaccagagcctca

SEQ ID NO: 279579 - DNA, 25 bp, Probe Sequence
tgtaggggccatagaccatacatac

SEQ ID NO: 279580 - DNA, 25 bp, Probe Sequence
tttgagggcccggaattataaatat

SEQ ID NO: 279581 - DNA, 25 bp, Probe Sequence
tgtgtgaggccctgccactattaaa

SEQ ID NO: 279582 - DNA, 25 bp, Probe Sequence
tgtggggtatatcccctatcttcac

SEQ ID NO: 279583 - DNA, 25 bp, Probe Sequence
tgtgaggagaattctgtcccctacc

SEQ ID NO: 279584 - DNA, 25 bp, Probe Sequence
tgtgaggagaattctgtcccctacc

SEQ ID NO: 279585 - DNA, 25 bp, Probe Sequence
tgtgaggagaattctgtcccctacc

SEQ ID NO: 279586 - DNA, 25 bp, Probe Sequence
tgtgaggagaattctctcccctacc

SEQ ID NO: 279587 - DNA, 25 bp, Probe Sequence
tgtggagaaaacacctttcccttct

SEQ ID NO: 279588 - DNA, 25 bp, Probe Sequence
tgtgggaaatcctgcgtttcccctg

SEQ ID NO: 279589 - DNA, 25 bp, Probe Sequence
tgtgggaaacactcatgggcagctg

SEQ ID NO: 279590 - DNA, 25 bp, Probe Sequence
tgtgcggaaccacccggggctgctg

SEQ ID NO: 279591 - DNA, 25 bp, Probe Sequence
tgtggatgacacaatccctggggct

SEQ ID NO: 279592 - DNA, 25 bp, Probe Sequence
tgtgaaaactactccagtggctgac

SEQ ID NO: 279593 - DNA, 25 bp, Probe Sequence
tgtgacgaggctaaggccgtggata

SEQ ID NO: 279594 - DNA, 25 bp, Probe Sequence
tgtgggagatgcgtagggggtcata

SEQ ID NO: 279595 - DNA, 25 bp, Probe Sequence
tgtgggcggccaagaagggtcaccc

SEQ ID NO: 279596 - DNA, 25 bp, Probe Sequence
tgtggctggtcatggaaggggcagt

SEQ ID NO: 279597 - DNA, 25 bp, Probe Sequence
tgggcgatcacccgaagtcaggagt

SEQ ID NO: 279598 - DNA, 25 bp, Probe Sequence
tgggcctgaccatggagcataagca

SEQ ID NO: 279599 - DNA, 25 bp, Probe Sequence
tgggccgcaccataatgagatgtga

SEQ ID NO: 279600 - DNA, 25 bp, Probe Sequence
tgtccctgccgctgaagaatggggc

SEQ ID NO: 279601 - DNA, 25 bp, Probe Sequence
tgtgtcccccataaaagatatgttg

SEQ ID NO: 279602 - DNA, 25 bp, Probe Sequence
tgtgttccttttccacagattgtct

SEQ ID NO: 279603 - DNA, 25 bp, Probe Sequence
tgtggttttgtttacaaatgttctg

SEQ ID NO: 279604 - DNA, 25 bp, Probe Sequence
tgtggtttattttattttcttcatt

SEQ ID NO: 279605 - DNA, 25 bp, Probe Sequence
tgtggtttgaccaattgtttttctt

SEQ ID NO: 279606 - DNA, 25 bp, Probe Sequence
tgtgtttctacagtatgtttttcca

SEQ ID NO: 279607 - DNA, 25 bp, Probe Sequence
tgtgtgtcacaaaatttggtattca

SEQ ID NO: 279608 - DNA, 25 bp, Probe Sequence
tgtgtctcacgcaagttttatactc

SEQ ID NO: 279609 - DNA, 25 bp, Probe Sequence
tgtggccgaggactttgattgcaca

SEQ ID NO: 279610 - DNA, 25 bp, Probe Sequence
tgtggcttcaggttctcacaggaca

SEQ ID NO: 279611 - DNA, 25 bp, Probe Sequence
tgtgtcataagacatcttcaagaca

SEQ ID NO: 279612 - DNA, 25 bp, Probe Sequence
tgtggatgccgatttctgtaaactc

SEQ ID NO: 279613 - DNA, 25 bp, Probe Sequence
tgtggatagccatttctgctcaacc

SEQ ID NO: 279614 - DNA, 25 bp, Probe Sequence
tgtggtagcacattcctatatttcc

SEQ ID NO: 279615 - DNA, 25 bp, Probe Sequence
tgtgtgtactctgcacgtatatctc

SEQ ID NO: 279616 - DNA, 25 bp, Probe Sequence
tgtgtgtattcacgcagttactcgc

SEQ ID NO: 279617 - DNA, 25 bp, Probe Sequence
tgtggcgatgtgcccagtgaaccga

SEQ ID NO: 279618 - DNA, 25 bp, Probe Sequence
tgtgtcacagtgcatggtggcctct

SEQ ID NO: 279619 - DNA, 25 bp, Probe Sequence
tgtgtcctcatgtgaatggcgtgta

SEQ ID NO: 279620 - DNA, 25 bp, Probe Sequence
tgtgtccatacaggagaggccttgg

SEQ ID NO: 279621 - DNA, 25 bp, Probe Sequence
tgatttaaaatgtgtacgtgggcca

SEQ ID NO: 279622 - DNA, 25 bp, Probe Sequence
tgtttaaagtgaactacagctgtgc

SEQ ID NO: 279623 - DNA, 25 bp, Probe Sequence
tgtggtataagcaaactacatggac

SEQ ID NO: 279624 - DNA, 25 bp, Probe Sequence
tgtggtttgacttactccagctgac

SEQ ID NO: 279625 - DNA, 25 bp, Probe Sequence
tgtggttgctgagtatatcgccccc

SEQ ID NO: 279626 - DNA, 25 bp, Probe Sequence
tgtgggtcagctacataagccccca

SEQ ID NO: 279627 - DNA, 25 bp, Probe Sequence
tgtgggatatgttccaggctcccca

SEQ ID NO: 279628 - DNA, 25 bp, Probe Sequence
tgtggcagttgttgcctgagcacca

SEQ ID NO: 279629 - DNA, 25 bp, Probe Sequence
tgtggagtcagactgagccacacca

SEQ ID NO: 279630 - DNA, 25 bp, Probe Sequence
tgtggacaagaatgcgcccacggtc

SEQ ID NO: 279631 - DNA, 25 bp, Probe Sequence
tgtgtgccaaggtggcaggcctcgt

SEQ ID NO: 279632 - DNA, 25 bp, Probe Sequence
tgtgcagaaaggtgcggccactctt

SEQ ID NO: 279633 - DNA, 25 bp, Probe Sequence
tgtgagaagcggaatgggtactgtc

SEQ ID NO: 279634 - DNA, 25 bp, Probe Sequence
tgtaaactgctgaaggtccctgact

SEQ ID NO: 279635 - DNA, 25 bp, Probe Sequence
tgtgaaatgcatcaaggtcctctcc

SEQ ID NO: 279636 - DNA, 25 bp, Probe Sequence
tgtgatcgtgacaaatcttccctcc

SEQ ID NO: 279637 - DNA, 25 bp, Probe Sequence
tgtgtcgcccagtaattctgttgcc

SEQ ID NO: 279638 - DNA, 25 bp, Probe Sequence
tgtgtacaccagggatctgtttgga

SEQ ID NO: 279639 - DNA, 25 bp, Probe Sequence
tgtgtgactaggagatgattttgtg

SEQ ID NO: 279640 - DNA, 25 bp, Probe Sequence
tgtggactaatgaaatggtgttgtt

SEQ ID NO: 279641 - DNA, 25 bp, Probe Sequence
tgtggactgtaaatgttttatttgt

SEQ ID NO: 279642 - DNA, 25 bp, Probe Sequence
tgtggggatgaactttttgttttgt

SEQ ID NO: 279643 - DNA, 25 bp, Probe Sequence
tgtgggaggatggtacttttctttt

SEQ ID NO: 279644 - DNA, 25 bp, Probe Sequence
tgtgagagggatggaattgttttct

SEQ ID NO: 279645 - DNA, 25 bp, Probe Sequence
tgtggaggccaggtatcctctgttt

SEQ ID NO: 279646 - DNA, 25 bp, Probe Sequence
tgtggggtagcttgtcctgctactt

SEQ ID NO: 279647 - DNA, 25 bp, Probe Sequence
tgtgggagaagttggccccagattt

SEQ ID NO: 279648 - DNA, 25 bp, Probe Sequence
tgtgggacaagatagccgcgcagct

SEQ ID NO: 279649 - DNA, 25 bp, Probe Sequence
tgtgggacaagatagccgcgcagct

SEQ ID NO: 279650 - DNA, 25 bp, Probe Sequence
tgtctggagcataacccacaggcgt

SEQ ID NO: 279651 - DNA, 25 bp, Probe Sequence
tgtgtcagagcactgagctccaccc

SEQ ID NO: 279652 - DNA, 25 bp, Probe Sequence
tgtgataaggctgctgccacctgtt

SEQ ID NO: 279653 - DNA, 25 bp, Probe Sequence
tgtgtggactgaacacctgcacttt

SEQ ID NO: 279654 - DNA, 25 bp, Probe Sequence
tgtggacactgtaacctactcttga

SEQ ID NO: 279655 - DNA, 25 bp, Probe Sequence
tgtgaaactgtatctgccactcatt

SEQ ID NO: 279656 - DNA, 25 bp, Probe Sequence
tgtgtgaaactgtatctgccactca

SEQ ID NO: 279657 - DNA, 25 bp, Probe Sequence
tgtgtgaacatcagatgcccgctgc

SEQ ID NO: 279658 - DNA, 25 bp, Probe Sequence
tgtggcatgacatctgggtcatctg

SEQ ID NO: 279659 - DNA, 25 bp, Probe Sequence
tgtgtctacacccaagttcttaact

SEQ ID NO: 279660 - DNA, 25 bp, Probe Sequence
tgtgtttatatctggttctatattt

SEQ ID NO: 279661 - DNA, 25 bp, Probe Sequence
tgtgtttagctacctttttatattt

SEQ ID NO: 279662 - DNA, 25 bp, Probe Sequence
tgtgttttgctatcctttttactgt

SEQ ID NO: 279663 - DNA, 25 bp, Probe Sequence
tgtgtttgtatttcctttcttaatt

SEQ ID NO: 279664 - DNA, 25 bp, Probe Sequence
tgtggattgtcagtgtcctttgctc

SEQ ID NO: 279665 - DNA, 25 bp, Probe Sequence
tgtagatttcctcgcctatgatgtc

SEQ ID NO: 279666 - DNA, 25 bp, Probe Sequence
tgtgatgtttatggccctcagatcc

SEQ ID NO: 279667 - DNA, 25 bp, Probe Sequence
tgtgtatcgtaaccagccagatcct

SEQ ID NO: 279668 - DNA, 25 bp, Probe Sequence
tgtgtacgtgggccagcatggtggc

SEQ ID NO: 279669 - DNA, 25 bp, Probe Sequence
tgtgattgtgtgagcaactgggtgt

SEQ ID NO: 279670 - DNA, 25 bp, Probe Sequence
tgtgggctgtacccagttggtgcta

SEQ ID NO: 279671 - DNA, 25 bp, Probe Sequence
tgtgggcttcctcgagggaggcaag

SEQ ID NO: 279672 - DNA, 25 bp, Probe Sequence
tgtgggcttcctcgagggaggcaag

SEQ ID NO: 279673 - DNA, 25 bp, Probe Sequence
tgtgaggcatatcctgtcggggtga

SEQ ID NO: 279674 - DNA, 25 bp, Probe Sequence
tgtgaggcaagggaggtggggagtc

SEQ ID NO: 279675 - DNA, 25 bp, Probe Sequence
tgtgggccagtcaggggtgaggaga

SEQ ID NO: 279676 - DNA, 25 bp, Probe Sequence
tgtggaccaccaaggggttgttgaa

SEQ ID NO: 279677 - DNA, 25 bp, Probe Sequence
tgtggaccactgcctgaaaggtttg

SEQ ID NO: 279678 - DNA, 25 bp, Probe Sequence
tgtgtgtgctcagtgccatgaagat

SEQ ID NO: 279679 - DNA, 25 bp, Probe Sequence
tgtggagtcagtggcagcatgcagc

SEQ ID NO: 279680 - DNA, 25 bp, Probe Sequence
tgtggggcagatggcatcacctacc

SEQ ID NO: 279681 - DNA, 25 bp, Probe Sequence
tgtgggagcagagtgaccctttgct

SEQ ID NO: 279682 - DNA, 25 bp, Probe Sequence
tgtggagactgatgacaacttcctg

SEQ ID NO: 279683 - DNA, 25 bp, Probe Sequence
tgtgagcacctgtgcacatctcttc

SEQ ID NO: 279684 - DNA, 25 bp, Probe Sequence
tgtgtcaccagttaatctttctcca

SEQ ID NO: 279685 - DNA, 25 bp, Probe Sequence
tgtgtgaccacatcgagttacaaca

SEQ ID NO: 279686 - DNA, 25 bp, Probe Sequence
tgtgttccaacagggtgcttacata

SEQ ID NO: 279687 - DNA, 25 bp, Probe Sequence
tgtgtaccccaatgtatgctatcat

SEQ ID NO: 279688 - DNA, 25 bp, Probe Sequence
tgtgtatcctcattactgtatcatt

SEQ ID NO: 279689 - DNA, 25 bp, Probe Sequence
tgtgtatgcacgtaaagtttgtact

SEQ ID NO: 279690 - DNA, 25 bp, Probe Sequence
tgtgtgtaattatacttatgtttca

SEQ ID NO: 279691 - DNA, 25 bp, Probe Sequence
tgtggtctattgtatatctttttct

SEQ ID NO: 279692 - DNA, 25 bp, Probe Sequence
tgtgcgtctctgttgattccaagtt

SEQ ID NO: 279693 - DNA, 25 bp, Probe Sequence
tgtgatgttgcctggtctatagtgc

SEQ ID NO: 279694 - DNA, 25 bp, Probe Sequence
tgtggagtccatctgtctatttcct

SEQ ID NO: 279695 - DNA, 25 bp, Probe Sequence
tgtgggctgcactttttatgcttgc

SEQ ID NO: 279696 - DNA, 25 bp, Probe Sequence
tgtggatgctctctatttagcggag

SEQ ID NO: 279697 - DNA, 25 bp, Probe Sequence
tgtgtgtgtctggttttagtgtcag

SEQ ID NO: 279698 - DNA, 25 bp, Probe Sequence
tgtggttcagctactttccatttgg

SEQ ID NO: 279699 - DNA, 25 bp, Probe Sequence
tgtggatgaagccatctattacttc

SEQ ID NO: 279700 - DNA, 25 bp, Probe Sequence
tgtggcagattgcctttgtccttca

SEQ ID NO: 279701 - DNA, 25 bp, Probe Sequence
tgtgtcgatatgttcggcttttcat

SEQ ID NO: 279702 - DNA, 25 bp, Probe Sequence
tgtgattatatctttggagtttgca

SEQ ID NO: 279703 - DNA, 25 bp, Probe Sequence
tgtgatgtattgtcttccagttgca

SEQ ID NO: 279704 - DNA, 25 bp, Probe Sequence
tgtggtacagaaagccctccaagcc

SEQ ID NO: 279705 - DNA, 25 bp, Probe Sequence
tgtctggaaggctgtggtcccaggc

SEQ ID NO: 279706 - DNA, 25 bp, Probe Sequence
tgtccagagccgtgtggtccaaggc

SEQ ID NO: 279707 - DNA, 25 bp, Probe Sequence
tgtgcagaaccactttggtccaaac

SEQ ID NO: 279708 - DNA, 25 bp, Probe Sequence
tgtcagaacccagatgtgaacacag

SEQ ID NO: 279709 - DNA, 25 bp, Probe Sequence
tgtccggcgcctggagtataagccc

SEQ ID NO: 279710 - DNA, 25 bp, Probe Sequence
tgtccaccgctctgtttaagaaagg

SEQ ID NO: 279711 - DNA, 25 bp, Probe Sequence
tgtgtcccactgttattaaagcaaa

SEQ ID NO: 279712 - DNA, 25 bp, Probe Sequence
tgtgtttcatgttctacttgaggca

SEQ ID NO: 279713 - DNA, 25 bp, Probe Sequence
tgtgtattccattccgctcgccaca

SEQ ID NO: 279714 - DNA, 25 bp, Probe Sequence
tgtgtctatacattgctttccgcat

SEQ ID NO: 279715 - DNA, 25 bp, Probe Sequence
tgtgtgtgacactgctcttcaaata

SEQ ID NO: 279716 - DNA, 25 bp, Probe Sequence
tgtcagaatcactcctctcaaatat

SEQ ID NO: 279717 - DNA, 25 bp, Probe Sequence
tgtgacttcccagcactagaataag

SEQ ID NO: 279718 - DNA, 25 bp, Probe Sequence
tgtgagctttagatcattaaatcca

SEQ ID NO: 279719 - DNA, 25 bp, Probe Sequence
tgtgtctgttaaatgaatgtcatat

SEQ ID NO: 279720 - DNA, 25 bp, Probe Sequence
tgtggtgtataagtgaagtcaaggt

SEQ ID NO: 279721 - DNA, 25 bp, Probe Sequence
tgtgcgcttaacgtgagggtgggtc

SEQ ID NO: 279722 - DNA, 25 bp, Probe Sequence
tgtggattcacagcgagaggtagag

SEQ ID NO: 279723 - DNA, 25 bp, Probe Sequence
tgtttgctcactaagcagggtcgtc

SEQ ID NO: 279724 - DNA, 25 bp, Probe Sequence
tgtggtctcctgaagggagcgcctc

SEQ ID NO: 279725 - DNA, 25 bp, Probe Sequence
tgtggtctgagtggacaggtgcctc

SEQ ID NO: 279726 - DNA, 25 bp, Probe Sequence
tgtggtaatgttcacctgcagtccc

SEQ ID NO: 279727 - DNA, 25 bp, Probe Sequence
tgacctaagtgtgactgcagcaggc

SEQ ID NO: 279728 - DNA, 25 bp, Probe Sequence
tgtgcgctaagtggcagacgctcgg

SEQ ID NO: 279729 - DNA, 25 bp, Probe Sequence
tgtggacaagtcagcaggatcagga

SEQ ID NO: 279730 - DNA, 25 bp, Probe Sequence
tgtgggtagatcagtggatgagaca

SEQ ID NO: 279731 - DNA, 25 bp, Probe Sequence
tgtgcaggtactcagtgtttatcca

SEQ ID NO: 279732 - DNA, 25 bp, Probe Sequence
tgtggtgaagctgagtttctgtcca

SEQ ID NO: 279733 - DNA, 25 bp, Probe Sequence
tgtggtgaagctgagtttctgtcca

SEQ ID NO: 279734 - DNA, 25 bp, Probe Sequence
tgtggagaagtgggcttcagattta

SEQ ID NO: 279735 - DNA, 25 bp, Probe Sequence
tgtggcaacctcttttgcatagttg

SEQ ID NO: 279736 - DNA, 25 bp, Probe Sequence
tgtgcaagaccgtttgtccacttca

SEQ ID NO: 279737 - DNA, 25 bp, Probe Sequence
tgtgcacaaccaccatgtgtcttct

SEQ ID NO: 279738 - DNA, 25 bp, Probe Sequence
tgtggacaccatccacgtccacaag

SEQ ID NO: 279739 - DNA, 25 bp, Probe Sequence
tgtgaggccctgccactattaaaaa

SEQ ID NO: 279740 - DNA, 25 bp, Probe Sequence
tgtgatctcaagtcccttttaaaat

SEQ ID NO: 279741 - DNA, 25 bp, Probe Sequence
tgctgttaggtcctggtattaaaaa

SEQ ID NO: 279742 - DNA, 25 bp, Probe Sequence
tgtgttctagccttggcgttcaaaa

SEQ ID NO: 279743 - DNA, 25 bp, Probe Sequence
tgtgcgtatacctccgatgtgaaac

SEQ ID NO: 279744 - DNA, 25 bp, Probe Sequence
tgtgagttaccattcggtggccact

SEQ ID NO: 279745 - DNA, 25 bp, Probe Sequence
tgctgaatgtaagaccgtggactgt

SEQ ID NO: 279746 - DNA, 25 bp, Probe Sequence
tgtgacatgtaacagccaggagtgt

SEQ ID NO: 279747 - DNA, 25 bp, Probe Sequence
tgtgatggtcaacagcgtggcgctg

SEQ ID NO: 279748 - DNA, 25 bp, Probe Sequence
tgtgtggatgatgctgccagggcgc

SEQ ID NO: 279749 - DNA, 25 bp, Probe Sequence
tgtgtgtgcagaattctaggcagca

SEQ ID NO: 279750 - DNA, 25 bp, Probe Sequence
tgtgctgagcatttggccagaggca

SEQ ID NO: 279751 - DNA, 25 bp, Probe Sequence
tgtgctcagcattgtagtctgtgca

SEQ ID NO: 279752 - DNA, 25 bp, Probe Sequence
tgtgcacagctaatgattcaatgcg

SEQ ID NO: 279753 - DNA, 25 bp, Probe Sequence
tgtccaatcctcaatcctggtttgg

SEQ ID NO: 279754 - DNA, 25 bp, Probe Sequence
tgtgtgcttcctatcctggataatc

SEQ ID NO: 279755 - DNA, 25 bp, Probe Sequence
tgtcagcttccttagtctgggcaac

SEQ ID NO: 279756 - DNA, 25 bp, Probe Sequence
tgtcctgacacaggagtcggccacc

SEQ ID NO: 279757 - DNA, 25 bp, Probe Sequence
tgtctctggacggcagctatgcgac

SEQ ID NO: 279758 - DNA, 25 bp, Probe Sequence
tgtcatatggatccatgcttcccac

SEQ ID NO: 279759 - DNA, 25 bp, Probe Sequence
tgtgcagctggcagtgttcctgccc

SEQ ID NO: 279760 - DNA, 25 bp, Probe Sequence
tgtgatgaggccgaggctgcctccc

SEQ ID NO: 279761 - DNA, 25 bp, Probe Sequence
tgtgatgaggccgaggctgcctccc

SEQ ID NO: 279762 - DNA, 25 bp, Probe Sequence
tgtgggacctatgggctctacacac

SEQ ID NO: 279763 - DNA, 25 bp, Probe Sequence
tgtgggctttaggggctacagagtc

SEQ ID NO: 279764 - DNA, 25 bp, Probe Sequence
tgtgaggcatttaggggctttcagg

SEQ ID NO: 279765 - DNA, 25 bp, Probe Sequence
tgtgggcagcttagggccctggagg

SEQ ID NO: 279766 - DNA, 25 bp, Probe Sequence
tgtcggccaacgggccgtgcgacaa

SEQ ID NO: 279767 - DNA, 25 bp, Probe Sequence
tgcggcctgcacagaaccgggccca

SEQ ID NO: 279768 - DNA, 25 bp, Probe Sequence
tgtgatgcccttagatgtccggggc

SEQ ID NO: 279769 - DNA, 25 bp, Probe Sequence
tgtgatgcccggaatatctggggtc

SEQ ID NO: 279770 - DNA, 25 bp, Probe Sequence
tgtgggccggtgtttgaggagtccc

SEQ ID NO: 279771 - DNA, 25 bp, Probe Sequence
tgtgagtgggggtgtggggtccagg

SEQ ID NO: 279772 - DNA, 25 bp, Probe Sequence
tgtgggctggggttgggggcacagc

SEQ ID NO: 279773 - DNA, 25 bp, Probe Sequence
tgtgagggaggagacgtgaggcaac

SEQ ID NO: 279774 - DNA, 25 bp, Probe Sequence
tgtgcaaggactgcaaggtggctga

SEQ ID NO: 279775 - DNA, 25 bp, Probe Sequence
tgtgagggtttcaatgaggtgctga

SEQ ID NO: 279776 - DNA, 25 bp, Probe Sequence
tgatgacatcgtctacatgggccag

SEQ ID NO: 279777 - DNA, 25 bp, Probe Sequence
tgtggtcagtatgtctcctgcacag

SEQ ID NO: 279778 - DNA, 25 bp, Probe Sequence
tgtgttctctgagacccatgatcag

SEQ ID NO: 279779 - DNA, 25 bp, Probe Sequence
tgtgttgctatggcacccagattaa

SEQ ID NO: 279780 - DNA, 25 bp, Probe Sequence
tgttgctatggcacccagattaact

SEQ ID NO: 279781 - DNA, 25 bp, Probe Sequence
tgtacatctgagcatcccaaaacct

SEQ ID NO: 279782 - DNA, 25 bp, Probe Sequence
tgtgccggatgtacccggagacctt

SEQ ID NO: 279783 - DNA, 25 bp, Probe Sequence
tgtgcccagtgaaccgaaagaacga

SEQ ID NO: 279784 - DNA, 25 bp, Probe Sequence
tgtccctgggacagttgagaagctg

SEQ ID NO: 279785 - DNA, 25 bp, Probe Sequence
tgtcctccggaatgctggtgccgga

SEQ ID NO: 279786 - DNA, 25 bp, Probe Sequence
tgttccccgatacgttgatgggaaa

SEQ ID NO: 279787 - DNA, 25 bp, Probe Sequence
tgtgtgccgccggcagaggctgaag

SEQ ID NO: 279788 - DNA, 25 bp, Probe Sequence
tgtgtgcaagcacagcgctggtgtg

SEQ ID NO: 279789 - DNA, 25 bp, Probe Sequence
tgtgtatatagcatcctgagctgtg

SEQ ID NO: 279790 - DNA, 25 bp, Probe Sequence
tgtgtcttcagcaatcagggagggc

SEQ ID NO: 279791 - DNA, 25 bp, Probe Sequence
tgtgtcttcagcaatcagggagggc

SEQ ID NO: 279792 - DNA, 25 bp, Probe Sequence
tgtgcactggcaccaagtgcgggtc

SEQ ID NO: 279793 - DNA, 25 bp, Probe Sequence
tgtgtctggagcctgcaggcaggtg

SEQ ID NO: 279794 - DNA, 25 bp, Probe Sequence
tgtgtgccattgcccaggcagagtc

SEQ ID NO: 279795 - DNA, 25 bp, Probe Sequence
tgtgtctcttgctcatagcaagcct

SEQ ID NO: 279796 - DNA, 25 bp, Probe Sequence
tgtggtcatcgctgcatctgaagac

SEQ ID NO: 279797 - DNA, 25 bp, Probe Sequence
tgtggtcatcgctgcatctgaagac

SEQ ID NO: 279798 - DNA, 25 bp, Probe Sequence
tgtgtgtgacctcgcatatgtatga

SEQ ID NO: 279799 - DNA, 25 bp, Probe Sequence
tgtgtgacctcgcatatgtatgaca

SEQ ID NO: 279800 - DNA, 25 bp, Probe Sequence
tgtgcccaaccttcatgtcatgaag

SEQ ID NO: 279801 - DNA, 25 bp, Probe Sequence
tgtgcccaaccttcatgtcatgaag

SEQ ID NO: 279802 - DNA, 25 bp, Probe Sequence
tgtcgaaatccacctgtcaggacgc

SEQ ID NO: 279803 - DNA, 25 bp, Probe Sequence
tgtcgacgctggctgctagggaagc

SEQ ID NO: 279804 - DNA, 25 bp, Probe Sequence
tgtgtgacgctggcattcttgggac

SEQ ID NO: 279805 - DNA, 25 bp, Probe Sequence
tgtgtccgaggttgctatggtgcca

SEQ ID NO: 279806 - DNA, 25 bp, Probe Sequence
tgtgagccgggcagctaaggcagcc

SEQ ID NO: 279807 - DNA, 25 bp, Probe Sequence
tgtgaccagtggcaggcacaggtcc

SEQ ID NO: 279808 - DNA, 25 bp, Probe Sequence
tgtgaggcagggagccctgagccct

SEQ ID NO: 279809 - DNA, 25 bp, Probe Sequence
tgtgaggcagggagccctgagccct

SEQ ID NO: 279810 - DNA, 25 bp, Probe Sequence
tgtgggatcaggatgcacttaccct

SEQ ID NO: 279811 - DNA, 25 bp, Probe Sequence
tgtggtggcaggcgcctgaaatccc

SEQ ID NO: 279812 - DNA, 25 bp, Probe Sequence
tgtggtggaacatgcctgtggtccc

SEQ ID NO: 279813 - DNA, 25 bp, Probe Sequence
tgtgtctgcaaacatccttattccc

SEQ ID NO: 279814 - DNA, 25 bp, Probe Sequence
tgtggtagctcacacctgtaatccc

SEQ ID NO: 279815 - DNA, 25 bp, Probe Sequence
tgtggtggctcatacctgtaatccc

SEQ ID NO: 279816 - DNA, 25 bp, Probe Sequence
tgtggtggctcatacctgtaatccc

SEQ ID NO: 279817 - DNA, 25 bp, Probe Sequence
tgtggtggtgcacacctgtgatccc

SEQ ID NO: 279818 - DNA, 25 bp, Probe Sequence
tgtatggggctgcagttggtctccc

SEQ ID NO: 279819 - DNA, 25 bp, Probe Sequence
tccgaggaggggtggactccacctt

SEQ ID NO: 279820 - DNA, 25 bp, Probe Sequence
taaggaagcgggagaacggcctcct

SEQ ID NO: 279821 - DNA, 25 bp, Probe Sequence
ttaggactccagagaaccggaccct

SEQ ID NO: 279822 - DNA, 25 bp, Probe Sequence
tgtggggacctcagaacactgtgac

SEQ ID NO: 279823 - DNA, 25 bp, Probe Sequence
tgtgaggagcactcgggacagggac

SEQ ID NO: 279824 - DNA, 25 bp, Probe Sequence
tgtgatcgtcacttggggatgcaga

SEQ ID NO: 279825 - DNA, 25 bp, Probe Sequence
tgtgtgcctagctgtggagaagaga

SEQ ID NO: 279826 - DNA, 25 bp, Probe Sequence
tgtgcttgctagctgggcaagaaag

SEQ ID NO: 279827 - DNA, 25 bp, Probe Sequence
tgtgtggcattgctgaggctaccca

SEQ ID NO: 279828 - DNA, 25 bp, Probe Sequence
tgtgggctgtgccaagtgtgcccaa

SEQ ID NO: 279829 - DNA, 25 bp, Probe Sequence
tgtgggctgtgccaagtgtgcccag

SEQ ID NO: 279830 - DNA, 25 bp, Probe Sequence
tgtgcgtgggctctgtgtggaagag

SEQ ID NO: 279831 - DNA, 25 bp, Probe Sequence
tgtgctggcttcacgtggcaggaag

SEQ ID NO: 279832 - DNA, 25 bp, Probe Sequence
tgtgctatgcctaggtggtgcaaaa

SEQ ID NO: 279833 - DNA, 25 bp, Probe Sequence
tgtgtttctgggctgcgaagacatg

SEQ ID NO: 279834 - DNA, 25 bp, Probe Sequence
tgtctcttctaaaagcggaagcgct

SEQ ID NO: 279835 - DNA, 25 bp, Probe Sequence
tgtctcactgtagacctggacgaca

SEQ ID NO: 279836 - DNA, 25 bp, Probe Sequence
tgtgtcctgtctgagccttatggag

SEQ ID NO: 279837 - DNA, 25 bp, Probe Sequence
tgtgatgggtgatgaggcttttaga

SEQ ID NO: 279838 - DNA, 25 bp, Probe Sequence
tgtgtgtgttgatcaggttgtgtga

SEQ ID NO: 279839 - DNA, 25 bp, Probe Sequence
tgtgcgtgtatatacgcgtgtgtac

SEQ ID NO: 279840 - DNA, 25 bp, Probe Sequence
tgtgtgtgtgttgggggtggtgatc

SEQ ID NO: 279841 - DNA, 25 bp, Probe Sequence
tgtgctttgttggagatggctttac

SEQ ID NO: 279842 - DNA, 25 bp, Probe Sequence
tgtgctgaatgtcttatatgcatta

SEQ ID NO: 279843 - DNA, 25 bp, Probe Sequence
tgtgtggtgtcgtctgtgaatgcta

SEQ ID NO: 279844 - DNA, 25 bp, Probe Sequence
tgtgtggtgtcgtctgtgaatgcta

SEQ ID NO: 279845 - DNA, 25 bp, Probe Sequence
tgtgtggtgtcgtctgtgaatgcta

SEQ ID NO: 279846 - DNA, 25 bp, Probe Sequence
tgtggtgtgtcaacttcatatcttg

SEQ ID NO: 279847 - DNA, 25 bp, Probe Sequence
tgtgggtgatctgcttttatctaaa

SEQ ID NO: 279848 - DNA, 25 bp, Probe Sequence
tgtccagttctggtcttttctgtga

SEQ ID NO: 279849 - DNA, 25 bp, Probe Sequence
tgtgaaattctcttgtctaatctga

SEQ ID NO: 279850 - DNA, 25 bp, Probe Sequence
tgtaagattttgataagactgacaa

SEQ ID NO: 279851 - DNA, 25 bp, Probe Sequence
tgtaaggttttttttgctacgcaat

SEQ ID NO: 279852 - DNA, 25 bp, Probe Sequence
tgtgatagctgtagtttctttcata

SEQ ID NO: 279853 - DNA, 25 bp, Probe Sequence
tgtgaactgtcttccttgttctagc

SEQ ID NO: 279854 - DNA, 25 bp, Probe Sequence
tgtgaactgtcatgcctggattttg

SEQ ID NO: 279855 - DNA, 25 bp, Probe Sequence
tgtgattcgctctagacttttgttg

SEQ ID NO: 279856 - DNA, 25 bp, Probe Sequence
tgtgcttggctttgcaactttgtcc

SEQ ID NO: 279857 - DNA, 25 bp, Probe Sequence
tgtgcctcctaatatcatttgtact

SEQ ID NO: 279858 - DNA, 25 bp, Probe Sequence
tgtgccccaatatcatcaaatggca

SEQ ID NO: 279859 - DNA, 25 bp, Probe Sequence
tgtgcacgtgtatagctcaaagagc

SEQ ID NO: 279860 - DNA, 25 bp, Probe Sequence
tgtcactggctaaagttacatggcc

SEQ ID NO: 279861 - DNA, 25 bp, Probe Sequence
tgtcctgtacacaggtacagcggtg

SEQ ID NO: 279862 - DNA, 25 bp, Probe Sequence
tgtgagcgtaacagcctacattgcc

SEQ ID NO: 279863 - DNA, 25 bp, Probe Sequence
tgtgatcttcccacaatacttgcct

SEQ ID NO: 279864 - DNA, 25 bp, Probe Sequence
tgtgtttacctagtatatgtagact

SEQ ID NO: 279865 - DNA, 25 bp, Probe Sequence
tgtgctttacttgctgaagctaagc

SEQ ID NO: 279866 - DNA, 25 bp, Probe Sequence
tgtgtctatacatttctaagccttg

SEQ ID NO: 279867 - DNA, 25 bp, Probe Sequence
tgtgtgctgtacttttacactcctt

SEQ ID NO: 279868 - DNA, 25 bp, Probe Sequence
tgtgtcttctgcatttacactcgca

SEQ ID NO: 279869 - DNA, 25 bp, Probe Sequence
tgtgtaacctctttacacgcagcgc

SEQ ID NO: 279870 - DNA, 25 bp, Probe Sequence
tgtctcagaactgaataactgcagt

SEQ ID NO: 279871 - DNA, 25 bp, Probe Sequence
tgtcctgaagcccagcgacacagaa

SEQ ID NO: 279872 - DNA, 25 bp, Probe Sequence
tgtcctgaagcccagcgacacagaa

SEQ ID NO: 279873 - DNA, 25 bp, Probe Sequence
tgtcctggtcacccagacacaaaga

SEQ ID NO: 279874 - DNA, 25 bp, Probe Sequence
tgtgctgggtgccccagacacaaga

SEQ ID NO: 279875 - DNA, 25 bp, Probe Sequence
tgtgcatggtggcaccagcgaaggg

SEQ ID NO: 279876 - DNA, 25 bp, Probe Sequence
tgtgcagactgggaccagcgctagc

SEQ ID NO: 279877 - DNA, 25 bp, Probe Sequence
tgtctgctcaaggatccaatcaacc

SEQ ID NO: 279878 - DNA, 25 bp, Probe Sequence
tgtgcagaaagattccaaaggagaa

SEQ ID NO: 279879 - DNA, 25 bp, Probe Sequence
tgtacagaaacagcagaccgagagc

SEQ ID NO: 279880 - DNA, 25 bp, Probe Sequence
tgtgacaaagggccagcagtctacc

SEQ ID NO: 279881 - DNA, 25 bp, Probe Sequence
tgtgggaaggtgtcctgtgtcactc

SEQ ID NO: 279882 - DNA, 25 bp, Probe Sequence
tgtgagggggcttgcttggtatgct

SEQ ID NO: 279883 - DNA, 25 bp, Probe Sequence
tgtgagtggggcatctgttggactt

SEQ ID NO: 279884 - DNA, 25 bp, Probe Sequence
tgtgacaaggtttcgttttcattcc

SEQ ID NO: 279885 - DNA, 25 bp, Probe Sequence
tgtgctaagggtccagtatttattt

SEQ ID NO: 279886 - DNA, 25 bp, Probe Sequence
tgtgttgggtatcagtatcttctct

SEQ ID NO: 279887 - DNA, 25 bp, Probe Sequence
tgtgtctgccaggatccagtgactt

SEQ ID NO: 279888 - DNA, 25 bp, Probe Sequence
tgtgcacttgaggagctcagatttt

SEQ ID NO: 279889 - DNA, 25 bp, Probe Sequence
tgtgcacgtcaggacgctgttctct

SEQ ID NO: 279890 - DNA, 25 bp, Probe Sequence
tgtgatcgtagctcactgcagtctc

SEQ ID NO: 279891 - DNA, 25 bp, Probe Sequence
tgtgacctcgcatatgtatgacatc

SEQ ID NO: 279892 - DNA, 25 bp, Probe Sequence
tgtgtactcgctgagtgtggaccct

SEQ ID NO: 279893 - DNA, 25 bp, Probe Sequence
tgtgatggccaggccaggggacccc

SEQ ID NO: 279894 - DNA, 25 bp, Probe Sequence
tgtgatggccaggccaggggacccc

SEQ ID NO: 279895 - DNA, 25 bp, Probe Sequence
tgtgatggccaggccaggggacccc

SEQ ID NO: 279896 - DNA, 25 bp, Probe Sequence
tgtgatggcgtcacagaagagaccc

SEQ ID NO: 279897 - DNA, 25 bp, Probe Sequence
tgtaggcctcatcttacaggtccta

SEQ ID NO: 279898 - DNA, 25 bp, Probe Sequence
tgtgaagcatccggttactgggcaa

SEQ ID NO: 279899 - DNA, 25 bp, Probe Sequence
tgtgacagagcctggtgaacagtga

SEQ ID NO: 279900 - DNA, 25 bp, Probe Sequence
tgtgcctacctcagatagacagtgc

SEQ ID NO: 279901 - DNA, 25 bp, Probe Sequence
tgtgcactaccatagctacatcagt

SEQ ID NO: 279902 - DNA, 25 bp, Probe Sequence
tgtgtctattattggtgacattgtt

SEQ ID NO: 279903 - DNA, 25 bp, Probe Sequence
tgtgatatgatgctcggctgatttt

SEQ ID NO: 279904 - DNA, 25 bp, Probe Sequence
tgtgtgtgtgtgtgtatatatatat

SEQ ID NO: 279905 - DNA, 25 bp, Probe Sequence
tgtgtggagtgacggaactgcagtg

SEQ ID NO: 279906 - DNA, 25 bp, Probe Sequence
tgtgaggagtgctgtgctacctggt

SEQ ID NO: 279907 - DNA, 25 bp, Probe Sequence
tgtgggcattgtgggctacgtggaa

SEQ ID NO: 279908 - DNA, 25 bp, Probe Sequence
tgtgggttgtcgtcaacagcttgac

SEQ ID NO: 279909 - DNA, 25 bp, Probe Sequence
tgtgaagtgttactacagccttaat

SEQ ID NO: 279910 - DNA, 25 bp, Probe Sequence
tgtctaggctaagtatgcacctaaa

SEQ ID NO: 279911 - DNA, 25 bp, Probe Sequence
tgtgtgggtttttgccattggacaa

SEQ ID NO: 279912 - DNA, 25 bp, Probe Sequence
tgtgtggtgtttgctcactaagcag

SEQ ID NO: 279913 - DNA, 25 bp, Probe Sequence
tgtgtgtggtgtttgctcactaagc

SEQ ID NO: 279914 - DNA, 25 bp, Probe Sequence
tgtgtggtgctgacatggcttctat

SEQ ID NO: 279915 - DNA, 25 bp, Probe Sequence
tgtgagtgtgataaggctgctgcca

SEQ ID NO: 279916 - DNA, 25 bp, Probe Sequence
tgtgggctgctgaagtcagctccgc

SEQ ID NO: 279917 - DNA, 25 bp, Probe Sequence
tgtgaaggtgacttccatccagcac

SEQ ID NO: 279918 - DNA, 25 bp, Probe Sequence
tgtgtagcatattcacccttcaaca

SEQ ID NO: 279919 - DNA, 25 bp, Probe Sequence
tgtgttgatgatggaccacttgacc

SEQ ID NO: 279920 - DNA, 25 bp, Probe Sequence
tgtgatattttgtacatcttactgt

SEQ ID NO: 279921 - DNA, 25 bp, Probe Sequence
tgtgcatagtacgacctttactgtc

SEQ ID NO: 279922 - DNA, 25 bp, Probe Sequence
tgatctaggccctcctgtagatcca

SEQ ID NO: 279923 - DNA, 25 bp, Probe Sequence
tgtctgagatcccggtgctgaagac

SEQ ID NO: 279924 - DNA, 25 bp, Probe Sequence
tgtgctgagccccagtgggttgcac

SEQ ID NO: 279925 - DNA, 25 bp, Probe Sequence
tgtgcatcactgggcttggatttgc

SEQ ID NO: 279926 - DNA, 25 bp, Probe Sequence
tgtgcctatgcgtttgtatatgctc

SEQ ID NO: 279927 - DNA, 25 bp, Probe Sequence
tgtgcttggaatgtgttgatgtgca

SEQ ID NO: 279928 - DNA, 25 bp, Probe Sequence
tgtgcttagaattgctggatgcatt

SEQ ID NO: 279929 - DNA, 25 bp, Probe Sequence
tgtgattgaacagtgctggtctgca

SEQ ID NO: 279930 - DNA, 25 bp, Probe Sequence
tgtgagtgataagtgtcagatcaat

SEQ ID NO: 279931 - DNA, 25 bp, Probe Sequence
tgtgagatgatctgttactgcaact

SEQ ID NO: 279932 - DNA, 25 bp, Probe Sequence
tgtgcaatacagtttcattaactcc

SEQ ID NO: 279933 - DNA, 25 bp, Probe Sequence
tgtgtaaatgtttcttgatctctaa

SEQ ID NO: 279934 - DNA, 25 bp, Probe Sequence
tgtgtgtacctttgtggattcttac

SEQ ID NO: 279935 - DNA, 25 bp, Probe Sequence
tgtgtgttgtttttcgtgttttcca

SEQ ID NO: 279936 - DNA, 25 bp, Probe Sequence
tgtgttttatcttttgtttttccat

SEQ ID NO: 279937 - DNA, 25 bp, Probe Sequence
tgtgaatgttgcttttttttttcct

SEQ ID NO: 279938 - DNA, 25 bp, Probe Sequence
tgtgtatttcttttaactgtgtata

SEQ ID NO: 279939 - DNA, 25 bp, Probe Sequence
tgtgcatggtgctttttaactttca

SEQ ID NO: 279940 - DNA, 25 bp, Probe Sequence
tgtgctgtggcctttgctaaaaaaa

SEQ ID NO: 279941 - DNA, 25 bp, Probe Sequence
tgtgctgtcgccttttagaaggaga

SEQ ID NO: 279942 - DNA, 25 bp, Probe Sequence
tgtgcctcagccctgttaaggggca

SEQ ID NO: 279943 - DNA, 25 bp, Probe Sequence
tgtccagacagcctgtatcttgggg

SEQ ID NO: 279944 - DNA, 25 bp, Probe Sequence
tgtccagcgacactcattcattgaa

SEQ ID NO: 279945 - DNA, 25 bp, Probe Sequence
tgtgcgggtgcactatggcttgtac

SEQ ID NO: 279946 - DNA, 25 bp, Probe Sequence
tgtgtgggtgagaaggtgtggctgc

SEQ ID NO: 279947 - DNA, 25 bp, Probe Sequence
tgtgttgtatggaggagggctggtc

SEQ ID NO: 279948 - DNA, 25 bp, Probe Sequence
tgttggtaggtcctagacgtggttc

SEQ ID NO: 279949 - DNA, 25 bp, Probe Sequence
tgttttctagccccgaggtggtggc

SEQ ID NO: 279950 - DNA, 25 bp, Probe Sequence
tgtgttgactgacgagccgaggggt

SEQ ID NO: 279951 - DNA, 25 bp, Probe Sequence
tgtgctttgcagaggccagggagga

SEQ ID NO: 279952 - DNA, 25 bp, Probe Sequence
tgtgctattgagattccagtggtga

SEQ ID NO: 279953 - DNA, 25 bp, Probe Sequence
tgtgcatttaatacctctgggcaga

SEQ ID NO: 279954 - DNA, 25 bp, Probe Sequence
tgtgttcaatagatttaggagcaga

SEQ ID NO: 279955 - DNA, 25 bp, Probe Sequence
tgtgcccaacgcatgttatagccag

SEQ ID NO: 279956 - DNA, 25 bp, Probe Sequence
tgtcccagaagcaatttaaggagca

SEQ ID NO: 279957 - DNA, 25 bp, Probe Sequence
tgtccgagaagtcaggcacgtagct

SEQ ID NO: 279958 - DNA, 25 bp, Probe Sequence
tgtcacgcagggtcgtagacgtgtc

SEQ ID NO: 279959 - DNA, 25 bp, Probe Sequence
tgtgcactaggcacgtaacctgcaa

SEQ ID NO: 279960 - DNA, 25 bp, Probe Sequence
tgtcttgagcagatcgaaatgccga

SEQ ID NO: 279961 - DNA, 25 bp, Probe Sequence
tgtgcttgacagattttcagccatg

SEQ ID NO: 279962 - DNA, 25 bp, Probe Sequence
tgtgtagcacagaactgcactagga

SEQ ID NO: 279963 - DNA, 25 bp, Probe Sequence
tgtgaagcgatggagctcctcactg

SEQ ID NO: 279964 - DNA, 25 bp, Probe Sequence
tgtgagcaagatgcgcatggccacc

SEQ ID NO: 279965 - DNA, 25 bp, Probe Sequence
tgtgcagagtgaactgccgccgacg

SEQ ID NO: 279966 - DNA, 25 bp, Probe Sequence
tgtgagatgctgtggcccagctgac

SEQ ID NO: 279967 - DNA, 25 bp, Probe Sequence
tgtaagtgaggccctcagcaagccc

SEQ ID NO: 279968 - DNA, 25 bp, Probe Sequence
tgtgaagtgagggctgtgcctaccc

SEQ ID NO: 279969 - DNA, 25 bp, Probe Sequence
tgtgacagggagggtcttactctgt

SEQ ID NO: 279970 - DNA, 25 bp, Probe Sequence
tgtgtaaggtggcctattcctctgt

SEQ ID NO: 279971 - DNA, 25 bp, Probe Sequence
tgtgtagggggttattgcctctgaa

SEQ ID NO: 279972 - DNA, 25 bp, Probe Sequence
tgtgtaagtcaactcttcagcctca

SEQ ID NO: 279973 - DNA, 25 bp, Probe Sequence
tgtgtaaacaattctatggcccagt

SEQ ID NO: 279974 - DNA, 25 bp, Probe Sequence
tgtgtacatcatcatggttccccag

SEQ ID NO: 279975 - DNA, 25 bp, Probe Sequence
tgtgtatacttgtctgttccccaca

SEQ ID NO: 279976 - DNA, 25 bp, Probe Sequence
tgtgctaagttgtcttacacttctc

SEQ ID NO: 279977 - DNA, 25 bp, Probe Sequence
tgtgtaagggttccacattttcaca

SEQ ID NO: 279978 - DNA, 25 bp, Probe Sequence
tgtgtgaaaacattcccttcttcgg

SEQ ID NO: 279979 - DNA, 25 bp, Probe Sequence
tgtgtgaaaacattcccttcttcgg

SEQ ID NO: 279980 - DNA, 25 bp, Probe Sequence
tgtctacataactttcgtaatggcc

SEQ ID NO: 279981 - DNA, 25 bp, Probe Sequence
gaacccaagaggcggaggttgtggt

SEQ ID NO: 279982 - DNA, 25 bp, Probe Sequence
tgtgtagcaaatttcgagcataaga

SEQ ID NO: 279983 - DNA, 25 bp, Probe Sequence
tgtgttcaaatctttgagagtgagc

SEQ ID NO: 279984 - DNA, 25 bp, Probe Sequence
tgtcttaaattatgtggtatcggcc

SEQ ID NO: 279985 - DNA, 25 bp, Probe Sequence
tgtcaaaaagtctgctgtaccgtcc

SEQ ID NO: 279986 - DNA, 25 bp, Probe Sequence
tgtcgcaaaacttacgtgaccccgc

SEQ ID NO: 279987 - DNA, 25 bp, Probe Sequence
tgtctgctaaataaacatgtgccct

SEQ ID NO: 279988 - DNA, 25 bp, Probe Sequence
tgtctcgtaatttatcctggcgttc

SEQ ID NO: 279989 - DNA, 25 bp, Probe Sequence
tgtgctcgtgtgtttagcctacgtt

SEQ ID NO: 279990 - DNA, 25 bp, Probe Sequence
tgtgcatatttgttgtacgttttga

SEQ ID NO: 279991 - DNA, 25 bp, Probe Sequence
tgtgctcttgtcctgtgactagttt

SEQ ID NO: 279992 - DNA, 25 bp, Probe Sequence
tgtgtctgcgttcctgttagcataa

SEQ ID NO: 279993 - DNA, 25 bp, Probe Sequence
tgtctgcgttcctgttagcataatg

SEQ ID NO: 279994 - DNA, 25 bp, Probe Sequence
tgtcttgatccctctccaagagtga

SEQ ID NO: 279995 - DNA, 25 bp, Probe Sequence
tgtctcgaccttgcctgaatggcgg

SEQ ID NO: 279996 - DNA, 25 bp, Probe Sequence
tgtctcgaccttgcctgaatggcgg

SEQ ID NO: 279997 - DNA, 25 bp, Probe Sequence
tgtccgttcttagccaagctgctag

SEQ ID NO: 279998 - DNA, 25 bp, Probe Sequence
tgtctcctcctttaactgagtcatc

SEQ ID NO: 279999 - DNA, 25 bp, Probe Sequence
tgtgcttctaatataaatggtctaa

SEQ ID NO: 280000 - DNA, 25 bp, Probe Sequence
tgtgctgttcctgtaagtttgctat

SEQ ID NO: 280001 - DNA, 25 bp, Probe Sequence
tgtgctttttgacttcagtttgcta

SEQ ID NO: 280002 - DNA, 25 bp, Probe Sequence
tgtgttgttcagagctattttgtac

SEQ ID NO: 280003 - DNA, 25 bp, Probe Sequence
tgtgttgttaaacttcagctttgga

SEQ ID NO: 280004 - DNA, 25 bp, Probe Sequence
tgtgtattttggtttggctgccggc

SEQ ID NO: 280005 - DNA, 25 bp, Probe Sequence
tgtgtcatgtttctttgtgcagcag

SEQ ID NO: 280006 - DNA, 25 bp, Probe Sequence
tgtgatgcggtggtccttgtgacat

SEQ ID NO: 280007 - DNA, 25 bp, Probe Sequence
tgtgtctgagtcatctttgtatctt

SEQ ID NO: 280008 - DNA, 25 bp, Probe Sequence
tgtgcacatgttgtcctagacgctt

SEQ ID NO: 280009 - DNA, 25 bp, Probe Sequence
tgtgtatatatgtgcctcacacctg

SEQ ID NO: 280010 - DNA, 25 bp, Probe Sequence
tgtgtatgatcaaagcgccactgcc

SEQ ID NO: 280011 - DNA, 25 bp, Probe Sequence
tgtgttgtgctgaagggacagccct

SEQ ID NO: 280012 - DNA, 25 bp, Probe Sequence
tgtgtatggccttgggtcacagctc

SEQ ID NO: 280013 - DNA, 25 bp, Probe Sequence
tgtgaatggactctgtgtccctgcc

SEQ ID NO: 280014 - DNA, 25 bp, Probe Sequence
tgtgaagcagttctatgaccaggcc

SEQ ID NO: 280015 - DNA, 25 bp, Probe Sequence
tgtcggagttggagcaccatgctgc

SEQ ID NO: 280016 - DNA, 25 bp, Probe Sequence
tgtccaggttggaggcatctctgac

SEQ ID NO: 280017 - DNA, 25 bp, Probe Sequence
tgtccaggttggagtgcagcggcgc

SEQ ID NO: 280018 - DNA, 25 bp, Probe Sequence
tgtgccagccttctcttatgggcac

SEQ ID NO: 280019 - DNA, 25 bp, Probe Sequence
tgtgccagccttctcttatgggcac

SEQ ID NO: 280020 - DNA, 25 bp, Probe Sequence
tgtgccagccttctcttatgggcac

SEQ ID NO: 280021 - DNA, 25 bp, Probe Sequence
tgtctcgttgatctaatattgacag

SEQ ID NO: 280022 - DNA, 25 bp, Probe Sequence
tgtccgtggtcgtcagtttaacaga

SEQ ID NO: 280023 - DNA, 25 bp, Probe Sequence
tgtgccgttttgttgttattcacat

SEQ ID NO: 280024 - DNA, 25 bp, Probe Sequence
tgtgcagtttttcatttcagatgga

SEQ ID NO: 280025 - DNA, 25 bp, Probe Sequence
tgtgctgtttttcctcatacaagta

SEQ ID NO: 280026 - DNA, 25 bp, Probe Sequence
tgtgcctttcaactccagaaacatt

SEQ ID NO: 280027 - DNA, 25 bp, Probe Sequence
tgtcctttgggatgaaagccacgta

SEQ ID NO: 280028 - DNA, 25 bp, Probe Sequence
tccagtttttgaggagccagccagg

SEQ ID NO: 280029 - DNA, 25 bp, Probe Sequence
tgtgcacttttacaagccgcaaagg

SEQ ID NO: 280030 - DNA, 25 bp, Probe Sequence
tgtgatcctgttcctcaacaagcaa

SEQ ID NO: 280031 - DNA, 25 bp, Probe Sequence
tgtgatcctgttcctcaacaagcaa

SEQ ID NO: 280032 - DNA, 25 bp, Probe Sequence
tgtctcccttgagaaaacaactcca

SEQ ID NO: 280033 - DNA, 25 bp, Probe Sequence
tgtctgggttgacctaggccaattc

SEQ ID NO: 280034 - DNA, 25 bp, Probe Sequence
tgtgctatgcgcttcaactagacct

SEQ ID NO: 280035 - DNA, 25 bp, Probe Sequence
tgtgttgctgaaagactacctcgtt

SEQ ID NO: 280036 - DNA, 25 bp, Probe Sequence
tgtgtatctgagcacgtattctcgt

SEQ ID NO: 280037 - DNA, 25 bp, Probe Sequence
tgtgtactctgcacgtatatctctt

SEQ ID NO: 280038 - DNA, 25 bp, Probe Sequence
tgtgctaccatagatgtgacatttt

SEQ ID NO: 280039 - DNA, 25 bp, Probe Sequence
tgtgtacctgtaatctcagctactc

SEQ ID NO: 280040 - DNA, 25 bp, Probe Sequence
tgtgtacctgaaagctcctggcaat

SEQ ID NO: 280041 - DNA, 25 bp, Probe Sequence
tgtttgccgtatagatttacaataa

SEQ ID NO: 280042 - DNA, 25 bp, Probe Sequence
tgtctacctgtttcttctacaagat

SEQ ID NO: 280043 - DNA, 25 bp, Probe Sequence
tgtgtaatagtttccctagaagcta

SEQ ID NO: 280044 - DNA, 25 bp, Probe Sequence
tgtgtaattcttttccagaaggaga

SEQ ID NO: 280045 - DNA, 25 bp, Probe Sequence
tgtgatacccatagcttccatgaga

SEQ ID NO: 280046 - DNA, 25 bp, Probe Sequence
tgtgtccctcaagatccagacactc

SEQ ID NO: 280047 - DNA, 25 bp, Probe Sequence
tgtgtcaccatcactactcaagacc

SEQ ID NO: 280048 - DNA, 25 bp, Probe Sequence
tgtgtacatctgagcatcccaaaac

SEQ ID NO: 280049 - DNA, 25 bp, Probe Sequence
tgtgtaactcattcaaccataaaaa

SEQ ID NO: 280050 - DNA, 25 bp, Probe Sequence
tgctgtaacattgaaggaaagacca

SEQ ID NO: 280051 - DNA, 25 bp, Probe Sequence
tgtaatgaacttatggaaagcccat

SEQ ID NO: 280052 - DNA, 25 bp, Probe Sequence
tctaacaaagggctaatacccagaa

SEQ ID NO: 280053 - DNA, 25 bp, Probe Sequence
tgctagccaaagcggtagcaaacca

SEQ ID NO: 280054 - DNA, 25 bp, Probe Sequence
tgtgagctcgacaggttgaaaaata

SEQ ID NO: 280055 - DNA, 25 bp, Probe Sequence
tgtgatgcctatgactttgagaaac

SEQ ID NO: 280056 - DNA, 25 bp, Probe Sequence
tgtgtactcatctcattgtgaacta

SEQ ID NO: 280057 - DNA, 25 bp, Probe Sequence
tgtgacactcatgctgtctgtgtat

SEQ ID NO: 280058 - DNA, 25 bp, Probe Sequence
tgtcagcacctggcagcttgtgaga

SEQ ID NO: 280059 - DNA, 25 bp, Probe Sequence
tgtgacaccttaccggagtaaaagt

SEQ ID NO: 280060 - DNA, 25 bp, Probe Sequence
tgtgctccctctgccaggaggagaa

SEQ ID NO: 280061 - DNA, 25 bp, Probe Sequence
tgtgctccctctgccaggaggagaa

SEQ ID NO: 280062 - DNA, 25 bp, Probe Sequence
tgtgtcactctcaacacacacagct

SEQ ID NO: 280063 - DNA, 25 bp, Probe Sequence
tgtgaccgcatcaaacagtctgcct

SEQ ID NO: 280064 - DNA, 25 bp, Probe Sequence
tgtcccatctaaacagtcgtcatcc

SEQ ID NO: 280065 - DNA, 25 bp, Probe Sequence
tgtgaccttaggaagtctctgcccc

SEQ ID NO: 280066 - DNA, 25 bp, Probe Sequence
tgtgacctggaggacagtgtgtgcc

SEQ ID NO: 280067 - DNA, 25 bp, Probe Sequence
tgtgacgggaaggcaggtgtgactc

SEQ ID NO: 280068 - DNA, 25 bp, Probe Sequence
tgtgccagcttccaacaggttactg

SEQ ID NO: 280069 - DNA, 25 bp, Probe Sequence
tgtctagtggcacactagttttggc

SEQ ID NO: 280070 - DNA, 25 bp, Probe Sequence
tgtcgcaagtcacagaattatttga

SEQ ID NO: 280071 - DNA, 25 bp, Probe Sequence
tgtccataggccacactttaatatc

SEQ ID NO: 280072 - DNA, 25 bp, Probe Sequence
tgtcccaatgacaggctctatcagt

SEQ ID NO: 280073 - DNA, 25 bp, Probe Sequence
tgtccaatatgtgcagcgttacctg

SEQ ID NO: 280074 - DNA, 25 bp, Probe Sequence
tgtccagatttgtcgtgttacagtt

SEQ ID NO: 280075 - DNA, 25 bp, Probe Sequence
tgtcgatatgttcggcttttcatgt

SEQ ID NO: 280076 - DNA, 25 bp, Probe Sequence
tgtcgactatatgagattgtatcca

SEQ ID NO: 280077 - DNA, 25 bp, Probe Sequence
tgtcttgcttatggcatgagggacc

SEQ ID NO: 280078 - DNA, 25 bp, Probe Sequence
tgtcgtgcctacaatcaagaattca

SEQ ID NO: 280079 - DNA, 25 bp, Probe Sequence
tgtcgtgcaccgatgagaactctcc

SEQ ID NO: 280080 - DNA, 25 bp, Probe Sequence
tgtcgtatccggagagagctatata

SEQ ID NO: 280081 - DNA, 25 bp, Probe Sequence
tgtcctatggctgggggcactagga

SEQ ID NO: 280082 - DNA, 25 bp, Probe Sequence
tgtcctggcactgtggccaagaggt

SEQ ID NO: 280083 - DNA, 25 bp, Probe Sequence
tgtcatcgctccactgagccaagat

SEQ ID NO: 280084 - DNA, 25 bp, Probe Sequence
tgtcactctctaaatgaccaaagtt

SEQ ID NO: 280085 - DNA, 25 bp, Probe Sequence
tgtcttcctgtaagaccttcgggtc

SEQ ID NO: 280086 - DNA, 25 bp, Probe Sequence
tgatcttgggcagaacataccgggt

SEQ ID NO: 280087 - DNA, 25 bp, Probe Sequence
tgtgttgatggtgtagctcccaggc

SEQ ID NO: 280088 - DNA, 25 bp, Probe Sequence
tgttgctatcggggactacaatggc

SEQ ID NO: 280089 - DNA, 25 bp, Probe Sequence
tgtctgtacccagactccacatgac

SEQ ID NO: 280090 - DNA, 25 bp, Probe Sequence
tgtgttagcctcagacactactgag

SEQ ID NO: 280091 - DNA, 25 bp, Probe Sequence
tgtgctgtacctgacaacttcaagt

SEQ ID NO: 280092 - DNA, 25 bp, Probe Sequence
tgtgctatccctgtacgcctctggc

SEQ ID NO: 280093 - DNA, 25 bp, Probe Sequence
tgtgctatccgcaggaaccgcgaga

SEQ ID NO: 280094 - DNA, 25 bp, Probe Sequence
tgtgtatgccgaggtgaacgccgat

SEQ ID NO: 280095 - DNA, 25 bp, Probe Sequence
tgtgatgatcgccgctgtgaagacc

SEQ ID NO: 280096 - DNA, 25 bp, Probe Sequence
tgtgagatcgcggtggaggaggctg

SEQ ID NO: 280097 - DNA, 25 bp, Probe Sequence
tgtgaccgagctggctaacaggctt

SEQ ID NO: 280098 - DNA, 25 bp, Probe Sequence
tgtgaccgagctataaattttttgt

SEQ ID NO: 280099 - DNA, 25 bp, Probe Sequence
tgtgacactgctcttcaaatatttt

SEQ ID NO: 280100 - DNA, 25 bp, Probe Sequence
tgtgcagccttggtggcaaatatct

SEQ ID NO: 280101 - DNA, 25 bp, Probe Sequence
tgctcaggaatggcccacaaatctg

SEQ ID NO: 280102 - DNA, 25 bp, Probe Sequence
tgtagctgatgatccgaataactac

SEQ ID NO: 280103 - DNA, 25 bp, Probe Sequence
tgtcctcatcaagcgtaataccacc

SEQ ID NO: 280104 - DNA, 25 bp, Probe Sequence
tgtcccgaagccggatgcatacgac

SEQ ID NO: 280105 - DNA, 25 bp, Probe Sequence
tgtgatcaccaacagggaaagacat

SEQ ID NO: 280106 - DNA, 25 bp, Probe Sequence
tgtgatcactttcagtggtgcagga

SEQ ID NO: 280107 - DNA, 25 bp, Probe Sequence
tgtgatcaagtaaatgtgctgtaga

SEQ ID NO: 280108 - DNA, 25 bp, Probe Sequence
tgtgacaaggatgggtgcatgggca

SEQ ID NO: 280109 - DNA, 25 bp, Probe Sequence
tgtgcacgatgccatccttgaggac

SEQ ID NO: 280110 - DNA, 25 bp, Probe Sequence
tgtgccgactccgtggaggaagtaa

SEQ ID NO: 280111 - DNA, 25 bp, Probe Sequence
tgtgccgcagcgccatagaaggaga

SEQ ID NO: 280112 - DNA, 25 bp, Probe Sequence
tgtgctgccacggcaggcccaggcc

SEQ ID NO: 280113 - DNA, 25 bp, Probe Sequence
tgtcgccaggcttgagtccagtggc

SEQ ID NO: 280114 - DNA, 25 bp, Probe Sequence
tgtccacaggcctgatccagaatgg

SEQ ID NO: 280115 - DNA, 25 bp, Probe Sequence
tgtccaatggccgctagtgactcag

SEQ ID NO: 280116 - DNA, 25 bp, Probe Sequence
tgtccagatggttaccatttgccac

SEQ ID NO: 280117 - DNA, 25 bp, Probe Sequence
tgtccagaggtgaggctgggccctc

SEQ ID NO: 280118 - DNA, 25 bp, Probe Sequence
tgtccagaggtgaggctgggccctc

SEQ ID NO: 280119 - DNA, 25 bp, Probe Sequence
tgtgccatggggcggggggtatcac

SEQ ID NO: 280120 - DNA, 25 bp, Probe Sequence
tgtgtatgggggctgtgacggaaac

SEQ ID NO: 280121 - DNA, 25 bp, Probe Sequence
tgtgcttgggggagacaccccacct

SEQ ID NO: 280122 - DNA, 25 bp, Probe Sequence
tgtccgaggacgagaacctggcctt

SEQ ID NO: 280123 - DNA, 25 bp, Probe Sequence
tgtcgggcggtgagcaatcgcaggc

SEQ ID NO: 280124 - DNA, 25 bp, Probe Sequence
tgtcggggccaggtacatccagaca

SEQ ID NO: 280125 - DNA, 25 bp, Probe Sequence
tgtctggggttggctctcttaaccc

SEQ ID NO: 280126 - DNA, 25 bp, Probe Sequence
tgtaagatgggggcctgttaacagg

SEQ ID NO: 280127 - DNA, 25 bp, Probe Sequence
tgtgaggagggggcactcctctcca

SEQ ID NO: 280128 - DNA, 25 bp, Probe Sequence
tgtgagtggctgagccagctccttg

SEQ ID NO: 280129 - DNA, 25 bp, Probe Sequence
tgtgagggacatgctcacctctagc

SEQ ID NO: 280130 - DNA, 25 bp, Probe Sequence
tgtgaggtggatgtcccaggcagag

SEQ ID NO: 280131 - DNA, 25 bp, Probe Sequence
tgtgagggaagctgcccggcaaagc

SEQ ID NO: 280132 - DNA, 25 bp, Probe Sequence
tgtcagggacgttgcctgagcccaa

SEQ ID NO: 280133 - DNA, 25 bp, Probe Sequence
tgtgagcaggcgctggctgctgagc

SEQ ID NO: 280134 - DNA, 25 bp, Probe Sequence
tgtcagcacagacgcatgggctgct

SEQ ID NO: 280135 - DNA, 25 bp, Probe Sequence
tgtgagaaaccttgccatctataag

SEQ ID NO: 280136 - DNA, 25 bp, Probe Sequence
tgtgatatatttcccctcttgaaga

SEQ ID NO: 280137 - DNA, 25 bp, Probe Sequence
tgtgattatcttctccacatctgaa

SEQ ID NO: 280138 - DNA, 25 bp, Probe Sequence
tgtgtatattatctcttgctctaaa

SEQ ID NO: 280139 - DNA, 25 bp, Probe Sequence
tgtgtatttcacaatgtcgtgctaa

SEQ ID NO: 280140 - DNA, 25 bp, Probe Sequence
tgtgaacctcacaggcaggctaaac

SEQ ID NO: 280141 - DNA, 25 bp, Probe Sequence
tgtagacttccaaaatggttaacct

SEQ ID NO: 280142 - DNA, 25 bp, Probe Sequence
tgtgagcaatgtgctgaaagagata

SEQ ID NO: 280143 - DNA, 25 bp, Probe Sequence
tgtgaactgtgaacacatcaaatca

SEQ ID NO: 280144 - DNA, 25 bp, Probe Sequence
tgtgaagaggcaccacccagtgcag

SEQ ID NO: 280145 - DNA, 25 bp, Probe Sequence
tgtgaacacagcctagcaccaggga

SEQ ID NO: 280146 - DNA, 25 bp, Probe Sequence
tgtgcaacaaatctgcccttgtacc

SEQ ID NO: 280147 - DNA, 25 bp, Probe Sequence
tgtgccaatgactgtcaccttcatc

SEQ ID NO: 280148 - DNA, 25 bp, Probe Sequence
tgtagccatggaggtgcggccatca

SEQ ID NO: 280149 - DNA, 25 bp, Probe Sequence
tgtactgtgagaagcatgcccgcca

SEQ ID NO: 280150 - DNA, 25 bp, Probe Sequence
tgtactgtgagaagcatgcccgcca

SEQ ID NO: 280151 - DNA, 25 bp, Probe Sequence
tgtgacttcaagagcctctggcatc

SEQ ID NO: 280152 - DNA, 25 bp, Probe Sequence
tgtgctttcctcagcagtatggctc

SEQ ID NO: 280153 - DNA, 25 bp, Probe Sequence
tgtctgtgtcccatggtcatagtca

SEQ ID NO: 280154 - DNA, 25 bp, Probe Sequence
tgtctctggacaggtggcttggcca

SEQ ID NO: 280155 - DNA, 25 bp, Probe Sequence
tgtcctggtggcgtggtctatggag

SEQ ID NO: 280156 - DNA, 25 bp, Probe Sequence
tgtcatctagtctcaagtatagcga

SEQ ID NO: 280157 - DNA, 25 bp, Probe Sequence
tgtctggagttaaagataatctact

SEQ ID NO: 280158 - DNA, 25 bp, Probe Sequence
tgtctcagaggttaaaaacattctg

SEQ ID NO: 280159 - DNA, 25 bp, Probe Sequence
tgtcccaggctacaggaattctctg

SEQ ID NO: 280160 - DNA, 25 bp, Probe Sequence
tgtcccagtctattcgggagtctga

SEQ ID NO: 280161 - DNA, 25 bp, Probe Sequence
tgtccctgtcttgtgggagatgcgt

SEQ ID NO: 280162 - DNA, 25 bp, Probe Sequence
tgatccttgcctttgtgggagctgc

SEQ ID NO: 280163 - DNA, 25 bp, Probe Sequence
tgatccttgcctttgtgggagctgc

SEQ ID NO: 280164 - DNA, 25 bp, Probe Sequence
tgtcctagacgcttcggaggctgag

SEQ ID NO: 280165 - DNA, 25 bp, Probe Sequence
tgattacagacgttcgggggggtgg

SEQ ID NO: 280166 - DNA, 25 bp, Probe Sequence
tgttgactgacgagccgaggggtgg

SEQ ID NO: 280167 - DNA, 25 bp, Probe Sequence
tttacaagaagtgcagaggggtttt

SEQ ID NO: 280168 - DNA, 25 bp, Probe Sequence
tgttaagggctgctcgggggatttc

SEQ ID NO: 280169 - DNA, 25 bp, Probe Sequence
tgttgaagccctgaatggcaaggag

SEQ ID NO: 280170 - DNA, 25 bp, Probe Sequence
tgtcgtagcctctgttgtcaatgga

SEQ ID NO: 280171 - DNA, 25 bp, Probe Sequence
tgtccatgaccctgattacctggat

SEQ ID NO: 280172 - DNA, 25 bp, Probe Sequence
tgtgcctgacggtgaacactctgga

SEQ ID NO: 280173 - DNA, 25 bp, Probe Sequence
tgtgctaccgtagtgaatcactgtg

SEQ ID NO: 280174 - DNA, 25 bp, Probe Sequence
tgtgttcctgtaggcataatatgag

SEQ ID NO: 280175 - DNA, 25 bp, Probe Sequence
tgtgatctgatcataggcaattaga

SEQ ID NO: 280176 - DNA, 25 bp, Probe Sequence
tgtgatctttctacagcagcttcag

SEQ ID NO: 280177 - DNA, 25 bp, Probe Sequence
tgtgattatgccattgcactccagc

SEQ ID NO: 280178 - DNA, 25 bp, Probe Sequence
tgtgacattccaggacactgccagc

SEQ ID NO: 280179 - DNA, 25 bp, Probe Sequence
tgtgacattccaggacactgccagc

SEQ ID NO: 280180 - DNA, 25 bp, Probe Sequence
tgtgaaggtcatggacctgcccacc

SEQ ID NO: 280181 - DNA, 25 bp, Probe Sequence
tgtgaggacatcggacgcagcctcc

SEQ ID NO: 280182 - DNA, 25 bp, Probe Sequence
tgtcagaaatcagatcagccctcaa

SEQ ID NO: 280183 - DNA, 25 bp, Probe Sequence
tgtcgatgcactacagtgaccccaa

SEQ ID NO: 280184 - DNA, 25 bp, Probe Sequence
tgtgctaacatttcagacctgccaa

SEQ ID NO: 280185 - DNA, 25 bp, Probe Sequence
tgtcgaagcattaaacagcctcatt

SEQ ID NO: 280186 - DNA, 25 bp, Probe Sequence
tgtcagaagcggaagctcaggccct

SEQ ID NO: 280187 - DNA, 25 bp, Probe Sequence
tgtcagatgagctgggctcacaagc

SEQ ID NO: 280188 - DNA, 25 bp, Probe Sequence
tgtcgtgagccagtggtccacgtct

SEQ ID NO: 280189 - DNA, 25 bp, Probe Sequence
tgatcagctacagcttgtcaccgtt

SEQ ID NO: 280190 - DNA, 25 bp, Probe Sequence
tgtgacttcatgctctgataactgc

SEQ ID NO: 280191 - DNA, 25 bp, Probe Sequence
tgtgacttcatgtgttccattgctc

SEQ ID NO: 280192 - DNA, 25 bp, Probe Sequence
tgtgcacagtagtgatctcctcggt

SEQ ID NO: 280193 - DNA, 25 bp, Probe Sequence
tgtgaaaagacgtcaatatctgctc

SEQ ID NO: 280194 - DNA, 25 bp, Probe Sequence
tgtgataaagccttttattgggttt

SEQ ID NO: 280195 - DNA, 25 bp, Probe Sequence
tgtatagaatccatttgtcatcagg

SEQ ID NO: 280196 - DNA, 25 bp, Probe Sequence
tgtaagtaccaggtcatgtccatcc

SEQ ID NO: 280197 - DNA, 25 bp, Probe Sequence
tgtctggtcaccagaccatccatct

SEQ ID NO: 280198 - DNA, 25 bp, Probe Sequence
tgtctggtatctgaactgagcctgc

SEQ ID NO: 280199 - DNA, 25 bp, Probe Sequence
tgtcggttttcaccatggagcagct

SEQ ID NO: 280200 - DNA, 25 bp, Probe Sequence
tgtgcagcgttacctggaggcgatc

SEQ ID NO: 280201 - DNA, 25 bp, Probe Sequence
tgtgaagtgctagctgaaggatgag

SEQ ID NO: 280202 - DNA, 25 bp, Probe Sequence
tgtaaatgtccctttagatggtttc

SEQ ID NO: 280203 - DNA, 25 bp, Probe Sequence
tgtacacagtcagctttggggttcc

SEQ ID NO: 280204 - DNA, 25 bp, Probe Sequence
tgtgacacagccatgtcttgggctt

SEQ ID NO: 280205 - DNA, 25 bp, Probe Sequence
tgtgcaacagcaaggacggcggggc

SEQ ID NO: 280206 - DNA, 25 bp, Probe Sequence
tgtcctgcatcaagaaggcctcggg

SEQ ID NO: 280207 - DNA, 25 bp, Probe Sequence
tgtgctgttcatcacaggcatcatc

SEQ ID NO: 280208 - DNA, 25 bp, Probe Sequence
tgtgctttcagttagccttctgtag

SEQ ID NO: 280209 - DNA, 25 bp, Probe Sequence
tgtgctttagttacattgtcagact

SEQ ID NO: 280210 - DNA, 25 bp, Probe Sequence
tgtgacttacttatctgtatcggtc

SEQ ID NO: 280211 - DNA, 25 bp, Probe Sequence
tgtacttaccgaagcgaacgcagcc

SEQ ID NO: 280212 - DNA, 25 bp, Probe Sequence
tgtccttccctgtggaattgccgag

SEQ ID NO: 280213 - DNA, 25 bp, Probe Sequence
tgtccttccctgtggaattgccgag

SEQ ID NO: 280214 - DNA, 25 bp, Probe Sequence
tgtctcttccagggggaattctcag

SEQ ID NO: 280215 - DNA, 25 bp, Probe Sequence
tgtctgtatacactgggtaacctga

SEQ ID NO: 280216 - DNA, 25 bp, Probe Sequence
tgtctttacactgacttcaggatag

SEQ ID NO: 280217 - DNA, 25 bp, Probe Sequence
tgtccttatccattacctcaaagca

SEQ ID NO: 280218 - DNA, 25 bp, Probe Sequence
tgtcctctacctcacgtgaaataaa

SEQ ID NO: 280219 - DNA, 25 bp, Probe Sequence
tgtcagtgaacccgccgttattaaa

SEQ ID NO: 280220 - DNA, 25 bp, Probe Sequence
tgtcagtgaacccgccgttattaaa

SEQ ID NO: 280221 - DNA, 25 bp, Probe Sequence
tgtcagtacctagccgaatattata

SEQ ID NO: 280222 - DNA, 25 bp, Probe Sequence
tgtgagatacctgcccaggctgtac

SEQ ID NO: 280223 - DNA, 25 bp, Probe Sequence
tgagaatacacccttcgtggtaccc

SEQ ID NO: 280224 - DNA, 25 bp, Probe Sequence
tgtgaaaagttgcccgggtgcagcg

SEQ ID NO: 280225 - DNA, 25 bp, Probe Sequence
tgtgaaataaaccctgtttgcacct

SEQ ID NO: 280226 - DNA, 25 bp, Probe Sequence
tgtgaagaagtgaaacctttccctt

SEQ ID NO: 280227 - DNA, 25 bp, Probe Sequence
tgtaaaataattcccttctcccatt

SEQ ID NO: 280228 - DNA, 25 bp, Probe Sequence
tgtcagaaacaaggacctctcccgc

SEQ ID NO: 280229 - DNA, 25 bp, Probe Sequence
tgtcagtaatttcacctggcccatc

SEQ ID NO: 280230 - DNA, 25 bp, Probe Sequence
tgtcagtgaagaagccccagggcca

SEQ ID NO: 280231 - DNA, 25 bp, Probe Sequence
tgtgactaagaagcctggggagcag

SEQ ID NO: 280232 - DNA, 25 bp, Probe Sequence
tgttggagtagtgagctggggaagg

SEQ ID NO: 280233 - DNA, 25 bp, Probe Sequence
tgtgctcaagtaccagaaggggaac

SEQ ID NO: 280234 - DNA, 25 bp, Probe Sequence
tgtgccggctacttggagggggagc

SEQ ID NO: 280235 - DNA, 25 bp, Probe Sequence
tgtcctgtgcccttgaattgggaag

SEQ ID NO: 280236 - DNA, 25 bp, Probe Sequence
tgtccgcccagccagataggggaag

SEQ ID NO: 280237 - DNA, 25 bp, Probe Sequence
tgtcccccatgcctggaagaggagc

SEQ ID NO: 280238 - DNA, 25 bp, Probe Sequence
tgtcccccatgcctggaagaggagc

SEQ ID NO: 280239 - DNA, 25 bp, Probe Sequence
tgtacccgtggtgagacaagaccca

SEQ ID NO: 280240 - DNA, 25 bp, Probe Sequence
tgtccccgtgttgcatgacagcatt

SEQ ID NO: 280241 - DNA, 25 bp, Probe Sequence
tgtccccgtgttgcatgacagcatt

SEQ ID NO: 280242 - DNA, 25 bp, Probe Sequence
tgtccccgtatttcaaattgtacct

SEQ ID NO: 280243 - DNA, 25 bp, Probe Sequence
tgtccccagtttctctgatagtgac

SEQ ID NO: 280244 - DNA, 25 bp, Probe Sequence
tgtccttcagttctgttatactcca

SEQ ID NO: 280245 - DNA, 25 bp, Probe Sequence
tgtcctatgagatgttttggtccca

SEQ ID NO: 280246 - DNA, 25 bp, Probe Sequence
tgtctaaatgaaattttgtatcctt

SEQ ID NO: 280247 - DNA, 25 bp, Probe Sequence
tgtcccaatgacttttctttactcc

SEQ ID NO: 280248 - DNA, 25 bp, Probe Sequence
tgtcctaagacagcttcaagacatc

SEQ ID NO: 280249 - DNA, 25 bp, Probe Sequence
tgtctctaaagcactaccgattctt

SEQ ID NO: 280250 - DNA, 25 bp, Probe Sequence
tgtcttattactttacctaatagtt

SEQ ID NO: 280251 - DNA, 25 bp, Probe Sequence
tgtcaccttcctttaccaaataact

SEQ ID NO: 280252 - DNA, 25 bp, Probe Sequence
tgaggccctgccactattaaaaact

SEQ ID NO: 280253 - DNA, 25 bp, Probe Sequence
tgtcgcccttagtcatataaccaaa

SEQ ID NO: 280254 - DNA, 25 bp, Probe Sequence
tgtgcacacctttgactacaactgc

SEQ ID NO: 280255 - DNA, 25 bp, Probe Sequence
tgtgccgactgtgggctgaacctga

SEQ ID NO: 280256 - DNA, 25 bp, Probe Sequence
tgtgccgactgtgggctgaacctga

SEQ ID NO: 280257 - DNA, 25 bp, Probe Sequence
tgtcccacatgtggaagaaccttta

SEQ ID NO: 280258 - DNA, 25 bp, Probe Sequence
tgtgcccacgaggcaggggcttttg

SEQ ID NO: 280259 - DNA, 25 bp, Probe Sequence
tgttctcacagtgtggggcagccgt

SEQ ID NO: 280260 - DNA, 25 bp, Probe Sequence
tgtagctcagcttttgggctagccc

SEQ ID NO: 280261 - DNA, 25 bp, Probe Sequence
tgtgaatcaggactcggagctcaag

SEQ ID NO: 280262 - DNA, 25 bp, Probe Sequence
tgtgacttaaagtgactcagagata

SEQ ID NO: 280263 - DNA, 25 bp, Probe Sequence
tgtgactttgtcacagcccaagata

SEQ ID NO: 280264 - DNA, 25 bp, Probe Sequence
tgtgcaacttcttggccagccaagt

SEQ ID NO: 280265 - DNA, 25 bp, Probe Sequence
tgtgaagctttacgcgcacacggac

SEQ ID NO: 280266 - DNA, 25 bp, Probe Sequence
tgtgagcagcacttgacagctctcc

SEQ ID NO: 280267 - DNA, 25 bp, Probe Sequence
tgtgaagaatggtagctccccagcc

SEQ ID NO: 280268 - DNA, 25 bp, Probe Sequence
tgtgcaaaaggatggccaccactgc

SEQ ID NO: 280269 - DNA, 25 bp, Probe Sequence
tgtgacaaaggatgcccagcagcac

SEQ ID NO: 280270 - DNA, 25 bp, Probe Sequence
tgtgctcaagggtacgccgctgagc

SEQ ID NO: 280271 - DNA, 25 bp, Probe Sequence
tgtctcagcgggcagtgcccagagc

SEQ ID NO: 280272 - DNA, 25 bp, Probe Sequence
tgtgcctgcgtgtaaaccacagcct

SEQ ID NO: 280273 - DNA, 25 bp, Probe Sequence
tgtaacgtataaactcaagcctttt

SEQ ID NO: 280274 - DNA, 25 bp, Probe Sequence
tgtcaagtggaatccttccctttcc

SEQ ID NO: 280275 - DNA, 25 bp, Probe Sequence
tgtcaagtcatttgacacctccctc

SEQ ID NO: 280276 - DNA, 25 bp, Probe Sequence
tgtcaagactccgacacctgaacca

SEQ ID NO: 280277 - DNA, 25 bp, Probe Sequence
tgtcatcattcagagcacagcctga

SEQ ID NO: 280278 - DNA, 25 bp, Probe Sequence
tgtctcaaagattaagccatgcatg

SEQ ID NO: 280279 - DNA, 25 bp, Probe Sequence
tgtgaaatgtattatcaccagcaga

SEQ ID NO: 280280 - DNA, 25 bp, Probe Sequence
tgtgcaatgttcaatacctcatata

SEQ ID NO: 280281 - DNA, 25 bp, Probe Sequence
tgtgaaattctctttcctgtagtcc

SEQ ID NO: 280282 - DNA, 25 bp, Probe Sequence
tgtgaatttatcgttcactccgctc

SEQ ID NO: 280283 - DNA, 25 bp, Probe Sequence
tgtgacatttgtggccacactgcct

SEQ ID NO: 280284 - DNA, 25 bp, Probe Sequence
tgtgcctcttgatgcaggtctcaat

SEQ ID NO: 280285 - DNA, 25 bp, Probe Sequence
tgtgctgctttatgacaccatcttc

SEQ ID NO: 280286 - DNA, 25 bp, Probe Sequence
tgtctgttgtgatccagagcaatca

SEQ ID NO: 280287 - DNA, 25 bp, Probe Sequence
tgtgcctagtagaacagcaagagca

SEQ ID NO: 280288 - DNA, 25 bp, Probe Sequence
tgtgctgtaacgacgagagcggcga

SEQ ID NO: 280289 - DNA, 25 bp, Probe Sequence
tgtgagagaagcagcgtggcggcca

SEQ ID NO: 280290 - DNA, 25 bp, Probe Sequence
tgtgaaaagcatcctgaggccgccc

SEQ ID NO: 280291 - DNA, 25 bp, Probe Sequence
tgtgagaaatcaccgattgcccttg

SEQ ID NO: 280292 - DNA, 25 bp, Probe Sequence
tgtgaaaaacacaattttgcctttt

SEQ ID NO: 280293 - DNA, 25 bp, Probe Sequence
tgtgaaatataagcctgcggcctta

SEQ ID NO: 280294 - DNA, 25 bp, Probe Sequence
tgtgcaaaaatctcttcccgatcta

SEQ ID NO: 280295 - DNA, 25 bp, Probe Sequence
tgtgcagaaacatatttccgcggaa

SEQ ID NO: 280296 - DNA, 25 bp, Probe Sequence
tgtgcatcaacagtctgtttcctgg

SEQ ID NO: 280297 - DNA, 25 bp, Probe Sequence
tgtcatcccacatgaactcctgatg

SEQ ID NO: 280298 - DNA, 25 bp, Probe Sequence
tgtgctgccaactgagttatctagt

SEQ ID NO: 280299 - DNA, 25 bp, Probe Sequence
tgtgaccaatattagcttattctgt

SEQ ID NO: 280300 - DNA, 25 bp, Probe Sequence
tgtgaccatgttaacattcatatca

SEQ ID NO: 280301 - DNA, 25 bp, Probe Sequence
tgtgaccatgtttcctctcaataaa

SEQ ID NO: 280302 - DNA, 25 bp, Probe Sequence
tctgactcggtttctccaaactgaa

SEQ ID NO: 280303 - DNA, 25 bp, Probe Sequence
tgtgactctatgtttgctccagaca

SEQ ID NO: 280304 - DNA, 25 bp, Probe Sequence
tgtgacgtcatgtcagtactccaaa

SEQ ID NO: 280305 - DNA, 25 bp, Probe Sequence
tgtgactgaggctagaagctgccat

SEQ ID NO: 280306 - DNA, 25 bp, Probe Sequence
tgtgaatgagcggctgatcagcatg

SEQ ID NO: 280307 - DNA, 25 bp, Probe Sequence
tgtgaatggcgtgtagatgagctgt

SEQ ID NO: 280308 - DNA, 25 bp, Probe Sequence
tgtgaagagttgagtgctgtgcttg

SEQ ID NO: 280309 - DNA, 25 bp, Probe Sequence
tgtgaagcacatcttgctgttgcct

SEQ ID NO: 280310 - DNA, 25 bp, Probe Sequence
tgtaagctgcatagttgtactgtgc

SEQ ID NO: 280311 - DNA, 25 bp, Probe Sequence
tgtgaagctcactgtgagcaatgtg

SEQ ID NO: 280312 - DNA, 25 bp, Probe Sequence
tgtgcaagcacagcgctggtgtggg

SEQ ID NO: 280313 - DNA, 25 bp, Probe Sequence
tgtcgagtccccaaggctgggggcc

SEQ ID NO: 280314 - DNA, 25 bp, Probe Sequence
tgtctttccctctaggtgtgtggga

SEQ ID NO: 280315 - DNA, 25 bp, Probe Sequence
tgtactgtcccggaggaggttggga

SEQ ID NO: 280316 - DNA, 25 bp, Probe Sequence
tgtactccaaccaggacccggagaa

SEQ ID NO: 280317 - DNA, 25 bp, Probe Sequence
tgtccccaatccaagggtctggagg

SEQ ID NO: 280318 - DNA, 25 bp, Probe Sequence
tgacctcccatagtagacccgggga

SEQ ID NO: 280319 - DNA, 25 bp, Probe Sequence
tgagcctcccaacatccgttggggt

SEQ ID NO: 280320 - DNA, 25 bp, Probe Sequence
tgaccccttaggcctatttaggtga

SEQ ID NO: 280321 - DNA, 25 bp, Probe Sequence
tgtcctccttcgattcttctaagga

SEQ ID NO: 280322 - DNA, 25 bp, Probe Sequence
tgtttccctcaaattttgtgaaaga

SEQ ID NO: 280323 - DNA, 25 bp, Probe Sequence
tgtcattccccatatgtgttggaga

SEQ ID NO: 280324 - DNA, 25 bp, Probe Sequence
tgtaatcccactgagtcggttgatc

SEQ ID NO: 280325 - DNA, 25 bp, Probe Sequence
tgtgcaaaccctgagttgtttgtct

SEQ ID NO: 280326 - DNA, 25 bp, Probe Sequence
tgtgaatatcacattatgatttatt

SEQ ID NO: 280327 - DNA, 25 bp, Probe Sequence
tgtgcatatcgaaatatattttgtt

SEQ ID NO: 280328 - DNA, 25 bp, Probe Sequence
tgtgcttagagaatgtatgtgtttt

SEQ ID NO: 280329 - DNA, 25 bp, Probe Sequence
tgtgctgtgcatattctgattttat

SEQ ID NO: 280330 - DNA, 25 bp, Probe Sequence
tgtgctttatgaatctgtcctgtga

SEQ ID NO: 280331 - DNA, 25 bp, Probe Sequence
tgtgcatatttgttggttctctgat

SEQ ID NO: 280332 - DNA, 25 bp, Probe Sequence
tgtgcctttgatggtgttcatttgc

SEQ ID NO: 280333 - DNA, 25 bp, Probe Sequence
tgtccttaatcggtccattcacaca

SEQ ID NO: 280334 - DNA, 25 bp, Probe Sequence
tgtcgctcttgatgttcctgataca

SEQ ID NO: 280335 - DNA, 25 bp, Probe Sequence
tgtctgttagatttgcttggtccag

SEQ ID NO: 280336 - DNA, 25 bp, Probe Sequence
tgtctgaatcatgtctgtatcccca

SEQ ID NO: 280337 - DNA, 25 bp, Probe Sequence
tgtgctcagtaaagtcttccatcca

SEQ ID NO: 280338 - DNA, 25 bp, Probe Sequence
tgtgccccaagtacagatgccatta

SEQ ID NO: 280339 - DNA, 25 bp, Probe Sequence
tgtgcacactcaagtcctgcagtca

SEQ ID NO: 280340 - DNA, 25 bp, Probe Sequence
tgtcacggatgactttgcagctcat

SEQ ID NO: 280341 - DNA, 25 bp, Probe Sequence
tgtctgggatgacttcacagcccag

SEQ ID NO: 280342 - DNA, 25 bp, Probe Sequence
tgtgctgtacgacaagttcatccgg

SEQ ID NO: 280343 - DNA, 25 bp, Probe Sequence
tgtgcttatcgcctggatctatcat

SEQ ID NO: 280344 - DNA, 25 bp, Probe Sequence
tgtgcttatcgcctggatctatcat

SEQ ID NO: 280345 - DNA, 25 bp, Probe Sequence
tgtgctttctgcatgcttagagcat

SEQ ID NO: 280346 - DNA, 25 bp, Probe Sequence
tgtgcctatcacctcttatgcacac

SEQ ID NO: 280347 - DNA, 25 bp, Probe Sequence
tgtgcacttgacctcggcagagaag

SEQ ID NO: 280348 - DNA, 25 bp, Probe Sequence
tgtgcacactacactggaggaatgt

SEQ ID NO: 280349 - DNA, 25 bp, Probe Sequence
tgtgccaccacaggctggggcaaga

SEQ ID NO: 280350 - DNA, 25 bp, Probe Sequence
tgtgccatccacgctaagagagtca

SEQ ID NO: 280351 - DNA, 25 bp, Probe Sequence
tgtgccatgtcaaacaaatagtcta

SEQ ID NO: 280352 - DNA, 25 bp, Probe Sequence
tgtgcacatgtaccctagaacttaa

SEQ ID NO: 280353 - DNA, 25 bp, Probe Sequence
tgtgcacttcaagaagtcactgtca

SEQ ID NO: 280354 - DNA, 25 bp, Probe Sequence
tgtcagaatcaacactggccttctc

SEQ ID NO: 280355 - DNA, 25 bp, Probe Sequence
tgtccattcctacctggacatgtcc

SEQ ID NO: 280356 - DNA, 25 bp, Probe Sequence
tgtactcgccgacggcaaagtccag

SEQ ID NO: 280357 - DNA, 25 bp, Probe Sequence
tgtcctccgctgtggcaagaagaag

SEQ ID NO: 280358 - DNA, 25 bp, Probe Sequence
tgtccatttgcattcggaaaagaat

SEQ ID NO: 280359 - DNA, 25 bp, Probe Sequence
tgtcctgtggcacgtgagaaaacag

SEQ ID NO: 280360 - DNA, 25 bp, Probe Sequence
tgtacttgcacattggagactgaaa

SEQ ID NO: 280361 - DNA, 25 bp, Probe Sequence
tgtacatctaattttgggaaaccaa

SEQ ID NO: 280362 - DNA, 25 bp, Probe Sequence
tgtctatctacctaggggaacacta

SEQ ID NO: 280363 - DNA, 25 bp, Probe Sequence
tgtccctgactctaggggcacatcc

SEQ ID NO: 280364 - DNA, 25 bp, Probe Sequence
tgtcaccgagtaactcgcgcacacc

SEQ ID NO: 280365 - DNA, 25 bp, Probe Sequence
tgtcgggagcttgtggcacatcacc

SEQ ID NO: 280366 - DNA, 25 bp, Probe Sequence
tgtcggtagttcttgcagtaggcac

SEQ ID NO: 280367 - DNA, 25 bp, Probe Sequence
tgtgcggctggttttggacagcgac

SEQ ID NO: 280368 - DNA, 25 bp, Probe Sequence
tgtctggcagaattttgtggagcaa

SEQ ID NO: 280369 - DNA, 25 bp, Probe Sequence
tgtctgccgacattttgccaaaaag

SEQ ID NO: 280370 - DNA, 25 bp, Probe Sequence
tgtctcctggctgcaataacaaaca

SEQ ID NO: 280371 - DNA, 25 bp, Probe Sequence
tgtacctagtcacattactgccaat

SEQ ID NO: 280372 - DNA, 25 bp, Probe Sequence
tgtcccaagcacgcttgagttgtat

SEQ ID NO: 280373 - DNA, 25 bp, Probe Sequence
tgtccacagatctttctatatttct

SEQ ID NO: 280374 - DNA, 25 bp, Probe Sequence
tgtcaccagttaatctttctccaat

SEQ ID NO: 280375 - DNA, 25 bp, Probe Sequence
tgtcccagtcagaatttgacttaag

SEQ ID NO: 280376 - DNA, 25 bp, Probe Sequence
tgtgcacacctatattaccttaaga

SEQ ID NO: 280377 - DNA, 25 bp, Probe Sequence
tgtcccgctgtgtagaactttaaaa

SEQ ID NO: 280378 - DNA, 25 bp, Probe Sequence
tgtcatccctggtgagcctatgaaa

SEQ ID NO: 280379 - DNA, 25 bp, Probe Sequence
tgtgcacggctgtggcagctgttga

SEQ ID NO: 280380 - DNA, 25 bp, Probe Sequence
tgtgcatagtggtgcgcgcttgtaa

SEQ ID NO: 280381 - DNA, 25 bp, Probe Sequence
tgtgctttgcggtccattagtaaac

SEQ ID NO: 280382 - DNA, 25 bp, Probe Sequence
tgtgctttgagccactttttgacaa

SEQ ID NO: 280383 - DNA, 25 bp, Probe Sequence
tgtgctttgtgaactctgctttaaa

SEQ ID NO: 280384 - DNA, 25 bp, Probe Sequence
tgtgctttcatacgcacctttgagg

SEQ ID NO: 280385 - DNA, 25 bp, Probe Sequence
tgtgcttctctaggaggttgggttt

SEQ ID NO: 280386 - DNA, 25 bp, Probe Sequence
tgtctggcacttggatcgggggtgt

SEQ ID NO: 280387 - DNA, 25 bp, Probe Sequence
tgtgctgcggttcatcatggagagt

SEQ ID NO: 280388 - DNA, 25 bp, Probe Sequence
tgtgccagcactagcctaggaggtt

SEQ ID NO: 280389 - DNA, 25 bp, Probe Sequence
tgtgccacacattgcattattaaat

SEQ ID NO: 280390 - DNA, 25 bp, Probe Sequence
tgtgcccagcattgactaatgttca

SEQ ID NO: 280391 - DNA, 25 bp, Probe Sequence
tgtccgcatgttgtaatcgtgcaaa

SEQ ID NO: 280392 - DNA, 25 bp, Probe Sequence
tgtctcccatctgtaatcctgacac

SEQ ID NO: 280393 - DNA, 25 bp, Probe Sequence
tgtccttaccacaaggcctgatcac

SEQ ID NO: 280394 - DNA, 25 bp, Probe Sequence
tgtgcttgaacctgaggcactgcac

SEQ ID NO: 280395 - DNA, 25 bp, Probe Sequence
tgtgctctggatgcatcggagggcc

SEQ ID NO: 280396 - DNA, 25 bp, Probe Sequence
tgtgctctgtgtttcaataccatcc

SEQ ID NO: 280397 - DNA, 25 bp, Probe Sequence
tgtgcctgtgcttactgtagtacca

SEQ ID NO: 280398 - DNA, 25 bp, Probe Sequence
tgtgccaggaacttgctactaccag

SEQ ID NO: 280399 - DNA, 25 bp, Probe Sequence
tgtccaggcacattgtgtacccctg

SEQ ID NO: 280400 - DNA, 25 bp, Probe Sequence
tgtacgagaaatcgttcgcccttct

SEQ ID NO: 280401 - DNA, 25 bp, Probe Sequence
tgtcaaagaacacctttcaccacct

SEQ ID NO: 280402 - DNA, 25 bp, Probe Sequence
tgtaaagaacgcgacttccacaacc

SEQ ID NO: 280403 - DNA, 25 bp, Probe Sequence
tgtcacggagatgggacccctgaga

SEQ ID NO: 280404 - DNA, 25 bp, Probe Sequence
tgtccggggctgcacgcgcgctaca

SEQ ID NO: 280405 - DNA, 25 bp, Probe Sequence
tgtgccacggggaaacgcagccccg

SEQ ID NO: 280406 - DNA, 25 bp, Probe Sequence
tgtgctccgggccaatgcagaggcc

SEQ ID NO: 280407 - DNA, 25 bp, Probe Sequence
tgtgctccgggccaatgcagaggcc

SEQ ID NO: 280408 - DNA, 25 bp, Probe Sequence
tgtgctccgggccaatgcagaggcc

SEQ ID NO: 280409 - DNA, 25 bp, Probe Sequence
tgtccctgggccagcagggacctct

SEQ ID NO: 280410 - DNA, 25 bp, Probe Sequence
tgtccctgcagtgcccataggcccg

SEQ ID NO: 280411 - DNA, 25 bp, Probe Sequence
tgtgccaagtgtgcccaaggctgca

SEQ ID NO: 280412 - DNA, 25 bp, Probe Sequence
tgtccaacagttatgcagagtgcta

SEQ ID NO: 280413 - DNA, 25 bp, Probe Sequence
tgtccaacagttatgcagagtgcta

SEQ ID NO: 280414 - DNA, 25 bp, Probe Sequence
tgtcccaggtgtatggagcgccaca

SEQ ID NO: 280415 - DNA, 25 bp, Probe Sequence
tgtcctcactgtcagtggagcccca

SEQ ID NO: 280416 - DNA, 25 bp, Probe Sequence
tgtcctcgtgtgtactgtgagaacc

SEQ ID NO: 280417 - DNA, 25 bp, Probe Sequence
tgtcctcgtgctgcacctgaaacga

SEQ ID NO: 280418 - DNA, 25 bp, Probe Sequence
tgtgcctttgagtccggtggacgat

SEQ ID NO: 280419 - DNA, 25 bp, Probe Sequence
tgtgccttaggatgcagcgtgaagc

SEQ ID NO: 280420 - DNA, 25 bp, Probe Sequence
tgtgcactgaatgttccactgaagt

SEQ ID NO: 280421 - DNA, 25 bp, Probe Sequence
tgtgctctactacttcacacattat

SEQ ID NO: 280422 - DNA, 25 bp, Probe Sequence
tgtgcctacatacatttctgtgaca

SEQ ID NO: 280423 - DNA, 25 bp, Probe Sequence
tgtgcctccaaggactgtctggcaa

SEQ ID NO: 280424 - DNA, 25 bp, Probe Sequence
tgtcccggaggaggttgggaggtgg

SEQ ID NO: 280425 - DNA, 25 bp, Probe Sequence
tgtcccccaggagggtggcaggggc

SEQ ID NO: 280426 - DNA, 25 bp, Probe Sequence
tgtcgccttcccggggtgaaggaca

SEQ ID NO: 280427 - DNA, 25 bp, Probe Sequence
tgtctgactatcactccagaggaag

SEQ ID NO: 280428 - DNA, 25 bp, Probe Sequence
tgtctgcctctgagccgcaggaaat

SEQ ID NO: 280429 - DNA, 25 bp, Probe Sequence
tgtccctggcctctgaggatcagat

SEQ ID NO: 280430 - DNA, 25 bp, Probe Sequence
tgccccgtcccaagggtattactgg

SEQ ID NO: 280431 - DNA, 25 bp, Probe Sequence
tctcgccgtccgagtcgtttattgt

SEQ ID NO: 280432 - DNA, 25 bp, Probe Sequence
tctagtccccgggggtctaattgcg

SEQ ID NO: 280433 - DNA, 25 bp, Probe Sequence
tctagcccggacgagggctctttct

SEQ ID NO: 280434 - DNA, 25 bp, Probe Sequence
tgtcagcccggacgcacgggctgct

SEQ ID NO: 280435 - DNA, 25 bp, Probe Sequence
tgtcggccgaagccatcggcatcat

SEQ ID NO: 280436 - DNA, 25 bp, Probe Sequence
tgtgctgccctgaagaatggcgcca

SEQ ID NO: 280437 - DNA, 25 bp, Probe Sequence
tgtgctgccatcctggatacgggca

SEQ ID NO: 280438 - DNA, 25 bp, Probe Sequence
tgtgctgcctgcgggaggatggtga

SEQ ID NO: 280439 - DNA, 25 bp, Probe Sequence
tgtcatgcggccggagcagatcatg

SEQ ID NO: 280440 - DNA, 25 bp, Probe Sequence
tgtcaggagccattgacgacgggcc

SEQ ID NO: 280441 - DNA, 25 bp, Probe Sequence
tgtcgtccacaatgtcacaggagct

SEQ ID NO: 280442 - DNA, 25 bp, Probe Sequence
tgtctgccccaagtaagagcgagtc

SEQ ID NO: 280443 - DNA, 25 bp, Probe Sequence
tgtccctaaaggcagagtgcttctt

SEQ ID NO: 280444 - DNA, 25 bp, Probe Sequence
tgtcccatgccaaatctaaggtttt

SEQ ID NO: 280445 - DNA, 25 bp, Probe Sequence
tgtctcccatcaaatgtaaggtcta

SEQ ID NO: 280446 - DNA, 25 bp, Probe Sequence
tgatcagccccagatttgacgtgca

SEQ ID NO: 280447 - DNA, 25 bp, Probe Sequence
tgtctggcaccagactcgtcaggac

SEQ ID NO: 280448 - DNA, 25 bp, Probe Sequence
tgtgctggacgcggacacatgatcc

SEQ ID NO: 280449 - DNA, 25 bp, Probe Sequence
tgtctggacagggacactggcttca

SEQ ID NO: 280450 - DNA, 25 bp, Probe Sequence
tgtaggagaggaacactgactctgg

SEQ ID NO: 280451 - DNA, 25 bp, Probe Sequence
tgtaaagaagaatccctcatcccca

SEQ ID NO: 280452 - DNA, 25 bp, Probe Sequence
tgctaaaataaatcgacagtgtctc

SEQ ID NO: 280453 - DNA, 25 bp, Probe Sequence
tgtagagactgataccgtagcccca

SEQ ID NO: 280454 - DNA, 25 bp, Probe Sequence
tgtcaatggtgaggatgcggtcccc

SEQ ID NO: 280455 - DNA, 25 bp, Probe Sequence
tgtcagatggtctgcagcgagtcac

SEQ ID NO: 280456 - DNA, 25 bp, Probe Sequence
tgtgcagactttggcagccgtgcac

SEQ ID NO: 280457 - DNA, 25 bp, Probe Sequence
tgtcagactttgggggatccccgcc

SEQ ID NO: 280458 - DNA, 25 bp, Probe Sequence
tgatagcctttcagggaaaaccttt

SEQ ID NO: 280459 - DNA, 25 bp, Probe Sequence
tgtacccttcggggacagtgtgcct

SEQ ID NO: 280460 - DNA, 25 bp, Probe Sequence
tgtatccagcaccggaaacggctcc

SEQ ID NO: 280461 - DNA, 25 bp, Probe Sequence
tgtacaagcctgggaacctgagccg

SEQ ID NO: 280462 - DNA, 25 bp, Probe Sequence
tgtccggctgcttggaagcctggac

SEQ ID NO: 280463 - DNA, 25 bp, Probe Sequence
tgtcctgtctcatggaagcactgga

SEQ ID NO: 280464 - DNA, 25 bp, Probe Sequence
tgtccagtctgctattgaaactata

SEQ ID NO: 280465 - DNA, 25 bp, Probe Sequence
tgtcctctcgcattgtaaatacata

SEQ ID NO: 280466 - DNA, 25 bp, Probe Sequence
tgtctctctcatatgctaggtagca

SEQ ID NO: 280467 - DNA, 25 bp, Probe Sequence
tgtgctcctcagattctgtgttcag

SEQ ID NO: 280468 - DNA, 25 bp, Probe Sequence
tgtccactcctgatgctgttatggg

SEQ ID NO: 280469 - DNA, 25 bp, Probe Sequence
tgtgctactctcatctgtgtgtatg

SEQ ID NO: 280470 - DNA, 25 bp, Probe Sequence
tgtctatcctttggggtgaaaaact

SEQ ID NO: 280471 - DNA, 25 bp, Probe Sequence
tgtgctgtcctgctggtgttgacaa

SEQ ID NO: 280472 - DNA, 25 bp, Probe Sequence
tgtctgtcccaactgtttgaacagt

SEQ ID NO: 280473 - DNA, 25 bp, Probe Sequence
tgtcttcagccactcacttataaag

SEQ ID NO: 280474 - DNA, 25 bp, Probe Sequence
tgtccctgtctgacagctttgaaga

SEQ ID NO: 280475 - DNA, 25 bp, Probe Sequence
tgtgctcatcttcagacttaataca

SEQ ID NO: 280476 - DNA, 25 bp, Probe Sequence
tgtgctgttcgtagtttgtataatc

SEQ ID NO: 280477 - DNA, 25 bp, Probe Sequence
tgtgcggtctcgattcgctgaattg

SEQ ID NO: 280478 - DNA, 25 bp, Probe Sequence
tgtcagagtatgcacggcgctttgg

SEQ ID NO: 280479 - DNA, 25 bp, Probe Sequence
tgtcagagttctcagtagtcttcag

SEQ ID NO: 280480 - DNA, 25 bp, Probe Sequence
tgtcagcgttccgaaagcttgtccc

SEQ ID NO: 280481 - DNA, 25 bp, Probe Sequence
tgtcacgtattgccaagagcttgaa

SEQ ID NO: 280482 - DNA, 25 bp, Probe Sequence
tgtcatcctcttccatgagacactc

SEQ ID NO: 280483 - DNA, 25 bp, Probe Sequence
tgtcatcctcttccatgagacactc

SEQ ID NO: 280484 - DNA, 25 bp, Probe Sequence
tgtcatcctcttccatgagacactc

SEQ ID NO: 280485 - DNA, 25 bp, Probe Sequence
tgtcgcagtgttcctggtcatctgc

SEQ ID NO: 280486 - DNA, 25 bp, Probe Sequence
tgtcagcgtttttgagtctgtcatt

SEQ ID NO: 280487 - DNA, 25 bp, Probe Sequence
tgtaggattctttctccagagcaat

SEQ ID NO: 280488 - DNA, 25 bp, Probe Sequence
tgtcactgatctttctggcaaggaa

SEQ ID NO: 280489 - DNA, 25 bp, Probe Sequence
tgtaagactttctgacatgtaacat

SEQ ID NO: 280490 - DNA, 25 bp, Probe Sequence
tgtcaagcacttagatggatataaa

SEQ ID NO: 280491 - DNA, 25 bp, Probe Sequence
tgtgctagaaataacagcatctaaa

SEQ ID NO: 280492 - DNA, 25 bp, Probe Sequence
tgtcaagaagaagtcagcttgagca

SEQ ID NO: 280493 - DNA, 25 bp, Probe Sequence
tgtcataaaatcgatcagtttggtg

SEQ ID NO: 280494 - DNA, 25 bp, Probe Sequence
tgtcaggacacatggattttggcag

SEQ ID NO: 280495 - DNA, 25 bp, Probe Sequence
tgtgcctgacactggtcttgcagta

SEQ ID NO: 280496 - DNA, 25 bp, Probe Sequence
tgtccactacatggttctatcagta

SEQ ID NO: 280497 - DNA, 25 bp, Probe Sequence
tgtcccacattccagccataagtga

SEQ ID NO: 280498 - DNA, 25 bp, Probe Sequence
tgtcctgcacttcaggtgcaagctg

SEQ ID NO: 280499 - DNA, 25 bp, Probe Sequence
tgtgcctttctctagatgtgatacg

SEQ ID NO: 280500 - DNA, 25 bp, Probe Sequence
tgtcctgtcttctaagatgtgcatc

SEQ ID NO: 280501 - DNA, 25 bp, Probe Sequence
tgtccttgtgattacattggcccca

SEQ ID NO: 280502 - DNA, 25 bp, Probe Sequence
tgtgcctttattttatgagccccag

SEQ ID NO: 280503 - DNA, 25 bp, Probe Sequence
tgtcctttgttttgatgagtcctga

SEQ ID NO: 280504 - DNA, 25 bp, Probe Sequence
tgtccttaggtcaaggccctcagaa

SEQ ID NO: 280505 - DNA, 25 bp, Probe Sequence
tgtacttactgaaggagccccgaga

SEQ ID NO: 280506 - DNA, 25 bp, Probe Sequence
tgtcctgatccgatggagaaacaaa

SEQ ID NO: 280507 - DNA, 25 bp, Probe Sequence
tgtcctatcccatatggagaagaaa

SEQ ID NO: 280508 - DNA, 25 bp, Probe Sequence
tgtgccttctccatatgaagtcaga

SEQ ID NO: 280509 - DNA, 25 bp, Probe Sequence
tgtgcctgtgtcccattaacacagt

SEQ ID NO: 280510 - DNA, 25 bp, Probe Sequence
tgtcctgctggttcattcacaacaa

SEQ ID NO: 280511 - DNA, 25 bp, Probe Sequence
tgtccagccagattcagtacatgaa

SEQ ID NO: 280512 - DNA, 25 bp, Probe Sequence
tgtccattcatgagtgtgacatgaa

SEQ ID NO: 280513 - DNA, 25 bp, Probe Sequence
tgtccaccagctagttgcacagaga

SEQ ID NO: 280514 - DNA, 25 bp, Probe Sequence
tgtccacatgcgtgtcagcacatac

SEQ ID NO: 280515 - DNA, 25 bp, Probe Sequence
tgtccactgggaccagcatgcacac

SEQ ID NO: 280516 - DNA, 25 bp, Probe Sequence
tgtcaacaaggaccagatcgccaag

SEQ ID NO: 280517 - DNA, 25 bp, Probe Sequence
tgtctccaaggacctgaccaacagc

SEQ ID NO: 280518 - DNA, 25 bp, Probe Sequence
tgtctccaaagagcgcctgaagccc

SEQ ID NO: 280519 - DNA, 25 bp, Probe Sequence
tgtccttcaaaaaggcgcagaccac

SEQ ID NO: 280520 - DNA, 25 bp, Probe Sequence
tgttttagtaaccggatgtccacca

SEQ ID NO: 280521 - DNA, 25 bp, Probe Sequence
tgtctttcagtcttcggggatctgc

SEQ ID NO: 280522 - DNA, 25 bp, Probe Sequence
tgtccattacacttcgtttgatgtc

SEQ ID NO: 280523 - DNA, 25 bp, Probe Sequence
tgtccaagaccacagtgctctgttt

SEQ ID NO: 280524 - DNA, 25 bp, Probe Sequence
tgtccaggaccttagttcatttgat

SEQ ID NO: 280525 - DNA, 25 bp, Probe Sequence
tgtccggagtctttgggtttgattc

SEQ ID NO: 280526 - DNA, 25 bp, Probe Sequence
tgtcctggccctttcagttttataa

SEQ ID NO: 280527 - DNA, 25 bp, Probe Sequence
tgtcctggccctttcagttttataa

SEQ ID NO: 280528 - DNA, 25 bp, Probe Sequence
tgtacttacttacacatttttaact

SEQ ID NO: 280529 - DNA, 25 bp, Probe Sequence
tgtacgtgttattccaagcctttaa

SEQ ID NO: 280530 - DNA, 25 bp, Probe Sequence
tgtagaattatttttacgatttcca

SEQ ID NO: 280531 - DNA, 25 bp, Probe Sequence
tgtaagattttgtgcttcccaatca

SEQ ID NO: 280532 - DNA, 25 bp, Probe Sequence
tgtcaaggtttgtgttaccctcctg

SEQ ID NO: 280533 - DNA, 25 bp, Probe Sequence
tgtactggtttgggtatgccacctc

SEQ ID NO: 280534 - DNA, 25 bp, Probe Sequence
tgtagtggcctttggagatgccccc

SEQ ID NO: 280535 - DNA, 25 bp, Probe Sequence
tgtaggactgtttgtgactggccct

SEQ ID NO: 280536 - DNA, 25 bp, Probe Sequence
tgtaggactgtttgtgactggccct

SEQ ID NO: 280537 - DNA, 25 bp, Probe Sequence
tgtccatcacctgtgtattggccct

SEQ ID NO: 280538 - DNA, 25 bp, Probe Sequence
tgtgcctatactgattcttgggaat

SEQ ID NO: 280539 - DNA, 25 bp, Probe Sequence
tgtgcctatactgattcttgggaat

SEQ ID NO: 280540 - DNA, 25 bp, Probe Sequence
tgtcctaagctggagttctgatttt

SEQ ID NO: 280541 - DNA, 25 bp, Probe Sequence
tgtaatcacaggggtttttatgaaa

SEQ ID NO: 280542 - DNA, 25 bp, Probe Sequence
tgtagactctggtttttcttttgac

SEQ ID NO: 280543 - DNA, 25 bp, Probe Sequence
tgtaggcaggagttgaattcatgtc

SEQ ID NO: 280544 - DNA, 25 bp, Probe Sequence
tgtaatgagtgttcgatatttgcta

SEQ ID NO: 280545 - DNA, 25 bp, Probe Sequence
tgtcaggtctgatagtcctctgcta

SEQ ID NO: 280546 - DNA, 25 bp, Probe Sequence
tgtatggtcaggccaagcctctcta

SEQ ID NO: 280547 - DNA, 25 bp, Probe Sequence
tgtctggtcagatctagttttatgc

SEQ ID NO: 280548 - DNA, 25 bp, Probe Sequence
tgatctttcagatctttccataaag

SEQ ID NO: 280549 - DNA, 25 bp, Probe Sequence
tgtctttgacattttccctggaaca

SEQ ID NO: 280550 - DNA, 25 bp, Probe Sequence
tgtctctctagttgaaccctgggaa

SEQ ID NO: 280551 - DNA, 25 bp, Probe Sequence
tgtcctttgtgccagaccaagcggc

SEQ ID NO: 280552 - DNA, 25 bp, Probe Sequence
tgtccaatgtgtgccctcagagggc

SEQ ID NO: 280553 - DNA, 25 bp, Probe Sequence
tgtaacgttaccctcaacagggagg

SEQ ID NO: 280554 - DNA, 25 bp, Probe Sequence
tgtacactgttactcagatctacac

SEQ ID NO: 280555 - DNA, 25 bp, Probe Sequence
tgtcatcaatggaaatcccatcacc

SEQ ID NO: 280556 - DNA, 25 bp, Probe Sequence
tgtcatcaggacactatctcaccct

SEQ ID NO: 280557 - DNA, 25 bp, Probe Sequence
tgtctctatgatccgtgactaccct

SEQ ID NO: 280558 - DNA, 25 bp, Probe Sequence
tgtctttatacgcttaggctctctg

SEQ ID NO: 280559 - DNA, 25 bp, Probe Sequence
tgtatatttacgatttccatgttgc

SEQ ID NO: 280560 - DNA, 25 bp, Probe Sequence
tgtacgggagccacttatatgtatg

SEQ ID NO: 280561 - DNA, 25 bp, Probe Sequence
tgtcaagcaggcgctcttgtgaatt

SEQ ID NO: 280562 - DNA, 25 bp, Probe Sequence
tgtctagccctgctctagtaatgtc

SEQ ID NO: 280563 - DNA, 25 bp, Probe Sequence
tgtccacctgatctgcaagctggat

SEQ ID NO: 280564 - DNA, 25 bp, Probe Sequence
tgtccactctagagcattgcttaca

SEQ ID NO: 280565 - DNA, 25 bp, Probe Sequence
tgtcctgaccacacatatgttatca

SEQ ID NO: 280566 - DNA, 25 bp, Probe Sequence
tgtcacatagcccctagattgctca

SEQ ID NO: 280567 - DNA, 25 bp, Probe Sequence
tgtacagattgccatcatagtagca

SEQ ID NO: 280568 - DNA, 25 bp, Probe Sequence
tgtaggcatctggcagctaccatgc

SEQ ID NO: 280569 - DNA, 25 bp, Probe Sequence
tgtagccgcatggcagacccatggc

SEQ ID NO: 280570 - DNA, 25 bp, Probe Sequence
tgtcacacgcatagatccacgaggc

SEQ ID NO: 280571 - DNA, 25 bp, Probe Sequence
tgtcagagcgcagtgaccgtgtgct

SEQ ID NO: 280572 - DNA, 25 bp, Probe Sequence
tgtaagccagatgacgtgatcctta

SEQ ID NO: 280573 - DNA, 25 bp, Probe Sequence
tgtacagcaacagaggtacctcttg

SEQ ID NO: 280574 - DNA, 25 bp, Probe Sequence
tgtacacgaactcggcttcttttgt

SEQ ID NO: 280575 - DNA, 25 bp, Probe Sequence
tgtaacggagtctcgctcttgttgc

SEQ ID NO: 280576 - DNA, 25 bp, Probe Sequence
tgttacgggtattcagccttcagtc

SEQ ID NO: 280577 - DNA, 25 bp, Probe Sequence
tgtaactgtgtggtttgcctttgtc

SEQ ID NO: 280578 - DNA, 25 bp, Probe Sequence
tgtaaagttagattttgcatattgt

SEQ ID NO: 280579 - DNA, 25 bp, Probe Sequence
tgtctgagattcttgtttccttttg

SEQ ID NO: 280580 - DNA, 25 bp, Probe Sequence
tgtcatatcactttgctcttaccat

SEQ ID NO: 280581 - DNA, 25 bp, Probe Sequence
tgtccatcacagtactattcatcac

SEQ ID NO: 280582 - DNA, 25 bp, Probe Sequence
tgtccagagcagtcgctactgctca

SEQ ID NO: 280583 - DNA, 25 bp, Probe Sequence
tgtccagatgttggctacagtcccc

SEQ ID NO: 280584 - DNA, 25 bp, Probe Sequence
tgtccacctggggacagtctgtgcc

SEQ ID NO: 280585 - DNA, 25 bp, Probe Sequence
tgtctcccttgtcagcaggggcgta

SEQ ID NO: 280586 - DNA, 25 bp, Probe Sequence
tgtctcccaagtcccacaagggatt

SEQ ID NO: 280587 - DNA, 25 bp, Probe Sequence
tgtcccttgagagccaggaatggct

SEQ ID NO: 280588 - DNA, 25 bp, Probe Sequence
tgtccttgtgagaaccggtctttgc

SEQ ID NO: 280589 - DNA, 25 bp, Probe Sequence
tgtgcctgtggtgaccgtggttaga

SEQ ID NO: 280590 - DNA, 25 bp, Probe Sequence
tgtccctttccaatcgtggtgtaag

SEQ ID NO: 280591 - DNA, 25 bp, Probe Sequence
tgtcacttttccctcgggaggaaat

SEQ ID NO: 280592 - DNA, 25 bp, Probe Sequence
ttcaaaagtcttcccggacaaaatg

SEQ ID NO: 280593 - DNA, 25 bp, Probe Sequence
tgtaaagaacttcctgtaaaacacg

SEQ ID NO: 280594 - DNA, 25 bp, Probe Sequence
tgtaaagaacttcctgtaaaacacg

SEQ ID NO: 280595 - DNA, 25 bp, Probe Sequence
tgtaaaactcttactacgtaaccag

SEQ ID NO: 280596 - DNA, 25 bp, Probe Sequence
tgtccaatttactgaccgtacacca

SEQ ID NO: 280597 - DNA, 25 bp, Probe Sequence
tgtcctttcttatacacgtacatac

SEQ ID NO: 280598 - DNA, 25 bp, Probe Sequence
tgtcctttttataatgcagagtgag

SEQ ID NO: 280599 - DNA, 25 bp, Probe Sequence
tgtcattcctttttatgaagtgctg

SEQ ID NO: 280600 - DNA, 25 bp, Probe Sequence
tgatattccacttagctgtagagtc

SEQ ID NO: 280601 - DNA, 25 bp, Probe Sequence
tgtatcctcatttccagaaagtggt

SEQ ID NO: 280602 - DNA, 25 bp, Probe Sequence
tgtatccagcacacggaagacatgg

SEQ ID NO: 280603 - DNA, 25 bp, Probe Sequence
tgtcataagacatcttcaagacatc

SEQ ID NO: 280604 - DNA, 25 bp, Probe Sequence
tgtaacagccattcttcctgacttt

SEQ ID NO: 280605 - DNA, 25 bp, Probe Sequence
tgtaattgacaaaatagtgacttct

SEQ ID NO: 280606 - DNA, 25 bp, Probe Sequence
tgtaattggcaaataactcaagact

SEQ ID NO: 280607 - DNA, 25 bp, Probe Sequence
tgtccttgtagatagactgccgagt

SEQ ID NO: 280608 - DNA, 25 bp, Probe Sequence
tgtagggtagagagacgctgggtga

SEQ ID NO: 280609 - DNA, 25 bp, Probe Sequence
tgtcatgggtgggtccttggggaac

SEQ ID NO: 280610 - DNA, 25 bp, Probe Sequence
tgtctggacaggggcccgtgatgga

SEQ ID NO: 280611 - DNA, 25 bp, Probe Sequence
tccgtacggcacccagagtacaaca

SEQ ID NO: 280612 - DNA, 25 bp, Probe Sequence
tccgtgtgcggctgtccagaaaacg

SEQ ID NO: 280613 - DNA, 25 bp, Probe Sequence
tgccttggggacctgccaaacgaaa

SEQ ID NO: 280614 - DNA, 25 bp, Probe Sequence
tgtattgctggggcttccaacaaaa

SEQ ID NO: 280615 - DNA, 25 bp, Probe Sequence
tgctaacaggggcgccgtaaagccc

SEQ ID NO: 280616 - DNA, 25 bp, Probe Sequence
tgtacacaggtacagcggtgaaaga

SEQ ID NO: 280617 - DNA, 25 bp, Probe Sequence
tgtacagcaaactgcccgtttagag

SEQ ID NO: 280618 - DNA, 25 bp, Probe Sequence
tgtaacaaacatttctgggtgacaa

SEQ ID NO: 280619 - DNA, 25 bp, Probe Sequence
tgtacaatgtaattccgtggagatg

SEQ ID NO: 280620 - DNA, 25 bp, Probe Sequence
tgtaagtattcattccagagaagaa

SEQ ID NO: 280621 - DNA, 25 bp, Probe Sequence
tgtccgatagacaccaggaagcaac

SEQ ID NO: 280622 - DNA, 25 bp, Probe Sequence
tgtccctagacagtagtggctacag

SEQ ID NO: 280623 - DNA, 25 bp, Probe Sequence
tgtcccctacaatttgtgcttctga

SEQ ID NO: 280624 - DNA, 25 bp, Probe Sequence
tgtcccctacaatttgtgcttctga

SEQ ID NO: 280625 - DNA, 25 bp, Probe Sequence
tgtcccctacaatttgtgcttctga

SEQ ID NO: 280626 - DNA, 25 bp, Probe Sequence
tgtccacccagctactggttcattt

SEQ ID NO: 280627 - DNA, 25 bp, Probe Sequence
tgtcctctaacttatggcttctatt

SEQ ID NO: 280628 - DNA, 25 bp, Probe Sequence
tgtccattatcctgaagttgctatg

SEQ ID NO: 280629 - DNA, 25 bp, Probe Sequence
tgcttcccactgtgactgggctatg

SEQ ID NO: 280630 - DNA, 25 bp, Probe Sequence
tgttccgcttcatgagggacgtgga

SEQ ID NO: 280631 - DNA, 25 bp, Probe Sequence
tgtctgcgtgcctaaattaacctgg

SEQ ID NO: 280632 - DNA, 25 bp, Probe Sequence
tgtctcggcccatttgaagaccagg

SEQ ID NO: 280633 - DNA, 25 bp, Probe Sequence
tgtcctcacccttgttaatctcaag

SEQ ID NO: 280634 - DNA, 25 bp, Probe Sequence
tgtcctgatgcttttgtctaattaa

SEQ ID NO: 280635 - DNA, 25 bp, Probe Sequence
tgtcctgatgcttttgtctaattaa

SEQ ID NO: 280636 - DNA, 25 bp, Probe Sequence
tgtctctgtctgtgtgctaaataaa

SEQ ID NO: 280637 - DNA, 25 bp, Probe Sequence
tgtcctggatgatggtccataagaa

SEQ ID NO: 280638 - DNA, 25 bp, Probe Sequence
tgtctttgatttccttcatcagaat

SEQ ID NO: 280639 - DNA, 25 bp, Probe Sequence
tgtctctctgattgggcttctaaat

SEQ ID NO: 280640 - DNA, 25 bp, Probe Sequence
tgtccttttgttgtcttatattgta

SEQ ID NO: 280641 - DNA, 25 bp, Probe Sequence
tgtcctttaatcactgcatttcatt

SEQ ID NO: 280642 - DNA, 25 bp, Probe Sequence
tgtcgtttaccacagtttccattta

SEQ ID NO: 280643 - DNA, 25 bp, Probe Sequence
tgtacttttcctctgtagtttttag

SEQ ID NO: 280644 - DNA, 25 bp, Probe Sequence
tgtccctttcctatgtatgcatttc

SEQ ID NO: 280645 - DNA, 25 bp, Probe Sequence
tgtctttttactatgtttttcggat

SEQ ID NO: 280646 - DNA, 25 bp, Probe Sequence
tgtctgtttatcccaagttttgttg

SEQ ID NO: 280647 - DNA, 25 bp, Probe Sequence
tgtctacatttataactatttactg

SEQ ID NO: 280648 - DNA, 25 bp, Probe Sequence
tgttaattcctggaactgtattttg

SEQ ID NO: 280649 - DNA, 25 bp, Probe Sequence
tgtaattttcataaatcctgattta

SEQ ID NO: 280650 - DNA, 25 bp, Probe Sequence
tgtcatcattcttcatggactcctt

SEQ ID NO: 280651 - DNA, 25 bp, Probe Sequence
tgtccatatctggcttgcatgtgcc

SEQ ID NO: 280652 - DNA, 25 bp, Probe Sequence
tgtactcatgctcatatgtgtgcac

SEQ ID NO: 280653 - DNA, 25 bp, Probe Sequence
tgtcccatgctactgattggcacgt

SEQ ID NO: 280654 - DNA, 25 bp, Probe Sequence
tgtccgatcaatagctcacgcagct

SEQ ID NO: 280655 - DNA, 25 bp, Probe Sequence
tgtacagccagtgctacgagctcac

SEQ ID NO: 280656 - DNA, 25 bp, Probe Sequence
tgtctcaaatgctgcttctggtgcc

SEQ ID NO: 280657 - DNA, 25 bp, Probe Sequence
tgtccagaatccattcggtgccaac

SEQ ID NO: 280658 - DNA, 25 bp, Probe Sequence
tgtaagaatttttgggtgactcact

SEQ ID NO: 280659 - DNA, 25 bp, Probe Sequence
tgtaactttgtttggagctggcacc

SEQ ID NO: 280660 - DNA, 25 bp, Probe Sequence
tgtaatgctttttcaggtgtgccaa

SEQ ID NO: 280661 - DNA, 25 bp, Probe Sequence
tgtcaagctcatttcctggtatgac

SEQ ID NO: 280662 - DNA, 25 bp, Probe Sequence
tgtcaggatcatgccctgtggcaca

SEQ ID NO: 280663 - DNA, 25 bp, Probe Sequence
tgtctgtgacatgcaacttacaaaa

SEQ ID NO: 280664 - DNA, 25 bp, Probe Sequence
tgtcgtgttacagttatacaatgat

SEQ ID NO: 280665 - DNA, 25 bp, Probe Sequence
tgtcacttttctgataaaagatggc

SEQ ID NO: 280666 - DNA, 25 bp, Probe Sequence
tgtactttcctaccccaagaggaag

SEQ ID NO: 280667 - DNA, 25 bp, Probe Sequence
tgtacttttcaagccactggaggga

SEQ ID NO: 280668 - DNA, 25 bp, Probe Sequence
tgtctcttttcaaaccaaattggga

SEQ ID NO: 280669 - DNA, 25 bp, Probe Sequence
tgttccttttacagcaaaagggact

SEQ ID NO: 280670 - DNA, 25 bp, Probe Sequence
tgactccgttattccgaaaggggca

SEQ ID NO: 280671 - DNA, 25 bp, Probe Sequence
tgtctcccttacctcgtgaagaggg

SEQ ID NO: 280672 - DNA, 25 bp, Probe Sequence
tgtctcccttacctcgtgaagaggg

SEQ ID NO: 280673 - DNA, 25 bp, Probe Sequence
tgttctcttttgcccgtaggtggga

SEQ ID NO: 280674 - DNA, 25 bp, Probe Sequence
tgtctcctttggaccgtttggtcta

SEQ ID NO: 280675 - DNA, 25 bp, Probe Sequence
tgtccctagattccggtttgggcca

SEQ ID NO: 280676 - DNA, 25 bp, Probe Sequence
tgtccctgaaagggacattctgtgg

SEQ ID NO: 280677 - DNA, 25 bp, Probe Sequence
tgtcccttgcaaggtgacaggccgc

SEQ ID NO: 280678 - DNA, 25 bp, Probe Sequence
tgtcccttgcaaggtgacaggccgc

SEQ ID NO: 280679 - DNA, 25 bp, Probe Sequence
tgtccgctttcatgaacacagcctg

SEQ ID NO: 280680 - DNA, 25 bp, Probe Sequence
tgtcccatttgcaataatatcacca

SEQ ID NO: 280681 - DNA, 25 bp, Probe Sequence
tgtctaatttcaataactaccagtt

SEQ ID NO: 280682 - DNA, 25 bp, Probe Sequence
tgtaagattctataaataaagctat

SEQ ID NO: 280683 - DNA, 25 bp, Probe Sequence
tgataaaccttattactaactctta

SEQ ID NO: 280684 - DNA, 25 bp, Probe Sequence
tgtaaaatattattcccaccctgac

SEQ ID NO: 280685 - DNA, 25 bp, Probe Sequence
tgtacaacaacctcaccaacgtgga

SEQ ID NO: 280686 - DNA, 25 bp, Probe Sequence
tgcttttaactctggtaaagtggat

SEQ ID NO: 280687 - DNA, 25 bp, Probe Sequence
tcttcgatagcctgtttaaaatgtt

SEQ ID NO: 280688 - DNA, 25 bp, Probe Sequence
tgtttatgaccagatttaaaattct

SEQ ID NO: 280689 - DNA, 25 bp, Probe Sequence
tgcttttacccttggaccgaattct

SEQ ID NO: 280690 - DNA, 25 bp, Probe Sequence
tgtttcccttgcatgggacgaaagc

SEQ ID NO: 280691 - DNA, 25 bp, Probe Sequence
tgtactcccgcctgggcaaaagagc

SEQ ID NO: 280692 - DNA, 25 bp, Probe Sequence
tgtacccgccctgggacaagaactt

SEQ ID NO: 280693 - DNA, 25 bp, Probe Sequence
tgtttccccacttaaaatagtcctg

SEQ ID NO: 280694 - DNA, 25 bp, Probe Sequence
tgtctcttcaccgtgttaacataat

SEQ ID NO: 280695 - DNA, 25 bp, Probe Sequence
tgtccccaacaagtttatgcagaac

SEQ ID NO: 280696 - DNA, 25 bp, Probe Sequence
tgtccccgctcagtctttgagcgag

SEQ ID NO: 280697 - DNA, 25 bp, Probe Sequence
tgtcacccctcaatttggcagtaaa

SEQ ID NO: 280698 - DNA, 25 bp, Probe Sequence
tgtacttctatccctgggcagtaaa

SEQ ID NO: 280699 - DNA, 25 bp, Probe Sequence
tgtcatcccttcactgaggctgtga

SEQ ID NO: 280700 - DNA, 25 bp, Probe Sequence
tgtctactcttatctggcactgata

SEQ ID NO: 280701 - DNA, 25 bp, Probe Sequence
tgtccctcgtgaggctggatctcaa

SEQ ID NO: 280702 - DNA, 25 bp, Probe Sequence
tgtccctctggcagttgtgtgatga

SEQ ID NO: 280703 - DNA, 25 bp, Probe Sequence
tgtcgcctggtggcattggtgtggg

SEQ ID NO: 280704 - DNA, 25 bp, Probe Sequence
tgtccctggggcaatgtgtgtgctt

SEQ ID NO: 280705 - DNA, 25 bp, Probe Sequence
tgtcaccggaggtatagctgtgccc

SEQ ID NO: 280706 - DNA, 25 bp, Probe Sequence
tgtccgggatggacacacttcccat

SEQ ID NO: 280707 - DNA, 25 bp, Probe Sequence
tgtccctggaggcccaatttgacaa

SEQ ID NO: 280708 - DNA, 25 bp, Probe Sequence
tgtcgccagttgtgcacttttacaa

SEQ ID NO: 280709 - DNA, 25 bp, Probe Sequence
tgtcccagggatgctctttgtaata

SEQ ID NO: 280710 - DNA, 25 bp, Probe Sequence
tgtccccggggagttaatgcatcta

SEQ ID NO: 280711 - DNA, 25 bp, Probe Sequence
tgtcccgcggggtttacgtgtgaca

SEQ ID NO: 280712 - DNA, 25 bp, Probe Sequence
tgtcccgcggggtttacgtgtgaca

SEQ ID NO: 280713 - DNA, 25 bp, Probe Sequence
tcccgtggtgggttttcaggcaata

SEQ ID NO: 280714 - DNA, 25 bp, Probe Sequence
tgtccctggcctggttttcaaaata

SEQ ID NO: 280715 - DNA, 25 bp, Probe Sequence
tgtcctctttcttgggtctaaagct

SEQ ID NO: 280716 - DNA, 25 bp, Probe Sequence
tgtcctcactttgtgggtcacactc

SEQ ID NO: 280717 - DNA, 25 bp, Probe Sequence
tgtctgctcagcttctgataaggtc

SEQ ID NO: 280718 - DNA, 25 bp, Probe Sequence
tgtccgcagctgtctgctagtggtt

SEQ ID NO: 280719 - DNA, 25 bp, Probe Sequence
tgtctccatctattgatgagggtct

SEQ ID NO: 280720 - DNA, 25 bp, Probe Sequence
tgtcccctagtgagggactgtgttg

SEQ ID NO: 280721 - DNA, 25 bp, Probe Sequence
tgtaccctttgaatgggaatttaca

SEQ ID NO: 280722 - DNA, 25 bp, Probe Sequence
tgtactcccatacataagtaggtac

SEQ ID NO: 280723 - DNA, 25 bp, Probe Sequence
tgtctcccctcatacacaaaagtac

SEQ ID NO: 280724 - DNA, 25 bp, Probe Sequence
tgttttgcacctaaatcgacgggac

SEQ ID NO: 280725 - DNA, 25 bp, Probe Sequence
tgtttgtggcacctagatcgacggg

SEQ ID NO: 280726 - DNA, 25 bp, Probe Sequence
tgtttgtgctgacaggtggcctagg

SEQ ID NO: 280727 - DNA, 25 bp, Probe Sequence
tgtttggggctaccttgagccagga

SEQ ID NO: 280728 - DNA, 25 bp, Probe Sequence
tgtcgggttctggtcttagcaagga

SEQ ID NO: 280729 - DNA, 25 bp, Probe Sequence
tgtcaggtagtctcatttggcaagt

SEQ ID NO: 280730 - DNA, 25 bp, Probe Sequence
tgtctgtgtcttctatttggcaaac

SEQ ID NO: 280731 - DNA, 25 bp, Probe Sequence
tgtctatggagccaagatatgtgga

SEQ ID NO: 280732 - DNA, 25 bp, Probe Sequence
tgtagggacatggatgaagctggaa

SEQ ID NO: 280733 - DNA, 25 bp, Probe Sequence
tgtagggcacatttgccagaggata

SEQ ID NO: 280734 - DNA, 25 bp, Probe Sequence
tgtagatccatatttcggaggtctt

SEQ ID NO: 280735 - DNA, 25 bp, Probe Sequence
tgtaatctcagctactcaggaggct

SEQ ID NO: 280736 - DNA, 25 bp, Probe Sequence
tgtaatctcagctactcaggaggct

SEQ ID NO: 280737 - DNA, 25 bp, Probe Sequence
tgtaacatgagcttattgagaccat

SEQ ID NO: 280738 - DNA, 25 bp, Probe Sequence
tgtatcaatctctgactgcaaccac

SEQ ID NO: 280739 - DNA, 25 bp, Probe Sequence
tgtatctatgcatcagcctggactc

SEQ ID NO: 280740 - DNA, 25 bp, Probe Sequence
tgtacttccacagttatgattgtcc

SEQ ID NO: 280741 - DNA, 25 bp, Probe Sequence
tgtcacttgaatcccgtgattgtca

SEQ ID NO: 280742 - DNA, 25 bp, Probe Sequence
tgtcctgtatcacctcagtgtttgc

SEQ ID NO: 280743 - DNA, 25 bp, Probe Sequence
tgtccccatcagcctgctgggacac

SEQ ID NO: 280744 - DNA, 25 bp, Probe Sequence
tgtcacccacagcaatgagaagcac

SEQ ID NO: 280745 - DNA, 25 bp, Probe Sequence
tgtcacgcatgccacacaagaagga

SEQ ID NO: 280746 - DNA, 25 bp, Probe Sequence
tgtccgagacagccgggaggagcct

SEQ ID NO: 280747 - DNA, 25 bp, Probe Sequence
tgtccgcatcgtcggcgggaaggct

SEQ ID NO: 280748 - DNA, 25 bp, Probe Sequence
tgtcgcgcccaagtctgggaagtgc

SEQ ID NO: 280749 - DNA, 25 bp, Probe Sequence
tgtccgccccacgagagagagagag

SEQ ID NO: 280750 - DNA, 25 bp, Probe Sequence
tgtcacccaggctggagtgcagtgg

SEQ ID NO: 280751 - DNA, 25 bp, Probe Sequence
tgtcagcaccatcctggaaggttat

SEQ ID NO: 280752 - DNA, 25 bp, Probe Sequence
tgtctgcaccgcttggtttgcagtt

SEQ ID NO: 280753 - DNA, 25 bp, Probe Sequence
tgtcatcaatggcggttctcatgct

SEQ ID NO: 280754 - DNA, 25 bp, Probe Sequence
tgtcaagcatctggagggtctctct

SEQ ID NO: 280755 - DNA, 25 bp, Probe Sequence
tgtcaatgtcagcagccagtgctcc

SEQ ID NO: 280756 - DNA, 25 bp, Probe Sequence
tgtcatttcagatctgcgcatccac

SEQ ID NO: 280757 - DNA, 25 bp, Probe Sequence
tgtctgttagacttcgttttggtaa

SEQ ID NO: 280758 - DNA, 25 bp, Probe Sequence
tgtctttaggcagcagcttttaata

SEQ ID NO: 280759 - DNA, 25 bp, Probe Sequence
tgttcttgggagtctgaattctcaa

SEQ ID NO: 280760 - DNA, 25 bp, Probe Sequence
tgtcatctttggcatagagaccaaa

SEQ ID NO: 280761 - DNA, 25 bp, Probe Sequence
tgtctttccgagtgtgagcacagct

SEQ ID NO: 280762 - DNA, 25 bp, Probe Sequence
tgtctgtgcccttgaaagaactgat

SEQ ID NO: 280763 - DNA, 25 bp, Probe Sequence
tgttgatgccgttccctgaacatag

SEQ ID NO: 280764 - DNA, 25 bp, Probe Sequence
tgtctggcagttgcctatgtttagc

SEQ ID NO: 280765 - DNA, 25 bp, Probe Sequence
tgtcaggatgttgctccatcctttg

SEQ ID NO: 280766 - DNA, 25 bp, Probe Sequence
tgtagaattagagacatctgatttg

SEQ ID NO: 280767 - DNA, 25 bp, Probe Sequence
tgtagaaatatagacctgtgaaaag

SEQ ID NO: 280768 - DNA, 25 bp, Probe Sequence
tgatgacataaacgtgacccaaaaa

SEQ ID NO: 280769 - DNA, 25 bp, Probe Sequence
tgtactacaagcccaccaagctaaa

SEQ ID NO: 280770 - DNA, 25 bp, Probe Sequence
tgacttcagaagcatcccggataat

SEQ ID NO: 280771 - DNA, 25 bp, Probe Sequence
tctttggaaggacccgcgtaacgtg

SEQ ID NO: 280772 - DNA, 25 bp, Probe Sequence
tccagctggaagtaaccccttccgg

SEQ ID NO: 280773 - DNA, 25 bp, Probe Sequence
tgtactggacaggagacatccccgc

SEQ ID NO: 280774 - DNA, 25 bp, Probe Sequence
tgtacgtgccgcggaaatgctccgc

SEQ ID NO: 280775 - DNA, 25 bp, Probe Sequence
tgtaagtctgtcgcatacatccttc

SEQ ID NO: 280776 - DNA, 25 bp, Probe Sequence
tgtaagggttccacattttcacatc

SEQ ID NO: 280777 - DNA, 25 bp, Probe Sequence
tgtaagggctctctgtggtttgact

SEQ ID NO: 280778 - DNA, 25 bp, Probe Sequence
tgtcaggacgcctaggggtctgtac

SEQ ID NO: 280779 - DNA, 25 bp, Probe Sequence
tgtagaactcactctgggctgtaac

SEQ ID NO: 280780 - DNA, 25 bp, Probe Sequence
tgtaaaccgcatggatgggcttccc

SEQ ID NO: 280781 - DNA, 25 bp, Probe Sequence
tgtaactagctgagctgggattcaa

SEQ ID NO: 280782 - DNA, 25 bp, Probe Sequence
tgtaagctactgcatctggcctata

SEQ ID NO: 280783 - DNA, 25 bp, Probe Sequence
tgtaacatcacgttgcataccttaa

SEQ ID NO: 280784 - DNA, 25 bp, Probe Sequence
tgtcaaccaccatttcagctattaa

SEQ ID NO: 280785 - DNA, 25 bp, Probe Sequence
tgtacagtgacaggctccactttga

SEQ ID NO: 280786 - DNA, 25 bp, Probe Sequence
tgtaaatggctggtccctgccttaa

SEQ ID NO: 280787 - DNA, 25 bp, Probe Sequence
tgtaataggcagatcgacttctcca

SEQ ID NO: 280788 - DNA, 25 bp, Probe Sequence
tgtaatggccaaatgcattccccca

SEQ ID NO: 280789 - DNA, 25 bp, Probe Sequence
tgtacattccaaaggtcaccatctc

SEQ ID NO: 280790 - DNA, 25 bp, Probe Sequence
tgttcatcgacgaggtccacatgct

SEQ ID NO: 280791 - DNA, 25 bp, Probe Sequence
tgtctgtaagccaggattcctgatc

SEQ ID NO: 280792 - DNA, 25 bp, Probe Sequence
tgtctcatagagaagccgcttccgg

SEQ ID NO: 280793 - DNA, 25 bp, Probe Sequence
tgtctccacgaaggcgtcctggagt

SEQ ID NO: 280794 - DNA, 25 bp, Probe Sequence
tgtctcctcgcatgggcatagggac

SEQ ID NO: 280795 - DNA, 25 bp, Probe Sequence
tgtcatccacgtctagtcagggacc

SEQ ID NO: 280796 - DNA, 25 bp, Probe Sequence
tgtatccgggataaccgggacctga

SEQ ID NO: 280797 - DNA, 25 bp, Probe Sequence
tgtacttggtatcactaggaggccc

SEQ ID NO: 280798 - DNA, 25 bp, Probe Sequence
tgtaatctgggacctgccaggcagg

SEQ ID NO: 280799 - DNA, 25 bp, Probe Sequence
tgtcagtgtgtggaccatggtcagg

SEQ ID NO: 280800 - DNA, 25 bp, Probe Sequence
tgtcttgtgggagatgcgtaggggg

SEQ ID NO: 280801 - DNA, 25 bp, Probe Sequence
tgtctctgaggacgtcatcggaggc

SEQ ID NO: 280802 - DNA, 25 bp, Probe Sequence
tgtctgtgacgagctcaggagggct

SEQ ID NO: 280803 - DNA, 25 bp, Probe Sequence
tgtctgtcgaggctgggagggtagc

SEQ ID NO: 280804 - DNA, 25 bp, Probe Sequence
tgtctaggaggactgggcagggtgg

SEQ ID NO: 280805 - DNA, 25 bp, Probe Sequence
tgtagggagggtgggcaatggggtt

SEQ ID NO: 280806 - DNA, 25 bp, Probe Sequence
tgtagagggtggggcagggtggggt

SEQ ID NO: 280807 - DNA, 25 bp, Probe Sequence
tgtagatgggccgcagatcggtggc

SEQ ID NO: 280808 - DNA, 25 bp, Probe Sequence
tgtagtcaacggtcagcttgttggt

SEQ ID NO: 280809 - DNA, 25 bp, Probe Sequence
ttcgccaagggttgtatttagtaag

SEQ ID NO: 280810 - DNA, 25 bp, Probe Sequence
tgtcccaggggtatatttagaccct

SEQ ID NO: 280811 - DNA, 25 bp, Probe Sequence
tttcccgagggaacttctgaccctg

SEQ ID NO: 280812 - DNA, 25 bp, Probe Sequence
tttccctgggaaattccacccagca

SEQ ID NO: 280813 - DNA, 25 bp, Probe Sequence
tgtcttacgagatggcttcaacccc

SEQ ID NO: 280814 - DNA, 25 bp, Probe Sequence
tgtcatcccggatctgtaaccgacc

SEQ ID NO: 280815 - DNA, 25 bp, Probe Sequence
tgtcacctacaatgcgtacatccag

SEQ ID NO: 280816 - DNA, 25 bp, Probe Sequence
tgtctccttctatggggcatatcat

SEQ ID NO: 280817 - DNA, 25 bp, Probe Sequence
tgttgcactacctcggccatgtcat

SEQ ID NO: 280818 - DNA, 25 bp, Probe Sequence
tgtacatctaccgcgggagatttcc

SEQ ID NO: 280819 - DNA, 25 bp, Probe Sequence
tgtaggttcacggcgtggactttgc

SEQ ID NO: 280820 - DNA, 25 bp, Probe Sequence
tgtagagttcacccaatccaacttc

SEQ ID NO: 280821 - DNA, 25 bp, Probe Sequence
tgtaacttcatgtgtctccaacagt

SEQ ID NO: 280822 - DNA, 25 bp, Probe Sequence
tgtcaaccctagcttctcaaaatac

SEQ ID NO: 280823 - DNA, 25 bp, Probe Sequence
tgtatataccatgtactctataaat

SEQ ID NO: 280824 - DNA, 25 bp, Probe Sequence
tgtcaatacactgcatgattttaca

SEQ ID NO: 280825 - DNA, 25 bp, Probe Sequence
tgtcagatcaataacagattaattt

SEQ ID NO: 280826 - DNA, 25 bp, Probe Sequence
tgtctgtacttgtgaaacattgtgt

SEQ ID NO: 280827 - DNA, 25 bp, Probe Sequence
tgtctgtaatctcaacactttggga

SEQ ID NO: 280828 - DNA, 25 bp, Probe Sequence
tgtcagtgaatccagtatagttctg

SEQ ID NO: 280829 - DNA, 25 bp, Probe Sequence
tgtcagctgcccgaatgttgttgca

SEQ ID NO: 280830 - DNA, 25 bp, Probe Sequence
tgtcagcgctcaggaatgtgctccg

SEQ ID NO: 280831 - DNA, 25 bp, Probe Sequence
tgtcacctcagtgacttacagtccc

SEQ ID NO: 280832 - DNA, 25 bp, Probe Sequence
tgtcaaatgcgtgacttcctgggcc

SEQ ID NO: 280833 - DNA, 25 bp, Probe Sequence
tgtacaatcgtttcatcattcggcg

SEQ ID NO: 280834 - DNA, 25 bp, Probe Sequence
tgtcacaatagcagagccattcaac

SEQ ID NO: 280835 - DNA, 25 bp, Probe Sequence
tgtacaattctgaagacactcattc

SEQ ID NO: 280836 - DNA, 25 bp, Probe Sequence
tgtcttatggcccagaactgcattt

SEQ ID NO: 280837 - DNA, 25 bp, Probe Sequence
tgtctcgtgttccaaatccattgct

SEQ ID NO: 280838 - DNA, 25 bp, Probe Sequence
tgtctcctgcttggaaagtctctct

SEQ ID NO: 280839 - DNA, 25 bp, Probe Sequence
tgtcatcagtgctatagtaaattac

SEQ ID NO: 280840 - DNA, 25 bp, Probe Sequence
tgtctcacccatttctaatttcatt

SEQ ID NO: 280841 - DNA, 25 bp, Probe Sequence
tgatgtacccaagtcttacgtttcc

SEQ ID NO: 280842 - DNA, 25 bp, Probe Sequence
tgatatgggctttctctttggtttc

SEQ ID NO: 280843 - DNA, 25 bp, Probe Sequence
tgttgggtaaccggatggggcttct

SEQ ID NO: 280844 - DNA, 25 bp, Probe Sequence
tgtttggtcaaggggtaggtgcaac

SEQ ID NO: 280845 - DNA, 25 bp, Probe Sequence
tgtcttggtgcctggacttgagtct

SEQ ID NO: 280846 - DNA, 25 bp, Probe Sequence
tgtcttcagagcgaggcagtcttac

SEQ ID NO: 280847 - DNA, 25 bp, Probe Sequence
tgtcttccgatcaacatttatgacc

SEQ ID NO: 280848 - DNA, 25 bp, Probe Sequence
tgtcttcaagactttctttgcctct

SEQ ID NO: 280849 - DNA, 25 bp, Probe Sequence
tgtcgacatcaacacatttcgcctc

SEQ ID NO: 280850 - DNA, 25 bp, Probe Sequence
tgtcagacataaagccatgtttcct

SEQ ID NO: 280851 - DNA, 25 bp, Probe Sequence
tgtctgccacgaagggttttctcat

SEQ ID NO: 280852 - DNA, 25 bp, Probe Sequence
tgtctcacattaaagctatttttct

SEQ ID NO: 280853 - DNA, 25 bp, Probe Sequence
tgtctccataagcctgttttttttt

SEQ ID NO: 280854 - DNA, 25 bp, Probe Sequence
tttcctaaacggtgtctttatacat

SEQ ID NO: 280855 - DNA, 25 bp, Probe Sequence
tgttcccaaagcaccctttaaacat

SEQ ID NO: 280856 - DNA, 25 bp, Probe Sequence
tgttttcaattcgccttttaagaag

SEQ ID NO: 280857 - DNA, 25 bp, Probe Sequence
tgtctttaaatcactcttctgtaaa

SEQ ID NO: 280858 - DNA, 25 bp, Probe Sequence
tgttttcttcacacagcttcttaaa

SEQ ID NO: 280859 - DNA, 25 bp, Probe Sequence
tgtctgattttaatgtccgttctta

SEQ ID NO: 280860 - DNA, 25 bp, Probe Sequence
tgtctttttttgaggctaatctatc

SEQ ID NO: 280861 - DNA, 25 bp, Probe Sequence
tgagtttcacctgtggggcaacttc

SEQ ID NO: 280862 - DNA, 25 bp, Probe Sequence
tgcgcttaacgtgagggtgggtcca

SEQ ID NO: 280863 - DNA, 25 bp, Probe Sequence
tgacttaacgtcaagctttgggttg

SEQ ID NO: 280864 - DNA, 25 bp, Probe Sequence
tgcgttacctgtcactattgtgcct

SEQ ID NO: 280865 - DNA, 25 bp, Probe Sequence
tgctgttgaccgtgtcttttcgagc

SEQ ID NO: 280866 - DNA, 25 bp, Probe Sequence
tgtttacaaagtacgtcttcaggtc

SEQ ID NO: 280867 - DNA, 25 bp, Probe Sequence
tgtttacaacatcatcggtggactt

SEQ ID NO: 280868 - DNA, 25 bp, Probe Sequence
taaggaggtaagattgccacgtgcc

SEQ ID NO: 280869 - DNA, 25 bp, Probe Sequence
tgtagaaggtgacgctctgggggca

SEQ ID NO: 280870 - DNA, 25 bp, Probe Sequence
tgtagaaggtgacgctctgggggca

SEQ ID NO: 280871 - DNA, 25 bp, Probe Sequence
tgtagagatggtgagccttggggcc

SEQ ID NO: 280872 - DNA, 25 bp, Probe Sequence
tgtagggggcaagctttggtgcgcc

SEQ ID NO: 280873 - DNA, 25 bp, Probe Sequence
tgtcagcggagaaatggctttgagc

SEQ ID NO: 280874 - DNA, 25 bp, Probe Sequence
tgtcagggagattctggggggcccc

SEQ ID NO: 280875 - DNA, 25 bp, Probe Sequence
tgatcaggcgacaggcggagaggcg

SEQ ID NO: 280876 - DNA, 25 bp, Probe Sequence
tgtacaccgcgccgcggaagggggc

SEQ ID NO: 280877 - DNA, 25 bp, Probe Sequence
tgatcaaccccctgcgaaaggagga

SEQ ID NO: 280878 - DNA, 25 bp, Probe Sequence
tgtctcacccctacggaatcagaga

SEQ ID NO: 280879 - DNA, 25 bp, Probe Sequence
tgtcaaaccctaggatagtctcata

SEQ ID NO: 280880 - DNA, 25 bp, Probe Sequence
tgtaaacctaaccataatcttaaca

SEQ ID NO: 280881 - DNA, 25 bp, Probe Sequence
tgtatacatttgtggaatggcttaa

SEQ ID NO: 280882 - DNA, 25 bp, Probe Sequence
tgtcaccattcttgttgctttttaa

SEQ ID NO: 280883 - DNA, 25 bp, Probe Sequence
tgtacattgctaagatttttttaag

SEQ ID NO: 280884 - DNA, 25 bp, Probe Sequence
tgtcttggctaaattttgatttggg

SEQ ID NO: 280885 - DNA, 25 bp, Probe Sequence
tgtctaccatgattatttttttaag

SEQ ID NO: 280886 - DNA, 25 bp, Probe Sequence
tgtctaacacacttctttttctaag

SEQ ID NO: 280887 - DNA, 25 bp, Probe Sequence
tgtctacataccatttctctcttag

SEQ ID NO: 280888 - DNA, 25 bp, Probe Sequence
tgtactctgtccagttcctttagaa

SEQ ID NO: 280889 - DNA, 25 bp, Probe Sequence
tgtcaacttcctatatccgattaaa

SEQ ID NO: 280890 - DNA, 25 bp, Probe Sequence
tgtaactcaccttttcctaacaaat

SEQ ID NO: 280891 - DNA, 25 bp, Probe Sequence
tgtcaaccctgtttccttaaaagag

SEQ ID NO: 280892 - DNA, 25 bp, Probe Sequence
tgtacacaactcactccttttaaag

SEQ ID NO: 280893 - DNA, 25 bp, Probe Sequence
tgtaaaatgccaggttttttatggt

SEQ ID NO: 280894 - DNA, 25 bp, Probe Sequence
tgtaaagatgccgggttttatattt

SEQ ID NO: 280895 - DNA, 25 bp, Probe Sequence
tgctaacaatgctctggggtctttt

SEQ ID NO: 280896 - DNA, 25 bp, Probe Sequence
tgtacacactgttaggggctcatct

SEQ ID NO: 280897 - DNA, 25 bp, Probe Sequence
tgtacatattgttagggtcagccat

SEQ ID NO: 280898 - DNA, 25 bp, Probe Sequence
tgtacatattgttagggtcagccat

SEQ ID NO: 280899 - DNA, 25 bp, Probe Sequence
tgtattcatgtggcctgggaaggac

SEQ ID NO: 280900 - DNA, 25 bp, Probe Sequence
tgtaatcatgaacctaggccaccat

SEQ ID NO: 280901 - DNA, 25 bp, Probe Sequence
tgtaatgtagacctagtccatcaga

SEQ ID NO: 280902 - DNA, 25 bp, Probe Sequence
tgtaacttggccagatgctccagca

SEQ ID NO: 280903 - DNA, 25 bp, Probe Sequence
tgtctgactttgaggagctgccgcc

SEQ ID NO: 280904 - DNA, 25 bp, Probe Sequence
tgtcatgacggtccaggagctgctg

SEQ ID NO: 280905 - DNA, 25 bp, Probe Sequence
tgtctactggacgatgggcttgagg

SEQ ID NO: 280906 - DNA, 25 bp, Probe Sequence
tgtaattggacagctctctcgaaga

SEQ ID NO: 280907 - DNA, 25 bp, Probe Sequence
tgtaattggacagctctctcgaaga

SEQ ID NO: 280908 - DNA, 25 bp, Probe Sequence
tgtaattggacagctctctcgaaga

SEQ ID NO: 280909 - DNA, 25 bp, Probe Sequence
tgtcaactggagtgctctctcagca

SEQ ID NO: 280910 - DNA, 25 bp, Probe Sequence
tgtaatttcagtagtctctcagctt

SEQ ID NO: 280911 - DNA, 25 bp, Probe Sequence
tgtaactttgcatgttcttgttttg

SEQ ID NO: 280912 - DNA, 25 bp, Probe Sequence
tgtaatgtaggcacttttattttca

SEQ ID NO: 280913 - DNA, 25 bp, Probe Sequence
tgtacatgtacgatattcaaacttt

SEQ ID NO: 280914 - DNA, 25 bp, Probe Sequence
tgtatatggagccctcaccaaagcc

SEQ ID NO: 280915 - DNA, 25 bp, Probe Sequence
tgtttgatgagacctatcctgaccc

SEQ ID NO: 280916 - DNA, 25 bp, Probe Sequence
tgtcactaatagaatatctctgaag

SEQ ID NO: 280917 - DNA, 25 bp, Probe Sequence
tgtactattgaccatcctgaagaca

SEQ ID NO: 280918 - DNA, 25 bp, Probe Sequence
tgtactttgcctacggcagcaacct

SEQ ID NO: 280919 - DNA, 25 bp, Probe Sequence
tgtactcttgcaaacagggaagttt

SEQ ID NO: 280920 - DNA, 25 bp, Probe Sequence
tgtaatttctgcacaggtctctgtt

SEQ ID NO: 280921 - DNA, 25 bp, Probe Sequence
tgtcactttgtcactcgatgtcatt

SEQ ID NO: 280922 - DNA, 25 bp, Probe Sequence
tgtcttgtggacacggaacattaaa

SEQ ID NO: 280923 - DNA, 25 bp, Probe Sequence
tgtctatttacatccgtccttacaa

SEQ ID NO: 280924 - DNA, 25 bp, Probe Sequence
tgttatagtacatctggaccttccc

SEQ ID NO: 280925 - DNA, 25 bp, Probe Sequence
tgtctctgagtattactgagaagca

SEQ ID NO: 280926 - DNA, 25 bp, Probe Sequence
tgtcagtggcatttaaagccatgca

SEQ ID NO: 280927 - DNA, 25 bp, Probe Sequence
tgtctgcgagattgtaggtgcctca

SEQ ID NO: 280928 - DNA, 25 bp, Probe Sequence
tgtaaatgaagtaggctgccatatt

SEQ ID NO: 280929 - DNA, 25 bp, Probe Sequence
tgtagatgtatatatggtgcccttc

SEQ ID NO: 280930 - DNA, 25 bp, Probe Sequence
tgtaaaataccttgtgccctattaa

SEQ ID NO: 280931 - DNA, 25 bp, Probe Sequence
tgaaaaaatcccagccctagtagca

SEQ ID NO: 280932 - DNA, 25 bp, Probe Sequence
tgaacaaaacaggttcctaagtgcc

SEQ ID NO: 280933 - DNA, 25 bp, Probe Sequence
tgtaaaaacatcatttccctgatgg

SEQ ID NO: 280934 - DNA, 25 bp, Probe Sequence
tgtaaagaagtcctttgagcctggc

SEQ ID NO: 280935 - DNA, 25 bp, Probe Sequence
tgtaaacaagtcctttcagttactc

SEQ ID NO: 280936 - DNA, 25 bp, Probe Sequence
ttacaaaactcacaccaggtactta

SEQ ID NO: 280937 - DNA, 25 bp, Probe Sequence
tgtacaaaaaagcaggctggtaccg

SEQ ID NO: 280938 - DNA, 25 bp, Probe Sequence
tgtaccttttagcctggctggtacc

SEQ ID NO: 280939 - DNA, 25 bp, Probe Sequence
tgtacccagttggtgctagtggaag

SEQ ID NO: 280940 - DNA, 25 bp, Probe Sequence
tgtaccacgttcagctcaaggcaga

SEQ ID NO: 280941 - DNA, 25 bp, Probe Sequence
tgtaccagaattcggccatgagccg

SEQ ID NO: 280942 - DNA, 25 bp, Probe Sequence
tgtacctgaaagctcctggcaatgc

SEQ ID NO: 280943 - DNA, 25 bp, Probe Sequence
tgtactaacaagtctccttgcagct

SEQ ID NO: 280944 - DNA, 25 bp, Probe Sequence
tgttttcacacgtacaggatctgta

SEQ ID NO: 280945 - DNA, 25 bp, Probe Sequence
tgtttgacgccgtcaccgatgtcat

SEQ ID NO: 280946 - DNA, 25 bp, Probe Sequence
tgtatggactcccaactgctttaac

SEQ ID NO: 280947 - DNA, 25 bp, Probe Sequence
tgtcatgtgacagaaacttttcctt

SEQ ID NO: 280948 - DNA, 25 bp, Probe Sequence
tgtaaacttactagctttaccttct

SEQ ID NO: 280949 - DNA, 25 bp, Probe Sequence
tgtaaacttactagctttaccttct

SEQ ID NO: 280950 - DNA, 25 bp, Probe Sequence
tgtaaacattagctctttccactgc

SEQ ID NO: 280951 - DNA, 25 bp, Probe Sequence
tgtaattcttctcctttgtcaaatg

SEQ ID NO: 280952 - DNA, 25 bp, Probe Sequence
tgtacctctgaccacttgtgttagg

SEQ ID NO: 280953 - DNA, 25 bp, Probe Sequence
tgtacccagacgaggtggcgtgcgt

SEQ ID NO: 280954 - DNA, 25 bp, Probe Sequence
tgtacgccaacacagtgctgtctgg

SEQ ID NO: 280955 - DNA, 25 bp, Probe Sequence
tgtacccagtgcaggtcagctctgc

SEQ ID NO: 280956 - DNA, 25 bp, Probe Sequence
tgtcattggcggatgtgtcctgctc

SEQ ID NO: 280957 - DNA, 25 bp, Probe Sequence
tgtctctggcacagtttgccttggc

SEQ ID NO: 280958 - DNA, 25 bp, Probe Sequence
tgtctctcacagtgtatgtgatttt

SEQ ID NO: 280959 - DNA, 25 bp, Probe Sequence
tgtctctaaacaatgtgtgatcttt

SEQ ID NO: 280960 - DNA, 25 bp, Probe Sequence
tgtctctgaaagacctttctctgga

SEQ ID NO: 280961 - DNA, 25 bp, Probe Sequence
tgtcttcaagtgacctgtactgctt

SEQ ID NO: 280962 - DNA, 25 bp, Probe Sequence
tgtcttcaattgtcacgcatttctt

SEQ ID NO: 280963 - DNA, 25 bp, Probe Sequence
tgtcttcacttatacttggatttgc

SEQ ID NO: 280964 - DNA, 25 bp, Probe Sequence
tgtcatttctctttactggatgttt

SEQ ID NO: 280965 - DNA, 25 bp, Probe Sequence
tgtcattcacctttcgtgttttttt

SEQ ID NO: 280966 - DNA, 25 bp, Probe Sequence
tgtcattcacctttcgtgttttttt

SEQ ID NO: 280967 - DNA, 25 bp, Probe Sequence
tgtcatatgacacttgggtttttta

SEQ ID NO: 280968 - DNA, 25 bp, Probe Sequence
tgtcttgtgctgtgtggtttgtttt

SEQ ID NO: 280969 - DNA, 25 bp, Probe Sequence
tgtctttcttgtgcagtcagggtct

SEQ ID NO: 280970 - DNA, 25 bp, Probe Sequence
tgtctttctttgtcattcagttcta

SEQ ID NO: 280971 - DNA, 25 bp, Probe Sequence
tgtctttctcttccttttatataaa

SEQ ID NO: 280972 - DNA, 25 bp, Probe Sequence
tgtcttcctaacttttctacgtata

SEQ ID NO: 280973 - DNA, 25 bp, Probe Sequence
tgtctttgctatgctttttatcatt

SEQ ID NO: 280974 - DNA, 25 bp, Probe Sequence
tgtcttatgatcacgtttgccatct

SEQ ID NO: 280975 - DNA, 25 bp, Probe Sequence
tgtctattactttgtttcacatgat

SEQ ID NO: 280976 - DNA, 25 bp, Probe Sequence
tgtcttcatattttaagtgcattga

SEQ ID NO: 280977 - DNA, 25 bp, Probe Sequence
tgtcttgcttgctccaagtcatcta

SEQ ID NO: 280978 - DNA, 25 bp, Probe Sequence
tgtcttcttgtggatctatctcatc

SEQ ID NO: 280979 - DNA, 25 bp, Probe Sequence
tgtctttgatggttcctctgacggc

SEQ ID NO: 280980 - DNA, 25 bp, Probe Sequence
tgtctaccgaggtctcagatacatg

SEQ ID NO: 280981 - DNA, 25 bp, Probe Sequence
tgtcattctcaacatctcagaccac

SEQ ID NO: 280982 - DNA, 25 bp, Probe Sequence
tgtcattcaagccgttattcacacc

SEQ ID NO: 280983 - DNA, 25 bp, Probe Sequence
tgtcttacccacttgagtcaattat

SEQ ID NO: 280984 - DNA, 25 bp, Probe Sequence
tgtcattaaccgtggcacacagaag

SEQ ID NO: 280985 - DNA, 25 bp, Probe Sequence
tgtaccagacgcagaggcacgagag

SEQ ID NO: 280986 - DNA, 25 bp, Probe Sequence
tgtactccagcgtgggcaacagagt

SEQ ID NO: 280987 - DNA, 25 bp, Probe Sequence
tgtactcgcacctggtggactactt

SEQ ID NO: 280988 - DNA, 25 bp, Probe Sequence
tgtacctgcacgggctgaggaacct

SEQ ID NO: 280989 - DNA, 25 bp, Probe Sequence
tgtaggtcacaggttgaggcccagc

SEQ ID NO: 280990 - DNA, 25 bp, Probe Sequence
tgtaggtgaacgctatggctccaag

SEQ ID NO: 280991 - DNA, 25 bp, Probe Sequence
tgtagttaactggttcctgctcaca

SEQ ID NO: 280992 - DNA, 25 bp, Probe Sequence
tgtagtcacattagtttgcctctcc

SEQ ID NO: 280993 - DNA, 25 bp, Probe Sequence
tgtagttgttagttgccctgctacc

SEQ ID NO: 280994 - DNA, 25 bp, Probe Sequence
tgatatttttgacagattcctccca

SEQ ID NO: 280995 - DNA, 25 bp, Probe Sequence
tgtactcttagatggattctccact

SEQ ID NO: 280996 - DNA, 25 bp, Probe Sequence
tgtactcttagatgggtttgatcaa

SEQ ID NO: 280997 - DNA, 25 bp, Probe Sequence
tgtacttatcggtgaatcattgatg

SEQ ID NO: 280998 - DNA, 25 bp, Probe Sequence
tgtcatcttactagcaacaacataa

SEQ ID NO: 280999 - DNA, 25 bp, Probe Sequence
tgtactttttcaacaagcacgacca

SEQ ID NO: 281000 - DNA, 25 bp, Probe Sequence
tgtatatttttcacccctgattatg

SEQ ID NO: 281001 - DNA, 25 bp, Probe Sequence
tgtcttattttaaaccctgtctcca

SEQ ID NO: 281002 - DNA, 25 bp, Probe Sequence
tgttaatgtttaccagcccatcaca

SEQ ID NO: 281003 - DNA, 25 bp, Probe Sequence
tgtcttgggctaaggacccacaccc

SEQ ID NO: 281004 - DNA, 25 bp, Probe Sequence
tgtcttggtgttgtgcagccaggcc

SEQ ID NO: 281005 - DNA, 25 bp, Probe Sequence
tgtcttcctgtcatgtgatgccagg

SEQ ID NO: 281006 - DNA, 25 bp, Probe Sequence
tgtcattccttcatctggccaaaaa

SEQ ID NO: 281007 - DNA, 25 bp, Probe Sequence
tgtctttgcaccacgtctaggaaga

SEQ ID NO: 281008 - DNA, 25 bp, Probe Sequence
tgtcttctggcctacttctgaaaaa

SEQ ID NO: 281009 - DNA, 25 bp, Probe Sequence
tgtattcttggctaattcgcccaga

SEQ ID NO: 281010 - DNA, 25 bp, Probe Sequence
tgtatctctagtcagttcagtagga

SEQ ID NO: 281011 - DNA, 25 bp, Probe Sequence
tgtcatccagaaaatgtgtcagcat

SEQ ID NO: 281012 - DNA, 25 bp, Probe Sequence
tgtcaccgtatttctgtgcctgtat

SEQ ID NO: 281013 - DNA, 25 bp, Probe Sequence
ttcccgaatttctgtcttaggcact

SEQ ID NO: 281014 - DNA, 25 bp, Probe Sequence
ttccccaactaaagcctagaagagc

SEQ ID NO: 281015 - DNA, 25 bp, Probe Sequence
ttcccgaagtcctgttcagaaggac

SEQ ID NO: 281016 - DNA, 25 bp, Probe Sequence
tgtacctaagttttttaatgagtga

SEQ ID NO: 281017 - DNA, 25 bp, Probe Sequence
tgtcacaatcaatgtttttatctga

SEQ ID NO: 281018 - DNA, 25 bp, Probe Sequence
tgtaccaaagggtcatgtggatcat

SEQ ID NO: 281019 - DNA, 25 bp, Probe Sequence
tgtcactcaaagctatatggctatt

SEQ ID NO: 281020 - DNA, 25 bp, Probe Sequence
tgtcatctcaagaagtgtatggttt

SEQ ID NO: 281021 - DNA, 25 bp, Probe Sequence
tgtcatcttgagctcttcatttatt

SEQ ID NO: 281022 - DNA, 25 bp, Probe Sequence
tgtcttatatgcattatcttttata

SEQ ID NO: 281023 - DNA, 25 bp, Probe Sequence
tgtctttatttagttgtttatttat

SEQ ID NO: 281024 - DNA, 25 bp, Probe Sequence
tgtcattctttaattttgttgtttt

SEQ ID NO: 281025 - DNA, 25 bp, Probe Sequence
tgttcctgttgtttttaactagctt

SEQ ID NO: 281026 - DNA, 25 bp, Probe Sequence
tgttcgcagttatcagggagagcta

SEQ ID NO: 281027 - DNA, 25 bp, Probe Sequence
tgtcatggatgtcctgaagggagac

SEQ ID NO: 281028 - DNA, 25 bp, Probe Sequence
tgtcagcgagctgtgcaacgtgggc

SEQ ID NO: 281029 - DNA, 25 bp, Probe Sequence
tgtcacgagctcgttagctgcgttc

SEQ ID NO: 281030 - DNA, 25 bp, Probe Sequence
tgtacgagctgtgctatacctgtcc

SEQ ID NO: 281031 - DNA, 25 bp, Probe Sequence
tgttttctgccagttaccattgcca

SEQ ID NO: 281032 - DNA, 25 bp, Probe Sequence
tgtttgaatgcctctaaagcccatg

SEQ ID NO: 281033 - DNA, 25 bp, Probe Sequence
tgtttggacttcgatgaaggaccgg

SEQ ID NO: 281034 - DNA, 25 bp, Probe Sequence
tgtactggagcaatcagatcacacg

SEQ ID NO: 281035 - DNA, 25 bp, Probe Sequence
tgattctgtggaaaatacccccctt

SEQ ID NO: 281036 - DNA, 25 bp, Probe Sequence
tgttatggaaatttggccccactta

SEQ ID NO: 281037 - DNA, 25 bp, Probe Sequence
tgccttggaaaggaggccctcccga

SEQ ID NO: 281038 - DNA, 25 bp, Probe Sequence
tgttaggaatgggaggccccttcct

SEQ ID NO: 281039 - DNA, 25 bp, Probe Sequence
tcattaaggagtgacccctttcctg

SEQ ID NO: 281040 - DNA, 25 bp, Probe Sequence
tgtaaagtgacagtaacccctacct

SEQ ID NO: 281041 - DNA, 25 bp, Probe Sequence
tgtacaaagccaaataccccatcgt

SEQ ID NO: 281042 - DNA, 25 bp, Probe Sequence
tgtaaagacctgcaactcagccatc

SEQ ID NO: 281043 - DNA, 25 bp, Probe Sequence
tgtcaaaactggacaaggcagcctc

SEQ ID NO: 281044 - DNA, 25 bp, Probe Sequence
tgttcactccttgaaggacctgccc

SEQ ID NO: 281045 - DNA, 25 bp, Probe Sequence
tgatccagcccgggagaggaccgag

SEQ ID NO: 281046 - DNA, 25 bp, Probe Sequence
tgttcgggcgccggaagacgccaga

SEQ ID NO: 281047 - DNA, 25 bp, Probe Sequence
tgtttagggccttaagcccctgagg

SEQ ID NO: 281048 - DNA, 25 bp, Probe Sequence
tgttttggccaccaaaatccacggg

SEQ ID NO: 281049 - DNA, 25 bp, Probe Sequence
tgttttggcacgcgaaagtcaacgg

SEQ ID NO: 281050 - DNA, 25 bp, Probe Sequence
tgtatttggcaactgtgggcaataa

SEQ ID NO: 281051 - DNA, 25 bp, Probe Sequence
tgtatttcacaatgtcgtgctaaat

SEQ ID NO: 281052 - DNA, 25 bp, Probe Sequence
tgtcatgttccgtgctgctttaaat

SEQ ID NO: 281053 - DNA, 25 bp, Probe Sequence
tgtcattgtttgctgttattagtaa

SEQ ID NO: 281054 - DNA, 25 bp, Probe Sequence
tgtactgtttgccattattacagtc

SEQ ID NO: 281055 - DNA, 25 bp, Probe Sequence
tgtcacttattccatttgtacctaa

SEQ ID NO: 281056 - DNA, 25 bp, Probe Sequence
tgtcatttattgaatcgttatacta

SEQ ID NO: 281057 - DNA, 25 bp, Probe Sequence
tgtcattaagtgcagaaataactaa

SEQ ID NO: 281058 - DNA, 25 bp, Probe Sequence
tgtcattaatttgctactgaactta

SEQ ID NO: 281059 - DNA, 25 bp, Probe Sequence
tgtttactgcagttgctcaggaact

SEQ ID NO: 281060 - DNA, 25 bp, Probe Sequence
tgtagtacagagatccagataagag

SEQ ID NO: 281061 - DNA, 25 bp, Probe Sequence
tgtcactcctgagatctgcaaacag

SEQ ID NO: 281062 - DNA, 25 bp, Probe Sequence
tgtaccgcgaggggcatgtgaagga

SEQ ID NO: 281063 - DNA, 25 bp, Probe Sequence
tgtcacacagtaggcccagtgcaag

SEQ ID NO: 281064 - DNA, 25 bp, Probe Sequence
tgataccgtagccccaggtgaaaac

SEQ ID NO: 281065 - DNA, 25 bp, Probe Sequence
tgtagccgatgaggcccaggtacag

SEQ ID NO: 281066 - DNA, 25 bp, Probe Sequence
tgtacggtctcagcgcggtacagac

SEQ ID NO: 281067 - DNA, 25 bp, Probe Sequence
tgtacggtcactgttggtgcgagac

SEQ ID NO: 281068 - DNA, 25 bp, Probe Sequence
tgtacttgtcacattggtgttggac

SEQ ID NO: 281069 - DNA, 25 bp, Probe Sequence
tgttctttcacttgggctgtttgag

SEQ ID NO: 281070 - DNA, 25 bp, Probe Sequence
tgtttttccgttcatctgttgaggg

SEQ ID NO: 281071 - DNA, 25 bp, Probe Sequence
tgtatttatccctgaacatgttttg

SEQ ID NO: 281072 - DNA, 25 bp, Probe Sequence
tgtatggtatcaaattcaaactctt

SEQ ID NO: 281073 - DNA, 25 bp, Probe Sequence
tgttgagtacatatactgacagctc

SEQ ID NO: 281074 - DNA, 25 bp, Probe Sequence
tgtatgcccacagctactggaatcc

SEQ ID NO: 281075 - DNA, 25 bp, Probe Sequence
tgtatgtctccatctattgatgagg

SEQ ID NO: 281076 - DNA, 25 bp, Probe Sequence
tgtatgacgctgggcacgttgagtg

SEQ ID NO: 281077 - DNA, 25 bp, Probe Sequence
tgtatgacgctgggcacgttgagtg

SEQ ID NO: 281078 - DNA, 25 bp, Probe Sequence
tgtaatcgctcaagcctgatctggg

SEQ ID NO: 281079 - DNA, 25 bp, Probe Sequence
tgtacccaacagtctcattgagagc

SEQ ID NO: 281080 - DNA, 25 bp, Probe Sequence
tgtacccagactccacatgacgggc

SEQ ID NO: 281081 - DNA, 25 bp, Probe Sequence
tgtagcccgagggcaacatccttcg

SEQ ID NO: 281082 - DNA, 25 bp, Probe Sequence
tgtaccctatggtctaatcactccc

SEQ ID NO: 281083 - DNA, 25 bp, Probe Sequence
tgtactctcctggactgaatgcagt

SEQ ID NO: 281084 - DNA, 25 bp, Probe Sequence
tgtaatcccatggagctaagcagta

SEQ ID NO: 281085 - DNA, 25 bp, Probe Sequence
tgtcatacactaagcagccagccag

SEQ ID NO: 281086 - DNA, 25 bp, Probe Sequence
tgtaaccttagactcagccagtttc

SEQ ID NO: 281087 - DNA, 25 bp, Probe Sequence
tgtaccctgagaactcagagcagtt

SEQ ID NO: 281088 - DNA, 25 bp, Probe Sequence
tgtagggtacagaatagagcgtgtg

SEQ ID NO: 281089 - DNA, 25 bp, Probe Sequence
tgtactcgtaaaacaaggatcatcg

SEQ ID NO: 281090 - DNA, 25 bp, Probe Sequence
tgtactcgtaaaacaaggatcatcg

SEQ ID NO: 281091 - DNA, 25 bp, Probe Sequence
tgtagacctgaatccacagtattat

SEQ ID NO: 281092 - DNA, 25 bp, Probe Sequence
tgtaacatttactccagcatctatt

SEQ ID NO: 281093 - DNA, 25 bp, Probe Sequence
tgtaacagtctagaacactcctctc

SEQ ID NO: 281094 - DNA, 25 bp, Probe Sequence
tgtcaaatgatgtgcaaaacctttt

SEQ ID NO: 281095 - DNA, 25 bp, Probe Sequence
tgtcactgctgggccaagaagcctt

SEQ ID NO: 281096 - DNA, 25 bp, Probe Sequence
tgtatctgctttgaagggcctacct

SEQ ID NO: 281097 - DNA, 25 bp, Probe Sequence
tgtatctgctttgaagggcctacct

SEQ ID NO: 281098 - DNA, 25 bp, Probe Sequence
tgttcagttccaaggagtcccagcg

SEQ ID NO: 281099 - DNA, 25 bp, Probe Sequence
tgtacagcgtcctcgaaaccacgag

SEQ ID NO: 281100 - DNA, 25 bp, Probe Sequence
ttaccgagccctgagaaacaaagac

SEQ ID NO: 281101 - DNA, 25 bp, Probe Sequence
tgttgcccaccatggaaattaaaga

SEQ ID NO: 281102 - DNA, 25 bp, Probe Sequence
tgttcctccaaacaaaaacaaaatg

SEQ ID NO: 281103 - DNA, 25 bp, Probe Sequence
tgttacccacagtaaacgaactttg

SEQ ID NO: 281104 - DNA, 25 bp, Probe Sequence
tgttagccgcccgaaggtacaagtt

SEQ ID NO: 281105 - DNA, 25 bp, Probe Sequence
tgtaactcgacccagtggtacaatg

SEQ ID NO: 281106 - DNA, 25 bp, Probe Sequence
tgtaactccacctgagttacaaaga

SEQ ID NO: 281107 - DNA, 25 bp, Probe Sequence
tgataacttaccttagcattgccaa

SEQ ID NO: 281108 - DNA, 25 bp, Probe Sequence
tgtaacttagctttagtcttataaa

SEQ ID NO: 281109 - DNA, 25 bp, Probe Sequence
tgtatcccaagcagcggtcattcaa

SEQ ID NO: 281110 - DNA, 25 bp, Probe Sequence
tgtatcccaagcagcggtcattcaa

SEQ ID NO: 281111 - DNA, 25 bp, Probe Sequence
tgtcatccacaacttcctatattag

SEQ ID NO: 281112 - DNA, 25 bp, Probe Sequence
tgtatcctgcacctactttaatgat

SEQ ID NO: 281113 - DNA, 25 bp, Probe Sequence
tgtacattgatggacacttaagatg

SEQ ID NO: 281114 - DNA, 25 bp, Probe Sequence
tgtcagttatgttcctgttaatggg

SEQ ID NO: 281115 - DNA, 25 bp, Probe Sequence
tgtatgagttgttgttgggaaaggg

SEQ ID NO: 281116 - DNA, 25 bp, Probe Sequence
tgtagatgtctgatggtttgaggag

SEQ ID NO: 281117 - DNA, 25 bp, Probe Sequence
tgtagttttttgccttttagacaag

SEQ ID NO: 281118 - DNA, 25 bp, Probe Sequence
tgtcactttttctcatgttctaatt

SEQ ID NO: 281119 - DNA, 25 bp, Probe Sequence
tgtactgttgttaggcagctctgta

SEQ ID NO: 281120 - DNA, 25 bp, Probe Sequence
tgtcacttgttgggagcatgagcag

SEQ ID NO: 281121 - DNA, 25 bp, Probe Sequence
tgtcactgtcagatggtctgcagcg

SEQ ID NO: 281122 - DNA, 25 bp, Probe Sequence
tgtacgctcataatcgagtgccgat

SEQ ID NO: 281123 - DNA, 25 bp, Probe Sequence
tgtagcactttgttgacttccatgg

SEQ ID NO: 281124 - DNA, 25 bp, Probe Sequence
tgtagactttcagcagcaatctcag

SEQ ID NO: 281125 - DNA, 25 bp, Probe Sequence
tgatagtcatttgcccgtcaagtta

SEQ ID NO: 281126 - DNA, 25 bp, Probe Sequence
tgataaattcatagcccaacaaggt

SEQ ID NO: 281127 - DNA, 25 bp, Probe Sequence
tgtaaatctactactaaaacgtcca

SEQ ID NO: 281128 - DNA, 25 bp, Probe Sequence
tgtaatatctgtgctctaataacga

SEQ ID NO: 281129 - DNA, 25 bp, Probe Sequence
tgtcaatcatttgtcacatttatcc

SEQ ID NO: 281130 - DNA, 25 bp, Probe Sequence
tgtaatgcactgatgtccttttggt

SEQ ID NO: 281131 - DNA, 25 bp, Probe Sequence
tgtaagcatgtttacctgttggctt

SEQ ID NO: 281132 - DNA, 25 bp, Probe Sequence
tgtaatgccaccaacgccattggct

SEQ ID NO: 281133 - DNA, 25 bp, Probe Sequence
tgtaggacaccttcagctatggcct

SEQ ID NO: 281134 - DNA, 25 bp, Probe Sequence
tgtcacgctcacagtagccatagct

SEQ ID NO: 281135 - DNA, 25 bp, Probe Sequence
tgtcaccttctagaccacatgatag

SEQ ID NO: 281136 - DNA, 25 bp, Probe Sequence
tgtacctctggtctccagcagatga

SEQ ID NO: 281137 - DNA, 25 bp, Probe Sequence
tgtaacccgctcatcactggatgaa

SEQ ID NO: 281138 - DNA, 25 bp, Probe Sequence
tgtaggctccctatcattatatata

SEQ ID NO: 281139 - DNA, 25 bp, Probe Sequence
tgtacagctactcataattttttaa

SEQ ID NO: 281140 - DNA, 25 bp, Probe Sequence
tgtaattatttttcagtctttttca

SEQ ID NO: 281141 - DNA, 25 bp, Probe Sequence
tgtaatttgattttttgctcccttc

SEQ ID NO: 281142 - DNA, 25 bp, Probe Sequence
tgtaatttattgttgcgttcctctg

SEQ ID NO: 281143 - DNA, 25 bp, Probe Sequence
tgtagatttttactgattgtcctgg

SEQ ID NO: 281144 - DNA, 25 bp, Probe Sequence
tgttgttttgtacaggttcgttgtt

SEQ ID NO: 281145 - DNA, 25 bp, Probe Sequence
tgttgtttctgccaaaggtaaatta

SEQ ID NO: 281146 - DNA, 25 bp, Probe Sequence
tgtattttctgttaatagtacctaa

SEQ ID NO: 281147 - DNA, 25 bp, Probe Sequence
tgttttttgtcattggcgtgcacac

SEQ ID NO: 281148 - DNA, 25 bp, Probe Sequence
tgtttcttttaataatgtcacgagc

SEQ ID NO: 281149 - DNA, 25 bp, Probe Sequence
tgtttttaataatatcggccgctgt

SEQ ID NO: 281150 - DNA, 25 bp, Probe Sequence
tattcaaaagacggactcggccctt

SEQ ID NO: 281151 - DNA, 25 bp, Probe Sequence
ttaaaaagccttgaatggcccttgt

SEQ ID NO: 281152 - DNA, 25 bp, Probe Sequence
tgttaccaacctccaaagggctctt

SEQ ID NO: 281153 - DNA, 25 bp, Probe Sequence
tgttacgtccctgctgaagtgtgca

SEQ ID NO: 281154 - DNA, 25 bp, Probe Sequence
tgttacataacaccccaaattaact

SEQ ID NO: 281155 - DNA, 25 bp, Probe Sequence
tgtttaaacggcccgcatcttaatt

SEQ ID NO: 281156 - DNA, 25 bp, Probe Sequence
tgttaaaaagagcccagcacctcct

SEQ ID NO: 281157 - DNA, 25 bp, Probe Sequence
tgtttatcaaaagcaagccccccag

SEQ ID NO: 281158 - DNA, 25 bp, Probe Sequence
tgttttagaatggacagccctcccc

SEQ ID NO: 281159 - DNA, 25 bp, Probe Sequence
tgtttattgccggaagctggacccc

SEQ ID NO: 281160 - DNA, 25 bp, Probe Sequence
tgtattaatcacgcgatgttgactg

SEQ ID NO: 281161 - DNA, 25 bp, Probe Sequence
tgtatttgaagggagcagatgctga

SEQ ID NO: 281162 - DNA, 25 bp, Probe Sequence
tgtagttgtggggggatgtgtgtgt

SEQ ID NO: 281163 - DNA, 25 bp, Probe Sequence
tgtactttgaggagaagtttcttat

SEQ ID NO: 281164 - DNA, 25 bp, Probe Sequence
tgtttttaaacaggagccttttatg

SEQ ID NO: 281165 - DNA, 25 bp, Probe Sequence
tgtttatgtttaccttccttactag

SEQ ID NO: 281166 - DNA, 25 bp, Probe Sequence
tgtttcaaattctctatcctttcta

SEQ ID NO: 281167 - DNA, 25 bp, Probe Sequence
tgtttggactttgtatactttaaat

SEQ ID NO: 281168 - DNA, 25 bp, Probe Sequence
tgtaatttgttagctaagtttaagt

SEQ ID NO: 281169 - DNA, 25 bp, Probe Sequence
tgtactttgtatctctaaatctaaa

SEQ ID NO: 281170 - DNA, 25 bp, Probe Sequence
ttggtttgttgaccataaccgtaca

SEQ ID NO: 281171 - DNA, 25 bp, Probe Sequence
tgtttttgtctgtgcaagacctgca

SEQ ID NO: 281172 - DNA, 25 bp, Probe Sequence
tgtagctttttgttcaatgacttga

SEQ ID NO: 281173 - DNA, 25 bp, Probe Sequence
tgtaccttttgatagatccacataa

SEQ ID NO: 281174 - DNA, 25 bp, Probe Sequence
tgtaacctgtgtgaagcagcagcca

SEQ ID NO: 281175 - DNA, 25 bp, Probe Sequence
tgtaacctgataaattcatagccca

SEQ ID NO: 281176 - DNA, 25 bp, Probe Sequence
tgtaaccagtgatatgattattcct

SEQ ID NO: 281177 - DNA, 25 bp, Probe Sequence
tgtaagacagtccaatttatgaatt

SEQ ID NO: 281178 - DNA, 25 bp, Probe Sequence
tgctgtgaaagctgaattaattaat

SEQ ID NO: 281179 - DNA, 25 bp, Probe Sequence
tgtatgatatggtgttttttagatg

SEQ ID NO: 281180 - DNA, 25 bp, Probe Sequence
tgtaataggctacctttttttgtct

SEQ ID NO: 281181 - DNA, 25 bp, Probe Sequence
tgtagaacctgagtatttttctttt

SEQ ID NO: 281182 - DNA, 25 bp, Probe Sequence
tgttaagttagtctgttgttatagt

SEQ ID NO: 281183 - DNA, 25 bp, Probe Sequence
tgttctaagtagatttaatttggga

SEQ ID NO: 281184 - DNA, 25 bp, Probe Sequence
tgtttaagtggttctagcttttggg

SEQ ID NO: 281185 - DNA, 25 bp, Probe Sequence
ttttgggtatatactcagttacggg

SEQ ID NO: 281186 - DNA, 25 bp, Probe Sequence
tttcggctataattccgccaaagtg

SEQ ID NO: 281187 - DNA, 25 bp, Probe Sequence
tgtttggaaacaaccccttgagctg

SEQ ID NO: 281188 - DNA, 25 bp, Probe Sequence
tgttttcagtaaagtctcgttacgc

SEQ ID NO: 281189 - DNA, 25 bp, Probe Sequence
tgttttctgtaatgtctgatactag

SEQ ID NO: 281190 - DNA, 25 bp, Probe Sequence
tgtttttgtgtccagctcagtatct

SEQ ID NO: 281191 - DNA, 25 bp, Probe Sequence
tgtttggtttcccatctaatcaact

SEQ ID NO: 281192 - DNA, 25 bp, Probe Sequence
tgtagtggttttggactcttcccag

SEQ ID NO: 281193 - DNA, 25 bp, Probe Sequence
tgtaatgctgttttggaatcatccc

SEQ ID NO: 281194 - DNA, 25 bp, Probe Sequence
tgtacagccctcttgtatagcatcc

SEQ ID NO: 281195 - DNA, 25 bp, Probe Sequence
tgtacagacttcttggtacccagtc

SEQ ID NO: 281196 - DNA, 25 bp, Probe Sequence
tgtacagtctacttttgaactattt

SEQ ID NO: 281197 - DNA, 25 bp, Probe Sequence
tgttaggccagctattttccttttc

SEQ ID NO: 281198 - DNA, 25 bp, Probe Sequence
tcttaggggcgtttttgccttgtgg

SEQ ID NO: 281199 - DNA, 25 bp, Probe Sequence
tgtttgggctgcctaacttccattt

SEQ ID NO: 281200 - DNA, 25 bp, Probe Sequence
tgatattgccctcatcaagcttgca

SEQ ID NO: 281201 - DNA, 25 bp, Probe Sequence
tgtaagcacacatgtaattgatgat

SEQ ID NO: 281202 - DNA, 25 bp, Probe Sequence
tgtaagcacacatgatccctctgaa

SEQ ID NO: 281203 - DNA, 25 bp, Probe Sequence
tgtaatgcaccactgtcgtttacca

SEQ ID NO: 281204 - DNA, 25 bp, Probe Sequence
tgtattacacgttcgttgtcaacat

SEQ ID NO: 281205 - DNA, 25 bp, Probe Sequence
tgtactgacgctgcactttgtaaac

SEQ ID NO: 281206 - DNA, 25 bp, Probe Sequence
tgtaatcacggcactttggaaggcc

SEQ ID NO: 281207 - DNA, 25 bp, Probe Sequence
tgtaatcccagcactttgggaggcc

SEQ ID NO: 281208 - DNA, 25 bp, Probe Sequence
tgtaatcccagctactcgggaggct

SEQ ID NO: 281209 - DNA, 25 bp, Probe Sequence
tgtaatcccagctacacaggaggct

SEQ ID NO: 281210 - DNA, 25 bp, Probe Sequence
tgtaatcccagctacacaggaggct

SEQ ID NO: 281211 - DNA, 25 bp, Probe Sequence
tgtagaccctcatcagagactgact

SEQ ID NO: 281212 - DNA, 25 bp, Probe Sequence
tgtaacggctcttagcacactcaca

SEQ ID NO: 281213 - DNA, 25 bp, Probe Sequence
tgctacgggccctagacaatacgat

SEQ ID NO: 281214 - DNA, 25 bp, Probe Sequence
tccagctcggtaaagaaatagcgtc

SEQ ID NO: 281215 - DNA, 25 bp, Probe Sequence
tccaatcagggaagtaagtacgtca

SEQ ID NO: 281216 - DNA, 25 bp, Probe Sequence
tactaagttaagagaatcatcgatc

SEQ ID NO: 281217 - DNA, 25 bp, Probe Sequence
tactatgtttcgtctacagttgcct

SEQ ID NO: 281218 - DNA, 25 bp, Probe Sequence
tactagttccgtcttttgtgtggcc

SEQ ID NO: 281219 - DNA, 25 bp, Probe Sequence
tactaattatccattccttttggcc

SEQ ID NO: 281220 - DNA, 25 bp, Probe Sequence
tcccaacttccctgatctttaagac

SEQ ID NO: 281221 - DNA, 25 bp, Probe Sequence
tcccacttttctgtttttcaagaat

SEQ ID NO: 281222 - DNA, 25 bp, Probe Sequence
tcccacgttttaactttctaagcat

SEQ ID NO: 281223 - DNA, 25 bp, Probe Sequence
tttcccctattacctggtgcaaaat

SEQ ID NO: 281224 - DNA, 25 bp, Probe Sequence
tgttcccacgtttcccgggatatat

SEQ ID NO: 281225 - DNA, 25 bp, Probe Sequence
tttccaaaatgcacactgcgggtta

SEQ ID NO: 281226 - DNA, 25 bp, Probe Sequence
tgttcgaaaacgtcggcaggttcta

SEQ ID NO: 281227 - DNA, 25 bp, Probe Sequence
tgttctggaatacttcggaagttaa

SEQ ID NO: 281228 - DNA, 25 bp, Probe Sequence
tgattcgggttttggccaagttaca

SEQ ID NO: 281229 - DNA, 25 bp, Probe Sequence
tgtttgttttcttggctaagattaa

SEQ ID NO: 281230 - DNA, 25 bp, Probe Sequence
tgttactacttttaccaagcggaag

SEQ ID NO: 281231 - DNA, 25 bp, Probe Sequence
tgattaaacctagacgcattaggaa

SEQ ID NO: 281232 - DNA, 25 bp, Probe Sequence
tgtttcaaccttttcactaaggaag

SEQ ID NO: 281233 - DNA, 25 bp, Probe Sequence
tgtataacagccttttccttctggt

SEQ ID NO: 281234 - DNA, 25 bp, Probe Sequence
tgttaaaccagtgtccttgtgatac

SEQ ID NO: 281235 - DNA, 25 bp, Probe Sequence
tgttttactcctttttattcatacg

SEQ ID NO: 281236 - DNA, 25 bp, Probe Sequence
tgttttactcctttttattcatacg

SEQ ID NO: 281237 - DNA, 25 bp, Probe Sequence
tgttttcaccttttaggttgctaag

SEQ ID NO: 281238 - DNA, 25 bp, Probe Sequence
tgttttcaaccattcttggtttaag

SEQ ID NO: 281239 - DNA, 25 bp, Probe Sequence
tttaccaagccgttggtctcctaag

SEQ ID NO: 281240 - DNA, 25 bp, Probe Sequence
tgtttaaagccgttggccttgctcc

SEQ ID NO: 281241 - DNA, 25 bp, Probe Sequence
tgtttaaacctgtattaataggcaa

SEQ ID NO: 281242 - DNA, 25 bp, Probe Sequence
tgttacttaccttgttattaaatat

SEQ ID NO: 281243 - DNA, 25 bp, Probe Sequence
tgattagtgtactgtttgaaacaaa

SEQ ID NO: 281244 - DNA, 25 bp, Probe Sequence
tgtttgtggcactttatcttcaagc

SEQ ID NO: 281245 - DNA, 25 bp, Probe Sequence
tgttcgtggtgagctacgccaagga

SEQ ID NO: 281246 - DNA, 25 bp, Probe Sequence
tgttcagtttgggtacgttggtgta

SEQ ID NO: 281247 - DNA, 25 bp, Probe Sequence
tgcttagggtttgactggctgggct

SEQ ID NO: 281248 - DNA, 25 bp, Probe Sequence
tgttaggaggttgccttggtgctgc

SEQ ID NO: 281249 - DNA, 25 bp, Probe Sequence
tgcttagaaagtgtgccttggccag

SEQ ID NO: 281250 - DNA, 25 bp, Probe Sequence
tcctagtccaatgtccttaggaccc

SEQ ID NO: 281251 - DNA, 25 bp, Probe Sequence
tccatttccgagctcctaagaaata

SEQ ID NO: 281252 - DNA, 25 bp, Probe Sequence
tgaattttccagctccccagaaaat

SEQ ID NO: 281253 - DNA, 25 bp, Probe Sequence
tgtttttaagcattcacccaaacaa

SEQ ID NO: 281254 - DNA, 25 bp, Probe Sequence
tgttcattttagcaccggaagcagt

SEQ ID NO: 281255 - DNA, 25 bp, Probe Sequence
tgttcatgtttctgaccttgcacta

SEQ ID NO: 281256 - DNA, 25 bp, Probe Sequence
tgttagcagttcttcccttggaaag

SEQ ID NO: 281257 - DNA, 25 bp, Probe Sequence
tgtttcaggagctcttctaggtaaa

SEQ ID NO: 281258 - DNA, 25 bp, Probe Sequence
tgattcgaatgacactgttcaggaa

SEQ ID NO: 281259 - DNA, 25 bp, Probe Sequence
tgttcgaaagcatcttgagaggaac

SEQ ID NO: 281260 - DNA, 25 bp, Probe Sequence
tgtaccatttgcactgtgagcaaat

SEQ ID NO: 281261 - DNA, 25 bp, Probe Sequence
tgtacaattatgtctcttgagcatc

SEQ ID NO: 281262 - DNA, 25 bp, Probe Sequence
tgtacaattatgtctcttgagcatc

SEQ ID NO: 281263 - DNA, 25 bp, Probe Sequence
tgtacatatcattaagcattggctg

SEQ ID NO: 281264 - DNA, 25 bp, Probe Sequence
tgtacattccacaagcattgccttc

SEQ ID NO: 281265 - DNA, 25 bp, Probe Sequence
tgtacataacactagaggcatttct

SEQ ID NO: 281266 - DNA, 25 bp, Probe Sequence
tgtactcatccctgggcatatgtgt

SEQ ID NO: 281267 - DNA, 25 bp, Probe Sequence
tgtaccttctgctgtgtgtgtgtat

SEQ ID NO: 281268 - DNA, 25 bp, Probe Sequence
tgtaccccatgccgtgagggtgtgg

SEQ ID NO: 281269 - DNA, 25 bp, Probe Sequence
tgagatcgaccgcgaggtggtgcgc

SEQ ID NO: 281270 - DNA, 25 bp, Probe Sequence
tgaccggccaggaaacggtcgccca

SEQ ID NO: 281271 - DNA, 25 bp, Probe Sequence
tcaccgacctcaagaacggttccct

SEQ ID NO: 281272 - DNA, 25 bp, Probe Sequence
tacggacctcggaaagtattcctgg

SEQ ID NO: 281273 - DNA, 25 bp, Probe Sequence
tatgcgggtttcctaaaaattctgg

SEQ ID NO: 281274 - DNA, 25 bp, Probe Sequence
tgagtgggaaatggctaaaacaatt

SEQ ID NO: 281275 - DNA, 25 bp, Probe Sequence
tgttggcgagaagatccaaaagatt

SEQ ID NO: 281276 - DNA, 25 bp, Probe Sequence
tgtatccgaaaattgctaagacagt

SEQ ID NO: 281277 - DNA, 25 bp, Probe Sequence
tgatatcgtgatgtacctaaaagtc

SEQ ID NO: 281278 - DNA, 25 bp, Probe Sequence
tgttcgtagtttgtataatcagtca

SEQ ID NO: 281279 - DNA, 25 bp, Probe Sequence
tgttctttggttggtaaggcctaag

SEQ ID NO: 281280 - DNA, 25 bp, Probe Sequence
tgctgtttttttgtactggacttta

SEQ ID NO: 281281 - DNA, 25 bp, Probe Sequence
tgttttcctcttagtattcctttgt

SEQ ID NO: 281282 - DNA, 25 bp, Probe Sequence
tgtactacgtttggtattttgtctt

SEQ ID NO: 281283 - DNA, 25 bp, Probe Sequence
tgtacataatgtattgttggtaatt

SEQ ID NO: 281284 - DNA, 25 bp, Probe Sequence
tgtagtttgtttagcctggttttgc

SEQ ID NO: 281285 - DNA, 25 bp, Probe Sequence
tgcgttttgtcacttttcgttttgc

SEQ ID NO: 281286 - DNA, 25 bp, Probe Sequence
tgctttttgaccctactggacattt

SEQ ID NO: 281287 - DNA, 25 bp, Probe Sequence
tgttttgcagcaaatcaacggactt

SEQ ID NO: 281288 - DNA, 25 bp, Probe Sequence
tgttctgtgcaccacgaacgttctt

SEQ ID NO: 281289 - DNA, 25 bp, Probe Sequence
tgttctgcagctcaaattccatttt

SEQ ID NO: 281290 - DNA, 25 bp, Probe Sequence
tgtttcattgcgaatcttttttagc

SEQ ID NO: 281291 - DNA, 25 bp, Probe Sequence
tgttttctggtaattacgttgacaa

SEQ ID NO: 281292 - DNA, 25 bp, Probe Sequence
tgttttcttttcagcctgttactgt

SEQ ID NO: 281293 - DNA, 25 bp, Probe Sequence
tgttacctgtttaggcctagaagtt

SEQ ID NO: 281294 - DNA, 25 bp, Probe Sequence
tgttaccttactcttcccaaggtga

SEQ ID NO: 281295 - DNA, 25 bp, Probe Sequence
tgtacccatctcaaatgttcccaag

SEQ ID NO: 281296 - DNA, 25 bp, Probe Sequence
tgtaacagcattcagaatctgccca

SEQ ID NO: 281297 - DNA, 25 bp, Probe Sequence
tgtaagctattttgagtgtgactat

SEQ ID NO: 281298 - DNA, 25 bp, Probe Sequence
tgtacagcatgctatctatagttaa

SEQ ID NO: 281299 - DNA, 25 bp, Probe Sequence
tgtacacataattatcatgttgata

SEQ ID NO: 281300 - DNA, 25 bp, Probe Sequence
tgtacacaaatgttgcttcatgcac

SEQ ID NO: 281301 - DNA, 25 bp, Probe Sequence
tgtacatgcgcagtgtcctagtgcc

SEQ ID NO: 281302 - DNA, 25 bp, Probe Sequence
tgtttgcgcttgaccatgttgcact

SEQ ID NO: 281303 - DNA, 25 bp, Probe Sequence
tgtttgtgttaccatgttaactttt

SEQ ID NO: 281304 - DNA, 25 bp, Probe Sequence
tgttcttggaggcctctgtaacgtt

SEQ ID NO: 281305 - DNA, 25 bp, Probe Sequence
tgttttgaggaccctccatactgtt

SEQ ID NO: 281306 - DNA, 25 bp, Probe Sequence
tgttttatgtactccttttgtgttt

SEQ ID NO: 281307 - DNA, 25 bp, Probe Sequence
tgtttggcttactttgagtttggtt

SEQ ID NO: 281308 - DNA, 25 bp, Probe Sequence
tgatattagttagtttaggattttt

SEQ ID NO: 281309 - DNA, 25 bp, Probe Sequence
tgctttggtgtagaagtggattcta

SEQ ID NO: 281310 - DNA, 25 bp, Probe Sequence
tgcttcggggggtcgtctgtatata

SEQ ID NO: 281311 - DNA, 25 bp, Probe Sequence
tgtacgtctgggaggtctatgatag

SEQ ID NO: 281312 - DNA, 25 bp, Probe Sequence
tcttcccgtggtgggttttcaggca

SEQ ID NO: 281313 - DNA, 25 bp, Probe Sequence
tgttcccgctggaggtaattggcta

SEQ ID NO: 281314 - DNA, 25 bp, Probe Sequence
tgttccgacaggtgcgacacttggc

SEQ ID NO: 281315 - DNA, 25 bp, Probe Sequence
tgttcctaatgacgtggactttagc

SEQ ID NO: 281316 - DNA, 25 bp, Probe Sequence
tgttactaaatagtcgcaccccagc

SEQ ID NO: 281317 - DNA, 25 bp, Probe Sequence
tgttcagcaaaaagtcagcaccggg

SEQ ID NO: 281318 - DNA, 25 bp, Probe Sequence
tgttccattgaagccgactctggcc

SEQ ID NO: 281319 - DNA, 25 bp, Probe Sequence
tgttacttgattcacctactgacct

SEQ ID NO: 281320 - DNA, 25 bp, Probe Sequence
tgtatacttgtctagtttaaggcta

SEQ ID NO: 281321 - DNA, 25 bp, Probe Sequence
tgtataccgtatctatctacccgac

SEQ ID NO: 281322 - DNA, 25 bp, Probe Sequence
tgtataccgtatctatctacccgac

SEQ ID NO: 281323 - DNA, 25 bp, Probe Sequence
tgtataccgtatctatctacccgac

SEQ ID NO: 281324 - DNA, 25 bp, Probe Sequence
tgtacctgtaatctcagctactcag

SEQ ID NO: 281325 - DNA, 25 bp, Probe Sequence
tgtaccttaatttcagagtcatcca

SEQ ID NO: 281326 - DNA, 25 bp, Probe Sequence
tgtactcttaatcattacctgacac

SEQ ID NO: 281327 - DNA, 25 bp, Probe Sequence
tgtatcttaaccccagactctgaaa

SEQ ID NO: 281328 - DNA, 25 bp, Probe Sequence
tgttctccgacctggtcgctgagaa

SEQ ID NO: 281329 - DNA, 25 bp, Probe Sequence
tgttctccgacctggtcgctgagaa

SEQ ID NO: 281330 - DNA, 25 bp, Probe Sequence
tgttctttgacctggaaatgggatt

SEQ ID NO: 281331 - DNA, 25 bp, Probe Sequence
tgtttttctctctaggaaatggggg

SEQ ID NO: 281332 - DNA, 25 bp, Probe Sequence
tgtttttcctctttaaaaagatcag

SEQ ID NO: 281333 - DNA, 25 bp, Probe Sequence
tgttatttactttctagataaaaca

SEQ ID NO: 281334 - DNA, 25 bp, Probe Sequence
tgttttgacctccctagaagacacc

SEQ ID NO: 281335 - DNA, 25 bp, Probe Sequence
tgttttgactctgttgagtacatat

SEQ ID NO: 281336 - DNA, 25 bp, Probe Sequence
tgattttttcacgtaagtccacata

SEQ ID NO: 281337 - DNA, 25 bp, Probe Sequence
tgtttcttctgacatacttccacat

SEQ ID NO: 281338 - DNA, 25 bp, Probe Sequence
tgtatatctctccagctgtactgta

SEQ ID NO: 281339 - DNA, 25 bp, Probe Sequence
tgttctgctctaactgatacctcaa

SEQ ID NO: 281340 - DNA, 25 bp, Probe Sequence
tgtagcttgctatctgtatttgaat

SEQ ID NO: 281341 - DNA, 25 bp, Probe Sequence
tgtactcgacagattatctctgaga

SEQ ID NO: 281342 - DNA, 25 bp, Probe Sequence
tgtaccccaatgtatgctatcataa

SEQ ID NO: 281343 - DNA, 25 bp, Probe Sequence
tgtacagccaaatattcatatactc

SEQ ID NO: 281344 - DNA, 25 bp, Probe Sequence
tgtacagacaactcatctcttaccc

SEQ ID NO: 281345 - DNA, 25 bp, Probe Sequence
tgtacaatatactgcactgtgttgc

SEQ ID NO: 281346 - DNA, 25 bp, Probe Sequence
tgtaaatcagtcacctgtgttgctg

SEQ ID NO: 281347 - DNA, 25 bp, Probe Sequence
tgtaaagagtctgccttctggatct

SEQ ID NO: 281348 - DNA, 25 bp, Probe Sequence
tgtaaaggtgctcctcttttttctt

SEQ ID NO: 281349 - DNA, 25 bp, Probe Sequence
tgttaagggcttgatatggatttca

SEQ ID NO: 281350 - DNA, 25 bp, Probe Sequence
tgttcagcagggctgaaagctttta

SEQ ID NO: 281351 - DNA, 25 bp, Probe Sequence
tgtaccggtgggaggttctataata

SEQ ID NO: 281352 - DNA, 25 bp, Probe Sequence
tttccggttggagagttaattagca

SEQ ID NO: 281353 - DNA, 25 bp, Probe Sequence
tgaccctggttggaaattaaacttg

SEQ ID NO: 281354 - DNA, 25 bp, Probe Sequence
tgatcccggtggtgggatccacgct

SEQ ID NO: 281355 - DNA, 25 bp, Probe Sequence
tgacttcgtgttcggggaggacttc

SEQ ID NO: 281356 - DNA, 25 bp, Probe Sequence
tatctttcgttgctggggtttggcc

SEQ ID NO: 281357 - DNA, 25 bp, Probe Sequence
tgttgtatctttggaggggttttgg

SEQ ID NO: 281358 - DNA, 25 bp, Probe Sequence
tgtattcttattaaacgtgtttgct

SEQ ID NO: 281359 - DNA, 25 bp, Probe Sequence
tgtacctttcttcactgcagatttc

SEQ ID NO: 281360 - DNA, 25 bp, Probe Sequence
tgttcccttcagtgacttgagtgtt

SEQ ID NO: 281361 - DNA, 25 bp, Probe Sequence
tgtattccttaatccctatctgtac

SEQ ID NO: 281362 - DNA, 25 bp, Probe Sequence
tgttttttacacccacatacagtac

SEQ ID NO: 281363 - DNA, 25 bp, Probe Sequence
tgtttctgtttgccgtaaatagtaa

SEQ ID NO: 281364 - DNA, 25 bp, Probe Sequence
tgtttcatagcaaggaggataaagc

SEQ ID NO: 281365 - DNA, 25 bp, Probe Sequence
tgtatactgagaaggcctgaagaag

SEQ ID NO: 281366 - DNA, 25 bp, Probe Sequence
tgttccgatttgcctctgagaacga

SEQ ID NO: 281367 - DNA, 25 bp, Probe Sequence
tgtttcaatctgtccatctaccagg

SEQ ID NO: 281368 - DNA, 25 bp, Probe Sequence
tgttggccattggtactgggcagga

SEQ ID NO: 281369 - DNA, 25 bp, Probe Sequence
tgtttgccaggcttaaggagaggag

SEQ ID NO: 281370 - DNA, 25 bp, Probe Sequence
tgtattgcccgatgcaatgagaaaa

SEQ ID NO: 281371 - DNA, 25 bp, Probe Sequence
tgattgccgaagtgaagaaagcatc

SEQ ID NO: 281372 - DNA, 25 bp, Probe Sequence
tgattttgatggtgaggtaactcta

SEQ ID NO: 281373 - DNA, 25 bp, Probe Sequence
tgtttcgtgccatgggtaatcaatg

SEQ ID NO: 281374 - DNA, 25 bp, Probe Sequence
tgtttctccccgggtctgataatgc

SEQ ID NO: 281375 - DNA, 25 bp, Probe Sequence
tgtttctcgttcgggactgagttgt

SEQ ID NO: 281376 - DNA, 25 bp, Probe Sequence
tgttattcttagcgtcactggtctg

SEQ ID NO: 281377 - DNA, 25 bp, Probe Sequence
tgttattcttagcgtcactggtctg

SEQ ID NO: 281378 - DNA, 25 bp, Probe Sequence
tgttcttctccacggtatgcggtgg

SEQ ID NO: 281379 - DNA, 25 bp, Probe Sequence
tgtttgactacagtgagtactggga

SEQ ID NO: 281380 - DNA, 25 bp, Probe Sequence
tgtactattaagtcatgtcctggta

SEQ ID NO: 281381 - DNA, 25 bp, Probe Sequence
tgtatcatatgccaagtacgcccct

SEQ ID NO: 281382 - DNA, 25 bp, Probe Sequence
tgtatcatatgccaagaacgccccc

SEQ ID NO: 281383 - DNA, 25 bp, Probe Sequence
tgtatcatgatagtcacaaacgccg

SEQ ID NO: 281384 - DNA, 25 bp, Probe Sequence
tgtatagatgcagccgttgcaggcg

SEQ ID NO: 281385 - DNA, 25 bp, Probe Sequence
tgtttgagcagctggcgtgtgaggc

SEQ ID NO: 281386 - DNA, 25 bp, Probe Sequence
tgttgtccagcccgcatgatggaca

SEQ ID NO: 281387 - DNA, 25 bp, Probe Sequence
tgatctgtgccggctacagggaagg

SEQ ID NO: 281388 - DNA, 25 bp, Probe Sequence
tgacggccggtgggaggtgcatggc

SEQ ID NO: 281389 - DNA, 25 bp, Probe Sequence
tgaggaccaggctgggtgtaccttg

SEQ ID NO: 281390 - DNA, 25 bp, Probe Sequence
tgttaccaggcatggcagtgggcgc

SEQ ID NO: 281391 - DNA, 25 bp, Probe Sequence
tgttcgccgcgtggaatgtgagtgt

SEQ ID NO: 281392 - DNA, 25 bp, Probe Sequence
tgtactcctggctagaatgctgtgg

SEQ ID NO: 281393 - DNA, 25 bp, Probe Sequence
tgtatgttctggttggagccggggc

SEQ ID NO: 281394 - DNA, 25 bp, Probe Sequence
tgtattatctgcacagacccacgga

SEQ ID NO: 281395 - DNA, 25 bp, Probe Sequence
tgtattatgtgacaaccatgcaggc

SEQ ID NO: 281396 - DNA, 25 bp, Probe Sequence
tgtatgttggtctacacttttgcca

SEQ ID NO: 281397 - DNA, 25 bp, Probe Sequence
tgtactttgcaatcatctttccttt

SEQ ID NO: 281398 - DNA, 25 bp, Probe Sequence
tgtactgatataaacacttccaaat

SEQ ID NO: 281399 - DNA, 25 bp, Probe Sequence
tgtatcttagacgacctgtccagat

SEQ ID NO: 281400 - DNA, 25 bp, Probe Sequence
tgtacttctgtcacaatgtggcagt

SEQ ID NO: 281401 - DNA, 25 bp, Probe Sequence
tgtagtgttgtaacctgctgcacgg

SEQ ID NO: 281402 - DNA, 25 bp, Probe Sequence
tgtaggagatgtgcgtcgtgccgag

SEQ ID NO: 281403 - DNA, 25 bp, Probe Sequence
tgtatgaagcttgtcctctgactag

SEQ ID NO: 281404 - DNA, 25 bp, Probe Sequence
tgtagatactagtccctgtgtcagg

SEQ ID NO: 281405 - DNA, 25 bp, Probe Sequence
tgtagaaccagatcactatgttgta

SEQ ID NO: 281406 - DNA, 25 bp, Probe Sequence
tgataaactctagctctaaatgcta

SEQ ID NO: 281407 - DNA, 25 bp, Probe Sequence
tgtatctccttagctgctcaataaa

SEQ ID NO: 281408 - DNA, 25 bp, Probe Sequence
tgtatctctctaccttctggaaaac

SEQ ID NO: 281409 - DNA, 25 bp, Probe Sequence
tgttccctggacactgcctaaaagg

SEQ ID NO: 281410 - DNA, 25 bp, Probe Sequence
tgttgttgggaaagggctttcgagg

SEQ ID NO: 281411 - DNA, 25 bp, Probe Sequence
tgtttgggcctaaaggctttgggcg

SEQ ID NO: 281412 - DNA, 25 bp, Probe Sequence
tgtttggaccccaagtgcttacgac

SEQ ID NO: 281413 - DNA, 25 bp, Probe Sequence
tgtttgacctccgatgagtagtgac

SEQ ID NO: 281414 - DNA, 25 bp, Probe Sequence
tgtattacgattcgcacgatgagtg

SEQ ID NO: 281415 - DNA, 25 bp, Probe Sequence
tgtatatagtcaagtaggagcagtg

SEQ ID NO: 281416 - DNA, 25 bp, Probe Sequence
tgtataactcttacagtagtctgta

SEQ ID NO: 281417 - DNA, 25 bp, Probe Sequence
tgtataaacttgaagtggttgtgtt

SEQ ID NO: 281418 - DNA, 25 bp, Probe Sequence
tgttcaaactgtgagttctgttctt

SEQ ID NO: 281419 - DNA, 25 bp, Probe Sequence
tgttccatgggagagtattttagag

SEQ ID NO: 281420 - DNA, 25 bp, Probe Sequence
tgttacaggcgagaaattatgtcaa

SEQ ID NO: 281421 - DNA, 25 bp, Probe Sequence
tgtttagaccagccaaattctgtca

SEQ ID NO: 281422 - DNA, 25 bp, Probe Sequence
tgtagaaagccacacactactacat

SEQ ID NO: 281423 - DNA, 25 bp, Probe Sequence
tgtatgaatatccacctcctttaaa

SEQ ID NO: 281424 - DNA, 25 bp, Probe Sequence
tgtatgtattcttccacctttggac

SEQ ID NO: 281425 - DNA, 25 bp, Probe Sequence
tgtatgtaattgtctatgcatttta

SEQ ID NO: 281426 - DNA, 25 bp, Probe Sequence
tgtataaaatgctcatcatctttga

SEQ ID NO: 281427 - DNA, 25 bp, Probe Sequence
tgtatacagaactgcgttggctgca

SEQ ID NO: 281428 - DNA, 25 bp, Probe Sequence
tgtttcagatcactgcggtgggctg

SEQ ID NO: 281429 - DNA, 25 bp, Probe Sequence
tgttacagatcctggtggtgttcca

SEQ ID NO: 281430 - DNA, 25 bp, Probe Sequence
tgttaagctgggcgttgtggttcat

SEQ ID NO: 281431 - DNA, 25 bp, Probe Sequence
tgttaggggcgcagcgtcaggtgtt

SEQ ID NO: 281432 - DNA, 25 bp, Probe Sequence
tgttggggagttcctggaagtgact

SEQ ID NO: 281433 - DNA, 25 bp, Probe Sequence
tgctattggggttgggggggaggtg

SEQ ID NO: 281434 - DNA, 25 bp, Probe Sequence
tgttgtggggtgcggggagagggga

SEQ ID NO: 281435 - DNA, 25 bp, Probe Sequence
tgttcactggtacgttggggagggg

SEQ ID NO: 281436 - DNA, 25 bp, Probe Sequence
tgttcatcggggtcctggggacgaa

SEQ ID NO: 281437 - DNA, 25 bp, Probe Sequence
tgttcacgatggaccgggtgctgac

SEQ ID NO: 281438 - DNA, 25 bp, Probe Sequence
tgttcctgggacaagggtcaagcca

SEQ ID NO: 281439 - DNA, 25 bp, Probe Sequence
tgtttgggagccatgggggagctca

SEQ ID NO: 281440 - DNA, 25 bp, Probe Sequence
tgcttggggagggtggggctttttg

SEQ ID NO: 281441 - DNA, 25 bp, Probe Sequence
tgcttggggagggtggggctttttg

SEQ ID NO: 281442 - DNA, 25 bp, Probe Sequence
tgttgtaggaggttgggtgttttca

SEQ ID NO: 281443 - DNA, 25 bp, Probe Sequence
tgtttcaaggcctgggcttcttctg

SEQ ID NO: 281444 - DNA, 25 bp, Probe Sequence
tgtagagggccctggtgtttctagc

SEQ ID NO: 281445 - DNA, 25 bp, Probe Sequence
tgtagcagacgtctgggcttttccc

SEQ ID NO: 281446 - DNA, 25 bp, Probe Sequence
tgttaatcgtagaaccgttgtccct

SEQ ID NO: 281447 - DNA, 25 bp, Probe Sequence
tgttaaagtgtgtaccattttttct

SEQ ID NO: 281448 - DNA, 25 bp, Probe Sequence
tgtacgtggtggttctatttttctc

SEQ ID NO: 281449 - DNA, 25 bp, Probe Sequence
tgtactgcgtatgcagtttttcctc

SEQ ID NO: 281450 - DNA, 25 bp, Probe Sequence
tgtttgcacttcggttttttccgca

SEQ ID NO: 281451 - DNA, 25 bp, Probe Sequence
tgtattcgatacgggtttcctccta

SEQ ID NO: 281452 - DNA, 25 bp, Probe Sequence
tgtatcatttgtggggtacacccct

SEQ ID NO: 281453 - DNA, 25 bp, Probe Sequence
tgtatatatccatcggtaactccct

SEQ ID NO: 281454 - DNA, 25 bp, Probe Sequence
tgtatgacatcctgggtcctgatcc

SEQ ID NO: 281455 - DNA, 25 bp, Probe Sequence
tgtagtcttcagtgctaccgcatca

SEQ ID NO: 281456 - DNA, 25 bp, Probe Sequence
tgtatctgtatctattccactagat

SEQ ID NO: 281457 - DNA, 25 bp, Probe Sequence
tgttatgtacaaccagcaatgaata

SEQ ID NO: 281458 - DNA, 25 bp, Probe Sequence
tgtattgtaagcacacatgtaattg

SEQ ID NO: 281459 - DNA, 25 bp, Probe Sequence
tgtagtatcttgagccattaatttt

SEQ ID NO: 281460 - DNA, 25 bp, Probe Sequence
tgtagttcttgcagcttattataag

SEQ ID NO: 281461 - DNA, 25 bp, Probe Sequence
tgtagaatctttattatctcaacaa

SEQ ID NO: 281462 - DNA, 25 bp, Probe Sequence
tgtagaatctcttcatgcttgacat

SEQ ID NO: 281463 - DNA, 25 bp, Probe Sequence
tgtagagatcaccaatctggactgt

SEQ ID NO: 281464 - DNA, 25 bp, Probe Sequence
tgtagagaccgcttcattactcctt

SEQ ID NO: 281465 - DNA, 25 bp, Probe Sequence
tgtagtaactgacacatcctctctt

SEQ ID NO: 281466 - DNA, 25 bp, Probe Sequence
tgtagaaacaggttcaccatctgcc

SEQ ID NO: 281467 - DNA, 25 bp, Probe Sequence
tgtagaaaagtaatctggcatgcag

SEQ ID NO: 281468 - DNA, 25 bp, Probe Sequence
tgtagagacaaggcattgctgcgca

SEQ ID NO: 281469 - DNA, 25 bp, Probe Sequence
tgtatagagcgtacctggcgcagag

SEQ ID NO: 281470 - DNA, 25 bp, Probe Sequence
tgtatgagtggaccctgccactggc

SEQ ID NO: 281471 - DNA, 25 bp, Probe Sequence
tgtacctgcagaaagatgacctggc

SEQ ID NO: 281472 - DNA, 25 bp, Probe Sequence
tgtaccttgaaaggatttccaccag

SEQ ID NO: 281473 - DNA, 25 bp, Probe Sequence
tgaacatttaaaagtttccctagcg

SEQ ID NO: 281474 - DNA, 25 bp, Probe Sequence
tgtttttgcaaatgcttgcccctac

SEQ ID NO: 281475 - DNA, 25 bp, Probe Sequence
tgttgtctacaaaacctactttagt

SEQ ID NO: 281476 - DNA, 25 bp, Probe Sequence
tgttctcgcaaaaacgtatctccta

SEQ ID NO: 281477 - DNA, 25 bp, Probe Sequence
tgtttctaaagtactgtcttccagc

SEQ ID NO: 281478 - DNA, 25 bp, Probe Sequence
tgtttctaagttgtgtttattcctg

SEQ ID NO: 281479 - DNA, 25 bp, Probe Sequence
tctgttcatgaagtttaggttttcc

SEQ ID NO: 281480 - DNA, 25 bp, Probe Sequence
tgtatcgatgccttttagtttttcc

SEQ ID NO: 281481 - DNA, 25 bp, Probe Sequence
tgtatgcatgtgccacatttcgctt

SEQ ID NO: 281482 - DNA, 25 bp, Probe Sequence
tgtatgtgtgccaatgccaggttcc

SEQ ID NO: 281483 - DNA, 25 bp, Probe Sequence
tgttgggaccacgggtgtgagccac

SEQ ID NO: 281484 - DNA, 25 bp, Probe Sequence
tgtttgcgacaggggttgggccagc

SEQ ID NO: 281485 - DNA, 25 bp, Probe Sequence
tgtttgcgctaggcgtttaccgcac

SEQ ID NO: 281486 - DNA, 25 bp, Probe Sequence
tgttgtgcgagggtgttttccgagg

SEQ ID NO: 281487 - DNA, 25 bp, Probe Sequence
tgtagcctgagggctggtgttgcct

SEQ ID NO: 281488 - DNA, 25 bp, Probe Sequence
tgtagcctgagggctggtgttgcct

SEQ ID NO: 281489 - DNA, 25 bp, Probe Sequence
tgtatcgctactgtgagctgttccc

SEQ ID NO: 281490 - DNA, 25 bp, Probe Sequence
tgtatcctgtatgggcccattctac

SEQ ID NO: 281491 - DNA, 25 bp, Probe Sequence
tgtatgcagctgttggagtaattcc

SEQ ID NO: 281492 - DNA, 25 bp, Probe Sequence
tgtatgcacgtaaagtttgtacttg

SEQ ID NO: 281493 - DNA, 25 bp, Probe Sequence
tgttcaggttttctgttgacttgta

SEQ ID NO: 281494 - DNA, 25 bp, Probe Sequence
tgttaaatttttctggacaatgcca

SEQ ID NO: 281495 - DNA, 25 bp, Probe Sequence
tgttaaatttttctggacaatgcca

SEQ ID NO: 281496 - DNA, 25 bp, Probe Sequence
tgtattaattttccggggctaccat

SEQ ID NO: 281497 - DNA, 25 bp, Probe Sequence
tgttttttattcctgtggggctcac

SEQ ID NO: 281498 - DNA, 25 bp, Probe Sequence
tgttttgttttgctacgagtccaca

SEQ ID NO: 281499 - DNA, 25 bp, Probe Sequence
tgttttgagtttcgtaccaccttat

SEQ ID NO: 281500 - DNA, 25 bp, Probe Sequence
tgttttagtttattacccagtatat

SEQ ID NO: 281501 - DNA, 25 bp, Probe Sequence
tgttatgttctgttattgacccaaa

SEQ ID NO: 281502 - DNA, 25 bp, Probe Sequence
tgtatatttctactgatctgatctc

SEQ ID NO: 281503 - DNA, 25 bp, Probe Sequence
tgtataactcaggcgtctttgcatt

SEQ ID NO: 281504 - DNA, 25 bp, Probe Sequence
tgtataatgctgacgttcttgcttt

SEQ ID NO: 281505 - DNA, 25 bp, Probe Sequence
tgtattatctgtaagatctgtcttg

SEQ ID NO: 281506 - DNA, 25 bp, Probe Sequence
tgttgtgagtgtaaatgcatttggt

SEQ ID NO: 281507 - DNA, 25 bp, Probe Sequence
tgatgggtggtcaaccttcaggttt

SEQ ID NO: 281508 - DNA, 25 bp, Probe Sequence
tgacggtggttttcaaaatgttgtt

SEQ ID NO: 281509 - DNA, 25 bp, Probe Sequence
tgagggcggttacctagttttgaat

SEQ ID NO: 281510 - DNA, 25 bp, Probe Sequence
taagggggcattctagtcttaactt

SEQ ID NO: 281511 - DNA, 25 bp, Probe Sequence
taacggttgattctcatttgtccct

SEQ ID NO: 281512 - DNA, 25 bp, Probe Sequence
taaggcagtgatttcccttaggccc

SEQ ID NO: 281513 - DNA, 25 bp, Probe Sequence
taaggtgtattagcggacggccctc

SEQ ID NO: 281514 - DNA, 25 bp, Probe Sequence
taaggtgttcaggaaggccggacgc

SEQ ID NO: 281515 - DNA, 25 bp, Probe Sequence
tatggggtaccccaagtcggacaga

SEQ ID NO: 281516 - DNA, 25 bp, Probe Sequence
ttccggtacttccagaaccaactca

SEQ ID NO: 281517 - DNA, 25 bp, Probe Sequence
ttgaccgctaccgtaaacacaacct

SEQ ID NO: 281518 - DNA, 25 bp, Probe Sequence
tgtaccacccacataatacctacac

SEQ ID NO: 281519 - DNA, 25 bp, Probe Sequence
tgttccagccccagaatgtggtaac

SEQ ID NO: 281520 - DNA, 25 bp, Probe Sequence
tgttccacacccctgggtatggaaa

SEQ ID NO: 281521 - DNA, 25 bp, Probe Sequence
tgttgcttacttctgtgggtggatt

SEQ ID NO: 281522 - DNA, 25 bp, Probe Sequence
tgttttcgctgtgtgtggcgggggc

SEQ ID NO: 281523 - DNA, 25 bp, Probe Sequence
tgttctggcggcattgtgggcttag

SEQ ID NO: 281524 - DNA, 25 bp, Probe Sequence
tgttcaacagacctgtggggcctca

SEQ ID NO: 281525 - DNA, 25 bp, Probe Sequence
tgttctaagactccattttgcaata

SEQ ID NO: 281526 - DNA, 25 bp, Probe Sequence
tgttctaacctcagtaatgcatcta

SEQ ID NO: 281527 - DNA, 25 bp, Probe Sequence
tgtatctctcactttttaagtctca

SEQ ID NO: 281528 - DNA, 25 bp, Probe Sequence
tgttcactccactatattagactta

SEQ ID NO: 281529 - DNA, 25 bp, Probe Sequence
tgttaccctttctaagttatataca

SEQ ID NO: 281530 - DNA, 25 bp, Probe Sequence
tgttaagtcttttacattttaatag

SEQ ID NO: 281531 - DNA, 25 bp, Probe Sequence
tgttgaggtttttttatctccaagg

SEQ ID NO: 281532 - DNA, 25 bp, Probe Sequence
tgtagggttgtgtcttttcccaatt

SEQ ID NO: 281533 - DNA, 25 bp, Probe Sequence
tgtagggaattgcatgctttttttt

SEQ ID NO: 281534 - DNA, 25 bp, Probe Sequence
tgataagggactcttgtgctttcat

SEQ ID NO: 281535 - DNA, 25 bp, Probe Sequence
tgataaagctactcttgtactcttc

SEQ ID NO: 281536 - DNA, 25 bp, Probe Sequence
tgtattaatgtctctcagtgcctct

SEQ ID NO: 281537 - DNA, 25 bp, Probe Sequence
tgtatgtttggcttcttgaggtctc

SEQ ID NO: 281538 - DNA, 25 bp, Probe Sequence
tgtttctgatgttattccagcctcc

SEQ ID NO: 281539 - DNA, 25 bp, Probe Sequence
tgttttgcaggtttacgccgcacac

SEQ ID NO: 281540 - DNA, 25 bp, Probe Sequence
tgtatttggtgtttggccctgcagt

SEQ ID NO: 281541 - DNA, 25 bp, Probe Sequence
tgtagactatgctgagtggccctgc

SEQ ID NO: 281542 - DNA, 25 bp, Probe Sequence
tgtatgactatgaggggcaggagca

SEQ ID NO: 281543 - DNA, 25 bp, Probe Sequence
tgttcacttgtgcatgggctaaaac

SEQ ID NO: 281544 - DNA, 25 bp, Probe Sequence
tgtttccattgcctgccttagaaac

SEQ ID NO: 281545 - DNA, 25 bp, Probe Sequence
tgtttccttgtactgatataaacac

SEQ ID NO: 281546 - DNA, 25 bp, Probe Sequence
tgtatcttgttctctgatcataaac

SEQ ID NO: 281547 - DNA, 25 bp, Probe Sequence
tgtatctcttgttatctgcatctca

SEQ ID NO: 281548 - DNA, 25 bp, Probe Sequence
tgtatgtctatgctttgtcatcagt

SEQ ID NO: 281549 - DNA, 25 bp, Probe Sequence
tgtatactatctttttatctgaagt

SEQ ID NO: 281550 - DNA, 25 bp, Probe Sequence
tgtatgaaatctgacttgtaaactc

SEQ ID NO: 281551 - DNA, 25 bp, Probe Sequence
tgttgaatactaacttctaattttt

SEQ ID NO: 281552 - DNA, 25 bp, Probe Sequence
tgtagcaaactatttgctgctatgg

SEQ ID NO: 281553 - DNA, 25 bp, Probe Sequence
tgtatgctcatagccttgcactgag

SEQ ID NO: 281554 - DNA, 25 bp, Probe Sequence
tgatcagtctaagcttcctaaggtc

SEQ ID NO: 281555 - DNA, 25 bp, Probe Sequence
tgtatgtctataggacatcctaatg

SEQ ID NO: 281556 - DNA, 25 bp, Probe Sequence
tgtagttccagctactcagtgagat

SEQ ID NO: 281557 - DNA, 25 bp, Probe Sequence
tgtagtcccagctactcaggaggct

SEQ ID NO: 281558 - DNA, 25 bp, Probe Sequence
tgtagtcccagctactcaggaggct

SEQ ID NO: 281559 - DNA, 25 bp, Probe Sequence
tgtagtcccagctacttgagaagct

SEQ ID NO: 281560 - DNA, 25 bp, Probe Sequence
tgtagtcccagctcctcaggagctg

SEQ ID NO: 281561 - DNA, 25 bp, Probe Sequence
tgtttcagctaatctctcggaggta

SEQ ID NO: 281562 - DNA, 25 bp, Probe Sequence
tgttacctacacatgcatcggattg

SEQ ID NO: 281563 - DNA, 25 bp, Probe Sequence
tgtttactgacacttacatacttgg

SEQ ID NO: 281564 - DNA, 25 bp, Probe Sequence
tgttttgctaccaatatcatacggg

SEQ ID NO: 281565 - DNA, 25 bp, Probe Sequence
tgttcgtgttgccaaatgcaatcga

SEQ ID NO: 281566 - DNA, 25 bp, Probe Sequence
tgtttggtattttgatgcagatgag

SEQ ID NO: 281567 - DNA, 25 bp, Probe Sequence
tgtttggcattgactgtgctagtgg

SEQ ID NO: 281568 - DNA, 25 bp, Probe Sequence
tgtatcccattgtctggcttttgta

SEQ ID NO: 281569 - DNA, 25 bp, Probe Sequence
tgaaccaattgggtggatttgattc

SEQ ID NO: 281570 - DNA, 25 bp, Probe Sequence
tgagacctttagctaacttagtgca

SEQ ID NO: 281571 - DNA, 25 bp, Probe Sequence
tgagttcttgttcttcagttaaaag

SEQ ID NO: 281572 - DNA, 25 bp, Probe Sequence
tgagttcttgttcttcagttaaaag

SEQ ID NO: 281573 - DNA, 25 bp, Probe Sequence
tgttccttttccacagattgtctaa

SEQ ID NO: 281574 - DNA, 25 bp, Probe Sequence
tgcttccattttcctacaggcagtc

SEQ ID NO: 281575 - DNA, 25 bp, Probe Sequence
tttccatttgtacaggggtaacgca

SEQ ID NO: 281576 - DNA, 25 bp, Probe Sequence
tgttcctattgctggtggggtgata

SEQ ID NO: 281577 - DNA, 25 bp, Probe Sequence
tgttcctattgctggtggggtgata

SEQ ID NO: 281578 - DNA, 25 bp, Probe Sequence
tgatacctggggtcgtcgagaggct

SEQ ID NO: 281579 - DNA, 25 bp, Probe Sequence
tgaacctcgaggaactccaggacga

SEQ ID NO: 281580 - DNA, 25 bp, Probe Sequence
tgatacctgaagcactcccaggctc

SEQ ID NO: 281581 - DNA, 25 bp, Probe Sequence
tgtatctagaaaacccatcgactca

SEQ ID NO: 281582 - DNA, 25 bp, Probe Sequence
tgtttacatatcacctcatggccta

SEQ ID NO: 281583 - DNA, 25 bp, Probe Sequence
tgtttacattgtacactgcgaccac

SEQ ID NO: 281584 - DNA, 25 bp, Probe Sequence
tgtatgtatcttcaactggtgtcca

SEQ ID NO: 281585 - DNA, 25 bp, Probe Sequence
tgattgggagctcaaccctgttcag

SEQ ID NO: 281586 - DNA, 25 bp, Probe Sequence
tgtttggtgcttagagacctgcccg

SEQ ID NO: 281587 - DNA, 25 bp, Probe Sequence
tgtttgacttctagtgtccgagccc

SEQ ID NO: 281588 - DNA, 25 bp, Probe Sequence
tgtttacatttgcttccatgaccaa

SEQ ID NO: 281589 - DNA, 25 bp, Probe Sequence
tgtttatatcttagtttttcacaaa

SEQ ID NO: 281590 - DNA, 25 bp, Probe Sequence
tgtagtaatcaaaatgttatccaac

SEQ ID NO: 281591 - DNA, 25 bp, Probe Sequence
tgtataaacatttatgttgacccac

SEQ ID NO: 281592 - DNA, 25 bp, Probe Sequence
tgtaggacacatttggttgcatcca

SEQ ID NO: 281593 - DNA, 25 bp, Probe Sequence
tgtatggacagtttttccggcaaaa

SEQ ID NO: 281594 - DNA, 25 bp, Probe Sequence
tgtatttcagtattttccagcctta

SEQ ID NO: 281595 - DNA, 25 bp, Probe Sequence
tgtttatgccatttttccagttcca

SEQ ID NO: 281596 - DNA, 25 bp, Probe Sequence
tgtttatgccatttttccagttcca

SEQ ID NO: 281597 - DNA, 25 bp, Probe Sequence
tgtttattgtcttgtatcctttctc

SEQ ID NO: 281598 - DNA, 25 bp, Probe Sequence
tgtttaattctgctgtctgctcttc

SEQ ID NO: 281599 - DNA, 25 bp, Probe Sequence
tgtttaattctgctgtctgctcttc

SEQ ID NO: 281600 - DNA, 25 bp, Probe Sequence
tgtttaattctgctgtctgctcttc

SEQ ID NO: 281601 - DNA, 25 bp, Probe Sequence
tgtttagattcccatttgttaagtt

SEQ ID NO: 281602 - DNA, 25 bp, Probe Sequence
tgttttgttatgtaatttttatgtt

SEQ ID NO: 281603 - DNA, 25 bp, Probe Sequence
tgtttttctcttgttgtttttatct

SEQ ID NO: 281604 - DNA, 25 bp, Probe Sequence
tgttttcttggtgttatcttttctc

SEQ ID NO: 281605 - DNA, 25 bp, Probe Sequence
tgttctttagtgtccttacctttat

SEQ ID NO: 281606 - DNA, 25 bp, Probe Sequence
tgttccttaggattttttccttctg

SEQ ID NO: 281607 - DNA, 25 bp, Probe Sequence
tgtattttagatgcttgtttcctat

SEQ ID NO: 281608 - DNA, 25 bp, Probe Sequence
tgttttgctgaaatcctgttttgta

SEQ ID NO: 281609 - DNA, 25 bp, Probe Sequence
tgttttgctatcctttttactgtaa

SEQ ID NO: 281610 - DNA, 25 bp, Probe Sequence
tgttgctgctatgactttttacctc

SEQ ID NO: 281611 - DNA, 25 bp, Probe Sequence
tgcttatctgaaacttcccaacttc

SEQ ID NO: 281612 - DNA, 25 bp, Probe Sequence
tgtttcagaatagctcttctactgt

SEQ ID NO: 281613 - DNA, 25 bp, Probe Sequence
tgttctcagatatggtcttaaaaga

SEQ ID NO: 281614 - DNA, 25 bp, Probe Sequence
tgtatgcactactgttttaaaagaa

SEQ ID NO: 281615 - DNA, 25 bp, Probe Sequence
tgttgccaacatcctgtttaccaaa

SEQ ID NO: 281616 - DNA, 25 bp, Probe Sequence
tgtatctcacactcatgcattgtcc

SEQ ID NO: 281617 - DNA, 25 bp, Probe Sequence
tgtattctcaggctcctatgcctgg

SEQ ID NO: 281618 - DNA, 25 bp, Probe Sequence
tgtttagagcatgacactctccccc

SEQ ID NO: 281619 - DNA, 25 bp, Probe Sequence
tgtattatacaaatcactatcgctc

SEQ ID NO: 281620 - DNA, 25 bp, Probe Sequence
tgtatctatagccactggttcctcc

SEQ ID NO: 281621 - DNA, 25 bp, Probe Sequence
tgtttacacccttgttctgtcaaag

SEQ ID NO: 281622 - DNA, 25 bp, Probe Sequence
tgtttatacactgttctccaaaggt

SEQ ID NO: 281623 - DNA, 25 bp, Probe Sequence
tgtttgatccctgttacccagagaa

SEQ ID NO: 281624 - DNA, 25 bp, Probe Sequence
tgtttctccagtattacctcaacga

SEQ ID NO: 281625 - DNA, 25 bp, Probe Sequence
tgtttctcacacttgttgcaccaaa

SEQ ID NO: 281626 - DNA, 25 bp, Probe Sequence
tgtttctgcacctgtagagatcacc

SEQ ID NO: 281627 - DNA, 25 bp, Probe Sequence
tgtttggacctccatatgagacacc

SEQ ID NO: 281628 - DNA, 25 bp, Probe Sequence
tgatctaaacgtcattcagccctag

SEQ ID NO: 281629 - DNA, 25 bp, Probe Sequence
tgatttaacctttatcctccgattc

SEQ ID NO: 281630 - DNA, 25 bp, Probe Sequence
tgtttaaccaaccatgttcacctct

SEQ ID NO: 281631 - DNA, 25 bp, Probe Sequence
tgctgttacctagagggtctcacct

SEQ ID NO: 281632 - DNA, 25 bp, Probe Sequence
tgtttcctctcaataaagttcccct

SEQ ID NO: 281633 - DNA, 25 bp, Probe Sequence
tgtttgccctccaaagtgtttacac

SEQ ID NO: 281634 - DNA, 25 bp, Probe Sequence
tgatcttccctgggggactttaact

SEQ ID NO: 281635 - DNA, 25 bp, Probe Sequence
tgattctgcctttggggacttttct

SEQ ID NO: 281636 - DNA, 25 bp, Probe Sequence
tgtatgcatccatttgtgccaggct

SEQ ID NO: 281637 - DNA, 25 bp, Probe Sequence
tgtatgtagctttagctcagcgcaa

SEQ ID NO: 281638 - DNA, 25 bp, Probe Sequence
tgtatttctttactactatagtagt

SEQ ID NO: 281639 - DNA, 25 bp, Probe Sequence
tgtttgttttaatatctagtgatct

SEQ ID NO: 281640 - DNA, 25 bp, Probe Sequence
tgttgtctcttttcaaaccaaattg

SEQ ID NO: 281641 - DNA, 25 bp, Probe Sequence
tgttgtcgttttaacatctccacgt

SEQ ID NO: 281642 - DNA, 25 bp, Probe Sequence
tgattttttttttccttacagtgag

SEQ ID NO: 281643 - DNA, 25 bp, Probe Sequence
tgtttctcttttggccctatacaaa

SEQ ID NO: 281644 - DNA, 25 bp, Probe Sequence
tgtttacttcttggtccttataaat

SEQ ID NO: 281645 - DNA, 25 bp, Probe Sequence
tgtttagtgtctccttcctaaagag

SEQ ID NO: 281646 - DNA, 25 bp, Probe Sequence
tgttttggatcccttctctagaaaa

SEQ ID NO: 281647 - DNA, 25 bp, Probe Sequence
tgttaatacgccattcctagaagaa

SEQ ID NO: 281648 - DNA, 25 bp, Probe Sequence
tgtttaacatccagcactgtaagaa

SEQ ID NO: 281649 - DNA, 25 bp, Probe Sequence
tgtttagaaagctgcctgatatggt

SEQ ID NO: 281650 - DNA, 25 bp, Probe Sequence
tgttcgagaagacgcggctactctg

SEQ ID NO: 281651 - DNA, 25 bp, Probe Sequence
tgttgccgaaatagctggtcctttt

SEQ ID NO: 281652 - DNA, 25 bp, Probe Sequence
tgttgcctgcaatagggctcttgtt

SEQ ID NO: 281653 - DNA, 25 bp, Probe Sequence
tgtatgccgcaagacaatattttgt

SEQ ID NO: 281654 - DNA, 25 bp, Probe Sequence
tctacccaagttaatgtttactttg

SEQ ID NO: 281655 - DNA, 25 bp, Probe Sequence
tgtatcctctgactttattttccat

SEQ ID NO: 281656 - DNA, 25 bp, Probe Sequence
tgtatccctgttgtgaggttccttc

SEQ ID NO: 281657 - DNA, 25 bp, Probe Sequence
tgtattcctgttgggttttcttgtt

SEQ ID NO: 281658 - DNA, 25 bp, Probe Sequence
tgtatgtctttgggtgtttgttttt

SEQ ID NO: 281659 - DNA, 25 bp, Probe Sequence
tgtattctggggcattgtatttttt

SEQ ID NO: 281660 - DNA, 25 bp, Probe Sequence
tgtttattgttgcatttttattttt

SEQ ID NO: 281661 - DNA, 25 bp, Probe Sequence
tgtttgttttgtttcttttctacat

SEQ ID NO: 281662 - DNA, 25 bp, Probe Sequence
tgttttgttttgttttgttttgcat

SEQ ID NO: 281663 - DNA, 25 bp, Probe Sequence
tgttttgttttgttttgttttgcat

SEQ ID NO: 281664 - DNA, 25 bp, Probe Sequence
tgttttgtttgtgtcgatatgttcg

SEQ ID NO: 281665 - DNA, 25 bp, Probe Sequence
tgttttgtcagtccttcagaatatt

SEQ ID NO: 281666 - DNA, 25 bp, Probe Sequence
tgttcttgctcagtgattttaaaga

SEQ ID NO: 281667 - DNA, 25 bp, Probe Sequence
tgtttgatgtcctttattgatacaa

SEQ ID NO: 281668 - DNA, 25 bp, Probe Sequence
tgtatatggctgtttaatctttgaa

SEQ ID NO: 281669 - DNA, 25 bp, Probe Sequence
tgttctgctgctcttcaatattgta

SEQ ID NO: 281670 - DNA, 25 bp, Probe Sequence
tgtttatgtctctgcaaaggctgac

SEQ ID NO: 281671 - DNA, 25 bp, Probe Sequence
tgtttatatcctactgacagtggaa

SEQ ID NO: 281672 - DNA, 25 bp, Probe Sequence
tgatcctgaagcttaagaagggcaa

SEQ ID NO: 281673 - DNA, 25 bp, Probe Sequence
tgatcctgaagctgttaaagtaaag

SEQ ID NO: 281674 - DNA, 25 bp, Probe Sequence
tgatcctggactgggtaccttacat

SEQ ID NO: 281675 - DNA, 25 bp, Probe Sequence
tgttctccaaaggtaccttatcctt

SEQ ID NO: 281676 - DNA, 25 bp, Probe Sequence
tgattaacaaagcaacctttccctt

SEQ ID NO: 281677 - DNA, 25 bp, Probe Sequence
tgattaagagcacaaactttttttt

SEQ ID NO: 281678 - DNA, 25 bp, Probe Sequence
tgttgaaatgctcaagacttcatta

SEQ ID NO: 281679 - DNA, 25 bp, Probe Sequence
tgtatcaacttttagcctgctcaac

SEQ ID NO: 281680 - DNA, 25 bp, Probe Sequence
tgctaaactgatcaaggcctacaca

SEQ ID NO: 281681 - DNA, 25 bp, Probe Sequence
tgtatacactgggtaacctgatcgt

SEQ ID NO: 281682 - DNA, 25 bp, Probe Sequence
tgtatactcgagtgacagcctacct

SEQ ID NO: 281683 - DNA, 25 bp, Probe Sequence
tgatacctccagtgggccgagagac

SEQ ID NO: 281684 - DNA, 25 bp, Probe Sequence
tgatcccttaacaggtgccagacgc

SEQ ID NO: 281685 - DNA, 25 bp, Probe Sequence
tttcattggaacttggtgccaaccc

SEQ ID NO: 281686 - DNA, 25 bp, Probe Sequence
tgttttggaacttcagagctcaggc

SEQ ID NO: 281687 - DNA, 25 bp, Probe Sequence
tgttttgaaactcagtatgccgccc

SEQ ID NO: 281688 - DNA, 25 bp, Probe Sequence
tgttttctaactcaggagtcagcca

SEQ ID NO: 281689 - DNA, 25 bp, Probe Sequence
tgttttccgaccattattcatgccc

SEQ ID NO: 281690 - DNA, 25 bp, Probe Sequence
tgtatttccataccacttttcagcc

SEQ ID NO: 281691 - DNA, 25 bp, Probe Sequence
tgttatcacctactactatttcaag

SEQ ID NO: 281692 - DNA, 25 bp, Probe Sequence
tgtttcacctggtttgtcctaaggc

SEQ ID NO: 281693 - DNA, 25 bp, Probe Sequence
tttaagtgcttgtggctcactgaag

SEQ ID NO: 281694 - DNA, 25 bp, Probe Sequence
tgtatcaactttgtgagtaataatg

SEQ ID NO: 281695 - DNA, 25 bp, Probe Sequence
tgtttactcattgcaagatataaaa

SEQ ID NO: 281696 - DNA, 25 bp, Probe Sequence
tgttctaatcattcaccaggaaaca

SEQ ID NO: 281697 - DNA, 25 bp, Probe Sequence
tgttggatgtactccaggaaataga

SEQ ID NO: 281698 - DNA, 25 bp, Probe Sequence
tgatagaactaatgccagaaagagg

SEQ ID NO: 281699 - DNA, 25 bp, Probe Sequence
tgatatacatctacatatataacat

SEQ ID NO: 281700 - DNA, 25 bp, Probe Sequence
tgtatcagtcaagatgtacatcagt

SEQ ID NO: 281701 - DNA, 25 bp, Probe Sequence
tgtatcactgcaagcgcttcaacac

SEQ ID NO: 281702 - DNA, 25 bp, Probe Sequence
tgtatttgaaggtctgcaccgcggg

SEQ ID NO: 281703 - DNA, 25 bp, Probe Sequence
tgttgataatatctctcacccggat

SEQ ID NO: 281704 - DNA, 25 bp, Probe Sequence
tgttgagactagctcgcccaacaga

SEQ ID NO: 281705 - DNA, 25 bp, Probe Sequence
tgttcagttcacctctggataaact

SEQ ID NO: 281706 - DNA, 25 bp, Probe Sequence
tgttcgctctcgccgaggaacaagt

SEQ ID NO: 281707 - DNA, 25 bp, Probe Sequence
tgttggttccagctggcaacacgtt

SEQ ID NO: 281708 - DNA, 25 bp, Probe Sequence
tgtttttcacatttgcgaatggttc

SEQ ID NO: 281709 - DNA, 25 bp, Probe Sequence
tgttttcagcctatggaatgatttc

SEQ ID NO: 281710 - DNA, 25 bp, Probe Sequence
tgtttcatgacactaatttagtctt

SEQ ID NO: 281711 - DNA, 25 bp, Probe Sequence
tgtttctggctatgatattattgct

SEQ ID NO: 281712 - DNA, 25 bp, Probe Sequence
tgttcccagtcagcatatacaagct

SEQ ID NO: 281713 - DNA, 25 bp, Probe Sequence
tgttctccaaagtataaatgagcat

SEQ ID NO: 281714 - DNA, 25 bp, Probe Sequence
tgtttgcccagtctcaaatgccatg

SEQ ID NO: 281715 - DNA, 25 bp, Probe Sequence
tgtattgcccagaagccatcgtgtc

SEQ ID NO: 281716 - DNA, 25 bp, Probe Sequence
tgttagcctcagacactactgaggt

SEQ ID NO: 281717 - DNA, 25 bp, Probe Sequence
tgtttgcccagacctacgggctgac

SEQ ID NO: 281718 - DNA, 25 bp, Probe Sequence
tgttctcccaatcagctcagggcaa

SEQ ID NO: 281719 - DNA, 25 bp, Probe Sequence
tgttccccactgtatctaggcaaca

SEQ ID NO: 281720 - DNA, 25 bp, Probe Sequence
tgcttgcccctagttaagtcaatcc

SEQ ID NO: 281721 - DNA, 25 bp, Probe Sequence
tgttgccgcttcattaagtggttca

SEQ ID NO: 281722 - DNA, 25 bp, Probe Sequence
tgtattacagtgctataaattctcc

SEQ ID NO: 281723 - DNA, 25 bp, Probe Sequence
tgttcaaatgtccttaattgtctcc

SEQ ID NO: 281724 - DNA, 25 bp, Probe Sequence
tgttacttgcctttaagtgcctctc

SEQ ID NO: 281725 - DNA, 25 bp, Probe Sequence
tgttcatctgtgacattaaaagttc

SEQ ID NO: 281726 - DNA, 25 bp, Probe Sequence
tgttcgtgtacccagaggagtcgct

SEQ ID NO: 281727 - DNA, 25 bp, Probe Sequence
tgttacttctcctggggtacatttt

SEQ ID NO: 281728 - DNA, 25 bp, Probe Sequence
tgtttcttcggctaaaggtacagtt

SEQ ID NO: 281729 - DNA, 25 bp, Probe Sequence
tgttgtcctgtgccataaagtgata

SEQ ID NO: 281730 - DNA, 25 bp, Probe Sequence
tgtttcattgtattctgtgagtgat

SEQ ID NO: 281731 - DNA, 25 bp, Probe Sequence
tgtttctttaacatgttttcttcaa

SEQ ID NO: 281732 - DNA, 25 bp, Probe Sequence
tgttacagttatacaatgatttttt

SEQ ID NO: 281733 - DNA, 25 bp, Probe Sequence
tgtttcatttgccaccatccgtttt

SEQ ID NO: 281734 - DNA, 25 bp, Probe Sequence
tgtttcttctcgacaccaaaatttt

SEQ ID NO: 281735 - DNA, 25 bp, Probe Sequence
tgtattttcacaaccagggaacctt

SEQ ID NO: 281736 - DNA, 25 bp, Probe Sequence
tgaaaattgccaccaaggccaaccc

SEQ ID NO: 281737 - DNA, 25 bp, Probe Sequence
tgagaatttacaccaaacccaaagg

SEQ ID NO: 281738 - DNA, 25 bp, Probe Sequence
tgaagagggccgcaagccccaaatg

SEQ ID NO: 281739 - DNA, 25 bp, Probe Sequence
tgatacgggaagagaccccaatcag

SEQ ID NO: 281740 - DNA, 25 bp, Probe Sequence
tgttcggcaaaaggacctccaccaa

SEQ ID NO: 281741 - DNA, 25 bp, Probe Sequence
tgtatttaaatagcacctcccttac

SEQ ID NO: 281742 - DNA, 25 bp, Probe Sequence
tgttcttacagaaccacctccaata

SEQ ID NO: 281743 - DNA, 25 bp, Probe Sequence
tgttcgttcaagtctgactacccat

SEQ ID NO: 281744 - DNA, 25 bp, Probe Sequence
tgttcgttcaagcctagcaatccat

SEQ ID NO: 281745 - DNA, 25 bp, Probe Sequence
tgttgcctctgaagatttcactcca

SEQ ID NO: 281746 - DNA, 25 bp, Probe Sequence
tgtttctctacatttatatctattt

SEQ ID NO: 281747 - DNA, 25 bp, Probe Sequence
tgtttctcaccatatgcttttgttg

SEQ ID NO: 281748 - DNA, 25 bp, Probe Sequence
tgatttccaacatgaggttttttgt

SEQ ID NO: 281749 - DNA, 25 bp, Probe Sequence
tgtttgtaagaatttgttgttttgt

SEQ ID NO: 281750 - DNA, 25 bp, Probe Sequence
tgttttcgtgaatttgcttgtttgt

SEQ ID NO: 281751 - DNA, 25 bp, Probe Sequence
tgttcttttgaagcttgtgctgagg

SEQ ID NO: 281752 - DNA, 25 bp, Probe Sequence
tgtttttggaattttgactggctga

SEQ ID NO: 281753 - DNA, 25 bp, Probe Sequence
tgtttgctttgatttttgcttggcc

SEQ ID NO: 281754 - DNA, 25 bp, Probe Sequence
tgtttgttgtgtgttgtgtcgtgta

SEQ ID NO: 281755 - DNA, 25 bp, Probe Sequence
tgttgattgtttgtgctttcttggc

SEQ ID NO: 281756 - DNA, 25 bp, Probe Sequence
tgttgagttttcactcttctaatgc

SEQ ID NO: 281757 - DNA, 25 bp, Probe Sequence
tgttggtgtttttcctgtaaagatc

SEQ ID NO: 281758 - DNA, 25 bp, Probe Sequence
tgattttgcttcatactcggttaat

SEQ ID NO: 281759 - DNA, 25 bp, Probe Sequence
tgtttgtgtgtaacctacagaaaaa

SEQ ID NO: 281760 - DNA, 25 bp, Probe Sequence
tgtttgtgataaccgtggcgaaagt

SEQ ID NO: 281761 - DNA, 25 bp, Probe Sequence
tgttggtgataacctctgctgggag

SEQ ID NO: 281762 - DNA, 25 bp, Probe Sequence
tgttgtgttttgaatctctccagag

SEQ ID NO: 281763 - DNA, 25 bp, Probe Sequence
tgtttctgtctggatcactgccaag

SEQ ID NO: 281764 - DNA, 25 bp, Probe Sequence
tgttttgatctgggctctgagcaca

SEQ ID NO: 281765 - DNA, 25 bp, Probe Sequence
tgtattatgctcccttcgatggcat

SEQ ID NO: 281766 - DNA, 25 bp, Probe Sequence
tgttctcactgcactggctgaagca

SEQ ID NO: 281767 - DNA, 25 bp, Probe Sequence
tgtttgcactcatctgacagaatcc

SEQ ID NO: 281768 - DNA, 25 bp, Probe Sequence
tgtttgcagctttctggcacatagt

SEQ ID NO: 281769 - DNA, 25 bp, Probe Sequence
tgttgccatggtaatcctgctcagt

SEQ ID NO: 281770 - DNA, 25 bp, Probe Sequence
tgttgaaagtaaccgtcgtcagaac

SEQ ID NO: 281771 - DNA, 25 bp, Probe Sequence
tgaagaaccttcacgttgtctacct

SEQ ID NO: 281772 - DNA, 25 bp, Probe Sequence
tgaaaactcctgtagcctaggctac

SEQ ID NO: 281773 - DNA, 25 bp, Probe Sequence
tgataactccctgagcctcaagaca

SEQ ID NO: 281774 - DNA, 25 bp, Probe Sequence
tgataactccctgagcctcaagaca

SEQ ID NO: 281775 - DNA, 25 bp, Probe Sequence
tgataactccctgagcctcaagaca

SEQ ID NO: 281776 - DNA, 25 bp, Probe Sequence
tgataactccctgagcctcaagaca

SEQ ID NO: 281777 - DNA, 25 bp, Probe Sequence
tgataaccactaagagtctctatta

SEQ ID NO: 281778 - DNA, 25 bp, Probe Sequence
tgattacccgtaacacatttgtgat

SEQ ID NO: 281779 - DNA, 25 bp, Probe Sequence
tgttgacgctctgcaaaagtttgca

SEQ ID NO: 281780 - DNA, 25 bp, Probe Sequence
tgttgacatctatcaaacatgttgt

SEQ ID NO: 281781 - DNA, 25 bp, Probe Sequence
tgtttcccaagctagactgtgtctg

SEQ ID NO: 281782 - DNA, 25 bp, Probe Sequence
tgctttccctggtaggtatttgcca

SEQ ID NO: 281783 - DNA, 25 bp, Probe Sequence
tgattttcctgatagctgtattaaa

SEQ ID NO: 281784 - DNA, 25 bp, Probe Sequence
tgtttttagattactttttcaactg

SEQ ID NO: 281785 - DNA, 25 bp, Probe Sequence
tgtttttggttttgtgatattcccg

SEQ ID NO: 281786 - DNA, 25 bp, Probe Sequence
tgttttctgggtcgtctatgtgtca

SEQ ID NO: 281787 - DNA, 25 bp, Probe Sequence
tgttttctctgaatgtcttggtgtc

SEQ ID NO: 281788 - DNA, 25 bp, Probe Sequence
tgtttcatcaccagactttggctcc

SEQ ID NO: 281789 - DNA, 25 bp, Probe Sequence
tgtttcatcaccagactttggctcc

SEQ ID NO: 281790 - DNA, 25 bp, Probe Sequence
tgatcttctaaggggcccagggcca

SEQ ID NO: 281791 - DNA, 25 bp, Probe Sequence
tgtttctcctgttggctcacagggc

SEQ ID NO: 281792 - DNA, 25 bp, Probe Sequence
tgttgtcttcactggctacagtggc

SEQ ID NO: 281793 - DNA, 25 bp, Probe Sequence
tgttgtattacatgcttagactaga

SEQ ID NO: 281794 - DNA, 25 bp, Probe Sequence
tgatttgattaaacctagacgcatt

SEQ ID NO: 281795 - DNA, 25 bp, Probe Sequence
tgtttgaccacaagcagggcaccta

SEQ ID NO: 281796 - DNA, 25 bp, Probe Sequence
tgtttgactacacagtggcctcatg

SEQ ID NO: 281797 - DNA, 25 bp, Probe Sequence
tgtttgactgactcggagctcacct

SEQ ID NO: 281798 - DNA, 25 bp, Probe Sequence
tgtttgcaattcacgttgccacctc

SEQ ID NO: 281799 - DNA, 25 bp, Probe Sequence
tgtttagggctaggcttggcctctt

SEQ ID NO: 281800 - DNA, 25 bp, Probe Sequence
tgttaaggggcaggtttctctttag

SEQ ID NO: 281801 - DNA, 25 bp, Probe Sequence
tgttacttgtggtgtgattttttga

SEQ ID NO: 281802 - DNA, 25 bp, Probe Sequence
tgttcgccgaggtgtgcatggtttc

SEQ ID NO: 281803 - DNA, 25 bp, Probe Sequence
tgattcgggaggtgtgtggctttgc

SEQ ID NO: 281804 - DNA, 25 bp, Probe Sequence
tgagtggggcatctgttggactttc

SEQ ID NO: 281805 - DNA, 25 bp, Probe Sequence
tgtttgggctgcttttagtttctct

SEQ ID NO: 281806 - DNA, 25 bp, Probe Sequence
tgtttctgagtgtttaaattttgca

SEQ ID NO: 281807 - DNA, 25 bp, Probe Sequence
tgttttgattatgtaccttttgata

SEQ ID NO: 281808 - DNA, 25 bp, Probe Sequence
tgttttgtcttcacccatgtaataa

SEQ ID NO: 281809 - DNA, 25 bp, Probe Sequence
tgttttgtcttcacccatgtaataa

SEQ ID NO: 281810 - DNA, 25 bp, Probe Sequence
ttttttttcaacactcttacacctg

SEQ ID NO: 281811 - DNA, 25 bp, Probe Sequence
ttttttttcaacactcttacacctg

SEQ ID NO: 281812 - DNA, 25 bp, Probe Sequence
tgattatcttttcaggtccttatac

SEQ ID NO: 281813 - DNA, 25 bp, Probe Sequence
tgttactctattacacttcctttca

SEQ ID NO: 281814 - DNA, 25 bp, Probe Sequence
tgtttctcagttactatttctcctc

SEQ ID NO: 281815 - DNA, 25 bp, Probe Sequence
tgttttgcagttaccatctcatcac

SEQ ID NO: 281816 - DNA, 25 bp, Probe Sequence
tgttaagcagattacttccatcagt

SEQ ID NO: 281817 - DNA, 25 bp, Probe Sequence
tgttgtagcagtgttctggatcatt

SEQ ID NO: 281818 - DNA, 25 bp, Probe Sequence
tgttggaagttatttggattgtttt

SEQ ID NO: 281819 - DNA, 25 bp, Probe Sequence
tgatatggaagtgtattccttttca

SEQ ID NO: 281820 - DNA, 25 bp, Probe Sequence
tgattgagatttttcgccctttcta

SEQ ID NO: 281821 - DNA, 25 bp, Probe Sequence
tgttagtgttcatttgcctgttggc

SEQ ID NO: 281822 - DNA, 25 bp, Probe Sequence
tgttctggtatgcattctttatagt

SEQ ID NO: 281823 - DNA, 25 bp, Probe Sequence
tgtttttgagcttctcattgtgtag

SEQ ID NO: 281824 - DNA, 25 bp, Probe Sequence
tgtttaatgatgatgactccgcaag

SEQ ID NO: 281825 - DNA, 25 bp, Probe Sequence
tgtttcaatcgaatggagccactgg

SEQ ID NO: 281826 - DNA, 25 bp, Probe Sequence
tgttggcacctggatggagtgctct

SEQ ID NO: 281827 - DNA, 25 bp, Probe Sequence
tgtttgaagcgcagcaggtgcatcg

SEQ ID NO: 281828 - DNA, 25 bp, Probe Sequence
tgttgcttatggtgcagctgtccag

SEQ ID NO: 281829 - DNA, 25 bp, Probe Sequence
tgttgctgttgctgccatgttaatg

SEQ ID NO: 281830 - DNA, 25 bp, Probe Sequence
tgttgtgcttgtcctggttattgtc

SEQ ID NO: 281831 - DNA, 25 bp, Probe Sequence
tgttggctctgttgtgtttattcac

SEQ ID NO: 281832 - DNA, 25 bp, Probe Sequence
tgtttgccatcatgtgtttcacacc

SEQ ID NO: 281833 - DNA, 25 bp, Probe Sequence
tgttctgcaactctggctttcataa

SEQ ID NO: 281834 - DNA, 25 bp, Probe Sequence
tgttgctgtaccttagctgtgtttg

SEQ ID NO: 281835 - DNA, 25 bp, Probe Sequence
tgtttctcacgcttacttgatctat

SEQ ID NO: 281836 - DNA, 25 bp, Probe Sequence
tgtttgccagctgtatattatccct

SEQ ID NO: 281837 - DNA, 25 bp, Probe Sequence
tgtttgcacgctggcctatatatca

SEQ ID NO: 281838 - DNA, 25 bp, Probe Sequence
tgtttgcagcctgctctagtgggac

SEQ ID NO: 281839 - DNA, 25 bp, Probe Sequence
tgtttgcagccttcgaagatgtaac

SEQ ID NO: 281840 - DNA, 25 bp, Probe Sequence
tgtttgctggcttggtccatgtgaa

SEQ ID NO: 281841 - DNA, 25 bp, Probe Sequence
tgttatgcaatgctggagacatggt

SEQ ID NO: 281842 - DNA, 25 bp, Probe Sequence
tgtttcaatggtaaatccttttgga

SEQ ID NO: 281843 - DNA, 25 bp, Probe Sequence
ttttgacgttactcctctttagaca

SEQ ID NO: 281844 - DNA, 25 bp, Probe Sequence
tgatttgaccttacctactatttgg

SEQ ID NO: 281845 - DNA, 25 bp, Probe Sequence
tgttttccattatcataatttgatg

SEQ ID NO: 281846 - DNA, 25 bp, Probe Sequence
tgttgttctcattacaacccttctg

SEQ ID NO: 281847 - DNA, 25 bp, Probe Sequence
tgcttttccatatccccaggattgc

SEQ ID NO: 281848 - DNA, 25 bp, Probe Sequence
tgattttcgcaaccacccaaatatc

SEQ ID NO: 281849 - DNA, 25 bp, Probe Sequence
tgattgaatcactaacacccaccaa

SEQ ID NO: 281850 - DNA, 25 bp, Probe Sequence
tgatccaaataaacagaccccgtct

SEQ ID NO: 281851 - DNA, 25 bp, Probe Sequence
tgatccaaataaacagaccccgtct

SEQ ID NO: 281852 - DNA, 25 bp, Probe Sequence
tgaccaacatggagaagccccgtct

SEQ ID NO: 281853 - DNA, 25 bp, Probe Sequence
tgaccaacatggagaaaccctgtct

SEQ ID NO: 281854 - DNA, 25 bp, Probe Sequence
tgagctaggaagagtctacccgaca

SEQ ID NO: 281855 - DNA, 25 bp, Probe Sequence
tgagctaaattgctttcatacccca

SEQ ID NO: 281856 - DNA, 25 bp, Probe Sequence
tgcactggaggtcttttagcctgcc

SEQ ID NO: 281857 - DNA, 25 bp, Probe Sequence
tgttgagagtctcattcttgccctg

SEQ ID NO: 281858 - DNA, 25 bp, Probe Sequence
tgttactgttgcactgatgtccgga

SEQ ID NO: 281859 - DNA, 25 bp, Probe Sequence
tgctccactttttctaccttggaac

SEQ ID NO: 281860 - DNA, 25 bp, Probe Sequence
tgctccactttttctaccttggaac

SEQ ID NO: 281861 - DNA, 25 bp, Probe Sequence
tgctccactttttctaccttggaac

SEQ ID NO: 281862 - DNA, 25 bp, Probe Sequence
tgatgctccctgagacaacctggga

SEQ ID NO: 281863 - DNA, 25 bp, Probe Sequence
tgttctcctttagcagacaggtgat

SEQ ID NO: 281864 - DNA, 25 bp, Probe Sequence
tgttcttgccctaccataagggctg

SEQ ID NO: 281865 - DNA, 25 bp, Probe Sequence
tgttttccctacctagaatgtcaga

SEQ ID NO: 281866 - DNA, 25 bp, Probe Sequence
tgtttaccgctttttcacatgtaga

SEQ ID NO: 281867 - DNA, 25 bp, Probe Sequence
tgttatttccctactctaattacaa

SEQ ID NO: 281868 - DNA, 25 bp, Probe Sequence
tgtttttctattaatcttttgtcaa

SEQ ID NO: 281869 - DNA, 25 bp, Probe Sequence
tgttttgtcactattcacattttag

SEQ ID NO: 281870 - DNA, 25 bp, Probe Sequence
tgtttttatcttatacacatgaata

SEQ ID NO: 281871 - DNA, 25 bp, Probe Sequence
tgttccatatatgttataccttgta

SEQ ID NO: 281872 - DNA, 25 bp, Probe Sequence
tgttccaatatgattccacccatgg

SEQ ID NO: 281873 - DNA, 25 bp, Probe Sequence
tgatcttcaacaaattgccctttag

SEQ ID NO: 281874 - DNA, 25 bp, Probe Sequence
tgatcttaagaattacccatgttta

SEQ ID NO: 281875 - DNA, 25 bp, Probe Sequence
tgatttacatatgaacctcagttct

SEQ ID NO: 281876 - DNA, 25 bp, Probe Sequence
tgttttcagatccaagtgctcagat

SEQ ID NO: 281877 - DNA, 25 bp, Probe Sequence
tgttgtccacagccagagcttagtg

SEQ ID NO: 281878 - DNA, 25 bp, Probe Sequence
tgttgagacatggccagcaattctg

SEQ ID NO: 281879 - DNA, 25 bp, Probe Sequence
tgttcaacaccctcttcatgaaccc

SEQ ID NO: 281880 - DNA, 25 bp, Probe Sequence
tgttcacaccacgctttgataacta

SEQ ID NO: 281881 - DNA, 25 bp, Probe Sequence
tgttcacaccacgctttgataacta

SEQ ID NO: 281882 - DNA, 25 bp, Probe Sequence
tgttatacacagctttatgatatca

SEQ ID NO: 281883 - DNA, 25 bp, Probe Sequence
tgtttatcagtcctgctcttataca

SEQ ID NO: 281884 - DNA, 25 bp, Probe Sequence
tgttgaatttcacttctgcaatagc

SEQ ID NO: 281885 - DNA, 25 bp, Probe Sequence
tgttacacttattctccaagctgcc

SEQ ID NO: 281886 - DNA, 25 bp, Probe Sequence
tgttacatagatattttagagccaa

SEQ ID NO: 281887 - DNA, 25 bp, Probe Sequence
tgattcggaaattttaagcccatga

SEQ ID NO: 281888 - DNA, 25 bp, Probe Sequence
tgatctcaggaattacattttccaa

SEQ ID NO: 281889 - DNA, 25 bp, Probe Sequence
tgatccactgaccaaatccttaacc

SEQ ID NO: 281890 - DNA, 25 bp, Probe Sequence
tgatcacctggagtgaagacctcac

SEQ ID NO: 281891 - DNA, 25 bp, Probe Sequence
tgatctctcggcagaaactctacaa

SEQ ID NO: 281892 - DNA, 25 bp, Probe Sequence
tgttcctggttgcaactcatgagat

SEQ ID NO: 281893 - DNA, 25 bp, Probe Sequence
tgttcctggtctttcactgacaatt

SEQ ID NO: 281894 - DNA, 25 bp, Probe Sequence
tgttcccgttgtccctggcacagat

SEQ ID NO: 281895 - DNA, 25 bp, Probe Sequence
tgttccatcagccgtaccgggcgat

SEQ ID NO: 281896 - DNA, 25 bp, Probe Sequence
tgttccataccctctgtgtgggatg

SEQ ID NO: 281897 - DNA, 25 bp, Probe Sequence
tgttcagattccattctgtggggaa

SEQ ID NO: 281898 - DNA, 25 bp, Probe Sequence
tgttcagcattcttagcctgtggca

SEQ ID NO: 281899 - DNA, 25 bp, Probe Sequence
tgttcaaatctttgagagtgagctc

SEQ ID NO: 281900 - DNA, 25 bp, Probe Sequence
tgttccctctgtgatgagctgtgcc

SEQ ID NO: 281901 - DNA, 25 bp, Probe Sequence
tgttcaccacgagtgtggctgctgg

SEQ ID NO: 281902 - DNA, 25 bp, Probe Sequence
tgttcatgcacgcagtatggcccag

SEQ ID NO: 281903 - DNA, 25 bp, Probe Sequence
tgttaagcagcattgcttgcccctg

SEQ ID NO: 281904 - DNA, 25 bp, Probe Sequence
tgattgctacagatgtggcctccag

SEQ ID NO: 281905 - DNA, 25 bp, Probe Sequence
tgttgctgaagttttgctgctgcca

SEQ ID NO: 281906 - DNA, 25 bp, Probe Sequence
tgttctggaatttgggggcaaccct

SEQ ID NO: 281907 - DNA, 25 bp, Probe Sequence
tgttctggactcttgggagtggaaa

SEQ ID NO: 281908 - DNA, 25 bp, Probe Sequence
tgttcccacttgagcaggtacacaa

SEQ ID NO: 281909 - DNA, 25 bp, Probe Sequence
tgttccaactacagaagtctcacca

SEQ ID NO: 281910 - DNA, 25 bp, Probe Sequence
tgttccaactacagaagtctcacca

SEQ ID NO: 281911 - DNA, 25 bp, Probe Sequence
tgtttatagctactgtgacagaaac

SEQ ID NO: 281912 - DNA, 25 bp, Probe Sequence
tgttgtaacctgctgcacggataca

SEQ ID NO: 281913 - DNA, 25 bp, Probe Sequence
tgttgaacgtacctgagcctgcaaa

SEQ ID NO: 281914 - DNA, 25 bp, Probe Sequence
tgttgcaattaacagaactgacact

SEQ ID NO: 281915 - DNA, 25 bp, Probe Sequence
tgttcgtgtaactgacagagatatc

SEQ ID NO: 281916 - DNA, 25 bp, Probe Sequence
tgattcgtttactagaacagtctaa

SEQ ID NO: 281917 - DNA, 25 bp, Probe Sequence
tgttcgacttcagcgagaagctcaa

SEQ ID NO: 281918 - DNA, 25 bp, Probe Sequence
tgttcttttcctttgaagtcacatt

SEQ ID NO: 281919 - DNA, 25 bp, Probe Sequence
tgttcttttcttaagctcccaattt

SEQ ID NO: 281920 - DNA, 25 bp, Probe Sequence
tgttcttttctggtaggttctgtct

SEQ ID NO: 281921 - DNA, 25 bp, Probe Sequence
tgatttttttttagttattgatttg

SEQ ID NO: 281922 - DNA, 25 bp, Probe Sequence
tgtttatttatttagttatttatct

SEQ ID NO: 281923 - DNA, 25 bp, Probe Sequence
tgttttcttatttcagctctggatt

SEQ ID NO: 281924 - DNA, 25 bp, Probe Sequence
tgttttgctacttacagtgtacttg

SEQ ID NO: 281925 - DNA, 25 bp, Probe Sequence
tgatttgggccttgaagagtaattg

SEQ ID NO: 281926 - DNA, 25 bp, Probe Sequence
tgattgggtacttaaaattttactg

SEQ ID NO: 281927 - DNA, 25 bp, Probe Sequence
tgttctcctactgcaaatattttca

SEQ ID NO: 281928 - DNA, 25 bp, Probe Sequence
tgttctttttattgaatctatttaa

SEQ ID NO: 281929 - DNA, 25 bp, Probe Sequence
tgttggtctttatatccttttatta

SEQ ID NO: 281930 - DNA, 25 bp, Probe Sequence
tgttacttttattatttggatgtat

SEQ ID NO: 281931 - DNA, 25 bp, Probe Sequence
tgttccttttaattgttcataagta

SEQ ID NO: 281932 - DNA, 25 bp, Probe Sequence
tgttcagcctatacttttccatatg

SEQ ID NO: 281933 - DNA, 25 bp, Probe Sequence
tgttccctatgaaagattccacaga

SEQ ID NO: 281934 - DNA, 25 bp, Probe Sequence
tgattcaccagtacaggatcccaca

SEQ ID NO: 281935 - DNA, 25 bp, Probe Sequence
tgttcatgtcagtgagagcttccca

SEQ ID NO: 281936 - DNA, 25 bp, Probe Sequence
tgttagccaaggacttgtcccacct

SEQ ID NO: 281937 - DNA, 25 bp, Probe Sequence
tgttagctccaaagcatttcccacc

SEQ ID NO: 281938 - DNA, 25 bp, Probe Sequence
tgttaaacatgtggtgttctccccg

SEQ ID NO: 281939 - DNA, 25 bp, Probe Sequence
tgatcaaacgctctgtgtttccacc

SEQ ID NO: 281940 - DNA, 25 bp, Probe Sequence
tgatcactgggacctggttccagcc

SEQ ID NO: 281941 - DNA, 25 bp, Probe Sequence
tgatcactgggacctggttccagcc

SEQ ID NO: 281942 - DNA, 25 bp, Probe Sequence
tgatcggcatggagctggtctccgt

SEQ ID NO: 281943 - DNA, 25 bp, Probe Sequence
tgttatgctgtgacacatggcccct

SEQ ID NO: 281944 - DNA, 25 bp, Probe Sequence
tgttctttataaggcacactcatac

SEQ ID NO: 281945 - DNA, 25 bp, Probe Sequence
tgttctttagatggtggcacattcc

SEQ ID NO: 281946 - DNA, 25 bp, Probe Sequence
tgatcatctctttcatgcagttgcc

SEQ ID NO: 281947 - DNA, 25 bp, Probe Sequence
tgatactgattatgaaatgtcccct

SEQ ID NO: 281948 - DNA, 25 bp, Probe Sequence
tgattctggctgagaacggcttcct

SEQ ID NO: 281949 - DNA, 25 bp, Probe Sequence
tgttcttcgggattctgggagccac

SEQ ID NO: 281950 - DNA, 25 bp, Probe Sequence
tgaccacaagggctatgggaccacc

SEQ ID NO: 281951 - DNA, 25 bp, Probe Sequence
tgactgaaggggcttggcttccact

SEQ ID NO: 281952 - DNA, 25 bp, Probe Sequence
tgttaatgaggccaatttttccagc

SEQ ID NO: 281953 - DNA, 25 bp, Probe Sequence
tgttacatggaaaggattttgaagc

SEQ ID NO: 281954 - DNA, 25 bp, Probe Sequence
tgttgccatggcgatagtaatattg

SEQ ID NO: 281955 - DNA, 25 bp, Probe Sequence
tgttcagctgacaaagtagtatttt

SEQ ID NO: 281956 - DNA, 25 bp, Probe Sequence
tgttcaagaaagcctcattcttttc

SEQ ID NO: 281957 - DNA, 25 bp, Probe Sequence
tgttacaggaagtcccttgccatcc

SEQ ID NO: 281958 - DNA, 25 bp, Probe Sequence
tgattacaggagcagcccaggcgga

SEQ ID NO: 281959 - DNA, 25 bp, Probe Sequence
tgcgtcacgtggaacaccaactcgc

SEQ ID NO: 281960 - DNA, 25 bp, Probe Sequence
tgagaagccctgatcagtcaaccag

SEQ ID NO: 281961 - DNA, 25 bp, Probe Sequence
tagtagccacgtctgtaacggcgcc

SEQ ID NO: 281962 - DNA, 25 bp, Probe Sequence
tgatctaccaagtggctaaacggac

SEQ ID NO: 281963 - DNA, 25 bp, Probe Sequence
tgttaccaaattataaaactacact

SEQ ID NO: 281964 - DNA, 25 bp, Probe Sequence
tgttcccatatatttaaaataccca

SEQ ID NO: 281965 - DNA, 25 bp, Probe Sequence
tgttcccttttgacataatatagtc

SEQ ID NO: 281966 - DNA, 25 bp, Probe Sequence
tgttccctcctggatgcaatttcag

SEQ ID NO: 281967 - DNA, 25 bp, Probe Sequence
tgttccctatccaatcaatcttgca

SEQ ID NO: 281968 - DNA, 25 bp, Probe Sequence
tgttcctcttgttctaatcttgtca

SEQ ID NO: 281969 - DNA, 25 bp, Probe Sequence
tgttttctatgatctgaacctgtca

SEQ ID NO: 281970 - DNA, 25 bp, Probe Sequence
tgttgtcacttgtcatctaaactta

SEQ ID NO: 281971 - DNA, 25 bp, Probe Sequence
tgttgtccttaaaaatgaattgacc

SEQ ID NO: 281972 - DNA, 25 bp, Probe Sequence
tgttttcattaatcaagaacgaaag

SEQ ID NO: 281973 - DNA, 25 bp, Probe Sequence
tgattttactacagggagacagaaa

SEQ ID NO: 281974 - DNA, 25 bp, Probe Sequence
tgattttgaaactgatttctagaaa

SEQ ID NO: 281975 - DNA, 25 bp, Probe Sequence
tgttcactagcatttaagtttagaa

SEQ ID NO: 281976 - DNA, 25 bp, Probe Sequence
tgttcacacatgtctttaggtggaa

SEQ ID NO: 281977 - DNA, 25 bp, Probe Sequence
tgttgaattgtcattatcggctaat

SEQ ID NO: 281978 - DNA, 25 bp, Probe Sequence
tgttattcttcagggcatcgtgcaa

SEQ ID NO: 281979 - DNA, 25 bp, Probe Sequence
tgttttctgctgtttgatctctaag

SEQ ID NO: 281980 - DNA, 25 bp, Probe Sequence
tgttctctttataggatctcattac

SEQ ID NO: 281981 - DNA, 25 bp, Probe Sequence
tgttttattctgggtcatctataga

SEQ ID NO: 281982 - DNA, 25 bp, Probe Sequence
tgttattatactcttcttattgact

SEQ ID NO: 281983 - DNA, 25 bp, Probe Sequence
tgttagctttacctttgtttactga

SEQ ID NO: 281984 - DNA, 25 bp, Probe Sequence
tgttacttctaactcatttttaaag

SEQ ID NO: 281985 - DNA, 25 bp, Probe Sequence
tgttacttgcagcattcatttgttt

SEQ ID NO: 281986 - DNA, 25 bp, Probe Sequence
tgttaatgctgggatccatatttag

SEQ ID NO: 281987 - DNA, 25 bp, Probe Sequence
tgttcacatgaacttatctgattta

SEQ ID NO: 281988 - DNA, 25 bp, Probe Sequence
tgttagcatgaagcttcttggacat

SEQ ID NO: 281989 - DNA, 25 bp, Probe Sequence
tgttatgtgaatgtatctttaaaac

SEQ ID NO: 281990 - DNA, 25 bp, Probe Sequence
tgttttggttgtactttggaattct

SEQ ID NO: 281991 - DNA, 25 bp, Probe Sequence
tgagagttggttgttttaaagctta

SEQ ID NO: 281992 - DNA, 25 bp, Probe Sequence
tgaggttggtggactttccccacct

SEQ ID NO: 281993 - DNA, 25 bp, Probe Sequence
tgagtttggtgatcctggtacccca

SEQ ID NO: 281994 - DNA, 25 bp, Probe Sequence
tagtctaggtccgcggttacggata

SEQ ID NO: 281995 - DNA, 25 bp, Probe Sequence
ttggctagttttgaggatttcgttg

SEQ ID NO: 281996 - DNA, 25 bp, Probe Sequence
ttactaggtttgaatgcggtgtaga

SEQ ID NO: 281997 - DNA, 25 bp, Probe Sequence
tgatttcaggtcaataacggtcccc

SEQ ID NO: 281998 - DNA, 25 bp, Probe Sequence
tgttctcctttgaagaacccctcac

SEQ ID NO: 281999 - DNA, 25 bp, Probe Sequence
tgttctctgtattgtactaaccaac

SEQ ID NO: 282000 - DNA, 25 bp, Probe Sequence
tgttactttagttcatcagaaaact

SEQ ID NO: 282001 - DNA, 25 bp, Probe Sequence
tgttcacttttgtctgccagaatta

SEQ ID NO: 282002 - DNA, 25 bp, Probe Sequence
tgttgacccttgtggaagatatgat

SEQ ID NO: 282003 - DNA, 25 bp, Probe Sequence
tgttcccactcatccaaacaatgca

SEQ ID NO: 282004 - DNA, 25 bp, Probe Sequence
tgttccaggctctcagtacaaagaa

SEQ ID NO: 282005 - DNA, 25 bp, Probe Sequence
tgttccagattgaccatgaataaaa

SEQ ID NO: 282006 - DNA, 25 bp, Probe Sequence
tgatctgcttttatctaaatgcaaa

SEQ ID NO: 282007 - DNA, 25 bp, Probe Sequence
tgatcctgttcctcaacaagcaaga

SEQ ID NO: 282008 - DNA, 25 bp, Probe Sequence
tgataagtgtcagatcaataacaga

SEQ ID NO: 282009 - DNA, 25 bp, Probe Sequence
tgttaggaccagaagcagagacacc

SEQ ID NO: 282010 - DNA, 25 bp, Probe Sequence
tgttattgacccaaaggccatcttt

SEQ ID NO: 282011 - DNA, 25 bp, Probe Sequence
tgttacagacccaagctgtccattt

SEQ ID NO: 282012 - DNA, 25 bp, Probe Sequence
tgttcatcagactcctgtgcaactt

SEQ ID NO: 282013 - DNA, 25 bp, Probe Sequence
tgttgatatggttcctggcaagccc

SEQ ID NO: 282014 - DNA, 25 bp, Probe Sequence
tgttgatatggttcctggcaagccc

SEQ ID NO: 282015 - DNA, 25 bp, Probe Sequence
tgttattttgtgacgtgagactgca

SEQ ID NO: 282016 - DNA, 25 bp, Probe Sequence
tgttatttcgttaccactgcatgca

SEQ ID NO: 282017 - DNA, 25 bp, Probe Sequence
tgttattgttgacatgaatctatgc

SEQ ID NO: 282018 - DNA, 25 bp, Probe Sequence
tgttataattatacaggctctgtgg

SEQ ID NO: 282019 - DNA, 25 bp, Probe Sequence
tgttcatacccaaactgtctggcag

SEQ ID NO: 282020 - DNA, 25 bp, Probe Sequence
tgttcaaacagcaaacgcccacaga

SEQ ID NO: 282021 - DNA, 25 bp, Probe Sequence
tgttcaagaatcaagcacagacgac

SEQ ID NO: 282022 - DNA, 25 bp, Probe Sequence
tgttaggagtgcaagaatagccagc

SEQ ID NO: 282023 - DNA, 25 bp, Probe Sequence
tgttaggaatggggccgcacagcag

SEQ ID NO: 282024 - DNA, 25 bp, Probe Sequence
tgttgagagggggatgcccctggcc

SEQ ID NO: 282025 - DNA, 25 bp, Probe Sequence
tgattgtgaaggaggcccctcccct

SEQ ID NO: 282026 - DNA, 25 bp, Probe Sequence
tgttggacaggggattggcgccccc

SEQ ID NO: 282027 - DNA, 25 bp, Probe Sequence
tgttaagcagcgagggcgcgaccgc

SEQ ID NO: 282028 - DNA, 25 bp, Probe Sequence
tgttaccagtgttgtgagcctacct

SEQ ID NO: 282029 - DNA, 25 bp, Probe Sequence
tgttcccagatgtccaacctggtct

SEQ ID NO: 282030 - DNA, 25 bp, Probe Sequence
tgttcaatcaggtccaagtgctgga

SEQ ID NO: 282031 - DNA, 25 bp, Probe Sequence
tgttactaggttggaggctggagat

SEQ ID NO: 282032 - DNA, 25 bp, Probe Sequence
tgttactgtgaatagcatcctgggt

SEQ ID NO: 282033 - DNA, 25 bp, Probe Sequence
tgttatcgatgaaaatgctccagtc

SEQ ID NO: 282034 - DNA, 25 bp, Probe Sequence
tgttgaagctgtcccagttcagtgc

SEQ ID NO: 282035 - DNA, 25 bp, Probe Sequence
tgttcataatgtcccatatttcacc

SEQ ID NO: 282036 - DNA, 25 bp, Probe Sequence
tgttcattaattcatattgccccgc

SEQ ID NO: 282037 - DNA, 25 bp, Probe Sequence
tgttcattaattcatattgccccgc

SEQ ID NO: 282038 - DNA, 25 bp, Probe Sequence
tgcttttgagtctcatttgcccttg

SEQ ID NO: 282039 - DNA, 25 bp, Probe Sequence
tgttttggtcccatgtgcacacatt

SEQ ID NO: 282040 - DNA, 25 bp, Probe Sequence
tgagcagattggtccgtgcttacca

SEQ ID NO: 282041 - DNA, 25 bp, Probe Sequence
tgcacgtgtcccgggtcgaccagca

SEQ ID NO: 282042 - DNA, 25 bp, Probe Sequence
tgctacgtcgccctggacttcgagc

SEQ ID NO: 282043 - DNA, 25 bp, Probe Sequence
tgatatcgccgcgctcgtcgtcgac

SEQ ID NO: 282044 - DNA, 25 bp, Probe Sequence
tgatagagccgagctcgtttagtga

SEQ ID NO: 282045 - DNA, 25 bp, Probe Sequence
tgttcagactggttcttcttacata

SEQ ID NO: 282046 - DNA, 25 bp, Probe Sequence
tgttccctagttactgcttgcagta

SEQ ID NO: 282047 - DNA, 25 bp, Probe Sequence
tgttcccatggcacctgtgattgta

SEQ ID NO: 282048 - DNA, 25 bp, Probe Sequence
tgatccacagcggagaccctgttaa

SEQ ID NO: 282049 - DNA, 25 bp, Probe Sequence
tgataacatggtggtcaagcttatt

SEQ ID NO: 282050 - DNA, 25 bp, Probe Sequence
tgttgatcagttgctccagtgtttg

SEQ ID NO: 282051 - DNA, 25 bp, Probe Sequence
tgttatcagcattgaccaagtggtt

SEQ ID NO: 282052 - DNA, 25 bp, Probe Sequence
tgttcatccatttcacagcaggatt

SEQ ID NO: 282053 - DNA, 25 bp, Probe Sequence
tgattcatctgaggtttcagcgagt

SEQ ID NO: 282054 - DNA, 25 bp, Probe Sequence
tgatcagacagagtggttcatcgac

SEQ ID NO: 282055 - DNA, 25 bp, Probe Sequence
tgatcatgatctttggcctactgca

SEQ ID NO: 282056 - DNA, 25 bp, Probe Sequence
tgatcaaatatttcagactctcatg

SEQ ID NO: 282057 - DNA, 25 bp, Probe Sequence
tgatccagaaattatagctcgaggt

SEQ ID NO: 282058 - DNA, 25 bp, Probe Sequence
tgatctaattaatgcactcgaggta

SEQ ID NO: 282059 - DNA, 25 bp, Probe Sequence
tgatgctataactacgattcgggga

SEQ ID NO: 282060 - DNA, 25 bp, Probe Sequence
tgatggttaccagagactgagatgg

SEQ ID NO: 282061 - DNA, 25 bp, Probe Sequence
tgatggttaccgctttggactggga

SEQ ID NO: 282062 - DNA, 25 bp, Probe Sequence
tgatagttttcccgtttacataggg

SEQ ID NO: 282063 - DNA, 25 bp, Probe Sequence
tgttccttatcctgattttcatatc

SEQ ID NO: 282064 - DNA, 25 bp, Probe Sequence
tgttccttagttcactttcttcaat

SEQ ID NO: 282065 - DNA, 25 bp, Probe Sequence
tgttaggtagttcactttctctctt

SEQ ID NO: 282066 - DNA, 25 bp, Probe Sequence
tgttatgggtgctgaactctctctc

SEQ ID NO: 282067 - DNA, 25 bp, Probe Sequence
tgttagggtcaagggtgtcctccac

SEQ ID NO: 282068 - DNA, 25 bp, Probe Sequence
tgttagggtcaagggtgtcctccac

SEQ ID NO: 282069 - DNA, 25 bp, Probe Sequence
tgttaggggagtgtgccccatctca

SEQ ID NO: 282070 - DNA, 25 bp, Probe Sequence
tgatctgaggggtggtgcctacttc

SEQ ID NO: 282071 - DNA, 25 bp, Probe Sequence
tgttagtcaggctggtctcgaactc

SEQ ID NO: 282072 - DNA, 25 bp, Probe Sequence
tgttggccaggctggtctcgaactc

SEQ ID NO: 282073 - DNA, 25 bp, Probe Sequence
tgatggacgggcaggtccgaagccg

SEQ ID NO: 282074 - DNA, 25 bp, Probe Sequence
tgaggaggggaaagtaggaccagga

SEQ ID NO: 282075 - DNA, 25 bp, Probe Sequence
tgaggacgagagtaagaactcccac

SEQ ID NO: 282076 - DNA, 25 bp, Probe Sequence
tgagccacggcaaaaaacccttcag

SEQ ID NO: 282077 - DNA, 25 bp, Probe Sequence
tgatgcccggaatatctggggtcca

SEQ ID NO: 282078 - DNA, 25 bp, Probe Sequence
tgatcctggggtgccactgggatcc

SEQ ID NO: 282079 - DNA, 25 bp, Probe Sequence
tgttggactgttgccacagtgcagt

SEQ ID NO: 282080 - DNA, 25 bp, Probe Sequence
tgatgtggcatggttcctgacggag

SEQ ID NO: 282081 - DNA, 25 bp, Probe Sequence
tgatggtcagttcccggggtcaatt

SEQ ID NO: 282082 - DNA, 25 bp, Probe Sequence
tgatgcccagaaccctggacgggca

SEQ ID NO: 282083 - DNA, 25 bp, Probe Sequence
tgatcccaggggatggcatcgggcc

SEQ ID NO: 282084 - DNA, 25 bp, Probe Sequence
ttacgggtggagtgtggggcccaga

SEQ ID NO: 282085 - DNA, 25 bp, Probe Sequence
tgttcgggggaaaattgaccttcag

SEQ ID NO: 282086 - DNA, 25 bp, Probe Sequence
tgttcgggggacaacttgtatcttt

SEQ ID NO: 282087 - DNA, 25 bp, Probe Sequence
tgttcacggcggattctttgtttta

SEQ ID NO: 282088 - DNA, 25 bp, Probe Sequence
tgttcccacctgattttgtgacact

SEQ ID NO: 282089 - DNA, 25 bp, Probe Sequence
tgttccccacaatgttttgtacgtg

SEQ ID NO: 282090 - DNA, 25 bp, Probe Sequence
tgttctccccaatgtgtattttaat

SEQ ID NO: 282091 - DNA, 25 bp, Probe Sequence
tgttctggcctagaggtcagtcctt

SEQ ID NO: 282092 - DNA, 25 bp, Probe Sequence
tgttgtatctctagtcagttcagta

SEQ ID NO: 282093 - DNA, 25 bp, Probe Sequence
tgttgtcttcagagcagttaccaag

SEQ ID NO: 282094 - DNA, 25 bp, Probe Sequence
tgttgctcttctatcagactgcacc

SEQ ID NO: 282095 - DNA, 25 bp, Probe Sequence
tgttctggactgcaaatctgcacac

SEQ ID NO: 282096 - DNA, 25 bp, Probe Sequence
tgttcaggcacgccagaaggatgcc

SEQ ID NO: 282097 - DNA, 25 bp, Probe Sequence
tgttgctgctccggcagacagaggc

SEQ ID NO: 282098 - DNA, 25 bp, Probe Sequence
tgttcatatccttcagtgacattga

SEQ ID NO: 282099 - DNA, 25 bp, Probe Sequence
tgttcacagcatgtatctgacttga

SEQ ID NO: 282100 - DNA, 25 bp, Probe Sequence
tgttcagcaatgttgatctcataaa

SEQ ID NO: 282101 - DNA, 25 bp, Probe Sequence
tgataagctgcacatgactacatag

SEQ ID NO: 282102 - DNA, 25 bp, Probe Sequence
tgatcacagctcctgaacgtcagca

SEQ ID NO: 282103 - DNA, 25 bp, Probe Sequence
tgatatgctgtcctcaatagatcca

SEQ ID NO: 282104 - DNA, 25 bp, Probe Sequence
tgatatcttcgcactgagcacatca

SEQ ID NO: 282105 - DNA, 25 bp, Probe Sequence
tgttccatccaaatgtctatgcaga

SEQ ID NO: 282106 - DNA, 25 bp, Probe Sequence
tgttgtgcttagaattgctggatgc

SEQ ID NO: 282107 - DNA, 25 bp, Probe Sequence
tgttcagctgttaatgctgggatcc

SEQ ID NO: 282108 - DNA, 25 bp, Probe Sequence
tgttcgctgtggacgctgtagaggc

SEQ ID NO: 282109 - DNA, 25 bp, Probe Sequence
tgttctctgagacccatgatcaggg

SEQ ID NO: 282110 - DNA, 25 bp, Probe Sequence
tgatatctcggatacaatagaggca

SEQ ID NO: 282111 - DNA, 25 bp, Probe Sequence
tgaactgggaaacccaggccttcct

SEQ ID NO: 282112 - DNA, 25 bp, Probe Sequence
tgaattgggcatgaagcccccttcc

SEQ ID NO: 282113 - DNA, 25 bp, Probe Sequence
tgattctggaagcaacgttctttcc

SEQ ID NO: 282114 - DNA, 25 bp, Probe Sequence
tgttctggtagctaactttctcctg

SEQ ID NO: 282115 - DNA, 25 bp, Probe Sequence
tgttgggtatcagtatcttctctcc

SEQ ID NO: 282116 - DNA, 25 bp, Probe Sequence
tgaggctttagacttcctgatcctc

SEQ ID NO: 282117 - DNA, 25 bp, Probe Sequence
tgaggccttgaacacggattatccc

SEQ ID NO: 282118 - DNA, 25 bp, Probe Sequence
tgagtccttgttttccagatttctc

SEQ ID NO: 282119 - DNA, 25 bp, Probe Sequence
tgaggtgtttctttggaatttccgg

SEQ ID NO: 282120 - DNA, 25 bp, Probe Sequence
tgctagtttcttgtagatattcaca

SEQ ID NO: 282121 - DNA, 25 bp, Probe Sequence
tgcaagttactccttacctatcaac

SEQ ID NO: 282122 - DNA, 25 bp, Probe Sequence
tcataggaacaggtagactttcaac

SEQ ID NO: 282123 - DNA, 25 bp, Probe Sequence
tgatagggaacactaactttgaacc

SEQ ID NO: 282124 - DNA, 25 bp, Probe Sequence
tgatggggcgccagaactaggggcc

SEQ ID NO: 282125 - DNA, 25 bp, Probe Sequence
tgacggccgctacacgtgtacggcc

SEQ ID NO: 282126 - DNA, 25 bp, Probe Sequence
tgaggagaagtctgccgttactgcc

SEQ ID NO: 282127 - DNA, 25 bp, Probe Sequence
tgaggagaagtctgccgttactgcc

SEQ ID NO: 282128 - DNA, 25 bp, Probe Sequence
tgatatttcagttcccgctgtactg

SEQ ID NO: 282129 - DNA, 25 bp, Probe Sequence
tgttctgtgagttatctcgtgataa

SEQ ID NO: 282130 - DNA, 25 bp, Probe Sequence
tgttgctttgctttcttgtggacag

SEQ ID NO: 282131 - DNA, 25 bp, Probe Sequence
tgttctagtctgttgcgctgttaca

SEQ ID NO: 282132 - DNA, 25 bp, Probe Sequence
tgatactggtagttggtgtgaaact

SEQ ID NO: 282133 - DNA, 25 bp, Probe Sequence
tgataatgacattgcactggtgcgg

SEQ ID NO: 282134 - DNA, 25 bp, Probe Sequence
tgataaccttgttgagccggtcgtc

SEQ ID NO: 282135 - DNA, 25 bp, Probe Sequence
tgatattatttttggccgttagtta

SEQ ID NO: 282136 - DNA, 25 bp, Probe Sequence
tgttgtttttagctcggtcttttag

SEQ ID NO: 282137 - DNA, 25 bp, Probe Sequence
tgttgtttttatcttattttctttg

SEQ ID NO: 282138 - DNA, 25 bp, Probe Sequence
tgttctgttttgttttgttttgcta

SEQ ID NO: 282139 - DNA, 25 bp, Probe Sequence
tgattctggttttgagttactcttt

SEQ ID NO: 282140 - DNA, 25 bp, Probe Sequence
tgttctcattctatgagttccctcc

SEQ ID NO: 282141 - DNA, 25 bp, Probe Sequence
tgttcatatccactctggttctttc

SEQ ID NO: 282142 - DNA, 25 bp, Probe Sequence
tgatcctccagacctgtgtttttca

SEQ ID NO: 282143 - DNA, 25 bp, Probe Sequence
tgattgtgccgtcattctgttttaa

SEQ ID NO: 282144 - DNA, 25 bp, Probe Sequence
tgatatgatgctcggctgatttttg

SEQ ID NO: 282145 - DNA, 25 bp, Probe Sequence
tgatactgagagctacctattggca

SEQ ID NO: 282146 - DNA, 25 bp, Probe Sequence
tgatactttttccattactgctgcg

SEQ ID NO: 282147 - DNA, 25 bp, Probe Sequence
tgatattttttccctgagcagttct

SEQ ID NO: 282148 - DNA, 25 bp, Probe Sequence
tgatatattgttctttgaccctgcc

SEQ ID NO: 282149 - DNA, 25 bp, Probe Sequence
tgatattttgtatttggcaactgtg

SEQ ID NO: 282150 - DNA, 25 bp, Probe Sequence
tgataactttaatagaatgtggctc

SEQ ID NO: 282151 - DNA, 25 bp, Probe Sequence
tgaggaccttggttaaaggagccca

SEQ ID NO: 282152 - DNA, 25 bp, Probe Sequence
tgaggccttttggtagtcggagccc

SEQ ID NO: 282153 - DNA, 25 bp, Probe Sequence
tatggcttgtacaaccagtcggacc

SEQ ID NO: 282154 - DNA, 25 bp, Probe Sequence
tgttctggctaaaccagtgaaaccc

SEQ ID NO: 282155 - DNA, 25 bp, Probe Sequence
tgttgccagctacgtcctggaacac

SEQ ID NO: 282156 - DNA, 25 bp, Probe Sequence
tgttctactcagcctctgtggaaga

SEQ ID NO: 282157 - DNA, 25 bp, Probe Sequence
tgttctgaatagctctgttgtgatg

SEQ ID NO: 282158 - DNA, 25 bp, Probe Sequence
tgttctgcctaccctgttggtataa

SEQ ID NO: 282159 - DNA, 25 bp, Probe Sequence
tgttcccatttccgttgtgttaatt

SEQ ID NO: 282160 - DNA, 25 bp, Probe Sequence
tgttcccacttcttgggctgttagg

SEQ ID NO: 282161 - DNA, 25 bp, Probe Sequence
tgttctacacctgttttgttatgta

SEQ ID NO: 282162 - DNA, 25 bp, Probe Sequence
tgatgtaaaacggttttcttgtggg

SEQ ID NO: 282163 - DNA, 25 bp, Probe Sequence
tgattaagctgagtggttttttgtt

SEQ ID NO: 282164 - DNA, 25 bp, Probe Sequence
tgttcatagtacttttcctcttgtc

SEQ ID NO: 282165 - DNA, 25 bp, Probe Sequence
tgttcttagcactttaattcctgtc

SEQ ID NO: 282166 - DNA, 25 bp, Probe Sequence
tgattcttgacagatttagtcgttc

SEQ ID NO: 282167 - DNA, 25 bp, Probe Sequence
tgatctcttggtgttatttcgttac

SEQ ID NO: 282168 - DNA, 25 bp, Probe Sequence
tgactgctttactgtatttttaagg

SEQ ID NO: 282169 - DNA, 25 bp, Probe Sequence
tgacttccaaagttacatgtttaag

SEQ ID NO: 282170 - DNA, 25 bp, Probe Sequence
taaggccaaggataatgtactagtt

SEQ ID NO: 282171 - DNA, 25 bp, Probe Sequence
tcaggggcaaggaagaattttagta

SEQ ID NO: 282172 - DNA, 25 bp, Probe Sequence
tgatggggccgtaaggctctttctt

SEQ ID NO: 282173 - DNA, 25 bp, Probe Sequence
tgatagggtattgagtgtattttgt

SEQ ID NO: 282174 - DNA, 25 bp, Probe Sequence
tgttggtatgttgctatttttcatt

SEQ ID NO: 282175 - DNA, 25 bp, Probe Sequence
tgttggtttgcacctttatgtatgc

SEQ ID NO: 282176 - DNA, 25 bp, Probe Sequence
tgttggtgattccagtggactgtat

SEQ ID NO: 282177 - DNA, 25 bp, Probe Sequence
tgttcattgtttcgtaacacagcat

SEQ ID NO: 282178 - DNA, 25 bp, Probe Sequence
tgttcttctgttctgcagacacgcc

SEQ ID NO: 282179 - DNA, 25 bp, Probe Sequence
tgttctgtcttgaggagccatagca

SEQ ID NO: 282180 - DNA, 25 bp, Probe Sequence
tgttggatatggaggaggatggagc

SEQ ID NO: 282181 - DNA, 25 bp, Probe Sequence
tgttgccttggggggtgtggcactc

SEQ ID NO: 282182 - DNA, 25 bp, Probe Sequence
tgcttcgttatgggttttggccccg

SEQ ID NO: 282183 - DNA, 25 bp, Probe Sequence
tgcgggccttcaagttattgggctc

SEQ ID NO: 282184 - DNA, 25 bp, Probe Sequence
tgctgtcccctaaggaaatccgagc

SEQ ID NO: 282185 - DNA, 25 bp, Probe Sequence
tctggaccataacggtccccgaggg

SEQ ID NO: 282186 - DNA, 25 bp, Probe Sequence
tgctggtctaatttggaccccctgc

SEQ ID NO: 282187 - DNA, 25 bp, Probe Sequence
tgttgtctacatgtgtgacctgcac

SEQ ID NO: 282188 - DNA, 25 bp, Probe Sequence
tgttggtagatccatgtgcatgcta

SEQ ID NO: 282189 - DNA, 25 bp, Probe Sequence
tgttgacatactcattgcctacttt

SEQ ID NO: 282190 - DNA, 25 bp, Probe Sequence
tgttgcaaacttaatgtcattttcc

SEQ ID NO: 282191 - DNA, 25 bp, Probe Sequence
tgttccaacctaagctctggtccaa

SEQ ID NO: 282192 - DNA, 25 bp, Probe Sequence
tgttcccaccatgagtctggaggcc

SEQ ID NO: 282193 - DNA, 25 bp, Probe Sequence
tgttcccaccatgagtctggaggcc

SEQ ID NO: 282194 - DNA, 25 bp, Probe Sequence
tgttccaagtcagcaactggaaacc

SEQ ID NO: 282195 - DNA, 25 bp, Probe Sequence
tgttccacaagtgcagctgtagaaa

SEQ ID NO: 282196 - DNA, 25 bp, Probe Sequence
tgttgcagcatccagttcatcttaa

SEQ ID NO: 282197 - DNA, 25 bp, Probe Sequence
tgatctgactcaagcatatcctcta

SEQ ID NO: 282198 - DNA, 25 bp, Probe Sequence
tgatctgtccagtgtcactctgtac

SEQ ID NO: 282199 - DNA, 25 bp, Probe Sequence
tgattgtgacagtgccttgtcgtcc

SEQ ID NO: 282200 - DNA, 25 bp, Probe Sequence
tgttgaaccacctgtgtagtctctc

SEQ ID NO: 282201 - DNA, 25 bp, Probe Sequence
tgattaaatcacctgggaagccatt

SEQ ID NO: 282202 - DNA, 25 bp, Probe Sequence
tgatgttaatcagcatggccaatga

SEQ ID NO: 282203 - DNA, 25 bp, Probe Sequence
tgatctcgttatgcacctcaagaag

SEQ ID NO: 282204 - DNA, 25 bp, Probe Sequence
tgatctggtatttatctgccaagaa

SEQ ID NO: 282205 - DNA, 25 bp, Probe Sequence
tgatcggctgtatgactccatgaag

SEQ ID NO: 282206 - DNA, 25 bp, Probe Sequence
tgatcaggcaattcggtcaattgtc

SEQ ID NO: 282207 - DNA, 25 bp, Probe Sequence
tgatcaggcaattcggtcaattgtc

SEQ ID NO: 282208 - DNA, 25 bp, Probe Sequence
tgatgaagattcgggaaattaagga

SEQ ID NO: 282209 - DNA, 25 bp, Probe Sequence
tgatattgcacttcttattttatat

SEQ ID NO: 282210 - DNA, 25 bp, Probe Sequence
tgattttttcttttgctttatgggt

SEQ ID NO: 282211 - DNA, 25 bp, Probe Sequence
tgattttttcttttgctttatgggt

SEQ ID NO: 282212 - DNA, 25 bp, Probe Sequence
tgattatttttttaagctggttggt

SEQ ID NO: 282213 - DNA, 25 bp, Probe Sequence
tgttccttgttttaggctttctcct

SEQ ID NO: 282214 - DNA, 25 bp, Probe Sequence
tgatgccctggctttaaggtttagc

SEQ ID NO: 282215 - DNA, 25 bp, Probe Sequence
tgatccgctattataagcttttaat

SEQ ID NO: 282216 - DNA, 25 bp, Probe Sequence
tgatcacctgaaagaaccattctta

SEQ ID NO: 282217 - DNA, 25 bp, Probe Sequence
tgataatctcaagacacctcccgag

SEQ ID NO: 282218 - DNA, 25 bp, Probe Sequence
tgataatctcaagacacctcccgag

SEQ ID NO: 282219 - DNA, 25 bp, Probe Sequence
tgataatctcaagacacctcccgag

SEQ ID NO: 282220 - DNA, 25 bp, Probe Sequence
tgatgaaacgtttcattcccctggc

SEQ ID NO: 282221 - DNA, 25 bp, Probe Sequence
tgatgaagactttatacagccccgc

SEQ ID NO: 282222 - DNA, 25 bp, Probe Sequence
tgatgaagactttatacagccccgc

SEQ ID NO: 282223 - DNA, 25 bp, Probe Sequence
tgatgcaagaagtgaatccccccaa

SEQ ID NO: 282224 - DNA, 25 bp, Probe Sequence
tgattgagggatcacagcccctcca

SEQ ID NO: 282225 - DNA, 25 bp, Probe Sequence
tgattggtattgcacatcaccctca

SEQ ID NO: 282226 - DNA, 25 bp, Probe Sequence
tgttgtgtgatcttggctcacggca

SEQ ID NO: 282227 - DNA, 25 bp, Probe Sequence
tgttctgtcatctgaggtgggcatc

SEQ ID NO: 282228 - DNA, 25 bp, Probe Sequence
tgttctgacagccaagggtgacgag

SEQ ID NO: 282229 - DNA, 25 bp, Probe Sequence
tgatctagaagcagaggaatcccag

SEQ ID NO: 282230 - DNA, 25 bp, Probe Sequence
tgttgaaagcaggggttcctgaggg

SEQ ID NO: 282231 - DNA, 25 bp, Probe Sequence
tgttgatgggcaaggagttccagcg

SEQ ID NO: 282232 - DNA, 25 bp, Probe Sequence
tgttgcaggcgaagcggtggcagcg

SEQ ID NO: 282233 - DNA, 25 bp, Probe Sequence
tgttgaggcgagcagggcaggcccc

SEQ ID NO: 282234 - DNA, 25 bp, Probe Sequence
tgttggcagaaggaccgcaaccacc

SEQ ID NO: 282235 - DNA, 25 bp, Probe Sequence
tgttgggaggtaatgctgccccacg

SEQ ID NO: 282236 - DNA, 25 bp, Probe Sequence
tgttggcagggttcagtcactgaca

SEQ ID NO: 282237 - DNA, 25 bp, Probe Sequence
tgttgtgcagtgtgcctgtcactac

SEQ ID NO: 282238 - DNA, 25 bp, Probe Sequence
tgttgtgcagtgtgcctgtcactac

SEQ ID NO: 282239 - DNA, 25 bp, Probe Sequence
tgttgtgcaatatccatctactgta

SEQ ID NO: 282240 - DNA, 25 bp, Probe Sequence
tgttgtgcaatatccatctactgta

SEQ ID NO: 282241 - DNA, 25 bp, Probe Sequence
tgttgagcaatgtacagtgtatggt

SEQ ID NO: 282242 - DNA, 25 bp, Probe Sequence
tgttgcatgctctcagaattatgtt

SEQ ID NO: 282243 - DNA, 25 bp, Probe Sequence
tgattcgctctagacttttgttggt

SEQ ID NO: 282244 - DNA, 25 bp, Probe Sequence
tgatgttcttagcactttaattcct

SEQ ID NO: 282245 - DNA, 25 bp, Probe Sequence
tgatgtttgggaccttttttcctca

SEQ ID NO: 282246 - DNA, 25 bp, Probe Sequence
tgatgtttgggaccttttttcctca

SEQ ID NO: 282247 - DNA, 25 bp, Probe Sequence
tgattcttggttcctttttctgtaa

SEQ ID NO: 282248 - DNA, 25 bp, Probe Sequence
tgttgctcgatgcattctatttctc

SEQ ID NO: 282249 - DNA, 25 bp, Probe Sequence
tgttgatctgagccttctatgaaag

SEQ ID NO: 282250 - DNA, 25 bp, Probe Sequence
tgcttttcagaccactagtcaagtc

SEQ ID NO: 282251 - DNA, 25 bp, Probe Sequence
tgattcatgacatccatttcccagt

SEQ ID NO: 282252 - DNA, 25 bp, Probe Sequence
tgttccatcaatcgatttcccagtt

SEQ ID NO: 282253 - DNA, 25 bp, Probe Sequence
tgttgccaccatgtattcatccaga

SEQ ID NO: 282254 - DNA, 25 bp, Probe Sequence
tgttgtacacagttgatattccaaa

SEQ ID NO: 282255 - DNA, 25 bp, Probe Sequence
tgttgtccaggttctattgccaaga

SEQ ID NO: 282256 - DNA, 25 bp, Probe Sequence
tgttgtcaaaattgccagctgcgcc

SEQ ID NO: 282257 - DNA, 25 bp, Probe Sequence
tgttctgatgcaagcaggccaggcc

SEQ ID NO: 282258 - DNA, 25 bp, Probe Sequence
tgatcatctacaagggcggcacctc

SEQ ID NO: 282259 - DNA, 25 bp, Probe Sequence
tgatcaccatccccatggtactgat

SEQ ID NO: 282260 - DNA, 25 bp, Probe Sequence
taagcttcccctgaatctgtcggga

SEQ ID NO: 282261 - DNA, 25 bp, Probe Sequence
taagttcccttctatatcctcaagg

SEQ ID NO: 282262 - DNA, 25 bp, Probe Sequence
tgataggccccataagacacacaca

SEQ ID NO: 282263 - DNA, 25 bp, Probe Sequence
tgataggccggccttctacagaaca

SEQ ID NO: 282264 - DNA, 25 bp, Probe Sequence
tgttgagcccccgtatgagaataaa

SEQ ID NO: 282265 - DNA, 25 bp, Probe Sequence
tgttgaggacccgcagagacattcc

SEQ ID NO: 282266 - DNA, 25 bp, Probe Sequence
tgttgaagccgggctcagacactct

SEQ ID NO: 282267 - DNA, 25 bp, Probe Sequence
tgagtacagtctctcaaccatccta

SEQ ID NO: 282268 - DNA, 25 bp, Probe Sequence
tgagaaagatcacgtctacctgcag

SEQ ID NO: 282269 - DNA, 25 bp, Probe Sequence
tgatgaaagattgccaacagctgct

SEQ ID NO: 282270 - DNA, 25 bp, Probe Sequence
tgttgaagtcttaatcagcagatta

SEQ ID NO: 282271 - DNA, 25 bp, Probe Sequence
tgagtgaccattttgtaggttacag

SEQ ID NO: 282272 - DNA, 25 bp, Probe Sequence
tgagtggcccttaaagagggaagtt

SEQ ID NO: 282273 - DNA, 25 bp, Probe Sequence
tgatcggcctgcatgaggatgacga

SEQ ID NO: 282274 - DNA, 25 bp, Probe Sequence
tgatcgatgcttttgacgaagccaa

SEQ ID NO: 282275 - DNA, 25 bp, Probe Sequence
tgatcgtggtggtagccaccatcaa

SEQ ID NO: 282276 - DNA, 25 bp, Probe Sequence
tgatcattgggttcaggagttgaga

SEQ ID NO: 282277 - DNA, 25 bp, Probe Sequence
tgttgctgttgttacagagtttgaa

SEQ ID NO: 282278 - DNA, 25 bp, Probe Sequence
tgttgtctctctgacgagtctcaga

SEQ ID NO: 282279 - DNA, 25 bp, Probe Sequence
tgttgttcttcaaccagcaacagca

SEQ ID NO: 282280 - DNA, 25 bp, Probe Sequence
tgttgtttactttagctacatattc

SEQ ID NO: 282281 - DNA, 25 bp, Probe Sequence
tgattgtgttccttttccacagatt

SEQ ID NO: 282282 - DNA, 25 bp, Probe Sequence
tgactgtatttgttcgactcgcact

SEQ ID NO: 282283 - DNA, 25 bp, Probe Sequence
tgattatattaaactgcctccagct

SEQ ID NO: 282284 - DNA, 25 bp, Probe Sequence
tgattatttatcacatagcccctta

SEQ ID NO: 282285 - DNA, 25 bp, Probe Sequence
tgatccaggacatccatagcccgat

SEQ ID NO: 282286 - DNA, 25 bp, Probe Sequence
tgatatcagaaggactagacccaga

SEQ ID NO: 282287 - DNA, 25 bp, Probe Sequence
tgatcagtatgaacctagcacccga

SEQ ID NO: 282288 - DNA, 25 bp, Probe Sequence
tgatatctggattctctgagccctc

SEQ ID NO: 282289 - DNA, 25 bp, Probe Sequence
tgagatcgcgagttcaacatgacca

SEQ ID NO: 282290 - DNA, 25 bp, Probe Sequence
tgatgatccgaataactacctgttt

SEQ ID NO: 282291 - DNA, 25 bp, Probe Sequence
tgatacctgcgttaacatactttgt

SEQ ID NO: 282292 - DNA, 25 bp, Probe Sequence
tgatcacctgagttgggattttgag

SEQ ID NO: 282293 - DNA, 25 bp, Probe Sequence
tgatcccaactttgaaatattccac

SEQ ID NO: 282294 - DNA, 25 bp, Probe Sequence
tgatcctaactttgctagtctagca

SEQ ID NO: 282295 - DNA, 25 bp, Probe Sequence
tgaccacgactttgcaggatctaat

SEQ ID NO: 282296 - DNA, 25 bp, Probe Sequence
tgatcatcacccttgtcagtgtcta

SEQ ID NO: 282297 - DNA, 25 bp, Probe Sequence
tgttgctcccagtctgtggttaaac

SEQ ID NO: 282298 - DNA, 25 bp, Probe Sequence
tgattatccatttggttgttacaga

SEQ ID NO: 282299 - DNA, 25 bp, Probe Sequence
tgattatacttctgagctgctacca

SEQ ID NO: 282300 - DNA, 25 bp, Probe Sequence
tgatttaatgtacactcccttttgc

SEQ ID NO: 282301 - DNA, 25 bp, Probe Sequence
tgattgttatgtaaaactcgctttt

SEQ ID NO: 282302 - DNA, 25 bp, Probe Sequence
tgttgcttttgttatcagcctgatt

SEQ ID NO: 282303 - DNA, 25 bp, Probe Sequence
tgttgctgtttgtgataactgatag

SEQ ID NO: 282304 - DNA, 25 bp, Probe Sequence
tgttgccatctttggtaatgctgac

SEQ ID NO: 282305 - DNA, 25 bp, Probe Sequence
tgttcctttcacttgcagtcagaca

SEQ ID NO: 282306 - DNA, 25 bp, Probe Sequence
tgttccgtgaccttagatgcagcat

SEQ ID NO: 282307 - DNA, 25 bp, Probe Sequence
tgattgctgctggacttgttgacga

SEQ ID NO: 282308 - DNA, 25 bp, Probe Sequence
tgttgctcactgaatctgttgggga

SEQ ID NO: 282309 - DNA, 25 bp, Probe Sequence
tgttgcttgcatacagggctgggaa

SEQ ID NO: 282310 - DNA, 25 bp, Probe Sequence
tgattgacgcacagcagtggggaga

SEQ ID NO: 282311 - DNA, 25 bp, Probe Sequence
tgatatccgtctggctgtgtgaggc

SEQ ID NO: 282312 - DNA, 25 bp, Probe Sequence
tgatcatgggtctggatggggccac

SEQ ID NO: 282313 - DNA, 25 bp, Probe Sequence
tgatattgtctctggaactcgctac

SEQ ID NO: 282314 - DNA, 25 bp, Probe Sequence
tgatttgtccagcgacactcattca

SEQ ID NO: 282315 - DNA, 25 bp, Probe Sequence
tgattttgctgctgggcaacttctt

SEQ ID NO: 282316 - DNA, 25 bp, Probe Sequence
tgatctaactgatgaaaatttctct

SEQ ID NO: 282317 - DNA, 25 bp, Probe Sequence
tgattagtctgatgagaggtttatc

SEQ ID NO: 282318 - DNA, 25 bp, Probe Sequence
tgatcaagttgacgacaggacagga

SEQ ID NO: 282319 - DNA, 25 bp, Probe Sequence
tgataacattgaggccaagacgggc

SEQ ID NO: 282320 - DNA, 25 bp, Probe Sequence
tgatatacctgagccagcacatcag

SEQ ID NO: 282321 - DNA, 25 bp, Probe Sequence
tgatgtacttacagacacaagaaca

SEQ ID NO: 282322 - DNA, 25 bp, Probe Sequence
tgatgcatgccaaaccaaactaaac

SEQ ID NO: 282323 - DNA, 25 bp, Probe Sequence
tgagccaaacccagagtacagcacc

SEQ ID NO: 282324 - DNA, 25 bp, Probe Sequence
tgatccagaactgtggggccagcac

SEQ ID NO: 282325 - DNA, 25 bp, Probe Sequence
tgatgccaacctcttacgtgcgcct

SEQ ID NO: 282326 - DNA, 25 bp, Probe Sequence
tgatgaatacgtgtgtagccggcct

SEQ ID NO: 282327 - DNA, 25 bp, Probe Sequence
tgatgaaacactgacctcttgtctc

SEQ ID NO: 282328 - DNA, 25 bp, Probe Sequence
tgataataccacaccatgttctgga

SEQ ID NO: 282329 - DNA, 25 bp, Probe Sequence
tgataatagcccagattctactgta

SEQ ID NO: 282330 - DNA, 25 bp, Probe Sequence
tgagggtctccacatttacttaaca

SEQ ID NO: 282331 - DNA, 25 bp, Probe Sequence
tgatggggccaatgtcgtcccaaac

SEQ ID NO: 282332 - DNA, 25 bp, Probe Sequence
tatgggaccattgtatgaaccttac

SEQ ID NO: 282333 - DNA, 25 bp, Probe Sequence
tgataatgaccaaccgaaacctctc

SEQ ID NO: 282334 - DNA, 25 bp, Probe Sequence
tgatctatacgcaaccggaaccaca

SEQ ID NO: 282335 - DNA, 25 bp, Probe Sequence
tgactcgaggaattgggaaccagga

SEQ ID NO: 282336 - DNA, 25 bp, Probe Sequence
tgatgccggtgaacgtgcaaaacag

SEQ ID NO: 282337 - DNA, 25 bp, Probe Sequence
tgatgctcgatgaatgctgggaatt

SEQ ID NO: 282338 - DNA, 25 bp, Probe Sequence
tgatctcatgctagcagagcaaaaa

SEQ ID NO: 282339 - DNA, 25 bp, Probe Sequence
tgatgccatctctgcagtagaagag

SEQ ID NO: 282340 - DNA, 25 bp, Probe Sequence
tgatcactccaggatattgacaaga

SEQ ID NO: 282341 - DNA, 25 bp, Probe Sequence
tgctcctatcagggttgctaaaccc

SEQ ID NO: 282342 - DNA, 25 bp, Probe Sequence
tgcggtactgggagcccatacccaa

SEQ ID NO: 282343 - DNA, 25 bp, Probe Sequence
tgcaattcccggacgtctaaaccaa

SEQ ID NO: 282344 - DNA, 25 bp, Probe Sequence
tgattccttctggtcctataaaaaa

SEQ ID NO: 282345 - DNA, 25 bp, Probe Sequence
tgttgctcttgccaggcctaaactt

SEQ ID NO: 282346 - DNA, 25 bp, Probe Sequence
tgccttcggccagagcggcaagttc

SEQ ID NO: 282347 - DNA, 25 bp, Probe Sequence
tgacttcgcccggtggcaatagttc

SEQ ID NO: 282348 - DNA, 25 bp, Probe Sequence
tgatttggccaatgtgtaatattta

SEQ ID NO: 282349 - DNA, 25 bp, Probe Sequence
tgttgtgttcaaatgttctgtactt

SEQ ID NO: 282350 - DNA, 25 bp, Probe Sequence
tgttgtgtgtgaactgttgtttctt

SEQ ID NO: 282351 - DNA, 25 bp, Probe Sequence
tgattgatttgaatctatatttttc

SEQ ID NO: 282352 - DNA, 25 bp, Probe Sequence
tgttgcttctgtggttattattctg

SEQ ID NO: 282353 - DNA, 25 bp, Probe Sequence
tgttgctatctataccattgagggc

SEQ ID NO: 282354 - DNA, 25 bp, Probe Sequence
tgatgatgtattgattccaggggcc

SEQ ID NO: 282355 - DNA, 25 bp, Probe Sequence
tgatatggtgcggaattcagaggac

SEQ ID NO: 282356 - DNA, 25 bp, Probe Sequence
tgattgaggcgcagaccatggaggc

SEQ ID NO: 282357 - DNA, 25 bp, Probe Sequence
tgatcgacgtgcagaacagggccta

SEQ ID NO: 282358 - DNA, 25 bp, Probe Sequence
tgatggactccggtgacggggtcac

SEQ ID NO: 282359 - DNA, 25 bp, Probe Sequence
tgagggcctggccctaggggtatca

SEQ ID NO: 282360 - DNA, 25 bp, Probe Sequence
tgaggggctggggctaggggaatag

SEQ ID NO: 282361 - DNA, 25 bp, Probe Sequence
tgatggggcggggctacaactatgc

SEQ ID NO: 282362 - DNA, 25 bp, Probe Sequence
tgatgggctaggtagttcaatcctc

SEQ ID NO: 282363 - DNA, 25 bp, Probe Sequence
tgatgtgcacagctaatgattcaat

SEQ ID NO: 282364 - DNA, 25 bp, Probe Sequence
tgagtcgcaggaatgagaacaggct

SEQ ID NO: 282365 - DNA, 25 bp, Probe Sequence
tgaggccggcttggaacatggtgaa

SEQ ID NO: 282366 - DNA, 25 bp, Probe Sequence
tgaggagacccagaacatggcccag

SEQ ID NO: 282367 - DNA, 25 bp, Probe Sequence
tgatggacaccagcggcaatgggaa

SEQ ID NO: 282368 - DNA, 25 bp, Probe Sequence
tgataacatcaaattctaagggaga

SEQ ID NO: 282369 - DNA, 25 bp, Probe Sequence
tgataactaatgacatccagtgtct

SEQ ID NO: 282370 - DNA, 25 bp, Probe Sequence
tgttgacataagatactttcacata

SEQ ID NO: 282371 - DNA, 25 bp, Probe Sequence
tgttgccatctacatagctttctct

SEQ ID NO: 282372 - DNA, 25 bp, Probe Sequence
tgattatctcttctactatatattt

SEQ ID NO: 282373 - DNA, 25 bp, Probe Sequence
tgagtattctcgctccagatcaaat

SEQ ID NO: 282374 - DNA, 25 bp, Probe Sequence
tgaggattagggaccagaccagaca

SEQ ID NO: 282375 - DNA, 25 bp, Probe Sequence
tgaggttaccgtggaaacagacaag

SEQ ID NO: 282376 - DNA, 25 bp, Probe Sequence
tgaggctttacctcagacaagaaga

SEQ ID NO: 282377 - DNA, 25 bp, Probe Sequence
tgaggagtgtgaccccaacaaggat

SEQ ID NO: 282378 - DNA, 25 bp, Probe Sequence
tgaggcggctatacccttaagccag

SEQ ID NO: 282379 - DNA, 25 bp, Probe Sequence
tgattgctggtttcccttacacata

SEQ ID NO: 282380 - DNA, 25 bp, Probe Sequence
tgattcatgaggaatccacccccag

SEQ ID NO: 282381 - DNA, 25 bp, Probe Sequence
tgttgctgggtcaaccagcctcaca

SEQ ID NO: 282382 - DNA, 25 bp, Probe Sequence
tgttgctgggcagtgactggcatcc

SEQ ID NO: 282383 - DNA, 25 bp, Probe Sequence
tgttgctgctggtgcaagccatgtc

SEQ ID NO: 282384 - DNA, 25 bp, Probe Sequence
tgttgatggccgccatcctcatgac

SEQ ID NO: 282385 - DNA, 25 bp, Probe Sequence
tgttgatgtgcacagctaatgattc

SEQ ID NO: 282386 - DNA, 25 bp, Probe Sequence
tgattgcactgccgactgagagctc

SEQ ID NO: 282387 - DNA, 25 bp, Probe Sequence
tgatgttcgggaggaggccttgtcc

SEQ ID NO: 282388 - DNA, 25 bp, Probe Sequence
tgattctggtggagattccttcttc

SEQ ID NO: 282389 - DNA, 25 bp, Probe Sequence
tgttgggtgagtacaaccttgctgt

SEQ ID NO: 282390 - DNA, 25 bp, Probe Sequence
tgctggcggctggtttacgccgctt

SEQ ID NO: 282391 - DNA, 25 bp, Probe Sequence
tgatggcgccgtgtagaagccgctc

SEQ ID NO: 282392 - DNA, 25 bp, Probe Sequence
tgatgtggccgtgtacgatggctcc

SEQ ID NO: 282393 - DNA, 25 bp, Probe Sequence
tgatgcagatgcgtttcgacgggct

SEQ ID NO: 282394 - DNA, 25 bp, Probe Sequence
tgatctgtgccattctagacatccc

SEQ ID NO: 282395 - DNA, 25 bp, Probe Sequence
tgatctgatgcttcttcaactgcgt

SEQ ID NO: 282396 - DNA, 25 bp, Probe Sequence
tgatgctttcacctatactggctgt

SEQ ID NO: 282397 - DNA, 25 bp, Probe Sequence
tgatctgtaatgcaccactgtcgtt

SEQ ID NO: 282398 - DNA, 25 bp, Probe Sequence
tgatcagtagtgggaatgtgcctct

SEQ ID NO: 282399 - DNA, 25 bp, Probe Sequence
tgatcgtggcagaggtggccctggt

SEQ ID NO: 282400 - DNA, 25 bp, Probe Sequence
tgatcgtggcagaggtggccctggt

SEQ ID NO: 282401 - DNA, 25 bp, Probe Sequence
tgattgtggccaaggcatcgcgcac

SEQ ID NO: 282402 - DNA, 25 bp, Probe Sequence
tgttgaggtcaagtccagcatcgca

SEQ ID NO: 282403 - DNA, 25 bp, Probe Sequence
tgattgtcagtctgtgtcacatcca

SEQ ID NO: 282404 - DNA, 25 bp, Probe Sequence
tgagtgaacatctgagctacccgga

SEQ ID NO: 282405 - DNA, 25 bp, Probe Sequence
tgattgattcatctgtaaaagggtc

SEQ ID NO: 282406 - DNA, 25 bp, Probe Sequence
tgttgatgacatcacttacaatgtg

SEQ ID NO: 282407 - DNA, 25 bp, Probe Sequence
tgttgacaatgcgtctctggcacgt

SEQ ID NO: 282408 - DNA, 25 bp, Probe Sequence
tgttgcagatagtcttgccgcatct

SEQ ID NO: 282409 - DNA, 25 bp, Probe Sequence
tgttgcagatagtcttgccgcatct

SEQ ID NO: 282410 - DNA, 25 bp, Probe Sequence
tgttgcagatagtcttgccgcatct

SEQ ID NO: 282411 - DNA, 25 bp, Probe Sequence
tgttgcagatagtcttgccgcatct

SEQ ID NO: 282412 - DNA, 25 bp, Probe Sequence
tgatgcatcgacttgcattcccact

SEQ ID NO: 282413 - DNA, 25 bp, Probe Sequence
tgatgatgatgatgatgatgtcgac

SEQ ID NO: 282414 - DNA, 25 bp, Probe Sequence
tgatgctgatcatctgcagctcggc

SEQ ID NO: 282415 - DNA, 25 bp, Probe Sequence
tgatcagtcaaccagctgtggcttc

SEQ ID NO: 282416 - DNA, 25 bp, Probe Sequence
tgatagtcacaaacgccgcatgttt

SEQ ID NO: 282417 - DNA, 25 bp, Probe Sequence
tgataccaatatcaccagcattcct

SEQ ID NO: 282418 - DNA, 25 bp, Probe Sequence
tgataccaatatcaccagcattcct

SEQ ID NO: 282419 - DNA, 25 bp, Probe Sequence
tgataccaatatcaccagcattcct

SEQ ID NO: 282420 - DNA, 25 bp, Probe Sequence
tgaagccaaatgggccgttaagggc

SEQ ID NO: 282421 - DNA, 25 bp, Probe Sequence
tgataccatcggggaccttaagaag

SEQ ID NO: 282422 - DNA, 25 bp, Probe Sequence
tgatacccacttggacttttaacaa

SEQ ID NO: 282423 - DNA, 25 bp, Probe Sequence
tgatacccactttttgtgaatacct

SEQ ID NO: 282424 - DNA, 25 bp, Probe Sequence
tgatttgccacaatgtccttaactc

SEQ ID NO: 282425 - DNA, 25 bp, Probe Sequence
tgatttgcctctggtccagtttctc

SEQ ID NO: 282426 - DNA, 25 bp, Probe Sequence
tgatttcctctcttgaattttcctt

SEQ ID NO: 282427 - DNA, 25 bp, Probe Sequence
tgatctacctcctgaatttattcac

SEQ ID NO: 282428 - DNA, 25 bp, Probe Sequence
tgattacccccgaaatatctctgac

SEQ ID NO: 282429 - DNA, 25 bp, Probe Sequence
tgattccacccatggcaaattccat

SEQ ID NO: 282430 - DNA, 25 bp, Probe Sequence
tgattccacccatggcaaattccat

SEQ ID NO: 282431 - DNA, 25 bp, Probe Sequence
tgatttcatccgcaacaaactctct

SEQ ID NO: 282432 - DNA, 25 bp, Probe Sequence
tgacttcaaaaaccctgactctctt

SEQ ID NO: 282433 - DNA, 25 bp, Probe Sequence
tgatcttgataattcccctgattcc

SEQ ID NO: 282434 - DNA, 25 bp, Probe Sequence
tgatatctgataaggcccatcctcc

SEQ ID NO: 282435 - DNA, 25 bp, Probe Sequence
tgattgtgtatgtgccgctaccacc

SEQ ID NO: 282436 - DNA, 25 bp, Probe Sequence
tgattgtgtatgtgccgctaccacc

SEQ ID NO: 282437 - DNA, 25 bp, Probe Sequence
tgattgtgtatgtgccgctaccacc

SEQ ID NO: 282438 - DNA, 25 bp, Probe Sequence
tgttggatagatgccagggcccctc

SEQ ID NO: 282439 - DNA, 25 bp, Probe Sequence
tgttgactatgacatcggggccact

SEQ ID NO: 282440 - DNA, 25 bp, Probe Sequence
tgttggccacagcttatgggccctg

SEQ ID NO: 282441 - DNA, 25 bp, Probe Sequence
tgttggcctcaggtgtaggccgccc

SEQ ID NO: 282442 - DNA, 25 bp, Probe Sequence
tgatatgacctcactgtcttgaccc

SEQ ID NO: 282443 - DNA, 25 bp, Probe Sequence
tgttgacttgatgttttatcacttc

SEQ ID NO: 282444 - DNA, 25 bp, Probe Sequence
tgttgacttgagctataatatgaat

SEQ ID NO: 282445 - DNA, 25 bp, Probe Sequence
tgatttctaggtcaattgatgtgat

SEQ ID NO: 282446 - DNA, 25 bp, Probe Sequence
tgagatttaagtttttttgaggttg

SEQ ID NO: 282447 - DNA, 25 bp, Probe Sequence
tgagtttgccgtttgtccttaactt

SEQ ID NO: 282448 - DNA, 25 bp, Probe Sequence
tgaggggctttatttgcctttacct

SEQ ID NO: 282449 - DNA, 25 bp, Probe Sequence
tgaggggctttatttgcctttacct

SEQ ID NO: 282450 - DNA, 25 bp, Probe Sequence
tgaggaatttgttttcgccttactt

SEQ ID NO: 282451 - DNA, 25 bp, Probe Sequence
tgatgtcaatattagtagtccactt

SEQ ID NO: 282452 - DNA, 25 bp, Probe Sequence
tgatgaactacatttatcccctttc

SEQ ID NO: 282453 - DNA, 25 bp, Probe Sequence
tgatagaagtgcattctcctcctat

SEQ ID NO: 282454 - DNA, 25 bp, Probe Sequence
tgatgaaatggattcccatcccaaa

SEQ ID NO: 282455 - DNA, 25 bp, Probe Sequence
tgattaatagactccattccagtaa

SEQ ID NO: 282456 - DNA, 25 bp, Probe Sequence
tgatcataaacctcagattcatctg

SEQ ID NO: 282457 - DNA, 25 bp, Probe Sequence
tgataagaaacatctgctccacgcc

SEQ ID NO: 282458 - DNA, 25 bp, Probe Sequence
tgatgaagtcattcaagcccacctc

SEQ ID NO: 282459 - DNA, 25 bp, Probe Sequence
tgatgccagttatcatgctgccact

SEQ ID NO: 282460 - DNA, 25 bp, Probe Sequence
tgatcacgttgggcatctgctgtgc

SEQ ID NO: 282461 - DNA, 25 bp, Probe Sequence
tgatctgtttggccacatgcaagtg

SEQ ID NO: 282462 - DNA, 25 bp, Probe Sequence
tgattgtttgtgctttcttggcagg

SEQ ID NO: 282463 - DNA, 25 bp, Probe Sequence
tgagttaagttgttggcttggggca

SEQ ID NO: 282464 - DNA, 25 bp, Probe Sequence
tgaggacacggcctgaggttgggga

SEQ ID NO: 282465 - DNA, 25 bp, Probe Sequence
tgaggccctgcagttagtttgcggg

SEQ ID NO: 282466 - DNA, 25 bp, Probe Sequence
tgaggccttgatttcaggtttggat

SEQ ID NO: 282467 - DNA, 25 bp, Probe Sequence
tgatctgcgttttgtcacttttcgt

SEQ ID NO: 282468 - DNA, 25 bp, Probe Sequence
tgatcaggatctttggcctacctgc

SEQ ID NO: 282469 - DNA, 25 bp, Probe Sequence
tgataggactgcttgggtcctccac

SEQ ID NO: 282470 - DNA, 25 bp, Probe Sequence
tgattgtgatctgaggttctgcccc

SEQ ID NO: 282471 - DNA, 25 bp, Probe Sequence
tgttgtgactctatgtttgctccag

SEQ ID NO: 282472 - DNA, 25 bp, Probe Sequence
tgatttgaaactggtgcttgtcgca

SEQ ID NO: 282473 - DNA, 25 bp, Probe Sequence
tgatattcaacagccacttgagcca

SEQ ID NO: 282474 - DNA, 25 bp, Probe Sequence
tgattccacacatcttcttggtctt

SEQ ID NO: 282475 - DNA, 25 bp, Probe Sequence
tgagtcccagcatccttgctgaact

SEQ ID NO: 282476 - DNA, 25 bp, Probe Sequence
tgatctccgagaagccagagtgaaa

SEQ ID NO: 282477 - DNA, 25 bp, Probe Sequence
tgattgctgctgggatggtggtgaa

SEQ ID NO: 282478 - DNA, 25 bp, Probe Sequence
tgattgctgctgggatggtggtgaa

SEQ ID NO: 282479 - DNA, 25 bp, Probe Sequence
tgattgtgctcaggtatgcggatga

SEQ ID NO: 282480 - DNA, 25 bp, Probe Sequence
tgattgatccaggacatccatagcc

SEQ ID NO: 282481 - DNA, 25 bp, Probe Sequence
tgatgtttgccgtcagcattcacca

SEQ ID NO: 282482 - DNA, 25 bp, Probe Sequence
tgatgtttgccgtcagcattcacca

SEQ ID NO: 282483 - DNA, 25 bp, Probe Sequence
tgattatcttctccacatctgaaat

SEQ ID NO: 282484 - DNA, 25 bp, Probe Sequence
tgatgtcatcttgagctcttcattt

SEQ ID NO: 282485 - DNA, 25 bp, Probe Sequence
tgatggtgattggagcggcagcttt

SEQ ID NO: 282486 - DNA, 25 bp, Probe Sequence
tgaggagattgccatggcgaccgtc

SEQ ID NO: 282487 - DNA, 25 bp, Probe Sequence
tgattgtgatggctggcctccagtc

SEQ ID NO: 282488 - DNA, 25 bp, Probe Sequence
tgatatgtatgcccatagcctagaa

SEQ ID NO: 282489 - DNA, 25 bp, Probe Sequence
tgatgcactgattccatcccaggaa

SEQ ID NO: 282490 - DNA, 25 bp, Probe Sequence
tgatcagtatctcactctgctggca

SEQ ID NO: 282491 - DNA, 25 bp, Probe Sequence
tgatcactactgacttgttggctcg

SEQ ID NO: 282492 - DNA, 25 bp, Probe Sequence
tgatcctcaggaatttgttccgccc

SEQ ID NO: 282493 - DNA, 25 bp, Probe Sequence
tgagaccaagaaactttcgctcccc

SEQ ID NO: 282494 - DNA, 25 bp, Probe Sequence
tgagaccaagaaactttcgctcccc

SEQ ID NO: 282495 - DNA, 25 bp, Probe Sequence
tgataccagactaactttccacttc

SEQ ID NO: 282496 - DNA, 25 bp, Probe Sequence
tgatttcagagtcctctttctcact

SEQ ID NO: 282497 - DNA, 25 bp, Probe Sequence
tgattgctcagggactcatctttcc

SEQ ID NO: 282498 - DNA, 25 bp, Probe Sequence
tgatgttcagagccacgcatcacct

SEQ ID NO: 282499 - DNA, 25 bp, Probe Sequence
tgatgccatcaaaggacatcccctg

SEQ ID NO: 282500 - DNA, 25 bp, Probe Sequence
tgatggcatgcaggagcaaaccccc

SEQ ID NO: 282501 - DNA, 25 bp, Probe Sequence
tgatgagcaacttggacagcaacag

SEQ ID NO: 282502 - DNA, 25 bp, Probe Sequence
tgatgcagaagctgctccgcaagca

SEQ ID NO: 282503 - DNA, 25 bp, Probe Sequence
tgatgatgacagcagctttgtagat

SEQ ID NO: 282504 - DNA, 25 bp, Probe Sequence
tgattgcacacggtttcttcagcgt

SEQ ID NO: 282505 - DNA, 25 bp, Probe Sequence
tgatatatatccttgttttatgtgt

SEQ ID NO: 282506 - DNA, 25 bp, Probe Sequence
tgatacttctctttttttgctgttc

SEQ ID NO: 282507 - DNA, 25 bp, Probe Sequence
tgatacttctctttttttgctgttc

SEQ ID NO: 282508 - DNA, 25 bp, Probe Sequence
tgatgactcgttttttcttctactc

SEQ ID NO: 282509 - DNA, 25 bp, Probe Sequence
tgatactcagtttcttgttcctggc

SEQ ID NO: 282510 - DNA, 25 bp, Probe Sequence
tgattgtcagtttcctgaggcctcc

SEQ ID NO: 282511 - DNA, 25 bp, Probe Sequence
tgttgtgttctggactgaggccttt

SEQ ID NO: 282512 - DNA, 25 bp, Probe Sequence
tgattctgttcggactgggttctca

SEQ ID NO: 282513 - DNA, 25 bp, Probe Sequence
tgattatcgtaggaggagtcctcca

SEQ ID NO: 282514 - DNA, 25 bp, Probe Sequence
tgattatggggctagttgtcctcca

SEQ ID NO: 282515 - DNA, 25 bp, Probe Sequence
tgatgctgatccagaagtttcctat

SEQ ID NO: 282516 - DNA, 25 bp, Probe Sequence
tgattgacatcaagaagtgtgtgaa

SEQ ID NO: 282517 - DNA, 25 bp, Probe Sequence
tgattgacacacagcactctctaaa

SEQ ID NO: 282518 - DNA, 25 bp, Probe Sequence
tgattgacaacacccatttttcctt

SEQ ID NO: 282519 - DNA, 25 bp, Probe Sequence
tgattgaaatagctctctcctaact

SEQ ID NO: 282520 - DNA, 25 bp, Probe Sequence
tgattcaagttgctaccatgtacat

SEQ ID NO: 282521 - DNA, 25 bp, Probe Sequence
tgaggcagatgtggcctccctgaac

SEQ ID NO: 282522 - DNA, 25 bp, Probe Sequence
tgaggcagatgtggcctccctgaac

SEQ ID NO: 282523 - DNA, 25 bp, Probe Sequence
tgatgctatttacatccctaggcca

SEQ ID NO: 282524 - DNA, 25 bp, Probe Sequence
tgatgtattttttttcttggcttaa

SEQ ID NO: 282525 - DNA, 25 bp, Probe Sequence
tgcatttgtttttttcctgacctga

SEQ ID NO: 282526 - DNA, 25 bp, Probe Sequence
tgatttcttttattctttgcacaac

SEQ ID NO: 282527 - DNA, 25 bp, Probe Sequence
tgattacttctgttttttacaccca

SEQ ID NO: 282528 - DNA, 25 bp, Probe Sequence
tgattagctttgtcactgtttcact

SEQ ID NO: 282529 - DNA, 25 bp, Probe Sequence
tgatttgaaatggatggtgttctct

SEQ ID NO: 282530 - DNA, 25 bp, Probe Sequence
tgattaaaatcgtgtctggcactga

SEQ ID NO: 282531 - DNA, 25 bp, Probe Sequence
tgattaatagcacatttcttcacaa

SEQ ID NO: 282532 - DNA, 25 bp, Probe Sequence
tgattgccaagggcattctctctcc

SEQ ID NO: 282533 - DNA, 25 bp, Probe Sequence
tgattcagaagggcgtcatccacca

SEQ ID NO: 282534 - DNA, 25 bp, Probe Sequence
tgatatcaaagactcattgcttaat

SEQ ID NO: 282535 - DNA, 25 bp, Probe Sequence
tgatatgataaactctagctctaaa

SEQ ID NO: 282536 - DNA, 25 bp, Probe Sequence
tgattcatatccttctgtactacaa

SEQ ID NO: 282537 - DNA, 25 bp, Probe Sequence
tgatagcattgctttcgtgtaaatt

SEQ ID NO: 282538 - DNA, 25 bp, Probe Sequence
tgatgacatgtcctgcatcttctat

SEQ ID NO: 282539 - DNA, 25 bp, Probe Sequence
tgataatgtcagcagctgtccctcc

SEQ ID NO: 282540 - DNA, 25 bp, Probe Sequence
tgataatgtcagcagctgtccctcc

SEQ ID NO: 282541 - DNA, 25 bp, Probe Sequence
tgatactggactatgtctccatcgc

SEQ ID NO: 282542 - DNA, 25 bp, Probe Sequence
tgatcactggagctgtggtcgctgc

SEQ ID NO: 282543 - DNA, 25 bp, Probe Sequence
tgatcactggagctgtggtcgctgc

SEQ ID NO: 282544 - DNA, 25 bp, Probe Sequence
tgatcactggagctgtggtcgctgc

SEQ ID NO: 282545 - DNA, 25 bp, Probe Sequence
tgattctgatcactcttggtcagct

SEQ ID NO: 282546 - DNA, 25 bp, Probe Sequence
tgatattgccagccattaccagata

SEQ ID NO: 282547 - DNA, 25 bp, Probe Sequence
tgagatcccagggggccagtacacc

SEQ ID NO: 282548 - DNA, 25 bp, Probe Sequence
tgaggccagaccatggacactacac

SEQ ID NO: 282549 - DNA, 25 bp, Probe Sequence
tgatatcggaccctgggccaaagcc

SEQ ID NO: 282550 - DNA, 25 bp, Probe Sequence
tgatgagggccctgggccagaaccc

SEQ ID NO: 282551 - DNA, 25 bp, Probe Sequence
tgatgagggccctgggccagaaccc

SEQ ID NO: 282552 - DNA, 25 bp, Probe Sequence
tgatgtaagtaaagggcccacaccc

SEQ ID NO: 282553 - DNA, 25 bp, Probe Sequence
tgataaaggaaagggcaccatcttc

SEQ ID NO: 282554 - DNA, 25 bp, Probe Sequence
tgaaagaagaaacggcacgacccct

SEQ ID NO: 282555 - DNA, 25 bp, Probe Sequence
tgaacccagaaacaacacaatccgt

SEQ ID NO: 282556 - DNA, 25 bp, Probe Sequence
tgaagcccaacgcaggtagcgaccg

SEQ ID NO: 282557 - DNA, 25 bp, Probe Sequence
tgagaccgctacttagcctcaagac

SEQ ID NO: 282558 - DNA, 25 bp, Probe Sequence
tgatgacaactatggacctggaccc

SEQ ID NO: 282559 - DNA, 25 bp, Probe Sequence
tgatacaaccacggatgagctgtca

SEQ ID NO: 282560 - DNA, 25 bp, Probe Sequence
tgatagccccgcagcaagattattt

SEQ ID NO: 282561 - DNA, 25 bp, Probe Sequence
tgatgtccccgttgtatgtatgagt

SEQ ID NO: 282562 - DNA, 25 bp, Probe Sequence
tgagtcccgccaagatgatatttta

SEQ ID NO: 282563 - DNA, 25 bp, Probe Sequence
tgatggtaaccaagaacccttacgc

SEQ ID NO: 282564 - DNA, 25 bp, Probe Sequence
tgatagttcccgtaacacttgtaac

SEQ ID NO: 282565 - DNA, 25 bp, Probe Sequence
tgaactcccccttcaaaggaaacag

SEQ ID NO: 282566 - DNA, 25 bp, Probe Sequence
tgaaccctcggatacgatagaaaat

SEQ ID NO: 282567 - DNA, 25 bp, Probe Sequence
tgaagccccgtatatttaatttatt

SEQ ID NO: 282568 - DNA, 25 bp, Probe Sequence
tacgacctttactgtcgtatttttg

SEQ ID NO: 282569 - DNA, 25 bp, Probe Sequence
tacttcttttagctgtttaactttg

SEQ ID NO: 282570 - DNA, 25 bp, Probe Sequence
tgcagttttattttttttacagctt

SEQ ID NO: 282571 - DNA, 25 bp, Probe Sequence
tgagctatttcatctatttttggca

SEQ ID NO: 282572 - DNA, 25 bp, Probe Sequence
tgatgtattacttctagattttcag

SEQ ID NO: 282573 - DNA, 25 bp, Probe Sequence
tgattcatctatgttggattattag

SEQ ID NO: 282574 - DNA, 25 bp, Probe Sequence
tgatatgcctatatttttcctcaaa

SEQ ID NO: 282575 - DNA, 25 bp, Probe Sequence
tgatgatactcaaatttctatctcc

SEQ ID NO: 282576 - DNA, 25 bp, Probe Sequence
tgatgagacaataatggcagctttc

SEQ ID NO: 282577 - DNA, 25 bp, Probe Sequence
tgattgatatctcgacagcactttc

SEQ ID NO: 282578 - DNA, 25 bp, Probe Sequence
tgatgctggtctctgcacacatatg

SEQ ID NO: 282579 - DNA, 25 bp, Probe Sequence
tgatgccaatgggtggaatgatgcc

SEQ ID NO: 282580 - DNA, 25 bp, Probe Sequence
tgatgcccgggctgaggatgcccag

SEQ ID NO: 282581 - DNA, 25 bp, Probe Sequence
tgatgacacggtccagggagccaag

SEQ ID NO: 282582 - DNA, 25 bp, Probe Sequence
tgatgacatcaagaaggtggtgaag

SEQ ID NO: 282583 - DNA, 25 bp, Probe Sequence
tgatccatctgtgtagtttctgaac

SEQ ID NO: 282584 - DNA, 25 bp, Probe Sequence
tgatccatctgtgtagtttctgaac

SEQ ID NO: 282585 - DNA, 25 bp, Probe Sequence
tgatgcactctatcgactgtttgcc

SEQ ID NO: 282586 - DNA, 25 bp, Probe Sequence
tgatcactggtgttgagcttttttt

SEQ ID NO: 282587 - DNA, 25 bp, Probe Sequence
tgatcctggctgtggactggctagt

SEQ ID NO: 282588 - DNA, 25 bp, Probe Sequence
tgatcctggctgtggactggctagt

SEQ ID NO: 282589 - DNA, 25 bp, Probe Sequence
tgatctcagtgtaacgacatggcca

SEQ ID NO: 282590 - DNA, 25 bp, Probe Sequence
tgatgtcaatgtccaggatcatttc

SEQ ID NO: 282591 - DNA, 25 bp, Probe Sequence
tgattatttgccattgtttcgaaat

SEQ ID NO: 282592 - DNA, 25 bp, Probe Sequence
tgattatattgtattttctcagata

SEQ ID NO: 282593 - DNA, 25 bp, Probe Sequence
tgatctatcatgggaattgcagtta

SEQ ID NO: 282594 - DNA, 25 bp, Probe Sequence
tgattatgcagatgacactgactct

SEQ ID NO: 282595 - DNA, 25 bp, Probe Sequence
tgattatcgctatcactacatcccc

SEQ ID NO: 282596 - DNA, 25 bp, Probe Sequence
tgatgtgaggcgacgcaccatcacc

SEQ ID NO: 282597 - DNA, 25 bp, Probe Sequence
tgatggcgtgatatgcacctgcaac

SEQ ID NO: 282598 - DNA, 25 bp, Probe Sequence
tgatgtggaaccgtcacgcaaaccc

SEQ ID NO: 282599 - DNA, 25 bp, Probe Sequence
tgagggtcactggtcctcaaagcgg

SEQ ID NO: 282600 - DNA, 25 bp, Probe Sequence
tgatgtaacctcattctcattaagg

SEQ ID NO: 282601 - DNA, 25 bp, Probe Sequence
tgatgaaacaccattgctactgaaa

SEQ ID NO: 282602 - DNA, 25 bp, Probe Sequence
tgatataaacacttccaaataaaaa

SEQ ID NO: 282603 - DNA, 25 bp, Probe Sequence
taatcaagtaactcaaatgtgacaa

SEQ ID NO: 282604 - DNA, 25 bp, Probe Sequence
tgataaatgttgtttcaaattacta

SEQ ID NO: 282605 - DNA, 25 bp, Probe Sequence
tgatacaagtagttgacagatttca

SEQ ID NO: 282606 - DNA, 25 bp, Probe Sequence
tgatatctaatagtgtacagttggg

SEQ ID NO: 282607 - DNA, 25 bp, Probe Sequence
tgattctaagagtctggtgtgctgg

SEQ ID NO: 282608 - DNA, 25 bp, Probe Sequence
tgatgtcatagggagcggggagctg

SEQ ID NO: 282609 - DNA, 25 bp, Probe Sequence
tgatttcgcttaggccagagtgatg

SEQ ID NO: 282610 - DNA, 25 bp, Probe Sequence
tgatctcctgtctcaacaaatgcag

SEQ ID NO: 282611 - DNA, 25 bp, Probe Sequence
tgatccctcagtgcataaaggagga

SEQ ID NO: 282612 - DNA, 25 bp, Probe Sequence
tgatctctctgaatcctaagggctg

SEQ ID NO: 282613 - DNA, 25 bp, Probe Sequence
tgattcatctgtaaaagggtctaga

SEQ ID NO: 282614 - DNA, 25 bp, Probe Sequence
tgatatattctgatgtatgggtgct

SEQ ID NO: 282615 - DNA, 25 bp, Probe Sequence
tgatggatatggctttgggtctgat

SEQ ID NO: 282616 - DNA, 25 bp, Probe Sequence
tgatggatatggcagtggacgtgga

SEQ ID NO: 282617 - DNA, 25 bp, Probe Sequence
tgatgcatgggtcatttgtcttggg

SEQ ID NO: 282618 - DNA, 25 bp, Probe Sequence
tgatcatgatgtatcatcttttatt

SEQ ID NO: 282619 - DNA, 25 bp, Probe Sequence
tgatcatggctttgctttatatctt

SEQ ID NO: 282620 - DNA, 25 bp, Probe Sequence
tgatctactataaggtattctatat

SEQ ID NO: 282621 - DNA, 25 bp, Probe Sequence
tgatctatgttttggtgagctctta

SEQ ID NO: 282622 - DNA, 25 bp, Probe Sequence
tgaggagtcttgtgtgcattgctgt

SEQ ID NO: 282623 - DNA, 25 bp, Probe Sequence
tgaggcacctaccttcatttttaac

SEQ ID NO: 282624 - DNA, 25 bp, Probe Sequence
tgaggaacgagccatctattttgat

SEQ ID NO: 282625 - DNA, 25 bp, Probe Sequence
tgaggacaatggcatctacttctgt

SEQ ID NO: 282626 - DNA, 25 bp, Probe Sequence
tgatagacattgtcaatttcatttt

SEQ ID NO: 282627 - DNA, 25 bp, Probe Sequence
tgataacatctgtcacactcttcca

SEQ ID NO: 282628 - DNA, 25 bp, Probe Sequence
tgataattctgtttctcatctgccc

SEQ ID NO: 282629 - DNA, 25 bp, Probe Sequence
tgatacatgcatcgtttctggctgg

SEQ ID NO: 282630 - DNA, 25 bp, Probe Sequence
tgatgacgtggaattctgcagcccc

SEQ ID NO: 282631 - DNA, 25 bp, Probe Sequence
tgagataggttgatctcgcccttac

SEQ ID NO: 282632 - DNA, 25 bp, Probe Sequence
tgagacgtgattaccgggttgggcg

SEQ ID NO: 282633 - DNA, 25 bp, Probe Sequence
tgagcaccaattttgcggggggcgg

SEQ ID NO: 282634 - DNA, 25 bp, Probe Sequence
tgaaccgggttgtgggcggcgagga

SEQ ID NO: 282635 - DNA, 25 bp, Probe Sequence
tgaactcggttgtaacggggctggg

SEQ ID NO: 282636 - DNA, 25 bp, Probe Sequence
tgaactcgtttgtaaacgacgtgtt

SEQ ID NO: 282637 - DNA, 25 bp, Probe Sequence
tgagacatcgtttccaaaaaaattc

SEQ ID NO: 282638 - DNA, 25 bp, Probe Sequence
tgagactccgtcacaacaacaacaa

SEQ ID NO: 282639 - DNA, 25 bp, Probe Sequence
tgatgccaaggtgccagccaaagac

SEQ ID NO: 282640 - DNA, 25 bp, Probe Sequence
tgacccaactgggggcaaaggtttg

SEQ ID NO: 282641 - DNA, 25 bp, Probe Sequence
tgactggcaacgagtggagaaggac

SEQ ID NO: 282642 - DNA, 25 bp, Probe Sequence
tgagtacaaccttgctgtgaaggag

SEQ ID NO: 282643 - DNA, 25 bp, Probe Sequence
tgagtactgacattcctgatgaagg

SEQ ID NO: 282644 - DNA, 25 bp, Probe Sequence
tgaggcttctgcctactgagcaagg

SEQ ID NO: 282645 - DNA, 25 bp, Probe Sequence
tgatgagctttcctttgatccggac

SEQ ID NO: 282646 - DNA, 25 bp, Probe Sequence
tgataaggtcctttatgagcagagg

SEQ ID NO: 282647 - DNA, 25 bp, Probe Sequence
tgagaaggtgcctgccatagccagg

SEQ ID NO: 282648 - DNA, 25 bp, Probe Sequence
tgatgagacagtccaactctaccgc

SEQ ID NO: 282649 - DNA, 25 bp, Probe Sequence
tgatgaaactgtccagactaccctc

SEQ ID NO: 282650 - DNA, 25 bp, Probe Sequence
tgctggtaatggccatggtaccccc

SEQ ID NO: 282651 - DNA, 25 bp, Probe Sequence
tgctggtaatggccatggtaccccc

SEQ ID NO: 282652 - DNA, 25 bp, Probe Sequence
tgaggataaggttcggatcccccgc

SEQ ID NO: 282653 - DNA, 25 bp, Probe Sequence
tgagggattggttccaggacccctg

SEQ ID NO: 282654 - DNA, 25 bp, Probe Sequence
tgagggtgtggttccaactgctcag

SEQ ID NO: 282655 - DNA, 25 bp, Probe Sequence
tgaggttctggtgaagctctctgca

SEQ ID NO: 282656 - DNA, 25 bp, Probe Sequence
tgaggttctggtgaagctctctgca

SEQ ID NO: 282657 - DNA, 25 bp, Probe Sequence
tgatggtatctgcctcgtagtgcat

SEQ ID NO: 282658 - DNA, 25 bp, Probe Sequence
tgaggctagtcccagaagctattga

SEQ ID NO: 282659 - DNA, 25 bp, Probe Sequence
tgagcattagtcctagagcgtcctg

SEQ ID NO: 282660 - DNA, 25 bp, Probe Sequence
tgatttgtatcttagacgacctgtc

SEQ ID NO: 282661 - DNA, 25 bp, Probe Sequence
tgatttgttgctgggagcggcggca

SEQ ID NO: 282662 - DNA, 25 bp, Probe Sequence
tgatttgggtctggacaaagtgcca

SEQ ID NO: 282663 - DNA, 25 bp, Probe Sequence
tgatttggcaactgacaacccacca

SEQ ID NO: 282664 - DNA, 25 bp, Probe Sequence
tgatttttgacacatacacccctaa

SEQ ID NO: 282665 - DNA, 25 bp, Probe Sequence
tgatcgtttccacttaagcgacctc

SEQ ID NO: 282666 - DNA, 25 bp, Probe Sequence
tgacgattccactgtaactaccaat

SEQ ID NO: 282667 - DNA, 25 bp, Probe Sequence
tgagggtcccttaaactgatgtctt

SEQ ID NO: 282668 - DNA, 25 bp, Probe Sequence
tgaggacgcccctaaatcgggtact

SEQ ID NO: 282669 - DNA, 25 bp, Probe Sequence
tgaggatggggacaagctgcgggta

SEQ ID NO: 282670 - DNA, 25 bp, Probe Sequence
tgaggacctggaataggcgccaaga

SEQ ID NO: 282671 - DNA, 25 bp, Probe Sequence
tgagtacccaaaagctcagccagcc

SEQ ID NO: 282672 - DNA, 25 bp, Probe Sequence
tgagagacgcaagccgctcaacatc

SEQ ID NO: 282673 - DNA, 25 bp, Probe Sequence
tgaggatgaagagccgccacctaag

SEQ ID NO: 282674 - DNA, 25 bp, Probe Sequence
tgaggaaagcacacagtcaccttct

SEQ ID NO: 282675 - DNA, 25 bp, Probe Sequence
tgaggataaactggaataccttttc

SEQ ID NO: 282676 - DNA, 25 bp, Probe Sequence
tgaggaaatatagaaaccaatcatt

SEQ ID NO: 282677 - DNA, 25 bp, Probe Sequence
tgaggtctgtttaaagtggcaatct

SEQ ID NO: 282678 - DNA, 25 bp, Probe Sequence
tgaggatgcttacccggggcagatc

SEQ ID NO: 282679 - DNA, 25 bp, Probe Sequence
tgcaggttaagggcagattgagacc

SEQ ID NO: 282680 - DNA, 25 bp, Probe Sequence
tgaggcttcaggggatgctgggccc

SEQ ID NO: 282681 - DNA, 25 bp, Probe Sequence
tgatggttctgcgcaacatggtgga

SEQ ID NO: 282682 - DNA, 25 bp, Probe Sequence
tgatgcctgtctgacacgttttggt

SEQ ID NO: 282683 - DNA, 25 bp, Probe Sequence
tgatgcctgtctgacacgttttggt

SEQ ID NO: 282684 - DNA, 25 bp, Probe Sequence
tgatctttctgggccttttgagggt

SEQ ID NO: 282685 - DNA, 25 bp, Probe Sequence
tgatgagttcatgtcctttgtaggg

SEQ ID NO: 282686 - DNA, 25 bp, Probe Sequence
tgatcaatgacagagccttctgagg

SEQ ID NO: 282687 - DNA, 25 bp, Probe Sequence
tgataaatgatggcacctcctgtgg

SEQ ID NO: 282688 - DNA, 25 bp, Probe Sequence
tgatggagcagatacgcccttggca

SEQ ID NO: 282689 - DNA, 25 bp, Probe Sequence
tgaggacagcatagactcacccagt

SEQ ID NO: 282690 - DNA, 25 bp, Probe Sequence
tgaggatctcaaagcacagcccaaa

SEQ ID NO: 282691 - DNA, 25 bp, Probe Sequence
tgagcatttaggaagcagcaccaag

SEQ ID NO: 282692 - DNA, 25 bp, Probe Sequence
tgagattttggtgcacccatcaccc

SEQ ID NO: 282693 - DNA, 25 bp, Probe Sequence
tgagagattttgtcaccacgaggcc

SEQ ID NO: 282694 - DNA, 25 bp, Probe Sequence
tgatgaatttggtctgcctctgagc

SEQ ID NO: 282695 - DNA, 25 bp, Probe Sequence
tgatacttcttcctcatttgggaca

SEQ ID NO: 282696 - DNA, 25 bp, Probe Sequence
tgagtttatgtcctctgtcgggaca

SEQ ID NO: 282697 - DNA, 25 bp, Probe Sequence
tgagtgtgaaggagcctggggaaag

SEQ ID NO: 282698 - DNA, 25 bp, Probe Sequence
tgatggtgtgagcttccttggggaa

SEQ ID NO: 282699 - DNA, 25 bp, Probe Sequence
tgaggctgtacctccttgactaagc

SEQ ID NO: 282700 - DNA, 25 bp, Probe Sequence
tgagagttgaactgccattcaaacc

SEQ ID NO: 282701 - DNA, 25 bp, Probe Sequence
tgaggtgtaacaaccacccaagccc

SEQ ID NO: 282702 - DNA, 25 bp, Probe Sequence
tgaggtattaatcccctccattgct

SEQ ID NO: 282703 - DNA, 25 bp, Probe Sequence
tgagttattaatcctcaattttcct

SEQ ID NO: 282704 - DNA, 25 bp, Probe Sequence
tgagttagcttattcaagttttgtc

SEQ ID NO: 282705 - DNA, 25 bp, Probe Sequence
tgagagctgcgcctaaaattttttc

SEQ ID NO: 282706 - DNA, 25 bp, Probe Sequence
tgaggagcgcgtgcaaagtgtcgat

SEQ ID NO: 282707 - DNA, 25 bp, Probe Sequence
tgaggagcaggtgagccgtgccaac

SEQ ID NO: 282708 - DNA, 25 bp, Probe Sequence
tgatgggagttctacagctgctgca

SEQ ID NO: 282709 - DNA, 25 bp, Probe Sequence
tgataggatattccctgctgcctac

SEQ ID NO: 282710 - DNA, 25 bp, Probe Sequence
tgataggatattccctgctgcctac

SEQ ID NO: 282711 - DNA, 25 bp, Probe Sequence
tgataggatattccctgctgcctac

SEQ ID NO: 282712 - DNA, 25 bp, Probe Sequence
tgatagagaaggacctgccccacta

SEQ ID NO: 282713 - DNA, 25 bp, Probe Sequence
tgatagaggagagcctcacctccga

SEQ ID NO: 282714 - DNA, 25 bp, Probe Sequence
tgagaggctggatcctaaccctgaa

SEQ ID NO: 282715 - DNA, 25 bp, Probe Sequence
tgagaggctggagcccatggctagt

SEQ ID NO: 282716 - DNA, 25 bp, Probe Sequence
tgaggtgggatggccccatctggat

SEQ ID NO: 282717 - DNA, 25 bp, Probe Sequence
tgaggtgggatggccccatctggat

SEQ ID NO: 282718 - DNA, 25 bp, Probe Sequence
tgaggcagacgagcacaccaggaga

SEQ ID NO: 282719 - DNA, 25 bp, Probe Sequence
tgagggagctttcacttgggacaac

SEQ ID NO: 282720 - DNA, 25 bp, Probe Sequence
tgagggacccgagcggggacttctc

SEQ ID NO: 282721 - DNA, 25 bp, Probe Sequence
tgaggaagcccaggctcggaggacc

SEQ ID NO: 282722 - DNA, 25 bp, Probe Sequence
tgagagggacccgattggtgttgcc

SEQ ID NO: 282723 - DNA, 25 bp, Probe Sequence
tgaggggtacaggttgggtgggcca

SEQ ID NO: 282724 - DNA, 25 bp, Probe Sequence
tgatgtgcaggatcgctttgaggtc

SEQ ID NO: 282725 - DNA, 25 bp, Probe Sequence
tgagtaagagctggtgtctgattgt

SEQ ID NO: 282726 - DNA, 25 bp, Probe Sequence
tgatgatcatccatcgtattgattg

SEQ ID NO: 282727 - DNA, 25 bp, Probe Sequence
tgatcctccaacttcatttgatgct

SEQ ID NO: 282728 - DNA, 25 bp, Probe Sequence
tgatacccccaggatcttgagtttt

SEQ ID NO: 282729 - DNA, 25 bp, Probe Sequence
tgaactccccagataaagtctgctc

SEQ ID NO: 282730 - DNA, 25 bp, Probe Sequence
tgagtctaccttctagtacttctca

SEQ ID NO: 282731 - DNA, 25 bp, Probe Sequence
tgaggctacaagtccaagtatcttc

SEQ ID NO: 282732 - DNA, 25 bp, Probe Sequence
tgatgctgtacccctcaaggattta

SEQ ID NO: 282733 - DNA, 25 bp, Probe Sequence
tgatgcttactgcgtcaacggctac

SEQ ID NO: 282734 - DNA, 25 bp, Probe Sequence
tgatctccagggctcaatcagccct

SEQ ID NO: 282735 - DNA, 25 bp, Probe Sequence
tgatgcttctgctcaggaatggccc

SEQ ID NO: 282736 - DNA, 25 bp, Probe Sequence
tgatgcttctccatgggcatttcca

SEQ ID NO: 282737 - DNA, 25 bp, Probe Sequence
tgatcaattcacaaggccatcttag

SEQ ID NO: 282738 - DNA, 25 bp, Probe Sequence
tgatcaataagaaatcactctgaag

SEQ ID NO: 282739 - DNA, 25 bp, Probe Sequence
tgatgaaccgcttcatgccactgaa

SEQ ID NO: 282740 - DNA, 25 bp, Probe Sequence
tgatgacattcggataagcactgat

SEQ ID NO: 282741 - DNA, 25 bp, Probe Sequence
tgatgacattcggataagcactgat

SEQ ID NO: 282742 - DNA, 25 bp, Probe Sequence
tgataatgtgcagaatggcctcata

SEQ ID NO: 282743 - DNA, 25 bp, Probe Sequence
tgatccagatgcccagaggctccat

SEQ ID NO: 282744 - DNA, 25 bp, Probe Sequence
tgatggagcatcagctgtggcccac

SEQ ID NO: 282745 - DNA, 25 bp, Probe Sequence
tgatgctggctcagttctggccaca

SEQ ID NO: 282746 - DNA, 25 bp, Probe Sequence
tgatcttgctctatctcacagcaca

SEQ ID NO: 282747 - DNA, 25 bp, Probe Sequence
tgatctgctgttagtctcagtcagc

SEQ ID NO: 282748 - DNA, 25 bp, Probe Sequence
tgatctgcttgtagcaccagctatt

SEQ ID NO: 282749 - DNA, 25 bp, Probe Sequence
tgatgcgcttttgtcagctacatcc

SEQ ID NO: 282750 - DNA, 25 bp, Probe Sequence
tgatcctggttccatagccaacact

SEQ ID NO: 282751 - DNA, 25 bp, Probe Sequence
tgatctcggatgaccaaaccagcct

SEQ ID NO: 282752 - DNA, 25 bp, Probe Sequence
tgatctcggatgaccaaaccagcct

SEQ ID NO: 282753 - DNA, 25 bp, Probe Sequence
tgatctgggagtggaaatcctgctc

SEQ ID NO: 282754 - DNA, 25 bp, Probe Sequence
tgagcgggcactggagagtaaggca

SEQ ID NO: 282755 - DNA, 25 bp, Probe Sequence
tgagagggcacggcaaggtcgccta

SEQ ID NO: 282756 - DNA, 25 bp, Probe Sequence
tgagggccagcggcttggaggttaa

SEQ ID NO: 282757 - DNA, 25 bp, Probe Sequence
tgagggtcctgtgtggcaagtggcc

SEQ ID NO: 282758 - DNA, 25 bp, Probe Sequence
tgatgtgtgtttgattgaatcaggg

SEQ ID NO: 282759 - DNA, 25 bp, Probe Sequence
tgaggattgtcattaaacacagttg

SEQ ID NO: 282760 - DNA, 25 bp, Probe Sequence
tgaggctggttgtacaatgcccacg

SEQ ID NO: 282761 - DNA, 25 bp, Probe Sequence
tgagggtgactcgacaacctccaag

SEQ ID NO: 282762 - DNA, 25 bp, Probe Sequence
tgaggtgcgagttacaccaaccagg

SEQ ID NO: 282763 - DNA, 25 bp, Probe Sequence
tgaggggtgctgaaaccagactggg

SEQ ID NO: 282764 - DNA, 25 bp, Probe Sequence
tgaggatgttcgaacctttctgcgg

SEQ ID NO: 282765 - DNA, 25 bp, Probe Sequence
tgagggatacctaatttgcattcgg

SEQ ID NO: 282766 - DNA, 25 bp, Probe Sequence
tgagagaatcactcaattcctattg

SEQ ID NO: 282767 - DNA, 25 bp, Probe Sequence
tgagatgaatacatttggttatatg

SEQ ID NO: 282768 - DNA, 25 bp, Probe Sequence
tgaatattaaagtgtgctggacatg

SEQ ID NO: 282769 - DNA, 25 bp, Probe Sequence
tgatgatattaatgtcactgggaca

SEQ ID NO: 282770 - DNA, 25 bp, Probe Sequence
tgatgagcattgaaggcacctggga

SEQ ID NO: 282771 - DNA, 25 bp, Probe Sequence
tgatgcagcgtgacatagcagccgg

SEQ ID NO: 282772 - DNA, 25 bp, Probe Sequence
tgatcagcgcagacctgcagtctct

SEQ ID NO: 282773 - DNA, 25 bp, Probe Sequence
tgatcacgcacaggctgaggccagg

SEQ ID NO: 282774 - DNA, 25 bp, Probe Sequence
tgatctgtgctagctgtgaggcagc

SEQ ID NO: 282775 - DNA, 25 bp, Probe Sequence
tgatgtgatgcctgttgagtcagat

SEQ ID NO: 282776 - DNA, 25 bp, Probe Sequence
tgatgctgagccagtttgtatgtgt

SEQ ID NO: 282777 - DNA, 25 bp, Probe Sequence
tgatgctcggctgatttttgtttac

SEQ ID NO: 282778 - DNA, 25 bp, Probe Sequence
tcgcccagctaattttttcgtattt

SEQ ID NO: 282779 - DNA, 25 bp, Probe Sequence
tgccctaataaaacttctctttctt

SEQ ID NO: 282780 - DNA, 25 bp, Probe Sequence
tgccctaataaaacttctctttctt

SEQ ID NO: 282781 - DNA, 25 bp, Probe Sequence
tcaaggaatacgtgcctttttctta

SEQ ID NO: 282782 - DNA, 25 bp, Probe Sequence
taaggaagtgctgtttttttttgag

SEQ ID NO: 282783 - DNA, 25 bp, Probe Sequence
taaggaagtgctgtttttttttgag

SEQ ID NO: 282784 - DNA, 25 bp, Probe Sequence
tgagggtatgggctttcttttttat

SEQ ID NO: 282785 - DNA, 25 bp, Probe Sequence
tgatggtctcaagggtcgtgtgttt

SEQ ID NO: 282786 - DNA, 25 bp, Probe Sequence
tatgttcttatgcgggtttcctaaa

SEQ ID NO: 282787 - DNA, 25 bp, Probe Sequence
tgagtttcattgccggggttggggc

SEQ ID NO: 282788 - DNA, 25 bp, Probe Sequence
tgcaaaccttgacgggactgggaga

SEQ ID NO: 282789 - DNA, 25 bp, Probe Sequence
tgagaacttcgtgggggcggggatc

SEQ ID NO: 282790 - DNA, 25 bp, Probe Sequence
tgaggatttcgttggaagcgggaat

SEQ ID NO: 282791 - DNA, 25 bp, Probe Sequence
tgaggaattagatgcaagaggtggg

SEQ ID NO: 282792 - DNA, 25 bp, Probe Sequence
tgaggtagaaatgcaagggggacac

SEQ ID NO: 282793 - DNA, 25 bp, Probe Sequence
tgaggccatgattaaaagggcggcc

SEQ ID NO: 282794 - DNA, 25 bp, Probe Sequence
tgcggcccagctaaggggcctggcc

SEQ ID NO: 282795 - DNA, 25 bp, Probe Sequence
tgactgtaactgaagtggccgggcc

SEQ ID NO: 282796 - DNA, 25 bp, Probe Sequence
tgacgtacctgagcatggacgggcc

SEQ ID NO: 282797 - DNA, 25 bp, Probe Sequence
tgacttacttatctgtatcggtcag

SEQ ID NO: 282798 - DNA, 25 bp, Probe Sequence
tgagttcacctacatgggggctcag

SEQ ID NO: 282799 - DNA, 25 bp, Probe Sequence
tgaccttcctgtctgggggtcagag

SEQ ID NO: 282800 - DNA, 25 bp, Probe Sequence
tgaggcttttgtttgaggagtttgg

SEQ ID NO: 282801 - DNA, 25 bp, Probe Sequence
tgaggaggttggtgtggattctgtt

SEQ ID NO: 282802 - DNA, 25 bp, Probe Sequence
tagtcggtagggggcagtcttgctt

SEQ ID NO: 282803 - DNA, 25 bp, Probe Sequence
tgagtctgggagcactaggtcttca

SEQ ID NO: 282804 - DNA, 25 bp, Probe Sequence
tgagttcggaggtttgccagctttg

SEQ ID NO: 282805 - DNA, 25 bp, Probe Sequence
tgagccgggtgttaggccagctatt

SEQ ID NO: 282806 - DNA, 25 bp, Probe Sequence
tgaccgtggctaagattcctccatt

SEQ ID NO: 282807 - DNA, 25 bp, Probe Sequence
tgatgccgatggcaactacttcctg

SEQ ID NO: 282808 - DNA, 25 bp, Probe Sequence
tgatgaggacgacagccacgtccgg

SEQ ID NO: 282809 - DNA, 25 bp, Probe Sequence
tgatgaggacaatgcccattcttag

SEQ ID NO: 282810 - DNA, 25 bp, Probe Sequence
tgatgggcaccatgctttctcatga

SEQ ID NO: 282811 - DNA, 25 bp, Probe Sequence
tgatggaggacatctttgcttcatt

SEQ ID NO: 282812 - DNA, 25 bp, Probe Sequence
tgagggggaatcctggtgctcaaat

SEQ ID NO: 282813 - DNA, 25 bp, Probe Sequence
tgaggagggggcctgagactggacc

SEQ ID NO: 282814 - DNA, 25 bp, Probe Sequence
tgaggtgggagggctggatcttttc

SEQ ID NO: 282815 - DNA, 25 bp, Probe Sequence
tgagttgaggcttgcgggatccttt

SEQ ID NO: 282816 - DNA, 25 bp, Probe Sequence
tgagtgtcgtgctggggaccaacga

SEQ ID NO: 282817 - DNA, 25 bp, Probe Sequence
tgagcattcggcttgaggtcaccaa

SEQ ID NO: 282818 - DNA, 25 bp, Probe Sequence
tgagcatggtggtgggctcctgtag

SEQ ID NO: 282819 - DNA, 25 bp, Probe Sequence
tgatgtggtggatgctggctcggga

SEQ ID NO: 282820 - DNA, 25 bp, Probe Sequence
tgatgtggtggatgctggctcggga

SEQ ID NO: 282821 - DNA, 25 bp, Probe Sequence
tgatgggctatgtcagtggcttcgg

SEQ ID NO: 282822 - DNA, 25 bp, Probe Sequence
tgatgggctctctatggtgttatcc

SEQ ID NO: 282823 - DNA, 25 bp, Probe Sequence
tgatgggcccagagtgacaacgcat

SEQ ID NO: 282824 - DNA, 25 bp, Probe Sequence
tgaggcccgcaggtctaagaccaag

SEQ ID NO: 282825 - DNA, 25 bp, Probe Sequence
tgatccctaatgcctgctgaagcac

SEQ ID NO: 282826 - DNA, 25 bp, Probe Sequence
tgatgagttaatgggtgcagcacac

SEQ ID NO: 282827 - DNA, 25 bp, Probe Sequence
tgatggattaagattgcagctacca

SEQ ID NO: 282828 - DNA, 25 bp, Probe Sequence
tgatcctatcaattttactatccct

SEQ ID NO: 282829 - DNA, 25 bp, Probe Sequence
tgatcttaagcagttccacttcttg

SEQ ID NO: 282830 - DNA, 25 bp, Probe Sequence
tgatcttaacaatcccattgcagtg

SEQ ID NO: 282831 - DNA, 25 bp, Probe Sequence
tgacgcaaaataccaccttggcgcc

SEQ ID NO: 282832 - DNA, 25 bp, Probe Sequence
tgacgcaaaataccaccttggcgcc

SEQ ID NO: 282833 - DNA, 25 bp, Probe Sequence
tgagccaaaatgtccccggaatcta

SEQ ID NO: 282834 - DNA, 25 bp, Probe Sequence
tgatgccgaaatgtcaccaggtcct

SEQ ID NO: 282835 - DNA, 25 bp, Probe Sequence
tgatgcggcagatattcccagtgct

SEQ ID NO: 282836 - DNA, 25 bp, Probe Sequence
tgatctgactggaattcctcctgct

SEQ ID NO: 282837 - DNA, 25 bp, Probe Sequence
tgatctattgagagccctctctccc

SEQ ID NO: 282838 - DNA, 25 bp, Probe Sequence
tgatggatggacagcttctttgccc

SEQ ID NO: 282839 - DNA, 25 bp, Probe Sequence
tgatgaagagactctgagccggccg

SEQ ID NO: 282840 - DNA, 25 bp, Probe Sequence
tgatggtgaacacctgggcagcttc

SEQ ID NO: 282841 - DNA, 25 bp, Probe Sequence
tgatgagtcctctctggtcagacat

SEQ ID NO: 282842 - DNA, 25 bp, Probe Sequence
tgatcattcctattcaagtaaaata

SEQ ID NO: 282843 - DNA, 25 bp, Probe Sequence
tgatgcccctgagtactgtgaaaaa

SEQ ID NO: 282844 - DNA, 25 bp, Probe Sequence
tgatccgtcgatcagatgataatga

SEQ ID NO: 282845 - DNA, 25 bp, Probe Sequence
tgatccatgtccaggtgcaactgtg

SEQ ID NO: 282846 - DNA, 25 bp, Probe Sequence
tgatggagatccaggtgaacggagg

SEQ ID NO: 282847 - DNA, 25 bp, Probe Sequence
tgatgggcactcaagagtcccgtga

SEQ ID NO: 282848 - DNA, 25 bp, Probe Sequence
tgagtgtgaatttgtccgccactgc

SEQ ID NO: 282849 - DNA, 25 bp, Probe Sequence
tgatgtgtattccattccgctcgcc

SEQ ID NO: 282850 - DNA, 25 bp, Probe Sequence
tgatgtgtattccattccgctcgcc

SEQ ID NO: 282851 - DNA, 25 bp, Probe Sequence
tgatgtcccatctaaacagtcgtca

SEQ ID NO: 282852 - DNA, 25 bp, Probe Sequence
tgatgtccacctcataagtcatgtc

SEQ ID NO: 282853 - DNA, 25 bp, Probe Sequence
tgatgtcacacatttccaatctctt

SEQ ID NO: 282854 - DNA, 25 bp, Probe Sequence
tgatgacacttacgacaatgacatt

SEQ ID NO: 282855 - DNA, 25 bp, Probe Sequence
tgatctccttagcagcttatttcat

SEQ ID NO: 282856 - DNA, 25 bp, Probe Sequence
tgatgcccctcaatacttctattgt

SEQ ID NO: 282857 - DNA, 25 bp, Probe Sequence
tgaggctcttcaaacatccattctg

SEQ ID NO: 282858 - DNA, 25 bp, Probe Sequence
tgaggacatcgcaccatcagtatcc

SEQ ID NO: 282859 - DNA, 25 bp, Probe Sequence
tgagttcactgtgccagcatgcttc

SEQ ID NO: 282860 - DNA, 25 bp, Probe Sequence
tgatgtacctcagccacatatacct

SEQ ID NO: 282861 - DNA, 25 bp, Probe Sequence
tgagtaaatacaggagcttccactt

SEQ ID NO: 282862 - DNA, 25 bp, Probe Sequence
tgagtggcagtatggagccggcctt

SEQ ID NO: 282863 - DNA, 25 bp, Probe Sequence
tgagtcagagtttgagaccgccctg

SEQ ID NO: 282864 - DNA, 25 bp, Probe Sequence
tgagatcgtgctactgcagtccagc

SEQ ID NO: 282865 - DNA, 25 bp, Probe Sequence
tgatgctggtcatcgcagcttcagc

SEQ ID NO: 282866 - DNA, 25 bp, Probe Sequence
tgatcctgagcatggtgctgtgctg

SEQ ID NO: 282867 - DNA, 25 bp, Probe Sequence
tgatggtggccaggatgctcagctg

SEQ ID NO: 282868 - DNA, 25 bp, Probe Sequence
tgagcgtcgacacagtcgctgttgg

SEQ ID NO: 282869 - DNA, 25 bp, Probe Sequence
tgaggacggcaaggtggtgactgtg

SEQ ID NO: 282870 - DNA, 25 bp, Probe Sequence
tgatgaatcccacatggggccggtg

SEQ ID NO: 282871 - DNA, 25 bp, Probe Sequence
tgatgtaccacctaggagagcccag

SEQ ID NO: 282872 - DNA, 25 bp, Probe Sequence
tgagtaccagcagtaccaggacgcc

SEQ ID NO: 282873 - DNA, 25 bp, Probe Sequence
tgaggtcatcggaatcccgacacct

SEQ ID NO: 282874 - DNA, 25 bp, Probe Sequence
tgaggtaggggtgcagaacagcctg

SEQ ID NO: 282875 - DNA, 25 bp, Probe Sequence
tgaggtcaggagttcgataccagcc

SEQ ID NO: 282876 - DNA, 25 bp, Probe Sequence
tgaggtcaggaggtcgcgaccatcc

SEQ ID NO: 282877 - DNA, 25 bp, Probe Sequence
tgatgcctcaaagacagtgtcccct

SEQ ID NO: 282878 - DNA, 25 bp, Probe Sequence
tgatccgcaagaacaagtaccgccc

SEQ ID NO: 282879 - DNA, 25 bp, Probe Sequence
tgatccagccaaaagaattactctc

SEQ ID NO: 282880 - DNA, 25 bp, Probe Sequence
tgatccagccaaaagaattactctc

SEQ ID NO: 282881 - DNA, 25 bp, Probe Sequence
tgatccagccaaaagaattactctc

SEQ ID NO: 282882 - DNA, 25 bp, Probe Sequence
tgatccaactaatgccttactcttc

SEQ ID NO: 282883 - DNA, 25 bp, Probe Sequence
tgaggcttcatttggccttagtccc

SEQ ID NO: 282884 - DNA, 25 bp, Probe Sequence
tgagattggttctgctcttttcttc

SEQ ID NO: 282885 - DNA, 25 bp, Probe Sequence
tgagtttggtaccatcttattttcc

SEQ ID NO: 282886 - DNA, 25 bp, Probe Sequence
tgagtttggtgttcagttactgagt

SEQ ID NO: 282887 - DNA, 25 bp, Probe Sequence
tgagattttgagttcaggatgaagg

SEQ ID NO: 282888 - DNA, 25 bp, Probe Sequence
tgaggtttggagaggtgaagtgatt

SEQ ID NO: 282889 - DNA, 25 bp, Probe Sequence
tgaggagtagaggagttttagttta

SEQ ID NO: 282890 - DNA, 25 bp, Probe Sequence
tgaggggaagggaccgctcagttat

SEQ ID NO: 282891 - DNA, 25 bp, Probe Sequence
tgatgggaaagttacctacggtcag

SEQ ID NO: 282892 - DNA, 25 bp, Probe Sequence
tgagtgacaaagtgactgcccggtc

SEQ ID NO: 282893 - DNA, 25 bp, Probe Sequence
tgaggtcaatggtgtctgttagagt

SEQ ID NO: 282894 - DNA, 25 bp, Probe Sequence
tgaggagattgccatggcgaccgtc

SEQ ID NO: 282895 - DNA, 25 bp, Probe Sequence
tgaggagattgccatggcgaccgtc

SEQ ID NO: 282896 - DNA, 25 bp, Probe Sequence
tgagtgaatctcaggcgcagcgcct

SEQ ID NO: 282897 - DNA, 25 bp, Probe Sequence
tgaggcctccatatgtggacacttc

SEQ ID NO: 282898 - DNA, 25 bp, Probe Sequence
tgaggcaccagaattgcttgaactg

SEQ ID NO: 282899 - DNA, 25 bp, Probe Sequence
tgaggacactggttttacctccagg

SEQ ID NO: 282900 - DNA, 25 bp, Probe Sequence
tgaggacacctacttgtaaccctgg

SEQ ID NO: 282901 - DNA, 25 bp, Probe Sequence
tgaagagacgggtgtaaagcctcct

SEQ ID NO: 282902 - DNA, 25 bp, Probe Sequence
tgaagaacgtggcgaaaccccgtat

SEQ ID NO: 282903 - DNA, 25 bp, Probe Sequence
tgaaagaggggtccgtgacctccgt

SEQ ID NO: 282904 - DNA, 25 bp, Probe Sequence
tgaggagaggggcccattcaccttt

SEQ ID NO: 282905 - DNA, 25 bp, Probe Sequence
tgaggcaaggggcactcatagcttc

SEQ ID NO: 282906 - DNA, 25 bp, Probe Sequence
tgagtcaaggggcttcactgcctgc

SEQ ID NO: 282907 - DNA, 25 bp, Probe Sequence
tgagatcaaggaagccgtcgctgcc

SEQ ID NO: 282908 - DNA, 25 bp, Probe Sequence
tgactgcaagaatactggcagttca

SEQ ID NO: 282909 - DNA, 25 bp, Probe Sequence
tgaggcaggtatcactagaggtcaa

SEQ ID NO: 282910 - DNA, 25 bp, Probe Sequence
tgaggacgcttatgatatgaggaaa

SEQ ID NO: 282911 - DNA, 25 bp, Probe Sequence
tgagtactgcttccggtgctaaaat

SEQ ID NO: 282912 - DNA, 25 bp, Probe Sequence
tgatgatacgcccgagcagatgcca

SEQ ID NO: 282913 - DNA, 25 bp, Probe Sequence
tgatgatgacgtgagcagcggctcc

SEQ ID NO: 282914 - DNA, 25 bp, Probe Sequence
tgaggctggcttagcaggagctcca

SEQ ID NO: 282915 - DNA, 25 bp, Probe Sequence
tgagtgcatcatgtacaaggtcccc

SEQ ID NO: 282916 - DNA, 25 bp, Probe Sequence
tgatgtgttgttgccatggtaatcc

SEQ ID NO: 282917 - DNA, 25 bp, Probe Sequence
tgatgtgccttctccatatgaagtc

SEQ ID NO: 282918 - DNA, 25 bp, Probe Sequence
tgaggccttaccttatgaagcagtg

SEQ ID NO: 282919 - DNA, 25 bp, Probe Sequence
tgagtctttacaaaatagccagtta

SEQ ID NO: 282920 - DNA, 25 bp, Probe Sequence
tgagtcttagaaaacaccatgctta

SEQ ID NO: 282921 - DNA, 25 bp, Probe Sequence
tgagtctatcaatgagctcccacct

SEQ ID NO: 282922 - DNA, 25 bp, Probe Sequence
tgagttcattgaccagtcacgcctt

SEQ ID NO: 282923 - DNA, 25 bp, Probe Sequence
tgatcctgcttggaagtaccgcttt

SEQ ID NO: 282924 - DNA, 25 bp, Probe Sequence
tgatcccttggatagagctctgcta

SEQ ID NO: 282925 - DNA, 25 bp, Probe Sequence
tgagaccttgtcttagagaatctaa

SEQ ID NO: 282926 - DNA, 25 bp, Probe Sequence
tgatgatagctctctgtaaaattta

SEQ ID NO: 282927 - DNA, 25 bp, Probe Sequence
tgagtcactcttgtacaagcttgtt

SEQ ID NO: 282928 - DNA, 25 bp, Probe Sequence
tgatgtgactttctgacactgattg

SEQ ID NO: 282929 - DNA, 25 bp, Probe Sequence
tgatgatcactggtgttgagctttt

SEQ ID NO: 282930 - DNA, 25 bp, Probe Sequence
tgagacctgggtcgatgctctttac

SEQ ID NO: 282931 - DNA, 25 bp, Probe Sequence
tgaggcacagcgataacttcttcac

SEQ ID NO: 282932 - DNA, 25 bp, Probe Sequence
tgaggcacagcgctggcattttgac

SEQ ID NO: 282933 - DNA, 25 bp, Probe Sequence
tgcggagagcagccagaaaattatt

SEQ ID NO: 282934 - DNA, 25 bp, Probe Sequence
tgaggagcgatgcgacaggcatgat

SEQ ID NO: 282935 - DNA, 25 bp, Probe Sequence
tgaggctgcgaaggcagatgcgatt

SEQ ID NO: 282936 - DNA, 25 bp, Probe Sequence
tgaggcaggcaatgcgagagataaa

SEQ ID NO: 282937 - DNA, 25 bp, Probe Sequence
tgaggggcttcacgagaggccacag

SEQ ID NO: 282938 - DNA, 25 bp, Probe Sequence
tgagggggtcagtaggtgctctgga

SEQ ID NO: 282939 - DNA, 25 bp, Probe Sequence
tgaggttaacatcgtggtgctgctt

SEQ ID NO: 282940 - DNA, 25 bp, Probe Sequence
tgagggctcaaacgtaggcgtctgt

SEQ ID NO: 282941 - DNA, 25 bp, Probe Sequence
tgaggactcctacacgaagatctgc

SEQ ID NO: 282942 - DNA, 25 bp, Probe Sequence
tgaggcacccaatgataggaatctg

SEQ ID NO: 282943 - DNA, 25 bp, Probe Sequence
tgaggccccaggcatcagagatcat

SEQ ID NO: 282944 - DNA, 25 bp, Probe Sequence
tgagtgcccgagccatatagcaggc

SEQ ID NO: 282945 - DNA, 25 bp, Probe Sequence
tgagtgcccgagccatatagcaggc

SEQ ID NO: 282946 - DNA, 25 bp, Probe Sequence
tgagtgcccgagccatatagcaggc

SEQ ID NO: 282947 - DNA, 25 bp, Probe Sequence
tgagtcctagggatgctgctggcta

SEQ ID NO: 282948 - DNA, 25 bp, Probe Sequence
tgagtccggtggacgatgcctgcaa

SEQ ID NO: 282949 - DNA, 25 bp, Probe Sequence
tgatgtccagcgagtggatgccgcc

SEQ ID NO: 282950 - DNA, 25 bp, Probe Sequence
tgatgagcagagccttgtgggccgc

SEQ ID NO: 282951 - DNA, 25 bp, Probe Sequence
tgatgagcgaggcgggtgctggcct

SEQ ID NO: 282952 - DNA, 25 bp, Probe Sequence
tgagagtgggcgagtgagttgacgg

SEQ ID NO: 282953 - DNA, 25 bp, Probe Sequence
tgactggttgcgcgtagttgctaac

SEQ ID NO: 282954 - DNA, 25 bp, Probe Sequence
tgagcttgtttgcagtacttttaaa

SEQ ID NO: 282955 - DNA, 25 bp, Probe Sequence
tgagtatggtagggggtttgaagaa

SEQ ID NO: 282956 - DNA, 25 bp, Probe Sequence
tgatgatttgggggaggctttggga

SEQ ID NO: 282957 - DNA, 25 bp, Probe Sequence
tgaggactagggcaggcagctgggg

SEQ ID NO: 282958 - DNA, 25 bp, Probe Sequence
tgagctgaccgaggcagagcgactc

SEQ ID NO: 282959 - DNA, 25 bp, Probe Sequence
tgatgtactggagcaatcagatcac

SEQ ID NO: 282960 - DNA, 25 bp, Probe Sequence
tgagctggcggagaggcacatccaa

SEQ ID NO: 282961 - DNA, 25 bp, Probe Sequence
tgacgacaggacaggaagccgcact

SEQ ID NO: 282962 - DNA, 25 bp, Probe Sequence
tgaggacgagataggggaccccttg

SEQ ID NO: 282963 - DNA, 25 bp, Probe Sequence
tgaggagctgggaggtacccctgtc

SEQ ID NO: 282964 - DNA, 25 bp, Probe Sequence
tgagaggctgggagttcacagacct

SEQ ID NO: 282965 - DNA, 25 bp, Probe Sequence
tgagaggtgaggagtgccacggctg

SEQ ID NO: 282966 - DNA, 25 bp, Probe Sequence
tgaggggaggggggcacatgctgag

SEQ ID NO: 282967 - DNA, 25 bp, Probe Sequence
tgaggaggcaagcagttgatgactg

SEQ ID NO: 282968 - DNA, 25 bp, Probe Sequence
tgatggaggccaaggtccgagtgct

SEQ ID NO: 282969 - DNA, 25 bp, Probe Sequence
tgaggtgaccttggatgcctgagtc

SEQ ID NO: 282970 - DNA, 25 bp, Probe Sequence
tgatgggactctcccttatgcaggc

SEQ ID NO: 282971 - DNA, 25 bp, Probe Sequence
tgaggatgacgtgcgctttgagagc

SEQ ID NO: 282972 - DNA, 25 bp, Probe Sequence
tgaggatgagctgagcccggagact

SEQ ID NO: 282973 - DNA, 25 bp, Probe Sequence
tgatgacgagtggcggcgggagacc

SEQ ID NO: 282974 - DNA, 25 bp, Probe Sequence
tgagacggctggcaggtacatcacc

SEQ ID NO: 282975 - DNA, 25 bp, Probe Sequence
tgatgctaggtttgtgagtttcacc

SEQ ID NO: 282976 - DNA, 25 bp, Probe Sequence
tgagtcggatctttcaagtaccccc

SEQ ID NO: 282977 - DNA, 25 bp, Probe Sequence
tgagtcagccaagaaagcccacctc

SEQ ID NO: 282978 - DNA, 25 bp, Probe Sequence
tgagtaccacatcgagaaaccaccc

SEQ ID NO: 282979 - DNA, 25 bp, Probe Sequence
tgagtccccgagataacatacgccc

SEQ ID NO: 282980 - DNA, 25 bp, Probe Sequence
tgaggcccacgagttctccaacacc

SEQ ID NO: 282981 - DNA, 25 bp, Probe Sequence
tgatgccctcctggtatttgacaac

SEQ ID NO: 282982 - DNA, 25 bp, Probe Sequence
tgatgcccttctggccaaaaccaga

SEQ ID NO: 282983 - DNA, 25 bp, Probe Sequence
tgatgactcttcgcagtagaacctc

SEQ ID NO: 282984 - DNA, 25 bp, Probe Sequence
tgagatctccctccagggaatccgc

SEQ ID NO: 282985 - DNA, 25 bp, Probe Sequence
tgagcatctttccggaggctaacag

SEQ ID NO: 282986 - DNA, 25 bp, Probe Sequence
tgagaaagccctggggatgaagctg

SEQ ID NO: 282987 - DNA, 25 bp, Probe Sequence
tgagaagtagacgggttgtttcaac

SEQ ID NO: 282988 - DNA, 25 bp, Probe Sequence
tgaggagcgagactctagtttttcc

SEQ ID NO: 282989 - DNA, 25 bp, Probe Sequence
tgagagatgcagtgctgctactttt

SEQ ID NO: 282990 - DNA, 25 bp, Probe Sequence
tgagagatcctgctgctattttctt

SEQ ID NO: 282991 - DNA, 25 bp, Probe Sequence
tgatggctactgtgaggctcttcta

SEQ ID NO: 282992 - DNA, 25 bp, Probe Sequence
tgatgagtacagcagagaccttcct

SEQ ID NO: 282993 - DNA, 25 bp, Probe Sequence
tgatgggtcacactaacctgtcact

SEQ ID NO: 282994 - DNA, 25 bp, Probe Sequence
tgagggccaaataacctgctagcta

SEQ ID NO: 282995 - DNA, 25 bp, Probe Sequence
tgaggtggtacaatctcggctcact

SEQ ID NO: 282996 - DNA, 25 bp, Probe Sequence
tgagtgatcaggcaattcggtcaat

SEQ ID NO: 282997 - DNA, 25 bp, Probe Sequence
tgagatgtatgcccaaagcggtaga

SEQ ID NO: 282998 - DNA, 25 bp, Probe Sequence
tgagcgtatgctggccaaggtctga

SEQ ID NO: 282999 - DNA, 25 bp, Probe Sequence
tgaggtgatctcgcaaagttattct

SEQ ID NO: 283000 - DNA, 25 bp, Probe Sequence
tgagggcatccgacaaggcccatct

SEQ ID NO: 283001 - DNA, 25 bp, Probe Sequence
tgatggcaactcctatggtgttcct

SEQ ID NO: 283002 - DNA, 25 bp, Probe Sequence
tgatgtagacagttggtgatgcttc

SEQ ID NO: 283003 - DNA, 25 bp, Probe Sequence
tgatgtgcaaagtggtaagctctaa

SEQ ID NO: 283004 - DNA, 25 bp, Probe Sequence
tgaggaaaggagctcacgcccagag

SEQ ID NO: 283005 - DNA, 25 bp, Probe Sequence
tgaggactcagaagttcaagctaaa

SEQ ID NO: 283006 - DNA, 25 bp, Probe Sequence
tgaggtcacagatgttgaagttgga

SEQ ID NO: 283007 - DNA, 25 bp, Probe Sequence
tgagaataaatattggggttgtcaa

SEQ ID NO: 283008 - DNA, 25 bp, Probe Sequence
tgaggataaatatggctgggcgtgt

SEQ ID NO: 283009 - DNA, 25 bp, Probe Sequence
tgatgtcaaaatggggctggtcttc

SEQ ID NO: 283010 - DNA, 25 bp, Probe Sequence
tgatgtcaagactaccgatggttac

SEQ ID NO: 283011 - DNA, 25 bp, Probe Sequence
tgatgtcaagaccctctatgagact

SEQ ID NO: 283012 - DNA, 25 bp, Probe Sequence
tgatgacatgaacctctcggagtcc

SEQ ID NO: 283013 - DNA, 25 bp, Probe Sequence
tgagcacgtattctcgtgaagcccc

SEQ ID NO: 283014 - DNA, 25 bp, Probe Sequence
tgatgggtataccatctggccccac

SEQ ID NO: 283015 - DNA, 25 bp, Probe Sequence
tgcatgggtatgttgcagacccccc

SEQ ID NO: 283016 - DNA, 25 bp, Probe Sequence
tgagattgtctgttcagtttcccca

SEQ ID NO: 283017 - DNA, 25 bp, Probe Sequence
tgagattgtgcagaccctgtctcta

SEQ ID NO: 283018 - DNA, 25 bp, Probe Sequence
tgatgtcatggtgatgcccaatctc

SEQ ID NO: 283019 - DNA, 25 bp, Probe Sequence
tgatgtgcttgtgatgcccaatctc

SEQ ID NO: 283020 - DNA, 25 bp, Probe Sequence
tgatgtgcttgtgatgcccaatctc

SEQ ID NO: 283021 - DNA, 25 bp, Probe Sequence
tgatgtgcttgtgatgcccaatctc

SEQ ID NO: 283022 - DNA, 25 bp, Probe Sequence
tgatgtggtcatttgtcctgatgcc

SEQ ID NO: 283023 - DNA, 25 bp, Probe Sequence
tgatggtggatacgctcttgatctc

SEQ ID NO: 283024 - DNA, 25 bp, Probe Sequence
tgatggtggtggcctgtaatcccag

SEQ ID NO: 283025 - DNA, 25 bp, Probe Sequence
tgaggttgcagtcctggaacccatc

SEQ ID NO: 283026 - DNA, 25 bp, Probe Sequence
tgaggtctcttgagggagcttagcc

SEQ ID NO: 283027 - DNA, 25 bp, Probe Sequence
tgcggttttcagaggcagcttttgc

SEQ ID NO: 283028 - DNA, 25 bp, Probe Sequence
tgatggtgtttatggttcttttgca

SEQ ID NO: 283029 - DNA, 25 bp, Probe Sequence
tgatgggccctatggttttctagag

SEQ ID NO: 283030 - DNA, 25 bp, Probe Sequence
tgatggggcccttggattctttggg

SEQ ID NO: 283031 - DNA, 25 bp, Probe Sequence
tgatggtgtcctttagggctcttgg

SEQ ID NO: 283032 - DNA, 25 bp, Probe Sequence
tgatgtttccatatagcttgctctc

SEQ ID NO: 283033 - DNA, 25 bp, Probe Sequence
tgagttttgtccatgctggtgtctg

SEQ ID NO: 283034 - DNA, 25 bp, Probe Sequence
tgagcccgtttcatcatggtttggt

SEQ ID NO: 283035 - DNA, 25 bp, Probe Sequence
tgacctcgttatcacatgagcttat

SEQ ID NO: 283036 - DNA, 25 bp, Probe Sequence
tgagaccacttgtaactgagctaac

SEQ ID NO: 283037 - DNA, 25 bp, Probe Sequence
tgatgacagaccgagacactgtctc

SEQ ID NO: 283038 - DNA, 25 bp, Probe Sequence
tgatgacatctcacaggtcttgcct

SEQ ID NO: 283039 - DNA, 25 bp, Probe Sequence
tgatggctctgcagaggacccattc

SEQ ID NO: 283040 - DNA, 25 bp, Probe Sequence
tgatgtgggaggagacagccaacct

SEQ ID NO: 283041 - DNA, 25 bp, Probe Sequence
tgatgtgtgcggaggacacccacag

SEQ ID NO: 283042 - DNA, 25 bp, Probe Sequence
tgagggcaagcagggcaagccccgc

SEQ ID NO: 283043 - DNA, 25 bp, Probe Sequence
tgatgtggccaaggtcaacaccctg

SEQ ID NO: 283044 - DNA, 25 bp, Probe Sequence
tgaggagaccacctcaaatgcctgt

SEQ ID NO: 283045 - DNA, 25 bp, Probe Sequence
tgagggagcctcccgaaggattaaa

SEQ ID NO: 283046 - DNA, 25 bp, Probe Sequence
tgaggtagctttggccaatggattc

SEQ ID NO: 283047 - DNA, 25 bp, Probe Sequence
tgaggtcagctttctgcctcataac

SEQ ID NO: 283048 - DNA, 25 bp, Probe Sequence
tgagtgtagtgacgcatgccctcaa

SEQ ID NO: 283049 - DNA, 25 bp, Probe Sequence
tgatgtaacagactctcctctcaaa

SEQ ID NO: 283050 - DNA, 25 bp, Probe Sequence
tgatgtaacatgtgatacatacaaa

SEQ ID NO: 283051 - DNA, 25 bp, Probe Sequence
tgatgtgaattctgaactgagacag

SEQ ID NO: 283052 - DNA, 25 bp, Probe Sequence
tgatgtatcatgatagtcacaaacg

SEQ ID NO: 283053 - DNA, 25 bp, Probe Sequence
tgatgtgtcattaagtgcagaaata

SEQ ID NO: 283054 - DNA, 25 bp, Probe Sequence
tgatgtgtcattaagtgcagaaata

SEQ ID NO: 283055 - DNA, 25 bp, Probe Sequence
tgatgagtatctaggatgccatgat

SEQ ID NO: 283056 - DNA, 25 bp, Probe Sequence
tgatggttccatcgatgcctgtaaa

SEQ ID NO: 283057 - DNA, 25 bp, Probe Sequence
tgagcttattatggaccgtcattga

SEQ ID NO: 283058 - DNA, 25 bp, Probe Sequence
tgacctgaatgatggccggggaagc

SEQ ID NO: 283059 - DNA, 25 bp, Probe Sequence
tgacctaaacgccaggggagagagg

SEQ ID NO: 283060 - DNA, 25 bp, Probe Sequence
tgacccctagcccattagggacact

SEQ ID NO: 283061 - DNA, 25 bp, Probe Sequence
tgagtccactttattctggggcact

SEQ ID NO: 283062 - DNA, 25 bp, Probe Sequence
tagccggctttgaggtggaggccat

SEQ ID NO: 283063 - DNA, 25 bp, Probe Sequence
tgagggtcttcgaggctgtggaaca

SEQ ID NO: 283064 - DNA, 25 bp, Probe Sequence
tgaggtgtctgagagggctgaggtg

SEQ ID NO: 283065 - DNA, 25 bp, Probe Sequence
tgaggagactacagcaggtgaacag

SEQ ID NO: 283066 - DNA, 25 bp, Probe Sequence
tgaggagatcccggacgagaccatg

SEQ ID NO: 283067 - DNA, 25 bp, Probe Sequence
tgaggtgacccagctgctgaacacc

SEQ ID NO: 283068 - DNA, 25 bp, Probe Sequence
tgaggctacccagattgacaacgta

SEQ ID NO: 283069 - DNA, 25 bp, Probe Sequence
tgaggggccacaaaataaacttcac

SEQ ID NO: 283070 - DNA, 25 bp, Probe Sequence
taggctaccaaccaaaagaagtcca

SEQ ID NO: 283071 - DNA, 25 bp, Probe Sequence
tcagaggaaaacccaaagccagaca

SEQ ID NO: 283072 - DNA, 25 bp, Probe Sequence
tgagatggaagagctgccaaagcca

SEQ ID NO: 283073 - DNA, 25 bp, Probe Sequence
tgagtgccgagactgtgccaaggcc

SEQ ID NO: 283074 - DNA, 25 bp, Probe Sequence
tgaggccaagactggcgctgacacc

SEQ ID NO: 283075 - DNA, 25 bp, Probe Sequence
tgaggccaagactggcgctgacacc

SEQ ID NO: 283076 - DNA, 25 bp, Probe Sequence
tgaggccaagactggcgctgacacc

SEQ ID NO: 283077 - DNA, 25 bp, Probe Sequence
tgaggaccagcagatggccagtcac

SEQ ID NO: 283078 - DNA, 25 bp, Probe Sequence
tgaggactgcaagaggagagctagc

SEQ ID NO: 283079 - DNA, 25 bp, Probe Sequence
tgatggcagtgctcaagtgacctct

SEQ ID NO: 283080 - DNA, 25 bp, Probe Sequence
tgatgtgcacgctctttgtgctggc

SEQ ID NO: 283081 - DNA, 25 bp, Probe Sequence
tgaggcatcacatgccttctgctag

SEQ ID NO: 283082 - DNA, 25 bp, Probe Sequence
tgaggcctatggcttcatcatcaaa

SEQ ID NO: 283083 - DNA, 25 bp, Probe Sequence
tgaggccaatggatcactcttgatt

SEQ ID NO: 283084 - DNA, 25 bp, Probe Sequence
tgatggattgtggataactctgttt

SEQ ID NO: 283085 - DNA, 25 bp, Probe Sequence
tgagtgttgtccatcagtctgattt

SEQ ID NO: 283086 - DNA, 25 bp, Probe Sequence
tgagctttgaaactagtggttttta

SEQ ID NO: 283087 - DNA, 25 bp, Probe Sequence
tgaggttaaacatctctctctcttt

SEQ ID NO: 283088 - DNA, 25 bp, Probe Sequence
tgagggtaaggttatctgtctgata

SEQ ID NO: 283089 - DNA, 25 bp, Probe Sequence
tgatgtggtagggtaatcttgtttg

SEQ ID NO: 283090 - DNA, 25 bp, Probe Sequence
tgatgtagtagtcaacatttttatt

SEQ ID NO: 283091 - DNA, 25 bp, Probe Sequence
tgaggagaagtttcttatttggagt

SEQ ID NO: 283092 - DNA, 25 bp, Probe Sequence
tgagacggagttttcgctcttgttg

SEQ ID NO: 283093 - DNA, 25 bp, Probe Sequence
tgaggcgtgaggactcgcagtcagg

SEQ ID NO: 283094 - DNA, 25 bp, Probe Sequence
tgatggggcaggaccgatgccagcc

SEQ ID NO: 283095 - DNA, 25 bp, Probe Sequence
tgatggaagatggtccgtgcccagg

SEQ ID NO: 283096 - DNA, 25 bp, Probe Sequence
tgaggagaggagtcactgtcaccag

SEQ ID NO: 283097 - DNA, 25 bp, Probe Sequence
tgaggaagctgagtctttcaccaat

SEQ ID NO: 283098 - DNA, 25 bp, Probe Sequence
tgaggaagggccatgtgacccagct

SEQ ID NO: 283099 - DNA, 25 bp, Probe Sequence
tgacgttcgaggaggaggcacagct

SEQ ID NO: 283100 - DNA, 25 bp, Probe Sequence
tgactggttgagcgggcaggccagc

SEQ ID NO: 283101 - DNA, 25 bp, Probe Sequence
tgactggattggtgaggcccgtgtg

SEQ ID NO: 283102 - DNA, 25 bp, Probe Sequence
tgagtgctttagtgagtcctcagcc

SEQ ID NO: 283103 - DNA, 25 bp, Probe Sequence
tatggttcctttggtcgctcgctcc

SEQ ID NO: 283104 - DNA, 25 bp, Probe Sequence
tgaggttcccttgtgagcttgaatc

SEQ ID NO: 283105 - DNA, 25 bp, Probe Sequence
tgaggttccttgtacgattgtagat

SEQ ID NO: 283106 - DNA, 25 bp, Probe Sequence
tgagctgtttcctcacaattggcga

SEQ ID NO: 283107 - DNA, 25 bp, Probe Sequence
tgacgagctgacgggcttttagcag

SEQ ID NO: 283108 - DNA, 25 bp, Probe Sequence
tgaggaggactcacttcttgaagat

SEQ ID NO: 283109 - DNA, 25 bp, Probe Sequence
tgatgggatatttttcatttgaaac

SEQ ID NO: 283110 - DNA, 25 bp, Probe Sequence
tgatggtaatattctatccttatga

SEQ ID NO: 283111 - DNA, 25 bp, Probe Sequence
tgaggtaaatatcatcctctgccag

SEQ ID NO: 283112 - DNA, 25 bp, Probe Sequence
tgagggaagataaatcctttctgat

SEQ ID NO: 283113 - DNA, 25 bp, Probe Sequence
tgagtgggcagctcccaatgtctta

SEQ ID NO: 283114 - DNA, 25 bp, Probe Sequence
tgagtggcgcagagccgggtttcat

SEQ ID NO: 283115 - DNA, 25 bp, Probe Sequence
tgagtgaggagtgcggggagcttct

SEQ ID NO: 283116 - DNA, 25 bp, Probe Sequence
tgaggacgagtggagaggagatttc

SEQ ID NO: 283117 - DNA, 25 bp, Probe Sequence
tgaggacacactggggcgcaggttc

SEQ ID NO: 283118 - DNA, 25 bp, Probe Sequence
tgaggaacggccaggaggcttcgcc

SEQ ID NO: 283119 - DNA, 25 bp, Probe Sequence
tgaggccaccccatgtggggtctgt

SEQ ID NO: 283120 - DNA, 25 bp, Probe Sequence
tgagactcagccgctgtctcgccgt

SEQ ID NO: 283121 - DNA, 25 bp, Probe Sequence
tgagacctcctgtaatgtcgcaagg

SEQ ID NO: 283122 - DNA, 25 bp, Probe Sequence
tgatgtccctgtcttgtgggagatg

SEQ ID NO: 283123 - DNA, 25 bp, Probe Sequence
tgagtccctgtttggttgctgatga

SEQ ID NO: 283124 - DNA, 25 bp, Probe Sequence
tgaggctcctggaggtgctcatcag

SEQ ID NO: 283125 - DNA, 25 bp, Probe Sequence
tgatggcggaggtcagggcctcact

SEQ ID NO: 283126 - DNA, 25 bp, Probe Sequence
tgagggagatgccatgagccgccca

SEQ ID NO: 283127 - DNA, 25 bp, Probe Sequence
tgagggagatgccatgagccgccca

SEQ ID NO: 283128 - DNA, 25 bp, Probe Sequence
tgaggctacagcaatgcaccgggca

SEQ ID NO: 283129 - DNA, 25 bp, Probe Sequence
tgatggctatgccttgcacacaggt

SEQ ID NO: 283130 - DNA, 25 bp, Probe Sequence
tgaggcatatgctagtcgatagagc

SEQ ID NO: 283131 - DNA, 25 bp, Probe Sequence
tgatggcttgagtcagctgcagggc

SEQ ID NO: 283132 - DNA, 25 bp, Probe Sequence
tgatggttgcatcagcatttctgct

SEQ ID NO: 283133 - DNA, 25 bp, Probe Sequence
tgatgggtgtcaacacttctgcctc

SEQ ID NO: 283134 - DNA, 25 bp, Probe Sequence
tgagggctgtcgagtgagctgcccc

SEQ ID NO: 283135 - DNA, 25 bp, Probe Sequence
tgaggcacagtaatcctggctgcag

SEQ ID NO: 283136 - DNA, 25 bp, Probe Sequence
tgatggccagattgtctgctgcctt

SEQ ID NO: 283137 - DNA, 25 bp, Probe Sequence
tgatggcatccactatgatccactt

SEQ ID NO: 283138 - DNA, 25 bp, Probe Sequence
tgaggcatgcatttaatcctctgcc

SEQ ID NO: 283139 - DNA, 25 bp, Probe Sequence
tgaggctcacgagttcctcatgtgc

SEQ ID NO: 283140 - DNA, 25 bp, Probe Sequence
tgaggtcaggagcccctgagcagtg

SEQ ID NO: 283141 - DNA, 25 bp, Probe Sequence
tgaggtcaggagcccctgagcagtg

SEQ ID NO: 283142 - DNA, 25 bp, Probe Sequence
tgaggtcaggagcccctgagcagtg

SEQ ID NO: 283143 - DNA, 25 bp, Probe Sequence
tgaggtcaggagcccctgagcagtg

SEQ ID NO: 283144 - DNA, 25 bp, Probe Sequence
tgagtagctgggaccacaggcgtgc

SEQ ID NO: 283145 - DNA, 25 bp, Probe Sequence
tgagtagctgggactacaggcgccc

SEQ ID NO: 283146 - DNA, 25 bp, Probe Sequence
tgagagactgcgcatctttgctctg

SEQ ID NO: 283147 - DNA, 25 bp, Probe Sequence
tgaggatgtggccacttgacttgtg

SEQ ID NO: 283148 - DNA, 25 bp, Probe Sequence
tgaggagggtcacctgatctgtcag

SEQ ID NO: 283149 - DNA, 25 bp, Probe Sequence
tgagggggcttgcttggtatgctta

SEQ ID NO: 283150 - DNA, 25 bp, Probe Sequence
tgagaggggccgcatggatgttgct

SEQ ID NO: 283151 - DNA, 25 bp, Probe Sequence
tgagtggagggccacatggcttctg

SEQ ID NO: 283152 - DNA, 25 bp, Probe Sequence
tgagtgcggagacagcttctctcac

SEQ ID NO: 283153 - DNA, 25 bp, Probe Sequence
tgagatccgtgagatccttccatct

SEQ ID NO: 283154 - DNA, 25 bp, Probe Sequence
tgaggcctgtgagagctgtgtcctg

SEQ ID NO: 283155 - DNA, 25 bp, Probe Sequence
tgaccagcactgtctcagtttcact

SEQ ID NO: 283156 - DNA, 25 bp, Probe Sequence
tgagtaacatgcccagtttcctttc

SEQ ID NO: 283157 - DNA, 25 bp, Probe Sequence
tgagtaaatgccggcttaccatctc

SEQ ID NO: 283158 - DNA, 25 bp, Probe Sequence
tgagtcaaatgccccctgagtgact

SEQ ID NO: 283159 - DNA, 25 bp, Probe Sequence
tgagtcaaatgccccctgagtgact

SEQ ID NO: 283160 - DNA, 25 bp, Probe Sequence
tgagtcagaaggccccgtgatacaa

SEQ ID NO: 283161 - DNA, 25 bp, Probe Sequence
tgagcaagtcaaccccaatctggaa

SEQ ID NO: 283162 - DNA, 25 bp, Probe Sequence
tgactagctatactccaactttact

SEQ ID NO: 283163 - DNA, 25 bp, Probe Sequence
tgaccagttacccttgtgtatcctg

SEQ ID NO: 283164 - DNA, 25 bp, Probe Sequence
tgacaagttcctattgttgcccttc

SEQ ID NO: 283165 - DNA, 25 bp, Probe Sequence
tgagaagatcttttctttttccttt

SEQ ID NO: 283166 - DNA, 25 bp, Probe Sequence
tgagatagttggttcttttacccca

SEQ ID NO: 283167 - DNA, 25 bp, Probe Sequence
tgagatcaaactgttatttaccaac

SEQ ID NO: 283168 - DNA, 25 bp, Probe Sequence
tgagaacagacgggaagcgtacgaa

SEQ ID NO: 283169 - DNA, 25 bp, Probe Sequence
tgaataatccgccagaacgaccaga

SEQ ID NO: 283170 - DNA, 25 bp, Probe Sequence
tgagataaagtccaatgcccaacac

SEQ ID NO: 283171 - DNA, 25 bp, Probe Sequence
tgagtagaaaccagcaccagcacag

SEQ ID NO: 283172 - DNA, 25 bp, Probe Sequence
tgaggcagccaagctacatccagaa

SEQ ID NO: 283173 - DNA, 25 bp, Probe Sequence
tgagtgataagtgtcagatcaataa

SEQ ID NO: 283174 - DNA, 25 bp, Probe Sequence
tgaggttcactctttgtgctacaaa

SEQ ID NO: 283175 - DNA, 25 bp, Probe Sequence
tgaggaatccttttcatatgaagaa

SEQ ID NO: 283176 - DNA, 25 bp, Probe Sequence
tgatggagctccgaatgtgcttaag

SEQ ID NO: 283177 - DNA, 25 bp, Probe Sequence
tgaggagccctgacatggtgaccag

SEQ ID NO: 283178 - DNA, 25 bp, Probe Sequence
tgaggaccacatacactgctgtccc

SEQ ID NO: 283179 - DNA, 25 bp, Probe Sequence
tgaggaccacatacactgctgtccc

SEQ ID NO: 283180 - DNA, 25 bp, Probe Sequence
tgaggtccatgctagcaagcttcct

SEQ ID NO: 283181 - DNA, 25 bp, Probe Sequence
tgagcgtgaatctgtatcttgccgg

SEQ ID NO: 283182 - DNA, 25 bp, Probe Sequence
tgaggctgattcgggagctagccga

SEQ ID NO: 283183 - DNA, 25 bp, Probe Sequence
tgaggctgagtgcagtggctcacac

SEQ ID NO: 283184 - DNA, 25 bp, Probe Sequence
tgagacattagccagtagctcactc

SEQ ID NO: 283185 - DNA, 25 bp, Probe Sequence
tgagactaaggctatctgcttccct

SEQ ID NO: 283186 - DNA, 25 bp, Probe Sequence
tgaggctgagggttttgctgccact

SEQ ID NO: 283187 - DNA, 25 bp, Probe Sequence
tgaggcaggaggaccatctgagccc

SEQ ID NO: 283188 - DNA, 25 bp, Probe Sequence
tgaggcaggagaatggcatgaacct

SEQ ID NO: 283189 - DNA, 25 bp, Probe Sequence
tgaggcaggagaatggcgtgaaccc

SEQ ID NO: 283190 - DNA, 25 bp, Probe Sequence
tgaggcaggagaatggcgtgaaccc

SEQ ID NO: 283191 - DNA, 25 bp, Probe Sequence
tgaggcaggagaatggcgtgaaccc

SEQ ID NO: 283192 - DNA, 25 bp, Probe Sequence
tgaggcaggagaatggcgtgaaccc

SEQ ID NO: 283193 - DNA, 25 bp, Probe Sequence
tgaggcaggagaatggcgtgaaccc

SEQ ID NO: 283194 - DNA, 25 bp, Probe Sequence
tgaggcaggagaatggcgtgaaccc

SEQ ID NO: 283195 - DNA, 25 bp, Probe Sequence
tgagacaggagaatcccttgaacct

SEQ ID NO: 283196 - DNA, 25 bp, Probe Sequence
tgcaaagaaattcgccttggccaac

SEQ ID NO: 283197 - DNA, 25 bp, Probe Sequence
tgaactaaagtttgtctggcgatac

SEQ ID NO: 283198 - DNA, 25 bp, Probe Sequence
tgaagcgaacatctgggtggttagc

SEQ ID NO: 283199 - DNA, 25 bp, Probe Sequence
tgagctaaaagctgtggtatgttag

SEQ ID NO: 283200 - DNA, 25 bp, Probe Sequence
tgagcccacccagaggttgttggag

SEQ ID NO: 283201 - DNA, 25 bp, Probe Sequence
taggaagcccacaaggttctgggcc

SEQ ID NO: 283202 - DNA, 25 bp, Probe Sequence
tgacgtccccagaagtttctgggtc

SEQ ID NO: 283203 - DNA, 25 bp, Probe Sequence
tgaccccacctgaaattcttggcca

SEQ ID NO: 283204 - DNA, 25 bp, Probe Sequence
tgacgcccacccaggttaagaatag

SEQ ID NO: 283205 - DNA, 25 bp, Probe Sequence
tgagcccccgtatgagaataaatat

SEQ ID NO: 283206 - DNA, 25 bp, Probe Sequence
tgaccccatttatgtgtaggagcac

SEQ ID NO: 283207 - DNA, 25 bp, Probe Sequence
tgaccccatttatgtgtaggagcac

SEQ ID NO: 283208 - DNA, 25 bp, Probe Sequence
tgaacccatgttaattttggaccct

SEQ ID NO: 283209 - DNA, 25 bp, Probe Sequence
tgagtccactgctccatttataacc

SEQ ID NO: 283210 - DNA, 25 bp, Probe Sequence
tgaggccatgcttaatatatttata

SEQ ID NO: 283211 - DNA, 25 bp, Probe Sequence
tgaggcttgtgatctgagtaattag

SEQ ID NO: 283212 - DNA, 25 bp, Probe Sequence
tgaggctgtgtatgctgacgtgctt

SEQ ID NO: 283213 - DNA, 25 bp, Probe Sequence
tgagtggctgcttaggacgttttcg

SEQ ID NO: 283214 - DNA, 25 bp, Probe Sequence
tgaggagtgcggggagcttctcctg

SEQ ID NO: 283215 - DNA, 25 bp, Probe Sequence
tgagtgggggattgcagcttccctc

SEQ ID NO: 283216 - DNA, 25 bp, Probe Sequence
tgaggcaggcggagcacttgaggtc

SEQ ID NO: 283217 - DNA, 25 bp, Probe Sequence
tgacttggctggcaactctgaagtc

SEQ ID NO: 283218 - DNA, 25 bp, Probe Sequence
tgacctggtggaggctttgaagaga

SEQ ID NO: 283219 - DNA, 25 bp, Probe Sequence
tgatggcggcgttaggtttgagaga

SEQ ID NO: 283220 - DNA, 25 bp, Probe Sequence
tgagactgtcgcagaggctgtctgg

SEQ ID NO: 283221 - DNA, 25 bp, Probe Sequence
tgagtctgtccagagtgcttgctac

SEQ ID NO: 283222 - DNA, 25 bp, Probe Sequence
tgagtctgtccagagtgcttgctac

SEQ ID NO: 283223 - DNA, 25 bp, Probe Sequence
tgaggtgtgacaccagtttgctcca

SEQ ID NO: 283224 - DNA, 25 bp, Probe Sequence
tgagttggaatcggtttgcatttac

SEQ ID NO: 283225 - DNA, 25 bp, Probe Sequence
tgagctgctggttcactcttcagca

SEQ ID NO: 283226 - DNA, 25 bp, Probe Sequence
tgacgctggtcattatcttgctgca

SEQ ID NO: 283227 - DNA, 25 bp, Probe Sequence
tgacctgtgttgcagcctgagatgc

SEQ ID NO: 283228 - DNA, 25 bp, Probe Sequence
tgagcactggttagtactggtcccc

SEQ ID NO: 283229 - DNA, 25 bp, Probe Sequence
tgagatgtgtttatatctggttcta

SEQ ID NO: 283230 - DNA, 25 bp, Probe Sequence
tgagtgctattgtattttggcttgg

SEQ ID NO: 283231 - DNA, 25 bp, Probe Sequence
tgagtgttcgatatttgctataggt

SEQ ID NO: 283232 - DNA, 25 bp, Probe Sequence
tgaggtccacagactatttgaagga

SEQ ID NO: 283233 - DNA, 25 bp, Probe Sequence
tgaggtcctaggatttgcacaccac

SEQ ID NO: 283234 - DNA, 25 bp, Probe Sequence
tgaggatgcctgcagaacggcctgc

SEQ ID NO: 283235 - DNA, 25 bp, Probe Sequence
tgagtgctgccagagagtctcaccc

SEQ ID NO: 283236 - DNA, 25 bp, Probe Sequence
tgaggggcagctagacttcaccccc

SEQ ID NO: 283237 - DNA, 25 bp, Probe Sequence
tgaggggcagctagacttcaccccc

SEQ ID NO: 283238 - DNA, 25 bp, Probe Sequence
tgagaaagacttcgctgagcacctc

SEQ ID NO: 283239 - DNA, 25 bp, Probe Sequence
tgagtaagcctttagaactttctga

SEQ ID NO: 283240 - DNA, 25 bp, Probe Sequence
tagtaggttccataaatgcccgaca

SEQ ID NO: 283241 - DNA, 25 bp, Probe Sequence
tgagtagagttaggaaaaccacgta

SEQ ID NO: 283242 - DNA, 25 bp, Probe Sequence
tgagttcagttgttataaaccattg

SEQ ID NO: 283243 - DNA, 25 bp, Probe Sequence
tgcagttagtaaatcataagcccaa

SEQ ID NO: 283244 - DNA, 25 bp, Probe Sequence
tgcttgtagtcatggccagggccaa

SEQ ID NO: 283245 - DNA, 25 bp, Probe Sequence
tgcttctaaggggtggtggccacca

SEQ ID NO: 283246 - DNA, 25 bp, Probe Sequence
tgagttaggtaggtgggcgctgccc

SEQ ID NO: 283247 - DNA, 25 bp, Probe Sequence
tgagttcagttagctcatgggccgg

SEQ ID NO: 283248 - DNA, 25 bp, Probe Sequence
tgagtccgacaaccattggggtggg

SEQ ID NO: 283249 - DNA, 25 bp, Probe Sequence
tgagctccccatcaccatgggaggt

SEQ ID NO: 283250 - DNA, 25 bp, Probe Sequence
tgagctccccatcaccatgggaggt

SEQ ID NO: 283251 - DNA, 25 bp, Probe Sequence
tgaccggcttagcactgagggcagt

SEQ ID NO: 283252 - DNA, 25 bp, Probe Sequence
tgactcgtgctgtgacttcggaagt

SEQ ID NO: 283253 - DNA, 25 bp, Probe Sequence
tgactgggtgaagatccgggagcgg

SEQ ID NO: 283254 - DNA, 25 bp, Probe Sequence
tgagcgggtgaagtgccactgggtc

SEQ ID NO: 283255 - DNA, 25 bp, Probe Sequence
tgagatgggaggatccctggagccc

SEQ ID NO: 283256 - DNA, 25 bp, Probe Sequence
tgaggtggaacaatcgcccaagccc

SEQ ID NO: 283257 - DNA, 25 bp, Probe Sequence
tgagtgggagactttgctcctggcc

SEQ ID NO: 283258 - DNA, 25 bp, Probe Sequence
tgagtgggaatatctgctctctgtt

SEQ ID NO: 283259 - DNA, 25 bp, Probe Sequence
tgagtgaggccattcttcatcctta

SEQ ID NO: 283260 - DNA, 25 bp, Probe Sequence
tgagatgcaggatttcctcacgcct

SEQ ID NO: 283261 - DNA, 25 bp, Probe Sequence
tgagacagaaattggacacatcctt

SEQ ID NO: 283262 - DNA, 25 bp, Probe Sequence
tagacaaaaaccacatactaatttg

SEQ ID NO: 283263 - DNA, 25 bp, Probe Sequence
tgagaaagctaagccctacatttct

SEQ ID NO: 283264 - DNA, 25 bp, Probe Sequence
tgaggaagtcactactcctagcctt

SEQ ID NO: 283265 - DNA, 25 bp, Probe Sequence
tgagatggagtctcactctgtcacc

SEQ ID NO: 283266 - DNA, 25 bp, Probe Sequence
tgagacagaatctcgctctgtcgcc

SEQ ID NO: 283267 - DNA, 25 bp, Probe Sequence
tgaggcagagtcttgttctgtcgcc

SEQ ID NO: 283268 - DNA, 25 bp, Probe Sequence
tgaggagagggtagtcagcatctcc

SEQ ID NO: 283269 - DNA, 25 bp, Probe Sequence
tgagggagtgagtgctctgcaccct

SEQ ID NO: 283270 - DNA, 25 bp, Probe Sequence
tgagggactgtgttgactgacgagc

SEQ ID NO: 283271 - DNA, 25 bp, Probe Sequence
tgagcccagcgtttgacgtcaggca

SEQ ID NO: 283272 - DNA, 25 bp, Probe Sequence
tgagcccaggtagtccagctctggg

SEQ ID NO: 283273 - DNA, 25 bp, Probe Sequence
tgagcctcagagtaatcccagcggc

SEQ ID NO: 283274 - DNA, 25 bp, Probe Sequence
tgagaccaagatcacccaagtcctg

SEQ ID NO: 283275 - DNA, 25 bp, Probe Sequence
tgagaccaagatcacccaagtcctg

SEQ ID NO: 283276 - DNA, 25 bp, Probe Sequence
tgagaccaagatcacccaagtcctg

SEQ ID NO: 283277 - DNA, 25 bp, Probe Sequence
tgaggcacattacagcaccaagaac

SEQ ID NO: 283278 - DNA, 25 bp, Probe Sequence
tgagccagcattaagacctgctaag

SEQ ID NO: 283279 - DNA, 25 bp, Probe Sequence
tgacgcagctgtgatatgcaccaga

SEQ ID NO: 283280 - DNA, 25 bp, Probe Sequence
tgaccaggccaagactcaagcctcc

SEQ ID NO: 283281 - DNA, 25 bp, Probe Sequence
tgaccaggcactaccgtaaacacac

SEQ ID NO: 283282 - DNA, 25 bp, Probe Sequence
tgactcttgcctgcctaacaaaata

SEQ ID NO: 283283 - DNA, 25 bp, Probe Sequence
tgagatcttactgcttgtcacttga

SEQ ID NO: 283284 - DNA, 25 bp, Probe Sequence
tgagggtatccagtatctccgtgat

SEQ ID NO: 283285 - DNA, 25 bp, Probe Sequence
tgagggtatccagtatctccgtgat

SEQ ID NO: 283286 - DNA, 25 bp, Probe Sequence
tgagggtagccagtatctccgtgat

SEQ ID NO: 283287 - DNA, 25 bp, Probe Sequence
tgagtgatgtcaccatttctacctg

SEQ ID NO: 283288 - DNA, 25 bp, Probe Sequence
tgaggtggttctttctatcctagta

SEQ ID NO: 283289 - DNA, 25 bp, Probe Sequence
tgagggaggctggacctattctact

SEQ ID NO: 283290 - DNA, 25 bp, Probe Sequence
tgaggatgaggtggaacgtgtggtc

SEQ ID NO: 283291 - DNA, 25 bp, Probe Sequence
tgagacgggcatgaactgctgggtc

SEQ ID NO: 283292 - DNA, 25 bp, Probe Sequence
tgagccggtcaggcacacaaggggc

SEQ ID NO: 283293 - DNA, 25 bp, Probe Sequence
tgactccccagcaaacacaaggtgc

SEQ ID NO: 283294 - DNA, 25 bp, Probe Sequence
tgacctcggcagagaagtagtgtcc

SEQ ID NO: 283295 - DNA, 25 bp, Probe Sequence
tgacctccgatgagtagtgacaccg

SEQ ID NO: 283296 - DNA, 25 bp, Probe Sequence
tgacgctgggcacgttgagtgaatc

SEQ ID NO: 283297 - DNA, 25 bp, Probe Sequence
tgagctgcatggtagttggggatcc

SEQ ID NO: 283298 - DNA, 25 bp, Probe Sequence
tgactctgtacaggatggggccgtc

SEQ ID NO: 283299 - DNA, 25 bp, Probe Sequence
tgagtcatggccgggtgggcggcac

SEQ ID NO: 283300 - DNA, 25 bp, Probe Sequence
tgagtgtgacttgggctaaaggccc

SEQ ID NO: 283301 - DNA, 25 bp, Probe Sequence
tgacggcaagacggtaaaggcccgc

SEQ ID NO: 283302 - DNA, 25 bp, Probe Sequence
tgacttctatgtcggtataatggcc

SEQ ID NO: 283303 - DNA, 25 bp, Probe Sequence
tgacctcaaggtcctaaatgcccag

SEQ ID NO: 283304 - DNA, 25 bp, Probe Sequence
tgactttacgtcttatacatcttag

SEQ ID NO: 283305 - DNA, 25 bp, Probe Sequence
tgagtcattgacttcattttatatt

SEQ ID NO: 283306 - DNA, 25 bp, Probe Sequence
tgagtgtacacatcattaatgagac

SEQ ID NO: 283307 - DNA, 25 bp, Probe Sequence
tgaggatggatctgcagatagtaga

SEQ ID NO: 283308 - DNA, 25 bp, Probe Sequence
tgaggatgttctggaagagctgaca

SEQ ID NO: 283309 - DNA, 25 bp, Probe Sequence
tgagtgtagtcagaaatcatgaccc

SEQ ID NO: 283310 - DNA, 25 bp, Probe Sequence
tgaggtggaagcttacacatctccc

SEQ ID NO: 283311 - DNA, 25 bp, Probe Sequence
tgagtgtggaccctaacacctggca

SEQ ID NO: 283312 - DNA, 25 bp, Probe Sequence
tgaggggaaactacagcacctggaa

SEQ ID NO: 283313 - DNA, 25 bp, Probe Sequence
tgagttggaaagctcgtcctctgca

SEQ ID NO: 283314 - DNA, 25 bp, Probe Sequence
tgaggagagaaccggtgcgtcctga

SEQ ID NO: 283315 - DNA, 25 bp, Probe Sequence
tgaggggctagtgcagtggtcctga

SEQ ID NO: 283316 - DNA, 25 bp, Probe Sequence
tgaggtgtgtagaacagggtcccac

SEQ ID NO: 283317 - DNA, 25 bp, Probe Sequence
tgaggtcattaagcttcaggcccac

SEQ ID NO: 283318 - DNA, 25 bp, Probe Sequence
tgaggtctggcatctggtaggcatc

SEQ ID NO: 283319 - DNA, 25 bp, Probe Sequence
tgaggtcctcagaatggcgggcaca

SEQ ID NO: 283320 - DNA, 25 bp, Probe Sequence
tgaggatcaatcctggggaggccag

SEQ ID NO: 283321 - DNA, 25 bp, Probe Sequence
tgaggatagatgcaggcgggtgagc

SEQ ID NO: 283322 - DNA, 25 bp, Probe Sequence
tgagggcagtgcggtggaggtgagg

SEQ ID NO: 283323 - DNA, 25 bp, Probe Sequence
tgagggctgtctcaggagggagggg

SEQ ID NO: 283324 - DNA, 25 bp, Probe Sequence
tgagggagagtgcgttggagcgggg

SEQ ID NO: 283325 - DNA, 25 bp, Probe Sequence
tgagtcgagggcatgtgctgggggg

SEQ ID NO: 283326 - DNA, 25 bp, Probe Sequence
tgaggggggcactgtgcctgggagg

SEQ ID NO: 283327 - DNA, 25 bp, Probe Sequence
tgagtgagtgggggcgtgcttggga

SEQ ID NO: 283328 - DNA, 25 bp, Probe Sequence
tgagagacggtggcgcgattgggac

SEQ ID NO: 283329 - DNA, 25 bp, Probe Sequence
tagaccgaggccggttcagaacttc

SEQ ID NO: 283330 - DNA, 25 bp, Probe Sequence
taacatccggccaaaacaaccttat

SEQ ID NO: 283331 - DNA, 25 bp, Probe Sequence
tgagatatctagtcctgaaaaacct

SEQ ID NO: 283332 - DNA, 25 bp, Probe Sequence
tgagtatctaggatgccatgatgaa

SEQ ID NO: 283333 - DNA, 25 bp, Probe Sequence
tgaggagtagtcagcgtgatgccaa

SEQ ID NO: 283334 - DNA, 25 bp, Probe Sequence
tgagaagctgagtcttctgcatcag

SEQ ID NO: 283335 - DNA, 25 bp, Probe Sequence
tgagaactgcactttggatcagtta

SEQ ID NO: 283336 - DNA, 25 bp, Probe Sequence
tgaggtctcagccttggatcaggag

SEQ ID NO: 283337 - DNA, 25 bp, Probe Sequence
tgagagttaccattatgccaggcgg

SEQ ID NO: 283338 - DNA, 25 bp, Probe Sequence
tgagcagttcatcaatgcagccaag

SEQ ID NO: 283339 - DNA, 25 bp, Probe Sequence
tgagtatatatcctgcatgctgcca

SEQ ID NO: 283340 - DNA, 25 bp, Probe Sequence
tgagtacatatactgacagctcatt

SEQ ID NO: 283341 - DNA, 25 bp, Probe Sequence
tgagataatgattgtactgccatga

SEQ ID NO: 283342 - DNA, 25 bp, Probe Sequence
tgagcatgaagctagctcatccctg

SEQ ID NO: 283343 - DNA, 25 bp, Probe Sequence
tgagatgccagcggcatagcccttc

SEQ ID NO: 283344 - DNA, 25 bp, Probe Sequence
tgagtgcagcactcatacctttctt

SEQ ID NO: 283345 - DNA, 25 bp, Probe Sequence
tgagctggcagagtctaagtgttct

SEQ ID NO: 283346 - DNA, 25 bp, Probe Sequence
tgagatggctgtgcatgactggaaa

SEQ ID NO: 283347 - DNA, 25 bp, Probe Sequence
tgagggtgtgtaccagtgccatgca

SEQ ID NO: 283348 - DNA, 25 bp, Probe Sequence
tgagagagtgatgcccatctgccta

SEQ ID NO: 283349 - DNA, 25 bp, Probe Sequence
tgagagagtgatgcccatctgccta

SEQ ID NO: 283350 - DNA, 25 bp, Probe Sequence
tgagtcagatgattccattctccga

SEQ ID NO: 283351 - DNA, 25 bp, Probe Sequence
tgagagtagacatattgccccattc

SEQ ID NO: 283352 - DNA, 25 bp, Probe Sequence
tgagcaccagactgtatacccttct

SEQ ID NO: 283353 - DNA, 25 bp, Probe Sequence
tgagagactggcaggaaccgagtct

SEQ ID NO: 283354 - DNA, 25 bp, Probe Sequence
tgaagacggacagtgactcggacct

SEQ ID NO: 283355 - DNA, 25 bp, Probe Sequence
tgacgagcggaggaacgccgagcag

SEQ ID NO: 283356 - DNA, 25 bp, Probe Sequence
tgagctgaaggccagcaacccggac

SEQ ID NO: 283357 - DNA, 25 bp, Probe Sequence
tgagggagtgcagaacacctggccg

SEQ ID NO: 283358 - DNA, 25 bp, Probe Sequence
tgagggagaccccgacagaggacgc

SEQ ID NO: 283359 - DNA, 25 bp, Probe Sequence
tgagtgagaacaatccggctggaaa

SEQ ID NO: 283360 - DNA, 25 bp, Probe Sequence
tgagtgccaagcgacgtggcgggct

SEQ ID NO: 283361 - DNA, 25 bp, Probe Sequence
tgagtggggcaagtgctgggctgtg

SEQ ID NO: 283362 - DNA, 25 bp, Probe Sequence
tgagtggggcaagtgctgggctgtg

SEQ ID NO: 283363 - DNA, 25 bp, Probe Sequence
tgagtgagcggcaggtggcgctgtg

SEQ ID NO: 283364 - DNA, 25 bp, Probe Sequence
tgagaggcagtttggtggcatgcta

SEQ ID NO: 283365 - DNA, 25 bp, Probe Sequence
tgagaccttagggctggatgcagat

SEQ ID NO: 283366 - DNA, 25 bp, Probe Sequence
tgagactcttaccctgggagatatg

SEQ ID NO: 283367 - DNA, 25 bp, Probe Sequence
tgagcaccgtcatggcttaatgttt

SEQ ID NO: 283368 - DNA, 25 bp, Probe Sequence
tgagaccctcattgaccagtattta

SEQ ID NO: 283369 - DNA, 25 bp, Probe Sequence
tgagactcgattttacatgatattt

SEQ ID NO: 283370 - DNA, 25 bp, Probe Sequence
tgagattccagtggtgacttcactg

SEQ ID NO: 283371 - DNA, 25 bp, Probe Sequence
tgagctgtacgggaagtctcactgg

SEQ ID NO: 283372 - DNA, 25 bp, Probe Sequence
tgacttcacggggattccagtctcc

SEQ ID NO: 283373 - DNA, 25 bp, Probe Sequence
tgaggatacacgggacccagaatcc

SEQ ID NO: 283374 - DNA, 25 bp, Probe Sequence
tgcaggttcccataaccagtcacac

SEQ ID NO: 283375 - DNA, 25 bp, Probe Sequence
tgagctttcttatacatctcctcca

SEQ ID NO: 283376 - DNA, 25 bp, Probe Sequence
tgacttactgtttcaacaaaccaga

SEQ ID NO: 283377 - DNA, 25 bp, Probe Sequence
tgagcttactacccaacttcaaaac

SEQ ID NO: 283378 - DNA, 25 bp, Probe Sequence
tgagtttcctttaacttacaaagct

SEQ ID NO: 283379 - DNA, 25 bp, Probe Sequence
tgactctcccttgtcctataaaaaa

SEQ ID NO: 283380 - DNA, 25 bp, Probe Sequence
tgagtcaaccagcttcctagaaaaa

SEQ ID NO: 283381 - DNA, 25 bp, Probe Sequence
tgaccgactgacattcctgggaaag

SEQ ID NO: 283382 - DNA, 25 bp, Probe Sequence
tgaccggctacgactggtgggacat

SEQ ID NO: 283383 - DNA, 25 bp, Probe Sequence
tgacccgttgccagagtgcagagaa

SEQ ID NO: 283384 - DNA, 25 bp, Probe Sequence
tgacctggggcaattacatacaaac

SEQ ID NO: 283385 - DNA, 25 bp, Probe Sequence
tgagccgagggccacagacaaagat

SEQ ID NO: 283386 - DNA, 25 bp, Probe Sequence
tgagggaggcgacctgatcagggga

SEQ ID NO: 283387 - DNA, 25 bp, Probe Sequence
tgagggctggctattgagaactgga

SEQ ID NO: 283388 - DNA, 25 bp, Probe Sequence
tgagggtcactcattgagacacgca

SEQ ID NO: 283389 - DNA, 25 bp, Probe Sequence
tgagtttcaccaactgagctcacct

SEQ ID NO: 283390 - DNA, 25 bp, Probe Sequence
tgagttacaaagacagaccctgtct

SEQ ID NO: 283391 - DNA, 25 bp, Probe Sequence
tgagtttagtcacaactcctgagtg

SEQ ID NO: 283392 - DNA, 25 bp, Probe Sequence
tgagcttgtacatccaacagccatg

SEQ ID NO: 283393 - DNA, 25 bp, Probe Sequence
tgagtagtactacaggagccatgag

SEQ ID NO: 283394 - DNA, 25 bp, Probe Sequence
tgagggcacctacattgacaagaaa

SEQ ID NO: 283395 - DNA, 25 bp, Probe Sequence
tgagggcacctacattgacaagaaa

SEQ ID NO: 283396 - DNA, 25 bp, Probe Sequence
tgagctgtgttcaaaaatacatagg

SEQ ID NO: 283397 - DNA, 25 bp, Probe Sequence
tgagctgtgttcaaaaatacatagg

SEQ ID NO: 283398 - DNA, 25 bp, Probe Sequence
tgagctgtgttcaaaaatacatagg

SEQ ID NO: 283399 - DNA, 25 bp, Probe Sequence
tgagtgggtctcccaagactaggcc

SEQ ID NO: 283400 - DNA, 25 bp, Probe Sequence
tgaggggtacagcaaaggggaccct

SEQ ID NO: 283401 - DNA, 25 bp, Probe Sequence
tgagggtgtaagtcaacagggggcc

SEQ ID NO: 283402 - DNA, 25 bp, Probe Sequence
tgacgggtaaatggcccgcctggca

SEQ ID NO: 283403 - DNA, 25 bp, Probe Sequence
tgacctgttccaaagagtccctggc

SEQ ID NO: 283404 - DNA, 25 bp, Probe Sequence
tgaccaaacccaggtttctcttgct

SEQ ID NO: 283405 - DNA, 25 bp, Probe Sequence
tgagccgcagatgtgactttttttt

SEQ ID NO: 283406 - DNA, 25 bp, Probe Sequence
tgagaagggctttgctttacttttt

SEQ ID NO: 283407 - DNA, 25 bp, Probe Sequence
taaaagacgaggtatttctgtttgt

SEQ ID NO: 283408 - DNA, 25 bp, Probe Sequence
tgagaaaggcgagacacgtttttgt

SEQ ID NO: 283409 - DNA, 25 bp, Probe Sequence
tgagaaggacaagacctgtttcctt

SEQ ID NO: 283410 - DNA, 25 bp, Probe Sequence
tgaaaagaccaatccttatttcttt

SEQ ID NO: 283411 - DNA, 25 bp, Probe Sequence
tgacctagaccaacaccattttttt

SEQ ID NO: 283412 - DNA, 25 bp, Probe Sequence
tgacctgatcatgaagacctgcttt

SEQ ID NO: 283413 - DNA, 25 bp, Probe Sequence
tgagccgtgtcgtatgacctagtaa

SEQ ID NO: 283414 - DNA, 25 bp, Probe Sequence
tgagtatggttgcatgtccaaatat

SEQ ID NO: 283415 - DNA, 25 bp, Probe Sequence
tgagtattgtttgtgctaagcattg

SEQ ID NO: 283416 - DNA, 25 bp, Probe Sequence
tgagatctgttatttctgtaacttc

SEQ ID NO: 283417 - DNA, 25 bp, Probe Sequence
tgcaccgttgactcagtatagttta

SEQ ID NO: 283418 - DNA, 25 bp, Probe Sequence
tgagccggtggccgtgttagtgttt

SEQ ID NO: 283419 - DNA, 25 bp, Probe Sequence
tgagcggtttgcagtgtccgttctc

SEQ ID NO: 283420 - DNA, 25 bp, Probe Sequence
tgaccgtttgctatattcctttttc

SEQ ID NO: 283421 - DNA, 25 bp, Probe Sequence
tgagacgttttcagaatttcttgtt

SEQ ID NO: 283422 - DNA, 25 bp, Probe Sequence
tgagtttacttttgttcctgttgtt

SEQ ID NO: 283423 - DNA, 25 bp, Probe Sequence
tgaggtgtcctttgtttttgtgtgt

SEQ ID NO: 283424 - DNA, 25 bp, Probe Sequence
tgagttctcactagtgtttttttaa

SEQ ID NO: 283425 - DNA, 25 bp, Probe Sequence
tgagttattttgatgtggcttttta

SEQ ID NO: 283426 - DNA, 25 bp, Probe Sequence
tgagttttaagattttctctccttt

SEQ ID NO: 283427 - DNA, 25 bp, Probe Sequence
tgagtttctggacagacttccctct

SEQ ID NO: 283428 - DNA, 25 bp, Probe Sequence
tgagttctgtgggggaacgcacctg

SEQ ID NO: 283429 - DNA, 25 bp, Probe Sequence
tgagtttggagcagggtccatccgg

SEQ ID NO: 283430 - DNA, 25 bp, Probe Sequence
tgagattgtgagaccggggcatccc

SEQ ID NO: 283431 - DNA, 25 bp, Probe Sequence
tgagatcctggactgagggggcctg

SEQ ID NO: 283432 - DNA, 25 bp, Probe Sequence
tgagcacccagagacagcgggcttg

SEQ ID NO: 283433 - DNA, 25 bp, Probe Sequence
tgaccagcctgcttacagggagcgt

SEQ ID NO: 283434 - DNA, 25 bp, Probe Sequence
tgagccagggagacaagggagtcgg

SEQ ID NO: 283435 - DNA, 25 bp, Probe Sequence
tgaccagggtaaagcaaggctccta

SEQ ID NO: 283436 - DNA, 25 bp, Probe Sequence
tgaccctggatggacgagggccctc

SEQ ID NO: 283437 - DNA, 25 bp, Probe Sequence
tgagcgccttcggggagtggaccga

SEQ ID NO: 283438 - DNA, 25 bp, Probe Sequence
tgagctgccccggagggagggagga

SEQ ID NO: 283439 - DNA, 25 bp, Probe Sequence
tgacctcgcttaagggcagggagaa

SEQ ID NO: 283440 - DNA, 25 bp, Probe Sequence
tgacccctggtacccatggtacaac

SEQ ID NO: 283441 - DNA, 25 bp, Probe Sequence
tgagtccctggggccagtggttacc

SEQ ID NO: 283442 - DNA, 25 bp, Probe Sequence
tgagtccgtgggcgcagaaagtccc

SEQ ID NO: 283443 - DNA, 25 bp, Probe Sequence
tgagttcgtgggcgagcctgagctc

SEQ ID NO: 283444 - DNA, 25 bp, Probe Sequence
tgagtctcgggatgaagccacagct

SEQ ID NO: 283445 - DNA, 25 bp, Probe Sequence
tgcacgtgggagatgaagtcaactg

SEQ ID NO: 283446 - DNA, 25 bp, Probe Sequence
tgagggaggagacgtgaggcaactg

SEQ ID NO: 283447 - DNA, 25 bp, Probe Sequence
tgagggagcagacggtgcactacat

SEQ ID NO: 283448 - DNA, 25 bp, Probe Sequence
tgagggctgcaatggtggcttcatg

SEQ ID NO: 283449 - DNA, 25 bp, Probe Sequence
tgagggctgcaatggtggcttcatg

SEQ ID NO: 283450 - DNA, 25 bp, Probe Sequence
tgagggtacaatcgtgtgctgcctg

SEQ ID NO: 283451 - DNA, 25 bp, Probe Sequence
tgagtgatgtagaagctggtggtgc

SEQ ID NO: 283452 - DNA, 25 bp, Probe Sequence
tgagtgtgtgcacgcgtgtgagtgt

SEQ ID NO: 283453 - DNA, 25 bp, Probe Sequence
tgagatggatgccctgttgagtctt

SEQ ID NO: 283454 - DNA, 25 bp, Probe Sequence
tgagatcagagtatgtctgtgtctt

SEQ ID NO: 283455 - DNA, 25 bp, Probe Sequence
tgagatgctggtaatggccatggta

SEQ ID NO: 283456 - DNA, 25 bp, Probe Sequence
tgagtgacctgcaggccattatcag

SEQ ID NO: 283457 - DNA, 25 bp, Probe Sequence
tgagtatcaggcaagcgcatcttac

SEQ ID NO: 283458 - DNA, 25 bp, Probe Sequence
tgagatcacaggaacagcaggtgac

SEQ ID NO: 283459 - DNA, 25 bp, Probe Sequence
tgagaactgagcccgcagggcagct

SEQ ID NO: 283460 - DNA, 25 bp, Probe Sequence
tgagcaccatcgatcgggagctgct

SEQ ID NO: 283461 - DNA, 25 bp, Probe Sequence
tgagcatccggaatatggagaagta

SEQ ID NO: 283462 - DNA, 25 bp, Probe Sequence
tgagcatcccgcagtgtacaggaca

SEQ ID NO: 283463 - DNA, 25 bp, Probe Sequence
tgagctactctgaagctgcaagcag

SEQ ID NO: 283464 - DNA, 25 bp, Probe Sequence
tgagtgtcttgtggctgagtcacct

SEQ ID NO: 283465 - DNA, 25 bp, Probe Sequence
tgagatcattggacactggacacac

SEQ ID NO: 283466 - DNA, 25 bp, Probe Sequence
tgaccattgtagagacaccacccat

SEQ ID NO: 283467 - DNA, 25 bp, Probe Sequence
tgaccttgtcgaaatccacctgtca

SEQ ID NO: 283468 - DNA, 25 bp, Probe Sequence
tgcccttatccaacatcccagggca

SEQ ID NO: 283469 - DNA, 25 bp, Probe Sequence
tgaccggataacaagcagccatggc

SEQ ID NO: 283470 - DNA, 25 bp, Probe Sequence
tgaccatctgagaaccaagcctgac

SEQ ID NO: 283471 - DNA, 25 bp, Probe Sequence
tgaccatctggtacattgaggggac

SEQ ID NO: 283472 - DNA, 25 bp, Probe Sequence
tgaccatagtgtatttgggcgccaa

SEQ ID NO: 283473 - DNA, 25 bp, Probe Sequence
tgagaaaggctcaatttggtgctca

SEQ ID NO: 283474 - DNA, 25 bp, Probe Sequence
tgagagtcagaggcctcttggtgct

SEQ ID NO: 283475 - DNA, 25 bp, Probe Sequence
tgacatgaagcggtctctgttggcc

SEQ ID NO: 283476 - DNA, 25 bp, Probe Sequence
tgagagatgattctttcttggccct

SEQ ID NO: 283477 - DNA, 25 bp, Probe Sequence
tgagagatgattctttcttggccct

SEQ ID NO: 283478 - DNA, 25 bp, Probe Sequence
tgagtgtgagtccctgtttggttgc

SEQ ID NO: 283479 - DNA, 25 bp, Probe Sequence
tgagatcaattccctggtgcggtac

SEQ ID NO: 283480 - DNA, 25 bp, Probe Sequence
tgagtctcagtacgagtgtgcgtga

SEQ ID NO: 283481 - DNA, 25 bp, Probe Sequence
tgagaccgctgaggaggtgctactg

SEQ ID NO: 283482 - DNA, 25 bp, Probe Sequence
tgagactccgtggggccaatgagga

SEQ ID NO: 283483 - DNA, 25 bp, Probe Sequence
tgagaccacgctttgatccagttgg

SEQ ID NO: 283484 - DNA, 25 bp, Probe Sequence
tgagatcccatggaggttagattgg

SEQ ID NO: 283485 - DNA, 25 bp, Probe Sequence
tgagttcctgctagatttcgtattc

SEQ ID NO: 283486 - DNA, 25 bp, Probe Sequence
tgagttgcctgatgtttctgagttc

SEQ ID NO: 283487 - DNA, 25 bp, Probe Sequence
tgagttgctctagatctactgtcct

SEQ ID NO: 283488 - DNA, 25 bp, Probe Sequence
tgagttatgatcgcaccactgtact

SEQ ID NO: 283489 - DNA, 25 bp, Probe Sequence
tgagttggctcggctcaaggttcat

SEQ ID NO: 283490 - DNA, 25 bp, Probe Sequence
tgagtcaagcctgtccagagttccc

SEQ ID NO: 283491 - DNA, 25 bp, Probe Sequence
tgagacaagattttgccactgttct

SEQ ID NO: 283492 - DNA, 25 bp, Probe Sequence
tgagagcaagatgggtcaccagcag

SEQ ID NO: 283493 - DNA, 25 bp, Probe Sequence
tgagaacattaggccccagcaacac

SEQ ID NO: 283494 - DNA, 25 bp, Probe Sequence
tgagatgccattattccaagcaaaa

SEQ ID NO: 283495 - DNA, 25 bp, Probe Sequence
tgagaccattgagtccatcaaccag

SEQ ID NO: 283496 - DNA, 25 bp, Probe Sequence
tgagtcatttgcatcactcgacctg

SEQ ID NO: 283497 - DNA, 25 bp, Probe Sequence
tgagatctttcactcactagctctc

SEQ ID NO: 283498 - DNA, 25 bp, Probe Sequence
tgagtcatcccaggactcagcacac

SEQ ID NO: 283499 - DNA, 25 bp, Probe Sequence
tgagtactccacactgcacaataac

SEQ ID NO: 283500 - DNA, 25 bp, Probe Sequence
tgagttgtcctacatgcaagtacat

SEQ ID NO: 283501 - DNA, 25 bp, Probe Sequence
tgagttgtcctacatgcaagtacat

SEQ ID NO: 283502 - DNA, 25 bp, Probe Sequence
tgagttgtcctacatgcaagtacat

SEQ ID NO: 283503 - DNA, 25 bp, Probe Sequence
tgagttgtcctacatgcaagtacat

SEQ ID NO: 283504 - DNA, 25 bp, Probe Sequence
tgagtctgacctcttcatgagctac

SEQ ID NO: 283505 - DNA, 25 bp, Probe Sequence
tgagggcagcctctaatctgagcac

SEQ ID NO: 283506 - DNA, 25 bp, Probe Sequence
tgagaggccccaagaagctgagctg

SEQ ID NO: 283507 - DNA, 25 bp, Probe Sequence
tgagaggccccaagaagctgagctg

SEQ ID NO: 283508 - DNA, 25 bp, Probe Sequence
tgagaggccccaagaagctgagctg

SEQ ID NO: 283509 - DNA, 25 bp, Probe Sequence
tgagaggccccaagaagctgagctg

SEQ ID NO: 283510 - DNA, 25 bp, Probe Sequence
tgagcaccacccagaagaagagcct

SEQ ID NO: 283511 - DNA, 25 bp, Probe Sequence
tgagcaccacccagaagaagagcct

SEQ ID NO: 283512 - DNA, 25 bp, Probe Sequence
tgaccaaccgcagcaatgcacagag

SEQ ID NO: 283513 - DNA, 25 bp, Probe Sequence
tgagcgacgaccttacagagcgagc

SEQ ID NO: 283514 - DNA, 25 bp, Probe Sequence
tgagcgacgaccttacagagcgagc

SEQ ID NO: 283515 - DNA, 25 bp, Probe Sequence
tgacgctccaccgaaagagtcactg

SEQ ID NO: 283516 - DNA, 25 bp, Probe Sequence
tgagcctagtcaccaagaactccac

SEQ ID NO: 283517 - DNA, 25 bp, Probe Sequence
tgactctggtcagagatacctggcc

SEQ ID NO: 283518 - DNA, 25 bp, Probe Sequence
tgacctcagacagtggttcctggta

SEQ ID NO: 283519 - DNA, 25 bp, Probe Sequence
tgactctccaaaagcctactgttaa

SEQ ID NO: 283520 - DNA, 25 bp, Probe Sequence
tgacccaaaaagccatgattgtcct

SEQ ID NO: 283521 - DNA, 25 bp, Probe Sequence
tgaccgtcaagctgccagatggata

SEQ ID NO: 283522 - DNA, 25 bp, Probe Sequence
tgactggtcctatgattatggcatc

SEQ ID NO: 283523 - DNA, 25 bp, Probe Sequence
tgactggctttactatttgaaaact

SEQ ID NO: 283524 - DNA, 25 bp, Probe Sequence
tgactttttgcacttctgtatatag

SEQ ID NO: 283525 - DNA, 25 bp, Probe Sequence
tgagctttttgcccttgcataggat

SEQ ID NO: 283526 - DNA, 25 bp, Probe Sequence
tgagttttttcatggctagagtatt

SEQ ID NO: 283527 - DNA, 25 bp, Probe Sequence
tgagttatttcctattctgtggttt

SEQ ID NO: 283528 - DNA, 25 bp, Probe Sequence
tgagattttttttccgtgtgtttat

SEQ ID NO: 283529 - DNA, 25 bp, Probe Sequence
tgagtttctttgtaacgttgatttt

SEQ ID NO: 283530 - DNA, 25 bp, Probe Sequence
tagttatctggatttacctaagttt

SEQ ID NO: 283531 - DNA, 25 bp, Probe Sequence
tctcgtactggatatacgttaatta

SEQ ID NO: 283532 - DNA, 25 bp, Probe Sequence
tgactgaattgctgacccttcaagc

SEQ ID NO: 283533 - DNA, 25 bp, Probe Sequence
tgagtgaatgtgggtgatctgcttt

SEQ ID NO: 283534 - DNA, 25 bp, Probe Sequence
tgagtaatcatgtggtgtgcgtgtg

SEQ ID NO: 283535 - DNA, 25 bp, Probe Sequence
tgagtaccgctttgcttgggtggaa

SEQ ID NO: 283536 - DNA, 25 bp, Probe Sequence
tgagaacccttgcctttgaatgtgg

SEQ ID NO: 283537 - DNA, 25 bp, Probe Sequence
tgagacctttagcttctgtcagtgc

SEQ ID NO: 283538 - DNA, 25 bp, Probe Sequence
tgagacctttagacagttgaccctg

SEQ ID NO: 283539 - DNA, 25 bp, Probe Sequence
tgaagccttctaacaagaacgatct

SEQ ID NO: 283540 - DNA, 25 bp, Probe Sequence
tgacccactctaagggacgctcact

SEQ ID NO: 283541 - DNA, 25 bp, Probe Sequence
tgagcccaagtgcttggacgccttc

SEQ ID NO: 283542 - DNA, 25 bp, Probe Sequence
tgagtctccagtcactggtggcctt

SEQ ID NO: 283543 - DNA, 25 bp, Probe Sequence
tgagaataagtgcacatggaaacgt

SEQ ID NO: 283544 - DNA, 25 bp, Probe Sequence
tgagatcgaacggactgtgaatccg

SEQ ID NO: 283545 - DNA, 25 bp, Probe Sequence
tgagcacagtcaggggctgggcatc

SEQ ID NO: 283546 - DNA, 25 bp, Probe Sequence
tgagcacatttgggagctggagaac

SEQ ID NO: 283547 - DNA, 25 bp, Probe Sequence
tgagatctttcatggggaggcagga

SEQ ID NO: 283548 - DNA, 25 bp, Probe Sequence
tgagagtcttgctggaggctggcga

SEQ ID NO: 283549 - DNA, 25 bp, Probe Sequence
tgcagttgcatttccgagtctgggc

SEQ ID NO: 283550 - DNA, 25 bp, Probe Sequence
tgagcttgcaaagcgggctggtgcc

SEQ ID NO: 283551 - DNA, 25 bp, Probe Sequence
tgagcaacagaaaaaggcggccatc

SEQ ID NO: 283552 - DNA, 25 bp, Probe Sequence
tgagaagagcttccaggacgcaccc

SEQ ID NO: 283553 - DNA, 25 bp, Probe Sequence
tgagtgagtttcctgacacgtccac

SEQ ID NO: 283554 - DNA, 25 bp, Probe Sequence
tgagtctgtgttgtgtcctgacacc

SEQ ID NO: 283555 - DNA, 25 bp, Probe Sequence
tgaccttgatctttgattgctaccc

SEQ ID NO: 283556 - DNA, 25 bp, Probe Sequence
tgaccgatgtctttttgtagcagga

SEQ ID NO: 283557 - DNA, 25 bp, Probe Sequence
tgagtcttcctctatgtttgacgaa

SEQ ID NO: 283558 - DNA, 25 bp, Probe Sequence
tgagtcttctgtaattcattgagca

SEQ ID NO: 283559 - DNA, 25 bp, Probe Sequence
tgagtcttctgtaattcattgagca

SEQ ID NO: 283560 - DNA, 25 bp, Probe Sequence
tgagttcactgccaaatcttaaagg

SEQ ID NO: 283561 - DNA, 25 bp, Probe Sequence
tgagcttcatgtcaaaacggaaggc

SEQ ID NO: 283562 - DNA, 25 bp, Probe Sequence
tgaccaaggacatgacactggaagg

SEQ ID NO: 283563 - DNA, 25 bp, Probe Sequence
tgaccagggctctgacgaggagaac

SEQ ID NO: 283564 - DNA, 25 bp, Probe Sequence
tgagcaagtgctctcagaagaggag

SEQ ID NO: 283565 - DNA, 25 bp, Probe Sequence
tgaaagtccccgaatgggtggatac

SEQ ID NO: 283566 - DNA, 25 bp, Probe Sequence
tgaagagcccctctacgtggggaca

SEQ ID NO: 283567 - DNA, 25 bp, Probe Sequence
tgaaaggacacggtccagggggcca

SEQ ID NO: 283568 - DNA, 25 bp, Probe Sequence
tgaaacgaccccacaggtcaggtgg

SEQ ID NO: 283569 - DNA, 25 bp, Probe Sequence
tgaaccgatgtcacaccaggaaggt

SEQ ID NO: 283570 - DNA, 25 bp, Probe Sequence
tgagtatcagtggctccctaggaaa

SEQ ID NO: 283571 - DNA, 25 bp, Probe Sequence
tgcggacaatcctcaataggatcat

SEQ ID NO: 283572 - DNA, 25 bp, Probe Sequence
tgagctagcaaccccagaaggcatc

SEQ ID NO: 283573 - DNA, 25 bp, Probe Sequence
tgagctctgcgaggaccgagaacac

SEQ ID NO: 283574 - DNA, 25 bp, Probe Sequence
tgagctgaatgagggccgagatgca

SEQ ID NO: 283575 - DNA, 25 bp, Probe Sequence
tgagctgaggatgggacgatgtgcc

SEQ ID NO: 283576 - DNA, 25 bp, Probe Sequence
tgagctcggagctgacagactcgct

SEQ ID NO: 283577 - DNA, 25 bp, Probe Sequence
tgagctcggagctgacagactcgct

SEQ ID NO: 283578 - DNA, 25 bp, Probe Sequence
tgagcacggctaagtgccagctcct

SEQ ID NO: 283579 - DNA, 25 bp, Probe Sequence
tgagagccactaatgtaagatacag

SEQ ID NO: 283580 - DNA, 25 bp, Probe Sequence
tgagaccaaggggaagtcactggaa

SEQ ID NO: 283581 - DNA, 25 bp, Probe Sequence
tgagaccacgggcaaagctcttcat

SEQ ID NO: 283582 - DNA, 25 bp, Probe Sequence
tgcagctccagggagttaactcttc

SEQ ID NO: 283583 - DNA, 25 bp, Probe Sequence
tgcatgcccactgaatataaccctg

SEQ ID NO: 283584 - DNA, 25 bp, Probe Sequence
tgcactaccccaatgtaggctccaa

SEQ ID NO: 283585 - DNA, 25 bp, Probe Sequence
tgactccccagcgtggagacgtcta

SEQ ID NO: 283586 - DNA, 25 bp, Probe Sequence
tgacccccaagcagatcaagtccag

SEQ ID NO: 283587 - DNA, 25 bp, Probe Sequence
tgacctctccggggtcacagaggag

SEQ ID NO: 283588 - DNA, 25 bp, Probe Sequence
tgaccatcatcggtggctgagcacg

SEQ ID NO: 283589 - DNA, 25 bp, Probe Sequence
tgacatcgacgtgcagctgagctcg

SEQ ID NO: 283590 - DNA, 25 bp, Probe Sequence
tgacatcgacgtgcagctgagctcg

SEQ ID NO: 283591 - DNA, 25 bp, Probe Sequence
tgagcatggggtgcaggagcctttc

SEQ ID NO: 283592 - DNA, 25 bp, Probe Sequence
tgagatggtatgaaaggccctttgt

SEQ ID NO: 283593 - DNA, 25 bp, Probe Sequence
tgagtagttaagccagccttctgag

SEQ ID NO: 283594 - DNA, 25 bp, Probe Sequence
tgagattgtaaaagcccttctggga

SEQ ID NO: 283595 - DNA, 25 bp, Probe Sequence
tgagtcattacagtggaccctctgg

SEQ ID NO: 283596 - DNA, 25 bp, Probe Sequence
tgagacctacaggaatcgcttctgg

SEQ ID NO: 283597 - DNA, 25 bp, Probe Sequence
tgagatcctggtgcacaacatagtg

SEQ ID NO: 283598 - DNA, 25 bp, Probe Sequence
tgagacctgtgtgacgcctagggat

SEQ ID NO: 283599 - DNA, 25 bp, Probe Sequence
tgacccatgttcacgttgttcacat

SEQ ID NO: 283600 - DNA, 25 bp, Probe Sequence
tgagtactggtaattgttttcagac

SEQ ID NO: 283601 - DNA, 25 bp, Probe Sequence
tgagtactgggcagtctcatctctc

SEQ ID NO: 283602 - DNA, 25 bp, Probe Sequence
tgagaacgtgagcggctactccagc

SEQ ID NO: 283603 - DNA, 25 bp, Probe Sequence
tgagaacttgcgtggctcattcctc

SEQ ID NO: 283604 - DNA, 25 bp, Probe Sequence
tgagagagctgtgtggccgctctcc

SEQ ID NO: 283605 - DNA, 25 bp, Probe Sequence
tgagagtgcgaggctgggctgtctc

SEQ ID NO: 283606 - DNA, 25 bp, Probe Sequence
tgagcagctggcgtgtgaggctgcc

SEQ ID NO: 283607 - DNA, 25 bp, Probe Sequence
tgagaggggtgtttgctgagcgctc

SEQ ID NO: 283608 - DNA, 25 bp, Probe Sequence
tgagaggggcatcctagtggccagc

SEQ ID NO: 283609 - DNA, 25 bp, Probe Sequence
tgagagtggggaagatgggacagcc

SEQ ID NO: 283610 - DNA, 25 bp, Probe Sequence
tgagaaagtggctctgcagaaagct

SEQ ID NO: 283611 - DNA, 25 bp, Probe Sequence
tgaacaagagtctttcaggacctgg

SEQ ID NO: 283612 - DNA, 25 bp, Probe Sequence
tgagacaggaggcttgccgatactt

SEQ ID NO: 283613 - DNA, 25 bp, Probe Sequence
tgagaaggcagctgtgttggacact

SEQ ID NO: 283614 - DNA, 25 bp, Probe Sequence
tgactcaggctgtagtgttgtaacc

SEQ ID NO: 283615 - DNA, 25 bp, Probe Sequence
tgaccaagtagggcctgtcacacca

SEQ ID NO: 283616 - DNA, 25 bp, Probe Sequence
tgaccaagtagggcctgtcacacca

SEQ ID NO: 283617 - DNA, 25 bp, Probe Sequence
tgaccaagtagggcctgtcacacca

SEQ ID NO: 283618 - DNA, 25 bp, Probe Sequence
tgaccaaggtgccagctattcaaca

SEQ ID NO: 283619 - DNA, 25 bp, Probe Sequence
tgaccctgggccctttaaatatagg

SEQ ID NO: 283620 - DNA, 25 bp, Probe Sequence
tgctccctgacctcttggaagaaga

SEQ ID NO: 283621 - DNA, 25 bp, Probe Sequence
tgagcccttcactcctgagaaaaag

SEQ ID NO: 283622 - DNA, 25 bp, Probe Sequence
tgacccccaccggtgagaaggaggg

SEQ ID NO: 283623 - DNA, 25 bp, Probe Sequence
tgagcttcctccatgcagtggaaca

SEQ ID NO: 283624 - DNA, 25 bp, Probe Sequence
tgagttagcccatggatgaggaagg

SEQ ID NO: 283625 - DNA, 25 bp, Probe Sequence
tgaacccactcatgggggcaaggtc

SEQ ID NO: 283626 - DNA, 25 bp, Probe Sequence
tgagaccccaactggctggaagttt

SEQ ID NO: 283627 - DNA, 25 bp, Probe Sequence
tgagagaccagttcttttagaagcc

SEQ ID NO: 283628 - DNA, 25 bp, Probe Sequence
tgagagacctgtttgtaataatttc

SEQ ID NO: 283629 - DNA, 25 bp, Probe Sequence
tgcggttcttcctgaatcagtattc

SEQ ID NO: 283630 - DNA, 25 bp, Probe Sequence
ttggttttaaatgacagttctgtga

SEQ ID NO: 283631 - DNA, 25 bp, Probe Sequence
tgacccctatagaacccagtttgta

SEQ ID NO: 283632 - DNA, 25 bp, Probe Sequence
tccccctaagagacctggacttaag

SEQ ID NO: 283633 - DNA, 25 bp, Probe Sequence
tgcccaactaaacccagaactcaaa

SEQ ID NO: 283634 - DNA, 25 bp, Probe Sequence
tcctagacctaacctgactagaaaa

SEQ ID NO: 283635 - DNA, 25 bp, Probe Sequence
tccttacctttaccactaataccag

SEQ ID NO: 283636 - DNA, 25 bp, Probe Sequence
tcctgtacctttaacctttagtctg

SEQ ID NO: 283637 - DNA, 25 bp, Probe Sequence
tgacttgcacctataaaattaatgt

SEQ ID NO: 283638 - DNA, 25 bp, Probe Sequence
tgacgtgatccttaaagactgctat

SEQ ID NO: 283639 - DNA, 25 bp, Probe Sequence
tgaccattccattattgagacctta

SEQ ID NO: 283640 - DNA, 25 bp, Probe Sequence
tgactcagtacgtggacaccatcct

SEQ ID NO: 283641 - DNA, 25 bp, Probe Sequence
tgaccaaacagacttcaaccacaca

SEQ ID NO: 283642 - DNA, 25 bp, Probe Sequence
tgagcccaaggacatccatgccaag

SEQ ID NO: 283643 - DNA, 25 bp, Probe Sequence
tgagaacgaagacactcagccggag

SEQ ID NO: 283644 - DNA, 25 bp, Probe Sequence
tgagaacaagagaaccagccctgga

SEQ ID NO: 283645 - DNA, 25 bp, Probe Sequence
tgactacattacaacgggccaggaa

SEQ ID NO: 283646 - DNA, 25 bp, Probe Sequence
tgaccaaaatcatctgtgcccagca

SEQ ID NO: 283647 - DNA, 25 bp, Probe Sequence
tgaccataaatagcgtatacgagcc

SEQ ID NO: 283648 - DNA, 25 bp, Probe Sequence
tgacaccaaaaggcggaccgagaca

SEQ ID NO: 283649 - DNA, 25 bp, Probe Sequence
tgaccaagaactgcatggacctaac

SEQ ID NO: 283650 - DNA, 25 bp, Probe Sequence
tgaccatgaatactgcagagagaaa

SEQ ID NO: 283651 - DNA, 25 bp, Probe Sequence
tgacactggcattgctgggtggtga

SEQ ID NO: 283652 - DNA, 25 bp, Probe Sequence
tgagcagggcgacgtgcagatggct

SEQ ID NO: 283653 - DNA, 25 bp, Probe Sequence
tgagcaggtcaggcccatgtagcca

SEQ ID NO: 283654 - DNA, 25 bp, Probe Sequence
tgagagtgatctgtcctgtgaggca

SEQ ID NO: 283655 - DNA, 25 bp, Probe Sequence
tgagatggtcccatctgcagggccc

SEQ ID NO: 283656 - DNA, 25 bp, Probe Sequence
tgagcagggcccttgcggagttccg

SEQ ID NO: 283657 - DNA, 25 bp, Probe Sequence
tgagcaggggcatctgggaggctct

SEQ ID NO: 283658 - DNA, 25 bp, Probe Sequence
tgagattggcgcccgaggggcgtct

SEQ ID NO: 283659 - DNA, 25 bp, Probe Sequence
tgagttctgcgcacgcaggattcag

SEQ ID NO: 283660 - DNA, 25 bp, Probe Sequence
tgagtttgctgtactgacgctgcac

SEQ ID NO: 283661 - DNA, 25 bp, Probe Sequence
tgactgtggcagtggacgcagcacc

SEQ ID NO: 283662 - DNA, 25 bp, Probe Sequence
tgaccggcagtggctgattgacacc

SEQ ID NO: 283663 - DNA, 25 bp, Probe Sequence
tgagctttggtgctgactacccaga

SEQ ID NO: 283664 - DNA, 25 bp, Probe Sequence
tgagctttggtgctgactacccaga

SEQ ID NO: 283665 - DNA, 25 bp, Probe Sequence
tgacgtatggtccatagtacccatt

SEQ ID NO: 283666 - DNA, 25 bp, Probe Sequence
tgacgatatcgaaatttctcaaatt

SEQ ID NO: 283667 - DNA, 25 bp, Probe Sequence
tgacggagcgcaacatttctccact

SEQ ID NO: 283668 - DNA, 25 bp, Probe Sequence
tgacagtggcctcaggttcacagtg

SEQ ID NO: 283669 - DNA, 25 bp, Probe Sequence
tgacttgacttttgagtcctaggga

SEQ ID NO: 283670 - DNA, 25 bp, Probe Sequence
tgacttgctcacctatgaacctatc

SEQ ID NO: 283671 - DNA, 25 bp, Probe Sequence
tgaatggccaagcaaaaatgatcga

SEQ ID NO: 283672 - DNA, 25 bp, Probe Sequence
tgaattccatactataaactaggaa

SEQ ID NO: 283673 - DNA, 25 bp, Probe Sequence
tgagacatcgcatcatcaaaagtta

SEQ ID NO: 283674 - DNA, 25 bp, Probe Sequence
tgagcactgctctaacaacaagcat

SEQ ID NO: 283675 - DNA, 25 bp, Probe Sequence
tgagcagctggccaaataccttcaa

SEQ ID NO: 283676 - DNA, 25 bp, Probe Sequence
tgagagctgccttatattcctacat

SEQ ID NO: 283677 - DNA, 25 bp, Probe Sequence
tgagagtcctgtaggatccctgctc

SEQ ID NO: 283678 - DNA, 25 bp, Probe Sequence
tgaagttgcatggctgtacccttcc

SEQ ID NO: 283679 - DNA, 25 bp, Probe Sequence
tgagaatgtgaggttcccctcgcac

SEQ ID NO: 283680 - DNA, 25 bp, Probe Sequence
tgagatgggagcagtctccccagcc

SEQ ID NO: 283681 - DNA, 25 bp, Probe Sequence
tgagatgggagctgtcttcccagcc

SEQ ID NO: 283682 - DNA, 25 bp, Probe Sequence
tgagatgggagctgtcttcccagcc

SEQ ID NO: 283683 - DNA, 25 bp, Probe Sequence
tgagatggactctagctctgtcacc

SEQ ID NO: 283684 - DNA, 25 bp, Probe Sequence
tgagatggagtcttgctgtctccca

SEQ ID NO: 283685 - DNA, 25 bp, Probe Sequence
tgagaggcagctatctgcactctaa

SEQ ID NO: 283686 - DNA, 25 bp, Probe Sequence
tgagattgcaccattgcactccagc

SEQ ID NO: 283687 - DNA, 25 bp, Probe Sequence
tgagaagcacatcattcagattcac

SEQ ID NO: 283688 - DNA, 25 bp, Probe Sequence
tgagaagccatggccagagcttctc

SEQ ID NO: 283689 - DNA, 25 bp, Probe Sequence
tgagaagaccatccagagcctacag

SEQ ID NO: 283690 - DNA, 25 bp, Probe Sequence
tgagaagacttctggcagcaacgta

SEQ ID NO: 283691 - DNA, 25 bp, Probe Sequence
tgagctgagatcataatggagctga

SEQ ID NO: 283692 - DNA, 25 bp, Probe Sequence
tgagctcagatacaatggtggcata

SEQ ID NO: 283693 - DNA, 25 bp, Probe Sequence
tgagcagcgatacctagggcggaag

SEQ ID NO: 283694 - DNA, 25 bp, Probe Sequence
tgagccctagctaagtcactgaaag

SEQ ID NO: 283695 - DNA, 25 bp, Probe Sequence
tgagcctttttcacagtgcataagc

SEQ ID NO: 283696 - DNA, 25 bp, Probe Sequence
tgagcgtttcccagaggatggaccc

SEQ ID NO: 283697 - DNA, 25 bp, Probe Sequence
tgaccttcatcatcaatggtgtgga

SEQ ID NO: 283698 - DNA, 25 bp, Probe Sequence
tgaccctctcactttggttggaact

SEQ ID NO: 283699 - DNA, 25 bp, Probe Sequence
tgacccctatttgtctgaggttctc

SEQ ID NO: 283700 - DNA, 25 bp, Probe Sequence
tgcaggttttttgttacgctgctgt

SEQ ID NO: 283701 - DNA, 25 bp, Probe Sequence
tgcagcgtacttctggcttttgcgc

SEQ ID NO: 283702 - DNA, 25 bp, Probe Sequence
tgacgtcaatgggaggtgtttgtgg

SEQ ID NO: 283703 - DNA, 25 bp, Probe Sequence
tgacccctcaggagggattgcaggc

SEQ ID NO: 283704 - DNA, 25 bp, Probe Sequence
tgaccctccgctgcagaggattgag

SEQ ID NO: 283705 - DNA, 25 bp, Probe Sequence
tgacatctaccagtccaaggaggcc

SEQ ID NO: 283706 - DNA, 25 bp, Probe Sequence
tgacatctgacgacgtgaaggagca

SEQ ID NO: 283707 - DNA, 25 bp, Probe Sequence
tgagcgctgtgcccagtacaagaag

SEQ ID NO: 283708 - DNA, 25 bp, Probe Sequence
tgagcgctgtgcccagtacaagaag

SEQ ID NO: 283709 - DNA, 25 bp, Probe Sequence
tgagcgctgtgcccagtacaagaag

SEQ ID NO: 283710 - DNA, 25 bp, Probe Sequence
tgagcgtggctgtgtgactaagata

SEQ ID NO: 283711 - DNA, 25 bp, Probe Sequence
tgactgcggctgtggcatgaaagca

SEQ ID NO: 283712 - DNA, 25 bp, Probe Sequence
tgacgtggttcacgtgaaagatgcc

SEQ ID NO: 283713 - DNA, 25 bp, Probe Sequence
tgagcgtggaaattgtggtaatgca

SEQ ID NO: 283714 - DNA, 25 bp, Probe Sequence
tgacggtaataggtggtaacttggt

SEQ ID NO: 283715 - DNA, 25 bp, Probe Sequence
tgacggtgaacactctggaccgctt

SEQ ID NO: 283716 - DNA, 25 bp, Probe Sequence
tgacgatgatgaaccagctggacca

SEQ ID NO: 283717 - DNA, 25 bp, Probe Sequence
tgagcgtgatgatctagcctccatc

SEQ ID NO: 283718 - DNA, 25 bp, Probe Sequence
tgagcgcatgaatcagtctctctcc

SEQ ID NO: 283719 - DNA, 25 bp, Probe Sequence
tgagcatcatgaactcgtttgtaaa

SEQ ID NO: 283720 - DNA, 25 bp, Probe Sequence
tgagcatctggattctgcctaataa

SEQ ID NO: 283721 - DNA, 25 bp, Probe Sequence
tgagcttcgagagtccattgaaatt

SEQ ID NO: 283722 - DNA, 25 bp, Probe Sequence
tgagcttggaggctttagtcattcc

SEQ ID NO: 283723 - DNA, 25 bp, Probe Sequence
tgagctgttgaccgtatgcttgctt

SEQ ID NO: 283724 - DNA, 25 bp, Probe Sequence
tgagctgtatagtgcctgctgactt

SEQ ID NO: 283725 - DNA, 25 bp, Probe Sequence
tgagagtctcaaagccatgttattc

SEQ ID NO: 283726 - DNA, 25 bp, Probe Sequence
tgaagtccaaggggattttgttttg

SEQ ID NO: 283727 - DNA, 25 bp, Probe Sequence
tgaaaacaagggctttgttttatct

SEQ ID NO: 283728 - DNA, 25 bp, Probe Sequence
ttgacgtcaatgggagtttgttttg

SEQ ID NO: 283729 - DNA, 25 bp, Probe Sequence
tcgaagtaggtgatgtttttttgtc

SEQ ID NO: 283730 - DNA, 25 bp, Probe Sequence
tccacataaggtgtttttgatttga

SEQ ID NO: 283731 - DNA, 25 bp, Probe Sequence
tccccaaggtagatataggtgaaga

SEQ ID NO: 283732 - DNA, 25 bp, Probe Sequence
tgacagcccaggtggctacaaagaa

SEQ ID NO: 283733 - DNA, 25 bp, Probe Sequence
tgagcaggaacgtggctcccaagac

SEQ ID NO: 283734 - DNA, 25 bp, Probe Sequence
tgagaaacatttggtgcccagaagt

SEQ ID NO: 283735 - DNA, 25 bp, Probe Sequence
tgagaaccttctttacccaagatta

SEQ ID NO: 283736 - DNA, 25 bp, Probe Sequence
tgagaactggttctacacgcgagct

SEQ ID NO: 283737 - DNA, 25 bp, Probe Sequence
tgagaactggttctacacgcgagct

SEQ ID NO: 283738 - DNA, 25 bp, Probe Sequence
tgagaactggttctacacgcgagct

SEQ ID NO: 283739 - DNA, 25 bp, Probe Sequence
tgagaaatgtgctggggtcgcgtgt

SEQ ID NO: 283740 - DNA, 25 bp, Probe Sequence
tgagctatattcagggtatccggta

SEQ ID NO: 283741 - DNA, 25 bp, Probe Sequence
tgagaatatccccgagttggcggct

SEQ ID NO: 283742 - DNA, 25 bp, Probe Sequence
tgagaattctccgggcagtgtagcc

SEQ ID NO: 283743 - DNA, 25 bp, Probe Sequence
tgagacttttccgcgtgatggctat

SEQ ID NO: 283744 - DNA, 25 bp, Probe Sequence
tgagcctttttaacacagtggtgat

SEQ ID NO: 283745 - DNA, 25 bp, Probe Sequence
tgaccttacctactatttggtttct

SEQ ID NO: 283746 - DNA, 25 bp, Probe Sequence
tgcccattgacctctagtggtgagt

SEQ ID NO: 283747 - DNA, 25 bp, Probe Sequence
tgagctgatgtaccacctaggagag

SEQ ID NO: 283748 - DNA, 25 bp, Probe Sequence
tgactatctgactccaaggaatggg

SEQ ID NO: 283749 - DNA, 25 bp, Probe Sequence
tgagcttcaaattccagttaagtgg

SEQ ID NO: 283750 - DNA, 25 bp, Probe Sequence
tgactccaaattatccaaactgctc

SEQ ID NO: 283751 - DNA, 25 bp, Probe Sequence
tgaccaaggaataccacagacaccc

SEQ ID NO: 283752 - DNA, 25 bp, Probe Sequence
tgagcgagcggacttcgcccaggcc

SEQ ID NO: 283753 - DNA, 25 bp, Probe Sequence
tgagcaagctggtttggccagacag

SEQ ID NO: 283754 - DNA, 25 bp, Probe Sequence
tgagcaatcgcaggcgctggctcag

SEQ ID NO: 283755 - DNA, 25 bp, Probe Sequence
tgagcaacgcatccggatgacggtt

SEQ ID NO: 283756 - DNA, 25 bp, Probe Sequence
tgacgcaaatgggcgtacggcgttg

SEQ ID NO: 283757 - DNA, 25 bp, Probe Sequence
tgacgcaaatgggcggtaggcgtgt

SEQ ID NO: 283758 - DNA, 25 bp, Probe Sequence
tgacctcacagaccgcgtgaaggtg

SEQ ID NO: 283759 - DNA, 25 bp, Probe Sequence
tgagccctacgaggagctggaggcg

SEQ ID NO: 283760 - DNA, 25 bp, Probe Sequence
tgagccctacgaggagctggaggcg

SEQ ID NO: 283761 - DNA, 25 bp, Probe Sequence
tgagacctgctgcagggcgtgggtg

SEQ ID NO: 283762 - DNA, 25 bp, Probe Sequence
tgagaaccatggtgtggtgttggta

SEQ ID NO: 283763 - DNA, 25 bp, Probe Sequence
tgagcatgacacagctcgggctgtc

SEQ ID NO: 283764 - DNA, 25 bp, Probe Sequence
tgactgccactactgcagggatccc

SEQ ID NO: 283765 - DNA, 25 bp, Probe Sequence
tgagctgtgaggtcatcggaatccc

SEQ ID NO: 283766 - DNA, 25 bp, Probe Sequence
tgagctgcttcactagggaatcctg

SEQ ID NO: 283767 - DNA, 25 bp, Probe Sequence
tgagctgcttcctgagacagatgct

SEQ ID NO: 283768 - DNA, 25 bp, Probe Sequence
tgagctgctaccacatgacagacac

SEQ ID NO: 283769 - DNA, 25 bp, Probe Sequence
tgacgctatgacacacagcgcgagc

SEQ ID NO: 283770 - DNA, 25 bp, Probe Sequence
tgacgatgtgcctctagactggcgg

SEQ ID NO: 283771 - DNA, 25 bp, Probe Sequence
tgagagtgtgtctttcagtcttcgg

SEQ ID NO: 283772 - DNA, 25 bp, Probe Sequence
tgagcagttgtcttctatgatccca

SEQ ID NO: 283773 - DNA, 25 bp, Probe Sequence
tgagcattagatttctcatttgcca

SEQ ID NO: 283774 - DNA, 25 bp, Probe Sequence
tgagcatatgaaagactctgcctgc

SEQ ID NO: 283775 - DNA, 25 bp, Probe Sequence
tgagacagcagcagagcatctcctc

SEQ ID NO: 283776 - DNA, 25 bp, Probe Sequence
tgagagctgccactgagcagccctg

SEQ ID NO: 283777 - DNA, 25 bp, Probe Sequence
tgagactgcctggcaacggctgatg

SEQ ID NO: 283778 - DNA, 25 bp, Probe Sequence
tgagaagcacaggaacgctccaggc

SEQ ID NO: 283779 - DNA, 25 bp, Probe Sequence
tgagacatccagcagatttccagcc

SEQ ID NO: 283780 - DNA, 25 bp, Probe Sequence
tgagaatctagcacttctccacttg

SEQ ID NO: 283781 - DNA, 25 bp, Probe Sequence
tgagagatccaaacttcaagcactc

SEQ ID NO: 283782 - DNA, 25 bp, Probe Sequence
tgagaacagtctccttcaacagctc

SEQ ID NO: 283783 - DNA, 25 bp, Probe Sequence
tgagaagctgggactacaggcgccc

SEQ ID NO: 283784 - DNA, 25 bp, Probe Sequence
tgagcaggtgtcttcaataggccca

SEQ ID NO: 283785 - DNA, 25 bp, Probe Sequence
tgagcgtggcctacgtgagccaaca

SEQ ID NO: 283786 - DNA, 25 bp, Probe Sequence
tgacgaggccgaggctgagccagag

SEQ ID NO: 283787 - DNA, 25 bp, Probe Sequence
tgactgtggggtgggcccaggattt

SEQ ID NO: 283788 - DNA, 25 bp, Probe Sequence
tgacagtaggggggcctctggtttg

SEQ ID NO: 283789 - DNA, 25 bp, Probe Sequence
tgactcagggggaccgttggtgtgc

SEQ ID NO: 283790 - DNA, 25 bp, Probe Sequence
tgactcacggggatttccagtctcc

SEQ ID NO: 283791 - DNA, 25 bp, Probe Sequence
tgactcacggggatttccagtctcc

SEQ ID NO: 283792 - DNA, 25 bp, Probe Sequence
tgaaactgggcgatgggcttttcct

SEQ ID NO: 283793 - DNA, 25 bp, Probe Sequence
tgaaccggatgtctcggcattaatc

SEQ ID NO: 283794 - DNA, 25 bp, Probe Sequence
tgagaaggaagtctgggctgggcat

SEQ ID NO: 283795 - DNA, 25 bp, Probe Sequence
tgagaaggaggggctgggccagggc

SEQ ID NO: 283796 - DNA, 25 bp, Probe Sequence
tgagaaggacgggcaggtcacactg

SEQ ID NO: 283797 - DNA, 25 bp, Probe Sequence
tgagaagcatgctgggggtgtcacg

SEQ ID NO: 283798 - DNA, 25 bp, Probe Sequence
tgagaagatttggacaggtgtacta

SEQ ID NO: 283799 - DNA, 25 bp, Probe Sequence
tgagaacatattgaaggcattgact

SEQ ID NO: 283800 - DNA, 25 bp, Probe Sequence
tgagacaaattcttaactctgacac

SEQ ID NO: 283801 - DNA, 25 bp, Probe Sequence
tgagaaagatctataattgacaccc

SEQ ID NO: 283802 - DNA, 25 bp, Probe Sequence
tgagaatagtttctcgtgtccccct

SEQ ID NO: 283803 - DNA, 25 bp, Probe Sequence
tgagaaaatcatttttattacccac

SEQ ID NO: 283804 - DNA, 25 bp, Probe Sequence
tgagaagcacgaccttcatgttacc

SEQ ID NO: 283805 - DNA, 25 bp, Probe Sequence
tgagaatcgaaccttggttccctaa

SEQ ID NO: 283806 - DNA, 25 bp, Probe Sequence
tgagaacgcaaccgtggttcctgga

SEQ ID NO: 283807 - DNA, 25 bp, Probe Sequence
tgagaaagccgcaggagcccgcgga

SEQ ID NO: 283808 - DNA, 25 bp, Probe Sequence
tgagacaacctgggagacagcctgg

SEQ ID NO: 283809 - DNA, 25 bp, Probe Sequence
tgagccagatctaggtcagacacca

SEQ ID NO: 283810 - DNA, 25 bp, Probe Sequence
tgcatacatctaagcctgaacccat

SEQ ID NO: 283811 - DNA, 25 bp, Probe Sequence
tgagacagaagcccatgatgaccca

SEQ ID NO: 283812 - DNA, 25 bp, Probe Sequence
tgagaagcgagcctatatctgtgcc

SEQ ID NO: 283813 - DNA, 25 bp, Probe Sequence
tgagaactagtcctgtcttgccaga

SEQ ID NO: 283814 - DNA, 25 bp, Probe Sequence
tgagaagtaccgctctgcagcaaga

SEQ ID NO: 283815 - DNA, 25 bp, Probe Sequence
tgcagctagctttctggacggcaga

SEQ ID NO: 283816 - DNA, 25 bp, Probe Sequence
tgagctcagccctggtgggcagaga

SEQ ID NO: 283817 - DNA, 25 bp, Probe Sequence
tgagctacatcctcattgttcacag

SEQ ID NO: 283818 - DNA, 25 bp, Probe Sequence
tgagaatagccagtgttgatgtcac

SEQ ID NO: 283819 - DNA, 25 bp, Probe Sequence
tgaaaaccgatttcagtgcacgatg

SEQ ID NO: 283820 - DNA, 25 bp, Probe Sequence
tgagagccccagctgacatggaaat

SEQ ID NO: 283821 - DNA, 25 bp, Probe Sequence
tgaaggacaagcatactacataata

SEQ ID NO: 283822 - DNA, 25 bp, Probe Sequence
tgagacaactggttatctaataaag

SEQ ID NO: 283823 - DNA, 25 bp, Probe Sequence
tgagacacacggtcttctaagactg

SEQ ID NO: 283824 - DNA, 25 bp, Probe Sequence
tgagacaacgtgattctccgcagct

SEQ ID NO: 283825 - DNA, 25 bp, Probe Sequence
tgaaaacggtacccaggcagctgca

SEQ ID NO: 283826 - DNA, 25 bp, Probe Sequence
tgcagggatcgttacccgaactgca

SEQ ID NO: 283827 - DNA, 25 bp, Probe Sequence
tgagcatgagctgtaacccggagcc

SEQ ID NO: 283828 - DNA, 25 bp, Probe Sequence
tgagaagtgttttctggcaggccct

SEQ ID NO: 283829 - DNA, 25 bp, Probe Sequence
tgagaatggacgctgcatccaggcc

SEQ ID NO: 283830 - DNA, 25 bp, Probe Sequence
tgagcagcctgagctacttcaagct

SEQ ID NO: 283831 - DNA, 25 bp, Probe Sequence
tgactgcagaagcctacttcacacc

SEQ ID NO: 283832 - DNA, 25 bp, Probe Sequence
tgactgagaagaggacgctcccggg

SEQ ID NO: 283833 - DNA, 25 bp, Probe Sequence
tgagaatagagagctccctccagag

SEQ ID NO: 283834 - DNA, 25 bp, Probe Sequence
tgagaagagaacgtcctcagcccag

SEQ ID NO: 283835 - DNA, 25 bp, Probe Sequence
tgagaaatgaattgctggtcaaaat

SEQ ID NO: 283836 - DNA, 25 bp, Probe Sequence
tgacctatgacagtttgtcaaaaag

SEQ ID NO: 283837 - DNA, 25 bp, Probe Sequence
tgacttgagaccagttgaataaaag

SEQ ID NO: 283838 - DNA, 25 bp, Probe Sequence
tgagctgaagccccgtatatttaat

SEQ ID NO: 283839 - DNA, 25 bp, Probe Sequence
tgagctacccggataattttcttca

SEQ ID NO: 283840 - DNA, 25 bp, Probe Sequence
tgagccacggaggcttttgtttttc

SEQ ID NO: 283841 - DNA, 25 bp, Probe Sequence
tgaccctcacaggtcttgtgttagt

SEQ ID NO: 283842 - DNA, 25 bp, Probe Sequence
tgactgccccagacttggttttgta

SEQ ID NO: 283843 - DNA, 25 bp, Probe Sequence
tgacttcccagtaaggctctctaag

SEQ ID NO: 283844 - DNA, 25 bp, Probe Sequence
tgagcttctcattgtgtagaatttc

SEQ ID NO: 283845 - DNA, 25 bp, Probe Sequence
tgacctccacggtgatgctgtggct

SEQ ID NO: 283846 - DNA, 25 bp, Probe Sequence
tgacctccaccgtatatttgagccc

SEQ ID NO: 283847 - DNA, 25 bp, Probe Sequence
tgacctccaccgtatatttgagccc

SEQ ID NO: 283848 - DNA, 25 bp, Probe Sequence
tgacatccacaaatgcagttttaga

SEQ ID NO: 283849 - DNA, 25 bp, Probe Sequence
tgactccaggaaccattttcaccta

SEQ ID NO: 283850 - DNA, 25 bp, Probe Sequence
tgagcaccagtgagttctttgcctc

SEQ ID NO: 283851 - DNA, 25 bp, Probe Sequence
tgagctgcttgtcagtttgttcgtc

SEQ ID NO: 283852 - DNA, 25 bp, Probe Sequence
tgagccaattccattcagttcttct

SEQ ID NO: 283853 - DNA, 25 bp, Probe Sequence
tgcactcgttagattcctttcttag

SEQ ID NO: 283854 - DNA, 25 bp, Probe Sequence
tccagggtggggacctgttcttcac

SEQ ID NO: 283855 - DNA, 25 bp, Probe Sequence
tgacggtgggtgtcccatttttatc

SEQ ID NO: 283856 - DNA, 25 bp, Probe Sequence
tacgcgggatagccccaaatgttac

SEQ ID NO: 283857 - DNA, 25 bp, Probe Sequence
tgcatgggggtaccccaatctgaag

SEQ ID NO: 283858 - DNA, 25 bp, Probe Sequence
tgacaggagttacaggttctaagcc

SEQ ID NO: 283859 - DNA, 25 bp, Probe Sequence
tgacctcaactacatggtttacatg

SEQ ID NO: 283860 - DNA, 25 bp, Probe Sequence
tgacttaacaagtggtctaaccctt

SEQ ID NO: 283861 - DNA, 25 bp, Probe Sequence
tgactattaaatctgttctacacac

SEQ ID NO: 283862 - DNA, 25 bp, Probe Sequence
tgacttctaaactttatcccatcgc

SEQ ID NO: 283863 - DNA, 25 bp, Probe Sequence
tgacgtcaggaacttctgacccccg

SEQ ID NO: 283864 - DNA, 25 bp, Probe Sequence
tgagcgatctggcagtgctctgaga

SEQ ID NO: 283865 - DNA, 25 bp, Probe Sequence
tgacgtctgcttggcatcttgagat

SEQ ID NO: 283866 - DNA, 25 bp, Probe Sequence
tgagcggcttctcgcacaaggtaaa

SEQ ID NO: 283867 - DNA, 25 bp, Probe Sequence
tgagctgtttgcagacaaggtccca

SEQ ID NO: 283868 - DNA, 25 bp, Probe Sequence
tgagctggattatcaccgaggcctc

SEQ ID NO: 283869 - DNA, 25 bp, Probe Sequence
tgactggtctgttccctgggaacta

SEQ ID NO: 283870 - DNA, 25 bp, Probe Sequence
tgactgttactgtccttggcgaatc

SEQ ID NO: 283871 - DNA, 25 bp, Probe Sequence
tgacgttcttgcttttggcgcccac

SEQ ID NO: 283872 - DNA, 25 bp, Probe Sequence
tgaagtctttcagaaggcctccgta

SEQ ID NO: 283873 - DNA, 25 bp, Probe Sequence
tgaaccttttacagacttgccgtta

SEQ ID NO: 283874 - DNA, 25 bp, Probe Sequence
tgaaccttttacagacttgccgtta

SEQ ID NO: 283875 - DNA, 25 bp, Probe Sequence
tgaacctatttactttctgaccctt

SEQ ID NO: 283876 - DNA, 25 bp, Probe Sequence
tgaacaatacgaagtcccttccctt

SEQ ID NO: 283877 - DNA, 25 bp, Probe Sequence
tgagaaatcaccgattgcccttgtc

SEQ ID NO: 283878 - DNA, 25 bp, Probe Sequence
tgagcaaatccccttggacattctc

SEQ ID NO: 283879 - DNA, 25 bp, Probe Sequence
tgagcataatcattccttggagtta

SEQ ID NO: 283880 - DNA, 25 bp, Probe Sequence
tgagcccataagcctgggagttcga

SEQ ID NO: 283881 - DNA, 25 bp, Probe Sequence
tgagcccagaattcactaggttcga

SEQ ID NO: 283882 - DNA, 25 bp, Probe Sequence
tgactctagataacctcgggccgat

SEQ ID NO: 283883 - DNA, 25 bp, Probe Sequence
tgactctagataacctcgggccgat

SEQ ID NO: 283884 - DNA, 25 bp, Probe Sequence
tgacctggagatgctcacggggcag

SEQ ID NO: 283885 - DNA, 25 bp, Probe Sequence
tgagcctgcgttcctaggtggctcg

SEQ ID NO: 283886 - DNA, 25 bp, Probe Sequence
tgcactcggcctttgaggtgggggc

SEQ ID NO: 283887 - DNA, 25 bp, Probe Sequence
tgacccccatgcgtggctgtggggg

SEQ ID NO: 283888 - DNA, 25 bp, Probe Sequence
tgacccccatgcgtggctgtggggg

SEQ ID NO: 283889 - DNA, 25 bp, Probe Sequence
tgaccatactgtttgtctgtgggat

SEQ ID NO: 283890 - DNA, 25 bp, Probe Sequence
tgactcaagtgcccttcactgagag

SEQ ID NO: 283891 - DNA, 25 bp, Probe Sequence
tgactagagttgctggctcgaggcc

SEQ ID NO: 283892 - DNA, 25 bp, Probe Sequence
tgactagagttgctggctcgaggcc

SEQ ID NO: 283893 - DNA, 25 bp, Probe Sequence
tgaccgagttgggcagtctgaagcc

SEQ ID NO: 283894 - DNA, 25 bp, Probe Sequence
tgagcggatgtgactggcgtctgac

SEQ ID NO: 283895 - DNA, 25 bp, Probe Sequence
tgagctgagattacgccactacact

SEQ ID NO: 283896 - DNA, 25 bp, Probe Sequence
tgagctgagatagagccactacact

SEQ ID NO: 283897 - DNA, 25 bp, Probe Sequence
tgagctgagatcgcaccattgcact

SEQ ID NO: 283898 - DNA, 25 bp, Probe Sequence
tgagcagagattcatccagcacttg

SEQ ID NO: 283899 - DNA, 25 bp, Probe Sequence
tgacatgccattttctagcagctgc

SEQ ID NO: 283900 - DNA, 25 bp, Probe Sequence
tgagcacgcagacactgtgcagctg

SEQ ID NO: 283901 - DNA, 25 bp, Probe Sequence
tgagcaggcgatcacagcatgcact

SEQ ID NO: 283902 - DNA, 25 bp, Probe Sequence
tgagcaggatgtccacatgcatgac

SEQ ID NO: 283903 - DNA, 25 bp, Probe Sequence
tgagcagatgcagaactagaccccc

SEQ ID NO: 283904 - DNA, 25 bp, Probe Sequence
tgagcaagaggaagctgcagcccac

SEQ ID NO: 283905 - DNA, 25 bp, Probe Sequence
tgagcagcagggaatgtcaccctgc

SEQ ID NO: 283906 - DNA, 25 bp, Probe Sequence
tgagcacaaggcattggccctctgg

SEQ ID NO: 283907 - DNA, 25 bp, Probe Sequence
tgagaagcagccaggccacattcgg

SEQ ID NO: 283908 - DNA, 25 bp, Probe Sequence
tgagcaggacacgggccagatgcac

SEQ ID NO: 283909 - DNA, 25 bp, Probe Sequence
tgagaagtcactggtctagatcccg

SEQ ID NO: 283910 - DNA, 25 bp, Probe Sequence
tgagaagtctctgttgatgggcaag

SEQ ID NO: 283911 - DNA, 25 bp, Probe Sequence
tgagaatgttctagactcagaggta

SEQ ID NO: 283912 - DNA, 25 bp, Probe Sequence
tgagcttgctgttgtacacagggta

SEQ ID NO: 283913 - DNA, 25 bp, Probe Sequence
tgactcctgtgaagaatcagggtca

SEQ ID NO: 283914 - DNA, 25 bp, Probe Sequence
tgacaactttaaacgggtcttcaag

SEQ ID NO: 283915 - DNA, 25 bp, Probe Sequence
tgaagacctttaacagggtcggtgg

SEQ ID NO: 283916 - DNA, 25 bp, Probe Sequence
tgaacagcctttgccaatcgtgggt

SEQ ID NO: 283917 - DNA, 25 bp, Probe Sequence
tgagccagctttacccaatgaaggg

SEQ ID NO: 283918 - DNA, 25 bp, Probe Sequence
tgaccgtatgtcaccaagagatgat

SEQ ID NO: 283919 - DNA, 25 bp, Probe Sequence
tgaccagtcttggccttaagctgac

SEQ ID NO: 283920 - DNA, 25 bp, Probe Sequence
tgaccatctcgtgcctgaaacaatt

SEQ ID NO: 283921 - DNA, 25 bp, Probe Sequence
tgacttatttccctaaactatttat

SEQ ID NO: 283922 - DNA, 25 bp, Probe Sequence
tgacagtctttctagtaagcactaa

SEQ ID NO: 283923 - DNA, 25 bp, Probe Sequence
tgctcagcctagaaactaccagtaa

SEQ ID NO: 283924 - DNA, 25 bp, Probe Sequence
tgagcactgtagacaaatgtttgta

SEQ ID NO: 283925 - DNA, 25 bp, Probe Sequence
tgaagttggccttttattggactaa

SEQ ID NO: 283926 - DNA, 25 bp, Probe Sequence
tgaagttgccctacttttaactttg

SEQ ID NO: 283927 - DNA, 25 bp, Probe Sequence
tgaaataccactacctttatagttt

SEQ ID NO: 283928 - DNA, 25 bp, Probe Sequence
tgagaataacttaaggttctagttt

SEQ ID NO: 283929 - DNA, 25 bp, Probe Sequence
tgaaattatttaagggttatgctgc

SEQ ID NO: 283930 - DNA, 25 bp, Probe Sequence
tgagaatgttgtccttgtggttcct

SEQ ID NO: 283931 - DNA, 25 bp, Probe Sequence
tgaaatgtttactgacacttacata

SEQ ID NO: 283932 - DNA, 25 bp, Probe Sequence
tgaacgccaaattgggcctgtaagg

SEQ ID NO: 283933 - DNA, 25 bp, Probe Sequence
tgaccgccaattgggccggttaagg

SEQ ID NO: 283934 - DNA, 25 bp, Probe Sequence
tgaccctgcgcaaggtggcgggtga

SEQ ID NO: 283935 - DNA, 25 bp, Probe Sequence
tgactcctgccaagtgagtggagga

SEQ ID NO: 283936 - DNA, 25 bp, Probe Sequence
tgactgcgtagctgagaggggaaca

SEQ ID NO: 283937 - DNA, 25 bp, Probe Sequence
tgactgacgagccgaggggtggccg

SEQ ID NO: 283938 - DNA, 25 bp, Probe Sequence
tgacttcacagcccagcatgggggc

SEQ ID NO: 283939 - DNA, 25 bp, Probe Sequence
tgactgccacagctgcagactgaga

SEQ ID NO: 283940 - DNA, 25 bp, Probe Sequence
tgactccatatggaggcctcacacc

SEQ ID NO: 283941 - DNA, 25 bp, Probe Sequence
tgacttcattgagacacattacctg

SEQ ID NO: 283942 - DNA, 25 bp, Probe Sequence
tgaccttcggcatgacattgatcgc

SEQ ID NO: 283943 - DNA, 25 bp, Probe Sequence
tgaccattaagcttgagatgttctg

SEQ ID NO: 283944 - DNA, 25 bp, Probe Sequence
tgaagcttaccactgcagattctca

SEQ ID NO: 283945 - DNA, 25 bp, Probe Sequence
tgacagttcatcttcaggtgtccag

SEQ ID NO: 283946 - DNA, 25 bp, Probe Sequence
tgagctgattattaacagttactga

SEQ ID NO: 283947 - DNA, 25 bp, Probe Sequence
tgagccaatatctcaccattgcact

SEQ ID NO: 283948 - DNA, 25 bp, Probe Sequence
tgaccgatcatcaaacgcagagccc

SEQ ID NO: 283949 - DNA, 25 bp, Probe Sequence
tgactggtttagtctgcagtctccg

SEQ ID NO: 283950 - DNA, 25 bp, Probe Sequence
tgactggtaagaccatcaccctcga

SEQ ID NO: 283951 - DNA, 25 bp, Probe Sequence
tgactggtaagaccatcaccctcga

SEQ ID NO: 283952 - DNA, 25 bp, Probe Sequence
tgacggctacaagtgccgactcctg

SEQ ID NO: 283953 - DNA, 25 bp, Probe Sequence
tgactggtaagggaacatgtccttc

SEQ ID NO: 283954 - DNA, 25 bp, Probe Sequence
tgaccttaagtggcccagtcaggct

SEQ ID NO: 283955 - DNA, 25 bp, Probe Sequence
tgacctctgtagaccttcagtactc

SEQ ID NO: 283956 - DNA, 25 bp, Probe Sequence
tgagcccaggagactttgaatgatc

SEQ ID NO: 283957 - DNA, 25 bp, Probe Sequence
tgagcccaggagtttgagaccagcc

SEQ ID NO: 283958 - DNA, 25 bp, Probe Sequence
tgagcccaggaggtcgaggctgcca

SEQ ID NO: 283959 - DNA, 25 bp, Probe Sequence
tgagcccattacgcgaggtgacggc

SEQ ID NO: 283960 - DNA, 25 bp, Probe Sequence
tgagctgtcatttatggagggtgca

SEQ ID NO: 283961 - DNA, 25 bp, Probe Sequence
tgactctctgtgccaagggctgtgc

SEQ ID NO: 283962 - DNA, 25 bp, Probe Sequence
tgacgcgagcagccaaggtgttgga

SEQ ID NO: 283963 - DNA, 25 bp, Probe Sequence
tacacggaggttgtgtttacaatgt

SEQ ID NO: 283964 - DNA, 25 bp, Probe Sequence
tgagccaggaggatttgttaagaac

SEQ ID NO: 283965 - DNA, 25 bp, Probe Sequence
tgacggagcgagatcttgtttcaaa

SEQ ID NO: 283966 - DNA, 25 bp, Probe Sequence
tgacgaagcgaaatttgaagatgac

SEQ ID NO: 283967 - DNA, 25 bp, Probe Sequence
tgactgtcaggatgttgcttcagag

SEQ ID NO: 283968 - DNA, 25 bp, Probe Sequence
tgacccagagcatgtttaccagttt

SEQ ID NO: 283969 - DNA, 25 bp, Probe Sequence
tgcaacctagtactttattagttta

SEQ ID NO: 283970 - DNA, 25 bp, Probe Sequence
tgaccgctagtatgttggaagttat

SEQ ID NO: 283971 - DNA, 25 bp, Probe Sequence
tgaaagccagtattagggacaaatt

SEQ ID NO: 283972 - DNA, 25 bp, Probe Sequence
tgaaactcagttttccaaccgagtt

SEQ ID NO: 283973 - DNA, 25 bp, Probe Sequence
tgacaaccgctatatccgcgcggtg

SEQ ID NO: 283974 - DNA, 25 bp, Probe Sequence
tgacaactgccgcagacctgggggt

SEQ ID NO: 283975 - DNA, 25 bp, Probe Sequence
tgacaactgccgcagacctgggggt

SEQ ID NO: 283976 - DNA, 25 bp, Probe Sequence
tgacaactgccgcagacctgggggt

SEQ ID NO: 283977 - DNA, 25 bp, Probe Sequence
tgagcaactaggactagcctgggca

SEQ ID NO: 283978 - DNA, 25 bp, Probe Sequence
tgagcgaagagagctaccgcgtctt

SEQ ID NO: 283979 - DNA, 25 bp, Probe Sequence
tgagcgagaagacgtaccagcccat

SEQ ID NO: 283980 - DNA, 25 bp, Probe Sequence
tgagcgagacggaacctggctcctt

SEQ ID NO: 283981 - DNA, 25 bp, Probe Sequence
tgacaggctgacctacctgagtctc

SEQ ID NO: 283982 - DNA, 25 bp, Probe Sequence
tgagcatcctcagatgtcggtgtct

SEQ ID NO: 283983 - DNA, 25 bp, Probe Sequence
tgagctgcctcaacagggctgtatt

SEQ ID NO: 283984 - DNA, 25 bp, Probe Sequence
tgagcgcactgatcatgatgaggta

SEQ ID NO: 283985 - DNA, 25 bp, Probe Sequence
tgagctgcagcaataaaagtgctat

SEQ ID NO: 283986 - DNA, 25 bp, Probe Sequence
tgaccagcttgattaatgtatatta

SEQ ID NO: 283987 - DNA, 25 bp, Probe Sequence
tgaccagcactgtttatggctgcta

SEQ ID NO: 283988 - DNA, 25 bp, Probe Sequence
tgaccagaaacacttcgctgctgca

SEQ ID NO: 283989 - DNA, 25 bp, Probe Sequence
tgacaaaaaacttcagttctcctta

SEQ ID NO: 283990 - DNA, 25 bp, Probe Sequence
tgacaaaaaacttcagttctcctta

SEQ ID NO: 283991 - DNA, 25 bp, Probe Sequence
tgacaaaaaccaaagtctcttctgc

SEQ ID NO: 283992 - DNA, 25 bp, Probe Sequence
tgaaataaacgaggtcctctcctgg

SEQ ID NO: 283993 - DNA, 25 bp, Probe Sequence
tgacctgaaagaccgaccattcttc

SEQ ID NO: 283994 - DNA, 25 bp, Probe Sequence
tgaccagaaaggcagccctgtccca

SEQ ID NO: 283995 - DNA, 25 bp, Probe Sequence
tgactctgagaaccaagcccggaag

SEQ ID NO: 283996 - DNA, 25 bp, Probe Sequence
tgactcggaccctgactgaggatgg

SEQ ID NO: 283997 - DNA, 25 bp, Probe Sequence
tgaccgagattcccgacgagagaga

SEQ ID NO: 283998 - DNA, 25 bp, Probe Sequence
tgacccaagccacgaacgagctgga

SEQ ID NO: 283999 - DNA, 25 bp, Probe Sequence
tgacctatggactgtcctactggca

SEQ ID NO: 284000 - DNA, 25 bp, Probe Sequence
tgacgtcggacagatactctcgtgc

SEQ ID NO: 284001 - DNA, 25 bp, Probe Sequence
tgacggtggtcagcacctttgagct

SEQ ID NO: 284002 - DNA, 25 bp, Probe Sequence
tgacaggtttagacaccccagtgct

SEQ ID NO: 284003 - DNA, 25 bp, Probe Sequence
tgaaggtgtttacgcccgagatgaa

SEQ ID NO: 284004 - DNA, 25 bp, Probe Sequence
tgaaggtgtttacgcccgagatgaa

SEQ ID NO: 284005 - DNA, 25 bp, Probe Sequence
taaggaattaagtctccgattatta

SEQ ID NO: 284006 - DNA, 25 bp, Probe Sequence
tgaaagtgttaaccttttggattag

SEQ ID NO: 284007 - DNA, 25 bp, Probe Sequence
tgaatgttttaaccattttcatggt

SEQ ID NO: 284008 - DNA, 25 bp, Probe Sequence
tgagcatttcttcaacatcttcaat

SEQ ID NO: 284009 - DNA, 25 bp, Probe Sequence
tgacttcactggcaaatcctgcaac

SEQ ID NO: 284010 - DNA, 25 bp, Probe Sequence
tgagcctcactgcaaaattagtgca

SEQ ID NO: 284011 - DNA, 25 bp, Probe Sequence
tgacctcactggaggctacgtcacc

SEQ ID NO: 284012 - DNA, 25 bp, Probe Sequence
tgacctatgctcctgggatacgcta

SEQ ID NO: 284013 - DNA, 25 bp, Probe Sequence
tgagctgtagctgcgtgagtacctc

SEQ ID NO: 284014 - DNA, 25 bp, Probe Sequence
tgactgctcctgtggaaactccaca

SEQ ID NO: 284015 - DNA, 25 bp, Probe Sequence
tgactccacggggattttccaagtc

SEQ ID NO: 284016 - DNA, 25 bp, Probe Sequence
tgactcacgggggattttcccaagt

SEQ ID NO: 284017 - DNA, 25 bp, Probe Sequence
tgcaccacggcgtttttttacaaca

SEQ ID NO: 284018 - DNA, 25 bp, Probe Sequence
tgaactcgggtttcttagtaagaca

SEQ ID NO: 284019 - DNA, 25 bp, Probe Sequence
tgaccttggttttctcttctaagtt

SEQ ID NO: 284020 - DNA, 25 bp, Probe Sequence
tgacctctggatcttccttgaaagg

SEQ ID NO: 284021 - DNA, 25 bp, Probe Sequence
tgaatctcgtgtctggccacgtgaa

SEQ ID NO: 284022 - DNA, 25 bp, Probe Sequence
tgaatctagagtcttccccgaaaag

SEQ ID NO: 284023 - DNA, 25 bp, Probe Sequence
tgaactaaggtgtctaccatgatta

SEQ ID NO: 284024 - DNA, 25 bp, Probe Sequence
tgaactgaccaggcactaccgtaaa

SEQ ID NO: 284025 - DNA, 25 bp, Probe Sequence
tgaaggaccggaaacccttgaacag

SEQ ID NO: 284026 - DNA, 25 bp, Probe Sequence
taaggtacttaataccagtgaactg

SEQ ID NO: 284027 - DNA, 25 bp, Probe Sequence
tcagtttccttataaccctctgact

SEQ ID NO: 284028 - DNA, 25 bp, Probe Sequence
tagttaagtcaatccccagtctact

SEQ ID NO: 284029 - DNA, 25 bp, Probe Sequence
tcgtttagtgaacccgtcagatcgc

SEQ ID NO: 284030 - DNA, 25 bp, Probe Sequence
tcgttttagtgaaccgtcagatcgc

SEQ ID NO: 284031 - DNA, 25 bp, Probe Sequence
tcgttgctaaaggaccagaaatact

SEQ ID NO: 284032 - DNA, 25 bp, Probe Sequence
tgaattttcagggaccagaaaacat

SEQ ID NO: 284033 - DNA, 25 bp, Probe Sequence
tgaaaaccatggcacgagaacaact

SEQ ID NO: 284034 - DNA, 25 bp, Probe Sequence
tgaaaaccttagacgtaatccatgg

SEQ ID NO: 284035 - DNA, 25 bp, Probe Sequence
tgaaatgacgttgccgattcaccag

SEQ ID NO: 284036 - DNA, 25 bp, Probe Sequence
tgaattccgtttatgtctaccgtcc

SEQ ID NO: 284037 - DNA, 25 bp, Probe Sequence
tgaattccgtttatgtctaccgtcc

SEQ ID NO: 284038 - DNA, 25 bp, Probe Sequence
tatttttgaaaatgttttggtccag

SEQ ID NO: 284039 - DNA, 25 bp, Probe Sequence
tataggttaaaatcttctcggtcac

SEQ ID NO: 284040 - DNA, 25 bp, Probe Sequence
tgaaggttcctatcatcgactcgga

SEQ ID NO: 284041 - DNA, 25 bp, Probe Sequence
tccaagtgggctgacttatccggca

SEQ ID NO: 284042 - DNA, 25 bp, Probe Sequence
tgaccagggctcgcactttactgga

SEQ ID NO: 284043 - DNA, 25 bp, Probe Sequence
tgaccagcaggcttaccttgttcaa

SEQ ID NO: 284044 - DNA, 25 bp, Probe Sequence
tgaccagcaggcttaccttgttcaa

SEQ ID NO: 284045 - DNA, 25 bp, Probe Sequence
tgactgaaggcctcacgtgtgtcac

SEQ ID NO: 284046 - DNA, 25 bp, Probe Sequence
tgactctatggcgttagcgtttccg

SEQ ID NO: 284047 - DNA, 25 bp, Probe Sequence
tgacttgatgcctcttggtatatca

SEQ ID NO: 284048 - DNA, 25 bp, Probe Sequence
tgacctgtcctctttgtgataattc

SEQ ID NO: 284049 - DNA, 25 bp, Probe Sequence
tgagccccctgagagaatggagttc

SEQ ID NO: 284050 - DNA, 25 bp, Probe Sequence
tgagcctacctatagcactggatta

SEQ ID NO: 284051 - DNA, 25 bp, Probe Sequence
tgaccatgaggccacggcctggatt

SEQ ID NO: 284052 - DNA, 25 bp, Probe Sequence
tgagcgcatggacacaggcacgact

SEQ ID NO: 284053 - DNA, 25 bp, Probe Sequence
tgagctcataggaacaggtagactt

SEQ ID NO: 284054 - DNA, 25 bp, Probe Sequence
tgactgatgtggtagggtaatcttg

SEQ ID NO: 284055 - DNA, 25 bp, Probe Sequence
tgacttgggataggactgagtggta

SEQ ID NO: 284056 - DNA, 25 bp, Probe Sequence
tgactgaggtcaacaggcgggtgtg

SEQ ID NO: 284057 - DNA, 25 bp, Probe Sequence
tgactgaagttggcccacaggattg

SEQ ID NO: 284058 - DNA, 25 bp, Probe Sequence
tgacatgaatctatgcgtgaaggtt

SEQ ID NO: 284059 - DNA, 25 bp, Probe Sequence
tgaaagtgctttccggaagttagat

SEQ ID NO: 284060 - DNA, 25 bp, Probe Sequence
tgaaagctcttcagtggaccttgag

SEQ ID NO: 284061 - DNA, 25 bp, Probe Sequence
tgacaagcttgttggggagttcctg

SEQ ID NO: 284062 - DNA, 25 bp, Probe Sequence
tgaacagtttcaggttatattttaa

SEQ ID NO: 284063 - DNA, 25 bp, Probe Sequence
tgaaccttctgtgtaactttttatt

SEQ ID NO: 284064 - DNA, 25 bp, Probe Sequence
tgaccctttaccatattttgttttg

SEQ ID NO: 284065 - DNA, 25 bp, Probe Sequence
tgagcctttaatggacttatttctt

SEQ ID NO: 284066 - DNA, 25 bp, Probe Sequence
tgacctttcacttaatgtactattt

SEQ ID NO: 284067 - DNA, 25 bp, Probe Sequence
tgacttttgcagatggaggaatttc

SEQ ID NO: 284068 - DNA, 25 bp, Probe Sequence
tgactttcatgcttctggggttgga

SEQ ID NO: 284069 - DNA, 25 bp, Probe Sequence
tgaaatgtagcgccgggcgcggtgg

SEQ ID NO: 284070 - DNA, 25 bp, Probe Sequence
tgacagattacggcgaggagcagcg

SEQ ID NO: 284071 - DNA, 25 bp, Probe Sequence
tgaccattgatgccccagggcagct

SEQ ID NO: 284072 - DNA, 25 bp, Probe Sequence
tgactgtgttgtcccagggctgatg

SEQ ID NO: 284073 - DNA, 25 bp, Probe Sequence
tgaccacagtgtcacagggtttctg

SEQ ID NO: 284074 - DNA, 25 bp, Probe Sequence
tgacctcagctaagactgggtcctt

SEQ ID NO: 284075 - DNA, 25 bp, Probe Sequence
tgacccacatcaaggcgggctgcat

SEQ ID NO: 284076 - DNA, 25 bp, Probe Sequence
tgactacagcatcgggcgggacatc

SEQ ID NO: 284077 - DNA, 25 bp, Probe Sequence
tgacccgcatcgggctggagacgtc

SEQ ID NO: 284078 - DNA, 25 bp, Probe Sequence
tgacccgatgggacaacagacctgc

SEQ ID NO: 284079 - DNA, 25 bp, Probe Sequence
tgaccgtcgggacagatactctgcg

SEQ ID NO: 284080 - DNA, 25 bp, Probe Sequence
tgagcggtctgcagagccgctactc

SEQ ID NO: 284081 - DNA, 25 bp, Probe Sequence
tgacaggctctcaggaccgagctgc

SEQ ID NO: 284082 - DNA, 25 bp, Probe Sequence
tgacatattccaaaagctcaacagc

SEQ ID NO: 284083 - DNA, 25 bp, Probe Sequence
tgaccttcataaagcatataaacaa

SEQ ID NO: 284084 - DNA, 25 bp, Probe Sequence
tgacagttcaagaaatcagccaact

SEQ ID NO: 284085 - DNA, 25 bp, Probe Sequence
tgacggtggggattgctgcacctcc

SEQ ID NO: 284086 - DNA, 25 bp, Probe Sequence
tgactcagatggtgcatatgctccc

SEQ ID NO: 284087 - DNA, 25 bp, Probe Sequence
tgaccactgtgatctgcagtcctgc

SEQ ID NO: 284088 - DNA, 25 bp, Probe Sequence
tgacggtgtgaatgactctccagct

SEQ ID NO: 284089 - DNA, 25 bp, Probe Sequence
tgacaggtgagcttggtctgggcct

SEQ ID NO: 284090 - DNA, 25 bp, Probe Sequence
tgagccgtgagctgggaggtgcttc

SEQ ID NO: 284091 - DNA, 25 bp, Probe Sequence
tgactctgtgactggccaggtttca

SEQ ID NO: 284092 - DNA, 25 bp, Probe Sequence
tgaccatgagactttgctgagaagt

SEQ ID NO: 284093 - DNA, 25 bp, Probe Sequence
tgacctgaggttggtggactttccc

SEQ ID NO: 284094 - DNA, 25 bp, Probe Sequence
tgaccaaagttgggagatcactgtc

SEQ ID NO: 284095 - DNA, 25 bp, Probe Sequence
tgaccctattttttgacacttccat

SEQ ID NO: 284096 - DNA, 25 bp, Probe Sequence
tgcagcagcctttttgtaaacttcc

SEQ ID NO: 284097 - DNA, 25 bp, Probe Sequence
tgcagaacattcttgtggtacaatt

SEQ ID NO: 284098 - DNA, 25 bp, Probe Sequence
tgagcccattcatttgctgattata

SEQ ID NO: 284099 - DNA, 25 bp, Probe Sequence
tgacctactctgtctgctgtgatta

SEQ ID NO: 284100 - DNA, 25 bp, Probe Sequence
tgacctgacctgatgtccattcatc

SEQ ID NO: 284101 - DNA, 25 bp, Probe Sequence
tgacttcatcttaatgtacattcac

SEQ ID NO: 284102 - DNA, 25 bp, Probe Sequence
tgactgtgccttactgtacatgctc

SEQ ID NO: 284103 - DNA, 25 bp, Probe Sequence
tgactgtggtgtccttgagatgctc

SEQ ID NO: 284104 - DNA, 25 bp, Probe Sequence
tgacttcaagagcctctggcatctc

SEQ ID NO: 284105 - DNA, 25 bp, Probe Sequence
tgaaatataagcctgcggccttaac

SEQ ID NO: 284106 - DNA, 25 bp, Probe Sequence
ttatattaccttctccaggaaccct

SEQ ID NO: 284107 - DNA, 25 bp, Probe Sequence
tcttttacctgtcaccgaagccagg

SEQ ID NO: 284108 - DNA, 25 bp, Probe Sequence
tgcattttaccccaaccgaaggtga

SEQ ID NO: 284109 - DNA, 25 bp, Probe Sequence
tgactctttcctcacagggaaggcg

SEQ ID NO: 284110 - DNA, 25 bp, Probe Sequence
tgagccttatttctctggaagcggc

SEQ ID NO: 284111 - DNA, 25 bp, Probe Sequence
tgcacacctcttgttgggaagcgtg

SEQ ID NO: 284112 - DNA, 25 bp, Probe Sequence
tgacacctactacctgaagaccgtc

SEQ ID NO: 284113 - DNA, 25 bp, Probe Sequence
tgacattgagaaccctgaaacccca

SEQ ID NO: 284114 - DNA, 25 bp, Probe Sequence
tgaaattggagcctctcgaaacccc

SEQ ID NO: 284115 - DNA, 25 bp, Probe Sequence
tgaaagtctaccttcgaaaccaagt

SEQ ID NO: 284116 - DNA, 25 bp, Probe Sequence
tgacaagttccctcacgagaatgaa

SEQ ID NO: 284117 - DNA, 25 bp, Probe Sequence
tgaactgttgcaactgaacgaggaa

SEQ ID NO: 284118 - DNA, 25 bp, Probe Sequence
tgagccatcctcacagatgatcgag

SEQ ID NO: 284119 - DNA, 25 bp, Probe Sequence
tgagcctctctgatgatggagatga

SEQ ID NO: 284120 - DNA, 25 bp, Probe Sequence
tgagccctcgtgctggaatggttgt

SEQ ID NO: 284121 - DNA, 25 bp, Probe Sequence
tgaacccaggatgtgaaggttgtgg

SEQ ID NO: 284122 - DNA, 25 bp, Probe Sequence
tgaagcttcatgcacttaaagaagt

SEQ ID NO: 284123 - DNA, 25 bp, Probe Sequence
tgacagagttggcttcagaaggtgt

SEQ ID NO: 284124 - DNA, 25 bp, Probe Sequence
tgaccgtctgtccttcaggagagga

SEQ ID NO: 284125 - DNA, 25 bp, Probe Sequence
tgactcatgtcattttctcagtaag

SEQ ID NO: 284126 - DNA, 25 bp, Probe Sequence
tgacagatatcattctccaccaatc

SEQ ID NO: 284127 - DNA, 25 bp, Probe Sequence
tgacagaaccagctgcaccatgtac

SEQ ID NO: 284128 - DNA, 25 bp, Probe Sequence
tgagcgaagccatcgcagctggcat

SEQ ID NO: 284129 - DNA, 25 bp, Probe Sequence
tgagccaagatcacgccattgtact

SEQ ID NO: 284130 - DNA, 25 bp, Probe Sequence
tgaccagagattatgccactgccct

SEQ ID NO: 284131 - DNA, 25 bp, Probe Sequence
tgagccaagattacgacaccgcact

SEQ ID NO: 284132 - DNA, 25 bp, Probe Sequence
tgactcaacatgttactgaccagca

SEQ ID NO: 284133 - DNA, 25 bp, Probe Sequence
tgaccagaagcttgacgcaccaagc

SEQ ID NO: 284134 - DNA, 25 bp, Probe Sequence
tgacgcatgaagtttcgcaacatgg

SEQ ID NO: 284135 - DNA, 25 bp, Probe Sequence
tgacagcgaacatttcatgaaatca

SEQ ID NO: 284136 - DNA, 25 bp, Probe Sequence
tgaccaacatatctcatgaatattc

SEQ ID NO: 284137 - DNA, 25 bp, Probe Sequence
tgaccaggcaactttgagatcatga

SEQ ID NO: 284138 - DNA, 25 bp, Probe Sequence
tgagccagtgatcacctgagtcaga

SEQ ID NO: 284139 - DNA, 25 bp, Probe Sequence
tgacgagttaacgggtgcagcacac

SEQ ID NO: 284140 - DNA, 25 bp, Probe Sequence
tgacgagttaatgggtgcagcacac

SEQ ID NO: 284141 - DNA, 25 bp, Probe Sequence
tgacaacttcctgagatggcacagt

SEQ ID NO: 284142 - DNA, 25 bp, Probe Sequence
tgacaaacccgatatggctgagatc

SEQ ID NO: 284143 - DNA, 25 bp, Probe Sequence
tgaccataggcctattaggtgacac

SEQ ID NO: 284144 - DNA, 25 bp, Probe Sequence
tgacacatcgttgcttcaggtacgc

SEQ ID NO: 284145 - DNA, 25 bp, Probe Sequence
tgaacaccttgctttgtggtcactg

SEQ ID NO: 284146 - DNA, 25 bp, Probe Sequence
tgaaaactactccagtggctgactg

SEQ ID NO: 284147 - DNA, 25 bp, Probe Sequence
tgaaatccttcacgcatatcagctg

SEQ ID NO: 284148 - DNA, 25 bp, Probe Sequence
tgacccagccatcccattactgggt

SEQ ID NO: 284149 - DNA, 25 bp, Probe Sequence
tgagccctggctcatatacatgttg

SEQ ID NO: 284150 - DNA, 25 bp, Probe Sequence
tgagccaattcccataacagataga

SEQ ID NO: 284151 - DNA, 25 bp, Probe Sequence
tgagccagattaacaggaatgaaga

SEQ ID NO: 284152 - DNA, 25 bp, Probe Sequence
tgacggcttctccagagagatgaag

SEQ ID NO: 284153 - DNA, 25 bp, Probe Sequence
tgacgccatccctaggaggatctct

SEQ ID NO: 284154 - DNA, 25 bp, Probe Sequence
tgacccatctcagaagcagaatctc

SEQ ID NO: 284155 - DNA, 25 bp, Probe Sequence
tgacctcttcagcatggtgacttcc

SEQ ID NO: 284156 - DNA, 25 bp, Probe Sequence
tgacctcttagttgcctcaagtgtt

SEQ ID NO: 284157 - DNA, 25 bp, Probe Sequence
tgacttcttatgtgtgctctatgag

SEQ ID NO: 284158 - DNA, 25 bp, Probe Sequence
tgaccaccgtgaagtgcctatgatg

SEQ ID NO: 284159 - DNA, 25 bp, Probe Sequence
tgacccacattcttggcactatgaa

SEQ ID NO: 284160 - DNA, 25 bp, Probe Sequence
tgaccacagcctccatggatctaat

SEQ ID NO: 284161 - DNA, 25 bp, Probe Sequence
tgacctcaggtgatggtgaaataat

SEQ ID NO: 284162 - DNA, 25 bp, Probe Sequence
tgacccctgctgagcgtgatgatct

SEQ ID NO: 284163 - DNA, 25 bp, Probe Sequence
tgacctctctgcgtgacagtggtcc

SEQ ID NO: 284164 - DNA, 25 bp, Probe Sequence
tgacctctctgggcaaggactggca

SEQ ID NO: 284165 - DNA, 25 bp, Probe Sequence
tgacctcctggcaaattgctgcgtc

SEQ ID NO: 284166 - DNA, 25 bp, Probe Sequence
tgacattccggaaatttggatcgaa

SEQ ID NO: 284167 - DNA, 25 bp, Probe Sequence
tgaattgcctaaaaaggaacctgtt

SEQ ID NO: 284168 - DNA, 25 bp, Probe Sequence
tgcgtgtccgaaagaacttaacgtt

SEQ ID NO: 284169 - DNA, 25 bp, Probe Sequence
tgccgaacgagaaaactgtccattt

SEQ ID NO: 284170 - DNA, 25 bp, Probe Sequence
tgacgcaaaataccaccttggcgcc

SEQ ID NO: 284171 - DNA, 25 bp, Probe Sequence
tgaagccaaaagtatccctttccct

SEQ ID NO: 284172 - DNA, 25 bp, Probe Sequence
tgaaagacaacagctccctttctgc

SEQ ID NO: 284173 - DNA, 25 bp, Probe Sequence
tgaaagccacagccctagggttctg

SEQ ID NO: 284174 - DNA, 25 bp, Probe Sequence
tgaaagccgaagttatggaccgcta

SEQ ID NO: 284175 - DNA, 25 bp, Probe Sequence
tgcacgagcctatggttgtggccgc

SEQ ID NO: 284176 - DNA, 25 bp, Probe Sequence
tgacgacctagagagatcccggctc

SEQ ID NO: 284177 - DNA, 25 bp, Probe Sequence
tgaagaccctggcaagcccagagca

SEQ ID NO: 284178 - DNA, 25 bp, Probe Sequence
tgaaaccttaaaacctgcatacctc

SEQ ID NO: 284179 - DNA, 25 bp, Probe Sequence
tgaaaccagtaatcagcccagtcct

SEQ ID NO: 284180 - DNA, 25 bp, Probe Sequence
taataccaagaagagtacttttcta

SEQ ID NO: 284181 - DNA, 25 bp, Probe Sequence
tgaaaacccatagagaaactttcta

SEQ ID NO: 284182 - DNA, 25 bp, Probe Sequence
tgaaaaacttagggacatcctgttt

SEQ ID NO: 284183 - DNA, 25 bp, Probe Sequence
tgaacagtttaagcagactggctga

SEQ ID NO: 284184 - DNA, 25 bp, Probe Sequence
tgaccatggttaactgagactgcag

SEQ ID NO: 284185 - DNA, 25 bp, Probe Sequence
tgaccaactctagggacactcagga

SEQ ID NO: 284186 - DNA, 25 bp, Probe Sequence
tgaccaagcccgggacagtcaaggc

SEQ ID NO: 284187 - DNA, 25 bp, Probe Sequence
tgaccgagaccgctacatggaacct

SEQ ID NO: 284188 - DNA, 25 bp, Probe Sequence
tgacctcagaaacacagctggacac

SEQ ID NO: 284189 - DNA, 25 bp, Probe Sequence
tgacctcagaaacacagctggacac

SEQ ID NO: 284190 - DNA, 25 bp, Probe Sequence
tgaactacggactgcactgaaagct

SEQ ID NO: 284191 - DNA, 25 bp, Probe Sequence
tgaaccttttctggccatgaaccat

SEQ ID NO: 284192 - DNA, 25 bp, Probe Sequence
tgaactttgttcacaccaacttgcg

SEQ ID NO: 284193 - DNA, 25 bp, Probe Sequence
tgaccttctgttgaacgtacctgag

SEQ ID NO: 284194 - DNA, 25 bp, Probe Sequence
tgaccgtctttgaaagcgacaaatg

SEQ ID NO: 284195 - DNA, 25 bp, Probe Sequence
tgaccgtctttgaaagcgacaaatg

SEQ ID NO: 284196 - DNA, 25 bp, Probe Sequence
tgacccctttgatattccagcaagt

SEQ ID NO: 284197 - DNA, 25 bp, Probe Sequence
tgacaccctttatatcccagaatgg

SEQ ID NO: 284198 - DNA, 25 bp, Probe Sequence
tgactcacacttgtaatcccagcaa

SEQ ID NO: 284199 - DNA, 25 bp, Probe Sequence
tgactgcatagtattcactttatga

SEQ ID NO: 284200 - DNA, 25 bp, Probe Sequence
tgactgtaatttaacatctttttct

SEQ ID NO: 284201 - DNA, 25 bp, Probe Sequence
tgacgattactcttgacacttttat

SEQ ID NO: 284202 - DNA, 25 bp, Probe Sequence
tgaacttgtttggaacttgtcataa

SEQ ID NO: 284203 - DNA, 25 bp, Probe Sequence
tgaaatcttcctcgtcagtggtcaa

SEQ ID NO: 284204 - DNA, 25 bp, Probe Sequence
tgaaatgttcgttttgtggaaaaga

SEQ ID NO: 284205 - DNA, 25 bp, Probe Sequence
ttacggtcctactgagcaaaaaata

SEQ ID NO: 284206 - DNA, 25 bp, Probe Sequence
ttaccctacctctgccaaaaagtgg

SEQ ID NO: 284207 - DNA, 25 bp, Probe Sequence
taaggccttccctgtcagaaggggg

SEQ ID NO: 284208 - DNA, 25 bp, Probe Sequence
tgaaggacttcctgttaaaaatgga

SEQ ID NO: 284209 - DNA, 25 bp, Probe Sequence
tgaagaagttcctagtttacagttc

SEQ ID NO: 284210 - DNA, 25 bp, Probe Sequence
tgaaagagttcagacttatcaccat

SEQ ID NO: 284211 - DNA, 25 bp, Probe Sequence
tgacttgagatttcagactggcaac

SEQ ID NO: 284212 - DNA, 25 bp, Probe Sequence
tgactgtgagtttccccacatagct

SEQ ID NO: 284213 - DNA, 25 bp, Probe Sequence
tgacttacttcagctctcatgaggc

SEQ ID NO: 284214 - DNA, 25 bp, Probe Sequence
tgacttcatgtctcatatccaggtc

SEQ ID NO: 284215 - DNA, 25 bp, Probe Sequence
tgacttcatgctctgataactgcct

SEQ ID NO: 284216 - DNA, 25 bp, Probe Sequence
tgacattcggcttgatccatgtcca

SEQ ID NO: 284217 - DNA, 25 bp, Probe Sequence
tgactctatgtttgctccagacaca

SEQ ID NO: 284218 - DNA, 25 bp, Probe Sequence
tgaccttctgggaccagtgcacaga

SEQ ID NO: 284219 - DNA, 25 bp, Probe Sequence
tgacagtgacgggtcacatgatctc

SEQ ID NO: 284220 - DNA, 25 bp, Probe Sequence
tgacagtgtgcagacagcaatgata

SEQ ID NO: 284221 - DNA, 25 bp, Probe Sequence
tgacagcagtgcttacatcaaatcc

SEQ ID NO: 284222 - DNA, 25 bp, Probe Sequence
tgacagaggttactctagcctgctt

SEQ ID NO: 284223 - DNA, 25 bp, Probe Sequence
tgactgagttcagtcctactctgct

SEQ ID NO: 284224 - DNA, 25 bp, Probe Sequence
tgacagtgcttgcatcctatttggt

SEQ ID NO: 284225 - DNA, 25 bp, Probe Sequence
tgacattgctacgtttctaccagtg

SEQ ID NO: 284226 - DNA, 25 bp, Probe Sequence
tgacgtcacgcagttctcttacgtg

SEQ ID NO: 284227 - DNA, 25 bp, Probe Sequence
tgacgagtctcagatcattttcagt

SEQ ID NO: 284228 - DNA, 25 bp, Probe Sequence
tgacggttcataaatggctgattta

SEQ ID NO: 284229 - DNA, 25 bp, Probe Sequence
tgacggtcaataaggacgtatgttc

SEQ ID NO: 284230 - DNA, 25 bp, Probe Sequence
tcaggttaaagagggcgttggtaat

SEQ ID NO: 284231 - DNA, 25 bp, Probe Sequence
taatgcctaagtttcccctggaaat

SEQ ID NO: 284232 - DNA, 25 bp, Probe Sequence
tgaagttaactgttccccttggtat

SEQ ID NO: 284233 - DNA, 25 bp, Probe Sequence
tgaaattataaatgtcccttgttac

SEQ ID NO: 284234 - DNA, 25 bp, Probe Sequence
tgcgaatgcttagatatccccggta

SEQ ID NO: 284235 - DNA, 25 bp, Probe Sequence
tgaaagttgggttcaccttgggcac

SEQ ID NO: 284236 - DNA, 25 bp, Probe Sequence
tgaaactatgggaccctttggacct

SEQ ID NO: 284237 - DNA, 25 bp, Probe Sequence
tgaacactttccactttttgacacc

SEQ ID NO: 284238 - DNA, 25 bp, Probe Sequence
tgaaacatatctcttatcttacgaa

SEQ ID NO: 284239 - DNA, 25 bp, Probe Sequence
tgactaagaatcttttttgcccaga

SEQ ID NO: 284240 - DNA, 25 bp, Probe Sequence
tgactactaaccatgacttgccaca

SEQ ID NO: 284241 - DNA, 25 bp, Probe Sequence
tgacccatgaatgtagtttcaacat

SEQ ID NO: 284242 - DNA, 25 bp, Probe Sequence
tgaccttgaacttcacatttcccac

SEQ ID NO: 284243 - DNA, 25 bp, Probe Sequence
tgaactggtcactgattttcccacg

SEQ ID NO: 284244 - DNA, 25 bp, Probe Sequence
tgacaaggcctgggagttgtcccgg

SEQ ID NO: 284245 - DNA, 25 bp, Probe Sequence
tgacaggaagctcaagttccccctg

SEQ ID NO: 284246 - DNA, 25 bp, Probe Sequence
tgacagggttcctgtgtacccactg

SEQ ID NO: 284247 - DNA, 25 bp, Probe Sequence
tgaaggggagccaagggaccaccct

SEQ ID NO: 284248 - DNA, 25 bp, Probe Sequence
tgaaagggacgacgggagctgcatg

SEQ ID NO: 284249 - DNA, 25 bp, Probe Sequence
tgaagaaagtcagggggactgcaaa

SEQ ID NO: 284250 - DNA, 25 bp, Probe Sequence
tgaaaaacgatgagggcattgctta

SEQ ID NO: 284251 - DNA, 25 bp, Probe Sequence
tgcaaagaacggcttggcttggctc

SEQ ID NO: 284252 - DNA, 25 bp, Probe Sequence
tgcacaagccttactttggttaccg

SEQ ID NO: 284253 - DNA, 25 bp, Probe Sequence
tgaaagtgctgtcttgtgtttaagg

SEQ ID NO: 284254 - DNA, 25 bp, Probe Sequence
tgacaagatgcaagacgagttttag

SEQ ID NO: 284255 - DNA, 25 bp, Probe Sequence
tgacaagatgtttctacctcttccc

SEQ ID NO: 284256 - DNA, 25 bp, Probe Sequence
tgacaaagttctgtttcttcacctg

SEQ ID NO: 284257 - DNA, 25 bp, Probe Sequence
tgacaaggtttcgttttcattcctg

SEQ ID NO: 284258 - DNA, 25 bp, Probe Sequence
tgaagaggcttctcctgttttatat

SEQ ID NO: 284259 - DNA, 25 bp, Probe Sequence
tgaaagcttatctctagtaaaaatc

SEQ ID NO: 284260 - DNA, 25 bp, Probe Sequence
tgacagagcctacccaaataagaag

SEQ ID NO: 284261 - DNA, 25 bp, Probe Sequence
tgacacagctgcactggcaagaaaa

SEQ ID NO: 284262 - DNA, 25 bp, Probe Sequence
tgacatcgccccaagagccaaaaat

SEQ ID NO: 284263 - DNA, 25 bp, Probe Sequence
tgaacaccccatgtgacaaaagaat

SEQ ID NO: 284264 - DNA, 25 bp, Probe Sequence
tgcaaacccaaaggacccaagtact

SEQ ID NO: 284265 - DNA, 25 bp, Probe Sequence
tgcaaacccaaaggacccaagtact

SEQ ID NO: 284266 - DNA, 25 bp, Probe Sequence
tgaaaccagctgtggatttcaaaac

SEQ ID NO: 284267 - DNA, 25 bp, Probe Sequence
tgaaatcaccgcctgcagttcggta

SEQ ID NO: 284268 - DNA, 25 bp, Probe Sequence
taaattacccaacatcaggtattcc

SEQ ID NO: 284269 - DNA, 25 bp, Probe Sequence
tgaaaaaccctaaatcaggtagaga

SEQ ID NO: 284270 - DNA, 25 bp, Probe Sequence
tgaaaactcccatttaagtgtctga

SEQ ID NO: 284271 - DNA, 25 bp, Probe Sequence
tgacaacactcagaatctaaattgg

SEQ ID NO: 284272 - DNA, 25 bp, Probe Sequence
tgactagcagccttaattccatttg

SEQ ID NO: 284273 - DNA, 25 bp, Probe Sequence
tgacttcaccacttattactacatg

SEQ ID NO: 284274 - DNA, 25 bp, Probe Sequence
tgacctcaagtcttttgtcttctga

SEQ ID NO: 284275 - DNA, 25 bp, Probe Sequence
tgaccgcgagacttctggcaattta

SEQ ID NO: 284276 - DNA, 25 bp, Probe Sequence
tgacctgcgcaatgtttatatgctt

SEQ ID NO: 284277 - DNA, 25 bp, Probe Sequence
tgacctcgcatatgtatgacatcct

SEQ ID NO: 284278 - DNA, 25 bp, Probe Sequence
tgaccccagaagggatctcttcagg

SEQ ID NO: 284279 - DNA, 25 bp, Probe Sequence
tgacccaatcaagagatttctcacc

SEQ ID NO: 284280 - DNA, 25 bp, Probe Sequence
taatagcaaaagaagcattctctag

SEQ ID NO: 284281 - DNA, 25 bp, Probe Sequence
tgaatcccaaaggccacatccaaga

SEQ ID NO: 284282 - DNA, 25 bp, Probe Sequence
tgaacccttagaagccaccatagag

SEQ ID NO: 284283 - DNA, 25 bp, Probe Sequence
tgacaactttattggcttcctctga

SEQ ID NO: 284284 - DNA, 25 bp, Probe Sequence
tgacacacttatagtctactgccca

SEQ ID NO: 284285 - DNA, 25 bp, Probe Sequence
tgactcacggattgccaagtctcca

SEQ ID NO: 284286 - DNA, 25 bp, Probe Sequence
tgactatgcggatgctcagcagtac

SEQ ID NO: 284287 - DNA, 25 bp, Probe Sequence
tgacgaagcgatccgagcagtcctc

SEQ ID NO: 284288 - DNA, 25 bp, Probe Sequence
tgacgtcagcagaccgagaccagtc

SEQ ID NO: 284289 - DNA, 25 bp, Probe Sequence
tgacctgcagcaactctggaaacct

SEQ ID NO: 284290 - DNA, 25 bp, Probe Sequence
tgacctgtgctgatatggacttcct

SEQ ID NO: 284291 - DNA, 25 bp, Probe Sequence
tgacgtagctgcaaaggacagatcc

SEQ ID NO: 284292 - DNA, 25 bp, Probe Sequence
tgaaggatgacgtcggacagatact

SEQ ID NO: 284293 - DNA, 25 bp, Probe Sequence
tgacgtggcacgtgctgaaacctca

SEQ ID NO: 284294 - DNA, 25 bp, Probe Sequence
tgacggtgatcgtgctgcagtacca

SEQ ID NO: 284295 - DNA, 25 bp, Probe Sequence
tgacggtgatcttgggcagaacata

SEQ ID NO: 284296 - DNA, 25 bp, Probe Sequence
tgaccggtgccttgggatttgacta

SEQ ID NO: 284297 - DNA, 25 bp, Probe Sequence
tgaccggtgccttgggatttgacta

SEQ ID NO: 284298 - DNA, 25 bp, Probe Sequence
tgacagctagtgcttgggatcgtac

SEQ ID NO: 284299 - DNA, 25 bp, Probe Sequence
tgacatctagaggaataaatcgtaa

SEQ ID NO: 284300 - DNA, 25 bp, Probe Sequence
tgaactgccagttatataagagtat

SEQ ID NO: 284301 - DNA, 25 bp, Probe Sequence
tgaacggcagtctagaataccagaa

SEQ ID NO: 284302 - DNA, 25 bp, Probe Sequence
tgacagggtgttgcagtaacaaaat

SEQ ID NO: 284303 - DNA, 25 bp, Probe Sequence
tgccgtgcccctgagtaggaaactg

SEQ ID NO: 284304 - DNA, 25 bp, Probe Sequence
tgactggccccccagtgaagagtaa

SEQ ID NO: 284305 - DNA, 25 bp, Probe Sequence
tgactgaagcctcccgttggagtga

SEQ ID NO: 284306 - DNA, 25 bp, Probe Sequence
tgactgaggccacccagttgatact

SEQ ID NO: 284307 - DNA, 25 bp, Probe Sequence
tgactagcagctgcccagctgtcaa

SEQ ID NO: 284308 - DNA, 25 bp, Probe Sequence
tgactgactgcagcagcttgcctca

SEQ ID NO: 284309 - DNA, 25 bp, Probe Sequence
tgacgctgtgcaacatcgtcctgga

SEQ ID NO: 284310 - DNA, 25 bp, Probe Sequence
tgacttgacaacagccctggagggg

SEQ ID NO: 284311 - DNA, 25 bp, Probe Sequence
tgaactgaaacatgccttgaaggga

SEQ ID NO: 284312 - DNA, 25 bp, Probe Sequence
tgacatcgttcagccctagtaggga

SEQ ID NO: 284313 - DNA, 25 bp, Probe Sequence
tgaaatgttcaagctcacaataagc

SEQ ID NO: 284314 - DNA, 25 bp, Probe Sequence
tgacactgtctatcagtacgtcggc

SEQ ID NO: 284315 - DNA, 25 bp, Probe Sequence
tgacatcttctatgacaacgtcgga

SEQ ID NO: 284316 - DNA, 25 bp, Probe Sequence
tgaactatcttagcccagtcaggga

SEQ ID NO: 284317 - DNA, 25 bp, Probe Sequence
tgacccttttcatcacagtcttggt

SEQ ID NO: 284318 - DNA, 25 bp, Probe Sequence
tgacccagggttctcagttggtgct

SEQ ID NO: 284319 - DNA, 25 bp, Probe Sequence
tgaactaggaattgttagcggggtt

SEQ ID NO: 284320 - DNA, 25 bp, Probe Sequence
tgaaaatggggctttccagggaatg

SEQ ID NO: 284321 - DNA, 25 bp, Probe Sequence
tgaaaaggagggattgcatgtacaa

SEQ ID NO: 284322 - DNA, 25 bp, Probe Sequence
tgaaaaccaggggcttgcccaaggc

SEQ ID NO: 284323 - DNA, 25 bp, Probe Sequence
tgaataagccagtgaatcccccagg

SEQ ID NO: 284324 - DNA, 25 bp, Probe Sequence
tgaaccaccacaagtaccggaagct

SEQ ID NO: 284325 - DNA, 25 bp, Probe Sequence
tgaaaagcccttctccaggaagctc

SEQ ID NO: 284326 - DNA, 25 bp, Probe Sequence
tgaaacccctccctaacatgggtat

SEQ ID NO: 284327 - DNA, 25 bp, Probe Sequence
taaaaccttgctagccaaagcggta

SEQ ID NO: 284328 - DNA, 25 bp, Probe Sequence
tgaaaacctctttccaaaggctgtt

SEQ ID NO: 284329 - DNA, 25 bp, Probe Sequence
tgaaagaccagcagaggcataaggt

SEQ ID NO: 284330 - DNA, 25 bp, Probe Sequence
tgacacagtctacatgggcaaagtg

SEQ ID NO: 284331 - DNA, 25 bp, Probe Sequence
tgacagcagtcggttggagcgagca

SEQ ID NO: 284332 - DNA, 25 bp, Probe Sequence
tgacaatgccacttatgccagcgag

SEQ ID NO: 284333 - DNA, 25 bp, Probe Sequence
tgacaagacgctagtcctgctgatg

SEQ ID NO: 284334 - DNA, 25 bp, Probe Sequence
tgacaattcctcatgccgagtcgag

SEQ ID NO: 284335 - DNA, 25 bp, Probe Sequence
tgaaatttctcaaccaggatggggc

SEQ ID NO: 284336 - DNA, 25 bp, Probe Sequence
tgaactttatcattggcattgtggg

SEQ ID NO: 284337 - DNA, 25 bp, Probe Sequence
tgacccttgatatttttgctggccc

SEQ ID NO: 284338 - DNA, 25 bp, Probe Sequence
tgaccctgtatttctttctggtgcc

SEQ ID NO: 284339 - DNA, 25 bp, Probe Sequence
tgacacccaatttccattctgggcc

SEQ ID NO: 284340 - DNA, 25 bp, Probe Sequence
tgacagtctcagtttgccagtcttg

SEQ ID NO: 284341 - DNA, 25 bp, Probe Sequence
tgacgatctgggctgcaggagctgg

SEQ ID NO: 284342 - DNA, 25 bp, Probe Sequence
tgacgatctgggctgcaggagctgg

SEQ ID NO: 284343 - DNA, 25 bp, Probe Sequence
tgaccctgagtcccagggctggtct

SEQ ID NO: 284344 - DNA, 25 bp, Probe Sequence
tgaccctggtcttcaatggttagca

SEQ ID NO: 284345 - DNA, 25 bp, Probe Sequence
tgaccctggtcttcaatggttagca

SEQ ID NO: 284346 - DNA, 25 bp, Probe Sequence
tgacccttgtggaagatatgattag

SEQ ID NO: 284347 - DNA, 25 bp, Probe Sequence
tgacttcttttttgactgatacagt

SEQ ID NO: 284348 - DNA, 25 bp, Probe Sequence
tgacatcatcttattcagtggcaaa

SEQ ID NO: 284349 - DNA, 25 bp, Probe Sequence
tgcaactccgttagcagaggaaaac

SEQ ID NO: 284350 - DNA, 25 bp, Probe Sequence
tgaaatcgttgaagcgagagaaaag

SEQ ID NO: 284351 - DNA, 25 bp, Probe Sequence
tgaaacctcatcttggagaaattta

SEQ ID NO: 284352 - DNA, 25 bp, Probe Sequence
tgaaactattctttgagtcaatttt

SEQ ID NO: 284353 - DNA, 25 bp, Probe Sequence
tgacgcataatgacgtatggtccat

SEQ ID NO: 284354 - DNA, 25 bp, Probe Sequence
tgacgatattgacagagttggcttc

SEQ ID NO: 284355 - DNA, 25 bp, Probe Sequence
tgacagatttagtcgttccacttca

SEQ ID NO: 284356 - DNA, 25 bp, Probe Sequence
tgacaatattcaaagttcccttttt

SEQ ID NO: 284357 - DNA, 25 bp, Probe Sequence
tgactatttctgtatgtctccatct

SEQ ID NO: 284358 - DNA, 25 bp, Probe Sequence
tgactttcaatgcctgtccgatttg

SEQ ID NO: 284359 - DNA, 25 bp, Probe Sequence
tgactttagttcctcttgttttaag

SEQ ID NO: 284360 - DNA, 25 bp, Probe Sequence
tgactctaagtgtactgtttgcatt

SEQ ID NO: 284361 - DNA, 25 bp, Probe Sequence
tgacttatgactctctgtgttctgt

SEQ ID NO: 284362 - DNA, 25 bp, Probe Sequence
tgactattctcatctctgttttgca

SEQ ID NO: 284363 - DNA, 25 bp, Probe Sequence
tgactcttctcaatcatctgtgggt

SEQ ID NO: 284364 - DNA, 25 bp, Probe Sequence
tgcacttgtcatatagctgggtttt

SEQ ID NO: 284365 - DNA, 25 bp, Probe Sequence
tgactgatgtaaaacggttttcttg

SEQ ID NO: 284366 - DNA, 25 bp, Probe Sequence
tgacattgtccaaacctttttcatt

SEQ ID NO: 284367 - DNA, 25 bp, Probe Sequence
tgcagatttcaacacttttttttaa

SEQ ID NO: 284368 - DNA, 25 bp, Probe Sequence
tcgaaatcacctcttgttttaaaca

SEQ ID NO: 284369 - DNA, 25 bp, Probe Sequence
tcaacacaagttatttacttaaaag

SEQ ID NO: 284370 - DNA, 25 bp, Probe Sequence
tgaacaaagtagctttccccaagga

SEQ ID NO: 284371 - DNA, 25 bp, Probe Sequence
tgaaggggaagacctattccgacgg

SEQ ID NO: 284372 - DNA, 25 bp, Probe Sequence
tgaagcatttacactctttaagaca

SEQ ID NO: 284373 - DNA, 25 bp, Probe Sequence
tgaacaagttcaattttgccaggaa

SEQ ID NO: 284374 - DNA, 25 bp, Probe Sequence
tacatcaaccgaactgttgccgtta

SEQ ID NO: 284375 - DNA, 25 bp, Probe Sequence
tgacagacacctttgtatgttcctt

SEQ ID NO: 284376 - DNA, 25 bp, Probe Sequence
tgaaaccagtttttatcccttctct

SEQ ID NO: 284377 - DNA, 25 bp, Probe Sequence
tgaaataggcttccttaacctcctt

SEQ ID NO: 284378 - DNA, 25 bp, Probe Sequence
tgaaataggattccttacttttagt

SEQ ID NO: 284379 - DNA, 25 bp, Probe Sequence
tgaagtaattcgcctgttttttggt

SEQ ID NO: 284380 - DNA, 25 bp, Probe Sequence
tgaaactactggtgtttttctgcct

SEQ ID NO: 284381 - DNA, 25 bp, Probe Sequence
tgaacttagggctgcttgtggctgg

SEQ ID NO: 284382 - DNA, 25 bp, Probe Sequence
tgaacttcctgtgacctgtggtgag

SEQ ID NO: 284383 - DNA, 25 bp, Probe Sequence
ttaaacctttgtggctgtggttggc

SEQ ID NO: 284384 - DNA, 25 bp, Probe Sequence
tactataactttttgcggtgcacgg

SEQ ID NO: 284385 - DNA, 25 bp, Probe Sequence
tacggcttttaatgcgggagctgcg

SEQ ID NO: 284386 - DNA, 25 bp, Probe Sequence
tgactcctttctcaagtgtgtgata

SEQ ID NO: 284387 - DNA, 25 bp, Probe Sequence
tgactctcctgctaccaattaaata

SEQ ID NO: 284388 - DNA, 25 bp, Probe Sequence
tgactccggcatttcactaaacaca

SEQ ID NO: 284389 - DNA, 25 bp, Probe Sequence
tgactcagggaatccatcacagccc

SEQ ID NO: 284390 - DNA, 25 bp, Probe Sequence
tgactcacgggatttcccagtctgc

SEQ ID NO: 284391 - DNA, 25 bp, Probe Sequence
tgactcacgggatgtccaagtctcc

SEQ ID NO: 284392 - DNA, 25 bp, Probe Sequence
tgacaacgtgtctgtccaggtctgt

SEQ ID NO: 284393 - DNA, 25 bp, Probe Sequence
tgcaccttcgtcagtacgagctgct

SEQ ID NO: 284394 - DNA, 25 bp, Probe Sequence
tgcaccttcgtcagtacgagctgct

SEQ ID NO: 284395 - DNA, 25 bp, Probe Sequence
tgaagcttctgtaattttgagcact

SEQ ID NO: 284396 - DNA, 25 bp, Probe Sequence
tgacagccctgaccagtgtagagat

SEQ ID NO: 284397 - DNA, 25 bp, Probe Sequence
tgaacccgggaggcggaagttgcag

SEQ ID NO: 284398 - DNA, 25 bp, Probe Sequence
tgactcccgggtggggaggtggcca

SEQ ID NO: 284399 - DNA, 25 bp, Probe Sequence
tgaacaacgaagggcgtggggtgcc

SEQ ID NO: 284400 - DNA, 25 bp, Probe Sequence
tgaaaccagtaatgttggctgggcg

SEQ ID NO: 284401 - DNA, 25 bp, Probe Sequence
tgaataccctatctgactccttggg

SEQ ID NO: 284402 - DNA, 25 bp, Probe Sequence
tgacactggctttgtggacatccct

SEQ ID NO: 284403 - DNA, 25 bp, Probe Sequence
tgacactggctttgtggacatccct

SEQ ID NO: 284404 - DNA, 25 bp, Probe Sequence
tgacattgccctcgtggagatcacc

SEQ ID NO: 284405 - DNA, 25 bp, Probe Sequence
tgactgtgcccttcatggaaaccac

SEQ ID NO: 284406 - DNA, 25 bp, Probe Sequence
tgactgtgcccttcatggaaaccac

SEQ ID NO: 284407 - DNA, 25 bp, Probe Sequence
tgactgtggtcttcgagcacgatgc

SEQ ID NO: 284408 - DNA, 25 bp, Probe Sequence
tgacttggacacttcagaccatgcc

SEQ ID NO: 284409 - DNA, 25 bp, Probe Sequence
tgactctgatacattgcaagcactc

SEQ ID NO: 284410 - DNA, 25 bp, Probe Sequence
tgactctgtgatgtatcatgatagt

SEQ ID NO: 284411 - DNA, 25 bp, Probe Sequence
tgactctgttgagtacatatactga

SEQ ID NO: 284412 - DNA, 25 bp, Probe Sequence
tgactctctcatggctactaacaag

SEQ ID NO: 284413 - DNA, 25 bp, Probe Sequence
tgactcctgctcccattaggagcag

SEQ ID NO: 284414 - DNA, 25 bp, Probe Sequence
tgacatcctgctcgacactatcagg

SEQ ID NO: 284415 - DNA, 25 bp, Probe Sequence
tgacacctctgccaacagatgctgt

SEQ ID NO: 284416 - DNA, 25 bp, Probe Sequence
tgaaccaccaaaagtgctgctccga

SEQ ID NO: 284417 - DNA, 25 bp, Probe Sequence
tgaaccaccaaaagtgctgctccga

SEQ ID NO: 284418 - DNA, 25 bp, Probe Sequence
tgacaccaatcagatcttcggcctg

SEQ ID NO: 284419 - DNA, 25 bp, Probe Sequence
tgacaacactgaaatcctagccctg

SEQ ID NO: 284420 - DNA, 25 bp, Probe Sequence
tgacatacgtggcattcagtccctg

SEQ ID NO: 284421 - DNA, 25 bp, Probe Sequence
tgacaactctggcatacggcccaga

SEQ ID NO: 284422 - DNA, 25 bp, Probe Sequence
tgacaactttggtatcgtggaagga

SEQ ID NO: 284423 - DNA, 25 bp, Probe Sequence
tgacgatttctgcaggctgtgtaag

SEQ ID NO: 284424 - DNA, 25 bp, Probe Sequence
tgaagcattttccactgccaatgaa

SEQ ID NO: 284425 - DNA, 25 bp, Probe Sequence
tgacatcattaagcaccccatggac

SEQ ID NO: 284426 - DNA, 25 bp, Probe Sequence
tgaactgaatgagcctccactggtc

SEQ ID NO: 284427 - DNA, 25 bp, Probe Sequence
tgacacatgaaagcagctccaagag

SEQ ID NO: 284428 - DNA, 25 bp, Probe Sequence
tgaacagaagatccacagtccaagt

SEQ ID NO: 284429 - DNA, 25 bp, Probe Sequence
tgaacagaggccacattactagagt

SEQ ID NO: 284430 - DNA, 25 bp, Probe Sequence
tgaacgtgtccttttgaggagggtg

SEQ ID NO: 284431 - DNA, 25 bp, Probe Sequence
tgaagtggttgtgttgtagggttgc

SEQ ID NO: 284432 - DNA, 25 bp, Probe Sequence
tgacagggatttacttccggtttct

SEQ ID NO: 284433 - DNA, 25 bp, Probe Sequence
tgaagggaaagacttcctgggtttg

SEQ ID NO: 284434 - DNA, 25 bp, Probe Sequence
tgacatggagaatgggaccccgttt

SEQ ID NO: 284435 - DNA, 25 bp, Probe Sequence
tgaatggataactagaataaccgat

SEQ ID NO: 284436 - DNA, 25 bp, Probe Sequence
tgacatggacaatacagttaacagt

SEQ ID NO: 284437 - DNA, 25 bp, Probe Sequence
tgacattataactcatgcctgaaca

SEQ ID NO: 284438 - DNA, 25 bp, Probe Sequence
tgaagtaaacccaacaaaactagag

SEQ ID NO: 284439 - DNA, 25 bp, Probe Sequence
taaataaaccaaagtataccgtgtg

SEQ ID NO: 284440 - DNA, 25 bp, Probe Sequence
tgaaataaaccctgtttgcacctcg

SEQ ID NO: 284441 - DNA, 25 bp, Probe Sequence
tgaacaaaataccaagtctcccctc

SEQ ID NO: 284442 - DNA, 25 bp, Probe Sequence
tgaagcacaaacttgtatgttcccc

SEQ ID NO: 284443 - DNA, 25 bp, Probe Sequence
tgaagtcttcaaagtctgttcttcc

SEQ ID NO: 284444 - DNA, 25 bp, Probe Sequence
tgaagtctttcaattgagctggttg

SEQ ID NO: 284445 - DNA, 25 bp, Probe Sequence
tgaacttttcatctgcagaggcaag

SEQ ID NO: 284446 - DNA, 25 bp, Probe Sequence
tgaacttcatttatcgagtcagaga

SEQ ID NO: 284447 - DNA, 25 bp, Probe Sequence
tgacactacattttcaggaactgaa

SEQ ID NO: 284448 - DNA, 25 bp, Probe Sequence
tgaactataatactaaggcctgaag

SEQ ID NO: 284449 - DNA, 25 bp, Probe Sequence
tgacacttacatacttggaccaaaa

SEQ ID NO: 284450 - DNA, 25 bp, Probe Sequence
tgaactacactgaaatctacccaag

SEQ ID NO: 284451 - DNA, 25 bp, Probe Sequence
tgaatctcccatgtgtctgacaaca

SEQ ID NO: 284452 - DNA, 25 bp, Probe Sequence
tgacaactggccggtctgcaagtca

SEQ ID NO: 284453 - DNA, 25 bp, Probe Sequence
tgacatcagcagtgctggtgctgct

SEQ ID NO: 284454 - DNA, 25 bp, Probe Sequence
tgacatcaagaaggtggtgaagcag

SEQ ID NO: 284455 - DNA, 25 bp, Probe Sequence
tgacagacgacagctttgataagaa

SEQ ID NO: 284456 - DNA, 25 bp, Probe Sequence
tgaaagtggcccagcttacagcaac

SEQ ID NO: 284457 - DNA, 25 bp, Probe Sequence
tgaaatttgctgtctacttaccacc

SEQ ID NO: 284458 - DNA, 25 bp, Probe Sequence
tgactctgtaccttacttacactac

SEQ ID NO: 284459 - DNA, 25 bp, Probe Sequence
tgacttgtaccaattctagcaccca

SEQ ID NO: 284460 - DNA, 25 bp, Probe Sequence
tgacttgttctaattctaggttcac

SEQ ID NO: 284461 - DNA, 25 bp, Probe Sequence
tgaattatactattggcgaggttcc

SEQ ID NO: 284462 - DNA, 25 bp, Probe Sequence
tgaagcttactgagccgaaggacct

SEQ ID NO: 284463 - DNA, 25 bp, Probe Sequence
tgaactgcctggaacctaagaccct

SEQ ID NO: 284464 - DNA, 25 bp, Probe Sequence
tgaagagttagaccccatggaccct

SEQ ID NO: 284465 - DNA, 25 bp, Probe Sequence
tgaagagttagaccccatggaccct

SEQ ID NO: 284466 - DNA, 25 bp, Probe Sequence
tgaagagttagaccccatggaccct

SEQ ID NO: 284467 - DNA, 25 bp, Probe Sequence
tgaagattacggtaacggccacttg

SEQ ID NO: 284468 - DNA, 25 bp, Probe Sequence
tgacaattgacacgatttcctgcac

SEQ ID NO: 284469 - DNA, 25 bp, Probe Sequence
taataggcagatcgacttctccact

SEQ ID NO: 284470 - DNA, 25 bp, Probe Sequence
tgacaagaagatcgagttccacctg

SEQ ID NO: 284471 - DNA, 25 bp, Probe Sequence
tgaaagacaagcagttacaccccca

SEQ ID NO: 284472 - DNA, 25 bp, Probe Sequence
tgaaaaaatcactggaacccccaga

SEQ ID NO: 284473 - DNA, 25 bp, Probe Sequence
tgaaggaacaacacctaaacccaag

SEQ ID NO: 284474 - DNA, 25 bp, Probe Sequence
tgaagagaaaccagcattaaacaag

SEQ ID NO: 284475 - DNA, 25 bp, Probe Sequence
tgacaagaccccatctctacaaaaa

SEQ ID NO: 284476 - DNA, 25 bp, Probe Sequence
tgacagacaaccatctctttttata

SEQ ID NO: 284477 - DNA, 25 bp, Probe Sequence
tgactaatcccatttctttatccta

SEQ ID NO: 284478 - DNA, 25 bp, Probe Sequence
tgacttgaggccagtttctttctcc

SEQ ID NO: 284479 - DNA, 25 bp, Probe Sequence
tgactatccgtcaggttgtcttctg

SEQ ID NO: 284480 - DNA, 25 bp, Probe Sequence
tcctaaggtccttgtattgtttgga

SEQ ID NO: 284481 - DNA, 25 bp, Probe Sequence
tccttaggtcttggccattctagtg

SEQ ID NO: 284482 - DNA, 25 bp, Probe Sequence
tgactaatatgtttacaagttagat

SEQ ID NO: 284483 - DNA, 25 bp, Probe Sequence
tgacacctatatgaacacagtttgt

SEQ ID NO: 284484 - DNA, 25 bp, Probe Sequence
tgacaccttctgaacatccgtttat

SEQ ID NO: 284485 - DNA, 25 bp, Probe Sequence
tgacattcctatcacatatcctact

SEQ ID NO: 284486 - DNA, 25 bp, Probe Sequence
tgacatgtccacagatctttctata

SEQ ID NO: 284487 - DNA, 25 bp, Probe Sequence
tgacagtgccacagctatttctcac

SEQ ID NO: 284488 - DNA, 25 bp, Probe Sequence
tgacttgactcatgcttgtttcact

SEQ ID NO: 284489 - DNA, 25 bp, Probe Sequence
tgacttggtctgatttattcactga

SEQ ID NO: 284490 - DNA, 25 bp, Probe Sequence
tagtagtgttccctagttactgctt

SEQ ID NO: 284491 - DNA, 25 bp, Probe Sequence
tgaatttttcccaagattcctgtcc

SEQ ID NO: 284492 - DNA, 25 bp, Probe Sequence
tgaagtataacccaaatgtccttcc

SEQ ID NO: 284493 - DNA, 25 bp, Probe Sequence
tgaaggaaagccacgctcccttcag

SEQ ID NO: 284494 - DNA, 25 bp, Probe Sequence
tgaaggagtaccgctccaaactcat

SEQ ID NO: 284495 - DNA, 25 bp, Probe Sequence
tgaacgaggaaggcacccaagccac

SEQ ID NO: 284496 - DNA, 25 bp, Probe Sequence
tgaacgaaataggcaggcacagaaa

SEQ ID NO: 284497 - DNA, 25 bp, Probe Sequence
tgaactgcacaaagtgaggggaaca

SEQ ID NO: 284498 - DNA, 25 bp, Probe Sequence
tgaacccgggtgatggctgaacgct

SEQ ID NO: 284499 - DNA, 25 bp, Probe Sequence
tgaacccgggtgagtaccgcgtgac

SEQ ID NO: 284500 - DNA, 25 bp, Probe Sequence
tgacacccggaaatgaggaccatca

SEQ ID NO: 284501 - DNA, 25 bp, Probe Sequence
tgactcccagatcagtcagagcccc

SEQ ID NO: 284502 - DNA, 25 bp, Probe Sequence
tgacatcccgagaagtccagacggc

SEQ ID NO: 284503 - DNA, 25 bp, Probe Sequence
tgacatatcactggggctctacagc

SEQ ID NO: 284504 - DNA, 25 bp, Probe Sequence
tgacttcctgggccacaaagattaa

SEQ ID NO: 284505 - DNA, 25 bp, Probe Sequence
tgacttccatccagcactgggttca

SEQ ID NO: 284506 - DNA, 25 bp, Probe Sequence
tgactccctggcagcagcagggctt

SEQ ID NO: 284507 - DNA, 25 bp, Probe Sequence
tgactccctggcagcagcagggctt

SEQ ID NO: 284508 - DNA, 25 bp, Probe Sequence
tgacaccgatggggacttcgatctg

SEQ ID NO: 284509 - DNA, 25 bp, Probe Sequence
tgactgccaataacattcttcgatc

SEQ ID NO: 284510 - DNA, 25 bp, Probe Sequence
tgactgaagatgcagctcactaccc

SEQ ID NO: 284511 - DNA, 25 bp, Probe Sequence
tgacatgaggttactcctagcctgc

SEQ ID NO: 284512 - DNA, 25 bp, Probe Sequence
tgactgcggtatatcttcagccaca

SEQ ID NO: 284513 - DNA, 25 bp, Probe Sequence
tgaagggttgactttacccatttgg

SEQ ID NO: 284514 - DNA, 25 bp, Probe Sequence
tgaaggtgatcctgtaaccctctgt

SEQ ID NO: 284515 - DNA, 25 bp, Probe Sequence
tgacaagatttcagaaagcccttct

SEQ ID NO: 284516 - DNA, 25 bp, Probe Sequence
tgaaaatactaagaagcgcatcttt

SEQ ID NO: 284517 - DNA, 25 bp, Probe Sequence
tgacaaacacggagaagtctgccct

SEQ ID NO: 284518 - DNA, 25 bp, Probe Sequence
tgacagcccacgcggagggctacac

SEQ ID NO: 284519 - DNA, 25 bp, Probe Sequence
tgaacctcacactgtaggactcaca

SEQ ID NO: 284520 - DNA, 25 bp, Probe Sequence
tgaacaggcacctctagtcaacagt

SEQ ID NO: 284521 - DNA, 25 bp, Probe Sequence
tcaggggactccttagtccacactg

SEQ ID NO: 284522 - DNA, 25 bp, Probe Sequence
tgcggggacccgagatggtgacagt

SEQ ID NO: 284523 - DNA, 25 bp, Probe Sequence
tgcgtggcaggtgccgggttactta

SEQ ID NO: 284524 - DNA, 25 bp, Probe Sequence
tgacttaggtggcgtgtttcagctt

SEQ ID NO: 284525 - DNA, 25 bp, Probe Sequence
tgaaattccatgtcgggtttacttg

SEQ ID NO: 284526 - DNA, 25 bp, Probe Sequence
tgaaaccacatccgtggttttttgg

SEQ ID NO: 284527 - DNA, 25 bp, Probe Sequence
tgaaaacctcctttggcttatttgc

SEQ ID NO: 284528 - DNA, 25 bp, Probe Sequence
tgaaatactcagcttaggcattttt

SEQ ID NO: 284529 - DNA, 25 bp, Probe Sequence
tgaaataatattactactgacttct

SEQ ID NO: 284530 - DNA, 25 bp, Probe Sequence
tgaaaagtttgccttctgacctcat

SEQ ID NO: 284531 - DNA, 25 bp, Probe Sequence
tgaaaagtctcccatgtctacttct

SEQ ID NO: 284532 - DNA, 25 bp, Probe Sequence
tgaaaagtctcccatgtctacttct

SEQ ID NO: 284533 - DNA, 25 bp, Probe Sequence
tgacaacagcctcaagatcatcagc

SEQ ID NO: 284534 - DNA, 25 bp, Probe Sequence
tgacatgcacaggctccagatatta

SEQ ID NO: 284535 - DNA, 25 bp, Probe Sequence
tgcactgcagaacacgatcacatcc

SEQ ID NO: 284536 - DNA, 25 bp, Probe Sequence
tgcactgcagaacacgatcacatcc

SEQ ID NO: 284537 - DNA, 25 bp, Probe Sequence
tgacagcacaagagaaactcctagt

SEQ ID NO: 284538 - DNA, 25 bp, Probe Sequence
tgacagctcaatccggtactttgag

SEQ ID NO: 284539 - DNA, 25 bp, Probe Sequence
tgacaggaaaccttccgtcgtgagg

SEQ ID NO: 284540 - DNA, 25 bp, Probe Sequence
tgaagtgaatccaaatacccgtgtc

SEQ ID NO: 284541 - DNA, 25 bp, Probe Sequence
tgaaggatctaagttggccctgttc

SEQ ID NO: 284542 - DNA, 25 bp, Probe Sequence
tgaaatacgtgacttgctcccagtt

SEQ ID NO: 284543 - DNA, 25 bp, Probe Sequence
tgaagtgatctttttccctagtcag

SEQ ID NO: 284544 - DNA, 25 bp, Probe Sequence
tgaaaattcatatgtccctcgtgag

SEQ ID NO: 284545 - DNA, 25 bp, Probe Sequence
tgaaatattttcttccttctcagca

SEQ ID NO: 284546 - DNA, 25 bp, Probe Sequence
tgaactatcagcttaaacttccagc

SEQ ID NO: 284547 - DNA, 25 bp, Probe Sequence
tgaagtcatcgaaaaaccccaggcc

SEQ ID NO: 284548 - DNA, 25 bp, Probe Sequence
tgaagttggtggtgaggccctgggc

SEQ ID NO: 284549 - DNA, 25 bp, Probe Sequence
tgaaagtggtggggcagggccgcgg

SEQ ID NO: 284550 - DNA, 25 bp, Probe Sequence
tgaaatgtggtctgagcagtcagcc

SEQ ID NO: 284551 - DNA, 25 bp, Probe Sequence
tgacactgattgatccaggacatcc

SEQ ID NO: 284552 - DNA, 25 bp, Probe Sequence
tgacacgattatgtgcgcgtcaaca

SEQ ID NO: 284553 - DNA, 25 bp, Probe Sequence
tgacaggctgttgtggcgtgaggcc

SEQ ID NO: 284554 - DNA, 25 bp, Probe Sequence
tgaagggttcgcagcgagagtcccg

SEQ ID NO: 284555 - DNA, 25 bp, Probe Sequence
tgaaaggtttgtacagatgcatgcc

SEQ ID NO: 284556 - DNA, 25 bp, Probe Sequence
tgaacggagttcaaaggctgctggc

SEQ ID NO: 284557 - DNA, 25 bp, Probe Sequence
tgaaagccacgtagattcctcttgc

SEQ ID NO: 284558 - DNA, 25 bp, Probe Sequence
tgacaacatcaacatgacccactac

SEQ ID NO: 284559 - DNA, 25 bp, Probe Sequence
tgactacaacattcactacctctac

SEQ ID NO: 284560 - DNA, 25 bp, Probe Sequence
tgacagacaatggaactacgcctgc

SEQ ID NO: 284561 - DNA, 25 bp, Probe Sequence
tgacttctaggaatctaccctgcag

SEQ ID NO: 284562 - DNA, 25 bp, Probe Sequence
tgacaggctagtcttgtctctctca

SEQ ID NO: 284563 - DNA, 25 bp, Probe Sequence
tgacacttagccgctgtctcgccgt

SEQ ID NO: 284564 - DNA, 25 bp, Probe Sequence
tgaaattaccaactgctttcctttc

SEQ ID NO: 284565 - DNA, 25 bp, Probe Sequence
tgacacttacaaaagctttcaaact

SEQ ID NO: 284566 - DNA, 25 bp, Probe Sequence
tgaactctacctttgctttcagaac

SEQ ID NO: 284567 - DNA, 25 bp, Probe Sequence
tgacactaatttagtcttttgatac

SEQ ID NO: 284568 - DNA, 25 bp, Probe Sequence
tgaatccttttttgttttcaacagt

SEQ ID NO: 284569 - DNA, 25 bp, Probe Sequence
tgaacagtatttaaggtttccaata

SEQ ID NO: 284570 - DNA, 25 bp, Probe Sequence
tgaacccatttgaggttcttcagat

SEQ ID NO: 284571 - DNA, 25 bp, Probe Sequence
tgaacccagttcagtttatctccag

SEQ ID NO: 284572 - DNA, 25 bp, Probe Sequence
tgaagccacaccaggtactgattcc

SEQ ID NO: 284573 - DNA, 25 bp, Probe Sequence
tgaagccatgcctcgacggcattca

SEQ ID NO: 284574 - DNA, 25 bp, Probe Sequence
tgacacgctcactgcgaaggcaggt

SEQ ID NO: 284575 - DNA, 25 bp, Probe Sequence
tgacacctcagctgacagcgtgggc

SEQ ID NO: 284576 - DNA, 25 bp, Probe Sequence
tgacacctcagtggtgctgctgggc

SEQ ID NO: 284577 - DNA, 25 bp, Probe Sequence
tgacacctcagtggtgctgctgggc

SEQ ID NO: 284578 - DNA, 25 bp, Probe Sequence
tgacaccaagggtcgctttgctgta

SEQ ID NO: 284579 - DNA, 25 bp, Probe Sequence
tgaactccgaggacacttttgtggg

SEQ ID NO: 284580 - DNA, 25 bp, Probe Sequence
tgaacctcttgtaccaattataggg

SEQ ID NO: 284581 - DNA, 25 bp, Probe Sequence
tgaacctcttggagactttcctcct

SEQ ID NO: 284582 - DNA, 25 bp, Probe Sequence
tgaagcctcttcgggatgtcttcca

SEQ ID NO: 284583 - DNA, 25 bp, Probe Sequence
tgaactctatcatcgacgtctacca

SEQ ID NO: 284584 - DNA, 25 bp, Probe Sequence
tgacacattaacccagcttttctca

SEQ ID NO: 284585 - DNA, 25 bp, Probe Sequence
tgaaaggattgcccgattttatcac

SEQ ID NO: 284586 - DNA, 25 bp, Probe Sequence
tgaaagagcctccaactattcgacc

SEQ ID NO: 284587 - DNA, 25 bp, Probe Sequence
tgaaggcagttactgactttccatc

SEQ ID NO: 284588 - DNA, 25 bp, Probe Sequence
tgaagggactagcacgcttccatct

SEQ ID NO: 284589 - DNA, 25 bp, Probe Sequence
tgaagtgaaataggaccctcccacc

SEQ ID NO: 284590 - DNA, 25 bp, Probe Sequence
tgaagaagcaaactgcccgttctcc

SEQ ID NO: 284591 - DNA, 25 bp, Probe Sequence
tgacagaaatacctgcagcatcccc

SEQ ID NO: 284592 - DNA, 25 bp, Probe Sequence
tgacaaaatcatgaggctcactcct

SEQ ID NO: 284593 - DNA, 25 bp, Probe Sequence
tgacatttatcagcaaatctcttgc

SEQ ID NO: 284594 - DNA, 25 bp, Probe Sequence
tgacacttacgacaatgacattgcg

SEQ ID NO: 284595 - DNA, 25 bp, Probe Sequence
tgacaccagaaacatgatccattga

SEQ ID NO: 284596 - DNA, 25 bp, Probe Sequence
tgaaccggaagttgcccagagaggc

SEQ ID NO: 284597 - DNA, 25 bp, Probe Sequence
tgaacctggaacttgaaggcagagg

SEQ ID NO: 284598 - DNA, 25 bp, Probe Sequence
tgaaccaggaatggaaaccatagag

SEQ ID NO: 284599 - DNA, 25 bp, Probe Sequence
tgaaccagcggatggagtccagcag

SEQ ID NO: 284600 - DNA, 25 bp, Probe Sequence
tgacaccatcccagaggactatgag

SEQ ID NO: 284601 - DNA, 25 bp, Probe Sequence
tgaagtacaggcaatgaagactttg

SEQ ID NO: 284602 - DNA, 25 bp, Probe Sequence
tgaaatacagcgtagtcagcccttg

SEQ ID NO: 284603 - DNA, 25 bp, Probe Sequence
tgaaggacaggagttcaggcctggc

SEQ ID NO: 284604 - DNA, 25 bp, Probe Sequence
tgaagggacatccttggggctgtgc

SEQ ID NO: 284605 - DNA, 25 bp, Probe Sequence
tgacagagggatgtggccggtgggc

SEQ ID NO: 284606 - DNA, 25 bp, Probe Sequence
tgaaaaggtttgcgctcctgtgctc

SEQ ID NO: 284607 - DNA, 25 bp, Probe Sequence
tgacaaaagtgttgtcttcactggc

SEQ ID NO: 284608 - DNA, 25 bp, Probe Sequence
tgacaaagggaagctttctcctcat

SEQ ID NO: 284609 - DNA, 25 bp, Probe Sequence
tgacacctggggtcagtttacctct

SEQ ID NO: 284610 - DNA, 25 bp, Probe Sequence
tgaatagggggttgtccatccctct

SEQ ID NO: 284611 - DNA, 25 bp, Probe Sequence
tgaacacgggaatgtgcccctgcac

SEQ ID NO: 284612 - DNA, 25 bp, Probe Sequence
tgaaccatgtggttggacccctgaa

SEQ ID NO: 284613 - DNA, 25 bp, Probe Sequence
tgaaagatgcggttggcaccctcaa

SEQ ID NO: 284614 - DNA, 25 bp, Probe Sequence
tgaaagtcctcaagtttgcctgcaa

SEQ ID NO: 284615 - DNA, 25 bp, Probe Sequence
tgaaaatcttgcgttgtatgttgaa

SEQ ID NO: 284616 - DNA, 25 bp, Probe Sequence
tgcataaatttgcctggttcagtat

SEQ ID NO: 284617 - DNA, 25 bp, Probe Sequence
tgaaaaagctgggaattgctgtctt

SEQ ID NO: 284618 - DNA, 25 bp, Probe Sequence
tgaaagcaggctgcccttgttcttg

SEQ ID NO: 284619 - DNA, 25 bp, Probe Sequence
tgaaggctggccgccttgttgtaga

SEQ ID NO: 284620 - DNA, 25 bp, Probe Sequence
tgacaggcgaggcggcagtgactgt

SEQ ID NO: 284621 - DNA, 25 bp, Probe Sequence
tgacagtgtgggacaggctcttctt

SEQ ID NO: 284622 - DNA, 25 bp, Probe Sequence
tgacagctgatgagacaaggaacct

SEQ ID NO: 284623 - DNA, 25 bp, Probe Sequence
tgaagcgtttgtgaggcatatcctg

SEQ ID NO: 284624 - DNA, 25 bp, Probe Sequence
tgaaggccgagaaatggctatttga

SEQ ID NO: 284625 - DNA, 25 bp, Probe Sequence
tgacatggccggggtggctgtcatg

SEQ ID NO: 284626 - DNA, 25 bp, Probe Sequence
tgacaggatggaagactggctgctc

SEQ ID NO: 284627 - DNA, 25 bp, Probe Sequence
tgacagaatggaagcaccagcgcat

SEQ ID NO: 284628 - DNA, 25 bp, Probe Sequence
tgaaagatgcaagcacctgaatttc

SEQ ID NO: 284629 - DNA, 25 bp, Probe Sequence
tgaaatgctcaagacttcattattt

SEQ ID NO: 284630 - DNA, 25 bp, Probe Sequence
tgaaatgtagcctctgtccttgtaa

SEQ ID NO: 284631 - DNA, 25 bp, Probe Sequence
tgcaactggctgtagtttcctttaa

SEQ ID NO: 284632 - DNA, 25 bp, Probe Sequence
tgaagcaaatgggtatttctttaaa

SEQ ID NO: 284633 - DNA, 25 bp, Probe Sequence
tgaagaggctgagttagtcccttag

SEQ ID NO: 284634 - DNA, 25 bp, Probe Sequence
tgacagtagctcttagactcgccta

SEQ ID NO: 284635 - DNA, 25 bp, Probe Sequence
tgacactgcagaactacatctccca

SEQ ID NO: 284636 - DNA, 25 bp, Probe Sequence
tgacacggagacatcctctccatgg

SEQ ID NO: 284637 - DNA, 25 bp, Probe Sequence
tgacagggaacttgccctgcatcta

SEQ ID NO: 284638 - DNA, 25 bp, Probe Sequence
tgaagttacatttgacattgatgcc

SEQ ID NO: 284639 - DNA, 25 bp, Probe Sequence
tgaagttacatttgccctaacccta

SEQ ID NO: 284640 - DNA, 25 bp, Probe Sequence
tgaaataaatcttgtgcctaatttt

SEQ ID NO: 284641 - DNA, 25 bp, Probe Sequence
tgaaataaacctggtcttgtgtttt

SEQ ID NO: 284642 - DNA, 25 bp, Probe Sequence
tgaaaaaatttggtacttgatcatt

SEQ ID NO: 284643 - DNA, 25 bp, Probe Sequence
tgaaaacatgtttaaactttcttat

SEQ ID NO: 284644 - DNA, 25 bp, Probe Sequence
tgaaagttgtttaaactacttattg

SEQ ID NO: 284645 - DNA, 25 bp, Probe Sequence
tgaaccttacatacttacttttttg

SEQ ID NO: 284646 - DNA, 25 bp, Probe Sequence
tgaacctgatagttttcacctcatt

SEQ ID NO: 284647 - DNA, 25 bp, Probe Sequence
tgacatcttctggttattactctga

SEQ ID NO: 284648 - DNA, 25 bp, Probe Sequence
tgacacttgtggcatcaaatgcctg

SEQ ID NO: 284649 - DNA, 25 bp, Probe Sequence
tgaactcctggcctcaggtgatctg

SEQ ID NO: 284650 - DNA, 25 bp, Probe Sequence
tgacaatccaatgccgagtggctga

SEQ ID NO: 284651 - DNA, 25 bp, Probe Sequence
tgaagaacttcgggatctggctgcg

SEQ ID NO: 284652 - DNA, 25 bp, Probe Sequence
tgaaaactgtcctgctcagtgccaa

SEQ ID NO: 284653 - DNA, 25 bp, Probe Sequence
tgaaatacgttcagcacacctacag

SEQ ID NO: 284654 - DNA, 25 bp, Probe Sequence
tgaaaagggatccagcacacctcct

SEQ ID NO: 284655 - DNA, 25 bp, Probe Sequence
tgaaacggcgaggaccaccaaccga

SEQ ID NO: 284656 - DNA, 25 bp, Probe Sequence
tgaagaccggattttcaccaacctg

SEQ ID NO: 284657 - DNA, 25 bp, Probe Sequence
tgaagacggtgtgcttccagaacct

SEQ ID NO: 284658 - DNA, 25 bp, Probe Sequence
tgaaacaggtggctctccatcaaag

SEQ ID NO: 284659 - DNA, 25 bp, Probe Sequence
tgctaggggctacttctccaaaaaa

SEQ ID NO: 284660 - DNA, 25 bp, Probe Sequence
tgaaaggtgcattttccccataaaa

SEQ ID NO: 284661 - DNA, 25 bp, Probe Sequence
tgaaatggatggtttccccagttta

SEQ ID NO: 284662 - DNA, 25 bp, Probe Sequence
tgaatgggaagcttttgcccgggga

SEQ ID NO: 284663 - DNA, 25 bp, Probe Sequence
tgcgatgggacacatttcccctagg

SEQ ID NO: 284664 - DNA, 25 bp, Probe Sequence
tgcaaggctgaacaacagcccctgg

SEQ ID NO: 284665 - DNA, 25 bp, Probe Sequence
tgacatcgtctttaaaccctgcgtg

SEQ ID NO: 284666 - DNA, 25 bp, Probe Sequence
tgaactggctatgaaccacctgggg

SEQ ID NO: 284667 - DNA, 25 bp, Probe Sequence
tgcaagtccatagaagcctccgtgg

SEQ ID NO: 284668 - DNA, 25 bp, Probe Sequence
tgaagtccacctgagccaacgtggc

SEQ ID NO: 284669 - DNA, 25 bp, Probe Sequence
tgaaccgacactcaaaacgctactg

SEQ ID NO: 284670 - DNA, 25 bp, Probe Sequence
taaatctgagtccccagaacctagt

SEQ ID NO: 284671 - DNA, 25 bp, Probe Sequence
tgaaacgaggcctgcctgaccaaat

SEQ ID NO: 284672 - DNA, 25 bp, Probe Sequence
tgaaaacggcctgctttccaaatgt

SEQ ID NO: 284673 - DNA, 25 bp, Probe Sequence
tgaaacgctggtccctactaaaata

SEQ ID NO: 284674 - DNA, 25 bp, Probe Sequence
tgaaaccgtgtctctactaaataca

SEQ ID NO: 284675 - DNA, 25 bp, Probe Sequence
tgaaacccagtctttacaaaataca

SEQ ID NO: 284676 - DNA, 25 bp, Probe Sequence
tgaaatttagtagttccaagtttca

SEQ ID NO: 284677 - DNA, 25 bp, Probe Sequence
taaagtatttacaccaagcttgtcc

SEQ ID NO: 284678 - DNA, 25 bp, Probe Sequence
tgaaagttttccacaataattacaa

SEQ ID NO: 284679 - DNA, 25 bp, Probe Sequence
tgaaattgtacaccaaaaccttaca

SEQ ID NO: 284680 - DNA, 25 bp, Probe Sequence
tgaacaggtcaagaataacacttca

SEQ ID NO: 284681 - DNA, 25 bp, Probe Sequence
tgaaaggcgctacattgagaacatt

SEQ ID NO: 284682 - DNA, 25 bp, Probe Sequence
tgaaattgcagaaggactgaacctg

SEQ ID NO: 284683 - DNA, 25 bp, Probe Sequence
tgaaactggtggcaacatgacctgc

SEQ ID NO: 284684 - DNA, 25 bp, Probe Sequence
tgaatattcgtgcaaaaatcctcaa

SEQ ID NO: 284685 - DNA, 25 bp, Probe Sequence
tgaaaactggactttatatatctaa

SEQ ID NO: 284686 - DNA, 25 bp, Probe Sequence
tgacactacgcacttttataataca

SEQ ID NO: 284687 - DNA, 25 bp, Probe Sequence
tgcaccgacggtcctggaaatctca

SEQ ID NO: 284688 - DNA, 25 bp, Probe Sequence
tgcaactcacagctggatctaaatt

SEQ ID NO: 284689 - DNA, 25 bp, Probe Sequence
tgaactgtcatgcctggattttggt

SEQ ID NO: 284690 - DNA, 25 bp, Probe Sequence
tgaactgtattttgcattttgtcta

SEQ ID NO: 284691 - DNA, 25 bp, Probe Sequence
tgaaattgcttttttgttgttgttt

SEQ ID NO: 284692 - DNA, 25 bp, Probe Sequence
tgaaattcgtgaactttttgttggt

SEQ ID NO: 284693 - DNA, 25 bp, Probe Sequence
tgaaatctaggaaaattattctata

SEQ ID NO: 284694 - DNA, 25 bp, Probe Sequence
tgaaatttcatggatgaattttcca

SEQ ID NO: 284695 - DNA, 25 bp, Probe Sequence
tgacagatatgttcttgcttctttt

SEQ ID NO: 284696 - DNA, 25 bp, Probe Sequence
tgacagaatctccgtgtgctttggt

SEQ ID NO: 284697 - DNA, 25 bp, Probe Sequence
tgacaaagtctttctgtgttggtgt

SEQ ID NO: 284698 - DNA, 25 bp, Probe Sequence
tgaaaggtctgtcctgtgcagaagg

SEQ ID NO: 284699 - DNA, 25 bp, Probe Sequence
tgaaagggcttgggtgcagtggctc

SEQ ID NO: 284700 - DNA, 25 bp, Probe Sequence
tgacaagggacaagacggtggtctt

SEQ ID NO: 284701 - DNA, 25 bp, Probe Sequence
tgaagcagtggattaaccttttcct

SEQ ID NO: 284702 - DNA, 25 bp, Probe Sequence
tgaacactggataacctaatttttt

SEQ ID NO: 284703 - DNA, 25 bp, Probe Sequence
tgaaacttttagcctaggatttgtt

SEQ ID NO: 284704 - DNA, 25 bp, Probe Sequence
tgaacacattttattcaagctctgg

SEQ ID NO: 284705 - DNA, 25 bp, Probe Sequence
tgaacacttgctttttgtgattgct

SEQ ID NO: 284706 - DNA, 25 bp, Probe Sequence
tgacactttcacttttgcagattgg

SEQ ID NO: 284707 - DNA, 25 bp, Probe Sequence
tgacactttcacttttgcagattgg

SEQ ID NO: 284708 - DNA, 25 bp, Probe Sequence
tgacagctttaagtgatatgagcat

SEQ ID NO: 284709 - DNA, 25 bp, Probe Sequence
tgacagctgtgtactcttaggctaa

SEQ ID NO: 284710 - DNA, 25 bp, Probe Sequence
tgacagtggggttcatgggtgcagc

SEQ ID NO: 284711 - DNA, 25 bp, Probe Sequence
tgacactggggtactgggacatccg

SEQ ID NO: 284712 - DNA, 25 bp, Probe Sequence
tgacactggggtactgggacatccg

SEQ ID NO: 284713 - DNA, 25 bp, Probe Sequence
tgaactgcagcatggattgggagct

SEQ ID NO: 284714 - DNA, 25 bp, Probe Sequence
tgaaagcctcgatgctgttgcagct

SEQ ID NO: 284715 - DNA, 25 bp, Probe Sequence
tgaaatgcttccacagctaacgttg

SEQ ID NO: 284716 - DNA, 25 bp, Probe Sequence
tgaaatcgaacagtcgctgaacggc

SEQ ID NO: 284717 - DNA, 25 bp, Probe Sequence
tgcaaaggggcgtcggacaagtgca

SEQ ID NO: 284718 - DNA, 25 bp, Probe Sequence
tgacagaggcgggagagcaggcgag

SEQ ID NO: 284719 - DNA, 25 bp, Probe Sequence
tgaaggagccgggacgcggggctct

SEQ ID NO: 284720 - DNA, 25 bp, Probe Sequence
tgaagtaccgggaccgtgcagctga

SEQ ID NO: 284721 - DNA, 25 bp, Probe Sequence
tgaacttcgagatacgggcacatac

SEQ ID NO: 284722 - DNA, 25 bp, Probe Sequence
tgaacttcgagatacaggcagatat

SEQ ID NO: 284723 - DNA, 25 bp, Probe Sequence
tgcatccttcgaacaagcaaggtta

SEQ ID NO: 284724 - DNA, 25 bp, Probe Sequence
tgacactatagaacaagtttgtaca

SEQ ID NO: 284725 - DNA, 25 bp, Probe Sequence
tgaacactctgaacaaggtcttgaa

SEQ ID NO: 284726 - DNA, 25 bp, Probe Sequence
tgcaggacggcaacaacttcagggt

SEQ ID NO: 284727 - DNA, 25 bp, Probe Sequence
tgacagaggacccagatcttcaggt

SEQ ID NO: 284728 - DNA, 25 bp, Probe Sequence
tgaagatggcatcgccagtctccat

SEQ ID NO: 284729 - DNA, 25 bp, Probe Sequence
tgaaaggcatcggtgccacgcatct

SEQ ID NO: 284730 - DNA, 25 bp, Probe Sequence
tgaacatgaacgttgccatatgcac

SEQ ID NO: 284731 - DNA, 25 bp, Probe Sequence
tgaacagacacgggtgaatgctgct

SEQ ID NO: 284732 - DNA, 25 bp, Probe Sequence
tgaagaacacggttgagtccccaga

SEQ ID NO: 284733 - DNA, 25 bp, Probe Sequence
tgaaataaagagttaccacccagca

SEQ ID NO: 284734 - DNA, 25 bp, Probe Sequence
tgaattcgaacagcatactccccga

SEQ ID NO: 284735 - DNA, 25 bp, Probe Sequence
tgaaacagaacagccaactcaccca

SEQ ID NO: 284736 - DNA, 25 bp, Probe Sequence
tgaaacataaatccgcaagtcacca

SEQ ID NO: 284737 - DNA, 25 bp, Probe Sequence
tgacacacatcagactcgcagagtt

SEQ ID NO: 284738 - DNA, 25 bp, Probe Sequence
tgaagcctatcaagcccatgcagtt

SEQ ID NO: 284739 - DNA, 25 bp, Probe Sequence
tgaacctagcacccgagattctatg

SEQ ID NO: 284740 - DNA, 25 bp, Probe Sequence
tgaaacgagtggtcagcacatttag

SEQ ID NO: 284741 - DNA, 25 bp, Probe Sequence
tgaagagctagtctatcagcatctg

SEQ ID NO: 284742 - DNA, 25 bp, Probe Sequence
tgaaagatccggtcatcgcatcaga

SEQ ID NO: 284743 - DNA, 25 bp, Probe Sequence
tgaacagtcctgggcactacatgta

SEQ ID NO: 284744 - DNA, 25 bp, Probe Sequence
tgaacagttcgcctacgacggcaag

SEQ ID NO: 284745 - DNA, 25 bp, Probe Sequence
tgaactatatccgtaacctggatag

SEQ ID NO: 284746 - DNA, 25 bp, Probe Sequence
tgcagattattcctttaacggccgg

SEQ ID NO: 284747 - DNA, 25 bp, Probe Sequence
tgcagattattcctttaacggccgg

SEQ ID NO: 284748 - DNA, 25 bp, Probe Sequence
tgaatcttttttttgacgggatggg

SEQ ID NO: 284749 - DNA, 25 bp, Probe Sequence
tgaatcttttttttgacgggatggg

SEQ ID NO: 284750 - DNA, 25 bp, Probe Sequence
tgaacgttttgttaagggtgagaat

SEQ ID NO: 284751 - DNA, 25 bp, Probe Sequence
taattttctgtgctaagggtccagt

SEQ ID NO: 284752 - DNA, 25 bp, Probe Sequence
tgaaagttgcggctaagctggcccc

SEQ ID NO: 284753 - DNA, 25 bp, Probe Sequence
tgaaagttctggcttgtagacccct

SEQ ID NO: 284754 - DNA, 25 bp, Probe Sequence
tgaaagttctggcttgtagacccct

SEQ ID NO: 284755 - DNA, 25 bp, Probe Sequence
tgaaagttctggcttgtagacccct

SEQ ID NO: 284756 - DNA, 25 bp, Probe Sequence
tgaaagttctggcttgtagacccct

SEQ ID NO: 284757 - DNA, 25 bp, Probe Sequence
tgaaagttgaggggtgctgaaacca

SEQ ID NO: 284758 - DNA, 25 bp, Probe Sequence
tgaactcttggggctgagctgcaac

SEQ ID NO: 284759 - DNA, 25 bp, Probe Sequence
tgaaggccttgtgctgaccaagctg

SEQ ID NO: 284760 - DNA, 25 bp, Probe Sequence
tgaaggccctagctgagcgcaaggc

SEQ ID NO: 284761 - DNA, 25 bp, Probe Sequence
tgaagagccgcaagaggcggaaggg

SEQ ID NO: 284762 - DNA, 25 bp, Probe Sequence
tgaaagtctgtgaagccggcaaagc

SEQ ID NO: 284763 - DNA, 25 bp, Probe Sequence
tgaacagccatataccaggaatagg

SEQ ID NO: 284764 - DNA, 25 bp, Probe Sequence
tgcacaaagatgttccaagtgacat

SEQ ID NO: 284765 - DNA, 25 bp, Probe Sequence
tgacacacagcactctctaaatctt

SEQ ID NO: 284766 - DNA, 25 bp, Probe Sequence
tgacaaaggatgcccagcagcactg

SEQ ID NO: 284767 - DNA, 25 bp, Probe Sequence
tgaagatcaagatcatcgcaccccc

SEQ ID NO: 284768 - DNA, 25 bp, Probe Sequence
tgaagcataaaatcaacccctcggc

SEQ ID NO: 284769 - DNA, 25 bp, Probe Sequence
tgaagaagaatacaacctcctgctg

SEQ ID NO: 284770 - DNA, 25 bp, Probe Sequence
tgaagaaatgttctgtgcccaccgt

SEQ ID NO: 284771 - DNA, 25 bp, Probe Sequence
tgaaaatattttagccccctcagat

SEQ ID NO: 284772 - DNA, 25 bp, Probe Sequence
tgaaaatattttagccccctcagat

SEQ ID NO: 284773 - DNA, 25 bp, Probe Sequence
tgaacatcctagattcacactccca

SEQ ID NO: 284774 - DNA, 25 bp, Probe Sequence
tgaaaccaggaactcactttcccgg

SEQ ID NO: 284775 - DNA, 25 bp, Probe Sequence
tgaaaccagatttctcacttgctct

SEQ ID NO: 284776 - DNA, 25 bp, Probe Sequence
tgacacaacagatatcaatctggat

SEQ ID NO: 284777 - DNA, 25 bp, Probe Sequence
tgaacagagagagaccctgagcccg

SEQ ID NO: 284778 - DNA, 25 bp, Probe Sequence
tgacaaggcaaatgcccaggccgca

SEQ ID NO: 284779 - DNA, 25 bp, Probe Sequence
tgacaatttacttcccaggtctcat

SEQ ID NO: 284780 - DNA, 25 bp, Probe Sequence
tgaactattcactgtcgagatggct

SEQ ID NO: 284781 - DNA, 25 bp, Probe Sequence
tgacacaatccctggggctgtgcat

SEQ ID NO: 284782 - DNA, 25 bp, Probe Sequence
tgacaaattctctcctgaggctgca

SEQ ID NO: 284783 - DNA, 25 bp, Probe Sequence
tgacaacagctgtcgtctctgggac

SEQ ID NO: 284784 - DNA, 25 bp, Probe Sequence
tgaaacactgacctcttgtctcaaa

SEQ ID NO: 284785 - DNA, 25 bp, Probe Sequence
tgaaatcctgattgtttgcactgga

SEQ ID NO: 284786 - DNA, 25 bp, Probe Sequence
tgaatgtcccagtctattcgggagt

SEQ ID NO: 284787 - DNA, 25 bp, Probe Sequence
tgaagggccaagcaacatgttgaat

SEQ ID NO: 284788 - DNA, 25 bp, Probe Sequence
tgaaggtgctcacgggcacgggtaa

SEQ ID NO: 284789 - DNA, 25 bp, Probe Sequence
tgaaagctgccatggccctggagaa

SEQ ID NO: 284790 - DNA, 25 bp, Probe Sequence
tgaaatgctctctgtgtgttagaga

SEQ ID NO: 284791 - DNA, 25 bp, Probe Sequence
tgaaatgcattccttgctagctcag

SEQ ID NO: 284792 - DNA, 25 bp, Probe Sequence
tgaaatcattgctatgtccaccaca

SEQ ID NO: 284793 - DNA, 25 bp, Probe Sequence
tgaaatcttcaggtccaccttctta

SEQ ID NO: 284794 - DNA, 25 bp, Probe Sequence
tgaaacttagagaaccctttgaata

SEQ ID NO: 284795 - DNA, 25 bp, Probe Sequence
tgaaacttaaactctgtgcttgtaa

SEQ ID NO: 284796 - DNA, 25 bp, Probe Sequence
tgaaatccttaaccctgtttgtcac

SEQ ID NO: 284797 - DNA, 25 bp, Probe Sequence
tgaagagccttttccctaaattatc

SEQ ID NO: 284798 - DNA, 25 bp, Probe Sequence
tgaaacctttcagcttatcaaaaaa

SEQ ID NO: 284799 - DNA, 25 bp, Probe Sequence
tgaaacctgtcgtgtaataaaaata

SEQ ID NO: 284800 - DNA, 25 bp, Probe Sequence
tgaaaccccatgtgtactaaaaata

SEQ ID NO: 284801 - DNA, 25 bp, Probe Sequence
tgaaaccccatctctaccaaaaata

SEQ ID NO: 284802 - DNA, 25 bp, Probe Sequence
tgaaaccccatctctaccaaaaata

SEQ ID NO: 284803 - DNA, 25 bp, Probe Sequence
tgaaaccccattttctcagaaaaat

SEQ ID NO: 284804 - DNA, 25 bp, Probe Sequence
tgaaatccggcatgttcttgtcaca

SEQ ID NO: 284805 - DNA, 25 bp, Probe Sequence
tgaaatccggcatgttcttgtcaca

SEQ ID NO: 284806 - DNA, 25 bp, Probe Sequence
tgaaactcggctgtattaatcacgc

SEQ ID NO: 284807 - DNA, 25 bp, Probe Sequence
tccgaccggtgagtcatttgcatca

SEQ ID NO: 284808 - DNA, 25 bp, Probe Sequence
tgacaatccaggcagtcttttccac

SEQ ID NO: 284809 - DNA, 25 bp, Probe Sequence
tgaaagccccgagtgaagcattctc

SEQ ID NO: 284810 - DNA, 25 bp, Probe Sequence
tgacaaggacccgtgtcacatcgtg

SEQ ID NO: 284811 - DNA, 25 bp, Probe Sequence
tgacaagctgacacctattcacgac

SEQ ID NO: 284812 - DNA, 25 bp, Probe Sequence
tgaacagctgcaaaccatcttcacc

SEQ ID NO: 284813 - DNA, 25 bp, Probe Sequence
tgaagagtaaaggcctgcctgccgc

SEQ ID NO: 284814 - DNA, 25 bp, Probe Sequence
tgaaagactgaaagcttcctcccta

SEQ ID NO: 284815 - DNA, 25 bp, Probe Sequence
tgaagaactgtgtgattctgcccca

SEQ ID NO: 284816 - DNA, 25 bp, Probe Sequence
tgaaacactgtacacagcctctcca

SEQ ID NO: 284817 - DNA, 25 bp, Probe Sequence
tgaaatcactgtaaatgcccccatc

SEQ ID NO: 284818 - DNA, 25 bp, Probe Sequence
tgaaatgagcacatcacattcccct

SEQ ID NO: 284819 - DNA, 25 bp, Probe Sequence
tgaaatgaactctacttctggccaa

SEQ ID NO: 284820 - DNA, 25 bp, Probe Sequence
tgaaaaactccagtccagagcctca

SEQ ID NO: 284821 - DNA, 25 bp, Probe Sequence
tgaaaaagctactccacatcactct

SEQ ID NO: 284822 - DNA, 25 bp, Probe Sequence
tgaaataactccaagaatctgcact

SEQ ID NO: 284823 - DNA, 25 bp, Probe Sequence
tgaagtcaacatgaagtttcctact

SEQ ID NO: 284824 - DNA, 25 bp, Probe Sequence
tgcaaagaaccccagtttcctattt

SEQ ID NO: 284825 - DNA, 25 bp, Probe Sequence
tgaaggaaccccttgtgtaattctt

SEQ ID NO: 284826 - DNA, 25 bp, Probe Sequence
tgaaatgcaacctcactgttatcta

SEQ ID NO: 284827 - DNA, 25 bp, Probe Sequence
tgacaatcaaccgctctatggaccc

SEQ ID NO: 284828 - DNA, 25 bp, Probe Sequence
tgcatgaaagccgaagttatggacc

SEQ ID NO: 284829 - DNA, 25 bp, Probe Sequence
tgaacaagcgccagctctattacca

SEQ ID NO: 284830 - DNA, 25 bp, Probe Sequence
tgaatcagctgcctcaagtcttttc

SEQ ID NO: 284831 - DNA, 25 bp, Probe Sequence
tgaaggggtcaagatcatcttccgg

SEQ ID NO: 284832 - DNA, 25 bp, Probe Sequence
tgaagggcgtaatgcacttatccac

SEQ ID NO: 284833 - DNA, 25 bp, Probe Sequence
tgaacgacaccgtaactatccgcac

SEQ ID NO: 284834 - DNA, 25 bp, Probe Sequence
tgaacgacaccgtaactatccgcac

SEQ ID NO: 284835 - DNA, 25 bp, Probe Sequence
tgaacagactcagtctacctccagc

SEQ ID NO: 284836 - DNA, 25 bp, Probe Sequence
tgaacagaattccatcatccctggc

SEQ ID NO: 284837 - DNA, 25 bp, Probe Sequence
tgaagaaattgactcatgctgcccc

SEQ ID NO: 284838 - DNA, 25 bp, Probe Sequence
tgaatatacattcatcagccccact

SEQ ID NO: 284839 - DNA, 25 bp, Probe Sequence
tgaaatatattcatggctccctctt

SEQ ID NO: 284840 - DNA, 25 bp, Probe Sequence
tgaaatgatacttgtactcccccta

SEQ ID NO: 284841 - DNA, 25 bp, Probe Sequence
tgacaatgaactttgggcaccagcc

SEQ ID NO: 284842 - DNA, 25 bp, Probe Sequence
tgaaatgttccttgtggatccccat

SEQ ID NO: 284843 - DNA, 25 bp, Probe Sequence
tgaaaatgtccttgtgatgtgcacg

SEQ ID NO: 284844 - DNA, 25 bp, Probe Sequence
tgaaatgtgtgcccatggctgggcg

SEQ ID NO: 284845 - DNA, 25 bp, Probe Sequence
tgaaagctgtgctcagaggaggtga

SEQ ID NO: 284846 - DNA, 25 bp, Probe Sequence
tgaaccatgatcccaatccaagtga

SEQ ID NO: 284847 - DNA, 25 bp, Probe Sequence
tgaaccagataccccctagaaaatt

SEQ ID NO: 284848 - DNA, 25 bp, Probe Sequence
tgaactgagaaccccttttaattga

SEQ ID NO: 284849 - DNA, 25 bp, Probe Sequence
tgaacgcaaatcagccactttaatt

SEQ ID NO: 284850 - DNA, 25 bp, Probe Sequence
tgaaatcaaatcaccacctcatcac

SEQ ID NO: 284851 - DNA, 25 bp, Probe Sequence
tgaaagaatatcatcctctgcatta

SEQ ID NO: 284852 - DNA, 25 bp, Probe Sequence
tgaagacagaaggtctgccagctta

SEQ ID NO: 284853 - DNA, 25 bp, Probe Sequence
tgaagtcaactgttaccgctgtggc

SEQ ID NO: 284854 - DNA, 25 bp, Probe Sequence
tgaatggcacctggctacaggcggg

SEQ ID NO: 284855 - DNA, 25 bp, Probe Sequence
tgaagatgcagcagcacgagcaggc

SEQ ID NO: 284856 - DNA, 25 bp, Probe Sequence
tgaaaggcttgggcacagatgagga

SEQ ID NO: 284857 - DNA, 25 bp, Probe Sequence
tgaaatggtggccacacgggtgcta

SEQ ID NO: 284858 - DNA, 25 bp, Probe Sequence
tgaaagtgtggagacaggcctgaag

SEQ ID NO: 284859 - DNA, 25 bp, Probe Sequence
tgaaagctgtggaataaggcccagt

SEQ ID NO: 284860 - DNA, 25 bp, Probe Sequence
tgaaagctgggtgtaggcactgcag

SEQ ID NO: 284861 - DNA, 25 bp, Probe Sequence
tgaaactggagtaatgaagctgctg

SEQ ID NO: 284862 - DNA, 25 bp, Probe Sequence
tgaacatctgggccctgattctggg

SEQ ID NO: 284863 - DNA, 25 bp, Probe Sequence
tgaacatctgagcagttttgtgctt

SEQ ID NO: 284864 - DNA, 25 bp, Probe Sequence
tgaagtcaggctcatctgcttactg

SEQ ID NO: 284865 - DNA, 25 bp, Probe Sequence
tgaattagcctcgatctttttgatt

SEQ ID NO: 284866 - DNA, 25 bp, Probe Sequence
tgaatgtgagcttaccagggtcttt

SEQ ID NO: 284867 - DNA, 25 bp, Probe Sequence
tgaaggaattaaggggtcctcttgt

SEQ ID NO: 284868 - DNA, 25 bp, Probe Sequence
tgaagtgtgttaaggggtcggctaa

SEQ ID NO: 284869 - DNA, 25 bp, Probe Sequence
tgaagtttcgcaacatggagacggc

SEQ ID NO: 284870 - DNA, 25 bp, Probe Sequence
tgaagtactacaactccgacgtgca

SEQ ID NO: 284871 - DNA, 25 bp, Probe Sequence
tgaaatacataaaagccaacagttt

SEQ ID NO: 284872 - DNA, 25 bp, Probe Sequence
tgctcttgaaaaaaccaacggtgcc

SEQ ID NO: 284873 - DNA, 25 bp, Probe Sequence
tcttgaaaaacttccccggtatgat

SEQ ID NO: 284874 - DNA, 25 bp, Probe Sequence
tcagttaaaagcttccccggtaatg

SEQ ID NO: 284875 - DNA, 25 bp, Probe Sequence
tgaataaatacctctcccagtgtaa

SEQ ID NO: 284876 - DNA, 25 bp, Probe Sequence
taataaattgcctcattcgtaaaaa

SEQ ID NO: 284877 - DNA, 25 bp, Probe Sequence
tgaataaattccttcaacgccaaaa

SEQ ID NO: 284878 - DNA, 25 bp, Probe Sequence
tgcaaataaacgctcactccgaatt

SEQ ID NO: 284879 - DNA, 25 bp, Probe Sequence
tgaactccaaccagaatccaaattg

SEQ ID NO: 284880 - DNA, 25 bp, Probe Sequence
tgaactgctcaactctaaacccaaa

SEQ ID NO: 284881 - DNA, 25 bp, Probe Sequence
tgaacttactctaacctcactaaag

SEQ ID NO: 284882 - DNA, 25 bp, Probe Sequence
tgcacacttactaaaaaactttgga

SEQ ID NO: 284883 - DNA, 25 bp, Probe Sequence
tgcacctaaatataagtaggtttat

SEQ ID NO: 284884 - DNA, 25 bp, Probe Sequence
tacctgtttatctgttaactattat

SEQ ID NO: 284885 - DNA, 25 bp, Probe Sequence
tgaattgtttattactgaaactttc

SEQ ID NO: 284886 - DNA, 25 bp, Probe Sequence
tgcactttgggatggtagaagtttc

SEQ ID NO: 284887 - DNA, 25 bp, Probe Sequence
tgcaccatggttccggggttggttc

SEQ ID NO: 284888 - DNA, 25 bp, Probe Sequence
tgaaaagctgctcggggttttttat

SEQ ID NO: 284889 - DNA, 25 bp, Probe Sequence
tgaaagactcttggggtctgtttct

SEQ ID NO: 284890 - DNA, 25 bp, Probe Sequence
tgaaatcgcttgaccggtcttgttc

SEQ ID NO: 284891 - DNA, 25 bp, Probe Sequence
tgaaagcagcattgaaataatttgt

SEQ ID NO: 284892 - DNA, 25 bp, Probe Sequence
tgaaacccacagtagagatttgatg

SEQ ID NO: 284893 - DNA, 25 bp, Probe Sequence
tgaaatggcccacagaacctatcta

SEQ ID NO: 284894 - DNA, 25 bp, Probe Sequence
tgaaaggccctttgtaactatcttt

SEQ ID NO: 284895 - DNA, 25 bp, Probe Sequence
tgaaaggctgttcttttcttctctt

SEQ ID NO: 284896 - DNA, 25 bp, Probe Sequence
tgaaagtcgctttctttttattcat

SEQ ID NO: 284897 - DNA, 25 bp, Probe Sequence
tgaaaccaatatcctgatattttta

SEQ ID NO: 284898 - DNA, 25 bp, Probe Sequence
tgaaactgctatagcctaagcggct

SEQ ID NO: 284899 - DNA, 25 bp, Probe Sequence
tgaaactcatgaagcccaggacgat

SEQ ID NO: 284900 - DNA, 25 bp, Probe Sequence
tgcaataccataacagtcaaactga

SEQ ID NO: 284901 - DNA, 25 bp, Probe Sequence
tgcatatcctgctactgcagctgca

SEQ ID NO: 284902 - DNA, 25 bp, Probe Sequence
tgcacccgcaacaggcgttttgcaa

SEQ ID NO: 284903 - DNA, 25 bp, Probe Sequence
tgaaagccacacacgtttcttgcac

SEQ ID NO: 284904 - DNA, 25 bp, Probe Sequence
tgaaactcagccaggttgtctaacc

SEQ ID NO: 284905 - DNA, 25 bp, Probe Sequence
tgaaaacagctcaggttctcaccac

SEQ ID NO: 284906 - DNA, 25 bp, Probe Sequence
tgaaaggactcaagtcttccactgc

SEQ ID NO: 284907 - DNA, 25 bp, Probe Sequence
tgaaagaggtgcagtcactcacacc

SEQ ID NO: 284908 - DNA, 25 bp, Probe Sequence
tgaaaagattgctgtccactgcaca

SEQ ID NO: 284909 - DNA, 25 bp, Probe Sequence
tgaaaagatcgtggtccttctgcag

SEQ ID NO: 284910 - DNA, 25 bp, Probe Sequence
tgaaaagacgtcaatatctgctcac

SEQ ID NO: 284911 - DNA, 25 bp, Probe Sequence
tgaaaggcaggcctatttcatcaca

SEQ ID NO: 284912 - DNA, 25 bp, Probe Sequence
tgaaggtcaggggctttatctatga

SEQ ID NO: 284913 - DNA, 25 bp, Probe Sequence
tgaacgacagggactccttctcaga

SEQ ID NO: 284914 - DNA, 25 bp, Probe Sequence
tgaactgacacacttctccatattc

SEQ ID NO: 284915 - DNA, 25 bp, Probe Sequence
tgaactgccagaatccatgctcagc

SEQ ID NO: 284916 - DNA, 25 bp, Probe Sequence
tgaagctgccagaaacgaacctctt

SEQ ID NO: 284917 - DNA, 25 bp, Probe Sequence
tgaagtgcacacaaacgttctccag

SEQ ID NO: 284918 - DNA, 25 bp, Probe Sequence
tgaattaataaggccttttcgcttt

SEQ ID NO: 284919 - DNA, 25 bp, Probe Sequence
tgaagtacgacacgcctttcatttt

SEQ ID NO: 284920 - DNA, 25 bp, Probe Sequence
tgaagccacgaagggccttaaatcc

SEQ ID NO: 284921 - DNA, 25 bp, Probe Sequence
tgaaactgcgaatggctcattaaat

SEQ ID NO: 284922 - DNA, 25 bp, Probe Sequence
tgaaagctgcagttgatggcctctc

SEQ ID NO: 284923 - DNA, 25 bp, Probe Sequence
tgaaagagcgccaaggcctcttctt

SEQ ID NO: 284924 - DNA, 25 bp, Probe Sequence
tgaaagaccaagactgctctagttt

SEQ ID NO: 284925 - DNA, 25 bp, Probe Sequence
tgaaagacctagatgcatttgaaaa

SEQ ID NO: 284926 - DNA, 25 bp, Probe Sequence
tgaagctaccttctgatgttgtaac

SEQ ID NO: 284927 - DNA, 25 bp, Probe Sequence
tgaacgcgccttctgattgggacag

SEQ ID NO: 284928 - DNA, 25 bp, Probe Sequence
tgaactgctgtttgcctgattggta

SEQ ID NO: 284929 - DNA, 25 bp, Probe Sequence
tgaacacagtcatcgctgcactgag

SEQ ID NO: 284930 - DNA, 25 bp, Probe Sequence
tgaaaagtatactacagctgcaaga

SEQ ID NO: 284931 - DNA, 25 bp, Probe Sequence
tcacaacgtaactcaatcaggagga

SEQ ID NO: 284932 - DNA, 25 bp, Probe Sequence
tgcaaacctatacacaaccaagtga

SEQ ID NO: 284933 - DNA, 25 bp, Probe Sequence
tgcactgactttatccagaccaaag

SEQ ID NO: 284934 - DNA, 25 bp, Probe Sequence
tgcaaagtttttcaaccaagtggtt

SEQ ID NO: 284935 - DNA, 25 bp, Probe Sequence
tgaacagatttcttgaataaaatgg

SEQ ID NO: 284936 - DNA, 25 bp, Probe Sequence
tgaacaggtatcctattgtctaatg

SEQ ID NO: 284937 - DNA, 25 bp, Probe Sequence
tgaactggagtcattttctgaaagg

SEQ ID NO: 284938 - DNA, 25 bp, Probe Sequence
tgaacgttgctgatcttatctgaag

SEQ ID NO: 284939 - DNA, 25 bp, Probe Sequence
tgaactgtgtgtaaccatagtaaca

SEQ ID NO: 284940 - DNA, 25 bp, Probe Sequence
tgaagtggtgcataacattgccaaa

SEQ ID NO: 284941 - DNA, 25 bp, Probe Sequence
tgcggagggtccctgatagccaaca

SEQ ID NO: 284942 - DNA, 25 bp, Probe Sequence
tgcaccagtaccgggaagccaatca

SEQ ID NO: 284943 - DNA, 25 bp, Probe Sequence
tgcaccactaccacgtatgtacatg

SEQ ID NO: 284944 - DNA, 25 bp, Probe Sequence
tgcacaggttcagccagtattcacg

SEQ ID NO: 284945 - DNA, 25 bp, Probe Sequence
tgcaattttacctagctaccactag

SEQ ID NO: 284946 - DNA, 25 bp, Probe Sequence
tgaatgtcttcaagaccgacacccg

SEQ ID NO: 284947 - DNA, 25 bp, Probe Sequence
tgaagtgcgtcagcatccagtacct

SEQ ID NO: 284948 - DNA, 25 bp, Probe Sequence
tgaagacaccatctccatgtgaccg

SEQ ID NO: 284949 - DNA, 25 bp, Probe Sequence
tgaacatcacctcgaccattgagca

SEQ ID NO: 284950 - DNA, 25 bp, Probe Sequence
tgaacgacctcgtctctgagtatca

SEQ ID NO: 284951 - DNA, 25 bp, Probe Sequence
tgaacatactcaccctagttagcac

SEQ ID NO: 284952 - DNA, 25 bp, Probe Sequence
tgaactacatgatactcacttacac

SEQ ID NO: 284953 - DNA, 25 bp, Probe Sequence
taactcccaaacgcttagtctttgt

SEQ ID NO: 284954 - DNA, 25 bp, Probe Sequence
tgaaccctaactggccgtatttatt

SEQ ID NO: 284955 - DNA, 25 bp, Probe Sequence
tgaacaccttacaccctgtgttcat

SEQ ID NO: 284956 - DNA, 25 bp, Probe Sequence
tgaacgtcttacaactcagttgttt

SEQ ID NO: 284957 - DNA, 25 bp, Probe Sequence
tgaaccgtgaacaaaactgtgtttt

SEQ ID NO: 284958 - DNA, 25 bp, Probe Sequence
tgaagtctggcaactcggacgtgta

SEQ ID NO: 284959 - DNA, 25 bp, Probe Sequence
tgaagtcttgaagactgcaccttaa

SEQ ID NO: 284960 - DNA, 25 bp, Probe Sequence
tgaagtcttgagaaactggccgcca

SEQ ID NO: 284961 - DNA, 25 bp, Probe Sequence
tgaaactgtgagtgactgctcccca

SEQ ID NO: 284962 - DNA, 25 bp, Probe Sequence
tgaaactgtatcacctttgccaagt

SEQ ID NO: 284963 - DNA, 25 bp, Probe Sequence
tgaaacgactttgtcctgctacagt

SEQ ID NO: 284964 - DNA, 25 bp, Probe Sequence
tgaaaagcctttctgttgcaactat

SEQ ID NO: 284965 - DNA, 25 bp, Probe Sequence
tgaaaaccttttagaagcccttctg

SEQ ID NO: 284966 - DNA, 25 bp, Probe Sequence
tgaaaagccagctcttgaacctctt

SEQ ID NO: 284967 - DNA, 25 bp, Probe Sequence
tgaacaactgcattccgcaaacctc

SEQ ID NO: 284968 - DNA, 25 bp, Probe Sequence
tgaacaacatgcattccgagaagct

SEQ ID NO: 284969 - DNA, 25 bp, Probe Sequence
tgaactcagcacattcgggaccaat

SEQ ID NO: 284970 - DNA, 25 bp, Probe Sequence
tgaagcgtgaacttcgtggtcgcct

SEQ ID NO: 284971 - DNA, 25 bp, Probe Sequence
tgaagggagatcatcggtggacaga

SEQ ID NO: 284972 - DNA, 25 bp, Probe Sequence
tgaaggggacattggacgggggccg

SEQ ID NO: 284973 - DNA, 25 bp, Probe Sequence
tgaagggtgactaaacgggcgccaa

SEQ ID NO: 284974 - DNA, 25 bp, Probe Sequence
tgaagtcgttcctccgggagtgcaa

SEQ ID NO: 284975 - DNA, 25 bp, Probe Sequence
tgaagctggattgatacggggaaaa

SEQ ID NO: 284976 - DNA, 25 bp, Probe Sequence
tgaatgctcgcatagatcacctggg

SEQ ID NO: 284977 - DNA, 25 bp, Probe Sequence
tgaagtcatgaaagtaattctgatg

SEQ ID NO: 284978 - DNA, 25 bp, Probe Sequence
tgaatacgaaattgttctctgatgt

SEQ ID NO: 284979 - DNA, 25 bp, Probe Sequence
tgaagacgaatatgatctgtgctgg

SEQ ID NO: 284980 - DNA, 25 bp, Probe Sequence
tgaacctggacaagcagcggctggg

SEQ ID NO: 284981 - DNA, 25 bp, Probe Sequence
tgaacctggacaagcagcggctggg

SEQ ID NO: 284982 - DNA, 25 bp, Probe Sequence
tgcagccaatcgcatggagccgctg

SEQ ID NO: 284983 - DNA, 25 bp, Probe Sequence
tgcagctccttgctgaaaccttcca

SEQ ID NO: 284984 - DNA, 25 bp, Probe Sequence
tgcaggctttcggacagtcctttct

SEQ ID NO: 284985 - DNA, 25 bp, Probe Sequence
tgcacagtttttgcgtcttgtttgc

SEQ ID NO: 284986 - DNA, 25 bp, Probe Sequence
tgcaaattgtgtgccctctggttca

SEQ ID NO: 284987 - DNA, 25 bp, Probe Sequence
tgaattttgcacagccctagataca

SEQ ID NO: 284988 - DNA, 25 bp, Probe Sequence
tgaaccgcttcatgccactgaatac

SEQ ID NO: 284989 - DNA, 25 bp, Probe Sequence
tgaaccgcttcatgccactgaatac

SEQ ID NO: 284990 - DNA, 25 bp, Probe Sequence
tgaaactgtatctgccactcatttc

SEQ ID NO: 284991 - DNA, 25 bp, Probe Sequence
tgaacacttcttgtagctcactgtc

SEQ ID NO: 284992 - DNA, 25 bp, Probe Sequence
tgaacacattgcaggggccagtgtc

SEQ ID NO: 284993 - DNA, 25 bp, Probe Sequence
tgaagagcattcatcgtgaggggtc

SEQ ID NO: 284994 - DNA, 25 bp, Probe Sequence
tgcagaaattttggtggactgtgat

SEQ ID NO: 284995 - DNA, 25 bp, Probe Sequence
tgaaaattgctttgatcgcgcatga

SEQ ID NO: 284996 - DNA, 25 bp, Probe Sequence
tgaaaattgctttgatcgcgcatga

SEQ ID NO: 284997 - DNA, 25 bp, Probe Sequence
tgaagtttgttttctgatgctgttc

SEQ ID NO: 284998 - DNA, 25 bp, Probe Sequence
tgaatttttttaattgccttcaatt

SEQ ID NO: 284999 - DNA, 25 bp, Probe Sequence
tgaattaagtcttccttccctattt

SEQ ID NO: 285000 - DNA, 25 bp, Probe Sequence
tgaattaccctttcattcagccttt

SEQ ID NO: 285001 - DNA, 25 bp, Probe Sequence
tgaattaccctttcattcagccttt

SEQ ID NO: 285002 - DNA, 25 bp, Probe Sequence
tgaattgaacttaactatcggcttt

SEQ ID NO: 285003 - DNA, 25 bp, Probe Sequence
tgaattagaaactatttgaggctat

SEQ ID NO: 285004 - DNA, 25 bp, Probe Sequence
tgaaccaggcccttttggatcttca

SEQ ID NO: 285005 - DNA, 25 bp, Probe Sequence
tgcatacaccctcagtcttggtttc

SEQ ID NO: 285006 - DNA, 25 bp, Probe Sequence
tgaaaaccgtagcctttgcattctc

SEQ ID NO: 285007 - DNA, 25 bp, Probe Sequence
tgaaaaaatgtgccattttgcattt

SEQ ID NO: 285008 - DNA, 25 bp, Probe Sequence
tgaaaaagatcaggctttctgactt

SEQ ID NO: 285009 - DNA, 25 bp, Probe Sequence
tgaaggggagctgcttatccgcttc

SEQ ID NO: 285010 - DNA, 25 bp, Probe Sequence
tgaaggtgggctgtttgcctttcgt

SEQ ID NO: 285011 - DNA, 25 bp, Probe Sequence
tcaagaatgttgcgtttcccttcgg

SEQ ID NO: 285012 - DNA, 25 bp, Probe Sequence
tgcaccaagggtgtttcctgttggg

SEQ ID NO: 285013 - DNA, 25 bp, Probe Sequence
tgaaacagggtcttgatttcgctta

SEQ ID NO: 285014 - DNA, 25 bp, Probe Sequence
tgaaaatgaattttatcttccttaa

SEQ ID NO: 285015 - DNA, 25 bp, Probe Sequence
tgaagaatgggttcccttcacctac

SEQ ID NO: 285016 - DNA, 25 bp, Probe Sequence
tgaaaagggaacctgcttctttact

SEQ ID NO: 285017 - DNA, 25 bp, Probe Sequence
tgaagaattgtatctcttgtcttta

SEQ ID NO: 285018 - DNA, 25 bp, Probe Sequence
tgaatgacattgctgtcgtttttta

SEQ ID NO: 285019 - DNA, 25 bp, Probe Sequence
tgaagaagtggtacacgatttttaa

SEQ ID NO: 285020 - DNA, 25 bp, Probe Sequence
tgaaaatggcgaaactttggagaca

SEQ ID NO: 285021 - DNA, 25 bp, Probe Sequence
tgaaaatacttttctcttggagtat

SEQ ID NO: 285022 - DNA, 25 bp, Probe Sequence
tgaatcaacctttcagcctaggacg

SEQ ID NO: 285023 - DNA, 25 bp, Probe Sequence
tgaaggccctttcggtggggctggt

SEQ ID NO: 285024 - DNA, 25 bp, Probe Sequence
tgaatgccgtctcacgggtggagcg

SEQ ID NO: 285025 - DNA, 25 bp, Probe Sequence
tgaaccgtcagatcgccttggagac

SEQ ID NO: 285026 - DNA, 25 bp, Probe Sequence
tgaaccgtcagatcgcctgagacgc

SEQ ID NO: 285027 - DNA, 25 bp, Probe Sequence
tgaaccgtcagatcgcctggagacg

SEQ ID NO: 285028 - DNA, 25 bp, Probe Sequence
tgcaacaaagaatcccgctggcatc

SEQ ID NO: 285029 - DNA, 25 bp, Probe Sequence
tgaagccaaagatgccgctgtgctc

SEQ ID NO: 285030 - DNA, 25 bp, Probe Sequence
tgaagacagtggctggcggtgcctg

SEQ ID NO: 285031 - DNA, 25 bp, Probe Sequence
tgaaaaggggcactgcacgagcacc

SEQ ID NO: 285032 - DNA, 25 bp, Probe Sequence
tgaagagggtggctgccgagttctt

SEQ ID NO: 285033 - DNA, 25 bp, Probe Sequence
tgaagagatgggctctgctctgaga

SEQ ID NO: 285034 - DNA, 25 bp, Probe Sequence
tgaagaccgagccctttgatgactt

SEQ ID NO: 285035 - DNA, 25 bp, Probe Sequence
tgaaccctgagtgtcttgtggctga

SEQ ID NO: 285036 - DNA, 25 bp, Probe Sequence
tgaacgccatgaccctgtggatggg

SEQ ID NO: 285037 - DNA, 25 bp, Probe Sequence
tgcaatctcggcactttggggggcc

SEQ ID NO: 285038 - DNA, 25 bp, Probe Sequence
tgaatactgccctttttggcggggt

SEQ ID NO: 285039 - DNA, 25 bp, Probe Sequence
tgaaacacacctgtctaggggcggc

SEQ ID NO: 285040 - DNA, 25 bp, Probe Sequence
tgaagagccgccacctaagagaagg

SEQ ID NO: 285041 - DNA, 25 bp, Probe Sequence
tgaaggcacaccactgaaatggcat

SEQ ID NO: 285042 - DNA, 25 bp, Probe Sequence
tgaaggacccggggagcaggagacc

SEQ ID NO: 285043 - DNA, 25 bp, Probe Sequence
tgaagaggcccaaggatgtcggagg

SEQ ID NO: 285044 - DNA, 25 bp, Probe Sequence
tgcaccatgccctagaggagtcggc

SEQ ID NO: 285045 - DNA, 25 bp, Probe Sequence
tgaacatgctgttataggatctaca

SEQ ID NO: 285046 - DNA, 25 bp, Probe Sequence
tgaacatctgtgagcaaatcccctt

SEQ ID NO: 285047 - DNA, 25 bp, Probe Sequence
tgaagctttgcccaaacaatccatg

SEQ ID NO: 285048 - DNA, 25 bp, Probe Sequence
tgaagctttctgataatcctgcctg

SEQ ID NO: 285049 - DNA, 25 bp, Probe Sequence
tgaagctgtccaatgtcaacctgca

SEQ ID NO: 285050 - DNA, 25 bp, Probe Sequence
tgaacattcctatcaatccaaattc

SEQ ID NO: 285051 - DNA, 25 bp, Probe Sequence
tgaatcctgcctgaatactcgtaac

SEQ ID NO: 285052 - DNA, 25 bp, Probe Sequence
tgccatccccgataacctggatgcc

SEQ ID NO: 285053 - DNA, 25 bp, Probe Sequence
tgcctgccactgaggaaacaggtca

SEQ ID NO: 285054 - DNA, 25 bp, Probe Sequence
tgcattaccggtcgatgcaacgagt

SEQ ID NO: 285055 - DNA, 25 bp, Probe Sequence
tgcagtaccccatagactggtgtta

SEQ ID NO: 285056 - DNA, 25 bp, Probe Sequence
tgcaataccaaatatacaggtttag

SEQ ID NO: 285057 - DNA, 25 bp, Probe Sequence
tgaaaactcagactttcggtcttgg

SEQ ID NO: 285058 - DNA, 25 bp, Probe Sequence
tgaaggaccagccctaggagtctgc

SEQ ID NO: 285059 - DNA, 25 bp, Probe Sequence
tgcaaagacaagctccagggaatcg

SEQ ID NO: 285060 - DNA, 25 bp, Probe Sequence
tgaaggggagtgtccagtggaagga

SEQ ID NO: 285061 - DNA, 25 bp, Probe Sequence
tgaatggggtggggctgtgggggca

SEQ ID NO: 285062 - DNA, 25 bp, Probe Sequence
tgaagatggttggccctttgatggg

SEQ ID NO: 285063 - DNA, 25 bp, Probe Sequence
tgaactggatcgcctccaagattgg

SEQ ID NO: 285064 - DNA, 25 bp, Probe Sequence
tgaactgatgtcagcacccgagtgg

SEQ ID NO: 285065 - DNA, 25 bp, Probe Sequence
tgaacaatgacatcaccctgctgaa

SEQ ID NO: 285066 - DNA, 25 bp, Probe Sequence
tgaatcagctactccgctatctgag

SEQ ID NO: 285067 - DNA, 25 bp, Probe Sequence
tgaagagtcagcccctgataccatc

SEQ ID NO: 285068 - DNA, 25 bp, Probe Sequence
tgaacatgagcgtctctttgacctc

SEQ ID NO: 285069 - DNA, 25 bp, Probe Sequence
tgaacatgagcgtctctttgacctc

SEQ ID NO: 285070 - DNA, 25 bp, Probe Sequence
tgaacatgagcgtctctttgacctc

SEQ ID NO: 285071 - DNA, 25 bp, Probe Sequence
tgaaaagccaacatgctgtcgctgc

SEQ ID NO: 285072 - DNA, 25 bp, Probe Sequence
tgaagccagagctagttgcgtccca

SEQ ID NO: 285073 - DNA, 25 bp, Probe Sequence
tgaagccaggacatgcagctgcatt

SEQ ID NO: 285074 - DNA, 25 bp, Probe Sequence
tgaagccaggacatgcagctgcatt

SEQ ID NO: 285075 - DNA, 25 bp, Probe Sequence
tgaaccagaacaacagcatctaata

SEQ ID NO: 285076 - DNA, 25 bp, Probe Sequence
tgaactggcaggaaatgcatcaaaa

SEQ ID NO: 285077 - DNA, 25 bp, Probe Sequence
tgaactatcagggcaagctcatagc

SEQ ID NO: 285078 - DNA, 25 bp, Probe Sequence
tgaatctatagaccaacttgcaaag

SEQ ID NO: 285079 - DNA, 25 bp, Probe Sequence
tgaactcaagtccagcattctcaac

SEQ ID NO: 285080 - DNA, 25 bp, Probe Sequence
tgaacacacattgctattcccatcc

SEQ ID NO: 285081 - DNA, 25 bp, Probe Sequence
tgaattgccttgggatttccttctc

SEQ ID NO: 285082 - DNA, 25 bp, Probe Sequence
tgaattgccttgggatttccttctc

SEQ ID NO: 285083 - DNA, 25 bp, Probe Sequence
tgaattgccttgggatttccttctc

SEQ ID NO: 285084 - DNA, 25 bp, Probe Sequence
tgaaggctcttcctgatctaacgtt

SEQ ID NO: 285085 - DNA, 25 bp, Probe Sequence
tgaagcgctgccagtatgtgaccga

SEQ ID NO: 285086 - DNA, 25 bp, Probe Sequence
tgaagcgctgccagtatgtgaccga

SEQ ID NO: 285087 - DNA, 25 bp, Probe Sequence
tgaagcgctgccagtatgtgaccga

SEQ ID NO: 285088 - DNA, 25 bp, Probe Sequence
tgaagttacttggatggacccattg

SEQ ID NO: 285089 - DNA, 25 bp, Probe Sequence
tgaagttcactcttgattgcaccca

SEQ ID NO: 285090 - DNA, 25 bp, Probe Sequence
tgaagttcactcttgattgcaccca

SEQ ID NO: 285091 - DNA, 25 bp, Probe Sequence
tgaagcagcacaagcggttgaccca

SEQ ID NO: 285092 - DNA, 25 bp, Probe Sequence
tgaagacacacgggttcacactgga

SEQ ID NO: 285093 - DNA, 25 bp, Probe Sequence
tgcaataaaaggttatatcagctgg

SEQ ID NO: 285094 - DNA, 25 bp, Probe Sequence
tgaataccagggttcttccaggcca

SEQ ID NO: 285095 - DNA, 25 bp, Probe Sequence
tgaatacttcgagtactttgcccca

SEQ ID NO: 285096 - DNA, 25 bp, Probe Sequence
tgaatacttcgagtactttgcccca

SEQ ID NO: 285097 - DNA, 25 bp, Probe Sequence
tgcataaccttagtattttcccaac

SEQ ID NO: 285098 - DNA, 25 bp, Probe Sequence
tgcattaaataactaaattcccatt

SEQ ID NO: 285099 - DNA, 25 bp, Probe Sequence
tgaataacacacgtggacatttcca

SEQ ID NO: 285100 - DNA, 25 bp, Probe Sequence
tgaacacccagcgggagagggccac

SEQ ID NO: 285101 - DNA, 25 bp, Probe Sequence
tgaaggccctgatgggtggaccacc

SEQ ID NO: 285102 - DNA, 25 bp, Probe Sequence
tgaaggccctgatgggtggaccacc

SEQ ID NO: 285103 - DNA, 25 bp, Probe Sequence
tgaagagtccgcagggggcacctgc

SEQ ID NO: 285104 - DNA, 25 bp, Probe Sequence
tgaagaatcttaggcgggtgcaccc

SEQ ID NO: 285105 - DNA, 25 bp, Probe Sequence
tgaagaactcctggggggcccaatg

SEQ ID NO: 285106 - DNA, 25 bp, Probe Sequence
tgaatcatgtctctagggcaaccca

SEQ ID NO: 285107 - DNA, 25 bp, Probe Sequence
tgaacattcctttggtatcagaccc

SEQ ID NO: 285108 - DNA, 25 bp, Probe Sequence
tgaagtgtccttgtagatagactgc

SEQ ID NO: 285109 - DNA, 25 bp, Probe Sequence
tgaagtagatcttttaaaactcttt

SEQ ID NO: 285110 - DNA, 25 bp, Probe Sequence
taattaatttatgtagagtcctttt

SEQ ID NO: 285111 - DNA, 25 bp, Probe Sequence
taattggaacttggtaggaactgcc

SEQ ID NO: 285112 - DNA, 25 bp, Probe Sequence
taaattaacttgtagaaaatctgct

SEQ ID NO: 285113 - DNA, 25 bp, Probe Sequence
tcgaaacccctgtgatgaaacttac

SEQ ID NO: 285114 - DNA, 25 bp, Probe Sequence
tcaggaatccccatttgaatttgta

SEQ ID NO: 285115 - DNA, 25 bp, Probe Sequence
tcctgaacttcctttggtagttgaa

SEQ ID NO: 285116 - DNA, 25 bp, Probe Sequence
tgcactaaccttttttggtggctaa

SEQ ID NO: 285117 - DNA, 25 bp, Probe Sequence
tgcactaacctttggtatcctttta

SEQ ID NO: 285118 - DNA, 25 bp, Probe Sequence
tgcccatcaccgctggaattttgat

SEQ ID NO: 285119 - DNA, 25 bp, Probe Sequence
tgctactacgtttgcccatttggat

SEQ ID NO: 285120 - DNA, 25 bp, Probe Sequence
tgcccttcctttactctattagcat

SEQ ID NO: 285121 - DNA, 25 bp, Probe Sequence
tgaactctcgctttctttttaatcc

SEQ ID NO: 285122 - DNA, 25 bp, Probe Sequence
tgaaccttctgttcttgtttcttcc

SEQ ID NO: 285123 - DNA, 25 bp, Probe Sequence
tgaattcttctttcattctgatctt

SEQ ID NO: 285124 - DNA, 25 bp, Probe Sequence
tgaagctgcctccaaaatctgcatc

SEQ ID NO: 285125 - DNA, 25 bp, Probe Sequence
tgaatgatcccgtagaatcttcctt

SEQ ID NO: 285126 - DNA, 25 bp, Probe Sequence
tgaacgcccagttgagtgttcctct

SEQ ID NO: 285127 - DNA, 25 bp, Probe Sequence
tgaatctgcgtggttttgatacttt

SEQ ID NO: 285128 - DNA, 25 bp, Probe Sequence
tgaattgccttgcttttatcactta

SEQ ID NO: 285129 - DNA, 25 bp, Probe Sequence
tgaactgccttacatgttgtcacct

SEQ ID NO: 285130 - DNA, 25 bp, Probe Sequence
tgcaactttacagtagatttcacct

SEQ ID NO: 285131 - DNA, 25 bp, Probe Sequence
tgaagtttagcaatatgacattctt

SEQ ID NO: 285132 - DNA, 25 bp, Probe Sequence
tgaagtctgaatctcataccctttc

SEQ ID NO: 285133 - DNA, 25 bp, Probe Sequence
tgaagccaaatctgaacccatgtcc

SEQ ID NO: 285134 - DNA, 25 bp, Probe Sequence
tgaaccacattgtgcaaaccttctc

SEQ ID NO: 285135 - DNA, 25 bp, Probe Sequence
tgaaccactggacgctggggtatcc

SEQ ID NO: 285136 - DNA, 25 bp, Probe Sequence
tgaaccctggcggcgaaggttgcag

SEQ ID NO: 285137 - DNA, 25 bp, Probe Sequence
tgaacccgggagcggagcttgcagt

SEQ ID NO: 285138 - DNA, 25 bp, Probe Sequence
tgaacccgggaggcggagcttgcag

SEQ ID NO: 285139 - DNA, 25 bp, Probe Sequence
tgaacccgggaggcggagcttgcag

SEQ ID NO: 285140 - DNA, 25 bp, Probe Sequence
tgaacccgggaggcggagcttgcag

SEQ ID NO: 285141 - DNA, 25 bp, Probe Sequence
tgaacccgggaggcggagcttgcag

SEQ ID NO: 285142 - DNA, 25 bp, Probe Sequence
tgaacccgggaggcggagcttgcag

SEQ ID NO: 285143 - DNA, 25 bp, Probe Sequence
tgaacccgggaggcggagcttgcag

SEQ ID NO: 285144 - DNA, 25 bp, Probe Sequence
tgaacccgggaggcggagcttgcag

SEQ ID NO: 285145 - DNA, 25 bp, Probe Sequence
tgaacccgggaggcggagcttgcag

SEQ ID NO: 285146 - DNA, 25 bp, Probe Sequence
tgaagcccagtgcagccgggtattg

SEQ ID NO: 285147 - DNA, 25 bp, Probe Sequence
tgaagcccaatgccagtcgggcagc

SEQ ID NO: 285148 - DNA, 25 bp, Probe Sequence
tgaagcagcccgcatattaggcgca

SEQ ID NO: 285149 - DNA, 25 bp, Probe Sequence
tgaagcagggctcgaaccaggccat

SEQ ID NO: 285150 - DNA, 25 bp, Probe Sequence
tgaacggtgctggcagttcggctag

SEQ ID NO: 285151 - DNA, 25 bp, Probe Sequence
tgaagggatctggcagggcaccaca

SEQ ID NO: 285152 - DNA, 25 bp, Probe Sequence
tgaaggagaccgcggagcatccaag

SEQ ID NO: 285153 - DNA, 25 bp, Probe Sequence
tgaagaggaactcagaggctcctcc

SEQ ID NO: 285154 - DNA, 25 bp, Probe Sequence
tgaaggagcccaacaaaggcccctc

SEQ ID NO: 285155 - DNA, 25 bp, Probe Sequence
tgcaaaacctgcacaatcagtccct

SEQ ID NO: 285156 - DNA, 25 bp, Probe Sequence
tgcaataaatctgacccagtgcccc

SEQ ID NO: 285157 - DNA, 25 bp, Probe Sequence
tgcaataatacaataccccttccaa

SEQ ID NO: 285158 - DNA, 25 bp, Probe Sequence
tgctataaaatctctttccattgaa

SEQ ID NO: 285159 - DNA, 25 bp, Probe Sequence
tgcagaaggacctcatcgtccggga

SEQ ID NO: 285160 - DNA, 25 bp, Probe Sequence
tcgaagggccggtagttcgagaagc

SEQ ID NO: 285161 - DNA, 25 bp, Probe Sequence
tgcagagggtgggaaaggttgaacc

SEQ ID NO: 285162 - DNA, 25 bp, Probe Sequence
tgaatgcggtgtagaaatgtttact

SEQ ID NO: 285163 - DNA, 25 bp, Probe Sequence
tgaagctggggggaggtgcctaatt

SEQ ID NO: 285164 - DNA, 25 bp, Probe Sequence
tgaagtactggggcgtagcctcctt

SEQ ID NO: 285165 - DNA, 25 bp, Probe Sequence
tgaagtcaccgggatgaacctatcc

SEQ ID NO: 285166 - DNA, 25 bp, Probe Sequence
taagtccctgagggtcactggtcct

SEQ ID NO: 285167 - DNA, 25 bp, Probe Sequence
tcagttcccggggtcaattggcttg

SEQ ID NO: 285168 - DNA, 25 bp, Probe Sequence
tcgaaaccagggggctattgtctct

SEQ ID NO: 285169 - DNA, 25 bp, Probe Sequence
tgcgaaaccgaaactgcctttcatt

SEQ ID NO: 285170 - DNA, 25 bp, Probe Sequence
tgcacaaaactatgttcgatttatt

SEQ ID NO: 285171 - DNA, 25 bp, Probe Sequence
tgcaagtcccttgtcttgataaatt

SEQ ID NO: 285172 - DNA, 25 bp, Probe Sequence
tgcacgtccgttatttcagtgactt

SEQ ID NO: 285173 - DNA, 25 bp, Probe Sequence
tgcacctcctcgtgatttaggcaat

SEQ ID NO: 285174 - DNA, 25 bp, Probe Sequence
tgcactgcaatctgggttacggagt

SEQ ID NO: 285175 - DNA, 25 bp, Probe Sequence
tgcacgcaagagtgcgtctcggaca

SEQ ID NO: 285176 - DNA, 25 bp, Probe Sequence
tgcacgtcaggacgctgttctctat

SEQ ID NO: 285177 - DNA, 25 bp, Probe Sequence
tgcagggaagcatctgtcttgtcat

SEQ ID NO: 285178 - DNA, 25 bp, Probe Sequence
tgcacaagtacgttttgtgacaggc

SEQ ID NO: 285179 - DNA, 25 bp, Probe Sequence
tgcaaggaagctatttaacatggtg

SEQ ID NO: 285180 - DNA, 25 bp, Probe Sequence
tgcagagtaagtactttcacttgaa

SEQ ID NO: 285181 - DNA, 25 bp, Probe Sequence
tgaagtaggctgccatattcagagg

SEQ ID NO: 285182 - DNA, 25 bp, Probe Sequence
tgaagaaggctggcactgtacgagt

SEQ ID NO: 285183 - DNA, 25 bp, Probe Sequence
tgaagaatgcactgccttcactttt

SEQ ID NO: 285184 - DNA, 25 bp, Probe Sequence
tgaagcgctacttagcatctccttt

SEQ ID NO: 285185 - DNA, 25 bp, Probe Sequence
tgcaaggtattttgagcccttcaga

SEQ ID NO: 285186 - DNA, 25 bp, Probe Sequence
tgaaggtgagtgaggccctcggcag

SEQ ID NO: 285187 - DNA, 25 bp, Probe Sequence
tgaagcgcgaggagcgggcgcggaa

SEQ ID NO: 285188 - DNA, 25 bp, Probe Sequence
tgaacccagtgcaggtgctgcagct

SEQ ID NO: 285189 - DNA, 25 bp, Probe Sequence
tgaactttggcgctgctggcagcat

SEQ ID NO: 285190 - DNA, 25 bp, Probe Sequence
tgaactttgacctctgcagcaataa

SEQ ID NO: 285191 - DNA, 25 bp, Probe Sequence
tgaagttctacctgcggatcatact

SEQ ID NO: 285192 - DNA, 25 bp, Probe Sequence
tgcaggggtccctgctagttagcgc

SEQ ID NO: 285193 - DNA, 25 bp, Probe Sequence
tgaagggattcctcactgtgggcag

SEQ ID NO: 285194 - DNA, 25 bp, Probe Sequence
tgaagggattcctcactgtgggcag

SEQ ID NO: 285195 - DNA, 25 bp, Probe Sequence
tgaaggaactattgccctctgggga

SEQ ID NO: 285196 - DNA, 25 bp, Probe Sequence
tgaagaactatgatccccagaagga

SEQ ID NO: 285197 - DNA, 25 bp, Probe Sequence
tgaagaacaatgacctccgggagaa

SEQ ID NO: 285198 - DNA, 25 bp, Probe Sequence
tgaattaaagtcctccatgttgaaa

SEQ ID NO: 285199 - DNA, 25 bp, Probe Sequence
tgaattaaagtactgactgctcgcc

SEQ ID NO: 285200 - DNA, 25 bp, Probe Sequence
tgaagtaacttcttactgctctcac

SEQ ID NO: 285201 - DNA, 25 bp, Probe Sequence
tgaatgtaacctgctagctctccga

SEQ ID NO: 285202 - DNA, 25 bp, Probe Sequence
tgaataaacgctgctgcttcatcct

SEQ ID NO: 285203 - DNA, 25 bp, Probe Sequence
tgaataaatcctctctatcacatcc

SEQ ID NO: 285204 - DNA, 25 bp, Probe Sequence
tgaatcaaacccactgatgccacag

SEQ ID NO: 285205 - DNA, 25 bp, Probe Sequence
tgaatctaattgctactgacccaga

SEQ ID NO: 285206 - DNA, 25 bp, Probe Sequence
tgaatcacaattctactatcttctg

SEQ ID NO: 285207 - DNA, 25 bp, Probe Sequence
tgaagtcatttattaccatatacta

SEQ ID NO: 285208 - DNA, 25 bp, Probe Sequence
tgaagtccctaattctgatatcgta

SEQ ID NO: 285209 - DNA, 25 bp, Probe Sequence
tgaacccccatttctgatttgtcag

SEQ ID NO: 285210 - DNA, 25 bp, Probe Sequence
tgaagccgccctaaggattttcctt

SEQ ID NO: 285211 - DNA, 25 bp, Probe Sequence
tgaacctcacctaacctgtgttttt

SEQ ID NO: 285212 - DNA, 25 bp, Probe Sequence
tgaaccccaccatatggattttttt

SEQ ID NO: 285213 - DNA, 25 bp, Probe Sequence
tgaaccccaccacagaatatctcat

SEQ ID NO: 285214 - DNA, 25 bp, Probe Sequence
tgaaccagcacacagggctatttct

SEQ ID NO: 285215 - DNA, 25 bp, Probe Sequence
tgaaccagacacctgtgtgcctgaa

SEQ ID NO: 285216 - DNA, 25 bp, Probe Sequence
tgcaacaagtcaggtggtggtcatg

SEQ ID NO: 285217 - DNA, 25 bp, Probe Sequence
tgaacctggcaggtggaggttgcag

SEQ ID NO: 285218 - DNA, 25 bp, Probe Sequence
tgcaacgcagccggggcaggtacag

SEQ ID NO: 285219 - DNA, 25 bp, Probe Sequence
tgcagcccaacggggctgccttcac

SEQ ID NO: 285220 - DNA, 25 bp, Probe Sequence
tgcaacccactgatgggatttcatc

SEQ ID NO: 285221 - DNA, 25 bp, Probe Sequence
tgctacctgcagaggggtccatacg

SEQ ID NO: 285222 - DNA, 25 bp, Probe Sequence
tgaagcagcttgaggccagacctac

SEQ ID NO: 285223 - DNA, 25 bp, Probe Sequence
tgaagagtttggcctaggcctaaag

SEQ ID NO: 285224 - DNA, 25 bp, Probe Sequence
tgaagaactgtggcctaattggaaa

SEQ ID NO: 285225 - DNA, 25 bp, Probe Sequence
tgcaagaactgatcccctttgtgaa

SEQ ID NO: 285226 - DNA, 25 bp, Probe Sequence
tgaagaccaacatcgccttcctgca

SEQ ID NO: 285227 - DNA, 25 bp, Probe Sequence
tgctcagggaaatggccttcccgcc

SEQ ID NO: 285228 - DNA, 25 bp, Probe Sequence
tccgggaaaggatggatcctcggga

SEQ ID NO: 285229 - DNA, 25 bp, Probe Sequence
tccggtgaaagaaccagtccctggg

SEQ ID NO: 285230 - DNA, 25 bp, Probe Sequence
tgccggagaaagacgccgatcctca

SEQ ID NO: 285231 - DNA, 25 bp, Probe Sequence
tgccctggaagaaggcctgctctaa

SEQ ID NO: 285232 - DNA, 25 bp, Probe Sequence
tgctgacttaggtggcgtgtttcag

SEQ ID NO: 285233 - DNA, 25 bp, Probe Sequence
tgcatgcaaaaccaggaagtgttat

SEQ ID NO: 285234 - DNA, 25 bp, Probe Sequence
tgcactactggccatggaacattta

SEQ ID NO: 285235 - DNA, 25 bp, Probe Sequence
tgcaccctgggaggaaggaccaccc

SEQ ID NO: 285236 - DNA, 25 bp, Probe Sequence
tgcccagcgggggaaagctaggccc

SEQ ID NO: 285237 - DNA, 25 bp, Probe Sequence
tgaatccgggtggcagaggctacag

SEQ ID NO: 285238 - DNA, 25 bp, Probe Sequence
tgaacccgggaggcagagcttgcag

SEQ ID NO: 285239 - DNA, 25 bp, Probe Sequence
tgaacccaggaggcggagcttgcag

SEQ ID NO: 285240 - DNA, 25 bp, Probe Sequence
tgaacccaggaggcggagcttgcag

SEQ ID NO: 285241 - DNA, 25 bp, Probe Sequence
tgaagctgaatggagccggccttga

SEQ ID NO: 285242 - DNA, 25 bp, Probe Sequence
tgaagtgcaggtggttggccttgcg

SEQ ID NO: 285243 - DNA, 25 bp, Probe Sequence
tgcaagacggtggtggctctttgtg

SEQ ID NO: 285244 - DNA, 25 bp, Probe Sequence
tgaagacggctgcctggcattggta

SEQ ID NO: 285245 - DNA, 25 bp, Probe Sequence
tgaagaggtgcggtggcttcctgat

SEQ ID NO: 285246 - DNA, 25 bp, Probe Sequence
tgcacgacgtgggaggctacccaga

SEQ ID NO: 285247 - DNA, 25 bp, Probe Sequence
tgccagatctggaggactactcccc

SEQ ID NO: 285248 - DNA, 25 bp, Probe Sequence
tgcagatgatctgagcgagattacc

SEQ ID NO: 285249 - DNA, 25 bp, Probe Sequence
tgcagctgtgccacaaattctcctt

SEQ ID NO: 285250 - DNA, 25 bp, Probe Sequence
tgaatggtctgtcattgtctgcctt

SEQ ID NO: 285251 - DNA, 25 bp, Probe Sequence
tgaagagtcgaacgtgctctgcctc

SEQ ID NO: 285252 - DNA, 25 bp, Probe Sequence
tgaaggcacccaggtgcttgagttg

SEQ ID NO: 285253 - DNA, 25 bp, Probe Sequence
tgaagatgaccctactgctgatgat

SEQ ID NO: 285254 - DNA, 25 bp, Probe Sequence
tgcactcgactcgatcagctgttca

SEQ ID NO: 285255 - DNA, 25 bp, Probe Sequence
tgaatccagatggcatggttgctct

SEQ ID NO: 285256 - DNA, 25 bp, Probe Sequence
tgaaccgcatggtgcttgcagtttt

SEQ ID NO: 285257 - DNA, 25 bp, Probe Sequence
tgaaggctgaggcacttctttttca

SEQ ID NO: 285258 - DNA, 25 bp, Probe Sequence
tgaaggagaggaggtgatctgttct

SEQ ID NO: 285259 - DNA, 25 bp, Probe Sequence
tgaagtgaggagatggttatttaaa

SEQ ID NO: 285260 - DNA, 25 bp, Probe Sequence
tgaatgtgggtgatctgcttttatc

SEQ ID NO: 285261 - DNA, 25 bp, Probe Sequence
tgcacagtgtttccctgtttatcca

SEQ ID NO: 285262 - DNA, 25 bp, Probe Sequence
tgaagtacatagtctggtaatacca

SEQ ID NO: 285263 - DNA, 25 bp, Probe Sequence
tgcaggtcctagcctggggtaggaa

SEQ ID NO: 285264 - DNA, 25 bp, Probe Sequence
tgaagctcctcgcaggagagagaga

SEQ ID NO: 285265 - DNA, 25 bp, Probe Sequence
tgaagcctgcgcccattgagcagga

SEQ ID NO: 285266 - DNA, 25 bp, Probe Sequence
tgaagcgagaggccactgcagacga

SEQ ID NO: 285267 - DNA, 25 bp, Probe Sequence
tgcatgcgagtgctgtactaccgag

SEQ ID NO: 285268 - DNA, 25 bp, Probe Sequence
tgaagcatgttgcatactaccctgg

SEQ ID NO: 285269 - DNA, 25 bp, Probe Sequence
tgaagaggttatggctgtccttggg

SEQ ID NO: 285270 - DNA, 25 bp, Probe Sequence
tgcaggaagttcagagttctaggag

SEQ ID NO: 285271 - DNA, 25 bp, Probe Sequence
tgcagaaggtacagagcctccgaag

SEQ ID NO: 285272 - DNA, 25 bp, Probe Sequence
tgcaaatcgtggagatgcccctggc

SEQ ID NO: 285273 - DNA, 25 bp, Probe Sequence
tgcaacgcggaatatcacaccggcc

SEQ ID NO: 285274 - DNA, 25 bp, Probe Sequence
tgaagggggacctgcagcactgcag

SEQ ID NO: 285275 - DNA, 25 bp, Probe Sequence
tgaagaggcagggcccctgacggag

SEQ ID NO: 285276 - DNA, 25 bp, Probe Sequence
tgaagaggcagggcccctgacggag

SEQ ID NO: 285277 - DNA, 25 bp, Probe Sequence
tgaaggcagcacatgccccaaatgg

SEQ ID NO: 285278 - DNA, 25 bp, Probe Sequence
tgaaggagctgaatgctcgccccat

SEQ ID NO: 285279 - DNA, 25 bp, Probe Sequence
tgaaggaggaatttgtgtcagtttt

SEQ ID NO: 285280 - DNA, 25 bp, Probe Sequence
tgaaggaccttatttggcatataaa

SEQ ID NO: 285281 - DNA, 25 bp, Probe Sequence
tgcaaagcactgacttctaagtaaa

SEQ ID NO: 285282 - DNA, 25 bp, Probe Sequence
tgcaaaacgttttattctgacaaat

SEQ ID NO: 285283 - DNA, 25 bp, Probe Sequence
tgaatgacacccatcaatctcttca

SEQ ID NO: 285284 - DNA, 25 bp, Probe Sequence
tgaatgccaaaccgattccttcact

SEQ ID NO: 285285 - DNA, 25 bp, Probe Sequence
tgaaccataatgctgcttcttgtgc

SEQ ID NO: 285286 - DNA, 25 bp, Probe Sequence
tgaatcacgtagctgctgttctcgg

SEQ ID NO: 285287 - DNA, 25 bp, Probe Sequence
tgaatcctaagggctggtctctgct

SEQ ID NO: 285288 - DNA, 25 bp, Probe Sequence
tgaatttgaaagactggctgctcga

SEQ ID NO: 285289 - DNA, 25 bp, Probe Sequence
tgcaattgtgaccagcactacggct

SEQ ID NO: 285290 - DNA, 25 bp, Probe Sequence
tgcagatgtatcccagcaaaagtgc

SEQ ID NO: 285291 - DNA, 25 bp, Probe Sequence
tgcaattgaccatcaactgggcccc

SEQ ID NO: 285292 - DNA, 25 bp, Probe Sequence
tgaaggagccccgagatgtggtccc

SEQ ID NO: 285293 - DNA, 25 bp, Probe Sequence
tgaagcgcatgcgcagcgggtggtc

SEQ ID NO: 285294 - DNA, 25 bp, Probe Sequence
tgcactggcagggatcaggtgttgg

SEQ ID NO: 285295 - DNA, 25 bp, Probe Sequence
tgaatggctgggaaattgctctgga

SEQ ID NO: 285296 - DNA, 25 bp, Probe Sequence
tgaatggctttgagtctggcgtgag

SEQ ID NO: 285297 - DNA, 25 bp, Probe Sequence
tgaaggatgtgtactttccttcaaa

SEQ ID NO: 285298 - DNA, 25 bp, Probe Sequence
tgaatgtgtgctgacttttattaaa

SEQ ID NO: 285299 - DNA, 25 bp, Probe Sequence
tgcaattgtgttacttttattattt

SEQ ID NO: 285300 - DNA, 25 bp, Probe Sequence
tgcttgggttcggtttttgaggatc

SEQ ID NO: 285301 - DNA, 25 bp, Probe Sequence
tgctgtaagtttctttttctggact

SEQ ID NO: 285302 - DNA, 25 bp, Probe Sequence
tgcatgggggatgtttcttcctggg

SEQ ID NO: 285303 - DNA, 25 bp, Probe Sequence
tgcaggtcgtacataacttccggta

SEQ ID NO: 285304 - DNA, 25 bp, Probe Sequence
ttcctagtaattaacctccggtgct

SEQ ID NO: 285305 - DNA, 25 bp, Probe Sequence
tgcctttgtttgcaaggcctcggtc

SEQ ID NO: 285306 - DNA, 25 bp, Probe Sequence
tgccttttccggtgaaccatggcgc

SEQ ID NO: 285307 - DNA, 25 bp, Probe Sequence
ttttttcagtcccagaacctacaga

SEQ ID NO: 285308 - DNA, 25 bp, Probe Sequence
tttttcagtcccagaacctacagat

SEQ ID NO: 285309 - DNA, 25 bp, Probe Sequence
tactttaggcccattccacaaagcc

SEQ ID NO: 285310 - DNA, 25 bp, Probe Sequence
tgaatttcaggctacctttgacaaa

SEQ ID NO: 285311 - DNA, 25 bp, Probe Sequence
tcaatttcgtgccagccaccgaaaa

SEQ ID NO: 285312 - DNA, 25 bp, Probe Sequence
tgaatttctcctctcaaggaaaacc

SEQ ID NO: 285313 - DNA, 25 bp, Probe Sequence
tgctactttgtgagtaaagaaaaca

SEQ ID NO: 285314 - DNA, 25 bp, Probe Sequence
tgcacgtttgtgtgtccttgtaaat

SEQ ID NO: 285315 - DNA, 25 bp, Probe Sequence
tgcactttgtttttccaaggaaatc

SEQ ID NO: 285316 - DNA, 25 bp, Probe Sequence
tgaagagtgggtttcacaagtgaaa

SEQ ID NO: 285317 - DNA, 25 bp, Probe Sequence
tgaagggccccttgcaaagtaatag

SEQ ID NO: 285318 - DNA, 25 bp, Probe Sequence
tgaagggcgccccagaaaggatcct

SEQ ID NO: 285319 - DNA, 25 bp, Probe Sequence
tgaagggcgcatatggaacggctct

SEQ ID NO: 285320 - DNA, 25 bp, Probe Sequence
tgaagaagcctcatcgctacaggcc

SEQ ID NO: 285321 - DNA, 25 bp, Probe Sequence
tgaagaagcgaggcccaacagctgg

SEQ ID NO: 285322 - DNA, 25 bp, Probe Sequence
tgcactgaacaagaccaaatcgctg

SEQ ID NO: 285323 - DNA, 25 bp, Probe Sequence
tgcactatgcactcagaaaaatcca

SEQ ID NO: 285324 - DNA, 25 bp, Probe Sequence
tgcacttgacctcggcagagaagta

SEQ ID NO: 285325 - DNA, 25 bp, Probe Sequence
tgcacctacgggccaggaaatgaga

SEQ ID NO: 285326 - DNA, 25 bp, Probe Sequence
tgcacccatctgcggatggtactcc

SEQ ID NO: 285327 - DNA, 25 bp, Probe Sequence
tgcaataattggcagatgcccactg

SEQ ID NO: 285328 - DNA, 25 bp, Probe Sequence
tgcaaataaggatgtgttctctgag

SEQ ID NO: 285329 - DNA, 25 bp, Probe Sequence
tgcaagctttcagtagttttctagt

SEQ ID NO: 285330 - DNA, 25 bp, Probe Sequence
tgcaattttggatgattattctttg

SEQ ID NO: 285331 - DNA, 25 bp, Probe Sequence
tgcaaatacgtatattctttttcca

SEQ ID NO: 285332 - DNA, 25 bp, Probe Sequence
tgcaaatacctgcatttcttacccc

SEQ ID NO: 285333 - DNA, 25 bp, Probe Sequence
tgcaaatagtatcatggcatcttat

SEQ ID NO: 285334 - DNA, 25 bp, Probe Sequence
tgaagaaccatgttgtgcatgtttt

SEQ ID NO: 285335 - DNA, 25 bp, Probe Sequence
tgaaggacctgttgctgcttctgtc

SEQ ID NO: 285336 - DNA, 25 bp, Probe Sequence
tgaagcggcgcagcagcgccagtgt

SEQ ID NO: 285337 - DNA, 25 bp, Probe Sequence
tgaaggggcaggtcagcgagatggc

SEQ ID NO: 285338 - DNA, 25 bp, Probe Sequence
tgcaaggggacacacggcatcatgt

SEQ ID NO: 285339 - DNA, 25 bp, Probe Sequence
tgaaggggcttcacggaatgttaca

SEQ ID NO: 285340 - DNA, 25 bp, Probe Sequence
tgaagggcgcgacccgcgaatatta

SEQ ID NO: 285341 - DNA, 25 bp, Probe Sequence
tgaagacgtctaccagctgcaggaa

SEQ ID NO: 285342 - DNA, 25 bp, Probe Sequence
tgaagcaggtctttcactcacaaca

SEQ ID NO: 285343 - DNA, 25 bp, Probe Sequence
tgaagagcaggtctcacatgcccga

SEQ ID NO: 285344 - DNA, 25 bp, Probe Sequence
tgaagatcagcgtgtgcgatgccgt

SEQ ID NO: 285345 - DNA, 25 bp, Probe Sequence
tgaatcaaccacctggtgctcgtgc

SEQ ID NO: 285346 - DNA, 25 bp, Probe Sequence
tgaagcaatgcatcgtggctcatcc

SEQ ID NO: 285347 - DNA, 25 bp, Probe Sequence
tgcaacagtgcatctcttatctcaa

SEQ ID NO: 285348 - DNA, 25 bp, Probe Sequence
tgcaatcattgatgtgcctgtcccc

SEQ ID NO: 285349 - DNA, 25 bp, Probe Sequence
tgaagctgctgatgggagctccacc

SEQ ID NO: 285350 - DNA, 25 bp, Probe Sequence
tgcaacggaagccaggccaactgcc

SEQ ID NO: 285351 - DNA, 25 bp, Probe Sequence
tgcaactggcaaacctgccgacgcc

SEQ ID NO: 285352 - DNA, 25 bp, Probe Sequence
tgaagcagaataaagctgtctgacc

SEQ ID NO: 285353 - DNA, 25 bp, Probe Sequence
tgcaagatgatttgtatcttagacg

SEQ ID NO: 285354 - DNA, 25 bp, Probe Sequence
tgaagatgctgttcactctggagcc

SEQ ID NO: 285355 - DNA, 25 bp, Probe Sequence
tgcaatgtggtaccctggaaacaaa

SEQ ID NO: 285356 - DNA, 25 bp, Probe Sequence
tgcacgtgggccctcgagaaataat

SEQ ID NO: 285357 - DNA, 25 bp, Probe Sequence
tgcaagggggacacatgaaaggcat

SEQ ID NO: 285358 - DNA, 25 bp, Probe Sequence
tgaagctgaccgtctttgaaagcga

SEQ ID NO: 285359 - DNA, 25 bp, Probe Sequence
tgaagctgagtttctgtccaatgag

SEQ ID NO: 285360 - DNA, 25 bp, Probe Sequence
tgaagctcattttatgtcatgtatg

SEQ ID NO: 285361 - DNA, 25 bp, Probe Sequence
tgcaactcatctttcattaaaggct

SEQ ID NO: 285362 - DNA, 25 bp, Probe Sequence
tgcaacttgctattcgtggagatga

SEQ ID NO: 285363 - DNA, 25 bp, Probe Sequence
tgcagacttctttcgggacgaggca

SEQ ID NO: 285364 - DNA, 25 bp, Probe Sequence
tgcagacttgttcaccaaccaggca

SEQ ID NO: 285365 - DNA, 25 bp, Probe Sequence
tgctgcccagtgtgaccagaaaggc

SEQ ID NO: 285366 - DNA, 25 bp, Probe Sequence
tgcaaccatgtgtgtcctataatgg

SEQ ID NO: 285367 - DNA, 25 bp, Probe Sequence
tgaagactgtttgccataaatctga

SEQ ID NO: 285368 - DNA, 25 bp, Probe Sequence
tgaagtttctcaggcacataaatcc

SEQ ID NO: 285369 - DNA, 25 bp, Probe Sequence
tgaagattctcctgtgctagatgtg

SEQ ID NO: 285370 - DNA, 25 bp, Probe Sequence
tgaagaactgtcagctcagcgttga

SEQ ID NO: 285371 - DNA, 25 bp, Probe Sequence
tgaatcaaattgtagctctgcttta

SEQ ID NO: 285372 - DNA, 25 bp, Probe Sequence
tgaataattgagatcttctgttcat

SEQ ID NO: 285373 - DNA, 25 bp, Probe Sequence
tgaagatgttcagccttgcttccag

SEQ ID NO: 285374 - DNA, 25 bp, Probe Sequence
tgaagctgtacttccgtgagctgcc

SEQ ID NO: 285375 - DNA, 25 bp, Probe Sequence
tgaaggtatgcttccctaagccgtt

SEQ ID NO: 285376 - DNA, 25 bp, Probe Sequence
tgaaggattgcatcctgctggggct

SEQ ID NO: 285377 - DNA, 25 bp, Probe Sequence
tgaagtccatcatcccagtggtcat

SEQ ID NO: 285378 - DNA, 25 bp, Probe Sequence
tgaagagcaatagccacttgagtga

SEQ ID NO: 285379 - DNA, 25 bp, Probe Sequence
tgaagatgtattgcccgatgcaatg

SEQ ID NO: 285380 - DNA, 25 bp, Probe Sequence
tgaagacttgtgataaatgagatga

SEQ ID NO: 285381 - DNA, 25 bp, Probe Sequence
tgcacaggtcgtgaggaaaagcacc

SEQ ID NO: 285382 - DNA, 25 bp, Probe Sequence
tgaagtgtgcgggacagcaagcccc

SEQ ID NO: 285383 - DNA, 25 bp, Probe Sequence
tgaagtccaggttagggctgccatc

SEQ ID NO: 285384 - DNA, 25 bp, Probe Sequence
tgaaggtgggcccagggctgactct

SEQ ID NO: 285385 - DNA, 25 bp, Probe Sequence
tgcaatgtaggggccggtggacctg

SEQ ID NO: 285386 - DNA, 25 bp, Probe Sequence
tgcagtctccgagacggggacgcca

SEQ ID NO: 285387 - DNA, 25 bp, Probe Sequence
tgcagtgttcgtgtcggaggggaag

SEQ ID NO: 285388 - DNA, 25 bp, Probe Sequence
tgcttttcacttccgaaggggagaa

SEQ ID NO: 285389 - DNA, 25 bp, Probe Sequence
tgcattgtcatcatcccgaacggaa

SEQ ID NO: 285390 - DNA, 25 bp, Probe Sequence
tgcaattattccccatgaacgagga

SEQ ID NO: 285391 - DNA, 25 bp, Probe Sequence
tgaattatagtacccacacatgcaa

SEQ ID NO: 285392 - DNA, 25 bp, Probe Sequence
tgaagacgagtacccagacatgccc

SEQ ID NO: 285393 - DNA, 25 bp, Probe Sequence
tgaagatggagcaggcctttgcccg

SEQ ID NO: 285394 - DNA, 25 bp, Probe Sequence
tgaagatgacgcgggcattgttcct

SEQ ID NO: 285395 - DNA, 25 bp, Probe Sequence
tgaagatgcgcgggcacttctgggt

SEQ ID NO: 285396 - DNA, 25 bp, Probe Sequence
tgaagatgcgcgggcacttctgggt

SEQ ID NO: 285397 - DNA, 25 bp, Probe Sequence
tgaagatgactgagcagcacaatca

SEQ ID NO: 285398 - DNA, 25 bp, Probe Sequence
tgaagatgactgagcagcacaatca

SEQ ID NO: 285399 - DNA, 25 bp, Probe Sequence
tgaagatcctgcatcagtatatgat

SEQ ID NO: 285400 - DNA, 25 bp, Probe Sequence
tgcagcagttcaggatgactaatga

SEQ ID NO: 285401 - DNA, 25 bp, Probe Sequence
tgcagcactgaatataccagcaaaa

SEQ ID NO: 285402 - DNA, 25 bp, Probe Sequence
tgcacagctaatgattcaatgcgag

SEQ ID NO: 285403 - DNA, 25 bp, Probe Sequence
tgcacacagagagttctgagaagat

SEQ ID NO: 285404 - DNA, 25 bp, Probe Sequence
tgcacaaaggtgtctcacagttggt

SEQ ID NO: 285405 - DNA, 25 bp, Probe Sequence
tgcagaaaaggcttcccttggctcc

SEQ ID NO: 285406 - DNA, 25 bp, Probe Sequence
tgaatcacatagattctcctccgtc

SEQ ID NO: 285407 - DNA, 25 bp, Probe Sequence
tgcaacaatgagactgttagctttt

SEQ ID NO: 285408 - DNA, 25 bp, Probe Sequence
tccaaaacctataatgcctcagtgc

SEQ ID NO: 285409 - DNA, 25 bp, Probe Sequence
tgcaaagttgtcatctatcccaggc

SEQ ID NO: 285410 - DNA, 25 bp, Probe Sequence
tgcaaagtatttaagcaccccccat

SEQ ID NO: 285411 - DNA, 25 bp, Probe Sequence
tgcaaagcctttaaccagtcttcaa

SEQ ID NO: 285412 - DNA, 25 bp, Probe Sequence
tgaataccttgatccagcgttccaa

SEQ ID NO: 285413 - DNA, 25 bp, Probe Sequence
tgaatggagctttaccaccgtacga

SEQ ID NO: 285414 - DNA, 25 bp, Probe Sequence
tgaaggacttaaagcatctgctgaa

SEQ ID NO: 285415 - DNA, 25 bp, Probe Sequence
tgaagtacaaccagcatatgctaca

SEQ ID NO: 285416 - DNA, 25 bp, Probe Sequence
tgaagaccaaccacattggccacac

SEQ ID NO: 285417 - DNA, 25 bp, Probe Sequence
tgaataaaactcactcaggcctcat

SEQ ID NO: 285418 - DNA, 25 bp, Probe Sequence
tgctattaaacctctctggcttata

SEQ ID NO: 285419 - DNA, 25 bp, Probe Sequence
tgcctgttaccgtcgagggttactg

SEQ ID NO: 285420 - DNA, 25 bp, Probe Sequence
tgcactggtacacgggcgagggcat

SEQ ID NO: 285421 - DNA, 25 bp, Probe Sequence
tgcaaagtgaggcttctgggtgcat

SEQ ID NO: 285422 - DNA, 25 bp, Probe Sequence
tgcaaaattatgcttatggctggca

SEQ ID NO: 285423 - DNA, 25 bp, Probe Sequence
tgcaactttgagtccttggcttgac

SEQ ID NO: 285424 - DNA, 25 bp, Probe Sequence
tgcacaactcaagctctgtggcctg

SEQ ID NO: 285425 - DNA, 25 bp, Probe Sequence
tgaagactccatcgtcttgcagtcg

SEQ ID NO: 285426 - DNA, 25 bp, Probe Sequence
tgaagactccatcgtcttgcagtcg

SEQ ID NO: 285427 - DNA, 25 bp, Probe Sequence
tgaagactctgctgctgtttgtggg

SEQ ID NO: 285428 - DNA, 25 bp, Probe Sequence
tgaagattgatcagcttgtgtatgg

SEQ ID NO: 285429 - DNA, 25 bp, Probe Sequence
tgaagtatgtcatgctgcctgtggc

SEQ ID NO: 285430 - DNA, 25 bp, Probe Sequence
tgaagtatgtcatgctgcctgtggc

SEQ ID NO: 285431 - DNA, 25 bp, Probe Sequence
tgaagtatgtcatgctgcctgtggc

SEQ ID NO: 285432 - DNA, 25 bp, Probe Sequence
tgaattgcattgaactgagcttggc

SEQ ID NO: 285433 - DNA, 25 bp, Probe Sequence
tgaagtgtctgaacaacctggcggc

SEQ ID NO: 285434 - DNA, 25 bp, Probe Sequence
tgaatgtgactaagaagcctgggga

SEQ ID NO: 285435 - DNA, 25 bp, Probe Sequence
tgaatgaacatatgagagctcatac

SEQ ID NO: 285436 - DNA, 25 bp, Probe Sequence
tgaagatggatactgatgggtgaca

SEQ ID NO: 285437 - DNA, 25 bp, Probe Sequence
tgaagtgctagctgaaggatgagca

SEQ ID NO: 285438 - DNA, 25 bp, Probe Sequence
tgaagtgctgacaagagacgcgaga

SEQ ID NO: 285439 - DNA, 25 bp, Probe Sequence
tgaatgcggccgagatcacagacaa

SEQ ID NO: 285440 - DNA, 25 bp, Probe Sequence
tgcacgctggcctatatatcaggga

SEQ ID NO: 285441 - DNA, 25 bp, Probe Sequence
tgcacggccgcaacaacggcaagaa

SEQ ID NO: 285442 - DNA, 25 bp, Probe Sequence
tgcaaggcctgcaccaggtgcggct

SEQ ID NO: 285443 - DNA, 25 bp, Probe Sequence
tgcactaactgtgcccgatgcgtgc

SEQ ID NO: 285444 - DNA, 25 bp, Probe Sequence
tgcaaaactggctgcctggaggccc

SEQ ID NO: 285445 - DNA, 25 bp, Probe Sequence
tgcactgaagggccctctggtggcc

SEQ ID NO: 285446 - DNA, 25 bp, Probe Sequence
tgctctcacatacaggaattagggc

SEQ ID NO: 285447 - DNA, 25 bp, Probe Sequence
tgctgtggccacatggctaaaccct

SEQ ID NO: 285448 - DNA, 25 bp, Probe Sequence
tgcttgcgctcaccatcaataaaag

SEQ ID NO: 285449 - DNA, 25 bp, Probe Sequence
tgcttgcgctcaccatcaataaaag

SEQ ID NO: 285450 - DNA, 25 bp, Probe Sequence
tgcttgcgctcaccatcaataaaag

SEQ ID NO: 285451 - DNA, 25 bp, Probe Sequence
tgctttctcccaacactcttgggga

SEQ ID NO: 285452 - DNA, 25 bp, Probe Sequence
tgcctccttacatcctttttggaac

SEQ ID NO: 285453 - DNA, 25 bp, Probe Sequence
tgcactggaaaatgcacattgcttt

SEQ ID NO: 285454 - DNA, 25 bp, Probe Sequence
tgcactggtggaagaagcgatcttt

SEQ ID NO: 285455 - DNA, 25 bp, Probe Sequence
tgcaatttgttaaagcagactgatt

SEQ ID NO: 285456 - DNA, 25 bp, Probe Sequence
tgcaaattgttaacaccagctatta

SEQ ID NO: 285457 - DNA, 25 bp, Probe Sequence
tgcacaattttcagccatagattta

SEQ ID NO: 285458 - DNA, 25 bp, Probe Sequence
tgcacttaattcactgccaatttag

SEQ ID NO: 285459 - DNA, 25 bp, Probe Sequence
tgaattagctctgccaccaatatgt

SEQ ID NO: 285460 - DNA, 25 bp, Probe Sequence
tgcaagaagcgcagccaccagaagt

SEQ ID NO: 285461 - DNA, 25 bp, Probe Sequence
tgcactgaaggcagaaccattaggc

SEQ ID NO: 285462 - DNA, 25 bp, Probe Sequence
tgcactgagccgggacacgattaac

SEQ ID NO: 285463 - DNA, 25 bp, Probe Sequence
tgcatatgagaagaacactgttgaa

SEQ ID NO: 285464 - DNA, 25 bp, Probe Sequence
tgcaatgaagccacaattgttattg

SEQ ID NO: 285465 - DNA, 25 bp, Probe Sequence
tgcaatcacaccatgccatgttttc

SEQ ID NO: 285466 - DNA, 25 bp, Probe Sequence
tgcacttcaccaaggatgtcaaggc

SEQ ID NO: 285467 - DNA, 25 bp, Probe Sequence
tgaatctcactcaggcatgtctggg

SEQ ID NO: 285468 - DNA, 25 bp, Probe Sequence
tgaatctcaggcgcagcgcctcgcg

SEQ ID NO: 285469 - DNA, 25 bp, Probe Sequence
tgaatctcgagtgagcggtgccacc

SEQ ID NO: 285470 - DNA, 25 bp, Probe Sequence
tcaggacggtaaggcgtacaccccg

SEQ ID NO: 285471 - DNA, 25 bp, Probe Sequence
tgcaggcctaggcaaggtacctctc

SEQ ID NO: 285472 - DNA, 25 bp, Probe Sequence
tgcagaccaaggggaacttcctcgc

SEQ ID NO: 285473 - DNA, 25 bp, Probe Sequence
tgcaaagccaggagcacctacacac

SEQ ID NO: 285474 - DNA, 25 bp, Probe Sequence
tgaatagccaggcctgacctcaagc

SEQ ID NO: 285475 - DNA, 25 bp, Probe Sequence
tgaatgaaagacgtgacctcctgct

SEQ ID NO: 285476 - DNA, 25 bp, Probe Sequence
tgaatgaaagacgtgacctcctgct

SEQ ID NO: 285477 - DNA, 25 bp, Probe Sequence
tgcacaataaacataacagcctctg

SEQ ID NO: 285478 - DNA, 25 bp, Probe Sequence
tgcaatgatgcacacttataccccc

SEQ ID NO: 285479 - DNA, 25 bp, Probe Sequence
tgaataaggccaattagcaacacag

SEQ ID NO: 285480 - DNA, 25 bp, Probe Sequence
tgaatgtaggccacaaaccacagta

SEQ ID NO: 285481 - DNA, 25 bp, Probe Sequence
tgcactggtgcggctgaaagaccca

SEQ ID NO: 285482 - DNA, 25 bp, Probe Sequence
tgcaccagtctggctttaaaccaac

SEQ ID NO: 285483 - DNA, 25 bp, Probe Sequence
tgcatccagcttcctatttacaatg

SEQ ID NO: 285484 - DNA, 25 bp, Probe Sequence
tgcaccactgtcgtttaccacagtt

SEQ ID NO: 285485 - DNA, 25 bp, Probe Sequence
tgcacccttggcaactactgatttt

SEQ ID NO: 285486 - DNA, 25 bp, Probe Sequence
tgcacagctcatttgcgaacggatt

SEQ ID NO: 285487 - DNA, 25 bp, Probe Sequence
tgcaactgcaaaggaattgggataa

SEQ ID NO: 285488 - DNA, 25 bp, Probe Sequence
tgcaattcagaatatgctcagggaa

SEQ ID NO: 285489 - DNA, 25 bp, Probe Sequence
tgcaactagcaactcatcttcggaa

SEQ ID NO: 285490 - DNA, 25 bp, Probe Sequence
tgccagatggaagtgctcgatcgct

SEQ ID NO: 285491 - DNA, 25 bp, Probe Sequence
tgcacatgtagttcctagagctgct

SEQ ID NO: 285492 - DNA, 25 bp, Probe Sequence
tgcactgtcgcgacgcagagaggct

SEQ ID NO: 285493 - DNA, 25 bp, Probe Sequence
tgcacgcgcgctacactgactggct

SEQ ID NO: 285494 - DNA, 25 bp, Probe Sequence
tgcaaggatgcttgagctgcccact

SEQ ID NO: 285495 - DNA, 25 bp, Probe Sequence
tgaaggctgatgccggcacagccgt

SEQ ID NO: 285496 - DNA, 25 bp, Probe Sequence
tgaagtcagagccagagagccgcct

SEQ ID NO: 285497 - DNA, 25 bp, Probe Sequence
tgcaagtccagggcacaggctgcct

SEQ ID NO: 285498 - DNA, 25 bp, Probe Sequence
tgaatacatcgcgatccaggcatgc

SEQ ID NO: 285499 - DNA, 25 bp, Probe Sequence
tgaatacagcgacccagtggatgga

SEQ ID NO: 285500 - DNA, 25 bp, Probe Sequence
tgaattcaggtcccagttgctgtca

SEQ ID NO: 285501 - DNA, 25 bp, Probe Sequence
tgaattcagtgaactcttttctcat

SEQ ID NO: 285502 - DNA, 25 bp, Probe Sequence
tgaattagtctaatcatgttttctg

SEQ ID NO: 285503 - DNA, 25 bp, Probe Sequence
tgaattcacccaagctttaaccgca

SEQ ID NO: 285504 - DNA, 25 bp, Probe Sequence
tgaatagcccacacaggtaccggct

SEQ ID NO: 285505 - DNA, 25 bp, Probe Sequence
tgcaggaggtggagaggtaccggct

SEQ ID NO: 285506 - DNA, 25 bp, Probe Sequence
tgcacgaggtggaggtggtcatcaa

SEQ ID NO: 285507 - DNA, 25 bp, Probe Sequence
tgcacgtgctgggtgtagtggaaca

SEQ ID NO: 285508 - DNA, 25 bp, Probe Sequence
tgcaggtgtgtggtcccaggacaaa

SEQ ID NO: 285509 - DNA, 25 bp, Probe Sequence
tcaggcggatggtcgttaacaaatg

SEQ ID NO: 285510 - DNA, 25 bp, Probe Sequence
tgcagttactaaggttacacaagat

SEQ ID NO: 285511 - DNA, 25 bp, Probe Sequence
tgcagctttaaaatggctaaccaca

SEQ ID NO: 285512 - DNA, 25 bp, Probe Sequence
tgcagttccagaatttctcacccac

SEQ ID NO: 285513 - DNA, 25 bp, Probe Sequence
tgcagtctacaaactttgccctggc

SEQ ID NO: 285514 - DNA, 25 bp, Probe Sequence
tgcagtctacacagcttcgggaaga

SEQ ID NO: 285515 - DNA, 25 bp, Probe Sequence
tgcaatactttccttctttgaagag

SEQ ID NO: 285516 - DNA, 25 bp, Probe Sequence
tgctcaaccacacattctctaagaa

SEQ ID NO: 285517 - DNA, 25 bp, Probe Sequence
tgcaaactaagctatttctatgaaa

SEQ ID NO: 285518 - DNA, 25 bp, Probe Sequence
tgcataagctgaactaaaataaaaa

SEQ ID NO: 285519 - DNA, 25 bp, Probe Sequence
tgcagaaataactaagacacaaata

SEQ ID NO: 285520 - DNA, 25 bp, Probe Sequence
tgcgagttacaccaaccaggacaga

SEQ ID NO: 285521 - DNA, 25 bp, Probe Sequence
tgctcgttacagaagaccagacatc

SEQ ID NO: 285522 - DNA, 25 bp, Probe Sequence
tgcatctaatcaaacctctcaacat

SEQ ID NO: 285523 - DNA, 25 bp, Probe Sequence
tgcagctgcgattaaccctaaaggc

SEQ ID NO: 285524 - DNA, 25 bp, Probe Sequence
tgcacttttacaagccgcaaaggca

SEQ ID NO: 285525 - DNA, 25 bp, Probe Sequence
tgcacttatttattgcggggagaca

SEQ ID NO: 285526 - DNA, 25 bp, Probe Sequence
tgcacatctttttagggggttcttt

SEQ ID NO: 285527 - DNA, 25 bp, Probe Sequence
tgcttttctttaacgttttcatggt

SEQ ID NO: 285528 - DNA, 25 bp, Probe Sequence
tgcattttcttatacgtttgatgga

SEQ ID NO: 285529 - DNA, 25 bp, Probe Sequence
tgcttgtcacttgaatcccgtgatt

SEQ ID NO: 285530 - DNA, 25 bp, Probe Sequence
tgcttgtctcaaagattaagccatg

SEQ ID NO: 285531 - DNA, 25 bp, Probe Sequence
tgcttttccagattttagtctcctt

SEQ ID NO: 285532 - DNA, 25 bp, Probe Sequence
tgcatagataccattttacttcctt

SEQ ID NO: 285533 - DNA, 25 bp, Probe Sequence
tgcaaatacatcaattctatcattt

SEQ ID NO: 285534 - DNA, 25 bp, Probe Sequence
tgcaaatatacttcctcttcttttt

SEQ ID NO: 285535 - DNA, 25 bp, Probe Sequence
tgcagaagcggttatctttcttttt

SEQ ID NO: 285536 - DNA, 25 bp, Probe Sequence
tgcaatacagtttcattaactcctt

SEQ ID NO: 285537 - DNA, 25 bp, Probe Sequence
tgcaatccagttaccagattcccac

SEQ ID NO: 285538 - DNA, 25 bp, Probe Sequence
tgcaatgccactgcatccatgcatt

SEQ ID NO: 285539 - DNA, 25 bp, Probe Sequence
tgcagcacaccaacatggcacatgt

SEQ ID NO: 285540 - DNA, 25 bp, Probe Sequence
tgcagcacaccaacatggcacatgt

SEQ ID NO: 285541 - DNA, 25 bp, Probe Sequence
tgcagcacaccaacatggcacatgt

SEQ ID NO: 285542 - DNA, 25 bp, Probe Sequence
tgcaaaccttcaagctgtgtaatat

SEQ ID NO: 285543 - DNA, 25 bp, Probe Sequence
tgcaaaccatactgggtacatcaaa

SEQ ID NO: 285544 - DNA, 25 bp, Probe Sequence
tgcacaattcatttagaggcttcaa

SEQ ID NO: 285545 - DNA, 25 bp, Probe Sequence
tgcacatgttgtcctagacgcttcg

SEQ ID NO: 285546 - DNA, 25 bp, Probe Sequence
tgaatgttgggtttctgctgtctgc

SEQ ID NO: 285547 - DNA, 25 bp, Probe Sequence
tgaatgttgggtttctgctgtctgc

SEQ ID NO: 285548 - DNA, 25 bp, Probe Sequence
tgaatttgaggtcttctatgatgaa

SEQ ID NO: 285549 - DNA, 25 bp, Probe Sequence
tgaatatcggggtcattgccaatga

SEQ ID NO: 285550 - DNA, 25 bp, Probe Sequence
tgcaataggggcctgctgtggctat

SEQ ID NO: 285551 - DNA, 25 bp, Probe Sequence
tgcaaattgcagccgtcgttgatgt

SEQ ID NO: 285552 - DNA, 25 bp, Probe Sequence
tgcaaagtcccttctgttgtgattc

SEQ ID NO: 285553 - DNA, 25 bp, Probe Sequence
tgcagagcgactggctgccttttga

SEQ ID NO: 285554 - DNA, 25 bp, Probe Sequence
tgaatgtgccacctgactttcagat

SEQ ID NO: 285555 - DNA, 25 bp, Probe Sequence
tgaatggcacagtgaccttcctgca

SEQ ID NO: 285556 - DNA, 25 bp, Probe Sequence
tgaatgtgacagtaacccctgccac

SEQ ID NO: 285557 - DNA, 25 bp, Probe Sequence
tgcacatgtaggtgcacccgcttat

SEQ ID NO: 285558 - DNA, 25 bp, Probe Sequence
tgcaatgtagtacaatcaccttata

SEQ ID NO: 285559 - DNA, 25 bp, Probe Sequence
tgcaatgggccaaacacacctcaaa

SEQ ID NO: 285560 - DNA, 25 bp, Probe Sequence
tgaatgaggctcaggccccatcaat

SEQ ID NO: 285561 - DNA, 25 bp, Probe Sequence
tgcaatgagaccatgatggccctct

SEQ ID NO: 285562 - DNA, 25 bp, Probe Sequence
tgcaatcaggtgaatatacagcctt

SEQ ID NO: 285563 - DNA, 25 bp, Probe Sequence
tgcaacacgtcaagcagactgccac

SEQ ID NO: 285564 - DNA, 25 bp, Probe Sequence
tgctcagcatccatgagacgctcca

SEQ ID NO: 285565 - DNA, 25 bp, Probe Sequence
tgcatcgccagcatttcgatcctcg

SEQ ID NO: 285566 - DNA, 25 bp, Probe Sequence
tgcagcccgcttatgcgtatgtgca

SEQ ID NO: 285567 - DNA, 25 bp, Probe Sequence
tgcagcgctgcgcagttctgtaaga

SEQ ID NO: 285568 - DNA, 25 bp, Probe Sequence
tgcaggtgagggaattcctggagag

SEQ ID NO: 285569 - DNA, 25 bp, Probe Sequence
tgcatggttgggagtcctgggtgga

SEQ ID NO: 285570 - DNA, 25 bp, Probe Sequence
tgcactttgtaaattccctggggaa

SEQ ID NO: 285571 - DNA, 25 bp, Probe Sequence
tgcagctttgggataccgctgggca

SEQ ID NO: 285572 - DNA, 25 bp, Probe Sequence
tgcaatgttctaggtgaccctgggc

SEQ ID NO: 285573 - DNA, 25 bp, Probe Sequence
tgcactggattaagtaacacgtact

SEQ ID NO: 285574 - DNA, 25 bp, Probe Sequence
tgaatgggaatttacaagctgtact

SEQ ID NO: 285575 - DNA, 25 bp, Probe Sequence
tgaaggcggttgtttagctctcact

SEQ ID NO: 285576 - DNA, 25 bp, Probe Sequence
tgaaggtggcttttgctttatagtt

SEQ ID NO: 285577 - DNA, 25 bp, Probe Sequence
tgaatgcgtgttatgttttgaaggt

SEQ ID NO: 285578 - DNA, 25 bp, Probe Sequence
tgaatgcgatggattacatttggaa

SEQ ID NO: 285579 - DNA, 25 bp, Probe Sequence
tgcagtcaaggattcttcattttta

SEQ ID NO: 285580 - DNA, 25 bp, Probe Sequence
tgcagacagatcgcctgtttttctt

SEQ ID NO: 285581 - DNA, 25 bp, Probe Sequence
tgcaaactcccagttgcaagctcct

SEQ ID NO: 285582 - DNA, 25 bp, Probe Sequence
tgcatttttccagttgcgagtccca

SEQ ID NO: 285583 - DNA, 25 bp, Probe Sequence
tgcacttttaaggctctaatcacca

SEQ ID NO: 285584 - DNA, 25 bp, Probe Sequence
tgcaatttctagtgccttctgtcca

SEQ ID NO: 285585 - DNA, 25 bp, Probe Sequence
tgaattggtcactgcatcttgtatc

SEQ ID NO: 285586 - DNA, 25 bp, Probe Sequence
tgaatctggtcatgccattattgca

SEQ ID NO: 285587 - DNA, 25 bp, Probe Sequence
tgcaactggcctggccgcaacagca

SEQ ID NO: 285588 - DNA, 25 bp, Probe Sequence
tgcaaatgcacctcctgcaagaaga

SEQ ID NO: 285589 - DNA, 25 bp, Probe Sequence
tgcacaatttctgccaaagactgat

SEQ ID NO: 285590 - DNA, 25 bp, Probe Sequence
tgcacacggtgcactctacaagtga

SEQ ID NO: 285591 - DNA, 25 bp, Probe Sequence
tgcaacgggctaatccacggaattg

SEQ ID NO: 285592 - DNA, 25 bp, Probe Sequence
tgcaacgggtacttgcagggccttg

SEQ ID NO: 285593 - DNA, 25 bp, Probe Sequence
tgcaactgtgtgtacaccagggatc

SEQ ID NO: 285594 - DNA, 25 bp, Probe Sequence
tgcaactgttgctgataagatcctg

SEQ ID NO: 285595 - DNA, 25 bp, Probe Sequence
tgcaactgttccgcaaactggggct

SEQ ID NO: 285596 - DNA, 25 bp, Probe Sequence
tgcacagcagatccccgaaattggt

SEQ ID NO: 285597 - DNA, 25 bp, Probe Sequence
tgcactccatccatcataactgtat

SEQ ID NO: 285598 - DNA, 25 bp, Probe Sequence
tgcacagacttcatataatcttaaa

SEQ ID NO: 285599 - DNA, 25 bp, Probe Sequence
tgcagaactctggcaatgagatttc

SEQ ID NO: 285600 - DNA, 25 bp, Probe Sequence
tgcagcccctgagatattttgctca

SEQ ID NO: 285601 - DNA, 25 bp, Probe Sequence
tgcatcacccggttttacagctgca

SEQ ID NO: 285602 - DNA, 25 bp, Probe Sequence
tgcacacgcacgggtgtttctgtgt

SEQ ID NO: 285603 - DNA, 25 bp, Probe Sequence
tgcacccacttttgcttgtagtcat

SEQ ID NO: 285604 - DNA, 25 bp, Probe Sequence
tgcacaaattctgtctctggattat

SEQ ID NO: 285605 - DNA, 25 bp, Probe Sequence
tgcaaataactcctccattgaaata

SEQ ID NO: 285606 - DNA, 25 bp, Probe Sequence
tgaattcaactcctcacatgagaag

SEQ ID NO: 285607 - DNA, 25 bp, Probe Sequence
tgcaatgtgcatgcctaaatggaaa

SEQ ID NO: 285608 - DNA, 25 bp, Probe Sequence
tgaatgtgcagaggatacgcatgga

SEQ ID NO: 285609 - DNA, 25 bp, Probe Sequence
tgaatggctgacctgacctgatgtc

SEQ ID NO: 285610 - DNA, 25 bp, Probe Sequence
tgcacatgggacagaccgggctgga

SEQ ID NO: 285611 - DNA, 25 bp, Probe Sequence
tgcaagggaattcttgtgtgctgct

SEQ ID NO: 285612 - DNA, 25 bp, Probe Sequence
tgcaggggaagggctggctggggtc

SEQ ID NO: 285613 - DNA, 25 bp, Probe Sequence
tgcaagggcgactctggagggcccc

SEQ ID NO: 285614 - DNA, 25 bp, Probe Sequence
tgcaacggagactccggtgggccgc

SEQ ID NO: 285615 - DNA, 25 bp, Probe Sequence
tgcaccgtaagcccagggatgtggc

SEQ ID NO: 285616 - DNA, 25 bp, Probe Sequence
tgcacctgtagagatcaccaatctg

SEQ ID NO: 285617 - DNA, 25 bp, Probe Sequence
tgcactggctgaagcaacccgccag

SEQ ID NO: 285618 - DNA, 25 bp, Probe Sequence
tgcacaggtaatacaacacgccgga

SEQ ID NO: 285619 - DNA, 25 bp, Probe Sequence
tgcaatgccttaacgagagccgcga

SEQ ID NO: 285620 - DNA, 25 bp, Probe Sequence
tgcagaccgtcaatggagcagaggc

SEQ ID NO: 285621 - DNA, 25 bp, Probe Sequence
tgcagacttctcgttagcagctgga

SEQ ID NO: 285622 - DNA, 25 bp, Probe Sequence
tgcagacggctcattcaagccttcg

SEQ ID NO: 285623 - DNA, 25 bp, Probe Sequence
tgaatgctggttttcacaccttttc

SEQ ID NO: 285624 - DNA, 25 bp, Probe Sequence
tgaatggttgttgcacaatttctcc

SEQ ID NO: 285625 - DNA, 25 bp, Probe Sequence
tgcatcctggtgatcaccttactcc

SEQ ID NO: 285626 - DNA, 25 bp, Probe Sequence
tgcatctcgagggatctgacctacc

SEQ ID NO: 285627 - DNA, 25 bp, Probe Sequence
tgcactggatacccatgactgcaag

SEQ ID NO: 285628 - DNA, 25 bp, Probe Sequence
tgcagcatggctgaccaactgactg

SEQ ID NO: 285629 - DNA, 25 bp, Probe Sequence
tgcaatgtggagtctgttctgaagc

SEQ ID NO: 285630 - DNA, 25 bp, Probe Sequence
tgcaagctggtggctggaccaatgt

SEQ ID NO: 285631 - DNA, 25 bp, Probe Sequence
tgcaaggggcgtcggacagtgcagc

SEQ ID NO: 285632 - DNA, 25 bp, Probe Sequence
tgcaaggacttgttggaggtggcag

SEQ ID NO: 285633 - DNA, 25 bp, Probe Sequence
tgcagaggagtccggctgggcggag

SEQ ID NO: 285634 - DNA, 25 bp, Probe Sequence
tgcagtgtttcgggcatgggcaaag

SEQ ID NO: 285635 - DNA, 25 bp, Probe Sequence
tgcagaggttactgaagagcaatag

SEQ ID NO: 285636 - DNA, 25 bp, Probe Sequence
tgcaagtggtactgttacaatgaca

SEQ ID NO: 285637 - DNA, 25 bp, Probe Sequence
tgaatgtcttactgtgatcaattaa

SEQ ID NO: 285638 - DNA, 25 bp, Probe Sequence
tgaatgttaacagggaaagatgctc

SEQ ID NO: 285639 - DNA, 25 bp, Probe Sequence
tgaatttaaactcagcaaagtctgg

SEQ ID NO: 285640 - DNA, 25 bp, Probe Sequence
tgaattgtgcaatttgtagaacttt

SEQ ID NO: 285641 - DNA, 25 bp, Probe Sequence
tgaatcttaaatagttacatttttt

SEQ ID NO: 285642 - DNA, 25 bp, Probe Sequence
tgcatacttacctagtgaaactttt

SEQ ID NO: 285643 - DNA, 25 bp, Probe Sequence
tgcagactgccccaatgtgacagca

SEQ ID NO: 285644 - DNA, 25 bp, Probe Sequence
tgcaaatgcgcactctatggacacc

SEQ ID NO: 285645 - DNA, 25 bp, Probe Sequence
tgaatgatgagcctatgtccctgcc

SEQ ID NO: 285646 - DNA, 25 bp, Probe Sequence
tgcaagaagagctgctgctcctgct

SEQ ID NO: 285647 - DNA, 25 bp, Probe Sequence
tgcaagggcagtggatgcgcctgtg

SEQ ID NO: 285648 - DNA, 25 bp, Probe Sequence
tgaatgcttgctacgagcggtggct

SEQ ID NO: 285649 - DNA, 25 bp, Probe Sequence
tgcactgactgcatggacggctact

SEQ ID NO: 285650 - DNA, 25 bp, Probe Sequence
tgcagcggagatgtacggctcctct

SEQ ID NO: 285651 - DNA, 25 bp, Probe Sequence
tgcagaggacggatctagctcctgt

SEQ ID NO: 285652 - DNA, 25 bp, Probe Sequence
tgcatgggacgaaagcttggctcca

SEQ ID NO: 285653 - DNA, 25 bp, Probe Sequence
tgcactggcaagaaaatggacccac

SEQ ID NO: 285654 - DNA, 25 bp, Probe Sequence
tgcactgctacatgaacagcgcctc

SEQ ID NO: 285655 - DNA, 25 bp, Probe Sequence
tgcactgccatgtatgaaagtctct

SEQ ID NO: 285656 - DNA, 25 bp, Probe Sequence
tgcaatgaatgcagcaaggttttca

SEQ ID NO: 285657 - DNA, 25 bp, Probe Sequence
tgcagagaactggcaagacccttct

SEQ ID NO: 285658 - DNA, 25 bp, Probe Sequence
tgcagaaaatgggtcagctcctttg

SEQ ID NO: 285659 - DNA, 25 bp, Probe Sequence
tgcaggacgggatcccctgtagtga

SEQ ID NO: 285660 - DNA, 25 bp, Probe Sequence
tgcagtgaaccgtgaccgagtgact

SEQ ID NO: 285661 - DNA, 25 bp, Probe Sequence
tgcagtcaccatctcagagggggcc

SEQ ID NO: 285662 - DNA, 25 bp, Probe Sequence
tgcggaccattccgaggggagtcca

SEQ ID NO: 285663 - DNA, 25 bp, Probe Sequence
tgcgtgattcctccagaggggtccc

SEQ ID NO: 285664 - DNA, 25 bp, Probe Sequence
tgctacttgcctacagtggggtgca

SEQ ID NO: 285665 - DNA, 25 bp, Probe Sequence
tgcagacctgccgaactgtggcggc

SEQ ID NO: 285666 - DNA, 25 bp, Probe Sequence
tgcagaccaacaaatctggctctgg

SEQ ID NO: 285667 - DNA, 25 bp, Probe Sequence
tgcagaccatacaggaggctgatgc

SEQ ID NO: 285668 - DNA, 25 bp, Probe Sequence
tgcagcagctcttgcagtgggtggg

SEQ ID NO: 285669 - DNA, 25 bp, Probe Sequence
tgcagcagctcttgcagtgggtggg

SEQ ID NO: 285670 - DNA, 25 bp, Probe Sequence
tgcagcagctcttgcagtgggtggg

SEQ ID NO: 285671 - DNA, 25 bp, Probe Sequence
tgcacagcatcggcaagatcggcgg

SEQ ID NO: 285672 - DNA, 25 bp, Probe Sequence
tgcacaactgccacacagggaattc

SEQ ID NO: 285673 - DNA, 25 bp, Probe Sequence
tgcaaactgctgaccacgccgaatc

SEQ ID NO: 285674 - DNA, 25 bp, Probe Sequence
tgcatcaacctgatcaccagccagg

SEQ ID NO: 285675 - DNA, 25 bp, Probe Sequence
tgctacacggataccccaaggacat

SEQ ID NO: 285676 - DNA, 25 bp, Probe Sequence
tgcattttgcctaccacaaagtggt

SEQ ID NO: 285677 - DNA, 25 bp, Probe Sequence
tgcaagatatccatccgcagagggc

SEQ ID NO: 285678 - DNA, 25 bp, Probe Sequence
tgcggtaccagtgcacagaggggtt

SEQ ID NO: 285679 - DNA, 25 bp, Probe Sequence
tgcgggtccagtgtcaacagtatca

SEQ ID NO: 285680 - DNA, 25 bp, Probe Sequence
tgcagaggtccacaacacacagatt

SEQ ID NO: 285681 - DNA, 25 bp, Probe Sequence
tgcaagcctcggcagaagctcgtta

SEQ ID NO: 285682 - DNA, 25 bp, Probe Sequence
tgcacagtctgaaggagaggcctgt

SEQ ID NO: 285683 - DNA, 25 bp, Probe Sequence
tgcagcagctggttgaggggcacca

SEQ ID NO: 285684 - DNA, 25 bp, Probe Sequence
tgcagcgagtggaagttcgccgcct

SEQ ID NO: 285685 - DNA, 25 bp, Probe Sequence
tgcagtagtgccaaaaggccccttc

SEQ ID NO: 285686 - DNA, 25 bp, Probe Sequence
tgcagtaactaatagtactcttacc

SEQ ID NO: 285687 - DNA, 25 bp, Probe Sequence
tgcaacaaccaatcagaaccataag

SEQ ID NO: 285688 - DNA, 25 bp, Probe Sequence
tgctcagcaacctagaagaagccaa

SEQ ID NO: 285689 - DNA, 25 bp, Probe Sequence
tgcagccggcctcaatgttggcaat

SEQ ID NO: 285690 - DNA, 25 bp, Probe Sequence
tgcagcacgtcgcttatattgggat

SEQ ID NO: 285691 - DNA, 25 bp, Probe Sequence
tgcgcgggcagttgctaatcggact

SEQ ID NO: 285692 - DNA, 25 bp, Probe Sequence
tgcacgtgccgaggctatcaaggcc

SEQ ID NO: 285693 - DNA, 25 bp, Probe Sequence
tgcactgcacctgggcaacaagagt

SEQ ID NO: 285694 - DNA, 25 bp, Probe Sequence
tgcacagcaactagagcaaactggt

SEQ ID NO: 285695 - DNA, 25 bp, Probe Sequence
tgcagaacctcaagctacctgtgtc

SEQ ID NO: 285696 - DNA, 25 bp, Probe Sequence
tgcaagagcctcgatgtagccggcc

SEQ ID NO: 285697 - DNA, 25 bp, Probe Sequence
tgcaaggagctgggtatcaccgccc

SEQ ID NO: 285698 - DNA, 25 bp, Probe Sequence
tgcaagcggtagttccattagccag

SEQ ID NO: 285699 - DNA, 25 bp, Probe Sequence
tgcagctggtgcagaatccttacca

SEQ ID NO: 285700 - DNA, 25 bp, Probe Sequence
tgcactgatgtgttgaaccttattc

SEQ ID NO: 285701 - DNA, 25 bp, Probe Sequence
tgcactgtgccattcaacactatga

SEQ ID NO: 285702 - DNA, 25 bp, Probe Sequence
tgcagttgccattgctgaccttatt

SEQ ID NO: 285703 - DNA, 25 bp, Probe Sequence
tgcagttgtgcactgctcgacctga

SEQ ID NO: 285704 - DNA, 25 bp, Probe Sequence
tgcagtactgcaagcatctggccct

SEQ ID NO: 285705 - DNA, 25 bp, Probe Sequence
tgcagcaacaatggcactgtccacc

SEQ ID NO: 285706 - DNA, 25 bp, Probe Sequence
tgcaaagcacatgaatattaatctg

SEQ ID NO: 285707 - DNA, 25 bp, Probe Sequence
tgcaatggcactgcagtactcattc

SEQ ID NO: 285708 - DNA, 25 bp, Probe Sequence
tgcaatgggccatgatcacgatcct

SEQ ID NO: 285709 - DNA, 25 bp, Probe Sequence
tgcaaaggcgcttaatcggcctcca

SEQ ID NO: 285710 - DNA, 25 bp, Probe Sequence
tgcaaaaggctagctcggcactaca

SEQ ID NO: 285711 - DNA, 25 bp, Probe Sequence
tgcaaaagtcaattgccttcctata

SEQ ID NO: 285712 - DNA, 25 bp, Probe Sequence
tgcaaacagggaaccgtctctatag

SEQ ID NO: 285713 - DNA, 25 bp, Probe Sequence
tgcaacacaggatacagacttcaaa

SEQ ID NO: 285714 - DNA, 25 bp, Probe Sequence
tgcagctgaagtactacaactccga

SEQ ID NO: 285715 - DNA, 25 bp, Probe Sequence
tgcatttcatgtttaacctccggct

SEQ ID NO: 285716 - DNA, 25 bp, Probe Sequence
tgcactcgcaatttaactttaacta

SEQ ID NO: 285717 - DNA, 25 bp, Probe Sequence
tgcagcatccacttcataattaaaa

SEQ ID NO: 285718 - DNA, 25 bp, Probe Sequence
tgcacaccgctttattaagaacaga

SEQ ID NO: 285719 - DNA, 25 bp, Probe Sequence
tgcacccacatataaaaggagaata

SEQ ID NO: 285720 - DNA, 25 bp, Probe Sequence
tgcactatctgctgtaaacggaaaa

SEQ ID NO: 285721 - DNA, 25 bp, Probe Sequence
tgcactgatcgctgccaatgcactc

SEQ ID NO: 285722 - DNA, 25 bp, Probe Sequence
tgcactgatcgctgccaatgcactc

SEQ ID NO: 285723 - DNA, 25 bp, Probe Sequence
tgcactatgtgccccaatatcatca

SEQ ID NO: 285724 - DNA, 25 bp, Probe Sequence
tgcaggatggactcttgcacatcac

SEQ ID NO: 285725 - DNA, 25 bp, Probe Sequence
tgcacctggcactctgatgactgcc

SEQ ID NO: 285726 - DNA, 25 bp, Probe Sequence
tgcactgtggtctctgcatggaccc

SEQ ID NO: 285727 - DNA, 25 bp, Probe Sequence
tgcaagggcagctcagcatggcccc

SEQ ID NO: 285728 - DNA, 25 bp, Probe Sequence
tgcaagggcagctcagcatggcccc

SEQ ID NO: 285729 - DNA, 25 bp, Probe Sequence
tgcaagggcagctcagcatggcccc

SEQ ID NO: 285730 - DNA, 25 bp, Probe Sequence
tgctcacagaacggatcatgtcccc

SEQ ID NO: 285731 - DNA, 25 bp, Probe Sequence
tgctgacggacacgtcgtacacgcg

SEQ ID NO: 285732 - DNA, 25 bp, Probe Sequence
tgcttccgaaggagtttccatatgc

SEQ ID NO: 285733 - DNA, 25 bp, Probe Sequence
tgctaccgatagggactttgccaag

SEQ ID NO: 285734 - DNA, 25 bp, Probe Sequence
tgctgacactgctggcgatttatgc

SEQ ID NO: 285735 - DNA, 25 bp, Probe Sequence
tgcagtaatgattgcgatttttgcc

SEQ ID NO: 285736 - DNA, 25 bp, Probe Sequence
tgcagtacattacgtattagtcatc

SEQ ID NO: 285737 - DNA, 25 bp, Probe Sequence
tgcagtgaagtagatgttaccatca

SEQ ID NO: 285738 - DNA, 25 bp, Probe Sequence
tgcagtcaggtcactgcctactgcc

SEQ ID NO: 285739 - DNA, 25 bp, Probe Sequence
tgcagatagtagagggccctgccta

SEQ ID NO: 285740 - DNA, 25 bp, Probe Sequence
tgcaatcacacgtggtgacctcaca

SEQ ID NO: 285741 - DNA, 25 bp, Probe Sequence
tgaattcacgatgggtgctcactgc

SEQ ID NO: 285742 - DNA, 25 bp, Probe Sequence
tgaatttctgtccggctgcaattta

SEQ ID NO: 285743 - DNA, 25 bp, Probe Sequence
tgcaatgtcactgctcgtgtggtct

SEQ ID NO: 285744 - DNA, 25 bp, Probe Sequence
tgcaattccttgtatagtgagctca

SEQ ID NO: 285745 - DNA, 25 bp, Probe Sequence
tgcagacctcctgacctatgacagg

SEQ ID NO: 285746 - DNA, 25 bp, Probe Sequence
tgcagacctcctgacctatgacagg

SEQ ID NO: 285747 - DNA, 25 bp, Probe Sequence
tgcaggtcttcggacgcaagaagac

SEQ ID NO: 285748 - DNA, 25 bp, Probe Sequence
tgcgcttcaacgtgctcaaggtcac

SEQ ID NO: 285749 - DNA, 25 bp, Probe Sequence
tgcgcttcaacgtgctcaaggtcac

SEQ ID NO: 285750 - DNA, 25 bp, Probe Sequence
tgcaagttacagttccaaggccaga

SEQ ID NO: 285751 - DNA, 25 bp, Probe Sequence
tgcaggtaccagtgtctgtgacgag

SEQ ID NO: 285752 - DNA, 25 bp, Probe Sequence
tgcaagtaccgctgttgtgattgct

SEQ ID NO: 285753 - DNA, 25 bp, Probe Sequence
tgcaatggttctctgttgtgtgtgt

SEQ ID NO: 285754 - DNA, 25 bp, Probe Sequence
tgcactgtttcgccaagggttgtat

SEQ ID NO: 285755 - DNA, 25 bp, Probe Sequence
tgcactgaactccaacgatgccttt

SEQ ID NO: 285756 - DNA, 25 bp, Probe Sequence
tgcagtgctcccaaagagacctttg

SEQ ID NO: 285757 - DNA, 25 bp, Probe Sequence
tgcacagcccctaagtcaacttagc

SEQ ID NO: 285758 - DNA, 25 bp, Probe Sequence
tgcacccctttactaacttgatgat

SEQ ID NO: 285759 - DNA, 25 bp, Probe Sequence
tgcacccctctttcaaatgataata

SEQ ID NO: 285760 - DNA, 25 bp, Probe Sequence
tgcataccagtcttaccaattataa

SEQ ID NO: 285761 - DNA, 25 bp, Probe Sequence
tgcattcgagtcttaaccatattta

SEQ ID NO: 285762 - DNA, 25 bp, Probe Sequence
tgcattgtggccccagacttttaaa

SEQ ID NO: 285763 - DNA, 25 bp, Probe Sequence
tgccgatgtgcctcagggtttacag

SEQ ID NO: 285764 - DNA, 25 bp, Probe Sequence
tgcggtgagccagagggttccagac

SEQ ID NO: 285765 - DNA, 25 bp, Probe Sequence
tgctttgagtcaaggggcttcactg

SEQ ID NO: 285766 - DNA, 25 bp, Probe Sequence
tgcaatctggattcagcccgattcc

SEQ ID NO: 285767 - DNA, 25 bp, Probe Sequence
tgcactctgcagttagacaccatta

SEQ ID NO: 285768 - DNA, 25 bp, Probe Sequence
tgcacacttgttttacatcatatac

SEQ ID NO: 285769 - DNA, 25 bp, Probe Sequence
tgcacgcgtgcatatgctacacata

SEQ ID NO: 285770 - DNA, 25 bp, Probe Sequence
tgcacagaggcatactgctcctact

SEQ ID NO: 285771 - DNA, 25 bp, Probe Sequence
tgcacaatatcaccaggcttcttct

SEQ ID NO: 285772 - DNA, 25 bp, Probe Sequence
tgctagagatcatcaaccatgcatc

SEQ ID NO: 285773 - DNA, 25 bp, Probe Sequence
tgcatacaagcatgatgacactggc

SEQ ID NO: 285774 - DNA, 25 bp, Probe Sequence
tgcacacattgctgagagccgtctc

SEQ ID NO: 285775 - DNA, 25 bp, Probe Sequence
tgcacaagcttcaatagccgattcg

SEQ ID NO: 285776 - DNA, 25 bp, Probe Sequence
tgcaccaggctcctgggatatgtcg

SEQ ID NO: 285777 - DNA, 25 bp, Probe Sequence
tgcactcaagcctgggcaataagaa

SEQ ID NO: 285778 - DNA, 25 bp, Probe Sequence
tgcactccagccttggtgacagagt

SEQ ID NO: 285779 - DNA, 25 bp, Probe Sequence
tgcactccagccttggtgacagagt

SEQ ID NO: 285780 - DNA, 25 bp, Probe Sequence
tgcactccagcttgggcaacagagc

SEQ ID NO: 285781 - DNA, 25 bp, Probe Sequence
tgcactccagcctggcaacagagtg

SEQ ID NO: 285782 - DNA, 25 bp, Probe Sequence
tgcaatgccggctggctcagtgatg

SEQ ID NO: 285783 - DNA, 25 bp, Probe Sequence
tgcagccatgggtaggtcagagatg

SEQ ID NO: 285784 - DNA, 25 bp, Probe Sequence
tgcaccctgggacccagaagtgccc

SEQ ID NO: 285785 - DNA, 25 bp, Probe Sequence
tgcacactctggggagccaggggcc

SEQ ID NO: 285786 - DNA, 25 bp, Probe Sequence
tgcactttgggaggccaaggcggga

SEQ ID NO: 285787 - DNA, 25 bp, Probe Sequence
tgcacttcgtggaacactaccggga

SEQ ID NO: 285788 - DNA, 25 bp, Probe Sequence
tgcacttggggccaagctgtgccgg

SEQ ID NO: 285789 - DNA, 25 bp, Probe Sequence
tgcactgctgtgtgtgacctgatcc

SEQ ID NO: 285790 - DNA, 25 bp, Probe Sequence
tgcacagtgtgcatctgacggaccc

SEQ ID NO: 285791 - DNA, 25 bp, Probe Sequence
tgcagcatgagggtctgcccaagcc

SEQ ID NO: 285792 - DNA, 25 bp, Probe Sequence
tgcagcatgagggtctgcccaagcc

SEQ ID NO: 285793 - DNA, 25 bp, Probe Sequence
tgcagagtaggagtccaaaccctta

SEQ ID NO: 285794 - DNA, 25 bp, Probe Sequence
tgcatattagcatcagtcaacccct

SEQ ID NO: 285795 - DNA, 25 bp, Probe Sequence
tgcattaagaacgacgccactgccc

SEQ ID NO: 285796 - DNA, 25 bp, Probe Sequence
tgcttagcaaacagcggcacgatgg

SEQ ID NO: 285797 - DNA, 25 bp, Probe Sequence
tgcttgagccccaaaggtcaaagct

SEQ ID NO: 285798 - DNA, 25 bp, Probe Sequence
tgcttgagtccagggaggtcgaggc

SEQ ID NO: 285799 - DNA, 25 bp, Probe Sequence
tgcagctgagctctgcgaggaccga

SEQ ID NO: 285800 - DNA, 25 bp, Probe Sequence
tgcatgatgtgcagctggaggatcc

SEQ ID NO: 285801 - DNA, 25 bp, Probe Sequence
tgcagcaggcgagtgtgcaggtgct

SEQ ID NO: 285802 - DNA, 25 bp, Probe Sequence
tgcacagggctgctgcagatgtatc

SEQ ID NO: 285803 - DNA, 25 bp, Probe Sequence
tgcagcagagctcgagacagggatc

SEQ ID NO: 285804 - DNA, 25 bp, Probe Sequence
tgcagagcacgcctggcaggacata

SEQ ID NO: 285805 - DNA, 25 bp, Probe Sequence
tgcagagacacacgtaggctcaaaa

SEQ ID NO: 285806 - DNA, 25 bp, Probe Sequence
tgcagaaccactttggtccaaaccc

SEQ ID NO: 285807 - DNA, 25 bp, Probe Sequence
tgcagatacacgaactggatccaaa

SEQ ID NO: 285808 - DNA, 25 bp, Probe Sequence
tgcagaaatgaggacttgtaatagt

SEQ ID NO: 285809 - DNA, 25 bp, Probe Sequence
tgcgaaggcaggttattagaagagt

SEQ ID NO: 285810 - DNA, 25 bp, Probe Sequence
tcgatatcctggttttggtagttct

SEQ ID NO: 285811 - DNA, 25 bp, Probe Sequence
tgcgttccaggatgttggactttcc

SEQ ID NO: 285812 - DNA, 25 bp, Probe Sequence
tgcagccccaggctttggactgtta

SEQ ID NO: 285813 - DNA, 25 bp, Probe Sequence
tgcagtcccattctttatggcctat

SEQ ID NO: 285814 - DNA, 25 bp, Probe Sequence
tgcactgctcaattctgtttttcgt

SEQ ID NO: 285815 - DNA, 25 bp, Probe Sequence
tgcagctgctaattatcttgttaaa

SEQ ID NO: 285816 - DNA, 25 bp, Probe Sequence
tgcactctataatttgtggtacagt

SEQ ID NO: 285817 - DNA, 25 bp, Probe Sequence
tgcacatcatattctattgtttact

SEQ ID NO: 285818 - DNA, 25 bp, Probe Sequence
tgcaatgcatattttttaatctcaa

SEQ ID NO: 285819 - DNA, 25 bp, Probe Sequence
tgcaaagagatcacttttcatgcaa

SEQ ID NO: 285820 - DNA, 25 bp, Probe Sequence
tgcacagaatgtcaccttctcatgg

SEQ ID NO: 285821 - DNA, 25 bp, Probe Sequence
tgcaagaatactggcagttcactgt

SEQ ID NO: 285822 - DNA, 25 bp, Probe Sequence
tgcaagaaaagctgctgctcctgct

SEQ ID NO: 285823 - DNA, 25 bp, Probe Sequence
tgcagcagaacattgccctacctgc

SEQ ID NO: 285824 - DNA, 25 bp, Probe Sequence
tgcagaaaatctgcagctgtgccta

SEQ ID NO: 285825 - DNA, 25 bp, Probe Sequence
tgcaacaaagatgcctcgcagcgag

SEQ ID NO: 285826 - DNA, 25 bp, Probe Sequence
tgcaaaggaatccccgagcagcatg

SEQ ID NO: 285827 - DNA, 25 bp, Probe Sequence
tgctatacagtatacctgaggctga

SEQ ID NO: 285828 - DNA, 25 bp, Probe Sequence
tgcagatacctcagacctggtgctc

SEQ ID NO: 285829 - DNA, 25 bp, Probe Sequence
tgcagcaactccagactgaggtcta

SEQ ID NO: 285830 - DNA, 25 bp, Probe Sequence
tgcaggaggccacactgatgttcta

SEQ ID NO: 285831 - DNA, 25 bp, Probe Sequence
tgcacgtggcactaatctggtgtca

SEQ ID NO: 285832 - DNA, 25 bp, Probe Sequence
tgcacgtggcctcttgagcagtggc

SEQ ID NO: 285833 - DNA, 25 bp, Probe Sequence
tgcacctgcccttcagggagatggg

SEQ ID NO: 285834 - DNA, 25 bp, Probe Sequence
tgcacctgcccttcagggagatggg

SEQ ID NO: 285835 - DNA, 25 bp, Probe Sequence
tgcacgacaccctgggaggggtgag

SEQ ID NO: 285836 - DNA, 25 bp, Probe Sequence
tgcagcctactggaaaggaggggga

SEQ ID NO: 285837 - DNA, 25 bp, Probe Sequence
tgcacccctgaagagcagcgggcag

SEQ ID NO: 285838 - DNA, 25 bp, Probe Sequence
tgccgccttccagaagggcttgcag

SEQ ID NO: 285839 - DNA, 25 bp, Probe Sequence
tgccgccttccagaagggcttgcag

SEQ ID NO: 285840 - DNA, 25 bp, Probe Sequence
tgcacagctccgcaaaggtggctac

SEQ ID NO: 285841 - DNA, 25 bp, Probe Sequence
tccagccactggcacgaagtgcctc

SEQ ID NO: 285842 - DNA, 25 bp, Probe Sequence
tgctaccaaggcccagctatggccc

SEQ ID NO: 285843 - DNA, 25 bp, Probe Sequence
tgctctcctaatgaagttggctccc

SEQ ID NO: 285844 - DNA, 25 bp, Probe Sequence
tgctccaccaataaacgtttcgatc

SEQ ID NO: 285845 - DNA, 25 bp, Probe Sequence
tgctctacaaaagtacctgttcttg

SEQ ID NO: 285846 - DNA, 25 bp, Probe Sequence
tgcttcacaaaatgcacttctattt

SEQ ID NO: 285847 - DNA, 25 bp, Probe Sequence
tgcaaccaacacatactgtcagact

SEQ ID NO: 285848 - DNA, 25 bp, Probe Sequence
tgctaccaatatcatacgggacttt

SEQ ID NO: 285849 - DNA, 25 bp, Probe Sequence
tgcagacctattcccacgaggtctc

SEQ ID NO: 285850 - DNA, 25 bp, Probe Sequence
tgcagacctgactgcgacaacttcc

SEQ ID NO: 285851 - DNA, 25 bp, Probe Sequence
tgcagacctcacggctggcaaaatc

SEQ ID NO: 285852 - DNA, 25 bp, Probe Sequence
tgcagaccgctcgggcatggagaat

SEQ ID NO: 285853 - DNA, 25 bp, Probe Sequence
tgcaagcacagcgctggtgtgggtg

SEQ ID NO: 285854 - DNA, 25 bp, Probe Sequence
tgcaaccaggacttgtggtgcagct

SEQ ID NO: 285855 - DNA, 25 bp, Probe Sequence
tgcagagtcagagtcctgggaccat

SEQ ID NO: 285856 - DNA, 25 bp, Probe Sequence
tgcaagccatgatcttggcgtccgc

SEQ ID NO: 285857 - DNA, 25 bp, Probe Sequence
tgcaagctagaaattggcttctcta

SEQ ID NO: 285858 - DNA, 25 bp, Probe Sequence
tgcacatccagacggctggttccta

SEQ ID NO: 285859 - DNA, 25 bp, Probe Sequence
tgcagtgccaagttgggttccttca

SEQ ID NO: 285860 - DNA, 25 bp, Probe Sequence
tgcagtcaacgacgcaggattccac

SEQ ID NO: 285861 - DNA, 25 bp, Probe Sequence
tgcagtcacttcgtgggatctgccc

SEQ ID NO: 285862 - DNA, 25 bp, Probe Sequence
tgcattgacttgggcactgacatgg

SEQ ID NO: 285863 - DNA, 25 bp, Probe Sequence
tgcatttgcctcacctgacaatgtt

SEQ ID NO: 285864 - DNA, 25 bp, Probe Sequence
tgcatcactgccagctgactacagt

SEQ ID NO: 285865 - DNA, 25 bp, Probe Sequence
tgcagcagctgcggacagagctact

SEQ ID NO: 285866 - DNA, 25 bp, Probe Sequence
tgcagatgctggctatgccatcctc

SEQ ID NO: 285867 - DNA, 25 bp, Probe Sequence
tgcagcctgtgacaggctcctggct

SEQ ID NO: 285868 - DNA, 25 bp, Probe Sequence
tgcagctgtgctcagggctacaggc

SEQ ID NO: 285869 - DNA, 25 bp, Probe Sequence
tgcagctgctggactggatgtgacg

SEQ ID NO: 285870 - DNA, 25 bp, Probe Sequence
tgcatctgcttactgaaggcaggta

SEQ ID NO: 285871 - DNA, 25 bp, Probe Sequence
tgcacagttggaaatggaggatgaa

SEQ ID NO: 285872 - DNA, 25 bp, Probe Sequence
tgcagtgtcggaaggccagctttga

SEQ ID NO: 285873 - DNA, 25 bp, Probe Sequence
tgcatattcggacccacacattacc

SEQ ID NO: 285874 - DNA, 25 bp, Probe Sequence
tgcctttcgagagaccattactgcc

SEQ ID NO: 285875 - DNA, 25 bp, Probe Sequence
tgcagtttggaatagactaaggccc

SEQ ID NO: 285876 - DNA, 25 bp, Probe Sequence
tgcagttctggtcagagacgctccc

SEQ ID NO: 285877 - DNA, 25 bp, Probe Sequence
tgcattttctggaaggacaccgacc

SEQ ID NO: 285878 - DNA, 25 bp, Probe Sequence
tgcatttaagggagactctgggggc

SEQ ID NO: 285879 - DNA, 25 bp, Probe Sequence
tgcagggaagggagatgtctgattc

SEQ ID NO: 285880 - DNA, 25 bp, Probe Sequence
tgcaggggggagcagactctcatca

SEQ ID NO: 285881 - DNA, 25 bp, Probe Sequence
tgcatgaagaggcacggcattccca

SEQ ID NO: 285882 - DNA, 25 bp, Probe Sequence
tgcatgaagaggcacggcattccca

SEQ ID NO: 285883 - DNA, 25 bp, Probe Sequence
tgctaggagtgcgacaagcagttcc

SEQ ID NO: 285884 - DNA, 25 bp, Probe Sequence
tgctaggaagctccgtagtcaccga

SEQ ID NO: 285885 - DNA, 25 bp, Probe Sequence
tgctggaacagtttaggtacctacc

SEQ ID NO: 285886 - DNA, 25 bp, Probe Sequence
tgctggacacccgcatgtgtaacaa

SEQ ID NO: 285887 - DNA, 25 bp, Probe Sequence
tgcagttcttccacagttcagcaaa

SEQ ID NO: 285888 - DNA, 25 bp, Probe Sequence
tgcaggatgcctactacatcttcca

SEQ ID NO: 285889 - DNA, 25 bp, Probe Sequence
tgcagcagaggtactcttctgtccc

SEQ ID NO: 285890 - DNA, 25 bp, Probe Sequence
tgcacagacactacttgcttttctc

SEQ ID NO: 285891 - DNA, 25 bp, Probe Sequence
tgcagacagactttagctccgatcc

SEQ ID NO: 285892 - DNA, 25 bp, Probe Sequence
tgcagacagactttagctccgatcc

SEQ ID NO: 285893 - DNA, 25 bp, Probe Sequence
tgcattagagcacggagtccgtcca

SEQ ID NO: 285894 - DNA, 25 bp, Probe Sequence
tgcattagggtgagtctgcctccct

SEQ ID NO: 285895 - DNA, 25 bp, Probe Sequence
tgcttaggatggatcccttctcttc

SEQ ID NO: 285896 - DNA, 25 bp, Probe Sequence
tgctgtaggggatatctcttgctct

SEQ ID NO: 285897 - DNA, 25 bp, Probe Sequence
tgcatgttggggtttcctttacctt

SEQ ID NO: 285898 - DNA, 25 bp, Probe Sequence
tgcatttgttggctctattttaatt

SEQ ID NO: 285899 - DNA, 25 bp, Probe Sequence
tgcacttgtcattgtgtttctccca

SEQ ID NO: 285900 - DNA, 25 bp, Probe Sequence
tgcactgtgtatcttgtgtccagac

SEQ ID NO: 285901 - DNA, 25 bp, Probe Sequence
tgcaggatgcttgatgctgcgtccc

SEQ ID NO: 285902 - DNA, 25 bp, Probe Sequence
tgcacttcttgcaatgtggttctga

SEQ ID NO: 285903 - DNA, 25 bp, Probe Sequence
tgcaccctgtgaatgtgcgctgcct

SEQ ID NO: 285904 - DNA, 25 bp, Probe Sequence
tgcaacaggtgctgcacgcaggctc

SEQ ID NO: 285905 - DNA, 25 bp, Probe Sequence
tgcataatggctgggacgacctgga

SEQ ID NO: 285906 - DNA, 25 bp, Probe Sequence
tgcagaatgtgctcaacaaccagca

SEQ ID NO: 285907 - DNA, 25 bp, Probe Sequence
tgcagaagctgctccgcaagcagga

SEQ ID NO: 285908 - DNA, 25 bp, Probe Sequence
tgcacggctctgctcgcagagggca

SEQ ID NO: 285909 - DNA, 25 bp, Probe Sequence
tgcacggctctgctcgcagagggca

SEQ ID NO: 285910 - DNA, 25 bp, Probe Sequence
tgcaggcagcagcagtccagaggcc

SEQ ID NO: 285911 - DNA, 25 bp, Probe Sequence
tgcaggcgcggagaagcaaccggca

SEQ ID NO: 285912 - DNA, 25 bp, Probe Sequence
tgcaggagcgggactacatcttcgg

SEQ ID NO: 285913 - DNA, 25 bp, Probe Sequence
tgcagagatcggcatgtcaccttgg

SEQ ID NO: 285914 - DNA, 25 bp, Probe Sequence
tgcagaccgaggtatccacgtggag

SEQ ID NO: 285915 - DNA, 25 bp, Probe Sequence
tgcagatcacggaagaccctggcga

SEQ ID NO: 285916 - DNA, 25 bp, Probe Sequence
tgcagggcagtgaaacccacgcagc

SEQ ID NO: 285917 - DNA, 25 bp, Probe Sequence
tgcagtggaggattacttcatgcgc

SEQ ID NO: 285918 - DNA, 25 bp, Probe Sequence
tgcgtggagcagttaataccatcaa

SEQ ID NO: 285919 - DNA, 25 bp, Probe Sequence
tgcagagaaatgttaatgtcttcaa

SEQ ID NO: 285920 - DNA, 25 bp, Probe Sequence
tgctgaagaagcccaagtttgaatt

SEQ ID NO: 285921 - DNA, 25 bp, Probe Sequence
tgctgctatgaagcccgacttcaat

SEQ ID NO: 285922 - DNA, 25 bp, Probe Sequence
tgctgtgtagatgccacaaccttcc

SEQ ID NO: 285923 - DNA, 25 bp, Probe Sequence
tgcttgtgtaatcgaccacctagcc

SEQ ID NO: 285924 - DNA, 25 bp, Probe Sequence
tgcttgagtatggtgttaactacct

SEQ ID NO: 285925 - DNA, 25 bp, Probe Sequence
tgcagcggtatgctgttcgaccagc

SEQ ID NO: 285926 - DNA, 25 bp, Probe Sequence
tgcagctgaaatcggattcgtcccg

SEQ ID NO: 285927 - DNA, 25 bp, Probe Sequence
tgcagtggacataagcattgggcca

SEQ ID NO: 285928 - DNA, 25 bp, Probe Sequence
tgcaggggctgaagcatgggctgcc

SEQ ID NO: 285929 - DNA, 25 bp, Probe Sequence
tgcagttgccgcactgcagtgtgcc

SEQ ID NO: 285930 - DNA, 25 bp, Probe Sequence
tgcagaggacacgctgcatgggccc

SEQ ID NO: 285931 - DNA, 25 bp, Probe Sequence
tgcagagtgtcacggagatgggacc

SEQ ID NO: 285932 - DNA, 25 bp, Probe Sequence
tgctcagtgccatgaagatggagac

SEQ ID NO: 285933 - DNA, 25 bp, Probe Sequence
tgcttgctgctcttggggttgaagt

SEQ ID NO: 285934 - DNA, 25 bp, Probe Sequence
tgcactgcctttggggctggaggga

SEQ ID NO: 285935 - DNA, 25 bp, Probe Sequence
tgcactgcctttggggctggaggga

SEQ ID NO: 285936 - DNA, 25 bp, Probe Sequence
tgcacttgatttgggccttgaagag

SEQ ID NO: 285937 - DNA, 25 bp, Probe Sequence
tgcacttaggtggtgaatgtgacta

SEQ ID NO: 285938 - DNA, 25 bp, Probe Sequence
tgcagccaagtcatgtaattagtca

SEQ ID NO: 285939 - DNA, 25 bp, Probe Sequence
tgcagccagatgtttgaatatttta

SEQ ID NO: 285940 - DNA, 25 bp, Probe Sequence
tgcagctcagatgtctcaggcactt

SEQ ID NO: 285941 - DNA, 25 bp, Probe Sequence
tgcactggctattcatcttgcactt

SEQ ID NO: 285942 - DNA, 25 bp, Probe Sequence
tgcctgccgaaatttcactttgcgg

SEQ ID NO: 285943 - DNA, 25 bp, Probe Sequence
tgcgtgtggaaacatcatcccgggg

SEQ ID NO: 285944 - DNA, 25 bp, Probe Sequence
tgctgtttacaagacccacgtggag

SEQ ID NO: 285945 - DNA, 25 bp, Probe Sequence
tcctactaaacctaccccaggagag

SEQ ID NO: 285946 - DNA, 25 bp, Probe Sequence
tccttccgaacgcacacttcaggag

SEQ ID NO: 285947 - DNA, 25 bp, Probe Sequence
tgctttggggacctagacctcaggt

SEQ ID NO: 285948 - DNA, 25 bp, Probe Sequence
tgctttgaggtgtagcattacctgg

SEQ ID NO: 285949 - DNA, 25 bp, Probe Sequence
tgcttctggcgatgacatttctaag

SEQ ID NO: 285950 - DNA, 25 bp, Probe Sequence
tgcattctctggcggttgaccaaga

SEQ ID NO: 285951 - DNA, 25 bp, Probe Sequence
tgcattctctggcggttgaccaaga

SEQ ID NO: 285952 - DNA, 25 bp, Probe Sequence
tgcattctctggcggttgaccaaga

SEQ ID NO: 285953 - DNA, 25 bp, Probe Sequence
tgctttcacgggaggcatcacaaaa

SEQ ID NO: 285954 - DNA, 25 bp, Probe Sequence
tgctttcacgggaggcatcacaaaa

SEQ ID NO: 285955 - DNA, 25 bp, Probe Sequence
tgctttgcggggggcagggcagaaa

SEQ ID NO: 285956 - DNA, 25 bp, Probe Sequence
tgctcttggggaaggggacagatta

SEQ ID NO: 285957 - DNA, 25 bp, Probe Sequence
tgcttggggtcaagggacacgcctt

SEQ ID NO: 285958 - DNA, 25 bp, Probe Sequence
tgctaagacgtttaaaacagcctaa

SEQ ID NO: 285959 - DNA, 25 bp, Probe Sequence
tgctagagtttatcaacacagaggt

SEQ ID NO: 285960 - DNA, 25 bp, Probe Sequence
tgctcgagactttaatcccaactgg

SEQ ID NO: 285961 - DNA, 25 bp, Probe Sequence
tgcatctgggcttaaacccataggt

SEQ ID NO: 285962 - DNA, 25 bp, Probe Sequence
tgcacgttgcattaaacctcactga

SEQ ID NO: 285963 - DNA, 25 bp, Probe Sequence
tgcacctgtgcagcgaagcttagcg

SEQ ID NO: 285964 - DNA, 25 bp, Probe Sequence
tgcaccgtagggcatgctgatacca

SEQ ID NO: 285965 - DNA, 25 bp, Probe Sequence
tgcaccgacagtgcagatgcgctca

SEQ ID NO: 285966 - DNA, 25 bp, Probe Sequence
tgcacctccagatatatgctctcga

SEQ ID NO: 285967 - DNA, 25 bp, Probe Sequence
tgcatagccccatctgatttctgca

SEQ ID NO: 285968 - DNA, 25 bp, Probe Sequence
tgctaccacaactatattatcatgc

SEQ ID NO: 285969 - DNA, 25 bp, Probe Sequence
tgctcaagacttcattatttgcctt

SEQ ID NO: 285970 - DNA, 25 bp, Probe Sequence
tgctccgtttgtgtttgtactaatc

SEQ ID NO: 285971 - DNA, 25 bp, Probe Sequence
tgcttttaatttacttgtacaattc

SEQ ID NO: 285972 - DNA, 25 bp, Probe Sequence
tgctttatacattttcttttacttt

SEQ ID NO: 285973 - DNA, 25 bp, Probe Sequence
tgctttatacattttcttttacttt

SEQ ID NO: 285974 - DNA, 25 bp, Probe Sequence
tgcttaagagtttgccttcattagt

SEQ ID NO: 285975 - DNA, 25 bp, Probe Sequence
tgcttaaggatgtgattggatggat

SEQ ID NO: 285976 - DNA, 25 bp, Probe Sequence
tgctatcgtggctgtgactggtgac

SEQ ID NO: 285977 - DNA, 25 bp, Probe Sequence
tcagatcgtccgctactggaactac

SEQ ID NO: 285978 - DNA, 25 bp, Probe Sequence
tcgaagtcgcggtcatcaggaactt

SEQ ID NO: 285979 - DNA, 25 bp, Probe Sequence
tccagagctcggcacaacgaactct

SEQ ID NO: 285980 - DNA, 25 bp, Probe Sequence
tgccaaatgcgtatgccaccaactt

SEQ ID NO: 285981 - DNA, 25 bp, Probe Sequence
tgcttgcaagcgacattcacaccga

SEQ ID NO: 285982 - DNA, 25 bp, Probe Sequence
tgcagactgagcctttgccagtaga

SEQ ID NO: 285983 - DNA, 25 bp, Probe Sequence
tgcagacaagccattgtgagccacc

SEQ ID NO: 285984 - DNA, 25 bp, Probe Sequence
tgcaccaacagcaactgtacctgcc

SEQ ID NO: 285985 - DNA, 25 bp, Probe Sequence
tgcatcacaacacactttcagtcat

SEQ ID NO: 285986 - DNA, 25 bp, Probe Sequence
tgcatataagagttatgttagccag

SEQ ID NO: 285987 - DNA, 25 bp, Probe Sequence
tgcattatcaacatcatattcagcc

SEQ ID NO: 285988 - DNA, 25 bp, Probe Sequence
tgcttgtcaacaccatgttcttcaa

SEQ ID NO: 285989 - DNA, 25 bp, Probe Sequence
tgcaggtcagcacgttgctgtcgat

SEQ ID NO: 285990 - DNA, 25 bp, Probe Sequence
tgcagtacatcaatgggcgtggata

SEQ ID NO: 285991 - DNA, 25 bp, Probe Sequence
tgcagtacatcaatgggcgtggata

SEQ ID NO: 285992 - DNA, 25 bp, Probe Sequence
tgcagaatgcatcacgggatgacta

SEQ ID NO: 285993 - DNA, 25 bp, Probe Sequence
tgcaggtggctagtggtcagactga

SEQ ID NO: 285994 - DNA, 25 bp, Probe Sequence
tgcagtggtgcatgcttgtaatttt

SEQ ID NO: 285995 - DNA, 25 bp, Probe Sequence
tgcaggcgctgcagcagctcttgca

SEQ ID NO: 285996 - DNA, 25 bp, Probe Sequence
tgcaggcgctgcagcagctcttgca

SEQ ID NO: 285997 - DNA, 25 bp, Probe Sequence
tgcaggcgctgcagcagctcttgca

SEQ ID NO: 285998 - DNA, 25 bp, Probe Sequence
tgcagctgccactgagctgtagctg

SEQ ID NO: 285999 - DNA, 25 bp, Probe Sequence
tgcaggccatcaagtgtgtggtggt

SEQ ID NO: 286000 - DNA, 25 bp, Probe Sequence
tgctgtgctacaacgtcggtcagaa

SEQ ID NO: 286001 - DNA, 25 bp, Probe Sequence
tgcttcctctaccatctgggagata

SEQ ID NO: 286002 - DNA, 25 bp, Probe Sequence
tgcatttctcaattgcatcggagaa

SEQ ID NO: 286003 - DNA, 25 bp, Probe Sequence
tgcagtcccagctactcaggagact

SEQ ID NO: 286004 - DNA, 25 bp, Probe Sequence
tgcagagctttacctcttagcacat

SEQ ID NO: 286005 - DNA, 25 bp, Probe Sequence
tgcagagctttggccttgacaacat

SEQ ID NO: 286006 - DNA, 25 bp, Probe Sequence
tgcatactattgtccctgaaaacct

SEQ ID NO: 286007 - DNA, 25 bp, Probe Sequence
tgctttttgccacagcatatttcct

SEQ ID NO: 286008 - DNA, 25 bp, Probe Sequence
tgcttacctgtacagccagtgctac

SEQ ID NO: 286009 - DNA, 25 bp, Probe Sequence
tgcagaacgttacagccacattact

SEQ ID NO: 286010 - DNA, 25 bp, Probe Sequence
tgcagtaattatgttccagattgac

SEQ ID NO: 286011 - DNA, 25 bp, Probe Sequence
tgcacatatttatatttatattcag

SEQ ID NO: 286012 - DNA, 25 bp, Probe Sequence
tgcactattatttgttgctattata

SEQ ID NO: 286013 - DNA, 25 bp, Probe Sequence
tgcacttttgatcttctattgaaat

SEQ ID NO: 286014 - DNA, 25 bp, Probe Sequence
tgcatttcttacccctggtgagaaa

SEQ ID NO: 286015 - DNA, 25 bp, Probe Sequence
tgcatgggctaaaaccaggaaaact

SEQ ID NO: 286016 - DNA, 25 bp, Probe Sequence
tgcataggctagaatctccaggaaa

SEQ ID NO: 286017 - DNA, 25 bp, Probe Sequence
tgcatgggtcatttcccagcatgaa

SEQ ID NO: 286018 - DNA, 25 bp, Probe Sequence
tgcagctttatggttccacagaatg

SEQ ID NO: 286019 - DNA, 25 bp, Probe Sequence
tgcacttctttttgagaaatatgtt

SEQ ID NO: 286020 - DNA, 25 bp, Probe Sequence
tgcacattcctatagcagagaacat

SEQ ID NO: 286021 - DNA, 25 bp, Probe Sequence
tgcacgatccaataggagacaccag

SEQ ID NO: 286022 - DNA, 25 bp, Probe Sequence
tgcactttgtggtggaaatgccagt

SEQ ID NO: 286023 - DNA, 25 bp, Probe Sequence
tgcattgttgtggtccagaaatgcc

SEQ ID NO: 286024 - DNA, 25 bp, Probe Sequence
tgcattttggccttaaagcaaataa

SEQ ID NO: 286025 - DNA, 25 bp, Probe Sequence
tgcagtatcctttaaaagcaaaaaa

SEQ ID NO: 286026 - DNA, 25 bp, Probe Sequence
tgcagtaccactttgataaaaatca

SEQ ID NO: 286027 - DNA, 25 bp, Probe Sequence
tgcagtcacccctgcctaaagatag

SEQ ID NO: 286028 - DNA, 25 bp, Probe Sequence
tgcactccaccctggtgacagagtg

SEQ ID NO: 286029 - DNA, 25 bp, Probe Sequence
tgcactccagtctgggtgacagagc

SEQ ID NO: 286030 - DNA, 25 bp, Probe Sequence
tgcactccagcctgggcgacagagc

SEQ ID NO: 286031 - DNA, 25 bp, Probe Sequence
tgcagtccagcctgggctacagagt

SEQ ID NO: 286032 - DNA, 25 bp, Probe Sequence
tgcagtacaatctggagctggcctt

SEQ ID NO: 286033 - DNA, 25 bp, Probe Sequence
tgcagtacttgatgtattggggtca

SEQ ID NO: 286034 - DNA, 25 bp, Probe Sequence
tgcaggtgtggatgccctgcgggtg

SEQ ID NO: 286035 - DNA, 25 bp, Probe Sequence
tgcagatggggatcctgcttgggcc

SEQ ID NO: 286036 - DNA, 25 bp, Probe Sequence
tgcaggtagtattcacagtgtggtg

SEQ ID NO: 286037 - DNA, 25 bp, Probe Sequence
tgcgagttgctttcagtcattcagg

SEQ ID NO: 286038 - DNA, 25 bp, Probe Sequence
tgcacgttgtgctacattctctaga

SEQ ID NO: 286039 - DNA, 25 bp, Probe Sequence
tgcagcactttgtcatcattcttca

SEQ ID NO: 286040 - DNA, 25 bp, Probe Sequence
tgcagcactatcagtatgttgaatt

SEQ ID NO: 286041 - DNA, 25 bp, Probe Sequence
tgcagctcatgaagccttggagata

SEQ ID NO: 286042 - DNA, 25 bp, Probe Sequence
tgcagcatagctaccttcagaattt

SEQ ID NO: 286043 - DNA, 25 bp, Probe Sequence
tgcagcaagctgatatcatcccatt

SEQ ID NO: 286044 - DNA, 25 bp, Probe Sequence
tgcgaatctgacttacgccattatt

SEQ ID NO: 286045 - DNA, 25 bp, Probe Sequence
tgctagactgagtgactgcagttag

SEQ ID NO: 286046 - DNA, 25 bp, Probe Sequence
tgctaatatccattgaatcggtagt

SEQ ID NO: 286047 - DNA, 25 bp, Probe Sequence
tgctaagtgtactgctgccgaagtt

SEQ ID NO: 286048 - DNA, 25 bp, Probe Sequence
tgctaagtgccctggcaagggtgcc

SEQ ID NO: 286049 - DNA, 25 bp, Probe Sequence
tgctaaagtagctgtgctaggggcc

SEQ ID NO: 286050 - DNA, 25 bp, Probe Sequence
tgcagcaaaataatagcctcggttc

SEQ ID NO: 286051 - DNA, 25 bp, Probe Sequence
tgcagggactagaagcctcagtttc

SEQ ID NO: 286052 - DNA, 25 bp, Probe Sequence
tgcagagtgatcagacagcccattc

SEQ ID NO: 286053 - DNA, 25 bp, Probe Sequence
tgcagcgtgtgctgaccgcattatc

SEQ ID NO: 286054 - DNA, 25 bp, Probe Sequence
tgcatggctgatctactctgttacc

SEQ ID NO: 286055 - DNA, 25 bp, Probe Sequence
tgctgttgaaccatagcttcaccct

SEQ ID NO: 286056 - DNA, 25 bp, Probe Sequence
tgctttcagatgacctacttacatc

SEQ ID NO: 286057 - DNA, 25 bp, Probe Sequence
tgcttgcttgagcttcagcggaatt

SEQ ID NO: 286058 - DNA, 25 bp, Probe Sequence
tgcttagtagccatggaggagagat

SEQ ID NO: 286059 - DNA, 25 bp, Probe Sequence
tgcttggaagcctggacgtgacacg

SEQ ID NO: 286060 - DNA, 25 bp, Probe Sequence
tgcttgtaacagttgtgaggtgatc

SEQ ID NO: 286061 - DNA, 25 bp, Probe Sequence
tgcttgctacgagcggtggctcatg

SEQ ID NO: 286062 - DNA, 25 bp, Probe Sequence
tgcatttgcctagtcgtgtgacctc

SEQ ID NO: 286063 - DNA, 25 bp, Probe Sequence
tgcagcattcctagtcgttgcttca

SEQ ID NO: 286064 - DNA, 25 bp, Probe Sequence
tgcgcattgccgagtatgccttcaa

SEQ ID NO: 286065 - DNA, 25 bp, Probe Sequence
tgcgcattgccgagtatgccttcaa

SEQ ID NO: 286066 - DNA, 25 bp, Probe Sequence
tgcagcaatggcctggtgattccca

SEQ ID NO: 286067 - DNA, 25 bp, Probe Sequence
tgcagcacataggtaggagtccccc

SEQ ID NO: 286068 - DNA, 25 bp, Probe Sequence
tgcagcgcttggtagagcagctcaa

SEQ ID NO: 286069 - DNA, 25 bp, Probe Sequence
tgcaccggcagaaagcagatgaagc

SEQ ID NO: 286070 - DNA, 25 bp, Probe Sequence
tgcagcccgtgctaacatgaaatgc

SEQ ID NO: 286071 - DNA, 25 bp, Probe Sequence
tgcacctcctgcaagaaaagctgct

SEQ ID NO: 286072 - DNA, 25 bp, Probe Sequence
tgcacctcctgcaagaagagctgct

SEQ ID NO: 286073 - DNA, 25 bp, Probe Sequence
tgcagctgtccaaaccagagcttcc

SEQ ID NO: 286074 - DNA, 25 bp, Probe Sequence
tgcagctctcgctgttcaagttcca

SEQ ID NO: 286075 - DNA, 25 bp, Probe Sequence
tgcagctgtctctgttcaaaggaac

SEQ ID NO: 286076 - DNA, 25 bp, Probe Sequence
tgcagtgtcatgttctgtaatagaa

SEQ ID NO: 286077 - DNA, 25 bp, Probe Sequence
tgcagcaggcagctctggaaaatga

SEQ ID NO: 286078 - DNA, 25 bp, Probe Sequence
tgcagcatccagcctttcaaagctg

SEQ ID NO: 286079 - DNA, 25 bp, Probe Sequence
tgcacccagcctggccagaagtgca

SEQ ID NO: 286080 - DNA, 25 bp, Probe Sequence
tgcagcccaactgctcgtggaatgc

SEQ ID NO: 286081 - DNA, 25 bp, Probe Sequence
tgcccgaaccctgcaggaatggtgt

SEQ ID NO: 286082 - DNA, 25 bp, Probe Sequence
tgcccaaacgtggcctggaggtgaa

SEQ ID NO: 286083 - DNA, 25 bp, Probe Sequence
tgctcgtaagtccaccggtgggaaa

SEQ ID NO: 286084 - DNA, 25 bp, Probe Sequence
tgctctacttgcgttgctttagggc

SEQ ID NO: 286085 - DNA, 25 bp, Probe Sequence
tgctcttccgcatcaggtaacaggt

SEQ ID NO: 286086 - DNA, 25 bp, Probe Sequence
tgcttcagaccatcagttacagaga

SEQ ID NO: 286087 - DNA, 25 bp, Probe Sequence
tgcttcgcctctgctggaacaagca

SEQ ID NO: 286088 - DNA, 25 bp, Probe Sequence
tgcttgtgcctgagctgtcaaaagt

SEQ ID NO: 286089 - DNA, 25 bp, Probe Sequence
tgcttgagttgcccttcaaaggtga

SEQ ID NO: 286090 - DNA, 25 bp, Probe Sequence
tgcttctgttacctccaagtggtaa

SEQ ID NO: 286091 - DNA, 25 bp, Probe Sequence
tgctacgtttctaccagtgtttcaa

SEQ ID NO: 286092 - DNA, 25 bp, Probe Sequence
tgctacgcaattctcgattctttga

SEQ ID NO: 286093 - DNA, 25 bp, Probe Sequence
tgcatttgatttctaggtcaattga

SEQ ID NO: 286094 - DNA, 25 bp, Probe Sequence
tgctttgtgtatctcatttaatttg

SEQ ID NO: 286095 - DNA, 25 bp, Probe Sequence
tgctgtttgcttttacttactttca

SEQ ID NO: 286096 - DNA, 25 bp, Probe Sequence
tgcgttttgttattcctactgccgc

SEQ ID NO: 286097 - DNA, 25 bp, Probe Sequence
tgctgtttttccattctacaccatg

SEQ ID NO: 286098 - DNA, 25 bp, Probe Sequence
tctggaattccgatcaacaaaatgg

SEQ ID NO: 286099 - DNA, 25 bp, Probe Sequence
tcgtggctgtcccaacaaaaaatcc

SEQ ID NO: 286100 - DNA, 25 bp, Probe Sequence
tgcagctggattacgcaacagtaaa

SEQ ID NO: 286101 - DNA, 25 bp, Probe Sequence
tgcatccgagacagaacatgctcaa

SEQ ID NO: 286102 - DNA, 25 bp, Probe Sequence
tgcataccaccatgtagcagctaca

SEQ ID NO: 286103 - DNA, 25 bp, Probe Sequence
tgctcacccacattctatgactgga

SEQ ID NO: 286104 - DNA, 25 bp, Probe Sequence
tgcacccactatttatgtctgaatc

SEQ ID NO: 286105 - DNA, 25 bp, Probe Sequence
tgcacccactatttatgtctgaatc

SEQ ID NO: 286106 - DNA, 25 bp, Probe Sequence
tgcacctactttaatgatatagcac

SEQ ID NO: 286107 - DNA, 25 bp, Probe Sequence
tgcacctggctcacaaggatctgac

SEQ ID NO: 286108 - DNA, 25 bp, Probe Sequence
tgcagactggcattaaggctgtgga

SEQ ID NO: 286109 - DNA, 25 bp, Probe Sequence
tgcagacttataagacagcagtgga

SEQ ID NO: 286110 - DNA, 25 bp, Probe Sequence
tgcagatctacagcgccagagtgct

SEQ ID NO: 286111 - DNA, 25 bp, Probe Sequence
tgcagacgcactgcaggcaggcgct

SEQ ID NO: 286112 - DNA, 25 bp, Probe Sequence
tgcatgtgtccgacaggcagcacca

SEQ ID NO: 286113 - DNA, 25 bp, Probe Sequence
tgcatggtcacagtagagatccccg

SEQ ID NO: 286114 - DNA, 25 bp, Probe Sequence
tgcagggagatttctgatgcctctg

SEQ ID NO: 286115 - DNA, 25 bp, Probe Sequence
tgcagagtgagaactttccctaccg

SEQ ID NO: 286116 - DNA, 25 bp, Probe Sequence
tgcagagtgagaactttccctaccg

SEQ ID NO: 286117 - DNA, 25 bp, Probe Sequence
tgcagagaaataagtgacccaacaa

SEQ ID NO: 286118 - DNA, 25 bp, Probe Sequence
tgctgagacaatcttgaacccaaat

SEQ ID NO: 286119 - DNA, 25 bp, Probe Sequence
tgcggcagcgcaacactgaaaccga

SEQ ID NO: 286120 - DNA, 25 bp, Probe Sequence
tgcagccagcctgctcgaaacttta

SEQ ID NO: 286121 - DNA, 25 bp, Probe Sequence
tgcagccagcctgctcgaaacttta

SEQ ID NO: 286122 - DNA, 25 bp, Probe Sequence
tgcacccaacctggataacattgaa

SEQ ID NO: 286123 - DNA, 25 bp, Probe Sequence
tgcaccagcaggtgccatcacgctt

SEQ ID NO: 286124 - DNA, 25 bp, Probe Sequence
tgcaccagcaggtgccatcacgctt

SEQ ID NO: 286125 - DNA, 25 bp, Probe Sequence
tgcaccagcaggtgccatcacgctt

SEQ ID NO: 286126 - DNA, 25 bp, Probe Sequence
tgcagctccaggtacatatcacgcg

SEQ ID NO: 286127 - DNA, 25 bp, Probe Sequence
tgcagcccattaacttctcaggaca

SEQ ID NO: 286128 - DNA, 25 bp, Probe Sequence
tgcaggaccaatgtcctgggccacc

SEQ ID NO: 286129 - DNA, 25 bp, Probe Sequence
tgcagtacagcaccgtcatcgggat

SEQ ID NO: 286130 - DNA, 25 bp, Probe Sequence
tgcagtggagcacagtcaaggagtg

SEQ ID NO: 286131 - DNA, 25 bp, Probe Sequence
tgcagggagcaggaaatcagtgctg

SEQ ID NO: 286132 - DNA, 25 bp, Probe Sequence
tgcagtgcagacgggcgatcctgct

SEQ ID NO: 286133 - DNA, 25 bp, Probe Sequence
tgcggcagcatatgcagcccgtgct

SEQ ID NO: 286134 - DNA, 25 bp, Probe Sequence
tgcagtgagctatgatcacgccgct

SEQ ID NO: 286135 - DNA, 25 bp, Probe Sequence
tgcaggctgcaatcaactgcccaca

SEQ ID NO: 286136 - DNA, 25 bp, Probe Sequence
tgcagtccttcaaagatgaccacca

SEQ ID NO: 286137 - DNA, 25 bp, Probe Sequence
tgcagtcaccgaaagagagcgccta

SEQ ID NO: 286138 - DNA, 25 bp, Probe Sequence
tgcagttccagcttaggaagccaca

SEQ ID NO: 286139 - DNA, 25 bp, Probe Sequence
tgctgttcggctcttgaatcccagc

SEQ ID NO: 286140 - DNA, 25 bp, Probe Sequence
tgctttggtcttcatgtgaactctc

SEQ ID NO: 286141 - DNA, 25 bp, Probe Sequence
tgcgtatacctccgatgtgaaaccc

SEQ ID NO: 286142 - DNA, 25 bp, Probe Sequence
tgctgttccccgcaatgatgaatgg

SEQ ID NO: 286143 - DNA, 25 bp, Probe Sequence
tgcagacggccgggaagctggtggc

SEQ ID NO: 286144 - DNA, 25 bp, Probe Sequence
tgcacctgagccgtggaggggctga

SEQ ID NO: 286145 - DNA, 25 bp, Probe Sequence
tgcaccgggagttgagggagcagac

SEQ ID NO: 286146 - DNA, 25 bp, Probe Sequence
tgcaggccgtgagagcagcgggcaa

SEQ ID NO: 286147 - DNA, 25 bp, Probe Sequence
tgcagccctgtgtcatcagttggga

SEQ ID NO: 286148 - DNA, 25 bp, Probe Sequence
tgctctactctgtatggcttgagga

SEQ ID NO: 286149 - DNA, 25 bp, Probe Sequence
tgctaaggctaaagttgatctgaac

SEQ ID NO: 286150 - DNA, 25 bp, Probe Sequence
tgctaagtcaagggttcactgcatt

SEQ ID NO: 286151 - DNA, 25 bp, Probe Sequence
tgcatgacttcaggcaagttactca

SEQ ID NO: 286152 - DNA, 25 bp, Probe Sequence
tgcagagcttcacgcactatcgata

SEQ ID NO: 286153 - DNA, 25 bp, Probe Sequence
tgcagagcacatttgcctactaatg

SEQ ID NO: 286154 - DNA, 25 bp, Probe Sequence
tgctggcactgagtgcctcatctcc

SEQ ID NO: 286155 - DNA, 25 bp, Probe Sequence
tgctggcactgagtgcctcatctcc

SEQ ID NO: 286156 - DNA, 25 bp, Probe Sequence
tgcatgtgcatcaaggccagtccta

SEQ ID NO: 286157 - DNA, 25 bp, Probe Sequence
tgcagtttagccatgtcctcaagat

SEQ ID NO: 286158 - DNA, 25 bp, Probe Sequence
tgcagtttggtcagctcctgacaca

SEQ ID NO: 286159 - DNA, 25 bp, Probe Sequence
tgcttttggcactgctcacagagcc

SEQ ID NO: 286160 - DNA, 25 bp, Probe Sequence
tgcttgtccctattgcctaggactc

SEQ ID NO: 286161 - DNA, 25 bp, Probe Sequence
tgcttgggaagactcctagctgtcc

SEQ ID NO: 286162 - DNA, 25 bp, Probe Sequence
tgctttggatagtctcctacgcacc

SEQ ID NO: 286163 - DNA, 25 bp, Probe Sequence
tgcatgtttatagctccagccaggc

SEQ ID NO: 286164 - DNA, 25 bp, Probe Sequence
tgctcattgtataagccccgaggcc

SEQ ID NO: 286165 - DNA, 25 bp, Probe Sequence
tgctcattagtatcccctgggaaga

SEQ ID NO: 286166 - DNA, 25 bp, Probe Sequence
tgctttcagttagccttctgtagga

SEQ ID NO: 286167 - DNA, 25 bp, Probe Sequence
tgctttagtttcttctccgtaaaat

SEQ ID NO: 286168 - DNA, 25 bp, Probe Sequence
tgcattttgtctacttgtaagtgaa

SEQ ID NO: 286169 - DNA, 25 bp, Probe Sequence
tgctttgtgtgtctgttaaatgaat

SEQ ID NO: 286170 - DNA, 25 bp, Probe Sequence
tgctttctggtttgttaattgtgta

SEQ ID NO: 286171 - DNA, 25 bp, Probe Sequence
tgcagtttattttgttatgttggat

SEQ ID NO: 286172 - DNA, 25 bp, Probe Sequence
tgcagaatttttaagctatgagggg

SEQ ID NO: 286173 - DNA, 25 bp, Probe Sequence
tgcagacattcattattagctccat

SEQ ID NO: 286174 - DNA, 25 bp, Probe Sequence
tgcagtcacatttaatcacatcccc

SEQ ID NO: 286175 - DNA, 25 bp, Probe Sequence
tgcatatggttctactcagcatccc

SEQ ID NO: 286176 - DNA, 25 bp, Probe Sequence
tgcataggaggctctcgatagcacc

SEQ ID NO: 286177 - DNA, 25 bp, Probe Sequence
tgctctggggatctccagcagcatc

SEQ ID NO: 286178 - DNA, 25 bp, Probe Sequence
tgcagtcagggtctgcgcacagtca

SEQ ID NO: 286179 - DNA, 25 bp, Probe Sequence
tgcggcggcaatcgtgcgcaatgaa

SEQ ID NO: 286180 - DNA, 25 bp, Probe Sequence
tgcggcggaatcacaggctgattac

SEQ ID NO: 286181 - DNA, 25 bp, Probe Sequence
tctggctggttcagggggtcagtta

SEQ ID NO: 286182 - DNA, 25 bp, Probe Sequence
tgctgggtttttgctggtgtcttta

SEQ ID NO: 286183 - DNA, 25 bp, Probe Sequence
tgctgtcgtttcagacttggatcct

SEQ ID NO: 286184 - DNA, 25 bp, Probe Sequence
tgctgtacttcctgcagctggaggc

SEQ ID NO: 286185 - DNA, 25 bp, Probe Sequence
tgctgtacttcctgcagctggaggc

SEQ ID NO: 286186 - DNA, 25 bp, Probe Sequence
tgcatgttcctcaggcctatgcagt

SEQ ID NO: 286187 - DNA, 25 bp, Probe Sequence
tgcatttgcctaggacttctcagct

SEQ ID NO: 286188 - DNA, 25 bp, Probe Sequence
tgcagaggcctatgttttcactcct

SEQ ID NO: 286189 - DNA, 25 bp, Probe Sequence
tgcgaggaaaagttgattcgtccat

SEQ ID NO: 286190 - DNA, 25 bp, Probe Sequence
tgccaggaaacgatttgggcctctg

SEQ ID NO: 286191 - DNA, 25 bp, Probe Sequence
tgcagcaggaacccacttaggtggc

SEQ ID NO: 286192 - DNA, 25 bp, Probe Sequence
tgcagaggagacggcagcctgggtc

SEQ ID NO: 286193 - DNA, 25 bp, Probe Sequence
tgcagagtgaaaagcacacaggctt

SEQ ID NO: 286194 - DNA, 25 bp, Probe Sequence
tgcaggtgaagatgcgcaaacgcta

SEQ ID NO: 286195 - DNA, 25 bp, Probe Sequence
tgcagttgcaagagtgcccacagcc

SEQ ID NO: 286196 - DNA, 25 bp, Probe Sequence
tgcaggtggatgaggtgcccagcca

SEQ ID NO: 286197 - DNA, 25 bp, Probe Sequence
tgcagggcaatatgggccacgccag

SEQ ID NO: 286198 - DNA, 25 bp, Probe Sequence
tgcatggagttccagtaccaggcca

SEQ ID NO: 286199 - DNA, 25 bp, Probe Sequence
tgcagtgagttgcagtcacacccct

SEQ ID NO: 286200 - DNA, 25 bp, Probe Sequence
tgcagtgagttatgatcgcaccact

SEQ ID NO: 286201 - DNA, 25 bp, Probe Sequence
tgcagtaagctgagatcgcaccact

SEQ ID NO: 286202 - DNA, 25 bp, Probe Sequence
tgcataaatcatacgagccccaatt

SEQ ID NO: 286203 - DNA, 25 bp, Probe Sequence
tgcatcaaatctacagtcacacaat

SEQ ID NO: 286204 - DNA, 25 bp, Probe Sequence
tgcatctcagcagtagggaaaatca

SEQ ID NO: 286205 - DNA, 25 bp, Probe Sequence
tgcatggctcattaggttcaaatta

SEQ ID NO: 286206 - DNA, 25 bp, Probe Sequence
tgcagagccaacttttctgtatata

SEQ ID NO: 286207 - DNA, 25 bp, Probe Sequence
tgcagagcctcgtatgtttgtcagt

SEQ ID NO: 286208 - DNA, 25 bp, Probe Sequence
tgcagctttgccttgacttgtgcag

SEQ ID NO: 286209 - DNA, 25 bp, Probe Sequence
tgcagttctcctggagttcgctgag

SEQ ID NO: 286210 - DNA, 25 bp, Probe Sequence
tgcagtactgcatcgagtgggctgc

SEQ ID NO: 286211 - DNA, 25 bp, Probe Sequence
tgcagctgcccaccgcaagggcagc

SEQ ID NO: 286212 - DNA, 25 bp, Probe Sequence
tgcagtggccccaaagatggcccac

SEQ ID NO: 286213 - DNA, 25 bp, Probe Sequence
tgcaggaggcaattaggattgccca

SEQ ID NO: 286214 - DNA, 25 bp, Probe Sequence
tgcggaggaacattggtgttacagc

SEQ ID NO: 286215 - DNA, 25 bp, Probe Sequence
tgcgggtgcactatggcttgtacaa

SEQ ID NO: 286216 - DNA, 25 bp, Probe Sequence
tgctgggtgattttagtctctacaa

SEQ ID NO: 286217 - DNA, 25 bp, Probe Sequence
tgcggctggatggaaactacttgaa

SEQ ID NO: 286218 - DNA, 25 bp, Probe Sequence
tgcgactggagcacactcatttttt

SEQ ID NO: 286219 - DNA, 25 bp, Probe Sequence
tgcaggcaaggcagaggcatttttt

SEQ ID NO: 286220 - DNA, 25 bp, Probe Sequence
tgcagtcggtcaagaggaggatttt

SEQ ID NO: 286221 - DNA, 25 bp, Probe Sequence
tgctgtcgattaagaccggagcttg

SEQ ID NO: 286222 - DNA, 25 bp, Probe Sequence
tgctgttgttaaagagcctatgggg

SEQ ID NO: 286223 - DNA, 25 bp, Probe Sequence
tgctctttgtaatatcggatgggtg

SEQ ID NO: 286224 - DNA, 25 bp, Probe Sequence
tgctttggtcgaacttggtgtgtgt

SEQ ID NO: 286225 - DNA, 25 bp, Probe Sequence
tgcttcggcatccaactgctgaatg

SEQ ID NO: 286226 - DNA, 25 bp, Probe Sequence
tgctaccgcatcaacctgcagatgc

SEQ ID NO: 286227 - DNA, 25 bp, Probe Sequence
tgctgaaccatgcacctagtgtcca

SEQ ID NO: 286228 - DNA, 25 bp, Probe Sequence
tgctgaaccatgcacctagtgtcca

SEQ ID NO: 286229 - DNA, 25 bp, Probe Sequence
tgctacccagccacgatggatgaca

SEQ ID NO: 286230 - DNA, 25 bp, Probe Sequence
tgctacccagccacgatggatgaca

SEQ ID NO: 286231 - DNA, 25 bp, Probe Sequence
tgctacgtggccagcacggatgcag

SEQ ID NO: 286232 - DNA, 25 bp, Probe Sequence
tgctacgaacaaaacgcagcgcatg

SEQ ID NO: 286233 - DNA, 25 bp, Probe Sequence
tgctacgaacgctccaacgagtacc

SEQ ID NO: 286234 - DNA, 25 bp, Probe Sequence
tgctacgaacgctccaacgagtacc

SEQ ID NO: 286235 - DNA, 25 bp, Probe Sequence
tgctcctagaccaccatttagtact

SEQ ID NO: 286236 - DNA, 25 bp, Probe Sequence
tgcttaggtccgtcacatttcagaa

SEQ ID NO: 286237 - DNA, 25 bp, Probe Sequence
tgcttcagacccatctatatttaaa

SEQ ID NO: 286238 - DNA, 25 bp, Probe Sequence
tgcccaaccatcagctatcatagta

SEQ ID NO: 286239 - DNA, 25 bp, Probe Sequence
tgccctacgatggcctaacaggagt

SEQ ID NO: 286240 - DNA, 25 bp, Probe Sequence
tgcggcaacctggtgtatacaggtg

SEQ ID NO: 286241 - DNA, 25 bp, Probe Sequence
tgcttcacacctctgcttggagagg

SEQ ID NO: 286242 - DNA, 25 bp, Probe Sequence
tgctcataacctctcagcctgagga

SEQ ID NO: 286243 - DNA, 25 bp, Probe Sequence
tgctcataacctctcagcctgagga

SEQ ID NO: 286244 - DNA, 25 bp, Probe Sequence
tgctcataacctctcagcctgagga

SEQ ID NO: 286245 - DNA, 25 bp, Probe Sequence
tgctcataacctctcagcctgagga

SEQ ID NO: 286246 - DNA, 25 bp, Probe Sequence
tgctatcatcaagtttccgctgacc

SEQ ID NO: 286247 - DNA, 25 bp, Probe Sequence
tgcatatctggcttctacggtgatc

SEQ ID NO: 286248 - DNA, 25 bp, Probe Sequence
tgcagatgcgtttcgacgggctgct

SEQ ID NO: 286249 - DNA, 25 bp, Probe Sequence
tgcagaggtaactctcaggcagcta

SEQ ID NO: 286250 - DNA, 25 bp, Probe Sequence
tgcagaagggaccctgcgtgcagtg

SEQ ID NO: 286251 - DNA, 25 bp, Probe Sequence
tgcagagagcggggccatggagggg

SEQ ID NO: 286252 - DNA, 25 bp, Probe Sequence
tgcagggtggtgctgggactgagcc

SEQ ID NO: 286253 - DNA, 25 bp, Probe Sequence
tgcaggcctgttctgaggcaataac

SEQ ID NO: 286254 - DNA, 25 bp, Probe Sequence
tgcagggtgattatgagccaactga

SEQ ID NO: 286255 - DNA, 25 bp, Probe Sequence
tgcagtggtttcagaggcagatctg

SEQ ID NO: 286256 - DNA, 25 bp, Probe Sequence
tgcggggttctgacaagctgccgag

SEQ ID NO: 286257 - DNA, 25 bp, Probe Sequence
tgcggtggttgacgtagtgctcgaa

SEQ ID NO: 286258 - DNA, 25 bp, Probe Sequence
tgcagagctagtggatgtgtttgtc

SEQ ID NO: 286259 - DNA, 25 bp, Probe Sequence
tgcaggctactccatgtttggggct

SEQ ID NO: 286260 - DNA, 25 bp, Probe Sequence
tgcatgggtcatttgtcttgggtgt

SEQ ID NO: 286261 - DNA, 25 bp, Probe Sequence
tgcagggctttttcttcgcatattt

SEQ ID NO: 286262 - DNA, 25 bp, Probe Sequence
tgcgggattgtttcaaccttttcac

SEQ ID NO: 286263 - DNA, 25 bp, Probe Sequence
tgctgggttggtgcacagtgatttt

SEQ ID NO: 286264 - DNA, 25 bp, Probe Sequence
tgcatcggattggttagccttcatt

SEQ ID NO: 286265 - DNA, 25 bp, Probe Sequence
tgcatcgtgattcctgtccattgga

SEQ ID NO: 286266 - DNA, 25 bp, Probe Sequence
tgcatgtggatcaaccatcgcttta

SEQ ID NO: 286267 - DNA, 25 bp, Probe Sequence
tgcatgcgagggaccattgcgtggc

SEQ ID NO: 286268 - DNA, 25 bp, Probe Sequence
tgcaggctgaggtcctggagtgcgt

SEQ ID NO: 286269 - DNA, 25 bp, Probe Sequence
tgcaggtgaggcttcaggggatgct

SEQ ID NO: 286270 - DNA, 25 bp, Probe Sequence
tgcaggagaccttcagcgggatgga

SEQ ID NO: 286271 - DNA, 25 bp, Probe Sequence
tgcaggaagcccagcgggcaggcat

SEQ ID NO: 286272 - DNA, 25 bp, Probe Sequence
tgcaggaagcccagcgggcaggcat

SEQ ID NO: 286273 - DNA, 25 bp, Probe Sequence
tgcaggtccccagcgtgggagtgaa

SEQ ID NO: 286274 - DNA, 25 bp, Probe Sequence
tgctgttcgaccagcggcaggtgta

SEQ ID NO: 286275 - DNA, 25 bp, Probe Sequence
tgctgaatgcttgctacgagcggtg

SEQ ID NO: 286276 - DNA, 25 bp, Probe Sequence
tgctgatataatggccaagaggaat

SEQ ID NO: 286277 - DNA, 25 bp, Probe Sequence
tgcatttagatcacatgagagcaaa

SEQ ID NO: 286278 - DNA, 25 bp, Probe Sequence
tgcattcatcagtcacatgggaaca

SEQ ID NO: 286279 - DNA, 25 bp, Probe Sequence
tgcttcatcttccagtgctgataat

SEQ ID NO: 286280 - DNA, 25 bp, Probe Sequence
tgcatcatctttggcagacagagaa

SEQ ID NO: 286281 - DNA, 25 bp, Probe Sequence
tgcagatgcatgctctgctacacca

SEQ ID NO: 286282 - DNA, 25 bp, Probe Sequence
tgctgacatggcttctatcacaacc

SEQ ID NO: 286283 - DNA, 25 bp, Probe Sequence
tgcatatgaggcattgtgctcaatg

SEQ ID NO: 286284 - DNA, 25 bp, Probe Sequence
tgcatagcacagctcagtcctgagc

SEQ ID NO: 286285 - DNA, 25 bp, Probe Sequence
tgcatagacagaacagggcgcgctc

SEQ ID NO: 286286 - DNA, 25 bp, Probe Sequence
tgcattgaggatagatgcaggcggg

SEQ ID NO: 286287 - DNA, 25 bp, Probe Sequence
tgcagtgtcatgtgagggcgtcagt

SEQ ID NO: 286288 - DNA, 25 bp, Probe Sequence
tgcatgtgtctgtgttcgtgtaggc

SEQ ID NO: 286289 - DNA, 25 bp, Probe Sequence
tgcatgtgtctgtgttcgtgtaggc

SEQ ID NO: 286290 - DNA, 25 bp, Probe Sequence
tgcagtgtgttcatccgttgctgcc

SEQ ID NO: 286291 - DNA, 25 bp, Probe Sequence
tgcgtgtttaatgatgatgactccg

SEQ ID NO: 286292 - DNA, 25 bp, Probe Sequence
tgcgctgattttagccagccactgg

SEQ ID NO: 286293 - DNA, 25 bp, Probe Sequence
tgctcatctctattctatagtcctg

SEQ ID NO: 286294 - DNA, 25 bp, Probe Sequence
tgcatgctcaatttctaggtccttt

SEQ ID NO: 286295 - DNA, 25 bp, Probe Sequence
tgccgaaatagctggtcctttttcg

SEQ ID NO: 286296 - DNA, 25 bp, Probe Sequence
tgcggaagtagcttgcctcacttct

SEQ ID NO: 286297 - DNA, 25 bp, Probe Sequence
tgcggaggtcaatgccgacgtggta

SEQ ID NO: 286298 - DNA, 25 bp, Probe Sequence
tgcagtgaggccaggcacctcagtg

SEQ ID NO: 286299 - DNA, 25 bp, Probe Sequence
tgcagtgcaccctggctacgggttc

SEQ ID NO: 286300 - DNA, 25 bp, Probe Sequence
tgcttgctaccgtgttcggagtctc

SEQ ID NO: 286301 - DNA, 25 bp, Probe Sequence
tgcttgctaccgtgttcggagtctc

SEQ ID NO: 286302 - DNA, 25 bp, Probe Sequence
tgctatctactggtcctttggaatt

SEQ ID NO: 286303 - DNA, 25 bp, Probe Sequence
tgcttcattctgctactttgtaact

SEQ ID NO: 286304 - DNA, 25 bp, Probe Sequence
tgctagatttcgtattctagtagtc

SEQ ID NO: 286305 - DNA, 25 bp, Probe Sequence
tgctagactcctatcttctgaattc

SEQ ID NO: 286306 - DNA, 25 bp, Probe Sequence
tgctagcatctgtgaacttgtgaca

SEQ ID NO: 286307 - DNA, 25 bp, Probe Sequence
tgctgatgcaagtaagggtgatgac

SEQ ID NO: 286308 - DNA, 25 bp, Probe Sequence
tgcatggcaaattctgtggcgctga

SEQ ID NO: 286309 - DNA, 25 bp, Probe Sequence
tgcagtgcagcagtaattatggtgc

SEQ ID NO: 286310 - DNA, 25 bp, Probe Sequence
tgcagatgatcacatttatggagat

SEQ ID NO: 286311 - DNA, 25 bp, Probe Sequence
tgcagtatctgcgtttatctcacaa

SEQ ID NO: 286312 - DNA, 25 bp, Probe Sequence
tgcagtcatcatgtgtgccaccatc

SEQ ID NO: 286313 - DNA, 25 bp, Probe Sequence
tgcatgccacagtagatgtccacat

SEQ ID NO: 286314 - DNA, 25 bp, Probe Sequence
tgcttactgtagtaccacactgttt

SEQ ID NO: 286315 - DNA, 25 bp, Probe Sequence
tgctgataccaatatcaccagcatt

SEQ ID NO: 286316 - DNA, 25 bp, Probe Sequence
tgcttcccaagatcctcagcaggga

SEQ ID NO: 286317 - DNA, 25 bp, Probe Sequence
tgcttcccagcctcacaatgtggga

SEQ ID NO: 286318 - DNA, 25 bp, Probe Sequence
tgcattcactccgtttccagtgagc

SEQ ID NO: 286319 - DNA, 25 bp, Probe Sequence
tgctaactccttaactcaggtgcca

SEQ ID NO: 286320 - DNA, 25 bp, Probe Sequence
tgctcagagctcattagacatcgga

SEQ ID NO: 286321 - DNA, 25 bp, Probe Sequence
tgctgcagagtcctatggagtagta

SEQ ID NO: 286322 - DNA, 25 bp, Probe Sequence
tgctgaagatgcctagcgtggccca

SEQ ID NO: 286323 - DNA, 25 bp, Probe Sequence
tgctgacagctatagggagccccag

SEQ ID NO: 286324 - DNA, 25 bp, Probe Sequence
tgcttatggcatgagggacctctcg

SEQ ID NO: 286325 - DNA, 25 bp, Probe Sequence
tgctaaagtctgagtcatctgcttc

SEQ ID NO: 286326 - DNA, 25 bp, Probe Sequence
tgcttgaacctgaggcactgcacac

SEQ ID NO: 286327 - DNA, 25 bp, Probe Sequence
tgcttatggcacaatttgcctcaaa

SEQ ID NO: 286328 - DNA, 25 bp, Probe Sequence
tgctgatcgtgctaaattttcagta

SEQ ID NO: 286329 - DNA, 25 bp, Probe Sequence
tgctgaggtgaaaaaatctgatgtt

SEQ ID NO: 286330 - DNA, 25 bp, Probe Sequence
tgctagtgtatgagttgttgttggg

SEQ ID NO: 286331 - DNA, 25 bp, Probe Sequence
tgctaggtgtgtggggtgtttcgcc

SEQ ID NO: 286332 - DNA, 25 bp, Probe Sequence
tgcctcattttgggcctggttggcc

SEQ ID NO: 286333 - DNA, 25 bp, Probe Sequence
tgctcaattttggtcctgctgtttt

SEQ ID NO: 286334 - DNA, 25 bp, Probe Sequence
tgctatttcctggtacagtgtagtt

SEQ ID NO: 286335 - DNA, 25 bp, Probe Sequence
tgcttcggcctggataagagcccct

SEQ ID NO: 286336 - DNA, 25 bp, Probe Sequence
tgcaggggtctgggagtcaggcccg

SEQ ID NO: 286337 - DNA, 25 bp, Probe Sequence
tgcatggggctgtggagtgggtgtc

SEQ ID NO: 286338 - DNA, 25 bp, Probe Sequence
tgctgcagctggtggacgaggtggt

SEQ ID NO: 286339 - DNA, 25 bp, Probe Sequence
tgctaatgaaggtacagttgtggtc

SEQ ID NO: 286340 - DNA, 25 bp, Probe Sequence
tgcttagacagtcagcatttgtctc

SEQ ID NO: 286341 - DNA, 25 bp, Probe Sequence
tgcattgggagttggcttgcttcat

SEQ ID NO: 286342 - DNA, 25 bp, Probe Sequence
tgcatggggaggtcagcttgagcta

SEQ ID NO: 286343 - DNA, 25 bp, Probe Sequence
tgcaggggatggcctgatcgagctg

SEQ ID NO: 286344 - DNA, 25 bp, Probe Sequence
tgcagggcctggtcatatcacagat

SEQ ID NO: 286345 - DNA, 25 bp, Probe Sequence
tgcagggcattccaatatcacagta

SEQ ID NO: 286346 - DNA, 25 bp, Probe Sequence
tgcaggaatctccacacaaatgtcc

SEQ ID NO: 286347 - DNA, 25 bp, Probe Sequence
tgcgtgcatactctctgtaattcca

SEQ ID NO: 286348 - DNA, 25 bp, Probe Sequence
tgctggcagaactacctggacttcc

SEQ ID NO: 286349 - DNA, 25 bp, Probe Sequence
tgctggaaacagactcgattcatat

SEQ ID NO: 286350 - DNA, 25 bp, Probe Sequence
tgctgaacgtcagccggatcatcgt

SEQ ID NO: 286351 - DNA, 25 bp, Probe Sequence
tgcgcaccttataccagaattcagt

SEQ ID NO: 286352 - DNA, 25 bp, Probe Sequence
tgcaggccttttggaacatctcaga

SEQ ID NO: 286353 - DNA, 25 bp, Probe Sequence
tgcaggtcttacagcaactcttcca

SEQ ID NO: 286354 - DNA, 25 bp, Probe Sequence
tgcagtacaatagcgtcttcttcca

SEQ ID NO: 286355 - DNA, 25 bp, Probe Sequence
tgcagtcaaaatccctcactttaga

SEQ ID NO: 286356 - DNA, 25 bp, Probe Sequence
tgcagtccaagtcctctagtgcaac

SEQ ID NO: 286357 - DNA, 25 bp, Probe Sequence
tgcagtccataattcacaaggagag

SEQ ID NO: 286358 - DNA, 25 bp, Probe Sequence
tccatcaggaattcacagacgagaa

SEQ ID NO: 286359 - DNA, 25 bp, Probe Sequence
tgctctaggagttcctggccagtca

SEQ ID NO: 286360 - DNA, 25 bp, Probe Sequence
tgctctagtagttcctggcaaactg

SEQ ID NO: 286361 - DNA, 25 bp, Probe Sequence
tgctgctgggcatttcacttaaaga

SEQ ID NO: 286362 - DNA, 25 bp, Probe Sequence
tgcggtggatataccctgaaagtcc

SEQ ID NO: 286363 - DNA, 25 bp, Probe Sequence
tgcagtcgtgtaattggcccaagtc

SEQ ID NO: 286364 - DNA, 25 bp, Probe Sequence
tgcaggcggcatagttgggcccatt

SEQ ID NO: 286365 - DNA, 25 bp, Probe Sequence
tgcaggcggcatagttgggcccatt

SEQ ID NO: 286366 - DNA, 25 bp, Probe Sequence
tgcggtgtgcggatgatgtggccta

SEQ ID NO: 286367 - DNA, 25 bp, Probe Sequence
tgcagggtgctgcattgagggctcc

SEQ ID NO: 286368 - DNA, 25 bp, Probe Sequence
tgcaggtagcaggattgcaggaccc

SEQ ID NO: 286369 - DNA, 25 bp, Probe Sequence
tgctgatgtgaccagtggcaggcac

SEQ ID NO: 286370 - DNA, 25 bp, Probe Sequence
tgctcaatcacaaggtgcatgccat

SEQ ID NO: 286371 - DNA, 25 bp, Probe Sequence
tgctcatacagcaggccatagaccc

SEQ ID NO: 286372 - DNA, 25 bp, Probe Sequence
tgctcatacagcaggccatagaccc

SEQ ID NO: 286373 - DNA, 25 bp, Probe Sequence
tgcatcaactgaacgcaaatcagcc

SEQ ID NO: 286374 - DNA, 25 bp, Probe Sequence
tgcataacttcaaaatcatgcttct

SEQ ID NO: 286375 - DNA, 25 bp, Probe Sequence
tgcattactctggtggattgttcta

SEQ ID NO: 286376 - DNA, 25 bp, Probe Sequence
tgcatatactgtctctgtttgcatc

SEQ ID NO: 286377 - DNA, 25 bp, Probe Sequence
tgcatgtagaagtttgtcttcatca

SEQ ID NO: 286378 - DNA, 25 bp, Probe Sequence
tgcagtgcccagtcattgctgttaa

SEQ ID NO: 286379 - DNA, 25 bp, Probe Sequence
tgcatttctcagtcggtgtgtaatc

SEQ ID NO: 286380 - DNA, 25 bp, Probe Sequence
tgcatttctcagtcggtgtgtaatc

SEQ ID NO: 286381 - DNA, 25 bp, Probe Sequence
tgcatctgtcatagtctgggtacca

SEQ ID NO: 286382 - DNA, 25 bp, Probe Sequence
tgctctgtccgtggatgaggccacc

SEQ ID NO: 286383 - DNA, 25 bp, Probe Sequence
tgccgatgccgtaaaagcaagtgct

SEQ ID NO: 286384 - DNA, 25 bp, Probe Sequence
tgctggttcgtccacaacaacggag

SEQ ID NO: 286385 - DNA, 25 bp, Probe Sequence
tgcttgttcaggcacgccagaagga

SEQ ID NO: 286386 - DNA, 25 bp, Probe Sequence
tgcttgtacaagcttgccaaagata

SEQ ID NO: 286387 - DNA, 25 bp, Probe Sequence
tgctttatcgtgagctctcggtgca

SEQ ID NO: 286388 - DNA, 25 bp, Probe Sequence
tgctttctgaagatgctacagggaa

SEQ ID NO: 286389 - DNA, 25 bp, Probe Sequence
tgctcttttagtttgacatggtgtt

SEQ ID NO: 286390 - DNA, 25 bp, Probe Sequence
tgcttgttctccaaatttggatgta

SEQ ID NO: 286391 - DNA, 25 bp, Probe Sequence
tgcgtgtgacctgtgaagtggtgta

SEQ ID NO: 286392 - DNA, 25 bp, Probe Sequence
tgcattggatttggggagtggttaa

SEQ ID NO: 286393 - DNA, 25 bp, Probe Sequence
tgcttggattctacgtgcagcgggt

SEQ ID NO: 286394 - DNA, 25 bp, Probe Sequence
tgctttcacacggcagtgtgctggg

SEQ ID NO: 286395 - DNA, 25 bp, Probe Sequence
tgcttgttcgcggatctggcagagc

SEQ ID NO: 286396 - DNA, 25 bp, Probe Sequence
tgctttccgcgtacagaagtgcttg

SEQ ID NO: 286397 - DNA, 25 bp, Probe Sequence
tgcttttccaccagaatgtgctgct

SEQ ID NO: 286398 - DNA, 25 bp, Probe Sequence
tgctttgatcaacaggacatggcct

SEQ ID NO: 286399 - DNA, 25 bp, Probe Sequence
tgctttgagcagtttggtcaactta

SEQ ID NO: 286400 - DNA, 25 bp, Probe Sequence
tgctcacatgaggcttcggttcatc

SEQ ID NO: 286401 - DNA, 25 bp, Probe Sequence
tgcatcatctgtcttgcgtgctatt

SEQ ID NO: 286402 - DNA, 25 bp, Probe Sequence
tgcatccatgtttccagtgtttcgg

SEQ ID NO: 286403 - DNA, 25 bp, Probe Sequence
tgctcctggtccttggtttcaaggc

SEQ ID NO: 286404 - DNA, 25 bp, Probe Sequence
tgcttctgtgtccagttttctaatg

SEQ ID NO: 286405 - DNA, 25 bp, Probe Sequence
tgctttcgtgtaaattatgtaatgc

SEQ ID NO: 286406 - DNA, 25 bp, Probe Sequence
tgctcgctgggtaacatacttcaac

SEQ ID NO: 286407 - DNA, 25 bp, Probe Sequence
tgcattgggcattctacatactggc

SEQ ID NO: 286408 - DNA, 25 bp, Probe Sequence
tgctagggcattacaatcctgtcct

SEQ ID NO: 286409 - DNA, 25 bp, Probe Sequence
tgcatagttgcgtaggatcctgttt

SEQ ID NO: 286410 - DNA, 25 bp, Probe Sequence
tgcatagttcagaagccctcacttt

SEQ ID NO: 286411 - DNA, 25 bp, Probe Sequence
tgctaatgttgcacacttactaaaa

SEQ ID NO: 286412 - DNA, 25 bp, Probe Sequence
tgctaatgacgacacctagctctaa

SEQ ID NO: 286413 - DNA, 25 bp, Probe Sequence
tgcatagaattgttaccaacctcca

SEQ ID NO: 286414 - DNA, 25 bp, Probe Sequence
tgctagaagctgtctaggtccgtcc

SEQ ID NO: 286415 - DNA, 25 bp, Probe Sequence
tgctggcaacagggaggaccagatc

SEQ ID NO: 286416 - DNA, 25 bp, Probe Sequence
tgctctgcaaaaggagagactccca

SEQ ID NO: 286417 - DNA, 25 bp, Probe Sequence
tgcatctgcaaaggggcgtcggaca

SEQ ID NO: 286418 - DNA, 25 bp, Probe Sequence
tgcatgtcaagtccgtcttcaggca

SEQ ID NO: 286419 - DNA, 25 bp, Probe Sequence
tgcatgtcttttagccattcatgaa

SEQ ID NO: 286420 - DNA, 25 bp, Probe Sequence
tgcagtgtttataggcttcttgtgt

SEQ ID NO: 286421 - DNA, 25 bp, Probe Sequence
tgcatggcattaattgttccttgct

SEQ ID NO: 286422 - DNA, 25 bp, Probe Sequence
tgctgccttgacagttcatcttcag

SEQ ID NO: 286423 - DNA, 25 bp, Probe Sequence
tgctagcttgacagtgctcacacct

SEQ ID NO: 286424 - DNA, 25 bp, Probe Sequence
tgctatccaggctgtgctatccctg

SEQ ID NO: 286425 - DNA, 25 bp, Probe Sequence
tgctctccagaggctagtgttccta

SEQ ID NO: 286426 - DNA, 25 bp, Probe Sequence
tgctcttaaacttggtgtgactgct

SEQ ID NO: 286427 - DNA, 25 bp, Probe Sequence
tgcttgtacatagagtgctgtagct

SEQ ID NO: 286428 - DNA, 25 bp, Probe Sequence
tgcttttcactgtgtgatgatcctt

SEQ ID NO: 286429 - DNA, 25 bp, Probe Sequence
tgcttcttcttgtcagagctcatcc

SEQ ID NO: 286430 - DNA, 25 bp, Probe Sequence
tgcatgcctgtagtaccagctgctc

SEQ ID NO: 286431 - DNA, 25 bp, Probe Sequence
tgctgcagcctgggaccaggcaccc

SEQ ID NO: 286432 - DNA, 25 bp, Probe Sequence
tgctgtggctgcagaccaacaaatc

SEQ ID NO: 286433 - DNA, 25 bp, Probe Sequence
tgctgtgtgcggggagcgaaaatca

SEQ ID NO: 286434 - DNA, 25 bp, Probe Sequence
tgctattgcaggaggccacactgat

SEQ ID NO: 286435 - DNA, 25 bp, Probe Sequence
tgctcttggtaccaggagctctgat

SEQ ID NO: 286436 - DNA, 25 bp, Probe Sequence
tgctttctccactgagtctctaatg

SEQ ID NO: 286437 - DNA, 25 bp, Probe Sequence
tgctgcttctgggtgggacctaaga

SEQ ID NO: 286438 - DNA, 25 bp, Probe Sequence
tgcggtattcattggtgcctaaaga

SEQ ID NO: 286439 - DNA, 25 bp, Probe Sequence
tgctggaatttgtggctgatgaagg

SEQ ID NO: 286440 - DNA, 25 bp, Probe Sequence
tgcgtaactggctgtgttctggtga

SEQ ID NO: 286441 - DNA, 25 bp, Probe Sequence
tgcttacctggacttgttgctgggg

SEQ ID NO: 286442 - DNA, 25 bp, Probe Sequence
tgctgtacgcgttttttgagatgga

SEQ ID NO: 286443 - DNA, 25 bp, Probe Sequence
tctgttttgactctgttgagtacat

SEQ ID NO: 286444 - DNA, 25 bp, Probe Sequence
tgcatgttcttgttttgttatataa

SEQ ID NO: 286445 - DNA, 25 bp, Probe Sequence
tgcatttcctgtttgttacacacaa

SEQ ID NO: 286446 - DNA, 25 bp, Probe Sequence
tgcttttctgcggctgtgtagtaaa

SEQ ID NO: 286447 - DNA, 25 bp, Probe Sequence
tgctcatacttggactgggaaaacc

SEQ ID NO: 286448 - DNA, 25 bp, Probe Sequence
tgctatccttagccttggaaactgc

SEQ ID NO: 286449 - DNA, 25 bp, Probe Sequence
tgctctacttagcctttggatttag

SEQ ID NO: 286450 - DNA, 25 bp, Probe Sequence
tgctccaatatgctcttttgactta

SEQ ID NO: 286451 - DNA, 25 bp, Probe Sequence
tgcttactatgtagtgttgccctta

SEQ ID NO: 286452 - DNA, 25 bp, Probe Sequence
tgcattccatagccatgtgcttgtc

SEQ ID NO: 286453 - DNA, 25 bp, Probe Sequence
tgcattatatattgatgtgtgtatc

SEQ ID NO: 286454 - DNA, 25 bp, Probe Sequence
tgcattatttatagtgctttcactt

SEQ ID NO: 286455 - DNA, 25 bp, Probe Sequence
tgcatccattttattgtgtgtatca

SEQ ID NO: 286456 - DNA, 25 bp, Probe Sequence
tgcatgccttggttttggtgctgct

SEQ ID NO: 286457 - DNA, 25 bp, Probe Sequence
tgcattgtctagttttcctgccaaa

SEQ ID NO: 286458 - DNA, 25 bp, Probe Sequence
tgcatctgattttgatttcctccag

SEQ ID NO: 286459 - DNA, 25 bp, Probe Sequence
tgcaggcatgtttcaattactcaag

SEQ ID NO: 286460 - DNA, 25 bp, Probe Sequence
tgcaggcccgacaagtaatgctagc

SEQ ID NO: 286461 - DNA, 25 bp, Probe Sequence
tgcaggacactggctcagtagtgcc

SEQ ID NO: 286462 - DNA, 25 bp, Probe Sequence
tgcaggaatgtctgcagtggagcac

SEQ ID NO: 286463 - DNA, 25 bp, Probe Sequence
tgcatagaatgttggccttgcagca

SEQ ID NO: 286464 - DNA, 25 bp, Probe Sequence
tgcattgagctatggtcgtgccact

SEQ ID NO: 286465 - DNA, 25 bp, Probe Sequence
tgcatgtgagccgggacgaggcctg

SEQ ID NO: 286466 - DNA, 25 bp, Probe Sequence
tgcatctggcctggaactggtgtta

SEQ ID NO: 286467 - DNA, 25 bp, Probe Sequence
tgcttccacagctaacgttgttaat

SEQ ID NO: 286468 - DNA, 25 bp, Probe Sequence
tgcggccaggctttttatttaatgt

SEQ ID NO: 286469 - DNA, 25 bp, Probe Sequence
tcacccggtactttattctaagaag

SEQ ID NO: 286470 - DNA, 25 bp, Probe Sequence
tccacgggtacttcaagttccaggg

SEQ ID NO: 286471 - DNA, 25 bp, Probe Sequence
tccccgagtcctcaggtacagcggg

SEQ ID NO: 286472 - DNA, 25 bp, Probe Sequence
tcgcccggtggcaatagttccggga

SEQ ID NO: 286473 - DNA, 25 bp, Probe Sequence
tgcaggacctttgtaggttgtggga

SEQ ID NO: 286474 - DNA, 25 bp, Probe Sequence
tgcggccccttcatttgattgtggg

SEQ ID NO: 286475 - DNA, 25 bp, Probe Sequence
tgcaggccctccatttggggagtgg

SEQ ID NO: 286476 - DNA, 25 bp, Probe Sequence
tgctttcactttttgggggcaggcc

SEQ ID NO: 286477 - DNA, 25 bp, Probe Sequence
tgctttcttctacacgggggagcgc

SEQ ID NO: 286478 - DNA, 25 bp, Probe Sequence
tgctttctcttgctaagggtgaccg

SEQ ID NO: 286479 - DNA, 25 bp, Probe Sequence
tgctggccttgtgaaaggagctcac

SEQ ID NO: 286480 - DNA, 25 bp, Probe Sequence
tgctggccttgtgaaaggagctcac

SEQ ID NO: 286481 - DNA, 25 bp, Probe Sequence
tgcggccatctacacggtgaggcac

SEQ ID NO: 286482 - DNA, 25 bp, Probe Sequence
tgctggcaccaatatcataataggc

SEQ ID NO: 286483 - DNA, 25 bp, Probe Sequence
tgctccacataagatccaaaacctc

SEQ ID NO: 286484 - DNA, 25 bp, Probe Sequence
tgctcaccaaagatccaccatatca

SEQ ID NO: 286485 - DNA, 25 bp, Probe Sequence
tgcatcctcagaaacctatccaaca

SEQ ID NO: 286486 - DNA, 25 bp, Probe Sequence
tgctcgctcagacactttggcagga

SEQ ID NO: 286487 - DNA, 25 bp, Probe Sequence
tgcttgtcaaggccctggagcgaca

SEQ ID NO: 286488 - DNA, 25 bp, Probe Sequence
tgcttgtcaaggccctggagcgaca

SEQ ID NO: 286489 - DNA, 25 bp, Probe Sequence
tgcttctgcatatactcggacgaca

SEQ ID NO: 286490 - DNA, 25 bp, Probe Sequence
tgctctccatcatggcgcaggatca

SEQ ID NO: 286491 - DNA, 25 bp, Probe Sequence
tgcatgtgccactcggaggaagccc

SEQ ID NO: 286492 - DNA, 25 bp, Probe Sequence
tgcaggccaggcagcgatagaagcc

SEQ ID NO: 286493 - DNA, 25 bp, Probe Sequence
tgcaggcctggctggaaaagaccca

SEQ ID NO: 286494 - DNA, 25 bp, Probe Sequence
tgctgggctgtgtttactaaaccca

SEQ ID NO: 286495 - DNA, 25 bp, Probe Sequence
tgctcacgcatgtatgcttagtata

SEQ ID NO: 286496 - DNA, 25 bp, Probe Sequence
tgctcacagtaactcagagattacc

SEQ ID NO: 286497 - DNA, 25 bp, Probe Sequence
tgctcctgcttacgaagtattccca

SEQ ID NO: 286498 - DNA, 25 bp, Probe Sequence
tgcttttgattgccaagatttccaa

SEQ ID NO: 286499 - DNA, 25 bp, Probe Sequence
tgcattatcttttataatcttcaca

SEQ ID NO: 286500 - DNA, 25 bp, Probe Sequence
tgctctactgtttcagtacagtcac

SEQ ID NO: 286501 - DNA, 25 bp, Probe Sequence
tgcttccatctttccatgaagtctc

SEQ ID NO: 286502 - DNA, 25 bp, Probe Sequence
tgctgacctcagggcctgacagtgt

SEQ ID NO: 286503 - DNA, 25 bp, Probe Sequence
tgctgagttggatgcctacatggcg

SEQ ID NO: 286504 - DNA, 25 bp, Probe Sequence
tgcatgaggaggtgccagcagtggg

SEQ ID NO: 286505 - DNA, 25 bp, Probe Sequence
tgctgactgaggtgcacgcagcgtc

SEQ ID NO: 286506 - DNA, 25 bp, Probe Sequence
tgctgcccagtaaaggaggtgccct

SEQ ID NO: 286507 - DNA, 25 bp, Probe Sequence
tgctgcagacgttggggggctagcc

SEQ ID NO: 286508 - DNA, 25 bp, Probe Sequence
tgctggccttgaggtggggaagccg

SEQ ID NO: 286509 - DNA, 25 bp, Probe Sequence
tgctgacttggagctagatgaggtg

SEQ ID NO: 286510 - DNA, 25 bp, Probe Sequence
tgctgtgtaggaggatgaaagggga

SEQ ID NO: 286511 - DNA, 25 bp, Probe Sequence
tgcatttagcgagtctagaagaagg

SEQ ID NO: 286512 - DNA, 25 bp, Probe Sequence
tgctgcttttgagttcacaaatagg

SEQ ID NO: 286513 - DNA, 25 bp, Probe Sequence
tgctgttcgtacacagaaacaggac

SEQ ID NO: 286514 - DNA, 25 bp, Probe Sequence
tgccttgggacttagaacaccgccg

SEQ ID NO: 286515 - DNA, 25 bp, Probe Sequence
tgctttgggcaggtggagcaccccc

SEQ ID NO: 286516 - DNA, 25 bp, Probe Sequence
tgctttgggcaggtggagcaccccc

SEQ ID NO: 286517 - DNA, 25 bp, Probe Sequence
tgcattgggagcaggggcggctctc

SEQ ID NO: 286518 - DNA, 25 bp, Probe Sequence
tgcattgggagcaggggcggctctc

SEQ ID NO: 286519 - DNA, 25 bp, Probe Sequence
tgcattagtagaagccacctggcct

SEQ ID NO: 286520 - DNA, 25 bp, Probe Sequence
tgcttagttgaacagggccctgaag

SEQ ID NO: 286521 - DNA, 25 bp, Probe Sequence
tgctctagattggcccatggtgcca

SEQ ID NO: 286522 - DNA, 25 bp, Probe Sequence
tgcatcaagaaggcctcgggcccca

SEQ ID NO: 286523 - DNA, 25 bp, Probe Sequence
tgctgcagaacggacttgggagccc

SEQ ID NO: 286524 - DNA, 25 bp, Probe Sequence
tgctcagaaacttatcacgggccct

SEQ ID NO: 286525 - DNA, 25 bp, Probe Sequence
tctgagtcaactttcgctggggaaa

SEQ ID NO: 286526 - DNA, 25 bp, Probe Sequence
tgctggtcagactttttttgttaga

SEQ ID NO: 286527 - DNA, 25 bp, Probe Sequence
tgctgctaagatttttctttggggt

SEQ ID NO: 286528 - DNA, 25 bp, Probe Sequence
tgcatgcatatactgtctctgtttg

SEQ ID NO: 286529 - DNA, 25 bp, Probe Sequence
tgctgaattagcctcgatctttttg

SEQ ID NO: 286530 - DNA, 25 bp, Probe Sequence
tgctgacattgacgtagtcgttgtc

SEQ ID NO: 286531 - DNA, 25 bp, Probe Sequence
tgctgcactaacctttggtatcctt

SEQ ID NO: 286532 - DNA, 25 bp, Probe Sequence
tgctgcatcaggggcttttgttcca

SEQ ID NO: 286533 - DNA, 25 bp, Probe Sequence
tgctgccatctggagattttcttcc

SEQ ID NO: 286534 - DNA, 25 bp, Probe Sequence
tgctgtatatgggtttatgcctgcc

SEQ ID NO: 286535 - DNA, 25 bp, Probe Sequence
tgctgttgatgagttctttctgttg

SEQ ID NO: 286536 - DNA, 25 bp, Probe Sequence
tgctgtgtgttctctctatagttct

SEQ ID NO: 286537 - DNA, 25 bp, Probe Sequence
tgcttatgtcatctctgttattgtc

SEQ ID NO: 286538 - DNA, 25 bp, Probe Sequence
tgcttatgacatgatcgctttctac

SEQ ID NO: 286539 - DNA, 25 bp, Probe Sequence
tgctgtcagcaatatcctcattgct

SEQ ID NO: 286540 - DNA, 25 bp, Probe Sequence
tgcttggttacttgcatgcattcat

SEQ ID NO: 286541 - DNA, 25 bp, Probe Sequence
tgcatagttgtactgtgcctgtctg

SEQ ID NO: 286542 - DNA, 25 bp, Probe Sequence
tgctatctgtgcctttgtcagtcta

SEQ ID NO: 286543 - DNA, 25 bp, Probe Sequence
tgctattggctctcagccagtgctc

SEQ ID NO: 286544 - DNA, 25 bp, Probe Sequence
tgcatttgacctaaccactgcgaaa

SEQ ID NO: 286545 - DNA, 25 bp, Probe Sequence
tgctatgtgacaaaacgccctgatt

SEQ ID NO: 286546 - DNA, 25 bp, Probe Sequence
tgcatttgcaccaaacagcccatgc

SEQ ID NO: 286547 - DNA, 25 bp, Probe Sequence
tgcatctgagcattctgaaagaaag

SEQ ID NO: 286548 - DNA, 25 bp, Probe Sequence
tgcatatgagctgcagcaataaaag

SEQ ID NO: 286549 - DNA, 25 bp, Probe Sequence
tgcatctgactgagcagaacaaatc

SEQ ID NO: 286550 - DNA, 25 bp, Probe Sequence
tgcatctgcgccagcaaacatcact

SEQ ID NO: 286551 - DNA, 25 bp, Probe Sequence
tgctcatagccttgcactgagcaca

SEQ ID NO: 286552 - DNA, 25 bp, Probe Sequence
tgctcacagcccgacgaaaggatgc

SEQ ID NO: 286553 - DNA, 25 bp, Probe Sequence
tgctaagcggcgacacgtatgaggc

SEQ ID NO: 286554 - DNA, 25 bp, Probe Sequence
tgctagcagtggcactttatagcca

SEQ ID NO: 286555 - DNA, 25 bp, Probe Sequence
tgctatcggggactacaatggccac

SEQ ID NO: 286556 - DNA, 25 bp, Probe Sequence
tgcgaaggggcagaactcaggcacc

SEQ ID NO: 286557 - DNA, 25 bp, Probe Sequence
tgctgccggtggtggactatgaaca

SEQ ID NO: 286558 - DNA, 25 bp, Probe Sequence
tgctgggaaatgtggacctggattc

SEQ ID NO: 286559 - DNA, 25 bp, Probe Sequence
tgctgtgaaacgtcctgacctgtga

SEQ ID NO: 286560 - DNA, 25 bp, Probe Sequence
tgctttaagtgactcagcaccctgc

SEQ ID NO: 286561 - DNA, 25 bp, Probe Sequence
tgcttgaaagatactgactgcccag

SEQ ID NO: 286562 - DNA, 25 bp, Probe Sequence
tgcttgaaagtttatcatgcaattt

SEQ ID NO: 286563 - DNA, 25 bp, Probe Sequence
tgcataatacagtggatctgaattt

SEQ ID NO: 286564 - DNA, 25 bp, Probe Sequence
tgctctgtacagtggtctatttctg

SEQ ID NO: 286565 - DNA, 25 bp, Probe Sequence
tgctgcgagaaggggcgcgatttct

SEQ ID NO: 286566 - DNA, 25 bp, Probe Sequence
tgctcaaccactgtggcgttctgct

SEQ ID NO: 286567 - DNA, 25 bp, Probe Sequence
tgctcagccaccatctggagtttta

SEQ ID NO: 286568 - DNA, 25 bp, Probe Sequence
tgctcagccaccatctggagtttta

SEQ ID NO: 286569 - DNA, 25 bp, Probe Sequence
tgctcagccaccatctggagtttta

SEQ ID NO: 286570 - DNA, 25 bp, Probe Sequence
tgctcagtgcccagcggaggtaaag

SEQ ID NO: 286571 - DNA, 25 bp, Probe Sequence
tgctgaggcctctggggctggaaag

SEQ ID NO: 286572 - DNA, 25 bp, Probe Sequence
tgctctggccatggttagtctggaa

SEQ ID NO: 286573 - DNA, 25 bp, Probe Sequence
tgccgggtcatgttaattgggaaaa

SEQ ID NO: 286574 - DNA, 25 bp, Probe Sequence
tccgggtccttgctcggagagtacg

SEQ ID NO: 286575 - DNA, 25 bp, Probe Sequence
tgcctggggagccggacggggctcc

SEQ ID NO: 286576 - DNA, 25 bp, Probe Sequence
tgcctgtgggggtccatttgggtac

SEQ ID NO: 286577 - DNA, 25 bp, Probe Sequence
tgcctttcgtgaacacattcttggt

SEQ ID NO: 286578 - DNA, 25 bp, Probe Sequence
tgctcttatcttctcaaattgtatt

SEQ ID NO: 286579 - DNA, 25 bp, Probe Sequence
tgctctgtgtcaatgttaacctgtc

SEQ ID NO: 286580 - DNA, 25 bp, Probe Sequence
tgctgtttgcaaattccaggcttcc

SEQ ID NO: 286581 - DNA, 25 bp, Probe Sequence
tgctgacttgaatgccagcccttgc

SEQ ID NO: 286582 - DNA, 25 bp, Probe Sequence
tgctgacttgaatgccagcccttgc

SEQ ID NO: 286583 - DNA, 25 bp, Probe Sequence
tgctgacttgaatgccagcccttgc

SEQ ID NO: 286584 - DNA, 25 bp, Probe Sequence
tgctgacttggaaggtgccctgtgc

SEQ ID NO: 286585 - DNA, 25 bp, Probe Sequence
tgctactttgaatgtctttactctt

SEQ ID NO: 286586 - DNA, 25 bp, Probe Sequence
tgctacttttgctgttttatttttt

SEQ ID NO: 286587 - DNA, 25 bp, Probe Sequence
tgcttgctttattagtgtttatact

SEQ ID NO: 286588 - DNA, 25 bp, Probe Sequence
tgcattctgtatttcgtgtctcata

SEQ ID NO: 286589 - DNA, 25 bp, Probe Sequence
tgcttctgtaagtttgcctataaaa

SEQ ID NO: 286590 - DNA, 25 bp, Probe Sequence
tgcttcattagtttcccctagcaga

SEQ ID NO: 286591 - DNA, 25 bp, Probe Sequence
tgcttttgatgtatccctttgtgaa

SEQ ID NO: 286592 - DNA, 25 bp, Probe Sequence
tgcttctttcatgtcaggcgttaaa

SEQ ID NO: 286593 - DNA, 25 bp, Probe Sequence
tgcttctttctccctgggaagaatg

SEQ ID NO: 286594 - DNA, 25 bp, Probe Sequence
tgctgttttctacccttggaaagaa

SEQ ID NO: 286595 - DNA, 25 bp, Probe Sequence
tgctttggtctatctttgagcgccc

SEQ ID NO: 286596 - DNA, 25 bp, Probe Sequence
tgctaagagttattctttacccaca

SEQ ID NO: 286597 - DNA, 25 bp, Probe Sequence
tgctcaacaatttatccattcaatc

SEQ ID NO: 286598 - DNA, 25 bp, Probe Sequence
tgcttacatgttcatctcttgccaa

SEQ ID NO: 286599 - DNA, 25 bp, Probe Sequence
tgcattcttgtaacacctctcaatg

SEQ ID NO: 286600 - DNA, 25 bp, Probe Sequence
tgctgtttgtaatagtgcacactgc

SEQ ID NO: 286601 - DNA, 25 bp, Probe Sequence
tgcttttgtatttactgccatgtaa

SEQ ID NO: 286602 - DNA, 25 bp, Probe Sequence
tgcttggctatcttggacatacagt

SEQ ID NO: 286603 - DNA, 25 bp, Probe Sequence
tgcccctacttttcaacaattttct

SEQ ID NO: 286604 - DNA, 25 bp, Probe Sequence
tgcccccaatttttcactattgtta

SEQ ID NO: 286605 - DNA, 25 bp, Probe Sequence
tgcattccccatcttaactgattta

SEQ ID NO: 286606 - DNA, 25 bp, Probe Sequence
tgctatggcacccagattaactgtt

SEQ ID NO: 286607 - DNA, 25 bp, Probe Sequence
tgcttatgaccaacattcatccctt

SEQ ID NO: 286608 - DNA, 25 bp, Probe Sequence
tgcattctgacattacatatttttt

SEQ ID NO: 286609 - DNA, 25 bp, Probe Sequence
tgcattttttacttttttttatgat

SEQ ID NO: 286610 - DNA, 25 bp, Probe Sequence
tgcattttttacttttttttatgat

SEQ ID NO: 286611 - DNA, 25 bp, Probe Sequence
tgcttattgttttgtttattttatt

SEQ ID NO: 286612 - DNA, 25 bp, Probe Sequence
tgcttttgagtagtttgtattttaa

SEQ ID NO: 286613 - DNA, 25 bp, Probe Sequence
tgctttctaggaggtttgttgtttt

SEQ ID NO: 286614 - DNA, 25 bp, Probe Sequence
tgcttctctaggaggttgggttttt

SEQ ID NO: 286615 - DNA, 25 bp, Probe Sequence
tgctctcttggggggatttggctgg

SEQ ID NO: 286616 - DNA, 25 bp, Probe Sequence
tgctccagtggatggtatatggtgg

SEQ ID NO: 286617 - DNA, 25 bp, Probe Sequence
tgctctggtggctggaattgaccgc

SEQ ID NO: 286618 - DNA, 25 bp, Probe Sequence
tgctcaggaggtccccattgagatc

SEQ ID NO: 286619 - DNA, 25 bp, Probe Sequence
tgctttgagctgtctctccaagcag

SEQ ID NO: 286620 - DNA, 25 bp, Probe Sequence
tgcttatggctggcatggaaataga

SEQ ID NO: 286621 - DNA, 25 bp, Probe Sequence
tgctactggttcggcaactgcagaa

SEQ ID NO: 286622 - DNA, 25 bp, Probe Sequence
tgctcctcaggtgtgctactggaag

SEQ ID NO: 286623 - DNA, 25 bp, Probe Sequence
tgctagacaaggttgctgttgtgca

SEQ ID NO: 286624 - DNA, 25 bp, Probe Sequence
tgctctacagagcttcagtgtgaga

SEQ ID NO: 286625 - DNA, 25 bp, Probe Sequence
tgcttcacgatgctgctctggtgat

SEQ ID NO: 286626 - DNA, 25 bp, Probe Sequence
tgcttccaatcttgctttgtgtatc

SEQ ID NO: 286627 - DNA, 25 bp, Probe Sequence
tgcattccaatttcatgttgatgat

SEQ ID NO: 286628 - DNA, 25 bp, Probe Sequence
tgcttcccaatatttatgatgacat

SEQ ID NO: 286629 - DNA, 25 bp, Probe Sequence
tgctgctctccagtcaagtagcgaa

SEQ ID NO: 286630 - DNA, 25 bp, Probe Sequence
tgctcctacctgcagagggcattgt

SEQ ID NO: 286631 - DNA, 25 bp, Probe Sequence
tgctgaggacctcagggacttgagg

SEQ ID NO: 286632 - DNA, 25 bp, Probe Sequence
tgcggggcctgcaaggagaactatt

SEQ ID NO: 286633 - DNA, 25 bp, Probe Sequence
tgctggtggcctgtgagaaactggg

SEQ ID NO: 286634 - DNA, 25 bp, Probe Sequence
tgctggctcctcggattgaaagtgt

SEQ ID NO: 286635 - DNA, 25 bp, Probe Sequence
tgctggcttcacgtggcaggaaggc

SEQ ID NO: 286636 - DNA, 25 bp, Probe Sequence
tgctcctgtgctgagccaggctaag

SEQ ID NO: 286637 - DNA, 25 bp, Probe Sequence
tgctgcctgctctaactgaagtcag

SEQ ID NO: 286638 - DNA, 25 bp, Probe Sequence
tgctcctgctgggactcaattcagg

SEQ ID NO: 286639 - DNA, 25 bp, Probe Sequence
tgctgccacaggggccaactagggc

SEQ ID NO: 286640 - DNA, 25 bp, Probe Sequence
tgctcccaggcaacactgagctgag

SEQ ID NO: 286641 - DNA, 25 bp, Probe Sequence
tgctatcgcaacaatcctggcagac

SEQ ID NO: 286642 - DNA, 25 bp, Probe Sequence
tgctatcgcaacaatcctggcagac

SEQ ID NO: 286643 - DNA, 25 bp, Probe Sequence
tgcttggagaagacttgggactggg

SEQ ID NO: 286644 - DNA, 25 bp, Probe Sequence
tgctagtgatgtggtcattgtaaag

SEQ ID NO: 286645 - DNA, 25 bp, Probe Sequence
tgctgggctgctgtgcagagtataa

SEQ ID NO: 286646 - DNA, 25 bp, Probe Sequence
tgctggcacgctggtgcacgtagca

SEQ ID NO: 286647 - DNA, 25 bp, Probe Sequence
tgcgcacatcgtggcagcggaagat

SEQ ID NO: 286648 - DNA, 25 bp, Probe Sequence
tgcgactcttcacagtgcaaattcc

SEQ ID NO: 286649 - DNA, 25 bp, Probe Sequence
tgctacattcactggtaaattcaag

SEQ ID NO: 286650 - DNA, 25 bp, Probe Sequence
tgctgtattcagtgttcactttaaa

SEQ ID NO: 286651 - DNA, 25 bp, Probe Sequence
tgctcattctcgtagctttttaaaa

SEQ ID NO: 286652 - DNA, 25 bp, Probe Sequence
tgctttctctaccttttgcaaaata

SEQ ID NO: 286653 - DNA, 25 bp, Probe Sequence
tgcttatcttggctcctctaagaaa

SEQ ID NO: 286654 - DNA, 25 bp, Probe Sequence
tgcttgtgccttgtcccaaaataaa

SEQ ID NO: 286655 - DNA, 25 bp, Probe Sequence
tgcttgtgccttgtcccaaaataaa

SEQ ID NO: 286656 - DNA, 25 bp, Probe Sequence
tgctttatcatctttacccaaataa

SEQ ID NO: 286657 - DNA, 25 bp, Probe Sequence
tgcttcaatcttatcaacgctacat

SEQ ID NO: 286658 - DNA, 25 bp, Probe Sequence
tgcgaacactgaactctacgccact

SEQ ID NO: 286659 - DNA, 25 bp, Probe Sequence
tgccagacagagaacctgagcctca

SEQ ID NO: 286660 - DNA, 25 bp, Probe Sequence
tgctcaatgggcaggcggcctgcca

SEQ ID NO: 286661 - DNA, 25 bp, Probe Sequence
tgcttttgagcaggacccactgcca

SEQ ID NO: 286662 - DNA, 25 bp, Probe Sequence
tgctttatggcaggcgcaaactcga

SEQ ID NO: 286663 - DNA, 25 bp, Probe Sequence
tgctttccgcatttcaagacatcca

SEQ ID NO: 286664 - DNA, 25 bp, Probe Sequence
tgcgttaccgctgcaatgacaccat

SEQ ID NO: 286665 - DNA, 25 bp, Probe Sequence
tgcgttaccgctgcaatgacaccat

SEQ ID NO: 286666 - DNA, 25 bp, Probe Sequence
tgcgttaccgctgcaatgacaccat

SEQ ID NO: 286667 - DNA, 25 bp, Probe Sequence
tgcgttaccgctgcaatgacaccat

SEQ ID NO: 286668 - DNA, 25 bp, Probe Sequence
tgctttcaccacgcagaatcggatt

SEQ ID NO: 286669 - DNA, 25 bp, Probe Sequence
tgctttcaccacgcagaatcggatt

SEQ ID NO: 286670 - DNA, 25 bp, Probe Sequence
tgctttccacagtcagaataggttt

SEQ ID NO: 286671 - DNA, 25 bp, Probe Sequence
tgctttcttcaaggtgacaggtcta

SEQ ID NO: 286672 - DNA, 25 bp, Probe Sequence
tgctcagattctaagttgttggcct

SEQ ID NO: 286673 - DNA, 25 bp, Probe Sequence
tgctcagcgttcatgttgttgggta

SEQ ID NO: 286674 - DNA, 25 bp, Probe Sequence
tgctggattgtcacttttgggagaa

SEQ ID NO: 286675 - DNA, 25 bp, Probe Sequence
tctagtcttaaggtttggggacatt

SEQ ID NO: 286676 - DNA, 25 bp, Probe Sequence
tccacgtaaactttcggggacacat

SEQ ID NO: 286677 - DNA, 25 bp, Probe Sequence
tctccttaacctttaagtcttacag

SEQ ID NO: 286678 - DNA, 25 bp, Probe Sequence
tgcccttctacctttgggtttacag

SEQ ID NO: 286679 - DNA, 25 bp, Probe Sequence
tctcccttgcaggtttgggtttgaa

SEQ ID NO: 286680 - DNA, 25 bp, Probe Sequence
tgcccttagagcgcactagttttaa

SEQ ID NO: 286681 - DNA, 25 bp, Probe Sequence
tgcctttatattacagtacttctta

SEQ ID NO: 286682 - DNA, 25 bp, Probe Sequence
tgcggtgtttgaacagtagtctgtt

SEQ ID NO: 286683 - DNA, 25 bp, Probe Sequence
tgctgttttgtttcatgatttcgtt

SEQ ID NO: 286684 - DNA, 25 bp, Probe Sequence
tgctttctcagttacatgttttgtg

SEQ ID NO: 286685 - DNA, 25 bp, Probe Sequence
tgctgtaccttagctgtgtttgctt

SEQ ID NO: 286686 - DNA, 25 bp, Probe Sequence
tgcttacgcattctggtgtttcaca

SEQ ID NO: 286687 - DNA, 25 bp, Probe Sequence
tgcttcaggattcgggttaggatga

SEQ ID NO: 286688 - DNA, 25 bp, Probe Sequence
tgcttagtatcttgggctttctgta

SEQ ID NO: 286689 - DNA, 25 bp, Probe Sequence
tgctgtacaacatgctggtttctgt

SEQ ID NO: 286690 - DNA, 25 bp, Probe Sequence
tgctggagatcatcgctggtatcct

SEQ ID NO: 286691 - DNA, 25 bp, Probe Sequence
tgctgagattcattgcagaggttca

SEQ ID NO: 286692 - DNA, 25 bp, Probe Sequence
tgctgaatgtcttatatgcattatc

SEQ ID NO: 286693 - DNA, 25 bp, Probe Sequence
tgctgaatgacatattttatcttgt

SEQ ID NO: 286694 - DNA, 25 bp, Probe Sequence
tgctgattgaattttatgccccttg

SEQ ID NO: 286695 - DNA, 25 bp, Probe Sequence
tgctgtgttatggtcgatggctcct

SEQ ID NO: 286696 - DNA, 25 bp, Probe Sequence
tgcttgggatgatggaggtactgcc

SEQ ID NO: 286697 - DNA, 25 bp, Probe Sequence
tgcttatggtagcgatgactgactg

SEQ ID NO: 286698 - DNA, 25 bp, Probe Sequence
tgctattgagattccagtggtgact

SEQ ID NO: 286699 - DNA, 25 bp, Probe Sequence
tgctatgtgcagaaccactttggtc

SEQ ID NO: 286700 - DNA, 25 bp, Probe Sequence
tgcttgtcagtttgttcgtctgtcc

SEQ ID NO: 286701 - DNA, 25 bp, Probe Sequence
tgctttctgttgtcattgctgttgt

SEQ ID NO: 286702 - DNA, 25 bp, Probe Sequence
tgctttgcttttagctgcactatgt

SEQ ID NO: 286703 - DNA, 25 bp, Probe Sequence
tgcttgagttgttatgtgccatatt

SEQ ID NO: 286704 - DNA, 25 bp, Probe Sequence
tgctttgttgatctgagccttctat

SEQ ID NO: 286705 - DNA, 25 bp, Probe Sequence
tgctttaggcctggagactttcatt

SEQ ID NO: 286706 - DNA, 25 bp, Probe Sequence
tgctctgccaagacaagaactttct

SEQ ID NO: 286707 - DNA, 25 bp, Probe Sequence
tgcttccatcagtaagatggcccca

SEQ ID NO: 286708 - DNA, 25 bp, Probe Sequence
tgctcatcgcataggaatgtgtgca

SEQ ID NO: 286709 - DNA, 25 bp, Probe Sequence
tgcgcaggcgctggcaagatggcgg

SEQ ID NO: 286710 - DNA, 25 bp, Probe Sequence
tgcgcagtacatcaatgggcgtgga

SEQ ID NO: 286711 - DNA, 25 bp, Probe Sequence
tgcgtgacaatccaatgccgagtgg

SEQ ID NO: 286712 - DNA, 25 bp, Probe Sequence
tgctgtgattaatgcatccagattg

SEQ ID NO: 286713 - DNA, 25 bp, Probe Sequence
tgctgtgtgtcctgcatcaagaagg

SEQ ID NO: 286714 - DNA, 25 bp, Probe Sequence
tgctctggatcctcaaatccacggt

SEQ ID NO: 286715 - DNA, 25 bp, Probe Sequence
tgctcgtgaagctcaatagccaggc

SEQ ID NO: 286716 - DNA, 25 bp, Probe Sequence
tgctccgaatctctgtagccgatga

SEQ ID NO: 286717 - DNA, 25 bp, Probe Sequence
tgctgccaacttctaaccgcaatag

SEQ ID NO: 286718 - DNA, 25 bp, Probe Sequence
tgcgcgtagttgctaacagcaaaga

SEQ ID NO: 286719 - DNA, 25 bp, Probe Sequence
tgctgcagaggttactgaagagcaa

SEQ ID NO: 286720 - DNA, 25 bp, Probe Sequence
tgctcgcagaccaacagccagagaa

SEQ ID NO: 286721 - DNA, 25 bp, Probe Sequence
tgctcctgacagtcatacctgaaac

SEQ ID NO: 286722 - DNA, 25 bp, Probe Sequence
tgctcttctccacactgttgggagg

SEQ ID NO: 286723 - DNA, 25 bp, Probe Sequence
tgctcttgggacactgcaagggaca

SEQ ID NO: 286724 - DNA, 25 bp, Probe Sequence
tgctattgtggtattctggtggaga

SEQ ID NO: 286725 - DNA, 25 bp, Probe Sequence
tgcttctttctgatctctagtggag

SEQ ID NO: 286726 - DNA, 25 bp, Probe Sequence
tgctggactctctacttcataagga

SEQ ID NO: 286727 - DNA, 25 bp, Probe Sequence
tgctccagtttcctgatcaagagga

SEQ ID NO: 286728 - DNA, 25 bp, Probe Sequence
tgcttatggtgcagctgtccaggca

SEQ ID NO: 286729 - DNA, 25 bp, Probe Sequence
tgctacagcgtgacgctggcacggc

SEQ ID NO: 286730 - DNA, 25 bp, Probe Sequence
tgctaccacatgacagacacaaggc

SEQ ID NO: 286731 - DNA, 25 bp, Probe Sequence
tgctcagccctgaggacagatgcct

SEQ ID NO: 286732 - DNA, 25 bp, Probe Sequence
tgctgtcctctgatttagctgctgc

SEQ ID NO: 286733 - DNA, 25 bp, Probe Sequence
tgctgtttgctgcagttctgtgtcc

SEQ ID NO: 286734 - DNA, 25 bp, Probe Sequence
tgctgtgtcctgaggtgcatttcct

SEQ ID NO: 286735 - DNA, 25 bp, Probe Sequence
tgctgttctttaaatgcgttcctca

SEQ ID NO: 286736 - DNA, 25 bp, Probe Sequence
tgctttcatttacacagatatccat

SEQ ID NO: 286737 - DNA, 25 bp, Probe Sequence
tgctttcatttacacagatatccat

SEQ ID NO: 286738 - DNA, 25 bp, Probe Sequence
tgctttccgtggcactgcatacaat

SEQ ID NO: 286739 - DNA, 25 bp, Probe Sequence
tgctattcgggtaatcttcacagaa

SEQ ID NO: 286740 - DNA, 25 bp, Probe Sequence
tgctattctgtgtcaaacacctctg

SEQ ID NO: 286741 - DNA, 25 bp, Probe Sequence
tgctattgccattaccataccattg

SEQ ID NO: 286742 - DNA, 25 bp, Probe Sequence
tgctcttcgcaatacatcatgtccg

SEQ ID NO: 286743 - DNA, 25 bp, Probe Sequence
tgctgcttcagcatggaactgatgc

SEQ ID NO: 286744 - DNA, 25 bp, Probe Sequence
tgcttttcttgccatactgcatagg

SEQ ID NO: 286745 - DNA, 25 bp, Probe Sequence
tgctctttctctgccagtgacagac

SEQ ID NO: 286746 - DNA, 25 bp, Probe Sequence
tgctcagtccttgcaatgttctagg

SEQ ID NO: 286747 - DNA, 25 bp, Probe Sequence
tgctcagaccttgcaggctgtggag

SEQ ID NO: 286748 - DNA, 25 bp, Probe Sequence
tgctcaccccagccgagtgtggggt

SEQ ID NO: 286749 - DNA, 25 bp, Probe Sequence
tgctacctcccagcaggcatgggaa

SEQ ID NO: 286750 - DNA, 25 bp, Probe Sequence
tgctacctcccagcaggcatgggaa

SEQ ID NO: 286751 - DNA, 25 bp, Probe Sequence
tgctgaccaccttgaacttcggaga

SEQ ID NO: 286752 - DNA, 25 bp, Probe Sequence
tcgaccatatttgtcatttggatga

SEQ ID NO: 286753 - DNA, 25 bp, Probe Sequence
tgcgcctctagtgccttttgagggg

SEQ ID NO: 286754 - DNA, 25 bp, Probe Sequence
tgccaccagaaccctacttaggggc

SEQ ID NO: 286755 - DNA, 25 bp, Probe Sequence
tccaccaaaagggctcctgagggtc

SEQ ID NO: 286756 - DNA, 25 bp, Probe Sequence
tgctaccacaaagggtccgacagta

SEQ ID NO: 286757 - DNA, 25 bp, Probe Sequence
tgcccaccagaagtatgtccgacaa

SEQ ID NO: 286758 - DNA, 25 bp, Probe Sequence
tgcccaccagaagtatgtccgacaa

SEQ ID NO: 286759 - DNA, 25 bp, Probe Sequence
tgctttccaaacaatacctatcata

SEQ ID NO: 286760 - DNA, 25 bp, Probe Sequence
tgctgttccaccaaatacaattcaa

SEQ ID NO: 286761 - DNA, 25 bp, Probe Sequence
tgctccacacaggccattacaattc

SEQ ID NO: 286762 - DNA, 25 bp, Probe Sequence
tgctcccactggtattactgatcat

SEQ ID NO: 286763 - DNA, 25 bp, Probe Sequence
tgctcccactggtattactgatcat

SEQ ID NO: 286764 - DNA, 25 bp, Probe Sequence
tgctcgccttggtcatgtacagcac

SEQ ID NO: 286765 - DNA, 25 bp, Probe Sequence
tgctgcagcctatggctttcgaaac

SEQ ID NO: 286766 - DNA, 25 bp, Probe Sequence
tgcgggtcaaggaccgcgacgactt

SEQ ID NO: 286767 - DNA, 25 bp, Probe Sequence
tgcgggtcataagcttgcgttgatt

SEQ ID NO: 286768 - DNA, 25 bp, Probe Sequence
tgcggtccagaagcttgcggtgagt

SEQ ID NO: 286769 - DNA, 25 bp, Probe Sequence
tgcggtgtcaacgctgcagggagtt

SEQ ID NO: 286770 - DNA, 25 bp, Probe Sequence
tgcggtgaaagcgaattcctagaca

SEQ ID NO: 286771 - DNA, 25 bp, Probe Sequence
tgcgtgtggactgaaatgcctcaaa

SEQ ID NO: 286772 - DNA, 25 bp, Probe Sequence
tgctgtgggacagcacaggcccagg

SEQ ID NO: 286773 - DNA, 25 bp, Probe Sequence
tgctggtgaagatgaccgcccagga

SEQ ID NO: 286774 - DNA, 25 bp, Probe Sequence
tgctgttacagatcccgacgcagaa

SEQ ID NO: 286775 - DNA, 25 bp, Probe Sequence
tgctgatacaaatggagagggcaga

SEQ ID NO: 286776 - DNA, 25 bp, Probe Sequence
tgctggcacaccagtggcaaggccc

SEQ ID NO: 286777 - DNA, 25 bp, Probe Sequence
tgctgctacaactgtggcaaaccag

SEQ ID NO: 286778 - DNA, 25 bp, Probe Sequence
tgctgtgatcagatttggaatacct

SEQ ID NO: 286779 - DNA, 25 bp, Probe Sequence
tgctgcctatttatagattacactg

SEQ ID NO: 286780 - DNA, 25 bp, Probe Sequence
tgctcttataccacaaatacattga

SEQ ID NO: 286781 - DNA, 25 bp, Probe Sequence
tgctcatcgaagccaccaaagcgtt

SEQ ID NO: 286782 - DNA, 25 bp, Probe Sequence
tgctcactgaaggcagccaatacga

SEQ ID NO: 286783 - DNA, 25 bp, Probe Sequence
tgctcacgaacagccctgtggaact

SEQ ID NO: 286784 - DNA, 25 bp, Probe Sequence
tgctacaacaactgcctggagatac

SEQ ID NO: 286785 - DNA, 25 bp, Probe Sequence
tgctcacctaaatccatctgactac

SEQ ID NO: 286786 - DNA, 25 bp, Probe Sequence
tgctacagctcagtattgcctggcc

SEQ ID NO: 286787 - DNA, 25 bp, Probe Sequence
tgctagtgctcacttatgtctcctc

SEQ ID NO: 286788 - DNA, 25 bp, Probe Sequence
tgctagtgctcacttatgtctcctc

SEQ ID NO: 286789 - DNA, 25 bp, Probe Sequence
tgctagtgctcacttatgtctcctc

SEQ ID NO: 286790 - DNA, 25 bp, Probe Sequence
tgctagctctaaattgtgtacaact

SEQ ID NO: 286791 - DNA, 25 bp, Probe Sequence
tgctcatgtcaatctaggctacaca

SEQ ID NO: 286792 - DNA, 25 bp, Probe Sequence
tgctgtgtcactgctatgtgcttcc

SEQ ID NO: 286793 - DNA, 25 bp, Probe Sequence
tgctgttctctgtcactgttcccgg

SEQ ID NO: 286794 - DNA, 25 bp, Probe Sequence
tgctgttctctgtcactgttcccgg

SEQ ID NO: 286795 - DNA, 25 bp, Probe Sequence
tgctgaagtttctttatccctgtca

SEQ ID NO: 286796 - DNA, 25 bp, Probe Sequence
tgctagagtttgcttgcacccacaa

SEQ ID NO: 286797 - DNA, 25 bp, Probe Sequence
tgctggagtcggcgcgcaaagcgaa

SEQ ID NO: 286798 - DNA, 25 bp, Probe Sequence
tgctgagtccgtgggcgcagaaagt

SEQ ID NO: 286799 - DNA, 25 bp, Probe Sequence
tgctggttggatgtgcaggaacttc

SEQ ID NO: 286800 - DNA, 25 bp, Probe Sequence
tgcgggtggaacagtcaacctttct

SEQ ID NO: 286801 - DNA, 25 bp, Probe Sequence
tcgagttaaagtctcaaccgtttgt

SEQ ID NO: 286802 - DNA, 25 bp, Probe Sequence
tcctctttgaaacaccccgtgttgt

SEQ ID NO: 286803 - DNA, 25 bp, Probe Sequence
tgcctttggaaagccccagggcact

SEQ ID NO: 286804 - DNA, 25 bp, Probe Sequence
tgcccttgtatagtgtccccatggg

SEQ ID NO: 286805 - DNA, 25 bp, Probe Sequence
tgctcctggtaaggtcccagaaaga

SEQ ID NO: 286806 - DNA, 25 bp, Probe Sequence
tgcccggtcggagtaaacacagaat

SEQ ID NO: 286807 - DNA, 25 bp, Probe Sequence
tgcccaggttaccaacaatcctgaa

SEQ ID NO: 286808 - DNA, 25 bp, Probe Sequence
tgctcaattttaggaagcctttgct

SEQ ID NO: 286809 - DNA, 25 bp, Probe Sequence
tgctcaattctgtttttcgtttgca

SEQ ID NO: 286810 - DNA, 25 bp, Probe Sequence
tgctaattcattttggggcctgtgg

SEQ ID NO: 286811 - DNA, 25 bp, Probe Sequence
tgctgatttattttacgcacttgta

SEQ ID NO: 286812 - DNA, 25 bp, Probe Sequence
tgctcatgttattgttgacatgaat

SEQ ID NO: 286813 - DNA, 25 bp, Probe Sequence
tgccatggtaatcctgctcagtacg

SEQ ID NO: 286814 - DNA, 25 bp, Probe Sequence
tgctatgggactattgctgtgatcg

SEQ ID NO: 286815 - DNA, 25 bp, Probe Sequence
tgctagggagctattgatgtgcaat

SEQ ID NO: 286816 - DNA, 25 bp, Probe Sequence
tgctggggcagtagtcatggcagac

SEQ ID NO: 286817 - DNA, 25 bp, Probe Sequence
tgctggaggctgaagtcggagatgc

SEQ ID NO: 286818 - DNA, 25 bp, Probe Sequence
tgcggggctgagcccggctgataaa

SEQ ID NO: 286819 - DNA, 25 bp, Probe Sequence
tgctgggctctggacaggtggtaaa

SEQ ID NO: 286820 - DNA, 25 bp, Probe Sequence
tgctgggctatgtaggcaggttaat

SEQ ID NO: 286821 - DNA, 25 bp, Probe Sequence
tgctgaggggtagcaggtccatctc

SEQ ID NO: 286822 - DNA, 25 bp, Probe Sequence
tgctaagtactgaacagccccatcc

SEQ ID NO: 286823 - DNA, 25 bp, Probe Sequence
tgctaagctaccacagctacagcaa

SEQ ID NO: 286824 - DNA, 25 bp, Probe Sequence
tgctgagagccaccaacagaggaga

SEQ ID NO: 286825 - DNA, 25 bp, Probe Sequence
tgctcggcagctacaacaggggcta

SEQ ID NO: 286826 - DNA, 25 bp, Probe Sequence
tgctagagatgtaataagggccttc

SEQ ID NO: 286827 - DNA, 25 bp, Probe Sequence
tgctctgtgaaaacaagggctttgt

SEQ ID NO: 286828 - DNA, 25 bp, Probe Sequence
tgctcagtgaaagaagtcacgtcgt

SEQ ID NO: 286829 - DNA, 25 bp, Probe Sequence
tgctgggagtacaacgtgacgtcgt

SEQ ID NO: 286830 - DNA, 25 bp, Probe Sequence
tgctgggacataacatccagaagtc

SEQ ID NO: 286831 - DNA, 25 bp, Probe Sequence
tgctgcgctgcaaagccatagcaga

SEQ ID NO: 286832 - DNA, 25 bp, Probe Sequence
tgctgcatggataacatgctgacat

SEQ ID NO: 286833 - DNA, 25 bp, Probe Sequence
tgctgcagctgaaatcggattcgtc

SEQ ID NO: 286834 - DNA, 25 bp, Probe Sequence
tgctgaataaacccttctgatctgg

SEQ ID NO: 286835 - DNA, 25 bp, Probe Sequence
tgcggaacaaatcttcagcactccc

SEQ ID NO: 286836 - DNA, 25 bp, Probe Sequence
tgctggtaagagagttgtcactact

SEQ ID NO: 286837 - DNA, 25 bp, Probe Sequence
tgctgggggatgtcaggtgccaccc

SEQ ID NO: 286838 - DNA, 25 bp, Probe Sequence
tgctatgcgatgagtcagcctccac

SEQ ID NO: 286839 - DNA, 25 bp, Probe Sequence
tgctgtgcggtgggactccacatgc

SEQ ID NO: 286840 - DNA, 25 bp, Probe Sequence
tgctggagaatatgagtgccatgca

SEQ ID NO: 286841 - DNA, 25 bp, Probe Sequence
tgctgagtgttccgtgtgccagcac

SEQ ID NO: 286842 - DNA, 25 bp, Probe Sequence
tgctgcagacctcggtgtggacaca

SEQ ID NO: 286843 - DNA, 25 bp, Probe Sequence
tgctcagtccctggtatgatgagtt

SEQ ID NO: 286844 - DNA, 25 bp, Probe Sequence
tgctcgccccatggaagtgttcatg

SEQ ID NO: 286845 - DNA, 25 bp, Probe Sequence
tgctggcgcctaggttgtgttgaga

SEQ ID NO: 286846 - DNA, 25 bp, Probe Sequence
tgccgctgtctaacttggtgtgcag

SEQ ID NO: 286847 - DNA, 25 bp, Probe Sequence
tgctcagcttctcagcgggattagc

SEQ ID NO: 286848 - DNA, 25 bp, Probe Sequence
tgctgctcttctcagatggcaactc

SEQ ID NO: 286849 - DNA, 25 bp, Probe Sequence
tgcgctgcccagaagatgagtatgc

SEQ ID NO: 286850 - DNA, 25 bp, Probe Sequence
tgctgctgctgctgctaaagttcca

SEQ ID NO: 286851 - DNA, 25 bp, Probe Sequence
tgctgctgctgctgctaaagttcca

SEQ ID NO: 286852 - DNA, 25 bp, Probe Sequence
tgcgcatggcccacaagttcataac

SEQ ID NO: 286853 - DNA, 25 bp, Probe Sequence
tgccattcccttaggctttagcagc

SEQ ID NO: 286854 - DNA, 25 bp, Probe Sequence
tgctattttctttgttgtctacatg

SEQ ID NO: 286855 - DNA, 25 bp, Probe Sequence
tgctctgtgtccatggttactgcga

SEQ ID NO: 286856 - DNA, 25 bp, Probe Sequence
tgctgttggccatgtggctagtgtg

SEQ ID NO: 286857 - DNA, 25 bp, Probe Sequence
tgctgggggcaactggccatttgcc

SEQ ID NO: 286858 - DNA, 25 bp, Probe Sequence
tgctgagagggcacggcaaggtcgc

SEQ ID NO: 286859 - DNA, 25 bp, Probe Sequence
tgctgggagagatcccctggcttgc

SEQ ID NO: 286860 - DNA, 25 bp, Probe Sequence
tgctgggagagatcccctggcttgc

SEQ ID NO: 286861 - DNA, 25 bp, Probe Sequence
ttgagacgtgattaccgggttgggc

SEQ ID NO: 286862 - DNA, 25 bp, Probe Sequence
tgctggccacgagtacggggtgtgg

SEQ ID NO: 286863 - DNA, 25 bp, Probe Sequence
tgctctcaaggatgacgtgggtttg

SEQ ID NO: 286864 - DNA, 25 bp, Probe Sequence
tgctccacgcacttgtcgtggtttc

SEQ ID NO: 286865 - DNA, 25 bp, Probe Sequence
tgctaagcagcaagtgtcagggtgg

SEQ ID NO: 286866 - DNA, 25 bp, Probe Sequence
tgctaacagcaattccaggctcagt

SEQ ID NO: 286867 - DNA, 25 bp, Probe Sequence
tgctccacagcaacatcaatgacct

SEQ ID NO: 286868 - DNA, 25 bp, Probe Sequence
tgctggcacagcagttctgagccct

SEQ ID NO: 286869 - DNA, 25 bp, Probe Sequence
tgctatgtcaggcttcatactccac

SEQ ID NO: 286870 - DNA, 25 bp, Probe Sequence
tgctgttcaggtcctctatcagcca

SEQ ID NO: 286871 - DNA, 25 bp, Probe Sequence
tgctgttatcctggttctcaccagg

SEQ ID NO: 286872 - DNA, 25 bp, Probe Sequence
tgcgatcctactgtttcactgcaaa

SEQ ID NO: 286873 - DNA, 25 bp, Probe Sequence
tgctgccactacatcgttatctgga

SEQ ID NO: 286874 - DNA, 25 bp, Probe Sequence
tgctcccttcaaagatttctgtaga

SEQ ID NO: 286875 - DNA, 25 bp, Probe Sequence
tgctcctaatcaagattgtttgaac

SEQ ID NO: 286876 - DNA, 25 bp, Probe Sequence
tgctgccttcatacagatgctgatt

SEQ ID NO: 286877 - DNA, 25 bp, Probe Sequence
tgctggtgtcatggctattgagcat

SEQ ID NO: 286878 - DNA, 25 bp, Probe Sequence
tgcggtggtccttgtgacatgtcag

SEQ ID NO: 286879 - DNA, 25 bp, Probe Sequence
tgcggctggttttggacagcgacac

SEQ ID NO: 286880 - DNA, 25 bp, Probe Sequence
tgctacgtggtgaaggacagcgcgc

SEQ ID NO: 286881 - DNA, 25 bp, Probe Sequence
tgctacactgtactcagggcatcct

SEQ ID NO: 286882 - DNA, 25 bp, Probe Sequence
tgctgagactcttgacagcacctcc

SEQ ID NO: 286883 - DNA, 25 bp, Probe Sequence
tgctatatgtgttacagacctcggt

SEQ ID NO: 286884 - DNA, 25 bp, Probe Sequence
tgctcattgttgtttgggctcaggt

SEQ ID NO: 286885 - DNA, 25 bp, Probe Sequence
tgctcagctttacttcaggtcattt

SEQ ID NO: 286886 - DNA, 25 bp, Probe Sequence
tgctgccagttatcataggctgttt

SEQ ID NO: 286887 - DNA, 25 bp, Probe Sequence
tgcccagcttcacttacagggtttc

SEQ ID NO: 286888 - DNA, 25 bp, Probe Sequence
tgctcaactcccacacggatgtggt

SEQ ID NO: 286889 - DNA, 25 bp, Probe Sequence
tgctcacacccagcacggaggtgtg

SEQ ID NO: 286890 - DNA, 25 bp, Probe Sequence
tgctatcacccgaggcagagcgagt

SEQ ID NO: 286891 - DNA, 25 bp, Probe Sequence
tgctccacccagagaagcacacttt

SEQ ID NO: 286892 - DNA, 25 bp, Probe Sequence
tgctgtacttactacaagaatcttt

SEQ ID NO: 286893 - DNA, 25 bp, Probe Sequence
tgctcttctttgtacacgaacttca

SEQ ID NO: 286894 - DNA, 25 bp, Probe Sequence
tgctgcttcttttatgacaaacaac

SEQ ID NO: 286895 - DNA, 25 bp, Probe Sequence
tgctgctacttatataattgccaaa

SEQ ID NO: 286896 - DNA, 25 bp, Probe Sequence
tcctgcactaacattttgccgcagt

SEQ ID NO: 286897 - DNA, 25 bp, Probe Sequence
tgcctgcctcacattttgtgggtgt

SEQ ID NO: 286898 - DNA, 25 bp, Probe Sequence
tgcctggtacagtatgggggttgta

SEQ ID NO: 286899 - DNA, 25 bp, Probe Sequence
tcctctgacgaatgggtatattgaa

SEQ ID NO: 286900 - DNA, 25 bp, Probe Sequence
tgcgttgcactgaggtggattttta

SEQ ID NO: 286901 - DNA, 25 bp, Probe Sequence
tgctgcttgattgtggagttgatgt

SEQ ID NO: 286902 - DNA, 25 bp, Probe Sequence
tgctccgtgcccggatgttgatcat

SEQ ID NO: 286903 - DNA, 25 bp, Probe Sequence
tgctccgtactctaacatctagctg

SEQ ID NO: 286904 - DNA, 25 bp, Probe Sequence
tgctctactacttcacacattatag

SEQ ID NO: 286905 - DNA, 25 bp, Probe Sequence
tgctctaataattctactgctagga

SEQ ID NO: 286906 - DNA, 25 bp, Probe Sequence
tgctgcagaaaagctgtttgggaat

SEQ ID NO: 286907 - DNA, 25 bp, Probe Sequence
tgctgcagaccaggaggtatgtgag

SEQ ID NO: 286908 - DNA, 25 bp, Probe Sequence
tgctgaggccgccagggagaagggc

SEQ ID NO: 286909 - DNA, 25 bp, Probe Sequence
tgctgagacccccggagcaggggtc

SEQ ID NO: 286910 - DNA, 25 bp, Probe Sequence
tgccgacgccgccggaaagcgtgcc

SEQ ID NO: 286911 - DNA, 25 bp, Probe Sequence
tgccgtccttgggaaaggcctgcat

SEQ ID NO: 286912 - DNA, 25 bp, Probe Sequence
tgccgtccttgggaaaggcctgcat

SEQ ID NO: 286913 - DNA, 25 bp, Probe Sequence
tgctctgtcctacaaaggggctttc

SEQ ID NO: 286914 - DNA, 25 bp, Probe Sequence
tgctctttctggaaatgaggaacta

SEQ ID NO: 286915 - DNA, 25 bp, Probe Sequence
tgctcttattccattgatgagaact

SEQ ID NO: 286916 - DNA, 25 bp, Probe Sequence
tgctctctatttagcggagaaatat

SEQ ID NO: 286917 - DNA, 25 bp, Probe Sequence
tgctcactgcttcgtcggcaaaaat

SEQ ID NO: 286918 - DNA, 25 bp, Probe Sequence
tgctcagcttctggacgcagcaaaa

SEQ ID NO: 286919 - DNA, 25 bp, Probe Sequence
tgctgcgcttcttctcagagaagag

SEQ ID NO: 286920 - DNA, 25 bp, Probe Sequence
tgctgccatctcactctaaagataa

SEQ ID NO: 286921 - DNA, 25 bp, Probe Sequence
tgctccgtgctcctttaaatagtga

SEQ ID NO: 286922 - DNA, 25 bp, Probe Sequence
tgctccaagcttcctgtaaactata

SEQ ID NO: 286923 - DNA, 25 bp, Probe Sequence
tgctcagaacttgggtgaccggatc

SEQ ID NO: 286924 - DNA, 25 bp, Probe Sequence
tgctctgagagtagggcgggcttga

SEQ ID NO: 286925 - DNA, 25 bp, Probe Sequence
tgctctatgatcaggaccgtgtgga

SEQ ID NO: 286926 - DNA, 25 bp, Probe Sequence
tgctgctggatggggagacgttcga

SEQ ID NO: 286927 - DNA, 25 bp, Probe Sequence
tgctgtggtggtgattgcgtctgtg

SEQ ID NO: 286928 - DNA, 25 bp, Probe Sequence
tgctgggtgtgctcttgaggcgaga

SEQ ID NO: 286929 - DNA, 25 bp, Probe Sequence
tgcgtgttgagtgtgtgggcggcag

SEQ ID NO: 286930 - DNA, 25 bp, Probe Sequence
tgcgtgagtggtgtgcaggcgcggt

SEQ ID NO: 286931 - DNA, 25 bp, Probe Sequence
tgcgtgagtggtgtgcaggcgcggt

SEQ ID NO: 286932 - DNA, 25 bp, Probe Sequence
tgcgtgagtggtgtgcaggcgcggt

SEQ ID NO: 286933 - DNA, 25 bp, Probe Sequence
tgcctggggatcatcaagttggctt

SEQ ID NO: 286934 - DNA, 25 bp, Probe Sequence
tgccaggtggacagccagtgtcctg

SEQ ID NO: 286935 - DNA, 25 bp, Probe Sequence
tccggcatgtgcaaggccggcttcg

SEQ ID NO: 286936 - DNA, 25 bp, Probe Sequence
tgctctggcaggcaggcaaagctag

SEQ ID NO: 286937 - DNA, 25 bp, Probe Sequence
tgctcaggggagggtacaccagctc

SEQ ID NO: 286938 - DNA, 25 bp, Probe Sequence
tgctcagaggggcgattccctcgtc

SEQ ID NO: 286939 - DNA, 25 bp, Probe Sequence
tgctgagaggggctgtccagttccc

SEQ ID NO: 286940 - DNA, 25 bp, Probe Sequence
tgcgagaacggcgagtccatgtcac

SEQ ID NO: 286941 - DNA, 25 bp, Probe Sequence
tgctaaactgtcttgcttatcacaa

SEQ ID NO: 286942 - DNA, 25 bp, Probe Sequence
tgctaaattccgtctgattctaata

SEQ ID NO: 286943 - DNA, 25 bp, Probe Sequence
tgctaaattctccatggacatagag

SEQ ID NO: 286944 - DNA, 25 bp, Probe Sequence
tgctgcagacatttggtgggtagag

SEQ ID NO: 286945 - DNA, 25 bp, Probe Sequence
tgctgcgcagatttgcagggttgag

SEQ ID NO: 286946 - DNA, 25 bp, Probe Sequence
tgctgcagcatattgtactggcctg

SEQ ID NO: 286947 - DNA, 25 bp, Probe Sequence
tgctgcagcatattgtactggcctg

SEQ ID NO: 286948 - DNA, 25 bp, Probe Sequence
tgctgccaactaacattgcattgat

SEQ ID NO: 286949 - DNA, 25 bp, Probe Sequence
tgctgccaccaaatctgtctagaat

SEQ ID NO: 286950 - DNA, 25 bp, Probe Sequence
tgctgctgcagtgatgtctgtgcca

SEQ ID NO: 286951 - DNA, 25 bp, Probe Sequence
tgcgctcagtgccatgcgttcgctg

SEQ ID NO: 286952 - DNA, 25 bp, Probe Sequence
tgctcatcctgcctggattcaagga

SEQ ID NO: 286953 - DNA, 25 bp, Probe Sequence
tgctcaactgcctcatgtacaagat

SEQ ID NO: 286954 - DNA, 25 bp, Probe Sequence
tgctaactcctgatctaactgatga

SEQ ID NO: 286955 - DNA, 25 bp, Probe Sequence
tgccaactagtaaaaactggacctt

SEQ ID NO: 286956 - DNA, 25 bp, Probe Sequence
tgcccctttccatacagggattttt

SEQ ID NO: 286957 - DNA, 25 bp, Probe Sequence
tgctcctttttttactggtgtggtt

SEQ ID NO: 286958 - DNA, 25 bp, Probe Sequence
tgctccttcactactaactgttgag

SEQ ID NO: 286959 - DNA, 25 bp, Probe Sequence
tgctcagcctgactttcaagcgtta

SEQ ID NO: 286960 - DNA, 25 bp, Probe Sequence
tgctcacagctgctattaaccctat

SEQ ID NO: 286961 - DNA, 25 bp, Probe Sequence
tgctgcaactggcaaacctgccgac

SEQ ID NO: 286962 - DNA, 25 bp, Probe Sequence
tgctcaattgatcatgaccctctca

SEQ ID NO: 286963 - DNA, 25 bp, Probe Sequence
tgctggtatatccatgacctcctga

SEQ ID NO: 286964 - DNA, 25 bp, Probe Sequence
tgctgcgctgattttagccagccac

SEQ ID NO: 286965 - DNA, 25 bp, Probe Sequence
tgctgtgctggatttctgctaccat

SEQ ID NO: 286966 - DNA, 25 bp, Probe Sequence
tgctggggcacaggctatcatctat

SEQ ID NO: 286967 - DNA, 25 bp, Probe Sequence
tgcggtgggcagctacatctatgac

SEQ ID NO: 286968 - DNA, 25 bp, Probe Sequence
tgcgcgggggccatattagcagcgg

SEQ ID NO: 286969 - DNA, 25 bp, Probe Sequence
tgccggtggacctcagcaagtggtc

SEQ ID NO: 286970 - DNA, 25 bp, Probe Sequence
tgccgggaaccccagaggaggtcgc

SEQ ID NO: 286971 - DNA, 25 bp, Probe Sequence
tgccgggaaccccagaggaggtcgc

SEQ ID NO: 286972 - DNA, 25 bp, Probe Sequence
tgcccagtaagcgccaggtggtggc

SEQ ID NO: 286973 - DNA, 25 bp, Probe Sequence
tgcccaggactcggaaggggcgccc

SEQ ID NO: 286974 - DNA, 25 bp, Probe Sequence
tgcggcgcgaccagaaagaggccct

SEQ ID NO: 286975 - DNA, 25 bp, Probe Sequence
tgctggcgcgggatgaggacgggcc

SEQ ID NO: 286976 - DNA, 25 bp, Probe Sequence
tgctgcaggggtctggggttggcaa

SEQ ID NO: 286977 - DNA, 25 bp, Probe Sequence
tgcgcaatgtggcattggggggccg

SEQ ID NO: 286978 - DNA, 25 bp, Probe Sequence
tgcgccttcaggaggatgcggacgg

SEQ ID NO: 286979 - DNA, 25 bp, Probe Sequence
tgctcacccaggacgtgagggtctg

SEQ ID NO: 286980 - DNA, 25 bp, Probe Sequence
tgctgcacccatctgcggatggtac

SEQ ID NO: 286981 - DNA, 25 bp, Probe Sequence
tgctgctgcccaactggcagggtag

SEQ ID NO: 286982 - DNA, 25 bp, Probe Sequence
tgctgctgacgctctgggtgaagaa

SEQ ID NO: 286983 - DNA, 25 bp, Probe Sequence
tgctggatctgctgtttgaagcgca

SEQ ID NO: 286984 - DNA, 25 bp, Probe Sequence
tgcgtctgatgtgtcattaagtgca

SEQ ID NO: 286985 - DNA, 25 bp, Probe Sequence
tgcgtctgatgtgtcattaagtgca

SEQ ID NO: 286986 - DNA, 25 bp, Probe Sequence
tgcgtcatgttcaccaactgcatgc

SEQ ID NO: 286987 - DNA, 25 bp, Probe Sequence
tgcgcaagtacaactacacgctgct

SEQ ID NO: 286988 - DNA, 25 bp, Probe Sequence
tgctgatgaaacactgacctcttgt

SEQ ID NO: 286989 - DNA, 25 bp, Probe Sequence
tgcgaaagtgctcaaccttgtgctg

SEQ ID NO: 286990 - DNA, 25 bp, Probe Sequence
tgcggactgatgttagactttggat

SEQ ID NO: 286991 - DNA, 25 bp, Probe Sequence
tgctggactttgagcactttctgcc

SEQ ID NO: 286992 - DNA, 25 bp, Probe Sequence
tgctggactttgagcactttctgcc

SEQ ID NO: 286993 - DNA, 25 bp, Probe Sequence
tgcggcaatttgacgacctcttccg

SEQ ID NO: 286994 - DNA, 25 bp, Probe Sequence
tgcgtccattagagcacagtccacc

SEQ ID NO: 286995 - DNA, 25 bp, Probe Sequence
tgcgggacatagaacaggtgccaca

SEQ ID NO: 286996 - DNA, 25 bp, Probe Sequence
tgcgactacaacaaggaggccatca

SEQ ID NO: 286997 - DNA, 25 bp, Probe Sequence
tgctgacaataacacaaaggccaat

SEQ ID NO: 286998 - DNA, 25 bp, Probe Sequence
tgcccagtaatcacctcaggcacga

SEQ ID NO: 286999 - DNA, 25 bp, Probe Sequence
tgctccgaaggttccgaagccgata

SEQ ID NO: 287000 - DNA, 25 bp, Probe Sequence
tgctcctggacttccctaagggaaa

SEQ ID NO: 287001 - DNA, 25 bp, Probe Sequence
tgcccgcaaaccagacacataggac

SEQ ID NO: 287002 - DNA, 25 bp, Probe Sequence
tgcccagcccagggggaaagggagc

SEQ ID NO: 287003 - DNA, 25 bp, Probe Sequence
tgctgcctagcctgtgggcaaaggg

SEQ ID NO: 287004 - DNA, 25 bp, Probe Sequence
tgctgtctaccatggacagcccggc

SEQ ID NO: 287005 - DNA, 25 bp, Probe Sequence
tgcgtgctgaagggcgacggcccag

SEQ ID NO: 287006 - DNA, 25 bp, Probe Sequence
tgcggctgatcaggatggagctgag

SEQ ID NO: 287007 - DNA, 25 bp, Probe Sequence
tgcgttgactgactgcagcagcttg

SEQ ID NO: 287008 - DNA, 25 bp, Probe Sequence
tgctgatggacttcgatgcgctggt

SEQ ID NO: 287009 - DNA, 25 bp, Probe Sequence
tgctgctgtacttcctgcagctgga

SEQ ID NO: 287010 - DNA, 25 bp, Probe Sequence
tgctgcagaacttcgccatgtgatg

SEQ ID NO: 287011 - DNA, 25 bp, Probe Sequence
tgctgccccatacacatatgatgcc

SEQ ID NO: 287012 - DNA, 25 bp, Probe Sequence
tgctccatacaatgactagtcacct

SEQ ID NO: 287013 - DNA, 25 bp, Probe Sequence
tgctcttcacataaagcttgctacc

SEQ ID NO: 287014 - DNA, 25 bp, Probe Sequence
tgctcatatgtgtgcacgcttggac

SEQ ID NO: 287015 - DNA, 25 bp, Probe Sequence
tgctcatatgtattgcctgttgctt

SEQ ID NO: 287016 - DNA, 25 bp, Probe Sequence
tgctctcatgactatgcagtttcta

SEQ ID NO: 287017 - DNA, 25 bp, Probe Sequence
tgccttacccgttttcattagtgca

SEQ ID NO: 287018 - DNA, 25 bp, Probe Sequence
tgccttgagctcctttatgtttggg

SEQ ID NO: 287019 - DNA, 25 bp, Probe Sequence
tgctcattaatcctgggagtctttg

SEQ ID NO: 287020 - DNA, 25 bp, Probe Sequence
tgccttccaccggagagactactga

SEQ ID NO: 287021 - DNA, 25 bp, Probe Sequence
tgctcgttagcatggaagacttctc

SEQ ID NO: 287022 - DNA, 25 bp, Probe Sequence
tgctcagataaacatacaacttcca

SEQ ID NO: 287023 - DNA, 25 bp, Probe Sequence
tgctcagataaacatacaacttcca

SEQ ID NO: 287024 - DNA, 25 bp, Probe Sequence
tgctcagtaaagtcttccatccaaa

SEQ ID NO: 287025 - DNA, 25 bp, Probe Sequence
tgctctgtaaagggtcttcctgaag

SEQ ID NO: 287026 - DNA, 25 bp, Probe Sequence
tgctctttgaatcgagtttggagga

SEQ ID NO: 287027 - DNA, 25 bp, Probe Sequence
tgctcttcgagagggtgtcagtgag

SEQ ID NO: 287028 - DNA, 25 bp, Probe Sequence
tgctctgtgtatgcggatgatttag

SEQ ID NO: 287029 - DNA, 25 bp, Probe Sequence
tgctctgtaattctggacattagtg

SEQ ID NO: 287030 - DNA, 25 bp, Probe Sequence
tgccaggagttgtctgcgagattgt

SEQ ID NO: 287031 - DNA, 25 bp, Probe Sequence
tgctcctgatttccctggaggttct

SEQ ID NO: 287032 - DNA, 25 bp, Probe Sequence
tgccctggtcaggtgtgggggtctt

SEQ ID NO: 287033 - DNA, 25 bp, Probe Sequence
tgcccttacaggtgggaccttttgt

SEQ ID NO: 287034 - DNA, 25 bp, Probe Sequence
tgcccttacaggtggagtatcttcg

SEQ ID NO: 287035 - DNA, 25 bp, Probe Sequence
tgcccttcaccgtggatgttttcag

SEQ ID NO: 287036 - DNA, 25 bp, Probe Sequence
tgcccttcaccgtggatgttttcag

SEQ ID NO: 287037 - DNA, 25 bp, Probe Sequence
tgcctttccctgtgtgaattttgta

SEQ ID NO: 287038 - DNA, 25 bp, Probe Sequence
tgcctttccctgtgtgaattttgta

SEQ ID NO: 287039 - DNA, 25 bp, Probe Sequence
tgcccttccctttgtgacttgaaga

SEQ ID NO: 287040 - DNA, 25 bp, Probe Sequence
tgcccttccctttgtgacttgaaga

SEQ ID NO: 287041 - DNA, 25 bp, Probe Sequence
tgcccttccctttgtgacttgaaga

SEQ ID NO: 287042 - DNA, 25 bp, Probe Sequence
tgccctttcccttcagaaaacgatg

SEQ ID NO: 287043 - DNA, 25 bp, Probe Sequence
tgcctctactttatcaattaactga

SEQ ID NO: 287044 - DNA, 25 bp, Probe Sequence
tgcctctactttatcaattaactga

SEQ ID NO: 287045 - DNA, 25 bp, Probe Sequence
tgcccttaactacgaactgaattgt

SEQ ID NO: 287046 - DNA, 25 bp, Probe Sequence
tccgttgaataccgccttgaattta

SEQ ID NO: 287047 - DNA, 25 bp, Probe Sequence
tgccgtctaaacctctctggagtga

SEQ ID NO: 287048 - DNA, 25 bp, Probe Sequence
tgcctttcaaaccctcaggtttgcc

SEQ ID NO: 287049 - DNA, 25 bp, Probe Sequence
tgccatttgcggaggtgacctttga

SEQ ID NO: 287050 - DNA, 25 bp, Probe Sequence
tgccttctcggctcttgacacttag

SEQ ID NO: 287051 - DNA, 25 bp, Probe Sequence
tgccctctgccgtgctaaaatatca

SEQ ID NO: 287052 - DNA, 25 bp, Probe Sequence
tgccctcgctttggatggaagttct

SEQ ID NO: 287053 - DNA, 25 bp, Probe Sequence
tgcccaactggcagggtagtggctc

SEQ ID NO: 287054 - DNA, 25 bp, Probe Sequence
tgctccaacttctgggtcagcagca

SEQ ID NO: 287055 - DNA, 25 bp, Probe Sequence
tgcccatattcctgctggctaacaa

SEQ ID NO: 287056 - DNA, 25 bp, Probe Sequence
tgctctcatagttctatcctctaat

SEQ ID NO: 287057 - DNA, 25 bp, Probe Sequence
tgcgtcatcgtttgctatgtctacg

SEQ ID NO: 287058 - DNA, 25 bp, Probe Sequence
tgctgttggtgcaagccatgtctcc

SEQ ID NO: 287059 - DNA, 25 bp, Probe Sequence
tgcgtaggtctacatcttactcaga

SEQ ID NO: 287060 - DNA, 25 bp, Probe Sequence
tgctctacagtgcagttttagtcag

SEQ ID NO: 287061 - DNA, 25 bp, Probe Sequence
tgctctgaaatctcctttagccatc

SEQ ID NO: 287062 - DNA, 25 bp, Probe Sequence
tgctctaagtgctgtttgttagtta

SEQ ID NO: 287063 - DNA, 25 bp, Probe Sequence
tgctctttgtgcttttgggcatctg

SEQ ID NO: 287064 - DNA, 25 bp, Probe Sequence
tgctccttgctgttttctgatgatt

SEQ ID NO: 287065 - DNA, 25 bp, Probe Sequence
tgctgcctctgtaaattcatgtatt

SEQ ID NO: 287066 - DNA, 25 bp, Probe Sequence
tgctgcttgtgatatatggagtctt

SEQ ID NO: 287067 - DNA, 25 bp, Probe Sequence
tgctgcctgctttgtgcagggtcct

SEQ ID NO: 287068 - DNA, 25 bp, Probe Sequence
tgctgcctgctttgtgcagggtcct

SEQ ID NO: 287069 - DNA, 25 bp, Probe Sequence
tgctccatctgaagcggttctcaga

SEQ ID NO: 287070 - DNA, 25 bp, Probe Sequence
tgcccatgctgcagacagtggccaa

SEQ ID NO: 287071 - DNA, 25 bp, Probe Sequence
tgcccatgctgcagacagtggccaa

SEQ ID NO: 287072 - DNA, 25 bp, Probe Sequence
tgctctagtggtacaggcccagatg

SEQ ID NO: 287073 - DNA, 25 bp, Probe Sequence
tgctctgaggtaaaggtccatgaac

SEQ ID NO: 287074 - DNA, 25 bp, Probe Sequence
tgctcctgttaaaggaactgacagc

SEQ ID NO: 287075 - DNA, 25 bp, Probe Sequence
tgctccctggtgaggtactgcagag

SEQ ID NO: 287076 - DNA, 25 bp, Probe Sequence
tgccccgttgtgggcctggagatga

SEQ ID NO: 287077 - DNA, 25 bp, Probe Sequence
tgctcccgtcgtgggctgagaagga

SEQ ID NO: 287078 - DNA, 25 bp, Probe Sequence
tgctcccttgggctctagagaggag

SEQ ID NO: 287079 - DNA, 25 bp, Probe Sequence
tgctcgccctgtattgaccaaggag

SEQ ID NO: 287080 - DNA, 25 bp, Probe Sequence
tgctggcccgatataagctccgaga

SEQ ID NO: 287081 - DNA, 25 bp, Probe Sequence
tgctgcagccccagctaaggttgaa

SEQ ID NO: 287082 - DNA, 25 bp, Probe Sequence
tgctgtcaccacacttgggtcagga

SEQ ID NO: 287083 - DNA, 25 bp, Probe Sequence
tgctggcccatcactttggcaaaga

SEQ ID NO: 287084 - DNA, 25 bp, Probe Sequence
tgctggcccatcactttggcaaaga

SEQ ID NO: 287085 - DNA, 25 bp, Probe Sequence
tgctccgcctgcagcgttgagaaac

SEQ ID NO: 287086 - DNA, 25 bp, Probe Sequence
tgctgccgcctgagtttcaagaatt

SEQ ID NO: 287087 - DNA, 25 bp, Probe Sequence
tgctgcactgctttggtttcatcag

SEQ ID NO: 287088 - DNA, 25 bp, Probe Sequence
tgctgcactgctttggtttcatcag

SEQ ID NO: 287089 - DNA, 25 bp, Probe Sequence
tgctgtctgatctgtgctttccagc

SEQ ID NO: 287090 - DNA, 25 bp, Probe Sequence
tgctgttgcagctcaggtctagcac

SEQ ID NO: 287091 - DNA, 25 bp, Probe Sequence
tgctgtatggatgcaggtcttgcca

SEQ ID NO: 287092 - DNA, 25 bp, Probe Sequence
tgctggcaggtttggcatcttcaca

SEQ ID NO: 287093 - DNA, 25 bp, Probe Sequence
tgcgcagggttctgatgtgtctctc

SEQ ID NO: 287094 - DNA, 25 bp, Probe Sequence
tgctgcgggtgctaaactggtgctc

SEQ ID NO: 287095 - DNA, 25 bp, Probe Sequence
tgctgcggatggcaatcctgctgtc

SEQ ID NO: 287096 - DNA, 25 bp, Probe Sequence
tgctgcggctgtgtgttttctgagc

SEQ ID NO: 287097 - DNA, 25 bp, Probe Sequence
tgctgaggttccttctattctgatg

SEQ ID NO: 287098 - DNA, 25 bp, Probe Sequence
tgctgaacattccatattattatag

SEQ ID NO: 287099 - DNA, 25 bp, Probe Sequence
tgctgaactgtccattttggtggtt

SEQ ID NO: 287100 - DNA, 25 bp, Probe Sequence
tgcccagtgtattgaattggtggta

SEQ ID NO: 287101 - DNA, 25 bp, Probe Sequence
tgcccagtgttcccgtggaatggaa

SEQ ID NO: 287102 - DNA, 25 bp, Probe Sequence
tgctccaggattccggtggcagatt

SEQ ID NO: 287103 - DNA, 25 bp, Probe Sequence
tgctcgcaggtgcccaggggcactc

SEQ ID NO: 287104 - DNA, 25 bp, Probe Sequence
tgctctgggcgggatggagctgaat

SEQ ID NO: 287105 - DNA, 25 bp, Probe Sequence
tgctctcggcggaagtgatcgctgt

SEQ ID NO: 287106 - DNA, 25 bp, Probe Sequence
tgcccggcctgaagatgaccatgga

SEQ ID NO: 287107 - DNA, 25 bp, Probe Sequence
tgcctaccgtcacatgaccttaggc

SEQ ID NO: 287108 - DNA, 25 bp, Probe Sequence
tgccccacgtacatgaccttatggg

SEQ ID NO: 287109 - DNA, 25 bp, Probe Sequence
tgcccccagggataccaagtggtga

SEQ ID NO: 287110 - DNA, 25 bp, Probe Sequence
tgctcccggaggtacctgaaggtgg

SEQ ID NO: 287111 - DNA, 25 bp, Probe Sequence
tgccctgcccaggtatcctggggga

SEQ ID NO: 287112 - DNA, 25 bp, Probe Sequence
tgccgtccccctaggatggggggca

SEQ ID NO: 287113 - DNA, 25 bp, Probe Sequence
tccagcccccgcattagggggagac

SEQ ID NO: 287114 - DNA, 25 bp, Probe Sequence
tcctagcttcttctaaggggggagg

SEQ ID NO: 287115 - DNA, 25 bp, Probe Sequence
tcctacttcttgtccagggcaagga

SEQ ID NO: 287116 - DNA, 25 bp, Probe Sequence
tcctgaatctttgggggtgaaggga

SEQ ID NO: 287117 - DNA, 25 bp, Probe Sequence
tgcggccatcttaagttcgggggga

SEQ ID NO: 287118 - DNA, 25 bp, Probe Sequence
tgctggcgcttctctcgtcggcgga

SEQ ID NO: 287119 - DNA, 25 bp, Probe Sequence
tgcggccatgtctgtcatgcggccg

SEQ ID NO: 287120 - DNA, 25 bp, Probe Sequence
tgcggacagagctactaccgcgcgg

SEQ ID NO: 287121 - DNA, 25 bp, Probe Sequence
tgccgacaaggcatctgccagcggc

SEQ ID NO: 287122 - DNA, 25 bp, Probe Sequence
tgcccagaggacatcgccaaggaaa

SEQ ID NO: 287123 - DNA, 25 bp, Probe Sequence
tgccgatgactatatccacaccgca

SEQ ID NO: 287124 - DNA, 25 bp, Probe Sequence
tgccctgaaatatctcacagccgag

SEQ ID NO: 287125 - DNA, 25 bp, Probe Sequence
tgccattagtgattaccgagtaaac

SEQ ID NO: 287126 - DNA, 25 bp, Probe Sequence
tgccttaggcctacctgatcaaaat

SEQ ID NO: 287127 - DNA, 25 bp, Probe Sequence
tgccttgaggcaatgcattcgtaac

SEQ ID NO: 287128 - DNA, 25 bp, Probe Sequence
tgcctctggacagcatggggaaccc

SEQ ID NO: 287129 - DNA, 25 bp, Probe Sequence
tgctccatggagggcacgtggtacc

SEQ ID NO: 287130 - DNA, 25 bp, Probe Sequence
tgctcctggggagtccttggagtgc

SEQ ID NO: 287131 - DNA, 25 bp, Probe Sequence
tgcctgacggtgaacactctggacc

SEQ ID NO: 287132 - DNA, 25 bp, Probe Sequence
tgctgtggcgcggattcttaggaac

SEQ ID NO: 287133 - DNA, 25 bp, Probe Sequence
tgcgctcggtgcgatactgatgatg

SEQ ID NO: 287134 - DNA, 25 bp, Probe Sequence
tgcgactggagtacctgcagatccc

SEQ ID NO: 287135 - DNA, 25 bp, Probe Sequence
tgcgccactgagacggcagagaccc

SEQ ID NO: 287136 - DNA, 25 bp, Probe Sequence
tgctgccctgaagaatggcgccacc

SEQ ID NO: 287137 - DNA, 25 bp, Probe Sequence
tgctccattggagtagtctcccacc

SEQ ID NO: 287138 - DNA, 25 bp, Probe Sequence
tgctcctatggagtcacataagcca

SEQ ID NO: 287139 - DNA, 25 bp, Probe Sequence
tgctccatatatatccagaatgtat

SEQ ID NO: 287140 - DNA, 25 bp, Probe Sequence
tgctccatcaccaccatgtgagtgg

SEQ ID NO: 287141 - DNA, 25 bp, Probe Sequence
tgctgcacgctggaaccatgtgtgg

SEQ ID NO: 287142 - DNA, 25 bp, Probe Sequence
tgctgacagcaggacccagtgttgc

SEQ ID NO: 287143 - DNA, 25 bp, Probe Sequence
tgctcctaggaggctgcttgttgcc

SEQ ID NO: 287144 - DNA, 25 bp, Probe Sequence
tgctcccaggatggtcgtgtgttca

SEQ ID NO: 287145 - DNA, 25 bp, Probe Sequence
tgcctacagtgatgtttggaatcga

SEQ ID NO: 287146 - DNA, 25 bp, Probe Sequence
tgcgtgaaggaagtggtcgaagctc

SEQ ID NO: 287147 - DNA, 25 bp, Probe Sequence
tgcgttcgctgaaaggcatcggtgc

SEQ ID NO: 287148 - DNA, 25 bp, Probe Sequence
tgctgttcctgtaagtttgctatta

SEQ ID NO: 287149 - DNA, 25 bp, Probe Sequence
tgcgttcctgttagcataatgtgag

SEQ ID NO: 287150 - DNA, 25 bp, Probe Sequence
tgcgcgatgccgggatcaaagtctg

SEQ ID NO: 287151 - DNA, 25 bp, Probe Sequence
tcgtcaggtgcaggtcagcacgttg

SEQ ID NO: 287152 - DNA, 25 bp, Probe Sequence
tgctgtcgggactgagcaggcaatg

SEQ ID NO: 287153 - DNA, 25 bp, Probe Sequence
tgctccgggccaatgcagaggcctc

SEQ ID NO: 287154 - DNA, 25 bp, Probe Sequence
tgctccgggccaatgcagaggcctc

SEQ ID NO: 287155 - DNA, 25 bp, Probe Sequence
tgctccgggccaatgcagaggcctc

SEQ ID NO: 287156 - DNA, 25 bp, Probe Sequence
tgctgccagggcgagtgcgagtggc

SEQ ID NO: 287157 - DNA, 25 bp, Probe Sequence
tgccaaggctgtgggcaaggtcatc

SEQ ID NO: 287158 - DNA, 25 bp, Probe Sequence
tgctgaagcgcgaggagcgggcgcg

SEQ ID NO: 287159 - DNA, 25 bp, Probe Sequence
tgcgggcgtatctgcagggaggcaa

SEQ ID NO: 287160 - DNA, 25 bp, Probe Sequence
tgcggaggccactgtgggaggctcg

SEQ ID NO: 287161 - DNA, 25 bp, Probe Sequence
tgcgggaggccgtggagctcccgct

SEQ ID NO: 287162 - DNA, 25 bp, Probe Sequence
tgctgaggtaacacggaccccagcc

SEQ ID NO: 287163 - DNA, 25 bp, Probe Sequence
tgccaggacaccacggacgaatgca

SEQ ID NO: 287164 - DNA, 25 bp, Probe Sequence
tccaaaatgcacactgcgggttatt

SEQ ID NO: 287165 - DNA, 25 bp, Probe Sequence
tccaaataatctcctcggtgtgggt

SEQ ID NO: 287166 - DNA, 25 bp, Probe Sequence
tccatgacatgaatctcgctgactg

SEQ ID NO: 287167 - DNA, 25 bp, Probe Sequence
tgcgagcacattacttgctgcatgg

SEQ ID NO: 287168 - DNA, 25 bp, Probe Sequence
tgctgagacttagtctcctggctga

SEQ ID NO: 287169 - DNA, 25 bp, Probe Sequence
tgctgagatgatccaggtcctgggc

SEQ ID NO: 287170 - DNA, 25 bp, Probe Sequence
tgctgcagtgtttcgggcatgggca

SEQ ID NO: 287171 - DNA, 25 bp, Probe Sequence
tgctgcagttcctgatgagatcccc

SEQ ID NO: 287172 - DNA, 25 bp, Probe Sequence
tgcgcatgtttgctgactacctcgc

SEQ ID NO: 287173 - DNA, 25 bp, Probe Sequence
tgcgattgattgttcatcttccctc

SEQ ID NO: 287174 - DNA, 25 bp, Probe Sequence
tgctgttgataatatctctcacccg

SEQ ID NO: 287175 - DNA, 25 bp, Probe Sequence
tgctgtatgctcatagccttgcact

SEQ ID NO: 287176 - DNA, 25 bp, Probe Sequence
tgctgcttgcaaatatgcatttcca

SEQ ID NO: 287177 - DNA, 25 bp, Probe Sequence
tgctgcccataaggctgtgctgcac

SEQ ID NO: 287178 - DNA, 25 bp, Probe Sequence
tgctgcccattaggcagactctccc

SEQ ID NO: 287179 - DNA, 25 bp, Probe Sequence
tgccgtgatctagtgtgcacttccc

SEQ ID NO: 287180 - DNA, 25 bp, Probe Sequence
tgcctgatgactctgtggattccac

SEQ ID NO: 287181 - DNA, 25 bp, Probe Sequence
tgcgcaggactcagatgacttcgag

SEQ ID NO: 287182 - DNA, 25 bp, Probe Sequence
tgcctggacatcagtgaacggaaat

SEQ ID NO: 287183 - DNA, 25 bp, Probe Sequence
tgcctgaggattctgacacctacct

SEQ ID NO: 287184 - DNA, 25 bp, Probe Sequence
tgcctggtcatctcagacccatgaa

SEQ ID NO: 287185 - DNA, 25 bp, Probe Sequence
tgctgtggctattccaacatctctg

SEQ ID NO: 287186 - DNA, 25 bp, Probe Sequence
tgctgtgaggcttcacaacctgctg

SEQ ID NO: 287187 - DNA, 25 bp, Probe Sequence
tgctgtgagagttcaggccctggga

SEQ ID NO: 287188 - DNA, 25 bp, Probe Sequence
tgctgtgcgagtgcaggtacgagga

SEQ ID NO: 287189 - DNA, 25 bp, Probe Sequence
tgctgctgaagcgcgaggagcgggc

SEQ ID NO: 287190 - DNA, 25 bp, Probe Sequence
tgctgctgaccctggtagaggtcat

SEQ ID NO: 287191 - DNA, 25 bp, Probe Sequence
tgctgcttcgttaggctggagggca

SEQ ID NO: 287192 - DNA, 25 bp, Probe Sequence
tgctggtcatttatgatggcaagga

SEQ ID NO: 287193 - DNA, 25 bp, Probe Sequence
tgctgggtgcctatgacctgaggcg

SEQ ID NO: 287194 - DNA, 25 bp, Probe Sequence
tgctgcgggacagctaccatggggc

SEQ ID NO: 287195 - DNA, 25 bp, Probe Sequence
tgctggaggggcggaccaaggagct

SEQ ID NO: 287196 - DNA, 25 bp, Probe Sequence
tgctgcaggaggcgctagacaagga

SEQ ID NO: 287197 - DNA, 25 bp, Probe Sequence
tgcgagaggagcagctggcacggga

SEQ ID NO: 287198 - DNA, 25 bp, Probe Sequence
tgcggaatgactggctggacttgcg

SEQ ID NO: 287199 - DNA, 25 bp, Probe Sequence
tgctgccaaactgctgtggtctgag

SEQ ID NO: 287200 - DNA, 25 bp, Probe Sequence
tgctccaaacttgcatgtgtctggg

SEQ ID NO: 287201 - DNA, 25 bp, Probe Sequence
tgctccagacacagagcttttattg

SEQ ID NO: 287202 - DNA, 25 bp, Probe Sequence
tgctgcttacctgactgtgcatttt

SEQ ID NO: 287203 - DNA, 25 bp, Probe Sequence
tgctgctgccaactaacattgcatt

SEQ ID NO: 287204 - DNA, 25 bp, Probe Sequence
tgctgcggcatcttaatcttgagta

SEQ ID NO: 287205 - DNA, 25 bp, Probe Sequence
tgctgcggcatcttatgtacaaaat

SEQ ID NO: 287206 - DNA, 25 bp, Probe Sequence
tgctgcctggcagagtgacaaaggc

SEQ ID NO: 287207 - DNA, 25 bp, Probe Sequence
tgctgccgcaatggctgtgggaagg

SEQ ID NO: 287208 - DNA, 25 bp, Probe Sequence
tgctgcccactgcttggagaagtcc

SEQ ID NO: 287209 - DNA, 25 bp, Probe Sequence
tccaccctgggagggggtgccggca

SEQ ID NO: 287210 - DNA, 25 bp, Probe Sequence
tgccccccggtttggcagtgaagga

SEQ ID NO: 287211 - DNA, 25 bp, Probe Sequence
tgcccccctgaggactagggcaggc

SEQ ID NO: 287212 - DNA, 25 bp, Probe Sequence
tgccgcagtaccagacctgggagga

SEQ ID NO: 287213 - DNA, 25 bp, Probe Sequence
tgcgcctgggacaggtctcggagga

SEQ ID NO: 287214 - DNA, 25 bp, Probe Sequence
tgcccacggacagggatctcggtgg

SEQ ID NO: 287215 - DNA, 25 bp, Probe Sequence
tgcctgaaggtctccaattagatag

SEQ ID NO: 287216 - DNA, 25 bp, Probe Sequence
tcctgtagtatttccagtagacatg

SEQ ID NO: 287217 - DNA, 25 bp, Probe Sequence
tgctgcttttttgcctgtcagaaga

SEQ ID NO: 287218 - DNA, 25 bp, Probe Sequence
tctgtttgttttcttcaatcacccc

SEQ ID NO: 287219 - DNA, 25 bp, Probe Sequence
tgctgtgtgttaactagtgtcaata

SEQ ID NO: 287220 - DNA, 25 bp, Probe Sequence
tgctgctgtgttacaaactctcaga

SEQ ID NO: 287221 - DNA, 25 bp, Probe Sequence
tgctgcactttacaaccactgcact

SEQ ID NO: 287222 - DNA, 25 bp, Probe Sequence
tgctgcactttattaccaagcctct

SEQ ID NO: 287223 - DNA, 25 bp, Probe Sequence
tgctgcctttaattgtcttgctctc

SEQ ID NO: 287224 - DNA, 25 bp, Probe Sequence
tcgcttttctgatggttaccgcttt

SEQ ID NO: 287225 - DNA, 25 bp, Probe Sequence
tgctggtttctgtagggtattttta

SEQ ID NO: 287226 - DNA, 25 bp, Probe Sequence
tgctgttgtttatggacttcttgat

SEQ ID NO: 287227 - DNA, 25 bp, Probe Sequence
tgcgttttagcatgtagttagtgag

SEQ ID NO: 287228 - DNA, 25 bp, Probe Sequence
tgctgtttttgttctactctaggca

SEQ ID NO: 287229 - DNA, 25 bp, Probe Sequence
tgctgctttttttttgacattgtca

SEQ ID NO: 287230 - DNA, 25 bp, Probe Sequence
tgctgtgttttggttgtggtctgaa

SEQ ID NO: 287231 - DNA, 25 bp, Probe Sequence
tgctggctttctgggattgatgtta

SEQ ID NO: 287232 - DNA, 25 bp, Probe Sequence
tgctgatcttccaggcctatggata

SEQ ID NO: 287233 - DNA, 25 bp, Probe Sequence
tgctgagctcttctggactcaggat

SEQ ID NO: 287234 - DNA, 25 bp, Probe Sequence
tgcgacactgtgcattgcattatgg

SEQ ID NO: 287235 - DNA, 25 bp, Probe Sequence
tgctgcacaggtcaatgccttcgtt

SEQ ID NO: 287236 - DNA, 25 bp, Probe Sequence
tgcccagcagtggaaccagtactat

SEQ ID NO: 287237 - DNA, 25 bp, Probe Sequence
tgcccactgtgaaaccactaggttc

SEQ ID NO: 287238 - DNA, 25 bp, Probe Sequence
tgcccatttaaatctcatgggttct

SEQ ID NO: 287239 - DNA, 25 bp, Probe Sequence
tgcctcttaaagtactgctatgaat

SEQ ID NO: 287240 - DNA, 25 bp, Probe Sequence
tgccctctaataagacattagctgt

SEQ ID NO: 287241 - DNA, 25 bp, Probe Sequence
tgccccttgcattaggtcttgtgtt

SEQ ID NO: 287242 - DNA, 25 bp, Probe Sequence
tgcccctagcactgggtttggtcac

SEQ ID NO: 287243 - DNA, 25 bp, Probe Sequence
tgcctcctaccatggatttttgcca

SEQ ID NO: 287244 - DNA, 25 bp, Probe Sequence
tgcctcgaaagtcggacctgttcca

SEQ ID NO: 287245 - DNA, 25 bp, Probe Sequence
tgccctgaatcaatttaccatttaa

SEQ ID NO: 287246 - DNA, 25 bp, Probe Sequence
tgcccgagagctcttagtttttaaa

SEQ ID NO: 287247 - DNA, 25 bp, Probe Sequence
tgcccaagactcagaatttttaaaa

SEQ ID NO: 287248 - DNA, 25 bp, Probe Sequence
tgcccgtgttctcacagttattaac

SEQ ID NO: 287249 - DNA, 25 bp, Probe Sequence
tgccttttggtcttgagtaattaac

SEQ ID NO: 287250 - DNA, 25 bp, Probe Sequence
tcctttgggcctgaggacctgcaga

SEQ ID NO: 287251 - DNA, 25 bp, Probe Sequence
tcccgtggggtctggagacgcagtt

SEQ ID NO: 287252 - DNA, 25 bp, Probe Sequence
tccctatggcgtacttcgaaccagt

SEQ ID NO: 287253 - DNA, 25 bp, Probe Sequence
tcaccattgggatgtttccagccgt

SEQ ID NO: 287254 - DNA, 25 bp, Probe Sequence
tgcctcttggtggcagtattcccac

SEQ ID NO: 287255 - DNA, 25 bp, Probe Sequence
tgcctatgtgttccagtttgacctg

SEQ ID NO: 287256 - DNA, 25 bp, Probe Sequence
tgcctggactggccatgttctagtc

SEQ ID NO: 287257 - DNA, 25 bp, Probe Sequence
tgcgttatctcagcttcttcaggcg

SEQ ID NO: 287258 - DNA, 25 bp, Probe Sequence
tgcgtttcacacttctttagagcta

SEQ ID NO: 287259 - DNA, 25 bp, Probe Sequence
tgctgtctgtcatcggtttgaaatt

SEQ ID NO: 287260 - DNA, 25 bp, Probe Sequence
tgcccacttgccggtacatacaagt

SEQ ID NO: 287261 - DNA, 25 bp, Probe Sequence
tgcccacttgccagttatcatcaaa

SEQ ID NO: 287262 - DNA, 25 bp, Probe Sequence
tgcccagctggcagatgcgttacag

SEQ ID NO: 287263 - DNA, 25 bp, Probe Sequence
tgcgcctgctggaagatgccgatta

SEQ ID NO: 287264 - DNA, 25 bp, Probe Sequence
tgcgcaccatctcaagggaatacac

SEQ ID NO: 287265 - DNA, 25 bp, Probe Sequence
tgcgatcccgcaacatggggggcac

SEQ ID NO: 287266 - DNA, 25 bp, Probe Sequence
tgctgtcccagaaccagggaggcaa

SEQ ID NO: 287267 - DNA, 25 bp, Probe Sequence
tgctgtccgggcaatcaaggaacat

SEQ ID NO: 287268 - DNA, 25 bp, Probe Sequence
tgctgttcaccgcatcacagtggaa

SEQ ID NO: 287269 - DNA, 25 bp, Probe Sequence
tgctgttcgcctcaaggcggcaagg

SEQ ID NO: 287270 - DNA, 25 bp, Probe Sequence
tgctgtgctgcgctaaggagctggc

SEQ ID NO: 287271 - DNA, 25 bp, Probe Sequence
tgcgcgtcgccaaagtgacaggcgg

SEQ ID NO: 287272 - DNA, 25 bp, Probe Sequence
tgcggcctccatttatacagacagg

SEQ ID NO: 287273 - DNA, 25 bp, Probe Sequence
tgcgggctccactatttgcaaatgg

SEQ ID NO: 287274 - DNA, 25 bp, Probe Sequence
tgcgtggaggccttcgtggaagtgg

SEQ ID NO: 287275 - DNA, 25 bp, Probe Sequence
tgcgctggacgatagcttggaggga

SEQ ID NO: 287276 - DNA, 25 bp, Probe Sequence
tgccggggatctctgtggaggtgga

SEQ ID NO: 287277 - DNA, 25 bp, Probe Sequence
tgccatggggctcgggttgaggggc

SEQ ID NO: 287278 - DNA, 25 bp, Probe Sequence
tccaccgagcggcgtgtaagagtgc

SEQ ID NO: 287279 - DNA, 25 bp, Probe Sequence
tccaccgagcggcgtgtaggagtgc

SEQ ID NO: 287280 - DNA, 25 bp, Probe Sequence
tgcccgcaggggccgaggagcgggc

SEQ ID NO: 287281 - DNA, 25 bp, Probe Sequence
tccagggagaggcgggatcacggcc

SEQ ID NO: 287282 - DNA, 25 bp, Probe Sequence
tccagggagaggcgggatcacggcc

SEQ ID NO: 287283 - DNA, 25 bp, Probe Sequence
tccagggagaggcgggatcacggcc

SEQ ID NO: 287284 - DNA, 25 bp, Probe Sequence
tcccggcgcgagcgggaccgggagc

SEQ ID NO: 287285 - DNA, 25 bp, Probe Sequence
tcccggccgcatgcggcaatttgac

SEQ ID NO: 287286 - DNA, 25 bp, Probe Sequence
tgcgggtgctggagctgctcaattt

SEQ ID NO: 287287 - DNA, 25 bp, Probe Sequence
tgcgtatgtcctaagctggagttct

SEQ ID NO: 287288 - DNA, 25 bp, Probe Sequence
tgcgttgttgctcactgaatctgtt

SEQ ID NO: 287289 - DNA, 25 bp, Probe Sequence
tgccttttctggagtttgtaaaatt

SEQ ID NO: 287290 - DNA, 25 bp, Probe Sequence
tgcccgtccggaacgtctataagaa

SEQ ID NO: 287291 - DNA, 25 bp, Probe Sequence
tgcccgtccggaacgtctataagaa

SEQ ID NO: 287292 - DNA, 25 bp, Probe Sequence
tgccccatgccacaaagttgaaaat

SEQ ID NO: 287293 - DNA, 25 bp, Probe Sequence
tgcgtcccacctgacagtacataaa

SEQ ID NO: 287294 - DNA, 25 bp, Probe Sequence
tgcgaccatctcctaaaggaatacc

SEQ ID NO: 287295 - DNA, 25 bp, Probe Sequence
tgctgtccctctttgaaggcaagaa

SEQ ID NO: 287296 - DNA, 25 bp, Probe Sequence
tgctgtcgccttttagaaggagaaa

SEQ ID NO: 287297 - DNA, 25 bp, Probe Sequence
tgcccccactgaccagaactagaaa

SEQ ID NO: 287298 - DNA, 25 bp, Probe Sequence
tgcgcccgactactcgggcgcagaa

SEQ ID NO: 287299 - DNA, 25 bp, Probe Sequence
tgcgctaccagctacagcgtggggt

SEQ ID NO: 287300 - DNA, 25 bp, Probe Sequence
tgcgtatcgagccgctggaggtcgc

SEQ ID NO: 287301 - DNA, 25 bp, Probe Sequence
tgcgtattgagcacattaagcactc

SEQ ID NO: 287302 - DNA, 25 bp, Probe Sequence
tgcccattggcagattacacatgta

SEQ ID NO: 287303 - DNA, 25 bp, Probe Sequence
tgcccgtgtgcagaaaccggatatg

SEQ ID NO: 287304 - DNA, 25 bp, Probe Sequence
tgcctttgagaccaaaccaagtgct

SEQ ID NO: 287305 - DNA, 25 bp, Probe Sequence
tgccttggactgtagaacagaactt

SEQ ID NO: 287306 - DNA, 25 bp, Probe Sequence
tgcctgtgcagattgcaatagacta

SEQ ID NO: 287307 - DNA, 25 bp, Probe Sequence
tgccgtcagcattcaccaaataaac

SEQ ID NO: 287308 - DNA, 25 bp, Probe Sequence
tgccgtcagcattcaccaaataaac

SEQ ID NO: 287309 - DNA, 25 bp, Probe Sequence
tgcctgtcttcatcttgaaagaaaa

SEQ ID NO: 287310 - DNA, 25 bp, Probe Sequence
tccgtctacgacttgggcaacaaca

SEQ ID NO: 287311 - DNA, 25 bp, Probe Sequence
tgccgttcacgacctggaggaggac

SEQ ID NO: 287312 - DNA, 25 bp, Probe Sequence
tgccgttcacgacctggaggaggac

SEQ ID NO: 287313 - DNA, 25 bp, Probe Sequence
tgccgttcacgacctggaggaggac

SEQ ID NO: 287314 - DNA, 25 bp, Probe Sequence
tgcccctcaacgtctgggatgagga

SEQ ID NO: 287315 - DNA, 25 bp, Probe Sequence
tgcccctgtacgtggattgggctgg

SEQ ID NO: 287316 - DNA, 25 bp, Probe Sequence
tgccccaaagggcaattggattgga

SEQ ID NO: 287317 - DNA, 25 bp, Probe Sequence
tccccaacagggtgagtggttgttg

SEQ ID NO: 287318 - DNA, 25 bp, Probe Sequence
tccccaaggggaaagactggctttg

SEQ ID NO: 287319 - DNA, 25 bp, Probe Sequence
tccctgctaaggctaaagttgatct

SEQ ID NO: 287320 - DNA, 25 bp, Probe Sequence
tgcccgtacaggctatggactttct

SEQ ID NO: 287321 - DNA, 25 bp, Probe Sequence
tgcccgtcaagttatttactgttaa

SEQ ID NO: 287322 - DNA, 25 bp, Probe Sequence
tgcctgccccagaatggtttttaaa

SEQ ID NO: 287323 - DNA, 25 bp, Probe Sequence
tgcgttcccgtatatttgtctcgta

SEQ ID NO: 287324 - DNA, 25 bp, Probe Sequence
tgcctcccaggttcaagcaattctc

SEQ ID NO: 287325 - DNA, 25 bp, Probe Sequence
tgctgatctactataaggtattcta

SEQ ID NO: 287326 - DNA, 25 bp, Probe Sequence
tgctgatctgttaaaatttctttcc

SEQ ID NO: 287327 - DNA, 25 bp, Probe Sequence
tgctgtcttgtatatacagcttttc

SEQ ID NO: 287328 - DNA, 25 bp, Probe Sequence
tcgaccagatattgtgaactttgtt

SEQ ID NO: 287329 - DNA, 25 bp, Probe Sequence
tgcgagccttcattgatgtgactgc

SEQ ID NO: 287330 - DNA, 25 bp, Probe Sequence
tgcggcccatcactatggagctcaa

SEQ ID NO: 287331 - DNA, 25 bp, Probe Sequence
tgcggcaccatagtggattgcctac

SEQ ID NO: 287332 - DNA, 25 bp, Probe Sequence
tgctgactccatatggaggcctcac

SEQ ID NO: 287333 - DNA, 25 bp, Probe Sequence
tgctgagggcatgtctcaccctcat

SEQ ID NO: 287334 - DNA, 25 bp, Probe Sequence
tgctgagcgtgatgatctagcctcc

SEQ ID NO: 287335 - DNA, 25 bp, Probe Sequence
tgctggcaggagcttcagacacgcc

SEQ ID NO: 287336 - DNA, 25 bp, Probe Sequence
tgctggagcagtctcacagctcacc

SEQ ID NO: 287337 - DNA, 25 bp, Probe Sequence
tgcctgcagcagtactactgtcaac

SEQ ID NO: 287338 - DNA, 25 bp, Probe Sequence
tgcctgctagaaattcagctgaagg

SEQ ID NO: 287339 - DNA, 25 bp, Probe Sequence
tgctgtgcgaggatctcactggttg

SEQ ID NO: 287340 - DNA, 25 bp, Probe Sequence
tgctgggagtgaatgatggcttatt

SEQ ID NO: 287341 - DNA, 25 bp, Probe Sequence
tgctggctgtggtgatggggattga

SEQ ID NO: 287342 - DNA, 25 bp, Probe Sequence
tgctggctgtggtgatggggattga

SEQ ID NO: 287343 - DNA, 25 bp, Probe Sequence
tgctgtcgggttaggaagtcttgtc

SEQ ID NO: 287344 - DNA, 25 bp, Probe Sequence
tgcgatcactggttaagaatgtttt

SEQ ID NO: 287345 - DNA, 25 bp, Probe Sequence
tgcgcacacttgatgaaggtgtttt

SEQ ID NO: 287346 - DNA, 25 bp, Probe Sequence
tgctgtcctttttattgtttttaat

SEQ ID NO: 287347 - DNA, 25 bp, Probe Sequence
tgcgttgcacttgtcattgtgtttc

SEQ ID NO: 287348 - DNA, 25 bp, Probe Sequence
tgcgctggacttgaattcagtgctt

SEQ ID NO: 287349 - DNA, 25 bp, Probe Sequence
tgcgtggacctgccagacacaggac

SEQ ID NO: 287350 - DNA, 25 bp, Probe Sequence
tgcgggaaggacagcaggggccctg

SEQ ID NO: 287351 - DNA, 25 bp, Probe Sequence
tgcgggaagccagccaggagagcaa

SEQ ID NO: 287352 - DNA, 25 bp, Probe Sequence
tgccttcaacaagctcactgcaagc

SEQ ID NO: 287353 - DNA, 25 bp, Probe Sequence
tgccctgaaagtcccagatcaagcc

SEQ ID NO: 287354 - DNA, 25 bp, Probe Sequence
tgccctgaaagtcccagatcaagcc

SEQ ID NO: 287355 - DNA, 25 bp, Probe Sequence
tgccctggagggccaactcaagaag

SEQ ID NO: 287356 - DNA, 25 bp, Probe Sequence
tgcccgtgtggactcacacagcaag

SEQ ID NO: 287357 - DNA, 25 bp, Probe Sequence
tgcgcaagatgggagcgcccgaatc

SEQ ID NO: 287358 - DNA, 25 bp, Probe Sequence
tccaagaggtcacccttgagaagaa

SEQ ID NO: 287359 - DNA, 25 bp, Probe Sequence
tgcccaactgtcaaccttgacaaat

SEQ ID NO: 287360 - DNA, 25 bp, Probe Sequence
tgcccctccacatctgtgggatatc

SEQ ID NO: 287361 - DNA, 25 bp, Probe Sequence
tgcccctccacatctgtgggatatc

SEQ ID NO: 287362 - DNA, 25 bp, Probe Sequence
tgccccatctcatcatttcgaagat

SEQ ID NO: 287363 - DNA, 25 bp, Probe Sequence
tgcctcatctcctatctttagtgaa

SEQ ID NO: 287364 - DNA, 25 bp, Probe Sequence
tgcccttgctcaatcagttgttgga

SEQ ID NO: 287365 - DNA, 25 bp, Probe Sequence
tgcccagaatcattaatatttgaga

SEQ ID NO: 287366 - DNA, 25 bp, Probe Sequence
tgcgctgcaggttatgaaacttgga

SEQ ID NO: 287367 - DNA, 25 bp, Probe Sequence
tgcctgctggtgtggaacatggcga

SEQ ID NO: 287368 - DNA, 25 bp, Probe Sequence
tgcctggccaggcagtacaggctga

SEQ ID NO: 287369 - DNA, 25 bp, Probe Sequence
tgccagtgccttcagtagagttacg

SEQ ID NO: 287370 - DNA, 25 bp, Probe Sequence
tgctggtctcttcagtgtgagctgg

SEQ ID NO: 287371 - DNA, 25 bp, Probe Sequence
tgctggatgctcttcaagtactgaa

SEQ ID NO: 287372 - DNA, 25 bp, Probe Sequence
tgctggatgctcttcaaggactgaa

SEQ ID NO: 287373 - DNA, 25 bp, Probe Sequence
tgctgttcatcgacgaggtccacat

SEQ ID NO: 287374 - DNA, 25 bp, Probe Sequence
tgctgttcatgtacaaggtcaggaa

SEQ ID NO: 287375 - DNA, 25 bp, Probe Sequence
tgctggctctgtccagggcaagaaa

SEQ ID NO: 287376 - DNA, 25 bp, Probe Sequence
tgctgatgcctctcgagacatacaa

SEQ ID NO: 287377 - DNA, 25 bp, Probe Sequence
tgctggcctcggcatgtttcaataa

SEQ ID NO: 287378 - DNA, 25 bp, Probe Sequence
tgcctggcctggcgtttcaggagag

SEQ ID NO: 287379 - DNA, 25 bp, Probe Sequence
tgcctgctgctctgcaggtaccatg

SEQ ID NO: 287380 - DNA, 25 bp, Probe Sequence
tgcgcactcatatatgctaagcctt

SEQ ID NO: 287381 - DNA, 25 bp, Probe Sequence
tgccatatcatgtgtgtacgctgaa

SEQ ID NO: 287382 - DNA, 25 bp, Probe Sequence
tgctgattatacttctgagctgcta

SEQ ID NO: 287383 - DNA, 25 bp, Probe Sequence
tgcgtctgtcagttcaagtgcaaca

SEQ ID NO: 287384 - DNA, 25 bp, Probe Sequence
tgcgccggctgctcagaagataccg

SEQ ID NO: 287385 - DNA, 25 bp, Probe Sequence
tgccacgattaaagactgagaccgg

SEQ ID NO: 287386 - DNA, 25 bp, Probe Sequence
tgcccgacaaatgggctgggccttg

SEQ ID NO: 287387 - DNA, 25 bp, Probe Sequence
tgccaaaaagggccgcggccacgtg

SEQ ID NO: 287388 - DNA, 25 bp, Probe Sequence
tccatccaaaaggggcagggcacgg

SEQ ID NO: 287389 - DNA, 25 bp, Probe Sequence
tccaaccctaagccactgggacggt

SEQ ID NO: 287390 - DNA, 25 bp, Probe Sequence
tccaaaactggacccttggagccgt

SEQ ID NO: 287391 - DNA, 25 bp, Probe Sequence
tcccaaaggtagtgcttgttcgcgg

SEQ ID NO: 287392 - DNA, 25 bp, Probe Sequence
tgcccaaaggtactcctttatacac

SEQ ID NO: 287393 - DNA, 25 bp, Probe Sequence
tgccccagggagtcccttttgatgg

SEQ ID NO: 287394 - DNA, 25 bp, Probe Sequence
tgccccagtcaggccgttttagaag

SEQ ID NO: 287395 - DNA, 25 bp, Probe Sequence
tgccctcaacgaccactttgtcaag

SEQ ID NO: 287396 - DNA, 25 bp, Probe Sequence
tgcccatggagcgcgtgtttgacta

SEQ ID NO: 287397 - DNA, 25 bp, Probe Sequence
tgccttagacgacgtgttacagtat

SEQ ID NO: 287398 - DNA, 25 bp, Probe Sequence
tgcgcttaaaacagcggaaatgatt

SEQ ID NO: 287399 - DNA, 25 bp, Probe Sequence
tcctccaacaacacgtggatctgca

SEQ ID NO: 287400 - DNA, 25 bp, Probe Sequence
tgcctcctataagtccagttgaaat

SEQ ID NO: 287401 - DNA, 25 bp, Probe Sequence
tgcctcctgatgcacttatcattga

SEQ ID NO: 287402 - DNA, 25 bp, Probe Sequence
tgccctttggacttgacattgtttc

SEQ ID NO: 287403 - DNA, 25 bp, Probe Sequence
tgcccctgaaacttgaaaattctcc

SEQ ID NO: 287404 - DNA, 25 bp, Probe Sequence
tgccccaaataaactcaggaacgcc

SEQ ID NO: 287405 - DNA, 25 bp, Probe Sequence
tgccccaacatgacggcgggcgacg

SEQ ID NO: 287406 - DNA, 25 bp, Probe Sequence
tgccccaagtccctgtggagaagtg

SEQ ID NO: 287407 - DNA, 25 bp, Probe Sequence
tgcccctaatcccagaggtagtgga

SEQ ID NO: 287408 - DNA, 25 bp, Probe Sequence
tgcccctgaacccaagagtgatgta

SEQ ID NO: 287409 - DNA, 25 bp, Probe Sequence
tgcgtgcagtggccccaaagatggc

SEQ ID NO: 287410 - DNA, 25 bp, Probe Sequence
tgctgtgcacagctgcctataggag

SEQ ID NO: 287411 - DNA, 25 bp, Probe Sequence
tgctggcatctctgcagctcaaaga

SEQ ID NO: 287412 - DNA, 25 bp, Probe Sequence
tgctggatacaggcaccaagaggcg

SEQ ID NO: 287413 - DNA, 25 bp, Probe Sequence
tgcgagtgcaaggccgggtggagag

SEQ ID NO: 287414 - DNA, 25 bp, Probe Sequence
tgcgggcagagcccggctgagaggg

SEQ ID NO: 287415 - DNA, 25 bp, Probe Sequence
tgctggagaacgccgtctgtgagca

SEQ ID NO: 287416 - DNA, 25 bp, Probe Sequence
tgctggaagcctccgaggtggaaga

SEQ ID NO: 287417 - DNA, 25 bp, Probe Sequence
tgctggtatctcctctaagtaagga

SEQ ID NO: 287418 - DNA, 25 bp, Probe Sequence
tgctgtgttctcttctaaaacaagc

SEQ ID NO: 287419 - DNA, 25 bp, Probe Sequence
tgctgggctctgccttaaacacaca

SEQ ID NO: 287420 - DNA, 25 bp, Probe Sequence
tgccctgttggcatcaggaacacaa

SEQ ID NO: 287421 - DNA, 25 bp, Probe Sequence
tgcccggctactacagcgagaaact

SEQ ID NO: 287422 - DNA, 25 bp, Probe Sequence
tgcccagtccacatagggaatgaca

SEQ ID NO: 287423 - DNA, 25 bp, Probe Sequence
tgcccgtccgagaggcagagctgac

SEQ ID NO: 287424 - DNA, 25 bp, Probe Sequence
tgcccaggccgacatggagagcagc

SEQ ID NO: 287425 - DNA, 25 bp, Probe Sequence
tgccgagggctaccattcagtgaca

SEQ ID NO: 287426 - DNA, 25 bp, Probe Sequence
tgcgcggggtatcctgtaggcaaga

SEQ ID NO: 287427 - DNA, 25 bp, Probe Sequence
tgcgcgtgggtgtagctttgtgcat

SEQ ID NO: 287428 - DNA, 25 bp, Probe Sequence
tgcggtggtgtctgcatcttatcac

SEQ ID NO: 287429 - DNA, 25 bp, Probe Sequence
tgcctgggattctaccgtaattgct

SEQ ID NO: 287430 - DNA, 25 bp, Probe Sequence
tgccttggcttcagccttgacaggc

SEQ ID NO: 287431 - DNA, 25 bp, Probe Sequence
tgccgtactccaggcttgtgtcggc

SEQ ID NO: 287432 - DNA, 25 bp, Probe Sequence
tgcctctaaccaggtgtccctggtc

SEQ ID NO: 287433 - DNA, 25 bp, Probe Sequence
tgcctgccaagtttgtgatccactg

SEQ ID NO: 287434 - DNA, 25 bp, Probe Sequence
tgcggaaatgtgtcttgtctccatt

SEQ ID NO: 287435 - DNA, 25 bp, Probe Sequence
tgctggagaagtctggcttcgcgtc

SEQ ID NO: 287436 - DNA, 25 bp, Probe Sequence
tgctgtaaagttggactgttgttca

SEQ ID NO: 287437 - DNA, 25 bp, Probe Sequence
tgcctttagctcatgtcgtgtttca

SEQ ID NO: 287438 - DNA, 25 bp, Probe Sequence
tgcctttgaggcatttcagtccaca

SEQ ID NO: 287439 - DNA, 25 bp, Probe Sequence
tgcctgttagtgattgtttcacatg

SEQ ID NO: 287440 - DNA, 25 bp, Probe Sequence
tgcctggtgttttgggctccacagg

SEQ ID NO: 287441 - DNA, 25 bp, Probe Sequence
tgcctgtttttgttggtgcacagag

SEQ ID NO: 287442 - DNA, 25 bp, Probe Sequence
tgccgaatttgtcgtgcctacaatc

SEQ ID NO: 287443 - DNA, 25 bp, Probe Sequence
tgccgaagaagtctctgctccaaat

SEQ ID NO: 287444 - DNA, 25 bp, Probe Sequence
tcctattaagtacagccgcaagaaa

SEQ ID NO: 287445 - DNA, 25 bp, Probe Sequence
tgcctatttaatggaacctccataa

SEQ ID NO: 287446 - DNA, 25 bp, Probe Sequence
tgcccttttcagcaaggctggaaat

SEQ ID NO: 287447 - DNA, 25 bp, Probe Sequence
tgccacttctacgcgggtggacaag

SEQ ID NO: 287448 - DNA, 25 bp, Probe Sequence
tgccacatccttctcaaggtggtag

SEQ ID NO: 287449 - DNA, 25 bp, Probe Sequence
tgccagtacattctacgtattaagt

SEQ ID NO: 287450 - DNA, 25 bp, Probe Sequence
tgccgatacttgttattgtctgctt

SEQ ID NO: 287451 - DNA, 25 bp, Probe Sequence
tgcgcagatacctaggcttgtccat

SEQ ID NO: 287452 - DNA, 25 bp, Probe Sequence
tgctggtgccactaatattgatcta

SEQ ID NO: 287453 - DNA, 25 bp, Probe Sequence
tgctggtgccactaatgttgatcta

SEQ ID NO: 287454 - DNA, 25 bp, Probe Sequence
tgctggatgcagccaagagtgtggt

SEQ ID NO: 287455 - DNA, 25 bp, Probe Sequence
tgcggagggcaagctgctggtcaaa

SEQ ID NO: 287456 - DNA, 25 bp, Probe Sequence
tgctgtgggtcatccgtgaggacca

SEQ ID NO: 287457 - DNA, 25 bp, Probe Sequence
tgctgtgggtcatccgtgaggacca

SEQ ID NO: 287458 - DNA, 25 bp, Probe Sequence
tgctgggagatggtcctgtggtgac

SEQ ID NO: 287459 - DNA, 25 bp, Probe Sequence
tgctgggcgatctcatcaaggtgac

SEQ ID NO: 287460 - DNA, 25 bp, Probe Sequence
tgctgggccacatgtcaagaggggc

SEQ ID NO: 287461 - DNA, 25 bp, Probe Sequence
tgctggggcacatttcacatatcga

SEQ ID NO: 287462 - DNA, 25 bp, Probe Sequence
tgctggaggcaaatcacatactgga

SEQ ID NO: 287463 - DNA, 25 bp, Probe Sequence
tgcgagctggcacccacatcctgtg

SEQ ID NO: 287464 - DNA, 25 bp, Probe Sequence
tgcgagtgctgtactaccgagatgc

SEQ ID NO: 287465 - DNA, 25 bp, Probe Sequence
tgcggtatagtggactcgactgctt

SEQ ID NO: 287466 - DNA, 25 bp, Probe Sequence
tgcgaggatgagggacgctatgcct

SEQ ID NO: 287467 - DNA, 25 bp, Probe Sequence
tgctgtgcaagagcgagcgctgcgt

SEQ ID NO: 287468 - DNA, 25 bp, Probe Sequence
tgctggccaaatggtgctcagcagg

SEQ ID NO: 287469 - DNA, 25 bp, Probe Sequence
tgcggccagcagttgcaggcagacg

SEQ ID NO: 287470 - DNA, 25 bp, Probe Sequence
tgcgcacacacacttgcattcatga

SEQ ID NO: 287471 - DNA, 25 bp, Probe Sequence
tgcgagcaaagcattctcatcagtc

SEQ ID NO: 287472 - DNA, 25 bp, Probe Sequence
tgctggagaagctggcctccatgct

SEQ ID NO: 287473 - DNA, 25 bp, Probe Sequence
tgcgagagagaatgagcctcccgcc

SEQ ID NO: 287474 - DNA, 25 bp, Probe Sequence
tgctgtggaaaatgcctggctggcc

SEQ ID NO: 287475 - DNA, 25 bp, Probe Sequence
tgctgggtgaagaagcctgacacag

SEQ ID NO: 287476 - DNA, 25 bp, Probe Sequence
tgctggggctgaacatgcctgccaa

SEQ ID NO: 287477 - DNA, 25 bp, Probe Sequence
tgcgtggtgctgaagcacatcccct

SEQ ID NO: 287478 - DNA, 25 bp, Probe Sequence
tgcgtggatgtcaagctcatctccc

SEQ ID NO: 287479 - DNA, 25 bp, Probe Sequence
tgcgtggcatcaatagcttccgcca

SEQ ID NO: 287480 - DNA, 25 bp, Probe Sequence
tgcggtgctcatgatgtgtggggca

SEQ ID NO: 287481 - DNA, 25 bp, Probe Sequence
tgccttcttccttgaggggcagttt

SEQ ID NO: 287482 - DNA, 25 bp, Probe Sequence
tgcctcatttcctgagctgggcatt

SEQ ID NO: 287483 - DNA, 25 bp, Probe Sequence
tgcgccatcattgggggcatgttca

SEQ ID NO: 287484 - DNA, 25 bp, Probe Sequence
tgcgcgtctatcgcaggagtgctga

SEQ ID NO: 287485 - DNA, 25 bp, Probe Sequence
tgcgcgtctatcgcaggagtgctga

SEQ ID NO: 287486 - DNA, 25 bp, Probe Sequence
tgcgcctttctgccggacgcgagca

SEQ ID NO: 287487 - DNA, 25 bp, Probe Sequence
tgcctcctcttgtcaggcagggaca

SEQ ID NO: 287488 - DNA, 25 bp, Probe Sequence
tgcgcctcattttcacagatggttc

SEQ ID NO: 287489 - DNA, 25 bp, Probe Sequence
tgccctcactgcaacagagcatttg

SEQ ID NO: 287490 - DNA, 25 bp, Probe Sequence
tgccctcacccaaggtgtcagacac

SEQ ID NO: 287491 - DNA, 25 bp, Probe Sequence
tgcccccaccatggggtgcgaatgg

SEQ ID NO: 287492 - DNA, 25 bp, Probe Sequence
tcctttcccctgtggccacagggaa

SEQ ID NO: 287493 - DNA, 25 bp, Probe Sequence
tcctttcccctgtggccacagggaa

SEQ ID NO: 287494 - DNA, 25 bp, Probe Sequence
tcatctgttcctcttaactacggtg

SEQ ID NO: 287495 - DNA, 25 bp, Probe Sequence
tcctgttcctcacaaatttccggga

SEQ ID NO: 287496 - DNA, 25 bp, Probe Sequence
tccttagtccgggcaactgtccggg

SEQ ID NO: 287497 - DNA, 25 bp, Probe Sequence
tgcctcttgacttgggcatcgtgtc

SEQ ID NO: 287498 - DNA, 25 bp, Probe Sequence
tgccctgaggctaggggcggcttac

SEQ ID NO: 287499 - DNA, 25 bp, Probe Sequence
tgcccgaggaagcggggtctggccc

SEQ ID NO: 287500 - DNA, 25 bp, Probe Sequence
tgcccgaggaagcggggtctggccc

SEQ ID NO: 287501 - DNA, 25 bp, Probe Sequence
tgccctgaggagagggtagtcagca

SEQ ID NO: 287502 - DNA, 25 bp, Probe Sequence
tgcccggaatatctggggtccaagg

SEQ ID NO: 287503 - DNA, 25 bp, Probe Sequence
tgccctggaagttcaggggcccagg

SEQ ID NO: 287504 - DNA, 25 bp, Probe Sequence
tgcccggtcagatcagctggatctc

SEQ ID NO: 287505 - DNA, 25 bp, Probe Sequence
tgcccttgtccaggctgggatctaa

SEQ ID NO: 287506 - DNA, 25 bp, Probe Sequence
tgcccaggtactgctgcagtgccat

SEQ ID NO: 287507 - DNA, 25 bp, Probe Sequence
tgccccagtagttctctggctacag

SEQ ID NO: 287508 - DNA, 25 bp, Probe Sequence
tgccttcgtggtactcatggctcac

SEQ ID NO: 287509 - DNA, 25 bp, Probe Sequence
tgcgcttcgtgggttttccagataa

SEQ ID NO: 287510 - DNA, 25 bp, Probe Sequence
tgcctacggatcatctattcctaaa

SEQ ID NO: 287511 - DNA, 25 bp, Probe Sequence
tcccccgattacatttctaagcgtg

SEQ ID NO: 287512 - DNA, 25 bp, Probe Sequence
tcccccgattacatttctaagcgtg

SEQ ID NO: 287513 - DNA, 25 bp, Probe Sequence
tgcccagctaacttcgttttaatgc

SEQ ID NO: 287514 - DNA, 25 bp, Probe Sequence
tgccctgctacctagtttgttagtg

SEQ ID NO: 287515 - DNA, 25 bp, Probe Sequence
tgccggtgatactggtagttggtgt

SEQ ID NO: 287516 - DNA, 25 bp, Probe Sequence
tcggggtgagtaagtagttgggtat

SEQ ID NO: 287517 - DNA, 25 bp, Probe Sequence
tgcccggtggtcaaaagttgcaggt

SEQ ID NO: 287518 - DNA, 25 bp, Probe Sequence
tgcccgtggttagagatgttgagtg

SEQ ID NO: 287519 - DNA, 25 bp, Probe Sequence
tgccccttttaccagtggctgaatc

SEQ ID NO: 287520 - DNA, 25 bp, Probe Sequence
tacaagttaaacatccctaatccca

SEQ ID NO: 287521 - DNA, 25 bp, Probe Sequence
tacctgtttgaacagccctctagcc

SEQ ID NO: 287522 - DNA, 25 bp, Probe Sequence
ttcacgtttaagggtcctctgaacg

SEQ ID NO: 287523 - DNA, 25 bp, Probe Sequence
tgcccgtttcatatgtaacttaaaa

SEQ ID NO: 287524 - DNA, 25 bp, Probe Sequence
tgcccagtgctttattgaagtttta

SEQ ID NO: 287525 - DNA, 25 bp, Probe Sequence
tgcccctgtaatacataagtttata

SEQ ID NO: 287526 - DNA, 25 bp, Probe Sequence
tccaactgtactggccaatttttga

SEQ ID NO: 287527 - DNA, 25 bp, Probe Sequence
tccaaccgcagagcctagctgttta

SEQ ID NO: 287528 - DNA, 25 bp, Probe Sequence
tccaaaccagtacaactatattgca

SEQ ID NO: 287529 - DNA, 25 bp, Probe Sequence
tgccctgacccaaaaagccatgatt

SEQ ID NO: 287530 - DNA, 25 bp, Probe Sequence
tgccccagttaaaagacacagaatg

SEQ ID NO: 287531 - DNA, 25 bp, Probe Sequence
tgcgctcacacttcaaaaccaataa

SEQ ID NO: 287532 - DNA, 25 bp, Probe Sequence
tgcgctcaccatcaataaaagtaat

SEQ ID NO: 287533 - DNA, 25 bp, Probe Sequence
tgcgctcaccatcaataaaagtaat

SEQ ID NO: 287534 - DNA, 25 bp, Probe Sequence
tgcctcctgcagaatatagaatagt

SEQ ID NO: 287535 - DNA, 25 bp, Probe Sequence
tgcctcctcagttctgcaagtagtt

SEQ ID NO: 287536 - DNA, 25 bp, Probe Sequence
tgcctgcgcacacagtgggggatgt

SEQ ID NO: 287537 - DNA, 25 bp, Probe Sequence
tgcctgcgcacacagtgggggatgt

SEQ ID NO: 287538 - DNA, 25 bp, Probe Sequence
tgcctgctgacttaggtggcgtgtt

SEQ ID NO: 287539 - DNA, 25 bp, Probe Sequence
tgcctcagcctccagagtagctggt

SEQ ID NO: 287540 - DNA, 25 bp, Probe Sequence
tgcctaagcacccggagctggcaga

SEQ ID NO: 287541 - DNA, 25 bp, Probe Sequence
tgcctaagcacccggagctggcaga

SEQ ID NO: 287542 - DNA, 25 bp, Probe Sequence
tgcctaagaatcagtggttcatcac

SEQ ID NO: 287543 - DNA, 25 bp, Probe Sequence
tgcctaaaatatccgctgtgcttca

SEQ ID NO: 287544 - DNA, 25 bp, Probe Sequence
tgccctaatattcctgcttgtagtt

SEQ ID NO: 287545 - DNA, 25 bp, Probe Sequence
tgcgctaacattcactcttgtttgt

SEQ ID NO: 287546 - DNA, 25 bp, Probe Sequence
tgctggaaatgttgaaccagttgga

SEQ ID NO: 287547 - DNA, 25 bp, Probe Sequence
tgctggagactttggatcggttggt

SEQ ID NO: 287548 - DNA, 25 bp, Probe Sequence
tgcggaggatggtgagcggtgcggt

SEQ ID NO: 287549 - DNA, 25 bp, Probe Sequence
tgcgggaggatggtgagcggtgcgg

SEQ ID NO: 287550 - DNA, 25 bp, Probe Sequence
tgcgggggctggacagcaaggcgtc

SEQ ID NO: 287551 - DNA, 25 bp, Probe Sequence
tgcccctgtctggaagacgtggctc

SEQ ID NO: 287552 - DNA, 25 bp, Probe Sequence
tgcctgcctgctcagaagaggtggc

SEQ ID NO: 287553 - DNA, 25 bp, Probe Sequence
tgccccatggtacctagtgtgtgtc

SEQ ID NO: 287554 - DNA, 25 bp, Probe Sequence
tgccctcgaaacgtcagcgtgtatc

SEQ ID NO: 287555 - DNA, 25 bp, Probe Sequence
tgccacctacaacgtcatagtggag

SEQ ID NO: 287556 - DNA, 25 bp, Probe Sequence
tgccctcctcagtgcttaggggcag

SEQ ID NO: 287557 - DNA, 25 bp, Probe Sequence
tgcccatcactttggcctagggaca

SEQ ID NO: 287558 - DNA, 25 bp, Probe Sequence
tccagcaacgttccctagaagaact

SEQ ID NO: 287559 - DNA, 25 bp, Probe Sequence
tccgggtgtgccccaaataaactca

SEQ ID NO: 287560 - DNA, 25 bp, Probe Sequence
tcccaagcctacctaaaacaaccat

SEQ ID NO: 287561 - DNA, 25 bp, Probe Sequence
tccaatgacctatgtaacggcaccc

SEQ ID NO: 287562 - DNA, 25 bp, Probe Sequence
tctaagacctacagctacctgaccc

SEQ ID NO: 287563 - DNA, 25 bp, Probe Sequence
tccaaaatccacagtatgggaccct

SEQ ID NO: 287564 - DNA, 25 bp, Probe Sequence
tccaaaattacaacggttggccgat

SEQ ID NO: 287565 - DNA, 25 bp, Probe Sequence
tcgaaggttccaacaaggtgcccgt

SEQ ID NO: 287566 - DNA, 25 bp, Probe Sequence
tctgaagacctttaacagggtcggt

SEQ ID NO: 287567 - DNA, 25 bp, Probe Sequence
tccggacctggtgtcaggggtggtc

SEQ ID NO: 287568 - DNA, 25 bp, Probe Sequence
tccgggcctttctcaacagaggatg

SEQ ID NO: 287569 - DNA, 25 bp, Probe Sequence
tccgggcactttagtccctggaagc

SEQ ID NO: 287570 - DNA, 25 bp, Probe Sequence
tgcgcaggggttaagccccgtggac

SEQ ID NO: 287571 - DNA, 25 bp, Probe Sequence
tgcgcaggggttaagccccgtggac

SEQ ID NO: 287572 - DNA, 25 bp, Probe Sequence
tccggtgagtctggagtccggtcgg

SEQ ID NO: 287573 - DNA, 25 bp, Probe Sequence
tccgggtgtaagcggcgtgtgcgtg

SEQ ID NO: 287574 - DNA, 25 bp, Probe Sequence
tccggaggctaacagacctgggctt

SEQ ID NO: 287575 - DNA, 25 bp, Probe Sequence
tcccgggaagatctgaactggctgc

SEQ ID NO: 287576 - DNA, 25 bp, Probe Sequence
tcccgggcggtatacagttgctgca

SEQ ID NO: 287577 - DNA, 25 bp, Probe Sequence
tccagcgagggaacgcccagttggc

SEQ ID NO: 287578 - DNA, 25 bp, Probe Sequence
tccaggagggcaagggcgattctgg

SEQ ID NO: 287579 - DNA, 25 bp, Probe Sequence
tccaaagggatggctggaaattggc

SEQ ID NO: 287580 - DNA, 25 bp, Probe Sequence
tgccaataagcgggctacaaagtac

SEQ ID NO: 287581 - DNA, 25 bp, Probe Sequence
tccaaaagcggccccaaggccttag

SEQ ID NO: 287582 - DNA, 25 bp, Probe Sequence
tgccgaaatccggaccaactgtctg

SEQ ID NO: 287583 - DNA, 25 bp, Probe Sequence
tccgcaaactggggctaaatccgca

SEQ ID NO: 287584 - DNA, 25 bp, Probe Sequence
tccagaaagcttccgttttctacgg

SEQ ID NO: 287585 - DNA, 25 bp, Probe Sequence
tccaggaggtttgttatgtaacgta

SEQ ID NO: 287586 - DNA, 25 bp, Probe Sequence
tccaggaggttggtcttttccacct

SEQ ID NO: 287587 - DNA, 25 bp, Probe Sequence
tccaaatggtgggtttgaacctaca

SEQ ID NO: 287588 - DNA, 25 bp, Probe Sequence
tccaaccttgaagtcctaaaccaca

SEQ ID NO: 287589 - DNA, 25 bp, Probe Sequence
tccaaccattggtcaccagaaatcc

SEQ ID NO: 287590 - DNA, 25 bp, Probe Sequence
tccacccaaaaaaacagactccagg

SEQ ID NO: 287591 - DNA, 25 bp, Probe Sequence
tagaaccaatgacaaacgaccccgt

SEQ ID NO: 287592 - DNA, 25 bp, Probe Sequence
taagactaatgctcagaacctaacc

SEQ ID NO: 287593 - DNA, 25 bp, Probe Sequence
tcaaaaatactgacaaaccaaagtt

SEQ ID NO: 287594 - DNA, 25 bp, Probe Sequence
ttacgtaatcgataagactaacttt

SEQ ID NO: 287595 - DNA, 25 bp, Probe Sequence
tctccatttatttaaaactacccat

SEQ ID NO: 287596 - DNA, 25 bp, Probe Sequence
tgcccactgtttcaaggacaacctg

SEQ ID NO: 287597 - DNA, 25 bp, Probe Sequence
tgccctgccttattacaggataccc

SEQ ID NO: 287598 - DNA, 25 bp, Probe Sequence
tgccctgcgactgtaatggcaattc

SEQ ID NO: 287599 - DNA, 25 bp, Probe Sequence
tgcccgaggctagtaggctgcaacc

SEQ ID NO: 287600 - DNA, 25 bp, Probe Sequence
tgcccaagttcgtgagcacaaccct

SEQ ID NO: 287601 - DNA, 25 bp, Probe Sequence
tgccctaattagggcatcctgcccc

SEQ ID NO: 287602 - DNA, 25 bp, Probe Sequence
tgccattacatttattggccccccg

SEQ ID NO: 287603 - DNA, 25 bp, Probe Sequence
tgcggtatgcattcattggacccct

SEQ ID NO: 287604 - DNA, 25 bp, Probe Sequence
tgcgtatcagatttatagacccagc

SEQ ID NO: 287605 - DNA, 25 bp, Probe Sequence
tgcctaagagcatatatacccacgc

SEQ ID NO: 287606 - DNA, 25 bp, Probe Sequence
tgccgcaaagctgtctactacacgg

SEQ ID NO: 287607 - DNA, 25 bp, Probe Sequence
tgcccatcaagcgctcagaaatgct

SEQ ID NO: 287608 - DNA, 25 bp, Probe Sequence
tgcctcatgagactcgccaagttga

SEQ ID NO: 287609 - DNA, 25 bp, Probe Sequence
tgcccagaagtcccaaattatcagt

SEQ ID NO: 287610 - DNA, 25 bp, Probe Sequence
tgccaaataatccctaattttccac

SEQ ID NO: 287611 - DNA, 25 bp, Probe Sequence
tccaaatatgactttacccttgact

SEQ ID NO: 287612 - DNA, 25 bp, Probe Sequence
tccaagtagacaacaacaacctcct

SEQ ID NO: 287613 - DNA, 25 bp, Probe Sequence
tgccacgctggagtttaatccctca

SEQ ID NO: 287614 - DNA, 25 bp, Probe Sequence
tgccacctgggcagataacctggag

SEQ ID NO: 287615 - DNA, 25 bp, Probe Sequence
tgccaggctggtttgaactcctaca

SEQ ID NO: 287616 - DNA, 25 bp, Probe Sequence
tccacctggtatgagaccacccatg

SEQ ID NO: 287617 - DNA, 25 bp, Probe Sequence
tccaactggtctggcaactacttca

SEQ ID NO: 287618 - DNA, 25 bp, Probe Sequence
tgccatcctgcgtctggacctggct

SEQ ID NO: 287619 - DNA, 25 bp, Probe Sequence
tgccatcctgcgtctggacctggct

SEQ ID NO: 287620 - DNA, 25 bp, Probe Sequence
tgcgctactgcagcggagcacaggg

SEQ ID NO: 287621 - DNA, 25 bp, Probe Sequence
tgcgctactcgggaaggacatgatg

SEQ ID NO: 287622 - DNA, 25 bp, Probe Sequence
tgcgctgcagaccgtcaatggagca

SEQ ID NO: 287623 - DNA, 25 bp, Probe Sequence
tgcgctcatgagcgtctgtggagcc

SEQ ID NO: 287624 - DNA, 25 bp, Probe Sequence
tgcctcagcagcaccagttgactgc

SEQ ID NO: 287625 - DNA, 25 bp, Probe Sequence
tccaagtttcctgtgacgctgggtc

SEQ ID NO: 287626 - DNA, 25 bp, Probe Sequence
tgccaatgtgaccctgggactctgg

SEQ ID NO: 287627 - DNA, 25 bp, Probe Sequence
tgcccagtgtcacaaagcagttggc

SEQ ID NO: 287628 - DNA, 25 bp, Probe Sequence
tgcccaggcaaggaacagaagtgag

SEQ ID NO: 287629 - DNA, 25 bp, Probe Sequence
tcctcatgaaagggacgacgggagc

SEQ ID NO: 287630 - DNA, 25 bp, Probe Sequence
tcccatagaagacacccgggacccg

SEQ ID NO: 287631 - DNA, 25 bp, Probe Sequence
tccgatgagtagtgacaccgggccg

SEQ ID NO: 287632 - DNA, 25 bp, Probe Sequence
tcctgatggtagagacagactccag

SEQ ID NO: 287633 - DNA, 25 bp, Probe Sequence
tgccctagtcacatggcagacccac

SEQ ID NO: 287634 - DNA, 25 bp, Probe Sequence
tgccattagcccagacaggactaag

SEQ ID NO: 287635 - DNA, 25 bp, Probe Sequence
tgcgcaagagccgcgacaaggccaa

SEQ ID NO: 287636 - DNA, 25 bp, Probe Sequence
tgcctaattccttaaaggccaaggt

SEQ ID NO: 287637 - DNA, 25 bp, Probe Sequence
tgcccatttcctacaaaaccaacac

SEQ ID NO: 287638 - DNA, 25 bp, Probe Sequence
tgcctattactcagcctaaggaaac

SEQ ID NO: 287639 - DNA, 25 bp, Probe Sequence
tgcctactatctacccaacaagaac

SEQ ID NO: 287640 - DNA, 25 bp, Probe Sequence
tgccaacgtcacatcccaaaatagt

SEQ ID NO: 287641 - DNA, 25 bp, Probe Sequence
tccaccccacttgacgtcaatggga

SEQ ID NO: 287642 - DNA, 25 bp, Probe Sequence
tccttccgcaaggaacgtcttgggg

SEQ ID NO: 287643 - DNA, 25 bp, Probe Sequence
tccactgtccaagaaggttcgaggc

SEQ ID NO: 287644 - DNA, 25 bp, Probe Sequence
tgccggcaccaagaagcagttccag

SEQ ID NO: 287645 - DNA, 25 bp, Probe Sequence
tgccggcaccatgggattgagcgcc

SEQ ID NO: 287646 - DNA, 25 bp, Probe Sequence
tgccgagacactcgggggctgcaca

SEQ ID NO: 287647 - DNA, 25 bp, Probe Sequence
tgcccaaaggcggctgtgcgctaag

SEQ ID NO: 287648 - DNA, 25 bp, Probe Sequence
tgcgctacattggccgcagtggcat

SEQ ID NO: 287649 - DNA, 25 bp, Probe Sequence
tgcccaagatccctgacatagcagt

SEQ ID NO: 287650 - DNA, 25 bp, Probe Sequence
tgcccagagatcaggtgtccagggc

SEQ ID NO: 287651 - DNA, 25 bp, Probe Sequence
tcctgcgacatcaggttctcagtcc

SEQ ID NO: 287652 - DNA, 25 bp, Probe Sequence
tgcgctgctgaaaacgattcatatt

SEQ ID NO: 287653 - DNA, 25 bp, Probe Sequence
tgcctgcaaatatgctgactgtatt

SEQ ID NO: 287654 - DNA, 25 bp, Probe Sequence
tgcctgaatgcaagcagcaggtgtt

SEQ ID NO: 287655 - DNA, 25 bp, Probe Sequence
tgccagtcagcagtcatgcacgctg

SEQ ID NO: 287656 - DNA, 25 bp, Probe Sequence
tgccgttggtctctcatgacttaac

SEQ ID NO: 287657 - DNA, 25 bp, Probe Sequence
tgccgttggctttggatgtctttgc

SEQ ID NO: 287658 - DNA, 25 bp, Probe Sequence
tgcctttagttacaggtcctgcctt

SEQ ID NO: 287659 - DNA, 25 bp, Probe Sequence
tgccacttagtccagaaagttctcc

SEQ ID NO: 287660 - DNA, 25 bp, Probe Sequence
tgcccttctgtccagggacttgatc

SEQ ID NO: 287661 - DNA, 25 bp, Probe Sequence
tgcccttctgatgctaagactccag

SEQ ID NO: 287662 - DNA, 25 bp, Probe Sequence
tgcctctaccatgtgagtcccagag

SEQ ID NO: 287663 - DNA, 25 bp, Probe Sequence
tgcctgtaaacccagctactcagga

SEQ ID NO: 287664 - DNA, 25 bp, Probe Sequence
tgcctgtaaacccagctactcagga

SEQ ID NO: 287665 - DNA, 25 bp, Probe Sequence
tgcctgtaaacccagctactcagga

SEQ ID NO: 287666 - DNA, 25 bp, Probe Sequence
tgcctgtaaacccagctactcagga

SEQ ID NO: 287667 - DNA, 25 bp, Probe Sequence
tgcctgtaatcccagttactcggag

SEQ ID NO: 287668 - DNA, 25 bp, Probe Sequence
tccactgagtgctcgttactgggga

SEQ ID NO: 287669 - DNA, 25 bp, Probe Sequence
tgccctgagctctgggtaaggacga

SEQ ID NO: 287670 - DNA, 25 bp, Probe Sequence
tgccacggccgagggagaaggagta

SEQ ID NO: 287671 - DNA, 25 bp, Probe Sequence
tgccaaggcaggtggatcacctgag

SEQ ID NO: 287672 - DNA, 25 bp, Probe Sequence
tccaatgccgagtggctgactgtac

SEQ ID NO: 287673 - DNA, 25 bp, Probe Sequence
tccaatgccaatctgaggaccttca

SEQ ID NO: 287674 - DNA, 25 bp, Probe Sequence
tgccttgtggatcatgggactcccc

SEQ ID NO: 287675 - DNA, 25 bp, Probe Sequence
tgcgctttggcttgatggagatctc

SEQ ID NO: 287676 - DNA, 25 bp, Probe Sequence
tgccatttgatattcatggatatca

SEQ ID NO: 287677 - DNA, 25 bp, Probe Sequence
tgccttgatgtactggagcaatcag

SEQ ID NO: 287678 - DNA, 25 bp, Probe Sequence
tgcctttcaagtgcatgcagctcac

SEQ ID NO: 287679 - DNA, 25 bp, Probe Sequence
tgcctttcaagtgcatgcagctcac

SEQ ID NO: 287680 - DNA, 25 bp, Probe Sequence
tgcccttcagaacttcagcacacac

SEQ ID NO: 287681 - DNA, 25 bp, Probe Sequence
tgcccttcaaaggtgatgacatcac

SEQ ID NO: 287682 - DNA, 25 bp, Probe Sequence
tgccctactgttggtatgactaccg

SEQ ID NO: 287683 - DNA, 25 bp, Probe Sequence
tgccctatttatgtttctactcggg

SEQ ID NO: 287684 - DNA, 25 bp, Probe Sequence
tgcgctttttatgtacttttagcta

SEQ ID NO: 287685 - DNA, 25 bp, Probe Sequence
tgcgcttgcttttctgtattttatt

SEQ ID NO: 287686 - DNA, 25 bp, Probe Sequence
tgcctcatcttcaacttttgtgctt

SEQ ID NO: 287687 - DNA, 25 bp, Probe Sequence
tgcctcagtgacacaatttatcttt

SEQ ID NO: 287688 - DNA, 25 bp, Probe Sequence
tgcctattgatacactttactaatc

SEQ ID NO: 287689 - DNA, 25 bp, Probe Sequence
tgcctgttacaaattgattactcaa

SEQ ID NO: 287690 - DNA, 25 bp, Probe Sequence
tgccttctgatctcacagttggtca

SEQ ID NO: 287691 - DNA, 25 bp, Probe Sequence
tgcctttgcccagaactggtgcatc

SEQ ID NO: 287692 - DNA, 25 bp, Probe Sequence
tgccttacccgatggcttgtgacgc

SEQ ID NO: 287693 - DNA, 25 bp, Probe Sequence
tgccttttccagtggtaggagcatc

SEQ ID NO: 287694 - DNA, 25 bp, Probe Sequence
tgccttaatccattccttgaggaca

SEQ ID NO: 287695 - DNA, 25 bp, Probe Sequence
tgccgtcaacatgcctttcatggac

SEQ ID NO: 287696 - DNA, 25 bp, Probe Sequence
tgcgaggagatcgccattatcccca

SEQ ID NO: 287697 - DNA, 25 bp, Probe Sequence
tccaggagatgggtcccacttgcac

SEQ ID NO: 287698 - DNA, 25 bp, Probe Sequence
tgccatggaaggattcgccactacc

SEQ ID NO: 287699 - DNA, 25 bp, Probe Sequence
tgcctgaaaaggaaaccaccacctc

SEQ ID NO: 287700 - DNA, 25 bp, Probe Sequence
tcctaaataggttttcctcacttca

SEQ ID NO: 287701 - DNA, 25 bp, Probe Sequence
tcctacgtattattttcttgaccca

SEQ ID NO: 287702 - DNA, 25 bp, Probe Sequence
tgcccagggttaattttccaccaag

SEQ ID NO: 287703 - DNA, 25 bp, Probe Sequence
tgcccagccagtactctttttggcc

SEQ ID NO: 287704 - DNA, 25 bp, Probe Sequence
tgcccgacgtgtatggtgtattcca

SEQ ID NO: 287705 - DNA, 25 bp, Probe Sequence
tgcccgctatggacggggcattcca

SEQ ID NO: 287706 - DNA, 25 bp, Probe Sequence
tgccctcagtggtcaggcgtgcaat

SEQ ID NO: 287707 - DNA, 25 bp, Probe Sequence
tgccctgtgatgctgggtgatgccc

SEQ ID NO: 287708 - DNA, 25 bp, Probe Sequence
tgcgcaatgctgacttggagctaga

SEQ ID NO: 287709 - DNA, 25 bp, Probe Sequence
tgccgagcgtgaggagactcagcag

SEQ ID NO: 287710 - DNA, 25 bp, Probe Sequence
tgccctagagagaatgacccagtgc

SEQ ID NO: 287711 - DNA, 25 bp, Probe Sequence
tgcctaatggagaagacccacgtgc

SEQ ID NO: 287712 - DNA, 25 bp, Probe Sequence
tgcctctgttagaaattcacactgt

SEQ ID NO: 287713 - DNA, 25 bp, Probe Sequence
tgcccaattgagtgcttcatgcctt

SEQ ID NO: 287714 - DNA, 25 bp, Probe Sequence
tgcccaattgagtgcttcatgcctt

SEQ ID NO: 287715 - DNA, 25 bp, Probe Sequence
tgcctttgatggtgttcatttgcat

SEQ ID NO: 287716 - DNA, 25 bp, Probe Sequence
tgcccctgtgtgagtcttttaggga

SEQ ID NO: 287717 - DNA, 25 bp, Probe Sequence
tgccccgattgctcctgttaaagga

SEQ ID NO: 287718 - DNA, 25 bp, Probe Sequence
tgcccgcaaagctcgcgctacaaaa

SEQ ID NO: 287719 - DNA, 25 bp, Probe Sequence
tgccaaactagctcacctatttaat

SEQ ID NO: 287720 - DNA, 25 bp, Probe Sequence
tgccaaggcaactcagcagccattt

SEQ ID NO: 287721 - DNA, 25 bp, Probe Sequence
tgccaagtgcgaactggcctttctc

SEQ ID NO: 287722 - DNA, 25 bp, Probe Sequence
tgccaacgttactgcctttatttaa

SEQ ID NO: 287723 - DNA, 25 bp, Probe Sequence
tccaacgtatcccaccaaatatttt

SEQ ID NO: 287724 - DNA, 25 bp, Probe Sequence
tccaaccaatacccaaaaatgtata

SEQ ID NO: 287725 - DNA, 25 bp, Probe Sequence
tccaagtaatactacctaattgtta

SEQ ID NO: 287726 - DNA, 25 bp, Probe Sequence
tgcccattgaatatagactttgtgt

SEQ ID NO: 287727 - DNA, 25 bp, Probe Sequence
tgcccttacatcttatacctggtgt

SEQ ID NO: 287728 - DNA, 25 bp, Probe Sequence
tgccccatgagatcttcatctcggt

SEQ ID NO: 287729 - DNA, 25 bp, Probe Sequence
tgccacaagagatcctttcagtccc

SEQ ID NO: 287730 - DNA, 25 bp, Probe Sequence
tgcccagcattgactaatgttcagt

SEQ ID NO: 287731 - DNA, 25 bp, Probe Sequence
tgcctcatatttaagctgctgctct

SEQ ID NO: 287732 - DNA, 25 bp, Probe Sequence
tgcccagatggctatacctgctgcc

SEQ ID NO: 287733 - DNA, 25 bp, Probe Sequence
tgcccagatggctatacctgctgcc

SEQ ID NO: 287734 - DNA, 25 bp, Probe Sequence
tgccgcagaccattatctggcggga

SEQ ID NO: 287735 - DNA, 25 bp, Probe Sequence
tgcccagacactgactatgccagag

SEQ ID NO: 287736 - DNA, 25 bp, Probe Sequence
tgcgcacagaccgtggtgagcttgg

SEQ ID NO: 287737 - DNA, 25 bp, Probe Sequence
tccaaggccctgttgggtggaatgg

SEQ ID NO: 287738 - DNA, 25 bp, Probe Sequence
tgccacggggtgttggatatggagg

SEQ ID NO: 287739 - DNA, 25 bp, Probe Sequence
tgcccagcgggtctgagtgtgaggt

SEQ ID NO: 287740 - DNA, 25 bp, Probe Sequence
tgcccaggctggagtgcagtggcgt

SEQ ID NO: 287741 - DNA, 25 bp, Probe Sequence
tgcccagagtgggagtggggagctt

SEQ ID NO: 287742 - DNA, 25 bp, Probe Sequence
tgccaaggtggtggtggcgggcggg

SEQ ID NO: 287743 - DNA, 25 bp, Probe Sequence
tgcgcaagaggggcgggctcagagc

SEQ ID NO: 287744 - DNA, 25 bp, Probe Sequence
tgccctgtgcttgtgggctgcaagt

SEQ ID NO: 287745 - DNA, 25 bp, Probe Sequence
tgcccatgtgcatcctgggtgcatt

SEQ ID NO: 287746 - DNA, 25 bp, Probe Sequence
tgcctaggcacatctctgagtgctt

SEQ ID NO: 287747 - DNA, 25 bp, Probe Sequence
tccaaggccagagctcaggcctgca

SEQ ID NO: 287748 - DNA, 25 bp, Probe Sequence
tccaagggcagtgctccaaggcagg

SEQ ID NO: 287749 - DNA, 25 bp, Probe Sequence
tcctcagggcccaccattgaagagg

SEQ ID NO: 287750 - DNA, 25 bp, Probe Sequence
tgcctaggtcccccaagcatggggg

SEQ ID NO: 287751 - DNA, 25 bp, Probe Sequence
tgcctacgtccccttagatgggcag

SEQ ID NO: 287752 - DNA, 25 bp, Probe Sequence
tgcctacctgcccagattactggac

SEQ ID NO: 287753 - DNA, 25 bp, Probe Sequence
tgcctacatcctgcagagcgagggg

SEQ ID NO: 287754 - DNA, 25 bp, Probe Sequence
tgcctatgacctgaggcggcgggag

SEQ ID NO: 287755 - DNA, 25 bp, Probe Sequence
tgcccatagctacagtggccgggag

SEQ ID NO: 287756 - DNA, 25 bp, Probe Sequence
tgcccttgctgctgggtggagtgga

SEQ ID NO: 287757 - DNA, 25 bp, Probe Sequence
tgcccttggccagcatgtggagtgg

SEQ ID NO: 287758 - DNA, 25 bp, Probe Sequence
tgcccaagactaccagtggatcggc

SEQ ID NO: 287759 - DNA, 25 bp, Probe Sequence
tgcgccatgagagccaagtggagga

SEQ ID NO: 287760 - DNA, 25 bp, Probe Sequence
tgcccatgtggacaagtcagcagga

SEQ ID NO: 287761 - DNA, 25 bp, Probe Sequence
tgcccatgatggacacacccaagtc

SEQ ID NO: 287762 - DNA, 25 bp, Probe Sequence
tgcccagatgtatacccagtgtgaa

SEQ ID NO: 287763 - DNA, 25 bp, Probe Sequence
tgcctatgcttaaagccaactgtgg

SEQ ID NO: 287764 - DNA, 25 bp, Probe Sequence
tgcctctgtctctgaggaacagggc

SEQ ID NO: 287765 - DNA, 25 bp, Probe Sequence
tgccatttgcctggatgaatatgag

SEQ ID NO: 287766 - DNA, 25 bp, Probe Sequence
tgcctttccattacctagcagaacc

SEQ ID NO: 287767 - DNA, 25 bp, Probe Sequence
tgcctgtgtacctcgtaggaacgct

SEQ ID NO: 287768 - DNA, 25 bp, Probe Sequence
tgccgtgggcagtgcgtgggagcac

SEQ ID NO: 287769 - DNA, 25 bp, Probe Sequence
tgcctggtggtatctgaggtgacca

SEQ ID NO: 287770 - DNA, 25 bp, Probe Sequence
tgcctgaggctgtaactgagagaaa

SEQ ID NO: 287771 - DNA, 25 bp, Probe Sequence
tgcctgatggcgaaagtgagaaaac

SEQ ID NO: 287772 - DNA, 25 bp, Probe Sequence
tgcctcggcagctggtgcgaaaatc

SEQ ID NO: 287773 - DNA, 25 bp, Probe Sequence
tgcctcctcagatggggatttatct

SEQ ID NO: 287774 - DNA, 25 bp, Probe Sequence
tgcccccagataagtggtctgtgaa

SEQ ID NO: 287775 - DNA, 25 bp, Probe Sequence
tgcccctgagatgagacgcctcata

SEQ ID NO: 287776 - DNA, 25 bp, Probe Sequence
tgcccctgacaggatactgagccaa

SEQ ID NO: 287777 - DNA, 25 bp, Probe Sequence
tgcccctgatcccaagtatgtcagc

SEQ ID NO: 287778 - DNA, 25 bp, Probe Sequence
tgccctcttctcaacagctgagtag

SEQ ID NO: 287779 - DNA, 25 bp, Probe Sequence
tgcccactgttgaacacatcattat

SEQ ID NO: 287780 - DNA, 25 bp, Probe Sequence
tgcccacagttgaacacaagtgctg

SEQ ID NO: 287781 - DNA, 25 bp, Probe Sequence
tgcccaaggctgcatctgcaaaggg

SEQ ID NO: 287782 - DNA, 25 bp, Probe Sequence
tgccacaaggtgcatgcagtgatag

SEQ ID NO: 287783 - DNA, 25 bp, Probe Sequence
tgcccagaggggtagtacaacagct

SEQ ID NO: 287784 - DNA, 25 bp, Probe Sequence
tgcctacggaggtggcagccatctc

SEQ ID NO: 287785 - DNA, 25 bp, Probe Sequence
tccacacggagttggagcggctgcc

SEQ ID NO: 287786 - DNA, 25 bp, Probe Sequence
tgccccctgaatggtatgtggtgcc

SEQ ID NO: 287787 - DNA, 25 bp, Probe Sequence
tgccccttcactggtaatgtgtcca

SEQ ID NO: 287788 - DNA, 25 bp, Probe Sequence
tgccccttcactggtaatgtgtcca

SEQ ID NO: 287789 - DNA, 25 bp, Probe Sequence
tgccccttcgcagctgaagtggaga

SEQ ID NO: 287790 - DNA, 25 bp, Probe Sequence
tgcccgtttcctggaggtggatgag

SEQ ID NO: 287791 - DNA, 25 bp, Probe Sequence
tgcgccggcttcgaggagggcaaga

SEQ ID NO: 287792 - DNA, 25 bp, Probe Sequence
tgcgccggcttcgaggagggcaaga

SEQ ID NO: 287793 - DNA, 25 bp, Probe Sequence
tgcccacgtcatccagctagggaaa

SEQ ID NO: 287794 - DNA, 25 bp, Probe Sequence
tgcccacagcctcgcttagggcaat

SEQ ID NO: 287795 - DNA, 25 bp, Probe Sequence
tgcccagaaagccaatcaggtcatc

SEQ ID NO: 287796 - DNA, 25 bp, Probe Sequence
tgcccagcacagtgcaagcaaacac

SEQ ID NO: 287797 - DNA, 25 bp, Probe Sequence
tgccccacttcgtcaatagacactt

SEQ ID NO: 287798 - DNA, 25 bp, Probe Sequence
tgcccagacaccagcatgtagacct

SEQ ID NO: 287799 - DNA, 25 bp, Probe Sequence
tgccagaacacctcaggcagagccc

SEQ ID NO: 287800 - DNA, 25 bp, Probe Sequence
tgccagaacacctcaggcagagccc

SEQ ID NO: 287801 - DNA, 25 bp, Probe Sequence
tgccagaacacctcaggcagagccc

SEQ ID NO: 287802 - DNA, 25 bp, Probe Sequence
tcatcaagtacctcccagagtggtc

SEQ ID NO: 287803 - DNA, 25 bp, Probe Sequence
tcatcaagtacctcccagagtggtc

SEQ ID NO: 287804 - DNA, 25 bp, Probe Sequence
tccatacaattctcttcagttagtg

SEQ ID NO: 287805 - DNA, 25 bp, Probe Sequence
tgcctacacttctcttgggttatgt

SEQ ID NO: 287806 - DNA, 25 bp, Probe Sequence
tgccaaacatttgtcgtggttacca

SEQ ID NO: 287807 - DNA, 25 bp, Probe Sequence
tgcccagtactggccatctgatgga

SEQ ID NO: 287808 - DNA, 25 bp, Probe Sequence
tgcgccagccaggcttgactgaggc

SEQ ID NO: 287809 - DNA, 25 bp, Probe Sequence
tgcctggccaccaatgagctgggca

SEQ ID NO: 287810 - DNA, 25 bp, Probe Sequence
tgccgcccagcaagggctgactgac

SEQ ID NO: 287811 - DNA, 25 bp, Probe Sequence
tgccgggcagcaggtgctggacgtc

SEQ ID NO: 287812 - DNA, 25 bp, Probe Sequence
tgcctagctagaggatctgtgaccc

SEQ ID NO: 287813 - DNA, 25 bp, Probe Sequence
tgcctgcctatgtgacgacaatcca

SEQ ID NO: 287814 - DNA, 25 bp, Probe Sequence
tgcctgctcaattgaactattccac

SEQ ID NO: 287815 - DNA, 25 bp, Probe Sequence
tgccatgccaaactatattgtcccc

SEQ ID NO: 287816 - DNA, 25 bp, Probe Sequence
tgcccacatatcttatttattcctc

SEQ ID NO: 287817 - DNA, 25 bp, Probe Sequence
tgccccaatttctattatgttctaa

SEQ ID NO: 287818 - DNA, 25 bp, Probe Sequence
tgccttcaattttggtatttcggtt

SEQ ID NO: 287819 - DNA, 25 bp, Probe Sequence
tgccatttcttcaaggtttactttt

SEQ ID NO: 287820 - DNA, 25 bp, Probe Sequence
tgccttacttttatcttaatttttg

SEQ ID NO: 287821 - DNA, 25 bp, Probe Sequence
tgcctatgcgtttgtatatgctcta

SEQ ID NO: 287822 - DNA, 25 bp, Probe Sequence
tgccctgtttggttcagctgtcagg

SEQ ID NO: 287823 - DNA, 25 bp, Probe Sequence
tgccctgtctctgaaccttcagaac

SEQ ID NO: 287824 - DNA, 25 bp, Probe Sequence
tgccttgtcatttaactctgtgaag

SEQ ID NO: 287825 - DNA, 25 bp, Probe Sequence
tgcctgtgatccatgctacttggga

SEQ ID NO: 287826 - DNA, 25 bp, Probe Sequence
tgcctcagatctgctgtagccagtg

SEQ ID NO: 287827 - DNA, 25 bp, Probe Sequence
tgcccgacccgaagagagtgagctt

SEQ ID NO: 287828 - DNA, 25 bp, Probe Sequence
tgcccgcccacgatggatgaagtgc

SEQ ID NO: 287829 - DNA, 25 bp, Probe Sequence
tgcccagcctgacttctggtgaggt

SEQ ID NO: 287830 - DNA, 25 bp, Probe Sequence
tgcccactgcattttctggaaggac

SEQ ID NO: 287831 - DNA, 25 bp, Probe Sequence
tgcccgctgcagtttcttgggacat

SEQ ID NO: 287832 - DNA, 25 bp, Probe Sequence
tgccgggagatcttgtctgtggact

SEQ ID NO: 287833 - DNA, 25 bp, Probe Sequence
tgccgcggggcactgccaaagaagg

SEQ ID NO: 287834 - DNA, 25 bp, Probe Sequence
tgccgtcggcgagtacaacaaagcc

SEQ ID NO: 287835 - DNA, 25 bp, Probe Sequence
tgccgatggggaggacaccacagtg

SEQ ID NO: 287836 - DNA, 25 bp, Probe Sequence
tgccgggttacttatcccaggcaga

SEQ ID NO: 287837 - DNA, 25 bp, Probe Sequence
tgcccaggatgtttattaccgggat

SEQ ID NO: 287838 - DNA, 25 bp, Probe Sequence
tgcccaggagctgcttgttcctgac

SEQ ID NO: 287839 - DNA, 25 bp, Probe Sequence
tgcccaggagctctccttgtgtaca

SEQ ID NO: 287840 - DNA, 25 bp, Probe Sequence
tgccctgggatcattactgtgtcca

SEQ ID NO: 287841 - DNA, 25 bp, Probe Sequence
tgcccagcctatatctacttgagcc

SEQ ID NO: 287842 - DNA, 25 bp, Probe Sequence
tccacagcaccattgtttactgacc

SEQ ID NO: 287843 - DNA, 25 bp, Probe Sequence
tgcccgcatgctttgaaaacagacc

SEQ ID NO: 287844 - DNA, 25 bp, Probe Sequence
tgcccgatgcaatgagaaaaacatt

SEQ ID NO: 287845 - DNA, 25 bp, Probe Sequence
tgccctctgctcaggacataaacag

SEQ ID NO: 287846 - DNA, 25 bp, Probe Sequence
tgccccaggctatgacaaagtcaag

SEQ ID NO: 287847 - DNA, 25 bp, Probe Sequence
tcctccaggaaaccagaagcccggg

SEQ ID NO: 287848 - DNA, 25 bp, Probe Sequence
tccccgtcaagaatggaaccaaggc

SEQ ID NO: 287849 - DNA, 25 bp, Probe Sequence
tcctcccgggacagaaacaagccct

SEQ ID NO: 287850 - DNA, 25 bp, Probe Sequence
tgcccgccagtgcacagggaagggc

SEQ ID NO: 287851 - DNA, 25 bp, Probe Sequence
tgcccaccgtgactgtgaggacgtg

SEQ ID NO: 287852 - DNA, 25 bp, Probe Sequence
tgcccacctggcagtacatcaagtg

SEQ ID NO: 287853 - DNA, 25 bp, Probe Sequence
tgccccttggcagaacatcaagtgt

SEQ ID NO: 287854 - DNA, 25 bp, Probe Sequence
tgccctttgtggaaagtcacaggtc

SEQ ID NO: 287855 - DNA, 25 bp, Probe Sequence
tccttgttgtggacagggaagtgcc

SEQ ID NO: 287856 - DNA, 25 bp, Probe Sequence
tcctttttttcatcagaacgcccgc

SEQ ID NO: 287857 - DNA, 25 bp, Probe Sequence
tgcctgttgttctcattacaaccct

SEQ ID NO: 287858 - DNA, 25 bp, Probe Sequence
tgcctgcaattttacctagctacca

SEQ ID NO: 287859 - DNA, 25 bp, Probe Sequence
tcctaattcgaagcagagtcctcag

SEQ ID NO: 287860 - DNA, 25 bp, Probe Sequence
tccaaaatgaaacaggcttctcagg

SEQ ID NO: 287861 - DNA, 25 bp, Probe Sequence
tgccaaaatcaaatgcaatagttgc

SEQ ID NO: 287862 - DNA, 25 bp, Probe Sequence
tccagaaaccttaaagaagcctctt

SEQ ID NO: 287863 - DNA, 25 bp, Probe Sequence
tccaaatacttgagaaattaccttt

SEQ ID NO: 287864 - DNA, 25 bp, Probe Sequence
tccaagaactgtatgacaccacctt

SEQ ID NO: 287865 - DNA, 25 bp, Probe Sequence
tcccacccagtcataaccaaggtca

SEQ ID NO: 287866 - DNA, 25 bp, Probe Sequence
tgccccctcattaaaattcacgttc

SEQ ID NO: 287867 - DNA, 25 bp, Probe Sequence
tgccctctgctatgaaggtctctgc

SEQ ID NO: 287868 - DNA, 25 bp, Probe Sequence
tgcccttgatgtcacaggatctctt

SEQ ID NO: 287869 - DNA, 25 bp, Probe Sequence
tgccctgtgtatcccagagatgcta

SEQ ID NO: 287870 - DNA, 25 bp, Probe Sequence
tgcccatgtgaaccctgcagatgga

SEQ ID NO: 287871 - DNA, 25 bp, Probe Sequence
tgcccatttggcagatgaaggaact

SEQ ID NO: 287872 - DNA, 25 bp, Probe Sequence
tgcctcaaaggcatgagcggggtct

SEQ ID NO: 287873 - DNA, 25 bp, Probe Sequence
tgcctccaaggcattcgatgcgtgt

SEQ ID NO: 287874 - DNA, 25 bp, Probe Sequence
tgccaccaaggcattagtgtctgta

SEQ ID NO: 287875 - DNA, 25 bp, Probe Sequence
tgccagccagggacctctggctggt

SEQ ID NO: 287876 - DNA, 25 bp, Probe Sequence
taatccagggctgttggggtttctg

SEQ ID NO: 287877 - DNA, 25 bp, Probe Sequence
taatgccagtacagacttaggactt

SEQ ID NO: 287878 - DNA, 25 bp, Probe Sequence
tcatagcccaacaaggtaattattt

SEQ ID NO: 287879 - DNA, 25 bp, Probe Sequence
tataaaaagtagggcaatttcatta

SEQ ID NO: 287880 - DNA, 25 bp, Probe Sequence
tccaaaaagtagtgttcttctctca

SEQ ID NO: 287881 - DNA, 25 bp, Probe Sequence
tccaatgatacccaacagtttattt

SEQ ID NO: 287882 - DNA, 25 bp, Probe Sequence
tgcctttcacagcaaacttttctgg

SEQ ID NO: 287883 - DNA, 25 bp, Probe Sequence
tgccttttaaaatccttattctcct

SEQ ID NO: 287884 - DNA, 25 bp, Probe Sequence
tgccttcttattttacttcttttag

SEQ ID NO: 287885 - DNA, 25 bp, Probe Sequence
tgccttgtatttgtttctttcttac

SEQ ID NO: 287886 - DNA, 25 bp, Probe Sequence
tgccgtttttcatagttttcaccac

SEQ ID NO: 287887 - DNA, 25 bp, Probe Sequence
tgcctgtttttcaaatgaggttcaa

SEQ ID NO: 287888 - DNA, 25 bp, Probe Sequence
tgcccttttgtactaatggtgtcga

SEQ ID NO: 287889 - DNA, 25 bp, Probe Sequence
tgcctctttcttggcaaagtttctg

SEQ ID NO: 287890 - DNA, 25 bp, Probe Sequence
tgcctcttctgcattcaaagttcct

SEQ ID NO: 287891 - DNA, 25 bp, Probe Sequence
tgccttttaattcagtgttcccatg

SEQ ID NO: 287892 - DNA, 25 bp, Probe Sequence
tgccctttatcactgtcagtcattc

SEQ ID NO: 287893 - DNA, 25 bp, Probe Sequence
tgccctatgtatccgtaaatgtcat

SEQ ID NO: 287894 - DNA, 25 bp, Probe Sequence
tgcctctgaattccgtttatgtcta

SEQ ID NO: 287895 - DNA, 25 bp, Probe Sequence
tgcctatgcaaaccagctttaggtc

SEQ ID NO: 287896 - DNA, 25 bp, Probe Sequence
tgccttccaagttgtttgctggctt

SEQ ID NO: 287897 - DNA, 25 bp, Probe Sequence
tacttggcaagtggttgtcaagttc

SEQ ID NO: 287898 - DNA, 25 bp, Probe Sequence
tgcctctgggaattttgtcaagatt

SEQ ID NO: 287899 - DNA, 25 bp, Probe Sequence
tgcctctggtggctgggattcagat

SEQ ID NO: 287900 - DNA, 25 bp, Probe Sequence
tgccctgcgtgacgtacgtcagcaa

SEQ ID NO: 287901 - DNA, 25 bp, Probe Sequence
tgccccatgtgaagtcactgtgcca

SEQ ID NO: 287902 - DNA, 25 bp, Probe Sequence
tgccccaggggatatatccagctca

SEQ ID NO: 287903 - DNA, 25 bp, Probe Sequence
tgccccaggagggagccatcctggc

SEQ ID NO: 287904 - DNA, 25 bp, Probe Sequence
tgccccagaaattgcagttcctgag

SEQ ID NO: 287905 - DNA, 25 bp, Probe Sequence
tgcctcccagactcatctataaagt

SEQ ID NO: 287906 - DNA, 25 bp, Probe Sequence
tcctcccaagtggtgcctaaagttt

SEQ ID NO: 287907 - DNA, 25 bp, Probe Sequence
tgcctacctagaatctgcctgaaag

SEQ ID NO: 287908 - DNA, 25 bp, Probe Sequence
tgcccatccgtaatatgggataaga

SEQ ID NO: 287909 - DNA, 25 bp, Probe Sequence
tgccaaccgcttaagagagaaagtc

SEQ ID NO: 287910 - DNA, 25 bp, Probe Sequence
tgccgatcgcctatgtgacagcaaa

SEQ ID NO: 287911 - DNA, 25 bp, Probe Sequence
tgcctgacccactgttgcagaatga

SEQ ID NO: 287912 - DNA, 25 bp, Probe Sequence
tgccagacccacaagccttgaagag

SEQ ID NO: 287913 - DNA, 25 bp, Probe Sequence
tgccataccgaatccgtgtgcggct

SEQ ID NO: 287914 - DNA, 25 bp, Probe Sequence
tgccatccaggattttggggtggta

SEQ ID NO: 287915 - DNA, 25 bp, Probe Sequence
tgcctctcagctagttggcgggggt

SEQ ID NO: 287916 - DNA, 25 bp, Probe Sequence
tgccctccttgttgtggacagggaa

SEQ ID NO: 287917 - DNA, 25 bp, Probe Sequence
tgcctcctttttcaagcagcggata

SEQ ID NO: 287918 - DNA, 25 bp, Probe Sequence
tgccccattcttttaacgttgtagg

SEQ ID NO: 287919 - DNA, 25 bp, Probe Sequence
tgccccattctatcatcgacgggta

SEQ ID NO: 287920 - DNA, 25 bp, Probe Sequence
tccaactactaaactgggggatatt

SEQ ID NO: 287921 - DNA, 25 bp, Probe Sequence
tccaagtgccagaggtgggcaggtg

SEQ ID NO: 287922 - DNA, 25 bp, Probe Sequence
tccaagtggagacggggatggggaa

SEQ ID NO: 287923 - DNA, 25 bp, Probe Sequence
tcctagagccggcgagcgtttgaga

SEQ ID NO: 287924 - DNA, 25 bp, Probe Sequence
tgcctgaagccctgtgacaatttgg

SEQ ID NO: 287925 - DNA, 25 bp, Probe Sequence
tgcctgtcttcctaataccatttgg

SEQ ID NO: 287926 - DNA, 25 bp, Probe Sequence
tgcctgttggcttcaatacatttga

SEQ ID NO: 287927 - DNA, 25 bp, Probe Sequence
tgccattgggctgctgcatatttta

SEQ ID NO: 287928 - DNA, 25 bp, Probe Sequence
tgccattggcttctcagatgtattt

SEQ ID NO: 287929 - DNA, 25 bp, Probe Sequence
tccaatggcctcataggggatttca

SEQ ID NO: 287930 - DNA, 25 bp, Probe Sequence
tgccctcccatacaggctggataaa

SEQ ID NO: 287931 - DNA, 25 bp, Probe Sequence
tgcctccctcagcgagatctgagca

SEQ ID NO: 287932 - DNA, 25 bp, Probe Sequence
tgccctcatctgctggagatcgata

SEQ ID NO: 287933 - DNA, 25 bp, Probe Sequence
tgccccacttggcagtacatcaagt

SEQ ID NO: 287934 - DNA, 25 bp, Probe Sequence
tgccccatcttggcttgaagaacag

SEQ ID NO: 287935 - DNA, 25 bp, Probe Sequence
tgccccaacggcctggatgagagaa

SEQ ID NO: 287936 - DNA, 25 bp, Probe Sequence
tgccccagacttgcgatggacacaa

SEQ ID NO: 287937 - DNA, 25 bp, Probe Sequence
tgcctccagccaaacgggagctttt

SEQ ID NO: 287938 - DNA, 25 bp, Probe Sequence
tgccttcaggccactgggcatgtat

SEQ ID NO: 287939 - DNA, 25 bp, Probe Sequence
tgccttatgttctatcatgggtgtt

SEQ ID NO: 287940 - DNA, 25 bp, Probe Sequence
tgcctatagtcctataagcttttcc

SEQ ID NO: 287941 - DNA, 25 bp, Probe Sequence
tgcctacagtcctagctacttggga

SEQ ID NO: 287942 - DNA, 25 bp, Probe Sequence
tgcctgtagtcccagctacttggga

SEQ ID NO: 287943 - DNA, 25 bp, Probe Sequence
tgcctgtagtcccagctactcagga

SEQ ID NO: 287944 - DNA, 25 bp, Probe Sequence
tgcctgtagtcccagctactcagga

SEQ ID NO: 287945 - DNA, 25 bp, Probe Sequence
tgcctgtagtcccagctactcagga

SEQ ID NO: 287946 - DNA, 25 bp, Probe Sequence
tgcctgtaatcccctaataagtcta

SEQ ID NO: 287947 - DNA, 25 bp, Probe Sequence
tgccaggtcctccttgaaaacgtca

SEQ ID NO: 287948 - DNA, 25 bp, Probe Sequence
tccagcagtggtcattcgacaacga

SEQ ID NO: 287949 - DNA, 25 bp, Probe Sequence
tgcccggagtggaactgaagcctgc

SEQ ID NO: 287950 - DNA, 25 bp, Probe Sequence
tgcccgtggtggactataagcactg

SEQ ID NO: 287951 - DNA, 25 bp, Probe Sequence
tgcccgctgggggcctgaagacatt

SEQ ID NO: 287952 - DNA, 25 bp, Probe Sequence
tgcccgctgggggcctgaagacatt

SEQ ID NO: 287953 - DNA, 25 bp, Probe Sequence
tgcccgctgggggcctgaagacatt

SEQ ID NO: 287954 - DNA, 25 bp, Probe Sequence
tgcccccaggtgaacattaactttc

SEQ ID NO: 287955 - DNA, 25 bp, Probe Sequence
tccaccgaggaaaaggaatcgtatc

SEQ ID NO: 287956 - DNA, 25 bp, Probe Sequence
tccaccgtgggaacagagaatacct

SEQ ID NO: 287957 - DNA, 25 bp, Probe Sequence
tccaacttagggtcaaaatacactg

SEQ ID NO: 287958 - DNA, 25 bp, Probe Sequence
tgccaggtttggaaagaaatcccgg

SEQ ID NO: 287959 - DNA, 25 bp, Probe Sequence
tctagggcttgtattaaaccactga

SEQ ID NO: 287960 - DNA, 25 bp, Probe Sequence
tcgatgccttttagtttttccaatg

SEQ ID NO: 287961 - DNA, 25 bp, Probe Sequence
tccagttacctagatattcccttga

SEQ ID NO: 287962 - DNA, 25 bp, Probe Sequence
tcccagaacctacagataccctgct

SEQ ID NO: 287963 - DNA, 25 bp, Probe Sequence
tccaagacccataggacttccatac

SEQ ID NO: 287964 - DNA, 25 bp, Probe Sequence
tgccctaactataggagtttctctc

SEQ ID NO: 287965 - DNA, 25 bp, Probe Sequence
tgccctggctttaaggtttagctcc

SEQ ID NO: 287966 - DNA, 25 bp, Probe Sequence
tccaatgagcttaaaacatttttcc

SEQ ID NO: 287967 - DNA, 25 bp, Probe Sequence
tgccaacacctcaaaacacctggtg

SEQ ID NO: 287968 - DNA, 25 bp, Probe Sequence
tccactatccttcagaccatcatgg

SEQ ID NO: 287969 - DNA, 25 bp, Probe Sequence
tgccacatcaacacaggactttctg

SEQ ID NO: 287970 - DNA, 25 bp, Probe Sequence
tgccacagccacggggtttgcaata

SEQ ID NO: 287971 - DNA, 25 bp, Probe Sequence
tgccaattccttgtttgtgcaaaat

SEQ ID NO: 287972 - DNA, 25 bp, Probe Sequence
tccagtggaagaccttagtaaaatc

SEQ ID NO: 287973 - DNA, 25 bp, Probe Sequence
tgccagggacagtgtgctcagtaaa

SEQ ID NO: 287974 - DNA, 25 bp, Probe Sequence
tgccagagaacctagtgctccttca

SEQ ID NO: 287975 - DNA, 25 bp, Probe Sequence
tgccgagcacagtcctgtgctgcct

SEQ ID NO: 287976 - DNA, 25 bp, Probe Sequence
tgcctgccatagccaggagcgcatc

SEQ ID NO: 287977 - DNA, 25 bp, Probe Sequence
tgcctgctcagaccttgcaggctgt

SEQ ID NO: 287978 - DNA, 25 bp, Probe Sequence
tgccatcatgacccttggccataat

SEQ ID NO: 287979 - DNA, 25 bp, Probe Sequence
tgccttgactcagatggtgcatatg

SEQ ID NO: 287980 - DNA, 25 bp, Probe Sequence
tgccctgacggcgaggtcatgaaga

SEQ ID NO: 287981 - DNA, 25 bp, Probe Sequence
tgcctctgagcgggagagtctgtgt

SEQ ID NO: 287982 - DNA, 25 bp, Probe Sequence
tgccctgcaggcctatgagagctac

SEQ ID NO: 287983 - DNA, 25 bp, Probe Sequence
tgccacagcaggcatcgcaactttc

SEQ ID NO: 287984 - DNA, 25 bp, Probe Sequence
tgcctgccattttcagaatcatctt

SEQ ID NO: 287985 - DNA, 25 bp, Probe Sequence
tgcctgccattttcagaatcatctt

SEQ ID NO: 287986 - DNA, 25 bp, Probe Sequence
tgcctgccattttcagaatcatctt

SEQ ID NO: 287987 - DNA, 25 bp, Probe Sequence
tgcctgccattttcagaatcatctt

SEQ ID NO: 287988 - DNA, 25 bp, Probe Sequence
tgcccgcattggtgcagatgcagcc

SEQ ID NO: 287989 - DNA, 25 bp, Probe Sequence
tgccggacgcgagcagatgaacgaa

SEQ ID NO: 287990 - DNA, 25 bp, Probe Sequence
tgccgctacctggactggatcaaga

SEQ ID NO: 287991 - DNA, 25 bp, Probe Sequence
tgccgctgaccgaggcgtgcaaaga

SEQ ID NO: 287992 - DNA, 25 bp, Probe Sequence
tgccggacgtgtacctatgcagaca

SEQ ID NO: 287993 - DNA, 25 bp, Probe Sequence
tgcccgagcatgatgcccgtgagaa

SEQ ID NO: 287994 - DNA, 25 bp, Probe Sequence
tgcccgatgctcaggacctgaggaa

SEQ ID NO: 287995 - DNA, 25 bp, Probe Sequence
tgccaggagctttggacctaatcca

SEQ ID NO: 287996 - DNA, 25 bp, Probe Sequence
tgcctgggcttatgccctcagatgg

SEQ ID NO: 287997 - DNA, 25 bp, Probe Sequence
tgcctggcctgtcacacaacaagga

SEQ ID NO: 287998 - DNA, 25 bp, Probe Sequence
tgccagacccacaagccttgaagag

SEQ ID NO: 287999 - DNA, 25 bp, Probe Sequence
tgcccccacacttgtcattaatgaa

SEQ ID NO: 288000 - DNA, 25 bp, Probe Sequence
tgccccaacagctatgttaataaca

SEQ ID NO: 288001 - DNA, 25 bp, Probe Sequence
tgcccctccagtttttatagacctg

SEQ ID NO: 288002 - DNA, 25 bp, Probe Sequence
tgcctccctctctttttaaaggctg

SEQ ID NO: 288003 - DNA, 25 bp, Probe Sequence
tccaccgctctgtttaagaaaggta

SEQ ID NO: 288004 - DNA, 25 bp, Probe Sequence
tgccacagcctcgtctggaaaaagg

SEQ ID NO: 288005 - DNA, 25 bp, Probe Sequence
tgccacagcctcgtctggaaaaagg

SEQ ID NO: 288006 - DNA, 25 bp, Probe Sequence
tgcccgcctcccgtgaagaagagga

SEQ ID NO: 288007 - DNA, 25 bp, Probe Sequence
tgccccctctgcatgtgggtagagg

SEQ ID NO: 288008 - DNA, 25 bp, Probe Sequence
tgcccctgttgaggtgggtgggcct

SEQ ID NO: 288009 - DNA, 25 bp, Probe Sequence
tgccggctgtcgagatgaggatggg

SEQ ID NO: 288010 - DNA, 25 bp, Probe Sequence
tgccggctactcggatggcagcaag

SEQ ID NO: 288011 - DNA, 25 bp, Probe Sequence
tgcccctagctcagggagacagatt

SEQ ID NO: 288012 - DNA, 25 bp, Probe Sequence
tgcctccttctcaggtaggagaatc

SEQ ID NO: 288013 - DNA, 25 bp, Probe Sequence
tgcccctcctcaagagcaaaagcaa

SEQ ID NO: 288014 - DNA, 25 bp, Probe Sequence
tgcccctcctcaagagcaaaagcaa

SEQ ID NO: 288015 - DNA, 25 bp, Probe Sequence
tgcccctgagtactgtgaaaaagac

SEQ ID NO: 288016 - DNA, 25 bp, Probe Sequence
tgccccctggtgctgacaagaaagc

SEQ ID NO: 288017 - DNA, 25 bp, Probe Sequence
tgcccctatggggctgaccagtaga

SEQ ID NO: 288018 - DNA, 25 bp, Probe Sequence
tccaatcattgatgggatccctaat

SEQ ID NO: 288019 - DNA, 25 bp, Probe Sequence
tgccaatcagatgcagtgggcccca

SEQ ID NO: 288020 - DNA, 25 bp, Probe Sequence
tgccaatcaacatgctggtgaaggt

SEQ ID NO: 288021 - DNA, 25 bp, Probe Sequence
tgccactgaccaccaggtagacagc

SEQ ID NO: 288022 - DNA, 25 bp, Probe Sequence
tgccagtggccatcaggctgagggc

SEQ ID NO: 288023 - DNA, 25 bp, Probe Sequence
tgcctgcgggactgggaggatctac

SEQ ID NO: 288024 - DNA, 25 bp, Probe Sequence
tgccgcctggactgatggaggccaa

SEQ ID NO: 288025 - DNA, 25 bp, Probe Sequence
tgccccagctacttgggaggctgaa

SEQ ID NO: 288026 - DNA, 25 bp, Probe Sequence
tccacaagtactccggcagggaggg

SEQ ID NO: 288027 - DNA, 25 bp, Probe Sequence
tccagccgtttgcaggggaggcggc

SEQ ID NO: 288028 - DNA, 25 bp, Probe Sequence
tccaccgcttagagatttggggggc

SEQ ID NO: 288029 - DNA, 25 bp, Probe Sequence
tccaccctcttacatttatggggca

SEQ ID NO: 288030 - DNA, 25 bp, Probe Sequence
tccgaaccttcagctttttgggctt

SEQ ID NO: 288031 - DNA, 25 bp, Probe Sequence
tccagagtccaaacccgttttggct

SEQ ID NO: 288032 - DNA, 25 bp, Probe Sequence
tgccagaaacgaacctctttgaaac

SEQ ID NO: 288033 - DNA, 25 bp, Probe Sequence
tgccaaacactagctctgtattaat

SEQ ID NO: 288034 - DNA, 25 bp, Probe Sequence
tgcctgagaaccactgctgcatata

SEQ ID NO: 288035 - DNA, 25 bp, Probe Sequence
tgcctgggcatggccacatgttaca

SEQ ID NO: 288036 - DNA, 25 bp, Probe Sequence
tcgctgggcatgcttcgggaattga

SEQ ID NO: 288037 - DNA, 25 bp, Probe Sequence
tcgctgggcatgcttcgggaattga

SEQ ID NO: 288038 - DNA, 25 bp, Probe Sequence
tgcctgggtgccatcaaggagaaca

SEQ ID NO: 288039 - DNA, 25 bp, Probe Sequence
tgcctgtgtgtggctccaatgggga

SEQ ID NO: 288040 - DNA, 25 bp, Probe Sequence
tgcctctgcgtggtgccatgaagga

SEQ ID NO: 288041 - DNA, 25 bp, Probe Sequence
tgccatctgcgtgacaataaacatt

SEQ ID NO: 288042 - DNA, 25 bp, Probe Sequence
tgccccactgtaaatatacagcatg

SEQ ID NO: 288043 - DNA, 25 bp, Probe Sequence
tgcccccagctgtgttacagcagac

SEQ ID NO: 288044 - DNA, 25 bp, Probe Sequence
tgcctcccctgtctgtaaggagcag

SEQ ID NO: 288045 - DNA, 25 bp, Probe Sequence
tgccccacctcctgtataggaagag

SEQ ID NO: 288046 - DNA, 25 bp, Probe Sequence
tgcccccctccagagagtgaggagg

SEQ ID NO: 288047 - DNA, 25 bp, Probe Sequence
tgcctcccattgcccaagagagagg

SEQ ID NO: 288048 - DNA, 25 bp, Probe Sequence
tgcctcccattgcccaagagagagg

SEQ ID NO: 288049 - DNA, 25 bp, Probe Sequence
tgcctcactcaatacagcagagcaa

SEQ ID NO: 288050 - DNA, 25 bp, Probe Sequence
tgcctctccagccaacatgcaaggc

SEQ ID NO: 288051 - DNA, 25 bp, Probe Sequence
tgcctgcttcggtgactcaggtgga

SEQ ID NO: 288052 - DNA, 25 bp, Probe Sequence
tgccatgaagggcgaccgtgcagga

SEQ ID NO: 288053 - DNA, 25 bp, Probe Sequence
tgcctgaaggcgagtgtgggcatag

SEQ ID NO: 288054 - DNA, 25 bp, Probe Sequence
tgcctacagtggggtgcagtccaag

SEQ ID NO: 288055 - DNA, 25 bp, Probe Sequence
tgcctgtacggtttgcagacatcaa

SEQ ID NO: 288056 - DNA, 25 bp, Probe Sequence
tgcctgtaagaatttgcacatgaat

SEQ ID NO: 288057 - DNA, 25 bp, Probe Sequence
tgcctaccagacgattgactcagca

SEQ ID NO: 288058 - DNA, 25 bp, Probe Sequence
tgcctcagctcatcgcaagagtagc

SEQ ID NO: 288059 - DNA, 25 bp, Probe Sequence
tgccacatctgcactgcagcggatg

SEQ ID NO: 288060 - DNA, 25 bp, Probe Sequence
tgccacactctacatggggggccat

SEQ ID NO: 288061 - DNA, 25 bp, Probe Sequence
tgccacctctgacaggtgtgcctgc

SEQ ID NO: 288062 - DNA, 25 bp, Probe Sequence
tgcccctctgctgcagtatgtatcg

SEQ ID NO: 288063 - DNA, 25 bp, Probe Sequence
tgccttctcttggctgtcatttagc

SEQ ID NO: 288064 - DNA, 25 bp, Probe Sequence
tgccttctagagggatgatagatca

SEQ ID NO: 288065 - DNA, 25 bp, Probe Sequence
tgcctgttgagtcagatgctttcat

SEQ ID NO: 288066 - DNA, 25 bp, Probe Sequence
tgccgtcgatgccatggactttatc

SEQ ID NO: 288067 - DNA, 25 bp, Probe Sequence
tgcctgttaccaaacctcatgcatc

SEQ ID NO: 288068 - DNA, 25 bp, Probe Sequence
tgcctggaatgccaccaggtatgcc

SEQ ID NO: 288069 - DNA, 25 bp, Probe Sequence
tgccgagagctgaaccagcgcgggc

SEQ ID NO: 288070 - DNA, 25 bp, Probe Sequence
tgccggatgtgcaggcctgcacggg

SEQ ID NO: 288071 - DNA, 25 bp, Probe Sequence
tgccccagatctgtccagcaggggg

SEQ ID NO: 288072 - DNA, 25 bp, Probe Sequence
tgccccagtgctggatccactgggt

SEQ ID NO: 288073 - DNA, 25 bp, Probe Sequence
tgccgcaagtgcggcttcgtggtct

SEQ ID NO: 288074 - DNA, 25 bp, Probe Sequence
tgcctgcagaagtgcaacgtgccct

SEQ ID NO: 288075 - DNA, 25 bp, Probe Sequence
tgcctcgaagttcagcagttcatct

SEQ ID NO: 288076 - DNA, 25 bp, Probe Sequence
tgcctccgtggtcagagattgtttc

SEQ ID NO: 288077 - DNA, 25 bp, Probe Sequence
tgcctacggtgtcagtgttggacct

SEQ ID NO: 288078 - DNA, 25 bp, Probe Sequence
tgccacctgggtcactggaggacca

SEQ ID NO: 288079 - DNA, 25 bp, Probe Sequence
tccggtaggcttccgagaggagccc

SEQ ID NO: 288080 - DNA, 25 bp, Probe Sequence
tccaggatatgtgtaaccagcgatg

SEQ ID NO: 288081 - DNA, 25 bp, Probe Sequence
tgccgggatgtgtgtaccacgttca

SEQ ID NO: 288082 - DNA, 25 bp, Probe Sequence
tgccaattattgtttaccgagtata

SEQ ID NO: 288083 - DNA, 25 bp, Probe Sequence
tgccagctgtatattatccctaaaa

SEQ ID NO: 288084 - DNA, 25 bp, Probe Sequence
tccactttttctaccttggaactgt

SEQ ID NO: 288085 - DNA, 25 bp, Probe Sequence
tccactttttctaccttggaactgt

SEQ ID NO: 288086 - DNA, 25 bp, Probe Sequence
tccacattattgacttttggaaacc

SEQ ID NO: 288087 - DNA, 25 bp, Probe Sequence
tccaaattggttgcagggaaagccc

SEQ ID NO: 288088 - DNA, 25 bp, Probe Sequence
tccagcaagggattcgggcgaagac

SEQ ID NO: 288089 - DNA, 25 bp, Probe Sequence
tccaatgggaactctggccaagact

SEQ ID NO: 288090 - DNA, 25 bp, Probe Sequence
tccaggggaattgttgcaatggagt

SEQ ID NO: 288091 - DNA, 25 bp, Probe Sequence
tgccggggcaattattgctggagga

SEQ ID NO: 288092 - DNA, 25 bp, Probe Sequence
tgccgggatcaaagtctgttctggc

SEQ ID NO: 288093 - DNA, 25 bp, Probe Sequence
tgccgggatcaaagtctgttctggc

SEQ ID NO: 288094 - DNA, 25 bp, Probe Sequence
tccaagagtaagttctgctacctcc

SEQ ID NO: 288095 - DNA, 25 bp, Probe Sequence
tccagggagaaggcattgcttcctc

SEQ ID NO: 288096 - DNA, 25 bp, Probe Sequence
tgccggaagacaccgtgttgcttct

SEQ ID NO: 288097 - DNA, 25 bp, Probe Sequence
tgccggaatatcagcaggcggctat

SEQ ID NO: 288098 - DNA, 25 bp, Probe Sequence
tgccggaatatcagcaggcggctat

SEQ ID NO: 288099 - DNA, 25 bp, Probe Sequence
tgccggacagacacacgtggcatct

SEQ ID NO: 288100 - DNA, 25 bp, Probe Sequence
tgccggccacataacatttgcactt

SEQ ID NO: 288101 - DNA, 25 bp, Probe Sequence
tgccagggcagcaaacatccttgtt

SEQ ID NO: 288102 - DNA, 25 bp, Probe Sequence
tgccagtgcagaagcagacccgtgc

SEQ ID NO: 288103 - DNA, 25 bp, Probe Sequence
tgccatgataaccagacctgctgcc

SEQ ID NO: 288104 - DNA, 25 bp, Probe Sequence
tgccatgataaccagacctgctgcc

SEQ ID NO: 288105 - DNA, 25 bp, Probe Sequence
tgccatgataaccagacctgctgcc

SEQ ID NO: 288106 - DNA, 25 bp, Probe Sequence
tgccatgaaggaagctgcctgctcc

SEQ ID NO: 288107 - DNA, 25 bp, Probe Sequence
tccaagtgatgctgctcaccatcag

SEQ ID NO: 288108 - DNA, 25 bp, Probe Sequence
tgccacagtagatgtccacataata

SEQ ID NO: 288109 - DNA, 25 bp, Probe Sequence
tgcctctgggatctctccagatatg

SEQ ID NO: 288110 - DNA, 25 bp, Probe Sequence
tgcctcatgacctgtctcaaatgct

SEQ ID NO: 288111 - DNA, 25 bp, Probe Sequence
tgccacgaccaagtgacagcaatgc

SEQ ID NO: 288112 - DNA, 25 bp, Probe Sequence
tgcctggaaaattgcaccactgtgc

SEQ ID NO: 288113 - DNA, 25 bp, Probe Sequence
tgccaggaaaatacaccaaatgctt

SEQ ID NO: 288114 - DNA, 25 bp, Probe Sequence
tgccaggaacagtaccctcaactca

SEQ ID NO: 288115 - DNA, 25 bp, Probe Sequence
tccaagaacgtctcccaatatctga

SEQ ID NO: 288116 - DNA, 25 bp, Probe Sequence
tccaagtggtttttccaaatcgcac

SEQ ID NO: 288117 - DNA, 25 bp, Probe Sequence
tccaagcacagaataattccacaac

SEQ ID NO: 288118 - DNA, 25 bp, Probe Sequence
tcgaaccaccattatttcacccgaa

SEQ ID NO: 288119 - DNA, 25 bp, Probe Sequence
tctgaaggcctccatttgtaccgaa

SEQ ID NO: 288120 - DNA, 25 bp, Probe Sequence
tccaagtcccaatttgtacttgtca

SEQ ID NO: 288121 - DNA, 25 bp, Probe Sequence
tgccaagacccagaggttccgtagt

SEQ ID NO: 288122 - DNA, 25 bp, Probe Sequence
tgccaagcaccgggtggtttccgga

SEQ ID NO: 288123 - DNA, 25 bp, Probe Sequence
tgcctacagcacggggcgtgtgtcc

SEQ ID NO: 288124 - DNA, 25 bp, Probe Sequence
tgccccacaacgtgcaggagatcct

SEQ ID NO: 288125 - DNA, 25 bp, Probe Sequence
tgccatcgcaagagagggggacctg

SEQ ID NO: 288126 - DNA, 25 bp, Probe Sequence
tgccactgaatggctagagggatac

SEQ ID NO: 288127 - DNA, 25 bp, Probe Sequence
tgccgctgagtgtgcaggatgtgct

SEQ ID NO: 288128 - DNA, 25 bp, Probe Sequence
tgccacgagagctgcatggaatgca

SEQ ID NO: 288129 - DNA, 25 bp, Probe Sequence
tgccatcaaccaagctgctgactgc

SEQ ID NO: 288130 - DNA, 25 bp, Probe Sequence
tgcctcattaataggttctgcaaag

SEQ ID NO: 288131 - DNA, 25 bp, Probe Sequence
tgccttttgatgccgtactgtaagc

SEQ ID NO: 288132 - DNA, 25 bp, Probe Sequence
tgcctttgtgatcctgagtccagaa

SEQ ID NO: 288133 - DNA, 25 bp, Probe Sequence
tgcctattttcctgtgcacagtcac

SEQ ID NO: 288134 - DNA, 25 bp, Probe Sequence
tgcctttaacccacactttcaggga

SEQ ID NO: 288135 - DNA, 25 bp, Probe Sequence
tgcctttgtacagctcatactttcc

SEQ ID NO: 288136 - DNA, 25 bp, Probe Sequence
tgccactctggacctaatagctgtt

SEQ ID NO: 288137 - DNA, 25 bp, Probe Sequence
tccagccggggctgtaatgtctcca

SEQ ID NO: 288138 - DNA, 25 bp, Probe Sequence
tccacctggaggtgcattggtccct

SEQ ID NO: 288139 - DNA, 25 bp, Probe Sequence
tccacagcgtgactatgtgtttgtc

SEQ ID NO: 288140 - DNA, 25 bp, Probe Sequence
tccacagtcagaataggtttttcac

SEQ ID NO: 288141 - DNA, 25 bp, Probe Sequence
tcccgtggaggaactttttaagctg

SEQ ID NO: 288142 - DNA, 25 bp, Probe Sequence
ttcgcgttgaccaagttccttaaag

SEQ ID NO: 288143 - DNA, 25 bp, Probe Sequence
tctcctttagccatggtcctttagg

SEQ ID NO: 288144 - DNA, 25 bp, Probe Sequence
tccacaggttccaggaccatttgag

SEQ ID NO: 288145 - DNA, 25 bp, Probe Sequence
tgccaacctcttacgtgcgcctttc

SEQ ID NO: 288146 - DNA, 25 bp, Probe Sequence
tgccattgcactgcaacctgggcga

SEQ ID NO: 288147 - DNA, 25 bp, Probe Sequence
tgccttcatcctaactgctggggaa

SEQ ID NO: 288148 - DNA, 25 bp, Probe Sequence
tgccttcgagatgcatgcctgggga

SEQ ID NO: 288149 - DNA, 25 bp, Probe Sequence
tgcctgggatatgagccggtggccg

SEQ ID NO: 288150 - DNA, 25 bp, Probe Sequence
tccaggggtctacacgtctgacaga

SEQ ID NO: 288151 - DNA, 25 bp, Probe Sequence
tccaggtattaacactttccagttt

SEQ ID NO: 288152 - DNA, 25 bp, Probe Sequence
tccaagttttatctctgtcctagtt

SEQ ID NO: 288153 - DNA, 25 bp, Probe Sequence
tccaaatgtttacgggagcctcctg

SEQ ID NO: 288154 - DNA, 25 bp, Probe Sequence
tccaaattttcatggaggctgattt

SEQ ID NO: 288155 - DNA, 25 bp, Probe Sequence
tgccaactattttgaggatgttgag

SEQ ID NO: 288156 - DNA, 25 bp, Probe Sequence
tgccaactattttgaggatgttgag

SEQ ID NO: 288157 - DNA, 25 bp, Probe Sequence
tgccaactttgttaagtggctcaga

SEQ ID NO: 288158 - DNA, 25 bp, Probe Sequence
tccagacttgattaaatgtccttga

SEQ ID NO: 288159 - DNA, 25 bp, Probe Sequence
tccaggcattgtgaaccccctggac

SEQ ID NO: 288160 - DNA, 25 bp, Probe Sequence
tccaggcattgtgaaccccctggac

SEQ ID NO: 288161 - DNA, 25 bp, Probe Sequence
tccaggcattaattccacccaggga

SEQ ID NO: 288162 - DNA, 25 bp, Probe Sequence
tgcctgagcaccaagtaacccaagc

SEQ ID NO: 288163 - DNA, 25 bp, Probe Sequence
tgcctgacccaagaaatcccaaaca

SEQ ID NO: 288164 - DNA, 25 bp, Probe Sequence
tcctacccccagaacatatcctgaa

SEQ ID NO: 288165 - DNA, 25 bp, Probe Sequence
tccaacccccttaatatggcttagg

SEQ ID NO: 288166 - DNA, 25 bp, Probe Sequence
tccaacctccttcaaattcagtcac

SEQ ID NO: 288167 - DNA, 25 bp, Probe Sequence
tccataccccttcaaacatgttgct

SEQ ID NO: 288168 - DNA, 25 bp, Probe Sequence
tccataccccttcaaacatgttgct

SEQ ID NO: 288169 - DNA, 25 bp, Probe Sequence
tccataccccttcaaacatgttgct

SEQ ID NO: 288170 - DNA, 25 bp, Probe Sequence
tccataaagtttagaaatcgttcaa

SEQ ID NO: 288171 - DNA, 25 bp, Probe Sequence
tcctggactttcaaaaaccttgaat

SEQ ID NO: 288172 - DNA, 25 bp, Probe Sequence
tcctgaatcttggctaaactcttta

SEQ ID NO: 288173 - DNA, 25 bp, Probe Sequence
tgcctctcacctgtaagatattatt

SEQ ID NO: 288174 - DNA, 25 bp, Probe Sequence
tgccttcacctgctatttggatgca

SEQ ID NO: 288175 - DNA, 25 bp, Probe Sequence
tgccttcacctgctatttggatgca

SEQ ID NO: 288176 - DNA, 25 bp, Probe Sequence
tgcctatcctcaagtattggaagag

SEQ ID NO: 288177 - DNA, 25 bp, Probe Sequence
tgcctacctctagcattgtaacgac

SEQ ID NO: 288178 - DNA, 25 bp, Probe Sequence
tgccttgcactgtgccattcaacac

SEQ ID NO: 288179 - DNA, 25 bp, Probe Sequence
tgccttcacagttgcaacaatgaga

SEQ ID NO: 288180 - DNA, 25 bp, Probe Sequence
tgccttacgtctgatcttgatgggg

SEQ ID NO: 288181 - DNA, 25 bp, Probe Sequence
tgccttccgattttcttgcatttgt

SEQ ID NO: 288182 - DNA, 25 bp, Probe Sequence
tgcctatcctgaatggtttgtcatt

SEQ ID NO: 288183 - DNA, 25 bp, Probe Sequence
tgcctcccaaatatgtctgtatgtt

SEQ ID NO: 288184 - DNA, 25 bp, Probe Sequence
tgcctgcggggtgatgttgatattc

SEQ ID NO: 288185 - DNA, 25 bp, Probe Sequence
tgccgggtggtggagaagtttctga

SEQ ID NO: 288186 - DNA, 25 bp, Probe Sequence
tgccgggggttcataggtcactggc

SEQ ID NO: 288187 - DNA, 25 bp, Probe Sequence
tccggggctgggagatgttcctgga

SEQ ID NO: 288188 - DNA, 25 bp, Probe Sequence
tccggggctgggagatgttcctgga

SEQ ID NO: 288189 - DNA, 25 bp, Probe Sequence
tgccggggctggatgagaggccgcc

SEQ ID NO: 288190 - DNA, 25 bp, Probe Sequence
tgcctgggcagggccgaaggatgcc

SEQ ID NO: 288191 - DNA, 25 bp, Probe Sequence
tgccgggcagggctgaaggtgtgct

SEQ ID NO: 288192 - DNA, 25 bp, Probe Sequence
tgccaggacgttctagcaggtcatc

SEQ ID NO: 288193 - DNA, 25 bp, Probe Sequence
tgccaagaataatgtacaagtcaat

SEQ ID NO: 288194 - DNA, 25 bp, Probe Sequence
tccaaacaatacctatcataactac

SEQ ID NO: 288195 - DNA, 25 bp, Probe Sequence
tccaaaaagggcttcaaggcccact

SEQ ID NO: 288196 - DNA, 25 bp, Probe Sequence
tccaaaagtttccacaaggccacct

SEQ ID NO: 288197 - DNA, 25 bp, Probe Sequence
tccaaaatgtcgtaactactccgcc

SEQ ID NO: 288198 - DNA, 25 bp, Probe Sequence
tccaaaatgtcgtaacaactccgcc

SEQ ID NO: 288199 - DNA, 25 bp, Probe Sequence
tccaaaatgtcgtaacaactccgcc

SEQ ID NO: 288200 - DNA, 25 bp, Probe Sequence
tccaaaatgtcgtaacaactccgcc

SEQ ID NO: 288201 - DNA, 25 bp, Probe Sequence
tccaaaatgtcgtaacaactccgcc

SEQ ID NO: 288202 - DNA, 25 bp, Probe Sequence
tccaaaatgtcgtaacaactccgcc

SEQ ID NO: 288203 - DNA, 25 bp, Probe Sequence
tccaaaatgtcgtaacaactccgcc

SEQ ID NO: 288204 - DNA, 25 bp, Probe Sequence
tccaaaatgtcgtaacaactccgcc

SEQ ID NO: 288205 - DNA, 25 bp, Probe Sequence
tccaaaatgtcgtaacaactccgcc

SEQ ID NO: 288206 - DNA, 25 bp, Probe Sequence
tccaaaatgtcgtaacaactccgcc

SEQ ID NO: 288207 - DNA, 25 bp, Probe Sequence
tccaaaatgtcgtaacaactccgcc

SEQ ID NO: 288208 - DNA, 25 bp, Probe Sequence
tccaaaatgtcgtaacaactccgcc

SEQ ID NO: 288209 - DNA, 25 bp, Probe Sequence
tccaaaatgtcgtaacaactccgcc

SEQ ID NO: 288210 - DNA, 25 bp, Probe Sequence
tccaaaatgtcgtaacaactccgcc

SEQ ID NO: 288211 - DNA, 25 bp, Probe Sequence
tccaaaatgtcgtaacaactccgcc

SEQ ID NO: 288212 - DNA, 25 bp, Probe Sequence
tccaaaatgtcgtaacaactccgcc

SEQ ID NO: 288213 - DNA, 25 bp, Probe Sequence
tccaaaatgtcgtaacaactccgcc

SEQ ID NO: 288214 - DNA, 25 bp, Probe Sequence
tccaaaatgtcgtaacaactccgcc

SEQ ID NO: 288215 - DNA, 25 bp, Probe Sequence
tccaaaatgtcgtaacaactccgcc

SEQ ID NO: 288216 - DNA, 25 bp, Probe Sequence
tccaaaatgtcgtaacaactccgcc

SEQ ID NO: 288217 - DNA, 25 bp, Probe Sequence
tccaaaatgtcgtaacaactccgcc

SEQ ID NO: 288218 - DNA, 25 bp, Probe Sequence
tccaaaatgtcgtaacaactccgcc

SEQ ID NO: 288219 - DNA, 25 bp, Probe Sequence
tccaaaatgtcgtaacaactccgcc

SEQ ID NO: 288220 - DNA, 25 bp, Probe Sequence
tccaaaatgtcgtaacaactccgcc

SEQ ID NO: 288221 - DNA, 25 bp, Probe Sequence
tccaaaatgtcgtaacaactccgcc

SEQ ID NO: 288222 - DNA, 25 bp, Probe Sequence
tccaaaatgtcgtaacaactccgcc

SEQ ID NO: 288223 - DNA, 25 bp, Probe Sequence
tccaaaatgtcgtaacaactccgcc

SEQ ID NO: 288224 - DNA, 25 bp, Probe Sequence
tccaaaatgtcgtaacaactccgcc

SEQ ID NO: 288225 - DNA, 25 bp, Probe Sequence
tccaaaatgtcgtaacaactccgcc

SEQ ID NO: 288226 - DNA, 25 bp, Probe Sequence
tccaaaatgtcgtaacaactccgcc

SEQ ID NO: 288227 - DNA, 25 bp, Probe Sequence
tccaaaatgtcgtaacaactccgcc

SEQ ID NO: 288228 - DNA, 25 bp, Probe Sequence
tccaaaatgtcgtaacaactccgcc

SEQ ID NO: 288229 - DNA, 25 bp, Probe Sequence
tccaaaatgtcgtaacaactccgcc

SEQ ID NO: 288230 - DNA, 25 bp, Probe Sequence
tccaaaatgtcgtaacaactccgcc

SEQ ID NO: 288231 - DNA, 25 bp, Probe Sequence
tccaaaatgtcgtaacaactccgcc

SEQ ID NO: 288232 - DNA, 25 bp, Probe Sequence
tccaaaatgtcgtaacaactccgcc

SEQ ID NO: 288233 - DNA, 25 bp, Probe Sequence
tccaaaatgtcgtaacaactccgcc

SEQ ID NO: 288234 - DNA, 25 bp, Probe Sequence
tccaaaatgtcgtaacaactccgcc

SEQ ID NO: 288235 - DNA, 25 bp, Probe Sequence
tccaaaatgtcgtaacaactccgcc

SEQ ID NO: 288236 - DNA, 25 bp, Probe Sequence
tccaaaatgtcgtaacaactccgcc

SEQ ID NO: 288237 - DNA, 25 bp, Probe Sequence
tccaaaatgtcgtaacaactccgcc

SEQ ID NO: 288238 - DNA, 25 bp, Probe Sequence
tccaaaatgtcgtaacaactccgcc

SEQ ID NO: 288239 - DNA, 25 bp, Probe Sequence
tccaaaatgtcgtaacaactccgcc

SEQ ID NO: 288240 - DNA, 25 bp, Probe Sequence
tccaaaatgtcgtaacaactccgcc

SEQ ID NO: 288241 - DNA, 25 bp, Probe Sequence
tccaaaatgtcgtaacaactccgcc

SEQ ID NO: 288242 - DNA, 25 bp, Probe Sequence
tccaaaatgtcgtaacaactccgcc

SEQ ID NO: 288243 - DNA, 25 bp, Probe Sequence
tccaaaatgtcgtaacaactccgcc

SEQ ID NO: 288244 - DNA, 25 bp, Probe Sequence
tccaaaatgtcgtaacaactccgcc

SEQ ID NO: 288245 - DNA, 25 bp, Probe Sequence
tccaaaatgtcgtaacaactccgcc

SEQ ID NO: 288246 - DNA, 25 bp, Probe Sequence
tccaaaatgtcgtaacaactccgcc

SEQ ID NO: 288247 - DNA, 25 bp, Probe Sequence
tccaaaatgtcgtaacaactccgcc

SEQ ID NO: 288248 - DNA, 25 bp, Probe Sequence
tccaaaatgtcgtaacaactccgcc

SEQ ID NO: 288249 - DNA, 25 bp, Probe Sequence
tccaaaatgtcgtaacaactccgcc

SEQ ID NO: 288250 - DNA, 25 bp, Probe Sequence
tccaaattgtcgtaacaacttccgg

SEQ ID NO: 288251 - DNA, 25 bp, Probe Sequence
tccaatatgtgcagaagaaccgggg

SEQ ID NO: 288252 - DNA, 25 bp, Probe Sequence
tctaacagataggaatgacctatgg

SEQ ID NO: 288253 - DNA, 25 bp, Probe Sequence
tgccaacctatgaaatggccgtgaa

SEQ ID NO: 288254 - DNA, 25 bp, Probe Sequence
taagaactgcattcaaggcctggct

SEQ ID NO: 288255 - DNA, 25 bp, Probe Sequence
tccaataccaacaggctctagccaa

SEQ ID NO: 288256 - DNA, 25 bp, Probe Sequence
tccaaagccaataaagtgatacacc

SEQ ID NO: 288257 - DNA, 25 bp, Probe Sequence
tccaccagcccttaaagtgtcggcc

SEQ ID NO: 288258 - DNA, 25 bp, Probe Sequence
tgcctcaccccttaccaatgagggc

SEQ ID NO: 288259 - DNA, 25 bp, Probe Sequence
tgcctgcatcctgtgtacaacatga

SEQ ID NO: 288260 - DNA, 25 bp, Probe Sequence
tgcctcagcctctctgagaagctgg

SEQ ID NO: 288261 - DNA, 25 bp, Probe Sequence
tgcctcagcctcacgagtagctggg

SEQ ID NO: 288262 - DNA, 25 bp, Probe Sequence
tgcctcagccttccaagtagctggg

SEQ ID NO: 288263 - DNA, 25 bp, Probe Sequence
tgcctcagtctcccaagtagctggg

SEQ ID NO: 288264 - DNA, 25 bp, Probe Sequence
tccaagtccggctagtacgcgaatt

SEQ ID NO: 288265 - DNA, 25 bp, Probe Sequence
tccaagatgcctggcaaaaccacct

SEQ ID NO: 288266 - DNA, 25 bp, Probe Sequence
tccaaatgtcgtaacgactccgccc

SEQ ID NO: 288267 - DNA, 25 bp, Probe Sequence
tccaaatgtcgtaacaactccgccc

SEQ ID NO: 288268 - DNA, 25 bp, Probe Sequence
tccaaatgtcgtaacaactccgccc

SEQ ID NO: 288269 - DNA, 25 bp, Probe Sequence
tccaaatgtcgtaacaactccgccc

SEQ ID NO: 288270 - DNA, 25 bp, Probe Sequence
tccaaatgtcgtaacaactccgccc

SEQ ID NO: 288271 - DNA, 25 bp, Probe Sequence
tccaaatgtcgtaacaactccgccc

SEQ ID NO: 288272 - DNA, 25 bp, Probe Sequence
tccaaatgtcgtaacaactccgccc

SEQ ID NO: 288273 - DNA, 25 bp, Probe Sequence
tccaaatgtcgtaacaactccgccc

SEQ ID NO: 288274 - DNA, 25 bp, Probe Sequence
tccaaatgtcgtaacaactccgccc

SEQ ID NO: 288275 - DNA, 25 bp, Probe Sequence
tccaaatgtcgtaacaactccgccc

SEQ ID NO: 288276 - DNA, 25 bp, Probe Sequence
tccaatagttagatctaccctgcct

SEQ ID NO: 288277 - DNA, 25 bp, Probe Sequence
tcgacatttataactcagaccccct

SEQ ID NO: 288278 - DNA, 25 bp, Probe Sequence
tccacatttagatccaaccagcctt

SEQ ID NO: 288279 - DNA, 25 bp, Probe Sequence
tccaccctgaatttcacatccaatt

SEQ ID NO: 288280 - DNA, 25 bp, Probe Sequence
tccacccgagacaccatagtcattg

SEQ ID NO: 288281 - DNA, 25 bp, Probe Sequence
tgccaacaagaacacctgtcctgga

SEQ ID NO: 288282 - DNA, 25 bp, Probe Sequence
tccaacagaaacagccgctgcccga

SEQ ID NO: 288283 - DNA, 25 bp, Probe Sequence
tccaagaggaggatccagctgccta

SEQ ID NO: 288284 - DNA, 25 bp, Probe Sequence
tccaaggaaggcagcaggcgcgcaa

SEQ ID NO: 288285 - DNA, 25 bp, Probe Sequence
tgccaagtaagagtggtggcctatt

SEQ ID NO: 288286 - DNA, 25 bp, Probe Sequence
tgccagagttgacccagtgtgcgga

SEQ ID NO: 288287 - DNA, 25 bp, Probe Sequence
tccaaattcagggcgcgatctggca

SEQ ID NO: 288288 - DNA, 25 bp, Probe Sequence
tccaacttaggaccaacctgagaaa

SEQ ID NO: 288289 - DNA, 25 bp, Probe Sequence
tccaatgcttctggagacttcctgc

SEQ ID NO: 288290 - DNA, 25 bp, Probe Sequence
tccgagtccgcgaacttctcggggt

SEQ ID NO: 288291 - DNA, 25 bp, Probe Sequence
tccaattctaggaatctgtcatcag

SEQ ID NO: 288292 - DNA, 25 bp, Probe Sequence
tcgatcttgcatggagcaatctcgc

SEQ ID NO: 288293 - DNA, 25 bp, Probe Sequence
tgccagctgtctggcatgcacctgc

SEQ ID NO: 288294 - DNA, 25 bp, Probe Sequence
tgccatgtgctggtaacgcatgcct

SEQ ID NO: 288295 - DNA, 25 bp, Probe Sequence
tccaggtggtagagctgcccagtgg

SEQ ID NO: 288296 - DNA, 25 bp, Probe Sequence
taaaattgtaagctcctcactggta

SEQ ID NO: 288297 - DNA, 25 bp, Probe Sequence
tccaactttaaaccctcactgctgg

SEQ ID NO: 288298 - DNA, 25 bp, Probe Sequence
tgccaaatcttacacgtctactcta

SEQ ID NO: 288299 - DNA, 25 bp, Probe Sequence
tccaaatttttatgcttgccttaaa

SEQ ID NO: 288300 - DNA, 25 bp, Probe Sequence
tccaaatgtggttacctcagctata

SEQ ID NO: 288301 - DNA, 25 bp, Probe Sequence
tccagctatggagacacactacttg

SEQ ID NO: 288302 - DNA, 25 bp, Probe Sequence
tccagtggagcagaacctctcctgc

SEQ ID NO: 288303 - DNA, 25 bp, Probe Sequence
tccactgagctataacttacttctg

SEQ ID NO: 288304 - DNA, 25 bp, Probe Sequence
tccactagtcatttcacttctaact

SEQ ID NO: 288305 - DNA, 25 bp, Probe Sequence
tgccatgtaacatctactcctgaaa

SEQ ID NO: 288306 - DNA, 25 bp, Probe Sequence
tgccttcaagcatctgtttaacaaa

SEQ ID NO: 288307 - DNA, 25 bp, Probe Sequence
tccttaaagactgctatataaatca

SEQ ID NO: 288308 - DNA, 25 bp, Probe Sequence
tgccattaactacaatgaaaagatc

SEQ ID NO: 288309 - DNA, 25 bp, Probe Sequence
tccattgacttagaggcaacaggat

SEQ ID NO: 288310 - DNA, 25 bp, Probe Sequence
tccaagccttaggggatgccgctga

SEQ ID NO: 288311 - DNA, 25 bp, Probe Sequence
tccaagccttaggggatgccgctga

SEQ ID NO: 288312 - DNA, 25 bp, Probe Sequence
tccaaggctaagcacactctccaga

SEQ ID NO: 288313 - DNA, 25 bp, Probe Sequence
tccaaagtatggaacactccaatca

SEQ ID NO: 288314 - DNA, 25 bp, Probe Sequence
tccaactttggcatccctagaaaac

SEQ ID NO: 288315 - DNA, 25 bp, Probe Sequence
tgcctagttcttcagccctagatgg

SEQ ID NO: 288316 - DNA, 25 bp, Probe Sequence
tgccatatgatactggacccctcag

SEQ ID NO: 288317 - DNA, 25 bp, Probe Sequence
tgccatattccagatgagccctagc

SEQ ID NO: 288318 - DNA, 25 bp, Probe Sequence
tgccttgtagagatgcagcctgccc

SEQ ID NO: 288319 - DNA, 25 bp, Probe Sequence
tgccattttcaggggtcgcatgccc

SEQ ID NO: 288320 - DNA, 25 bp, Probe Sequence
tgccttgactaggacgattctcacc

SEQ ID NO: 288321 - DNA, 25 bp, Probe Sequence
tgcctttctagtcctattctattgc

SEQ ID NO: 288322 - DNA, 25 bp, Probe Sequence
tgccttttattcatcagtcttctga

SEQ ID NO: 288323 - DNA, 25 bp, Probe Sequence
tgccattttatactttctctctgtg

SEQ ID NO: 288324 - DNA, 25 bp, Probe Sequence
tgccaataacattcttcgatctctg

SEQ ID NO: 288325 - DNA, 25 bp, Probe Sequence
tgcctatataattttccattccccg

SEQ ID NO: 288326 - DNA, 25 bp, Probe Sequence
tccttataattactccagactctcc

SEQ ID NO: 288327 - DNA, 25 bp, Probe Sequence
tgccttgtacttttctcatacacca

SEQ ID NO: 288328 - DNA, 25 bp, Probe Sequence
tgccttgtgatgatttctcttcatc

SEQ ID NO: 288329 - DNA, 25 bp, Probe Sequence
tgccttgtgattatcttctccacat

SEQ ID NO: 288330 - DNA, 25 bp, Probe Sequence
tgccattctttaacctgttactcgg

SEQ ID NO: 288331 - DNA, 25 bp, Probe Sequence
tccatttattcccttgttagcaagt

SEQ ID NO: 288332 - DNA, 25 bp, Probe Sequence
tccattatatactgcttcttgaact

SEQ ID NO: 288333 - DNA, 25 bp, Probe Sequence
tccagcttcaactcttcttagttac

SEQ ID NO: 288334 - DNA, 25 bp, Probe Sequence
tccagcgtgacctcattttcagaat

SEQ ID NO: 288335 - DNA, 25 bp, Probe Sequence
tccaggatattctcagttgcaaaag

SEQ ID NO: 288336 - DNA, 25 bp, Probe Sequence
tccaagatacttacgtgccacaatt

SEQ ID NO: 288337 - DNA, 25 bp, Probe Sequence
tccaaattctttactgtccaatttt

SEQ ID NO: 288338 - DNA, 25 bp, Probe Sequence
tgccttttagtttttccaatgattt

SEQ ID NO: 288339 - DNA, 25 bp, Probe Sequence
tccttgtaagtatcttcaaagttga

SEQ ID NO: 288340 - DNA, 25 bp, Probe Sequence
tcccgtagggaacttctaccttcag

SEQ ID NO: 288341 - DNA, 25 bp, Probe Sequence
tccctgctaggggttttaggtctct

SEQ ID NO: 288342 - DNA, 25 bp, Probe Sequence
tcctgtccgtgtttgtttagtactt

SEQ ID NO: 288343 - DNA, 25 bp, Probe Sequence
tccgttatgggagggagtagaactt

SEQ ID NO: 288344 - DNA, 25 bp, Probe Sequence
tgccagcattgatgaacggatgaag

SEQ ID NO: 288345 - DNA, 25 bp, Probe Sequence
tgccagcgtgcaggaagggggcaag

SEQ ID NO: 288346 - DNA, 25 bp, Probe Sequence
tgccacagctacagagagggaggag

SEQ ID NO: 288347 - DNA, 25 bp, Probe Sequence
tgccaaccatgcagaggcccagaga

SEQ ID NO: 288348 - DNA, 25 bp, Probe Sequence
tccaacgagagccagagcctcgatg

SEQ ID NO: 288349 - DNA, 25 bp, Probe Sequence
tccaagaggcatccataccctgggt

SEQ ID NO: 288350 - DNA, 25 bp, Probe Sequence
tccaatggtgactacatccactggc

SEQ ID NO: 288351 - DNA, 25 bp, Probe Sequence
tgccaagtggacgagacagaggagc

SEQ ID NO: 288352 - DNA, 25 bp, Probe Sequence
tgccatttcataaagtctgaggatt

SEQ ID NO: 288353 - DNA, 25 bp, Probe Sequence
tgccttctcatgtggcttcgtgtga

SEQ ID NO: 288354 - DNA, 25 bp, Probe Sequence
tgcctagtgctattctgcttgttta

SEQ ID NO: 288355 - DNA, 25 bp, Probe Sequence
tgcctagtgctattctgcttgttta

SEQ ID NO: 288356 - DNA, 25 bp, Probe Sequence
tgccataggaacacttctgtctaca

SEQ ID NO: 288357 - DNA, 25 bp, Probe Sequence
tgccacagaaacatggactgagctg

SEQ ID NO: 288358 - DNA, 25 bp, Probe Sequence
tccacgagaaagggcatcttctgtc

SEQ ID NO: 288359 - DNA, 25 bp, Probe Sequence
tccacagtaggacaccatccttctg

SEQ ID NO: 288360 - DNA, 25 bp, Probe Sequence
tccaccttgtaggcccattttgttg

SEQ ID NO: 288361 - DNA, 25 bp, Probe Sequence
tcccccagtagcgcttttttctgga

SEQ ID NO: 288362 - DNA, 25 bp, Probe Sequence
tcccccaacacggatgagtttttag

SEQ ID NO: 288363 - DNA, 25 bp, Probe Sequence
tccaggaaacccgttgtcttgtaat

SEQ ID NO: 288364 - DNA, 25 bp, Probe Sequence
tccaagtagtccaccttcatttaac

SEQ ID NO: 288365 - DNA, 25 bp, Probe Sequence
tccaatgatagttttcccgtttaca

SEQ ID NO: 288366 - DNA, 25 bp, Probe Sequence
tccaagctgaaacttccacgttaaa

SEQ ID NO: 288367 - DNA, 25 bp, Probe Sequence
tccaagataatgtctccaacgtctc

SEQ ID NO: 288368 - DNA, 25 bp, Probe Sequence
tccacgattctgtgcatcaacagtc

SEQ ID NO: 288369 - DNA, 25 bp, Probe Sequence
tgccttgacttgtgcagacacctgc

SEQ ID NO: 288370 - DNA, 25 bp, Probe Sequence
tgccagtgagggagcacaccctgct

SEQ ID NO: 288371 - DNA, 25 bp, Probe Sequence
tgccagtatgggcgcatcagctcca

SEQ ID NO: 288372 - DNA, 25 bp, Probe Sequence
tgccagcttggaagagctcctgtcc

SEQ ID NO: 288373 - DNA, 25 bp, Probe Sequence
tgccacaaggtcaactactgctcca

SEQ ID NO: 288374 - DNA, 25 bp, Probe Sequence
tgccatcgctgtggtagaactgccc

SEQ ID NO: 288375 - DNA, 25 bp, Probe Sequence
tgccaagtgtgcccaaggctgcatc

SEQ ID NO: 288376 - DNA, 25 bp, Probe Sequence
tgccaagtgtgcccagggctgcatc

SEQ ID NO: 288377 - DNA, 25 bp, Probe Sequence
tgccacagcttggctcaggggcagt

SEQ ID NO: 288378 - DNA, 25 bp, Probe Sequence
tgccacgcatcttcatgaagggcgc

SEQ ID NO: 288379 - DNA, 25 bp, Probe Sequence
tgccagcgactgtctcagactgggc

SEQ ID NO: 288380 - DNA, 25 bp, Probe Sequence
tccacgtagactcggctgcggagta

SEQ ID NO: 288381 - DNA, 25 bp, Probe Sequence
tccaagaggtctccgtcatggcagt

SEQ ID NO: 288382 - DNA, 25 bp, Probe Sequence
tccacaaggctcagataaggcagct

SEQ ID NO: 288383 - DNA, 25 bp, Probe Sequence
tgcctaagcctgcttgtagccagtg

SEQ ID NO: 288384 - DNA, 25 bp, Probe Sequence
tgccaaacactacctgaagtcctgc

SEQ ID NO: 288385 - DNA, 25 bp, Probe Sequence
tgccaaacctgacctgaggggcagc

SEQ ID NO: 288386 - DNA, 25 bp, Probe Sequence
tccacgccctgggcaggtaggcggg

SEQ ID NO: 288387 - DNA, 25 bp, Probe Sequence
tccacacacgttcctgttggggagg

SEQ ID NO: 288388 - DNA, 25 bp, Probe Sequence
tccacgagttcttttctggtgggag

SEQ ID NO: 288389 - DNA, 25 bp, Probe Sequence
tccaaaatgttatttaggccggaca

SEQ ID NO: 288390 - DNA, 25 bp, Probe Sequence
tgccataaatgtagatattttccca

SEQ ID NO: 288391 - DNA, 25 bp, Probe Sequence
tgccacaaaggtgtgttgagcccat

SEQ ID NO: 288392 - DNA, 25 bp, Probe Sequence
tccaaacaagaatgtctgagggcat

SEQ ID NO: 288393 - DNA, 25 bp, Probe Sequence
tgccaaacaagcagcctgccgggca

SEQ ID NO: 288394 - DNA, 25 bp, Probe Sequence
tgccttcaacacagagccacgtgtc

SEQ ID NO: 288395 - DNA, 25 bp, Probe Sequence
tgccttcgagtgcgaggcgaggtgg

SEQ ID NO: 288396 - DNA, 25 bp, Probe Sequence
tgccaactactgcgagggtgagtgc

SEQ ID NO: 288397 - DNA, 25 bp, Probe Sequence
tgccaaagcgtgcaaggggcagtgg

SEQ ID NO: 288398 - DNA, 25 bp, Probe Sequence
tgccaagaggtgcaatgtggtgtgt

SEQ ID NO: 288399 - DNA, 25 bp, Probe Sequence
tccaatgaggtgcacagagtctgtc

SEQ ID NO: 288400 - DNA, 25 bp, Probe Sequence
tgccactgaggaaacaggtcatgaa

SEQ ID NO: 288401 - DNA, 25 bp, Probe Sequence
tgccatcgaaaccaccaggtgtacc

SEQ ID NO: 288402 - DNA, 25 bp, Probe Sequence
tgccttcctaggacacaggggactc

SEQ ID NO: 288403 - DNA, 25 bp, Probe Sequence
tgccattccttcgcacagatgaaac

SEQ ID NO: 288404 - DNA, 25 bp, Probe Sequence
tgccatgttcgacttcagcgagaag

SEQ ID NO: 288405 - DNA, 25 bp, Probe Sequence
tgccatgctcttcacggtggacaat

SEQ ID NO: 288406 - DNA, 25 bp, Probe Sequence
tgccagtcttgcaatcaggtcagaa

SEQ ID NO: 288407 - DNA, 25 bp, Probe Sequence
tgccagtgctcaaaaggctacagca

SEQ ID NO: 288408 - DNA, 25 bp, Probe Sequence
tccagctgatcaagaatggcaagaa

SEQ ID NO: 288409 - DNA, 25 bp, Probe Sequence
tgccactggccctatcgaagccaga

SEQ ID NO: 288410 - DNA, 25 bp, Probe Sequence
tgccacggctctctggtaatgcaga

SEQ ID NO: 288411 - DNA, 25 bp, Probe Sequence
tgccttccttgcggtgaaagcgaat

SEQ ID NO: 288412 - DNA, 25 bp, Probe Sequence
tgccttcctaaattatgactgctga

SEQ ID NO: 288413 - DNA, 25 bp, Probe Sequence
tccagtcctaagtattacctgaaat

SEQ ID NO: 288414 - DNA, 25 bp, Probe Sequence
tccacttctaattgatatacacaaa

SEQ ID NO: 288415 - DNA, 25 bp, Probe Sequence
tccagccaccaataattccaaagtg

SEQ ID NO: 288416 - DNA, 25 bp, Probe Sequence
tgccaccaccatcagaattcataat

SEQ ID NO: 288417 - DNA, 25 bp, Probe Sequence
tccccacgaaggccttcattactta

SEQ ID NO: 288418 - DNA, 25 bp, Probe Sequence
tccaccaataaacgtttcgatcttt

SEQ ID NO: 288419 - DNA, 25 bp, Probe Sequence
tccacagaatgatcaagttgacgac

SEQ ID NO: 288420 - DNA, 25 bp, Probe Sequence
tccacaaatgcttagagttaccact

SEQ ID NO: 288421 - DNA, 25 bp, Probe Sequence
tccaaattactattgtataccagct

SEQ ID NO: 288422 - DNA, 25 bp, Probe Sequence
tccaataaaagatttcagatgctca

SEQ ID NO: 288423 - DNA, 25 bp, Probe Sequence
tctgaacaaaagtaagggcaaggca

SEQ ID NO: 288424 - DNA, 25 bp, Probe Sequence
tcgtacatactacgtaatggccggc

SEQ ID NO: 288425 - DNA, 25 bp, Probe Sequence
tcgtacatacttacgtaatgcccgc

SEQ ID NO: 288426 - DNA, 25 bp, Probe Sequence
tctggaattcgtgctggtctcccag

SEQ ID NO: 288427 - DNA, 25 bp, Probe Sequence
tcctggaagcctgtgaattcctcag

SEQ ID NO: 288428 - DNA, 25 bp, Probe Sequence
tccaggaagttcaggtcgccatcat

SEQ ID NO: 288429 - DNA, 25 bp, Probe Sequence
tccaggccatttatggcctccatcc

SEQ ID NO: 288430 - DNA, 25 bp, Probe Sequence
tgccaggccattgttgacaccggca

SEQ ID NO: 288431 - DNA, 25 bp, Probe Sequence
tgccagcccagttcttaacaggcca

SEQ ID NO: 288432 - DNA, 25 bp, Probe Sequence
tgccatctccctggcttatgagcag

SEQ ID NO: 288433 - DNA, 25 bp, Probe Sequence
tgccatcatgccgatgttcatcgta

SEQ ID NO: 288434 - DNA, 25 bp, Probe Sequence
tgccattgcctggtcacattgaaat

SEQ ID NO: 288435 - DNA, 25 bp, Probe Sequence
tgccttctctgcccaaatgataagg

SEQ ID NO: 288436 - DNA, 25 bp, Probe Sequence
tgccatctttgccttgtcacaaagg

SEQ ID NO: 288437 - DNA, 25 bp, Probe Sequence
tgccatcctgcggtcttgacaaaga

SEQ ID NO: 288438 - DNA, 25 bp, Probe Sequence
tccagcccaccatttgcaataagac

SEQ ID NO: 288439 - DNA, 25 bp, Probe Sequence
tccaccacccactatatgagaaccg

SEQ ID NO: 288440 - DNA, 25 bp, Probe Sequence
tccaactaccacaaaaagaccacac

SEQ ID NO: 288441 - DNA, 25 bp, Probe Sequence
tcacagaagtccactaaagttcacc

SEQ ID NO: 288442 - DNA, 25 bp, Probe Sequence
tctaaagtctatgtaatggtggtca

SEQ ID NO: 288443 - DNA, 25 bp, Probe Sequence
tctctacgccttgctaatttcggtg

SEQ ID NO: 288444 - DNA, 25 bp, Probe Sequence
tccaacctttttctgtgtctggcta

SEQ ID NO: 288445 - DNA, 25 bp, Probe Sequence
tccacagcttttacactattttgac

SEQ ID NO: 288446 - DNA, 25 bp, Probe Sequence
tgccatcacatccctgatactgtgt

SEQ ID NO: 288447 - DNA, 25 bp, Probe Sequence
tgccatcacatccctgatactgtgt

SEQ ID NO: 288448 - DNA, 25 bp, Probe Sequence
tgccactgcatccttcagacagtta

SEQ ID NO: 288449 - DNA, 25 bp, Probe Sequence
tgccaggatctcagcgcatagacca

SEQ ID NO: 288450 - DNA, 25 bp, Probe Sequence
tgccacagactaatggctatgacct

SEQ ID NO: 288451 - DNA, 25 bp, Probe Sequence
tgccacagtctgaggttgatatcta

SEQ ID NO: 288452 - DNA, 25 bp, Probe Sequence
tgccacagtgagatgagtttagaac

SEQ ID NO: 288453 - DNA, 25 bp, Probe Sequence
tccacagtgcagatcagttgaaaac

SEQ ID NO: 288454 - DNA, 25 bp, Probe Sequence
tccaaaaagtcgtgaacaactccgc

SEQ ID NO: 288455 - DNA, 25 bp, Probe Sequence
tccaaaatggtggtaacaacttccg

SEQ ID NO: 288456 - DNA, 25 bp, Probe Sequence
tccaaaattgtcgtaacaactccgc

SEQ ID NO: 288457 - DNA, 25 bp, Probe Sequence
tgccaaaatattccccttatctttg

SEQ ID NO: 288458 - DNA, 25 bp, Probe Sequence
tgccataaatttcttcatcgacatt

SEQ ID NO: 288459 - DNA, 25 bp, Probe Sequence
tccaagctatttctacactatctgt

SEQ ID NO: 288460 - DNA, 25 bp, Probe Sequence
tccaagccctggataatgctttact

SEQ ID NO: 288461 - DNA, 25 bp, Probe Sequence
tccagaccctggtggatgtgttcac

SEQ ID NO: 288462 - DNA, 25 bp, Probe Sequence
tccagtgccctgatagtcagttcga

SEQ ID NO: 288463 - DNA, 25 bp, Probe Sequence
tccagctgaccgttaaatgagggca

SEQ ID NO: 288464 - DNA, 25 bp, Probe Sequence
tccacaacatccttagggagggaat

SEQ ID NO: 288465 - DNA, 25 bp, Probe Sequence
tccacacatctccctaagtcagagt

SEQ ID NO: 288466 - DNA, 25 bp, Probe Sequence
tccacacatctccctaagtcagagt

SEQ ID NO: 288467 - DNA, 25 bp, Probe Sequence
tccagacagtcctctactgcgattt

SEQ ID NO: 288468 - DNA, 25 bp, Probe Sequence
tccaaagtagcatcttgctagacct

SEQ ID NO: 288469 - DNA, 25 bp, Probe Sequence
tccacgtgtaagctttgagccctag

SEQ ID NO: 288470 - DNA, 25 bp, Probe Sequence
tccagcggcaaagtgtttgagcctt

SEQ ID NO: 288471 - DNA, 25 bp, Probe Sequence
tccagaggaggcgggtatcaccatg

SEQ ID NO: 288472 - DNA, 25 bp, Probe Sequence
ttcgttggctgaacgttaccagcac

SEQ ID NO: 288473 - DNA, 25 bp, Probe Sequence
tccagttggagaccgtcaaccttca

SEQ ID NO: 288474 - DNA, 25 bp, Probe Sequence
tcctggggccgaggtcaaaattgag

SEQ ID NO: 288475 - DNA, 25 bp, Probe Sequence
tccgggggctgaattaaaaatgctt

SEQ ID NO: 288476 - DNA, 25 bp, Probe Sequence
tccgaggtgcctttctccaaaaggt

SEQ ID NO: 288477 - DNA, 25 bp, Probe Sequence
tccgaggtgcctttctccaaaaggt

SEQ ID NO: 288478 - DNA, 25 bp, Probe Sequence
tcccagagggtgtttcctagaaact

SEQ ID NO: 288479 - DNA, 25 bp, Probe Sequence
tccacagcgtggttttcttaaaata

SEQ ID NO: 288480 - DNA, 25 bp, Probe Sequence
tccacccaggcctttctgtaaataa

SEQ ID NO: 288481 - DNA, 25 bp, Probe Sequence
tccacccagcagtcatgatgttaga

SEQ ID NO: 288482 - DNA, 25 bp, Probe Sequence
tccagccccagaatgtggtaactct

SEQ ID NO: 288483 - DNA, 25 bp, Probe Sequence
tccaccgccactgtgtgaaactgta

SEQ ID NO: 288484 - DNA, 25 bp, Probe Sequence
tccaccctcagcggatgataatctc

SEQ ID NO: 288485 - DNA, 25 bp, Probe Sequence
tccacctcagaataatagactccac

SEQ ID NO: 288486 - DNA, 25 bp, Probe Sequence
tccaccgacacttttaactacgcca

SEQ ID NO: 288487 - DNA, 25 bp, Probe Sequence
tccatgcttcccttttaacataacc

SEQ ID NO: 288488 - DNA, 25 bp, Probe Sequence
tccatcccctcatagttaagtagcc

SEQ ID NO: 288489 - DNA, 25 bp, Probe Sequence
tccacccggcaataatgaggttccc

SEQ ID NO: 288490 - DNA, 25 bp, Probe Sequence
tccacaccattaacaagatgagcct

SEQ ID NO: 288491 - DNA, 25 bp, Probe Sequence
tccagcccttcgtcaatggaggtct

SEQ ID NO: 288492 - DNA, 25 bp, Probe Sequence
tccagcatccattcctaataaaaat

SEQ ID NO: 288493 - DNA, 25 bp, Probe Sequence
tccacacagctcttccaataaaggt

SEQ ID NO: 288494 - DNA, 25 bp, Probe Sequence
tcgaccagtttttcgagacagccta

SEQ ID NO: 288495 - DNA, 25 bp, Probe Sequence
tccagccttgtttccaaaactctca

SEQ ID NO: 288496 - DNA, 25 bp, Probe Sequence
tcccctaatgacctaaatacactga

SEQ ID NO: 288497 - DNA, 25 bp, Probe Sequence
tcgattcttggaaaaactacactga

SEQ ID NO: 288498 - DNA, 25 bp, Probe Sequence
tccaacttggcagtaaatctacgta

SEQ ID NO: 288499 - DNA, 25 bp, Probe Sequence
tccaacctggagtataatattcaga

SEQ ID NO: 288500 - DNA, 25 bp, Probe Sequence
tccaaaagggattcaaattcagact

SEQ ID NO: 288501 - DNA, 25 bp, Probe Sequence
tccaacataatggattaatgttcca

SEQ ID NO: 288502 - DNA, 25 bp, Probe Sequence
tccaactacttgtgatctctctcac

SEQ ID NO: 288503 - DNA, 25 bp, Probe Sequence
tcctagcccttttatcaactcctag

SEQ ID NO: 288504 - DNA, 25 bp, Probe Sequence
tccacctcctttaaatactctattt

SEQ ID NO: 288505 - DNA, 25 bp, Probe Sequence
tccacatctgcctggcaaaaccttt

SEQ ID NO: 288506 - DNA, 25 bp, Probe Sequence
tccacatcctataaagaagcccctt

SEQ ID NO: 288507 - DNA, 25 bp, Probe Sequence
tgccacacgctgtacaagaagcaaa

SEQ ID NO: 288508 - DNA, 25 bp, Probe Sequence
tgccaagcgcaagagaaagtataac

SEQ ID NO: 288509 - DNA, 25 bp, Probe Sequence
tgccagcaccaagagattatttaat

SEQ ID NO: 288510 - DNA, 25 bp, Probe Sequence
tgccagcaccaagagattatttaat

SEQ ID NO: 288511 - DNA, 25 bp, Probe Sequence
tgccaggctctgtcaaatcttttac

SEQ ID NO: 288512 - DNA, 25 bp, Probe Sequence
tgccaatgtcgtcttcagtttcaac

SEQ ID NO: 288513 - DNA, 25 bp, Probe Sequence
tgccactgggctgttggttagaagc

SEQ ID NO: 288514 - DNA, 25 bp, Probe Sequence
tgccactgttgttttgggggggctt

SEQ ID NO: 288515 - DNA, 25 bp, Probe Sequence
tgccatccgtgtgttccgggcctgc

SEQ ID NO: 288516 - DNA, 25 bp, Probe Sequence
tccaccagatgacattcccatgttt

SEQ ID NO: 288517 - DNA, 25 bp, Probe Sequence
tccaaagggaatactcacattttgt

SEQ ID NO: 288518 - DNA, 25 bp, Probe Sequence
tccaaaggaggatactgttttgtga

SEQ ID NO: 288519 - DNA, 25 bp, Probe Sequence
tgccaagggccagacatttttgtgt

SEQ ID NO: 288520 - DNA, 25 bp, Probe Sequence
tgccaaccccatgaattgtgttatt

SEQ ID NO: 288521 - DNA, 25 bp, Probe Sequence
tccaaaccaatgagatggccatttt

SEQ ID NO: 288522 - DNA, 25 bp, Probe Sequence
tccaaaccaagtttcctattatctt

SEQ ID NO: 288523 - DNA, 25 bp, Probe Sequence
tccactaccaagcttcttctatgtt

SEQ ID NO: 288524 - DNA, 25 bp, Probe Sequence
tgccagtgactcttagtgtctgttt

SEQ ID NO: 288525 - DNA, 25 bp, Probe Sequence
tgccaatgtctcgtctattatgttg

SEQ ID NO: 288526 - DNA, 25 bp, Probe Sequence
tgccactttcctcactgatattggg

SEQ ID NO: 288527 - DNA, 25 bp, Probe Sequence
tgccactttcctcactgatattggg

SEQ ID NO: 288528 - DNA, 25 bp, Probe Sequence
tgccactttcctcactgatattggg

SEQ ID NO: 288529 - DNA, 25 bp, Probe Sequence
tccactttcctctcaatttgggctg

SEQ ID NO: 288530 - DNA, 25 bp, Probe Sequence
tccacttccagttctagtaaggaag

SEQ ID NO: 288531 - DNA, 25 bp, Probe Sequence
tccactattctctattggctaaaat

SEQ ID NO: 288532 - DNA, 25 bp, Probe Sequence
tccacctgtttgtggtacacacaca

SEQ ID NO: 288533 - DNA, 25 bp, Probe Sequence
tccaatgtgtataggtcggaaacaa

SEQ ID NO: 288534 - DNA, 25 bp, Probe Sequence
tccatactataaactaggaatgaaa

SEQ ID NO: 288535 - DNA, 25 bp, Probe Sequence
tcctgcagcgaaaacgggaagctat

SEQ ID NO: 288536 - DNA, 25 bp, Probe Sequence
tcctctgagaaggacgggcaggtca

SEQ ID NO: 288537 - DNA, 25 bp, Probe Sequence
tcctcttgctaggcatgagggggga

SEQ ID NO: 288538 - DNA, 25 bp, Probe Sequence
tgccatcttgtgaaggagcgttagg

SEQ ID NO: 288539 - DNA, 25 bp, Probe Sequence
tgccagccgtgatgctcaggcttga

SEQ ID NO: 288540 - DNA, 25 bp, Probe Sequence
tgccagctaataagaagtgccaagt

SEQ ID NO: 288541 - DNA, 25 bp, Probe Sequence
tccactcagtgacacggctcaagtc

SEQ ID NO: 288542 - DNA, 25 bp, Probe Sequence
tgccaccaggaatcgtctctggcca

SEQ ID NO: 288543 - DNA, 25 bp, Probe Sequence
tgccaccaggaatcgtctctggcca

SEQ ID NO: 288544 - DNA, 25 bp, Probe Sequence
tccaccaacaactgtacatgctcaa

SEQ ID NO: 288545 - DNA, 25 bp, Probe Sequence
tccactcaacagtcatcaaccacta

SEQ ID NO: 288546 - DNA, 25 bp, Probe Sequence
tccactcaacagtcatcaaccacta

SEQ ID NO: 288547 - DNA, 25 bp, Probe Sequence
tgccactaagtggctcagtcacacc

SEQ ID NO: 288548 - DNA, 25 bp, Probe Sequence
tgccacaaagcttcacagacagccc

SEQ ID NO: 288549 - DNA, 25 bp, Probe Sequence
tccacatgcaacccaacagcagtgc

SEQ ID NO: 288550 - DNA, 25 bp, Probe Sequence
tccacagacccaaccagttacgatg

SEQ ID NO: 288551 - DNA, 25 bp, Probe Sequence
tccagcaccaccacaaattgacaat

SEQ ID NO: 288552 - DNA, 25 bp, Probe Sequence
tccagcccaacacccaagttaaggt

SEQ ID NO: 288553 - DNA, 25 bp, Probe Sequence
tgccatgcccaaggcctaggttatg

SEQ ID NO: 288554 - DNA, 25 bp, Probe Sequence
tgccacccagaacctgagtgcgggc

SEQ ID NO: 288555 - DNA, 25 bp, Probe Sequence
tgccaccctgagccctagaatgggt

SEQ ID NO: 288556 - DNA, 25 bp, Probe Sequence
tgccacccgtgtgcatatcacacag

SEQ ID NO: 288557 - DNA, 25 bp, Probe Sequence
tccacacttgtgaaattcaatcagt

SEQ ID NO: 288558 - DNA, 25 bp, Probe Sequence
tgccaacttctaaccgcaatagtga

SEQ ID NO: 288559 - DNA, 25 bp, Probe Sequence
tgccaattaccagtagacactagtg

SEQ ID NO: 288560 - DNA, 25 bp, Probe Sequence
tccacttgaacagagaattggtaga

SEQ ID NO: 288561 - DNA, 25 bp, Probe Sequence
tccatctcccaccaaaatctttgag

SEQ ID NO: 288562 - DNA, 25 bp, Probe Sequence
tgccaccccactcttaatcagtggt

SEQ ID NO: 288563 - DNA, 25 bp, Probe Sequence
tgccaccccactcttaatcagtggt

SEQ ID NO: 288564 - DNA, 25 bp, Probe Sequence
tgccaccccactcttaatcagtggt

SEQ ID NO: 288565 - DNA, 25 bp, Probe Sequence
tgccaccaggcctttttaaataagt

SEQ ID NO: 288566 - DNA, 25 bp, Probe Sequence
tgccatgtgatgggctttttaaatg

SEQ ID NO: 288567 - DNA, 25 bp, Probe Sequence
tgccatggagcggctctgattggag

SEQ ID NO: 288568 - DNA, 25 bp, Probe Sequence
tgccagtcggtcggtgtgggacaaa

SEQ ID NO: 288569 - DNA, 25 bp, Probe Sequence
tgccagtcggtcggtgtgggacaaa

SEQ ID NO: 288570 - DNA, 25 bp, Probe Sequence
tgccagtgcctgggtggatgggcca

SEQ ID NO: 288571 - DNA, 25 bp, Probe Sequence
tgccagtctcatgggtagatagtgg

SEQ ID NO: 288572 - DNA, 25 bp, Probe Sequence
tgccaggcatcctcatggaagtgac

SEQ ID NO: 288573 - DNA, 25 bp, Probe Sequence
tgccagctctactacatgggggacc

SEQ ID NO: 288574 - DNA, 25 bp, Probe Sequence
tgccagccatactctttggcatcca

SEQ ID NO: 288575 - DNA, 25 bp, Probe Sequence
tgccagtatgacccacttggactca

SEQ ID NO: 288576 - DNA, 25 bp, Probe Sequence
tgccagtatgacccacttggactca

SEQ ID NO: 288577 - DNA, 25 bp, Probe Sequence
tccaatgctgaggtacttgtcccat

SEQ ID NO: 288578 - DNA, 25 bp, Probe Sequence
tgccaagtaggcaaaagctcactca

SEQ ID NO: 288579 - DNA, 25 bp, Probe Sequence
tgccaatgggtggaatgatgccacc

SEQ ID NO: 288580 - DNA, 25 bp, Probe Sequence
tcgaatggttggaattccaggaacc

SEQ ID NO: 288581 - DNA, 25 bp, Probe Sequence
tcagcaaggatcagtttccggaggt

SEQ ID NO: 288582 - DNA, 25 bp, Probe Sequence
tccaggagtaccttgtctcggagag

SEQ ID NO: 288583 - DNA, 25 bp, Probe Sequence
tccatcgatgttcttcttcggatca

SEQ ID NO: 288584 - DNA, 25 bp, Probe Sequence
tccatgtttccagtgtttcggtttt

SEQ ID NO: 288585 - DNA, 25 bp, Probe Sequence
tccagtgtctgggtttcttgagtgt

SEQ ID NO: 288586 - DNA, 25 bp, Probe Sequence
tccagagtcactccgttctaaggtt

SEQ ID NO: 288587 - DNA, 25 bp, Probe Sequence
tccacagtgactacagagtctcaag

SEQ ID NO: 288588 - DNA, 25 bp, Probe Sequence
tccaatgagatcctcaagcacatca

SEQ ID NO: 288589 - DNA, 25 bp, Probe Sequence
tgccagtgagctcgccattcactga

SEQ ID NO: 288590 - DNA, 25 bp, Probe Sequence
tgccagggcatgaagcctcatctaa

SEQ ID NO: 288591 - DNA, 25 bp, Probe Sequence
tccagtggatgcacaccatgcccac

SEQ ID NO: 288592 - DNA, 25 bp, Probe Sequence
tgccagaggagctcgacatctccca

SEQ ID NO: 288593 - DNA, 25 bp, Probe Sequence
tccagctggacttcgatgacttcct

SEQ ID NO: 288594 - DNA, 25 bp, Probe Sequence
tccagggaatgaagaagctctccta

SEQ ID NO: 288595 - DNA, 25 bp, Probe Sequence
tcctgggaaaagagtcaataaacaa

SEQ ID NO: 288596 - DNA, 25 bp, Probe Sequence
tccgaagaaaagagccctctcagca

SEQ ID NO: 288597 - DNA, 25 bp, Probe Sequence
tccagaggctagtgttcctatccca

SEQ ID NO: 288598 - DNA, 25 bp, Probe Sequence
tccaggatgttattcttccttccca

SEQ ID NO: 288599 - DNA, 25 bp, Probe Sequence
tccagtaggctctagcttattttaa

SEQ ID NO: 288600 - DNA, 25 bp, Probe Sequence
tccaaatgatcctagtaattgccta

SEQ ID NO: 288601 - DNA, 25 bp, Probe Sequence
tccaaatgatcctagtaattgccta

SEQ ID NO: 288602 - DNA, 25 bp, Probe Sequence
tccacacattcttcgctatttgact

SEQ ID NO: 288603 - DNA, 25 bp, Probe Sequence
tgccaagcacttccttgaattgaag

SEQ ID NO: 288604 - DNA, 25 bp, Probe Sequence
tgccaaagcttgaggcctctgggtt

SEQ ID NO: 288605 - DNA, 25 bp, Probe Sequence
tccaaggcattgggaccatgggtgc

SEQ ID NO: 288606 - DNA, 25 bp, Probe Sequence
tccaagacatctggtaccacgagga

SEQ ID NO: 288607 - DNA, 25 bp, Probe Sequence
tccacaaactggaactgctctttga

SEQ ID NO: 288608 - DNA, 25 bp, Probe Sequence
tgccaaatacatgaagcttcatgca

SEQ ID NO: 288609 - DNA, 25 bp, Probe Sequence
tccaatttcatgttgatgatataca

SEQ ID NO: 288610 - DNA, 25 bp, Probe Sequence
tgccaagtgctttctgtgagtatag

SEQ ID NO: 288611 - DNA, 25 bp, Probe Sequence
tccaagtgcatttcttaaataagtt

SEQ ID NO: 288612 - DNA, 25 bp, Probe Sequence
tccagagttaataaagacagaagat

SEQ ID NO: 288613 - DNA, 25 bp, Probe Sequence
tccagagaagtattaatgccttaat

SEQ ID NO: 288614 - DNA, 25 bp, Probe Sequence
tccagaacgtagtgagccttgatta

SEQ ID NO: 288615 - DNA, 25 bp, Probe Sequence
tccagctaggatgatcgaggttgtt

SEQ ID NO: 288616 - DNA, 25 bp, Probe Sequence
tgccagctaccccttgagggatggt

SEQ ID NO: 288617 - DNA, 25 bp, Probe Sequence
tgccactatcctccagtatgggtga

SEQ ID NO: 288618 - DNA, 25 bp, Probe Sequence
tgccacgaccgtggctatctggtga

SEQ ID NO: 288619 - DNA, 25 bp, Probe Sequence
tccaaggccctagatctgctgatgg

SEQ ID NO: 288620 - DNA, 25 bp, Probe Sequence
tccaatggccgctagtgactcagtg

SEQ ID NO: 288621 - DNA, 25 bp, Probe Sequence
tccacagacccatcagcactgatgt

SEQ ID NO: 288622 - DNA, 25 bp, Probe Sequence
tccacatgaacgcacgcctgagatt

SEQ ID NO: 288623 - DNA, 25 bp, Probe Sequence
tccaatgagcaggaagattctgaga

SEQ ID NO: 288624 - DNA, 25 bp, Probe Sequence
tccagtgaggcttcagtgtacagca

SEQ ID NO: 288625 - DNA, 25 bp, Probe Sequence
tccaggcaggattcagcacaacact

SEQ ID NO: 288626 - DNA, 25 bp, Probe Sequence
tccaggcaggattcagcacaacact

SEQ ID NO: 288627 - DNA, 25 bp, Probe Sequence
tccaggcaggattcagcacaacact

SEQ ID NO: 288628 - DNA, 25 bp, Probe Sequence
tccagtggtgaaacgaagcaatgtg

SEQ ID NO: 288629 - DNA, 25 bp, Probe Sequence
tccagtgtccacaggggcttgggat

SEQ ID NO: 288630 - DNA, 25 bp, Probe Sequence
tccaggtccacagggtatcccagga

SEQ ID NO: 288631 - DNA, 25 bp, Probe Sequence
tccactccaaaacatatcaccagag

SEQ ID NO: 288632 - DNA, 25 bp, Probe Sequence
tccatgctcagcctagaaactacca

SEQ ID NO: 288633 - DNA, 25 bp, Probe Sequence
tccaaatcctggaaccatacatcag

SEQ ID NO: 288634 - DNA, 25 bp, Probe Sequence
tcctaaaatggctctctgagatgca

SEQ ID NO: 288635 - DNA, 25 bp, Probe Sequence
tcctgagaagtggaccccagaggtg

SEQ ID NO: 288636 - DNA, 25 bp, Probe Sequence
tccagcgacactcattcattgaaga

SEQ ID NO: 288637 - DNA, 25 bp, Probe Sequence
tccaaaaacacattcaggcattagc

SEQ ID NO: 288638 - DNA, 25 bp, Probe Sequence
tccacaacttcaatattaattatcg

SEQ ID NO: 288639 - DNA, 25 bp, Probe Sequence
tcccccaatatttttactacgtgtg

SEQ ID NO: 288640 - DNA, 25 bp, Probe Sequence
tccccggtttatctgatctactcgg

SEQ ID NO: 288641 - DNA, 25 bp, Probe Sequence
tccccagggtttgatgtctttgcca

SEQ ID NO: 288642 - DNA, 25 bp, Probe Sequence
tctcccccgtttgtttgttggagtg

SEQ ID NO: 288643 - DNA, 25 bp, Probe Sequence
tccaccccgttgacgtcatgggagt

SEQ ID NO: 288644 - DNA, 25 bp, Probe Sequence
tccagcccggttcccgggaggatga

SEQ ID NO: 288645 - DNA, 25 bp, Probe Sequence
tccacaacggttactgcgatggcag

SEQ ID NO: 288646 - DNA, 25 bp, Probe Sequence
tgccactctcgtcttcgatgtggag

SEQ ID NO: 288647 - DNA, 25 bp, Probe Sequence
tgccacgcttttatccagagagacc

SEQ ID NO: 288648 - DNA, 25 bp, Probe Sequence
tccacagctgacagattccaacaga

SEQ ID NO: 288649 - DNA, 25 bp, Probe Sequence
tccacctgtagctataccagccaga

SEQ ID NO: 288650 - DNA, 25 bp, Probe Sequence
tccacttgaagctcactcagtaata

SEQ ID NO: 288651 - DNA, 25 bp, Probe Sequence
tccactctcaacaaactcatcaaaa

SEQ ID NO: 288652 - DNA, 25 bp, Probe Sequence
tccactctcaacaaactcatcaaaa

SEQ ID NO: 288653 - DNA, 25 bp, Probe Sequence
tccactctcaacaaactcatcaaaa

SEQ ID NO: 288654 - DNA, 25 bp, Probe Sequence
tccagttaccgtccatctcaaaagg

SEQ ID NO: 288655 - DNA, 25 bp, Probe Sequence
tcccaaaggccacatccaagacagg

SEQ ID NO: 288656 - DNA, 25 bp, Probe Sequence
tccacatcaaggcagccatccagca

SEQ ID NO: 288657 - DNA, 25 bp, Probe Sequence
tccagctcagtgccgatgatatcca

SEQ ID NO: 288658 - DNA, 25 bp, Probe Sequence
tccagtcttgcacagcatagaaggt

SEQ ID NO: 288659 - DNA, 25 bp, Probe Sequence
tccggcgcataaagtcagcaaggtt

SEQ ID NO: 288660 - DNA, 25 bp, Probe Sequence
tccagtgccaaaaatgcgaccgagc

SEQ ID NO: 288661 - DNA, 25 bp, Probe Sequence
tccaggaaatcaaagaagccgaggc

SEQ ID NO: 288662 - DNA, 25 bp, Probe Sequence
tccaagaagccaaaggacccagagc

SEQ ID NO: 288663 - DNA, 25 bp, Probe Sequence
tccacgaggccaatgggaccgagga

SEQ ID NO: 288664 - DNA, 25 bp, Probe Sequence
tccagtgggccgagagacacggtgg

SEQ ID NO: 288665 - DNA, 25 bp, Probe Sequence
tccagctgcggcctgcacagaaccg

SEQ ID NO: 288666 - DNA, 25 bp, Probe Sequence
tgccactgtgggcatcagaggccct

SEQ ID NO: 288667 - DNA, 25 bp, Probe Sequence
tccagctttggttagaccctgcatg

SEQ ID NO: 288668 - DNA, 25 bp, Probe Sequence
tccagtttagtttgctgctattagc

SEQ ID NO: 288669 - DNA, 25 bp, Probe Sequence
tccatttccgttcctggatctacgg

SEQ ID NO: 288670 - DNA, 25 bp, Probe Sequence
tccatttcccttctgatgttaaaag

SEQ ID NO: 288671 - DNA, 25 bp, Probe Sequence
tccaactcccctgttgtagaagtga

SEQ ID NO: 288672 - DNA, 25 bp, Probe Sequence
tgccaaagatcccttttaaccaaca

SEQ ID NO: 288673 - DNA, 25 bp, Probe Sequence
tccaaaagcctactgttaaccagaa

SEQ ID NO: 288674 - DNA, 25 bp, Probe Sequence
tccacgatcctttatcttaacctga

SEQ ID NO: 288675 - DNA, 25 bp, Probe Sequence
tccagtactgctttcttcaaactct

SEQ ID NO: 288676 - DNA, 25 bp, Probe Sequence
tccagtgactcagcctacacaaggg

SEQ ID NO: 288677 - DNA, 25 bp, Probe Sequence
tccaatcacaccagctatcacaggt

SEQ ID NO: 288678 - DNA, 25 bp, Probe Sequence
tccaacgtgcacagtcaatgagttg

SEQ ID NO: 288679 - DNA, 25 bp, Probe Sequence
tccactcgtactcccaaatgatgat

SEQ ID NO: 288680 - DNA, 25 bp, Probe Sequence
tccaattgttctgctctaactgata

SEQ ID NO: 288681 - DNA, 25 bp, Probe Sequence
tccaatatgaatacccatcccctga

SEQ ID NO: 288682 - DNA, 25 bp, Probe Sequence
tccactgagaaagctaagccctaca

SEQ ID NO: 288683 - DNA, 25 bp, Probe Sequence
tccctaaaaactctcagctccaaat

SEQ ID NO: 288684 - DNA, 25 bp, Probe Sequence
tcgcgctacaaaaccgggctggaag

SEQ ID NO: 288685 - DNA, 25 bp, Probe Sequence
tcgcccaacagaaccacggcggtga

SEQ ID NO: 288686 - DNA, 25 bp, Probe Sequence
tcgcccaacagaaccacggcggtga

SEQ ID NO: 288687 - DNA, 25 bp, Probe Sequence
tcgcccaacagaaccacggcggtga

SEQ ID NO: 288688 - DNA, 25 bp, Probe Sequence
tcgcccaacagaaccacggcggtga

SEQ ID NO: 288689 - DNA, 25 bp, Probe Sequence
tcgtccgggaaatcggggctgaggg

SEQ ID NO: 288690 - DNA, 25 bp, Probe Sequence
tccagccaggccagaccgagggctg

SEQ ID NO: 288691 - DNA, 25 bp, Probe Sequence
tccagactgggcagccaggcagagg

SEQ ID NO: 288692 - DNA, 25 bp, Probe Sequence
tccaaatggagagtgtagcctgagg

SEQ ID NO: 288693 - DNA, 25 bp, Probe Sequence
tccagaaggatgatggcagatggca

SEQ ID NO: 288694 - DNA, 25 bp, Probe Sequence
tccagaacgaacagcctgacacata

SEQ ID NO: 288695 - DNA, 25 bp, Probe Sequence
tccagaactgaagttgccctacttt

SEQ ID NO: 288696 - DNA, 25 bp, Probe Sequence
tccacagtccaagtggcctcatcac

SEQ ID NO: 288697 - DNA, 25 bp, Probe Sequence
tccaagtctcaggatgcaccatcaa

SEQ ID NO: 288698 - DNA, 25 bp, Probe Sequence
tgccaagtcacagaggcgcagccag

SEQ ID NO: 288699 - DNA, 25 bp, Probe Sequence
tccagcgtcatagagatcccgagca

SEQ ID NO: 288700 - DNA, 25 bp, Probe Sequence
tccacgttagcccaggctctgagag

SEQ ID NO: 288701 - DNA, 25 bp, Probe Sequence
tccacagtgttgccagagccttaat

SEQ ID NO: 288702 - DNA, 25 bp, Probe Sequence
tgccaagtttgcagaacaagaacca

SEQ ID NO: 288703 - DNA, 25 bp, Probe Sequence
tccacagttctctgaatgccaatat

SEQ ID NO: 288704 - DNA, 25 bp, Probe Sequence
tccaacagttgctgactcacattag

SEQ ID NO: 288705 - DNA, 25 bp, Probe Sequence
tccaactttgctaactcctggcatg

SEQ ID NO: 288706 - DNA, 25 bp, Probe Sequence
tccaagattatgtccactctgatgg

SEQ ID NO: 288707 - DNA, 25 bp, Probe Sequence
tccaaatgtgctcccagtgctaggt

SEQ ID NO: 288708 - DNA, 25 bp, Probe Sequence
tccaggtgatgcccgggctgaggat

SEQ ID NO: 288709 - DNA, 25 bp, Probe Sequence
tccacagtgctgcagtctgagctgg

SEQ ID NO: 288710 - DNA, 25 bp, Probe Sequence
tccacaatctgctgacatagggggt

SEQ ID NO: 288711 - DNA, 25 bp, Probe Sequence
tccacaacactggacttgggctctg

SEQ ID NO: 288712 - DNA, 25 bp, Probe Sequence
tccacagggggacttgatctcatct

SEQ ID NO: 288713 - DNA, 25 bp, Probe Sequence
tccacgctggggacgtgtatctcta

SEQ ID NO: 288714 - DNA, 25 bp, Probe Sequence
tccatggcctggcagtgttacctca

SEQ ID NO: 288715 - DNA, 25 bp, Probe Sequence
tccatgccctgtccaggtatggagc

SEQ ID NO: 288716 - DNA, 25 bp, Probe Sequence
tccacctctgtgtgtgtacgagctc

SEQ ID NO: 288717 - DNA, 25 bp, Probe Sequence
tccaacttgagctggctggtggtcc

SEQ ID NO: 288718 - DNA, 25 bp, Probe Sequence
tccagtcttgtctatgggggttctc

SEQ ID NO: 288719 - DNA, 25 bp, Probe Sequence
tccttcttggaggggacgtcaccct

SEQ ID NO: 288720 - DNA, 25 bp, Probe Sequence
tccacatcttggtgaagttgtcccc

SEQ ID NO: 288721 - DNA, 25 bp, Probe Sequence
tccaactttgtaagagtctgaccca

SEQ ID NO: 288722 - DNA, 25 bp, Probe Sequence
tccagttcctggaacaggttcacca

SEQ ID NO: 288723 - DNA, 25 bp, Probe Sequence
tccagcttggcgacccagctgttaa

SEQ ID NO: 288724 - DNA, 25 bp, Probe Sequence
tccagcttgttgtcccaatgaaata

SEQ ID NO: 288725 - DNA, 25 bp, Probe Sequence
tcctgctggtttcccgagggaactt

SEQ ID NO: 288726 - DNA, 25 bp, Probe Sequence
tccacggtgttctggcagcagggac

SEQ ID NO: 288727 - DNA, 25 bp, Probe Sequence
tccacggtgttctggcagcagggac

SEQ ID NO: 288728 - DNA, 25 bp, Probe Sequence
tccacggtgttctggcagcagggac

SEQ ID NO: 288729 - DNA, 25 bp, Probe Sequence
tccaaggtgctgaatcttggaggag

SEQ ID NO: 288730 - DNA, 25 bp, Probe Sequence
tgccaaggtctcagctttgtagcag

SEQ ID NO: 288731 - DNA, 25 bp, Probe Sequence
tccaagcagtcctgttcattcatgt

SEQ ID NO: 288732 - DNA, 25 bp, Probe Sequence
tccaatgcagtcccattctttatgg

SEQ ID NO: 288733 - DNA, 25 bp, Probe Sequence
tccaagcaggaccacctttattgtg

SEQ ID NO: 288734 - DNA, 25 bp, Probe Sequence
tccaaactacagtcctatgtactga

SEQ ID NO: 288735 - DNA, 25 bp, Probe Sequence
tccaacgtgatattccttgaagtag

SEQ ID NO: 288736 - DNA, 25 bp, Probe Sequence
tccagtcctgaatcatcttggagaa

SEQ ID NO: 288737 - DNA, 25 bp, Probe Sequence
tccaatctcagtcactctaggactc

SEQ ID NO: 288738 - DNA, 25 bp, Probe Sequence
tccaactcagtgtttaaggcacacc

SEQ ID NO: 288739 - DNA, 25 bp, Probe Sequence
tccaactggctgcatataggagtca

SEQ ID NO: 288740 - DNA, 25 bp, Probe Sequence
tccacactggcagaggagtgggaca

SEQ ID NO: 288741 - DNA, 25 bp, Probe Sequence
tccacactgcagggaggagtggtac

SEQ ID NO: 288742 - DNA, 25 bp, Probe Sequence
tccagactcagggcagaactttatg

SEQ ID NO: 288743 - DNA, 25 bp, Probe Sequence
tccacataatggtcagctatttttg

SEQ ID NO: 288744 - DNA, 25 bp, Probe Sequence
tgccaatgactgtcaccttcatctc

SEQ ID NO: 288745 - DNA, 25 bp, Probe Sequence
tgccaatgcactcgatcttgtcatt

SEQ ID NO: 288746 - DNA, 25 bp, Probe Sequence
tccatgatgctggggctcttcatct

SEQ ID NO: 288747 - DNA, 25 bp, Probe Sequence
tcctgctgcacgtgcagcccagtat

SEQ ID NO: 288748 - DNA, 25 bp, Probe Sequence
tccagatgcctgtgcttacagcatt

SEQ ID NO: 288749 - DNA, 25 bp, Probe Sequence
tccactgcactgtgctagcagctca

SEQ ID NO: 288750 - DNA, 25 bp, Probe Sequence
tccttgcaatgttctaggtgaccct

SEQ ID NO: 288751 - DNA, 25 bp, Probe Sequence
tctggaaatgttaacctcaccctac

SEQ ID NO: 288752 - DNA, 25 bp, Probe Sequence
tcagggaagaaaacaccccgtactg

SEQ ID NO: 288753 - DNA, 25 bp, Probe Sequence
tccaagaagtagttcaccccagcta

SEQ ID NO: 288754 - DNA, 25 bp, Probe Sequence
tccagaagagttgatcccagccatg

SEQ ID NO: 288755 - DNA, 25 bp, Probe Sequence
tccaaagcagtttgtgcctgctgta

SEQ ID NO: 288756 - DNA, 25 bp, Probe Sequence
tgccaatcacagacaactcactttt

SEQ ID NO: 288757 - DNA, 25 bp, Probe Sequence
tgccaatgcacgcacacatcagtgc

SEQ ID NO: 288758 - DNA, 25 bp, Probe Sequence
tccaagatgcagcagaacggctacg

SEQ ID NO: 288759 - DNA, 25 bp, Probe Sequence
tccacagctgctcaataaagtacaa

SEQ ID NO: 288760 - DNA, 25 bp, Probe Sequence
tccacatgcgccggaaggagcttca

SEQ ID NO: 288761 - DNA, 25 bp, Probe Sequence
tccacttcactcccaggagattcct

SEQ ID NO: 288762 - DNA, 25 bp, Probe Sequence
tacactgttctccaaaggtacctta

SEQ ID NO: 288763 - DNA, 25 bp, Probe Sequence
tattcagttttatgggtactttata

SEQ ID NO: 288764 - DNA, 25 bp, Probe Sequence
tccacttatttatgggtattttata

SEQ ID NO: 288765 - DNA, 25 bp, Probe Sequence
tccactcctctacaggtgtttgtta

SEQ ID NO: 288766 - DNA, 25 bp, Probe Sequence
tccacccagctactggttcatttga

SEQ ID NO: 288767 - DNA, 25 bp, Probe Sequence
tccacgccctgagggcaggctttgc

SEQ ID NO: 288768 - DNA, 25 bp, Probe Sequence
tccacattcttaggcggaggttgca

SEQ ID NO: 288769 - DNA, 25 bp, Probe Sequence
tccacgttgtcagcgctcaggaatg

SEQ ID NO: 288770 - DNA, 25 bp, Probe Sequence
tccacgttgtcagcgctcaggaatg

SEQ ID NO: 288771 - DNA, 25 bp, Probe Sequence
tccactgtttcggtgccagcagaga

SEQ ID NO: 288772 - DNA, 25 bp, Probe Sequence
tccactgcttaccttacaaaatagt

SEQ ID NO: 288773 - DNA, 25 bp, Probe Sequence
tccagacattaacttacacattgta

SEQ ID NO: 288774 - DNA, 25 bp, Probe Sequence
tccacgtgtagactttgcgcttgat

SEQ ID NO: 288775 - DNA, 25 bp, Probe Sequence
tccacgttcaggatattgttgtttt

SEQ ID NO: 288776 - DNA, 25 bp, Probe Sequence
tccagaaattggatgcttttttttt

SEQ ID NO: 288777 - DNA, 25 bp, Probe Sequence
tccacaccgggatgctttgtttgtt

SEQ ID NO: 288778 - DNA, 25 bp, Probe Sequence
tccacacacggccaggcctgtttat

SEQ ID NO: 288779 - DNA, 25 bp, Probe Sequence
tccacataggagtggcttttctgtc

SEQ ID NO: 288780 - DNA, 25 bp, Probe Sequence
tccactttgacttcgtactgtcttt

SEQ ID NO: 288781 - DNA, 25 bp, Probe Sequence
tccacttaaatatattccatctttt

SEQ ID NO: 288782 - DNA, 25 bp, Probe Sequence
tccacacgcattaatagtcccattt

SEQ ID NO: 288783 - DNA, 25 bp, Probe Sequence
tccacaccttgttaagccaatttct

SEQ ID NO: 288784 - DNA, 25 bp, Probe Sequence
tccacgctcatcttgcaaagcgcta

SEQ ID NO: 288785 - DNA, 25 bp, Probe Sequence
tccagctcatcctttgacgctgtga

SEQ ID NO: 288786 - DNA, 25 bp, Probe Sequence
tccagtcacatctggccagagggct

SEQ ID NO: 288787 - DNA, 25 bp, Probe Sequence
tccagggcatcacatcctggggctc

SEQ ID NO: 288788 - DNA, 25 bp, Probe Sequence
tccagggtgcatctcctggtcagga

SEQ ID NO: 288789 - DNA, 25 bp, Probe Sequence
tccagcgtgctctctcggaataaga

SEQ ID NO: 288790 - DNA, 25 bp, Probe Sequence
tccaaggcattcgatgcgtgtttaa

SEQ ID NO: 288791 - DNA, 25 bp, Probe Sequence
tccaaactgccccctatatgtaaag

SEQ ID NO: 288792 - DNA, 25 bp, Probe Sequence
tccaaagctgcctctgttttaaaga

SEQ ID NO: 288793 - DNA, 25 bp, Probe Sequence
tccaaaatgagccttttattgaaaa

SEQ ID NO: 288794 - DNA, 25 bp, Probe Sequence
tccagaggtgcgctttttatgtact

SEQ ID NO: 288795 - DNA, 25 bp, Probe Sequence
tccagactgtgcgcaagtttcttac

SEQ ID NO: 288796 - DNA, 25 bp, Probe Sequence
tcagctacctggaaaatttattact

SEQ ID NO: 288797 - DNA, 25 bp, Probe Sequence
ttgctaccgtgaaacctttacctag

SEQ ID NO: 288798 - DNA, 25 bp, Probe Sequence
tcgcgtctcggaaaccggtagcgct

SEQ ID NO: 288799 - DNA, 25 bp, Probe Sequence
tccagtgccgggtcaccaccgagga

SEQ ID NO: 288800 - DNA, 25 bp, Probe Sequence
tccaacccatttaatcaccatggga

SEQ ID NO: 288801 - DNA, 25 bp, Probe Sequence
tccaaccccagtacaacctgtagac

SEQ ID NO: 288802 - DNA, 25 bp, Probe Sequence
tccaaccttcaggaattccgttacg

SEQ ID NO: 288803 - DNA, 25 bp, Probe Sequence
tccaagcgtttggtgttaccttctc

SEQ ID NO: 288804 - DNA, 25 bp, Probe Sequence
tccaagagtactgtgtcttcctgtc

SEQ ID NO: 288805 - DNA, 25 bp, Probe Sequence
tccactaggccttttaatcctatca

SEQ ID NO: 288806 - DNA, 25 bp, Probe Sequence
tccacacaggccattacaattcttc

SEQ ID NO: 288807 - DNA, 25 bp, Probe Sequence
tccaacagaccaaaaaatgttttca

SEQ ID NO: 288808 - DNA, 25 bp, Probe Sequence
tcctttgatgcctaaaaattttcca

SEQ ID NO: 288809 - DNA, 25 bp, Probe Sequence
tcggaagatgccagaaactttctca

SEQ ID NO: 288810 - DNA, 25 bp, Probe Sequence
tccaaactgccttaaacgttgtatt

SEQ ID NO: 288811 - DNA, 25 bp, Probe Sequence
tccattcagcccttaaacctttata

SEQ ID NO: 288812 - DNA, 25 bp, Probe Sequence
tccattcctactatatacccataga

SEQ ID NO: 288813 - DNA, 25 bp, Probe Sequence
tccttcgctcgtttatccaataaac

SEQ ID NO: 288814 - DNA, 25 bp, Probe Sequence
tccttcgctcgtttatccaataaac

SEQ ID NO: 288815 - DNA, 25 bp, Probe Sequence
tccaacctgcttcttcaaacagaac

SEQ ID NO: 288816 - DNA, 25 bp, Probe Sequence
tccaaaccactggctgtcagaacaa

SEQ ID NO: 288817 - DNA, 25 bp, Probe Sequence
tccaagacccagactatgaagaatg

SEQ ID NO: 288818 - DNA, 25 bp, Probe Sequence
tccaaattccacaataagcaatatg

SEQ ID NO: 288819 - DNA, 25 bp, Probe Sequence
tccaaatcatcctaactagttttca

SEQ ID NO: 288820 - DNA, 25 bp, Probe Sequence
tccagattgttttcctagtatttcc

SEQ ID NO: 288821 - DNA, 25 bp, Probe Sequence
tccacctttattatcagtctcttcc

SEQ ID NO: 288822 - DNA, 25 bp, Probe Sequence
tccacgctcaaagtttcaggtctcg

SEQ ID NO: 288823 - DNA, 25 bp, Probe Sequence
tccaggtgacctatacaggttctgg

SEQ ID NO: 288824 - DNA, 25 bp, Probe Sequence
tccaggcttcacgtttggaaatctg

SEQ ID NO: 288825 - DNA, 25 bp, Probe Sequence
tccagtctccgggttgaattccagt

SEQ ID NO: 288826 - DNA, 25 bp, Probe Sequence
tccagtctccgggttgaattccagt

SEQ ID NO: 288827 - DNA, 25 bp, Probe Sequence
tccacattcctgtttgtaatccttg

SEQ ID NO: 288828 - DNA, 25 bp, Probe Sequence
tccacattcctgtttgtaatccttg

SEQ ID NO: 288829 - DNA, 25 bp, Probe Sequence
tccacattgaagttgtgtgcagtgg

SEQ ID NO: 288830 - DNA, 25 bp, Probe Sequence
tccatctggagttttgaggggtgag

SEQ ID NO: 288831 - DNA, 25 bp, Probe Sequence
tccaggagattgttgataaggttaa

SEQ ID NO: 288832 - DNA, 25 bp, Probe Sequence
tccacatcagtatcatcaaaggtta

SEQ ID NO: 288833 - DNA, 25 bp, Probe Sequence
tccacagcagcattatccacaaggt

SEQ ID NO: 288834 - DNA, 25 bp, Probe Sequence
tccaacagacctgcagctgagggtc

SEQ ID NO: 288835 - DNA, 25 bp, Probe Sequence
tccagcagcaacttgtagtgagaag

SEQ ID NO: 288836 - DNA, 25 bp, Probe Sequence
tccagcgagcacaagtgcaggtgga

SEQ ID NO: 288837 - DNA, 25 bp, Probe Sequence
tccacagacacacgaggtattgcac

SEQ ID NO: 288838 - DNA, 25 bp, Probe Sequence
tctacaagcaattaggtgattcaaa

SEQ ID NO: 288839 - DNA, 25 bp, Probe Sequence
tccagcaacatttgggccagctaaa

SEQ ID NO: 288840 - DNA, 25 bp, Probe Sequence
tccacaataattcccaactcataaa

SEQ ID NO: 288841 - DNA, 25 bp, Probe Sequence
tccagcaaatatccttcaaacatga

SEQ ID NO: 288842 - DNA, 25 bp, Probe Sequence
tccagaagcataccaaaagatcaga

SEQ ID NO: 288843 - DNA, 25 bp, Probe Sequence
tccagaagcttccaaatcctgaaat

SEQ ID NO: 288844 - DNA, 25 bp, Probe Sequence
tccagaactggctgaaccgccacag

SEQ ID NO: 288845 - DNA, 25 bp, Probe Sequence
tccagagacgggaaaacacccagca

SEQ ID NO: 288846 - DNA, 25 bp, Probe Sequence
tccaggatgctgagatctaaaccca

SEQ ID NO: 288847 - DNA, 25 bp, Probe Sequence
tccactgggaagtctaagagtccat

SEQ ID NO: 288848 - DNA, 25 bp, Probe Sequence
tccattgggaagtccacaaccctaa

SEQ ID NO: 288849 - DNA, 25 bp, Probe Sequence
tccactggaagggccacgaacactc

SEQ ID NO: 288850 - DNA, 25 bp, Probe Sequence
tcctcttggaggccccaaagttttg

SEQ ID NO: 288851 - DNA, 25 bp, Probe Sequence
tccttcaggggagacaccaatttct

SEQ ID NO: 288852 - DNA, 25 bp, Probe Sequence
tccttagaaggtcacactcacagtt

SEQ ID NO: 288853 - DNA, 25 bp, Probe Sequence
tccttaagggatgccctcagtgcct

SEQ ID NO: 288854 - DNA, 25 bp, Probe Sequence
tccttaaagagaagtcaccggccgg

SEQ ID NO: 288855 - DNA, 25 bp, Probe Sequence
tctctttaactgtgtgaccagcgga

SEQ ID NO: 288856 - DNA, 25 bp, Probe Sequence
tcctatttactctggtaacttcagg

SEQ ID NO: 288857 - DNA, 25 bp, Probe Sequence
tcctacttaggtggttaatttcctg

SEQ ID NO: 288858 - DNA, 25 bp, Probe Sequence
tcctagttaattggtttaccattca

SEQ ID NO: 288859 - DNA, 25 bp, Probe Sequence
tcctgactttttgctttaatttaga

SEQ ID NO: 288860 - DNA, 25 bp, Probe Sequence
tccttctttctaggctttaagcaga

SEQ ID NO: 288861 - DNA, 25 bp, Probe Sequence
tctttttctcttgcttctaaggggt

SEQ ID NO: 288862 - DNA, 25 bp, Probe Sequence
ttttttccgtacctcctggaggatg

SEQ ID NO: 288863 - DNA, 25 bp, Probe Sequence
tttctcttccggatgtcccggagca

SEQ ID NO: 288864 - DNA, 25 bp, Probe Sequence
tcccttctttggatgtccttgtgag

SEQ ID NO: 288865 - DNA, 25 bp, Probe Sequence
tcctttttggggagttgttatgcca

SEQ ID NO: 288866 - DNA, 25 bp, Probe Sequence
tccatatttcggaggtcttctaatg

SEQ ID NO: 288867 - DNA, 25 bp, Probe Sequence
tccatttacctgtgcgtggcttact

SEQ ID NO: 288868 - DNA, 25 bp, Probe Sequence
tccagttaagtgcaggtagttcccc

SEQ ID NO: 288869 - DNA, 25 bp, Probe Sequence
tccgcttcaaggcagagcaaatgtg

SEQ ID NO: 288870 - DNA, 25 bp, Probe Sequence
tccttcacaagatggcaaagaggcc

SEQ ID NO: 288871 - DNA, 25 bp, Probe Sequence
tccattcctaacaccaatgacccat

SEQ ID NO: 288872 - DNA, 25 bp, Probe Sequence
tccttgtcatcatcctggctatatc

SEQ ID NO: 288873 - DNA, 25 bp, Probe Sequence
tccacatggcattcatgctctagta

SEQ ID NO: 288874 - DNA, 25 bp, Probe Sequence
tccaggatgagccattgtagatcat

SEQ ID NO: 288875 - DNA, 25 bp, Probe Sequence
tccacaacagccagtcagaaccata

SEQ ID NO: 288876 - DNA, 25 bp, Probe Sequence
tccaaacccaggccagaagccagac

SEQ ID NO: 288877 - DNA, 25 bp, Probe Sequence
tccaacatcccagggcagaaatgaa

SEQ ID NO: 288878 - DNA, 25 bp, Probe Sequence
tccacagactccaggcatatcttga

SEQ ID NO: 288879 - DNA, 25 bp, Probe Sequence
tccatcagacattccagtaatggga

SEQ ID NO: 288880 - DNA, 25 bp, Probe Sequence
tccacaggctacaagccctgggacc

SEQ ID NO: 288881 - DNA, 25 bp, Probe Sequence
tccacggccaacatgctcagggaac

SEQ ID NO: 288882 - DNA, 25 bp, Probe Sequence
tccacggccacagtgtcaatgggga

SEQ ID NO: 288883 - DNA, 25 bp, Probe Sequence
tccacacagtccgtgtgcggggagg

SEQ ID NO: 288884 - DNA, 25 bp, Probe Sequence
tccaccttcatattggctaggtagg

SEQ ID NO: 288885 - DNA, 25 bp, Probe Sequence
tccaacttcatttgatgctaaatag

SEQ ID NO: 288886 - DNA, 25 bp, Probe Sequence
tccaacaggctttatgtatcaatag

SEQ ID NO: 288887 - DNA, 25 bp, Probe Sequence
tccactcagattaatatgaagcaaa

SEQ ID NO: 288888 - DNA, 25 bp, Probe Sequence
tccacctgagttacaaagacagacc

SEQ ID NO: 288889 - DNA, 25 bp, Probe Sequence
tccacttagtggataaagcagcaac

SEQ ID NO: 288890 - DNA, 25 bp, Probe Sequence
tccctaagggttacgccatgccctt

SEQ ID NO: 288891 - DNA, 25 bp, Probe Sequence
tccagaaagagtctaccctgcacct

SEQ ID NO: 288892 - DNA, 25 bp, Probe Sequence
tccaaatcaacacaatgcactctgc

SEQ ID NO: 288893 - DNA, 25 bp, Probe Sequence
tccaaatcagagttagttgccatgt

SEQ ID NO: 288894 - DNA, 25 bp, Probe Sequence
tccaaactgatagtacattgccatc

SEQ ID NO: 288895 - DNA, 25 bp, Probe Sequence
tccagatcgcttgcttcattggtca

SEQ ID NO: 288896 - DNA, 25 bp, Probe Sequence
tccagacagcctgtatcttggggga

SEQ ID NO: 288897 - DNA, 25 bp, Probe Sequence
tccagaccctggttgcttcaaggac

SEQ ID NO: 288898 - DNA, 25 bp, Probe Sequence
tcctgacacatcagttcccggaact

SEQ ID NO: 288899 - DNA, 25 bp, Probe Sequence
tccatgcatactattgtccctgaaa

SEQ ID NO: 288900 - DNA, 25 bp, Probe Sequence
tccactgagccggtgtacatctaaa

SEQ ID NO: 288901 - DNA, 25 bp, Probe Sequence
tccactggcccaagaagcatctaga

SEQ ID NO: 288902 - DNA, 25 bp, Probe Sequence
tccagggctccaaatctgcctagaa

SEQ ID NO: 288903 - DNA, 25 bp, Probe Sequence
tccaggccctcagatggcacattag

SEQ ID NO: 288904 - DNA, 25 bp, Probe Sequence
tccaggcccacagcatggggcttgg

SEQ ID NO: 288905 - DNA, 25 bp, Probe Sequence
tccagagaagcatcccagggctttg

SEQ ID NO: 288906 - DNA, 25 bp, Probe Sequence
tcctaaacagcccaactggcattta

SEQ ID NO: 288907 - DNA, 25 bp, Probe Sequence
tcctaacatggcccacacgttgtat

SEQ ID NO: 288908 - DNA, 25 bp, Probe Sequence
tccataaatgcccgacaagtaagta

SEQ ID NO: 288909 - DNA, 25 bp, Probe Sequence
tccaggaagcagcagccaactaagt

SEQ ID NO: 288910 - DNA, 25 bp, Probe Sequence
tccatccaagcaagagctacactga

SEQ ID NO: 288911 - DNA, 25 bp, Probe Sequence
tccatgactaaatcttccgcagacc

SEQ ID NO: 288912 - DNA, 25 bp, Probe Sequence
tcctgaagaagcacaacctcaaccc

SEQ ID NO: 288913 - DNA, 25 bp, Probe Sequence
tctaacaggtgctcaacctactcca

SEQ ID NO: 288914 - DNA, 25 bp, Probe Sequence
tccacaaagtgcatcacctcaacct

SEQ ID NO: 288915 - DNA, 25 bp, Probe Sequence
tccaccacaggcatcctgcaaatgc

SEQ ID NO: 288916 - DNA, 25 bp, Probe Sequence
tccactccacgaacagtgcgctgag

SEQ ID NO: 288917 - DNA, 25 bp, Probe Sequence
tccaccaactgaatcatttgtgcac

SEQ ID NO: 288918 - DNA, 25 bp, Probe Sequence
tccactacaggttttatgagacttc

SEQ ID NO: 288919 - DNA, 25 bp, Probe Sequence
tccctcaagagtaactacaatcttc

SEQ ID NO: 288920 - DNA, 25 bp, Probe Sequence
tccattaaagaaacaccgtgcaacg

SEQ ID NO: 288921 - DNA, 25 bp, Probe Sequence
tccagtttagtaacacctgcctcac

SEQ ID NO: 288922 - DNA, 25 bp, Probe Sequence
tccaaatgtaagtgacagtggctca

SEQ ID NO: 288923 - DNA, 25 bp, Probe Sequence
tccatgtataaacttgaagtggttg

SEQ ID NO: 288924 - DNA, 25 bp, Probe Sequence
tccattattagcctggggtgtggtg

SEQ ID NO: 288925 - DNA, 25 bp, Probe Sequence
tccagaagtgggccgctgtggtggt

SEQ ID NO: 288926 - DNA, 25 bp, Probe Sequence
tccagaagctgatggcccagagtgg

SEQ ID NO: 288927 - DNA, 25 bp, Probe Sequence
tccagacctgtcccaacagcaggga

SEQ ID NO: 288928 - DNA, 25 bp, Probe Sequence
tccgacacggctcaagtcacgaatc

SEQ ID NO: 288929 - DNA, 25 bp, Probe Sequence
tccaggcctggtgacataccaagac

SEQ ID NO: 288930 - DNA, 25 bp, Probe Sequence
tctactcctgggaagcccaaaaccg

SEQ ID NO: 288931 - DNA, 25 bp, Probe Sequence
tccactggggtcaccctaaacctga

SEQ ID NO: 288932 - DNA, 25 bp, Probe Sequence
tccactgggcagacaggccctcaga

SEQ ID NO: 288933 - DNA, 25 bp, Probe Sequence
tccagggggccaggcaaccaacaaa

SEQ ID NO: 288934 - DNA, 25 bp, Probe Sequence
tccagcagagggaacgctatccaaa

SEQ ID NO: 288935 - DNA, 25 bp, Probe Sequence
tccagaattgtcactgtgcattcaa

SEQ ID NO: 288936 - DNA, 25 bp, Probe Sequence
tccaaatgtcttcctttgtcaacta

SEQ ID NO: 288937 - DNA, 25 bp, Probe Sequence
tccaaagctttacatttcaactgaa

SEQ ID NO: 288938 - DNA, 25 bp, Probe Sequence
tccagaagttttccatcttcccaaa

SEQ ID NO: 288939 - DNA, 25 bp, Probe Sequence
tcctaggtatttccacctcggaaca

SEQ ID NO: 288940 - DNA, 25 bp, Probe Sequence
tccagtggatatcttgacctacgtg

SEQ ID NO: 288941 - DNA, 25 bp, Probe Sequence
tccatgtggttaactggactgacct

SEQ ID NO: 288942 - DNA, 25 bp, Probe Sequence
tccaggtttatccgtgtcattccta

SEQ ID NO: 288943 - DNA, 25 bp, Probe Sequence
tacgtgttattccaagcctttaaat

SEQ ID NO: 288944 - DNA, 25 bp, Probe Sequence
tccagtttttcccactatttaacat

SEQ ID NO: 288945 - DNA, 25 bp, Probe Sequence
tccatttgttgagcgacttctgaaa

SEQ ID NO: 288946 - DNA, 25 bp, Probe Sequence
tcctttggcaacggtgacttgagta

SEQ ID NO: 288947 - DNA, 25 bp, Probe Sequence
tccagttccaaagccaattgattac

SEQ ID NO: 288948 - DNA, 25 bp, Probe Sequence
tctcaaacacaaagcccaacgggac

SEQ ID NO: 288949 - DNA, 25 bp, Probe Sequence
tccaccccattgacgtcaatcggga

SEQ ID NO: 288950 - DNA, 25 bp, Probe Sequence
tccaccccattgacgtgcaatggga

SEQ ID NO: 288951 - DNA, 25 bp, Probe Sequence
tccaccagttgtggcgtccagaaag

SEQ ID NO: 288952 - DNA, 25 bp, Probe Sequence
tccacctgttggacctccatagaag

SEQ ID NO: 288953 - DNA, 25 bp, Probe Sequence
tccacgctgttgtggacctccatag

SEQ ID NO: 288954 - DNA, 25 bp, Probe Sequence
tccactggggcaacagacactgcca

SEQ ID NO: 288955 - DNA, 25 bp, Probe Sequence
tccacttgtgacgtcatgtcagtac

SEQ ID NO: 288956 - DNA, 25 bp, Probe Sequence
tccgcgtgatggctatgccttgcac

SEQ ID NO: 288957 - DNA, 25 bp, Probe Sequence
tccagagataatcctagccatcctc

SEQ ID NO: 288958 - DNA, 25 bp, Probe Sequence
tccacaaagctgccattgtcatcct

SEQ ID NO: 288959 - DNA, 25 bp, Probe Sequence
tccacaacgtgtccattatcctgaa

SEQ ID NO: 288960 - DNA, 25 bp, Probe Sequence
tccacataagagttctaattctgaa

SEQ ID NO: 288961 - DNA, 25 bp, Probe Sequence
tccacttaactgactagctttgata

SEQ ID NO: 288962 - DNA, 25 bp, Probe Sequence
tccacctcaagcttcatagttattt

SEQ ID NO: 288963 - DNA, 25 bp, Probe Sequence
tccagcctatcgttgatggatattt

SEQ ID NO: 288964 - DNA, 25 bp, Probe Sequence
tccaggctcacgttggacgctattt

SEQ ID NO: 288965 - DNA, 25 bp, Probe Sequence
tccaggcatccttttaggactgtgt

SEQ ID NO: 288966 - DNA, 25 bp, Probe Sequence
tccaccacatttttatgacactgta

SEQ ID NO: 288967 - DNA, 25 bp, Probe Sequence
tccgtccatgtttttgccacaaagg

SEQ ID NO: 288968 - DNA, 25 bp, Probe Sequence
tccattctattttaaggcccaagta

SEQ ID NO: 288969 - DNA, 25 bp, Probe Sequence
tccttctaccatcaaggccgggtga

SEQ ID NO: 288970 - DNA, 25 bp, Probe Sequence
tcctatctgatcctggagacgctgc

SEQ ID NO: 288971 - DNA, 25 bp, Probe Sequence
tccgatgatgacctgtgcatgaggc

SEQ ID NO: 288972 - DNA, 25 bp, Probe Sequence
tccatatgagacaccgggccggatc

SEQ ID NO: 288973 - DNA, 25 bp, Probe Sequence
tccagctgatcaacccggggagtac

SEQ ID NO: 288974 - DNA, 25 bp, Probe Sequence
tccagctgctcaacctgctgggcaa

SEQ ID NO: 288975 - DNA, 25 bp, Probe Sequence
tcccccatgaccagggcaactttgt

SEQ ID NO: 288976 - DNA, 25 bp, Probe Sequence
tcctctggtaccgctgcgaattttg

SEQ ID NO: 288977 - DNA, 25 bp, Probe Sequence
tcccatgggaaccctccaaagaatg

SEQ ID NO: 288978 - DNA, 25 bp, Probe Sequence
tccacaggggacctacccctattgc

SEQ ID NO: 288979 - DNA, 25 bp, Probe Sequence
tccggggaatccaatcccattcttc

SEQ ID NO: 288980 - DNA, 25 bp, Probe Sequence
tccttggaagtcagtcgtagtcctc

SEQ ID NO: 288981 - DNA, 25 bp, Probe Sequence
tccttgtgggtcagatttcagagtt

SEQ ID NO: 288982 - DNA, 25 bp, Probe Sequence
tccatgtgtgggacactgattagac

SEQ ID NO: 288983 - DNA, 25 bp, Probe Sequence
tccactgtgtggaatgtgaatagtt

SEQ ID NO: 288984 - DNA, 25 bp, Probe Sequence
tccacttcagtgcatgtcttagttg

SEQ ID NO: 288985 - DNA, 25 bp, Probe Sequence
tccagctgtcggcagtactcagtgg

SEQ ID NO: 288986 - DNA, 25 bp, Probe Sequence
tccagctgtctggaagactcgcctg

SEQ ID NO: 288987 - DNA, 25 bp, Probe Sequence
tccacttgcttgaagacccatgcgg

SEQ ID NO: 288988 - DNA, 25 bp, Probe Sequence
tccagccctgatgcatgacacctgg

SEQ ID NO: 288989 - DNA, 25 bp, Probe Sequence
tccacgctgatgacgcagaagacgg

SEQ ID NO: 288990 - DNA, 25 bp, Probe Sequence
tccacattcagaggcatcacaagta

SEQ ID NO: 288991 - DNA, 25 bp, Probe Sequence
tccatctctatgagccaccattgga

SEQ ID NO: 288992 - DNA, 25 bp, Probe Sequence
tccacctcataagtcatgtctcttg

SEQ ID NO: 288993 - DNA, 25 bp, Probe Sequence
tccacactctatatttctgtgtgtc

SEQ ID NO: 288994 - DNA, 25 bp, Probe Sequence
tccacatctgaaattccttttgaca

SEQ ID NO: 288995 - DNA, 25 bp, Probe Sequence
tccacaccaagtgacactactggcc

SEQ ID NO: 288996 - DNA, 25 bp, Probe Sequence
tccacacaattgaggacttctggcg

SEQ ID NO: 288997 - DNA, 25 bp, Probe Sequence
tccagcaaatcgagctccttctgct

SEQ ID NO: 288998 - DNA, 25 bp, Probe Sequence
tccagaacaagatcatgcgatactt

SEQ ID NO: 288999 - DNA, 25 bp, Probe Sequence
tccagtcacacaacctctatttcgg

SEQ ID NO: 289000 - DNA, 25 bp, Probe Sequence
tccagctccataccctaaattctga

SEQ ID NO: 289001 - DNA, 25 bp, Probe Sequence
tccagcccaagactgcctaatttaa

SEQ ID NO: 289002 - DNA, 25 bp, Probe Sequence
tccaccaacagcctccatttttagg

SEQ ID NO: 289003 - DNA, 25 bp, Probe Sequence
tccatccattcactatacttttcta

SEQ ID NO: 289004 - DNA, 25 bp, Probe Sequence
tccatccattcactatacttttcta

SEQ ID NO: 289005 - DNA, 25 bp, Probe Sequence
tccatccattcactatacttttcta

SEQ ID NO: 289006 - DNA, 25 bp, Probe Sequence
tccaccttcatttaactctttgaaa

SEQ ID NO: 289007 - DNA, 25 bp, Probe Sequence
tcccgcttctgggaactccgggaca

SEQ ID NO: 289008 - DNA, 25 bp, Probe Sequence
tccacgtattggtcaacttcagggt

SEQ ID NO: 289009 - DNA, 25 bp, Probe Sequence
tccccagattgattaacttaaggtc

SEQ ID NO: 289010 - DNA, 25 bp, Probe Sequence
tcctccgatttacacgaaaagctct

SEQ ID NO: 289011 - DNA, 25 bp, Probe Sequence
tccaccgcgttacaccatgagtaac

SEQ ID NO: 289012 - DNA, 25 bp, Probe Sequence
tccacctgggcaattacctgggagc

SEQ ID NO: 289013 - DNA, 25 bp, Probe Sequence
tccacactgggatatcatcgctggc

SEQ ID NO: 289014 - DNA, 25 bp, Probe Sequence
tccacctggtcatatactctgcagc

SEQ ID NO: 289015 - DNA, 25 bp, Probe Sequence
tccagcccctcatcatatactggct

SEQ ID NO: 289016 - DNA, 25 bp, Probe Sequence
tccgaccagtgcatgcatatactgt

SEQ ID NO: 289017 - DNA, 25 bp, Probe Sequence
tccagcccgtgctgtatcagctgta

SEQ ID NO: 289018 - DNA, 25 bp, Probe Sequence
tccacttcagtctcttcagcagaga

SEQ ID NO: 289019 - DNA, 25 bp, Probe Sequence
tccactcagatgctccttcaagaga

SEQ ID NO: 289020 - DNA, 25 bp, Probe Sequence
tccactttttcactatagagccttt

SEQ ID NO: 289021 - DNA, 25 bp, Probe Sequence
tcctttcattgtcttaggccttcat

SEQ ID NO: 289022 - DNA, 25 bp, Probe Sequence
tcccaacgatggttggggccttcag

SEQ ID NO: 289023 - DNA, 25 bp, Probe Sequence
tccgaacgcacacttcaggagcagc

SEQ ID NO: 289024 - DNA, 25 bp, Probe Sequence
tccgccagatgctcttcgtgagcgg

SEQ ID NO: 289025 - DNA, 25 bp, Probe Sequence
tccacgcatggcttctgccattggt

SEQ ID NO: 289026 - DNA, 25 bp, Probe Sequence
tccaccaggacttcctgggcttcta

SEQ ID NO: 289027 - DNA, 25 bp, Probe Sequence
tcccgggattgcatctgggcttaaa

SEQ ID NO: 289028 - DNA, 25 bp, Probe Sequence
tccttggttttgtttactatataag

SEQ ID NO: 289029 - DNA, 25 bp, Probe Sequence
tccataatttgagttttacataaaa

SEQ ID NO: 289030 - DNA, 25 bp, Probe Sequence
tccatagtttgatagtgccacttaa

SEQ ID NO: 289031 - DNA, 25 bp, Probe Sequence
tccatagatgcagatgggctgccac

SEQ ID NO: 289032 - DNA, 25 bp, Probe Sequence
tccatctggagcaatgtgacccctt

SEQ ID NO: 289033 - DNA, 25 bp, Probe Sequence
tccactagaggcaagatgccccttg

SEQ ID NO: 289034 - DNA, 25 bp, Probe Sequence
tccacatcatgagcgaagttctttg

SEQ ID NO: 289035 - DNA, 25 bp, Probe Sequence
tccagcactggaaaccttctcttgg

SEQ ID NO: 289036 - DNA, 25 bp, Probe Sequence
tccagcactgtaagaagctgtccag

SEQ ID NO: 289037 - DNA, 25 bp, Probe Sequence
tccagcagaggatgaaggtcagcaa

SEQ ID NO: 289038 - DNA, 25 bp, Probe Sequence
tccagtggcgggacatagtcagcag

SEQ ID NO: 289039 - DNA, 25 bp, Probe Sequence
tccaggagttggactcagctctgca

SEQ ID NO: 289040 - DNA, 25 bp, Probe Sequence
tccatggggatggtccagcagctgg

SEQ ID NO: 289041 - DNA, 25 bp, Probe Sequence
tccatggagtacttcaaatctgccc

SEQ ID NO: 289042 - DNA, 25 bp, Probe Sequence
tccagtggtgacttcactgatattt

SEQ ID NO: 289043 - DNA, 25 bp, Probe Sequence
tccagtggtgacttcactgatattt

SEQ ID NO: 289044 - DNA, 25 bp, Probe Sequence
tccaggcttgacttcaatggtttct

SEQ ID NO: 289045 - DNA, 25 bp, Probe Sequence
tccagagactggttcgcttgttttt

SEQ ID NO: 289046 - DNA, 25 bp, Probe Sequence
tccaggtcttttgcagtgtgtttgt

SEQ ID NO: 289047 - DNA, 25 bp, Probe Sequence
tccacgtgctgtaccaagtgctggt

SEQ ID NO: 289048 - DNA, 25 bp, Probe Sequence
tccacgtgctgtgttatggtcgatg

SEQ ID NO: 289049 - DNA, 25 bp, Probe Sequence
tccacgatcttcctgaagaagagaa

SEQ ID NO: 289050 - DNA, 25 bp, Probe Sequence
tccaccacctctggaacaagattaa

SEQ ID NO: 289051 - DNA, 25 bp, Probe Sequence
tccactcccataggctacagaaaaa

SEQ ID NO: 289052 - DNA, 25 bp, Probe Sequence
tccacccccaactcatgaaaagatt

SEQ ID NO: 289053 - DNA, 25 bp, Probe Sequence
tcccaaagccagaaactaaacaaat

SEQ ID NO: 289054 - DNA, 25 bp, Probe Sequence
tccaccaaactaaactataacaaat

SEQ ID NO: 289055 - DNA, 25 bp, Probe Sequence
tccagccaaacgaagcttcataagt

SEQ ID NO: 289056 - DNA, 25 bp, Probe Sequence
tccagcccccagaatgtggctaact

SEQ ID NO: 289057 - DNA, 25 bp, Probe Sequence
tccaggtcccgcaagacagctaatc

SEQ ID NO: 289058 - DNA, 25 bp, Probe Sequence
tccaggtcccagtgaatgaaaacga

SEQ ID NO: 289059 - DNA, 25 bp, Probe Sequence
tccggtcccaggttatgacacacct

SEQ ID NO: 289060 - DNA, 25 bp, Probe Sequence
tccagtgaccctgagatcaacacca

SEQ ID NO: 289061 - DNA, 25 bp, Probe Sequence
tccagagacacacaagagcaccaaa

SEQ ID NO: 289062 - DNA, 25 bp, Probe Sequence
tccaggacatcgagggagccagcgc

SEQ ID NO: 289063 - DNA, 25 bp, Probe Sequence
tccaggctcagtattgtgaccgcgg

SEQ ID NO: 289064 - DNA, 25 bp, Probe Sequence
tccatgccatatcatgtgtgtacgc

SEQ ID NO: 289065 - DNA, 25 bp, Probe Sequence
tccagcccatgccatggcggattct

SEQ ID NO: 289066 - DNA, 25 bp, Probe Sequence
tccaccctggtccggattgtggtca

SEQ ID NO: 289067 - DNA, 25 bp, Probe Sequence
tccagcacgaggacctggtctttgt

SEQ ID NO: 289068 - DNA, 25 bp, Probe Sequence
tccagcgcaaggaggggctgcttct

SEQ ID NO: 289069 - DNA, 25 bp, Probe Sequence
tccagctacaggatgtggggtatga

SEQ ID NO: 289070 - DNA, 25 bp, Probe Sequence
tccagcccactggtgtctgggtatg

SEQ ID NO: 289071 - DNA, 25 bp, Probe Sequence
tccagccaagatgttcatgtagtat

SEQ ID NO: 289072 - DNA, 25 bp, Probe Sequence
tccagccaagggttattatgtgtac

SEQ ID NO: 289073 - DNA, 25 bp, Probe Sequence
tccacccagggaattttagctatgc

SEQ ID NO: 289074 - DNA, 25 bp, Probe Sequence
tctccctagggtacttgggttggtg

SEQ ID NO: 289075 - DNA, 25 bp, Probe Sequence
tcccttgggccaacctgaggtttgt

SEQ ID NO: 289076 - DNA, 25 bp, Probe Sequence
tccatagttcccacccaggattaga

SEQ ID NO: 289077 - DNA, 25 bp, Probe Sequence
tccacctgtcccacaacaggatcag

SEQ ID NO: 289078 - DNA, 25 bp, Probe Sequence
tccacctgtcccacaacaggatcag

SEQ ID NO: 289079 - DNA, 25 bp, Probe Sequence
ttcgacgtccttacaactggacagg

SEQ ID NO: 289080 - DNA, 25 bp, Probe Sequence
tctaacctccctaaattgggccaga

SEQ ID NO: 289081 - DNA, 25 bp, Probe Sequence
ttgaactgtcccattacgtgcgacg

SEQ ID NO: 289082 - DNA, 25 bp, Probe Sequence
tcttgaagtcgcctttagggtggct

SEQ ID NO: 289083 - DNA, 25 bp, Probe Sequence
tcctacttctgactttacttgtggt

SEQ ID NO: 289084 - DNA, 25 bp, Probe Sequence
tcctaatgccttacactacttggtt

SEQ ID NO: 289085 - DNA, 25 bp, Probe Sequence
tcctaatactataccttcgggaatt

SEQ ID NO: 289086 - DNA, 25 bp, Probe Sequence
tcttttagtaaggcatttggggttg

SEQ ID NO: 289087 - DNA, 25 bp, Probe Sequence
tttgttcgtgaggcctttggcccga

SEQ ID NO: 289088 - DNA, 25 bp, Probe Sequence
tcctttcagtggacccgggtcaaga

SEQ ID NO: 289089 - DNA, 25 bp, Probe Sequence
tccttttctggtttcgtgttcacca

SEQ ID NO: 289090 - DNA, 25 bp, Probe Sequence
tccttctaacgtgtgagatgtcccg

SEQ ID NO: 289091 - DNA, 25 bp, Probe Sequence
tcctggctaacacggtgaaaccccg

SEQ ID NO: 289092 - DNA, 25 bp, Probe Sequence
tcctgcagattatgtggaaataccc

SEQ ID NO: 289093 - DNA, 25 bp, Probe Sequence
tcctgaaatgggtctgaaaaatccc

SEQ ID NO: 289094 - DNA, 25 bp, Probe Sequence
tccagtacatgggcccaaaagtccc

SEQ ID NO: 289095 - DNA, 25 bp, Probe Sequence
tccagactctttgcaccaaagctcc

SEQ ID NO: 289096 - DNA, 25 bp, Probe Sequence
tccgactttctcaagctacagactt

SEQ ID NO: 289097 - DNA, 25 bp, Probe Sequence
tcctactattccgtctacgacttgg

SEQ ID NO: 289098 - DNA, 25 bp, Probe Sequence
tccatagtacccattaggacttcca

SEQ ID NO: 289099 - DNA, 25 bp, Probe Sequence
tccttgacaccgatggggacttcga

SEQ ID NO: 289100 - DNA, 25 bp, Probe Sequence
tccattcgccccaaggggacaacgg

SEQ ID NO: 289101 - DNA, 25 bp, Probe Sequence
tccactcacacccatagcgggagag

SEQ ID NO: 289102 - DNA, 25 bp, Probe Sequence
tccactacatccatgatgggatcgg

SEQ ID NO: 289103 - DNA, 25 bp, Probe Sequence
tccacctcgcacatgtctggaggac

SEQ ID NO: 289104 - DNA, 25 bp, Probe Sequence
tccacctcgcacatgtctggaggac

SEQ ID NO: 289105 - DNA, 25 bp, Probe Sequence
tccacctggcacagaatatgcactg

SEQ ID NO: 289106 - DNA, 25 bp, Probe Sequence
tccacctggcacagttgctgaagaa

SEQ ID NO: 289107 - DNA, 25 bp, Probe Sequence
tccagcctggaagtgttgcagaggt

SEQ ID NO: 289108 - DNA, 25 bp, Probe Sequence
tccagctgcaggtttgttagagtct

SEQ ID NO: 289109 - DNA, 25 bp, Probe Sequence
tccagcagcggtatgttgggccaga

SEQ ID NO: 289110 - DNA, 25 bp, Probe Sequence
tccagatgtgagttttttccaagca

SEQ ID NO: 289111 - DNA, 25 bp, Probe Sequence
tccagatttatcatattttcccaca

SEQ ID NO: 289112 - DNA, 25 bp, Probe Sequence
tccagacttcacacagtattctccc

SEQ ID NO: 289113 - DNA, 25 bp, Probe Sequence
tccatgaaatccaagtaatactacc

SEQ ID NO: 289114 - DNA, 25 bp, Probe Sequence
tcctataataaaatggcaccttccc

SEQ ID NO: 289115 - DNA, 25 bp, Probe Sequence
tcctatggaaacaacgccttccgca

SEQ ID NO: 289116 - DNA, 25 bp, Probe Sequence
tcctaggacacaggggactccttga

SEQ ID NO: 289117 - DNA, 25 bp, Probe Sequence
tcctgaagatcaagccagttctcct

SEQ ID NO: 289118 - DNA, 25 bp, Probe Sequence
tccatgaaatcgacctgtttaataa

SEQ ID NO: 289119 - DNA, 25 bp, Probe Sequence
tccatggagactgcctttcatgaaa

SEQ ID NO: 289120 - DNA, 25 bp, Probe Sequence
tccagctggcaacacgtttgcaaag

SEQ ID NO: 289121 - DNA, 25 bp, Probe Sequence
tccagagccaatcccagatttcgca

SEQ ID NO: 289122 - DNA, 25 bp, Probe Sequence
tccagcacccaggccagtattgaga

SEQ ID NO: 289123 - DNA, 25 bp, Probe Sequence
tccagagtccatgccattaagtaca

SEQ ID NO: 289124 - DNA, 25 bp, Probe Sequence
tccacgttctgctcttcaaggagga

SEQ ID NO: 289125 - DNA, 25 bp, Probe Sequence
tccacgttctgctcttcaaggagga

SEQ ID NO: 289126 - DNA, 25 bp, Probe Sequence
tccactttgcctgtgtaagtgaaaa

SEQ ID NO: 289127 - DNA, 25 bp, Probe Sequence
tccaccttgcctatctttgggtaga

SEQ ID NO: 289128 - DNA, 25 bp, Probe Sequence
tccaccttcttacgctatggcaggt

SEQ ID NO: 289129 - DNA, 25 bp, Probe Sequence
tccactccttttcctgcaagagatg

SEQ ID NO: 289130 - DNA, 25 bp, Probe Sequence
tccaccttttcttcacaagcagatc

SEQ ID NO: 289131 - DNA, 25 bp, Probe Sequence
tccatcactttttacataatcggca

SEQ ID NO: 289132 - DNA, 25 bp, Probe Sequence
tccatgcctgttttacagaaacaca

SEQ ID NO: 289133 - DNA, 25 bp, Probe Sequence
tccagactgttctatccaaaaaagt

SEQ ID NO: 289134 - DNA, 25 bp, Probe Sequence
tccgccagaacgaccagaaaaaatg

SEQ ID NO: 289135 - DNA, 25 bp, Probe Sequence
tccgaaatgcactccagaagaaaat

SEQ ID NO: 289136 - DNA, 25 bp, Probe Sequence
tactaaggaccaaacaagataatga

SEQ ID NO: 289137 - DNA, 25 bp, Probe Sequence
tcattaagtgcagaaataactaaga

SEQ ID NO: 289138 - DNA, 25 bp, Probe Sequence
tcctacaggggccaaaaccagagaa

SEQ ID NO: 289139 - DNA, 25 bp, Probe Sequence
tcctccaggtgtcttacttcagaat

SEQ ID NO: 289140 - DNA, 25 bp, Probe Sequence
tccttcagggacagattttccaacc

SEQ ID NO: 289141 - DNA, 25 bp, Probe Sequence
tccttgcggtgaaagcgaattccta

SEQ ID NO: 289142 - DNA, 25 bp, Probe Sequence
tccttcgtgatctggggatgtgcca

SEQ ID NO: 289143 - DNA, 25 bp, Probe Sequence
tccatgtggggcctgcaggcaagtc

SEQ ID NO: 289144 - DNA, 25 bp, Probe Sequence
tccagtgcggagtctgagacccttt

SEQ ID NO: 289145 - DNA, 25 bp, Probe Sequence
tccattcaatggacaagatcccgtt

SEQ ID NO: 289146 - DNA, 25 bp, Probe Sequence
tccatgtccggaaagattctgtttc

SEQ ID NO: 289147 - DNA, 25 bp, Probe Sequence
tacttccggtttcttcatattgagg

SEQ ID NO: 289148 - DNA, 25 bp, Probe Sequence
tccattccttcatgtctttatttag

SEQ ID NO: 289149 - DNA, 25 bp, Probe Sequence
tccttgcctgacagtatttttgaat

SEQ ID NO: 289150 - DNA, 25 bp, Probe Sequence
tccttcctgagttcttggtttcgac

SEQ ID NO: 289151 - DNA, 25 bp, Probe Sequence
tccttctgtaactttggtaactgca

SEQ ID NO: 289152 - DNA, 25 bp, Probe Sequence
tccagtctgtaagatgggggcctgt

SEQ ID NO: 289153 - DNA, 25 bp, Probe Sequence
tccttttggctttcgagggcctgta

SEQ ID NO: 289154 - DNA, 25 bp, Probe Sequence
tccttccttttaaacagggcttgct

SEQ ID NO: 289155 - DNA, 25 bp, Probe Sequence
tccattcctggcataaaaagtcttt

SEQ ID NO: 289156 - DNA, 25 bp, Probe Sequence
tcgaccctgacgtaaccggttatgt

SEQ ID NO: 289157 - DNA, 25 bp, Probe Sequence
tcctcctagacctaacctgactaga

SEQ ID NO: 289158 - DNA, 25 bp, Probe Sequence
tccttccaaccaaatttgactgtcc

SEQ ID NO: 289159 - DNA, 25 bp, Probe Sequence
tcctaccaacactggatctgggact

SEQ ID NO: 289160 - DNA, 25 bp, Probe Sequence
tcctctcccacagaaagcggtgact

SEQ ID NO: 289161 - DNA, 25 bp, Probe Sequence
tcacctgcccaagagtacctttgtg

SEQ ID NO: 289162 - DNA, 25 bp, Probe Sequence
tcacctgcccaagagtacctttgtg

SEQ ID NO: 289163 - DNA, 25 bp, Probe Sequence
tccagttagcaatatcatacctatt

SEQ ID NO: 289164 - DNA, 25 bp, Probe Sequence
tccagttacattgtcttactctctt

SEQ ID NO: 289165 - DNA, 25 bp, Probe Sequence
tccattttaagctttctaccttctt

SEQ ID NO: 289166 - DNA, 25 bp, Probe Sequence
tccattttaaacagataccttccct

SEQ ID NO: 289167 - DNA, 25 bp, Probe Sequence
tcctctttaaaccgtagttggcgca

SEQ ID NO: 289168 - DNA, 25 bp, Probe Sequence
tacttttcctcctgtcatggtggga

SEQ ID NO: 289169 - DNA, 25 bp, Probe Sequence
tattttttcctctccatggtatcag

SEQ ID NO: 289170 - DNA, 25 bp, Probe Sequence
taattgtttttcgctacctacgtgc

SEQ ID NO: 289171 - DNA, 25 bp, Probe Sequence
tcaaactttgtttcctgggtactgg

SEQ ID NO: 289172 - DNA, 25 bp, Probe Sequence
tcaaactttgtttcctgggtactgg

SEQ ID NO: 289173 - DNA, 25 bp, Probe Sequence
tcctctttattttcctgtggttttg

SEQ ID NO: 289174 - DNA, 25 bp, Probe Sequence
tcctttgtatcctcaagggtccttg

SEQ ID NO: 289175 - DNA, 25 bp, Probe Sequence
tcctctttagccacagggaacctcc

SEQ ID NO: 289176 - DNA, 25 bp, Probe Sequence
tcctctttacacactctgttaggtc

SEQ ID NO: 289177 - DNA, 25 bp, Probe Sequence
tccccgtacagctgtctaagggtta

SEQ ID NO: 289178 - DNA, 25 bp, Probe Sequence
tccaccttcagatgtgtctacgtgc

SEQ ID NO: 289179 - DNA, 25 bp, Probe Sequence
tccaccttcagatgtgtctacgtgc

SEQ ID NO: 289180 - DNA, 25 bp, Probe Sequence
tccaccattcaggaggttatcagaa

SEQ ID NO: 289181 - DNA, 25 bp, Probe Sequence
tccaccatggtggatggactgaagt

SEQ ID NO: 289182 - DNA, 25 bp, Probe Sequence
tccagcctggcgacggaggaatgct

SEQ ID NO: 289183 - DNA, 25 bp, Probe Sequence
tccacctgacaaagggctgatattc

SEQ ID NO: 289184 - DNA, 25 bp, Probe Sequence
tccaccagaacttgaggcaaatcgt

SEQ ID NO: 289185 - DNA, 25 bp, Probe Sequence
tccacgcacacagtgagcagctgca

SEQ ID NO: 289186 - DNA, 25 bp, Probe Sequence
tccaccagagagtagcacatgcagc

SEQ ID NO: 289187 - DNA, 25 bp, Probe Sequence
tccagccaacatgcaaggctgcagc

SEQ ID NO: 289188 - DNA, 25 bp, Probe Sequence
tccatctacctgcaggtgctgactg

SEQ ID NO: 289189 - DNA, 25 bp, Probe Sequence
tccagctactcagtgagatgggaga

SEQ ID NO: 289190 - DNA, 25 bp, Probe Sequence
tccagctcactcatcaatggggcca

SEQ ID NO: 289191 - DNA, 25 bp, Probe Sequence
tccaccacaaccaatgggtccagga

SEQ ID NO: 289192 - DNA, 25 bp, Probe Sequence
tccatccaaggcattgggaccatgg

SEQ ID NO: 289193 - DNA, 25 bp, Probe Sequence
tccaggcctgaccctgggagacagg

SEQ ID NO: 289194 - DNA, 25 bp, Probe Sequence
tccatcctggcattccgggagaagg

SEQ ID NO: 289195 - DNA, 25 bp, Probe Sequence
tccatccttgcatcactggggagga

SEQ ID NO: 289196 - DNA, 25 bp, Probe Sequence
tcctccttgctatgccggagactga

SEQ ID NO: 289197 - DNA, 25 bp, Probe Sequence
tcctcctacgctggatcggaagcag

SEQ ID NO: 289198 - DNA, 25 bp, Probe Sequence
tccatgcttaccacagggaggcaag

SEQ ID NO: 289199 - DNA, 25 bp, Probe Sequence
tccagcttgcccaataaggatttag

SEQ ID NO: 289200 - DNA, 25 bp, Probe Sequence
tccttccccgtcaaggcattgtagg

SEQ ID NO: 289201 - DNA, 25 bp, Probe Sequence
tccttccccattgaggttggggtag

SEQ ID NO: 289202 - DNA, 25 bp, Probe Sequence
tccattcctcactgaaggtggggtt

SEQ ID NO: 289203 - DNA, 25 bp, Probe Sequence
tccattcccaccttaggagggctag

SEQ ID NO: 289204 - DNA, 25 bp, Probe Sequence
tcctatgccctgccctaaagggctc

SEQ ID NO: 289205 - DNA, 25 bp, Probe Sequence
tccataacgctcctcatactaggcc

SEQ ID NO: 289206 - DNA, 25 bp, Probe Sequence
tccatccctcttccatactgaggtg

SEQ ID NO: 289207 - DNA, 25 bp, Probe Sequence
tccagtccttgtcttcatgtggtta

SEQ ID NO: 289208 - DNA, 25 bp, Probe Sequence
tccagtctttgttttgcaggtatag

SEQ ID NO: 289209 - DNA, 25 bp, Probe Sequence
tccagtctcttgaaaacacgggagg

SEQ ID NO: 289210 - DNA, 25 bp, Probe Sequence
tccagtcctgataaagagcatagtg

SEQ ID NO: 289211 - DNA, 25 bp, Probe Sequence
tccagtgcctgacttgggataggac

SEQ ID NO: 289212 - DNA, 25 bp, Probe Sequence
tccaggacagcaattgtggtagatg

SEQ ID NO: 289213 - DNA, 25 bp, Probe Sequence
tccaggtacactcctgggagttttg

SEQ ID NO: 289214 - DNA, 25 bp, Probe Sequence
tcctttgacgctcctagtagttttg

SEQ ID NO: 289215 - DNA, 25 bp, Probe Sequence
tcctttgacgctcctagtagttttg

SEQ ID NO: 289216 - DNA, 25 bp, Probe Sequence
tcctttaccattaagccaggcttgt

SEQ ID NO: 289217 - DNA, 25 bp, Probe Sequence
tccttttgaattttgcacagcccta

SEQ ID NO: 289218 - DNA, 25 bp, Probe Sequence
tccagtttggcagtgttacaacgta

SEQ ID NO: 289219 - DNA, 25 bp, Probe Sequence
tccagatttgtcgtgttacagttat

SEQ ID NO: 289220 - DNA, 25 bp, Probe Sequence
tccagtatctccgtgattaccttca

SEQ ID NO: 289221 - DNA, 25 bp, Probe Sequence
tccagtatctccgtgattaccttca

SEQ ID NO: 289222 - DNA, 25 bp, Probe Sequence
tccatttctgccacatatgaccttg

SEQ ID NO: 289223 - DNA, 25 bp, Probe Sequence
tccatatctcattgttatttacttg

SEQ ID NO: 289224 - DNA, 25 bp, Probe Sequence
tccagacatcattgctttgtgccaa

SEQ ID NO: 289225 - DNA, 25 bp, Probe Sequence
tccagtcacactgcagtgtgccaac

SEQ ID NO: 289226 - DNA, 25 bp, Probe Sequence
tccagtcacagctcagacttcatag

SEQ ID NO: 289227 - DNA, 25 bp, Probe Sequence
tccattccatgctgctgtgttacaa

SEQ ID NO: 289228 - DNA, 25 bp, Probe Sequence
tccatctccagaagttttccatctt

SEQ ID NO: 289229 - DNA, 25 bp, Probe Sequence
tccaggccatgattgatccttccat

SEQ ID NO: 289230 - DNA, 25 bp, Probe Sequence
tccatggattcaatggactcatcca

SEQ ID NO: 289231 - DNA, 25 bp, Probe Sequence
tccatggctttaggtatcaccactg

SEQ ID NO: 289232 - DNA, 25 bp, Probe Sequence
tccatggttggccaattcctagctg

SEQ ID NO: 289233 - DNA, 25 bp, Probe Sequence
tccatggtactccagttacaattga

SEQ ID NO: 289234 - DNA, 25 bp, Probe Sequence
tcctaggacccagttcctcatgtaa

SEQ ID NO: 289235 - DNA, 25 bp, Probe Sequence
tccgcagtaatatcttccctctgat

SEQ ID NO: 289236 - DNA, 25 bp, Probe Sequence
tcctagtaatactttgcctttttca

SEQ ID NO: 289237 - DNA, 25 bp, Probe Sequence
tcctttttaactgcactttctttat

SEQ ID NO: 289238 - DNA, 25 bp, Probe Sequence
tccttcctaaagagcacttttgtat

SEQ ID NO: 289239 - DNA, 25 bp, Probe Sequence
tccttccgtcaagttgtcttatttt

SEQ ID NO: 289240 - DNA, 25 bp, Probe Sequence
tccttactctcaccttttatgagat

SEQ ID NO: 289241 - DNA, 25 bp, Probe Sequence
tccatcaaccttcttattaatgtca

SEQ ID NO: 289242 - DNA, 25 bp, Probe Sequence
tcctcacacctatggtttttttact

SEQ ID NO: 289243 - DNA, 25 bp, Probe Sequence
tcctagaactagggtcatttcaatt

SEQ ID NO: 289244 - DNA, 25 bp, Probe Sequence
tcctgaagatctctaccatttaatt

SEQ ID NO: 289245 - DNA, 25 bp, Probe Sequence
tccatatatgttataccttgtatga

SEQ ID NO: 289246 - DNA, 25 bp, Probe Sequence
tccagaaggctcaaacctgatctga

SEQ ID NO: 289247 - DNA, 25 bp, Probe Sequence
tccagtcttctcatcatccaactga

SEQ ID NO: 289248 - DNA, 25 bp, Probe Sequence
tccaggttctcatcagcagcaacga

SEQ ID NO: 289249 - DNA, 25 bp, Probe Sequence
tccagaccatcttcaccacaattgg

SEQ ID NO: 289250 - DNA, 25 bp, Probe Sequence
tccagatctataattgcgcaatatt

SEQ ID NO: 289251 - DNA, 25 bp, Probe Sequence
tccagctgcttaacttcattttatt

SEQ ID NO: 289252 - DNA, 25 bp, Probe Sequence
tccagcttctaagttcagttctgca

SEQ ID NO: 289253 - DNA, 25 bp, Probe Sequence
tccatgtctctgagcattagatttc

SEQ ID NO: 289254 - DNA, 25 bp, Probe Sequence
tccatgttccatttgtagatcttta

SEQ ID NO: 289255 - DNA, 25 bp, Probe Sequence
tccagtgcccagtgtatgagtgtgt

SEQ ID NO: 289256 - DNA, 25 bp, Probe Sequence
tccatcatcccagtggtcatggctg

SEQ ID NO: 289257 - DNA, 25 bp, Probe Sequence
tccattcccaatctagtgctagatg

SEQ ID NO: 289258 - DNA, 25 bp, Probe Sequence
tccattcccaagatgcctgatcaga

SEQ ID NO: 289259 - DNA, 25 bp, Probe Sequence
tccattaccaagagctcatgccacc

SEQ ID NO: 289260 - DNA, 25 bp, Probe Sequence
tccattacctggcactagcaacatt

SEQ ID NO: 289261 - DNA, 25 bp, Probe Sequence
tcctcaaccttggcaccagaaacat

SEQ ID NO: 289262 - DNA, 25 bp, Probe Sequence
tccttccctgaaaccagcaaacacc

SEQ ID NO: 289263 - DNA, 25 bp, Probe Sequence
tccttcgttataaccacaatgagat

SEQ ID NO: 289264 - DNA, 25 bp, Probe Sequence
tccttacctattccaacctaatgat

SEQ ID NO: 289265 - DNA, 25 bp, Probe Sequence
tcctgtcaccataggcaataccttt

SEQ ID NO: 289266 - DNA, 25 bp, Probe Sequence
tccagctgggcattgaggaagcctt

SEQ ID NO: 289267 - DNA, 25 bp, Probe Sequence
tccgtggcgcctcggaggcgttcag

SEQ ID NO: 289268 - DNA, 25 bp, Probe Sequence
tccagagacgcctggatggctctgt

SEQ ID NO: 289269 - DNA, 25 bp, Probe Sequence
tccagaccaggatggctgggcgagc

SEQ ID NO: 289270 - DNA, 25 bp, Probe Sequence
tccagcccaggaaacttgtgcaagc

SEQ ID NO: 289271 - DNA, 25 bp, Probe Sequence
tccagcctcacgttcacttaggcac

SEQ ID NO: 289272 - DNA, 25 bp, Probe Sequence
tcctcaatcgagttcctctacgaag

SEQ ID NO: 289273 - DNA, 25 bp, Probe Sequence
tccttacggccaccttacagaggtt

SEQ ID NO: 289274 - DNA, 25 bp, Probe Sequence
tccatcatgaagtgtgacgtggaca

SEQ ID NO: 289275 - DNA, 25 bp, Probe Sequence
tccatcatgaagatctacacgttca

SEQ ID NO: 289276 - DNA, 25 bp, Probe Sequence
tccagcagaattactacttgtgata

SEQ ID NO: 289277 - DNA, 25 bp, Probe Sequence
tccagatgaattttatttggcataa

SEQ ID NO: 289278 - DNA, 25 bp, Probe Sequence
tccagaattttgaattaggagatca

SEQ ID NO: 289279 - DNA, 25 bp, Probe Sequence
tccggtttttgtcagtacatctatg

SEQ ID NO: 289280 - DNA, 25 bp, Probe Sequence
tcccctctttttgcactaattgtgg

SEQ ID NO: 289281 - DNA, 25 bp, Probe Sequence
tccagctctgatatcttcgcactga

SEQ ID NO: 289282 - DNA, 25 bp, Probe Sequence
tccagtgcaaggacgtcctgctgca

SEQ ID NO: 289283 - DNA, 25 bp, Probe Sequence
tccatgagaagtaccgctctgcagc

SEQ ID NO: 289284 - DNA, 25 bp, Probe Sequence
tccagatgttatgctcctgctgatc

SEQ ID NO: 289285 - DNA, 25 bp, Probe Sequence
tccaggctctataccctggtgctgg

SEQ ID NO: 289286 - DNA, 25 bp, Probe Sequence
tccagactgtcaagagcctgcggct

SEQ ID NO: 289287 - DNA, 25 bp, Probe Sequence
tccagcctggcaagagaacgagact

SEQ ID NO: 289288 - DNA, 25 bp, Probe Sequence
tccagcctgggcgacagagcgagac

SEQ ID NO: 289289 - DNA, 25 bp, Probe Sequence
tccagcctgggctacagagtgagac

SEQ ID NO: 289290 - DNA, 25 bp, Probe Sequence
tccagcctggacaatgagagtgaaa

SEQ ID NO: 289291 - DNA, 25 bp, Probe Sequence
tccagcctggacaacaagagcgaaa

SEQ ID NO: 289292 - DNA, 25 bp, Probe Sequence
tccagcctggacaacaagagcgaaa

SEQ ID NO: 289293 - DNA, 25 bp, Probe Sequence
tccagcctgggcaacaagtcaaaaa

SEQ ID NO: 289294 - DNA, 25 bp, Probe Sequence
tccagcctgggtgacaagagcaaaa

SEQ ID NO: 289295 - DNA, 25 bp, Probe Sequence
tccagcctgggtgatagagcaagaa

SEQ ID NO: 289296 - DNA, 25 bp, Probe Sequence
tccagcctgggtgacagagcaagac

SEQ ID NO: 289297 - DNA, 25 bp, Probe Sequence
tccagcctgggtgacagagcaagat

SEQ ID NO: 289298 - DNA, 25 bp, Probe Sequence
tccagcttgggtgacagagcaagac

SEQ ID NO: 289299 - DNA, 25 bp, Probe Sequence
tccagcgtgggcaacagagtaagac

SEQ ID NO: 289300 - DNA, 25 bp, Probe Sequence
tccaggctgcgggcaagagtccaga

SEQ ID NO: 289301 - DNA, 25 bp, Probe Sequence
tccagaccaggactgaaatccagag

SEQ ID NO: 289302 - DNA, 25 bp, Probe Sequence
tccagaccgcggcctaataatgagt

SEQ ID NO: 289303 - DNA, 25 bp, Probe Sequence
tccatgtcctgggcctaaaatcgta

SEQ ID NO: 289304 - DNA, 25 bp, Probe Sequence
tccttgccaggacctagagtttgtt

SEQ ID NO: 289305 - DNA, 25 bp, Probe Sequence
tccttcctgggcatggagtcctgtg

SEQ ID NO: 289306 - DNA, 25 bp, Probe Sequence
tccttcttgggcctggaggttagca

SEQ ID NO: 289307 - DNA, 25 bp, Probe Sequence
tccttctgtccatcgtgggtaacag

SEQ ID NO: 289308 - DNA, 25 bp, Probe Sequence
tccttttccacagattgtctaaagc

SEQ ID NO: 289309 - DNA, 25 bp, Probe Sequence
tcctacctcccggcatttaaagtgt

SEQ ID NO: 289310 - DNA, 25 bp, Probe Sequence
tcctacctcccggcatttaaagtgt

SEQ ID NO: 289311 - DNA, 25 bp, Probe Sequence
tcctacctcccggcatttaaagtga

SEQ ID NO: 289312 - DNA, 25 bp, Probe Sequence
tcctaaccctctagctttaattgga

SEQ ID NO: 289313 - DNA, 25 bp, Probe Sequence
tcctgaacctttaggcttgtctcgg

SEQ ID NO: 289314 - DNA, 25 bp, Probe Sequence
tttgtaccttttagcctggctggta

SEQ ID NO: 289315 - DNA, 25 bp, Probe Sequence
tcctctacctatttccacagttggt

SEQ ID NO: 289316 - DNA, 25 bp, Probe Sequence
tcctataagcttttccacttgatgg

SEQ ID NO: 289317 - DNA, 25 bp, Probe Sequence
tccttgcattttgacatccctgaag

SEQ ID NO: 289318 - DNA, 25 bp, Probe Sequence
tccttctgttgatgacttcgtaagt

SEQ ID NO: 289319 - DNA, 25 bp, Probe Sequence
tccatttgagtgagttcccttagtg

SEQ ID NO: 289320 - DNA, 25 bp, Probe Sequence
tcctttgagtgtatacccagtaatg

SEQ ID NO: 289321 - DNA, 25 bp, Probe Sequence
tcctttggtatcagacccgaagcgc

SEQ ID NO: 289322 - DNA, 25 bp, Probe Sequence
tcctttcctccaatgaaccaaaccg

SEQ ID NO: 289323 - DNA, 25 bp, Probe Sequence
tccttttgcctttgagaccaaacca

SEQ ID NO: 289324 - DNA, 25 bp, Probe Sequence
tccttgttaccttcaggcagaatta

SEQ ID NO: 289325 - DNA, 25 bp, Probe Sequence
tcctccttcccttacggaattacat

SEQ ID NO: 289326 - DNA, 25 bp, Probe Sequence
tcctccttcccttacggaattacat

SEQ ID NO: 289327 - DNA, 25 bp, Probe Sequence
tcctcacttcccagacggggtagcg

SEQ ID NO: 289328 - DNA, 25 bp, Probe Sequence
tcctcctaccaccgaagtggttagg

SEQ ID NO: 289329 - DNA, 25 bp, Probe Sequence
tccagacgaccagtggatactgagg

SEQ ID NO: 289330 - DNA, 25 bp, Probe Sequence
tccagggaaccttcatgactgttgg

SEQ ID NO: 289331 - DNA, 25 bp, Probe Sequence
tccagatggagtcgctgacataggt

SEQ ID NO: 289332 - DNA, 25 bp, Probe Sequence
tccagatatggtcgctgctcaatgg

SEQ ID NO: 289333 - DNA, 25 bp, Probe Sequence
tccagaagctcacctctctagtgta

SEQ ID NO: 289334 - DNA, 25 bp, Probe Sequence
tccaggtcctgccttgtgagatgtg

SEQ ID NO: 289335 - DNA, 25 bp, Probe Sequence
tcctactcctgccatgcattgaagg

SEQ ID NO: 289336 - DNA, 25 bp, Probe Sequence
tccataccacactggtgccagggga

SEQ ID NO: 289337 - DNA, 25 bp, Probe Sequence
tcgtcttctccaaagtcaaggggaa

SEQ ID NO: 289338 - DNA, 25 bp, Probe Sequence
tcctttcccatgaaccctggagggt

SEQ ID NO: 289339 - DNA, 25 bp, Probe Sequence
tcctaggcccaggacccattatggg

SEQ ID NO: 289340 - DNA, 25 bp, Probe Sequence
tcctattcccagtacagccagtacc

SEQ ID NO: 289341 - DNA, 25 bp, Probe Sequence
tcctttcaccagtacaacactgtct

SEQ ID NO: 289342 - DNA, 25 bp, Probe Sequence
tcctttattgagtaccaagccatgt

SEQ ID NO: 289343 - DNA, 25 bp, Probe Sequence
tccatttcttacacacactgccaga

SEQ ID NO: 289344 - DNA, 25 bp, Probe Sequence
tccttgtcttaaatactgagctcag

SEQ ID NO: 289345 - DNA, 25 bp, Probe Sequence
tccagattgttctatgagacaggta

SEQ ID NO: 289346 - DNA, 25 bp, Probe Sequence
tccagttctgacctgagcacggttt

SEQ ID NO: 289347 - DNA, 25 bp, Probe Sequence
tccagttctgacctgagcacggttt

SEQ ID NO: 289348 - DNA, 25 bp, Probe Sequence
tccagttctcatctaccggatttca

SEQ ID NO: 289349 - DNA, 25 bp, Probe Sequence
tccattaccatcaatcctggttttg

SEQ ID NO: 289350 - DNA, 25 bp, Probe Sequence
tccattcatttccatactggctttt

SEQ ID NO: 289351 - DNA, 25 bp, Probe Sequence
tccattatttctactgcttacactt

SEQ ID NO: 289352 - DNA, 25 bp, Probe Sequence
tccatcaacttgcttgtttgccttc

SEQ ID NO: 289353 - DNA, 25 bp, Probe Sequence
tccagcatagcttggtcttatttct

SEQ ID NO: 289354 - DNA, 25 bp, Probe Sequence
tccatgactgctttactgtattttt

SEQ ID NO: 289355 - DNA, 25 bp, Probe Sequence
tccatatctgttaagtatacatgta

SEQ ID NO: 289356 - DNA, 25 bp, Probe Sequence
tcctttttaatgttaatgtgttgac

SEQ ID NO: 289357 - DNA, 25 bp, Probe Sequence
tccttctttcctttttgctgtaggc

SEQ ID NO: 289358 - DNA, 25 bp, Probe Sequence
tccttcgattactattcgtgcctag

SEQ ID NO: 289359 - DNA, 25 bp, Probe Sequence
tcctcctttggcaacggtgacttga

SEQ ID NO: 289360 - DNA, 25 bp, Probe Sequence
tcctttaaggcagaggctggtcgaa

SEQ ID NO: 289361 - DNA, 25 bp, Probe Sequence
tcctttaattcagaggttcctaact

SEQ ID NO: 289362 - DNA, 25 bp, Probe Sequence
tccttttatccccaggaatcaataa

SEQ ID NO: 289363 - DNA, 25 bp, Probe Sequence
tcctttttctacactaaaacaatat

SEQ ID NO: 289364 - DNA, 25 bp, Probe Sequence
tccttttcccctgatcaaaaaaatg

SEQ ID NO: 289365 - DNA, 25 bp, Probe Sequence
tccagttgtgcagccagaatgaaat

SEQ ID NO: 289366 - DNA, 25 bp, Probe Sequence
tccagttgctgttaagaatgatgta

SEQ ID NO: 289367 - DNA, 25 bp, Probe Sequence
tccagtccagctttggcagcttgta

SEQ ID NO: 289368 - DNA, 25 bp, Probe Sequence
tccatgtgccttttggatctttgca

SEQ ID NO: 289369 - DNA, 25 bp, Probe Sequence
tccataggctcttggtgcactgttt

SEQ ID NO: 289370 - DNA, 25 bp, Probe Sequence
tccagttgctgctgatgctcatctt

SEQ ID NO: 289371 - DNA, 25 bp, Probe Sequence
tccagatggcatggttgctctattg

SEQ ID NO: 289372 - DNA, 25 bp, Probe Sequence
tccagatgagccctagcctcataac

SEQ ID NO: 289373 - DNA, 25 bp, Probe Sequence
tccagatgcaccagctcctattaat

SEQ ID NO: 289374 - DNA, 25 bp, Probe Sequence
tccatatcccattccctgtagaaaa

SEQ ID NO: 289375 - DNA, 25 bp, Probe Sequence
tcctgcatccctatctgcgggaaaa

SEQ ID NO: 289376 - DNA, 25 bp, Probe Sequence
tcctagccaatggtctggacaacaa

SEQ ID NO: 289377 - DNA, 25 bp, Probe Sequence
tcctggctacggtcttccaaaagtc

SEQ ID NO: 289378 - DNA, 25 bp, Probe Sequence
tcctcgtcacggttatcccaggagg

SEQ ID NO: 289379 - DNA, 25 bp, Probe Sequence
tcctcccccagagatctggctggag

SEQ ID NO: 289380 - DNA, 25 bp, Probe Sequence
tccatcccaggctacaacaagctgt

SEQ ID NO: 289381 - DNA, 25 bp, Probe Sequence
tccatctcgagggactataacctga

SEQ ID NO: 289382 - DNA, 25 bp, Probe Sequence
tccatcctggccaagctgaaacgca

SEQ ID NO: 289383 - DNA, 25 bp, Probe Sequence
tccttgctgcgaaagtgctcaacct

SEQ ID NO: 289384 - DNA, 25 bp, Probe Sequence
tccatcagcatggagacgctgtcag

SEQ ID NO: 289385 - DNA, 25 bp, Probe Sequence
tccatcctcagagcaggtcgaaaat

SEQ ID NO: 289386 - DNA, 25 bp, Probe Sequence
tccattgccatatcggctcgcaaat

SEQ ID NO: 289387 - DNA, 25 bp, Probe Sequence
tccaggcgcagagcgcactgcagca

SEQ ID NO: 289388 - DNA, 25 bp, Probe Sequence
tccagaggcagttctcactgtgaca

SEQ ID NO: 289389 - DNA, 25 bp, Probe Sequence
tccagagcaggtggtcggtggcatc

SEQ ID NO: 289390 - DNA, 25 bp, Probe Sequence
tctgggcaggaaccgtgggatcgcc

SEQ ID NO: 289391 - DNA, 25 bp, Probe Sequence
ttcggaaaagccccgtgtggccaag

SEQ ID NO: 289392 - DNA, 25 bp, Probe Sequence
tccagagacaatggccccgatggga

SEQ ID NO: 289393 - DNA, 25 bp, Probe Sequence
tcctgagcgcaagtactccgtgtgg

SEQ ID NO: 289394 - DNA, 25 bp, Probe Sequence
tccatggccaggaagccctgtgggc

SEQ ID NO: 289395 - DNA, 25 bp, Probe Sequence
tccagtgacagggatccagttcagg

SEQ ID NO: 289396 - DNA, 25 bp, Probe Sequence
tccattggccaggcaccagagtcca

SEQ ID NO: 289397 - DNA, 25 bp, Probe Sequence
tccttggcccaatgtagatgctcac

SEQ ID NO: 289398 - DNA, 25 bp, Probe Sequence
tccttgtgccaaacgtctggccaat

SEQ ID NO: 289399 - DNA, 25 bp, Probe Sequence
tcctttcccttggagctggacatga

SEQ ID NO: 289400 - DNA, 25 bp, Probe Sequence
tccagttcctctttggtgtacagac

SEQ ID NO: 289401 - DNA, 25 bp, Probe Sequence
tccagttgcctctgaagttcacagg

SEQ ID NO: 289402 - DNA, 25 bp, Probe Sequence
tccagattttctgacagctgtccat

SEQ ID NO: 289403 - DNA, 25 bp, Probe Sequence
tctagaccatttggcatcggctcct

SEQ ID NO: 289404 - DNA, 25 bp, Probe Sequence
tccataccagtaaactggctcatct

SEQ ID NO: 289405 - DNA, 25 bp, Probe Sequence
tcctcaccgtgaataagacttacaa

SEQ ID NO: 289406 - DNA, 25 bp, Probe Sequence
tcctcccagttcaaggacctcaaag

SEQ ID NO: 289407 - DNA, 25 bp, Probe Sequence
tccttgttgttggggaactcaatca

SEQ ID NO: 289408 - DNA, 25 bp, Probe Sequence
tccatctgcttgctgcggtgcaaga

SEQ ID NO: 289409 - DNA, 25 bp, Probe Sequence
tccatctgcctcagggatcacgaga

SEQ ID NO: 289410 - DNA, 25 bp, Probe Sequence
tccatctgccccaggacaagagcaa

SEQ ID NO: 289411 - DNA, 25 bp, Probe Sequence
tccattcaactctgtgacacagcac

SEQ ID NO: 289412 - DNA, 25 bp, Probe Sequence
tctctgaagacctgatgacccagct

SEQ ID NO: 289413 - DNA, 25 bp, Probe Sequence
tcctgcaagtcctgtaacctgtaca

SEQ ID NO: 289414 - DNA, 25 bp, Probe Sequence
tcctaacccaagcatatctttactt

SEQ ID NO: 289415 - DNA, 25 bp, Probe Sequence
tccttccgccaagataattatcact

SEQ ID NO: 289416 - DNA, 25 bp, Probe Sequence
tccttccagggagctcttttaatct

SEQ ID NO: 289417 - DNA, 25 bp, Probe Sequence
tccttcaagaaacctttttacacat

SEQ ID NO: 289418 - DNA, 25 bp, Probe Sequence
tccttcacaactacggcgtttacac

SEQ ID NO: 289419 - DNA, 25 bp, Probe Sequence
tcctttgacactacgcacttttata

SEQ ID NO: 289420 - DNA, 25 bp, Probe Sequence
tcctgtacacagttccactattaaa

SEQ ID NO: 289421 - DNA, 25 bp, Probe Sequence
tcgtgaccaatgttacagtaatttc

SEQ ID NO: 289422 - DNA, 25 bp, Probe Sequence
tccatgaccaacttaatgtgaatga

SEQ ID NO: 289423 - DNA, 25 bp, Probe Sequence
tccatggcaccgtcaaggctgagaa

SEQ ID NO: 289424 - DNA, 25 bp, Probe Sequence
tccatggaacctgacgtagctgcaa

SEQ ID NO: 289425 - DNA, 25 bp, Probe Sequence
tccattagaagctgacgttctgcag

SEQ ID NO: 289426 - DNA, 25 bp, Probe Sequence
tccagttgtatggagcctcttctgc

SEQ ID NO: 289427 - DNA, 25 bp, Probe Sequence
tccagggcacaggctgccttttgga

SEQ ID NO: 289428 - DNA, 25 bp, Probe Sequence
tccagggcacaggctgccttttgga

SEQ ID NO: 289429 - DNA, 25 bp, Probe Sequence
tccaggaacgcctgcttcttgagat

SEQ ID NO: 289430 - DNA, 25 bp, Probe Sequence
tccaggaacgcctgcttcttgagat

SEQ ID NO: 289431 - DNA, 25 bp, Probe Sequence
tccagtaaagcctgctgatcttaag

SEQ ID NO: 289432 - DNA, 25 bp, Probe Sequence
tccagtgatgaagtttgtgacgtac

SEQ ID NO: 289433 - DNA, 25 bp, Probe Sequence
tccagtgatagcatccaatgaccta

SEQ ID NO: 289434 - DNA, 25 bp, Probe Sequence
tcgatattgagcgtccaacctatac

SEQ ID NO: 289435 - DNA, 25 bp, Probe Sequence
tcctattggagtgcaatccttactt

SEQ ID NO: 289436 - DNA, 25 bp, Probe Sequence
tcctttggagttactgcagttactg

SEQ ID NO: 289437 - DNA, 25 bp, Probe Sequence
tccttctggaggacacacagtctca

SEQ ID NO: 289438 - DNA, 25 bp, Probe Sequence
tcctttgcaagagcgcagaccaccg

SEQ ID NO: 289439 - DNA, 25 bp, Probe Sequence
tcgcaattaaggagcaagcccccat

SEQ ID NO: 289440 - DNA, 25 bp, Probe Sequence
tcgaacggactgtgaatccgctctt

SEQ ID NO: 289441 - DNA, 25 bp, Probe Sequence
tcatttcggacggatggatcccttt

SEQ ID NO: 289442 - DNA, 25 bp, Probe Sequence
tcctacaggactgtctgtctcctgc

SEQ ID NO: 289443 - DNA, 25 bp, Probe Sequence
tcctaaggtcttagcatccacctga

SEQ ID NO: 289444 - DNA, 25 bp, Probe Sequence
tcctatgggtgttatcacctagctg

SEQ ID NO: 289445 - DNA, 25 bp, Probe Sequence
tcctaggtatataatcaccttttaa

SEQ ID NO: 289446 - DNA, 25 bp, Probe Sequence
tcctcggtcaataaaggccctaaat

SEQ ID NO: 289447 - DNA, 25 bp, Probe Sequence
tcctcaggactattaacccctgcaa

SEQ ID NO: 289448 - DNA, 25 bp, Probe Sequence
tcctaatagtagaagaaccctccat

SEQ ID NO: 289449 - DNA, 25 bp, Probe Sequence
tcctagcaactatataacctccctc

SEQ ID NO: 289450 - DNA, 25 bp, Probe Sequence
tccttccaatagttagatctaccct

SEQ ID NO: 289451 - DNA, 25 bp, Probe Sequence
tccttcaaaatgtctactgttcacg

SEQ ID NO: 289452 - DNA, 25 bp, Probe Sequence
tccttcaggaattttgcagttcaat

SEQ ID NO: 289453 - DNA, 25 bp, Probe Sequence
tccttgcatggctcattaggttcaa

SEQ ID NO: 289454 - DNA, 25 bp, Probe Sequence
tcctttgccagcgtggatttctcaa

SEQ ID NO: 289455 - DNA, 25 bp, Probe Sequence
tccatttcccagtgcatacatctaa

SEQ ID NO: 289456 - DNA, 25 bp, Probe Sequence
tccattttcacacttcacagtcatg

SEQ ID NO: 289457 - DNA, 25 bp, Probe Sequence
tccattattccatatgacagttgtt

SEQ ID NO: 289458 - DNA, 25 bp, Probe Sequence
tccatggttccacagaagctttgtt

SEQ ID NO: 289459 - DNA, 25 bp, Probe Sequence
tccttgttcttttgaagcttgtgct

SEQ ID NO: 289460 - DNA, 25 bp, Probe Sequence
tccattccctttgtatgctgtactg

SEQ ID NO: 289461 - DNA, 25 bp, Probe Sequence
tccatggactcttgtttatggtact

SEQ ID NO: 289462 - DNA, 25 bp, Probe Sequence
tccaggcctccacatttgagtttga

SEQ ID NO: 289463 - DNA, 25 bp, Probe Sequence
tccaggccctgcaaactatagtttg

SEQ ID NO: 289464 - DNA, 25 bp, Probe Sequence
tccaggcagccgacattctgttgta

SEQ ID NO: 289465 - DNA, 25 bp, Probe Sequence
tccaggatgctcgctgggattccca

SEQ ID NO: 289466 - DNA, 25 bp, Probe Sequence
tccatctgtcctgtgtggaatccag

SEQ ID NO: 289467 - DNA, 25 bp, Probe Sequence
tccatctgtcctgtgtggaatccag

SEQ ID NO: 289468 - DNA, 25 bp, Probe Sequence
tccatcagtctgatttaggcacaag

SEQ ID NO: 289469 - DNA, 25 bp, Probe Sequence
tccatcagatcatgtgttctggaga

SEQ ID NO: 289470 - DNA, 25 bp, Probe Sequence
tccatcttcgcggtagctgggaccg

SEQ ID NO: 289471 - DNA, 25 bp, Probe Sequence
tccatctgccagaatctagtgggat

SEQ ID NO: 289472 - DNA, 25 bp, Probe Sequence
tccatgctggagactctgcgggagc

SEQ ID NO: 289473 - DNA, 25 bp, Probe Sequence
tccaggctgagatgtcggagcacct

SEQ ID NO: 289474 - DNA, 25 bp, Probe Sequence
tccatgggatgatgacagcggccgc

SEQ ID NO: 289475 - DNA, 25 bp, Probe Sequence
tcctcggatacgacactgtccaggt

SEQ ID NO: 289476 - DNA, 25 bp, Probe Sequence
tcctcaagtcatgaccgtcacactg

SEQ ID NO: 289477 - DNA, 25 bp, Probe Sequence
tccgcaagtacaaccgcttcgagaa

SEQ ID NO: 289478 - DNA, 25 bp, Probe Sequence
tccgcaagtacaaccgcttcgagaa

SEQ ID NO: 289479 - DNA, 25 bp, Probe Sequence
tccgtagtcaccgacgagaccagaa

SEQ ID NO: 289480 - DNA, 25 bp, Probe Sequence
tcctgctcagtacgagaggaaccgc

SEQ ID NO: 289481 - DNA, 25 bp, Probe Sequence
tcctcacagttgccatgtagacccc

SEQ ID NO: 289482 - DNA, 25 bp, Probe Sequence
tcctcacagttgccatgtagacccc

SEQ ID NO: 289483 - DNA, 25 bp, Probe Sequence
tccttattctgtcctgagaccacgg

SEQ ID NO: 289484 - DNA, 25 bp, Probe Sequence
tccttgagttgtgctgaatgcccca

SEQ ID NO: 289485 - DNA, 25 bp, Probe Sequence
tcctaagtctgtggctcgtatcgcc

SEQ ID NO: 289486 - DNA, 25 bp, Probe Sequence
tcctaagtctgtggctcgtatcgcc

SEQ ID NO: 289487 - DNA, 25 bp, Probe Sequence
tcctagacaaggcccgtatcagcac

SEQ ID NO: 289488 - DNA, 25 bp, Probe Sequence
tcctcataaaccacagatacagatc

SEQ ID NO: 289489 - DNA, 25 bp, Probe Sequence
tctctaaaaccaggagttgaatttt

SEQ ID NO: 289490 - DNA, 25 bp, Probe Sequence
tcctccaccacaaagggctggactt

SEQ ID NO: 289491 - DNA, 25 bp, Probe Sequence
tccattcctatttagagggagtcct

SEQ ID NO: 289492 - DNA, 25 bp, Probe Sequence
tccattccctggcagtgaggagccc

SEQ ID NO: 289493 - DNA, 25 bp, Probe Sequence
tcctcaccagtggcaagtgcaggca

SEQ ID NO: 289494 - DNA, 25 bp, Probe Sequence
tccatacctccatcactgcatggag

SEQ ID NO: 289495 - DNA, 25 bp, Probe Sequence
tcctcagcttcttgcccataaatgg

SEQ ID NO: 289496 - DNA, 25 bp, Probe Sequence
tcctattttatgcccattatccaag

SEQ ID NO: 289497 - DNA, 25 bp, Probe Sequence
tccgtttttggcctctactaaagag

SEQ ID NO: 289498 - DNA, 25 bp, Probe Sequence
tcctatttttagctttagcaaagag

SEQ ID NO: 289499 - DNA, 25 bp, Probe Sequence
tccttcctttaatcttatgcaaaag

SEQ ID NO: 289500 - DNA, 25 bp, Probe Sequence
tccttcaccatacaccttatcaaaa

SEQ ID NO: 289501 - DNA, 25 bp, Probe Sequence
tccattttactggactttcataaaa

SEQ ID NO: 289502 - DNA, 25 bp, Probe Sequence
tccttttttgtgcctttcatcagaa

SEQ ID NO: 289503 - DNA, 25 bp, Probe Sequence
tcctttgtctttctttgtcattcag

SEQ ID NO: 289504 - DNA, 25 bp, Probe Sequence
tccatttttctccatggtgttttag

SEQ ID NO: 289505 - DNA, 25 bp, Probe Sequence
tccttctatactgcaagtcttttga

SEQ ID NO: 289506 - DNA, 25 bp, Probe Sequence
tcctcattatgagccaattccattc

SEQ ID NO: 289507 - DNA, 25 bp, Probe Sequence
tcctctttgagccctagctaagtca

SEQ ID NO: 289508 - DNA, 25 bp, Probe Sequence
tcctcgttaagcagaagaagtcagt

SEQ ID NO: 289509 - DNA, 25 bp, Probe Sequence
tcctgttctaactgccagtactcag

SEQ ID NO: 289510 - DNA, 25 bp, Probe Sequence
tcctttctaacactctcttactgag

SEQ ID NO: 289511 - DNA, 25 bp, Probe Sequence
tccatcatgtataacctcactgttc

SEQ ID NO: 289512 - DNA, 25 bp, Probe Sequence
tccattgtatgcatgtgccacattt

SEQ ID NO: 289513 - DNA, 25 bp, Probe Sequence
tcctctgatgtgggctgcagcacac

SEQ ID NO: 289514 - DNA, 25 bp, Probe Sequence
tccagtgtgtccgtgaggcagcaca

SEQ ID NO: 289515 - DNA, 25 bp, Probe Sequence
tccatttgtacattgatggacactt

SEQ ID NO: 289516 - DNA, 25 bp, Probe Sequence
tccatatggacccagtcgacctgat

SEQ ID NO: 289517 - DNA, 25 bp, Probe Sequence
tccattggcaccgagaacaccgagg

SEQ ID NO: 289518 - DNA, 25 bp, Probe Sequence
tccattggcaccgagaacaccgagg

SEQ ID NO: 289519 - DNA, 25 bp, Probe Sequence
tccattggcaccgagaacaccgagg

SEQ ID NO: 289520 - DNA, 25 bp, Probe Sequence
tccttggcctcccaaagtgctggga

SEQ ID NO: 289521 - DNA, 25 bp, Probe Sequence
tccttggccctgccatagggcagag

SEQ ID NO: 289522 - DNA, 25 bp, Probe Sequence
tcctttcacttggctgagactgcga

SEQ ID NO: 289523 - DNA, 25 bp, Probe Sequence
tccttgtgcatgtgagttgactgat

SEQ ID NO: 289524 - DNA, 25 bp, Probe Sequence
tccattcttgcttgactctactatt

SEQ ID NO: 289525 - DNA, 25 bp, Probe Sequence
tccattaatttgacatccatctttt

SEQ ID NO: 289526 - DNA, 25 bp, Probe Sequence
tccattatatcatgtatcacggtct

SEQ ID NO: 289527 - DNA, 25 bp, Probe Sequence
tccaggatcatatgttagaggtcat

SEQ ID NO: 289528 - DNA, 25 bp, Probe Sequence
tccggatcacggcaatgcggctgca

SEQ ID NO: 289529 - DNA, 25 bp, Probe Sequence
tccggatcacggcaatgcggctgca

SEQ ID NO: 289530 - DNA, 25 bp, Probe Sequence
tccaggatacctcgaacctgctcaa

SEQ ID NO: 289531 - DNA, 25 bp, Probe Sequence
tccaggacccagcatatctttctgc

SEQ ID NO: 289532 - DNA, 25 bp, Probe Sequence
tccattacctcaaagcagtcattcc

SEQ ID NO: 289533 - DNA, 25 bp, Probe Sequence
tccattctccacgatgcagcgtatt

SEQ ID NO: 289534 - DNA, 25 bp, Probe Sequence
tccatgtcttccgtgtgctggatac

SEQ ID NO: 289535 - DNA, 25 bp, Probe Sequence
tccatgtttctcatatcttgcaaaa

SEQ ID NO: 289536 - DNA, 25 bp, Probe Sequence
tccttggctgtttatcttcgaactc

SEQ ID NO: 289537 - DNA, 25 bp, Probe Sequence
tcctcgcctagtttctgtgtgaact

SEQ ID NO: 289538 - DNA, 25 bp, Probe Sequence
tccattcactatacttttctaactg

SEQ ID NO: 289539 - DNA, 25 bp, Probe Sequence
tccattcactatacttttctaactg

SEQ ID NO: 289540 - DNA, 25 bp, Probe Sequence
tccattcactatacttttctaactg

SEQ ID NO: 289541 - DNA, 25 bp, Probe Sequence
tccatctagctatctatgacctacc

SEQ ID NO: 289542 - DNA, 25 bp, Probe Sequence
tccatgaagctctcaagtcctgcat

SEQ ID NO: 289543 - DNA, 25 bp, Probe Sequence
tccaggaatcccagtgcctgctggg

SEQ ID NO: 289544 - DNA, 25 bp, Probe Sequence
tccggaatcagtgggtcccagcggc

SEQ ID NO: 289545 - DNA, 25 bp, Probe Sequence
tccattgaatcggtagtcccagttc

SEQ ID NO: 289546 - DNA, 25 bp, Probe Sequence
tccttacatctggcaaacccagtac

SEQ ID NO: 289547 - DNA, 25 bp, Probe Sequence
tccttatcactgacacaaaaagtag

SEQ ID NO: 289548 - DNA, 25 bp, Probe Sequence
tcctctacagcttcatcaatcgcaa

SEQ ID NO: 289549 - DNA, 25 bp, Probe Sequence
tccatggtaggagtcaatctgccac

SEQ ID NO: 289550 - DNA, 25 bp, Probe Sequence
tccaggaagcctacagtcttcaccc

SEQ ID NO: 289551 - DNA, 25 bp, Probe Sequence
ttccatgaagtctcagtttacccaa

SEQ ID NO: 289552 - DNA, 25 bp, Probe Sequence
tccataaggtcatgcctttaagtaa

SEQ ID NO: 289553 - DNA, 25 bp, Probe Sequence
tcctaagggcctcctgatggaagaa

SEQ ID NO: 289554 - DNA, 25 bp, Probe Sequence
tcctcaaacgaggctctgactgaag

SEQ ID NO: 289555 - DNA, 25 bp, Probe Sequence
tcctataagcgcttctcttcgcata

SEQ ID NO: 289556 - DNA, 25 bp, Probe Sequence
tcctataagcgcttctcttcgcata

SEQ ID NO: 289557 - DNA, 25 bp, Probe Sequence
tccttacatgtgtttccatcaacat

SEQ ID NO: 289558 - DNA, 25 bp, Probe Sequence
tccttgcctatgatgtccttgacat

SEQ ID NO: 289559 - DNA, 25 bp, Probe Sequence
tccattgctaagttttttgaccaca

SEQ ID NO: 289560 - DNA, 25 bp, Probe Sequence
tccttattgatcgatcttttcccac

SEQ ID NO: 289561 - DNA, 25 bp, Probe Sequence
tcctgtttgacaacgacttcccagc

SEQ ID NO: 289562 - DNA, 25 bp, Probe Sequence
tccatttgtgaggaggacttctcgc

SEQ ID NO: 289563 - DNA, 25 bp, Probe Sequence
tcctatttgcagaaccactttgtgg

SEQ ID NO: 289564 - DNA, 25 bp, Probe Sequence
tccatttctgcagaacttactgtac

SEQ ID NO: 289565 - DNA, 25 bp, Probe Sequence
tcctacttggcagtacatctacgta

SEQ ID NO: 289566 - DNA, 25 bp, Probe Sequence
tcctactgtcagtaaatctacgtta

SEQ ID NO: 289567 - DNA, 25 bp, Probe Sequence
tcctactgtgcgtgtatatacgcgt

SEQ ID NO: 289568 - DNA, 25 bp, Probe Sequence
tccttctgtgcctttgaatacaaat

SEQ ID NO: 289569 - DNA, 25 bp, Probe Sequence
tcacattaggctgttggttcaaact

SEQ ID NO: 289570 - DNA, 25 bp, Probe Sequence
tccatcaagggtcctgagctgctca

SEQ ID NO: 289571 - DNA, 25 bp, Probe Sequence
tccgcaaaggctgatgacatcacaa

SEQ ID NO: 289572 - DNA, 25 bp, Probe Sequence
tccgcaagcggatgaacaccaaccc

SEQ ID NO: 289573 - DNA, 25 bp, Probe Sequence
tcctgaccttgtggaaaacaaccct

SEQ ID NO: 289574 - DNA, 25 bp, Probe Sequence
tcctagattttctaaacaaaacctg

SEQ ID NO: 289575 - DNA, 25 bp, Probe Sequence
tcctcacattataaaacacaagatc

SEQ ID NO: 289576 - DNA, 25 bp, Probe Sequence
tcctagtcttaattaccatattcag

SEQ ID NO: 289577 - DNA, 25 bp, Probe Sequence
tcctagtttagacaactggtaagcc

SEQ ID NO: 289578 - DNA, 25 bp, Probe Sequence
tcctgtgctttccctgaactgggac

SEQ ID NO: 289579 - DNA, 25 bp, Probe Sequence
tccatgttttgtgctggtgctgagg

SEQ ID NO: 289580 - DNA, 25 bp, Probe Sequence
tccatgatttctccctgtattgagg

SEQ ID NO: 289581 - DNA, 25 bp, Probe Sequence
tccatatgattcactcattgtaaga

SEQ ID NO: 289582 - DNA, 25 bp, Probe Sequence
tcctctttcccttggtattgaaact

SEQ ID NO: 289583 - DNA, 25 bp, Probe Sequence
tcctctttcccttggtattgaaact

SEQ ID NO: 289584 - DNA, 25 bp, Probe Sequence
tcctaattccacagctgctcaataa

SEQ ID NO: 289585 - DNA, 25 bp, Probe Sequence
tccatcccctcaaaccatatataaa

SEQ ID NO: 289586 - DNA, 25 bp, Probe Sequence
tccatcttcgccaccaaaatgtaaa

SEQ ID NO: 289587 - DNA, 25 bp, Probe Sequence
tcctcctggcctggcctgaatatta

SEQ ID NO: 289588 - DNA, 25 bp, Probe Sequence
tcctcctggcctggcctgaatatta

SEQ ID NO: 289589 - DNA, 25 bp, Probe Sequence
tccatcttggtgcatcctgacaaaa

SEQ ID NO: 289590 - DNA, 25 bp, Probe Sequence
tccatattctgtcaccatcaatcaa

SEQ ID NO: 289591 - DNA, 25 bp, Probe Sequence
tccttctctgtgagctgtcagtcta

SEQ ID NO: 289592 - DNA, 25 bp, Probe Sequence
tccttgttctgatgcaagcaggcca

SEQ ID NO: 289593 - DNA, 25 bp, Probe Sequence
tccatcttgtaatgctacaattcag

SEQ ID NO: 289594 - DNA, 25 bp, Probe Sequence
tccatctgtgtgcaactaactgact

SEQ ID NO: 289595 - DNA, 25 bp, Probe Sequence
tcctcattccagaacgaacagcctg

SEQ ID NO: 289596 - DNA, 25 bp, Probe Sequence
tccggtacatgaacgaagcctttgc

SEQ ID NO: 289597 - DNA, 25 bp, Probe Sequence
tcctagctacatctggtaccttggc

SEQ ID NO: 289598 - DNA, 25 bp, Probe Sequence
tcccagtaggcttttaccattagca

SEQ ID NO: 289599 - DNA, 25 bp, Probe Sequence
tcctcagttgcctggttgctattag

SEQ ID NO: 289600 - DNA, 25 bp, Probe Sequence
tcctcattagtgaaggtggcttttg

SEQ ID NO: 289601 - DNA, 25 bp, Probe Sequence
tcctctttggtgtacagacttcttg

SEQ ID NO: 289602 - DNA, 25 bp, Probe Sequence
tccggttgggtctgcattttggaga

SEQ ID NO: 289603 - DNA, 25 bp, Probe Sequence
tcctggtagggtctgcctgttggaa

SEQ ID NO: 289604 - DNA, 25 bp, Probe Sequence
tcccgctaggagagtcctcttctaa

SEQ ID NO: 289605 - DNA, 25 bp, Probe Sequence
tcccctagggagcttgctctcaagg

SEQ ID NO: 289606 - DNA, 25 bp, Probe Sequence
tcccctagggactgtcctagccagg

SEQ ID NO: 289607 - DNA, 25 bp, Probe Sequence
tcccctaccttttgtggaaccagtg

SEQ ID NO: 289608 - DNA, 25 bp, Probe Sequence
tcccaccccttgaacgtaggcaggg

SEQ ID NO: 289609 - DNA, 25 bp, Probe Sequence
tcctagtccctgtcacacagtaggc

SEQ ID NO: 289610 - DNA, 25 bp, Probe Sequence
tcctaacccccaacagaagtgttca

SEQ ID NO: 289611 - DNA, 25 bp, Probe Sequence
tccccacacctctgagggggtctca

SEQ ID NO: 289612 - DNA, 25 bp, Probe Sequence
tcctcacaaccctatgagggcaagt

SEQ ID NO: 289613 - DNA, 25 bp, Probe Sequence
tcctcatgcatatcaattaggcaca

SEQ ID NO: 289614 - DNA, 25 bp, Probe Sequence
tcctcatgtaactttacaacccttg

SEQ ID NO: 289615 - DNA, 25 bp, Probe Sequence
tcctatgtggaatgtccgccacctt

SEQ ID NO: 289616 - DNA, 25 bp, Probe Sequence
tcctatgtggaatgtccgccacctt

SEQ ID NO: 289617 - DNA, 25 bp, Probe Sequence
tcctgagttggatgtcatcccccga

SEQ ID NO: 289618 - DNA, 25 bp, Probe Sequence
tcctggaaggaattataatccccaa

SEQ ID NO: 289619 - DNA, 25 bp, Probe Sequence
tccttagagtaatcatttcaaccaa

SEQ ID NO: 289620 - DNA, 25 bp, Probe Sequence
tccttgaggcaactatcatattcat

SEQ ID NO: 289621 - DNA, 25 bp, Probe Sequence
tccttggtgcgacactgtgcattgc

SEQ ID NO: 289622 - DNA, 25 bp, Probe Sequence
tccatgatgttccagtactttgtga

SEQ ID NO: 289623 - DNA, 25 bp, Probe Sequence
tccatctgtttagtactgtattgtg

SEQ ID NO: 289624 - DNA, 25 bp, Probe Sequence
tccatctctgtctcaacttcatggt

SEQ ID NO: 289625 - DNA, 25 bp, Probe Sequence
tccatctctgtctcaacttcatggt

SEQ ID NO: 289626 - DNA, 25 bp, Probe Sequence
tcctctcatgctccaaacttgcatg

SEQ ID NO: 289627 - DNA, 25 bp, Probe Sequence
tccattgcagatgcgcagacatggc

SEQ ID NO: 289628 - DNA, 25 bp, Probe Sequence
tccatatgctcaatgctaccatgtg

SEQ ID NO: 289629 - DNA, 25 bp, Probe Sequence
tccattcttatggccagcattccac

SEQ ID NO: 289630 - DNA, 25 bp, Probe Sequence
tccatgacttgatttgagctttgca

SEQ ID NO: 289631 - DNA, 25 bp, Probe Sequence
tccatgaatggatacctctgtgtcc

SEQ ID NO: 289632 - DNA, 25 bp, Probe Sequence
tcctgaagtcatgcacctgtttaca

SEQ ID NO: 289633 - DNA, 25 bp, Probe Sequence
tcctagcgcagagtccttgtttaaa

SEQ ID NO: 289634 - DNA, 25 bp, Probe Sequence
tccatacagcaggcactgtggctct

SEQ ID NO: 289635 - DNA, 25 bp, Probe Sequence
tcctcaacaggcactgcagcatttc

SEQ ID NO: 289636 - DNA, 25 bp, Probe Sequence
tcctgcaacaagcagctcacagccc

SEQ ID NO: 289637 - DNA, 25 bp, Probe Sequence
tccattgatcaacggctgaccttct

SEQ ID NO: 289638 - DNA, 25 bp, Probe Sequence
tcctcatatccaaggctacttttga

SEQ ID NO: 289639 - DNA, 25 bp, Probe Sequence
tcctgaacaagaggtatttctggac

SEQ ID NO: 289640 - DNA, 25 bp, Probe Sequence
tcctgccaccagggttcttttgaaa

SEQ ID NO: 289641 - DNA, 25 bp, Probe Sequence
tcctcccagagggtgtttcctagaa

SEQ ID NO: 289642 - DNA, 25 bp, Probe Sequence
tcctcacctgaaattatgcttccta

SEQ ID NO: 289643 - DNA, 25 bp, Probe Sequence
tccatccctaaagttctcttctaag

SEQ ID NO: 289644 - DNA, 25 bp, Probe Sequence
tcctccttaactatacttgctagat

SEQ ID NO: 289645 - DNA, 25 bp, Probe Sequence
tcctggtttaacattttcgtatact

SEQ ID NO: 289646 - DNA, 25 bp, Probe Sequence
tcctggtttcttgttcagttttact

SEQ ID NO: 289647 - DNA, 25 bp, Probe Sequence
tcctgggtttttttagattctgcct

SEQ ID NO: 289648 - DNA, 25 bp, Probe Sequence
tcctggtttctttattggaggtcct

SEQ ID NO: 289649 - DNA, 25 bp, Probe Sequence
tcctgggcattctgaagtaaattca

SEQ ID NO: 289650 - DNA, 25 bp, Probe Sequence
tcctgggttcaagtagtattaccac

SEQ ID NO: 289651 - DNA, 25 bp, Probe Sequence
tccttggttgcaactactactacaa

SEQ ID NO: 289652 - DNA, 25 bp, Probe Sequence
tccttggttcatgcttctactgtga

SEQ ID NO: 289653 - DNA, 25 bp, Probe Sequence
tcctgctgggactcaattcaggcta

SEQ ID NO: 289654 - DNA, 25 bp, Probe Sequence
tccttggctacagactcctggaaca

SEQ ID NO: 289655 - DNA, 25 bp, Probe Sequence
tccatcctggacttattcctgggac

SEQ ID NO: 289656 - DNA, 25 bp, Probe Sequence
tccttgcggaccattccgaggggag

SEQ ID NO: 289657 - DNA, 25 bp, Probe Sequence
tccttgcagctgtctctgttcaaag

SEQ ID NO: 289658 - DNA, 25 bp, Probe Sequence
tccttatgctggacttttaaagctt

SEQ ID NO: 289659 - DNA, 25 bp, Probe Sequence
tcctattctgtggtttttccagctt

SEQ ID NO: 289660 - DNA, 25 bp, Probe Sequence
tcccttcgtgggtgatggccacgcc

SEQ ID NO: 289661 - DNA, 25 bp, Probe Sequence
tccgcattcagaaggtttggcgacg

SEQ ID NO: 289662 - DNA, 25 bp, Probe Sequence
tccgcaaggaacgtcttggggcttc

SEQ ID NO: 289663 - DNA, 25 bp, Probe Sequence
tcccaaggaacgccataggacttcc

SEQ ID NO: 289664 - DNA, 25 bp, Probe Sequence
tcccacagggaacctgggttcttct

SEQ ID NO: 289665 - DNA, 25 bp, Probe Sequence
tcctccgtgataacgcgagcgttta

SEQ ID NO: 289666 - DNA, 25 bp, Probe Sequence
tcctacgtattagtcgtcgctatgt

SEQ ID NO: 289667 - DNA, 25 bp, Probe Sequence
tccttcgtttctgtgtggctgcaga

SEQ ID NO: 289668 - DNA, 25 bp, Probe Sequence
tcctcggattgaaagtgtggagaca

SEQ ID NO: 289669 - DNA, 25 bp, Probe Sequence
tccttgcacttagccttggcagacc

SEQ ID NO: 289670 - DNA, 25 bp, Probe Sequence
tccttgcagctgtagtcactggagc

SEQ ID NO: 289671 - DNA, 25 bp, Probe Sequence
tcctctgcatgcaaagattctcaag

SEQ ID NO: 289672 - DNA, 25 bp, Probe Sequence
tcctcatgatacaagatactacagt

SEQ ID NO: 289673 - DNA, 25 bp, Probe Sequence
tccatcatttgcaactgctgttcgt

SEQ ID NO: 289674 - DNA, 25 bp, Probe Sequence
tcctttatgatgtgcatgtccttga

SEQ ID NO: 289675 - DNA, 25 bp, Probe Sequence
tcctaaattgcatcagtgatcctga

SEQ ID NO: 289676 - DNA, 25 bp, Probe Sequence
tcctgaggttcttcatattccagag

SEQ ID NO: 289677 - DNA, 25 bp, Probe Sequence
tcctggagtacctcaccgcagaggt

SEQ ID NO: 289678 - DNA, 25 bp, Probe Sequence
tcctggggacctgacaggccacagt

SEQ ID NO: 289679 - DNA, 25 bp, Probe Sequence
tcctggggcaccaaaaactgcaatg

SEQ ID NO: 289680 - DNA, 25 bp, Probe Sequence
tcctggggaagcataaccttcggca

SEQ ID NO: 289681 - DNA, 25 bp, Probe Sequence
tcctggtggggaaaaccttctggag

SEQ ID NO: 289682 - DNA, 25 bp, Probe Sequence
tcctttcgttcgaaactctccatgg

SEQ ID NO: 289683 - DNA, 25 bp, Probe Sequence
tcctttagtttagagctgggcagtg

SEQ ID NO: 289684 - DNA, 25 bp, Probe Sequence
tcctttaggtttagagctggtcagt

SEQ ID NO: 289685 - DNA, 25 bp, Probe Sequence
tccttcgccttactcaagtggctca

SEQ ID NO: 289686 - DNA, 25 bp, Probe Sequence
tcctttgcttgtttatcagtcctgc

SEQ ID NO: 289687 - DNA, 25 bp, Probe Sequence
tccttgtttgcagtgattaatcacc

SEQ ID NO: 289688 - DNA, 25 bp, Probe Sequence
tccttgtactgatataaacacttcc

SEQ ID NO: 289689 - DNA, 25 bp, Probe Sequence
tccttgtctaatttcaataactacc

SEQ ID NO: 289690 - DNA, 25 bp, Probe Sequence
tcctcatgtttatcccaaactaatc

SEQ ID NO: 289691 - DNA, 25 bp, Probe Sequence
tcctaaaatctcaagccaaactcaa

SEQ ID NO: 289692 - DNA, 25 bp, Probe Sequence
tcccaaaacgttgcgattataagtg

SEQ ID NO: 289693 - DNA, 25 bp, Probe Sequence
tcctcaaagatcctctggttctaga

SEQ ID NO: 289694 - DNA, 25 bp, Probe Sequence
tcctctccatgatgtcttcgttaga

SEQ ID NO: 289695 - DNA, 25 bp, Probe Sequence
tccttctcagccgtcgggataggat

SEQ ID NO: 289696 - DNA, 25 bp, Probe Sequence
tcctttcacaccgagcggaagacag

SEQ ID NO: 289697 - DNA, 25 bp, Probe Sequence
tcctggccaacggtctggacaacga

SEQ ID NO: 289698 - DNA, 25 bp, Probe Sequence
tcctgtggccaggggtccaaacaga

SEQ ID NO: 289699 - DNA, 25 bp, Probe Sequence
tcctgtggcaggcagcgccaagcaa

SEQ ID NO: 289700 - DNA, 25 bp, Probe Sequence
tcctggtagctgtagctgagtactg

SEQ ID NO: 289701 - DNA, 25 bp, Probe Sequence
tccggctggtgttctgagggttgcc

SEQ ID NO: 289702 - DNA, 25 bp, Probe Sequence
tcctggcattttcctttgcgttgcc

SEQ ID NO: 289703 - DNA, 25 bp, Probe Sequence
tcctggagctttgctttctattgaa

SEQ ID NO: 289704 - DNA, 25 bp, Probe Sequence
tccgctgtcttgtgtacttttgtac

SEQ ID NO: 289705 - DNA, 25 bp, Probe Sequence
tcctctgactttatactgttattac

SEQ ID NO: 289706 - DNA, 25 bp, Probe Sequence
tccttgcatcaatttttcttatttc

SEQ ID NO: 289707 - DNA, 25 bp, Probe Sequence
tccttgataaacattctgcaatatt

SEQ ID NO: 289708 - DNA, 25 bp, Probe Sequence
tcctctaattaaaatgtgcagtatt

SEQ ID NO: 289709 - DNA, 25 bp, Probe Sequence
tcctcattttgaattatgtgcacta

SEQ ID NO: 289710 - DNA, 25 bp, Probe Sequence
tccattctgtggattagtgctagaa

SEQ ID NO: 289711 - DNA, 25 bp, Probe Sequence
tccatttgctgtactctttgctagt

SEQ ID NO: 289712 - DNA, 25 bp, Probe Sequence
tccttttgtgccttcttgtagatta

SEQ ID NO: 289713 - DNA, 25 bp, Probe Sequence
tcctgtttgtaatccttggttcgcc

SEQ ID NO: 289714 - DNA, 25 bp, Probe Sequence
tcctgtttgtaatccttggttcgcc

SEQ ID NO: 289715 - DNA, 25 bp, Probe Sequence
tcctgtttgtaatccttggttcgcc

SEQ ID NO: 289716 - DNA, 25 bp, Probe Sequence
tcctgtttcaagttttctggggcct

SEQ ID NO: 289717 - DNA, 25 bp, Probe Sequence
tccttttaattttcctggtgccaat

SEQ ID NO: 289718 - DNA, 25 bp, Probe Sequence
tcctttcccatttattctgggaaga

SEQ ID NO: 289719 - DNA, 25 bp, Probe Sequence
tccttcttccttgatactcacgaag

SEQ ID NO: 289720 - DNA, 25 bp, Probe Sequence
tccttttcctcatttattcctaaag

SEQ ID NO: 289721 - DNA, 25 bp, Probe Sequence
tccttttcctcatttattcctaaag

SEQ ID NO: 289722 - DNA, 25 bp, Probe Sequence
tcctattttcactttactgctctaa

SEQ ID NO: 289723 - DNA, 25 bp, Probe Sequence
tccattttattcttctgagtgtcta

SEQ ID NO: 289724 - DNA, 25 bp, Probe Sequence
tccatttctacaagtcttggattga

SEQ ID NO: 289725 - DNA, 25 bp, Probe Sequence
tcctttctatcactgtttggtagca

SEQ ID NO: 289726 - DNA, 25 bp, Probe Sequence
tcctttcctaggtattgttgcagca

SEQ ID NO: 289727 - DNA, 25 bp, Probe Sequence
tcctttttgagccctcatttgtctt

SEQ ID NO: 289728 - DNA, 25 bp, Probe Sequence
tcctttcaaaccctcatgactgaca

SEQ ID NO: 289729 - DNA, 25 bp, Probe Sequence
tcctttcaaaccctcatgactgaca

SEQ ID NO: 289730 - DNA, 25 bp, Probe Sequence
tcctcgatctgaacctccaattaaa

SEQ ID NO: 289731 - DNA, 25 bp, Probe Sequence
tcctcaatagatccacctcaagtgt

SEQ ID NO: 289732 - DNA, 25 bp, Probe Sequence
tcctctgagagagccaccaaggagg

SEQ ID NO: 289733 - DNA, 25 bp, Probe Sequence
tccattctgggaccatctccaggag

SEQ ID NO: 289734 - DNA, 25 bp, Probe Sequence
tcctgggtggcacatcccaagagcc

SEQ ID NO: 289735 - DNA, 25 bp, Probe Sequence
tcctggagctggaccggaaggtggc

SEQ ID NO: 289736 - DNA, 25 bp, Probe Sequence
tcctagaggtggcaagaaggatgac

SEQ ID NO: 289737 - DNA, 25 bp, Probe Sequence
tcctagggtgtggagagcgggcccc

SEQ ID NO: 289738 - DNA, 25 bp, Probe Sequence
tcgcaaggagtggaaaccaccaccg

SEQ ID NO: 289739 - DNA, 25 bp, Probe Sequence
tcgcaagcgctgctgtaacgacttc

SEQ ID NO: 289740 - DNA, 25 bp, Probe Sequence
tccattgcctgccttagaaactggc

SEQ ID NO: 289741 - DNA, 25 bp, Probe Sequence
tcctctcctacttggataactgtgg

SEQ ID NO: 289742 - DNA, 25 bp, Probe Sequence
tcctgcatcgccatgatgtgtaacg

SEQ ID NO: 289743 - DNA, 25 bp, Probe Sequence
tcctgctgtgtcctgaggtgcattt

SEQ ID NO: 289744 - DNA, 25 bp, Probe Sequence
tcctgctgtgtcctgaggtgcattt

SEQ ID NO: 289745 - DNA, 25 bp, Probe Sequence
tcctcattgatggagatggtgctgg

SEQ ID NO: 289746 - DNA, 25 bp, Probe Sequence
tccattgtcatgcagctgttggagc

SEQ ID NO: 289747 - DNA, 25 bp, Probe Sequence
tccattgagctaactgttggggagc

SEQ ID NO: 289748 - DNA, 25 bp, Probe Sequence
tccttgacaagcttgttggggagtt

SEQ ID NO: 289749 - DNA, 25 bp, Probe Sequence
tccttcacacactatttttgtgggt

SEQ ID NO: 289750 - DNA, 25 bp, Probe Sequence
tccttctgtctctttgtttctgagc

SEQ ID NO: 289751 - DNA, 25 bp, Probe Sequence
tcctgatcttcctgaagatctctac

SEQ ID NO: 289752 - DNA, 25 bp, Probe Sequence
tccttctcttcagggaatgctctac

SEQ ID NO: 289753 - DNA, 25 bp, Probe Sequence
tcctcacttttgcagttgattactg

SEQ ID NO: 289754 - DNA, 25 bp, Probe Sequence
tcctactcacttctgtttctattaa

SEQ ID NO: 289755 - DNA, 25 bp, Probe Sequence
tccttgtccttcagttctgttatac

SEQ ID NO: 289756 - DNA, 25 bp, Probe Sequence
tccttagcatctgtggtgtctttaa

SEQ ID NO: 289757 - DNA, 25 bp, Probe Sequence
tccttggatgcccatggttatgtaa

SEQ ID NO: 289758 - DNA, 25 bp, Probe Sequence
tccttggacttgtcaccttgtgaca

SEQ ID NO: 289759 - DNA, 25 bp, Probe Sequence
tccttcagacgccaagcacttatga

SEQ ID NO: 289760 - DNA, 25 bp, Probe Sequence
tccttgctacagcaagctctggata

SEQ ID NO: 289761 - DNA, 25 bp, Probe Sequence
tccttctccagatcagtcttgtaca

SEQ ID NO: 289762 - DNA, 25 bp, Probe Sequence
tcctatctcttatcagtcattgtaa

SEQ ID NO: 289763 - DNA, 25 bp, Probe Sequence
tcctgttgcttaccagatcttacag

SEQ ID NO: 289764 - DNA, 25 bp, Probe Sequence
tcctcgttgctacagtttgccagta

SEQ ID NO: 289765 - DNA, 25 bp, Probe Sequence
tcctcctctggataacttgactgta

SEQ ID NO: 289766 - DNA, 25 bp, Probe Sequence
tcctccttccatggaacctgacgta

SEQ ID NO: 289767 - DNA, 25 bp, Probe Sequence
tcctttatcatctagcagcagccga

SEQ ID NO: 289768 - DNA, 25 bp, Probe Sequence
tcctctcgattgtagcatagcctga

SEQ ID NO: 289769 - DNA, 25 bp, Probe Sequence
tcctctcagtgggcagtctgccagg

SEQ ID NO: 289770 - DNA, 25 bp, Probe Sequence
tcctttgtggacgttggcactggga

SEQ ID NO: 289771 - DNA, 25 bp, Probe Sequence
tcctttgggacccagatcatcgggg

SEQ ID NO: 289772 - DNA, 25 bp, Probe Sequence
tcctttctggactgagaagagaaga

SEQ ID NO: 289773 - DNA, 25 bp, Probe Sequence
tcctatcccatatggagaagaaagg

SEQ ID NO: 289774 - DNA, 25 bp, Probe Sequence
tcctcactcacgtggaaatgtgaac

SEQ ID NO: 289775 - DNA, 25 bp, Probe Sequence
tcctcaccaacattagttaggaaaa

SEQ ID NO: 289776 - DNA, 25 bp, Probe Sequence
tccattctacaccatggtaaaagaa

SEQ ID NO: 289777 - DNA, 25 bp, Probe Sequence
tccttgctaatctgagctacttaga

SEQ ID NO: 289778 - DNA, 25 bp, Probe Sequence
tccttctagtgccgtcaatttgaga

SEQ ID NO: 289779 - DNA, 25 bp, Probe Sequence
tccttcactgtgctgagaatttcta

SEQ ID NO: 289780 - DNA, 25 bp, Probe Sequence
tccttgagctgtacgggaagtctca

SEQ ID NO: 289781 - DNA, 25 bp, Probe Sequence
tccttgacgtcaatggtgaagatta

SEQ ID NO: 289782 - DNA, 25 bp, Probe Sequence
tccttgacgtcaatgtgttgtagta

SEQ ID NO: 289783 - DNA, 25 bp, Probe Sequence
tccattccagtaatggtatcactgt

SEQ ID NO: 289784 - DNA, 25 bp, Probe Sequence
tccattccaatagagtattgctgat

SEQ ID NO: 289785 - DNA, 25 bp, Probe Sequence
tccttccatttctagtgtattattt

SEQ ID NO: 289786 - DNA, 25 bp, Probe Sequence
tccttgctcgttgattttgttttaa

SEQ ID NO: 289787 - DNA, 25 bp, Probe Sequence
tccttgtggtgatcattgttgtgta

SEQ ID NO: 289788 - DNA, 25 bp, Probe Sequence
tccttctcatggcacttgctgtgga

SEQ ID NO: 289789 - DNA, 25 bp, Probe Sequence
tccttcttgcgaccatatggggaat

SEQ ID NO: 289790 - DNA, 25 bp, Probe Sequence
tcctcattgggaccaggtgggctgt

SEQ ID NO: 289791 - DNA, 25 bp, Probe Sequence
tcctctcttggatatggttggtttt

SEQ ID NO: 289792 - DNA, 25 bp, Probe Sequence
tccttcctagtaatactttgccttt

SEQ ID NO: 289793 - DNA, 25 bp, Probe Sequence
tccttgcaatgagtagaatttccct

SEQ ID NO: 289794 - DNA, 25 bp, Probe Sequence
tccttccatgaggaaagccgccctt

SEQ ID NO: 289795 - DNA, 25 bp, Probe Sequence
tccttccatgaggaaagccgccctt

SEQ ID NO: 289796 - DNA, 25 bp, Probe Sequence
tccttccacacatagaggcacctgt

SEQ ID NO: 289797 - DNA, 25 bp, Probe Sequence
tcctcccaaatgcaggtccactatt

SEQ ID NO: 289798 - DNA, 25 bp, Probe Sequence
tcctacaacacgcaagttccttctt

SEQ ID NO: 289799 - DNA, 25 bp, Probe Sequence
tcctagaattcgaaggctctctctt

SEQ ID NO: 289800 - DNA, 25 bp, Probe Sequence
tcctctgaaccacagttccattgta

SEQ ID NO: 289801 - DNA, 25 bp, Probe Sequence
tccttacccaattgtaccttctaga

SEQ ID NO: 289802 - DNA, 25 bp, Probe Sequence
tccttacactaatttgaactcttaa

SEQ ID NO: 289803 - DNA, 25 bp, Probe Sequence
tccttctacttatttagatctttcc

SEQ ID NO: 289804 - DNA, 25 bp, Probe Sequence
tcctttgagctttcttgatttcctc

SEQ ID NO: 289805 - DNA, 25 bp, Probe Sequence
tccttctgtttctctgaatatcttc

SEQ ID NO: 289806 - DNA, 25 bp, Probe Sequence
tcctggtctttcactgacaattcca

SEQ ID NO: 289807 - DNA, 25 bp, Probe Sequence
tccttgtcctcctctaagatggaca

SEQ ID NO: 289808 - DNA, 25 bp, Probe Sequence
tccttgtccctaggctacaatgcta

SEQ ID NO: 289809 - DNA, 25 bp, Probe Sequence
tccattgctcctctacaagcaatta

SEQ ID NO: 289810 - DNA, 25 bp, Probe Sequence
tcctagctcctgactgaacactata

SEQ ID NO: 289811 - DNA, 25 bp, Probe Sequence
tcctgacttctaataacattgatgt

SEQ ID NO: 289812 - DNA, 25 bp, Probe Sequence
tccttcttcaactcagcagtgcaga

SEQ ID NO: 289813 - DNA, 25 bp, Probe Sequence
tccttcttgatagtttgcaggcaaa

SEQ ID NO: 289814 - DNA, 25 bp, Probe Sequence
tcctttaatcttatgcaaaagagaa

SEQ ID NO: 289815 - DNA, 25 bp, Probe Sequence
tcctcttcaacgaactcaaaggcga

SEQ ID NO: 289816 - DNA, 25 bp, Probe Sequence
tcctcattgctgcgatcatgtccaa

SEQ ID NO: 289817 - DNA, 25 bp, Probe Sequence
tcctctagttctttgttcatagccc

SEQ ID NO: 289818 - DNA, 25 bp, Probe Sequence
tcctctagctgtctggctgtataac

SEQ ID NO: 289819 - DNA, 25 bp, Probe Sequence
tcctctagtgccctggtttagatct

SEQ ID NO: 289820 - DNA, 25 bp, Probe Sequence
tcctctgatgtggttggggggtctg

SEQ ID NO: 289821 - DNA, 25 bp, Probe Sequence
tcctctctggatttgggtgttagct

SEQ ID NO: 289822 - DNA, 25 bp, Probe Sequence
tccttgggctgctgaggggctagtg

SEQ ID NO: 289823 - DNA, 25 bp, Probe Sequence
tcctgtgaagagttgagtgctgtgc

SEQ ID NO: 289824 - DNA, 25 bp, Probe Sequence
tcctactgaggctgcagtgcgcttc

SEQ ID NO: 289825 - DNA, 25 bp, Probe Sequence
tcctccatatggcccagggcttacc

SEQ ID NO: 289826 - DNA, 25 bp, Probe Sequence
tcctccctggagaagagctacgagc

SEQ ID NO: 289827 - DNA, 25 bp, Probe Sequence
tcctcctcggtgaaaagccgcactg

SEQ ID NO: 289828 - DNA, 25 bp, Probe Sequence
tccttgctcggagagtacggcctga

SEQ ID NO: 289829 - DNA, 25 bp, Probe Sequence
tccttccgaggaagctaaggctgcg

SEQ ID NO: 289830 - DNA, 25 bp, Probe Sequence
tccttcacagatcggtgtaatcctg

SEQ ID NO: 289831 - DNA, 25 bp, Probe Sequence
tccttgaagtagatgtggatgactg

SEQ ID NO: 289832 - DNA, 25 bp, Probe Sequence
tcctttcagtagttggtagagctga

SEQ ID NO: 289833 - DNA, 25 bp, Probe Sequence
tcctggtctgttgttgccagcactg

SEQ ID NO: 289834 - DNA, 25 bp, Probe Sequence
tcctggttcccagtatggcacaatg

SEQ ID NO: 289835 - DNA, 25 bp, Probe Sequence
tcctgagttacttcattagcaactg

SEQ ID NO: 289836 - DNA, 25 bp, Probe Sequence
tcctaggtcactggctgctgacaac

SEQ ID NO: 289837 - DNA, 25 bp, Probe Sequence
tcctgaggctgattcgggagctagc

SEQ ID NO: 289838 - DNA, 25 bp, Probe Sequence
tcctgggccagaaggtgtcgatgca

SEQ ID NO: 289839 - DNA, 25 bp, Probe Sequence
tccttgctgccaagctctggaggaa

SEQ ID NO: 289840 - DNA, 25 bp, Probe Sequence
tccttgctgtatccctgttgtgagg

SEQ ID NO: 289841 - DNA, 25 bp, Probe Sequence
tcctttgtctgacgctctgtgtatt

SEQ ID NO: 289842 - DNA, 25 bp, Probe Sequence
tcctttgacttccatgggtcttggg

SEQ ID NO: 289843 - DNA, 25 bp, Probe Sequence
tcctttgccattggaggctccggga

SEQ ID NO: 289844 - DNA, 25 bp, Probe Sequence
tccttctccatcagaggctgggaaa

SEQ ID NO: 289845 - DNA, 25 bp, Probe Sequence
tccttccaagtgctgtggggcataa

SEQ ID NO: 289846 - DNA, 25 bp, Probe Sequence
tcctccgaatggctggctgtggatg

SEQ ID NO: 289847 - DNA, 25 bp, Probe Sequence
tcctcggagctgggagacttggaga

SEQ ID NO: 289848 - DNA, 25 bp, Probe Sequence
tcctcgacattggtcataattggca

SEQ ID NO: 289849 - DNA, 25 bp, Probe Sequence
tcctaactgttttgtatatgctgca

SEQ ID NO: 289850 - DNA, 25 bp, Probe Sequence
tcctactctgctttggtacatcaca

SEQ ID NO: 289851 - DNA, 25 bp, Probe Sequence
tcctagctctgccagttgctagcca

SEQ ID NO: 289852 - DNA, 25 bp, Probe Sequence
tccttgctcatcgcttgcaaacagg

SEQ ID NO: 289853 - DNA, 25 bp, Probe Sequence
tccttgccatctgctaagaagactg

SEQ ID NO: 289854 - DNA, 25 bp, Probe Sequence
tccttcaagccagcaacacagagca

SEQ ID NO: 289855 - DNA, 25 bp, Probe Sequence
tccttcacgccgtaggcaagcgggg

SEQ ID NO: 289856 - DNA, 25 bp, Probe Sequence
tccttcacgccgtaggcaagcgggg

SEQ ID NO: 289857 - DNA, 25 bp, Probe Sequence
tccttctggtccagcgcaaggaggg

SEQ ID NO: 289858 - DNA, 25 bp, Probe Sequence
tcctttttgctcactcaagctggta

SEQ ID NO: 289859 - DNA, 25 bp, Probe Sequence
tccttcttcctgactccaccatgtg

SEQ ID NO: 289860 - DNA, 25 bp, Probe Sequence
tccttctgtcgtgctcagcattatg

SEQ ID NO: 289861 - DNA, 25 bp, Probe Sequence
tccttcgctcggttcgaaagtcttc

SEQ ID NO: 289862 - DNA, 25 bp, Probe Sequence
tccgggatccagttaggaaccttca

SEQ ID NO: 289863 - DNA, 25 bp, Probe Sequence
tccggtgaacaatgcagtcaggcct

SEQ ID NO: 289864 - DNA, 25 bp, Probe Sequence
tccttctgaaaaagcagcacatggc

SEQ ID NO: 289865 - DNA, 25 bp, Probe Sequence
tccttctgcagaccggcacaagagc

SEQ ID NO: 289866 - DNA, 25 bp, Probe Sequence
tcctctctgagactgctaagtaggg

SEQ ID NO: 289867 - DNA, 25 bp, Probe Sequence
tccttctgcagaaatcatcgtcttg

SEQ ID NO: 289868 - DNA, 25 bp, Probe Sequence
tcctttgatgacatgtcctgcatct

SEQ ID NO: 289869 - DNA, 25 bp, Probe Sequence
tcctttatattcgtactgcactttg

SEQ ID NO: 289870 - DNA, 25 bp, Probe Sequence
tcctcttcaattgattcttgcttcg

SEQ ID NO: 289871 - DNA, 25 bp, Probe Sequence
tcctcttaagagttctattcttcag

SEQ ID NO: 289872 - DNA, 25 bp, Probe Sequence
tcctcattactgccaatcttttgta

SEQ ID NO: 289873 - DNA, 25 bp, Probe Sequence
tcctcaaactgtgatttttctgaac

SEQ ID NO: 289874 - DNA, 25 bp, Probe Sequence
tcctctaagtgtagtttttctttca

SEQ ID NO: 289875 - DNA, 25 bp, Probe Sequence
tccgtcaagttgtcttattttttca

SEQ ID NO: 289876 - DNA, 25 bp, Probe Sequence
tccgtataatatttacctcttacca

SEQ ID NO: 289877 - DNA, 25 bp, Probe Sequence
tcctttcaaatcatgttcttatacc

SEQ ID NO: 289878 - DNA, 25 bp, Probe Sequence
tcctcttgaccaacttacttggaac

SEQ ID NO: 289879 - DNA, 25 bp, Probe Sequence
tccttcgacgtccttacaactggac

SEQ ID NO: 289880 - DNA, 25 bp, Probe Sequence
tcgaatccctgccgttagcgactgc

SEQ ID NO: 289881 - DNA, 25 bp, Probe Sequence
tcctatgtcctgcggtgagtgagcc

SEQ ID NO: 289882 - DNA, 25 bp, Probe Sequence
tccgttctctgggagtgacgcagct

SEQ ID NO: 289883 - DNA, 25 bp, Probe Sequence
tcctttatctgtgacttcatgctct

SEQ ID NO: 289884 - DNA, 25 bp, Probe Sequence
tccttatactgcagatcctctctgt

SEQ ID NO: 289885 - DNA, 25 bp, Probe Sequence
tccttcaccagtagaccatgcctga

SEQ ID NO: 289886 - DNA, 25 bp, Probe Sequence
tccgtgaccttagatgcagcatcca

SEQ ID NO: 289887 - DNA, 25 bp, Probe Sequence
tcctatgtctcttcaacaggctcca

SEQ ID NO: 289888 - DNA, 25 bp, Probe Sequence
tccgcattgctgataccaatatcac

SEQ ID NO: 289889 - DNA, 25 bp, Probe Sequence
tccgcctggattcccagaagcacat

SEQ ID NO: 289890 - DNA, 25 bp, Probe Sequence
tccgcctggattcccagaagcacat

SEQ ID NO: 289891 - DNA, 25 bp, Probe Sequence
tcctccattatcagccagaagtgca

SEQ ID NO: 289892 - DNA, 25 bp, Probe Sequence
tcctcttccacgctcagaagtgttc

SEQ ID NO: 289893 - DNA, 25 bp, Probe Sequence
tcctcttccacgctcagaagtgttc

SEQ ID NO: 289894 - DNA, 25 bp, Probe Sequence
tcctcttccaccctcagtggatgat

SEQ ID NO: 289895 - DNA, 25 bp, Probe Sequence
tcctcttccaccctcagtggatgat

SEQ ID NO: 289896 - DNA, 25 bp, Probe Sequence
tcctgtaccgtcctcaatgtagaag

SEQ ID NO: 289897 - DNA, 25 bp, Probe Sequence
tcctgtaccgtcctcaatgtagaag

SEQ ID NO: 289898 - DNA, 25 bp, Probe Sequence
tccttcatccctctccagaaaagga

SEQ ID NO: 289899 - DNA, 25 bp, Probe Sequence
tccttcatccctctccagaagagga

SEQ ID NO: 289900 - DNA, 25 bp, Probe Sequence
tccttcatccctctccagaagagga

SEQ ID NO: 289901 - DNA, 25 bp, Probe Sequence
tccccgcttctctccaagaaggaga

SEQ ID NO: 289902 - DNA, 25 bp, Probe Sequence
tccccctttacctaatctagtagat

SEQ ID NO: 289903 - DNA, 25 bp, Probe Sequence
tcctctcctctctggtaggtttaat

SEQ ID NO: 289904 - DNA, 25 bp, Probe Sequence
tcctctcctctctggtaggtttaat

SEQ ID NO: 289905 - DNA, 25 bp, Probe Sequence
tcccaccgcccggatggggtagaat

SEQ ID NO: 289906 - DNA, 25 bp, Probe Sequence
tctctagtccccgggggtctaattg

SEQ ID NO: 289907 - DNA, 25 bp, Probe Sequence
tcctagctccagatggggctgttaa

SEQ ID NO: 289908 - DNA, 25 bp, Probe Sequence
tcctcagccaacagagctgtggttg

SEQ ID NO: 289909 - DNA, 25 bp, Probe Sequence
tcctcagcaaccacatgcgggatgc

SEQ ID NO: 289910 - DNA, 25 bp, Probe Sequence
tcctgccatacagcctctgcaggca

SEQ ID NO: 289911 - DNA, 25 bp, Probe Sequence
tcctgctaaggcccttggacacaga

SEQ ID NO: 289912 - DNA, 25 bp, Probe Sequence
tcctgtgacactctcacattccagg

SEQ ID NO: 289913 - DNA, 25 bp, Probe Sequence
tcctgatgatctgctctactcattc

SEQ ID NO: 289914 - DNA, 25 bp, Probe Sequence
tcctcaagcatggtctttctacttg

SEQ ID NO: 289915 - DNA, 25 bp, Probe Sequence
tccttagcagcttatttcataattg

SEQ ID NO: 289916 - DNA, 25 bp, Probe Sequence
tcctcacacgcttttctacaatggc

SEQ ID NO: 289917 - DNA, 25 bp, Probe Sequence
tcctgcgcaccttataccagaattc

SEQ ID NO: 289918 - DNA, 25 bp, Probe Sequence
tcccgcaggttcttccagaactggt

SEQ ID NO: 289919 - DNA, 25 bp, Probe Sequence
tcctactggttcccaagctacaggt

SEQ ID NO: 289920 - DNA, 25 bp, Probe Sequence
tcctcactggtttggcctgtagagg

SEQ ID NO: 289921 - DNA, 25 bp, Probe Sequence
tcctacatcgttttcaccactgaaa

SEQ ID NO: 289922 - DNA, 25 bp, Probe Sequence
tccttctcgtctttgactatgctga

SEQ ID NO: 289923 - DNA, 25 bp, Probe Sequence
tcctcttcctctttgtgtaggtttc

SEQ ID NO: 289924 - DNA, 25 bp, Probe Sequence
tccttctacttacctgctggatttt

SEQ ID NO: 289925 - DNA, 25 bp, Probe Sequence
tcctctacacttagcctgtgatgag

SEQ ID NO: 289926 - DNA, 25 bp, Probe Sequence
tcctgctaatcctgtcataatgaat

SEQ ID NO: 289927 - DNA, 25 bp, Probe Sequence
tcctcttacgctctgctcaatgaaa

SEQ ID NO: 289928 - DNA, 25 bp, Probe Sequence
tcctctaaacatttgctgttcaaac

SEQ ID NO: 289929 - DNA, 25 bp, Probe Sequence
tcctccaaaccactggctgtcagaa

SEQ ID NO: 289930 - DNA, 25 bp, Probe Sequence
tcctctctacccttggatgtcaaga

SEQ ID NO: 289931 - DNA, 25 bp, Probe Sequence
tcctccattcctgatgacttcaaga

SEQ ID NO: 289932 - DNA, 25 bp, Probe Sequence
tcctcactggccacaatctgtaaaa

SEQ ID NO: 289933 - DNA, 25 bp, Probe Sequence
tcctctctggtcagacatcgctgga

SEQ ID NO: 289934 - DNA, 25 bp, Probe Sequence
tcctagctgggaagacaccgtgaca

SEQ ID NO: 289935 - DNA, 25 bp, Probe Sequence
tcctagggctgccagacatacgctg

SEQ ID NO: 289936 - DNA, 25 bp, Probe Sequence
tcctagagggatcagcacacttgtc

SEQ ID NO: 289937 - DNA, 25 bp, Probe Sequence
tcctggagggtgtgaccttgaccca

SEQ ID NO: 289938 - DNA, 25 bp, Probe Sequence
tcctgggcggacagaccctaaaact

SEQ ID NO: 289939 - DNA, 25 bp, Probe Sequence
tcctacctggacatgtcccattaaa

SEQ ID NO: 289940 - DNA, 25 bp, Probe Sequence
tcctacctggctacttaacatcgac

SEQ ID NO: 289941 - DNA, 25 bp, Probe Sequence
tcctgacttcctcttagatcataga

SEQ ID NO: 289942 - DNA, 25 bp, Probe Sequence
tcctacagctgccgccaagagaaga

SEQ ID NO: 289943 - DNA, 25 bp, Probe Sequence
tcctctagctgccaccagagagttc

SEQ ID NO: 289944 - DNA, 25 bp, Probe Sequence
tccttcagcacggcgtggtgtgtcc

SEQ ID NO: 289945 - DNA, 25 bp, Probe Sequence
tccttttcaggcctgcagagtgtcc

SEQ ID NO: 289946 - DNA, 25 bp, Probe Sequence
tccttttcctgcaagagatgatggt

SEQ ID NO: 289947 - DNA, 25 bp, Probe Sequence
tcctttgaccaatgagcatgctcag

SEQ ID NO: 289948 - DNA, 25 bp, Probe Sequence
tcctttcaatcagtggtccatcagg

SEQ ID NO: 289949 - DNA, 25 bp, Probe Sequence
tcctgaccgcaggtggtgcttcagg

SEQ ID NO: 289950 - DNA, 25 bp, Probe Sequence
tcctggcaagcccatgtgtgttgag

SEQ ID NO: 289951 - DNA, 25 bp, Probe Sequence
tcctggcaagcccatgtgtgttgag

SEQ ID NO: 289952 - DNA, 25 bp, Probe Sequence
tcctggcaagcccatgtgtgttgag

SEQ ID NO: 289953 - DNA, 25 bp, Probe Sequence
tcctggcagatcttgccttgtcaga

SEQ ID NO: 289954 - DNA, 25 bp, Probe Sequence
tcctatgagatgcgcctggttattg

SEQ ID NO: 289955 - DNA, 25 bp, Probe Sequence
tcctcatgcagactggcactggcag

SEQ ID NO: 289956 - DNA, 25 bp, Probe Sequence
tcctagtgactggacatgcctggaa

SEQ ID NO: 289957 - DNA, 25 bp, Probe Sequence
tcctagtggctattctcgctgggat

SEQ ID NO: 289958 - DNA, 25 bp, Probe Sequence
tcctggagcacttgttccgggatgg

SEQ ID NO: 289959 - DNA, 25 bp, Probe Sequence
tcctggagcatttgttgaccgccaa

SEQ ID NO: 289960 - DNA, 25 bp, Probe Sequence
tcctggcaggcactgtggacaccca

SEQ ID NO: 289961 - DNA, 25 bp, Probe Sequence
ttccctggccttgaagcccaaggca

SEQ ID NO: 289962 - DNA, 25 bp, Probe Sequence
tttcgtggcagtctaacctcaggcc

SEQ ID NO: 289963 - DNA, 25 bp, Probe Sequence
tcttcactggtccttaaccttgggt

SEQ ID NO: 289964 - DNA, 25 bp, Probe Sequence
tcctttggacctacaatttttgcct

SEQ ID NO: 289965 - DNA, 25 bp, Probe Sequence
tcctttacctttcagtgcagtttct

SEQ ID NO: 289966 - DNA, 25 bp, Probe Sequence
tcctttccttatggccagtggattt

SEQ ID NO: 289967 - DNA, 25 bp, Probe Sequence
tcctttcctcttgctaggcatgagg

SEQ ID NO: 289968 - DNA, 25 bp, Probe Sequence
tcctttccattctctctatggggag

SEQ ID NO: 289969 - DNA, 25 bp, Probe Sequence
tcctctttattttgtcatagggagg

SEQ ID NO: 289970 - DNA, 25 bp, Probe Sequence
tcctataatgttggatgctatgaga

SEQ ID NO: 289971 - DNA, 25 bp, Probe Sequence
tcctaatgtctgatgctcattgagc

SEQ ID NO: 289972 - DNA, 25 bp, Probe Sequence
tcctacatccgcattgctgatacca

SEQ ID NO: 289973 - DNA, 25 bp, Probe Sequence
tcctatctccacatctctgaagaag

SEQ ID NO: 289974 - DNA, 25 bp, Probe Sequence
tccttacccattagtctcagaaatt

SEQ ID NO: 289975 - DNA, 25 bp, Probe Sequence
tcctgaccccaaagtcaagaagtat

SEQ ID NO: 289976 - DNA, 25 bp, Probe Sequence
tcctcaccgacatcaccaagggtgt

SEQ ID NO: 289977 - DNA, 25 bp, Probe Sequence
tcctccgtgaagaagaccatggtgt

SEQ ID NO: 289978 - DNA, 25 bp, Probe Sequence
tcctctcatgtttatagaccacggg

SEQ ID NO: 289979 - DNA, 25 bp, Probe Sequence
tccttatgtaaactgagccctttgt

SEQ ID NO: 289980 - DNA, 25 bp, Probe Sequence
tcctattgaaacttgcccagatgtt

SEQ ID NO: 289981 - DNA, 25 bp, Probe Sequence
tcctttcaaatcagacgatgagact

SEQ ID NO: 289982 - DNA, 25 bp, Probe Sequence
tcctttcaaagtccactgcagagct

SEQ ID NO: 289983 - DNA, 25 bp, Probe Sequence
tcctttggaaaacctgcagatcatc

SEQ ID NO: 289984 - DNA, 25 bp, Probe Sequence
tcctctttgaggaccctgaatcact

SEQ ID NO: 289985 - DNA, 25 bp, Probe Sequence
tccttttgagggcccatagtgaata

SEQ ID NO: 289986 - DNA, 25 bp, Probe Sequence
tcctgttccaggagcaccagtttga

SEQ ID NO: 289987 - DNA, 25 bp, Probe Sequence
tcctttctcgaaattgccagtgtgt

SEQ ID NO: 289988 - DNA, 25 bp, Probe Sequence
tccttttcccacagcagcatatttt

SEQ ID NO: 289989 - DNA, 25 bp, Probe Sequence
tccctttctccataaaattcttctt

SEQ ID NO: 289990 - DNA, 25 bp, Probe Sequence
tcctccctctcctaaagtaatttga

SEQ ID NO: 289991 - DNA, 25 bp, Probe Sequence
tctacacctcctttaagatttactt

SEQ ID NO: 289992 - DNA, 25 bp, Probe Sequence
tcctaccttctttacatgttgtgca

SEQ ID NO: 289993 - DNA, 25 bp, Probe Sequence
tcctcatcgtttttatctctgtgtg

SEQ ID NO: 289994 - DNA, 25 bp, Probe Sequence
tcctcatcgtttttatctctgtgtg

SEQ ID NO: 289995 - DNA, 25 bp, Probe Sequence
tcctagattctcatcttcctggatg

SEQ ID NO: 289996 - DNA, 25 bp, Probe Sequence
tcctagtgttcaaatactgtggcat

SEQ ID NO: 289997 - DNA, 25 bp, Probe Sequence
tcctggcgtctaaatgagcgtcact

SEQ ID NO: 289998 - DNA, 25 bp, Probe Sequence
tcctgtcttgctagacaaggttgct

SEQ ID NO: 289999 - DNA, 25 bp, Probe Sequence
tcctttgtcgtgaatatccttgctc

SEQ ID NO: 290000 - DNA, 25 bp, Probe Sequence
tccttttcactgatattgcttcatt

SEQ ID NO: 290001 - DNA, 25 bp, Probe Sequence
tcctttgtcctaatcctggaattaa

SEQ ID NO: 290002 - DNA, 25 bp, Probe Sequence
tcctatttcacgttcacatggaaaa

SEQ ID NO: 290003 - DNA, 25 bp, Probe Sequence
tccggggcatctactcaatgaaaaa

SEQ ID NO: 290004 - DNA, 25 bp, Probe Sequence
tcctgggtctgcaactttggaaaac

SEQ ID NO: 290005 - DNA, 25 bp, Probe Sequence
tcctgggatcccttttatgtatact

SEQ ID NO: 290006 - DNA, 25 bp, Probe Sequence
tcctcgctatcatattcattaataa

SEQ ID NO: 290007 - DNA, 25 bp, Probe Sequence
tcctaggtctactcatctacatcct

SEQ ID NO: 290008 - DNA, 25 bp, Probe Sequence
tccgggatggacacacttcccatag

SEQ ID NO: 290009 - DNA, 25 bp, Probe Sequence
tccgaggacgagaacctggccttga

SEQ ID NO: 290010 - DNA, 25 bp, Probe Sequence
tccgaggtcggacagcagactttgt

SEQ ID NO: 290011 - DNA, 25 bp, Probe Sequence
tcctgaactgggtggtgatttttct

SEQ ID NO: 290012 - DNA, 25 bp, Probe Sequence
tcgcgaacgccgggctggattacta

SEQ ID NO: 290013 - DNA, 25 bp, Probe Sequence
tcctgtactcgcacctggtggacta

SEQ ID NO: 290014 - DNA, 25 bp, Probe Sequence
tcctgtgccaaattcagtggggact

SEQ ID NO: 290015 - DNA, 25 bp, Probe Sequence
tcctggccaacttcttggcccagac

SEQ ID NO: 290016 - DNA, 25 bp, Probe Sequence
tcctggctcaacagtgattccctga

SEQ ID NO: 290017 - DNA, 25 bp, Probe Sequence
tcctggctcaacagtgattccctga

SEQ ID NO: 290018 - DNA, 25 bp, Probe Sequence
tcctcctagccaagttgctcaacta

SEQ ID NO: 290019 - DNA, 25 bp, Probe Sequence
tcctcctagccaaattgctcaacta

SEQ ID NO: 290020 - DNA, 25 bp, Probe Sequence
tcctctcagctcctaaagcacaact

SEQ ID NO: 290021 - DNA, 25 bp, Probe Sequence
tcctccatccacaaagtgcatcacc

SEQ ID NO: 290022 - DNA, 25 bp, Probe Sequence
tcctcctgctacagagaagaccctc

SEQ ID NO: 290023 - DNA, 25 bp, Probe Sequence
tcctcattgttcacagtgaaaactc

SEQ ID NO: 290024 - DNA, 25 bp, Probe Sequence
tcctatgcatttctagataaaagta

SEQ ID NO: 290025 - DNA, 25 bp, Probe Sequence
tcctcagtctgtcaattaaacacta

SEQ ID NO: 290026 - DNA, 25 bp, Probe Sequence
tcctcatccgtttttgaaattctca

SEQ ID NO: 290027 - DNA, 25 bp, Probe Sequence
tcctatctctatgattttactatcc

SEQ ID NO: 290028 - DNA, 25 bp, Probe Sequence
tcctcatcctgagacggtctctacc

SEQ ID NO: 290029 - DNA, 25 bp, Probe Sequence
tcctgacctgaagttgttgttacca

SEQ ID NO: 290030 - DNA, 25 bp, Probe Sequence
tcctacacagagcctctgtttgcca

SEQ ID NO: 290031 - DNA, 25 bp, Probe Sequence
tcctcaccagcactgacgttgggga

SEQ ID NO: 290032 - DNA, 25 bp, Probe Sequence
tccccacacgtacctttgggactgg

SEQ ID NO: 290033 - DNA, 25 bp, Probe Sequence
tccggaatgggacctttgacagcag

SEQ ID NO: 290034 - DNA, 25 bp, Probe Sequence
tccgtgacagggaccgatgtggaca

SEQ ID NO: 290035 - DNA, 25 bp, Probe Sequence
tcctagactggactcttgagggaca

SEQ ID NO: 290036 - DNA, 25 bp, Probe Sequence
tcctagagcggtccttggggagacg

SEQ ID NO: 290037 - DNA, 25 bp, Probe Sequence
tcctaggagggcttgctgtgcggag

SEQ ID NO: 290038 - DNA, 25 bp, Probe Sequence
tcctcagggctacagcagtagggag

SEQ ID NO: 290039 - DNA, 25 bp, Probe Sequence
tcctgcagtggctcgggtatgccga

SEQ ID NO: 290040 - DNA, 25 bp, Probe Sequence
tcctgcagtggctcgggtatgccga

SEQ ID NO: 290041 - DNA, 25 bp, Probe Sequence
tcctgagcgagttctgggtcctcag

SEQ ID NO: 290042 - DNA, 25 bp, Probe Sequence
tcctcacgagctatagtggcgcaca

SEQ ID NO: 290043 - DNA, 25 bp, Probe Sequence
tcctccagtgttaagctatagccat

SEQ ID NO: 290044 - DNA, 25 bp, Probe Sequence
tccgccagatgtgctgcaaaacctg

SEQ ID NO: 290045 - DNA, 25 bp, Probe Sequence
tccccagtgtcctacaaactaatgt

SEQ ID NO: 290046 - DNA, 25 bp, Probe Sequence
tccccagccatttagaaacaagttc

SEQ ID NO: 290047 - DNA, 25 bp, Probe Sequence
tccccgtgattatggggctagttgt

SEQ ID NO: 290048 - DNA, 25 bp, Probe Sequence
tcccccaagtacaggcgctaattgt

SEQ ID NO: 290049 - DNA, 25 bp, Probe Sequence
tccccgaagtcctgaccgagttggg

SEQ ID NO: 290050 - DNA, 25 bp, Probe Sequence
tccccaaagtccagaccagaactcg

SEQ ID NO: 290051 - DNA, 25 bp, Probe Sequence
tcccacaaagaaaacccaggaccag

SEQ ID NO: 290052 - DNA, 25 bp, Probe Sequence
tcctccaaccaatacccaaaaatgt

SEQ ID NO: 290053 - DNA, 25 bp, Probe Sequence
tcctccaactcaacaacattctata

SEQ ID NO: 290054 - DNA, 25 bp, Probe Sequence
tcctccaactcaacaacattctata

SEQ ID NO: 290055 - DNA, 25 bp, Probe Sequence
tcctccaactcaacaacattctata

SEQ ID NO: 290056 - DNA, 25 bp, Probe Sequence
tcctccaactcaacaacattctata

SEQ ID NO: 290057 - DNA, 25 bp, Probe Sequence
tcctccaactcaacaacattctata

SEQ ID NO: 290058 - DNA, 25 bp, Probe Sequence
tcctccaactcaacaacattctata

SEQ ID NO: 290059 - DNA, 25 bp, Probe Sequence
tcctccaactcaacaacattctata

SEQ ID NO: 290060 - DNA, 25 bp, Probe Sequence
tcctgcagcacccaagcaagttttc

SEQ ID NO: 290061 - DNA, 25 bp, Probe Sequence
tcctcagcagtccacaaagcatttt

SEQ ID NO: 290062 - DNA, 25 bp, Probe Sequence
tcctccagggacatacatatgcatt

SEQ ID NO: 290063 - DNA, 25 bp, Probe Sequence
tcctcaagggccaggtgtacatcct

SEQ ID NO: 290064 - DNA, 25 bp, Probe Sequence
tcccatatgggcctgagttgtaccc

SEQ ID NO: 290065 - DNA, 25 bp, Probe Sequence
tccctaagccgttgggttccagcga

SEQ ID NO: 290066 - DNA, 25 bp, Probe Sequence
tcgccgacaacgggggtctcaaggc

SEQ ID NO: 290067 - DNA, 25 bp, Probe Sequence
tcctcaacaagtggtggattctcac

SEQ ID NO: 290068 - DNA, 25 bp, Probe Sequence
tcctcagaccaggtggaattactta

SEQ ID NO: 290069 - DNA, 25 bp, Probe Sequence
tccgaattagcggtgtatttcttga

SEQ ID NO: 290070 - DNA, 25 bp, Probe Sequence
tcctcagtatagccggtgaaccctg

SEQ ID NO: 290071 - DNA, 25 bp, Probe Sequence
tcctgtggtctccttggaaatccgt

SEQ ID NO: 290072 - DNA, 25 bp, Probe Sequence
tcctctcccttctggaagactagtt

SEQ ID NO: 290073 - DNA, 25 bp, Probe Sequence
tcccccggtctaggatcgaaatgtt

SEQ ID NO: 290074 - DNA, 25 bp, Probe Sequence
tcctccgggttaggggagcaaggat

SEQ ID NO: 290075 - DNA, 25 bp, Probe Sequence
tcctcttggtttaccaggaaagctg

SEQ ID NO: 290076 - DNA, 25 bp, Probe Sequence
tcctttgtattctgccaggcacaca

SEQ ID NO: 290077 - DNA, 25 bp, Probe Sequence
tcctcctgtagtgctcacaggtccc

SEQ ID NO: 290078 - DNA, 25 bp, Probe Sequence
tcctcactggggttccaagagagcc

SEQ ID NO: 290079 - DNA, 25 bp, Probe Sequence
tcctcctgtagcccaggcaagagag

SEQ ID NO: 290080 - DNA, 25 bp, Probe Sequence
tcctctcatggggtcaggcatagac

SEQ ID NO: 290081 - DNA, 25 bp, Probe Sequence
tcctctcaggggcagcatgctaacg

SEQ ID NO: 290082 - DNA, 25 bp, Probe Sequence
tcctctcagggatcatatccacaag

SEQ ID NO: 290083 - DNA, 25 bp, Probe Sequence
tcctcaataggatcatcagcaaaca

SEQ ID NO: 290084 - DNA, 25 bp, Probe Sequence
tcctcagtgggcaaacagaagccag

SEQ ID NO: 290085 - DNA, 25 bp, Probe Sequence
tcctcagtgatcttaaaagctccag

SEQ ID NO: 290086 - DNA, 25 bp, Probe Sequence
tcctcctacattgaacagacacggt

SEQ ID NO: 290087 - DNA, 25 bp, Probe Sequence
tcctcttacttcaatttgaacccat

SEQ ID NO: 290088 - DNA, 25 bp, Probe Sequence
tcctctcaccatatatttaaccacg

SEQ ID NO: 290089 - DNA, 25 bp, Probe Sequence
tcctctccttagaactttcatagcc

SEQ ID NO: 290090 - DNA, 25 bp, Probe Sequence
tcctctaggtaactcaagtgtcacc

SEQ ID NO: 290091 - DNA, 25 bp, Probe Sequence
tcctctgggttttatagtgatacag

SEQ ID NO: 290092 - DNA, 25 bp, Probe Sequence
tcctcggtgatgaagtattctgtac

SEQ ID NO: 290093 - DNA, 25 bp, Probe Sequence
tcctcagtggataaagtagtctact

SEQ ID NO: 290094 - DNA, 25 bp, Probe Sequence
tcctgcagctcaagaaagttttaca

SEQ ID NO: 290095 - DNA, 25 bp, Probe Sequence
tcctcctcttgaaggtctactgtga

SEQ ID NO: 290096 - DNA, 25 bp, Probe Sequence
tcctgcctttagagttccatgaaca

SEQ ID NO: 290097 - DNA, 25 bp, Probe Sequence
tcctgtttccagatgcattcctgtc

SEQ ID NO: 290098 - DNA, 25 bp, Probe Sequence
tcctgattccctaattgtgctgtgt

SEQ ID NO: 290099 - DNA, 25 bp, Probe Sequence
tcctggcccacgatattggattctt

SEQ ID NO: 290100 - DNA, 25 bp, Probe Sequence
tcctcaccaacacttattattttcc

SEQ ID NO: 290101 - DNA, 25 bp, Probe Sequence
tcctcaactacagacttatatattc

SEQ ID NO: 290102 - DNA, 25 bp, Probe Sequence
tcctaagctggagttctgattttta

SEQ ID NO: 290103 - DNA, 25 bp, Probe Sequence
tcctaagctggcaagccgcatcttg

SEQ ID NO: 290104 - DNA, 25 bp, Probe Sequence
tcctgaagttgctatggctatcttg

SEQ ID NO: 290105 - DNA, 25 bp, Probe Sequence
tcctctacttcagtgggatgctgtg

SEQ ID NO: 290106 - DNA, 25 bp, Probe Sequence
tcctcatcatctttctgctggagat

SEQ ID NO: 290107 - DNA, 25 bp, Probe Sequence
tcctccatagcaggctgttggcata

SEQ ID NO: 290108 - DNA, 25 bp, Probe Sequence
tcctctcatcagacctgcgtggata

SEQ ID NO: 290109 - DNA, 25 bp, Probe Sequence
tcctcatgacagcccctgaagtagg

SEQ ID NO: 290110 - DNA, 25 bp, Probe Sequence
tcctcttgggccctgatttcagagt

SEQ ID NO: 290111 - DNA, 25 bp, Probe Sequence
tcctcttggagaagctgttgctgag

SEQ ID NO: 290112 - DNA, 25 bp, Probe Sequence
tcctcatgtgttactctgttgcaga

SEQ ID NO: 290113 - DNA, 25 bp, Probe Sequence
tcctcagatgccactggctggcaca

SEQ ID NO: 290114 - DNA, 25 bp, Probe Sequence
tcctcacagccactgtggtggcctc

SEQ ID NO: 290115 - DNA, 25 bp, Probe Sequence
tcctcaaccacttgtcttggctgta

SEQ ID NO: 290116 - DNA, 25 bp, Probe Sequence
tcctacctacatctgcttgagcagt

SEQ ID NO: 290117 - DNA, 25 bp, Probe Sequence
tcctaactccatgtctctgagcatt

SEQ ID NO: 290118 - DNA, 25 bp, Probe Sequence
tcctacaagaatgatgcctactttc

SEQ ID NO: 290119 - DNA, 25 bp, Probe Sequence
tcctactataataatgctgaatctt

SEQ ID NO: 290120 - DNA, 25 bp, Probe Sequence
tccgcactatataattcgcacacat

SEQ ID NO: 290121 - DNA, 25 bp, Probe Sequence
tcctggtgtgattgttgccaacatg

SEQ ID NO: 290122 - DNA, 25 bp, Probe Sequence
tcctgttgtttgctgccattggcat

SEQ ID NO: 290123 - DNA, 25 bp, Probe Sequence
tcctgttttttgatgcttggctccc

SEQ ID NO: 290124 - DNA, 25 bp, Probe Sequence
tcgcttccgttggtagcttgagtcc

SEQ ID NO: 290125 - DNA, 25 bp, Probe Sequence
tcctcttccttggcaaagtgaaccg

SEQ ID NO: 290126 - DNA, 25 bp, Probe Sequence
tcctcatactttccaaagtggtcaa

SEQ ID NO: 290127 - DNA, 25 bp, Probe Sequence
tcctaaatatgccaagaggtgcaat

SEQ ID NO: 290128 - DNA, 25 bp, Probe Sequence
tcctcaaacatctggagcctgaacc

SEQ ID NO: 290129 - DNA, 25 bp, Probe Sequence
tcctagcccatctgcagagcaatga

SEQ ID NO: 290130 - DNA, 25 bp, Probe Sequence
tcctaacagcattgtgaagttgacc

SEQ ID NO: 290131 - DNA, 25 bp, Probe Sequence
tcctcaagcacatcaacgagctgac

SEQ ID NO: 290132 - DNA, 25 bp, Probe Sequence
tcctcagagcaccacacactgagca

SEQ ID NO: 290133 - DNA, 25 bp, Probe Sequence
tcctcagagcaccacacactgagca

SEQ ID NO: 290134 - DNA, 25 bp, Probe Sequence
tcctggacatcgtgcacatcagcat

SEQ ID NO: 290135 - DNA, 25 bp, Probe Sequence
tcctggcactggttcagaatgcaca

SEQ ID NO: 290136 - DNA, 25 bp, Probe Sequence
tcctgtactgtgtctggaagcctcc

SEQ ID NO: 290137 - DNA, 25 bp, Probe Sequence
tccgtacatgtgtgaagtcctgcat

SEQ ID NO: 290138 - DNA, 25 bp, Probe Sequence
tcctgtatctagaaaacccatcgac

SEQ ID NO: 290139 - DNA, 25 bp, Probe Sequence
tcctctgtcaaaagtagcccataac

SEQ ID NO: 290140 - DNA, 25 bp, Probe Sequence
tcctctatgaaatgggctcgtaaca

SEQ ID NO: 290141 - DNA, 25 bp, Probe Sequence
tcctctgtaatgtggcgctttcaac

SEQ ID NO: 290142 - DNA, 25 bp, Probe Sequence
tcctctgttatatagcttttcccaa

SEQ ID NO: 290143 - DNA, 25 bp, Probe Sequence
tcctctttttccatcataattctaa

SEQ ID NO: 290144 - DNA, 25 bp, Probe Sequence
tcctctttttccatcataattctaa

SEQ ID NO: 290145 - DNA, 25 bp, Probe Sequence
tccgccttcttggctttagttaaca

SEQ ID NO: 290146 - DNA, 25 bp, Probe Sequence
tcctcctccttggctttaattatgc

SEQ ID NO: 290147 - DNA, 25 bp, Probe Sequence
tccccttattgtactttttatggca

SEQ ID NO: 290148 - DNA, 25 bp, Probe Sequence
tcctcctctttatttttcgtgatgg

SEQ ID NO: 290149 - DNA, 25 bp, Probe Sequence
tcctccttgttatttctgtttgtaa

SEQ ID NO: 290150 - DNA, 25 bp, Probe Sequence
tcctccattgttgccctggaatgta

SEQ ID NO: 290151 - DNA, 25 bp, Probe Sequence
tcctctttgccggccctgaaagagg

SEQ ID NO: 290152 - DNA, 25 bp, Probe Sequence
tcctctgttgtcccacgtgaacaga

SEQ ID NO: 290153 - DNA, 25 bp, Probe Sequence
tcctgtggtgtccatgaggtaccac

SEQ ID NO: 290154 - DNA, 25 bp, Probe Sequence
tcctgtagtgctcacaggtcccagc

SEQ ID NO: 290155 - DNA, 25 bp, Probe Sequence
tcctgaaacttcaaggtccctgcca

SEQ ID NO: 290156 - DNA, 25 bp, Probe Sequence
tccggaaattcatggttggctacga

SEQ ID NO: 290157 - DNA, 25 bp, Probe Sequence
tcggggacagtagggttggtgggag

SEQ ID NO: 290158 - DNA, 25 bp, Probe Sequence
tccgaggacacttttgtgggggtgg

SEQ ID NO: 290159 - DNA, 25 bp, Probe Sequence
tccgggaccgaaatagccggcagcc

SEQ ID NO: 290160 - DNA, 25 bp, Probe Sequence
tcctgggatcctcagaagcctgact

SEQ ID NO: 290161 - DNA, 25 bp, Probe Sequence
tccggacatgaaccataaccatact

SEQ ID NO: 290162 - DNA, 25 bp, Probe Sequence
tccggaattacctgtccatcttccg

SEQ ID NO: 290163 - DNA, 25 bp, Probe Sequence
tccggaatttcccgggattcgagtg

SEQ ID NO: 290164 - DNA, 25 bp, Probe Sequence
tccggaaccaccatgggtggccact

SEQ ID NO: 290165 - DNA, 25 bp, Probe Sequence
tcctggactctactttgggtcccag

SEQ ID NO: 290166 - DNA, 25 bp, Probe Sequence
tcctggaactgagagtgggccctgg

SEQ ID NO: 290167 - DNA, 25 bp, Probe Sequence
tcctgggagccatggtggtcctggc

SEQ ID NO: 290168 - DNA, 25 bp, Probe Sequence
tcctgaggaccgagcagtggccaag

SEQ ID NO: 290169 - DNA, 25 bp, Probe Sequence
tccgagacagccgggaggagcctgg

SEQ ID NO: 290170 - DNA, 25 bp, Probe Sequence
tcctgagaccgcttggcaacatgcg

SEQ ID NO: 290171 - DNA, 25 bp, Probe Sequence
tcctggtcaccaaggcagtgcatgc

SEQ ID NO: 290172 - DNA, 25 bp, Probe Sequence
tcctgttctagatctcagacatgct

SEQ ID NO: 290173 - DNA, 25 bp, Probe Sequence
tcctggatcctgcaatgcggcattg

SEQ ID NO: 290174 - DNA, 25 bp, Probe Sequence
tccgcgtcccgaatgctgacattga

SEQ ID NO: 290175 - DNA, 25 bp, Probe Sequence
tcctgcgttactttgctgaggataa

SEQ ID NO: 290176 - DNA, 25 bp, Probe Sequence
tcctccgcatccggtgcgaggaaga

SEQ ID NO: 290177 - DNA, 25 bp, Probe Sequence
tcctccgcacgggtcgaccagcaga

SEQ ID NO: 290178 - DNA, 25 bp, Probe Sequence
tcctgccacacggcgtggcacttga

SEQ ID NO: 290179 - DNA, 25 bp, Probe Sequence
tcctcacactcagcttcagcataag

SEQ ID NO: 290180 - DNA, 25 bp, Probe Sequence
tcctgacagctacctctcagcagga

SEQ ID NO: 290181 - DNA, 25 bp, Probe Sequence
tcctactgctatccttagccttgga

SEQ ID NO: 290182 - DNA, 25 bp, Probe Sequence
tcctggtgatcaccttactcctgga

SEQ ID NO: 290183 - DNA, 25 bp, Probe Sequence
tcctcggtcaagagcgtgcctgaaa

SEQ ID NO: 290184 - DNA, 25 bp, Probe Sequence
tcctctgggaaaagcttgacgatta

SEQ ID NO: 290185 - DNA, 25 bp, Probe Sequence
tcccttggtgaatgtaaatgataat

SEQ ID NO: 290186 - DNA, 25 bp, Probe Sequence
tcccattggttaaaagcaagtcata

SEQ ID NO: 290187 - DNA, 25 bp, Probe Sequence
tcccttcgttatcatcagagaattc

SEQ ID NO: 290188 - DNA, 25 bp, Probe Sequence
tccgcatgttgtaatcgtgcaaata

SEQ ID NO: 290189 - DNA, 25 bp, Probe Sequence
tccgatgtactcacgctggatatcc

SEQ ID NO: 290190 - DNA, 25 bp, Probe Sequence
tcctgaggtctcagccttggatcag

SEQ ID NO: 290191 - DNA, 25 bp, Probe Sequence
tcctcactttcctctgtgtgatgtg

SEQ ID NO: 290192 - DNA, 25 bp, Probe Sequence
tcctgcagaagtcaactgtgtgagt

SEQ ID NO: 290193 - DNA, 25 bp, Probe Sequence
tcctcaaagcatccaccatggtgga

SEQ ID NO: 290194 - DNA, 25 bp, Probe Sequence
tcctcatccaggacatcctgcggga

SEQ ID NO: 290195 - DNA, 25 bp, Probe Sequence
tcctcatctatggtgcatccaccag

SEQ ID NO: 290196 - DNA, 25 bp, Probe Sequence
tcctcatgctgaactgcattccttc

SEQ ID NO: 290197 - DNA, 25 bp, Probe Sequence
tcgcatcatcaaaagttatcttccg

SEQ ID NO: 290198 - DNA, 25 bp, Probe Sequence
tcctcacaagggatggtggccgggg

SEQ ID NO: 290199 - DNA, 25 bp, Probe Sequence
tccctgcaagggtgactcgggcggg

SEQ ID NO: 290200 - DNA, 25 bp, Probe Sequence
tcctctaaggaatactagtgcagca

SEQ ID NO: 290201 - DNA, 25 bp, Probe Sequence
tcctcttgcagtggaaactttgtgc

SEQ ID NO: 290202 - DNA, 25 bp, Probe Sequence
tcctgattagtctaacagttgtgtt

SEQ ID NO: 290203 - DNA, 25 bp, Probe Sequence
tcctgttaagctgggcgttgtggtt

SEQ ID NO: 290204 - DNA, 25 bp, Probe Sequence
tcctgttgaatggcccttgttgccc

SEQ ID NO: 290205 - DNA, 25 bp, Probe Sequence
tcctgatgagaagtcccgtgttgcc

SEQ ID NO: 290206 - DNA, 25 bp, Probe Sequence
tcctgagtgtcagtttgttgtccct

SEQ ID NO: 290207 - DNA, 25 bp, Probe Sequence
tcctgtaatcacagttttccctgct

SEQ ID NO: 290208 - DNA, 25 bp, Probe Sequence
tcctggaggaatgtagctttcctgc

SEQ ID NO: 290209 - DNA, 25 bp, Probe Sequence
tcctgagagcagcacaggaatcttc

SEQ ID NO: 290210 - DNA, 25 bp, Probe Sequence
tcctgcaggcactagctggagatgc

SEQ ID NO: 290211 - DNA, 25 bp, Probe Sequence
tcctcagccagccatgctgagcatc

SEQ ID NO: 290212 - DNA, 25 bp, Probe Sequence
tcctcatgacatcatcgatgacatc

SEQ ID NO: 290213 - DNA, 25 bp, Probe Sequence
tcctgctacaaaaagacatcggtca

SEQ ID NO: 290214 - DNA, 25 bp, Probe Sequence
tcactcaacaaaaaaccgaggccct

SEQ ID NO: 290215 - DNA, 25 bp, Probe Sequence
tctctgaaactaaaaacttggacct

SEQ ID NO: 290216 - DNA, 25 bp, Probe Sequence
tcctgagatacatatgataagttta

SEQ ID NO: 290217 - DNA, 25 bp, Probe Sequence
tcctctgcataattgaaatagtatt

SEQ ID NO: 290218 - DNA, 25 bp, Probe Sequence
tcctcatgcattccacataatttac

SEQ ID NO: 290219 - DNA, 25 bp, Probe Sequence
tcctcacatccagatcatttctagg

SEQ ID NO: 290220 - DNA, 25 bp, Probe Sequence
tcctgacacctccaagttctagggc

SEQ ID NO: 290221 - DNA, 25 bp, Probe Sequence
tcctccaccccaggcttagaggaca

SEQ ID NO: 290222 - DNA, 25 bp, Probe Sequence
tcctcaactccctgttcaaaatgca

SEQ ID NO: 290223 - DNA, 25 bp, Probe Sequence
tcccaccccactcttaatcagtggt

SEQ ID NO: 290224 - DNA, 25 bp, Probe Sequence
tcctcccggtgcccaagaatagatg

SEQ ID NO: 290225 - DNA, 25 bp, Probe Sequence
tcctccactgggtccgaatcagtag

SEQ ID NO: 290226 - DNA, 25 bp, Probe Sequence
tcctccagtgatctccagagctagt

SEQ ID NO: 290227 - DNA, 25 bp, Probe Sequence
tcctccagcgtctgccataggaatg

SEQ ID NO: 290228 - DNA, 25 bp, Probe Sequence
tcctcatccgtgtgctcattaaagg

SEQ ID NO: 290229 - DNA, 25 bp, Probe Sequence
tcctcatccctgtgttagaccggat

SEQ ID NO: 290230 - DNA, 25 bp, Probe Sequence
tcctctgttctgtgaatggactctg

SEQ ID NO: 290231 - DNA, 25 bp, Probe Sequence
tcctctgcttgacatggtggacctg

SEQ ID NO: 290232 - DNA, 25 bp, Probe Sequence
tcctcttctgggactgctgtgaggc

SEQ ID NO: 290233 - DNA, 25 bp, Probe Sequence
tcctcttctgggactgctgtgaggc

SEQ ID NO: 290234 - DNA, 25 bp, Probe Sequence
tcctgcgtctggacctggctggccg

SEQ ID NO: 290235 - DNA, 25 bp, Probe Sequence
tcctggccttgtctgtggagacgga

SEQ ID NO: 290236 - DNA, 25 bp, Probe Sequence
tcctggccttgtctgtggagacgga

SEQ ID NO: 290237 - DNA, 25 bp, Probe Sequence
tcctgggtgtgtccttgttaagtga

SEQ ID NO: 290238 - DNA, 25 bp, Probe Sequence
tccgcaaggttcatgtgaccaagga

SEQ ID NO: 290239 - DNA, 25 bp, Probe Sequence
tcctccaggagtatggcactcaggg

SEQ ID NO: 290240 - DNA, 25 bp, Probe Sequence
tcctgccgggatcatggtctgcggc

SEQ ID NO: 290241 - DNA, 25 bp, Probe Sequence
tcctgttggggtgtgtctcaggcag

SEQ ID NO: 290242 - DNA, 25 bp, Probe Sequence
tcctgggaggtgtttggcatcgtca

SEQ ID NO: 290243 - DNA, 25 bp, Probe Sequence
tcctccagaggggtccctcttgcag

SEQ ID NO: 290244 - DNA, 25 bp, Probe Sequence
tccccataaagcgttgaccattcca

SEQ ID NO: 290245 - DNA, 25 bp, Probe Sequence
tcccctaaatcttgtactgttcaca

SEQ ID NO: 290246 - DNA, 25 bp, Probe Sequence
tccctctgcacaacttacctttgtg

SEQ ID NO: 290247 - DNA, 25 bp, Probe Sequence
tcctcgtccaacataacctggtgag

SEQ ID NO: 290248 - DNA, 25 bp, Probe Sequence
tcctggatcccaagtcaaccattgt

SEQ ID NO: 290249 - DNA, 25 bp, Probe Sequence
tcctggtcacccagacacaaagatg

SEQ ID NO: 290250 - DNA, 25 bp, Probe Sequence
tcctgtctcccgatgaaaacatatc

SEQ ID NO: 290251 - DNA, 25 bp, Probe Sequence
tcctgatctaactgatgaaaatttc

SEQ ID NO: 290252 - DNA, 25 bp, Probe Sequence
tcctgctggaacttttcatatttct

SEQ ID NO: 290253 - DNA, 25 bp, Probe Sequence
tccggaaacttttatctcacactct

SEQ ID NO: 290254 - DNA, 25 bp, Probe Sequence
tccggacgacgtaatcactgacatt

SEQ ID NO: 290255 - DNA, 25 bp, Probe Sequence
tccgtgccagacatggacctatctg

SEQ ID NO: 290256 - DNA, 25 bp, Probe Sequence
tcctggtcgatgctcgactcattca

SEQ ID NO: 290257 - DNA, 25 bp, Probe Sequence
tcctgtgggtggacgcattcacgca

SEQ ID NO: 290258 - DNA, 25 bp, Probe Sequence
tcctgctggcctattgctataccaa

SEQ ID NO: 290259 - DNA, 25 bp, Probe Sequence
tcctgaggatggatctgcagatagt

SEQ ID NO: 290260 - DNA, 25 bp, Probe Sequence
tacgaggagctctgcatcgtcatgt

SEQ ID NO: 290261 - DNA, 25 bp, Probe Sequence
tccgagaagtcaggcacgtagctca

SEQ ID NO: 290262 - DNA, 25 bp, Probe Sequence
tccgtggacgaccactttgccaaag

SEQ ID NO: 290263 - DNA, 25 bp, Probe Sequence
tcctgaggaacatgcgctttgccaa

SEQ ID NO: 290264 - DNA, 25 bp, Probe Sequence
tcctgctggatgtcaagccttggga

SEQ ID NO: 290265 - DNA, 25 bp, Probe Sequence
tcctgctggatgtcaagccttggga

SEQ ID NO: 290266 - DNA, 25 bp, Probe Sequence
tcctgtctcatggaagcactggagg

SEQ ID NO: 290267 - DNA, 25 bp, Probe Sequence
tcctgtgctttctgcatgcttagag

SEQ ID NO: 290268 - DNA, 25 bp, Probe Sequence
tcctgtgctttctgcatgcttagag

SEQ ID NO: 290269 - DNA, 25 bp, Probe Sequence
tcctgatgttgcttggccattgaga

SEQ ID NO: 290270 - DNA, 25 bp, Probe Sequence
tcctgcattgtcttggtttgattag

SEQ ID NO: 290271 - DNA, 25 bp, Probe Sequence
tccgcatgctaatcgctttttaccg

SEQ ID NO: 290272 - DNA, 25 bp, Probe Sequence
tcctccaaagccgatttattgcccc

SEQ ID NO: 290273 - DNA, 25 bp, Probe Sequence
tcctccaaagccgatttattgcccc

SEQ ID NO: 290274 - DNA, 25 bp, Probe Sequence
tccgccaaagtggcttcaaggcccc

SEQ ID NO: 290275 - DNA, 25 bp, Probe Sequence
tcccctaagatgtttccagggccct

SEQ ID NO: 290276 - DNA, 25 bp, Probe Sequence
tcccccaaggactctcaggaggact

SEQ ID NO: 290277 - DNA, 25 bp, Probe Sequence
tcccccaaactcttttcagagaact

SEQ ID NO: 290278 - DNA, 25 bp, Probe Sequence
tcccctaaccccaaacatagatcac

SEQ ID NO: 290279 - DNA, 25 bp, Probe Sequence
tcccccaaccaggcattaaaacacg

SEQ ID NO: 290280 - DNA, 25 bp, Probe Sequence
tcccccaaacaagtgagaacataca

SEQ ID NO: 290281 - DNA, 25 bp, Probe Sequence
tcctccctaagagtctcctgacaaa

SEQ ID NO: 290282 - DNA, 25 bp, Probe Sequence
tcctcctctaagatggacaggcaca

SEQ ID NO: 290283 - DNA, 25 bp, Probe Sequence
tcctccagtaaagtgaaattcagca

SEQ ID NO: 290284 - DNA, 25 bp, Probe Sequence
tcctccaatcagttctacactgttg

SEQ ID NO: 290285 - DNA, 25 bp, Probe Sequence
tcctgtattgagttgtatcgtgtgg

SEQ ID NO: 290286 - DNA, 25 bp, Probe Sequence
tcctgcgttgcacttgtcattgtgt

SEQ ID NO: 290287 - DNA, 25 bp, Probe Sequence
tcctgcagggccagtcagagtgtta

SEQ ID NO: 290288 - DNA, 25 bp, Probe Sequence
tcctggtgaccagctgacagaggga

SEQ ID NO: 290289 - DNA, 25 bp, Probe Sequence
tcctggtggtcaacatgaagggcaa

SEQ ID NO: 290290 - DNA, 25 bp, Probe Sequence
tcctggggtcagaacaaagcttaat

SEQ ID NO: 290291 - DNA, 25 bp, Probe Sequence
tcctgcgtgtccgaaagaacttaac

SEQ ID NO: 290292 - DNA, 25 bp, Probe Sequence
tccgggtcctcctgaagtgataatt

SEQ ID NO: 290293 - DNA, 25 bp, Probe Sequence
tccccaaagcctttaaggtacatgt

SEQ ID NO: 290294 - DNA, 25 bp, Probe Sequence
tccccaacaaccatccaggtgacat

SEQ ID NO: 290295 - DNA, 25 bp, Probe Sequence
tccccctacctgggccagtgaaata

SEQ ID NO: 290296 - DNA, 25 bp, Probe Sequence
tcccttgtacttgcctactgtaata

SEQ ID NO: 290297 - DNA, 25 bp, Probe Sequence
tcgcttttttgtgcacttctatgac

SEQ ID NO: 290298 - DNA, 25 bp, Probe Sequence
tcctcttgttttaagcttctttcat

SEQ ID NO: 290299 - DNA, 25 bp, Probe Sequence
tcctctgttgattttttcttttgct

SEQ ID NO: 290300 - DNA, 25 bp, Probe Sequence
tcctctgttgattttttcttttgct

SEQ ID NO: 290301 - DNA, 25 bp, Probe Sequence
tcccagatttcgcaattcttctttc

SEQ ID NO: 290302 - DNA, 25 bp, Probe Sequence
tccccaggaccagagttctctttat

SEQ ID NO: 290303 - DNA, 25 bp, Probe Sequence
tcccgggatgccacagtttatttta

SEQ ID NO: 290304 - DNA, 25 bp, Probe Sequence
tcttcaggttccacatggtatagtt

SEQ ID NO: 290305 - DNA, 25 bp, Probe Sequence
tcctcggttcactctgagtcatcaa

SEQ ID NO: 290306 - DNA, 25 bp, Probe Sequence
tcctcggtgttgtctgtggtggaga

SEQ ID NO: 290307 - DNA, 25 bp, Probe Sequence
tcctctgtgtcttgactgtgggcaa

SEQ ID NO: 290308 - DNA, 25 bp, Probe Sequence
tcctctgtgtcaacatctctggagc

SEQ ID NO: 290309 - DNA, 25 bp, Probe Sequence
tcctcatctgtcacatcgctacaga

SEQ ID NO: 290310 - DNA, 25 bp, Probe Sequence
tcctcttgtctactccagacagtta

SEQ ID NO: 290311 - DNA, 25 bp, Probe Sequence
tctccattgatctgccaaatcgtta

SEQ ID NO: 290312 - DNA, 25 bp, Probe Sequence
tcctgttgaattgcaccatcgtgaa

SEQ ID NO: 290313 - DNA, 25 bp, Probe Sequence
tcctgaatacaagcctatgcgtgaa

SEQ ID NO: 290314 - DNA, 25 bp, Probe Sequence
tcctgcaagaaaagctgctgctcct

SEQ ID NO: 290315 - DNA, 25 bp, Probe Sequence
tcctggatgaatagactgtgctttt

SEQ ID NO: 290316 - DNA, 25 bp, Probe Sequence
tcctggaggtggtcgtttttgaggg

SEQ ID NO: 290317 - DNA, 25 bp, Probe Sequence
tcctctgggtggtgaagttcaattc

SEQ ID NO: 290318 - DNA, 25 bp, Probe Sequence
tcccgggaggatgaagttcgtgtac

SEQ ID NO: 290319 - DNA, 25 bp, Probe Sequence
tcccgggatagagaagtctttaaat

SEQ ID NO: 290320 - DNA, 25 bp, Probe Sequence
tccctgaagttttacgtgccttgca

SEQ ID NO: 290321 - DNA, 25 bp, Probe Sequence
tccccaaccttattctgtgtgtaga

SEQ ID NO: 290322 - DNA, 25 bp, Probe Sequence
tccccttgtttctttgggtgagaag

SEQ ID NO: 290323 - DNA, 25 bp, Probe Sequence
tcctgccttcttccttgaggggcag

SEQ ID NO: 290324 - DNA, 25 bp, Probe Sequence
tcctgctcttttgttactgagtgag

SEQ ID NO: 290325 - DNA, 25 bp, Probe Sequence
tcctgttttatcttctattcagtag

SEQ ID NO: 290326 - DNA, 25 bp, Probe Sequence
tcctgtttcttgtttaatagtagtc

SEQ ID NO: 290327 - DNA, 25 bp, Probe Sequence
tccgttttgtattagaatgactgtt

SEQ ID NO: 290328 - DNA, 25 bp, Probe Sequence
tcctcttttacgtgaatgactatat

SEQ ID NO: 290329 - DNA, 25 bp, Probe Sequence
tcctcttttctttcaagaactatat

SEQ ID NO: 290330 - DNA, 25 bp, Probe Sequence
tccctaaccctgtctaaactaatgg

SEQ ID NO: 290331 - DNA, 25 bp, Probe Sequence
tccctaagtccaactactaaactgg

SEQ ID NO: 290332 - DNA, 25 bp, Probe Sequence
tcccgacgttgatctcttacaactg

SEQ ID NO: 290333 - DNA, 25 bp, Probe Sequence
tccgcaccgttccacagtataaata

SEQ ID NO: 290334 - DNA, 25 bp, Probe Sequence
tccgatccgtccctaacaaactagg

SEQ ID NO: 290335 - DNA, 25 bp, Probe Sequence
tcctgtccagtctgctattgaaact

SEQ ID NO: 290336 - DNA, 25 bp, Probe Sequence
tcctgtccccaaggacacacataca

SEQ ID NO: 290337 - DNA, 25 bp, Probe Sequence
tcctgtcaactggatggaaacacaa

SEQ ID NO: 290338 - DNA, 25 bp, Probe Sequence
tcctgtcaactggatggaaacacaa

SEQ ID NO: 290339 - DNA, 25 bp, Probe Sequence
tcctccaacttgatgcagaagaaac

SEQ ID NO: 290340 - DNA, 25 bp, Probe Sequence
tcctccatcagcatgttagacaact

SEQ ID NO: 290341 - DNA, 25 bp, Probe Sequence
tcctggccagcttctataccaagta

SEQ ID NO: 290342 - DNA, 25 bp, Probe Sequence
tcctgaacaggagtcttctgaagtt

SEQ ID NO: 290343 - DNA, 25 bp, Probe Sequence
tcctctgactaggtttctaatttct

SEQ ID NO: 290344 - DNA, 25 bp, Probe Sequence
tcctctgaataccttcctacattat

SEQ ID NO: 290345 - DNA, 25 bp, Probe Sequence
tcctgctaaagtctcctgttgttta

SEQ ID NO: 290346 - DNA, 25 bp, Probe Sequence
tcctgctttagtcctttgtaatttg

SEQ ID NO: 290347 - DNA, 25 bp, Probe Sequence
tcctgcttttggctttaccatatgt

SEQ ID NO: 290348 - DNA, 25 bp, Probe Sequence
tcctgtttgtgatctattatgcctt

SEQ ID NO: 290349 - DNA, 25 bp, Probe Sequence
tcctgatgttggtattctctgagtt

SEQ ID NO: 290350 - DNA, 25 bp, Probe Sequence
tcctgctgtgggtttgcttaatgag

SEQ ID NO: 290351 - DNA, 25 bp, Probe Sequence
tcctgttccgtgaccttagatgcag

SEQ ID NO: 290352 - DNA, 25 bp, Probe Sequence
tccgttctcgaaccttcataatcat

SEQ ID NO: 290353 - DNA, 25 bp, Probe Sequence
tccccctgctgagactttaatctcc

SEQ ID NO: 290354 - DNA, 25 bp, Probe Sequence
tcctccgtcagaaattattactctc

SEQ ID NO: 290355 - DNA, 25 bp, Probe Sequence
tcctctcttctgataaattccccat

SEQ ID NO: 290356 - DNA, 25 bp, Probe Sequence
tccgctgtcacggtaaagtccgcca

SEQ ID NO: 290357 - DNA, 25 bp, Probe Sequence
tcctctgtcacttcaaaactccagc

SEQ ID NO: 290358 - DNA, 25 bp, Probe Sequence
tcctgctgcaactcaagttccacag

SEQ ID NO: 290359 - DNA, 25 bp, Probe Sequence
tacctaaatatcagtctccacggga

SEQ ID NO: 290360 - DNA, 25 bp, Probe Sequence
taattaaaggctttgcaacaccaaa

SEQ ID NO: 290361 - DNA, 25 bp, Probe Sequence
tttaaaaggctatagagtccaaagg

SEQ ID NO: 290362 - DNA, 25 bp, Probe Sequence
tttggatctagggttaggccaaaga

SEQ ID NO: 290363 - DNA, 25 bp, Probe Sequence
tcctgtgtctttgtaatggccaaat

SEQ ID NO: 290364 - DNA, 25 bp, Probe Sequence
tcctgttccttggaaaatctccatt

SEQ ID NO: 290365 - DNA, 25 bp, Probe Sequence
tcctgttccgagcaacttttctaat

SEQ ID NO: 290366 - DNA, 25 bp, Probe Sequence
tccgtccaaggactgacttttcaga

SEQ ID NO: 290367 - DNA, 25 bp, Probe Sequence
tcctggtcaatatggacatgtcttt

SEQ ID NO: 290368 - DNA, 25 bp, Probe Sequence
tcctgctgtagttcttgcagcttat

SEQ ID NO: 290369 - DNA, 25 bp, Probe Sequence
tcctgcagtcagaaattccttgtat

SEQ ID NO: 290370 - DNA, 25 bp, Probe Sequence
tcctgcggagctatcagccagtata

SEQ ID NO: 290371 - DNA, 25 bp, Probe Sequence
tcctgcgggctaggcagccaggagc

SEQ ID NO: 290372 - DNA, 25 bp, Probe Sequence
tcctggagtggaagaccgcacgcac

SEQ ID NO: 290373 - DNA, 25 bp, Probe Sequence
tccgggcatgtgaagaggcaccacc

SEQ ID NO: 290374 - DNA, 25 bp, Probe Sequence
tccgcggctgatcgcggagctggcc

SEQ ID NO: 290375 - DNA, 25 bp, Probe Sequence
tccgcagggtggctgaagagtccgc

SEQ ID NO: 290376 - DNA, 25 bp, Probe Sequence
tccgaaatgtcgtaacaactccgcc

SEQ ID NO: 290377 - DNA, 25 bp, Probe Sequence
tccgaaatgtcgtaacaactccgcc

SEQ ID NO: 290378 - DNA, 25 bp, Probe Sequence
tccggatattcacaaaactgccttc

SEQ ID NO: 290379 - DNA, 25 bp, Probe Sequence
tcctgccttacacatagaagcattc

SEQ ID NO: 290380 - DNA, 25 bp, Probe Sequence
tcctgccttcaattcttatacctgc

SEQ ID NO: 290381 - DNA, 25 bp, Probe Sequence
tcctctcttcatactgtttgaagtc

SEQ ID NO: 290382 - DNA, 25 bp, Probe Sequence
tcctctctgttgtttttaatctgca

SEQ ID NO: 290383 - DNA, 25 bp, Probe Sequence
tcctctctttaaatgtgatagtctc

SEQ ID NO: 290384 - DNA, 25 bp, Probe Sequence
tcgatctgcttgggatgatggaggt

SEQ ID NO: 290385 - DNA, 25 bp, Probe Sequence
tcctctccatgggatgatgacagcg

SEQ ID NO: 290386 - DNA, 25 bp, Probe Sequence
tcctgtgcatcaaggacatggccgg

SEQ ID NO: 290387 - DNA, 25 bp, Probe Sequence
tcctgccatcaaaccggcactgagc

SEQ ID NO: 290388 - DNA, 25 bp, Probe Sequence
tcctcctccaaacggactgagtgct

SEQ ID NO: 290389 - DNA, 25 bp, Probe Sequence
tcctgctcttaatcgtgtgagatgg

SEQ ID NO: 290390 - DNA, 25 bp, Probe Sequence
tcctgctcttaactcgatgacttgg

SEQ ID NO: 290391 - DNA, 25 bp, Probe Sequence
tcctcctatcaaggcagctattgtg

SEQ ID NO: 290392 - DNA, 25 bp, Probe Sequence
tcctcccatgtcactgcagattgag

SEQ ID NO: 290393 - DNA, 25 bp, Probe Sequence
tcctctgcaagtccatctatgttgt

SEQ ID NO: 290394 - DNA, 25 bp, Probe Sequence
tcctgtcacactacagtcatttctt

SEQ ID NO: 290395 - DNA, 25 bp, Probe Sequence
tctctgtgaccatcagctttaggat

SEQ ID NO: 290396 - DNA, 25 bp, Probe Sequence
tcctgtgcctcttactacttggagt

SEQ ID NO: 290397 - DNA, 25 bp, Probe Sequence
tcctgcagctctgaagtggttctga

SEQ ID NO: 290398 - DNA, 25 bp, Probe Sequence
tcctctgcttcataggtgttctgca

SEQ ID NO: 290399 - DNA, 25 bp, Probe Sequence
tcctcctttctttgctgtttgcaat

SEQ ID NO: 290400 - DNA, 25 bp, Probe Sequence
tcctcccgattattgcgtattctaa

SEQ ID NO: 290401 - DNA, 25 bp, Probe Sequence
tcctccctgataagagttgtccaaa

SEQ ID NO: 290402 - DNA, 25 bp, Probe Sequence
tcctgccttgtgagatgtggcccca

SEQ ID NO: 290403 - DNA, 25 bp, Probe Sequence
tcctccctctgaggcgtgaggactc

SEQ ID NO: 290404 - DNA, 25 bp, Probe Sequence
tcctccggccctggagggagcatct

SEQ ID NO: 290405 - DNA, 25 bp, Probe Sequence
tcctgactgcctgatggggtgactt

SEQ ID NO: 290406 - DNA, 25 bp, Probe Sequence
tcctgacaccatgagggccagcagc

SEQ ID NO: 290407 - DNA, 25 bp, Probe Sequence
tcctgacacctccagaacgcaggtg

SEQ ID NO: 290408 - DNA, 25 bp, Probe Sequence
tccggcatggcggagagaacgtggc

SEQ ID NO: 290409 - DNA, 25 bp, Probe Sequence
tccggggcgagtgacacgcagagct

SEQ ID NO: 290410 - DNA, 25 bp, Probe Sequence
tccgagtggctgcctacaacaaagc

SEQ ID NO: 290411 - DNA, 25 bp, Probe Sequence
tcctgagctgcctgctaaaaggaaa

SEQ ID NO: 290412 - DNA, 25 bp, Probe Sequence
tcctgatcctctgtagaaaggattt

SEQ ID NO: 290413 - DNA, 25 bp, Probe Sequence
tacacaaccaagtgaaaggattaat

SEQ ID NO: 290414 - DNA, 25 bp, Probe Sequence
tcccaatccaagtgaataaaccaag

SEQ ID NO: 290415 - DNA, 25 bp, Probe Sequence
tccccatccatagatagacataacc

SEQ ID NO: 290416 - DNA, 25 bp, Probe Sequence
tccccacacatagccaacatcgggc

SEQ ID NO: 290417 - DNA, 25 bp, Probe Sequence
tcctccactctttaacagctgctgg

SEQ ID NO: 290418 - DNA, 25 bp, Probe Sequence
tcctccactctttaacagctgctgg

SEQ ID NO: 290419 - DNA, 25 bp, Probe Sequence
tccccacggttatatgtgtgtccct

SEQ ID NO: 290420 - DNA, 25 bp, Probe Sequence
tccctccttctctaaatgtagtccc

SEQ ID NO: 290421 - DNA, 25 bp, Probe Sequence
tccccttcctagcaatgaggtcctt

SEQ ID NO: 290422 - DNA, 25 bp, Probe Sequence
tcgcctgctacaaaaacaaggtcgt

SEQ ID NO: 290423 - DNA, 25 bp, Probe Sequence
tcccgtccctgatgacaaagatctt

SEQ ID NO: 290424 - DNA, 25 bp, Probe Sequence
tcctcgtcctggtcaactatatctt

SEQ ID NO: 290425 - DNA, 25 bp, Probe Sequence
tcctctgtcctgatctaggtgtcta

SEQ ID NO: 290426 - DNA, 25 bp, Probe Sequence
tcctctgttcaatcatgggtgtatt

SEQ ID NO: 290427 - DNA, 25 bp, Probe Sequence
tcctgtttcatgttcactggtattt

SEQ ID NO: 290428 - DNA, 25 bp, Probe Sequence
tcgctttgtagacaaggttcattta

SEQ ID NO: 290429 - DNA, 25 bp, Probe Sequence
tcgtactggatatacgttaattatc

SEQ ID NO: 290430 - DNA, 25 bp, Probe Sequence
tcttagtgctaataccttgcctctt

SEQ ID NO: 290431 - DNA, 25 bp, Probe Sequence
tttggatataaatcttacccttcaa

SEQ ID NO: 290432 - DNA, 25 bp, Probe Sequence
tctgaggaatttgttttcgccttac

SEQ ID NO: 290433 - DNA, 25 bp, Probe Sequence
tcctggacatttggtattctgccct

SEQ ID NO: 290434 - DNA, 25 bp, Probe Sequence
tcctcgatcttcagttgagcttcct

SEQ ID NO: 290435 - DNA, 25 bp, Probe Sequence
tcctcctttaactgagtcatcatct

SEQ ID NO: 290436 - DNA, 25 bp, Probe Sequence
tcctcctaacagtaggcttatcgcc

SEQ ID NO: 290437 - DNA, 25 bp, Probe Sequence
tcttcaaaaaggagtttgcaccctc

SEQ ID NO: 290438 - DNA, 25 bp, Probe Sequence
tcctgacaaaggcggcttctgcgtc

SEQ ID NO: 290439 - DNA, 25 bp, Probe Sequence
tcctggtgaaggtgggcacggtcac

SEQ ID NO: 290440 - DNA, 25 bp, Probe Sequence
tcctggactaagtccggctcgttca

SEQ ID NO: 290441 - DNA, 25 bp, Probe Sequence
tcctgtgaagaatcagggtcagtgt

SEQ ID NO: 290442 - DNA, 25 bp, Probe Sequence
tcctgtatcacctcagtgtttgctg

SEQ ID NO: 290443 - DNA, 25 bp, Probe Sequence
tcgtcgccctcgagatgattatcgt

SEQ ID NO: 290444 - DNA, 25 bp, Probe Sequence
tcgtggtcgtcgcgctgagaaagtt

SEQ ID NO: 290445 - DNA, 25 bp, Probe Sequence
tccggaccttgcccatggagaagtt

SEQ ID NO: 290446 - DNA, 25 bp, Probe Sequence
tcctggaatcttggccgtccaggtt

SEQ ID NO: 290447 - DNA, 25 bp, Probe Sequence
tcctggaacttggatcttaagagat

SEQ ID NO: 290448 - DNA, 25 bp, Probe Sequence
tcctgtgcctttggacctaacacta

SEQ ID NO: 290449 - DNA, 25 bp, Probe Sequence
tcctgctcctgttgtacctaagcaa

SEQ ID NO: 290450 - DNA, 25 bp, Probe Sequence
tcctgtccttgggtctgcaagagaa

SEQ ID NO: 290451 - DNA, 25 bp, Probe Sequence
tcctgtctctcgaatcttccagaga

SEQ ID NO: 290452 - DNA, 25 bp, Probe Sequence
tcctgaccatgactatcattcaaag

SEQ ID NO: 290453 - DNA, 25 bp, Probe Sequence
tccgtctcaagcatattaacaggga

SEQ ID NO: 290454 - DNA, 25 bp, Probe Sequence
tccgcatcctcagagatatcgagca

SEQ ID NO: 290455 - DNA, 25 bp, Probe Sequence
tcctgttctcagggtgacgactgcc

SEQ ID NO: 290456 - DNA, 25 bp, Probe Sequence
tcctgcgcttgagggggggtgtcta

SEQ ID NO: 290457 - DNA, 25 bp, Probe Sequence
tcctgcgcttgagggggggtgtcta

SEQ ID NO: 290458 - DNA, 25 bp, Probe Sequence
tcccctacaggtggggcggtccagg

SEQ ID NO: 290459 - DNA, 25 bp, Probe Sequence
tccgactgggagccggaggaacggg

SEQ ID NO: 290460 - DNA, 25 bp, Probe Sequence
tccggcatggagagagagcggaaag

SEQ ID NO: 290461 - DNA, 25 bp, Probe Sequence
tccgctctggagcatgaggctggat

SEQ ID NO: 290462 - DNA, 25 bp, Probe Sequence
tcctgcaccaggcctgggtgagtgg

SEQ ID NO: 290463 - DNA, 25 bp, Probe Sequence
tcctccagagggtctgaggcaatag

SEQ ID NO: 290464 - DNA, 25 bp, Probe Sequence
tccgccagtgggtaatcgccctggc

SEQ ID NO: 290465 - DNA, 25 bp, Probe Sequence
tcctccaggcagcccaatggggctg

SEQ ID NO: 290466 - DNA, 25 bp, Probe Sequence
tcctccaggcagcccaatggggctg

SEQ ID NO: 290467 - DNA, 25 bp, Probe Sequence
tcctccatgggccctgcaggagggg

SEQ ID NO: 290468 - DNA, 25 bp, Probe Sequence
tcctccatgggccctgcaggagggg

SEQ ID NO: 290469 - DNA, 25 bp, Probe Sequence
tcctccgtccgctaagtatggcggg

SEQ ID NO: 290470 - DNA, 25 bp, Probe Sequence
tcctggtcccgagaggaggtggggc

SEQ ID NO: 290471 - DNA, 25 bp, Probe Sequence
tccggcccctcagagacatagtggc

SEQ ID NO: 290472 - DNA, 25 bp, Probe Sequence
tcctgtcacccattttgaagagtgg

SEQ ID NO: 290473 - DNA, 25 bp, Probe Sequence
tcctgacctgcatgttctattttgg

SEQ ID NO: 290474 - DNA, 25 bp, Probe Sequence
tcctgacgctaagagcttcgtgctg

SEQ ID NO: 290475 - DNA, 25 bp, Probe Sequence
tcctgggtactgggcatgtgcctgt

SEQ ID NO: 290476 - DNA, 25 bp, Probe Sequence
tcctgggtactgggcatgtgcctgt

SEQ ID NO: 290477 - DNA, 25 bp, Probe Sequence
tccgggaactgcagctgtgcagcag

SEQ ID NO: 290478 - DNA, 25 bp, Probe Sequence
tccgggaactgcagctgtgcagcag

SEQ ID NO: 290479 - DNA, 25 bp, Probe Sequence
tcctgtggcataatgtgatggtcaa

SEQ ID NO: 290480 - DNA, 25 bp, Probe Sequence
tcctgtggcacaacatgaagctccc

SEQ ID NO: 290481 - DNA, 25 bp, Probe Sequence
tcctgccttcaccatgaagtccagc

SEQ ID NO: 290482 - DNA, 25 bp, Probe Sequence
tcctccatcctgctggatgtcaagc

SEQ ID NO: 290483 - DNA, 25 bp, Probe Sequence
tcctccatcctgctggatgtcaagc

SEQ ID NO: 290484 - DNA, 25 bp, Probe Sequence
tcctccacctggggcatgtggacca

SEQ ID NO: 290485 - DNA, 25 bp, Probe Sequence
tcctccacctggggcatgtggacca

SEQ ID NO: 290486 - DNA, 25 bp, Probe Sequence
tcctgcctccggtgaggctgagcca

SEQ ID NO: 290487 - DNA, 25 bp, Probe Sequence
tccgcgtccaggtggatggcagcat

SEQ ID NO: 290488 - DNA, 25 bp, Probe Sequence
tccgtgtgcggggaggtaacaagaa

SEQ ID NO: 290489 - DNA, 25 bp, Probe Sequence
tccggcgcggtggagggaaacgcct

SEQ ID NO: 290490 - DNA, 25 bp, Probe Sequence
tcctggccgggtaagggtgcctagc

SEQ ID NO: 290491 - DNA, 25 bp, Probe Sequence
tcctggcactgtggccaagaggtgc

SEQ ID NO: 290492 - DNA, 25 bp, Probe Sequence
tcctggtagctggcacaaggaggcc

SEQ ID NO: 290493 - DNA, 25 bp, Probe Sequence
tcctggtcaccggcaagacggccga

SEQ ID NO: 290494 - DNA, 25 bp, Probe Sequence
tcctggtcaccggcaagacggccga

SEQ ID NO: 290495 - DNA, 25 bp, Probe Sequence
tcggttaatccctgtctggactgag

SEQ ID NO: 290496 - DNA, 25 bp, Probe Sequence
tccgttttcttccgttgtgaatgcc

SEQ ID NO: 290497 - DNA, 25 bp, Probe Sequence
tccgttttcttccgttgtgaatgcc

SEQ ID NO: 290498 - DNA, 25 bp, Probe Sequence
tccgttctccttccgcaaggaacgt

SEQ ID NO: 290499 - DNA, 25 bp, Probe Sequence
tcctgtcttcactgagcgcagggct

SEQ ID NO: 290500 - DNA, 25 bp, Probe Sequence
tccgtttatcaggacacgggcccca

SEQ ID NO: 290501 - DNA, 25 bp, Probe Sequence
tccggcttgaaggaaccaacgtcca

SEQ ID NO: 290502 - DNA, 25 bp, Probe Sequence
tcctgtttgttacacacaagggcca

SEQ ID NO: 290503 - DNA, 25 bp, Probe Sequence
tcctgttctttcttacacaagagct

SEQ ID NO: 290504 - DNA, 25 bp, Probe Sequence
tccgaaaattgctaagacagtagat

SEQ ID NO: 290505 - DNA, 25 bp, Probe Sequence
tcctggacactttacagactttgct

SEQ ID NO: 290506 - DNA, 25 bp, Probe Sequence
tcctgtagaatttcagcatccttac

SEQ ID NO: 290507 - DNA, 25 bp, Probe Sequence
tcctgtaagatttcatactctatga

SEQ ID NO: 290508 - DNA, 25 bp, Probe Sequence
tcctgctaaatgactagacttcagc

SEQ ID NO: 290509 - DNA, 25 bp, Probe Sequence
tcccatgaaaggtggctccacggtc

SEQ ID NO: 290510 - DNA, 25 bp, Probe Sequence
tccccaactgagtgtcttactgtgt

SEQ ID NO: 290511 - DNA, 25 bp, Probe Sequence
tccccacaggttgtcattacttaat

SEQ ID NO: 290512 - DNA, 25 bp, Probe Sequence
tcccttgcaatgtgagtttactgat

SEQ ID NO: 290513 - DNA, 25 bp, Probe Sequence
tcctgctaagtgtggcttctagagt

SEQ ID NO: 290514 - DNA, 25 bp, Probe Sequence
tcctgctagatttcgtattctagta

SEQ ID NO: 290515 - DNA, 25 bp, Probe Sequence
tcgcgttgttatatttctaaaccaa

SEQ ID NO: 290516 - DNA, 25 bp, Probe Sequence
tcccttgacttcttgtttcaattac

SEQ ID NO: 290517 - DNA, 25 bp, Probe Sequence
tccctaccttcatgttccagtggaa

SEQ ID NO: 290518 - DNA, 25 bp, Probe Sequence
tccctaccttcatgttccagtggaa

SEQ ID NO: 290519 - DNA, 25 bp, Probe Sequence
tccgaggccttgtgtcatggggtaa

SEQ ID NO: 290520 - DNA, 25 bp, Probe Sequence
tccgccccttgacgctatggcggta

SEQ ID NO: 290521 - DNA, 25 bp, Probe Sequence
tcctggtcttattggtcctggtgat

SEQ ID NO: 290522 - DNA, 25 bp, Probe Sequence
tcctgtttgctgtatgggctcgggt

SEQ ID NO: 290523 - DNA, 25 bp, Probe Sequence
tcctgtttcatttgagcctccaaac

SEQ ID NO: 290524 - DNA, 25 bp, Probe Sequence
tcctgtgttctgtaagtcacctaaa

SEQ ID NO: 290525 - DNA, 25 bp, Probe Sequence
tccgatcgactgccaagcagcagcc

SEQ ID NO: 290526 - DNA, 25 bp, Probe Sequence
tccgatcaatagctcacgcagctcc

SEQ ID NO: 290527 - DNA, 25 bp, Probe Sequence
tccgcatcgtccgtgacgacatgct

SEQ ID NO: 290528 - DNA, 25 bp, Probe Sequence
tccgcatcgtccgtgacgacatgct

SEQ ID NO: 290529 - DNA, 25 bp, Probe Sequence
tccgtcattcacagggacatggaaa

SEQ ID NO: 290530 - DNA, 25 bp, Probe Sequence
tcgcttaagcacaggagttggaatc

SEQ ID NO: 290531 - DNA, 25 bp, Probe Sequence
tcctgtgaacactggagtcttgcaa

SEQ ID NO: 290532 - DNA, 25 bp, Probe Sequence
tcctgtgacctcagggtttggccca

SEQ ID NO: 290533 - DNA, 25 bp, Probe Sequence
tcctgcttttcaagtcagtttggca

SEQ ID NO: 290534 - DNA, 25 bp, Probe Sequence
tcctgctttctctttcagtattaaa

SEQ ID NO: 290535 - DNA, 25 bp, Probe Sequence
tcctgcacctactttaatgatatag

SEQ ID NO: 290536 - DNA, 25 bp, Probe Sequence
tcctgaccgactactgcaaagccag

SEQ ID NO: 290537 - DNA, 25 bp, Probe Sequence
tcctgctcttaaacgcaaggcccga

SEQ ID NO: 290538 - DNA, 25 bp, Probe Sequence
tcgccttttaggctcaggacggaag

SEQ ID NO: 290539 - DNA, 25 bp, Probe Sequence
tccctgctttggtgtaggggttggg

SEQ ID NO: 290540 - DNA, 25 bp, Probe Sequence
tcccccttggcatttagttggtact

SEQ ID NO: 290541 - DNA, 25 bp, Probe Sequence
tccgccctttttaattagtgtagct

SEQ ID NO: 290542 - DNA, 25 bp, Probe Sequence
tccgtctcttaagtaattggttagt

SEQ ID NO: 290543 - DNA, 25 bp, Probe Sequence
tcctggcacaataattttatggtta

SEQ ID NO: 290544 - DNA, 25 bp, Probe Sequence
tcctggtcatctgcattgtggtggt

SEQ ID NO: 290545 - DNA, 25 bp, Probe Sequence
tccggcctgcaggcatggtgtggta

SEQ ID NO: 290546 - DNA, 25 bp, Probe Sequence
tccgtgtgtggagggttggtgaaac

SEQ ID NO: 290547 - DNA, 25 bp, Probe Sequence
tcctggagtgcgtgagcctggtgga

SEQ ID NO: 290548 - DNA, 25 bp, Probe Sequence
tcctgccagggtgactctggtggcc

SEQ ID NO: 290549 - DNA, 25 bp, Probe Sequence
tcctgcaagggcgactctggagggc

SEQ ID NO: 290550 - DNA, 25 bp, Probe Sequence
tcctgtaatcctagcactttaggaa

SEQ ID NO: 290551 - DNA, 25 bp, Probe Sequence
tcgaagtgctccagcagtactaccc

SEQ ID NO: 290552 - DNA, 25 bp, Probe Sequence
tcgaaatccacctgtcaggacgcct

SEQ ID NO: 290553 - DNA, 25 bp, Probe Sequence
tctaggacccaattctatagccctt

SEQ ID NO: 290554 - DNA, 25 bp, Probe Sequence
tccgacagctccaatactgtgaccc

SEQ ID NO: 290555 - DNA, 25 bp, Probe Sequence
tcctgaagctcagaaccaaccctgt

SEQ ID NO: 290556 - DNA, 25 bp, Probe Sequence
tccgaagctctggaagcgcaagccc

SEQ ID NO: 290557 - DNA, 25 bp, Probe Sequence
tccgaagctctggaagcgcaagccc

SEQ ID NO: 290558 - DNA, 25 bp, Probe Sequence
tccggctgcttggaagcctggacgt

SEQ ID NO: 290559 - DNA, 25 bp, Probe Sequence
tcctgagctcttcgaagcactgggc

SEQ ID NO: 290560 - DNA, 25 bp, Probe Sequence
tcctgcgcctgtatcatgactgagg

SEQ ID NO: 290561 - DNA, 25 bp, Probe Sequence
tcctgccctgttgtgtatagatgca

SEQ ID NO: 290562 - DNA, 25 bp, Probe Sequence
tcctgcccagttatctgcatagata

SEQ ID NO: 290563 - DNA, 25 bp, Probe Sequence
tcctgcccagctacgacatggagta

SEQ ID NO: 290564 - DNA, 25 bp, Probe Sequence
tcctgcccagctacgacatggagta

SEQ ID NO: 290565 - DNA, 25 bp, Probe Sequence
tcctgttcacttgtgcatgggctaa

SEQ ID NO: 290566 - DNA, 25 bp, Probe Sequence
tcctgtcttttgtgcatgggcgacc

SEQ ID NO: 290567 - DNA, 25 bp, Probe Sequence
tcctgttggttattctgagtctgac

SEQ ID NO: 290568 - DNA, 25 bp, Probe Sequence
tcctgtcttgttcataaattgacaa

SEQ ID NO: 290569 - DNA, 25 bp, Probe Sequence
tcctgacaattcccatattaataaa

SEQ ID NO: 290570 - DNA, 25 bp, Probe Sequence
tcctggatatctgtgtattttcaaa

SEQ ID NO: 290571 - DNA, 25 bp, Probe Sequence
tcctggatgacgtgtccttgacaca

SEQ ID NO: 290572 - DNA, 25 bp, Probe Sequence
tcctggtggcgtggtctatggagct

SEQ ID NO: 290573 - DNA, 25 bp, Probe Sequence
tcctggggcgctggttcagcgcggg

SEQ ID NO: 290574 - DNA, 25 bp, Probe Sequence
tcctggggcatcgggtgcagcaggg

SEQ ID NO: 290575 - DNA, 25 bp, Probe Sequence
tcctggtgctcatgggcacctgggc

SEQ ID NO: 290576 - DNA, 25 bp, Probe Sequence
tccggaggcaagatcacctgcggga

SEQ ID NO: 290577 - DNA, 25 bp, Probe Sequence
tcccggctggatatccgtgtgggga

SEQ ID NO: 290578 - DNA, 25 bp, Probe Sequence
tccgactgtggtgtctttgctgagg

SEQ ID NO: 290579 - DNA, 25 bp, Probe Sequence
tccgtctcccatgttatatgctggc

SEQ ID NO: 290580 - DNA, 25 bp, Probe Sequence
tcctgtcacccaggctggtatgcgg

SEQ ID NO: 290581 - DNA, 25 bp, Probe Sequence
tccgtcgccgccaagatgatgtgcg

SEQ ID NO: 290582 - DNA, 25 bp, Probe Sequence
tccgtggggccaatgaggatgagct

SEQ ID NO: 290583 - DNA, 25 bp, Probe Sequence
tccggggcgctgcatagagtgctgt

SEQ ID NO: 290584 - DNA, 25 bp, Probe Sequence
tccggggcgctgcatagagtgctgt

SEQ ID NO: 290585 - DNA, 25 bp, Probe Sequence
tccgctggagcgctctggagagcga

SEQ ID NO: 290586 - DNA, 25 bp, Probe Sequence
tcctgctaaggccattggacacaga

SEQ ID NO: 290587 - DNA, 25 bp, Probe Sequence
tcctgtccatgaccttgggcacagg

SEQ ID NO: 290588 - DNA, 25 bp, Probe Sequence
tcctgtccatgaccttgggcacagg

SEQ ID NO: 290589 - DNA, 25 bp, Probe Sequence
tcctgtctgagccctgaagagccag

SEQ ID NO: 290590 - DNA, 25 bp, Probe Sequence
tcctgtgctcagccctgaggacaga

SEQ ID NO: 290591 - DNA, 25 bp, Probe Sequence
tcctgtgtgacagcagatgcaaaga

SEQ ID NO: 290592 - DNA, 25 bp, Probe Sequence
tccgtgtgatgcccagtaaagcctg

SEQ ID NO: 290593 - DNA, 25 bp, Probe Sequence
tcgcttgcattgtctgcagtaggag

SEQ ID NO: 290594 - DNA, 25 bp, Probe Sequence
tcctgtgcaggctcatgctgcaggc

SEQ ID NO: 290595 - DNA, 25 bp, Probe Sequence
tcctggagcagcctctccatggatg

SEQ ID NO: 290596 - DNA, 25 bp, Probe Sequence
tcctggagcagcaaccactgcagcg

SEQ ID NO: 290597 - DNA, 25 bp, Probe Sequence
tcctggcaaatactcctgcaggcca

SEQ ID NO: 290598 - DNA, 25 bp, Probe Sequence
tccgccagatcatcggtcaggccaa

SEQ ID NO: 290599 - DNA, 25 bp, Probe Sequence
tccccagatcccagtatgactacat

SEQ ID NO: 290600 - DNA, 25 bp, Probe Sequence
tcccgaagccggatgcatacgacct

SEQ ID NO: 290601 - DNA, 25 bp, Probe Sequence
tcatcccggatctgtaaccgaccgt

SEQ ID NO: 290602 - DNA, 25 bp, Probe Sequence
tccctgggaccgtaaaataaggctg

SEQ ID NO: 290603 - DNA, 25 bp, Probe Sequence
tccctggacaccctcaaatgggggt

SEQ ID NO: 290604 - DNA, 25 bp, Probe Sequence
tcctgggccagccttcaagctgggt

SEQ ID NO: 290605 - DNA, 25 bp, Probe Sequence
tccgtgtgacgtttctgagtgtagt

SEQ ID NO: 290606 - DNA, 25 bp, Probe Sequence
tcctggctgtttttgtgcctgtttg

SEQ ID NO: 290607 - DNA, 25 bp, Probe Sequence
tcctgtttactttgtcatcagttgg

SEQ ID NO: 290608 - DNA, 25 bp, Probe Sequence
tcctggactgacaggctacagttga

SEQ ID NO: 290609 - DNA, 25 bp, Probe Sequence
tcctggagtacttccaacagttgct

SEQ ID NO: 290610 - DNA, 25 bp, Probe Sequence
tcctggcattcagtcctcaaatgtg

SEQ ID NO: 290611 - DNA, 25 bp, Probe Sequence
tcctgggccagctctcagaagtggc

SEQ ID NO: 290612 - DNA, 25 bp, Probe Sequence
tcctgagagccactaatgtaagata

SEQ ID NO: 290613 - DNA, 25 bp, Probe Sequence
tccggagcctcaacttcaggatgtt

SEQ ID NO: 290614 - DNA, 25 bp, Probe Sequence
tcctgaagcactaccttcagagggg

SEQ ID NO: 290615 - DNA, 25 bp, Probe Sequence
tcctgaagcccagcgacacagaagg

SEQ ID NO: 290616 - DNA, 25 bp, Probe Sequence
tcctgaagcccagcgacacagaagg

SEQ ID NO: 290617 - DNA, 25 bp, Probe Sequence
tccgaagtcctgggactgcgggatg

SEQ ID NO: 290618 - DNA, 25 bp, Probe Sequence
tcgcagaaacccaaactcgggggct

SEQ ID NO: 290619 - DNA, 25 bp, Probe Sequence
tccggtagccctagacttggggtca

SEQ ID NO: 290620 - DNA, 25 bp, Probe Sequence
tccggtttcttcatattgaggggca

SEQ ID NO: 290621 - DNA, 25 bp, Probe Sequence
tcctgggtacccagtgctgatgggg

SEQ ID NO: 290622 - DNA, 25 bp, Probe Sequence
tcctggggggcccagatcatcgggg

SEQ ID NO: 290623 - DNA, 25 bp, Probe Sequence
tcctggggggcccaatggggagaga

SEQ ID NO: 290624 - DNA, 25 bp, Probe Sequence
tcctgggaggagagacactggtggg

SEQ ID NO: 290625 - DNA, 25 bp, Probe Sequence
tcctggttggcaaagaccggtcaag

SEQ ID NO: 290626 - DNA, 25 bp, Probe Sequence
tcctgtgttaggaaactgctagtaa

SEQ ID NO: 290627 - DNA, 25 bp, Probe Sequence
tccgctttcaggaagacattatttc

SEQ ID NO: 290628 - DNA, 25 bp, Probe Sequence
tcgcccctcctgacagaagattttc

SEQ ID NO: 290629 - DNA, 25 bp, Probe Sequence
tcgcccctcctgacagaagattttc

SEQ ID NO: 290630 - DNA, 25 bp, Probe Sequence
tcgcccctcctgacagaagattttc

SEQ ID NO: 290631 - DNA, 25 bp, Probe Sequence
tcgtccgtctctatgacaacttcac

SEQ ID NO: 290632 - DNA, 25 bp, Probe Sequence
tcgacttgtttttgcacatgtttcc

SEQ ID NO: 290633 - DNA, 25 bp, Probe Sequence
tcatcaatgatgccttttactttag

SEQ ID NO: 290634 - DNA, 25 bp, Probe Sequence
tctaagggcttaagactgattagtc

SEQ ID NO: 290635 - DNA, 25 bp, Probe Sequence
tctctaaccctaagaccattcgcat

SEQ ID NO: 290636 - DNA, 25 bp, Probe Sequence
tctctcaaagctcagaacggtctct

SEQ ID NO: 290637 - DNA, 25 bp, Probe Sequence
tcgctataccatcgtgatccggttt

SEQ ID NO: 290638 - DNA, 25 bp, Probe Sequence
tcgctataccatggttgagcggttt

SEQ ID NO: 290639 - DNA, 25 bp, Probe Sequence
tctccatacttcgccaaggttgtag

SEQ ID NO: 290640 - DNA, 25 bp, Probe Sequence
tcccttgccccaaaaggatctggaa

SEQ ID NO: 290641 - DNA, 25 bp, Probe Sequence
tcccttcccccataagttggaggat

SEQ ID NO: 290642 - DNA, 25 bp, Probe Sequence
tcccttcccttctcgttaagaatca

SEQ ID NO: 290643 - DNA, 25 bp, Probe Sequence
tcccgtgcccatcattagttaatag

SEQ ID NO: 290644 - DNA, 25 bp, Probe Sequence
tcccgttcccagtatttgtcaaatg

SEQ ID NO: 290645 - DNA, 25 bp, Probe Sequence
tctgtcttacccacttgagtcaatt

SEQ ID NO: 290646 - DNA, 25 bp, Probe Sequence
tccctggagcccacgggacagattt

SEQ ID NO: 290647 - DNA, 25 bp, Probe Sequence
tcctgtggagaaggccgggtatgtt

SEQ ID NO: 290648 - DNA, 25 bp, Probe Sequence
tccgggaaactgtggcgtgatggcc

SEQ ID NO: 290649 - DNA, 25 bp, Probe Sequence
tcccgggattcgagtgtggtggcca

SEQ ID NO: 290650 - DNA, 25 bp, Probe Sequence
tccgagggtttgggaatgtctgtgc

SEQ ID NO: 290651 - DNA, 25 bp, Probe Sequence
tcctgggtctttcatggggtgatgc

SEQ ID NO: 290652 - DNA, 25 bp, Probe Sequence
tccccgttaatggagcggggcgcca

SEQ ID NO: 290653 - DNA, 25 bp, Probe Sequence
tccccagttacaggaaggagtccct

SEQ ID NO: 290654 - DNA, 25 bp, Probe Sequence
tccccactgtactgttagaggccaa

SEQ ID NO: 290655 - DNA, 25 bp, Probe Sequence
tctccgcacgactgttacagaggtc

SEQ ID NO: 290656 - DNA, 25 bp, Probe Sequence
tctgcccaggatgttaaaggttgct

SEQ ID NO: 290657 - DNA, 25 bp, Probe Sequence
tcccccgccgtaaataggctcatct

SEQ ID NO: 290658 - DNA, 25 bp, Probe Sequence
tccgcccccaataaaagcaattcca

SEQ ID NO: 290659 - DNA, 25 bp, Probe Sequence
tcccccctgaaatgtatagaatcca

SEQ ID NO: 290660 - DNA, 25 bp, Probe Sequence
tcccccggagggagcaagaatctca

SEQ ID NO: 290661 - DNA, 25 bp, Probe Sequence
tcccctgggcagggggcgacaactc

SEQ ID NO: 290662 - DNA, 25 bp, Probe Sequence
tccggcagggagggtgacaagcaca

SEQ ID NO: 290663 - DNA, 25 bp, Probe Sequence
tccgcgtccgaggtgtgaagaccaa

SEQ ID NO: 290664 - DNA, 25 bp, Probe Sequence
tcccgtcgtgggctgagaaggagca

SEQ ID NO: 290665 - DNA, 25 bp, Probe Sequence
tcccagtgcctgctggggacgttct

SEQ ID NO: 290666 - DNA, 25 bp, Probe Sequence
tccccacatcatcgtgggtacccct

SEQ ID NO: 290667 - DNA, 25 bp, Probe Sequence
tactacactcaacggtttggatcct

SEQ ID NO: 290668 - DNA, 25 bp, Probe Sequence
tcccaagtcaaccattgttgccatc

SEQ ID NO: 290669 - DNA, 25 bp, Probe Sequence
tcccaagccaggcctttctggaggc

SEQ ID NO: 290670 - DNA, 25 bp, Probe Sequence
tcccacaaaatggcccttggtggca

SEQ ID NO: 290671 - DNA, 25 bp, Probe Sequence
tccgggagaattggccattggtaaa

SEQ ID NO: 290672 - DNA, 25 bp, Probe Sequence
tccggctggaaccatggagggtgta

SEQ ID NO: 290673 - DNA, 25 bp, Probe Sequence
tccggcagcgaaactgggtggtcgt

SEQ ID NO: 290674 - DNA, 25 bp, Probe Sequence
tcctgaggagagaaccggtgcgtcc

SEQ ID NO: 290675 - DNA, 25 bp, Probe Sequence
tcctgaggagagaaccggcgctggg

SEQ ID NO: 290676 - DNA, 25 bp, Probe Sequence
tcctgagaggatgccggtgcgggcg

SEQ ID NO: 290677 - DNA, 25 bp, Probe Sequence
tcctggactgagggggcctggatgc

SEQ ID NO: 290678 - DNA, 25 bp, Probe Sequence
tcctggtgcgatgatgggcctggca

SEQ ID NO: 290679 - DNA, 25 bp, Probe Sequence
tccggtggttattgaggctggagct

SEQ ID NO: 290680 - DNA, 25 bp, Probe Sequence
tcccgggcttagaaggccggctact

SEQ ID NO: 290681 - DNA, 25 bp, Probe Sequence
tccccgtttatgaaagtcgctttct

SEQ ID NO: 290682 - DNA, 25 bp, Probe Sequence
tccccagacctaccataaagtttct

SEQ ID NO: 290683 - DNA, 25 bp, Probe Sequence
tcccccactctaaagcaaatttatc

SEQ ID NO: 290684 - DNA, 25 bp, Probe Sequence
tccgcccacgctgacaataaagttg

SEQ ID NO: 290685 - DNA, 25 bp, Probe Sequence
tcccccacgtgtgaagtgtagtggc

SEQ ID NO: 290686 - DNA, 25 bp, Probe Sequence
tcccaccccattgaagtccaagggg

SEQ ID NO: 290687 - DNA, 25 bp, Probe Sequence
tccgccccaattgaacgccaaattg

SEQ ID NO: 290688 - DNA, 25 bp, Probe Sequence
tccccttcagttcagagccaaaatg

SEQ ID NO: 290689 - DNA, 25 bp, Probe Sequence
tccccttacattcatgaccttgaca

SEQ ID NO: 290690 - DNA, 25 bp, Probe Sequence
tccctctaaatacctaccctagatg

SEQ ID NO: 290691 - DNA, 25 bp, Probe Sequence
tcccactaaatattgtaatcctaat

SEQ ID NO: 290692 - DNA, 25 bp, Probe Sequence
tccccatcaacgttgttatccagga

SEQ ID NO: 290693 - DNA, 25 bp, Probe Sequence
tccccagctaagtcttatttcagaa

SEQ ID NO: 290694 - DNA, 25 bp, Probe Sequence
tccccagctacgcattcaaggatgg

SEQ ID NO: 290695 - DNA, 25 bp, Probe Sequence
tccgcaagtttgccatccatggtga

SEQ ID NO: 290696 - DNA, 25 bp, Probe Sequence
tccgccagttctacatcaacgtgga

SEQ ID NO: 290697 - DNA, 25 bp, Probe Sequence
tccccagtggctctcagacgaagag

SEQ ID NO: 290698 - DNA, 25 bp, Probe Sequence
tccccagtgtgctccagggtgaggt

SEQ ID NO: 290699 - DNA, 25 bp, Probe Sequence
tccccagggacctgctgacttgaat

SEQ ID NO: 290700 - DNA, 25 bp, Probe Sequence
tccccagggacctgctgacttgaat

SEQ ID NO: 290701 - DNA, 25 bp, Probe Sequence
tccccagggacctgctgacttgaat

SEQ ID NO: 290702 - DNA, 25 bp, Probe Sequence
tcccctgggccggaagactgggaat

SEQ ID NO: 290703 - DNA, 25 bp, Probe Sequence
tccctggggcctggtgggtaggcaa

SEQ ID NO: 290704 - DNA, 25 bp, Probe Sequence
tccctggaaggctgtggccgggtga

SEQ ID NO: 290705 - DNA, 25 bp, Probe Sequence
tcccttaactctgtagcctggcagt

SEQ ID NO: 290706 - DNA, 25 bp, Probe Sequence
tcccaggttcttgtaggtcgctgat

SEQ ID NO: 290707 - DNA, 25 bp, Probe Sequence
tcccgatttctctgttggtcggagt

SEQ ID NO: 290708 - DNA, 25 bp, Probe Sequence
tcccagttattcagtaacctgaggc

SEQ ID NO: 290709 - DNA, 25 bp, Probe Sequence
tcaccagtttcctgaaatcatgggt

SEQ ID NO: 290710 - DNA, 25 bp, Probe Sequence
tcccgtcttgactgagttcagtcct

SEQ ID NO: 290711 - DNA, 25 bp, Probe Sequence
tcccccagtgaatgatttagaattt

SEQ ID NO: 290712 - DNA, 25 bp, Probe Sequence
tcccaccaggaatgtttaaaactag

SEQ ID NO: 290713 - DNA, 25 bp, Probe Sequence
tcccctgggaagatttaaagctgta

SEQ ID NO: 290714 - DNA, 25 bp, Probe Sequence
tcccctggacaaagttgctgacaag

SEQ ID NO: 290715 - DNA, 25 bp, Probe Sequence
tccgcctggggagtgttggatccac

SEQ ID NO: 290716 - DNA, 25 bp, Probe Sequence
tcctgtgctgcctgatgttcagtac

SEQ ID NO: 290717 - DNA, 25 bp, Probe Sequence
tccggctgcctaagctgtatctgaa

SEQ ID NO: 290718 - DNA, 25 bp, Probe Sequence
tccggccgcaaagtctttgcagaat

SEQ ID NO: 290719 - DNA, 25 bp, Probe Sequence
tccggacgcccagctttgaaaattt

SEQ ID NO: 290720 - DNA, 25 bp, Probe Sequence
tcaaggacccacacttaaagagaga

SEQ ID NO: 290721 - DNA, 25 bp, Probe Sequence
tcaaaacccttagcaagaccaagaa

SEQ ID NO: 290722 - DNA, 25 bp, Probe Sequence
tcccaaaagcttggtaagcccaaga

SEQ ID NO: 290723 - DNA, 25 bp, Probe Sequence
tccgcaaagacctgtacgccaacac

SEQ ID NO: 290724 - DNA, 25 bp, Probe Sequence
tccctaacacctgaatcccagatga

SEQ ID NO: 290725 - DNA, 25 bp, Probe Sequence
tccctaacttctgttccatcaagac

SEQ ID NO: 290726 - DNA, 25 bp, Probe Sequence
tcccacaacttctgctataacaata

SEQ ID NO: 290727 - DNA, 25 bp, Probe Sequence
tcccagccctagtagcaattaagga

SEQ ID NO: 290728 - DNA, 25 bp, Probe Sequence
tcccagcctttttgaatttcacggt

SEQ ID NO: 290729 - DNA, 25 bp, Probe Sequence
tccctgccagttaccaaatctactg

SEQ ID NO: 290730 - DNA, 25 bp, Probe Sequence
tccgcgtcggtagacattgttctgt

SEQ ID NO: 290731 - DNA, 25 bp, Probe Sequence
tcccgtgggtaattttctattatat

SEQ ID NO: 290732 - DNA, 25 bp, Probe Sequence
tcccgtttgtcacttttctgataaa

SEQ ID NO: 290733 - DNA, 25 bp, Probe Sequence
tcccctccttgggtttatgcaaata

SEQ ID NO: 290734 - DNA, 25 bp, Probe Sequence
tccccccagaggtcaagttcaacaa

SEQ ID NO: 290735 - DNA, 25 bp, Probe Sequence
tcctggtgccaatttcaagttccaa

SEQ ID NO: 290736 - DNA, 25 bp, Probe Sequence
tcctgtgcccactttagatgtatct

SEQ ID NO: 290737 - DNA, 25 bp, Probe Sequence
tcctgtccgcacacatttaatcttt

SEQ ID NO: 290738 - DNA, 25 bp, Probe Sequence
tcctgggctatcacattataatgct

SEQ ID NO: 290739 - DNA, 25 bp, Probe Sequence
tcctgggattcaaacctgcatattg

SEQ ID NO: 290740 - DNA, 25 bp, Probe Sequence
tcctgggtctatcacttgttgctgg

SEQ ID NO: 290741 - DNA, 25 bp, Probe Sequence
tcctgtgtctttcgacttctgtgat

SEQ ID NO: 290742 - DNA, 25 bp, Probe Sequence
tcccatgttatgcccagcgtttgat

SEQ ID NO: 290743 - DNA, 25 bp, Probe Sequence
tccgcgtgtcatcttggtttgtgtt

SEQ ID NO: 290744 - DNA, 25 bp, Probe Sequence
tccctcgtcaatttgggttgtgtcc

SEQ ID NO: 290745 - DNA, 25 bp, Probe Sequence
tcgcgcccaagtctgggaagtgccc

SEQ ID NO: 290746 - DNA, 25 bp, Probe Sequence
tcccctgcaactcctaggggtgcgc

SEQ ID NO: 290747 - DNA, 25 bp, Probe Sequence
tccgcatcgaggaggacgtcgtggt

SEQ ID NO: 290748 - DNA, 25 bp, Probe Sequence
tcccctggcagtaggggtggggtag

SEQ ID NO: 290749 - DNA, 25 bp, Probe Sequence
tccgccggaggtctagctgtgggcg

SEQ ID NO: 290750 - DNA, 25 bp, Probe Sequence
tcccggtggaatgttcagaggtggc

SEQ ID NO: 290751 - DNA, 25 bp, Probe Sequence
tccccaggaaatcttcagcaacgtc

SEQ ID NO: 290752 - DNA, 25 bp, Probe Sequence
tccccaggaatagctgtcactccgg

SEQ ID NO: 290753 - DNA, 25 bp, Probe Sequence
tcccttggaaaccttacattctaag

SEQ ID NO: 290754 - DNA, 25 bp, Probe Sequence
tccgtctcgagactttctacttgaa

SEQ ID NO: 290755 - DNA, 25 bp, Probe Sequence
tccctcctggaacttggatcttaag

SEQ ID NO: 290756 - DNA, 25 bp, Probe Sequence
tccctcaggaaccgtggaccttaat

SEQ ID NO: 290757 - DNA, 25 bp, Probe Sequence
tccgctcgtgcagcttgtagaacct

SEQ ID NO: 290758 - DNA, 25 bp, Probe Sequence
tccccagcgatctattgacaaacct

SEQ ID NO: 290759 - DNA, 25 bp, Probe Sequence
tcgcctcggaagttccaacatcact

SEQ ID NO: 290760 - DNA, 25 bp, Probe Sequence
tccctaggtcaaagccactatcatc

SEQ ID NO: 290761 - DNA, 25 bp, Probe Sequence
tcccgatgttcagcatggtgtactc

SEQ ID NO: 290762 - DNA, 25 bp, Probe Sequence
tccctggaacagcctgagcttagct

SEQ ID NO: 290763 - DNA, 25 bp, Probe Sequence
tccgctgtaccacgcaatgatgggt

SEQ ID NO: 290764 - DNA, 25 bp, Probe Sequence
tcctgtgtcctctgaaagaggtgca

SEQ ID NO: 290765 - DNA, 25 bp, Probe Sequence
tccgtgtgctcattaaagggatcca

SEQ ID NO: 290766 - DNA, 25 bp, Probe Sequence
tcgttggcctcttaaggatgacaca

SEQ ID NO: 290767 - DNA, 25 bp, Probe Sequence
tcgttggctcctacttgattgcaca

SEQ ID NO: 290768 - DNA, 25 bp, Probe Sequence
tcgcttaggccagagtgatggcacc

SEQ ID NO: 290769 - DNA, 25 bp, Probe Sequence
tccggagcaccagggatgcaggacc

SEQ ID NO: 290770 - DNA, 25 bp, Probe Sequence
tcctggaggggctgatcagtgcccg

SEQ ID NO: 290771 - DNA, 25 bp, Probe Sequence
tcctgggggacccatgggtcgcatg

SEQ ID NO: 290772 - DNA, 25 bp, Probe Sequence
tccgagactggatcgatggtgttct

SEQ ID NO: 290773 - DNA, 25 bp, Probe Sequence
tcctggactcagatgctgaggattt

SEQ ID NO: 290774 - DNA, 25 bp, Probe Sequence
tcgctggaacagctggaagtctctg

SEQ ID NO: 290775 - DNA, 25 bp, Probe Sequence
tccggacaatgacgagaggccctgg

SEQ ID NO: 290776 - DNA, 25 bp, Probe Sequence
tccggagcctggctgaactgactgc

SEQ ID NO: 290777 - DNA, 25 bp, Probe Sequence
tcaccgagctgcacttaactgttct

SEQ ID NO: 290778 - DNA, 25 bp, Probe Sequence
tcccctctgaaccaaatcgtttact

SEQ ID NO: 290779 - DNA, 25 bp, Probe Sequence
tccctacgatgagaactggttctac

SEQ ID NO: 290780 - DNA, 25 bp, Probe Sequence
tccctactatcagagacttgtcctt

SEQ ID NO: 290781 - DNA, 25 bp, Probe Sequence
tcgcctcagtttgaacattgaccct

SEQ ID NO: 290782 - DNA, 25 bp, Probe Sequence
tccctagtttacaagtcagagtcac

SEQ ID NO: 290783 - DNA, 25 bp, Probe Sequence
tccccaattctgataggctgacctc

SEQ ID NO: 290784 - DNA, 25 bp, Probe Sequence
tccccatcaactctggggacctctt

SEQ ID NO: 290785 - DNA, 25 bp, Probe Sequence
tcccgcataaggcagggtgaccccc

SEQ ID NO: 290786 - DNA, 25 bp, Probe Sequence
tccctctttgggaggtgatgttccc

SEQ ID NO: 290787 - DNA, 25 bp, Probe Sequence
tcccctttctggtaggattgatgga

SEQ ID NO: 290788 - DNA, 25 bp, Probe Sequence
tcccccttctagagtgcttcaaaat

SEQ ID NO: 290789 - DNA, 25 bp, Probe Sequence
tccccatatctaacaacgtaaaaat

SEQ ID NO: 290790 - DNA, 25 bp, Probe Sequence
tcccgtaatccagccatgtaggaaa

SEQ ID NO: 290791 - DNA, 25 bp, Probe Sequence
tcccctattcacagtgatgaaggaa

SEQ ID NO: 290792 - DNA, 25 bp, Probe Sequence
tccggcatacccaggtgtgcaaggc

SEQ ID NO: 290793 - DNA, 25 bp, Probe Sequence
tccggaattcccgggatcgagtcct

SEQ ID NO: 290794 - DNA, 25 bp, Probe Sequence
tccggaattcccgggattcaggtct

SEQ ID NO: 290795 - DNA, 25 bp, Probe Sequence
tccggaattcccgggatggcgtttg

SEQ ID NO: 290796 - DNA, 25 bp, Probe Sequence
tccggaattcccgggatggcgtcgg

SEQ ID NO: 290797 - DNA, 25 bp, Probe Sequence
tccggaattcccgggatggccgagc

SEQ ID NO: 290798 - DNA, 25 bp, Probe Sequence
tccggaattcccgggatcgccagga

SEQ ID NO: 290799 - DNA, 25 bp, Probe Sequence
tccggaattcccgggatctcctgtg

SEQ ID NO: 290800 - DNA, 25 bp, Probe Sequence
tccggaattcccgggatccagctgg

SEQ ID NO: 290801 - DNA, 25 bp, Probe Sequence
tccggaattcccgggatgtcgccgt

SEQ ID NO: 290802 - DNA, 25 bp, Probe Sequence
tccggaattcccgggatgtcgcgcc

SEQ ID NO: 290803 - DNA, 25 bp, Probe Sequence
tccggaattcccgggattgcaccca

SEQ ID NO: 290804 - DNA, 25 bp, Probe Sequence
tccgggattgcccgggatctcacgc

SEQ ID NO: 290805 - DNA, 25 bp, Probe Sequence
tcctggatgaacgcgggtcgcagcc

SEQ ID NO: 290806 - DNA, 25 bp, Probe Sequence
tcctggagcccagaggagggcagca

SEQ ID NO: 290807 - DNA, 25 bp, Probe Sequence
tccggacactcctagagaacgcagc

SEQ ID NO: 290808 - DNA, 25 bp, Probe Sequence
tcctggttcatcataagaatctcag

SEQ ID NO: 290809 - DNA, 25 bp, Probe Sequence
tcctggtcacatcattaactgctaa

SEQ ID NO: 290810 - DNA, 25 bp, Probe Sequence
tccgtctgtagatttaactgctgaa

SEQ ID NO: 290811 - DNA, 25 bp, Probe Sequence
tcctggagtacatttgtcacattca

SEQ ID NO: 290812 - DNA, 25 bp, Probe Sequence
tccgggtacagatctcagcagtgca

SEQ ID NO: 290813 - DNA, 25 bp, Probe Sequence
tcccggatagcaacctcgggacaga

SEQ ID NO: 290814 - DNA, 25 bp, Probe Sequence
tcccctgaatggatccagctggaca

SEQ ID NO: 290815 - DNA, 25 bp, Probe Sequence
tcccacctgaggacaaagctggcgc

SEQ ID NO: 290816 - DNA, 25 bp, Probe Sequence
tcccccactgccgagaatgctaggc

SEQ ID NO: 290817 - DNA, 25 bp, Probe Sequence
tccggccactgacacaaccagaaaa

SEQ ID NO: 290818 - DNA, 25 bp, Probe Sequence
tccggcctctgattcctggaagaaa

SEQ ID NO: 290819 - DNA, 25 bp, Probe Sequence
tccgggccatgattatcgcagaacg

SEQ ID NO: 290820 - DNA, 25 bp, Probe Sequence
tccgtgtgccagcactagcctagga

SEQ ID NO: 290821 - DNA, 25 bp, Probe Sequence
tccgtgtgatttatgagcgcatgaa

SEQ ID NO: 290822 - DNA, 25 bp, Probe Sequence
tccctgaggaatactgaccggcagt

SEQ ID NO: 290823 - DNA, 25 bp, Probe Sequence
tccctggaccatctgcatccagagg

SEQ ID NO: 290824 - DNA, 25 bp, Probe Sequence
tcccggcgttcaatgtcatcaatgg

SEQ ID NO: 290825 - DNA, 25 bp, Probe Sequence
tccctgggcgttatctgaattggcg

SEQ ID NO: 290826 - DNA, 25 bp, Probe Sequence
taagctggcctcaggtttattggcg

SEQ ID NO: 290827 - DNA, 25 bp, Probe Sequence
tcaagaggcaccagcactttatctg

SEQ ID NO: 290828 - DNA, 25 bp, Probe Sequence
tcctggattcacacactggtatctg

SEQ ID NO: 290829 - DNA, 25 bp, Probe Sequence
tcctggatgtggacacccagtcctg

SEQ ID NO: 290830 - DNA, 25 bp, Probe Sequence
tcctggagggtggactctgtcctgg

SEQ ID NO: 290831 - DNA, 25 bp, Probe Sequence
tcctggagggtggactctgtcctgg

SEQ ID NO: 290832 - DNA, 25 bp, Probe Sequence
tcctggcaacagtcagattcttcta

SEQ ID NO: 290833 - DNA, 25 bp, Probe Sequence
tcctggcacactgcagtactcagat

SEQ ID NO: 290834 - DNA, 25 bp, Probe Sequence
tcctggcaggtggcattcatctcag

SEQ ID NO: 290835 - DNA, 25 bp, Probe Sequence
tcccatcgttaattcaccagttgcc

SEQ ID NO: 290836 - DNA, 25 bp, Probe Sequence
tcaccttcttactcgtagtcgacgg

SEQ ID NO: 290837 - DNA, 25 bp, Probe Sequence
tcccttagctactcaggaggccgag

SEQ ID NO: 290838 - DNA, 25 bp, Probe Sequence
tcccttagctactcaggaggccgag

SEQ ID NO: 290839 - DNA, 25 bp, Probe Sequence
tcccctagttggccactggggccac

SEQ ID NO: 290840 - DNA, 25 bp, Probe Sequence
tcccctagttggccactggggccac

SEQ ID NO: 290841 - DNA, 25 bp, Probe Sequence
tcccctagtccgtccaaggactgac

SEQ ID NO: 290842 - DNA, 25 bp, Probe Sequence
tccccatagtgacgccaataggact

SEQ ID NO: 290843 - DNA, 25 bp, Probe Sequence
tccccaagttgcccagaaagactgt

SEQ ID NO: 290844 - DNA, 25 bp, Probe Sequence
tccccatgaactgctctgtgaaact

SEQ ID NO: 290845 - DNA, 25 bp, Probe Sequence
tcccgtgtcactgtttacatgacct

SEQ ID NO: 290846 - DNA, 25 bp, Probe Sequence
tccctgggactggttgttttcttag

SEQ ID NO: 290847 - DNA, 25 bp, Probe Sequence
tcacctggaacccttgtttaaggat

SEQ ID NO: 290848 - DNA, 25 bp, Probe Sequence
tcccaggaaactttgcttctaattc

SEQ ID NO: 290849 - DNA, 25 bp, Probe Sequence
tccccaagaactcctttaatatctc

SEQ ID NO: 290850 - DNA, 25 bp, Probe Sequence
tccccaagaacgtcctttaatatgt

SEQ ID NO: 290851 - DNA, 25 bp, Probe Sequence
tccctgctagaaaacacattgtact

SEQ ID NO: 290852 - DNA, 25 bp, Probe Sequence
tcccgaaggagatcactttaccctc

SEQ ID NO: 290853 - DNA, 25 bp, Probe Sequence
tccccaccctattaaattacatccg

SEQ ID NO: 290854 - DNA, 25 bp, Probe Sequence
tcccaactgcagataagaattacat

SEQ ID NO: 290855 - DNA, 25 bp, Probe Sequence
tcccatcaacatttcaatatgttca

SEQ ID NO: 290856 - DNA, 25 bp, Probe Sequence
tccgtcagatccacaaatttgagga

SEQ ID NO: 290857 - DNA, 25 bp, Probe Sequence
tccccagtgccttgagagtttcacc

SEQ ID NO: 290858 - DNA, 25 bp, Probe Sequence
tccgccggcctggatacaaatcagc

SEQ ID NO: 290859 - DNA, 25 bp, Probe Sequence
tccggccctctggtacagaagatgt

SEQ ID NO: 290860 - DNA, 25 bp, Probe Sequence
tccgtgccccgtgagtgcaagatga

SEQ ID NO: 290861 - DNA, 25 bp, Probe Sequence
tccgcccccattgacgcaaatgggc

SEQ ID NO: 290862 - DNA, 25 bp, Probe Sequence
tcccatccctttgagccattcaggg

SEQ ID NO: 290863 - DNA, 25 bp, Probe Sequence
tcccatgcaccggaattcctttggg

SEQ ID NO: 290864 - DNA, 25 bp, Probe Sequence
tccccaccggaagtcctgatgtata

SEQ ID NO: 290865 - DNA, 25 bp, Probe Sequence
tccccccaggtgactaggttcaaga

SEQ ID NO: 290866 - DNA, 25 bp, Probe Sequence
tccccagccggaactggttaccaag

SEQ ID NO: 290867 - DNA, 25 bp, Probe Sequence
tccccgcccagagaagggagccagg

SEQ ID NO: 290868 - DNA, 25 bp, Probe Sequence
tccccctctaagaggaggatcctga

SEQ ID NO: 290869 - DNA, 25 bp, Probe Sequence
tccgctcctcagaaggggaagttta

SEQ ID NO: 290870 - DNA, 25 bp, Probe Sequence
tccccctcaggacagggagtctgat

SEQ ID NO: 290871 - DNA, 25 bp, Probe Sequence
tcccgcgaaggaccggaaaggagcg

SEQ ID NO: 290872 - DNA, 25 bp, Probe Sequence
tcccgggatggccggggaaatggcg

SEQ ID NO: 290873 - DNA, 25 bp, Probe Sequence
tccggggtggctgggtgtaatcaga

SEQ ID NO: 290874 - DNA, 25 bp, Probe Sequence
tccggggagtgcatcggtacttgag

SEQ ID NO: 290875 - DNA, 25 bp, Probe Sequence
tccgctgggaggaacctgaacctgg

SEQ ID NO: 290876 - DNA, 25 bp, Probe Sequence
tcccgggatgtcaacccaacacagg

SEQ ID NO: 290877 - DNA, 25 bp, Probe Sequence
tccctggggatcaactccagataag

SEQ ID NO: 290878 - DNA, 25 bp, Probe Sequence
tccgcggaggtttcggcagtggcat

SEQ ID NO: 290879 - DNA, 25 bp, Probe Sequence
tccgaggagagtttccgccaggagg

SEQ ID NO: 290880 - DNA, 25 bp, Probe Sequence
tccgaagggtgctcaccatcgtgca

SEQ ID NO: 290881 - DNA, 25 bp, Probe Sequence
tccccagggagcagactgtgcggca

SEQ ID NO: 290882 - DNA, 25 bp, Probe Sequence
tcccctggacacagaggtgcccatg

SEQ ID NO: 290883 - DNA, 25 bp, Probe Sequence
tcccatctaaacagtcgtcatccaa

SEQ ID NO: 290884 - DNA, 25 bp, Probe Sequence
tcccttgagaaatgtctgtaagcca

SEQ ID NO: 290885 - DNA, 25 bp, Probe Sequence
tcccttagtgaattttgtctcctgc

SEQ ID NO: 290886 - DNA, 25 bp, Probe Sequence
tcccatatggtatcataagtcctcc

SEQ ID NO: 290887 - DNA, 25 bp, Probe Sequence
tccgttggtagcttgagtcccatgc

SEQ ID NO: 290888 - DNA, 25 bp, Probe Sequence
tccgactggctgccaggatgtacct

SEQ ID NO: 290889 - DNA, 25 bp, Probe Sequence
tccgtctgtctactgtgtgagactt

SEQ ID NO: 290890 - DNA, 25 bp, Probe Sequence
tccgcattgcctattgatacacttt

SEQ ID NO: 290891 - DNA, 25 bp, Probe Sequence
tcccatgaccctttaacagcatctg

SEQ ID NO: 290892 - DNA, 25 bp, Probe Sequence
tcccatgaccctttaacagcatctg

SEQ ID NO: 290893 - DNA, 25 bp, Probe Sequence
tccctaatgcctgctgaagcacctg

SEQ ID NO: 290894 - DNA, 25 bp, Probe Sequence
tccctcgatgggctgcaacatcatc

SEQ ID NO: 290895 - DNA, 25 bp, Probe Sequence
tccctcgtgaggctggatctcaaaa

SEQ ID NO: 290896 - DNA, 25 bp, Probe Sequence
tccctgggcatatgtgtaccaaagg

SEQ ID NO: 290897 - DNA, 25 bp, Probe Sequence
tcccagagggagcagctatttaagg

SEQ ID NO: 290898 - DNA, 25 bp, Probe Sequence
tccccaagtgggcctgatttagcag

SEQ ID NO: 290899 - DNA, 25 bp, Probe Sequence
tccccaagatacgctgaagtgtgag

SEQ ID NO: 290900 - DNA, 25 bp, Probe Sequence
tccctgaaaggcgctacattgagaa

SEQ ID NO: 290901 - DNA, 25 bp, Probe Sequence
tcggcaaaaggacctccaccaagac

SEQ ID NO: 290902 - DNA, 25 bp, Probe Sequence
ttggaaaggaggccctcccgacatg

SEQ ID NO: 290903 - DNA, 25 bp, Probe Sequence
tcctggacagcaggaggctctactc

SEQ ID NO: 290904 - DNA, 25 bp, Probe Sequence
tccggacagcagtaggccagctcgg

SEQ ID NO: 290905 - DNA, 25 bp, Probe Sequence
tccggacacaaaccttctagcttgg

SEQ ID NO: 290906 - DNA, 25 bp, Probe Sequence
tccgtgacccatgcgattcaagtcg

SEQ ID NO: 290907 - DNA, 25 bp, Probe Sequence
tccctgtacactggcagttcggcca

SEQ ID NO: 290908 - DNA, 25 bp, Probe Sequence
tcccgctgtactggttcagcgtgcc

SEQ ID NO: 290909 - DNA, 25 bp, Probe Sequence
tccctgcagtacagctccaatggca

SEQ ID NO: 290910 - DNA, 25 bp, Probe Sequence
tccccaagcatcatctcacgaggag

SEQ ID NO: 290911 - DNA, 25 bp, Probe Sequence
tccccaggctctagtgcaggaggag

SEQ ID NO: 290912 - DNA, 25 bp, Probe Sequence
tccccagatgcctgggtgcaaagaa

SEQ ID NO: 290913 - DNA, 25 bp, Probe Sequence
tcccagaaccgcctggtcagaaact

SEQ ID NO: 290914 - DNA, 25 bp, Probe Sequence
tcccaagaccccgctgaaggagcgc

SEQ ID NO: 290915 - DNA, 25 bp, Probe Sequence
tcccagggccccatcttgatgggcc

SEQ ID NO: 290916 - DNA, 25 bp, Probe Sequence
tcccgggcccgttgaggatgaggcc

SEQ ID NO: 290917 - DNA, 25 bp, Probe Sequence
tcccgtcccctgagagggatgagtt

SEQ ID NO: 290918 - DNA, 25 bp, Probe Sequence
tcccccttcctgatgaaaagactag

SEQ ID NO: 290919 - DNA, 25 bp, Probe Sequence
tcccctctgactacctaaaatcaat

SEQ ID NO: 290920 - DNA, 25 bp, Probe Sequence
tccccctgcctgatgaaaagacgaa

SEQ ID NO: 290921 - DNA, 25 bp, Probe Sequence
tccccctgcctgatgaaaagacgaa

SEQ ID NO: 290922 - DNA, 25 bp, Probe Sequence
tccgccaccccaaatacaacaggat

SEQ ID NO: 290923 - DNA, 25 bp, Probe Sequence
tccgccaccctcaatataatcagcg

SEQ ID NO: 290924 - DNA, 25 bp, Probe Sequence
tccgccacacgtaactgagatgctc

SEQ ID NO: 290925 - DNA, 25 bp, Probe Sequence
tccgcacgactgttacagaggtctc

SEQ ID NO: 290926 - DNA, 25 bp, Probe Sequence
tccgcgtcctgagagagatggtccc

SEQ ID NO: 290927 - DNA, 25 bp, Probe Sequence
tccggtttgaggacaatggcatcta

SEQ ID NO: 290928 - DNA, 25 bp, Probe Sequence
tccgagctcctaagaaatatgcttc

SEQ ID NO: 290929 - DNA, 25 bp, Probe Sequence
tcccgcatccttgaggcaactatca

SEQ ID NO: 290930 - DNA, 25 bp, Probe Sequence
tccggatccgcagaggaactgatga

SEQ ID NO: 290931 - DNA, 25 bp, Probe Sequence
tccggaaccagaagtgaacgcgacc

SEQ ID NO: 290932 - DNA, 25 bp, Probe Sequence
tcgcgttcacaaccgtgaagaggac

SEQ ID NO: 290933 - DNA, 25 bp, Probe Sequence
tcgcgtgtcaccaacgtgaaggtga

SEQ ID NO: 290934 - DNA, 25 bp, Probe Sequence
tccctgctcccttctatacaggaat

SEQ ID NO: 290935 - DNA, 25 bp, Probe Sequence
tccctctcccttgagaagctgagtc

SEQ ID NO: 290936 - DNA, 25 bp, Probe Sequence
tcccctctttatgagactctgtctc

SEQ ID NO: 290937 - DNA, 25 bp, Probe Sequence
tccctttgtggggaacttgccctct

SEQ ID NO: 290938 - DNA, 25 bp, Probe Sequence
tccctgtattaggttagcttcccct

SEQ ID NO: 290939 - DNA, 25 bp, Probe Sequence
tccctgttgtgaggttccttccagg

SEQ ID NO: 290940 - DNA, 25 bp, Probe Sequence
tccctggtggaacacaattcaagcc

SEQ ID NO: 290941 - DNA, 25 bp, Probe Sequence
tccctggggcactgcacaattgata

SEQ ID NO: 290942 - DNA, 25 bp, Probe Sequence
tccccgaggaatggcaccttggcaa

SEQ ID NO: 290943 - DNA, 25 bp, Probe Sequence
tccccgcaggacacaagtgccagat

SEQ ID NO: 290944 - DNA, 25 bp, Probe Sequence
tccctccgagctagaattgtccaga

SEQ ID NO: 290945 - DNA, 25 bp, Probe Sequence
tccccaagagctaggttgcctgagt

SEQ ID NO: 290946 - DNA, 25 bp, Probe Sequence
tccgtcaagcacaactgttctctga

SEQ ID NO: 290947 - DNA, 25 bp, Probe Sequence
tccgtatcactttcgattcttggaa

SEQ ID NO: 290948 - DNA, 25 bp, Probe Sequence
tccgtcattctttttacattgtaaa

SEQ ID NO: 290949 - DNA, 25 bp, Probe Sequence
tccctactcctgtcattacatttac

SEQ ID NO: 290950 - DNA, 25 bp, Probe Sequence
tccggcattcacatcattcatgttt

SEQ ID NO: 290951 - DNA, 25 bp, Probe Sequence
tccgtgacatctatgcctatggttt

SEQ ID NO: 290952 - DNA, 25 bp, Probe Sequence
tccgtactctaacatctagctggct

SEQ ID NO: 290953 - DNA, 25 bp, Probe Sequence
tccggaagctacagattcagtgtct

SEQ ID NO: 290954 - DNA, 25 bp, Probe Sequence
tccggagactacagcttcgctgggt

SEQ ID NO: 290955 - DNA, 25 bp, Probe Sequence
tccgtggaggacaagctcacctgtt

SEQ ID NO: 290956 - DNA, 25 bp, Probe Sequence
tccctggagaagaactaagcctttg

SEQ ID NO: 290957 - DNA, 25 bp, Probe Sequence
tccctggaacataccaaaccctaga

SEQ ID NO: 290958 - DNA, 25 bp, Probe Sequence
tcccatggaaatgccaccgtgtctg

SEQ ID NO: 290959 - DNA, 25 bp, Probe Sequence
tccgccgagagcagtaccgtgtggc

SEQ ID NO: 290960 - DNA, 25 bp, Probe Sequence
tccccgatatgcaccaccgggtaaa

SEQ ID NO: 290961 - DNA, 25 bp, Probe Sequence
tcaccctaacaagccgcaacgtaaa

SEQ ID NO: 290962 - DNA, 25 bp, Probe Sequence
tcccctaccaaggcaatgccacggc

SEQ ID NO: 290963 - DNA, 25 bp, Probe Sequence
tcccctagttgaggatagtcaggag

SEQ ID NO: 290964 - DNA, 25 bp, Probe Sequence
tccctgcttttgagatagtaggaag

SEQ ID NO: 290965 - DNA, 25 bp, Probe Sequence
tcccttttcagagaatgtaaatgat

SEQ ID NO: 290966 - DNA, 25 bp, Probe Sequence
tccctttttcaaacatggaagcaat

SEQ ID NO: 290967 - DNA, 25 bp, Probe Sequence
tccctttcctccccaggaatatgtg

SEQ ID NO: 290968 - DNA, 25 bp, Probe Sequence
tccctatgtcctgtgacctacaagg

SEQ ID NO: 290969 - DNA, 25 bp, Probe Sequence
tccgatactcccagatctgtgcaaa

SEQ ID NO: 290970 - DNA, 25 bp, Probe Sequence
tccgtgccttcaaatctcttgacaa

SEQ ID NO: 290971 - DNA, 25 bp, Probe Sequence
tccgttcatgtggaatatgttggaa

SEQ ID NO: 290972 - DNA, 25 bp, Probe Sequence
tccgtacagcccgtactggtggagt

SEQ ID NO: 290973 - DNA, 25 bp, Probe Sequence
tccgtaagctctttattggtggctt

SEQ ID NO: 290974 - DNA, 25 bp, Probe Sequence
tccctaattctactatgtggctctc

SEQ ID NO: 290975 - DNA, 25 bp, Probe Sequence
tccctaacatgttcgtggactcctc

SEQ ID NO: 290976 - DNA, 25 bp, Probe Sequence
tccctaacttctgattaactctctg

SEQ ID NO: 290977 - DNA, 25 bp, Probe Sequence
tccgaaaatgtcgtaacaactccgc

SEQ ID NO: 290978 - DNA, 25 bp, Probe Sequence
tcccaaaatgtcgtaacaactccgc

SEQ ID NO: 290979 - DNA, 25 bp, Probe Sequence
tccctgccacgtggaaacaatcatc

SEQ ID NO: 290980 - DNA, 25 bp, Probe Sequence
tccgctgccaggacgaaagcgaggc

SEQ ID NO: 290981 - DNA, 25 bp, Probe Sequence
tccctgaagaactgacacaaggtgc

SEQ ID NO: 290982 - DNA, 25 bp, Probe Sequence
tccctaaaagcacccacatttgttt

SEQ ID NO: 290983 - DNA, 25 bp, Probe Sequence
tccctagaaactgccatttacttaa

SEQ ID NO: 290984 - DNA, 25 bp, Probe Sequence
tctccttggaaatccgtctagttaa

SEQ ID NO: 290985 - DNA, 25 bp, Probe Sequence
tccctaggaggatctctgtcttgag

SEQ ID NO: 290986 - DNA, 25 bp, Probe Sequence
tcccttacggaattacatcttgatg

SEQ ID NO: 290987 - DNA, 25 bp, Probe Sequence
tcccctcaagtattctacactttaa

SEQ ID NO: 290988 - DNA, 25 bp, Probe Sequence
tcccctttgtcttcttagtttatag

SEQ ID NO: 290989 - DNA, 25 bp, Probe Sequence
tcccttccgtttatagttctctgag

SEQ ID NO: 290990 - DNA, 25 bp, Probe Sequence
tcccctcgcgtttaacacaatatag

SEQ ID NO: 290991 - DNA, 25 bp, Probe Sequence
tccccacctgtagtaacagccatta

SEQ ID NO: 290992 - DNA, 25 bp, Probe Sequence
tccccactgtatctaggcaacatag

SEQ ID NO: 290993 - DNA, 25 bp, Probe Sequence
tccctcttggatcacaaacaccggt

SEQ ID NO: 290994 - DNA, 25 bp, Probe Sequence
tccctttgtctttcaaactccaagg

SEQ ID NO: 290995 - DNA, 25 bp, Probe Sequence
tccctattttaactacctcaactgg

SEQ ID NO: 290996 - DNA, 25 bp, Probe Sequence
tcccttttaaaatcgctaggattct

SEQ ID NO: 290997 - DNA, 25 bp, Probe Sequence
tccctatttaatattggctagtgta

SEQ ID NO: 290998 - DNA, 25 bp, Probe Sequence
tcgtttttaatcctttgcctatgaa

SEQ ID NO: 290999 - DNA, 25 bp, Probe Sequence
tttttaaatcagcttagcccaaagg

SEQ ID NO: 291000 - DNA, 25 bp, Probe Sequence
tttttagagttgagttcccgagagg

SEQ ID NO: 291001 - DNA, 25 bp, Probe Sequence
tcttttaagtttagccccaatatag

SEQ ID NO: 291002 - DNA, 25 bp, Probe Sequence
tctatgaagaaataatcccccaata

SEQ ID NO: 291003 - DNA, 25 bp, Probe Sequence
tcatatacccagaaaacccccaaga

SEQ ID NO: 291004 - DNA, 25 bp, Probe Sequence
tcgataccaaggaaaccctctcaga

SEQ ID NO: 291005 - DNA, 25 bp, Probe Sequence
tctggtgctgaataaacccttctga

SEQ ID NO: 291006 - DNA, 25 bp, Probe Sequence
tccgattactgagatgcacctcttt

SEQ ID NO: 291007 - DNA, 25 bp, Probe Sequence
tcccagtcactgagtccgtatctgt

SEQ ID NO: 291008 - DNA, 25 bp, Probe Sequence
tcccagtacctgaatcctgaatctt

SEQ ID NO: 291009 - DNA, 25 bp, Probe Sequence
tccctgagactcctgagccagaatc

SEQ ID NO: 291010 - DNA, 25 bp, Probe Sequence
tccgaagagctgctgagccacttgc

SEQ ID NO: 291011 - DNA, 25 bp, Probe Sequence
tccgagagagtgagagcgctcctgg

SEQ ID NO: 291012 - DNA, 25 bp, Probe Sequence
tccgatgggatgagagctgggtgca

SEQ ID NO: 291013 - DNA, 25 bp, Probe Sequence
tccgggacagcatcgtgcagtgtga

SEQ ID NO: 291014 - DNA, 25 bp, Probe Sequence
tccgcacggagaacgagctgcatgg

SEQ ID NO: 291015 - DNA, 25 bp, Probe Sequence
tccctaaagaacaagctcaggcgcg

SEQ ID NO: 291016 - DNA, 25 bp, Probe Sequence
tcccagagactataactaggccaga

SEQ ID NO: 291017 - DNA, 25 bp, Probe Sequence
tccccagcccaggtacatgaggcca

SEQ ID NO: 291018 - DNA, 25 bp, Probe Sequence
tcccctgcccagatagctggtggtg

SEQ ID NO: 291019 - DNA, 25 bp, Probe Sequence
tcgctcctacttcaacatggtgttg

SEQ ID NO: 291020 - DNA, 25 bp, Probe Sequence
tccctccatcttcattcataggtct

SEQ ID NO: 291021 - DNA, 25 bp, Probe Sequence
tcccccatcacaattgttagttttt

SEQ ID NO: 291022 - DNA, 25 bp, Probe Sequence
tccccaccacattatgtcaagattc

SEQ ID NO: 291023 - DNA, 25 bp, Probe Sequence
tccccatgtgagtacatgacccatt

SEQ ID NO: 291024 - DNA, 25 bp, Probe Sequence
tcccagcatgtgtgtattcaccatg

SEQ ID NO: 291025 - DNA, 25 bp, Probe Sequence
tcccctgtatttagtcaccagtgcc

SEQ ID NO: 291026 - DNA, 25 bp, Probe Sequence
tcccctagactaggactccagtgcc

SEQ ID NO: 291027 - DNA, 25 bp, Probe Sequence
tccgtgtggatcggcggctccatcc

SEQ ID NO: 291028 - DNA, 25 bp, Probe Sequence
tccgttgaacagtcgtgctctgatc

SEQ ID NO: 291029 - DNA, 25 bp, Probe Sequence
tcccattgtacagcatgctatctat

SEQ ID NO: 291030 - DNA, 25 bp, Probe Sequence
tcccataatctctcagctacctgga

SEQ ID NO: 291031 - DNA, 25 bp, Probe Sequence
tcccatattcggcctgtgaagtggc

SEQ ID NO: 291032 - DNA, 25 bp, Probe Sequence
tccctttcgtcagttgctgaggtgt

SEQ ID NO: 291033 - DNA, 25 bp, Probe Sequence
tcgcctattaccattgtgatgcgtt

SEQ ID NO: 291034 - DNA, 25 bp, Probe Sequence
tccctgactccctttgcttggagtc

SEQ ID NO: 291035 - DNA, 25 bp, Probe Sequence
tccctaaccctaattgatgagaggc

SEQ ID NO: 291036 - DNA, 25 bp, Probe Sequence
tcccttaccatcaaatcaattggcc

SEQ ID NO: 291037 - DNA, 25 bp, Probe Sequence
tccctttccatctttcagcatagac

SEQ ID NO: 291038 - DNA, 25 bp, Probe Sequence
tcccctgtcacttttgcagatattc

SEQ ID NO: 291039 - DNA, 25 bp, Probe Sequence
tcccctataatctgctgagtaatct

SEQ ID NO: 291040 - DNA, 25 bp, Probe Sequence
tcccctttgctatgtgatgctacac

SEQ ID NO: 291041 - DNA, 25 bp, Probe Sequence
tccctccttgctggagcagctgaac

SEQ ID NO: 291042 - DNA, 25 bp, Probe Sequence
tcccctgctatgcctcaggtgaacc

SEQ ID NO: 291043 - DNA, 25 bp, Probe Sequence
tcccacatgccttaaggggaccgtg

SEQ ID NO: 291044 - DNA, 25 bp, Probe Sequence
tccccatagccatagggtgacttac

SEQ ID NO: 291045 - DNA, 25 bp, Probe Sequence
tccgcctcccaaagtgctgggatta

SEQ ID NO: 291046 - DNA, 25 bp, Probe Sequence
tccgcctcctcatgcggagggacaa

SEQ ID NO: 291047 - DNA, 25 bp, Probe Sequence
tccgactacagcatgtggaggaaga

SEQ ID NO: 291048 - DNA, 25 bp, Probe Sequence
tccccaagcggaatgaggccaagac

SEQ ID NO: 291049 - DNA, 25 bp, Probe Sequence
tccgccatgcatggagatatggacc

SEQ ID NO: 291050 - DNA, 25 bp, Probe Sequence
tccgcgtcatccgtagagagcacgg

SEQ ID NO: 291051 - DNA, 25 bp, Probe Sequence
tcccgcctcatccacagaaagggag

SEQ ID NO: 291052 - DNA, 25 bp, Probe Sequence
tccgccccattgacgccaaatgggc

SEQ ID NO: 291053 - DNA, 25 bp, Probe Sequence
tccgccccattgacgcaaatggctg

SEQ ID NO: 291054 - DNA, 25 bp, Probe Sequence
tccgccccattgacgcaaatggcgg

SEQ ID NO: 291055 - DNA, 25 bp, Probe Sequence
tccgccccattgacgcaaatggcgg

SEQ ID NO: 291056 - DNA, 25 bp, Probe Sequence
tccgccccattgacgcaaatggcgg

SEQ ID NO: 291057 - DNA, 25 bp, Probe Sequence
tccgccccattgacgcaaatggcgg

SEQ ID NO: 291058 - DNA, 25 bp, Probe Sequence
tccgccccattgacgcaaatggcgg

SEQ ID NO: 291059 - DNA, 25 bp, Probe Sequence
tccgccccattgacgcaaatgggcg

SEQ ID NO: 291060 - DNA, 25 bp, Probe Sequence
tccgccccattgacgcaaatgggcg

SEQ ID NO: 291061 - DNA, 25 bp, Probe Sequence
tccgccccattgacgcaaatggtcg

SEQ ID NO: 291062 - DNA, 25 bp, Probe Sequence
tccgccccatggacgcaaatggtcg

SEQ ID NO: 291063 - DNA, 25 bp, Probe Sequence
tccgccccagtgacgagaggtatag

SEQ ID NO: 291064 - DNA, 25 bp, Probe Sequence
tccccgtctgcacctgaagggttgt

SEQ ID NO: 291065 - DNA, 25 bp, Probe Sequence
tccctgtgtagccctaggttgtagt

SEQ ID NO: 291066 - DNA, 25 bp, Probe Sequence
tcgcctttaccacctagttgatagt

SEQ ID NO: 291067 - DNA, 25 bp, Probe Sequence
tcgctttttggacctgaccgatgca

SEQ ID NO: 291068 - DNA, 25 bp, Probe Sequence
tcgtagttttatctggcgtgacaag

SEQ ID NO: 291069 - DNA, 25 bp, Probe Sequence
tcgtagttaaatctctcgaggggaa

SEQ ID NO: 291070 - DNA, 25 bp, Probe Sequence
tcaggaggttttggttccactggaa

SEQ ID NO: 291071 - DNA, 25 bp, Probe Sequence
taagtgacttgagagttcccggttt

SEQ ID NO: 291072 - DNA, 25 bp, Probe Sequence
tacgctacagtagaatacccctgtt

SEQ ID NO: 291073 - DNA, 25 bp, Probe Sequence
tccccacttaaaatagtcctgctta

SEQ ID NO: 291074 - DNA, 25 bp, Probe Sequence
tcaccgccaaagaggtgtccttctc

SEQ ID NO: 291075 - DNA, 25 bp, Probe Sequence
tctacaggaaaatgtgggccccctc

SEQ ID NO: 291076 - DNA, 25 bp, Probe Sequence
tctgtaaacaactgggtgccttccc

SEQ ID NO: 291077 - DNA, 25 bp, Probe Sequence
tctgaaaacacttcaggcgcccttc

SEQ ID NO: 291078 - DNA, 25 bp, Probe Sequence
tctcaagcccaaagggccaccttac

SEQ ID NO: 291079 - DNA, 25 bp, Probe Sequence
tctgcagtaacggggggacctatac

SEQ ID NO: 291080 - DNA, 25 bp, Probe Sequence
tcgctataaccatggggatcgcttt

SEQ ID NO: 291081 - DNA, 25 bp, Probe Sequence
tcgccacaaatatgggtactgcgga

SEQ ID NO: 291082 - DNA, 25 bp, Probe Sequence
tccgttgccatatgggtggtgtgga

SEQ ID NO: 291083 - DNA, 25 bp, Probe Sequence
tccctcatgcctccgagggggtgga

SEQ ID NO: 291084 - DNA, 25 bp, Probe Sequence
tccgctgagtccagattggcaggtg

SEQ ID NO: 291085 - DNA, 25 bp, Probe Sequence
tccgcgagacgttgtttgagatgtg

SEQ ID NO: 291086 - DNA, 25 bp, Probe Sequence
tcccgcagacttctctgtagatcgc

SEQ ID NO: 291087 - DNA, 25 bp, Probe Sequence
tccccagactaagccgagatagaaa

SEQ ID NO: 291088 - DNA, 25 bp, Probe Sequence
tccccacatcaagcccgaatgatat

SEQ ID NO: 291089 - DNA, 25 bp, Probe Sequence
tccctccatattgccaccaaagatg

SEQ ID NO: 291090 - DNA, 25 bp, Probe Sequence
tcccctcatagaaagacaaaagcat

SEQ ID NO: 291091 - DNA, 25 bp, Probe Sequence
tcccctgaagcatttacagaacagc

SEQ ID NO: 291092 - DNA, 25 bp, Probe Sequence
tccctctacatatttaccacaacac

SEQ ID NO: 291093 - DNA, 25 bp, Probe Sequence
tcccttgacatacgtgaaacacaca

SEQ ID NO: 291094 - DNA, 25 bp, Probe Sequence
tccgcctgcagcgttgagaaaccca

SEQ ID NO: 291095 - DNA, 25 bp, Probe Sequence
tcccttctcgcttgggaactctagt

SEQ ID NO: 291096 - DNA, 25 bp, Probe Sequence
tcccatttcgtgtgggcgcttcatt

SEQ ID NO: 291097 - DNA, 25 bp, Probe Sequence
tccgcattccgggaggaggtatcac

SEQ ID NO: 291098 - DNA, 25 bp, Probe Sequence
tcacgaccctggaagggggcaacct

SEQ ID NO: 291099 - DNA, 25 bp, Probe Sequence
tcaggactttggaggtgggggcggg

SEQ ID NO: 291100 - DNA, 25 bp, Probe Sequence
tccgccttggggagtggaggaggtc

SEQ ID NO: 291101 - DNA, 25 bp, Probe Sequence
tccccttgggcactgaggagagggg

SEQ ID NO: 291102 - DNA, 25 bp, Probe Sequence
tccccgagggcgaaggccattgggt

SEQ ID NO: 291103 - DNA, 25 bp, Probe Sequence
tccccagaaccgagtgcctatgagg

SEQ ID NO: 291104 - DNA, 25 bp, Probe Sequence
tccgcctaaccaatgtggccgtggt

SEQ ID NO: 291105 - DNA, 25 bp, Probe Sequence
tcccctactgctgtgggctggggtt

SEQ ID NO: 291106 - DNA, 25 bp, Probe Sequence
tccccaccgcatgtggatactgggt

SEQ ID NO: 291107 - DNA, 25 bp, Probe Sequence
tccccgtgcgcagaggctactgggg

SEQ ID NO: 291108 - DNA, 25 bp, Probe Sequence
tccccggctggcagcgtagtggggc

SEQ ID NO: 291109 - DNA, 25 bp, Probe Sequence
tcacctacacggaccgttgggggca

SEQ ID NO: 291110 - DNA, 25 bp, Probe Sequence
tccccacactggacctgagggctga

SEQ ID NO: 291111 - DNA, 25 bp, Probe Sequence
tcccatcaccatcttccaggagcga

SEQ ID NO: 291112 - DNA, 25 bp, Probe Sequence
tcccaagctgctgtttcaaggctga

SEQ ID NO: 291113 - DNA, 25 bp, Probe Sequence
tcccgacttgtttctcaggtgtgaa

SEQ ID NO: 291114 - DNA, 25 bp, Probe Sequence
tccccgctgtgtgactttgggcaag

SEQ ID NO: 291115 - DNA, 25 bp, Probe Sequence
tcgcggcaggttctctttgagtcaa

SEQ ID NO: 291116 - DNA, 25 bp, Probe Sequence
tctgagggtcccacttggaggaatt

SEQ ID NO: 291117 - DNA, 25 bp, Probe Sequence
tctagggagtcgcgccttacaaatc

SEQ ID NO: 291118 - DNA, 25 bp, Probe Sequence
tctaagggacgctcacttataagtg

SEQ ID NO: 291119 - DNA, 25 bp, Probe Sequence
tcgtaggaacgctgagctgcctcaa

SEQ ID NO: 291120 - DNA, 25 bp, Probe Sequence
tcttaggaacgctgttctagccggc

SEQ ID NO: 291121 - DNA, 25 bp, Probe Sequence
tctaaaaacagttgtatctaaccgc

SEQ ID NO: 291122 - DNA, 25 bp, Probe Sequence
tctccaaaagcctactgttaaccag

SEQ ID NO: 291123 - DNA, 25 bp, Probe Sequence
tcccaacacagaattttcatgaccc

SEQ ID NO: 291124 - DNA, 25 bp, Probe Sequence
tcccaagtagagatgatgccacacc

SEQ ID NO: 291125 - DNA, 25 bp, Probe Sequence
tcccaattaggaagtgtaagcagct

SEQ ID NO: 291126 - DNA, 25 bp, Probe Sequence
tccgaatgtgcttaagtggaaagat

SEQ ID NO: 291127 - DNA, 25 bp, Probe Sequence
tccgagggtgacaggtgaaagaccc

SEQ ID NO: 291128 - DNA, 25 bp, Probe Sequence
tccgacgaggacaaggagggcagca

SEQ ID NO: 291129 - DNA, 25 bp, Probe Sequence
tcccctgaggcccaagcgggagaaa

SEQ ID NO: 291130 - DNA, 25 bp, Probe Sequence
tcccgtagtcctcaggctgtaagca

SEQ ID NO: 291131 - DNA, 25 bp, Probe Sequence
tcccgtagtcctcaggctgtaagca

SEQ ID NO: 291132 - DNA, 25 bp, Probe Sequence
tcccgtagtcctcaggctgtaagca

SEQ ID NO: 291133 - DNA, 25 bp, Probe Sequence
tcccgtaaccgcaggcatgtgacag

SEQ ID NO: 291134 - DNA, 25 bp, Probe Sequence
tcccttaagcccagacatctgttga

SEQ ID NO: 291135 - DNA, 25 bp, Probe Sequence
tcccttccagcctggaagtgttgca

SEQ ID NO: 291136 - DNA, 25 bp, Probe Sequence
tccctaccccatggtgctaggaaga

SEQ ID NO: 291137 - DNA, 25 bp, Probe Sequence
tccctcaccgctgactcaaggaaga

SEQ ID NO: 291138 - DNA, 25 bp, Probe Sequence
tcgccctgtattgaccaaggagcag

SEQ ID NO: 291139 - DNA, 25 bp, Probe Sequence
tcgccctgagaagatctaccccagg

SEQ ID NO: 291140 - DNA, 25 bp, Probe Sequence
tccgcttgccaaaataaccgaagga

SEQ ID NO: 291141 - DNA, 25 bp, Probe Sequence
tcccttctatgaaaaccaggattgg

SEQ ID NO: 291142 - DNA, 25 bp, Probe Sequence
tccgcctcaatgcagaaccagtagt

SEQ ID NO: 291143 - DNA, 25 bp, Probe Sequence
tcccccatttacaatccttcatgta

SEQ ID NO: 291144 - DNA, 25 bp, Probe Sequence
tccccatctcttgtacacattttaa

SEQ ID NO: 291145 - DNA, 25 bp, Probe Sequence
tccctgttcattgtaagcactttta

SEQ ID NO: 291146 - DNA, 25 bp, Probe Sequence
tccctaatatgtatactatcttttt

SEQ ID NO: 291147 - DNA, 25 bp, Probe Sequence
tcccaaaatataggttactcttgtt

SEQ ID NO: 291148 - DNA, 25 bp, Probe Sequence
tccgcatcaggtaacaggtttcttg

SEQ ID NO: 291149 - DNA, 25 bp, Probe Sequence
tcgcaccaagtttccgtcttttgga

SEQ ID NO: 291150 - DNA, 25 bp, Probe Sequence
tcccctgcagttaccggtattgtaa

SEQ ID NO: 291151 - DNA, 25 bp, Probe Sequence
tccctctcagatacccagtggaatt

SEQ ID NO: 291152 - DNA, 25 bp, Probe Sequence
tccgcctggaacctgagagcgagta

SEQ ID NO: 291153 - DNA, 25 bp, Probe Sequence
tcccctgttatcctggtctaataac

SEQ ID NO: 291154 - DNA, 25 bp, Probe Sequence
tcccctcttccaatgagcttaaaac

SEQ ID NO: 291155 - DNA, 25 bp, Probe Sequence
tcccacacttcctgttacaataact

SEQ ID NO: 291156 - DNA, 25 bp, Probe Sequence
tccctcccacgctgttaattagaga

SEQ ID NO: 291157 - DNA, 25 bp, Probe Sequence
tcccccatcgtgtgttagtgttagt

SEQ ID NO: 291158 - DNA, 25 bp, Probe Sequence
tccccctgccattggtatagctggt

SEQ ID NO: 291159 - DNA, 25 bp, Probe Sequence
tccccactgccaacgtgtcagtggt

SEQ ID NO: 291160 - DNA, 25 bp, Probe Sequence
tccgctgcattgccaaagtgtcttc

SEQ ID NO: 291161 - DNA, 25 bp, Probe Sequence
tccccattccataaggttttcattc

SEQ ID NO: 291162 - DNA, 25 bp, Probe Sequence
tccccattccagcagtagatttaac

SEQ ID NO: 291163 - DNA, 25 bp, Probe Sequence
tcccattatctttgaccagtattaa

SEQ ID NO: 291164 - DNA, 25 bp, Probe Sequence
tccctgatattttcccagtgttcgc

SEQ ID NO: 291165 - DNA, 25 bp, Probe Sequence
tcccgatttgtagcactttgttgac

SEQ ID NO: 291166 - DNA, 25 bp, Probe Sequence
tccccttctgtgtcacagttcttgg

SEQ ID NO: 291167 - DNA, 25 bp, Probe Sequence
tccctccgcagcacaagattttggg

SEQ ID NO: 291168 - DNA, 25 bp, Probe Sequence
tccctcagcgagatctgagcatctt

SEQ ID NO: 291169 - DNA, 25 bp, Probe Sequence
tccccagctgaccagggtgcttggg

SEQ ID NO: 291170 - DNA, 25 bp, Probe Sequence
tccccagctgaccagggtgcttggg

SEQ ID NO: 291171 - DNA, 25 bp, Probe Sequence
tccctgagctgggaggcggctttgg

SEQ ID NO: 291172 - DNA, 25 bp, Probe Sequence
tccctatcttccagcaggttagagg

SEQ ID NO: 291173 - DNA, 25 bp, Probe Sequence
tccctcctgaccagcagaggttgat

SEQ ID NO: 291174 - DNA, 25 bp, Probe Sequence
tcccaggctgatgctcgacaggtag

SEQ ID NO: 291175 - DNA, 25 bp, Probe Sequence
tcccctgtgtgagctgaagcctcag

SEQ ID NO: 291176 - DNA, 25 bp, Probe Sequence
tccctcattgtagcgaagagcagga

SEQ ID NO: 291177 - DNA, 25 bp, Probe Sequence
tccgcatgatctctcctgaaggagg

SEQ ID NO: 291178 - DNA, 25 bp, Probe Sequence
tcccgcagcagttcctgaatggggt

SEQ ID NO: 291179 - DNA, 25 bp, Probe Sequence
tccccagtgtacatattgtatctgt

SEQ ID NO: 291180 - DNA, 25 bp, Probe Sequence
tccccgttcagcatttctgtggtgg

SEQ ID NO: 291181 - DNA, 25 bp, Probe Sequence
tcccctaatctggtttctgtgttga

SEQ ID NO: 291182 - DNA, 25 bp, Probe Sequence
tcccccatattgttcttgtggtagt

SEQ ID NO: 291183 - DNA, 25 bp, Probe Sequence
tccccgcatggtgttgggggtgctg

SEQ ID NO: 291184 - DNA, 25 bp, Probe Sequence
tccctaatggccgctggggggtgag

SEQ ID NO: 291185 - DNA, 25 bp, Probe Sequence
tccctaatggccgctggggggtgag

SEQ ID NO: 291186 - DNA, 25 bp, Probe Sequence
tccccaggtccagctctggagggga

SEQ ID NO: 291187 - DNA, 25 bp, Probe Sequence
tactacgggtacctgtggagcgagg

SEQ ID NO: 291188 - DNA, 25 bp, Probe Sequence
tcgctgaaagccacatggattatga

SEQ ID NO: 291189 - DNA, 25 bp, Probe Sequence
tcgcaagaacctgatggacatgttc

SEQ ID NO: 291190 - DNA, 25 bp, Probe Sequence
tcgacaaacactcagtggaggtcac

SEQ ID NO: 291191 - DNA, 25 bp, Probe Sequence
tcgaggaagccatacccaagtcctt

SEQ ID NO: 291192 - DNA, 25 bp, Probe Sequence
tcgtggaggccgtgtccaaagactt

SEQ ID NO: 291193 - DNA, 25 bp, Probe Sequence
tcgtggagtggatccccaacaacgt

SEQ ID NO: 291194 - DNA, 25 bp, Probe Sequence
tcgtgaaggagttctcccacatcgc

SEQ ID NO: 291195 - DNA, 25 bp, Probe Sequence
tagctacggcaatcctgaacttcct

SEQ ID NO: 291196 - DNA, 25 bp, Probe Sequence
tctgaacaggttgtcaccacttcct

SEQ ID NO: 291197 - DNA, 25 bp, Probe Sequence
tcggacggatggatccctttcgtca

SEQ ID NO: 291198 - DNA, 25 bp, Probe Sequence
tcccggggagttacgctgtgtttgc

SEQ ID NO: 291199 - DNA, 25 bp, Probe Sequence
tcccgggatgtttctccatgttggt

SEQ ID NO: 291200 - DNA, 25 bp, Probe Sequence
tcgctgggtttatcccacatcgagt

SEQ ID NO: 291201 - DNA, 25 bp, Probe Sequence
tcccggatctgtaaccgaccgtgta

SEQ ID NO: 291202 - DNA, 25 bp, Probe Sequence
tccccgaatgggtggataccgtcaa

SEQ ID NO: 291203 - DNA, 25 bp, Probe Sequence
tccccgactggtttttgaacagaca

SEQ ID NO: 291204 - DNA, 25 bp, Probe Sequence
tccccagttggtgtttccaacaaag

SEQ ID NO: 291205 - DNA, 25 bp, Probe Sequence
tccccggtggttttgtgctcaaaat

SEQ ID NO: 291206 - DNA, 25 bp, Probe Sequence
tcccgctggaggtaattggctaacc

SEQ ID NO: 291207 - DNA, 25 bp, Probe Sequence
tccccttgatggaaattgaccatac

SEQ ID NO: 291208 - DNA, 25 bp, Probe Sequence
tcccctggaccttatataacatact

SEQ ID NO: 291209 - DNA, 25 bp, Probe Sequence
tcgcctcagaaccgtattataacag

SEQ ID NO: 291210 - DNA, 25 bp, Probe Sequence
tcgagaccatcccggctaaaacggt

SEQ ID NO: 291211 - DNA, 25 bp, Probe Sequence
tcgagaccatcccggctaaaacggt

SEQ ID NO: 291212 - DNA, 25 bp, Probe Sequence
tcagaaggaacctgtgaaagccttt

SEQ ID NO: 291213 - DNA, 25 bp, Probe Sequence
tcgaaggaacaaagatgactatgct

SEQ ID NO: 291214 - DNA, 25 bp, Probe Sequence
tcgccagtggaagaagattagtgca

SEQ ID NO: 291215 - DNA, 25 bp, Probe Sequence
tcccgggacacctaggctagggtgg

SEQ ID NO: 291216 - DNA, 25 bp, Probe Sequence
tcccgggatccatcaaccaagtggg

SEQ ID NO: 291217 - DNA, 25 bp, Probe Sequence
tccctgggtcactggtctccagtgg

SEQ ID NO: 291218 - DNA, 25 bp, Probe Sequence
tccctgactacctggtcatccagat

SEQ ID NO: 291219 - DNA, 25 bp, Probe Sequence
tcccgacatacctgtgtcttcgtgt

SEQ ID NO: 291220 - DNA, 25 bp, Probe Sequence
tcccggagagcctgtgtcattggtg

SEQ ID NO: 291221 - DNA, 25 bp, Probe Sequence
tccccggatgtgtgagaataatgtg

SEQ ID NO: 291222 - DNA, 25 bp, Probe Sequence
tcccgggatctgtctcaaatatttc

SEQ ID NO: 291223 - DNA, 25 bp, Probe Sequence
tcccaggccttcgcagattatgtta

SEQ ID NO: 291224 - DNA, 25 bp, Probe Sequence
tcccagatcgtctccaattcgaaaa

SEQ ID NO: 291225 - DNA, 25 bp, Probe Sequence
tcgacaacgaaagtcataccgtaga

SEQ ID NO: 291226 - DNA, 25 bp, Probe Sequence
tcccaactggagctatgacactttt

SEQ ID NO: 291227 - DNA, 25 bp, Probe Sequence
tcccgttggagtgagagcctcttgg

SEQ ID NO: 291228 - DNA, 25 bp, Probe Sequence
tcgtttttgagggggtcatgccggg

SEQ ID NO: 291229 - DNA, 25 bp, Probe Sequence
tcaggttttacgagaggcgaaggag

SEQ ID NO: 291230 - DNA, 25 bp, Probe Sequence
tcggttgtgaactaaaggccgacaa

SEQ ID NO: 291231 - DNA, 25 bp, Probe Sequence
tcgtgtggcgacggataaggcctga

SEQ ID NO: 291232 - DNA, 25 bp, Probe Sequence
tcgcgtgggcaaggtggggcctatg

SEQ ID NO: 291233 - DNA, 25 bp, Probe Sequence
tccctgggcagggagagggccaagg

SEQ ID NO: 291234 - DNA, 25 bp, Probe Sequence
tcgctctgggggccaatggagctgc

SEQ ID NO: 291235 - DNA, 25 bp, Probe Sequence
tctctccgtgatctgcaatggtcag

SEQ ID NO: 291236 - DNA, 25 bp, Probe Sequence
tccgccgtgcatctgaatttcaggg

SEQ ID NO: 291237 - DNA, 25 bp, Probe Sequence
tccccagtctcacgagtttgctgag

SEQ ID NO: 291238 - DNA, 25 bp, Probe Sequence
tcccaaggcctgagttctggaccta

SEQ ID NO: 291239 - DNA, 25 bp, Probe Sequence
tccctaggctagaaattgctgggcc

SEQ ID NO: 291240 - DNA, 25 bp, Probe Sequence
tcccatgggatgtgaaaggctggcc

SEQ ID NO: 291241 - DNA, 25 bp, Probe Sequence
tcccgggatcgcgaaacgtgggttg

SEQ ID NO: 291242 - DNA, 25 bp, Probe Sequence
tcccaggtactggccaacctgagtt

SEQ ID NO: 291243 - DNA, 25 bp, Probe Sequence
tcccggtcctgtacgatttcagtat

SEQ ID NO: 291244 - DNA, 25 bp, Probe Sequence
tccccgtacttccagatttattgtt

SEQ ID NO: 291245 - DNA, 25 bp, Probe Sequence
tccgccttagttcagagttgtgtgt

SEQ ID NO: 291246 - DNA, 25 bp, Probe Sequence
tcccctctacttggcaagtggttgt

SEQ ID NO: 291247 - DNA, 25 bp, Probe Sequence
tcccctctactgggcaagtgcttgt

SEQ ID NO: 291248 - DNA, 25 bp, Probe Sequence
tccgccactcacggacaagagctgg

SEQ ID NO: 291249 - DNA, 25 bp, Probe Sequence
tcgccaggccaggaatcacaagctc

SEQ ID NO: 291250 - DNA, 25 bp, Probe Sequence
tcccaggccagagacaaggcagaca

SEQ ID NO: 291251 - DNA, 25 bp, Probe Sequence
tcccattccagaaaccataagactc

SEQ ID NO: 291252 - DNA, 25 bp, Probe Sequence
tcgcctgaccattacacgcaaagat

SEQ ID NO: 291253 - DNA, 25 bp, Probe Sequence
tcgccgcacatcatcagcgcgcaag

SEQ ID NO: 291254 - DNA, 25 bp, Probe Sequence
tcccatctgcatctcgagtcgcaga

SEQ ID NO: 291255 - DNA, 25 bp, Probe Sequence
tccctcgctgcgatctattgaaagt

SEQ ID NO: 291256 - DNA, 25 bp, Probe Sequence
tcagccattggacctcttctaaagg

SEQ ID NO: 291257 - DNA, 25 bp, Probe Sequence
tcccttcggccacttcttggaggga

SEQ ID NO: 291258 - DNA, 25 bp, Probe Sequence
tcccttccagcccattttaattaga

SEQ ID NO: 291259 - DNA, 25 bp, Probe Sequence
tccccaccagctctttggaagtgag

SEQ ID NO: 291260 - DNA, 25 bp, Probe Sequence
tcccgcgcctgttggttggaagtga

SEQ ID NO: 291261 - DNA, 25 bp, Probe Sequence
tcggggcagctgtggtagtgtggaa

SEQ ID NO: 291262 - DNA, 25 bp, Probe Sequence
tcccggtgtgagctggcgttggata

SEQ ID NO: 291263 - DNA, 25 bp, Probe Sequence
tccctggttatgattctgaaagcaa

SEQ ID NO: 291264 - DNA, 25 bp, Probe Sequence
tcggtggctgtctttccattaaaga

SEQ ID NO: 291265 - DNA, 25 bp, Probe Sequence
tcgggtgtcagcttaacattccaca

SEQ ID NO: 291266 - DNA, 25 bp, Probe Sequence
tcccttgtgagcttgaatcaaccaa

SEQ ID NO: 291267 - DNA, 25 bp, Probe Sequence
tcccctatgccattgcatatcaatc

SEQ ID NO: 291268 - DNA, 25 bp, Probe Sequence
tccctctggctatcatgccaactac

SEQ ID NO: 291269 - DNA, 25 bp, Probe Sequence
tccctctggctatcatgccaactac

SEQ ID NO: 291270 - DNA, 25 bp, Probe Sequence
tccctctggctatcatgccaactac

SEQ ID NO: 291271 - DNA, 25 bp, Probe Sequence
tccctgcagtgcagtacctatctca

SEQ ID NO: 291272 - DNA, 25 bp, Probe Sequence
tccctggtgcggtaccagtgcacag

SEQ ID NO: 291273 - DNA, 25 bp, Probe Sequence
tcccaggagggatcacatctcacca

SEQ ID NO: 291274 - DNA, 25 bp, Probe Sequence
tcgacctgatgcagagccttctgag

SEQ ID NO: 291275 - DNA, 25 bp, Probe Sequence
tcgacacgtcatggaccatgactgg

SEQ ID NO: 291276 - DNA, 25 bp, Probe Sequence
tcgaacccggacgaggtggtggtgc

SEQ ID NO: 291277 - DNA, 25 bp, Probe Sequence
tcgccacagctacaccggatggtgg

SEQ ID NO: 291278 - DNA, 25 bp, Probe Sequence
tcccatactatctgcttggatttgg

SEQ ID NO: 291279 - DNA, 25 bp, Probe Sequence
tcccactcttctctgggacttgtgg

SEQ ID NO: 291280 - DNA, 25 bp, Probe Sequence
tcccccctctcgagggcgatgagga

SEQ ID NO: 291281 - DNA, 25 bp, Probe Sequence
tcccccctctcgagggcgatgagga

SEQ ID NO: 291282 - DNA, 25 bp, Probe Sequence
tcccgcttccttcagcggagtagga

SEQ ID NO: 291283 - DNA, 25 bp, Probe Sequence
tcccacttcccaacatgggagaatt

SEQ ID NO: 291284 - DNA, 25 bp, Probe Sequence
tcccacaaccgcagcgaggagtttc

SEQ ID NO: 291285 - DNA, 25 bp, Probe Sequence
tcccaacacctcttggggagtttag

SEQ ID NO: 291286 - DNA, 25 bp, Probe Sequence
tcccagacaccggcgtgggaatgtg

SEQ ID NO: 291287 - DNA, 25 bp, Probe Sequence
tcccaggcccgctgggagggtacat

SEQ ID NO: 291288 - DNA, 25 bp, Probe Sequence
tcccagggctctgacgaaggcgtta

SEQ ID NO: 291289 - DNA, 25 bp, Probe Sequence
tcccaggtcttttgtgagaaggtta

SEQ ID NO: 291290 - DNA, 25 bp, Probe Sequence
tcccacgtctacaatggagtcgagt

SEQ ID NO: 291291 - DNA, 25 bp, Probe Sequence
tcccaagtctagcccggacgagggc

SEQ ID NO: 291292 - DNA, 25 bp, Probe Sequence
tcccaacttagccctgggtgggccg

SEQ ID NO: 291293 - DNA, 25 bp, Probe Sequence
tcccaacttagccctgggtgggccg

SEQ ID NO: 291294 - DNA, 25 bp, Probe Sequence
tcccagccctactcgggatgagtgc

SEQ ID NO: 291295 - DNA, 25 bp, Probe Sequence
tcccagccccccaggagagctgggc

SEQ ID NO: 291296 - DNA, 25 bp, Probe Sequence
tcccgccctcacagaggagatgctg

SEQ ID NO: 291297 - DNA, 25 bp, Probe Sequence
tccctccactctacaaggagctctt

SEQ ID NO: 291298 - DNA, 25 bp, Probe Sequence
tccctccatccgacagaggaccaac

SEQ ID NO: 291299 - DNA, 25 bp, Probe Sequence
tcccctgcaccgagggaacaactcg

SEQ ID NO: 291300 - DNA, 25 bp, Probe Sequence
tcccccctgcgggtgaagaacttcg

SEQ ID NO: 291301 - DNA, 25 bp, Probe Sequence
tcccgccggcgcggatcaagaagat

SEQ ID NO: 291302 - DNA, 25 bp, Probe Sequence
tcccgctaggtggtgtcaagcaggc

SEQ ID NO: 291303 - DNA, 25 bp, Probe Sequence
tccctgctaggagtgcgacaagcag

SEQ ID NO: 291304 - DNA, 25 bp, Probe Sequence
tccccatatgtgttggagaatgaca

SEQ ID NO: 291305 - DNA, 25 bp, Probe Sequence
tccccatctgggagggtggcattct

SEQ ID NO: 291306 - DNA, 25 bp, Probe Sequence
tcccacatggggccggtgatggtat

SEQ ID NO: 291307 - DNA, 25 bp, Probe Sequence
tcccactgcaagcggctgcttgtgg

SEQ ID NO: 291308 - DNA, 25 bp, Probe Sequence
tccccagaatgtgcctctagtgtga

SEQ ID NO: 291309 - DNA, 25 bp, Probe Sequence
tccctcaagagtgcagccttggcta

SEQ ID NO: 291310 - DNA, 25 bp, Probe Sequence
tcccgctgcagagtaagccgggctg

SEQ ID NO: 291311 - DNA, 25 bp, Probe Sequence
tcccgctgatgagcgaggcgggtgc

SEQ ID NO: 291312 - DNA, 25 bp, Probe Sequence
tccctgtgcagatgcagccagcagg

SEQ ID NO: 291313 - DNA, 25 bp, Probe Sequence
tccctgcagagatggcacagactgc

SEQ ID NO: 291314 - DNA, 25 bp, Probe Sequence
tcgcagtcaggtaagcaggtcaaat

SEQ ID NO: 291315 - DNA, 25 bp, Probe Sequence
tccctcacctacaagatgctcaagt

SEQ ID NO: 291316 - DNA, 25 bp, Probe Sequence
tcccctcctgaaagatgtcatcgca

SEQ ID NO: 291317 - DNA, 25 bp, Probe Sequence
tcccgacactgacttcagtctactt

SEQ ID NO: 291318 - DNA, 25 bp, Probe Sequence
tccccggtaatgtcaatcaagcttg

SEQ ID NO: 291319 - DNA, 25 bp, Probe Sequence
tccccgcagttttcaatcatgtctg

SEQ ID NO: 291320 - DNA, 25 bp, Probe Sequence
tccctccatgactagtaatctttct

SEQ ID NO: 291321 - DNA, 25 bp, Probe Sequence
tcccacacaagcagtctttttctac

SEQ ID NO: 291322 - DNA, 25 bp, Probe Sequence
tcccaagcaagcccctatgatttgt

SEQ ID NO: 291323 - DNA, 25 bp, Probe Sequence
tcccacctagatgttgagtcttgtc

SEQ ID NO: 291324 - DNA, 25 bp, Probe Sequence
tccccctcagttttgcattgatttt

SEQ ID NO: 291325 - DNA, 25 bp, Probe Sequence
tcccctcccttcagattatgttaac

SEQ ID NO: 291326 - DNA, 25 bp, Probe Sequence
tcccttccggtatgttcaggagaac

SEQ ID NO: 291327 - DNA, 25 bp, Probe Sequence
tcccttccggtatgttcaggagaac

SEQ ID NO: 291328 - DNA, 25 bp, Probe Sequence
tccctgtgccctggaagttcagggg

SEQ ID NO: 291329 - DNA, 25 bp, Probe Sequence
tccctgatgaccagaagtttgccat

SEQ ID NO: 291330 - DNA, 25 bp, Probe Sequence
tcccagagattcaaggatggttcaa

SEQ ID NO: 291331 - DNA, 25 bp, Probe Sequence
tcccatggatacacaacgttgcaag

SEQ ID NO: 291332 - DNA, 25 bp, Probe Sequence
tcccaatgctacacaaccagaaagt

SEQ ID NO: 291333 - DNA, 25 bp, Probe Sequence
tcccaatgctacacaaccagaaagt

SEQ ID NO: 291334 - DNA, 25 bp, Probe Sequence
tcccactgcatatttccatcttgaa

SEQ ID NO: 291335 - DNA, 25 bp, Probe Sequence
tcccctctgtagagatcatgcgaac

SEQ ID NO: 291336 - DNA, 25 bp, Probe Sequence
tccccatggctcagcgagcactgag

SEQ ID NO: 291337 - DNA, 25 bp, Probe Sequence
tccccatggtactgatgcttgctgg

SEQ ID NO: 291338 - DNA, 25 bp, Probe Sequence
tcccctagtgagggactgtgttgac

SEQ ID NO: 291339 - DNA, 25 bp, Probe Sequence
tccccatgaagcagggtgtcttgac

SEQ ID NO: 291340 - DNA, 25 bp, Probe Sequence
tcccacagacgtctgggcctggaaa

SEQ ID NO: 291341 - DNA, 25 bp, Probe Sequence
tcccctacgacccggagatggaaga

SEQ ID NO: 291342 - DNA, 25 bp, Probe Sequence
tcccctacgacccggagatggaaga

SEQ ID NO: 291343 - DNA, 25 bp, Probe Sequence
tccctctaccggcggggtgaagaag

SEQ ID NO: 291344 - DNA, 25 bp, Probe Sequence
tccctctttcggctggtgtagaata

SEQ ID NO: 291345 - DNA, 25 bp, Probe Sequence
tccctctttcggctggtgtagaata

SEQ ID NO: 291346 - DNA, 25 bp, Probe Sequence
tcccatctttcttccggacaatgaa

SEQ ID NO: 291347 - DNA, 25 bp, Probe Sequence
tcccatctttcttccggacaatgaa

SEQ ID NO: 291348 - DNA, 25 bp, Probe Sequence
tcccgttgtccctggcacagatgcc

SEQ ID NO: 291349 - DNA, 25 bp, Probe Sequence
tcccaggggcataaggacaaagcca

SEQ ID NO: 291350 - DNA, 25 bp, Probe Sequence
tccccgggcagctagctataaagca

SEQ ID NO: 291351 - DNA, 25 bp, Probe Sequence
tccccgagagaaagtgttaacattg

SEQ ID NO: 291352 - DNA, 25 bp, Probe Sequence
tcccctcaggcatcgttgtaaagtg

SEQ ID NO: 291353 - DNA, 25 bp, Probe Sequence
tccctgtcggctgtgtttgaacact

SEQ ID NO: 291354 - DNA, 25 bp, Probe Sequence
tcccgtccatctggtatgagtaacc

SEQ ID NO: 291355 - DNA, 25 bp, Probe Sequence
tccctgccctgctttaataaacagc

SEQ ID NO: 291356 - DNA, 25 bp, Probe Sequence
tccctgaccgcaccaacagaaagca

SEQ ID NO: 291357 - DNA, 25 bp, Probe Sequence
tccctggcccagtctcaaaaaaaat

SEQ ID NO: 291358 - DNA, 25 bp, Probe Sequence
tccctggcccgtgctggaaaagtga

SEQ ID NO: 291359 - DNA, 25 bp, Probe Sequence
tcccaggaccggcaggaaccaggaa

SEQ ID NO: 291360 - DNA, 25 bp, Probe Sequence
tcccagttctcgagaagaaaaggag

SEQ ID NO: 291361 - DNA, 25 bp, Probe Sequence
tcccattttcagagcaacaagataa

SEQ ID NO: 291362 - DNA, 25 bp, Probe Sequence
tcccatttggtcccgacaagatgac

SEQ ID NO: 291363 - DNA, 25 bp, Probe Sequence
tcccagactggttcttgaacagaca

SEQ ID NO: 291364 - DNA, 25 bp, Probe Sequence
tcccacctgattttgtgacactata

SEQ ID NO: 291365 - DNA, 25 bp, Probe Sequence
tcccacgctgttaattagagaaaga

SEQ ID NO: 291366 - DNA, 25 bp, Probe Sequence
tcccctggcttgcagaaaatccaga

SEQ ID NO: 291367 - DNA, 25 bp, Probe Sequence
tcccctgctgagttggaaattccag

SEQ ID NO: 291368 - DNA, 25 bp, Probe Sequence
tcccaactggttcgacctttgcaga

SEQ ID NO: 291369 - DNA, 25 bp, Probe Sequence
tcccacatgtggaagaacctttaat

SEQ ID NO: 291370 - DNA, 25 bp, Probe Sequence
tcccacattttttgtcctctgaaaa

SEQ ID NO: 291371 - DNA, 25 bp, Probe Sequence
tcccatcatcttggtactactagat

SEQ ID NO: 291372 - DNA, 25 bp, Probe Sequence
tccctgccctggaacatgactaaga

SEQ ID NO: 291373 - DNA, 25 bp, Probe Sequence
tcccggcctgtaacatatctgtaaa

SEQ ID NO: 291374 - DNA, 25 bp, Probe Sequence
tcgccgtcctataataggctttaga

SEQ ID NO: 291375 - DNA, 25 bp, Probe Sequence
tcgtctgttctgtgttggttttact

SEQ ID NO: 291376 - DNA, 25 bp, Probe Sequence
tcgggtctcagtttttttgtttgcg

SEQ ID NO: 291377 - DNA, 25 bp, Probe Sequence
tccctttagtttgtttgctgtctgg

SEQ ID NO: 291378 - DNA, 25 bp, Probe Sequence
tcccctgtagtgaccattttgctat

SEQ ID NO: 291379 - DNA, 25 bp, Probe Sequence
tcccctctttcaatcattggtgatt

SEQ ID NO: 291380 - DNA, 25 bp, Probe Sequence
tcccctctttccaaagagctgagac

SEQ ID NO: 291381 - DNA, 25 bp, Probe Sequence
tcccctcatcctcctaatgttgaga

SEQ ID NO: 291382 - DNA, 25 bp, Probe Sequence
tcccgccacactacttgagttgaag

SEQ ID NO: 291383 - DNA, 25 bp, Probe Sequence
tcccccaagattgtggttgccattc

SEQ ID NO: 291384 - DNA, 25 bp, Probe Sequence
tcccctctagttttgggtgtgcatg

SEQ ID NO: 291385 - DNA, 25 bp, Probe Sequence
tcccaccgagtttgaggccatggca

SEQ ID NO: 291386 - DNA, 25 bp, Probe Sequence
tccccgctagcttggggcgagcaga

SEQ ID NO: 291387 - DNA, 25 bp, Probe Sequence
tccccgtagtctgtggcagtgaacc

SEQ ID NO: 291388 - DNA, 25 bp, Probe Sequence
tcccgggatgttgtagcaggaatct

SEQ ID NO: 291389 - DNA, 25 bp, Probe Sequence
tcccgggatgtgatctatcagacaa

SEQ ID NO: 291390 - DNA, 25 bp, Probe Sequence
tccccggatggtacattcaggcacc

SEQ ID NO: 291391 - DNA, 25 bp, Probe Sequence
tcccctgtgaaagcttgattcctgc

SEQ ID NO: 291392 - DNA, 25 bp, Probe Sequence
tcccctctgcaaatacctgcatttc

SEQ ID NO: 291393 - DNA, 25 bp, Probe Sequence
tccctccagccaataggcagctttc

SEQ ID NO: 291394 - DNA, 25 bp, Probe Sequence
tccctccatgcaaaagtggggctaa

SEQ ID NO: 291395 - DNA, 25 bp, Probe Sequence
tcccatttgaaattgctggcgctgc

SEQ ID NO: 291396 - DNA, 25 bp, Probe Sequence
tcggctcggagaatgctgccgggcc

SEQ ID NO: 291397 - DNA, 25 bp, Probe Sequence
tcgctgctgggcatatgccccagcc

SEQ ID NO: 291398 - DNA, 25 bp, Probe Sequence
tcgcttaggtcttgctctcaaattt

SEQ ID NO: 291399 - DNA, 25 bp, Probe Sequence
tcccaaggacaggcttcagcatcag

SEQ ID NO: 291400 - DNA, 25 bp, Probe Sequence
tccctcagaacggcgcgagaagcga

SEQ ID NO: 291401 - DNA, 25 bp, Probe Sequence
tccctctctactggagtggaaggtc

SEQ ID NO: 291402 - DNA, 25 bp, Probe Sequence
tcccttcatcaaggagtaccaggcc

SEQ ID NO: 291403 - DNA, 25 bp, Probe Sequence
tccctgaccatctgagaaccaagcc

SEQ ID NO: 291404 - DNA, 25 bp, Probe Sequence
tccctgttctgatgagagagcccat

SEQ ID NO: 291405 - DNA, 25 bp, Probe Sequence
tcccaggctgcttaggagacagaat

SEQ ID NO: 291406 - DNA, 25 bp, Probe Sequence
tccctggcgcttgaggctcagaaga

SEQ ID NO: 291407 - DNA, 25 bp, Probe Sequence
tccctgccactgtgggcatcagagg

SEQ ID NO: 291408 - DNA, 25 bp, Probe Sequence
tcccaggcacaggtgttgcaccagg

SEQ ID NO: 291409 - DNA, 25 bp, Probe Sequence
tccctgaggctcccttgactcagga

SEQ ID NO: 291410 - DNA, 25 bp, Probe Sequence
tccctgggcgcgatatttctggtga

SEQ ID NO: 291411 - DNA, 25 bp, Probe Sequence
tccctggcactggttgttttctgtg

SEQ ID NO: 291412 - DNA, 25 bp, Probe Sequence
tccctggaatgagttgaggccactg

SEQ ID NO: 291413 - DNA, 25 bp, Probe Sequence
tcccaggaaagtgctgtgccctatc

SEQ ID NO: 291414 - DNA, 25 bp, Probe Sequence
tcccaggcagagttgtctgaatcct

SEQ ID NO: 291415 - DNA, 25 bp, Probe Sequence
tcgccaggcgttttctgagcatacc

SEQ ID NO: 291416 - DNA, 25 bp, Probe Sequence
tcgcgccggattattgctgcaactg

SEQ ID NO: 291417 - DNA, 25 bp, Probe Sequence
tcgcgccaaattttgcgctcggtgc

SEQ ID NO: 291418 - DNA, 25 bp, Probe Sequence
tcgccgccaatgcttgttcaggcac

SEQ ID NO: 291419 - DNA, 25 bp, Probe Sequence
tcgcctccaagattggttctaacgc

SEQ ID NO: 291420 - DNA, 25 bp, Probe Sequence
tccctacggatttcttaaaagccag

SEQ ID NO: 291421 - DNA, 25 bp, Probe Sequence
tcccttttgtcttcttgataatagt

SEQ ID NO: 291422 - DNA, 25 bp, Probe Sequence
tccctgtttggttgctgatgagctt

SEQ ID NO: 291423 - DNA, 25 bp, Probe Sequence
tccctgattttgctgctgggcaact

SEQ ID NO: 291424 - DNA, 25 bp, Probe Sequence
tctcctagtttggctggggaagtgc

SEQ ID NO: 291425 - DNA, 25 bp, Probe Sequence
tccctagtcattgggaaagtagagc

SEQ ID NO: 291426 - DNA, 25 bp, Probe Sequence
tccctctgtggtagtagtgagtaga

SEQ ID NO: 291427 - DNA, 25 bp, Probe Sequence
tccctcgtggtccatgacgtggaat

SEQ ID NO: 291428 - DNA, 25 bp, Probe Sequence
tccctcttccatactgaggtggaga

SEQ ID NO: 291429 - DNA, 25 bp, Probe Sequence
tccctctgttcactgtggtgggaaa

SEQ ID NO: 291430 - DNA, 25 bp, Probe Sequence
tccctctctgtcaagtttggaaacg

SEQ ID NO: 291431 - DNA, 25 bp, Probe Sequence
tcccccttctgagtatgttcaatat

SEQ ID NO: 291432 - DNA, 25 bp, Probe Sequence
tcccgggatctggtatcttcaaaat

SEQ ID NO: 291433 - DNA, 25 bp, Probe Sequence
tcccgggataatgacttgaaatgac

SEQ ID NO: 291434 - DNA, 25 bp, Probe Sequence
tcccagggacacgaactggagatta

SEQ ID NO: 291435 - DNA, 25 bp, Probe Sequence
tcccaatgggagcccacggaactaa

SEQ ID NO: 291436 - DNA, 25 bp, Probe Sequence
tcgtcaccaggacccaaggaaccaa

SEQ ID NO: 291437 - DNA, 25 bp, Probe Sequence
tcgtcccagggacacgaactggaga

SEQ ID NO: 291438 - DNA, 25 bp, Probe Sequence
tttccggaggctaacagacctgggc

SEQ ID NO: 291439 - DNA, 25 bp, Probe Sequence
tccccgggagcatgaatgacttcag

SEQ ID NO: 291440 - DNA, 25 bp, Probe Sequence
tcccgcagaacctgaagatgttcgc

SEQ ID NO: 291441 - DNA, 25 bp, Probe Sequence
tcccatgagaacccataggacttcc

SEQ ID NO: 291442 - DNA, 25 bp, Probe Sequence
tcccagtgtacgactacgatccatc

SEQ ID NO: 291443 - DNA, 25 bp, Probe Sequence
tcccagtgcatacatctaagcctga

SEQ ID NO: 291444 - DNA, 25 bp, Probe Sequence
tcccagctgctctgataagaggagg

SEQ ID NO: 291445 - DNA, 25 bp, Probe Sequence
tcccagatgcatccgagacagaaca

SEQ ID NO: 291446 - DNA, 25 bp, Probe Sequence
tcccaaatcacaggatagatgcaga

SEQ ID NO: 291447 - DNA, 25 bp, Probe Sequence
tcccacaatcataggtatcagcgta

SEQ ID NO: 291448 - DNA, 25 bp, Probe Sequence
tcccatcaccagaaatgatagcgtg

SEQ ID NO: 291449 - DNA, 25 bp, Probe Sequence
tccctcggcagatgttcagcgatgc

SEQ ID NO: 291450 - DNA, 25 bp, Probe Sequence
tcccgggacaaggagcgcgtgcgga

SEQ ID NO: 291451 - DNA, 25 bp, Probe Sequence
tcccgggatacaggccggatgcagt

SEQ ID NO: 291452 - DNA, 25 bp, Probe Sequence
tcccagaaagactccggagctgcct

SEQ ID NO: 291453 - DNA, 25 bp, Probe Sequence
tcccacacaagacccaagtagctgc

SEQ ID NO: 291454 - DNA, 25 bp, Probe Sequence
tccctctcacagtcacgaagtagca

SEQ ID NO: 291455 - DNA, 25 bp, Probe Sequence
tcccccacagattcctagcaatgaa

SEQ ID NO: 291456 - DNA, 25 bp, Probe Sequence
tcccatcccagatacgacagatgat

SEQ ID NO: 291457 - DNA, 25 bp, Probe Sequence
tcgcaataccaaagtcgcaagaatg

SEQ ID NO: 291458 - DNA, 25 bp, Probe Sequence
tcgccatgatccagcagtacctgaa

SEQ ID NO: 291459 - DNA, 25 bp, Probe Sequence
tccctgatcttctgattgccataaa

SEQ ID NO: 291460 - DNA, 25 bp, Probe Sequence
tcccatgcatcgtggtggccaataa

SEQ ID NO: 291461 - DNA, 25 bp, Probe Sequence
tcccagctcttggggatgccaaggc

SEQ ID NO: 291462 - DNA, 25 bp, Probe Sequence
tcccgctcctattagatctaatgcc

SEQ ID NO: 291463 - DNA, 25 bp, Probe Sequence
tcccgtactgattagtcaacagtgg

SEQ ID NO: 291464 - DNA, 25 bp, Probe Sequence
tcccagtgacctcagctaagactgg

SEQ ID NO: 291465 - DNA, 25 bp, Probe Sequence
tcggcaaacagcacactaatcctgg

SEQ ID NO: 291466 - DNA, 25 bp, Probe Sequence
tcccaaatgcaggccctccatttgg

SEQ ID NO: 291467 - DNA, 25 bp, Probe Sequence
tcccataagagctccctttgtgggg

SEQ ID NO: 291468 - DNA, 25 bp, Probe Sequence
tcccgaggagcaccccgtgctgctg

SEQ ID NO: 291469 - DNA, 25 bp, Probe Sequence
tcccagggagagacacagcccactg

SEQ ID NO: 291470 - DNA, 25 bp, Probe Sequence
tccctgggagggacatgcttagcag

SEQ ID NO: 291471 - DNA, 25 bp, Probe Sequence
tccctgggcaggagtgctggtgagg

SEQ ID NO: 291472 - DNA, 25 bp, Probe Sequence
tcccgatgaggacttcagctgagta

SEQ ID NO: 291473 - DNA, 25 bp, Probe Sequence
tcccagttagatatcagtgagtttg

SEQ ID NO: 291474 - DNA, 25 bp, Probe Sequence
tccctgtctaaaacacatcagtgta

SEQ ID NO: 291475 - DNA, 25 bp, Probe Sequence
tcgtttcatttcttctcatcagact

SEQ ID NO: 291476 - DNA, 25 bp, Probe Sequence
tcgtttagtgaaccgtcagatcgcc

SEQ ID NO: 291477 - DNA, 25 bp, Probe Sequence
tcgtttagtgaaccgtcagatcgcc

SEQ ID NO: 291478 - DNA, 25 bp, Probe Sequence
tcgatggtagtcgccgtgcctacca

SEQ ID NO: 291479 - DNA, 25 bp, Probe Sequence
tcgatggtagtcgccgtgcctacca

SEQ ID NO: 291480 - DNA, 25 bp, Probe Sequence
tcgtggaggttggccgggtggccta

SEQ ID NO: 291481 - DNA, 25 bp, Probe Sequence
tcgtggaggttggccgggtggccta

SEQ ID NO: 291482 - DNA, 25 bp, Probe Sequence
tctggggcgaattacggagggttct

SEQ ID NO: 291483 - DNA, 25 bp, Probe Sequence
tctggggccaattccttaaggcctt

SEQ ID NO: 291484 - DNA, 25 bp, Probe Sequence
tcccgggatatttttcaatccactt

SEQ ID NO: 291485 - DNA, 25 bp, Probe Sequence
tcccgggatgacatattatttaata

SEQ ID NO: 291486 - DNA, 25 bp, Probe Sequence
tcccgggatatctttctgtttatga

SEQ ID NO: 291487 - DNA, 25 bp, Probe Sequence
tctggaaggaactttcggctataat

SEQ ID NO: 291488 - DNA, 25 bp, Probe Sequence
tctagaagaaactggcgcttaaacc

SEQ ID NO: 291489 - DNA, 25 bp, Probe Sequence
tctaaatgtaactcaccttttccta

SEQ ID NO: 291490 - DNA, 25 bp, Probe Sequence
tcccagaataaagcaccttctccct

SEQ ID NO: 291491 - DNA, 25 bp, Probe Sequence
tcccaagccaattaagcctttccaa

SEQ ID NO: 291492 - DNA, 25 bp, Probe Sequence
tcccaatccaagtcaaactttgcac

SEQ ID NO: 291493 - DNA, 25 bp, Probe Sequence
tcgcccaccaaccaagtgttacaag

SEQ ID NO: 291494 - DNA, 25 bp, Probe Sequence
tcgaccagcccccaaatgtcgaaga

SEQ ID NO: 291495 - DNA, 25 bp, Probe Sequence
tcgactcagcccaaaagcttcttaa

SEQ ID NO: 291496 - DNA, 25 bp, Probe Sequence
tcgtccaccctaaatgtactcagaa

SEQ ID NO: 291497 - DNA, 25 bp, Probe Sequence
tcccacaccacggtatctactggat

SEQ ID NO: 291498 - DNA, 25 bp, Probe Sequence
tcccagcagctcagtgtgattacag

SEQ ID NO: 291499 - DNA, 25 bp, Probe Sequence
tcccaggcctagatgatgtcacagt

SEQ ID NO: 291500 - DNA, 25 bp, Probe Sequence
tccctggcatctttaatccacatga

SEQ ID NO: 291501 - DNA, 25 bp, Probe Sequence
tcccagatgccttctagattcactg

SEQ ID NO: 291502 - DNA, 25 bp, Probe Sequence
tcccagcagactgaagcttcagctt

SEQ ID NO: 291503 - DNA, 25 bp, Probe Sequence
tcccagagactggtattgtggctgt

SEQ ID NO: 291504 - DNA, 25 bp, Probe Sequence
tcccaaggcatgcttctgtgtgctt

SEQ ID NO: 291505 - DNA, 25 bp, Probe Sequence
tcccacgacatgcactcaatagccg

SEQ ID NO: 291506 - DNA, 25 bp, Probe Sequence
tccctctacatcatcattggagccc

SEQ ID NO: 291507 - DNA, 25 bp, Probe Sequence
tccctcatccacagtaggacaccat

SEQ ID NO: 291508 - DNA, 25 bp, Probe Sequence
tccctcattgcaggggggagcagac

SEQ ID NO: 291509 - DNA, 25 bp, Probe Sequence
tccctcattagctaccttgagcaga

SEQ ID NO: 291510 - DNA, 25 bp, Probe Sequence
tcccacaacagctgcctgaatgcaa

SEQ ID NO: 291511 - DNA, 25 bp, Probe Sequence
tcccaatagctgttgcccattgacc

SEQ ID NO: 291512 - DNA, 25 bp, Probe Sequence
tcccaagagggtctgctctgagcct

SEQ ID NO: 291513 - DNA, 25 bp, Probe Sequence
tccctgaagggctcctgatcagtct

SEQ ID NO: 291514 - DNA, 25 bp, Probe Sequence
tcgcctacatggatagtccacactc

SEQ ID NO: 291515 - DNA, 25 bp, Probe Sequence
tccctgacttggtgctcacatgcac

SEQ ID NO: 291516 - DNA, 25 bp, Probe Sequence
tcccatacatttggaccatggcagc

SEQ ID NO: 291517 - DNA, 25 bp, Probe Sequence
tcccacaattttcccatgatgaggt

SEQ ID NO: 291518 - DNA, 25 bp, Probe Sequence
tcccaaagttcaaacagagagcact

SEQ ID NO: 291519 - DNA, 25 bp, Probe Sequence
tcgacaagactgctaaccaggcctc

SEQ ID NO: 291520 - DNA, 25 bp, Probe Sequence
tcgaaatgcagaacgacgccggcga

SEQ ID NO: 291521 - DNA, 25 bp, Probe Sequence
tctgcaaataaaaacgtgtgtatca

SEQ ID NO: 291522 - DNA, 25 bp, Probe Sequence
tcgggtgaaataatggtggttcgaa

SEQ ID NO: 291523 - DNA, 25 bp, Probe Sequence
tcggggttatgaaatttgttgagta

SEQ ID NO: 291524 - DNA, 25 bp, Probe Sequence
tcccactttcaaaattcttctgagc

SEQ ID NO: 291525 - DNA, 25 bp, Probe Sequence
tcgctcggttcgaaagtcttcgccc

SEQ ID NO: 291526 - DNA, 25 bp, Probe Sequence
tcaccagggtctcaagtttcctgcc

SEQ ID NO: 291527 - DNA, 25 bp, Probe Sequence
tcccgggatgatagaagttctcact

SEQ ID NO: 291528 - DNA, 25 bp, Probe Sequence
tcccttggattacttttgctcaatt

SEQ ID NO: 291529 - DNA, 25 bp, Probe Sequence
tccctgttgatttgtttgtgccttt

SEQ ID NO: 291530 - DNA, 25 bp, Probe Sequence
tccctgcctgcaatattttatgatt

SEQ ID NO: 291531 - DNA, 25 bp, Probe Sequence
tccctgatctgaactatttgctttc

SEQ ID NO: 291532 - DNA, 25 bp, Probe Sequence
tcccgtctaaccatgatgccttaac

SEQ ID NO: 291533 - DNA, 25 bp, Probe Sequence
tccctttgctatactgtgatcctta

SEQ ID NO: 291534 - DNA, 25 bp, Probe Sequence
tccctggagctatctgtggtcttag

SEQ ID NO: 291535 - DNA, 25 bp, Probe Sequence
tcccggtctatcttgtgacatttgg

SEQ ID NO: 291536 - DNA, 25 bp, Probe Sequence
tcccggagttcaggtgactgaggga

SEQ ID NO: 291537 - DNA, 25 bp, Probe Sequence
tcccggagtgaccgtgacatcacgc

SEQ ID NO: 291538 - DNA, 25 bp, Probe Sequence
tcccgggatggccgctaaatagctc

SEQ ID NO: 291539 - DNA, 25 bp, Probe Sequence
tctgctcaggaatggcccacaaatc

SEQ ID NO: 291540 - DNA, 25 bp, Probe Sequence
tctgtaaagggggcccaactcactg

SEQ ID NO: 291541 - DNA, 25 bp, Probe Sequence
tcgctcaaagagcggctccttgcca

SEQ ID NO: 291542 - DNA, 25 bp, Probe Sequence
tcgtgcaaataaacgctcactccga

SEQ ID NO: 291543 - DNA, 25 bp, Probe Sequence
tcgtgcaaataaacgctcactccga

SEQ ID NO: 291544 - DNA, 25 bp, Probe Sequence
tcggagacatgaacggcttcacgcc

SEQ ID NO: 291545 - DNA, 25 bp, Probe Sequence
tcggagacatgaacggcttcacgcc

SEQ ID NO: 291546 - DNA, 25 bp, Probe Sequence
tcgaaggcaacattggcctgcactg

SEQ ID NO: 291547 - DNA, 25 bp, Probe Sequence
tcccatcagaacttggcagccttga

SEQ ID NO: 291548 - DNA, 25 bp, Probe Sequence
tccctgcaggcctggagcctgtagg

SEQ ID NO: 291549 - DNA, 25 bp, Probe Sequence
tccctcagggtagcaccatggcagg

SEQ ID NO: 291550 - DNA, 25 bp, Probe Sequence
tcccatcaaggttcagcggcagtgg

SEQ ID NO: 291551 - DNA, 25 bp, Probe Sequence
tccctgcaggctccctgggcaggga

SEQ ID NO: 291552 - DNA, 25 bp, Probe Sequence
tccctgtgattgccctgttaagtat

SEQ ID NO: 291553 - DNA, 25 bp, Probe Sequence
tccctggtctccgtgtataacagct

SEQ ID NO: 291554 - DNA, 25 bp, Probe Sequence
tccctggcccaccttatagagagcc

SEQ ID NO: 291555 - DNA, 25 bp, Probe Sequence
tcccatgtccgctctgtaagaagct

SEQ ID NO: 291556 - DNA, 25 bp, Probe Sequence
tcccatccctgagcttgaagcaaga

SEQ ID NO: 291557 - DNA, 25 bp, Probe Sequence
tccctcccctccaatgataaagaaa

SEQ ID NO: 291558 - DNA, 25 bp, Probe Sequence
tcgcgcccccgagacaaagaggaga

SEQ ID NO: 291559 - DNA, 25 bp, Probe Sequence
tcgctacctacgtgcagaagaaaaa

SEQ ID NO: 291560 - DNA, 25 bp, Probe Sequence
tcccaccctcgaggcagggaaaagc

SEQ ID NO: 291561 - DNA, 25 bp, Probe Sequence
tctgccccacctaggggaaaaactg

SEQ ID NO: 291562 - DNA, 25 bp, Probe Sequence
tcgagttcacctcacggagacttac

SEQ ID NO: 291563 - DNA, 25 bp, Probe Sequence
tcggggaccttaagaagctgattgc

SEQ ID NO: 291564 - DNA, 25 bp, Probe Sequence
tcgaagtgaccttcaagaaccccct

SEQ ID NO: 291565 - DNA, 25 bp, Probe Sequence
taaaatttcagtgaacacaccccta

SEQ ID NO: 291566 - DNA, 25 bp, Probe Sequence
tcacaacatttgtgaacttccccct

SEQ ID NO: 291567 - DNA, 25 bp, Probe Sequence
tctaactttgcacaagtaacccatg

SEQ ID NO: 291568 - DNA, 25 bp, Probe Sequence
tcaagtcttccacaataattcccaa

SEQ ID NO: 291569 - DNA, 25 bp, Probe Sequence
tcagtgtatacctttaaacccataa

SEQ ID NO: 291570 - DNA, 25 bp, Probe Sequence
tcgtgctaaattttcagtaggccta

SEQ ID NO: 291571 - DNA, 25 bp, Probe Sequence
tcgtttatcatttccggggtgctgt

SEQ ID NO: 291572 - DNA, 25 bp, Probe Sequence
tcgactttctttcaggggatattgg

SEQ ID NO: 291573 - DNA, 25 bp, Probe Sequence
tcccttttttgccagtagagttatt

SEQ ID NO: 291574 - DNA, 25 bp, Probe Sequence
tcccttcttttcacaagcactgttg

SEQ ID NO: 291575 - DNA, 25 bp, Probe Sequence
tcccttttcttagctatgagctgat

SEQ ID NO: 291576 - DNA, 25 bp, Probe Sequence
tcccatgagttatttcctattctgt

SEQ ID NO: 291577 - DNA, 25 bp, Probe Sequence
tcccatgagattttgtctttctaca

SEQ ID NO: 291578 - DNA, 25 bp, Probe Sequence
tccctgcgatgggagtcttgtctcc

SEQ ID NO: 291579 - DNA, 25 bp, Probe Sequence
tcccatgttggccaggctggtcttg

SEQ ID NO: 291580 - DNA, 25 bp, Probe Sequence
tcccagctatggcacagccgtttgt

SEQ ID NO: 291581 - DNA, 25 bp, Probe Sequence
tcccagctatggcacagccgtttgt

SEQ ID NO: 291582 - DNA, 25 bp, Probe Sequence
tcccagctatggcacagccgtttgt

SEQ ID NO: 291583 - DNA, 25 bp, Probe Sequence
tcccagctaggaaaccctgtgtgtc

SEQ ID NO: 291584 - DNA, 25 bp, Probe Sequence
tcgcccaaccaactctattgtgttc

SEQ ID NO: 291585 - DNA, 25 bp, Probe Sequence
tctgccttaccaagtgttttcttac

SEQ ID NO: 291586 - DNA, 25 bp, Probe Sequence
tctgccttaccaagtgttttcttac

SEQ ID NO: 291587 - DNA, 25 bp, Probe Sequence
tccctgttcccactgatttttatta

SEQ ID NO: 291588 - DNA, 25 bp, Probe Sequence
tccctgttcccactgatttttatta

SEQ ID NO: 291589 - DNA, 25 bp, Probe Sequence
tccctgggccggcatttgtattggg

SEQ ID NO: 291590 - DNA, 25 bp, Probe Sequence
tccctgaaggggctttgtggcatct

SEQ ID NO: 291591 - DNA, 25 bp, Probe Sequence
tccctaaacgtgctctctgggcacc

SEQ ID NO: 291592 - DNA, 25 bp, Probe Sequence
tcggtgaaaagccgcactgggggcc

SEQ ID NO: 291593 - DNA, 25 bp, Probe Sequence
tcaggtaacaactccgtgggtgcca

SEQ ID NO: 291594 - DNA, 25 bp, Probe Sequence
tcgaacaaaaagtccctgcggtcca

SEQ ID NO: 291595 - DNA, 25 bp, Probe Sequence
tctaaggaaatccccaccctataca

SEQ ID NO: 291596 - DNA, 25 bp, Probe Sequence
tcgaaggtgaagccaccccagttaa

SEQ ID NO: 291597 - DNA, 25 bp, Probe Sequence
tcgacagggagcctgtccaccagca

SEQ ID NO: 291598 - DNA, 25 bp, Probe Sequence
tcccatctaagcattccacactgca

SEQ ID NO: 291599 - DNA, 25 bp, Probe Sequence
tccctctcaagtaatggctcagcta

SEQ ID NO: 291600 - DNA, 25 bp, Probe Sequence
tccctctcaaatacacgtgatctgg

SEQ ID NO: 291601 - DNA, 25 bp, Probe Sequence
tccctcacagtatatgaatgatctg

SEQ ID NO: 291602 - DNA, 25 bp, Probe Sequence
tccctctctggatataattatgaag

SEQ ID NO: 291603 - DNA, 25 bp, Probe Sequence
tccctacttgtcccatatttgcaag

SEQ ID NO: 291604 - DNA, 25 bp, Probe Sequence
tccctgactttctctagttagatgt

SEQ ID NO: 291605 - DNA, 25 bp, Probe Sequence
tcccaaattctctagtttatagatg

SEQ ID NO: 291606 - DNA, 25 bp, Probe Sequence
tcccaaaatctccaagcctatcaag

SEQ ID NO: 291607 - DNA, 25 bp, Probe Sequence
tcccacatcttcccaagctgtgaaa

SEQ ID NO: 291608 - DNA, 25 bp, Probe Sequence
tcccttcagtcgccatcatgattat

SEQ ID NO: 291609 - DNA, 25 bp, Probe Sequence
tccctgctcagaggaacagtgtgaa

SEQ ID NO: 291610 - DNA, 25 bp, Probe Sequence
tccctggcacatgcatacttgtcaa

SEQ ID NO: 291611 - DNA, 25 bp, Probe Sequence
tccctggctatccatctttggtatt

SEQ ID NO: 291612 - DNA, 25 bp, Probe Sequence
tcgcctgacaaccactggtctgtag

SEQ ID NO: 291613 - DNA, 25 bp, Probe Sequence
tcccacagcacagtgacggttctag

SEQ ID NO: 291614 - DNA, 25 bp, Probe Sequence
tcccagagacacccagtttctcagt

SEQ ID NO: 291615 - DNA, 25 bp, Probe Sequence
tcccagagaacgaagaaatcccccg

SEQ ID NO: 291616 - DNA, 25 bp, Probe Sequence
tcgtcaagaatcctggaaacccacc

SEQ ID NO: 291617 - DNA, 25 bp, Probe Sequence
tcccttgccatcctaaaagccaccc

SEQ ID NO: 291618 - DNA, 25 bp, Probe Sequence
tcgcctctggcagcgaaaagacccc

SEQ ID NO: 291619 - DNA, 25 bp, Probe Sequence
tcgcttgagtcatcagccaacagac

SEQ ID NO: 291620 - DNA, 25 bp, Probe Sequence
tcgcgcggatcatgatgccaacctc

SEQ ID NO: 291621 - DNA, 25 bp, Probe Sequence
tcggcaggaaacacagcagctccgt

SEQ ID NO: 291622 - DNA, 25 bp, Probe Sequence
tcgccaatggaattcctgactctgg

SEQ ID NO: 291623 - DNA, 25 bp, Probe Sequence
tcgccgtgtgaattcctttcaggtg

SEQ ID NO: 291624 - DNA, 25 bp, Probe Sequence
tcgtcgtcgtaagtcattcagggtg

SEQ ID NO: 291625 - DNA, 25 bp, Probe Sequence
tctgggtggttagcattcaagttaa

SEQ ID NO: 291626 - DNA, 25 bp, Probe Sequence
tctgggcctggaacctttggttcag

SEQ ID NO: 291627 - DNA, 25 bp, Probe Sequence
tctgttaccgactttttgacttcgt

SEQ ID NO: 291628 - DNA, 25 bp, Probe Sequence
tctggatcccgtctgtatttattgg

SEQ ID NO: 291629 - DNA, 25 bp, Probe Sequence
tctggacaacttcttgagtctatta

SEQ ID NO: 291630 - DNA, 25 bp, Probe Sequence
tctggcacctgtttctaggcctaac

SEQ ID NO: 291631 - DNA, 25 bp, Probe Sequence
tcgtctgcctgttttgtggactggc

SEQ ID NO: 291632 - DNA, 25 bp, Probe Sequence
tcgatgcgtgtttaatgatgatgac

SEQ ID NO: 291633 - DNA, 25 bp, Probe Sequence
tcgctctgtggcatacaggagacac

SEQ ID NO: 291634 - DNA, 25 bp, Probe Sequence
tcgctctatctcacaaagagactaa

SEQ ID NO: 291635 - DNA, 25 bp, Probe Sequence
tcccttcttccaaatatgactttac

SEQ ID NO: 291636 - DNA, 25 bp, Probe Sequence
tcggatttgtccaaaatttttccag

SEQ ID NO: 291637 - DNA, 25 bp, Probe Sequence
tcgagtttgtttttgtcattttcgt

SEQ ID NO: 291638 - DNA, 25 bp, Probe Sequence
tcgttttggttaagttggcttctgt

SEQ ID NO: 291639 - DNA, 25 bp, Probe Sequence
tcgttccggttatgttgtgtaagtc

SEQ ID NO: 291640 - DNA, 25 bp, Probe Sequence
tcgttccgggcacacttgtgtgaca

SEQ ID NO: 291641 - DNA, 25 bp, Probe Sequence
tcatttccaaagctacttgtttaca

SEQ ID NO: 291642 - DNA, 25 bp, Probe Sequence
ttgttaaaagggtcacttcggtgca

SEQ ID NO: 291643 - DNA, 25 bp, Probe Sequence
tctgtttggaaacaaccccttgagc

SEQ ID NO: 291644 - DNA, 25 bp, Probe Sequence
tcgctttgttgtcaaacacccgttc

SEQ ID NO: 291645 - DNA, 25 bp, Probe Sequence
tcgaggttgtttgcaacgaccgtct

SEQ ID NO: 291646 - DNA, 25 bp, Probe Sequence
tcgagggctgactttcaatagatcg

SEQ ID NO: 291647 - DNA, 25 bp, Probe Sequence
tcagggcgcgatctggcaaaggctc

SEQ ID NO: 291648 - DNA, 25 bp, Probe Sequence
tcaggccagaattaggagggagctt

SEQ ID NO: 291649 - DNA, 25 bp, Probe Sequence
tcagggagattctggggggcccctg

SEQ ID NO: 291650 - DNA, 25 bp, Probe Sequence
tcagtgggttcttgagcgtgggtag

SEQ ID NO: 291651 - DNA, 25 bp, Probe Sequence
tcggcaggcccaacaggctgggaaa

SEQ ID NO: 291652 - DNA, 25 bp, Probe Sequence
tcggatgcagcatatcacagggtta

SEQ ID NO: 291653 - DNA, 25 bp, Probe Sequence
tcagcaaggctggaaatgggatatg

SEQ ID NO: 291654 - DNA, 25 bp, Probe Sequence
tcgcgaagctgccaaagccttagac

SEQ ID NO: 291655 - DNA, 25 bp, Probe Sequence
tcgagactcatgcacaagcttcaat

SEQ ID NO: 291656 - DNA, 25 bp, Probe Sequence
tcgagatcgcctagtatgttctgtg

SEQ ID NO: 291657 - DNA, 25 bp, Probe Sequence
tcgcgtacctaggatgccgcgtgga

SEQ ID NO: 291658 - DNA, 25 bp, Probe Sequence
tcgactacatcttggacctgcagat

SEQ ID NO: 291659 - DNA, 25 bp, Probe Sequence
tcgactggcatcatgtggtcaggat

SEQ ID NO: 291660 - DNA, 25 bp, Probe Sequence
tcgcctcccttgatgtcaagatcca

SEQ ID NO: 291661 - DNA, 25 bp, Probe Sequence
tcccttccacagacgtcactgataa

SEQ ID NO: 291662 - DNA, 25 bp, Probe Sequence
tcccttcacaagaggccgcagagaa

SEQ ID NO: 291663 - DNA, 25 bp, Probe Sequence
tcccttagcccttggggcagagacc

SEQ ID NO: 291664 - DNA, 25 bp, Probe Sequence
tcccaatagcactttcattgccagt

SEQ ID NO: 291665 - DNA, 25 bp, Probe Sequence
tcccaaagctcagacttgccaggct

SEQ ID NO: 291666 - DNA, 25 bp, Probe Sequence
tcccttgactcaggactgtgctcga

SEQ ID NO: 291667 - DNA, 25 bp, Probe Sequence
tccctccatctcaggtgtctgaaag

SEQ ID NO: 291668 - DNA, 25 bp, Probe Sequence
tcccaccagctgaggtccgaggaaa

SEQ ID NO: 291669 - DNA, 25 bp, Probe Sequence
tcagtctgagacacggatccgggac

SEQ ID NO: 291670 - DNA, 25 bp, Probe Sequence
tctggtcagaatccggatactgggt

SEQ ID NO: 291671 - DNA, 25 bp, Probe Sequence
tcgcgtagtagccatggtgatcggt

SEQ ID NO: 291672 - DNA, 25 bp, Probe Sequence
tcggtaccaggcgcagatcatggca

SEQ ID NO: 291673 - DNA, 25 bp, Probe Sequence
tcgagatacgggcacatacggattc

SEQ ID NO: 291674 - DNA, 25 bp, Probe Sequence
taattacggctgccaagggggtctc

SEQ ID NO: 291675 - DNA, 25 bp, Probe Sequence
tctactgaggccccaaggggtttct

SEQ ID NO: 291676 - DNA, 25 bp, Probe Sequence
tctcctatcttctctaggggtttca

SEQ ID NO: 291677 - DNA, 25 bp, Probe Sequence
tcttcagttttattttaggatttct

SEQ ID NO: 291678 - DNA, 25 bp, Probe Sequence
tcgtagtttgtataatcagtcattc

SEQ ID NO: 291679 - DNA, 25 bp, Probe Sequence
tcgataggatagatagactcacatc

SEQ ID NO: 291680 - DNA, 25 bp, Probe Sequence
tcgtactgatggatttgctgaagca

SEQ ID NO: 291681 - DNA, 25 bp, Probe Sequence
tcgtacgtggagaagtgggaatgca

SEQ ID NO: 291682 - DNA, 25 bp, Probe Sequence
tcgaccttgccgaaggggagtccga

SEQ ID NO: 291683 - DNA, 25 bp, Probe Sequence
tcgaccttgccgaaggggagtccga

SEQ ID NO: 291684 - DNA, 25 bp, Probe Sequence
ttggcctaccgaaagagggaccgca

SEQ ID NO: 291685 - DNA, 25 bp, Probe Sequence
tcgagacccctgtgagaagaaccgc

SEQ ID NO: 291686 - DNA, 25 bp, Probe Sequence
tcggtgcccctatggggctgaccag

SEQ ID NO: 291687 - DNA, 25 bp, Probe Sequence
tcgcaggcggccatgatgggcctca

SEQ ID NO: 291688 - DNA, 25 bp, Probe Sequence
tcgcggggcaaaatggagctcgagg

SEQ ID NO: 291689 - DNA, 25 bp, Probe Sequence
tcgtggaagaaatgtcagcaggaag

SEQ ID NO: 291690 - DNA, 25 bp, Probe Sequence
tcgtaaccaggttctacagggaggc

SEQ ID NO: 291691 - DNA, 25 bp, Probe Sequence
tcgacgaggagttcaccggggaggc

SEQ ID NO: 291692 - DNA, 25 bp, Probe Sequence
tctgaacggagttcaaaggctgctg

SEQ ID NO: 291693 - DNA, 25 bp, Probe Sequence
tcgagaccggttcaagagcttccag

SEQ ID NO: 291694 - DNA, 25 bp, Probe Sequence
tcggcccaggtttaaataaggcagg

SEQ ID NO: 291695 - DNA, 25 bp, Probe Sequence
tcgcgcccatgttgtatgacacata

SEQ ID NO: 291696 - DNA, 25 bp, Probe Sequence
tcggcccatttgaagaccaggaagt

SEQ ID NO: 291697 - DNA, 25 bp, Probe Sequence
tcggaaatctatactgaccaaggat

SEQ ID NO: 291698 - DNA, 25 bp, Probe Sequence
tcgtgaaacctgcctacacatgggc

SEQ ID NO: 291699 - DNA, 25 bp, Probe Sequence
tcgaaaggctcactctcaagcacga

SEQ ID NO: 291700 - DNA, 25 bp, Probe Sequence
tcgactccatccatacaatcacaga

SEQ ID NO: 291701 - DNA, 25 bp, Probe Sequence
tcgccccacagcttcaaaggcatca

SEQ ID NO: 291702 - DNA, 25 bp, Probe Sequence
tcgcatccgccattcagaacaggaa

SEQ ID NO: 291703 - DNA, 25 bp, Probe Sequence
tcgatcacccattgcagaagcagtt

SEQ ID NO: 291704 - DNA, 25 bp, Probe Sequence
tcgagcagcctaccagcaagtgatc

SEQ ID NO: 291705 - DNA, 25 bp, Probe Sequence
tcgatgatgcgcacgcgcttgtcac

SEQ ID NO: 291706 - DNA, 25 bp, Probe Sequence
tcgatgcagcaaacttcattatctt

SEQ ID NO: 291707 - DNA, 25 bp, Probe Sequence
tcgatgcagctgtagtgacaatctc

SEQ ID NO: 291708 - DNA, 25 bp, Probe Sequence
tcgcagaccatagtgcccatctgcc

SEQ ID NO: 291709 - DNA, 25 bp, Probe Sequence
tcgagtccatatagctacattccac

SEQ ID NO: 291710 - DNA, 25 bp, Probe Sequence
tcgagtccatatagctacattccac

SEQ ID NO: 291711 - DNA, 25 bp, Probe Sequence
tcgacccttatgaacatgaggcctt

SEQ ID NO: 291712 - DNA, 25 bp, Probe Sequence
tcgactgccttcataagcgtccata

SEQ ID NO: 291713 - DNA, 25 bp, Probe Sequence
tcgatcatgctttcttcaaggtgac

SEQ ID NO: 291714 - DNA, 25 bp, Probe Sequence
tcgatatttccaatcctggctactt

SEQ ID NO: 291715 - DNA, 25 bp, Probe Sequence
tagtcagttcgaatgcccggacttc

SEQ ID NO: 291716 - DNA, 25 bp, Probe Sequence
tcccagttcagactgtccaggacat

SEQ ID NO: 291717 - DNA, 25 bp, Probe Sequence
tccctttccacatcaaggcacatca

SEQ ID NO: 291718 - DNA, 25 bp, Probe Sequence
tcggtttccacagcattgaactgaa

SEQ ID NO: 291719 - DNA, 25 bp, Probe Sequence
tcgtcattgtcttaaagtcaactgg

SEQ ID NO: 291720 - DNA, 25 bp, Probe Sequence
tcgacattactctgaagggacgcac

SEQ ID NO: 291721 - DNA, 25 bp, Probe Sequence
tcgacattgccgtcgacggcgagcc

SEQ ID NO: 291722 - DNA, 25 bp, Probe Sequence
tcgactggctcctgattacgatgct

SEQ ID NO: 291723 - DNA, 25 bp, Probe Sequence
tcggtgcgatactgatgatgaaatt

SEQ ID NO: 291724 - DNA, 25 bp, Probe Sequence
tcccatggcacctgtgattgtactc

SEQ ID NO: 291725 - DNA, 25 bp, Probe Sequence
tcgcctgagatataagttgtactgc

SEQ ID NO: 291726 - DNA, 25 bp, Probe Sequence
tcccaatctatctaaatttcatcca

SEQ ID NO: 291727 - DNA, 25 bp, Probe Sequence
tcccaccttcgaagattaccagatc

SEQ ID NO: 291728 - DNA, 25 bp, Probe Sequence
tcccttgcgggaagactgccaatat

SEQ ID NO: 291729 - DNA, 25 bp, Probe Sequence
tccctcgggctatgagtgccacatc

SEQ ID NO: 291730 - DNA, 25 bp, Probe Sequence
tcccttaggctttagcagctttgca

SEQ ID NO: 291731 - DNA, 25 bp, Probe Sequence
tcgcctatgaagattacagtcctga

SEQ ID NO: 291732 - DNA, 25 bp, Probe Sequence
tcgccttaggcatgtgcaagtccca

SEQ ID NO: 291733 - DNA, 25 bp, Probe Sequence
tcgatgtggaggtggacgacccact

SEQ ID NO: 291734 - DNA, 25 bp, Probe Sequence
tcgaatggtttgaggtgatctcgca

SEQ ID NO: 291735 - DNA, 25 bp, Probe Sequence
tcggcaggttcgaggcgattcgagc

SEQ ID NO: 291736 - DNA, 25 bp, Probe Sequence
tcaggaactgggagacgtacaagca

SEQ ID NO: 291737 - DNA, 25 bp, Probe Sequence
tcggacctaggtcgcggcgacatgg

SEQ ID NO: 291738 - DNA, 25 bp, Probe Sequence
tcccaggctaagctgcggcgggagc

SEQ ID NO: 291739 - DNA, 25 bp, Probe Sequence
tcgtcaggggagctggagcacgtga

SEQ ID NO: 291740 - DNA, 25 bp, Probe Sequence
tcgccggcggctcatgaagaggctc

SEQ ID NO: 291741 - DNA, 25 bp, Probe Sequence
tccctagagccacctggtgttgctc

SEQ ID NO: 291742 - DNA, 25 bp, Probe Sequence
tcccttgagaagctgagtcttctgc

SEQ ID NO: 291743 - DNA, 25 bp, Probe Sequence
tcgccttgaaggctcagacgtgcag

SEQ ID NO: 291744 - DNA, 25 bp, Probe Sequence
tcccttcctgtgatcatatcggcac

SEQ ID NO: 291745 - DNA, 25 bp, Probe Sequence
tcccttggtttcaatgatcaggcaa

SEQ ID NO: 291746 - DNA, 25 bp, Probe Sequence
tcccttcagcatttcatctgctatg

SEQ ID NO: 291747 - DNA, 25 bp, Probe Sequence
tccctacagcagatctcgctacagg

SEQ ID NO: 291748 - DNA, 25 bp, Probe Sequence
tccctcatcacaggacccactgagg

SEQ ID NO: 291749 - DNA, 25 bp, Probe Sequence
tcccaataatagtcccacagggaac

SEQ ID NO: 291750 - DNA, 25 bp, Probe Sequence
tcccaaagtaccgccaagagaacct

SEQ ID NO: 291751 - DNA, 25 bp, Probe Sequence
tcccaaattatgccacctaatgaaa

SEQ ID NO: 291752 - DNA, 25 bp, Probe Sequence
tcccaaagtatgtcactgttggaaa

SEQ ID NO: 291753 - DNA, 25 bp, Probe Sequence
tcccaaggtcaggattctgtggata

SEQ ID NO: 291754 - DNA, 25 bp, Probe Sequence
tctaatagtgtacagttggggagta

SEQ ID NO: 291755 - DNA, 25 bp, Probe Sequence
tctaaatgaccaaagttgggagatc

SEQ ID NO: 291756 - DNA, 25 bp, Probe Sequence
tctaactggctagaagtgcccaacg

SEQ ID NO: 291757 - DNA, 25 bp, Probe Sequence
tctgaacggaacagtgtccccacag

SEQ ID NO: 291758 - DNA, 25 bp, Probe Sequence
tcgaaccagaggagttcttgcgccc

SEQ ID NO: 291759 - DNA, 25 bp, Probe Sequence
tcgacaccaaccagcatcatgtcca

SEQ ID NO: 291760 - DNA, 25 bp, Probe Sequence
tcgacaccaaccagcatcatgtcca

SEQ ID NO: 291761 - DNA, 25 bp, Probe Sequence
tcgccaccaagagattcgatgctca

SEQ ID NO: 291762 - DNA, 25 bp, Probe Sequence
tcccagaaggcggagtcgatctccc

SEQ ID NO: 291763 - DNA, 25 bp, Probe Sequence
tcccagcagggggaggcaatccctt

SEQ ID NO: 291764 - DNA, 25 bp, Probe Sequence
tcgcgggctgggaaggattcactct

SEQ ID NO: 291765 - DNA, 25 bp, Probe Sequence
tctagggtgggttggaaaatctcca

SEQ ID NO: 291766 - DNA, 25 bp, Probe Sequence
tcgacagagggttggggaagaccca

SEQ ID NO: 291767 - DNA, 25 bp, Probe Sequence
tctcatcaaggtgaacgggcggccc

SEQ ID NO: 291768 - DNA, 25 bp, Probe Sequence
tctccaaggacaaacgggccctcaa

SEQ ID NO: 291769 - DNA, 25 bp, Probe Sequence
tcgacggcaacaacacggactccga

SEQ ID NO: 291770 - DNA, 25 bp, Probe Sequence
tcgagaaaatcaacggaacccagat

SEQ ID NO: 291771 - DNA, 25 bp, Probe Sequence
taagaaaactaccctggaacagtag

SEQ ID NO: 291772 - DNA, 25 bp, Probe Sequence
tcaggaaaaccaaccatagaacttt

SEQ ID NO: 291773 - DNA, 25 bp, Probe Sequence
tcaggtacagcagagataaaactct

SEQ ID NO: 291774 - DNA, 25 bp, Probe Sequence
tcgtggacgcctttaatcaagcctg

SEQ ID NO: 291775 - DNA, 25 bp, Probe Sequence
tcgagaacccatagccaatagagtt

SEQ ID NO: 291776 - DNA, 25 bp, Probe Sequence
tcgggatctggctcccataggtatc

SEQ ID NO: 291777 - DNA, 25 bp, Probe Sequence
tcgagtgatcttgccccagaccggc

SEQ ID NO: 291778 - DNA, 25 bp, Probe Sequence
tcgaggaccctgtgcaagactcggc

SEQ ID NO: 291779 - DNA, 25 bp, Probe Sequence
tctagggccgtcaggacacgggagg

SEQ ID NO: 291780 - DNA, 25 bp, Probe Sequence
tcgggcgccggaagacgccagagga

SEQ ID NO: 291781 - DNA, 25 bp, Probe Sequence
tctgtggggttagagcccagagcaa

SEQ ID NO: 291782 - DNA, 25 bp, Probe Sequence
tctctcggagttcccgtcttatgag

SEQ ID NO: 291783 - DNA, 25 bp, Probe Sequence
tcccagatacttcacgcatctatgt

SEQ ID NO: 291784 - DNA, 25 bp, Probe Sequence
tcccattcacttaacagctcttttg

SEQ ID NO: 291785 - DNA, 25 bp, Probe Sequence
tcccattcacttaacagctcttttg

SEQ ID NO: 291786 - DNA, 25 bp, Probe Sequence
tcccttcagtttgcagctttgggat

SEQ ID NO: 291787 - DNA, 25 bp, Probe Sequence
tcgcctgggttcgtagtattggatt

SEQ ID NO: 291788 - DNA, 25 bp, Probe Sequence
tccctttgttgttgagttattttat

SEQ ID NO: 291789 - DNA, 25 bp, Probe Sequence
tccctttgtatttcatgtgtaattc

SEQ ID NO: 291790 - DNA, 25 bp, Probe Sequence
tcccatctgtaatttgcagggagat

SEQ ID NO: 291791 - DNA, 25 bp, Probe Sequence
tcgccctggacttcgagcaagagat

SEQ ID NO: 291792 - DNA, 25 bp, Probe Sequence
tcgccctggacttcgagcaagagat

SEQ ID NO: 291793 - DNA, 25 bp, Probe Sequence
tcgtctctggtagctgcagccaaat

SEQ ID NO: 291794 - DNA, 25 bp, Probe Sequence
tcgtctctaaccacgcctattaagc

SEQ ID NO: 291795 - DNA, 25 bp, Probe Sequence
tcgtctctaaccacgcctattaagc

SEQ ID NO: 291796 - DNA, 25 bp, Probe Sequence
tcgtctctaaccacgcctattaagc

SEQ ID NO: 291797 - DNA, 25 bp, Probe Sequence
tcgctttttaccgccagatgaaatc

SEQ ID NO: 291798 - DNA, 25 bp, Probe Sequence
tcgcttcttgaagacctatgtaaag

SEQ ID NO: 291799 - DNA, 25 bp, Probe Sequence
tcccttatcactgtgcctttaacct

SEQ ID NO: 291800 - DNA, 25 bp, Probe Sequence
tcgagtacatacaggtagtttacct

SEQ ID NO: 291801 - DNA, 25 bp, Probe Sequence
tcgggacattccactggtttctgtc

SEQ ID NO: 291802 - DNA, 25 bp, Probe Sequence
tcggctgtattaatcacgcgatgtt

SEQ ID NO: 291803 - DNA, 25 bp, Probe Sequence
tcccattcctagacccgtggattga

SEQ ID NO: 291804 - DNA, 25 bp, Probe Sequence
tcccttccagcagcaacttgtagtg

SEQ ID NO: 291805 - DNA, 25 bp, Probe Sequence
tcgcccctccagtaaagctgtagag

SEQ ID NO: 291806 - DNA, 25 bp, Probe Sequence
tcgttcgccaagtacagacttctgg

SEQ ID NO: 291807 - DNA, 25 bp, Probe Sequence
tcgtctccctgagggagaccttggc

SEQ ID NO: 291808 - DNA, 25 bp, Probe Sequence
tcgactcctctgagaaggacgggca

SEQ ID NO: 291809 - DNA, 25 bp, Probe Sequence
tcgaccagcggcaggtgtacaggac

SEQ ID NO: 291810 - DNA, 25 bp, Probe Sequence
tcgtcgagctggcggaaccggagga

SEQ ID NO: 291811 - DNA, 25 bp, Probe Sequence
tcgctccacaacctgaaaccgagaa

SEQ ID NO: 291812 - DNA, 25 bp, Probe Sequence
tcggccaaattgtcaacacgctaga

SEQ ID NO: 291813 - DNA, 25 bp, Probe Sequence
tcgcggcgacatggccaaacgtacc

SEQ ID NO: 291814 - DNA, 25 bp, Probe Sequence
tcgctgggattgacacaaacacagg

SEQ ID NO: 291815 - DNA, 25 bp, Probe Sequence
tcgcgcaggatttcaaaaccgacct

SEQ ID NO: 291816 - DNA, 25 bp, Probe Sequence
tcgccatgtatttagcagagacggg

SEQ ID NO: 291817 - DNA, 25 bp, Probe Sequence
tcgcttatattgggatgacctgaag

SEQ ID NO: 291818 - DNA, 25 bp, Probe Sequence
tcgcttttggcgacagacttgaaga

SEQ ID NO: 291819 - DNA, 25 bp, Probe Sequence
tcccattttctgatgatttgaaggg

SEQ ID NO: 291820 - DNA, 25 bp, Probe Sequence
tcccttgtatctatttgtggtgaat

SEQ ID NO: 291821 - DNA, 25 bp, Probe Sequence
tcccttctatctcttctggtgaata

SEQ ID NO: 291822 - DNA, 25 bp, Probe Sequence
tcccatcttgtctctcttggatgat

SEQ ID NO: 291823 - DNA, 25 bp, Probe Sequence
tcccatcttgtctctcttggatgat

SEQ ID NO: 291824 - DNA, 25 bp, Probe Sequence
tcccagcggcgctacattggggtga

SEQ ID NO: 291825 - DNA, 25 bp, Probe Sequence
tcccacgctggtactttgacgtgga

SEQ ID NO: 291826 - DNA, 25 bp, Probe Sequence
tctaccacacctgtggcggtagcct

SEQ ID NO: 291827 - DNA, 25 bp, Probe Sequence
tcggcgaacactgttcgcttcgcct

SEQ ID NO: 291828 - DNA, 25 bp, Probe Sequence
tcggcgaacactgttcgcttcgcct

SEQ ID NO: 291829 - DNA, 25 bp, Probe Sequence
tcagggaaacttaattcctgcccgt

SEQ ID NO: 291830 - DNA, 25 bp, Probe Sequence
tcgtggaacacgaccgtggtgcccg

SEQ ID NO: 291831 - DNA, 25 bp, Probe Sequence
tcgggaggcgaagcgttgtcctcag

SEQ ID NO: 291832 - DNA, 25 bp, Probe Sequence
tcggaaggaaattccgtctcctctt

SEQ ID NO: 291833 - DNA, 25 bp, Probe Sequence
tcgggggacaacttgtatctttcta

SEQ ID NO: 291834 - DNA, 25 bp, Probe Sequence
tctgctggggacggtagttgctttt

SEQ ID NO: 291835 - DNA, 25 bp, Probe Sequence
tctagggacatgggtactcttttta

SEQ ID NO: 291836 - DNA, 25 bp, Probe Sequence
tctacagaactggggacctcgtttt

SEQ ID NO: 291837 - DNA, 25 bp, Probe Sequence
tctacagaactggggacctcgtttt

SEQ ID NO: 291838 - DNA, 25 bp, Probe Sequence
tcccagacactttaaccctgtgtgt

SEQ ID NO: 291839 - DNA, 25 bp, Probe Sequence
tcccaagatctttaactcctcctgg

SEQ ID NO: 291840 - DNA, 25 bp, Probe Sequence
tcccaaatgtcgtaacaactccgcc

SEQ ID NO: 291841 - DNA, 25 bp, Probe Sequence
tcccaaatgtcgtaacaactccgcc

SEQ ID NO: 291842 - DNA, 25 bp, Probe Sequence
tcccaaatgtcgtaacaactccgcc

SEQ ID NO: 291843 - DNA, 25 bp, Probe Sequence
tcccaaatgtcgtaacaactccgcc

SEQ ID NO: 291844 - DNA, 25 bp, Probe Sequence
tcccaaatgtcgtaacaactccgcc

SEQ ID NO: 291845 - DNA, 25 bp, Probe Sequence
tcccaatgtggcctaaaaatgcaac

SEQ ID NO: 291846 - DNA, 25 bp, Probe Sequence
tcccactctggacaataaaaacgaa

SEQ ID NO: 291847 - DNA, 25 bp, Probe Sequence
tcgcccgccagaagaatatgaaaaa

SEQ ID NO: 291848 - DNA, 25 bp, Probe Sequence
tcggcaagccagagtggaaaccata

SEQ ID NO: 291849 - DNA, 25 bp, Probe Sequence
tcgcgacctcgaagtgggaaacaca

SEQ ID NO: 291850 - DNA, 25 bp, Probe Sequence
tcggacctcaggtggctgaaggaga

SEQ ID NO: 291851 - DNA, 25 bp, Probe Sequence
tcgaggccaacctggacacatggag

SEQ ID NO: 291852 - DNA, 25 bp, Probe Sequence
tcggcgcgcaaagcgaaagcggcag

SEQ ID NO: 291853 - DNA, 25 bp, Probe Sequence
tcggtatgggatgcagaactctggc

SEQ ID NO: 291854 - DNA, 25 bp, Probe Sequence
tcggagcaggttgaggactgtgtgc

SEQ ID NO: 291855 - DNA, 25 bp, Probe Sequence
tcggtgagcggtggtggtttattct

SEQ ID NO: 291856 - DNA, 25 bp, Probe Sequence
tcgggagtgtgtttagtctgtttta

SEQ ID NO: 291857 - DNA, 25 bp, Probe Sequence
tcgtgaggggtctttgtcctctgta

SEQ ID NO: 291858 - DNA, 25 bp, Probe Sequence
tctgtagagggccctggtgtttcta

SEQ ID NO: 291859 - DNA, 25 bp, Probe Sequence
tcgtaaggcctgtctggtttgtgaa

SEQ ID NO: 291860 - DNA, 25 bp, Probe Sequence
tcggaatggcgctcagcagatattt

SEQ ID NO: 291861 - DNA, 25 bp, Probe Sequence
tcggaatggcgctcagcagatattt

SEQ ID NO: 291862 - DNA, 25 bp, Probe Sequence
tcgtcaagcatgccttcgagatcat

SEQ ID NO: 291863 - DNA, 25 bp, Probe Sequence
tcgtaatgcagcctactatagccct

SEQ ID NO: 291864 - DNA, 25 bp, Probe Sequence
tcgacagttgcagtacttacccttg

SEQ ID NO: 291865 - DNA, 25 bp, Probe Sequence
tcgacagttgcagtacttacccttg

SEQ ID NO: 291866 - DNA, 25 bp, Probe Sequence
tcgccagttgtgcacttttacaagc

SEQ ID NO: 291867 - DNA, 25 bp, Probe Sequence
tcccatttctgggcaatttagacag

SEQ ID NO: 291868 - DNA, 25 bp, Probe Sequence
tcccagttcttgccagatagtgcaa

SEQ ID NO: 291869 - DNA, 25 bp, Probe Sequence
tcccagtctattcgggagtctgagt

SEQ ID NO: 291870 - DNA, 25 bp, Probe Sequence
tcccagatgtagagagagcagcctg

SEQ ID NO: 291871 - DNA, 25 bp, Probe Sequence
tcgcacatatgtggggcagagcagc

SEQ ID NO: 291872 - DNA, 25 bp, Probe Sequence
tcgcattctgctggattgccacagt

SEQ ID NO: 291873 - DNA, 25 bp, Probe Sequence
tcgttcccatcactggactgtaggc

SEQ ID NO: 291874 - DNA, 25 bp, Probe Sequence
tcgatgtccttgcggtcgtaggtga

SEQ ID NO: 291875 - DNA, 25 bp, Probe Sequence
tcgtgacctctgacggtttctgagc

SEQ ID NO: 291876 - DNA, 25 bp, Probe Sequence
tctggccgcctgaggctttagactt

SEQ ID NO: 291877 - DNA, 25 bp, Probe Sequence
tcggccgtcattgcttttggactat

SEQ ID NO: 291878 - DNA, 25 bp, Probe Sequence
tcccatcgctttgattattgttgct

SEQ ID NO: 291879 - DNA, 25 bp, Probe Sequence
tcccagccacctgattttgatggtg

SEQ ID NO: 291880 - DNA, 25 bp, Probe Sequence
tcggatgaccctggtcttcaatggt

SEQ ID NO: 291881 - DNA, 25 bp, Probe Sequence
tcgtggctccctcttaaagtgtaga

SEQ ID NO: 291882 - DNA, 25 bp, Probe Sequence
tctggcttcgacccaacaaagttca

SEQ ID NO: 291883 - DNA, 25 bp, Probe Sequence
tcggctataattccgccaaagtggc

SEQ ID NO: 291884 - DNA, 25 bp, Probe Sequence
tcgtctcagtttccccaaatggggt

SEQ ID NO: 291885 - DNA, 25 bp, Probe Sequence
tcgttcatgttttagcaagaggcgt

SEQ ID NO: 291886 - DNA, 25 bp, Probe Sequence
tcggtcagtaatgagcacgatgtgg

SEQ ID NO: 291887 - DNA, 25 bp, Probe Sequence
tcgggaggcaaactcctggatgcga

SEQ ID NO: 291888 - DNA, 25 bp, Probe Sequence
tctggagcagccttagtccagttgc

SEQ ID NO: 291889 - DNA, 25 bp, Probe Sequence
tcggcagcagagtttgtccaaatga

SEQ ID NO: 291890 - DNA, 25 bp, Probe Sequence
tcggcagcagagtttgtccaaatga

SEQ ID NO: 291891 - DNA, 25 bp, Probe Sequence
tcgccagcatcattcttcacaaaga

SEQ ID NO: 291892 - DNA, 25 bp, Probe Sequence
tcgacactgttcttagctcaatgag

SEQ ID NO: 291893 - DNA, 25 bp, Probe Sequence
tcggactgtgctgtggctaaccagg

SEQ ID NO: 291894 - DNA, 25 bp, Probe Sequence
tcgctctcttctggtgatcaaacaa

SEQ ID NO: 291895 - DNA, 25 bp, Probe Sequence
tcgctccttctggtatatgcatgtc

SEQ ID NO: 291896 - DNA, 25 bp, Probe Sequence
tcgccttcctgcagaatgtgctcaa

SEQ ID NO: 291897 - DNA, 25 bp, Probe Sequence
tcgtgtatccgaaaattgctaagac

SEQ ID NO: 291898 - DNA, 25 bp, Probe Sequence
tcgctttgccagtagaatccggaaa

SEQ ID NO: 291899 - DNA, 25 bp, Probe Sequence
tcgcgttggcagcggatgcgggaag

SEQ ID NO: 291900 - DNA, 25 bp, Probe Sequence
tcccagtgggaggggcaggctgaca

SEQ ID NO: 291901 - DNA, 25 bp, Probe Sequence
tcccaggtgcggtgtgcaccgagcg

SEQ ID NO: 291902 - DNA, 25 bp, Probe Sequence
tcccagaggccgtggcatgcgggga

SEQ ID NO: 291903 - DNA, 25 bp, Probe Sequence
tcccagcggctcatgaagcatcgag

SEQ ID NO: 291904 - DNA, 25 bp, Probe Sequence
tcccagtgcccactgtagccatgga

SEQ ID NO: 291905 - DNA, 25 bp, Probe Sequence
tcccagtgaccatgcattcaccgaa

SEQ ID NO: 291906 - DNA, 25 bp, Probe Sequence
tcccagtcctgcacgtcacaggaga

SEQ ID NO: 291907 - DNA, 25 bp, Probe Sequence
tcccatgtcatggatgcctgtgcca

SEQ ID NO: 291908 - DNA, 25 bp, Probe Sequence
tcccagtcatgctacctgtagagcc

SEQ ID NO: 291909 - DNA, 25 bp, Probe Sequence
tcccagcagagctgcacttagtgca

SEQ ID NO: 291910 - DNA, 25 bp, Probe Sequence
tcccagaggctcaaccaaataaaac

SEQ ID NO: 291911 - DNA, 25 bp, Probe Sequence
tcccaaggcatcccaaaacaccata

SEQ ID NO: 291912 - DNA, 25 bp, Probe Sequence
tcccagagtcatcctcagttgacgc

SEQ ID NO: 291913 - DNA, 25 bp, Probe Sequence
tcggcatgacctcgctcaaagagcg

SEQ ID NO: 291914 - DNA, 25 bp, Probe Sequence
tcgaaacctgccagacatgatgcag

SEQ ID NO: 291915 - DNA, 25 bp, Probe Sequence
tcgacaacggctccggcatgtgcaa

SEQ ID NO: 291916 - DNA, 25 bp, Probe Sequence
tcccacacagttgcgtgcactgaac

SEQ ID NO: 291917 - DNA, 25 bp, Probe Sequence
tcccagcactttgggtggctaaggc

SEQ ID NO: 291918 - DNA, 25 bp, Probe Sequence
tcccagcactttgggaggccgaggt

SEQ ID NO: 291919 - DNA, 25 bp, Probe Sequence
tcccatgctatctcagggggctgag

SEQ ID NO: 291920 - DNA, 25 bp, Probe Sequence
tcccagctactcaggaggcggaggc

SEQ ID NO: 291921 - DNA, 25 bp, Probe Sequence
tcccagctactcgggaggctgaggc

SEQ ID NO: 291922 - DNA, 25 bp, Probe Sequence
tcccagtacatcgagtggctgcaaa

SEQ ID NO: 291923 - DNA, 25 bp, Probe Sequence
tcccagatgataacattgaggccaa

SEQ ID NO: 291924 - DNA, 25 bp, Probe Sequence
tctggcagtataactcaggtcagaa

SEQ ID NO: 291925 - DNA, 25 bp, Probe Sequence
taatcagtgacacccggaaatgagg

SEQ ID NO: 291926 - DNA, 25 bp, Probe Sequence
tcgcacagtgtacccggaggagcac

SEQ ID NO: 291927 - DNA, 25 bp, Probe Sequence
tcccagctgattcccgagatgcagg

SEQ ID NO: 291928 - DNA, 25 bp, Probe Sequence
tcccagctactacatcagatgcggt

SEQ ID NO: 291929 - DNA, 25 bp, Probe Sequence
tcccacttgctcagcagcttgggct

SEQ ID NO: 291930 - DNA, 25 bp, Probe Sequence
tcccagctccacagcaatgttgtca

SEQ ID NO: 291931 - DNA, 25 bp, Probe Sequence
tcccagtgcatctaagtcatgttta

SEQ ID NO: 291932 - DNA, 25 bp, Probe Sequence
tcccagcagctctagaccagatgtt

SEQ ID NO: 291933 - DNA, 25 bp, Probe Sequence
tcccagcagcttggggcaaggtgct

SEQ ID NO: 291934 - DNA, 25 bp, Probe Sequence
tcccacacttggtgcgctggagcac

SEQ ID NO: 291935 - DNA, 25 bp, Probe Sequence
tcccaccctggctgtgtgaagcagg

SEQ ID NO: 291936 - DNA, 25 bp, Probe Sequence
tcccacctctggggcattgtacaag

SEQ ID NO: 291937 - DNA, 25 bp, Probe Sequence
tcccagccctgggggtttaagctct

SEQ ID NO: 291938 - DNA, 25 bp, Probe Sequence
tcccaccactccgattggttacgat

SEQ ID NO: 291939 - DNA, 25 bp, Probe Sequence
tcgcctcaaggcggcaaggttacct

SEQ ID NO: 291940 - DNA, 25 bp, Probe Sequence
tcgccatcatgaacgacaccgtaac

SEQ ID NO: 291941 - DNA, 25 bp, Probe Sequence
tcgccagcatttcgatcctcgtcag

SEQ ID NO: 291942 - DNA, 25 bp, Probe Sequence
tcgctgcctttgcataccagataga

SEQ ID NO: 291943 - DNA, 25 bp, Probe Sequence
tctcggggggagacctgaagatacc

SEQ ID NO: 291944 - DNA, 25 bp, Probe Sequence
tcatctgaggggcggtctagtctaa

SEQ ID NO: 291945 - DNA, 25 bp, Probe Sequence
tctaactggaggggctctagtgcta

SEQ ID NO: 291946 - DNA, 25 bp, Probe Sequence
tcgaaatggctggcggtaaggctgg

SEQ ID NO: 291947 - DNA, 25 bp, Probe Sequence
tcgcttcaaggccgggacagtgtgg

SEQ ID NO: 291948 - DNA, 25 bp, Probe Sequence
tcgcttcaaggccgggacagtgtgg

SEQ ID NO: 291949 - DNA, 25 bp, Probe Sequence
tcgttgtgagagtgaggcctggggt

SEQ ID NO: 291950 - DNA, 25 bp, Probe Sequence
tcgtgggagaagatgacccgtggaa

SEQ ID NO: 291951 - DNA, 25 bp, Probe Sequence
tcggcatcgagaagtacatcccgta

SEQ ID NO: 291952 - DNA, 25 bp, Probe Sequence
tcgcgatcggtggtcatcatgcgcc

SEQ ID NO: 291953 - DNA, 25 bp, Probe Sequence
tcgaatccagtgttctgtcagcgcg

SEQ ID NO: 291954 - DNA, 25 bp, Probe Sequence
tcgacgccaggaacatgatggccgc

SEQ ID NO: 291955 - DNA, 25 bp, Probe Sequence
tcggagcacgtaaatgcgtccctgt

SEQ ID NO: 291956 - DNA, 25 bp, Probe Sequence
tcgaagactggcaagcacggccacg

SEQ ID NO: 291957 - DNA, 25 bp, Probe Sequence
tcgcaaccaggattgacaggccatc

SEQ ID NO: 291958 - DNA, 25 bp, Probe Sequence
tcgcaacatctggatcgtgaagcca

SEQ ID NO: 291959 - DNA, 25 bp, Probe Sequence
tcccacagcccaagcagatagctca

SEQ ID NO: 291960 - DNA, 25 bp, Probe Sequence
tcccagaactcaggcgcatatgcat

SEQ ID NO: 291961 - DNA, 25 bp, Probe Sequence
tcccagatacgacagatgatgcttt

SEQ ID NO: 291962 - DNA, 25 bp, Probe Sequence
tcccaccctgactagtcattttgtt

SEQ ID NO: 291963 - DNA, 25 bp, Probe Sequence
tcccaacctgcgctgtgattttagc

SEQ ID NO: 291964 - DNA, 25 bp, Probe Sequence
tcccaatccgggttgtggaaaccag

SEQ ID NO: 291965 - DNA, 25 bp, Probe Sequence
tcccactcctgtttttaaaactcag

SEQ ID NO: 291966 - DNA, 25 bp, Probe Sequence
tcccactgtctttaagttgaaactg

SEQ ID NO: 291967 - DNA, 25 bp, Probe Sequence
tcgacctgtccttcaatgttgataa

SEQ ID NO: 291968 - DNA, 25 bp, Probe Sequence
tcgctcctctcctacttggataact

SEQ ID NO: 291969 - DNA, 25 bp, Probe Sequence
tcccacattcgctgcattcgtaagg

SEQ ID NO: 291970 - DNA, 25 bp, Probe Sequence
tcgcgagttccaccgtatgtacggg

SEQ ID NO: 291971 - DNA, 25 bp, Probe Sequence
tcgcgagttcaacatgaccaacttg

SEQ ID NO: 291972 - DNA, 25 bp, Probe Sequence
tcggacttatactgatcccaagtta

SEQ ID NO: 291973 - DNA, 25 bp, Probe Sequence
tcgacctcttagtgatgctgccagg

SEQ ID NO: 291974 - DNA, 25 bp, Probe Sequence
tcgatcctcgtcaggtgcaggtcag

SEQ ID NO: 291975 - DNA, 25 bp, Probe Sequence
tcgatcctcgtcaggtgcaggtcag

SEQ ID NO: 291976 - DNA, 25 bp, Probe Sequence
tcgagactagtctggccgacatagt

SEQ ID NO: 291977 - DNA, 25 bp, Probe Sequence
tcggcttagactgggtgcccaagaa

SEQ ID NO: 291978 - DNA, 25 bp, Probe Sequence
tcgacaccaagtcttgcctcaagaa

SEQ ID NO: 291979 - DNA, 25 bp, Probe Sequence
tcgagagccaagatttgtggaagtt

SEQ ID NO: 291980 - DNA, 25 bp, Probe Sequence
tcgagaaaagtattgctgtggctga

SEQ ID NO: 291981 - DNA, 25 bp, Probe Sequence
tcagggtaagctgctctgaggtaaa

SEQ ID NO: 291982 - DNA, 25 bp, Probe Sequence
tcgggctaagcagattgtgtggaat

SEQ ID NO: 291983 - DNA, 25 bp, Probe Sequence
tcgaggccattgcgttggtggagaa

SEQ ID NO: 291984 - DNA, 25 bp, Probe Sequence
tcgagagagagtcttcgggagagga

SEQ ID NO: 291985 - DNA, 25 bp, Probe Sequence
tcgaggagacatgcttctggagaag

SEQ ID NO: 291986 - DNA, 25 bp, Probe Sequence
tcggggaacctgtatggcacgagca

SEQ ID NO: 291987 - DNA, 25 bp, Probe Sequence
tcgaggtgactgtgggccacgagca

SEQ ID NO: 291988 - DNA, 25 bp, Probe Sequence
tcgtcggtccgggctgccacgacca

SEQ ID NO: 291989 - DNA, 25 bp, Probe Sequence
tcgtgggagccgtgggtcagatcgg

SEQ ID NO: 291990 - DNA, 25 bp, Probe Sequence
tctggggaccagaggtaacacggca

SEQ ID NO: 291991 - DNA, 25 bp, Probe Sequence
tcgggtcccattgtgtatacacaga

SEQ ID NO: 291992 - DNA, 25 bp, Probe Sequence
tcgggtcccattgtgtatacacaga

SEQ ID NO: 291993 - DNA, 25 bp, Probe Sequence
tcgagctactccagggcttagaaga

SEQ ID NO: 291994 - DNA, 25 bp, Probe Sequence
tcgtgctgaacctgggcaaagacag

SEQ ID NO: 291995 - DNA, 25 bp, Probe Sequence
tcgctctctcccgggaaagaacagg

SEQ ID NO: 291996 - DNA, 25 bp, Probe Sequence
tcgcccacaccatagaaagaacagg

SEQ ID NO: 291997 - DNA, 25 bp, Probe Sequence
tcgcccacccgatgatgggacacag

SEQ ID NO: 291998 - DNA, 25 bp, Probe Sequence
tcgccaacgccgtcaatgagggcac

SEQ ID NO: 291999 - DNA, 25 bp, Probe Sequence
tcccaactgctcacagaacggatca

SEQ ID NO: 292000 - DNA, 25 bp, Probe Sequence
tcccacttgcaccgctgaaggaaga

SEQ ID NO: 292001 - DNA, 25 bp, Probe Sequence
tcccacattgtcttgctaaatatag

SEQ ID NO: 292002 - DNA, 25 bp, Probe Sequence
tcgctacttgtcttgcttatggcat

SEQ ID NO: 292003 - DNA, 25 bp, Probe Sequence
tcttaccgtcctctaggtaactcaa

SEQ ID NO: 292004 - DNA, 25 bp, Probe Sequence
tcttactcttcgcagtcaggtaagc

SEQ ID NO: 292005 - DNA, 25 bp, Probe Sequence
tctggcagtctgagggtatggtaaa

SEQ ID NO: 292006 - DNA, 25 bp, Probe Sequence
tcgtcttcgatgtggagcttctaaa

SEQ ID NO: 292007 - DNA, 25 bp, Probe Sequence
tctgtattggcgtggaccccaacag

SEQ ID NO: 292008 - DNA, 25 bp, Probe Sequence
tttggtttttggtccttgcaacagt

SEQ ID NO: 292009 - DNA, 25 bp, Probe Sequence
tttggccttttggggcattcatccc

SEQ ID NO: 292010 - DNA, 25 bp, Probe Sequence
tcttatactattagttcgttaccga

SEQ ID NO: 292011 - DNA, 25 bp, Probe Sequence
tctggggtttttactgttacctgat

SEQ ID NO: 292012 - DNA, 25 bp, Probe Sequence
tcgggttttggccaagttacagtca

SEQ ID NO: 292013 - DNA, 25 bp, Probe Sequence
tctggagttcttctccagcttaccc

SEQ ID NO: 292014 - DNA, 25 bp, Probe Sequence
tcggagttctatcacttgcttgacc

SEQ ID NO: 292015 - DNA, 25 bp, Probe Sequence
tcgtggttatgaccatcttcttggt

SEQ ID NO: 292016 - DNA, 25 bp, Probe Sequence
tcggccttagcgccatttttttgga

SEQ ID NO: 292017 - DNA, 25 bp, Probe Sequence
tcggcccataagcccttgttgggaa

SEQ ID NO: 292018 - DNA, 25 bp, Probe Sequence
tcgtcacctcaacctggatttggga

SEQ ID NO: 292019 - DNA, 25 bp, Probe Sequence
tctctaaatgaccaaagttgggaga

SEQ ID NO: 292020 - DNA, 25 bp, Probe Sequence
tcttgagcaaactgagttagggagg

SEQ ID NO: 292021 - DNA, 25 bp, Probe Sequence
tctggctccaactcagtgtttaagg

SEQ ID NO: 292022 - DNA, 25 bp, Probe Sequence
tctagtctaggtccgcggttacgga

SEQ ID NO: 292023 - DNA, 25 bp, Probe Sequence
tcccactaggtgtcgggtttctaga

SEQ ID NO: 292024 - DNA, 25 bp, Probe Sequence
tcccacaagcggtggacgtgctgct

SEQ ID NO: 292025 - DNA, 25 bp, Probe Sequence
tcgcgacacagggcttggtggtggt

SEQ ID NO: 292026 - DNA, 25 bp, Probe Sequence
tcgtacacgcgagctgtggactggt

SEQ ID NO: 292027 - DNA, 25 bp, Probe Sequence
tcgatacaccgggcctggagaacta

SEQ ID NO: 292028 - DNA, 25 bp, Probe Sequence
tctacaccttggtcctgacagaccc

SEQ ID NO: 292029 - DNA, 25 bp, Probe Sequence
tcgtgcagacttgaccgagtacctc

SEQ ID NO: 292030 - DNA, 25 bp, Probe Sequence
tcgtggccatcttccacaagtactc

SEQ ID NO: 292031 - DNA, 25 bp, Probe Sequence
tcggatcgcttcttaggagtatcct

SEQ ID NO: 292032 - DNA, 25 bp, Probe Sequence
tcgcgtgccattgctgagctgggca

SEQ ID NO: 292033 - DNA, 25 bp, Probe Sequence
tcgacttctctactgactggatgca

SEQ ID NO: 292034 - DNA, 25 bp, Probe Sequence
tcgatgttgtatttgcagtggctga

SEQ ID NO: 292035 - DNA, 25 bp, Probe Sequence
tcgctgtcattcatgatgcggccag

SEQ ID NO: 292036 - DNA, 25 bp, Probe Sequence
tcgcatgatcaagctaggtctaggt

SEQ ID NO: 292037 - DNA, 25 bp, Probe Sequence
tcgttcaagcctagcaatccatcag

SEQ ID NO: 292038 - DNA, 25 bp, Probe Sequence
tcgtccaagccaacaacagtcgctg

SEQ ID NO: 292039 - DNA, 25 bp, Probe Sequence
tcgcctccagctacgaagagtgccg

SEQ ID NO: 292040 - DNA, 25 bp, Probe Sequence
tcgccgccactcaaggtgctggcgg

SEQ ID NO: 292041 - DNA, 25 bp, Probe Sequence
tcgctggacaccatgagtcacactg

SEQ ID NO: 292042 - DNA, 25 bp, Probe Sequence
tcgctgctacaggttggcggtcaga

SEQ ID NO: 292043 - DNA, 25 bp, Probe Sequence
tcgctggactgctcagggtgccaga

SEQ ID NO: 292044 - DNA, 25 bp, Probe Sequence
tcgctggactgctcagggtgccaga

SEQ ID NO: 292045 - DNA, 25 bp, Probe Sequence
tcgatgaccacaggggagctccgag

SEQ ID NO: 292046 - DNA, 25 bp, Probe Sequence
tcgacagcgactcggcgtgtccgag

SEQ ID NO: 292047 - DNA, 25 bp, Probe Sequence
tcggacgacatcttctgtaccagag

SEQ ID NO: 292048 - DNA, 25 bp, Probe Sequence
tcgaataaatcttctgtatcctcgc

SEQ ID NO: 292049 - DNA, 25 bp, Probe Sequence
tcgctctagacttttgttggtcgcc

SEQ ID NO: 292050 - DNA, 25 bp, Probe Sequence
tcgctctggattccatttgggtcag

SEQ ID NO: 292051 - DNA, 25 bp, Probe Sequence
tcgcatatgtatgacatcctgggtc

SEQ ID NO: 292052 - DNA, 25 bp, Probe Sequence
tcgcaatgattcagctcgctgagga

SEQ ID NO: 292053 - DNA, 25 bp, Probe Sequence
tcgcaatgattcagctcgctgagga

SEQ ID NO: 292054 - DNA, 25 bp, Probe Sequence
tcgcaccattgcggtcgcgcggatc

SEQ ID NO: 292055 - DNA, 25 bp, Probe Sequence
tcgaaatatgcctgtgcagctgccg

SEQ ID NO: 292056 - DNA, 25 bp, Probe Sequence
tcgatgacaatctgggagtgtgctg

SEQ ID NO: 292057 - DNA, 25 bp, Probe Sequence
tcgagattcacatgggattatccct

SEQ ID NO: 292058 - DNA, 25 bp, Probe Sequence
tcccaatccagacagtctgaccgtg

SEQ ID NO: 292059 - DNA, 25 bp, Probe Sequence
tacccatgaatgtgagcttaccagg

SEQ ID NO: 292060 - DNA, 25 bp, Probe Sequence
tcgccctgatatgtgtgctctacaa

SEQ ID NO: 292061 - DNA, 25 bp, Probe Sequence
tctcctacataggtgtctccaaaat

SEQ ID NO: 292062 - DNA, 25 bp, Probe Sequence
tctcctgaaatgggtctgaaaaatc

SEQ ID NO: 292063 - DNA, 25 bp, Probe Sequence
tctcactcataagcgggaactaagc

SEQ ID NO: 292064 - DNA, 25 bp, Probe Sequence
tcatacctaatggcgaaaagcttaa

SEQ ID NO: 292065 - DNA, 25 bp, Probe Sequence
tctaccgagctgtcagcaagacggt

SEQ ID NO: 292066 - DNA, 25 bp, Probe Sequence
tcgctcccagcttatatggatcggc

SEQ ID NO: 292067 - DNA, 25 bp, Probe Sequence
tctgcttcacgtggactgggcatgc

SEQ ID NO: 292068 - DNA, 25 bp, Probe Sequence
tcgcccaggctggagtgcagtgaca

SEQ ID NO: 292069 - DNA, 25 bp, Probe Sequence
tcgtccaggtgcttgctatgttgac

SEQ ID NO: 292070 - DNA, 25 bp, Probe Sequence
tcgacaggttgctgccagagagcct

SEQ ID NO: 292071 - DNA, 25 bp, Probe Sequence
tctgcagtgagtgcaaccgcacctt

SEQ ID NO: 292072 - DNA, 25 bp, Probe Sequence
tctggagattcctctcacagtcact

SEQ ID NO: 292073 - DNA, 25 bp, Probe Sequence
tctgggactgcctcaacgggcaggc

SEQ ID NO: 292074 - DNA, 25 bp, Probe Sequence
tcggcgccaccgtcaacatggacgg

SEQ ID NO: 292075 - DNA, 25 bp, Probe Sequence
tcggcgccaccgtcaacatggacgg

SEQ ID NO: 292076 - DNA, 25 bp, Probe Sequence
tcgtgcgggaagtcgacaggccggg

SEQ ID NO: 292077 - DNA, 25 bp, Probe Sequence
tcggtggtgcaacaaagatgcctcg

SEQ ID NO: 292078 - DNA, 25 bp, Probe Sequence
tcaggtgagttacttaaggctagga

SEQ ID NO: 292079 - DNA, 25 bp, Probe Sequence
tcgtgtggctgcaggtagcagcact

SEQ ID NO: 292080 - DNA, 25 bp, Probe Sequence
tcgctgtgcccatgatggacacacc

SEQ ID NO: 292081 - DNA, 25 bp, Probe Sequence
tctgtatctgaatcttgaagactgc

SEQ ID NO: 292082 - DNA, 25 bp, Probe Sequence
tctgtgacttcatgctctgataact

SEQ ID NO: 292083 - DNA, 25 bp, Probe Sequence
tcggccatgtcatggtaaacggtcc

SEQ ID NO: 292084 - DNA, 25 bp, Probe Sequence
tcggccttcacgcataaaggcagtc

SEQ ID NO: 292085 - DNA, 25 bp, Probe Sequence
tcgagcctccacatgtcataaaatg

SEQ ID NO: 292086 - DNA, 25 bp, Probe Sequence
tcgacacatcccatgtgtttctctg

SEQ ID NO: 292087 - DNA, 25 bp, Probe Sequence
tcgcacacacgcagagttctgctcc

SEQ ID NO: 292088 - DNA, 25 bp, Probe Sequence
tctgtgccctgaaagtacctgaaag

SEQ ID NO: 292089 - DNA, 25 bp, Probe Sequence
tcgtgtcctgaaaatcctcgcacac

SEQ ID NO: 292090 - DNA, 25 bp, Probe Sequence
tcggcaatccaagcacctagatacc

SEQ ID NO: 292091 - DNA, 25 bp, Probe Sequence
tcgacaacgaaaagccgagaaccca

SEQ ID NO: 292092 - DNA, 25 bp, Probe Sequence
tcggacagcgaatgcgccgacaacc

SEQ ID NO: 292093 - DNA, 25 bp, Probe Sequence
tcggacgcaagaagacagcgacagc

SEQ ID NO: 292094 - DNA, 25 bp, Probe Sequence
tcggacgagcgcaaaagcgccttct

SEQ ID NO: 292095 - DNA, 25 bp, Probe Sequence
tcgacctggcacagaagcgcatctt

SEQ ID NO: 292096 - DNA, 25 bp, Probe Sequence
tcgatgccttcgagatgcatgcctg

SEQ ID NO: 292097 - DNA, 25 bp, Probe Sequence
tcggatttcacaagcatgaccagcc

SEQ ID NO: 292098 - DNA, 25 bp, Probe Sequence
tcgaatcatttaatgctcccactgc

SEQ ID NO: 292099 - DNA, 25 bp, Probe Sequence
tcagtggatttcttgctccgattgc

SEQ ID NO: 292100 - DNA, 25 bp, Probe Sequence
tcgtgaagctctttgactctgatcc

SEQ ID NO: 292101 - DNA, 25 bp, Probe Sequence
tcgtgggctctttgggtgactgagc

SEQ ID NO: 292102 - DNA, 25 bp, Probe Sequence
tcgtgggatccttatgttagtcaga

SEQ ID NO: 292103 - DNA, 25 bp, Probe Sequence
tcggcggacttgtgatcggcctgca

SEQ ID NO: 292104 - DNA, 25 bp, Probe Sequence
tcggaggagcttctacgtgtatgcg

SEQ ID NO: 292105 - DNA, 25 bp, Probe Sequence
tcggggatctgcactttgtggtgga

SEQ ID NO: 292106 - DNA, 25 bp, Probe Sequence
tcgggatactgcacacggagaggag

SEQ ID NO: 292107 - DNA, 25 bp, Probe Sequence
tctggaatggcctcatcgggggaaa

SEQ ID NO: 292108 - DNA, 25 bp, Probe Sequence
tcgagaagcgccgctctgagggcga

SEQ ID NO: 292109 - DNA, 25 bp, Probe Sequence
tcgagagacgctgactgtcgggcgg

SEQ ID NO: 292110 - DNA, 25 bp, Probe Sequence
tcgacagatgcggcaccgatcctta

SEQ ID NO: 292111 - DNA, 25 bp, Probe Sequence
tcgaagattaccagatcatcagttt

SEQ ID NO: 292112 - DNA, 25 bp, Probe Sequence
tcgacgtgtaccttgacatctgtga

SEQ ID NO: 292113 - DNA, 25 bp, Probe Sequence
tagattgtttccttaccgtgtttga

SEQ ID NO: 292114 - DNA, 25 bp, Probe Sequence
tcagttttgtccccaacaagtttat

SEQ ID NO: 292115 - DNA, 25 bp, Probe Sequence
tagttttgcctagaatcctgttttc

SEQ ID NO: 292116 - DNA, 25 bp, Probe Sequence
tcgttcttccacagtatcttgtttt

SEQ ID NO: 292117 - DNA, 25 bp, Probe Sequence
tcgtttttacatatgtctttgccta

SEQ ID NO: 292118 - DNA, 25 bp, Probe Sequence
tcggtacttgagcaatgcctacgcc

SEQ ID NO: 292119 - DNA, 25 bp, Probe Sequence
tctgtgtaagggcttgtctccctcc

SEQ ID NO: 292120 - DNA, 25 bp, Probe Sequence
tctgtgaccagggactttgcaacct

SEQ ID NO: 292121 - DNA, 25 bp, Probe Sequence
tctggactaaatatttaagtgcagt

SEQ ID NO: 292122 - DNA, 25 bp, Probe Sequence
tctggactacatatagaaaacttct

SEQ ID NO: 292123 - DNA, 25 bp, Probe Sequence
tcgatacatgaatttaacttacttt

SEQ ID NO: 292124 - DNA, 25 bp, Probe Sequence
tcacctcaggtcgtaactttcttta

SEQ ID NO: 292125 - DNA, 25 bp, Probe Sequence
tcgcactcaggtgatggactcttct

SEQ ID NO: 292126 - DNA, 25 bp, Probe Sequence
tctacatgggcaaagtgaccttctc

SEQ ID NO: 292127 - DNA, 25 bp, Probe Sequence
tctggcattgccaacgaagccttca

SEQ ID NO: 292128 - DNA, 25 bp, Probe Sequence
tctggcttaaaccaacctatccaaa

SEQ ID NO: 292129 - DNA, 25 bp, Probe Sequence
tctgttcttacagaaccacctccaa

SEQ ID NO: 292130 - DNA, 25 bp, Probe Sequence
tctctactaagcgaaaacccatctc

SEQ ID NO: 292131 - DNA, 25 bp, Probe Sequence
tcgtgacatcaaccctagacctgtc

SEQ ID NO: 292132 - DNA, 25 bp, Probe Sequence
tcaggcctccacgctgaggcctttg

SEQ ID NO: 292133 - DNA, 25 bp, Probe Sequence
tcgcccctgactctatggcgttagc

SEQ ID NO: 292134 - DNA, 25 bp, Probe Sequence
tcttgccattcccttaggctttagc

SEQ ID NO: 292135 - DNA, 25 bp, Probe Sequence
tcgtgcaatccgcttcagacaggat

SEQ ID NO: 292136 - DNA, 25 bp, Probe Sequence
tcgtattctcgtatctgccatgagt

SEQ ID NO: 292137 - DNA, 25 bp, Probe Sequence
tcgatatgttcggcttttcatgtat

SEQ ID NO: 292138 - DNA, 25 bp, Probe Sequence
tcgctgctgttgcactaatagtgtt

SEQ ID NO: 292139 - DNA, 25 bp, Probe Sequence
tcgccataaggcattgatcaggatt

SEQ ID NO: 292140 - DNA, 25 bp, Probe Sequence
tcgccaagtggcgttgtgtgctgaa

SEQ ID NO: 292141 - DNA, 25 bp, Probe Sequence
tcgccgaggggtggtgtctgaccac

SEQ ID NO: 292142 - DNA, 25 bp, Probe Sequence
tcaccaagttgggccgcttggtcaa

SEQ ID NO: 292143 - DNA, 25 bp, Probe Sequence
tcagctaagactgggtcctttggag

SEQ ID NO: 292144 - DNA, 25 bp, Probe Sequence
tcagccaaacttaaccttggtgggg

SEQ ID NO: 292145 - DNA, 25 bp, Probe Sequence
tcgcccaccttgatcatcggggagg

SEQ ID NO: 292146 - DNA, 25 bp, Probe Sequence
tcgcatccacgtgcgacctggagga

SEQ ID NO: 292147 - DNA, 25 bp, Probe Sequence
tcgatttttcacccagcatcgggag

SEQ ID NO: 292148 - DNA, 25 bp, Probe Sequence
tcgtggtactcatggctcacgggag

SEQ ID NO: 292149 - DNA, 25 bp, Probe Sequence
tcgggagactgagaccacggagaat

SEQ ID NO: 292150 - DNA, 25 bp, Probe Sequence
tcgggagaatgtgtgccctgcgact

SEQ ID NO: 292151 - DNA, 25 bp, Probe Sequence
tcggcggaagtgatcgctgtgtgaa

SEQ ID NO: 292152 - DNA, 25 bp, Probe Sequence
tcggctaaaggtacagttcctttca

SEQ ID NO: 292153 - DNA, 25 bp, Probe Sequence
tcgatctacgggatctttccattat

SEQ ID NO: 292154 - DNA, 25 bp, Probe Sequence
tcgtctgacctatttccttcagtta

SEQ ID NO: 292155 - DNA, 25 bp, Probe Sequence
tcagcctatacttttccatatggta

SEQ ID NO: 292156 - DNA, 25 bp, Probe Sequence
tcgcctcaactttatccacatgaaa

SEQ ID NO: 292157 - DNA, 25 bp, Probe Sequence
tcggctgcaactactaccacaagcc

SEQ ID NO: 292158 - DNA, 25 bp, Probe Sequence
tcgggagactaaatccagcggccag

SEQ ID NO: 292159 - DNA, 25 bp, Probe Sequence
tctggaagacctcaccatgggacgc

SEQ ID NO: 292160 - DNA, 25 bp, Probe Sequence
tctgtgaaaccttccgtggtcactc

SEQ ID NO: 292161 - DNA, 25 bp, Probe Sequence
tctgggtggtgttcatcgtggtagt

SEQ ID NO: 292162 - DNA, 25 bp, Probe Sequence
tctgggctgggaagccctgttggcc

SEQ ID NO: 292163 - DNA, 25 bp, Probe Sequence
tctagggctggggctacatttggct

SEQ ID NO: 292164 - DNA, 25 bp, Probe Sequence
tctagggctggggctacatttggct

SEQ ID NO: 292165 - DNA, 25 bp, Probe Sequence
tctagggctggggctacatttggct

SEQ ID NO: 292166 - DNA, 25 bp, Probe Sequence
tcgagtggtctgtgttcctattgct

SEQ ID NO: 292167 - DNA, 25 bp, Probe Sequence
tcgagtggtctgtgttcctattgct

SEQ ID NO: 292168 - DNA, 25 bp, Probe Sequence
tcgttgcttcagtgttctgtggtct

SEQ ID NO: 292169 - DNA, 25 bp, Probe Sequence
tcgtctattatgttgttgattttct

SEQ ID NO: 292170 - DNA, 25 bp, Probe Sequence
tcgacttgagaaatgcttgtggtat

SEQ ID NO: 292171 - DNA, 25 bp, Probe Sequence
tcgtccgtgacgacatgctgtgtgc

SEQ ID NO: 292172 - DNA, 25 bp, Probe Sequence
tcgtccgtgacgacatgctgtgtgc

SEQ ID NO: 292173 - DNA, 25 bp, Probe Sequence
tcgctgcgagtacctcatggagctg

SEQ ID NO: 292174 - DNA, 25 bp, Probe Sequence
tcgatgaggatgaacgctggacgga

SEQ ID NO: 292175 - DNA, 25 bp, Probe Sequence
tcgtgcgtgtgtgtgcgtacgtgta

SEQ ID NO: 292176 - DNA, 25 bp, Probe Sequence
tcgtggtgttgccatggcgatagta

SEQ ID NO: 292177 - DNA, 25 bp, Probe Sequence
tcgatatgtcttcagtgcctagaac

SEQ ID NO: 292178 - DNA, 25 bp, Probe Sequence
tcgattactattcgtgcctagcaaa

SEQ ID NO: 292179 - DNA, 25 bp, Probe Sequence
tcgattgatttacggcgctaaggat

SEQ ID NO: 292180 - DNA, 25 bp, Probe Sequence
tcgatcttcataacggacaaactga

SEQ ID NO: 292181 - DNA, 25 bp, Probe Sequence
tcgatcttcataacggacaaactga

SEQ ID NO: 292182 - DNA, 25 bp, Probe Sequence
tcgtgtctcataattgtcaaaacca

SEQ ID NO: 292183 - DNA, 25 bp, Probe Sequence
tcgatgacactaaggccccaacatc

SEQ ID NO: 292184 - DNA, 25 bp, Probe Sequence
tcgattccagcaaagcaccgcaaca

SEQ ID NO: 292185 - DNA, 25 bp, Probe Sequence
tcgactctcaaatactggcagtggt

SEQ ID NO: 292186 - DNA, 25 bp, Probe Sequence
tcgtgccgcgcgttaatgagcaggg

SEQ ID NO: 292187 - DNA, 25 bp, Probe Sequence
tcggctcggcaagtacaagggcggg

SEQ ID NO: 292188 - DNA, 25 bp, Probe Sequence
tcgtgccgagcagctactgcaggat

SEQ ID NO: 292189 - DNA, 25 bp, Probe Sequence
tcgcctcggcagccataggagcgaa

SEQ ID NO: 292190 - DNA, 25 bp, Probe Sequence
tcgtctccgtgccagatgtggcaag

SEQ ID NO: 292191 - DNA, 25 bp, Probe Sequence
tcgactccctgtcgagcttcaagga

SEQ ID NO: 292192 - DNA, 25 bp, Probe Sequence
tcgctcgcaccttggaggtcgaggc

SEQ ID NO: 292193 - DNA, 25 bp, Probe Sequence
tcgtctgaccttggctggccaatag

SEQ ID NO: 292194 - DNA, 25 bp, Probe Sequence
tctttacttacagtggaccaatgga

SEQ ID NO: 292195 - DNA, 25 bp, Probe Sequence
ttcctactttaccaacctcagagta

SEQ ID NO: 292196 - DNA, 25 bp, Probe Sequence
tctgcctcccttggtaacccaagga

SEQ ID NO: 292197 - DNA, 25 bp, Probe Sequence
tcgccccttctctatgaacttaaaa

SEQ ID NO: 292198 - DNA, 25 bp, Probe Sequence
tctgtcccttcctgggcaaagaaga

SEQ ID NO: 292199 - DNA, 25 bp, Probe Sequence
tcggcccttcctgacgagaaaacag

SEQ ID NO: 292200 - DNA, 25 bp, Probe Sequence
tcggtccttccgaggaagctaaggc

SEQ ID NO: 292201 - DNA, 25 bp, Probe Sequence
tcaggcccccccagagaaataagcc

SEQ ID NO: 292202 - DNA, 25 bp, Probe Sequence
tcggttctccccagatgacaaatac

SEQ ID NO: 292203 - DNA, 25 bp, Probe Sequence
tcgaagtctcttctcaaacaaattc

SEQ ID NO: 292204 - DNA, 25 bp, Probe Sequence
tctaagtttggtgcgaacgccattc

SEQ ID NO: 292205 - DNA, 25 bp, Probe Sequence
tctggaatttgggggcaacccttgc

SEQ ID NO: 292206 - DNA, 25 bp, Probe Sequence
tctggtttctggagataacccatca

SEQ ID NO: 292207 - DNA, 25 bp, Probe Sequence
tctggtttggatcctgaagaacgaa

SEQ ID NO: 292208 - DNA, 25 bp, Probe Sequence
tctgggaagagactctctaagtcca

SEQ ID NO: 292209 - DNA, 25 bp, Probe Sequence
tctgggaattccccgaaggcacaga

SEQ ID NO: 292210 - DNA, 25 bp, Probe Sequence
tctgggacttttacaaatggaatta

SEQ ID NO: 292211 - DNA, 25 bp, Probe Sequence
tctggtttttcagcacttgggattg

SEQ ID NO: 292212 - DNA, 25 bp, Probe Sequence
tcggtttttcatccactgcaggaat

SEQ ID NO: 292213 - DNA, 25 bp, Probe Sequence
tctggttctttctcaacattgccat

SEQ ID NO: 292214 - DNA, 25 bp, Probe Sequence
tctgtttgcagtatttactcctctg

SEQ ID NO: 292215 - DNA, 25 bp, Probe Sequence
tcgggatgagtgctttgcccgtcgg

SEQ ID NO: 292216 - DNA, 25 bp, Probe Sequence
tcgggcatgagtctgtttcccaagc

SEQ ID NO: 292217 - DNA, 25 bp, Probe Sequence
tcgggccaagcaagatttcctgaag

SEQ ID NO: 292218 - DNA, 25 bp, Probe Sequence
tctggacctaatagctgttccttag

SEQ ID NO: 292219 - DNA, 25 bp, Probe Sequence
tctaaactaattgttcttttgttgc

SEQ ID NO: 292220 - DNA, 25 bp, Probe Sequence
tcgagaaataataccctcgtgtttt

SEQ ID NO: 292221 - DNA, 25 bp, Probe Sequence
tctgtaaatgccatcaccgcggatg

SEQ ID NO: 292222 - DNA, 25 bp, Probe Sequence
tctgtgaacccacagctcggttgcc

SEQ ID NO: 292223 - DNA, 25 bp, Probe Sequence
tcggaacacattcagctgctgggtg

SEQ ID NO: 292224 - DNA, 25 bp, Probe Sequence
tcgcaaaactcatgatgctccggct

SEQ ID NO: 292225 - DNA, 25 bp, Probe Sequence
tcgtaatcaacttggtccggtttca

SEQ ID NO: 292226 - DNA, 25 bp, Probe Sequence
tcgctattacctggtgatccgtttt

SEQ ID NO: 292227 - DNA, 25 bp, Probe Sequence
tcgctatacccatggtatcgttttg

SEQ ID NO: 292228 - DNA, 25 bp, Probe Sequence
tcgcattacccttggtcactgtgat

SEQ ID NO: 292229 - DNA, 25 bp, Probe Sequence
tcgtcattctcctggtcattgtagt

SEQ ID NO: 292230 - DNA, 25 bp, Probe Sequence
tcgtcttctagcttgtgcctagttg

SEQ ID NO: 292231 - DNA, 25 bp, Probe Sequence
tctggttcagatctgtgcctttggc

SEQ ID NO: 292232 - DNA, 25 bp, Probe Sequence
tcgtgactagagatgacctctctgg

SEQ ID NO: 292233 - DNA, 25 bp, Probe Sequence
tcgagacgaggtttccttcatcaaa

SEQ ID NO: 292234 - DNA, 25 bp, Probe Sequence
tcgaagtaatgctgctccttcctaa

SEQ ID NO: 292235 - DNA, 25 bp, Probe Sequence
tctgaggatgaagagccgccaccta

SEQ ID NO: 292236 - DNA, 25 bp, Probe Sequence
tcgatggggatcgacatcgcctcgg

SEQ ID NO: 292237 - DNA, 25 bp, Probe Sequence
tcgggtagtccagtggcctagctgg

SEQ ID NO: 292238 - DNA, 25 bp, Probe Sequence
tcggtcatactggactggcttcgtt

SEQ ID NO: 292239 - DNA, 25 bp, Probe Sequence
tcggtcatactggactggcttcgtt

SEQ ID NO: 292240 - DNA, 25 bp, Probe Sequence
tcggtgatcactgagggatttccgc

SEQ ID NO: 292241 - DNA, 25 bp, Probe Sequence
tcggcttcctcttggtgatattcgc

SEQ ID NO: 292242 - DNA, 25 bp, Probe Sequence
tcgaggcctgctgtggtgattttga

SEQ ID NO: 292243 - DNA, 25 bp, Probe Sequence
tctgggcatctgttctggtttttaa

SEQ ID NO: 292244 - DNA, 25 bp, Probe Sequence
tctgcagaacttactgtacagttta

SEQ ID NO: 292245 - DNA, 25 bp, Probe Sequence
tctgttgcacttggttagctttaat

SEQ ID NO: 292246 - DNA, 25 bp, Probe Sequence
tcgagtacctcaagtcagtttgcct

SEQ ID NO: 292247 - DNA, 25 bp, Probe Sequence
tcgaggacgtgcagtcgctgctgga

SEQ ID NO: 292248 - DNA, 25 bp, Probe Sequence
tcgtggacaatgtctactgcattgg

SEQ ID NO: 292249 - DNA, 25 bp, Probe Sequence
tcgctgggatcttgatgcttgcttt

SEQ ID NO: 292250 - DNA, 25 bp, Probe Sequence
tcgcagagctgaggcacactggtgt

SEQ ID NO: 292251 - DNA, 25 bp, Probe Sequence
tcgaaggcaatgccctgctgtggcg

SEQ ID NO: 292252 - DNA, 25 bp, Probe Sequence
tcgatagggcaccgcgtgctgatgg

SEQ ID NO: 292253 - DNA, 25 bp, Probe Sequence
tcgaagcccagcttgagatgcgagt

SEQ ID NO: 292254 - DNA, 25 bp, Probe Sequence
tcgatagcaacacgtgatagcaggt

SEQ ID NO: 292255 - DNA, 25 bp, Probe Sequence
tcgatggcaaacggaagcctgtgac

SEQ ID NO: 292256 - DNA, 25 bp, Probe Sequence
tcggactacacgcagacgctgtcca

SEQ ID NO: 292257 - DNA, 25 bp, Probe Sequence
tctgaaagaaagagcatcgttccaa

SEQ ID NO: 292258 - DNA, 25 bp, Probe Sequence
tcggggatatagaccacgattccgc

SEQ ID NO: 292259 - DNA, 25 bp, Probe Sequence
tcgggagatacattccaaggccccc

SEQ ID NO: 292260 - DNA, 25 bp, Probe Sequence
tctgtggagtatgtaccgacggccg

SEQ ID NO: 292261 - DNA, 25 bp, Probe Sequence
tctggagagtacatcgcctccggac

SEQ ID NO: 292262 - DNA, 25 bp, Probe Sequence
tctggaggctaaaccctgtctggat

SEQ ID NO: 292263 - DNA, 25 bp, Probe Sequence
tctggaggctgctagactcctatct

SEQ ID NO: 292264 - DNA, 25 bp, Probe Sequence
tcgtgaggcctatcctggtgatgtg

SEQ ID NO: 292265 - DNA, 25 bp, Probe Sequence
tcgtcagagccaacacctttgttgc

SEQ ID NO: 292266 - DNA, 25 bp, Probe Sequence
tcgacggccatccacttattaatgg

SEQ ID NO: 292267 - DNA, 25 bp, Probe Sequence
tctggggcctcgctaattgaatgtg

SEQ ID NO: 292268 - DNA, 25 bp, Probe Sequence
tctgagaccctcagaaaggaaggat

SEQ ID NO: 292269 - DNA, 25 bp, Probe Sequence
tcgagacccatactgctgacagaaa

SEQ ID NO: 292270 - DNA, 25 bp, Probe Sequence
tcgcagcagctccgatgggatgaga

SEQ ID NO: 292271 - DNA, 25 bp, Probe Sequence
tcgcactccagcctgggtgacaaga

SEQ ID NO: 292272 - DNA, 25 bp, Probe Sequence
tcgactctgctgctcatgggaagaa

SEQ ID NO: 292273 - DNA, 25 bp, Probe Sequence
tcgcatcttggaccactgaaatgaa

SEQ ID NO: 292274 - DNA, 25 bp, Probe Sequence
tcaggctttcagcttgaactaagag

SEQ ID NO: 292275 - DNA, 25 bp, Probe Sequence
tctggcttgtccatctggtctaagg

SEQ ID NO: 292276 - DNA, 25 bp, Probe Sequence
tctggttgggcttagagtctgcctg

SEQ ID NO: 292277 - DNA, 25 bp, Probe Sequence
tcgggagggcagaagctgtccgagg

SEQ ID NO: 292278 - DNA, 25 bp, Probe Sequence
tctgggaggggtttgtgggtgaact

SEQ ID NO: 292279 - DNA, 25 bp, Probe Sequence
tctttaacctgttactcggtgtact

SEQ ID NO: 292280 - DNA, 25 bp, Probe Sequence
tctgttagagggggaccggtcgtat

SEQ ID NO: 292281 - DNA, 25 bp, Probe Sequence
tctgtgggaaaggaacacggttctg

SEQ ID NO: 292282 - DNA, 25 bp, Probe Sequence
tcgtggtgtaagcaacacctccctt

SEQ ID NO: 292283 - DNA, 25 bp, Probe Sequence
tctggggaacgtcaacgtcacgctc

SEQ ID NO: 292284 - DNA, 25 bp, Probe Sequence
tctggaggaaccaaaccttcagcct

SEQ ID NO: 292285 - DNA, 25 bp, Probe Sequence
tcgggcgaagacaaacggatgcacc

SEQ ID NO: 292286 - DNA, 25 bp, Probe Sequence
tctggccggacagaactggtgctct

SEQ ID NO: 292287 - DNA, 25 bp, Probe Sequence
tctcccttccaggaatgctgggccc

SEQ ID NO: 292288 - DNA, 25 bp, Probe Sequence
tctggagccccggaatgtgcgggcc

SEQ ID NO: 292289 - DNA, 25 bp, Probe Sequence
tctgcggacccggggctggaagaga

SEQ ID NO: 292290 - DNA, 25 bp, Probe Sequence
tctgggatgccatgaagggcgaccg

SEQ ID NO: 292291 - DNA, 25 bp, Probe Sequence
tcgggtccaaaatctcatgaatggt

SEQ ID NO: 292292 - DNA, 25 bp, Probe Sequence
tcgagcgcaccataaacctgcagag

SEQ ID NO: 292293 - DNA, 25 bp, Probe Sequence
tcgagctgcctgttaagcatcctga

SEQ ID NO: 292294 - DNA, 25 bp, Probe Sequence
tcgcagtgactgtggtgtccttgag

SEQ ID NO: 292295 - DNA, 25 bp, Probe Sequence
tcgagtgattcgctggatcctgtca

SEQ ID NO: 292296 - DNA, 25 bp, Probe Sequence
tcggaagattgctggactcgctgaa

SEQ ID NO: 292297 - DNA, 25 bp, Probe Sequence
tcgcagaagtgggagaggccggcag

SEQ ID NO: 292298 - DNA, 25 bp, Probe Sequence
tcgtgggtgcttgagagctctgagc

SEQ ID NO: 292299 - DNA, 25 bp, Probe Sequence
tcgggtgtagctgatggtgctggag

SEQ ID NO: 292300 - DNA, 25 bp, Probe Sequence
tcagggtgaagcgtgggaggggggt

SEQ ID NO: 292301 - DNA, 25 bp, Probe Sequence
tcaatggtacccagggagggagcat

SEQ ID NO: 292302 - DNA, 25 bp, Probe Sequence
tcatgggttcccagaagaggcggtc

SEQ ID NO: 292303 - DNA, 25 bp, Probe Sequence
tctggcgccattgtagcacagcggg

SEQ ID NO: 292304 - DNA, 25 bp, Probe Sequence
tctggctatcatgccaactactgcg

SEQ ID NO: 292305 - DNA, 25 bp, Probe Sequence
tcgtttcatttcacaactgagagga

SEQ ID NO: 292306 - DNA, 25 bp, Probe Sequence
tctgtaccattataccctagaagaa

SEQ ID NO: 292307 - DNA, 25 bp, Probe Sequence
tctgtaaattgtttgctgttaaaaa

SEQ ID NO: 292308 - DNA, 25 bp, Probe Sequence
tcgtgcaaaaggggtgcattaatac

SEQ ID NO: 292309 - DNA, 25 bp, Probe Sequence
tcgggcaaagagggtgacaagttca

SEQ ID NO: 292310 - DNA, 25 bp, Probe Sequence
tcgtggcacaagcaggtgaacactc

SEQ ID NO: 292311 - DNA, 25 bp, Probe Sequence
tcgtacacaatggagcaatgataac

SEQ ID NO: 292312 - DNA, 25 bp, Probe Sequence
tcgataatcattgcatagtgactga

SEQ ID NO: 292313 - DNA, 25 bp, Probe Sequence
tctgatatactgtacaaaggcgaga

SEQ ID NO: 292314 - DNA, 25 bp, Probe Sequence
tctggcatcctaaatcaacgggact

SEQ ID NO: 292315 - DNA, 25 bp, Probe Sequence
tctggcctctgaaaaaagtgtcccc

SEQ ID NO: 292316 - DNA, 25 bp, Probe Sequence
tctgggctgtgtttaaacggcccgc

SEQ ID NO: 292317 - DNA, 25 bp, Probe Sequence
ttgaggggtgctgaaaccagactgg

SEQ ID NO: 292318 - DNA, 25 bp, Probe Sequence
tctgggctgggtgtgaccaagcagg

SEQ ID NO: 292319 - DNA, 25 bp, Probe Sequence
tcgtgagtggggttgaaaacaggcc

SEQ ID NO: 292320 - DNA, 25 bp, Probe Sequence
tcgggaaggagttcacagaagcggt

SEQ ID NO: 292321 - DNA, 25 bp, Probe Sequence
tctggtgctaggttacgagggctgg

SEQ ID NO: 292322 - DNA, 25 bp, Probe Sequence
tcggcgctggggtatcagtgagggc

SEQ ID NO: 292323 - DNA, 25 bp, Probe Sequence
tcggccttgggattcagagcgaagt

SEQ ID NO: 292324 - DNA, 25 bp, Probe Sequence
tcggctccgaggtggagctgagaca

SEQ ID NO: 292325 - DNA, 25 bp, Probe Sequence
tcggtcgcgggaagaggcggagcgg

SEQ ID NO: 292326 - DNA, 25 bp, Probe Sequence
tcgggccgtgaacgagacgaggctg

SEQ ID NO: 292327 - DNA, 25 bp, Probe Sequence
tcgaggccttagagtacagatgggt

SEQ ID NO: 292328 - DNA, 25 bp, Probe Sequence
tcggcccgtagatttatcaagggtg

SEQ ID NO: 292329 - DNA, 25 bp, Probe Sequence
tcgtcacggttatcccaggagggac

SEQ ID NO: 292330 - DNA, 25 bp, Probe Sequence
tctggccacgtgaagacccagctga

SEQ ID NO: 292331 - DNA, 25 bp, Probe Sequence
tcggcgccagtgaaataccactacc

SEQ ID NO: 292332 - DNA, 25 bp, Probe Sequence
tcgagcaggagttaacaccgtcacc

SEQ ID NO: 292333 - DNA, 25 bp, Probe Sequence
tcgagcaggagttaacaccgtcacc

SEQ ID NO: 292334 - DNA, 25 bp, Probe Sequence
tcggaggagatgctcacttcgatga

SEQ ID NO: 292335 - DNA, 25 bp, Probe Sequence
tcgtaggatttgacatcttctggtt

SEQ ID NO: 292336 - DNA, 25 bp, Probe Sequence
tcgtaagatttgtcttcctgaagcc

SEQ ID NO: 292337 - DNA, 25 bp, Probe Sequence
tctgagaaagcttcttcccaaagcc

SEQ ID NO: 292338 - DNA, 25 bp, Probe Sequence
tcggaagctcattgttcagcccaac

SEQ ID NO: 292339 - DNA, 25 bp, Probe Sequence
tcgtgaactctatttattcccacat

SEQ ID NO: 292340 - DNA, 25 bp, Probe Sequence
tcggactctctatgagtctccacgc

SEQ ID NO: 292341 - DNA, 25 bp, Probe Sequence
tcgtactctttggagatgcccattc

SEQ ID NO: 292342 - DNA, 25 bp, Probe Sequence
tcggacatttctcagacatctccca

SEQ ID NO: 292343 - DNA, 25 bp, Probe Sequence
tcggagcagcatttgtttctcccca

SEQ ID NO: 292344 - DNA, 25 bp, Probe Sequence
tcgatgcagcagatacctttacacc

SEQ ID NO: 292345 - DNA, 25 bp, Probe Sequence
tcgatgagaactctctcattaccat

SEQ ID NO: 292346 - DNA, 25 bp, Probe Sequence
tcggaagactccgtcatctacatca

SEQ ID NO: 292347 - DNA, 25 bp, Probe Sequence
tcgagaagcttcccatgcttcagga

SEQ ID NO: 292348 - DNA, 25 bp, Probe Sequence
tcgagaagcacaaccactaccagaa

SEQ ID NO: 292349 - DNA, 25 bp, Probe Sequence
tctggacccagaggactacactaaa

SEQ ID NO: 292350 - DNA, 25 bp, Probe Sequence
tctggaattggttacatccctgaaa

SEQ ID NO: 292351 - DNA, 25 bp, Probe Sequence
tcggtttgcatttacgcctgtaaat

SEQ ID NO: 292352 - DNA, 25 bp, Probe Sequence
tcgtctcctcggtaacctgtatttt

SEQ ID NO: 292353 - DNA, 25 bp, Probe Sequence
tcgtgttacagttatacaatgattt

SEQ ID NO: 292354 - DNA, 25 bp, Probe Sequence
tctggatcggaatttacctgatttc

SEQ ID NO: 292355 - DNA, 25 bp, Probe Sequence
tctcgtcaaaaaatattcacagttc

SEQ ID NO: 292356 - DNA, 25 bp, Probe Sequence
tctggacaataaaaacgaatgtaca

SEQ ID NO: 292357 - DNA, 25 bp, Probe Sequence
tctggatcaccgtgaaggaagtgga

SEQ ID NO: 292358 - DNA, 25 bp, Probe Sequence
tctggtactctgtgaaagaagagaa

SEQ ID NO: 292359 - DNA, 25 bp, Probe Sequence
tctggtgacccaggacgagcttgac

SEQ ID NO: 292360 - DNA, 25 bp, Probe Sequence
tctggggcttcagaaggcttgaata

SEQ ID NO: 292361 - DNA, 25 bp, Probe Sequence
tctgggcactaagaaggtctatgaa

SEQ ID NO: 292362 - DNA, 25 bp, Probe Sequence
tcgagagccgaatgcagaggttcca

SEQ ID NO: 292363 - DNA, 25 bp, Probe Sequence
tcggtggagaagcctgtgtcctcga

SEQ ID NO: 292364 - DNA, 25 bp, Probe Sequence
tctggatgtacattccatttccatc

SEQ ID NO: 292365 - DNA, 25 bp, Probe Sequence
tctggatttcatcttttcccagcac

SEQ ID NO: 292366 - DNA, 25 bp, Probe Sequence
tcggagtcctccagtgatctccaga

SEQ ID NO: 292367 - DNA, 25 bp, Probe Sequence
tctggactttccagtgatgccactg

SEQ ID NO: 292368 - DNA, 25 bp, Probe Sequence
tcggtttcacaaatggcagacttga

SEQ ID NO: 292369 - DNA, 25 bp, Probe Sequence
tcggtgtctgagggttgaggttgca

SEQ ID NO: 292370 - DNA, 25 bp, Probe Sequence
tcggtgtctggcagatgcggcacct

SEQ ID NO: 292371 - DNA, 25 bp, Probe Sequence
tcgggactgagcaggcaatggccta

SEQ ID NO: 292372 - DNA, 25 bp, Probe Sequence
tctggaagggggcaagccgctcatg

SEQ ID NO: 292373 - DNA, 25 bp, Probe Sequence
tcaggttggggggcagcccccagtc

SEQ ID NO: 292374 - DNA, 25 bp, Probe Sequence
tcaggggtgaggagagcccccgaca

SEQ ID NO: 292375 - DNA, 25 bp, Probe Sequence
tctggggcatcgagggccccatcga

SEQ ID NO: 292376 - DNA, 25 bp, Probe Sequence
tctgtaggatttgggctgccccagg

SEQ ID NO: 292377 - DNA, 25 bp, Probe Sequence
tctgtgggataagaggccagcctgc

SEQ ID NO: 292378 - DNA, 25 bp, Probe Sequence
tcgggagctgggaagagcaccctgc

SEQ ID NO: 292379 - DNA, 25 bp, Probe Sequence
tctgggctgctggaataggacactc

SEQ ID NO: 292380 - DNA, 25 bp, Probe Sequence
tctgagactgtggtgaaactccttc

SEQ ID NO: 292381 - DNA, 25 bp, Probe Sequence
tctgggctgccaggaaacgatttgg

SEQ ID NO: 292382 - DNA, 25 bp, Probe Sequence
tctgggatacatgtacagtacgtgc

SEQ ID NO: 292383 - DNA, 25 bp, Probe Sequence
tctggtggattgttctagtactgta

SEQ ID NO: 292384 - DNA, 25 bp, Probe Sequence
tctggtggattgttctagtactgta

SEQ ID NO: 292385 - DNA, 25 bp, Probe Sequence
tctggtggattgttctagtactgta

SEQ ID NO: 292386 - DNA, 25 bp, Probe Sequence
tctgtgtatgcacgtaaagtttgta

SEQ ID NO: 292387 - DNA, 25 bp, Probe Sequence
tctgagtatagagagaatggcttga

SEQ ID NO: 292388 - DNA, 25 bp, Probe Sequence
tctggtcagagatacctggcctggt

SEQ ID NO: 292389 - DNA, 25 bp, Probe Sequence
tctggcacgaaatcttgctcgggca

SEQ ID NO: 292390 - DNA, 25 bp, Probe Sequence
tcggcacaacgaactctgaaggcac

SEQ ID NO: 292391 - DNA, 25 bp, Probe Sequence
tcggacaagtgcagctgctgcgcct

SEQ ID NO: 292392 - DNA, 25 bp, Probe Sequence
tcggaggagctggctctgtgtggct

SEQ ID NO: 292393 - DNA, 25 bp, Probe Sequence
tctggaatagctggctttattggca

SEQ ID NO: 292394 - DNA, 25 bp, Probe Sequence
tctgacagtagctcttagactcgcc

SEQ ID NO: 292395 - DNA, 25 bp, Probe Sequence
tcataagtcatgtctcttgggcctc

SEQ ID NO: 292396 - DNA, 25 bp, Probe Sequence
tctaagctcagtgttgtcaggtccc

SEQ ID NO: 292397 - DNA, 25 bp, Probe Sequence
tctggaggcaggtgagtcaatctcc

SEQ ID NO: 292398 - DNA, 25 bp, Probe Sequence
tcgagagggatgtctggtcagcccc

SEQ ID NO: 292399 - DNA, 25 bp, Probe Sequence
tctgaaggaatgtctctttgtcccg

SEQ ID NO: 292400 - DNA, 25 bp, Probe Sequence
tctggagtaaatggttggctctacg

SEQ ID NO: 292401 - DNA, 25 bp, Probe Sequence
tctgggaggtaggacggctgcttcc

SEQ ID NO: 292402 - DNA, 25 bp, Probe Sequence
tcggggtgcgaggtctgtctgcacc

SEQ ID NO: 292403 - DNA, 25 bp, Probe Sequence
tcgggatgtgggctctagagcgcct

SEQ ID NO: 292404 - DNA, 25 bp, Probe Sequence
tcggagagggtcaactggacctccc

SEQ ID NO: 292405 - DNA, 25 bp, Probe Sequence
tctggagagggttggatgcgtcccc

SEQ ID NO: 292406 - DNA, 25 bp, Probe Sequence
tctgagaaggacgggcaggtcacac

SEQ ID NO: 292407 - DNA, 25 bp, Probe Sequence
tcgtggggacaccagaagtcaacca

SEQ ID NO: 292408 - DNA, 25 bp, Probe Sequence
tctgggggactatgaaatccacgat

SEQ ID NO: 292409 - DNA, 25 bp, Probe Sequence
tcggggacctgaagaagatgaacaa

SEQ ID NO: 292410 - DNA, 25 bp, Probe Sequence
tcggaaacacagagccaggaatata

SEQ ID NO: 292411 - DNA, 25 bp, Probe Sequence
tcttgcataagctgaactaaaataa

SEQ ID NO: 292412 - DNA, 25 bp, Probe Sequence
tcgttcaagtctgactacccatcag

SEQ ID NO: 292413 - DNA, 25 bp, Probe Sequence
tcgttacatgccgcagaatcctcac

SEQ ID NO: 292414 - DNA, 25 bp, Probe Sequence
tctgggacatccagcaaatgccccg

SEQ ID NO: 292415 - DNA, 25 bp, Probe Sequence
tcgagcgacaacatgcagacagccg

SEQ ID NO: 292416 - DNA, 25 bp, Probe Sequence
tcgaggaccacagagcacatcctga

SEQ ID NO: 292417 - DNA, 25 bp, Probe Sequence
tctgagatggcaccactagcactcc

SEQ ID NO: 292418 - DNA, 25 bp, Probe Sequence
tcggatggggagagactgcgcaggc

SEQ ID NO: 292419 - DNA, 25 bp, Probe Sequence
tctggagggtgagcgacctgcgaga

SEQ ID NO: 292420 - DNA, 25 bp, Probe Sequence
tctggggaggcagcgttcagggaga

SEQ ID NO: 292421 - DNA, 25 bp, Probe Sequence
tcggggagtgaaggcctcgttgaga

SEQ ID NO: 292422 - DNA, 25 bp, Probe Sequence
tcggattggttagccttcattgagc

SEQ ID NO: 292423 - DNA, 25 bp, Probe Sequence
tcgtttggttagtcagcattctttg

SEQ ID NO: 292424 - DNA, 25 bp, Probe Sequence
tcgtctgaagtcaaccactactttt

SEQ ID NO: 292425 - DNA, 25 bp, Probe Sequence
tctgactaagctccccacaattagt

SEQ ID NO: 292426 - DNA, 25 bp, Probe Sequence
tctgacataactcccagtttgtttt

SEQ ID NO: 292427 - DNA, 25 bp, Probe Sequence
tcgttcatattcacgtttattctct

SEQ ID NO: 292428 - DNA, 25 bp, Probe Sequence
tcgtttttcttggggtactcttgat

SEQ ID NO: 292429 - DNA, 25 bp, Probe Sequence
tcttttttcttgagccagttttaat

SEQ ID NO: 292430 - DNA, 25 bp, Probe Sequence
tcggcttttcatgtatgtagatttt

SEQ ID NO: 292431 - DNA, 25 bp, Probe Sequence
tcgtcgtcttcagacaccagtgatt

SEQ ID NO: 292432 - DNA, 25 bp, Probe Sequence
tcgtcgcttcttgaagacctatgta

SEQ ID NO: 292433 - DNA, 25 bp, Probe Sequence
tctgacatttttaacaacttagtaa

SEQ ID NO: 292434 - DNA, 25 bp, Probe Sequence
tctgtattattccccgttcttggaa

SEQ ID NO: 292435 - DNA, 25 bp, Probe Sequence
tctgtttttaggtgtctttaagcca

SEQ ID NO: 292436 - DNA, 25 bp, Probe Sequence
tctgtttaaacctgtattaataggc

SEQ ID NO: 292437 - DNA, 25 bp, Probe Sequence
tttgtgttaccctcctgtaaatggt

SEQ ID NO: 292438 - DNA, 25 bp, Probe Sequence
tttgttgacccggtacttcatactg

SEQ ID NO: 292439 - DNA, 25 bp, Probe Sequence
tctggttattccggtggttgtcctg

SEQ ID NO: 292440 - DNA, 25 bp, Probe Sequence
tcggtatttcacggcgtatgcctcc

SEQ ID NO: 292441 - DNA, 25 bp, Probe Sequence
tcggtacttagccacctgatgacta

SEQ ID NO: 292442 - DNA, 25 bp, Probe Sequence
tcggtacctaccactgagaattcag

SEQ ID NO: 292443 - DNA, 25 bp, Probe Sequence
tcgtgtccctaaggagtgagaaacc

SEQ ID NO: 292444 - DNA, 25 bp, Probe Sequence
tcggtccctcattgcaggggggagc

SEQ ID NO: 292445 - DNA, 25 bp, Probe Sequence
tcgggccctgataagcggctggtga

SEQ ID NO: 292446 - DNA, 25 bp, Probe Sequence
tcggttctgcttacagtgtgtggga

SEQ ID NO: 292447 - DNA, 25 bp, Probe Sequence
tcggctgactacttcgtgttggcct

SEQ ID NO: 292448 - DNA, 25 bp, Probe Sequence
tctgtggagtcagtgggtgtcggcc

SEQ ID NO: 292449 - DNA, 25 bp, Probe Sequence
tctggagaaacgtggatgtggcacc

SEQ ID NO: 292450 - DNA, 25 bp, Probe Sequence
tctggagaaacgtggatgtggcacc

SEQ ID NO: 292451 - DNA, 25 bp, Probe Sequence
tcgggctaagcggcggatgcagtac

SEQ ID NO: 292452 - DNA, 25 bp, Probe Sequence
tcggcagccataggagcgaacactg

SEQ ID NO: 292453 - DNA, 25 bp, Probe Sequence
tctggctggtcgggaatacctggga

SEQ ID NO: 292454 - DNA, 25 bp, Probe Sequence
tctggtggcattcaaagaagtggga

SEQ ID NO: 292455 - DNA, 25 bp, Probe Sequence
tcttgggtatgccctaccaggtgga

SEQ ID NO: 292456 - DNA, 25 bp, Probe Sequence
tcaggggttctgtctacctggggac

SEQ ID NO: 292457 - DNA, 25 bp, Probe Sequence
tcaggttttctgttgacttgtagga

SEQ ID NO: 292458 - DNA, 25 bp, Probe Sequence
tcggttgtctggttgccattgttga

SEQ ID NO: 292459 - DNA, 25 bp, Probe Sequence
tcgttttcatcgtctgtcaggtgga

SEQ ID NO: 292460 - DNA, 25 bp, Probe Sequence
tcgtgtttgacgccgtcaccgatgt

SEQ ID NO: 292461 - DNA, 25 bp, Probe Sequence
tcggctcttgacacttagccgctgt

SEQ ID NO: 292462 - DNA, 25 bp, Probe Sequence
tctcctattgaaacttgcccagatg

SEQ ID NO: 292463 - DNA, 25 bp, Probe Sequence
tctccactcggcacggttgcagtgg

SEQ ID NO: 292464 - DNA, 25 bp, Probe Sequence
tctgggaacctttgggtcattgccc

SEQ ID NO: 292465 - DNA, 25 bp, Probe Sequence
tcgaggagccctttgaactttccaa

SEQ ID NO: 292466 - DNA, 25 bp, Probe Sequence
tctggtgaacgccctatactttaaa

SEQ ID NO: 292467 - DNA, 25 bp, Probe Sequence
tcgggaagcctgaaatgtctttgaa

SEQ ID NO: 292468 - DNA, 25 bp, Probe Sequence
tcgggaacagggaattgtctctgaa

SEQ ID NO: 292469 - DNA, 25 bp, Probe Sequence
tcgggaaaggtgctgcttacgctca

SEQ ID NO: 292470 - DNA, 25 bp, Probe Sequence
tcgtggtaatggtgctgttctcgct

SEQ ID NO: 292471 - DNA, 25 bp, Probe Sequence
tcgtggaagatgaagttgtcctttg

SEQ ID NO: 292472 - DNA, 25 bp, Probe Sequence
tctggagacggcaggttcacttgcg

SEQ ID NO: 292473 - DNA, 25 bp, Probe Sequence
tctggcagttgcctatgtttagcaa

SEQ ID NO: 292474 - DNA, 25 bp, Probe Sequence
tctggatatggagtatgttttgcta

SEQ ID NO: 292475 - DNA, 25 bp, Probe Sequence
tctgggacgacaggttcatctctat

SEQ ID NO: 292476 - DNA, 25 bp, Probe Sequence
tcgtggtcgctgtgatcatgatctt

SEQ ID NO: 292477 - DNA, 25 bp, Probe Sequence
tcgtcttcagcaaggatcagtttcc

SEQ ID NO: 292478 - DNA, 25 bp, Probe Sequence
tcgttgtcagctacttgatgtcctt

SEQ ID NO: 292479 - DNA, 25 bp, Probe Sequence
tctgattagctctcagtcttcagct

SEQ ID NO: 292480 - DNA, 25 bp, Probe Sequence
tcgttcactcatggaaaatagcgat

SEQ ID NO: 292481 - DNA, 25 bp, Probe Sequence
tctgtggcaccagctaacacggatc

SEQ ID NO: 292482 - DNA, 25 bp, Probe Sequence
tctgtgccacggggaaacgcagccc

SEQ ID NO: 292483 - DNA, 25 bp, Probe Sequence
tctggcccgcggaagttaagcaacc

SEQ ID NO: 292484 - DNA, 25 bp, Probe Sequence
tctgaggttgggagttcaagaccag

SEQ ID NO: 292485 - DNA, 25 bp, Probe Sequence
tctgggctcggtcagtggagaacct

SEQ ID NO: 292486 - DNA, 25 bp, Probe Sequence
tcagggtccagtcagtagacaaaaa

SEQ ID NO: 292487 - DNA, 25 bp, Probe Sequence
tcgggaaagatgcatgtggattaaa

SEQ ID NO: 292488 - DNA, 25 bp, Probe Sequence
tcgggattcagacagtggactggag

SEQ ID NO: 292489 - DNA, 25 bp, Probe Sequence
tcgaggttcaggaggcggcaggagt

SEQ ID NO: 292490 - DNA, 25 bp, Probe Sequence
tcggagcttaggaggggcggagacg

SEQ ID NO: 292491 - DNA, 25 bp, Probe Sequence
tcggagattgtggggggccggcgag

SEQ ID NO: 292492 - DNA, 25 bp, Probe Sequence
tcggatgtctggtggggcggagcag

SEQ ID NO: 292493 - DNA, 25 bp, Probe Sequence
tcggtgcgtggattctggtccgagc

SEQ ID NO: 292494 - DNA, 25 bp, Probe Sequence
tcgatgtgctgtggatatcggtttg

SEQ ID NO: 292495 - DNA, 25 bp, Probe Sequence
tcgatctctgggatttatgctcatg

SEQ ID NO: 292496 - DNA, 25 bp, Probe Sequence
tcgtcagctcggttgctttatcatg

SEQ ID NO: 292497 - DNA, 25 bp, Probe Sequence
tcgtcatcatcccagtgttggtcgt

SEQ ID NO: 292498 - DNA, 25 bp, Probe Sequence
tcgatgacatcaacagtggtgctgt

SEQ ID NO: 292499 - DNA, 25 bp, Probe Sequence
tcgattcatcaggcggtcttgtaca

SEQ ID NO: 292500 - DNA, 25 bp, Probe Sequence
tcgtgctcaatgctgatgtctgctc

SEQ ID NO: 292501 - DNA, 25 bp, Probe Sequence
tcgtgctgcacaagctgcacttcac

SEQ ID NO: 292502 - DNA, 25 bp, Probe Sequence
tctgtggtgccagtgcacactacct

SEQ ID NO: 292503 - DNA, 25 bp, Probe Sequence
tctgtggtgccagtgcacactacct

SEQ ID NO: 292504 - DNA, 25 bp, Probe Sequence
tctgtggctcctgacactatcaaca

SEQ ID NO: 292505 - DNA, 25 bp, Probe Sequence
tcgatgctgttaacaacttctgata

SEQ ID NO: 292506 - DNA, 25 bp, Probe Sequence
tctactggctgcaccagtggctata

SEQ ID NO: 292507 - DNA, 25 bp, Probe Sequence
tctgaatttgcattccatggtgtta

SEQ ID NO: 292508 - DNA, 25 bp, Probe Sequence
tcgttctctgattccagcagaggga

SEQ ID NO: 292509 - DNA, 25 bp, Probe Sequence
tcgtgcggtgtcaacgctgcaggga

SEQ ID NO: 292510 - DNA, 25 bp, Probe Sequence
tcgtcttatcacaatgcctcagtag

SEQ ID NO: 292511 - DNA, 25 bp, Probe Sequence
tcgtccctcataattccacgagaaa

SEQ ID NO: 292512 - DNA, 25 bp, Probe Sequence
tcgtttctatgatctctccagtaaa

SEQ ID NO: 292513 - DNA, 25 bp, Probe Sequence
tctggttctagatctttcaggaatt

SEQ ID NO: 292514 - DNA, 25 bp, Probe Sequence
tcggttcatccttccagtcaatgaa

SEQ ID NO: 292515 - DNA, 25 bp, Probe Sequence
tcggttaacttgcatctccagattg

SEQ ID NO: 292516 - DNA, 25 bp, Probe Sequence
tcggttgatcacctgagttgggatt

SEQ ID NO: 292517 - DNA, 25 bp, Probe Sequence
tcggcattaatccgtttatgtgatg

SEQ ID NO: 292518 - DNA, 25 bp, Probe Sequence
tcggttgatctccatgtttagtgta

SEQ ID NO: 292519 - DNA, 25 bp, Probe Sequence
tctggtgctgtcctgttttactgga

SEQ ID NO: 292520 - DNA, 25 bp, Probe Sequence
tctggattgtccaccaaatgcattg

SEQ ID NO: 292521 - DNA, 25 bp, Probe Sequence
tctgttgcatttagcccaaatcagt

SEQ ID NO: 292522 - DNA, 25 bp, Probe Sequence
tcagttggtctcgcaccagatagta

SEQ ID NO: 292523 - DNA, 25 bp, Probe Sequence
tcgtgtggtctccagcaagggattc

SEQ ID NO: 292524 - DNA, 25 bp, Probe Sequence
tcggtatgtgcccagacaggtgatg

SEQ ID NO: 292525 - DNA, 25 bp, Probe Sequence
tctggcagatgacaagacagtttcc

SEQ ID NO: 292526 - DNA, 25 bp, Probe Sequence
tctcaattgaaataactttgccaca

SEQ ID NO: 292527 - DNA, 25 bp, Probe Sequence
tctggcaagaaatacctccgctaca

SEQ ID NO: 292528 - DNA, 25 bp, Probe Sequence
tctggagatgaaagcgatcccggcc

SEQ ID NO: 292529 - DNA, 25 bp, Probe Sequence
tcagtcaataaaggatccgggccca

SEQ ID NO: 292530 - DNA, 25 bp, Probe Sequence
tcgtcaaggacatcatccacgaccc

SEQ ID NO: 292531 - DNA, 25 bp, Probe Sequence
tctgtaaggtcatgtgcttccaccc

SEQ ID NO: 292532 - DNA, 25 bp, Probe Sequence
tctgtgaactggctttgcaacctcc

SEQ ID NO: 292533 - DNA, 25 bp, Probe Sequence
tctgtctcctaggctttaagcccca

SEQ ID NO: 292534 - DNA, 25 bp, Probe Sequence
tcgttctgcacaggcactttagccc

SEQ ID NO: 292535 - DNA, 25 bp, Probe Sequence
tcgttatgagaaacatttggtgccc

SEQ ID NO: 292536 - DNA, 25 bp, Probe Sequence
tcgtcattcgaaacatagtggaggc

SEQ ID NO: 292537 - DNA, 25 bp, Probe Sequence
tctggtaggcatcacgagctggggc

SEQ ID NO: 292538 - DNA, 25 bp, Probe Sequence
tcggcggggcttggagtgtgatggc

SEQ ID NO: 292539 - DNA, 25 bp, Probe Sequence
tcggcggggcttggagtgtgatggc

SEQ ID NO: 292540 - DNA, 25 bp, Probe Sequence
tctgccatggggctcgggttgaggg

SEQ ID NO: 292541 - DNA, 25 bp, Probe Sequence
tctgtcgggcggtgagcaatcgcag

SEQ ID NO: 292542 - DNA, 25 bp, Probe Sequence
tctgttgggccttggagacagctgc

SEQ ID NO: 292543 - DNA, 25 bp, Probe Sequence
tctgatcagggtgagcatcaaactc

SEQ ID NO: 292544 - DNA, 25 bp, Probe Sequence
tcgtaggcacttacaaataccaaga

SEQ ID NO: 292545 - DNA, 25 bp, Probe Sequence
tcgtcagccagctaaccagaacaca

SEQ ID NO: 292546 - DNA, 25 bp, Probe Sequence
tcgtcaccatcatgtattggaaatt

SEQ ID NO: 292547 - DNA, 25 bp, Probe Sequence
tcgtcactgtaggcaatgtagagaa

SEQ ID NO: 292548 - DNA, 25 bp, Probe Sequence
tcgtcacgctcgcatctatagataa

SEQ ID NO: 292549 - DNA, 25 bp, Probe Sequence
tctgtaagtcacctaaaatacctac

SEQ ID NO: 292550 - DNA, 25 bp, Probe Sequence
tctgcttcagtcccaatgtaaacct

SEQ ID NO: 292551 - DNA, 25 bp, Probe Sequence
tctgcttgagtatggtgttaactac

SEQ ID NO: 292552 - DNA, 25 bp, Probe Sequence
tctgcttgggcagtaatgtaaacaa

SEQ ID NO: 292553 - DNA, 25 bp, Probe Sequence
tctgttaggactcagttgcaagaac

SEQ ID NO: 292554 - DNA, 25 bp, Probe Sequence
tcggtcaattgtcactgtcatcaga

SEQ ID NO: 292555 - DNA, 25 bp, Probe Sequence
tcggccgaagccatcggcatcatga

SEQ ID NO: 292556 - DNA, 25 bp, Probe Sequence
tcggacagatactctcgtgcaaaag

SEQ ID NO: 292557 - DNA, 25 bp, Probe Sequence
tctctgactgcaaccacttgggaaa

SEQ ID NO: 292558 - DNA, 25 bp, Probe Sequence
tctctactcaatgccacggtacaat

SEQ ID NO: 292559 - DNA, 25 bp, Probe Sequence
tcggagccatctgcaagcgggaaaa

SEQ ID NO: 292560 - DNA, 25 bp, Probe Sequence
tcgtttcatcattcggcgtgcgaat

SEQ ID NO: 292561 - DNA, 25 bp, Probe Sequence
tcgtcaacaatgtctgcgcgggact

SEQ ID NO: 292562 - DNA, 25 bp, Probe Sequence
tctggcaactacttcacggagacgg

SEQ ID NO: 292563 - DNA, 25 bp, Probe Sequence
tcttaacaagttcctggactccgcg

SEQ ID NO: 292564 - DNA, 25 bp, Probe Sequence
tagacgaaagttctggtggccactg

SEQ ID NO: 292565 - DNA, 25 bp, Probe Sequence
tacctgctaagtcaagggttcactg

SEQ ID NO: 292566 - DNA, 25 bp, Probe Sequence
tacccttggacccagaggttctttg

SEQ ID NO: 292567 - DNA, 25 bp, Probe Sequence
tacccttggacccagaggttctttg

SEQ ID NO: 292568 - DNA, 25 bp, Probe Sequence
tatcccttggaaaaggggcacctat

SEQ ID NO: 292569 - DNA, 25 bp, Probe Sequence
tctccccaaaaatgtatagtgcctt

SEQ ID NO: 292570 - DNA, 25 bp, Probe Sequence
tctcccagtaaagcttttcttctcc

SEQ ID NO: 292571 - DNA, 25 bp, Probe Sequence
tctcccagtaaagcttttcttctcc

SEQ ID NO: 292572 - DNA, 25 bp, Probe Sequence
tctgcccagctaacttcgttttaat

SEQ ID NO: 292573 - DNA, 25 bp, Probe Sequence
tcaccctttcctattcttcataagg

SEQ ID NO: 292574 - DNA, 25 bp, Probe Sequence
tcaccctttcctattcttcataagg

SEQ ID NO: 292575 - DNA, 25 bp, Probe Sequence
tcaccgtttggctcgatattataag

SEQ ID NO: 292576 - DNA, 25 bp, Probe Sequence
tcatccctttgttactaacctcagt

SEQ ID NO: 292577 - DNA, 25 bp, Probe Sequence
tctctcctgagtgtactaattccca

SEQ ID NO: 292578 - DNA, 25 bp, Probe Sequence
tctccttgttactacttttaccaag

SEQ ID NO: 292579 - DNA, 25 bp, Probe Sequence
tcaccattttaacactggaagccac

SEQ ID NO: 292580 - DNA, 25 bp, Probe Sequence
tcagccctttggtaactggcaatgc

SEQ ID NO: 292581 - DNA, 25 bp, Probe Sequence
tctggcccgtgacatactggagatc

SEQ ID NO: 292582 - DNA, 25 bp, Probe Sequence
tctgggccggtggtaccgagtctaa

SEQ ID NO: 292583 - DNA, 25 bp, Probe Sequence
tctgggccggtggtactgagtctaa

SEQ ID NO: 292584 - DNA, 25 bp, Probe Sequence
tctggactcctgggtttgaggcaga

SEQ ID NO: 292585 - DNA, 25 bp, Probe Sequence
tctgtgactggccaggtttcaggac

SEQ ID NO: 292586 - DNA, 25 bp, Probe Sequence
tctgtgcacaaggacgggtcaggaa

SEQ ID NO: 292587 - DNA, 25 bp, Probe Sequence
tctgtctggatcccgaggtatggca

SEQ ID NO: 292588 - DNA, 25 bp, Probe Sequence
tctggcaggtgaccgtggcctgcga

SEQ ID NO: 292589 - DNA, 25 bp, Probe Sequence
tctggctggatgcgtttgcctatca

SEQ ID NO: 292590 - DNA, 25 bp, Probe Sequence
tcggtggcattgcttcggcatatgc

SEQ ID NO: 292591 - DNA, 25 bp, Probe Sequence
tcgtggccatcggtgtctggcagat

SEQ ID NO: 292592 - DNA, 25 bp, Probe Sequence
tcgtgtgccagcggtgtggggagga

SEQ ID NO: 292593 - DNA, 25 bp, Probe Sequence
tcgtgtaagcagtttggtggaagaa

SEQ ID NO: 292594 - DNA, 25 bp, Probe Sequence
tctgcagtaccacagtggaggaaat

SEQ ID NO: 292595 - DNA, 25 bp, Probe Sequence
tctgagatcaaactgcaaggcggca

SEQ ID NO: 292596 - DNA, 25 bp, Probe Sequence
tctgcgactacaacaaggaggccat

SEQ ID NO: 292597 - DNA, 25 bp, Probe Sequence
tcgtcattgagaaagagggctcctg

SEQ ID NO: 292598 - DNA, 25 bp, Probe Sequence
tcgtcagtggtcaaggtgtgtcatc

SEQ ID NO: 292599 - DNA, 25 bp, Probe Sequence
tcagacactactgaggtggttcttt

SEQ ID NO: 292600 - DNA, 25 bp, Probe Sequence
tcagacccccactttgagttttatt

SEQ ID NO: 292601 - DNA, 25 bp, Probe Sequence
tcattacaacccttctggttattcc

SEQ ID NO: 292602 - DNA, 25 bp, Probe Sequence
tctgtacacccgttattttataccg

SEQ ID NO: 292603 - DNA, 25 bp, Probe Sequence
tctgtaaccgtattctttgaaagct

SEQ ID NO: 292604 - DNA, 25 bp, Probe Sequence
tcgtccaccgcaaatgcttctaaac

SEQ ID NO: 292605 - DNA, 25 bp, Probe Sequence
tcgtccagccacaaatgaaggtgaa

SEQ ID NO: 292606 - DNA, 25 bp, Probe Sequence
tctgtcacgtccactaatcggcaaa

SEQ ID NO: 292607 - DNA, 25 bp, Probe Sequence
tctgtccttccatgtgtggggaaag

SEQ ID NO: 292608 - DNA, 25 bp, Probe Sequence
tcggcctcccaaagtgctgggatta

SEQ ID NO: 292609 - DNA, 25 bp, Probe Sequence
tcggcctcccaaagtgctgggatta

SEQ ID NO: 292610 - DNA, 25 bp, Probe Sequence
tcggcctcccaaagtgctgggatta

SEQ ID NO: 292611 - DNA, 25 bp, Probe Sequence
tcggcctcccaaagtgctgggatta

SEQ ID NO: 292612 - DNA, 25 bp, Probe Sequence
tcggcctcccaaagtgctgggatta

SEQ ID NO: 292613 - DNA, 25 bp, Probe Sequence
tcggcctcccaaagtgctgggatta

SEQ ID NO: 292614 - DNA, 25 bp, Probe Sequence
tcggcctcccaaagtgctaggatta

SEQ ID NO: 292615 - DNA, 25 bp, Probe Sequence
tctgtcctctcctttttaggagtaa

SEQ ID NO: 292616 - DNA, 25 bp, Probe Sequence
tctgtcccaactgtttgaacagtgt

SEQ ID NO: 292617 - DNA, 25 bp, Probe Sequence
tcggcaccaagcgctttgacagtga

SEQ ID NO: 292618 - DNA, 25 bp, Probe Sequence
tctgtcccaacagcaatgtgacgga

SEQ ID NO: 292619 - DNA, 25 bp, Probe Sequence
tctggacacagtgcccgtgtcggag

SEQ ID NO: 292620 - DNA, 25 bp, Probe Sequence
tctccagcaagggattcgggcgaag

SEQ ID NO: 292621 - DNA, 25 bp, Probe Sequence
tctgaagcatcaggccatttggggc

SEQ ID NO: 292622 - DNA, 25 bp, Probe Sequence
tctgacaacagacttttcagtggaa

SEQ ID NO: 292623 - DNA, 25 bp, Probe Sequence
tctatcgagaagatttccacggaga

SEQ ID NO: 292624 - DNA, 25 bp, Probe Sequence
tctgagtaccagactattccactta

SEQ ID NO: 292625 - DNA, 25 bp, Probe Sequence
tctgaagacctgatgacccagcttc

SEQ ID NO: 292626 - DNA, 25 bp, Probe Sequence
tctgactagttcagactgccacgcc

SEQ ID NO: 292627 - DNA, 25 bp, Probe Sequence
tctgattccttcaactggctactga

SEQ ID NO: 292628 - DNA, 25 bp, Probe Sequence
tctgaaggttgcactggccagcatg

SEQ ID NO: 292629 - DNA, 25 bp, Probe Sequence
tctcaaggtggagctctggggtttg

SEQ ID NO: 292630 - DNA, 25 bp, Probe Sequence
tctcaagttagattcctggtcctgg

SEQ ID NO: 292631 - DNA, 25 bp, Probe Sequence
tctcggcattaatccgtttatgtga

SEQ ID NO: 292632 - DNA, 25 bp, Probe Sequence
tctctggattagtgcgggtatagac

SEQ ID NO: 292633 - DNA, 25 bp, Probe Sequence
tctgtggattagtgctagaatagag

SEQ ID NO: 292634 - DNA, 25 bp, Probe Sequence
tcggaactgaggccatgattaagag

SEQ ID NO: 292635 - DNA, 25 bp, Probe Sequence
tcggaactgaggccatgattaagag

SEQ ID NO: 292636 - DNA, 25 bp, Probe Sequence
tctgagagactacttatgaataagt

SEQ ID NO: 292637 - DNA, 25 bp, Probe Sequence
tctggggctgtcttatgaaaatata

SEQ ID NO: 292638 - DNA, 25 bp, Probe Sequence
tcgtcgccatgcctcggaaaattga

SEQ ID NO: 292639 - DNA, 25 bp, Probe Sequence
tcgtcctacgctcgtacacaatgga

SEQ ID NO: 292640 - DNA, 25 bp, Probe Sequence
tcgtcctgatccggctgaagaagaa

SEQ ID NO: 292641 - DNA, 25 bp, Probe Sequence
tcagtactgactgtgtaagctaaat

SEQ ID NO: 292642 - DNA, 25 bp, Probe Sequence
tctgtatacactgggtaacctgatc

SEQ ID NO: 292643 - DNA, 25 bp, Probe Sequence
tctgtagtcttcagtgctaccgcat

SEQ ID NO: 292644 - DNA, 25 bp, Probe Sequence
tctgtcatatctcatcctgtaacgc

SEQ ID NO: 292645 - DNA, 25 bp, Probe Sequence
tctgtttcatcgacaagttcacccc

SEQ ID NO: 292646 - DNA, 25 bp, Probe Sequence
tcttggtctcctgagtgtacccagg

SEQ ID NO: 292647 - DNA, 25 bp, Probe Sequence
tctatggccccatgaagaactacct

SEQ ID NO: 292648 - DNA, 25 bp, Probe Sequence
tctttggcctcacataaactacact

SEQ ID NO: 292649 - DNA, 25 bp, Probe Sequence
tctcgtggcccacaggaaagatcct

SEQ ID NO: 292650 - DNA, 25 bp, Probe Sequence
tctcgtccacgaggggagaaaccta

SEQ ID NO: 292651 - DNA, 25 bp, Probe Sequence
tctttccggaggctaacagacctgg

SEQ ID NO: 292652 - DNA, 25 bp, Probe Sequence
tctgttcgtgggccgaaagtacccg

SEQ ID NO: 292653 - DNA, 25 bp, Probe Sequence
tctgtccgtttgccggtcgtgggcg

SEQ ID NO: 292654 - DNA, 25 bp, Probe Sequence
tctggccctggtggggcttgtggag

SEQ ID NO: 292655 - DNA, 25 bp, Probe Sequence
tctggccctggtggggcttgtggag

SEQ ID NO: 292656 - DNA, 25 bp, Probe Sequence
tctggactggagatgtagatttggg

SEQ ID NO: 292657 - DNA, 25 bp, Probe Sequence
tcttggggagggagttctgggcctg

SEQ ID NO: 292658 - DNA, 25 bp, Probe Sequence
tcttggggagggagttctgggcctg

SEQ ID NO: 292659 - DNA, 25 bp, Probe Sequence
tctgttgcagagaggggtcctggag

SEQ ID NO: 292660 - DNA, 25 bp, Probe Sequence
tctgattccagcagagggaacgcta

SEQ ID NO: 292661 - DNA, 25 bp, Probe Sequence
tcattcccaggggcgacgtcgtaaa

SEQ ID NO: 292662 - DNA, 25 bp, Probe Sequence
tctctcccaaggcctgacaatggta

SEQ ID NO: 292663 - DNA, 25 bp, Probe Sequence
tctctcccaaggcctgacaatggta

SEQ ID NO: 292664 - DNA, 25 bp, Probe Sequence
tctgtcgacactgggctgaaatgcc

SEQ ID NO: 292665 - DNA, 25 bp, Probe Sequence
tctgtgggcaagcctgctctagagc

SEQ ID NO: 292666 - DNA, 25 bp, Probe Sequence
tctgggcctgaggtgctcagactgc

SEQ ID NO: 292667 - DNA, 25 bp, Probe Sequence
tcggtgcactgatcgctgccaatgc

SEQ ID NO: 292668 - DNA, 25 bp, Probe Sequence
tcggagccatcatcgcgccaaattt

SEQ ID NO: 292669 - DNA, 25 bp, Probe Sequence
tcggaggctaaggcaggagaatcgc

SEQ ID NO: 292670 - DNA, 25 bp, Probe Sequence
tcggaggtatccgagctggacacag

SEQ ID NO: 292671 - DNA, 25 bp, Probe Sequence
tcggattgaaagtgtggagacaggc

SEQ ID NO: 292672 - DNA, 25 bp, Probe Sequence
tctgagactgaaatgtggggatcca

SEQ ID NO: 292673 - DNA, 25 bp, Probe Sequence
tcgtgtctgactttgaggagctgcc

SEQ ID NO: 292674 - DNA, 25 bp, Probe Sequence
tctggtcaactggtggagattggct

SEQ ID NO: 292675 - DNA, 25 bp, Probe Sequence
tcgggaggctgaggcgagagatcgc

SEQ ID NO: 292676 - DNA, 25 bp, Probe Sequence
tcggtgctgcagatggccaagacgc

SEQ ID NO: 292677 - DNA, 25 bp, Probe Sequence
tcggccgctgtttgtacagacagcc

SEQ ID NO: 292678 - DNA, 25 bp, Probe Sequence
tcggagctcacctagtacagaccgc

SEQ ID NO: 292679 - DNA, 25 bp, Probe Sequence
tcggcaccacctagatgcatacatc

SEQ ID NO: 292680 - DNA, 25 bp, Probe Sequence
tctggacagcaccttggtgccagtg

SEQ ID NO: 292681 - DNA, 25 bp, Probe Sequence
tcggagcagagccatggcggctgct

SEQ ID NO: 292682 - DNA, 25 bp, Probe Sequence
tctgggcagtgcaggcggctgccag

SEQ ID NO: 292683 - DNA, 25 bp, Probe Sequence
tctgggaagagttcgctgtgccagt

SEQ ID NO: 292684 - DNA, 25 bp, Probe Sequence
tctgggaagtggtcagcgcatcctg

SEQ ID NO: 292685 - DNA, 25 bp, Probe Sequence
tctggaagagtttcctgacctactc

SEQ ID NO: 292686 - DNA, 25 bp, Probe Sequence
tctgagtacagtctctcaaccatcc

SEQ ID NO: 292687 - DNA, 25 bp, Probe Sequence
tctgttgaaatgctcaagacttcat

SEQ ID NO: 292688 - DNA, 25 bp, Probe Sequence
tctgtttactgccacaagcactgtg

SEQ ID NO: 292689 - DNA, 25 bp, Probe Sequence
tctgttatactccagccatttgctg

SEQ ID NO: 292690 - DNA, 25 bp, Probe Sequence
tcggtgtatgctccaccagttggag

SEQ ID NO: 292691 - DNA, 25 bp, Probe Sequence
tctggctgcaatgctgcgccagtta

SEQ ID NO: 292692 - DNA, 25 bp, Probe Sequence
tctgaccagtgcagcatccgttgat

SEQ ID NO: 292693 - DNA, 25 bp, Probe Sequence
tctgaggatcagcactgccagtgga

SEQ ID NO: 292694 - DNA, 25 bp, Probe Sequence
tctgaggatcagcactgccagtgga

SEQ ID NO: 292695 - DNA, 25 bp, Probe Sequence
tctgaggatcagcactgccagtgga

SEQ ID NO: 292696 - DNA, 25 bp, Probe Sequence
tctctgagatcgaacggactgtgaa

SEQ ID NO: 292697 - DNA, 25 bp, Probe Sequence
ttcacgcataaaggcagtcgtacat

SEQ ID NO: 292698 - DNA, 25 bp, Probe Sequence
tctcaactaacgcctacattacatt

SEQ ID NO: 292699 - DNA, 25 bp, Probe Sequence
tctaacatctacacttctctagctc

SEQ ID NO: 292700 - DNA, 25 bp, Probe Sequence
tctgtatttatcagcgatgcccctc

SEQ ID NO: 292701 - DNA, 25 bp, Probe Sequence
tctgtgcctattcagcaattcccta

SEQ ID NO: 292702 - DNA, 25 bp, Probe Sequence
tctgtgcctattcagcaattcccta

SEQ ID NO: 292703 - DNA, 25 bp, Probe Sequence
tctgtgcctattcagcaattcccta

SEQ ID NO: 292704 - DNA, 25 bp, Probe Sequence
tctgtcctcctaagaaatctgccca

SEQ ID NO: 292705 - DNA, 25 bp, Probe Sequence
tctgtccccagggagcagactgtgc

SEQ ID NO: 292706 - DNA, 25 bp, Probe Sequence
tctgtccagcagggggcagtaagtg

SEQ ID NO: 292707 - DNA, 25 bp, Probe Sequence
tctattcgggagtctgagtatagag

SEQ ID NO: 292708 - DNA, 25 bp, Probe Sequence
tctgaaggtggactctatgtatgca

SEQ ID NO: 292709 - DNA, 25 bp, Probe Sequence
tctgatgtgaatcttctgatgccga

SEQ ID NO: 292710 - DNA, 25 bp, Probe Sequence
tctgtgatgtatcatgatagtcaca

SEQ ID NO: 292711 - DNA, 25 bp, Probe Sequence
tctggtatatgcatgtcactgcatg

SEQ ID NO: 292712 - DNA, 25 bp, Probe Sequence
tctgactgagatgttgcctgatgga

SEQ ID NO: 292713 - DNA, 25 bp, Probe Sequence
tctgatcttgatgggggcactggcc

SEQ ID NO: 292714 - DNA, 25 bp, Probe Sequence
tctgatctgcagtagtgtggactag

SEQ ID NO: 292715 - DNA, 25 bp, Probe Sequence
tctgaggcagatgagcttacaagta

SEQ ID NO: 292716 - DNA, 25 bp, Probe Sequence
tctgaggcagatgagcttacaagta

SEQ ID NO: 292717 - DNA, 25 bp, Probe Sequence
tcgggagtctgagtatagagagaat

SEQ ID NO: 292718 - DNA, 25 bp, Probe Sequence
tctgtgtgcgtcatgttcaccaact

SEQ ID NO: 292719 - DNA, 25 bp, Probe Sequence
tctgttgagatttttccctcacctt

SEQ ID NO: 292720 - DNA, 25 bp, Probe Sequence
tctggcatgtgattatttacttcaa

SEQ ID NO: 292721 - DNA, 25 bp, Probe Sequence
tctggcgcgaacactggaatgcata

SEQ ID NO: 292722 - DNA, 25 bp, Probe Sequence
tctggccttacagcattattgcaag

SEQ ID NO: 292723 - DNA, 25 bp, Probe Sequence
tctggcctggaactggtgttaagcc

SEQ ID NO: 292724 - DNA, 25 bp, Probe Sequence
tctggccaggcatggtggcttacgc

SEQ ID NO: 292725 - DNA, 25 bp, Probe Sequence
tctggccaggcacgatggctcatgc

SEQ ID NO: 292726 - DNA, 25 bp, Probe Sequence
tctgtctcaggcagggcatcattca

SEQ ID NO: 292727 - DNA, 25 bp, Probe Sequence
tctgtgctcaaaagactgccttctc

SEQ ID NO: 292728 - DNA, 25 bp, Probe Sequence
tctggctgaaattatcatccttgtg

SEQ ID NO: 292729 - DNA, 25 bp, Probe Sequence
tctggcgacagttttccttctcatc

SEQ ID NO: 292730 - DNA, 25 bp, Probe Sequence
tctgggatcaaaggctctttcctct

SEQ ID NO: 292731 - DNA, 25 bp, Probe Sequence
tctgggtcagagagctctggtctgt

SEQ ID NO: 292732 - DNA, 25 bp, Probe Sequence
tctggactgcaacggtcttcttgtg

SEQ ID NO: 292733 - DNA, 25 bp, Probe Sequence
tctggatcgacacgggcatccattc

SEQ ID NO: 292734 - DNA, 25 bp, Probe Sequence
tctggatctgggcagtcagcactct

SEQ ID NO: 292735 - DNA, 25 bp, Probe Sequence
tctggatctgggcagtcagcactct

SEQ ID NO: 292736 - DNA, 25 bp, Probe Sequence
tctggcatctggtaggcatcacgag

SEQ ID NO: 292737 - DNA, 25 bp, Probe Sequence
tctgtgtcctgaagtcgccagagga

SEQ ID NO: 292738 - DNA, 25 bp, Probe Sequence
tctggaggctgtatggccgcagcac

SEQ ID NO: 292739 - DNA, 25 bp, Probe Sequence
tctggaggtctttggctggacatca

SEQ ID NO: 292740 - DNA, 25 bp, Probe Sequence
tctgaggtgtacaaggctgtagctg

SEQ ID NO: 292741 - DNA, 25 bp, Probe Sequence
tctgtaattcattgagcagttagct

SEQ ID NO: 292742 - DNA, 25 bp, Probe Sequence
tctgtcaaatgctatggttttctta

SEQ ID NO: 292743 - DNA, 25 bp, Probe Sequence
tctggctgccacttggttatgttgt

SEQ ID NO: 292744 - DNA, 25 bp, Probe Sequence
tcggtgccacgcatcttcatgaagg

SEQ ID NO: 292745 - DNA, 25 bp, Probe Sequence
tctgggcacccattctgtacaggga

SEQ ID NO: 292746 - DNA, 25 bp, Probe Sequence
tctgggacgctcagctgatgtccgg

SEQ ID NO: 292747 - DNA, 25 bp, Probe Sequence
tctgggacgctcagctgatgtccgg

SEQ ID NO: 292748 - DNA, 25 bp, Probe Sequence
tctggaggcgctcctatgatgtccc

SEQ ID NO: 292749 - DNA, 25 bp, Probe Sequence
tctgtaaggctgcctgaggggcctg

SEQ ID NO: 292750 - DNA, 25 bp, Probe Sequence
tctggaggtgagcgagcgggtgcgg

SEQ ID NO: 292751 - DNA, 25 bp, Probe Sequence
tctggagggacctcggagtcgcagg

SEQ ID NO: 292752 - DNA, 25 bp, Probe Sequence
tctgaggttccctcatggagctcca

SEQ ID NO: 292753 - DNA, 25 bp, Probe Sequence
tctgaggttactgtacccatccctc

SEQ ID NO: 292754 - DNA, 25 bp, Probe Sequence
tctgagtgtctatgttaacttccct

SEQ ID NO: 292755 - DNA, 25 bp, Probe Sequence
tcggtgtgtaaggtggcctattcct

SEQ ID NO: 292756 - DNA, 25 bp, Probe Sequence
tatggttatggaggtctgactaggc

SEQ ID NO: 292757 - DNA, 25 bp, Probe Sequence
tctgtttcaggagctcttctaggta

SEQ ID NO: 292758 - DNA, 25 bp, Probe Sequence
tctgtttcaggagctcttctaggta

SEQ ID NO: 292759 - DNA, 25 bp, Probe Sequence
tctgtttaaagttgttctggttgat

SEQ ID NO: 292760 - DNA, 25 bp, Probe Sequence
tatggattcaattaagtttggtaga

SEQ ID NO: 292761 - DNA, 25 bp, Probe Sequence
tctggattgcaattttgtttaggaa

SEQ ID NO: 292762 - DNA, 25 bp, Probe Sequence
tctgtatttacctgatgctctaaaa

SEQ ID NO: 292763 - DNA, 25 bp, Probe Sequence
tctgtttaatctgatgacttaatga

SEQ ID NO: 292764 - DNA, 25 bp, Probe Sequence
tctggtaaatatctactgtttgcca

SEQ ID NO: 292765 - DNA, 25 bp, Probe Sequence
tctggtataccacaaatgattcatg

SEQ ID NO: 292766 - DNA, 25 bp, Probe Sequence
tctgttgaagccatacaatgttcta

SEQ ID NO: 292767 - DNA, 25 bp, Probe Sequence
tctgttgtatctctagtcagttcag

SEQ ID NO: 292768 - DNA, 25 bp, Probe Sequence
ttatttttcctagagtcaaccaaag

SEQ ID NO: 292769 - DNA, 25 bp, Probe Sequence
tttttagccctcaggttaccaagat

SEQ ID NO: 292770 - DNA, 25 bp, Probe Sequence
ttggttagccccagacttgggctag

SEQ ID NO: 292771 - DNA, 25 bp, Probe Sequence
tctcgtaatgcctcttgacttgggc

SEQ ID NO: 292772 - DNA, 25 bp, Probe Sequence
tctcctgaacctttaggcttgtctc

SEQ ID NO: 292773 - DNA, 25 bp, Probe Sequence
tctccaaactctataccttgatttc

SEQ ID NO: 292774 - DNA, 25 bp, Probe Sequence
tctaagtacctttcctacattttct

SEQ ID NO: 292775 - DNA, 25 bp, Probe Sequence
tctagggacctttatgtcctatttg

SEQ ID NO: 292776 - DNA, 25 bp, Probe Sequence
tctagggtgggtttacagctttttg

SEQ ID NO: 292777 - DNA, 25 bp, Probe Sequence
tctactggcaggaaatctacgtatt

SEQ ID NO: 292778 - DNA, 25 bp, Probe Sequence
tcttcggggagaagagccgaatgta

SEQ ID NO: 292779 - DNA, 25 bp, Probe Sequence
tctccaggggaaagagccaccctct

SEQ ID NO: 292780 - DNA, 25 bp, Probe Sequence
tctccagggtgcatggactaggacc

SEQ ID NO: 292781 - DNA, 25 bp, Probe Sequence
tctgccggccacataacatttgcac

SEQ ID NO: 292782 - DNA, 25 bp, Probe Sequence
tctccagtgcctctactacgtgagg

SEQ ID NO: 292783 - DNA, 25 bp, Probe Sequence
tctcccggctggcaatgtggtgaag

SEQ ID NO: 292784 - DNA, 25 bp, Probe Sequence
tctcccagacaccggcgtgggaatg

SEQ ID NO: 292785 - DNA, 25 bp, Probe Sequence
tctgtccgagacagccgggaggagc

SEQ ID NO: 292786 - DNA, 25 bp, Probe Sequence
tctcatcgggacagcccgtgcagaa

SEQ ID NO: 292787 - DNA, 25 bp, Probe Sequence
tcatgaagggcgcgacccgcgaata

SEQ ID NO: 292788 - DNA, 25 bp, Probe Sequence
tctgcaacgggctaatccacggaat

SEQ ID NO: 292789 - DNA, 25 bp, Probe Sequence
tctggcctggaggctatccagcgta

SEQ ID NO: 292790 - DNA, 25 bp, Probe Sequence
tctgggtgagaggctacagtgtgta

SEQ ID NO: 292791 - DNA, 25 bp, Probe Sequence
tctgggtatgaggctaccttccttg

SEQ ID NO: 292792 - DNA, 25 bp, Probe Sequence
tctgccgtctgaggttttatacttc

SEQ ID NO: 292793 - DNA, 25 bp, Probe Sequence
tctgcaaccatgtgtgtcctataat

SEQ ID NO: 292794 - DNA, 25 bp, Probe Sequence
tctgacgtatgttagtctcttaatt

SEQ ID NO: 292795 - DNA, 25 bp, Probe Sequence
tctgaagctaggtacaccttagttc

SEQ ID NO: 292796 - DNA, 25 bp, Probe Sequence
tcggagcatgaagaccctggagttc

SEQ ID NO: 292797 - DNA, 25 bp, Probe Sequence
tcttactgacagcaaccaggaattt

SEQ ID NO: 292798 - DNA, 25 bp, Probe Sequence
tctgtgattacacacacgagccacc

SEQ ID NO: 292799 - DNA, 25 bp, Probe Sequence
tctgtgctctaataacgatgtatat

SEQ ID NO: 292800 - DNA, 25 bp, Probe Sequence
tctggctctacgacacacttaatac

SEQ ID NO: 292801 - DNA, 25 bp, Probe Sequence
tctccagctgaaatcccattgaaat

SEQ ID NO: 292802 - DNA, 25 bp, Probe Sequence
tctgcaagtatgtctacaaatggaa

SEQ ID NO: 292803 - DNA, 25 bp, Probe Sequence
tctgcaaagctggtgccgttgagaa

SEQ ID NO: 292804 - DNA, 25 bp, Probe Sequence
tctgcccagtgggtcttggcataag

SEQ ID NO: 292805 - DNA, 25 bp, Probe Sequence
tctggtcattggtgctgttcaacag

SEQ ID NO: 292806 - DNA, 25 bp, Probe Sequence
tctggacttgagtgtgtttgctctt

SEQ ID NO: 292807 - DNA, 25 bp, Probe Sequence
tctggagtctggatgttgctctcta

SEQ ID NO: 292808 - DNA, 25 bp, Probe Sequence
tctgaggtgataaatgttgtttcaa

SEQ ID NO: 292809 - DNA, 25 bp, Probe Sequence
tctcatgggcatattttgtttttga

SEQ ID NO: 292810 - DNA, 25 bp, Probe Sequence
tctggtagctacctcatttttctat

SEQ ID NO: 292811 - DNA, 25 bp, Probe Sequence
tctgggcagaagcttatcttttttg

SEQ ID NO: 292812 - DNA, 25 bp, Probe Sequence
tctggaggagatttgctttcttttt

SEQ ID NO: 292813 - DNA, 25 bp, Probe Sequence
tctacagtgatttgtgggttttttt

SEQ ID NO: 292814 - DNA, 25 bp, Probe Sequence
tctcatttatacgtgggagctaatc

SEQ ID NO: 292815 - DNA, 25 bp, Probe Sequence
tctcattcttgccctggagttaata

SEQ ID NO: 292816 - DNA, 25 bp, Probe Sequence
tctggtgttgctgcgtggggagaac

SEQ ID NO: 292817 - DNA, 25 bp, Probe Sequence
tctgtgtctggtgggtatggacaga

SEQ ID NO: 292818 - DNA, 25 bp, Probe Sequence
tctgtgcattgctgcggttggtcaa

SEQ ID NO: 292819 - DNA, 25 bp, Probe Sequence
tctgtgctactactgtgctaggtcc

SEQ ID NO: 292820 - DNA, 25 bp, Probe Sequence
tctggcatctctttctgcaaaggca

SEQ ID NO: 292821 - DNA, 25 bp, Probe Sequence
tctgatgactcatcactgcccaagg

SEQ ID NO: 292822 - DNA, 25 bp, Probe Sequence
tctgcattccaaacagcatcctacc

SEQ ID NO: 292823 - DNA, 25 bp, Probe Sequence
tctgagtcctcaaagaccaggccgt

SEQ ID NO: 292824 - DNA, 25 bp, Probe Sequence
tcggtgccagcagagaccagcaggc

SEQ ID NO: 292825 - DNA, 25 bp, Probe Sequence
tcggctgctacagcgtgacgctggc

SEQ ID NO: 292826 - DNA, 25 bp, Probe Sequence
tctggtctgccaggtgaacggtgcc

SEQ ID NO: 292827 - DNA, 25 bp, Probe Sequence
tctggcttgactggatggaaggaga

SEQ ID NO: 292828 - DNA, 25 bp, Probe Sequence
tctggcttcctggtagagggcggca

SEQ ID NO: 292829 - DNA, 25 bp, Probe Sequence
tctggccccgtggagtggagcaggc

SEQ ID NO: 292830 - DNA, 25 bp, Probe Sequence
tctggaccctgagagctgaatgagg

SEQ ID NO: 292831 - DNA, 25 bp, Probe Sequence
tcggccaccatgtcgcaagaatgat

SEQ ID NO: 292832 - DNA, 25 bp, Probe Sequence
tctggtcagacatcgctggaaatga

SEQ ID NO: 292833 - DNA, 25 bp, Probe Sequence
tctggcaacaagtcctggatcctgc

SEQ ID NO: 292834 - DNA, 25 bp, Probe Sequence
tctggcaacaagtcctggatcctgc

SEQ ID NO: 292835 - DNA, 25 bp, Probe Sequence
tctgtgcacaaatccatcaaccgtt

SEQ ID NO: 292836 - DNA, 25 bp, Probe Sequence
tctgagccaacatctatccagcagc

SEQ ID NO: 292837 - DNA, 25 bp, Probe Sequence
tctggagcagaatttatcacacaca

SEQ ID NO: 292838 - DNA, 25 bp, Probe Sequence
tctgagggggatacattcaaagacc

SEQ ID NO: 292839 - DNA, 25 bp, Probe Sequence
tctgaggatagcatatttcatataa

SEQ ID NO: 292840 - DNA, 25 bp, Probe Sequence
tcggccacctacattgcagaagagt

SEQ ID NO: 292841 - DNA, 25 bp, Probe Sequence
tcggcctcctgggttcaaatgattc

SEQ ID NO: 292842 - DNA, 25 bp, Probe Sequence
tctggaccttgaccttcagaacttc

SEQ ID NO: 292843 - DNA, 25 bp, Probe Sequence
tcggctaatgttctgagaaacttct

SEQ ID NO: 292844 - DNA, 25 bp, Probe Sequence
tctgggtatcttcctgggaggtctt

SEQ ID NO: 292845 - DNA, 25 bp, Probe Sequence
tctgtggtacttgctgagagaaaag

SEQ ID NO: 292846 - DNA, 25 bp, Probe Sequence
tctggtgtcactctctaaatgacca

SEQ ID NO: 292847 - DNA, 25 bp, Probe Sequence
tctggagctactcctgctacaatcc

SEQ ID NO: 292848 - DNA, 25 bp, Probe Sequence
tctgggtccttctatgcagcagact

SEQ ID NO: 292849 - DNA, 25 bp, Probe Sequence
tctggtgctgacatcaagagaagct

SEQ ID NO: 292850 - DNA, 25 bp, Probe Sequence
tctggtgctgacatcaagagaagct

SEQ ID NO: 292851 - DNA, 25 bp, Probe Sequence
tctgcgcggcatatgcacacgaact

SEQ ID NO: 292852 - DNA, 25 bp, Probe Sequence
tctgtctggatttgcctgcagagtt

SEQ ID NO: 292853 - DNA, 25 bp, Probe Sequence
tctgtgcgtgatgagtgctgcggcc

SEQ ID NO: 292854 - DNA, 25 bp, Probe Sequence
tctggagctgtggttgctgctgtga

SEQ ID NO: 292855 - DNA, 25 bp, Probe Sequence
tctgtagcctggtctgtgcattgtg

SEQ ID NO: 292856 - DNA, 25 bp, Probe Sequence
tctgatgagcacctccttttgtgca

SEQ ID NO: 292857 - DNA, 25 bp, Probe Sequence
tctgaaaatccctttttctggtgga

SEQ ID NO: 292858 - DNA, 25 bp, Probe Sequence
tctgaaaatccagtcccttctttgg

SEQ ID NO: 292859 - DNA, 25 bp, Probe Sequence
tctgattaagccctggcctcttgat

SEQ ID NO: 292860 - DNA, 25 bp, Probe Sequence
tctgattgggtcagctggcttccta

SEQ ID NO: 292861 - DNA, 25 bp, Probe Sequence
tctgaagggatctcgtgtttgctga

SEQ ID NO: 292862 - DNA, 25 bp, Probe Sequence
tctgtagaggccactgtgtttctag

SEQ ID NO: 292863 - DNA, 25 bp, Probe Sequence
tctgtaggaccaacttctctgatca

SEQ ID NO: 292864 - DNA, 25 bp, Probe Sequence
tctgaagaacacactctcctgtatt

SEQ ID NO: 292865 - DNA, 25 bp, Probe Sequence
tctgcttgaaaccttccctgaatag

SEQ ID NO: 292866 - DNA, 25 bp, Probe Sequence
tctgttactcagctttcctagagcc

SEQ ID NO: 292867 - DNA, 25 bp, Probe Sequence
tctgtgtttcagctaatctctcgga

SEQ ID NO: 292868 - DNA, 25 bp, Probe Sequence
tctgtcttgtaaaccacattcttga

SEQ ID NO: 292869 - DNA, 25 bp, Probe Sequence
tctggcttatagtctcttcattcta

SEQ ID NO: 292870 - DNA, 25 bp, Probe Sequence
tctggctctaattcacagtgctctt

SEQ ID NO: 292871 - DNA, 25 bp, Probe Sequence
tctcaagtcaagtcactggtctgtt

SEQ ID NO: 292872 - DNA, 25 bp, Probe Sequence
tctgaagtcaaccactacttttccc

SEQ ID NO: 292873 - DNA, 25 bp, Probe Sequence
tctggagaacaccattcctgatttc

SEQ ID NO: 292874 - DNA, 25 bp, Probe Sequence
tctgtgaaatatccttccattgttt

SEQ ID NO: 292875 - DNA, 25 bp, Probe Sequence
tctgggtgttacctgctcatttgtt

SEQ ID NO: 292876 - DNA, 25 bp, Probe Sequence
tctgaggttttatttcatttttcaa

SEQ ID NO: 292877 - DNA, 25 bp, Probe Sequence
tctgagttttaacatcacttcttcc

SEQ ID NO: 292878 - DNA, 25 bp, Probe Sequence
tctgggtctcaatcgataattttca

SEQ ID NO: 292879 - DNA, 25 bp, Probe Sequence
tctgcattttcttggagaaatttaa

SEQ ID NO: 292880 - DNA, 25 bp, Probe Sequence
tctgcatccttccaaccaaatttga

SEQ ID NO: 292881 - DNA, 25 bp, Probe Sequence
tctgtgctcttggccacttaattta

SEQ ID NO: 292882 - DNA, 25 bp, Probe Sequence
tctggtttgttctttcatgtttaaa

SEQ ID NO: 292883 - DNA, 25 bp, Probe Sequence
tctggtactttgtatctcagttaaa

SEQ ID NO: 292884 - DNA, 25 bp, Probe Sequence
tctcgtatctgccatgagttcaatt

SEQ ID NO: 292885 - DNA, 25 bp, Probe Sequence
tctgcagtatctggcttgtccatct

SEQ ID NO: 292886 - DNA, 25 bp, Probe Sequence
tctgggatgcaggcatgcttctcac

SEQ ID NO: 292887 - DNA, 25 bp, Probe Sequence
tctggagagcctggtgcttcacgat

SEQ ID NO: 292888 - DNA, 25 bp, Probe Sequence
tctgggatgcctggctgctggagta

SEQ ID NO: 292889 - DNA, 25 bp, Probe Sequence
tctgggatgcctggctgctggagta

SEQ ID NO: 292890 - DNA, 25 bp, Probe Sequence
tctggagaccttgctggcagtgcta

SEQ ID NO: 292891 - DNA, 25 bp, Probe Sequence
tctggggtctgtctgtcagtgcaat

SEQ ID NO: 292892 - DNA, 25 bp, Probe Sequence
tctgctggagtcagacgtcagactt

SEQ ID NO: 292893 - DNA, 25 bp, Probe Sequence
tctcggcggaagtgatcgctgtgtg

SEQ ID NO: 292894 - DNA, 25 bp, Probe Sequence
tctgcagtctggtgtagacactgga

SEQ ID NO: 292895 - DNA, 25 bp, Probe Sequence
tctgactctagatgggacacttgac

SEQ ID NO: 292896 - DNA, 25 bp, Probe Sequence
tctggttcaagagggaattcccctt

SEQ ID NO: 292897 - DNA, 25 bp, Probe Sequence
tctgtttcaaactaaagctcccacc

SEQ ID NO: 292898 - DNA, 25 bp, Probe Sequence
tctgggtcaagctttcatcagcccc

SEQ ID NO: 292899 - DNA, 25 bp, Probe Sequence
tctgtgtgtagacattgtattccac

SEQ ID NO: 292900 - DNA, 25 bp, Probe Sequence
tctgaatctagacatcgccattccc

SEQ ID NO: 292901 - DNA, 25 bp, Probe Sequence
tctgtattcatgagatcacactgcc

SEQ ID NO: 292902 - DNA, 25 bp, Probe Sequence
tctgtagctcaggagagcacccctc

SEQ ID NO: 292903 - DNA, 25 bp, Probe Sequence
tctgctgagatctcagagcctgccc

SEQ ID NO: 292904 - DNA, 25 bp, Probe Sequence
tctgagcatatgttccatgcctgcc

SEQ ID NO: 292905 - DNA, 25 bp, Probe Sequence
tctgagcttgcaatgccgccaagcg

SEQ ID NO: 292906 - DNA, 25 bp, Probe Sequence
tctggtctcggccgcagaagcgaga

SEQ ID NO: 292907 - DNA, 25 bp, Probe Sequence
tctggccttctgatgcaaatgcaaa

SEQ ID NO: 292908 - DNA, 25 bp, Probe Sequence
tctggcgtggtgaccaagatgaaga

SEQ ID NO: 292909 - DNA, 25 bp, Probe Sequence
tcggcagctgctgtagcgaagagag

SEQ ID NO: 292910 - DNA, 25 bp, Probe Sequence
tcggcgctgcctacggaggtggcag

SEQ ID NO: 292911 - DNA, 25 bp, Probe Sequence
tctgagctgggcttcagcaggtgtg

SEQ ID NO: 292912 - DNA, 25 bp, Probe Sequence
tctgcctaggcaacatcatgagatc

SEQ ID NO: 292913 - DNA, 25 bp, Probe Sequence
tctggcatcaggctgcttggacatg

SEQ ID NO: 292914 - DNA, 25 bp, Probe Sequence
tctggtcagagccacagggtctgcc

SEQ ID NO: 292915 - DNA, 25 bp, Probe Sequence
tctggctcacaggaaagtgtctgca

SEQ ID NO: 292916 - DNA, 25 bp, Probe Sequence
tcggctcagccgggcagtttgagga

SEQ ID NO: 292917 - DNA, 25 bp, Probe Sequence
tctagtacccagtccatgttcaaat

SEQ ID NO: 292918 - DNA, 25 bp, Probe Sequence
tctgagtatcaggcaagcgcatctt

SEQ ID NO: 292919 - DNA, 25 bp, Probe Sequence
tctctgtctcaggcagggcatcatt

SEQ ID NO: 292920 - DNA, 25 bp, Probe Sequence
tctgcagcctcaggagcgagacttc

SEQ ID NO: 292921 - DNA, 25 bp, Probe Sequence
tctgcgcgcagtgggcgagatctca

SEQ ID NO: 292922 - DNA, 25 bp, Probe Sequence
tctgcacggtacctgagatcctggt

SEQ ID NO: 292923 - DNA, 25 bp, Probe Sequence
tctcctagacccgtgacctgagatg

SEQ ID NO: 292924 - DNA, 25 bp, Probe Sequence
tctcctagacccgtgacctgagatg

SEQ ID NO: 292925 - DNA, 25 bp, Probe Sequence
tctcctagacccgtgacctgagatg

SEQ ID NO: 292926 - DNA, 25 bp, Probe Sequence
ttccagaatcccagatccgggctac

SEQ ID NO: 292927 - DNA, 25 bp, Probe Sequence
tctcggaaacacagagccaggaata

SEQ ID NO: 292928 - DNA, 25 bp, Probe Sequence
ttcggaaaagaatgaccagcaaaag

SEQ ID NO: 292929 - DNA, 25 bp, Probe Sequence
tctagagaaaagttatacccaggtc

SEQ ID NO: 292930 - DNA, 25 bp, Probe Sequence
tctaagtcaaaatttcccaagtgaa

SEQ ID NO: 292931 - DNA, 25 bp, Probe Sequence
tctggagtcagatcaagtccgcagg

SEQ ID NO: 292932 - DNA, 25 bp, Probe Sequence
tctggcagtcagagacagccgggcg

SEQ ID NO: 292933 - DNA, 25 bp, Probe Sequence
tctgagctgttcagactgtcgggcg

SEQ ID NO: 292934 - DNA, 25 bp, Probe Sequence
tctggtatgtctcatttctcagcct

SEQ ID NO: 292935 - DNA, 25 bp, Probe Sequence
tctgcagaaattgagttccagcctc

SEQ ID NO: 292936 - DNA, 25 bp, Probe Sequence
tctggaactctctgggctcagacta

SEQ ID NO: 292937 - DNA, 25 bp, Probe Sequence
tctggattccatttgggtcagcctg

SEQ ID NO: 292938 - DNA, 25 bp, Probe Sequence
tctggatataacttgggcacctcct

SEQ ID NO: 292939 - DNA, 25 bp, Probe Sequence
tctgtaagcaacgggaacacctgct

SEQ ID NO: 292940 - DNA, 25 bp, Probe Sequence
tctgatggatgacctctgtgaagca

SEQ ID NO: 292941 - DNA, 25 bp, Probe Sequence
tctgagggactcttctgcatattgc

SEQ ID NO: 292942 - DNA, 25 bp, Probe Sequence
tctggtaggctggtcagctacatgc

SEQ ID NO: 292943 - DNA, 25 bp, Probe Sequence
tctgttgatgtggtgtaatacactg

SEQ ID NO: 292944 - DNA, 25 bp, Probe Sequence
tctgtggtggtgttataatacggga

SEQ ID NO: 292945 - DNA, 25 bp, Probe Sequence
tctgataaggcttttactgacccca

SEQ ID NO: 292946 - DNA, 25 bp, Probe Sequence
tctaaacgctaatccaagcctcacc

SEQ ID NO: 292947 - DNA, 25 bp, Probe Sequence
tctaacggctactgaaacacccact

SEQ ID NO: 292948 - DNA, 25 bp, Probe Sequence
tctgttacctgatttgaaacccctc

SEQ ID NO: 292949 - DNA, 25 bp, Probe Sequence
tctgttctcctttgaagaacccctc

SEQ ID NO: 292950 - DNA, 25 bp, Probe Sequence
tctgtttctagttgaggagtttcct

SEQ ID NO: 292951 - DNA, 25 bp, Probe Sequence
tctgtttctagttgaggagtttcct

SEQ ID NO: 292952 - DNA, 25 bp, Probe Sequence
tctgcttcctataccaggttgttcc

SEQ ID NO: 292953 - DNA, 25 bp, Probe Sequence
tctgggcatctactccgtgttgccc

SEQ ID NO: 292954 - DNA, 25 bp, Probe Sequence
tctgggcactgagttcagtcggccc

SEQ ID NO: 292955 - DNA, 25 bp, Probe Sequence
tctgtggaggaggccatactcccct

SEQ ID NO: 292956 - DNA, 25 bp, Probe Sequence
tctgtggaggaggccatactcccct

SEQ ID NO: 292957 - DNA, 25 bp, Probe Sequence
tctctgggggcccataataccaccc

SEQ ID NO: 292958 - DNA, 25 bp, Probe Sequence
tcatcggcgagtgggtaaaggcagc

SEQ ID NO: 292959 - DNA, 25 bp, Probe Sequence
tctgggctaggcctcttagagcctg

SEQ ID NO: 292960 - DNA, 25 bp, Probe Sequence
tctgccctagagttgttcacagcct

SEQ ID NO: 292961 - DNA, 25 bp, Probe Sequence
tctggcctgaggtattgtgaagatt

SEQ ID NO: 292962 - DNA, 25 bp, Probe Sequence
tctgtgcctgggctgggaagactca

SEQ ID NO: 292963 - DNA, 25 bp, Probe Sequence
tctctgcaccgtactgtggaaaaga

SEQ ID NO: 292964 - DNA, 25 bp, Probe Sequence
tctctgagcagtcagggtgggaaga

SEQ ID NO: 292965 - DNA, 25 bp, Probe Sequence
ttgcagatgcgtccgaagggaaata

SEQ ID NO: 292966 - DNA, 25 bp, Probe Sequence
tcaacatgctggtgaaggtgaaagg

SEQ ID NO: 292967 - DNA, 25 bp, Probe Sequence
tctgagcactggtataagatgtgag

SEQ ID NO: 292968 - DNA, 25 bp, Probe Sequence
tctgttcagctgttaatgctgggat

SEQ ID NO: 292969 - DNA, 25 bp, Probe Sequence
tctgtgtgactgatgggcagggctc

SEQ ID NO: 292970 - DNA, 25 bp, Probe Sequence
tctgcaggactgacggagaccctca

SEQ ID NO: 292971 - DNA, 25 bp, Probe Sequence
tctgggcagtgaaatcagaccttca

SEQ ID NO: 292972 - DNA, 25 bp, Probe Sequence
tctgggagatgtgcatccctcttct

SEQ ID NO: 292973 - DNA, 25 bp, Probe Sequence
tctggatgagttggtcctttcagct

SEQ ID NO: 292974 - DNA, 25 bp, Probe Sequence
tctgcaatagttggatttatctacg

SEQ ID NO: 292975 - DNA, 25 bp, Probe Sequence
tctggcgaggtcatttactgagtgc

SEQ ID NO: 292976 - DNA, 25 bp, Probe Sequence
tctggacatggccctttacatagtg

SEQ ID NO: 292977 - DNA, 25 bp, Probe Sequence
tctgaaattccttttgacacctgca

SEQ ID NO: 292978 - DNA, 25 bp, Probe Sequence
tctaagatccttgttgacgctctgc

SEQ ID NO: 292979 - DNA, 25 bp, Probe Sequence
tctgaagtccttgcaagacgctgat

SEQ ID NO: 292980 - DNA, 25 bp, Probe Sequence
tctgaacagtttaagcagactggct

SEQ ID NO: 292981 - DNA, 25 bp, Probe Sequence
tctgaacattgttaacacatcccta

SEQ ID NO: 292982 - DNA, 25 bp, Probe Sequence
tctgagccttgcaaaacctgcacaa

SEQ ID NO: 292983 - DNA, 25 bp, Probe Sequence
tctgagcagcagctggaccctcaac

SEQ ID NO: 292984 - DNA, 25 bp, Probe Sequence
tctgtaacgttaccctcaacaggga

SEQ ID NO: 292985 - DNA, 25 bp, Probe Sequence
tcattaattttgatttcaaatggaa

SEQ ID NO: 292986 - DNA, 25 bp, Probe Sequence
tctgtaatgtcaagaatttaagaat

SEQ ID NO: 292987 - DNA, 25 bp, Probe Sequence
agttctattgacattcctcaagata

SEQ ID NO: 292988 - DNA, 25 bp, Probe Sequence
tctgtgtttcattaggcattcatcc

SEQ ID NO: 292989 - DNA, 25 bp, Probe Sequence
tctggtttgctgtatgaccttgcac

SEQ ID NO: 292990 - DNA, 25 bp, Probe Sequence
tctgttaactgaatgccactctgta

SEQ ID NO: 292991 - DNA, 25 bp, Probe Sequence
tctgttaactgaatgccactctgta

SEQ ID NO: 292992 - DNA, 25 bp, Probe Sequence
tctgttaactgaataccactctgta

SEQ ID NO: 292993 - DNA, 25 bp, Probe Sequence
tctgttaataaattgccttcatgta

SEQ ID NO: 292994 - DNA, 25 bp, Probe Sequence
tctgcttccatatatttcccagtca

SEQ ID NO: 292995 - DNA, 25 bp, Probe Sequence
tcttttaatttaacccagtcagaca

SEQ ID NO: 292996 - DNA, 25 bp, Probe Sequence
tctgactccaatttaaaccaggaaa

SEQ ID NO: 292997 - DNA, 25 bp, Probe Sequence
tctgacctccattaatgtaagaaaa

SEQ ID NO: 292998 - DNA, 25 bp, Probe Sequence
tctggctttcataagtagtaaaaat

SEQ ID NO: 292999 - DNA, 25 bp, Probe Sequence
tctgtgttcttaaataggcaattta

SEQ ID NO: 293000 - DNA, 25 bp, Probe Sequence
tctgcaggtcagtaaaaggatttaa

SEQ ID NO: 293001 - DNA, 25 bp, Probe Sequence
tctgggtaccagattgtatttagag

SEQ ID NO: 293002 - DNA, 25 bp, Probe Sequence
tctgcggtaccttattgtacctaag

SEQ ID NO: 293003 - DNA, 25 bp, Probe Sequence
tctgctcttttcttttaaccaatag

SEQ ID NO: 293004 - DNA, 25 bp, Probe Sequence
tctgtttttctcagtatcctctact

SEQ ID NO: 293005 - DNA, 25 bp, Probe Sequence
tctgttttattctgggtcatctata

SEQ ID NO: 293006 - DNA, 25 bp, Probe Sequence
tctggttctttattgggttatgtgt

SEQ ID NO: 293007 - DNA, 25 bp, Probe Sequence
tctggtgtcttggggaagctttgtt

SEQ ID NO: 293008 - DNA, 25 bp, Probe Sequence
tctggagtcagtcaggaggcacccc

SEQ ID NO: 293009 - DNA, 25 bp, Probe Sequence
tctgggataatgcaggggcgcgctc

SEQ ID NO: 293010 - DNA, 25 bp, Probe Sequence
tctggagaacgccaacgtgctggcc

SEQ ID NO: 293011 - DNA, 25 bp, Probe Sequence
tctgggattggcacactggcagagc

SEQ ID NO: 293012 - DNA, 25 bp, Probe Sequence
tctgctggggatggccactgtgaat

SEQ ID NO: 293013 - DNA, 25 bp, Probe Sequence
tctgtgggcagtagccctgtgtggc

SEQ ID NO: 293014 - DNA, 25 bp, Probe Sequence
tctgtgggcagtagccctgtgtggc

SEQ ID NO: 293015 - DNA, 25 bp, Probe Sequence
tctgtgggctgaactccgaggacac

SEQ ID NO: 293016 - DNA, 25 bp, Probe Sequence
tctgggcctgaagcaagagccagcc

SEQ ID NO: 293017 - DNA, 25 bp, Probe Sequence
tctggttctcaagaaaatcatcata

SEQ ID NO: 293018 - DNA, 25 bp, Probe Sequence
tctggtatctgcatgtaaaatcttc

SEQ ID NO: 293019 - DNA, 25 bp, Probe Sequence
tctggtatcctggcacaataatttt

SEQ ID NO: 293020 - DNA, 25 bp, Probe Sequence
tctgttaatctaacaatagactatt

SEQ ID NO: 293021 - DNA, 25 bp, Probe Sequence
tctgttattctgttacaatactata

SEQ ID NO: 293022 - DNA, 25 bp, Probe Sequence
tctgtcttcttgtatcaatatttga

SEQ ID NO: 293023 - DNA, 25 bp, Probe Sequence
tctgttgtcttctcaaattctgtag

SEQ ID NO: 293024 - DNA, 25 bp, Probe Sequence
tctgcttgtttaactagattgtaca

SEQ ID NO: 293025 - DNA, 25 bp, Probe Sequence
tctgcttgtttaactagattgtaca

SEQ ID NO: 293026 - DNA, 25 bp, Probe Sequence
tctggtgccttaacgcatggctgga

SEQ ID NO: 293027 - DNA, 25 bp, Probe Sequence
tctggatcctaaacctgcaatggaa

SEQ ID NO: 293028 - DNA, 25 bp, Probe Sequence
tctggatccctttctctgaatggag

SEQ ID NO: 293029 - DNA, 25 bp, Probe Sequence
tctggaccagcaattctgagctatg

SEQ ID NO: 293030 - DNA, 25 bp, Probe Sequence
tctggaccagatatctgtgctacta

SEQ ID NO: 293031 - DNA, 25 bp, Probe Sequence
tctgctccaagtcattgcttactac

SEQ ID NO: 293032 - DNA, 25 bp, Probe Sequence
tctgcaaaagctcttcttcctgaag

SEQ ID NO: 293033 - DNA, 25 bp, Probe Sequence
tctgacttggcacattctaccatca

SEQ ID NO: 293034 - DNA, 25 bp, Probe Sequence
tctgacattcggcttgatccatgtc

SEQ ID NO: 293035 - DNA, 25 bp, Probe Sequence
tctgaagtgtggttactgcacagta

SEQ ID NO: 293036 - DNA, 25 bp, Probe Sequence
tctgaagggcaggcctcatgcagca

SEQ ID NO: 293037 - DNA, 25 bp, Probe Sequence
tctgaagcgagcgtcttcgatgcct

SEQ ID NO: 293038 - DNA, 25 bp, Probe Sequence
tctgagagctgatgattctagtgcc

SEQ ID NO: 293039 - DNA, 25 bp, Probe Sequence
tctgagcctgaaatgctccactcct

SEQ ID NO: 293040 - DNA, 25 bp, Probe Sequence
tctgggctgatcttgtgccattctt

SEQ ID NO: 293041 - DNA, 25 bp, Probe Sequence
tctgggtgtcttggtcttttatttt

SEQ ID NO: 293042 - DNA, 25 bp, Probe Sequence
tctggttttgttactgttgtcatta

SEQ ID NO: 293043 - DNA, 25 bp, Probe Sequence
tctgattttctgtcttcttgtatca

SEQ ID NO: 293044 - DNA, 25 bp, Probe Sequence
tctgtaatgcaccactgtcgtttac

SEQ ID NO: 293045 - DNA, 25 bp, Probe Sequence
tctgtccatcagtgcatgacgttta

SEQ ID NO: 293046 - DNA, 25 bp, Probe Sequence
tctgtccaatgagcaggaagattct

SEQ ID NO: 293047 - DNA, 25 bp, Probe Sequence
tctgtgcaaaagcagtgagagatgc

SEQ ID NO: 293048 - DNA, 25 bp, Probe Sequence
tctggaaaacgcccagagatttaat

SEQ ID NO: 293049 - DNA, 25 bp, Probe Sequence
tctggaaatcaagccttgtttatta

SEQ ID NO: 293050 - DNA, 25 bp, Probe Sequence
tctgcgaaataagcctcatccttaa

SEQ ID NO: 293051 - DNA, 25 bp, Probe Sequence
tctccataaagagcttcagcagtta

SEQ ID NO: 293052 - DNA, 25 bp, Probe Sequence
tctggaaaagaggctgtaggcatct

SEQ ID NO: 293053 - DNA, 25 bp, Probe Sequence
tctgggaaatgcatctggaggctaa

SEQ ID NO: 293054 - DNA, 25 bp, Probe Sequence
tctggtacaagcaccttatctatca

SEQ ID NO: 293055 - DNA, 25 bp, Probe Sequence
tctgagttcacagtcttcttacttc

SEQ ID NO: 293056 - DNA, 25 bp, Probe Sequence
tctgcagattattcctttaacggcc

SEQ ID NO: 293057 - DNA, 25 bp, Probe Sequence
tctgatgcatttagccttcaaccct

SEQ ID NO: 293058 - DNA, 25 bp, Probe Sequence
tctggatgtttccttcatacattaa

SEQ ID NO: 293059 - DNA, 25 bp, Probe Sequence
tctggaggctgtatgcccacgtata

SEQ ID NO: 293060 - DNA, 25 bp, Probe Sequence
tctggaggctgttagctaacttgca

SEQ ID NO: 293061 - DNA, 25 bp, Probe Sequence
tctgaaatcagtaagataccttgag

SEQ ID NO: 293062 - DNA, 25 bp, Probe Sequence
tctgtaacatattgataaccattga

SEQ ID NO: 293063 - DNA, 25 bp, Probe Sequence
tctgctctacagatgaaagtcctga

SEQ ID NO: 293064 - DNA, 25 bp, Probe Sequence
tctccgaatttgtacttgctctggt

SEQ ID NO: 293065 - DNA, 25 bp, Probe Sequence
tctccttttctctagtatttgactg

SEQ ID NO: 293066 - DNA, 25 bp, Probe Sequence
tctccttttgcttgttagtattttc

SEQ ID NO: 293067 - DNA, 25 bp, Probe Sequence
tctccttttggtgtaatgttttaca

SEQ ID NO: 293068 - DNA, 25 bp, Probe Sequence
tctgtttttcgtttgcattgtcttt

SEQ ID NO: 293069 - DNA, 25 bp, Probe Sequence
tctgcatttttacctatgctaggct

SEQ ID NO: 293070 - DNA, 25 bp, Probe Sequence
tctgctttgttacaagctcccaggg

SEQ ID NO: 293071 - DNA, 25 bp, Probe Sequence
tctgcttttcttcaaggccaactga

SEQ ID NO: 293072 - DNA, 25 bp, Probe Sequence
tctgttcttttttgaggctcaggga

SEQ ID NO: 293073 - DNA, 25 bp, Probe Sequence
tctgttgattttgcaaatgctccag

SEQ ID NO: 293074 - DNA, 25 bp, Probe Sequence
tctgtggggtatgattatcaccaag

SEQ ID NO: 293075 - DNA, 25 bp, Probe Sequence
tctgtggatggaaacattacatgta

SEQ ID NO: 293076 - DNA, 25 bp, Probe Sequence
tctccctggatgagcaacacattac

SEQ ID NO: 293077 - DNA, 25 bp, Probe Sequence
tctgccctggtcgcataaatttgtc

SEQ ID NO: 293078 - DNA, 25 bp, Probe Sequence
tctggtctggtcggatgaacacgtg

SEQ ID NO: 293079 - DNA, 25 bp, Probe Sequence
ttagctgcgttcggggaaggttggg

SEQ ID NO: 293080 - DNA, 25 bp, Probe Sequence
tctgagctcactgaccggaaggtcc

SEQ ID NO: 293081 - DNA, 25 bp, Probe Sequence
tctgagccagattaacaggaatgaa

SEQ ID NO: 293082 - DNA, 25 bp, Probe Sequence
tctgggcgcaagcacagtgattgaa

SEQ ID NO: 293083 - DNA, 25 bp, Probe Sequence
tctgggcagttgtaccatgcattaa

SEQ ID NO: 293084 - DNA, 25 bp, Probe Sequence
tctggtctgttgtatctctagtcag

SEQ ID NO: 293085 - DNA, 25 bp, Probe Sequence
tctgttaggtcattcttgcattgct

SEQ ID NO: 293086 - DNA, 25 bp, Probe Sequence
tctgtcgcagcgactttgtcatcct

SEQ ID NO: 293087 - DNA, 25 bp, Probe Sequence
tctgcatgcagcagcactgacgtcc

SEQ ID NO: 293088 - DNA, 25 bp, Probe Sequence
tctgctgcaaagcctgaggacactg

SEQ ID NO: 293089 - DNA, 25 bp, Probe Sequence
tctcagagaagagtgctgggactgt

SEQ ID NO: 293090 - DNA, 25 bp, Probe Sequence
tctgcacgacgatgaggtgacagtc

SEQ ID NO: 293091 - DNA, 25 bp, Probe Sequence
tctgcctgtactgaagctgaaatgc

SEQ ID NO: 293092 - DNA, 25 bp, Probe Sequence
tctgccggacgcgagcagatgaacg

SEQ ID NO: 293093 - DNA, 25 bp, Probe Sequence
tctggggactcagggtgaagcgtgg

SEQ ID NO: 293094 - DNA, 25 bp, Probe Sequence
tctgtacgcccagggaaagcggcgt

SEQ ID NO: 293095 - DNA, 25 bp, Probe Sequence
tcttacaggcccaggactggagctt

SEQ ID NO: 293096 - DNA, 25 bp, Probe Sequence
tcttgaaggcccaccatgggccttg

SEQ ID NO: 293097 - DNA, 25 bp, Probe Sequence
tctgagaatggctctcccagaggcc

SEQ ID NO: 293098 - DNA, 25 bp, Probe Sequence
tctgaaagtggggcccggccagcac

SEQ ID NO: 293099 - DNA, 25 bp, Probe Sequence
tctgacaattgccaggcccaaacac

SEQ ID NO: 293100 - DNA, 25 bp, Probe Sequence
tctacaaagagaagctacaaacccc

SEQ ID NO: 293101 - DNA, 25 bp, Probe Sequence
tctccaaaggtaccttatccttcca

SEQ ID NO: 293102 - DNA, 25 bp, Probe Sequence
tctcggcaactaagcagtccctgag

SEQ ID NO: 293103 - DNA, 25 bp, Probe Sequence
tctcggacatttatacctatggccc

SEQ ID NO: 293104 - DNA, 25 bp, Probe Sequence
tcttgtgccattcttgaccttggac

SEQ ID NO: 293105 - DNA, 25 bp, Probe Sequence
tcatcgggatggtgtccactgggac

SEQ ID NO: 293106 - DNA, 25 bp, Probe Sequence
tcactggtaatgtgtccattcgagg

SEQ ID NO: 293107 - DNA, 25 bp, Probe Sequence
tctctggtacttgtggcttgctagt

SEQ ID NO: 293108 - DNA, 25 bp, Probe Sequence
tctctggtacttgtggcttgctagt

SEQ ID NO: 293109 - DNA, 25 bp, Probe Sequence
tctctggtacttgtggcttgctagt

SEQ ID NO: 293110 - DNA, 25 bp, Probe Sequence
tctgtggtccgtaggagccactatg

SEQ ID NO: 293111 - DNA, 25 bp, Probe Sequence
tctgtggcgagccatttgtcccaag

SEQ ID NO: 293112 - DNA, 25 bp, Probe Sequence
tctgagagaggccattctttcccaa

SEQ ID NO: 293113 - DNA, 25 bp, Probe Sequence
tctgagtcagagccatgtcttctcc

SEQ ID NO: 293114 - DNA, 25 bp, Probe Sequence
tctgagccaaggttgcaatcttcca

SEQ ID NO: 293115 - DNA, 25 bp, Probe Sequence
tctgtctctagatatgcaagttcct

SEQ ID NO: 293116 - DNA, 25 bp, Probe Sequence
tctgttccagatttatgatgtttta

SEQ ID NO: 293117 - DNA, 25 bp, Probe Sequence
tctgttaagttagtctgttgttata

SEQ ID NO: 293118 - DNA, 25 bp, Probe Sequence
tctgttagctttacctttgtttact

SEQ ID NO: 293119 - DNA, 25 bp, Probe Sequence
tctgtgtagttttaacatttttact

SEQ ID NO: 293120 - DNA, 25 bp, Probe Sequence
tctgcgtgacaataaacattatgct

SEQ ID NO: 293121 - DNA, 25 bp, Probe Sequence
tctcggacatagtaagtacactgta

SEQ ID NO: 293122 - DNA, 25 bp, Probe Sequence
tctggtggctagggatgtactcatg

SEQ ID NO: 293123 - DNA, 25 bp, Probe Sequence
tctgaatttcaggggtcatgctgat

SEQ ID NO: 293124 - DNA, 25 bp, Probe Sequence
tctgagtcttaggcggtgcatgacc

SEQ ID NO: 293125 - DNA, 25 bp, Probe Sequence
tctgagtcttaggcgatgcgtgacc

SEQ ID NO: 293126 - DNA, 25 bp, Probe Sequence
tctgatgtgttagggatgggttctg

SEQ ID NO: 293127 - DNA, 25 bp, Probe Sequence
tctgcttgggatgatggaggtactg

SEQ ID NO: 293128 - DNA, 25 bp, Probe Sequence
tctccagtagacaatgctgggtaag

SEQ ID NO: 293129 - DNA, 25 bp, Probe Sequence
tctcaagctagcccagagggtggga

SEQ ID NO: 293130 - DNA, 25 bp, Probe Sequence
tctgcaatgtaggggccggtggacc

SEQ ID NO: 293131 - DNA, 25 bp, Probe Sequence
tctgagagcgaggcgtggcagcgtg

SEQ ID NO: 293132 - DNA, 25 bp, Probe Sequence
tctgagatgctggtaatggccatgg

SEQ ID NO: 293133 - DNA, 25 bp, Probe Sequence
tctgatgtgatgcctgttgagtcag

SEQ ID NO: 293134 - DNA, 25 bp, Probe Sequence
tctgtgcatgatcgtggtggtagcc

SEQ ID NO: 293135 - DNA, 25 bp, Probe Sequence
tctgtctgtcgagcgaggagccgcg

SEQ ID NO: 293136 - DNA, 25 bp, Probe Sequence
tctgtcctcagggtgggcagagcca

SEQ ID NO: 293137 - DNA, 25 bp, Probe Sequence
tctgtcgatcccaggccagagacaa

SEQ ID NO: 293138 - DNA, 25 bp, Probe Sequence
tctgtggatccgggccaccagaaga

SEQ ID NO: 293139 - DNA, 25 bp, Probe Sequence
tctggtgaccattgatgccccaggg

SEQ ID NO: 293140 - DNA, 25 bp, Probe Sequence
tctgtgtttatttgtggccgagtgt

SEQ ID NO: 293141 - DNA, 25 bp, Probe Sequence
tctgatggttttagtctcgaggatg

SEQ ID NO: 293142 - DNA, 25 bp, Probe Sequence
tctgaggcctttagcctctgaatga

SEQ ID NO: 293143 - DNA, 25 bp, Probe Sequence
tctgcttgatcaattcccttgaata

SEQ ID NO: 293144 - DNA, 25 bp, Probe Sequence
tctgcctgaagattcctcaggtcaa

SEQ ID NO: 293145 - DNA, 25 bp, Probe Sequence
tctgaccacgactttgcaggatcta

SEQ ID NO: 293146 - DNA, 25 bp, Probe Sequence
tctacctatgaactacggactgcac

SEQ ID NO: 293147 - DNA, 25 bp, Probe Sequence
tctatctggtaacactggagctgac

SEQ ID NO: 293148 - DNA, 25 bp, Probe Sequence
tctgatcttgtcaaacccagcctga

SEQ ID NO: 293149 - DNA, 25 bp, Probe Sequence
tctgatcttgtcaaacccagcctga

SEQ ID NO: 293150 - DNA, 25 bp, Probe Sequence
tctgatcttgtcaaacccagcctga

SEQ ID NO: 293151 - DNA, 25 bp, Probe Sequence
tctgtttgccacacccaggtgattt

SEQ ID NO: 293152 - DNA, 25 bp, Probe Sequence
tctgcgttacaaactcctaggaggg

SEQ ID NO: 293153 - DNA, 25 bp, Probe Sequence
tctgctgttgacaatggctctctgg

SEQ ID NO: 293154 - DNA, 25 bp, Probe Sequence
tctgctttcacacggcagtgtgctg

SEQ ID NO: 293155 - DNA, 25 bp, Probe Sequence
tctgtttcagatcactgcggtgggc

SEQ ID NO: 293156 - DNA, 25 bp, Probe Sequence
tctggtccagcgcaaggaggggctg

SEQ ID NO: 293157 - DNA, 25 bp, Probe Sequence
tctggtgcccagaagagttagaggt

SEQ ID NO: 293158 - DNA, 25 bp, Probe Sequence
tctggtcacggcagagcttttgtgg

SEQ ID NO: 293159 - DNA, 25 bp, Probe Sequence
tctgtacttgtgaaacattgtgtgg

SEQ ID NO: 293160 - DNA, 25 bp, Probe Sequence
tctgtcctgtgtggaatccagtgag

SEQ ID NO: 293161 - DNA, 25 bp, Probe Sequence
tctgtcctgtgtggaatccagtgag

SEQ ID NO: 293162 - DNA, 25 bp, Probe Sequence
tctgctgccagggcgagtgcgagtg

SEQ ID NO: 293163 - DNA, 25 bp, Probe Sequence
tctcctgcagggccagtcagagtgt

SEQ ID NO: 293164 - DNA, 25 bp, Probe Sequence
tctcctggggtacattttacaagaa

SEQ ID NO: 293165 - DNA, 25 bp, Probe Sequence
tctccttgggtatgttcttgggcaa

SEQ ID NO: 293166 - DNA, 25 bp, Probe Sequence
tctcctaggtgtttgatatttttga

SEQ ID NO: 293167 - DNA, 25 bp, Probe Sequence
tcatgcctacgtaaggtctttgaaa

SEQ ID NO: 293168 - DNA, 25 bp, Probe Sequence
tctgccataggaacacttctgtcta

SEQ ID NO: 293169 - DNA, 25 bp, Probe Sequence
tctgcccagtgtccagttttacata

SEQ ID NO: 293170 - DNA, 25 bp, Probe Sequence
tctgcggcaaggcgttttccagacc

SEQ ID NO: 293171 - DNA, 25 bp, Probe Sequence
tctcccataggtagtttaacaggca

SEQ ID NO: 293172 - DNA, 25 bp, Probe Sequence
tctcctctacagatttttgctgccc

SEQ ID NO: 293173 - DNA, 25 bp, Probe Sequence
tctgccagcccactgttgtatacgc

SEQ ID NO: 293174 - DNA, 25 bp, Probe Sequence
tctgtcaccatcaatcaagaataca

SEQ ID NO: 293175 - DNA, 25 bp, Probe Sequence
tctgtcaagcacatcagcaatcata

SEQ ID NO: 293176 - DNA, 25 bp, Probe Sequence
tctgttcagccacttgcaacacaat

SEQ ID NO: 293177 - DNA, 25 bp, Probe Sequence
tctgcaacgcagacttcgacaagtt

SEQ ID NO: 293178 - DNA, 25 bp, Probe Sequence
tctgcaaggggcgtcggacagtgca

SEQ ID NO: 293179 - DNA, 25 bp, Probe Sequence
tctgctggaggccgaacgtcaggag

SEQ ID NO: 293180 - DNA, 25 bp, Probe Sequence
tctgatggcactgtaaagatctgga

SEQ ID NO: 293181 - DNA, 25 bp, Probe Sequence
tctgctgagtgtgctaaatactggg

SEQ ID NO: 293182 - DNA, 25 bp, Probe Sequence
tctgctagagtttatcaacacagag

SEQ ID NO: 293183 - DNA, 25 bp, Probe Sequence
tctgcatcaactgaacgcaaatcag

SEQ ID NO: 293184 - DNA, 25 bp, Probe Sequence
tctgcatcagacttagatacaagcc

SEQ ID NO: 293185 - DNA, 25 bp, Probe Sequence
tctgtgcagatgagcagtcacactg

SEQ ID NO: 293186 - DNA, 25 bp, Probe Sequence
tctgccatcatgccgatgttcatcg

SEQ ID NO: 293187 - DNA, 25 bp, Probe Sequence
tctgcctcagctccattttgctgaa

SEQ ID NO: 293188 - DNA, 25 bp, Probe Sequence
tctgcttctgcaccttatcttaaag

SEQ ID NO: 293189 - DNA, 25 bp, Probe Sequence
tctgtttgcaccatgtcttccagga

SEQ ID NO: 293190 - DNA, 25 bp, Probe Sequence
tctgttccagcctatggctttaggc

SEQ ID NO: 293191 - DNA, 25 bp, Probe Sequence
tctgtccacttctggttgccaggag

SEQ ID NO: 293192 - DNA, 25 bp, Probe Sequence
tctgcctgacctcagagtgtccagg

SEQ ID NO: 293193 - DNA, 25 bp, Probe Sequence
tctccagatccccatgtgagtacat

SEQ ID NO: 293194 - DNA, 25 bp, Probe Sequence
tctccaaagctcagtatctgaatat

SEQ ID NO: 293195 - DNA, 25 bp, Probe Sequence
tctccaaagccaataaagtgataca

SEQ ID NO: 293196 - DNA, 25 bp, Probe Sequence
tctctactaccaccaaggagaatag

SEQ ID NO: 293197 - DNA, 25 bp, Probe Sequence
tctgacactacctttctgggaaatg

SEQ ID NO: 293198 - DNA, 25 bp, Probe Sequence
tctgatatcccgtttctggtaataa

SEQ ID NO: 293199 - DNA, 25 bp, Probe Sequence
tcttccccagacactggtttgaaga

SEQ ID NO: 293200 - DNA, 25 bp, Probe Sequence
tctcaccctaaggacagggtggaag

SEQ ID NO: 293201 - DNA, 25 bp, Probe Sequence
tctccaacgagagccagagcctcga

SEQ ID NO: 293202 - DNA, 25 bp, Probe Sequence
tctgcctacggtgtcagtgttggac

SEQ ID NO: 293203 - DNA, 25 bp, Probe Sequence
tcacctgggctaggtcagttcggaa

SEQ ID NO: 293204 - DNA, 25 bp, Probe Sequence
tcacctgtgggaagacggacgtgga

SEQ ID NO: 293205 - DNA, 25 bp, Probe Sequence
tctcctgccggaagccggacggcag

SEQ ID NO: 293206 - DNA, 25 bp, Probe Sequence
ttcccgggatctttgggaggccgag

SEQ ID NO: 293207 - DNA, 25 bp, Probe Sequence
tctcccgtggatgacggatgaggac

SEQ ID NO: 293208 - DNA, 25 bp, Probe Sequence
tctgcccgttgaaggcatcctggga

SEQ ID NO: 293209 - DNA, 25 bp, Probe Sequence
tctcctctttattttcctgtggttt

SEQ ID NO: 293210 - DNA, 25 bp, Probe Sequence
tctcccatttatgtccctagtaatg

SEQ ID NO: 293211 - DNA, 25 bp, Probe Sequence
tctccaagttagattcgtactgtat

SEQ ID NO: 293212 - DNA, 25 bp, Probe Sequence
tctccacgtttgatccgttttcagc

SEQ ID NO: 293213 - DNA, 25 bp, Probe Sequence
tctccacgtttgatccattttcagc

SEQ ID NO: 293214 - DNA, 25 bp, Probe Sequence
tctccacgtttgatccattttcagc

SEQ ID NO: 293215 - DNA, 25 bp, Probe Sequence
tctacactagttaaacatttttgca

SEQ ID NO: 293216 - DNA, 25 bp, Probe Sequence
tctcccgatgaaaacatatcttttg

SEQ ID NO: 293217 - DNA, 25 bp, Probe Sequence
tctgcccttcagaagactcgttttt

SEQ ID NO: 293218 - DNA, 25 bp, Probe Sequence
tctgcccttcagagtgcaggagttg

SEQ ID NO: 293219 - DNA, 25 bp, Probe Sequence
tctgccctcatggaaggtgacgttc

SEQ ID NO: 293220 - DNA, 25 bp, Probe Sequence
tctgccaccacgtagtcaagggtct

SEQ ID NO: 293221 - DNA, 25 bp, Probe Sequence
tctgcctcctgggttcaagtgattc

SEQ ID NO: 293222 - DNA, 25 bp, Probe Sequence
tctgcctccaaggcattcgatgcgt

SEQ ID NO: 293223 - DNA, 25 bp, Probe Sequence
tctgtcgcccaggctggagtgcagt

SEQ ID NO: 293224 - DNA, 25 bp, Probe Sequence
tctgtcgcccaggctggagtgcagt

SEQ ID NO: 293225 - DNA, 25 bp, Probe Sequence
tctgtcgcccaggctggagtgcagt

SEQ ID NO: 293226 - DNA, 25 bp, Probe Sequence
tctgtcacccaggctggagtgcagt

SEQ ID NO: 293227 - DNA, 25 bp, Probe Sequence
tctgacatggccggggtggctgtca

SEQ ID NO: 293228 - DNA, 25 bp, Probe Sequence
tctgaatgcggccacggatgccttg

SEQ ID NO: 293229 - DNA, 25 bp, Probe Sequence
tctgcaatgcgaacaggtacctatc

SEQ ID NO: 293230 - DNA, 25 bp, Probe Sequence
tctgaagcagcaacattgtaacatt

SEQ ID NO: 293231 - DNA, 25 bp, Probe Sequence
tctgtatcaagacgtgttacttcga

SEQ ID NO: 293232 - DNA, 25 bp, Probe Sequence
tctgatgatcactggtgttgagctt

SEQ ID NO: 293233 - DNA, 25 bp, Probe Sequence
tctgtatcatcagaggctgggcttg

SEQ ID NO: 293234 - DNA, 25 bp, Probe Sequence
tctgtactgcacaagattaggtaga

SEQ ID NO: 293235 - DNA, 25 bp, Probe Sequence
tctgacactccatcataaagctaat

SEQ ID NO: 293236 - DNA, 25 bp, Probe Sequence
tctgagcatctttccggaggctaac

SEQ ID NO: 293237 - DNA, 25 bp, Probe Sequence
tctgcactcttagctggattctaaa

SEQ ID NO: 293238 - DNA, 25 bp, Probe Sequence
tctgcactccaggcctggtgacata

SEQ ID NO: 293239 - DNA, 25 bp, Probe Sequence
tctctcattgcccagtggtgacatg

SEQ ID NO: 293240 - DNA, 25 bp, Probe Sequence
tctccaatcccaggtagccatggta

SEQ ID NO: 293241 - DNA, 25 bp, Probe Sequence
tctcgaactcctgacctcaggtgat

SEQ ID NO: 293242 - DNA, 25 bp, Probe Sequence
tttgcagaccctgtctaaaggctga

SEQ ID NO: 293243 - DNA, 25 bp, Probe Sequence
tctgtagcccctctcaaaaggagtc

SEQ ID NO: 293244 - DNA, 25 bp, Probe Sequence
tcttgacccagccgaaaaagttgaa

SEQ ID NO: 293245 - DNA, 25 bp, Probe Sequence
tctgaactccccagataaagtctgc

SEQ ID NO: 293246 - DNA, 25 bp, Probe Sequence
tcagaacccggaagctactatgtgt

SEQ ID NO: 293247 - DNA, 25 bp, Probe Sequence
tacaacacgccggactgactctggc

SEQ ID NO: 293248 - DNA, 25 bp, Probe Sequence
tcacccaggccagtggggtctggtt

SEQ ID NO: 293249 - DNA, 25 bp, Probe Sequence
tcatctccgaccaatgggtcctgac

SEQ ID NO: 293250 - DNA, 25 bp, Probe Sequence
tctctcgccgccaatgcttgttcag

SEQ ID NO: 293251 - DNA, 25 bp, Probe Sequence
tctcgccgccaatgcttgttcaggc

SEQ ID NO: 293252 - DNA, 25 bp, Probe Sequence
tctccccagtcatcttatttggcta

SEQ ID NO: 293253 - DNA, 25 bp, Probe Sequence
tctcccttcagcaacttattttgct

SEQ ID NO: 293254 - DNA, 25 bp, Probe Sequence
tctccctccagcatttgtttctgga

SEQ ID NO: 293255 - DNA, 25 bp, Probe Sequence
tctcccccatgacatttttagaaag

SEQ ID NO: 293256 - DNA, 25 bp, Probe Sequence
tctccccctaccaagtttggcagag

SEQ ID NO: 293257 - DNA, 25 bp, Probe Sequence
tctgccatcgcagtaaccgttgtgg

SEQ ID NO: 293258 - DNA, 25 bp, Probe Sequence
tctgccatcaccgagaacagtatgt

SEQ ID NO: 293259 - DNA, 25 bp, Probe Sequence
tctgacatccaggtgtaatctgacc

SEQ ID NO: 293260 - DNA, 25 bp, Probe Sequence
tctgagcattagatttctcatttgc

SEQ ID NO: 293261 - DNA, 25 bp, Probe Sequence
tctagcaatcagattttcctgtgga

SEQ ID NO: 293262 - DNA, 25 bp, Probe Sequence
tctgatgactcgttttttcttctac

SEQ ID NO: 293263 - DNA, 25 bp, Probe Sequence
tctgaacctgatagttttcacctca

SEQ ID NO: 293264 - DNA, 25 bp, Probe Sequence
tctgaaggtgttcattccatctctc

SEQ ID NO: 293265 - DNA, 25 bp, Probe Sequence
tctttggagatgcccattctacttt

SEQ ID NO: 293266 - DNA, 25 bp, Probe Sequence
tctcctggcagtttctaccagcatt

SEQ ID NO: 293267 - DNA, 25 bp, Probe Sequence
tctaatgcgcatgaagtcacagcag

SEQ ID NO: 293268 - DNA, 25 bp, Probe Sequence
tctcagagagcaagcggtagccaga

SEQ ID NO: 293269 - DNA, 25 bp, Probe Sequence
tctgcatgaatgcactggtcaccag

SEQ ID NO: 293270 - DNA, 25 bp, Probe Sequence
tctgcgagattgtaggtgcctcaag

SEQ ID NO: 293271 - DNA, 25 bp, Probe Sequence
tctgcaggttgaagccatgtctaca

SEQ ID NO: 293272 - DNA, 25 bp, Probe Sequence
tctgatggcttgaacttgcccacag

SEQ ID NO: 293273 - DNA, 25 bp, Probe Sequence
tctgagtgcttggtggtgacccatg

SEQ ID NO: 293274 - DNA, 25 bp, Probe Sequence
tctcggctgctgatggtaccaatgt

SEQ ID NO: 293275 - DNA, 25 bp, Probe Sequence
tctccgcgtgttgtacatctagagt

SEQ ID NO: 293276 - DNA, 25 bp, Probe Sequence
tcagtccttgttcttttgaagcttg

SEQ ID NO: 293277 - DNA, 25 bp, Probe Sequence
tctgtcctacttctgactttacttg

SEQ ID NO: 293278 - DNA, 25 bp, Probe Sequence
tctgtcctacttctgactttacttg

SEQ ID NO: 293279 - DNA, 25 bp, Probe Sequence
tctgatcctgactctttcaattaca

SEQ ID NO: 293280 - DNA, 25 bp, Probe Sequence
tctgtccaactgcctgttcaataaa

SEQ ID NO: 293281 - DNA, 25 bp, Probe Sequence
tctgtctgtgtccctgttagcacaa

SEQ ID NO: 293282 - DNA, 25 bp, Probe Sequence
tctgtatgtctccatctattgatga

SEQ ID NO: 293283 - DNA, 25 bp, Probe Sequence
tctgtgctgaatgtcttatatgcat

SEQ ID NO: 293284 - DNA, 25 bp, Probe Sequence
tctgtgcttatgtcatctctgttat

SEQ ID NO: 293285 - DNA, 25 bp, Probe Sequence
tctgatgatattcctcatgctttga

SEQ ID NO: 293286 - DNA, 25 bp, Probe Sequence
tctgctgaatgtcctgaccttgaac

SEQ ID NO: 293287 - DNA, 25 bp, Probe Sequence
tctgtccattcctacctggacatgt

SEQ ID NO: 293288 - DNA, 25 bp, Probe Sequence
tctgtcgttctatcatcagagaaat

SEQ ID NO: 293289 - DNA, 25 bp, Probe Sequence
tcttctttggtgcccgacaaatggg

SEQ ID NO: 293290 - DNA, 25 bp, Probe Sequence
ttttgttgggcaccgaaatcacggg

SEQ ID NO: 293291 - DNA, 25 bp, Probe Sequence
tcttttagggagggtgactgggagg

SEQ ID NO: 293292 - DNA, 25 bp, Probe Sequence
tctgtttgggaagacgtggaggaaa

SEQ ID NO: 293293 - DNA, 25 bp, Probe Sequence
tctctgtttgggagacttggggaaa

SEQ ID NO: 293294 - DNA, 25 bp, Probe Sequence
tctctcttttttggaacggcggcca

SEQ ID NO: 293295 - DNA, 25 bp, Probe Sequence
tctccgattatgtgggctcggggcc

SEQ ID NO: 293296 - DNA, 25 bp, Probe Sequence
tctcctaggagctgtcctggtgggc

SEQ ID NO: 293297 - DNA, 25 bp, Probe Sequence
tctgcctcaaaggtggcctgggcgg

SEQ ID NO: 293298 - DNA, 25 bp, Probe Sequence
tctgcactcaatgcctggcgagggc

SEQ ID NO: 293299 - DNA, 25 bp, Probe Sequence
tctgcatcttaggggggagggctgg

SEQ ID NO: 293300 - DNA, 25 bp, Probe Sequence
tctgtccccatctgggagggtggca

SEQ ID NO: 293301 - DNA, 25 bp, Probe Sequence
tctgtgcctccactggttgagggtg

SEQ ID NO: 293302 - DNA, 25 bp, Probe Sequence
tctatgacatcatctggttcagtcc

SEQ ID NO: 293303 - DNA, 25 bp, Probe Sequence
tctgaaatcacactgatgacatcag

SEQ ID NO: 293304 - DNA, 25 bp, Probe Sequence
tctcaaatactggcatcaagcatct

SEQ ID NO: 293305 - DNA, 25 bp, Probe Sequence
tctgatatcttcgcactgagcacat

SEQ ID NO: 293306 - DNA, 25 bp, Probe Sequence
tctgcttctctcacctaaaaaaaga

SEQ ID NO: 293307 - DNA, 25 bp, Probe Sequence
tctgtccctgcaacctggaacaaga

SEQ ID NO: 293308 - DNA, 25 bp, Probe Sequence
tctgtcactgttcccggaagcacag

SEQ ID NO: 293309 - DNA, 25 bp, Probe Sequence
tctgtctttccgagtgtgagcacag

SEQ ID NO: 293310 - DNA, 25 bp, Probe Sequence
tctgttttcatcttgaggtggccaa

SEQ ID NO: 293311 - DNA, 25 bp, Probe Sequence
tctgcctatttattggggtgcctat

SEQ ID NO: 293312 - DNA, 25 bp, Probe Sequence
tctccatctattgatgagggtctta

SEQ ID NO: 293313 - DNA, 25 bp, Probe Sequence
tctccaggattgtcagtggcttcgc

SEQ ID NO: 293314 - DNA, 25 bp, Probe Sequence
tctcctctgacttcaacagcgacac

SEQ ID NO: 293315 - DNA, 25 bp, Probe Sequence
tctcctctgacttcaacagcgacac

SEQ ID NO: 293316 - DNA, 25 bp, Probe Sequence
tctcctctgacttcaacagcgacac

SEQ ID NO: 293317 - DNA, 25 bp, Probe Sequence
tctgagctgctaccacatgacagac

SEQ ID NO: 293318 - DNA, 25 bp, Probe Sequence
tctgcagcctgccacacatggcagc

SEQ ID NO: 293319 - DNA, 25 bp, Probe Sequence
tctgcatcagcggcacagtgaagtg

SEQ ID NO: 293320 - DNA, 25 bp, Probe Sequence
tctgtcatgcggccggagcagatca

SEQ ID NO: 293321 - DNA, 25 bp, Probe Sequence
tctgtcaggtggctgcgcttcagcc

SEQ ID NO: 293322 - DNA, 25 bp, Probe Sequence
tctgacagagtgtgccgtctctgcc

SEQ ID NO: 293323 - DNA, 25 bp, Probe Sequence
tctgacaaatgattcctgcttctcc

SEQ ID NO: 293324 - DNA, 25 bp, Probe Sequence
tctgaacacagaagcctcttcctgg

SEQ ID NO: 293325 - DNA, 25 bp, Probe Sequence
tctgttaaacaggctgcttccttgg

SEQ ID NO: 293326 - DNA, 25 bp, Probe Sequence
tcatattgcgaaagccttggccctt

SEQ ID NO: 293327 - DNA, 25 bp, Probe Sequence
tctgcatttgaaagtcttggaggat

SEQ ID NO: 293328 - DNA, 25 bp, Probe Sequence
tctgctgctgtttacattctggggg

SEQ ID NO: 293329 - DNA, 25 bp, Probe Sequence
tctgagctagtgtcacctgcacagg

SEQ ID NO: 293330 - DNA, 25 bp, Probe Sequence
tctgagctagttggttgaatttttt

SEQ ID NO: 293331 - DNA, 25 bp, Probe Sequence
tctcaggagttgcttgtacattctt

SEQ ID NO: 293332 - DNA, 25 bp, Probe Sequence
tctgcgggttgtctgttaactctgc

SEQ ID NO: 293333 - DNA, 25 bp, Probe Sequence
tctcaggggcccctgactgaacctt

SEQ ID NO: 293334 - DNA, 25 bp, Probe Sequence
tctaggaggcctcctgacttattca

SEQ ID NO: 293335 - DNA, 25 bp, Probe Sequence
tctaggctacttcctgacttactgg

SEQ ID NO: 293336 - DNA, 25 bp, Probe Sequence
tctgaccattttacgtctctacggc

SEQ ID NO: 293337 - DNA, 25 bp, Probe Sequence
tctgaccattttacgtctctacggc

SEQ ID NO: 293338 - DNA, 25 bp, Probe Sequence
tcttccttttcggatactattgatg

SEQ ID NO: 293339 - DNA, 25 bp, Probe Sequence
tctgtctttgtgagtgaacatacaa

SEQ ID NO: 293340 - DNA, 25 bp, Probe Sequence
tctgtacctgtgattgtagatataa

SEQ ID NO: 293341 - DNA, 25 bp, Probe Sequence
tctgtcccctgagtgttaatttgat

SEQ ID NO: 293342 - DNA, 25 bp, Probe Sequence
tctgtcccactgtgtctcattatag

SEQ ID NO: 293343 - DNA, 25 bp, Probe Sequence
tctgtcccacggaatctatttaccc

SEQ ID NO: 293344 - DNA, 25 bp, Probe Sequence
tctgtccccgggtttcagagacaac

SEQ ID NO: 293345 - DNA, 25 bp, Probe Sequence
tctgttctgggaggtattggaggga

SEQ ID NO: 293346 - DNA, 25 bp, Probe Sequence
tctgaactgtgtgggttttggagga

SEQ ID NO: 293347 - DNA, 25 bp, Probe Sequence
tctgaacttgggttgtgccgagaga

SEQ ID NO: 293348 - DNA, 25 bp, Probe Sequence
tctgccactgacctgtgtggcagga

SEQ ID NO: 293349 - DNA, 25 bp, Probe Sequence
tctgcctgctaccatgtgaggatga

SEQ ID NO: 293350 - DNA, 25 bp, Probe Sequence
tctctcgatctgcttgggatgatgg

SEQ ID NO: 293351 - DNA, 25 bp, Probe Sequence
tctgtcgtgtcccattggcattgag

SEQ ID NO: 293352 - DNA, 25 bp, Probe Sequence
tctgtcgcccaggttggagtgcagt

SEQ ID NO: 293353 - DNA, 25 bp, Probe Sequence
tctgtcgcccaggctggagggcagt

SEQ ID NO: 293354 - DNA, 25 bp, Probe Sequence
tctgttggtcagactcaaatgagag

SEQ ID NO: 293355 - DNA, 25 bp, Probe Sequence
tctgttggtcagactcaaatgagag

SEQ ID NO: 293356 - DNA, 25 bp, Probe Sequence
tctgttgagtacatatactgacagc

SEQ ID NO: 293357 - DNA, 25 bp, Probe Sequence
tctgttggctaaaataatgctcttt

SEQ ID NO: 293358 - DNA, 25 bp, Probe Sequence
tctgtagtgctgtattattttcaat

SEQ ID NO: 293359 - DNA, 25 bp, Probe Sequence
tctgacactttcacttttgcagatt

SEQ ID NO: 293360 - DNA, 25 bp, Probe Sequence
tctgaccttgtcatttcaatagtta

SEQ ID NO: 293361 - DNA, 25 bp, Probe Sequence
tctgacactgtgactctgtataaaa

SEQ ID NO: 293362 - DNA, 25 bp, Probe Sequence
tctccacgatgcagcgtatttcaca

SEQ ID NO: 293363 - DNA, 25 bp, Probe Sequence
tctctacatgacacagttaccaccc

SEQ ID NO: 293364 - DNA, 25 bp, Probe Sequence
tctctgcacagtgaccttcacagca

SEQ ID NO: 293365 - DNA, 25 bp, Probe Sequence
tctgctgctcgagttcctacagagt

SEQ ID NO: 293366 - DNA, 25 bp, Probe Sequence
tctgcactcatgatatggaaaggct

SEQ ID NO: 293367 - DNA, 25 bp, Probe Sequence
tctgcaccatggtatacccaggtca

SEQ ID NO: 293368 - DNA, 25 bp, Probe Sequence
tctgcatcctgaccatgactatcat

SEQ ID NO: 293369 - DNA, 25 bp, Probe Sequence
tctgacctgcagacttcatttggag

SEQ ID NO: 293370 - DNA, 25 bp, Probe Sequence
tctgccccagataggtggtgccagt

SEQ ID NO: 293371 - DNA, 25 bp, Probe Sequence
tctgcccagataatcgtgtctcctg

SEQ ID NO: 293372 - DNA, 25 bp, Probe Sequence
tctgctgacaggaatattctcccta

SEQ ID NO: 293373 - DNA, 25 bp, Probe Sequence
tctgctactggaagtctctctcttc

SEQ ID NO: 293374 - DNA, 25 bp, Probe Sequence
tctgttctgtgaatggactctgtgt

SEQ ID NO: 293375 - DNA, 25 bp, Probe Sequence
tctgctgtttgaagcgcagcaggtg

SEQ ID NO: 293376 - DNA, 25 bp, Probe Sequence
tctcgatctgcttgggatgatggag

SEQ ID NO: 293377 - DNA, 25 bp, Probe Sequence
tctccatcatgttgctgggcagtga

SEQ ID NO: 293378 - DNA, 25 bp, Probe Sequence
tctgcagcgatgcagctggggctgc

SEQ ID NO: 293379 - DNA, 25 bp, Probe Sequence
tctgccaggagactgagcggctgca

SEQ ID NO: 293380 - DNA, 25 bp, Probe Sequence
tctctcctgcagtatgagtgaccac

SEQ ID NO: 293381 - DNA, 25 bp, Probe Sequence
tctgctactgcgaattgatgacatc

SEQ ID NO: 293382 - DNA, 25 bp, Probe Sequence
tctgcttctcttactatactcatac

SEQ ID NO: 293383 - DNA, 25 bp, Probe Sequence
tctgttctctggctatttgcaaaac

SEQ ID NO: 293384 - DNA, 25 bp, Probe Sequence
tctcctgcttggtgatttcagcaag

SEQ ID NO: 293385 - DNA, 25 bp, Probe Sequence
tctctctgccctttgactggaaagg

SEQ ID NO: 293386 - DNA, 25 bp, Probe Sequence
tctgccagcacctactgagggaaag

SEQ ID NO: 293387 - DNA, 25 bp, Probe Sequence
tctgcccagcctcggagggtgggca

SEQ ID NO: 293388 - DNA, 25 bp, Probe Sequence
tctgccaagcaccgggtggtttccg

SEQ ID NO: 293389 - DNA, 25 bp, Probe Sequence
tctctcaagaccaggtggattccat

SEQ ID NO: 293390 - DNA, 25 bp, Probe Sequence
tctgctgaccccaggggactacatg

SEQ ID NO: 293391 - DNA, 25 bp, Probe Sequence
tctgctgacccacacgggtctaaat

SEQ ID NO: 293392 - DNA, 25 bp, Probe Sequence
tttggctttcgagggcctgtaaata

SEQ ID NO: 293393 - DNA, 25 bp, Probe Sequence
tacttgttcccaggaccttaactca

SEQ ID NO: 293394 - DNA, 25 bp, Probe Sequence
tcatttgttccttggaccttaatca

SEQ ID NO: 293395 - DNA, 25 bp, Probe Sequence
tctctctttacttggactttgaaca

SEQ ID NO: 293396 - DNA, 25 bp, Probe Sequence
tctgcctttgaaactgacataatga

SEQ ID NO: 293397 - DNA, 25 bp, Probe Sequence
tctgcctgtcacaatatattctcaa

SEQ ID NO: 293398 - DNA, 25 bp, Probe Sequence
tctgccttccaatattactaatctc

SEQ ID NO: 293399 - DNA, 25 bp, Probe Sequence
tctgcatcttccactattttcaatg

SEQ ID NO: 293400 - DNA, 25 bp, Probe Sequence
tctgccctccacttaatgttaatga

SEQ ID NO: 293401 - DNA, 25 bp, Probe Sequence
tctgccgtaactggaatcttcatag

SEQ ID NO: 293402 - DNA, 25 bp, Probe Sequence
tctgcctgacaggctgtgactcttc

SEQ ID NO: 293403 - DNA, 25 bp, Probe Sequence
tctgccatacatgttaatattctac

SEQ ID NO: 293404 - DNA, 25 bp, Probe Sequence
tcttctactcaaagaattgtccaag

SEQ ID NO: 293405 - DNA, 25 bp, Probe Sequence
tctgattacaaaaagatacttcaag

SEQ ID NO: 293406 - DNA, 25 bp, Probe Sequence
tctctttaaatgtgatagtctcaga

SEQ ID NO: 293407 - DNA, 25 bp, Probe Sequence
tcttttctgaagattgtcctacaat

SEQ ID NO: 293408 - DNA, 25 bp, Probe Sequence
tctctgtttgtaaccttgtcgacaa

SEQ ID NO: 293409 - DNA, 25 bp, Probe Sequence
tctcttgaattttcctttctcagaa

SEQ ID NO: 293410 - DNA, 25 bp, Probe Sequence
tctctcagaagtcacagctggttaa

SEQ ID NO: 293411 - DNA, 25 bp, Probe Sequence
tctccaacagaatatgctccattat

SEQ ID NO: 293412 - DNA, 25 bp, Probe Sequence
tctaataagacattagctgtctagg

SEQ ID NO: 293413 - DNA, 25 bp, Probe Sequence
tctcaggacaacttagcctccagga

SEQ ID NO: 293414 - DNA, 25 bp, Probe Sequence
tctcggagcaaagtgacttgagcat

SEQ ID NO: 293415 - DNA, 25 bp, Probe Sequence
tctctcaagcagagcattcttagtt

SEQ ID NO: 293416 - DNA, 25 bp, Probe Sequence
tctcgcagtgcagtggtgcggtaat

SEQ ID NO: 293417 - DNA, 25 bp, Probe Sequence
tctccctgaggactggcttgacagg

SEQ ID NO: 293418 - DNA, 25 bp, Probe Sequence
tctccctggatgttgagctctcatc

SEQ ID NO: 293419 - DNA, 25 bp, Probe Sequence
tctccatgctgccagttgttatcta

SEQ ID NO: 293420 - DNA, 25 bp, Probe Sequence
tctcctgctgaaggtgttacctcac

SEQ ID NO: 293421 - DNA, 25 bp, Probe Sequence
tctgcctctggaggctaaaccctgt

SEQ ID NO: 293422 - DNA, 25 bp, Probe Sequence
tctcctggggccaggatccgtgtgc

SEQ ID NO: 293423 - DNA, 25 bp, Probe Sequence
tctttgggcctcctggactacagga

SEQ ID NO: 293424 - DNA, 25 bp, Probe Sequence
tctctcgggacaactggcacaagcg

SEQ ID NO: 293425 - DNA, 25 bp, Probe Sequence
tctccactggagacctgcaacaggc

SEQ ID NO: 293426 - DNA, 25 bp, Probe Sequence
tctctacggtggctgccactggctt

SEQ ID NO: 293427 - DNA, 25 bp, Probe Sequence
tctccacgaaggcgtcctggagtca

SEQ ID NO: 293428 - DNA, 25 bp, Probe Sequence
tctccaggagggcaagggcgattct

SEQ ID NO: 293429 - DNA, 25 bp, Probe Sequence
tctcaaggcggcctatcgggcttac

SEQ ID NO: 293430 - DNA, 25 bp, Probe Sequence
tctcaacctgggcatttgctcacta

SEQ ID NO: 293431 - DNA, 25 bp, Probe Sequence
ttaaagggggtttgtcagaagcaag

SEQ ID NO: 293432 - DNA, 25 bp, Probe Sequence
tctcacagggtggggttgtcagtta

SEQ ID NO: 293433 - DNA, 25 bp, Probe Sequence
tctgccaaggatgtgccttctactt

SEQ ID NO: 293434 - DNA, 25 bp, Probe Sequence
tctgccaaggatgtgccttcaactt

SEQ ID NO: 293435 - DNA, 25 bp, Probe Sequence
tctctaaggagaatggcccagtcct

SEQ ID NO: 293436 - DNA, 25 bp, Probe Sequence
tctgttagggaaagcaggagcctct

SEQ ID NO: 293437 - DNA, 25 bp, Probe Sequence
tctgttgccgaaatagctggtcctt

SEQ ID NO: 293438 - DNA, 25 bp, Probe Sequence
tctccttcctataggctgatgtctc

SEQ ID NO: 293439 - DNA, 25 bp, Probe Sequence
tctcctcctttaactgagtcatcat

SEQ ID NO: 293440 - DNA, 25 bp, Probe Sequence
tctgctcagcttctgataaggtctc

SEQ ID NO: 293441 - DNA, 25 bp, Probe Sequence
tctgcaacagctcctggaagggcca

SEQ ID NO: 293442 - DNA, 25 bp, Probe Sequence
tctgctacagccctgggaggagcca

SEQ ID NO: 293443 - DNA, 25 bp, Probe Sequence
tctatcctcctgtggaggagccagt

SEQ ID NO: 293444 - DNA, 25 bp, Probe Sequence
tctgagcccttggggtgtttcactc

SEQ ID NO: 293445 - DNA, 25 bp, Probe Sequence
tctgagtactagtgtgttcctccta

SEQ ID NO: 293446 - DNA, 25 bp, Probe Sequence
tctaggattatgtttatcccttcca

SEQ ID NO: 293447 - DNA, 25 bp, Probe Sequence
tctgaggacttgttttctttttctt

SEQ ID NO: 293448 - DNA, 25 bp, Probe Sequence
tctgcattgactgcattttttttga

SEQ ID NO: 293449 - DNA, 25 bp, Probe Sequence
tctgaagaggcttctcctgttttat

SEQ ID NO: 293450 - DNA, 25 bp, Probe Sequence
tctaatcaggtttctttattgttcc

SEQ ID NO: 293451 - DNA, 25 bp, Probe Sequence
tctaattgtgtcatttgtactgttt

SEQ ID NO: 293452 - DNA, 25 bp, Probe Sequence
tctcgagtgttattttctgattgtg

SEQ ID NO: 293453 - DNA, 25 bp, Probe Sequence
tctcagtctttatttgtgtaattca

SEQ ID NO: 293454 - DNA, 25 bp, Probe Sequence
tctgcagttgtctgtatgtgtttta

SEQ ID NO: 293455 - DNA, 25 bp, Probe Sequence
tctgcaatggtcagctgtgcttgct

SEQ ID NO: 293456 - DNA, 25 bp, Probe Sequence
tctgctgtagattggctgtgccagc

SEQ ID NO: 293457 - DNA, 25 bp, Probe Sequence
tctgctatgagctaactggagagcc

SEQ ID NO: 293458 - DNA, 25 bp, Probe Sequence
tctctagcatgctctctgaggagga

SEQ ID NO: 293459 - DNA, 25 bp, Probe Sequence
tctctagctctccatctattgatag

SEQ ID NO: 293460 - DNA, 25 bp, Probe Sequence
tctgatagctttcatcattgaactt

SEQ ID NO: 293461 - DNA, 25 bp, Probe Sequence
tctcaggctttcagcttgaactaag

SEQ ID NO: 293462 - DNA, 25 bp, Probe Sequence
tctgcagcgcttgaagcctgagatc

SEQ ID NO: 293463 - DNA, 25 bp, Probe Sequence
tctgcagctgctaaaactacatgtg

SEQ ID NO: 293464 - DNA, 25 bp, Probe Sequence
tctgagctgctctacagagcttcag

SEQ ID NO: 293465 - DNA, 25 bp, Probe Sequence
tctgatgtgtcattaagtgcagaaa

SEQ ID NO: 293466 - DNA, 25 bp, Probe Sequence
tctgttgtgcattcaattcttattt

SEQ ID NO: 293467 - DNA, 25 bp, Probe Sequence
tctcattgtgcttcgtatcagtcag

SEQ ID NO: 293468 - DNA, 25 bp, Probe Sequence
tctcatttgcccttgcacatgtaag

SEQ ID NO: 293469 - DNA, 25 bp, Probe Sequence
tctgattacccactcactacatgaa

SEQ ID NO: 293470 - DNA, 25 bp, Probe Sequence
tctgattaaatccaatatgacatga

SEQ ID NO: 293471 - DNA, 25 bp, Probe Sequence
tctgatgtaacatgtgatacataca

SEQ ID NO: 293472 - DNA, 25 bp, Probe Sequence
tctaatagacaagtgtaatctcacc

SEQ ID NO: 293473 - DNA, 25 bp, Probe Sequence
tctacggacagagactgaccaccgc

SEQ ID NO: 293474 - DNA, 25 bp, Probe Sequence
tctcacaagaacttcactcaacccc

SEQ ID NO: 293475 - DNA, 25 bp, Probe Sequence
tctgaaaaagctactccacatcact

SEQ ID NO: 293476 - DNA, 25 bp, Probe Sequence
tctgaaagaggtgcagtcactcaca

SEQ ID NO: 293477 - DNA, 25 bp, Probe Sequence
tctctataagtttctgtcattgaac

SEQ ID NO: 293478 - DNA, 25 bp, Probe Sequence
tctcatctaatctcatggctttaaa

SEQ ID NO: 293479 - DNA, 25 bp, Probe Sequence
tctgcccaactgtcaaccttgacaa

SEQ ID NO: 293480 - DNA, 25 bp, Probe Sequence
tctcagaacttaaactcttaccaaa

SEQ ID NO: 293481 - DNA, 25 bp, Probe Sequence
tctgcagaactttgggattatactt

SEQ ID NO: 293482 - DNA, 25 bp, Probe Sequence
tctgcagagaactggcaagaccctt

SEQ ID NO: 293483 - DNA, 25 bp, Probe Sequence
tctgcagcagaacttccaggacaac

SEQ ID NO: 293484 - DNA, 25 bp, Probe Sequence
tctgcacgctcaatgcccagtaaaa

SEQ ID NO: 293485 - DNA, 25 bp, Probe Sequence
tctgactgctcactgttcatattat

SEQ ID NO: 293486 - DNA, 25 bp, Probe Sequence
tctgagatgacactgcctctatttc

SEQ ID NO: 293487 - DNA, 25 bp, Probe Sequence
tctgagtccactgctccatttataa

SEQ ID NO: 293488 - DNA, 25 bp, Probe Sequence
tctgcagcacgatttctcttttgat

SEQ ID NO: 293489 - DNA, 25 bp, Probe Sequence
tctgcagcacgatttctcttttgat

SEQ ID NO: 293490 - DNA, 25 bp, Probe Sequence
tctgcagaggctgtctcatcttttg

SEQ ID NO: 293491 - DNA, 25 bp, Probe Sequence
tctgcagggcccatatcctggatgt

SEQ ID NO: 293492 - DNA, 25 bp, Probe Sequence
tctgagtctcctgtagcatctggtt

SEQ ID NO: 293493 - DNA, 25 bp, Probe Sequence
tctgctggccttggtagattgactt

SEQ ID NO: 293494 - DNA, 25 bp, Probe Sequence
tctgctggcagctcgtgcaattgtt

SEQ ID NO: 293495 - DNA, 25 bp, Probe Sequence
tctgcagcccccagaatgttctgga

SEQ ID NO: 293496 - DNA, 25 bp, Probe Sequence
tctcagaacccagaatctttgaggg

SEQ ID NO: 293497 - DNA, 25 bp, Probe Sequence
tctctgtaaccgtattctttgaaag

SEQ ID NO: 293498 - DNA, 25 bp, Probe Sequence
tctcccaaccaaatcctcttaaaga

SEQ ID NO: 293499 - DNA, 25 bp, Probe Sequence
tctcccccaaagaaccatgtattaa

SEQ ID NO: 293500 - DNA, 25 bp, Probe Sequence
tctccgcagccaattaagccgactg

SEQ ID NO: 293501 - DNA, 25 bp, Probe Sequence
tctccaggcacaaggacagcccagc

SEQ ID NO: 293502 - DNA, 25 bp, Probe Sequence
tctgcggtgaaccaagcagctcctc

SEQ ID NO: 293503 - DNA, 25 bp, Probe Sequence
tctgctgggagagtgctcagccgcc

SEQ ID NO: 293504 - DNA, 25 bp, Probe Sequence
tctgctgtaaaggctgcagcctccc

SEQ ID NO: 293505 - DNA, 25 bp, Probe Sequence
tctctttgtagaatgagacccccct

SEQ ID NO: 293506 - DNA, 25 bp, Probe Sequence
tctcatttttcagggaccactcttc

SEQ ID NO: 293507 - DNA, 25 bp, Probe Sequence
tctctttttatattatgccgctttc

SEQ ID NO: 293508 - DNA, 25 bp, Probe Sequence
tctctgttttaaatactctggtggc

SEQ ID NO: 293509 - DNA, 25 bp, Probe Sequence
tctctggcctctcaggaatcagggt

SEQ ID NO: 293510 - DNA, 25 bp, Probe Sequence
tctgctgaccttcggcatgacattg

SEQ ID NO: 293511 - DNA, 25 bp, Probe Sequence
tctgctgatccgaagaatcacagga

SEQ ID NO: 293512 - DNA, 25 bp, Probe Sequence
tctctatcacaaatccaaatggaac

SEQ ID NO: 293513 - DNA, 25 bp, Probe Sequence
tctgctaccatctacttaaagtcca

SEQ ID NO: 293514 - DNA, 25 bp, Probe Sequence
tctctagctgattcctataccactc

SEQ ID NO: 293515 - DNA, 25 bp, Probe Sequence
tctgcacctgtagagatcaccaatc

SEQ ID NO: 293516 - DNA, 25 bp, Probe Sequence
tctcccttacaatccaaatgcgtct

SEQ ID NO: 293517 - DNA, 25 bp, Probe Sequence
tctgccctttgaagtcggaacaatt

SEQ ID NO: 293518 - DNA, 25 bp, Probe Sequence
tctgccctgtccaccaggataagtg

SEQ ID NO: 293519 - DNA, 25 bp, Probe Sequence
tctctccgctccaaggtggatgaag

SEQ ID NO: 293520 - DNA, 25 bp, Probe Sequence
tctcccgctacacagaagtaacaaa

SEQ ID NO: 293521 - DNA, 25 bp, Probe Sequence
tctccctctactcacaatactaaag

SEQ ID NO: 293522 - DNA, 25 bp, Probe Sequence
tctcccactgagcatgacaagcact

SEQ ID NO: 293523 - DNA, 25 bp, Probe Sequence
tctgctccattcacgatcaatgcac

SEQ ID NO: 293524 - DNA, 25 bp, Probe Sequence
tctgctccattcacgatcaatgcac

SEQ ID NO: 293525 - DNA, 25 bp, Probe Sequence
tctgctgccatcattcggatgctca

SEQ ID NO: 293526 - DNA, 25 bp, Probe Sequence
tctgcagacattgctcggtgtgcgc

SEQ ID NO: 293527 - DNA, 25 bp, Probe Sequence
tctgcaggatatagcccggaggagg

SEQ ID NO: 293528 - DNA, 25 bp, Probe Sequence
tctgcgtgaacgtaggaaggaagcg

SEQ ID NO: 293529 - DNA, 25 bp, Probe Sequence
tctcagtacatctataggaagtgaa

SEQ ID NO: 293530 - DNA, 25 bp, Probe Sequence
tctcctcatctctaacagctcagga

SEQ ID NO: 293531 - DNA, 25 bp, Probe Sequence
tctgcagctgcttataaagctccga

SEQ ID NO: 293532 - DNA, 25 bp, Probe Sequence
tctgcagtcctacagagatacagca

SEQ ID NO: 293533 - DNA, 25 bp, Probe Sequence
tctgcactctaaactgcaaacagaa

SEQ ID NO: 293534 - DNA, 25 bp, Probe Sequence
tctgctcttaacagccacaaggacc

SEQ ID NO: 293535 - DNA, 25 bp, Probe Sequence
tctcttgataaaggaaagggcacca

SEQ ID NO: 293536 - DNA, 25 bp, Probe Sequence
tctccccaaaggcaatggccgctac

SEQ ID NO: 293537 - DNA, 25 bp, Probe Sequence
tctgccccaagaaggacgtactcga

SEQ ID NO: 293538 - DNA, 25 bp, Probe Sequence
tctccccgaaaggtcttgacctgaa

SEQ ID NO: 293539 - DNA, 25 bp, Probe Sequence
tctgcccggtaagggctgcccaaga

SEQ ID NO: 293540 - DNA, 25 bp, Probe Sequence
tctcctccgaaatgaatgaacatac

SEQ ID NO: 293541 - DNA, 25 bp, Probe Sequence
tctcgtgcctgaaacaattaacatg

SEQ ID NO: 293542 - DNA, 25 bp, Probe Sequence
tctcctcgtgctgcacctgaaacga

SEQ ID NO: 293543 - DNA, 25 bp, Probe Sequence
tctccaacatcgacacctaaagctg

SEQ ID NO: 293544 - DNA, 25 bp, Probe Sequence
tctccaacgtgcacagtcaatgagt

SEQ ID NO: 293545 - DNA, 25 bp, Probe Sequence
tctgccaagggccgactaagagaag

SEQ ID NO: 293546 - DNA, 25 bp, Probe Sequence
tctgccgaggagcgccaagaagatg

SEQ ID NO: 293547 - DNA, 25 bp, Probe Sequence
tctgacggcttctccagagagatga

SEQ ID NO: 293548 - DNA, 25 bp, Probe Sequence
tctgccgcccttctgaagaatgcac

SEQ ID NO: 293549 - DNA, 25 bp, Probe Sequence
tctgacatcccttcctggaaacagc

SEQ ID NO: 293550 - DNA, 25 bp, Probe Sequence
tctgacatcccttcctggaaacagc

SEQ ID NO: 293551 - DNA, 25 bp, Probe Sequence
tctgcaattccagcttgggcaacag

SEQ ID NO: 293552 - DNA, 25 bp, Probe Sequence
tctcctatccagcctgttgggaatg

SEQ ID NO: 293553 - DNA, 25 bp, Probe Sequence
tctcctacgcaccattttgtcaggt

SEQ ID NO: 293554 - DNA, 25 bp, Probe Sequence
tctcccagctccgtagtcttaggaa

SEQ ID NO: 293555 - DNA, 25 bp, Probe Sequence
tctcctacatccgcattgctgatac

SEQ ID NO: 293556 - DNA, 25 bp, Probe Sequence
tctcctacatccgcattgctgatac

SEQ ID NO: 293557 - DNA, 25 bp, Probe Sequence
tctcctacatccgcattgctgatac

SEQ ID NO: 293558 - DNA, 25 bp, Probe Sequence
tctcctacgccagtcatgttgtgat

SEQ ID NO: 293559 - DNA, 25 bp, Probe Sequence
tctgccaatttactatgattgtgta

SEQ ID NO: 293560 - DNA, 25 bp, Probe Sequence
tctgacacagtagggagcttggctc

SEQ ID NO: 293561 - DNA, 25 bp, Probe Sequence
tctgagatcgaacggactgtgaatc

SEQ ID NO: 293562 - DNA, 25 bp, Probe Sequence
tctgagttcagaccggagtaatcca

SEQ ID NO: 293563 - DNA, 25 bp, Probe Sequence
tctaatagagagccggattcaccgt

SEQ ID NO: 293564 - DNA, 25 bp, Probe Sequence
tctcctgcgaagagcgaaacctgct

SEQ ID NO: 293565 - DNA, 25 bp, Probe Sequence
tctccggacatgaaccataaccata

SEQ ID NO: 293566 - DNA, 25 bp, Probe Sequence
tctcggaaattactcaaaccatcag

SEQ ID NO: 293567 - DNA, 25 bp, Probe Sequence
tcatcatagtttaaggaatacccag

SEQ ID NO: 293568 - DNA, 25 bp, Probe Sequence
tctaagttttgtcatcaatccagga

SEQ ID NO: 293569 - DNA, 25 bp, Probe Sequence
tctcacagttattaaccagactcag

SEQ ID NO: 293570 - DNA, 25 bp, Probe Sequence
tctacagttttttccgcagacttct

SEQ ID NO: 293571 - DNA, 25 bp, Probe Sequence
tctacgcttttgaacttgcaggctg

SEQ ID NO: 293572 - DNA, 25 bp, Probe Sequence
taatcgtcttagagccactggtgaa

SEQ ID NO: 293573 - DNA, 25 bp, Probe Sequence
tatacccttcaaggacagtttgcca

SEQ ID NO: 293574 - DNA, 25 bp, Probe Sequence
tctacctttcaatggggctagtgca

SEQ ID NO: 293575 - DNA, 25 bp, Probe Sequence
tctactttaaagtgtccttgtgatt

SEQ ID NO: 293576 - DNA, 25 bp, Probe Sequence
tctgaataaaaataaccttggcttg

SEQ ID NO: 293577 - DNA, 25 bp, Probe Sequence
tctcagtaaacctgaacacttggaa

SEQ ID NO: 293578 - DNA, 25 bp, Probe Sequence
tctctgtcaagtttggaaacgatgt

SEQ ID NO: 293579 - DNA, 25 bp, Probe Sequence
tctgctgttacgtttgaagtctgac

SEQ ID NO: 293580 - DNA, 25 bp, Probe Sequence
tctgcgttcctgttagcataatgtg

SEQ ID NO: 293581 - DNA, 25 bp, Probe Sequence
tctgcttcccgatgacaacacggac

SEQ ID NO: 293582 - DNA, 25 bp, Probe Sequence
tctgccctccgacgaagaaggcgaa

SEQ ID NO: 293583 - DNA, 25 bp, Probe Sequence
tctgccctacggttagtaccaggac

SEQ ID NO: 293584 - DNA, 25 bp, Probe Sequence
tctcgtccacggagaactccgcgac

SEQ ID NO: 293585 - DNA, 25 bp, Probe Sequence
tctccactccggaggaactgggcct

SEQ ID NO: 293586 - DNA, 25 bp, Probe Sequence
tctccactccggaggaactgggcct

SEQ ID NO: 293587 - DNA, 25 bp, Probe Sequence
tctctcccttccaggaatgctgggc

SEQ ID NO: 293588 - DNA, 25 bp, Probe Sequence
tctgccccatgggcacgggaggggc

SEQ ID NO: 293589 - DNA, 25 bp, Probe Sequence
tctgcccctgctgcagcagaggaga

SEQ ID NO: 293590 - DNA, 25 bp, Probe Sequence
tctgcccctgctgcagcagaggaga

SEQ ID NO: 293591 - DNA, 25 bp, Probe Sequence
tctgcagtctccgagacggggacgc

SEQ ID NO: 293592 - DNA, 25 bp, Probe Sequence
tctcagccttcttgtgcttaggact

SEQ ID NO: 293593 - DNA, 25 bp, Probe Sequence
tctccacgtgctgtgttatggtcga

SEQ ID NO: 293594 - DNA, 25 bp, Probe Sequence
tctcccgggcttagaaggccggcta

SEQ ID NO: 293595 - DNA, 25 bp, Probe Sequence
tctcccgtgcctgagaagagccaga

SEQ ID NO: 293596 - DNA, 25 bp, Probe Sequence
tctcccgtgcctgagaagagccaga

SEQ ID NO: 293597 - DNA, 25 bp, Probe Sequence
tctcccgtgcctgagaagagccaga

SEQ ID NO: 293598 - DNA, 25 bp, Probe Sequence
tctccgcttgccaaaataaccgaag

SEQ ID NO: 293599 - DNA, 25 bp, Probe Sequence
tctccctttgcaaaaatgggctaga

SEQ ID NO: 293600 - DNA, 25 bp, Probe Sequence
tctccctgcctgatgaaaggactaa

SEQ ID NO: 293601 - DNA, 25 bp, Probe Sequence
tctccccttttatactaataatctt

SEQ ID NO: 293602 - DNA, 25 bp, Probe Sequence
tctccccattttgtaacactgtacc

SEQ ID NO: 293603 - DNA, 25 bp, Probe Sequence
tctccaattttgagcgaaacccacc

SEQ ID NO: 293604 - DNA, 25 bp, Probe Sequence
tctccagcatatgtaagtggaactc

SEQ ID NO: 293605 - DNA, 25 bp, Probe Sequence
tctccactcagttgcaacttggact

SEQ ID NO: 293606 - DNA, 25 bp, Probe Sequence
tctgctagcatctgtgaacttgtga

SEQ ID NO: 293607 - DNA, 25 bp, Probe Sequence
tctgcttatgcacgtatattggtat

SEQ ID NO: 293608 - DNA, 25 bp, Probe Sequence
tctgctattcgggtaatcttcacag

SEQ ID NO: 293609 - DNA, 25 bp, Probe Sequence
tctgctggagactggagtttcacag

SEQ ID NO: 293610 - DNA, 25 bp, Probe Sequence
tctcgtgctatctggagtcctacac

SEQ ID NO: 293611 - DNA, 25 bp, Probe Sequence
tctgctgtgttatgatggtcttact

SEQ ID NO: 293612 - DNA, 25 bp, Probe Sequence
tctgctctttgtccatgtgttaatg

SEQ ID NO: 293613 - DNA, 25 bp, Probe Sequence
tctgctgctttgtttcttctaagta

SEQ ID NO: 293614 - DNA, 25 bp, Probe Sequence
tctgcgccattaactcattaatagc

SEQ ID NO: 293615 - DNA, 25 bp, Probe Sequence
tctcatgaatattcgtgcaaaaatc

SEQ ID NO: 293616 - DNA, 25 bp, Probe Sequence
tctgcattgtagtgtctcaaagaca

SEQ ID NO: 293617 - DNA, 25 bp, Probe Sequence
tctccagtattacctcaacgagcag

SEQ ID NO: 293618 - DNA, 25 bp, Probe Sequence
tctgccagtgtatccagcacacgga

SEQ ID NO: 293619 - DNA, 25 bp, Probe Sequence
tctgcaagatgttaccacctggagg

SEQ ID NO: 293620 - DNA, 25 bp, Probe Sequence
tctgaaggtcaccaacactgaagac

SEQ ID NO: 293621 - DNA, 25 bp, Probe Sequence
tctcactgtgtacaattctgaagac

SEQ ID NO: 293622 - DNA, 25 bp, Probe Sequence
tctcctgtgctgaccaaccaaataa

SEQ ID NO: 293623 - DNA, 25 bp, Probe Sequence
tctcctttctcttacgcttaaggct

SEQ ID NO: 293624 - DNA, 25 bp, Probe Sequence
tctctcccttgtttccttaagagct

SEQ ID NO: 293625 - DNA, 25 bp, Probe Sequence
tctccctttgggacctgtccaaggg

SEQ ID NO: 293626 - DNA, 25 bp, Probe Sequence
tctccttttggatcaattaccagtg

SEQ ID NO: 293627 - DNA, 25 bp, Probe Sequence
tctcctttgggattcccacacgcaa

SEQ ID NO: 293628 - DNA, 25 bp, Probe Sequence
tctccttggaatttcacgacagcac

SEQ ID NO: 293629 - DNA, 25 bp, Probe Sequence
tctgcctgcttaattgtgctagaaa

SEQ ID NO: 293630 - DNA, 25 bp, Probe Sequence
aagttaacattatcctatttccata

SEQ ID NO: 293631 - DNA, 25 bp, Probe Sequence
tctgcaattacgaagcatctgccaa

SEQ ID NO: 293632 - DNA, 25 bp, Probe Sequence
tctgcagacatacttgaaatccaag

SEQ ID NO: 293633 - DNA, 25 bp, Probe Sequence
tctgaatcatgtctgtatccccagt

SEQ ID NO: 293634 - DNA, 25 bp, Probe Sequence
tctgaatctctctgaacacctcagg

SEQ ID NO: 293635 - DNA, 25 bp, Probe Sequence
tctgaagtctcaagaactgccataa

SEQ ID NO: 293636 - DNA, 25 bp, Probe Sequence
tctgcaaattattcagcctccaaat

SEQ ID NO: 293637 - DNA, 25 bp, Probe Sequence
tctgccatatctttgcatccttcaa

SEQ ID NO: 293638 - DNA, 25 bp, Probe Sequence
tctctgttctagaatccttcagttc

SEQ ID NO: 293639 - DNA, 25 bp, Probe Sequence
tctctgtttaaacctgtattaatag

SEQ ID NO: 293640 - DNA, 25 bp, Probe Sequence
tctgctttaaaagtctgtaatttca

SEQ ID NO: 293641 - DNA, 25 bp, Probe Sequence
tctgctttttagtctttatcattct

SEQ ID NO: 293642 - DNA, 25 bp, Probe Sequence
tctgcttatttatgatggcatccac

SEQ ID NO: 293643 - DNA, 25 bp, Probe Sequence
tctctaatttgcatgggcaccacat

SEQ ID NO: 293644 - DNA, 25 bp, Probe Sequence
tctccaatttcttagtcacttctgt

SEQ ID NO: 293645 - DNA, 25 bp, Probe Sequence
tctgcactgttttgttgaactttgt

SEQ ID NO: 293646 - DNA, 25 bp, Probe Sequence
tctgcaccttatagactgatgtctc

SEQ ID NO: 293647 - DNA, 25 bp, Probe Sequence
tctgcctgtttggagctcagtgcta

SEQ ID NO: 293648 - DNA, 25 bp, Probe Sequence
tctgccagttcgggatcgtgtagcc

SEQ ID NO: 293649 - DNA, 25 bp, Probe Sequence
tctgccagttcctgaaaggagccaa

SEQ ID NO: 293650 - DNA, 25 bp, Probe Sequence
tctaagagtccccagatagcgagta

SEQ ID NO: 293651 - DNA, 25 bp, Probe Sequence
tctaagtgtccctttcctatgtatg

SEQ ID NO: 293652 - DNA, 25 bp, Probe Sequence
tctgcaagtggatatttggctagtt

SEQ ID NO: 293653 - DNA, 25 bp, Probe Sequence
tctgaagctggattgatacggggaa

SEQ ID NO: 293654 - DNA, 25 bp, Probe Sequence
tctgcaggcctatgatgccaagggc

SEQ ID NO: 293655 - DNA, 25 bp, Probe Sequence
tctcgttctataatgccacagatgg

SEQ ID NO: 293656 - DNA, 25 bp, Probe Sequence
tctcgccacttttgcatgacaatga

SEQ ID NO: 293657 - DNA, 25 bp, Probe Sequence
tctcaccaccttagataaatgactt

SEQ ID NO: 293658 - DNA, 25 bp, Probe Sequence
tctgccctttttacaatgatgattt

SEQ ID NO: 293659 - DNA, 25 bp, Probe Sequence
tctcgcttcagaacttaattcatct

SEQ ID NO: 293660 - DNA, 25 bp, Probe Sequence
tctccatacgtagtgaacagtcatc

SEQ ID NO: 293661 - DNA, 25 bp, Probe Sequence
tctctcttcggataaatgtctccac

SEQ ID NO: 293662 - DNA, 25 bp, Probe Sequence
tctcattactaacaacatttccccc

SEQ ID NO: 293663 - DNA, 25 bp, Probe Sequence
tctccaatgctgaggtacttgtccc

SEQ ID NO: 293664 - DNA, 25 bp, Probe Sequence
tctgccaatgtgactcgctattatt

SEQ ID NO: 293665 - DNA, 25 bp, Probe Sequence
tctgcacaactgcatgcacttctct

SEQ ID NO: 293666 - DNA, 25 bp, Probe Sequence
tctcgaacggatgctcttctttgta

SEQ ID NO: 293667 - DNA, 25 bp, Probe Sequence
tctgctaacagccgcctgtatgttt

SEQ ID NO: 293668 - DNA, 25 bp, Probe Sequence
tctgctactcagctgcacgctgagc

SEQ ID NO: 293669 - DNA, 25 bp, Probe Sequence
tctgcatcactaatcagctcctgga

SEQ ID NO: 293670 - DNA, 25 bp, Probe Sequence
tctgcaaatacatgtcctggatcaa

SEQ ID NO: 293671 - DNA, 25 bp, Probe Sequence
tctgaatcgagatgtccatagtcaa

SEQ ID NO: 293672 - DNA, 25 bp, Probe Sequence
tctgaatccagaggtgcatcaaatt

SEQ ID NO: 293673 - DNA, 25 bp, Probe Sequence
tctgcaactctggctttcataagta

SEQ ID NO: 293674 - DNA, 25 bp, Probe Sequence
tctgcagactgggattttgaggtgg

SEQ ID NO: 293675 - DNA, 25 bp, Probe Sequence
tctgcagactgggcttagcgtgagc

SEQ ID NO: 293676 - DNA, 25 bp, Probe Sequence
tctcaactggatctacaatgtctgg

SEQ ID NO: 293677 - DNA, 25 bp, Probe Sequence
tctcattggaattgtaagctgggga

SEQ ID NO: 293678 - DNA, 25 bp, Probe Sequence
tctgcagtggacataagcattgggc

SEQ ID NO: 293679 - DNA, 25 bp, Probe Sequence
tctaggagactttagccttggcgtt

SEQ ID NO: 293680 - DNA, 25 bp, Probe Sequence
tctgcgttttgtcacttttcgtttt

SEQ ID NO: 293681 - DNA, 25 bp, Probe Sequence
tcaggtattggcagtttttccattt

SEQ ID NO: 293682 - DNA, 25 bp, Probe Sequence
tctttggggtggagtttcctctgtg

SEQ ID NO: 293683 - DNA, 25 bp, Probe Sequence
tctctcctggggtaggtttagtagg

SEQ ID NO: 293684 - DNA, 25 bp, Probe Sequence
tctgctcctggtgagcacgtgtttg

SEQ ID NO: 293685 - DNA, 25 bp, Probe Sequence
tctgctgcctaagaaggtctgtctg

SEQ ID NO: 293686 - DNA, 25 bp, Probe Sequence
tctcttcgcaagtgaggatcagatc

SEQ ID NO: 293687 - DNA, 25 bp, Probe Sequence
tctcctacagagatgtggtgcaatt

SEQ ID NO: 293688 - DNA, 25 bp, Probe Sequence
tctccaaacatgacctgggccattt

SEQ ID NO: 293689 - DNA, 25 bp, Probe Sequence
tctcccaatcagctcagggcaagtg

SEQ ID NO: 293690 - DNA, 25 bp, Probe Sequence
tctgcccagacgagctggagaagct

SEQ ID NO: 293691 - DNA, 25 bp, Probe Sequence
tctgcccaaacaatctgtggatgga

SEQ ID NO: 293692 - DNA, 25 bp, Probe Sequence
tctcgcgagagcgtatctgcgtgtc

SEQ ID NO: 293693 - DNA, 25 bp, Probe Sequence
tctgcaggaatccctctgcaggagc

SEQ ID NO: 293694 - DNA, 25 bp, Probe Sequence
tctcaagaatgcccatctgtgaaca

SEQ ID NO: 293695 - DNA, 25 bp, Probe Sequence
tctgcctgtatgtcttctgcataag

SEQ ID NO: 293696 - DNA, 25 bp, Probe Sequence
tctccttagtcttctcatagcatta

SEQ ID NO: 293697 - DNA, 25 bp, Probe Sequence
tctcctagctgttcttcagaattca

SEQ ID NO: 293698 - DNA, 25 bp, Probe Sequence
tctcccgctgaattctaaatcctta

SEQ ID NO: 293699 - DNA, 25 bp, Probe Sequence
tctccaagctgaaacttccacgtta

SEQ ID NO: 293700 - DNA, 25 bp, Probe Sequence
tctcccagctaggaaaccctgtgtg

SEQ ID NO: 293701 - DNA, 25 bp, Probe Sequence
tctcccagcgttaaccccaggggag

SEQ ID NO: 293702 - DNA, 25 bp, Probe Sequence
tctcccctaatgagcgctcacgggg

SEQ ID NO: 293703 - DNA, 25 bp, Probe Sequence
tctccttcctggagcccagaggagg

SEQ ID NO: 293704 - DNA, 25 bp, Probe Sequence
tctgccctcccgaaactaagcgggg

SEQ ID NO: 293705 - DNA, 25 bp, Probe Sequence
tctgccttccggcttaaagctgtgg

SEQ ID NO: 293706 - DNA, 25 bp, Probe Sequence
tctccttcctcagaatacactctgg

SEQ ID NO: 293707 - DNA, 25 bp, Probe Sequence
tctccttccgcaaggaacgtcttgg

SEQ ID NO: 293708 - DNA, 25 bp, Probe Sequence
tctccttgtttaaaatctgactgct

SEQ ID NO: 293709 - DNA, 25 bp, Probe Sequence
tctccatttctttaagtctcagctt

SEQ ID NO: 293710 - DNA, 25 bp, Probe Sequence
tctgctcattctctctgaagtctag

SEQ ID NO: 293711 - DNA, 25 bp, Probe Sequence
tctgctattctgttgccagagggag

SEQ ID NO: 293712 - DNA, 25 bp, Probe Sequence
tctgcctgtgcttatccagataaga

SEQ ID NO: 293713 - DNA, 25 bp, Probe Sequence
tctgccaggcgctagacatgtacag

SEQ ID NO: 293714 - DNA, 25 bp, Probe Sequence
tctcacgtcgcagtgccatggacgc

SEQ ID NO: 293715 - DNA, 25 bp, Probe Sequence
tctcaagcactgacactcattaccg

SEQ ID NO: 293716 - DNA, 25 bp, Probe Sequence
tctaacgtgtgagatgtcccgagag

SEQ ID NO: 293717 - DNA, 25 bp, Probe Sequence
tctaagtgttctgagctggaggagg

SEQ ID NO: 293718 - DNA, 25 bp, Probe Sequence
tctaagcattccacactgcagggag

SEQ ID NO: 293719 - DNA, 25 bp, Probe Sequence
tctctgagactgctaagtaggggca

SEQ ID NO: 293720 - DNA, 25 bp, Probe Sequence
tcttgtgggagatgcgtagggggtc

SEQ ID NO: 293721 - DNA, 25 bp, Probe Sequence
tctctgtgggagagcttcatgccag

SEQ ID NO: 293722 - DNA, 25 bp, Probe Sequence
tctcggctcttgacacttagccgct

SEQ ID NO: 293723 - DNA, 25 bp, Probe Sequence
tctgcggtgctggtatttagagcgc

SEQ ID NO: 293724 - DNA, 25 bp, Probe Sequence
tctgccgatcgcctatgtgacagca

SEQ ID NO: 293725 - DNA, 25 bp, Probe Sequence
tctccgcattgcctattgatacact

SEQ ID NO: 293726 - DNA, 25 bp, Probe Sequence
tctgccaaagcttttgatgtccttg

SEQ ID NO: 293727 - DNA, 25 bp, Probe Sequence
tctgctcaaggatgtgggctctctt

SEQ ID NO: 293728 - DNA, 25 bp, Probe Sequence
tctgctctgagagtagggcgggctt

SEQ ID NO: 293729 - DNA, 25 bp, Probe Sequence
tctgctttgagtcaaggggcttcac

SEQ ID NO: 293730 - DNA, 25 bp, Probe Sequence
tctgctttgggaaagagggcctttg

SEQ ID NO: 293731 - DNA, 25 bp, Probe Sequence
tctgcctctcggagcagggagctca

SEQ ID NO: 293732 - DNA, 25 bp, Probe Sequence
tctgcccctggaggtggtagcaagg

SEQ ID NO: 293733 - DNA, 25 bp, Probe Sequence
tctgcccctggaggtggtagcaagg

SEQ ID NO: 293734 - DNA, 25 bp, Probe Sequence
tctcaggaccgtagtgcctaccaga

SEQ ID NO: 293735 - DNA, 25 bp, Probe Sequence
tctcgaaacaacatccttcgcacca

SEQ ID NO: 293736 - DNA, 25 bp, Probe Sequence
tctcgcaaagttattcttccaccat

SEQ ID NO: 293737 - DNA, 25 bp, Probe Sequence
tctccagaagttttccatcttccca

SEQ ID NO: 293738 - DNA, 25 bp, Probe Sequence
tctcgcaaaggatctccttcatccc

SEQ ID NO: 293739 - DNA, 25 bp, Probe Sequence
tctcgcaaaggatctccttcatccc

SEQ ID NO: 293740 - DNA, 25 bp, Probe Sequence
tctcagcatcactatgtagcattct

SEQ ID NO: 293741 - DNA, 25 bp, Probe Sequence
tctccacatctgaaattccttttga

SEQ ID NO: 293742 - DNA, 25 bp, Probe Sequence
tctctcaatcctgtggctttggtga

SEQ ID NO: 293743 - DNA, 25 bp, Probe Sequence
tctcctgattctgatgtggttggtc

SEQ ID NO: 293744 - DNA, 25 bp, Probe Sequence
tctccgtgacatctatgcctatggt

SEQ ID NO: 293745 - DNA, 25 bp, Probe Sequence
tctccagtactgctttcttcaaact

SEQ ID NO: 293746 - DNA, 25 bp, Probe Sequence
tctctgcagtcacttttccttagaa

SEQ ID NO: 293747 - DNA, 25 bp, Probe Sequence
tctctttactgccacaggctaagaa

SEQ ID NO: 293748 - DNA, 25 bp, Probe Sequence
tctgctttcaaggagaggcaacgag

SEQ ID NO: 293749 - DNA, 25 bp, Probe Sequence
tctcttttcatgtgtggcagaatag

SEQ ID NO: 293750 - DNA, 25 bp, Probe Sequence
tctccttgaagatcttgcacaaaga

SEQ ID NO: 293751 - DNA, 25 bp, Probe Sequence
tctcctgaaagcttctcccaaaaaa

SEQ ID NO: 293752 - DNA, 25 bp, Probe Sequence
tctcctgaaagcttctcccaaaaaa

SEQ ID NO: 293753 - DNA, 25 bp, Probe Sequence
tctctctgccaagatccatctaaac

SEQ ID NO: 293754 - DNA, 25 bp, Probe Sequence
tctctggcctgaggtattgtgaaga

SEQ ID NO: 293755 - DNA, 25 bp, Probe Sequence
tctctgtcactgttcccggaagcac

SEQ ID NO: 293756 - DNA, 25 bp, Probe Sequence
tcttgatagtttgcaggcaaaacaa

SEQ ID NO: 293757 - DNA, 25 bp, Probe Sequence
taattagctttccaaccaaccaaat

SEQ ID NO: 293758 - DNA, 25 bp, Probe Sequence
tactggcgcttagaaccagacccga

SEQ ID NO: 293759 - DNA, 25 bp, Probe Sequence
tcacgtgattaagaccctactccaa

SEQ ID NO: 293760 - DNA, 25 bp, Probe Sequence
tcacgtgattaagaccctactccaa

SEQ ID NO: 293761 - DNA, 25 bp, Probe Sequence
tcaccgaaagagagcgcctatctca

SEQ ID NO: 293762 - DNA, 25 bp, Probe Sequence
tctccgtaactgtggtctccacatt

SEQ ID NO: 293763 - DNA, 25 bp, Probe Sequence
tctccgtaattagcatggccccagt

SEQ ID NO: 293764 - DNA, 25 bp, Probe Sequence
tctgccttaatctgttgggctccag

SEQ ID NO: 293765 - DNA, 25 bp, Probe Sequence
tctgccttaatctgttgggctccag

SEQ ID NO: 293766 - DNA, 25 bp, Probe Sequence
tctccttattgctgtgaagggcaga

SEQ ID NO: 293767 - DNA, 25 bp, Probe Sequence
tctccctcctggtgaagtgtgactt

SEQ ID NO: 293768 - DNA, 25 bp, Probe Sequence
tctccagccccgtcagaaggggctg

SEQ ID NO: 293769 - DNA, 25 bp, Probe Sequence
tctccggacctggtgtcaggggtgg

SEQ ID NO: 293770 - DNA, 25 bp, Probe Sequence
tctgcctgggctatgggaagtgggg

SEQ ID NO: 293771 - DNA, 25 bp, Probe Sequence
tctgcgtgggcatcgtgggcagtgg

SEQ ID NO: 293772 - DNA, 25 bp, Probe Sequence
tctgcgttagcatctggtttgctgt

SEQ ID NO: 293773 - DNA, 25 bp, Probe Sequence
tctgcttgtagcaccagctattggc

SEQ ID NO: 293774 - DNA, 25 bp, Probe Sequence
tctgccttagcactcagttgcattc

SEQ ID NO: 293775 - DNA, 25 bp, Probe Sequence
tctccattatgcctcaggccttggg

SEQ ID NO: 293776 - DNA, 25 bp, Probe Sequence
tctacagaagccaagctccctggag

SEQ ID NO: 293777 - DNA, 25 bp, Probe Sequence
tctccagaacaaagagcccttggct

SEQ ID NO: 293778 - DNA, 25 bp, Probe Sequence
tctccatatacactagacagcctgt

SEQ ID NO: 293779 - DNA, 25 bp, Probe Sequence
tctcactatgagagagcacacgggg

SEQ ID NO: 293780 - DNA, 25 bp, Probe Sequence
tctactttgggtcccagatgtagag

SEQ ID NO: 293781 - DNA, 25 bp, Probe Sequence
tctcctaagggcctcctgatggaag

SEQ ID NO: 293782 - DNA, 25 bp, Probe Sequence
tctccagatagtgcctttgattgaa

SEQ ID NO: 293783 - DNA, 25 bp, Probe Sequence
tctacaatttccaaaggttgcaaga

SEQ ID NO: 293784 - DNA, 25 bp, Probe Sequence
tcttggggtcttcaggactgaagag

SEQ ID NO: 293785 - DNA, 25 bp, Probe Sequence
tcttgaggatacacgggacccagaa

SEQ ID NO: 293786 - DNA, 25 bp, Probe Sequence
tcttcgttgacacagtggtcccaga

SEQ ID NO: 293787 - DNA, 25 bp, Probe Sequence
tcttcttgggccatgggtaccaatg

SEQ ID NO: 293788 - DNA, 25 bp, Probe Sequence
tcagcacttgggattggggttaagc

SEQ ID NO: 293789 - DNA, 25 bp, Probe Sequence
tcatccttgaagtccggggtattat

SEQ ID NO: 293790 - DNA, 25 bp, Probe Sequence
tctcctgtgaagatggacggtattt

SEQ ID NO: 293791 - DNA, 25 bp, Probe Sequence
tctctctaggaaatgggggtgataa

SEQ ID NO: 293792 - DNA, 25 bp, Probe Sequence
tctattaagctgtggtggggatgaa

SEQ ID NO: 293793 - DNA, 25 bp, Probe Sequence
tcttaaacatgagggagcgtgggta

SEQ ID NO: 293794 - DNA, 25 bp, Probe Sequence
tttccacaatggcaaggtccggaca

SEQ ID NO: 293795 - DNA, 25 bp, Probe Sequence
tcttctccaagctgaagggccgtgg

SEQ ID NO: 293796 - DNA, 25 bp, Probe Sequence
tctccccacagctgaggggctgggg

SEQ ID NO: 293797 - DNA, 25 bp, Probe Sequence
tctccctcacttctatgggcatgga

SEQ ID NO: 293798 - DNA, 25 bp, Probe Sequence
tctccagcccttcgtcaatggaggt

SEQ ID NO: 293799 - DNA, 25 bp, Probe Sequence
tctgctcaggctggggtccagtggg

SEQ ID NO: 293800 - DNA, 25 bp, Probe Sequence
tctgccatccaggggtgtagtgagg

SEQ ID NO: 293801 - DNA, 25 bp, Probe Sequence
tctgctgctccggggtggagctggg

SEQ ID NO: 293802 - DNA, 25 bp, Probe Sequence
tctcccggacggagcagcttgcaga

SEQ ID NO: 293803 - DNA, 25 bp, Probe Sequence
tctccttggatctgtggtctctgga

SEQ ID NO: 293804 - DNA, 25 bp, Probe Sequence
tctccttggagctgtgatcactgga

SEQ ID NO: 293805 - DNA, 25 bp, Probe Sequence
tctccttggagctgtgatcactgga

SEQ ID NO: 293806 - DNA, 25 bp, Probe Sequence
tctcccaggagtcgctgatcactgg

SEQ ID NO: 293807 - DNA, 25 bp, Probe Sequence
tctcccaggagtcgctgatcactgg

SEQ ID NO: 293808 - DNA, 25 bp, Probe Sequence
tctcccaaggctgcgtctggagggg

SEQ ID NO: 293809 - DNA, 25 bp, Probe Sequence
tctcccaaggctgcgtctggagggg

SEQ ID NO: 293810 - DNA, 25 bp, Probe Sequence
tctcctcaaagctcagcttagatgt

SEQ ID NO: 293811 - DNA, 25 bp, Probe Sequence
tctcccaattgtgctttaggttcac

SEQ ID NO: 293812 - DNA, 25 bp, Probe Sequence
tctccccttaccataatggatgctc

SEQ ID NO: 293813 - DNA, 25 bp, Probe Sequence
tctcccagtctgtgcaataaaggtc

SEQ ID NO: 293814 - DNA, 25 bp, Probe Sequence
tctccgcacctgtgcctaagaagct

SEQ ID NO: 293815 - DNA, 25 bp, Probe Sequence
tctccctcctgattctaaaatgtct

SEQ ID NO: 293816 - DNA, 25 bp, Probe Sequence
tctcagagggcgtttagcaaatggc

SEQ ID NO: 293817 - DNA, 25 bp, Probe Sequence
tctgctgagggcgactccaaggcag

SEQ ID NO: 293818 - DNA, 25 bp, Probe Sequence
tctctgaagctggattgatacgggg

SEQ ID NO: 293819 - DNA, 25 bp, Probe Sequence
tctctgagacccatgatcaggggat

SEQ ID NO: 293820 - DNA, 25 bp, Probe Sequence
tctcgaaccctgtctagaaggaatg

SEQ ID NO: 293821 - DNA, 25 bp, Probe Sequence
tctccaccagcccttaaagtgtcgg

SEQ ID NO: 293822 - DNA, 25 bp, Probe Sequence
tctccacccacactatcatagattt

SEQ ID NO: 293823 - DNA, 25 bp, Probe Sequence
tctccaccccattgacgtgcaatgg

SEQ ID NO: 293824 - DNA, 25 bp, Probe Sequence
tctccaccccattgacgtgcaatgg

SEQ ID NO: 293825 - DNA, 25 bp, Probe Sequence
tctccaccccattgacgtcaatggg

SEQ ID NO: 293826 - DNA, 25 bp, Probe Sequence
tctccaccccattgacgtcaatggg

SEQ ID NO: 293827 - DNA, 25 bp, Probe Sequence
tctccaccccattgacgtcaatggg

SEQ ID NO: 293828 - DNA, 25 bp, Probe Sequence
tctccaccccattgacgtcaatggg

SEQ ID NO: 293829 - DNA, 25 bp, Probe Sequence
tctccaccccattgacgtcaatggg

SEQ ID NO: 293830 - DNA, 25 bp, Probe Sequence
tctccaccccattgacgtcaatggg

SEQ ID NO: 293831 - DNA, 25 bp, Probe Sequence
tctccaccccattgacgtcaatggg

SEQ ID NO: 293832 - DNA, 25 bp, Probe Sequence
tctccaccccattgacgtcaatggg

SEQ ID NO: 293833 - DNA, 25 bp, Probe Sequence
tctccaccccattgacgtcaatggg

SEQ ID NO: 293834 - DNA, 25 bp, Probe Sequence
tctccaccccattgacgtcaatggg

SEQ ID NO: 293835 - DNA, 25 bp, Probe Sequence
tctccaccccattgacgtcaatggg

SEQ ID NO: 293836 - DNA, 25 bp, Probe Sequence
tctccaccccattgacgtcaatggg

SEQ ID NO: 293837 - DNA, 25 bp, Probe Sequence
tctccaccccattgacgtcaatggg

SEQ ID NO: 293838 - DNA, 25 bp, Probe Sequence
tctccaccccattgacgtcaatggg

SEQ ID NO: 293839 - DNA, 25 bp, Probe Sequence
tctccaccccattgacgtcaatggg

SEQ ID NO: 293840 - DNA, 25 bp, Probe Sequence
tctccaccccattgacgtcaatggg

SEQ ID NO: 293841 - DNA, 25 bp, Probe Sequence
tctccaccccattgacgtcaatggg

SEQ ID NO: 293842 - DNA, 25 bp, Probe Sequence
tctccaccccattgacgtcaatggg

SEQ ID NO: 293843 - DNA, 25 bp, Probe Sequence
tctccaccccattgacgtcaatggg

SEQ ID NO: 293844 - DNA, 25 bp, Probe Sequence
tctccaccccattgacgtcaatggg

SEQ ID NO: 293845 - DNA, 25 bp, Probe Sequence
tctccaccccattgacgtcaatggg

SEQ ID NO: 293846 - DNA, 25 bp, Probe Sequence
tctccaccccattgacgtcaatggg

SEQ ID NO: 293847 - DNA, 25 bp, Probe Sequence
tctccaccccattgacgtcaatggg

SEQ ID NO: 293848 - DNA, 25 bp, Probe Sequence
tctccaccccattgacgtcaatggg

SEQ ID NO: 293849 - DNA, 25 bp, Probe Sequence
tctccaccccattgacgtcaatggg

SEQ ID NO: 293850 - DNA, 25 bp, Probe Sequence
tctccaccccattgacgtcaatggg

SEQ ID NO: 293851 - DNA, 25 bp, Probe Sequence
tctccaccccattgacgtcaatggg

SEQ ID NO: 293852 - DNA, 25 bp, Probe Sequence
tctccaccccattgacgtcaatggg

SEQ ID NO: 293853 - DNA, 25 bp, Probe Sequence
tctccaccccattgacgtcaatggg

SEQ ID NO: 293854 - DNA, 25 bp, Probe Sequence
tctccaccccattgacgtcaatggg

SEQ ID NO: 293855 - DNA, 25 bp, Probe Sequence
tctccaccccattgacgtcaatggg

SEQ ID NO: 293856 - DNA, 25 bp, Probe Sequence
tctccaccccattgacgtcaatggg

SEQ ID NO: 293857 - DNA, 25 bp, Probe Sequence
tctccaccccattgacgtcaatggg

SEQ ID NO: 293858 - DNA, 25 bp, Probe Sequence
tctccaccccattgacgtcaatggg

SEQ ID NO: 293859 - DNA, 25 bp, Probe Sequence
tctccaccccattgacgtcaatggg

SEQ ID NO: 293860 - DNA, 25 bp, Probe Sequence
tctccaccccattgacgtcaatggg

SEQ ID NO: 293861 - DNA, 25 bp, Probe Sequence
tctccaccccattgacgtcaatggg

SEQ ID NO: 293862 - DNA, 25 bp, Probe Sequence
tctccaccccattgacgtcaatggg

SEQ ID NO: 293863 - DNA, 25 bp, Probe Sequence
tctccaccccattgacgtcaatggg

SEQ ID NO: 293864 - DNA, 25 bp, Probe Sequence
tctccaccccattgacgtcaatggg

SEQ ID NO: 293865 - DNA, 25 bp, Probe Sequence
tctccaccccattgacgtcaatggg

SEQ ID NO: 293866 - DNA, 25 bp, Probe Sequence
tctccaccccattgacgtcaatggg

SEQ ID NO: 293867 - DNA, 25 bp, Probe Sequence
tctccaccccattgacgtcaatggg

SEQ ID NO: 293868 - DNA, 25 bp, Probe Sequence
tctccaccccattgacgtcaatggg

SEQ ID NO: 293869 - DNA, 25 bp, Probe Sequence
tctccaccccattgacgtcaatggg

SEQ ID NO: 293870 - DNA, 25 bp, Probe Sequence
tctccaccccattgacgtcaatggg

SEQ ID NO: 293871 - DNA, 25 bp, Probe Sequence
tctccaccccattgacgtcaatggg

SEQ ID NO: 293872 - DNA, 25 bp, Probe Sequence
tctccaccccattgacgtcaatggg

SEQ ID NO: 293873 - DNA, 25 bp, Probe Sequence
tctccaccccattgacgtcaatggg

SEQ ID NO: 293874 - DNA, 25 bp, Probe Sequence
tctccaccccattgacgtcaatggg

SEQ ID NO: 293875 - DNA, 25 bp, Probe Sequence
tctccaccccattgacgtcaatggg

SEQ ID NO: 293876 - DNA, 25 bp, Probe Sequence
tctccaccccattgacgtcaatggg

SEQ ID NO: 293877 - DNA, 25 bp, Probe Sequence
tctccaccccattgacgtcaatggg

SEQ ID NO: 293878 - DNA, 25 bp, Probe Sequence
tctccaccccattgacgtcaatggg

SEQ ID NO: 293879 - DNA, 25 bp, Probe Sequence
tctccaccccattgacgtcaatggg

SEQ ID NO: 293880 - DNA, 25 bp, Probe Sequence
tctccaccccattgacgtcaatggg

SEQ ID NO: 293881 - DNA, 25 bp, Probe Sequence
tctccaccccattgacgtcaatggg

SEQ ID NO: 293882 - DNA, 25 bp, Probe Sequence
tctccaccccattgacgtcaatggg

SEQ ID NO: 293883 - DNA, 25 bp, Probe Sequence
tctccaccccattgacgtcaatggg

SEQ ID NO: 293884 - DNA, 25 bp, Probe Sequence
tctccaccccattgacgtcaatggg

SEQ ID NO: 293885 - DNA, 25 bp, Probe Sequence
tctccaccccattgacgtcaatggg

SEQ ID NO: 293886 - DNA, 25 bp, Probe Sequence
tctccaccccattgacgtcaatggg

SEQ ID NO: 293887 - DNA, 25 bp, Probe Sequence
tctccaccccattgacgtcaatggg

SEQ ID NO: 293888 - DNA, 25 bp, Probe Sequence
tctccaccccattgacgtcaatggg

SEQ ID NO: 293889 - DNA, 25 bp, Probe Sequence
tctccaccccattgacgtcaatggg

SEQ ID NO: 293890 - DNA, 25 bp, Probe Sequence
tctccaccccattgacgtcaatggg

SEQ ID NO: 293891 - DNA, 25 bp, Probe Sequence
tctccaccccatgacgtcaatggga

SEQ ID NO: 293892 - DNA, 25 bp, Probe Sequence
tctccaccccatgacgtcaatggga

SEQ ID NO: 293893 - DNA, 25 bp, Probe Sequence
tctccaccccatgacgtcaatggga

SEQ ID NO: 293894 - DNA, 25 bp, Probe Sequence
tctccaccccatgacgtcaatggga

SEQ ID NO: 293895 - DNA, 25 bp, Probe Sequence
tctccaccccatgacgtcaatggga

SEQ ID NO: 293896 - DNA, 25 bp, Probe Sequence
tctccaccccatgacgtcaatggga

SEQ ID NO: 293897 - DNA, 25 bp, Probe Sequence
tctccaccccatgacgtcaattggg

SEQ ID NO: 293898 - DNA, 25 bp, Probe Sequence
tctccaccccatgacgtcaatgggg

SEQ ID NO: 293899 - DNA, 25 bp, Probe Sequence
tctccaccccatggacgtcaatggg

SEQ ID NO: 293900 - DNA, 25 bp, Probe Sequence
tctccaccccatggacgtcatggga

SEQ ID NO: 293901 - DNA, 25 bp, Probe Sequence
tctcctcccctggggcacagagata

SEQ ID NO: 293902 - DNA, 25 bp, Probe Sequence
tctccttcttcttggtcacatatat

SEQ ID NO: 293903 - DNA, 25 bp, Probe Sequence
tctcattgtttccagttagcaatat

SEQ ID NO: 293904 - DNA, 25 bp, Probe Sequence
tctcttggttccctaaagcactttc

SEQ ID NO: 293905 - DNA, 25 bp, Probe Sequence
tctttggttgcaagtcataagcctg

SEQ ID NO: 293906 - DNA, 25 bp, Probe Sequence
tctcgggatgtgggctctagagcgc

SEQ ID NO: 293907 - DNA, 25 bp, Probe Sequence
tctccccggcatggtcatgtgatgg

SEQ ID NO: 293908 - DNA, 25 bp, Probe Sequence
tctcactgcccaaggtctgtgatgg

SEQ ID NO: 293909 - DNA, 25 bp, Probe Sequence
tctctgtgcttcactgatctggtca

SEQ ID NO: 293910 - DNA, 25 bp, Probe Sequence
tctctgtgcttatgtcatctctgtt

SEQ ID NO: 293911 - DNA, 25 bp, Probe Sequence
tctcagtcactctaggactctgcac

SEQ ID NO: 293912 - DNA, 25 bp, Probe Sequence
tctcagccattttgggcatatgtat

SEQ ID NO: 293913 - DNA, 25 bp, Probe Sequence
tctcactcgtgcaatggccaatgta

SEQ ID NO: 293914 - DNA, 25 bp, Probe Sequence
tctgccactgtccggaaattcatgg

SEQ ID NO: 293915 - DNA, 25 bp, Probe Sequence
tctgccactgtccggaaattcatgg

SEQ ID NO: 293916 - DNA, 25 bp, Probe Sequence
tctcccttcttgtacaatccagagg

SEQ ID NO: 293917 - DNA, 25 bp, Probe Sequence
tctctcctatctgagaaatccagga

SEQ ID NO: 293918 - DNA, 25 bp, Probe Sequence
tctctcctgattggaattctttgaa

SEQ ID NO: 293919 - DNA, 25 bp, Probe Sequence
tctcctgtgtctgcaatttctcaaa

SEQ ID NO: 293920 - DNA, 25 bp, Probe Sequence
tctcgtggtctcactttgttacttg

SEQ ID NO: 293921 - DNA, 25 bp, Probe Sequence
tctcgtggtctcactttgttacttg

SEQ ID NO: 293922 - DNA, 25 bp, Probe Sequence
tctcgatttcactttttttatttat

SEQ ID NO: 293923 - DNA, 25 bp, Probe Sequence
tctcttcttcctgttattggtagtt

SEQ ID NO: 293924 - DNA, 25 bp, Probe Sequence
tctcttttctcagccttatagtagg

SEQ ID NO: 293925 - DNA, 25 bp, Probe Sequence
tcattcttactgtggcttgtagcat

SEQ ID NO: 293926 - DNA, 25 bp, Probe Sequence
tctctcttacttactgggaacacac

SEQ ID NO: 293927 - DNA, 25 bp, Probe Sequence
tctctctttccactctgggaaacct

SEQ ID NO: 293928 - DNA, 25 bp, Probe Sequence
tctttttccggctggaaccatggag

SEQ ID NO: 293929 - DNA, 25 bp, Probe Sequence
tcttttctggggcttcaacctgaag

SEQ ID NO: 293930 - DNA, 25 bp, Probe Sequence
tcttcttctgggggactgagaactg

SEQ ID NO: 293931 - DNA, 25 bp, Probe Sequence
tctaccttggcagaacatgtacgta

SEQ ID NO: 293932 - DNA, 25 bp, Probe Sequence
tctcccttggtaagacttattttgt

SEQ ID NO: 293933 - DNA, 25 bp, Probe Sequence
tctcccttctggaagactagttttc

SEQ ID NO: 293934 - DNA, 25 bp, Probe Sequence
tctcctgtgtgtcaagactcagttc

SEQ ID NO: 293935 - DNA, 25 bp, Probe Sequence
tctcctttaccaatactgcgatgct

SEQ ID NO: 293936 - DNA, 25 bp, Probe Sequence
tctcctatatacgctgccattactc

SEQ ID NO: 293937 - DNA, 25 bp, Probe Sequence
tctcctgttcgtttcaagtgagctc

SEQ ID NO: 293938 - DNA, 25 bp, Probe Sequence
tctcgcctcgggttgcaatggaccc

SEQ ID NO: 293939 - DNA, 25 bp, Probe Sequence
tctccctccagaaacagtggactct

SEQ ID NO: 293940 - DNA, 25 bp, Probe Sequence
tctacactccagggcatcttgaccc

SEQ ID NO: 293941 - DNA, 25 bp, Probe Sequence
tctcaactcctcttgaatctatccc

SEQ ID NO: 293942 - DNA, 25 bp, Probe Sequence
tctacaccagctctggcatcatgtc

SEQ ID NO: 293943 - DNA, 25 bp, Probe Sequence
tctccactctgtccatcagatacta

SEQ ID NO: 293944 - DNA, 25 bp, Probe Sequence
tcttactgctctcacaattctaagg

SEQ ID NO: 293945 - DNA, 25 bp, Probe Sequence
tctctctcctatcagcattttaaca

SEQ ID NO: 293946 - DNA, 25 bp, Probe Sequence
tctgccacttagcacttgtataatc

SEQ ID NO: 293947 - DNA, 25 bp, Probe Sequence
tctctacttatgccccctaaaagaa

SEQ ID NO: 293948 - DNA, 25 bp, Probe Sequence
tctccacatttcctacttcatagaa

SEQ ID NO: 293949 - DNA, 25 bp, Probe Sequence
tctcgatgcttctttgccttaatga

SEQ ID NO: 293950 - DNA, 25 bp, Probe Sequence
tctccatcatgttttaacatactgt

SEQ ID NO: 293951 - DNA, 25 bp, Probe Sequence
tctcaagctgctttcaggagctagc

SEQ ID NO: 293952 - DNA, 25 bp, Probe Sequence
tctctagtcagttcagtaggagcat

SEQ ID NO: 293953 - DNA, 25 bp, Probe Sequence
tctctagtcctgtcaaagcaaccct

SEQ ID NO: 293954 - DNA, 25 bp, Probe Sequence
tctccaccctcgatcagagacaact

SEQ ID NO: 293955 - DNA, 25 bp, Probe Sequence
tctccaccccaaatgcaggactgta

SEQ ID NO: 293956 - DNA, 25 bp, Probe Sequence
tctccaccccaatgacgtcaatggg

SEQ ID NO: 293957 - DNA, 25 bp, Probe Sequence
tctccaccccattgacggtcaatgg

SEQ ID NO: 293958 - DNA, 25 bp, Probe Sequence
tctccaccccattgacgtcaaatgg

SEQ ID NO: 293959 - DNA, 25 bp, Probe Sequence
tcatccccaggcagagcgaaacctg

SEQ ID NO: 293960 - DNA, 25 bp, Probe Sequence
tcaacaccttcttcagtgaaacggg

SEQ ID NO: 293961 - DNA, 25 bp, Probe Sequence
tcaggaccaccaccgttaaggaagg

SEQ ID NO: 293962 - DNA, 25 bp, Probe Sequence
tctttccaaccaggtccaaggaatt

SEQ ID NO: 293963 - DNA, 25 bp, Probe Sequence
tcttgctccaaagggctccgtggag

SEQ ID NO: 293964 - DNA, 25 bp, Probe Sequence
tcttgacaaagactggtcccgggcg

SEQ ID NO: 293965 - DNA, 25 bp, Probe Sequence
tcttactaaactctgaggcctgaag

SEQ ID NO: 293966 - DNA, 25 bp, Probe Sequence
tctctgtaaaataatctgggacgac

SEQ ID NO: 293967 - DNA, 25 bp, Probe Sequence
tctctgtccgagacagccgggagga

SEQ ID NO: 293968 - DNA, 25 bp, Probe Sequence
tctcgttcgggactgagttgtgaat

SEQ ID NO: 293969 - DNA, 25 bp, Probe Sequence
tctccttttgtactgtgttgtgctt

SEQ ID NO: 293970 - DNA, 25 bp, Probe Sequence
tctccttttatgccttttggtcttg

SEQ ID NO: 293971 - DNA, 25 bp, Probe Sequence
tctatttattagcttggtgacccag

SEQ ID NO: 293972 - DNA, 25 bp, Probe Sequence
tcttgggatgatttttgggacctca

SEQ ID NO: 293973 - DNA, 25 bp, Probe Sequence
tctagtaaatttaagtccacctcaa

SEQ ID NO: 293974 - DNA, 25 bp, Probe Sequence
tctagacttttgttggtcgccctaa

SEQ ID NO: 293975 - DNA, 25 bp, Probe Sequence
tctccagtttttagtttgcacgtaa

SEQ ID NO: 293976 - DNA, 25 bp, Probe Sequence
tcttcgatttttcttatgaccttaa

SEQ ID NO: 293977 - DNA, 25 bp, Probe Sequence
tcttgcttttttgtagaaccgtagc

SEQ ID NO: 293978 - DNA, 25 bp, Probe Sequence
tcagcgttttttagggaatccaggg

SEQ ID NO: 293979 - DNA, 25 bp, Probe Sequence
tcagcttccttagtctgggcaacta

SEQ ID NO: 293980 - DNA, 25 bp, Probe Sequence
tctccatcctgtttctagcacaaaa

SEQ ID NO: 293981 - DNA, 25 bp, Probe Sequence
tctccactccatgtttgcaatacac

SEQ ID NO: 293982 - DNA, 25 bp, Probe Sequence
tctccctctcaggggtagcagagac

SEQ ID NO: 293983 - DNA, 25 bp, Probe Sequence
tctcccccaggcagctataagaata

SEQ ID NO: 293984 - DNA, 25 bp, Probe Sequence
tctccctctctgtcaagtttggaaa

SEQ ID NO: 293985 - DNA, 25 bp, Probe Sequence
tctaccttggaactgtattagataa

SEQ ID NO: 293986 - DNA, 25 bp, Probe Sequence
tctccctgggtcttgtgatgaacta

SEQ ID NO: 293987 - DNA, 25 bp, Probe Sequence
tctcctcggacctggagaacgtgcc

SEQ ID NO: 293988 - DNA, 25 bp, Probe Sequence
tctctgtacgcccagggaaagcggc

SEQ ID NO: 293989 - DNA, 25 bp, Probe Sequence
tctcagctactcaggaggctaaggc

SEQ ID NO: 293990 - DNA, 25 bp, Probe Sequence
tctcaccactgaagggcgtaatgca

SEQ ID NO: 293991 - DNA, 25 bp, Probe Sequence
tctccaccgagcggcgtgtaagagt

SEQ ID NO: 293992 - DNA, 25 bp, Probe Sequence
tctccaccgagcggcgtgtaggagt

SEQ ID NO: 293993 - DNA, 25 bp, Probe Sequence
tctcccgctgatgagcgaggcgggt

SEQ ID NO: 293994 - DNA, 25 bp, Probe Sequence
tctcctagctggggatggggcatgg

SEQ ID NO: 293995 - DNA, 25 bp, Probe Sequence
tctcttggtctgaaatgaggactgc

SEQ ID NO: 293996 - DNA, 25 bp, Probe Sequence
tctatggagccaagatatgtggact

SEQ ID NO: 293997 - DNA, 25 bp, Probe Sequence
tctatggacttatctgcgaacttat

SEQ ID NO: 293998 - DNA, 25 bp, Probe Sequence
tcataggccttctctgaaaatgtat

SEQ ID NO: 293999 - DNA, 25 bp, Probe Sequence
tctagtttctcgtcagaaatcatgg

SEQ ID NO: 294000 - DNA, 25 bp, Probe Sequence
tctacttatctattttactcgacat

SEQ ID NO: 294001 - DNA, 25 bp, Probe Sequence
tctacatgtacgtgttcatcctggc

SEQ ID NO: 294002 - DNA, 25 bp, Probe Sequence
tctatcagctgggcatgcggtacct

SEQ ID NO: 294003 - DNA, 25 bp, Probe Sequence
tctacggatgcctcgacaggctgtt

SEQ ID NO: 294004 - DNA, 25 bp, Probe Sequence
tctcacttggccttctgaaggtcct

SEQ ID NO: 294005 - DNA, 25 bp, Probe Sequence
tctcacacatgtctaccgaggtctc

SEQ ID NO: 294006 - DNA, 25 bp, Probe Sequence
tctccctgatgcatcctatgagttt

SEQ ID NO: 294007 - DNA, 25 bp, Probe Sequence
tctcgctctggattccatttgggtc

SEQ ID NO: 294008 - DNA, 25 bp, Probe Sequence
tctcctctcgcatctatgtggtgga

SEQ ID NO: 294009 - DNA, 25 bp, Probe Sequence
tctcccttgcattttggcctatgca

SEQ ID NO: 294010 - DNA, 25 bp, Probe Sequence
tctcctctatgaaatgggctcgtaa

SEQ ID NO: 294011 - DNA, 25 bp, Probe Sequence
tctccatctgtgagatgaggctagc

SEQ ID NO: 294012 - DNA, 25 bp, Probe Sequence
tctcctgctgtgagctggctgagga

SEQ ID NO: 294013 - DNA, 25 bp, Probe Sequence
tctcctgctgtgagctggctgagga

SEQ ID NO: 294014 - DNA, 25 bp, Probe Sequence
tctcctctgctgcagcaggggcaga

SEQ ID NO: 294015 - DNA, 25 bp, Probe Sequence
tctcccagctgccagtgggtgcaag

SEQ ID NO: 294016 - DNA, 25 bp, Probe Sequence
tctcccagctgccagtgggtgcaag

SEQ ID NO: 294017 - DNA, 25 bp, Probe Sequence
tctccggcatggagagagagcggaa

SEQ ID NO: 294018 - DNA, 25 bp, Probe Sequence
tctcctgtgcatgggctcgaaggga

SEQ ID NO: 294019 - DNA, 25 bp, Probe Sequence
tctcctgtgctagatgtgcaaatgc

SEQ ID NO: 294020 - DNA, 25 bp, Probe Sequence
tctcactggctgtcagtatgacatt

SEQ ID NO: 294021 - DNA, 25 bp, Probe Sequence
tctcagtgtctgtcactattcctaa

SEQ ID NO: 294022 - DNA, 25 bp, Probe Sequence
tctcagttttagctgctctcaaatt

SEQ ID NO: 294023 - DNA, 25 bp, Probe Sequence
tctaggttcaagtgcgccagaatgc

SEQ ID NO: 294024 - DNA, 25 bp, Probe Sequence
tctccctcagaacggcgcgagaagc

SEQ ID NO: 294025 - DNA, 25 bp, Probe Sequence
tctctgcctggatcccggcagaagc

SEQ ID NO: 294026 - DNA, 25 bp, Probe Sequence
tctagacggcatccagccggaggcc

SEQ ID NO: 294027 - DNA, 25 bp, Probe Sequence
tctaatctggcatgtctcaggattc

SEQ ID NO: 294028 - DNA, 25 bp, Probe Sequence
tctctatcctgcagtcggcagatca

SEQ ID NO: 294029 - DNA, 25 bp, Probe Sequence
tctctctcctgcagtatgagtgacc

SEQ ID NO: 294030 - DNA, 25 bp, Probe Sequence
tctcctcgcatgggcatagggaccc

SEQ ID NO: 294031 - DNA, 25 bp, Probe Sequence
tctctgctttgagtcaaggggcttc

SEQ ID NO: 294032 - DNA, 25 bp, Probe Sequence
tctcctgttggctcacagggctgaa

SEQ ID NO: 294033 - DNA, 25 bp, Probe Sequence
tctcctttagcagacaggtgataac

SEQ ID NO: 294034 - DNA, 25 bp, Probe Sequence
tctcctttgcaatagcagttataac

SEQ ID NO: 294035 - DNA, 25 bp, Probe Sequence
tctcacttaacactacgttttctgc

SEQ ID NO: 294036 - DNA, 25 bp, Probe Sequence
tctccattatatctacatccttttg

SEQ ID NO: 294037 - DNA, 25 bp, Probe Sequence
tctcagcgtaaagcaatccatgctt

SEQ ID NO: 294038 - DNA, 25 bp, Probe Sequence
tctccagtcacagctcagacttcat

SEQ ID NO: 294039 - DNA, 25 bp, Probe Sequence
tctcgcagcaccactatattatcat

SEQ ID NO: 294040 - DNA, 25 bp, Probe Sequence
tctcctactgcaaatattttcatat

SEQ ID NO: 294041 - DNA, 25 bp, Probe Sequence
tctcctcagtcaaaagcatttgctt

SEQ ID NO: 294042 - DNA, 25 bp, Probe Sequence
tctagccatgcttaaacatttttca

SEQ ID NO: 294043 - DNA, 25 bp, Probe Sequence
tctaactgatgaaaatttctctcca

SEQ ID NO: 294044 - DNA, 25 bp, Probe Sequence
tctcacactaaataaatctctatga

SEQ ID NO: 294045 - DNA, 25 bp, Probe Sequence
tctctactaagaactctttcttaaa

SEQ ID NO: 294046 - DNA, 25 bp, Probe Sequence
tctctagttagatgtcagtcctaaa

SEQ ID NO: 294047 - DNA, 25 bp, Probe Sequence
tctctagttagatgtcagtcctaaa

SEQ ID NO: 294048 - DNA, 25 bp, Probe Sequence
tctctaattatacattgtcttaaat

SEQ ID NO: 294049 - DNA, 25 bp, Probe Sequence
tctctagtttatagatggcctgtca

SEQ ID NO: 294050 - DNA, 25 bp, Probe Sequence
tctagtttatagatggcctgtcatg

SEQ ID NO: 294051 - DNA, 25 bp, Probe Sequence
tctagaatttccagcctggtgcgta

SEQ ID NO: 294052 - DNA, 25 bp, Probe Sequence
tctctagaatttccagcctggtgcg

SEQ ID NO: 294053 - DNA, 25 bp, Probe Sequence
tctctaaacttccctctagttggca

SEQ ID NO: 294054 - DNA, 25 bp, Probe Sequence
tcttgttcacttggtcttaatttct

SEQ ID NO: 294055 - DNA, 25 bp, Probe Sequence
tctctgatgatcactggtgttgagc

SEQ ID NO: 294056 - DNA, 25 bp, Probe Sequence
tctctgtgggttctgattcatgctg

SEQ ID NO: 294057 - DNA, 25 bp, Probe Sequence
tctctgctggagactggagtttcac

SEQ ID NO: 294058 - DNA, 25 bp, Probe Sequence
tctctgaggaatttgttttcgcctt

SEQ ID NO: 294059 - DNA, 25 bp, Probe Sequence
tctctgcgggattgtttcaaccttt

SEQ ID NO: 294060 - DNA, 25 bp, Probe Sequence
tctcctggagtacttccaacagttg

SEQ ID NO: 294061 - DNA, 25 bp, Probe Sequence
tctcactgggctttgtcaacacgtg

SEQ ID NO: 294062 - DNA, 25 bp, Probe Sequence
tctccaggtgcactgctataacagc

SEQ ID NO: 294063 - DNA, 25 bp, Probe Sequence
tctatcgcaggagtgctgaaacagg

SEQ ID NO: 294064 - DNA, 25 bp, Probe Sequence
tctctgccagagggcacagaacatg

SEQ ID NO: 294065 - DNA, 25 bp, Probe Sequence
tctctgcctacatgaagtccagccg

SEQ ID NO: 294066 - DNA, 25 bp, Probe Sequence
tctagtctaaggacactgcggccct

SEQ ID NO: 294067 - DNA, 25 bp, Probe Sequence
tctaaggaccgtcctgcgagatcgc

SEQ ID NO: 294068 - DNA, 25 bp, Probe Sequence
tctcaggcgcagcgcctcgcgaacg

SEQ ID NO: 294069 - DNA, 25 bp, Probe Sequence
ttcagtggccggctctgaaagaaaa

SEQ ID NO: 294070 - DNA, 25 bp, Probe Sequence
tctaggtccgcggttacggataaca

SEQ ID NO: 294071 - DNA, 25 bp, Probe Sequence
tctacaattgtgcgttgacggaaaa

SEQ ID NO: 294072 - DNA, 25 bp, Probe Sequence
tctacaacgtgcctgcagtggccga

SEQ ID NO: 294073 - DNA, 25 bp, Probe Sequence
tctctagacggacactgtccaagat

SEQ ID NO: 294074 - DNA, 25 bp, Probe Sequence
tctctctaaggagaatggcccagtc

SEQ ID NO: 294075 - DNA, 25 bp, Probe Sequence
tctatgtcggtataatggcccgcct

SEQ ID NO: 294076 - DNA, 25 bp, Probe Sequence
tcttacgtggactcagagggctccc

SEQ ID NO: 294077 - DNA, 25 bp, Probe Sequence
tcttcacggttctgcaagatgtccc

SEQ ID NO: 294078 - DNA, 25 bp, Probe Sequence
tcttaccatgctaatgggcaagtct

SEQ ID NO: 294079 - DNA, 25 bp, Probe Sequence
tctctcctgctcttgttggaagatc

SEQ ID NO: 294080 - DNA, 25 bp, Probe Sequence
tctctcctgctcttgttggaagatc

SEQ ID NO: 294081 - DNA, 25 bp, Probe Sequence
tctctcctctcgattgtagcatagc

SEQ ID NO: 294082 - DNA, 25 bp, Probe Sequence
tctcccactcagctatgctagggct

SEQ ID NO: 294083 - DNA, 25 bp, Probe Sequence
tctccgactatgccttcttgggcac

SEQ ID NO: 294084 - DNA, 25 bp, Probe Sequence
tctcggactgtgaattttggtgatg

SEQ ID NO: 294085 - DNA, 25 bp, Probe Sequence
tctctggacttgattttaagatctt

SEQ ID NO: 294086 - DNA, 25 bp, Probe Sequence
tctctgactctcctttttaacatca

SEQ ID NO: 294087 - DNA, 25 bp, Probe Sequence
tctcagattgaccatttctgttact

SEQ ID NO: 294088 - DNA, 25 bp, Probe Sequence
tctcatagtgcagctttatttatct

SEQ ID NO: 294089 - DNA, 25 bp, Probe Sequence
tctccagtccctgtgtttttttttg

SEQ ID NO: 294090 - DNA, 25 bp, Probe Sequence
tctcctgtccgtgtttgtttagtac

SEQ ID NO: 294091 - DNA, 25 bp, Probe Sequence
tctcctgtctctttctgttttacag

SEQ ID NO: 294092 - DNA, 25 bp, Probe Sequence
tctcctattcattgcttttatgtga

SEQ ID NO: 294093 - DNA, 25 bp, Probe Sequence
tctcctgatgtacctcttttcatga

SEQ ID NO: 294094 - DNA, 25 bp, Probe Sequence
tctctgggtgaggcatctggttact

SEQ ID NO: 294095 - DNA, 25 bp, Probe Sequence
tctctggcgcgaacactggaatgca

SEQ ID NO: 294096 - DNA, 25 bp, Probe Sequence
tctcagatgcaggatccactaattt

SEQ ID NO: 294097 - DNA, 25 bp, Probe Sequence
tctcaggtcctttctaagtgtccct

SEQ ID NO: 294098 - DNA, 25 bp, Probe Sequence
tctctgagacctcttaagttctaag

SEQ ID NO: 294099 - DNA, 25 bp, Probe Sequence
tctctgatccctcaatttggtctgt

SEQ ID NO: 294100 - DNA, 25 bp, Probe Sequence
tctaccccatgaactttcattcctg

SEQ ID NO: 294101 - DNA, 25 bp, Probe Sequence
tctctctcctactggttattcttga

SEQ ID NO: 294102 - DNA, 25 bp, Probe Sequence
taatctctaaaccatgttaggttaa

SEQ ID NO: 294103 - DNA, 25 bp, Probe Sequence
tcaatttcaataccgtaaggaaaag

SEQ ID NO: 294104 - DNA, 25 bp, Probe Sequence
tcttttcaaaccaaattgggagaat

SEQ ID NO: 294105 - DNA, 25 bp, Probe Sequence
tcttttgacaaccaccttggaaaat

SEQ ID NO: 294106 - DNA, 25 bp, Probe Sequence
tctctttacttggactttgaacaaa

SEQ ID NO: 294107 - DNA, 25 bp, Probe Sequence
tctcatttcagaagaacggcatgaa

SEQ ID NO: 294108 - DNA, 25 bp, Probe Sequence
tctatgtgctcaaggaacatacaga

SEQ ID NO: 294109 - DNA, 25 bp, Probe Sequence
tctagtgctaaataatagtactgaa

SEQ ID NO: 294110 - DNA, 25 bp, Probe Sequence
tctagtcaaaaatatcagtcgggga

SEQ ID NO: 294111 - DNA, 25 bp, Probe Sequence
tctaccaagagaaacaaggcgagga

SEQ ID NO: 294112 - DNA, 25 bp, Probe Sequence
tctctcaaaggacagccacggcagg

SEQ ID NO: 294113 - DNA, 25 bp, Probe Sequence
tctctcaaagaaacacctcaactgg

SEQ ID NO: 294114 - DNA, 25 bp, Probe Sequence
tcttatcgagatagtcactcccacg

SEQ ID NO: 294115 - DNA, 25 bp, Probe Sequence
tctctgtcagagtatgtttctcgca

SEQ ID NO: 294116 - DNA, 25 bp, Probe Sequence
tctctgatcaagcagattccacgaa

SEQ ID NO: 294117 - DNA, 25 bp, Probe Sequence
tctcgacaccgaatcaccatcaaga

SEQ ID NO: 294118 - DNA, 25 bp, Probe Sequence
tctcaagggaatacacatacaaaca

SEQ ID NO: 294119 - DNA, 25 bp, Probe Sequence
tctcaaagtaaagtcattaacatca

SEQ ID NO: 294120 - DNA, 25 bp, Probe Sequence
tctagaggaataaatcgtaacaagg

SEQ ID NO: 294121 - DNA, 25 bp, Probe Sequence
tctaagaaggcaactgcgtaaccag

SEQ ID NO: 294122 - DNA, 25 bp, Probe Sequence
tctcacagaagtccactaaagttca

SEQ ID NO: 294123 - DNA, 25 bp, Probe Sequence
tctcaaacaggcccacaaattctga

SEQ ID NO: 294124 - DNA, 25 bp, Probe Sequence
tctctgcagctctgacccaaattta

SEQ ID NO: 294125 - DNA, 25 bp, Probe Sequence
tctcttgtgcaatccctaatataat

SEQ ID NO: 294126 - DNA, 25 bp, Probe Sequence
tctctattgtaatctctattggaga

SEQ ID NO: 294127 - DNA, 25 bp, Probe Sequence
tctagatttgaagtgtccttgtaga

SEQ ID NO: 294128 - DNA, 25 bp, Probe Sequence
tctaatgttgagcccccgtatgaga

SEQ ID NO: 294129 - DNA, 25 bp, Probe Sequence
tctaagcaaagtgcccctgcaggcg

SEQ ID NO: 294130 - DNA, 25 bp, Probe Sequence
tctcagaggaggactaccgcgggag

SEQ ID NO: 294131 - DNA, 25 bp, Probe Sequence
tctcagggccagaccagacagatgg

SEQ ID NO: 294132 - DNA, 25 bp, Probe Sequence
tcttgggcaattgcagataattcca

SEQ ID NO: 294133 - DNA, 25 bp, Probe Sequence
tctctggccagttgtctggtttcca

SEQ ID NO: 294134 - DNA, 25 bp, Probe Sequence
tctccccagtgccttgagagtttca

SEQ ID NO: 294135 - DNA, 25 bp, Probe Sequence
tctctcccttgctttggagtggact

SEQ ID NO: 294136 - DNA, 25 bp, Probe Sequence
tctccgcgatttttcagagtggaaa

SEQ ID NO: 294137 - DNA, 25 bp, Probe Sequence
tctcctcctctaattaagcttgtta

SEQ ID NO: 294138 - DNA, 25 bp, Probe Sequence
tctctatctctcttatttagtcttc

SEQ ID NO: 294139 - DNA, 25 bp, Probe Sequence
tctctctccctggatgttgagtctc

SEQ ID NO: 294140 - DNA, 25 bp, Probe Sequence
tctctgcccctggatagtgtccagc

SEQ ID NO: 294141 - DNA, 25 bp, Probe Sequence
tctctactccaaatatgatgcccag

SEQ ID NO: 294142 - DNA, 25 bp, Probe Sequence
tctcttcaaaacaagtgctcctgcc

SEQ ID NO: 294143 - DNA, 25 bp, Probe Sequence
tctttagccaaggagtctcccttcc

SEQ ID NO: 294144 - DNA, 25 bp, Probe Sequence
tcttcataccaacggtccctagtta

SEQ ID NO: 294145 - DNA, 25 bp, Probe Sequence
tcttttcttaagctcccaatttggc

SEQ ID NO: 294146 - DNA, 25 bp, Probe Sequence
tctctttctaagagacctgaactgg

SEQ ID NO: 294147 - DNA, 25 bp, Probe Sequence
tctctggccatatacagaccgaact

SEQ ID NO: 294148 - DNA, 25 bp, Probe Sequence
tctctggcgccattgtagcacagcg

SEQ ID NO: 294149 - DNA, 25 bp, Probe Sequence
tctcagcctccattgatcaacggct

SEQ ID NO: 294150 - DNA, 25 bp, Probe Sequence
tctcacttcacattctcaagtggca

SEQ ID NO: 294151 - DNA, 25 bp, Probe Sequence
tctcctgtcacatctaaagtgcgaa

SEQ ID NO: 294152 - DNA, 25 bp, Probe Sequence
tctcgctccatctctaatagactaa

SEQ ID NO: 294153 - DNA, 25 bp, Probe Sequence
tctctgctcccatgtaatagcacag

SEQ ID NO: 294154 - DNA, 25 bp, Probe Sequence
tctctccctcatgaaaacaagccct

SEQ ID NO: 294155 - DNA, 25 bp, Probe Sequence
tctcccctctctttctaagagacct

SEQ ID NO: 294156 - DNA, 25 bp, Probe Sequence
tctcacccatgctgaacattatgaa

SEQ ID NO: 294157 - DNA, 25 bp, Probe Sequence
tctcttcgctgctgaaataataatg

SEQ ID NO: 294158 - DNA, 25 bp, Probe Sequence
tctctacggccccaataaaagacaa

SEQ ID NO: 294159 - DNA, 25 bp, Probe Sequence
tctctcactaccacaagaacaacac

SEQ ID NO: 294160 - DNA, 25 bp, Probe Sequence
tctcttcataccggaccatcaacaa

SEQ ID NO: 294161 - DNA, 25 bp, Probe Sequence
tctcattcaatccctacagcgaatt

SEQ ID NO: 294162 - DNA, 25 bp, Probe Sequence
tctctaaacaactatgcaaacatta

SEQ ID NO: 294163 - DNA, 25 bp, Probe Sequence
tctctgcaattctcgtggagacttt

SEQ ID NO: 294164 - DNA, 25 bp, Probe Sequence
tctctgcagttttctgttgggcctt

SEQ ID NO: 294165 - DNA, 25 bp, Probe Sequence
tctagagtatgttcttatgcgggtt

SEQ ID NO: 294166 - DNA, 25 bp, Probe Sequence
tctagaaagagaacagtgcgcagga

SEQ ID NO: 294167 - DNA, 25 bp, Probe Sequence
tcatcgaaaagaaagcccagctaac

SEQ ID NO: 294168 - DNA, 25 bp, Probe Sequence
tctcgtttagtgaacccgtcagatc

SEQ ID NO: 294169 - DNA, 25 bp, Probe Sequence
tctcagtttccaaaccaagtttcct

SEQ ID NO: 294170 - DNA, 25 bp, Probe Sequence
tctcagatttccaagagccagagat

SEQ ID NO: 294171 - DNA, 25 bp, Probe Sequence
tctcatcttcccaaacaagctgcat

SEQ ID NO: 294172 - DNA, 25 bp, Probe Sequence
tctcctgtccaatgacatgtgtgct

SEQ ID NO: 294173 - DNA, 25 bp, Probe Sequence
tctctgcagatagatagacactggc

SEQ ID NO: 294174 - DNA, 25 bp, Probe Sequence
tctatcagtacgtcggcaatggaag

SEQ ID NO: 294175 - DNA, 25 bp, Probe Sequence
tctagctaggcgtcggacggataac

SEQ ID NO: 294176 - DNA, 25 bp, Probe Sequence
tcttctagggtcccagcttgaccat

SEQ ID NO: 294177 - DNA, 25 bp, Probe Sequence
tctctccaagagaaccagcttccaa

SEQ ID NO: 294178 - DNA, 25 bp, Probe Sequence
tctcccaggagaaagccatgttcag

SEQ ID NO: 294179 - DNA, 25 bp, Probe Sequence
tctctggcagtataactcaggtcag

SEQ ID NO: 294180 - DNA, 25 bp, Probe Sequence
tctcggctgtagtactcgtggatca

SEQ ID NO: 294181 - DNA, 25 bp, Probe Sequence
tctcagggacagtgcacgcaggtgc

SEQ ID NO: 294182 - DNA, 25 bp, Probe Sequence
tctcaggtcaggtctgcagcagagc

SEQ ID NO: 294183 - DNA, 25 bp, Probe Sequence
tctaggactgggcccgagggtggtt

SEQ ID NO: 294184 - DNA, 25 bp, Probe Sequence
tctaggactgggcccgagggtggtt

SEQ ID NO: 294185 - DNA, 25 bp, Probe Sequence
tctcccacttggccaagcagggagg

SEQ ID NO: 294186 - DNA, 25 bp, Probe Sequence
tctcctcgcttcctcaaaaagatca

SEQ ID NO: 294187 - DNA, 25 bp, Probe Sequence
tctcattccttcccaacgatagtaa

SEQ ID NO: 294188 - DNA, 25 bp, Probe Sequence
tctcattccttcccaacgatagtaa

SEQ ID NO: 294189 - DNA, 25 bp, Probe Sequence
tctcattacccacacacgaaggaaa

SEQ ID NO: 294190 - DNA, 25 bp, Probe Sequence
tctcccatcccagatacgacagatg

SEQ ID NO: 294191 - DNA, 25 bp, Probe Sequence
tctaccagggccatattagcagtga

SEQ ID NO: 294192 - DNA, 25 bp, Probe Sequence
tctctccaaccccatttatgcagga

SEQ ID NO: 294193 - DNA, 25 bp, Probe Sequence
tctctccaaccccatttatgcagga

SEQ ID NO: 294194 - DNA, 25 bp, Probe Sequence
tctttaactccgtgtctgaggagtt

SEQ ID NO: 294195 - DNA, 25 bp, Probe Sequence
tctaataattttgcctctgggaatt

SEQ ID NO: 294196 - DNA, 25 bp, Probe Sequence
tctactacaattcagtcattgggaa

SEQ ID NO: 294197 - DNA, 25 bp, Probe Sequence
tctactacttgaatgattttggaat

SEQ ID NO: 294198 - DNA, 25 bp, Probe Sequence
tctcacttgctaacatgtttttatt

SEQ ID NO: 294199 - DNA, 25 bp, Probe Sequence
tctacctaagtcagctttcatcttt

SEQ ID NO: 294200 - DNA, 25 bp, Probe Sequence
tctaggtaactcaagtgtcacctcc

SEQ ID NO: 294201 - DNA, 25 bp, Probe Sequence
tctatttaactgcagattctcccaa

SEQ ID NO: 294202 - DNA, 25 bp, Probe Sequence
tctcaattaccatatatacacccaa

SEQ ID NO: 294203 - DNA, 25 bp, Probe Sequence
tctctcatttcctgtaagcaaccaa

SEQ ID NO: 294204 - DNA, 25 bp, Probe Sequence
tctcgctttgttgtcaaacacccgt

SEQ ID NO: 294205 - DNA, 25 bp, Probe Sequence
tctctcgctttgttgtcaaacaccc

SEQ ID NO: 294206 - DNA, 25 bp, Probe Sequence
tcttcatcttggggtaattacaggc

SEQ ID NO: 294207 - DNA, 25 bp, Probe Sequence
tctctgcagtgtaaggtccttagca

SEQ ID NO: 294208 - DNA, 25 bp, Probe Sequence
tctaatggctcttctgacgcttgga

SEQ ID NO: 294209 - DNA, 25 bp, Probe Sequence
tctaatggctcttctgacgcttgga

SEQ ID NO: 294210 - DNA, 25 bp, Probe Sequence
tctaaatcttatccacatgtctgtg

SEQ ID NO: 294211 - DNA, 25 bp, Probe Sequence
tctaagacctccaagcttgttttta

SEQ ID NO: 294212 - DNA, 25 bp, Probe Sequence
ttacgacccgaacagattttgtcaa

SEQ ID NO: 294213 - DNA, 25 bp, Probe Sequence
tctactaccaccaaggagaatagtt

SEQ ID NO: 294214 - DNA, 25 bp, Probe Sequence
tctattaaattaaaagactttctca

SEQ ID NO: 294215 - DNA, 25 bp, Probe Sequence
tcatatgtaacttaaaactttctag

SEQ ID NO: 294216 - DNA, 25 bp, Probe Sequence
tctcttgaagtttccaaccctttgt

SEQ ID NO: 294217 - DNA, 25 bp, Probe Sequence
tctctttcagtattaaactctcctt

SEQ ID NO: 294218 - DNA, 25 bp, Probe Sequence
tctctgttaatacataattgctcca

SEQ ID NO: 294219 - DNA, 25 bp, Probe Sequence
tctctggctatttgcaaaacctctc

SEQ ID NO: 294220 - DNA, 25 bp, Probe Sequence
tctctgagccttgcaaaacctgcac

SEQ ID NO: 294221 - DNA, 25 bp, Probe Sequence
tctctgccttcagcaatcaattcca

SEQ ID NO: 294222 - DNA, 25 bp, Probe Sequence
tcttgtttctaccaatattctaggc

SEQ ID NO: 294223 - DNA, 25 bp, Probe Sequence
tcttccctccaccagtagttaggtg

SEQ ID NO: 294224 - DNA, 25 bp, Probe Sequence
tcttccaacccccttaatatggctt

SEQ ID NO: 294225 - DNA, 25 bp, Probe Sequence
tctcccaactactgttactggttat

SEQ ID NO: 294226 - DNA, 25 bp, Probe Sequence
tctcccttcacctgttacagagttt

SEQ ID NO: 294227 - DNA, 25 bp, Probe Sequence
tctcacacctccttagctgtaagag

SEQ ID NO: 294228 - DNA, 25 bp, Probe Sequence
tctcaaccatcctaagagctgaaaa

SEQ ID NO: 294229 - DNA, 25 bp, Probe Sequence
tctcagagccgccacaagattgaac

SEQ ID NO: 294230 - DNA, 25 bp, Probe Sequence
tctcagcccagccactgatgctgga

SEQ ID NO: 294231 - DNA, 25 bp, Probe Sequence
tctcagcccagccactgatgctgga

SEQ ID NO: 294232 - DNA, 25 bp, Probe Sequence
tctcagttagtgacagatgttgttg

SEQ ID NO: 294233 - DNA, 25 bp, Probe Sequence
tctcagcttcattggctagtttctc

SEQ ID NO: 294234 - DNA, 25 bp, Probe Sequence
tctcagtcaatttctggggaccctg

SEQ ID NO: 294235 - DNA, 25 bp, Probe Sequence
tctcgctgagggacggtgaggccac

SEQ ID NO: 294236 - DNA, 25 bp, Probe Sequence
tctacatgggtaacgatgaccacac

SEQ ID NO: 294237 - DNA, 25 bp, Probe Sequence
tctctctcctttacgagacgaaaag

SEQ ID NO: 294238 - DNA, 25 bp, Probe Sequence
tctccccgtcatggcaaacgagcaa

SEQ ID NO: 294239 - DNA, 25 bp, Probe Sequence
tctcccctatatggcatggaccaaa

SEQ ID NO: 294240 - DNA, 25 bp, Probe Sequence
tctcggcccatttgaagaccaggaa

SEQ ID NO: 294241 - DNA, 25 bp, Probe Sequence
tcttggcgcctttaggacataccca

SEQ ID NO: 294242 - DNA, 25 bp, Probe Sequence
tctagcgtcttcacagcgaatacac

SEQ ID NO: 294243 - DNA, 25 bp, Probe Sequence
tctacggttgcaaactgctgaccac

SEQ ID NO: 294244 - DNA, 25 bp, Probe Sequence
tcttcgacaagcacaggtgactctc

SEQ ID NO: 294245 - DNA, 25 bp, Probe Sequence
tctctctacagtgactgggcttcct

SEQ ID NO: 294246 - DNA, 25 bp, Probe Sequence
tctctttctggcctggaggctatcc

SEQ ID NO: 294247 - DNA, 25 bp, Probe Sequence
tctctcgtctaggggagacattcaa

SEQ ID NO: 294248 - DNA, 25 bp, Probe Sequence
tctctggcctatggggacccaagag

SEQ ID NO: 294249 - DNA, 25 bp, Probe Sequence
tctttgactatgaggccaccctgag

SEQ ID NO: 294250 - DNA, 25 bp, Probe Sequence
tctttctgttgatggtaaccaagaa

SEQ ID NO: 294251 - DNA, 25 bp, Probe Sequence
tcttcttcttttttaactgaaagct

SEQ ID NO: 294252 - DNA, 25 bp, Probe Sequence
tcttgtttcttccttgaaagtaact

SEQ ID NO: 294253 - DNA, 25 bp, Probe Sequence
catccgcattgctgataccaatatc

SEQ ID NO: 294254 - DNA, 25 bp, Probe Sequence
tctattttgcctgaatttccacctc

SEQ ID NO: 294255 - DNA, 25 bp, Probe Sequence
tctttgtaggacaatttctccacct

SEQ ID NO: 294256 - DNA, 25 bp, Probe Sequence
tctcttatcaagaatacctgcccgc

SEQ ID NO: 294257 - DNA, 25 bp, Probe Sequence
tctctttgcaagaatcagccagcca

SEQ ID NO: 294258 - DNA, 25 bp, Probe Sequence
tctctgttgctgctggtgcaagcca

SEQ ID NO: 294259 - DNA, 25 bp, Probe Sequence
tctcgcattctgctggattgccaca

SEQ ID NO: 294260 - DNA, 25 bp, Probe Sequence
tcatcctgtgctcggaaatcccaaa

SEQ ID NO: 294261 - DNA, 25 bp, Probe Sequence
tctcagtggtctagaaaatcagaaa

SEQ ID NO: 294262 - DNA, 25 bp, Probe Sequence
tctagatggccttgaccactctgat

SEQ ID NO: 294263 - DNA, 25 bp, Probe Sequence
tctcaacatctcagaccactggatc

SEQ ID NO: 294264 - DNA, 25 bp, Probe Sequence
tctagatcatctaagatccatgctg

SEQ ID NO: 294265 - DNA, 25 bp, Probe Sequence
tctagatttagaatgccaccccaaa

SEQ ID NO: 294266 - DNA, 25 bp, Probe Sequence
tctagaaataaaatcaccctgactg

SEQ ID NO: 294267 - DNA, 25 bp, Probe Sequence
tctacaaataattgccccctttgtt

SEQ ID NO: 294268 - DNA, 25 bp, Probe Sequence
tctatgtaaaagccccacctattgc

SEQ ID NO: 294269 - DNA, 25 bp, Probe Sequence
tctcgtcaaagggccactgccaagg

SEQ ID NO: 294270 - DNA, 25 bp, Probe Sequence
tctcagtataactccatctgcaata

SEQ ID NO: 294271 - DNA, 25 bp, Probe Sequence
tctctctataagtttctgtcattga

SEQ ID NO: 294272 - DNA, 25 bp, Probe Sequence
tctctcttctaactctctacttaga

SEQ ID NO: 294273 - DNA, 25 bp, Probe Sequence
tctagctatctatgacctacctgtg

SEQ ID NO: 294274 - DNA, 25 bp, Probe Sequence
tctactactaaaacgtccagttctt

SEQ ID NO: 294275 - DNA, 25 bp, Probe Sequence
tctcatctagtacctaccttagttt

SEQ ID NO: 294276 - DNA, 25 bp, Probe Sequence
tctcttcatgtatcatccccagagc

SEQ ID NO: 294277 - DNA, 25 bp, Probe Sequence
tctcttcatgtatctcctaatgcct

SEQ ID NO: 294278 - DNA, 25 bp, Probe Sequence
tctctctcttaagccttattcttca

SEQ ID NO: 294279 - DNA, 25 bp, Probe Sequence
tctttttacaacatttttcattata

SEQ ID NO: 294280 - DNA, 25 bp, Probe Sequence
tcttttttcagagaaggccttacag

SEQ ID NO: 294281 - DNA, 25 bp, Probe Sequence
tctttatgttcttaaggaccccaca

SEQ ID NO: 294282 - DNA, 25 bp, Probe Sequence
tcatccaagttttaagtcctccacc

SEQ ID NO: 294283 - DNA, 25 bp, Probe Sequence
tcatgcctatttaatggaacctcca

SEQ ID NO: 294284 - DNA, 25 bp, Probe Sequence
tctaaatgtcttaagaacctaatta

SEQ ID NO: 294285 - DNA, 25 bp, Probe Sequence
tctacatgttttaagacaccttgtt

SEQ ID NO: 294286 - DNA, 25 bp, Probe Sequence
tctagctgtctggctgtataactct

SEQ ID NO: 294287 - DNA, 25 bp, Probe Sequence
tctcactgtctgctggcaaagatag

SEQ ID NO: 294288 - DNA, 25 bp, Probe Sequence
tctactggcaggcgacaagtcactc

SEQ ID NO: 294289 - DNA, 25 bp, Probe Sequence
tctacgggatctttccattatgtcg

SEQ ID NO: 294290 - DNA, 25 bp, Probe Sequence
tctaagggacattatcttgttgtga

SEQ ID NO: 294291 - DNA, 25 bp, Probe Sequence
tctaggggaatctctgtgatagtaa

SEQ ID NO: 294292 - DNA, 25 bp, Probe Sequence
tctaagtgtttcacagtgtctgtaa

SEQ ID NO: 294293 - DNA, 25 bp, Probe Sequence
tctaatgtgtctctcacggcttgta

SEQ ID NO: 294294 - DNA, 25 bp, Probe Sequence
tctcaaggctctggaactgtggatg

SEQ ID NO: 294295 - DNA, 25 bp, Probe Sequence
tctaaactctttcttggatgccacc

SEQ ID NO: 294296 - DNA, 25 bp, Probe Sequence
tctcaaatttttcaatggttctttt

SEQ ID NO: 294297 - DNA, 25 bp, Probe Sequence
tttgtcacttttcaagtactttctg

SEQ ID NO: 294298 - DNA, 25 bp, Probe Sequence
tctttgccttttgaactcacttcaa

SEQ ID NO: 294299 - DNA, 25 bp, Probe Sequence
tctattcctttcttaaacctaccag

SEQ ID NO: 294300 - DNA, 25 bp, Probe Sequence
tctttcctttacaattacttggcct

SEQ ID NO: 294301 - DNA, 25 bp, Probe Sequence
tctattttatttatttttcccagtg

SEQ ID NO: 294302 - DNA, 25 bp, Probe Sequence
tctctctcttttttttttttgacag

SEQ ID NO: 294303 - DNA, 25 bp, Probe Sequence
tctaactcttctgttcgttgttaga

SEQ ID NO: 294304 - DNA, 25 bp, Probe Sequence
tctagacttggatctgccagttgtt

SEQ ID NO: 294305 - DNA, 25 bp, Probe Sequence
tctttcttgtatctccgttgattcc

SEQ ID NO: 294306 - DNA, 25 bp, Probe Sequence
tctattcttgcttaaaactgtactc

SEQ ID NO: 294307 - DNA, 25 bp, Probe Sequence
tctacatttctattaagaggctact

SEQ ID NO: 294308 - DNA, 25 bp, Probe Sequence
tctcacttccaacttaggaccaacc

SEQ ID NO: 294309 - DNA, 25 bp, Probe Sequence
tctaattcaagacctcaagccaaac

SEQ ID NO: 294310 - DNA, 25 bp, Probe Sequence
tctacatacaagacttcaccataag

SEQ ID NO: 294311 - DNA, 25 bp, Probe Sequence
tctcacattcagacttacacttaat

SEQ ID NO: 294312 - DNA, 25 bp, Probe Sequence
tctagatctcagacatgctttcttt

SEQ ID NO: 294313 - DNA, 25 bp, Probe Sequence
tctaacacagactttcttcactgtc

SEQ ID NO: 294314 - DNA, 25 bp, Probe Sequence
tctaactcaggagtcagccaactgt

SEQ ID NO: 294315 - DNA, 25 bp, Probe Sequence
tctcaagtcaaggccaggcacggcg

SEQ ID NO: 294316 - DNA, 25 bp, Probe Sequence
tctatattctgatcggagccggcgc

SEQ ID NO: 294317 - DNA, 25 bp, Probe Sequence
tctaatgtggagtgcgacttggcca

SEQ ID NO: 294318 - DNA, 25 bp, Probe Sequence
tctacttgggtagcttggtgccatt

SEQ ID NO: 294319 - DNA, 25 bp, Probe Sequence
tctacttatttagatctttccattt

SEQ ID NO: 294320 - DNA, 25 bp, Probe Sequence
tctctttgtttctgagctttcctgt

SEQ ID NO: 294321 - DNA, 25 bp, Probe Sequence
tctcttttctacagattttccaggg

SEQ ID NO: 294322 - DNA, 25 bp, Probe Sequence
tctcatttttccaaattctttactg

SEQ ID NO: 294323 - DNA, 25 bp, Probe Sequence
tctctcttacccatactattatatt

SEQ ID NO: 294324 - DNA, 25 bp, Probe Sequence
tctctttaagccccagttatgcaac

SEQ ID NO: 294325 - DNA, 25 bp, Probe Sequence
tctacttaaggcccagttaatataa

SEQ ID NO: 294326 - DNA, 25 bp, Probe Sequence
tctacttacctgctggatttttcaa

SEQ ID NO: 294327 - DNA, 25 bp, Probe Sequence
tctactttctcctatggatcgctta

SEQ ID NO: 294328 - DNA, 25 bp, Probe Sequence
tctactgaagctgattggtaggcta

SEQ ID NO: 294329 - DNA, 25 bp, Probe Sequence
tctacataactttcgtaatggcccg

SEQ ID NO: 294330 - DNA, 25 bp, Probe Sequence
tctaataactgcagtgtttcccgcc

SEQ ID NO: 294331 - DNA, 25 bp, Probe Sequence
tctaatcaatgtcaggctttcctcg

SEQ ID NO: 294332 - DNA, 25 bp, Probe Sequence
tctcgaaattgccagtgtgtacttg

SEQ ID NO: 294333 - DNA, 25 bp, Probe Sequence
tctctggacatggccctttacatag

SEQ ID NO: 294334 - DNA, 25 bp, Probe Sequence
tcttgttcatactcaaatagtagtt

SEQ ID NO: 294335 - DNA, 25 bp, Probe Sequence
tctctattcttccaccagttgtggc

SEQ ID NO: 294336 - DNA, 25 bp, Probe Sequence
tctcatagtcttccctgacttgggt

SEQ ID NO: 294337 - DNA, 25 bp, Probe Sequence
tctacagttgtacccctagggaggg

SEQ ID NO: 294338 - DNA, 25 bp, Probe Sequence
tctcaccggtggctaagcgggggcg

SEQ ID NO: 294339 - DNA, 25 bp, Probe Sequence
tttctcttgcttctaaggggtggtg

SEQ ID NO: 294340 - DNA, 25 bp, Probe Sequence
tcttctgactttctaggggtttggg

SEQ ID NO: 294341 - DNA, 25 bp, Probe Sequence
tttgtgtccctgtgggtggacgtgg

SEQ ID NO: 294342 - DNA, 25 bp, Probe Sequence
tcttttgcccgtaggtgggagggtg

SEQ ID NO: 294343 - DNA, 25 bp, Probe Sequence
tctactcatgccagattttgggatt

SEQ ID NO: 294344 - DNA, 25 bp, Probe Sequence
tctctgctgtcccagttttgaggtt

SEQ ID NO: 294345 - DNA, 25 bp, Probe Sequence
tctctgttccgcaggatggggtttg

SEQ ID NO: 294346 - DNA, 25 bp, Probe Sequence
tctcagtgtccgtggcatttttgtg

SEQ ID NO: 294347 - DNA, 25 bp, Probe Sequence
ttaggtccgtcacatttcagaagag

SEQ ID NO: 294348 - DNA, 25 bp, Probe Sequence
tctcggtccgtcaaagtgaagatca

SEQ ID NO: 294349 - DNA, 25 bp, Probe Sequence
tctcggtccgtcaaagtgaagatca

SEQ ID NO: 294350 - DNA, 25 bp, Probe Sequence
tctcgtctctctgccatgaaggaat

SEQ ID NO: 294351 - DNA, 25 bp, Probe Sequence
tcaggtcacataactatgtagggcc

SEQ ID NO: 294352 - DNA, 25 bp, Probe Sequence
tcaggctgatcaccatgctagtcac

SEQ ID NO: 294353 - DNA, 25 bp, Probe Sequence
tctcagctcatcccactgatgacac

SEQ ID NO: 294354 - DNA, 25 bp, Probe Sequence
tctcagtctctgtccgagacagccg

SEQ ID NO: 294355 - DNA, 25 bp, Probe Sequence
tctcagtctcttgctgcagatcagt

SEQ ID NO: 294356 - DNA, 25 bp, Probe Sequence
tctcagtcaatttgccagccaggga

SEQ ID NO: 294357 - DNA, 25 bp, Probe Sequence
tctcatgtggtttgcacagcccagc

SEQ ID NO: 294358 - DNA, 25 bp, Probe Sequence
tctctgttgaaacggtccagcccag

SEQ ID NO: 294359 - DNA, 25 bp, Probe Sequence
tcttgctgtgagaggtctcaccccg

SEQ ID NO: 294360 - DNA, 25 bp, Probe Sequence
tctctgtgtggatagactccccagc

SEQ ID NO: 294361 - DNA, 25 bp, Probe Sequence
tcatctggggcatttacttcgccat

SEQ ID NO: 294362 - DNA, 25 bp, Probe Sequence
tctttgggctttagttcctctcata

SEQ ID NO: 294363 - DNA, 25 bp, Probe Sequence
tctactttggttaggtagctccagc

SEQ ID NO: 294364 - DNA, 25 bp, Probe Sequence
tcttatttggccaggtagctctcct

SEQ ID NO: 294365 - DNA, 25 bp, Probe Sequence
tctttgttgacccggtacttcatac

SEQ ID NO: 294366 - DNA, 25 bp, Probe Sequence
tctactgtgtaggggaggactttgt

SEQ ID NO: 294367 - DNA, 25 bp, Probe Sequence
tctacttggaggaatgggatttggg

SEQ ID NO: 294368 - DNA, 25 bp, Probe Sequence
tcttcttgagggtggacttcttggt

SEQ ID NO: 294369 - DNA, 25 bp, Probe Sequence
tcatttactgggagtgagttcattg

SEQ ID NO: 294370 - DNA, 25 bp, Probe Sequence
tctctaagctggcctcaggtttatt

SEQ ID NO: 294371 - DNA, 25 bp, Probe Sequence
tctctctcctggtgcagagttgcaa

SEQ ID NO: 294372 - DNA, 25 bp, Probe Sequence
tcttgctgccggagcgttacatcaa

SEQ ID NO: 294373 - DNA, 25 bp, Probe Sequence
tctagctggcgaaacctgtatccgg

SEQ ID NO: 294374 - DNA, 25 bp, Probe Sequence
tctagatggggccacctatgacctc

SEQ ID NO: 294375 - DNA, 25 bp, Probe Sequence
tctcaaggagtgtctccttgcccct

SEQ ID NO: 294376 - DNA, 25 bp, Probe Sequence
tctctagagaggacatccctgctgg

SEQ ID NO: 294377 - DNA, 25 bp, Probe Sequence
tctctaacgcagaacatctctctag

SEQ ID NO: 294378 - DNA, 25 bp, Probe Sequence
tctctcatcaaggctacaattgctg

SEQ ID NO: 294379 - DNA, 25 bp, Probe Sequence
tctctcatctttttcaagtcttttc

SEQ ID NO: 294380 - DNA, 25 bp, Probe Sequence
tctctgttctgtttggcacttgtat

SEQ ID NO: 294381 - DNA, 25 bp, Probe Sequence
tctctgtgttctgtgtatttgtctg

SEQ ID NO: 294382 - DNA, 25 bp, Probe Sequence
tctctctgtgactggtgattttgtg

SEQ ID NO: 294383 - DNA, 25 bp, Probe Sequence
tctctcgtgactgggacttgtggga

SEQ ID NO: 294384 - DNA, 25 bp, Probe Sequence
tcttggtagttctcttgggcagaaa

SEQ ID NO: 294385 - DNA, 25 bp, Probe Sequence
tcttttgattcctcttgggctgaag

SEQ ID NO: 294386 - DNA, 25 bp, Probe Sequence
tcttttccccagtatagtggaaaga

SEQ ID NO: 294387 - DNA, 25 bp, Probe Sequence
tcattttttcaattatagttgggga

SEQ ID NO: 294388 - DNA, 25 bp, Probe Sequence
tctcttttcaaaccaaattgggaga

SEQ ID NO: 294389 - DNA, 25 bp, Probe Sequence
tcttcttggaggttaaaagggagca

SEQ ID NO: 294390 - DNA, 25 bp, Probe Sequence
tctttctggaatgtcaccaaccaag

SEQ ID NO: 294391 - DNA, 25 bp, Probe Sequence
tcttctcagaagtgacaccaacccc

SEQ ID NO: 294392 - DNA, 25 bp, Probe Sequence
tctcaccacatacagatgcccaatc

SEQ ID NO: 294393 - DNA, 25 bp, Probe Sequence
tctctctctctacagtgactgggct

SEQ ID NO: 294394 - DNA, 25 bp, Probe Sequence
tctctctcctccaaatgacaaagtt

SEQ ID NO: 294395 - DNA, 25 bp, Probe Sequence
ttatccctggtgaggaaagttaagt

SEQ ID NO: 294396 - DNA, 25 bp, Probe Sequence
tttcccaggtttgtcaacgtgactg

SEQ ID NO: 294397 - DNA, 25 bp, Probe Sequence
tcattcttcaggattgccctactgg

SEQ ID NO: 294398 - DNA, 25 bp, Probe Sequence
tcattcttcaggattgccctactgg

SEQ ID NO: 294399 - DNA, 25 bp, Probe Sequence
tcattcttcaggattgccctactgg

SEQ ID NO: 294400 - DNA, 25 bp, Probe Sequence
tcattcttcaggattgccctactgg

SEQ ID NO: 294401 - DNA, 25 bp, Probe Sequence
tcatacttaaatttgcaggctacct

SEQ ID NO: 294402 - DNA, 25 bp, Probe Sequence
tctactaaatattagcggggtgtgg

SEQ ID NO: 294403 - DNA, 25 bp, Probe Sequence
tctacttaattagtcagcggctgga

SEQ ID NO: 294404 - DNA, 25 bp, Probe Sequence
tctactgtatactagccggggaaat

SEQ ID NO: 294405 - DNA, 25 bp, Probe Sequence
tctacaccaactatgaggcgggcaa

SEQ ID NO: 294406 - DNA, 25 bp, Probe Sequence
tctctccctactattcagcgggtgg

SEQ ID NO: 294407 - DNA, 25 bp, Probe Sequence
tctctactaaatattagcggggtgt

SEQ ID NO: 294408 - DNA, 25 bp, Probe Sequence
tttaggaaatcgaggcgagtggatc

SEQ ID NO: 294409 - DNA, 25 bp, Probe Sequence
tctctatctgggagctgggccaggg

SEQ ID NO: 294410 - DNA, 25 bp, Probe Sequence
tctcttgctgagaacttgattgaag

SEQ ID NO: 294411 - DNA, 25 bp, Probe Sequence
tctcttctgaggaccgctgataagc

SEQ ID NO: 294412 - DNA, 25 bp, Probe Sequence
tctttctggatgactctgctgacag

SEQ ID NO: 294413 - DNA, 25 bp, Probe Sequence
tctctctggagttcatgtgctgcct

SEQ ID NO: 294414 - DNA, 25 bp, Probe Sequence
tctcatgctggatgccagctggccc

SEQ ID NO: 294415 - DNA, 25 bp, Probe Sequence
tctcagtgtaacgacatggccagtg

SEQ ID NO: 294416 - DNA, 25 bp, Probe Sequence
tctactgttcacgaaatcctgtgca

SEQ ID NO: 294417 - DNA, 25 bp, Probe Sequence
tctacttggggaaatcaggtgcagc

SEQ ID NO: 294418 - DNA, 25 bp, Probe Sequence
tctcactgagggggaacgattgcac

SEQ ID NO: 294419 - DNA, 25 bp, Probe Sequence
tctacagagtgtggcggacgattga

SEQ ID NO: 294420 - DNA, 25 bp, Probe Sequence
tctaatgtgatgcccggaatatctg

SEQ ID NO: 294421 - DNA, 25 bp, Probe Sequence
tctactgtattcccaaaaggcaata

SEQ ID NO: 294422 - DNA, 25 bp, Probe Sequence
tctagcctagtccgcgggacggata

SEQ ID NO: 294423 - DNA, 25 bp, Probe Sequence
tctagcctagtccgcgggacggata

SEQ ID NO: 294424 - DNA, 25 bp, Probe Sequence
tctacctaactgccagcaagaagaa

SEQ ID NO: 294425 - DNA, 25 bp, Probe Sequence
tctactcgtatccccaagattcaga

SEQ ID NO: 294426 - DNA, 25 bp, Probe Sequence
tctcactctgttgtccaggttggag

SEQ ID NO: 294427 - DNA, 25 bp, Probe Sequence
ttctttggatggtccggattggagg

SEQ ID NO: 294428 - DNA, 25 bp, Probe Sequence
tcttttaaggtgacccatctgtgat

SEQ ID NO: 294429 - DNA, 25 bp, Probe Sequence
tctctcttaggtaccacctcatgga

SEQ ID NO: 294430 - DNA, 25 bp, Probe Sequence
tcttttgatggcgagaaccaaggag

SEQ ID NO: 294431 - DNA, 25 bp, Probe Sequence
tctttggtgcccgacaaatgggctg

SEQ ID NO: 294432 - DNA, 25 bp, Probe Sequence
tctttactcaaggataacacggcga

SEQ ID NO: 294433 - DNA, 25 bp, Probe Sequence
tcttgtaccaattataggggaggaa

SEQ ID NO: 294434 - DNA, 25 bp, Probe Sequence
tcttttccatgtatgaggaggggga

SEQ ID NO: 294435 - DNA, 25 bp, Probe Sequence
tcatttcttcttgtggggtggggct

SEQ ID NO: 294436 - DNA, 25 bp, Probe Sequence
tcatttcttcttgtggggtggggct

SEQ ID NO: 294437 - DNA, 25 bp, Probe Sequence
tcttggaagcttggtggaggtgggg

SEQ ID NO: 294438 - DNA, 25 bp, Probe Sequence
tctctgctgaaggttgtaagtggtc

SEQ ID NO: 294439 - DNA, 25 bp, Probe Sequence
tctctctgaatcctaagggctggtc

SEQ ID NO: 294440 - DNA, 25 bp, Probe Sequence
tctctgccaatgcctcaaaggcctg

SEQ ID NO: 294441 - DNA, 25 bp, Probe Sequence
tctagccaagccatcaagtgtctga

SEQ ID NO: 294442 - DNA, 25 bp, Probe Sequence
tctcagccaaacctgctgcttggtg

SEQ ID NO: 294443 - DNA, 25 bp, Probe Sequence
tctcaggcaggcagctgcgtcttgt

SEQ ID NO: 294444 - DNA, 25 bp, Probe Sequence
tctcatgtgcggctggttttggaca

SEQ ID NO: 294445 - DNA, 25 bp, Probe Sequence
tctcagtgagtgatggtcagaatag

SEQ ID NO: 294446 - DNA, 25 bp, Probe Sequence
tctcagtgggcagtctgccaggaga

SEQ ID NO: 294447 - DNA, 25 bp, Probe Sequence
tctactagagagtctgccagatgag

SEQ ID NO: 294448 - DNA, 25 bp, Probe Sequence
tctatccagcagacacacctgttgg

SEQ ID NO: 294449 - DNA, 25 bp, Probe Sequence
tctcacactgtgaaccacttaggat

SEQ ID NO: 294450 - DNA, 25 bp, Probe Sequence
tctcacacttgttgcaccaaagtga

SEQ ID NO: 294451 - DNA, 25 bp, Probe Sequence
tctcacgttgctccaccaataaacg

SEQ ID NO: 294452 - DNA, 25 bp, Probe Sequence
tctacatggcttcgcagcccaaaaa

SEQ ID NO: 294453 - DNA, 25 bp, Probe Sequence
tctcagcagcccagtccaaataaac

SEQ ID NO: 294454 - DNA, 25 bp, Probe Sequence
tctcagaacgctgtgcccaatacaa

SEQ ID NO: 294455 - DNA, 25 bp, Probe Sequence
tctagaacactcctctcagggatca

SEQ ID NO: 294456 - DNA, 25 bp, Probe Sequence
tctagataacctcgggccgatcgca

SEQ ID NO: 294457 - DNA, 25 bp, Probe Sequence
tctaatgaaccatttggcctgtaga

SEQ ID NO: 294458 - DNA, 25 bp, Probe Sequence
tctagcagaacctttatcaagtgaa

SEQ ID NO: 294459 - DNA, 25 bp, Probe Sequence
tctacgacacacttaatactgtgaa

SEQ ID NO: 294460 - DNA, 25 bp, Probe Sequence
tctactgtgacacttatctcactgt

SEQ ID NO: 294461 - DNA, 25 bp, Probe Sequence
tctcttgttatctgcatctcattgt

SEQ ID NO: 294462 - DNA, 25 bp, Probe Sequence
tctcaatggatttctgcttcagtta

SEQ ID NO: 294463 - DNA, 25 bp, Probe Sequence
tctacagtattagtctatcgcttac

SEQ ID NO: 294464 - DNA, 25 bp, Probe Sequence
tctacagaaatgctctatttacaaa

SEQ ID NO: 294465 - DNA, 25 bp, Probe Sequence
tcacgagaacaaactttgtaaatct

SEQ ID NO: 294466 - DNA, 25 bp, Probe Sequence
tcaccataaaacattttccctcctt

SEQ ID NO: 294467 - DNA, 25 bp, Probe Sequence
tcacttaacgatattttctttttct

SEQ ID NO: 294468 - DNA, 25 bp, Probe Sequence
tactaagtagtcatccttttccctt

SEQ ID NO: 294469 - DNA, 25 bp, Probe Sequence
tatcttagtaaagcccttttcctct

SEQ ID NO: 294470 - DNA, 25 bp, Probe Sequence
tcatcattgaaaataccccttcccc

SEQ ID NO: 294471 - DNA, 25 bp, Probe Sequence
tcatttgctagtaactcccttaccg

SEQ ID NO: 294472 - DNA, 25 bp, Probe Sequence
tctatatgctgatgatactcaaatt

SEQ ID NO: 294473 - DNA, 25 bp, Probe Sequence
tctagatctcagttaatgcttatgc

SEQ ID NO: 294474 - DNA, 25 bp, Probe Sequence
tctagtcatcacttgtgcagctgaa

SEQ ID NO: 294475 - DNA, 25 bp, Probe Sequence
tctttatccctgtcactaattttac

SEQ ID NO: 294476 - DNA, 25 bp, Probe Sequence
tctagatcccccgattacatttcta

SEQ ID NO: 294477 - DNA, 25 bp, Probe Sequence
tctaccaaacccatagatgtgttaa

SEQ ID NO: 294478 - DNA, 25 bp, Probe Sequence
tctacgagataaccccaagtttacg

SEQ ID NO: 294479 - DNA, 25 bp, Probe Sequence
tctagatattaaccccatatttaga

SEQ ID NO: 294480 - DNA, 25 bp, Probe Sequence
tctagaagacagtaccattctttaa

SEQ ID NO: 294481 - DNA, 25 bp, Probe Sequence
tctcaaacctggacctttattgaac

SEQ ID NO: 294482 - DNA, 25 bp, Probe Sequence
tctaacacacttctttttctaagga

SEQ ID NO: 294483 - DNA, 25 bp, Probe Sequence
tctagaaccctgggtttttacatgt

SEQ ID NO: 294484 - DNA, 25 bp, Probe Sequence
tctacaatccctccgttagattaaa

SEQ ID NO: 294485 - DNA, 25 bp, Probe Sequence
tctcactttgccccagttacaaaaa

SEQ ID NO: 294486 - DNA, 25 bp, Probe Sequence
tctcactttgccccagttacaaaaa

SEQ ID NO: 294487 - DNA, 25 bp, Probe Sequence
tctcactttgaggcacatttacatc

SEQ ID NO: 294488 - DNA, 25 bp, Probe Sequence
tctcagtcttcagctctatttatct

SEQ ID NO: 294489 - DNA, 25 bp, Probe Sequence
tctacctcagctacttatttacttg

SEQ ID NO: 294490 - DNA, 25 bp, Probe Sequence
tctttctcagtttattggttgaatg

SEQ ID NO: 294491 - DNA, 25 bp, Probe Sequence
tctcttttctggtcatgtctttaat

SEQ ID NO: 294492 - DNA, 25 bp, Probe Sequence
tctcttctccaggaatgtctggtca

SEQ ID NO: 294493 - DNA, 25 bp, Probe Sequence
tctctactcatgccagattttggga

SEQ ID NO: 294494 - DNA, 25 bp, Probe Sequence
tctctactctgaggcactctgttgg

SEQ ID NO: 294495 - DNA, 25 bp, Probe Sequence
tctctactctgaggcactctgttgg

SEQ ID NO: 294496 - DNA, 25 bp, Probe Sequence
tcttcagattgtggatgtgtgtcat

SEQ ID NO: 294497 - DNA, 25 bp, Probe Sequence
tctctaatctgttttgagtctttac

SEQ ID NO: 294498 - DNA, 25 bp, Probe Sequence
tctctaatttatcggcagcttctgt

SEQ ID NO: 294499 - DNA, 25 bp, Probe Sequence
tctcttgtttctttgcattaatgta

SEQ ID NO: 294500 - DNA, 25 bp, Probe Sequence
tctttgtttgtaacttatctgtaaa

SEQ ID NO: 294501 - DNA, 25 bp, Probe Sequence
tctctagtttgattaaattcttgca

SEQ ID NO: 294502 - DNA, 25 bp, Probe Sequence
tctctcactgtttatacgttattca

SEQ ID NO: 294503 - DNA, 25 bp, Probe Sequence
tcatctccggaaacttttatctcac

SEQ ID NO: 294504 - DNA, 25 bp, Probe Sequence
tcatcctcctaatgttgagaaaatc

SEQ ID NO: 294505 - DNA, 25 bp, Probe Sequence
tcttccactacattgttgaaatcaa

SEQ ID NO: 294506 - DNA, 25 bp, Probe Sequence
tctcacaaaacccgctacagacaag

SEQ ID NO: 294507 - DNA, 25 bp, Probe Sequence
tctacaacccaataacagacatgag

SEQ ID NO: 294508 - DNA, 25 bp, Probe Sequence
tctacagatcccaaaagcttggtaa

SEQ ID NO: 294509 - DNA, 25 bp, Probe Sequence
tctaactcctcaaccatctgtggta

SEQ ID NO: 294510 - DNA, 25 bp, Probe Sequence
tctcaagctccttccctaggagcat

SEQ ID NO: 294511 - DNA, 25 bp, Probe Sequence
tctcaactacttcgccattgcggag

SEQ ID NO: 294512 - DNA, 25 bp, Probe Sequence
tctcaactacattggcctcgatgga

SEQ ID NO: 294513 - DNA, 25 bp, Probe Sequence
tctcaagctttgtacactggataaa

SEQ ID NO: 294514 - DNA, 25 bp, Probe Sequence
tctcatatttctcacactaaataaa

SEQ ID NO: 294515 - DNA, 25 bp, Probe Sequence
tcttattcccaatgctacacaacca

SEQ ID NO: 294516 - DNA, 25 bp, Probe Sequence
tcttattcccaatgctacacaacca

SEQ ID NO: 294517 - DNA, 25 bp, Probe Sequence
tctctttcacacaatacttcagaca

SEQ ID NO: 294518 - DNA, 25 bp, Probe Sequence
tctctttcgtgattccttgcaacaa

SEQ ID NO: 294519 - DNA, 25 bp, Probe Sequence
tcttcattcagttaccttcaaggaa

SEQ ID NO: 294520 - DNA, 25 bp, Probe Sequence
tctcatttccttatctctcagtgga

SEQ ID NO: 294521 - DNA, 25 bp, Probe Sequence
tctcttaccgtcctctaggtaactc

SEQ ID NO: 294522 - DNA, 25 bp, Probe Sequence
tctcttcaccgtgttaacataatct

SEQ ID NO: 294523 - DNA, 25 bp, Probe Sequence
tctcatttcccagtttaatcataga

SEQ ID NO: 294524 - DNA, 25 bp, Probe Sequence
tctctttgccatgcttttcatcata

SEQ ID NO: 294525 - DNA, 25 bp, Probe Sequence
tctctatatccgccattgatatcga

SEQ ID NO: 294526 - DNA, 25 bp, Probe Sequence
tctcttcactgcacattgcaatgca

SEQ ID NO: 294527 - DNA, 25 bp, Probe Sequence
tctttcacgtacatccatcatttgc

SEQ ID NO: 294528 - DNA, 25 bp, Probe Sequence
tctttggtgtacagacttcttggta

SEQ ID NO: 294529 - DNA, 25 bp, Probe Sequence
tcttttcttcagcggttcttgttga

SEQ ID NO: 294530 - DNA, 25 bp, Probe Sequence
tcttttttgcggctttgctgtggtt

SEQ ID NO: 294531 - DNA, 25 bp, Probe Sequence
tctttattttgtcatagggaggatt

SEQ ID NO: 294532 - DNA, 25 bp, Probe Sequence
tctttgttcttcccaaggagggaca

SEQ ID NO: 294533 - DNA, 25 bp, Probe Sequence
tctatggggtaccccaagtcggaca

SEQ ID NO: 294534 - DNA, 25 bp, Probe Sequence
tcattggggtccccaacgtgggcaa

SEQ ID NO: 294535 - DNA, 25 bp, Probe Sequence
tcttgggccgccggaaggtgggtga

SEQ ID NO: 294536 - DNA, 25 bp, Probe Sequence
tcttgggactggggtttcggattga

SEQ ID NO: 294537 - DNA, 25 bp, Probe Sequence
tcttgtccctggggcaatgtgtgtg

SEQ ID NO: 294538 - DNA, 25 bp, Probe Sequence
tcttaactctgacacaattggatgc

SEQ ID NO: 294539 - DNA, 25 bp, Probe Sequence
tcttaacctgtctagctgtcggaaa

SEQ ID NO: 294540 - DNA, 25 bp, Probe Sequence
tctcttacctttagctgcttgatca

SEQ ID NO: 294541 - DNA, 25 bp, Probe Sequence
tctcattagcctgtgactctgtgat

SEQ ID NO: 294542 - DNA, 25 bp, Probe Sequence
tctcttcgctttcacttggactgag

SEQ ID NO: 294543 - DNA, 25 bp, Probe Sequence
tctcttgctgttctgacttggcaca

SEQ ID NO: 294544 - DNA, 25 bp, Probe Sequence
tctatgaggcttgctcctatggctc

SEQ ID NO: 294545 - DNA, 25 bp, Probe Sequence
tcatctgggcaatcccgtggcttag

SEQ ID NO: 294546 - DNA, 25 bp, Probe Sequence
tctcattacaacccttctggttatt

SEQ ID NO: 294547 - DNA, 25 bp, Probe Sequence
tcttaattactcttccaggtccaat

SEQ ID NO: 294548 - DNA, 25 bp, Probe Sequence
tcttaactgacgtaccatggtagct

SEQ ID NO: 294549 - DNA, 25 bp, Probe Sequence
tctatgtactacaaacctggttttt

SEQ ID NO: 294550 - DNA, 25 bp, Probe Sequence
tctttacccaggattggtttcttca

SEQ ID NO: 294551 - DNA, 25 bp, Probe Sequence
tctttcctccaggtagagttttctt

SEQ ID NO: 294552 - DNA, 25 bp, Probe Sequence
tctagacactaagatatgagcatag

SEQ ID NO: 294553 - DNA, 25 bp, Probe Sequence
tctaagcatgctcagctaatagctg

SEQ ID NO: 294554 - DNA, 25 bp, Probe Sequence
tctcatactgctcagtgacatggcc

SEQ ID NO: 294555 - DNA, 25 bp, Probe Sequence
tctcaacatgcctggagatgccccg

SEQ ID NO: 294556 - DNA, 25 bp, Probe Sequence
tctacaatgccacggatggatctca

SEQ ID NO: 294557 - DNA, 25 bp, Probe Sequence
tctataatgccacagatggatctca

SEQ ID NO: 294558 - DNA, 25 bp, Probe Sequence
tcttaacccgtgagctctaattgga

SEQ ID NO: 294559 - DNA, 25 bp, Probe Sequence
tctttacccgaaaccattctcttga

SEQ ID NO: 294560 - DNA, 25 bp, Probe Sequence
tctctatattcccaaattcatattt

SEQ ID NO: 294561 - DNA, 25 bp, Probe Sequence
tctcattagccccttttaatttgtt

SEQ ID NO: 294562 - DNA, 25 bp, Probe Sequence
tctttccccacggttatatgtgtgt

SEQ ID NO: 294563 - DNA, 25 bp, Probe Sequence
tctcttctagcgtggttttcttgtg

SEQ ID NO: 294564 - DNA, 25 bp, Probe Sequence
tctttgtcaagtgggcttttgttta

SEQ ID NO: 294565 - DNA, 25 bp, Probe Sequence
tcttcaatccgaggacctttggctc

SEQ ID NO: 294566 - DNA, 25 bp, Probe Sequence
tcttaactcgatgacttggggctcc

SEQ ID NO: 294567 - DNA, 25 bp, Probe Sequence
tcttacccgttgttaggggcgcagc

SEQ ID NO: 294568 - DNA, 25 bp, Probe Sequence
tctttcccggagttcaggtgactga

SEQ ID NO: 294569 - DNA, 25 bp, Probe Sequence
tctagcccagggcatacagctgtcc

SEQ ID NO: 294570 - DNA, 25 bp, Probe Sequence
tctacccacggctaaggtcttcatt

SEQ ID NO: 294571 - DNA, 25 bp, Probe Sequence
tctacctccagggaaagccttctta

SEQ ID NO: 294572 - DNA, 25 bp, Probe Sequence
tctagcttttgggaaaacgtgcttc

SEQ ID NO: 294573 - DNA, 25 bp, Probe Sequence
tctactttgtctccataagcctgtt

SEQ ID NO: 294574 - DNA, 25 bp, Probe Sequence
tctagttataaccaccagccgttaa

SEQ ID NO: 294575 - DNA, 25 bp, Probe Sequence
tctcactttaacctcacatggcaga

SEQ ID NO: 294576 - DNA, 25 bp, Probe Sequence
tctactcctacagtctgcaaggcta

SEQ ID NO: 294577 - DNA, 25 bp, Probe Sequence
tctacctgctaagtcaagggttcac

SEQ ID NO: 294578 - DNA, 25 bp, Probe Sequence
tctaccctaatttcactggagtgac

SEQ ID NO: 294579 - DNA, 25 bp, Probe Sequence
tctacaccttcactgatacttttac

SEQ ID NO: 294580 - DNA, 25 bp, Probe Sequence
tctatcacctcttctaatcttttaa

SEQ ID NO: 294581 - DNA, 25 bp, Probe Sequence
tctaaatcctcatttatctcttcta

SEQ ID NO: 294582 - DNA, 25 bp, Probe Sequence
tctataattgtatatatgcctttga

SEQ ID NO: 294583 - DNA, 25 bp, Probe Sequence
tctataatttgattcattgccgtaa

SEQ ID NO: 294584 - DNA, 25 bp, Probe Sequence
tctacattttgagtttgatggtaaa

SEQ ID NO: 294585 - DNA, 25 bp, Probe Sequence
tcttcacgcttgcttccagtaaaaa

SEQ ID NO: 294586 - DNA, 25 bp, Probe Sequence
tcttacgttggtggccaagtaactt

SEQ ID NO: 294587 - DNA, 25 bp, Probe Sequence
tcttactgtcattgtcctaaaacct

SEQ ID NO: 294588 - DNA, 25 bp, Probe Sequence
tctacctctatatcaccaaagtcct

SEQ ID NO: 294589 - DNA, 25 bp, Probe Sequence
tcttttctactagcaaatgacccta

SEQ ID NO: 294590 - DNA, 25 bp, Probe Sequence
tctcttgctccccacaagaagtcca

SEQ ID NO: 294591 - DNA, 25 bp, Probe Sequence
tcatttgcttccacaagaaccgcga

SEQ ID NO: 294592 - DNA, 25 bp, Probe Sequence
tcattattacctcctagggccagga

SEQ ID NO: 294593 - DNA, 25 bp, Probe Sequence
tctcttctgaccatctgggttttga

SEQ ID NO: 294594 - DNA, 25 bp, Probe Sequence
tctaagctggcctcaggtttattgg

SEQ ID NO: 294595 - DNA, 25 bp, Probe Sequence
tcagaacttgccttcagggttagct

SEQ ID NO: 294596 - DNA, 25 bp, Probe Sequence
tcaggagctcttctaggtaaagctg

SEQ ID NO: 294597 - DNA, 25 bp, Probe Sequence
tcaggccctgtctgggccagaactg

SEQ ID NO: 294598 - DNA, 25 bp, Probe Sequence
tcagtcacctattacggtcctactg

SEQ ID NO: 294599 - DNA, 25 bp, Probe Sequence
tcaagaccctacatggtcctactta

SEQ ID NO: 294600 - DNA, 25 bp, Probe Sequence
tcataaccaaagagaatcccacatt

SEQ ID NO: 294601 - DNA, 25 bp, Probe Sequence
tcattcactctaggggacccctact

SEQ ID NO: 294602 - DNA, 25 bp, Probe Sequence
tcttaattactagacctcagtactg

SEQ ID NO: 294603 - DNA, 25 bp, Probe Sequence
tctttttaatatgcccgaatgaatg

SEQ ID NO: 294604 - DNA, 25 bp, Probe Sequence
tcttttaataatgtcacgagcacca

SEQ ID NO: 294605 - DNA, 25 bp, Probe Sequence
tctttctaagtcggcttcgagcacc

SEQ ID NO: 294606 - DNA, 25 bp, Probe Sequence
tctcttccagtgtccgtgttaatgt

SEQ ID NO: 294607 - DNA, 25 bp, Probe Sequence
tctcagtccttgttcttttgaagct

SEQ ID NO: 294608 - DNA, 25 bp, Probe Sequence
tctcattctctttgttttgtggcac

SEQ ID NO: 294609 - DNA, 25 bp, Probe Sequence
tctcttgctctaaatgatatgtgtg

SEQ ID NO: 294610 - DNA, 25 bp, Probe Sequence
tctcttgcggtgctcatgatgtgtg

SEQ ID NO: 294611 - DNA, 25 bp, Probe Sequence
tcatgcttcggatgtcttggagacc

SEQ ID NO: 294612 - DNA, 25 bp, Probe Sequence
tctacgcggtggactacgagacctt

SEQ ID NO: 294613 - DNA, 25 bp, Probe Sequence
tatatcccagtgctgtaccagcctt

SEQ ID NO: 294614 - DNA, 25 bp, Probe Sequence
tcttccaatgagcttaaaacatttt

SEQ ID NO: 294615 - DNA, 25 bp, Probe Sequence
tcttctaatgtctggaaagcaactg

SEQ ID NO: 294616 - DNA, 25 bp, Probe Sequence
tctttacttcccaaaacatcctgga

SEQ ID NO: 294617 - DNA, 25 bp, Probe Sequence
ttttaccagcccttggacactatgg

SEQ ID NO: 294618 - DNA, 25 bp, Probe Sequence
tctcattaccacacttgctaaaaag

SEQ ID NO: 294619 - DNA, 25 bp, Probe Sequence
tctcaatcccagattttcaaaaaat

SEQ ID NO: 294620 - DNA, 25 bp, Probe Sequence
tctaatcccagcattaaagtgaaac

SEQ ID NO: 294621 - DNA, 25 bp, Probe Sequence
tctttgcccgccttggcaagtacat

SEQ ID NO: 294622 - DNA, 25 bp, Probe Sequence
tctttgcccgccttggcaagtacat

SEQ ID NO: 294623 - DNA, 25 bp, Probe Sequence
tctacgccagccagtggacaggatt

SEQ ID NO: 294624 - DNA, 25 bp, Probe Sequence
tctacccgcaggagctgacatggac

SEQ ID NO: 294625 - DNA, 25 bp, Probe Sequence
tctaccgcgaggtggaccagcgcga

SEQ ID NO: 294626 - DNA, 25 bp, Probe Sequence
tctatctccaggagggcaagggcga

SEQ ID NO: 294627 - DNA, 25 bp, Probe Sequence
tctacacctgggaggcttgcgacga

SEQ ID NO: 294628 - DNA, 25 bp, Probe Sequence
tctagcacactgcagtgaggccagg

SEQ ID NO: 294629 - DNA, 25 bp, Probe Sequence
tctacacggggttagctgcaggtgg

SEQ ID NO: 294630 - DNA, 25 bp, Probe Sequence
tctacacacgtgtattagtctgttt

SEQ ID NO: 294631 - DNA, 25 bp, Probe Sequence
tctcacaccctgcagtggatgcatg

SEQ ID NO: 294632 - DNA, 25 bp, Probe Sequence
tctcacaagcaaccctgagagagac

SEQ ID NO: 294633 - DNA, 25 bp, Probe Sequence
tctactttcacatcggagagacgga

SEQ ID NO: 294634 - DNA, 25 bp, Probe Sequence
tctagctagtccgcgggttcggata

SEQ ID NO: 294635 - DNA, 25 bp, Probe Sequence
tctagctaggccgcgggacggataa

SEQ ID NO: 294636 - DNA, 25 bp, Probe Sequence
tctagcctagccgcgggacggataa

SEQ ID NO: 294637 - DNA, 25 bp, Probe Sequence
tctagcctagccgcgggacggataa

SEQ ID NO: 294638 - DNA, 25 bp, Probe Sequence
tctagcctagccgcgggacggataa

SEQ ID NO: 294639 - DNA, 25 bp, Probe Sequence
tctacctgatccgggtggcacggag

SEQ ID NO: 294640 - DNA, 25 bp, Probe Sequence
tctaagctgcacatgggggcccagc

SEQ ID NO: 294641 - DNA, 25 bp, Probe Sequence
tctacgctgagcagggcgacgtgca

SEQ ID NO: 294642 - DNA, 25 bp, Probe Sequence
tctagcgggactcggcatgaggctg

SEQ ID NO: 294643 - DNA, 25 bp, Probe Sequence
tctcagcgcagtgccgatggtggcc

SEQ ID NO: 294644 - DNA, 25 bp, Probe Sequence
tctcatcaaggctacaattgctggt

SEQ ID NO: 294645 - DNA, 25 bp, Probe Sequence
tctagccaggaatctattgtgtttt

SEQ ID NO: 294646 - DNA, 25 bp, Probe Sequence
tcatcagccggattttgttattgat

SEQ ID NO: 294647 - DNA, 25 bp, Probe Sequence
tcatcagccggattttgttattgat

SEQ ID NO: 294648 - DNA, 25 bp, Probe Sequence
tctacacggaggttgtgtttacaat

SEQ ID NO: 294649 - DNA, 25 bp, Probe Sequence
tctaatctgttttgagtctttacaa

SEQ ID NO: 294650 - DNA, 25 bp, Probe Sequence
tctacacttatttagcattttaaca

SEQ ID NO: 294651 - DNA, 25 bp, Probe Sequence
tctaccattcatagccagatgtgta

SEQ ID NO: 294652 - DNA, 25 bp, Probe Sequence
tctacctcactgaccgggtcatgac

SEQ ID NO: 294653 - DNA, 25 bp, Probe Sequence
tctacctcactgaccgggtcatgac

SEQ ID NO: 294654 - DNA, 25 bp, Probe Sequence
tctacacacctgagggggagacggc

SEQ ID NO: 294655 - DNA, 25 bp, Probe Sequence
tctacacccgcatcaggggagggat

SEQ ID NO: 294656 - DNA, 25 bp, Probe Sequence
tctcagcggcccacgaggtggagtt

SEQ ID NO: 294657 - DNA, 25 bp, Probe Sequence
tctcaggggctctagggactgccag

SEQ ID NO: 294658 - DNA, 25 bp, Probe Sequence
tctaggttctcatgccatattccag

SEQ ID NO: 294659 - DNA, 25 bp, Probe Sequence
tctatgagtctccacgcaatttcta

SEQ ID NO: 294660 - DNA, 25 bp, Probe Sequence
tctagcaggtcatcggtgctttgct

SEQ ID NO: 294661 - DNA, 25 bp, Probe Sequence
ttacggtaacggccacttggccagt

SEQ ID NO: 294662 - DNA, 25 bp, Probe Sequence
tctagggaagtcatctcacttggcc

SEQ ID NO: 294663 - DNA, 25 bp, Probe Sequence
tctagagaggaagcccctctgagcc

SEQ ID NO: 294664 - DNA, 25 bp, Probe Sequence
tctagagaggacatccctgctgggc

SEQ ID NO: 294665 - DNA, 25 bp, Probe Sequence
tctagagaggacatccctgctgggc

SEQ ID NO: 294666 - DNA, 25 bp, Probe Sequence
tctagaacccggctctgagggcact

SEQ ID NO: 294667 - DNA, 25 bp, Probe Sequence
tctagtactccgtggaaggatcctc

SEQ ID NO: 294668 - DNA, 25 bp, Probe Sequence
tcatttttgccgtggataggcgctt

SEQ ID NO: 294669 - DNA, 25 bp, Probe Sequence
tcttgatttcgcttaggccagagtg

SEQ ID NO: 294670 - DNA, 25 bp, Probe Sequence
tcttcttcccaggtgtgccaaggaa

SEQ ID NO: 294671 - DNA, 25 bp, Probe Sequence
tctacttcgaagactggcaagcacg

SEQ ID NO: 294672 - DNA, 25 bp, Probe Sequence
tctactctagaaagcatggaaatta

SEQ ID NO: 294673 - DNA, 25 bp, Probe Sequence
tctatctaaatttcatccattatta

SEQ ID NO: 294674 - DNA, 25 bp, Probe Sequence
tctactataaggtattctatattta

SEQ ID NO: 294675 - DNA, 25 bp, Probe Sequence
tctcactgcatataagagttatgtt

SEQ ID NO: 294676 - DNA, 25 bp, Probe Sequence
tctacatccaccaaaattgtgtgtg

SEQ ID NO: 294677 - DNA, 25 bp, Probe Sequence
tctacgccactccacaaatgatgtt

SEQ ID NO: 294678 - DNA, 25 bp, Probe Sequence
tctactcttcaccacgatatcatgt

SEQ ID NO: 294679 - DNA, 25 bp, Probe Sequence
tctaatttatcggcagcttctgtgg

SEQ ID NO: 294680 - DNA, 25 bp, Probe Sequence
tctatgaatttcgtacttattacct

SEQ ID NO: 294681 - DNA, 25 bp, Probe Sequence
tcttgagtactacttttcctacctt

SEQ ID NO: 294682 - DNA, 25 bp, Probe Sequence
tcttcgtactaaaatttgattcctt

SEQ ID NO: 294683 - DNA, 25 bp, Probe Sequence
tcttccaaatatgactttacccttg

SEQ ID NO: 294684 - DNA, 25 bp, Probe Sequence
tcttagtaaagcccttttcctctgt

SEQ ID NO: 294685 - DNA, 25 bp, Probe Sequence
tttagcttaaagatgtattggtttt

SEQ ID NO: 294686 - DNA, 25 bp, Probe Sequence
tcttaccctaagttgttctggcata

SEQ ID NO: 294687 - DNA, 25 bp, Probe Sequence
tctttgccctaagcttcttggaata

SEQ ID NO: 294688 - DNA, 25 bp, Probe Sequence
tctttcctaagagcccttcgaagca

SEQ ID NO: 294689 - DNA, 25 bp, Probe Sequence
tcttttcttgactcctttctcaagt

SEQ ID NO: 294690 - DNA, 25 bp, Probe Sequence
tctttggttgacccctggattaaag

SEQ ID NO: 294691 - DNA, 25 bp, Probe Sequence
tctttagtcttccctttgttatatg

SEQ ID NO: 294692 - DNA, 25 bp, Probe Sequence
tctatttccttctcatattgattat

SEQ ID NO: 294693 - DNA, 25 bp, Probe Sequence
tcttctttattctgttgatgtggtg

SEQ ID NO: 294694 - DNA, 25 bp, Probe Sequence
tcttattttacttcttttagctgtt

SEQ ID NO: 294695 - DNA, 25 bp, Probe Sequence
tcttttgtttgaagtgcttatcagc

SEQ ID NO: 294696 - DNA, 25 bp, Probe Sequence
tcttctctattgtaaggtttccatt

SEQ ID NO: 294697 - DNA, 25 bp, Probe Sequence
tcttctcagatacagaccgttttat

SEQ ID NO: 294698 - DNA, 25 bp, Probe Sequence
tctactcgttgttgaaatttttatt

SEQ ID NO: 294699 - DNA, 25 bp, Probe Sequence
tctactcgggaacaaacgttggttg

SEQ ID NO: 294700 - DNA, 25 bp, Probe Sequence
tcttctgggggactgagaactgtag

SEQ ID NO: 294701 - DNA, 25 bp, Probe Sequence
ttgggactgggtggaaacttgatgc

SEQ ID NO: 294702 - DNA, 25 bp, Probe Sequence
tatgggagggagtagaactttgact

SEQ ID NO: 294703 - DNA, 25 bp, Probe Sequence
ttcgggcgaagacaaacggatgcac

SEQ ID NO: 294704 - DNA, 25 bp, Probe Sequence
tttggctgaaggtcctaacctgatt

SEQ ID NO: 294705 - DNA, 25 bp, Probe Sequence
tcttcttggggtcctgatactcatt

SEQ ID NO: 294706 - DNA, 25 bp, Probe Sequence
tctttctgggaccatctggattcat

SEQ ID NO: 294707 - DNA, 25 bp, Probe Sequence
tcttcatcggaaccatccaagtgat

SEQ ID NO: 294708 - DNA, 25 bp, Probe Sequence
tcttccaaaggcctcgagtgcgata

SEQ ID NO: 294709 - DNA, 25 bp, Probe Sequence
tctcaccaggaggtgtcgcactgcc

SEQ ID NO: 294710 - DNA, 25 bp, Probe Sequence
tctacactgggcagctggccctgaa

SEQ ID NO: 294711 - DNA, 25 bp, Probe Sequence
tctacactgggcagctggccctgaa

SEQ ID NO: 294712 - DNA, 25 bp, Probe Sequence
tctttctgggcaaggtcgtcgaccc

SEQ ID NO: 294713 - DNA, 25 bp, Probe Sequence
tctatttgggcaagagatgcgctta

SEQ ID NO: 294714 - DNA, 25 bp, Probe Sequence
tttgcaggcggtcaggcctataccc

SEQ ID NO: 294715 - DNA, 25 bp, Probe Sequence
tttccgggacaaccgcatggacagg

SEQ ID NO: 294716 - DNA, 25 bp, Probe Sequence
tcttcacagtgttcccctagaaagg

SEQ ID NO: 294717 - DNA, 25 bp, Probe Sequence
tcttcccgtccctgatgacaaagat

SEQ ID NO: 294718 - DNA, 25 bp, Probe Sequence
tctaccctctccttaaacatcagaa

SEQ ID NO: 294719 - DNA, 25 bp, Probe Sequence
tctacctttgctttcagaaccactt

SEQ ID NO: 294720 - DNA, 25 bp, Probe Sequence
tctacaatcttgacatttgaaccat

SEQ ID NO: 294721 - DNA, 25 bp, Probe Sequence
tctcaatcactcagctcttaaagca

SEQ ID NO: 294722 - DNA, 25 bp, Probe Sequence
tctatatagcctttgctaaagagca

SEQ ID NO: 294723 - DNA, 25 bp, Probe Sequence
tctcaagagcctgtgttcatctaga

SEQ ID NO: 294724 - DNA, 25 bp, Probe Sequence
tctcaaattctgtaggatctgtagt

SEQ ID NO: 294725 - DNA, 25 bp, Probe Sequence
tctaggtttgcatgtagctatagtc

SEQ ID NO: 294726 - DNA, 25 bp, Probe Sequence
tctagagtagagttgctagtcatat

SEQ ID NO: 294727 - DNA, 25 bp, Probe Sequence
tctaaataaatcctcctgtttcccg

SEQ ID NO: 294728 - DNA, 25 bp, Probe Sequence
tctaaatagcttcgtctcagtttcc

SEQ ID NO: 294729 - DNA, 25 bp, Probe Sequence
tcataaatcctgatttagtttcctg

SEQ ID NO: 294730 - DNA, 25 bp, Probe Sequence
tcatccatttcgtgttttttcctgt

SEQ ID NO: 294731 - DNA, 25 bp, Probe Sequence
tcttcttgtcgctttttgtcatata

SEQ ID NO: 294732 - DNA, 25 bp, Probe Sequence
tcttgggggcttttttcatacagct

SEQ ID NO: 294733 - DNA, 25 bp, Probe Sequence
ttatgggcaaccaatctttggaagc

SEQ ID NO: 294734 - DNA, 25 bp, Probe Sequence
tctagaagcacacctctttttgaca

SEQ ID NO: 294735 - DNA, 25 bp, Probe Sequence
tctaggagccgctctttttccagaa

SEQ ID NO: 294736 - DNA, 25 bp, Probe Sequence
tcttagagcccgtctttatgtttaa

SEQ ID NO: 294737 - DNA, 25 bp, Probe Sequence
tcttatacctaattttagtctttca

SEQ ID NO: 294738 - DNA, 25 bp, Probe Sequence
tctaacacttacgatttattcttta

SEQ ID NO: 294739 - DNA, 25 bp, Probe Sequence
tctacacctggaaatttactcttga

SEQ ID NO: 294740 - DNA, 25 bp, Probe Sequence
tctaccctgcagatattctaatata

SEQ ID NO: 294741 - DNA, 25 bp, Probe Sequence
tctactctaaactgctctaatgaag

SEQ ID NO: 294742 - DNA, 25 bp, Probe Sequence
tctacctgaatactctcctgagaaa

SEQ ID NO: 294743 - DNA, 25 bp, Probe Sequence
tctagcttacttcccctgtgaagaa

SEQ ID NO: 294744 - DNA, 25 bp, Probe Sequence
tctagtgggttgacctttaaatgca

SEQ ID NO: 294745 - DNA, 25 bp, Probe Sequence
tctatgaccgggaccccgaaggcaa

SEQ ID NO: 294746 - DNA, 25 bp, Probe Sequence
tcttactcgggagctggctgaagat

SEQ ID NO: 294747 - DNA, 25 bp, Probe Sequence
tctttcattacaccctagctgaagg

SEQ ID NO: 294748 - DNA, 25 bp, Probe Sequence
tctatttcaagctacaccattgaga

SEQ ID NO: 294749 - DNA, 25 bp, Probe Sequence
tcatattatcaagaagctaggagga

SEQ ID NO: 294750 - DNA, 25 bp, Probe Sequence
tctacacacagagaagtacgtggaa

SEQ ID NO: 294751 - DNA, 25 bp, Probe Sequence
tcttctcatcgggacagcccgtgca

SEQ ID NO: 294752 - DNA, 25 bp, Probe Sequence
tcatttatcttgaacattccgacgt

SEQ ID NO: 294753 - DNA, 25 bp, Probe Sequence
tcttcctctgtgaaaatccaatacc

SEQ ID NO: 294754 - DNA, 25 bp, Probe Sequence
tctttccgttgtgtccaaatctgtt

SEQ ID NO: 294755 - DNA, 25 bp, Probe Sequence
tctttacttttcacttcaattaatg

SEQ ID NO: 294756 - DNA, 25 bp, Probe Sequence
tctaaactttatcccatcgctttga

SEQ ID NO: 294757 - DNA, 25 bp, Probe Sequence
tctaattcttaacactcatacttga

SEQ ID NO: 294758 - DNA, 25 bp, Probe Sequence
tcttattcccactcctcaaattgga

SEQ ID NO: 294759 - DNA, 25 bp, Probe Sequence
tctaagaaactcccctaaatggcaa

SEQ ID NO: 294760 - DNA, 25 bp, Probe Sequence
tcttcagaaaacctccaaagtagat

SEQ ID NO: 294761 - DNA, 25 bp, Probe Sequence
tcttgacaaaacctaacttgcgcag

SEQ ID NO: 294762 - DNA, 25 bp, Probe Sequence
tcttgacaaaacctaacttgcgcag

SEQ ID NO: 294763 - DNA, 25 bp, Probe Sequence
tcttgaaaaaccctatgttccatgg

SEQ ID NO: 294764 - DNA, 25 bp, Probe Sequence
tctataaataaagctatattctgta

SEQ ID NO: 294765 - DNA, 25 bp, Probe Sequence
tctatgaccattaggcctatttagg

SEQ ID NO: 294766 - DNA, 25 bp, Probe Sequence
tctagcattcaaggtcccattcggg

SEQ ID NO: 294767 - DNA, 25 bp, Probe Sequence
tctagtgtagcagcctccaggcagg

SEQ ID NO: 294768 - DNA, 25 bp, Probe Sequence
tctagtgtagcagcctccaggcagg

SEQ ID NO: 294769 - DNA, 25 bp, Probe Sequence
tctagtgggaccttgactggagaaa

SEQ ID NO: 294770 - DNA, 25 bp, Probe Sequence
tctagtgcagagaacttgttgagga

SEQ ID NO: 294771 - DNA, 25 bp, Probe Sequence
tctagtgccgtcaatttgagataat

SEQ ID NO: 294772 - DNA, 25 bp, Probe Sequence
tctagccacagtatattgcaataaa

SEQ ID NO: 294773 - DNA, 25 bp, Probe Sequence
tctaccacgtttctggatacagtga

SEQ ID NO: 294774 - DNA, 25 bp, Probe Sequence
tctaccacattctccaggtagcaag

SEQ ID NO: 294775 - DNA, 25 bp, Probe Sequence
tctacgacctgctctaggtgggcat

SEQ ID NO: 294776 - DNA, 25 bp, Probe Sequence
tctaacccagcaccatagactgggt

SEQ ID NO: 294777 - DNA, 25 bp, Probe Sequence
tctatacctagcaccagtgcttggc

SEQ ID NO: 294778 - DNA, 25 bp, Probe Sequence
tctatagcacttgatcatatgttat

SEQ ID NO: 294779 - DNA, 25 bp, Probe Sequence
tctagatacttttcattaccttttt

SEQ ID NO: 294780 - DNA, 25 bp, Probe Sequence
tctacatacctatcatgtgccctgt

SEQ ID NO: 294781 - DNA, 25 bp, Probe Sequence
tctacacacccatagtgcacacttg

SEQ ID NO: 294782 - DNA, 25 bp, Probe Sequence
tctacacacccatagtgcacacttg

SEQ ID NO: 294783 - DNA, 25 bp, Probe Sequence
tctataccaataaagtgaccttgct

SEQ ID NO: 294784 - DNA, 25 bp, Probe Sequence
tcttcccactagaaggggaactcca

SEQ ID NO: 294785 - DNA, 25 bp, Probe Sequence
tctatcccaccaaaaataagcactc

SEQ ID NO: 294786 - DNA, 25 bp, Probe Sequence
tctatccctcacagtaccaaacgat

SEQ ID NO: 294787 - DNA, 25 bp, Probe Sequence
tctatccctcacagtaccaacggat

SEQ ID NO: 294788 - DNA, 25 bp, Probe Sequence
tctatctggctactcgtatcgaaca

SEQ ID NO: 294789 - DNA, 25 bp, Probe Sequence
tctttggcaacttaattagacatag

SEQ ID NO: 294790 - DNA, 25 bp, Probe Sequence
tcttttgccctgtaatgtaacaaag

SEQ ID NO: 294791 - DNA, 25 bp, Probe Sequence
tcttttccacttttgtgaaaaccat

SEQ ID NO: 294792 - DNA, 25 bp, Probe Sequence
tcttacccctggtgagaaaagcaca

SEQ ID NO: 294793 - DNA, 25 bp, Probe Sequence
tcatttcccctttaagaacaacatg

SEQ ID NO: 294794 - DNA, 25 bp, Probe Sequence
tattcgtcctttgacaaaagtaaat

SEQ ID NO: 294795 - DNA, 25 bp, Probe Sequence
tctttctcctttagaagaatactac

SEQ ID NO: 294796 - DNA, 25 bp, Probe Sequence
tcttcgactttctaaaaaagctcaa

SEQ ID NO: 294797 - DNA, 25 bp, Probe Sequence
tcattaaatgttcataggagcaaat

SEQ ID NO: 294798 - DNA, 25 bp, Probe Sequence
tctttcattttgcacctgcagccaa

SEQ ID NO: 294799 - DNA, 25 bp, Probe Sequence
tctttcaaagtccagcctagtctgg

SEQ ID NO: 294800 - DNA, 25 bp, Probe Sequence
tctttcaaaccaactctttagcacc

SEQ ID NO: 294801 - DNA, 25 bp, Probe Sequence
tcttcacgatgacaccatctttgaa

SEQ ID NO: 294802 - DNA, 25 bp, Probe Sequence
tctacaagatgtcagtgcactgaaa

SEQ ID NO: 294803 - DNA, 25 bp, Probe Sequence
tcttcagactgctacattcactggt

SEQ ID NO: 294804 - DNA, 25 bp, Probe Sequence
tctaagcactgactctagccaggcc

SEQ ID NO: 294805 - DNA, 25 bp, Probe Sequence
tcatagagcacgtcttgaacacccc

SEQ ID NO: 294806 - DNA, 25 bp, Probe Sequence
tctagtgagcacatgtacacacctc

SEQ ID NO: 294807 - DNA, 25 bp, Probe Sequence
tctattgctgtcaagtaccacctca

SEQ ID NO: 294808 - DNA, 25 bp, Probe Sequence
tctagctgattcctataccactcaa

SEQ ID NO: 294809 - DNA, 25 bp, Probe Sequence
tctagtggggcttcatcatcctgaa

SEQ ID NO: 294810 - DNA, 25 bp, Probe Sequence
tctattggaggcatcatcattctga

SEQ ID NO: 294811 - DNA, 25 bp, Probe Sequence
tctagatggacccatcacctagata

SEQ ID NO: 294812 - DNA, 25 bp, Probe Sequence
tctaaagccccattctgcatgagaa

SEQ ID NO: 294813 - DNA, 25 bp, Probe Sequence
tctacagagccttacactctgcgaa

SEQ ID NO: 294814 - DNA, 25 bp, Probe Sequence
tctacacaccaatatcctgtgaaat

SEQ ID NO: 294815 - DNA, 25 bp, Probe Sequence
tctagccagtaatggacttcagaat

SEQ ID NO: 294816 - DNA, 25 bp, Probe Sequence
tctaccacataattctacttgctga

SEQ ID NO: 294817 - DNA, 25 bp, Probe Sequence
tctattcagtagtatttgcattgta

SEQ ID NO: 294818 - DNA, 25 bp, Probe Sequence
tctattctgtaggcttccatgtcca

SEQ ID NO: 294819 - DNA, 25 bp, Probe Sequence
tctatacctagaagcagccagccca

SEQ ID NO: 294820 - DNA, 25 bp, Probe Sequence
tctatgaactagacggagctcccac

SEQ ID NO: 294821 - DNA, 25 bp, Probe Sequence
tctatgaattagatgggcggaagcc

SEQ ID NO: 294822 - DNA, 25 bp, Probe Sequence
tctaaaatagggacgtggccaggca

SEQ ID NO: 294823 - DNA, 25 bp, Probe Sequence
ttcttactcgggagctggctgaaga

SEQ ID NO: 294824 - DNA, 25 bp, Probe Sequence
taattacattgggagcagttcatga

SEQ ID NO: 294825 - DNA, 25 bp, Probe Sequence
tcatattaaccctacctgtcaacgt

SEQ ID NO: 294826 - DNA, 25 bp, Probe Sequence
tctattagtcccagcctgcaaaaga

SEQ ID NO: 294827 - DNA, 25 bp, Probe Sequence
tctagtattttcagcactccataaa

SEQ ID NO: 294828 - DNA, 25 bp, Probe Sequence
tctatattttctctacgcaaaaaaa

SEQ ID NO: 294829 - DNA, 25 bp, Probe Sequence
tctagcttcattgcttaccagaaaa

SEQ ID NO: 294830 - DNA, 25 bp, Probe Sequence
tctacctgccatgtatcggcgaagg

SEQ ID NO: 294831 - DNA, 25 bp, Probe Sequence
tctacccaccttggccagaaagatg

SEQ ID NO: 294832 - DNA, 25 bp, Probe Sequence
tctatccgttcttcacttagcagga

SEQ ID NO: 294833 - DNA, 25 bp, Probe Sequence
tcatacctgttgtacacttgggtga

SEQ ID NO: 294834 - DNA, 25 bp, Probe Sequence
tcataaaatcgatcagtttggtgaa

SEQ ID NO: 294835 - DNA, 25 bp, Probe Sequence
tctatgaaatcgtcgcttcttgaag

SEQ ID NO: 294836 - DNA, 25 bp, Probe Sequence
tctagatatgatctccatttttatt

SEQ ID NO: 294837 - DNA, 25 bp, Probe Sequence
tctatcgatgttgccacttttttcc

SEQ ID NO: 294838 - DNA, 25 bp, Probe Sequence
tctatatgctgcacccacttaatct

SEQ ID NO: 294839 - DNA, 25 bp, Probe Sequence
tcttatccttctggagtctcaaccc

SEQ ID NO: 294840 - DNA, 25 bp, Probe Sequence
tctattcgccttaggcatgtgcaag

SEQ ID NO: 294841 - DNA, 25 bp, Probe Sequence
tctatctctattacatgaatggagg

SEQ ID NO: 294842 - DNA, 25 bp, Probe Sequence
tctactgtattggcgagcatggata

SEQ ID NO: 294843 - DNA, 25 bp, Probe Sequence
tctacagccattgggatccagacat

SEQ ID NO: 294844 - DNA, 25 bp, Probe Sequence
tctacagcgttgcagaacatgaacg

SEQ ID NO: 294845 - DNA, 25 bp, Probe Sequence
tcttgcagctgttgagcgcacctaa

SEQ ID NO: 294846 - DNA, 25 bp, Probe Sequence
tctttctccaatgatcctatgagga

SEQ ID NO: 294847 - DNA, 25 bp, Probe Sequence
tcttcttctcagacaatgcctgtgg

SEQ ID NO: 294848 - DNA, 25 bp, Probe Sequence
tcttttctatgagcagcaggggata

SEQ ID NO: 294849 - DNA, 25 bp, Probe Sequence
tcttttcaaaacagggtgctcctcc

SEQ ID NO: 294850 - DNA, 25 bp, Probe Sequence
tcttttcaaaccacgattttcccat

SEQ ID NO: 294851 - DNA, 25 bp, Probe Sequence
tcttttgtcaacttcctgattatgt

SEQ ID NO: 294852 - DNA, 25 bp, Probe Sequence
tctttaactcaaacactaaattacg

SEQ ID NO: 294853 - DNA, 25 bp, Probe Sequence
ttttagactaatatacaacttcacc

SEQ ID NO: 294854 - DNA, 25 bp, Probe Sequence
tctttagacatattttggcccttca

SEQ ID NO: 294855 - DNA, 25 bp, Probe Sequence
tcttaatagcagtgttggcttttat

SEQ ID NO: 294856 - DNA, 25 bp, Probe Sequence
tctttataaagcctgtaggttcttt

SEQ ID NO: 294857 - DNA, 25 bp, Probe Sequence
tcttctcaaacctggacctttattg

SEQ ID NO: 294858 - DNA, 25 bp, Probe Sequence
tcttccaccctcaagaaactcttga

SEQ ID NO: 294859 - DNA, 25 bp, Probe Sequence
tcttccattaccatcaatcctggtt

SEQ ID NO: 294860 - DNA, 25 bp, Probe Sequence
tcttctttaccagaacggttctttg

SEQ ID NO: 294861 - DNA, 25 bp, Probe Sequence
tctatcttccccagacactggtttg

SEQ ID NO: 294862 - DNA, 25 bp, Probe Sequence
tctacaatctcccttcacaagtttt

SEQ ID NO: 294863 - DNA, 25 bp, Probe Sequence
tctacatttcccacaaagtcacttc

SEQ ID NO: 294864 - DNA, 25 bp, Probe Sequence
tcttcttgttccattaagtcagaat

SEQ ID NO: 294865 - DNA, 25 bp, Probe Sequence
tcttcttggacgagtacaggagcat

SEQ ID NO: 294866 - DNA, 25 bp, Probe Sequence
tttcaggtactgggaaactgacatc

SEQ ID NO: 294867 - DNA, 25 bp, Probe Sequence
tcttcaggttcacagaacccgccgc

SEQ ID NO: 294868 - DNA, 25 bp, Probe Sequence
tcttcctgtacagagaaccttccag

SEQ ID NO: 294869 - DNA, 25 bp, Probe Sequence
tcatcagcgcgcaagagggcagacc

SEQ ID NO: 294870 - DNA, 25 bp, Probe Sequence
tcatcagtcagtggtgtggagggct

SEQ ID NO: 294871 - DNA, 25 bp, Probe Sequence
tcatcatcatcgtgtgggttgtctc

SEQ ID NO: 294872 - DNA, 25 bp, Probe Sequence
tctatgctcagaacttgggtgaccg

SEQ ID NO: 294873 - DNA, 25 bp, Probe Sequence
tctatgcgagagcttcggtcagccc

SEQ ID NO: 294874 - DNA, 25 bp, Probe Sequence
tctactgagactttcagaatcacac

SEQ ID NO: 294875 - DNA, 25 bp, Probe Sequence
tctactcacacttcacgtgtgccac

SEQ ID NO: 294876 - DNA, 25 bp, Probe Sequence
tctacacgccattcactgaggacac

SEQ ID NO: 294877 - DNA, 25 bp, Probe Sequence
tctaccgcaagaagctgagccagcc

SEQ ID NO: 294878 - DNA, 25 bp, Probe Sequence
tctacagcgccagagtgctgacgcc

SEQ ID NO: 294879 - DNA, 25 bp, Probe Sequence
tcttcaggcacgcatgtgtaccagt

SEQ ID NO: 294880 - DNA, 25 bp, Probe Sequence
tcttcagtcgtcttgggacctggga

SEQ ID NO: 294881 - DNA, 25 bp, Probe Sequence
tctacgtgtatgcgggcatcctggc

SEQ ID NO: 294882 - DNA, 25 bp, Probe Sequence
tctacgagaagcggggtcaggcctg

SEQ ID NO: 294883 - DNA, 25 bp, Probe Sequence
tctacagaacacagctggtttcctg

SEQ ID NO: 294884 - DNA, 25 bp, Probe Sequence
tctatctagttcatgctttctttgc

SEQ ID NO: 294885 - DNA, 25 bp, Probe Sequence
tctactatcttctgttgtctcattc

SEQ ID NO: 294886 - DNA, 25 bp, Probe Sequence
tctactcagctagagagatctccct

SEQ ID NO: 294887 - DNA, 25 bp, Probe Sequence
tctactgactagtagtgttccctag

SEQ ID NO: 294888 - DNA, 25 bp, Probe Sequence
tctattgccaagaatgtgttgtcca

SEQ ID NO: 294889 - DNA, 25 bp, Probe Sequence
tctttggcaaattctgttctcctta

SEQ ID NO: 294890 - DNA, 25 bp, Probe Sequence
tcatttacatactagtttatggctt

SEQ ID NO: 294891 - DNA, 25 bp, Probe Sequence
tctttgatttcgtttcatcagagtt

SEQ ID NO: 294892 - DNA, 25 bp, Probe Sequence
tcttttttgcttttgcataaatctc

SEQ ID NO: 294893 - DNA, 25 bp, Probe Sequence
tcttttagtgttttgctgaaatcct

SEQ ID NO: 294894 - DNA, 25 bp, Probe Sequence
tctatgttaacctttgctgctcaga

SEQ ID NO: 294895 - DNA, 25 bp, Probe Sequence
tctatggctgaatctaatgctccaa

SEQ ID NO: 294896 - DNA, 25 bp, Probe Sequence
tctaggctgttcttggagcccacac

SEQ ID NO: 294897 - DNA, 25 bp, Probe Sequence
tctacacatgttttaacacccaaaa

SEQ ID NO: 294898 - DNA, 25 bp, Probe Sequence
tctaccttaatatctccccaaaaat

SEQ ID NO: 294899 - DNA, 25 bp, Probe Sequence
tctaccagaaggtagtccagccaaa

SEQ ID NO: 294900 - DNA, 25 bp, Probe Sequence
tctttcagagcactggctctccagc

SEQ ID NO: 294901 - DNA, 25 bp, Probe Sequence
tctagagagagccgcgttgccagtt

SEQ ID NO: 294902 - DNA, 25 bp, Probe Sequence
tctaggcaactaggcttggcacagt

SEQ ID NO: 294903 - DNA, 25 bp, Probe Sequence
tctatgtcatatgtggcctggccaa

SEQ ID NO: 294904 - DNA, 25 bp, Probe Sequence
tctattgctaggagcctgccagaac

SEQ ID NO: 294905 - DNA, 25 bp, Probe Sequence
tctatcagaaaaacctgcccaatgc

SEQ ID NO: 294906 - DNA, 25 bp, Probe Sequence
tcttgagaaactggccgccactgca

SEQ ID NO: 294907 - DNA, 25 bp, Probe Sequence
tctatgataaactccgtaccaaggg

SEQ ID NO: 294908 - DNA, 25 bp, Probe Sequence
tctatgaaaccaactgtgtaccaac

SEQ ID NO: 294909 - DNA, 25 bp, Probe Sequence
tcttccacaagagtctgttactaca

SEQ ID NO: 294910 - DNA, 25 bp, Probe Sequence
tcttgtaaagagtctgccttctgga

SEQ ID NO: 294911 - DNA, 25 bp, Probe Sequence
tctactgatacatgtctgtgtttgc

SEQ ID NO: 294912 - DNA, 25 bp, Probe Sequence
tctagttacaggacggtttctttct

SEQ ID NO: 294913 - DNA, 25 bp, Probe Sequence
tctatttggggcagtttctgctctt

SEQ ID NO: 294914 - DNA, 25 bp, Probe Sequence
tctatgtgattgtgccgtcattctg

SEQ ID NO: 294915 - DNA, 25 bp, Probe Sequence
tcttgtcattgtgcagcccaactgc

SEQ ID NO: 294916 - DNA, 25 bp, Probe Sequence
tcttctatgatgaacacaccctccg

SEQ ID NO: 294917 - DNA, 25 bp, Probe Sequence
tcttcttgtaaactcctctactttt

SEQ ID NO: 294918 - DNA, 25 bp, Probe Sequence
tcttcttttccacttttacttatga

SEQ ID NO: 294919 - DNA, 25 bp, Probe Sequence
tcttttattacgatttacctctaat

SEQ ID NO: 294920 - DNA, 25 bp, Probe Sequence
tctttctttggtattccatccacta

SEQ ID NO: 294921 - DNA, 25 bp, Probe Sequence
tctttttatagcgacattcctcccg

SEQ ID NO: 294922 - DNA, 25 bp, Probe Sequence
tctattttaatctcaatcccctttt

SEQ ID NO: 294923 - DNA, 25 bp, Probe Sequence
tcttacttcaatttgaacccatttg

SEQ ID NO: 294924 - DNA, 25 bp, Probe Sequence
tctatcattccaattctatatccga

SEQ ID NO: 294925 - DNA, 25 bp, Probe Sequence
tctacttctctcgatgctaatcaca

SEQ ID NO: 294926 - DNA, 25 bp, Probe Sequence
tctacttcatgctgaccagaggcac

SEQ ID NO: 294927 - DNA, 25 bp, Probe Sequence
tctacgctgtgccttggcagggcac

SEQ ID NO: 294928 - DNA, 25 bp, Probe Sequence
tctacgtaggtggtcgagcgacaac

SEQ ID NO: 294929 - DNA, 25 bp, Probe Sequence
ggacatggaggcccacagtttgtgg

SEQ ID NO: 294930 - DNA, 25 bp, Probe Sequence
tcttttgagacattagccagtagct

SEQ ID NO: 294931 - DNA, 25 bp, Probe Sequence
tctacgtgactggttgcgcgtagtt

SEQ ID NO: 294932 - DNA, 25 bp, Probe Sequence
tctacaggcctcatctggcttcaga

SEQ ID NO: 294933 - DNA, 25 bp, Probe Sequence
tctactagcctcctgtggcttggac

SEQ ID NO: 294934 - DNA, 25 bp, Probe Sequence
tctagatctttcaggaattggcaca

SEQ ID NO: 294935 - DNA, 25 bp, Probe Sequence
tctactctcttcatgaaactaactt

SEQ ID NO: 294936 - DNA, 25 bp, Probe Sequence
tctttcctgttgtaaatcttccttt

SEQ ID NO: 294937 - DNA, 25 bp, Probe Sequence
tctagtcctttgcgaatttctctga

SEQ ID NO: 294938 - DNA, 25 bp, Probe Sequence
tctagtcctattctattgcagttat

SEQ ID NO: 294939 - DNA, 25 bp, Probe Sequence
tcttctgtaattcattgagcagtta

SEQ ID NO: 294940 - DNA, 25 bp, Probe Sequence
tctatcttatttctttgtgattaaa

SEQ ID NO: 294941 - DNA, 25 bp, Probe Sequence
tctttgtctcttcaccgtgttaaca

SEQ ID NO: 294942 - DNA, 25 bp, Probe Sequence
tctattcctttcaccagtacaacac

SEQ ID NO: 294943 - DNA, 25 bp, Probe Sequence
tctattcccttcttccaaatatgac

SEQ ID NO: 294944 - DNA, 25 bp, Probe Sequence
tctttttcttacacagaattggcag

SEQ ID NO: 294945 - DNA, 25 bp, Probe Sequence
tcttgagttttttacaggatgttgg

SEQ ID NO: 294946 - DNA, 25 bp, Probe Sequence
tctatcctcattattcacggtaatg

SEQ ID NO: 294947 - DNA, 25 bp, Probe Sequence
tctacttctttctacacagacacgg

SEQ ID NO: 294948 - DNA, 25 bp, Probe Sequence
tctacttctttctacacagacacgg

SEQ ID NO: 294949 - DNA, 25 bp, Probe Sequence
tctacttcaccaaataatgacacac

SEQ ID NO: 294950 - DNA, 25 bp, Probe Sequence
tctatattcccaaattcatatttca

SEQ ID NO: 294951 - DNA, 25 bp, Probe Sequence
tctatttcatacattctcatacatt

SEQ ID NO: 294952 - DNA, 25 bp, Probe Sequence
tctatgattttactatccaagagct

SEQ ID NO: 294953 - DNA, 25 bp, Probe Sequence
tcttgattttaaagcaacaggcctt

SEQ ID NO: 294954 - DNA, 25 bp, Probe Sequence
tcttttatgttcacaccaccacatt

SEQ ID NO: 294955 - DNA, 25 bp, Probe Sequence
tctttttttctggaggctggcacct

SEQ ID NO: 294956 - DNA, 25 bp, Probe Sequence
tctttgttcctaatgacgtggactt

SEQ ID NO: 294957 - DNA, 25 bp, Probe Sequence
tctttgtttcacagactgtgtgatc

SEQ ID NO: 294958 - DNA, 25 bp, Probe Sequence
tcttggatttatagtaccttatact

SEQ ID NO: 294959 - DNA, 25 bp, Probe Sequence
tcttgtgttttgctatcctttttac

SEQ ID NO: 294960 - DNA, 25 bp, Probe Sequence
tcttctgtattctccaacttttaaa

SEQ ID NO: 294961 - DNA, 25 bp, Probe Sequence
tctattgaactcttaaactctttta

SEQ ID NO: 294962 - DNA, 25 bp, Probe Sequence
tctttaagtctgcagatttttttat

SEQ ID NO: 294963 - DNA, 25 bp, Probe Sequence
tcttcctagctcggggcttttaaat

SEQ ID NO: 294964 - DNA, 25 bp, Probe Sequence
tcttctttgcctgcctgtattttaa

SEQ ID NO: 294965 - DNA, 25 bp, Probe Sequence
tcttctttcctgcagtttagttaat

SEQ ID NO: 294966 - DNA, 25 bp, Probe Sequence
tctatttacccttgcttttggtact

SEQ ID NO: 294967 - DNA, 25 bp, Probe Sequence
tcttccagatcgcttgcttcattgg

SEQ ID NO: 294968 - DNA, 25 bp, Probe Sequence
tcttaccagctgtgtgtccttaggt

SEQ ID NO: 294969 - DNA, 25 bp, Probe Sequence
tcttaaactgtgtgttctccatggt

SEQ ID NO: 294970 - DNA, 25 bp, Probe Sequence
tcttaaagtaatttgatcctcagga

SEQ ID NO: 294971 - DNA, 25 bp, Probe Sequence
tcttcaaatctctttttagctcagt

SEQ ID NO: 294972 - DNA, 25 bp, Probe Sequence
tcttcctcaccaactttactagtag

SEQ ID NO: 294973 - DNA, 25 bp, Probe Sequence
tcattcctagtacctttttgcctaa

SEQ ID NO: 294974 - DNA, 25 bp, Probe Sequence
tcttcgtactcacctagcttaagct

SEQ ID NO: 294975 - DNA, 25 bp, Probe Sequence
tctacgtattagtcatcgctattac

SEQ ID NO: 294976 - DNA, 25 bp, Probe Sequence
tctacggcattgctccagtggatgg

SEQ ID NO: 294977 - DNA, 25 bp, Probe Sequence
tctaggactctgcactgaatggctg

SEQ ID NO: 294978 - DNA, 25 bp, Probe Sequence
tctacgacctgggcttgatgggcta

SEQ ID NO: 294979 - DNA, 25 bp, Probe Sequence
tcttccccgtgattatggggctagt

SEQ ID NO: 294980 - DNA, 25 bp, Probe Sequence
tctatcccggctttggtgcggggta

SEQ ID NO: 294981 - DNA, 25 bp, Probe Sequence
tctatcccggctttggtgcggggta

SEQ ID NO: 294982 - DNA, 25 bp, Probe Sequence
tctttctaggctttaagcagagggt

SEQ ID NO: 294983 - DNA, 25 bp, Probe Sequence
tctttcgaggtgttgggatggtggc

SEQ ID NO: 294984 - DNA, 25 bp, Probe Sequence
tcttttgccgcttctgtagattttg

SEQ ID NO: 294985 - DNA, 25 bp, Probe Sequence
tctattggcccatgttacattagag

SEQ ID NO: 294986 - DNA, 25 bp, Probe Sequence
tctaggtccaattgttctgctctaa

SEQ ID NO: 294987 - DNA, 25 bp, Probe Sequence
tctaggtcccaagactgcactgtca

SEQ ID NO: 294988 - DNA, 25 bp, Probe Sequence
tcattggttcctttgatagccattc

SEQ ID NO: 294989 - DNA, 25 bp, Probe Sequence
tcttgtcaccacagttacctgtcaa

SEQ ID NO: 294990 - DNA, 25 bp, Probe Sequence
tctttcatgccctttggacttgaca

SEQ ID NO: 294991 - DNA, 25 bp, Probe Sequence
tcttgttgcttctctggatccagaa

SEQ ID NO: 294992 - DNA, 25 bp, Probe Sequence
tctttggcttcaacaggacagaaat

SEQ ID NO: 294993 - DNA, 25 bp, Probe Sequence
tctatttggtcaatgcagagacaca

SEQ ID NO: 294994 - DNA, 25 bp, Probe Sequence
tctagggatccaatcagatgcagag

SEQ ID NO: 294995 - DNA, 25 bp, Probe Sequence
tctagtggtacaggcccagatgcct

SEQ ID NO: 294996 - DNA, 25 bp, Probe Sequence
tctagtgggacagcccagagcctgg

SEQ ID NO: 294997 - DNA, 25 bp, Probe Sequence
tctagggtacatgtccacaatgcac

SEQ ID NO: 294998 - DNA, 25 bp, Probe Sequence
tctagaggtaatttatatccgcccc

SEQ ID NO: 294999 - DNA, 25 bp, Probe Sequence
tctatggagtaggtattatccccat

SEQ ID NO: 295000 - DNA, 25 bp, Probe Sequence
tcttagagcatccttttacgcctgt

SEQ ID NO: 295001 - DNA, 25 bp, Probe Sequence
tctttggctagtgttatgtgcctgt

SEQ ID NO: 295002 - DNA, 25 bp, Probe Sequence
tcttctggtaatatagatgagcttt

SEQ ID NO: 295003 - DNA, 25 bp, Probe Sequence
tctttcttcagctattagtagttga

SEQ ID NO: 295004 - DNA, 25 bp, Probe Sequence
tctttcctgcagtttagttaatatg

SEQ ID NO: 295005 - DNA, 25 bp, Probe Sequence
tctttcctctgttatagcattcaat

SEQ ID NO: 295006 - DNA, 25 bp, Probe Sequence
tcttaattcttctaagttgactttt

SEQ ID NO: 295007 - DNA, 25 bp, Probe Sequence
tcttaatgtttttgtttgtatgttt

SEQ ID NO: 295008 - DNA, 25 bp, Probe Sequence
tctttacgttgttgtgcttgttttt

SEQ ID NO: 295009 - DNA, 25 bp, Probe Sequence
tctttcctggtgatgccttgtttgg

SEQ ID NO: 295010 - DNA, 25 bp, Probe Sequence
tcttttctggtcatgtctttaattt

SEQ ID NO: 295011 - DNA, 25 bp, Probe Sequence
tctttttgagatacgtttattgtat

SEQ ID NO: 295012 - DNA, 25 bp, Probe Sequence
tctttcatgtggagcgattgtattt

SEQ ID NO: 295013 - DNA, 25 bp, Probe Sequence
tctattagggaacctttcttattag

SEQ ID NO: 295014 - DNA, 25 bp, Probe Sequence
tcttcgggagaatctttattttcag

SEQ ID NO: 295015 - DNA, 25 bp, Probe Sequence
tcttatgagtgacaatcgttagttt

SEQ ID NO: 295016 - DNA, 25 bp, Probe Sequence
tctatgtccagaatattttaccttt

SEQ ID NO: 295017 - DNA, 25 bp, Probe Sequence
tctttgcaaaaacttgttccttctt

SEQ ID NO: 295018 - DNA, 25 bp, Probe Sequence
tctttctaaattgctgttccttaat

SEQ ID NO: 295019 - DNA, 25 bp, Probe Sequence
tctttctaaattgctgttccttaat

SEQ ID NO: 295020 - DNA, 25 bp, Probe Sequence
tcttcctacgttgactgttcttatt

SEQ ID NO: 295021 - DNA, 25 bp, Probe Sequence
tcattcctcctggttattggtttgt

SEQ ID NO: 295022 - DNA, 25 bp, Probe Sequence
tcattaccgtctgtgattgccattt

SEQ ID NO: 295023 - DNA, 25 bp, Probe Sequence
tcttacgatgttatgagtctgattc

SEQ ID NO: 295024 - DNA, 25 bp, Probe Sequence
tctttaaatgtgatagtctcagaaa

SEQ ID NO: 295025 - DNA, 25 bp, Probe Sequence
tctttttcttgattagtctgatgag

SEQ ID NO: 295026 - DNA, 25 bp, Probe Sequence
tctttatccatttgtacattgatgg

SEQ ID NO: 295027 - DNA, 25 bp, Probe Sequence
tcttttccaggacagcaattgtggt

SEQ ID NO: 295028 - DNA, 25 bp, Probe Sequence
tcttttgccccacaggaattcctgt

SEQ ID NO: 295029 - DNA, 25 bp, Probe Sequence
tcttattgaccttgggcgaaccttt

SEQ ID NO: 295030 - DNA, 25 bp, Probe Sequence
tcttcacatgacacaggggaatcct

SEQ ID NO: 295031 - DNA, 25 bp, Probe Sequence
tcttccccaccgcatgtggatactg

SEQ ID NO: 295032 - DNA, 25 bp, Probe Sequence
tctttgcccacccagtgtaatgtca

SEQ ID NO: 295033 - DNA, 25 bp, Probe Sequence
tcatttgcccttgcacatgtaagtt

SEQ ID NO: 295034 - DNA, 25 bp, Probe Sequence
tctttcaccctgtcctgatagactt

SEQ ID NO: 295035 - DNA, 25 bp, Probe Sequence
tctttcctcctgaaactagtctctg

SEQ ID NO: 295036 - DNA, 25 bp, Probe Sequence
tctttccattcaccagaccattccg

SEQ ID NO: 295037 - DNA, 25 bp, Probe Sequence
tctttccaactctacggatttgcct

SEQ ID NO: 295038 - DNA, 25 bp, Probe Sequence
tctttgaaactgtatcacctttgcc

SEQ ID NO: 295039 - DNA, 25 bp, Probe Sequence
tctttgtgacactgagaccttctgc

SEQ ID NO: 295040 - DNA, 25 bp, Probe Sequence
tctttagatcaattagaggctttgc

SEQ ID NO: 295041 - DNA, 25 bp, Probe Sequence
tcatttagaaatcggaggtgtggat

SEQ ID NO: 295042 - DNA, 25 bp, Probe Sequence
tcattccagttaagcggggcgaaga

SEQ ID NO: 295043 - DNA, 25 bp, Probe Sequence
tctaccagtccaaggaggccgggca

SEQ ID NO: 295044 - DNA, 25 bp, Probe Sequence
tcttccatccaaaaggggcagggca

SEQ ID NO: 295045 - DNA, 25 bp, Probe Sequence
tcttcaataaacgtggggagggctc

SEQ ID NO: 295046 - DNA, 25 bp, Probe Sequence
tcttcaataaacgtggggagggctc

SEQ ID NO: 295047 - DNA, 25 bp, Probe Sequence
tcttacacaagagctggagcccgtg

SEQ ID NO: 295048 - DNA, 25 bp, Probe Sequence
tctttgccaacagcatgggtaaggg

SEQ ID NO: 295049 - DNA, 25 bp, Probe Sequence
tctttaagacacagacgtaaggcgt

SEQ ID NO: 295050 - DNA, 25 bp, Probe Sequence
tctttaggaacccaccagagggcag

SEQ ID NO: 295051 - DNA, 25 bp, Probe Sequence
tcttttgaaaaccgcatccaggcgg

SEQ ID NO: 295052 - DNA, 25 bp, Probe Sequence
tctttggccacaatggcagcctcag

SEQ ID NO: 295053 - DNA, 25 bp, Probe Sequence
tcttttccagcaagtacccagggta

SEQ ID NO: 295054 - DNA, 25 bp, Probe Sequence
tcttgggcaccaagtacctggaggt

SEQ ID NO: 295055 - DNA, 25 bp, Probe Sequence
tcttgggcagaacataccgggtggt

SEQ ID NO: 295056 - DNA, 25 bp, Probe Sequence
cttcactgccaatcaggcaaagacc

SEQ ID NO: 295057 - DNA, 25 bp, Probe Sequence
tcttcagtggaccttgagctaatag

SEQ ID NO: 295058 - DNA, 25 bp, Probe Sequence
tcttatggagccctggagttgttgg

SEQ ID NO: 295059 - DNA, 25 bp, Probe Sequence
tctttggcagacagagaattggagt

SEQ ID NO: 295060 - DNA, 25 bp, Probe Sequence
tttgtctggactagaaaatctgagt

SEQ ID NO: 295061 - DNA, 25 bp, Probe Sequence
tcttcctaggtgcataaccggtaca

SEQ ID NO: 295062 - DNA, 25 bp, Probe Sequence
tcttcctaagtttacaccagtgtgg

SEQ ID NO: 295063 - DNA, 25 bp, Probe Sequence
tcttcctgaagatctctaccattta

SEQ ID NO: 295064 - DNA, 25 bp, Probe Sequence
tcttcctaacccaagcatatcttta

SEQ ID NO: 295065 - DNA, 25 bp, Probe Sequence
tcttccatggtcgccagaattgtca

SEQ ID NO: 295066 - DNA, 25 bp, Probe Sequence
tctttctggtgcccaaactttcagg

SEQ ID NO: 295067 - DNA, 25 bp, Probe Sequence
tctttctggtttgaacttgctcgga

SEQ ID NO: 295068 - DNA, 25 bp, Probe Sequence
tcttcttggagtttaccttgtttca

SEQ ID NO: 295069 - DNA, 25 bp, Probe Sequence
tcttttgggtcggcccatgtggttt

SEQ ID NO: 295070 - DNA, 25 bp, Probe Sequence
tcttatgtgttgagtccaaagagct

SEQ ID NO: 295071 - DNA, 25 bp, Probe Sequence
tcttatgatttagctccacgagcca

SEQ ID NO: 295072 - DNA, 25 bp, Probe Sequence
tctttgtttgcatcctcggaggaca

SEQ ID NO: 295073 - DNA, 25 bp, Probe Sequence
tcttattttcaaccagggagctatc

SEQ ID NO: 295074 - DNA, 25 bp, Probe Sequence
tcttattttgcgctcgaggttatgg

SEQ ID NO: 295075 - DNA, 25 bp, Probe Sequence
tctatatgtttccttgggtgtaggg

SEQ ID NO: 295076 - DNA, 25 bp, Probe Sequence
tctagggcctcagtctggagtggga

SEQ ID NO: 295077 - DNA, 25 bp, Probe Sequence
tcttgggccttggctctgagttgga

SEQ ID NO: 295078 - DNA, 25 bp, Probe Sequence
tctttttttactagagatctgcaga

SEQ ID NO: 295079 - DNA, 25 bp, Probe Sequence
tctttcagtcttcggggatctgcac

SEQ ID NO: 295080 - DNA, 25 bp, Probe Sequence
tctttcatgttgtgggttctgggag

SEQ ID NO: 295081 - DNA, 25 bp, Probe Sequence
tcttggatgacgtcggcgttgctgg

SEQ ID NO: 295082 - DNA, 25 bp, Probe Sequence
tctttgtgaaatagtggttgtggaa

SEQ ID NO: 295083 - DNA, 25 bp, Probe Sequence
tcatgtttttatataaagtgcgcca

SEQ ID NO: 295084 - DNA, 25 bp, Probe Sequence
tcttttttatctagaaatggctgca

SEQ ID NO: 295085 - DNA, 25 bp, Probe Sequence
tctttttgtgacctcagaatgtctc

SEQ ID NO: 295086 - DNA, 25 bp, Probe Sequence
tctatttagctgtcactagcactct

SEQ ID NO: 295087 - DNA, 25 bp, Probe Sequence
tcttctatctgctgtctgcaacatc

SEQ ID NO: 295088 - DNA, 25 bp, Probe Sequence
tcttcatgactgtctccagcaatag

SEQ ID NO: 295089 - DNA, 25 bp, Probe Sequence
tcttcagtcatggcattcgcagtgc

SEQ ID NO: 295090 - DNA, 25 bp, Probe Sequence
tctatcagatattcattgtcatgca

SEQ ID NO: 295091 - DNA, 25 bp, Probe Sequence
tctatcagccacagtctctgcatgt

SEQ ID NO: 295092 - DNA, 25 bp, Probe Sequence
tcatctaccctgtctgttggtcaga

SEQ ID NO: 295093 - DNA, 25 bp, Probe Sequence
tcatctaccctgtctgttggtcaga

SEQ ID NO: 295094 - DNA, 25 bp, Probe Sequence
tcattgcaacctctgcctttttaaa

SEQ ID NO: 295095 - DNA, 25 bp, Probe Sequence
tctttacccacttctcagtttataa

SEQ ID NO: 295096 - DNA, 25 bp, Probe Sequence
tctttaaacactcctcaaaactgaa

SEQ ID NO: 295097 - DNA, 25 bp, Probe Sequence
tctttaagacaaattcccatccaaa

SEQ ID NO: 295098 - DNA, 25 bp, Probe Sequence
tcttttgtatgaatatccacctcct

SEQ ID NO: 295099 - DNA, 25 bp, Probe Sequence
tcttgtgctttcatacgcacctttg

SEQ ID NO: 295100 - DNA, 25 bp, Probe Sequence
tcttttgtttcaaagcagctcttgg

SEQ ID NO: 295101 - DNA, 25 bp, Probe Sequence
tctttggtttctcatcacatttgta

SEQ ID NO: 295102 - DNA, 25 bp, Probe Sequence
tctattgatgtcttggctaaatttt

SEQ ID NO: 295103 - DNA, 25 bp, Probe Sequence
tctatggattcacttctatttattt

SEQ ID NO: 295104 - DNA, 25 bp, Probe Sequence
tcatatggttttacttttctcccgg

SEQ ID NO: 295105 - DNA, 25 bp, Probe Sequence
tcactgggttttcttttcttttctg

SEQ ID NO: 295106 - DNA, 25 bp, Probe Sequence
tcacgttggtttctgcttttaattt

SEQ ID NO: 295107 - DNA, 25 bp, Probe Sequence
tcaggttgagatttaagtttttttg

SEQ ID NO: 295108 - DNA, 25 bp, Probe Sequence
tcatttggagtttgaacccgttttg

SEQ ID NO: 295109 - DNA, 25 bp, Probe Sequence
tcttgttacttatatccccagttcc

SEQ ID NO: 295110 - DNA, 25 bp, Probe Sequence
tctattgtacttttcagaaccattt

SEQ ID NO: 295111 - DNA, 25 bp, Probe Sequence
tcttattgactatcagttcaccttt

SEQ ID NO: 295112 - DNA, 25 bp, Probe Sequence
tcattcatggcagtgattcagtaaa

SEQ ID NO: 295113 - DNA, 25 bp, Probe Sequence
tcttcttgcatgcatgtcagctaca

SEQ ID NO: 295114 - DNA, 25 bp, Probe Sequence
tctttagctgctttcatgctacaat

SEQ ID NO: 295115 - DNA, 25 bp, Probe Sequence
tcttgtcagtgaatccagtatagtt

SEQ ID NO: 295116 - DNA, 25 bp, Probe Sequence
tctttagatgagatcacgctggatt

SEQ ID NO: 295117 - DNA, 25 bp, Probe Sequence
tctattaaatgagcacgtttttgta

SEQ ID NO: 295118 - DNA, 25 bp, Probe Sequence
tctatataattatcaccgtttctgc

SEQ ID NO: 295119 - DNA, 25 bp, Probe Sequence
tctatataagcttgaggctcgtttt

SEQ ID NO: 295120 - DNA, 25 bp, Probe Sequence
tcttataaccgtgcttctttcatgt

SEQ ID NO: 295121 - DNA, 25 bp, Probe Sequence
tcttattaccggatatatttgcatt

SEQ ID NO: 295122 - DNA, 25 bp, Probe Sequence
tcttcattcctcctggttattggtt

SEQ ID NO: 295123 - DNA, 25 bp, Probe Sequence
tctttatcctaaggttcactaactg

SEQ ID NO: 295124 - DNA, 25 bp, Probe Sequence
tcattttcccttggattacttttgc

SEQ ID NO: 295125 - DNA, 25 bp, Probe Sequence
tctttcccccttttaatttgtgatg

SEQ ID NO: 295126 - DNA, 25 bp, Probe Sequence
tctttcccccttttaatttgtgatg

SEQ ID NO: 295127 - DNA, 25 bp, Probe Sequence
tctagtccccttatttcctatggaa

SEQ ID NO: 295128 - DNA, 25 bp, Probe Sequence
tcagactaccctaatttgtaaatgg

SEQ ID NO: 295129 - DNA, 25 bp, Probe Sequence
taactccacctgagttacaaagaca

SEQ ID NO: 295130 - DNA, 25 bp, Probe Sequence
tcattctccaatcttttacaaaaca

SEQ ID NO: 295131 - DNA, 25 bp, Probe Sequence
tcttctccgcacgactgttacagag

SEQ ID NO: 295132 - DNA, 25 bp, Probe Sequence
tcttccctccagtcttctgagggat

SEQ ID NO: 295133 - DNA, 25 bp, Probe Sequence
tcttacgtgcgcctttctgccggac

SEQ ID NO: 295134 - DNA, 25 bp, Probe Sequence
tcttgaagatggcgtcctccagtga

SEQ ID NO: 295135 - DNA, 25 bp, Probe Sequence
tcttgagacaggaggcttgccgata

SEQ ID NO: 295136 - DNA, 25 bp, Probe Sequence
tctttaagctgatggcctctctgtt

SEQ ID NO: 295137 - DNA, 25 bp, Probe Sequence
tctttatacgcttaggctctctggg

SEQ ID NO: 295138 - DNA, 25 bp, Probe Sequence
tcttctgaattctatagtgcctggg

SEQ ID NO: 295139 - DNA, 25 bp, Probe Sequence
tctttgactgtcttaactggaggaa

SEQ ID NO: 295140 - DNA, 25 bp, Probe Sequence
tctttagatgtcgtatccggaggag

SEQ ID NO: 295141 - DNA, 25 bp, Probe Sequence
tcttccaggttttgacctgcaggca

SEQ ID NO: 295142 - DNA, 25 bp, Probe Sequence
tcttccagcgtcaattgacaatcag

SEQ ID NO: 295143 - DNA, 25 bp, Probe Sequence
tcttccatgctacatgtacaataag

SEQ ID NO: 295144 - DNA, 25 bp, Probe Sequence
tcttccagtaattcgccaaaatgac

SEQ ID NO: 295145 - DNA, 25 bp, Probe Sequence
tcttcacgtacaacagccacaggta

SEQ ID NO: 295146 - DNA, 25 bp, Probe Sequence
tctatcatcgacgtctaccacaagt

SEQ ID NO: 295147 - DNA, 25 bp, Probe Sequence
tctatcatcaacttcactactcata

SEQ ID NO: 295148 - DNA, 25 bp, Probe Sequence
tctatctgcattttgcctaccacaa

SEQ ID NO: 295149 - DNA, 25 bp, Probe Sequence
tcttctcattccggtcacctaaaaa

SEQ ID NO: 295150 - DNA, 25 bp, Probe Sequence
tctttctttgcaagttccatggaag

SEQ ID NO: 295151 - DNA, 25 bp, Probe Sequence
tcttttttgcttctcctacaaaacg

SEQ ID NO: 295152 - DNA, 25 bp, Probe Sequence
tctttccttcttttgcctaatacag

SEQ ID NO: 295153 - DNA, 25 bp, Probe Sequence
tttgttgtattttctcccagtaaag

SEQ ID NO: 295154 - DNA, 25 bp, Probe Sequence
tctttcttttgattcttcctaacaa

SEQ ID NO: 295155 - DNA, 25 bp, Probe Sequence
tctattgtgtttttcttctgccaat

SEQ ID NO: 295156 - DNA, 25 bp, Probe Sequence
tctatgcttctaattttctctgaaa

SEQ ID NO: 295157 - DNA, 25 bp, Probe Sequence
tctatcttttataattctggagaaa

SEQ ID NO: 295158 - DNA, 25 bp, Probe Sequence
tctatcttttcatcatgtctatagt

SEQ ID NO: 295159 - DNA, 25 bp, Probe Sequence
tctatgtccttccctgttggagatg

SEQ ID NO: 295160 - DNA, 25 bp, Probe Sequence
tctttcctggcactggttcagaatg

SEQ ID NO: 295161 - DNA, 25 bp, Probe Sequence
tcttttcaagagcagtgtccgtggt

SEQ ID NO: 295162 - DNA, 25 bp, Probe Sequence
tctttactagagcatttcctgtgag

SEQ ID NO: 295163 - DNA, 25 bp, Probe Sequence
tcttccaccagacagtctccaggaa

SEQ ID NO: 295164 - DNA, 25 bp, Probe Sequence
tcttccaccagacagtctccaggaa

SEQ ID NO: 295165 - DNA, 25 bp, Probe Sequence
tcttccaggagactagactactgtt

SEQ ID NO: 295166 - DNA, 25 bp, Probe Sequence
tcttcccgtagtcacatcttgattg

SEQ ID NO: 295167 - DNA, 25 bp, Probe Sequence
tctttcctgtagtcccattgatgta

SEQ ID NO: 295168 - DNA, 25 bp, Probe Sequence
tctttcctgtaggaattgtagtcaa

SEQ ID NO: 295169 - DNA, 25 bp, Probe Sequence
tctttgccttattcatcatttttaa

SEQ ID NO: 295170 - DNA, 25 bp, Probe Sequence
tctttgcttcattccttatcttaaa

SEQ ID NO: 295171 - DNA, 25 bp, Probe Sequence
tcttaggtaaccttatatttacaat

SEQ ID NO: 295172 - DNA, 25 bp, Probe Sequence
tcttaggggaccaccatcgtacatg

SEQ ID NO: 295173 - DNA, 25 bp, Probe Sequence
tcttcgtgaagaccctgactggtaa

SEQ ID NO: 295174 - DNA, 25 bp, Probe Sequence
tcttcagtagcttccttactcgtat

SEQ ID NO: 295175 - DNA, 25 bp, Probe Sequence
tcttctggagcctgtgtactgcgga

SEQ ID NO: 295176 - DNA, 25 bp, Probe Sequence
tcttcacgtgctgcctgtacaggag

SEQ ID NO: 295177 - DNA, 25 bp, Probe Sequence
tcttcaagcgcatctcggagcagtt

SEQ ID NO: 295178 - DNA, 25 bp, Probe Sequence
tcttcgacgccatcgcggagattgg

SEQ ID NO: 295179 - DNA, 25 bp, Probe Sequence
tctttggccacactcatgtggatga

SEQ ID NO: 295180 - DNA, 25 bp, Probe Sequence
tctttctgctccttgcattttgaca

SEQ ID NO: 295181 - DNA, 25 bp, Probe Sequence
tctttctgctccttgcattttgaca

SEQ ID NO: 295182 - DNA, 25 bp, Probe Sequence
tctattcttccaccagttgtggcgt

SEQ ID NO: 295183 - DNA, 25 bp, Probe Sequence
tcttggcctcccaaagtgctgggat

SEQ ID NO: 295184 - DNA, 25 bp, Probe Sequence
tctttgagcgagcccattttgtgga

SEQ ID NO: 295185 - DNA, 25 bp, Probe Sequence
tcttgtggctgagtcacctctcagg

SEQ ID NO: 295186 - DNA, 25 bp, Probe Sequence
tcttgtacggtcactgttggtgcga

SEQ ID NO: 295187 - DNA, 25 bp, Probe Sequence
tctttagggtattgcttgggttcgg

SEQ ID NO: 295188 - DNA, 25 bp, Probe Sequence
tctttagaccaatgcattgcgtttc

SEQ ID NO: 295189 - DNA, 25 bp, Probe Sequence
tctttccaccattcaggaggttatc

SEQ ID NO: 295190 - DNA, 25 bp, Probe Sequence
tcttgccccaattcttaggatttct

SEQ ID NO: 295191 - DNA, 25 bp, Probe Sequence
tctttgccgaaacctgcaggcgttc

SEQ ID NO: 295192 - DNA, 25 bp, Probe Sequence
tcttatccgagagagtgagagcgct

SEQ ID NO: 295193 - DNA, 25 bp, Probe Sequence
tctttccgagtgtgagcacagctcc

SEQ ID NO: 295194 - DNA, 25 bp, Probe Sequence
tctttctggcagtgggcccatgaag

SEQ ID NO: 295195 - DNA, 25 bp, Probe Sequence
tctttgatgcggtgggctcagagca

SEQ ID NO: 295196 - DNA, 25 bp, Probe Sequence
tctttgccctcaaggtgctcaacat

SEQ ID NO: 295197 - DNA, 25 bp, Probe Sequence
tctttggcaccaagtttgacctcag

SEQ ID NO: 295198 - DNA, 25 bp, Probe Sequence
tcttatgttccaactttcccacata

SEQ ID NO: 295199 - DNA, 25 bp, Probe Sequence
tctttggtgccagctgtttcatcac

SEQ ID NO: 295200 - DNA, 25 bp, Probe Sequence
tctttggtgccagctgtttcatcac

SEQ ID NO: 295201 - DNA, 25 bp, Probe Sequence
tcttatcctcacatctgttttcaca

SEQ ID NO: 295202 - DNA, 25 bp, Probe Sequence
tctttgccatagcctgcttcttata

SEQ ID NO: 295203 - DNA, 25 bp, Probe Sequence
tctttgcacaaggggtcatgctgat

SEQ ID NO: 295204 - DNA, 25 bp, Probe Sequence
tcttggacctggagcctgatgaaga

SEQ ID NO: 295205 - DNA, 25 bp, Probe Sequence
tcttgtcaccttaaactaaagcaga

SEQ ID NO: 295206 - DNA, 25 bp, Probe Sequence
tcttgtgcccttaactacgaactga

SEQ ID NO: 295207 - DNA, 25 bp, Probe Sequence
tctttccacagtgactacagagtct

SEQ ID NO: 295208 - DNA, 25 bp, Probe Sequence
tcttccccaggcaattactggcctc

SEQ ID NO: 295209 - DNA, 25 bp, Probe Sequence
tctttctccaggattgtcagtggct

SEQ ID NO: 295210 - DNA, 25 bp, Probe Sequence
tctttctttgcctaattgcagaggc

SEQ ID NO: 295211 - DNA, 25 bp, Probe Sequence
tcttttttcttgtcattgctggtca

SEQ ID NO: 295212 - DNA, 25 bp, Probe Sequence
tcttacttctgtagaacactggcca

SEQ ID NO: 295213 - DNA, 25 bp, Probe Sequence
tcttacttcctcatcaccggaggaa

SEQ ID NO: 295214 - DNA, 25 bp, Probe Sequence
tcttacctcctctgcatgcaaagat

SEQ ID NO: 295215 - DNA, 25 bp, Probe Sequence
tctatacccacccagaatgagacat

SEQ ID NO: 295216 - DNA, 25 bp, Probe Sequence
tcttgacccaagccagaatagaagg

SEQ ID NO: 295217 - DNA, 25 bp, Probe Sequence
tcatgtccccaactcaaggctagaa

SEQ ID NO: 295218 - DNA, 25 bp, Probe Sequence
tcatgtccccaactcaaggctagaa

SEQ ID NO: 295219 - DNA, 25 bp, Probe Sequence
tctatcctgccttctttggctatta

SEQ ID NO: 295220 - DNA, 25 bp, Probe Sequence
tctatccttctcaacttgacttcat

SEQ ID NO: 295221 - DNA, 25 bp, Probe Sequence
tctatcctgtgtaactacaaggcca

SEQ ID NO: 295222 - DNA, 25 bp, Probe Sequence
tctatcagcttaatttggcagagaa

SEQ ID NO: 295223 - DNA, 25 bp, Probe Sequence
tcatcatccatcttaattggcataa

SEQ ID NO: 295224 - DNA, 25 bp, Probe Sequence
tcttcctttaattagatcataaata

SEQ ID NO: 295225 - DNA, 25 bp, Probe Sequence
tctatccttcaatctgatgacaaaa

SEQ ID NO: 295226 - DNA, 25 bp, Probe Sequence
tctatcctctaattccattaaatcc

SEQ ID NO: 295227 - DNA, 25 bp, Probe Sequence
tctttctcaacattgccatttttca

SEQ ID NO: 295228 - DNA, 25 bp, Probe Sequence
tcttttcattcatacataagttcag

SEQ ID NO: 295229 - DNA, 25 bp, Probe Sequence
tcttttacctgagcaatggtgtagt

SEQ ID NO: 295230 - DNA, 25 bp, Probe Sequence
tcttttaccaaccagagagtgtgaa

SEQ ID NO: 295231 - DNA, 25 bp, Probe Sequence
tcttttattctaccacggctggaga

SEQ ID NO: 295232 - DNA, 25 bp, Probe Sequence
tcttttttttgctctgtgtagcaga

SEQ ID NO: 295233 - DNA, 25 bp, Probe Sequence
tcttttatttctgtatgtggagcta

SEQ ID NO: 295234 - DNA, 25 bp, Probe Sequence
tctttccttcccaataggtgatctt

SEQ ID NO: 295235 - DNA, 25 bp, Probe Sequence
tttcccttaccgatcggcattcata

SEQ ID NO: 295236 - DNA, 25 bp, Probe Sequence
tcttcccagtctgcctttggattaa

SEQ ID NO: 295237 - DNA, 25 bp, Probe Sequence
tcttgcccgctcatttgttaataaa

SEQ ID NO: 295238 - DNA, 25 bp, Probe Sequence
tcttaccagccactttgcaaaaact

SEQ ID NO: 295239 - DNA, 25 bp, Probe Sequence
tctataccagctgttgtaaactgat

SEQ ID NO: 295240 - DNA, 25 bp, Probe Sequence
tcttaccacattatcccaactggtt

SEQ ID NO: 295241 - DNA, 25 bp, Probe Sequence
tctttccatttttctccatggtgtt

SEQ ID NO: 295242 - DNA, 25 bp, Probe Sequence
tctttccagttttgcatccagtgac

SEQ ID NO: 295243 - DNA, 25 bp, Probe Sequence
tctttccacttgctgttcaggacca

SEQ ID NO: 295244 - DNA, 25 bp, Probe Sequence
tcttttacttgcatgtttgtacaca

SEQ ID NO: 295245 - DNA, 25 bp, Probe Sequence
tctttctcactgcctttgtttagaa

SEQ ID NO: 295246 - DNA, 25 bp, Probe Sequence
tctttctcactgcctttgtttagaa

SEQ ID NO: 295247 - DNA, 25 bp, Probe Sequence
tcttgacctatgccttttcttagaa

SEQ ID NO: 295248 - DNA, 25 bp, Probe Sequence
tctttcacttgggcactgactgtag

SEQ ID NO: 295249 - DNA, 25 bp, Probe Sequence
tactccactaggtcagtgacagtgt

SEQ ID NO: 295250 - DNA, 25 bp, Probe Sequence
tatcccaactggtttaaagccctga

SEQ ID NO: 295251 - DNA, 25 bp, Probe Sequence
tcaacctacttatttccaaatctta

SEQ ID NO: 295252 - DNA, 25 bp, Probe Sequence
tctatacaattttcttacagatgtc

SEQ ID NO: 295253 - DNA, 25 bp, Probe Sequence
tctattaatcttttgtcaacttcct

SEQ ID NO: 295254 - DNA, 25 bp, Probe Sequence
tcatttaactctttgaaactgtatc

SEQ ID NO: 295255 - DNA, 25 bp, Probe Sequence
tcttatttcatttctgtaacagttg

SEQ ID NO: 295256 - DNA, 25 bp, Probe Sequence
tcttttctacatttttaagtattat

SEQ ID NO: 295257 - DNA, 25 bp, Probe Sequence
tcttctctaacttggttaaccataa

SEQ ID NO: 295258 - DNA, 25 bp, Probe Sequence
tcttttcacctcctgttagcaaaaa

SEQ ID NO: 295259 - DNA, 25 bp, Probe Sequence
tcttattcatgagtccgtatcaacg

SEQ ID NO: 295260 - DNA, 25 bp, Probe Sequence
tctttgtcagcgccacgtgagacac

SEQ ID NO: 295261 - DNA, 25 bp, Probe Sequence
tctttgtgcagactgaaggaacact

SEQ ID NO: 295262 - DNA, 25 bp, Probe Sequence
tcattgtagcgaagagcaggaactt

SEQ ID NO: 295263 - DNA, 25 bp, Probe Sequence
tctttcaccacgtgtgaactgtggg

SEQ ID NO: 295264 - DNA, 25 bp, Probe Sequence
tctttcaccacgggtgggctgcgga

SEQ ID NO: 295265 - DNA, 25 bp, Probe Sequence
tctatatcttcaggcgcgcggtctg

SEQ ID NO: 295266 - DNA, 25 bp, Probe Sequence
tcttgactatactgagctggctcaa

SEQ ID NO: 295267 - DNA, 25 bp, Probe Sequence
tcttgccttgatgtactggagcaat

SEQ ID NO: 295268 - DNA, 25 bp, Probe Sequence
tcttgtcactgtctctgatgggtat

SEQ ID NO: 295269 - DNA, 25 bp, Probe Sequence
tcttgcctgcttcactgtggatggg

SEQ ID NO: 295270 - DNA, 25 bp, Probe Sequence
tcttcagcatcgcacctgaggtggt

SEQ ID NO: 295271 - DNA, 25 bp, Probe Sequence
tttcaacggatccttgaagaatgtg

SEQ ID NO: 295272 - DNA, 25 bp, Probe Sequence
tttcaagcagtgtgtcgggaaggga

SEQ ID NO: 295273 - DNA, 25 bp, Probe Sequence
tttcaagcttttaagggcaggggcg

SEQ ID NO: 295274 - DNA, 25 bp, Probe Sequence
ttacaagctcccaggggaggtgggg

SEQ ID NO: 295275 - DNA, 25 bp, Probe Sequence
tactcaagcccgcggggacattggg

SEQ ID NO: 295276 - DNA, 25 bp, Probe Sequence
tcacccaggacgtgagggtctgggt

SEQ ID NO: 295277 - DNA, 25 bp, Probe Sequence
tcataacggagcccggagggcgagg

SEQ ID NO: 295278 - DNA, 25 bp, Probe Sequence
tcagaaatgtgaggggggcgggggc

SEQ ID NO: 295279 - DNA, 25 bp, Probe Sequence
tcagaaatgtgaggggggcgggggc

SEQ ID NO: 295280 - DNA, 25 bp, Probe Sequence
tcatcctttgaggggaagggaccgc

SEQ ID NO: 295281 - DNA, 25 bp, Probe Sequence
tcaccaaatgatctggaatgtgcta

SEQ ID NO: 295282 - DNA, 25 bp, Probe Sequence
tcatgctaatatccattgaatcggt

SEQ ID NO: 295283 - DNA, 25 bp, Probe Sequence
tcagttcttgaaaaacggtgtcata

SEQ ID NO: 295284 - DNA, 25 bp, Probe Sequence
tcagttgttactgaacatgggtaag

SEQ ID NO: 295285 - DNA, 25 bp, Probe Sequence
tcagggttaatgttttctggtaatt

SEQ ID NO: 295286 - DNA, 25 bp, Probe Sequence
taggtttgaatgcggtgtagaaatg

SEQ ID NO: 295287 - DNA, 25 bp, Probe Sequence
taagattgtggaatgggtgtaagac

SEQ ID NO: 295288 - DNA, 25 bp, Probe Sequence
taaagttggttcacttcaaagctaa

SEQ ID NO: 295289 - DNA, 25 bp, Probe Sequence
tcaactgttgtctcttttcaaacca

SEQ ID NO: 295290 - DNA, 25 bp, Probe Sequence
tcaaagctcgtctgcgctttctaat

SEQ ID NO: 295291 - DNA, 25 bp, Probe Sequence
tcatcaagcacaaccggttcacaaa

SEQ ID NO: 295292 - DNA, 25 bp, Probe Sequence
tcatagaccacccatcggggcagaa

SEQ ID NO: 295293 - DNA, 25 bp, Probe Sequence
tcaaaccttcagtgagggggtggga

SEQ ID NO: 295294 - DNA, 25 bp, Probe Sequence
tcaaaccttcagtgagggggtggga

SEQ ID NO: 295295 - DNA, 25 bp, Probe Sequence
taatacacgtcattggagggctgcg

SEQ ID NO: 295296 - DNA, 25 bp, Probe Sequence
tcagatcgccgacggggatgtgtgc

SEQ ID NO: 295297 - DNA, 25 bp, Probe Sequence
tcagtgcgttcgcgcgagttggaat

SEQ ID NO: 295298 - DNA, 25 bp, Probe Sequence
tcaggcgcttcgtggaggttggccg

SEQ ID NO: 295299 - DNA, 25 bp, Probe Sequence
tcaggcgcttcgtggaggttggccg

SEQ ID NO: 295300 - DNA, 25 bp, Probe Sequence
tcaggccgtccagagctggcatttg

SEQ ID NO: 295301 - DNA, 25 bp, Probe Sequence
tcagcagggtacacaggcgtttcca

SEQ ID NO: 295302 - DNA, 25 bp, Probe Sequence
tcaaggagtacaacctggtctgagc

SEQ ID NO: 295303 - DNA, 25 bp, Probe Sequence
tcagaggaggactaccgcgggagga

SEQ ID NO: 295304 - DNA, 25 bp, Probe Sequence
tcaagaagcccctctcaggggccag

SEQ ID NO: 295305 - DNA, 25 bp, Probe Sequence
tcagaaaggccccctaaagacctgg

SEQ ID NO: 295306 - DNA, 25 bp, Probe Sequence
tcagggggccggtgaaggtcctgga

SEQ ID NO: 295307 - DNA, 25 bp, Probe Sequence
tcagggatggccgttggccacgtct

SEQ ID NO: 295308 - DNA, 25 bp, Probe Sequence
tcaggtacagcgggctgtgcccggc

SEQ ID NO: 295309 - DNA, 25 bp, Probe Sequence
tcagaggacaccctgctgaaggacg

SEQ ID NO: 295310 - DNA, 25 bp, Probe Sequence
tacagccataccacaaggtacgtcc

SEQ ID NO: 295311 - DNA, 25 bp, Probe Sequence
tcacagtaacgttcattggttcctt

SEQ ID NO: 295312 - DNA, 25 bp, Probe Sequence
tcatcgtgaggggtctttgtcctct

SEQ ID NO: 295313 - DNA, 25 bp, Probe Sequence
tcatcagtgacgaggtatatctttc

SEQ ID NO: 295314 - DNA, 25 bp, Probe Sequence
tcttctagcgtggttttcttgtggt

SEQ ID NO: 295315 - DNA, 25 bp, Probe Sequence
tcacctacgcgagtcttactttgag

SEQ ID NO: 295316 - DNA, 25 bp, Probe Sequence
tcatccgggaagtctttgatttatg

SEQ ID NO: 295317 - DNA, 25 bp, Probe Sequence
tcaccatgttgatcgcgtttttggc

SEQ ID NO: 295318 - DNA, 25 bp, Probe Sequence
tcatctccttttgcgcttatttgga

SEQ ID NO: 295319 - DNA, 25 bp, Probe Sequence
tcttcctttcagagttctccatggc

SEQ ID NO: 295320 - DNA, 25 bp, Probe Sequence
tcttgtgttatacttttctcctggc

SEQ ID NO: 295321 - DNA, 25 bp, Probe Sequence
tcttaataatatctggtatcctggc

SEQ ID NO: 295322 - DNA, 25 bp, Probe Sequence
tcttaaaatatgtccatgtcatact

SEQ ID NO: 295323 - DNA, 25 bp, Probe Sequence
tcattaaaattatctacaatttcct

SEQ ID NO: 295324 - DNA, 25 bp, Probe Sequence
tcttaaatttagttcatctttcttt

SEQ ID NO: 295325 - DNA, 25 bp, Probe Sequence
tctttcctgtatattctcttgtctg

SEQ ID NO: 295326 - DNA, 25 bp, Probe Sequence
tctttcctaaatactccatctgttt

SEQ ID NO: 295327 - DNA, 25 bp, Probe Sequence
tcttatccttttaccaaatcaatat

SEQ ID NO: 295328 - DNA, 25 bp, Probe Sequence
tcttctcagtttgatccaaataaac

SEQ ID NO: 295329 - DNA, 25 bp, Probe Sequence
tctttctgtttatgaccagatttaa

SEQ ID NO: 295330 - DNA, 25 bp, Probe Sequence
tctttgtgctttaatgcactcaatt

SEQ ID NO: 295331 - DNA, 25 bp, Probe Sequence
tcttcgtctttttgcttggatatga

SEQ ID NO: 295332 - DNA, 25 bp, Probe Sequence
tcttagttcttttctttgatctgtg

SEQ ID NO: 295333 - DNA, 25 bp, Probe Sequence
tcttttctttgatctgtgtgcctgt

SEQ ID NO: 295334 - DNA, 25 bp, Probe Sequence
tcttcttcttggaaatagtcctcca

SEQ ID NO: 295335 - DNA, 25 bp, Probe Sequence
tcttattgttggtaatagtgcttta

SEQ ID NO: 295336 - DNA, 25 bp, Probe Sequence
tcttcatttttagaaatgcctgtga

SEQ ID NO: 295337 - DNA, 25 bp, Probe Sequence
tcttttggttcatcacaagcctctg

SEQ ID NO: 295338 - DNA, 25 bp, Probe Sequence
tctttgggttgatcccacctatgag

SEQ ID NO: 295339 - DNA, 25 bp, Probe Sequence
taaggagtgggattcctactttatg

SEQ ID NO: 295340 - DNA, 25 bp, Probe Sequence
taaggaggaaaagaccttgacatat

SEQ ID NO: 295341 - DNA, 25 bp, Probe Sequence
taaggctggaaaggactccggaaag

SEQ ID NO: 295342 - DNA, 25 bp, Probe Sequence
taggcagctgtagaaccccaggaaa

SEQ ID NO: 295343 - DNA, 25 bp, Probe Sequence
tcaatggcatttgaaccaccaaaaa

SEQ ID NO: 295344 - DNA, 25 bp, Probe Sequence
tcttggattgtggttcgccgcacaa

SEQ ID NO: 295345 - DNA, 25 bp, Probe Sequence
tcttcacagtgcaaattccccacaa

SEQ ID NO: 295346 - DNA, 25 bp, Probe Sequence
tcttccaggagcgagatccctccaa

SEQ ID NO: 295347 - DNA, 25 bp, Probe Sequence
tcttccaggagcgagatccctccaa

SEQ ID NO: 295348 - DNA, 25 bp, Probe Sequence
tcttccaggagcgagatccctccaa

SEQ ID NO: 295349 - DNA, 25 bp, Probe Sequence
tcttcctgggtggcacatcccaaga

SEQ ID NO: 295350 - DNA, 25 bp, Probe Sequence
tcttctgggttgaatcattccaaag

SEQ ID NO: 295351 - DNA, 25 bp, Probe Sequence
tcttctgtgtggctgacagtctcag

SEQ ID NO: 295352 - DNA, 25 bp, Probe Sequence
tctttgcaggcggtcaggcctatac

SEQ ID NO: 295353 - DNA, 25 bp, Probe Sequence
tcttccagagcctcagcggtaacag

SEQ ID NO: 295354 - DNA, 25 bp, Probe Sequence
tcttccggccacactgaggacaagg

SEQ ID NO: 295355 - DNA, 25 bp, Probe Sequence
tcttcccgtctcaaaatggacatga

SEQ ID NO: 295356 - DNA, 25 bp, Probe Sequence
tcttcagtcttcggaaatgccacag

SEQ ID NO: 295357 - DNA, 25 bp, Probe Sequence
tcttgcctagtgcctaaatgctcca

SEQ ID NO: 295358 - DNA, 25 bp, Probe Sequence
tcttgcatcaagatctttaatccat

SEQ ID NO: 295359 - DNA, 25 bp, Probe Sequence
tcttgactcagtacgtggacaccat

SEQ ID NO: 295360 - DNA, 25 bp, Probe Sequence
tttactggctgagtgtgagccgcca

SEQ ID NO: 295361 - DNA, 25 bp, Probe Sequence
tcttggctggtgttgtggacgtgac

SEQ ID NO: 295362 - DNA, 25 bp, Probe Sequence
tctttgctgttgttggtcgcagcta

SEQ ID NO: 295363 - DNA, 25 bp, Probe Sequence
tcttctggcttgactggatggaagg

SEQ ID NO: 295364 - DNA, 25 bp, Probe Sequence
tcttgctgcccaggctggagtgcaa

SEQ ID NO: 295365 - DNA, 25 bp, Probe Sequence
tcttctcctgcagcctgagatggat

SEQ ID NO: 295366 - DNA, 25 bp, Probe Sequence
tcttgccccagattctagatcttgt

SEQ ID NO: 295367 - DNA, 25 bp, Probe Sequence
tcttccctcatgttctcatgtttgt

SEQ ID NO: 295368 - DNA, 25 bp, Probe Sequence
tcttccctgcagtgttttcatttta

SEQ ID NO: 295369 - DNA, 25 bp, Probe Sequence
tcttccctgcagtgttttcatttta

SEQ ID NO: 295370 - DNA, 25 bp, Probe Sequence
tcttccctgcagtgttttcatttta

SEQ ID NO: 295371 - DNA, 25 bp, Probe Sequence
tcttcctgtcagcgtttttgagtct

SEQ ID NO: 295372 - DNA, 25 bp, Probe Sequence
tcttcaggccagcagtatctgttgg

SEQ ID NO: 295373 - DNA, 25 bp, Probe Sequence
tcttggacacacagtgtcttcctgt

SEQ ID NO: 295374 - DNA, 25 bp, Probe Sequence
tcttggcaaatgacctttacctttt

SEQ ID NO: 295375 - DNA, 25 bp, Probe Sequence
tcttcacataaagcttgctaccgct

SEQ ID NO: 295376 - DNA, 25 bp, Probe Sequence
tcttcaatatcattcctagtacctt

SEQ ID NO: 295377 - DNA, 25 bp, Probe Sequence
tctttaatccattgtcagtatttgt

SEQ ID NO: 295378 - DNA, 25 bp, Probe Sequence
tctttctatctcttgtactacactg

SEQ ID NO: 295379 - DNA, 25 bp, Probe Sequence
tcttctgtcaagcttactacagtga

SEQ ID NO: 295380 - DNA, 25 bp, Probe Sequence
tcttgtggcaatctaatctggcatg

SEQ ID NO: 295381 - DNA, 25 bp, Probe Sequence
tcttttgcacatcttcctgagttga

SEQ ID NO: 295382 - DNA, 25 bp, Probe Sequence
tcttttgtctttccgtggagctgtc

SEQ ID NO: 295383 - DNA, 25 bp, Probe Sequence
tctttctggctggttcagggggtca

SEQ ID NO: 295384 - DNA, 25 bp, Probe Sequence
tcttgccgcagctgttcatggtgag

SEQ ID NO: 295385 - DNA, 25 bp, Probe Sequence
tcttcgctggacaccatgagtcaca

SEQ ID NO: 295386 - DNA, 25 bp, Probe Sequence
tcttctgagaacgctgatgatccca

SEQ ID NO: 295387 - DNA, 25 bp, Probe Sequence
tcttctataaacaggcatgcactca

SEQ ID NO: 295388 - DNA, 25 bp, Probe Sequence
tcttccagcaattcttgtagcctca

SEQ ID NO: 295389 - DNA, 25 bp, Probe Sequence
tcttggcacgagccattgctagcca

SEQ ID NO: 295390 - DNA, 25 bp, Probe Sequence
tcttgtacatgcgcagtgtcctagt

SEQ ID NO: 295391 - DNA, 25 bp, Probe Sequence
tcttgtcctagttgttccatgagtc

SEQ ID NO: 295392 - DNA, 25 bp, Probe Sequence
tcttgctcctcatgacttcgcaaat

SEQ ID NO: 295393 - DNA, 25 bp, Probe Sequence
tcttgtgcctcttttgggccaatta

SEQ ID NO: 295394 - DNA, 25 bp, Probe Sequence
tttggtctttagtcacccagttgca

SEQ ID NO: 295395 - DNA, 25 bp, Probe Sequence
tcttcgtttatcagccttcagttga

SEQ ID NO: 295396 - DNA, 25 bp, Probe Sequence
tcttcgtttatcagccttcagttga

SEQ ID NO: 295397 - DNA, 25 bp, Probe Sequence
tcttcgtttatcagccttcagttga

SEQ ID NO: 295398 - DNA, 25 bp, Probe Sequence
tcttggcttttgctcctggagttaa

SEQ ID NO: 295399 - DNA, 25 bp, Probe Sequence
tcttggctttgttgcacctgtttta

SEQ ID NO: 295400 - DNA, 25 bp, Probe Sequence
tcttggccactttaatagtttctga

SEQ ID NO: 295401 - DNA, 25 bp, Probe Sequence
tcttttcatcatgtctatagttcct

SEQ ID NO: 295402 - DNA, 25 bp, Probe Sequence
tcttctctaatagtctgtattcctt

SEQ ID NO: 295403 - DNA, 25 bp, Probe Sequence
tcttggctcatatttcttttctttc

SEQ ID NO: 295404 - DNA, 25 bp, Probe Sequence
tcataggtcatattgaaatcttcaa

SEQ ID NO: 295405 - DNA, 25 bp, Probe Sequence
tcatcatcgtcaatcgtaatcggga

SEQ ID NO: 295406 - DNA, 25 bp, Probe Sequence
tcatctattcattcgccagcatcga

SEQ ID NO: 295407 - DNA, 25 bp, Probe Sequence
tcttgaggttcagagcatcagaatg

SEQ ID NO: 295408 - DNA, 25 bp, Probe Sequence
tcttgagaggccagatgctccagtg

SEQ ID NO: 295409 - DNA, 25 bp, Probe Sequence
tcttagacgacctgtccagatggtt

SEQ ID NO: 295410 - DNA, 25 bp, Probe Sequence
tctttacaggcctgcccagagatgg

SEQ ID NO: 295411 - DNA, 25 bp, Probe Sequence
tcttaaccccaggactcagaagtga

SEQ ID NO: 295412 - DNA, 25 bp, Probe Sequence
tcttaaccccagactctgaaaatgg

SEQ ID NO: 295413 - DNA, 25 bp, Probe Sequence
tcttacacatctgccaccggaaata

SEQ ID NO: 295414 - DNA, 25 bp, Probe Sequence
tcttcaccagcgagcacggggagaa

SEQ ID NO: 295415 - DNA, 25 bp, Probe Sequence
tcttcacacaagctcaatgaggcgg

SEQ ID NO: 295416 - DNA, 25 bp, Probe Sequence
tcttaatccagcttgcaagtgaatg

SEQ ID NO: 295417 - DNA, 25 bp, Probe Sequence
tcattagaccatttccaggacttgt

SEQ ID NO: 295418 - DNA, 25 bp, Probe Sequence
tcttgagagcctgtagatttcttgt

SEQ ID NO: 295419 - DNA, 25 bp, Probe Sequence
tcttgagacatttgtaagtcctttg

SEQ ID NO: 295420 - DNA, 25 bp, Probe Sequence
tcttgcaataattggcagatgccca

SEQ ID NO: 295421 - DNA, 25 bp, Probe Sequence
tcttgatcaaatccagagctcctgc

SEQ ID NO: 295422 - DNA, 25 bp, Probe Sequence
tcttcacaaatttgaacactggttc

SEQ ID NO: 295423 - DNA, 25 bp, Probe Sequence
tcttgaaacttaaactctgtgcttg

SEQ ID NO: 295424 - DNA, 25 bp, Probe Sequence
tcattggacactggacacactagtt

SEQ ID NO: 295425 - DNA, 25 bp, Probe Sequence
tcttcaagacctgagcctggagctc

SEQ ID NO: 295426 - DNA, 25 bp, Probe Sequence
tcttcagaacgctcaacatggacat

SEQ ID NO: 295427 - DNA, 25 bp, Probe Sequence
tcttgcagaatcaccacacgagacc

SEQ ID NO: 295428 - DNA, 25 bp, Probe Sequence
tcttgataaaggaaagggcaccatc

SEQ ID NO: 295429 - DNA, 25 bp, Probe Sequence
tcttaataaagactgggatgccaaa

SEQ ID NO: 295430 - DNA, 25 bp, Probe Sequence
tcttatatacagcagtcagagatga

SEQ ID NO: 295431 - DNA, 25 bp, Probe Sequence
tcttatggcacctttcagagagtca

SEQ ID NO: 295432 - DNA, 25 bp, Probe Sequence
tcttagctcacttattccaaaacta

SEQ ID NO: 295433 - DNA, 25 bp, Probe Sequence
tcttacccttcaatgttaaatctac

SEQ ID NO: 295434 - DNA, 25 bp, Probe Sequence
tcttacacctgttatggaaaatgtc

SEQ ID NO: 295435 - DNA, 25 bp, Probe Sequence
tcttacctgctatatgtgaataata

SEQ ID NO: 295436 - DNA, 25 bp, Probe Sequence
tcttattcctattactgtgatcaaa

SEQ ID NO: 295437 - DNA, 25 bp, Probe Sequence
tctttcaccatttactgtaatgcag

SEQ ID NO: 295438 - DNA, 25 bp, Probe Sequence
tctttcacacaatacttcagacaca

SEQ ID NO: 295439 - DNA, 25 bp, Probe Sequence
tcttttcagtaacctgctagtgcac

SEQ ID NO: 295440 - DNA, 25 bp, Probe Sequence
tcttcattgagtttgtcaataggac

SEQ ID NO: 295441 - DNA, 25 bp, Probe Sequence
tcttcaatctgttttgagcttggag

SEQ ID NO: 295442 - DNA, 25 bp, Probe Sequence
tcttaactctttccagcttcagatg

SEQ ID NO: 295443 - DNA, 25 bp, Probe Sequence
tcttgaactcttagaacttagcaca

SEQ ID NO: 295444 - DNA, 25 bp, Probe Sequence
tcttgtaccttgcagcatgctctac

SEQ ID NO: 295445 - DNA, 25 bp, Probe Sequence
tcattgtccctacagacacccagaa

SEQ ID NO: 295446 - DNA, 25 bp, Probe Sequence
tcatttagttgagaaaagccagcat

SEQ ID NO: 295447 - DNA, 25 bp, Probe Sequence
tcattttgcggtgaaaacataatga

SEQ ID NO: 295448 - DNA, 25 bp, Probe Sequence
tcttcttcagcgtctacattaacaa

SEQ ID NO: 295449 - DNA, 25 bp, Probe Sequence
tcttcttcgcctacacggacaagat

SEQ ID NO: 295450 - DNA, 25 bp, Probe Sequence
tcttcaccagcgtgcggcagaaaat

SEQ ID NO: 295451 - DNA, 25 bp, Probe Sequence
tcttcaccagcgtgcggcagaaaat

SEQ ID NO: 295452 - DNA, 25 bp, Probe Sequence
tcttcccaggtgtgccaaggaatta

SEQ ID NO: 295453 - DNA, 25 bp, Probe Sequence
tcatttcctggtatgacaacgaatt

SEQ ID NO: 295454 - DNA, 25 bp, Probe Sequence
tcatttcctggtatgacaacgaatt

SEQ ID NO: 295455 - DNA, 25 bp, Probe Sequence
tcatttttggctcttcagaaacttg

SEQ ID NO: 295456 - DNA, 25 bp, Probe Sequence
tcttttgtcctccttagcacaatgt

SEQ ID NO: 295457 - DNA, 25 bp, Probe Sequence
tctttagtcacccagttgcacactg

SEQ ID NO: 295458 - DNA, 25 bp, Probe Sequence
tcttcagtgtgagctggggccagct

SEQ ID NO: 295459 - DNA, 25 bp, Probe Sequence
tcttcggtgcggcagagggacaagc

SEQ ID NO: 295460 - DNA, 25 bp, Probe Sequence
tctttattctggcctggggcacaag

SEQ ID NO: 295461 - DNA, 25 bp, Probe Sequence
tcttctattttgccaggctggtgca

SEQ ID NO: 295462 - DNA, 25 bp, Probe Sequence
tcttctaattgcccaggtgatctca

SEQ ID NO: 295463 - DNA, 25 bp, Probe Sequence
tcatactagttgctcaggactgcta

SEQ ID NO: 295464 - DNA, 25 bp, Probe Sequence
tcataatagttacagtcggcatcaa

SEQ ID NO: 295465 - DNA, 25 bp, Probe Sequence
tcttgttttcactgacgtgatcaga

SEQ ID NO: 295466 - DNA, 25 bp, Probe Sequence
tcttttattcccaactgcagataag

SEQ ID NO: 295467 - DNA, 25 bp, Probe Sequence
tcttcttcatcagcactaccataac

SEQ ID NO: 295468 - DNA, 25 bp, Probe Sequence
tcttcttccatggttccacagaagc

SEQ ID NO: 295469 - DNA, 25 bp, Probe Sequence
tcttcccctctttccaaagagctga

SEQ ID NO: 295470 - DNA, 25 bp, Probe Sequence
tcttcctagtccaaccaaacactga

SEQ ID NO: 295471 - DNA, 25 bp, Probe Sequence
tcttcctttatcagccacaatatct

SEQ ID NO: 295472 - DNA, 25 bp, Probe Sequence
tcattaccttaaagcatcaccactc

SEQ ID NO: 295473 - DNA, 25 bp, Probe Sequence
tcttacagtcgatggacttcctgat

SEQ ID NO: 295474 - DNA, 25 bp, Probe Sequence
tcttggagggtacactttcttcact

SEQ ID NO: 295475 - DNA, 25 bp, Probe Sequence
tcttggagggacagcatcctttttt

SEQ ID NO: 295476 - DNA, 25 bp, Probe Sequence
tcttgagggtcacttcctaactctt

SEQ ID NO: 295477 - DNA, 25 bp, Probe Sequence
tcttgcaggttgcctgacttacctc

SEQ ID NO: 295478 - DNA, 25 bp, Probe Sequence
tcttgcatggtttggagctgatcgc

SEQ ID NO: 295479 - DNA, 25 bp, Probe Sequence
tcttgcatggtttggagctgatcgc

SEQ ID NO: 295480 - DNA, 25 bp, Probe Sequence
tcttgctggtctgtgcgtgatgagt

SEQ ID NO: 295481 - DNA, 25 bp, Probe Sequence
tcttcagccgcagggcctgcagagc

SEQ ID NO: 295482 - DNA, 25 bp, Probe Sequence
tcttcactgtgctgcagccagatga

SEQ ID NO: 295483 - DNA, 25 bp, Probe Sequence
tcttcactgtgctgcagccagatga

SEQ ID NO: 295484 - DNA, 25 bp, Probe Sequence
tcttcctcatgctgaactgcattcc

SEQ ID NO: 295485 - DNA, 25 bp, Probe Sequence
tcttcaccacgatatcatgttacta

SEQ ID NO: 295486 - DNA, 25 bp, Probe Sequence
tcttttcacaagcactgttgactct

SEQ ID NO: 295487 - DNA, 25 bp, Probe Sequence
tcttttacaagacctgcattttatt

SEQ ID NO: 295488 - DNA, 25 bp, Probe Sequence
tcagtttccaaaccaagtttcctat

SEQ ID NO: 295489 - DNA, 25 bp, Probe Sequence
tcttacttcaaactaagttgtattt

SEQ ID NO: 295490 - DNA, 25 bp, Probe Sequence
tcttactgacatatgtacttttagt

SEQ ID NO: 295491 - DNA, 25 bp, Probe Sequence
tcttaagcaatattttttattcagt

SEQ ID NO: 295492 - DNA, 25 bp, Probe Sequence
tcttattgcatatcattttgttgta

SEQ ID NO: 295493 - DNA, 25 bp, Probe Sequence
tcttctatagcatcttcttctgttc

SEQ ID NO: 295494 - DNA, 25 bp, Probe Sequence
tcttcttgccaattttgttgtttaa

SEQ ID NO: 295495 - DNA, 25 bp, Probe Sequence
tctttttatattatgccgctttcaa

SEQ ID NO: 295496 - DNA, 25 bp, Probe Sequence
tctttattttctataactgttcaaa

SEQ ID NO: 295497 - DNA, 25 bp, Probe Sequence
tctttttttttttatctgcttctgt

SEQ ID NO: 295498 - DNA, 25 bp, Probe Sequence
tcttctttttttaatgtggtgttct

SEQ ID NO: 295499 - DNA, 25 bp, Probe Sequence
tcttttcctataatgttctgggttt

SEQ ID NO: 295500 - DNA, 25 bp, Probe Sequence
tcataatttctattgatgtcttggc

SEQ ID NO: 295501 - DNA, 25 bp, Probe Sequence
tcataatttcaactagatcaagaca

SEQ ID NO: 295502 - DNA, 25 bp, Probe Sequence
tcttcttgtcagtgaatccagtata

SEQ ID NO: 295503 - DNA, 25 bp, Probe Sequence
tattttgtccaggactccggtgctg

SEQ ID NO: 295504 - DNA, 25 bp, Probe Sequence
tcagttttcctgagcaaccttctgc

SEQ ID NO: 295505 - DNA, 25 bp, Probe Sequence
tcattctttttgagatacgtttatt

SEQ ID NO: 295506 - DNA, 25 bp, Probe Sequence
tcatcccatgtacaaaaccattttt

SEQ ID NO: 295507 - DNA, 25 bp, Probe Sequence
tcatccttagcacaaagcaccttaa

SEQ ID NO: 295508 - DNA, 25 bp, Probe Sequence
tcttctttgctaacaaccgctttga

SEQ ID NO: 295509 - DNA, 25 bp, Probe Sequence
tcttctttggtgtcatttcgattta

SEQ ID NO: 295510 - DNA, 25 bp, Probe Sequence
tcttctttgttgttcttctagtgtg

SEQ ID NO: 295511 - DNA, 25 bp, Probe Sequence
tcttctttgtggagcctctcagtgt

SEQ ID NO: 295512 - DNA, 25 bp, Probe Sequence
tcttgcttttggcgcccacagtgat

SEQ ID NO: 295513 - DNA, 25 bp, Probe Sequence
tcttcgtggacactggctccaagga

SEQ ID NO: 295514 - DNA, 25 bp, Probe Sequence
tcttcgggcgcacggtgagcaagcg

SEQ ID NO: 295515 - DNA, 25 bp, Probe Sequence
tcttctgatccagcctgtagagact

SEQ ID NO: 295516 - DNA, 25 bp, Probe Sequence
tcattctgaccagtttctggtggca

SEQ ID NO: 295517 - DNA, 25 bp, Probe Sequence
tcttctgacctgcatgttgagttct

SEQ ID NO: 295518 - DNA, 25 bp, Probe Sequence
tcttctgtctccatgtggtttttgg

SEQ ID NO: 295519 - DNA, 25 bp, Probe Sequence
tcttctgttaagtgtgttttctctg

SEQ ID NO: 295520 - DNA, 25 bp, Probe Sequence
tcttcagtataatgggctttcacta

SEQ ID NO: 295521 - DNA, 25 bp, Probe Sequence
tcttcagaacaatgtagacttccaa

SEQ ID NO: 295522 - DNA, 25 bp, Probe Sequence
tcttcagcaacgtcagttggtctcg

SEQ ID NO: 295523 - DNA, 25 bp, Probe Sequence
tcataagaatctcagttttatcacc

SEQ ID NO: 295524 - DNA, 25 bp, Probe Sequence
tcaccacaattggactcctgtaccc

SEQ ID NO: 295525 - DNA, 25 bp, Probe Sequence
tcttatcacttggactttcatcccc

SEQ ID NO: 295526 - DNA, 25 bp, Probe Sequence
tcttactgcttgtcacttgaatccc

SEQ ID NO: 295527 - DNA, 25 bp, Probe Sequence
tcttggtgcctggacttgagtctca

SEQ ID NO: 295528 - DNA, 25 bp, Probe Sequence
tcttgtgctcagacatccttggatc

SEQ ID NO: 295529 - DNA, 25 bp, Probe Sequence
tcttctctgacttctctcatcagaa

SEQ ID NO: 295530 - DNA, 25 bp, Probe Sequence
tcttcctgttttgctctgaacatcg

SEQ ID NO: 295531 - DNA, 25 bp, Probe Sequence
tcttcctcttttacgtgaatgacta

SEQ ID NO: 295532 - DNA, 25 bp, Probe Sequence
tcattcctcttatactgtaattcag

SEQ ID NO: 295533 - DNA, 25 bp, Probe Sequence
tcatacctattaaagctgttcattg

SEQ ID NO: 295534 - DNA, 25 bp, Probe Sequence
tcatagccattaacgaggtccctgc

SEQ ID NO: 295535 - DNA, 25 bp, Probe Sequence
ttaaagttaccacatcccacaaaat

SEQ ID NO: 295536 - DNA, 25 bp, Probe Sequence
ttaccagtaaccaccagaacaacct

SEQ ID NO: 295537 - DNA, 25 bp, Probe Sequence
tcaaccaaaaccaccctgaaagcac

SEQ ID NO: 295538 - DNA, 25 bp, Probe Sequence
tcataaaaaacctcggccacctgca

SEQ ID NO: 295539 - DNA, 25 bp, Probe Sequence
taaaaagggcacagccaccacctac

SEQ ID NO: 295540 - DNA, 25 bp, Probe Sequence
tcaataaaggatccgggcccaacac

SEQ ID NO: 295541 - DNA, 25 bp, Probe Sequence
tcaaaattgagctctaggcccaaaa

SEQ ID NO: 295542 - DNA, 25 bp, Probe Sequence
tcataatactggtgtcggacaaaga

SEQ ID NO: 295543 - DNA, 25 bp, Probe Sequence
tcttcagactggtcagcattagaaa

SEQ ID NO: 295544 - DNA, 25 bp, Probe Sequence
tcatcaagagggaccatataccata

SEQ ID NO: 295545 - DNA, 25 bp, Probe Sequence
tcttcagagtctaccttaccatata

SEQ ID NO: 295546 - DNA, 25 bp, Probe Sequence
tcttaagacatcacttacccaattt

SEQ ID NO: 295547 - DNA, 25 bp, Probe Sequence
tcatgtaaaatgagctttcctaaat

SEQ ID NO: 295548 - DNA, 25 bp, Probe Sequence
tcattataacaaactgttcgcttaa

SEQ ID NO: 295549 - DNA, 25 bp, Probe Sequence
tcttgtagacaaaaaggcctatgca

SEQ ID NO: 295550 - DNA, 25 bp, Probe Sequence
tcttgtcagacataaagccatgttt

SEQ ID NO: 295551 - DNA, 25 bp, Probe Sequence
tcttctcgacaccaaaattttcatg

SEQ ID NO: 295552 - DNA, 25 bp, Probe Sequence
tcttggctgtcccaaggattcttca

SEQ ID NO: 295553 - DNA, 25 bp, Probe Sequence
tcttccattccggagatgatccttg

SEQ ID NO: 295554 - DNA, 25 bp, Probe Sequence
tcttcacattcattgatgactacct

SEQ ID NO: 295555 - DNA, 25 bp, Probe Sequence
tcttgatatccagtgctgcttacct

SEQ ID NO: 295556 - DNA, 25 bp, Probe Sequence
tcttgtaaactcctctactttttga

SEQ ID NO: 295557 - DNA, 25 bp, Probe Sequence
tcttgtaacacctctcaatggttgt

SEQ ID NO: 295558 - DNA, 25 bp, Probe Sequence
tcttctaaggaatctcatcactttg

SEQ ID NO: 295559 - DNA, 25 bp, Probe Sequence
tcttcattgttagtcctcaactttg

SEQ ID NO: 295560 - DNA, 25 bp, Probe Sequence
tcttacactgctacaccattacttt

SEQ ID NO: 295561 - DNA, 25 bp, Probe Sequence
tcttaaccctcaggcaaacctgtgt

SEQ ID NO: 295562 - DNA, 25 bp, Probe Sequence
tcttaaccaccagatcattccttct

SEQ ID NO: 295563 - DNA, 25 bp, Probe Sequence
tcttcaagccatcagtatctacctc

SEQ ID NO: 295564 - DNA, 25 bp, Probe Sequence
tcatccaactgacattactagccta

SEQ ID NO: 295565 - DNA, 25 bp, Probe Sequence
tcatccaggtactgctgaggtcacc

SEQ ID NO: 295566 - DNA, 25 bp, Probe Sequence
tcatccgtgtgatactcgagtacct

SEQ ID NO: 295567 - DNA, 25 bp, Probe Sequence
tcttggtggagatactgagcatgtc

SEQ ID NO: 295568 - DNA, 25 bp, Probe Sequence
tcttaaggagcattcgccagatgaa

SEQ ID NO: 295569 - DNA, 25 bp, Probe Sequence
tcttccagtggctcagcatccaaat

SEQ ID NO: 295570 - DNA, 25 bp, Probe Sequence
tcttctagagcctttgatccagcaa

SEQ ID NO: 295571 - DNA, 25 bp, Probe Sequence
tcttgctagacctagatgagtcagg

SEQ ID NO: 295572 - DNA, 25 bp, Probe Sequence
tcttgtacaggctgagaggctgaga

SEQ ID NO: 295573 - DNA, 25 bp, Probe Sequence
tcttcatactgtttgaagtcatgaa

SEQ ID NO: 295574 - DNA, 25 bp, Probe Sequence
tcattcaagctatttaatatctggc

SEQ ID NO: 295575 - DNA, 25 bp, Probe Sequence
tcattccacttttgcatataggtca

SEQ ID NO: 295576 - DNA, 25 bp, Probe Sequence
tcttccactttgctaatgactccag

SEQ ID NO: 295577 - DNA, 25 bp, Probe Sequence
tcttccactttgctaatgactccag

SEQ ID NO: 295578 - DNA, 25 bp, Probe Sequence
tcttcgatctctgggatttatgctc

SEQ ID NO: 295579 - DNA, 25 bp, Probe Sequence
tcttctgttcattggattcgtctgt

SEQ ID NO: 295580 - DNA, 25 bp, Probe Sequence
tcttatcttctcctgaactgttgat

SEQ ID NO: 295581 - DNA, 25 bp, Probe Sequence
tcttactctctccatataatttcta

SEQ ID NO: 295582 - DNA, 25 bp, Probe Sequence
tcttcctctctctatttaactgtaa

SEQ ID NO: 295583 - DNA, 25 bp, Probe Sequence
tcattgcctactttaacacctgtca

SEQ ID NO: 295584 - DNA, 25 bp, Probe Sequence
tcttactactttgaccgcgatgatg

SEQ ID NO: 295585 - DNA, 25 bp, Probe Sequence
tttcgtcctaatgatcccaagagct

SEQ ID NO: 295586 - DNA, 25 bp, Probe Sequence
tcttctttttcaggctcgccaaggc

SEQ ID NO: 295587 - DNA, 25 bp, Probe Sequence
tcttcttgtctctaacactgtcaga

SEQ ID NO: 295588 - DNA, 25 bp, Probe Sequence
tcatttttccaaattctttactgtc

SEQ ID NO: 295589 - DNA, 25 bp, Probe Sequence
tcttcttccagcaatttctttattt

SEQ ID NO: 295590 - DNA, 25 bp, Probe Sequence
tcttcttctcagagttcatattctc

SEQ ID NO: 295591 - DNA, 25 bp, Probe Sequence
tcttgttctctgatcataaacctca

SEQ ID NO: 295592 - DNA, 25 bp, Probe Sequence
tcttctgttctactgtaagcccatc

SEQ ID NO: 295593 - DNA, 25 bp, Probe Sequence
tcttagtgtctagtggatcaggcca

SEQ ID NO: 295594 - DNA, 25 bp, Probe Sequence
tcttatgtcctaggaagcggccacc

SEQ ID NO: 295595 - DNA, 25 bp, Probe Sequence
tcttctgtcacaatgctaagtggta

SEQ ID NO: 295596 - DNA, 25 bp, Probe Sequence
tcttcatcttcattgttagtcctca

SEQ ID NO: 295597 - DNA, 25 bp, Probe Sequence
tcttgctctgccatggctatttcca

SEQ ID NO: 295598 - DNA, 25 bp, Probe Sequence
tcttcttgtggatctatctcatcaa

SEQ ID NO: 295599 - DNA, 25 bp, Probe Sequence
tcttcttttcattataccatgctga

SEQ ID NO: 295600 - DNA, 25 bp, Probe Sequence
tcttgttcttctagatcaaatcaga

SEQ ID NO: 295601 - DNA, 25 bp, Probe Sequence
tcttcactcttcaggcagcgtagaa

SEQ ID NO: 295602 - DNA, 25 bp, Probe Sequence
tcattccactccaggtcctggcaaa

SEQ ID NO: 295603 - DNA, 25 bp, Probe Sequence
tcttccacaactcgtgtttaatata

SEQ ID NO: 295604 - DNA, 25 bp, Probe Sequence
tcttagcacatcttcgactttaggt

SEQ ID NO: 295605 - DNA, 25 bp, Probe Sequence
tcttccaagttcttcttgcatgagg

SEQ ID NO: 295606 - DNA, 25 bp, Probe Sequence
tcttcacaagatgacttgctcgctg

SEQ ID NO: 295607 - DNA, 25 bp, Probe Sequence
tcttatccacatgtctgtgcctggg

SEQ ID NO: 295608 - DNA, 25 bp, Probe Sequence
tcttcacacactctttgttagagga

SEQ ID NO: 295609 - DNA, 25 bp, Probe Sequence
tcttgacaactatttgcttttgagt

SEQ ID NO: 295610 - DNA, 25 bp, Probe Sequence
tcttacaactcagttgttttgagtc

SEQ ID NO: 295611 - DNA, 25 bp, Probe Sequence
tcttcactactagattccttgcacc

SEQ ID NO: 295612 - DNA, 25 bp, Probe Sequence
tcttgcagccaaagaactttacacc

SEQ ID NO: 295613 - DNA, 25 bp, Probe Sequence
tcatctcagttaagacacgttcaga

SEQ ID NO: 295614 - DNA, 25 bp, Probe Sequence
tcacctgtgccataccagttaaaca

SEQ ID NO: 295615 - DNA, 25 bp, Probe Sequence
tcatcaggatcgtccaccgtgtata

SEQ ID NO: 295616 - DNA, 25 bp, Probe Sequence
tcttgagatccccacatctgtggac

SEQ ID NO: 295617 - DNA, 25 bp, Probe Sequence
tcttgagatccccacatctgtggac

SEQ ID NO: 295618 - DNA, 25 bp, Probe Sequence
taatcagactggaaacgggactttc

SEQ ID NO: 295619 - DNA, 25 bp, Probe Sequence
tcaacaggtggtgcactgggaccgg

SEQ ID NO: 295620 - DNA, 25 bp, Probe Sequence
tcacgtgggcgtgttgtggggggga

SEQ ID NO: 295621 - DNA, 25 bp, Probe Sequence
tcatcatgggggaggtggacggcgg

SEQ ID NO: 295622 - DNA, 25 bp, Probe Sequence
tcatctccggaatggaagaggtgag

SEQ ID NO: 295623 - DNA, 25 bp, Probe Sequence
tcagcccaagtaaaagagtttgcag

SEQ ID NO: 295624 - DNA, 25 bp, Probe Sequence
tagcgagggaaagaggtgtctcaga

SEQ ID NO: 295625 - DNA, 25 bp, Probe Sequence
tcagctggtcggaaaaggcctctaa

SEQ ID NO: 295626 - DNA, 25 bp, Probe Sequence
tcagctggtcggaaaaggcctctaa

SEQ ID NO: 295627 - DNA, 25 bp, Probe Sequence
tcatcgtctcggggggagacctgaa

SEQ ID NO: 295628 - DNA, 25 bp, Probe Sequence
tcatgagattcaggccaggggttat

SEQ ID NO: 295629 - DNA, 25 bp, Probe Sequence
tcatagatgacccccaggtattgtc

SEQ ID NO: 295630 - DNA, 25 bp, Probe Sequence
tcatagaggctcaaccaatatagga

SEQ ID NO: 295631 - DNA, 25 bp, Probe Sequence
tcatatgattgaacacgcacagaag

SEQ ID NO: 295632 - DNA, 25 bp, Probe Sequence
tcatcatcctgaacaacaaagagtg

SEQ ID NO: 295633 - DNA, 25 bp, Probe Sequence
tcatcacccaaacccaagaggcgga

SEQ ID NO: 295634 - DNA, 25 bp, Probe Sequence
tcatcacccgaacccaagaggcgga

SEQ ID NO: 295635 - DNA, 25 bp, Probe Sequence
tcactccctaatcatcaagacttgg

SEQ ID NO: 295636 - DNA, 25 bp, Probe Sequence
tcattaatctaactctacaaccgga

SEQ ID NO: 295637 - DNA, 25 bp, Probe Sequence
tcttctcatgtatcttaaccccaga

SEQ ID NO: 295638 - DNA, 25 bp, Probe Sequence
tcttcaatactgttttaccccatcc

SEQ ID NO: 295639 - DNA, 25 bp, Probe Sequence
tcttctaagctttttatgtgccctc

SEQ ID NO: 295640 - DNA, 25 bp, Probe Sequence
tcttctcaatttttatatgtttact

SEQ ID NO: 295641 - DNA, 25 bp, Probe Sequence
tcttctcctttgtaaatagcttatt

SEQ ID NO: 295642 - DNA, 25 bp, Probe Sequence
tcttctcctttgtcaaatggtattt

SEQ ID NO: 295643 - DNA, 25 bp, Probe Sequence
tcttccgcatcaggtaacaggtttc

SEQ ID NO: 295644 - DNA, 25 bp, Probe Sequence
tcttccatggcaattacagcagagc

SEQ ID NO: 295645 - DNA, 25 bp, Probe Sequence
tcttccatggttccacagaagcttt

SEQ ID NO: 295646 - DNA, 25 bp, Probe Sequence
tcttccacttgaacagagaattggt

SEQ ID NO: 295647 - DNA, 25 bp, Probe Sequence
tcttctcatctggttcagaacttag

SEQ ID NO: 295648 - DNA, 25 bp, Probe Sequence
tcttctctcatggatcctgatacca

SEQ ID NO: 295649 - DNA, 25 bp, Probe Sequence
tcttcagcacatgctcactgttctc

SEQ ID NO: 295650 - DNA, 25 bp, Probe Sequence
tcttcagcacatgctcactgttctc

SEQ ID NO: 295651 - DNA, 25 bp, Probe Sequence
tcttcaggcggtagctgattctgga

SEQ ID NO: 295652 - DNA, 25 bp, Probe Sequence
tcttcaggcggtagctgattctgga

SEQ ID NO: 295653 - DNA, 25 bp, Probe Sequence
tcttgtgagtggggcatctgttgga

SEQ ID NO: 295654 - DNA, 25 bp, Probe Sequence
tcttgtaggtgtatgcttactgcag

SEQ ID NO: 295655 - DNA, 25 bp, Probe Sequence
tcagaaggggaagtttactcccagt

SEQ ID NO: 295656 - DNA, 25 bp, Probe Sequence
tcaaaccaaaactctgattgcccag

SEQ ID NO: 295657 - DNA, 25 bp, Probe Sequence
tcagaatccaaacacgctttccgtc

SEQ ID NO: 295658 - DNA, 25 bp, Probe Sequence
tcaaattccagccaaacgttccttg

SEQ ID NO: 295659 - DNA, 25 bp, Probe Sequence
tcaacaaccaccaaattttatcttt

SEQ ID NO: 295660 - DNA, 25 bp, Probe Sequence
tcaatagggaactagattctttttt

SEQ ID NO: 295661 - DNA, 25 bp, Probe Sequence
tcttcggtgatatatattgcattat

SEQ ID NO: 295662 - DNA, 25 bp, Probe Sequence
tcttgggatgattttctagtcttaa

SEQ ID NO: 295663 - DNA, 25 bp, Probe Sequence
tcttgctggtgatgtcaaacctcta

SEQ ID NO: 295664 - DNA, 25 bp, Probe Sequence
tcttgatactttccaaattctctga

SEQ ID NO: 295665 - DNA, 25 bp, Probe Sequence
tcatgaatattcgtgcaaaaatcct

SEQ ID NO: 295666 - DNA, 25 bp, Probe Sequence
tcttcatcttcaccagaggaatcac

SEQ ID NO: 295667 - DNA, 25 bp, Probe Sequence
tcttcctgtcaccataggcaatacc

SEQ ID NO: 295668 - DNA, 25 bp, Probe Sequence
tcatccctgtgcaaatggaagtacc

SEQ ID NO: 295669 - DNA, 25 bp, Probe Sequence
tcatcccgatggtcactgaactgat

SEQ ID NO: 295670 - DNA, 25 bp, Probe Sequence
tcatcgcgctgaccttcgagaagtt

SEQ ID NO: 295671 - DNA, 25 bp, Probe Sequence
tcattgctgcgatcatgtccaagga

SEQ ID NO: 295672 - DNA, 25 bp, Probe Sequence
tcattgctcctcctgagcgcaagta

SEQ ID NO: 295673 - DNA, 25 bp, Probe Sequence
tcattgcctgctacatacaaagaac

SEQ ID NO: 295674 - DNA, 25 bp, Probe Sequence
tcttgccgcttcacagacacacaag

SEQ ID NO: 295675 - DNA, 25 bp, Probe Sequence
tcattgagtgtcaccagagaccagg

SEQ ID NO: 295676 - DNA, 25 bp, Probe Sequence
tcatcagcaaacacaaagacctgcg

SEQ ID NO: 295677 - DNA, 25 bp, Probe Sequence
tcattagacacaacaaaacccaaac

SEQ ID NO: 295678 - DNA, 25 bp, Probe Sequence
tcattgtacagcctcaaaccaccaa

SEQ ID NO: 295679 - DNA, 25 bp, Probe Sequence
tcttccaacaatgctgaccaccaga

SEQ ID NO: 295680 - DNA, 25 bp, Probe Sequence
tcttccaccagttgtggcgtccaga

SEQ ID NO: 295681 - DNA, 25 bp, Probe Sequence
tcttcgctggcgtggacgtcacgaa

SEQ ID NO: 295682 - DNA, 25 bp, Probe Sequence
tcttcagcgccctgggcgctgccta

SEQ ID NO: 295683 - DNA, 25 bp, Probe Sequence
tcttcagtgaaacgggtgctggcaa

SEQ ID NO: 295684 - DNA, 25 bp, Probe Sequence
tcatccgtgaggaccagggcggcga

SEQ ID NO: 295685 - DNA, 25 bp, Probe Sequence
tcatccgtgaggaccagggcggcga

SEQ ID NO: 295686 - DNA, 25 bp, Probe Sequence
tcttcggggagcagcgatgcgaccc

SEQ ID NO: 295687 - DNA, 25 bp, Probe Sequence
tcttcgaaggctctggggaggcccg

SEQ ID NO: 295688 - DNA, 25 bp, Probe Sequence
tcttccagaggtgatgatgcggcag

SEQ ID NO: 295689 - DNA, 25 bp, Probe Sequence
tcttcctgaagacatggcccagtcg

SEQ ID NO: 295690 - DNA, 25 bp, Probe Sequence
tcttctctgaagctaggtacacctt

SEQ ID NO: 295691 - DNA, 25 bp, Probe Sequence
tcttgcttatggcatgagggacctc

SEQ ID NO: 295692 - DNA, 25 bp, Probe Sequence
tcattgtctatgcacaccaggaacc

SEQ ID NO: 295693 - DNA, 25 bp, Probe Sequence
tcattggctatgtaaaagcaggcag

SEQ ID NO: 295694 - DNA, 25 bp, Probe Sequence
tcatgtcaggcgttaaactgtcagt

SEQ ID NO: 295695 - DNA, 25 bp, Probe Sequence
tcttcaccgtgttaacataatctat

SEQ ID NO: 295696 - DNA, 25 bp, Probe Sequence
tcttcaccgttatcatctatgttcg

SEQ ID NO: 295697 - DNA, 25 bp, Probe Sequence
tcattgagccttttatcctctgttc

SEQ ID NO: 295698 - DNA, 25 bp, Probe Sequence
tcttgtcttgtgtataattctctat

SEQ ID NO: 295699 - DNA, 25 bp, Probe Sequence
tcattttgggcttcaagtctctctc

SEQ ID NO: 295700 - DNA, 25 bp, Probe Sequence
tcattgttagtcctcaactttgtct

SEQ ID NO: 295701 - DNA, 25 bp, Probe Sequence
tcattgtctaacacacttctttttc

SEQ ID NO: 295702 - DNA, 25 bp, Probe Sequence
tcatttttaagttccttgttacatc

SEQ ID NO: 295703 - DNA, 25 bp, Probe Sequence
tcatgttcaggcagaaccggtccca

SEQ ID NO: 295704 - DNA, 25 bp, Probe Sequence
tcatgtttgtgataaccgtggcgaa

SEQ ID NO: 295705 - DNA, 25 bp, Probe Sequence
tcagtttggttccacccagttgaaa

SEQ ID NO: 295706 - DNA, 25 bp, Probe Sequence
tcagtttggttccacccagttgaaa

SEQ ID NO: 295707 - DNA, 25 bp, Probe Sequence
tcagtttggttccacccagttgaaa

SEQ ID NO: 295708 - DNA, 25 bp, Probe Sequence
tcattcgtggttgagcacaggctgg

SEQ ID NO: 295709 - DNA, 25 bp, Probe Sequence
tcttctgttgtccacagccagagct

SEQ ID NO: 295710 - DNA, 25 bp, Probe Sequence
tcttctgttgtccacagccagagct

SEQ ID NO: 295711 - DNA, 25 bp, Probe Sequence
tcttctgctttcaaggagaggcaac

SEQ ID NO: 295712 - DNA, 25 bp, Probe Sequence
tcttctgcttttcccaggagaacat

SEQ ID NO: 295713 - DNA, 25 bp, Probe Sequence
tcttctgttttgcccatggtcaagt

SEQ ID NO: 295714 - DNA, 25 bp, Probe Sequence
tcttcattcctttccagaacaactc

SEQ ID NO: 295715 - DNA, 25 bp, Probe Sequence
tcttgaggtctttctcagacaaaca

SEQ ID NO: 295716 - DNA, 25 bp, Probe Sequence
tcttgtggatctatctcatcaaaca

SEQ ID NO: 295717 - DNA, 25 bp, Probe Sequence
tcttgtgcgcacacttgatgaaggt

SEQ ID NO: 295718 - DNA, 25 bp, Probe Sequence
tcttgatgcccaacattggttatgg

SEQ ID NO: 295719 - DNA, 25 bp, Probe Sequence
tcttgtgctcatgactgggtctatg

SEQ ID NO: 295720 - DNA, 25 bp, Probe Sequence
tcttcttcacaattgatggtgcttc

SEQ ID NO: 295721 - DNA, 25 bp, Probe Sequence
tcttctctgccttgttagtgcatat

SEQ ID NO: 295722 - DNA, 25 bp, Probe Sequence
tcttcttcagcttcctagtatttgg

SEQ ID NO: 295723 - DNA, 25 bp, Probe Sequence
tcttcttcagcttcctagtatttgg

SEQ ID NO: 295724 - DNA, 25 bp, Probe Sequence
tcttcttcagcttcctagtatttgg

SEQ ID NO: 295725 - DNA, 25 bp, Probe Sequence
tcttcttcgttcaagatgaattctg

SEQ ID NO: 295726 - DNA, 25 bp, Probe Sequence
tcttctgggtaaagcactatgtctg

SEQ ID NO: 295727 - DNA, 25 bp, Probe Sequence
tcttcttgagtaatcacaccatttc

SEQ ID NO: 295728 - DNA, 25 bp, Probe Sequence
tcttgcatgtgacaattgacaatct

SEQ ID NO: 295729 - DNA, 25 bp, Probe Sequence
tcttgcatggagcaatctcgcagtg

SEQ ID NO: 295730 - DNA, 25 bp, Probe Sequence
tcttcggagctattgcaggcgcagc

SEQ ID NO: 295731 - DNA, 25 bp, Probe Sequence
tcattaaagtgattgctgggagcaa

SEQ ID NO: 295732 - DNA, 25 bp, Probe Sequence
tcattgaatctctctgtcgtgacaa

SEQ ID NO: 295733 - DNA, 25 bp, Probe Sequence
tcattgttactgccttgtgagataa

SEQ ID NO: 295734 - DNA, 25 bp, Probe Sequence
tcattgttactgccttgtgagataa

SEQ ID NO: 295735 - DNA, 25 bp, Probe Sequence
tcatttaagagcatttgactacaac

SEQ ID NO: 295736 - DNA, 25 bp, Probe Sequence
tcattccacagacttacacagttta

SEQ ID NO: 295737 - DNA, 25 bp, Probe Sequence
tcttctgccaatttactatgattgt

SEQ ID NO: 295738 - DNA, 25 bp, Probe Sequence
tcttctgccaatttactatgattgt

SEQ ID NO: 295739 - DNA, 25 bp, Probe Sequence
tcattctggaaccatactatcaaat

SEQ ID NO: 295740 - DNA, 25 bp, Probe Sequence
tcatttgtcaaccttttcagtaaag

SEQ ID NO: 295741 - DNA, 25 bp, Probe Sequence
tcattgtttgctgttattagtaata

SEQ ID NO: 295742 - DNA, 25 bp, Probe Sequence
tcataggtatcagcgtattacccaa

SEQ ID NO: 295743 - DNA, 25 bp, Probe Sequence
tcatcgttgaacactttagccttaa

SEQ ID NO: 295744 - DNA, 25 bp, Probe Sequence
tcaggttgaaacttttggctttcgg

SEQ ID NO: 295745 - DNA, 25 bp, Probe Sequence
tcaggtggaaacttttggctttcgg

SEQ ID NO: 295746 - DNA, 25 bp, Probe Sequence
tagggtgaaaacattcagtttttga

SEQ ID NO: 295747 - DNA, 25 bp, Probe Sequence
tttggtactaaggtgctcagtcctt

SEQ ID NO: 295748 - DNA, 25 bp, Probe Sequence
tcttggtacttagatgacaacatca

SEQ ID NO: 295749 - DNA, 25 bp, Probe Sequence
tcttgttcactaaggagtaacacag

SEQ ID NO: 295750 - DNA, 25 bp, Probe Sequence
tcttgtcatcttttagagtaaacta

SEQ ID NO: 295751 - DNA, 25 bp, Probe Sequence
tcttgttcttgagatgaggaaagga

SEQ ID NO: 295752 - DNA, 25 bp, Probe Sequence
tcttccctgctaggagtgcgacaag

SEQ ID NO: 295753 - DNA, 25 bp, Probe Sequence
tcttctcggtcaccaggcgatgaag

SEQ ID NO: 295754 - DNA, 25 bp, Probe Sequence
tcttctgcagagaatcgcccggaga

SEQ ID NO: 295755 - DNA, 25 bp, Probe Sequence
tcttgatcagagtacccttgtatgg

SEQ ID NO: 295756 - DNA, 25 bp, Probe Sequence
tcttgacacttagccgctgtctcgc

SEQ ID NO: 295757 - DNA, 25 bp, Probe Sequence
tcttgaaggtcaggggctttatcta

SEQ ID NO: 295758 - DNA, 25 bp, Probe Sequence
tcttgagaattctcgtcttccatca

SEQ ID NO: 295759 - DNA, 25 bp, Probe Sequence
tcttgagctacctgcgtctttatga

SEQ ID NO: 295760 - DNA, 25 bp, Probe Sequence
tcttgacctctttgggctttagttc

SEQ ID NO: 295761 - DNA, 25 bp, Probe Sequence
tcatttctccttaaggtttacctct

SEQ ID NO: 295762 - DNA, 25 bp, Probe Sequence
tcatctttcacttttggttttcctc

SEQ ID NO: 295763 - DNA, 25 bp, Probe Sequence
tcatttccccagttggtgtttccaa

SEQ ID NO: 295764 - DNA, 25 bp, Probe Sequence
tcattctccccactttattagttaa

SEQ ID NO: 295765 - DNA, 25 bp, Probe Sequence
tcttgtccaccggtttttgttggag

SEQ ID NO: 295766 - DNA, 25 bp, Probe Sequence
tcatgttcccgttgtttttccggag

SEQ ID NO: 295767 - DNA, 25 bp, Probe Sequence
tcaggtccctgatgtttccagaagg

SEQ ID NO: 295768 - DNA, 25 bp, Probe Sequence
tcagtctccctttgtggttcgaagg

SEQ ID NO: 295769 - DNA, 25 bp, Probe Sequence
tcttgtcctttcctggttcaaagca

SEQ ID NO: 295770 - DNA, 25 bp, Probe Sequence
tcttctcctcctataggatcacaac

SEQ ID NO: 295771 - DNA, 25 bp, Probe Sequence
tcattgtgcgctctttgcggacagc

SEQ ID NO: 295772 - DNA, 25 bp, Probe Sequence
tcattgtcagattttctgagtacag

SEQ ID NO: 295773 - DNA, 25 bp, Probe Sequence
tcatccaagcaagttagagtccagc

SEQ ID NO: 295774 - DNA, 25 bp, Probe Sequence
atgttgctcaactcagacatcttct

SEQ ID NO: 295775 - DNA, 25 bp, Probe Sequence
tcattcgaaatggaccctgctgatg

SEQ ID NO: 295776 - DNA, 25 bp, Probe Sequence
tcataccaacacgatcctattctgt

SEQ ID NO: 295777 - DNA, 25 bp, Probe Sequence
tcataggtcactggctctccaagtg

SEQ ID NO: 295778 - DNA, 25 bp, Probe Sequence
tcattggacatgagctgacccacgg

SEQ ID NO: 295779 - DNA, 25 bp, Probe Sequence
tcttggctgagaagcggcgccaggc

SEQ ID NO: 295780 - DNA, 25 bp, Probe Sequence
tcttggtgtgatgcggggtgggctg

SEQ ID NO: 295781 - DNA, 25 bp, Probe Sequence
tcttctgtgtggacgaggggaggct

SEQ ID NO: 295782 - DNA, 25 bp, Probe Sequence
tcttcctctgtttgcaggggagtgt

SEQ ID NO: 295783 - DNA, 25 bp, Probe Sequence
tcttccttgctccgcagaagagagt

SEQ ID NO: 295784 - DNA, 25 bp, Probe Sequence
tcttcttgttcccaatcacagtgtt

SEQ ID NO: 295785 - DNA, 25 bp, Probe Sequence
tcttgcctattaccataccagtgta

SEQ ID NO: 295786 - DNA, 25 bp, Probe Sequence
tcttgctcttgatcagcacatccaa

SEQ ID NO: 295787 - DNA, 25 bp, Probe Sequence
tcttctctaatgctgcatccctaat

SEQ ID NO: 295788 - DNA, 25 bp, Probe Sequence
tcattcgctcaaattatccctaaag

SEQ ID NO: 295789 - DNA, 25 bp, Probe Sequence
tcattgcctcttctacttgtaaaat

SEQ ID NO: 295790 - DNA, 25 bp, Probe Sequence
tcattgccctttcacttcagaaaca

SEQ ID NO: 295791 - DNA, 25 bp, Probe Sequence
tcatgtttctgtttacccaaaaaag

SEQ ID NO: 295792 - DNA, 25 bp, Probe Sequence
tcatgaattcttttcccttagccaa

SEQ ID NO: 295793 - DNA, 25 bp, Probe Sequence
tcatcagtggttgtcccaatatcca

SEQ ID NO: 295794 - DNA, 25 bp, Probe Sequence
tcatcacggtctttagccatgcaca

SEQ ID NO: 295795 - DNA, 25 bp, Probe Sequence
tcatcatcctggctatatctctaca

SEQ ID NO: 295796 - DNA, 25 bp, Probe Sequence
tcatcacaaatggctacatctccaa

SEQ ID NO: 295797 - DNA, 25 bp, Probe Sequence
tcatcaacaatgagctttcccattt

SEQ ID NO: 295798 - DNA, 25 bp, Probe Sequence
tcatcgacctggacttgtgtaactc

SEQ ID NO: 295799 - DNA, 25 bp, Probe Sequence
tcatattattcgccttgttacactc

SEQ ID NO: 295800 - DNA, 25 bp, Probe Sequence
tcatataatttgctagtcatcccct

SEQ ID NO: 295801 - DNA, 25 bp, Probe Sequence
tcatcttaatctgatattcccccaa

SEQ ID NO: 295802 - DNA, 25 bp, Probe Sequence
tcactggcttctctatattcccaaa

SEQ ID NO: 295803 - DNA, 25 bp, Probe Sequence
tcttccatgtctattagctccacaa

SEQ ID NO: 295804 - DNA, 25 bp, Probe Sequence
tcttctgctttgattcttgccatca

SEQ ID NO: 295805 - DNA, 25 bp, Probe Sequence
tcatattttctatacttccattctt

SEQ ID NO: 295806 - DNA, 25 bp, Probe Sequence
tcatttccttcatatttttctctta

SEQ ID NO: 295807 - DNA, 25 bp, Probe Sequence
tcttgtgcctttgatggtgttcatt

SEQ ID NO: 295808 - DNA, 25 bp, Probe Sequence
tcttggcagtgtccgtggttgctaa

SEQ ID NO: 295809 - DNA, 25 bp, Probe Sequence
tcttgggggacctgctcattgatga

SEQ ID NO: 295810 - DNA, 25 bp, Probe Sequence
tcttgggggacctgctcattgatga

SEQ ID NO: 295811 - DNA, 25 bp, Probe Sequence
tcttccgactacaacctcatggatg

SEQ ID NO: 295812 - DNA, 25 bp, Probe Sequence
tcttccgactgagcggcactgggag

SEQ ID NO: 295813 - DNA, 25 bp, Probe Sequence
tcttcggcctgagcgagacggaacc

SEQ ID NO: 295814 - DNA, 25 bp, Probe Sequence
tcttcggacgcaagaagacagcgac

SEQ ID NO: 295815 - DNA, 25 bp, Probe Sequence
tcatccggcaccagtcagaccgata

SEQ ID NO: 295816 - DNA, 25 bp, Probe Sequence
tcaccgagcctcacggggaggtaaa

SEQ ID NO: 295817 - DNA, 25 bp, Probe Sequence
tcatccacgtctagtcagggaccgt

SEQ ID NO: 295818 - DNA, 25 bp, Probe Sequence
tcatgccagctgccaagctcaagga

SEQ ID NO: 295819 - DNA, 25 bp, Probe Sequence
tcatcatacagaccaccatatgttc

SEQ ID NO: 295820 - DNA, 25 bp, Probe Sequence
tcatcatcctagccctaagtctggc

SEQ ID NO: 295821 - DNA, 25 bp, Probe Sequence
tcatccgcttctccaaatatctggg

SEQ ID NO: 295822 - DNA, 25 bp, Probe Sequence
tcatctggtttggcattttttggac

SEQ ID NO: 295823 - DNA, 25 bp, Probe Sequence
tcatctgagggagcttcacttggac

SEQ ID NO: 295824 - DNA, 25 bp, Probe Sequence
tcatctgagggagcttcacttggac

SEQ ID NO: 295825 - DNA, 25 bp, Probe Sequence
tactcgggcgcagaacttgggacca

SEQ ID NO: 295826 - DNA, 25 bp, Probe Sequence
tcagggggctcagagtctgggtacc

SEQ ID NO: 295827 - DNA, 25 bp, Probe Sequence
tcaggggtctaggaggggcattttg

SEQ ID NO: 295828 - DNA, 25 bp, Probe Sequence
tcacccccgaggagcaggagtttgt

SEQ ID NO: 295829 - DNA, 25 bp, Probe Sequence
tcaccccagagggtcgggcaggttg

SEQ ID NO: 295830 - DNA, 25 bp, Probe Sequence
tcatcccctacaggtggggcggtcc

SEQ ID NO: 295831 - DNA, 25 bp, Probe Sequence
tcttgccctaaggtggaagccgcct

SEQ ID NO: 295832 - DNA, 25 bp, Probe Sequence
tcatctccctggagggcaagccttt

SEQ ID NO: 295833 - DNA, 25 bp, Probe Sequence
tcatcttcgccgaggtgctcggcct

SEQ ID NO: 295834 - DNA, 25 bp, Probe Sequence
tcttgttggcgatgtggctcaggct

SEQ ID NO: 295835 - DNA, 25 bp, Probe Sequence
tcttctggcggaccgtgcgaggtat

SEQ ID NO: 295836 - DNA, 25 bp, Probe Sequence
tcttctgtgctgttcctgtaagttt

SEQ ID NO: 295837 - DNA, 25 bp, Probe Sequence
tcttctgtgctgttcctgtaagttt

SEQ ID NO: 295838 - DNA, 25 bp, Probe Sequence
tcttctgtgctgttcctgtaagttt

SEQ ID NO: 295839 - DNA, 25 bp, Probe Sequence
tcttgtgcatgtctgctctgatata

SEQ ID NO: 295840 - DNA, 25 bp, Probe Sequence
tcttctgatgtaacatgtgatacat

SEQ ID NO: 295841 - DNA, 25 bp, Probe Sequence
tcttctgagcacaatatggaatcta

SEQ ID NO: 295842 - DNA, 25 bp, Probe Sequence
tcttctgcagactcatgcagcccta

SEQ ID NO: 295843 - DNA, 25 bp, Probe Sequence
tcatttcagcattactgactgctta

SEQ ID NO: 295844 - DNA, 25 bp, Probe Sequence
tcatgcttccttaatatctttgaac

SEQ ID NO: 295845 - DNA, 25 bp, Probe Sequence
tcagtgtccttctcatttcagtagg

SEQ ID NO: 295846 - DNA, 25 bp, Probe Sequence
tcttgtcacctcattttgcattact

SEQ ID NO: 295847 - DNA, 25 bp, Probe Sequence
tcttgtcacctcattttgcattact

SEQ ID NO: 295848 - DNA, 25 bp, Probe Sequence
tcttgtctttcaattatctgtattg

SEQ ID NO: 295849 - DNA, 25 bp, Probe Sequence
tcttgtcttcactgatactggagtc

SEQ ID NO: 295850 - DNA, 25 bp, Probe Sequence
tcatcgtcctgggtgaacgggtgcg

SEQ ID NO: 295851 - DNA, 25 bp, Probe Sequence
tcatcgaccggaagcgcacggggga

SEQ ID NO: 295852 - DNA, 25 bp, Probe Sequence
tcatggacaatggcttcgccggctg

SEQ ID NO: 295853 - DNA, 25 bp, Probe Sequence
taaacgatgccgaccggcgatgcgg

SEQ ID NO: 295854 - DNA, 25 bp, Probe Sequence
tcaggacgaaggaccaccgtcggtc

SEQ ID NO: 295855 - DNA, 25 bp, Probe Sequence
tcaggggatcgacccaatgctactc

SEQ ID NO: 295856 - DNA, 25 bp, Probe Sequence
tcatagcggtcaagtgccagccaac

SEQ ID NO: 295857 - DNA, 25 bp, Probe Sequence
tcatgaccttcgatgacgacatccg

SEQ ID NO: 295858 - DNA, 25 bp, Probe Sequence
tcatgccctttggacttgacattgt

SEQ ID NO: 295859 - DNA, 25 bp, Probe Sequence
tcatgcacctgtttacatggacaag

SEQ ID NO: 295860 - DNA, 25 bp, Probe Sequence
tcatagttgtgtatgatgtgacaga

SEQ ID NO: 295861 - DNA, 25 bp, Probe Sequence
tcatcagttgagtaccagtgccaga

SEQ ID NO: 295862 - DNA, 25 bp, Probe Sequence
tcatcttcaagtactcggccaaaac

SEQ ID NO: 295863 - DNA, 25 bp, Probe Sequence
tcatctgccaaatccggagccaaga

SEQ ID NO: 295864 - DNA, 25 bp, Probe Sequence
tcatatccacaagccgaatagaaac

SEQ ID NO: 295865 - DNA, 25 bp, Probe Sequence
tcatcaccacacgcacttatcagga

SEQ ID NO: 295866 - DNA, 25 bp, Probe Sequence
tcactgtcagcagaacttaccaccc

SEQ ID NO: 295867 - DNA, 25 bp, Probe Sequence
tttgtacaacagacttaagacccgt

SEQ ID NO: 295868 - DNA, 25 bp, Probe Sequence
tcatttaaacatatacacagtatcc

SEQ ID NO: 295869 - DNA, 25 bp, Probe Sequence
tcttgtactccaatcccacagtaaa

SEQ ID NO: 295870 - DNA, 25 bp, Probe Sequence
tcattatattcctcctcacagtaga

SEQ ID NO: 295871 - DNA, 25 bp, Probe Sequence
tcattcttttcctccagcatggagt

SEQ ID NO: 295872 - DNA, 25 bp, Probe Sequence
tcattttttgacctcatcactgaga

SEQ ID NO: 295873 - DNA, 25 bp, Probe Sequence
tcttcctctttcctgagactggatc

SEQ ID NO: 295874 - DNA, 25 bp, Probe Sequence
tcattcccatttctgcatgcttggt

SEQ ID NO: 295875 - DNA, 25 bp, Probe Sequence
tcatcgcgccaaattttgcgctcgg

SEQ ID NO: 295876 - DNA, 25 bp, Probe Sequence
tcatcgcgccaaattttgcgctcgg

SEQ ID NO: 295877 - DNA, 25 bp, Probe Sequence
tcatcagaaaattttgtcactctct

SEQ ID NO: 295878 - DNA, 25 bp, Probe Sequence
tcatctgaaagattctcttcccttg

SEQ ID NO: 295879 - DNA, 25 bp, Probe Sequence
tcacaaaatgactcaaccctttttt

SEQ ID NO: 295880 - DNA, 25 bp, Probe Sequence
tcagaaaatgtctgcccttttgttt

SEQ ID NO: 295881 - DNA, 25 bp, Probe Sequence
tcagaaccacttagtccttttgtaa

SEQ ID NO: 295882 - DNA, 25 bp, Probe Sequence
tcagaactacttaatgctttttgcc

SEQ ID NO: 295883 - DNA, 25 bp, Probe Sequence
tcatgacactaatttagtcttttga

SEQ ID NO: 295884 - DNA, 25 bp, Probe Sequence
tcatgactacactttttcctttcag

SEQ ID NO: 295885 - DNA, 25 bp, Probe Sequence
tcatatccactctggttctttccag

SEQ ID NO: 295886 - DNA, 25 bp, Probe Sequence
tcatggcccatgtggcttcaggttc

SEQ ID NO: 295887 - DNA, 25 bp, Probe Sequence
cagacctagggacttcctacttggg

SEQ ID NO: 295888 - DNA, 25 bp, Probe Sequence
tcatctccaagctgaaaaatgtgat

SEQ ID NO: 295889 - DNA, 25 bp, Probe Sequence
tcatcacctcacttaaacaattata

SEQ ID NO: 295890 - DNA, 25 bp, Probe Sequence
tcatcaactggattgacaaaatcat

SEQ ID NO: 295891 - DNA, 25 bp, Probe Sequence
tcatctttgtgatgcccaaatgaaa

SEQ ID NO: 295892 - DNA, 25 bp, Probe Sequence
tcatcttcgactttctaaaaaagct

SEQ ID NO: 295893 - DNA, 25 bp, Probe Sequence
tcattgtctacctgctaagtcaagg

SEQ ID NO: 295894 - DNA, 25 bp, Probe Sequence
tcatgatttccctgtagaaagtgag

SEQ ID NO: 295895 - DNA, 25 bp, Probe Sequence
tcagtttatctccagttgaaacgat

SEQ ID NO: 295896 - DNA, 25 bp, Probe Sequence
tcatttctagcccagttgggttttg

SEQ ID NO: 295897 - DNA, 25 bp, Probe Sequence
tcatatcctcagaccaggtggaatt

SEQ ID NO: 295898 - DNA, 25 bp, Probe Sequence
tcattctatcacccaggctggagtg

SEQ ID NO: 295899 - DNA, 25 bp, Probe Sequence
tcatctctctccgggactggatgtt

SEQ ID NO: 295900 - DNA, 25 bp, Probe Sequence
tcattcagtctgtgcaacggatttt

SEQ ID NO: 295901 - DNA, 25 bp, Probe Sequence
tcattgtgcttgtgagggtgtttcc

SEQ ID NO: 295902 - DNA, 25 bp, Probe Sequence
tcttggctgtagggtgtgtggttaa

SEQ ID NO: 295903 - DNA, 25 bp, Probe Sequence
tcttgaggctgagggcgggtggtac

SEQ ID NO: 295904 - DNA, 25 bp, Probe Sequence
tcttgcgggaggccgggtagctgga

SEQ ID NO: 295905 - DNA, 25 bp, Probe Sequence
tcttgcgggagccaccaggcaagca

SEQ ID NO: 295906 - DNA, 25 bp, Probe Sequence
tcttgatccgatccactagtgataa

SEQ ID NO: 295907 - DNA, 25 bp, Probe Sequence
tcttgccgcgagtccatgtgaaaga

SEQ ID NO: 295908 - DNA, 25 bp, Probe Sequence
tcattcagctgcagcccttgcagga

SEQ ID NO: 295909 - DNA, 25 bp, Probe Sequence
tcatctagcagcagccgaacaaaat

SEQ ID NO: 295910 - DNA, 25 bp, Probe Sequence
tcatcatcagaatcccaccaatact

SEQ ID NO: 295911 - DNA, 25 bp, Probe Sequence
tcatacaagtaaacacagaaagtca

SEQ ID NO: 295912 - DNA, 25 bp, Probe Sequence
tcaaaaggaaactacagtcgtcggg

SEQ ID NO: 295913 - DNA, 25 bp, Probe Sequence
tcaaaacggaaaatagggcctgagg

SEQ ID NO: 295914 - DNA, 25 bp, Probe Sequence
tcaaaacaagaagagggtcctgctg

SEQ ID NO: 295915 - DNA, 25 bp, Probe Sequence
tcatgtcaaaacggaaggcgtcaat

SEQ ID NO: 295916 - DNA, 25 bp, Probe Sequence
tcatgccaactactgcgagggtgag

SEQ ID NO: 295917 - DNA, 25 bp, Probe Sequence
tcatagcaagcctgtgggtagagga

SEQ ID NO: 295918 - DNA, 25 bp, Probe Sequence
tcatcctaactgctggggaagcggg

SEQ ID NO: 295919 - DNA, 25 bp, Probe Sequence
tcagcctacagttatgttcagtcac

SEQ ID NO: 295920 - DNA, 25 bp, Probe Sequence
tcaccaaagtcgttatcagaatgta

SEQ ID NO: 295921 - DNA, 25 bp, Probe Sequence
tcaagctcaagcaggaactcaagta

SEQ ID NO: 295922 - DNA, 25 bp, Probe Sequence
tcatgaccaagacaaactgccaata

SEQ ID NO: 295923 - DNA, 25 bp, Probe Sequence
tcatacccaaactgtctggcagtca

SEQ ID NO: 295924 - DNA, 25 bp, Probe Sequence
tcatgacccagagctccttggagac

SEQ ID NO: 295925 - DNA, 25 bp, Probe Sequence
tcagcacgttgctgtcgattaagac

SEQ ID NO: 295926 - DNA, 25 bp, Probe Sequence
tcagggatgggttcgattctaaaaa

SEQ ID NO: 295927 - DNA, 25 bp, Probe Sequence
tcaggccaggggttattataaggga

SEQ ID NO: 295928 - DNA, 25 bp, Probe Sequence
tcagaccaggtggaattacttaaat

SEQ ID NO: 295929 - DNA, 25 bp, Probe Sequence
taaccaggtccaatcagtaaaaata

SEQ ID NO: 295930 - DNA, 25 bp, Probe Sequence
tcataaaacaccatcattaagaata

SEQ ID NO: 295931 - DNA, 25 bp, Probe Sequence
tcaggaaaaatgcacttgggaatca

SEQ ID NO: 295932 - DNA, 25 bp, Probe Sequence
tcaaaacggtgtacttcgtgctttt

SEQ ID NO: 295933 - DNA, 25 bp, Probe Sequence
taaacctgggttggggtgctttctg

SEQ ID NO: 295934 - DNA, 25 bp, Probe Sequence
tcatagggcaggttttgggttttct

SEQ ID NO: 295935 - DNA, 25 bp, Probe Sequence
tcaggaggggtggttggcgtttcta

SEQ ID NO: 295936 - DNA, 25 bp, Probe Sequence
tcagggccggttgtggccatggtct

SEQ ID NO: 295937 - DNA, 25 bp, Probe Sequence
tcaggggaagggatggcaaagctca

SEQ ID NO: 295938 - DNA, 25 bp, Probe Sequence
tcaggcttgaagtccaggttagggc

SEQ ID NO: 295939 - DNA, 25 bp, Probe Sequence
tcagtttgacttgaagttaggtctt

SEQ ID NO: 295940 - DNA, 25 bp, Probe Sequence
tcacctttctgcaacaagttagttt

SEQ ID NO: 295941 - DNA, 25 bp, Probe Sequence
tcagacgtttagtcaagcttggttt

SEQ ID NO: 295942 - DNA, 25 bp, Probe Sequence
tcagacgtacctgcaagctgagggt

SEQ ID NO: 295943 - DNA, 25 bp, Probe Sequence
tcagcaggttccagtgcctgacttg

SEQ ID NO: 295944 - DNA, 25 bp, Probe Sequence
tcagaggttgtcagactgccctatc

SEQ ID NO: 295945 - DNA, 25 bp, Probe Sequence
tcagaggtcgtggaaaccctggctc

SEQ ID NO: 295946 - DNA, 25 bp, Probe Sequence
taggtaagggaagcccgcagctgcc

SEQ ID NO: 295947 - DNA, 25 bp, Probe Sequence
tcaggtaagggtttccactctgcac

SEQ ID NO: 295948 - DNA, 25 bp, Probe Sequence
tcagggataaccagggacattcacc

SEQ ID NO: 295949 - DNA, 25 bp, Probe Sequence
tcaggaaacacacggggacctctct

SEQ ID NO: 295950 - DNA, 25 bp, Probe Sequence
tcaggcaattcaggtccggtcctga

SEQ ID NO: 295951 - DNA, 25 bp, Probe Sequence
tcacaggacccgatgcagactcctg

SEQ ID NO: 295952 - DNA, 25 bp, Probe Sequence
tcacctaaagcaactggatctccag

SEQ ID NO: 295953 - DNA, 25 bp, Probe Sequence
tcaccgaagtgactctatgacccag

SEQ ID NO: 295954 - DNA, 25 bp, Probe Sequence
tcaccgggatgaacctatccttcca

SEQ ID NO: 295955 - DNA, 25 bp, Probe Sequence
tcaccgtggatagtcccttttgcgg

SEQ ID NO: 295956 - DNA, 25 bp, Probe Sequence
tcatcacagtgtaactcccttgtcg

SEQ ID NO: 295957 - DNA, 25 bp, Probe Sequence
tcataaggcacatctcagccttctt

SEQ ID NO: 295958 - DNA, 25 bp, Probe Sequence
tcaagcgtaataccaccattcctac

SEQ ID NO: 295959 - DNA, 25 bp, Probe Sequence
tcaagcgtaataccaccattcctac

SEQ ID NO: 295960 - DNA, 25 bp, Probe Sequence
tcttgagtaatcacaccatttcata

SEQ ID NO: 295961 - DNA, 25 bp, Probe Sequence
tcttgagcaaattaactgatatcca

SEQ ID NO: 295962 - DNA, 25 bp, Probe Sequence
tcttgacagatttagtcgttccact

SEQ ID NO: 295963 - DNA, 25 bp, Probe Sequence
tcttgcagcagtcacatttgttccc

SEQ ID NO: 295964 - DNA, 25 bp, Probe Sequence
tcattgccattgaaattcttacttg

SEQ ID NO: 295965 - DNA, 25 bp, Probe Sequence
tcatttcattaagatctctaatctg

SEQ ID NO: 295966 - DNA, 25 bp, Probe Sequence
tcattcataccattcacacctaaag

SEQ ID NO: 295967 - DNA, 25 bp, Probe Sequence
tcatcttcttcatcagcaactacca

SEQ ID NO: 295968 - DNA, 25 bp, Probe Sequence
tcatcgtcttgaaagagcctccaac

SEQ ID NO: 295969 - DNA, 25 bp, Probe Sequence
tcatctgtttcctaggtaaaccagc

SEQ ID NO: 295970 - DNA, 25 bp, Probe Sequence
tcttgatgttcttgaggaaatccct

SEQ ID NO: 295971 - DNA, 25 bp, Probe Sequence
tcattgatccactgaccaaatcctt

SEQ ID NO: 295972 - DNA, 25 bp, Probe Sequence
tcattgattgcctcctgtaatcctg

SEQ ID NO: 295973 - DNA, 25 bp, Probe Sequence
tcttgactggaggccatcaaccctc

SEQ ID NO: 295974 - DNA, 25 bp, Probe Sequence
tcttgacttgtcacacaatcgcctc

SEQ ID NO: 295975 - DNA, 25 bp, Probe Sequence
tcttgattgatttaacaacgcccga

SEQ ID NO: 295976 - DNA, 25 bp, Probe Sequence
tcttgtgctgttggatatcaccccc

SEQ ID NO: 295977 - DNA, 25 bp, Probe Sequence
tcaggatggtctcgatctcctgacc

SEQ ID NO: 295978 - DNA, 25 bp, Probe Sequence
tcaggtggtactacaccaagcccag

SEQ ID NO: 295979 - DNA, 25 bp, Probe Sequence
tcagaaggaacaaggcccccagagg

SEQ ID NO: 295980 - DNA, 25 bp, Probe Sequence
tcagaattaaaactgcccttaattt

SEQ ID NO: 295981 - DNA, 25 bp, Probe Sequence
tcaggaatcaaaactgccctctaat

SEQ ID NO: 295982 - DNA, 25 bp, Probe Sequence
tcagggagaattatccctaaacccg

SEQ ID NO: 295983 - DNA, 25 bp, Probe Sequence
tcatggggactcctacccatttgat

SEQ ID NO: 295984 - DNA, 25 bp, Probe Sequence
tcatgcgggacccagctaacttgga

SEQ ID NO: 295985 - DNA, 25 bp, Probe Sequence
tcatccgagacaggagtccagggga

SEQ ID NO: 295986 - DNA, 25 bp, Probe Sequence
tcatctcagatacgggtcctggcgc

SEQ ID NO: 295987 - DNA, 25 bp, Probe Sequence
tcatccgcaagcctgtgacggtcca

SEQ ID NO: 295988 - DNA, 25 bp, Probe Sequence
tcattgcaggggggagcagactctc

SEQ ID NO: 295989 - DNA, 25 bp, Probe Sequence
tcattgagttcggtgcatctggcca

SEQ ID NO: 295990 - DNA, 25 bp, Probe Sequence
tcttgtgaagtgatgcagctgacct

SEQ ID NO: 295991 - DNA, 25 bp, Probe Sequence
tcatttggaggaatcaccccatttc

SEQ ID NO: 295992 - DNA, 25 bp, Probe Sequence
tcatgtgcggggatcatctgccgtg

SEQ ID NO: 295993 - DNA, 25 bp, Probe Sequence
tcattgctaagtgtactgctgccga

SEQ ID NO: 295994 - DNA, 25 bp, Probe Sequence
tcattccctataatgatctgcccgc

SEQ ID NO: 295995 - DNA, 25 bp, Probe Sequence
tcattcagccaatatgcattcctcc

SEQ ID NO: 295996 - DNA, 25 bp, Probe Sequence
tcttggagcaatttgtctgcgccca

SEQ ID NO: 295997 - DNA, 25 bp, Probe Sequence
tcttgagtgcattttggcactggga

SEQ ID NO: 295998 - DNA, 25 bp, Probe Sequence
tcttgttgctcagcatggcacggtc

SEQ ID NO: 295999 - DNA, 25 bp, Probe Sequence
tcattgcttgtggacggaccagctc

SEQ ID NO: 296000 - DNA, 25 bp, Probe Sequence
tcattgcttgtggacggaccagctc

SEQ ID NO: 296001 - DNA, 25 bp, Probe Sequence
tcttgtaggtcgctgatgctcactc

SEQ ID NO: 296002 - DNA, 25 bp, Probe Sequence
tcttgctagacaaggttgctgttgt

SEQ ID NO: 296003 - DNA, 25 bp, Probe Sequence
tcactgctactcagcctgaggttgc

SEQ ID NO: 296004 - DNA, 25 bp, Probe Sequence
tcactgctactcagcctgaggttgc

SEQ ID NO: 296005 - DNA, 25 bp, Probe Sequence
tcattgccagtggctccgaggactg

SEQ ID NO: 296006 - DNA, 25 bp, Probe Sequence
tcttgcactgtggtctctgcatgga

SEQ ID NO: 296007 - DNA, 25 bp, Probe Sequence
tcattcactgctgttgctcatttgc

SEQ ID NO: 296008 - DNA, 25 bp, Probe Sequence
tcattcactgtcctggcttttattt

SEQ ID NO: 296009 - DNA, 25 bp, Probe Sequence
tcattcacttccctgattttgataa

SEQ ID NO: 296010 - DNA, 25 bp, Probe Sequence
tcttgagttctgcagcttctgtgta

SEQ ID NO: 296011 - DNA, 25 bp, Probe Sequence
tcttgttatctgcatctcattgttt

SEQ ID NO: 296012 - DNA, 25 bp, Probe Sequence
tcttgacatttgaaccatgttgttt

SEQ ID NO: 296013 - DNA, 25 bp, Probe Sequence
tcttgcacatcactacctgcagttt

SEQ ID NO: 296014 - DNA, 25 bp, Probe Sequence
tcttgcacatcactacctgcagttt

SEQ ID NO: 296015 - DNA, 25 bp, Probe Sequence
tcattgtcctctgagctgcagtttc

SEQ ID NO: 296016 - DNA, 25 bp, Probe Sequence
tcaggtacctgcaggaatttgcccc

SEQ ID NO: 296017 - DNA, 25 bp, Probe Sequence
tcagttacctgcataccaactgcct

SEQ ID NO: 296018 - DNA, 25 bp, Probe Sequence
tcatttacacagatatccatgcctg

SEQ ID NO: 296019 - DNA, 25 bp, Probe Sequence
tcatttacacacctctcttgagcta

SEQ ID NO: 296020 - DNA, 25 bp, Probe Sequence
tcatttaatccattgtcaaggatga

SEQ ID NO: 296021 - DNA, 25 bp, Probe Sequence
tcttgtatatcctactcagcggcta

SEQ ID NO: 296022 - DNA, 25 bp, Probe Sequence
tcttgttgactttctcactggtgag

SEQ ID NO: 296023 - DNA, 25 bp, Probe Sequence
tcattgcttcctttctacaggacga

SEQ ID NO: 296024 - DNA, 25 bp, Probe Sequence
tcattttcactaccatacaagaaaa

SEQ ID NO: 296025 - DNA, 25 bp, Probe Sequence
tcttgttcctgactccagaggaacg

SEQ ID NO: 296026 - DNA, 25 bp, Probe Sequence
tcttggcatcctatcactatgtgat

SEQ ID NO: 296027 - DNA, 25 bp, Probe Sequence
tcttgacatcctagcttcttctaag

SEQ ID NO: 296028 - DNA, 25 bp, Probe Sequence
tcatctgcaaccatgtgtgtcctat

SEQ ID NO: 296029 - DNA, 25 bp, Probe Sequence
tcatgcaaatcaagaggttccaatc

SEQ ID NO: 296030 - DNA, 25 bp, Probe Sequence
tcatcaactcatgaacattacacac

SEQ ID NO: 296031 - DNA, 25 bp, Probe Sequence
tcatcatgaccagaagcttgacgca

SEQ ID NO: 296032 - DNA, 25 bp, Probe Sequence
tcatcatgaccagaagcttgacgca

SEQ ID NO: 296033 - DNA, 25 bp, Probe Sequence
tcatcaattctctatcatgttgaag

SEQ ID NO: 296034 - DNA, 25 bp, Probe Sequence
tcagcctgtcaactcagttaacaag

SEQ ID NO: 296035 - DNA, 25 bp, Probe Sequence
tcatgcctgatctgtacttctacag

SEQ ID NO: 296036 - DNA, 25 bp, Probe Sequence
tcatgcctgatctgtacttctacag

SEQ ID NO: 296037 - DNA, 25 bp, Probe Sequence
tcatgcctgcaatgctagtgctttg

SEQ ID NO: 296038 - DNA, 25 bp, Probe Sequence
tcatcaagcacattatcagactttg

SEQ ID NO: 296039 - DNA, 25 bp, Probe Sequence
tcatatgtgtcatcacagcttttgt

SEQ ID NO: 296040 - DNA, 25 bp, Probe Sequence
tcttgcttcagacccatctatattt

SEQ ID NO: 296041 - DNA, 25 bp, Probe Sequence
tcatatttcagaaccctctatttaa

SEQ ID NO: 296042 - DNA, 25 bp, Probe Sequence
tcaggttctaaccctttgctgtaca

SEQ ID NO: 296043 - DNA, 25 bp, Probe Sequence
tcacgtttaagggtcctctgaacgg

SEQ ID NO: 296044 - DNA, 25 bp, Probe Sequence
tcatgcagttttggggcacctctta

SEQ ID NO: 296045 - DNA, 25 bp, Probe Sequence
tcatgcggaggtcagtcaccttcat

SEQ ID NO: 296046 - DNA, 25 bp, Probe Sequence
tcatctggggtttgtcatcaccata

SEQ ID NO: 296047 - DNA, 25 bp, Probe Sequence
tcatctaccggatttcatccagtga

SEQ ID NO: 296048 - DNA, 25 bp, Probe Sequence
tcagttttggctcgtccatcagtga

SEQ ID NO: 296049 - DNA, 25 bp, Probe Sequence
tcagttttggctcgtccatcagtga

SEQ ID NO: 296050 - DNA, 25 bp, Probe Sequence
tcagtcaacccttaccgcattgaag

SEQ ID NO: 296051 - DNA, 25 bp, Probe Sequence
tcaggaacgcctcgatacgctggaa

SEQ ID NO: 296052 - DNA, 25 bp, Probe Sequence
tcagctaacgcttccagaccgcggc

SEQ ID NO: 296053 - DNA, 25 bp, Probe Sequence
tcaccatcactactcaagaccggag

SEQ ID NO: 296054 - DNA, 25 bp, Probe Sequence
tcatggagttagccaagagccagga

SEQ ID NO: 296055 - DNA, 25 bp, Probe Sequence
tcatggtgcgcttggcacagggcct

SEQ ID NO: 296056 - DNA, 25 bp, Probe Sequence
tcagagctgagtttcctgaccactc

SEQ ID NO: 296057 - DNA, 25 bp, Probe Sequence
tcaggcatgaatgattctagacact

SEQ ID NO: 296058 - DNA, 25 bp, Probe Sequence
tcatacatgcatagtacttacacac

SEQ ID NO: 296059 - DNA, 25 bp, Probe Sequence
tcatcagatcaacacattcactcca

SEQ ID NO: 296060 - DNA, 25 bp, Probe Sequence
tcatcaacacagctcgcaacttatg

SEQ ID NO: 296061 - DNA, 25 bp, Probe Sequence
tcataagacatcttcaagacatctt

SEQ ID NO: 296062 - DNA, 25 bp, Probe Sequence
taatggaccaagtaagatcatgttg

SEQ ID NO: 296063 - DNA, 25 bp, Probe Sequence
tcttggagcccacacaagcagatat

SEQ ID NO: 296064 - DNA, 25 bp, Probe Sequence
tcaggggcccaggaagagcaaaatg

SEQ ID NO: 296065 - DNA, 25 bp, Probe Sequence
tcagggcccggagacgaacacgggg

SEQ ID NO: 296066 - DNA, 25 bp, Probe Sequence
tcaggagcccaggtgggcggaccca

SEQ ID NO: 296067 - DNA, 25 bp, Probe Sequence
tcatctgcagtaacggggggaccta

SEQ ID NO: 296068 - DNA, 25 bp, Probe Sequence
tcatcgcagatgtggtggagaagac

SEQ ID NO: 296069 - DNA, 25 bp, Probe Sequence
tcatctgtagatgagtgtaacagtc

SEQ ID NO: 296070 - DNA, 25 bp, Probe Sequence
tcactgtcgagatggctaatcagta

SEQ ID NO: 296071 - DNA, 25 bp, Probe Sequence
tcatctgttaatacgcatattcaca

SEQ ID NO: 296072 - DNA, 25 bp, Probe Sequence
tcatcgatctatagttgttggcata

SEQ ID NO: 296073 - DNA, 25 bp, Probe Sequence
tcatagatcatgtattttctactca

SEQ ID NO: 296074 - DNA, 25 bp, Probe Sequence
tcattggcattgttatttaatcata

SEQ ID NO: 296075 - DNA, 25 bp, Probe Sequence
tcattgaattgaaagttgcatagta

SEQ ID NO: 296076 - DNA, 25 bp, Probe Sequence
tcattaatatacaggcttagtcagc

SEQ ID NO: 296077 - DNA, 25 bp, Probe Sequence
tcattttataacactctagcccctg

SEQ ID NO: 296078 - DNA, 25 bp, Probe Sequence
tcttgttgtgaaaaattatctccct

SEQ ID NO: 296079 - DNA, 25 bp, Probe Sequence
tcaggttgtgaccgagattcccgac

SEQ ID NO: 296080 - DNA, 25 bp, Probe Sequence
tcagacttagaggggacttccagcc

SEQ ID NO: 296081 - DNA, 25 bp, Probe Sequence
tcagacttgatcagggactaacacc

SEQ ID NO: 296082 - DNA, 25 bp, Probe Sequence
taatgttgcctggggcttaacccac

SEQ ID NO: 296083 - DNA, 25 bp, Probe Sequence
taatgttgcctggggcttaacccac

SEQ ID NO: 296084 - DNA, 25 bp, Probe Sequence
taattctgttgccggaagatacccc

SEQ ID NO: 296085 - DNA, 25 bp, Probe Sequence
taacgctgaagcctggaaacaaaca

SEQ ID NO: 296086 - DNA, 25 bp, Probe Sequence
tcaactctaggacgcaaaacgaaaa

SEQ ID NO: 296087 - DNA, 25 bp, Probe Sequence
tcatccttgtgttgtgaaagacaaa

SEQ ID NO: 296088 - DNA, 25 bp, Probe Sequence
tcatcacttttaattcaaaccagaa

SEQ ID NO: 296089 - DNA, 25 bp, Probe Sequence
tcatctcggtctggagacaacacca

SEQ ID NO: 296090 - DNA, 25 bp, Probe Sequence
tcatgctgatgcctctcgagacata

SEQ ID NO: 296091 - DNA, 25 bp, Probe Sequence
tcatgatgatgcaccggacaggcct

SEQ ID NO: 296092 - DNA, 25 bp, Probe Sequence
tcatcatcatgcaagcctgccgagg

SEQ ID NO: 296093 - DNA, 25 bp, Probe Sequence
tcatcattgcaaatcatggtgacag

SEQ ID NO: 296094 - DNA, 25 bp, Probe Sequence
tcatcttcatcgaccggaagcgcac

SEQ ID NO: 296095 - DNA, 25 bp, Probe Sequence
tcatcgtcggtccgggctgccacga

SEQ ID NO: 296096 - DNA, 25 bp, Probe Sequence
tcataagggatccgcagctgctccc

SEQ ID NO: 296097 - DNA, 25 bp, Probe Sequence
tcatttggtactgactttctctctc

SEQ ID NO: 296098 - DNA, 25 bp, Probe Sequence
tcatttggattgccctctttcaatt

SEQ ID NO: 296099 - DNA, 25 bp, Probe Sequence
tcatttgttttgtctgctaataaat

SEQ ID NO: 296100 - DNA, 25 bp, Probe Sequence
tcaggtttattggcgataatcacag

SEQ ID NO: 296101 - DNA, 25 bp, Probe Sequence
tcatggccaccaaccgtggcatcac

SEQ ID NO: 296102 - DNA, 25 bp, Probe Sequence
tcatcgcgcccatgttgtatgacac

SEQ ID NO: 296103 - DNA, 25 bp, Probe Sequence
tcatctctcccttttttatatcaag

SEQ ID NO: 296104 - DNA, 25 bp, Probe Sequence
tcattcctgttctttcttacacaag

SEQ ID NO: 296105 - DNA, 25 bp, Probe Sequence
tcattctgttatacttctgtacaca

SEQ ID NO: 296106 - DNA, 25 bp, Probe Sequence
tcatttttgatgactacctcagaac

SEQ ID NO: 296107 - DNA, 25 bp, Probe Sequence
tcatttcttctacaactcatacact

SEQ ID NO: 296108 - DNA, 25 bp, Probe Sequence
tcatgtgcacttcccaaaaaacctg

SEQ ID NO: 296109 - DNA, 25 bp, Probe Sequence
tcatcccctcattgcaacaaaacct

SEQ ID NO: 296110 - DNA, 25 bp, Probe Sequence
tcatcccctatgccattgcatatca

SEQ ID NO: 296111 - DNA, 25 bp, Probe Sequence
tcatcttcaccagaggaatcactct

SEQ ID NO: 296112 - DNA, 25 bp, Probe Sequence
tcttgttccagctaggcaatgcctt

SEQ ID NO: 296113 - DNA, 25 bp, Probe Sequence
tcttggtgacagtggaatctttgtc

SEQ ID NO: 296114 - DNA, 25 bp, Probe Sequence
tcatcgggaacagggaattgtctct

SEQ ID NO: 296115 - DNA, 25 bp, Probe Sequence
tcattagtgaaggtggcttttgctt

SEQ ID NO: 296116 - DNA, 25 bp, Probe Sequence
tcattttgcattactgtcttccgtg

SEQ ID NO: 296117 - DNA, 25 bp, Probe Sequence
tcattttgcattactgtcttccgtg

SEQ ID NO: 296118 - DNA, 25 bp, Probe Sequence
tcattggtggctacatatttctctc

SEQ ID NO: 296119 - DNA, 25 bp, Probe Sequence
tcattgtgtagaatttctagatccc

SEQ ID NO: 296120 - DNA, 25 bp, Probe Sequence
tcattagcttgaattgtatagattt

SEQ ID NO: 296121 - DNA, 25 bp, Probe Sequence
tcatttttgatgaactgcacatgtt

SEQ ID NO: 296122 - DNA, 25 bp, Probe Sequence
tcattcacatctagccaagccagtg

SEQ ID NO: 296123 - DNA, 25 bp, Probe Sequence
tatgtcaacatcgagacgcctgtga

SEQ ID NO: 296124 - DNA, 25 bp, Probe Sequence
tcattcatccatcagacacctgctg

SEQ ID NO: 296125 - DNA, 25 bp, Probe Sequence
tcattcatgcttcaattcacacttc

SEQ ID NO: 296126 - DNA, 25 bp, Probe Sequence
tcatctctgtctgcaacgcagactt

SEQ ID NO: 296127 - DNA, 25 bp, Probe Sequence
tcataatctctgtcaaaagcccatg

SEQ ID NO: 296128 - DNA, 25 bp, Probe Sequence
tcatagagctcgtcacaaaccctga

SEQ ID NO: 296129 - DNA, 25 bp, Probe Sequence
tcattcctaacctaaccttagagtc

SEQ ID NO: 296130 - DNA, 25 bp, Probe Sequence
tttctataaccatttcacctggact

SEQ ID NO: 296131 - DNA, 25 bp, Probe Sequence
tcattttcaacctgtactctgagga

SEQ ID NO: 296132 - DNA, 25 bp, Probe Sequence
tcatgtttaaaaggaacttattgca

SEQ ID NO: 296133 - DNA, 25 bp, Probe Sequence
tcatgttgctaaattccaactttgt

SEQ ID NO: 296134 - DNA, 25 bp, Probe Sequence
tcatattgtaatgtgttcatctcat

SEQ ID NO: 296135 - DNA, 25 bp, Probe Sequence
tcattttcaaggtttacgcactgcc

SEQ ID NO: 296136 - DNA, 25 bp, Probe Sequence
tcatttttcagggaccactcttccc

SEQ ID NO: 296137 - DNA, 25 bp, Probe Sequence
tcagttttcaggttcttcctagctc

SEQ ID NO: 296138 - DNA, 25 bp, Probe Sequence
tcatcttttgatgtgacttttcacc

SEQ ID NO: 296139 - DNA, 25 bp, Probe Sequence
tcatttcatttaagagatcatttca

SEQ ID NO: 296140 - DNA, 25 bp, Probe Sequence
tcattctgctgaaaagattatattc

SEQ ID NO: 296141 - DNA, 25 bp, Probe Sequence
tcatttgcagacaaggatcttctgg

SEQ ID NO: 296142 - DNA, 25 bp, Probe Sequence
tcagttgcaacttggacttgtcctc

SEQ ID NO: 296143 - DNA, 25 bp, Probe Sequence
tcatgttctacttgaggcagcctgc

SEQ ID NO: 296144 - DNA, 25 bp, Probe Sequence
tcatttcaacaaaggagctccgatg

SEQ ID NO: 296145 - DNA, 25 bp, Probe Sequence
tcatttcaacaaaggagctccgatg

SEQ ID NO: 296146 - DNA, 25 bp, Probe Sequence
tcattctcaacatctcagaccactg

SEQ ID NO: 296147 - DNA, 25 bp, Probe Sequence
tcattatcaaattgtcgacatcatt

SEQ ID NO: 296148 - DNA, 25 bp, Probe Sequence
tcatcttcaaagcacaactctattt

SEQ ID NO: 296149 - DNA, 25 bp, Probe Sequence
tcatctataaagttgccacctaaaa

SEQ ID NO: 296150 - DNA, 25 bp, Probe Sequence
tcattattttttgcacactcacaat

SEQ ID NO: 296151 - DNA, 25 bp, Probe Sequence
tcattgtaagttgccactgccaaca

SEQ ID NO: 296152 - DNA, 25 bp, Probe Sequence
tcatttaaggaggcgctggcaagcc

SEQ ID NO: 296153 - DNA, 25 bp, Probe Sequence
tcatgatctatacgcaaccggaacc

SEQ ID NO: 296154 - DNA, 25 bp, Probe Sequence
tcatgatctatacgcaaccggaacc

SEQ ID NO: 296155 - DNA, 25 bp, Probe Sequence
tcatcattaacgacagcctggacca

SEQ ID NO: 296156 - DNA, 25 bp, Probe Sequence
tcatttatacgtgggagctaatcat

SEQ ID NO: 296157 - DNA, 25 bp, Probe Sequence
tcatttgtatccaaggtgctgaatc

SEQ ID NO: 296158 - DNA, 25 bp, Probe Sequence
tcatttctacactactgagtatata

SEQ ID NO: 296159 - DNA, 25 bp, Probe Sequence
tcatatctcaaagtaaagtcattaa

SEQ ID NO: 296160 - DNA, 25 bp, Probe Sequence
tcattccagacggcaactgcctcta

SEQ ID NO: 296161 - DNA, 25 bp, Probe Sequence
tcattcctgattggctttctcttac

SEQ ID NO: 296162 - DNA, 25 bp, Probe Sequence
tcatcatcaccagtggtttcttcta

SEQ ID NO: 296163 - DNA, 25 bp, Probe Sequence
tcataacacttggcacttgttctag

SEQ ID NO: 296164 - DNA, 25 bp, Probe Sequence
tcattagcctgtgactctgtgatgt

SEQ ID NO: 296165 - DNA, 25 bp, Probe Sequence
tcttggagcagccagaccatgtttc

SEQ ID NO: 296166 - DNA, 25 bp, Probe Sequence
tcatctggaagcctacggtgttcac

SEQ ID NO: 296167 - DNA, 25 bp, Probe Sequence
tcatcttggagcgtatggaggactt

SEQ ID NO: 296168 - DNA, 25 bp, Probe Sequence
tcatttggctgcatggcgtggccac

SEQ ID NO: 296169 - DNA, 25 bp, Probe Sequence
tcttggcagtgctggcttggccatt

SEQ ID NO: 296170 - DNA, 25 bp, Probe Sequence
tcattggcattctggtgttcctacc

SEQ ID NO: 296171 - DNA, 25 bp, Probe Sequence
tcattggcattctggtgttcctacc

SEQ ID NO: 296172 - DNA, 25 bp, Probe Sequence
tcattgtgcatctctgaggttccct

SEQ ID NO: 296173 - DNA, 25 bp, Probe Sequence
tcatcaatgatctgtgtggtccccg

SEQ ID NO: 296174 - DNA, 25 bp, Probe Sequence
tcataattgcattgactttccccac

SEQ ID NO: 296175 - DNA, 25 bp, Probe Sequence
tcatatgattataagcattcccctc

SEQ ID NO: 296176 - DNA, 25 bp, Probe Sequence
tcattagcttactattgccatcccc

SEQ ID NO: 296177 - DNA, 25 bp, Probe Sequence
tcaaaattagtaatccccgccaggc

SEQ ID NO: 296178 - DNA, 25 bp, Probe Sequence
tcatcaagaaagtcatcatccccgc

SEQ ID NO: 296179 - DNA, 25 bp, Probe Sequence
tcatagaaattgcctccagtccagt

SEQ ID NO: 296180 - DNA, 25 bp, Probe Sequence
tcatgagattaggactccacgccag

SEQ ID NO: 296181 - DNA, 25 bp, Probe Sequence
tcatggcattcgcagtgcccagtga

SEQ ID NO: 296182 - DNA, 25 bp, Probe Sequence
tcatcagatatgcgggtccagtgtc

SEQ ID NO: 296183 - DNA, 25 bp, Probe Sequence
tcatcagtatctcggcacacaacag

SEQ ID NO: 296184 - DNA, 25 bp, Probe Sequence
tcatcagaatcccaccaatactacc

SEQ ID NO: 296185 - DNA, 25 bp, Probe Sequence
tcattgaactcaaccacatgatcaa

SEQ ID NO: 296186 - DNA, 25 bp, Probe Sequence
tcatatgaagtcaccctagccatca

SEQ ID NO: 296187 - DNA, 25 bp, Probe Sequence
tcatctatattcacctaaccataaa

SEQ ID NO: 296188 - DNA, 25 bp, Probe Sequence
tcatgttgaagcaccgaaagataaa

SEQ ID NO: 296189 - DNA, 25 bp, Probe Sequence
tcatattcacacacagaaaagacta

SEQ ID NO: 296190 - DNA, 25 bp, Probe Sequence
tcattggcagccacatgtagaatga

SEQ ID NO: 296191 - DNA, 25 bp, Probe Sequence
tcattgagccccctgagagaatgga

SEQ ID NO: 296192 - DNA, 25 bp, Probe Sequence
tcatttgcagtggttagtcatcaga

SEQ ID NO: 296193 - DNA, 25 bp, Probe Sequence
tcatcgtcatggttctgcttcaaga

SEQ ID NO: 296194 - DNA, 25 bp, Probe Sequence
tcattgtatgtacctttattgcttc

SEQ ID NO: 296195 - DNA, 25 bp, Probe Sequence
tcattagatgtacatttcctggttc

SEQ ID NO: 296196 - DNA, 25 bp, Probe Sequence
tcaacgattaaagtcctacgtgatc

SEQ ID NO: 296197 - DNA, 25 bp, Probe Sequence
tcatactgtttgaggtctactgtat

SEQ ID NO: 296198 - DNA, 25 bp, Probe Sequence
tcatattgttctacacctgttttgt

SEQ ID NO: 296199 - DNA, 25 bp, Probe Sequence
tcatttcttctacctgagactcttt

SEQ ID NO: 296200 - DNA, 25 bp, Probe Sequence
tcatttgtgacctcagacactctct

SEQ ID NO: 296201 - DNA, 25 bp, Probe Sequence
tcatttgtatagtacgtctcacttg

SEQ ID NO: 296202 - DNA, 25 bp, Probe Sequence
tcatgtcatagctgaaccctactct

SEQ ID NO: 296203 - DNA, 25 bp, Probe Sequence
tcatccacagtaggacaccatcctt

SEQ ID NO: 296204 - DNA, 25 bp, Probe Sequence
tcatcccactgatgacaccacgacg

SEQ ID NO: 296205 - DNA, 25 bp, Probe Sequence
tcatctggcctggataatctcactg

SEQ ID NO: 296206 - DNA, 25 bp, Probe Sequence
tcattagacggtttccaggttttct

SEQ ID NO: 296207 - DNA, 25 bp, Probe Sequence
tcaccaggctggtctaccaggtagt

SEQ ID NO: 296208 - DNA, 25 bp, Probe Sequence
tcatcacaagtgcctctgaaagcga

SEQ ID NO: 296209 - DNA, 25 bp, Probe Sequence
tcatcacaagtgcctctgaaagcga

SEQ ID NO: 296210 - DNA, 25 bp, Probe Sequence
tcatcacaagtgcctctgaaagcga

SEQ ID NO: 296211 - DNA, 25 bp, Probe Sequence
tcatccaactcctgaaatccaataa

SEQ ID NO: 296212 - DNA, 25 bp, Probe Sequence
tcatcctagccctaagtctggccta

SEQ ID NO: 296213 - DNA, 25 bp, Probe Sequence
tcatttggcttgtgtgcatctggcc

SEQ ID NO: 296214 - DNA, 25 bp, Probe Sequence
tcatcaatgcttttgcgtcactggc

SEQ ID NO: 296215 - DNA, 25 bp, Probe Sequence
tcatacgcctctactgatacatgtc

SEQ ID NO: 296216 - DNA, 25 bp, Probe Sequence
tcatacgctccaactgatccagatg

SEQ ID NO: 296217 - DNA, 25 bp, Probe Sequence
tcataaccagcaagcctctcaatgc

SEQ ID NO: 296218 - DNA, 25 bp, Probe Sequence
tcataaccaaggtcagcatccgcct

SEQ ID NO: 296219 - DNA, 25 bp, Probe Sequence
tcattaccatgaggacagcaccaag

SEQ ID NO: 296220 - DNA, 25 bp, Probe Sequence
tcatctacatcatcaacgtccacag

SEQ ID NO: 296221 - DNA, 25 bp, Probe Sequence
tcagatagatcctgaagttacagat

SEQ ID NO: 296222 - DNA, 25 bp, Probe Sequence
tcaggagatacttcaccctcaagtg

SEQ ID NO: 296223 - DNA, 25 bp, Probe Sequence
tcatgggtagcatcacgcccacaga

SEQ ID NO: 296224 - DNA, 25 bp, Probe Sequence
tcatgggtagcatcacgcccacaga

SEQ ID NO: 296225 - DNA, 25 bp, Probe Sequence
tcatgctcctgtgccagaacgcaca

SEQ ID NO: 296226 - DNA, 25 bp, Probe Sequence
tcatgctcctgtgccagaacgcaca

SEQ ID NO: 296227 - DNA, 25 bp, Probe Sequence
tcatcttcttcgccatttggcacat

SEQ ID NO: 296228 - DNA, 25 bp, Probe Sequence
tcatctctttcatgcagttgccaat

SEQ ID NO: 296229 - DNA, 25 bp, Probe Sequence
tcattgctttcaaatcttccacacc

SEQ ID NO: 296230 - DNA, 25 bp, Probe Sequence
tcattgtttcagttatctatccaag

SEQ ID NO: 296231 - DNA, 25 bp, Probe Sequence
tcattttgctcagttgaaatctata

SEQ ID NO: 296232 - DNA, 25 bp, Probe Sequence
tcattgttcgcttctgtaattctga

SEQ ID NO: 296233 - DNA, 25 bp, Probe Sequence
tcattttcatcttttcttgctgcta

SEQ ID NO: 296234 - DNA, 25 bp, Probe Sequence
tcattttcatcttttcttgctgcta

SEQ ID NO: 296235 - DNA, 25 bp, Probe Sequence
tcatctgttaattgtccttttagta

SEQ ID NO: 296236 - DNA, 25 bp, Probe Sequence
tcatcttttgagtttgctctttggt

SEQ ID NO: 296237 - DNA, 25 bp, Probe Sequence
tcatatgtattgcctgttgctttta

SEQ ID NO: 296238 - DNA, 25 bp, Probe Sequence
tcatctgtcattatattctaattaa

SEQ ID NO: 296239 - DNA, 25 bp, Probe Sequence
tcatccatcttaattggcataagga

SEQ ID NO: 296240 - DNA, 25 bp, Probe Sequence
tcatctgccttaacgtgatcggaga

SEQ ID NO: 296241 - DNA, 25 bp, Probe Sequence
tcattccccatatgtgttggagaat

SEQ ID NO: 296242 - DNA, 25 bp, Probe Sequence
tcatcttcctcaatcgctttttgga

SEQ ID NO: 296243 - DNA, 25 bp, Probe Sequence
tcatccatcacttcccattttatgg

SEQ ID NO: 296244 - DNA, 25 bp, Probe Sequence
tcatctgatcagcattaatttgggg

SEQ ID NO: 296245 - DNA, 25 bp, Probe Sequence
tcatcaaggctacaattgctggtgg

SEQ ID NO: 296246 - DNA, 25 bp, Probe Sequence
tcatcaatggcggttctcatgctgg

SEQ ID NO: 296247 - DNA, 25 bp, Probe Sequence
tcatacattgagtcttcatgcatca

SEQ ID NO: 296248 - DNA, 25 bp, Probe Sequence
tcataactgcagtccttcaaagatg

SEQ ID NO: 296249 - DNA, 25 bp, Probe Sequence
tcatacactctctcttcgcaagtga

SEQ ID NO: 296250 - DNA, 25 bp, Probe Sequence
tcatatatcccagacctgaagctga

SEQ ID NO: 296251 - DNA, 25 bp, Probe Sequence
tcatgtccccatgacttgcatacaa

SEQ ID NO: 296252 - DNA, 25 bp, Probe Sequence
tcatccccactctacatatgtaaaa

SEQ ID NO: 296253 - DNA, 25 bp, Probe Sequence
tcatggccacaaaacaagtagaaac

SEQ ID NO: 296254 - DNA, 25 bp, Probe Sequence
tcatggtacctataatggtgatata

SEQ ID NO: 296255 - DNA, 25 bp, Probe Sequence
tcatgggcatccccacatatgggca

SEQ ID NO: 296256 - DNA, 25 bp, Probe Sequence
tcagggatcttgttgcattgggagc

SEQ ID NO: 296257 - DNA, 25 bp, Probe Sequence
tcagggatcttgttgcattgggagc

SEQ ID NO: 296258 - DNA, 25 bp, Probe Sequence
tcatggtgactggggtcttgggctg

SEQ ID NO: 296259 - DNA, 25 bp, Probe Sequence
tcatctgtgacgtggagctggtcgt

SEQ ID NO: 296260 - DNA, 25 bp, Probe Sequence
tcattctgcacgacgatgaggtgac

SEQ ID NO: 296261 - DNA, 25 bp, Probe Sequence
tcattctgcaggacacaaaggctct

SEQ ID NO: 296262 - DNA, 25 bp, Probe Sequence
tcatctgtcagtgcaatcaaggata

SEQ ID NO: 296263 - DNA, 25 bp, Probe Sequence
tcatctttgtgttcatctactgtaa

SEQ ID NO: 296264 - DNA, 25 bp, Probe Sequence
tcactgcttggacactacattccaa

SEQ ID NO: 296265 - DNA, 25 bp, Probe Sequence
tcatgcctcggaaggctactaccgc

SEQ ID NO: 296266 - DNA, 25 bp, Probe Sequence
tcatgcaagtcggggctggctaccc

SEQ ID NO: 296267 - DNA, 25 bp, Probe Sequence
tcagaaccagggccagtggccgcca

SEQ ID NO: 296268 - DNA, 25 bp, Probe Sequence
tcatgaaccaggaaaaactcgccaa

SEQ ID NO: 296269 - DNA, 25 bp, Probe Sequence
tcatgaaactggcagaaaccccttc

SEQ ID NO: 296270 - DNA, 25 bp, Probe Sequence
taagcagactggctgaagctttgcc

SEQ ID NO: 296271 - DNA, 25 bp, Probe Sequence
tcaagaagggggaatgctgtcggga

SEQ ID NO: 296272 - DNA, 25 bp, Probe Sequence
tcagagtccaggccctaggttggga

SEQ ID NO: 296273 - DNA, 25 bp, Probe Sequence
tactgtcccggaggaggttgggagg

SEQ ID NO: 296274 - DNA, 25 bp, Probe Sequence
tcaccctaaggacagggtggaagag

SEQ ID NO: 296275 - DNA, 25 bp, Probe Sequence
taccctgaaagttaaggagaagaat

SEQ ID NO: 296276 - DNA, 25 bp, Probe Sequence
tactaatggggttcaattaacaaat

SEQ ID NO: 296277 - DNA, 25 bp, Probe Sequence
tcactatcatgtctaaaattaagca

SEQ ID NO: 296278 - DNA, 25 bp, Probe Sequence
tcactgtgctatcctacgaaatcat

SEQ ID NO: 296279 - DNA, 25 bp, Probe Sequence
tcagctgaaacagtcctggactttc

SEQ ID NO: 296280 - DNA, 25 bp, Probe Sequence
tcagtcaagtctgccggatgtcttt

SEQ ID NO: 296281 - DNA, 25 bp, Probe Sequence
tcataagagtctcaatggagttttc

SEQ ID NO: 296282 - DNA, 25 bp, Probe Sequence
tcattaagatctctaatctgttttg

SEQ ID NO: 296283 - DNA, 25 bp, Probe Sequence
tcatataatgtttctcaatcttgtt

SEQ ID NO: 296284 - DNA, 25 bp, Probe Sequence
tcatataatgtttctcaatcttgtt

SEQ ID NO: 296285 - DNA, 25 bp, Probe Sequence
tcatttcatctatctcaattcttat

SEQ ID NO: 296286 - DNA, 25 bp, Probe Sequence
tcatttcatctatctcaattcttat

SEQ ID NO: 296287 - DNA, 25 bp, Probe Sequence
tcatcttcactatcaccattgggat

SEQ ID NO: 296288 - DNA, 25 bp, Probe Sequence
tcatattcagcccatcacgctgtgg

SEQ ID NO: 296289 - DNA, 25 bp, Probe Sequence
tcatattcagcccatcacgctgtgg

SEQ ID NO: 296290 - DNA, 25 bp, Probe Sequence
tcatttccggctgctgtgtgtgagc

SEQ ID NO: 296291 - DNA, 25 bp, Probe Sequence
tcatcgaggggctctgctgtgtaga

SEQ ID NO: 296292 - DNA, 25 bp, Probe Sequence
tcatggggctgtgagtgctactccg

SEQ ID NO: 296293 - DNA, 25 bp, Probe Sequence
tcaggggttataatgtaatcgctca

SEQ ID NO: 296294 - DNA, 25 bp, Probe Sequence
tcaggcgttaaactgtcagtcgaac

SEQ ID NO: 296295 - DNA, 25 bp, Probe Sequence
tcagtagtgtaatccattttcaatg

SEQ ID NO: 296296 - DNA, 25 bp, Probe Sequence
tcagaaatctaaactattttactta

SEQ ID NO: 296297 - DNA, 25 bp, Probe Sequence
tcaaatttcaaaaagtttcacctag

SEQ ID NO: 296298 - DNA, 25 bp, Probe Sequence
tcatatattgtcaaataggtttcat

SEQ ID NO: 296299 - DNA, 25 bp, Probe Sequence
tcattttggcaaagtggtctgtttt

SEQ ID NO: 296300 - DNA, 25 bp, Probe Sequence
tcatcatttggtgcttagtctttgt

SEQ ID NO: 296301 - DNA, 25 bp, Probe Sequence
tcatttggtgatgcttttgcttctg

SEQ ID NO: 296302 - DNA, 25 bp, Probe Sequence
tcatttgactccttattttctgctg

SEQ ID NO: 296303 - DNA, 25 bp, Probe Sequence
tcatttgattccttctatttgcaca

SEQ ID NO: 296304 - DNA, 25 bp, Probe Sequence
tcatttctctctgcactatttctgc

SEQ ID NO: 296305 - DNA, 25 bp, Probe Sequence
tcatactttcctgctgacatatctg

SEQ ID NO: 296306 - DNA, 25 bp, Probe Sequence
tcataccttatttggaattgctgga

SEQ ID NO: 296307 - DNA, 25 bp, Probe Sequence
tcagaccttcatgagctgcaatctc

SEQ ID NO: 296308 - DNA, 25 bp, Probe Sequence
tcagacacgtgcttgatgctgagca

SEQ ID NO: 296309 - DNA, 25 bp, Probe Sequence
tcatgaccacagtccatgccatcac

SEQ ID NO: 296310 - DNA, 25 bp, Probe Sequence
tcatatccacaagtgctcgtgctgt

SEQ ID NO: 296311 - DNA, 25 bp, Probe Sequence
tcagagcctgcatgtgtatgccgtc

SEQ ID NO: 296312 - DNA, 25 bp, Probe Sequence
tcagagcctgcatgtgtatgccgtc

SEQ ID NO: 296313 - DNA, 25 bp, Probe Sequence
tcaggggcaccaatgtgcgtgctga

SEQ ID NO: 296314 - DNA, 25 bp, Probe Sequence
tcatggggacccagtgtgcgatggc

SEQ ID NO: 296315 - DNA, 25 bp, Probe Sequence
tcagggacacccagatgtagaagct

SEQ ID NO: 296316 - DNA, 25 bp, Probe Sequence
tcaggaaccttcagatagcagtaga

SEQ ID NO: 296317 - DNA, 25 bp, Probe Sequence
tcagagaaacggcgtcatgcccagc

SEQ ID NO: 296318 - DNA, 25 bp, Probe Sequence
tcagagaaacggcgtcatgcccagc

SEQ ID NO: 296319 - DNA, 25 bp, Probe Sequence
tcagtgaaggtggtggggctgccgg

SEQ ID NO: 296320 - DNA, 25 bp, Probe Sequence
tcagaaggtggatgtggtggccgag

SEQ ID NO: 296321 - DNA, 25 bp, Probe Sequence
tcaggggagggatggtatgccgcat

SEQ ID NO: 296322 - DNA, 25 bp, Probe Sequence
tcaccggaggtatagctgtgcccac

SEQ ID NO: 296323 - DNA, 25 bp, Probe Sequence
tcatcgtcaaggtcaacgggcgtcc

SEQ ID NO: 296324 - DNA, 25 bp, Probe Sequence
tcatcgggggccacgaggtgacccc

SEQ ID NO: 296325 - DNA, 25 bp, Probe Sequence
tcatcgggggccgggaggtgatccc

SEQ ID NO: 296326 - DNA, 25 bp, Probe Sequence
tcaccaggggacctagggagatccc

SEQ ID NO: 296327 - DNA, 25 bp, Probe Sequence
tcactagggaatcctgcggcaggac

SEQ ID NO: 296328 - DNA, 25 bp, Probe Sequence
tcatctacgagaagcgccggaagcc

SEQ ID NO: 296329 - DNA, 25 bp, Probe Sequence
tcacttctggggcacaggacgacct

SEQ ID NO: 296330 - DNA, 25 bp, Probe Sequence
tcatctttgcaggcggtcaggccta

SEQ ID NO: 296331 - DNA, 25 bp, Probe Sequence
tcatggtctgggggatgcaggcagg

SEQ ID NO: 296332 - DNA, 25 bp, Probe Sequence
tcatccgcgcggggatgactgctcg

SEQ ID NO: 296333 - DNA, 25 bp, Probe Sequence
tcatgccatcaggggaactctgtag

SEQ ID NO: 296334 - DNA, 25 bp, Probe Sequence
tcaggcatctgtgctgaatgtctta

SEQ ID NO: 296335 - DNA, 25 bp, Probe Sequence
tcatgagagctgtcctgaatgccct

SEQ ID NO: 296336 - DNA, 25 bp, Probe Sequence
tcatgtgcacttaccaatctcactt

SEQ ID NO: 296337 - DNA, 25 bp, Probe Sequence
tcatctgatgtttctatagtcactt

SEQ ID NO: 296338 - DNA, 25 bp, Probe Sequence
tcatctgttagctttacctttgttt

SEQ ID NO: 296339 - DNA, 25 bp, Probe Sequence
tcacttgtacagtccaccttttgat

SEQ ID NO: 296340 - DNA, 25 bp, Probe Sequence
tcattatatactctaccttcattaa

SEQ ID NO: 296341 - DNA, 25 bp, Probe Sequence
tcattattggctcaactttcctcac

SEQ ID NO: 296342 - DNA, 25 bp, Probe Sequence
tcagtgctagggcaacttctgcctg

SEQ ID NO: 296343 - DNA, 25 bp, Probe Sequence
tcagtcattgggaaatgccgcccat

SEQ ID NO: 296344 - DNA, 25 bp, Probe Sequence
tcagtgagttggaaagctcgtcctc

SEQ ID NO: 296345 - DNA, 25 bp, Probe Sequence
tcagttttgctggaggccgcaacca

SEQ ID NO: 296346 - DNA, 25 bp, Probe Sequence
tcattttgggccttgctaaattgat

SEQ ID NO: 296347 - DNA, 25 bp, Probe Sequence
tcattttgtcccttgtaaatcaaga

SEQ ID NO: 296348 - DNA, 25 bp, Probe Sequence
tcatttctgtccccattatgactta

SEQ ID NO: 296349 - DNA, 25 bp, Probe Sequence
tcatcttgtgtgtggttattgctta

SEQ ID NO: 296350 - DNA, 25 bp, Probe Sequence
tcatcatctttgtggtcttccttgc

SEQ ID NO: 296351 - DNA, 25 bp, Probe Sequence
tcatgattttgtggcaggcttcccg

SEQ ID NO: 296352 - DNA, 25 bp, Probe Sequence
tcatgctttctggaaacttccccgt

SEQ ID NO: 296353 - DNA, 25 bp, Probe Sequence
tcatctggtttattactctcaccca

SEQ ID NO: 296354 - DNA, 25 bp, Probe Sequence
tcatgattgttttttcttcagcctc

SEQ ID NO: 296355 - DNA, 25 bp, Probe Sequence
tcatgttcttcttagtaccatccat

SEQ ID NO: 296356 - DNA, 25 bp, Probe Sequence
tcatgtaaattatggagcacaatgt

SEQ ID NO: 296357 - DNA, 25 bp, Probe Sequence
tcatgttatgctcagaggcaaatat

SEQ ID NO: 296358 - DNA, 25 bp, Probe Sequence
tcatttgatgctaaataggagatac

SEQ ID NO: 296359 - DNA, 25 bp, Probe Sequence
tcacgttcttaaagtttagcaaaat

SEQ ID NO: 296360 - DNA, 25 bp, Probe Sequence
tcaggtaataccagctttagccaac

SEQ ID NO: 296361 - DNA, 25 bp, Probe Sequence
tcagagtagtaagatgctttattca

SEQ ID NO: 296362 - DNA, 25 bp, Probe Sequence
tcagagtcccaagattaaaagaaaa

SEQ ID NO: 296363 - DNA, 25 bp, Probe Sequence
tcatcagtccaaaccatcataaaaa

SEQ ID NO: 296364 - DNA, 25 bp, Probe Sequence
tcatagctgaaaattacttaaggaa

SEQ ID NO: 296365 - DNA, 25 bp, Probe Sequence
tcatagctgtagattacgtgaagga

SEQ ID NO: 296366 - DNA, 25 bp, Probe Sequence
tcatgacggtgattttcgtgtaaga

SEQ ID NO: 296367 - DNA, 25 bp, Probe Sequence
tcatgtggcggtgtccgtggaggac

SEQ ID NO: 296368 - DNA, 25 bp, Probe Sequence
tcatgtgggaggagccggagatcca

SEQ ID NO: 296369 - DNA, 25 bp, Probe Sequence
tcaggggagctggagcacgtgaccc

SEQ ID NO: 296370 - DNA, 25 bp, Probe Sequence
tcatggacgacacgagccgatccat

SEQ ID NO: 296371 - DNA, 25 bp, Probe Sequence
tcatgaggcgacaggtcttcaaatt

SEQ ID NO: 296372 - DNA, 25 bp, Probe Sequence
tcatctggaacaaggtaaaaagggg

SEQ ID NO: 296373 - DNA, 25 bp, Probe Sequence
tcagctggaaagctgctttatagga

SEQ ID NO: 296374 - DNA, 25 bp, Probe Sequence
tcagtggaatgtttggaataagaag

SEQ ID NO: 296375 - DNA, 25 bp, Probe Sequence
tcaggggttaatggaatcacagaaa

SEQ ID NO: 296376 - DNA, 25 bp, Probe Sequence
tcagtaggtgaactcagccattaga

SEQ ID NO: 296377 - DNA, 25 bp, Probe Sequence
tcatttgagtagatcggagtcagat

SEQ ID NO: 296378 - DNA, 25 bp, Probe Sequence
tcagtggagaaaatggagactcaga

SEQ ID NO: 296379 - DNA, 25 bp, Probe Sequence
tcatggtgtgtacctgtaatctcag

SEQ ID NO: 296380 - DNA, 25 bp, Probe Sequence
tcataaggatagacttgaagcacag

SEQ ID NO: 296381 - DNA, 25 bp, Probe Sequence
tcataaggcaagtcctgagcgacct

SEQ ID NO: 296382 - DNA, 25 bp, Probe Sequence
tcacaaggatcctctgaaaccctct

SEQ ID NO: 296383 - DNA, 25 bp, Probe Sequence
tcaggggaccaaaaaacttgctctt

SEQ ID NO: 296384 - DNA, 25 bp, Probe Sequence
tcagtggtgccagagtaaagtttct

SEQ ID NO: 296385 - DNA, 25 bp, Probe Sequence
tcaggttccacatggtatagttact

SEQ ID NO: 296386 - DNA, 25 bp, Probe Sequence
tcaggtctcacatcaggaattttcg

SEQ ID NO: 296387 - DNA, 25 bp, Probe Sequence
tcaggttcttaagggattctccgtt

SEQ ID NO: 296388 - DNA, 25 bp, Probe Sequence
tcaggttttgtaaagatgccgggtt

SEQ ID NO: 296389 - DNA, 25 bp, Probe Sequence
tcaagttttgtccaggatggccctg

SEQ ID NO: 296390 - DNA, 25 bp, Probe Sequence
tcaaggttcttcggggtgtgagctg

SEQ ID NO: 296391 - DNA, 25 bp, Probe Sequence
tcaccgtgttgcgcggggagcacgg

SEQ ID NO: 296392 - DNA, 25 bp, Probe Sequence
tcaccagggatcggggaggaagggg

SEQ ID NO: 296393 - DNA, 25 bp, Probe Sequence
tcatgcctccgagggggtggaaggg

SEQ ID NO: 296394 - DNA, 25 bp, Probe Sequence
tcaggtccgaggcggtggagcggct

SEQ ID NO: 296395 - DNA, 25 bp, Probe Sequence
tcatggtagcagcagcgggggtggc

SEQ ID NO: 296396 - DNA, 25 bp, Probe Sequence
tcaggtgcagacaagtgggcggtgt

SEQ ID NO: 296397 - DNA, 25 bp, Probe Sequence
tcatgtggcaaacgtgcggctcgtg

SEQ ID NO: 296398 - DNA, 25 bp, Probe Sequence
tcatgtaccatgactggcggctggt

SEQ ID NO: 296399 - DNA, 25 bp, Probe Sequence
tcatccctctacatgggctgtggct

SEQ ID NO: 296400 - DNA, 25 bp, Probe Sequence
tcatctctattggcctggggtgcct

SEQ ID NO: 296401 - DNA, 25 bp, Probe Sequence
tcatcaccattggcaatgagcggtt

SEQ ID NO: 296402 - DNA, 25 bp, Probe Sequence
tcatctctcttgtctatacctgata

SEQ ID NO: 296403 - DNA, 25 bp, Probe Sequence
tcatatgatcttctaagttgatttt

SEQ ID NO: 296404 - DNA, 25 bp, Probe Sequence
tcatgtgtgttcgtgcgtgtgtgtg

SEQ ID NO: 296405 - DNA, 25 bp, Probe Sequence
tcagcttcttcaggcggtagctgat

SEQ ID NO: 296406 - DNA, 25 bp, Probe Sequence
tcatgccctctcacaggtttgtgtt

SEQ ID NO: 296407 - DNA, 25 bp, Probe Sequence
tcatcacccttgtcagtgtctattg

SEQ ID NO: 296408 - DNA, 25 bp, Probe Sequence
tcataactctggtgaatgtattcat

SEQ ID NO: 296409 - DNA, 25 bp, Probe Sequence
tcagggccagggctcatgaatctca

SEQ ID NO: 296410 - DNA, 25 bp, Probe Sequence
tcatggggagaagatgagtacttga

SEQ ID NO: 296411 - DNA, 25 bp, Probe Sequence
tcatggggaacagatgtgttccacc

SEQ ID NO: 296412 - DNA, 25 bp, Probe Sequence
tcagggagaacctttcacggcaccc

SEQ ID NO: 296413 - DNA, 25 bp, Probe Sequence
tcagggcaaaccctttcgagcagca

SEQ ID NO: 296414 - DNA, 25 bp, Probe Sequence
tcagagccaacacctttgttgcaga

SEQ ID NO: 296415 - DNA, 25 bp, Probe Sequence
tcatgaactcggccattctcttgga

SEQ ID NO: 296416 - DNA, 25 bp, Probe Sequence
tcatggacacagggcactgccttgc

SEQ ID NO: 296417 - DNA, 25 bp, Probe Sequence
tcatctgaggaggcctcgtctctga

SEQ ID NO: 296418 - DNA, 25 bp, Probe Sequence
tcatctgaggactgcatcggtggac

SEQ ID NO: 296419 - DNA, 25 bp, Probe Sequence
tcagctagagaactcactgagtaga

SEQ ID NO: 296420 - DNA, 25 bp, Probe Sequence
tcagccaatgaacaagatcgagagg

SEQ ID NO: 296421 - DNA, 25 bp, Probe Sequence
tcaggcaatagaggaggacggggtg

SEQ ID NO: 296422 - DNA, 25 bp, Probe Sequence
tcatctgcaatgtaggggccggtgg

SEQ ID NO: 296423 - DNA, 25 bp, Probe Sequence
tcatccattattagcctggggtgtg

SEQ ID NO: 296424 - DNA, 25 bp, Probe Sequence
tcatcctcatttacaagaggggtca

SEQ ID NO: 296425 - DNA, 25 bp, Probe Sequence
tcatctcctactccaatacgggtga

SEQ ID NO: 296426 - DNA, 25 bp, Probe Sequence
tcatctactcacacttcacgtgtgc

SEQ ID NO: 296427 - DNA, 25 bp, Probe Sequence
tcatctacacccgcatcaggggagg

SEQ ID NO: 296428 - DNA, 25 bp, Probe Sequence
tcatctacacgccattcactgagga

SEQ ID NO: 296429 - DNA, 25 bp, Probe Sequence
tcatcatattcacagtcctgagaat

SEQ ID NO: 296430 - DNA, 25 bp, Probe Sequence
tcatcatgtctatagttcctgagat

SEQ ID NO: 296431 - DNA, 25 bp, Probe Sequence
tcatcagttttattgcctgctcgat

SEQ ID NO: 296432 - DNA, 25 bp, Probe Sequence
tcatcctgttgaattgcaccatcgt

SEQ ID NO: 296433 - DNA, 25 bp, Probe Sequence
tcatcatcatgatcttcgaccactt

SEQ ID NO: 296434 - DNA, 25 bp, Probe Sequence
tcatgacagatacttgccctgctcg

SEQ ID NO: 296435 - DNA, 25 bp, Probe Sequence
tcataagatggttgcattctagctg

SEQ ID NO: 296436 - DNA, 25 bp, Probe Sequence
tcataagcagcgaccttgtggcatc

SEQ ID NO: 296437 - DNA, 25 bp, Probe Sequence
tcataactggcttctgcttgtcatc

SEQ ID NO: 296438 - DNA, 25 bp, Probe Sequence
tcaaattggctgatctttccgttgc

SEQ ID NO: 296439 - DNA, 25 bp, Probe Sequence
tcatcaaaagttatcttccgttccc

SEQ ID NO: 296440 - DNA, 25 bp, Probe Sequence
tcaaagacaatgttattttccttcc

SEQ ID NO: 296441 - DNA, 25 bp, Probe Sequence
tcatgcaaggatcttttttccctct

SEQ ID NO: 296442 - DNA, 25 bp, Probe Sequence
tcatctcatgttttcttattgtcac

SEQ ID NO: 296443 - DNA, 25 bp, Probe Sequence
tcatatcatttataatcttgtcaca

SEQ ID NO: 296444 - DNA, 25 bp, Probe Sequence
tcatacattctcatacatttaactt

SEQ ID NO: 296445 - DNA, 25 bp, Probe Sequence
tcatctaacgtttcagtgtatcctt

SEQ ID NO: 296446 - DNA, 25 bp, Probe Sequence
tagctaagtttcgagttgcccgtct

SEQ ID NO: 296447 - DNA, 25 bp, Probe Sequence
tcagtggggttcgatgttccctttt

SEQ ID NO: 296448 - DNA, 25 bp, Probe Sequence
tcagatatgcgggtccagtgtcaac

SEQ ID NO: 296449 - DNA, 25 bp, Probe Sequence
tcatgattgcggcctccatttatac

SEQ ID NO: 296450 - DNA, 25 bp, Probe Sequence
tcatcattgcaggcgtttaataacg

SEQ ID NO: 296451 - DNA, 25 bp, Probe Sequence
tcatcctgcccgatccaaagaagat

SEQ ID NO: 296452 - DNA, 25 bp, Probe Sequence
tcatgcctggccgctacaaccagga

SEQ ID NO: 296453 - DNA, 25 bp, Probe Sequence
tcatctctggccatatacagaccga

SEQ ID NO: 296454 - DNA, 25 bp, Probe Sequence
tcatcacgcagccactaacgggaga

SEQ ID NO: 296455 - DNA, 25 bp, Probe Sequence
tcatccctgagctgaacgggaagct

SEQ ID NO: 296456 - DNA, 25 bp, Probe Sequence
tcaccagcgagcacggggagaagct

SEQ ID NO: 296457 - DNA, 25 bp, Probe Sequence
tcatccagcgcacacggctgctgga

SEQ ID NO: 296458 - DNA, 25 bp, Probe Sequence
tcatgcggccggagcagatcatgaa

SEQ ID NO: 296459 - DNA, 25 bp, Probe Sequence
tcagggctagggaacatcattaaga

SEQ ID NO: 296460 - DNA, 25 bp, Probe Sequence
tcatgggatctaggattacttaaaa

SEQ ID NO: 296461 - DNA, 25 bp, Probe Sequence
tcatcggatattggctatattgata

SEQ ID NO: 296462 - DNA, 25 bp, Probe Sequence
tcatcaagataaggcatttctttcc

SEQ ID NO: 296463 - DNA, 25 bp, Probe Sequence
tcatagagaccagcacattcctgtc

SEQ ID NO: 296464 - DNA, 25 bp, Probe Sequence
tcaggagatcgagcccatcctggct

SEQ ID NO: 296465 - DNA, 25 bp, Probe Sequence
tcaggagttgcttgtacattcttgg

SEQ ID NO: 296466 - DNA, 25 bp, Probe Sequence
tcactggggtggcaatgtcctgggt

SEQ ID NO: 296467 - DNA, 25 bp, Probe Sequence
tttggggtggcctgtgttgccactc

SEQ ID NO: 296468 - DNA, 25 bp, Probe Sequence
tttggggtggcctgtgttgccactc

SEQ ID NO: 296469 - DNA, 25 bp, Probe Sequence
tttggggtggcctgtgttgccactc

SEQ ID NO: 296470 - DNA, 25 bp, Probe Sequence
tttaggggccactggagtcgagctc

SEQ ID NO: 296471 - DNA, 25 bp, Probe Sequence
tactttggggacttgtagggatgcc

SEQ ID NO: 296472 - DNA, 25 bp, Probe Sequence
tcaggttggggagtctttggttgac

SEQ ID NO: 296473 - DNA, 25 bp, Probe Sequence
tcaggttggggttggcttggtttca

SEQ ID NO: 296474 - DNA, 25 bp, Probe Sequence
tcagacagggggtgggctttgccta

SEQ ID NO: 296475 - DNA, 25 bp, Probe Sequence
tcagactggaaacgggactttctat

SEQ ID NO: 296476 - DNA, 25 bp, Probe Sequence
tcatgaccctaactgttcactgttt

SEQ ID NO: 296477 - DNA, 25 bp, Probe Sequence
tcatgtgctgccaactgagttatct

SEQ ID NO: 296478 - DNA, 25 bp, Probe Sequence
tcatgttccatatatgttatacctt

SEQ ID NO: 296479 - DNA, 25 bp, Probe Sequence
tcatcattccacactgtatatatac

SEQ ID NO: 296480 - DNA, 25 bp, Probe Sequence
tcatcttcacaattctaattctact

SEQ ID NO: 296481 - DNA, 25 bp, Probe Sequence
tcatgaccagcttgattaatgtata

SEQ ID NO: 296482 - DNA, 25 bp, Probe Sequence
tcatgcctacattagtgagatttag

SEQ ID NO: 296483 - DNA, 25 bp, Probe Sequence
tcatgcctccattaccagttgcaat

SEQ ID NO: 296484 - DNA, 25 bp, Probe Sequence
tcatcttcacgtgccatgtgtgctg

SEQ ID NO: 296485 - DNA, 25 bp, Probe Sequence
tcatgcttcaagaccttgttcagag

SEQ ID NO: 296486 - DNA, 25 bp, Probe Sequence
tcatctcataaaccatacttggaag

SEQ ID NO: 296487 - DNA, 25 bp, Probe Sequence
tcatcctcaaccctaaatggacata

SEQ ID NO: 296488 - DNA, 25 bp, Probe Sequence
tcatcgccgtgggctacgtggacga

SEQ ID NO: 296489 - DNA, 25 bp, Probe Sequence
tcaggacgctggatgccagctccca

SEQ ID NO: 296490 - DNA, 25 bp, Probe Sequence
tcagatgactgcgatttgccctctg

SEQ ID NO: 296491 - DNA, 25 bp, Probe Sequence
tcagatgacggcagacgcacgctga

SEQ ID NO: 296492 - DNA, 25 bp, Probe Sequence
tcagatacagctgggttccctggct

SEQ ID NO: 296493 - DNA, 25 bp, Probe Sequence
tcagtcaaggggctccactgacttc

SEQ ID NO: 296494 - DNA, 25 bp, Probe Sequence
tcatgtgcgagacggcactccacta

SEQ ID NO: 296495 - DNA, 25 bp, Probe Sequence
tcatgctgcctgtggctgaccaata

SEQ ID NO: 296496 - DNA, 25 bp, Probe Sequence
tcatgctgcctgtggctgaccaata

SEQ ID NO: 296497 - DNA, 25 bp, Probe Sequence
tcatcccatgttagctccaaagcat

SEQ ID NO: 296498 - DNA, 25 bp, Probe Sequence
tcatgcatcttcctaacccaagcat

SEQ ID NO: 296499 - DNA, 25 bp, Probe Sequence
tcatgcagttgccaatattcataac

SEQ ID NO: 296500 - DNA, 25 bp, Probe Sequence
tcatgctgtgtggccaattataatt

SEQ ID NO: 296501 - DNA, 25 bp, Probe Sequence
tcatctttggcagacagagaattgg

SEQ ID NO: 296502 - DNA, 25 bp, Probe Sequence
tcatcatcttcctctcagaaggatg

SEQ ID NO: 296503 - DNA, 25 bp, Probe Sequence
tcatcatccccgcccggatgaagag

SEQ ID NO: 296504 - DNA, 25 bp, Probe Sequence
tcacttaccgagccctgagaaacaa

SEQ ID NO: 296505 - DNA, 25 bp, Probe Sequence
tcagtgaacacacccctataaccat

SEQ ID NO: 296506 - DNA, 25 bp, Probe Sequence
tcacgcaaacacacactaattcctg

SEQ ID NO: 296507 - DNA, 25 bp, Probe Sequence
tcaccaacaacctcaagtctcttga

SEQ ID NO: 296508 - DNA, 25 bp, Probe Sequence
tcatccacacaacaccaggacttaa

SEQ ID NO: 296509 - DNA, 25 bp, Probe Sequence
tcatccctcatccacagtaggacac

SEQ ID NO: 296510 - DNA, 25 bp, Probe Sequence
tcatcgtgtctatcatgaacgacag

SEQ ID NO: 296511 - DNA, 25 bp, Probe Sequence
tcatgggtgtattcaggagctgacg

SEQ ID NO: 296512 - DNA, 25 bp, Probe Sequence
tcatgcgggttgtggagctgctggc

SEQ ID NO: 296513 - DNA, 25 bp, Probe Sequence
tcatcgtggtagtgtcggtggcctg

SEQ ID NO: 296514 - DNA, 25 bp, Probe Sequence
tcatggggaagggccaggtccagct

SEQ ID NO: 296515 - DNA, 25 bp, Probe Sequence
tcatcgggatttccaagtctccacc

SEQ ID NO: 296516 - DNA, 25 bp, Probe Sequence
tcatcgcgtagtagccatggtgatc

SEQ ID NO: 296517 - DNA, 25 bp, Probe Sequence
tcatcagagtcatttgccctggctc

SEQ ID NO: 296518 - DNA, 25 bp, Probe Sequence
tcaggagtgatgtagccagaggcca

SEQ ID NO: 296519 - DNA, 25 bp, Probe Sequence
tcagggatgagatcgctgggtgcat

SEQ ID NO: 296520 - DNA, 25 bp, Probe Sequence
tcagagcgaagttggcgggactttc

SEQ ID NO: 296521 - DNA, 25 bp, Probe Sequence
tcagatggccagtagtggtggactt

SEQ ID NO: 296522 - DNA, 25 bp, Probe Sequence
tcagaggccaaggaatttggcctgt

SEQ ID NO: 296523 - DNA, 25 bp, Probe Sequence
tcagggcctagtattctcttcgggc

SEQ ID NO: 296524 - DNA, 25 bp, Probe Sequence
tcagcgagtcgtatttcttttttgc

SEQ ID NO: 296525 - DNA, 25 bp, Probe Sequence
tcagccaacaggagcgtccttttct

SEQ ID NO: 296526 - DNA, 25 bp, Probe Sequence
tcaccagtaggttggacagcatata

SEQ ID NO: 296527 - DNA, 25 bp, Probe Sequence
tcatcgaaaagaaagcacagctaac

SEQ ID NO: 296528 - DNA, 25 bp, Probe Sequence
tcatcgacgagaacccagagctgtt

SEQ ID NO: 296529 - DNA, 25 bp, Probe Sequence
tcatctccctgaactccaaggttca

SEQ ID NO: 296530 - DNA, 25 bp, Probe Sequence
tcatgtcccagaacttagcctttac

SEQ ID NO: 296531 - DNA, 25 bp, Probe Sequence
tcatgtccaaggattggccgcttgt

SEQ ID NO: 296532 - DNA, 25 bp, Probe Sequence
tcagtccaaggaagctcgaagcagg

SEQ ID NO: 296533 - DNA, 25 bp, Probe Sequence
tcatgtcctaagacagcttcaagac

SEQ ID NO: 296534 - DNA, 25 bp, Probe Sequence
tcagtgccatgttcgacttcagcga

SEQ ID NO: 296535 - DNA, 25 bp, Probe Sequence
tcagcttcagcttaactgacagatg

SEQ ID NO: 296536 - DNA, 25 bp, Probe Sequence
tcatctgctagttaccatggtgatg

SEQ ID NO: 296537 - DNA, 25 bp, Probe Sequence
tcagatctcagtgtcaccgctgatg

SEQ ID NO: 296538 - DNA, 25 bp, Probe Sequence
taattctgtgcaggcagcccacatg

SEQ ID NO: 296539 - DNA, 25 bp, Probe Sequence
tcagacactagagagccccttctgg

SEQ ID NO: 296540 - DNA, 25 bp, Probe Sequence
tcagtagcaagagatggcccaacga

SEQ ID NO: 296541 - DNA, 25 bp, Probe Sequence
tcacaagaaggtggcccggaccatc

SEQ ID NO: 296542 - DNA, 25 bp, Probe Sequence
tcagaggggagaggtactcgaccca

SEQ ID NO: 296543 - DNA, 25 bp, Probe Sequence
tcagtgttggagggccacctgaacc

SEQ ID NO: 296544 - DNA, 25 bp, Probe Sequence
tcagtgtctggtggaggacgccaag

SEQ ID NO: 296545 - DNA, 25 bp, Probe Sequence
tcaggctgggggagcatccaagatg

SEQ ID NO: 296546 - DNA, 25 bp, Probe Sequence
tcatccctgaatcttgccacagaga

SEQ ID NO: 296547 - DNA, 25 bp, Probe Sequence
tcatctcccattactgtccaaagta

SEQ ID NO: 296548 - DNA, 25 bp, Probe Sequence
tcatctcattcaatttatccaataa

SEQ ID NO: 296549 - DNA, 25 bp, Probe Sequence
tcatcagaatctgtcggccaaaagc

SEQ ID NO: 296550 - DNA, 25 bp, Probe Sequence
tcagaaaccagttggctctagctac

SEQ ID NO: 296551 - DNA, 25 bp, Probe Sequence
taagaatcggtctgtgggctactga

SEQ ID NO: 296552 - DNA, 25 bp, Probe Sequence
tcaaaacggcaatatgggctactga

SEQ ID NO: 296553 - DNA, 25 bp, Probe Sequence
tcaacaagagcgtgactgggttcta

SEQ ID NO: 296554 - DNA, 25 bp, Probe Sequence
tcatgaaagggacgacgggagctgc

SEQ ID NO: 296555 - DNA, 25 bp, Probe Sequence
tcatgaaaggcgccgtggagaaggg

SEQ ID NO: 296556 - DNA, 25 bp, Probe Sequence
tcagcaaagggggggcagaccgggc

SEQ ID NO: 296557 - DNA, 25 bp, Probe Sequence
tcagcaaagggggggcagaccgggc

SEQ ID NO: 296558 - DNA, 25 bp, Probe Sequence
tcagaaagggctcctgcactgactc

SEQ ID NO: 296559 - DNA, 25 bp, Probe Sequence
tcaaaaagaccctctggctgtggac

SEQ ID NO: 296560 - DNA, 25 bp, Probe Sequence
tcagaaaaaccttttgacctcaagt

SEQ ID NO: 296561 - DNA, 25 bp, Probe Sequence
tcagtactttttaatggaaacaact

SEQ ID NO: 296562 - DNA, 25 bp, Probe Sequence
tcagatactctgctgtttgggacac

SEQ ID NO: 296563 - DNA, 25 bp, Probe Sequence
tcaatcatgcctatttaatggaacc

SEQ ID NO: 296564 - DNA, 25 bp, Probe Sequence
tcagagagcgatttgttacataaac

SEQ ID NO: 296565 - DNA, 25 bp, Probe Sequence
tcaggctgagtctgttttatcaatc

SEQ ID NO: 296566 - DNA, 25 bp, Probe Sequence
tcagggatttggttctcatcaacat

SEQ ID NO: 296567 - DNA, 25 bp, Probe Sequence
tcatgacggtgtccttccacaaata

SEQ ID NO: 296568 - DNA, 25 bp, Probe Sequence
tcatgacggtgtccttccacaaata

SEQ ID NO: 296569 - DNA, 25 bp, Probe Sequence
tcaggcggagaagtactctcaaaaa

SEQ ID NO: 296570 - DNA, 25 bp, Probe Sequence
tcagatacaagcatgtaacaaaaaa

SEQ ID NO: 296571 - DNA, 25 bp, Probe Sequence
tcagacactcagcttctgatctgag

SEQ ID NO: 296572 - DNA, 25 bp, Probe Sequence
tcaggacctggttgctactggttcg

SEQ ID NO: 296573 - DNA, 25 bp, Probe Sequence
tcagtgacacggaactgtcgggtca

SEQ ID NO: 296574 - DNA, 25 bp, Probe Sequence
tcagggccaagttcgtggggacacc

SEQ ID NO: 296575 - DNA, 25 bp, Probe Sequence
tcatgggccacctctgtggaaacca

SEQ ID NO: 296576 - DNA, 25 bp, Probe Sequence
tcaggccaagcctctctaaatgacc

SEQ ID NO: 296577 - DNA, 25 bp, Probe Sequence
tcatggcctgagctacaccaaatag

SEQ ID NO: 296578 - DNA, 25 bp, Probe Sequence
tcacccagggtcacacaattgataa

SEQ ID NO: 296579 - DNA, 25 bp, Probe Sequence
tcagactcagtcggaacaaattgga

SEQ ID NO: 296580 - DNA, 25 bp, Probe Sequence
tcagaatctgtcggccaaaagcggt

SEQ ID NO: 296581 - DNA, 25 bp, Probe Sequence
tcatgtctgttagggaaagcaggag

SEQ ID NO: 296582 - DNA, 25 bp, Probe Sequence
tcaggctttgaggagaatacacagg

SEQ ID NO: 296583 - DNA, 25 bp, Probe Sequence
tcaggcttatgagaatcacaactgt

SEQ ID NO: 296584 - DNA, 25 bp, Probe Sequence
tcagtgtttaaggcacaccctgctt

SEQ ID NO: 296585 - DNA, 25 bp, Probe Sequence
tcatggtcgatatgaccaccctcct

SEQ ID NO: 296586 - DNA, 25 bp, Probe Sequence
tcatgagactcaatatcaccacccc

SEQ ID NO: 296587 - DNA, 25 bp, Probe Sequence
tcagcaaccaaaggcaccggccttg

SEQ ID NO: 296588 - DNA, 25 bp, Probe Sequence
tcagcaacttaagctcctgtgccta

SEQ ID NO: 296589 - DNA, 25 bp, Probe Sequence
tcagaatttaggttcctgccctgtt

SEQ ID NO: 296590 - DNA, 25 bp, Probe Sequence
tcagatatttgagtttaaccctttt

SEQ ID NO: 296591 - DNA, 25 bp, Probe Sequence
tcagtcataagagattaaccgagat

SEQ ID NO: 296592 - DNA, 25 bp, Probe Sequence
tcatgttcaaatgttcacaaccaca

SEQ ID NO: 296593 - DNA, 25 bp, Probe Sequence
tcagtctaagcttcctaaggtcctt

SEQ ID NO: 296594 - DNA, 25 bp, Probe Sequence
tcagttatggttcctttggtcgctc

SEQ ID NO: 296595 - DNA, 25 bp, Probe Sequence
tcacttggccttctgaaggtcctcc

SEQ ID NO: 296596 - DNA, 25 bp, Probe Sequence
tcacgggattttccaagtctccacc

SEQ ID NO: 296597 - DNA, 25 bp, Probe Sequence
tcacggggatttccaagtgctccac

SEQ ID NO: 296598 - DNA, 25 bp, Probe Sequence
tcagggggcatgtcccagtgttttt

SEQ ID NO: 296599 - DNA, 25 bp, Probe Sequence
tcaggcagggcatcattcagtaatt

SEQ ID NO: 296600 - DNA, 25 bp, Probe Sequence
tcatgtcagtgagagcttcccacac

SEQ ID NO: 296601 - DNA, 25 bp, Probe Sequence
tcatgtgacagatactttccagagc

SEQ ID NO: 296602 - DNA, 25 bp, Probe Sequence
tcagtgacacagaacttgaccgaag

SEQ ID NO: 296603 - DNA, 25 bp, Probe Sequence
tcatgtctacataactttcgtaatg

SEQ ID NO: 296604 - DNA, 25 bp, Probe Sequence
tcatctgtgacttttgttctggaat

SEQ ID NO: 296605 - DNA, 25 bp, Probe Sequence
tcatctctattctatagtcctgtaa

SEQ ID NO: 296606 - DNA, 25 bp, Probe Sequence
tcatgcctttgatagtctctctgga

SEQ ID NO: 296607 - DNA, 25 bp, Probe Sequence
tcagcttctgataaggtctcaggaa

SEQ ID NO: 296608 - DNA, 25 bp, Probe Sequence
tcagtcttttaggattagaagaatt

SEQ ID NO: 296609 - DNA, 25 bp, Probe Sequence
tcagtagttgcttccctaactgcaa

SEQ ID NO: 296610 - DNA, 25 bp, Probe Sequence
tcatgtatcttaaccccagactctg

SEQ ID NO: 296611 - DNA, 25 bp, Probe Sequence
tcatgttctgtaactctactccttg

SEQ ID NO: 296612 - DNA, 25 bp, Probe Sequence
tcagaactgcaattcttactccctt

SEQ ID NO: 296613 - DNA, 25 bp, Probe Sequence
tcagtaagtattgaactcccttctc

SEQ ID NO: 296614 - DNA, 25 bp, Probe Sequence
tcaggaagttcaaagacccagcctt

SEQ ID NO: 296615 - DNA, 25 bp, Probe Sequence
tcaggaggccacatatacagcccct

SEQ ID NO: 296616 - DNA, 25 bp, Probe Sequence
tcaggtggcctctgaaacaccactc

SEQ ID NO: 296617 - DNA, 25 bp, Probe Sequence
tcaggggccctgtattacggcagca

SEQ ID NO: 296618 - DNA, 25 bp, Probe Sequence
tcacaggaccctgcatgatactgga

SEQ ID NO: 296619 - DNA, 25 bp, Probe Sequence
tcaggggtgcctggtgaattctgca

SEQ ID NO: 296620 - DNA, 25 bp, Probe Sequence
tcagaggagatgatgcttattttaa

SEQ ID NO: 296621 - DNA, 25 bp, Probe Sequence
tcagtgaggtgcaggaggttatata

SEQ ID NO: 296622 - DNA, 25 bp, Probe Sequence
tcaggcaggtgatgaatggttttca

SEQ ID NO: 296623 - DNA, 25 bp, Probe Sequence
tcaggcaggtgatgaatggttttca

SEQ ID NO: 296624 - DNA, 25 bp, Probe Sequence
tcagctcggagatgaattcgcttcc

SEQ ID NO: 296625 - DNA, 25 bp, Probe Sequence
tcatgcctggagcaatgagggtcta

SEQ ID NO: 296626 - DNA, 25 bp, Probe Sequence
tcatctttcaggcatgaatgattct

SEQ ID NO: 296627 - DNA, 25 bp, Probe Sequence
tcatcttcatatccctgattgtcct

SEQ ID NO: 296628 - DNA, 25 bp, Probe Sequence
tcagtagctgaacctgtctgacccg

SEQ ID NO: 296629 - DNA, 25 bp, Probe Sequence
tcatgtttgagaccttcaacacccc

SEQ ID NO: 296630 - DNA, 25 bp, Probe Sequence
tcaggtgatggactcttcttcctgc

SEQ ID NO: 296631 - DNA, 25 bp, Probe Sequence
tcaggtgatggtctgtctcttctga

SEQ ID NO: 296632 - DNA, 25 bp, Probe Sequence
tcagatggggtgctcatcttgttca

SEQ ID NO: 296633 - DNA, 25 bp, Probe Sequence
tcatgtgaggggcgcattcctccag

SEQ ID NO: 296634 - DNA, 25 bp, Probe Sequence
tcatggagtggatgctgcctcctcc

SEQ ID NO: 296635 - DNA, 25 bp, Probe Sequence
tcagtggtggacctgacctgccgtc

SEQ ID NO: 296636 - DNA, 25 bp, Probe Sequence
tcagtgagtttcgatgactagcctg

SEQ ID NO: 296637 - DNA, 25 bp, Probe Sequence
tcagttgttacagagctcagcagct

SEQ ID NO: 296638 - DNA, 25 bp, Probe Sequence
tcagatggtctgcagcgagtcacac

SEQ ID NO: 296639 - DNA, 25 bp, Probe Sequence
tcatctgggctgcaggatgatggcc

SEQ ID NO: 296640 - DNA, 25 bp, Probe Sequence
tcatgcatgtggacgagtgtgtgga

SEQ ID NO: 296641 - DNA, 25 bp, Probe Sequence
tcatccgtgacgacatgctgtgtgc

SEQ ID NO: 296642 - DNA, 25 bp, Probe Sequence
tcatgcgcaatgctgacttggagct

SEQ ID NO: 296643 - DNA, 25 bp, Probe Sequence
tcatctgcactgccatacgtggagt

SEQ ID NO: 296644 - DNA, 25 bp, Probe Sequence
tcatgccactgcaacaagcgtgaga

SEQ ID NO: 296645 - DNA, 25 bp, Probe Sequence
tcatgccactgaatacgttgaaaaa

SEQ ID NO: 296646 - DNA, 25 bp, Probe Sequence
tcatccccactgagtggtgagaaga

SEQ ID NO: 296647 - DNA, 25 bp, Probe Sequence
tcatccctgggcatatgtgtaccaa

SEQ ID NO: 296648 - DNA, 25 bp, Probe Sequence
tcatcgccatgggctacgtggacga

SEQ ID NO: 296649 - DNA, 25 bp, Probe Sequence
tcagcctatgtgcctgacactggtc

SEQ ID NO: 296650 - DNA, 25 bp, Probe Sequence
tcaccattgggctaactttgctgct

SEQ ID NO: 296651 - DNA, 25 bp, Probe Sequence
tcagacattaagtgactgtatcatg

SEQ ID NO: 296652 - DNA, 25 bp, Probe Sequence
tcagaccatagcaactcctgtactc

SEQ ID NO: 296653 - DNA, 25 bp, Probe Sequence
tcagagttacatacatacagctacc

SEQ ID NO: 296654 - DNA, 25 bp, Probe Sequence
tcaggctgccaaatgcaggcactca

SEQ ID NO: 296655 - DNA, 25 bp, Probe Sequence
tcaggacagcaactgggccagcaaa

SEQ ID NO: 296656 - DNA, 25 bp, Probe Sequence
tcatgagaagagtaggtcgcccaga

SEQ ID NO: 296657 - DNA, 25 bp, Probe Sequence
tcagcattagatgcaggtcgtacat

SEQ ID NO: 296658 - DNA, 25 bp, Probe Sequence
tcagattactgtttgctggctaatt

SEQ ID NO: 296659 - DNA, 25 bp, Probe Sequence
tcagatgtatttgtctgccccattg

SEQ ID NO: 296660 - DNA, 25 bp, Probe Sequence
tcatggttgatgattctcccctgat

SEQ ID NO: 296661 - DNA, 25 bp, Probe Sequence
tcatgtgttgagcttcaggttctga

SEQ ID NO: 296662 - DNA, 25 bp, Probe Sequence
tcatgatttagtcctcagaaatgga

SEQ ID NO: 296663 - DNA, 25 bp, Probe Sequence
tcatctgttcagtcatctccaaaaa

SEQ ID NO: 296664 - DNA, 25 bp, Probe Sequence
tcatctgttcagtcatctccaaaaa

SEQ ID NO: 296665 - DNA, 25 bp, Probe Sequence
tcatctcctcgattttaatctgaaa

SEQ ID NO: 296666 - DNA, 25 bp, Probe Sequence
tcatctgacatccaggtgtaatctg

SEQ ID NO: 296667 - DNA, 25 bp, Probe Sequence
tcagaaatcaagcctgtcacattgc

SEQ ID NO: 296668 - DNA, 25 bp, Probe Sequence
tcagaaatcaagcctgtcacattgc

SEQ ID NO: 296669 - DNA, 25 bp, Probe Sequence
tcatggaaacaggctgtcagatccc

SEQ ID NO: 296670 - DNA, 25 bp, Probe Sequence
tcatgagagcaaaccgtagtcccct

SEQ ID NO: 296671 - DNA, 25 bp, Probe Sequence
tcatgcgagccttcattgatgtgac

SEQ ID NO: 296672 - DNA, 25 bp, Probe Sequence
tcatgcaggcctgtctgtgtgattg

SEQ ID NO: 296673 - DNA, 25 bp, Probe Sequence
tcatcgccctgtgcatggagcaagt

SEQ ID NO: 296674 - DNA, 25 bp, Probe Sequence
tcatccacctgtgtgagtccatcac

SEQ ID NO: 296675 - DNA, 25 bp, Probe Sequence
tcatgcacaagcttcaatagccgat

SEQ ID NO: 296676 - DNA, 25 bp, Probe Sequence
tcatccacgatggcctagcacgtgg

SEQ ID NO: 296677 - DNA, 25 bp, Probe Sequence
tcatcctggatgacgtgtccttgac

SEQ ID NO: 296678 - DNA, 25 bp, Probe Sequence
tcacctatggccatggccttgactg

SEQ ID NO: 296679 - DNA, 25 bp, Probe Sequence
tcagtattagcgtggccttgacctt

SEQ ID NO: 296680 - DNA, 25 bp, Probe Sequence
tcagagtgttgttccgttaaccttt

SEQ ID NO: 296681 - DNA, 25 bp, Probe Sequence
tcagagtttctaccaatttcccatc

SEQ ID NO: 296682 - DNA, 25 bp, Probe Sequence
tcacagtaactcagagattaccaac

SEQ ID NO: 296683 - DNA, 25 bp, Probe Sequence
tcacgtagagagagggatacccagg

SEQ ID NO: 296684 - DNA, 25 bp, Probe Sequence
tcatctgtaggatttgggctgcccc

SEQ ID NO: 296685 - DNA, 25 bp, Probe Sequence
tcatccgccagatttgagcagcgcc

SEQ ID NO: 296686 - DNA, 25 bp, Probe Sequence
tcagatcgcctggaggatcgccatc

SEQ ID NO: 296687 - DNA, 25 bp, Probe Sequence
tcaggacctgcttggtcagctgcag

SEQ ID NO: 296688 - DNA, 25 bp, Probe Sequence
tcatgagagcctgtagccaccaatg

SEQ ID NO: 296689 - DNA, 25 bp, Probe Sequence
tcaggaccctgaaccatcaatatga

SEQ ID NO: 296690 - DNA, 25 bp, Probe Sequence
tcaggacaacttagcctccaggacg

SEQ ID NO: 296691 - DNA, 25 bp, Probe Sequence
tcagagaactctggaacccgttcgc

SEQ ID NO: 296692 - DNA, 25 bp, Probe Sequence
tcagagaactctggaacccgttcgc

SEQ ID NO: 296693 - DNA, 25 bp, Probe Sequence
tcagatatacgagaacgccatgatt

SEQ ID NO: 296694 - DNA, 25 bp, Probe Sequence
tcatgatctactgcgacaacatcgt

SEQ ID NO: 296695 - DNA, 25 bp, Probe Sequence
tcatgttattgttgacatgaatcta

SEQ ID NO: 296696 - DNA, 25 bp, Probe Sequence
tcatgtctatttttgatgactcatc

SEQ ID NO: 296697 - DNA, 25 bp, Probe Sequence
tcagtgatattcacatcgacatcat

SEQ ID NO: 296698 - DNA, 25 bp, Probe Sequence
tcatgagataataggcctactcata

SEQ ID NO: 296699 - DNA, 25 bp, Probe Sequence
tcatgatgagacagtccaactctac

SEQ ID NO: 296700 - DNA, 25 bp, Probe Sequence
tcagaaggccgtgaagcatttacac

SEQ ID NO: 296701 - DNA, 25 bp, Probe Sequence
tcaggcggccgggaagatggcggac

SEQ ID NO: 296702 - DNA, 25 bp, Probe Sequence
tcaggccccgaggcaaaagcaagga

SEQ ID NO: 296703 - DNA, 25 bp, Probe Sequence
tcacccggcggccaaaggccagtga

SEQ ID NO: 296704 - DNA, 25 bp, Probe Sequence
tcaccctcgaggtggagcccagtga

SEQ ID NO: 296705 - DNA, 25 bp, Probe Sequence
tcaccctcgaggtggagcccagtga

SEQ ID NO: 296706 - DNA, 25 bp, Probe Sequence
tcactactcaagaccggaggcacag

SEQ ID NO: 296707 - DNA, 25 bp, Probe Sequence
tcagctactcaggaggctaaggcat

SEQ ID NO: 296708 - DNA, 25 bp, Probe Sequence
tcagctgaccggatgccaactcaga

SEQ ID NO: 296709 - DNA, 25 bp, Probe Sequence
tcagttccaactgcatcaagccaga

SEQ ID NO: 296710 - DNA, 25 bp, Probe Sequence
tcagatttcagagttcaggagccaa

SEQ ID NO: 296711 - DNA, 25 bp, Probe Sequence
tcagagctctgccatttcttgagta

SEQ ID NO: 296712 - DNA, 25 bp, Probe Sequence
tcatgtgccttcaattttggtattt

SEQ ID NO: 296713 - DNA, 25 bp, Probe Sequence
tcatgtgcggctggttttggacagc

SEQ ID NO: 296714 - DNA, 25 bp, Probe Sequence
tcagtgcacgatgctttctggacca

SEQ ID NO: 296715 - DNA, 25 bp, Probe Sequence
tcaggcagcagtgttcatctctggc

SEQ ID NO: 296716 - DNA, 25 bp, Probe Sequence
tcagggcagctggaaatcttctcgc

SEQ ID NO: 296717 - DNA, 25 bp, Probe Sequence
tcatccctctggaagagctgttctg

SEQ ID NO: 296718 - DNA, 25 bp, Probe Sequence
tcatccttctagaaggcgcctgccc

SEQ ID NO: 296719 - DNA, 25 bp, Probe Sequence
tcagagctactaggagggccagccc

SEQ ID NO: 296720 - DNA, 25 bp, Probe Sequence
tcagcctaggggatggcgagccctg

SEQ ID NO: 296721 - DNA, 25 bp, Probe Sequence
tcaccttggggccttgatgactgcc

SEQ ID NO: 296722 - DNA, 25 bp, Probe Sequence
tacgttggtggccaagtaacttggg

SEQ ID NO: 296723 - DNA, 25 bp, Probe Sequence
taccactaggtggatagtaaattta

SEQ ID NO: 296724 - DNA, 25 bp, Probe Sequence
taatcctaagtggaaagactacata

SEQ ID NO: 296725 - DNA, 25 bp, Probe Sequence
tacccttcaatgttaaatctacaaa

SEQ ID NO: 296726 - DNA, 25 bp, Probe Sequence
tcatcccttactcttacagtagcaa

SEQ ID NO: 296727 - DNA, 25 bp, Probe Sequence
tcaggcctatacccttcaaggacag

SEQ ID NO: 296728 - DNA, 25 bp, Probe Sequence
tcaggcatcttactccgtgaaggga

SEQ ID NO: 296729 - DNA, 25 bp, Probe Sequence
tcatgagatgtaatctacctacaga

SEQ ID NO: 296730 - DNA, 25 bp, Probe Sequence
tcatgaatgtggccatggccccggg

SEQ ID NO: 296731 - DNA, 25 bp, Probe Sequence
tcatgaacacagcctgggaccaggg

SEQ ID NO: 296732 - DNA, 25 bp, Probe Sequence
tcatgaacacagcctgggaccaggg

SEQ ID NO: 296733 - DNA, 25 bp, Probe Sequence
tcatgaccatcatcggtggctgagc

SEQ ID NO: 296734 - DNA, 25 bp, Probe Sequence
tcagagcgcagccatcggtgcgctg

SEQ ID NO: 296735 - DNA, 25 bp, Probe Sequence
tcagaggcagcttcaagtgcctttt

SEQ ID NO: 296736 - DNA, 25 bp, Probe Sequence
tcatgggctttcagtgcttttttcc

SEQ ID NO: 296737 - DNA, 25 bp, Probe Sequence
tcaggactttatgctgatatgtttt

SEQ ID NO: 296738 - DNA, 25 bp, Probe Sequence
tcaggatttatatctatacctagca

SEQ ID NO: 296739 - DNA, 25 bp, Probe Sequence
tcatgagcttcctcctaacagtagg

SEQ ID NO: 296740 - DNA, 25 bp, Probe Sequence
tcatgcctgtccagtctacagcaaa

SEQ ID NO: 296741 - DNA, 25 bp, Probe Sequence
tcatccatgctgcctttcaaagcaa

SEQ ID NO: 296742 - DNA, 25 bp, Probe Sequence
tcatgccattggattgctcagaata

SEQ ID NO: 296743 - DNA, 25 bp, Probe Sequence
tcatgctctagtagttcctggcaaa

SEQ ID NO: 296744 - DNA, 25 bp, Probe Sequence
tcagtccaaggatcaccgcaatttt

SEQ ID NO: 296745 - DNA, 25 bp, Probe Sequence
tcagtccaaagagaacctttctgtg

SEQ ID NO: 296746 - DNA, 25 bp, Probe Sequence
tcagcccaaaagcttcttaagctga

SEQ ID NO: 296747 - DNA, 25 bp, Probe Sequence
tcatgcccctaagattttaagtacg

SEQ ID NO: 296748 - DNA, 25 bp, Probe Sequence
tcatcctcgctatcatattcattaa

SEQ ID NO: 296749 - DNA, 25 bp, Probe Sequence
tcatccttccagtcaatgaaggcaa

SEQ ID NO: 296750 - DNA, 25 bp, Probe Sequence
tcagagttccagtcttacaggacat

SEQ ID NO: 296751 - DNA, 25 bp, Probe Sequence
tcaggttcacgtgcttttgagatga

SEQ ID NO: 296752 - DNA, 25 bp, Probe Sequence
tcatgcgttcccgtatatttgtctc

SEQ ID NO: 296753 - DNA, 25 bp, Probe Sequence
tcagaggtccctggagtttctgctt

SEQ ID NO: 296754 - DNA, 25 bp, Probe Sequence
tcagtctctccactgtggtttcagc

SEQ ID NO: 296755 - DNA, 25 bp, Probe Sequence
tcagtcttcaatctgttttgagctt

SEQ ID NO: 296756 - DNA, 25 bp, Probe Sequence
tcatgtttggtgttgagttatttta

SEQ ID NO: 296757 - DNA, 25 bp, Probe Sequence
tcatgtctttatttagttgtttatt

SEQ ID NO: 296758 - DNA, 25 bp, Probe Sequence
tcagtgcctttgttggtagttttta

SEQ ID NO: 296759 - DNA, 25 bp, Probe Sequence
tcatgtgcatctggtgtaggaagtt

SEQ ID NO: 296760 - DNA, 25 bp, Probe Sequence
tcactgcttcgactaaaaggttttt

SEQ ID NO: 296761 - DNA, 25 bp, Probe Sequence
tcatcctatcccttccaaggttggt

SEQ ID NO: 296762 - DNA, 25 bp, Probe Sequence
tcaccttgcccagccaactgggagc

SEQ ID NO: 296763 - DNA, 25 bp, Probe Sequence
tcagcgtgtgcctaccctacgccgg

SEQ ID NO: 296764 - DNA, 25 bp, Probe Sequence
tcagcttgtgccaaacctgacctga

SEQ ID NO: 296765 - DNA, 25 bp, Probe Sequence
tcagcttgtgggtgtggacctgaac

SEQ ID NO: 296766 - DNA, 25 bp, Probe Sequence
tcatgcggagggacaagaccctgaa

SEQ ID NO: 296767 - DNA, 25 bp, Probe Sequence
tcagtgttgggagagatccctgcag

SEQ ID NO: 296768 - DNA, 25 bp, Probe Sequence
tcatgttctgtgtcacgtgaccctg

SEQ ID NO: 296769 - DNA, 25 bp, Probe Sequence
tcatgcgtccgttctggagacttgt

SEQ ID NO: 296770 - DNA, 25 bp, Probe Sequence
tcatggtttcatttagcagacttta

SEQ ID NO: 296771 - DNA, 25 bp, Probe Sequence
tcatgtttttcatttgatactttta

SEQ ID NO: 296772 - DNA, 25 bp, Probe Sequence
tcatgtcttttccatgtgtacctgt

SEQ ID NO: 296773 - DNA, 25 bp, Probe Sequence
tcagtatcatcaaaggttactcttc

SEQ ID NO: 296774 - DNA, 25 bp, Probe Sequence
tcagtatgtgggggcttcatctctt

SEQ ID NO: 296775 - DNA, 25 bp, Probe Sequence
tcagtattatctgacatctttcttt

SEQ ID NO: 296776 - DNA, 25 bp, Probe Sequence
tcagcttctacctgcactttttgta

SEQ ID NO: 296777 - DNA, 25 bp, Probe Sequence
tcagtcctactctgctttggtacat

SEQ ID NO: 296778 - DNA, 25 bp, Probe Sequence
tcagtcctaatctattggagaaaag

SEQ ID NO: 296779 - DNA, 25 bp, Probe Sequence
tcagatctctaatgcattaatgcac

SEQ ID NO: 296780 - DNA, 25 bp, Probe Sequence
tcagtcttcagctctatttatctta

SEQ ID NO: 296781 - DNA, 25 bp, Probe Sequence
tcatgcatttactctattgcttatg

SEQ ID NO: 296782 - DNA, 25 bp, Probe Sequence
tcatgcttctactgtgacacttatc

SEQ ID NO: 296783 - DNA, 25 bp, Probe Sequence
tcagttctagcaggtggcacgatca

SEQ ID NO: 296784 - DNA, 25 bp, Probe Sequence
tcagaacattcagatcgccgacggg

SEQ ID NO: 296785 - DNA, 25 bp, Probe Sequence
tcagacatccttggatcgtccactg

SEQ ID NO: 296786 - DNA, 25 bp, Probe Sequence
tcatgtccacattgagaagtgccct

SEQ ID NO: 296787 - DNA, 25 bp, Probe Sequence
tcatcctgcaagtgatcagccgctc

SEQ ID NO: 296788 - DNA, 25 bp, Probe Sequence
tcatgcctgttatctcagcacactg

SEQ ID NO: 296789 - DNA, 25 bp, Probe Sequence
tcatgcctgaaattccagcaattta

SEQ ID NO: 296790 - DNA, 25 bp, Probe Sequence
tcatccatgagaggacccacacgga

SEQ ID NO: 296791 - DNA, 25 bp, Probe Sequence
tcagcgagctgagatcacaccactg

SEQ ID NO: 296792 - DNA, 25 bp, Probe Sequence
tcagcgagctgagatcacaccactg

SEQ ID NO: 296793 - DNA, 25 bp, Probe Sequence
tcagtagcatctgtcacacgagccc

SEQ ID NO: 296794 - DNA, 25 bp, Probe Sequence
tcagaaatgcatcctccagctgaca

SEQ ID NO: 296795 - DNA, 25 bp, Probe Sequence
tcagaagagtaaacgtgccaagcac

SEQ ID NO: 296796 - DNA, 25 bp, Probe Sequence
tcaggtgttggatccatgtaatcac

SEQ ID NO: 296797 - DNA, 25 bp, Probe Sequence
tcagagagtttgtcaccagttaagc

SEQ ID NO: 296798 - DNA, 25 bp, Probe Sequence
tcagcggtcactgaaagtgcttaca

SEQ ID NO: 296799 - DNA, 25 bp, Probe Sequence
tcaggggactgacaacatcctccag

SEQ ID NO: 296800 - DNA, 25 bp, Probe Sequence
tcagacaaaggagtcaacctcccag

SEQ ID NO: 296801 - DNA, 25 bp, Probe Sequence
tcagacacagctgagtccgacaacc

SEQ ID NO: 296802 - DNA, 25 bp, Probe Sequence
tcagaacactgtgaccttagcccag

SEQ ID NO: 296803 - DNA, 25 bp, Probe Sequence
tatagccggtgaaccctgataccag

SEQ ID NO: 296804 - DNA, 25 bp, Probe Sequence
tagggcaggttatctctgttccagt

SEQ ID NO: 296805 - DNA, 25 bp, Probe Sequence
tcagggaggctaatggttgctttgc

SEQ ID NO: 296806 - DNA, 25 bp, Probe Sequence
tcatgggagactcatgtttttctgt

SEQ ID NO: 296807 - DNA, 25 bp, Probe Sequence
tcatgagtggagtattttcctttgt

SEQ ID NO: 296808 - DNA, 25 bp, Probe Sequence
tcatgatgcatgggtcatttgtctt

SEQ ID NO: 296809 - DNA, 25 bp, Probe Sequence
tcatgatcagcgtcatcgtggttat

SEQ ID NO: 296810 - DNA, 25 bp, Probe Sequence
tcatgaggcagatctggagttgcag

SEQ ID NO: 296811 - DNA, 25 bp, Probe Sequence
tcacgggcaacgacagtctgcacga

SEQ ID NO: 296812 - DNA, 25 bp, Probe Sequence
tcacgggcaacgacagtctgcacga

SEQ ID NO: 296813 - DNA, 25 bp, Probe Sequence
tcagggtgaatggactgctcccgct

SEQ ID NO: 296814 - DNA, 25 bp, Probe Sequence
tcagggtgaatggactgctcccgct

SEQ ID NO: 296815 - DNA, 25 bp, Probe Sequence
tcagggtgaatggactgctcccgct

SEQ ID NO: 296816 - DNA, 25 bp, Probe Sequence
tcagggtcaatgaactcctcgagcc

SEQ ID NO: 296817 - DNA, 25 bp, Probe Sequence
tcagggtttgagaccagcctggcca

SEQ ID NO: 296818 - DNA, 25 bp, Probe Sequence
tcagggtttgagaccagcctggcca

SEQ ID NO: 296819 - DNA, 25 bp, Probe Sequence
tcaggtttatgaaggcgagcgtgcc

SEQ ID NO: 296820 - DNA, 25 bp, Probe Sequence
tcaggtgcccagagatcaggtgtcc

SEQ ID NO: 296821 - DNA, 25 bp, Probe Sequence
tcaggtgtccagggctcaggtgccc

SEQ ID NO: 296822 - DNA, 25 bp, Probe Sequence
tcaggtgtccaggctgacacctccc

SEQ ID NO: 296823 - DNA, 25 bp, Probe Sequence
tcagggtggcatggctcacaacagc

SEQ ID NO: 296824 - DNA, 25 bp, Probe Sequence
tcagggccatgagtgtcacccagac

SEQ ID NO: 296825 - DNA, 25 bp, Probe Sequence
tcatggagactgtcttacgctgaca

SEQ ID NO: 296826 - DNA, 25 bp, Probe Sequence
tcatgaagacagccctcaaggaaga

SEQ ID NO: 296827 - DNA, 25 bp, Probe Sequence
tcagaaaacctccaaagtagatgtg

SEQ ID NO: 296828 - DNA, 25 bp, Probe Sequence
tcagtgaacccaagaaatgtaataa

SEQ ID NO: 296829 - DNA, 25 bp, Probe Sequence
tcagtgacacccggaaatgaggacc

SEQ ID NO: 296830 - DNA, 25 bp, Probe Sequence
tcagtggacccgggtcaagaatacc

SEQ ID NO: 296831 - DNA, 25 bp, Probe Sequence
tcagggtggccggcattcacaagaa

SEQ ID NO: 296832 - DNA, 25 bp, Probe Sequence
tcaggaggatctgcacttcatccac

SEQ ID NO: 296833 - DNA, 25 bp, Probe Sequence
tcagtaggctccaaatttccagtcc

SEQ ID NO: 296834 - DNA, 25 bp, Probe Sequence
tcagaagccgcgatttcaggcgtcc

SEQ ID NO: 296835 - DNA, 25 bp, Probe Sequence
tcagcacggggggcagtaagcgtcc

SEQ ID NO: 296836 - DNA, 25 bp, Probe Sequence
tcagactggtctggcacgttgggat

SEQ ID NO: 296837 - DNA, 25 bp, Probe Sequence
tcagattgctgtccccggggagtta

SEQ ID NO: 296838 - DNA, 25 bp, Probe Sequence
tcagaatgtggcaccagaggactgt

SEQ ID NO: 296839 - DNA, 25 bp, Probe Sequence
tcagaactcgcaatccgagccagct

SEQ ID NO: 296840 - DNA, 25 bp, Probe Sequence
tcagaatcttgattccccatcagcc

SEQ ID NO: 296841 - DNA, 25 bp, Probe Sequence
tcagaagcttaagtgaccatgcagc

SEQ ID NO: 296842 - DNA, 25 bp, Probe Sequence
tcagaatatctatggccacagcagc

SEQ ID NO: 296843 - DNA, 25 bp, Probe Sequence
tcaggttctcaccacatacagatgc

SEQ ID NO: 296844 - DNA, 25 bp, Probe Sequence
tcaggggcagagcactcacgtgcat

SEQ ID NO: 296845 - DNA, 25 bp, Probe Sequence
tcaggggagggtacaccagctcaga

SEQ ID NO: 296846 - DNA, 25 bp, Probe Sequence
tcagcgtgggtgttgaatccagcac

SEQ ID NO: 296847 - DNA, 25 bp, Probe Sequence
tcaggctggcttctgatgttcagtc

SEQ ID NO: 296848 - DNA, 25 bp, Probe Sequence
tcaccaggtgccatatggccatgac

SEQ ID NO: 296849 - DNA, 25 bp, Probe Sequence
ttccatgaggccaatgaagactgca

SEQ ID NO: 296850 - DNA, 25 bp, Probe Sequence
tatgagctgcagcaataaaagtgct

SEQ ID NO: 296851 - DNA, 25 bp, Probe Sequence
tcatgttgatgatatacacaatggc

SEQ ID NO: 296852 - DNA, 25 bp, Probe Sequence
tcagctggctgtgcagaccaagcgc

SEQ ID NO: 296853 - DNA, 25 bp, Probe Sequence
tcagtcctgctcaatcacaaggtgc

SEQ ID NO: 296854 - DNA, 25 bp, Probe Sequence
tcatgtgccctgtatcacagaagat

SEQ ID NO: 296855 - DNA, 25 bp, Probe Sequence
tcagagaccataacacatgaaatat

SEQ ID NO: 296856 - DNA, 25 bp, Probe Sequence
tcaggacctcactcagaaagactaa

SEQ ID NO: 296857 - DNA, 25 bp, Probe Sequence
tcaggccctacatagaacatacagt

SEQ ID NO: 296858 - DNA, 25 bp, Probe Sequence
tcagtagccaaatagatccagcaga

SEQ ID NO: 296859 - DNA, 25 bp, Probe Sequence
tcagaagctcgatagcaacacgtga

SEQ ID NO: 296860 - DNA, 25 bp, Probe Sequence
tcagagagctggtacaacctcctgc

SEQ ID NO: 296861 - DNA, 25 bp, Probe Sequence
tcagcggcaagatgatcacccctga

SEQ ID NO: 296862 - DNA, 25 bp, Probe Sequence
tcagggagcgaatccagccacagac

SEQ ID NO: 296863 - DNA, 25 bp, Probe Sequence
tcagggagcgaatccagccacagac

SEQ ID NO: 296864 - DNA, 25 bp, Probe Sequence
tcagtggttcatcaccagccacaac

SEQ ID NO: 296865 - DNA, 25 bp, Probe Sequence
tcagaggtattgtgacagccaaatg

SEQ ID NO: 296866 - DNA, 25 bp, Probe Sequence
tcaggtgtaccaaaatctcagaatc

SEQ ID NO: 296867 - DNA, 25 bp, Probe Sequence
tcatgtgtgtacttgacaaccaaca

SEQ ID NO: 296868 - DNA, 25 bp, Probe Sequence
tcatgtgtgtacgctgaaagataca

SEQ ID NO: 296869 - DNA, 25 bp, Probe Sequence
tcagctttgagccactgtaagcatg

SEQ ID NO: 296870 - DNA, 25 bp, Probe Sequence
tcagctgttgtgctcattagtttgt

SEQ ID NO: 296871 - DNA, 25 bp, Probe Sequence
tcatgtctatagttcctgagatttt

SEQ ID NO: 296872 - DNA, 25 bp, Probe Sequence
tcatgtcttcactgatgctgctgtt

SEQ ID NO: 296873 - DNA, 25 bp, Probe Sequence
tcatgtcttcactgatgctgctgtt

SEQ ID NO: 296874 - DNA, 25 bp, Probe Sequence
tcatgtacttcattgtgcgctcttt

SEQ ID NO: 296875 - DNA, 25 bp, Probe Sequence
tcatgtgatctcaagtcccttttaa

SEQ ID NO: 296876 - DNA, 25 bp, Probe Sequence
tcatggattgctggaggtcttttaa

SEQ ID NO: 296877 - DNA, 25 bp, Probe Sequence
tcaggcactgtgtaattctattgta

SEQ ID NO: 296878 - DNA, 25 bp, Probe Sequence
tcaggcacggataacagcaaatgga

SEQ ID NO: 296879 - DNA, 25 bp, Probe Sequence
tcagtacggtgatcagcaaggataa

SEQ ID NO: 296880 - DNA, 25 bp, Probe Sequence
tcaggacggagatcccgggagaaaa

SEQ ID NO: 296881 - DNA, 25 bp, Probe Sequence
tcaggacctgactaccctgagggca

SEQ ID NO: 296882 - DNA, 25 bp, Probe Sequence
tcaggacctgactaccctgagggca

SEQ ID NO: 296883 - DNA, 25 bp, Probe Sequence
tcatgaacctaggccaccatgggga

SEQ ID NO: 296884 - DNA, 25 bp, Probe Sequence
tcaaacagaagcagccgtgggcaaa

SEQ ID NO: 296885 - DNA, 25 bp, Probe Sequence
tcaacactgaactgcaactgtggca

SEQ ID NO: 296886 - DNA, 25 bp, Probe Sequence
tcagacacatgatccgcaagaacaa

SEQ ID NO: 296887 - DNA, 25 bp, Probe Sequence
tcagagatcatctacacacatagaa

SEQ ID NO: 296888 - DNA, 25 bp, Probe Sequence
tcaggattcggccactcaggcatga

SEQ ID NO: 296889 - DNA, 25 bp, Probe Sequence
tcagtgcaatccccaatcgagagaa

SEQ ID NO: 296890 - DNA, 25 bp, Probe Sequence
tcacgaaccctggcactggagaatt

SEQ ID NO: 296891 - DNA, 25 bp, Probe Sequence
tcagggcaccttgcacgggaatgca

SEQ ID NO: 296892 - DNA, 25 bp, Probe Sequence
tcatgtgacaccttaccggagtaaa

SEQ ID NO: 296893 - DNA, 25 bp, Probe Sequence
tcagtacatgcctagacctgggctc

SEQ ID NO: 296894 - DNA, 25 bp, Probe Sequence
tcagtacatgcctagacctgggctc

SEQ ID NO: 296895 - DNA, 25 bp, Probe Sequence
tcatgggctgcggaggactgggccc

SEQ ID NO: 296896 - DNA, 25 bp, Probe Sequence
tcaggcagtcaggagggctggcggc

SEQ ID NO: 296897 - DNA, 25 bp, Probe Sequence
tcagccaaccaatgtgtgcgcgggg

SEQ ID NO: 296898 - DNA, 25 bp, Probe Sequence
tcagcctccaaagtggagctgggag

SEQ ID NO: 296899 - DNA, 25 bp, Probe Sequence
tcatgtctgcctcaaattgctggtg

SEQ ID NO: 296900 - DNA, 25 bp, Probe Sequence
tcagatctcaggccattaccaggtg

SEQ ID NO: 296901 - DNA, 25 bp, Probe Sequence
tcactctctggacctactaggtgac

SEQ ID NO: 296902 - DNA, 25 bp, Probe Sequence
tcacgttgcataccttaaatataca

SEQ ID NO: 296903 - DNA, 25 bp, Probe Sequence
tcacgcttgcttccagtaaaaaaaa

SEQ ID NO: 296904 - DNA, 25 bp, Probe Sequence
tcacctgttttggatacaaagccca

SEQ ID NO: 296905 - DNA, 25 bp, Probe Sequence
tcacctggtttgtcctaaggccata

SEQ ID NO: 296906 - DNA, 25 bp, Probe Sequence
tcatggagaccttgaacgaaggccg

SEQ ID NO: 296907 - DNA, 25 bp, Probe Sequence
tcatgtatacctggaggggaccctg

SEQ ID NO: 296908 - DNA, 25 bp, Probe Sequence
tcatggaagcctacgagagcgaccc

SEQ ID NO: 296909 - DNA, 25 bp, Probe Sequence
tcagtgacagccagagaatgcccac

SEQ ID NO: 296910 - DNA, 25 bp, Probe Sequence
tcagctgacagcgtgggcaacgcct

SEQ ID NO: 296911 - DNA, 25 bp, Probe Sequence
tcagcgatcagcattggaactgttg

SEQ ID NO: 296912 - DNA, 25 bp, Probe Sequence
tcagctggctggaggaattggagaa

SEQ ID NO: 296913 - DNA, 25 bp, Probe Sequence
tatctgactccaaggaatggggctc

SEQ ID NO: 296914 - DNA, 25 bp, Probe Sequence
tcactgactctgaggacaaggccct

SEQ ID NO: 296915 - DNA, 25 bp, Probe Sequence
tcagtacatcgagaatccacgcccg

SEQ ID NO: 296916 - DNA, 25 bp, Probe Sequence
tcagtatctcggcacacaacagctc

SEQ ID NO: 296917 - DNA, 25 bp, Probe Sequence
tcagtactcagccggcagcataatg

SEQ ID NO: 296918 - DNA, 25 bp, Probe Sequence
tcagtagcattccgcgagacgttgt

SEQ ID NO: 296919 - DNA, 25 bp, Probe Sequence
tcatgtggaggggccagaggcttgc

SEQ ID NO: 296920 - DNA, 25 bp, Probe Sequence
tcaggagggagcggagcagccattc

SEQ ID NO: 296921 - DNA, 25 bp, Probe Sequence
tcaggagctaagcggagccttcagc

SEQ ID NO: 296922 - DNA, 25 bp, Probe Sequence
tcaggatgctaggggctacttctcc

SEQ ID NO: 296923 - DNA, 25 bp, Probe Sequence
tcatggtgtggctaatctacattta

SEQ ID NO: 296924 - DNA, 25 bp, Probe Sequence
tcaggcttgtaaatctcagcatttt

SEQ ID NO: 296925 - DNA, 25 bp, Probe Sequence
tcacttggctgagactgcgattatt

SEQ ID NO: 296926 - DNA, 25 bp, Probe Sequence
tcagcattggctctacagcgttgca

SEQ ID NO: 296927 - DNA, 25 bp, Probe Sequence
tcagctgtggctctatatgattacc

SEQ ID NO: 296928 - DNA, 25 bp, Probe Sequence
tcagtgaacggaaatgtgatgactc

SEQ ID NO: 296929 - DNA, 25 bp, Probe Sequence
tcaggacacggtgcagcgatgccgg

SEQ ID NO: 296930 - DNA, 25 bp, Probe Sequence
tcaggtgcaggtcagcacgttgctg

SEQ ID NO: 296931 - DNA, 25 bp, Probe Sequence
tcagagtgattttgagtgaccaagg

SEQ ID NO: 296932 - DNA, 25 bp, Probe Sequence
tcacagtgtgtcataggacaggcag

SEQ ID NO: 296933 - DNA, 25 bp, Probe Sequence
tcacagatgctgtgaaggtcgtgga

SEQ ID NO: 296934 - DNA, 25 bp, Probe Sequence
tcagcagagtttgatagtctttcta

SEQ ID NO: 296935 - DNA, 25 bp, Probe Sequence
tcagagcattgtgcaatacagtttc

SEQ ID NO: 296936 - DNA, 25 bp, Probe Sequence
tcaggctgtgtgtataaggtgtatg

SEQ ID NO: 296937 - DNA, 25 bp, Probe Sequence
tcagtggtggaatgagggtggtata

SEQ ID NO: 296938 - DNA, 25 bp, Probe Sequence
tcagatggggcctgggctgttgtgt

SEQ ID NO: 296939 - DNA, 25 bp, Probe Sequence
tcagaggggcctctgtgggtgctgg

SEQ ID NO: 296940 - DNA, 25 bp, Probe Sequence
tcagaggattgccgaagggaggcct

SEQ ID NO: 296941 - DNA, 25 bp, Probe Sequence
tcaggcgatgtgctttatggcaggc

SEQ ID NO: 296942 - DNA, 25 bp, Probe Sequence
tcaggccactgggcatgtatggagg

SEQ ID NO: 296943 - DNA, 25 bp, Probe Sequence
tcagcgccctgggcgctgcctatgg

SEQ ID NO: 296944 - DNA, 25 bp, Probe Sequence
tcaccaatctggactgtactcggga

SEQ ID NO: 296945 - DNA, 25 bp, Probe Sequence
tcagctaacttattctactccgatg

SEQ ID NO: 296946 - DNA, 25 bp, Probe Sequence
tcagcacaagctccagtgcagaccc

SEQ ID NO: 296947 - DNA, 25 bp, Probe Sequence
tcagatgccactggctggcacagcc

SEQ ID NO: 296948 - DNA, 25 bp, Probe Sequence
tcagatcctctgatggccatgctgc

SEQ ID NO: 296949 - DNA, 25 bp, Probe Sequence
tcagatgcctctgctggagctggca

SEQ ID NO: 296950 - DNA, 25 bp, Probe Sequence
tcagagcctgcaagtgctggtctcg

SEQ ID NO: 296951 - DNA, 25 bp, Probe Sequence
tcagaggcatcaaggtggtcgaaga

SEQ ID NO: 296952 - DNA, 25 bp, Probe Sequence
tcagcgagccgacgtgtggggatga

SEQ ID NO: 296953 - DNA, 25 bp, Probe Sequence
tcagcagactcgcccaggagaggaa

SEQ ID NO: 296954 - DNA, 25 bp, Probe Sequence
tcagtacatctataggaagtgaaga

SEQ ID NO: 296955 - DNA, 25 bp, Probe Sequence
tcaggtgacaagtagggcatgtaaa

SEQ ID NO: 296956 - DNA, 25 bp, Probe Sequence
tcagctgggacgagggctgtgccca

SEQ ID NO: 296957 - DNA, 25 bp, Probe Sequence
tcagtaaagccttggtcttctcgac

SEQ ID NO: 296958 - DNA, 25 bp, Probe Sequence
tcagaaaatccttgctcgttccgca

SEQ ID NO: 296959 - DNA, 25 bp, Probe Sequence
tcagctataaactgtacttcctgct

SEQ ID NO: 296960 - DNA, 25 bp, Probe Sequence
tcagccaggcaagaaagcttccttc

SEQ ID NO: 296961 - DNA, 25 bp, Probe Sequence
tcagagccacaagcaaagtttgcac

SEQ ID NO: 296962 - DNA, 25 bp, Probe Sequence
tcaagaacaacataagcatagtgca

SEQ ID NO: 296963 - DNA, 25 bp, Probe Sequence
tcaggaagctgtaccaacaagatgc

SEQ ID NO: 296964 - DNA, 25 bp, Probe Sequence
tcaccaagatcttcagcaacgaggc

SEQ ID NO: 296965 - DNA, 25 bp, Probe Sequence
tcagcaagaacctacagcacagatt

SEQ ID NO: 296966 - DNA, 25 bp, Probe Sequence
tcagaaggactctcaatcactcagc

SEQ ID NO: 296967 - DNA, 25 bp, Probe Sequence
tcacataggagggaacagaccatgg

SEQ ID NO: 296968 - DNA, 25 bp, Probe Sequence
tcaccggagactgcatcagcagcca

SEQ ID NO: 296969 - DNA, 25 bp, Probe Sequence
tcagagctgggacacagcgcaccag

SEQ ID NO: 296970 - DNA, 25 bp, Probe Sequence
tcagaatggcggcagcggagcatcg

SEQ ID NO: 296971 - DNA, 25 bp, Probe Sequence
tcagaatggcggcagcggagcatcg

SEQ ID NO: 296972 - DNA, 25 bp, Probe Sequence
tcagctacgggcaagcgggcagctg

SEQ ID NO: 296973 - DNA, 25 bp, Probe Sequence
tcagcaacgccagcaggcgtcagag

SEQ ID NO: 296974 - DNA, 25 bp, Probe Sequence
tcaagacttactaggcagtctggtg

SEQ ID NO: 296975 - DNA, 25 bp, Probe Sequence
tcacggctctccttaatgactgagt

SEQ ID NO: 296976 - DNA, 25 bp, Probe Sequence
tcagcgccatccattaggcctagca

SEQ ID NO: 296977 - DNA, 25 bp, Probe Sequence
tcagcggatgtcacgagctcgttag

SEQ ID NO: 296978 - DNA, 25 bp, Probe Sequence
tcagttattcttcactgctcttggt

SEQ ID NO: 296979 - DNA, 25 bp, Probe Sequence
tcagtctttattgcgctgcttcgaa

SEQ ID NO: 296980 - DNA, 25 bp, Probe Sequence
tcaggcgtctttgcatttctgcgaa

SEQ ID NO: 296981 - DNA, 25 bp, Probe Sequence
tcagtgcaggtttggatacatctgc

SEQ ID NO: 296982 - DNA, 25 bp, Probe Sequence
tcagcgagtgcttgggatccgcatc

SEQ ID NO: 296983 - DNA, 25 bp, Probe Sequence
tcaggttgtctgaagtcactgcaca

SEQ ID NO: 296984 - DNA, 25 bp, Probe Sequence
tcagtaggtctgaaggcctccattt

SEQ ID NO: 296985 - DNA, 25 bp, Probe Sequence
tcagtaagtgtaaggtgtacttggt

SEQ ID NO: 296986 - DNA, 25 bp, Probe Sequence
tcagcttaggcaaagtttacttgac

SEQ ID NO: 296987 - DNA, 25 bp, Probe Sequence
tcagttttataagttggtttccagc

SEQ ID NO: 296988 - DNA, 25 bp, Probe Sequence
tcagttttataagttggtttccagc

SEQ ID NO: 296989 - DNA, 25 bp, Probe Sequence
tcagtatcttgaaagcgggtcccct

SEQ ID NO: 296990 - DNA, 25 bp, Probe Sequence
tactttggttaggtagctccagcct

SEQ ID NO: 296991 - DNA, 25 bp, Probe Sequence
tcagtttgcagctttgggataccgc

SEQ ID NO: 296992 - DNA, 25 bp, Probe Sequence
tcagaattgttttggtgatacctca

SEQ ID NO: 296993 - DNA, 25 bp, Probe Sequence
tcagatgtgtttaaggagaccctat

SEQ ID NO: 296994 - DNA, 25 bp, Probe Sequence
tcaggtggcatttgcaggtgaccag

SEQ ID NO: 296995 - DNA, 25 bp, Probe Sequence
tcaggtgtgcttttgggactgcatg

SEQ ID NO: 296996 - DNA, 25 bp, Probe Sequence
tcagatatgtctagaattggaagca

SEQ ID NO: 296997 - DNA, 25 bp, Probe Sequence
tcagcatgcagctttactttttcaa

SEQ ID NO: 296998 - DNA, 25 bp, Probe Sequence
tcaggatcatttgctctctttaaga

SEQ ID NO: 296999 - DNA, 25 bp, Probe Sequence
tcaggtcattaaattgtataaccat

SEQ ID NO: 297000 - DNA, 25 bp, Probe Sequence
tcaggtcattcccaagtaaatttat

SEQ ID NO: 297001 - DNA, 25 bp, Probe Sequence
tcagagttccttcattaaatataat

SEQ ID NO: 297002 - DNA, 25 bp, Probe Sequence
tcaggatctcttagcattttaatta

SEQ ID NO: 297003 - DNA, 25 bp, Probe Sequence
tcagagagctctggtctgttgtatc

SEQ ID NO: 297004 - DNA, 25 bp, Probe Sequence
tcagaggctctgacactgtctggtt

SEQ ID NO: 297005 - DNA, 25 bp, Probe Sequence
tcagatggccgttcagggacttcag

SEQ ID NO: 297006 - DNA, 25 bp, Probe Sequence
tcaggaggatgttcatgggagattc

SEQ ID NO: 297007 - DNA, 25 bp, Probe Sequence
tcaggcagctgaggtagagggttgc

SEQ ID NO: 297008 - DNA, 25 bp, Probe Sequence
tcaggcctgacatagcagctctggt

SEQ ID NO: 297009 - DNA, 25 bp, Probe Sequence
tcatggcccacatggcctccaagga

SEQ ID NO: 297010 - DNA, 25 bp, Probe Sequence
tcagcgccacactggtgtctgaaag

SEQ ID NO: 297011 - DNA, 25 bp, Probe Sequence
tcagcgccacactggtgtctgaaag

SEQ ID NO: 297012 - DNA, 25 bp, Probe Sequence
tcagcgccgagtggacttttgcaaa

SEQ ID NO: 297013 - DNA, 25 bp, Probe Sequence
tcagcaacggtttcttcatccagga

SEQ ID NO: 297014 - DNA, 25 bp, Probe Sequence
tcagaacagagatggcttcatcgac

SEQ ID NO: 297015 - DNA, 25 bp, Probe Sequence
tcagagacaaagtcacttgccatgg

SEQ ID NO: 297016 - DNA, 25 bp, Probe Sequence
tcaggctcagaaacacccctgactc

SEQ ID NO: 297017 - DNA, 25 bp, Probe Sequence
tcagtctgaaatgcagctccctgtc

SEQ ID NO: 297018 - DNA, 25 bp, Probe Sequence
tcagtcggaatggcgctcagcagat

SEQ ID NO: 297019 - DNA, 25 bp, Probe Sequence
tcagtaacacatggctgctcacagc

SEQ ID NO: 297020 - DNA, 25 bp, Probe Sequence
tcagctactagaatctgctgccaga

SEQ ID NO: 297021 - DNA, 25 bp, Probe Sequence
tcaggactatgacctcaggcactct

SEQ ID NO: 297022 - DNA, 25 bp, Probe Sequence
tcagtgaggctgtccactggacctg

SEQ ID NO: 297023 - DNA, 25 bp, Probe Sequence
tcaggaggctcagcagcaggacgac

SEQ ID NO: 297024 - DNA, 25 bp, Probe Sequence
tcagcgtgtccatccaggtggagta

SEQ ID NO: 297025 - DNA, 25 bp, Probe Sequence
tcaggcattcctagccgagtgtgac

SEQ ID NO: 297026 - DNA, 25 bp, Probe Sequence
tcacagattcctggtcgggtggctt

SEQ ID NO: 297027 - DNA, 25 bp, Probe Sequence
tcaagtatccggaaccctgtgcatt

SEQ ID NO: 297028 - DNA, 25 bp, Probe Sequence
tcagagtcatccaagagtcctcttg

SEQ ID NO: 297029 - DNA, 25 bp, Probe Sequence
tcagcatgattcttcagaggctctt

SEQ ID NO: 297030 - DNA, 25 bp, Probe Sequence
tcagcatgttcgtgctgctgccatc

SEQ ID NO: 297031 - DNA, 25 bp, Probe Sequence
tcagatcttcggcctgagcgagacg

SEQ ID NO: 297032 - DNA, 25 bp, Probe Sequence
tcagaccttgcaggctgtggagcaa

SEQ ID NO: 297033 - DNA, 25 bp, Probe Sequence
tcagatctcttgctggtgatgtcaa

SEQ ID NO: 297034 - DNA, 25 bp, Probe Sequence
tcagtcatattgcggcatagtgtca

SEQ ID NO: 297035 - DNA, 25 bp, Probe Sequence
tcagatctaggatgtgctagggcaa

SEQ ID NO: 297036 - DNA, 25 bp, Probe Sequence
tcagaatcaagttgtgggtggaaaa

SEQ ID NO: 297037 - DNA, 25 bp, Probe Sequence
tcaactactgcgtatggcgggacaa

SEQ ID NO: 297038 - DNA, 25 bp, Probe Sequence
taatctcagctactcaggaggctaa

SEQ ID NO: 297039 - DNA, 25 bp, Probe Sequence
taaccctaaaggggctagattatct

SEQ ID NO: 297040 - DNA, 25 bp, Probe Sequence
tcagacctctaaaccctgtatttcc

SEQ ID NO: 297041 - DNA, 25 bp, Probe Sequence
tcaaactgctaaaagggttgcttca

SEQ ID NO: 297042 - DNA, 25 bp, Probe Sequence
tcagaccttacctgggttttcaggg

SEQ ID NO: 297043 - DNA, 25 bp, Probe Sequence
tcagctctcgtaactggggctttta

SEQ ID NO: 297044 - DNA, 25 bp, Probe Sequence
tcagtgatctttctgggccttttga

SEQ ID NO: 297045 - DNA, 25 bp, Probe Sequence
tcaccctcttcaagggcttctttga

SEQ ID NO: 297046 - DNA, 25 bp, Probe Sequence
tcaggaccctgaaggtgctcactgt

SEQ ID NO: 297047 - DNA, 25 bp, Probe Sequence
tcagtgtcccagtggtgacatctca

SEQ ID NO: 297048 - DNA, 25 bp, Probe Sequence
tcagttcttctatgaatgaatctgc

SEQ ID NO: 297049 - DNA, 25 bp, Probe Sequence
tcagtcttttactatgagattctaa

SEQ ID NO: 297050 - DNA, 25 bp, Probe Sequence
tcagtcttttactatgagattctaa

SEQ ID NO: 297051 - DNA, 25 bp, Probe Sequence
tcagcattttaacaggtctccatca

SEQ ID NO: 297052 - DNA, 25 bp, Probe Sequence
tcagatgtcaataagaatggttcca

SEQ ID NO: 297053 - DNA, 25 bp, Probe Sequence
tcagacagccatcagaattctccca

SEQ ID NO: 297054 - DNA, 25 bp, Probe Sequence
tcaggagccatatcacatctgtccc

SEQ ID NO: 297055 - DNA, 25 bp, Probe Sequence
tcaggagccatatcacatctgtccc

SEQ ID NO: 297056 - DNA, 25 bp, Probe Sequence
tcaggagccatatcacatctgtccc

SEQ ID NO: 297057 - DNA, 25 bp, Probe Sequence
tcaggaggcaagtcaatctttttta

SEQ ID NO: 297058 - DNA, 25 bp, Probe Sequence
tcagctgagacatgaaactatttga

SEQ ID NO: 297059 - DNA, 25 bp, Probe Sequence
tcagagaacaaggacgctggtgtgg

SEQ ID NO: 297060 - DNA, 25 bp, Probe Sequence
tcagccaaacctgctgcttggtggt

SEQ ID NO: 297061 - DNA, 25 bp, Probe Sequence
tcacaaatacgagtcttgggggccc

SEQ ID NO: 297062 - DNA, 25 bp, Probe Sequence
tcaacaaactgattcttgggaggcc

SEQ ID NO: 297063 - DNA, 25 bp, Probe Sequence
tcagtcgtgacttttctgggggcat

SEQ ID NO: 297064 - DNA, 25 bp, Probe Sequence
tcagtagtgcctttacttcaggctt

SEQ ID NO: 297065 - DNA, 25 bp, Probe Sequence
tcagtgggcctgctattaaatgtgg

SEQ ID NO: 297066 - DNA, 25 bp, Probe Sequence
tcagtggtgcctgcatttataatta

SEQ ID NO: 297067 - DNA, 25 bp, Probe Sequence
tcagcggtatccgaattatgaagtg

SEQ ID NO: 297068 - DNA, 25 bp, Probe Sequence
tcagtggcttcggggtcatggagga

SEQ ID NO: 297069 - DNA, 25 bp, Probe Sequence
tcagagttctaggagtggaagagga

SEQ ID NO: 297070 - DNA, 25 bp, Probe Sequence
tcaggcttctcagctgggaagagag

SEQ ID NO: 297071 - DNA, 25 bp, Probe Sequence
tcagtgcgacctgtgaggatgtgaa

SEQ ID NO: 297072 - DNA, 25 bp, Probe Sequence
tcaggcatgcagggtgatggtgaag

SEQ ID NO: 297073 - DNA, 25 bp, Probe Sequence
tcagccatggcttgaatttgatatg

SEQ ID NO: 297074 - DNA, 25 bp, Probe Sequence
tcagtgggtgtgacatatttcatgg

SEQ ID NO: 297075 - DNA, 25 bp, Probe Sequence
tcagtgactggtatatcttcatcag

SEQ ID NO: 297076 - DNA, 25 bp, Probe Sequence
tcagcatccggcatggacttatcgt

SEQ ID NO: 297077 - DNA, 25 bp, Probe Sequence
tcagctccaggcagtgttctgccga

SEQ ID NO: 297078 - DNA, 25 bp, Probe Sequence
tcagcccagcagaagcattatcttt

SEQ ID NO: 297079 - DNA, 25 bp, Probe Sequence
tcagactcgcagagtttctttcccg

SEQ ID NO: 297080 - DNA, 25 bp, Probe Sequence
tcagcactccataaattctattacc

SEQ ID NO: 297081 - DNA, 25 bp, Probe Sequence
tcagtcttcttccatgtctattagc

SEQ ID NO: 297082 - DNA, 25 bp, Probe Sequence
tcagtttctctttctctaaagcttg

SEQ ID NO: 297083 - DNA, 25 bp, Probe Sequence
tcagtttcactatctccaaagcatt

SEQ ID NO: 297084 - DNA, 25 bp, Probe Sequence
tcagttctgttatactccagccatt

SEQ ID NO: 297085 - DNA, 25 bp, Probe Sequence
tcagattctggttcaaattctgcca

SEQ ID NO: 297086 - DNA, 25 bp, Probe Sequence
tcaaacgtgtatcacttttcaaaaa

SEQ ID NO: 297087 - DNA, 25 bp, Probe Sequence
tcaccacctgggcactattatcaaa

SEQ ID NO: 297088 - DNA, 25 bp, Probe Sequence
tcaccacgccggctaattttgtact

SEQ ID NO: 297089 - DNA, 25 bp, Probe Sequence
tcactctccactaggaaatttttac

SEQ ID NO: 297090 - DNA, 25 bp, Probe Sequence
tcacgtacagcaagccaacttcttt

SEQ ID NO: 297091 - DNA, 25 bp, Probe Sequence
tcagcgtcacacctaaacacagctt

SEQ ID NO: 297092 - DNA, 25 bp, Probe Sequence
tcagcagctcactgctacaagaccc

SEQ ID NO: 297093 - DNA, 25 bp, Probe Sequence
tcacactgcatgcccatatcaaaac

SEQ ID NO: 297094 - DNA, 25 bp, Probe Sequence
tcactcgcatctcctacaagaatga

SEQ ID NO: 297095 - DNA, 25 bp, Probe Sequence
tcagccgcctgcaatcaggtgaata

SEQ ID NO: 297096 - DNA, 25 bp, Probe Sequence
tcaccagccctatgcttcattaagg

SEQ ID NO: 297097 - DNA, 25 bp, Probe Sequence
tcagctactactcacattcatttaa

SEQ ID NO: 297098 - DNA, 25 bp, Probe Sequence
tcagtatccacctcatagctttaca

SEQ ID NO: 297099 - DNA, 25 bp, Probe Sequence
tcagcgtcgacctcatgagttacct

SEQ ID NO: 297100 - DNA, 25 bp, Probe Sequence
tcagcgttgaacactagtatactat

SEQ ID NO: 297101 - DNA, 25 bp, Probe Sequence
tcacgtacatccatcatttgcaact

SEQ ID NO: 297102 - DNA, 25 bp, Probe Sequence
tcagcggagcaggcccaacgattct

SEQ ID NO: 297103 - DNA, 25 bp, Probe Sequence
tcaggagactgagctaaacattatg

SEQ ID NO: 297104 - DNA, 25 bp, Probe Sequence
tcagcccctggggagaacaaatggc

SEQ ID NO: 297105 - DNA, 25 bp, Probe Sequence
tcagcacccgcatcgagaatcagaa

SEQ ID NO: 297106 - DNA, 25 bp, Probe Sequence
tcagcacccgcatcgagaatcagaa

SEQ ID NO: 297107 - DNA, 25 bp, Probe Sequence
tcacatgggccacgcaatcaataat

SEQ ID NO: 297108 - DNA, 25 bp, Probe Sequence
tcactgggctgtccaatggcaatgt

SEQ ID NO: 297109 - DNA, 25 bp, Probe Sequence
tcaccggctgtgtgcgagcagatgt

SEQ ID NO: 297110 - DNA, 25 bp, Probe Sequence
tcacacaggtagcgcccttttattc

SEQ ID NO: 297111 - DNA, 25 bp, Probe Sequence
tcagagtttgagataccttgttttc

SEQ ID NO: 297112 - DNA, 25 bp, Probe Sequence
tcagagtcttgggggcttttttcat

SEQ ID NO: 297113 - DNA, 25 bp, Probe Sequence
tcagaatgcttacgggtgttatttt

SEQ ID NO: 297114 - DNA, 25 bp, Probe Sequence
tcagaagttcaagctaaatattgtt

SEQ ID NO: 297115 - DNA, 25 bp, Probe Sequence
tcagatcagctttgctcctgaaatt

SEQ ID NO: 297116 - DNA, 25 bp, Probe Sequence
tcagatgcaggatccactaattttt

SEQ ID NO: 297117 - DNA, 25 bp, Probe Sequence
tcagatgatctccccttgaatgttt

SEQ ID NO: 297118 - DNA, 25 bp, Probe Sequence
tcagtcaccagctctggaattagat

SEQ ID NO: 297119 - DNA, 25 bp, Probe Sequence
tcagtagccaatttgatcatttgga

SEQ ID NO: 297120 - DNA, 25 bp, Probe Sequence
tcagtcgccaatatgcagctctttg

SEQ ID NO: 297121 - DNA, 25 bp, Probe Sequence
tcactcagccaccctgagttgcttt

SEQ ID NO: 297122 - DNA, 25 bp, Probe Sequence
tcaccacttagcctgtttttttatc

SEQ ID NO: 297123 - DNA, 25 bp, Probe Sequence
tcactactagaccgtttaatttgtt

SEQ ID NO: 297124 - DNA, 25 bp, Probe Sequence
tcactcccagggaatttgaaattga

SEQ ID NO: 297125 - DNA, 25 bp, Probe Sequence
tcagcctccatggagtacttcaaat

SEQ ID NO: 297126 - DNA, 25 bp, Probe Sequence
tcactgcttcatgcctacgtaaggt

SEQ ID NO: 297127 - DNA, 25 bp, Probe Sequence
tcagccatccacgtctaggtatcag

SEQ ID NO: 297128 - DNA, 25 bp, Probe Sequence
tcagtatccacccaaatggcaagtt

SEQ ID NO: 297129 - DNA, 25 bp, Probe Sequence
tcagtccacacgcagcgggcagaga

SEQ ID NO: 297130 - DNA, 25 bp, Probe Sequence
tcagatcacacggcggcttggagaa

SEQ ID NO: 297131 - DNA, 25 bp, Probe Sequence
tcagtatacactgcgctgtgacatg

SEQ ID NO: 297132 - DNA, 25 bp, Probe Sequence
tcagtatgcatagttctctgtaata

SEQ ID NO: 297133 - DNA, 25 bp, Probe Sequence
tcaggatgcaatgtgcatgcctaaa

SEQ ID NO: 297134 - DNA, 25 bp, Probe Sequence
tcactgcagcacactgcttccagaa

SEQ ID NO: 297135 - DNA, 25 bp, Probe Sequence
tcagctggagtttgtccgcattgat

SEQ ID NO: 297136 - DNA, 25 bp, Probe Sequence
tcagccgacttttcccaggatggaa

SEQ ID NO: 297137 - DNA, 25 bp, Probe Sequence
tcagccgacttttcccaggatggaa

SEQ ID NO: 297138 - DNA, 25 bp, Probe Sequence
tcagtgcccctttccatacagggat

SEQ ID NO: 297139 - DNA, 25 bp, Probe Sequence
tcagttccccttggaaaggtgtaga

SEQ ID NO: 297140 - DNA, 25 bp, Probe Sequence
tcagttcccctgtgcagatgggctg

SEQ ID NO: 297141 - DNA, 25 bp, Probe Sequence
tcagaggcccgtgaagatatggctg

SEQ ID NO: 297142 - DNA, 25 bp, Probe Sequence
tcacccaccgtatcaggatcgtgca

SEQ ID NO: 297143 - DNA, 25 bp, Probe Sequence
tcaccatccaaggcatccggtttga

SEQ ID NO: 297144 - DNA, 25 bp, Probe Sequence
tcactaacaaggtcatcatggatta

SEQ ID NO: 297145 - DNA, 25 bp, Probe Sequence
tcagtaaccagtttcatgctgtgtc

SEQ ID NO: 297146 - DNA, 25 bp, Probe Sequence
tcagtgaacaagtttcagcggttca

SEQ ID NO: 297147 - DNA, 25 bp, Probe Sequence
tcagagccaaaatatcagggttgaa

SEQ ID NO: 297148 - DNA, 25 bp, Probe Sequence
tcagagacaccattaatcagtgttt

SEQ ID NO: 297149 - DNA, 25 bp, Probe Sequence
tcagacatgaccataaatagcgtat

SEQ ID NO: 297150 - DNA, 25 bp, Probe Sequence
tcagctctggaaaaacaatctggag

SEQ ID NO: 297151 - DNA, 25 bp, Probe Sequence
tcacctggacaacctcaagggcacc

SEQ ID NO: 297152 - DNA, 25 bp, Probe Sequence
tcacctggacaacctcaagggcacc

SEQ ID NO: 297153 - DNA, 25 bp, Probe Sequence
tcacctggactatctaaccagtcct

SEQ ID NO: 297154 - DNA, 25 bp, Probe Sequence
tcaccttcaccagcaatattcagtc

SEQ ID NO: 297155 - DNA, 25 bp, Probe Sequence
tcaaagcacaactctatttcatgct

SEQ ID NO: 297156 - DNA, 25 bp, Probe Sequence
tcagagatgcacacaccttgcttca

SEQ ID NO: 297157 - DNA, 25 bp, Probe Sequence
tcagcagcagagagccctgggtgac

SEQ ID NO: 297158 - DNA, 25 bp, Probe Sequence
tcagaggcagaacctagtcttgttg

SEQ ID NO: 297159 - DNA, 25 bp, Probe Sequence
tcagaggaagcctgagtgctcactt

SEQ ID NO: 297160 - DNA, 25 bp, Probe Sequence
tcagggatcaccacattgtcgttct

SEQ ID NO: 297161 - DNA, 25 bp, Probe Sequence
tcagggaattattcttttttctgca

SEQ ID NO: 297162 - DNA, 25 bp, Probe Sequence
tcagtaaaatattttctttatctaa

SEQ ID NO: 297163 - DNA, 25 bp, Probe Sequence
tcagacagttatatcctccttttaa

SEQ ID NO: 297164 - DNA, 25 bp, Probe Sequence
tcagccagttgtatccacagcttct

SEQ ID NO: 297165 - DNA, 25 bp, Probe Sequence
tcactgcagattcaggaccagcttg

SEQ ID NO: 297166 - DNA, 25 bp, Probe Sequence
tcacgcaaggcgaagaccagtacta

SEQ ID NO: 297167 - DNA, 25 bp, Probe Sequence
tcagcccagctataaccagtatcag

SEQ ID NO: 297168 - DNA, 25 bp, Probe Sequence
tcagaccatgtatgaagaggcttac

SEQ ID NO: 297169 - DNA, 25 bp, Probe Sequence
tcagtccatattgtatacctataac

SEQ ID NO: 297170 - DNA, 25 bp, Probe Sequence
tcagtgccaaggtgctactcttgca

SEQ ID NO: 297171 - DNA, 25 bp, Probe Sequence
tcagtgcccgtgtggactcacacag

SEQ ID NO: 297172 - DNA, 25 bp, Probe Sequence
tcagcccggacagggtctacatcaa

SEQ ID NO: 297173 - DNA, 25 bp, Probe Sequence
tcaccactgaagggcgtaatgcact

SEQ ID NO: 297174 - DNA, 25 bp, Probe Sequence
tcaccagtgaagagcctatgtgcat

SEQ ID NO: 297175 - DNA, 25 bp, Probe Sequence
taatgctctgaccaagccgagatgc

SEQ ID NO: 297176 - DNA, 25 bp, Probe Sequence
taatgctctgaccaagccgagatgc

SEQ ID NO: 297177 - DNA, 25 bp, Probe Sequence
tcaagattgcagcaacccagcacct

SEQ ID NO: 297178 - DNA, 25 bp, Probe Sequence
tcaatgacggtaatggcccgcctgg

SEQ ID NO: 297179 - DNA, 25 bp, Probe Sequence
tcagagaaagttagttcggctcgat

SEQ ID NO: 297180 - DNA, 25 bp, Probe Sequence
tcagcgtgaaggagttgcggacaat

SEQ ID NO: 297181 - DNA, 25 bp, Probe Sequence
tcaggtgtgggcagttgggcaagca

SEQ ID NO: 297182 - DNA, 25 bp, Probe Sequence
tcagggaggtgccagttacagcagg

SEQ ID NO: 297183 - DNA, 25 bp, Probe Sequence
tcagggagggctggtgcatcccaag

SEQ ID NO: 297184 - DNA, 25 bp, Probe Sequence
tcagaacgtggcagccatccaggag

SEQ ID NO: 297185 - DNA, 25 bp, Probe Sequence
tcagaagctgctagtctgtctccaa

SEQ ID NO: 297186 - DNA, 25 bp, Probe Sequence
tcagcgactttggtctcaccaagga

SEQ ID NO: 297187 - DNA, 25 bp, Probe Sequence
tcacgcaacttggtccaccaaacgc

SEQ ID NO: 297188 - DNA, 25 bp, Probe Sequence
tcaacaactttctcccagaggcagt

SEQ ID NO: 297189 - DNA, 25 bp, Probe Sequence
tcaaaattgtccgcccatgggctga

SEQ ID NO: 297190 - DNA, 25 bp, Probe Sequence
tcaaaattgtccgcccatgggctga

SEQ ID NO: 297191 - DNA, 25 bp, Probe Sequence
tcaaaattgtccgcccatgggctga

SEQ ID NO: 297192 - DNA, 25 bp, Probe Sequence
tcaaaatagtccaccagtgattctg

SEQ ID NO: 297193 - DNA, 25 bp, Probe Sequence
tcaataaagtactgaagcattttcc

SEQ ID NO: 297194 - DNA, 25 bp, Probe Sequence
tcaataaagtttgtacactttccaa

SEQ ID NO: 297195 - DNA, 25 bp, Probe Sequence
tcaataaatgacacccagaccttcc

SEQ ID NO: 297196 - DNA, 25 bp, Probe Sequence
tcagaaacagacaccatctgcacct

SEQ ID NO: 297197 - DNA, 25 bp, Probe Sequence
tcagaaacaaccatcctagcttcct

SEQ ID NO: 297198 - DNA, 25 bp, Probe Sequence
tcagaacaaacaattcctccgtccg

SEQ ID NO: 297199 - DNA, 25 bp, Probe Sequence
taggagtaaattcccgaagtcctgt

SEQ ID NO: 297200 - DNA, 25 bp, Probe Sequence
tagggggaatgcctaggaaccctgt

SEQ ID NO: 297201 - DNA, 25 bp, Probe Sequence
ttccggcaagtgataggaaaccact

SEQ ID NO: 297202 - DNA, 25 bp, Probe Sequence
tcacccgaagatttaagatacacca

SEQ ID NO: 297203 - DNA, 25 bp, Probe Sequence
tcaccgctggaattttgatgaccta

SEQ ID NO: 297204 - DNA, 25 bp, Probe Sequence
tacggcggactaatcttcaactcct

SEQ ID NO: 297205 - DNA, 25 bp, Probe Sequence
taaacgggcaattcaaaactggctg

SEQ ID NO: 297206 - DNA, 25 bp, Probe Sequence
tcaaacgggactttccaaaatgtcg

SEQ ID NO: 297207 - DNA, 25 bp, Probe Sequence
tcaacggggactttccaaaatgtcg

SEQ ID NO: 297208 - DNA, 25 bp, Probe Sequence
tcaactccgtgcttaaccaaagaag

SEQ ID NO: 297209 - DNA, 25 bp, Probe Sequence
taactcgggcccactggaaacagtg

SEQ ID NO: 297210 - DNA, 25 bp, Probe Sequence
tcaaccggagcgaccaccgttaagg

SEQ ID NO: 297211 - DNA, 25 bp, Probe Sequence
tcagagccgggtactcactggatct

SEQ ID NO: 297212 - DNA, 25 bp, Probe Sequence
tcagagagtggaggtctccggccga

SEQ ID NO: 297213 - DNA, 25 bp, Probe Sequence
tcaatggtgaagattacggtaacgg

SEQ ID NO: 297214 - DNA, 25 bp, Probe Sequence
tcaaggtatcatatcccaagtacgc

SEQ ID NO: 297215 - DNA, 25 bp, Probe Sequence
tcagcagcgtaactaccctaaaagc

SEQ ID NO: 297216 - DNA, 25 bp, Probe Sequence
tcagccgggtgttcccagacaaaga

SEQ ID NO: 297217 - DNA, 25 bp, Probe Sequence
tcactattgtttacccaaaggaaat

SEQ ID NO: 297218 - DNA, 25 bp, Probe Sequence
taaatcagcttagcccaaaggggtt

SEQ ID NO: 297219 - DNA, 25 bp, Probe Sequence
taaagtcttccatccaaaaggggca

SEQ ID NO: 297220 - DNA, 25 bp, Probe Sequence
taataggctaccaaccaaaagaagt

SEQ ID NO: 297221 - DNA, 25 bp, Probe Sequence
tcaaaactactaactacaacaactt

SEQ ID NO: 297222 - DNA, 25 bp, Probe Sequence
taggcaattttaaaacagactcctt

SEQ ID NO: 297223 - DNA, 25 bp, Probe Sequence
taggcaattttaaaacagactcctt

SEQ ID NO: 297224 - DNA, 25 bp, Probe Sequence
taggcaattttaaaacagactcctt

SEQ ID NO: 297225 - DNA, 25 bp, Probe Sequence
tcagactgctttaaaaaaaatcctt

SEQ ID NO: 297226 - DNA, 25 bp, Probe Sequence
tcacccttgtcacaaacaatatttc

SEQ ID NO: 297227 - DNA, 25 bp, Probe Sequence
tcaccctgtaccacaaacacattac

SEQ ID NO: 297228 - DNA, 25 bp, Probe Sequence
tcaccagcttacaactcaaaccggg

SEQ ID NO: 297229 - DNA, 25 bp, Probe Sequence
tcagcccagaacaatgctaaagtag

SEQ ID NO: 297230 - DNA, 25 bp, Probe Sequence
tcagtccaaatctttgcaaggctca

SEQ ID NO: 297231 - DNA, 25 bp, Probe Sequence
tcagaccaagaatttgacaactcac

SEQ ID NO: 297232 - DNA, 25 bp, Probe Sequence
tcagaaagggatttacaagtcccca

SEQ ID NO: 297233 - DNA, 25 bp, Probe Sequence
tcacgggggatttccaagtctccac

SEQ ID NO: 297234 - DNA, 25 bp, Probe Sequence
tcacggggaatttccaagtctccac

SEQ ID NO: 297235 - DNA, 25 bp, Probe Sequence
tcacggggatttccaaagtctccac

SEQ ID NO: 297236 - DNA, 25 bp, Probe Sequence
tcacggggatttccaaagtctccac

SEQ ID NO: 297237 - DNA, 25 bp, Probe Sequence
tcaccgggactgtccaaaatgtcgt

SEQ ID NO: 297238 - DNA, 25 bp, Probe Sequence
tcaacgggcaccaggccaagttctt

SEQ ID NO: 297239 - DNA, 25 bp, Probe Sequence
tcaacgggcaccaggccaagttctt

SEQ ID NO: 297240 - DNA, 25 bp, Probe Sequence
tcagcctgggcagtcttaccaaaat

SEQ ID NO: 297241 - DNA, 25 bp, Probe Sequence
tcagtaggagcattttccctacaat

SEQ ID NO: 297242 - DNA, 25 bp, Probe Sequence
tcagaaggcaacattccctgaacat

SEQ ID NO: 297243 - DNA, 25 bp, Probe Sequence
tcacaagggcgaaccacctgaacaa

SEQ ID NO: 297244 - DNA, 25 bp, Probe Sequence
taaagtggaaactcttggaccaaga

SEQ ID NO: 297245 - DNA, 25 bp, Probe Sequence
tactagttatatcaccttgggtaaa

SEQ ID NO: 297246 - DNA, 25 bp, Probe Sequence
tcagcttttctacatttaggtaaaa

SEQ ID NO: 297247 - DNA, 25 bp, Probe Sequence
tcagcggttcttgttgaagttaaaa

SEQ ID NO: 297248 - DNA, 25 bp, Probe Sequence
tcagcgagttctcctgggcatgaaa

SEQ ID NO: 297249 - DNA, 25 bp, Probe Sequence
tcagcttgtgtctttctggagagaa

SEQ ID NO: 297250 - DNA, 25 bp, Probe Sequence
tcactgtgtacaattctgaagacac

SEQ ID NO: 297251 - DNA, 25 bp, Probe Sequence
tcactgttgggctttgaaagcattg

SEQ ID NO: 297252 - DNA, 25 bp, Probe Sequence
tcacgtttatgcttctgaactcggg

SEQ ID NO: 297253 - DNA, 25 bp, Probe Sequence
tcagcagcgggtttggaacatagcg

SEQ ID NO: 297254 - DNA, 25 bp, Probe Sequence
tcacacggcggcttggagaaaccca

SEQ ID NO: 297255 - DNA, 25 bp, Probe Sequence
tcacgcgggcaggggtgggagccct

SEQ ID NO: 297256 - DNA, 25 bp, Probe Sequence
tcaacggccattgagctttgggcct

SEQ ID NO: 297257 - DNA, 25 bp, Probe Sequence
tcaccggctcttggacttacgtgac

SEQ ID NO: 297258 - DNA, 25 bp, Probe Sequence
tcaccccagttcttctgtagggact

SEQ ID NO: 297259 - DNA, 25 bp, Probe Sequence
tcaccaccatgtgttcttggggtcc

SEQ ID NO: 297260 - DNA, 25 bp, Probe Sequence
tcagccacttcttttctctgagtgg

SEQ ID NO: 297261 - DNA, 25 bp, Probe Sequence
tcaccacattgtcgttcttgggctg

SEQ ID NO: 297262 - DNA, 25 bp, Probe Sequence
tcagcccttgatcccatttctgggc

SEQ ID NO: 297263 - DNA, 25 bp, Probe Sequence
tcaccttcgagaacatgattgtgga

SEQ ID NO: 297264 - DNA, 25 bp, Probe Sequence
tagtttcagagtaagatttcaggtg

SEQ ID NO: 297265 - DNA, 25 bp, Probe Sequence
tcacatttatggagattattattgg

SEQ ID NO: 297266 - DNA, 25 bp, Probe Sequence
tcactatgtagcattctgttttagc

SEQ ID NO: 297267 - DNA, 25 bp, Probe Sequence
tcagcttgtatgaattcacgtacca

SEQ ID NO: 297268 - DNA, 25 bp, Probe Sequence
tcagactggagctataccctatccc

SEQ ID NO: 297269 - DNA, 25 bp, Probe Sequence
tcagccatgaggtagtccctgacca

SEQ ID NO: 297270 - DNA, 25 bp, Probe Sequence
tcagcaagagcgggacgcctgtgct

SEQ ID NO: 297271 - DNA, 25 bp, Probe Sequence
tcagcagaggtgggatcccacgccc

SEQ ID NO: 297272 - DNA, 25 bp, Probe Sequence
tcagcagaggtgggatcccacgccc

SEQ ID NO: 297273 - DNA, 25 bp, Probe Sequence
tcagagatgaggggtcctcagctcg

SEQ ID NO: 297274 - DNA, 25 bp, Probe Sequence
tcagcagatgagtgccagtccagcc

SEQ ID NO: 297275 - DNA, 25 bp, Probe Sequence
tcagcagatggaaacagtcttcaac

SEQ ID NO: 297276 - DNA, 25 bp, Probe Sequence
tcagcagttggaaagctctctattc

SEQ ID NO: 297277 - DNA, 25 bp, Probe Sequence
tcagcaagcatgtagtaactcttcc

SEQ ID NO: 297278 - DNA, 25 bp, Probe Sequence
tcagcaacgtcagttggtctcgcac

SEQ ID NO: 297279 - DNA, 25 bp, Probe Sequence
tcagcacagggagaggtccacagac

SEQ ID NO: 297280 - DNA, 25 bp, Probe Sequence
tcactaggtgcagagagcccaggcc

SEQ ID NO: 297281 - DNA, 25 bp, Probe Sequence
tcactatggtatgctggccagcacc

SEQ ID NO: 297282 - DNA, 25 bp, Probe Sequence
tcacctgtgtgagctgctggcacag

SEQ ID NO: 297283 - DNA, 25 bp, Probe Sequence
tcagccgtgtggggtctgcaatggt

SEQ ID NO: 297284 - DNA, 25 bp, Probe Sequence
tcagccctccagtagtagcgtggta

SEQ ID NO: 297285 - DNA, 25 bp, Probe Sequence
tcaccctacagatgagaggtggctg

SEQ ID NO: 297286 - DNA, 25 bp, Probe Sequence
tcaccatgtccctggcagagggctt

SEQ ID NO: 297287 - DNA, 25 bp, Probe Sequence
tcagccagtttctgccagacactga

SEQ ID NO: 297288 - DNA, 25 bp, Probe Sequence
tcagccattttgggcatatgtatct

SEQ ID NO: 297289 - DNA, 25 bp, Probe Sequence
tcagctcttctatagcatcttcttc

SEQ ID NO: 297290 - DNA, 25 bp, Probe Sequence
tcagacttatcaccattcttatgtc

SEQ ID NO: 297291 - DNA, 25 bp, Probe Sequence
tcagactaacagctgatctctcggc

SEQ ID NO: 297292 - DNA, 25 bp, Probe Sequence
tcagatctaaagcctctgcaacaag

SEQ ID NO: 297293 - DNA, 25 bp, Probe Sequence
tcagcagtcacaatgtggtcaaaga

SEQ ID NO: 297294 - DNA, 25 bp, Probe Sequence
tcagcatgctaattgtggtcccaca

SEQ ID NO: 297295 - DNA, 25 bp, Probe Sequence
tcagcaatgaaggaggcatccacca

SEQ ID NO: 297296 - DNA, 25 bp, Probe Sequence
tcagcatacaattacgctccactgt

SEQ ID NO: 297297 - DNA, 25 bp, Probe Sequence
tcagaccactcattgttctactgag

SEQ ID NO: 297298 - DNA, 25 bp, Probe Sequence
tcagtgcgatcaaagttctacgtgc

SEQ ID NO: 297299 - DNA, 25 bp, Probe Sequence
tcagtgctgtcaccgtatttctgtg

SEQ ID NO: 297300 - DNA, 25 bp, Probe Sequence
tcaatgctgtcaggaaacttcaggc

SEQ ID NO: 297301 - DNA, 25 bp, Probe Sequence
tcagctctgtcaagaatggtccagg

SEQ ID NO: 297302 - DNA, 25 bp, Probe Sequence
tcagtcattcatagcactatatcga

SEQ ID NO: 297303 - DNA, 25 bp, Probe Sequence
tcagctttgctccagatcagatcga

SEQ ID NO: 297304 - DNA, 25 bp, Probe Sequence
tcagtttctgcactgctgagacaga

SEQ ID NO: 297305 - DNA, 25 bp, Probe Sequence
tcagaattccagccgctcatctgaa

SEQ ID NO: 297306 - DNA, 25 bp, Probe Sequence
tcagcaattcaatcacatcactagc

SEQ ID NO: 297307 - DNA, 25 bp, Probe Sequence
tcagaactgaataactgcagtgact

SEQ ID NO: 297308 - DNA, 25 bp, Probe Sequence
tcagaacaattgcaccagctccatc

SEQ ID NO: 297309 - DNA, 25 bp, Probe Sequence
tcagaaacattcctttcaccatcat

SEQ ID NO: 297310 - DNA, 25 bp, Probe Sequence
tcagaaggattcctatgtgggcgac

SEQ ID NO: 297311 - DNA, 25 bp, Probe Sequence
tcaccgcaatttttgatggatggca

SEQ ID NO: 297312 - DNA, 25 bp, Probe Sequence
tcaccaaatttttctgaacagcatc

SEQ ID NO: 297313 - DNA, 25 bp, Probe Sequence
tcagctgaagcaatttaccgaagat

SEQ ID NO: 297314 - DNA, 25 bp, Probe Sequence
tcactgaagcttactgagccgaagg

SEQ ID NO: 297315 - DNA, 25 bp, Probe Sequence
tcaccagcaaggctgacctgtcagg

SEQ ID NO: 297316 - DNA, 25 bp, Probe Sequence
tcagacactgagcttgttcttcacg

SEQ ID NO: 297317 - DNA, 25 bp, Probe Sequence
tcagtactcactgtgttttccactt

SEQ ID NO: 297318 - DNA, 25 bp, Probe Sequence
tcagaacacactttttttcctcttt

SEQ ID NO: 297319 - DNA, 25 bp, Probe Sequence
tcagaacacactttttttcctcttt

SEQ ID NO: 297320 - DNA, 25 bp, Probe Sequence
tcagaatcaactcttcttatccgca

SEQ ID NO: 297321 - DNA, 25 bp, Probe Sequence
tcagaccaaacagtgctgtttcccg

SEQ ID NO: 297322 - DNA, 25 bp, Probe Sequence
tcagtctaataagctgctctgcccc

SEQ ID NO: 297323 - DNA, 25 bp, Probe Sequence
tcagcctaagaatggcactcccact

SEQ ID NO: 297324 - DNA, 25 bp, Probe Sequence
tcagcaagaaggagatgccgcccac

SEQ ID NO: 297325 - DNA, 25 bp, Probe Sequence
tcagcatgaaagcattgcatgagta

SEQ ID NO: 297326 - DNA, 25 bp, Probe Sequence
tcagcatgaaagccttcagtcccgt

SEQ ID NO: 297327 - DNA, 25 bp, Probe Sequence
tcagctgaccagcattttccaagcc

SEQ ID NO: 297328 - DNA, 25 bp, Probe Sequence
tcaccatcaagtaatgccccagacc

SEQ ID NO: 297329 - DNA, 25 bp, Probe Sequence
tcaccatcaagtaatgccccagacc

SEQ ID NO: 297330 - DNA, 25 bp, Probe Sequence
tcacgctgaatatatgaccacgctc

SEQ ID NO: 297331 - DNA, 25 bp, Probe Sequence
tcagctggaaagatacgccatcctt

SEQ ID NO: 297332 - DNA, 25 bp, Probe Sequence
tcagcaggagaaattcctctcccca

SEQ ID NO: 297333 - DNA, 25 bp, Probe Sequence
tcactgggaacaacacagccgtcca

SEQ ID NO: 297334 - DNA, 25 bp, Probe Sequence
tcactgtggaatatagacccataat

SEQ ID NO: 297335 - DNA, 25 bp, Probe Sequence
tcagcttgaagaactatgatcccca

SEQ ID NO: 297336 - DNA, 25 bp, Probe Sequence
tcagcatcatgtagacagctatgac

SEQ ID NO: 297337 - DNA, 25 bp, Probe Sequence
tcagcatgctgattgcactgccgac

SEQ ID NO: 297338 - DNA, 25 bp, Probe Sequence
tcagcactgatgtacccaacttata

SEQ ID NO: 297339 - DNA, 25 bp, Probe Sequence
tcagccttgccagcagcaatcattt

SEQ ID NO: 297340 - DNA, 25 bp, Probe Sequence
tcagcctcggatggccaacattcag

SEQ ID NO: 297341 - DNA, 25 bp, Probe Sequence
tcagctgcttggtgtagagttgatg

SEQ ID NO: 297342 - DNA, 25 bp, Probe Sequence
tcagccttggagcatgggctcgtgg

SEQ ID NO: 297343 - DNA, 25 bp, Probe Sequence
tcacgtttaggtggggcgtgccacc

SEQ ID NO: 297344 - DNA, 25 bp, Probe Sequence
tcacgccattactgggggcttcagt

SEQ ID NO: 297345 - DNA, 25 bp, Probe Sequence
tcaccatcttccaggagcgagatcc

SEQ ID NO: 297346 - DNA, 25 bp, Probe Sequence
tcaccatcacccgtgggaaggcgca

SEQ ID NO: 297347 - DNA, 25 bp, Probe Sequence
tcagctaaccctaagctagaggtca

SEQ ID NO: 297348 - DNA, 25 bp, Probe Sequence
taataactccttagctaagttttat

SEQ ID NO: 297349 - DNA, 25 bp, Probe Sequence
tcaagtggctgcgttttttttagtt

SEQ ID NO: 297350 - DNA, 25 bp, Probe Sequence
taatttctccctatgtttatttttg

SEQ ID NO: 297351 - DNA, 25 bp, Probe Sequence
taatttgttctgattttttggtttg

SEQ ID NO: 297352 - DNA, 25 bp, Probe Sequence
tcagatttttctgcttgttcttaat

SEQ ID NO: 297353 - DNA, 25 bp, Probe Sequence
tcagtagatttttgtttggcatcat

SEQ ID NO: 297354 - DNA, 25 bp, Probe Sequence
tcagctagacctagatattgtgccc

SEQ ID NO: 297355 - DNA, 25 bp, Probe Sequence
tcagaaaccgttttgtgcctgctgg

SEQ ID NO: 297356 - DNA, 25 bp, Probe Sequence
tcagacataaagccatgtttcctct

SEQ ID NO: 297357 - DNA, 25 bp, Probe Sequence
tcagcactgaaaccgagtcacctgt

SEQ ID NO: 297358 - DNA, 25 bp, Probe Sequence
tcagcccagaatcccaggtcctggg

SEQ ID NO: 297359 - DNA, 25 bp, Probe Sequence
tcacctgcaaatgccacctgagatg

SEQ ID NO: 297360 - DNA, 25 bp, Probe Sequence
tcacgctgcggcaccatagtggatt

SEQ ID NO: 297361 - DNA, 25 bp, Probe Sequence
tcactgcacggcaccaagtacacat

SEQ ID NO: 297362 - DNA, 25 bp, Probe Sequence
tcactacgtctgccacatcaagaaa

SEQ ID NO: 297363 - DNA, 25 bp, Probe Sequence
tcagctacttagcttcaaatagcaa

SEQ ID NO: 297364 - DNA, 25 bp, Probe Sequence
tcagctacttgaggtcggtaacaga

SEQ ID NO: 297365 - DNA, 25 bp, Probe Sequence
tcaccgcctgcagttcggtagaaga

SEQ ID NO: 297366 - DNA, 25 bp, Probe Sequence
tcacacaggtgaactcggaagacaa

SEQ ID NO: 297367 - DNA, 25 bp, Probe Sequence
tcaccatggatacccttactgagca

SEQ ID NO: 297368 - DNA, 25 bp, Probe Sequence
tcaccagtgacgcgttctagcagac

SEQ ID NO: 297369 - DNA, 25 bp, Probe Sequence
tcaccgcgaggcctattgttgaata

SEQ ID NO: 297370 - DNA, 25 bp, Probe Sequence
tcacccaagcctcttggctgagggt

SEQ ID NO: 297371 - DNA, 25 bp, Probe Sequence
tacccacattccgaagggctgggca

SEQ ID NO: 297372 - DNA, 25 bp, Probe Sequence
tcactgcccattgctaagcgaggtt

SEQ ID NO: 297373 - DNA, 25 bp, Probe Sequence
tcaccccttcacagactgacagaat

SEQ ID NO: 297374 - DNA, 25 bp, Probe Sequence
tcaccactcattttgaccatataga

SEQ ID NO: 297375 - DNA, 25 bp, Probe Sequence
tcaccacctattttcctgatcagtt

SEQ ID NO: 297376 - DNA, 25 bp, Probe Sequence
tcaccactgtaatctccaggggcac

SEQ ID NO: 297377 - DNA, 25 bp, Probe Sequence
tcacgcctgtaatcccagcactttg

SEQ ID NO: 297378 - DNA, 25 bp, Probe Sequence
tcactctctaaatgaccaaagttgg

SEQ ID NO: 297379 - DNA, 25 bp, Probe Sequence
tcactccggaaccaccatgggtggc

SEQ ID NO: 297380 - DNA, 25 bp, Probe Sequence
tcactcacagtgtcactgtcagatg

SEQ ID NO: 297381 - DNA, 25 bp, Probe Sequence
tcactgcatagtccctgctgatgga

SEQ ID NO: 297382 - DNA, 25 bp, Probe Sequence
tcactctctgatttcattgaggatc

SEQ ID NO: 297383 - DNA, 25 bp, Probe Sequence
tcagctcctgaatcaagacttacta

SEQ ID NO: 297384 - DNA, 25 bp, Probe Sequence
tcaccacatgtatcaattcttaaaa

SEQ ID NO: 297385 - DNA, 25 bp, Probe Sequence
tcaccctctaccatctgtaaacaac

SEQ ID NO: 297386 - DNA, 25 bp, Probe Sequence
tcacctgttcaagatttcgataccc

SEQ ID NO: 297387 - DNA, 25 bp, Probe Sequence
tcagccattattacttttggtatcc

SEQ ID NO: 297388 - DNA, 25 bp, Probe Sequence
tcagccttcttgtgcttaggactac

SEQ ID NO: 297389 - DNA, 25 bp, Probe Sequence
tcacctctctagtgtaaccagtcac

SEQ ID NO: 297390 - DNA, 25 bp, Probe Sequence
tcacctcccagatatactacttgca

SEQ ID NO: 297391 - DNA, 25 bp, Probe Sequence
tcacggctactctatatacttttgc

SEQ ID NO: 297392 - DNA, 25 bp, Probe Sequence
tcactagaactgtgtacttgattga

SEQ ID NO: 297393 - DNA, 25 bp, Probe Sequence
tcaccaacacagtagttttgtatta

SEQ ID NO: 297394 - DNA, 25 bp, Probe Sequence
tcactaatatagtatgctcttggta

SEQ ID NO: 297395 - DNA, 25 bp, Probe Sequence
tcagcttaatagtgcctcatcgtac

SEQ ID NO: 297396 - DNA, 25 bp, Probe Sequence
tcagcttcttagtggctacgtgatt

SEQ ID NO: 297397 - DNA, 25 bp, Probe Sequence
tcagctgtcttttggaggacgtacg

SEQ ID NO: 297398 - DNA, 25 bp, Probe Sequence
tcactcatttcttggggtcgtattc

SEQ ID NO: 297399 - DNA, 25 bp, Probe Sequence
tcactgtttccagaagtagctaatg

SEQ ID NO: 297400 - DNA, 25 bp, Probe Sequence
tcactgttcccggaagcacagctaa

SEQ ID NO: 297401 - DNA, 25 bp, Probe Sequence
tcactgccacccagaagactgtgga

SEQ ID NO: 297402 - DNA, 25 bp, Probe Sequence
tcacttgagcccaggagttggaggc

SEQ ID NO: 297403 - DNA, 25 bp, Probe Sequence
tcacctgaggtcaggagttcaagac

SEQ ID NO: 297404 - DNA, 25 bp, Probe Sequence
tcacgcgcaggtgacggccttagat

SEQ ID NO: 297405 - DNA, 25 bp, Probe Sequence
tcacctgatggggacgaggcttgag

SEQ ID NO: 297406 - DNA, 25 bp, Probe Sequence
tcacttctggaagctaggaatgagc

SEQ ID NO: 297407 - DNA, 25 bp, Probe Sequence
tcactttcaggtggccaggaatgtt

SEQ ID NO: 297408 - DNA, 25 bp, Probe Sequence
tcaccttccagtgtgcagaagttag

SEQ ID NO: 297409 - DNA, 25 bp, Probe Sequence
tcaccatttactgtaatgcagtgta

SEQ ID NO: 297410 - DNA, 25 bp, Probe Sequence
tcacctttgctccagatcaacgtta

SEQ ID NO: 297411 - DNA, 25 bp, Probe Sequence
tcagaattctgctgagttatttcta

SEQ ID NO: 297412 - DNA, 25 bp, Probe Sequence
tcagatttatgagacttcttagtca

SEQ ID NO: 297413 - DNA, 25 bp, Probe Sequence
tcagattgtgttttcttcttggata

SEQ ID NO: 297414 - DNA, 25 bp, Probe Sequence
tcagttgtgtttagcacttattaag

SEQ ID NO: 297415 - DNA, 25 bp, Probe Sequence
tcagctgctgttctaacctcagtaa

SEQ ID NO: 297416 - DNA, 25 bp, Probe Sequence
tcacctgttatctactcccagaaat

SEQ ID NO: 297417 - DNA, 25 bp, Probe Sequence
tcagcctgcttatactactgccaga

SEQ ID NO: 297418 - DNA, 25 bp, Probe Sequence
tcaccatcttagactcttctgagga

SEQ ID NO: 297419 - DNA, 25 bp, Probe Sequence
tcagctactcttacctgtgctagag

SEQ ID NO: 297420 - DNA, 25 bp, Probe Sequence
tcagacacactctctgtgcgtatac

SEQ ID NO: 297421 - DNA, 25 bp, Probe Sequence
tcagctacatcctactgtgcgtgta

SEQ ID NO: 297422 - DNA, 25 bp, Probe Sequence
tcaccaatgcagccagctgtgcctg

SEQ ID NO: 297423 - DNA, 25 bp, Probe Sequence
tcagccaagcgtggtggtgcatgcc

SEQ ID NO: 297424 - DNA, 25 bp, Probe Sequence
tcagctgacaatactgtgggccgct

SEQ ID NO: 297425 - DNA, 25 bp, Probe Sequence
tcagcgcgcaagagggcagaccgat

SEQ ID NO: 297426 - DNA, 25 bp, Probe Sequence
tcaccgcacagacaccaaatggatt

SEQ ID NO: 297427 - DNA, 25 bp, Probe Sequence
tcaccagcagaacacctgtaagtat

SEQ ID NO: 297428 - DNA, 25 bp, Probe Sequence
tcacctgacctgcaactcaaaggct

SEQ ID NO: 297429 - DNA, 25 bp, Probe Sequence
tcacctgcacagggtaccaccaggt

SEQ ID NO: 297430 - DNA, 25 bp, Probe Sequence
tcaaatccacgactcaacatcctgg

SEQ ID NO: 297431 - DNA, 25 bp, Probe Sequence
tcagagactacgtccacagacactg

SEQ ID NO: 297432 - DNA, 25 bp, Probe Sequence
tcagcaagagatggtcacatcagaa

SEQ ID NO: 297433 - DNA, 25 bp, Probe Sequence
tcagacagagtggttcatcgacaag

SEQ ID NO: 297434 - DNA, 25 bp, Probe Sequence
tcagacagatgtggttgcatcctaa

SEQ ID NO: 297435 - DNA, 25 bp, Probe Sequence
tcagaaatgtgttatcacccagaag

SEQ ID NO: 297436 - DNA, 25 bp, Probe Sequence
tcacagaagactttaatccgtcaaa

SEQ ID NO: 297437 - DNA, 25 bp, Probe Sequence
tcagcgaagaatgccaacacctcaa

SEQ ID NO: 297438 - DNA, 25 bp, Probe Sequence
tcaccaatgagtttaacatctccac

SEQ ID NO: 297439 - DNA, 25 bp, Probe Sequence
tcaccatcagtgaatttaagcccac

SEQ ID NO: 297440 - DNA, 25 bp, Probe Sequence
tcagaataggtttttcacaccacct

SEQ ID NO: 297441 - DNA, 25 bp, Probe Sequence
tcaactgaggtaaattaaaccctga

SEQ ID NO: 297442 - DNA, 25 bp, Probe Sequence
taaaaggtaacattttccactctca

SEQ ID NO: 297443 - DNA, 25 bp, Probe Sequence
tacgaaggttcccttttatccacat

SEQ ID NO: 297444 - DNA, 25 bp, Probe Sequence
taatggaggtccactttattctcaa

SEQ ID NO: 297445 - DNA, 25 bp, Probe Sequence
tcacgtaagtccacatatacttcta

SEQ ID NO: 297446 - DNA, 25 bp, Probe Sequence
tcagctttaccctctgaacttctga

SEQ ID NO: 297447 - DNA, 25 bp, Probe Sequence
tcagctttaccctctgaacttctga

SEQ ID NO: 297448 - DNA, 25 bp, Probe Sequence
tcagcttctcccataggtagtttaa

SEQ ID NO: 297449 - DNA, 25 bp, Probe Sequence
tcagcttagcccaaaggggttgtga

SEQ ID NO: 297450 - DNA, 25 bp, Probe Sequence
tcagcttagcccagcatgaagagat

SEQ ID NO: 297451 - DNA, 25 bp, Probe Sequence
tcagcttacccttgccaacaataga

SEQ ID NO: 297452 - DNA, 25 bp, Probe Sequence
tcacttattccatttgtacctaaga

SEQ ID NO: 297453 - DNA, 25 bp, Probe Sequence
tcaccttccgattttacccaagtat

SEQ ID NO: 297454 - DNA, 25 bp, Probe Sequence
tacgttgactgttcttattccactg

SEQ ID NO: 297455 - DNA, 25 bp, Probe Sequence
tcactgttactgtcctaagtcgaaa

SEQ ID NO: 297456 - DNA, 25 bp, Probe Sequence
tcacggaatcttttaagtgctgaac

SEQ ID NO: 297457 - DNA, 25 bp, Probe Sequence
tcacgagtattttgtggttgtgaaa

SEQ ID NO: 297458 - DNA, 25 bp, Probe Sequence
tcagcaagcgtcattgtggtttcat

SEQ ID NO: 297459 - DNA, 25 bp, Probe Sequence
tcacaggcactgcatcgggttgtct

SEQ ID NO: 297460 - DNA, 25 bp, Probe Sequence
tcacagtgactcccaaatcctttgg

SEQ ID NO: 297461 - DNA, 25 bp, Probe Sequence
tcagcagggcctctaacctgtgatg

SEQ ID NO: 297462 - DNA, 25 bp, Probe Sequence
tcacaggggccaggaacctagcagt

SEQ ID NO: 297463 - DNA, 25 bp, Probe Sequence
taatgagggatcctgcaagcaaaag

SEQ ID NO: 297464 - DNA, 25 bp, Probe Sequence
taatgagaccccctacgagaaaggt

SEQ ID NO: 297465 - DNA, 25 bp, Probe Sequence
taatataccccctacaaaagcactc

SEQ ID NO: 297466 - DNA, 25 bp, Probe Sequence
tcagaaaccaccgcagaaaccagcc

SEQ ID NO: 297467 - DNA, 25 bp, Probe Sequence
tcacaaaacccgctacagacaagct

SEQ ID NO: 297468 - DNA, 25 bp, Probe Sequence
taataatacctcccttagaagtttg

SEQ ID NO: 297469 - DNA, 25 bp, Probe Sequence
tcacttgtaccccactaaaagtatt

SEQ ID NO: 297470 - DNA, 25 bp, Probe Sequence
tcaccgtacccacatgacacgtgat

SEQ ID NO: 297471 - DNA, 25 bp, Probe Sequence
tcaccggcctcattttacagatgga

SEQ ID NO: 297472 - DNA, 25 bp, Probe Sequence
tcagccaggcctttctgaaggagtt

SEQ ID NO: 297473 - DNA, 25 bp, Probe Sequence
tcagccacgggatcgtggaggttga

SEQ ID NO: 297474 - DNA, 25 bp, Probe Sequence
tcacccggcgcacagtgtgggttgc

SEQ ID NO: 297475 - DNA, 25 bp, Probe Sequence
tcaaccaggccacagaggacgtcta

SEQ ID NO: 297476 - DNA, 25 bp, Probe Sequence
tcaacgggtacaaacgagtcctggc

SEQ ID NO: 297477 - DNA, 25 bp, Probe Sequence
tcaacgggtacaaacgagtcctggc

SEQ ID NO: 297478 - DNA, 25 bp, Probe Sequence
taacggtgtgactcacggggatttc

SEQ ID NO: 297479 - DNA, 25 bp, Probe Sequence
tcaagattctgtctaaaggggtttt

SEQ ID NO: 297480 - DNA, 25 bp, Probe Sequence
tcaacgtcgggtcacatgggaatgt

SEQ ID NO: 297481 - DNA, 25 bp, Probe Sequence
tcaccaatcatcgggaacagggaat

SEQ ID NO: 297482 - DNA, 25 bp, Probe Sequence
tcaccaactgggacgacatggagaa

SEQ ID NO: 297483 - DNA, 25 bp, Probe Sequence
tcaccagactgggaattcaagtaca

SEQ ID NO: 297484 - DNA, 25 bp, Probe Sequence
tcaccagagtgacaacttcagccct

SEQ ID NO: 297485 - DNA, 25 bp, Probe Sequence
tcaccgatgcttgaacattcctgcc

SEQ ID NO: 297486 - DNA, 25 bp, Probe Sequence
tcaccaggccatgaagcgagctctg

SEQ ID NO: 297487 - DNA, 25 bp, Probe Sequence
tcaccaagcacttccaggactgacc

SEQ ID NO: 297488 - DNA, 25 bp, Probe Sequence
tcacctcgctcttctcagaagtgac

SEQ ID NO: 297489 - DNA, 25 bp, Probe Sequence
tcagcctatggtttgcagaggggca

SEQ ID NO: 297490 - DNA, 25 bp, Probe Sequence
tcagctgcttgggaggctgaggcag

SEQ ID NO: 297491 - DNA, 25 bp, Probe Sequence
tcagctggtgggccgagaggcagga

SEQ ID NO: 297492 - DNA, 25 bp, Probe Sequence
tcagctcctgcagctctgaagtggt

SEQ ID NO: 297493 - DNA, 25 bp, Probe Sequence
tcagccactgcccaaaaaggatccc

SEQ ID NO: 297494 - DNA, 25 bp, Probe Sequence
tcacgcccggagtagaagcgcatac

SEQ ID NO: 297495 - DNA, 25 bp, Probe Sequence
tcacgccctaataaggagcgaatcc

SEQ ID NO: 297496 - DNA, 25 bp, Probe Sequence
tcacccacagcaatgagaagcacga

SEQ ID NO: 297497 - DNA, 25 bp, Probe Sequence
tcagctgtccagaaagcaaggcaaa

SEQ ID NO: 297498 - DNA, 25 bp, Probe Sequence
tcagcagtccacaaagcattttcat

SEQ ID NO: 297499 - DNA, 25 bp, Probe Sequence
tcagcatatccaaaactccccatgg

SEQ ID NO: 297500 - DNA, 25 bp, Probe Sequence
tcagcacatccaaaaacaccaagac

SEQ ID NO: 297501 - DNA, 25 bp, Probe Sequence
tcagaacccttttcaacacagtgcc

SEQ ID NO: 297502 - DNA, 25 bp, Probe Sequence
tcagcttgccctgttaaaagatgaa

SEQ ID NO: 297503 - DNA, 25 bp, Probe Sequence
tcactgtgccttatgcattaaaatt

SEQ ID NO: 297504 - DNA, 25 bp, Probe Sequence
tcactgttcattttgcctttgttct

SEQ ID NO: 297505 - DNA, 25 bp, Probe Sequence
tcacagtgtcttaagcacagaagtc

SEQ ID NO: 297506 - DNA, 25 bp, Probe Sequence
tcagctgtggctttcagaagaatgg

SEQ ID NO: 297507 - DNA, 25 bp, Probe Sequence
tcagctgctggtggatcagatatac

SEQ ID NO: 297508 - DNA, 25 bp, Probe Sequence
tcagcagctggtaatcttgctctgc

SEQ ID NO: 297509 - DNA, 25 bp, Probe Sequence
tcagcatcccagactctctgctgat

SEQ ID NO: 297510 - DNA, 25 bp, Probe Sequence
tcagccagccatgctgagcatctga

SEQ ID NO: 297511 - DNA, 25 bp, Probe Sequence
tcagctctgccaagctgagcctggc

SEQ ID NO: 297512 - DNA, 25 bp, Probe Sequence
tcagcatcttgctaggaggcatgga

SEQ ID NO: 297513 - DNA, 25 bp, Probe Sequence
tcactcttcaggcagcgtagaaaac

SEQ ID NO: 297514 - DNA, 25 bp, Probe Sequence
tcaacctctggggcgtccaataaca

SEQ ID NO: 297515 - DNA, 25 bp, Probe Sequence
tcaaccattgggaccatatcaccaa

SEQ ID NO: 297516 - DNA, 25 bp, Probe Sequence
tcacccatgggtgctgcaccccaga

SEQ ID NO: 297517 - DNA, 25 bp, Probe Sequence
tcactcctggcggcaaaccaaacaa

SEQ ID NO: 297518 - DNA, 25 bp, Probe Sequence
tcactcctggcggcaaaccaaacaa

SEQ ID NO: 297519 - DNA, 25 bp, Probe Sequence
tcaccctgtggaaaaccgatggaca

SEQ ID NO: 297520 - DNA, 25 bp, Probe Sequence
tcaccacctggctgaacccaggtcc

SEQ ID NO: 297521 - DNA, 25 bp, Probe Sequence
tcactccctgactgtagctgtaggt

SEQ ID NO: 297522 - DNA, 25 bp, Probe Sequence
tcaccaggtgaacgctcagcgctgg

SEQ ID NO: 297523 - DNA, 25 bp, Probe Sequence
tcaccagcagtgcaggcattcggca

SEQ ID NO: 297524 - DNA, 25 bp, Probe Sequence
tcagctgccagcaaagccaaggtgc

SEQ ID NO: 297525 - DNA, 25 bp, Probe Sequence
tcacgctcacagtagccatagctga

SEQ ID NO: 297526 - DNA, 25 bp, Probe Sequence
tcagcagcatccagggcaagatgag

SEQ ID NO: 297527 - DNA, 25 bp, Probe Sequence
actacccaaggtgctatgcttacat

SEQ ID NO: 297528 - DNA, 25 bp, Probe Sequence
tcagcctcccgagtagctgggacta

SEQ ID NO: 297529 - DNA, 25 bp, Probe Sequence
tcagcctcccgagtagctgggacta

SEQ ID NO: 297530 - DNA, 25 bp, Probe Sequence
tcagcctcccgagtagctgggacta

SEQ ID NO: 297531 - DNA, 25 bp, Probe Sequence
tcagcctcccgagtagctgggacta

SEQ ID NO: 297532 - DNA, 25 bp, Probe Sequence
tcagcctcccgagtagctaggacta

SEQ ID NO: 297533 - DNA, 25 bp, Probe Sequence
tcagcagcccctgtggctagaggaa

SEQ ID NO: 297534 - DNA, 25 bp, Probe Sequence
tcagcagcccctgtggctagaggaa

SEQ ID NO: 297535 - DNA, 25 bp, Probe Sequence
tcaccacctctggtgttcagagggg

SEQ ID NO: 297536 - DNA, 25 bp, Probe Sequence
tcacctcccagactgttgctaggat

SEQ ID NO: 297537 - DNA, 25 bp, Probe Sequence
tcagcctcccaacgtgctgggatta

SEQ ID NO: 297538 - DNA, 25 bp, Probe Sequence
tcagcctcccacagtgctgggatta

SEQ ID NO: 297539 - DNA, 25 bp, Probe Sequence
tcacccctgagcaggctgcagagag

SEQ ID NO: 297540 - DNA, 25 bp, Probe Sequence
tcaccgccgactcgcggaagagtca

SEQ ID NO: 297541 - DNA, 25 bp, Probe Sequence
tcaccccagagccctagagggtcag

SEQ ID NO: 297542 - DNA, 25 bp, Probe Sequence
tcacccagaattgcttgaagggctg

SEQ ID NO: 297543 - DNA, 25 bp, Probe Sequence
tcacacccatttgttgaagacctaa

SEQ ID NO: 297544 - DNA, 25 bp, Probe Sequence
tcactgcggcttatacagtacccta

SEQ ID NO: 297545 - DNA, 25 bp, Probe Sequence
tcactccctgtcatagttaccgatg

SEQ ID NO: 297546 - DNA, 25 bp, Probe Sequence
tcaccccttgctgggtagagcctag

SEQ ID NO: 297547 - DNA, 25 bp, Probe Sequence
tcagacacccttggggatggcactc

SEQ ID NO: 297548 - DNA, 25 bp, Probe Sequence
tcacacaaacttggtggtcctgcac

SEQ ID NO: 297549 - DNA, 25 bp, Probe Sequence
tcacagcaaacctgagcagcgcgtc

SEQ ID NO: 297550 - DNA, 25 bp, Probe Sequence
tcagcagcactagttggacagggga

SEQ ID NO: 297551 - DNA, 25 bp, Probe Sequence
tcagcaccatcctggaaggttatta

SEQ ID NO: 297552 - DNA, 25 bp, Probe Sequence
tcagccctcaaagaatggggtctgt

SEQ ID NO: 297553 - DNA, 25 bp, Probe Sequence
tcagctttgaaagaagttggcgtgg

SEQ ID NO: 297554 - DNA, 25 bp, Probe Sequence
tcagctcttaaagcaacctgtcagt

SEQ ID NO: 297555 - DNA, 25 bp, Probe Sequence
tcagctcctaaagcacaactgtgtg

SEQ ID NO: 297556 - DNA, 25 bp, Probe Sequence
tcagcatcagcaaaaattacagtgg

SEQ ID NO: 297557 - DNA, 25 bp, Probe Sequence
taatcacaaagctttatcgtgttgt

SEQ ID NO: 297558 - DNA, 25 bp, Probe Sequence
tagtccatgtacttaaaggttgcat

SEQ ID NO: 297559 - DNA, 25 bp, Probe Sequence
tcaaactaacgaaaaggcctgcatg

SEQ ID NO: 297560 - DNA, 25 bp, Probe Sequence
tcagaaccacggtacaagcacctct

SEQ ID NO: 297561 - DNA, 25 bp, Probe Sequence
tcagccactcacttataaagatact

SEQ ID NO: 297562 - DNA, 25 bp, Probe Sequence
tcagccttcagattgtatgagaaaa

SEQ ID NO: 297563 - DNA, 25 bp, Probe Sequence
tcagccttctgaatagctggaacaa

SEQ ID NO: 297564 - DNA, 25 bp, Probe Sequence
tcagcctcctgagtcgctgggatta

SEQ ID NO: 297565 - DNA, 25 bp, Probe Sequence
tcagcttcctgagtgtttggactac

SEQ ID NO: 297566 - DNA, 25 bp, Probe Sequence
tcagctctcctgctgtgatgtggaa

SEQ ID NO: 297567 - DNA, 25 bp, Probe Sequence
tcacttcatcgtttgactggacagt

SEQ ID NO: 297568 - DNA, 25 bp, Probe Sequence
tcacgtacctgaagcacgactctgt

SEQ ID NO: 297569 - DNA, 25 bp, Probe Sequence
tcagcctccttgtgcaaactgggcc

SEQ ID NO: 297570 - DNA, 25 bp, Probe Sequence
tcagccaccttgatagtcactgggc

SEQ ID NO: 297571 - DNA, 25 bp, Probe Sequence
tcaccacccgcaagcaggcagtggg

SEQ ID NO: 297572 - DNA, 25 bp, Probe Sequence
tcacaaccatcctggtcattctcga

SEQ ID NO: 297573 - DNA, 25 bp, Probe Sequence
tcacagatctgatcaaggaccccga

SEQ ID NO: 297574 - DNA, 25 bp, Probe Sequence
tcacgcactatcgatagggcaccgc

SEQ ID NO: 297575 - DNA, 25 bp, Probe Sequence
tcagcgcccgtgaagggcactggct

SEQ ID NO: 297576 - DNA, 25 bp, Probe Sequence
tcagaaccggtacctggatggcatg

SEQ ID NO: 297577 - DNA, 25 bp, Probe Sequence
tacaacgggtggcaggttctggacc

SEQ ID NO: 297578 - DNA, 25 bp, Probe Sequence
tcagaagtagggaccgctttcttac

SEQ ID NO: 297579 - DNA, 25 bp, Probe Sequence
tcaaagggagcggccaggtgtttac

SEQ ID NO: 297580 - DNA, 25 bp, Probe Sequence
tcaacagggaggctaagtgtggtac

SEQ ID NO: 297581 - DNA, 25 bp, Probe Sequence
tcaccaaggcagcgcatgtatgttg

SEQ ID NO: 297582 - DNA, 25 bp, Probe Sequence
tcacagcaagaacagtccatgttgt

SEQ ID NO: 297583 - DNA, 25 bp, Probe Sequence
tcaccaaataaacttgctctctggg

SEQ ID NO: 297584 - DNA, 25 bp, Probe Sequence
tcagcacatatataacgtctctctc

SEQ ID NO: 297585 - DNA, 25 bp, Probe Sequence
tcagcataaataagagttctctctc

SEQ ID NO: 297586 - DNA, 25 bp, Probe Sequence
tcagctgactaatggactgtcccca

SEQ ID NO: 297587 - DNA, 25 bp, Probe Sequence
tcagcagagcttcagaggtggcccc

SEQ ID NO: 297588 - DNA, 25 bp, Probe Sequence
tcagctgattggcagcaggctccct

SEQ ID NO: 297589 - DNA, 25 bp, Probe Sequence
tcacatgctcttcatggtgcatccc

SEQ ID NO: 297590 - DNA, 25 bp, Probe Sequence
tcagctgggcatcctggtgcatgcc

SEQ ID NO: 297591 - DNA, 25 bp, Probe Sequence
tcagcatgatggaccggtgatggcg

SEQ ID NO: 297592 - DNA, 25 bp, Probe Sequence
tcagctgttgtagaggatgtggcct

SEQ ID NO: 297593 - DNA, 25 bp, Probe Sequence
tcagcttatcaagaggatggccaat

SEQ ID NO: 297594 - DNA, 25 bp, Probe Sequence
tcagctgttaatgctgggatccata

SEQ ID NO: 297595 - DNA, 25 bp, Probe Sequence
tcagcagtgaactctggtgtctcaa

SEQ ID NO: 297596 - DNA, 25 bp, Probe Sequence
tcagcaggaagccatcgaccttcaa

SEQ ID NO: 297597 - DNA, 25 bp, Probe Sequence
tcagcaaatacctggcaattaatcc

SEQ ID NO: 297598 - DNA, 25 bp, Probe Sequence
tcaccagaacaaaacagattttctc

SEQ ID NO: 297599 - DNA, 25 bp, Probe Sequence
tcacaagaaccttataactttcaca

SEQ ID NO: 297600 - DNA, 25 bp, Probe Sequence
tcacaagaaacctataacttcacac

SEQ ID NO: 297601 - DNA, 25 bp, Probe Sequence
tcactagcaacctcaaacagacacc

SEQ ID NO: 297602 - DNA, 25 bp, Probe Sequence
tcagctaaagctgccacagaagagg

SEQ ID NO: 297603 - DNA, 25 bp, Probe Sequence
tcagcaagaagttcggagacatgag

SEQ ID NO: 297604 - DNA, 25 bp, Probe Sequence
tcagcaagaatttcccagcctgcag

SEQ ID NO: 297605 - DNA, 25 bp, Probe Sequence
tcacacgcgattgcgcaatgccata

SEQ ID NO: 297606 - DNA, 25 bp, Probe Sequence
tcacccatgagctccaagccatgaa

SEQ ID NO: 297607 - DNA, 25 bp, Probe Sequence
tcagccgtgaattccacagccatga

SEQ ID NO: 297608 - DNA, 25 bp, Probe Sequence
tcacaggctgatttccacaggcttc

SEQ ID NO: 297609 - DNA, 25 bp, Probe Sequence
tcagccgcaagctcgatcgacttgc

SEQ ID NO: 297610 - DNA, 25 bp, Probe Sequence
tcacccagagagccagacacacggc

SEQ ID NO: 297611 - DNA, 25 bp, Probe Sequence
tcacctcgtacaggccatcatcgag

SEQ ID NO: 297612 - DNA, 25 bp, Probe Sequence
tcacaccgtacatcacaatgaagtg

SEQ ID NO: 297613 - DNA, 25 bp, Probe Sequence
tcacctcgctcgcaagtatcaagaa

SEQ ID NO: 297614 - DNA, 25 bp, Probe Sequence
tcaccttgcctctcaggcacaataa

SEQ ID NO: 297615 - DNA, 25 bp, Probe Sequence
tcacctggctttcagagctactagg

SEQ ID NO: 297616 - DNA, 25 bp, Probe Sequence
tcaccagttaagcaggctcctcgga

SEQ ID NO: 297617 - DNA, 25 bp, Probe Sequence
tcaccagttaatctttctccaatga

SEQ ID NO: 297618 - DNA, 25 bp, Probe Sequence
tcactgcaggtaatgcctttccctt

SEQ ID NO: 297619 - DNA, 25 bp, Probe Sequence
tcagctgaggtttgcacttcctctc

SEQ ID NO: 297620 - DNA, 25 bp, Probe Sequence
tcaccagtctgatgagtctcaccat

SEQ ID NO: 297621 - DNA, 25 bp, Probe Sequence
tcaccacatgcttggaccatgcaaa

SEQ ID NO: 297622 - DNA, 25 bp, Probe Sequence
tcaccacctcatcacaatcaaattt

SEQ ID NO: 297623 - DNA, 25 bp, Probe Sequence
tcagccacagcttctctattaaatt

SEQ ID NO: 297624 - DNA, 25 bp, Probe Sequence
tcagcacttgtctcattttaatgta

SEQ ID NO: 297625 - DNA, 25 bp, Probe Sequence
tcactttgttacttgtttctgtccc

SEQ ID NO: 297626 - DNA, 25 bp, Probe Sequence
tcactttgttacttgtttctgtccc

SEQ ID NO: 297627 - DNA, 25 bp, Probe Sequence
tcactttgggctgtgggtttcagct

SEQ ID NO: 297628 - DNA, 25 bp, Probe Sequence
tcacgttcgtcaagtccgttatcca

SEQ ID NO: 297629 - DNA, 25 bp, Probe Sequence
tcactgcactggtaaggccgttcac

SEQ ID NO: 297630 - DNA, 25 bp, Probe Sequence
tcaccactgctaagggactctatcc

SEQ ID NO: 297631 - DNA, 25 bp, Probe Sequence
tcaccatgctcttctaggagacttt

SEQ ID NO: 297632 - DNA, 25 bp, Probe Sequence
tcagctttatcctggcagcagcttt

SEQ ID NO: 297633 - DNA, 25 bp, Probe Sequence
tcacttattcgatggacacagctat

SEQ ID NO: 297634 - DNA, 25 bp, Probe Sequence
tcactcttttccaggacagcaattg

SEQ ID NO: 297635 - DNA, 25 bp, Probe Sequence
tcacccttttttattgcagttggtt

SEQ ID NO: 297636 - DNA, 25 bp, Probe Sequence
taccttttacttcttaaatggtgct

SEQ ID NO: 297637 - DNA, 25 bp, Probe Sequence
taccttttacttcttaaatggtgct

SEQ ID NO: 297638 - DNA, 25 bp, Probe Sequence
tcaccttagggtggctttaattgta

SEQ ID NO: 297639 - DNA, 25 bp, Probe Sequence
tcaccactacggaacttattcacgt

SEQ ID NO: 297640 - DNA, 25 bp, Probe Sequence
tcaccttcgttgaatcttaaatagt

SEQ ID NO: 297641 - DNA, 25 bp, Probe Sequence
tcacctgtttggattctatattagt

SEQ ID NO: 297642 - DNA, 25 bp, Probe Sequence
tcacctcattcttcatttcagatct

SEQ ID NO: 297643 - DNA, 25 bp, Probe Sequence
tcagcgacttttattgcagatgtct

SEQ ID NO: 297644 - DNA, 25 bp, Probe Sequence
tcacgtggattttgcttggatcttg

SEQ ID NO: 297645 - DNA, 25 bp, Probe Sequence
tcactgatgctgagccagtttgtat

SEQ ID NO: 297646 - DNA, 25 bp, Probe Sequence
tcagctgattcttgacagatttagt

SEQ ID NO: 297647 - DNA, 25 bp, Probe Sequence
tcagcttcccagacagactatagac

SEQ ID NO: 297648 - DNA, 25 bp, Probe Sequence
tcagcttcccagacagactatagac

SEQ ID NO: 297649 - DNA, 25 bp, Probe Sequence
tcagcttaactgacagatgttaaag

SEQ ID NO: 297650 - DNA, 25 bp, Probe Sequence
tcacccaacatgaatattatgaaga

SEQ ID NO: 297651 - DNA, 25 bp, Probe Sequence
tcacctccgagttcattcatgacat

SEQ ID NO: 297652 - DNA, 25 bp, Probe Sequence
tcacctgccagactggcttatcaag

SEQ ID NO: 297653 - DNA, 25 bp, Probe Sequence
tcacctgaagaacctctatgagggg

SEQ ID NO: 297654 - DNA, 25 bp, Probe Sequence
tcaccatataaacttgcatttgagc

SEQ ID NO: 297655 - DNA, 25 bp, Probe Sequence
tcagctgcatgatgaagttcactgt

SEQ ID NO: 297656 - DNA, 25 bp, Probe Sequence
tcagctctgaaacatcacacatcta

SEQ ID NO: 297657 - DNA, 25 bp, Probe Sequence
tcagcttgcaaattctatcctctaa

SEQ ID NO: 297658 - DNA, 25 bp, Probe Sequence
tcagcatctccaattttcagcagct

SEQ ID NO: 297659 - DNA, 25 bp, Probe Sequence
tcagccctcaagatctacagctcaa

SEQ ID NO: 297660 - DNA, 25 bp, Probe Sequence
tcacttccatacatctacacaggac

SEQ ID NO: 297661 - DNA, 25 bp, Probe Sequence
tcagctgatcgcccgtgtagaaggc

SEQ ID NO: 297662 - DNA, 25 bp, Probe Sequence
tcagcagtcatgcacgctgataaaa

SEQ ID NO: 297663 - DNA, 25 bp, Probe Sequence
tcagcattctgaccgtgaacaatga

SEQ ID NO: 297664 - DNA, 25 bp, Probe Sequence
tcagcattgtagtctgtgcaaagca

SEQ ID NO: 297665 - DNA, 25 bp, Probe Sequence
tcagcaggtcactgctacaagcccc

SEQ ID NO: 297666 - DNA, 25 bp, Probe Sequence
tcagcaggccactgctacaagtccc

SEQ ID NO: 297667 - DNA, 25 bp, Probe Sequence
tcacagtgtcactgtcagatggtct

SEQ ID NO: 297668 - DNA, 25 bp, Probe Sequence
tcacagttgccatgtagaccccttg

SEQ ID NO: 297669 - DNA, 25 bp, Probe Sequence
tcaccttcaatgttaccaccgttga

SEQ ID NO: 297670 - DNA, 25 bp, Probe Sequence
tactttaagtttgcacccttgaaat

SEQ ID NO: 297671 - DNA, 25 bp, Probe Sequence
tcagctttaagatgttacccttcca

SEQ ID NO: 297672 - DNA, 25 bp, Probe Sequence
tagtttaaaaatctgccacctgcac

SEQ ID NO: 297673 - DNA, 25 bp, Probe Sequence
tagtttctaacatttgcccaggacc

SEQ ID NO: 297674 - DNA, 25 bp, Probe Sequence
tagcttactaactgggcaaacctcc

SEQ ID NO: 297675 - DNA, 25 bp, Probe Sequence
taaggcctgaactgggaaacccagg

SEQ ID NO: 297676 - DNA, 25 bp, Probe Sequence
taaggcctgtggggggtaatccctg

SEQ ID NO: 297677 - DNA, 25 bp, Probe Sequence
tcaagttttggggtaaagacacctg

SEQ ID NO: 297678 - DNA, 25 bp, Probe Sequence
tcactcctttaacaaaaaccttgct

SEQ ID NO: 297679 - DNA, 25 bp, Probe Sequence
tcacccttttgatagaaatacctca

SEQ ID NO: 297680 - DNA, 25 bp, Probe Sequence
taagtttgcctataaaaaccacact

SEQ ID NO: 297681 - DNA, 25 bp, Probe Sequence
tcacagtttttatctaaacaacacc

SEQ ID NO: 297682 - DNA, 25 bp, Probe Sequence
tcacctcttctttaccagaacggtt

SEQ ID NO: 297683 - DNA, 25 bp, Probe Sequence
tcacccttttggagtcagagcgaga

SEQ ID NO: 297684 - DNA, 25 bp, Probe Sequence
tcacctcttctgtcgttgtcagagg

SEQ ID NO: 297685 - DNA, 25 bp, Probe Sequence
tcagccacccctggttacaggagta

SEQ ID NO: 297686 - DNA, 25 bp, Probe Sequence
tcacccccactgaaaaagatgagta

SEQ ID NO: 297687 - DNA, 25 bp, Probe Sequence
tcacccaccacattaacaacataaa

SEQ ID NO: 297688 - DNA, 25 bp, Probe Sequence
tcaacaaacccttggcaacactaga

SEQ ID NO: 297689 - DNA, 25 bp, Probe Sequence
tcaaaaacgcccggatctcagtcaa

SEQ ID NO: 297690 - DNA, 25 bp, Probe Sequence
tcaaaaattgagtcacgtccgacta

SEQ ID NO: 297691 - DNA, 25 bp, Probe Sequence
tcaaaagcactacaggcccatgaat

SEQ ID NO: 297692 - DNA, 25 bp, Probe Sequence
tcaaagtttcagagaccattgcaat

SEQ ID NO: 297693 - DNA, 25 bp, Probe Sequence
taacctgtctcacctggacttaagc

SEQ ID NO: 297694 - DNA, 25 bp, Probe Sequence
tcagcatcctttatctgtgacttca

SEQ ID NO: 297695 - DNA, 25 bp, Probe Sequence
tcaccagcgcggactatgtatttca

SEQ ID NO: 297696 - DNA, 25 bp, Probe Sequence
tcacaatggtggaaagcttcatgta

SEQ ID NO: 297697 - DNA, 25 bp, Probe Sequence
tcaaaatgggacactggattctgag

SEQ ID NO: 297698 - DNA, 25 bp, Probe Sequence
tcaagaagccgatcatcctggtcta

SEQ ID NO: 297699 - DNA, 25 bp, Probe Sequence
tcaccaagccaaacatcatcatgga

SEQ ID NO: 297700 - DNA, 25 bp, Probe Sequence
tcacacgagccaagtctcagcggat

SEQ ID NO: 297701 - DNA, 25 bp, Probe Sequence
tcacacgagccaagtctcagcggat

SEQ ID NO: 297702 - DNA, 25 bp, Probe Sequence
tcaccaagctctggatctgctgtcg

SEQ ID NO: 297703 - DNA, 25 bp, Probe Sequence
tcaccaagctctggatctgctgtcg

SEQ ID NO: 297704 - DNA, 25 bp, Probe Sequence
tcaccaagctctggatctgctgtcg

SEQ ID NO: 297705 - DNA, 25 bp, Probe Sequence
tcaccagaccattccgcttcaaggc

SEQ ID NO: 297706 - DNA, 25 bp, Probe Sequence
tcagctaaccactcgctctaaagca

SEQ ID NO: 297707 - DNA, 25 bp, Probe Sequence
tcactggaccccagcctagatgaca

SEQ ID NO: 297708 - DNA, 25 bp, Probe Sequence
tcactcgactccctgcgggaggaga

SEQ ID NO: 297709 - DNA, 25 bp, Probe Sequence
tcactcgacctcctaagtgggactg

SEQ ID NO: 297710 - DNA, 25 bp, Probe Sequence
tcagctccaaacgtaggggaggggt

SEQ ID NO: 297711 - DNA, 25 bp, Probe Sequence
tcagcccagaacttaagcagagact

SEQ ID NO: 297712 - DNA, 25 bp, Probe Sequence
tcagccccagatttgacgtgcaact

SEQ ID NO: 297713 - DNA, 25 bp, Probe Sequence
tcacccagcagatgttcgatgccaa

SEQ ID NO: 297714 - DNA, 25 bp, Probe Sequence
tcaccacagccatgtctgcgtttga

SEQ ID NO: 297715 - DNA, 25 bp, Probe Sequence
tcacttcagctcagtagctttggtc

SEQ ID NO: 297716 - DNA, 25 bp, Probe Sequence
tcactacagcctaaagccttgcctt

SEQ ID NO: 297717 - DNA, 25 bp, Probe Sequence
tcaccatagccttacagcttttctc

SEQ ID NO: 297718 - DNA, 25 bp, Probe Sequence
tcacctagtttacctagttcagggc

SEQ ID NO: 297719 - DNA, 25 bp, Probe Sequence
tcacctagtttatcatattgttgaa

SEQ ID NO: 297720 - DNA, 25 bp, Probe Sequence
tcaccattcttatgtcactttagaa

SEQ ID NO: 297721 - DNA, 25 bp, Probe Sequence
tcacctcttctaatcttttaatgta

SEQ ID NO: 297722 - DNA, 25 bp, Probe Sequence
tcagcttttcctggtttgccaatta

SEQ ID NO: 297723 - DNA, 25 bp, Probe Sequence
tcagcttcattggctagtttctctc

SEQ ID NO: 297724 - DNA, 25 bp, Probe Sequence
tcagctttgttcgtgttatttccct

SEQ ID NO: 297725 - DNA, 25 bp, Probe Sequence
tcactggtggctgagctttttccca

SEQ ID NO: 297726 - DNA, 25 bp, Probe Sequence
tcactggtgttgagctttttttcat

SEQ ID NO: 297727 - DNA, 25 bp, Probe Sequence
tcagctccatatttacttattttta

SEQ ID NO: 297728 - DNA, 25 bp, Probe Sequence
tcagctcctcactgatttctttata

SEQ ID NO: 297729 - DNA, 25 bp, Probe Sequence
tcactccacactggcacgtttgtga

SEQ ID NO: 297730 - DNA, 25 bp, Probe Sequence
tcacccaccagggcctgttgtgggg

SEQ ID NO: 297731 - DNA, 25 bp, Probe Sequence
tcagcccaggcagccagctttgggc

SEQ ID NO: 297732 - DNA, 25 bp, Probe Sequence
tcacccagcgtggccatgaatcggg

SEQ ID NO: 297733 - DNA, 25 bp, Probe Sequence
tcacccagtgctaccgagacatggg

SEQ ID NO: 297734 - DNA, 25 bp, Probe Sequence
tcagccctcgccatcatggaaaatg

SEQ ID NO: 297735 - DNA, 25 bp, Probe Sequence
tcagccctcgccatcatggaaaatg

SEQ ID NO: 297736 - DNA, 25 bp, Probe Sequence
tcagccctcgccatcatggaaaatg

SEQ ID NO: 297737 - DNA, 25 bp, Probe Sequence
tcagccttagtccctggctaattgc

SEQ ID NO: 297738 - DNA, 25 bp, Probe Sequence
tcaccttcaactgcttctaattctt

SEQ ID NO: 297739 - DNA, 25 bp, Probe Sequence
tcactttaccttctgccaaatgcag

SEQ ID NO: 297740 - DNA, 25 bp, Probe Sequence
tcactgttgacccttgtggaagata

SEQ ID NO: 297741 - DNA, 25 bp, Probe Sequence
tcacttatgttccttctagagtaac

SEQ ID NO: 297742 - DNA, 25 bp, Probe Sequence
tcacctattttgactcgcagcgtac

SEQ ID NO: 297743 - DNA, 25 bp, Probe Sequence
tcacctgtttgtggtcatgctggta

SEQ ID NO: 297744 - DNA, 25 bp, Probe Sequence
tcacctgcgctgtggacactgagaa

SEQ ID NO: 297745 - DNA, 25 bp, Probe Sequence
tcacctgcgctgtggacactgagaa

SEQ ID NO: 297746 - DNA, 25 bp, Probe Sequence
tcacctgcgctgtggacactgagaa

SEQ ID NO: 297747 - DNA, 25 bp, Probe Sequence
tcaccatggcatgatgagacacaga

SEQ ID NO: 297748 - DNA, 25 bp, Probe Sequence
tcaccagcctgggcagcagcaagaa

SEQ ID NO: 297749 - DNA, 25 bp, Probe Sequence
tcacccctgcatacatcacaaagaa

SEQ ID NO: 297750 - DNA, 25 bp, Probe Sequence
tcacccagtcatgtgcactgaatgt

SEQ ID NO: 297751 - DNA, 25 bp, Probe Sequence
tcacatacagtagatcactttttac

SEQ ID NO: 297752 - DNA, 25 bp, Probe Sequence
tcactagcgacagccactttttact

SEQ ID NO: 297753 - DNA, 25 bp, Probe Sequence
tcactactccagacctttttcaagt

SEQ ID NO: 297754 - DNA, 25 bp, Probe Sequence
tcaccacgcccagctaatttttgta

SEQ ID NO: 297755 - DNA, 25 bp, Probe Sequence
tcacaacagcagggccttcttcttt

SEQ ID NO: 297756 - DNA, 25 bp, Probe Sequence
tcacaccggaccatgtcatgtcctg

SEQ ID NO: 297757 - DNA, 25 bp, Probe Sequence
taaccagaactccagtttcactggg

SEQ ID NO: 297758 - DNA, 25 bp, Probe Sequence
taaccagcagactggcttctccgac

SEQ ID NO: 297759 - DNA, 25 bp, Probe Sequence
tcacttagcagttctggttcctctg

SEQ ID NO: 297760 - DNA, 25 bp, Probe Sequence
tcagcctacccactgaagtctttgg

SEQ ID NO: 297761 - DNA, 25 bp, Probe Sequence
tcactccgaccggtgagtcatttgc

SEQ ID NO: 297762 - DNA, 25 bp, Probe Sequence
tcactcccgggagtggatcacccat

SEQ ID NO: 297763 - DNA, 25 bp, Probe Sequence
tcacttcctcggcatgagtcagcca

SEQ ID NO: 297764 - DNA, 25 bp, Probe Sequence
tcacctccagcgccaaagtggacat

SEQ ID NO: 297765 - DNA, 25 bp, Probe Sequence
tcacctctgacgctgactgcgaaat

SEQ ID NO: 297766 - DNA, 25 bp, Probe Sequence
tcacctctgacgctgactgcgaaat

SEQ ID NO: 297767 - DNA, 25 bp, Probe Sequence
tcactctgcgactgtgcggagaaac

SEQ ID NO: 297768 - DNA, 25 bp, Probe Sequence
tcagcccaaccagtgcgtgggccac

SEQ ID NO: 297769 - DNA, 25 bp, Probe Sequence
tcagcccagacacaggtgctgtctc

SEQ ID NO: 297770 - DNA, 25 bp, Probe Sequence
tcagcccagccactgatgctggatg

SEQ ID NO: 297771 - DNA, 25 bp, Probe Sequence
tcacagcctctgcctatgtgctgat

SEQ ID NO: 297772 - DNA, 25 bp, Probe Sequence
tcacagcagtccctgagtctgaaac

SEQ ID NO: 297773 - DNA, 25 bp, Probe Sequence
tcacagagtcgccgtctggatgacc

SEQ ID NO: 297774 - DNA, 25 bp, Probe Sequence
tcacgggcctgtactgtgagagcca

SEQ ID NO: 297775 - DNA, 25 bp, Probe Sequence
tcacggagacttactgaggcagaaa

SEQ ID NO: 297776 - DNA, 25 bp, Probe Sequence
tcacttgggctgtttgagagcataa

SEQ ID NO: 297777 - DNA, 25 bp, Probe Sequence
tcactctggcccattgacagatgag

SEQ ID NO: 297778 - DNA, 25 bp, Probe Sequence
tcactgtggacagtttgacatcgac

SEQ ID NO: 297779 - DNA, 25 bp, Probe Sequence
tcagctggagacgcactatagggtg

SEQ ID NO: 297780 - DNA, 25 bp, Probe Sequence
tcactactgacggtctcaagaggtc

SEQ ID NO: 297781 - DNA, 25 bp, Probe Sequence
tcaccattacaggccatgctgagac

SEQ ID NO: 297782 - DNA, 25 bp, Probe Sequence
tcaccattacaggccatgctgagac

SEQ ID NO: 297783 - DNA, 25 bp, Probe Sequence
tcagcctctgcaaggcactcagggt

SEQ ID NO: 297784 - DNA, 25 bp, Probe Sequence
tcaccctgcaaggcatcatcagctg

SEQ ID NO: 297785 - DNA, 25 bp, Probe Sequence
tcaccacggcagaaatcagcgcccg

SEQ ID NO: 297786 - DNA, 25 bp, Probe Sequence
tcaccacacgcacttatcaggaacg

SEQ ID NO: 297787 - DNA, 25 bp, Probe Sequence
tcagccatgaccgttatgaggaaat

SEQ ID NO: 297788 - DNA, 25 bp, Probe Sequence
tcacctgatcctgaaagtccagatg

SEQ ID NO: 297789 - DNA, 25 bp, Probe Sequence
tcaccttccattaagtgttcaagca

SEQ ID NO: 297790 - DNA, 25 bp, Probe Sequence
tcaccttcactgggaacaacacagc

SEQ ID NO: 297791 - DNA, 25 bp, Probe Sequence
tcaacttgacttcataagagcactg

SEQ ID NO: 297792 - DNA, 25 bp, Probe Sequence
tcaccttgtctaccatcaagacact

SEQ ID NO: 297793 - DNA, 25 bp, Probe Sequence
tcaaattattaggcacaatgaactt

SEQ ID NO: 297794 - DNA, 25 bp, Probe Sequence
tcaaatatttaccactaagacttct

SEQ ID NO: 297795 - DNA, 25 bp, Probe Sequence
tcaataaggtggccggaaacttcca

SEQ ID NO: 297796 - DNA, 25 bp, Probe Sequence
tcaacacggaggtagtcacgtttcc

SEQ ID NO: 297797 - DNA, 25 bp, Probe Sequence
tcacacacagggctattcctttcct

SEQ ID NO: 297798 - DNA, 25 bp, Probe Sequence
taaagtaggggtaccatgttcatct

SEQ ID NO: 297799 - DNA, 25 bp, Probe Sequence
tcaaagtttggtttcgatcttcata

SEQ ID NO: 297800 - DNA, 25 bp, Probe Sequence
tcaaagggtgttttatgttgacata

SEQ ID NO: 297801 - DNA, 25 bp, Probe Sequence
tcacttgggttcattctattcagaa

SEQ ID NO: 297802 - DNA, 25 bp, Probe Sequence
tcaccgtgtgtaaatctttcccaat

SEQ ID NO: 297803 - DNA, 25 bp, Probe Sequence
tcacggactggacgatctttccact

SEQ ID NO: 297804 - DNA, 25 bp, Probe Sequence
tcacgcaagcatggttaacgtccct

SEQ ID NO: 297805 - DNA, 25 bp, Probe Sequence
tcaccaacatggagagacctccctc

SEQ ID NO: 297806 - DNA, 25 bp, Probe Sequence
tcaccttcgagtagagaggcccgcc

SEQ ID NO: 297807 - DNA, 25 bp, Probe Sequence
tcagcccattggcaatgaggctgcc

SEQ ID NO: 297808 - DNA, 25 bp, Probe Sequence
tcagccctcaggcacagttgggcca

SEQ ID NO: 297809 - DNA, 25 bp, Probe Sequence
tcactcccaggcagagttgtctgaa

SEQ ID NO: 297810 - DNA, 25 bp, Probe Sequence
tcactgcgaaggcaggttattagaa

SEQ ID NO: 297811 - DNA, 25 bp, Probe Sequence
tcactggaagatcattgtaattcaa

SEQ ID NO: 297812 - DNA, 25 bp, Probe Sequence
tcacgggagatttcttgttgctcaa

SEQ ID NO: 297813 - DNA, 25 bp, Probe Sequence
tcacagtggagaactcttggccaaa

SEQ ID NO: 297814 - DNA, 25 bp, Probe Sequence
tcacagtgatgaagattcgggaaat

SEQ ID NO: 297815 - DNA, 25 bp, Probe Sequence
tcactggtgagaatgtccgagaatt

SEQ ID NO: 297816 - DNA, 25 bp, Probe Sequence
tcactgagggatttccgcgagctcg

SEQ ID NO: 297817 - DNA, 25 bp, Probe Sequence
tcaacgggactttccagatgtcgta

SEQ ID NO: 297818 - DNA, 25 bp, Probe Sequence
tcaacgggactttccgaaatgtcgt

SEQ ID NO: 297819 - DNA, 25 bp, Probe Sequence
tcaacgggactttccgaaatgtcgt

SEQ ID NO: 297820 - DNA, 25 bp, Probe Sequence
tcaacgggactttcccaaatgtcgt

SEQ ID NO: 297821 - DNA, 25 bp, Probe Sequence
tcaacgggactttcccaaatgtcgt

SEQ ID NO: 297822 - DNA, 25 bp, Probe Sequence
tcaacgggactttcccaaatgtcgt

SEQ ID NO: 297823 - DNA, 25 bp, Probe Sequence
tcaacgggactttcccaaatgtcgt

SEQ ID NO: 297824 - DNA, 25 bp, Probe Sequence
tcaacgggactttcccaaatgtcgt

SEQ ID NO: 297825 - DNA, 25 bp, Probe Sequence
tcaacgggactttcccaaatgtcgt

SEQ ID NO: 297826 - DNA, 25 bp, Probe Sequence
tcaacgggactttcccaaatgtcgt

SEQ ID NO: 297827 - DNA, 25 bp, Probe Sequence
tcaacgggactttccaaaatgtcgt

SEQ ID NO: 297828 - DNA, 25 bp, Probe Sequence
tcaacgggactttccaaaatgtcgt

SEQ ID NO: 297829 - DNA, 25 bp, Probe Sequence
tcaacgggactttccaaaatgtcgt

SEQ ID NO: 297830 - DNA, 25 bp, Probe Sequence
tcaacgggactttccaaaatgtcgt

SEQ ID NO: 297831 - DNA, 25 bp, Probe Sequence
tcaacgggactttccaaaatgtcgt

SEQ ID NO: 297832 - DNA, 25 bp, Probe Sequence
tcaacgggactttccaaaatgtcgt

SEQ ID NO: 297833 - DNA, 25 bp, Probe Sequence
tcaacgggactttccaaaatgtcgt

SEQ ID NO: 297834 - DNA, 25 bp, Probe Sequence
tcaacgggactttccaaaatgtcgt

SEQ ID NO: 297835 - DNA, 25 bp, Probe Sequence
tcaacgggactttccaaaatgtcgt

SEQ ID NO: 297836 - DNA, 25 bp, Probe Sequence
tcaacgggactttccaaaatgtcgt

SEQ ID NO: 297837 - DNA, 25 bp, Probe Sequence
tcaacgggactttccaaaatgtcgt

SEQ ID NO: 297838 - DNA, 25 bp, Probe Sequence
tcaacgggactttccaaaatgtcgt

SEQ ID NO: 297839 - DNA, 25 bp, Probe Sequence
tcaacgggactttccaaaatgtcgt

SEQ ID NO: 297840 - DNA, 25 bp, Probe Sequence
tcaacgggactttccaaaatgtcgt

SEQ ID NO: 297841 - DNA, 25 bp, Probe Sequence
tcaacgggactttccaaaatgtcgt

SEQ ID NO: 297842 - DNA, 25 bp, Probe Sequence
tcaacgggactttccaaaatgtcgt

SEQ ID NO: 297843 - DNA, 25 bp, Probe Sequence
tcaacgggactttccaaaatgtcgt

SEQ ID NO: 297844 - DNA, 25 bp, Probe Sequence
tcaacgggactttccaaaatgtcgt

SEQ ID NO: 297845 - DNA, 25 bp, Probe Sequence
tcaacgggactttccaaaatgtcgt

SEQ ID NO: 297846 - DNA, 25 bp, Probe Sequence
tcaacgggactttccaaaatgtcgt

SEQ ID NO: 297847 - DNA, 25 bp, Probe Sequence
tcaacgggactttccaaaatgtcgt

SEQ ID NO: 297848 - DNA, 25 bp, Probe Sequence
tcaacgggactttccaaaatgtcgt

SEQ ID NO: 297849 - DNA, 25 bp, Probe Sequence
tcaacgggactttccaaaatgtcgt

SEQ ID NO: 297850 - DNA, 25 bp, Probe Sequence
tcaacgggactttccaaaatgtcgt

SEQ ID NO: 297851 - DNA, 25 bp, Probe Sequence
tcaacgggactttccaaaatgtcgt

SEQ ID NO: 297852 - DNA, 25 bp, Probe Sequence
tcaacgggactttccaaaatgtcgt

SEQ ID NO: 297853 - DNA, 25 bp, Probe Sequence
tcaacgggactttccaaaatgtcgt

SEQ ID NO: 297854 - DNA, 25 bp, Probe Sequence
tcaacgggactttccaaaatgtcgt

SEQ ID NO: 297855 - DNA, 25 bp, Probe Sequence
tcaacgggactttccaaaatgtcgt

SEQ ID NO: 297856 - DNA, 25 bp, Probe Sequence
tcaacgggactttccaaaatgtcgt

SEQ ID NO: 297857 - DNA, 25 bp, Probe Sequence
tcaacgggactttccaaaatgtcgt

SEQ ID NO: 297858 - DNA, 25 bp, Probe Sequence
tcaacgggactttccaaaatgtcgt

SEQ ID NO: 297859 - DNA, 25 bp, Probe Sequence
tcaacgggactttccaaaatgtcgt

SEQ ID NO: 297860 - DNA, 25 bp, Probe Sequence
tcaacgggactttccaaaatgtcgt

SEQ ID NO: 297861 - DNA, 25 bp, Probe Sequence
tcaacgggactttccaaaatgtcgt

SEQ ID NO: 297862 - DNA, 25 bp, Probe Sequence
tcaacgggactttccaaaatgtcgt

SEQ ID NO: 297863 - DNA, 25 bp, Probe Sequence
tcaacgggactttccaaaatgtcgt

SEQ ID NO: 297864 - DNA, 25 bp, Probe Sequence
tcaacgggactttccaaaatgtcgt

SEQ ID NO: 297865 - DNA, 25 bp, Probe Sequence
tcaacgggactttccaaaatgtcgt

SEQ ID NO: 297866 - DNA, 25 bp, Probe Sequence
tcaacgggactttccaaaatgtcgt

SEQ ID NO: 297867 - DNA, 25 bp, Probe Sequence
tcaacgggactttccaaaatgtcgt

SEQ ID NO: 297868 - DNA, 25 bp, Probe Sequence
tcaacgggactttccaaattgtcgt

SEQ ID NO: 297869 - DNA, 25 bp, Probe Sequence
tcaacgggactttccaaatgtcgta

SEQ ID NO: 297870 - DNA, 25 bp, Probe Sequence
tcaacgggactttccaaatgtcgta

SEQ ID NO: 297871 - DNA, 25 bp, Probe Sequence
tcaacgggactttccaaatgtcgta

SEQ ID NO: 297872 - DNA, 25 bp, Probe Sequence
tcaacgggactttccaaatgtcgta

SEQ ID NO: 297873 - DNA, 25 bp, Probe Sequence
tcaacgggactttccaaatgtcgta

SEQ ID NO: 297874 - DNA, 25 bp, Probe Sequence
tcaacgggactttccaaatgtcgta

SEQ ID NO: 297875 - DNA, 25 bp, Probe Sequence
tcaacgggactttccaaatgtcgta

SEQ ID NO: 297876 - DNA, 25 bp, Probe Sequence
tcaacgggactttccataatgtcgt

SEQ ID NO: 297877 - DNA, 25 bp, Probe Sequence
tcaacgggactttccaagatgtcgt

SEQ ID NO: 297878 - DNA, 25 bp, Probe Sequence
tcaacgggactttccaaaattgtcg

SEQ ID NO: 297879 - DNA, 25 bp, Probe Sequence
tcaacgggactttccaaaattgtcg

SEQ ID NO: 297880 - DNA, 25 bp, Probe Sequence
tcaacgggactttccgaaaatgtcg

SEQ ID NO: 297881 - DNA, 25 bp, Probe Sequence
tcaacgggactttcccaaaatgtcg

SEQ ID NO: 297882 - DNA, 25 bp, Probe Sequence
taaggggatttacccacatgaaaag

SEQ ID NO: 297883 - DNA, 25 bp, Probe Sequence
taaggagttttccctggctccaaag

SEQ ID NO: 297884 - DNA, 25 bp, Probe Sequence
tcaatggattttgttgggcaccgaa

SEQ ID NO: 297885 - DNA, 25 bp, Probe Sequence
tcactggttttttagaggatcttaa

SEQ ID NO: 297886 - DNA, 25 bp, Probe Sequence
tcactggtttcataagatggttgca

SEQ ID NO: 297887 - DNA, 25 bp, Probe Sequence
tcactcttctaatgcaagggtctca

SEQ ID NO: 297888 - DNA, 25 bp, Probe Sequence
tcactgttcatattataggggacca

SEQ ID NO: 297889 - DNA, 25 bp, Probe Sequence
tcacttttgcagattgggtaacaca

SEQ ID NO: 297890 - DNA, 25 bp, Probe Sequence
tcacgatttcacactgggtacagct

SEQ ID NO: 297891 - DNA, 25 bp, Probe Sequence
tcaaaaccatattgtggcctacccc

SEQ ID NO: 297892 - DNA, 25 bp, Probe Sequence
tcaaatactggactgcggccaactc

SEQ ID NO: 297893 - DNA, 25 bp, Probe Sequence
tcaacaagatggacttggcggatct

SEQ ID NO: 297894 - DNA, 25 bp, Probe Sequence
tcaaagtctgttctggcggcattgt

SEQ ID NO: 297895 - DNA, 25 bp, Probe Sequence
taaggtttatgtaggcaatcttgga

SEQ ID NO: 297896 - DNA, 25 bp, Probe Sequence
tcaagttcttaggtccctttggagg

SEQ ID NO: 297897 - DNA, 25 bp, Probe Sequence
tcaacactcttacacctgttatgga

SEQ ID NO: 297898 - DNA, 25 bp, Probe Sequence
tcaacactcttacacctgttatgga

SEQ ID NO: 297899 - DNA, 25 bp, Probe Sequence
tcaaattcttcgaaagtggttggat

SEQ ID NO: 297900 - DNA, 25 bp, Probe Sequence
tcacagtttacccatttggcctgga

SEQ ID NO: 297901 - DNA, 25 bp, Probe Sequence
tcaagttctgacataattagacatg

SEQ ID NO: 297902 - DNA, 25 bp, Probe Sequence
tcacaatgtcgtgctaaataaatgt

SEQ ID NO: 297903 - DNA, 25 bp, Probe Sequence
tcaactttgtgagtaataatgtcag

SEQ ID NO: 297904 - DNA, 25 bp, Probe Sequence
tcacctttgtttcattattacagca

SEQ ID NO: 297905 - DNA, 25 bp, Probe Sequence
tactcttagcaatccattatttaat

SEQ ID NO: 297906 - DNA, 25 bp, Probe Sequence
tcacctctagcatcaccagtattag

SEQ ID NO: 297907 - DNA, 25 bp, Probe Sequence
tcactcatggaatcctgcagcttta

SEQ ID NO: 297908 - DNA, 25 bp, Probe Sequence
tcacacaggaaacacgctagtgacc

SEQ ID NO: 297909 - DNA, 25 bp, Probe Sequence
tcacactggctagctccgtaatgaa

SEQ ID NO: 297910 - DNA, 25 bp, Probe Sequence
tcaccgagcgcggctacagcttcac

SEQ ID NO: 297911 - DNA, 25 bp, Probe Sequence
tcacggagcagccttcaagcattcc

SEQ ID NO: 297912 - DNA, 25 bp, Probe Sequence
tcactggcatggccttccgtgtccc

SEQ ID NO: 297913 - DNA, 25 bp, Probe Sequence
tcacgttgggcatctgctgtgcata

SEQ ID NO: 297914 - DNA, 25 bp, Probe Sequence
tcacgttgccattaatgcatcatca

SEQ ID NO: 297915 - DNA, 25 bp, Probe Sequence
tcacggatgactttgcagctcatct

SEQ ID NO: 297916 - DNA, 25 bp, Probe Sequence
tcaccgagcacgtatgatctctcta

SEQ ID NO: 297917 - DNA, 25 bp, Probe Sequence
tcaccagtacaggatcccacataac

SEQ ID NO: 297918 - DNA, 25 bp, Probe Sequence
tcaccattaactggcctgatctaac

SEQ ID NO: 297919 - DNA, 25 bp, Probe Sequence
tcacgcataaaggcagtcgtacata

SEQ ID NO: 297920 - DNA, 25 bp, Probe Sequence
tcacgcataagaggcagtgcgaaca

SEQ ID NO: 297921 - DNA, 25 bp, Probe Sequence
tcacgccgatgatggagctgaagcc

SEQ ID NO: 297922 - DNA, 25 bp, Probe Sequence
tcaccattgatattggggaggctcc

SEQ ID NO: 297923 - DNA, 25 bp, Probe Sequence
tcacctggatcattaagaagcaacc

SEQ ID NO: 297924 - DNA, 25 bp, Probe Sequence
tcacgcatgccacacaagaaggacc

SEQ ID NO: 297925 - DNA, 25 bp, Probe Sequence
tcacgcagccactaacgggagagct

SEQ ID NO: 297926 - DNA, 25 bp, Probe Sequence
tcacatcacccatcagcacatggaa

SEQ ID NO: 297927 - DNA, 25 bp, Probe Sequence
tcacatagcccctagattgctcaat

SEQ ID NO: 297928 - DNA, 25 bp, Probe Sequence
tcacattcacacgcgattgcgcaat

SEQ ID NO: 297929 - DNA, 25 bp, Probe Sequence
tcacattcacacgcgattgcgcaat

SEQ ID NO: 297930 - DNA, 25 bp, Probe Sequence
tcacatctacacgtggcttggaggc

SEQ ID NO: 297931 - DNA, 25 bp, Probe Sequence
tcaaatacacgtgatctggccctaa

SEQ ID NO: 297932 - DNA, 25 bp, Probe Sequence
tcacagctaaggggactgcccagct

SEQ ID NO: 297933 - DNA, 25 bp, Probe Sequence
tcacaggaaggctgattcaccccaa

SEQ ID NO: 297934 - DNA, 25 bp, Probe Sequence
tcactggccaagggctggcagctct

SEQ ID NO: 297935 - DNA, 25 bp, Probe Sequence
tcacatgcccatgtgtctaggccat

SEQ ID NO: 297936 - DNA, 25 bp, Probe Sequence
tcaccatctctggagtctatgacct

SEQ ID NO: 297937 - DNA, 25 bp, Probe Sequence
tcacctgatctgctgttagtctcag

SEQ ID NO: 297938 - DNA, 25 bp, Probe Sequence
tcactgcatataagagttatgttag

SEQ ID NO: 297939 - DNA, 25 bp, Probe Sequence
tcacgtgcatatccagtccatgctg

SEQ ID NO: 297940 - DNA, 25 bp, Probe Sequence
tcacgtgcttggcctcaatgcaggc

SEQ ID NO: 297941 - DNA, 25 bp, Probe Sequence
tcacggcaatgcggctgcactggtg

SEQ ID NO: 297942 - DNA, 25 bp, Probe Sequence
tcactgtcagatggtctgcagcgag

SEQ ID NO: 297943 - DNA, 25 bp, Probe Sequence
tcactatcagcagcctgcagcctga

SEQ ID NO: 297944 - DNA, 25 bp, Probe Sequence
tcacatatgtgcagtgtcagcacca

SEQ ID NO: 297945 - DNA, 25 bp, Probe Sequence
tcacgagctatagtggcgcacaagc

SEQ ID NO: 297946 - DNA, 25 bp, Probe Sequence
tcaaatgcaatagttgccaaagcta

SEQ ID NO: 297947 - DNA, 25 bp, Probe Sequence
tcaactgagtaagtctgaacctcta

SEQ ID NO: 297948 - DNA, 25 bp, Probe Sequence
tcaaatggtacgttataacatcaat

SEQ ID NO: 297949 - DNA, 25 bp, Probe Sequence
tcacaaggtacaaaatcttgcataa

SEQ ID NO: 297950 - DNA, 25 bp, Probe Sequence
tcacgagcgttcacctgttcaagga

SEQ ID NO: 297951 - DNA, 25 bp, Probe Sequence
tcacggagttctcccgatctggaag

SEQ ID NO: 297952 - DNA, 25 bp, Probe Sequence
tcacagtagttcccagggcagcaga

SEQ ID NO: 297953 - DNA, 25 bp, Probe Sequence
tcacgccagagtgatggggcgagac

SEQ ID NO: 297954 - DNA, 25 bp, Probe Sequence
tcacatcctgggtgggacagagcag

SEQ ID NO: 297955 - DNA, 25 bp, Probe Sequence
tcaaatcggataggagtgtcaggcc

SEQ ID NO: 297956 - DNA, 25 bp, Probe Sequence
tcaaacagaaacctatgggctcccc

SEQ ID NO: 297957 - DNA, 25 bp, Probe Sequence
tcaaactgaagcactacgggcctgg

SEQ ID NO: 297958 - DNA, 25 bp, Probe Sequence
taagattaatgttctagggccgggc

SEQ ID NO: 297959 - DNA, 25 bp, Probe Sequence
tcaaagctaggatttcagggcccag

SEQ ID NO: 297960 - DNA, 25 bp, Probe Sequence
tcaaacgaagacactgtccccagct

SEQ ID NO: 297961 - DNA, 25 bp, Probe Sequence
taaaagaaaattgtcccgctcacca

SEQ ID NO: 297962 - DNA, 25 bp, Probe Sequence
taagaaaaaatatagccccaatgta

SEQ ID NO: 297963 - DNA, 25 bp, Probe Sequence
taatgaaaatgactttaaccctttg

SEQ ID NO: 297964 - DNA, 25 bp, Probe Sequence
tcaaaccaactctttagcaccttgt

SEQ ID NO: 297965 - DNA, 25 bp, Probe Sequence
tcacatcactcaccattttaacact

SEQ ID NO: 297966 - DNA, 25 bp, Probe Sequence
tcacacccacgggtgctactgcacg

SEQ ID NO: 297967 - DNA, 25 bp, Probe Sequence
tcacgtccacgggggacgagccgtg

SEQ ID NO: 297968 - DNA, 25 bp, Probe Sequence
tacagtacaaacaggactgtcaggg

SEQ ID NO: 297969 - DNA, 25 bp, Probe Sequence
tcaaggacacccaggccatgaagga

SEQ ID NO: 297970 - DNA, 25 bp, Probe Sequence
tcacggattactacggccggagcag

SEQ ID NO: 297971 - DNA, 25 bp, Probe Sequence
tcacactgttactccacagcggagg

SEQ ID NO: 297972 - DNA, 25 bp, Probe Sequence
tcacagctggtagagacccaggagt

SEQ ID NO: 297973 - DNA, 25 bp, Probe Sequence
tcacggagaacttcccgctgaagct

SEQ ID NO: 297974 - DNA, 25 bp, Probe Sequence
tcacggagatgggacccctgagatg

SEQ ID NO: 297975 - DNA, 25 bp, Probe Sequence
tactagatgcagagaccccgcagag

SEQ ID NO: 297976 - DNA, 25 bp, Probe Sequence
tactagatgcagagaccccgcagag

SEQ ID NO: 297977 - DNA, 25 bp, Probe Sequence
tcactcaacaaccaagcgcctggag

SEQ ID NO: 297978 - DNA, 25 bp, Probe Sequence
tcaccctagtctcaggcacaggagc

SEQ ID NO: 297979 - DNA, 25 bp, Probe Sequence
tcaccctgagatggaagccggcttc

SEQ ID NO: 297980 - DNA, 25 bp, Probe Sequence
tcacctcggaggagctggctctgtg

SEQ ID NO: 297981 - DNA, 25 bp, Probe Sequence
tcacgcttgtgatgtggtggccgtc

SEQ ID NO: 297982 - DNA, 25 bp, Probe Sequence
tcacgcttgtgatgtggtggccgtc

SEQ ID NO: 297983 - DNA, 25 bp, Probe Sequence
tcacgcttgtgatgtggtggccgtc

SEQ ID NO: 297984 - DNA, 25 bp, Probe Sequence
tcaaattctgagcctggggggtcct

SEQ ID NO: 297985 - DNA, 25 bp, Probe Sequence
tcaaatattacctgcagggattctc

SEQ ID NO: 297986 - DNA, 25 bp, Probe Sequence
tcaaaactacacttgagaatttttt

SEQ ID NO: 297987 - DNA, 25 bp, Probe Sequence
tcaaatcgtcctttaagtcttcctt

SEQ ID NO: 297988 - DNA, 25 bp, Probe Sequence
tagaatttcctaacagagtttactg

SEQ ID NO: 297989 - DNA, 25 bp, Probe Sequence
tacttttacttagagttatagttct

SEQ ID NO: 297990 - DNA, 25 bp, Probe Sequence
tcaccttttctttctggtttgaact

SEQ ID NO: 297991 - DNA, 25 bp, Probe Sequence
tcacctgtgttcatgggatgtattg

SEQ ID NO: 297992 - DNA, 25 bp, Probe Sequence
tcaccagtcctcttggggttttgta

SEQ ID NO: 297993 - DNA, 25 bp, Probe Sequence
tcaaagtcctttcggatcttcttgg

SEQ ID NO: 297994 - DNA, 25 bp, Probe Sequence
tcaaatgtacatgtggcccttttgc

SEQ ID NO: 297995 - DNA, 25 bp, Probe Sequence
tcaccagtaatatgtctccttgctt

SEQ ID NO: 297996 - DNA, 25 bp, Probe Sequence
tcaccagcataatcactgtctgcct

SEQ ID NO: 297997 - DNA, 25 bp, Probe Sequence
taccctaaccaagttccttggccat

SEQ ID NO: 297998 - DNA, 25 bp, Probe Sequence
taccctaaccaagttccttggccat

SEQ ID NO: 297999 - DNA, 25 bp, Probe Sequence
tttccagagtcctggtcagttccca

SEQ ID NO: 298000 - DNA, 25 bp, Probe Sequence
tattcctgtctgggggtacttccca

SEQ ID NO: 298001 - DNA, 25 bp, Probe Sequence
tactcgcacctggtggactacttcc

SEQ ID NO: 298002 - DNA, 25 bp, Probe Sequence
taatcagccctctgtgacataggta

SEQ ID NO: 298003 - DNA, 25 bp, Probe Sequence
tcacaagccttgtttctgatactta

SEQ ID NO: 298004 - DNA, 25 bp, Probe Sequence
tcacaagccttgtttctgatactta

SEQ ID NO: 298005 - DNA, 25 bp, Probe Sequence
tcaacaaattgccctttagtctccc

SEQ ID NO: 298006 - DNA, 25 bp, Probe Sequence
tcaaagttctggcttctggactctg

SEQ ID NO: 298007 - DNA, 25 bp, Probe Sequence
tcaccagggctgcttttaactctgg

SEQ ID NO: 298008 - DNA, 25 bp, Probe Sequence
tcacctgcaaggctttgtggactct

SEQ ID NO: 298009 - DNA, 25 bp, Probe Sequence
tcacccacatgggggagatggacca

SEQ ID NO: 298010 - DNA, 25 bp, Probe Sequence
tcaccctcttccggagatgtagcaa

SEQ ID NO: 298011 - DNA, 25 bp, Probe Sequence
tcaccctcttctgtgagcaggaaag

SEQ ID NO: 298012 - DNA, 25 bp, Probe Sequence
tcaccctattggctaccgaatacta

SEQ ID NO: 298013 - DNA, 25 bp, Probe Sequence
tcaccccatttgctacctagcatat

SEQ ID NO: 298014 - DNA, 25 bp, Probe Sequence
tcacccaagcctatcacgcgtgaat

SEQ ID NO: 298015 - DNA, 25 bp, Probe Sequence
tcactctaaactttccctgttcaga

SEQ ID NO: 298016 - DNA, 25 bp, Probe Sequence
tcacttaacactagacaccaggtcg

SEQ ID NO: 298017 - DNA, 25 bp, Probe Sequence
tcactaaggagtaacacagaggtca

SEQ ID NO: 298018 - DNA, 25 bp, Probe Sequence
tcactaatagaatatctctgaagct

SEQ ID NO: 298019 - DNA, 25 bp, Probe Sequence
tcactcaaagagttttagaaggaca

SEQ ID NO: 298020 - DNA, 25 bp, Probe Sequence
tcaacctgtgagttttgtggggaca

SEQ ID NO: 298021 - DNA, 25 bp, Probe Sequence
tcaacttggaggtgatgccgggaag

SEQ ID NO: 298022 - DNA, 25 bp, Probe Sequence
tcaacttgtagacacagccgggcaa

SEQ ID NO: 298023 - DNA, 25 bp, Probe Sequence
tcaaccatttcacaaggaggacaag

SEQ ID NO: 298024 - DNA, 25 bp, Probe Sequence
tcaaagctttccaaagccaggcacc

SEQ ID NO: 298025 - DNA, 25 bp, Probe Sequence
tcaaatattttttgcatccccatgc

SEQ ID NO: 298026 - DNA, 25 bp, Probe Sequence
tcaaatgtttgctttgttacctgga

SEQ ID NO: 298027 - DNA, 25 bp, Probe Sequence
tcaaatgatttgattaaacctagac

SEQ ID NO: 298028 - DNA, 25 bp, Probe Sequence
tcacactgatctgggttaaaacctg

SEQ ID NO: 298029 - DNA, 25 bp, Probe Sequence
tcaactgtctgtcttagaattcccc

SEQ ID NO: 298030 - DNA, 25 bp, Probe Sequence
tcaactacatggtttacatgttcca

SEQ ID NO: 298031 - DNA, 25 bp, Probe Sequence
tcaagataaggcatttctttcccgg

SEQ ID NO: 298032 - DNA, 25 bp, Probe Sequence
taatgaaatggagcccttccctgga

SEQ ID NO: 298033 - DNA, 25 bp, Probe Sequence
taatgaaggagttcccccttctgag

SEQ ID NO: 298034 - DNA, 25 bp, Probe Sequence
tcacagaaattatatcccctttgag

SEQ ID NO: 298035 - DNA, 25 bp, Probe Sequence
tcaaacttgtaatcctcactctttg

SEQ ID NO: 298036 - DNA, 25 bp, Probe Sequence
tcacgacattgtaaaatctcacttt

SEQ ID NO: 298037 - DNA, 25 bp, Probe Sequence
tcacccatgagatcaatattcacat

SEQ ID NO: 298038 - DNA, 25 bp, Probe Sequence
tcactgttgcagtccataattcaca

SEQ ID NO: 298039 - DNA, 25 bp, Probe Sequence
tcactgtatggaatcagaaccagat

SEQ ID NO: 298040 - DNA, 25 bp, Probe Sequence
tcactgttggtgcgagacttgtttt

SEQ ID NO: 298041 - DNA, 25 bp, Probe Sequence
tcacgtttctgtagaacttgtgagc

SEQ ID NO: 298042 - DNA, 25 bp, Probe Sequence
tcaccttatcctagaacttgaggct

SEQ ID NO: 298043 - DNA, 25 bp, Probe Sequence
tcactctgtatcccaaagcttaagt

SEQ ID NO: 298044 - DNA, 25 bp, Probe Sequence
tcacttgtagcacaaattgtcacaa

SEQ ID NO: 298045 - DNA, 25 bp, Probe Sequence
tcacttgaatcccgtgattgtcata

SEQ ID NO: 298046 - DNA, 25 bp, Probe Sequence
tcactctggacccagggctgacatc

SEQ ID NO: 298047 - DNA, 25 bp, Probe Sequence
tcactccgaagccagcggcatggtg

SEQ ID NO: 298048 - DNA, 25 bp, Probe Sequence
tcacccaggctggagtgcagtggtg

SEQ ID NO: 298049 - DNA, 25 bp, Probe Sequence
tcacccaggctggagtggagtggta

SEQ ID NO: 298050 - DNA, 25 bp, Probe Sequence
tcacccactgggaggatctggatca

SEQ ID NO: 298051 - DNA, 25 bp, Probe Sequence
tcaccctttgtctagtgatcttgta

SEQ ID NO: 298052 - DNA, 25 bp, Probe Sequence
tcacctttccattgttgcatcttga

SEQ ID NO: 298053 - DNA, 25 bp, Probe Sequence
tcacctattcatgagtattattgaa

SEQ ID NO: 298054 - DNA, 25 bp, Probe Sequence
tcacgtgcataatatattctactaa

SEQ ID NO: 298055 - DNA, 25 bp, Probe Sequence
tcacttgctgtaaatctactactaa

SEQ ID NO: 298056 - DNA, 25 bp, Probe Sequence
tcactatgtgtgatgtcctctgata

SEQ ID NO: 298057 - DNA, 25 bp, Probe Sequence
tcacatgatttattctcagctctaa

SEQ ID NO: 298058 - DNA, 25 bp, Probe Sequence
tcacacaactcatcacatgcttcca

SEQ ID NO: 298059 - DNA, 25 bp, Probe Sequence
tcaagaaaatgaccatgtacatgaa

SEQ ID NO: 298060 - DNA, 25 bp, Probe Sequence
tcaacaagcacgaccatggatgatg

SEQ ID NO: 298061 - DNA, 25 bp, Probe Sequence
tcacacatcacattcccatggtggc

SEQ ID NO: 298062 - DNA, 25 bp, Probe Sequence
tcacacatcacattcccatggtggc

SEQ ID NO: 298063 - DNA, 25 bp, Probe Sequence
tcaacagcacagacagcgagcgctg

SEQ ID NO: 298064 - DNA, 25 bp, Probe Sequence
tcacacagccagaagcggtggggac

SEQ ID NO: 298065 - DNA, 25 bp, Probe Sequence
tcaaagctgcgaaacctgtgggatc

SEQ ID NO: 298066 - DNA, 25 bp, Probe Sequence
tcacacacctgtagcacttactggt

SEQ ID NO: 298067 - DNA, 25 bp, Probe Sequence
tcacccctggaacttcacattggtt

SEQ ID NO: 298068 - DNA, 25 bp, Probe Sequence
tcacgtttgccatatcccattggtt

SEQ ID NO: 298069 - DNA, 25 bp, Probe Sequence
tcaagatttcgataccccagaggtt

SEQ ID NO: 298070 - DNA, 25 bp, Probe Sequence
tcaagagtttgagaccagcctgggc

SEQ ID NO: 298071 - DNA, 25 bp, Probe Sequence
tcaaactacattgagcccctgagga

SEQ ID NO: 298072 - DNA, 25 bp, Probe Sequence
tcaagagtatcaacaatgccgaaaa

SEQ ID NO: 298073 - DNA, 25 bp, Probe Sequence
tcaaagtcattgcccacggcaaaga

SEQ ID NO: 298074 - DNA, 25 bp, Probe Sequence
tcaaaggcattcgccacgacatcac

SEQ ID NO: 298075 - DNA, 25 bp, Probe Sequence
tcaaagagttcgccgcgggctacaa

SEQ ID NO: 298076 - DNA, 25 bp, Probe Sequence
tcaagcagtgtgtcgggaagggata

SEQ ID NO: 298077 - DNA, 25 bp, Probe Sequence
tcaagcagtgtgtagggaaggcata

SEQ ID NO: 298078 - DNA, 25 bp, Probe Sequence
tcacacgctgtggatgggactggcc

SEQ ID NO: 298079 - DNA, 25 bp, Probe Sequence
tcaactagggatgggtttcctccca

SEQ ID NO: 298080 - DNA, 25 bp, Probe Sequence
taaagggttgggacctcacatgccc

SEQ ID NO: 298081 - DNA, 25 bp, Probe Sequence
taaagtttggggatgccaggcatac

SEQ ID NO: 298082 - DNA, 25 bp, Probe Sequence
taaggtgggtgggttgcctgagctc

SEQ ID NO: 298083 - DNA, 25 bp, Probe Sequence
taatcgggttggaggccatgccttg

SEQ ID NO: 298084 - DNA, 25 bp, Probe Sequence
taatcggggaatatggcactctgtt

SEQ ID NO: 298085 - DNA, 25 bp, Probe Sequence
tagactgaacgaatacaaccaactt

SEQ ID NO: 298086 - DNA, 25 bp, Probe Sequence
tagttaccgctaacaacctattcca

SEQ ID NO: 298087 - DNA, 25 bp, Probe Sequence
tactcaagcctgcaaaaccttttac

SEQ ID NO: 298088 - DNA, 25 bp, Probe Sequence
tcactcaagccatcacaaactcttt

SEQ ID NO: 298089 - DNA, 25 bp, Probe Sequence
tcactccagcaacacaaccatgttt

SEQ ID NO: 298090 - DNA, 25 bp, Probe Sequence
tcacttgctcaacaccagactttaa

SEQ ID NO: 298091 - DNA, 25 bp, Probe Sequence
tcaccctcctcaagtatacttcaaa

SEQ ID NO: 298092 - DNA, 25 bp, Probe Sequence
tcacccccatcatattttccaatga

SEQ ID NO: 298093 - DNA, 25 bp, Probe Sequence
tcaccgtccacagctttggaataaa

SEQ ID NO: 298094 - DNA, 25 bp, Probe Sequence
tcaccgtgtcaacctgatggggaga

SEQ ID NO: 298095 - DNA, 25 bp, Probe Sequence
tcacgtcgcgcatcgtgggtggaga

SEQ ID NO: 298096 - DNA, 25 bp, Probe Sequence
tcacgtctgccagctggtgagggca

SEQ ID NO: 298097 - DNA, 25 bp, Probe Sequence
tcacaggctgcaggctagagggggc

SEQ ID NO: 298098 - DNA, 25 bp, Probe Sequence
tcacattgcggtcagagctgctggg

SEQ ID NO: 298099 - DNA, 25 bp, Probe Sequence
tcaatggggatgcagacctctcagg

SEQ ID NO: 298100 - DNA, 25 bp, Probe Sequence
tcaatggggatgcagacctctcagg

SEQ ID NO: 298101 - DNA, 25 bp, Probe Sequence
tcactggggatgcgctgcccagaag

SEQ ID NO: 298102 - DNA, 25 bp, Probe Sequence
tcacgggagttcctgttaaaggtca

SEQ ID NO: 298103 - DNA, 25 bp, Probe Sequence
taccccagctaccgttaaatgagga

SEQ ID NO: 298104 - DNA, 25 bp, Probe Sequence
taccggtacaggcaaaacgaggaat

SEQ ID NO: 298105 - DNA, 25 bp, Probe Sequence
tcaccctctacgggagaaccaagga

SEQ ID NO: 298106 - DNA, 25 bp, Probe Sequence
taccgtcctctaggtaactcaagtg

SEQ ID NO: 298107 - DNA, 25 bp, Probe Sequence
tacaggtccccgatgaaccaagaga

SEQ ID NO: 298108 - DNA, 25 bp, Probe Sequence
tcaccctccccgaggacggagatga

SEQ ID NO: 298109 - DNA, 25 bp, Probe Sequence
tcaccctccgctattcaacagggac

SEQ ID NO: 298110 - DNA, 25 bp, Probe Sequence
tcaccccccatcttaagtaattact

SEQ ID NO: 298111 - DNA, 25 bp, Probe Sequence
tcaacccagccagaaagtacttccc

SEQ ID NO: 298112 - DNA, 25 bp, Probe Sequence
tcacactcatagctgaaaattactt

SEQ ID NO: 298113 - DNA, 25 bp, Probe Sequence
tcacactcatagctgtagattacgt

SEQ ID NO: 298114 - DNA, 25 bp, Probe Sequence
tcacagatagacttttgttcactta

SEQ ID NO: 298115 - DNA, 25 bp, Probe Sequence
tacaatagactttggggacttgggg

SEQ ID NO: 298116 - DNA, 25 bp, Probe Sequence
taaaggacttatcaaactggtttca

SEQ ID NO: 298117 - DNA, 25 bp, Probe Sequence
tcaaaactgctgcatggataacatg

SEQ ID NO: 298118 - DNA, 25 bp, Probe Sequence
tcaaagacagcgcatggaagctcca

SEQ ID NO: 298119 - DNA, 25 bp, Probe Sequence
tcacaagcccgctgtgaaccaaacg

SEQ ID NO: 298120 - DNA, 25 bp, Probe Sequence
tcacagcagcacgccttaatcaaag

SEQ ID NO: 298121 - DNA, 25 bp, Probe Sequence
tcacagccatcctcataatacacaa

SEQ ID NO: 298122 - DNA, 25 bp, Probe Sequence
tcacacaatacttcagacacacaac

SEQ ID NO: 298123 - DNA, 25 bp, Probe Sequence
tcactaatcatctaaacaactcact

SEQ ID NO: 298124 - DNA, 25 bp, Probe Sequence
tcactcagctcttaaagcaacctgt

SEQ ID NO: 298125 - DNA, 25 bp, Probe Sequence
tcactcccttgctatagcaagctct

SEQ ID NO: 298126 - DNA, 25 bp, Probe Sequence
tcaccgccttgctataggagtcacc

SEQ ID NO: 298127 - DNA, 25 bp, Probe Sequence
tcacccttggacaagctgtgagacc

SEQ ID NO: 298128 - DNA, 25 bp, Probe Sequence
tcacccttggacaaggtccccagga

SEQ ID NO: 298129 - DNA, 25 bp, Probe Sequence
tcaccctctggtagaaggcactgac

SEQ ID NO: 298130 - DNA, 25 bp, Probe Sequence
tcactccccagcatgaaggcgctga

SEQ ID NO: 298131 - DNA, 25 bp, Probe Sequence
tcactaccccattgaagacgcatca

SEQ ID NO: 298132 - DNA, 25 bp, Probe Sequence
tcacttccggcatgcagtacagcac

SEQ ID NO: 298133 - DNA, 25 bp, Probe Sequence
tcacttccaacttaggaccaacctg

SEQ ID NO: 298134 - DNA, 25 bp, Probe Sequence
tcacttccacttcaaaccttcagtg

SEQ ID NO: 298135 - DNA, 25 bp, Probe Sequence
tcacttaactctcgcaataccataa

SEQ ID NO: 298136 - DNA, 25 bp, Probe Sequence
tcacttaccctagttcattataaaa

SEQ ID NO: 298137 - DNA, 25 bp, Probe Sequence
tcactcacccaaactgaccaataaa

SEQ ID NO: 298138 - DNA, 25 bp, Probe Sequence
taatccgccagaacgaccagaaaaa

SEQ ID NO: 298139 - DNA, 25 bp, Probe Sequence
taaaccccaacacccgagtgatgaa

SEQ ID NO: 298140 - DNA, 25 bp, Probe Sequence
taaacctaccccaggagagagacgt

SEQ ID NO: 298141 - DNA, 25 bp, Probe Sequence
tcaagtcctacctgccaggaatagc

SEQ ID NO: 298142 - DNA, 25 bp, Probe Sequence
taattggctacgtgctcttgtttgg

SEQ ID NO: 298143 - DNA, 25 bp, Probe Sequence
taagggctactatctcaaggggaag

SEQ ID NO: 298144 - DNA, 25 bp, Probe Sequence
tcaagggctttttccagagtgctaa

SEQ ID NO: 298145 - DNA, 25 bp, Probe Sequence
tcaagctggccgactcttaaggaaa

SEQ ID NO: 298146 - DNA, 25 bp, Probe Sequence
tcaagctacttgactttctcctaga

SEQ ID NO: 298147 - DNA, 25 bp, Probe Sequence
tcaacagaagtgatttgtccaatat

SEQ ID NO: 298148 - DNA, 25 bp, Probe Sequence
tcaaccccgatgaacgtccaatggg

SEQ ID NO: 298149 - DNA, 25 bp, Probe Sequence
tcaacctacaggaatcctccacctg

SEQ ID NO: 298150 - DNA, 25 bp, Probe Sequence
tcaacctcaaggagtacaacctggt

SEQ ID NO: 298151 - DNA, 25 bp, Probe Sequence
tcaacaatagggtttacgacctcga

SEQ ID NO: 298152 - DNA, 25 bp, Probe Sequence
tcaaaatgtctactgttcacgaaat

SEQ ID NO: 298153 - DNA, 25 bp, Probe Sequence
tcaaaacatcttagtcatacgacca

SEQ ID NO: 298154 - DNA, 25 bp, Probe Sequence
tcaaaacatactctgatcaccccga

SEQ ID NO: 298155 - DNA, 25 bp, Probe Sequence
tcaaaccacaatgcacatccttact

SEQ ID NO: 298156 - DNA, 25 bp, Probe Sequence
tcaatgactccctcacattcttaga

SEQ ID NO: 298157 - DNA, 25 bp, Probe Sequence
taagactactatacaaactacagag

SEQ ID NO: 298158 - DNA, 25 bp, Probe Sequence
tcacaagctggaaagaaactatccg

SEQ ID NO: 298159 - DNA, 25 bp, Probe Sequence
tcacaggccgacaagatacctctcg

SEQ ID NO: 298160 - DNA, 25 bp, Probe Sequence
tcacaagattgacagcttctgctgt

SEQ ID NO: 298161 - DNA, 25 bp, Probe Sequence
tcacagaactggatgttgctgctga

SEQ ID NO: 298162 - DNA, 25 bp, Probe Sequence
tcacaacactggctgagcggatgca

SEQ ID NO: 298163 - DNA, 25 bp, Probe Sequence
tcacaccaatgccagtgctcgagac

SEQ ID NO: 298164 - DNA, 25 bp, Probe Sequence
tcacagcatcagggggctcagagtc

SEQ ID NO: 298165 - DNA, 25 bp, Probe Sequence
tcacacaggaacagctaggaccatt

SEQ ID NO: 298166 - DNA, 25 bp, Probe Sequence
tcactcaggaaacttcagcgaccca

SEQ ID NO: 298167 - DNA, 25 bp, Probe Sequence
tcaccctgacaccttcagcagtaaa

SEQ ID NO: 298168 - DNA, 25 bp, Probe Sequence
tcaaggctgagcgcattatggtaga

SEQ ID NO: 298169 - DNA, 25 bp, Probe Sequence
tcaacctagctttcgaatgctgata

SEQ ID NO: 298170 - DNA, 25 bp, Probe Sequence
tcaacgcaaggactggtgatgagta

SEQ ID NO: 298171 - DNA, 25 bp, Probe Sequence
tcaagcagatagcaggagatgacat

SEQ ID NO: 298172 - DNA, 25 bp, Probe Sequence
tcacgcagaagttggcaggagcatg

SEQ ID NO: 298173 - DNA, 25 bp, Probe Sequence
tcacatcaacgtcgggtcacatggg

SEQ ID NO: 298174 - DNA, 25 bp, Probe Sequence
tcacagccactgtggtggcctctgg

SEQ ID NO: 298175 - DNA, 25 bp, Probe Sequence
tcacagcaactcaggggcacagctc

SEQ ID NO: 298176 - DNA, 25 bp, Probe Sequence
tcacaaagccagtaggtggcagagc

SEQ ID NO: 298177 - DNA, 25 bp, Probe Sequence
tcacacacgcgcacatgggcgcgca

SEQ ID NO: 298178 - DNA, 25 bp, Probe Sequence
tcacatcccagacgatgggcggcca

SEQ ID NO: 298179 - DNA, 25 bp, Probe Sequence
tcacagcccgacgaaaggatgccaa

SEQ ID NO: 298180 - DNA, 25 bp, Probe Sequence
tcacgacacagaaaccaagatggaa

SEQ ID NO: 298181 - DNA, 25 bp, Probe Sequence
tatcccacgatatctaaatgaaaaa

SEQ ID NO: 298182 - DNA, 25 bp, Probe Sequence
tcaatcccagattttcaaaaaataa

SEQ ID NO: 298183 - DNA, 25 bp, Probe Sequence
tcaacccgtaactactactaatcaa

SEQ ID NO: 298184 - DNA, 25 bp, Probe Sequence
tcaacccctttgagctgactaatca

SEQ ID NO: 298185 - DNA, 25 bp, Probe Sequence
taatccctctttttgtgacacaagt

SEQ ID NO: 298186 - DNA, 25 bp, Probe Sequence
taatcccatttctttatcctaaggt

SEQ ID NO: 298187 - DNA, 25 bp, Probe Sequence
taaccttctctaaatcccataaggt

SEQ ID NO: 298188 - DNA, 25 bp, Probe Sequence
taagcctccccacaaggcgagggga

SEQ ID NO: 298189 - DNA, 25 bp, Probe Sequence
taacctcccccatagttatgaagag

SEQ ID NO: 298190 - DNA, 25 bp, Probe Sequence
taagcctcgacctgtagctgtttca

SEQ ID NO: 298191 - DNA, 25 bp, Probe Sequence
ttggtgtgaaactcggctgtattaa

SEQ ID NO: 298192 - DNA, 25 bp, Probe Sequence
tataggtaaatctcaagggtaaaat

SEQ ID NO: 298193 - DNA, 25 bp, Probe Sequence
taaggttaaaccacagcttgaagaa

SEQ ID NO: 298194 - DNA, 25 bp, Probe Sequence
tagggctctgaatacgggcttaaag

SEQ ID NO: 298195 - DNA, 25 bp, Probe Sequence
taattctctcgatacggttctaaac

SEQ ID NO: 298196 - DNA, 25 bp, Probe Sequence
taaccttcctgatctggtttcaacc

SEQ ID NO: 298197 - DNA, 25 bp, Probe Sequence
tcaaactacctgtactggtttaaat

SEQ ID NO: 298198 - DNA, 25 bp, Probe Sequence
taaactcacaggtgctaaatttaaa

SEQ ID NO: 298199 - DNA, 25 bp, Probe Sequence
tcaaacccagggccaagtatgctac

SEQ ID NO: 298200 - DNA, 25 bp, Probe Sequence
tcaattccctggtgcggtaccagtg

SEQ ID NO: 298201 - DNA, 25 bp, Probe Sequence
tcacacccttagttttgtaccatta

SEQ ID NO: 298202 - DNA, 25 bp, Probe Sequence
tcaacctgtaagtattttcgaattt

SEQ ID NO: 298203 - DNA, 25 bp, Probe Sequence
tcactctctgttattctgttacaat

SEQ ID NO: 298204 - DNA, 25 bp, Probe Sequence
tcactgcttgttatgcatcatttca

SEQ ID NO: 298205 - DNA, 25 bp, Probe Sequence
tcacttcaattaatgctgcgcttcg

SEQ ID NO: 298206 - DNA, 25 bp, Probe Sequence
tcacccacgatatcatcaccaagtt

SEQ ID NO: 298207 - DNA, 25 bp, Probe Sequence
tcaacgcccataatcataccaagcc

SEQ ID NO: 298208 - DNA, 25 bp, Probe Sequence
tcaacccattaaagacccaggccct

SEQ ID NO: 298209 - DNA, 25 bp, Probe Sequence
tcaaccgcacgacggacgtgacgca

SEQ ID NO: 298210 - DNA, 25 bp, Probe Sequence
tcaactccactggggaaggctccca

SEQ ID NO: 298211 - DNA, 25 bp, Probe Sequence
tcaaggtcctggggaaccccaagag

SEQ ID NO: 298212 - DNA, 25 bp, Probe Sequence
tcaaggtcctggggaaccccaagag

SEQ ID NO: 298213 - DNA, 25 bp, Probe Sequence
tcaagcccgcggggacattgggaag

SEQ ID NO: 298214 - DNA, 25 bp, Probe Sequence
tcaagaccggaggcacagagggcag

SEQ ID NO: 298215 - DNA, 25 bp, Probe Sequence
taagacccggatgcagggcctggag

SEQ ID NO: 298216 - DNA, 25 bp, Probe Sequence
tcaacacccggcttcggaagctgga

SEQ ID NO: 298217 - DNA, 25 bp, Probe Sequence
tcaacctggggttcgaaatcagtga

SEQ ID NO: 298218 - DNA, 25 bp, Probe Sequence
tcaactggggagtaccaagtgcttt

SEQ ID NO: 298219 - DNA, 25 bp, Probe Sequence
tcaactggggggtctcaagtgggtg

SEQ ID NO: 298220 - DNA, 25 bp, Probe Sequence
tcaagaggagggcactagggccctg

SEQ ID NO: 298221 - DNA, 25 bp, Probe Sequence
taaaaggggcgatcaggtccatctc

SEQ ID NO: 298222 - DNA, 25 bp, Probe Sequence
taaaaggccgtttcagtcttcaatc

SEQ ID NO: 298223 - DNA, 25 bp, Probe Sequence
tcaacaaggcctgttccttcagcaa

SEQ ID NO: 298224 - DNA, 25 bp, Probe Sequence
tcaaccaggcaagatcatccggtga

SEQ ID NO: 298225 - DNA, 25 bp, Probe Sequence
tcaacgtgcgcaagcgttgcggcgg

SEQ ID NO: 298226 - DNA, 25 bp, Probe Sequence
tcaacgtgcgcaagcgttgcggcgg

SEQ ID NO: 298227 - DNA, 25 bp, Probe Sequence
tcacacgggagcgtttgggcgcagc

SEQ ID NO: 298228 - DNA, 25 bp, Probe Sequence
tcaacggtcagcttgttggtgccaa

SEQ ID NO: 298229 - DNA, 25 bp, Probe Sequence
tcaagcaggccctgttggaattgaa

SEQ ID NO: 298230 - DNA, 25 bp, Probe Sequence
tcaagcacaccctggtgacctgtga

SEQ ID NO: 298231 - DNA, 25 bp, Probe Sequence
tcaagcacaccctggtgacctgtga

SEQ ID NO: 298232 - DNA, 25 bp, Probe Sequence
tcaagaccaattcggctgtccggac

SEQ ID NO: 298233 - DNA, 25 bp, Probe Sequence
tcaaacagactcctagctctgccag

SEQ ID NO: 298234 - DNA, 25 bp, Probe Sequence
tcacataaagcttgctaccgctcaa

SEQ ID NO: 298235 - DNA, 25 bp, Probe Sequence
tcaataaagtaccctgtgctcaacc

SEQ ID NO: 298236 - DNA, 25 bp, Probe Sequence
tcaataaagtaccctgtgctcaacc

SEQ ID NO: 298237 - DNA, 25 bp, Probe Sequence
tcaataaagacaccttttgtaccaa

SEQ ID NO: 298238 - DNA, 25 bp, Probe Sequence
tcaaaatcaacgtttaattaccagt

SEQ ID NO: 298239 - DNA, 25 bp, Probe Sequence
tttgactcaccggggatttccaagt

SEQ ID NO: 298240 - DNA, 25 bp, Probe Sequence
tagctaccactaggtggatagtaaa

SEQ ID NO: 298241 - DNA, 25 bp, Probe Sequence
tactaaactgggggatattatgaag

SEQ ID NO: 298242 - DNA, 25 bp, Probe Sequence
tactgaaacgagtggtcagcacatt

SEQ ID NO: 298243 - DNA, 25 bp, Probe Sequence
tcactggaaagagtgccagtcagca

SEQ ID NO: 298244 - DNA, 25 bp, Probe Sequence
taatcagcttgaactgccagtgcac

SEQ ID NO: 298245 - DNA, 25 bp, Probe Sequence
tcaagcctagcaatccatcagacaa

SEQ ID NO: 298246 - DNA, 25 bp, Probe Sequence
tcacacgcatagatccacgaggcac

SEQ ID NO: 298247 - DNA, 25 bp, Probe Sequence
tcaacgctatgaacgcaaggctgtg

SEQ ID NO: 298248 - DNA, 25 bp, Probe Sequence
tcaacggcagcgacgaagagcagtg

SEQ ID NO: 298249 - DNA, 25 bp, Probe Sequence
tcaactggattgacaaaatcatgag

SEQ ID NO: 298250 - DNA, 25 bp, Probe Sequence
tcaaccgtcatgacaaaatcaatgg

SEQ ID NO: 298251 - DNA, 25 bp, Probe Sequence
tcacaccacctgaccaagatgacag

SEQ ID NO: 298252 - DNA, 25 bp, Probe Sequence
tcacactagctcaccagcagtgaat

SEQ ID NO: 298253 - DNA, 25 bp, Probe Sequence
tcacaattgtctctcacagtgtatg

SEQ ID NO: 298254 - DNA, 25 bp, Probe Sequence
tcaacattcattcacagattgactg

SEQ ID NO: 298255 - DNA, 25 bp, Probe Sequence
tcaagcgtcactcatctgtacatag

SEQ ID NO: 298256 - DNA, 25 bp, Probe Sequence
tcacagcgttggcactgtcttcaga

SEQ ID NO: 298257 - DNA, 25 bp, Probe Sequence
tcacatgcatatttaacttcccaca

SEQ ID NO: 298258 - DNA, 25 bp, Probe Sequence
taccttataacacttagccacttct

SEQ ID NO: 298259 - DNA, 25 bp, Probe Sequence
tcactgccttaaccttaactgttct

SEQ ID NO: 298260 - DNA, 25 bp, Probe Sequence
tcactccttcaaccactcaagtggt

SEQ ID NO: 298261 - DNA, 25 bp, Probe Sequence
tcacacctgtaatcccagcattttg

SEQ ID NO: 298262 - DNA, 25 bp, Probe Sequence
tcaacctctcagtgattccatttct

SEQ ID NO: 298263 - DNA, 25 bp, Probe Sequence
tcaatccatcctcggatgtcgctgc

SEQ ID NO: 298264 - DNA, 25 bp, Probe Sequence
tcactttcactgaggatgctgtcct

SEQ ID NO: 298265 - DNA, 25 bp, Probe Sequence
tcactttgggcatggcagcttccta

SEQ ID NO: 298266 - DNA, 25 bp, Probe Sequence
tcacatttgtgcctggtgacttcct

SEQ ID NO: 298267 - DNA, 25 bp, Probe Sequence
tcacaatgtggccgaggactttgat

SEQ ID NO: 298268 - DNA, 25 bp, Probe Sequence
tcacagatgctgctggcagtccctt

SEQ ID NO: 298269 - DNA, 25 bp, Probe Sequence
tcacatgatctcatcggtaccttcc

SEQ ID NO: 298270 - DNA, 25 bp, Probe Sequence
tcactgctgactccaagtactgcta

SEQ ID NO: 298271 - DNA, 25 bp, Probe Sequence
tcactgagactccgagtcagcccaa

SEQ ID NO: 298272 - DNA, 25 bp, Probe Sequence
tcactcgaatccgggagacagaggt

SEQ ID NO: 298273 - DNA, 25 bp, Probe Sequence
tcacttgaacccgggaggcggaggt

SEQ ID NO: 298274 - DNA, 25 bp, Probe Sequence
ttagtaatccccgccaggcgaggtg

SEQ ID NO: 298275 - DNA, 25 bp, Probe Sequence
ttagttacccctgcctaaaggatat

SEQ ID NO: 298276 - DNA, 25 bp, Probe Sequence
tcaatttacccctctgctaaataaa

SEQ ID NO: 298277 - DNA, 25 bp, Probe Sequence
tcactattacttgaactttccaaaa

SEQ ID NO: 298278 - DNA, 25 bp, Probe Sequence
tcactcttaattaatatctgtatcc

SEQ ID NO: 298279 - DNA, 25 bp, Probe Sequence
tcacttttatgatcattcctattca

SEQ ID NO: 298280 - DNA, 25 bp, Probe Sequence
tcacttatttattcatatcatgcct

SEQ ID NO: 298281 - DNA, 25 bp, Probe Sequence
tcaaattttttcacatgctgcatgt

SEQ ID NO: 298282 - DNA, 25 bp, Probe Sequence
tcaaatggtatttcttagttgctag

SEQ ID NO: 298283 - DNA, 25 bp, Probe Sequence
tcaagaggtttccttatctcataag

SEQ ID NO: 298284 - DNA, 25 bp, Probe Sequence
tcacatagagtgatctttcccaaga

SEQ ID NO: 298285 - DNA, 25 bp, Probe Sequence
tcaagagatctttctttccaaaaca

SEQ ID NO: 298286 - DNA, 25 bp, Probe Sequence
tcaaaccttactatacacaagagaa

SEQ ID NO: 298287 - DNA, 25 bp, Probe Sequence
taagaagctctacatgtaaaaaggg

SEQ ID NO: 298288 - DNA, 25 bp, Probe Sequence
tcacagcacagcacaccttataaaa

SEQ ID NO: 298289 - DNA, 25 bp, Probe Sequence
tcacacaatgccaagacttcgaaaa

SEQ ID NO: 298290 - DNA, 25 bp, Probe Sequence
tcactttgcatttggctttgagaaa

SEQ ID NO: 298291 - DNA, 25 bp, Probe Sequence
tcactctccaccagcctgggaaatg

SEQ ID NO: 298292 - DNA, 25 bp, Probe Sequence
tcaaactaatgaggtctgggaagtg

SEQ ID NO: 298293 - DNA, 25 bp, Probe Sequence
tcacaggaaagtgtctgcagtaggg

SEQ ID NO: 298294 - DNA, 25 bp, Probe Sequence
tcacagtgcaaattccccacaagcg

SEQ ID NO: 298295 - DNA, 25 bp, Probe Sequence
tcacttacaaattcacccacgagac

SEQ ID NO: 298296 - DNA, 25 bp, Probe Sequence
taatctccaacatccaagcatcgaa

SEQ ID NO: 298297 - DNA, 25 bp, Probe Sequence
taatggccatcatcctaagcccaaa

SEQ ID NO: 298298 - DNA, 25 bp, Probe Sequence
taattccatgcatctcaacaaccac

SEQ ID NO: 298299 - DNA, 25 bp, Probe Sequence
taattgaaggcagcaaaaggcacag

SEQ ID NO: 298300 - DNA, 25 bp, Probe Sequence
taattatagaagcaagaaggcgata

SEQ ID NO: 298301 - DNA, 25 bp, Probe Sequence
taatttggaggaaaggaggcgtggt

SEQ ID NO: 298302 - DNA, 25 bp, Probe Sequence
taatttgcagggagatcgacgacgt

SEQ ID NO: 298303 - DNA, 25 bp, Probe Sequence
taatttgcaggggtgcccgctatgg

SEQ ID NO: 298304 - DNA, 25 bp, Probe Sequence
taatcccaagggtgcctgcttaggc

SEQ ID NO: 298305 - DNA, 25 bp, Probe Sequence
taaccctgggcagtggttcttaggc

SEQ ID NO: 298306 - DNA, 25 bp, Probe Sequence
taaccttaggcatgagtccttaggg

SEQ ID NO: 298307 - DNA, 25 bp, Probe Sequence
tagtgccgtagggagttacccggtg

SEQ ID NO: 298308 - DNA, 25 bp, Probe Sequence
taaccaaagaagctgtactccgggg

SEQ ID NO: 298309 - DNA, 25 bp, Probe Sequence
taaccaaagaagctgtactccgggg

SEQ ID NO: 298310 - DNA, 25 bp, Probe Sequence
tcaacctagaaacctttatccctgc

SEQ ID NO: 298311 - DNA, 25 bp, Probe Sequence
tatgggctttaatttcactacccca

SEQ ID NO: 298312 - DNA, 25 bp, Probe Sequence
tagagacaattagggccaaccccaa

SEQ ID NO: 298313 - DNA, 25 bp, Probe Sequence
taagtgacatacggggaccttccac

SEQ ID NO: 298314 - DNA, 25 bp, Probe Sequence
taatgtgacttgggggagcctttac

SEQ ID NO: 298315 - DNA, 25 bp, Probe Sequence
taattttagggcgcaccctctactc

SEQ ID NO: 298316 - DNA, 25 bp, Probe Sequence
taattttcaggaagacccaatccag

SEQ ID NO: 298317 - DNA, 25 bp, Probe Sequence
tcactctcttagcaaggtctcacac

SEQ ID NO: 298318 - DNA, 25 bp, Probe Sequence
tcacacttctagtaagcctctacct

SEQ ID NO: 298319 - DNA, 25 bp, Probe Sequence
tcacattctttctaaccatggaccc

SEQ ID NO: 298320 - DNA, 25 bp, Probe Sequence
tcacactcttctctgagcctgaaat

SEQ ID NO: 298321 - DNA, 25 bp, Probe Sequence
tcacaccatttcatacttcaactaa

SEQ ID NO: 298322 - DNA, 25 bp, Probe Sequence
tcacactcttccatattgtctgcac

SEQ ID NO: 298323 - DNA, 25 bp, Probe Sequence
tcacacattggactagcttgctctc

SEQ ID NO: 298324 - DNA, 25 bp, Probe Sequence
tcacaaccacaatgcatctgactgc

SEQ ID NO: 298325 - DNA, 25 bp, Probe Sequence
tcacacctccagtagcatcaaactc

SEQ ID NO: 298326 - DNA, 25 bp, Probe Sequence
tcaacttcaagtttcagcaactacc

SEQ ID NO: 298327 - DNA, 25 bp, Probe Sequence
tcaaatttttcaccagatcctctcc

SEQ ID NO: 298328 - DNA, 25 bp, Probe Sequence
tcaaattatcttgctgaatccttct

SEQ ID NO: 298329 - DNA, 25 bp, Probe Sequence
tcaaaaatctatctgaatttggaat

SEQ ID NO: 298330 - DNA, 25 bp, Probe Sequence
tcaaagactcattgcttaattctaa

SEQ ID NO: 298331 - DNA, 25 bp, Probe Sequence
tcaagtcattcaagttaagcttaat

SEQ ID NO: 298332 - DNA, 25 bp, Probe Sequence
tcaagacttcattatttgccttttg

SEQ ID NO: 298333 - DNA, 25 bp, Probe Sequence
tcaaatgggagttttgtttttggca

SEQ ID NO: 298334 - DNA, 25 bp, Probe Sequence
tcaaatgtgggtactcttttaggag

SEQ ID NO: 298335 - DNA, 25 bp, Probe Sequence
taaattggtagactcttttggaggg

SEQ ID NO: 298336 - DNA, 25 bp, Probe Sequence
tcaaatccgggacttgtttgtacgt

SEQ ID NO: 298337 - DNA, 25 bp, Probe Sequence
tcaaccacagtttttgtgtttactt

SEQ ID NO: 298338 - DNA, 25 bp, Probe Sequence
tcaagaacagtttcttctggattcc

SEQ ID NO: 298339 - DNA, 25 bp, Probe Sequence
tcaacgacgaattcttgtggctacc

SEQ ID NO: 298340 - DNA, 25 bp, Probe Sequence
tcaacaaccgagccttttgcaacta

SEQ ID NO: 298341 - DNA, 25 bp, Probe Sequence
taacctgtcgaagttatctgatgac

SEQ ID NO: 298342 - DNA, 25 bp, Probe Sequence
tcacatcctgtgggactctgttgat

SEQ ID NO: 298343 - DNA, 25 bp, Probe Sequence
tcactgttgtagcttctgttgtgat

SEQ ID NO: 298344 - DNA, 25 bp, Probe Sequence
tcactaagctcgctttcttgctgtc

SEQ ID NO: 298345 - DNA, 25 bp, Probe Sequence
tcactaagctcgctttcttgctgtc

SEQ ID NO: 298346 - DNA, 25 bp, Probe Sequence
tcactaagctcgctttcttgctgtc

SEQ ID NO: 298347 - DNA, 25 bp, Probe Sequence
tactcgaacggtactctttgcatct

SEQ ID NO: 298348 - DNA, 25 bp, Probe Sequence
tacggaaccgtgagttccgctgcct

SEQ ID NO: 298349 - DNA, 25 bp, Probe Sequence
tacaggaaacgggggatccactccg

SEQ ID NO: 298350 - DNA, 25 bp, Probe Sequence
tcaaggcaaaaatcgttgtcacatc

SEQ ID NO: 298351 - DNA, 25 bp, Probe Sequence
taatccgtcaaattcttgtataact

SEQ ID NO: 298352 - DNA, 25 bp, Probe Sequence
tcacaccaggccaatccttgttaac

SEQ ID NO: 298353 - DNA, 25 bp, Probe Sequence
tcaaccaccatttcagctattaaaa

SEQ ID NO: 298354 - DNA, 25 bp, Probe Sequence
tcaaacaccctttgtattccaaaat

SEQ ID NO: 298355 - DNA, 25 bp, Probe Sequence
tcaaatgtccttaattgtctccaga

SEQ ID NO: 298356 - DNA, 25 bp, Probe Sequence
tcaaatgatcctttatcttttcaga

SEQ ID NO: 298357 - DNA, 25 bp, Probe Sequence
tcaaatgatcctttatcttttcaga

SEQ ID NO: 298358 - DNA, 25 bp, Probe Sequence
tcactttcatttaatccattgtcaa

SEQ ID NO: 298359 - DNA, 25 bp, Probe Sequence
tcacttctttgtaatccagttgctg

SEQ ID NO: 298360 - DNA, 25 bp, Probe Sequence
tcactatcaattttgttcagctggt

SEQ ID NO: 298361 - DNA, 25 bp, Probe Sequence
tcactctcagtgcttcttactatta

SEQ ID NO: 298362 - DNA, 25 bp, Probe Sequence
tcactctaggtttatattgtatgta

SEQ ID NO: 298363 - DNA, 25 bp, Probe Sequence
tcactctgtgagtgcacattttggt

SEQ ID NO: 298364 - DNA, 25 bp, Probe Sequence
tcacttgtcatggtctttcttggta

SEQ ID NO: 298365 - DNA, 25 bp, Probe Sequence
tcactcactctgatttatgttttga

SEQ ID NO: 298366 - DNA, 25 bp, Probe Sequence
tcacatccatctacttttttatcca

SEQ ID NO: 298367 - DNA, 25 bp, Probe Sequence
tcacacctcactctttatagtgcac

SEQ ID NO: 298368 - DNA, 25 bp, Probe Sequence
tcaaccaccgacttatcaatgcagc

SEQ ID NO: 298369 - DNA, 25 bp, Probe Sequence
tcaactcagccttcagattgtatga

SEQ ID NO: 298370 - DNA, 25 bp, Probe Sequence
tcaacacagctcgcaacttatggct

SEQ ID NO: 298371 - DNA, 25 bp, Probe Sequence
tcaagccagcctgaccaacatggtg

SEQ ID NO: 298372 - DNA, 25 bp, Probe Sequence
tcaagccagcctgaccaacatggtg

SEQ ID NO: 298373 - DNA, 25 bp, Probe Sequence
ttagccatgcacaaacggtagtttt

SEQ ID NO: 298374 - DNA, 25 bp, Probe Sequence
ttagccatgcacaaacggtagtttt

SEQ ID NO: 298375 - DNA, 25 bp, Probe Sequence
ttagccatgcacaaacggtagtttt

SEQ ID NO: 298376 - DNA, 25 bp, Probe Sequence
tcaacatatgcataaccttagtatt

SEQ ID NO: 298377 - DNA, 25 bp, Probe Sequence
tcacttgccactcacctgtgagttc

SEQ ID NO: 298378 - DNA, 25 bp, Probe Sequence
tcactctgtcacccaggctggagtg

SEQ ID NO: 298379 - DNA, 25 bp, Probe Sequence
tcactctattcgccttaggcatgtg

SEQ ID NO: 298380 - DNA, 25 bp, Probe Sequence
tcaatccaggagccttgagtctgtg

SEQ ID NO: 298381 - DNA, 25 bp, Probe Sequence
tcacatttgtgatctgtagctctgg

SEQ ID NO: 298382 - DNA, 25 bp, Probe Sequence
tcacatggtgtggtctgatgttctg

SEQ ID NO: 298383 - DNA, 25 bp, Probe Sequence
tcacagtggctggactcatcgattc

SEQ ID NO: 298384 - DNA, 25 bp, Probe Sequence
tcaagctggctaagcctgccatgct

SEQ ID NO: 298385 - DNA, 25 bp, Probe Sequence
tcaagctggctcactcagacacatt

SEQ ID NO: 298386 - DNA, 25 bp, Probe Sequence
tcaaggcactgaacaggcacctcta

SEQ ID NO: 298387 - DNA, 25 bp, Probe Sequence
tcaaccacgataataccctgcttgc

SEQ ID NO: 298388 - DNA, 25 bp, Probe Sequence
tcaaccacgataataccctgcttgc

SEQ ID NO: 298389 - DNA, 25 bp, Probe Sequence
taaacacgtttagagtaatttgagt

SEQ ID NO: 298390 - DNA, 25 bp, Probe Sequence
ttgggcccccaagaattatattgag

SEQ ID NO: 298391 - DNA, 25 bp, Probe Sequence
ttttcccctaactttagcaatgtag

SEQ ID NO: 298392 - DNA, 25 bp, Probe Sequence
taagcctccctagatttaaagtaga

SEQ ID NO: 298393 - DNA, 25 bp, Probe Sequence
taatgcacccctctttcaaatgata

SEQ ID NO: 298394 - DNA, 25 bp, Probe Sequence
tcaatgcagccgcctgtgtattgca

SEQ ID NO: 298395 - DNA, 25 bp, Probe Sequence
tcaagggagttgttttgcacctaaa

SEQ ID NO: 298396 - DNA, 25 bp, Probe Sequence
taagttcagtagttgcttccctaac

SEQ ID NO: 298397 - DNA, 25 bp, Probe Sequence
taagttcagtagttgcttccctaac

SEQ ID NO: 298398 - DNA, 25 bp, Probe Sequence
tcaagaactgtacaagctgccctag

SEQ ID NO: 298399 - DNA, 25 bp, Probe Sequence
tcaagacacctcccgagtgtctgct

SEQ ID NO: 298400 - DNA, 25 bp, Probe Sequence
tcaacagccctgtgaagtgacctca

SEQ ID NO: 298401 - DNA, 25 bp, Probe Sequence
tcacagaccaggtgaactgccccaa

SEQ ID NO: 298402 - DNA, 25 bp, Probe Sequence
tcaagacacggggaacccacacaca

SEQ ID NO: 298403 - DNA, 25 bp, Probe Sequence
tcaagaggggcagcaacaccaccag

SEQ ID NO: 298404 - DNA, 25 bp, Probe Sequence
tcaagggacggaaacatcagcacca

SEQ ID NO: 298405 - DNA, 25 bp, Probe Sequence
tcacatcgctacagacaagacctcc

SEQ ID NO: 298406 - DNA, 25 bp, Probe Sequence
tactccttccagccagtgaggatcc

SEQ ID NO: 298407 - DNA, 25 bp, Probe Sequence
tcactttgtcactcgatgtcattcc

SEQ ID NO: 298408 - DNA, 25 bp, Probe Sequence
tcactttgctcatgttattgttgac

SEQ ID NO: 298409 - DNA, 25 bp, Probe Sequence
tcacagttgctgtctattaatttaa

SEQ ID NO: 298410 - DNA, 25 bp, Probe Sequence
tcacagttccctttatttcacataa

SEQ ID NO: 298411 - DNA, 25 bp, Probe Sequence
tacagtcgtcgggaaggaacaagag

SEQ ID NO: 298412 - DNA, 25 bp, Probe Sequence
tcaatggttagcagaagggagaaaa

SEQ ID NO: 298413 - DNA, 25 bp, Probe Sequence
tcaacgtggagcacatgacggagaa

SEQ ID NO: 298414 - DNA, 25 bp, Probe Sequence
tcaacgtggcagagggcgctttaac

SEQ ID NO: 298415 - DNA, 25 bp, Probe Sequence
tcaactggccgctggagtgatttct

SEQ ID NO: 298416 - DNA, 25 bp, Probe Sequence
tcaattgagacctttagctaactta

SEQ ID NO: 298417 - DNA, 25 bp, Probe Sequence
tcacattaagccctctccaaaatga

SEQ ID NO: 298418 - DNA, 25 bp, Probe Sequence
tcacattcaatgccagttaaaatta

SEQ ID NO: 298419 - DNA, 25 bp, Probe Sequence
tcaaccaacatcattatgaaattaa

SEQ ID NO: 298420 - DNA, 25 bp, Probe Sequence
tcaataaacaacagctgaagcaaaa

SEQ ID NO: 298421 - DNA, 25 bp, Probe Sequence
tcaaaacacacagtacagacagcat

SEQ ID NO: 298422 - DNA, 25 bp, Probe Sequence
tcaaaggccagagtcacaggaagga

SEQ ID NO: 298423 - DNA, 25 bp, Probe Sequence
tcacagattgcagggacacaggaag

SEQ ID NO: 298424 - DNA, 25 bp, Probe Sequence
tacagccgacgaggcgcaggaagcc

SEQ ID NO: 298425 - DNA, 25 bp, Probe Sequence
tcaaggcaactagtggagagaactg

SEQ ID NO: 298426 - DNA, 25 bp, Probe Sequence
tcaaggataacacggcgatgaacgt

SEQ ID NO: 298427 - DNA, 25 bp, Probe Sequence
tcacaggtagattctggtttacaat

SEQ ID NO: 298428 - DNA, 25 bp, Probe Sequence
tcacatttcagtccgtttatcactt

SEQ ID NO: 298429 - DNA, 25 bp, Probe Sequence
tcaatttcctcacctttaaactggg

SEQ ID NO: 298430 - DNA, 25 bp, Probe Sequence
taagttccctctttgaaaactggtg

SEQ ID NO: 298431 - DNA, 25 bp, Probe Sequence
taaatttctcctgggaaacctgcct

SEQ ID NO: 298432 - DNA, 25 bp, Probe Sequence
ttcagattttagctggaaccccaat

SEQ ID NO: 298433 - DNA, 25 bp, Probe Sequence
taagatgactttggtgaaaccccgt

SEQ ID NO: 298434 - DNA, 25 bp, Probe Sequence
taaagcgtttggaaaatccacagga

SEQ ID NO: 298435 - DNA, 25 bp, Probe Sequence
tcaaccagtttgctgtaatgccaga

SEQ ID NO: 298436 - DNA, 25 bp, Probe Sequence
taatactttgtccttcatatgtgaa

SEQ ID NO: 298437 - DNA, 25 bp, Probe Sequence
tcaatcctgttgagttacatttaga

SEQ ID NO: 298438 - DNA, 25 bp, Probe Sequence
tcaactttctttatagcattgaaaa

SEQ ID NO: 298439 - DNA, 25 bp, Probe Sequence
tcacattattgctttttcctctgta

SEQ ID NO: 298440 - DNA, 25 bp, Probe Sequence
tactgtattgggcttcttcgttaat

SEQ ID NO: 298441 - DNA, 25 bp, Probe Sequence
tactgtattgggcttcttcgttaat

SEQ ID NO: 298442 - DNA, 25 bp, Probe Sequence
taaatattgggctgtttccctcttc

SEQ ID NO: 298443 - DNA, 25 bp, Probe Sequence
taaatattgggctgtttccctcttc

SEQ ID NO: 298444 - DNA, 25 bp, Probe Sequence
tcaaatgggaccggattgcccctgc

SEQ ID NO: 298445 - DNA, 25 bp, Probe Sequence
tcaaagacggtaaatggcccgccgg

SEQ ID NO: 298446 - DNA, 25 bp, Probe Sequence
tcaaggacggtaaatgggccgcctg

SEQ ID NO: 298447 - DNA, 25 bp, Probe Sequence
tcaaggacggtaatggcccgcctgt

SEQ ID NO: 298448 - DNA, 25 bp, Probe Sequence
tcacaggccatgggactggccctct

SEQ ID NO: 298449 - DNA, 25 bp, Probe Sequence
tcacagcagacagggtcgctgccct

SEQ ID NO: 298450 - DNA, 25 bp, Probe Sequence
tcaaagtacgagaagctacctgtga

SEQ ID NO: 298451 - DNA, 25 bp, Probe Sequence
tcaaatgccaaacactagctctgta

SEQ ID NO: 298452 - DNA, 25 bp, Probe Sequence
tcacacaggaaacagctatgaccat

SEQ ID NO: 298453 - DNA, 25 bp, Probe Sequence
tcacatgcacgagagtccttgttcc

SEQ ID NO: 298454 - DNA, 25 bp, Probe Sequence
tcacatgcacgacagtccttgttcc

SEQ ID NO: 298455 - DNA, 25 bp, Probe Sequence
tcacatgattattcagtcctttagt

SEQ ID NO: 298456 - DNA, 25 bp, Probe Sequence
tcacagctggaatctcctttgccat

SEQ ID NO: 298457 - DNA, 25 bp, Probe Sequence
tcacagctggaatctcctttgccat

SEQ ID NO: 298458 - DNA, 25 bp, Probe Sequence
tcacagctggaatctcctttgccat

SEQ ID NO: 298459 - DNA, 25 bp, Probe Sequence
tcacagaggagacctcctgttcctc

SEQ ID NO: 298460 - DNA, 25 bp, Probe Sequence
tcacagatagagccttctgtgttgc

SEQ ID NO: 298461 - DNA, 25 bp, Probe Sequence
tcaagatcagaggttccagcttcct

SEQ ID NO: 298462 - DNA, 25 bp, Probe Sequence
tcaaacaactatgctactctccttt

SEQ ID NO: 298463 - DNA, 25 bp, Probe Sequence
tcacaagctaaagtctgattccctt

SEQ ID NO: 298464 - DNA, 25 bp, Probe Sequence
tcaaactctacagtttctccatctc

SEQ ID NO: 298465 - DNA, 25 bp, Probe Sequence
tcaaatggccacatgtccactacca

SEQ ID NO: 298466 - DNA, 25 bp, Probe Sequence
tcacacatgtggtcactgtgctact

SEQ ID NO: 298467 - DNA, 25 bp, Probe Sequence
tcacaatgttggcctgtcagagctt

SEQ ID NO: 298468 - DNA, 25 bp, Probe Sequence
tcacagctcctgaacgtcagcagct

SEQ ID NO: 298469 - DNA, 25 bp, Probe Sequence
tcacaggccattacagtaccatgtt

SEQ ID NO: 298470 - DNA, 25 bp, Probe Sequence
tcaaaaatgctgacaatccagagtt

SEQ ID NO: 298471 - DNA, 25 bp, Probe Sequence
tcacacaaactgatgatgacaggtc

SEQ ID NO: 298472 - DNA, 25 bp, Probe Sequence
tcaacaagactgagagcctttcccc

SEQ ID NO: 298473 - DNA, 25 bp, Probe Sequence
tcaacaggactttgtccagactctc

SEQ ID NO: 298474 - DNA, 25 bp, Probe Sequence
tcaacggaccacaccaaaatgccat

SEQ ID NO: 298475 - DNA, 25 bp, Probe Sequence
tcaacggctacatagaaaaatccac

SEQ ID NO: 298476 - DNA, 25 bp, Probe Sequence
tcaacggtccattcatgcaacaaat

SEQ ID NO: 298477 - DNA, 25 bp, Probe Sequence
tcaacggctccatgctgcagagagc

SEQ ID NO: 298478 - DNA, 25 bp, Probe Sequence
tcaaaggctcccttcagaatgaccc

SEQ ID NO: 298479 - DNA, 25 bp, Probe Sequence
tcacttggctgctcttctgaagaac

SEQ ID NO: 298480 - DNA, 25 bp, Probe Sequence
tcacttggctgctcttctgaagaac

SEQ ID NO: 298481 - DNA, 25 bp, Probe Sequence
tcacttggctgctcttctgaagaac

SEQ ID NO: 298482 - DNA, 25 bp, Probe Sequence
tcaagcaggcgctcttgtgaattaa

SEQ ID NO: 298483 - DNA, 25 bp, Probe Sequence
tcaagacctgctccgtttatgtagt

SEQ ID NO: 298484 - DNA, 25 bp, Probe Sequence
tcaagacctgctccgtttatgtagt

SEQ ID NO: 298485 - DNA, 25 bp, Probe Sequence
tcaatggactcatccatttgtgagg

SEQ ID NO: 298486 - DNA, 25 bp, Probe Sequence
taatgtttcattgatttgagaagcc

SEQ ID NO: 298487 - DNA, 25 bp, Probe Sequence
tacagtgtgatctcagctttgcaaa

SEQ ID NO: 298488 - DNA, 25 bp, Probe Sequence
tcaaggctgcagtgagctatgatca

SEQ ID NO: 298489 - DNA, 25 bp, Probe Sequence
tcacaagcactgttgactctgcata

SEQ ID NO: 298490 - DNA, 25 bp, Probe Sequence
tcaaacatcatgtgcatctcctcat

SEQ ID NO: 298491 - DNA, 25 bp, Probe Sequence
tcacaaatcaacatctcacttccga

SEQ ID NO: 298492 - DNA, 25 bp, Probe Sequence
tcaaaatcagtcactcccttcagaa

SEQ ID NO: 298493 - DNA, 25 bp, Probe Sequence
tcaaaatcagtcactcccttcagaa

SEQ ID NO: 298494 - DNA, 25 bp, Probe Sequence
tcaaaatcagtcactcccttcagaa

SEQ ID NO: 298495 - DNA, 25 bp, Probe Sequence
taaacatgggcagcttccttcagga

SEQ ID NO: 298496 - DNA, 25 bp, Probe Sequence
taacgatgaggcgctggccttgggg

SEQ ID NO: 298497 - DNA, 25 bp, Probe Sequence
tcaacaacagcggcctggccagtga

SEQ ID NO: 298498 - DNA, 25 bp, Probe Sequence
tcaagcaccaaggcacgatcacagt

SEQ ID NO: 298499 - DNA, 25 bp, Probe Sequence
tcaatggacacggagctgtgacgat

SEQ ID NO: 298500 - DNA, 25 bp, Probe Sequence
tcaatgccccgaagctggaaaccga

SEQ ID NO: 298501 - DNA, 25 bp, Probe Sequence
tcacagcccctaactcataaagcaa

SEQ ID NO: 298502 - DNA, 25 bp, Probe Sequence
tcacagctccacgaagactcaaaag

SEQ ID NO: 298503 - DNA, 25 bp, Probe Sequence
tcaaacccctgacctcaaatgatgt

SEQ ID NO: 298504 - DNA, 25 bp, Probe Sequence
tcaaaccctgcttatgatatgaaaa

SEQ ID NO: 298505 - DNA, 25 bp, Probe Sequence
tcaagccaccatctatgtccataaa

SEQ ID NO: 298506 - DNA, 25 bp, Probe Sequence
tcaagccaccatctatgtccataaa

SEQ ID NO: 298507 - DNA, 25 bp, Probe Sequence
tcaaggcaacatctccacacagaaa

SEQ ID NO: 298508 - DNA, 25 bp, Probe Sequence
tcaaggccctcgtaaagcccaagga

SEQ ID NO: 298509 - DNA, 25 bp, Probe Sequence
tcaaggccagtcctattcaacctag

SEQ ID NO: 298510 - DNA, 25 bp, Probe Sequence
tcacaggcagcagcacttcaaactc

SEQ ID NO: 298511 - DNA, 25 bp, Probe Sequence
tcacagagctgctgattctcaaaac

SEQ ID NO: 298512 - DNA, 25 bp, Probe Sequence
tcacagacagcccttgctggggaca

SEQ ID NO: 298513 - DNA, 25 bp, Probe Sequence
tcaagacagtgccctgtgggttcct

SEQ ID NO: 298514 - DNA, 25 bp, Probe Sequence
tcaagacagtgccctgtgggttcct

SEQ ID NO: 298515 - DNA, 25 bp, Probe Sequence
tcaaacagtttctggagtgtgccca

SEQ ID NO: 298516 - DNA, 25 bp, Probe Sequence
tcaaaagttatcttccgttcccatt

SEQ ID NO: 298517 - DNA, 25 bp, Probe Sequence
tcaagggttcactgcatttctcctt

SEQ ID NO: 298518 - DNA, 25 bp, Probe Sequence
tcaagggttcactgcatttctcctt

SEQ ID NO: 298519 - DNA, 25 bp, Probe Sequence
taagggcctaatgcttattcttttc

SEQ ID NO: 298520 - DNA, 25 bp, Probe Sequence
taagggcttaacctgtgactttaat

SEQ ID NO: 298521 - DNA, 25 bp, Probe Sequence
taagggcttaacctgtgactttaat

SEQ ID NO: 298522 - DNA, 25 bp, Probe Sequence
tcaaggctggatacggttgacttca

SEQ ID NO: 298523 - DNA, 25 bp, Probe Sequence
tcaaggctgagaacgggaagcttgt

SEQ ID NO: 298524 - DNA, 25 bp, Probe Sequence
tcaagcgtcagaccgagtgcatggt

SEQ ID NO: 298525 - DNA, 25 bp, Probe Sequence
tcaatcctctgatcagggtgagcat

SEQ ID NO: 298526 - DNA, 25 bp, Probe Sequence
tcacatcttatatacagcagtcaga

SEQ ID NO: 298527 - DNA, 25 bp, Probe Sequence
tcacatcttgttgtccaccagagag

SEQ ID NO: 298528 - DNA, 25 bp, Probe Sequence
tcaagtttcctggccaccagaagat

SEQ ID NO: 298529 - DNA, 25 bp, Probe Sequence
taagtaagtctggctagtctaggat

SEQ ID NO: 298530 - DNA, 25 bp, Probe Sequence
tcaagtcaagtcactggtctgtttg

SEQ ID NO: 298531 - DNA, 25 bp, Probe Sequence
tcaatatcgagtgcctgcgggactt

SEQ ID NO: 298532 - DNA, 25 bp, Probe Sequence
tcaaaatgagttcgcctgtggagag

SEQ ID NO: 298533 - DNA, 25 bp, Probe Sequence
tcaagggacgttctgtgggcagtag

SEQ ID NO: 298534 - DNA, 25 bp, Probe Sequence
tcaagagcaggggtgggccggggag

SEQ ID NO: 298535 - DNA, 25 bp, Probe Sequence
tcacaacctctgtggtccgtaggag

SEQ ID NO: 298536 - DNA, 25 bp, Probe Sequence
tcacacgccctgattcacggtgaga

SEQ ID NO: 298537 - DNA, 25 bp, Probe Sequence
tcaaggtgcacttgtccactgggga

SEQ ID NO: 298538 - DNA, 25 bp, Probe Sequence
tcaagaccatccgaggcctggttga

SEQ ID NO: 298539 - DNA, 25 bp, Probe Sequence
tcaaaactcggtgatcatagttgat

SEQ ID NO: 298540 - DNA, 25 bp, Probe Sequence
tcaaaacggcgccgaacatgttgct

SEQ ID NO: 298541 - DNA, 25 bp, Probe Sequence
taaaacgggtaaaatgatccattct

SEQ ID NO: 298542 - DNA, 25 bp, Probe Sequence
taactcacggggattttccagtctc

SEQ ID NO: 298543 - DNA, 25 bp, Probe Sequence
tactatccgaggtaattttgaagtt

SEQ ID NO: 298544 - DNA, 25 bp, Probe Sequence
taatttgcgagactaactttgagag

SEQ ID NO: 298545 - DNA, 25 bp, Probe Sequence
taattctaagatgatcactttgcaa

SEQ ID NO: 298546 - DNA, 25 bp, Probe Sequence
taatttaaatgctcgttctgaacca

SEQ ID NO: 298547 - DNA, 25 bp, Probe Sequence
tcaatttcaaaccctgcttatgata

SEQ ID NO: 298548 - DNA, 25 bp, Probe Sequence
taataatatcggccgctgtttgtac

SEQ ID NO: 298549 - DNA, 25 bp, Probe Sequence
tcaaaatgattgctcctttctctac

SEQ ID NO: 298550 - DNA, 25 bp, Probe Sequence
tcaagtgatcttctgccaatgtctc

SEQ ID NO: 298551 - DNA, 25 bp, Probe Sequence
tcaagttattgggctcagtgctgta

SEQ ID NO: 298552 - DNA, 25 bp, Probe Sequence
tcacagttattaaccagactcagaa

SEQ ID NO: 298553 - DNA, 25 bp, Probe Sequence
tcaagtgccttaatccgagccagca

SEQ ID NO: 298554 - DNA, 25 bp, Probe Sequence
tcaaggcctcgaagtcattccgcca

SEQ ID NO: 298555 - DNA, 25 bp, Probe Sequence
tcacaggtctgacatacttcaccct

SEQ ID NO: 298556 - DNA, 25 bp, Probe Sequence
tcacagttcttggtgactgtcccac

SEQ ID NO: 298557 - DNA, 25 bp, Probe Sequence
tcaagttctggccttctgatgcaaa

SEQ ID NO: 298558 - DNA, 25 bp, Probe Sequence
tcaagctcatttcctggtatgacaa

SEQ ID NO: 298559 - DNA, 25 bp, Probe Sequence
tcaagcctggcatttggttgctcac

SEQ ID NO: 298560 - DNA, 25 bp, Probe Sequence
tcaagcagtgtgaatgggttcccag

SEQ ID NO: 298561 - DNA, 25 bp, Probe Sequence
tcaactgtgatttggctttcccgtg

SEQ ID NO: 298562 - DNA, 25 bp, Probe Sequence
tcaacccatcttcctagtgtttgtg

SEQ ID NO: 298563 - DNA, 25 bp, Probe Sequence
tcaacctcatcaagactggtgtctg

SEQ ID NO: 298564 - DNA, 25 bp, Probe Sequence
tcaacctgcatagccggtgggtgag

SEQ ID NO: 298565 - DNA, 25 bp, Probe Sequence
tcaaaccatacctggtgggggttct

SEQ ID NO: 298566 - DNA, 25 bp, Probe Sequence
tcaagtcccccttgtggcggggact

SEQ ID NO: 298567 - DNA, 25 bp, Probe Sequence
tcaagtcccccttgtggcggggact

SEQ ID NO: 298568 - DNA, 25 bp, Probe Sequence
tcacagctgccagcttggtgtgccg

SEQ ID NO: 298569 - DNA, 25 bp, Probe Sequence
tcacaagaaggctgtgctgtcccct

SEQ ID NO: 298570 - DNA, 25 bp, Probe Sequence
tcacaagaaggctgtgctgtcccct

SEQ ID NO: 298571 - DNA, 25 bp, Probe Sequence
tcacaagaaggctgtgctgtcccct

SEQ ID NO: 298572 - DNA, 25 bp, Probe Sequence
tcacaataaacggctgcgtctcctc

SEQ ID NO: 298573 - DNA, 25 bp, Probe Sequence
tcaacatcaagaccctggagcaccg

SEQ ID NO: 298574 - DNA, 25 bp, Probe Sequence
tcaacatctcagaccactggatccg

SEQ ID NO: 298575 - DNA, 25 bp, Probe Sequence
tcaaccatctgaggaaggaccagga

SEQ ID NO: 298576 - DNA, 25 bp, Probe Sequence
tcaattactaggtcaagatctagcg

SEQ ID NO: 298577 - DNA, 25 bp, Probe Sequence
taattacttctggcaagatgttctg

SEQ ID NO: 298578 - DNA, 25 bp, Probe Sequence
taattgccgtcgtcaaaccttgtta

SEQ ID NO: 298579 - DNA, 25 bp, Probe Sequence
ttttccggcagtcacctattactaa

SEQ ID NO: 298580 - DNA, 25 bp, Probe Sequence
tttctcctgacactaccaagttact

SEQ ID NO: 298581 - DNA, 25 bp, Probe Sequence
taattcccaccttcgaagattacca

SEQ ID NO: 298582 - DNA, 25 bp, Probe Sequence
taatcctcgggtccaggagattcag

SEQ ID NO: 298583 - DNA, 25 bp, Probe Sequence
taattccgaaggccacgtttcatct

SEQ ID NO: 298584 - DNA, 25 bp, Probe Sequence
tcaagtccaaagtccaaagtatcat

SEQ ID NO: 298585 - DNA, 25 bp, Probe Sequence
tcaagaataacacttcaaagtcatc

SEQ ID NO: 298586 - DNA, 25 bp, Probe Sequence
tcaaataaaccaacaacagaccaac

SEQ ID NO: 298587 - DNA, 25 bp, Probe Sequence
tcaaatggaacctgccctctaaagc

SEQ ID NO: 298588 - DNA, 25 bp, Probe Sequence
tcaatgcatgtatcgttgcctctgc

SEQ ID NO: 298589 - DNA, 25 bp, Probe Sequence
tcaaggttgtcgatctgctagctcc

SEQ ID NO: 298590 - DNA, 25 bp, Probe Sequence
tcaagtggggcgatgctggcgctga

SEQ ID NO: 298591 - DNA, 25 bp, Probe Sequence
tcaagtggggcgatgctggcgctga

SEQ ID NO: 298592 - DNA, 25 bp, Probe Sequence
tcaactctccagctgtgatggcgga

SEQ ID NO: 298593 - DNA, 25 bp, Probe Sequence
tcaagtcccagatgatgtgtgcgga

SEQ ID NO: 298594 - DNA, 25 bp, Probe Sequence
tcaaaccacagactttggcctcaga

SEQ ID NO: 298595 - DNA, 25 bp, Probe Sequence
tcaaatccacggtggctgccatcat

SEQ ID NO: 298596 - DNA, 25 bp, Probe Sequence
tcaagatgctactgcagtggtccct

SEQ ID NO: 298597 - DNA, 25 bp, Probe Sequence
tcaaggcattgtagggggctcctcg

SEQ ID NO: 298598 - DNA, 25 bp, Probe Sequence
tcaaggctgtgaaggcggcttccca

SEQ ID NO: 298599 - DNA, 25 bp, Probe Sequence
tcaaggtgtttgacggcatcccacc

SEQ ID NO: 298600 - DNA, 25 bp, Probe Sequence
taagggtctagaaagtcctccctgg

SEQ ID NO: 298601 - DNA, 25 bp, Probe Sequence
taattacctagaaattactccttgg

SEQ ID NO: 298602 - DNA, 25 bp, Probe Sequence
taattccacgagaaagggcatcttc

SEQ ID NO: 298603 - DNA, 25 bp, Probe Sequence
taaaccaggatgattacctttaggt

SEQ ID NO: 298604 - DNA, 25 bp, Probe Sequence
tcaaaccacgattttcccatttatt

SEQ ID NO: 298605 - DNA, 25 bp, Probe Sequence
tcacaacccagaagtaaccaccttt

SEQ ID NO: 298606 - DNA, 25 bp, Probe Sequence
tcaaaccatagagggagcccccctt

SEQ ID NO: 298607 - DNA, 25 bp, Probe Sequence
taaaacattgcctaagcccttgcct

SEQ ID NO: 298608 - DNA, 25 bp, Probe Sequence
tcaaagaattcccaacgccaggacc

SEQ ID NO: 298609 - DNA, 25 bp, Probe Sequence
tcaaggagtcccgcatcacaagggc

SEQ ID NO: 298610 - DNA, 25 bp, Probe Sequence
tcaagtggctccgtgaagtcagagg

SEQ ID NO: 298611 - DNA, 25 bp, Probe Sequence
taactggtcctcataccatgcaggt

SEQ ID NO: 298612 - DNA, 25 bp, Probe Sequence
taggtggcctaagccccgatgtaaa

SEQ ID NO: 298613 - DNA, 25 bp, Probe Sequence
taggtcacctaggaaccttagtgaa

SEQ ID NO: 298614 - DNA, 25 bp, Probe Sequence
taattaagctaagcccttactagac

SEQ ID NO: 298615 - DNA, 25 bp, Probe Sequence
taagtaagtagaccccactgagaaa

SEQ ID NO: 298616 - DNA, 25 bp, Probe Sequence
taagtagagttgttgccaaaagcaa

SEQ ID NO: 298617 - DNA, 25 bp, Probe Sequence
tcaagttgaatcatatgcccaaagt

SEQ ID NO: 298618 - DNA, 25 bp, Probe Sequence
taagctaaattttcctagagagttt

SEQ ID NO: 298619 - DNA, 25 bp, Probe Sequence
tcaatcaatcaaattcccttaaatt

SEQ ID NO: 298620 - DNA, 25 bp, Probe Sequence
taattacacaaacccttcacagact

SEQ ID NO: 298621 - DNA, 25 bp, Probe Sequence
tcaagctaccaatgactttcttcac

SEQ ID NO: 298622 - DNA, 25 bp, Probe Sequence
tcaactgggcataatgacattttct

SEQ ID NO: 298623 - DNA, 25 bp, Probe Sequence
tcaactggcttgggtgctggtatct

SEQ ID NO: 298624 - DNA, 25 bp, Probe Sequence
tcaacggctgtcaaatgatgagata

SEQ ID NO: 298625 - DNA, 25 bp, Probe Sequence
tcaagccttactaagcatatgatag

SEQ ID NO: 298626 - DNA, 25 bp, Probe Sequence
tagggttgacgtacatagtgagggt

SEQ ID NO: 298627 - DNA, 25 bp, Probe Sequence
tacggttgacttcacggggattcca

SEQ ID NO: 298628 - DNA, 25 bp, Probe Sequence
taagttaatcttcacgtttttgcaa

SEQ ID NO: 298629 - DNA, 25 bp, Probe Sequence
tacttttcctctgtagtttttagca

SEQ ID NO: 298630 - DNA, 25 bp, Probe Sequence
tacgaattccaatatactttaaaat

SEQ ID NO: 298631 - DNA, 25 bp, Probe Sequence
tcaaatgatgtgcaaaaccttttac

SEQ ID NO: 298632 - DNA, 25 bp, Probe Sequence
tcaaacagtaccaaacctttataca

SEQ ID NO: 298633 - DNA, 25 bp, Probe Sequence
tcaaaagtgaacaccctggcctatc

SEQ ID NO: 298634 - DNA, 25 bp, Probe Sequence
tcaaaggaaaagacaccttgcctat

SEQ ID NO: 298635 - DNA, 25 bp, Probe Sequence
tcaaagtgaacaagaccctgccgta

SEQ ID NO: 298636 - DNA, 25 bp, Probe Sequence
tacagcgagaaaataccttccgtgc

SEQ ID NO: 298637 - DNA, 25 bp, Probe Sequence
taagggagatcatacctaccggctc

SEQ ID NO: 298638 - DNA, 25 bp, Probe Sequence
taaagggttaatgtgcaacgttatt

SEQ ID NO: 298639 - DNA, 25 bp, Probe Sequence
taacagggcttatgtttcagtttgt

SEQ ID NO: 298640 - DNA, 25 bp, Probe Sequence
taataggctctgtggttctggtttt

SEQ ID NO: 298641 - DNA, 25 bp, Probe Sequence
taatgaggattttgttctgtgtttg

SEQ ID NO: 298642 - DNA, 25 bp, Probe Sequence
taatagccttgcatgttgtagttag

SEQ ID NO: 298643 - DNA, 25 bp, Probe Sequence
taatatccattgaatcggtagtccc

SEQ ID NO: 298644 - DNA, 25 bp, Probe Sequence
taatcccatgctaacctgtaatccc

SEQ ID NO: 298645 - DNA, 25 bp, Probe Sequence
tcaattatgactaccctaactcctc

SEQ ID NO: 298646 - DNA, 25 bp, Probe Sequence
taatttgagctcgtatttacccctg

SEQ ID NO: 298647 - DNA, 25 bp, Probe Sequence
taatttagccttacctagaccctgt

SEQ ID NO: 298648 - DNA, 25 bp, Probe Sequence
taattctaccttaactgtaagcctt

SEQ ID NO: 298649 - DNA, 25 bp, Probe Sequence
taattctattcttagtggtaaactt

SEQ ID NO: 298650 - DNA, 25 bp, Probe Sequence
taattccttatgacattttaaactt

SEQ ID NO: 298651 - DNA, 25 bp, Probe Sequence
taataccttatgttgtccttaaata

SEQ ID NO: 298652 - DNA, 25 bp, Probe Sequence
taatactagttgtgaccttagtgtt

SEQ ID NO: 298653 - DNA, 25 bp, Probe Sequence
taatacaaatggaaacctggtgttt

SEQ ID NO: 298654 - DNA, 25 bp, Probe Sequence
tagtcgcaaatcttacagccggtca

SEQ ID NO: 298655 - DNA, 25 bp, Probe Sequence
tagtcgcaaatcttacagccggtca

SEQ ID NO: 298656 - DNA, 25 bp, Probe Sequence
taatcgtaatcatgacattcagagt

SEQ ID NO: 298657 - DNA, 25 bp, Probe Sequence
taatagtcattccaaatatgagatg

SEQ ID NO: 298658 - DNA, 25 bp, Probe Sequence
tcaatgagctctcccacaagggcaa

SEQ ID NO: 298659 - DNA, 25 bp, Probe Sequence
tcaaatgcttcctactcagcgtgac

SEQ ID NO: 298660 - DNA, 25 bp, Probe Sequence
tcaaactctcagaaatcctgatgac

SEQ ID NO: 298661 - DNA, 25 bp, Probe Sequence
tcaacacttcataggctcactgggt

SEQ ID NO: 298662 - DNA, 25 bp, Probe Sequence
tcaaacttctgtgcacaaagtgctc

SEQ ID NO: 298663 - DNA, 25 bp, Probe Sequence
tcaaagattccttcaccatacacct

SEQ ID NO: 298664 - DNA, 25 bp, Probe Sequence
tcaagagtaactacaatcttcccat

SEQ ID NO: 298665 - DNA, 25 bp, Probe Sequence
tcacaagctaacttccactaatcca

SEQ ID NO: 298666 - DNA, 25 bp, Probe Sequence
tcaaagctaaattccacactaccac

SEQ ID NO: 298667 - DNA, 25 bp, Probe Sequence
tcaactctacacaaatccagctaac

SEQ ID NO: 298668 - DNA, 25 bp, Probe Sequence
tcaactggcatacacatccctgtga

SEQ ID NO: 298669 - DNA, 25 bp, Probe Sequence
tcaatgctagaacaacgcctgtcac

SEQ ID NO: 298670 - DNA, 25 bp, Probe Sequence
tcaactcagagtccaaccacttacc

SEQ ID NO: 298671 - DNA, 25 bp, Probe Sequence
taactgactggaacccacttaccgt

SEQ ID NO: 298672 - DNA, 25 bp, Probe Sequence
tcaaaaatggagttccacttctccc

SEQ ID NO: 298673 - DNA, 25 bp, Probe Sequence
tcaagtaaggcatgtctacaccccc

SEQ ID NO: 298674 - DNA, 25 bp, Probe Sequence
tcaataaaggcttgctctttcttcc

SEQ ID NO: 298675 - DNA, 25 bp, Probe Sequence
tcaatcaagcccaaatttcttcctc

SEQ ID NO: 298676 - DNA, 25 bp, Probe Sequence
tcaagctgaaccaagatttctgcca

SEQ ID NO: 298677 - DNA, 25 bp, Probe Sequence
taatctatacagaacatgatcctac

SEQ ID NO: 298678 - DNA, 25 bp, Probe Sequence
taatattgaagaaattcccacattt

SEQ ID NO: 298679 - DNA, 25 bp, Probe Sequence
taaaggaaagggcaccatcttcatg

SEQ ID NO: 298680 - DNA, 25 bp, Probe Sequence
taaacttacggacacctctttgtgg

SEQ ID NO: 298681 - DNA, 25 bp, Probe Sequence
taatacttaccgagtcagactttgt

SEQ ID NO: 298682 - DNA, 25 bp, Probe Sequence
taattttaaagttgctggcctaatg

SEQ ID NO: 298683 - DNA, 25 bp, Probe Sequence
tttgtgtcgatatgttcggcttttc

SEQ ID NO: 298684 - DNA, 25 bp, Probe Sequence
tttctgtgctaagggtccagtattt

SEQ ID NO: 298685 - DNA, 25 bp, Probe Sequence
tttcttaacccgtgagctctaattg

SEQ ID NO: 298686 - DNA, 25 bp, Probe Sequence
ttcattaagacctgattggttaaat

SEQ ID NO: 298687 - DNA, 25 bp, Probe Sequence
taattagggagttatttggtaagca

SEQ ID NO: 298688 - DNA, 25 bp, Probe Sequence
taatctacgtgactggttgcgcgta

SEQ ID NO: 298689 - DNA, 25 bp, Probe Sequence
taagtgatcgtgtgagtcgtcgtta

SEQ ID NO: 298690 - DNA, 25 bp, Probe Sequence
tcaaggcatctggagggctttcgtg

SEQ ID NO: 298691 - DNA, 25 bp, Probe Sequence
tcaagtcttctggagcctttctgat

SEQ ID NO: 298692 - DNA, 25 bp, Probe Sequence
tcaagacatgttaaccttttataaa

SEQ ID NO: 298693 - DNA, 25 bp, Probe Sequence
tcaaagcatttaatctatagtctat

SEQ ID NO: 298694 - DNA, 25 bp, Probe Sequence
tcaatccgttgaacagtcgtgctct

SEQ ID NO: 298695 - DNA, 25 bp, Probe Sequence
tcaatgccagtaacgcgtcttcctg

SEQ ID NO: 298696 - DNA, 25 bp, Probe Sequence
tcaacacagtcaaagcggctctagc

SEQ ID NO: 298697 - DNA, 25 bp, Probe Sequence
taagagcatgaaagacaggcctgag

SEQ ID NO: 298698 - DNA, 25 bp, Probe Sequence
taatagaatatctctgaagctggat

SEQ ID NO: 298699 - DNA, 25 bp, Probe Sequence
tcaatagccgattcgatcaagtgga

SEQ ID NO: 298700 - DNA, 25 bp, Probe Sequence
tcaagagcccagtccatacactgtg

SEQ ID NO: 298701 - DNA, 25 bp, Probe Sequence
tcaaatgtcctgtctcatggaagca

SEQ ID NO: 298702 - DNA, 25 bp, Probe Sequence
tcaaagttctacgtgcgagagccgc

SEQ ID NO: 298703 - DNA, 25 bp, Probe Sequence
tcaaagtactcaaagcctggccatc

SEQ ID NO: 298704 - DNA, 25 bp, Probe Sequence
tcaaagccatctgaagcctgtctct

SEQ ID NO: 298705 - DNA, 25 bp, Probe Sequence
tcaacatgcctttcatggacttcct

SEQ ID NO: 298706 - DNA, 25 bp, Probe Sequence
tcaacatttcctagagccttattag

SEQ ID NO: 298707 - DNA, 25 bp, Probe Sequence
tcaacatagtccagaacctgctaag

SEQ ID NO: 298708 - DNA, 25 bp, Probe Sequence
tcaagcagattccacgaatcctcgg

SEQ ID NO: 298709 - DNA, 25 bp, Probe Sequence
tcaaagctgaccatggatccctggg

SEQ ID NO: 298710 - DNA, 25 bp, Probe Sequence
tcaaagtggcgcatgatgtccctct

SEQ ID NO: 298711 - DNA, 25 bp, Probe Sequence
tcaaagtgagcagtgtttggctact

SEQ ID NO: 298712 - DNA, 25 bp, Probe Sequence
tcaaagtgctcagtggtttgccctt

SEQ ID NO: 298713 - DNA, 25 bp, Probe Sequence
tcaaaggatcttgacttgctcacct

SEQ ID NO: 298714 - DNA, 25 bp, Probe Sequence
taataggatcgttcagccgctgcat

SEQ ID NO: 298715 - DNA, 25 bp, Probe Sequence
tatatcgagatcctggaccggcacc

SEQ ID NO: 298716 - DNA, 25 bp, Probe Sequence
tatatcgagatcctggaccggcacc

SEQ ID NO: 298717 - DNA, 25 bp, Probe Sequence
tcaaagagtgtgtgaggcggcgccc

SEQ ID NO: 298718 - DNA, 25 bp, Probe Sequence
taagcgagctctttagtgaaccgtc

SEQ ID NO: 298719 - DNA, 25 bp, Probe Sequence
taagggctatgtttggtaccagtgt

SEQ ID NO: 298720 - DNA, 25 bp, Probe Sequence
taagggctatgtttggtaccagtgt

SEQ ID NO: 298721 - DNA, 25 bp, Probe Sequence
tcaacgggatgtatgcggactcaga

SEQ ID NO: 298722 - DNA, 25 bp, Probe Sequence
tcaacgggatgtatgcggactcaga

SEQ ID NO: 298723 - DNA, 25 bp, Probe Sequence
tcaacacaggactttctggatcaag

SEQ ID NO: 298724 - DNA, 25 bp, Probe Sequence
tcaacaatgggttacatggcagcaa

SEQ ID NO: 298725 - DNA, 25 bp, Probe Sequence
tcaacaaggttatcagtgagctgaa

SEQ ID NO: 298726 - DNA, 25 bp, Probe Sequence
tcaacattgactacagaagctgact

SEQ ID NO: 298727 - DNA, 25 bp, Probe Sequence
tcaactgaacgcaaatcagccactt

SEQ ID NO: 298728 - DNA, 25 bp, Probe Sequence
tcaattgtcactgtcatcagaatct

SEQ ID NO: 298729 - DNA, 25 bp, Probe Sequence
tcaattgtcactgtcatcagaatct

SEQ ID NO: 298730 - DNA, 25 bp, Probe Sequence
tcaactgtctccaaaataatctctt

SEQ ID NO: 298731 - DNA, 25 bp, Probe Sequence
tcaactgcttcaacatcaattatct

SEQ ID NO: 298732 - DNA, 25 bp, Probe Sequence
tcaacttctcatcccaatgctgagt

SEQ ID NO: 298733 - DNA, 25 bp, Probe Sequence
tcaatctgtctactcttatctggca

SEQ ID NO: 298734 - DNA, 25 bp, Probe Sequence
tcaattgccttcctatatatcagca

SEQ ID NO: 298735 - DNA, 25 bp, Probe Sequence
tcaattccccgttaatggagcgggg

SEQ ID NO: 298736 - DNA, 25 bp, Probe Sequence
tcaattcccctttgctatgtgatgc

SEQ ID NO: 298737 - DNA, 25 bp, Probe Sequence
tcaatgtcaggctttcctcggagac

SEQ ID NO: 298738 - DNA, 25 bp, Probe Sequence
tcaagtagctgatgtgcagttgaga

SEQ ID NO: 298739 - DNA, 25 bp, Probe Sequence
tcaagaagaagtcagcttgagcata

SEQ ID NO: 298740 - DNA, 25 bp, Probe Sequence
tcaatatgcaagttaggcttaattt

SEQ ID NO: 298741 - DNA, 25 bp, Probe Sequence
tacaatcctttgggtctaattctgt

SEQ ID NO: 298742 - DNA, 25 bp, Probe Sequence
ttactggtcctggagacaaacttgt

SEQ ID NO: 298743 - DNA, 25 bp, Probe Sequence
taattggtaagtgaaaactctgtta

SEQ ID NO: 298744 - DNA, 25 bp, Probe Sequence
taattggaccattggaacccctgtt

SEQ ID NO: 298745 - DNA, 25 bp, Probe Sequence
taatttatccacggcactccgcgag

SEQ ID NO: 298746 - DNA, 25 bp, Probe Sequence
tcaatttacgactgcctatcgggat

SEQ ID NO: 298747 - DNA, 25 bp, Probe Sequence
tcaatttacgactgcctatcgggat

SEQ ID NO: 298748 - DNA, 25 bp, Probe Sequence
tcaacttcggcctcaatgtcgtgga

SEQ ID NO: 298749 - DNA, 25 bp, Probe Sequence
tcaacttcggcctcaatgtcgtgga

SEQ ID NO: 298750 - DNA, 25 bp, Probe Sequence
tcaacttcggcctcaatgtcgtgga

SEQ ID NO: 298751 - DNA, 25 bp, Probe Sequence
tcaacttcaaccacaatgggtcgat

SEQ ID NO: 298752 - DNA, 25 bp, Probe Sequence
taattacaaccattcaatgccccga

SEQ ID NO: 298753 - DNA, 25 bp, Probe Sequence
taattaaataagtcaattcctggaa

SEQ ID NO: 298754 - DNA, 25 bp, Probe Sequence
taatgtctactgtgaaaatttggta

SEQ ID NO: 298755 - DNA, 25 bp, Probe Sequence
taatgttattggtgagccattttta

SEQ ID NO: 298756 - DNA, 25 bp, Probe Sequence
taataatcctagagaccttttttct

SEQ ID NO: 298757 - DNA, 25 bp, Probe Sequence
taaaccgctaagctcctcttaattt

SEQ ID NO: 298758 - DNA, 25 bp, Probe Sequence
tcaaaccctttcatacctttattct

SEQ ID NO: 298759 - DNA, 25 bp, Probe Sequence
taactcctttgtgctaccaacttac

SEQ ID NO: 298760 - DNA, 25 bp, Probe Sequence
taactctttcaccctactaaattca

SEQ ID NO: 298761 - DNA, 25 bp, Probe Sequence
tcaactctttccctataggaaactt

SEQ ID NO: 298762 - DNA, 25 bp, Probe Sequence
tacctgtttaagaaagtgaaatgtt

SEQ ID NO: 298763 - DNA, 25 bp, Probe Sequence
tcaactttttaagtggtcaaatgtt

SEQ ID NO: 298764 - DNA, 25 bp, Probe Sequence
tcaacttttttagaatccacatttt

SEQ ID NO: 298765 - DNA, 25 bp, Probe Sequence
tcaacagtttttatatgcccactgt

SEQ ID NO: 298766 - DNA, 25 bp, Probe Sequence
taaaattcttttgatccccgatttg

SEQ ID NO: 298767 - DNA, 25 bp, Probe Sequence
taagaaacttttatgacctctattt

SEQ ID NO: 298768 - DNA, 25 bp, Probe Sequence
taataaacttctttggcaacttaat

SEQ ID NO: 298769 - DNA, 25 bp, Probe Sequence
tacgacgacttcaactgcaacatct

SEQ ID NO: 298770 - DNA, 25 bp, Probe Sequence
taatccgactgtaagctcatcacct

SEQ ID NO: 298771 - DNA, 25 bp, Probe Sequence
taattatggcttctgtcatctccag

SEQ ID NO: 298772 - DNA, 25 bp, Probe Sequence
taattctggttctatctacctcaac

SEQ ID NO: 298773 - DNA, 25 bp, Probe Sequence
taatattgccgttatattccaaaat

SEQ ID NO: 298774 - DNA, 25 bp, Probe Sequence
taatataccaatgcttttatcaaac

SEQ ID NO: 298775 - DNA, 25 bp, Probe Sequence
taagtccccagggactgtcagcagc

SEQ ID NO: 298776 - DNA, 25 bp, Probe Sequence
tcaagtcccgaggctacgtgaagga

SEQ ID NO: 298777 - DNA, 25 bp, Probe Sequence
tcaagtcccgaggctacgtgaagga

SEQ ID NO: 298778 - DNA, 25 bp, Probe Sequence
tcaagtcccggggctgcgtgaagga

SEQ ID NO: 298779 - DNA, 25 bp, Probe Sequence
tacagtgcccggcacgagctgaacc

SEQ ID NO: 298780 - DNA, 25 bp, Probe Sequence
tcaagtccgggattcttctatctgc

SEQ ID NO: 298781 - DNA, 25 bp, Probe Sequence
tcaagacgctgtaaacctctgaagg

SEQ ID NO: 298782 - DNA, 25 bp, Probe Sequence
tcaagacgctgtaaacctctgaagg

SEQ ID NO: 298783 - DNA, 25 bp, Probe Sequence
tcaaacgctgtgtccattctcagca

SEQ ID NO: 298784 - DNA, 25 bp, Probe Sequence
tcaagcacatgcagaatattctcca

SEQ ID NO: 298785 - DNA, 25 bp, Probe Sequence
tcaacgacatcgtgattctccagct

SEQ ID NO: 298786 - DNA, 25 bp, Probe Sequence
tcaactgacaggttttacagactgg

SEQ ID NO: 298787 - DNA, 25 bp, Probe Sequence
tcaacagacagctttttctcaacag

SEQ ID NO: 298788 - DNA, 25 bp, Probe Sequence
taatggccagtggtttcatcaatca

SEQ ID NO: 298789 - DNA, 25 bp, Probe Sequence
tagaaacgggatttcaccacgttgg

SEQ ID NO: 298790 - DNA, 25 bp, Probe Sequence
taataactcggattccagcccacat

SEQ ID NO: 298791 - DNA, 25 bp, Probe Sequence
tcaataaacagtgtctgcgccccaa

SEQ ID NO: 298792 - DNA, 25 bp, Probe Sequence
tcaataaactctgtatcagccccca

SEQ ID NO: 298793 - DNA, 25 bp, Probe Sequence
tcaataccatccactatgcaattag

SEQ ID NO: 298794 - DNA, 25 bp, Probe Sequence
tcaagaatgcccatctgtgaacaca

SEQ ID NO: 298795 - DNA, 25 bp, Probe Sequence
tcaagaccattctcaggatcagcaa

SEQ ID NO: 298796 - DNA, 25 bp, Probe Sequence
tcaaggcgctgtccaaggatctgcc

SEQ ID NO: 298797 - DNA, 25 bp, Probe Sequence
tcaaggggatcagaggtccctggag

SEQ ID NO: 298798 - DNA, 25 bp, Probe Sequence
taagagggacacacgctccattgaa

SEQ ID NO: 298799 - DNA, 25 bp, Probe Sequence
tcaacaaggacctcagcgccaatga

SEQ ID NO: 298800 - DNA, 25 bp, Probe Sequence
tcaacttgtagttgacagcgccctg

SEQ ID NO: 298801 - DNA, 25 bp, Probe Sequence
tcaagatggatcgggacctgccctc

SEQ ID NO: 298802 - DNA, 25 bp, Probe Sequence
tcaagctgggcttggccaagtccat

SEQ ID NO: 298803 - DNA, 25 bp, Probe Sequence
tcaagctgggcttggccaagtccat

SEQ ID NO: 298804 - DNA, 25 bp, Probe Sequence
tcaatctgaggctaaggacatgtcc

SEQ ID NO: 298805 - DNA, 25 bp, Probe Sequence
tcaatgcgagacaagattggcgtct

SEQ ID NO: 298806 - DNA, 25 bp, Probe Sequence
tcaaggtgaacatttatgctgcatt

SEQ ID NO: 298807 - DNA, 25 bp, Probe Sequence
tcaagcgttttaatgcattgcagta

SEQ ID NO: 298808 - DNA, 25 bp, Probe Sequence
tcaagcggtttgagcatgtaggcaa

SEQ ID NO: 298809 - DNA, 25 bp, Probe Sequence
tcaagtgggtgtaccagtgatggca

SEQ ID NO: 298810 - DNA, 25 bp, Probe Sequence
tcaaggagcctgggacgtgaggccc

SEQ ID NO: 298811 - DNA, 25 bp, Probe Sequence
tcaacggccgggccgtggaggccta

SEQ ID NO: 298812 - DNA, 25 bp, Probe Sequence
tcaagcactccaggggttgtgggtt

SEQ ID NO: 298813 - DNA, 25 bp, Probe Sequence
tacagaacccgggtcagcggggtca

SEQ ID NO: 298814 - DNA, 25 bp, Probe Sequence
tcaacaaccagcagttcctggcagg

SEQ ID NO: 298815 - DNA, 25 bp, Probe Sequence
taatagggcctggtccctgggagga

SEQ ID NO: 298816 - DNA, 25 bp, Probe Sequence
taaagcaggccggtccgaggaggca

SEQ ID NO: 298817 - DNA, 25 bp, Probe Sequence
taaggcggcccagagcgaggaaagg

SEQ ID NO: 298818 - DNA, 25 bp, Probe Sequence
taagtggagcccctacgtagaaagg

SEQ ID NO: 298819 - DNA, 25 bp, Probe Sequence
taagtggagagaccccctgaacaca

SEQ ID NO: 298820 - DNA, 25 bp, Probe Sequence
taaggaggtagctcccagcactcaa

SEQ ID NO: 298821 - DNA, 25 bp, Probe Sequence
taaggttctaatacaccgcagctca

SEQ ID NO: 298822 - DNA, 25 bp, Probe Sequence
taaggttgtttaagacgtgcttcaa

SEQ ID NO: 298823 - DNA, 25 bp, Probe Sequence
taaggtttttagcatgttcctcctt

SEQ ID NO: 298824 - DNA, 25 bp, Probe Sequence
taacagcttttgtgttaatcccctt

SEQ ID NO: 298825 - DNA, 25 bp, Probe Sequence
tcaacctttctaccttaatatctcc

SEQ ID NO: 298826 - DNA, 25 bp, Probe Sequence
tcaaccttgtgctgccaaacttgtc

SEQ ID NO: 298827 - DNA, 25 bp, Probe Sequence
taatcctcatgttccaaaatattta

SEQ ID NO: 298828 - DNA, 25 bp, Probe Sequence
tcaacctctcaatcccagattttca

SEQ ID NO: 298829 - DNA, 25 bp, Probe Sequence
tcaacctcacagacactccaatggt

SEQ ID NO: 298830 - DNA, 25 bp, Probe Sequence
tcaatgcagccaagatcatccgcca

SEQ ID NO: 298831 - DNA, 25 bp, Probe Sequence
tcaatgcagccaagatcatccgcca

SEQ ID NO: 298832 - DNA, 25 bp, Probe Sequence
tcaatgcagccaagatcatccgcca

SEQ ID NO: 298833 - DNA, 25 bp, Probe Sequence
tcaagcagtcattcatatcagcgta

SEQ ID NO: 298834 - DNA, 25 bp, Probe Sequence
tcaagagaatgctatcatcctgctt

SEQ ID NO: 298835 - DNA, 25 bp, Probe Sequence
tcaaggatactgtcccttatttgaa

SEQ ID NO: 298836 - DNA, 25 bp, Probe Sequence
tcaactctccttttcctatttgaat

SEQ ID NO: 298837 - DNA, 25 bp, Probe Sequence
taatatcccttgttccattttacag

SEQ ID NO: 298838 - DNA, 25 bp, Probe Sequence
taataaccaatatatcgtgtatccg

SEQ ID NO: 298839 - DNA, 25 bp, Probe Sequence
taataacaaatatcacgtttggtga

SEQ ID NO: 298840 - DNA, 25 bp, Probe Sequence
taatagctggaaaaccctctgtagt

SEQ ID NO: 298841 - DNA, 25 bp, Probe Sequence
taatcagctaggaaccctttggagg

SEQ ID NO: 298842 - DNA, 25 bp, Probe Sequence
taccagtttgtaccttttagcctgg

SEQ ID NO: 298843 - DNA, 25 bp, Probe Sequence
ttctgaactttgcgcgttaagccgg

SEQ ID NO: 298844 - DNA, 25 bp, Probe Sequence
tcaagtctcaattgaactgcctcct

SEQ ID NO: 298845 - DNA, 25 bp, Probe Sequence
tcaagtcctacaagaaccttgcttt

SEQ ID NO: 298846 - DNA, 25 bp, Probe Sequence
tcaagctctttaaatcaccatcttc

SEQ ID NO: 298847 - DNA, 25 bp, Probe Sequence
tcaagctgtgtaatattccaatgtt

SEQ ID NO: 298848 - DNA, 25 bp, Probe Sequence
tcaagtgcatgcaatttttttgatg

SEQ ID NO: 298849 - DNA, 25 bp, Probe Sequence
tcaagtgctgccctggctgaaggag

SEQ ID NO: 298850 - DNA, 25 bp, Probe Sequence
tcaatggtgccacggagcacatcgc

SEQ ID NO: 298851 - DNA, 25 bp, Probe Sequence
taatgtgatgcccggaatatctggg

SEQ ID NO: 298852 - DNA, 25 bp, Probe Sequence
taatttgccgccgcaaggagtgccg

SEQ ID NO: 298853 - DNA, 25 bp, Probe Sequence
taatcttcctcggccaggacaggcc

SEQ ID NO: 298854 - DNA, 25 bp, Probe Sequence
taattctccttcccagataaggcaa

SEQ ID NO: 298855 - DNA, 25 bp, Probe Sequence
taacctcacggcccatgattacgtc

SEQ ID NO: 298856 - DNA, 25 bp, Probe Sequence
tcaacccggggagtactcagtgttc

SEQ ID NO: 298857 - DNA, 25 bp, Probe Sequence
tcaatatcctggtgttaacctgact

SEQ ID NO: 298858 - DNA, 25 bp, Probe Sequence
taatgacctgggagctagaccggct

SEQ ID NO: 298859 - DNA, 25 bp, Probe Sequence
taagtcagttgacttgccgcacatc

SEQ ID NO: 298860 - DNA, 25 bp, Probe Sequence
taatatatatctgctgtccagacag

SEQ ID NO: 298861 - DNA, 25 bp, Probe Sequence
taataaatccactctcaactgcagg

SEQ ID NO: 298862 - DNA, 25 bp, Probe Sequence
taataagtcaactgatgctcatcga

SEQ ID NO: 298863 - DNA, 25 bp, Probe Sequence
taataaatcaactcagtgatcctga

SEQ ID NO: 298864 - DNA, 25 bp, Probe Sequence
taatttctaactacgtacctgggtg

SEQ ID NO: 298865 - DNA, 25 bp, Probe Sequence
taatctttgaagtttgttctttggt

SEQ ID NO: 298866 - DNA, 25 bp, Probe Sequence
tcaatatttaagtttgttgctgtca

SEQ ID NO: 298867 - DNA, 25 bp, Probe Sequence
taattttgaagtttactgttgaaat

SEQ ID NO: 298868 - DNA, 25 bp, Probe Sequence
taatcttttacctatttcttacaat

SEQ ID NO: 298869 - DNA, 25 bp, Probe Sequence
tactattttacctatgacccgtgga

SEQ ID NO: 298870 - DNA, 25 bp, Probe Sequence
tacaatcgtttcatcattcggcgtg

SEQ ID NO: 298871 - DNA, 25 bp, Probe Sequence
taattagtgattcctcttatgcggt

SEQ ID NO: 298872 - DNA, 25 bp, Probe Sequence
tcaactcggattactcctacggttt

SEQ ID NO: 298873 - DNA, 25 bp, Probe Sequence
taacctggtttcgttagaggtgtct

SEQ ID NO: 298874 - DNA, 25 bp, Probe Sequence
taatagattgtttccttaccgtgtt

SEQ ID NO: 298875 - DNA, 25 bp, Probe Sequence
taatagtctgtattccttaatccct

SEQ ID NO: 298876 - DNA, 25 bp, Probe Sequence
taatagtagattacctcaattcccc

SEQ ID NO: 298877 - DNA, 25 bp, Probe Sequence
tcaatgaatagtggccccagactcc

SEQ ID NO: 298878 - DNA, 25 bp, Probe Sequence
taatagggctcagcccaggcagcca

SEQ ID NO: 298879 - DNA, 25 bp, Probe Sequence
tagaaggggaccgacaacaggagag

SEQ ID NO: 298880 - DNA, 25 bp, Probe Sequence
taatgcgggggctggaccaggctga

SEQ ID NO: 298881 - DNA, 25 bp, Probe Sequence
tcaatggtgaggatgcggtccccta

SEQ ID NO: 298882 - DNA, 25 bp, Probe Sequence
taatcctaggttcatgacccttcac

SEQ ID NO: 298883 - DNA, 25 bp, Probe Sequence
taatcccaggtaagtcaagcctaca

SEQ ID NO: 298884 - DNA, 25 bp, Probe Sequence
taatatacaggcttagtcagctgcc

SEQ ID NO: 298885 - DNA, 25 bp, Probe Sequence
tcaacttcatggtgcactgagctgt

SEQ ID NO: 298886 - DNA, 25 bp, Probe Sequence
tcaatcacaaggtgcatgccatgag

SEQ ID NO: 298887 - DNA, 25 bp, Probe Sequence
taaccaaggtgccagctgagcggaa

SEQ ID NO: 298888 - DNA, 25 bp, Probe Sequence
tacaccaactgtcaatgccggaatt

SEQ ID NO: 298889 - DNA, 25 bp, Probe Sequence
tcaaccacttgtcttggctgtagat

SEQ ID NO: 298890 - DNA, 25 bp, Probe Sequence
taatccatttgtgagggctttgcct

SEQ ID NO: 298891 - DNA, 25 bp, Probe Sequence
taatcaacttggtccggtttcacag

SEQ ID NO: 298892 - DNA, 25 bp, Probe Sequence
taatcagtctctgtacttgtttccc

SEQ ID NO: 298893 - DNA, 25 bp, Probe Sequence
tcaaggtcttgtgcctatttttctg

SEQ ID NO: 298894 - DNA, 25 bp, Probe Sequence
tcaagacttttgactgccattttgt

SEQ ID NO: 298895 - DNA, 25 bp, Probe Sequence
tcaagatctgtttatctgtacctta

SEQ ID NO: 298896 - DNA, 25 bp, Probe Sequence
tcaatacttctattgttatgcctcc

SEQ ID NO: 298897 - DNA, 25 bp, Probe Sequence
tcaatgtgttctttgttccactgga

SEQ ID NO: 298898 - DNA, 25 bp, Probe Sequence
tcaagtctctgctttgagtcaaggg

SEQ ID NO: 298899 - DNA, 25 bp, Probe Sequence
tcaagctcctttaggactgggtgga

SEQ ID NO: 298900 - DNA, 25 bp, Probe Sequence
tcaagttcaatgagtactggagatt

SEQ ID NO: 298901 - DNA, 25 bp, Probe Sequence
taagcgtccataggatatctgagga

SEQ ID NO: 298902 - DNA, 25 bp, Probe Sequence
tcaagagacttgagttcgggacagt

SEQ ID NO: 298903 - DNA, 25 bp, Probe Sequence
taataagccatgagcttcgttctac

SEQ ID NO: 298904 - DNA, 25 bp, Probe Sequence
taataagacattagctgtctaggcg

SEQ ID NO: 298905 - DNA, 25 bp, Probe Sequence
taatcacatgagagacttctttgct

SEQ ID NO: 298906 - DNA, 25 bp, Probe Sequence
tcaatcacatcactagcacttttat

SEQ ID NO: 298907 - DNA, 25 bp, Probe Sequence
taatcaatcacatgagtaccttact

SEQ ID NO: 298908 - DNA, 25 bp, Probe Sequence
taatcagcagcgtaactaccctaaa

SEQ ID NO: 298909 - DNA, 25 bp, Probe Sequence
tcaatacgcgggatagccccaaatg

SEQ ID NO: 298910 - DNA, 25 bp, Probe Sequence
taatccaagcggatgagcccacgac

SEQ ID NO: 298911 - DNA, 25 bp, Probe Sequence
taacgagagccgcgagggcagcggc

SEQ ID NO: 298912 - DNA, 25 bp, Probe Sequence
taacgggatatgctgagaatgagga

SEQ ID NO: 298913 - DNA, 25 bp, Probe Sequence
taaagttttgggcatgaagggttga

SEQ ID NO: 298914 - DNA, 25 bp, Probe Sequence
taatagttttccctggaataggata

SEQ ID NO: 298915 - DNA, 25 bp, Probe Sequence
taattttttctcgacaataaagata

SEQ ID NO: 298916 - DNA, 25 bp, Probe Sequence
taatttgctactgaacttaataaaa

SEQ ID NO: 298917 - DNA, 25 bp, Probe Sequence
taatttctatgtggaatttcctatc

SEQ ID NO: 298918 - DNA, 25 bp, Probe Sequence
tcaattttttggtctttctgctatg

SEQ ID NO: 298919 - DNA, 25 bp, Probe Sequence
taatcattgtagtggcctaagtgtg

SEQ ID NO: 298920 - DNA, 25 bp, Probe Sequence
tcaagtaggagcagtggaaatggtt

SEQ ID NO: 298921 - DNA, 25 bp, Probe Sequence
tcaagggggtagtaaaataatctgt

SEQ ID NO: 298922 - DNA, 25 bp, Probe Sequence
taaggttatctttgaaaaagcactt

SEQ ID NO: 298923 - DNA, 25 bp, Probe Sequence
taaggctctaatcaccaaaagcagc

SEQ ID NO: 298924 - DNA, 25 bp, Probe Sequence
taaggcctaacttaaagcccagatc

SEQ ID NO: 298925 - DNA, 25 bp, Probe Sequence
taaacgttactttaatggcaattgt

SEQ ID NO: 298926 - DNA, 25 bp, Probe Sequence
taaaccaaactggaagatgggattt

SEQ ID NO: 298927 - DNA, 25 bp, Probe Sequence
tagaaccttaggcattggggagttt

SEQ ID NO: 298928 - DNA, 25 bp, Probe Sequence
taaggctgcttacccttgggggtgt

SEQ ID NO: 298929 - DNA, 25 bp, Probe Sequence
tcaagtgtcacctccttggagaagc

SEQ ID NO: 298930 - DNA, 25 bp, Probe Sequence
tcaagttcatgtcacgctgggtaat

SEQ ID NO: 298931 - DNA, 25 bp, Probe Sequence
tcaagaacatgattatccagcggta

SEQ ID NO: 298932 - DNA, 25 bp, Probe Sequence
tcaagacactgtaaccacaagatgg

SEQ ID NO: 298933 - DNA, 25 bp, Probe Sequence
tcaagatattgataccccagaggtt

SEQ ID NO: 298934 - DNA, 25 bp, Probe Sequence
taatgaactatttctcccaaggttt

SEQ ID NO: 298935 - DNA, 25 bp, Probe Sequence
taatacactacctgtacaaaggttt

SEQ ID NO: 298936 - DNA, 25 bp, Probe Sequence
taattcatctaacgctacacaaaag

SEQ ID NO: 298937 - DNA, 25 bp, Probe Sequence
taattttgccagctaaggacataaa

SEQ ID NO: 298938 - DNA, 25 bp, Probe Sequence
taatccttgcagggtaaggaagcaa

SEQ ID NO: 298939 - DNA, 25 bp, Probe Sequence
tcaatatttaggttacaggatagca

SEQ ID NO: 298940 - DNA, 25 bp, Probe Sequence
taatttttggaattcggccagaggg

SEQ ID NO: 298941 - DNA, 25 bp, Probe Sequence
taatttttagcttagggcctggtgg

SEQ ID NO: 298942 - DNA, 25 bp, Probe Sequence
taattcgttgtatgaggcgcctgga

SEQ ID NO: 298943 - DNA, 25 bp, Probe Sequence
taatgtggttgtgatagccccgcag

SEQ ID NO: 298944 - DNA, 25 bp, Probe Sequence
taatggtatcatcaaggccttcaga

SEQ ID NO: 298945 - DNA, 25 bp, Probe Sequence
tcaatgccattaacaagtgccccct

SEQ ID NO: 298946 - DNA, 25 bp, Probe Sequence
tcaatgccattaacaagtgccccct

SEQ ID NO: 298947 - DNA, 25 bp, Probe Sequence
tcaatgccattaacaagtgccccct

SEQ ID NO: 298948 - DNA, 25 bp, Probe Sequence
tcaacgcttaaaggtgtcttcctcc

SEQ ID NO: 298949 - DNA, 25 bp, Probe Sequence
tagggttaaaggtctgcttgttcgg

SEQ ID NO: 298950 - DNA, 25 bp, Probe Sequence
tagggtttacgacctcgatgttgga

SEQ ID NO: 298951 - DNA, 25 bp, Probe Sequence
ttagttataagtctccgagttggaa

SEQ ID NO: 298952 - DNA, 25 bp, Probe Sequence
taagtttaagagctcccattgtaca

SEQ ID NO: 298953 - DNA, 25 bp, Probe Sequence
taaggtttatagttccctcaacaca

SEQ ID NO: 298954 - DNA, 25 bp, Probe Sequence
taaattttggaatcctctaaacatt

SEQ ID NO: 298955 - DNA, 25 bp, Probe Sequence
taatttttcgtaggcacttacaaat

SEQ ID NO: 298956 - DNA, 25 bp, Probe Sequence
tcaatgttttagcaagccattccta

SEQ ID NO: 298957 - DNA, 25 bp, Probe Sequence
tcaagttttaaagcatatccccatg

SEQ ID NO: 298958 - DNA, 25 bp, Probe Sequence
tcaatgctattgccattaccatacc

SEQ ID NO: 298959 - DNA, 25 bp, Probe Sequence
taatgctgcatccctaattgtacac

SEQ ID NO: 298960 - DNA, 25 bp, Probe Sequence
taatgctgcatccctaattgtacac

SEQ ID NO: 298961 - DNA, 25 bp, Probe Sequence
tcaagtgctctcatagttctatcct

SEQ ID NO: 298962 - DNA, 25 bp, Probe Sequence
tcaagctgccgacagctttctccat

SEQ ID NO: 298963 - DNA, 25 bp, Probe Sequence
tcaaccctgatgaagctgttgctta

SEQ ID NO: 298964 - DNA, 25 bp, Probe Sequence
tcaacccagaatttcttatccagcc

SEQ ID NO: 298965 - DNA, 25 bp, Probe Sequence
tcaagattagtattgtttaccccct

SEQ ID NO: 298966 - DNA, 25 bp, Probe Sequence
taagtttcttttaatccaatccact

SEQ ID NO: 298967 - DNA, 25 bp, Probe Sequence
taattattttagaacttaagcaact

SEQ ID NO: 298968 - DNA, 25 bp, Probe Sequence
taagttttgtggtacttcaccctct

SEQ ID NO: 298969 - DNA, 25 bp, Probe Sequence
tcaagttttctgtaaattttctctt

SEQ ID NO: 298970 - DNA, 25 bp, Probe Sequence
tcaagactatctacaaaaatttatt

SEQ ID NO: 298971 - DNA, 25 bp, Probe Sequence
tcaagattactataatggctgttat

SEQ ID NO: 298972 - DNA, 25 bp, Probe Sequence
tcaagatctagcgataatgacgatg

SEQ ID NO: 298973 - DNA, 25 bp, Probe Sequence
tcaatactgtgaaatatgcagcaag

SEQ ID NO: 298974 - DNA, 25 bp, Probe Sequence
tcaataccggagatcatgcaagctg

SEQ ID NO: 298975 - DNA, 25 bp, Probe Sequence
tcaatgggcgtggattatgcgggtt

SEQ ID NO: 298976 - DNA, 25 bp, Probe Sequence
tcaatggccgctggtttgctggccg

SEQ ID NO: 298977 - DNA, 25 bp, Probe Sequence
taatggcacagaactccgaggccgc

SEQ ID NO: 298978 - DNA, 25 bp, Probe Sequence
tcaagtacaggggcctggtccgcaa

SEQ ID NO: 298979 - DNA, 25 bp, Probe Sequence
tcaagaaggcctatgtggaggccaa

SEQ ID NO: 298980 - DNA, 25 bp, Probe Sequence
taatatcggccgctgtttgtacaga

SEQ ID NO: 298981 - DNA, 25 bp, Probe Sequence
tcaattaggcacatgttttgtgaaa

SEQ ID NO: 298982 - DNA, 25 bp, Probe Sequence
tcaattgggagtttgttttggcacc

SEQ ID NO: 298983 - DNA, 25 bp, Probe Sequence
tcaatgaggcggtcctgttattacc

SEQ ID NO: 298984 - DNA, 25 bp, Probe Sequence
tcaatatgtgccgccagtgtttccg

SEQ ID NO: 298985 - DNA, 25 bp, Probe Sequence
taatctgggacgacaggttcatctc

SEQ ID NO: 298986 - DNA, 25 bp, Probe Sequence
taatacaacacgccggactgactct

SEQ ID NO: 298987 - DNA, 25 bp, Probe Sequence
tcaattcaatacgcgggatagcccc

SEQ ID NO: 298988 - DNA, 25 bp, Probe Sequence
tcaagatccacatcccaggtggcct

SEQ ID NO: 298989 - DNA, 25 bp, Probe Sequence
ttgaatcaaaatatccgtggactgc

SEQ ID NO: 298990 - DNA, 25 bp, Probe Sequence
tataaaagcgtcaccgtggtagccc

SEQ ID NO: 298991 - DNA, 25 bp, Probe Sequence
taaaaacttacagcgatggccccac

SEQ ID NO: 298992 - DNA, 25 bp, Probe Sequence
taaaaacttacagcgatggccccac

SEQ ID NO: 298993 - DNA, 25 bp, Probe Sequence
tcaagaaatcttggagccgctggac

SEQ ID NO: 298994 - DNA, 25 bp, Probe Sequence
tcaagaatgacatgctgtgcgccgg

SEQ ID NO: 298995 - DNA, 25 bp, Probe Sequence
tcaagaatgacatgctgtgcgccgg

SEQ ID NO: 298996 - DNA, 25 bp, Probe Sequence
taacactgtaactagctgagctggg

SEQ ID NO: 298997 - DNA, 25 bp, Probe Sequence
taatactgattttactacagggaga

SEQ ID NO: 298998 - DNA, 25 bp, Probe Sequence
taatagctcaaataacagcagggaa

SEQ ID NO: 298999 - DNA, 25 bp, Probe Sequence
taatgacattaatacctctagaaag

SEQ ID NO: 299000 - DNA, 25 bp, Probe Sequence
taatgactaatctaaggtctaggaa

SEQ ID NO: 299001 - DNA, 25 bp, Probe Sequence
taatagtgtcactagagagtctgac

SEQ ID NO: 299002 - DNA, 25 bp, Probe Sequence
taatagtgcacactgcaaatattac

SEQ ID NO: 299003 - DNA, 25 bp, Probe Sequence
taatagctgcctcatgacaagtaca

SEQ ID NO: 299004 - DNA, 25 bp, Probe Sequence
tcaagagatcttcattaagtaccca

SEQ ID NO: 299005 - DNA, 25 bp, Probe Sequence
tcaaggctcctgcttaaagtccaca

SEQ ID NO: 299006 - DNA, 25 bp, Probe Sequence
taaccccttgaaacaagtctctcac

SEQ ID NO: 299007 - DNA, 25 bp, Probe Sequence
taatacaatttgcagaaaattccca

SEQ ID NO: 299008 - DNA, 25 bp, Probe Sequence
taattccatttgcagcctcaattcc

SEQ ID NO: 299009 - DNA, 25 bp, Probe Sequence
taatgttcgtcagacctccatgttc

SEQ ID NO: 299010 - DNA, 25 bp, Probe Sequence
tcaagattctgtcaacctcactgtg

SEQ ID NO: 299011 - DNA, 25 bp, Probe Sequence
tcaattttctgctcagcctcatgtt

SEQ ID NO: 299012 - DNA, 25 bp, Probe Sequence
tcaatttcattatcagcaggcatct

SEQ ID NO: 299013 - DNA, 25 bp, Probe Sequence
taattccatgaatcgcttctctttt

SEQ ID NO: 299014 - DNA, 25 bp, Probe Sequence
tcaatctactgaattccttttttaa

SEQ ID NO: 299015 - DNA, 25 bp, Probe Sequence
taatctatatgtttccttgggtgta

SEQ ID NO: 299016 - DNA, 25 bp, Probe Sequence
taatttctgcttgagtatggtgtta

SEQ ID NO: 299017 - DNA, 25 bp, Probe Sequence
taatgtttcctcaagataggtttta

SEQ ID NO: 299018 - DNA, 25 bp, Probe Sequence
taatgctttggaaaaatgggtcttt

SEQ ID NO: 299019 - DNA, 25 bp, Probe Sequence
tcaatctttgtgaaatagtggttgt

SEQ ID NO: 299020 - DNA, 25 bp, Probe Sequence
tcaacgtgtgtatattgatgtttat

SEQ ID NO: 299021 - DNA, 25 bp, Probe Sequence
tcaagcgggtctcagagcagtttac

SEQ ID NO: 299022 - DNA, 25 bp, Probe Sequence
taatctggatccctagaagtttatg

SEQ ID NO: 299023 - DNA, 25 bp, Probe Sequence
taatttgacttctgacatgttggca

SEQ ID NO: 299024 - DNA, 25 bp, Probe Sequence
taattaacctccggtgctctgaact

SEQ ID NO: 299025 - DNA, 25 bp, Probe Sequence
taatctcaagacaccttccgagcgt

SEQ ID NO: 299026 - DNA, 25 bp, Probe Sequence
taatctcaagacacctgccgagtgc

SEQ ID NO: 299027 - DNA, 25 bp, Probe Sequence
taattcaatttgttctgccgagatt

SEQ ID NO: 299028 - DNA, 25 bp, Probe Sequence
taattcctcttgcccaacggcatat

SEQ ID NO: 299029 - DNA, 25 bp, Probe Sequence
taattccgataacgaacgagactct

SEQ ID NO: 299030 - DNA, 25 bp, Probe Sequence
taatgcccgtttcatatgtaactta

SEQ ID NO: 299031 - DNA, 25 bp, Probe Sequence
taatcccggtctatcttgtgacatt

SEQ ID NO: 299032 - DNA, 25 bp, Probe Sequence
taatcaccccatgtaggtgtacatt

SEQ ID NO: 299033 - DNA, 25 bp, Probe Sequence
tatactccaactggggagttccgtg

SEQ ID NO: 299034 - DNA, 25 bp, Probe Sequence
ttggtctgcaacgggctaatccacg

SEQ ID NO: 299035 - DNA, 25 bp, Probe Sequence
tatagtccagggggctttccaagtc

SEQ ID NO: 299036 - DNA, 25 bp, Probe Sequence
tcaagtcctgggggatgtgctctgc

SEQ ID NO: 299037 - DNA, 25 bp, Probe Sequence
tcaagacctgagcctggagctcctg

SEQ ID NO: 299038 - DNA, 25 bp, Probe Sequence
taatcacgcgatgttgactgcacag

SEQ ID NO: 299039 - DNA, 25 bp, Probe Sequence
taagcacaggagttggaatccagcc

SEQ ID NO: 299040 - DNA, 25 bp, Probe Sequence
tcaagacagccgtctgtgacatccc

SEQ ID NO: 299041 - DNA, 25 bp, Probe Sequence
tcaagaagcacgcgtactgctccaa

SEQ ID NO: 299042 - DNA, 25 bp, Probe Sequence
tcaatgtagcctcttaatcccatca

SEQ ID NO: 299043 - DNA, 25 bp, Probe Sequence
tcaaggtcgtgcgtctgaagcctac

SEQ ID NO: 299044 - DNA, 25 bp, Probe Sequence
tcaagggcccaggcatggtggctca

SEQ ID NO: 299045 - DNA, 25 bp, Probe Sequence
tcaagttccacaggatggtcaagct

SEQ ID NO: 299046 - DNA, 25 bp, Probe Sequence
tcaagttccaagttgctaatacagc

SEQ ID NO: 299047 - DNA, 25 bp, Probe Sequence
tcaagttaccatatgatttagcaat

SEQ ID NO: 299048 - DNA, 25 bp, Probe Sequence
tcaagcttacctactgttatctcta

SEQ ID NO: 299049 - DNA, 25 bp, Probe Sequence
tacactcaacggtttggatcctaga

SEQ ID NO: 299050 - DNA, 25 bp, Probe Sequence
tacagtcaatgggccgtggaaaagc

SEQ ID NO: 299051 - DNA, 25 bp, Probe Sequence
taaggcagaggctggtcgaaaaaaa

SEQ ID NO: 299052 - DNA, 25 bp, Probe Sequence
tcaagtcagtggtggctcgctttga

SEQ ID NO: 299053 - DNA, 25 bp, Probe Sequence
tcaagtcactggtctgtttgcattt

SEQ ID NO: 299054 - DNA, 25 bp, Probe Sequence
tcaattccaggagtttttttctttg

SEQ ID NO: 299055 - DNA, 25 bp, Probe Sequence
taattccaaggtgttgtttgctttt

SEQ ID NO: 299056 - DNA, 25 bp, Probe Sequence
taattctaagacttttgaattttca

SEQ ID NO: 299057 - DNA, 25 bp, Probe Sequence
taattctactgaagtttaatttctg

SEQ ID NO: 299058 - DNA, 25 bp, Probe Sequence
taatgttacccccttgaaattcagc

SEQ ID NO: 299059 - DNA, 25 bp, Probe Sequence
ttagttaccaacaggacatctcaca

SEQ ID NO: 299060 - DNA, 25 bp, Probe Sequence
taagtggaccccacagactcagaca

SEQ ID NO: 299061 - DNA, 25 bp, Probe Sequence
taagtgtgcctggcaaccaaatcga

SEQ ID NO: 299062 - DNA, 25 bp, Probe Sequence
tcaagtctacatgtacctagtcaca

SEQ ID NO: 299063 - DNA, 25 bp, Probe Sequence
tcaacctaattttcttagcacaaga

SEQ ID NO: 299064 - DNA, 25 bp, Probe Sequence
taaggctaaagttgatctgaacaaa

SEQ ID NO: 299065 - DNA, 25 bp, Probe Sequence
tcaatggttatactactagaactta

SEQ ID NO: 299066 - DNA, 25 bp, Probe Sequence
tcaatggctttatttttaacctata

SEQ ID NO: 299067 - DNA, 25 bp, Probe Sequence
tcaattgtttcctttgtaacctgta

SEQ ID NO: 299068 - DNA, 25 bp, Probe Sequence
taattcttctcctttgtcaaatggt

SEQ ID NO: 299069 - DNA, 25 bp, Probe Sequence
taattttctttatgtctgtttgtgc

SEQ ID NO: 299070 - DNA, 25 bp, Probe Sequence
tattttttgctttggtcgaacttgg

SEQ ID NO: 299071 - DNA, 25 bp, Probe Sequence
taatttctgatcttctagtggctac

SEQ ID NO: 299072 - DNA, 25 bp, Probe Sequence
tcaatttcttgctaataaactcaca

SEQ ID NO: 299073 - DNA, 25 bp, Probe Sequence
taagctttcctatgcataaccacaa

SEQ ID NO: 299074 - DNA, 25 bp, Probe Sequence
taatcagtatcagtaaaaagacaaa

SEQ ID NO: 299075 - DNA, 25 bp, Probe Sequence
taatcagcttaataattaccatcag

SEQ ID NO: 299076 - DNA, 25 bp, Probe Sequence
taatgcctttatgttcaatcccagg

SEQ ID NO: 299077 - DNA, 25 bp, Probe Sequence
tcaagcgttatgtcttcgacaccca

SEQ ID NO: 299078 - DNA, 25 bp, Probe Sequence
tcaaggtttgtgttaccctcctgta

SEQ ID NO: 299079 - DNA, 25 bp, Probe Sequence
tcaaggttgggagaggccggtgttc

SEQ ID NO: 299080 - DNA, 25 bp, Probe Sequence
taaggttgggtctttcaggctggtt

SEQ ID NO: 299081 - DNA, 25 bp, Probe Sequence
taaggtgcttggagtttacctggct

SEQ ID NO: 299082 - DNA, 25 bp, Probe Sequence
taagggcgacttggtgttcaccgcc

SEQ ID NO: 299083 - DNA, 25 bp, Probe Sequence
tcaaggactcagtttggttccaccc

SEQ ID NO: 299084 - DNA, 25 bp, Probe Sequence
tcaaggactcagtttggttccaccc

SEQ ID NO: 299085 - DNA, 25 bp, Probe Sequence
tcaaggactcagtttggttccaccc

SEQ ID NO: 299086 - DNA, 25 bp, Probe Sequence
tcaagggccagatcttgatgcccaa

SEQ ID NO: 299087 - DNA, 25 bp, Probe Sequence
tcaaggagacagtatctcagcgccc

SEQ ID NO: 299088 - DNA, 25 bp, Probe Sequence
taactgaacagtatagcccttttag

SEQ ID NO: 299089 - DNA, 25 bp, Probe Sequence
taacattcacatactaacccttctt

SEQ ID NO: 299090 - DNA, 25 bp, Probe Sequence
taatcatgtaaagtaagagttctct

SEQ ID NO: 299091 - DNA, 25 bp, Probe Sequence
taactagaagttatgagtatcttaa

SEQ ID NO: 299092 - DNA, 25 bp, Probe Sequence
taatctcaagttatgttgttttaga

SEQ ID NO: 299093 - DNA, 25 bp, Probe Sequence
taatgcataattgatgttttcgtta

SEQ ID NO: 299094 - DNA, 25 bp, Probe Sequence
tcaattgcaattgtgttacttttat

SEQ ID NO: 299095 - DNA, 25 bp, Probe Sequence
tcaatctggcttctgcattactatt

SEQ ID NO: 299096 - DNA, 25 bp, Probe Sequence
tcaagggcttttcggactgtttgct

SEQ ID NO: 299097 - DNA, 25 bp, Probe Sequence
tcaagggattctcaggtctcagtct

SEQ ID NO: 299098 - DNA, 25 bp, Probe Sequence
tcaatgcagagcactccaggcttca

SEQ ID NO: 299099 - DNA, 25 bp, Probe Sequence
taaggatgcatggtccagccttcag

SEQ ID NO: 299100 - DNA, 25 bp, Probe Sequence
taaggagtactcgacctgtaccagc

SEQ ID NO: 299101 - DNA, 25 bp, Probe Sequence
tacagacttagggacttctactgcc

SEQ ID NO: 299102 - DNA, 25 bp, Probe Sequence
tcaagactatcagcttctcttttgc

SEQ ID NO: 299103 - DNA, 25 bp, Probe Sequence
tcaatacaacagtttcacttataga

SEQ ID NO: 299104 - DNA, 25 bp, Probe Sequence
taattaccactttctctgtatatga

SEQ ID NO: 299105 - DNA, 25 bp, Probe Sequence
taattgttccttgtgcatgttaata

SEQ ID NO: 299106 - DNA, 25 bp, Probe Sequence
taattttgccatcctaggcttaaat

SEQ ID NO: 299107 - DNA, 25 bp, Probe Sequence
taattccttcatcctaacttctaat

SEQ ID NO: 299108 - DNA, 25 bp, Probe Sequence
taattttcattcatcaacctctcaa

SEQ ID NO: 299109 - DNA, 25 bp, Probe Sequence
taatttgtttctacctaatgctata

SEQ ID NO: 299110 - DNA, 25 bp, Probe Sequence
taaccagtcttcaatccttactaac

SEQ ID NO: 299111 - DNA, 25 bp, Probe Sequence
taatacagacttatctcctcactcc

SEQ ID NO: 299112 - DNA, 25 bp, Probe Sequence
taataagttataatctcttcccctc

SEQ ID NO: 299113 - DNA, 25 bp, Probe Sequence
taatacctttatgttctcccatata

SEQ ID NO: 299114 - DNA, 25 bp, Probe Sequence
taattcctattaagtacagccgcaa

SEQ ID NO: 299115 - DNA, 25 bp, Probe Sequence
taattcactaagctgcctagccaca

SEQ ID NO: 299116 - DNA, 25 bp, Probe Sequence
taattggctaaccagccaagatccc

SEQ ID NO: 299117 - DNA, 25 bp, Probe Sequence
taattggctaccctgaagccaccat

SEQ ID NO: 299118 - DNA, 25 bp, Probe Sequence
taattgcgctgagccttgagcacac

SEQ ID NO: 299119 - DNA, 25 bp, Probe Sequence
tcaatggaggcacctgtcggcagac

SEQ ID NO: 299120 - DNA, 25 bp, Probe Sequence
tcaatggaggcacctgtcggcagac

SEQ ID NO: 299121 - DNA, 25 bp, Probe Sequence
tcaatcccgaggctgctgagagacg

SEQ ID NO: 299122 - DNA, 25 bp, Probe Sequence
tcaatcctgcggctttggtgacagt

SEQ ID NO: 299123 - DNA, 25 bp, Probe Sequence
taatcgctcaagcctgatctgggac

SEQ ID NO: 299124 - DNA, 25 bp, Probe Sequence
taagtctcatcaacgatctgatggt

SEQ ID NO: 299125 - DNA, 25 bp, Probe Sequence
taaggctgtcctggcatccatggac

SEQ ID NO: 299126 - DNA, 25 bp, Probe Sequence
taatgctgtgccttcgctgcacagt

SEQ ID NO: 299127 - DNA, 25 bp, Probe Sequence
tcaatgccctgctcatgatggcagt

SEQ ID NO: 299128 - DNA, 25 bp, Probe Sequence
taatgcaactgcttaatggcactaa

SEQ ID NO: 299129 - DNA, 25 bp, Probe Sequence
taatagctcatttacatggctccaa

SEQ ID NO: 299130 - DNA, 25 bp, Probe Sequence
taatatctcttagggacccagaccc

SEQ ID NO: 299131 - DNA, 25 bp, Probe Sequence
tcaatcatcttttgtgacatcccca

SEQ ID NO: 299132 - DNA, 25 bp, Probe Sequence
tcaatgcttcttcatggaccatcca

SEQ ID NO: 299133 - DNA, 25 bp, Probe Sequence
taattatgttccagattgaccatga

SEQ ID NO: 299134 - DNA, 25 bp, Probe Sequence
taatgtatgtgtccattttacccac

SEQ ID NO: 299135 - DNA, 25 bp, Probe Sequence
taataatgctgaccacttaccgtca

SEQ ID NO: 299136 - DNA, 25 bp, Probe Sequence
tcaatgagacaaccctgtgcaagcc

SEQ ID NO: 299137 - DNA, 25 bp, Probe Sequence
tcaatgagacaaccctgtgcaagcc

SEQ ID NO: 299138 - DNA, 25 bp, Probe Sequence
tcaagaccaggccctggcagcaacc

SEQ ID NO: 299139 - DNA, 25 bp, Probe Sequence
tcaagaccagcctgggcaacacagc

SEQ ID NO: 299140 - DNA, 25 bp, Probe Sequence
tcaagaccagcctgggcaacacagc

SEQ ID NO: 299141 - DNA, 25 bp, Probe Sequence
tcaagaccagcctggccaacatggt

SEQ ID NO: 299142 - DNA, 25 bp, Probe Sequence
tcaagaccagcctggacaacatagt

SEQ ID NO: 299143 - DNA, 25 bp, Probe Sequence
taatacccttcttactgacatatgt

SEQ ID NO: 299144 - DNA, 25 bp, Probe Sequence
taatcacccttgtcacaaacaatat

SEQ ID NO: 299145 - DNA, 25 bp, Probe Sequence
taatgacatccagtgtctccaaaat

SEQ ID NO: 299146 - DNA, 25 bp, Probe Sequence
tcaatgtcaccacagcaccagaatt

SEQ ID NO: 299147 - DNA, 25 bp, Probe Sequence
taatggcaattccaacgagtgtttg

SEQ ID NO: 299148 - DNA, 25 bp, Probe Sequence
taatggcacataacactccaatgat

SEQ ID NO: 299149 - DNA, 25 bp, Probe Sequence
taagtgccatcaacttgcagcaatg

SEQ ID NO: 299150 - DNA, 25 bp, Probe Sequence
tcaagtagcatcaatcttatactga

SEQ ID NO: 299151 - DNA, 25 bp, Probe Sequence
tcaatgtatcatatgccattacgcc

SEQ ID NO: 299152 - DNA, 25 bp, Probe Sequence
taattagcatctaccattatcccca

SEQ ID NO: 299153 - DNA, 25 bp, Probe Sequence
taaaagattcgcctgattccccaga

SEQ ID NO: 299154 - DNA, 25 bp, Probe Sequence
taataagcttagcttctcttgccac

SEQ ID NO: 299155 - DNA, 25 bp, Probe Sequence
taataccttcgggatcactgtcccc

SEQ ID NO: 299156 - DNA, 25 bp, Probe Sequence
taataggctttagagcctttcacct

SEQ ID NO: 299157 - DNA, 25 bp, Probe Sequence
taaaggctcccagaggtttagcaac

SEQ ID NO: 299158 - DNA, 25 bp, Probe Sequence
taagggtcgaaggtggatttagcag

SEQ ID NO: 299159 - DNA, 25 bp, Probe Sequence
taagggttgcggcgtgatgtcttca

SEQ ID NO: 299160 - DNA, 25 bp, Probe Sequence
tcaatggggggacgggatgcctggc

SEQ ID NO: 299161 - DNA, 25 bp, Probe Sequence
tcaaggcagaggtgcggggcgctga

SEQ ID NO: 299162 - DNA, 25 bp, Probe Sequence
taaggatgaggtaggtaggcaggaa

SEQ ID NO: 299163 - DNA, 25 bp, Probe Sequence
tcaatggagcagaggcggggaagga

SEQ ID NO: 299164 - DNA, 25 bp, Probe Sequence
tcaatgggcaatgacaggtaaatta

SEQ ID NO: 299165 - DNA, 25 bp, Probe Sequence
taatgagcgttaacacagtaaaata

SEQ ID NO: 299166 - DNA, 25 bp, Probe Sequence
taatagactccattccagtaatggt

SEQ ID NO: 299167 - DNA, 25 bp, Probe Sequence
taattgtgcctagccagtattggta

SEQ ID NO: 299168 - DNA, 25 bp, Probe Sequence
taattttcatgacctggatatgtgg

SEQ ID NO: 299169 - DNA, 25 bp, Probe Sequence
taatttgcattactctggtggattg

SEQ ID NO: 299170 - DNA, 25 bp, Probe Sequence
taatttgcattactctggtggattg

SEQ ID NO: 299171 - DNA, 25 bp, Probe Sequence
tcaaggctacaattgctggtggtgg

SEQ ID NO: 299172 - DNA, 25 bp, Probe Sequence
tcaagagtctggtttggggctgggt

SEQ ID NO: 299173 - DNA, 25 bp, Probe Sequence
tcaagagccaggtggtcgcggggac

SEQ ID NO: 299174 - DNA, 25 bp, Probe Sequence
tcaaggctcgagatcttcgcgggaa

SEQ ID NO: 299175 - DNA, 25 bp, Probe Sequence
tcaaggcatttgttgctatcgggga

SEQ ID NO: 299176 - DNA, 25 bp, Probe Sequence
tcaagtctcattctgcttcagggga

SEQ ID NO: 299177 - DNA, 25 bp, Probe Sequence
tcaagtctcttgaggctcaggcgga

SEQ ID NO: 299178 - DNA, 25 bp, Probe Sequence
tcaagatgtcccaggtcctgggaag

SEQ ID NO: 299179 - DNA, 25 bp, Probe Sequence
tcaaggacaccaaaatcacgtgtga

SEQ ID NO: 299180 - DNA, 25 bp, Probe Sequence
tacggaagccgttttcgcttcactt

SEQ ID NO: 299181 - DNA, 25 bp, Probe Sequence
tacggaagccgttttcgcttcactt

SEQ ID NO: 299182 - DNA, 25 bp, Probe Sequence
taatggccagattttttgggtcctt

SEQ ID NO: 299183 - DNA, 25 bp, Probe Sequence
taaggcatagtttattttttcctct

SEQ ID NO: 299184 - DNA, 25 bp, Probe Sequence
taaggtagtgcgatttttagcctcc

SEQ ID NO: 299185 - DNA, 25 bp, Probe Sequence
tcaagttactggcttttatacttac

SEQ ID NO: 299186 - DNA, 25 bp, Probe Sequence
taatgttgacggctttgtgattgat

SEQ ID NO: 299187 - DNA, 25 bp, Probe Sequence
taagttgatagccctctagtcagtt

SEQ ID NO: 299188 - DNA, 25 bp, Probe Sequence
taagtatttgtacctaacagtcttg

SEQ ID NO: 299189 - DNA, 25 bp, Probe Sequence
taagtaccggagcctaggcgacctg

SEQ ID NO: 299190 - DNA, 25 bp, Probe Sequence
taagtttggagacctgaggcccctt

SEQ ID NO: 299191 - DNA, 25 bp, Probe Sequence
taagtttggagacctgaggcccctt

SEQ ID NO: 299192 - DNA, 25 bp, Probe Sequence
taagggcttgattcctagccccgtt

SEQ ID NO: 299193 - DNA, 25 bp, Probe Sequence
tcaaggagctggtgcccagcatccc

SEQ ID NO: 299194 - DNA, 25 bp, Probe Sequence
tcaagtgggatctgtcacaccagcc

SEQ ID NO: 299195 - DNA, 25 bp, Probe Sequence
tcaagtgcgttctttagaccaatgc

SEQ ID NO: 299196 - DNA, 25 bp, Probe Sequence
tcaagtcgtttcgttagcacacagt

SEQ ID NO: 299197 - DNA, 25 bp, Probe Sequence
tcaaggttgcttcttacagactgtt

SEQ ID NO: 299198 - DNA, 25 bp, Probe Sequence
taattggagtatctaaagccagtgg

SEQ ID NO: 299199 - DNA, 25 bp, Probe Sequence
taattgtggtttccaacccagtgga

SEQ ID NO: 299200 - DNA, 25 bp, Probe Sequence
taattcttttatcaatcccagcatt

SEQ ID NO: 299201 - DNA, 25 bp, Probe Sequence
taatttgtttaccgttgctgctcat

SEQ ID NO: 299202 - DNA, 25 bp, Probe Sequence
taattctgttgtaaagttgtctgtt

SEQ ID NO: 299203 - DNA, 25 bp, Probe Sequence
taaacctgttaatcctgtcttttgc

SEQ ID NO: 299204 - DNA, 25 bp, Probe Sequence
taattcctgtcaaattttttgttct

SEQ ID NO: 299205 - DNA, 25 bp, Probe Sequence
taattccttcactaggttgggtttg

SEQ ID NO: 299206 - DNA, 25 bp, Probe Sequence
taatgtgccccctgtgaatagtgtt

SEQ ID NO: 299207 - DNA, 25 bp, Probe Sequence
taattttcaccccaataatgttcta

SEQ ID NO: 299208 - DNA, 25 bp, Probe Sequence
taattttacctccagaacacattct

SEQ ID NO: 299209 - DNA, 25 bp, Probe Sequence
taattattgcaaacctatacacaac

SEQ ID NO: 299210 - DNA, 25 bp, Probe Sequence
tcaattatagaaagtcatttctcaa

SEQ ID NO: 299211 - DNA, 25 bp, Probe Sequence
taattggcaggtattttctcacatc

SEQ ID NO: 299212 - DNA, 25 bp, Probe Sequence
taattcagcgttatttaagcacata

SEQ ID NO: 299213 - DNA, 25 bp, Probe Sequence
taagtccggctcgttcaagaacata

SEQ ID NO: 299214 - DNA, 25 bp, Probe Sequence
taattccggtcagtgctgacaaata

SEQ ID NO: 299215 - DNA, 25 bp, Probe Sequence
taactccctgtgtctgcatgagcat

SEQ ID NO: 299216 - DNA, 25 bp, Probe Sequence
tcaatgacacctttctgatggtctt

SEQ ID NO: 299217 - DNA, 25 bp, Probe Sequence
tcaagtcacccattcgagacatttc

SEQ ID NO: 299218 - DNA, 25 bp, Probe Sequence
taagtcctccgtcagaaattattac

SEQ ID NO: 299219 - DNA, 25 bp, Probe Sequence
taatgatcttccttgggaaattatt

SEQ ID NO: 299220 - DNA, 25 bp, Probe Sequence
taatcatcatgttttccgaccatta

SEQ ID NO: 299221 - DNA, 25 bp, Probe Sequence
taatttgcctttcaggtcattccca

SEQ ID NO: 299222 - DNA, 25 bp, Probe Sequence
taatttgccttatctaggtggtcca

SEQ ID NO: 299223 - DNA, 25 bp, Probe Sequence
taatattaattgtttaggggcttct

SEQ ID NO: 299224 - DNA, 25 bp, Probe Sequence
taaatggttggctctacgggcttca

SEQ ID NO: 299225 - DNA, 25 bp, Probe Sequence
taaaggaatggcacccgtccttgta

SEQ ID NO: 299226 - DNA, 25 bp, Probe Sequence
taatctggaagagtttcctgaccta

SEQ ID NO: 299227 - DNA, 25 bp, Probe Sequence
taattgtgtaaaatagccttcccaa

SEQ ID NO: 299228 - DNA, 25 bp, Probe Sequence
taattgagttcaattcgcctctccg

SEQ ID NO: 299229 - DNA, 25 bp, Probe Sequence
tcaatggagtgtactaccgcctggg

SEQ ID NO: 299230 - DNA, 25 bp, Probe Sequence
taaggagtgtaccaatctctgctgt

SEQ ID NO: 299231 - DNA, 25 bp, Probe Sequence
taaggccttagccatgatctgcagg

SEQ ID NO: 299232 - DNA, 25 bp, Probe Sequence
taaggtctatgggagtagcatggaa

SEQ ID NO: 299233 - DNA, 25 bp, Probe Sequence
taagaaacatgggaattgcagaaat

SEQ ID NO: 299234 - DNA, 25 bp, Probe Sequence
taataaacagtacctgctctcaaat

SEQ ID NO: 299235 - DNA, 25 bp, Probe Sequence
tcaatagaaatcaaggtgttcaata

SEQ ID NO: 299236 - DNA, 25 bp, Probe Sequence
tcaatgagcatgtttagactttaac

SEQ ID NO: 299237 - DNA, 25 bp, Probe Sequence
taaactgttttggaattaatggctt

SEQ ID NO: 299238 - DNA, 25 bp, Probe Sequence
taatatctgtatcctggaacaatat

SEQ ID NO: 299239 - DNA, 25 bp, Probe Sequence
taatatactcatcatagaaaacttg

SEQ ID NO: 299240 - DNA, 25 bp, Probe Sequence
taagatagcttcataaggagacttg

SEQ ID NO: 299241 - DNA, 25 bp, Probe Sequence
taatgtcaggtcttaccagccactt

SEQ ID NO: 299242 - DNA, 25 bp, Probe Sequence
taatttggctaaagcacccctgttg

SEQ ID NO: 299243 - DNA, 25 bp, Probe Sequence
taatttcacaagggccatccctttc

SEQ ID NO: 299244 - DNA, 25 bp, Probe Sequence
taatttatagactgccatggcctta

SEQ ID NO: 299245 - DNA, 25 bp, Probe Sequence
tcaatttataacgttctcagtcctt

SEQ ID NO: 299246 - DNA, 25 bp, Probe Sequence
taattataatacgtttcccagcctc

SEQ ID NO: 299247 - DNA, 25 bp, Probe Sequence
taaggataaacactaataagagctc

SEQ ID NO: 299248 - DNA, 25 bp, Probe Sequence
tacgtggacacagaaagcaagtttc

SEQ ID NO: 299249 - DNA, 25 bp, Probe Sequence
taactgtgtccttgaaacacgtttc

SEQ ID NO: 299250 - DNA, 25 bp, Probe Sequence
taattgttgctcaccacttagattt

SEQ ID NO: 299251 - DNA, 25 bp, Probe Sequence
taattgcaatctaccatatcttaag

SEQ ID NO: 299252 - DNA, 25 bp, Probe Sequence
taattagactatgtcattgtgaggc

SEQ ID NO: 299253 - DNA, 25 bp, Probe Sequence
taagtagattacacatggttgaggt

SEQ ID NO: 299254 - DNA, 25 bp, Probe Sequence
taagtatcttacagacctcagggat

SEQ ID NO: 299255 - DNA, 25 bp, Probe Sequence
taagtccttagaaattcctggctgg

SEQ ID NO: 299256 - DNA, 25 bp, Probe Sequence
taagttcttggaaattaagccattt

SEQ ID NO: 299257 - DNA, 25 bp, Probe Sequence
taacgtcttgaaacttaaactctgt

SEQ ID NO: 299258 - DNA, 25 bp, Probe Sequence
taatttcctgtcacctaaagcttca

SEQ ID NO: 299259 - DNA, 25 bp, Probe Sequence
taattgtctcagtcacagcttttac

SEQ ID NO: 299260 - DNA, 25 bp, Probe Sequence
tcaattgttatgtccacttattcac

SEQ ID NO: 299261 - DNA, 25 bp, Probe Sequence
tcaattgtttattctctgctttcct

SEQ ID NO: 299262 - DNA, 25 bp, Probe Sequence
taatggtgcttattttcctaactcc

SEQ ID NO: 299263 - DNA, 25 bp, Probe Sequence
taatggtcatttttgtaagacacat

SEQ ID NO: 299264 - DNA, 25 bp, Probe Sequence
tcaatggttcttttgtcgatgccac

SEQ ID NO: 299265 - DNA, 25 bp, Probe Sequence
tagctggtcctttttcgggagttag

SEQ ID NO: 299266 - DNA, 25 bp, Probe Sequence
taggcagttcttttacgaaggttca

SEQ ID NO: 299267 - DNA, 25 bp, Probe Sequence
taaaattccattatcgggagttcct

SEQ ID NO: 299268 - DNA, 25 bp, Probe Sequence
taagaattccccacctgtagtaaca

SEQ ID NO: 299269 - DNA, 25 bp, Probe Sequence
ttaggattatcccagcctcttagta

SEQ ID NO: 299270 - DNA, 25 bp, Probe Sequence
tttggtgatacctcacccctgtaat

SEQ ID NO: 299271 - DNA, 25 bp, Probe Sequence
tttagtgaaccgtcagatcgcctgg

SEQ ID NO: 299272 - DNA, 25 bp, Probe Sequence
tttagtgaaccgtcagatcgcctgg

SEQ ID NO: 299273 - DNA, 25 bp, Probe Sequence
tttagtgaaccgtcagatcgcctgg

SEQ ID NO: 299274 - DNA, 25 bp, Probe Sequence
tttagtgaaccgtcagatcgcctgg

SEQ ID NO: 299275 - DNA, 25 bp, Probe Sequence
ttagggagactcgtaaggccaggcc

SEQ ID NO: 299276 - DNA, 25 bp, Probe Sequence
taaggaggttcctgagaggggccgc

SEQ ID NO: 299277 - DNA, 25 bp, Probe Sequence
taaggaggttcctgagaggggccgc

SEQ ID NO: 299278 - DNA, 25 bp, Probe Sequence
taagggattgggggagggagcctgg

SEQ ID NO: 299279 - DNA, 25 bp, Probe Sequence
taaggggtggggctggacgtcagga

SEQ ID NO: 299280 - DNA, 25 bp, Probe Sequence
taagagggtttgccttggatccggg

SEQ ID NO: 299281 - DNA, 25 bp, Probe Sequence
taagagggtttgccttggatccggg

SEQ ID NO: 299282 - DNA, 25 bp, Probe Sequence
taagggagattctggtggacctctg

SEQ ID NO: 299283 - DNA, 25 bp, Probe Sequence
taatagggcttctgcctaagcctct

SEQ ID NO: 299284 - DNA, 25 bp, Probe Sequence
taatgaggagctgatggcctccctg

SEQ ID NO: 299285 - DNA, 25 bp, Probe Sequence
taagaaacacgaaggcatccctgag

SEQ ID NO: 299286 - DNA, 25 bp, Probe Sequence
taatatggaacaaaggatccactga

SEQ ID NO: 299287 - DNA, 25 bp, Probe Sequence
taatctggtttacggatgtgactga

SEQ ID NO: 299288 - DNA, 25 bp, Probe Sequence
taatgttttatactgtttactgaaa

SEQ ID NO: 299289 - DNA, 25 bp, Probe Sequence
taatgctgtttaaggactaatgtga

SEQ ID NO: 299290 - DNA, 25 bp, Probe Sequence
taatggttcttcgtcagccaagggg

SEQ ID NO: 299291 - DNA, 25 bp, Probe Sequence
taatggattctggggactcagggtg

SEQ ID NO: 299292 - DNA, 25 bp, Probe Sequence
taatggatttggttaatgacttatg

SEQ ID NO: 299293 - DNA, 25 bp, Probe Sequence
taatggataatattctaggacttag

SEQ ID NO: 299294 - DNA, 25 bp, Probe Sequence
taatggaacatatgtagagcactta

SEQ ID NO: 299295 - DNA, 25 bp, Probe Sequence
taaggcatatcaaagaagcagactg

SEQ ID NO: 299296 - DNA, 25 bp, Probe Sequence
taagagctcccattgtacagcatgc

SEQ ID NO: 299297 - DNA, 25 bp, Probe Sequence
tcaaggctgctgtctttatcagcac

SEQ ID NO: 299298 - DNA, 25 bp, Probe Sequence
taatgtcttgcatttgtacagaatt

SEQ ID NO: 299299 - DNA, 25 bp, Probe Sequence
taatttcctgctagctactgattta

SEQ ID NO: 299300 - DNA, 25 bp, Probe Sequence
tcaatcttttgtacacactttatag

SEQ ID NO: 299301 - DNA, 25 bp, Probe Sequence
taatagttttaccctctgcattgga

SEQ ID NO: 299302 - DNA, 25 bp, Probe Sequence
tcaatcgctttttggacctgaccga

SEQ ID NO: 299303 - DNA, 25 bp, Probe Sequence
taatcacttctatggacttatctgc

SEQ ID NO: 299304 - DNA, 25 bp, Probe Sequence
taagcatttttactatctctacgcc

SEQ ID NO: 299305 - DNA, 25 bp, Probe Sequence
taatttcttttatcactacctcaac

SEQ ID NO: 299306 - DNA, 25 bp, Probe Sequence
taattattatttggccctctgccca

SEQ ID NO: 299307 - DNA, 25 bp, Probe Sequence
taattcttattgagcagccattgcc

SEQ ID NO: 299308 - DNA, 25 bp, Probe Sequence
taatttgctcctgacagtcatacct

SEQ ID NO: 299309 - DNA, 25 bp, Probe Sequence
taatgttctccagcaaacttcactc

SEQ ID NO: 299310 - DNA, 25 bp, Probe Sequence
taatgtgtacctgaaagctcctggc

SEQ ID NO: 299311 - DNA, 25 bp, Probe Sequence
taattctaccataaccacatcttcc

SEQ ID NO: 299312 - DNA, 25 bp, Probe Sequence
taatacatttcaacatgcttttgtc

SEQ ID NO: 299313 - DNA, 25 bp, Probe Sequence
taatccattgtcagtatttgtgcat

SEQ ID NO: 299314 - DNA, 25 bp, Probe Sequence
tcaatccacttaaatatattccatc

SEQ ID NO: 299315 - DNA, 25 bp, Probe Sequence
taatctcactttgaatatctcctga

SEQ ID NO: 299316 - DNA, 25 bp, Probe Sequence
taataattttgccaatattgccaag

SEQ ID NO: 299317 - DNA, 25 bp, Probe Sequence
taatgaaatttctgacattgtcata

SEQ ID NO: 299318 - DNA, 25 bp, Probe Sequence
taataaatttcttgttttcattctt

SEQ ID NO: 299319 - DNA, 25 bp, Probe Sequence
taattagaaacttgctgtacttttt

SEQ ID NO: 299320 - DNA, 25 bp, Probe Sequence
taattaacattccctgtgacctagt

SEQ ID NO: 299321 - DNA, 25 bp, Probe Sequence
taatatgtaattacctgtagtttat

SEQ ID NO: 299322 - DNA, 25 bp, Probe Sequence
taattgcgcaatattcaccgtatat

SEQ ID NO: 299323 - DNA, 25 bp, Probe Sequence
taattggcagatgcccactgccttc

SEQ ID NO: 299324 - DNA, 25 bp, Probe Sequence
taattgcagaatccactttgcctgt

SEQ ID NO: 299325 - DNA, 25 bp, Probe Sequence
taatgtgcagtatataatagttgat

SEQ ID NO: 299326 - DNA, 25 bp, Probe Sequence
taattagctacattgatttatcagt

SEQ ID NO: 299327 - DNA, 25 bp, Probe Sequence
taattatcgaatccagtgttctgtc

SEQ ID NO: 299328 - DNA, 25 bp, Probe Sequence
taattatgcagaataagctctttat

SEQ ID NO: 299329 - DNA, 25 bp, Probe Sequence
taatttacattaatgctctttttta

SEQ ID NO: 299330 - DNA, 25 bp, Probe Sequence
tcaatgttgaattttttctttatta

SEQ ID NO: 299331 - DNA, 25 bp, Probe Sequence
taatatgtatactatctttttatct

SEQ ID NO: 299332 - DNA, 25 bp, Probe Sequence
taatctattctctagcttaggtatc

SEQ ID NO: 299333 - DNA, 25 bp, Probe Sequence
taatctattgattcacattttgttg

SEQ ID NO: 299334 - DNA, 25 bp, Probe Sequence
taatctgagccttgcagactttcat

SEQ ID NO: 299335 - DNA, 25 bp, Probe Sequence
taatgtgcatgactggagactggtt

SEQ ID NO: 299336 - DNA, 25 bp, Probe Sequence
taatggacagctggatctcatcgta

SEQ ID NO: 299337 - DNA, 25 bp, Probe Sequence
taatagagctgggatgacatcttca

SEQ ID NO: 299338 - DNA, 25 bp, Probe Sequence
tcaatgagctgtcgggcatacctcc

SEQ ID NO: 299339 - DNA, 25 bp, Probe Sequence
taatgatctgtcgatcgttcaccct

SEQ ID NO: 299340 - DNA, 25 bp, Probe Sequence
taatgacattgcgacagtctgcata

SEQ ID NO: 299341 - DNA, 25 bp, Probe Sequence
taatgatattgagaagcctagcttc

SEQ ID NO: 299342 - DNA, 25 bp, Probe Sequence
tcaatttctgaacaccataggtaga

SEQ ID NO: 299343 - DNA, 25 bp, Probe Sequence
tcaattactgtacaactactgtata

SEQ ID NO: 299344 - DNA, 25 bp, Probe Sequence
tcaattaccttagcagcaactgttt

SEQ ID NO: 299345 - DNA, 25 bp, Probe Sequence
taatctaccatttcctacactattt

SEQ ID NO: 299346 - DNA, 25 bp, Probe Sequence
taattactagaagatctgcactatt

SEQ ID NO: 299347 - DNA, 25 bp, Probe Sequence
taattaccatcagagcatcagccta

SEQ ID NO: 299348 - DNA, 25 bp, Probe Sequence
taattttgcacagacatctcctcac

SEQ ID NO: 299349 - DNA, 25 bp, Probe Sequence
taattttgccaatattgccaagttt

SEQ ID NO: 299350 - DNA, 25 bp, Probe Sequence
taattgttccgaatttctccacttt

SEQ ID NO: 299351 - DNA, 25 bp, Probe Sequence
taattgaatcctattttaatctttt

SEQ ID NO: 299352 - DNA, 25 bp, Probe Sequence
taatagatatgactttgcttccaac

SEQ ID NO: 299353 - DNA, 25 bp, Probe Sequence
taatgatgtcaccatttctacctgc

SEQ ID NO: 299354 - DNA, 25 bp, Probe Sequence
taatggtcacgaggtccagacccac

SEQ ID NO: 299355 - DNA, 25 bp, Probe Sequence
taatggcccatgggagccaggccca

SEQ ID NO: 299356 - DNA, 25 bp, Probe Sequence
taaggcccactggagggcgctcatc

SEQ ID NO: 299357 - DNA, 25 bp, Probe Sequence
taagtgcctccctagaggactccat

SEQ ID NO: 299358 - DNA, 25 bp, Probe Sequence
taaggcttacctacatggaccagtt

SEQ ID NO: 299359 - DNA, 25 bp, Probe Sequence
taatgagttcactttcaggcaccgt

SEQ ID NO: 299360 - DNA, 25 bp, Probe Sequence
taatcgatatgtcttcagtgcctag

SEQ ID NO: 299361 - DNA, 25 bp, Probe Sequence
taatactttcttccagtgcctgaaa

SEQ ID NO: 299362 - DNA, 25 bp, Probe Sequence
tcaatattgtgtgtcctggcttaac

SEQ ID NO: 299363 - DNA, 25 bp, Probe Sequence
taatatctggtatcctggcacaata

SEQ ID NO: 299364 - DNA, 25 bp, Probe Sequence
tcaatatgggtatcacagtgtctta

SEQ ID NO: 299365 - DNA, 25 bp, Probe Sequence
taatctctggcttacaagtccttaa

SEQ ID NO: 299366 - DNA, 25 bp, Probe Sequence
taattcttcacctaagtctctgtga

SEQ ID NO: 299367 - DNA, 25 bp, Probe Sequence
taattctaacgcttaaatcatgtga

SEQ ID NO: 299368 - DNA, 25 bp, Probe Sequence
taattctaaccagagcaagcttttt

SEQ ID NO: 299369 - DNA, 25 bp, Probe Sequence
taagtcttaccctgtaatttttgct

SEQ ID NO: 299370 - DNA, 25 bp, Probe Sequence
taagtcttaccctgtaatttttgct

SEQ ID NO: 299371 - DNA, 25 bp, Probe Sequence
taagctttactgctttagtttcttc

SEQ ID NO: 299372 - DNA, 25 bp, Probe Sequence
tcaatttgaacccatttgaggttct

SEQ ID NO: 299373 - DNA, 25 bp, Probe Sequence
tcaatctgtgaagcctttatctatg

SEQ ID NO: 299374 - DNA, 25 bp, Probe Sequence
taattgccaagtgctttctgtgagt

SEQ ID NO: 299375 - DNA, 25 bp, Probe Sequence
taatgcatggtactatgcctccgtg

SEQ ID NO: 299376 - DNA, 25 bp, Probe Sequence
taatgtggtacttcgctcatcaggc

SEQ ID NO: 299377 - DNA, 25 bp, Probe Sequence
taatgaagtactaagcagctacgaa

SEQ ID NO: 299378 - DNA, 25 bp, Probe Sequence
taatacagatactacgctgatacta

SEQ ID NO: 299379 - DNA, 25 bp, Probe Sequence
taatgctcagatttagtgtctacat

SEQ ID NO: 299380 - DNA, 25 bp, Probe Sequence
taagtgcagcatttttgcatctgac

SEQ ID NO: 299381 - DNA, 25 bp, Probe Sequence
taagtacgtatgttcatctacagta

SEQ ID NO: 299382 - DNA, 25 bp, Probe Sequence
taagtcacaggcaggacccagtttc

SEQ ID NO: 299383 - DNA, 25 bp, Probe Sequence
taagtagggttgccagcctggtttc

SEQ ID NO: 299384 - DNA, 25 bp, Probe Sequence
taatttgggttgtctgtcttgtctt

SEQ ID NO: 299385 - DNA, 25 bp, Probe Sequence
taagttgtggtagtttagtgatttt

SEQ ID NO: 299386 - DNA, 25 bp, Probe Sequence
taatgtgtatgcctattttattttt

SEQ ID NO: 299387 - DNA, 25 bp, Probe Sequence
taatttagctcggttctcttgttgg

SEQ ID NO: 299388 - DNA, 25 bp, Probe Sequence
taatttctcacctattttgtgtgtg

SEQ ID NO: 299389 - DNA, 25 bp, Probe Sequence
taatctttagcctattttgagtcta

SEQ ID NO: 299390 - DNA, 25 bp, Probe Sequence
taattttatgctttccctgattcca

SEQ ID NO: 299391 - DNA, 25 bp, Probe Sequence
taatttatgttactccttgatcttt

SEQ ID NO: 299392 - DNA, 25 bp, Probe Sequence
taatttacttgtacaattcattgtt

SEQ ID NO: 299393 - DNA, 25 bp, Probe Sequence
taatttctctctcatgcaaacctgt

SEQ ID NO: 299394 - DNA, 25 bp, Probe Sequence
tcaattgtcctcccaggatactgtg

SEQ ID NO: 299395 - DNA, 25 bp, Probe Sequence
taatagtgcctcatagtctacttag

SEQ ID NO: 299396 - DNA, 25 bp, Probe Sequence
taaactggcttactatagacttcgt

SEQ ID NO: 299397 - DNA, 25 bp, Probe Sequence
taaagcggctgctcgaacagattgc

SEQ ID NO: 299398 - DNA, 25 bp, Probe Sequence
taacagccttgccacgaacagttga

SEQ ID NO: 299399 - DNA, 25 bp, Probe Sequence
taattgtcagattcaccaaagttga

SEQ ID NO: 299400 - DNA, 25 bp, Probe Sequence
tagcattgtgctaacagtaaaagta

SEQ ID NO: 299401 - DNA, 25 bp, Probe Sequence
taatatgtttaggcttataagttaa

SEQ ID NO: 299402 - DNA, 25 bp, Probe Sequence
taattttccaacataatggattaat

SEQ ID NO: 299403 - DNA, 25 bp, Probe Sequence
taattgtttaaaatctctggcttca

SEQ ID NO: 299404 - DNA, 25 bp, Probe Sequence
taatctgttttataccttgcttatt

SEQ ID NO: 299405 - DNA, 25 bp, Probe Sequence
taattattgttatacacagctttat

SEQ ID NO: 299406 - DNA, 25 bp, Probe Sequence
taatgtatttgttgcttccctttat

SEQ ID NO: 299407 - DNA, 25 bp, Probe Sequence
taatcataattttttccttatttat

SEQ ID NO: 299408 - DNA, 25 bp, Probe Sequence
taataaactgttatctcctgttctt

SEQ ID NO: 299409 - DNA, 25 bp, Probe Sequence
taatcagttgttatctccctggtct

SEQ ID NO: 299410 - DNA, 25 bp, Probe Sequence
taagtgttttaactccctgaactat

SEQ ID NO: 299411 - DNA, 25 bp, Probe Sequence
taatttagttacattcttaaacaat

SEQ ID NO: 299412 - DNA, 25 bp, Probe Sequence
taatttctgcaatcattttttaaaa

SEQ ID NO: 299413 - DNA, 25 bp, Probe Sequence
taatttcatgcaatactatttaata

SEQ ID NO: 299414 - DNA, 25 bp, Probe Sequence
taatttcaactagatcaagacatgt

SEQ ID NO: 299415 - DNA, 25 bp, Probe Sequence
taagttcaggtagaaacatcatttc

SEQ ID NO: 299416 - DNA, 25 bp, Probe Sequence
taatttcggtggaccaactattcct

SEQ ID NO: 299417 - DNA, 25 bp, Probe Sequence
tacaggtgggggaaacctatccaat

SEQ ID NO: 299418 - DNA, 25 bp, Probe Sequence
taagttggggacttcactttccctg

SEQ ID NO: 299419 - DNA, 25 bp, Probe Sequence
taaccatggggatcgcttttggcca

SEQ ID NO: 299420 - DNA, 25 bp, Probe Sequence
taaacatgagggagcgtgggtagcc

SEQ ID NO: 299421 - DNA, 25 bp, Probe Sequence
taaacaggagttcagcggagtagca

SEQ ID NO: 299422 - DNA, 25 bp, Probe Sequence
taatgaataacctggctgggctgaa

SEQ ID NO: 299423 - DNA, 25 bp, Probe Sequence
taatgaaacaccttctctggagcca

SEQ ID NO: 299424 - DNA, 25 bp, Probe Sequence
taagcaaaagcgtcccaggagccgt

SEQ ID NO: 299425 - DNA, 25 bp, Probe Sequence
taataaatggtgtctctagtgagca

SEQ ID NO: 299426 - DNA, 25 bp, Probe Sequence
taatacctgtgccattctcaataag

SEQ ID NO: 299427 - DNA, 25 bp, Probe Sequence
taatatgcactggcagctttgtaaa

SEQ ID NO: 299428 - DNA, 25 bp, Probe Sequence
taattaccgcgcattgagtagacca

SEQ ID NO: 299429 - DNA, 25 bp, Probe Sequence
taggtgacccctatagaacccagtt

SEQ ID NO: 299430 - DNA, 25 bp, Probe Sequence
taatgaaacgctgttcagaaaccag

SEQ ID NO: 299431 - DNA, 25 bp, Probe Sequence
taatagccatcctcttcacaatata

SEQ ID NO: 299432 - DNA, 25 bp, Probe Sequence
taatcagatacctgctgtcaccaca

SEQ ID NO: 299433 - DNA, 25 bp, Probe Sequence
taagcagttctactcgatcaccaag

SEQ ID NO: 299434 - DNA, 25 bp, Probe Sequence
taagtgatctcgttatgcacctcaa

SEQ ID NO: 299435 - DNA, 25 bp, Probe Sequence
taagggcatcgtcgtgggcatcaag

SEQ ID NO: 299436 - DNA, 25 bp, Probe Sequence
taaggaggactcttgaggctcataa

SEQ ID NO: 299437 - DNA, 25 bp, Probe Sequence
taaggaggactaccatcctgcaact

SEQ ID NO: 299438 - DNA, 25 bp, Probe Sequence
taaggattatgctggcatccccttt

SEQ ID NO: 299439 - DNA, 25 bp, Probe Sequence
taatggtatcactgttgacccttgt

SEQ ID NO: 299440 - DNA, 25 bp, Probe Sequence
taatgagtactgggtgctgacggct

SEQ ID NO: 299441 - DNA, 25 bp, Probe Sequence
taagatgtaatgagtgctctctgag

SEQ ID NO: 299442 - DNA, 25 bp, Probe Sequence
taatatgtaatcatgtgtcaggaca

SEQ ID NO: 299443 - DNA, 25 bp, Probe Sequence
taatatgtgacttttgtcttgaaaa

SEQ ID NO: 299444 - DNA, 25 bp, Probe Sequence
taattatgactgatttcttatagga

SEQ ID NO: 299445 - DNA, 25 bp, Probe Sequence
taatcctgaggttttcaattatgga

SEQ ID NO: 299446 - DNA, 25 bp, Probe Sequence
taatcctgggagtctttgtttgcaa

SEQ ID NO: 299447 - DNA, 25 bp, Probe Sequence
taatcaggggtgtctttcttgtgca

SEQ ID NO: 299448 - DNA, 25 bp, Probe Sequence
taaaggggggtctctgcagtgtaag

SEQ ID NO: 299449 - DNA, 25 bp, Probe Sequence
taaaggaggggcagggagggcgcag

SEQ ID NO: 299450 - DNA, 25 bp, Probe Sequence
taacagggtcggtggtgagggctgg

SEQ ID NO: 299451 - DNA, 25 bp, Probe Sequence
taccagtttgggtggggggtgatca

SEQ ID NO: 299452 - DNA, 25 bp, Probe Sequence
taaccccaggggaggtgagggatca

SEQ ID NO: 299453 - DNA, 25 bp, Probe Sequence
taatctcctcggtgtgggtggtggt

SEQ ID NO: 299454 - DNA, 25 bp, Probe Sequence
taatggccgctggggggtgagggcg

SEQ ID NO: 299455 - DNA, 25 bp, Probe Sequence
taagtgccttgcggtcagggactga

SEQ ID NO: 299456 - DNA, 25 bp, Probe Sequence
taagtgacttgctgtacgtgatata

SEQ ID NO: 299457 - DNA, 25 bp, Probe Sequence
taaggtctctgatgccactggacag

SEQ ID NO: 299458 - DNA, 25 bp, Probe Sequence
taagtgtcctaagtcagtggttccc

SEQ ID NO: 299459 - DNA, 25 bp, Probe Sequence
taaggattgccatgtcagtccttca

SEQ ID NO: 299460 - DNA, 25 bp, Probe Sequence
taaggtgtgactctgctgaccttcg

SEQ ID NO: 299461 - DNA, 25 bp, Probe Sequence
taaggatgtgttctctgagacccat

SEQ ID NO: 299462 - DNA, 25 bp, Probe Sequence
taaggagtgttttgtaggattcaac

SEQ ID NO: 299463 - DNA, 25 bp, Probe Sequence
taaggagtttttattgtgtaatcac

SEQ ID NO: 299464 - DNA, 25 bp, Probe Sequence
taagggattccctaatatgtatact

SEQ ID NO: 299465 - DNA, 25 bp, Probe Sequence
taaggccttggccacaattctttct

SEQ ID NO: 299466 - DNA, 25 bp, Probe Sequence
tacggctttggtcgcacagtgtacc

SEQ ID NO: 299467 - DNA, 25 bp, Probe Sequence
taagagtttgttcccgtggtgcgga

SEQ ID NO: 299468 - DNA, 25 bp, Probe Sequence
taatggtgttgtggcctcagatttc

SEQ ID NO: 299469 - DNA, 25 bp, Probe Sequence
taagaggctttggcccaactgcctc

SEQ ID NO: 299470 - DNA, 25 bp, Probe Sequence
taagtggattacccaaacaccgcgt

SEQ ID NO: 299471 - DNA, 25 bp, Probe Sequence
taagtgttctacaactaatgagacc

SEQ ID NO: 299472 - DNA, 25 bp, Probe Sequence
taaggactgaagccactacatacct

SEQ ID NO: 299473 - DNA, 25 bp, Probe Sequence
taaggacatgacaccaactattagg

SEQ ID NO: 299474 - DNA, 25 bp, Probe Sequence
taaggatcgtattccctgctttaag

SEQ ID NO: 299475 - DNA, 25 bp, Probe Sequence
taaaccactattccatgcttttaag

SEQ ID NO: 299476 - DNA, 25 bp, Probe Sequence
taataccattattacctctttgaaa

SEQ ID NO: 299477 - DNA, 25 bp, Probe Sequence
taataaatttattattcctgtggaa

SEQ ID NO: 299478 - DNA, 25 bp, Probe Sequence
taataaagttatgcattcagttaaa

SEQ ID NO: 299479 - DNA, 25 bp, Probe Sequence
taataacgtgtagccatttctggaa

SEQ ID NO: 299480 - DNA, 25 bp, Probe Sequence
taattaacttacccttatctgccaa

SEQ ID NO: 299481 - DNA, 25 bp, Probe Sequence
ttcagtaaagtctcgttacgccaaa

SEQ ID NO: 299482 - DNA, 25 bp, Probe Sequence
taattacctaacagcagttctttgc

SEQ ID NO: 299483 - DNA, 25 bp, Probe Sequence
taagttcctacctgactatgctttc

SEQ ID NO: 299484 - DNA, 25 bp, Probe Sequence
taagttcacagtgtttcttattccc

SEQ ID NO: 299485 - DNA, 25 bp, Probe Sequence
taatgattgcgatttttgccattga

SEQ ID NO: 299486 - DNA, 25 bp, Probe Sequence
taatttgctatgtttcttgcattat

SEQ ID NO: 299487 - DNA, 25 bp, Probe Sequence
taattctgccatggtcctagattgt

SEQ ID NO: 299488 - DNA, 25 bp, Probe Sequence
taattctcaacgactgctctatttt

SEQ ID NO: 299489 - DNA, 25 bp, Probe Sequence
taattgcagaactaaactcatttat

SEQ ID NO: 299490 - DNA, 25 bp, Probe Sequence
taagtggcaattccatacatatttt

SEQ ID NO: 299491 - DNA, 25 bp, Probe Sequence
taatgattcaatgcgagacaagatt

SEQ ID NO: 299492 - DNA, 25 bp, Probe Sequence
taatcttcagctgaacacaagcaaa

SEQ ID NO: 299493 - DNA, 25 bp, Probe Sequence
taatctccaggggcaccattgaaat

SEQ ID NO: 299494 - DNA, 25 bp, Probe Sequence
taatggagcggggcgccagtgaatt

SEQ ID NO: 299495 - DNA, 25 bp, Probe Sequence
taatgggtgggggatccgatcatgg

SEQ ID NO: 299496 - DNA, 25 bp, Probe Sequence
taatggcgggagggaacaccggctt

SEQ ID NO: 299497 - DNA, 25 bp, Probe Sequence
tactgtgcagggaaccaaaccaagg

SEQ ID NO: 299498 - DNA, 25 bp, Probe Sequence
taatggcaaggtcctcacaactgaa

SEQ ID NO: 299499 - DNA, 25 bp, Probe Sequence
taatgaaatggcccacagaacctat

SEQ ID NO: 299500 - DNA, 25 bp, Probe Sequence
taatgtaatcgctcaagcctgatct

SEQ ID NO: 299501 - DNA, 25 bp, Probe Sequence
taattaaccaccaatccaacatcca

SEQ ID NO: 299502 - DNA, 25 bp, Probe Sequence
taattaattaccaggcatattccaa

SEQ ID NO: 299503 - DNA, 25 bp, Probe Sequence
taatattgtaagcccaggatgttcc

SEQ ID NO: 299504 - DNA, 25 bp, Probe Sequence
taataattaatgcccctctcttaca

SEQ ID NO: 299505 - DNA, 25 bp, Probe Sequence
taataattaatgcccctctcttaca

SEQ ID NO: 299506 - DNA, 25 bp, Probe Sequence
taataatcataatcctttttcagta

SEQ ID NO: 299507 - DNA, 25 bp, Probe Sequence
taataactaaaccagattctttgtg

SEQ ID NO: 299508 - DNA, 25 bp, Probe Sequence
taataagtaaataacttgtctgtaa

SEQ ID NO: 299509 - DNA, 25 bp, Probe Sequence
taatagcctccaggttctttcagta

SEQ ID NO: 299510 - DNA, 25 bp, Probe Sequence
taattttcttggttctttcagctga

SEQ ID NO: 299511 - DNA, 25 bp, Probe Sequence
taatttacttggcattttaggacat

SEQ ID NO: 299512 - DNA, 25 bp, Probe Sequence
taataatacttccaatttttttcat

SEQ ID NO: 299513 - DNA, 25 bp, Probe Sequence
taatcagctcctggatttttttttt

SEQ ID NO: 299514 - DNA, 25 bp, Probe Sequence
taatagctcacagcacatttgttaa

SEQ ID NO: 299515 - DNA, 25 bp, Probe Sequence
taatcaccacccacattgactaatc

SEQ ID NO: 299516 - DNA, 25 bp, Probe Sequence
taataaagctccattgtgcctgcaa

SEQ ID NO: 299517 - DNA, 25 bp, Probe Sequence
taaaaagtagccctggccaggaacg

SEQ ID NO: 299518 - DNA, 25 bp, Probe Sequence
taaggaagtacattctggccaggca

SEQ ID NO: 299519 - DNA, 25 bp, Probe Sequence
taagtaggtactagggctaccaggg

SEQ ID NO: 299520 - DNA, 25 bp, Probe Sequence
tacagtatttcctgggctacaacag

SEQ ID NO: 299521 - DNA, 25 bp, Probe Sequence
taatccattacctggcactagcaac

SEQ ID NO: 299522 - DNA, 25 bp, Probe Sequence
taattattacattttgactaccaca

SEQ ID NO: 299523 - DNA, 25 bp, Probe Sequence
taacttcggacttatactgatccca

SEQ ID NO: 299524 - DNA, 25 bp, Probe Sequence
taatcaacgcccataatcataccaa

SEQ ID NO: 299525 - DNA, 25 bp, Probe Sequence
taatcaaggcttttaacatgaacag

SEQ ID NO: 299526 - DNA, 25 bp, Probe Sequence
taatccaagctttataccagatgaa

SEQ ID NO: 299527 - DNA, 25 bp, Probe Sequence
tacccaagatggatatcacagagga

SEQ ID NO: 299528 - DNA, 25 bp, Probe Sequence
taatccaaagcctttcagcaaagaa

SEQ ID NO: 299529 - DNA, 25 bp, Probe Sequence
taatccatattggcagaacgaaaac

SEQ ID NO: 299530 - DNA, 25 bp, Probe Sequence
taatcaatttccctctagacaacac

SEQ ID NO: 299531 - DNA, 25 bp, Probe Sequence
taatacttttcccgaaacacacatt

SEQ ID NO: 299532 - DNA, 25 bp, Probe Sequence
taatccttttatcaaaacactgtat

SEQ ID NO: 299533 - DNA, 25 bp, Probe Sequence
taaccttgtattctacaagcttgct

SEQ ID NO: 299534 - DNA, 25 bp, Probe Sequence
taatcgttgtaaactaacagcttaa

SEQ ID NO: 299535 - DNA, 25 bp, Probe Sequence
taatcagcttaaaatccaaagtgtc

SEQ ID NO: 299536 - DNA, 25 bp, Probe Sequence
tacaccctaactaccaccaggtaga

SEQ ID NO: 299537 - DNA, 25 bp, Probe Sequence
taagcctttaaaaacggctgtcagg

SEQ ID NO: 299538 - DNA, 25 bp, Probe Sequence
taagcctctctgttgaaacggtcca

SEQ ID NO: 299539 - DNA, 25 bp, Probe Sequence
taagctgctctgaggtaaaggtcca

SEQ ID NO: 299540 - DNA, 25 bp, Probe Sequence
taagagtctagtggttccagggccc

SEQ ID NO: 299541 - DNA, 25 bp, Probe Sequence
taatgtatctagtgtgtcctgtgac

SEQ ID NO: 299542 - DNA, 25 bp, Probe Sequence
taatgttgataacagtgcttggcac

SEQ ID NO: 299543 - DNA, 25 bp, Probe Sequence
taatgttaaacagtggctgcaggaa

SEQ ID NO: 299544 - DNA, 25 bp, Probe Sequence
taatcatctgcaaccatgtgtgtcc

SEQ ID NO: 299545 - DNA, 25 bp, Probe Sequence
tacatctgtgcaccacggtgctcct

SEQ ID NO: 299546 - DNA, 25 bp, Probe Sequence
taatgatgatgactccgcaagccct

SEQ ID NO: 299547 - DNA, 25 bp, Probe Sequence
taatggagatgtctggacccttcct

SEQ ID NO: 299548 - DNA, 25 bp, Probe Sequence
taagctgggtttgactgcgaccctc

SEQ ID NO: 299549 - DNA, 25 bp, Probe Sequence
taagttggtcaagttggggcctgct

SEQ ID NO: 299550 - DNA, 25 bp, Probe Sequence
taagtgggatagaggatgaggtgga

SEQ ID NO: 299551 - DNA, 25 bp, Probe Sequence
taaggttgaagatggctggaatgca

SEQ ID NO: 299552 - DNA, 25 bp, Probe Sequence
taatagtgtacagttggggagtaca

SEQ ID NO: 299553 - DNA, 25 bp, Probe Sequence
taatctcttgttatgcagggagtac

SEQ ID NO: 299554 - DNA, 25 bp, Probe Sequence
taatttctcttttccagcaagtacc

SEQ ID NO: 299555 - DNA, 25 bp, Probe Sequence
taatttctgtgattatcgccaataa

SEQ ID NO: 299556 - DNA, 25 bp, Probe Sequence
taatttgtgtattagctacatcatc

SEQ ID NO: 299557 - DNA, 25 bp, Probe Sequence
taattattgctgagacctccactgg

SEQ ID NO: 299558 - DNA, 25 bp, Probe Sequence
taattatgcgaatgtttccctgtcc

SEQ ID NO: 299559 - DNA, 25 bp, Probe Sequence
tattagtcataaaacaccatcatta

SEQ ID NO: 299560 - DNA, 25 bp, Probe Sequence
taaggagagtaaaccccaagcaggc

SEQ ID NO: 299561 - DNA, 25 bp, Probe Sequence
taatggtaataaaccccaagcgtat

SEQ ID NO: 299562 - DNA, 25 bp, Probe Sequence
taatggacaagtcaagccgcacacg

SEQ ID NO: 299563 - DNA, 25 bp, Probe Sequence
taatagacaagtgtaatctcaccat

SEQ ID NO: 299564 - DNA, 25 bp, Probe Sequence
tacaaaaatcccaaattcactttat

SEQ ID NO: 299565 - DNA, 25 bp, Probe Sequence
taaaaattcccagataatgtttact

SEQ ID NO: 299566 - DNA, 25 bp, Probe Sequence
taaaaattccacattgaagttgtgt

SEQ ID NO: 299567 - DNA, 25 bp, Probe Sequence
taaggacatatctacgttgaatgta

SEQ ID NO: 299568 - DNA, 25 bp, Probe Sequence
taatgatgccaatgggtggaatgat

SEQ ID NO: 299569 - DNA, 25 bp, Probe Sequence
taatggccaattaactgagaatgta

SEQ ID NO: 299570 - DNA, 25 bp, Probe Sequence
taatttattctaacaatgatcttga

SEQ ID NO: 299571 - DNA, 25 bp, Probe Sequence
taatgacttttacctatatgctgtg

SEQ ID NO: 299572 - DNA, 25 bp, Probe Sequence
taatacagtttcctgctatctgccg

SEQ ID NO: 299573 - DNA, 25 bp, Probe Sequence
taatcacagttccctgttatacaga

SEQ ID NO: 299574 - DNA, 25 bp, Probe Sequence
taatcatatttgtgctttcaaaaga

SEQ ID NO: 299575 - DNA, 25 bp, Probe Sequence
taagctgctttgtgtttcaagagaa

SEQ ID NO: 299576 - DNA, 25 bp, Probe Sequence
taagctctgtgtctagtgtagaaca

SEQ ID NO: 299577 - DNA, 25 bp, Probe Sequence
taagccattagttaggcaagtcaat

SEQ ID NO: 299578 - DNA, 25 bp, Probe Sequence
taagtctttaaaccaagccgttatg

SEQ ID NO: 299579 - DNA, 25 bp, Probe Sequence
taagtgtagtaatgaaagccagtat

SEQ ID NO: 299580 - DNA, 25 bp, Probe Sequence
tagacttcgtaaaaatggctccaga

SEQ ID NO: 299581 - DNA, 25 bp, Probe Sequence
taatgttcgtataaaatcaccacaa

SEQ ID NO: 299582 - DNA, 25 bp, Probe Sequence
taatgttcgtttatgatcttagcaa

SEQ ID NO: 299583 - DNA, 25 bp, Probe Sequence
taagttcagttattagtctgtgaag

SEQ ID NO: 299584 - DNA, 25 bp, Probe Sequence
taagcccagttataacctatgttat

SEQ ID NO: 299585 - DNA, 25 bp, Probe Sequence
taagcccagcttagagatggccata

SEQ ID NO: 299586 - DNA, 25 bp, Probe Sequence
taaggccacagaatgcggcctagca

SEQ ID NO: 299587 - DNA, 25 bp, Probe Sequence
taagcccaagcatcatggtctcagc

SEQ ID NO: 299588 - DNA, 25 bp, Probe Sequence
taaccgcaatagtgactctgtgctt

SEQ ID NO: 299589 - DNA, 25 bp, Probe Sequence
taaccctcaggcaaacctgtgttcc

SEQ ID NO: 299590 - DNA, 25 bp, Probe Sequence
taaccctcaggcaaacctgtgttcc

SEQ ID NO: 299591 - DNA, 25 bp, Probe Sequence
taaccctcaggcaaacctgtgttcc

SEQ ID NO: 299592 - DNA, 25 bp, Probe Sequence
taaccgtggcgaaagtcttgttaat

SEQ ID NO: 299593 - DNA, 25 bp, Probe Sequence
taaccttgcggaaccagcttatgaa

SEQ ID NO: 299594 - DNA, 25 bp, Probe Sequence
taatatttcagtgccccttgcagaa

SEQ ID NO: 299595 - DNA, 25 bp, Probe Sequence
taatgtttaccagcccatcacaaca

SEQ ID NO: 299596 - DNA, 25 bp, Probe Sequence
taatgttttgaggaccctccatact

SEQ ID NO: 299597 - DNA, 25 bp, Probe Sequence
tacagtttagggtcctagcgcagag

SEQ ID NO: 299598 - DNA, 25 bp, Probe Sequence
taatgtgtctaattgtgcctagcca

SEQ ID NO: 299599 - DNA, 25 bp, Probe Sequence
taatatgtccaacctgcttgtgctc

SEQ ID NO: 299600 - DNA, 25 bp, Probe Sequence
taagcatgtttacctgttggcttgc

SEQ ID NO: 299601 - DNA, 25 bp, Probe Sequence
taagcattgttgttctgttttgagg

SEQ ID NO: 299602 - DNA, 25 bp, Probe Sequence
taagatctctaatctgttttgagtc

SEQ ID NO: 299603 - DNA, 25 bp, Probe Sequence
taagatcttggttccttttcaacct

SEQ ID NO: 299604 - DNA, 25 bp, Probe Sequence
taaggcttttgtgtatttaatccta

SEQ ID NO: 299605 - DNA, 25 bp, Probe Sequence
taaggctcttgtatcttttactttc

SEQ ID NO: 299606 - DNA, 25 bp, Probe Sequence
taatttctctgtaggttgtaacttt

SEQ ID NO: 299607 - DNA, 25 bp, Probe Sequence
tacaccgttaggattgtacctttca

SEQ ID NO: 299608 - DNA, 25 bp, Probe Sequence
taaactttagagagatggccttttc

SEQ ID NO: 299609 - DNA, 25 bp, Probe Sequence
taatgactttacaaagctggcaata

SEQ ID NO: 299610 - DNA, 25 bp, Probe Sequence
taatgagctattaaaactcagcctg

SEQ ID NO: 299611 - DNA, 25 bp, Probe Sequence
taatgactggtttagtctgcagtct

SEQ ID NO: 299612 - DNA, 25 bp, Probe Sequence
taagactgtggtttctatgagcccc

SEQ ID NO: 299613 - DNA, 25 bp, Probe Sequence
taagacagggaattgggagccatca

SEQ ID NO: 299614 - DNA, 25 bp, Probe Sequence
taaggcaagggggctgcgagcctgc

SEQ ID NO: 299615 - DNA, 25 bp, Probe Sequence
taaggcaagggggctgcgagcctgc

SEQ ID NO: 299616 - DNA, 25 bp, Probe Sequence
taaggagcagggtcctggtcctaaa

SEQ ID NO: 299617 - DNA, 25 bp, Probe Sequence
taagcggcgagtccaaggggctaag

SEQ ID NO: 299618 - DNA, 25 bp, Probe Sequence
taatcaatgccacccaagggcacca

SEQ ID NO: 299619 - DNA, 25 bp, Probe Sequence
taatcaatgccaaaagtgtgaacaa

SEQ ID NO: 299620 - DNA, 25 bp, Probe Sequence
taatctcagccaaacctgctgcttg

SEQ ID NO: 299621 - DNA, 25 bp, Probe Sequence
taatgtatctgaaacctcatcttgg

SEQ ID NO: 299622 - DNA, 25 bp, Probe Sequence
taatgttctatatagcctttgctaa

SEQ ID NO: 299623 - DNA, 25 bp, Probe Sequence
taatgtggcataaaccctgtctcta

SEQ ID NO: 299624 - DNA, 25 bp, Probe Sequence
taagatggaagctgctggcttcact

SEQ ID NO: 299625 - DNA, 25 bp, Probe Sequence
ttagtggaacccggttcagatcgcc

SEQ ID NO: 299626 - DNA, 25 bp, Probe Sequence
taaatggaaccctggtggtccacca

SEQ ID NO: 299627 - DNA, 25 bp, Probe Sequence
taaaatgaaacctcgttggcctctt

SEQ ID NO: 299628 - DNA, 25 bp, Probe Sequence
tagaaataatctgtaggttgggcac

SEQ ID NO: 299629 - DNA, 25 bp, Probe Sequence
tagactagaattaaaggtatggggt

SEQ ID NO: 299630 - DNA, 25 bp, Probe Sequence
taacaagaattaagcagagttgggc

SEQ ID NO: 299631 - DNA, 25 bp, Probe Sequence
taactaaagttactggcttggtctt

SEQ ID NO: 299632 - DNA, 25 bp, Probe Sequence
taagtactaaattgggcagggcttt

SEQ ID NO: 299633 - DNA, 25 bp, Probe Sequence
taatgtaaccatttggggtccgctt

SEQ ID NO: 299634 - DNA, 25 bp, Probe Sequence
taatcttagcaaaagggaggccgag

SEQ ID NO: 299635 - DNA, 25 bp, Probe Sequence
taatcccagcactttgggaggccga

SEQ ID NO: 299636 - DNA, 25 bp, Probe Sequence
taatcccagcattttgggaggccaa

SEQ ID NO: 299637 - DNA, 25 bp, Probe Sequence
taatctgactaattttgggactgaa

SEQ ID NO: 299638 - DNA, 25 bp, Probe Sequence
taacaggcaaaaattgggaacaact

SEQ ID NO: 299639 - DNA, 25 bp, Probe Sequence
taatatggcatttaagaggtgaaag

SEQ ID NO: 299640 - DNA, 25 bp, Probe Sequence
taatcagagtcttaaaggatcccag

SEQ ID NO: 299641 - DNA, 25 bp, Probe Sequence
tacatagaggctcaaagtgaaggga

SEQ ID NO: 299642 - DNA, 25 bp, Probe Sequence
taagcataggtggtaaataaaggaa

SEQ ID NO: 299643 - DNA, 25 bp, Probe Sequence
taagtctccgagttggaaaaggaag

SEQ ID NO: 299644 - DNA, 25 bp, Probe Sequence
taacctccggtttgtggacaggcaa

SEQ ID NO: 299645 - DNA, 25 bp, Probe Sequence
tacatcccctgactaagggaaacca

SEQ ID NO: 299646 - DNA, 25 bp, Probe Sequence
taaattcttttgatggcgagaacca

SEQ ID NO: 299647 - DNA, 25 bp, Probe Sequence
taagattttgtgcttcccaatcact

SEQ ID NO: 299648 - DNA, 25 bp, Probe Sequence
taagtttggtgcgaacgccattctg

SEQ ID NO: 299649 - DNA, 25 bp, Probe Sequence
tacaggtctggaaccaccgagtgct

SEQ ID NO: 299650 - DNA, 25 bp, Probe Sequence
taaggactggaacaaggagcgggaa

SEQ ID NO: 299651 - DNA, 25 bp, Probe Sequence
taggggtaatagtacaggcgtggtg

SEQ ID NO: 299652 - DNA, 25 bp, Probe Sequence
tatagggaaaagcacggttggtact

SEQ ID NO: 299653 - DNA, 25 bp, Probe Sequence
taagactaaaagcacaggttgtgga

SEQ ID NO: 299654 - DNA, 25 bp, Probe Sequence
taaattcaccaggtaaggtttcagt

SEQ ID NO: 299655 - DNA, 25 bp, Probe Sequence
ttctgaacagtatttaaggtttcca

SEQ ID NO: 299656 - DNA, 25 bp, Probe Sequence
taagtacttatttattggctttcca

SEQ ID NO: 299657 - DNA, 25 bp, Probe Sequence
taatctcttattatagtggtttata

SEQ ID NO: 299658 - DNA, 25 bp, Probe Sequence
taacgttttaaaggtgattgtcaag

SEQ ID NO: 299659 - DNA, 25 bp, Probe Sequence
taacccttctgataggtagttgtgg

SEQ ID NO: 299660 - DNA, 25 bp, Probe Sequence
taaccagcccccagggatgattgtg

SEQ ID NO: 299661 - DNA, 25 bp, Probe Sequence
taaccagactccttacaagtgggtc

SEQ ID NO: 299662 - DNA, 25 bp, Probe Sequence
taactcagaccccaactggtggaaa

SEQ ID NO: 299663 - DNA, 25 bp, Probe Sequence
taatctctacctttcaatggggcta

SEQ ID NO: 299664 - DNA, 25 bp, Probe Sequence
taatcccacctactcaggaggctga

SEQ ID NO: 299665 - DNA, 25 bp, Probe Sequence
taatcccagcactttcggaggctga

SEQ ID NO: 299666 - DNA, 25 bp, Probe Sequence
taatcccagctactcgggaggctga

SEQ ID NO: 299667 - DNA, 25 bp, Probe Sequence
taatcccagtgaccgccagggagct

SEQ ID NO: 299668 - DNA, 25 bp, Probe Sequence
taatcccagctgctcaggaggctga

SEQ ID NO: 299669 - DNA, 25 bp, Probe Sequence
taatcccagccactccagaggctga

SEQ ID NO: 299670 - DNA, 25 bp, Probe Sequence
taatcccagccactccagaggctga

SEQ ID NO: 299671 - DNA, 25 bp, Probe Sequence
taatgctgacagatccaagacctag

SEQ ID NO: 299672 - DNA, 25 bp, Probe Sequence
taatgctcagaacctaaccactacc

SEQ ID NO: 299673 - DNA, 25 bp, Probe Sequence
taacccaaggtaccatcctaggctg

SEQ ID NO: 299674 - DNA, 25 bp, Probe Sequence
taatacgcaaagccagacccgggcg

SEQ ID NO: 299675 - DNA, 25 bp, Probe Sequence
taatacgcaaagccagacctcggcg

SEQ ID NO: 299676 - DNA, 25 bp, Probe Sequence
tatcaacgcaaacaccttagggtac

SEQ ID NO: 299677 - DNA, 25 bp, Probe Sequence
taatacagagaacacctcgacaggt

SEQ ID NO: 299678 - DNA, 25 bp, Probe Sequence
taatcacagaggtgacatcccatca

SEQ ID NO: 299679 - DNA, 25 bp, Probe Sequence
tatagaagggataaaccgccaggtt

SEQ ID NO: 299680 - DNA, 25 bp, Probe Sequence
taagaatgggtctcactctgccatc

SEQ ID NO: 299681 - DNA, 25 bp, Probe Sequence
taagaatgggccctttgcccagcac

SEQ ID NO: 299682 - DNA, 25 bp, Probe Sequence
taaggctggtgcactgaactccaac

SEQ ID NO: 299683 - DNA, 25 bp, Probe Sequence
taagttctgatcacatgtaatacta

SEQ ID NO: 299684 - DNA, 25 bp, Probe Sequence
taagtacagacaaagcaagtcactg

SEQ ID NO: 299685 - DNA, 25 bp, Probe Sequence
taagtcaagaccatgatgagatgcc

SEQ ID NO: 299686 - DNA, 25 bp, Probe Sequence
taaggcaagccagtcatggaatctt

SEQ ID NO: 299687 - DNA, 25 bp, Probe Sequence
taagtgtactcgacagattatctct

SEQ ID NO: 299688 - DNA, 25 bp, Probe Sequence
taaggaattcgatgatgacacttac

SEQ ID NO: 299689 - DNA, 25 bp, Probe Sequence
taaggcaagtcctgagcgacctaca

SEQ ID NO: 299690 - DNA, 25 bp, Probe Sequence
taaagccctcctggggacttggaat

SEQ ID NO: 299691 - DNA, 25 bp, Probe Sequence
taaagccctcctggggacttggaat

SEQ ID NO: 299692 - DNA, 25 bp, Probe Sequence
taataacttcctgtttcattgtatt

SEQ ID NO: 299693 - DNA, 25 bp, Probe Sequence
taataacatacagttttgtcacttt

SEQ ID NO: 299694 - DNA, 25 bp, Probe Sequence
taatactttgcctttttcactgtgt

SEQ ID NO: 299695 - DNA, 25 bp, Probe Sequence
taatgactaatatgtttacaagtta

SEQ ID NO: 299696 - DNA, 25 bp, Probe Sequence
taaagctccagactgtttaaaatat

SEQ ID NO: 299697 - DNA, 25 bp, Probe Sequence
taatactctagaattgtgtaacatt

SEQ ID NO: 299698 - DNA, 25 bp, Probe Sequence
taatgaggccaatttttccagcatt

SEQ ID NO: 299699 - DNA, 25 bp, Probe Sequence
taagagtgccttattaaagtataga

SEQ ID NO: 299700 - DNA, 25 bp, Probe Sequence
taagatgtacttggatttaattaaa

SEQ ID NO: 299701 - DNA, 25 bp, Probe Sequence
taagcctcacctatttaatccaatg

SEQ ID NO: 299702 - DNA, 25 bp, Probe Sequence
taagcccaactctaggaaatgcaca

SEQ ID NO: 299703 - DNA, 25 bp, Probe Sequence
taactgccaatctataggaatacat

SEQ ID NO: 299704 - DNA, 25 bp, Probe Sequence
taatgtgctacttaccagaatataa

SEQ ID NO: 299705 - DNA, 25 bp, Probe Sequence
taatctctcctatctgagaaatcca

SEQ ID NO: 299706 - DNA, 25 bp, Probe Sequence
taatctctcgctttgttgtcaaaca

SEQ ID NO: 299707 - DNA, 25 bp, Probe Sequence
taatctttgcctggagtgacactac

SEQ ID NO: 299708 - DNA, 25 bp, Probe Sequence
taatctttgtctgagggcagcacac

SEQ ID NO: 299709 - DNA, 25 bp, Probe Sequence
taatctttgtcattctggacgcaca

SEQ ID NO: 299710 - DNA, 25 bp, Probe Sequence
taatcttttgcatcgataccatttt

SEQ ID NO: 299711 - DNA, 25 bp, Probe Sequence
taatcttttgtcaacttcctgatta

SEQ ID NO: 299712 - DNA, 25 bp, Probe Sequence
taatctgttttgagtctttacaaaa

SEQ ID NO: 299713 - DNA, 25 bp, Probe Sequence
taatacttgaccagcttatctaaaa

SEQ ID NO: 299714 - DNA, 25 bp, Probe Sequence
taagacttcaccagtcaaagcgaac

SEQ ID NO: 299715 - DNA, 25 bp, Probe Sequence
taagcacttcatgacccatcaagga

SEQ ID NO: 299716 - DNA, 25 bp, Probe Sequence
taatccttcatgtataacttaggtt

SEQ ID NO: 299717 - DNA, 25 bp, Probe Sequence
taccgctttggtgacctcagcgtga

SEQ ID NO: 299718 - DNA, 25 bp, Probe Sequence
taaccctgggttttccatgctggat

SEQ ID NO: 299719 - DNA, 25 bp, Probe Sequence
taaccattggggccttacactgttt

SEQ ID NO: 299720 - DNA, 25 bp, Probe Sequence
taaccaatgtggccgtggtacggat

SEQ ID NO: 299721 - DNA, 25 bp, Probe Sequence
tacacccgttacttcgtatcgaata

SEQ ID NO: 299722 - DNA, 25 bp, Probe Sequence
taacgggtatgattacagtagcttt

SEQ ID NO: 299723 - DNA, 25 bp, Probe Sequence
taaggtggaatttgcaggtcagccc

SEQ ID NO: 299724 - DNA, 25 bp, Probe Sequence
taagggaataggccaggctccatcc

SEQ ID NO: 299725 - DNA, 25 bp, Probe Sequence
taagaggaaacaaagcgttctgcgc

SEQ ID NO: 299726 - DNA, 25 bp, Probe Sequence
taatctgaaaactcaccttctcacc

SEQ ID NO: 299727 - DNA, 25 bp, Probe Sequence
taactgtaacttagacctttcctgg

SEQ ID NO: 299728 - DNA, 25 bp, Probe Sequence
taacctgaacgacatacttctccag

SEQ ID NO: 299729 - DNA, 25 bp, Probe Sequence
taacctgaaatgtttacttgtgcct

SEQ ID NO: 299730 - DNA, 25 bp, Probe Sequence
taatcttacactcacttcttgtctt

SEQ ID NO: 299731 - DNA, 25 bp, Probe Sequence
taatctgtaccactatctgtttcta

SEQ ID NO: 299732 - DNA, 25 bp, Probe Sequence
taagctgatgactgttttttctaca

SEQ ID NO: 299733 - DNA, 25 bp, Probe Sequence
taatgtggacggttatgactactca

SEQ ID NO: 299734 - DNA, 25 bp, Probe Sequence
taatgtggtcatttgttgccttcta

SEQ ID NO: 299735 - DNA, 25 bp, Probe Sequence
taagggcatctctattagatcttta

SEQ ID NO: 299736 - DNA, 25 bp, Probe Sequence
taatgggcttttgattctaatgata

SEQ ID NO: 299737 - DNA, 25 bp, Probe Sequence
taagagagttgtcactactagatta

SEQ ID NO: 299738 - DNA, 25 bp, Probe Sequence
taaggaatatctcttgatatagaat

SEQ ID NO: 299739 - DNA, 25 bp, Probe Sequence
taagagtctgacccattgtaagtga

SEQ ID NO: 299740 - DNA, 25 bp, Probe Sequence
taactgaatgccactctgtaattgc

SEQ ID NO: 299741 - DNA, 25 bp, Probe Sequence
taactgaatgccactctgtaattgc

SEQ ID NO: 299742 - DNA, 25 bp, Probe Sequence
taatctggtgtcactctctaaatga

SEQ ID NO: 299743 - DNA, 25 bp, Probe Sequence
taatgctgaattatcttaagtgaga

SEQ ID NO: 299744 - DNA, 25 bp, Probe Sequence
taatgtcacttgtctctataactac

SEQ ID NO: 299745 - DNA, 25 bp, Probe Sequence
taactgccttgatcaacgtctcagc

SEQ ID NO: 299746 - DNA, 25 bp, Probe Sequence
taatctgcatctaatcaaacctctc

SEQ ID NO: 299747 - DNA, 25 bp, Probe Sequence
taatctctctgagttcacagtcttc

SEQ ID NO: 299748 - DNA, 25 bp, Probe Sequence
taagctttaatcttcgtcattgtct

SEQ ID NO: 299749 - DNA, 25 bp, Probe Sequence
taatgcaaatatacttcctcttctt

SEQ ID NO: 299750 - DNA, 25 bp, Probe Sequence
taatgacaataaatccctgctcccc

SEQ ID NO: 299751 - DNA, 25 bp, Probe Sequence
taaggctgtagcttgccgatgctcc

SEQ ID NO: 299752 - DNA, 25 bp, Probe Sequence
taaccggagatacctatctcccaaa

SEQ ID NO: 299753 - DNA, 25 bp, Probe Sequence
tacatccgggagacgtaccccgacg

SEQ ID NO: 299754 - DNA, 25 bp, Probe Sequence
taaggcgtggagacagctccatccc

SEQ ID NO: 299755 - DNA, 25 bp, Probe Sequence
taaggcgatggagatgtactgagtc

SEQ ID NO: 299756 - DNA, 25 bp, Probe Sequence
taatgacgtggactttagcatgcag

SEQ ID NO: 299757 - DNA, 25 bp, Probe Sequence
taatgactgataccttagaagagaa

SEQ ID NO: 299758 - DNA, 25 bp, Probe Sequence
taatgcagaattttgtcagaagaca

SEQ ID NO: 299759 - DNA, 25 bp, Probe Sequence
taatccagatttgctgagagggcac

SEQ ID NO: 299760 - DNA, 25 bp, Probe Sequence
taatccgtttatgtgatgtgtattc

SEQ ID NO: 299761 - DNA, 25 bp, Probe Sequence
taatcctacaggtgctgtgttattc

SEQ ID NO: 299762 - DNA, 25 bp, Probe Sequence
taatcagtatcactttctgtgctta

SEQ ID NO: 299763 - DNA, 25 bp, Probe Sequence
taatcagattagcctgattctcttc

SEQ ID NO: 299764 - DNA, 25 bp, Probe Sequence
taatcatgtctacataactttcgta

SEQ ID NO: 299765 - DNA, 25 bp, Probe Sequence
taatcagtcattcatagcactatat

SEQ ID NO: 299766 - DNA, 25 bp, Probe Sequence
taatcagctgccaataatatctaat

SEQ ID NO: 299767 - DNA, 25 bp, Probe Sequence
taatcacaccatttcatacttcaac

SEQ ID NO: 299768 - DNA, 25 bp, Probe Sequence
taatccacagagtgaaatgacaacc

SEQ ID NO: 299769 - DNA, 25 bp, Probe Sequence
taatgctctcagtaaacctgaacac

SEQ ID NO: 299770 - DNA, 25 bp, Probe Sequence
taatgctgtggtcaaaccatagcac

SEQ ID NO: 299771 - DNA, 25 bp, Probe Sequence
taatcttgccccagattctagatct

SEQ ID NO: 299772 - DNA, 25 bp, Probe Sequence
taatctttctccaatgatcctatga

SEQ ID NO: 299773 - DNA, 25 bp, Probe Sequence
taatcaatgtcaggctttcctcgga

SEQ ID NO: 299774 - DNA, 25 bp, Probe Sequence
taatgtcattcaggttcatccatgt

SEQ ID NO: 299775 - DNA, 25 bp, Probe Sequence
taatgtagcctgcctctatttgttg

SEQ ID NO: 299776 - DNA, 25 bp, Probe Sequence
taagagacacagctgcttgccttgg

SEQ ID NO: 299777 - DNA, 25 bp, Probe Sequence
taatggcatcacctggctttcagag

SEQ ID NO: 299778 - DNA, 25 bp, Probe Sequence
taaggacaccatagctgccaacagc

SEQ ID NO: 299779 - DNA, 25 bp, Probe Sequence
taaggacaccatagctgccaacagc

SEQ ID NO: 299780 - DNA, 25 bp, Probe Sequence
taagaacaccatagctgccaatagc

SEQ ID NO: 299781 - DNA, 25 bp, Probe Sequence
taagaaatcgagacccatactgctg

SEQ ID NO: 299782 - DNA, 25 bp, Probe Sequence
taagccagacgaaccaaattcagtg

SEQ ID NO: 299783 - DNA, 25 bp, Probe Sequence
taatggcaagccactcataatgttg

SEQ ID NO: 299784 - DNA, 25 bp, Probe Sequence
taatgtcacgagcaccaatgagctt

SEQ ID NO: 299785 - DNA, 25 bp, Probe Sequence
taatgccaagggtctagtgtgttct

SEQ ID NO: 299786 - DNA, 25 bp, Probe Sequence
taatgagccaaggttgagtgtttcc

SEQ ID NO: 299787 - DNA, 25 bp, Probe Sequence
taagactccagacttgcgttcaacc

SEQ ID NO: 299788 - DNA, 25 bp, Probe Sequence
tacaactaatttaatggcataacca

SEQ ID NO: 299789 - DNA, 25 bp, Probe Sequence
taaacttagtccaaagccacctcaa

SEQ ID NO: 299790 - DNA, 25 bp, Probe Sequence
taactactactaatcaacgcccata

SEQ ID NO: 299791 - DNA, 25 bp, Probe Sequence
taaatactaccagcacatccctaga

SEQ ID NO: 299792 - DNA, 25 bp, Probe Sequence
taaaggccacaggagacattactat

SEQ ID NO: 299793 - DNA, 25 bp, Probe Sequence
taagagtccaggtgacatccactat

SEQ ID NO: 299794 - DNA, 25 bp, Probe Sequence
taagaacttggatgacactattgat

SEQ ID NO: 299795 - DNA, 25 bp, Probe Sequence
taaggacttgagtgactttgaggcc

SEQ ID NO: 299796 - DNA, 25 bp, Probe Sequence
taaggaattaggccccttcagacca

SEQ ID NO: 299797 - DNA, 25 bp, Probe Sequence
taaggaacgggccacctgtaacaga

SEQ ID NO: 299798 - DNA, 25 bp, Probe Sequence
taaggagacaggggcaccctcgaag

SEQ ID NO: 299799 - DNA, 25 bp, Probe Sequence
taagtagccactggtgtcctgggaa

SEQ ID NO: 299800 - DNA, 25 bp, Probe Sequence
taagtagccttctgttgtgggaata

SEQ ID NO: 299801 - DNA, 25 bp, Probe Sequence
tacgaaccttcgaatggttggaatt

SEQ ID NO: 299802 - DNA, 25 bp, Probe Sequence
tacggtcgttgcccatggtgattaa

SEQ ID NO: 299803 - DNA, 25 bp, Probe Sequence
taaggtcttatctacatgggtttga

SEQ ID NO: 299804 - DNA, 25 bp, Probe Sequence
taaggattctcagtactggcgtttt

SEQ ID NO: 299805 - DNA, 25 bp, Probe Sequence
taaggatatacccttggtatttgat

SEQ ID NO: 299806 - DNA, 25 bp, Probe Sequence
taagagttatacaattggcttttgg

SEQ ID NO: 299807 - DNA, 25 bp, Probe Sequence
taatgcactttgttattcccatttg

SEQ ID NO: 299808 - DNA, 25 bp, Probe Sequence
taacactttgttcactagcatttaa

SEQ ID NO: 299809 - DNA, 25 bp, Probe Sequence
tatagccttttttgactggggaagc

SEQ ID NO: 299810 - DNA, 25 bp, Probe Sequence
tacgccttgctaatttcggtggacc

SEQ ID NO: 299811 - DNA, 25 bp, Probe Sequence
taagaaatgcaaagttaggctgggc

SEQ ID NO: 299812 - DNA, 25 bp, Probe Sequence
taagaaatgacagtctcggggggaa

SEQ ID NO: 299813 - DNA, 25 bp, Probe Sequence
taacttcgaagccatagggtggaga

SEQ ID NO: 299814 - DNA, 25 bp, Probe Sequence
taacccataaggggaggtggaagtg

SEQ ID NO: 299815 - DNA, 25 bp, Probe Sequence
taaccctagataggtggggacctgg

SEQ ID NO: 299816 - DNA, 25 bp, Probe Sequence
taactcttcttctgggggactgaga

SEQ ID NO: 299817 - DNA, 25 bp, Probe Sequence
taactgccacttaagcggcggttgg

SEQ ID NO: 299818 - DNA, 25 bp, Probe Sequence
tacacaacactaaaggacgaacctg

SEQ ID NO: 299819 - DNA, 25 bp, Probe Sequence
taacagaaatatcgagttccccctt

SEQ ID NO: 299820 - DNA, 25 bp, Probe Sequence
taacagaaatatcgagttccccctt

SEQ ID NO: 299821 - DNA, 25 bp, Probe Sequence
taaatcaacatctgtataccccctt

SEQ ID NO: 299822 - DNA, 25 bp, Probe Sequence
tacaggaagcaaactaagcccccgc

SEQ ID NO: 299823 - DNA, 25 bp, Probe Sequence
taagggaggcaatgaaccctctccc

SEQ ID NO: 299824 - DNA, 25 bp, Probe Sequence
tacagttggggctgacagacctccc

SEQ ID NO: 299825 - DNA, 25 bp, Probe Sequence
tacacctggaagtttcagaacccac

SEQ ID NO: 299826 - DNA, 25 bp, Probe Sequence
tagaccaatgggacttaaacccaca

SEQ ID NO: 299827 - DNA, 25 bp, Probe Sequence
taaccaggggatggtggacaccgca

SEQ ID NO: 299828 - DNA, 25 bp, Probe Sequence
taagccaggggagcatgggtccaca

SEQ ID NO: 299829 - DNA, 25 bp, Probe Sequence
taagccggggatggtgatggatgcc

SEQ ID NO: 299830 - DNA, 25 bp, Probe Sequence
taagtggctgcggcgggaagatggc

SEQ ID NO: 299831 - DNA, 25 bp, Probe Sequence
taagtcgtgcctggctgagcaagct

SEQ ID NO: 299832 - DNA, 25 bp, Probe Sequence
taagattgtcctgtgacagcagccc

SEQ ID NO: 299833 - DNA, 25 bp, Probe Sequence
taagttgttccaagacacccactta

SEQ ID NO: 299834 - DNA, 25 bp, Probe Sequence
taagttttcacttataaactgttat

SEQ ID NO: 299835 - DNA, 25 bp, Probe Sequence
taaggttttcttgagagcctgtaga

SEQ ID NO: 299836 - DNA, 25 bp, Probe Sequence
tagggatttttagaactcaattaat

SEQ ID NO: 299837 - DNA, 25 bp, Probe Sequence
taaggtttatctcaagtctcaattg

SEQ ID NO: 299838 - DNA, 25 bp, Probe Sequence
taatgggttttcacagtccagcttc

SEQ ID NO: 299839 - DNA, 25 bp, Probe Sequence
taatgccagtttcctaattccatct

SEQ ID NO: 299840 - DNA, 25 bp, Probe Sequence
taatctcagtttacagccatttctt

SEQ ID NO: 299841 - DNA, 25 bp, Probe Sequence
taaccctgttagcaatattcttttg

SEQ ID NO: 299842 - DNA, 25 bp, Probe Sequence
taagctccttatgggcaggatctgt

SEQ ID NO: 299843 - DNA, 25 bp, Probe Sequence
taatccactgtcagatctggatcgt

SEQ ID NO: 299844 - DNA, 25 bp, Probe Sequence
taacgcacgtccatgtgcacatgcg

SEQ ID NO: 299845 - DNA, 25 bp, Probe Sequence
taagctcctgatctatgctgcatcc

SEQ ID NO: 299846 - DNA, 25 bp, Probe Sequence
taatcctgcttgctctggcaacagg

SEQ ID NO: 299847 - DNA, 25 bp, Probe Sequence
taatccattcaactctgtgacacag

SEQ ID NO: 299848 - DNA, 25 bp, Probe Sequence
taaccaatatatcgtgtatccgaaa

SEQ ID NO: 299849 - DNA, 25 bp, Probe Sequence
taaggcaataattcctatacgaagc

SEQ ID NO: 299850 - DNA, 25 bp, Probe Sequence
taagctgcaccattagttaacaaag

SEQ ID NO: 299851 - DNA, 25 bp, Probe Sequence
taagctaccttcattaagcagcatg

SEQ ID NO: 299852 - DNA, 25 bp, Probe Sequence
taagctacctacatctgaaccagaa

SEQ ID NO: 299853 - DNA, 25 bp, Probe Sequence
taaccccagcaactgtatgtccaga

SEQ ID NO: 299854 - DNA, 25 bp, Probe Sequence
taagccagacacgagctgtagccac

SEQ ID NO: 299855 - DNA, 25 bp, Probe Sequence
taatgccacacattgtgcttggccc

SEQ ID NO: 299856 - DNA, 25 bp, Probe Sequence
taatctgtgctttgttgggctcatc

SEQ ID NO: 299857 - DNA, 25 bp, Probe Sequence
taatgctgatctactataaggtatt

SEQ ID NO: 299858 - DNA, 25 bp, Probe Sequence
taatctgcttaattatagacttctg

SEQ ID NO: 299859 - DNA, 25 bp, Probe Sequence
taactttaactatgcctatcgccct

SEQ ID NO: 299860 - DNA, 25 bp, Probe Sequence
taactactattaacagcctttgcca

SEQ ID NO: 299861 - DNA, 25 bp, Probe Sequence
taacagggattataggcgcgtgcca

SEQ ID NO: 299862 - DNA, 25 bp, Probe Sequence
taagagtgtttattcgtcggttcat

SEQ ID NO: 299863 - DNA, 25 bp, Probe Sequence
taagagttactatcttcttgccctg

SEQ ID NO: 299864 - DNA, 25 bp, Probe Sequence
taatggccaaatttctccttccact

SEQ ID NO: 299865 - DNA, 25 bp, Probe Sequence
taatggctacaagtctgtcctctaa

SEQ ID NO: 299866 - DNA, 25 bp, Probe Sequence
taatggagatccatctgtcctgtgt

SEQ ID NO: 299867 - DNA, 25 bp, Probe Sequence
taatggagatccatctgtcctgtgt

SEQ ID NO: 299868 - DNA, 25 bp, Probe Sequence
taatgtgactctagttctccgcatt

SEQ ID NO: 299869 - DNA, 25 bp, Probe Sequence
taaggacctggtggtgctgctgttt

SEQ ID NO: 299870 - DNA, 25 bp, Probe Sequence
taaggacctggtggtgctgctgttt

SEQ ID NO: 299871 - DNA, 25 bp, Probe Sequence
taaggagcctggctgatgtcacttt

SEQ ID NO: 299872 - DNA, 25 bp, Probe Sequence
taatgtactcatgggattgtcctat

SEQ ID NO: 299873 - DNA, 25 bp, Probe Sequence
taatgtactcatgggattgtcctat

SEQ ID NO: 299874 - DNA, 25 bp, Probe Sequence
taatgctagcagtggcactttatag

SEQ ID NO: 299875 - DNA, 25 bp, Probe Sequence
taagctcatctgggtgccttttagg

SEQ ID NO: 299876 - DNA, 25 bp, Probe Sequence
taagtctcataactctatttttagt

SEQ ID NO: 299877 - DNA, 25 bp, Probe Sequence
taaccaatgacaatacttttttgtg

SEQ ID NO: 299878 - DNA, 25 bp, Probe Sequence
taatgacacatgccttgaagttttg

SEQ ID NO: 299879 - DNA, 25 bp, Probe Sequence
taatggcctccttaaggccatgatg

SEQ ID NO: 299880 - DNA, 25 bp, Probe Sequence
taaggtctgctaatgaagccctgtg

SEQ ID NO: 299881 - DNA, 25 bp, Probe Sequence
taagtgttgcttagagtcattcctc

SEQ ID NO: 299882 - DNA, 25 bp, Probe Sequence
taagttataatcagtattcatctct

SEQ ID NO: 299883 - DNA, 25 bp, Probe Sequence
taatgatatttacgatgttttcctc

SEQ ID NO: 299884 - DNA, 25 bp, Probe Sequence
taaataaatagcaaactttcaccta

SEQ ID NO: 299885 - DNA, 25 bp, Probe Sequence
taaaataaacccatagatcacccct

SEQ ID NO: 299886 - DNA, 25 bp, Probe Sequence
taagagaaccacacccaaagtcctc

SEQ ID NO: 299887 - DNA, 25 bp, Probe Sequence
tacacgaacctaacccaaatttgct

SEQ ID NO: 299888 - DNA, 25 bp, Probe Sequence
tacaccaaatccagcccttgatttc

SEQ ID NO: 299889 - DNA, 25 bp, Probe Sequence
taactcatagatccccctctataat

SEQ ID NO: 299890 - DNA, 25 bp, Probe Sequence
taatgtatgcaattcccacatcaaa

SEQ ID NO: 299891 - DNA, 25 bp, Probe Sequence
taatgacagaagatgcaccactaaa

SEQ ID NO: 299892 - DNA, 25 bp, Probe Sequence
taagataaagataaccccaaatgca

SEQ ID NO: 299893 - DNA, 25 bp, Probe Sequence
taatgtgaaataaaccctgtttgca

SEQ ID NO: 299894 - DNA, 25 bp, Probe Sequence
taagtatgaaacaacctatggtctg

SEQ ID NO: 299895 - DNA, 25 bp, Probe Sequence
taagttgttgaattccttaatttag

SEQ ID NO: 299896 - DNA, 25 bp, Probe Sequence
taagattttttttcctcaagtatag

SEQ ID NO: 299897 - DNA, 25 bp, Probe Sequence
taagattcttgttaacccatttatg

SEQ ID NO: 299898 - DNA, 25 bp, Probe Sequence
taatgtttctgtcaaagcttcttaa

SEQ ID NO: 299899 - DNA, 25 bp, Probe Sequence
taatgtttcatttgacggtctcttt

SEQ ID NO: 299900 - DNA, 25 bp, Probe Sequence
taatgtttttgtcctgtgtagatat

SEQ ID NO: 299901 - DNA, 25 bp, Probe Sequence
taatgttttttgcagcagcatgaat

SEQ ID NO: 299902 - DNA, 25 bp, Probe Sequence
taatgctgtgtttttggccaggcat

SEQ ID NO: 299903 - DNA, 25 bp, Probe Sequence
taatgagtgctttagtgagtcctca

SEQ ID NO: 299904 - DNA, 25 bp, Probe Sequence
taagcagcatctctatatactccta

SEQ ID NO: 299905 - DNA, 25 bp, Probe Sequence
taagcagcatctctatatactccta

SEQ ID NO: 299906 - DNA, 25 bp, Probe Sequence
taagcagcatctctatatactccta

SEQ ID NO: 299907 - DNA, 25 bp, Probe Sequence
taagctatctctcatggttcctatg

SEQ ID NO: 299908 - DNA, 25 bp, Probe Sequence
taatggcattctcagccacctggat

SEQ ID NO: 299909 - DNA, 25 bp, Probe Sequence
taaggcacatctcagccttcttgtg

SEQ ID NO: 299910 - DNA, 25 bp, Probe Sequence
taagtgagattatgcagcgtttgtt

SEQ ID NO: 299911 - DNA, 25 bp, Probe Sequence
taagatactaaggacgttgttttgg

SEQ ID NO: 299912 - DNA, 25 bp, Probe Sequence
taacatggcccacacgttgtatttg

SEQ ID NO: 299913 - DNA, 25 bp, Probe Sequence
taactggcgactccggtattaagct

SEQ ID NO: 299914 - DNA, 25 bp, Probe Sequence
taagtggcagacgctcggggagagc

SEQ ID NO: 299915 - DNA, 25 bp, Probe Sequence
taaatgtgacaccccggggggcctg

SEQ ID NO: 299916 - DNA, 25 bp, Probe Sequence
taaatttcaaggcaggtaccctctg

SEQ ID NO: 299917 - DNA, 25 bp, Probe Sequence
taacggtctcatgggggaaccctct

SEQ ID NO: 299918 - DNA, 25 bp, Probe Sequence
taaaagatatcattggggaaaccct

SEQ ID NO: 299919 - DNA, 25 bp, Probe Sequence
taaggatgactctggtcagagatac

SEQ ID NO: 299920 - DNA, 25 bp, Probe Sequence
taacgtggctgccggctatgacatc

SEQ ID NO: 299921 - DNA, 25 bp, Probe Sequence
taacaggggcgccgtaaagcccatg

SEQ ID NO: 299922 - DNA, 25 bp, Probe Sequence
taaaggtggctccagaaagggcatc

SEQ ID NO: 299923 - DNA, 25 bp, Probe Sequence
taagagcttcgtgctgaacctgggc

SEQ ID NO: 299924 - DNA, 25 bp, Probe Sequence
taagcatgtgctagtgtctgaaccc

SEQ ID NO: 299925 - DNA, 25 bp, Probe Sequence
taagcaggaatttatgaacacccat

SEQ ID NO: 299926 - DNA, 25 bp, Probe Sequence
tacgacgtattttagttccacatca

SEQ ID NO: 299927 - DNA, 25 bp, Probe Sequence
taagcacttatcagggcttccacac

SEQ ID NO: 299928 - DNA, 25 bp, Probe Sequence
taagcagtttgcaagccgaagccca

SEQ ID NO: 299929 - DNA, 25 bp, Probe Sequence
taacaatttcaacacaggggacagc

SEQ ID NO: 299930 - DNA, 25 bp, Probe Sequence
tagcacttttatttacggagtaaga

SEQ ID NO: 299931 - DNA, 25 bp, Probe Sequence
tatgcagcctttattaccaagccca

SEQ ID NO: 299932 - DNA, 25 bp, Probe Sequence
taagcccttactagaccaatgggac

SEQ ID NO: 299933 - DNA, 25 bp, Probe Sequence
taagcccatcaagaaagtcatggtg

SEQ ID NO: 299934 - DNA, 25 bp, Probe Sequence
taagcctcatccttaaagagaagtc

SEQ ID NO: 299935 - DNA, 25 bp, Probe Sequence
taaggcctactttaagagataccaa

SEQ ID NO: 299936 - DNA, 25 bp, Probe Sequence
taaccctacttctcacagtgcagga

SEQ ID NO: 299937 - DNA, 25 bp, Probe Sequence
taaccttggcttgtcatttcagtgg

SEQ ID NO: 299938 - DNA, 25 bp, Probe Sequence
taagccttctgctcacatttttgtg

SEQ ID NO: 299939 - DNA, 25 bp, Probe Sequence
taagccttctgctcacatttttgtg

SEQ ID NO: 299940 - DNA, 25 bp, Probe Sequence
taacctttgcaaaccttcaagctgt

SEQ ID NO: 299941 - DNA, 25 bp, Probe Sequence
taaccctgtctaaactaatggcgca

SEQ ID NO: 299942 - DNA, 25 bp, Probe Sequence
taagccacttgtgtagttgggcccc

SEQ ID NO: 299943 - DNA, 25 bp, Probe Sequence
taagccatcttggtaaatttcccca

SEQ ID NO: 299944 - DNA, 25 bp, Probe Sequence
taagacactttgccaaggctctccc

SEQ ID NO: 299945 - DNA, 25 bp, Probe Sequence
taagactgctttgtatgtgactccc

SEQ ID NO: 299946 - DNA, 25 bp, Probe Sequence
taacttctgttccatcaagacaccc

SEQ ID NO: 299947 - DNA, 25 bp, Probe Sequence
taaaccgatctccaaagatttcctt

SEQ ID NO: 299948 - DNA, 25 bp, Probe Sequence
taacgggagtccaaagagttctcta

SEQ ID NO: 299949 - DNA, 25 bp, Probe Sequence
tacacccaagttaccaaattcctga

SEQ ID NO: 299950 - DNA, 25 bp, Probe Sequence
taagcaaaattttccagaattccca

SEQ ID NO: 299951 - DNA, 25 bp, Probe Sequence
taaccaattcttactcaagtaccca

SEQ ID NO: 299952 - DNA, 25 bp, Probe Sequence
tacccaagtatctcaaatgcccgga

SEQ ID NO: 299953 - DNA, 25 bp, Probe Sequence
tactcaaagtactcaaagcctggcc

SEQ ID NO: 299954 - DNA, 25 bp, Probe Sequence
taacaatagtccacatgtccctggc

SEQ ID NO: 299955 - DNA, 25 bp, Probe Sequence
taacattattttgcttgccgctggc

SEQ ID NO: 299956 - DNA, 25 bp, Probe Sequence
taagcataacttttctactggtgta

SEQ ID NO: 299957 - DNA, 25 bp, Probe Sequence
taagtatgagctaaattccctgtta

SEQ ID NO: 299958 - DNA, 25 bp, Probe Sequence
taagtaacttatttctgcactgttt

SEQ ID NO: 299959 - DNA, 25 bp, Probe Sequence
taatgtagactttgacttttttatt

SEQ ID NO: 299960 - DNA, 25 bp, Probe Sequence
taatgtagactttgacttttttatt

SEQ ID NO: 299961 - DNA, 25 bp, Probe Sequence
taagtagtttagaccttctcttcat

SEQ ID NO: 299962 - DNA, 25 bp, Probe Sequence
taatgtagttctttgttcctgcttt

SEQ ID NO: 299963 - DNA, 25 bp, Probe Sequence
taagatgcagtaattatgttccaga

SEQ ID NO: 299964 - DNA, 25 bp, Probe Sequence
taatggcactaaatatattccagtt

SEQ ID NO: 299965 - DNA, 25 bp, Probe Sequence
taaggcaccaattgttttggttggt

SEQ ID NO: 299966 - DNA, 25 bp, Probe Sequence
taagtagcctattttttaaatgtct

SEQ ID NO: 299967 - DNA, 25 bp, Probe Sequence
taatgtagctactcttatttatttt

SEQ ID NO: 299968 - DNA, 25 bp, Probe Sequence
taatgggtatatggtttcttttttg

SEQ ID NO: 299969 - DNA, 25 bp, Probe Sequence
taaggtttacctcttactctatgta

SEQ ID NO: 299970 - DNA, 25 bp, Probe Sequence
taacgtttccggtattactctgcta

SEQ ID NO: 299971 - DNA, 25 bp, Probe Sequence
taactttgtgaagagtttctcctaa

SEQ ID NO: 299972 - DNA, 25 bp, Probe Sequence
taactccttagctaagttttattat

SEQ ID NO: 299973 - DNA, 25 bp, Probe Sequence
taagttaatgactaatatgtttaca

SEQ ID NO: 299974 - DNA, 25 bp, Probe Sequence
taatgtgattgtgtattctgtttac

SEQ ID NO: 299975 - DNA, 25 bp, Probe Sequence
taatgagtgttcgatatttgctata

SEQ ID NO: 299976 - DNA, 25 bp, Probe Sequence
taatgattgttgccagtgactgatg

SEQ ID NO: 299977 - DNA, 25 bp, Probe Sequence
tacacagcctctccagtatggtggc

SEQ ID NO: 299978 - DNA, 25 bp, Probe Sequence
taagcagcttatccagtataccgcc

SEQ ID NO: 299979 - DNA, 25 bp, Probe Sequence
taagcagtggaccatggtcacccct

SEQ ID NO: 299980 - DNA, 25 bp, Probe Sequence
taagttgtggaaagtctccctctgt

SEQ ID NO: 299981 - DNA, 25 bp, Probe Sequence
taagttgtgaatgtcagctccctct

SEQ ID NO: 299982 - DNA, 25 bp, Probe Sequence
taagtagtgtatcctgcacctactt

SEQ ID NO: 299983 - DNA, 25 bp, Probe Sequence
taagaagctgattgcagcccaaact

SEQ ID NO: 299984 - DNA, 25 bp, Probe Sequence
taagacctattaatcctgacacttc

SEQ ID NO: 299985 - DNA, 25 bp, Probe Sequence
taaggactgagccaatcctgccaga

SEQ ID NO: 299986 - DNA, 25 bp, Probe Sequence
taagtgtcgagggaccatgccagca

SEQ ID NO: 299987 - DNA, 25 bp, Probe Sequence
taaggaagcggtagccatgccatgc

SEQ ID NO: 299988 - DNA, 25 bp, Probe Sequence
taaggaagccaggtcttctctcttc

SEQ ID NO: 299989 - DNA, 25 bp, Probe Sequence
taaggaacatctctgctttcactct

SEQ ID NO: 299990 - DNA, 25 bp, Probe Sequence
taaggaacatctctgctttcactct

SEQ ID NO: 299991 - DNA, 25 bp, Probe Sequence
taaggattccacttctttcagattt

SEQ ID NO: 299992 - DNA, 25 bp, Probe Sequence
taaggatggtacttgcatatggtga

SEQ ID NO: 299993 - DNA, 25 bp, Probe Sequence
tacaggagtctgtctctgctatgga

SEQ ID NO: 299994 - DNA, 25 bp, Probe Sequence
taaggagcacgcaacgtagatgcat

SEQ ID NO: 299995 - DNA, 25 bp, Probe Sequence
tacacagcagacctagccatgggca

SEQ ID NO: 299996 - DNA, 25 bp, Probe Sequence
taagcaggacctgcctggagcactg

SEQ ID NO: 299997 - DNA, 25 bp, Probe Sequence
taagtgtatcctgtatgggcccatt

SEQ ID NO: 299998 - DNA, 25 bp, Probe Sequence
taaagtagctgtgctaggggcctct

SEQ ID NO: 299999 - DNA, 25 bp, Probe Sequence
taacagctggttggccggtgtggcc

SEQ ID NO: 300000 - DNA, 25 bp, Probe Sequence
taagtcggatgagcctgtctgtgcc

SEQ ID NO: 300001 - DNA, 25 bp, Probe Sequence
taacctggctacgtatgtcttcctt

SEQ ID NO: 300002 - DNA, 25 bp, Probe Sequence
taatggctgccttttcattttcatc

SEQ ID NO: 300003 - DNA, 25 bp, Probe Sequence
taatggctgccttttcattttcatc

SEQ ID NO: 300004 - DNA, 25 bp, Probe Sequence
taaggtgtcttattttttgcatcaa

SEQ ID NO: 300005 - DNA, 25 bp, Probe Sequence
taatgtgatggtcaattttctgcat

SEQ ID NO: 300006 - DNA, 25 bp, Probe Sequence
taagctatgagttgaaatgttctgt

SEQ ID NO: 300007 - DNA, 25 bp, Probe Sequence
taagcctcatttctcatgttcagac

SEQ ID NO: 300008 - DNA, 25 bp, Probe Sequence
taagcctcatttctatttcttcttc

SEQ ID NO: 300009 - DNA, 25 bp, Probe Sequence
taaccttcctggaatccattttcta

SEQ ID NO: 300010 - DNA, 25 bp, Probe Sequence
taacctaacggttctcatgcggtgc

SEQ ID NO: 300011 - DNA, 25 bp, Probe Sequence
taacctaacggttctcatgcggtgc

SEQ ID NO: 300012 - DNA, 25 bp, Probe Sequence
tacagtgcgcacaggctttatcgag

SEQ ID NO: 300013 - DNA, 25 bp, Probe Sequence
taagctggcaagccgcatcttgagc

SEQ ID NO: 300014 - DNA, 25 bp, Probe Sequence
taagttgcatagctgctttgcagtg

SEQ ID NO: 300015 - DNA, 25 bp, Probe Sequence
taagagcgctcaggctgggtgcagt

SEQ ID NO: 300016 - DNA, 25 bp, Probe Sequence
taacgcgttcgcagttgcagcgatt

SEQ ID NO: 300017 - DNA, 25 bp, Probe Sequence
taaggccttctgtactttgcttatt

SEQ ID NO: 300018 - DNA, 25 bp, Probe Sequence
taagtcagctttcatctttgtggat

SEQ ID NO: 300019 - DNA, 25 bp, Probe Sequence
taagtagtctagatctcagttaatg

SEQ ID NO: 300020 - DNA, 25 bp, Probe Sequence
taagtagtgctgtttgccagctgta

SEQ ID NO: 300021 - DNA, 25 bp, Probe Sequence
taagtgggtgtaatcatggctgaaa

SEQ ID NO: 300022 - DNA, 25 bp, Probe Sequence
taagatagaggttatttgttcaaat

SEQ ID NO: 300023 - DNA, 25 bp, Probe Sequence
taagcatggggtttgtttctctaaa

SEQ ID NO: 300024 - DNA, 25 bp, Probe Sequence
taactgtaagccttttagtcttcaa

SEQ ID NO: 300025 - DNA, 25 bp, Probe Sequence
taactcgagaccttttcaacttggc

SEQ ID NO: 300026 - DNA, 25 bp, Probe Sequence
taacgcgctgacgttgttcaacctg

SEQ ID NO: 300027 - DNA, 25 bp, Probe Sequence
taagccgagaccatgcttattgccc

SEQ ID NO: 300028 - DNA, 25 bp, Probe Sequence
ttaggaaggctaaccttggcccagg

SEQ ID NO: 300029 - DNA, 25 bp, Probe Sequence
tatagatgaagttagaccattagcc

SEQ ID NO: 300030 - DNA, 25 bp, Probe Sequence
taactagtgtcaatatccattaatg

SEQ ID NO: 300031 - DNA, 25 bp, Probe Sequence
taacttcattgcttaatatcaaatt

SEQ ID NO: 300032 - DNA, 25 bp, Probe Sequence
taagtgtactcaaaatatcataatt

SEQ ID NO: 300033 - DNA, 25 bp, Probe Sequence
taatggtcactcaatagctttcaaa

SEQ ID NO: 300034 - DNA, 25 bp, Probe Sequence
taagaggcctctaactggatccagg

SEQ ID NO: 300035 - DNA, 25 bp, Probe Sequence
taagagcttcctgattgagattcag

SEQ ID NO: 300036 - DNA, 25 bp, Probe Sequence
taagcagtccctgagaccatttaac

SEQ ID NO: 300037 - DNA, 25 bp, Probe Sequence
taaggtctgactgacaaattctgta

SEQ ID NO: 300038 - DNA, 25 bp, Probe Sequence
taaggaccactcaataagtaatgta

SEQ ID NO: 300039 - DNA, 25 bp, Probe Sequence
taagtgcctatctaaaagcaagtta

SEQ ID NO: 300040 - DNA, 25 bp, Probe Sequence
taagtcttcacaggaacaagtgctt

SEQ ID NO: 300041 - DNA, 25 bp, Probe Sequence
taagttccagaataatagtgtcatt

SEQ ID NO: 300042 - DNA, 25 bp, Probe Sequence
taagttaagaaatgacagtctcggg

SEQ ID NO: 300043 - DNA, 25 bp, Probe Sequence
taagtgtcagatcaataacagatta

SEQ ID NO: 300044 - DNA, 25 bp, Probe Sequence
taagtcatctgacattaaatcattt

SEQ ID NO: 300045 - DNA, 25 bp, Probe Sequence
taacctgatagaattaactcgtatt

SEQ ID NO: 300046 - DNA, 25 bp, Probe Sequence
taacctggagatttccaccttttct

SEQ ID NO: 300047 - DNA, 25 bp, Probe Sequence
taactgtggctatttcgacctgttt

SEQ ID NO: 300048 - DNA, 25 bp, Probe Sequence
taactgttgttttggacttgaactt

SEQ ID NO: 300049 - DNA, 25 bp, Probe Sequence
taacctatctcttgggacttagccc

SEQ ID NO: 300050 - DNA, 25 bp, Probe Sequence
taaaatccttagcctggtctgactt

SEQ ID NO: 300051 - DNA, 25 bp, Probe Sequence
taacctcactgttctgggtctggag

SEQ ID NO: 300052 - DNA, 25 bp, Probe Sequence
taactacacatgcttggaattaagt

SEQ ID NO: 300053 - DNA, 25 bp, Probe Sequence
tacacattccagctgcttaaccttt

SEQ ID NO: 300054 - DNA, 25 bp, Probe Sequence
tacatttcctggtttaacattttcg

SEQ ID NO: 300055 - DNA, 25 bp, Probe Sequence
taactttgctggttaaaatttccat

SEQ ID NO: 300056 - DNA, 25 bp, Probe Sequence
taactctggggataaatttttgaca

SEQ ID NO: 300057 - DNA, 25 bp, Probe Sequence
taagccttgtggcaaaatttttgtg

SEQ ID NO: 300058 - DNA, 25 bp, Probe Sequence
taagcctttgggtccagagtttctt

SEQ ID NO: 300059 - DNA, 25 bp, Probe Sequence
taagcactgcggtgaaggagttagt

SEQ ID NO: 300060 - DNA, 25 bp, Probe Sequence
taagccggctggcctgggagttagg

SEQ ID NO: 300061 - DNA, 25 bp, Probe Sequence
taagccccgaggcctagagtggcag

SEQ ID NO: 300062 - DNA, 25 bp, Probe Sequence
taaagtccggagtctagagtacagt

SEQ ID NO: 300063 - DNA, 25 bp, Probe Sequence
taaaaccggactgaaggagctgccc

SEQ ID NO: 300064 - DNA, 25 bp, Probe Sequence
taaaaccggtcgggaacatctctcg

SEQ ID NO: 300065 - DNA, 25 bp, Probe Sequence
taaaactagtgtcttcaaatcctca

SEQ ID NO: 300066 - DNA, 25 bp, Probe Sequence
tagaaaggaggcaatttgaaaccaa

SEQ ID NO: 300067 - DNA, 25 bp, Probe Sequence
tatggaaaaccgttatagacccaat

SEQ ID NO: 300068 - DNA, 25 bp, Probe Sequence
taggaaacccttaaaacacacatgg

SEQ ID NO: 300069 - DNA, 25 bp, Probe Sequence
taaaagcaccatattaaaacttgga

SEQ ID NO: 300070 - DNA, 25 bp, Probe Sequence
taaccagctgctatgttaaaatacc

SEQ ID NO: 300071 - DNA, 25 bp, Probe Sequence
taacgagctggttcgtaccaagacc

SEQ ID NO: 300072 - DNA, 25 bp, Probe Sequence
taacgagctggttcgtaccaagacc

SEQ ID NO: 300073 - DNA, 25 bp, Probe Sequence
taaggaagagtgtttcactcacaga

SEQ ID NO: 300074 - DNA, 25 bp, Probe Sequence
taagggcaagtaattcacaccaggc

SEQ ID NO: 300075 - DNA, 25 bp, Probe Sequence
taaggagaagctgtgctacgtcgcc

SEQ ID NO: 300076 - DNA, 25 bp, Probe Sequence
taaggagaagctgtgctacgtcgcc

SEQ ID NO: 300077 - DNA, 25 bp, Probe Sequence
taagggaactgtttccttcatgccg

SEQ ID NO: 300078 - DNA, 25 bp, Probe Sequence
taagggactcttgtgctttcatacg

SEQ ID NO: 300079 - DNA, 25 bp, Probe Sequence
taaggacgccttgatgctttcttca

SEQ ID NO: 300080 - DNA, 25 bp, Probe Sequence
taatggaagccctgtctgtttgcca

SEQ ID NO: 300081 - DNA, 25 bp, Probe Sequence
taagacgacgcctgtggcatttgcc

SEQ ID NO: 300082 - DNA, 25 bp, Probe Sequence
taagtcacaaaacagtgcaactgca

SEQ ID NO: 300083 - DNA, 25 bp, Probe Sequence
taagtgcagaaataactaagacaca

SEQ ID NO: 300084 - DNA, 25 bp, Probe Sequence
taagggggtcattctctatggtcca

SEQ ID NO: 300085 - DNA, 25 bp, Probe Sequence
taagggggtcattctctatggtcca

SEQ ID NO: 300086 - DNA, 25 bp, Probe Sequence
taagggggtcattctctatggtcca

SEQ ID NO: 300087 - DNA, 25 bp, Probe Sequence
taagggggtcattctctatggtcca

SEQ ID NO: 300088 - DNA, 25 bp, Probe Sequence
taagggggatgcacttaggtggtga

SEQ ID NO: 300089 - DNA, 25 bp, Probe Sequence
taagaggtggatgtttgggattgta

SEQ ID NO: 300090 - DNA, 25 bp, Probe Sequence
taagctgtttgtgttgctggtggtt

SEQ ID NO: 300091 - DNA, 25 bp, Probe Sequence
taagcccttggcaggggtggtcctt

SEQ ID NO: 300092 - DNA, 25 bp, Probe Sequence
taagagccttccaggcgtggtgacc

SEQ ID NO: 300093 - DNA, 25 bp, Probe Sequence
tagaaccggacctagcatgattgta

SEQ ID NO: 300094 - DNA, 25 bp, Probe Sequence
taaaactacccatgcaattaaaagg

SEQ ID NO: 300095 - DNA, 25 bp, Probe Sequence
tagaagttcccccaattacaaactg

SEQ ID NO: 300096 - DNA, 25 bp, Probe Sequence
taagacttctgactccaatttaaac

SEQ ID NO: 300097 - DNA, 25 bp, Probe Sequence
taaacttctttggcaacttaattag

SEQ ID NO: 300098 - DNA, 25 bp, Probe Sequence
taagcctttttgtcacctcaatatt

SEQ ID NO: 300099 - DNA, 25 bp, Probe Sequence
taagacttttggtttctcgcattgc

SEQ ID NO: 300100 - DNA, 25 bp, Probe Sequence
taagctttgttgggtttcagcaaga

SEQ ID NO: 300101 - DNA, 25 bp, Probe Sequence
taagttagtctgttgttatagtaga

SEQ ID NO: 300102 - DNA, 25 bp, Probe Sequence
tacagtaacctgttgtctttatata

SEQ ID NO: 300103 - DNA, 25 bp, Probe Sequence
taagtgtttgcttttcatcttttat

SEQ ID NO: 300104 - DNA, 25 bp, Probe Sequence
taaggtatctggtatctgcatgtaa

SEQ ID NO: 300105 - DNA, 25 bp, Probe Sequence
taagagtttgagatgcgtggagcag

SEQ ID NO: 300106 - DNA, 25 bp, Probe Sequence
taagagttatgttagccaggtgcag

SEQ ID NO: 300107 - DNA, 25 bp, Probe Sequence
taagttttgacccgcagagtgcact

SEQ ID NO: 300108 - DNA, 25 bp, Probe Sequence
taaccagttagcacagatgaggcct

SEQ ID NO: 300109 - DNA, 25 bp, Probe Sequence
taaaattagaattcagagggatctc

SEQ ID NO: 300110 - DNA, 25 bp, Probe Sequence
taaattgtagggtagagagacgctg

SEQ ID NO: 300111 - DNA, 25 bp, Probe Sequence
taagatataaagcctcagagaacaa

SEQ ID NO: 300112 - DNA, 25 bp, Probe Sequence
taagtattgtaggcatagcgttcag

SEQ ID NO: 300113 - DNA, 25 bp, Probe Sequence
taaggttgctagtacagcgtttgct

SEQ ID NO: 300114 - DNA, 25 bp, Probe Sequence
taagcggctgtttactgcttttcat

SEQ ID NO: 300115 - DNA, 25 bp, Probe Sequence
ttacggagttgttcctttactggct

SEQ ID NO: 300116 - DNA, 25 bp, Probe Sequence
tttaaagttgttctggttgattgct

SEQ ID NO: 300117 - DNA, 25 bp, Probe Sequence
tattaaaacattcccggtgtgagct

SEQ ID NO: 300118 - DNA, 25 bp, Probe Sequence
taagaacaaaaggcctgggtgccta

SEQ ID NO: 300119 - DNA, 25 bp, Probe Sequence
taagataaggtaccgttatgtccca

SEQ ID NO: 300120 - DNA, 25 bp, Probe Sequence
tacaacagaccccaacagtactttc

SEQ ID NO: 300121 - DNA, 25 bp, Probe Sequence
tacaacagaccccaacagtactttc

SEQ ID NO: 300122 - DNA, 25 bp, Probe Sequence
taccccaaccgaaggtgacttccat

SEQ ID NO: 300123 - DNA, 25 bp, Probe Sequence
taacccacactttcagggagccctt

SEQ ID NO: 300124 - DNA, 25 bp, Probe Sequence
taacgtgcatacatatctgcagggc

SEQ ID NO: 300125 - DNA, 25 bp, Probe Sequence
taagctgccatacgtgttcagtgtg

SEQ ID NO: 300126 - DNA, 25 bp, Probe Sequence
taactgctataggatctgtctgcta

SEQ ID NO: 300127 - DNA, 25 bp, Probe Sequence
taacgataatgcccatgacgcttcc

SEQ ID NO: 300128 - DNA, 25 bp, Probe Sequence
taaggatgcaacctctgacgttctg

SEQ ID NO: 300129 - DNA, 25 bp, Probe Sequence
taaaacattcccggtgtgagctggc

SEQ ID NO: 300130 - DNA, 25 bp, Probe Sequence
taagcaacagccccaaatgctggct

SEQ ID NO: 300131 - DNA, 25 bp, Probe Sequence
taactacaatcacctaatgcccaca

SEQ ID NO: 300132 - DNA, 25 bp, Probe Sequence
taaggagcgaatcctacatccacca

SEQ ID NO: 300133 - DNA, 25 bp, Probe Sequence
taactggtgaagcctacagccatcc

SEQ ID NO: 300134 - DNA, 25 bp, Probe Sequence
taaggtggtactcaagccatgctgc

SEQ ID NO: 300135 - DNA, 25 bp, Probe Sequence
taaggagactggccgaagctctgcc

SEQ ID NO: 300136 - DNA, 25 bp, Probe Sequence
taaggagactggccgaagctctgcc

SEQ ID NO: 300137 - DNA, 25 bp, Probe Sequence
taaggagaatggcccagtcctctcc

SEQ ID NO: 300138 - DNA, 25 bp, Probe Sequence
taagagaaagtcacaggccctcttc

SEQ ID NO: 300139 - DNA, 25 bp, Probe Sequence
taagaccaagtcctcgctggactgc

SEQ ID NO: 300140 - DNA, 25 bp, Probe Sequence
taagttaagatctcgctgaaagcca

SEQ ID NO: 300141 - DNA, 25 bp, Probe Sequence
taagttaactctacggaaatccacg

SEQ ID NO: 300142 - DNA, 25 bp, Probe Sequence
tagagaaaaattatggccctaccga

SEQ ID NO: 300143 - DNA, 25 bp, Probe Sequence
taagaaataaaacactgcaccccga

SEQ ID NO: 300144 - DNA, 25 bp, Probe Sequence
taaaattaaagaaattgcttcctca

SEQ ID NO: 300145 - DNA, 25 bp, Probe Sequence
taagagtctcaatggagttttctat

SEQ ID NO: 300146 - DNA, 25 bp, Probe Sequence
taagaagtagtctggttttgttctt

SEQ ID NO: 300147 - DNA, 25 bp, Probe Sequence
taaaggtagtcaggatattttatcc

SEQ ID NO: 300148 - DNA, 25 bp, Probe Sequence
tagtcacctcggggattttttccat

SEQ ID NO: 300149 - DNA, 25 bp, Probe Sequence
taacccacaggcgttttttctgcca

SEQ ID NO: 300150 - DNA, 25 bp, Probe Sequence
taagacaaccctggttcctttgtga

SEQ ID NO: 300151 - DNA, 25 bp, Probe Sequence
taaatcctacctagagacctttgtt

SEQ ID NO: 300152 - DNA, 25 bp, Probe Sequence
taaaggaacctaatggtgcttattt

SEQ ID NO: 300153 - DNA, 25 bp, Probe Sequence
tacaaccaacttatttgaacattta

SEQ ID NO: 300154 - DNA, 25 bp, Probe Sequence
taacacacttctttttctaaggaat

SEQ ID NO: 300155 - DNA, 25 bp, Probe Sequence
taaccaaacttcttcctaaggagat

SEQ ID NO: 300156 - DNA, 25 bp, Probe Sequence
taacctagaaattccctaacagaga

SEQ ID NO: 300157 - DNA, 25 bp, Probe Sequence
tacttattaaaaccacataccaagc

SEQ ID NO: 300158 - DNA, 25 bp, Probe Sequence
taccacttaaagaggaaccagagct

SEQ ID NO: 300159 - DNA, 25 bp, Probe Sequence
taccctgtaaagccgttttagaatg

SEQ ID NO: 300160 - DNA, 25 bp, Probe Sequence
taactattaaggccttttccacacg

SEQ ID NO: 300161 - DNA, 25 bp, Probe Sequence
taactacattacctgttcttgccta

SEQ ID NO: 300162 - DNA, 25 bp, Probe Sequence
taagctaatttctatttcttgccga

SEQ ID NO: 300163 - DNA, 25 bp, Probe Sequence
taacatcgacttcgttcacttcacg

SEQ ID NO: 300164 - DNA, 25 bp, Probe Sequence
taactatgactgacgtccccagaag

SEQ ID NO: 300165 - DNA, 25 bp, Probe Sequence
taacatatcctggcctcactaagaa

SEQ ID NO: 300166 - DNA, 25 bp, Probe Sequence
tacaccttcccacttgctgaaaagg

SEQ ID NO: 300167 - DNA, 25 bp, Probe Sequence
tacaccttcccacttgctgaaaagg

SEQ ID NO: 300168 - DNA, 25 bp, Probe Sequence
taaccatttcaatctgatgataaac

SEQ ID NO: 300169 - DNA, 25 bp, Probe Sequence
taacctgattatttggagaccacat

SEQ ID NO: 300170 - DNA, 25 bp, Probe Sequence
taagcaagttacttaagactacacc

SEQ ID NO: 300171 - DNA, 25 bp, Probe Sequence
taagcatagtgctcagaaaactcat

SEQ ID NO: 300172 - DNA, 25 bp, Probe Sequence
taaccatactaccatcaatactcat

SEQ ID NO: 300173 - DNA, 25 bp, Probe Sequence
tacacccacgtccagatctacgtgc

SEQ ID NO: 300174 - DNA, 25 bp, Probe Sequence
taacccacaccttgatccaagagct

SEQ ID NO: 300175 - DNA, 25 bp, Probe Sequence
taaccgctaacattactgcaggcca

SEQ ID NO: 300176 - DNA, 25 bp, Probe Sequence
taactccttaactcaggtgccactt

SEQ ID NO: 300177 - DNA, 25 bp, Probe Sequence
taagctccttgaaggtaggatgctt

SEQ ID NO: 300178 - DNA, 25 bp, Probe Sequence
tacagacgttgctaggaaactgcct

SEQ ID NO: 300179 - DNA, 25 bp, Probe Sequence
tacggggctgttggagactctgcct

SEQ ID NO: 300180 - DNA, 25 bp, Probe Sequence
taagagggtgggggcacggaattcg

SEQ ID NO: 300181 - DNA, 25 bp, Probe Sequence
taaggtgagcaggcacggcacggaa

SEQ ID NO: 300182 - DNA, 25 bp, Probe Sequence
taagtgtggcgtccagagcccaaga

SEQ ID NO: 300183 - DNA, 25 bp, Probe Sequence
taagtgatgactgtgccaccctagg

SEQ ID NO: 300184 - DNA, 25 bp, Probe Sequence
taagtgatgactgtgccaccctagg

SEQ ID NO: 300185 - DNA, 25 bp, Probe Sequence
taaggaggctcttgaaccctctgga

SEQ ID NO: 300186 - DNA, 25 bp, Probe Sequence
taagctcagtgttgtcaggtccctg

SEQ ID NO: 300187 - DNA, 25 bp, Probe Sequence
taagctcgtgtaacggcggcggtgt

SEQ ID NO: 300188 - DNA, 25 bp, Probe Sequence
taagtcggtaagctagaggattgta

SEQ ID NO: 300189 - DNA, 25 bp, Probe Sequence
taagtagggaacatggcagagagtg

SEQ ID NO: 300190 - DNA, 25 bp, Probe Sequence
taaggtgtggctttaggagcagtgg

SEQ ID NO: 300191 - DNA, 25 bp, Probe Sequence
taaggtggcgtgttgcagtgcagag

SEQ ID NO: 300192 - DNA, 25 bp, Probe Sequence
tacaggttgctttgatcgacacatc

SEQ ID NO: 300193 - DNA, 25 bp, Probe Sequence
tacaggttgctttgatcgacacatc

SEQ ID NO: 300194 - DNA, 25 bp, Probe Sequence
tacaggttgctttgatcgacacatc

SEQ ID NO: 300195 - DNA, 25 bp, Probe Sequence
tacaggttgctttgatcgacacatc

SEQ ID NO: 300196 - DNA, 25 bp, Probe Sequence
taaggttggtagtctgtgcctctgg

SEQ ID NO: 300197 - DNA, 25 bp, Probe Sequence
taacgtcggtagttctgctttatta

SEQ ID NO: 300198 - DNA, 25 bp, Probe Sequence
taacagcagggacaccgtttttatt

SEQ ID NO: 300199 - DNA, 25 bp, Probe Sequence
taagcgcgttaatcccttattttag

SEQ ID NO: 300200 - DNA, 25 bp, Probe Sequence
taagggcattttacccttgcagttt

SEQ ID NO: 300201 - DNA, 25 bp, Probe Sequence
taagggaaactttcctctgccttga

SEQ ID NO: 300202 - DNA, 25 bp, Probe Sequence
taaggtgaaaccgtgtctctactaa

SEQ ID NO: 300203 - DNA, 25 bp, Probe Sequence
taacgaaagggctggactactataa

SEQ ID NO: 300204 - DNA, 25 bp, Probe Sequence
taacgaaaaggcctgcatgaaactt

SEQ ID NO: 300205 - DNA, 25 bp, Probe Sequence
tacaggcagcgatggtctcagaaac

SEQ ID NO: 300206 - DNA, 25 bp, Probe Sequence
tacagctggcaaggttcatagaata

SEQ ID NO: 300207 - DNA, 25 bp, Probe Sequence
taagctggaaagtcactggaataac

SEQ ID NO: 300208 - DNA, 25 bp, Probe Sequence
taagctgaagaaaactgtgcccaca

SEQ ID NO: 300209 - DNA, 25 bp, Probe Sequence
taagctgcatagttgtactgtgcct

SEQ ID NO: 300210 - DNA, 25 bp, Probe Sequence
taagtcacactactgcagctgtctt

SEQ ID NO: 300211 - DNA, 25 bp, Probe Sequence
taagcacagactcgtcagctcggtt

SEQ ID NO: 300212 - DNA, 25 bp, Probe Sequence
taagcacatgatggctgggcaccgt

SEQ ID NO: 300213 - DNA, 25 bp, Probe Sequence
taagcactgatgtcatatggatcca

SEQ ID NO: 300214 - DNA, 25 bp, Probe Sequence
taagcatgtgtgttgaatgtcacaa

SEQ ID NO: 300215 - DNA, 25 bp, Probe Sequence
taagatattactattcagcagaact

SEQ ID NO: 300216 - DNA, 25 bp, Probe Sequence
taagacattagctgtctaggcgtgt

SEQ ID NO: 300217 - DNA, 25 bp, Probe Sequence
tagagaaaaccgtccaggccagtta

SEQ ID NO: 300218 - DNA, 25 bp, Probe Sequence
taaaaaagccacttagttcagtcaa

SEQ ID NO: 300219 - DNA, 25 bp, Probe Sequence
taagaaaaccggccacttcagcaac

SEQ ID NO: 300220 - DNA, 25 bp, Probe Sequence
taagacacaaataacctttgcaaac

SEQ ID NO: 300221 - DNA, 25 bp, Probe Sequence
tagagatcatgcgaactacagtttg

SEQ ID NO: 300222 - DNA, 25 bp, Probe Sequence
taagccatgcatgtctaagtacgca

SEQ ID NO: 300223 - DNA, 25 bp, Probe Sequence
taagccatgcatgtctaagtacgca

SEQ ID NO: 300224 - DNA, 25 bp, Probe Sequence
taacctgatcgtggagagtgaggct

SEQ ID NO: 300225 - DNA, 25 bp, Probe Sequence
taaccatcacgagagtctgcagcac

SEQ ID NO: 300226 - DNA, 25 bp, Probe Sequence
taactcatccctgatggtctgtgag

SEQ ID NO: 300227 - DNA, 25 bp, Probe Sequence
tacaccaccttcaaggcttgtgagc

SEQ ID NO: 300228 - DNA, 25 bp, Probe Sequence
taagtcatcgctataccatggtgat

SEQ ID NO: 300229 - DNA, 25 bp, Probe Sequence
taagatgctcggattcactctgtga

SEQ ID NO: 300230 - DNA, 25 bp, Probe Sequence
taagattagggtggcattgctttta

SEQ ID NO: 300231 - DNA, 25 bp, Probe Sequence
taagtcaagggttcactgcatttct

SEQ ID NO: 300232 - DNA, 25 bp, Probe Sequence
taagtaccgattccacatcattcca

SEQ ID NO: 300233 - DNA, 25 bp, Probe Sequence
taagttcaatgttcccatcactcga

SEQ ID NO: 300234 - DNA, 25 bp, Probe Sequence
taagtgttgatgtatcacctcccca

SEQ ID NO: 300235 - DNA, 25 bp, Probe Sequence
taagtgttgatgtatcacctcccca

SEQ ID NO: 300236 - DNA, 25 bp, Probe Sequence
taagtgtggcagtacccatgaggac

SEQ ID NO: 300237 - DNA, 25 bp, Probe Sequence
taagtgattgagtacctgcagagct

SEQ ID NO: 300238 - DNA, 25 bp, Probe Sequence
taagagcatgctccaacacagcgaa

SEQ ID NO: 300239 - DNA, 25 bp, Probe Sequence
taagagcatcactgatccctggaca

SEQ ID NO: 300240 - DNA, 25 bp, Probe Sequence
taagagcatatctcgccaggatgta

SEQ ID NO: 300241 - DNA, 25 bp, Probe Sequence
taagcagtacttggcctgtatataa

SEQ ID NO: 300242 - DNA, 25 bp, Probe Sequence
taagtttttgccattataattttga

SEQ ID NO: 300243 - DNA, 25 bp, Probe Sequence
taactttttgctcttataattttat

SEQ ID NO: 300244 - DNA, 25 bp, Probe Sequence
taaaattttctgcttggacctcttt

SEQ ID NO: 300245 - DNA, 25 bp, Probe Sequence
taaaattttctgcttggacctcttt

SEQ ID NO: 300246 - DNA, 25 bp, Probe Sequence
taaagtatttactatatggcccttt

SEQ ID NO: 300247 - DNA, 25 bp, Probe Sequence
taacactgatttaagttggcccctt

SEQ ID NO: 300248 - DNA, 25 bp, Probe Sequence
taagcctggttaaattggtcatcta

SEQ ID NO: 300249 - DNA, 25 bp, Probe Sequence
taagccctgttacctgctggatatt

SEQ ID NO: 300250 - DNA, 25 bp, Probe Sequence
taactcgtggtgttgccatggcgat

SEQ ID NO: 300251 - DNA, 25 bp, Probe Sequence
taagctggggtgatggatgtggtaa

SEQ ID NO: 300252 - DNA, 25 bp, Probe Sequence
taagctggggtagggtgatggcagt

SEQ ID NO: 300253 - DNA, 25 bp, Probe Sequence
taactgccggtggggagaacttcgc

SEQ ID NO: 300254 - DNA, 25 bp, Probe Sequence
taactggcagggtgcccagtctacc

SEQ ID NO: 300255 - DNA, 25 bp, Probe Sequence
taagatggccgattctgcccgttga

SEQ ID NO: 300256 - DNA, 25 bp, Probe Sequence
taagcagaccaagcgcttcgtggca

SEQ ID NO: 300257 - DNA, 25 bp, Probe Sequence
taacaagctcacgcagttgggcact

SEQ ID NO: 300258 - DNA, 25 bp, Probe Sequence
taacacgctacagccttggcttctt

SEQ ID NO: 300259 - DNA, 25 bp, Probe Sequence
taagctcagtaaagccttggtcttc

SEQ ID NO: 300260 - DNA, 25 bp, Probe Sequence
taagtaaagcacctcctggtattcc

SEQ ID NO: 300261 - DNA, 25 bp, Probe Sequence
taactatctacctcactggtttttt

SEQ ID NO: 300262 - DNA, 25 bp, Probe Sequence
taagatacatagcctcccttttttt

SEQ ID NO: 300263 - DNA, 25 bp, Probe Sequence
ttgagaaaccaatcctcttttgttt

SEQ ID NO: 300264 - DNA, 25 bp, Probe Sequence
taaaaaccctacttggttgtgatgt

SEQ ID NO: 300265 - DNA, 25 bp, Probe Sequence
taaataaccccattctttgcttgaa

SEQ ID NO: 300266 - DNA, 25 bp, Probe Sequence
taaaaaactcctgtcttgctagaca

SEQ ID NO: 300267 - DNA, 25 bp, Probe Sequence
taaaataacttcggacttatactga

SEQ ID NO: 300268 - DNA, 25 bp, Probe Sequence
taaacaagccattgcagcggcattt

SEQ ID NO: 300269 - DNA, 25 bp, Probe Sequence
taaaatcagaattcaggtccgtcct

SEQ ID NO: 300270 - DNA, 25 bp, Probe Sequence
taaaatcagaattcaggtccgtcct

SEQ ID NO: 300271 - DNA, 25 bp, Probe Sequence
taaaatacctggagtgctcggcgct

SEQ ID NO: 300272 - DNA, 25 bp, Probe Sequence
taaaaaccagtcgggtgtggcgtct

SEQ ID NO: 300273 - DNA, 25 bp, Probe Sequence
tacaaagaatgcttcctgggtggag

SEQ ID NO: 300274 - DNA, 25 bp, Probe Sequence
taagacacagacgtaaggcgtggag

SEQ ID NO: 300275 - DNA, 25 bp, Probe Sequence
taagaagcagccatggtggcgtaag

SEQ ID NO: 300276 - DNA, 25 bp, Probe Sequence
taagagcaccccatctgggaagagg

SEQ ID NO: 300277 - DNA, 25 bp, Probe Sequence
taagactctcccaggatggaacaca

SEQ ID NO: 300278 - DNA, 25 bp, Probe Sequence
taagccctctccaaaatgaaatcaa

SEQ ID NO: 300279 - DNA, 25 bp, Probe Sequence
tacacggctcccgaaagtatgcagc

SEQ ID NO: 300280 - DNA, 25 bp, Probe Sequence
taagcgatgtgtcctcaaggtccac

SEQ ID NO: 300281 - DNA, 25 bp, Probe Sequence
taagatatggtgccctgtgtatccc

SEQ ID NO: 300282 - DNA, 25 bp, Probe Sequence
taacattgggtcctgggtctttcat

SEQ ID NO: 300283 - DNA, 25 bp, Probe Sequence
taacccgtatgccggggcatttcca

SEQ ID NO: 300284 - DNA, 25 bp, Probe Sequence
taacccagtagtttggagtatccca

SEQ ID NO: 300285 - DNA, 25 bp, Probe Sequence
taacttactatgaccttgaattcct

SEQ ID NO: 300286 - DNA, 25 bp, Probe Sequence
taacttatgtggactgtaaatgttt

SEQ ID NO: 300287 - DNA, 25 bp, Probe Sequence
taacccatggtgattccggtttttg

SEQ ID NO: 300288 - DNA, 25 bp, Probe Sequence
taagctcaagagtgtttcggttggt

SEQ ID NO: 300289 - DNA, 25 bp, Probe Sequence
taagccataatctcttagtggattg

SEQ ID NO: 300290 - DNA, 25 bp, Probe Sequence
taagccaagaacttacagggatttt

SEQ ID NO: 300291 - DNA, 25 bp, Probe Sequence
taagcccaacaagggcaggtatttt

SEQ ID NO: 300292 - DNA, 25 bp, Probe Sequence
taaaaaccatgacgtcggacatttt

SEQ ID NO: 300293 - DNA, 25 bp, Probe Sequence
taacaaacggagtactgagtcttct

SEQ ID NO: 300294 - DNA, 25 bp, Probe Sequence
taagttattgtgaaactgagtttcc

SEQ ID NO: 300295 - DNA, 25 bp, Probe Sequence
taagcattattattcaactggtcta

SEQ ID NO: 300296 - DNA, 25 bp, Probe Sequence
taagcactgtgttccagaccgtgtc

SEQ ID NO: 300297 - DNA, 25 bp, Probe Sequence
taaccagctgttcagaaccttctga

SEQ ID NO: 300298 - DNA, 25 bp, Probe Sequence
taaccagtctttaaggttttgcagg

SEQ ID NO: 300299 - DNA, 25 bp, Probe Sequence
taaccagtccttgatgttgtgtgac

SEQ ID NO: 300300 - DNA, 25 bp, Probe Sequence
taactcaatcctctgatcagggtga

SEQ ID NO: 300301 - DNA, 25 bp, Probe Sequence
tacacgagacctccgtacagggaag

SEQ ID NO: 300302 - DNA, 25 bp, Probe Sequence
taactagcataccccgaagtggaga

SEQ ID NO: 300303 - DNA, 25 bp, Probe Sequence
taagaccatcaccctcgaagtggag

SEQ ID NO: 300304 - DNA, 25 bp, Probe Sequence
taaaccctacctggataaggataag

SEQ ID NO: 300305 - DNA, 25 bp, Probe Sequence
taagccccgtggaccaaaggaaatg

SEQ ID NO: 300306 - DNA, 25 bp, Probe Sequence
taagccccgtggaccaaaggaaatg

SEQ ID NO: 300307 - DNA, 25 bp, Probe Sequence
taaccccctgtggcacataaggcac

SEQ ID NO: 300308 - DNA, 25 bp, Probe Sequence
taacccccagtgccacagagaagac

SEQ ID NO: 300309 - DNA, 25 bp, Probe Sequence
taacttcaggtacagcagagataaa

SEQ ID NO: 300310 - DNA, 25 bp, Probe Sequence
taacttgcgcagaaaacaagatgag

SEQ ID NO: 300311 - DNA, 25 bp, Probe Sequence
taagctccgagagaaccagctgccc

SEQ ID NO: 300312 - DNA, 25 bp, Probe Sequence
taaatccaggatcaacctgcctgcc

SEQ ID NO: 300313 - DNA, 25 bp, Probe Sequence
taaccttgaatccaaagtgtctgca

SEQ ID NO: 300314 - DNA, 25 bp, Probe Sequence
taaccttgcgaggtacagtggctca

SEQ ID NO: 300315 - DNA, 25 bp, Probe Sequence
taacctgctgcacggatacatggga

SEQ ID NO: 300316 - DNA, 25 bp, Probe Sequence
taaccatagcctcgatcatcaagaa

SEQ ID NO: 300317 - DNA, 25 bp, Probe Sequence
taacatatgagagtgctaaccagca

SEQ ID NO: 300318 - DNA, 25 bp, Probe Sequence
taacatgggagtcacacaagccgcc

SEQ ID NO: 300319 - DNA, 25 bp, Probe Sequence
taaaggggcttaagtcagcctgcat

SEQ ID NO: 300320 - DNA, 25 bp, Probe Sequence
taagagcagaggtttactaggccaa

SEQ ID NO: 300321 - DNA, 25 bp, Probe Sequence
taagctaagcccttactagaccaat

SEQ ID NO: 300322 - DNA, 25 bp, Probe Sequence
taagttaggcagtcttctaccaaat

SEQ ID NO: 300323 - DNA, 25 bp, Probe Sequence
taagatctactattttataccaaat

SEQ ID NO: 300324 - DNA, 25 bp, Probe Sequence
taaatctactactaaaacgtccagt

SEQ ID NO: 300325 - DNA, 25 bp, Probe Sequence
taaactattgactctatacctctaa

SEQ ID NO: 300326 - DNA, 25 bp, Probe Sequence
taacttagtgcaaacataactttaa

SEQ ID NO: 300327 - DNA, 25 bp, Probe Sequence
taactaagacacaaataacctttgc

SEQ ID NO: 300328 - DNA, 25 bp, Probe Sequence
taagccaactcgaaaaagccgtaca

SEQ ID NO: 300329 - DNA, 25 bp, Probe Sequence
taacgaactcaggaaagcaccggaa

SEQ ID NO: 300330 - DNA, 25 bp, Probe Sequence
taacagacactacataagacattga

SEQ ID NO: 300331 - DNA, 25 bp, Probe Sequence
taagcagacctacagcactgagccc

SEQ ID NO: 300332 - DNA, 25 bp, Probe Sequence
taagcacaggtccaacttggccctg

SEQ ID NO: 300333 - DNA, 25 bp, Probe Sequence
taagaatttgcatacttacctagtg

SEQ ID NO: 300334 - DNA, 25 bp, Probe Sequence
taaactactgaactgttacctaggt

SEQ ID NO: 300335 - DNA, 25 bp, Probe Sequence
taacctcactgaattgctggaacca

SEQ ID NO: 300336 - DNA, 25 bp, Probe Sequence
taagaactctgatttctgtgctccc

SEQ ID NO: 300337 - DNA, 25 bp, Probe Sequence
taagatctgctttttctatttctcc

SEQ ID NO: 300338 - DNA, 25 bp, Probe Sequence
taagttcagcacttgtctcatttta

SEQ ID NO: 300339 - DNA, 25 bp, Probe Sequence
taagttcagccattattacttttgg

SEQ ID NO: 300340 - DNA, 25 bp, Probe Sequence
taagttcccatttgaaattgctggc

SEQ ID NO: 300341 - DNA, 25 bp, Probe Sequence
taagcttcaaactaggtattctggg

SEQ ID NO: 300342 - DNA, 25 bp, Probe Sequence
taagccgcaagacatgacgttaggg

SEQ ID NO: 300343 - DNA, 25 bp, Probe Sequence
taacctgccaacatactttaagtag

SEQ ID NO: 300344 - DNA, 25 bp, Probe Sequence
taacctgccaacatactttaagtag

SEQ ID NO: 300345 - DNA, 25 bp, Probe Sequence
tacagccttaatattttcctagtag

SEQ ID NO: 300346 - DNA, 25 bp, Probe Sequence
taaccttaatttcctatgtatttca

SEQ ID NO: 300347 - DNA, 25 bp, Probe Sequence
tacacctctaaaatggtagttttgt

SEQ ID NO: 300348 - DNA, 25 bp, Probe Sequence
taacttcttcaactatggacttttt

SEQ ID NO: 300349 - DNA, 25 bp, Probe Sequence
taacattctttgcattgtacttgta

SEQ ID NO: 300350 - DNA, 25 bp, Probe Sequence
taagcatttattggttttttctagg

SEQ ID NO: 300351 - DNA, 25 bp, Probe Sequence
taaatcctagtgtgtttatacaagg

SEQ ID NO: 300352 - DNA, 25 bp, Probe Sequence
taagcacctattttggaaaactggg

SEQ ID NO: 300353 - DNA, 25 bp, Probe Sequence
taagactccattttgcaataaacgt

SEQ ID NO: 300354 - DNA, 25 bp, Probe Sequence
taagaaccatagttccataataatt

SEQ ID NO: 300355 - DNA, 25 bp, Probe Sequence
taagcactcctagcccaatatttat

SEQ ID NO: 300356 - DNA, 25 bp, Probe Sequence
taaccatggtgagaccctatctcta

SEQ ID NO: 300357 - DNA, 25 bp, Probe Sequence
taaccagggaactgcctgcatcttt

SEQ ID NO: 300358 - DNA, 25 bp, Probe Sequence
taaacctgggactggctacatactt

SEQ ID NO: 300359 - DNA, 25 bp, Probe Sequence
taaaccggtggcttctgattctaca

SEQ ID NO: 300360 - DNA, 25 bp, Probe Sequence
taacacggcgatgaacgtcttacaa

SEQ ID NO: 300361 - DNA, 25 bp, Probe Sequence
taagagaggactgaacagctcttcc

SEQ ID NO: 300362 - DNA, 25 bp, Probe Sequence
taagaagaaacgtgcctgcttcccc

SEQ ID NO: 300363 - DNA, 25 bp, Probe Sequence
taagaagaaacgtgcctgcttcccc

SEQ ID NO: 300364 - DNA, 25 bp, Probe Sequence
taagaagaaacgtgcctgcttcccc

SEQ ID NO: 300365 - DNA, 25 bp, Probe Sequence
taacaaaactaaccctgctgtcctt

SEQ ID NO: 300366 - DNA, 25 bp, Probe Sequence
taacaaaactaaccctgctgtcctt

SEQ ID NO: 300367 - DNA, 25 bp, Probe Sequence
taaaaaccaaactctgtgtcagcat

SEQ ID NO: 300368 - DNA, 25 bp, Probe Sequence
taaaatactaaacgtgtgtcttcaa

SEQ ID NO: 300369 - DNA, 25 bp, Probe Sequence
taaaattgctggtgcgctatactta

SEQ ID NO: 300370 - DNA, 25 bp, Probe Sequence
taaaatatccgctgtgcttcacttc

SEQ ID NO: 300371 - DNA, 25 bp, Probe Sequence
taacaacccacaggatggtcacccc

SEQ ID NO: 300372 - DNA, 25 bp, Probe Sequence
taagcttcctaagatcaaaccctgc

SEQ ID NO: 300373 - DNA, 25 bp, Probe Sequence
taagttgcactgacaaaaataccaa

SEQ ID NO: 300374 - DNA, 25 bp, Probe Sequence
taagaagcacttaaatcactccaaa

SEQ ID NO: 300375 - DNA, 25 bp, Probe Sequence
taagagagatttactgctatcccag

SEQ ID NO: 300376 - DNA, 25 bp, Probe Sequence
taagcgatatttattatctgcaagg

SEQ ID NO: 300377 - DNA, 25 bp, Probe Sequence
taacgtgtcctgctttggcagagag

SEQ ID NO: 300378 - DNA, 25 bp, Probe Sequence
taaccgtgcttctttcatgtcaggc

SEQ ID NO: 300379 - DNA, 25 bp, Probe Sequence
taagccatgagcttcgttctacgtg

SEQ ID NO: 300380 - DNA, 25 bp, Probe Sequence
taagcactggtaatttctacctgta

SEQ ID NO: 300381 - DNA, 25 bp, Probe Sequence
taagcagagagttatttgtgactat

SEQ ID NO: 300382 - DNA, 25 bp, Probe Sequence
taactgacagatgttaaagctttct

SEQ ID NO: 300383 - DNA, 25 bp, Probe Sequence
taactgctgcagggcttaatacatt

SEQ ID NO: 300384 - DNA, 25 bp, Probe Sequence
taacatgctgcccctaagtgaatct

SEQ ID NO: 300385 - DNA, 25 bp, Probe Sequence
taactgcccacttggcagtacatca

SEQ ID NO: 300386 - DNA, 25 bp, Probe Sequence
taactctccagttatcagtactccc

SEQ ID NO: 300387 - DNA, 25 bp, Probe Sequence
taaaatgcctgtcaactgcacttcc

SEQ ID NO: 300388 - DNA, 25 bp, Probe Sequence
taaaggcactttcactgcctgtcac

SEQ ID NO: 300389 - DNA, 25 bp, Probe Sequence
taagaggctttggccaatgcctata

SEQ ID NO: 300390 - DNA, 25 bp, Probe Sequence
taaagagctgaaaccaacctagttt

SEQ ID NO: 300391 - DNA, 25 bp, Probe Sequence
taacagatgagctgtcgaacctccc

SEQ ID NO: 300392 - DNA, 25 bp, Probe Sequence
taagagtatgcagccaggcacatcc

SEQ ID NO: 300393 - DNA, 25 bp, Probe Sequence
taagcaatgttaacagtgaactgtg

SEQ ID NO: 300394 - DNA, 25 bp, Probe Sequence
taagcacctatggacttccagctgg

SEQ ID NO: 300395 - DNA, 25 bp, Probe Sequence
taagcatcctgagctcttcgaagca

SEQ ID NO: 300396 - DNA, 25 bp, Probe Sequence
taagcacacattttattcacataga

SEQ ID NO: 300397 - DNA, 25 bp, Probe Sequence
taactccatgtctctgagcattaga

SEQ ID NO: 300398 - DNA, 25 bp, Probe Sequence
taactggcattttgtagatgtggtt

SEQ ID NO: 300399 - DNA, 25 bp, Probe Sequence
taactatagcattatggtgagtgga

SEQ ID NO: 300400 - DNA, 25 bp, Probe Sequence
taacattggcagtcgaggagtcaga

SEQ ID NO: 300401 - DNA, 25 bp, Probe Sequence
taagcatagatctgccagtggttgt

SEQ ID NO: 300402 - DNA, 25 bp, Probe Sequence
taagaagtcgtggctaggtgttgtt

SEQ ID NO: 300403 - DNA, 25 bp, Probe Sequence
taagacttgtgtttgaggtattttt

SEQ ID NO: 300404 - DNA, 25 bp, Probe Sequence
taagagttctcttatgtattatttt

SEQ ID NO: 300405 - DNA, 25 bp, Probe Sequence
taagagcacctcattcctgtgtttt

SEQ ID NO: 300406 - DNA, 25 bp, Probe Sequence
taagagacaggacgtagctggattt

SEQ ID NO: 300407 - DNA, 25 bp, Probe Sequence
taagcgatcatgtttctccagtatt

SEQ ID NO: 300408 - DNA, 25 bp, Probe Sequence
taagagtagtgtgcccagatctgca

SEQ ID NO: 300409 - DNA, 25 bp, Probe Sequence
taagaaacattgctaatgcattgca

SEQ ID NO: 300410 - DNA, 25 bp, Probe Sequence
taaactacatcctgaactcgacgtc

SEQ ID NO: 300411 - DNA, 25 bp, Probe Sequence
taaaaacacatcttaactccacgct

SEQ ID NO: 300412 - DNA, 25 bp, Probe Sequence
taaaatgtcactttacccctggata

SEQ ID NO: 300413 - DNA, 25 bp, Probe Sequence
taaaatgccaggttttttatggtca

SEQ ID NO: 300414 - DNA, 25 bp, Probe Sequence
taaaaagcaggagttcgtttagtgg

SEQ ID NO: 300415 - DNA, 25 bp, Probe Sequence
taagaatactgtgttctgtgttatt

SEQ ID NO: 300416 - DNA, 25 bp, Probe Sequence
taaaatcactttgcctgggatatga

SEQ ID NO: 300417 - DNA, 25 bp, Probe Sequence
taaagatagccagcctagaggtatg

SEQ ID NO: 300418 - DNA, 25 bp, Probe Sequence
taagaaatcagatcccagggtgaga

SEQ ID NO: 300419 - DNA, 25 bp, Probe Sequence
taagagaatcaagccccggccagaa

SEQ ID NO: 300420 - DNA, 25 bp, Probe Sequence
taacgaacaacagcaacgtcttgaa

SEQ ID NO: 300421 - DNA, 25 bp, Probe Sequence
taaccaacaccaaacacgtggatca

SEQ ID NO: 300422 - DNA, 25 bp, Probe Sequence
taaccacagccctaaatccatgata

SEQ ID NO: 300423 - DNA, 25 bp, Probe Sequence
taagccatcccacaagttctatacc

SEQ ID NO: 300424 - DNA, 25 bp, Probe Sequence
taacactccaatgatagttttcccg

SEQ ID NO: 300425 - DNA, 25 bp, Probe Sequence
taaactcacaaggtggttctttcca

SEQ ID NO: 300426 - DNA, 25 bp, Probe Sequence
taagaaccaagcttgggtttctcta

SEQ ID NO: 300427 - DNA, 25 bp, Probe Sequence
taaagcaccagtctggggtcgcctg

SEQ ID NO: 300428 - DNA, 25 bp, Probe Sequence
taaacactgagggggaagacagcca

SEQ ID NO: 300429 - DNA, 25 bp, Probe Sequence
taaagccgagccagccaaaatagaa

SEQ ID NO: 300430 - DNA, 25 bp, Probe Sequence
taaaccatgtccccaggaaatttga

SEQ ID NO: 300431 - DNA, 25 bp, Probe Sequence
taaaactgataatcggaagacatat

SEQ ID NO: 300432 - DNA, 25 bp, Probe Sequence
taaaacattacagcagttaagtctt

SEQ ID NO: 300433 - DNA, 25 bp, Probe Sequence
taaaactgtggcaccttaattttga

SEQ ID NO: 300434 - DNA, 25 bp, Probe Sequence
taaaacgagggtccttccctcatgg

SEQ ID NO: 300435 - DNA, 25 bp, Probe Sequence
taagcctcgggctaatttcccatag

SEQ ID NO: 300436 - DNA, 25 bp, Probe Sequence
taagccccaggctgaatacccaggg

SEQ ID NO: 300437 - DNA, 25 bp, Probe Sequence
taagactccgtttaatttccagaag

SEQ ID NO: 300438 - DNA, 25 bp, Probe Sequence
taagacccgttcaaattatcttgct

SEQ ID NO: 300439 - DNA, 25 bp, Probe Sequence
taagaaccctttatgtaccatctgg

SEQ ID NO: 300440 - DNA, 25 bp, Probe Sequence
tacagacagcctgcgtgttgtaaat

SEQ ID NO: 300441 - DNA, 25 bp, Probe Sequence
taagaccccacctattctagaatta

SEQ ID NO: 300442 - DNA, 25 bp, Probe Sequence
taaactcccccaatacttggattga

SEQ ID NO: 300443 - DNA, 25 bp, Probe Sequence
taagactacaccattactagttgga

SEQ ID NO: 300444 - DNA, 25 bp, Probe Sequence
taagactcatatggttgtggctaat

SEQ ID NO: 300445 - DNA, 25 bp, Probe Sequence
taagagccatcaagggccctcattt

SEQ ID NO: 300446 - DNA, 25 bp, Probe Sequence
taagcatctataaattgacttcttt

SEQ ID NO: 300447 - DNA, 25 bp, Probe Sequence
taagcatatgttacttaccttgtta

SEQ ID NO: 300448 - DNA, 25 bp, Probe Sequence
taaacgttttgtgccttggtctaat

SEQ ID NO: 300449 - DNA, 25 bp, Probe Sequence
taagaatgttctagggcactctggg

SEQ ID NO: 300450 - DNA, 25 bp, Probe Sequence
tacagcaactacagcgtgaacgggg

SEQ ID NO: 300451 - DNA, 25 bp, Probe Sequence
taagcctaaaggctgggcgcgatgg

SEQ ID NO: 300452 - DNA, 25 bp, Probe Sequence
taacctgcaataggcgggtgggtgc

SEQ ID NO: 300453 - DNA, 25 bp, Probe Sequence
taaaccaataactaggctggaccct

SEQ ID NO: 300454 - DNA, 25 bp, Probe Sequence
taaacccataggtagtcaggaacca

SEQ ID NO: 300455 - DNA, 25 bp, Probe Sequence
taagcccctagaggcagatcaggta

SEQ ID NO: 300456 - DNA, 25 bp, Probe Sequence
taagcccagcatttgagagaaggta

SEQ ID NO: 300457 - DNA, 25 bp, Probe Sequence
taaccccatatttagatacatgatt

SEQ ID NO: 300458 - DNA, 25 bp, Probe Sequence
taacgtgcagttttaatatctacta

SEQ ID NO: 300459 - DNA, 25 bp, Probe Sequence
taacttgccttacatatcagccctc

SEQ ID NO: 300460 - DNA, 25 bp, Probe Sequence
tacactaccaaacatatcaccttaa

SEQ ID NO: 300461 - DNA, 25 bp, Probe Sequence
taaacacaaaaggtaaactctccat

SEQ ID NO: 300462 - DNA, 25 bp, Probe Sequence
taagaaagaaacttcaacactgcca

SEQ ID NO: 300463 - DNA, 25 bp, Probe Sequence
taaacaagaaacccaacaacagctt

SEQ ID NO: 300464 - DNA, 25 bp, Probe Sequence
taaaaaaatcacctcaacagccctg

SEQ ID NO: 300465 - DNA, 25 bp, Probe Sequence
taaaaaaaagagtcagaggccctag

SEQ ID NO: 300466 - DNA, 25 bp, Probe Sequence
taaaaagtatgagctcagggccccg

SEQ ID NO: 300467 - DNA, 25 bp, Probe Sequence
taacagagaggggtctcagggccca

SEQ ID NO: 300468 - DNA, 25 bp, Probe Sequence
taacaagtagccaagtcacgtccca

SEQ ID NO: 300469 - DNA, 25 bp, Probe Sequence
taaaacagactcaatgtccccctca

SEQ ID NO: 300470 - DNA, 25 bp, Probe Sequence
taaaagtcactttattcctccatca

SEQ ID NO: 300471 - DNA, 25 bp, Probe Sequence
taaaagtcactttattcctccatca

SEQ ID NO: 300472 - DNA, 25 bp, Probe Sequence
taagacatatctctaattccatcca

SEQ ID NO: 300473 - DNA, 25 bp, Probe Sequence
taagacctttctataccatgcctga

SEQ ID NO: 300474 - DNA, 25 bp, Probe Sequence
taagaactttgttttcctcctatca

SEQ ID NO: 300475 - DNA, 25 bp, Probe Sequence
taagaactttgttttcctcctatca

SEQ ID NO: 300476 - DNA, 25 bp, Probe Sequence
taagaactttgatttccattccatt

SEQ ID NO: 300477 - DNA, 25 bp, Probe Sequence
taaataggtcagtcttgacatttca

SEQ ID NO: 300478 - DNA, 25 bp, Probe Sequence
taactcatggtgtggctaatctaca

SEQ ID NO: 300479 - DNA, 25 bp, Probe Sequence
taagcacattgttagagtattatca

SEQ ID NO: 300480 - DNA, 25 bp, Probe Sequence
taagcacacatgtaattgatgattt

SEQ ID NO: 300481 - DNA, 25 bp, Probe Sequence
taagccaatgtggagtctgatcttt

SEQ ID NO: 300482 - DNA, 25 bp, Probe Sequence
taacccatgtgggatgtcatctttt

SEQ ID NO: 300483 - DNA, 25 bp, Probe Sequence
taacacctgtgtgtgtcaccagtat

SEQ ID NO: 300484 - DNA, 25 bp, Probe Sequence
taaccagtggagttgcatgccctgt

SEQ ID NO: 300485 - DNA, 25 bp, Probe Sequence
taaacatgtacgttctgctgcctga

SEQ ID NO: 300486 - DNA, 25 bp, Probe Sequence
taacctgataaattcatagcccaac

SEQ ID NO: 300487 - DNA, 25 bp, Probe Sequence
taacctctacagacacaatcctcaa

SEQ ID NO: 300488 - DNA, 25 bp, Probe Sequence
taacctctagagtcactgatacaca

SEQ ID NO: 300489 - DNA, 25 bp, Probe Sequence
taagcaattaattcactaagctgcc

SEQ ID NO: 300490 - DNA, 25 bp, Probe Sequence
taagcattccgtccatctaagctca

SEQ ID NO: 300491 - DNA, 25 bp, Probe Sequence
tacagatcctccagatctaactatt

SEQ ID NO: 300492 - DNA, 25 bp, Probe Sequence
taagctcctgacactctatcttatt

SEQ ID NO: 300493 - DNA, 25 bp, Probe Sequence
taagccacacacattgttgctgcta

SEQ ID NO: 300494 - DNA, 25 bp, Probe Sequence
taactctgacacaattggatgctgt

SEQ ID NO: 300495 - DNA, 25 bp, Probe Sequence
taagctttatgccattgggctgctg

SEQ ID NO: 300496 - DNA, 25 bp, Probe Sequence
taacttatttcaagggtgctgtgct

SEQ ID NO: 300497 - DNA, 25 bp, Probe Sequence
taacttaatcacagaggtgacatcc

SEQ ID NO: 300498 - DNA, 25 bp, Probe Sequence
taaccaacaccaaagaaacatccaa

SEQ ID NO: 300499 - DNA, 25 bp, Probe Sequence
tagaagcggccaggaagaaaaccac

SEQ ID NO: 300500 - DNA, 25 bp, Probe Sequence
taaaagctccaggcagaaaagaccc

SEQ ID NO: 300501 - DNA, 25 bp, Probe Sequence
taaaactcacgtggtcgtagctcct

SEQ ID NO: 300502 - DNA, 25 bp, Probe Sequence
taaaatatccggttgcgtaccagtt

SEQ ID NO: 300503 - DNA, 25 bp, Probe Sequence
taaaatatcactcatccttaaactt

SEQ ID NO: 300504 - DNA, 25 bp, Probe Sequence
taaaagtaactcaaccttaagcaat

SEQ ID NO: 300505 - DNA, 25 bp, Probe Sequence
taagaagtctttagaccttaatgta

SEQ ID NO: 300506 - DNA, 25 bp, Probe Sequence
taaagacctctttgacctgaacagc

SEQ ID NO: 300507 - DNA, 25 bp, Probe Sequence
taaagacccaactcaatggattgct

SEQ ID NO: 300508 - DNA, 25 bp, Probe Sequence
taaaaaccacactcagtctttgttc

SEQ ID NO: 300509 - DNA, 25 bp, Probe Sequence
taaaatacccatcttgctttctttt

SEQ ID NO: 300510 - DNA, 25 bp, Probe Sequence
taaaattccactgttttatctaatt

SEQ ID NO: 300511 - DNA, 25 bp, Probe Sequence
taaaattccgagtctttctcactgc

SEQ ID NO: 300512 - DNA, 25 bp, Probe Sequence
taaaattccgagtctttctcactgc

SEQ ID NO: 300513 - DNA, 25 bp, Probe Sequence
taaaacttcgttctttatcagcctc

SEQ ID NO: 300514 - DNA, 25 bp, Probe Sequence
taaaacattttcttggtgttagctt

SEQ ID NO: 300515 - DNA, 25 bp, Probe Sequence
taaactaattgttcttttgttgctt

SEQ ID NO: 300516 - DNA, 25 bp, Probe Sequence
taaactggactagccttatttgcaa

SEQ ID NO: 300517 - DNA, 25 bp, Probe Sequence
taaactcgactaaaacaagtgtata

SEQ ID NO: 300518 - DNA, 25 bp, Probe Sequence
taaaatcgttcatagacttctgtaa

SEQ ID NO: 300519 - DNA, 25 bp, Probe Sequence
taaccacgtctctgcaattctcgtg

SEQ ID NO: 300520 - DNA, 25 bp, Probe Sequence
taaccagtccttcgtattctcgtat

SEQ ID NO: 300521 - DNA, 25 bp, Probe Sequence
taaccacccagaggctcatttctgt

SEQ ID NO: 300522 - DNA, 25 bp, Probe Sequence
taaccatacaactctcatttcctta

SEQ ID NO: 300523 - DNA, 25 bp, Probe Sequence
taactataaatctctagaattctgt

SEQ ID NO: 300524 - DNA, 25 bp, Probe Sequence
taagcagctaaattttctgaaactg

SEQ ID NO: 300525 - DNA, 25 bp, Probe Sequence
taagcagctaaattttctgaaactg

SEQ ID NO: 300526 - DNA, 25 bp, Probe Sequence
taaatctaagtttggtgcgaacgcc

SEQ ID NO: 300527 - DNA, 25 bp, Probe Sequence
taaactggaggtaggtcgatttgga

SEQ ID NO: 300528 - DNA, 25 bp, Probe Sequence
taaattaagtccctgtagatttgga

SEQ ID NO: 300529 - DNA, 25 bp, Probe Sequence
taaaagacagtggccttcagattgg

SEQ ID NO: 300530 - DNA, 25 bp, Probe Sequence
taaaagtcgcattccatatctttgg

SEQ ID NO: 300531 - DNA, 25 bp, Probe Sequence
taaaaccccagccaactcattgggt

SEQ ID NO: 300532 - DNA, 25 bp, Probe Sequence
taaaagcagaactaccactttggcc

SEQ ID NO: 300533 - DNA, 25 bp, Probe Sequence
taaaaggaactatgtctggaaggct

SEQ ID NO: 300534 - DNA, 25 bp, Probe Sequence
taaaaggaacttattgcaaagcact

SEQ ID NO: 300535 - DNA, 25 bp, Probe Sequence
taaatttcgtttataagattcagta

SEQ ID NO: 300536 - DNA, 25 bp, Probe Sequence
taaatgaattttagtttggttcact

SEQ ID NO: 300537 - DNA, 25 bp, Probe Sequence
taaagcctcctaagggggtcattct

SEQ ID NO: 300538 - DNA, 25 bp, Probe Sequence
taaagcctcctaagggggtcattct

SEQ ID NO: 300539 - DNA, 25 bp, Probe Sequence
taaatgctgcttcatggggaagaat

SEQ ID NO: 300540 - DNA, 25 bp, Probe Sequence
taaagctgtctgaagcggacaagct

SEQ ID NO: 300541 - DNA, 25 bp, Probe Sequence
taaagcccatagcggaaggcctggc

SEQ ID NO: 300542 - DNA, 25 bp, Probe Sequence
taaaccgccaggttgaacctctgga

SEQ ID NO: 300543 - DNA, 25 bp, Probe Sequence
taaactctgtcatcattacccttta

SEQ ID NO: 300544 - DNA, 25 bp, Probe Sequence
taaagtctgtttatccgtaagtggg

SEQ ID NO: 300545 - DNA, 25 bp, Probe Sequence
taagctgtcttgtatttacttaatt

SEQ ID NO: 300546 - DNA, 25 bp, Probe Sequence
taagcttttgtatctgccagtgaat

SEQ ID NO: 300547 - DNA, 25 bp, Probe Sequence
taactgtgtcatgaagctgccggac

SEQ ID NO: 300548 - DNA, 25 bp, Probe Sequence
taactgatgtccaaagcaccctgtt

SEQ ID NO: 300549 - DNA, 25 bp, Probe Sequence
taaccatcataaagacactgcctgt

SEQ ID NO: 300550 - DNA, 25 bp, Probe Sequence
taaccatctgaaagcaacttttttg

SEQ ID NO: 300551 - DNA, 25 bp, Probe Sequence
taaccctacagacactaatgccttg

SEQ ID NO: 300552 - DNA, 25 bp, Probe Sequence
tacacccccaagtgcatatgggtct

SEQ ID NO: 300553 - DNA, 25 bp, Probe Sequence
tacacacaccccatcgcgggtgtgc

SEQ ID NO: 300554 - DNA, 25 bp, Probe Sequence
taacaaccacacattgggccaggcg

SEQ ID NO: 300555 - DNA, 25 bp, Probe Sequence
taaccactgcatatgttggctcccc

SEQ ID NO: 300556 - DNA, 25 bp, Probe Sequence
taaacctaaatgttctgcctaccct

SEQ ID NO: 300557 - DNA, 25 bp, Probe Sequence
taacgagtacaaattccctaccact

SEQ ID NO: 300558 - DNA, 25 bp, Probe Sequence
taaaggtgtcctgctaccatatcca

SEQ ID NO: 300559 - DNA, 25 bp, Probe Sequence
tagaaggttttaggaatagtgacag

SEQ ID NO: 300560 - DNA, 25 bp, Probe Sequence
taaaggatcatttgacaactggtga

SEQ ID NO: 300561 - DNA, 25 bp, Probe Sequence
taaaggttgtcatttaagttgaata

SEQ ID NO: 300562 - DNA, 25 bp, Probe Sequence
taaaggttgtatctagttctattgt

SEQ ID NO: 300563 - DNA, 25 bp, Probe Sequence
taaagcctttattgtagaactatgt

SEQ ID NO: 300564 - DNA, 25 bp, Probe Sequence
taaacctctgtttcatgctaaccag

SEQ ID NO: 300565 - DNA, 25 bp, Probe Sequence
taacctaactagtcatgctaaccag

SEQ ID NO: 300566 - DNA, 25 bp, Probe Sequence
taagcgtctactagaaaaatctcag

SEQ ID NO: 300567 - DNA, 25 bp, Probe Sequence
taagcatgttacaagcaaacaacaa

SEQ ID NO: 300568 - DNA, 25 bp, Probe Sequence
taactattatccaaacaaattaaat

SEQ ID NO: 300569 - DNA, 25 bp, Probe Sequence
ttcacctttctgcaacaagttagtt

SEQ ID NO: 300570 - DNA, 25 bp, Probe Sequence
taacctcctaagtatcaagtataga

SEQ ID NO: 300571 - DNA, 25 bp, Probe Sequence
taaacctgcaagtaaagattcaaga

SEQ ID NO: 300572 - DNA, 25 bp, Probe Sequence
taaagccttaagcacaattaattaa

SEQ ID NO: 300573 - DNA, 25 bp, Probe Sequence
taaatgttgtttcaaattactaaat

SEQ ID NO: 300574 - DNA, 25 bp, Probe Sequence
taaagtttgtacaaacattgccaaa

SEQ ID NO: 300575 - DNA, 25 bp, Probe Sequence
taaagttggtgcacgttcgcggaga

SEQ ID NO: 300576 - DNA, 25 bp, Probe Sequence
taaacttgtgttgtggtcctccaga

SEQ ID NO: 300577 - DNA, 25 bp, Probe Sequence
tataaaagtgttcattgtttcgtaa

SEQ ID NO: 300578 - DNA, 25 bp, Probe Sequence
taaactatgtttcttgttactatta

SEQ ID NO: 300579 - DNA, 25 bp, Probe Sequence
taacctcagtttcattgtttgtaaa

SEQ ID NO: 300580 - DNA, 25 bp, Probe Sequence
taacctatgttattatatttcccaa

SEQ ID NO: 300581 - DNA, 25 bp, Probe Sequence
taaccagatggctctttttcccaag

SEQ ID NO: 300582 - DNA, 25 bp, Probe Sequence
taacacagtgttccttgttctacgc

SEQ ID NO: 300583 - DNA, 25 bp, Probe Sequence
taacaaggcttgaatctgtattacc

SEQ ID NO: 300584 - DNA, 25 bp, Probe Sequence
taagcattcgcaaggagtggaaacc

SEQ ID NO: 300585 - DNA, 25 bp, Probe Sequence
taagctctacattgcgattgtgaca

SEQ ID NO: 300586 - DNA, 25 bp, Probe Sequence
taagctactgattgctgctattgac

SEQ ID NO: 300587 - DNA, 25 bp, Probe Sequence
taagctactgcatctggcctataat

SEQ ID NO: 300588 - DNA, 25 bp, Probe Sequence
taaaaaacactggccttcagattgg

SEQ ID NO: 300589 - DNA, 25 bp, Probe Sequence
taaagaagaattgcctgtaatcccc

SEQ ID NO: 300590 - DNA, 25 bp, Probe Sequence
taaagtagaaattcactgccttccc

SEQ ID NO: 300591 - DNA, 25 bp, Probe Sequence
taaagtagaaattcactgccttccc

SEQ ID NO: 300592 - DNA, 25 bp, Probe Sequence
taaagaaacagacccgcttcttgcc

SEQ ID NO: 300593 - DNA, 25 bp, Probe Sequence
taaaaagactactggcctctgtgcc

SEQ ID NO: 300594 - DNA, 25 bp, Probe Sequence
taaaaccctacatgagcttcctgac

SEQ ID NO: 300595 - DNA, 25 bp, Probe Sequence
taaaaactctttagccagtcgtgac

SEQ ID NO: 300596 - DNA, 25 bp, Probe Sequence
taaccgccttattagccagattgtg

SEQ ID NO: 300597 - DNA, 25 bp, Probe Sequence
taaccagtctgaagtttcatttatg

SEQ ID NO: 300598 - DNA, 25 bp, Probe Sequence
taaccaggcgatactttgttttgta

SEQ ID NO: 300599 - DNA, 25 bp, Probe Sequence
taaccagtggatatttaatcttctt

SEQ ID NO: 300600 - DNA, 25 bp, Probe Sequence
taactgttggcttttctaatcttgt

SEQ ID NO: 300601 - DNA, 25 bp, Probe Sequence
taactgttgtgctgtttccatcttc

SEQ ID NO: 300602 - DNA, 25 bp, Probe Sequence
taagcgtcaggcttgttttcatgct

SEQ ID NO: 300603 - DNA, 25 bp, Probe Sequence
taacggcccacagtattgtcagctg

SEQ ID NO: 300604 - DNA, 25 bp, Probe Sequence
taacggccaaactgttcatcctagc

SEQ ID NO: 300605 - DNA, 25 bp, Probe Sequence
taagctgtacaatcgtttcatcatt

SEQ ID NO: 300606 - DNA, 25 bp, Probe Sequence
taagctgtaatatctatttttgttt

SEQ ID NO: 300607 - DNA, 25 bp, Probe Sequence
taacatggtgtatctttttgcttat

SEQ ID NO: 300608 - DNA, 25 bp, Probe Sequence
taactggattgggtttttcctgtct

SEQ ID NO: 300609 - DNA, 25 bp, Probe Sequence
taacgtttcagcaattttgtccttt

SEQ ID NO: 300610 - DNA, 25 bp, Probe Sequence
taacgcttctacaagtattttcatt

SEQ ID NO: 300611 - DNA, 25 bp, Probe Sequence
taacctcctgcctaggatttgtaca

SEQ ID NO: 300612 - DNA, 25 bp, Probe Sequence
taacctgctgtggtacctttgtaca

SEQ ID NO: 300613 - DNA, 25 bp, Probe Sequence
taagcattgggccatagtttgttaa

SEQ ID NO: 300614 - DNA, 25 bp, Probe Sequence
taaattggtggatttcatttaaatt

SEQ ID NO: 300615 - DNA, 25 bp, Probe Sequence
taaagggggtatatgttgcaaacaa

SEQ ID NO: 300616 - DNA, 25 bp, Probe Sequence
taaagggcaacttatcgttccaaag

SEQ ID NO: 300617 - DNA, 25 bp, Probe Sequence
taaaggagccaattccaactctgta

SEQ ID NO: 300618 - DNA, 25 bp, Probe Sequence
taaaggggaatttccatgccgtcta

SEQ ID NO: 300619 - DNA, 25 bp, Probe Sequence
taaacttgagtcatcccgacgttga

SEQ ID NO: 300620 - DNA, 25 bp, Probe Sequence
taaacatgtaaccatgccctaccct

SEQ ID NO: 300621 - DNA, 25 bp, Probe Sequence
taacagctgtaagtgatggaaacca

SEQ ID NO: 300622 - DNA, 25 bp, Probe Sequence
tacacctgctcacaggcgagaaccc

SEQ ID NO: 300623 - DNA, 25 bp, Probe Sequence
taacggccagtagctgagacgccac

SEQ ID NO: 300624 - DNA, 25 bp, Probe Sequence
taaagggaggggggcacccactgtg

SEQ ID NO: 300625 - DNA, 25 bp, Probe Sequence
taacatggggttcggagcgaccttg

SEQ ID NO: 300626 - DNA, 25 bp, Probe Sequence
taactggggcgtacacagtgaccct

SEQ ID NO: 300627 - DNA, 25 bp, Probe Sequence
taaaatgtccctaccagaagcctta

SEQ ID NO: 300628 - DNA, 25 bp, Probe Sequence
taaaatatcctcagccctgatgcct

SEQ ID NO: 300629 - DNA, 25 bp, Probe Sequence
taaccatataccatgtcttatcagt

SEQ ID NO: 300630 - DNA, 25 bp, Probe Sequence
taaactgtacacataattatcatgt

SEQ ID NO: 300631 - DNA, 25 bp, Probe Sequence
tacaggctgctagcttgtataagct

SEQ ID NO: 300632 - DNA, 25 bp, Probe Sequence
taaagtctcctccgtgataacgcga

SEQ ID NO: 300633 - DNA, 25 bp, Probe Sequence
tataaggtgcctcactgtgtaccca

SEQ ID NO: 300634 - DNA, 25 bp, Probe Sequence
taaaatgggctccctggtatctcct

SEQ ID NO: 300635 - DNA, 25 bp, Probe Sequence
taaaatgggctccctggtatctcct

SEQ ID NO: 300636 - DNA, 25 bp, Probe Sequence
taaaatgggctccctggtatctcct

SEQ ID NO: 300637 - DNA, 25 bp, Probe Sequence
taaaatgggctccctggtatctcct

SEQ ID NO: 300638 - DNA, 25 bp, Probe Sequence
taaacaaggtcgctggtcatcctct

SEQ ID NO: 300639 - DNA, 25 bp, Probe Sequence
taaacaaggtcgctggtcatcctct

SEQ ID NO: 300640 - DNA, 25 bp, Probe Sequence
taaaaaagtgaccttatgccctcta

SEQ ID NO: 300641 - DNA, 25 bp, Probe Sequence
taaacatgaagatccttgtgccaaa

SEQ ID NO: 300642 - DNA, 25 bp, Probe Sequence
taacacttcaaagtcatcttgccag

SEQ ID NO: 300643 - DNA, 25 bp, Probe Sequence
taacagtatgccaacatcactcctc

SEQ ID NO: 300644 - DNA, 25 bp, Probe Sequence
taacatgtggacccaactgcctgtg

SEQ ID NO: 300645 - DNA, 25 bp, Probe Sequence
taacagtgcagattccacgttcttg

SEQ ID NO: 300646 - DNA, 25 bp, Probe Sequence
taacttgtttgccatcagttctcca

SEQ ID NO: 300647 - DNA, 25 bp, Probe Sequence
taaccttttggttgtttgtgcaata

SEQ ID NO: 300648 - DNA, 25 bp, Probe Sequence
taaccttttggttgtttgtgcaata

SEQ ID NO: 300649 - DNA, 25 bp, Probe Sequence
taaccttttttgagtggctatctca

SEQ ID NO: 300650 - DNA, 25 bp, Probe Sequence
taactgctcttttattcctggtgtt

SEQ ID NO: 300651 - DNA, 25 bp, Probe Sequence
taactggtatattagatcccatggg

SEQ ID NO: 300652 - DNA, 25 bp, Probe Sequence
taactgatgtacttgatgatactat

SEQ ID NO: 300653 - DNA, 25 bp, Probe Sequence
taaagtgctacattgagtaaatata

SEQ ID NO: 300654 - DNA, 25 bp, Probe Sequence
taaaggttcatctgtccatgcaaaa

SEQ ID NO: 300655 - DNA, 25 bp, Probe Sequence
taacagggtatgctgcctctgtaaa

SEQ ID NO: 300656 - DNA, 25 bp, Probe Sequence
taacaggtctgtgatgcccttagat

SEQ ID NO: 300657 - DNA, 25 bp, Probe Sequence
taacgttcattggttcctttgatag

SEQ ID NO: 300658 - DNA, 25 bp, Probe Sequence
taacttttatgccttcactttacaa

SEQ ID NO: 300659 - DNA, 25 bp, Probe Sequence
taactgttcttcctggcgctaaaaa

SEQ ID NO: 300660 - DNA, 25 bp, Probe Sequence
taactagtggtcaggcttaaaaatc

SEQ ID NO: 300661 - DNA, 25 bp, Probe Sequence
taactactgagtactgagcttaata

SEQ ID NO: 300662 - DNA, 25 bp, Probe Sequence
taacatgaacagatttcttgaataa

SEQ ID NO: 300663 - DNA, 25 bp, Probe Sequence
taacaggcagaggttttgatgtagg

SEQ ID NO: 300664 - DNA, 25 bp, Probe Sequence
taaagtcagaagttttactccaggt

SEQ ID NO: 300665 - DNA, 25 bp, Probe Sequence
taaaccagaaagtgtattgccaact

SEQ ID NO: 300666 - DNA, 25 bp, Probe Sequence
taaagccaagaatccttggcccaat

SEQ ID NO: 300667 - DNA, 25 bp, Probe Sequence
taacagataggaatgacctatggct

SEQ ID NO: 300668 - DNA, 25 bp, Probe Sequence
taacaagggcatcgactcagacgct

SEQ ID NO: 300669 - DNA, 25 bp, Probe Sequence
taacatactgtatactctatagcag

SEQ ID NO: 300670 - DNA, 25 bp, Probe Sequence
taacattctataccactccaagaaa

SEQ ID NO: 300671 - DNA, 25 bp, Probe Sequence
taacagtctgactaacttaaaataa

SEQ ID NO: 300672 - DNA, 25 bp, Probe Sequence
taactcctgatctaactgatgaaaa

SEQ ID NO: 300673 - DNA, 25 bp, Probe Sequence
taacccgctcatcactggatgaaga

SEQ ID NO: 300674 - DNA, 25 bp, Probe Sequence
tacacccctcattagttaaggataa

SEQ ID NO: 300675 - DNA, 25 bp, Probe Sequence
taaccctccctagttgaatgttatt

SEQ ID NO: 300676 - DNA, 25 bp, Probe Sequence
taccacccccaatcgaaaggattct

SEQ ID NO: 300677 - DNA, 25 bp, Probe Sequence
taaatcccctcataggcaaagatga

SEQ ID NO: 300678 - DNA, 25 bp, Probe Sequence
taaatgcccccatttgagatgcctt

SEQ ID NO: 300679 - DNA, 25 bp, Probe Sequence
taaacggcccaactagtgcttctgg

SEQ ID NO: 300680 - DNA, 25 bp, Probe Sequence
tacaaccccaacaaaatcttcggcg

SEQ ID NO: 300681 - DNA, 25 bp, Probe Sequence
taaaacagcactaaataacttgggg

SEQ ID NO: 300682 - DNA, 25 bp, Probe Sequence
taaacattgcatttagaaagctttt

SEQ ID NO: 300683 - DNA, 25 bp, Probe Sequence
taaaactctgagagactacttatga

SEQ ID NO: 300684 - DNA, 25 bp, Probe Sequence
taaaataatagtagccaacttcagt

SEQ ID NO: 300685 - DNA, 25 bp, Probe Sequence
taaatacagtagtccccacttatct

SEQ ID NO: 300686 - DNA, 25 bp, Probe Sequence
taactaagcttctcgctctaatact

SEQ ID NO: 300687 - DNA, 25 bp, Probe Sequence
taacaaatcttagtcctcataaacc

SEQ ID NO: 300688 - DNA, 25 bp, Probe Sequence
taaaagtgtgtaggactgaaacagt

SEQ ID NO: 300689 - DNA, 25 bp, Probe Sequence
taaaaggttatatcagctgggcatg

SEQ ID NO: 300690 - DNA, 25 bp, Probe Sequence
taacaaaggtgttgcacagttgaga

SEQ ID NO: 300691 - DNA, 25 bp, Probe Sequence
taacaaaggcatcgcccacagggac

SEQ ID NO: 300692 - DNA, 25 bp, Probe Sequence
taacaaagctgttctcatgaaggga

SEQ ID NO: 300693 - DNA, 25 bp, Probe Sequence
taactacagctgttgatctacctcc

SEQ ID NO: 300694 - DNA, 25 bp, Probe Sequence
taactgcattcttgtaacacctctc

SEQ ID NO: 300695 - DNA, 25 bp, Probe Sequence
taaccatatcattattaccacattt

SEQ ID NO: 300696 - DNA, 25 bp, Probe Sequence
taacagctacatgtgctcccaggtt

SEQ ID NO: 300697 - DNA, 25 bp, Probe Sequence
taacagctgctttttcacgcatggt

SEQ ID NO: 300698 - DNA, 25 bp, Probe Sequence
taacttgctgtttctcacgtttcag

SEQ ID NO: 300699 - DNA, 25 bp, Probe Sequence
taacctgtggagtcacacgtttatg

SEQ ID NO: 300700 - DNA, 25 bp, Probe Sequence
taaccatgtcaaataccctgttcag

SEQ ID NO: 300701 - DNA, 25 bp, Probe Sequence
taaaattcaacatcccttcgtggta

SEQ ID NO: 300702 - DNA, 25 bp, Probe Sequence
taaaaccgaattacctcctgtatgt

SEQ ID NO: 300703 - DNA, 25 bp, Probe Sequence
taaaatacgaatgttaccaggcatg

SEQ ID NO: 300704 - DNA, 25 bp, Probe Sequence
taaaatagttaatttagccaggcat

SEQ ID NO: 300705 - DNA, 25 bp, Probe Sequence
taaaaaaccaaattagccagacatg

SEQ ID NO: 300706 - DNA, 25 bp, Probe Sequence
taaaagattctttaataacatgatt

SEQ ID NO: 300707 - DNA, 25 bp, Probe Sequence
taaaaacgcttttatagactcttag

SEQ ID NO: 300708 - DNA, 25 bp, Probe Sequence
taaaaaggctttgaatactgtccta

SEQ ID NO: 300709 - DNA, 25 bp, Probe Sequence
tacaaacctgtcctggaattctacc

SEQ ID NO: 300710 - DNA, 25 bp, Probe Sequence
taaaatcgagtccttacagccatac

SEQ ID NO: 300711 - DNA, 25 bp, Probe Sequence
taaaatcgagtccttacagccatac

SEQ ID NO: 300712 - DNA, 25 bp, Probe Sequence
taaaatcgagtccttacagccatac

SEQ ID NO: 300713 - DNA, 25 bp, Probe Sequence
taaaagagcggcccaagcagcagca

SEQ ID NO: 300714 - DNA, 25 bp, Probe Sequence
taaaatgacggctaccacactcatg

SEQ ID NO: 300715 - DNA, 25 bp, Probe Sequence
taacctaacctattgacctgcatgt

SEQ ID NO: 300716 - DNA, 25 bp, Probe Sequence
taactgctagccctatttcttgtga

SEQ ID NO: 300717 - DNA, 25 bp, Probe Sequence
taaatgtggccccatggtattggat

SEQ ID NO: 300718 - DNA, 25 bp, Probe Sequence
taaatgggccgcctggccattatgg

SEQ ID NO: 300719 - DNA, 25 bp, Probe Sequence
taaatggcccgcctgggcattatgc

SEQ ID NO: 300720 - DNA, 25 bp, Probe Sequence
taaatagctcacgttaggcatgaaa

SEQ ID NO: 300721 - DNA, 25 bp, Probe Sequence
taaacagcatcacaaagtacagaac

SEQ ID NO: 300722 - DNA, 25 bp, Probe Sequence
taaacgatttattttactgaactct

SEQ ID NO: 300723 - DNA, 25 bp, Probe Sequence
taaaagatgacttttctaggacacc

SEQ ID NO: 300724 - DNA, 25 bp, Probe Sequence
taaaagatgacttttctaggacacc

SEQ ID NO: 300725 - DNA, 25 bp, Probe Sequence
taaaaggactcttccatcagagatg

SEQ ID NO: 300726 - DNA, 25 bp, Probe Sequence
taacacaggaacaactgccggtgat

SEQ ID NO: 300727 - DNA, 25 bp, Probe Sequence
taaaagtagcatcttgccgggttgt

SEQ ID NO: 300728 - DNA, 25 bp, Probe Sequence
taaagaaagctcttctgtccggtta

SEQ ID NO: 300729 - DNA, 25 bp, Probe Sequence
taaagaattccttggtgccgggtgc

SEQ ID NO: 300730 - DNA, 25 bp, Probe Sequence
taaagcaattccttggcttcggctc

SEQ ID NO: 300731 - DNA, 25 bp, Probe Sequence
taaaaaatatctaggcattgtggat

SEQ ID NO: 300732 - DNA, 25 bp, Probe Sequence
taaaacaattctgagaggaaatgta

SEQ ID NO: 300733 - DNA, 25 bp, Probe Sequence
taaaatatattctgagtgtaacatt

SEQ ID NO: 300734 - DNA, 25 bp, Probe Sequence
taaactaatggcgcagtggtagctg

SEQ ID NO: 300735 - DNA, 25 bp, Probe Sequence
taaaaattagctggatgtggtggtg

SEQ ID NO: 300736 - DNA, 25 bp, Probe Sequence
tatagtcaagtaggagcagtggaaa

SEQ ID NO: 300737 - DNA, 25 bp, Probe Sequence
taaacaggtatccagcacgaggacc

SEQ ID NO: 300738 - DNA, 25 bp, Probe Sequence
taacaagagttccatcccaggaggc

SEQ ID NO: 300739 - DNA, 25 bp, Probe Sequence
taaaagagtctctacctccagggaa

SEQ ID NO: 300740 - DNA, 25 bp, Probe Sequence
taaaaacctgaactttcattggatt

SEQ ID NO: 300741 - DNA, 25 bp, Probe Sequence
taaaacctctaaccatctctttgtt

SEQ ID NO: 300742 - DNA, 25 bp, Probe Sequence
taaagttcctaagtatccattttat

SEQ ID NO: 300743 - DNA, 25 bp, Probe Sequence
taaatgtatgtccaacttccacttt

SEQ ID NO: 300744 - DNA, 25 bp, Probe Sequence
taaatggtctagaacgtggcctggg

SEQ ID NO: 300745 - DNA, 25 bp, Probe Sequence
taaatatgctctggtctggggtctc

SEQ ID NO: 300746 - DNA, 25 bp, Probe Sequence
taaaatgtctaggctaagtatgcac

SEQ ID NO: 300747 - DNA, 25 bp, Probe Sequence
taaccatctgatatctatagtagac

SEQ ID NO: 300748 - DNA, 25 bp, Probe Sequence
taactctgtatcagtcaagatgtac

SEQ ID NO: 300749 - DNA, 25 bp, Probe Sequence
taacatttatcagggcagcagagac

SEQ ID NO: 300750 - DNA, 25 bp, Probe Sequence
taacattgttcaggcgcatggcccc

SEQ ID NO: 300751 - DNA, 25 bp, Probe Sequence
taacatatttcagcattggctctac

SEQ ID NO: 300752 - DNA, 25 bp, Probe Sequence
taacttgtgtcttgatttgttgcac

SEQ ID NO: 300753 - DNA, 25 bp, Probe Sequence
taacttgagtctattgccttgcctt

SEQ ID NO: 300754 - DNA, 25 bp, Probe Sequence
taaaaagtctaattgcgttgtttgt

SEQ ID NO: 300755 - DNA, 25 bp, Probe Sequence
taaaaagaaagtcgcgttgttatat

SEQ ID NO: 300756 - DNA, 25 bp, Probe Sequence
taaaaatgaaaccagctgtggattt

SEQ ID NO: 300757 - DNA, 25 bp, Probe Sequence
tacagaaaaaacctttgcagattta

SEQ ID NO: 300758 - DNA, 25 bp, Probe Sequence
tactaaaggcacttccttcctgtta

SEQ ID NO: 300759 - DNA, 25 bp, Probe Sequence
taaaggcacgactgggatttcttct

SEQ ID NO: 300760 - DNA, 25 bp, Probe Sequence
taaaggcaccccgggattattatca

SEQ ID NO: 300761 - DNA, 25 bp, Probe Sequence
taaaggcaccgaacagcgttgaatt

SEQ ID NO: 300762 - DNA, 25 bp, Probe Sequence
taaaatgctcctaatcaagattgtt

SEQ ID NO: 300763 - DNA, 25 bp, Probe Sequence
taacacatccctaggttgtgtgctt

SEQ ID NO: 300764 - DNA, 25 bp, Probe Sequence
taaacatttgcaccacttgtggctt

SEQ ID NO: 300765 - DNA, 25 bp, Probe Sequence
taacaaacatcactgccactgtggc

SEQ ID NO: 300766 - DNA, 25 bp, Probe Sequence
taacagatgcaatgtgctactgatt

SEQ ID NO: 300767 - DNA, 25 bp, Probe Sequence
taaaatgcactgccctactgttggt

SEQ ID NO: 300768 - DNA, 25 bp, Probe Sequence
taaaagcctacactattgcttgtgt

SEQ ID NO: 300769 - DNA, 25 bp, Probe Sequence
taaatagcccacctgaactcatgac

SEQ ID NO: 300770 - DNA, 25 bp, Probe Sequence
taactggcctgatctaacaatgaaa

SEQ ID NO: 300771 - DNA, 25 bp, Probe Sequence
taactggactgacctaaacgtggaa

SEQ ID NO: 300772 - DNA, 25 bp, Probe Sequence
tactgccggtgaggctgaaacgctg

SEQ ID NO: 300773 - DNA, 25 bp, Probe Sequence
tactgccggtgaggctgaaacgctg

SEQ ID NO: 300774 - DNA, 25 bp, Probe Sequence
taacctggctgggctgaaactgtct

SEQ ID NO: 300775 - DNA, 25 bp, Probe Sequence
taactctggcaggactaatcccctt

SEQ ID NO: 300776 - DNA, 25 bp, Probe Sequence
taactataagtatactgcctgccta

SEQ ID NO: 300777 - DNA, 25 bp, Probe Sequence
taactttagattgactggacactat

SEQ ID NO: 300778 - DNA, 25 bp, Probe Sequence
taactttctatatctgctaaactat

SEQ ID NO: 300779 - DNA, 25 bp, Probe Sequence
taactgattttcaagtgctaaacca

SEQ ID NO: 300780 - DNA, 25 bp, Probe Sequence
taactttagatctttgaaaacccag

SEQ ID NO: 300781 - DNA, 25 bp, Probe Sequence
taaagttcgaaaataccaagcccag

SEQ ID NO: 300782 - DNA, 25 bp, Probe Sequence
tagacattttaagaaccagagccat

SEQ ID NO: 300783 - DNA, 25 bp, Probe Sequence
tagaatttcaaataaccagtctttt

SEQ ID NO: 300784 - DNA, 25 bp, Probe Sequence
taaacttcttaggttccagtcttct

SEQ ID NO: 300785 - DNA, 25 bp, Probe Sequence
taacagtgtttaaagtctcagtttc

SEQ ID NO: 300786 - DNA, 25 bp, Probe Sequence
taaaatgtttgcaaatgtctttttt

SEQ ID NO: 300787 - DNA, 25 bp, Probe Sequence
taaagcccaggcaatatttttgtta

SEQ ID NO: 300788 - DNA, 25 bp, Probe Sequence
taaatgaccacacgtttcttttcga

SEQ ID NO: 300789 - DNA, 25 bp, Probe Sequence
taaacacaccaccttgatttttaat

SEQ ID NO: 300790 - DNA, 25 bp, Probe Sequence
taaaagcacccacatttgtttcaat

SEQ ID NO: 300791 - DNA, 25 bp, Probe Sequence
taaaatcacttctgtttgttcaaaa

SEQ ID NO: 300792 - DNA, 25 bp, Probe Sequence
taaacttgctactgttgttcaacac

SEQ ID NO: 300793 - DNA, 25 bp, Probe Sequence
taactcttctgttcgttgttagaat

SEQ ID NO: 300794 - DNA, 25 bp, Probe Sequence
taacttagctttagtcttataaaca

SEQ ID NO: 300795 - DNA, 25 bp, Probe Sequence
taactcttcaaaagccgttaaacag

SEQ ID NO: 300796 - DNA, 25 bp, Probe Sequence
taacacttaaacagtataaaatgcg

SEQ ID NO: 300797 - DNA, 25 bp, Probe Sequence
taacagatgttaaaccttttaatgt

SEQ ID NO: 300798 - DNA, 25 bp, Probe Sequence
taactcttacgccaacttcttaatg

SEQ ID NO: 300799 - DNA, 25 bp, Probe Sequence
taactcttacctaattattcttaca

SEQ ID NO: 300800 - DNA, 25 bp, Probe Sequence
taacatattaccttattttgaacaa

SEQ ID NO: 300801 - DNA, 25 bp, Probe Sequence
taacattcatatcatgtattttact

SEQ ID NO: 300802 - DNA, 25 bp, Probe Sequence
taacatcatcttccttattttcagc

SEQ ID NO: 300803 - DNA, 25 bp, Probe Sequence
taaagcatcaccactcattttgacc

SEQ ID NO: 300804 - DNA, 25 bp, Probe Sequence
taacaccatggcaccttttgcacat

SEQ ID NO: 300805 - DNA, 25 bp, Probe Sequence
taaactacggatgcttttcaaagat

SEQ ID NO: 300806 - DNA, 25 bp, Probe Sequence
taacacatatcctgcctttactaaa

SEQ ID NO: 300807 - DNA, 25 bp, Probe Sequence
taaagttcccctgtgacactcaaaa

SEQ ID NO: 300808 - DNA, 25 bp, Probe Sequence
taaagttgcccctgtaatacataag

SEQ ID NO: 300809 - DNA, 25 bp, Probe Sequence
taaacgtccacagagtataaataac

SEQ ID NO: 300810 - DNA, 25 bp, Probe Sequence
taaactgtccaggatctgatttaaa

SEQ ID NO: 300811 - DNA, 25 bp, Probe Sequence
tacatactgcccctaatttctaaag

SEQ ID NO: 300812 - DNA, 25 bp, Probe Sequence
taaaccacacctcagtcactaaagg

SEQ ID NO: 300813 - DNA, 25 bp, Probe Sequence
tacttgtaaccctggcagctaaggc

SEQ ID NO: 300814 - DNA, 25 bp, Probe Sequence
tactgtgaaaaactttggtaactca

SEQ ID NO: 300815 - DNA, 25 bp, Probe Sequence
tacagatcccaaaagcttggtaagc

SEQ ID NO: 300816 - DNA, 25 bp, Probe Sequence
tactgcacccaaaggaatttaagac

SEQ ID NO: 300817 - DNA, 25 bp, Probe Sequence
tactgctggtcactcatggaatcct

SEQ ID NO: 300818 - DNA, 25 bp, Probe Sequence
tacggtgtcgttcatgatggcgatc

SEQ ID NO: 300819 - DNA, 25 bp, Probe Sequence
tacgggccaggaaatgagagtctca

SEQ ID NO: 300820 - DNA, 25 bp, Probe Sequence
tacgtgtccaatgacgacatgttga

SEQ ID NO: 300821 - DNA, 25 bp, Probe Sequence
tatcggttcaaaaacctcctgaccg

SEQ ID NO: 300822 - DNA, 25 bp, Probe Sequence
tatcggggcaagttcccctataacg

SEQ ID NO: 300823 - DNA, 25 bp, Probe Sequence
tactggggaaacaccttctgagacc

SEQ ID NO: 300824 - DNA, 25 bp, Probe Sequence
taccaggttaaagacattcggaggc

SEQ ID NO: 300825 - DNA, 25 bp, Probe Sequence
taaaagtataaagcagccctgggga

SEQ ID NO: 300826 - DNA, 25 bp, Probe Sequence
ttaaattctaacccagggcatgggg

SEQ ID NO: 300827 - DNA, 25 bp, Probe Sequence
taaaatgcgtgaacccgggaggcgg

SEQ ID NO: 300828 - DNA, 25 bp, Probe Sequence
tacaggaggtcatggctagggaggc

SEQ ID NO: 300829 - DNA, 25 bp, Probe Sequence
taaagatggctctggcaagctgggg

SEQ ID NO: 300830 - DNA, 25 bp, Probe Sequence
tacaaagcccagctgcaaatgatgg

SEQ ID NO: 300831 - DNA, 25 bp, Probe Sequence
taaacgctcactccgaattagcggt

SEQ ID NO: 300832 - DNA, 25 bp, Probe Sequence
taaatcctcaaacgcaattgcagca

SEQ ID NO: 300833 - DNA, 25 bp, Probe Sequence
taacacctcagatagccatggcagc

SEQ ID NO: 300834 - DNA, 25 bp, Probe Sequence
taaagcctggacttggatcgcatcc

SEQ ID NO: 300835 - DNA, 25 bp, Probe Sequence
taacgcctggaagtagctgagtctc

SEQ ID NO: 300836 - DNA, 25 bp, Probe Sequence
tacactgaaggagctgaaagtgccc

SEQ ID NO: 300837 - DNA, 25 bp, Probe Sequence
taaatgaagtaggctgccatattca

SEQ ID NO: 300838 - DNA, 25 bp, Probe Sequence
taaatggccagtgctgcttcttgca

SEQ ID NO: 300839 - DNA, 25 bp, Probe Sequence
taaatggctcatccagtctgacctc

SEQ ID NO: 300840 - DNA, 25 bp, Probe Sequence
taactagtctaccagtgacctcagg

SEQ ID NO: 300841 - DNA, 25 bp, Probe Sequence
taactagactaccatgtgaaaatca

SEQ ID NO: 300842 - DNA, 25 bp, Probe Sequence
tacaccgaatgaccaggtaacatca

SEQ ID NO: 300843 - DNA, 25 bp, Probe Sequence
tacacgggagacgacgtccgcatca

SEQ ID NO: 300844 - DNA, 25 bp, Probe Sequence
taactggagagcccttggtctgctc

SEQ ID NO: 300845 - DNA, 25 bp, Probe Sequence
taactctgtggcacgtgggcatcac

SEQ ID NO: 300846 - DNA, 25 bp, Probe Sequence
taactatggagacccagggctcctt

SEQ ID NO: 300847 - DNA, 25 bp, Probe Sequence
taactaatgacatccagtgtctcca

SEQ ID NO: 300848 - DNA, 25 bp, Probe Sequence
taactagataattgggcatgtctta

SEQ ID NO: 300849 - DNA, 25 bp, Probe Sequence
taaaaattgttgccgatgtctatat

SEQ ID NO: 300850 - DNA, 25 bp, Probe Sequence
taaagtatctgtattgcattaaata

SEQ ID NO: 300851 - DNA, 25 bp, Probe Sequence
taaagctattatcttgaacagagtc

SEQ ID NO: 300852 - DNA, 25 bp, Probe Sequence
taaagctagttctattgaaatgcaa

SEQ ID NO: 300853 - DNA, 25 bp, Probe Sequence
taaaatcgtagcttgtacagatcaa

SEQ ID NO: 300854 - DNA, 25 bp, Probe Sequence
taaacacctgactctaggacatgca

SEQ ID NO: 300855 - DNA, 25 bp, Probe Sequence
tagaacaagtttgctacgaacaaaa

SEQ ID NO: 300856 - DNA, 25 bp, Probe Sequence
taaaccctgtctctactgaaaataa

SEQ ID NO: 300857 - DNA, 25 bp, Probe Sequence
taaaaccacctggaactgaccaatt

SEQ ID NO: 300858 - DNA, 25 bp, Probe Sequence
taaaacccttgagcacaacagcaaa

SEQ ID NO: 300859 - DNA, 25 bp, Probe Sequence
taaacagctcctcccagcaaaaaaa

SEQ ID NO: 300860 - DNA, 25 bp, Probe Sequence
taaagagctgtgtaacatcaaaaaa

SEQ ID NO: 300861 - DNA, 25 bp, Probe Sequence
taaaactttctagtagcatattaaa

SEQ ID NO: 300862 - DNA, 25 bp, Probe Sequence
taactactgctttagtagtatctca

SEQ ID NO: 300863 - DNA, 25 bp, Probe Sequence
taactctcgctacagccgatatcac

SEQ ID NO: 300864 - DNA, 25 bp, Probe Sequence
taacttcacttgacgcacgttagct

SEQ ID NO: 300865 - DNA, 25 bp, Probe Sequence
taactatccagtcaactttcagctt

SEQ ID NO: 300866 - DNA, 25 bp, Probe Sequence
taacttccactaatccattatcctt

SEQ ID NO: 300867 - DNA, 25 bp, Probe Sequence
taactctccagtaacagcctatctt

SEQ ID NO: 300868 - DNA, 25 bp, Probe Sequence
taactgccagagtgtcatccttgtg

SEQ ID NO: 300869 - DNA, 25 bp, Probe Sequence
taactccatatgtgttcctcttgtt

SEQ ID NO: 300870 - DNA, 25 bp, Probe Sequence
taacatcactgttagatccctcctt

SEQ ID NO: 300871 - DNA, 25 bp, Probe Sequence
taaagcacttaagcacctccatatt

SEQ ID NO: 300872 - DNA, 25 bp, Probe Sequence
taaagcccgagaaaccacacataat

SEQ ID NO: 300873 - DNA, 25 bp, Probe Sequence
taacaggacgcaatccctcaactac

SEQ ID NO: 300874 - DNA, 25 bp, Probe Sequence
taacaggcctgactgcattgttcac

SEQ ID NO: 300875 - DNA, 25 bp, Probe Sequence
tacaagtgccgactcctgaattttc

SEQ ID NO: 300876 - DNA, 25 bp, Probe Sequence
taaagctgctaactcctgatctaac

SEQ ID NO: 300877 - DNA, 25 bp, Probe Sequence
taactgctgtaaatcctaggaaata

SEQ ID NO: 300878 - DNA, 25 bp, Probe Sequence
taaagctgtctgacccaggagaaaa

SEQ ID NO: 300879 - DNA, 25 bp, Probe Sequence
taacagctgatctctcggcagaaac

SEQ ID NO: 300880 - DNA, 25 bp, Probe Sequence
taacactcaaccatgtcagtggagc

SEQ ID NO: 300881 - DNA, 25 bp, Probe Sequence
taacatgcataaatcttaagagcga

SEQ ID NO: 300882 - DNA, 25 bp, Probe Sequence
taacatgcacaatcagctttgagga

SEQ ID NO: 300883 - DNA, 25 bp, Probe Sequence
taacagcgcaatcctattctagagt

SEQ ID NO: 300884 - DNA, 25 bp, Probe Sequence
taacagcctttcaattcatatactg

SEQ ID NO: 300885 - DNA, 25 bp, Probe Sequence
taactccatcttagtgtatagcctg

SEQ ID NO: 300886 - DNA, 25 bp, Probe Sequence
taacatgctgacataggcttaacag

SEQ ID NO: 300887 - DNA, 25 bp, Probe Sequence
taacgtcagttgatgctggaacatg

SEQ ID NO: 300888 - DNA, 25 bp, Probe Sequence
tacacgtcattggagggctgcgtat

SEQ ID NO: 300889 - DNA, 25 bp, Probe Sequence
tacatctgccagttcgggatcgtgt

SEQ ID NO: 300890 - DNA, 25 bp, Probe Sequence
tacactgggtaacctgatcgtggag

SEQ ID NO: 300891 - DNA, 25 bp, Probe Sequence
tacactgaggtgaggctacaagggg

SEQ ID NO: 300892 - DNA, 25 bp, Probe Sequence
taaatggatggagcgctaccttagg

SEQ ID NO: 300893 - DNA, 25 bp, Probe Sequence
taacatgatcatccgacgctactca

SEQ ID NO: 300894 - DNA, 25 bp, Probe Sequence
taaagcttgcactcgtttcagagcc

SEQ ID NO: 300895 - DNA, 25 bp, Probe Sequence
taaagcttgcactcgtttcagagcc

SEQ ID NO: 300896 - DNA, 25 bp, Probe Sequence
taacagtcagacttttgattatgat

SEQ ID NO: 300897 - DNA, 25 bp, Probe Sequence
taactagaacttgctgtctgatgtt

SEQ ID NO: 300898 - DNA, 25 bp, Probe Sequence
tacagttaagttcctcctatttgcc

SEQ ID NO: 300899 - DNA, 25 bp, Probe Sequence
taggcttaatttcttcgccttccac

SEQ ID NO: 300900 - DNA, 25 bp, Probe Sequence
taaatgtatattcgttcccgttcca

SEQ ID NO: 300901 - DNA, 25 bp, Probe Sequence
taactgtactaaatcctttttccat

SEQ ID NO: 300902 - DNA, 25 bp, Probe Sequence
taactctagtatttcgttttcttct

SEQ ID NO: 300903 - DNA, 25 bp, Probe Sequence
taactcaaggataccttcttattta

SEQ ID NO: 300904 - DNA, 25 bp, Probe Sequence
taaagagaattccctatttatttga

SEQ ID NO: 300905 - DNA, 25 bp, Probe Sequence
taaagtattgtcccctctttttgca

SEQ ID NO: 300906 - DNA, 25 bp, Probe Sequence
tacaactagtatggtcccattttgg

SEQ ID NO: 300907 - DNA, 25 bp, Probe Sequence
tacaactactatgtacctacaaaaa

SEQ ID NO: 300908 - DNA, 25 bp, Probe Sequence
taaaataatgaaatggcccacagaa

SEQ ID NO: 300909 - DNA, 25 bp, Probe Sequence
taaagaattataaggcctggtgcga

SEQ ID NO: 300910 - DNA, 25 bp, Probe Sequence
taaaacacaagtatctctggtcaga

SEQ ID NO: 300911 - DNA, 25 bp, Probe Sequence
taaataaagcgtttgtgtttcaagt

SEQ ID NO: 300912 - DNA, 25 bp, Probe Sequence
taaaagaatcttttggtttctcact

SEQ ID NO: 300913 - DNA, 25 bp, Probe Sequence
taaatcagtatttgtgtggtatatt

SEQ ID NO: 300914 - DNA, 25 bp, Probe Sequence
taacatcttattgttggtaatagtg

SEQ ID NO: 300915 - DNA, 25 bp, Probe Sequence
taaactgatttccttgccaactagt

SEQ ID NO: 300916 - DNA, 25 bp, Probe Sequence
taaacgttctcttctactacacatt

SEQ ID NO: 300917 - DNA, 25 bp, Probe Sequence
taaagggctctcaaaactcaacagt

SEQ ID NO: 300918 - DNA, 25 bp, Probe Sequence
taaataggctttacaggctcccctc

SEQ ID NO: 300919 - DNA, 25 bp, Probe Sequence
taaaatgggtctcagatgctccgcc

SEQ ID NO: 300920 - DNA, 25 bp, Probe Sequence
taaaagcaagtcatagttctgccca

SEQ ID NO: 300921 - DNA, 25 bp, Probe Sequence
taaaagggtctttgcttctgattac

SEQ ID NO: 300922 - DNA, 25 bp, Probe Sequence
taacacaggggttggactggactac

SEQ ID NO: 300923 - DNA, 25 bp, Probe Sequence
taaacgacgtgtttgagcagctggc

SEQ ID NO: 300924 - DNA, 25 bp, Probe Sequence
taacttggcggagttcgctgtggct

SEQ ID NO: 300925 - DNA, 25 bp, Probe Sequence
taacttggcggagttcgctgtggct

SEQ ID NO: 300926 - DNA, 25 bp, Probe Sequence
tagactcggggagaacttggtggcc

SEQ ID NO: 300927 - DNA, 25 bp, Probe Sequence
taaacgggcgccaagactcagggga

SEQ ID NO: 300928 - DNA, 25 bp, Probe Sequence
taaacagctgggagaaactgggaaa

SEQ ID NO: 300929 - DNA, 25 bp, Probe Sequence
taaacagcaaagaggatggcgagga

SEQ ID NO: 300930 - DNA, 25 bp, Probe Sequence
taaagctgcacctctgggggaatga

SEQ ID NO: 300931 - DNA, 25 bp, Probe Sequence
tacaaataccagctagggccagtga

SEQ ID NO: 300932 - DNA, 25 bp, Probe Sequence
taaattacacagttcacaaacagta

SEQ ID NO: 300933 - DNA, 25 bp, Probe Sequence
taaaattcatagttaccaatgcaat

SEQ ID NO: 300934 - DNA, 25 bp, Probe Sequence
taaaatttaatctcaccgaatgtac

SEQ ID NO: 300935 - DNA, 25 bp, Probe Sequence
taaaatgattaaagtccctgtcgtt

SEQ ID NO: 300936 - DNA, 25 bp, Probe Sequence
taaaagtatcaatgtccctctccta

SEQ ID NO: 300937 - DNA, 25 bp, Probe Sequence
taaaatgtcacctagtggccctttt

SEQ ID NO: 300938 - DNA, 25 bp, Probe Sequence
taaaatccagctttgtggcacctct

SEQ ID NO: 300939 - DNA, 25 bp, Probe Sequence
taaatacaccgatgggcactctgta

SEQ ID NO: 300940 - DNA, 25 bp, Probe Sequence
taaataaaccaattggcactctgta

SEQ ID NO: 300941 - DNA, 25 bp, Probe Sequence
taacaaatgaccacgacagcttatg

SEQ ID NO: 300942 - DNA, 25 bp, Probe Sequence
taaaattgacaccctaacatcacaa

SEQ ID NO: 300943 - DNA, 25 bp, Probe Sequence
taacaatgtaaccatctgaaagcaa

SEQ ID NO: 300944 - DNA, 25 bp, Probe Sequence
taacatattcaaagtgctaacagaa

SEQ ID NO: 300945 - DNA, 25 bp, Probe Sequence
tacatcccacagaggaaacagaatg

SEQ ID NO: 300946 - DNA, 25 bp, Probe Sequence
tacactgcctggaggatagcagaga

SEQ ID NO: 300947 - DNA, 25 bp, Probe Sequence
tacacccggaagtcatacagtcatc

SEQ ID NO: 300948 - DNA, 25 bp, Probe Sequence
tacacctgcgagtgttccaatctct

SEQ ID NO: 300949 - DNA, 25 bp, Probe Sequence
taactcaggcgtctttgcatttctg

SEQ ID NO: 300950 - DNA, 25 bp, Probe Sequence
taactcaagtgtcacctccttggag

SEQ ID NO: 300951 - DNA, 25 bp, Probe Sequence
taactcttatgttacttctcctggg

SEQ ID NO: 300952 - DNA, 25 bp, Probe Sequence
tacatccttcgattactattcgtgc

SEQ ID NO: 300953 - DNA, 25 bp, Probe Sequence
taacacttgggttctatgctcagaa

SEQ ID NO: 300954 - DNA, 25 bp, Probe Sequence
taaagctaggcaaacatcataagga

SEQ ID NO: 300955 - DNA, 25 bp, Probe Sequence
taaatattgccaaacgacacaggaa

SEQ ID NO: 300956 - DNA, 25 bp, Probe Sequence
taaattgggtgatcaacacacagaa

SEQ ID NO: 300957 - DNA, 25 bp, Probe Sequence
tacaagttggtaaacacagccatta

SEQ ID NO: 300958 - DNA, 25 bp, Probe Sequence
tacaaggtctggatccatcagccct

SEQ ID NO: 300959 - DNA, 25 bp, Probe Sequence
taaaagttattcccatgcaggccct

SEQ ID NO: 300960 - DNA, 25 bp, Probe Sequence
taccaagtaacctacaagcctccta

SEQ ID NO: 300961 - DNA, 25 bp, Probe Sequence
taaaatttgaactgaacctcgtgcc

SEQ ID NO: 300962 - DNA, 25 bp, Probe Sequence
taacactttaaatgccacttctgag

SEQ ID NO: 300963 - DNA, 25 bp, Probe Sequence
taaaccattaaaattcttcctgaag

SEQ ID NO: 300964 - DNA, 25 bp, Probe Sequence
taaaccattaaaattcttcctgaag

SEQ ID NO: 300965 - DNA, 25 bp, Probe Sequence
taaatacagaaagatacttcctcat

SEQ ID NO: 300966 - DNA, 25 bp, Probe Sequence
taaaccaaattctaaccagcctatc

SEQ ID NO: 300967 - DNA, 25 bp, Probe Sequence
taaagctagtaggcaagacccctca

SEQ ID NO: 300968 - DNA, 25 bp, Probe Sequence
taacagaacgagccaagacccgctg

SEQ ID NO: 300969 - DNA, 25 bp, Probe Sequence
tataagaaacacgaaggcatccctg

SEQ ID NO: 300970 - DNA, 25 bp, Probe Sequence
taaatagacacgcacggcagccaca

SEQ ID NO: 300971 - DNA, 25 bp, Probe Sequence
taaaaacacagggcccaccaatcga

SEQ ID NO: 300972 - DNA, 25 bp, Probe Sequence
taaaaacagtcaacctatccaaggt

SEQ ID NO: 300973 - DNA, 25 bp, Probe Sequence
taacaaactgtctctcagaccacag

SEQ ID NO: 300974 - DNA, 25 bp, Probe Sequence
taaagaacgccttctacatcggcag

SEQ ID NO: 300975 - DNA, 25 bp, Probe Sequence
taaactaccacttctaatcagtgtt

SEQ ID NO: 300976 - DNA, 25 bp, Probe Sequence
taaagtactcacacaagttgtttca

SEQ ID NO: 300977 - DNA, 25 bp, Probe Sequence
taaatggcacctatactggctttta

SEQ ID NO: 300978 - DNA, 25 bp, Probe Sequence
taaacacgcctagattgtttttaca

SEQ ID NO: 300979 - DNA, 25 bp, Probe Sequence
taaaagggcaacatgtttctgttaa

SEQ ID NO: 300980 - DNA, 25 bp, Probe Sequence
taaagggacagaatacttcctgttt

SEQ ID NO: 300981 - DNA, 25 bp, Probe Sequence
taaactgtaaataacttgccctggg

SEQ ID NO: 300982 - DNA, 25 bp, Probe Sequence
taaactgtaaataacttgccctggg

SEQ ID NO: 300983 - DNA, 25 bp, Probe Sequence
taaactgtaaataacttgccctggg

SEQ ID NO: 300984 - DNA, 25 bp, Probe Sequence
tagaaattaataccactacccgtga

SEQ ID NO: 300985 - DNA, 25 bp, Probe Sequence
taacagcattaaagtgattcacccg

SEQ ID NO: 300986 - DNA, 25 bp, Probe Sequence
taacagcattaaagtgattcacccg

SEQ ID NO: 300987 - DNA, 25 bp, Probe Sequence
taaaggtttagtctcactgccgtta

SEQ ID NO: 300988 - DNA, 25 bp, Probe Sequence
taaagtgtttcaatttttccagtca

SEQ ID NO: 300989 - DNA, 25 bp, Probe Sequence
taaattgtttcagatgttactagga

SEQ ID NO: 300990 - DNA, 25 bp, Probe Sequence
taaaagatttcagatgctcaaaaaa

SEQ ID NO: 300991 - DNA, 25 bp, Probe Sequence
taaaagttctatgatctgcaaaaaa

SEQ ID NO: 300992 - DNA, 25 bp, Probe Sequence
taacacgcttagtgtctctaaaaac

SEQ ID NO: 300993 - DNA, 25 bp, Probe Sequence
taacagctgttagttttataattaa

SEQ ID NO: 300994 - DNA, 25 bp, Probe Sequence
taacagctgttagttttataattaa

SEQ ID NO: 300995 - DNA, 25 bp, Probe Sequence
taaactgttgaaaccaatcacatta

SEQ ID NO: 300996 - DNA, 25 bp, Probe Sequence
taaactggtgaaactgacccaaata

SEQ ID NO: 300997 - DNA, 25 bp, Probe Sequence
taaacaggattaacttaacaataga

SEQ ID NO: 300998 - DNA, 25 bp, Probe Sequence
taaaagggatgatcttaactgaaga

SEQ ID NO: 300999 - DNA, 25 bp, Probe Sequence
taaacattggtgcacttgaactgag

SEQ ID NO: 301000 - DNA, 25 bp, Probe Sequence
taaacctgaggccagcttagagagg

SEQ ID NO: 301001 - DNA, 25 bp, Probe Sequence
taaaccgagaccatttgcaggaggt

SEQ ID NO: 301002 - DNA, 25 bp, Probe Sequence
taaaccaggacgacctgtaccaggc

SEQ ID NO: 301003 - DNA, 25 bp, Probe Sequence
taaaggcatgcaaacccagtgacca

SEQ ID NO: 301004 - DNA, 25 bp, Probe Sequence
taaagcaggcaatccctgtagccgc

SEQ ID NO: 301005 - DNA, 25 bp, Probe Sequence
taaacccaaattagtgtcagccgaa

SEQ ID NO: 301006 - DNA, 25 bp, Probe Sequence
taaaaacagattctgattccccaaa

SEQ ID NO: 301007 - DNA, 25 bp, Probe Sequence
taaaacacgttcatgtgttcaccaa

SEQ ID NO: 301008 - DNA, 25 bp, Probe Sequence
taaaagccatttgtgtaatctccaa

SEQ ID NO: 301009 - DNA, 25 bp, Probe Sequence
taaaacctgtaggtacaatcccaag

SEQ ID NO: 301010 - DNA, 25 bp, Probe Sequence
taaaacctgtaggtacaatcccaag

SEQ ID NO: 301011 - DNA, 25 bp, Probe Sequence
taaaacctgtaggtacaatcccaag

SEQ ID NO: 301012 - DNA, 25 bp, Probe Sequence
taaaactgttagaaacctccacatt

SEQ ID NO: 301013 - DNA, 25 bp, Probe Sequence
taaaggagttaaaactgcctccact

SEQ ID NO: 301014 - DNA, 25 bp, Probe Sequence
taaaggaattttatcacctcgagcc

SEQ ID NO: 301015 - DNA, 25 bp, Probe Sequence
taaaggatttggtttccctgccatg

SEQ ID NO: 301016 - DNA, 25 bp, Probe Sequence
taaaggtcattgcttcccactgaca

SEQ ID NO: 301017 - DNA, 25 bp, Probe Sequence
taaagttggtgctttctccactgag

SEQ ID NO: 301018 - DNA, 25 bp, Probe Sequence
taacactgtggatacctcccatgag

SEQ ID NO: 301019 - DNA, 25 bp, Probe Sequence
taaacgtggaatgcatgtgactgta

SEQ ID NO: 301020 - DNA, 25 bp, Probe Sequence
taaaactgcgccacttggcagtaca

SEQ ID NO: 301021 - DNA, 25 bp, Probe Sequence
taaagaccagtcacttggctgctct

SEQ ID NO: 301022 - DNA, 25 bp, Probe Sequence
taaaaccagtctcagatatcatact

SEQ ID NO: 301023 - DNA, 25 bp, Probe Sequence
taacacccagtacagacatatccac

SEQ ID NO: 301024 - DNA, 25 bp, Probe Sequence
tacacacccagttatggaatgtcca

SEQ ID NO: 301025 - DNA, 25 bp, Probe Sequence
taaacccaagaatcaatgtagcctc

SEQ ID NO: 301026 - DNA, 25 bp, Probe Sequence
taaactccaaggtaactggacttct

SEQ ID NO: 301027 - DNA, 25 bp, Probe Sequence
taaagtcaaatgccaaacactagct

SEQ ID NO: 301028 - DNA, 25 bp, Probe Sequence
taaagtccaatgcccaacactagct

SEQ ID NO: 301029 - DNA, 25 bp, Probe Sequence
taacagatcagcatgtccagctccc

SEQ ID NO: 301030 - DNA, 25 bp, Probe Sequence
taaaacatgcagccacaggctctcc

SEQ ID NO: 301031 - DNA, 25 bp, Probe Sequence
taacaagcatacccagtgttctgct

SEQ ID NO: 301032 - DNA, 25 bp, Probe Sequence
taacaatgtggcccacggcatcgtc

SEQ ID NO: 301033 - DNA, 25 bp, Probe Sequence
taacacttgacattattggaccccc

SEQ ID NO: 301034 - DNA, 25 bp, Probe Sequence
taacactatgaattatgtgcagagt

SEQ ID NO: 301035 - DNA, 25 bp, Probe Sequence
taacactgtgaatgaagctatatat

SEQ ID NO: 301036 - DNA, 25 bp, Probe Sequence
tacagcaggtgattcagctacttga

SEQ ID NO: 301037 - DNA, 25 bp, Probe Sequence
tacaagaggtgaagatgacagtgca

SEQ ID NO: 301038 - DNA, 25 bp, Probe Sequence
tactatgagtgaaagggagccagaa

SEQ ID NO: 301039 - DNA, 25 bp, Probe Sequence
tactcaaggataacacggcgatgaa

SEQ ID NO: 301040 - DNA, 25 bp, Probe Sequence
tactacgtaatggccggctgtctga

SEQ ID NO: 301041 - DNA, 25 bp, Probe Sequence
taaatggtagtgtgcggagtttttt

SEQ ID NO: 301042 - DNA, 25 bp, Probe Sequence
taaaggaaatttgatgtgttttttg

SEQ ID NO: 301043 - DNA, 25 bp, Probe Sequence
taaagggtatttggtctggttcata

SEQ ID NO: 301044 - DNA, 25 bp, Probe Sequence
taaagggagacttgagcttgtttaa

SEQ ID NO: 301045 - DNA, 25 bp, Probe Sequence
taaatgcttgagtttcccattttaa

SEQ ID NO: 301046 - DNA, 25 bp, Probe Sequence
taaaaatggtcttcacgcttgcttc

SEQ ID NO: 301047 - DNA, 25 bp, Probe Sequence
taaaaatttgctgaatgcttgctac

SEQ ID NO: 301048 - DNA, 25 bp, Probe Sequence
taaaggaatccccaatgttctgcgc

SEQ ID NO: 301049 - DNA, 25 bp, Probe Sequence
taaaggaactgacagcagtgcttac

SEQ ID NO: 301050 - DNA, 25 bp, Probe Sequence
taaagtaaatagtaattctctgaaa

SEQ ID NO: 301051 - DNA, 25 bp, Probe Sequence
taaaactcagaattctttcctaaga

SEQ ID NO: 301052 - DNA, 25 bp, Probe Sequence
taaagaagcagttttttcaccgagc

SEQ ID NO: 301053 - DNA, 25 bp, Probe Sequence
tacacagtagttctgtcttacccac

SEQ ID NO: 301054 - DNA, 25 bp, Probe Sequence
taccaaagttaaacatggacttctc

SEQ ID NO: 301055 - DNA, 25 bp, Probe Sequence
tacaaaagttaaccaagcctatgct

SEQ ID NO: 301056 - DNA, 25 bp, Probe Sequence
taaaaagttaaggactcgcaatcta

SEQ ID NO: 301057 - DNA, 25 bp, Probe Sequence
taaaatattattcccaccctgacta

SEQ ID NO: 301058 - DNA, 25 bp, Probe Sequence
taaaaaatatcttctcacgcctgta

SEQ ID NO: 301059 - DNA, 25 bp, Probe Sequence
taaaaatgaacttctcccgctacac

SEQ ID NO: 301060 - DNA, 25 bp, Probe Sequence
taaaacatcaaactacccagcaacc

SEQ ID NO: 301061 - DNA, 25 bp, Probe Sequence
taaaacaacaacaacaacaacaaca

SEQ ID NO: 301062 - DNA, 25 bp, Probe Sequence
taaagaccctttacaacaacagcca

SEQ ID NO: 301063 - DNA, 25 bp, Probe Sequence
tacaaccggtttcaaaccgccactg

SEQ ID NO: 301064 - DNA, 25 bp, Probe Sequence
tacacagactggattcagagaaccc

SEQ ID NO: 301065 - DNA, 25 bp, Probe Sequence
tacagagaatggctgtgcgggacag

SEQ ID NO: 301066 - DNA, 25 bp, Probe Sequence
taaagagctggccggccaggcacag

SEQ ID NO: 301067 - DNA, 25 bp, Probe Sequence
taacaggaggcccatctcaagacac

SEQ ID NO: 301068 - DNA, 25 bp, Probe Sequence
taaaggagcccaccttgaaccatta

SEQ ID NO: 301069 - DNA, 25 bp, Probe Sequence
tacaacggcaagaccttcaaccagg

SEQ ID NO: 301070 - DNA, 25 bp, Probe Sequence
taaacccaagatcctctaacacaca

SEQ ID NO: 301071 - DNA, 25 bp, Probe Sequence
taaaactacattcactataactcag

SEQ ID NO: 301072 - DNA, 25 bp, Probe Sequence
taaagatcgaccctgacgtaaccgg

SEQ ID NO: 301073 - DNA, 25 bp, Probe Sequence
taaaccagtccactgttatacccgg

SEQ ID NO: 301074 - DNA, 25 bp, Probe Sequence
tacaacccttctggttattccggtg

SEQ ID NO: 301075 - DNA, 25 bp, Probe Sequence
taaatcccttcagtatttatccctc

SEQ ID NO: 301076 - DNA, 25 bp, Probe Sequence
taaacccctcagacagtttgcttat

SEQ ID NO: 301077 - DNA, 25 bp, Probe Sequence
taaagcacctttctgtttgcctgat

SEQ ID NO: 301078 - DNA, 25 bp, Probe Sequence
taaaagcctgttctgttgggcagcc

SEQ ID NO: 301079 - DNA, 25 bp, Probe Sequence
tatatgatacctctttattggcccg

SEQ ID NO: 301080 - DNA, 25 bp, Probe Sequence
taaacacttcatattattcgccttg

SEQ ID NO: 301081 - DNA, 25 bp, Probe Sequence
taaatttcatccattattagcctgg

SEQ ID NO: 301082 - DNA, 25 bp, Probe Sequence
taacagtatctccttctattagtcc

SEQ ID NO: 301083 - DNA, 25 bp, Probe Sequence
taaagtcatacgctccaactgatcc

SEQ ID NO: 301084 - DNA, 25 bp, Probe Sequence
taaattcattgctcttcaagatgtc

SEQ ID NO: 301085 - DNA, 25 bp, Probe Sequence
taaatactgtggttgcctctatgtg

SEQ ID NO: 301086 - DNA, 25 bp, Probe Sequence
taaacacagcttctctcctgagtgt

SEQ ID NO: 301087 - DNA, 25 bp, Probe Sequence
taaaatccttattctcctgctgaag

SEQ ID NO: 301088 - DNA, 25 bp, Probe Sequence
taaaatcttctcggtcaccaggcga

SEQ ID NO: 301089 - DNA, 25 bp, Probe Sequence
taaaactcggctgggcacggtggac

SEQ ID NO: 301090 - DNA, 25 bp, Probe Sequence
taaaaattggctgggcgcggtggct

SEQ ID NO: 301091 - DNA, 25 bp, Probe Sequence
taaatacatctgtggggcgggctct

SEQ ID NO: 301092 - DNA, 25 bp, Probe Sequence
tagaaccttttgggactggcctttg

SEQ ID NO: 301093 - DNA, 25 bp, Probe Sequence
taacagctcttttgggattgggtgt

SEQ ID NO: 301094 - DNA, 25 bp, Probe Sequence
tacacacccaattcgtcttggtctg

SEQ ID NO: 301095 - DNA, 25 bp, Probe Sequence
tacacacccaattcgtcttggtctg

SEQ ID NO: 301096 - DNA, 25 bp, Probe Sequence
tacaccgaccattttgctatttctt

SEQ ID NO: 301097 - DNA, 25 bp, Probe Sequence
taaacgagcctatttctctttgcac

SEQ ID NO: 301098 - DNA, 25 bp, Probe Sequence
taacaagcccattatgctatcctta

SEQ ID NO: 301099 - DNA, 25 bp, Probe Sequence
taaagaccattattgctaccaaatc

SEQ ID NO: 301100 - DNA, 25 bp, Probe Sequence
taaacaccagtttcccagcaaacag

SEQ ID NO: 301101 - DNA, 25 bp, Probe Sequence
taaaaatagttaacacagatcaagt

SEQ ID NO: 301102 - DNA, 25 bp, Probe Sequence
taaacataacattaatacctaagta

SEQ ID NO: 301103 - DNA, 25 bp, Probe Sequence
taaacaacagcaaatatacttgaat

SEQ ID NO: 301104 - DNA, 25 bp, Probe Sequence
taaataaagctatattctgtaaaaa

SEQ ID NO: 301105 - DNA, 25 bp, Probe Sequence
taacaaggaccatcttctatcccac

SEQ ID NO: 301106 - DNA, 25 bp, Probe Sequence
taaagggacagcttgtccttccctg

SEQ ID NO: 301107 - DNA, 25 bp, Probe Sequence
taaatgggcacagtatgctccttac

SEQ ID NO: 301108 - DNA, 25 bp, Probe Sequence
taaaggcagcaaccattcatctttc

SEQ ID NO: 301109 - DNA, 25 bp, Probe Sequence
taaaatagcatgcctttctctcttt

SEQ ID NO: 301110 - DNA, 25 bp, Probe Sequence
taaaatagcatgcctttctctcttt

SEQ ID NO: 301111 - DNA, 25 bp, Probe Sequence
taaaatattgatccttcccttggac

SEQ ID NO: 301112 - DNA, 25 bp, Probe Sequence
taaagatgttgactcttacctgtga

SEQ ID NO: 301113 - DNA, 25 bp, Probe Sequence
taaacatttgtatatacctgtgaaa

SEQ ID NO: 301114 - DNA, 25 bp, Probe Sequence
taaactcttgcataatacattgata

SEQ ID NO: 301115 - DNA, 25 bp, Probe Sequence
taaatcatttagccactaagttatt

SEQ ID NO: 301116 - DNA, 25 bp, Probe Sequence
taaattacgatgtcctcaggttatc

SEQ ID NO: 301117 - DNA, 25 bp, Probe Sequence
tactcagaacttggcctacgtttcc

SEQ ID NO: 301118 - DNA, 25 bp, Probe Sequence
taacaaactgtcccatacgttacta

SEQ ID NO: 301119 - DNA, 25 bp, Probe Sequence
taacaacctgcttggcaagtttgaa

SEQ ID NO: 301120 - DNA, 25 bp, Probe Sequence
taaagtcacgctgggaacctgctaa

SEQ ID NO: 301121 - DNA, 25 bp, Probe Sequence
taaatgccagcctgagtacctgaag

SEQ ID NO: 301122 - DNA, 25 bp, Probe Sequence
tacaggccagcatggaacagcatct

SEQ ID NO: 301123 - DNA, 25 bp, Probe Sequence
taaagcctcaaggacatctgcctgt

SEQ ID NO: 301124 - DNA, 25 bp, Probe Sequence
taaactcagcaaagtctggcgtgat

SEQ ID NO: 301125 - DNA, 25 bp, Probe Sequence
tacaagccgcaaaggcagcaggcta

SEQ ID NO: 301126 - DNA, 25 bp, Probe Sequence
tacacatgccaaatggaccaatgtc

SEQ ID NO: 301127 - DNA, 25 bp, Probe Sequence
taaacatcaagttaccatatgattt

SEQ ID NO: 301128 - DNA, 25 bp, Probe Sequence
taaatacatcgtgacctgtgtaatt

SEQ ID NO: 301129 - DNA, 25 bp, Probe Sequence
taaatccatctgactacttgttcct

SEQ ID NO: 301130 - DNA, 25 bp, Probe Sequence
taaatccttttcttatgtgtactgg

SEQ ID NO: 301131 - DNA, 25 bp, Probe Sequence
tacactagcttaatctggtttacgg

SEQ ID NO: 301132 - DNA, 25 bp, Probe Sequence
taaatagcgtatacgagccttcacg

SEQ ID NO: 301133 - DNA, 25 bp, Probe Sequence
taaatcatgcgatcttggcactcct

SEQ ID NO: 301134 - DNA, 25 bp, Probe Sequence
taaaatgtgtacgtgggccagcatg

SEQ ID NO: 301135 - DNA, 25 bp, Probe Sequence
taaagattcgaatgcaggctcaagg

SEQ ID NO: 301136 - DNA, 25 bp, Probe Sequence
taaaattgcaaataggccatgcaca

SEQ ID NO: 301137 - DNA, 25 bp, Probe Sequence
taaattggcaaatgactcaagactc

SEQ ID NO: 301138 - DNA, 25 bp, Probe Sequence
taaaagtgctatgagacccaacctc

SEQ ID NO: 301139 - DNA, 25 bp, Probe Sequence
taaaatggcactgaaccaattttca

SEQ ID NO: 301140 - DNA, 25 bp, Probe Sequence
taaatattaccctccaagtctgtac

SEQ ID NO: 301141 - DNA, 25 bp, Probe Sequence
tacttatctactgtccgaaggcctt

SEQ ID NO: 301142 - DNA, 25 bp, Probe Sequence
tacttttaacattgcctcgtggcct

SEQ ID NO: 301143 - DNA, 25 bp, Probe Sequence
tactatttctacacctacttggata

SEQ ID NO: 301144 - DNA, 25 bp, Probe Sequence
tacttattttgctggttctctggca

SEQ ID NO: 301145 - DNA, 25 bp, Probe Sequence
tacagtgttctatacgttgttcccg

SEQ ID NO: 301146 - DNA, 25 bp, Probe Sequence
tacaatgtattatcaaccttttccc

SEQ ID NO: 301147 - DNA, 25 bp, Probe Sequence
tacttttgtaactcctactctactg

SEQ ID NO: 301148 - DNA, 25 bp, Probe Sequence
tacatcttttacaccttttctactg

SEQ ID NO: 301149 - DNA, 25 bp, Probe Sequence
tacactttgttttttatcacttact

SEQ ID NO: 301150 - DNA, 25 bp, Probe Sequence
tacacgtttgggttaatgtttcagt

SEQ ID NO: 301151 - DNA, 25 bp, Probe Sequence
tacaggtttagtatttttgcctgtt

SEQ ID NO: 301152 - DNA, 25 bp, Probe Sequence
taaactttactcatgtatttgtagt

SEQ ID NO: 301153 - DNA, 25 bp, Probe Sequence
taaacttgggtttttgtgatgtagg

SEQ ID NO: 301154 - DNA, 25 bp, Probe Sequence
taaacttgaagtggttgtgttgtag

SEQ ID NO: 301155 - DNA, 25 bp, Probe Sequence
taaactctgcacttattttgatttg

SEQ ID NO: 301156 - DNA, 25 bp, Probe Sequence
taaagactgaattttatctgtttta

SEQ ID NO: 301157 - DNA, 25 bp, Probe Sequence
taaagacgtattgaattgttgaatt

SEQ ID NO: 301158 - DNA, 25 bp, Probe Sequence
taaaatggtttcctattttgcttat

SEQ ID NO: 301159 - DNA, 25 bp, Probe Sequence
tacacatatgatgcccgtatttttt

SEQ ID NO: 301160 - DNA, 25 bp, Probe Sequence
taaaatgtcctatgtatatcttcta

SEQ ID NO: 301161 - DNA, 25 bp, Probe Sequence
taaaatgtcaacatcttcatcttct

SEQ ID NO: 301162 - DNA, 25 bp, Probe Sequence
taaaatatctatcttttcatcatgt

SEQ ID NO: 301163 - DNA, 25 bp, Probe Sequence
tacacttagtaaattcttccagatt

SEQ ID NO: 301164 - DNA, 25 bp, Probe Sequence
tacacttagctatgttttgcaactc

SEQ ID NO: 301165 - DNA, 25 bp, Probe Sequence
taaagctggtgctgtcttaaactgt

SEQ ID NO: 301166 - DNA, 25 bp, Probe Sequence
taaagcccctttgtgaaactgttct

SEQ ID NO: 301167 - DNA, 25 bp, Probe Sequence
taaaccccagttctgaatcacctac

SEQ ID NO: 301168 - DNA, 25 bp, Probe Sequence
taaacctccagaatattattagtct

SEQ ID NO: 301169 - DNA, 25 bp, Probe Sequence
taaaccccaagcgtattatagactt

SEQ ID NO: 301170 - DNA, 25 bp, Probe Sequence
taaaacacccacctgcatgtaatac

SEQ ID NO: 301171 - DNA, 25 bp, Probe Sequence
taaaaaccctagacatgctacagaa

SEQ ID NO: 301172 - DNA, 25 bp, Probe Sequence
taaaaggcctctacttctaaacact

SEQ ID NO: 301173 - DNA, 25 bp, Probe Sequence
taaataacccctttcaatatacctg

SEQ ID NO: 301174 - DNA, 25 bp, Probe Sequence
taaacaattacctttcatttatact

SEQ ID NO: 301175 - DNA, 25 bp, Probe Sequence
taaaaattacattcttctgatgtaa

SEQ ID NO: 301176 - DNA, 25 bp, Probe Sequence
taaaacaaccattgcatgtttgctt

SEQ ID NO: 301177 - DNA, 25 bp, Probe Sequence
taaaagcttctattgcagtcctctt

SEQ ID NO: 301178 - DNA, 25 bp, Probe Sequence
taaaatgctctctgtactctagtct

SEQ ID NO: 301179 - DNA, 25 bp, Probe Sequence
taaaatgctctctgtactctagtct

SEQ ID NO: 301180 - DNA, 25 bp, Probe Sequence
taaaggctgccaagttactccattg

SEQ ID NO: 301181 - DNA, 25 bp, Probe Sequence
taaaggctgccaagttactccattg

SEQ ID NO: 301182 - DNA, 25 bp, Probe Sequence
taaatagtgcactgtttcgccaagg

SEQ ID NO: 301183 - DNA, 25 bp, Probe Sequence
taaaagcattcatgtttctccacag

SEQ ID NO: 301184 - DNA, 25 bp, Probe Sequence
taaaatcaatcattacattcaccac

SEQ ID NO: 301185 - DNA, 25 bp, Probe Sequence
taaaatcaaccaacttcgacccaag

SEQ ID NO: 301186 - DNA, 25 bp, Probe Sequence
taaattaactatggcttcggcgctc

SEQ ID NO: 301187 - DNA, 25 bp, Probe Sequence
tatggtgtatgatgggttcaggcct

SEQ ID NO: 301188 - DNA, 25 bp, Probe Sequence
tacacagtagcatggggtacccttg

SEQ ID NO: 301189 - DNA, 25 bp, Probe Sequence
tacacccgcatatggcgtaaccttc

SEQ ID NO: 301190 - DNA, 25 bp, Probe Sequence
tacacaccttcgaggtgaccggcca

SEQ ID NO: 301191 - DNA, 25 bp, Probe Sequence
tacaacctcttgcggagcggggaag

SEQ ID NO: 301192 - DNA, 25 bp, Probe Sequence
tacaaactttgccctggccgagtga

SEQ ID NO: 301193 - DNA, 25 bp, Probe Sequence
tacaaactttgctatgggtccctga

SEQ ID NO: 301194 - DNA, 25 bp, Probe Sequence
taaaacttatgctatctgcggggcc

SEQ ID NO: 301195 - DNA, 25 bp, Probe Sequence
tacacggtcctgtttggggtgtcac

SEQ ID NO: 301196 - DNA, 25 bp, Probe Sequence
tacaaggattcgtttagctaattca

SEQ ID NO: 301197 - DNA, 25 bp, Probe Sequence
taaaggcagtcgtacatactacgta

SEQ ID NO: 301198 - DNA, 25 bp, Probe Sequence
taaagcaagctcagtcatacatgac

SEQ ID NO: 301199 - DNA, 25 bp, Probe Sequence
taaatgcagcatccacttcataatt

SEQ ID NO: 301200 - DNA, 25 bp, Probe Sequence
taaagagtctgccttctggatctca

SEQ ID NO: 301201 - DNA, 25 bp, Probe Sequence
taaacagttcccatgtgagccattc

SEQ ID NO: 301202 - DNA, 25 bp, Probe Sequence
taaatggtgtctctagtgagcacat

SEQ ID NO: 301203 - DNA, 25 bp, Probe Sequence
taaattcctcatagcaagtatcaag

SEQ ID NO: 301204 - DNA, 25 bp, Probe Sequence
taaatgtaatttgaagccagatgac

SEQ ID NO: 301205 - DNA, 25 bp, Probe Sequence
taaatgtcagaatcgaactcagaga

SEQ ID NO: 301206 - DNA, 25 bp, Probe Sequence
taaatgttcattaccaacttgataa

SEQ ID NO: 301207 - DNA, 25 bp, Probe Sequence
taaattattctgtagacactttcaa

SEQ ID NO: 301208 - DNA, 25 bp, Probe Sequence
taaatctgttctacacacgtgtatt

SEQ ID NO: 301209 - DNA, 25 bp, Probe Sequence
taaacctcacttaatggatgtagta

SEQ ID NO: 301210 - DNA, 25 bp, Probe Sequence
taaacctagctaaaagttactgcaa

SEQ ID NO: 301211 - DNA, 25 bp, Probe Sequence
taaactcctgcttaaggtgttctaa

SEQ ID NO: 301212 - DNA, 25 bp, Probe Sequence
taaagattttctcagtggtctagaa

SEQ ID NO: 301213 - DNA, 25 bp, Probe Sequence
taaacttgacccaggtggctagcaa

SEQ ID NO: 301214 - DNA, 25 bp, Probe Sequence
taaatcttaaacttggtgcccaact

SEQ ID NO: 301215 - DNA, 25 bp, Probe Sequence
taaattactaacttgtgtgttccta

SEQ ID NO: 301216 - DNA, 25 bp, Probe Sequence
tacaaattttagtgaggtatctcta

SEQ ID NO: 301217 - DNA, 25 bp, Probe Sequence
tacagactttccttctgggtttgta

SEQ ID NO: 301218 - DNA, 25 bp, Probe Sequence
taaactttctttagtagtatgttca

SEQ ID NO: 301219 - DNA, 25 bp, Probe Sequence
taaacttggcttgtctagagaccca

SEQ ID NO: 301220 - DNA, 25 bp, Probe Sequence
taaagccttccattttagaagccca

SEQ ID NO: 301221 - DNA, 25 bp, Probe Sequence
taaagttcttatactcaaaagcctt

SEQ ID NO: 301222 - DNA, 25 bp, Probe Sequence
taaagagccttcaccagaacagcgc

SEQ ID NO: 301223 - DNA, 25 bp, Probe Sequence
taaaaacttgcgccagagaaacaca

SEQ ID NO: 301224 - DNA, 25 bp, Probe Sequence
taaaaactcatcccatggccagggc

SEQ ID NO: 301225 - DNA, 25 bp, Probe Sequence
taaaaagcaacagtcctctgcaggg

SEQ ID NO: 301226 - DNA, 25 bp, Probe Sequence
taaaaagcataattttctcattctg

SEQ ID NO: 301227 - DNA, 25 bp, Probe Sequence
taaaaaattgttactccatacggct

SEQ ID NO: 301228 - DNA, 25 bp, Probe Sequence
taaataggttttcctcacttcaggc

SEQ ID NO: 301229 - DNA, 25 bp, Probe Sequence
taaataggttttcctcacttcaggc

SEQ ID NO: 301230 - DNA, 25 bp, Probe Sequence
taaagcagtgtttgctccaccttca

SEQ ID NO: 301231 - DNA, 25 bp, Probe Sequence
taaagcatgccttatttagcctctc

SEQ ID NO: 301232 - DNA, 25 bp, Probe Sequence
taaagcatgccttatttagcctctc

SEQ ID NO: 301233 - DNA, 25 bp, Probe Sequence
tacagaatgcctgacttgcccttac

SEQ ID NO: 301234 - DNA, 25 bp, Probe Sequence
tacaacagacttaagacccgttcaa

SEQ ID NO: 301235 - DNA, 25 bp, Probe Sequence
taaactggatactaatcccttataa

SEQ ID NO: 301236 - DNA, 25 bp, Probe Sequence
taaagccaggactattccctttcct

SEQ ID NO: 301237 - DNA, 25 bp, Probe Sequence
taaactcttataactccactttcct

SEQ ID NO: 301238 - DNA, 25 bp, Probe Sequence
taaatcatacgagccccaatttcct

SEQ ID NO: 301239 - DNA, 25 bp, Probe Sequence
taaagcatacgggtcctggcatctt

SEQ ID NO: 301240 - DNA, 25 bp, Probe Sequence
taaagacaaggttccaggcagctgg

SEQ ID NO: 301241 - DNA, 25 bp, Probe Sequence
taaaggacatgacctccgagcagct

SEQ ID NO: 301242 - DNA, 25 bp, Probe Sequence
taaagaacaaccatgtgggctttcc

SEQ ID NO: 301243 - DNA, 25 bp, Probe Sequence
taaataaagcagggtgggctcttta

SEQ ID NO: 301244 - DNA, 25 bp, Probe Sequence
taaaaacaagtcttctcgatttata

SEQ ID NO: 301245 - DNA, 25 bp, Probe Sequence
taaaggaacatgtatttcctttcta

SEQ ID NO: 301246 - DNA, 25 bp, Probe Sequence
taaagcgttttaattcctttctctg

SEQ ID NO: 301247 - DNA, 25 bp, Probe Sequence
taaagcagtatttctacccttttag

SEQ ID NO: 301248 - DNA, 25 bp, Probe Sequence
tacaacaggtatgtttttgtttcag

SEQ ID NO: 301249 - DNA, 25 bp, Probe Sequence
taaacagcacagattttttctttct

SEQ ID NO: 301250 - DNA, 25 bp, Probe Sequence
taaacacatatcgtttctttttctt

SEQ ID NO: 301251 - DNA, 25 bp, Probe Sequence
taaactgtacagtgtctttttttgt

SEQ ID NO: 301252 - DNA, 25 bp, Probe Sequence
taaagggcacagtttgtatattttt

SEQ ID NO: 301253 - DNA, 25 bp, Probe Sequence
taaagggagcattcttttccctctt

SEQ ID NO: 301254 - DNA, 25 bp, Probe Sequence
taaatggtgcaactctgggtcccag

SEQ ID NO: 301255 - DNA, 25 bp, Probe Sequence
taaacgtgcagactatgcaaaccag

SEQ ID NO: 301256 - DNA, 25 bp, Probe Sequence
taaaagcacagcatacacaacccca

SEQ ID NO: 301257 - DNA, 25 bp, Probe Sequence
taaagctgcagagctagcccagacc

SEQ ID NO: 301258 - DNA, 25 bp, Probe Sequence
taaactgagcagtctcataccatgg

SEQ ID NO: 301259 - DNA, 25 bp, Probe Sequence
taaacggcaccagtaccaacagcac

SEQ ID NO: 301260 - DNA, 25 bp, Probe Sequence
taaactgcgcatcatgaagccccag

SEQ ID NO: 301261 - DNA, 25 bp, Probe Sequence
taaagtgccagtaatccgccaagag

SEQ ID NO: 301262 - DNA, 25 bp, Probe Sequence
taaagatgtcagagtgccccaagct

SEQ ID NO: 301263 - DNA, 25 bp, Probe Sequence
tacactgggcagctggccctgaact

SEQ ID NO: 301264 - DNA, 25 bp, Probe Sequence
tacactgggcagctggccctgaact

SEQ ID NO: 301265 - DNA, 25 bp, Probe Sequence
tacaccgtgcacctgggcagtgata

SEQ ID NO: 301266 - DNA, 25 bp, Probe Sequence
tacaagttgctactggatcaggagc

SEQ ID NO: 301267 - DNA, 25 bp, Probe Sequence
taaagtatgctacaatctgtgtcat

SEQ ID NO: 301268 - DNA, 25 bp, Probe Sequence
taaagtcattagtataatattgctt

SEQ ID NO: 301269 - DNA, 25 bp, Probe Sequence
taaagctatggcatcatataatttg

SEQ ID NO: 301270 - DNA, 25 bp, Probe Sequence
taaagcctgctgatcttaagaagag

SEQ ID NO: 301271 - DNA, 25 bp, Probe Sequence
taaagcttgctaccgctcaaaaaaa

SEQ ID NO: 301272 - DNA, 25 bp, Probe Sequence
taaagtgtgcgatcttcaaaaaaaa

SEQ ID NO: 301273 - DNA, 25 bp, Probe Sequence
tagacagttggtgtaataaataatc

SEQ ID NO: 301274 - DNA, 25 bp, Probe Sequence
taaagacgttttataagcatcatta

SEQ ID NO: 301275 - DNA, 25 bp, Probe Sequence
taaagagcactattttttaatgaaa

SEQ ID NO: 301276 - DNA, 25 bp, Probe Sequence
taaaagctgtttttgttgttgtaca

SEQ ID NO: 301277 - DNA, 25 bp, Probe Sequence
taaactgatgtttttgtcgttgtca

SEQ ID NO: 301278 - DNA, 25 bp, Probe Sequence
taaatttgctgttctggtattacca

SEQ ID NO: 301279 - DNA, 25 bp, Probe Sequence
taaacattgcaggataggtagtaaa

SEQ ID NO: 301280 - DNA, 25 bp, Probe Sequence
taaacttgagtcttgaatgtgaaaa

SEQ ID NO: 301281 - DNA, 25 bp, Probe Sequence
tactagcttcagaaatgcacattga

SEQ ID NO: 301282 - DNA, 25 bp, Probe Sequence
tacaactggagaagtgcacatctgg

SEQ ID NO: 301283 - DNA, 25 bp, Probe Sequence
taaactgagagtagagtgcttagtt

SEQ ID NO: 301284 - DNA, 25 bp, Probe Sequence
taaactgttgtgccagtgcttaggc

SEQ ID NO: 301285 - DNA, 25 bp, Probe Sequence
taaacattttgtcttatgggaagtt

SEQ ID NO: 301286 - DNA, 25 bp, Probe Sequence
taaactttagttaatgatgtgtcaa

SEQ ID NO: 301287 - DNA, 25 bp, Probe Sequence
tacaattttatttttttctgcaaga

SEQ ID NO: 301288 - DNA, 25 bp, Probe Sequence
tacaatttatgttttcctgttgaat

SEQ ID NO: 301289 - DNA, 25 bp, Probe Sequence
taaactttatcccatcgctttgatt

SEQ ID NO: 301290 - DNA, 25 bp, Probe Sequence
taaattttatttccagctcctgttc

SEQ ID NO: 301291 - DNA, 25 bp, Probe Sequence
taaattttgcactgctcaattctgt

SEQ ID NO: 301292 - DNA, 25 bp, Probe Sequence
taaatattctgcggtctaatcccat

SEQ ID NO: 301293 - DNA, 25 bp, Probe Sequence
tacaataagcgtttctgcagtcccg

SEQ ID NO: 301294 - DNA, 25 bp, Probe Sequence
taaatgaactgttatctccctccaa

SEQ ID NO: 301295 - DNA, 25 bp, Probe Sequence
taaaaatatgtattactacctgcaa

SEQ ID NO: 301296 - DNA, 25 bp, Probe Sequence
taaagaattgctgctactttgtgca

SEQ ID NO: 301297 - DNA, 25 bp, Probe Sequence
taaagactttcttactcttcgcagt

SEQ ID NO: 301298 - DNA, 25 bp, Probe Sequence
taaagacttttccatctcttaagat

SEQ ID NO: 301299 - DNA, 25 bp, Probe Sequence
taaagcctttttacacatctcaaaa

SEQ ID NO: 301300 - DNA, 25 bp, Probe Sequence
taaagcagtatttttcttgacaaaa

SEQ ID NO: 301301 - DNA, 25 bp, Probe Sequence
taaatgagtacttgattcttcagaa

SEQ ID NO: 301302 - DNA, 25 bp, Probe Sequence
taaagactaaggtttcgagagcatt

SEQ ID NO: 301303 - DNA, 25 bp, Probe Sequence
taaatatctactgtttgccaggcat

SEQ ID NO: 301304 - DNA, 25 bp, Probe Sequence
tacacaccaactgctttgaggtcac

SEQ ID NO: 301305 - DNA, 25 bp, Probe Sequence
taaaaagcctaccaatgagagctca

SEQ ID NO: 301306 - DNA, 25 bp, Probe Sequence
taaacagtcactggaaagagtgcca

SEQ ID NO: 301307 - DNA, 25 bp, Probe Sequence
taaacattattctcaagcacatgca

SEQ ID NO: 301308 - DNA, 25 bp, Probe Sequence
taaagctctgtttcctagcacagca

SEQ ID NO: 301309 - DNA, 25 bp, Probe Sequence
taaagtggattgtcactcagaaaaa

SEQ ID NO: 301310 - DNA, 25 bp, Probe Sequence
taaactgtggatgcactagacaaga

SEQ ID NO: 301311 - DNA, 25 bp, Probe Sequence
taaacttgcacatgactggaacgaa

SEQ ID NO: 301312 - DNA, 25 bp, Probe Sequence
taaacttgcacatgactggaacgaa

SEQ ID NO: 301313 - DNA, 25 bp, Probe Sequence
taaagccagcacttttggaactaat

SEQ ID NO: 301314 - DNA, 25 bp, Probe Sequence
taaaacaccatcattaagaataatt

SEQ ID NO: 301315 - DNA, 25 bp, Probe Sequence
taaatacccaccatacaatagagat

SEQ ID NO: 301316 - DNA, 25 bp, Probe Sequence
taaatgcacccagcttaagtagaag

SEQ ID NO: 301317 - DNA, 25 bp, Probe Sequence
taaacaatccaaatctaagcttaga

SEQ ID NO: 301318 - DNA, 25 bp, Probe Sequence
tacgagcaacgaataataacctgga

SEQ ID NO: 301319 - DNA, 25 bp, Probe Sequence
tacagaaaagatgataaaccttaga

SEQ ID NO: 301320 - DNA, 25 bp, Probe Sequence
tacagaaacatgttaaaggccggac

SEQ ID NO: 301321 - DNA, 25 bp, Probe Sequence
tactgaacatagttaggttcctgga

SEQ ID NO: 301322 - DNA, 25 bp, Probe Sequence
tactaaatattaagtgttctttgac

SEQ ID NO: 301323 - DNA, 25 bp, Probe Sequence
tactaacttatgaactccaatttga

SEQ ID NO: 301324 - DNA, 25 bp, Probe Sequence
tacaataatgttactctacaaatgg

SEQ ID NO: 301325 - DNA, 25 bp, Probe Sequence
taaatgaagattaccctcaaatgct

SEQ ID NO: 301326 - DNA, 25 bp, Probe Sequence
taaacaggcatctaccctacaactc

SEQ ID NO: 301327 - DNA, 25 bp, Probe Sequence
taaataatgtcatcgcctccaactg

SEQ ID NO: 301328 - DNA, 25 bp, Probe Sequence
taaatgaaatgcttccacagctaac

SEQ ID NO: 301329 - DNA, 25 bp, Probe Sequence
tagcatcgagaaaatcaacggaacc

SEQ ID NO: 301330 - DNA, 25 bp, Probe Sequence
tacacaacagcaaatcatcagggag

SEQ ID NO: 301331 - DNA, 25 bp, Probe Sequence
tacagcataagccttatcctgccag

SEQ ID NO: 301332 - DNA, 25 bp, Probe Sequence
tacatacacatgttgatatacatct

SEQ ID NO: 301333 - DNA, 25 bp, Probe Sequence
tacaagcctgagtctaaacatatta

SEQ ID NO: 301334 - DNA, 25 bp, Probe Sequence
taaatgtgatagtctcagaaacatt

SEQ ID NO: 301335 - DNA, 25 bp, Probe Sequence
taaatggctcatgtagataaggtag

SEQ ID NO: 301336 - DNA, 25 bp, Probe Sequence
tacacattgcttgcgagaactggtt

SEQ ID NO: 301337 - DNA, 25 bp, Probe Sequence
taaactctgttccatacacttgtat

SEQ ID NO: 301338 - DNA, 25 bp, Probe Sequence
taaacattgtttacccatagtaggg

SEQ ID NO: 301339 - DNA, 25 bp, Probe Sequence
tacttcaatttgaacccatttgagg

SEQ ID NO: 301340 - DNA, 25 bp, Probe Sequence
tactaatacgtctccctttggggat

SEQ ID NO: 301341 - DNA, 25 bp, Probe Sequence
taaaaacctcttgcattttggctaa

SEQ ID NO: 301342 - DNA, 25 bp, Probe Sequence
ttaacaacccgtgctttgaagaaga

SEQ ID NO: 301343 - DNA, 25 bp, Probe Sequence
taaacagaccccgtctggcaagaaa

SEQ ID NO: 301344 - DNA, 25 bp, Probe Sequence
taaaaatctgccacctgcacaggta

SEQ ID NO: 301345 - DNA, 25 bp, Probe Sequence
taaataatcctctacattagcggta

SEQ ID NO: 301346 - DNA, 25 bp, Probe Sequence
tagtaaatcccttcagtatttatcc

SEQ ID NO: 301347 - DNA, 25 bp, Probe Sequence
tacatataacccagcgattccattc

SEQ ID NO: 301348 - DNA, 25 bp, Probe Sequence
tactacaaccagagcgaggccaacc

SEQ ID NO: 301349 - DNA, 25 bp, Probe Sequence
tactacaaccagagcgaggccaacc

SEQ ID NO: 301350 - DNA, 25 bp, Probe Sequence
tacaatcatgccacgggggccaaca

SEQ ID NO: 301351 - DNA, 25 bp, Probe Sequence
taaagatgggtccgtggcccacact

SEQ ID NO: 301352 - DNA, 25 bp, Probe Sequence
taaagagaggtccttcagcacagca

SEQ ID NO: 301353 - DNA, 25 bp, Probe Sequence
taaagaaaggctttcccagcatcac

SEQ ID NO: 301354 - DNA, 25 bp, Probe Sequence
taaagctaagcagtcctgccgtcat

SEQ ID NO: 301355 - DNA, 25 bp, Probe Sequence
taaatcaacaaaactgctcgccaga

SEQ ID NO: 301356 - DNA, 25 bp, Probe Sequence
taaagctaaagaacttctgcacgca

SEQ ID NO: 301357 - DNA, 25 bp, Probe Sequence
taaagttcaagcactggctgggcac

SEQ ID NO: 301358 - DNA, 25 bp, Probe Sequence
taaatgaccaaagttgggagatcac

SEQ ID NO: 301359 - DNA, 25 bp, Probe Sequence
taaatatgtcaaaattgtggagaag

SEQ ID NO: 301360 - DNA, 25 bp, Probe Sequence
tacactatgatgtttgagtcgggaa

SEQ ID NO: 301361 - DNA, 25 bp, Probe Sequence
tacacaagggtggctgtctggggca

SEQ ID NO: 301362 - DNA, 25 bp, Probe Sequence
tacacaagggtggctgtctggggca

SEQ ID NO: 301363 - DNA, 25 bp, Probe Sequence
taaaccggtcgcctctggcagcgaa

SEQ ID NO: 301364 - DNA, 25 bp, Probe Sequence
taaactgcagtcacgttggcctgaa

SEQ ID NO: 301365 - DNA, 25 bp, Probe Sequence
taaacgagacgggtgcatctgcgtg

SEQ ID NO: 301366 - DNA, 25 bp, Probe Sequence
taaagaggacgcgtcactcgctgtc

SEQ ID NO: 301367 - DNA, 25 bp, Probe Sequence
taaagaggtgccttcagctggtggg

SEQ ID NO: 301368 - DNA, 25 bp, Probe Sequence
taaagaatggccgagccttggggga

SEQ ID NO: 301369 - DNA, 25 bp, Probe Sequence
taaagatgaggggggcctgtcgcgg

SEQ ID NO: 301370 - DNA, 25 bp, Probe Sequence
taaagtgaggcctggcacagtagct

SEQ ID NO: 301371 - DNA, 25 bp, Probe Sequence
taaagattagcctggctgatatggt

SEQ ID NO: 301372 - DNA, 25 bp, Probe Sequence
taaattctaacccagggcatggggt

SEQ ID NO: 301373 - DNA, 25 bp, Probe Sequence
taaatttctagccctctcgcagggc

SEQ ID NO: 301374 - DNA, 25 bp, Probe Sequence
taaactctctagcacttggcatgta

SEQ ID NO: 301375 - DNA, 25 bp, Probe Sequence
taaagctgtgctgggactctggtgc

SEQ ID NO: 301376 - DNA, 25 bp, Probe Sequence
taaagctgtgctgggactctggtgc

SEQ ID NO: 301377 - DNA, 25 bp, Probe Sequence
taaacagtgctccgaccctgaaaaa

SEQ ID NO: 301378 - DNA, 25 bp, Probe Sequence
taaacatgtgccctcaggccaaaaa

SEQ ID NO: 301379 - DNA, 25 bp, Probe Sequence
taaacagtacctgctctcaaattga

SEQ ID NO: 301380 - DNA, 25 bp, Probe Sequence
taaagaatcaccaactgtaaacatg

SEQ ID NO: 301381 - DNA, 25 bp, Probe Sequence
tacaagtacctgaatgctgcgacaa

SEQ ID NO: 301382 - DNA, 25 bp, Probe Sequence
tacaattagctattatccgatccat

SEQ ID NO: 301383 - DNA, 25 bp, Probe Sequence
taaatcatactttgtcttccatcat

SEQ ID NO: 301384 - DNA, 25 bp, Probe Sequence
taaaaatcacattctctgttcagct

SEQ ID NO: 301385 - DNA, 25 bp, Probe Sequence
taaacactatcttatcttctcctga

SEQ ID NO: 301386 - DNA, 25 bp, Probe Sequence
taaacttatctggtgcattctcccc

SEQ ID NO: 301387 - DNA, 25 bp, Probe Sequence
taaactctcctagtcaatatccacc

SEQ ID NO: 301388 - DNA, 25 bp, Probe Sequence
tacacaaatccagctaacaccagcc

SEQ ID NO: 301389 - DNA, 25 bp, Probe Sequence
tacacaaaggcttccagacctgagc

SEQ ID NO: 301390 - DNA, 25 bp, Probe Sequence
taaattcaggcttcagcacgccgtc

SEQ ID NO: 301391 - DNA, 25 bp, Probe Sequence
taaagtcagagttggcatgccttgt

SEQ ID NO: 301392 - DNA, 25 bp, Probe Sequence
taaaggaggtcgccagcatcattct

SEQ ID NO: 301393 - DNA, 25 bp, Probe Sequence
tacacaaaggacctcagctgcttct

SEQ ID NO: 301394 - DNA, 25 bp, Probe Sequence
tacaaatgaggcctccatctcggct

SEQ ID NO: 301395 - DNA, 25 bp, Probe Sequence
tacaaagagagccaacttacagatg

SEQ ID NO: 301396 - DNA, 25 bp, Probe Sequence
tacaatcaagtcattttacctttac

SEQ ID NO: 301397 - DNA, 25 bp, Probe Sequence
taaacaagctgcacattacacctct

SEQ ID NO: 301398 - DNA, 25 bp, Probe Sequence
tacaaacacatcacctgacgtctct

SEQ ID NO: 301399 - DNA, 25 bp, Probe Sequence
tacaagatggttgccgggtcatgtt

SEQ ID NO: 301400 - DNA, 25 bp, Probe Sequence
taaactgtgtgttctccatggtcat

SEQ ID NO: 301401 - DNA, 25 bp, Probe Sequence
taaagtgtcttctatctcattgtat

SEQ ID NO: 301402 - DNA, 25 bp, Probe Sequence
taaaggattgatttgctattatttt

SEQ ID NO: 301403 - DNA, 25 bp, Probe Sequence
taaaccatgtattcccttatctttt

SEQ ID NO: 301404 - DNA, 25 bp, Probe Sequence
taaatgccagtatctcagtctttct

SEQ ID NO: 301405 - DNA, 25 bp, Probe Sequence
tacaagacagtccaccgttttgttt

SEQ ID NO: 301406 - DNA, 25 bp, Probe Sequence
tacacagacagtggcccttttgtgg

SEQ ID NO: 301407 - DNA, 25 bp, Probe Sequence
tacaagggcctgcatcatctttggc

SEQ ID NO: 301408 - DNA, 25 bp, Probe Sequence
taaagtgagaccctatctcttaaaa

SEQ ID NO: 301409 - DNA, 25 bp, Probe Sequence
taaatgtcagacactattaaataga

SEQ ID NO: 301410 - DNA, 25 bp, Probe Sequence
taaattcatagcccaacaaggtaat

SEQ ID NO: 301411 - DNA, 25 bp, Probe Sequence
tatcgatgggacccagacaaggctg

SEQ ID NO: 301412 - DNA, 25 bp, Probe Sequence
tacagccgcttcctgcgaaaggctg

SEQ ID NO: 301413 - DNA, 25 bp, Probe Sequence
tacagccagtcagacttcaaggctt

SEQ ID NO: 301414 - DNA, 25 bp, Probe Sequence
tacagcgttgcagaacatgaacgat

SEQ ID NO: 301415 - DNA, 25 bp, Probe Sequence
tacagcaactatttcaaagcccatt

SEQ ID NO: 301416 - DNA, 25 bp, Probe Sequence
taaaccatgatcttgaaagtgccaa

SEQ ID NO: 301417 - DNA, 25 bp, Probe Sequence
taaacatgcatttcataactgtcaa

SEQ ID NO: 301418 - DNA, 25 bp, Probe Sequence
tacacaatcttgtatttgcagtgaa

SEQ ID NO: 301419 - DNA, 25 bp, Probe Sequence
taaacagtataaaatgcgtgaaccc

SEQ ID NO: 301420 - DNA, 25 bp, Probe Sequence
taaagtgtataaaaggaccagccca

SEQ ID NO: 301421 - DNA, 25 bp, Probe Sequence
taaacttagaatcatgaaccccacc

SEQ ID NO: 301422 - DNA, 25 bp, Probe Sequence
taaactttgagtcatgaacctccct

SEQ ID NO: 301423 - DNA, 25 bp, Probe Sequence
tacgcacttttgcaggatgacctca

SEQ ID NO: 301424 - DNA, 25 bp, Probe Sequence
tacagttttttccgcagacttcttt

SEQ ID NO: 301425 - DNA, 25 bp, Probe Sequence
tacttgctttttgcaaagctaatta

SEQ ID NO: 301426 - DNA, 25 bp, Probe Sequence
tacttcctctgtttaacagtccttg

SEQ ID NO: 301427 - DNA, 25 bp, Probe Sequence
tactattcctgttgtaaagttagat

SEQ ID NO: 301428 - DNA, 25 bp, Probe Sequence
taaatgtgccttagcctaagcctcc

SEQ ID NO: 301429 - DNA, 25 bp, Probe Sequence
taaatgatcctttgttcacggctct

SEQ ID NO: 301430 - DNA, 25 bp, Probe Sequence
taaattcctaatgtacattgtgctc

SEQ ID NO: 301431 - DNA, 25 bp, Probe Sequence
taaatttccttggtcatttctgccc

SEQ ID NO: 301432 - DNA, 25 bp, Probe Sequence
taaatttccttggtcatttctgccc

SEQ ID NO: 301433 - DNA, 25 bp, Probe Sequence
taaactcatcaatgtgcctttgcat

SEQ ID NO: 301434 - DNA, 25 bp, Probe Sequence
taaacttcaacactctttatgataa

SEQ ID NO: 301435 - DNA, 25 bp, Probe Sequence
tacagggtccaccctttatcataaa

SEQ ID NO: 301436 - DNA, 25 bp, Probe Sequence
taccgttggggagttctatataagc

SEQ ID NO: 301437 - DNA, 25 bp, Probe Sequence
taccggtgggaggttctataataag

SEQ ID NO: 301438 - DNA, 25 bp, Probe Sequence
tatccccgggatcatttaaaccaga

SEQ ID NO: 301439 - DNA, 25 bp, Probe Sequence
tattccctgggttttctataaacag

SEQ ID NO: 301440 - DNA, 25 bp, Probe Sequence
tattccctgggttttctataaacag

SEQ ID NO: 301441 - DNA, 25 bp, Probe Sequence
taaaccttggtctttcttgaatcca

SEQ ID NO: 301442 - DNA, 25 bp, Probe Sequence
taaaccattgtgactattgttggtc

SEQ ID NO: 301443 - DNA, 25 bp, Probe Sequence
tacaaccagttgaaatttccagtaa

SEQ ID NO: 301444 - DNA, 25 bp, Probe Sequence
taaaccggcattgtattccaaagac

SEQ ID NO: 301445 - DNA, 25 bp, Probe Sequence
taaatttggcttgtttcacaaaatg

SEQ ID NO: 301446 - DNA, 25 bp, Probe Sequence
taaatgtcccttgttacataaacaa

SEQ ID NO: 301447 - DNA, 25 bp, Probe Sequence
taaagtcctccatgttgaaaaataa

SEQ ID NO: 301448 - DNA, 25 bp, Probe Sequence
taaagcactttctctctgaaaaaaa

SEQ ID NO: 301449 - DNA, 25 bp, Probe Sequence
taaagcacctatgtactgagccaaa

SEQ ID NO: 301450 - DNA, 25 bp, Probe Sequence
taaaccacattggaactgacctgaa

SEQ ID NO: 301451 - DNA, 25 bp, Probe Sequence
tagctgcattactgccaactgacct

SEQ ID NO: 301452 - DNA, 25 bp, Probe Sequence
tactgggaaacctgctacttcgtca

SEQ ID NO: 301453 - DNA, 25 bp, Probe Sequence
tacttggaaaatgatgctgttaggt

SEQ ID NO: 301454 - DNA, 25 bp, Probe Sequence
tacttccaaacaagaatgtctgagg

SEQ ID NO: 301455 - DNA, 25 bp, Probe Sequence
tactcttcgcagtcaggtaagcagg

SEQ ID NO: 301456 - DNA, 25 bp, Probe Sequence
tacttctacagatgattatgcagca

SEQ ID NO: 301457 - DNA, 25 bp, Probe Sequence
tacttaccagcagaattcagctacc

SEQ ID NO: 301458 - DNA, 25 bp, Probe Sequence
tagttcaccactgacatacggcact

SEQ ID NO: 301459 - DNA, 25 bp, Probe Sequence
tagtccagccaaaccagactacctt

SEQ ID NO: 301460 - DNA, 25 bp, Probe Sequence
tactgcccgcaaagctcgcgctaca

SEQ ID NO: 301461 - DNA, 25 bp, Probe Sequence
tacgctgtaataggtcgcttaaaga

SEQ ID NO: 301462 - DNA, 25 bp, Probe Sequence
tacttgttatatggaccctaagata

SEQ ID NO: 301463 - DNA, 25 bp, Probe Sequence
tacatatgttttcacacgtacagga

SEQ ID NO: 301464 - DNA, 25 bp, Probe Sequence
taaatgtttttggccgggcgtggtg

SEQ ID NO: 301465 - DNA, 25 bp, Probe Sequence
taaatgtttttggccgggcgtggtg

SEQ ID NO: 301466 - DNA, 25 bp, Probe Sequence
taaatgattgttctccaaggcctga

SEQ ID NO: 301467 - DNA, 25 bp, Probe Sequence
tacaaataattagtccgggcgtgat

SEQ ID NO: 301468 - DNA, 25 bp, Probe Sequence
tacaagaaactagccagatgcggtg

SEQ ID NO: 301469 - DNA, 25 bp, Probe Sequence
tacaagtgaccattgccctagaggg

SEQ ID NO: 301470 - DNA, 25 bp, Probe Sequence
taaagcagactcttcctctgcaagt

SEQ ID NO: 301471 - DNA, 25 bp, Probe Sequence
taaagcatttatttgcagctgcaag

SEQ ID NO: 301472 - DNA, 25 bp, Probe Sequence
taaaccatctgaattggctcaatga

SEQ ID NO: 301473 - DNA, 25 bp, Probe Sequence
tacaaccttgaactgctgggatcaa

SEQ ID NO: 301474 - DNA, 25 bp, Probe Sequence
tacatgacgacaaagctgctaaatc

SEQ ID NO: 301475 - DNA, 25 bp, Probe Sequence
tacaagcagagactcactccaaccc

SEQ ID NO: 301476 - DNA, 25 bp, Probe Sequence
tacaaggagagcttcgccaatgccg

SEQ ID NO: 301477 - DNA, 25 bp, Probe Sequence
tacaaggctggcatgactcacatcg

SEQ ID NO: 301478 - DNA, 25 bp, Probe Sequence
tacataactgcggtaatgcccgcct

SEQ ID NO: 301479 - DNA, 25 bp, Probe Sequence
tacaaagccctgaagatgccctacc

SEQ ID NO: 301480 - DNA, 25 bp, Probe Sequence
tacagacccctagggtcctgacagg

SEQ ID NO: 301481 - DNA, 25 bp, Probe Sequence
tacagaggccacacatggtccagac

SEQ ID NO: 301482 - DNA, 25 bp, Probe Sequence
tacaaacaagcccattgtcctgtgc

SEQ ID NO: 301483 - DNA, 25 bp, Probe Sequence
tacacacaagggccaggctccattc

SEQ ID NO: 301484 - DNA, 25 bp, Probe Sequence
tacacacaagggccaggctccattc

SEQ ID NO: 301485 - DNA, 25 bp, Probe Sequence
tacactcaagtgtgcaagttcacca

SEQ ID NO: 301486 - DNA, 25 bp, Probe Sequence
taaactgatggctcacagactgcac

SEQ ID NO: 301487 - DNA, 25 bp, Probe Sequence
tacccatgatgagccgcgaggatca

SEQ ID NO: 301488 - DNA, 25 bp, Probe Sequence
tacacgtatgcagccatgctcagga

SEQ ID NO: 301489 - DNA, 25 bp, Probe Sequence
taaagtgcacagtcactgtagtgac

SEQ ID NO: 301490 - DNA, 25 bp, Probe Sequence
taaatctaagattctgctgaggagc

SEQ ID NO: 301491 - DNA, 25 bp, Probe Sequence
tagatttccctattgtgacagagcc

SEQ ID NO: 301492 - DNA, 25 bp, Probe Sequence
tagtagcccaaattataaaccactt

SEQ ID NO: 301493 - DNA, 25 bp, Probe Sequence
tactggcccaaacaaagagaccaat

SEQ ID NO: 301494 - DNA, 25 bp, Probe Sequence
tactacccagacaccaaaagaagaa

SEQ ID NO: 301495 - DNA, 25 bp, Probe Sequence
tagtacccacacatgcaaaataaat

SEQ ID NO: 301496 - DNA, 25 bp, Probe Sequence
taaacgcctccttcaaaaagcaatc

SEQ ID NO: 301497 - DNA, 25 bp, Probe Sequence
tacataccccctacaaacaagttct

SEQ ID NO: 301498 - DNA, 25 bp, Probe Sequence
tacattgatcaggccatccaggaca

SEQ ID NO: 301499 - DNA, 25 bp, Probe Sequence
tacatgagcatcaccatcttggtct

SEQ ID NO: 301500 - DNA, 25 bp, Probe Sequence
tacaagatccccgactggtttttga

SEQ ID NO: 301501 - DNA, 25 bp, Probe Sequence
tacaagatcccagactggttcttga

SEQ ID NO: 301502 - DNA, 25 bp, Probe Sequence
tactggacctactcagggtctctga

SEQ ID NO: 301503 - DNA, 25 bp, Probe Sequence
tactggtcccactgtgcagtacatc

SEQ ID NO: 301504 - DNA, 25 bp, Probe Sequence
tacttgcctacagtggggtgcagtc

SEQ ID NO: 301505 - DNA, 25 bp, Probe Sequence
tacagtttgagtgggcgtggcattc

SEQ ID NO: 301506 - DNA, 25 bp, Probe Sequence
tacaggcttgggggtgagccctgct

SEQ ID NO: 301507 - DNA, 25 bp, Probe Sequence
tacaaggtagtgggtcgctgcctgc

SEQ ID NO: 301508 - DNA, 25 bp, Probe Sequence
tacaaagtttgatcacctgcctgca

SEQ ID NO: 301509 - DNA, 25 bp, Probe Sequence
tacaagcagttaatcacccaccata

SEQ ID NO: 301510 - DNA, 25 bp, Probe Sequence
tacaagcagttaatcacccaccata

SEQ ID NO: 301511 - DNA, 25 bp, Probe Sequence
tacaagcagttaatcacccaccata

SEQ ID NO: 301512 - DNA, 25 bp, Probe Sequence
taaaggtctgatgatcacacacaaa

SEQ ID NO: 301513 - DNA, 25 bp, Probe Sequence
taaagttggatgcccacactatgaa

SEQ ID NO: 301514 - DNA, 25 bp, Probe Sequence
taaattatggagcacaatgtaagac

SEQ ID NO: 301515 - DNA, 25 bp, Probe Sequence
taaagtcataactccatgatgcaaa

SEQ ID NO: 301516 - DNA, 25 bp, Probe Sequence
taaagtcatcaatacctcaaaaaaa

SEQ ID NO: 301517 - DNA, 25 bp, Probe Sequence
taaagtcatcaatacctcaaaaaaa

SEQ ID NO: 301518 - DNA, 25 bp, Probe Sequence
tacaaaaaactactcagctataaaa

SEQ ID NO: 301519 - DNA, 25 bp, Probe Sequence
taaatgaagaaccatgttgtgcatg

SEQ ID NO: 301520 - DNA, 25 bp, Probe Sequence
taaagcaacaggcctttctcaggtg

SEQ ID NO: 301521 - DNA, 25 bp, Probe Sequence
tacaagcaaaggtctctggctagcg

SEQ ID NO: 301522 - DNA, 25 bp, Probe Sequence
tacctgccacgtatcggcgaaggtt

SEQ ID NO: 301523 - DNA, 25 bp, Probe Sequence
tacgtgcgcctttctgccggacgcg

SEQ ID NO: 301524 - DNA, 25 bp, Probe Sequence
taccgtcactttgacgagaccgtca

SEQ ID NO: 301525 - DNA, 25 bp, Probe Sequence
tacggtcactgttggtgcgagactt

SEQ ID NO: 301526 - DNA, 25 bp, Probe Sequence
tacagactactggatggtgaagaat

SEQ ID NO: 301527 - DNA, 25 bp, Probe Sequence
tacatcctactgtgcgtgtatatac

SEQ ID NO: 301528 - DNA, 25 bp, Probe Sequence
tacttgaactggcaggaaatgcatc

SEQ ID NO: 301529 - DNA, 25 bp, Probe Sequence
tacagtggatgtgggggaaatgaaa

SEQ ID NO: 301530 - DNA, 25 bp, Probe Sequence
ttaggaggagctgggtgaactgtac

SEQ ID NO: 301531 - DNA, 25 bp, Probe Sequence
tttgctacgggccctagacaatacg

SEQ ID NO: 301532 - DNA, 25 bp, Probe Sequence
tactgcaactggggcctacatacaa

SEQ ID NO: 301533 - DNA, 25 bp, Probe Sequence
tactgcgttggcacttaccaagttg

SEQ ID NO: 301534 - DNA, 25 bp, Probe Sequence
tactctgtaccaatcttactcgagc

SEQ ID NO: 301535 - DNA, 25 bp, Probe Sequence
tactgtatgaagcttgtcctctgac

SEQ ID NO: 301536 - DNA, 25 bp, Probe Sequence
tactttgcaagccagtgacctgcct

SEQ ID NO: 301537 - DNA, 25 bp, Probe Sequence
tacggtgaaagggacaccctttgag

SEQ ID NO: 301538 - DNA, 25 bp, Probe Sequence
tactgggaggtgggacccctttcat

SEQ ID NO: 301539 - DNA, 25 bp, Probe Sequence
tactttacgagaggcccaccttatc

SEQ ID NO: 301540 - DNA, 25 bp, Probe Sequence
tactttgggaaatgactccatttct

SEQ ID NO: 301541 - DNA, 25 bp, Probe Sequence
tacatatcgggacatggccctactt

SEQ ID NO: 301542 - DNA, 25 bp, Probe Sequence
tacagggggagcaactgcacctttt

SEQ ID NO: 301543 - DNA, 25 bp, Probe Sequence
tacaggtatgtgccttctgcacctg

SEQ ID NO: 301544 - DNA, 25 bp, Probe Sequence
tacagactatgtgaacgcatccttt

SEQ ID NO: 301545 - DNA, 25 bp, Probe Sequence
tacagattagcaataaactccttaa

SEQ ID NO: 301546 - DNA, 25 bp, Probe Sequence
tacagtgaaaaatacccagatgaag

SEQ ID NO: 301547 - DNA, 25 bp, Probe Sequence
taaagaaacaccgtgcaacgtgaaa

SEQ ID NO: 301548 - DNA, 25 bp, Probe Sequence
tacaaaaatattatgccacggaaat

SEQ ID NO: 301549 - DNA, 25 bp, Probe Sequence
taaatgtaaaaactgccatctggca

SEQ ID NO: 301550 - DNA, 25 bp, Probe Sequence
taaattaaggtactcctctgctgct

SEQ ID NO: 301551 - DNA, 25 bp, Probe Sequence
taaatctgaagaggcttctcctgtt

SEQ ID NO: 301552 - DNA, 25 bp, Probe Sequence
taaatctatagacgttgcctgccat

SEQ ID NO: 301553 - DNA, 25 bp, Probe Sequence
taaatctatagacgttgcctgccat

SEQ ID NO: 301554 - DNA, 25 bp, Probe Sequence
tacatacgtaacaaacctgcacatt

SEQ ID NO: 301555 - DNA, 25 bp, Probe Sequence
tactggtgtaaaaagccttcacatg

SEQ ID NO: 301556 - DNA, 25 bp, Probe Sequence
tatgttggataaactaccttcccga

SEQ ID NO: 301557 - DNA, 25 bp, Probe Sequence
tatgttgaagttctaaccccaggta

SEQ ID NO: 301558 - DNA, 25 bp, Probe Sequence
tacttggaggctcaacctcccaggc

SEQ ID NO: 301559 - DNA, 25 bp, Probe Sequence
tacaggggggcctcctgtagcaagc

SEQ ID NO: 301560 - DNA, 25 bp, Probe Sequence
tacacggtgaggcacccggagtggc

SEQ ID NO: 301561 - DNA, 25 bp, Probe Sequence
tagcaccgtgggcaggaacggcgtc

SEQ ID NO: 301562 - DNA, 25 bp, Probe Sequence
tacaacggggaacgcacgctggatg

SEQ ID NO: 301563 - DNA, 25 bp, Probe Sequence
tacaacggggaacgcacgctggatg

SEQ ID NO: 301564 - DNA, 25 bp, Probe Sequence
tacccgtgtgggggcactgtgggaa

SEQ ID NO: 301565 - DNA, 25 bp, Probe Sequence
tacccgtgtgggggcactgtgggaa

SEQ ID NO: 301566 - DNA, 25 bp, Probe Sequence
tacccgtgtgggggcactgtgggaa

SEQ ID NO: 301567 - DNA, 25 bp, Probe Sequence
taccactggtgatgcggttttggca

SEQ ID NO: 301568 - DNA, 25 bp, Probe Sequence
taccctgggaagctgccgtagcttc

SEQ ID NO: 301569 - DNA, 25 bp, Probe Sequence
taccctggccaagatccgcaaggcc

SEQ ID NO: 301570 - DNA, 25 bp, Probe Sequence
taccctggccaagatccgcaaggcc

SEQ ID NO: 301571 - DNA, 25 bp, Probe Sequence
tacatctaagcctgaacccataacc

SEQ ID NO: 301572 - DNA, 25 bp, Probe Sequence
ttatctatgttacaaacccaaccat

SEQ ID NO: 301573 - DNA, 25 bp, Probe Sequence
tatttttaaaacacccacctgcatg

SEQ ID NO: 301574 - DNA, 25 bp, Probe Sequence
tattttttaactaatcacccctgat

SEQ ID NO: 301575 - DNA, 25 bp, Probe Sequence
ttttaagtaagtagaccccactgag

SEQ ID NO: 301576 - DNA, 25 bp, Probe Sequence
tatttaaggaattaggccccttcag

SEQ ID NO: 301577 - DNA, 25 bp, Probe Sequence
tacgtaacgaaaaggcctagcgagg

SEQ ID NO: 301578 - DNA, 25 bp, Probe Sequence
tacgtgaacgacatgtggccgggct

SEQ ID NO: 301579 - DNA, 25 bp, Probe Sequence
tacgctgaagaaatttgacccgatg

SEQ ID NO: 301580 - DNA, 25 bp, Probe Sequence
tacagctaaggaattatcccttgta

SEQ ID NO: 301581 - DNA, 25 bp, Probe Sequence
tacactgcagggtttcgcccaataa

SEQ ID NO: 301582 - DNA, 25 bp, Probe Sequence
tacacttggagaccctacacaaaat

SEQ ID NO: 301583 - DNA, 25 bp, Probe Sequence
tacttctggaagcttaacaaaacta

SEQ ID NO: 301584 - DNA, 25 bp, Probe Sequence
tacagtcattaaatttacctaaact

SEQ ID NO: 301585 - DNA, 25 bp, Probe Sequence
tacatggcctaaaatgtttctacaa

SEQ ID NO: 301586 - DNA, 25 bp, Probe Sequence
tacatgtgtaaaggtttcatgttca

SEQ ID NO: 301587 - DNA, 25 bp, Probe Sequence
tacattaatagtggtgtttttacct

SEQ ID NO: 301588 - DNA, 25 bp, Probe Sequence
tacaccaggatgggttttgtaacct

SEQ ID NO: 301589 - DNA, 25 bp, Probe Sequence
tacattatggggaagcctggtaccc

SEQ ID NO: 301590 - DNA, 25 bp, Probe Sequence
tacattttctggtactctgtgaaag

SEQ ID NO: 301591 - DNA, 25 bp, Probe Sequence
tacacttattggaactctgcttgat

SEQ ID NO: 301592 - DNA, 25 bp, Probe Sequence
tacaccgatgggcactctgtatcta

SEQ ID NO: 301593 - DNA, 25 bp, Probe Sequence
taccgtggctgtcacgcagccacca

SEQ ID NO: 301594 - DNA, 25 bp, Probe Sequence
tacacagattctcaacgacccatat

SEQ ID NO: 301595 - DNA, 25 bp, Probe Sequence
taaagcttttgcacagacttcatat

SEQ ID NO: 301596 - DNA, 25 bp, Probe Sequence
taaatgtgttctgccgtcattctat

SEQ ID NO: 301597 - DNA, 25 bp, Probe Sequence
tatacactgttctccaaaggtacct

SEQ ID NO: 301598 - DNA, 25 bp, Probe Sequence
tacacctgatagtcaaataaggtac

SEQ ID NO: 301599 - DNA, 25 bp, Probe Sequence
tacacacatgaatacaaaggaccaa

SEQ ID NO: 301600 - DNA, 25 bp, Probe Sequence
tacacattgtataaaaccgaccaaa

SEQ ID NO: 301601 - DNA, 25 bp, Probe Sequence
tacatcattctgtacaactaccgcc

SEQ ID NO: 301602 - DNA, 25 bp, Probe Sequence
taaatccatgataaagctactcttg

SEQ ID NO: 301603 - DNA, 25 bp, Probe Sequence
tacttccaacagttgctgactcaca

SEQ ID NO: 301604 - DNA, 25 bp, Probe Sequence
tacactccaactcatgagacccaca

SEQ ID NO: 301605 - DNA, 25 bp, Probe Sequence
tacatttgaactgagaacccctttt

SEQ ID NO: 301606 - DNA, 25 bp, Probe Sequence
tacattgagaaactaaaccctcttc

SEQ ID NO: 301607 - DNA, 25 bp, Probe Sequence
tacatagaaaaatccaccccttacg

SEQ ID NO: 301608 - DNA, 25 bp, Probe Sequence
tacaaaaataaaacgcacagatctt

SEQ ID NO: 301609 - DNA, 25 bp, Probe Sequence
tacaaaccataaatcccacacagat

SEQ ID NO: 301610 - DNA, 25 bp, Probe Sequence
taaagacacattcttctcagcacca

SEQ ID NO: 301611 - DNA, 25 bp, Probe Sequence
tagaactacattctttaccccttgt

SEQ ID NO: 301612 - DNA, 25 bp, Probe Sequence
taaattacttctattaccacgttgt

SEQ ID NO: 301613 - DNA, 25 bp, Probe Sequence
taaatctaccctcttagcaattttt

SEQ ID NO: 301614 - DNA, 25 bp, Probe Sequence
taaattagtccctcattagattttt

SEQ ID NO: 301615 - DNA, 25 bp, Probe Sequence
taaattaactctaacatttgtttat

SEQ ID NO: 301616 - DNA, 25 bp, Probe Sequence
taaattcaagtccaggcttttttat

SEQ ID NO: 301617 - DNA, 25 bp, Probe Sequence
tacaattcaaatgctttttgtttta

SEQ ID NO: 301618 - DNA, 25 bp, Probe Sequence
tacaaacaggtccttgttctcttct

SEQ ID NO: 301619 - DNA, 25 bp, Probe Sequence
tacagaacctgtcatctgtattttt

SEQ ID NO: 301620 - DNA, 25 bp, Probe Sequence
tacagaaatgctctatttacaaatt

SEQ ID NO: 301621 - DNA, 25 bp, Probe Sequence
tacacagttcatttttttcaccttt

SEQ ID NO: 301622 - DNA, 25 bp, Probe Sequence
tacacaaatgcctttgccttcactc

SEQ ID NO: 301623 - DNA, 25 bp, Probe Sequence
tacaaggacctggtgctcttgctcc

SEQ ID NO: 301624 - DNA, 25 bp, Probe Sequence
tacagcagtgatctgggcaagctcc

SEQ ID NO: 301625 - DNA, 25 bp, Probe Sequence
tacagcagttgcaaggtaacctccg

SEQ ID NO: 301626 - DNA, 25 bp, Probe Sequence
tacaagtgtgagccgtaacacccag

SEQ ID NO: 301627 - DNA, 25 bp, Probe Sequence
tacagttgttgcagataatttccag

SEQ ID NO: 301628 - DNA, 25 bp, Probe Sequence
tacagttttttgactatcttaatgc

SEQ ID NO: 301629 - DNA, 25 bp, Probe Sequence
tacagtttttctgcattgaaaatgc

SEQ ID NO: 301630 - DNA, 25 bp, Probe Sequence
tacagttcttttcattcatacataa

SEQ ID NO: 301631 - DNA, 25 bp, Probe Sequence
tacagtccttgctgagctcttagaa

SEQ ID NO: 301632 - DNA, 25 bp, Probe Sequence
tatagcacgttacagttgttgcaga

SEQ ID NO: 301633 - DNA, 25 bp, Probe Sequence
tacagcacggggcgtgtgtccaggc

SEQ ID NO: 301634 - DNA, 25 bp, Probe Sequence
tacagatcctggtggtgttccagtt

SEQ ID NO: 301635 - DNA, 25 bp, Probe Sequence
tacaatcctggtatcattgccaatt

SEQ ID NO: 301636 - DNA, 25 bp, Probe Sequence
tacagatcaaggaattggactcaat

SEQ ID NO: 301637 - DNA, 25 bp, Probe Sequence
tacacacaaaaactggtgtaattgg

SEQ ID NO: 301638 - DNA, 25 bp, Probe Sequence
tacaaaaaagcaggctggtaccggg

SEQ ID NO: 301639 - DNA, 25 bp, Probe Sequence
tacaaaaaagcaggctggtaccggt

SEQ ID NO: 301640 - DNA, 25 bp, Probe Sequence
tacaaaaaagcaggctggtaccggt

SEQ ID NO: 301641 - DNA, 25 bp, Probe Sequence
tacaaaaaagcaggctggtaccggt

SEQ ID NO: 301642 - DNA, 25 bp, Probe Sequence
tacaaaaaagcaggctggtaccggt

SEQ ID NO: 301643 - DNA, 25 bp, Probe Sequence
tacaatcattaaaagcaggctacct

SEQ ID NO: 301644 - DNA, 25 bp, Probe Sequence
taaatctgaaaaagctactccacat

SEQ ID NO: 301645 - DNA, 25 bp, Probe Sequence
tacgtcgaacaatgtagcagccact

SEQ ID NO: 301646 - DNA, 25 bp, Probe Sequence
tagaccgagaactgaagaccgtgca

SEQ ID NO: 301647 - DNA, 25 bp, Probe Sequence
tacccgcaggttttcagatctagga

SEQ ID NO: 301648 - DNA, 25 bp, Probe Sequence
tacttccaggtgtgtcagacttggg

SEQ ID NO: 301649 - DNA, 25 bp, Probe Sequence
tacaccagttggtgtcagacccgag

SEQ ID NO: 301650 - DNA, 25 bp, Probe Sequence
tacaccagctctggcatcatgtcag

SEQ ID NO: 301651 - DNA, 25 bp, Probe Sequence
tacattcagccttgatattgagatc

SEQ ID NO: 301652 - DNA, 25 bp, Probe Sequence
ttcccagcctttttgaatttcacgg

SEQ ID NO: 301653 - DNA, 25 bp, Probe Sequence
ttccacccctttctggtatatcggg

SEQ ID NO: 301654 - DNA, 25 bp, Probe Sequence
ttcccggtgtttgctggtttcaggg

SEQ ID NO: 301655 - DNA, 25 bp, Probe Sequence
tacccattggtgattcggtttttgg

SEQ ID NO: 301656 - DNA, 25 bp, Probe Sequence
taccacgtggtgaacctggctgagg

SEQ ID NO: 301657 - DNA, 25 bp, Probe Sequence
taccacgtggtgaacctggctgagg

SEQ ID NO: 301658 - DNA, 25 bp, Probe Sequence
tacgcccagggaaagcggcgttatg

SEQ ID NO: 301659 - DNA, 25 bp, Probe Sequence
tacagcacccggtgctgcggctgtt

SEQ ID NO: 301660 - DNA, 25 bp, Probe Sequence
tacagcccgaactgcaagttgctta

SEQ ID NO: 301661 - DNA, 25 bp, Probe Sequence
tacagcccgacctacaaacaggaca

SEQ ID NO: 301662 - DNA, 25 bp, Probe Sequence
tacacaccaattgaagaaactgcca

SEQ ID NO: 301663 - DNA, 25 bp, Probe Sequence
tacagccaacttgagcgaaaccgcc

SEQ ID NO: 301664 - DNA, 25 bp, Probe Sequence
tacacctcctatgaaaaaacttcct

SEQ ID NO: 301665 - DNA, 25 bp, Probe Sequence
tacacctcctatgaaaaaacttcct

SEQ ID NO: 301666 - DNA, 25 bp, Probe Sequence
tacacctcctatgaaaaaacttcct

SEQ ID NO: 301667 - DNA, 25 bp, Probe Sequence
tacaagctccaaggatgcaatcaaa

SEQ ID NO: 301668 - DNA, 25 bp, Probe Sequence
tacaagatgcatcagtatctgttaa

SEQ ID NO: 301669 - DNA, 25 bp, Probe Sequence
tacaatgtgcactgaatcgtttcat

SEQ ID NO: 301670 - DNA, 25 bp, Probe Sequence
tacaagggcgggacgtgtgctgtgg

SEQ ID NO: 301671 - DNA, 25 bp, Probe Sequence
tacaagtagcagccccagtgactgt

SEQ ID NO: 301672 - DNA, 25 bp, Probe Sequence
tacagcctaatgacaaagatggatg

SEQ ID NO: 301673 - DNA, 25 bp, Probe Sequence
tacagaccagagacaaagcaagaga

SEQ ID NO: 301674 - DNA, 25 bp, Probe Sequence
tacagaccagagacaaagcaagaga

SEQ ID NO: 301675 - DNA, 25 bp, Probe Sequence
tacagacgagtgcccaacagcaacc

SEQ ID NO: 301676 - DNA, 25 bp, Probe Sequence
tacagaggcaatgccaccatgatac

SEQ ID NO: 301677 - DNA, 25 bp, Probe Sequence
tacaagagcaactccagcatgcaca

SEQ ID NO: 301678 - DNA, 25 bp, Probe Sequence
tacaaatggaatcccaatctatcta

SEQ ID NO: 301679 - DNA, 25 bp, Probe Sequence
taaatgatggagctccgaatgtgct

SEQ ID NO: 301680 - DNA, 25 bp, Probe Sequence
taaatgtggcctttctgaatgttat

SEQ ID NO: 301681 - DNA, 25 bp, Probe Sequence
taaattctgactttgctgacttaat

SEQ ID NO: 301682 - DNA, 25 bp, Probe Sequence
taaagtggactttgcagcacattaa

SEQ ID NO: 301683 - DNA, 25 bp, Probe Sequence
tacaagttacatatagcatcattct

SEQ ID NO: 301684 - DNA, 25 bp, Probe Sequence
tacacagtttcatgtatctgtatct

SEQ ID NO: 301685 - DNA, 25 bp, Probe Sequence
tacacctacttggatatacttctgg

SEQ ID NO: 301686 - DNA, 25 bp, Probe Sequence
tacaccagagtaactaagtatcgag

SEQ ID NO: 301687 - DNA, 25 bp, Probe Sequence
tacacaggcgtttccaagtttcagt

SEQ ID NO: 301688 - DNA, 25 bp, Probe Sequence
tacacagtgagcatcaccagtttta

SEQ ID NO: 301689 - DNA, 25 bp, Probe Sequence
tacaagcttgctacaatcatgtatc

SEQ ID NO: 301690 - DNA, 25 bp, Probe Sequence
taaagtagccagcatcattagcagc

SEQ ID NO: 301691 - DNA, 25 bp, Probe Sequence
taaattcaagagctcatctccaccc

SEQ ID NO: 301692 - DNA, 25 bp, Probe Sequence
taaattaattgtgcctgccaccacc

SEQ ID NO: 301693 - DNA, 25 bp, Probe Sequence
tataattatttgaactcccatcccc

SEQ ID NO: 301694 - DNA, 25 bp, Probe Sequence
ttaaaaattaccgctgcacaccctt

SEQ ID NO: 301695 - DNA, 25 bp, Probe Sequence
ttaactaaaagcactcccacgtcta

SEQ ID NO: 301696 - DNA, 25 bp, Probe Sequence
taaatccaaacacttgtcaccgttc

SEQ ID NO: 301697 - DNA, 25 bp, Probe Sequence
taaatctaaatctcattcccttctt

SEQ ID NO: 301698 - DNA, 25 bp, Probe Sequence
tacaattcaaatttattagctctac

SEQ ID NO: 301699 - DNA, 25 bp, Probe Sequence
tacaacagctccaagtattcaccta

SEQ ID NO: 301700 - DNA, 25 bp, Probe Sequence
tacaagtgcatgtcaagtcacccac

SEQ ID NO: 301701 - DNA, 25 bp, Probe Sequence
taaaggctgaattggcatacccctg

SEQ ID NO: 301702 - DNA, 25 bp, Probe Sequence
taaaggctgtgttgctatggcaccc

SEQ ID NO: 301703 - DNA, 25 bp, Probe Sequence
tacaaggctctgagtgaccaccaca

SEQ ID NO: 301704 - DNA, 25 bp, Probe Sequence
tacaaggctctgagtgaccaccaca

SEQ ID NO: 301705 - DNA, 25 bp, Probe Sequence
tacaaggctctgagtgaccaccaca

SEQ ID NO: 301706 - DNA, 25 bp, Probe Sequence
tacaaggtcatcctgggtgcacacc

SEQ ID NO: 301707 - DNA, 25 bp, Probe Sequence
tacaatgcttaccggttacactcca

SEQ ID NO: 301708 - DNA, 25 bp, Probe Sequence
tacaatgtggccatggactacccca

SEQ ID NO: 301709 - DNA, 25 bp, Probe Sequence
tacaatgtggccatggactacccca

SEQ ID NO: 301710 - DNA, 25 bp, Probe Sequence
tacaaaggccacctgtcagagtccc

SEQ ID NO: 301711 - DNA, 25 bp, Probe Sequence
tacaaaggccacctgtcagagtccc

SEQ ID NO: 301712 - DNA, 25 bp, Probe Sequence
taaatggcccgcctggcataatgcc

SEQ ID NO: 301713 - DNA, 25 bp, Probe Sequence
taaatggcccgcctggcataatgcc

SEQ ID NO: 301714 - DNA, 25 bp, Probe Sequence
taaatggcccgcctggcatatatgc

SEQ ID NO: 301715 - DNA, 25 bp, Probe Sequence
taaatgcccgcctggcattatgccc

SEQ ID NO: 301716 - DNA, 25 bp, Probe Sequence
tacatctaccgcgggagatttccca

SEQ ID NO: 301717 - DNA, 25 bp, Probe Sequence
tacagcttcgctgggtggatgtggc

SEQ ID NO: 301718 - DNA, 25 bp, Probe Sequence
tacactgactggctcagcgtgtgcc

SEQ ID NO: 301719 - DNA, 25 bp, Probe Sequence
tacatgtgcacatgcggcattttac

SEQ ID NO: 301720 - DNA, 25 bp, Probe Sequence
tacactgtaatggtgcatatatttc

SEQ ID NO: 301721 - DNA, 25 bp, Probe Sequence
tacagtgtcacaggtgctatgaagg

SEQ ID NO: 301722 - DNA, 25 bp, Probe Sequence
tacgttcactggtctctaagtgtaa

SEQ ID NO: 301723 - DNA, 25 bp, Probe Sequence
taaatcccatggggctattggtaga

SEQ ID NO: 301724 - DNA, 25 bp, Probe Sequence
taaatccttggagcttctggttcct

SEQ ID NO: 301725 - DNA, 25 bp, Probe Sequence
taaatcccgtaattcctggagtgcc

SEQ ID NO: 301726 - DNA, 25 bp, Probe Sequence
taaaggtcttaaatcactcgaatac

SEQ ID NO: 301727 - DNA, 25 bp, Probe Sequence
tagttggatttatctacgggtacgt

SEQ ID NO: 301728 - DNA, 25 bp, Probe Sequence
ttgttaatgttatagaaggggggat

SEQ ID NO: 301729 - DNA, 25 bp, Probe Sequence
tttgtcaagatttacaggctgggcg

SEQ ID NO: 301730 - DNA, 25 bp, Probe Sequence
tacgtcggattcccggatggcgttt

SEQ ID NO: 301731 - DNA, 25 bp, Probe Sequence
tacagtgcattataggcggtgggtt

SEQ ID NO: 301732 - DNA, 25 bp, Probe Sequence
tacagactttacaggcttggctttg

SEQ ID NO: 301733 - DNA, 25 bp, Probe Sequence
tacacactttatttacttcgttttg

SEQ ID NO: 301734 - DNA, 25 bp, Probe Sequence
tacacactttatttacttcgttttg

SEQ ID NO: 301735 - DNA, 25 bp, Probe Sequence
tacacacgtttgtttcttcgtgcct

SEQ ID NO: 301736 - DNA, 25 bp, Probe Sequence
tacacactgtacattttcacggcca

SEQ ID NO: 301737 - DNA, 25 bp, Probe Sequence
tacacagcatgttgatttggtcact

SEQ ID NO: 301738 - DNA, 25 bp, Probe Sequence
tacaagcagtcagttctcggcaggg

SEQ ID NO: 301739 - DNA, 25 bp, Probe Sequence
tacagtcctcaggtctaggcagggc

SEQ ID NO: 301740 - DNA, 25 bp, Probe Sequence
tacagtcaatcaggttctggcctcc

SEQ ID NO: 301741 - DNA, 25 bp, Probe Sequence
tacagtccagatgttcttcgtaata

SEQ ID NO: 301742 - DNA, 25 bp, Probe Sequence
tacagtccaaccaacaggtgtaaaa

SEQ ID NO: 301743 - DNA, 25 bp, Probe Sequence
tacagccatccaccttcagatgtgt

SEQ ID NO: 301744 - DNA, 25 bp, Probe Sequence
tacaccatcaacattcacaagcgca

SEQ ID NO: 301745 - DNA, 25 bp, Probe Sequence
tacacacatagaattcgatacctaa

SEQ ID NO: 301746 - DNA, 25 bp, Probe Sequence
tacacatctagcagtcagttcttgt

SEQ ID NO: 301747 - DNA, 25 bp, Probe Sequence
tacacatctagcagtcagttcttgt

SEQ ID NO: 301748 - DNA, 25 bp, Probe Sequence
taaattctgatattgcacttcttat

SEQ ID NO: 301749 - DNA, 25 bp, Probe Sequence
taaatagctatatccatgtactgta

SEQ ID NO: 301750 - DNA, 25 bp, Probe Sequence
tacagtggttgatgccttacatgaa

SEQ ID NO: 301751 - DNA, 25 bp, Probe Sequence
tacatgcatttttcacttaacgata

SEQ ID NO: 301752 - DNA, 25 bp, Probe Sequence
tacagactttaaaacagcaaatagc

SEQ ID NO: 301753 - DNA, 25 bp, Probe Sequence
tactaccttagaggatagcagttcc

SEQ ID NO: 301754 - DNA, 25 bp, Probe Sequence
tatgtcaggatttgaagaaggttca

SEQ ID NO: 301755 - DNA, 25 bp, Probe Sequence
tagtacagagatccagataagagtt

SEQ ID NO: 301756 - DNA, 25 bp, Probe Sequence
tacatcagagagtttgtcaccagtt

SEQ ID NO: 301757 - DNA, 25 bp, Probe Sequence
tacattaccattgccactgattttt

SEQ ID NO: 301758 - DNA, 25 bp, Probe Sequence
tacattaccatgctgtgcctcagtt

SEQ ID NO: 301759 - DNA, 25 bp, Probe Sequence
taaataaagcctggcacttgctgat

SEQ ID NO: 301760 - DNA, 25 bp, Probe Sequence
tacagtgacaggctccactttgagg

SEQ ID NO: 301761 - DNA, 25 bp, Probe Sequence
tacagtgatcggcccagcattggcg

SEQ ID NO: 301762 - DNA, 25 bp, Probe Sequence
taaatgtggcagacgcagcctgcgg

SEQ ID NO: 301763 - DNA, 25 bp, Probe Sequence
taaatgctccatttgcagctctagc

SEQ ID NO: 301764 - DNA, 25 bp, Probe Sequence
tacaatgtccattacaccatgagta

SEQ ID NO: 301765 - DNA, 25 bp, Probe Sequence
taaatcataatttcaactagatcaa

SEQ ID NO: 301766 - DNA, 25 bp, Probe Sequence
taaatctaaaataaccaataatcca

SEQ ID NO: 301767 - DNA, 25 bp, Probe Sequence
taaattaaaccaatctacaaactat

SEQ ID NO: 301768 - DNA, 25 bp, Probe Sequence
tacaatctaataatcatatcaacag

SEQ ID NO: 301769 - DNA, 25 bp, Probe Sequence
tacactcgcagttaatatcatagca

SEQ ID NO: 301770 - DNA, 25 bp, Probe Sequence
tacatctacgtattagtcatcgcta

SEQ ID NO: 301771 - DNA, 25 bp, Probe Sequence
tacatctacgtattagtcatcgcta

SEQ ID NO: 301772 - DNA, 25 bp, Probe Sequence
tacacaagtgatataggcttctgca

SEQ ID NO: 301773 - DNA, 25 bp, Probe Sequence
tacagccattccaataggcttcata

SEQ ID NO: 301774 - DNA, 25 bp, Probe Sequence
tacacgttcaacaaggtgctcatgc

SEQ ID NO: 301775 - DNA, 25 bp, Probe Sequence
tacgctggaaaaagtgcgcgatgcc

SEQ ID NO: 301776 - DNA, 25 bp, Probe Sequence
tactcgagttaaagtctcaaccgtt

SEQ ID NO: 301777 - DNA, 25 bp, Probe Sequence
tacttcagtccaaaatccaactcgc

SEQ ID NO: 301778 - DNA, 25 bp, Probe Sequence
tacttttcccgaaacacacattggt

SEQ ID NO: 301779 - DNA, 25 bp, Probe Sequence
tactttactctttcactaacttggt

SEQ ID NO: 301780 - DNA, 25 bp, Probe Sequence
tacttatttccaaatcttactttgt

SEQ ID NO: 301781 - DNA, 25 bp, Probe Sequence
tacttatttagatctttccattttt

SEQ ID NO: 301782 - DNA, 25 bp, Probe Sequence
tacttttcttgagaattctcgtctt

SEQ ID NO: 301783 - DNA, 25 bp, Probe Sequence
tacattgtccataaggaattcgatg

SEQ ID NO: 301784 - DNA, 25 bp, Probe Sequence
taaatgcctatctaaaattctgatt

SEQ ID NO: 301785 - DNA, 25 bp, Probe Sequence
tacacaacattctgacaatgtcaaa

SEQ ID NO: 301786 - DNA, 25 bp, Probe Sequence
tacactgacttgagaccagttgaat

SEQ ID NO: 301787 - DNA, 25 bp, Probe Sequence
tacacttcctgcttaaacttgaccc

SEQ ID NO: 301788 - DNA, 25 bp, Probe Sequence
tacattcttctgatgtaacatgtga

SEQ ID NO: 301789 - DNA, 25 bp, Probe Sequence
tacttgctttgagttggaatcggtt

SEQ ID NO: 301790 - DNA, 25 bp, Probe Sequence
tacttttaactttgaacttggctag

SEQ ID NO: 301791 - DNA, 25 bp, Probe Sequence
tacattctgtaagagattgagcctg

SEQ ID NO: 301792 - DNA, 25 bp, Probe Sequence
tacatttgagaagcccttgcctggc

SEQ ID NO: 301793 - DNA, 25 bp, Probe Sequence
tacatactttaacccttgtctggct

SEQ ID NO: 301794 - DNA, 25 bp, Probe Sequence
tacataactcatgcagtaatttctg

SEQ ID NO: 301795 - DNA, 25 bp, Probe Sequence
tacataactgtaagtcctgtttggt

SEQ ID NO: 301796 - DNA, 25 bp, Probe Sequence
tactactgtgctaggtcctttgttt

SEQ ID NO: 301797 - DNA, 25 bp, Probe Sequence
tacgggatctttccattatgtcgtt

SEQ ID NO: 301798 - DNA, 25 bp, Probe Sequence
tacttgaatctgatccttaccctat

SEQ ID NO: 301799 - DNA, 25 bp, Probe Sequence
tacattgacacgatctcttcacttc

SEQ ID NO: 301800 - DNA, 25 bp, Probe Sequence
tacacgacctgttatttccatgact

SEQ ID NO: 301801 - DNA, 25 bp, Probe Sequence
tacaagcaccttatctatcacagac

SEQ ID NO: 301802 - DNA, 25 bp, Probe Sequence
tacagtatacttatctgatcagagc

SEQ ID NO: 301803 - DNA, 25 bp, Probe Sequence
tacagatatgtgcacgttgctagac

SEQ ID NO: 301804 - DNA, 25 bp, Probe Sequence
tacaatcatgcctacattagtgaga

SEQ ID NO: 301805 - DNA, 25 bp, Probe Sequence
taaatagcagctatgtgtgtgcaaa

SEQ ID NO: 301806 - DNA, 25 bp, Probe Sequence
taaatagagtgctttttcatggaaa

SEQ ID NO: 301807 - DNA, 25 bp, Probe Sequence
taaatgaactcaatctaaattaaaa

SEQ ID NO: 301808 - DNA, 25 bp, Probe Sequence
tagaaaatcttcatggaattcacaa

SEQ ID NO: 301809 - DNA, 25 bp, Probe Sequence
taaataatctttcgccaagtgaaaa

SEQ ID NO: 301810 - DNA, 25 bp, Probe Sequence
taaatagcatctagtacacaaaaaa

SEQ ID NO: 301811 - DNA, 25 bp, Probe Sequence
taaatgatcatgctctcaaaaaaaa

SEQ ID NO: 301812 - DNA, 25 bp, Probe Sequence
taaatgtctgctacaccgaaacaaa

SEQ ID NO: 301813 - DNA, 25 bp, Probe Sequence
taaatcagatgtacaccgaaaaaaa

SEQ ID NO: 301814 - DNA, 25 bp, Probe Sequence
tacattgatattcccagcgtaaatt

SEQ ID NO: 301815 - DNA, 25 bp, Probe Sequence
tagttgagattctatccagggcaat

SEQ ID NO: 301816 - DNA, 25 bp, Probe Sequence
tactgggccctattcagtggcagct

SEQ ID NO: 301817 - DNA, 25 bp, Probe Sequence
tacatggatcctcattactgccaat

SEQ ID NO: 301818 - DNA, 25 bp, Probe Sequence
tacaggattatcaattacccacatg

SEQ ID NO: 301819 - DNA, 25 bp, Probe Sequence
tacagtgagtcaaaatcctgccact

SEQ ID NO: 301820 - DNA, 25 bp, Probe Sequence
tacactaatagaaacttggcactcc

SEQ ID NO: 301821 - DNA, 25 bp, Probe Sequence
tacactcgtatgatacttcgacact

SEQ ID NO: 301822 - DNA, 25 bp, Probe Sequence
tacacctgtgagaattctctcccct

SEQ ID NO: 301823 - DNA, 25 bp, Probe Sequence
tactcttggatgcttcttaaccctc

SEQ ID NO: 301824 - DNA, 25 bp, Probe Sequence
tactcttggatgcttcttaaccctc

SEQ ID NO: 301825 - DNA, 25 bp, Probe Sequence
tactgtgtatgtcttcttaacctcc

SEQ ID NO: 301826 - DNA, 25 bp, Probe Sequence
tactttaggactccagaattccact

SEQ ID NO: 301827 - DNA, 25 bp, Probe Sequence
tagttctagtaaaacaataccttat

SEQ ID NO: 301828 - DNA, 25 bp, Probe Sequence
tacatttttagattagcaaacacct

SEQ ID NO: 301829 - DNA, 25 bp, Probe Sequence
tacacagctttatgatatcaaagac

SEQ ID NO: 301830 - DNA, 25 bp, Probe Sequence
tacagacttatatattcaagtgctt

SEQ ID NO: 301831 - DNA, 25 bp, Probe Sequence
tactgaactatacatgccaatcatg

SEQ ID NO: 301832 - DNA, 25 bp, Probe Sequence
tactgacacttacatacttggacca

SEQ ID NO: 301833 - DNA, 25 bp, Probe Sequence
tactcagttctaagtacctggcccc

SEQ ID NO: 301834 - DNA, 25 bp, Probe Sequence
tactttcttcaagacctgagcctgg

SEQ ID NO: 301835 - DNA, 25 bp, Probe Sequence
tactttttcaacaagcacgaccatg

SEQ ID NO: 301836 - DNA, 25 bp, Probe Sequence
tacatatttctctcaacacgtgcaa

SEQ ID NO: 301837 - DNA, 25 bp, Probe Sequence
tacagaaggctatcacacttgtgaa

SEQ ID NO: 301838 - DNA, 25 bp, Probe Sequence
tacaggaactgtcaccgtgtcaacc

SEQ ID NO: 301839 - DNA, 25 bp, Probe Sequence
tacaggacgattcactgccatgcca

SEQ ID NO: 301840 - DNA, 25 bp, Probe Sequence
tacagtagtgttggactgttgccac

SEQ ID NO: 301841 - DNA, 25 bp, Probe Sequence
tacttcattgtcttgaggcttccag

SEQ ID NO: 301842 - DNA, 25 bp, Probe Sequence
tacattgcattgactgggattccag

SEQ ID NO: 301843 - DNA, 25 bp, Probe Sequence
tacatattctgaaagagcattccga

SEQ ID NO: 301844 - DNA, 25 bp, Probe Sequence
tacaatttacattagcatcccacaa

SEQ ID NO: 301845 - DNA, 25 bp, Probe Sequence
tacaatctcacagaagtccactaaa

SEQ ID NO: 301846 - DNA, 25 bp, Probe Sequence
tacaatctgcactttaactgactta

SEQ ID NO: 301847 - DNA, 25 bp, Probe Sequence
tacaaacacagttgaaagacttaga

SEQ ID NO: 301848 - DNA, 25 bp, Probe Sequence
tacagagatccagataagagttaaa

SEQ ID NO: 301849 - DNA, 25 bp, Probe Sequence
taaattgccatcttgaagcagtgta

SEQ ID NO: 301850 - DNA, 25 bp, Probe Sequence
taaatctcccctggcatgaggtgcc

SEQ ID NO: 301851 - DNA, 25 bp, Probe Sequence
tacagacattccctttgaggtgcca

SEQ ID NO: 301852 - DNA, 25 bp, Probe Sequence
tacagaccatcagatcttcgtccca

SEQ ID NO: 301853 - DNA, 25 bp, Probe Sequence
tacaggcccatgaattacttcctca

SEQ ID NO: 301854 - DNA, 25 bp, Probe Sequence
tacaggctggataaaactgttttta

SEQ ID NO: 301855 - DNA, 25 bp, Probe Sequence
tacatggctttttagaatttcgtta

SEQ ID NO: 301856 - DNA, 25 bp, Probe Sequence
tactggttttaatacctgctttgca

SEQ ID NO: 301857 - DNA, 25 bp, Probe Sequence
tactggtttcttaactgacgtacca

SEQ ID NO: 301858 - DNA, 25 bp, Probe Sequence
tacaggcgttcactatcagctggct

SEQ ID NO: 301859 - DNA, 25 bp, Probe Sequence
tacagcggctctcatgatgtgggct

SEQ ID NO: 301860 - DNA, 25 bp, Probe Sequence
tacatctgccctcatggaaggtgac

SEQ ID NO: 301861 - DNA, 25 bp, Probe Sequence
tacacaggccttcagaaggtcaccc

SEQ ID NO: 301862 - DNA, 25 bp, Probe Sequence
tacataactttcgtaatggcccgcc

SEQ ID NO: 301863 - DNA, 25 bp, Probe Sequence
tacaaacctaaaatgctgctgcccc

SEQ ID NO: 301864 - DNA, 25 bp, Probe Sequence
tacaacatccagaaagagtccaccc

SEQ ID NO: 301865 - DNA, 25 bp, Probe Sequence
tacaacatccagaaagagtccaccc

SEQ ID NO: 301866 - DNA, 25 bp, Probe Sequence
tacaaatcgcagagctgaggcacac

SEQ ID NO: 301867 - DNA, 25 bp, Probe Sequence
tacagaatcgaactctgcacttctc

SEQ ID NO: 301868 - DNA, 25 bp, Probe Sequence
tacagccatctgggacatgcctgtc

SEQ ID NO: 301869 - DNA, 25 bp, Probe Sequence
tacagcgctcgaagaatcactatca

SEQ ID NO: 301870 - DNA, 25 bp, Probe Sequence
tacagcgtggacaaatctctcagcc

SEQ ID NO: 301871 - DNA, 25 bp, Probe Sequence
tacagcttggatcgagcttcctgca

SEQ ID NO: 301872 - DNA, 25 bp, Probe Sequence
tacagccgatatcacagcagccggt

SEQ ID NO: 301873 - DNA, 25 bp, Probe Sequence
tacactctgcgaataaagcctctgt

SEQ ID NO: 301874 - DNA, 25 bp, Probe Sequence
tacaatggtgaaaacagtcctgttc

SEQ ID NO: 301875 - DNA, 25 bp, Probe Sequence
tacaaggttattttgtacttgtctt

SEQ ID NO: 301876 - DNA, 25 bp, Probe Sequence
tacaatgttgtacaattatgttttt

SEQ ID NO: 301877 - DNA, 25 bp, Probe Sequence
tacagtgccgtacagaatagtttca

SEQ ID NO: 301878 - DNA, 25 bp, Probe Sequence
tactgggcggactgataacatttaa

SEQ ID NO: 301879 - DNA, 25 bp, Probe Sequence
tacatgggggacctgatccaacacc

SEQ ID NO: 301880 - DNA, 25 bp, Probe Sequence
tacaggggcaacctggtttccatcc

SEQ ID NO: 301881 - DNA, 25 bp, Probe Sequence
tacagaagaaactggggctcctcca

SEQ ID NO: 301882 - DNA, 25 bp, Probe Sequence
tacaaaaaagttgtcctcctctcag

SEQ ID NO: 301883 - DNA, 25 bp, Probe Sequence
taaataacaatttgttcttttgttg

SEQ ID NO: 301884 - DNA, 25 bp, Probe Sequence
tacaaaattacttgtttgttttcat

SEQ ID NO: 301885 - DNA, 25 bp, Probe Sequence
tacaaagatctctttacggttttat

SEQ ID NO: 301886 - DNA, 25 bp, Probe Sequence
tacacaatttatttgacgttttatt

SEQ ID NO: 301887 - DNA, 25 bp, Probe Sequence
tacaccttctaatttctttatttct

SEQ ID NO: 301888 - DNA, 25 bp, Probe Sequence
tacaccttctaatttctttatttct

SEQ ID NO: 301889 - DNA, 25 bp, Probe Sequence
tacaacattcaactttagtattttt

SEQ ID NO: 301890 - DNA, 25 bp, Probe Sequence
tacaggcttgaaagtctaacttttt

SEQ ID NO: 301891 - DNA, 25 bp, Probe Sequence
tacaggcaggacagcatttgacttt

SEQ ID NO: 301892 - DNA, 25 bp, Probe Sequence
tacttcgtgacaggcatcgtcagct

SEQ ID NO: 301893 - DNA, 25 bp, Probe Sequence
tacttcgtgcaagtgcgctgcaacc

SEQ ID NO: 301894 - DNA, 25 bp, Probe Sequence
tactacagccactggcgcaagctgc

SEQ ID NO: 301895 - DNA, 25 bp, Probe Sequence
tacaacagccagacgggccagtgcc

SEQ ID NO: 301896 - DNA, 25 bp, Probe Sequence
tacaactcaaaccgggctgggcaaa

SEQ ID NO: 301897 - DNA, 25 bp, Probe Sequence
tacaaccacactcatggccgggaaa

SEQ ID NO: 301898 - DNA, 25 bp, Probe Sequence
tacatactacgtaatggccggctgt

SEQ ID NO: 301899 - DNA, 25 bp, Probe Sequence
tacatactcatcatggggctcctgt

SEQ ID NO: 301900 - DNA, 25 bp, Probe Sequence
tacacttattttcagctcctcatgt

SEQ ID NO: 301901 - DNA, 25 bp, Probe Sequence
tactttcaattgcctagcacaatag

SEQ ID NO: 301902 - DNA, 25 bp, Probe Sequence
tactcatgctcatatgtgtgcacgc

SEQ ID NO: 301903 - DNA, 25 bp, Probe Sequence
tactcagtcatactgtgggactatt

SEQ ID NO: 301904 - DNA, 25 bp, Probe Sequence
tactcagttacgggattgctgaatc

SEQ ID NO: 301905 - DNA, 25 bp, Probe Sequence
tacaggttccgcgtatgtgcgtgtc

SEQ ID NO: 301906 - DNA, 25 bp, Probe Sequence
tacaggtgacctggtactgcttgat

SEQ ID NO: 301907 - DNA, 25 bp, Probe Sequence
tacacaggagcctttgatctcatta

SEQ ID NO: 301908 - DNA, 25 bp, Probe Sequence
tacacagcgactttttatcattcat

SEQ ID NO: 301909 - DNA, 25 bp, Probe Sequence
tactcagctgtccctttaaaaataa

SEQ ID NO: 301910 - DNA, 25 bp, Probe Sequence
tactcagtttttctacgaaataaat

SEQ ID NO: 301911 - DNA, 25 bp, Probe Sequence
tactctttttcctgaaagaatatca

SEQ ID NO: 301912 - DNA, 25 bp, Probe Sequence
tacacttagtgtattaagacaagta

SEQ ID NO: 301913 - DNA, 25 bp, Probe Sequence
tactttcctgatgtgtaatacggaa

SEQ ID NO: 301914 - DNA, 25 bp, Probe Sequence
tacttctcctggggtacattttaca

SEQ ID NO: 301915 - DNA, 25 bp, Probe Sequence
tagctcctttggatgcagtccttta

SEQ ID NO: 301916 - DNA, 25 bp, Probe Sequence
tacattctagagcaatagtatttct

SEQ ID NO: 301917 - DNA, 25 bp, Probe Sequence
tacatttggagctttgggagtatta

SEQ ID NO: 301918 - DNA, 25 bp, Probe Sequence
tacattgatggacacttaagatgat

SEQ ID NO: 301919 - DNA, 25 bp, Probe Sequence
tagtagtcgcagacctcgaaatgat

SEQ ID NO: 301920 - DNA, 25 bp, Probe Sequence
tagctcagtggcagctccgaagctg

SEQ ID NO: 301921 - DNA, 25 bp, Probe Sequence
tacatcaatgggcgtggatagcggt

SEQ ID NO: 301922 - DNA, 25 bp, Probe Sequence
tacatcagggtgcgattctatgagg

SEQ ID NO: 301923 - DNA, 25 bp, Probe Sequence
tacaaatgtgtgagtctgctatggg

SEQ ID NO: 301924 - DNA, 25 bp, Probe Sequence
tacagaatattggacttgcattgat

SEQ ID NO: 301925 - DNA, 25 bp, Probe Sequence
tacaagagatttttctgcatattct

SEQ ID NO: 301926 - DNA, 25 bp, Probe Sequence
taaattgctttatctgtatatctga

SEQ ID NO: 301927 - DNA, 25 bp, Probe Sequence
taaattctttatgattaattgtata

SEQ ID NO: 301928 - DNA, 25 bp, Probe Sequence
taaatattccttcacatatctttat

SEQ ID NO: 301929 - DNA, 25 bp, Probe Sequence
taaatatgtcccttctcttttgtaa

SEQ ID NO: 301930 - DNA, 25 bp, Probe Sequence
taaatttctgcttgtgcctttagaa

SEQ ID NO: 301931 - DNA, 25 bp, Probe Sequence
tacaagtactgtatgcatctttaaa

SEQ ID NO: 301932 - DNA, 25 bp, Probe Sequence
tacagtgtatttagatgcatccatt

SEQ ID NO: 301933 - DNA, 25 bp, Probe Sequence
tacaaaatatcttgagcactgatct

SEQ ID NO: 301934 - DNA, 25 bp, Probe Sequence
tacacaccaagcaatgagcactttg

SEQ ID NO: 301935 - DNA, 25 bp, Probe Sequence
tacagccacgagggcacctttgagg

SEQ ID NO: 301936 - DNA, 25 bp, Probe Sequence
tacagccacgagggcacctttgagg

SEQ ID NO: 301937 - DNA, 25 bp, Probe Sequence
tacagcgccagagtgctgacgcctt

SEQ ID NO: 301938 - DNA, 25 bp, Probe Sequence
tacagcgcaacagcagcctgcagct

SEQ ID NO: 301939 - DNA, 25 bp, Probe Sequence
tacagctaatcagcattctcactcc

SEQ ID NO: 301940 - DNA, 25 bp, Probe Sequence
tacatgctgaattagcctcgatctt

SEQ ID NO: 301941 - DNA, 25 bp, Probe Sequence
tacatttctaagccttgtttgcaga

SEQ ID NO: 301942 - DNA, 25 bp, Probe Sequence
tacttcccaccgtgtgctggaatgg

SEQ ID NO: 301943 - DNA, 25 bp, Probe Sequence
tactacccccgtgtggagtacggct

SEQ ID NO: 301944 - DNA, 25 bp, Probe Sequence
tactacccccgtgtggagtacggct

SEQ ID NO: 301945 - DNA, 25 bp, Probe Sequence
tactacccccgtgtggagtacggct

SEQ ID NO: 301946 - DNA, 25 bp, Probe Sequence
tactaccgcctccacttggagggct

SEQ ID NO: 301947 - DNA, 25 bp, Probe Sequence
ttgctagccaacccagaaggaagtg

SEQ ID NO: 301948 - DNA, 25 bp, Probe Sequence
tatcatacttcctgcagaaggtatg

SEQ ID NO: 301949 - DNA, 25 bp, Probe Sequence
tactactctcagggacacagttatt

SEQ ID NO: 301950 - DNA, 25 bp, Probe Sequence
tactcacttcacaagaccgtcaaga

SEQ ID NO: 301951 - DNA, 25 bp, Probe Sequence
tactccttcacagatcggtgtaatc

SEQ ID NO: 301952 - DNA, 25 bp, Probe Sequence
tacacgcactaagattgattggaac

SEQ ID NO: 301953 - DNA, 25 bp, Probe Sequence
tactcaacccatgattcagggaacc

SEQ ID NO: 301954 - DNA, 25 bp, Probe Sequence
tacagagactccacattcaggtgta

SEQ ID NO: 301955 - DNA, 25 bp, Probe Sequence
tacagctgacccatatgccagtgga

SEQ ID NO: 301956 - DNA, 25 bp, Probe Sequence
tacactacatccacagcaaaagcat

SEQ ID NO: 301957 - DNA, 25 bp, Probe Sequence
tagaaacttgcttatcaaaacttaa

SEQ ID NO: 301958 - DNA, 25 bp, Probe Sequence
tacaagacttttacctagcacttaa

SEQ ID NO: 301959 - DNA, 25 bp, Probe Sequence
taccaacctgttacctactttgact

SEQ ID NO: 301960 - DNA, 25 bp, Probe Sequence
tactagacctgtaacttttgtaaat

SEQ ID NO: 301961 - DNA, 25 bp, Probe Sequence
tacaacacctgtggactctacatgt

SEQ ID NO: 301962 - DNA, 25 bp, Probe Sequence
tacaaccttgctgcccaaatcagcc

SEQ ID NO: 301963 - DNA, 25 bp, Probe Sequence
tacacctctggtgacctatttgcac

SEQ ID NO: 301964 - DNA, 25 bp, Probe Sequence
tacaactctggtaagcctagcttct

SEQ ID NO: 301965 - DNA, 25 bp, Probe Sequence
tacaactcattcacagagctcgccc

SEQ ID NO: 301966 - DNA, 25 bp, Probe Sequence
tactacaatctcacagaagtccact

SEQ ID NO: 301967 - DNA, 25 bp, Probe Sequence
tacatcttactcagaatcactacac

SEQ ID NO: 301968 - DNA, 25 bp, Probe Sequence
tacactacactttgaattctatgca

SEQ ID NO: 301969 - DNA, 25 bp, Probe Sequence
tacactacactgttatagttaatct

SEQ ID NO: 301970 - DNA, 25 bp, Probe Sequence
tacactacagatcctccagatctaa

SEQ ID NO: 301971 - DNA, 25 bp, Probe Sequence
tacaccaaatagctcaacatataag

SEQ ID NO: 301972 - DNA, 25 bp, Probe Sequence
tacacgaatagacatcaaactcaat

SEQ ID NO: 301973 - DNA, 25 bp, Probe Sequence
tacacgtctactctaaactgctcta

SEQ ID NO: 301974 - DNA, 25 bp, Probe Sequence
tacactttttcttaacctgtctagc

SEQ ID NO: 301975 - DNA, 25 bp, Probe Sequence
tacaattgtttatacactgttctcc

SEQ ID NO: 301976 - DNA, 25 bp, Probe Sequence
tacaacattgtttctcacacttgtt

SEQ ID NO: 301977 - DNA, 25 bp, Probe Sequence
tactcactgtgttttccactttgac

SEQ ID NO: 301978 - DNA, 25 bp, Probe Sequence
tactcattttttaccttgtagggag

SEQ ID NO: 301979 - DNA, 25 bp, Probe Sequence
tactccccttgtttctttgggtgag

SEQ ID NO: 301980 - DNA, 25 bp, Probe Sequence
tatccacaacttatttttggtagga

SEQ ID NO: 301981 - DNA, 25 bp, Probe Sequence
tataaaatcctacctttggccaagt

SEQ ID NO: 301982 - DNA, 25 bp, Probe Sequence
tacaacaacccactcttgagggaac

SEQ ID NO: 301983 - DNA, 25 bp, Probe Sequence
tacaacacacccaagtataggatga

SEQ ID NO: 301984 - DNA, 25 bp, Probe Sequence
tacaaacacccatcacatgactatg

SEQ ID NO: 301985 - DNA, 25 bp, Probe Sequence
tacaaaacccatacatccaggtgga

SEQ ID NO: 301986 - DNA, 25 bp, Probe Sequence
tactagacactactgacatccaagg

SEQ ID NO: 301987 - DNA, 25 bp, Probe Sequence
tactagacctcagtactgaatcagg

SEQ ID NO: 301988 - DNA, 25 bp, Probe Sequence
tacttctccatgcttctagtcggaa

SEQ ID NO: 301989 - DNA, 25 bp, Probe Sequence
tactaattcagtatccagaccaaat

SEQ ID NO: 301990 - DNA, 25 bp, Probe Sequence
tacttagtagctactcccaaattgt

SEQ ID NO: 301991 - DNA, 25 bp, Probe Sequence
tacttttagttaatccacaatctat

SEQ ID NO: 301992 - DNA, 25 bp, Probe Sequence
tacattctcattgttgtccagccat

SEQ ID NO: 301993 - DNA, 25 bp, Probe Sequence
tacatgttattgttttcaacctaga

SEQ ID NO: 301994 - DNA, 25 bp, Probe Sequence
tacatgtgtttgtctggtcagatct

SEQ ID NO: 301995 - DNA, 25 bp, Probe Sequence
tacatgggcttggccgaagagctgg

SEQ ID NO: 301996 - DNA, 25 bp, Probe Sequence
tactgggattggcatacgtgttcac

SEQ ID NO: 301997 - DNA, 25 bp, Probe Sequence
tactaggtttgaatgcggtgtagaa

SEQ ID NO: 301998 - DNA, 25 bp, Probe Sequence
tactaagatttctatacctggaata

SEQ ID NO: 301999 - DNA, 25 bp, Probe Sequence
tacttgaattgtgcaatttgtagaa

SEQ ID NO: 302000 - DNA, 25 bp, Probe Sequence
tacaatgacttatttttggtggcaa

SEQ ID NO: 302001 - DNA, 25 bp, Probe Sequence
tactcagccttgttttcggtgtgta

SEQ ID NO: 302002 - DNA, 25 bp, Probe Sequence
tactgacggtgatcgttggctccta

SEQ ID NO: 302003 - DNA, 25 bp, Probe Sequence
tactacagggggctcagtgtcatcc

SEQ ID NO: 302004 - DNA, 25 bp, Probe Sequence
tactaagggtactgctgctgctgct

SEQ ID NO: 302005 - DNA, 25 bp, Probe Sequence
tactaagggtactgctgctgctgct

SEQ ID NO: 302006 - DNA, 25 bp, Probe Sequence
tacttgaggtgctcaccttggctgc

SEQ ID NO: 302007 - DNA, 25 bp, Probe Sequence
tacttgtggtgtgaccatgttcatt

SEQ ID NO: 302008 - DNA, 25 bp, Probe Sequence
tacaagtgggtctgcatctgcttac

SEQ ID NO: 302009 - DNA, 25 bp, Probe Sequence
tacaatgttacccagcatgctgttg

SEQ ID NO: 302010 - DNA, 25 bp, Probe Sequence
tacaatgttggctcaagtgctgcat

SEQ ID NO: 302011 - DNA, 25 bp, Probe Sequence
tacacattgttctgaagtgcacaca

SEQ ID NO: 302012 - DNA, 25 bp, Probe Sequence
tacactctctcttcgcaagtgagga

SEQ ID NO: 302013 - DNA, 25 bp, Probe Sequence
tacacctgccatatccatctgcagg

SEQ ID NO: 302014 - DNA, 25 bp, Probe Sequence
tacacggtgaagaagcatctgcagg

SEQ ID NO: 302015 - DNA, 25 bp, Probe Sequence
tacaagggccagaagctagctgaac

SEQ ID NO: 302016 - DNA, 25 bp, Probe Sequence
tactaaggactgaagccactacata

SEQ ID NO: 302017 - DNA, 25 bp, Probe Sequence
tactaagcatatgatagttcatact

SEQ ID NO: 302018 - DNA, 25 bp, Probe Sequence
tacaaacaatgccacgcttatagaa

SEQ ID NO: 302019 - DNA, 25 bp, Probe Sequence
tactaatcaacgcccataatcatac

SEQ ID NO: 302020 - DNA, 25 bp, Probe Sequence
tacaaatagagaactaaatcacagt

SEQ ID NO: 302021 - DNA, 25 bp, Probe Sequence
tacaacaggattactctgaacaatg

SEQ ID NO: 302022 - DNA, 25 bp, Probe Sequence
tacaacagttggactctggacaatg

SEQ ID NO: 302023 - DNA, 25 bp, Probe Sequence
tacataattctggtttggatcctga

SEQ ID NO: 302024 - DNA, 25 bp, Probe Sequence
tacataatttgccttcagaatcttc

SEQ ID NO: 302025 - DNA, 25 bp, Probe Sequence
tacatattctactttaacactttaa

SEQ ID NO: 302026 - DNA, 25 bp, Probe Sequence
tacaaccaacattatagaactttta

SEQ ID NO: 302027 - DNA, 25 bp, Probe Sequence
tacaagctaagattccagaagcatt

SEQ ID NO: 302028 - DNA, 25 bp, Probe Sequence
tacatgtgtaagtgccagacagctg

SEQ ID NO: 302029 - DNA, 25 bp, Probe Sequence
tacagcagctacctggccaaggctg

SEQ ID NO: 302030 - DNA, 25 bp, Probe Sequence
tacagcgtgacgctggcacggctgc

SEQ ID NO: 302031 - DNA, 25 bp, Probe Sequence
tacaggcaggtgctggcattgttgc

SEQ ID NO: 302032 - DNA, 25 bp, Probe Sequence
tacagagttgtcatgccttgaagca

SEQ ID NO: 302033 - DNA, 25 bp, Probe Sequence
tacatgaagcttcatgcacttaaag

SEQ ID NO: 302034 - DNA, 25 bp, Probe Sequence
tacaccaaatgcttctagtattgtt

SEQ ID NO: 302035 - DNA, 25 bp, Probe Sequence
tacactagtcagttctttatattct

SEQ ID NO: 302036 - DNA, 25 bp, Probe Sequence
tacagtagatcactttttactctgt

SEQ ID NO: 302037 - DNA, 25 bp, Probe Sequence
tacagtaaatatcctttatgcttgt

SEQ ID NO: 302038 - DNA, 25 bp, Probe Sequence
tacagtaattgttccttgtgcatgt

SEQ ID NO: 302039 - DNA, 25 bp, Probe Sequence
tacagtgctgttagaccttttggct

SEQ ID NO: 302040 - DNA, 25 bp, Probe Sequence
tacacactgcttaccctgatttatt

SEQ ID NO: 302041 - DNA, 25 bp, Probe Sequence
tacatcctccatacaacttgttctt

SEQ ID NO: 302042 - DNA, 25 bp, Probe Sequence
tacatccaccaaaattgtgtgtgtt

SEQ ID NO: 302043 - DNA, 25 bp, Probe Sequence
tacaccctcacattagtgtgctgtg

SEQ ID NO: 302044 - DNA, 25 bp, Probe Sequence
tacacacctctcccagttgttggga

SEQ ID NO: 302045 - DNA, 25 bp, Probe Sequence
tacaaactcctgggctttctgggga

SEQ ID NO: 302046 - DNA, 25 bp, Probe Sequence
tacacaactcactccttttaaagaa

SEQ ID NO: 302047 - DNA, 25 bp, Probe Sequence
tactctgtccagttcctttagaaaa

SEQ ID NO: 302048 - DNA, 25 bp, Probe Sequence
tactttgccagtacaatctaacgta

SEQ ID NO: 302049 - DNA, 25 bp, Probe Sequence
tactttcacttaacactagacacca

SEQ ID NO: 302050 - DNA, 25 bp, Probe Sequence
tacattttcttaccaggagcagcat

SEQ ID NO: 302051 - DNA, 25 bp, Probe Sequence
tacactttactactacaatgaatta

SEQ ID NO: 302052 - DNA, 25 bp, Probe Sequence
tacactttactaatcatgaaattct

SEQ ID NO: 302053 - DNA, 25 bp, Probe Sequence
tacaccattactttcttgagacatt

SEQ ID NO: 302054 - DNA, 25 bp, Probe Sequence
tacaccacatacatattgtgtgaca

SEQ ID NO: 302055 - DNA, 25 bp, Probe Sequence
taccgctcttgcaataattggcaga

SEQ ID NO: 302056 - DNA, 25 bp, Probe Sequence
tacaccctgtgttcatctgtgacat

SEQ ID NO: 302057 - DNA, 25 bp, Probe Sequence
tacacaactggcctcatttaattcc

SEQ ID NO: 302058 - DNA, 25 bp, Probe Sequence
tactatgaccctttttaatctcgcc

SEQ ID NO: 302059 - DNA, 25 bp, Probe Sequence
tacaaccctgatttttgaccttgcc

SEQ ID NO: 302060 - DNA, 25 bp, Probe Sequence
tactacctggaggtttgtcctctcc

SEQ ID NO: 302061 - DNA, 25 bp, Probe Sequence
tacttcctggaggtgggcacgctcc

SEQ ID NO: 302062 - DNA, 25 bp, Probe Sequence
tacttcctgtaatgaggacgttcaa

SEQ ID NO: 302063 - DNA, 25 bp, Probe Sequence
tacttttgtaagcagctgtttaaaa

SEQ ID NO: 302064 - DNA, 25 bp, Probe Sequence
tactttctgcttgtagttgcttaaa

SEQ ID NO: 302065 - DNA, 25 bp, Probe Sequence
tactttctgcttgtagttgcttaaa

SEQ ID NO: 302066 - DNA, 25 bp, Probe Sequence
tacttgtcttttgatgcttggggaa

SEQ ID NO: 302067 - DNA, 25 bp, Probe Sequence
tactgagtccactttattctggggc

SEQ ID NO: 302068 - DNA, 25 bp, Probe Sequence
tacttctggctcttctatttggggc

SEQ ID NO: 302069 - DNA, 25 bp, Probe Sequence
tacattctgtccggagtttgaggtc

SEQ ID NO: 302070 - DNA, 25 bp, Probe Sequence
tacattttcctggagtacatttgtc

SEQ ID NO: 302071 - DNA, 25 bp, Probe Sequence
tactatttcaatacttacatatctg

SEQ ID NO: 302072 - DNA, 25 bp, Probe Sequence
tacattttgatcaactctttaagga

SEQ ID NO: 302073 - DNA, 25 bp, Probe Sequence
tacgttataacatcaattatagaaa

SEQ ID NO: 302074 - DNA, 25 bp, Probe Sequence
tactcttaaactatattgtacatta

SEQ ID NO: 302075 - DNA, 25 bp, Probe Sequence
tacacagtcaaatttacatttatct

SEQ ID NO: 302076 - DNA, 25 bp, Probe Sequence
tacacatgcttggaattaagtttta

SEQ ID NO: 302077 - DNA, 25 bp, Probe Sequence
tacacatgcttgtatctttattttt

SEQ ID NO: 302078 - DNA, 25 bp, Probe Sequence
tacacacttgttgatgattaatgga

SEQ ID NO: 302079 - DNA, 25 bp, Probe Sequence
tacacctctttacgtatatgatgtg

SEQ ID NO: 302080 - DNA, 25 bp, Probe Sequence
tacacctctttacgtatatgatgtg

SEQ ID NO: 302081 - DNA, 25 bp, Probe Sequence
tacacactctgttaggtcattcttg

SEQ ID NO: 302082 - DNA, 25 bp, Probe Sequence
tacacaggctgttatttttctcaat

SEQ ID NO: 302083 - DNA, 25 bp, Probe Sequence
tacagcaggcatggattgtttatgt

SEQ ID NO: 302084 - DNA, 25 bp, Probe Sequence
tacactgacagccactatgcttttg

SEQ ID NO: 302085 - DNA, 25 bp, Probe Sequence
tacacagatatccatgcctgtttta

SEQ ID NO: 302086 - DNA, 25 bp, Probe Sequence
tacacataattatcatgttgatata

SEQ ID NO: 302087 - DNA, 25 bp, Probe Sequence
tacagtaatgaatgcatgttttgca

SEQ ID NO: 302088 - DNA, 25 bp, Probe Sequence
tacagttcaacaccgtttctgcata

SEQ ID NO: 302089 - DNA, 25 bp, Probe Sequence
tatagttacaggcggtgtcctttta

SEQ ID NO: 302090 - DNA, 25 bp, Probe Sequence
tttgtaaaatgccaggttttttatg

SEQ ID NO: 302091 - DNA, 25 bp, Probe Sequence
ttcctgaaaaggtgttactgtgttt

SEQ ID NO: 302092 - DNA, 25 bp, Probe Sequence
taccaaatatacaggtttagtattt

SEQ ID NO: 302093 - DNA, 25 bp, Probe Sequence
tactaaccacagatcccttaattta

SEQ ID NO: 302094 - DNA, 25 bp, Probe Sequence
tactaggtcaagatctagcgataat

SEQ ID NO: 302095 - DNA, 25 bp, Probe Sequence
tacttggccagtacatctacgtatt

SEQ ID NO: 302096 - DNA, 25 bp, Probe Sequence
tacttggccagtacatctacgtatt

SEQ ID NO: 302097 - DNA, 25 bp, Probe Sequence
tacttggcctgtatataatggcata

SEQ ID NO: 302098 - DNA, 25 bp, Probe Sequence
tactatgccgcattcatttaaagct

SEQ ID NO: 302099 - DNA, 25 bp, Probe Sequence
tatcggccgctgtttgtacagacag

SEQ ID NO: 302100 - DNA, 25 bp, Probe Sequence
tacagcagggatttaacaaacagga

SEQ ID NO: 302101 - DNA, 25 bp, Probe Sequence
tacagcgagtatatgaacaacaaag

SEQ ID NO: 302102 - DNA, 25 bp, Probe Sequence
tacagcgagtatatgaacaacaaag

SEQ ID NO: 302103 - DNA, 25 bp, Probe Sequence
tacgctgaattattccacataatgg

SEQ ID NO: 302104 - DNA, 25 bp, Probe Sequence
tacacatgcaggaatctccacacaa

SEQ ID NO: 302105 - DNA, 25 bp, Probe Sequence
tacactgcatgattttacagcaaca

SEQ ID NO: 302106 - DNA, 25 bp, Probe Sequence
tacattcagtatactaccaagaagc

SEQ ID NO: 302107 - DNA, 25 bp, Probe Sequence
tacagtctctcaaccatcctaagag

SEQ ID NO: 302108 - DNA, 25 bp, Probe Sequence
tacgtcatccagactactcgaaatg

SEQ ID NO: 302109 - DNA, 25 bp, Probe Sequence
tacatttcagacatatccaaaggga

SEQ ID NO: 302110 - DNA, 25 bp, Probe Sequence
tacatacaagacttcaccataaggc

SEQ ID NO: 302111 - DNA, 25 bp, Probe Sequence
tacataacagaaaaggctaagcaga

SEQ ID NO: 302112 - DNA, 25 bp, Probe Sequence
tacatacaaaaattgcattagagca

SEQ ID NO: 302113 - DNA, 25 bp, Probe Sequence
tactacaaagcatccacaaacatcc

SEQ ID NO: 302114 - DNA, 25 bp, Probe Sequence
tacaacaaagcatttctcacccata

SEQ ID NO: 302115 - DNA, 25 bp, Probe Sequence
tacagtcaaagattgtgtcacctca

SEQ ID NO: 302116 - DNA, 25 bp, Probe Sequence
tacatggaacgctgcatgtcacctc

SEQ ID NO: 302117 - DNA, 25 bp, Probe Sequence
tacagtgagtctgagatggcaccac

SEQ ID NO: 302118 - DNA, 25 bp, Probe Sequence
tacatggtgactgaacgcgccacct

SEQ ID NO: 302119 - DNA, 25 bp, Probe Sequence
tacatggtgactgccagtgccgagg

SEQ ID NO: 302120 - DNA, 25 bp, Probe Sequence
tacaggtcctcctggaacaggtccg

SEQ ID NO: 302121 - DNA, 25 bp, Probe Sequence
tacagcgtcctcgaaaccacgagca

SEQ ID NO: 302122 - DNA, 25 bp, Probe Sequence
tacgcagacgcagaaaacgcaggca

SEQ ID NO: 302123 - DNA, 25 bp, Probe Sequence
tacgcgcacacggacaaaatgccca

SEQ ID NO: 302124 - DNA, 25 bp, Probe Sequence
tacacagtcacgcaaacacacacta

SEQ ID NO: 302125 - DNA, 25 bp, Probe Sequence
tacacagtacgcctgggagaccaca

SEQ ID NO: 302126 - DNA, 25 bp, Probe Sequence
tactgcattcccgtggggacacacg

SEQ ID NO: 302127 - DNA, 25 bp, Probe Sequence
taccttcaggccatgtggaactagg

SEQ ID NO: 302128 - DNA, 25 bp, Probe Sequence
tactttcaagcatttagggacgggg

SEQ ID NO: 302129 - DNA, 25 bp, Probe Sequence
tactttaagctattctagtgtcccc

SEQ ID NO: 302130 - DNA, 25 bp, Probe Sequence
tacatttcaacatgcttttgtcccc

SEQ ID NO: 302131 - DNA, 25 bp, Probe Sequence
tactttcacatatcttaggacccaa

SEQ ID NO: 302132 - DNA, 25 bp, Probe Sequence
tacatttcattaccttaaaaagcca

SEQ ID NO: 302133 - DNA, 25 bp, Probe Sequence
tacatgttcatctcttgccaaataa

SEQ ID NO: 302134 - DNA, 25 bp, Probe Sequence
tacataatcacccttgtcacaaaca

SEQ ID NO: 302135 - DNA, 25 bp, Probe Sequence
tactaccaccctataatgagagaga

SEQ ID NO: 302136 - DNA, 25 bp, Probe Sequence
tactatcttttcatttatcaagcag

SEQ ID NO: 302137 - DNA, 25 bp, Probe Sequence
tacacatgtgttatctacctcaagg

SEQ ID NO: 302138 - DNA, 25 bp, Probe Sequence
tacacaagtttcgtacttagggtga

SEQ ID NO: 302139 - DNA, 25 bp, Probe Sequence
tactcagagtttatattttccttca

SEQ ID NO: 302140 - DNA, 25 bp, Probe Sequence
tactgaatagttaatggttccctta

SEQ ID NO: 302141 - DNA, 25 bp, Probe Sequence
tactgaacttcaaaatgtgtcccgt

SEQ ID NO: 302142 - DNA, 25 bp, Probe Sequence
tactgaaaatccatgcaggtcccat

SEQ ID NO: 302143 - DNA, 25 bp, Probe Sequence
tacaggaaatcctgcatggcgccgt

SEQ ID NO: 302144 - DNA, 25 bp, Probe Sequence
tacaggaagtcccttgccatcctaa

SEQ ID NO: 302145 - DNA, 25 bp, Probe Sequence
tacagataaagctgctaactcctga

SEQ ID NO: 302146 - DNA, 25 bp, Probe Sequence
tacagataccctgctacttgcttca

SEQ ID NO: 302147 - DNA, 25 bp, Probe Sequence
tacagacaacgcgcttttgctgaac

SEQ ID NO: 302148 - DNA, 25 bp, Probe Sequence
tacagaccaccatatgttctttgac

SEQ ID NO: 302149 - DNA, 25 bp, Probe Sequence
tacagacacactttttgtccctgca

SEQ ID NO: 302150 - DNA, 25 bp, Probe Sequence
tacataacctatatacctccagcag

SEQ ID NO: 302151 - DNA, 25 bp, Probe Sequence
tacagaactccatcttactcaagaa

SEQ ID NO: 302152 - DNA, 25 bp, Probe Sequence
tactgaattccataactgtacagaa

SEQ ID NO: 302153 - DNA, 25 bp, Probe Sequence
tacagcctaaataaagcttggcaac

SEQ ID NO: 302154 - DNA, 25 bp, Probe Sequence
tacagctccaaaaagccttccagaa

SEQ ID NO: 302155 - DNA, 25 bp, Probe Sequence
tagagacacacaagaacccttcaaa

SEQ ID NO: 302156 - DNA, 25 bp, Probe Sequence
tacacaacaaaaaccctgtacgaga

SEQ ID NO: 302157 - DNA, 25 bp, Probe Sequence
tacacaggaaaccgtcctgcttcca

SEQ ID NO: 302158 - DNA, 25 bp, Probe Sequence
tactacaaaagccgtgacctcagcc

SEQ ID NO: 302159 - DNA, 25 bp, Probe Sequence
tacttcaaaatgaatgtggccaggc

SEQ ID NO: 302160 - DNA, 25 bp, Probe Sequence
tacttcgacattgagcggcgtgacc

SEQ ID NO: 302161 - DNA, 25 bp, Probe Sequence
tacttggactattcagggagctgca

SEQ ID NO: 302162 - DNA, 25 bp, Probe Sequence
tagccccagctactcaggaggctga

SEQ ID NO: 302163 - DNA, 25 bp, Probe Sequence
tacacctcccagacggggtggtggc

SEQ ID NO: 302164 - DNA, 25 bp, Probe Sequence
tacactctatctcgtggtggcagtg

SEQ ID NO: 302165 - DNA, 25 bp, Probe Sequence
tacacctgcatctgcggcagtggtg

SEQ ID NO: 302166 - DNA, 25 bp, Probe Sequence
tacatcatagtcttgggagggatta

SEQ ID NO: 302167 - DNA, 25 bp, Probe Sequence
tacagtagtgcattggtgggtctca

SEQ ID NO: 302168 - DNA, 25 bp, Probe Sequence
ttcagctgatagctgggggctcccc

SEQ ID NO: 302169 - DNA, 25 bp, Probe Sequence
ttaggattgcccaggagtccaacga

SEQ ID NO: 302170 - DNA, 25 bp, Probe Sequence
tacgaggtggccaggattctcaacc

SEQ ID NO: 302171 - DNA, 25 bp, Probe Sequence
tacgagaaggcgacgatgaccggac

SEQ ID NO: 302172 - DNA, 25 bp, Probe Sequence
tacgagaacgccatgattgctgctg

SEQ ID NO: 302173 - DNA, 25 bp, Probe Sequence
tactgggacccatgaatctgataga

SEQ ID NO: 302174 - DNA, 25 bp, Probe Sequence
tacatttgcactgctcagaatcttc

SEQ ID NO: 302175 - DNA, 25 bp, Probe Sequence
tacagtgtactcttagcaatccatt

SEQ ID NO: 302176 - DNA, 25 bp, Probe Sequence
tacagtgtactcttagcaatccatt

SEQ ID NO: 302177 - DNA, 25 bp, Probe Sequence
tacagtgtactcttagcaatccatt

SEQ ID NO: 302178 - DNA, 25 bp, Probe Sequence
tacacgtgagattaaaaccaatttt

SEQ ID NO: 302179 - DNA, 25 bp, Probe Sequence
tacatcaaggtatcatatcccaagt

SEQ ID NO: 302180 - DNA, 25 bp, Probe Sequence
tacatcaagtgtatcatatgccaag

SEQ ID NO: 302181 - DNA, 25 bp, Probe Sequence
tacatccgcattgctgataccaata

SEQ ID NO: 302182 - DNA, 25 bp, Probe Sequence
tacatccgcattgctgataccaata

SEQ ID NO: 302183 - DNA, 25 bp, Probe Sequence
tacatccgcattgctgataccaata

SEQ ID NO: 302184 - DNA, 25 bp, Probe Sequence
tacactggctatttaaccaaatgag

SEQ ID NO: 302185 - DNA, 25 bp, Probe Sequence
taccggtcgatgcaacgagtgatga

SEQ ID NO: 302186 - DNA, 25 bp, Probe Sequence
tacagatggatctatttaagaggag

SEQ ID NO: 302187 - DNA, 25 bp, Probe Sequence
tagcagtggcactttatagccacgg

SEQ ID NO: 302188 - DNA, 25 bp, Probe Sequence
tactggcgaatcttgaacccgggtg

SEQ ID NO: 302189 - DNA, 25 bp, Probe Sequence
tactttgaaccttatgctcctgggc

SEQ ID NO: 302190 - DNA, 25 bp, Probe Sequence
tactttcaagtgctgagtcctgggg

SEQ ID NO: 302191 - DNA, 25 bp, Probe Sequence
tactttacagtgtgggccatctggt

SEQ ID NO: 302192 - DNA, 25 bp, Probe Sequence
tacttttcagtgtcaacggcagtgg

SEQ ID NO: 302193 - DNA, 25 bp, Probe Sequence
tactctgcttagtctcaaggtatgg

SEQ ID NO: 302194 - DNA, 25 bp, Probe Sequence
tactcatttagatctcgcacatctg

SEQ ID NO: 302195 - DNA, 25 bp, Probe Sequence
tatctttgtagatgtggaccaccaa

SEQ ID NO: 302196 - DNA, 25 bp, Probe Sequence
tacttcgtggagtggatccccaaca

SEQ ID NO: 302197 - DNA, 25 bp, Probe Sequence
tacttgggaggctgaagcaggagaa

SEQ ID NO: 302198 - DNA, 25 bp, Probe Sequence
tacacgggcgagggcatggacgaga

SEQ ID NO: 302199 - DNA, 25 bp, Probe Sequence
tacacgggcgtcaatgaatacgaca

SEQ ID NO: 302200 - DNA, 25 bp, Probe Sequence
tacatgggggctcaggtggcagaca

SEQ ID NO: 302201 - DNA, 25 bp, Probe Sequence
tacaccagggtgcgagatgccagct

SEQ ID NO: 302202 - DNA, 25 bp, Probe Sequence
tacactcactttatagagcaagatg

SEQ ID NO: 302203 - DNA, 25 bp, Probe Sequence
tacaggcctcttatggagccctgga

SEQ ID NO: 302204 - DNA, 25 bp, Probe Sequence
tagggcctcagtctggagtgggata

SEQ ID NO: 302205 - DNA, 25 bp, Probe Sequence
tagggcaactgcagcgggtgggcca

SEQ ID NO: 302206 - DNA, 25 bp, Probe Sequence
taggccgacccgggttgagaggagc

SEQ ID NO: 302207 - DNA, 25 bp, Probe Sequence
tacactccagcctgggtgatagagc

SEQ ID NO: 302208 - DNA, 25 bp, Probe Sequence
tacatccggccatggacgcaatggc

SEQ ID NO: 302209 - DNA, 25 bp, Probe Sequence
tacactttgccgggaccatcagggc

SEQ ID NO: 302210 - DNA, 25 bp, Probe Sequence
tacctttggcagtacaatctaccgt

SEQ ID NO: 302211 - DNA, 25 bp, Probe Sequence
tacttttccagagattttccgtcat

SEQ ID NO: 302212 - DNA, 25 bp, Probe Sequence
tatttttcggcagattttcctcacc

SEQ ID NO: 302213 - DNA, 25 bp, Probe Sequence
tacttatacaggcatttttccccac

SEQ ID NO: 302214 - DNA, 25 bp, Probe Sequence
tactttaatggcaattgttcccctc

SEQ ID NO: 302215 - DNA, 25 bp, Probe Sequence
tactatgtatcaggcatctgtgctg

SEQ ID NO: 302216 - DNA, 25 bp, Probe Sequence
tacatctggtaccttggctggcatt

SEQ ID NO: 302217 - DNA, 25 bp, Probe Sequence
tacatgggcaacattgtgcaggtta

SEQ ID NO: 302218 - DNA, 25 bp, Probe Sequence
tacagtggatgtaattatgctaatt

SEQ ID NO: 302219 - DNA, 25 bp, Probe Sequence
tacaggcttgtgattcatgcttact

SEQ ID NO: 302220 - DNA, 25 bp, Probe Sequence
tacaggatcgtgaactctatttatt

SEQ ID NO: 302221 - DNA, 25 bp, Probe Sequence
tacaggcggtgtccttttaaatgtg

SEQ ID NO: 302222 - DNA, 25 bp, Probe Sequence
tactggcatgggattttgtcaaaga

SEQ ID NO: 302223 - DNA, 25 bp, Probe Sequence
tacttctgggactttattctatgaa

SEQ ID NO: 302224 - DNA, 25 bp, Probe Sequence
tacatgttgtgtagacttactttaa

SEQ ID NO: 302225 - DNA, 25 bp, Probe Sequence
tacattcatcttcgactttctaaaa

SEQ ID NO: 302226 - DNA, 25 bp, Probe Sequence
tacttcattgtgcgctctttgcgga

SEQ ID NO: 302227 - DNA, 25 bp, Probe Sequence
tacatgtcgttgctggctttgttgt

SEQ ID NO: 302228 - DNA, 25 bp, Probe Sequence
tacagggttggttctcatttcgtgc

SEQ ID NO: 302229 - DNA, 25 bp, Probe Sequence
tacacgagaattttgctcattttac

SEQ ID NO: 302230 - DNA, 25 bp, Probe Sequence
tacctgggacgagtcctgtttacag

SEQ ID NO: 302231 - DNA, 25 bp, Probe Sequence
tactcggggtgacccttttcatcac

SEQ ID NO: 302232 - DNA, 25 bp, Probe Sequence
taccgttgataaacctaactgctaa

SEQ ID NO: 302233 - DNA, 25 bp, Probe Sequence
tacacgttgaacacatccacattgt

SEQ ID NO: 302234 - DNA, 25 bp, Probe Sequence
taccagttatacaccatcactgctt

SEQ ID NO: 302235 - DNA, 25 bp, Probe Sequence
tacactctgatttccaaacacttat

SEQ ID NO: 302236 - DNA, 25 bp, Probe Sequence
tacactgtttaatatagcactgaat

SEQ ID NO: 302237 - DNA, 25 bp, Probe Sequence
tacagcatgtgcccaaaacagcctc

SEQ ID NO: 302238 - DNA, 25 bp, Probe Sequence
tacactgtctactgaccagagccca

SEQ ID NO: 302239 - DNA, 25 bp, Probe Sequence
tacactactattaactaggcttcag

SEQ ID NO: 302240 - DNA, 25 bp, Probe Sequence
tacattacatttacaatagtgcttg

SEQ ID NO: 302241 - DNA, 25 bp, Probe Sequence
tactttcatctgaaacattccatgt

SEQ ID NO: 302242 - DNA, 25 bp, Probe Sequence
tacttcctcatgctcatcttcatga

SEQ ID NO: 302243 - DNA, 25 bp, Probe Sequence
tacttgacttagatttctgtccact

SEQ ID NO: 302244 - DNA, 25 bp, Probe Sequence
tacttactaattttcagtgtcctta

SEQ ID NO: 302245 - DNA, 25 bp, Probe Sequence
tactcccaaatgatgatctaccctt

SEQ ID NO: 302246 - DNA, 25 bp, Probe Sequence
tactcaccaataaattctacttcct

SEQ ID NO: 302247 - DNA, 25 bp, Probe Sequence
tacttccaattatgtcatcaatttt

SEQ ID NO: 302248 - DNA, 25 bp, Probe Sequence
tacttggtattataatgcataattg

SEQ ID NO: 302249 - DNA, 25 bp, Probe Sequence
tacttggtgtatcgataatcattta

SEQ ID NO: 302250 - DNA, 25 bp, Probe Sequence
tactgcaggtggtgatttgttgata

SEQ ID NO: 302251 - DNA, 25 bp, Probe Sequence
tagttagggtctattttatatttat

SEQ ID NO: 302252 - DNA, 25 bp, Probe Sequence
tactttgaggagaagtttcttattt

SEQ ID NO: 302253 - DNA, 25 bp, Probe Sequence
tactttgacttgaagtgtttttagt

SEQ ID NO: 302254 - DNA, 25 bp, Probe Sequence
tacatttttaatatggtttatcaat

SEQ ID NO: 302255 - DNA, 25 bp, Probe Sequence
tacagttctttgatttcgtttcatc

SEQ ID NO: 302256 - DNA, 25 bp, Probe Sequence
tacagtgggggcatttctttatatc

SEQ ID NO: 302257 - DNA, 25 bp, Probe Sequence
tacatggggtgcgtattctgttttt

SEQ ID NO: 302258 - DNA, 25 bp, Probe Sequence
tacagggatgctgtttttccattct

SEQ ID NO: 302259 - DNA, 25 bp, Probe Sequence
tactgcgtatgcagtttttcctcca

SEQ ID NO: 302260 - DNA, 25 bp, Probe Sequence
tacatctcaagcaaggggttcctcc

SEQ ID NO: 302261 - DNA, 25 bp, Probe Sequence
tacacctagcattgcctacttagcc

SEQ ID NO: 302262 - DNA, 25 bp, Probe Sequence
tacactgctacatgcctgcagcttc

SEQ ID NO: 302263 - DNA, 25 bp, Probe Sequence
tacactgcttacgttgccatgatcc

SEQ ID NO: 302264 - DNA, 25 bp, Probe Sequence
tacactgttactcagatctacacaa

SEQ ID NO: 302265 - DNA, 25 bp, Probe Sequence
tacagtttagctttattcaccatat

SEQ ID NO: 302266 - DNA, 25 bp, Probe Sequence
tacagtattactttctataatcata

SEQ ID NO: 302267 - DNA, 25 bp, Probe Sequence
tacagcttgttttttgagagaatca

SEQ ID NO: 302268 - DNA, 25 bp, Probe Sequence
tacagttttcttggtggcagaatga

SEQ ID NO: 302269 - DNA, 25 bp, Probe Sequence
tactttcttttgtctgcgccaagag

SEQ ID NO: 302270 - DNA, 25 bp, Probe Sequence
tacacctcagtgactttcggcaaga

SEQ ID NO: 302271 - DNA, 25 bp, Probe Sequence
tacaccctggtcatcactgacaaag

SEQ ID NO: 302272 - DNA, 25 bp, Probe Sequence
tacgacctggtcacggagaagatgt

SEQ ID NO: 302273 - DNA, 25 bp, Probe Sequence
tacagacctgtttagggctaggctt

SEQ ID NO: 302274 - DNA, 25 bp, Probe Sequence
tactactcgttctgggcagacctta

SEQ ID NO: 302275 - DNA, 25 bp, Probe Sequence
tacatactgagataggggttcctgg

SEQ ID NO: 302276 - DNA, 25 bp, Probe Sequence
tactgcagcggagcacagggttcca

SEQ ID NO: 302277 - DNA, 25 bp, Probe Sequence
tactgcagctaaaccagcggcttca

SEQ ID NO: 302278 - DNA, 25 bp, Probe Sequence
tacagatgcattatccagaactgaa

SEQ ID NO: 302279 - DNA, 25 bp, Probe Sequence
tactatatatttgctgatggctaga

SEQ ID NO: 302280 - DNA, 25 bp, Probe Sequence
tactgtatactagccggggaaattt

SEQ ID NO: 302281 - DNA, 25 bp, Probe Sequence
tactgattttactacagggagacag

SEQ ID NO: 302282 - DNA, 25 bp, Probe Sequence
tactcgtacatatatagagggacat

SEQ ID NO: 302283 - DNA, 25 bp, Probe Sequence
tacggtaatcacatggcagaggact

SEQ ID NO: 302284 - DNA, 25 bp, Probe Sequence
taggcactaaccagagaaggcttcc

SEQ ID NO: 302285 - DNA, 25 bp, Probe Sequence
tatggccctaccgaaataggttagg

SEQ ID NO: 302286 - DNA, 25 bp, Probe Sequence
taccaccaaggagaatagtttagga

SEQ ID NO: 302287 - DNA, 25 bp, Probe Sequence
tactcaacagggttgttaacctagg

SEQ ID NO: 302288 - DNA, 25 bp, Probe Sequence
tacttactgttgtttaaagggatgt

SEQ ID NO: 302289 - DNA, 25 bp, Probe Sequence
tacttgcactttggggagaaggctg

SEQ ID NO: 302290 - DNA, 25 bp, Probe Sequence
tactaacttcttggggcattctgag

SEQ ID NO: 302291 - DNA, 25 bp, Probe Sequence
tactccctttgtacagtattctgag

SEQ ID NO: 302292 - DNA, 25 bp, Probe Sequence
tactgcggttgcgttagtttctgtc

SEQ ID NO: 302293 - DNA, 25 bp, Probe Sequence
tacgcgttgggttcaggaatttctt

SEQ ID NO: 302294 - DNA, 25 bp, Probe Sequence
taccgtgttggttttgactggatat

SEQ ID NO: 302295 - DNA, 25 bp, Probe Sequence
taccgtgtgtattctcttgacgggg

SEQ ID NO: 302296 - DNA, 25 bp, Probe Sequence
tacgtctgtgtgtgtcctgacggct

SEQ ID NO: 302297 - DNA, 25 bp, Probe Sequence
tacgtcgtggagtccactggcgtct

SEQ ID NO: 302298 - DNA, 25 bp, Probe Sequence
tagcctagggaaccacgggggcaca

SEQ ID NO: 302299 - DNA, 25 bp, Probe Sequence
ttggctcgccggatacggggagaga

SEQ ID NO: 302300 - DNA, 25 bp, Probe Sequence
taggccgccctaactggggcggaag

SEQ ID NO: 302301 - DNA, 25 bp, Probe Sequence
tagagtccaccgaggagggcacgac

SEQ ID NO: 302302 - DNA, 25 bp, Probe Sequence
tacgttcctcatgaaagggacgacg

SEQ ID NO: 302303 - DNA, 25 bp, Probe Sequence
tacatttcctcaccataagggtccc

SEQ ID NO: 302304 - DNA, 25 bp, Probe Sequence
tacttcatccttgcaaagagaatcc

SEQ ID NO: 302305 - DNA, 25 bp, Probe Sequence
tactacgcctaggcacacaggccag

SEQ ID NO: 302306 - DNA, 25 bp, Probe Sequence
tacagagtgctctgtaccagtgctc

SEQ ID NO: 302307 - DNA, 25 bp, Probe Sequence
tacatgggcaaagtgaccttctcat

SEQ ID NO: 302308 - DNA, 25 bp, Probe Sequence
tacagggagtgaggagccttgctgc

SEQ ID NO: 302309 - DNA, 25 bp, Probe Sequence
tacagggggcagcccagcatgtgcc

SEQ ID NO: 302310 - DNA, 25 bp, Probe Sequence
tacatggtggtcaccactgagcccc

SEQ ID NO: 302311 - DNA, 25 bp, Probe Sequence
tactggtgtggtttctctggcacag

SEQ ID NO: 302312 - DNA, 25 bp, Probe Sequence
tactgttgacagtttccgcagaaat

SEQ ID NO: 302313 - DNA, 25 bp, Probe Sequence
tacatcattgaactcaaccacatga

SEQ ID NO: 302314 - DNA, 25 bp, Probe Sequence
tacatgtgtgacctgcacaccaaga

SEQ ID NO: 302315 - DNA, 25 bp, Probe Sequence
tacagtgagaagcatgcaccagtca

SEQ ID NO: 302316 - DNA, 25 bp, Probe Sequence
tacagtatggcgtgaccagtcatgt

SEQ ID NO: 302317 - DNA, 25 bp, Probe Sequence
tactgttggagatctgacagtcatt

SEQ ID NO: 302318 - DNA, 25 bp, Probe Sequence
tacatttacacatctagcagtcagt

SEQ ID NO: 302319 - DNA, 25 bp, Probe Sequence
tactttcacttactacacatcattt

SEQ ID NO: 302320 - DNA, 25 bp, Probe Sequence
tactttcgtttatcatgctttccat

SEQ ID NO: 302321 - DNA, 25 bp, Probe Sequence
tactttgcaccataacatgttaaat

SEQ ID NO: 302322 - DNA, 25 bp, Probe Sequence
taccctgggcaatgacgtcttcaat

SEQ ID NO: 302323 - DNA, 25 bp, Probe Sequence
tacccgaccagatcaaatctttttt

SEQ ID NO: 302324 - DNA, 25 bp, Probe Sequence
tactccatagctttcaaaccttttt

SEQ ID NO: 302325 - DNA, 25 bp, Probe Sequence
taccctactttgcaccataacatgt

SEQ ID NO: 302326 - DNA, 25 bp, Probe Sequence
tacacctacttccaggccaagataa

SEQ ID NO: 302327 - DNA, 25 bp, Probe Sequence
tacagacttcttggtacccagtcac

SEQ ID NO: 302328 - DNA, 25 bp, Probe Sequence
tacagacttgccgttaacagcatta

SEQ ID NO: 302329 - DNA, 25 bp, Probe Sequence
tacgtttcccattcatcacagaaca

SEQ ID NO: 302330 - DNA, 25 bp, Probe Sequence
tacttgttgcctcacatccgaaagt

SEQ ID NO: 302331 - DNA, 25 bp, Probe Sequence
tttggccgctcgcaataccaaagtc

SEQ ID NO: 302332 - DNA, 25 bp, Probe Sequence
tttggagtcccacaaaccacagttt

SEQ ID NO: 302333 - DNA, 25 bp, Probe Sequence
tatcggggactacaatggccacgtc

SEQ ID NO: 302334 - DNA, 25 bp, Probe Sequence
tagtagggacttaatgggccggtcg

SEQ ID NO: 302335 - DNA, 25 bp, Probe Sequence
tacttgggaattgaggagcccctct

SEQ ID NO: 302336 - DNA, 25 bp, Probe Sequence
tacttgttgaaatggtagccccccg

SEQ ID NO: 302337 - DNA, 25 bp, Probe Sequence
tacttcctcaactgttcagcactca

SEQ ID NO: 302338 - DNA, 25 bp, Probe Sequence
tactatgagctcaagcaggtgccca

SEQ ID NO: 302339 - DNA, 25 bp, Probe Sequence
tacgtagtgctgacaggacccactc

SEQ ID NO: 302340 - DNA, 25 bp, Probe Sequence
tactgtgcttggagcggctccagct

SEQ ID NO: 302341 - DNA, 25 bp, Probe Sequence
tacggttttggtgtcctgctacaaa

SEQ ID NO: 302342 - DNA, 25 bp, Probe Sequence
tacggtttgtggtagtaatctaata

SEQ ID NO: 302343 - DNA, 25 bp, Probe Sequence
tactggtttgggtatgccacctcaa

SEQ ID NO: 302344 - DNA, 25 bp, Probe Sequence
tacttcccaaattatgccacctaat

SEQ ID NO: 302345 - DNA, 25 bp, Probe Sequence
tactatgcccaaacagaaatcctga

SEQ ID NO: 302346 - DNA, 25 bp, Probe Sequence
tacttgtccctgacaggctgaccta

SEQ ID NO: 302347 - DNA, 25 bp, Probe Sequence
tacttgtctgcagtgatagagtcac

SEQ ID NO: 302348 - DNA, 25 bp, Probe Sequence
tacttgcttcacgtggatgctcagt

SEQ ID NO: 302349 - DNA, 25 bp, Probe Sequence
tactacttgcacttgaatccatgtc

SEQ ID NO: 302350 - DNA, 25 bp, Probe Sequence
tacatcaatgcttttgttcctctca

SEQ ID NO: 302351 - DNA, 25 bp, Probe Sequence
tacagcagactttctttgcagttat

SEQ ID NO: 302352 - DNA, 25 bp, Probe Sequence
tacagcacagtagagttgatcatta

SEQ ID NO: 302353 - DNA, 25 bp, Probe Sequence
tacatgacctgtgactgtatcatta

SEQ ID NO: 302354 - DNA, 25 bp, Probe Sequence
tacattcatctgatcagcattaatt

SEQ ID NO: 302355 - DNA, 25 bp, Probe Sequence
tacatctgactgcctgacatggact

SEQ ID NO: 302356 - DNA, 25 bp, Probe Sequence
tacagcaagctgctgtgcggcctgc

SEQ ID NO: 302357 - DNA, 25 bp, Probe Sequence
tacagaagatggatccccatgccct

SEQ ID NO: 302358 - DNA, 25 bp, Probe Sequence
tacagcaagaggtgcccatattcct

SEQ ID NO: 302359 - DNA, 25 bp, Probe Sequence
tacatggaagcgtttctcagtcccc

SEQ ID NO: 302360 - DNA, 25 bp, Probe Sequence
tacgagatccagttctctcaggacg

SEQ ID NO: 302361 - DNA, 25 bp, Probe Sequence
tactagtccctgtgtcaggatggta

SEQ ID NO: 302362 - DNA, 25 bp, Probe Sequence
tactttccgctgtgtccagatgttg

SEQ ID NO: 302363 - DNA, 25 bp, Probe Sequence
tactttccgctgtgtccagatgttg

SEQ ID NO: 302364 - DNA, 25 bp, Probe Sequence
tactttgcctttttcactgtgtatg

SEQ ID NO: 302365 - DNA, 25 bp, Probe Sequence
tactttgcgttaggtgtgctggttg

SEQ ID NO: 302366 - DNA, 25 bp, Probe Sequence
tacttatctgtatcggtcagggtcc

SEQ ID NO: 302367 - DNA, 25 bp, Probe Sequence
tacttaagtcatatggatcagggag

SEQ ID NO: 302368 - DNA, 25 bp, Probe Sequence
tacttcctgacgatggagatgggga

SEQ ID NO: 302369 - DNA, 25 bp, Probe Sequence
tacttcatgctgaccagaggcactg

SEQ ID NO: 302370 - DNA, 25 bp, Probe Sequence
tactctgcagtggacataagcattg

SEQ ID NO: 302371 - DNA, 25 bp, Probe Sequence
tatcatgctgcacccagagcaactc

SEQ ID NO: 302372 - DNA, 25 bp, Probe Sequence
tacatggcactttggcataccgaaa

SEQ ID NO: 302373 - DNA, 25 bp, Probe Sequence
tacgacagatgatgcttttcgaaat

SEQ ID NO: 302374 - DNA, 25 bp, Probe Sequence
tactcgagtgacttcttatcgcaat

SEQ ID NO: 302375 - DNA, 25 bp, Probe Sequence
tactgccattcacttcataatccag

SEQ ID NO: 302376 - DNA, 25 bp, Probe Sequence
taggccagagcactttactccaggc

SEQ ID NO: 302377 - DNA, 25 bp, Probe Sequence
tacgccaacacggtgctgtcgggcg

SEQ ID NO: 302378 - DNA, 25 bp, Probe Sequence
tacaggcaagacactctgtgcgcgg

SEQ ID NO: 302379 - DNA, 25 bp, Probe Sequence
tacaggtcagaatggcggcagcgga

SEQ ID NO: 302380 - DNA, 25 bp, Probe Sequence
tacagtgtaaagggcaggcatgcat

SEQ ID NO: 302381 - DNA, 25 bp, Probe Sequence
tacaggatacattatccaggcatgg

SEQ ID NO: 302382 - DNA, 25 bp, Probe Sequence
tacaggatcaacttccagccagacc

SEQ ID NO: 302383 - DNA, 25 bp, Probe Sequence
tacaggatcaacttccagccagacc

SEQ ID NO: 302384 - DNA, 25 bp, Probe Sequence
tacaggcaacacttcaatgctcata

SEQ ID NO: 302385 - DNA, 25 bp, Probe Sequence
tacagtgatatgtctggcagagcta

SEQ ID NO: 302386 - DNA, 25 bp, Probe Sequence
tactgtataatctgcagcatgctat

SEQ ID NO: 302387 - DNA, 25 bp, Probe Sequence
tacagatgtcaaaagcagtctagtt

SEQ ID NO: 302388 - DNA, 25 bp, Probe Sequence
tacagcatgctatctatagttaata

SEQ ID NO: 302389 - DNA, 25 bp, Probe Sequence
tacagcttaatgaacaggtaatgca

SEQ ID NO: 302390 - DNA, 25 bp, Probe Sequence
tactgattagtcaacagtggaaaat

SEQ ID NO: 302391 - DNA, 25 bp, Probe Sequence
tactgacgtgtaaatgctggtattt

SEQ ID NO: 302392 - DNA, 25 bp, Probe Sequence
tactagctgttaaatgtggaggtca

SEQ ID NO: 302393 - DNA, 25 bp, Probe Sequence
tacatccagaattagtttgaggacc

SEQ ID NO: 302394 - DNA, 25 bp, Probe Sequence
tacatcagagaattcgtactgaaga

SEQ ID NO: 302395 - DNA, 25 bp, Probe Sequence
tacttgaaatgtagatactatatga

SEQ ID NO: 302396 - DNA, 25 bp, Probe Sequence
tacttactatgtatcaggcatctgt

SEQ ID NO: 302397 - DNA, 25 bp, Probe Sequence
tacttagttgccacactcatgctta

SEQ ID NO: 302398 - DNA, 25 bp, Probe Sequence
tacatggaagggacgcaccatttat

SEQ ID NO: 302399 - DNA, 25 bp, Probe Sequence
tactctgaagggacgcacagttatc

SEQ ID NO: 302400 - DNA, 25 bp, Probe Sequence
tacattaaggtacgagcaggtgata

SEQ ID NO: 302401 - DNA, 25 bp, Probe Sequence
tacattttggtgtgactaggccaca

SEQ ID NO: 302402 - DNA, 25 bp, Probe Sequence
tacatatttgcatcctgactaggct

SEQ ID NO: 302403 - DNA, 25 bp, Probe Sequence
tacatatttcattcccaatttgtgt

SEQ ID NO: 302404 - DNA, 25 bp, Probe Sequence
tactctttaactccaagtattgctc

SEQ ID NO: 302405 - DNA, 25 bp, Probe Sequence
tacctcttaacctaaagcaattatt

SEQ ID NO: 302406 - DNA, 25 bp, Probe Sequence
tacctttaacctttagtctgtcaag

SEQ ID NO: 302407 - DNA, 25 bp, Probe Sequence
tacctgtaaagtcttagttttcaga

SEQ ID NO: 302408 - DNA, 25 bp, Probe Sequence
tagtttttcagtctatgggtttagt

SEQ ID NO: 302409 - DNA, 25 bp, Probe Sequence
tactttttcgggccatggttttcat

SEQ ID NO: 302410 - DNA, 25 bp, Probe Sequence
tacttgtgtgtctgggttgtttttt

SEQ ID NO: 302411 - DNA, 25 bp, Probe Sequence
tacagtttgcattgaggcagaattt

SEQ ID NO: 302412 - DNA, 25 bp, Probe Sequence
tacagatttgaatagcagcattagt

SEQ ID NO: 302413 - DNA, 25 bp, Probe Sequence
tacagattgaaatttcaccttgtaa

SEQ ID NO: 302414 - DNA, 25 bp, Probe Sequence
tactgctaggaatttacctttcaga

SEQ ID NO: 302415 - DNA, 25 bp, Probe Sequence
tacgccgctttctgacactttcact

SEQ ID NO: 302416 - DNA, 25 bp, Probe Sequence
taccgcttccttagaacttctacag

SEQ ID NO: 302417 - DNA, 25 bp, Probe Sequence
tacgtcttgcctataagctaatatc

SEQ ID NO: 302418 - DNA, 25 bp, Probe Sequence
tactgatttgaccttacctactatt

SEQ ID NO: 302419 - DNA, 25 bp, Probe Sequence
tacgaattacgttacttccagatta

SEQ ID NO: 302420 - DNA, 25 bp, Probe Sequence
tacgaattacgttacttccagatta

SEQ ID NO: 302421 - DNA, 25 bp, Probe Sequence
tactaatttgtttgacattccatgt

SEQ ID NO: 302422 - DNA, 25 bp, Probe Sequence
tactcagtctttaaaattcgtctct

SEQ ID NO: 302423 - DNA, 25 bp, Probe Sequence
tacagagtcttggaaaagtcggtat

SEQ ID NO: 302424 - DNA, 25 bp, Probe Sequence
tacaggacttgttgccaattgggta

SEQ ID NO: 302425 - DNA, 25 bp, Probe Sequence
tacagatacttgcaacaatgtggat

SEQ ID NO: 302426 - DNA, 25 bp, Probe Sequence
tacagtcctatgtactgaaggaatt

SEQ ID NO: 302427 - DNA, 25 bp, Probe Sequence
tacttgtctagtttaaggctatttt

SEQ ID NO: 302428 - DNA, 25 bp, Probe Sequence
tagcatttctttttggagggtttag

SEQ ID NO: 302429 - DNA, 25 bp, Probe Sequence
tacttctatttgtgggtactttagg

SEQ ID NO: 302430 - DNA, 25 bp, Probe Sequence
tactattaagattggccttactttt

SEQ ID NO: 302431 - DNA, 25 bp, Probe Sequence
tactattattgaaatcgcttgaccg

SEQ ID NO: 302432 - DNA, 25 bp, Probe Sequence
taccaatctatgtaataggctacct

SEQ ID NO: 302433 - DNA, 25 bp, Probe Sequence
tactcaattatcttcacgatttcct

SEQ ID NO: 302434 - DNA, 25 bp, Probe Sequence
tactgacttgatttttcattctgcc

SEQ ID NO: 302435 - DNA, 25 bp, Probe Sequence
tactgcagctgtcttttctatcaca

SEQ ID NO: 302436 - DNA, 25 bp, Probe Sequence
tatctgccgaacatctgactagcca

SEQ ID NO: 302437 - DNA, 25 bp, Probe Sequence
tactgcgacaacatcgtgcgcacca

SEQ ID NO: 302438 - DNA, 25 bp, Probe Sequence
tactgcggaaattcttgtgcgcaca

SEQ ID NO: 302439 - DNA, 25 bp, Probe Sequence
tactagaaagtcttttggccatcag

SEQ ID NO: 302440 - DNA, 25 bp, Probe Sequence
tactactagatgtctttaggcagca

SEQ ID NO: 302441 - DNA, 25 bp, Probe Sequence
tactcattatcgccttttgacagct

SEQ ID NO: 302442 - DNA, 25 bp, Probe Sequence
tacagattcctaattctatgacagt

SEQ ID NO: 302443 - DNA, 25 bp, Probe Sequence
tactatctccttgttatgaagtttg

SEQ ID NO: 302444 - DNA, 25 bp, Probe Sequence
tacttccattctgtttcggatttta

SEQ ID NO: 302445 - DNA, 25 bp, Probe Sequence
tacattcccttttttctgtgaaata

SEQ ID NO: 302446 - DNA, 25 bp, Probe Sequence
tataccctttttggcctgaagacat

SEQ ID NO: 302447 - DNA, 25 bp, Probe Sequence
tacatcctcattgttcacagtgaaa

SEQ ID NO: 302448 - DNA, 25 bp, Probe Sequence
tactttgctggatttcaagatgaca

SEQ ID NO: 302449 - DNA, 25 bp, Probe Sequence
tacttttggtatcccagaacatgac

SEQ ID NO: 302450 - DNA, 25 bp, Probe Sequence
tacttcagtgtgtatctctaaaaga

SEQ ID NO: 302451 - DNA, 25 bp, Probe Sequence
tacattctgtgttcctcgaataagt

SEQ ID NO: 302452 - DNA, 25 bp, Probe Sequence
tacattctgtttactgccacaagca

SEQ ID NO: 302453 - DNA, 25 bp, Probe Sequence
tacttcgttatcactgccatgcagt

SEQ ID NO: 302454 - DNA, 25 bp, Probe Sequence
tacttggaatatttccctgagctta

SEQ ID NO: 302455 - DNA, 25 bp, Probe Sequence
tacttcgacactgttcttagctcaa

SEQ ID NO: 302456 - DNA, 25 bp, Probe Sequence
tacataaacactgcttcttacagga

SEQ ID NO: 302457 - DNA, 25 bp, Probe Sequence
tacatacatacactcactctgtctg

SEQ ID NO: 302458 - DNA, 25 bp, Probe Sequence
tacatactgacaacccattcagccc

SEQ ID NO: 302459 - DNA, 25 bp, Probe Sequence
tagcaactggcatcacgttgaggcc

SEQ ID NO: 302460 - DNA, 25 bp, Probe Sequence
tactcatctgcctcattttgggcct

SEQ ID NO: 302461 - DNA, 25 bp, Probe Sequence
tactcattgcctactttaacacctg

SEQ ID NO: 302462 - DNA, 25 bp, Probe Sequence
tacatgattcttatttacaacccca

SEQ ID NO: 302463 - DNA, 25 bp, Probe Sequence
tacatggcattaattgatttaacca

SEQ ID NO: 302464 - DNA, 25 bp, Probe Sequence
tactgtcaaatgatgtgcaaaacct

SEQ ID NO: 302465 - DNA, 25 bp, Probe Sequence
tacgtcagtaaattcatgtaacctt

SEQ ID NO: 302466 - DNA, 25 bp, Probe Sequence
tactttgctataaatatgataatgc

SEQ ID NO: 302467 - DNA, 25 bp, Probe Sequence
tacatcttgcctaccattgcatgaa

SEQ ID NO: 302468 - DNA, 25 bp, Probe Sequence
tacatttctctgagcagtcagggtg

SEQ ID NO: 302469 - DNA, 25 bp, Probe Sequence
tacttgtcttgcttatggcatgagg

SEQ ID NO: 302470 - DNA, 25 bp, Probe Sequence
tactgtgacgtctgaggctggagaa

SEQ ID NO: 302471 - DNA, 25 bp, Probe Sequence
tactgcctcagttgttgcctggaga

SEQ ID NO: 302472 - DNA, 25 bp, Probe Sequence
tactgcttgcagtaattcaactgga

SEQ ID NO: 302473 - DNA, 25 bp, Probe Sequence
tacttctgcatgaacatctccagcc

SEQ ID NO: 302474 - DNA, 25 bp, Probe Sequence
tactatctgcacaacctgtgaccgc

SEQ ID NO: 302475 - DNA, 25 bp, Probe Sequence
tagccctgatctacctaatactgca

SEQ ID NO: 302476 - DNA, 25 bp, Probe Sequence
tatgcacaatttatagcaagagtca

SEQ ID NO: 302477 - DNA, 25 bp, Probe Sequence
tactgcaagtcttttgatagatgtc

SEQ ID NO: 302478 - DNA, 25 bp, Probe Sequence
tacgatggtgctttgcaaggatgta

SEQ ID NO: 302479 - DNA, 25 bp, Probe Sequence
tactgttctctctccatgagttcaa

SEQ ID NO: 302480 - DNA, 25 bp, Probe Sequence
tacttgtttttccattgtatgcaaa

SEQ ID NO: 302481 - DNA, 25 bp, Probe Sequence
tactgtgtctctagggttaagccaa

SEQ ID NO: 302482 - DNA, 25 bp, Probe Sequence
tactcttgtcatatggtctagaaat

SEQ ID NO: 302483 - DNA, 25 bp, Probe Sequence
tacttgcttccattgtgtctgaaac

SEQ ID NO: 302484 - DNA, 25 bp, Probe Sequence
tacttcatcaactggattgacaaaa

SEQ ID NO: 302485 - DNA, 25 bp, Probe Sequence
tacttaacttcatatataatcaata

SEQ ID NO: 302486 - DNA, 25 bp, Probe Sequence
tactggagactcattatagaataat

SEQ ID NO: 302487 - DNA, 25 bp, Probe Sequence
tacattcaccacattatcagaataa

SEQ ID NO: 302488 - DNA, 25 bp, Probe Sequence
tacttcccctatcatagaagagctt

SEQ ID NO: 302489 - DNA, 25 bp, Probe Sequence
tactcactcacctgtatagggactt

SEQ ID NO: 302490 - DNA, 25 bp, Probe Sequence
tactatcacacctgtaatcccacta

SEQ ID NO: 302491 - DNA, 25 bp, Probe Sequence
tacttcaagctctttaaatcaccat

SEQ ID NO: 302492 - DNA, 25 bp, Probe Sequence
tacccaagtttgataaagctcatga

SEQ ID NO: 302493 - DNA, 25 bp, Probe Sequence
tacttttttgtgacaaggagctctt

SEQ ID NO: 302494 - DNA, 25 bp, Probe Sequence
tacttttttcattagattggtcttc

SEQ ID NO: 302495 - DNA, 25 bp, Probe Sequence
tactgttgtttttagctcggtcttt

SEQ ID NO: 302496 - DNA, 25 bp, Probe Sequence
tactgttgtttaaagggatgttatt

SEQ ID NO: 302497 - DNA, 25 bp, Probe Sequence
tacggcgttgtacggtggatgtcta

SEQ ID NO: 302498 - DNA, 25 bp, Probe Sequence
tatcaggcttaggactgtgggaggc

SEQ ID NO: 302499 - DNA, 25 bp, Probe Sequence
tacagggcatgagggctatgggaga

SEQ ID NO: 302500 - DNA, 25 bp, Probe Sequence
tactgctgagctgtggccaaggtca

SEQ ID NO: 302501 - DNA, 25 bp, Probe Sequence
tacttagcctcaagacaactgtcat

SEQ ID NO: 302502 - DNA, 25 bp, Probe Sequence
tactttctctgaaggaagcccatgc

SEQ ID NO: 302503 - DNA, 25 bp, Probe Sequence
tacttaccgaagcgaacgcagcctt

SEQ ID NO: 302504 - DNA, 25 bp, Probe Sequence
tactaattcgcatctggaagctcag

SEQ ID NO: 302505 - DNA, 25 bp, Probe Sequence
tactgagtatccactccataccaca

SEQ ID NO: 302506 - DNA, 25 bp, Probe Sequence
taccgtacattgctgccataccagg

SEQ ID NO: 302507 - DNA, 25 bp, Probe Sequence
tacttgaatgcaagcactgcaatac

SEQ ID NO: 302508 - DNA, 25 bp, Probe Sequence
tactaatgaatccactcagctaccc

SEQ ID NO: 302509 - DNA, 25 bp, Probe Sequence
tacgaatgaatgccagctctgcttg

SEQ ID NO: 302510 - DNA, 25 bp, Probe Sequence
tacaggtgtgagccactgtgcctgg

SEQ ID NO: 302511 - DNA, 25 bp, Probe Sequence
tacatctgtgtatactgtcctggtt

SEQ ID NO: 302512 - DNA, 25 bp, Probe Sequence
tactcatggaatatattctgcgttt

SEQ ID NO: 302513 - DNA, 25 bp, Probe Sequence
tactatggagatctggctgctcgcc

SEQ ID NO: 302514 - DNA, 25 bp, Probe Sequence
tactgtggagtggtgggcttccttg

SEQ ID NO: 302515 - DNA, 25 bp, Probe Sequence
ttccaggagtcgtggtttcttgcct

SEQ ID NO: 302516 - DNA, 25 bp, Probe Sequence
tatcggggtcaagggattggttcca

SEQ ID NO: 302517 - DNA, 25 bp, Probe Sequence
tagcgggcggttgtaaggtctccgg

SEQ ID NO: 302518 - DNA, 25 bp, Probe Sequence
tacggagggttgggtagacatctaa

SEQ ID NO: 302519 - DNA, 25 bp, Probe Sequence
ttccaggaaagtgtgaagacccaaa

SEQ ID NO: 302520 - DNA, 25 bp, Probe Sequence
tatctaacaaagggctaatacccag

SEQ ID NO: 302521 - DNA, 25 bp, Probe Sequence
tatccgaaaattgctaagacagtag

SEQ ID NO: 302522 - DNA, 25 bp, Probe Sequence
tatccagataaagccaagttactaa

SEQ ID NO: 302523 - DNA, 25 bp, Probe Sequence
tacataaacaagaccacgtttctaa

SEQ ID NO: 302524 - DNA, 25 bp, Probe Sequence
tacttaccaaacatcagttcttcaa

SEQ ID NO: 302525 - DNA, 25 bp, Probe Sequence
tacctacctacctggttgatcctgc

SEQ ID NO: 302526 - DNA, 25 bp, Probe Sequence
tacctaactacctcatggatgtgtt

SEQ ID NO: 302527 - DNA, 25 bp, Probe Sequence
tacctaactacctcatggatgtgtt

SEQ ID NO: 302528 - DNA, 25 bp, Probe Sequence
ttccaaaatgcacactgcgggttat

SEQ ID NO: 302529 - DNA, 25 bp, Probe Sequence
ttccatgatctaccaactaggtttg

SEQ ID NO: 302530 - DNA, 25 bp, Probe Sequence
tacccagcattatacttggttcatg

SEQ ID NO: 302531 - DNA, 25 bp, Probe Sequence
taccaagcatcttccaccaagaaca

SEQ ID NO: 302532 - DNA, 25 bp, Probe Sequence
tactcaatctcaactcatctcaatg

SEQ ID NO: 302533 - DNA, 25 bp, Probe Sequence
tactcatggtcggctcttgcaaggt

SEQ ID NO: 302534 - DNA, 25 bp, Probe Sequence
tactcagccacgccgtgtgtaggct

SEQ ID NO: 302535 - DNA, 25 bp, Probe Sequence
taccgccacgacatggtcgcagttc

SEQ ID NO: 302536 - DNA, 25 bp, Probe Sequence
tactgttcaagagttggctgccctt

SEQ ID NO: 302537 - DNA, 25 bp, Probe Sequence
tacttccagcagtacggctgcacct

SEQ ID NO: 302538 - DNA, 25 bp, Probe Sequence
tactccattgataacgaggccctgt

SEQ ID NO: 302539 - DNA, 25 bp, Probe Sequence
tatcttcatcagtgacgaggtatat

SEQ ID NO: 302540 - DNA, 25 bp, Probe Sequence
tacttcacagtagcatgacagtata

SEQ ID NO: 302541 - DNA, 25 bp, Probe Sequence
tacttatagtcctagcatagtacta

SEQ ID NO: 302542 - DNA, 25 bp, Probe Sequence
tacccatagggctagatctgtatct

SEQ ID NO: 302543 - DNA, 25 bp, Probe Sequence
tacgtccaatagtgacttgtcgcat

SEQ ID NO: 302544 - DNA, 25 bp, Probe Sequence
tacgtccaaggatgcacgttgtgct

SEQ ID NO: 302545 - DNA, 25 bp, Probe Sequence
tacggcaagtatttcaagttgctga

SEQ ID NO: 302546 - DNA, 25 bp, Probe Sequence
tacgttgagttcttctagcttgctt

SEQ ID NO: 302547 - DNA, 25 bp, Probe Sequence
tacgtattcattgtctacctgctaa

SEQ ID NO: 302548 - DNA, 25 bp, Probe Sequence
tacggttctgttataccccatatat

SEQ ID NO: 302549 - DNA, 25 bp, Probe Sequence
tactcttttttataccctctatatt

SEQ ID NO: 302550 - DNA, 25 bp, Probe Sequence
tacttctgttttttacacccacata

SEQ ID NO: 302551 - DNA, 25 bp, Probe Sequence
tacatttcctttaaacatccacaaa

SEQ ID NO: 302552 - DNA, 25 bp, Probe Sequence
tactttcctttttatcatcgtataa

SEQ ID NO: 302553 - DNA, 25 bp, Probe Sequence
tactttttggtttgacactgtattt

SEQ ID NO: 302554 - DNA, 25 bp, Probe Sequence
tacttttgattaatatatacttttt

SEQ ID NO: 302555 - DNA, 25 bp, Probe Sequence
tacatgttggtgcagaatatagtca

SEQ ID NO: 302556 - DNA, 25 bp, Probe Sequence
tatctgcggcagaggaataagtacc

SEQ ID NO: 302557 - DNA, 25 bp, Probe Sequence
tactgccacaggctaagaatgctga

SEQ ID NO: 302558 - DNA, 25 bp, Probe Sequence
tagctgcgcatggtggtaaaattac

SEQ ID NO: 302559 - DNA, 25 bp, Probe Sequence
tactggcatggtacggagatgtttc

SEQ ID NO: 302560 - DNA, 25 bp, Probe Sequence
tactggatcatgtggcaattctatt

SEQ ID NO: 302561 - DNA, 25 bp, Probe Sequence
ttcgaatggttggaattccaggaac

SEQ ID NO: 302562 - DNA, 25 bp, Probe Sequence
tacgaattcttgcctttccaggtac

SEQ ID NO: 302563 - DNA, 25 bp, Probe Sequence
tactgaaaggtgctttactgttcac

SEQ ID NO: 302564 - DNA, 25 bp, Probe Sequence
tactataaggtattctatatttata

SEQ ID NO: 302565 - DNA, 25 bp, Probe Sequence
tactttctgtgtttttatcttatac

SEQ ID NO: 302566 - DNA, 25 bp, Probe Sequence
tacgcattctggtgtttcacaaaag

SEQ ID NO: 302567 - DNA, 25 bp, Probe Sequence
tactatagtaaactcttccttaaga

SEQ ID NO: 302568 - DNA, 25 bp, Probe Sequence
tacttttttcaggcttactctaaga

SEQ ID NO: 302569 - DNA, 25 bp, Probe Sequence
tactttgacttcgtgcgtcttcgaa

SEQ ID NO: 302570 - DNA, 25 bp, Probe Sequence
tacattctagttctggtgctctcta

SEQ ID NO: 302571 - DNA, 25 bp, Probe Sequence
tacatactagtttatggcttctttc

SEQ ID NO: 302572 - DNA, 25 bp, Probe Sequence
tacatcctcctgttattgcttttta

SEQ ID NO: 302573 - DNA, 25 bp, Probe Sequence
tactttcctgtaactgcttttgctt

SEQ ID NO: 302574 - DNA, 25 bp, Probe Sequence
tactttctcgttattttgtgtgcat

SEQ ID NO: 302575 - DNA, 25 bp, Probe Sequence
tactgtcctggttagttttgtacaa

SEQ ID NO: 302576 - DNA, 25 bp, Probe Sequence
tacgtccgggagatctttttcagct

SEQ ID NO: 302577 - DNA, 25 bp, Probe Sequence
taccttctaggagctcctattggga

SEQ ID NO: 302578 - DNA, 25 bp, Probe Sequence
tacatgcaactacagcctcctatgt

SEQ ID NO: 302579 - DNA, 25 bp, Probe Sequence
tacatatactgacagctcatttatc

SEQ ID NO: 302580 - DNA, 25 bp, Probe Sequence
tacatgaacaactggctgctctgtc

SEQ ID NO: 302581 - DNA, 25 bp, Probe Sequence
tactgaaacacattatgcctctgta

SEQ ID NO: 302582 - DNA, 25 bp, Probe Sequence
tactgaccaacatatctcatgaata

SEQ ID NO: 302583 - DNA, 25 bp, Probe Sequence
taccccaccaagaccagaagtaagg

SEQ ID NO: 302584 - DNA, 25 bp, Probe Sequence
tacccccaaagagccgggagctgag

SEQ ID NO: 302585 - DNA, 25 bp, Probe Sequence
tatcccccaagctgagggaaggtga

SEQ ID NO: 302586 - DNA, 25 bp, Probe Sequence
tactccctcaagtacaagcttaggt

SEQ ID NO: 302587 - DNA, 25 bp, Probe Sequence
tactccttaccttcaagtaatgttc

SEQ ID NO: 302588 - DNA, 25 bp, Probe Sequence
tacccctatgtcatccaggaactta

SEQ ID NO: 302589 - DNA, 25 bp, Probe Sequence
tacccctatgtcatccaggaactta

SEQ ID NO: 302590 - DNA, 25 bp, Probe Sequence
tacgcccctatgacgtcaaggacgg

SEQ ID NO: 302591 - DNA, 25 bp, Probe Sequence
tacatgccccttccaaaaggcagaa

SEQ ID NO: 302592 - DNA, 25 bp, Probe Sequence
tacatgccccttccaaaaggcagaa

SEQ ID NO: 302593 - DNA, 25 bp, Probe Sequence
tacgctacctgtgcaccataaagaa

SEQ ID NO: 302594 - DNA, 25 bp, Probe Sequence
tacgctacctgtgcaccataaagaa

SEQ ID NO: 302595 - DNA, 25 bp, Probe Sequence
tacgagactctgttccaaaaaaaat

SEQ ID NO: 302596 - DNA, 25 bp, Probe Sequence
tacgagactctgttccaaaaaaaat

SEQ ID NO: 302597 - DNA, 25 bp, Probe Sequence
tacgagactctgttccaaaaaaaat

SEQ ID NO: 302598 - DNA, 25 bp, Probe Sequence
tactaactttctcctaactaaatat

SEQ ID NO: 302599 - DNA, 25 bp, Probe Sequence
tactaactttctcctaactaaatat

SEQ ID NO: 302600 - DNA, 25 bp, Probe Sequence
tactaactttctcctaactaaatat

SEQ ID NO: 302601 - DNA, 25 bp, Probe Sequence
tactaactttctcctaactaaatat

SEQ ID NO: 302602 - DNA, 25 bp, Probe Sequence
tactaactttcttcactactagatt

SEQ ID NO: 302603 - DNA, 25 bp, Probe Sequence
tacttacatttcagacatatccaaa

SEQ ID NO: 302604 - DNA, 25 bp, Probe Sequence
tactatactactgagaatatctaac

SEQ ID NO: 302605 - DNA, 25 bp, Probe Sequence
tacttgaaaatatgacactctagtc

SEQ ID NO: 302606 - DNA, 25 bp, Probe Sequence
tacttgaaaatatgacactctagtc

SEQ ID NO: 302607 - DNA, 25 bp, Probe Sequence
tacattaaaaatgggtttctgcacc

SEQ ID NO: 302608 - DNA, 25 bp, Probe Sequence
tacattcatcaatatccctcttgta

SEQ ID NO: 302609 - DNA, 25 bp, Probe Sequence
tacttacagataccacctctcttaa

SEQ ID NO: 302610 - DNA, 25 bp, Probe Sequence
tatgcattaccatgaaaacgttaaa

SEQ ID NO: 302611 - DNA, 25 bp, Probe Sequence
tacttatcccaatgaatgcgtgtta

SEQ ID NO: 302612 - DNA, 25 bp, Probe Sequence
tactttctcctatggatcgcttaca

SEQ ID NO: 302613 - DNA, 25 bp, Probe Sequence
tactctttattatagaatgctctcc

SEQ ID NO: 302614 - DNA, 25 bp, Probe Sequence
tacttttattatttggatgtatatc

SEQ ID NO: 302615 - DNA, 25 bp, Probe Sequence
tactttatacttttctgtgcttgac

SEQ ID NO: 302616 - DNA, 25 bp, Probe Sequence
tacttcatcaacagttcttttatta

SEQ ID NO: 302617 - DNA, 25 bp, Probe Sequence
tactttcagccttgttatttaatct

SEQ ID NO: 302618 - DNA, 25 bp, Probe Sequence
tacgctaaccattgtttctgtagtt

SEQ ID NO: 302619 - DNA, 25 bp, Probe Sequence
tacttaacctcagtttcattgtttg

SEQ ID NO: 302620 - DNA, 25 bp, Probe Sequence
tacttgccaccagcttgtgcattta

SEQ ID NO: 302621 - DNA, 25 bp, Probe Sequence
tacttccgccagatgtgctgcaaaa

SEQ ID NO: 302622 - DNA, 25 bp, Probe Sequence
tacattccccagaatgtgcctctag

SEQ ID NO: 302623 - DNA, 25 bp, Probe Sequence
tacctccccagagtcaaccttgggt

SEQ ID NO: 302624 - DNA, 25 bp, Probe Sequence
tactctgcctcaagtggaaactgtg

SEQ ID NO: 302625 - DNA, 25 bp, Probe Sequence
tacatcgactccctgaacagacaga

SEQ ID NO: 302626 - DNA, 25 bp, Probe Sequence
tacctgcatcgggtggccagagcag

SEQ ID NO: 302627 - DNA, 25 bp, Probe Sequence
tactctcatacaggggacccgtatt

SEQ ID NO: 302628 - DNA, 25 bp, Probe Sequence
tacatcataaaaagtggcccatttt

SEQ ID NO: 302629 - DNA, 25 bp, Probe Sequence
tactctatgtaaaagccccacctat

SEQ ID NO: 302630 - DNA, 25 bp, Probe Sequence
tactaaatgaaatgcttccacagct

SEQ ID NO: 302631 - DNA, 25 bp, Probe Sequence
tactaggtccagagctctggcccat

SEQ ID NO: 302632 - DNA, 25 bp, Probe Sequence
tactggagactctggtcagtgccca

SEQ ID NO: 302633 - DNA, 25 bp, Probe Sequence
tactgggcatgtgcctgtctgagcc

SEQ ID NO: 302634 - DNA, 25 bp, Probe Sequence
tactgggcatgtgcctgtctgagcc

SEQ ID NO: 302635 - DNA, 25 bp, Probe Sequence
tactgctggcatgtaatgcttagtt

SEQ ID NO: 302636 - DNA, 25 bp, Probe Sequence
tactgtgatgcatttcaagtggcag

SEQ ID NO: 302637 - DNA, 25 bp, Probe Sequence
tagctgtgatcatccacaagccaaa

SEQ ID NO: 302638 - DNA, 25 bp, Probe Sequence
tactggactatgtctccatcgccag

SEQ ID NO: 302639 - DNA, 25 bp, Probe Sequence
tactggccatatttgcttgagcctg

SEQ ID NO: 302640 - DNA, 25 bp, Probe Sequence
tactctgctttgtagttgtggctgt

SEQ ID NO: 302641 - DNA, 25 bp, Probe Sequence
tacttattctggaagatctggctga

SEQ ID NO: 302642 - DNA, 25 bp, Probe Sequence
tactatgattgtgtatgtgccgcta

SEQ ID NO: 302643 - DNA, 25 bp, Probe Sequence
tactcaagtgtacagatctcctcaa

SEQ ID NO: 302644 - DNA, 25 bp, Probe Sequence
tactaaggtgctcagtccttgcaat

SEQ ID NO: 302645 - DNA, 25 bp, Probe Sequence
taccaggggtgcaaaacttcagatt

SEQ ID NO: 302646 - DNA, 25 bp, Probe Sequence
tacctgtggggtttcacttgcccat

SEQ ID NO: 302647 - DNA, 25 bp, Probe Sequence
tacttgctgggacggattcttgcgg

SEQ ID NO: 302648 - DNA, 25 bp, Probe Sequence
tagcttggggacctgaactgtcctg

SEQ ID NO: 302649 - DNA, 25 bp, Probe Sequence
tacattgctgaggacctgacaggac

SEQ ID NO: 302650 - DNA, 25 bp, Probe Sequence
tactttgatgattgccaacagtggc

SEQ ID NO: 302651 - DNA, 25 bp, Probe Sequence
tacttggatgattgtcaccggaggt

SEQ ID NO: 302652 - DNA, 25 bp, Probe Sequence
tactctgaatgatcttcctgtgggt

SEQ ID NO: 302653 - DNA, 25 bp, Probe Sequence
tactcagagtatcgcttccctgaag

SEQ ID NO: 302654 - DNA, 25 bp, Probe Sequence
tactcagagtatcgcttccctgaag

SEQ ID NO: 302655 - DNA, 25 bp, Probe Sequence
tactgagagctacctattggcataa

SEQ ID NO: 302656 - DNA, 25 bp, Probe Sequence
tactagactaccctttaaaatcaag

SEQ ID NO: 302657 - DNA, 25 bp, Probe Sequence
tactttgtacaggctattaaattgc

SEQ ID NO: 302658 - DNA, 25 bp, Probe Sequence
tacttttgacttaatttccatatgg

SEQ ID NO: 302659 - DNA, 25 bp, Probe Sequence
tactactagatcacttgtcctcttg

SEQ ID NO: 302660 - DNA, 25 bp, Probe Sequence
tacttcgtgtctacaatgtcctctt

SEQ ID NO: 302661 - DNA, 25 bp, Probe Sequence
tactcatttgtattcactgtcactt

SEQ ID NO: 302662 - DNA, 25 bp, Probe Sequence
tactgctttgtagtgactcgtgctc

SEQ ID NO: 302663 - DNA, 25 bp, Probe Sequence
taccgtattagtatcgcctattacc

SEQ ID NO: 302664 - DNA, 25 bp, Probe Sequence
taccaaaaaagcacggctggtaccg

SEQ ID NO: 302665 - DNA, 25 bp, Probe Sequence
tacgaacaaaacgcagcgcatggta

SEQ ID NO: 302666 - DNA, 25 bp, Probe Sequence
tagctttctaaagccacgctgtgtc

SEQ ID NO: 302667 - DNA, 25 bp, Probe Sequence
tactgtctgtgagaaaccagctggt

SEQ ID NO: 302668 - DNA, 25 bp, Probe Sequence
tatcatgtcttagagcccgtcttta

SEQ ID NO: 302669 - DNA, 25 bp, Probe Sequence
tactggcactgacatggccgtcttc

SEQ ID NO: 302670 - DNA, 25 bp, Probe Sequence
tactggacggtgggcagtgactccg

SEQ ID NO: 302671 - DNA, 25 bp, Probe Sequence
tacgtgactggttgcgcgtagttgc

SEQ ID NO: 302672 - DNA, 25 bp, Probe Sequence
tactgaagagcaatagccacttgag

SEQ ID NO: 302673 - DNA, 25 bp, Probe Sequence
taccctagctacaccttcagtggtg

SEQ ID NO: 302674 - DNA, 25 bp, Probe Sequence
taccctgaccatgacctgaggttgg

SEQ ID NO: 302675 - DNA, 25 bp, Probe Sequence
tacttctgactttacttgtggtgtg

SEQ ID NO: 302676 - DNA, 25 bp, Probe Sequence
tactgtacagtttagttggagtgta

SEQ ID NO: 302677 - DNA, 25 bp, Probe Sequence
tacggagagtctagcctgggtgtgt

SEQ ID NO: 302678 - DNA, 25 bp, Probe Sequence
tactgaaggagccccgagatgtggt

SEQ ID NO: 302679 - DNA, 25 bp, Probe Sequence
tactgaactcaacaagatcttggct

SEQ ID NO: 302680 - DNA, 25 bp, Probe Sequence
tactgtgcctaatttttcattggct

SEQ ID NO: 302681 - DNA, 25 bp, Probe Sequence
tactgggcttaattcctcggtgatg

SEQ ID NO: 302682 - DNA, 25 bp, Probe Sequence
tactgggcttgatatgactttgagg

SEQ ID NO: 302683 - DNA, 25 bp, Probe Sequence
tagctcagtgctttttgcctttaag

SEQ ID NO: 302684 - DNA, 25 bp, Probe Sequence
tactacatctacattcagcttggaa

SEQ ID NO: 302685 - DNA, 25 bp, Probe Sequence
tatctaatctccaaccttagggagt

SEQ ID NO: 302686 - DNA, 25 bp, Probe Sequence
tatcgaatccctgccgttagcgact

SEQ ID NO: 302687 - DNA, 25 bp, Probe Sequence
taccttcccaagccaattaagcctt

SEQ ID NO: 302688 - DNA, 25 bp, Probe Sequence
tacttcccataagcgtaaatgcctg

SEQ ID NO: 302689 - DNA, 25 bp, Probe Sequence
tagatcccaaaagggccaaagcttt

SEQ ID NO: 302690 - DNA, 25 bp, Probe Sequence
tactcctgcaaatgggtacagtctc

SEQ ID NO: 302691 - DNA, 25 bp, Probe Sequence
tactcctaaacagcagtcagccaca

SEQ ID NO: 302692 - DNA, 25 bp, Probe Sequence
taccctcagatcaccttcgagaaca

SEQ ID NO: 302693 - DNA, 25 bp, Probe Sequence
taccctcagatcaccttcgagaaca

SEQ ID NO: 302694 - DNA, 25 bp, Probe Sequence
taccccttcatgtcctaaagaagac

SEQ ID NO: 302695 - DNA, 25 bp, Probe Sequence
taccccatgcctgctgcagaaatat

SEQ ID NO: 302696 - DNA, 25 bp, Probe Sequence
tacccacatcttataaaatggcccc

SEQ ID NO: 302697 - DNA, 25 bp, Probe Sequence
taccccaagtcggacagaaggccca

SEQ ID NO: 302698 - DNA, 25 bp, Probe Sequence
tacccaaagggctacaaacctcctg

SEQ ID NO: 302699 - DNA, 25 bp, Probe Sequence
taccctaagagtttaagagcctaag

SEQ ID NO: 302700 - DNA, 25 bp, Probe Sequence
taccctatgtagttgtggaagttta

SEQ ID NO: 302701 - DNA, 25 bp, Probe Sequence
tacccttttacttgctactggttca

SEQ ID NO: 302702 - DNA, 25 bp, Probe Sequence
taccgtttattattgcataccttta

SEQ ID NO: 302703 - DNA, 25 bp, Probe Sequence
tacggtcatcttgaatgatcccttt

SEQ ID NO: 302704 - DNA, 25 bp, Probe Sequence
tacgagtgccttaaagttcattgta

SEQ ID NO: 302705 - DNA, 25 bp, Probe Sequence
tacggaggctctcacagttcaacaa

SEQ ID NO: 302706 - DNA, 25 bp, Probe Sequence
tactgatgggctaggtagttcaatc

SEQ ID NO: 302707 - DNA, 25 bp, Probe Sequence
tactgttggccatgtcttcatcagt

SEQ ID NO: 302708 - DNA, 25 bp, Probe Sequence
tactattgttcattgcttccttttc

SEQ ID NO: 302709 - DNA, 25 bp, Probe Sequence
tactttgtcatatctgtcttttctg

SEQ ID NO: 302710 - DNA, 25 bp, Probe Sequence
tacattattatattgcattatttat

SEQ ID NO: 302711 - DNA, 25 bp, Probe Sequence
tactgatattgttacatgtattagt

SEQ ID NO: 302712 - DNA, 25 bp, Probe Sequence
tactgttgtacaatcatgttctggt

SEQ ID NO: 302713 - DNA, 25 bp, Probe Sequence
tacttgtaacatttgtgtgatggct

SEQ ID NO: 302714 - DNA, 25 bp, Probe Sequence
tactttatatcatttgcgtagtgtg

SEQ ID NO: 302715 - DNA, 25 bp, Probe Sequence
tactctattatatttgttacatttt

SEQ ID NO: 302716 - DNA, 25 bp, Probe Sequence
tacttattgaatctgctttactttt

SEQ ID NO: 302717 - DNA, 25 bp, Probe Sequence
tactcatcctgaatggagctttacc

SEQ ID NO: 302718 - DNA, 25 bp, Probe Sequence
tactacagctgcaagaacttttcca

SEQ ID NO: 302719 - DNA, 25 bp, Probe Sequence
tatctccagctgtgaggctagtccc

SEQ ID NO: 302720 - DNA, 25 bp, Probe Sequence
tactctgcactatagccatttgccc

SEQ ID NO: 302721 - DNA, 25 bp, Probe Sequence
tactgtctcttactgtctgttgacc

SEQ ID NO: 302722 - DNA, 25 bp, Probe Sequence
tactgtgtactacctgcatttgtgc

SEQ ID NO: 302723 - DNA, 25 bp, Probe Sequence
tactttagctacatattcttccttt

SEQ ID NO: 302724 - DNA, 25 bp, Probe Sequence
tactgttcgtacatttctctcttaa

SEQ ID NO: 302725 - DNA, 25 bp, Probe Sequence
tacgttactaaatttgttcatttca

SEQ ID NO: 302726 - DNA, 25 bp, Probe Sequence
tactgttaatgatactggttcattt

SEQ ID NO: 302727 - DNA, 25 bp, Probe Sequence
tactgtctaaagtaagtttctcctt

SEQ ID NO: 302728 - DNA, 25 bp, Probe Sequence
tacgtgattaataaagatttccttt

SEQ ID NO: 302729 - DNA, 25 bp, Probe Sequence
tagccgtagacggaacttcgccttt

SEQ ID NO: 302730 - DNA, 25 bp, Probe Sequence
taccaaagcacctcgattttctttt

SEQ ID NO: 302731 - DNA, 25 bp, Probe Sequence
tacgccaaacctcggcattttttgt

SEQ ID NO: 302732 - DNA, 25 bp, Probe Sequence
taccccatacctttaattctagtct

SEQ ID NO: 302733 - DNA, 25 bp, Probe Sequence
tacccctaccagggcaaggatggtt

SEQ ID NO: 302734 - DNA, 25 bp, Probe Sequence
tactccagctgaccgttaaatgagg

SEQ ID NO: 302735 - DNA, 25 bp, Probe Sequence
tacttcacatcgtcgttcacatggg

SEQ ID NO: 302736 - DNA, 25 bp, Probe Sequence
tacttcacatcgtcgttcacatggg

SEQ ID NO: 302737 - DNA, 25 bp, Probe Sequence
tatcttagacgacctgtccagatgg

SEQ ID NO: 302738 - DNA, 25 bp, Probe Sequence
tactccaatctaccactctaatggc

SEQ ID NO: 302739 - DNA, 25 bp, Probe Sequence
tacccattatagcacaaaatcagcc

SEQ ID NO: 302740 - DNA, 25 bp, Probe Sequence
tacccttatctgccaaaaccagagc

SEQ ID NO: 302741 - DNA, 25 bp, Probe Sequence
tagcctttgctcagacaaaagaggc

SEQ ID NO: 302742 - DNA, 25 bp, Probe Sequence
tactctttgctagtaccaaaagtag

SEQ ID NO: 302743 - DNA, 25 bp, Probe Sequence
tacttctgagctgctaccacatgac

SEQ ID NO: 302744 - DNA, 25 bp, Probe Sequence
tacttcatggcagctatcccacaga

SEQ ID NO: 302745 - DNA, 25 bp, Probe Sequence
tacttcatggcagctatcccacaga

SEQ ID NO: 302746 - DNA, 25 bp, Probe Sequence
tacttcatgcgcaatgctgacttgg

SEQ ID NO: 302747 - DNA, 25 bp, Probe Sequence
tactgctatggccgtggcattgggg

SEQ ID NO: 302748 - DNA, 25 bp, Probe Sequence
tactgtgagagccagatggggcagg

SEQ ID NO: 302749 - DNA, 25 bp, Probe Sequence
tactctagggagtatgctggaggca

SEQ ID NO: 302750 - DNA, 25 bp, Probe Sequence
tactctcgtgcaaaaggggtgcatt

SEQ ID NO: 302751 - DNA, 25 bp, Probe Sequence
tagcttctgctcccaggaaggtagt

SEQ ID NO: 302752 - DNA, 25 bp, Probe Sequence
tacttcagcccagggaagggatagc

SEQ ID NO: 302753 - DNA, 25 bp, Probe Sequence
tagcctagcacgcgggacggataac

SEQ ID NO: 302754 - DNA, 25 bp, Probe Sequence
tagattggcccatggtgccaggtta

SEQ ID NO: 302755 - DNA, 25 bp, Probe Sequence
taggattgcccaggagtccaacgat

SEQ ID NO: 302756 - DNA, 25 bp, Probe Sequence
taccattgtcctggaagtcccgatc

SEQ ID NO: 302757 - DNA, 25 bp, Probe Sequence
tacgggtcctggcgctaggaatcaa

SEQ ID NO: 302758 - DNA, 25 bp, Probe Sequence
tacggcatttcccgggacagacaaa

SEQ ID NO: 302759 - DNA, 25 bp, Probe Sequence
tactgtacttcctagtaaccctaag

SEQ ID NO: 302760 - DNA, 25 bp, Probe Sequence
tacctagttcgctcaaacactacat

SEQ ID NO: 302761 - DNA, 25 bp, Probe Sequence
taccaagtcctagaaataccatatg

SEQ ID NO: 302762 - DNA, 25 bp, Probe Sequence
taccaactccgaccaggaaccatga

SEQ ID NO: 302763 - DNA, 25 bp, Probe Sequence
taggccgcgggaccggataacaatt

SEQ ID NO: 302764 - DNA, 25 bp, Probe Sequence
taggcccgcgggacggataacaaat

SEQ ID NO: 302765 - DNA, 25 bp, Probe Sequence
tttcttcgccctgcaggtaacaaat

SEQ ID NO: 302766 - DNA, 25 bp, Probe Sequence
ttgtttcccttgcatgggacgaaag

SEQ ID NO: 302767 - DNA, 25 bp, Probe Sequence
tatgtttctactcggggaacaaacg

SEQ ID NO: 302768 - DNA, 25 bp, Probe Sequence
tagatttacactccgggacgttgcc

SEQ ID NO: 302769 - DNA, 25 bp, Probe Sequence
tactttaccgtcttcgacagggcaa

SEQ ID NO: 302770 - DNA, 25 bp, Probe Sequence
tacttttccgtcatcagtattatca

SEQ ID NO: 302771 - DNA, 25 bp, Probe Sequence
tactcatttccttcctagtaatact

SEQ ID NO: 302772 - DNA, 25 bp, Probe Sequence
tactcttatcctaagtagaaagact

SEQ ID NO: 302773 - DNA, 25 bp, Probe Sequence
tactctaacctcactaaagaatgtt

SEQ ID NO: 302774 - DNA, 25 bp, Probe Sequence
tacttcccccatttgaaatgtgatg

SEQ ID NO: 302775 - DNA, 25 bp, Probe Sequence
tacttgaacccataaacttggaaga

SEQ ID NO: 302776 - DNA, 25 bp, Probe Sequence
tacctactccctcaaacgggtggag

SEQ ID NO: 302777 - DNA, 25 bp, Probe Sequence
tacctttcccttaagagctagttgt

SEQ ID NO: 302778 - DNA, 25 bp, Probe Sequence
tagccatttacctacggagggttgg

SEQ ID NO: 302779 - DNA, 25 bp, Probe Sequence
tagcctatctacaatcaagggggta

SEQ ID NO: 302780 - DNA, 25 bp, Probe Sequence
tacctagctaccactaggtggatag

SEQ ID NO: 302781 - DNA, 25 bp, Probe Sequence
tacccaaacctactgggctactaat

SEQ ID NO: 302782 - DNA, 25 bp, Probe Sequence
tacttcagaaccgttggagtccaac

SEQ ID NO: 302783 - DNA, 25 bp, Probe Sequence
tactatgaaagctgctctggcctcg

SEQ ID NO: 302784 - DNA, 25 bp, Probe Sequence
tactatgaaccatcctgtactcaga

SEQ ID NO: 302785 - DNA, 25 bp, Probe Sequence
tactgagacacccataattcccata

SEQ ID NO: 302786 - DNA, 25 bp, Probe Sequence
tactgacaaccctagtgtcacctca

SEQ ID NO: 302787 - DNA, 25 bp, Probe Sequence
tactagaacttaagatggccccaaa

SEQ ID NO: 302788 - DNA, 25 bp, Probe Sequence
tactcaaactttgtcctcgtgaaga

SEQ ID NO: 302789 - DNA, 25 bp, Probe Sequence
tagccagaccttgtttctactaaaa

SEQ ID NO: 302790 - DNA, 25 bp, Probe Sequence
tagtaataccctctctctacaaaaa

SEQ ID NO: 302791 - DNA, 25 bp, Probe Sequence
tacttataacctatcttagagaaat

SEQ ID NO: 302792 - DNA, 25 bp, Probe Sequence
tactgatataaacacttccaaataa

SEQ ID NO: 302793 - DNA, 25 bp, Probe Sequence
tacttaataagtacctactagtaag

SEQ ID NO: 302794 - DNA, 25 bp, Probe Sequence
tacctaagaagcaccttaagattag

SEQ ID NO: 302795 - DNA, 25 bp, Probe Sequence
taccgggcaatagtacttgaagtat

SEQ ID NO: 302796 - DNA, 25 bp, Probe Sequence
taccgggaacgactgtatagagtat

SEQ ID NO: 302797 - DNA, 25 bp, Probe Sequence
tacccggaccgggtgccggtgatag

SEQ ID NO: 302798 - DNA, 25 bp, Probe Sequence
taccctgagctcaggggccgactac

SEQ ID NO: 302799 - DNA, 25 bp, Probe Sequence
tacccaggtggaggggaccaccctg

SEQ ID NO: 302800 - DNA, 25 bp, Probe Sequence
tagaccaaggggaggacttcccagc

SEQ ID NO: 302801 - DNA, 25 bp, Probe Sequence
tagaccaaccagtgggaaactgccc

SEQ ID NO: 302802 - DNA, 25 bp, Probe Sequence
ttaccaagcctctgggattttacca

SEQ ID NO: 302803 - DNA, 25 bp, Probe Sequence
ttcccaggatcctgggtctgttccc

SEQ ID NO: 302804 - DNA, 25 bp, Probe Sequence
ttcctaggacacaggggactccttg

SEQ ID NO: 302805 - DNA, 25 bp, Probe Sequence
tttgtagggacaggggtcccactat

SEQ ID NO: 302806 - DNA, 25 bp, Probe Sequence
tttcttgggaatgtgtgccggaata

SEQ ID NO: 302807 - DNA, 25 bp, Probe Sequence
ttttgtgggggtgggggagatagca

SEQ ID NO: 302808 - DNA, 25 bp, Probe Sequence
tttcatggggctctgggatcaaaag

SEQ ID NO: 302809 - DNA, 25 bp, Probe Sequence
ttccaccagttgtggcgtccagaaa

SEQ ID NO: 302810 - DNA, 25 bp, Probe Sequence
tatcaaaactcctggggcctgacaa

SEQ ID NO: 302811 - DNA, 25 bp, Probe Sequence
taccataacccaaggctgaaaataa

SEQ ID NO: 302812 - DNA, 25 bp, Probe Sequence
taccttacgtcatggtgagggaaag

SEQ ID NO: 302813 - DNA, 25 bp, Probe Sequence
tactgtctacttttcaggattaaaa

SEQ ID NO: 302814 - DNA, 25 bp, Probe Sequence
tactgtctacttttcaggattaaaa

SEQ ID NO: 302815 - DNA, 25 bp, Probe Sequence
tactggctaccacaaaattaacaac

SEQ ID NO: 302816 - DNA, 25 bp, Probe Sequence
tactctgtggccccaaattttataa

SEQ ID NO: 302817 - DNA, 25 bp, Probe Sequence
tactctcagggacacagttattgac

SEQ ID NO: 302818 - DNA, 25 bp, Probe Sequence
tagtcacagttaccgcgtgtactac

SEQ ID NO: 302819 - DNA, 25 bp, Probe Sequence
tagtccagtggcctagctggtacca

SEQ ID NO: 302820 - DNA, 25 bp, Probe Sequence
tactccgctggcccatgaagtaaat

SEQ ID NO: 302821 - DNA, 25 bp, Probe Sequence
tactctccggacatgaaccataacc

SEQ ID NO: 302822 - DNA, 25 bp, Probe Sequence
tacttactacacatgaaccataatg

SEQ ID NO: 302823 - DNA, 25 bp, Probe Sequence
tacttactgaaggagccccgagatg

SEQ ID NO: 302824 - DNA, 25 bp, Probe Sequence
tactggaatacgggaaccgaggagg

SEQ ID NO: 302825 - DNA, 25 bp, Probe Sequence
tacgggaactacgactacgggagct

SEQ ID NO: 302826 - DNA, 25 bp, Probe Sequence
tacgggccctagacaatacgatgga

SEQ ID NO: 302827 - DNA, 25 bp, Probe Sequence
tacgggcttcaccaagtgaccatgg

SEQ ID NO: 302828 - DNA, 25 bp, Probe Sequence
tactgggctgtctgaaggggctggc

SEQ ID NO: 302829 - DNA, 25 bp, Probe Sequence
tactgctgggccggaaggtggtggt

SEQ ID NO: 302830 - DNA, 25 bp, Probe Sequence
taccgccgcaaccacaagggtggtg

SEQ ID NO: 302831 - DNA, 25 bp, Probe Sequence
tactcaccgagacacacgggctgag

SEQ ID NO: 302832 - DNA, 25 bp, Probe Sequence
tactctttgagacatcactggccta

SEQ ID NO: 302833 - DNA, 25 bp, Probe Sequence
tactctttggagatgcccattctac

SEQ ID NO: 302834 - DNA, 25 bp, Probe Sequence
tacttttggagctggccttctcaag

SEQ ID NO: 302835 - DNA, 25 bp, Probe Sequence
tacgatcttgggtggagtttaatgc

SEQ ID NO: 302836 - DNA, 25 bp, Probe Sequence
tagccttgtaggctgggtttaagaa

SEQ ID NO: 302837 - DNA, 25 bp, Probe Sequence
tagtcttggggcaggatgattttgg

SEQ ID NO: 302838 - DNA, 25 bp, Probe Sequence
tactgtggggtggggctgttgatat

SEQ ID NO: 302839 - DNA, 25 bp, Probe Sequence
taggtaggtgggcgctgcccagaaa

SEQ ID NO: 302840 - DNA, 25 bp, Probe Sequence
ttcttacgttggtggccaagtaact

SEQ ID NO: 302841 - DNA, 25 bp, Probe Sequence
tacttattgttggtaggcacatcgt

SEQ ID NO: 302842 - DNA, 25 bp, Probe Sequence
tacttattgctagatgggagaggct

SEQ ID NO: 302843 - DNA, 25 bp, Probe Sequence
tagtggttaatggatgtgggaggta

SEQ ID NO: 302844 - DNA, 25 bp, Probe Sequence
taggggtatcaggcggggaggttgg

SEQ ID NO: 302845 - DNA, 25 bp, Probe Sequence
tagagaaggacccggaggggcctgg

SEQ ID NO: 302846 - DNA, 25 bp, Probe Sequence
tagaggggaccacgggagggacaag

SEQ ID NO: 302847 - DNA, 25 bp, Probe Sequence
tagccgtggtccaggagacggaggg

SEQ ID NO: 302848 - DNA, 25 bp, Probe Sequence
tacccgggcattgccgacaggatgc

SEQ ID NO: 302849 - DNA, 25 bp, Probe Sequence
taccggggattcaccatccccgagg

SEQ ID NO: 302850 - DNA, 25 bp, Probe Sequence
taccgggaggctcagttcccgtagg

SEQ ID NO: 302851 - DNA, 25 bp, Probe Sequence
taccgttaagcgctgtgctaccggg

SEQ ID NO: 302852 - DNA, 25 bp, Probe Sequence
tactcttttactttggttcctgttg

SEQ ID NO: 302853 - DNA, 25 bp, Probe Sequence
tactcagttccaacttgtgattcct

SEQ ID NO: 302854 - DNA, 25 bp, Probe Sequence
tactcagtcaaaacttgtgttctca

SEQ ID NO: 302855 - DNA, 25 bp, Probe Sequence
tactcatgccagattttgggattac

SEQ ID NO: 302856 - DNA, 25 bp, Probe Sequence
tactcatgccaaattcacagttttt

SEQ ID NO: 302857 - DNA, 25 bp, Probe Sequence
tactctgcacgtatatctcttctgt

SEQ ID NO: 302858 - DNA, 25 bp, Probe Sequence
tactgtgacacttatctcactgttt

SEQ ID NO: 302859 - DNA, 25 bp, Probe Sequence
tactggactttaccttgatatatgt

SEQ ID NO: 302860 - DNA, 25 bp, Probe Sequence
tactatactcatacatttttaatat

SEQ ID NO: 302861 - DNA, 25 bp, Probe Sequence
tactatcattgagtcctttcttatt

SEQ ID NO: 302862 - DNA, 25 bp, Probe Sequence
tactcatatagagcttgtacatatt

SEQ ID NO: 302863 - DNA, 25 bp, Probe Sequence
tactatctatgggctcctactataa

SEQ ID NO: 302864 - DNA, 25 bp, Probe Sequence
tactcttgagtgtctccttttgata

SEQ ID NO: 302865 - DNA, 25 bp, Probe Sequence
tacctaggcttgtccattttatgca

SEQ ID NO: 302866 - DNA, 25 bp, Probe Sequence
tacctggtttgtgaatgtattggag

SEQ ID NO: 302867 - DNA, 25 bp, Probe Sequence
tacctggtttgctggctttggcaga

SEQ ID NO: 302868 - DNA, 25 bp, Probe Sequence
taccatggtgatgcggttttggcag

SEQ ID NO: 302869 - DNA, 25 bp, Probe Sequence
ttcctggggaagagttgtacgccca

SEQ ID NO: 302870 - DNA, 25 bp, Probe Sequence
taccgtggaaggtggattacgccct

SEQ ID NO: 302871 - DNA, 25 bp, Probe Sequence
taccggaaaggtgtgatcaaggcca

SEQ ID NO: 302872 - DNA, 25 bp, Probe Sequence
taccgatgtagcagtcctgcacctg

SEQ ID NO: 302873 - DNA, 25 bp, Probe Sequence
tactcttgtattctcatggcaccta

SEQ ID NO: 302874 - DNA, 25 bp, Probe Sequence
taccttttggcagtgatgagctaaa

SEQ ID NO: 302875 - DNA, 25 bp, Probe Sequence
tacctttccacatgtcagcttagaa

SEQ ID NO: 302876 - DNA, 25 bp, Probe Sequence
tactttctggagtaatcaggtggaa

SEQ ID NO: 302877 - DNA, 25 bp, Probe Sequence
tactttctgtgttgaagcactgttg

SEQ ID NO: 302878 - DNA, 25 bp, Probe Sequence
tactttctgtgttgaagcactgttg

SEQ ID NO: 302879 - DNA, 25 bp, Probe Sequence
tactttcattgttaacactgagcta

SEQ ID NO: 302880 - DNA, 25 bp, Probe Sequence
tactttcctgctgacatatctgatc

SEQ ID NO: 302881 - DNA, 25 bp, Probe Sequence
tactgtaccctgcagtgttgatttt

SEQ ID NO: 302882 - DNA, 25 bp, Probe Sequence
tactctaccctgcaacattgaactc

SEQ ID NO: 302883 - DNA, 25 bp, Probe Sequence
tactctactctcagtatggattatt

SEQ ID NO: 302884 - DNA, 25 bp, Probe Sequence
tactctcaccttttatgagattgag

SEQ ID NO: 302885 - DNA, 25 bp, Probe Sequence
tacccaattctaagtggttgacaga

SEQ ID NO: 302886 - DNA, 25 bp, Probe Sequence
tacccagtcacttgggcttgagaaa

SEQ ID NO: 302887 - DNA, 25 bp, Probe Sequence
tacccgtgctatggtggtttgctac

SEQ ID NO: 302888 - DNA, 25 bp, Probe Sequence
taccaggtctgttgagggttctact

SEQ ID NO: 302889 - DNA, 25 bp, Probe Sequence
tagccactgttttggggctttaata

SEQ ID NO: 302890 - DNA, 25 bp, Probe Sequence
tacgactgcctatcgggatatttta

SEQ ID NO: 302891 - DNA, 25 bp, Probe Sequence
tacgtctccctttggggatttaatg

SEQ ID NO: 302892 - DNA, 25 bp, Probe Sequence
tagcgtttccggttggagagttaat

SEQ ID NO: 302893 - DNA, 25 bp, Probe Sequence
tacgtccatctcttgtttaaattca

SEQ ID NO: 302894 - DNA, 25 bp, Probe Sequence
tactgtccagctctgttgattttaa

SEQ ID NO: 302895 - DNA, 25 bp, Probe Sequence
tttgcatccagccctgagacatgta

SEQ ID NO: 302896 - DNA, 25 bp, Probe Sequence
tactgcatcgacaacgaggcgctct

SEQ ID NO: 302897 - DNA, 25 bp, Probe Sequence
tactgcatctgattaaatgtctcca

SEQ ID NO: 302898 - DNA, 25 bp, Probe Sequence
tactctctgagtacattgtgccctt

SEQ ID NO: 302899 - DNA, 25 bp, Probe Sequence
tactagcgtgtgattgtccttctgc

SEQ ID NO: 302900 - DNA, 25 bp, Probe Sequence
tactctgttatgactctgtcttccc

SEQ ID NO: 302901 - DNA, 25 bp, Probe Sequence
tactctgttatgactctgtcttccc

SEQ ID NO: 302902 - DNA, 25 bp, Probe Sequence
tactctgttaccaatggctttacta

SEQ ID NO: 302903 - DNA, 25 bp, Probe Sequence
tactggtccattcatgagatattca

SEQ ID NO: 302904 - DNA, 25 bp, Probe Sequence
tacgtggctcacactgagtgtctgc

SEQ ID NO: 302905 - DNA, 25 bp, Probe Sequence
tactgtgtctacatccggaatgctg

SEQ ID NO: 302906 - DNA, 25 bp, Probe Sequence
tactgctgtttcacgtcggtatcag

SEQ ID NO: 302907 - DNA, 25 bp, Probe Sequence
tacttttttgaccacgagccatgag

SEQ ID NO: 302908 - DNA, 25 bp, Probe Sequence
tacgccccttatggacgtcaatgac

SEQ ID NO: 302909 - DNA, 25 bp, Probe Sequence
tacgccctctacggacagagactga

SEQ ID NO: 302910 - DNA, 25 bp, Probe Sequence
tacgccctctacggacagagactga

SEQ ID NO: 302911 - DNA, 25 bp, Probe Sequence
tactcccctccttgaactaggattg

SEQ ID NO: 302912 - DNA, 25 bp, Probe Sequence
taccacacgtccaaagttagattta

SEQ ID NO: 302913 - DNA, 25 bp, Probe Sequence
tactaccaccaaggagaatagttta

SEQ ID NO: 302914 - DNA, 25 bp, Probe Sequence
tactaccaccactgttattattaag

SEQ ID NO: 302915 - DNA, 25 bp, Probe Sequence
tactactaccaccactgttattatt

SEQ ID NO: 302916 - DNA, 25 bp, Probe Sequence
tactacttgtacctgtatgtctttt

SEQ ID NO: 302917 - DNA, 25 bp, Probe Sequence
tactccatttaccgtgatgtgaata

SEQ ID NO: 302918 - DNA, 25 bp, Probe Sequence
tacgaatgttaccaggcatggcagt

SEQ ID NO: 302919 - DNA, 25 bp, Probe Sequence
tactggattatagaggaagactgga

SEQ ID NO: 302920 - DNA, 25 bp, Probe Sequence
tactcagtggtcagcggaaacttga

SEQ ID NO: 302921 - DNA, 25 bp, Probe Sequence
tactgcgtatggcgggacaaccatg

SEQ ID NO: 302922 - DNA, 25 bp, Probe Sequence
tacccttggcctgagagacagtctg

SEQ ID NO: 302923 - DNA, 25 bp, Probe Sequence
tatctcaacggcctcggcaattgtt

SEQ ID NO: 302924 - DNA, 25 bp, Probe Sequence
tatctcaacggcctcggcaattgtt

SEQ ID NO: 302925 - DNA, 25 bp, Probe Sequence
taccaacgccgaggtgctcaaggtc

SEQ ID NO: 302926 - DNA, 25 bp, Probe Sequence
taccaacgccgaggtgctcaaggtc

SEQ ID NO: 302927 - DNA, 25 bp, Probe Sequence
taccccctcaggtgcacaaggtata

SEQ ID NO: 302928 - DNA, 25 bp, Probe Sequence
tactccccactgatggaccagtggt

SEQ ID NO: 302929 - DNA, 25 bp, Probe Sequence
tactccccacgaatgtgaagaggcc

SEQ ID NO: 302930 - DNA, 25 bp, Probe Sequence
taccatacctttaggaaggcgtcca

SEQ ID NO: 302931 - DNA, 25 bp, Probe Sequence
tacgaatggtttagcgccaggttcc

SEQ ID NO: 302932 - DNA, 25 bp, Probe Sequence
tacgcagatggtttgggccacttcc

SEQ ID NO: 302933 - DNA, 25 bp, Probe Sequence
taggcagggctaggggagcccaccg

SEQ ID NO: 302934 - DNA, 25 bp, Probe Sequence
tactggggtgaccgagtggacagcc

SEQ ID NO: 302935 - DNA, 25 bp, Probe Sequence
tactggaagggaccctggagccctg

SEQ ID NO: 302936 - DNA, 25 bp, Probe Sequence
tactcgtaaggaacactctgaccca

SEQ ID NO: 302937 - DNA, 25 bp, Probe Sequence
taccagaacggttctttgaccagca

SEQ ID NO: 302938 - DNA, 25 bp, Probe Sequence
taccaacacgtcactgggaccaggt

SEQ ID NO: 302939 - DNA, 25 bp, Probe Sequence
taccaccctggctgtgggaagcagg

SEQ ID NO: 302940 - DNA, 25 bp, Probe Sequence
taccctcaccggcatgggacatgag

SEQ ID NO: 302941 - DNA, 25 bp, Probe Sequence
taccctcaccggcatgggacatgag

SEQ ID NO: 302942 - DNA, 25 bp, Probe Sequence
tactcccagctcccaaggagactga

SEQ ID NO: 302943 - DNA, 25 bp, Probe Sequence
tagatccacgaggcaccaaggcctg

SEQ ID NO: 302944 - DNA, 25 bp, Probe Sequence
tagataccatgggtcaggaggcctg

SEQ ID NO: 302945 - DNA, 25 bp, Probe Sequence
tactgccctgaggctaggggcggct

SEQ ID NO: 302946 - DNA, 25 bp, Probe Sequence
tacggacagagactgaccaccgcct

SEQ ID NO: 302947 - DNA, 25 bp, Probe Sequence
tacggacagagactgaccaccgcct

SEQ ID NO: 302948 - DNA, 25 bp, Probe Sequence
tactgggcaggattggcaacacccc

SEQ ID NO: 302949 - DNA, 25 bp, Probe Sequence
tactgggcaggctggtatgggcccc

SEQ ID NO: 302950 - DNA, 25 bp, Probe Sequence
tactgtctgggctgggggggacact

SEQ ID NO: 302951 - DNA, 25 bp, Probe Sequence
tacgcttaggctctctggggaagaa

SEQ ID NO: 302952 - DNA, 25 bp, Probe Sequence
tactgttacctgtttaggcctagaa

SEQ ID NO: 302953 - DNA, 25 bp, Probe Sequence
tacgtggaccgtacggagtcgagaa

SEQ ID NO: 302954 - DNA, 25 bp, Probe Sequence
tacggccaccttacagaggttctgc

SEQ ID NO: 302955 - DNA, 25 bp, Probe Sequence
tactgatgccatgtaaaggccttta

SEQ ID NO: 302956 - DNA, 25 bp, Probe Sequence
tagcccattgccaaaaggttttact

SEQ ID NO: 302957 - DNA, 25 bp, Probe Sequence
tatgaaaacctttgaggcttttact

SEQ ID NO: 302958 - DNA, 25 bp, Probe Sequence
tactattacctttgaatgtgtttgc

SEQ ID NO: 302959 - DNA, 25 bp, Probe Sequence
tactatccatccctaaagttctctt

SEQ ID NO: 302960 - DNA, 25 bp, Probe Sequence
tactcatcaattgaaaagtcctcca

SEQ ID NO: 302961 - DNA, 25 bp, Probe Sequence
tactccaattcataaatctattcat

SEQ ID NO: 302962 - DNA, 25 bp, Probe Sequence
tactccatttcataaaccatgttac

SEQ ID NO: 302963 - DNA, 25 bp, Probe Sequence
tactcatcttcctaattaccatact

SEQ ID NO: 302964 - DNA, 25 bp, Probe Sequence
tagcactgaatgcctacaggacaaa

SEQ ID NO: 302965 - DNA, 25 bp, Probe Sequence
tagcagagcaggcaccaggacggat

SEQ ID NO: 302966 - DNA, 25 bp, Probe Sequence
tagccagcatgtcctcaatgaacgg

SEQ ID NO: 302967 - DNA, 25 bp, Probe Sequence
tagcgatcgctgccaggatatacgt

SEQ ID NO: 302968 - DNA, 25 bp, Probe Sequence
tactcttcaccacgatatcatgtta

SEQ ID NO: 302969 - DNA, 25 bp, Probe Sequence
taccggcaccggaacagcatgaaag

SEQ ID NO: 302970 - DNA, 25 bp, Probe Sequence
tacctaggcgcgggacgaaacattt

SEQ ID NO: 302971 - DNA, 25 bp, Probe Sequence
tacctgggtgcctatatcgacaaag

SEQ ID NO: 302972 - DNA, 25 bp, Probe Sequence
tactgcatgggtcatttcccagcat

SEQ ID NO: 302973 - DNA, 25 bp, Probe Sequence
tactggatggtgaagaattcccatg

SEQ ID NO: 302974 - DNA, 25 bp, Probe Sequence
tactggtggaataatatccgccccc

SEQ ID NO: 302975 - DNA, 25 bp, Probe Sequence
tactaaccaacaattctcagacccc

SEQ ID NO: 302976 - DNA, 25 bp, Probe Sequence
tactcatatgcttacaaactcggtg

SEQ ID NO: 302977 - DNA, 25 bp, Probe Sequence
tactgagctggctcaaatcccgatg

SEQ ID NO: 302978 - DNA, 25 bp, Probe Sequence
tactgcgagggtgagtgcccgagcc

SEQ ID NO: 302979 - DNA, 25 bp, Probe Sequence
tactgcgagggtgagtgcccgagcc

SEQ ID NO: 302980 - DNA, 25 bp, Probe Sequence
tactgcgagggtgagtgcccgagcc

SEQ ID NO: 302981 - DNA, 25 bp, Probe Sequence
tagtgggggatgggtcctctagact

SEQ ID NO: 302982 - DNA, 25 bp, Probe Sequence
tactggggggttggacagccaaatt

SEQ ID NO: 302983 - DNA, 25 bp, Probe Sequence
tactggggaagtaagacatctcgaa

SEQ ID NO: 302984 - DNA, 25 bp, Probe Sequence
tactgtgggcatatctacacaccaa

SEQ ID NO: 302985 - DNA, 25 bp, Probe Sequence
tactctggtattagtagctcatcca

SEQ ID NO: 302986 - DNA, 25 bp, Probe Sequence
tactctcactttaaactcaccaaag

SEQ ID NO: 302987 - DNA, 25 bp, Probe Sequence
tactgtcctaaaaactcatccctac

SEQ ID NO: 302988 - DNA, 25 bp, Probe Sequence
tactgtcagttgtacttctgctcca

SEQ ID NO: 302989 - DNA, 25 bp, Probe Sequence
tactgtcagttaccttagttaacaa

SEQ ID NO: 302990 - DNA, 25 bp, Probe Sequence
tactcactcttgctcttacattaaa

SEQ ID NO: 302991 - DNA, 25 bp, Probe Sequence
tactcactctctgttattctgttac

SEQ ID NO: 302992 - DNA, 25 bp, Probe Sequence
tactctccattgcacgattatttca

SEQ ID NO: 302993 - DNA, 25 bp, Probe Sequence
tacctccatgtgccctttttaggga

SEQ ID NO: 302994 - DNA, 25 bp, Probe Sequence
taccccagtactattctccagaggt

SEQ ID NO: 302995 - DNA, 25 bp, Probe Sequence
tacccacaggaagttattccaactt

SEQ ID NO: 302996 - DNA, 25 bp, Probe Sequence
tacccagggacagcaattcacagcc

SEQ ID NO: 302997 - DNA, 25 bp, Probe Sequence
tacgccaagcacaccaaacagagcc

SEQ ID NO: 302998 - DNA, 25 bp, Probe Sequence
tactgcgaaacccacgcaagagccc

SEQ ID NO: 302999 - DNA, 25 bp, Probe Sequence
tacggacaatccaagccatagccca

SEQ ID NO: 303000 - DNA, 25 bp, Probe Sequence
tactggagcaatcagatcacacggc

SEQ ID NO: 303001 - DNA, 25 bp, Probe Sequence
tacggcgctaaggatgactctggtc

SEQ ID NO: 303002 - DNA, 25 bp, Probe Sequence
tactgtgcgtgtatatacgcgtgtg

SEQ ID NO: 303003 - DNA, 25 bp, Probe Sequence
tactgcttgtcacttgaatcccgtg

SEQ ID NO: 303004 - DNA, 25 bp, Probe Sequence
tactcattgtctatgcacaccagga

SEQ ID NO: 303005 - DNA, 25 bp, Probe Sequence
taccagtttttgtctccagagaccc

SEQ ID NO: 303006 - DNA, 25 bp, Probe Sequence
taccattttggtttgaagggcagtc

SEQ ID NO: 303007 - DNA, 25 bp, Probe Sequence
tacccttctggccctgattgggcac

SEQ ID NO: 303008 - DNA, 25 bp, Probe Sequence
taccgtatgtgcaccatattggagt

SEQ ID NO: 303009 - DNA, 25 bp, Probe Sequence
taccgagctgtcagcaagacggtgt

SEQ ID NO: 303010 - DNA, 25 bp, Probe Sequence
tacgagccttcacgcataagaggca

SEQ ID NO: 303011 - DNA, 25 bp, Probe Sequence
tacgagcagctgtgagtgaggggac

SEQ ID NO: 303012 - DNA, 25 bp, Probe Sequence
tacccagtgggacagaggagcaagg

SEQ ID NO: 303013 - DNA, 25 bp, Probe Sequence
tactccgtgaagtctagggacagga

SEQ ID NO: 303014 - DNA, 25 bp, Probe Sequence
tacccggcaaattatgtggaggcga

SEQ ID NO: 303015 - DNA, 25 bp, Probe Sequence
tacctgcggatcatactgggggcca

SEQ ID NO: 303016 - DNA, 25 bp, Probe Sequence
tacccggttcagcctggctcggcaa

SEQ ID NO: 303017 - DNA, 25 bp, Probe Sequence
tacccaggttgaacaggtcgtgccc

SEQ ID NO: 303018 - DNA, 25 bp, Probe Sequence
tactaactgttgagacgtgcttccc

SEQ ID NO: 303019 - DNA, 25 bp, Probe Sequence
tactaagtttgggaggtataccata

SEQ ID NO: 303020 - DNA, 25 bp, Probe Sequence
tagtcttgttttgaggtagaaatgc

SEQ ID NO: 303021 - DNA, 25 bp, Probe Sequence
tagctctttcttgagaggagagacc

SEQ ID NO: 303022 - DNA, 25 bp, Probe Sequence
tagcagtaaactgagagtagagtgc

SEQ ID NO: 303023 - DNA, 25 bp, Probe Sequence
tagcttgaacctgggaagcagaggt

SEQ ID NO: 303024 - DNA, 25 bp, Probe Sequence
tactcaagaccggaggcacagaggg

SEQ ID NO: 303025 - DNA, 25 bp, Probe Sequence
tacgacatgaacgcggccaatgtgg

SEQ ID NO: 303026 - DNA, 25 bp, Probe Sequence
tacgtggaacaccaggccaaagctg

SEQ ID NO: 303027 - DNA, 25 bp, Probe Sequence
tacgggaagagaccccaatcagatt

SEQ ID NO: 303028 - DNA, 25 bp, Probe Sequence
tactggtgaacaacccgtaatgaat

SEQ ID NO: 303029 - DNA, 25 bp, Probe Sequence
tactactaatcaacgcccataatca

SEQ ID NO: 303030 - DNA, 25 bp, Probe Sequence
tacgagctgcctgacggccaggtca

SEQ ID NO: 303031 - DNA, 25 bp, Probe Sequence
tacgagaccatcgagcgactgcgga

SEQ ID NO: 303032 - DNA, 25 bp, Probe Sequence
taggcaaggctgggcacatcatgcg

SEQ ID NO: 303033 - DNA, 25 bp, Probe Sequence
tactccagcctgggcaacagcgaga

SEQ ID NO: 303034 - DNA, 25 bp, Probe Sequence
tactccagcctgggcaacgagcaaa

SEQ ID NO: 303035 - DNA, 25 bp, Probe Sequence
tactccagcctgggcaacgagcaaa

SEQ ID NO: 303036 - DNA, 25 bp, Probe Sequence
tactcagccggcagcataatgaaaa

SEQ ID NO: 303037 - DNA, 25 bp, Probe Sequence
tactcaggaggctaaggcatgaaaa

SEQ ID NO: 303038 - DNA, 25 bp, Probe Sequence
tactcgcgaggttgaggcaggagaa

SEQ ID NO: 303039 - DNA, 25 bp, Probe Sequence
tactctcaggtttggactggagcca

SEQ ID NO: 303040 - DNA, 25 bp, Probe Sequence
tagcccggtaatgactgggtccaga

SEQ ID NO: 303041 - DNA, 25 bp, Probe Sequence
tactgttgttaagcactgtgttcca

SEQ ID NO: 303042 - DNA, 25 bp, Probe Sequence
tagcgttcgaacgcactgatttcga

SEQ ID NO: 303043 - DNA, 25 bp, Probe Sequence
taccattcggtggccactatttcta

SEQ ID NO: 303044 - DNA, 25 bp, Probe Sequence
taccgtctgggacagtatactatag

SEQ ID NO: 303045 - DNA, 25 bp, Probe Sequence
tacctgttgcagaagcggttatctt

SEQ ID NO: 303046 - DNA, 25 bp, Probe Sequence
tacctgtcagcgagagtttgctctg

SEQ ID NO: 303047 - DNA, 25 bp, Probe Sequence
tactctctatgcacggtttgtgatc

SEQ ID NO: 303048 - DNA, 25 bp, Probe Sequence
tactccttttgtgttttatcttttg

SEQ ID NO: 303049 - DNA, 25 bp, Probe Sequence
tacccttttgtgttattctactcta

SEQ ID NO: 303050 - DNA, 25 bp, Probe Sequence
tacgcctgtaaatgtattcattctt

SEQ ID NO: 303051 - DNA, 25 bp, Probe Sequence
tacgacttcacaaaacctatactta

SEQ ID NO: 303052 - DNA, 25 bp, Probe Sequence
tacgctctgctcaatgaaaccttcc

SEQ ID NO: 303053 - DNA, 25 bp, Probe Sequence
taccggtcacagaagacctcacgcc

SEQ ID NO: 303054 - DNA, 25 bp, Probe Sequence
taccagtgctactcatacccactgc

SEQ ID NO: 303055 - DNA, 25 bp, Probe Sequence
tacgccttacgactacagccagtca

SEQ ID NO: 303056 - DNA, 25 bp, Probe Sequence
tacgccttacgactacagccagtca

SEQ ID NO: 303057 - DNA, 25 bp, Probe Sequence
tacgccttacgactacagccagtca

SEQ ID NO: 303058 - DNA, 25 bp, Probe Sequence
tacgcctctactgatacatgtctgt

SEQ ID NO: 303059 - DNA, 25 bp, Probe Sequence
tactcacaccctgagaattctggga

SEQ ID NO: 303060 - DNA, 25 bp, Probe Sequence
tactgtgcccctgaaatctggatgg

SEQ ID NO: 303061 - DNA, 25 bp, Probe Sequence
tacgtgacctcggagactgtggtgc

SEQ ID NO: 303062 - DNA, 25 bp, Probe Sequence
tacggatgcctcgacaggctgttcg

SEQ ID NO: 303063 - DNA, 25 bp, Probe Sequence
taccttcctaaccagctgttcagaa

SEQ ID NO: 303064 - DNA, 25 bp, Probe Sequence
tacgctccagctgatccagatgtta

SEQ ID NO: 303065 - DNA, 25 bp, Probe Sequence
tactgtctcatgaatatataggaat

SEQ ID NO: 303066 - DNA, 25 bp, Probe Sequence
tactgtatcatggtcattggggtcc

SEQ ID NO: 303067 - DNA, 25 bp, Probe Sequence
tactgttttgtgcggtgtgtctcca

SEQ ID NO: 303068 - DNA, 25 bp, Probe Sequence
tagctttgtagtgggttttctgtgc

SEQ ID NO: 303069 - DNA, 25 bp, Probe Sequence
tactcctgtagaagtctttgctttg

SEQ ID NO: 303070 - DNA, 25 bp, Probe Sequence
tactccattacatgtcggttgtctg

SEQ ID NO: 303071 - DNA, 25 bp, Probe Sequence
tactcctctgacgaatgggtatatt

SEQ ID NO: 303072 - DNA, 25 bp, Probe Sequence
tactccttgatctttgtcttttgtc

SEQ ID NO: 303073 - DNA, 25 bp, Probe Sequence
tactcaattatgtctttgttgtatt

SEQ ID NO: 303074 - DNA, 25 bp, Probe Sequence
tactcaagttcctttcactgtgatt

SEQ ID NO: 303075 - DNA, 25 bp, Probe Sequence
tactctagggccaaatccattcttc

SEQ ID NO: 303076 - DNA, 25 bp, Probe Sequence
tactccgaagaaattcacatctgta

SEQ ID NO: 303077 - DNA, 25 bp, Probe Sequence
tactcaagaagtccagttccatgat

SEQ ID NO: 303078 - DNA, 25 bp, Probe Sequence
tactccaagagtaagttctgctacc

SEQ ID NO: 303079 - DNA, 25 bp, Probe Sequence
tatcccaggaggcgttggttcacca

SEQ ID NO: 303080 - DNA, 25 bp, Probe Sequence
tacctacggagggttgggtagacat

SEQ ID NO: 303081 - DNA, 25 bp, Probe Sequence
tacctaccggctcattagtgttgtc

SEQ ID NO: 303082 - DNA, 25 bp, Probe Sequence
tacccctgttgcctatgtaggttct

SEQ ID NO: 303083 - DNA, 25 bp, Probe Sequence
taccccctgctgcttttgagaaatt

SEQ ID NO: 303084 - DNA, 25 bp, Probe Sequence
taccctttagtttttgataaatgat

SEQ ID NO: 303085 - DNA, 25 bp, Probe Sequence
tacccagtttccttatctataaaat

SEQ ID NO: 303086 - DNA, 25 bp, Probe Sequence
tactctcatatagtcacactttaaa

SEQ ID NO: 303087 - DNA, 25 bp, Probe Sequence
tactctcatattcaacttgtacaag

SEQ ID NO: 303088 - DNA, 25 bp, Probe Sequence
tactccttggaagtttgtatatagc

SEQ ID NO: 303089 - DNA, 25 bp, Probe Sequence
tacgtcctggtcgttttgacatgca

SEQ ID NO: 303090 - DNA, 25 bp, Probe Sequence
tacctactttccttcatgaacatcc

SEQ ID NO: 303091 - DNA, 25 bp, Probe Sequence
tacccagttaccaaagatcatcttc

SEQ ID NO: 303092 - DNA, 25 bp, Probe Sequence
taccacgttactgcatactgatccc

SEQ ID NO: 303093 - DNA, 25 bp, Probe Sequence
tacccaactgttgcatcagtacccc

SEQ ID NO: 303094 - DNA, 25 bp, Probe Sequence
tacgccaagttcgaccagtacaggt

SEQ ID NO: 303095 - DNA, 25 bp, Probe Sequence
tactggcaatgcttccacagcgtaa

SEQ ID NO: 303096 - DNA, 25 bp, Probe Sequence
tacgaaatgcttgctcaggctcaga

SEQ ID NO: 303097 - DNA, 25 bp, Probe Sequence
tactgacatgtggggccaggtcacc

SEQ ID NO: 303098 - DNA, 25 bp, Probe Sequence
taccaatgccaaagccaggtgccgc

SEQ ID NO: 303099 - DNA, 25 bp, Probe Sequence
tactcacattcacacgcgattgcgc

SEQ ID NO: 303100 - DNA, 25 bp, Probe Sequence
tactgcatcttatttctggaaacct

SEQ ID NO: 303101 - DNA, 25 bp, Probe Sequence
tactccttgatctttatgaatgacc

SEQ ID NO: 303102 - DNA, 25 bp, Probe Sequence
tactgcctgaactgagagaatgacg

SEQ ID NO: 303103 - DNA, 25 bp, Probe Sequence
tactgcctgtagcaatggccagagc

SEQ ID NO: 303104 - DNA, 25 bp, Probe Sequence
tactccgcccaaaggctgcagatca

SEQ ID NO: 303105 - DNA, 25 bp, Probe Sequence
tactcctcctataagagcagctata

SEQ ID NO: 303106 - DNA, 25 bp, Probe Sequence
tagctcccctgtgagggcaatgagg

SEQ ID NO: 303107 - DNA, 25 bp, Probe Sequence
tactctccattgacctggacaaggt

SEQ ID NO: 303108 - DNA, 25 bp, Probe Sequence
tactgtctgttgacctggtgcaaga

SEQ ID NO: 303109 - DNA, 25 bp, Probe Sequence
tactgctctgaatcctgttctatag

SEQ ID NO: 303110 - DNA, 25 bp, Probe Sequence
tactgctctaatgctgctagtcgta

SEQ ID NO: 303111 - DNA, 25 bp, Probe Sequence
tactgcactgagaacttgcgtggct

SEQ ID NO: 303112 - DNA, 25 bp, Probe Sequence
tactgtctggaaaggtgtcagctga

SEQ ID NO: 303113 - DNA, 25 bp, Probe Sequence
tacctgctggactcgaatagctgga

SEQ ID NO: 303114 - DNA, 25 bp, Probe Sequence
tacctgctggactcgaatagctgga

SEQ ID NO: 303115 - DNA, 25 bp, Probe Sequence
tacgctttggactgagaagcatcga

SEQ ID NO: 303116 - DNA, 25 bp, Probe Sequence
tacgctgggcgacaggagagctcag

SEQ ID NO: 303117 - DNA, 25 bp, Probe Sequence
tacgtgtgcagccctcagaggaaag

SEQ ID NO: 303118 - DNA, 25 bp, Probe Sequence
tactgcttgtgccctggacattaaa

SEQ ID NO: 303119 - DNA, 25 bp, Probe Sequence
tactgatttagctggatcttactca

SEQ ID NO: 303120 - DNA, 25 bp, Probe Sequence
tactctttcatccgatgtttactga

SEQ ID NO: 303121 - DNA, 25 bp, Probe Sequence
tactctgtctgctgtgattaaacaa

SEQ ID NO: 303122 - DNA, 25 bp, Probe Sequence
tagtccacctcggcttatgaaaacg

SEQ ID NO: 303123 - DNA, 25 bp, Probe Sequence
tagggccctggcgtgaaacaatgca

SEQ ID NO: 303124 - DNA, 25 bp, Probe Sequence
tactgacctatgctctaaaacatga

SEQ ID NO: 303125 - DNA, 25 bp, Probe Sequence
tactgcatgcacctcctgtaaaagg

SEQ ID NO: 303126 - DNA, 25 bp, Probe Sequence
tacgcatgactacattacaacgggc

SEQ ID NO: 303127 - DNA, 25 bp, Probe Sequence
tacctgactaggtctatccacgcac

SEQ ID NO: 303128 - DNA, 25 bp, Probe Sequence
tacccagaaagaaatccgccactca

SEQ ID NO: 303129 - DNA, 25 bp, Probe Sequence
taccacatggggagaaccccaacca

SEQ ID NO: 303130 - DNA, 25 bp, Probe Sequence
tacccaggggagattccagccagac

SEQ ID NO: 303131 - DNA, 25 bp, Probe Sequence
tacgtcgccctggacttcgagcaag

SEQ ID NO: 303132 - DNA, 25 bp, Probe Sequence
tagcagtctgccatggactctggcc

SEQ ID NO: 303133 - DNA, 25 bp, Probe Sequence
tacgtctgatcttgatgggggcact

SEQ ID NO: 303134 - DNA, 25 bp, Probe Sequence
tacgacctgctctaggtgggcattg

SEQ ID NO: 303135 - DNA, 25 bp, Probe Sequence
tacgacactgtccaggttggaggca

SEQ ID NO: 303136 - DNA, 25 bp, Probe Sequence
tacgacagtgtcaggatcgcgggct

SEQ ID NO: 303137 - DNA, 25 bp, Probe Sequence
tacgggatcatcacttctcggatgc

SEQ ID NO: 303138 - DNA, 25 bp, Probe Sequence
tactggaatcaagccctgcaggagc

SEQ ID NO: 303139 - DNA, 25 bp, Probe Sequence
tactccaaccaggacccggagaaca

SEQ ID NO: 303140 - DNA, 25 bp, Probe Sequence
tacctacctacaacgagcgcgagaa

SEQ ID NO: 303141 - DNA, 25 bp, Probe Sequence
tacctacagaaaagtgcccagagca

SEQ ID NO: 303142 - DNA, 25 bp, Probe Sequence
tacggttgcaaactgctgaccacgc

SEQ ID NO: 303143 - DNA, 25 bp, Probe Sequence
tacgggtcttacggactcacacccg

SEQ ID NO: 303144 - DNA, 25 bp, Probe Sequence
tacccgtcttaggcagcaacagcag

SEQ ID NO: 303145 - DNA, 25 bp, Probe Sequence
tacctgcagattgcatgggcataaa

SEQ ID NO: 303146 - DNA, 25 bp, Probe Sequence
tacctgcggctggatggaaactact

SEQ ID NO: 303147 - DNA, 25 bp, Probe Sequence
tacctgcgacaggctgcatgcaaac

SEQ ID NO: 303148 - DNA, 25 bp, Probe Sequence
tacctgggcagtgcgtatcacgctt

SEQ ID NO: 303149 - DNA, 25 bp, Probe Sequence
tacctggtgctcactgtgcacctgt

SEQ ID NO: 303150 - DNA, 25 bp, Probe Sequence
tagccatggtcctttaggcactgga

SEQ ID NO: 303151 - DNA, 25 bp, Probe Sequence
tacctgtgatcggtttgtcagtaca

SEQ ID NO: 303152 - DNA, 25 bp, Probe Sequence
tacctggcatgtgcttgtcaagttc

SEQ ID NO: 303153 - DNA, 25 bp, Probe Sequence
taccagggtacttctccgttgatgt

SEQ ID NO: 303154 - DNA, 25 bp, Probe Sequence
taccggatacacactacgagagatg

SEQ ID NO: 303155 - DNA, 25 bp, Probe Sequence
tagatctggaacccccaagtgaggc

SEQ ID NO: 303156 - DNA, 25 bp, Probe Sequence
tagttggggcccagagagatgcatg

SEQ ID NO: 303157 - DNA, 25 bp, Probe Sequence
tagtaggacgtccctgagaggagaa

SEQ ID NO: 303158 - DNA, 25 bp, Probe Sequence
tagctgaaaattacttaaggaagag

SEQ ID NO: 303159 - DNA, 25 bp, Probe Sequence
tagttaaaaccttgctagccaaagc

SEQ ID NO: 303160 - DNA, 25 bp, Probe Sequence
tactggaaacctgttatgccaaaca

SEQ ID NO: 303161 - DNA, 25 bp, Probe Sequence
tactggagagacctttgtttttaca

SEQ ID NO: 303162 - DNA, 25 bp, Probe Sequence
tacgacaaacacattacattattaa

SEQ ID NO: 303163 - DNA, 25 bp, Probe Sequence
taccacaaacacattacattattaa

SEQ ID NO: 303164 - DNA, 25 bp, Probe Sequence
taccacaaaccggtaactgtacctg

SEQ ID NO: 303165 - DNA, 25 bp, Probe Sequence
ttccttagtccgggcaactgtccgg

SEQ ID NO: 303166 - DNA, 25 bp, Probe Sequence
ttccgtcagtacgcgaaggatatcg

SEQ ID NO: 303167 - DNA, 25 bp, Probe Sequence
ttgccagtcaggtaccagaggatta

SEQ ID NO: 303168 - DNA, 25 bp, Probe Sequence
taccagtcaggtaccaggagtctaa

SEQ ID NO: 303169 - DNA, 25 bp, Probe Sequence
taccattggtaacccagagtgctga

SEQ ID NO: 303170 - DNA, 25 bp, Probe Sequence
tacgattcctcatatccaaggctac

SEQ ID NO: 303171 - DNA, 25 bp, Probe Sequence
tacgatggccttaagcacaaggtca

SEQ ID NO: 303172 - DNA, 25 bp, Probe Sequence
tacgatggccttaagcacaaggtca

SEQ ID NO: 303173 - DNA, 25 bp, Probe Sequence
taccatggcaaaactggaagagtct

SEQ ID NO: 303174 - DNA, 25 bp, Probe Sequence
tactgggcaagtgcttgtcaagttc

SEQ ID NO: 303175 - DNA, 25 bp, Probe Sequence
tactgtggagaggacttccaaatgt

SEQ ID NO: 303176 - DNA, 25 bp, Probe Sequence
tactcctatgatgacattccagact

SEQ ID NO: 303177 - DNA, 25 bp, Probe Sequence
taccctatgcaatgattcccaaacc

SEQ ID NO: 303178 - DNA, 25 bp, Probe Sequence
tagcccaagtgataacttcgaagcc

SEQ ID NO: 303179 - DNA, 25 bp, Probe Sequence
tacccaagtgcatgtacttggcaat

SEQ ID NO: 303180 - DNA, 25 bp, Probe Sequence
tagccccagtgcggcaacaggagct

SEQ ID NO: 303181 - DNA, 25 bp, Probe Sequence
tagggccgtcaggacacgggagggt

SEQ ID NO: 303182 - DNA, 25 bp, Probe Sequence
tacgaccgcaaggacatcgaggagc

SEQ ID NO: 303183 - DNA, 25 bp, Probe Sequence
tacgaccgcctcatcaaggagagcc

SEQ ID NO: 303184 - DNA, 25 bp, Probe Sequence
tacgaccgcctcatcaaggagagcc

SEQ ID NO: 303185 - DNA, 25 bp, Probe Sequence
tacgacctcgccatcaaggctatca

SEQ ID NO: 303186 - DNA, 25 bp, Probe Sequence
tactgacttctcctataagcgcttc

SEQ ID NO: 303187 - DNA, 25 bp, Probe Sequence
tactgacttctcctataagcgcttc

SEQ ID NO: 303188 - DNA, 25 bp, Probe Sequence
tactcctctgatgcatttagccttc

SEQ ID NO: 303189 - DNA, 25 bp, Probe Sequence
taccctggtccacataccgatttaa

SEQ ID NO: 303190 - DNA, 25 bp, Probe Sequence
taccctgagtctcatttccttatct

SEQ ID NO: 303191 - DNA, 25 bp, Probe Sequence
taccatattactgttggctttctat

SEQ ID NO: 303192 - DNA, 25 bp, Probe Sequence
tacctttgagttttcagccttatgt

SEQ ID NO: 303193 - DNA, 25 bp, Probe Sequence
tacctttcagtgcagtttcttttca

SEQ ID NO: 303194 - DNA, 25 bp, Probe Sequence
taccgtgtttgataaatgttgtcca

SEQ ID NO: 303195 - DNA, 25 bp, Probe Sequence
tactgcctggtaaaagaattggttc

SEQ ID NO: 303196 - DNA, 25 bp, Probe Sequence
tagcgccatggcaaaagcaaattta

SEQ ID NO: 303197 - DNA, 25 bp, Probe Sequence
tactcgaggcataaatgtagttgtc

SEQ ID NO: 303198 - DNA, 25 bp, Probe Sequence
tactccagctgcttaacttcatttt

SEQ ID NO: 303199 - DNA, 25 bp, Probe Sequence
tactgctagagcttatcatcttcaa

SEQ ID NO: 303200 - DNA, 25 bp, Probe Sequence
tactgcacagacttatctgcaatca

SEQ ID NO: 303201 - DNA, 25 bp, Probe Sequence
tactgcacagtatttcttcatcatt

SEQ ID NO: 303202 - DNA, 25 bp, Probe Sequence
tacgctcgtagtacattatctttac

SEQ ID NO: 303203 - DNA, 25 bp, Probe Sequence
tacgtattagtcatctgctagttac

SEQ ID NO: 303204 - DNA, 25 bp, Probe Sequence
tactgttgtgtaatgtctctagaaa

SEQ ID NO: 303205 - DNA, 25 bp, Probe Sequence
tattttgggacacctttcgaactgt

SEQ ID NO: 303206 - DNA, 25 bp, Probe Sequence
taccatcggggaccttaagaagctg

SEQ ID NO: 303207 - DNA, 25 bp, Probe Sequence
tactgacggggcttttactaggctt

SEQ ID NO: 303208 - DNA, 25 bp, Probe Sequence
tacgacaggggcgtgaatacttttt

SEQ ID NO: 303209 - DNA, 25 bp, Probe Sequence
taccacggggcgaaatcctatttct

SEQ ID NO: 303210 - DNA, 25 bp, Probe Sequence
tactccctggggaagatgccatatg

SEQ ID NO: 303211 - DNA, 25 bp, Probe Sequence
tactccacggttctgtgcagctatt

SEQ ID NO: 303212 - DNA, 25 bp, Probe Sequence
tactccaaatgattgctttcttttc

SEQ ID NO: 303213 - DNA, 25 bp, Probe Sequence
tactccaagatcaagcatttgcgtt

SEQ ID NO: 303214 - DNA, 25 bp, Probe Sequence
tacctccagctgaactttggttttt

SEQ ID NO: 303215 - DNA, 25 bp, Probe Sequence
tagttgctcggcactgttggttttg

SEQ ID NO: 303216 - DNA, 25 bp, Probe Sequence
tagcaggcgggaatctgtttgcatt

SEQ ID NO: 303217 - DNA, 25 bp, Probe Sequence
tagcaaagggatttgtttatctaaa

SEQ ID NO: 303218 - DNA, 25 bp, Probe Sequence
tactgaggtggttctttctatccta

SEQ ID NO: 303219 - DNA, 25 bp, Probe Sequence
tactggtttgtgtctttgctatgct

SEQ ID NO: 303220 - DNA, 25 bp, Probe Sequence
tactgcagtagttgactttgctgta

SEQ ID NO: 303221 - DNA, 25 bp, Probe Sequence
tactggtcagcttagctctctcaga

SEQ ID NO: 303222 - DNA, 25 bp, Probe Sequence
tagctcaggccaaactgcctcagca

SEQ ID NO: 303223 - DNA, 25 bp, Probe Sequence
taccaggcgcagatcatggcaggca

SEQ ID NO: 303224 - DNA, 25 bp, Probe Sequence
taccccagcagtacagaactcagta

SEQ ID NO: 303225 - DNA, 25 bp, Probe Sequence
taccccacaggtaaatcctgtgtta

SEQ ID NO: 303226 - DNA, 25 bp, Probe Sequence
tacccaaaggttttaatgtgatctc

SEQ ID NO: 303227 - DNA, 25 bp, Probe Sequence
tacccaaagttatcgatattcttac

SEQ ID NO: 303228 - DNA, 25 bp, Probe Sequence
tacccgttttcattagtgcattctt

SEQ ID NO: 303229 - DNA, 25 bp, Probe Sequence
tactgctatgttttcttagagtttt

SEQ ID NO: 303230 - DNA, 25 bp, Probe Sequence
tactgcttacactttagaatgttta

SEQ ID NO: 303231 - DNA, 25 bp, Probe Sequence
tactgctttcaacttaaatcactga

SEQ ID NO: 303232 - DNA, 25 bp, Probe Sequence
tacctatccaatactaaatacccct

SEQ ID NO: 303233 - DNA, 25 bp, Probe Sequence
taccctgactcaatcttagaacatc

SEQ ID NO: 303234 - DNA, 25 bp, Probe Sequence
taccctgcagatattctaatatata

SEQ ID NO: 303235 - DNA, 25 bp, Probe Sequence
taccgtgcttactcctatgatgaca

SEQ ID NO: 303236 - DNA, 25 bp, Probe Sequence
taccaggatggttaccaggatgact

SEQ ID NO: 303237 - DNA, 25 bp, Probe Sequence
taccagaagaattccctggtcaccc

SEQ ID NO: 303238 - DNA, 25 bp, Probe Sequence
taccaaagacttacgggatgcagca

SEQ ID NO: 303239 - DNA, 25 bp, Probe Sequence
taccagagagactccttcaaggctg

SEQ ID NO: 303240 - DNA, 25 bp, Probe Sequence
taccagacgtgctccaacaatgggc

SEQ ID NO: 303241 - DNA, 25 bp, Probe Sequence
taccgatatgttaccaaactgctgg

SEQ ID NO: 303242 - DNA, 25 bp, Probe Sequence
taccgacatgatcagaaaggctcat

SEQ ID NO: 303243 - DNA, 25 bp, Probe Sequence
tacccaatattacacagcccaattt

SEQ ID NO: 303244 - DNA, 25 bp, Probe Sequence
tacctcaacatcaaaacctcataat

SEQ ID NO: 303245 - DNA, 25 bp, Probe Sequence
taccacaactcaacggctacataga

SEQ ID NO: 303246 - DNA, 25 bp, Probe Sequence
tacgacaagcgctgcgacctgtgga

SEQ ID NO: 303247 - DNA, 25 bp, Probe Sequence
taccgaagcgaacgcagcctttgag

SEQ ID NO: 303248 - DNA, 25 bp, Probe Sequence
tacccacacgagaacatgcctcttg

SEQ ID NO: 303249 - DNA, 25 bp, Probe Sequence
tactgctccactgacaagcccagtg

SEQ ID NO: 303250 - DNA, 25 bp, Probe Sequence
tacgtgccgcggaaatgctccgcta

SEQ ID NO: 303251 - DNA, 25 bp, Probe Sequence
tactgtgacagcctgtatgtgccct

SEQ ID NO: 303252 - DNA, 25 bp, Probe Sequence
tactgtacacccatgctcaatatat

SEQ ID NO: 303253 - DNA, 25 bp, Probe Sequence
tactgtaatatggatttcacttctg

SEQ ID NO: 303254 - DNA, 25 bp, Probe Sequence
tactgtctacatgctttctcattca

SEQ ID NO: 303255 - DNA, 25 bp, Probe Sequence
tactgttttgccttattgcttaact

SEQ ID NO: 303256 - DNA, 25 bp, Probe Sequence
tactgtttctccattttctagaagc

SEQ ID NO: 303257 - DNA, 25 bp, Probe Sequence
tactgacccaccttttgattttagc

SEQ ID NO: 303258 - DNA, 25 bp, Probe Sequence
tactgccccaagtgcatggatgtgt

SEQ ID NO: 303259 - DNA, 25 bp, Probe Sequence
taccctccaaattatgcgtctggtg

SEQ ID NO: 303260 - DNA, 25 bp, Probe Sequence
tatctttcgacagtggtggcctggg

SEQ ID NO: 303261 - DNA, 25 bp, Probe Sequence
tatcctttcacagtgttcccaaggg

SEQ ID NO: 303262 - DNA, 25 bp, Probe Sequence
tacctgtgttcagtggttcctgagc

SEQ ID NO: 303263 - DNA, 25 bp, Probe Sequence
tacgctgtgccttggcagggcacaa

SEQ ID NO: 303264 - DNA, 25 bp, Probe Sequence
tacgctgagcagggcgacgtgcaga

SEQ ID NO: 303265 - DNA, 25 bp, Probe Sequence
tacgtgaagacgcagctgcagctgg

SEQ ID NO: 303266 - DNA, 25 bp, Probe Sequence
tactgcatcgagtgggctgcacgca

SEQ ID NO: 303267 - DNA, 25 bp, Probe Sequence
tactgggagatacagccatccacct

SEQ ID NO: 303268 - DNA, 25 bp, Probe Sequence
tactgggagatacagccatccacct

SEQ ID NO: 303269 - DNA, 25 bp, Probe Sequence
tactgggagatacagccatccacct

SEQ ID NO: 303270 - DNA, 25 bp, Probe Sequence
tactgggagatacagccatccacct

SEQ ID NO: 303271 - DNA, 25 bp, Probe Sequence
tactgggagatacagccatccacct

SEQ ID NO: 303272 - DNA, 25 bp, Probe Sequence
tactgtggataaaatgctatcacac

SEQ ID NO: 303273 - DNA, 25 bp, Probe Sequence
tactgtgtctccactgatatcagca

SEQ ID NO: 303274 - DNA, 25 bp, Probe Sequence
tacgtgtgtcctcgcgagacaagct

SEQ ID NO: 303275 - DNA, 25 bp, Probe Sequence
tactgtgatgtcccgtagacaagac

SEQ ID NO: 303276 - DNA, 25 bp, Probe Sequence
tacgtattccacattgaaagcatga

SEQ ID NO: 303277 - DNA, 25 bp, Probe Sequence
tactgagtttaagttgaacagcatt

SEQ ID NO: 303278 - DNA, 25 bp, Probe Sequence
tactggcagttcactgtggacagtt

SEQ ID NO: 303279 - DNA, 25 bp, Probe Sequence
tactgtttctgttgcctggacagtt

SEQ ID NO: 303280 - DNA, 25 bp, Probe Sequence
tactgtattcgtccagagacctatt

SEQ ID NO: 303281 - DNA, 25 bp, Probe Sequence
tactgcatttttccagaagcccact

SEQ ID NO: 303282 - DNA, 25 bp, Probe Sequence
tacgttgttatgatgaatcccacat

SEQ ID NO: 303283 - DNA, 25 bp, Probe Sequence
tacgcgggatggaagaacacctgca

SEQ ID NO: 303284 - DNA, 25 bp, Probe Sequence
tagcgggggaggaatacagggcttc

SEQ ID NO: 303285 - DNA, 25 bp, Probe Sequence
tagggtggggagagacgggccctgg

SEQ ID NO: 303286 - DNA, 25 bp, Probe Sequence
tacgagggggcgtgcgtgaggccct

SEQ ID NO: 303287 - DNA, 25 bp, Probe Sequence
tacgagtgggacgtggctgaggccc

SEQ ID NO: 303288 - DNA, 25 bp, Probe Sequence
tacgacaggtacacgcagagctgcc

SEQ ID NO: 303289 - DNA, 25 bp, Probe Sequence
tacgacgggacacacagactgcatt

SEQ ID NO: 303290 - DNA, 25 bp, Probe Sequence
taccatgtgtggtcactacgtctgc

SEQ ID NO: 303291 - DNA, 25 bp, Probe Sequence
taccatctggccagctacgatgctg

SEQ ID NO: 303292 - DNA, 25 bp, Probe Sequence
taccatgtggccacaactgctgtgg

SEQ ID NO: 303293 - DNA, 25 bp, Probe Sequence
tactgagtgtccaaacactgcagag

SEQ ID NO: 303294 - DNA, 25 bp, Probe Sequence
tactggggctccactgtgaagaaca

SEQ ID NO: 303295 - DNA, 25 bp, Probe Sequence
tactgtcggaccctttgtggtagca

SEQ ID NO: 303296 - DNA, 25 bp, Probe Sequence
tagcttcggacccatattttccata

SEQ ID NO: 303297 - DNA, 25 bp, Probe Sequence
tacccggacactgatgtcatcctca

SEQ ID NO: 303298 - DNA, 25 bp, Probe Sequence
taccatccaggcgtcaatggacctc

SEQ ID NO: 303299 - DNA, 25 bp, Probe Sequence
tagcctcctggactactagtcctca

SEQ ID NO: 303300 - DNA, 25 bp, Probe Sequence
tacctgccaggaatagctagtctct

SEQ ID NO: 303301 - DNA, 25 bp, Probe Sequence
taccccagagactgtcaatctcatt

SEQ ID NO: 303302 - DNA, 25 bp, Probe Sequence
tacccaccaaaagcactctatgtga

SEQ ID NO: 303303 - DNA, 25 bp, Probe Sequence
taccacatcgagaaaccacccttgg

SEQ ID NO: 303304 - DNA, 25 bp, Probe Sequence
tacccattgaaatttcacctcaggt

SEQ ID NO: 303305 - DNA, 25 bp, Probe Sequence
tacccattgaaatttcacctcaggt

SEQ ID NO: 303306 - DNA, 25 bp, Probe Sequence
tacccttgataaaccatctctagag

SEQ ID NO: 303307 - DNA, 25 bp, Probe Sequence
tacctttgacaaagctttcttcctc

SEQ ID NO: 303308 - DNA, 25 bp, Probe Sequence
tacctggtgcgcgagagcgtatccc

SEQ ID NO: 303309 - DNA, 25 bp, Probe Sequence
tagctggagtggcacaggtgaccca

SEQ ID NO: 303310 - DNA, 25 bp, Probe Sequence
tactgaaagcagccagtcggccaag

SEQ ID NO: 303311 - DNA, 25 bp, Probe Sequence
tacccagacgagctgcagtgcctgg

SEQ ID NO: 303312 - DNA, 25 bp, Probe Sequence
tacccagacgagctgcagtgcctgg

SEQ ID NO: 303313 - DNA, 25 bp, Probe Sequence
tacccagacgagctgcagtgcctgg

SEQ ID NO: 303314 - DNA, 25 bp, Probe Sequence
tagctccgactacagcatgtggagg

SEQ ID NO: 303315 - DNA, 25 bp, Probe Sequence
tagcttgagaagcaaattggcaggt

SEQ ID NO: 303316 - DNA, 25 bp, Probe Sequence
tactgtaatgcgcacctttgctaat

SEQ ID NO: 303317 - DNA, 25 bp, Probe Sequence
tactgtaaagtgtccgtctgtgtct

SEQ ID NO: 303318 - DNA, 25 bp, Probe Sequence
tactgataccatgaagttctttctt

SEQ ID NO: 303319 - DNA, 25 bp, Probe Sequence
tactgataccatgaagttctttctt

SEQ ID NO: 303320 - DNA, 25 bp, Probe Sequence
tactggactcaggaacttttgttag

SEQ ID NO: 303321 - DNA, 25 bp, Probe Sequence
tacgagtccacattcctgtttgtaa

SEQ ID NO: 303322 - DNA, 25 bp, Probe Sequence
tacgagtccacattcctgtttgtaa

SEQ ID NO: 303323 - DNA, 25 bp, Probe Sequence
tacgagtccacattcctgtttgtaa

SEQ ID NO: 303324 - DNA, 25 bp, Probe Sequence
tacgagatgcccttcctgaatatag

SEQ ID NO: 303325 - DNA, 25 bp, Probe Sequence
tacgagatactccagccaaaaatgc

SEQ ID NO: 303326 - DNA, 25 bp, Probe Sequence
tacggaagtaaccgcaaaactctag

SEQ ID NO: 303327 - DNA, 25 bp, Probe Sequence
taccgaagacaacagccaaaaccaa

SEQ ID NO: 303328 - DNA, 25 bp, Probe Sequence
taccccagataagagctaaaaccac

SEQ ID NO: 303329 - DNA, 25 bp, Probe Sequence
tatccccagcaaaaagctccgcaac

SEQ ID NO: 303330 - DNA, 25 bp, Probe Sequence
tacccccaaataaatcaggcatgca

SEQ ID NO: 303331 - DNA, 25 bp, Probe Sequence
taccccgataaactcacaggtgcta

SEQ ID NO: 303332 - DNA, 25 bp, Probe Sequence
taccactttaatttaagatgttaat

SEQ ID NO: 303333 - DNA, 25 bp, Probe Sequence
tacccttgactttgctgaaatttgc

SEQ ID NO: 303334 - DNA, 25 bp, Probe Sequence
tacccattagtctcagaaattgtct

SEQ ID NO: 303335 - DNA, 25 bp, Probe Sequence
tacccttggtcttcaaaggccattt

SEQ ID NO: 303336 - DNA, 25 bp, Probe Sequence
taccacgtggatgacaccaacctct

SEQ ID NO: 303337 - DNA, 25 bp, Probe Sequence
tacgccgtggagggacgagacctga

SEQ ID NO: 303338 - DNA, 25 bp, Probe Sequence
tagccacctaggggaggaggccgtg

SEQ ID NO: 303339 - DNA, 25 bp, Probe Sequence
taccacctatggagaaagctgttgt

SEQ ID NO: 303340 - DNA, 25 bp, Probe Sequence
taccaaagtcgcaagaatggctttg

SEQ ID NO: 303341 - DNA, 25 bp, Probe Sequence
taccgaaccgcttacagttgctatg

SEQ ID NO: 303342 - DNA, 25 bp, Probe Sequence
tacctgtcaacgtaacgatttcatg

SEQ ID NO: 303343 - DNA, 25 bp, Probe Sequence
tacgtgggcatgggacaggcttttg

SEQ ID NO: 303344 - DNA, 25 bp, Probe Sequence
tacgtgggcatgggacaggcttttg

SEQ ID NO: 303345 - DNA, 25 bp, Probe Sequence
tactgttggcagtgatcatgatctt

SEQ ID NO: 303346 - DNA, 25 bp, Probe Sequence
tacgtgggagctaatcattgcatgt

SEQ ID NO: 303347 - DNA, 25 bp, Probe Sequence
tacgtgggaatgatcctcagtgtgc

SEQ ID NO: 303348 - DNA, 25 bp, Probe Sequence
tacccaggaggattcctgcaggctt

SEQ ID NO: 303349 - DNA, 25 bp, Probe Sequence
tacccagtgaagaatctacagctgc

SEQ ID NO: 303350 - DNA, 25 bp, Probe Sequence
tacccacatgacttagttagtgcat

SEQ ID NO: 303351 - DNA, 25 bp, Probe Sequence
taccctgcagaattaggtaggaaga

SEQ ID NO: 303352 - DNA, 25 bp, Probe Sequence
tatgaaccgcaatatgggaggaaca

SEQ ID NO: 303353 - DNA, 25 bp, Probe Sequence
tagctttcgcaatatttgttgaaca

SEQ ID NO: 303354 - DNA, 25 bp, Probe Sequence
tagacttcgactttttaaattgact

SEQ ID NO: 303355 - DNA, 25 bp, Probe Sequence
tacctgttaccactttcaaaaatct

SEQ ID NO: 303356 - DNA, 25 bp, Probe Sequence
tacctagtgaaacttttctagaatt

SEQ ID NO: 303357 - DNA, 25 bp, Probe Sequence
taccgagtaaacatatgacattgaa

SEQ ID NO: 303358 - DNA, 25 bp, Probe Sequence
tacgcacattcacaccttgtaagaa

SEQ ID NO: 303359 - DNA, 25 bp, Probe Sequence
tacgcaattctcgattctttgaaga

SEQ ID NO: 303360 - DNA, 25 bp, Probe Sequence
tacctgtgatccggttttgccagta

SEQ ID NO: 303361 - DNA, 25 bp, Probe Sequence
tagactgtgactaggttcacagcct

SEQ ID NO: 303362 - DNA, 25 bp, Probe Sequence
tagccatgtgcagaggattgaaact

SEQ ID NO: 303363 - DNA, 25 bp, Probe Sequence
tacctgatggtagtgacaaagaata

SEQ ID NO: 303364 - DNA, 25 bp, Probe Sequence
tacgtgcatggtaaaataatggcat

SEQ ID NO: 303365 - DNA, 25 bp, Probe Sequence
tacgtgctgaatactgaaaaggcga

SEQ ID NO: 303366 - DNA, 25 bp, Probe Sequence
tacggtaaactgcccacttggcagt

SEQ ID NO: 303367 - DNA, 25 bp, Probe Sequence
tacggtaacggccacttggccagta

SEQ ID NO: 303368 - DNA, 25 bp, Probe Sequence
taccccaaagtgcatttgcctagga

SEQ ID NO: 303369 - DNA, 25 bp, Probe Sequence
tacctaaatattgtattctctagta

SEQ ID NO: 303370 - DNA, 25 bp, Probe Sequence
tacctaccgtgtgtattctcttgac

SEQ ID NO: 303371 - DNA, 25 bp, Probe Sequence
tacctacatcggccttaatcctggt

SEQ ID NO: 303372 - DNA, 25 bp, Probe Sequence
tacctatctcggcataattctcata

SEQ ID NO: 303373 - DNA, 25 bp, Probe Sequence
tacccactctctgtgaatacctacc

SEQ ID NO: 303374 - DNA, 25 bp, Probe Sequence
tacctcaccgcagaggtacttgaac

SEQ ID NO: 303375 - DNA, 25 bp, Probe Sequence
tagctctaggccgtcgggacggata

SEQ ID NO: 303376 - DNA, 25 bp, Probe Sequence
tagcctaggccgcgggacggataaa

SEQ ID NO: 303377 - DNA, 25 bp, Probe Sequence
tagcctagtccgcgggacggataac

SEQ ID NO: 303378 - DNA, 25 bp, Probe Sequence
tagcctaggccgcgggacggataac

SEQ ID NO: 303379 - DNA, 25 bp, Probe Sequence
tagcctaggccgcgggacggataac

SEQ ID NO: 303380 - DNA, 25 bp, Probe Sequence
tagcctaggccgcgggacggataac

SEQ ID NO: 303381 - DNA, 25 bp, Probe Sequence
tagcctaggccgcgggacggataac

SEQ ID NO: 303382 - DNA, 25 bp, Probe Sequence
tagcctaggccgcgggacggataac

SEQ ID NO: 303383 - DNA, 25 bp, Probe Sequence
tagcctaggccgcgggacggataac

SEQ ID NO: 303384 - DNA, 25 bp, Probe Sequence
tagcctaggccgcgggacggataac

SEQ ID NO: 303385 - DNA, 25 bp, Probe Sequence
tagcctaggccgcgggacggataac

SEQ ID NO: 303386 - DNA, 25 bp, Probe Sequence
tagcctaggccgcgggacggataac

SEQ ID NO: 303387 - DNA, 25 bp, Probe Sequence
tagcctaggccgcgggacggataac

SEQ ID NO: 303388 - DNA, 25 bp, Probe Sequence
tagcctaggccgcgggacggataac

SEQ ID NO: 303389 - DNA, 25 bp, Probe Sequence
tagcctaggccgcgggacggataac

SEQ ID NO: 303390 - DNA, 25 bp, Probe Sequence
tagcctaggccgcgggacggataac

SEQ ID NO: 303391 - DNA, 25 bp, Probe Sequence
tagcctaggccgcgggacggataac

SEQ ID NO: 303392 - DNA, 25 bp, Probe Sequence
tagcctaggccgcgggacggataac

SEQ ID NO: 303393 - DNA, 25 bp, Probe Sequence
tagcctaggccgcgggacggataac

SEQ ID NO: 303394 - DNA, 25 bp, Probe Sequence
tagcctaggccgcgggacggataac

SEQ ID NO: 303395 - DNA, 25 bp, Probe Sequence
tagcctaggccgcgggacggataac

SEQ ID NO: 303396 - DNA, 25 bp, Probe Sequence
tagcctaggccgcgggacggataac

SEQ ID NO: 303397 - DNA, 25 bp, Probe Sequence
tagcctaggccgcgggacggataac

SEQ ID NO: 303398 - DNA, 25 bp, Probe Sequence
tagcctaggccgcgggacggataac

SEQ ID NO: 303399 - DNA, 25 bp, Probe Sequence
tagcctaggccgcgggacggataac

SEQ ID NO: 303400 - DNA, 25 bp, Probe Sequence
tagcctaggccgcgggacggataac

SEQ ID NO: 303401 - DNA, 25 bp, Probe Sequence
tagcctaggccgcgggacggataac

SEQ ID NO: 303402 - DNA, 25 bp, Probe Sequence
tagcctaggccgcgggacggataac

SEQ ID NO: 303403 - DNA, 25 bp, Probe Sequence
tagcctaggccgcgggacggataac

SEQ ID NO: 303404 - DNA, 25 bp, Probe Sequence
tagcctaggccgcgggacggataac

SEQ ID NO: 303405 - DNA, 25 bp, Probe Sequence
tagcctaggccgcgggacggataac

SEQ ID NO: 303406 - DNA, 25 bp, Probe Sequence
tagcctaggccgcgggacggataac

SEQ ID NO: 303407 - DNA, 25 bp, Probe Sequence
tagcctaggccgcgggacggataac

SEQ ID NO: 303408 - DNA, 25 bp, Probe Sequence
tagcctaggccgcgggacggataac

SEQ ID NO: 303409 - DNA, 25 bp, Probe Sequence
tagcctaggccgcgggacggataac

SEQ ID NO: 303410 - DNA, 25 bp, Probe Sequence
tagcctaggccgcgggacggataac

SEQ ID NO: 303411 - DNA, 25 bp, Probe Sequence
tagcctaggccgcgggacggataac

SEQ ID NO: 303412 - DNA, 25 bp, Probe Sequence
tagcctaggccgcgggacggataac

SEQ ID NO: 303413 - DNA, 25 bp, Probe Sequence
tagcctaggccgcgggacggataac

SEQ ID NO: 303414 - DNA, 25 bp, Probe Sequence
tagcctaggccgcgggacggataac

SEQ ID NO: 303415 - DNA, 25 bp, Probe Sequence
tagcctaggccgcgggacggataac

SEQ ID NO: 303416 - DNA, 25 bp, Probe Sequence
tagcctaggccgcgggacggataac

SEQ ID NO: 303417 - DNA, 25 bp, Probe Sequence
tagcctaggccgcgggacggataac

SEQ ID NO: 303418 - DNA, 25 bp, Probe Sequence
tagcctaggccgcgggacggataac

SEQ ID NO: 303419 - DNA, 25 bp, Probe Sequence
tagcctaggccgcgggacggataac

SEQ ID NO: 303420 - DNA, 25 bp, Probe Sequence
tagcctaggccgcgggacggataac

SEQ ID NO: 303421 - DNA, 25 bp, Probe Sequence
tagcctaggccgcgggacggataac

SEQ ID NO: 303422 - DNA, 25 bp, Probe Sequence
tagcctaggccgcgggacggataac

SEQ ID NO: 303423 - DNA, 25 bp, Probe Sequence
tagcctaggccgcgggacggataac

SEQ ID NO: 303424 - DNA, 25 bp, Probe Sequence
tagcctaggccgcgggacggataac

SEQ ID NO: 303425 - DNA, 25 bp, Probe Sequence
tagcctaggccgcgggacggataac

SEQ ID NO: 303426 - DNA, 25 bp, Probe Sequence
tagcctaggccgcgggacggataac

SEQ ID NO: 303427 - DNA, 25 bp, Probe Sequence
tagcctaggccgcgggacggataac

SEQ ID NO: 303428 - DNA, 25 bp, Probe Sequence
tagcctaggccgcgggacggataac

SEQ ID NO: 303429 - DNA, 25 bp, Probe Sequence
tagcctaggccgcgggacggataac

SEQ ID NO: 303430 - DNA, 25 bp, Probe Sequence
tagcctaggccgcgggacggataac

SEQ ID NO: 303431 - DNA, 25 bp, Probe Sequence
tagcctaggccgcgggacggataac

SEQ ID NO: 303432 - DNA, 25 bp, Probe Sequence
tagcctaggccgcgggacggataac

SEQ ID NO: 303433 - DNA, 25 bp, Probe Sequence
tagcctaggccgcgggacggataac

SEQ ID NO: 303434 - DNA, 25 bp, Probe Sequence
tagcctaggccgcgggacggataac

SEQ ID NO: 303435 - DNA, 25 bp, Probe Sequence
tagcctaggccgcgggacggataac

SEQ ID NO: 303436 - DNA, 25 bp, Probe Sequence
tagcctaggccgcgggacggataac

SEQ ID NO: 303437 - DNA, 25 bp, Probe Sequence
tagcctaggccgcgggacggataac

SEQ ID NO: 303438 - DNA, 25 bp, Probe Sequence
tagcctaggccgcgggacggataac

SEQ ID NO: 303439 - DNA, 25 bp, Probe Sequence
tagcctaggccgcgggacggataac

SEQ ID NO: 303440 - DNA, 25 bp, Probe Sequence
tagcctaggccgcgggacggataac

SEQ ID NO: 303441 - DNA, 25 bp, Probe Sequence
tagcctaggccgcgggacggataac

SEQ ID NO: 303442 - DNA, 25 bp, Probe Sequence
tagcctaggccgcgggacggataac

SEQ ID NO: 303443 - DNA, 25 bp, Probe Sequence
tagcctaggccgcgggacggataac

SEQ ID NO: 303444 - DNA, 25 bp, Probe Sequence
tagcctaggccgcgggacggataac

SEQ ID NO: 303445 - DNA, 25 bp, Probe Sequence
tagcctaggccgcgggacggataac

SEQ ID NO: 303446 - DNA, 25 bp, Probe Sequence
tagcctaggccgcgggacggataac

SEQ ID NO: 303447 - DNA, 25 bp, Probe Sequence
tagcctaggccgcgggacggataac

SEQ ID NO: 303448 - DNA, 25 bp, Probe Sequence
tagcctaggccgcgggacggataac

SEQ ID NO: 303449 - DNA, 25 bp, Probe Sequence
tagcctaggccgcgggacggataac

SEQ ID NO: 303450 - DNA, 25 bp, Probe Sequence
tagcctaggccgcgggacggataac

SEQ ID NO: 303451 - DNA, 25 bp, Probe Sequence
tagcctaggccgcgggacggataac

SEQ ID NO: 303452 - DNA, 25 bp, Probe Sequence
tagcctaggccgcgggacggataac

SEQ ID NO: 303453 - DNA, 25 bp, Probe Sequence
tagcctaggccgcgggacggataac

SEQ ID NO: 303454 - DNA, 25 bp, Probe Sequence
tagcctaggccgcgggacggataac

SEQ ID NO: 303455 - DNA, 25 bp, Probe Sequence
tagcctaggccgcgggacggataac

SEQ ID NO: 303456 - DNA, 25 bp, Probe Sequence
tagcctaggccgcgggacggataac

SEQ ID NO: 303457 - DNA, 25 bp, Probe Sequence
tagcctaggccgcgggacggataac

SEQ ID NO: 303458 - DNA, 25 bp, Probe Sequence
tagcctaggccgcgggacggataac

SEQ ID NO: 303459 - DNA, 25 bp, Probe Sequence
tagcctaggccgcgggacggataac

SEQ ID NO: 303460 - DNA, 25 bp, Probe Sequence
tagcctaggccgcgggacggataac

SEQ ID NO: 303461 - DNA, 25 bp, Probe Sequence
tagcctaggccgcgggacggataac

SEQ ID NO: 303462 - DNA, 25 bp, Probe Sequence
tagcctaggccgcgggacggataac

SEQ ID NO: 303463 - DNA, 25 bp, Probe Sequence
tagcctaggccgcgggacggataac

SEQ ID NO: 303464 - DNA, 25 bp, Probe Sequence
tagcctaggccgcgggacggataac

SEQ ID NO: 303465 - DNA, 25 bp, Probe Sequence
tagcctaggccgcgggacggataac

SEQ ID NO: 303466 - DNA, 25 bp, Probe Sequence
tagcctaggccgcgggacggataac

SEQ ID NO: 303467 - DNA, 25 bp, Probe Sequence
tagcctaggccgcgggacggataac

SEQ ID NO: 303468 - DNA, 25 bp, Probe Sequence
tagcctaggccgcgggacggataac

SEQ ID NO: 303469 - DNA, 25 bp, Probe Sequence
tagcctaggccgcgggacggataac

SEQ ID NO: 303470 - DNA, 25 bp, Probe Sequence
tagcctaggccgcgggacggataac

SEQ ID NO: 303471 - DNA, 25 bp, Probe Sequence
tagcctaggccgcgggacggataac

SEQ ID NO: 303472 - DNA, 25 bp, Probe Sequence
tagcctaggccgcgggacggataac

SEQ ID NO: 303473 - DNA, 25 bp, Probe Sequence
tagcctaggccgcgggacggataac

SEQ ID NO: 303474 - DNA, 25 bp, Probe Sequence
tagcctaggccgcgggacggataac

SEQ ID NO: 303475 - DNA, 25 bp, Probe Sequence
tagcctaggccgcgggacggataac

SEQ ID NO: 303476 - DNA, 25 bp, Probe Sequence
tagcctaggccgcgggacggataac

SEQ ID NO: 303477 - DNA, 25 bp, Probe Sequence
tagcctaggccgcgggacggataac

SEQ ID NO: 303478 - DNA, 25 bp, Probe Sequence
tagcctaggccgcgggacggataac

SEQ ID NO: 303479 - DNA, 25 bp, Probe Sequence
tagcctaggccgcgggacggataac

SEQ ID NO: 303480 - DNA, 25 bp, Probe Sequence
tagcctaggccgcgggacggataac

SEQ ID NO: 303481 - DNA, 25 bp, Probe Sequence
tagcctaggccgcgggacggataac

SEQ ID NO: 303482 - DNA, 25 bp, Probe Sequence
tagcctaggccgcgggacggataac

SEQ ID NO: 303483 - DNA, 25 bp, Probe Sequence
tagcctaggccgcgggacggataac

SEQ ID NO: 303484 - DNA, 25 bp, Probe Sequence
tagcctaggccgcgggacggataac

SEQ ID NO: 303485 - DNA, 25 bp, Probe Sequence
tagcctaggccgcgggacggataac

SEQ ID NO: 303486 - DNA, 25 bp, Probe Sequence
tagcctaggccgcgggacggataac

SEQ ID NO: 303487 - DNA, 25 bp, Probe Sequence
tagcccagagggtgggagcctaagg

SEQ ID NO: 303488 - DNA, 25 bp, Probe Sequence
tacccctgagtgtggtcccacagga

SEQ ID NO: 303489 - DNA, 25 bp, Probe Sequence
tacccctgagtgtggtcccacagga

SEQ ID NO: 303490 - DNA, 25 bp, Probe Sequence
taccttgatttctggtgtcccggaa

SEQ ID NO: 303491 - DNA, 25 bp, Probe Sequence
tagctttattactctaatcccaggt

SEQ ID NO: 303492 - DNA, 25 bp, Probe Sequence
tagctaataaacctgtaagcccagc

SEQ ID NO: 303493 - DNA, 25 bp, Probe Sequence
tagcttcataatctgttaacattcc

SEQ ID NO: 303494 - DNA, 25 bp, Probe Sequence
tagccgctacatctgttacttttgt

SEQ ID NO: 303495 - DNA, 25 bp, Probe Sequence
tacctagcacatatattactttttg

SEQ ID NO: 303496 - DNA, 25 bp, Probe Sequence
taccttgcacattttttgttgttac

SEQ ID NO: 303497 - DNA, 25 bp, Probe Sequence
tacctgcacgagtgtattggtctgt

SEQ ID NO: 303498 - DNA, 25 bp, Probe Sequence
taccataccaattgctttctgactt

SEQ ID NO: 303499 - DNA, 25 bp, Probe Sequence
taccagcaccttagtcttgtacttc

SEQ ID NO: 303500 - DNA, 25 bp, Probe Sequence
taccagactatggcattgtattttt

SEQ ID NO: 303501 - DNA, 25 bp, Probe Sequence
taccagttggccatgatgtcttttc

SEQ ID NO: 303502 - DNA, 25 bp, Probe Sequence
taccacctggaggatttctctgtta

SEQ ID NO: 303503 - DNA, 25 bp, Probe Sequence
tagccccttagccagttgtatatta

SEQ ID NO: 303504 - DNA, 25 bp, Probe Sequence
taccttctgttccttatgatattct

SEQ ID NO: 303505 - DNA, 25 bp, Probe Sequence
tagccacctgatgactaatgacaac

SEQ ID NO: 303506 - DNA, 25 bp, Probe Sequence
taccaacatgtcccatggttccagc

SEQ ID NO: 303507 - DNA, 25 bp, Probe Sequence
taccgagatctgcacgatgttccaa

SEQ ID NO: 303508 - DNA, 25 bp, Probe Sequence
taccaggagctgcacgtggactccg

SEQ ID NO: 303509 - DNA, 25 bp, Probe Sequence
taccgggagcgcgggggtgagctcc

SEQ ID NO: 303510 - DNA, 25 bp, Probe Sequence
taccgtgtggccgtgggaaagaaca

SEQ ID NO: 303511 - DNA, 25 bp, Probe Sequence
tacggtgtcagtgttggacctgacc

SEQ ID NO: 303512 - DNA, 25 bp, Probe Sequence
tacgacctcgatgttggatcaggac

SEQ ID NO: 303513 - DNA, 25 bp, Probe Sequence
taccatcctaggctgggctcaagac

SEQ ID NO: 303514 - DNA, 25 bp, Probe Sequence
taccatcctaggctgacacctaact

SEQ ID NO: 303515 - DNA, 25 bp, Probe Sequence
tagcccactaatccaaactctaaca

SEQ ID NO: 303516 - DNA, 25 bp, Probe Sequence
tagccccaaatttatgacattacac

SEQ ID NO: 303517 - DNA, 25 bp, Probe Sequence
taccccaagcttacaactgcatcaa

SEQ ID NO: 303518 - DNA, 25 bp, Probe Sequence
taccgacaagctctagacatgatct

SEQ ID NO: 303519 - DNA, 25 bp, Probe Sequence
tacctgaaactatatcattgattta

SEQ ID NO: 303520 - DNA, 25 bp, Probe Sequence
tacctggctacttaacatcgacttc

SEQ ID NO: 303521 - DNA, 25 bp, Probe Sequence
tagcccagtttatcaatcagttatc

SEQ ID NO: 303522 - DNA, 25 bp, Probe Sequence
tacccttcttactgacatatgtact

SEQ ID NO: 303523 - DNA, 25 bp, Probe Sequence
tacccaacttcaaaactaggactct

SEQ ID NO: 303524 - DNA, 25 bp, Probe Sequence
tacccagactccacatgacgggcac

SEQ ID NO: 303525 - DNA, 25 bp, Probe Sequence
tacccgaactgcatcaggcgtggca

SEQ ID NO: 303526 - DNA, 25 bp, Probe Sequence
taccaaaaagccaggctggtacccg

SEQ ID NO: 303527 - DNA, 25 bp, Probe Sequence
taccaagaaaccagcccctgaaaag

SEQ ID NO: 303528 - DNA, 25 bp, Probe Sequence
tacccaggaacctcctttgagcata

SEQ ID NO: 303529 - DNA, 25 bp, Probe Sequence
tttccaaacccaggctattcggcaa

SEQ ID NO: 303530 - DNA, 25 bp, Probe Sequence
tttcttaacctgagcttgattaaaa

SEQ ID NO: 303531 - DNA, 25 bp, Probe Sequence
tattctgccaacctgggttaattaa

SEQ ID NO: 303532 - DNA, 25 bp, Probe Sequence
tagtcatcctgctgtgggtttgctt

SEQ ID NO: 303533 - DNA, 25 bp, Probe Sequence
tagcattccaccttgaactttttct

SEQ ID NO: 303534 - DNA, 25 bp, Probe Sequence
tagcattctaccaccatgtgtctca

SEQ ID NO: 303535 - DNA, 25 bp, Probe Sequence
tacctctacctgtgctatgtgtgaa

SEQ ID NO: 303536 - DNA, 25 bp, Probe Sequence
tacctcacagcctgggatggctcca

SEQ ID NO: 303537 - DNA, 25 bp, Probe Sequence
taccgcctgcatgtggatggtgtcc

SEQ ID NO: 303538 - DNA, 25 bp, Probe Sequence
taccctctgattattggaatccatt

SEQ ID NO: 303539 - DNA, 25 bp, Probe Sequence
tacgcacttgtattctggagttcac

SEQ ID NO: 303540 - DNA, 25 bp, Probe Sequence
ttaagcttgactttggcaattccca

SEQ ID NO: 303541 - DNA, 25 bp, Probe Sequence
ttaagcttgactttggcaattccca

SEQ ID NO: 303542 - DNA, 25 bp, Probe Sequence
tacgtttgactccgggatttccagt

SEQ ID NO: 303543 - DNA, 25 bp, Probe Sequence
tagcgtttgactcacggattgccaa

SEQ ID NO: 303544 - DNA, 25 bp, Probe Sequence
tagctgatttttctgcaagtgttaa

SEQ ID NO: 303545 - DNA, 25 bp, Probe Sequence
tagctttcttggcctacagagtaaa

SEQ ID NO: 303546 - DNA, 25 bp, Probe Sequence
tacgttcctcccaaaggtgataaga

SEQ ID NO: 303547 - DNA, 25 bp, Probe Sequence
tacgcttcacccgaacagttggaag

SEQ ID NO: 303548 - DNA, 25 bp, Probe Sequence
taccgtctgccccagacaagtggga

SEQ ID NO: 303549 - DNA, 25 bp, Probe Sequence
taccgtctgccccagacaagtggga

SEQ ID NO: 303550 - DNA, 25 bp, Probe Sequence
tacccagacccgaagcacgtgagga

SEQ ID NO: 303551 - DNA, 25 bp, Probe Sequence
tacccagaccacacacagtttgaga

SEQ ID NO: 303552 - DNA, 25 bp, Probe Sequence
tacccacacctatccttttgagggg

SEQ ID NO: 303553 - DNA, 25 bp, Probe Sequence
ttacccacacctatccttttgaggg

SEQ ID NO: 303554 - DNA, 25 bp, Probe Sequence
tagaccaacaccatttttttccttg

SEQ ID NO: 303555 - DNA, 25 bp, Probe Sequence
tagaggcaatacaggtttagattcc

SEQ ID NO: 303556 - DNA, 25 bp, Probe Sequence
tagaggatatccatgcgtttgcaat

SEQ ID NO: 303557 - DNA, 25 bp, Probe Sequence
tagcgtcttcacagcgaatacacag

SEQ ID NO: 303558 - DNA, 25 bp, Probe Sequence
tacctagctcaccctgagataacag

SEQ ID NO: 303559 - DNA, 25 bp, Probe Sequence
tacctgagtcctggggatgaacagg

SEQ ID NO: 303560 - DNA, 25 bp, Probe Sequence
tacctttcttcgagcatgaaccgtc

SEQ ID NO: 303561 - DNA, 25 bp, Probe Sequence
tacctgtctcttgactgcagtacct

SEQ ID NO: 303562 - DNA, 25 bp, Probe Sequence
tacctgactgcttaaccgatggctc

SEQ ID NO: 303563 - DNA, 25 bp, Probe Sequence
tagctatatgccttaaccctggcct

SEQ ID NO: 303564 - DNA, 25 bp, Probe Sequence
taccaatgccaaaaccctaagtact

SEQ ID NO: 303565 - DNA, 25 bp, Probe Sequence
taccactccaagaaacctactaatt

SEQ ID NO: 303566 - DNA, 25 bp, Probe Sequence
taccacccaatgaaaaaaggatctg

SEQ ID NO: 303567 - DNA, 25 bp, Probe Sequence
tatatcaccaaagtcctaaagggga

SEQ ID NO: 303568 - DNA, 25 bp, Probe Sequence
ttaagccccaatagctacaaggagg

SEQ ID NO: 303569 - DNA, 25 bp, Probe Sequence
ttgggtcacgccattactgggggct

SEQ ID NO: 303570 - DNA, 25 bp, Probe Sequence
ttgaagtaattctgtcctgcggggt

SEQ ID NO: 303571 - DNA, 25 bp, Probe Sequence
ttaattgcgaaggggactcagggtg

SEQ ID NO: 303572 - DNA, 25 bp, Probe Sequence
tttgaggcaaagggtggtacagagg

SEQ ID NO: 303573 - DNA, 25 bp, Probe Sequence
ttcgggccatggggtgtgtagtaat

SEQ ID NO: 303574 - DNA, 25 bp, Probe Sequence
ttcgggaatgcccggcgtagctcga

SEQ ID NO: 303575 - DNA, 25 bp, Probe Sequence
taccatggacggcggtgtggcctga

SEQ ID NO: 303576 - DNA, 25 bp, Probe Sequence
tagccaaatggctggggtggttcag

SEQ ID NO: 303577 - DNA, 25 bp, Probe Sequence
tacgcaatagcgacgcgctggcgtt

SEQ ID NO: 303578 - DNA, 25 bp, Probe Sequence
tacccaaagatcagcatcagcgtca

SEQ ID NO: 303579 - DNA, 25 bp, Probe Sequence
tacccaaactgtctggcagtcactg

SEQ ID NO: 303580 - DNA, 25 bp, Probe Sequence
taccccacacagggtggcagaactt

SEQ ID NO: 303581 - DNA, 25 bp, Probe Sequence
tagacccagcaggggtcggccaact

SEQ ID NO: 303582 - DNA, 25 bp, Probe Sequence
tagctccacaagtgtgtggccccgc

SEQ ID NO: 303583 - DNA, 25 bp, Probe Sequence
tagctgccgtggttggtgtggagcg

SEQ ID NO: 303584 - DNA, 25 bp, Probe Sequence
tattctcggggccctgtgtaggggg

SEQ ID NO: 303585 - DNA, 25 bp, Probe Sequence
taggtgggtagccctgatgggggtc

SEQ ID NO: 303586 - DNA, 25 bp, Probe Sequence
taggggagggggcagatggtggttg

SEQ ID NO: 303587 - DNA, 25 bp, Probe Sequence
taggaagctgaggtgggaaggtggc

SEQ ID NO: 303588 - DNA, 25 bp, Probe Sequence
tagagaagattgacgtgggggaagc

SEQ ID NO: 303589 - DNA, 25 bp, Probe Sequence
tagaaaattcactattggctgggag

SEQ ID NO: 303590 - DNA, 25 bp, Probe Sequence
tagaaaacctaaatgctggggcaca

SEQ ID NO: 303591 - DNA, 25 bp, Probe Sequence
tagcaaaacctatgtcagagttgaa

SEQ ID NO: 303592 - DNA, 25 bp, Probe Sequence
tacgaccaccgttcttgagtgtgga

SEQ ID NO: 303593 - DNA, 25 bp, Probe Sequence
tacgacccccgaaggcagatttgtg

SEQ ID NO: 303594 - DNA, 25 bp, Probe Sequence
tatccggctcaccaaagggtacgct

SEQ ID NO: 303595 - DNA, 25 bp, Probe Sequence
tatactgagtacgaaagggttttct

SEQ ID NO: 303596 - DNA, 25 bp, Probe Sequence
tagactagtgccgtagggagttacc

SEQ ID NO: 303597 - DNA, 25 bp, Probe Sequence
tagaatttccactttggagaatact

SEQ ID NO: 303598 - DNA, 25 bp, Probe Sequence
tagaattacctcttacaaacccaga

SEQ ID NO: 303599 - DNA, 25 bp, Probe Sequence
tagaattcaacataacaagctcatt

SEQ ID NO: 303600 - DNA, 25 bp, Probe Sequence
tagtacctaaaattgcaacttctaa

SEQ ID NO: 303601 - DNA, 25 bp, Probe Sequence
tagaactgtcaagatgtcactttct

SEQ ID NO: 303602 - DNA, 25 bp, Probe Sequence
tagaagcgcatacgcatgactacat

SEQ ID NO: 303603 - DNA, 25 bp, Probe Sequence
tagcaaggctgatctgtctggcatg

SEQ ID NO: 303604 - DNA, 25 bp, Probe Sequence
tagctaggagcaggcttgtggcagc

SEQ ID NO: 303605 - DNA, 25 bp, Probe Sequence
tagcgacgcgctggcgttacagcgc

SEQ ID NO: 303606 - DNA, 25 bp, Probe Sequence
tagctggaggctaggtatgcatcta

SEQ ID NO: 303607 - DNA, 25 bp, Probe Sequence
tagccgtggccaactacatcaataa

SEQ ID NO: 303608 - DNA, 25 bp, Probe Sequence
tagcttgggtccaccatgcagaaca

SEQ ID NO: 303609 - DNA, 25 bp, Probe Sequence
tagccagggtcctactaactactca

SEQ ID NO: 303610 - DNA, 25 bp, Probe Sequence
tagacgggttgtttcaacatttcct

SEQ ID NO: 303611 - DNA, 25 bp, Probe Sequence
tagaaacgtgggttaagctcttcct

SEQ ID NO: 303612 - DNA, 25 bp, Probe Sequence
tatgtggacggggatccccacttca

SEQ ID NO: 303613 - DNA, 25 bp, Probe Sequence
tttaagccggactccaagtccacct

SEQ ID NO: 303614 - DNA, 25 bp, Probe Sequence
ttgttaccaacctccaaagggctct

SEQ ID NO: 303615 - DNA, 25 bp, Probe Sequence
tttacaacaaaatcccagggaccag

SEQ ID NO: 303616 - DNA, 25 bp, Probe Sequence
ttgtacaaaaaagcaggctggtacc

SEQ ID NO: 303617 - DNA, 25 bp, Probe Sequence
tattaaattacatccggtgcaaaaa

SEQ ID NO: 303618 - DNA, 25 bp, Probe Sequence
tatggcaaatttcaggggcaaggaa

SEQ ID NO: 303619 - DNA, 25 bp, Probe Sequence
taggacgaagtctaggcccaagtca

SEQ ID NO: 303620 - DNA, 25 bp, Probe Sequence
taggacaaagccaaaggccccttgt

SEQ ID NO: 303621 - DNA, 25 bp, Probe Sequence
tagtggaaaacctaagcctccctct

SEQ ID NO: 303622 - DNA, 25 bp, Probe Sequence
tagctggtacttggcaaatctccct

SEQ ID NO: 303623 - DNA, 25 bp, Probe Sequence
tagcatttactatacagacccagac

SEQ ID NO: 303624 - DNA, 25 bp, Probe Sequence
tagcttctattgtaagactgccccc

SEQ ID NO: 303625 - DNA, 25 bp, Probe Sequence
tatggtcctggaaagacacaaccaa

SEQ ID NO: 303626 - DNA, 25 bp, Probe Sequence
tatgggctttgaaccccaaataagg

SEQ ID NO: 303627 - DNA, 25 bp, Probe Sequence
ttggtgtttaacacttaaacagtat

SEQ ID NO: 303628 - DNA, 25 bp, Probe Sequence
taggttttaagaatctctaaacagt

SEQ ID NO: 303629 - DNA, 25 bp, Probe Sequence
tagcgattctcttcatgtatctcct

SEQ ID NO: 303630 - DNA, 25 bp, Probe Sequence
tagcaaatgtctctgctaccatttc

SEQ ID NO: 303631 - DNA, 25 bp, Probe Sequence
taccagtggctgaatctactttctc

SEQ ID NO: 303632 - DNA, 25 bp, Probe Sequence
tatcctgtagtctatctgactcccc

SEQ ID NO: 303633 - DNA, 25 bp, Probe Sequence
taccattgagtatctgtcactcctg

SEQ ID NO: 303634 - DNA, 25 bp, Probe Sequence
tacctaggtatgcctggttgcctgc

SEQ ID NO: 303635 - DNA, 25 bp, Probe Sequence
tacccagagattgctgctgttctat

SEQ ID NO: 303636 - DNA, 25 bp, Probe Sequence
taccaacaactgggcttatcactgg

SEQ ID NO: 303637 - DNA, 25 bp, Probe Sequence
tacctgtaatctcagctactcagga

SEQ ID NO: 303638 - DNA, 25 bp, Probe Sequence
tacctgagaacgaagacactcagcc

SEQ ID NO: 303639 - DNA, 25 bp, Probe Sequence
tacctgcagaaagatgacctggcaa

SEQ ID NO: 303640 - DNA, 25 bp, Probe Sequence
tacctacagatatgtgcacgttgct

SEQ ID NO: 303641 - DNA, 25 bp, Probe Sequence
tacctgaagaccgtcacgtctgcgt

SEQ ID NO: 303642 - DNA, 25 bp, Probe Sequence
tacctgaagatctttcccatcttgc

SEQ ID NO: 303643 - DNA, 25 bp, Probe Sequence
tacctagagtttactcccaggccag

SEQ ID NO: 303644 - DNA, 25 bp, Probe Sequence
tacctaggctttactcttgagtgtc

SEQ ID NO: 303645 - DNA, 25 bp, Probe Sequence
taccttggctggcattatgggaatg

SEQ ID NO: 303646 - DNA, 25 bp, Probe Sequence
taccttggcagaacatgtacgtatt

SEQ ID NO: 303647 - DNA, 25 bp, Probe Sequence
taccttctgcattacattaccgtgt

SEQ ID NO: 303648 - DNA, 25 bp, Probe Sequence
taggcttctgcacagtctgaaggag

SEQ ID NO: 303649 - DNA, 25 bp, Probe Sequence
tagacagtctgaacagtttaagcag

SEQ ID NO: 303650 - DNA, 25 bp, Probe Sequence
taccgattggatggtttagtgaggc

SEQ ID NO: 303651 - DNA, 25 bp, Probe Sequence
tagcttcatatggtcgattctggtt

SEQ ID NO: 303652 - DNA, 25 bp, Probe Sequence
tagctatctatgacctacctgtgtg

SEQ ID NO: 303653 - DNA, 25 bp, Probe Sequence
tagcttttgatgtctccaagtagtc

SEQ ID NO: 303654 - DNA, 25 bp, Probe Sequence
taccaatgtttctcaagctcgtcaa

SEQ ID NO: 303655 - DNA, 25 bp, Probe Sequence
tacccagttggtcaagtggtgaaaa

SEQ ID NO: 303656 - DNA, 25 bp, Probe Sequence
tatcccagaaggtgaagatcgagct

SEQ ID NO: 303657 - DNA, 25 bp, Probe Sequence
tagccacaagggaccagttccactg

SEQ ID NO: 303658 - DNA, 25 bp, Probe Sequence
tagacctgaggttccagtgtctcct

SEQ ID NO: 303659 - DNA, 25 bp, Probe Sequence
tagagcctttgatccagcaataccc

SEQ ID NO: 303660 - DNA, 25 bp, Probe Sequence
tagaactttgcatagcagctgctac

SEQ ID NO: 303661 - DNA, 25 bp, Probe Sequence
tagatgtattccccaacatgctcac

SEQ ID NO: 303662 - DNA, 25 bp, Probe Sequence
tagcatcatcaaccctctaattcac

SEQ ID NO: 303663 - DNA, 25 bp, Probe Sequence
taccatatatacccttttatctttc

SEQ ID NO: 303664 - DNA, 25 bp, Probe Sequence
taccttaaaccatttcacagcaccc

SEQ ID NO: 303665 - DNA, 25 bp, Probe Sequence
tagcgtatacgagccttcacgcata

SEQ ID NO: 303666 - DNA, 25 bp, Probe Sequence
tagcttgtgggctgcccaatccatc

SEQ ID NO: 303667 - DNA, 25 bp, Probe Sequence
tagcatagtacctgactcaataaat

SEQ ID NO: 303668 - DNA, 25 bp, Probe Sequence
tagcagagtttgtgaccaaagtcag

SEQ ID NO: 303669 - DNA, 25 bp, Probe Sequence
tagatgagtttccagcagccaggag

SEQ ID NO: 303670 - DNA, 25 bp, Probe Sequence
tagcaggtggcacgatcagcagcac

SEQ ID NO: 303671 - DNA, 25 bp, Probe Sequence
tagctggagctgctgtcagcgcagg

SEQ ID NO: 303672 - DNA, 25 bp, Probe Sequence
tagctgtagctgagtactggttccc

SEQ ID NO: 303673 - DNA, 25 bp, Probe Sequence
tagctacgcaatgtgcctgtggtcc

SEQ ID NO: 303674 - DNA, 25 bp, Probe Sequence
taccacacagatgttcctgtctcct

SEQ ID NO: 303675 - DNA, 25 bp, Probe Sequence
taccatcacgagattaatctttcaa

SEQ ID NO: 303676 - DNA, 25 bp, Probe Sequence
taccactcagtaagtatttcttgaa

SEQ ID NO: 303677 - DNA, 25 bp, Probe Sequence
tacccatggtatcgttttgcagtac

SEQ ID NO: 303678 - DNA, 25 bp, Probe Sequence
tagccacatggtacgtcctggggac

SEQ ID NO: 303679 - DNA, 25 bp, Probe Sequence
taccaagtgtttgcgcagggaggcc

SEQ ID NO: 303680 - DNA, 25 bp, Probe Sequence
taccattgctgcattcttgggggga

SEQ ID NO: 303681 - DNA, 25 bp, Probe Sequence
taccttgcatgttcactcagtgctc

SEQ ID NO: 303682 - DNA, 25 bp, Probe Sequence
taccagtgcataacaccacactcag

SEQ ID NO: 303683 - DNA, 25 bp, Probe Sequence
taccagctcatgaagacagccctca

SEQ ID NO: 303684 - DNA, 25 bp, Probe Sequence
taccatctcagtgagcaccagctgc

SEQ ID NO: 303685 - DNA, 25 bp, Probe Sequence
tacctctcatgctggatgccagctg

SEQ ID NO: 303686 - DNA, 25 bp, Probe Sequence
taccactggcatcgtgatggactcc

SEQ ID NO: 303687 - DNA, 25 bp, Probe Sequence
taccactggcatcgtgatggactcc

SEQ ID NO: 303688 - DNA, 25 bp, Probe Sequence
tagccactgtggacttgagcatgtc

SEQ ID NO: 303689 - DNA, 25 bp, Probe Sequence
tagtaatgtctgactatcactccag

SEQ ID NO: 303690 - DNA, 25 bp, Probe Sequence
tagctagcagtctgtagcctcatcc

SEQ ID NO: 303691 - DNA, 25 bp, Probe Sequence
tagaaggtcacactcacagttccag

SEQ ID NO: 303692 - DNA, 25 bp, Probe Sequence
tagccggtgaaccctgataccagga

SEQ ID NO: 303693 - DNA, 25 bp, Probe Sequence
tacctggacatgtcccattaaaaag

SEQ ID NO: 303694 - DNA, 25 bp, Probe Sequence
taccatggacatctacttcgacgag

SEQ ID NO: 303695 - DNA, 25 bp, Probe Sequence
tacctgtacactgacttgagaccag

SEQ ID NO: 303696 - DNA, 25 bp, Probe Sequence
taccctgtcactgagcattaaccac

SEQ ID NO: 303697 - DNA, 25 bp, Probe Sequence
tacccaccactctgcttaaaagttg

SEQ ID NO: 303698 - DNA, 25 bp, Probe Sequence
tacctcaacctatggtataatggtt

SEQ ID NO: 303699 - DNA, 25 bp, Probe Sequence
tacccacacatgcaaaataaatggc

SEQ ID NO: 303700 - DNA, 25 bp, Probe Sequence
tacccatgactgcaagaatactggc

SEQ ID NO: 303701 - DNA, 25 bp, Probe Sequence
taccactcatcgcggagcaaggcgc

SEQ ID NO: 303702 - DNA, 25 bp, Probe Sequence
tacgccaagcacctggagcactggc

SEQ ID NO: 303703 - DNA, 25 bp, Probe Sequence
tagcagctattgtccttgggggcac

SEQ ID NO: 303704 - DNA, 25 bp, Probe Sequence
taggtagacagacttgggtggcaat

SEQ ID NO: 303705 - DNA, 25 bp, Probe Sequence
tagctgtgaacatgccagggttgca

SEQ ID NO: 303706 - DNA, 25 bp, Probe Sequence
tagctgtagatatcaggtgcttctg

SEQ ID NO: 303707 - DNA, 25 bp, Probe Sequence
tagcagtagtcctgccctttgtatg

SEQ ID NO: 303708 - DNA, 25 bp, Probe Sequence
taccatcaatcctggttttgatctg

SEQ ID NO: 303709 - DNA, 25 bp, Probe Sequence
tacccctagctgtgtgtttgatatg

SEQ ID NO: 303710 - DNA, 25 bp, Probe Sequence
tacccttcctgttgttttgttagca

SEQ ID NO: 303711 - DNA, 25 bp, Probe Sequence
taccctctgccgatggcatttgtgt

SEQ ID NO: 303712 - DNA, 25 bp, Probe Sequence
tacccagtctcgagacatattgtgt

SEQ ID NO: 303713 - DNA, 25 bp, Probe Sequence
tttccaggtcagaaaccattgttca

SEQ ID NO: 303714 - DNA, 25 bp, Probe Sequence
tttcctggataatacctttaagaat

SEQ ID NO: 303715 - DNA, 25 bp, Probe Sequence
tttccatatggtataccttgaaaaa

SEQ ID NO: 303716 - DNA, 25 bp, Probe Sequence
tacccattggctatgccacttgaaa

SEQ ID NO: 303717 - DNA, 25 bp, Probe Sequence
tacccattcgttatctgtggaaaac

SEQ ID NO: 303718 - DNA, 25 bp, Probe Sequence
taccttttagtaagttggcatgaaa

SEQ ID NO: 303719 - DNA, 25 bp, Probe Sequence
taccttcttattatttgatctagaa

SEQ ID NO: 303720 - DNA, 25 bp, Probe Sequence
tacctagttgatctttcagatcttt

SEQ ID NO: 303721 - DNA, 25 bp, Probe Sequence
tacctcaattgtattttgtgctgtt

SEQ ID NO: 303722 - DNA, 25 bp, Probe Sequence
tacccctttgtcaactgctgtgaat

SEQ ID NO: 303723 - DNA, 25 bp, Probe Sequence
tatcccctctttcaatcattggtga

SEQ ID NO: 303724 - DNA, 25 bp, Probe Sequence
taccctgcctgtactactctaggga

SEQ ID NO: 303725 - DNA, 25 bp, Probe Sequence
tacctatcctgagtctatcttaaag

SEQ ID NO: 303726 - DNA, 25 bp, Probe Sequence
taccatctcccaacttttaaagcca

SEQ ID NO: 303727 - DNA, 25 bp, Probe Sequence
tacctctcagtcactttctatactg

SEQ ID NO: 303728 - DNA, 25 bp, Probe Sequence
tacctgactgtgcattttaagactg

SEQ ID NO: 303729 - DNA, 25 bp, Probe Sequence
taccatgcacttactttgtacaggc

SEQ ID NO: 303730 - DNA, 25 bp, Probe Sequence
taccatgcactaattcaatcacagg

SEQ ID NO: 303731 - DNA, 25 bp, Probe Sequence
tagaagaatatattcccaaatggga

SEQ ID NO: 303732 - DNA, 25 bp, Probe Sequence
tataacaatcatgcattcgaggagc

SEQ ID NO: 303733 - DNA, 25 bp, Probe Sequence
tagacaatatcttcagtgccgggca

SEQ ID NO: 303734 - DNA, 25 bp, Probe Sequence
taccacttgctggagctgctggagg

SEQ ID NO: 303735 - DNA, 25 bp, Probe Sequence
taccagcttgccttgatgggattgg

SEQ ID NO: 303736 - DNA, 25 bp, Probe Sequence
taccagtgtctgtgacgagctcagg

SEQ ID NO: 303737 - DNA, 25 bp, Probe Sequence
taccagatccgctaccgagtggagg

SEQ ID NO: 303738 - DNA, 25 bp, Probe Sequence
taccgatcggcattcataggatgaa

SEQ ID NO: 303739 - DNA, 25 bp, Probe Sequence
taccacaaatgattcatgcaaatga

SEQ ID NO: 303740 - DNA, 25 bp, Probe Sequence
taccaccacgatcatgcacagagtg

SEQ ID NO: 303741 - DNA, 25 bp, Probe Sequence
taccactcatggatctgaatcagat

SEQ ID NO: 303742 - DNA, 25 bp, Probe Sequence
taccagacagagaagggcatcactg

SEQ ID NO: 303743 - DNA, 25 bp, Probe Sequence
tacctggatgacatcgcgtgccatg

SEQ ID NO: 303744 - DNA, 25 bp, Probe Sequence
taccttgtcaccaaggcagcgcatg

SEQ ID NO: 303745 - DNA, 25 bp, Probe Sequence
tacctgctgtcactccagaggacat

SEQ ID NO: 303746 - DNA, 25 bp, Probe Sequence
tacctgctgtcactccagaggacat

SEQ ID NO: 303747 - DNA, 25 bp, Probe Sequence
tacctgcatttcccagaggactagc

SEQ ID NO: 303748 - DNA, 25 bp, Probe Sequence
tacccatatgtccatcacagtacta

SEQ ID NO: 303749 - DNA, 25 bp, Probe Sequence
tagctccatgagacacttcagttta

SEQ ID NO: 303750 - DNA, 25 bp, Probe Sequence
taccgcatgcgaatctttgcgccta

SEQ ID NO: 303751 - DNA, 25 bp, Probe Sequence
tacctgtgcaacaaatctgcccttg

SEQ ID NO: 303752 - DNA, 25 bp, Probe Sequence
tacctgatagacacattcctctctg

SEQ ID NO: 303753 - DNA, 25 bp, Probe Sequence
taccagcataccactggaccttgtc

SEQ ID NO: 303754 - DNA, 25 bp, Probe Sequence
taccagctagggccagtgacagttg

SEQ ID NO: 303755 - DNA, 25 bp, Probe Sequence
taccagcgagggccgcggagatggg

SEQ ID NO: 303756 - DNA, 25 bp, Probe Sequence
taccttgagggaacagtcatatgag

SEQ ID NO: 303757 - DNA, 25 bp, Probe Sequence
taccttgggcaagatattgcagaaa

SEQ ID NO: 303758 - DNA, 25 bp, Probe Sequence
taccttctagcgttatagtaaaaat

SEQ ID NO: 303759 - DNA, 25 bp, Probe Sequence
tagcctttactgtttgatataccaa

SEQ ID NO: 303760 - DNA, 25 bp, Probe Sequence
taccttccactcctctggagaaaag

SEQ ID NO: 303761 - DNA, 25 bp, Probe Sequence
tacctcccagtctcaggaagatatt

SEQ ID NO: 303762 - DNA, 25 bp, Probe Sequence
taccatctcatcacatctaaaaaat

SEQ ID NO: 303763 - DNA, 25 bp, Probe Sequence
taccacttgcatcattttacaaata

SEQ ID NO: 303764 - DNA, 25 bp, Probe Sequence
taccatgcttcacaatgtaagttat

SEQ ID NO: 303765 - DNA, 25 bp, Probe Sequence
taccatgactcaaatcttaagatct

SEQ ID NO: 303766 - DNA, 25 bp, Probe Sequence
taccgcagcatctatttctcaagcc

SEQ ID NO: 303767 - DNA, 25 bp, Probe Sequence
tacctatgatatggttccagagccc

SEQ ID NO: 303768 - DNA, 25 bp, Probe Sequence
tagcctaggaggttttagtctctac

SEQ ID NO: 303769 - DNA, 25 bp, Probe Sequence
tagccatagggtgacttaccttgtc

SEQ ID NO: 303770 - DNA, 25 bp, Probe Sequence
taggatcggggctgcttatgccttt

SEQ ID NO: 303771 - DNA, 25 bp, Probe Sequence
taggtcgtggtgtgtcccactttaa

SEQ ID NO: 303772 - DNA, 25 bp, Probe Sequence
taccatcctgttgcgtccaacatgt

SEQ ID NO: 303773 - DNA, 25 bp, Probe Sequence
taccacaaggtacgtccatttggac

SEQ ID NO: 303774 - DNA, 25 bp, Probe Sequence
taccacaaggtacgtccatttggac

SEQ ID NO: 303775 - DNA, 25 bp, Probe Sequence
taccacaaggtacgtccatttggac

SEQ ID NO: 303776 - DNA, 25 bp, Probe Sequence
taccaaatgagttagcccatggatg

SEQ ID NO: 303777 - DNA, 25 bp, Probe Sequence
taccaattcaaccaccaaggaaaca

SEQ ID NO: 303778 - DNA, 25 bp, Probe Sequence
taccaattctagcacccactgaaaa

SEQ ID NO: 303779 - DNA, 25 bp, Probe Sequence
taccagaagctaaactccctgagac

SEQ ID NO: 303780 - DNA, 25 bp, Probe Sequence
tatcaaaaaaagactcagccaagac

SEQ ID NO: 303781 - DNA, 25 bp, Probe Sequence
tagcaagaaatctacatccaccaaa

SEQ ID NO: 303782 - DNA, 25 bp, Probe Sequence
taccagcaaaagaaccctcagcaga

SEQ ID NO: 303783 - DNA, 25 bp, Probe Sequence
taccaaaaagactcttgatgaagaa

SEQ ID NO: 303784 - DNA, 25 bp, Probe Sequence
tacctacacaccaactgctttgagg

SEQ ID NO: 303785 - DNA, 25 bp, Probe Sequence
tacctagatcagccatcagcctgtc

SEQ ID NO: 303786 - DNA, 25 bp, Probe Sequence
tacctgatgtacctgatgctatgtc

SEQ ID NO: 303787 - DNA, 25 bp, Probe Sequence
tacctgactatccagcagctgctgg

SEQ ID NO: 303788 - DNA, 25 bp, Probe Sequence
taccgatgttcaccgtgctcaggaa

SEQ ID NO: 303789 - DNA, 25 bp, Probe Sequence
taccaggcttgctctttgcagtgaa

SEQ ID NO: 303790 - DNA, 25 bp, Probe Sequence
tacctggcttgctctgtccagaatt

SEQ ID NO: 303791 - DNA, 25 bp, Probe Sequence
tacctgggtggccttccagatgttc

SEQ ID NO: 303792 - DNA, 25 bp, Probe Sequence
tagagcgggaaccttcctgaggtgt

SEQ ID NO: 303793 - DNA, 25 bp, Probe Sequence
tagagcgggaaccttcctgaggtgt

SEQ ID NO: 303794 - DNA, 25 bp, Probe Sequence
ttaagtggggtcttgcttgggtgtc

SEQ ID NO: 303795 - DNA, 25 bp, Probe Sequence
ttaaggggtctagttgccgtttgcg

SEQ ID NO: 303796 - DNA, 25 bp, Probe Sequence
tataagggggtagtgggaacagtgg

SEQ ID NO: 303797 - DNA, 25 bp, Probe Sequence
tagggaacaagtgctggaaacagtg

SEQ ID NO: 303798 - DNA, 25 bp, Probe Sequence
tagggaacgcggaaggatcataacg

SEQ ID NO: 303799 - DNA, 25 bp, Probe Sequence
taggggacagaaatcaggtattggc

SEQ ID NO: 303800 - DNA, 25 bp, Probe Sequence
taccagtgcacagaggggtttgtcc

SEQ ID NO: 303801 - DNA, 25 bp, Probe Sequence
tagccaccccaagtgtggttatgcc

SEQ ID NO: 303802 - DNA, 25 bp, Probe Sequence
tagcccccacaagctggggcttcct

SEQ ID NO: 303803 - DNA, 25 bp, Probe Sequence
tagcccccacaagctggggcttcct

SEQ ID NO: 303804 - DNA, 25 bp, Probe Sequence
tagctccaagcggaccggtggttca

SEQ ID NO: 303805 - DNA, 25 bp, Probe Sequence
tagcggaaggaattgcgggccttca

SEQ ID NO: 303806 - DNA, 25 bp, Probe Sequence
tagacgaatggagatgcaggagctg

SEQ ID NO: 303807 - DNA, 25 bp, Probe Sequence
tagcactggtgtggagatcaaacga

SEQ ID NO: 303808 - DNA, 25 bp, Probe Sequence
tagcaatggctctagcaaaatacta

SEQ ID NO: 303809 - DNA, 25 bp, Probe Sequence
tagcagcagcaggcaaatcaaaaaa

SEQ ID NO: 303810 - DNA, 25 bp, Probe Sequence
tagagcaagacatctgcaaaatgga

SEQ ID NO: 303811 - DNA, 25 bp, Probe Sequence
tagaaggtaacctaaatggcttata

SEQ ID NO: 303812 - DNA, 25 bp, Probe Sequence
tagtaattaacctccggtgctctga

SEQ ID NO: 303813 - DNA, 25 bp, Probe Sequence
tagaacaaaccctgccaagtgctgc

SEQ ID NO: 303814 - DNA, 25 bp, Probe Sequence
tagtcattaacccatctctgaactg

SEQ ID NO: 303815 - DNA, 25 bp, Probe Sequence
tagtggtaacttttcaaacagccct

SEQ ID NO: 303816 - DNA, 25 bp, Probe Sequence
tagcccttgtttttaacacacgctc

SEQ ID NO: 303817 - DNA, 25 bp, Probe Sequence
tagccccagttattctctaggcaac

SEQ ID NO: 303818 - DNA, 25 bp, Probe Sequence
tagctactcaggaggccgaggcaga

SEQ ID NO: 303819 - DNA, 25 bp, Probe Sequence
tagctactcaggaggccgaggcaga

SEQ ID NO: 303820 - DNA, 25 bp, Probe Sequence
tagtcctcagaaatggactaggaat

SEQ ID NO: 303821 - DNA, 25 bp, Probe Sequence
tagtcctagatatttccatgggcca

SEQ ID NO: 303822 - DNA, 25 bp, Probe Sequence
tacctcgactggatccatgggcaca

SEQ ID NO: 303823 - DNA, 25 bp, Probe Sequence
taccacactcatgggtcactggggc

SEQ ID NO: 303824 - DNA, 25 bp, Probe Sequence
tacctcctgtgggtgaatgtgctgg

SEQ ID NO: 303825 - DNA, 25 bp, Probe Sequence
tacctgccttggttcagcagcgggt

SEQ ID NO: 303826 - DNA, 25 bp, Probe Sequence
tacctgctctgtttttggctgtgag

SEQ ID NO: 303827 - DNA, 25 bp, Probe Sequence
tacctctgtgtatggtcactagaga

SEQ ID NO: 303828 - DNA, 25 bp, Probe Sequence
tacctctggtcagaatccggatact

SEQ ID NO: 303829 - DNA, 25 bp, Probe Sequence
tagccatttacagcaatgccaaata

SEQ ID NO: 303830 - DNA, 25 bp, Probe Sequence
tacctgttatcagtagtgcctttac

SEQ ID NO: 303831 - DNA, 25 bp, Probe Sequence
tacctgttacgcaattttttatctc

SEQ ID NO: 303832 - DNA, 25 bp, Probe Sequence
tacctgacattgctacgtttctacc

SEQ ID NO: 303833 - DNA, 25 bp, Probe Sequence
tatcgattttgtccaagttttacca

SEQ ID NO: 303834 - DNA, 25 bp, Probe Sequence
tatcgcaattgacggaaactttgac

SEQ ID NO: 303835 - DNA, 25 bp, Probe Sequence
tagccaaggagggaacatgtatgta

SEQ ID NO: 303836 - DNA, 25 bp, Probe Sequence
tagacttggagggaaatgggctttt

SEQ ID NO: 303837 - DNA, 25 bp, Probe Sequence
tagacttggagggaaatgggctttt

SEQ ID NO: 303838 - DNA, 25 bp, Probe Sequence
tagacattagggtgccagccaggtt

SEQ ID NO: 303839 - DNA, 25 bp, Probe Sequence
tagtcaaagggcttcccttggttcg

SEQ ID NO: 303840 - DNA, 25 bp, Probe Sequence
taccaaatggtcttactcttgaatt

SEQ ID NO: 303841 - DNA, 25 bp, Probe Sequence
taccaaaggtgctacatctatgtga

SEQ ID NO: 303842 - DNA, 25 bp, Probe Sequence
tagccaagattgactgtattagatg

SEQ ID NO: 303843 - DNA, 25 bp, Probe Sequence
tagccatctgctatcagcatcatta

SEQ ID NO: 303844 - DNA, 25 bp, Probe Sequence
tatgccctgctcaggacttactgga

SEQ ID NO: 303845 - DNA, 25 bp, Probe Sequence
tatgacccctagcccattagggaca

SEQ ID NO: 303846 - DNA, 25 bp, Probe Sequence
tatagaggcctagccactagttaga

SEQ ID NO: 303847 - DNA, 25 bp, Probe Sequence
ttgaagggctagattgggatttgaa

SEQ ID NO: 303848 - DNA, 25 bp, Probe Sequence
taggaggcgctgctttgtggttgat

SEQ ID NO: 303849 - DNA, 25 bp, Probe Sequence
tagggactttctactggcagtacat

SEQ ID NO: 303850 - DNA, 25 bp, Probe Sequence
tagggactttccattgacgtcaatg

SEQ ID NO: 303851 - DNA, 25 bp, Probe Sequence
tagggactttccattgacgtcaatg

SEQ ID NO: 303852 - DNA, 25 bp, Probe Sequence
tagggactttccattgacgtcaatg

SEQ ID NO: 303853 - DNA, 25 bp, Probe Sequence
tagaaaattctgccgtctgaggttt

SEQ ID NO: 303854 - DNA, 25 bp, Probe Sequence
tagaaagtatcatctttcaggcatg

SEQ ID NO: 303855 - DNA, 25 bp, Probe Sequence
tagatagtgttctacttttaaacca

SEQ ID NO: 303856 - DNA, 25 bp, Probe Sequence
tagtagtttgattctggtttccctc

SEQ ID NO: 303857 - DNA, 25 bp, Probe Sequence
taccagttttttagtttgagctctt

SEQ ID NO: 303858 - DNA, 25 bp, Probe Sequence
taccagttttttagtttgagctctt

SEQ ID NO: 303859 - DNA, 25 bp, Probe Sequence
taccagtttgtggttctgactacat

SEQ ID NO: 303860 - DNA, 25 bp, Probe Sequence
taccagtgccctctttaccactgga

SEQ ID NO: 303861 - DNA, 25 bp, Probe Sequence
taccaggccattgcttctaacagta

SEQ ID NO: 303862 - DNA, 25 bp, Probe Sequence
tacctgctgcgatttttcttcacag

SEQ ID NO: 303863 - DNA, 25 bp, Probe Sequence
tacctatccgtaaactcatcaagtt

SEQ ID NO: 303864 - DNA, 25 bp, Probe Sequence
tatccaaagggaatactcacatttt

SEQ ID NO: 303865 - DNA, 25 bp, Probe Sequence
tatccaaagggaatactcacatttt

SEQ ID NO: 303866 - DNA, 25 bp, Probe Sequence
tatccaaagggaatactcacatttt

SEQ ID NO: 303867 - DNA, 25 bp, Probe Sequence
taccaatagcttcataaactgttta

SEQ ID NO: 303868 - DNA, 25 bp, Probe Sequence
tacctctccctggaggcaactgttt

SEQ ID NO: 303869 - DNA, 25 bp, Probe Sequence
tacctcccactgtgaaatcgctggt

SEQ ID NO: 303870 - DNA, 25 bp, Probe Sequence
tacctactcacattggagagttctg

SEQ ID NO: 303871 - DNA, 25 bp, Probe Sequence
tacctaccagtttgtggttctgact

SEQ ID NO: 303872 - DNA, 25 bp, Probe Sequence
taccttcaagtaatgttcaacagac

SEQ ID NO: 303873 - DNA, 25 bp, Probe Sequence
taccttctagtacttctcataaaca

SEQ ID NO: 303874 - DNA, 25 bp, Probe Sequence
tacctgtgcattcagttctgtgaat

SEQ ID NO: 303875 - DNA, 25 bp, Probe Sequence
tagccgtcagacgagatactggaga

SEQ ID NO: 303876 - DNA, 25 bp, Probe Sequence
taccagccagagggtagggcacaaa

SEQ ID NO: 303877 - DNA, 25 bp, Probe Sequence
taccgtcaagctggccaagcacaaa

SEQ ID NO: 303878 - DNA, 25 bp, Probe Sequence
taccgtcaagctggccaagcacaaa

SEQ ID NO: 303879 - DNA, 25 bp, Probe Sequence
tagccgtcacatttctagacaagca

SEQ ID NO: 303880 - DNA, 25 bp, Probe Sequence
tagcccagcattgatctagaagcag

SEQ ID NO: 303881 - DNA, 25 bp, Probe Sequence
tagcccagacaggactaaggggact

SEQ ID NO: 303882 - DNA, 25 bp, Probe Sequence
tagcctcagacactactgaggtggt

SEQ ID NO: 303883 - DNA, 25 bp, Probe Sequence
taccatctgacctctgcaggagaga

SEQ ID NO: 303884 - DNA, 25 bp, Probe Sequence
tagccggactcagctgcgaggagat

SEQ ID NO: 303885 - DNA, 25 bp, Probe Sequence
tacctagcaccagtgcttggcatca

SEQ ID NO: 303886 - DNA, 25 bp, Probe Sequence
tacctacatcacaagtatgccaagt

SEQ ID NO: 303887 - DNA, 25 bp, Probe Sequence
taccatagcaaccagcaactccagg

SEQ ID NO: 303888 - DNA, 25 bp, Probe Sequence
taccatcaatatggccgagctccac

SEQ ID NO: 303889 - DNA, 25 bp, Probe Sequence
tacctaatcggcgagtgcccatctg

SEQ ID NO: 303890 - DNA, 25 bp, Probe Sequence
tacctaacggcggctgccattttca

SEQ ID NO: 303891 - DNA, 25 bp, Probe Sequence
tacctaacaagtactgctcatttac

SEQ ID NO: 303892 - DNA, 25 bp, Probe Sequence
tacctggatctactctttatttaaa

SEQ ID NO: 303893 - DNA, 25 bp, Probe Sequence
tacctatagtagtctgtgtttaaag

SEQ ID NO: 303894 - DNA, 25 bp, Probe Sequence
tatgacttagtcccttttctactac

SEQ ID NO: 303895 - DNA, 25 bp, Probe Sequence
tagagttcttctttctttcttaagc

SEQ ID NO: 303896 - DNA, 25 bp, Probe Sequence
tagagttccacggtttgtttacaca

SEQ ID NO: 303897 - DNA, 25 bp, Probe Sequence
tagtctccccgtatgagttagaata

SEQ ID NO: 303898 - DNA, 25 bp, Probe Sequence
tagtttccacgtaggcaggtcgctt

SEQ ID NO: 303899 - DNA, 25 bp, Probe Sequence
taggcttctacgtggtggacagtca

SEQ ID NO: 303900 - DNA, 25 bp, Probe Sequence
tacctttgaatgtgtttgcagagct

SEQ ID NO: 303901 - DNA, 25 bp, Probe Sequence
tagccttgcatgttgtagttagaga

SEQ ID NO: 303902 - DNA, 25 bp, Probe Sequence
tagcaatcgcatcatcggtgccaag

SEQ ID NO: 303903 - DNA, 25 bp, Probe Sequence
tagcactccagcctgggtgacagag

SEQ ID NO: 303904 - DNA, 25 bp, Probe Sequence
tagctcatccatctagggtgcgtag

SEQ ID NO: 303905 - DNA, 25 bp, Probe Sequence
tagtattctctatgtagtgccaagt

SEQ ID NO: 303906 - DNA, 25 bp, Probe Sequence
tatggacttctcagtcctcctaatt

SEQ ID NO: 303907 - DNA, 25 bp, Probe Sequence
tatgctaattaggtgtccacactaa

SEQ ID NO: 303908 - DNA, 25 bp, Probe Sequence
tatgttattatatttcccaaagaac

SEQ ID NO: 303909 - DNA, 25 bp, Probe Sequence
tacctttatcttaccacacacatgg

SEQ ID NO: 303910 - DNA, 25 bp, Probe Sequence
tacctgcctttcataatcaccaggg

SEQ ID NO: 303911 - DNA, 25 bp, Probe Sequence
tagtttgcttctgtaagcaacggga

SEQ ID NO: 303912 - DNA, 25 bp, Probe Sequence
tagtggtttccagaagaacaggggt

SEQ ID NO: 303913 - DNA, 25 bp, Probe Sequence
taggggctgctccctcaaaaaggga

SEQ ID NO: 303914 - DNA, 25 bp, Probe Sequence
tagcgggccattccttagcaaaatg

SEQ ID NO: 303915 - DNA, 25 bp, Probe Sequence
tatcggcctaatcttagccctgaag

SEQ ID NO: 303916 - DNA, 25 bp, Probe Sequence
tatctgggcttatatctggcctctg

SEQ ID NO: 303917 - DNA, 25 bp, Probe Sequence
tagttttgctgaagactggccttat

SEQ ID NO: 303918 - DNA, 25 bp, Probe Sequence
tagctctctttaagacagacatcta

SEQ ID NO: 303919 - DNA, 25 bp, Probe Sequence
tagcttcgttttggcagtcacatct

SEQ ID NO: 303920 - DNA, 25 bp, Probe Sequence
tagctatcgttatttgatacctata

SEQ ID NO: 303921 - DNA, 25 bp, Probe Sequence
tagctctggactcttaacacttaag

SEQ ID NO: 303922 - DNA, 25 bp, Probe Sequence
tagagattgggacttaccctttagg

SEQ ID NO: 303923 - DNA, 25 bp, Probe Sequence
tagcatgtgttgcagctgtcaccac

SEQ ID NO: 303924 - DNA, 25 bp, Probe Sequence
tagctggtcatggtgtgtacctgta

SEQ ID NO: 303925 - DNA, 25 bp, Probe Sequence
tagcaggtcatcggtgctttgctgt

SEQ ID NO: 303926 - DNA, 25 bp, Probe Sequence
tagcagatgtccactgcgttgtccc

SEQ ID NO: 303927 - DNA, 25 bp, Probe Sequence
tagcgctcacgcaagcatggttaac

SEQ ID NO: 303928 - DNA, 25 bp, Probe Sequence
taggccattgcagcatccttagatg

SEQ ID NO: 303929 - DNA, 25 bp, Probe Sequence
tagccagcatcttgtaactaaatga

SEQ ID NO: 303930 - DNA, 25 bp, Probe Sequence
tagccagtgtgactatgcacctaat

SEQ ID NO: 303931 - DNA, 25 bp, Probe Sequence
taccaatctcacttaccatagcatg

SEQ ID NO: 303932 - DNA, 25 bp, Probe Sequence
taccaatcctccaacttgatgcaga

SEQ ID NO: 303933 - DNA, 25 bp, Probe Sequence
tagccaaacaccactttgtaaaagg

SEQ ID NO: 303934 - DNA, 25 bp, Probe Sequence
taccatcaatactcatcattaataa

SEQ ID NO: 303935 - DNA, 25 bp, Probe Sequence
taccacatatacacctgatagtcaa

SEQ ID NO: 303936 - DNA, 25 bp, Probe Sequence
taccatatatatactagataaccag

SEQ ID NO: 303937 - DNA, 25 bp, Probe Sequence
taccacaaatgcaaaatcaccccct

SEQ ID NO: 303938 - DNA, 25 bp, Probe Sequence
taccatattgtcaaaatagtccacc

SEQ ID NO: 303939 - DNA, 25 bp, Probe Sequence
taccatttgaaccacatatcccact

SEQ ID NO: 303940 - DNA, 25 bp, Probe Sequence
taccactaagacttctgactccaat

SEQ ID NO: 303941 - DNA, 25 bp, Probe Sequence
tagccaccggatgtgctgaggccta

SEQ ID NO: 303942 - DNA, 25 bp, Probe Sequence
tagacccaggtgaggcagggctgaa

SEQ ID NO: 303943 - DNA, 25 bp, Probe Sequence
tagaaaggatggactggacggcaga

SEQ ID NO: 303944 - DNA, 25 bp, Probe Sequence
tagacagggagaactcgtcggcagg

SEQ ID NO: 303945 - DNA, 25 bp, Probe Sequence
tagctctaagaaactctttggggat

SEQ ID NO: 303946 - DNA, 25 bp, Probe Sequence
tagcctcagaggaccagttttgtgg

SEQ ID NO: 303947 - DNA, 25 bp, Probe Sequence
tagctctcaagggccagtttctgga

SEQ ID NO: 303948 - DNA, 25 bp, Probe Sequence
tagctctaagagcaattctgggaga

SEQ ID NO: 303949 - DNA, 25 bp, Probe Sequence
tagactccttcgtgatctggggatg

SEQ ID NO: 303950 - DNA, 25 bp, Probe Sequence
tacctcctctgttcaatcatgggtg

SEQ ID NO: 303951 - DNA, 25 bp, Probe Sequence
tagcctggtctgtgcattgtggctg

SEQ ID NO: 303952 - DNA, 25 bp, Probe Sequence
tagccggacggggatctgagctggc

SEQ ID NO: 303953 - DNA, 25 bp, Probe Sequence
tagttgaacagggccctgaagcgcg

SEQ ID NO: 303954 - DNA, 25 bp, Probe Sequence
tagtctaaggatgccctccaggctt

SEQ ID NO: 303955 - DNA, 25 bp, Probe Sequence
tacctaatggagatccatctgtcct

SEQ ID NO: 303956 - DNA, 25 bp, Probe Sequence
tacctaatggagatccatctgtcct

SEQ ID NO: 303957 - DNA, 25 bp, Probe Sequence
tacctttatgagacgactctacctt

SEQ ID NO: 303958 - DNA, 25 bp, Probe Sequence
tatccctttggaagaccttgcttgg

SEQ ID NO: 303959 - DNA, 25 bp, Probe Sequence
tagcctttaccaaacgtgtttgaca

SEQ ID NO: 303960 - DNA, 25 bp, Probe Sequence
taccttacaaatttcttttctatga

SEQ ID NO: 303961 - DNA, 25 bp, Probe Sequence
taccattccaaattactattgtata

SEQ ID NO: 303962 - DNA, 25 bp, Probe Sequence
taccattcttcacccagagatcgtt

SEQ ID NO: 303963 - DNA, 25 bp, Probe Sequence
taccttcatcctacccagaaattat

SEQ ID NO: 303964 - DNA, 25 bp, Probe Sequence
taccagattcccactgaaaattcta

SEQ ID NO: 303965 - DNA, 25 bp, Probe Sequence
tacctcatttacagtcagaaagctt

SEQ ID NO: 303966 - DNA, 25 bp, Probe Sequence
tacctctcttaaaatgacacccttc

SEQ ID NO: 303967 - DNA, 25 bp, Probe Sequence
tatgccccctaaaagaaggccatac

SEQ ID NO: 303968 - DNA, 25 bp, Probe Sequence
tagccccctgaattaacagagccca

SEQ ID NO: 303969 - DNA, 25 bp, Probe Sequence
tagccgcccgaaggtacaagttgca

SEQ ID NO: 303970 - DNA, 25 bp, Probe Sequence
tagccatgtcctcaagataaagtct

SEQ ID NO: 303971 - DNA, 25 bp, Probe Sequence
tagcctgtggcaataaagagaaact

SEQ ID NO: 303972 - DNA, 25 bp, Probe Sequence
tagagcctgtgcataaaactgaaac

SEQ ID NO: 303973 - DNA, 25 bp, Probe Sequence
tagatccatggccagaaattaggaa

SEQ ID NO: 303974 - DNA, 25 bp, Probe Sequence
tagatctctcgccgccaatgcttgt

SEQ ID NO: 303975 - DNA, 25 bp, Probe Sequence
tagccctgctctagtaatgtctgac

SEQ ID NO: 303976 - DNA, 25 bp, Probe Sequence
tagacagcgttttcagttctgcagc

SEQ ID NO: 303977 - DNA, 25 bp, Probe Sequence
taccagcgttatgagatcaagatga

SEQ ID NO: 303978 - DNA, 25 bp, Probe Sequence
tagctcacgttaggcatgaaacagg

SEQ ID NO: 303979 - DNA, 25 bp, Probe Sequence
tagccactgcttcgccagagagaag

SEQ ID NO: 303980 - DNA, 25 bp, Probe Sequence
tagcactcacttccaaaagattgtt

SEQ ID NO: 303981 - DNA, 25 bp, Probe Sequence
tagcagtacctccctaaagcatttt

SEQ ID NO: 303982 - DNA, 25 bp, Probe Sequence
tagcatttttgcacaaggaattgct

SEQ ID NO: 303983 - DNA, 25 bp, Probe Sequence
tagtgctttaggtcaggccaatggt

SEQ ID NO: 303984 - DNA, 25 bp, Probe Sequence
tagagttcccgatgcccaatgagga

SEQ ID NO: 303985 - DNA, 25 bp, Probe Sequence
tagcggggacgatgccttggatgga

SEQ ID NO: 303986 - DNA, 25 bp, Probe Sequence
tagcctttgaaggatgccctgtgta

SEQ ID NO: 303987 - DNA, 25 bp, Probe Sequence
taggctttgacagacccatatgcac

SEQ ID NO: 303988 - DNA, 25 bp, Probe Sequence
tagcaggattgcaggaccctctgcc

SEQ ID NO: 303989 - DNA, 25 bp, Probe Sequence
tagcgttcagatgtgactggcccac

SEQ ID NO: 303990 - DNA, 25 bp, Probe Sequence
tagattctgcctgacacggaacacc

SEQ ID NO: 303991 - DNA, 25 bp, Probe Sequence
tagaatatctctgaagctggattga

SEQ ID NO: 303992 - DNA, 25 bp, Probe Sequence
tagaatgctctcctgcaacttgagt

SEQ ID NO: 303993 - DNA, 25 bp, Probe Sequence
tagaaggtcatgcagatgatctgag

SEQ ID NO: 303994 - DNA, 25 bp, Probe Sequence
tatgagcgggcgcagtgattatagg

SEQ ID NO: 303995 - DNA, 25 bp, Probe Sequence
tagcaagcgatccagacttctatag

SEQ ID NO: 303996 - DNA, 25 bp, Probe Sequence
tagctacaattatctgatcttgaca

SEQ ID NO: 303997 - DNA, 25 bp, Probe Sequence
tagccagcatttccgattttgacat

SEQ ID NO: 303998 - DNA, 25 bp, Probe Sequence
taccattgtgatgcgttcttgccag

SEQ ID NO: 303999 - DNA, 25 bp, Probe Sequence
taccatgatgatgcggttttgacag

SEQ ID NO: 304000 - DNA, 25 bp, Probe Sequence
taccatctgcatggggctggggtcc

SEQ ID NO: 304001 - DNA, 25 bp, Probe Sequence
tacctatgtgagggctgggcatgat

SEQ ID NO: 304002 - DNA, 25 bp, Probe Sequence
tagctgcttggtaactgtgtcatga

SEQ ID NO: 304003 - DNA, 25 bp, Probe Sequence
tagctgttgagttaattaggaggac

SEQ ID NO: 304004 - DNA, 25 bp, Probe Sequence
tagagttgagttcccgagagggccg

SEQ ID NO: 304005 - DNA, 25 bp, Probe Sequence
tagcggtgaagctccagggggccgc

SEQ ID NO: 304006 - DNA, 25 bp, Probe Sequence
tagcagggaacaacagatactgggg

SEQ ID NO: 304007 - DNA, 25 bp, Probe Sequence
tagatgggagacgcgctcaatccgt

SEQ ID NO: 304008 - DNA, 25 bp, Probe Sequence
tagctgggtgtggtggctcatacct

SEQ ID NO: 304009 - DNA, 25 bp, Probe Sequence
tagctgggtggaatggcccatgcct

SEQ ID NO: 304010 - DNA, 25 bp, Probe Sequence
tagctgatgatccgaataactacct

SEQ ID NO: 304011 - DNA, 25 bp, Probe Sequence
tagctgaatccgcccagtgatagcc

SEQ ID NO: 304012 - DNA, 25 bp, Probe Sequence
taggatcacctcccagatatactac

SEQ ID NO: 304013 - DNA, 25 bp, Probe Sequence
tagtagctactcccaaattgtcagc

SEQ ID NO: 304014 - DNA, 25 bp, Probe Sequence
tagtgcctaccagacgattgactca

SEQ ID NO: 304015 - DNA, 25 bp, Probe Sequence
tagcctctcctgtaagggtgatcta

SEQ ID NO: 304016 - DNA, 25 bp, Probe Sequence
tagcctctcctgtaagggtgatcta

SEQ ID NO: 304017 - DNA, 25 bp, Probe Sequence
taggcattgttgtgaaggtattttg

SEQ ID NO: 304018 - DNA, 25 bp, Probe Sequence
taggagtgctatgaaagtgaattat

SEQ ID NO: 304019 - DNA, 25 bp, Probe Sequence
tagaggctgctgtgaaagaggctgg

SEQ ID NO: 304020 - DNA, 25 bp, Probe Sequence
tagcaaatgctttgaaagggttgta

SEQ ID NO: 304021 - DNA, 25 bp, Probe Sequence
ttaaatggtaaatgaccttgtatat

SEQ ID NO: 304022 - DNA, 25 bp, Probe Sequence
tatgagagggtatagggaggtgttt

SEQ ID NO: 304023 - DNA, 25 bp, Probe Sequence
tagcagcggttattcggtgagcggt

SEQ ID NO: 304024 - DNA, 25 bp, Probe Sequence
tagcacggtttaaagttctgtgtat

SEQ ID NO: 304025 - DNA, 25 bp, Probe Sequence
taccatgattgtatacagtttgtga

SEQ ID NO: 304026 - DNA, 25 bp, Probe Sequence
taccagctttagccaactttctgtg

SEQ ID NO: 304027 - DNA, 25 bp, Probe Sequence
tagccctttaggtgattttgatcca

SEQ ID NO: 304028 - DNA, 25 bp, Probe Sequence
tagccctttagttatgagcctgtgg

SEQ ID NO: 304029 - DNA, 25 bp, Probe Sequence
tagccaccatttttcagagtcctgg

SEQ ID NO: 304030 - DNA, 25 bp, Probe Sequence
tagccaccatttttcagagtcctgg

SEQ ID NO: 304031 - DNA, 25 bp, Probe Sequence
taccacctctcttaatcaggctgct

SEQ ID NO: 304032 - DNA, 25 bp, Probe Sequence
tagcacctgctcccaaatcatgggc

SEQ ID NO: 304033 - DNA, 25 bp, Probe Sequence
tagccctgtagatttgtctggtgca

SEQ ID NO: 304034 - DNA, 25 bp, Probe Sequence
tagacctggtgatcattcgagagca

SEQ ID NO: 304035 - DNA, 25 bp, Probe Sequence
tagacctggtgatcattcgagagca

SEQ ID NO: 304036 - DNA, 25 bp, Probe Sequence
tagacctggtgatcattcgagagca

SEQ ID NO: 304037 - DNA, 25 bp, Probe Sequence
tagtcgtggatcactacaaggagga

SEQ ID NO: 304038 - DNA, 25 bp, Probe Sequence
tagcctgtgtgtctctaaaccagcc

SEQ ID NO: 304039 - DNA, 25 bp, Probe Sequence
tagcctgtgtgtctctaaaccagcc

SEQ ID NO: 304040 - DNA, 25 bp, Probe Sequence
tagccatggaggatgctaaaccatt

SEQ ID NO: 304041 - DNA, 25 bp, Probe Sequence
tagactatgaggctgcgaaggcaga

SEQ ID NO: 304042 - DNA, 25 bp, Probe Sequence
tagacattagacagggacctgaaag

SEQ ID NO: 304043 - DNA, 25 bp, Probe Sequence
tagaaacgactgtgaaccgatgtca

SEQ ID NO: 304044 - DNA, 25 bp, Probe Sequence
tagcagaacgctcttgaaacaagta

SEQ ID NO: 304045 - DNA, 25 bp, Probe Sequence
tagcatggacgtgcattgagaagcc

SEQ ID NO: 304046 - DNA, 25 bp, Probe Sequence
tagcatgcccaaggctacaaagcta

SEQ ID NO: 304047 - DNA, 25 bp, Probe Sequence
tagctgccaacagctaaagcccctg

SEQ ID NO: 304048 - DNA, 25 bp, Probe Sequence
tagctgccaacagctaaagccccca

SEQ ID NO: 304049 - DNA, 25 bp, Probe Sequence
tagctctaactggctagaagtgccc

SEQ ID NO: 304050 - DNA, 25 bp, Probe Sequence
tagttaagtcaccaccaggcaagcc

SEQ ID NO: 304051 - DNA, 25 bp, Probe Sequence
tagttacagtcggcatcaaccaacc

SEQ ID NO: 304052 - DNA, 25 bp, Probe Sequence
tagctttagattacccctatacaca

SEQ ID NO: 304053 - DNA, 25 bp, Probe Sequence
tagatttagaatgccaccccaaaaa

SEQ ID NO: 304054 - DNA, 25 bp, Probe Sequence
taggttgggacccactccaaataat

SEQ ID NO: 304055 - DNA, 25 bp, Probe Sequence
tagatgtagggatagactgacaata

SEQ ID NO: 304056 - DNA, 25 bp, Probe Sequence
taggcaccggcaaatacagacaata

SEQ ID NO: 304057 - DNA, 25 bp, Probe Sequence
tagtgactgaccataaagagacaaa

SEQ ID NO: 304058 - DNA, 25 bp, Probe Sequence
tagactagaccaagcagaagaaaga

SEQ ID NO: 304059 - DNA, 25 bp, Probe Sequence
tagaaatatagacctgtgaaaagac

SEQ ID NO: 304060 - DNA, 25 bp, Probe Sequence
tagaccagtgaaacggaataatgac

SEQ ID NO: 304061 - DNA, 25 bp, Probe Sequence
tagacaattgacactggattaaaca

SEQ ID NO: 304062 - DNA, 25 bp, Probe Sequence
tagaaattagcgtaatattgagaaa

SEQ ID NO: 304063 - DNA, 25 bp, Probe Sequence
tagaatattatttggtcctggataa

SEQ ID NO: 304064 - DNA, 25 bp, Probe Sequence
tagctagtccgcgggttcggataca

SEQ ID NO: 304065 - DNA, 25 bp, Probe Sequence
tagctgactcttctggttgggctta

SEQ ID NO: 304066 - DNA, 25 bp, Probe Sequence
tagcaactttgctgtgattccgttt

SEQ ID NO: 304067 - DNA, 25 bp, Probe Sequence
tagccagtatctccgtgattacctt

SEQ ID NO: 304068 - DNA, 25 bp, Probe Sequence
taccatgtgatgcgttttgaccagt

SEQ ID NO: 304069 - DNA, 25 bp, Probe Sequence
taccaggcatggcagtgggcgcctt

SEQ ID NO: 304070 - DNA, 25 bp, Probe Sequence
tagcctggcacgatggtgggcactt

SEQ ID NO: 304071 - DNA, 25 bp, Probe Sequence
tagccatcagcaggaccgttggcct

SEQ ID NO: 304072 - DNA, 25 bp, Probe Sequence
tagccctgaagaggcctatgacctt

SEQ ID NO: 304073 - DNA, 25 bp, Probe Sequence
tagcccgtaaagagtatccctttcg

SEQ ID NO: 304074 - DNA, 25 bp, Probe Sequence
tagcccggacgagggctctttctta

SEQ ID NO: 304075 - DNA, 25 bp, Probe Sequence
tagaggaggacggggtgctttccac

SEQ ID NO: 304076 - DNA, 25 bp, Probe Sequence
tagaggcagctgtcacgggagttcc

SEQ ID NO: 304077 - DNA, 25 bp, Probe Sequence
tagactgcagtggacagtccccacc

SEQ ID NO: 304078 - DNA, 25 bp, Probe Sequence
tagatgtcagtctcgttaccagcag

SEQ ID NO: 304079 - DNA, 25 bp, Probe Sequence
tagctgatcagttttttcacctgga

SEQ ID NO: 304080 - DNA, 25 bp, Probe Sequence
tagcggccatttatttctctgtagc

SEQ ID NO: 304081 - DNA, 25 bp, Probe Sequence
tagctgtgctatgaggtttctttga

SEQ ID NO: 304082 - DNA, 25 bp, Probe Sequence
tatctgtcttggtggcccaatggaa

SEQ ID NO: 304083 - DNA, 25 bp, Probe Sequence
tatctctccatgttcagttccaagg

SEQ ID NO: 304084 - DNA, 25 bp, Probe Sequence
tagctgccctattcacttctaaggg

SEQ ID NO: 304085 - DNA, 25 bp, Probe Sequence
tagctgctgccgatacaccagatac

SEQ ID NO: 304086 - DNA, 25 bp, Probe Sequence
tagctgctccagaattcaataaagt

SEQ ID NO: 304087 - DNA, 25 bp, Probe Sequence
tagcagtgtagtctcaattatatct

SEQ ID NO: 304088 - DNA, 25 bp, Probe Sequence
tagcagcatgtacccaaagtgttct

SEQ ID NO: 304089 - DNA, 25 bp, Probe Sequence
taccattatccccaaatcttatttt

SEQ ID NO: 304090 - DNA, 25 bp, Probe Sequence
tagtcatttgcccgtcaagttattt

SEQ ID NO: 304091 - DNA, 25 bp, Probe Sequence
tagactccattccagtaatggtatc

SEQ ID NO: 304092 - DNA, 25 bp, Probe Sequence
tagactccattgtgccttactatat

SEQ ID NO: 304093 - DNA, 25 bp, Probe Sequence
tagaatcttgtctgtcactcactac

SEQ ID NO: 304094 - DNA, 25 bp, Probe Sequence
tagcgtattgtatatacgcctcaca

SEQ ID NO: 304095 - DNA, 25 bp, Probe Sequence
tagactggtatataagcgcctacat

SEQ ID NO: 304096 - DNA, 25 bp, Probe Sequence
tatagatcgttacaaccgaacaggg

SEQ ID NO: 304097 - DNA, 25 bp, Probe Sequence
tagaattgttaccaacctccaaagg

SEQ ID NO: 304098 - DNA, 25 bp, Probe Sequence
tagttttatctctatacccaaaatg

SEQ ID NO: 304099 - DNA, 25 bp, Probe Sequence
tagtgttttatttacctgacaaatg

SEQ ID NO: 304100 - DNA, 25 bp, Probe Sequence
tagctatttttgacctcctgatcag

SEQ ID NO: 304101 - DNA, 25 bp, Probe Sequence
taccagcttttaaccatctgatatc

SEQ ID NO: 304102 - DNA, 25 bp, Probe Sequence
taccagctttttgtttgtttatgtt

SEQ ID NO: 304103 - DNA, 25 bp, Probe Sequence
taccagctttggtacttcatttttt

SEQ ID NO: 304104 - DNA, 25 bp, Probe Sequence
tagccattatggtttttcctttctc

SEQ ID NO: 304105 - DNA, 25 bp, Probe Sequence
tagccaaaagtggctgctctgccta

SEQ ID NO: 304106 - DNA, 25 bp, Probe Sequence
tagccaactgcgacacattcgccta

SEQ ID NO: 304107 - DNA, 25 bp, Probe Sequence
tagccaactgcgacacattcgccta

SEQ ID NO: 304108 - DNA, 25 bp, Probe Sequence
tagccagtcgtgacatcaaccctag

SEQ ID NO: 304109 - DNA, 25 bp, Probe Sequence
taccagccgctgcaaaatcatgcca

SEQ ID NO: 304110 - DNA, 25 bp, Probe Sequence
taccagctgttgtaaactgatggct

SEQ ID NO: 304111 - DNA, 25 bp, Probe Sequence
tagccctgatatgattactatgagc

SEQ ID NO: 304112 - DNA, 25 bp, Probe Sequence
tagccttctcatgattcaaagagct

SEQ ID NO: 304113 - DNA, 25 bp, Probe Sequence
tagactcttatacttcaaacactga

SEQ ID NO: 304114 - DNA, 25 bp, Probe Sequence
tagaccttgaatcataaccctcacc

SEQ ID NO: 304115 - DNA, 25 bp, Probe Sequence
tagacttctgaaatctcaccttcca

SEQ ID NO: 304116 - DNA, 25 bp, Probe Sequence
tagacaacatctatcccctttaagg

SEQ ID NO: 304117 - DNA, 25 bp, Probe Sequence
tatgagacgactctacctttgctga

SEQ ID NO: 304118 - DNA, 25 bp, Probe Sequence
tagaagagactgaccaccataccaa

SEQ ID NO: 304119 - DNA, 25 bp, Probe Sequence
tagaaagctgaaggcccaatgaaat

SEQ ID NO: 304120 - DNA, 25 bp, Probe Sequence
tagccacagtattgctccctaaaat

SEQ ID NO: 304121 - DNA, 25 bp, Probe Sequence
tagccacagtattgctccctaaaat

SEQ ID NO: 304122 - DNA, 25 bp, Probe Sequence
tagcccattagggacactatagaac

SEQ ID NO: 304123 - DNA, 25 bp, Probe Sequence
tagcctctctgggcccaataaaaca

SEQ ID NO: 304124 - DNA, 25 bp, Probe Sequence
tagccttcgcggggcaaaatggagc

SEQ ID NO: 304125 - DNA, 25 bp, Probe Sequence
tagcacttggggagatcaatcctag

SEQ ID NO: 304126 - DNA, 25 bp, Probe Sequence
tagcgggaaggatgaccacgctcac

SEQ ID NO: 304127 - DNA, 25 bp, Probe Sequence
ttgacaggaaggagacccccctgca

SEQ ID NO: 304128 - DNA, 25 bp, Probe Sequence
tagaatgtgggtatagggcccctat

SEQ ID NO: 304129 - DNA, 25 bp, Probe Sequence
tagcctctgtaggttaggctgcccc

SEQ ID NO: 304130 - DNA, 25 bp, Probe Sequence
tagaccatgtaagctggggccgctc

SEQ ID NO: 304131 - DNA, 25 bp, Probe Sequence
tagcccagtgactctgaggatcgcc

SEQ ID NO: 304132 - DNA, 25 bp, Probe Sequence
taccagattcacttctgaattggcc

SEQ ID NO: 304133 - DNA, 25 bp, Probe Sequence
tagcccattctcttctttagagttt

SEQ ID NO: 304134 - DNA, 25 bp, Probe Sequence
tagccattttattattttagtgtat

SEQ ID NO: 304135 - DNA, 25 bp, Probe Sequence
tagccatcattatatgtttaagtct

SEQ ID NO: 304136 - DNA, 25 bp, Probe Sequence
tagccatcattatatgtttaagtct

SEQ ID NO: 304137 - DNA, 25 bp, Probe Sequence
tagccatcattatatgtttaagtct

SEQ ID NO: 304138 - DNA, 25 bp, Probe Sequence
tagcactgattattggttttactta

SEQ ID NO: 304139 - DNA, 25 bp, Probe Sequence
tagcaatttatctgaattctctccc

SEQ ID NO: 304140 - DNA, 25 bp, Probe Sequence
tagccttctgagaaagcttcttccc

SEQ ID NO: 304141 - DNA, 25 bp, Probe Sequence
tagccgcgtgtgacagtcttgcatt

SEQ ID NO: 304142 - DNA, 25 bp, Probe Sequence
tagccgcgtgtgacagtcttgcatt

SEQ ID NO: 304143 - DNA, 25 bp, Probe Sequence
tagccagcgctgatggtatctgcct

SEQ ID NO: 304144 - DNA, 25 bp, Probe Sequence
tagccagacatgatggcatgcacct

SEQ ID NO: 304145 - DNA, 25 bp, Probe Sequence
tagccaggcatggtggcacacacct

SEQ ID NO: 304146 - DNA, 25 bp, Probe Sequence
tagccaggcatggtgccgcataact

SEQ ID NO: 304147 - DNA, 25 bp, Probe Sequence
tagccaggtgtggcggcgtaatccc

SEQ ID NO: 304148 - DNA, 25 bp, Probe Sequence
tagccaggtgggctggtgtaacacc

SEQ ID NO: 304149 - DNA, 25 bp, Probe Sequence
tagcgggcagggttgggctgaatca

SEQ ID NO: 304150 - DNA, 25 bp, Probe Sequence
tagctgggcgtggtgttgggagcct

SEQ ID NO: 304151 - DNA, 25 bp, Probe Sequence
tagccaggcgtggtggtgggtgcct

SEQ ID NO: 304152 - DNA, 25 bp, Probe Sequence
tagccaggcgtggtggcacatgcct

SEQ ID NO: 304153 - DNA, 25 bp, Probe Sequence
tagccaggccagtatggagcacctc

SEQ ID NO: 304154 - DNA, 25 bp, Probe Sequence
tagccatatcctttgcaatgatatt

SEQ ID NO: 304155 - DNA, 25 bp, Probe Sequence
taccaactccttgtgatatctttgc

SEQ ID NO: 304156 - DNA, 25 bp, Probe Sequence
tagccaccctttgaaatgctctctg

SEQ ID NO: 304157 - DNA, 25 bp, Probe Sequence
taccagccactttgcaaaaactgtc

SEQ ID NO: 304158 - DNA, 25 bp, Probe Sequence
taccagcacatccctagatactact

SEQ ID NO: 304159 - DNA, 25 bp, Probe Sequence
taccagaattctcagagacaccatt

SEQ ID NO: 304160 - DNA, 25 bp, Probe Sequence
tagcagcaaatctacaagagaccct

SEQ ID NO: 304161 - DNA, 25 bp, Probe Sequence
tagcctacatcatcatagagtccac

SEQ ID NO: 304162 - DNA, 25 bp, Probe Sequence
tagcctgacagctctagatacagca

SEQ ID NO: 304163 - DNA, 25 bp, Probe Sequence
tagtctgcgcagcgtatgcacacga

SEQ ID NO: 304164 - DNA, 25 bp, Probe Sequence
taggcatggagccagcgtcaactac

SEQ ID NO: 304165 - DNA, 25 bp, Probe Sequence
taggcaaaggcacttacacttccag

SEQ ID NO: 304166 - DNA, 25 bp, Probe Sequence
taccaaaagcagccgaccatctttc

SEQ ID NO: 304167 - DNA, 25 bp, Probe Sequence
taccaaaaacatcacctctagcatc

SEQ ID NO: 304168 - DNA, 25 bp, Probe Sequence
tagccacaaaccaggcgtctcaacc

SEQ ID NO: 304169 - DNA, 25 bp, Probe Sequence
tagccaaaaccaggcgtctcaacct

SEQ ID NO: 304170 - DNA, 25 bp, Probe Sequence
tagtatcagaacggggctctcgact

SEQ ID NO: 304171 - DNA, 25 bp, Probe Sequence
tagttagcacgcatgggcgcctact

SEQ ID NO: 304172 - DNA, 25 bp, Probe Sequence
tagtatattcacagctgggcacaac

SEQ ID NO: 304173 - DNA, 25 bp, Probe Sequence
tagaatttccagcctggtgcgtaca

SEQ ID NO: 304174 - DNA, 25 bp, Probe Sequence
tagaacgccctggctggtatgacca

SEQ ID NO: 304175 - DNA, 25 bp, Probe Sequence
tagagcggtccttggggagacgcgg

SEQ ID NO: 304176 - DNA, 25 bp, Probe Sequence
tagacgagctggcgttggacccagt

SEQ ID NO: 304177 - DNA, 25 bp, Probe Sequence
tagcatctggttcagtgtttccctg

SEQ ID NO: 304178 - DNA, 25 bp, Probe Sequence
tagactgccttggagttctttccga

SEQ ID NO: 304179 - DNA, 25 bp, Probe Sequence
tagaggccataccaatgtctatccc

SEQ ID NO: 304180 - DNA, 25 bp, Probe Sequence
tagatctcctagctgagacttacac

SEQ ID NO: 304181 - DNA, 25 bp, Probe Sequence
tagactactcagctggttaatggca

SEQ ID NO: 304182 - DNA, 25 bp, Probe Sequence
tagccaactatgggtttagttcaac

SEQ ID NO: 304183 - DNA, 25 bp, Probe Sequence
tatgcaccaccgggtaaagttcacg

SEQ ID NO: 304184 - DNA, 25 bp, Probe Sequence
tagatcccccgattacatttctaag

SEQ ID NO: 304185 - DNA, 25 bp, Probe Sequence
tagatcccccgattacatttctaag

SEQ ID NO: 304186 - DNA, 25 bp, Probe Sequence
tagaccctgacgtgaacattgtaag

SEQ ID NO: 304187 - DNA, 25 bp, Probe Sequence
tagcaacctgccttgggacttagaa

SEQ ID NO: 304188 - DNA, 25 bp, Probe Sequence
tagaagccacccaaggaattaggaa

SEQ ID NO: 304189 - DNA, 25 bp, Probe Sequence
tagaagccccagaggaacacggcca

SEQ ID NO: 304190 - DNA, 25 bp, Probe Sequence
taccaacctcagagtatttcggccc

SEQ ID NO: 304191 - DNA, 25 bp, Probe Sequence
tagaaacctccacattcttaggcgg

SEQ ID NO: 304192 - DNA, 25 bp, Probe Sequence
tagaagccgtcaaccatttttcacc

SEQ ID NO: 304193 - DNA, 25 bp, Probe Sequence
tagaagagtgtcactgaattttgtc

SEQ ID NO: 304194 - DNA, 25 bp, Probe Sequence
tagaagcatattcagtggtcttttc

SEQ ID NO: 304195 - DNA, 25 bp, Probe Sequence
tagaaatttgcaagggcttcttttc

SEQ ID NO: 304196 - DNA, 25 bp, Probe Sequence
tagaaagttctttggctccttacca

SEQ ID NO: 304197 - DNA, 25 bp, Probe Sequence
tagaaagttctttggctccttacca

SEQ ID NO: 304198 - DNA, 25 bp, Probe Sequence
tagaagcagttctggtctcaaaacc

SEQ ID NO: 304199 - DNA, 25 bp, Probe Sequence
tagagccacctggtgttgctcacaa

SEQ ID NO: 304200 - DNA, 25 bp, Probe Sequence
tataggacgcagctgttgccatgac

SEQ ID NO: 304201 - DNA, 25 bp, Probe Sequence
tatgctggccacacagttccagagc

SEQ ID NO: 304202 - DNA, 25 bp, Probe Sequence
tagctcagcctcacaggccaaagca

SEQ ID NO: 304203 - DNA, 25 bp, Probe Sequence
tagctgcaatccagcttcccaagaa

SEQ ID NO: 304204 - DNA, 25 bp, Probe Sequence
tagctcaccagcagtgaatccaaaa

SEQ ID NO: 304205 - DNA, 25 bp, Probe Sequence
tatggagcacaatgtaagacaaaag

SEQ ID NO: 304206 - DNA, 25 bp, Probe Sequence
taggagcccaagatctgacggaagc

SEQ ID NO: 304207 - DNA, 25 bp, Probe Sequence
tagaagcccagactttacgactaca

SEQ ID NO: 304208 - DNA, 25 bp, Probe Sequence
tagaagcccagccagcttcttggat

SEQ ID NO: 304209 - DNA, 25 bp, Probe Sequence
tagaagcatcgacttgggctggagt

SEQ ID NO: 304210 - DNA, 25 bp, Probe Sequence
tataaggccagtcggactgcgacat

SEQ ID NO: 304211 - DNA, 25 bp, Probe Sequence
tagatgaggccaggcgcggtggctc

SEQ ID NO: 304212 - DNA, 25 bp, Probe Sequence
tagctgcggccatctggggatattc

SEQ ID NO: 304213 - DNA, 25 bp, Probe Sequence
tagccaggcaaagggggcaatggcg

SEQ ID NO: 304214 - DNA, 25 bp, Probe Sequence
tagccaacaagatggccaggtgtct

SEQ ID NO: 304215 - DNA, 25 bp, Probe Sequence
tagacaatacgatggaacgttctat

SEQ ID NO: 304216 - DNA, 25 bp, Probe Sequence
tagaagcaagaaggcgatagctttt

SEQ ID NO: 304217 - DNA, 25 bp, Probe Sequence
tagcaacaatactggaggcctcttt

SEQ ID NO: 304218 - DNA, 25 bp, Probe Sequence
tagatcagcaaaccggggcctacta

SEQ ID NO: 304219 - DNA, 25 bp, Probe Sequence
tagaataacatgcggtggctcatac

SEQ ID NO: 304220 - DNA, 25 bp, Probe Sequence
tagaggacaatggcgttcagccacc

SEQ ID NO: 304221 - DNA, 25 bp, Probe Sequence
taggtacaatgtcgtgagggcgcca

SEQ ID NO: 304222 - DNA, 25 bp, Probe Sequence
ttttacaagccgcaaaggcagcagg

SEQ ID NO: 304223 - DNA, 25 bp, Probe Sequence
tttcttacccggtctgagtacgaca

SEQ ID NO: 304224 - DNA, 25 bp, Probe Sequence
tttcgttccgggtcgatgttcgatg

SEQ ID NO: 304225 - DNA, 25 bp, Probe Sequence
tagctgcgttcggggaaggttgggg

SEQ ID NO: 304226 - DNA, 25 bp, Probe Sequence
tatgataggtcggggaagagggggc

SEQ ID NO: 304227 - DNA, 25 bp, Probe Sequence
tagaagagtcccatgaaaggtggct

SEQ ID NO: 304228 - DNA, 25 bp, Probe Sequence
tagaaactccaatgaaagacactgt

SEQ ID NO: 304229 - DNA, 25 bp, Probe Sequence
taccaagcccagagatacagatgtc

SEQ ID NO: 304230 - DNA, 25 bp, Probe Sequence
tattaaaccgcccaagcagtgtgcc

SEQ ID NO: 304231 - DNA, 25 bp, Probe Sequence
tataaacccctcagacagtttgctt

SEQ ID NO: 304232 - DNA, 25 bp, Probe Sequence
tatagacacccccaaataggtgggt

SEQ ID NO: 304233 - DNA, 25 bp, Probe Sequence
tatgaagcctcctcaagggggtcgt

SEQ ID NO: 304234 - DNA, 25 bp, Probe Sequence
tagacctgctccccagaggaggggc

SEQ ID NO: 304235 - DNA, 25 bp, Probe Sequence
ttacacttccagcgaggagagctcg

SEQ ID NO: 304236 - DNA, 25 bp, Probe Sequence
tagaagtacacacgggggaccgaat

SEQ ID NO: 304237 - DNA, 25 bp, Probe Sequence
tagcaagtatcaagggagaggtacc

SEQ ID NO: 304238 - DNA, 25 bp, Probe Sequence
tagccaggtgacctggacaagtcac

SEQ ID NO: 304239 - DNA, 25 bp, Probe Sequence
tagaagggacggctcagtggctgca

SEQ ID NO: 304240 - DNA, 25 bp, Probe Sequence
tagcagcaggggccggtacaggata

SEQ ID NO: 304241 - DNA, 25 bp, Probe Sequence
tagaaggcgggctgtactgatgaca

SEQ ID NO: 304242 - DNA, 25 bp, Probe Sequence
tagaaatcaaggtgttcaatacagt

SEQ ID NO: 304243 - DNA, 25 bp, Probe Sequence
tagaaacctgcgctttaacacgtct

SEQ ID NO: 304244 - DNA, 25 bp, Probe Sequence
tagtagagacggggtttcaccgtgt

SEQ ID NO: 304245 - DNA, 25 bp, Probe Sequence
taggggccagaggggcttacacgat

SEQ ID NO: 304246 - DNA, 25 bp, Probe Sequence
taggggcagtcctgccttacacata

SEQ ID NO: 304247 - DNA, 25 bp, Probe Sequence
tagagaaggccctccatgtgacttc

SEQ ID NO: 304248 - DNA, 25 bp, Probe Sequence
tagagaagcccgatcttggattcct

SEQ ID NO: 304249 - DNA, 25 bp, Probe Sequence
tagaaaactcgttttctgctccctt

SEQ ID NO: 304250 - DNA, 25 bp, Probe Sequence
tataaaagtgccaaacctgccctct

SEQ ID NO: 304251 - DNA, 25 bp, Probe Sequence
tattaaatgtgacgaactgcccccc

SEQ ID NO: 304252 - DNA, 25 bp, Probe Sequence
tagtaactatgactgacgtccccag

SEQ ID NO: 304253 - DNA, 25 bp, Probe Sequence
tagtacttagcctacctagaccagc

SEQ ID NO: 304254 - DNA, 25 bp, Probe Sequence
tagtacaataaaacctcatgacctc

SEQ ID NO: 304255 - DNA, 25 bp, Probe Sequence
tagtagaataaatcctgcaccagca

SEQ ID NO: 304256 - DNA, 25 bp, Probe Sequence
tagctgggattatagcgtgcgccac

SEQ ID NO: 304257 - DNA, 25 bp, Probe Sequence
tagctgggattatgggcgcccacca

SEQ ID NO: 304258 - DNA, 25 bp, Probe Sequence
tagctgggataacaggcgcccacca

SEQ ID NO: 304259 - DNA, 25 bp, Probe Sequence
tagctgggattacaggtgcccacca

SEQ ID NO: 304260 - DNA, 25 bp, Probe Sequence
tagctgggactacaggcatgcacca

SEQ ID NO: 304261 - DNA, 25 bp, Probe Sequence
tagctgggactacaggcacgagcca

SEQ ID NO: 304262 - DNA, 25 bp, Probe Sequence
tagctaggactacaggcacacgcca

SEQ ID NO: 304263 - DNA, 25 bp, Probe Sequence
tagcccaggctctgagagccagccc

SEQ ID NO: 304264 - DNA, 25 bp, Probe Sequence
tagcctagtctaaggatgccctcca

SEQ ID NO: 304265 - DNA, 25 bp, Probe Sequence
tagctcggtcttttagctcaatccc

SEQ ID NO: 304266 - DNA, 25 bp, Probe Sequence
tagtcgtattctgctactcgaacag

SEQ ID NO: 304267 - DNA, 25 bp, Probe Sequence
tagaagtttctttacctgctgacag

SEQ ID NO: 304268 - DNA, 25 bp, Probe Sequence
tagagaatttccttcctactgagaa

SEQ ID NO: 304269 - DNA, 25 bp, Probe Sequence
tatcagagacttgtccttaccacaa

SEQ ID NO: 304270 - DNA, 25 bp, Probe Sequence
tagcaagaagtaccctgtggcccat

SEQ ID NO: 304271 - DNA, 25 bp, Probe Sequence
tagactagagaaaccgtcctctttt

SEQ ID NO: 304272 - DNA, 25 bp, Probe Sequence
tagactagagaaaccgtcctctttt

SEQ ID NO: 304273 - DNA, 25 bp, Probe Sequence
tagcccaaagtcagtgtctctgttt

SEQ ID NO: 304274 - DNA, 25 bp, Probe Sequence
tagccccaagatgcgtgtatctctc

SEQ ID NO: 304275 - DNA, 25 bp, Probe Sequence
tagtttcaagtgggcgactctgctc

SEQ ID NO: 304276 - DNA, 25 bp, Probe Sequence
tagtttgcacgtaaggattcgtagg

SEQ ID NO: 304277 - DNA, 25 bp, Probe Sequence
tagaatagacagggagaactcgtcg

SEQ ID NO: 304278 - DNA, 25 bp, Probe Sequence
tagatctgcagaaggggacaccctg

SEQ ID NO: 304279 - DNA, 25 bp, Probe Sequence
tagctctgagccagttcagtacctg

SEQ ID NO: 304280 - DNA, 25 bp, Probe Sequence
tagctctgagccagttcagtacctg

SEQ ID NO: 304281 - DNA, 25 bp, Probe Sequence
tagttaccaggtttgtaacttagct

SEQ ID NO: 304282 - DNA, 25 bp, Probe Sequence
tagttcaacttttttagaatccaca

SEQ ID NO: 304283 - DNA, 25 bp, Probe Sequence
tagcttcacacatgaaattgagaaa

SEQ ID NO: 304284 - DNA, 25 bp, Probe Sequence
tagcttcaaatagcaattcacatga

SEQ ID NO: 304285 - DNA, 25 bp, Probe Sequence
tagccttaatacccttcacattact

SEQ ID NO: 304286 - DNA, 25 bp, Probe Sequence
tagacttaatcccctaaagttctgc

SEQ ID NO: 304287 - DNA, 25 bp, Probe Sequence
tagaactttgactctaagagtttct

SEQ ID NO: 304288 - DNA, 25 bp, Probe Sequence
tagcggtttgactcgacggggattt

SEQ ID NO: 304289 - DNA, 25 bp, Probe Sequence
tagcggtttgactcacggggatttc

SEQ ID NO: 304290 - DNA, 25 bp, Probe Sequence
tagcggtttgactcacggggatttc

SEQ ID NO: 304291 - DNA, 25 bp, Probe Sequence
tagcggtttgactcacggggatttc

SEQ ID NO: 304292 - DNA, 25 bp, Probe Sequence
tagcggtttgactcacggggatttc

SEQ ID NO: 304293 - DNA, 25 bp, Probe Sequence
tagcggtttgactcacggggatttc

SEQ ID NO: 304294 - DNA, 25 bp, Probe Sequence
tatgggagttggtgaaggggctttc

SEQ ID NO: 304295 - DNA, 25 bp, Probe Sequence
tatggtagggggagagggacctgcc

SEQ ID NO: 304296 - DNA, 25 bp, Probe Sequence
taggatggggggcatggcccctggc

SEQ ID NO: 304297 - DNA, 25 bp, Probe Sequence
tagagaagtaaacatcacacccaac

SEQ ID NO: 304298 - DNA, 25 bp, Probe Sequence
tagagaactaaatcacagtactcaa

SEQ ID NO: 304299 - DNA, 25 bp, Probe Sequence
tagcagaaactaactccgtaatgaa

SEQ ID NO: 304300 - DNA, 25 bp, Probe Sequence
tagcagtaagctttcccattataat

SEQ ID NO: 304301 - DNA, 25 bp, Probe Sequence
tagccatagatcattcctttcaact

SEQ ID NO: 304302 - DNA, 25 bp, Probe Sequence
tagaaagaatccccattccagcagt

SEQ ID NO: 304303 - DNA, 25 bp, Probe Sequence
tagcaaagaaacccattcatgtgta

SEQ ID NO: 304304 - DNA, 25 bp, Probe Sequence
tagcctggaaagacacctctgtctg

SEQ ID NO: 304305 - DNA, 25 bp, Probe Sequence
tagaagcgagggcaccagcagttgt

SEQ ID NO: 304306 - DNA, 25 bp, Probe Sequence
tagagagctgcaaaccaccaggggg

SEQ ID NO: 304307 - DNA, 25 bp, Probe Sequence
tagcacagattatataccagggtta

SEQ ID NO: 304308 - DNA, 25 bp, Probe Sequence
tatcacagttagatcaccatgctgc

SEQ ID NO: 304309 - DNA, 25 bp, Probe Sequence
tagctgagttcatttcatctctccc

SEQ ID NO: 304310 - DNA, 25 bp, Probe Sequence
tagcatgatagtcatttgcccgtca

SEQ ID NO: 304311 - DNA, 25 bp, Probe Sequence
tagctcatggctagcatatgggcac

SEQ ID NO: 304312 - DNA, 25 bp, Probe Sequence
tagcacagcacaagctcaggcagct

SEQ ID NO: 304313 - DNA, 25 bp, Probe Sequence
tagatgcagcatccagctcttgcag

SEQ ID NO: 304314 - DNA, 25 bp, Probe Sequence
tagataatccagtgtcaggaagaca

SEQ ID NO: 304315 - DNA, 25 bp, Probe Sequence
tagaccatacatacgatcagcaaaa

SEQ ID NO: 304316 - DNA, 25 bp, Probe Sequence
tagaaatgatgcttctgctcaggaa

SEQ ID NO: 304317 - DNA, 25 bp, Probe Sequence
tagcatacactgtgtgccaggaggt

SEQ ID NO: 304318 - DNA, 25 bp, Probe Sequence
tagcattcctgtattctgggggcca

SEQ ID NO: 304319 - DNA, 25 bp, Probe Sequence
tagcagccactgtcatttctcagtg

SEQ ID NO: 304320 - DNA, 25 bp, Probe Sequence
tagcagttctggttcctctgatgga

SEQ ID NO: 304321 - DNA, 25 bp, Probe Sequence
tagcagcttctctatccaggatgat

SEQ ID NO: 304322 - DNA, 25 bp, Probe Sequence
tagcactttcattgccagtgtcttt

SEQ ID NO: 304323 - DNA, 25 bp, Probe Sequence
tagcacatgttcagtcattcagtct

SEQ ID NO: 304324 - DNA, 25 bp, Probe Sequence
tagcagctttgtcgtcatgtagcac

SEQ ID NO: 304325 - DNA, 25 bp, Probe Sequence
tagcagctgctgctgttgctgcgac

SEQ ID NO: 304326 - DNA, 25 bp, Probe Sequence
tagactgtggtattcatgcaagaga

SEQ ID NO: 304327 - DNA, 25 bp, Probe Sequence
tagactgtgatattattacataatg

SEQ ID NO: 304328 - DNA, 25 bp, Probe Sequence
tagcccctagattgctcaatcaatc

SEQ ID NO: 304329 - DNA, 25 bp, Probe Sequence
tagctctggtagtctgccaattctc

SEQ ID NO: 304330 - DNA, 25 bp, Probe Sequence
tatgattgtgtatgtgccgctacca

SEQ ID NO: 304331 - DNA, 25 bp, Probe Sequence
tagttttcaacttcagtactcaaat

SEQ ID NO: 304332 - DNA, 25 bp, Probe Sequence
tagcatatttcatccaagtgcaata

SEQ ID NO: 304333 - DNA, 25 bp, Probe Sequence
tagcatatttcatccaagtgcaata

SEQ ID NO: 304334 - DNA, 25 bp, Probe Sequence
tagctgtttcagtcaccagtgaaga

SEQ ID NO: 304335 - DNA, 25 bp, Probe Sequence
tagctgtatctgtatacctgtaata

SEQ ID NO: 304336 - DNA, 25 bp, Probe Sequence
tagcctacacttctctgcatgaata

SEQ ID NO: 304337 - DNA, 25 bp, Probe Sequence
tagctctaaatgctagctctaaatt

SEQ ID NO: 304338 - DNA, 25 bp, Probe Sequence
tagttaacatgcctggcccatcttc

SEQ ID NO: 304339 - DNA, 25 bp, Probe Sequence
tatgattccacccatggcaaattcc

SEQ ID NO: 304340 - DNA, 25 bp, Probe Sequence
tagactccacacagtcagcaatgtc

SEQ ID NO: 304341 - DNA, 25 bp, Probe Sequence
tagacacacgacatgcaagagttgc

SEQ ID NO: 304342 - DNA, 25 bp, Probe Sequence
tagcacccgagattctatgtgtaga

SEQ ID NO: 304343 - DNA, 25 bp, Probe Sequence
tagcctgggaagttctgttgctgca

SEQ ID NO: 304344 - DNA, 25 bp, Probe Sequence
tagtcgggcatgagtctgtttccca

SEQ ID NO: 304345 - DNA, 25 bp, Probe Sequence
tagacaaggacggccattttcacca

SEQ ID NO: 304346 - DNA, 25 bp, Probe Sequence
tagaaaaccctggtatttagctcag

SEQ ID NO: 304347 - DNA, 25 bp, Probe Sequence
tagaaaggacttttatttgagtgca

SEQ ID NO: 304348 - DNA, 25 bp, Probe Sequence
tagaaagccctctttactctgatta

SEQ ID NO: 304349 - DNA, 25 bp, Probe Sequence
tagaaacctttatccctgcttatct

SEQ ID NO: 304350 - DNA, 25 bp, Probe Sequence
tagaaagttttgagcacttgctata

SEQ ID NO: 304351 - DNA, 25 bp, Probe Sequence
tagaaagttttggacaggcgctgta

SEQ ID NO: 304352 - DNA, 25 bp, Probe Sequence
tagaaaagtactacacgcgcctggg

SEQ ID NO: 304353 - DNA, 25 bp, Probe Sequence
tagatgagaagtcttcacggggaga

SEQ ID NO: 304354 - DNA, 25 bp, Probe Sequence
tagaaattgatcttccctgggggac

SEQ ID NO: 304355 - DNA, 25 bp, Probe Sequence
tagagaattctgttttggggggaca

SEQ ID NO: 304356 - DNA, 25 bp, Probe Sequence
tagatattttttttccatggggtca

SEQ ID NO: 304357 - DNA, 25 bp, Probe Sequence
tagatattttttttccatggggtca

SEQ ID NO: 304358 - DNA, 25 bp, Probe Sequence
tagatattttttttccatggggtca

SEQ ID NO: 304359 - DNA, 25 bp, Probe Sequence
tagttaatcttttgtctcttgcggt

SEQ ID NO: 304360 - DNA, 25 bp, Probe Sequence
tagctctgacactttcagttctatg

SEQ ID NO: 304361 - DNA, 25 bp, Probe Sequence
tagcctgtgactctgtgatgtatca

SEQ ID NO: 304362 - DNA, 25 bp, Probe Sequence
tagcctcgatctttttgattaagag

SEQ ID NO: 304363 - DNA, 25 bp, Probe Sequence
tagctcgacctagtttctgtgaaga

SEQ ID NO: 304364 - DNA, 25 bp, Probe Sequence
tagtccaccagtgattctgtaaaga

SEQ ID NO: 304365 - DNA, 25 bp, Probe Sequence
tagatctcagacatgctttctttac

SEQ ID NO: 304366 - DNA, 25 bp, Probe Sequence
tagcacacagattcactttaatttc

SEQ ID NO: 304367 - DNA, 25 bp, Probe Sequence
tagacagcacatttctagtcaaaaa

SEQ ID NO: 304368 - DNA, 25 bp, Probe Sequence
taggcagcagcttttaatacagggt

SEQ ID NO: 304369 - DNA, 25 bp, Probe Sequence
tagagtcacattttgaatcaagatg

SEQ ID NO: 304370 - DNA, 25 bp, Probe Sequence
tagacctcagtactgaatcaggacc

SEQ ID NO: 304371 - DNA, 25 bp, Probe Sequence
tagaccactctgtcaaactgtcacc

SEQ ID NO: 304372 - DNA, 25 bp, Probe Sequence
tagcaccattcaccacagcaggata

SEQ ID NO: 304373 - DNA, 25 bp, Probe Sequence
tagcaccattcaccacagcaggata

SEQ ID NO: 304374 - DNA, 25 bp, Probe Sequence
tagcaggcactggcatagcacggta

SEQ ID NO: 304375 - DNA, 25 bp, Probe Sequence
tagcatggcatgcagcacacacggc

SEQ ID NO: 304376 - DNA, 25 bp, Probe Sequence
tagcagagcagctccctcgctgcga

SEQ ID NO: 304377 - DNA, 25 bp, Probe Sequence
tagagacagtcccctcgatagagag

SEQ ID NO: 304378 - DNA, 25 bp, Probe Sequence
tagaacttccatacactgctggtgg

SEQ ID NO: 304379 - DNA, 25 bp, Probe Sequence
tagctacatctggtaccttggctgg

SEQ ID NO: 304380 - DNA, 25 bp, Probe Sequence
tagctaggcatggtagcgcctgcct

SEQ ID NO: 304381 - DNA, 25 bp, Probe Sequence
tagatatctagagtagagttgctag

SEQ ID NO: 304382 - DNA, 25 bp, Probe Sequence
tagcacttgagactacagctttgga

SEQ ID NO: 304383 - DNA, 25 bp, Probe Sequence
tagctgctagcttgctaattttgga

SEQ ID NO: 304384 - DNA, 25 bp, Probe Sequence
tagcagatagtctcatatttaggaa

SEQ ID NO: 304385 - DNA, 25 bp, Probe Sequence
tagcagatacttttcttctagaagc

SEQ ID NO: 304386 - DNA, 25 bp, Probe Sequence
tagattcactgatgtccttcagaca

SEQ ID NO: 304387 - DNA, 25 bp, Probe Sequence
tagattagcagaacgctcttgaaac

SEQ ID NO: 304388 - DNA, 25 bp, Probe Sequence
tagttacaagtctttggaaactctt

SEQ ID NO: 304389 - DNA, 25 bp, Probe Sequence
tagaaagtagtggtaataattcctt

SEQ ID NO: 304390 - DNA, 25 bp, Probe Sequence
tagaaaaagctgactccatttttgt

SEQ ID NO: 304391 - DNA, 25 bp, Probe Sequence
tagaaaacaatgcctgccttttgcc

SEQ ID NO: 304392 - DNA, 25 bp, Probe Sequence
tagaccaaaagcctgcatttgtacc

SEQ ID NO: 304393 - DNA, 25 bp, Probe Sequence
tagagcactagagctcgctcgtgta

SEQ ID NO: 304394 - DNA, 25 bp, Probe Sequence
tagtcctgaaggcccttgataagaa

SEQ ID NO: 304395 - DNA, 25 bp, Probe Sequence
tagtcgatagagcggctttagtata

SEQ ID NO: 304396 - DNA, 25 bp, Probe Sequence
tagttttgggtgtctttacttcaca

SEQ ID NO: 304397 - DNA, 25 bp, Probe Sequence
tagtcttgggctatctattactctc

SEQ ID NO: 304398 - DNA, 25 bp, Probe Sequence
tagttgtgtcaccattcttgttgct

SEQ ID NO: 304399 - DNA, 25 bp, Probe Sequence
tagattttagtctcgtgtgacatga

SEQ ID NO: 304400 - DNA, 25 bp, Probe Sequence
tagctgtttaactttgtaagatgca

SEQ ID NO: 304401 - DNA, 25 bp, Probe Sequence
tagttttcaagcagttaagtcatag

SEQ ID NO: 304402 - DNA, 25 bp, Probe Sequence
tagtttaacgcattgctaaagacaa

SEQ ID NO: 304403 - DNA, 25 bp, Probe Sequence
tagtttagacaactggtaagccagc

SEQ ID NO: 304404 - DNA, 25 bp, Probe Sequence
tagaacttgaaactggccacccagc

SEQ ID NO: 304405 - DNA, 25 bp, Probe Sequence
tagatcatctaatgttgagcccccg

SEQ ID NO: 304406 - DNA, 25 bp, Probe Sequence
tagaagctgaatagtgacgccctcc

SEQ ID NO: 304407 - DNA, 25 bp, Probe Sequence
tagaatataatggctatccccctct

SEQ ID NO: 304408 - DNA, 25 bp, Probe Sequence
tagagcaaactggtacagccacttt

SEQ ID NO: 304409 - DNA, 25 bp, Probe Sequence
tagacaaagttgtgacccattttac

SEQ ID NO: 304410 - DNA, 25 bp, Probe Sequence
taggaaatttggcccccacatgtaa

SEQ ID NO: 304411 - DNA, 25 bp, Probe Sequence
tagttaagtgggatcgagacatgta

SEQ ID NO: 304412 - DNA, 25 bp, Probe Sequence
tagaataagtgggagcttcggcgcc

SEQ ID NO: 304413 - DNA, 25 bp, Probe Sequence
tagagatttggggggctctggcccc

SEQ ID NO: 304414 - DNA, 25 bp, Probe Sequence
tagcttttgggagtgccctgtgttc

SEQ ID NO: 304415 - DNA, 25 bp, Probe Sequence
tagtttctgacatgtgcctatgcgt

SEQ ID NO: 304416 - DNA, 25 bp, Probe Sequence
tagtttgtatatcatccttggctcc

SEQ ID NO: 304417 - DNA, 25 bp, Probe Sequence
tagtttggtattttcctagcttcct

SEQ ID NO: 304418 - DNA, 25 bp, Probe Sequence
tagtgagggttgacttccccattcc

SEQ ID NO: 304419 - DNA, 25 bp, Probe Sequence
tagaaggggaactccacactgtctc

SEQ ID NO: 304420 - DNA, 25 bp, Probe Sequence
tagaaggacttagacctcacatatt

SEQ ID NO: 304421 - DNA, 25 bp, Probe Sequence
taggaaacctacccttcagaagtag

SEQ ID NO: 304422 - DNA, 25 bp, Probe Sequence
taggaaactgtcccctaggggctgg

SEQ ID NO: 304423 - DNA, 25 bp, Probe Sequence
tagagaaccagtgcacctcaggtgc

SEQ ID NO: 304424 - DNA, 25 bp, Probe Sequence
taggaagctcctgggcttagctgtg

SEQ ID NO: 304425 - DNA, 25 bp, Probe Sequence
taggaagctcctgggcttagctgtg

SEQ ID NO: 304426 - DNA, 25 bp, Probe Sequence
tattgagaccatcctggctaacatg

SEQ ID NO: 304427 - DNA, 25 bp, Probe Sequence
tagctggcaccacaggcatttgcta

SEQ ID NO: 304428 - DNA, 25 bp, Probe Sequence
tagttcccagcctgatttctgaaag

SEQ ID NO: 304429 - DNA, 25 bp, Probe Sequence
tagctcatccctgaatatttgctga

SEQ ID NO: 304430 - DNA, 25 bp, Probe Sequence
tagctacacctggaagtttcagaac

SEQ ID NO: 304431 - DNA, 25 bp, Probe Sequence
tagattaccaggatgtcccagacac

SEQ ID NO: 304432 - DNA, 25 bp, Probe Sequence
tataaaccggtcgcctctggcagcg

SEQ ID NO: 304433 - DNA, 25 bp, Probe Sequence
tataaaatgcgtgaacccgggaggc

SEQ ID NO: 304434 - DNA, 25 bp, Probe Sequence
tagaaatgggggtggcaagtggggt

SEQ ID NO: 304435 - DNA, 25 bp, Probe Sequence
tagctaatggggtttggcaatggga

SEQ ID NO: 304436 - DNA, 25 bp, Probe Sequence
tagtaaggggtcttcccatgttggc

SEQ ID NO: 304437 - DNA, 25 bp, Probe Sequence
tagagacggggtttcaccatgctgg

SEQ ID NO: 304438 - DNA, 25 bp, Probe Sequence
tagagacccaggagtgcctgattgt

SEQ ID NO: 304439 - DNA, 25 bp, Probe Sequence
taggacaccagtgggtcctcactgc

SEQ ID NO: 304440 - DNA, 25 bp, Probe Sequence
tagatgaactcaccgggagctaaga

SEQ ID NO: 304441 - DNA, 25 bp, Probe Sequence
tagatatcccccaagctgagggaag

SEQ ID NO: 304442 - DNA, 25 bp, Probe Sequence
tagacagacccctgcaggggacact

SEQ ID NO: 304443 - DNA, 25 bp, Probe Sequence
tagcaaacagcggcacgatggggcc

SEQ ID NO: 304444 - DNA, 25 bp, Probe Sequence
tagagaacgcagccctagagcctgc

SEQ ID NO: 304445 - DNA, 25 bp, Probe Sequence
tagagtgactcagaccacacagcca

SEQ ID NO: 304446 - DNA, 25 bp, Probe Sequence
tagctgtagtcaagcctcaccagcc

SEQ ID NO: 304447 - DNA, 25 bp, Probe Sequence
tagcgctactcaagcctgcaaaacc

SEQ ID NO: 304448 - DNA, 25 bp, Probe Sequence
tagagctaccagtctatgatattac

SEQ ID NO: 304449 - DNA, 25 bp, Probe Sequence
tagagaaatatgctatgagattgtg

SEQ ID NO: 304450 - DNA, 25 bp, Probe Sequence
tagatcagaagtactcaaattgggg

SEQ ID NO: 304451 - DNA, 25 bp, Probe Sequence
tagaacaagtttcatttagtgctga

SEQ ID NO: 304452 - DNA, 25 bp, Probe Sequence
tagctaaacttcgcattgaacgaga

SEQ ID NO: 304453 - DNA, 25 bp, Probe Sequence
tagctattaatttcatcttaacaga

SEQ ID NO: 304454 - DNA, 25 bp, Probe Sequence
tagcatgtctatccttctttgaaag

SEQ ID NO: 304455 - DNA, 25 bp, Probe Sequence
tagcttcttgtcaccttaaactaaa

SEQ ID NO: 304456 - DNA, 25 bp, Probe Sequence
tagcttctggtcagcactgattaaa

SEQ ID NO: 304457 - DNA, 25 bp, Probe Sequence
tagtcttggcacagtctcatgttaa

SEQ ID NO: 304458 - DNA, 25 bp, Probe Sequence
tagatttgaagtgtccttgtagata

SEQ ID NO: 304459 - DNA, 25 bp, Probe Sequence
tagtgttcaacaggccctttctgat

SEQ ID NO: 304460 - DNA, 25 bp, Probe Sequence
tagtgcttcaaagctcctgggacac

SEQ ID NO: 304461 - DNA, 25 bp, Probe Sequence
tagtgtccttaggtcaaggccctca

SEQ ID NO: 304462 - DNA, 25 bp, Probe Sequence
tagcttcctgtagccaatcaggtta

SEQ ID NO: 304463 - DNA, 25 bp, Probe Sequence
tagttcctgatagatctccggttct

SEQ ID NO: 304464 - DNA, 25 bp, Probe Sequence
tagttcgtgagtgatggggtgtatt

SEQ ID NO: 304465 - DNA, 25 bp, Probe Sequence
tagttgttggttttgcgaggaaaag

SEQ ID NO: 304466 - DNA, 25 bp, Probe Sequence
tagttttgctttctcgtggataata

SEQ ID NO: 304467 - DNA, 25 bp, Probe Sequence
taggtttgagttctggctgagccac

SEQ ID NO: 304468 - DNA, 25 bp, Probe Sequence
taggtttgagttctggctgagccac

SEQ ID NO: 304469 - DNA, 25 bp, Probe Sequence
tagttctaagtcattgttcccatcc

SEQ ID NO: 304470 - DNA, 25 bp, Probe Sequence
tagatgttaagtgtctttatcaccc

SEQ ID NO: 304471 - DNA, 25 bp, Probe Sequence
ttcagattaagttttggttcaagtt

SEQ ID NO: 304472 - DNA, 25 bp, Probe Sequence
ttcagagtaagatttcaggtgacaa

SEQ ID NO: 304473 - DNA, 25 bp, Probe Sequence
tataagtgtaggtgggtatcaaaac

SEQ ID NO: 304474 - DNA, 25 bp, Probe Sequence
tatagcgttggatttgaggttgtaa

SEQ ID NO: 304475 - DNA, 25 bp, Probe Sequence
tatgggtgggtctaatttggtaacg

SEQ ID NO: 304476 - DNA, 25 bp, Probe Sequence
tagtgggggcgtttttgcagtaagg

SEQ ID NO: 304477 - DNA, 25 bp, Probe Sequence
taggggtgacagatctcttcaacca

SEQ ID NO: 304478 - DNA, 25 bp, Probe Sequence
tagggaaggagtttccatccaccaa

SEQ ID NO: 304479 - DNA, 25 bp, Probe Sequence
taggaacagtagtattcaataaaca

SEQ ID NO: 304480 - DNA, 25 bp, Probe Sequence
taggaaggtggagtatagaagaata

SEQ ID NO: 304481 - DNA, 25 bp, Probe Sequence
tagtgagacctgtagctacaaaaag

SEQ ID NO: 304482 - DNA, 25 bp, Probe Sequence
tagtgagaccttgtctctacaaaaa

SEQ ID NO: 304483 - DNA, 25 bp, Probe Sequence
tagagcatgacagcatcgattctca

SEQ ID NO: 304484 - DNA, 25 bp, Probe Sequence
tagaggagaccccatttcattcctg

SEQ ID NO: 304485 - DNA, 25 bp, Probe Sequence
tagaggagaccccatttcattcctg

SEQ ID NO: 304486 - DNA, 25 bp, Probe Sequence
taggaaaatgccctttggtcactgt

SEQ ID NO: 304487 - DNA, 25 bp, Probe Sequence
taggaacctaccagttggccatgat

SEQ ID NO: 304488 - DNA, 25 bp, Probe Sequence
tagcgaagcgtacctggtgggtctg

SEQ ID NO: 304489 - DNA, 25 bp, Probe Sequence
taggaagagttcttggtggtgtccc

SEQ ID NO: 304490 - DNA, 25 bp, Probe Sequence
tagtggagagcatcgcggggttcct

SEQ ID NO: 304491 - DNA, 25 bp, Probe Sequence
taggaacagaccgggaccttgtctc

SEQ ID NO: 304492 - DNA, 25 bp, Probe Sequence
tagtaacagtgcagattccacgttc

SEQ ID NO: 304493 - DNA, 25 bp, Probe Sequence
tagctagatttcatcattccacact

SEQ ID NO: 304494 - DNA, 25 bp, Probe Sequence
tagctgagacttacacgttcaactt

SEQ ID NO: 304495 - DNA, 25 bp, Probe Sequence
tagctatgagctgatcattgctcct

SEQ ID NO: 304496 - DNA, 25 bp, Probe Sequence
tagcttggtttattctccttacttg

SEQ ID NO: 304497 - DNA, 25 bp, Probe Sequence
tagctatgtgctttattgttttatc

SEQ ID NO: 304498 - DNA, 25 bp, Probe Sequence
tagctaggtccaatgttaaatacat

SEQ ID NO: 304499 - DNA, 25 bp, Probe Sequence
tagcatatgggcactttacagaatc

SEQ ID NO: 304500 - DNA, 25 bp, Probe Sequence
tagcgtggccaagttctatccaccc

SEQ ID NO: 304501 - DNA, 25 bp, Probe Sequence
taggtcccaattctactgcaaatag

SEQ ID NO: 304502 - DNA, 25 bp, Probe Sequence
ttggccccaattcaaccaggcggaa

SEQ ID NO: 304503 - DNA, 25 bp, Probe Sequence
tatgggcaccaaggtaagccggcgc

SEQ ID NO: 304504 - DNA, 25 bp, Probe Sequence
tagattaccaaattagcccaggcgt

SEQ ID NO: 304505 - DNA, 25 bp, Probe Sequence
tagctcttttattctaccacggctg

SEQ ID NO: 304506 - DNA, 25 bp, Probe Sequence
tagcttttactaattcgcatctgga

SEQ ID NO: 304507 - DNA, 25 bp, Probe Sequence
tagcttcttactctgttttgttgtt

SEQ ID NO: 304508 - DNA, 25 bp, Probe Sequence
tagttctaactgctaaatttgttct

SEQ ID NO: 304509 - DNA, 25 bp, Probe Sequence
tatgttaaagatgtagtttctagtt

SEQ ID NO: 304510 - DNA, 25 bp, Probe Sequence
tagttcacggtctcagtagtctaga

SEQ ID NO: 304511 - DNA, 25 bp, Probe Sequence
taggtagggtgcatgcagcttatta

SEQ ID NO: 304512 - DNA, 25 bp, Probe Sequence
taggtatgtggtatcaggtaagcag

SEQ ID NO: 304513 - DNA, 25 bp, Probe Sequence
tatggtgttggtagtaataagtgca

SEQ ID NO: 304514 - DNA, 25 bp, Probe Sequence
tagggaaggcatagtggaatacccc

SEQ ID NO: 304515 - DNA, 25 bp, Probe Sequence
tagcagggagacttgggtgaccccc

SEQ ID NO: 304516 - DNA, 25 bp, Probe Sequence
tagcaagaacactgcgtggccctac

SEQ ID NO: 304517 - DNA, 25 bp, Probe Sequence
tagagggacagcacttctccctgac

SEQ ID NO: 304518 - DNA, 25 bp, Probe Sequence
tagagggatacatcgcctaccgaca

SEQ ID NO: 304519 - DNA, 25 bp, Probe Sequence
tagatgcggacattcacaccaacac

SEQ ID NO: 304520 - DNA, 25 bp, Probe Sequence
tagaggcagacatcactgccaactt

SEQ ID NO: 304521 - DNA, 25 bp, Probe Sequence
tagtcaagaagatcatccaagatat

SEQ ID NO: 304522 - DNA, 25 bp, Probe Sequence
tagtgttgtaacctgctgcacggat

SEQ ID NO: 304523 - DNA, 25 bp, Probe Sequence
tagtgtagtactgttggctcgatat

SEQ ID NO: 304524 - DNA, 25 bp, Probe Sequence
tagtgttggactgttgccacagtgc

SEQ ID NO: 304525 - DNA, 25 bp, Probe Sequence
tagggatggactatggcccagtccc

SEQ ID NO: 304526 - DNA, 25 bp, Probe Sequence
tagacttcgactcaggatccagtcc

SEQ ID NO: 304527 - DNA, 25 bp, Probe Sequence
tagatctccgcaccaagaatgcctt

SEQ ID NO: 304528 - DNA, 25 bp, Probe Sequence
tagctatcacagcaaaggattccta

SEQ ID NO: 304529 - DNA, 25 bp, Probe Sequence
tagttacaacaattggtctcctcca

SEQ ID NO: 304530 - DNA, 25 bp, Probe Sequence
tagttgatgaaatagcttccctaaa

SEQ ID NO: 304531 - DNA, 25 bp, Probe Sequence
tagataaaatagacaatttcctaaa

SEQ ID NO: 304532 - DNA, 25 bp, Probe Sequence
tagaagaatactaccatttctttaa

SEQ ID NO: 304533 - DNA, 25 bp, Probe Sequence
tagatgtggtttgactatttctgta

SEQ ID NO: 304534 - DNA, 25 bp, Probe Sequence
tagtttgctcctcactattgtttac

SEQ ID NO: 304535 - DNA, 25 bp, Probe Sequence
tagtttttccaatgatttttacact

SEQ ID NO: 304536 - DNA, 25 bp, Probe Sequence
tagattttctcctaggtgtttgata

SEQ ID NO: 304537 - DNA, 25 bp, Probe Sequence
tagatttgccttgtggtgttccatc

SEQ ID NO: 304538 - DNA, 25 bp, Probe Sequence
tatgtttccttgggtgtagggattt

SEQ ID NO: 304539 - DNA, 25 bp, Probe Sequence
tagtttctctgtgggaataaaggtt

SEQ ID NO: 304540 - DNA, 25 bp, Probe Sequence
tagaccttattcgttctaacggtat

SEQ ID NO: 304541 - DNA, 25 bp, Probe Sequence
tatgacttagttgcgttacaccctt

SEQ ID NO: 304542 - DNA, 25 bp, Probe Sequence
tagaattgagttgtgtgaagatgtc

SEQ ID NO: 304543 - DNA, 25 bp, Probe Sequence
tagactggacagcttgtggcaagtg

SEQ ID NO: 304544 - DNA, 25 bp, Probe Sequence
tagaggtgtctgcctatgcttaaag

SEQ ID NO: 304545 - DNA, 25 bp, Probe Sequence
tagaagttcctgtattcctaatagg

SEQ ID NO: 304546 - DNA, 25 bp, Probe Sequence
tagagatattcttatttcactaaat

SEQ ID NO: 304547 - DNA, 25 bp, Probe Sequence
tagatgctttgttttgatcattaaa

SEQ ID NO: 304548 - DNA, 25 bp, Probe Sequence
tagtgcctgtgttgttacggaaagc

SEQ ID NO: 304549 - DNA, 25 bp, Probe Sequence
taggacacgttgctactggaaatgc

SEQ ID NO: 304550 - DNA, 25 bp, Probe Sequence
taggcccagtgcaagtatttgaagg

SEQ ID NO: 304551 - DNA, 25 bp, Probe Sequence
tagtgtccaggctctgtttatgggt

SEQ ID NO: 304552 - DNA, 25 bp, Probe Sequence
tagttgccacactcatgcttacata

SEQ ID NO: 304553 - DNA, 25 bp, Probe Sequence
tagtgagggactgtgttgactgacg

SEQ ID NO: 304554 - DNA, 25 bp, Probe Sequence
tagctgggcgcagtggtgtgtgcct

SEQ ID NO: 304555 - DNA, 25 bp, Probe Sequence
tagctacgcatcgtggtgtgcgcct

SEQ ID NO: 304556 - DNA, 25 bp, Probe Sequence
tagagatgccatttgtgggcagctc

SEQ ID NO: 304557 - DNA, 25 bp, Probe Sequence
tagagagcaatttgtctggactaga

SEQ ID NO: 304558 - DNA, 25 bp, Probe Sequence
tagatactagtccctgtgtcaggat

SEQ ID NO: 304559 - DNA, 25 bp, Probe Sequence
tagctattagtgacctatgacagtt

SEQ ID NO: 304560 - DNA, 25 bp, Probe Sequence
tagctttgagtcgttcaacctcttc

SEQ ID NO: 304561 - DNA, 25 bp, Probe Sequence
tagctgtctggctgtataactctta

SEQ ID NO: 304562 - DNA, 25 bp, Probe Sequence
tagcttctgttgactctaactttga

SEQ ID NO: 304563 - DNA, 25 bp, Probe Sequence
tagcattgctttcgtgtaaattatg

SEQ ID NO: 304564 - DNA, 25 bp, Probe Sequence
tagcattcttctttggaaatctttt

SEQ ID NO: 304565 - DNA, 25 bp, Probe Sequence
tagctgctttgctcaggaagacatt

SEQ ID NO: 304566 - DNA, 25 bp, Probe Sequence
tagctgctttcatgctacaatgaca

SEQ ID NO: 304567 - DNA, 25 bp, Probe Sequence
tagtgctgtccagctaaatggctca

SEQ ID NO: 304568 - DNA, 25 bp, Probe Sequence
tagatcattcctttcaactggaccc

SEQ ID NO: 304569 - DNA, 25 bp, Probe Sequence
tagaatactttttcactgcaggccc

SEQ ID NO: 304570 - DNA, 25 bp, Probe Sequence
tagaagagcttttacttgggcgccc

SEQ ID NO: 304571 - DNA, 25 bp, Probe Sequence
tagtagaattcctctttggccacaa

SEQ ID NO: 304572 - DNA, 25 bp, Probe Sequence
tagatacaaacctggttgatgacca

SEQ ID NO: 304573 - DNA, 25 bp, Probe Sequence
tagaagcacacctctttttgacata

SEQ ID NO: 304574 - DNA, 25 bp, Probe Sequence
tagatcaaacatgcactttactagc

SEQ ID NO: 304575 - DNA, 25 bp, Probe Sequence
tagtaaagagaacttggatgccagc

SEQ ID NO: 304576 - DNA, 25 bp, Probe Sequence
taggcaagtggccagttgcctccac

SEQ ID NO: 304577 - DNA, 25 bp, Probe Sequence
tagaaaggtgccgattcaccaacac

SEQ ID NO: 304578 - DNA, 25 bp, Probe Sequence
tagaaagaggccatctcactagaat

SEQ ID NO: 304579 - DNA, 25 bp, Probe Sequence
tagcaccaagtgtttctcaaaatat

SEQ ID NO: 304580 - DNA, 25 bp, Probe Sequence
tagaccacgatgttacatccgcaaa

SEQ ID NO: 304581 - DNA, 25 bp, Probe Sequence
tagaccatctgacaatgcattgctg

SEQ ID NO: 304582 - DNA, 25 bp, Probe Sequence
tagcactgaagaactgtcagctcag

SEQ ID NO: 304583 - DNA, 25 bp, Probe Sequence
tagcagctaatgaagcccagcttct

SEQ ID NO: 304584 - DNA, 25 bp, Probe Sequence
tagctcagagattggcccctagctt

SEQ ID NO: 304585 - DNA, 25 bp, Probe Sequence
tagctataaggtccttgttgctgtt

SEQ ID NO: 304586 - DNA, 25 bp, Probe Sequence
tagtgtgccgactccgtggaggaag

SEQ ID NO: 304587 - DNA, 25 bp, Probe Sequence
tagtgttccttgcattttgggacag

SEQ ID NO: 304588 - DNA, 25 bp, Probe Sequence
taggtagccttactacttgggcctc

SEQ ID NO: 304589 - DNA, 25 bp, Probe Sequence
taggtagccttactacttgggcctc

SEQ ID NO: 304590 - DNA, 25 bp, Probe Sequence
taggggactttctacttggcagtac

SEQ ID NO: 304591 - DNA, 25 bp, Probe Sequence
tagggacttttcccattgacgtaca

SEQ ID NO: 304592 - DNA, 25 bp, Probe Sequence
tagttaaagatcgaccctgacgtaa

SEQ ID NO: 304593 - DNA, 25 bp, Probe Sequence
taggatgtacagttacccagcacgt

SEQ ID NO: 304594 - DNA, 25 bp, Probe Sequence
tagtattatctagtacccagtccat

SEQ ID NO: 304595 - DNA, 25 bp, Probe Sequence
tagtatttcaaatttccttccttgt

SEQ ID NO: 304596 - DNA, 25 bp, Probe Sequence
tagtttttggttgcgttgcctgtgt

SEQ ID NO: 304597 - DNA, 25 bp, Probe Sequence
tagaacttaggttcacgtttatgta

SEQ ID NO: 304598 - DNA, 25 bp, Probe Sequence
tagaacccatggaacccttgtttat

SEQ ID NO: 304599 - DNA, 25 bp, Probe Sequence
tagtcccaagagaatagcgttttaa

SEQ ID NO: 304600 - DNA, 25 bp, Probe Sequence
tagaaccccagattcaggcttgtgt

SEQ ID NO: 304601 - DNA, 25 bp, Probe Sequence
tagacaccaccctcagagattctga

SEQ ID NO: 304602 - DNA, 25 bp, Probe Sequence
tagaagccgcccagcaggagtttaa

SEQ ID NO: 304603 - DNA, 25 bp, Probe Sequence
taggaacagcccagcacaggtattt

SEQ ID NO: 304604 - DNA, 25 bp, Probe Sequence
tagtagacagaccttttctgttttt

SEQ ID NO: 304605 - DNA, 25 bp, Probe Sequence
tagggacatgggtactctttttatt

SEQ ID NO: 304606 - DNA, 25 bp, Probe Sequence
taggggtggggcttctcgaatttat

SEQ ID NO: 304607 - DNA, 25 bp, Probe Sequence
tagagaccggggtttcaccatgttt

SEQ ID NO: 304608 - DNA, 25 bp, Probe Sequence
tagagaggggggatgtcacacgcag

SEQ ID NO: 304609 - DNA, 25 bp, Probe Sequence
tagagctggtgctggaagcccaccg

SEQ ID NO: 304610 - DNA, 25 bp, Probe Sequence
tagagcagggctggtcataccctct

SEQ ID NO: 304611 - DNA, 25 bp, Probe Sequence
tagagagacgctgggtgacctgcca

SEQ ID NO: 304612 - DNA, 25 bp, Probe Sequence
tagacgaccgtgcagacgcactgca

SEQ ID NO: 304613 - DNA, 25 bp, Probe Sequence
tagacgacctgtccagatggttacc

SEQ ID NO: 304614 - DNA, 25 bp, Probe Sequence
tagacaactcttcaggttccacatg

SEQ ID NO: 304615 - DNA, 25 bp, Probe Sequence
tagacacccttgaagatttggcctg

SEQ ID NO: 304616 - DNA, 25 bp, Probe Sequence
tagaatcccctgaaagcagtagcca

SEQ ID NO: 304617 - DNA, 25 bp, Probe Sequence
tagattcccatggccataaaatggc

SEQ ID NO: 304618 - DNA, 25 bp, Probe Sequence
tagatccccagggctacatactgtt

SEQ ID NO: 304619 - DNA, 25 bp, Probe Sequence
tagacttccaagctagctacttatt

SEQ ID NO: 304620 - DNA, 25 bp, Probe Sequence
tagcagttcctaatacctactttta

SEQ ID NO: 304621 - DNA, 25 bp, Probe Sequence
tagggtactgaatgccttttttcct

SEQ ID NO: 304622 - DNA, 25 bp, Probe Sequence
taggtaaccagatggctctttttcc

SEQ ID NO: 304623 - DNA, 25 bp, Probe Sequence
tagggggccagagcactttgatttc

SEQ ID NO: 304624 - DNA, 25 bp, Probe Sequence
taggatggagcccaggccacatgga

SEQ ID NO: 304625 - DNA, 25 bp, Probe Sequence
taggatggagcccaggccacatgga

SEQ ID NO: 304626 - DNA, 25 bp, Probe Sequence
tatggcgaatctgaggctcctgcgc

SEQ ID NO: 304627 - DNA, 25 bp, Probe Sequence
tagacgtgagatggggctgcctcga

SEQ ID NO: 304628 - DNA, 25 bp, Probe Sequence
tagaatgtggtctggctgcttctca

SEQ ID NO: 304629 - DNA, 25 bp, Probe Sequence
tagagatgaggtctcctgcctcagc

SEQ ID NO: 304630 - DNA, 25 bp, Probe Sequence
tagcagcagctacttatcctggtac

SEQ ID NO: 304631 - DNA, 25 bp, Probe Sequence
tagcaatatgacattcttggtgaca

SEQ ID NO: 304632 - DNA, 25 bp, Probe Sequence
tagcacttgatcatatgttatatac

SEQ ID NO: 304633 - DNA, 25 bp, Probe Sequence
tagcagttgctcacatgtctttggg

SEQ ID NO: 304634 - DNA, 25 bp, Probe Sequence
tagatgctcaggaagatgctcttgg

SEQ ID NO: 304635 - DNA, 25 bp, Probe Sequence
tagtctcgtgtgacatgatgttatg

SEQ ID NO: 304636 - DNA, 25 bp, Probe Sequence
tagttcgatgttgatgctcttgcag

SEQ ID NO: 304637 - DNA, 25 bp, Probe Sequence
tagttaggcctggctcattctgcac

SEQ ID NO: 304638 - DNA, 25 bp, Probe Sequence
tagtgtagtgaccctcagtgcagtc

SEQ ID NO: 304639 - DNA, 25 bp, Probe Sequence
tagattcttgagccacacttcagtc

SEQ ID NO: 304640 - DNA, 25 bp, Probe Sequence
tagttgtgtgtgcagcacttcgccc

SEQ ID NO: 304641 - DNA, 25 bp, Probe Sequence
tagtgtgtggatcagaaccccaccc

SEQ ID NO: 304642 - DNA, 25 bp, Probe Sequence
tagtgggggccaaagatgccccctc

SEQ ID NO: 304643 - DNA, 25 bp, Probe Sequence
tagtggagggccttcagggccagac

SEQ ID NO: 304644 - DNA, 25 bp, Probe Sequence
tagtgatgagagcacccaggtggaa

SEQ ID NO: 304645 - DNA, 25 bp, Probe Sequence
tatgggtggttcccatggtggcttc

SEQ ID NO: 304646 - DNA, 25 bp, Probe Sequence
tagggtcgttgaataaatggcttag

SEQ ID NO: 304647 - DNA, 25 bp, Probe Sequence
tagggctgggttgagattggcttct

SEQ ID NO: 304648 - DNA, 25 bp, Probe Sequence
taggagagaggttaatgttactttt

SEQ ID NO: 304649 - DNA, 25 bp, Probe Sequence
taggaacaggtagactttcaactat

SEQ ID NO: 304650 - DNA, 25 bp, Probe Sequence
tagtaacgccataggacttttcctt

SEQ ID NO: 304651 - DNA, 25 bp, Probe Sequence
tagtaacagccattaaattcatttt

SEQ ID NO: 304652 - DNA, 25 bp, Probe Sequence
tagtaccatccatgaacttcagcaa

SEQ ID NO: 304653 - DNA, 25 bp, Probe Sequence
tagtacatcttacaactccgcatac

SEQ ID NO: 304654 - DNA, 25 bp, Probe Sequence
tagcacattcctatatttccagcta

SEQ ID NO: 304655 - DNA, 25 bp, Probe Sequence
tagaaatcctttcagtgctatgtag

SEQ ID NO: 304656 - DNA, 25 bp, Probe Sequence
tagcaaatgtgtcataagtcctata

SEQ ID NO: 304657 - DNA, 25 bp, Probe Sequence
tagaattatgtggcaaatcccttaa

SEQ ID NO: 304658 - DNA, 25 bp, Probe Sequence
tagtaaattcacaaatcccattttc

SEQ ID NO: 304659 - DNA, 25 bp, Probe Sequence
tagtatttccacagaagccctggct

SEQ ID NO: 304660 - DNA, 25 bp, Probe Sequence
tagtatgttcaacagaccccattag

SEQ ID NO: 304661 - DNA, 25 bp, Probe Sequence
taggatggttattagggcccattag

SEQ ID NO: 304662 - DNA, 25 bp, Probe Sequence
tagatcaggttttagggtcctgcaa

SEQ ID NO: 304663 - DNA, 25 bp, Probe Sequence
tagactggtgtcatgaagttcctga

SEQ ID NO: 304664 - DNA, 25 bp, Probe Sequence
tagcagctgggtctgaccttgcttt

SEQ ID NO: 304665 - DNA, 25 bp, Probe Sequence
tagcacattctttgtcaccttggta

SEQ ID NO: 304666 - DNA, 25 bp, Probe Sequence
tagcacatgttttgtacttggtaca

SEQ ID NO: 304667 - DNA, 25 bp, Probe Sequence
tagcaccctggtcacctgtgtgaca

SEQ ID NO: 304668 - DNA, 25 bp, Probe Sequence
tagacaactggtaagccagctcctc

SEQ ID NO: 304669 - DNA, 25 bp, Probe Sequence
tagtccctggctaattgcctgttct

SEQ ID NO: 304670 - DNA, 25 bp, Probe Sequence
tagtcctgcttaaattcacatggtg

SEQ ID NO: 304671 - DNA, 25 bp, Probe Sequence
tagtcctgcttaaattcacatggtg

SEQ ID NO: 304672 - DNA, 25 bp, Probe Sequence
tagactctgttaatttcctgcagct

SEQ ID NO: 304673 - DNA, 25 bp, Probe Sequence
tagacctgcttcatgaatctctcac

SEQ ID NO: 304674 - DNA, 25 bp, Probe Sequence
tagcatcctgggtatcatatctgta

SEQ ID NO: 304675 - DNA, 25 bp, Probe Sequence
tagtagttgagcttattctatatga

SEQ ID NO: 304676 - DNA, 25 bp, Probe Sequence
taggcactgggcattaccatagaga

SEQ ID NO: 304677 - DNA, 25 bp, Probe Sequence
tagaacatggtcattaccctgagaa

SEQ ID NO: 304678 - DNA, 25 bp, Probe Sequence
tagacatgctggtcatttaccctca

SEQ ID NO: 304679 - DNA, 25 bp, Probe Sequence
tagcagcctgacttttatgccctaa

SEQ ID NO: 304680 - DNA, 25 bp, Probe Sequence
tagacctaactgttaccatctgact

SEQ ID NO: 304681 - DNA, 25 bp, Probe Sequence
tagaaataccatttgacccagccat

SEQ ID NO: 304682 - DNA, 25 bp, Probe Sequence
tagaacacactatttgtaacagcca

SEQ ID NO: 304683 - DNA, 25 bp, Probe Sequence
tagaacacagttttgtagtgccact

SEQ ID NO: 304684 - DNA, 25 bp, Probe Sequence
tagtcaaagctcatatctaagtcag

SEQ ID NO: 304685 - DNA, 25 bp, Probe Sequence
tagtaaagcattttagcaactcccc

SEQ ID NO: 304686 - DNA, 25 bp, Probe Sequence
tagttcaaatgatagcaatacccct

SEQ ID NO: 304687 - DNA, 25 bp, Probe Sequence
tagttacacatcttcaacagacccc

SEQ ID NO: 304688 - DNA, 25 bp, Probe Sequence
tagttaaaattcaagcagaacattc

SEQ ID NO: 304689 - DNA, 25 bp, Probe Sequence
tagtgtacagttggggagtacattc

SEQ ID NO: 304690 - DNA, 25 bp, Probe Sequence
tagtcacatcaacgtcgggtcacat

SEQ ID NO: 304691 - DNA, 25 bp, Probe Sequence
tagacactctgacaagctggccaaa

SEQ ID NO: 304692 - DNA, 25 bp, Probe Sequence
tagacctgtgaaaagacgtcaatat

SEQ ID NO: 304693 - DNA, 25 bp, Probe Sequence
tagtctgcatggttaaaagtagtca

SEQ ID NO: 304694 - DNA, 25 bp, Probe Sequence
tagtaatgagtatgaggagaagtat

SEQ ID NO: 304695 - DNA, 25 bp, Probe Sequence
tagtgaaacttttctagaattattt

SEQ ID NO: 304696 - DNA, 25 bp, Probe Sequence
tagtaagcctttacaagacttgtta

SEQ ID NO: 304697 - DNA, 25 bp, Probe Sequence
tagatcaagacatgttaacctttta

SEQ ID NO: 304698 - DNA, 25 bp, Probe Sequence
tagaagaggcaattttacccttatt

SEQ ID NO: 304699 - DNA, 25 bp, Probe Sequence
tagaaattatattttagcctttatt

SEQ ID NO: 304700 - DNA, 25 bp, Probe Sequence
tagaaattatattttagcctttatt

SEQ ID NO: 304701 - DNA, 25 bp, Probe Sequence
tagcataaaattttctactcttttt

SEQ ID NO: 304702 - DNA, 25 bp, Probe Sequence
tagcaaggacctcgttttcattttt

SEQ ID NO: 304703 - DNA, 25 bp, Probe Sequence
tagaacgctcttcttttagtgtttt

SEQ ID NO: 304704 - DNA, 25 bp, Probe Sequence
tagacactatgtgcttttttttttt

SEQ ID NO: 304705 - DNA, 25 bp, Probe Sequence
tagacactatgtgcttttttttttt

SEQ ID NO: 304706 - DNA, 25 bp, Probe Sequence
tagaatgtcagggttttattatttt

SEQ ID NO: 304707 - DNA, 25 bp, Probe Sequence
tagtagataggcttgtggttttttt

SEQ ID NO: 304708 - DNA, 25 bp, Probe Sequence
tagtataccagctttggtacttcat

SEQ ID NO: 304709 - DNA, 25 bp, Probe Sequence
tagtaatacacactcggtgaccctc

SEQ ID NO: 304710 - DNA, 25 bp, Probe Sequence
tatttcaaaacctttgtccctcagt

SEQ ID NO: 304711 - DNA, 25 bp, Probe Sequence
tagtcctataagcttttccacttga

SEQ ID NO: 304712 - DNA, 25 bp, Probe Sequence
tagtcctgtaagatttcatactcta

SEQ ID NO: 304713 - DNA, 25 bp, Probe Sequence
tagtatgtttatgtttcatgacact

SEQ ID NO: 304714 - DNA, 25 bp, Probe Sequence
tagggcttggctgtaggtgtgcact

SEQ ID NO: 304715 - DNA, 25 bp, Probe Sequence
tagggccatggtgggccgcttgaat

SEQ ID NO: 304716 - DNA, 25 bp, Probe Sequence
tagaggttggtttccctcggaggat

SEQ ID NO: 304717 - DNA, 25 bp, Probe Sequence
taggtggtgggatctcaccgtgggt

SEQ ID NO: 304718 - DNA, 25 bp, Probe Sequence
tagggcgtgtgggttacgtgtctgg

SEQ ID NO: 304719 - DNA, 25 bp, Probe Sequence
tagaggctttcggctttttgggaca

SEQ ID NO: 304720 - DNA, 25 bp, Probe Sequence
tagtgtttgtaggtattctgtggga

SEQ ID NO: 304721 - DNA, 25 bp, Probe Sequence
tagtttttctgaacactggctggga

SEQ ID NO: 304722 - DNA, 25 bp, Probe Sequence
tagtctttctaaaataacgggagct

SEQ ID NO: 304723 - DNA, 25 bp, Probe Sequence
tagtaatactacaaccaacggtgaa

SEQ ID NO: 304724 - DNA, 25 bp, Probe Sequence
tagttaataaccaatatatcgtgta

SEQ ID NO: 304725 - DNA, 25 bp, Probe Sequence
tagttccattagccagtgttattgt

SEQ ID NO: 304726 - DNA, 25 bp, Probe Sequence
tagttgctagaagtcatgagtcttt

SEQ ID NO: 304727 - DNA, 25 bp, Probe Sequence
tagtctgcattttggcaactcctct

SEQ ID NO: 304728 - DNA, 25 bp, Probe Sequence
tagacatattttggcccttcatgca

SEQ ID NO: 304729 - DNA, 25 bp, Probe Sequence
tagcactcatttaaccctgttagca

SEQ ID NO: 304730 - DNA, 25 bp, Probe Sequence
tagactacttgaacccataaacttg

SEQ ID NO: 304731 - DNA, 25 bp, Probe Sequence
tagagtacctttgcctaaactcttt

SEQ ID NO: 304732 - DNA, 25 bp, Probe Sequence
tagagttacattaaccttgttgttt

SEQ ID NO: 304733 - DNA, 25 bp, Probe Sequence
tagagttccatatattgtatttgtt

SEQ ID NO: 304734 - DNA, 25 bp, Probe Sequence
tagaatcctcattacaataatttgt

SEQ ID NO: 304735 - DNA, 25 bp, Probe Sequence
tagcacctatcaataaatacttctt

SEQ ID NO: 304736 - DNA, 25 bp, Probe Sequence
tagcactatatcgagtacatacagg

SEQ ID NO: 304737 - DNA, 25 bp, Probe Sequence
tagagctgtgtctgtatacactggg

SEQ ID NO: 304738 - DNA, 25 bp, Probe Sequence
taggagtttgagaccagcctgggcg

SEQ ID NO: 304739 - DNA, 25 bp, Probe Sequence
tagagatgttgagtgcgccgcactg

SEQ ID NO: 304740 - DNA, 25 bp, Probe Sequence
tagaggcaggttggccagtctgtac

SEQ ID NO: 304741 - DNA, 25 bp, Probe Sequence
tagagtggtttaacgtctttcctct

SEQ ID NO: 304742 - DNA, 25 bp, Probe Sequence
tagagtggtggcaaagcttcctttt

SEQ ID NO: 304743 - DNA, 25 bp, Probe Sequence
tagagtggtggcaaagcttcctttt

SEQ ID NO: 304744 - DNA, 25 bp, Probe Sequence
tagagtaacacatatcctgccttta

SEQ ID NO: 304745 - DNA, 25 bp, Probe Sequence
taggtacaaatggaatcccaatcta

SEQ ID NO: 304746 - DNA, 25 bp, Probe Sequence
tagtaacaggatccactcaccctgc

SEQ ID NO: 304747 - DNA, 25 bp, Probe Sequence
tagtaaccggatgtccaccatgact

SEQ ID NO: 304748 - DNA, 25 bp, Probe Sequence
tagtacccattaggacttccatgac

SEQ ID NO: 304749 - DNA, 25 bp, Probe Sequence
tagttaccaacaggacatctcacat

SEQ ID NO: 304750 - DNA, 25 bp, Probe Sequence
tagtctttcaaatgaatgtactgta

SEQ ID NO: 304751 - DNA, 25 bp, Probe Sequence
tagtttctcctctaatcagtaattt

SEQ ID NO: 304752 - DNA, 25 bp, Probe Sequence
tagactttcttgtatacatttttct

SEQ ID NO: 304753 - DNA, 25 bp, Probe Sequence
tagactctggtttttcttttgacca

SEQ ID NO: 304754 - DNA, 25 bp, Probe Sequence
tagataggtgtttgtccttttacca

SEQ ID NO: 304755 - DNA, 25 bp, Probe Sequence
tagaagcttcttgctcctgtttaac

SEQ ID NO: 304756 - DNA, 25 bp, Probe Sequence
tagacgtgtctgtacccagactcca

SEQ ID NO: 304757 - DNA, 25 bp, Probe Sequence
tagaaatcgctgtcgccttaatcca

SEQ ID NO: 304758 - DNA, 25 bp, Probe Sequence
tagacaaccaggacactctacactc

SEQ ID NO: 304759 - DNA, 25 bp, Probe Sequence
tagagaatccatgtcgctctgacac

SEQ ID NO: 304760 - DNA, 25 bp, Probe Sequence
tagagaatcccactttctatagcag

SEQ ID NO: 304761 - DNA, 25 bp, Probe Sequence
tagatgacccaggctttcaaatgaa

SEQ ID NO: 304762 - DNA, 25 bp, Probe Sequence
tagtgactagccccttaaatgccag

SEQ ID NO: 304763 - DNA, 25 bp, Probe Sequence
tagcacactgaagccttgacaaccc

SEQ ID NO: 304764 - DNA, 25 bp, Probe Sequence
tagagtgctagagctcttacgcccc

SEQ ID NO: 304765 - DNA, 25 bp, Probe Sequence
tagaggtaaagctgtatccccctaa

SEQ ID NO: 304766 - DNA, 25 bp, Probe Sequence
taggggaagatgttcttcgccctgc

SEQ ID NO: 304767 - DNA, 25 bp, Probe Sequence
taggatggaagtcttgtcccgctat

SEQ ID NO: 304768 - DNA, 25 bp, Probe Sequence
tagagatggaaatccggcctcgctt

SEQ ID NO: 304769 - DNA, 25 bp, Probe Sequence
tatggaagacaaatccgaccgccct

SEQ ID NO: 304770 - DNA, 25 bp, Probe Sequence
taggggacaatccggattggccctc

SEQ ID NO: 304771 - DNA, 25 bp, Probe Sequence
tagggaacaaatgtgatctgaccac

SEQ ID NO: 304772 - DNA, 25 bp, Probe Sequence
taggttccaataacagcactacgcc

SEQ ID NO: 304773 - DNA, 25 bp, Probe Sequence
tagtgttacaataagcgtttctgca

SEQ ID NO: 304774 - DNA, 25 bp, Probe Sequence
tagtgtaaaatgacatgtcttttct

SEQ ID NO: 304775 - DNA, 25 bp, Probe Sequence
tagatgtaaaacatatcttcctcta

SEQ ID NO: 304776 - DNA, 25 bp, Probe Sequence
tagagtatataggttttgtaccttt

SEQ ID NO: 304777 - DNA, 25 bp, Probe Sequence
tagaattctagcttttttcctcctt

SEQ ID NO: 304778 - DNA, 25 bp, Probe Sequence
tagaatattctgcgtctttctctcc

SEQ ID NO: 304779 - DNA, 25 bp, Probe Sequence
tagtcacagttgcagattatatttc

SEQ ID NO: 304780 - DNA, 25 bp, Probe Sequence
tagtctagatctcagttaatgctta

SEQ ID NO: 304781 - DNA, 25 bp, Probe Sequence
tagacttgttgtactatgcaactta

SEQ ID NO: 304782 - DNA, 25 bp, Probe Sequence
taggctccttgggcttcaagcagga

SEQ ID NO: 304783 - DNA, 25 bp, Probe Sequence
tagatgtccggggctgcacgcgcgc

SEQ ID NO: 304784 - DNA, 25 bp, Probe Sequence
tataacacagggctgcaagtctctg

SEQ ID NO: 304785 - DNA, 25 bp, Probe Sequence
tagaaatcggaggtgtggatgctct

SEQ ID NO: 304786 - DNA, 25 bp, Probe Sequence
tagaaatcggaggtgtggatgctct

SEQ ID NO: 304787 - DNA, 25 bp, Probe Sequence
tagggactggagctcggatgccctg

SEQ ID NO: 304788 - DNA, 25 bp, Probe Sequence
tagggggcaagctttggtgcgcccc

SEQ ID NO: 304789 - DNA, 25 bp, Probe Sequence
tagagggggagttgagcaggcgcca

SEQ ID NO: 304790 - DNA, 25 bp, Probe Sequence
tagaggaggggagtgagcgggcccg

SEQ ID NO: 304791 - DNA, 25 bp, Probe Sequence
tagaggggggaggcacacgatccga

SEQ ID NO: 304792 - DNA, 25 bp, Probe Sequence
tagaagacaccgggaccgatcctag

SEQ ID NO: 304793 - DNA, 25 bp, Probe Sequence
tagaagacaccgggaccgatccagc

SEQ ID NO: 304794 - DNA, 25 bp, Probe Sequence
tagaagacaccgggaccgatccagc

SEQ ID NO: 304795 - DNA, 25 bp, Probe Sequence
tagaagacaccgggaccgatccagc

SEQ ID NO: 304796 - DNA, 25 bp, Probe Sequence
tagaagacaccgggaccgatccagc

SEQ ID NO: 304797 - DNA, 25 bp, Probe Sequence
tagaagacaccgggaccgatccagc

SEQ ID NO: 304798 - DNA, 25 bp, Probe Sequence
tagaagacaccgggaccgatccagc

SEQ ID NO: 304799 - DNA, 25 bp, Probe Sequence
tagaagacaccgggaccgatccagc

SEQ ID NO: 304800 - DNA, 25 bp, Probe Sequence
tagaagacaccgggaccgatccagc

SEQ ID NO: 304801 - DNA, 25 bp, Probe Sequence
tagaagacaccgggaccgatccagc

SEQ ID NO: 304802 - DNA, 25 bp, Probe Sequence
tagaagacaccgggaccgatccagc

SEQ ID NO: 304803 - DNA, 25 bp, Probe Sequence
tagaagacaccgggaccgatccagc

SEQ ID NO: 304804 - DNA, 25 bp, Probe Sequence
tagaagacaccgggaccgatccagc

SEQ ID NO: 304805 - DNA, 25 bp, Probe Sequence
tagaagacaccgggaccgatccagc

SEQ ID NO: 304806 - DNA, 25 bp, Probe Sequence
tagaagacaccgggaccgatccagc

SEQ ID NO: 304807 - DNA, 25 bp, Probe Sequence
tagaagacaccgggaccgatccagc

SEQ ID NO: 304808 - DNA, 25 bp, Probe Sequence
tagaagacaccgggaccgatccagc

SEQ ID NO: 304809 - DNA, 25 bp, Probe Sequence
tagaagacaccgggaccgatccagc

SEQ ID NO: 304810 - DNA, 25 bp, Probe Sequence
tagaagacaccgggaccgatccagc

SEQ ID NO: 304811 - DNA, 25 bp, Probe Sequence
tagaagacaccgggaccgatccagc

SEQ ID NO: 304812 - DNA, 25 bp, Probe Sequence
tagaagacaccgggaccgatccagc

SEQ ID NO: 304813 - DNA, 25 bp, Probe Sequence
tagaagacaccgggaccgatccagc

SEQ ID NO: 304814 - DNA, 25 bp, Probe Sequence
tagaagacaccgggaccgatccagc

SEQ ID NO: 304815 - DNA, 25 bp, Probe Sequence
tagaagacaccgggaccgatccagc

SEQ ID NO: 304816 - DNA, 25 bp, Probe Sequence
tagaagacaccgggaccgatccagc

SEQ ID NO: 304817 - DNA, 25 bp, Probe Sequence
tagaagacaccgggaccgatccagc

SEQ ID NO: 304818 - DNA, 25 bp, Probe Sequence
tagaagacaccgggaccgatccagc

SEQ ID NO: 304819 - DNA, 25 bp, Probe Sequence
tagaagacaccgggaccgatccagc

SEQ ID NO: 304820 - DNA, 25 bp, Probe Sequence
tagaagacaccgggaccgatccagc

SEQ ID NO: 304821 - DNA, 25 bp, Probe Sequence
tagaagacaccgggaccgatccagc

SEQ ID NO: 304822 - DNA, 25 bp, Probe Sequence
tagaagacaccgggaccgatccagc

SEQ ID NO: 304823 - DNA, 25 bp, Probe Sequence
tagaagacaccgggaccgatccagc

SEQ ID NO: 304824 - DNA, 25 bp, Probe Sequence
tagaagacaccgggaccgatccagc

SEQ ID NO: 304825 - DNA, 25 bp, Probe Sequence
tagaagacaccgggaccgatccagc

SEQ ID NO: 304826 - DNA, 25 bp, Probe Sequence
tagaagacaccgggaccgatccagc

SEQ ID NO: 304827 - DNA, 25 bp, Probe Sequence
tagaagacaccgggaccgatccagc

SEQ ID NO: 304828 - DNA, 25 bp, Probe Sequence
tagaagacaccgggaccgatccagc

SEQ ID NO: 304829 - DNA, 25 bp, Probe Sequence
tagaagacaccgggaccgatccagc

SEQ ID NO: 304830 - DNA, 25 bp, Probe Sequence
tagaagacaccgggaccgatccagc

SEQ ID NO: 304831 - DNA, 25 bp, Probe Sequence
tagaagacaccgggaccgatccagc

SEQ ID NO: 304832 - DNA, 25 bp, Probe Sequence
tagaagacaccgggaccgatccagc

SEQ ID NO: 304833 - DNA, 25 bp, Probe Sequence
tagaagacaccgggaccgatccagc

SEQ ID NO: 304834 - DNA, 25 bp, Probe Sequence
tagaagacaccgggaccgatccagc

SEQ ID NO: 304835 - DNA, 25 bp, Probe Sequence
tagaagacaccgggaccgatccagc

SEQ ID NO: 304836 - DNA, 25 bp, Probe Sequence
tagaagacaccgggaccgatccagc

SEQ ID NO: 304837 - DNA, 25 bp, Probe Sequence
tagaagacaccgggaccgatccagc

SEQ ID NO: 304838 - DNA, 25 bp, Probe Sequence
tagaagacaccgggaccgatccagc

SEQ ID NO: 304839 - DNA, 25 bp, Probe Sequence
tagaagacaccgggaccgatccagc

SEQ ID NO: 304840 - DNA, 25 bp, Probe Sequence
tagaagacaccgggaccgatccagc

SEQ ID NO: 304841 - DNA, 25 bp, Probe Sequence
tagaagacaccgggaccgatccagc

SEQ ID NO: 304842 - DNA, 25 bp, Probe Sequence
tagaagacaccgggaccgatccagc

SEQ ID NO: 304843 - DNA, 25 bp, Probe Sequence
tagaagacaccgggaccgatccagc

SEQ ID NO: 304844 - DNA, 25 bp, Probe Sequence
tagaagacaccgggaccgatccagc

SEQ ID NO: 304845 - DNA, 25 bp, Probe Sequence
tagaagacaccgggaccgatccagc

SEQ ID NO: 304846 - DNA, 25 bp, Probe Sequence
tagaagacaccgggaccgatccagc

SEQ ID NO: 304847 - DNA, 25 bp, Probe Sequence
tagaagacaccgggaccgatccagc

SEQ ID NO: 304848 - DNA, 25 bp, Probe Sequence
tagaagacaccgggaccgatccagc

SEQ ID NO: 304849 - DNA, 25 bp, Probe Sequence
tagaagacaccgggaccgatccagc

SEQ ID NO: 304850 - DNA, 25 bp, Probe Sequence
tagaagacaccgggaccgatccagc

SEQ ID NO: 304851 - DNA, 25 bp, Probe Sequence
tagaagacaccgggaccgatccagc

SEQ ID NO: 304852 - DNA, 25 bp, Probe Sequence
tagaagacaccgggaccgatccagc

SEQ ID NO: 304853 - DNA, 25 bp, Probe Sequence
tagaagacaccgggaccgatccagc

SEQ ID NO: 304854 - DNA, 25 bp, Probe Sequence
tagaagacaccgggaccgatccagc

SEQ ID NO: 304855 - DNA, 25 bp, Probe Sequence
tagaagacaccgggaccgatccagc

SEQ ID NO: 304856 - DNA, 25 bp, Probe Sequence
tagaagacaccgggaccgatccagc

SEQ ID NO: 304857 - DNA, 25 bp, Probe Sequence
tagaagacaccgggaccgatccagc

SEQ ID NO: 304858 - DNA, 25 bp, Probe Sequence
tagaagacaccgggaccgatccagc

SEQ ID NO: 304859 - DNA, 25 bp, Probe Sequence
tagaagacaccgggaccgatccagc

SEQ ID NO: 304860 - DNA, 25 bp, Probe Sequence
tagaagacaccgggaccgatccagc

SEQ ID NO: 304861 - DNA, 25 bp, Probe Sequence
tagaagacaccgggaccgatccagc

SEQ ID NO: 304862 - DNA, 25 bp, Probe Sequence
tagaagacaccgggaccgatccagc

SEQ ID NO: 304863 - DNA, 25 bp, Probe Sequence
tagaagacaccgggaccgatccagc

SEQ ID NO: 304864 - DNA, 25 bp, Probe Sequence
tagaagacaccgggaccgatccagc

SEQ ID NO: 304865 - DNA, 25 bp, Probe Sequence
tagaagacaccgggaccgatccagc

SEQ ID NO: 304866 - DNA, 25 bp, Probe Sequence
tagaagacaccgggaccgatccagc

SEQ ID NO: 304867 - DNA, 25 bp, Probe Sequence
tagaagacaccgggaccgatccagc

SEQ ID NO: 304868 - DNA, 25 bp, Probe Sequence
tagaagacaccgggaccgatccagc

SEQ ID NO: 304869 - DNA, 25 bp, Probe Sequence
tagaagacaccgggaccgatccagc

SEQ ID NO: 304870 - DNA, 25 bp, Probe Sequence
tagaagacaccgggaccgatccagc

SEQ ID NO: 304871 - DNA, 25 bp, Probe Sequence
tagaagacaccgggaccgatccagc

SEQ ID NO: 304872 - DNA, 25 bp, Probe Sequence
tagaagacaccgggaccgatccagc

SEQ ID NO: 304873 - DNA, 25 bp, Probe Sequence
tagaagacaccgggaccgatccagc

SEQ ID NO: 304874 - DNA, 25 bp, Probe Sequence
tagaagacaccgggaccgatccagc

SEQ ID NO: 304875 - DNA, 25 bp, Probe Sequence
tagaagacaccgggaccgatccagc

SEQ ID NO: 304876 - DNA, 25 bp, Probe Sequence
tagaagacaccgggaccgatccagc

SEQ ID NO: 304877 - DNA, 25 bp, Probe Sequence
tagaagacaccgggaccgatccagc

SEQ ID NO: 304878 - DNA, 25 bp, Probe Sequence
tagaagacaccgggaccgatccagc

SEQ ID NO: 304879 - DNA, 25 bp, Probe Sequence
tagaagacaccgggaccgatccagc

SEQ ID NO: 304880 - DNA, 25 bp, Probe Sequence
tagaagacaccgggaccgatccagc

SEQ ID NO: 304881 - DNA, 25 bp, Probe Sequence
tagaagacaccgggaccgatccagc

SEQ ID NO: 304882 - DNA, 25 bp, Probe Sequence
tagaagacaccgggaccgatccagc

SEQ ID NO: 304883 - DNA, 25 bp, Probe Sequence
tagaagacaccgggaccgatccagc

SEQ ID NO: 304884 - DNA, 25 bp, Probe Sequence
tagaagacaccgggaccgatccagc

SEQ ID NO: 304885 - DNA, 25 bp, Probe Sequence
tagaagacaccgggaccgatccagc

SEQ ID NO: 304886 - DNA, 25 bp, Probe Sequence
tagaagacaccgggaccgatccagc

SEQ ID NO: 304887 - DNA, 25 bp, Probe Sequence
tagaagacaccgggaccgatccagc

SEQ ID NO: 304888 - DNA, 25 bp, Probe Sequence
tagaagacaccgggaccgatccagc

SEQ ID NO: 304889 - DNA, 25 bp, Probe Sequence
tagaagacaccgggaccgatccagc

SEQ ID NO: 304890 - DNA, 25 bp, Probe Sequence
tagaagacaccgggaccgatccagc

SEQ ID NO: 304891 - DNA, 25 bp, Probe Sequence
tagaagacaccgggaccgatccagc

SEQ ID NO: 304892 - DNA, 25 bp, Probe Sequence
tagaagacaccgggaccgatccagc

SEQ ID NO: 304893 - DNA, 25 bp, Probe Sequence
tagaagacaccgggaccgatccagc

SEQ ID NO: 304894 - DNA, 25 bp, Probe Sequence
tagaagacaccgggaccgatccagc

SEQ ID NO: 304895 - DNA, 25 bp, Probe Sequence
tagaagacaccgggaccgatccagc

SEQ ID NO: 304896 - DNA, 25 bp, Probe Sequence
tagaagacaccgggaccgatccagc

SEQ ID NO: 304897 - DNA, 25 bp, Probe Sequence
tagaagacaccgggaccgatccagc

SEQ ID NO: 304898 - DNA, 25 bp, Probe Sequence
tagaagacaccgggaccgatccagc

SEQ ID NO: 304899 - DNA, 25 bp, Probe Sequence
tagaagacaccgggaccgatccagc

SEQ ID NO: 304900 - DNA, 25 bp, Probe Sequence
tagaagacaccgggaccgatccagc

SEQ ID NO: 304901 - DNA, 25 bp, Probe Sequence
tagaagacaccgggaccgatccagc

SEQ ID NO: 304902 - DNA, 25 bp, Probe Sequence
tagaagacaccgggaccgatccagc

SEQ ID NO: 304903 - DNA, 25 bp, Probe Sequence
tagaagacaccgggaccgatccagc

SEQ ID NO: 304904 - DNA, 25 bp, Probe Sequence
tagaagacaccgggaccgatccagc

SEQ ID NO: 304905 - DNA, 25 bp, Probe Sequence
tagaagacaccgggaccgatccagc

SEQ ID NO: 304906 - DNA, 25 bp, Probe Sequence
tagataacctcgggccgatcgcacg

SEQ ID NO: 304907 - DNA, 25 bp, Probe Sequence
tagaaacctcgatatcgagcgccca

SEQ ID NO: 304908 - DNA, 25 bp, Probe Sequence
tagaaacctcgatattgagcgtcca

SEQ ID NO: 304909 - DNA, 25 bp, Probe Sequence
tagaaacctaattttcagcgttcat

SEQ ID NO: 304910 - DNA, 25 bp, Probe Sequence
taggaacgtaatcgtgtcccctatc

SEQ ID NO: 304911 - DNA, 25 bp, Probe Sequence
tagggagcctggagtatccttccat

SEQ ID NO: 304912 - DNA, 25 bp, Probe Sequence
tagggagcctggagtatccttccat

SEQ ID NO: 304913 - DNA, 25 bp, Probe Sequence
tagggagcctggagtatccttccat

SEQ ID NO: 304914 - DNA, 25 bp, Probe Sequence
taggtggcacggagaattttggatt

SEQ ID NO: 304915 - DNA, 25 bp, Probe Sequence
tagtgtggaggcggaagttttggaa

SEQ ID NO: 304916 - DNA, 25 bp, Probe Sequence
tagtctgtggtgggaaattcaatgg

SEQ ID NO: 304917 - DNA, 25 bp, Probe Sequence
tagtcgttgcttcagtgttctgtgg

SEQ ID NO: 304918 - DNA, 25 bp, Probe Sequence
tagtgctgagtcttggggtactggc

SEQ ID NO: 304919 - DNA, 25 bp, Probe Sequence
tagtctgagtgcgtgtggggacctc

SEQ ID NO: 304920 - DNA, 25 bp, Probe Sequence
tagtctaactagtggtcaggcttaa

SEQ ID NO: 304921 - DNA, 25 bp, Probe Sequence
tagtgctaaaatcagtgtaacttat

SEQ ID NO: 304922 - DNA, 25 bp, Probe Sequence
taggtgacactatagaacaagtttg

SEQ ID NO: 304923 - DNA, 25 bp, Probe Sequence
tagagtgcccatgtgaaataaattt

SEQ ID NO: 304924 - DNA, 25 bp, Probe Sequence
tagagtcccatccattgaattcaat

SEQ ID NO: 304925 - DNA, 25 bp, Probe Sequence
tagaggctcaaccaatataggatat

SEQ ID NO: 304926 - DNA, 25 bp, Probe Sequence
tagaggtcatcatcaatacagagtg

SEQ ID NO: 304927 - DNA, 25 bp, Probe Sequence
tagggtacagaatagagcgtgtgct

SEQ ID NO: 304928 - DNA, 25 bp, Probe Sequence
tagagtttatcaacacagaggtgtc

SEQ ID NO: 304929 - DNA, 25 bp, Probe Sequence
tagagctaatacatgccgacgggcg

SEQ ID NO: 304930 - DNA, 25 bp, Probe Sequence
tagagtacttgaatacaggtggggg

SEQ ID NO: 304931 - DNA, 25 bp, Probe Sequence
tagagaacgtggcagcaagctgagg

SEQ ID NO: 304932 - DNA, 25 bp, Probe Sequence
taggggctggtgcaaaggatgagtt

SEQ ID NO: 304933 - DNA, 25 bp, Probe Sequence
taggaggggtaatggtggagttggc

SEQ ID NO: 304934 - DNA, 25 bp, Probe Sequence
taggacgcgggacgcggggagtggg

SEQ ID NO: 304935 - DNA, 25 bp, Probe Sequence
taggggccgatgagcttgggtacgt

SEQ ID NO: 304936 - DNA, 25 bp, Probe Sequence
taggggcagagtgtgcttggagtca

SEQ ID NO: 304937 - DNA, 25 bp, Probe Sequence
tagggagaatctgcctccacagtca

SEQ ID NO: 304938 - DNA, 25 bp, Probe Sequence
tagggagcattttccttctagtcta

SEQ ID NO: 304939 - DNA, 25 bp, Probe Sequence
tagagtacatcctcctgttattgct

SEQ ID NO: 304940 - DNA, 25 bp, Probe Sequence
tagataaaatcacttctgtttgttc

SEQ ID NO: 304941 - DNA, 25 bp, Probe Sequence
tagaagacaacaacacacttgtgtt

SEQ ID NO: 304942 - DNA, 25 bp, Probe Sequence
tagggaatgacatcacctttatggc

SEQ ID NO: 304943 - DNA, 25 bp, Probe Sequence
tagagagccggattcaccgtttggc

SEQ ID NO: 304944 - DNA, 25 bp, Probe Sequence
tagagagccggattcaccgtttggc

SEQ ID NO: 304945 - DNA, 25 bp, Probe Sequence
tagatggccttgaccactctgattt

SEQ ID NO: 304946 - DNA, 25 bp, Probe Sequence
tagaggctcttggacacacagtgtc

SEQ ID NO: 304947 - DNA, 25 bp, Probe Sequence
tagatgcaggtcgtacataacttcc

SEQ ID NO: 304948 - DNA, 25 bp, Probe Sequence
tagatgcaattttaactcctgtccc

SEQ ID NO: 304949 - DNA, 25 bp, Probe Sequence
tagacatacttgtacgctcacttgc

SEQ ID NO: 304950 - DNA, 25 bp, Probe Sequence
tagacaaatacatctgccctcatgg

SEQ ID NO: 304951 - DNA, 25 bp, Probe Sequence
tagataagaactttgcacacttcaa

SEQ ID NO: 304952 - DNA, 25 bp, Probe Sequence
tagaacactattttcagaatctgaa

SEQ ID NO: 304953 - DNA, 25 bp, Probe Sequence
tagaacactattttcagaatctgaa

SEQ ID NO: 304954 - DNA, 25 bp, Probe Sequence
tagaacactcctctcagggatcata

SEQ ID NO: 304955 - DNA, 25 bp, Probe Sequence
tagtatcctgccaccaggagtccaa

SEQ ID NO: 304956 - DNA, 25 bp, Probe Sequence
tagtacttgactactctagaggctg

SEQ ID NO: 304957 - DNA, 25 bp, Probe Sequence
tagatatccatacatcttaaattgg

SEQ ID NO: 304958 - DNA, 25 bp, Probe Sequence
tagatcatcctggtttctttattgg

SEQ ID NO: 304959 - DNA, 25 bp, Probe Sequence
tagttactgagtccactttattctg

SEQ ID NO: 304960 - DNA, 25 bp, Probe Sequence
tagtttctgattcactattagagaa

SEQ ID NO: 304961 - DNA, 25 bp, Probe Sequence
tagtattctggatcaccgtgaagga

SEQ ID NO: 304962 - DNA, 25 bp, Probe Sequence
tagtctttggcagccaggtgtggtg

SEQ ID NO: 304963 - DNA, 25 bp, Probe Sequence
tagacttggatctgccagttgttga

SEQ ID NO: 304964 - DNA, 25 bp, Probe Sequence
tagacttgtgatatgcgtgtgttta

SEQ ID NO: 304965 - DNA, 25 bp, Probe Sequence
tagacttgcaagacatggcctgtat

SEQ ID NO: 304966 - DNA, 25 bp, Probe Sequence
tagagatcaccaatctggactgtac

SEQ ID NO: 304967 - DNA, 25 bp, Probe Sequence
tagacatcagtattctgccatcatt

SEQ ID NO: 304968 - DNA, 25 bp, Probe Sequence
tatgaacatctttgtgccaataaat

SEQ ID NO: 304969 - DNA, 25 bp, Probe Sequence
tagatttctcatttgccaataataa

SEQ ID NO: 304970 - DNA, 25 bp, Probe Sequence
tagtatgtgccaagagccctaaaaa

SEQ ID NO: 304971 - DNA, 25 bp, Probe Sequence
tagtcagtgccaaatcttccgagat

SEQ ID NO: 304972 - DNA, 25 bp, Probe Sequence
tagttggtaataactccagagaagc

SEQ ID NO: 304973 - DNA, 25 bp, Probe Sequence
tagtgggctattttctgctaggggg

SEQ ID NO: 304974 - DNA, 25 bp, Probe Sequence
tagttggtcttgtacatgcgcagtg

SEQ ID NO: 304975 - DNA, 25 bp, Probe Sequence
tagtcaggattattactgtagttga

SEQ ID NO: 304976 - DNA, 25 bp, Probe Sequence
tagtaggcttagatctcaaattcat

SEQ ID NO: 304977 - DNA, 25 bp, Probe Sequence
tagttggctataagtacgtcattct

SEQ ID NO: 304978 - DNA, 25 bp, Probe Sequence
tagtctgtataataagggcatctct

SEQ ID NO: 304979 - DNA, 25 bp, Probe Sequence
tagtcattaaatggaagtgtctgcc

SEQ ID NO: 304980 - DNA, 25 bp, Probe Sequence
tagactctccaatgaatgtgttcaa

SEQ ID NO: 304981 - DNA, 25 bp, Probe Sequence
tagacactaaaatcatgttgatcta

SEQ ID NO: 304982 - DNA, 25 bp, Probe Sequence
tagtttgtataatcagtcattcata

SEQ ID NO: 304983 - DNA, 25 bp, Probe Sequence
tagtactgataagttcgtctttcaa

SEQ ID NO: 304984 - DNA, 25 bp, Probe Sequence
taggaccatctagttagttccacaa

SEQ ID NO: 304985 - DNA, 25 bp, Probe Sequence
tagaggcgcctagaaattccacttg

SEQ ID NO: 304986 - DNA, 25 bp, Probe Sequence
taggggctatgctctgcaattccct

SEQ ID NO: 304987 - DNA, 25 bp, Probe Sequence
tagtaacaatcttgcagccttcctt

SEQ ID NO: 304988 - DNA, 25 bp, Probe Sequence
tagtttatgatattgccctctttgt

SEQ ID NO: 304989 - DNA, 25 bp, Probe Sequence
tagtcatatttattgacctggtggt

SEQ ID NO: 304990 - DNA, 25 bp, Probe Sequence
tagttgttgctgtctaagctgggag

SEQ ID NO: 304991 - DNA, 25 bp, Probe Sequence
tagtagtcatcctaatatgtgtggg

SEQ ID NO: 304992 - DNA, 25 bp, Probe Sequence
tagatattcacagctcattttagag

SEQ ID NO: 304993 - DNA, 25 bp, Probe Sequence
tagatagagttggtcctgttaggag

SEQ ID NO: 304994 - DNA, 25 bp, Probe Sequence
tagatagcactgccttcttgttcca

SEQ ID NO: 304995 - DNA, 25 bp, Probe Sequence
tagtgacatctggctctcagcttat

SEQ ID NO: 304996 - DNA, 25 bp, Probe Sequence
tagtgactctgtgcttgtctgttta

SEQ ID NO: 304997 - DNA, 25 bp, Probe Sequence
tagtgacttcgtaagcctgttgtta

SEQ ID NO: 304998 - DNA, 25 bp, Probe Sequence
tagtgtattcacttaccctagttca

SEQ ID NO: 304999 - DNA, 25 bp, Probe Sequence
taggtttaactatttgctcaatgtc

SEQ ID NO: 305000 - DNA, 25 bp, Probe Sequence
tagactttcaactattgttagatgt

SEQ ID NO: 305001 - DNA, 25 bp, Probe Sequence
tagatctttccatttttctccatgg

SEQ ID NO: 305002 - DNA, 25 bp, Probe Sequence
tagactcattcatacttggctgcaa

SEQ ID NO: 305003 - DNA, 25 bp, Probe Sequence
tagagtcagtcattggctttgtcat

SEQ ID NO: 305004 - DNA, 25 bp, Probe Sequence
tagaccaatgcattgcgtttctttc

SEQ ID NO: 305005 - DNA, 25 bp, Probe Sequence
tagacaaatgctagtgtgttttaac

SEQ ID NO: 305006 - DNA, 25 bp, Probe Sequence
tagacaaggttgctgttgtgcagtg

SEQ ID NO: 305007 - DNA, 25 bp, Probe Sequence
tagataagtgttctgtctgactttc

SEQ ID NO: 305008 - DNA, 25 bp, Probe Sequence
tagaaaggtagtaatctagctcact

SEQ ID NO: 305009 - DNA, 25 bp, Probe Sequence
tagaggatggtactgttttcatact

SEQ ID NO: 305010 - DNA, 25 bp, Probe Sequence
tagggactgccaggctgtttcagcc

SEQ ID NO: 305011 - DNA, 25 bp, Probe Sequence
tagagaatgccctcagctcttagct

SEQ ID NO: 305012 - DNA, 25 bp, Probe Sequence
tagagaatgccctcagctcttagct

SEQ ID NO: 305013 - DNA, 25 bp, Probe Sequence
tagagatgatgccacacctgttaga

SEQ ID NO: 305014 - DNA, 25 bp, Probe Sequence
taggaatgcttgcctctggcaggca

SEQ ID NO: 305015 - DNA, 25 bp, Probe Sequence
tagggcagctgtcgtctatgccgta

SEQ ID NO: 305016 - DNA, 25 bp, Probe Sequence
tagtggcagcgctttcaacagctaa

SEQ ID NO: 305017 - DNA, 25 bp, Probe Sequence
tagtgagcacatgtacacacctctc

SEQ ID NO: 305018 - DNA, 25 bp, Probe Sequence
tatctgaggcagctattccgcattc

SEQ ID NO: 305019 - DNA, 25 bp, Probe Sequence
tatgtgagctggctgacgccttgag

SEQ ID NO: 305020 - DNA, 25 bp, Probe Sequence
taggcagctcatgtgcacgttttct

SEQ ID NO: 305021 - DNA, 25 bp, Probe Sequence
tagggcagcagcatcagagtcttct

SEQ ID NO: 305022 - DNA, 25 bp, Probe Sequence
tagagcaatgcattccaaattttta

SEQ ID NO: 305023 - DNA, 25 bp, Probe Sequence
tagagcatatttgccaataaagctt

SEQ ID NO: 305024 - DNA, 25 bp, Probe Sequence
tagacatcttgtgacactaaatcac

SEQ ID NO: 305025 - DNA, 25 bp, Probe Sequence
tagagctctcgtgacttaatcacct

SEQ ID NO: 305026 - DNA, 25 bp, Probe Sequence
tagatgattcaagactctgacccct

SEQ ID NO: 305027 - DNA, 25 bp, Probe Sequence
tagataacaagacctcagtgccttc

SEQ ID NO: 305028 - DNA, 25 bp, Probe Sequence
tagagagaaaggtcatcagtgtcat

SEQ ID NO: 305029 - DNA, 25 bp, Probe Sequence
tagagaaatgagtctcatgcctgta

SEQ ID NO: 305030 - DNA, 25 bp, Probe Sequence
tagagaaatgagtgctggttttgag

SEQ ID NO: 305031 - DNA, 25 bp, Probe Sequence
tagagaagagagactcggttctaac

SEQ ID NO: 305032 - DNA, 25 bp, Probe Sequence
tagagatcgaagcctcctatctcca

SEQ ID NO: 305033 - DNA, 25 bp, Probe Sequence
taggagcgaacactgctgctctctc

SEQ ID NO: 305034 - DNA, 25 bp, Probe Sequence
taggggaacactagtatatcttgct

SEQ ID NO: 305035 - DNA, 25 bp, Probe Sequence
tagaggtggatgtcttgttttgtgt

SEQ ID NO: 305036 - DNA, 25 bp, Probe Sequence
tagagcatgcatactggtttttttt

SEQ ID NO: 305037 - DNA, 25 bp, Probe Sequence
tagagtcaaattctcttgattttaa

SEQ ID NO: 305038 - DNA, 25 bp, Probe Sequence
taggtgacacttcgtttgatctgcc

SEQ ID NO: 305039 - DNA, 25 bp, Probe Sequence
tagacgcaacgtctgtcgacacgat

SEQ ID NO: 305040 - DNA, 25 bp, Probe Sequence
tagacctaggtcttttgaactcaag

SEQ ID NO: 305041 - DNA, 25 bp, Probe Sequence
tagagatgctagctagtgttgaagc

SEQ ID NO: 305042 - DNA, 25 bp, Probe Sequence
tagagacaaggcattgctgcgcaga

SEQ ID NO: 305043 - DNA, 25 bp, Probe Sequence
tagacagcaagacatgtgtgcaaga

SEQ ID NO: 305044 - DNA, 25 bp, Probe Sequence
tagacacaagaattgcatcgatgaa

SEQ ID NO: 305045 - DNA, 25 bp, Probe Sequence
tagatcaaatagttgcatagcagta

SEQ ID NO: 305046 - DNA, 25 bp, Probe Sequence
tagacaactgcatttcattcaccaa

SEQ ID NO: 305047 - DNA, 25 bp, Probe Sequence
tagacaagtgtaatctcaccataat

SEQ ID NO: 305048 - DNA, 25 bp, Probe Sequence
tagagaaatgttcctcctcatatct

SEQ ID NO: 305049 - DNA, 25 bp, Probe Sequence
tagttattgttgttacatatgagct

SEQ ID NO: 305050 - DNA, 25 bp, Probe Sequence
tagttttgtgtgttggctgctccac

SEQ ID NO: 305051 - DNA, 25 bp, Probe Sequence
tagttttgtgtgttggctgctccac

SEQ ID NO: 305052 - DNA, 25 bp, Probe Sequence
tagttttgtgtgttggctgctccac

SEQ ID NO: 305053 - DNA, 25 bp, Probe Sequence
tagtatttgcttctggtggaattaa

SEQ ID NO: 305054 - DNA, 25 bp, Probe Sequence
tagatactgctttttgggaggttaa

SEQ ID NO: 305055 - DNA, 25 bp, Probe Sequence
tagtaagcagtgtttctggccccta

SEQ ID NO: 305056 - DNA, 25 bp, Probe Sequence
tagtgattgcggtttcggtcgctct

SEQ ID NO: 305057 - DNA, 25 bp, Probe Sequence
tagtatttggtcaccagccgtcatc

SEQ ID NO: 305058 - DNA, 25 bp, Probe Sequence
tagtgaaccgtcagatcgcctggat

SEQ ID NO: 305059 - DNA, 25 bp, Probe Sequence
tagtgaaccgtcagatcgcctggat

SEQ ID NO: 305060 - DNA, 25 bp, Probe Sequence
tagtgaaccgtcagatcgcctggag

SEQ ID NO: 305061 - DNA, 25 bp, Probe Sequence
tagtgaaccgtcagatcgcctggag

SEQ ID NO: 305062 - DNA, 25 bp, Probe Sequence
tagtgaaccgtcagatcgcctggag

SEQ ID NO: 305063 - DNA, 25 bp, Probe Sequence
tagtgaaccgtcagatcgcctggag

SEQ ID NO: 305064 - DNA, 25 bp, Probe Sequence
tagtgaaccgtcagatcgcctggag

SEQ ID NO: 305065 - DNA, 25 bp, Probe Sequence
tagtgaaccgtcagatcgcctggag

SEQ ID NO: 305066 - DNA, 25 bp, Probe Sequence
tagtgaaccgtcagatcgcctggag

SEQ ID NO: 305067 - DNA, 25 bp, Probe Sequence
tagtgaaccgtcagatcgcctggag

SEQ ID NO: 305068 - DNA, 25 bp, Probe Sequence
tagtgaaccgtcagatcgcctggag

SEQ ID NO: 305069 - DNA, 25 bp, Probe Sequence
tagtgaaccgtcagatcgcctggag

SEQ ID NO: 305070 - DNA, 25 bp, Probe Sequence
tagtgaaccgtcagatcgcctggag

SEQ ID NO: 305071 - DNA, 25 bp, Probe Sequence
tagtgaaccgtcagatcgcctggag

SEQ ID NO: 305072 - DNA, 25 bp, Probe Sequence
tagtgaaccgtcagatcgcctggag

SEQ ID NO: 305073 - DNA, 25 bp, Probe Sequence
tagtgaaccgtcagatcgcctggag

SEQ ID NO: 305074 - DNA, 25 bp, Probe Sequence
tagtgaaccgtcagatcgcctggag

SEQ ID NO: 305075 - DNA, 25 bp, Probe Sequence
tagtgaaccgtcagatcgcctggag

SEQ ID NO: 305076 - DNA, 25 bp, Probe Sequence
tagtgaaccgtcagatcgcctggag

SEQ ID NO: 305077 - DNA, 25 bp, Probe Sequence
tagtgaaccgtcagatcgcctggag

SEQ ID NO: 305078 - DNA, 25 bp, Probe Sequence
tagtgaaccgtcagatcgcctggag

SEQ ID NO: 305079 - DNA, 25 bp, Probe Sequence
tagtgaaccgtcagatcgcctggag

SEQ ID NO: 305080 - DNA, 25 bp, Probe Sequence
tagtgaaccgtcagatcgcctggag

SEQ ID NO: 305081 - DNA, 25 bp, Probe Sequence
tagtgaaccgtcagatcgcctggag

SEQ ID NO: 305082 - DNA, 25 bp, Probe Sequence
tagtgaaccgtcagatcgcctggag

SEQ ID NO: 305083 - DNA, 25 bp, Probe Sequence
taggggcctgtatatccccagagac

SEQ ID NO: 305084 - DNA, 25 bp, Probe Sequence
tagggcccgtatttaccctatagca

SEQ ID NO: 305085 - DNA, 25 bp, Probe Sequence
tagagacccatgtcatcttaaccta

SEQ ID NO: 305086 - DNA, 25 bp, Probe Sequence
tagagcccctaactgtagacctgaa

SEQ ID NO: 305087 - DNA, 25 bp, Probe Sequence
tagggcctcatgggtgtagccgcat

SEQ ID NO: 305088 - DNA, 25 bp, Probe Sequence
tagaggcctttgcatctgggcctgg

SEQ ID NO: 305089 - DNA, 25 bp, Probe Sequence
tagagtcttttatctggtcagggga

SEQ ID NO: 305090 - DNA, 25 bp, Probe Sequence
tagaccctgtttcctttcaggaggg

SEQ ID NO: 305091 - DNA, 25 bp, Probe Sequence
tagacgctttaaagttctcaaaggg

SEQ ID NO: 305092 - DNA, 25 bp, Probe Sequence
tagactgtattgcaaggtataaaga

SEQ ID NO: 305093 - DNA, 25 bp, Probe Sequence
taggtaaatctatatgctgaaaagt

SEQ ID NO: 305094 - DNA, 25 bp, Probe Sequence
taggtccaattgttctgctctaact

SEQ ID NO: 305095 - DNA, 25 bp, Probe Sequence
tagttccacatttggctgcatcttg

SEQ ID NO: 305096 - DNA, 25 bp, Probe Sequence
tatggtccatagtacccattaggac

SEQ ID NO: 305097 - DNA, 25 bp, Probe Sequence
taggtctgaaggcctccatttgtac

SEQ ID NO: 305098 - DNA, 25 bp, Probe Sequence
tagagcacttgaacctcctttgtac

SEQ ID NO: 305099 - DNA, 25 bp, Probe Sequence
tagagagctattacctacctttcat

SEQ ID NO: 305100 - DNA, 25 bp, Probe Sequence
tagagcctttcacctaatcatgtct

SEQ ID NO: 305101 - DNA, 25 bp, Probe Sequence
tagaccttctcttcataatcttgct

SEQ ID NO: 305102 - DNA, 25 bp, Probe Sequence
tagagtctgttctacatgggcctgc

SEQ ID NO: 305103 - DNA, 25 bp, Probe Sequence
taggcatgtttaacatccagcactg

SEQ ID NO: 305104 - DNA, 25 bp, Probe Sequence
tagtcgtattttgccaccgtaaaca

SEQ ID NO: 305105 - DNA, 25 bp, Probe Sequence
tagacttttgttggtcgccctaata

SEQ ID NO: 305106 - DNA, 25 bp, Probe Sequence
tagactttgcagttgctgtggccgc

SEQ ID NO: 305107 - DNA, 25 bp, Probe Sequence
tagactgttatcttgttggccctat

SEQ ID NO: 305108 - DNA, 25 bp, Probe Sequence
tagagcatttgagtagttggttcct

SEQ ID NO: 305109 - DNA, 25 bp, Probe Sequence
tagagcttagtggaggctgggatcc

SEQ ID NO: 305110 - DNA, 25 bp, Probe Sequence
taggtttgagaattgtaggattcaa

SEQ ID NO: 305111 - DNA, 25 bp, Probe Sequence
taggcgtgtacgttgggagttcaaa

SEQ ID NO: 305112 - DNA, 25 bp, Probe Sequence
taggggtcaaggggagaatgctgaa

SEQ ID NO: 305113 - DNA, 25 bp, Probe Sequence
taggggttacctagataatgccaaa

SEQ ID NO: 305114 - DNA, 25 bp, Probe Sequence
tagggctgatttgtttaattaaact

SEQ ID NO: 305115 - DNA, 25 bp, Probe Sequence
tagtggcgttttttaacttctcaga

SEQ ID NO: 305116 - DNA, 25 bp, Probe Sequence
tagttcagttttttgacttcctttg

SEQ ID NO: 305117 - DNA, 25 bp, Probe Sequence
tagtcctgttttcctaataactttg

SEQ ID NO: 305118 - DNA, 25 bp, Probe Sequence
tagtcctgttttcctaataactttg

SEQ ID NO: 305119 - DNA, 25 bp, Probe Sequence
tagttgtttgtgagctatgataatc

SEQ ID NO: 305120 - DNA, 25 bp, Probe Sequence
tagtgttcgttcaagcctagcaatc

SEQ ID NO: 305121 - DNA, 25 bp, Probe Sequence
tagatttgtttcgagcccgtatcgc

SEQ ID NO: 305122 - DNA, 25 bp, Probe Sequence
tagatattgattttgggacttaccc

SEQ ID NO: 305123 - DNA, 25 bp, Probe Sequence
taggtttttatgttgattgtactca

SEQ ID NO: 305124 - DNA, 25 bp, Probe Sequence
tagtttagtttgtggcttcatggaa

SEQ ID NO: 305125 - DNA, 25 bp, Probe Sequence
tagatttcttttatggctatcaagt

SEQ ID NO: 305126 - DNA, 25 bp, Probe Sequence
taggcgtcacatatgcttggttcaa

SEQ ID NO: 305127 - DNA, 25 bp, Probe Sequence
tagggttttctcttggttgtagagt

SEQ ID NO: 305128 - DNA, 25 bp, Probe Sequence
tattggtatttctgtggggtcactg

SEQ ID NO: 305129 - DNA, 25 bp, Probe Sequence
tatggttaggtacgggtcttcctgc

SEQ ID NO: 305130 - DNA, 25 bp, Probe Sequence
taggaacggtgactggaccttccag

SEQ ID NO: 305131 - DNA, 25 bp, Probe Sequence
taggaactgattctctacctttctt

SEQ ID NO: 305132 - DNA, 25 bp, Probe Sequence
tagtgaactttcagctaccttttaa

SEQ ID NO: 305133 - DNA, 25 bp, Probe Sequence
tagttatttgtcacttacttggaaa

SEQ ID NO: 305134 - DNA, 25 bp, Probe Sequence
tagttttttcaccttcagttgtctc

SEQ ID NO: 305135 - DNA, 25 bp, Probe Sequence
tagtatttttgcctgttagtgattg

SEQ ID NO: 305136 - DNA, 25 bp, Probe Sequence
tagatatgtgttagtgtttaccttt

SEQ ID NO: 305137 - DNA, 25 bp, Probe Sequence
tagatgtgtgttatctgtaaccatt

SEQ ID NO: 305138 - DNA, 25 bp, Probe Sequence
tagtgtttctagcattatcccatcc

SEQ ID NO: 305139 - DNA, 25 bp, Probe Sequence
tagtgctgttccaggaatcctaccc

SEQ ID NO: 305140 - DNA, 25 bp, Probe Sequence
tatgtgcccccagggataccaagtg

SEQ ID NO: 305141 - DNA, 25 bp, Probe Sequence
tatggacccatctgggacctttgta

SEQ ID NO: 305142 - DNA, 25 bp, Probe Sequence
tagatcgcccttaaagacccattgt

SEQ ID NO: 305143 - DNA, 25 bp, Probe Sequence
tagatccaatttaatcaggcaccag

SEQ ID NO: 305144 - DNA, 25 bp, Probe Sequence
tagtagatatttaaacagtgccaga

SEQ ID NO: 305145 - DNA, 25 bp, Probe Sequence
tagtaatttgtatacacactgcaga

SEQ ID NO: 305146 - DNA, 25 bp, Probe Sequence
tagacctttgtgatagaactaaaat

SEQ ID NO: 305147 - DNA, 25 bp, Probe Sequence
tagacctttgtgatagaactaaaat

SEQ ID NO: 305148 - DNA, 25 bp, Probe Sequence
tagtcactttgccagctcaaaagaa

SEQ ID NO: 305149 - DNA, 25 bp, Probe Sequence
tagtcctagctgacgccaataataa

SEQ ID NO: 305150 - DNA, 25 bp, Probe Sequence
taggctcaaccctcatatttcaaga

SEQ ID NO: 305151 - DNA, 25 bp, Probe Sequence
tagggattccttccaatagttagat

SEQ ID NO: 305152 - DNA, 25 bp, Probe Sequence
taggaatctctttggaattgggagc

SEQ ID NO: 305153 - DNA, 25 bp, Probe Sequence
tatggagtcctcatgggtaaagcag

SEQ ID NO: 305154 - DNA, 25 bp, Probe Sequence
tagtggtctcagagctggaaaggca

SEQ ID NO: 305155 - DNA, 25 bp, Probe Sequence
tagagtgttcaaagcaggcccgagc

SEQ ID NO: 305156 - DNA, 25 bp, Probe Sequence
tagggcattacaatcctgtcctagc

SEQ ID NO: 305157 - DNA, 25 bp, Probe Sequence
tagacctcaacaagccgtatcttca

SEQ ID NO: 305158 - DNA, 25 bp, Probe Sequence
tagacctgaccaaggtgccagctat

SEQ ID NO: 305159 - DNA, 25 bp, Probe Sequence
tagtcacagacaaaagcatacagta

SEQ ID NO: 305160 - DNA, 25 bp, Probe Sequence
tagtgactgaaaagcctaagtgcaa

SEQ ID NO: 305161 - DNA, 25 bp, Probe Sequence
tagtgacttaatattgccagccaaa

SEQ ID NO: 305162 - DNA, 25 bp, Probe Sequence
tagtgccttgaatattgtagaattt

SEQ ID NO: 305163 - DNA, 25 bp, Probe Sequence
taggccctgtcatagtggaaatccc

SEQ ID NO: 305164 - DNA, 25 bp, Probe Sequence
taggccctatattatggtgacacct

SEQ ID NO: 305165 - DNA, 25 bp, Probe Sequence
tagagccctcattatgagcctccat

SEQ ID NO: 305166 - DNA, 25 bp, Probe Sequence
tagagcccatgatagcagctgcagc

SEQ ID NO: 305167 - DNA, 25 bp, Probe Sequence
tagtgcgtctgagatgaagcagctc

SEQ ID NO: 305168 - DNA, 25 bp, Probe Sequence
tagatggatataaatgcagcaactt

SEQ ID NO: 305169 - DNA, 25 bp, Probe Sequence
tagaggtcatacaataagactttaa

SEQ ID NO: 305170 - DNA, 25 bp, Probe Sequence
tagaggaaagcttaatactcttttt

SEQ ID NO: 305171 - DNA, 25 bp, Probe Sequence
tagagtcctatttaatttcttcttt

SEQ ID NO: 305172 - DNA, 25 bp, Probe Sequence
tagagtttctgtttgattctttttt

SEQ ID NO: 305173 - DNA, 25 bp, Probe Sequence
taggttatttgatatgtcctttcct

SEQ ID NO: 305174 - DNA, 25 bp, Probe Sequence
tagggatgcctttctagtcctattc

SEQ ID NO: 305175 - DNA, 25 bp, Probe Sequence
taggagcccattttttcctaatctg

SEQ ID NO: 305176 - DNA, 25 bp, Probe Sequence
taggactatttgtttccctacactt

SEQ ID NO: 305177 - DNA, 25 bp, Probe Sequence
tagagtttttctgaacctgatagtt

SEQ ID NO: 305178 - DNA, 25 bp, Probe Sequence
taggccttttagaaaacatggagtt

SEQ ID NO: 305179 - DNA, 25 bp, Probe Sequence
taggtgttttagctataatttctta

SEQ ID NO: 305180 - DNA, 25 bp, Probe Sequence
tagtatctgtttagggaaatttcct

SEQ ID NO: 305181 - DNA, 25 bp, Probe Sequence
tagttggattttgggaccttggcct

SEQ ID NO: 305182 - DNA, 25 bp, Probe Sequence
tagtgggattggtggataatatggt

SEQ ID NO: 305183 - DNA, 25 bp, Probe Sequence
tagagggggctttggcaactatggt

SEQ ID NO: 305184 - DNA, 25 bp, Probe Sequence
tagaggggatcctggacacactgga

SEQ ID NO: 305185 - DNA, 25 bp, Probe Sequence
taggcgaggatttcctgaccaagag

SEQ ID NO: 305186 - DNA, 25 bp, Probe Sequence
taggaaaatcaaggcccgcaaaggc

SEQ ID NO: 305187 - DNA, 25 bp, Probe Sequence
taggaaaatcaaggcccgcaaaggc

SEQ ID NO: 305188 - DNA, 25 bp, Probe Sequence
taggttccataaatgcccgacaagt

SEQ ID NO: 305189 - DNA, 25 bp, Probe Sequence
tagtgttcctcatgtgttctaaagt

SEQ ID NO: 305190 - DNA, 25 bp, Probe Sequence
tagtcctcaccttctgttttagagt

SEQ ID NO: 305191 - DNA, 25 bp, Probe Sequence
tagtcctattctattgcagttatag

SEQ ID NO: 305192 - DNA, 25 bp, Probe Sequence
taggccaattcttggtagttctctt

SEQ ID NO: 305193 - DNA, 25 bp, Probe Sequence
tagatccatatttcggaggtcttct

SEQ ID NO: 305194 - DNA, 25 bp, Probe Sequence
tagatccatttctgcagaacttact

SEQ ID NO: 305195 - DNA, 25 bp, Probe Sequence
tagaggctttgctgggacataacat

SEQ ID NO: 305196 - DNA, 25 bp, Probe Sequence
tagagacttctaggaaatcaagaga

SEQ ID NO: 305197 - DNA, 25 bp, Probe Sequence
tagagtttgcctcaacacatgtgag

SEQ ID NO: 305198 - DNA, 25 bp, Probe Sequence
tagttgcttccctaactgcaaaggc

SEQ ID NO: 305199 - DNA, 25 bp, Probe Sequence
tagttgcttccctaactgcaaaggc

SEQ ID NO: 305200 - DNA, 25 bp, Probe Sequence
tagtggatcccctaacaacagtgag

SEQ ID NO: 305201 - DNA, 25 bp, Probe Sequence
tagataatgccttaatacgtcctgg

SEQ ID NO: 305202 - DNA, 25 bp, Probe Sequence
tatgaggtgctctgttacgtgcctg

SEQ ID NO: 305203 - DNA, 25 bp, Probe Sequence
tagggctgtgccttgtactgtgccc

SEQ ID NO: 305204 - DNA, 25 bp, Probe Sequence
tagaggcttgtgtgcacgtgagcgt

SEQ ID NO: 305205 - DNA, 25 bp, Probe Sequence
tagtgcctgctgacttaggtggcgt

SEQ ID NO: 305206 - DNA, 25 bp, Probe Sequence
tagtcaccttcatcacagcatgtgc

SEQ ID NO: 305207 - DNA, 25 bp, Probe Sequence
tagtgaccttctcaagctgtcaggt

SEQ ID NO: 305208 - DNA, 25 bp, Probe Sequence
tagtccagctttaagtttcggtaag

SEQ ID NO: 305209 - DNA, 25 bp, Probe Sequence
tagtgccctttgtcagtttgaggga

SEQ ID NO: 305210 - DNA, 25 bp, Probe Sequence
tagtacgcttcttagtgttgagaga

SEQ ID NO: 305211 - DNA, 25 bp, Probe Sequence
tagtagacctgccctgtgttatgga

SEQ ID NO: 305212 - DNA, 25 bp, Probe Sequence
tagtcatacctaaatttttcagcac

SEQ ID NO: 305213 - DNA, 25 bp, Probe Sequence
tagtaactgtgtaatttgttcaaga

SEQ ID NO: 305214 - DNA, 25 bp, Probe Sequence
taggaagctggtcagttttacagtg

SEQ ID NO: 305215 - DNA, 25 bp, Probe Sequence
tagagtagggtttgttaaaacatgg

SEQ ID NO: 305216 - DNA, 25 bp, Probe Sequence
taggattggcggctcattcaaaaat

SEQ ID NO: 305217 - DNA, 25 bp, Probe Sequence
taggtgtcgggtttctagagaagcc

SEQ ID NO: 305218 - DNA, 25 bp, Probe Sequence
tagggccagtgacagttgcagaaat

SEQ ID NO: 305219 - DNA, 25 bp, Probe Sequence
tagtcgctatagaaatgttgctgaa

SEQ ID NO: 305220 - DNA, 25 bp, Probe Sequence
tagatggcactactcctgtgtgtga

SEQ ID NO: 305221 - DNA, 25 bp, Probe Sequence
tagatggattctccactcagttgca

SEQ ID NO: 305222 - DNA, 25 bp, Probe Sequence
tagtgcagaatacgcagtctttgag

SEQ ID NO: 305223 - DNA, 25 bp, Probe Sequence
tagtagaaatgatgcttctgctcag

SEQ ID NO: 305224 - DNA, 25 bp, Probe Sequence
tagagtcttgtctccaatgtcagtg

SEQ ID NO: 305225 - DNA, 25 bp, Probe Sequence
tagagattggttaagtagttgtgac

SEQ ID NO: 305226 - DNA, 25 bp, Probe Sequence
taggtatggttgcaggcacctgtaa

SEQ ID NO: 305227 - DNA, 25 bp, Probe Sequence
taggtctggttgttgcaccatctgc

SEQ ID NO: 305228 - DNA, 25 bp, Probe Sequence
taggagttgaatttgcactttgcct

SEQ ID NO: 305229 - DNA, 25 bp, Probe Sequence
taggcaacttcatttggcttgtgtg

SEQ ID NO: 305230 - DNA, 25 bp, Probe Sequence
tagtggaaactggggcttatgctgc

SEQ ID NO: 305231 - DNA, 25 bp, Probe Sequence
taggagagactcggggttctcgttg

SEQ ID NO: 305232 - DNA, 25 bp, Probe Sequence
tagtagtgagctgggaggcgcttcc

SEQ ID NO: 305233 - DNA, 25 bp, Probe Sequence
tagtagtgagctgggaggcgcttcc

SEQ ID NO: 305234 - DNA, 25 bp, Probe Sequence
tagtgactgagtggggggtgctggc

SEQ ID NO: 305235 - DNA, 25 bp, Probe Sequence
taggttggtgagcacacgtctggcc

SEQ ID NO: 305236 - DNA, 25 bp, Probe Sequence
tagggtcctgaggacaccgtgagcc

SEQ ID NO: 305237 - DNA, 25 bp, Probe Sequence
tagtccctatgaaatcagccgtgcc

SEQ ID NO: 305238 - DNA, 25 bp, Probe Sequence
tagtcccatgctatctcagggggct

SEQ ID NO: 305239 - DNA, 25 bp, Probe Sequence
tagtcccagctagttgggaggctga

SEQ ID NO: 305240 - DNA, 25 bp, Probe Sequence
tagttccagctactcagtgagatgg

SEQ ID NO: 305241 - DNA, 25 bp, Probe Sequence
tagtcccagctactcgagaggctaa

SEQ ID NO: 305242 - DNA, 25 bp, Probe Sequence
tagtcccagctatgcgagaggctga

SEQ ID NO: 305243 - DNA, 25 bp, Probe Sequence
tagatgccagcaggggagagtttga

SEQ ID NO: 305244 - DNA, 25 bp, Probe Sequence
tagagtggttggcagagtcctcatt

SEQ ID NO: 305245 - DNA, 25 bp, Probe Sequence
tagagtggctagtagtttcttcatt

SEQ ID NO: 305246 - DNA, 25 bp, Probe Sequence
tagaggccactgtgtttctagcact

SEQ ID NO: 305247 - DNA, 25 bp, Probe Sequence
tagaggcttcttagattctcccagc

SEQ ID NO: 305248 - DNA, 25 bp, Probe Sequence
tagattgttcttataccacctctca

SEQ ID NO: 305249 - DNA, 25 bp, Probe Sequence
tagatttacaataatgcacccctct

SEQ ID NO: 305250 - DNA, 25 bp, Probe Sequence
tagattctccagagtccatgccatt

SEQ ID NO: 305251 - DNA, 25 bp, Probe Sequence
tagatagtccgagcttcatcgtatc

SEQ ID NO: 305252 - DNA, 25 bp, Probe Sequence
tagagatcccgagcatcttggtcat

SEQ ID NO: 305253 - DNA, 25 bp, Probe Sequence
tagatgactccgtttgcattcttct

SEQ ID NO: 305254 - DNA, 25 bp, Probe Sequence
taggcacaccacttactggctatta

SEQ ID NO: 305255 - DNA, 25 bp, Probe Sequence
taggctacacaaaactagttggagt

SEQ ID NO: 305256 - DNA, 25 bp, Probe Sequence
taggctgcacaagagccttgattga

SEQ ID NO: 305257 - DNA, 25 bp, Probe Sequence
tagatcatctaagatccatgctgat

SEQ ID NO: 305258 - DNA, 25 bp, Probe Sequence
tagttctaatgcttctactgcagct

SEQ ID NO: 305259 - DNA, 25 bp, Probe Sequence
tagtgggagatgttctgcaggcagc

SEQ ID NO: 305260 - DNA, 25 bp, Probe Sequence
tatgtggagagcgacagtaggctgc

SEQ ID NO: 305261 - DNA, 25 bp, Probe Sequence
taggggagccaacatgccagtggcc

SEQ ID NO: 305262 - DNA, 25 bp, Probe Sequence
tagtggaacccggttcagatcgccc

SEQ ID NO: 305263 - DNA, 25 bp, Probe Sequence
taggagaatcccggtgatccaggca

SEQ ID NO: 305264 - DNA, 25 bp, Probe Sequence
tagggagatctgagggcatccgaca

SEQ ID NO: 305265 - DNA, 25 bp, Probe Sequence
tagtctgagaggaaaggccccaagc

SEQ ID NO: 305266 - DNA, 25 bp, Probe Sequence
tatgtctgacgtatacggcgccaac

SEQ ID NO: 305267 - DNA, 25 bp, Probe Sequence
tagttgaggatagtcaggagcgtca

SEQ ID NO: 305268 - DNA, 25 bp, Probe Sequence
tagaggaggatgatcctgagctgtt

SEQ ID NO: 305269 - DNA, 25 bp, Probe Sequence
tagatggaacacatgctctgatgcg

SEQ ID NO: 305270 - DNA, 25 bp, Probe Sequence
tagtctgtgaccctgtatgatccta

SEQ ID NO: 305271 - DNA, 25 bp, Probe Sequence
tagattgtgatcccttgagatatgg

SEQ ID NO: 305272 - DNA, 25 bp, Probe Sequence
tagatgtctgatggtttgaggagaa

SEQ ID NO: 305273 - DNA, 25 bp, Probe Sequence
tagatggcctctatgtaggagcaaa

SEQ ID NO: 305274 - DNA, 25 bp, Probe Sequence
tagattgcctctcctggacatggca

SEQ ID NO: 305275 - DNA, 25 bp, Probe Sequence
tatgttggctgcccaggatgtggcc

SEQ ID NO: 305276 - DNA, 25 bp, Probe Sequence
tatttggctgccaggagtgatgcat

SEQ ID NO: 305277 - DNA, 25 bp, Probe Sequence
tagttgcctgtctgggaatacctct

SEQ ID NO: 305278 - DNA, 25 bp, Probe Sequence
tagtccctgttcagagataattcta

SEQ ID NO: 305279 - DNA, 25 bp, Probe Sequence
tagtcttggttctgaaacttctcta

SEQ ID NO: 305280 - DNA, 25 bp, Probe Sequence
tatagctggtgccccaaaacttcca

SEQ ID NO: 305281 - DNA, 25 bp, Probe Sequence
tatgactgacgtccccagaagtttc

SEQ ID NO: 305282 - DNA, 25 bp, Probe Sequence
taggtgcctggacccagggtgtgcc

SEQ ID NO: 305283 - DNA, 25 bp, Probe Sequence
tagggctcaggacaagtggctcccc

SEQ ID NO: 305284 - DNA, 25 bp, Probe Sequence
tagggtctggagtcagactcagccg

SEQ ID NO: 305285 - DNA, 25 bp, Probe Sequence
taggcgatgcgtgaccacgcagccc

SEQ ID NO: 305286 - DNA, 25 bp, Probe Sequence
tagggagcagttacaagggcctgca

SEQ ID NO: 305287 - DNA, 25 bp, Probe Sequence
tagtgcgggtatagacacccccaaa

SEQ ID NO: 305288 - DNA, 25 bp, Probe Sequence
tagtgcttgtggagatcacagcccc

SEQ ID NO: 305289 - DNA, 25 bp, Probe Sequence
taggtttgtttgaacacttctcttt

SEQ ID NO: 305290 - DNA, 25 bp, Probe Sequence
taggtgttggtataactaaatcttt

SEQ ID NO: 305291 - DNA, 25 bp, Probe Sequence
tagtgttctgtttgaaactaatact

SEQ ID NO: 305292 - DNA, 25 bp, Probe Sequence
tttttttgtgggcaccagaactagc

SEQ ID NO: 305293 - DNA, 25 bp, Probe Sequence
tttttccggctggaaccatggaggg

SEQ ID NO: 305294 - DNA, 25 bp, Probe Sequence
tattttccggcattcaacctacagg

SEQ ID NO: 305295 - DNA, 25 bp, Probe Sequence
tttcttctaccagacccttctggtg

SEQ ID NO: 305296 - DNA, 25 bp, Probe Sequence
tttcccataagagctccctttgtgg

SEQ ID NO: 305297 - DNA, 25 bp, Probe Sequence
ttctatttacagtgtaccctttgaa

SEQ ID NO: 305298 - DNA, 25 bp, Probe Sequence
ttcttttaaggtgacccatctgtga

SEQ ID NO: 305299 - DNA, 25 bp, Probe Sequence
tttttttagggcgcagactgctgcg

SEQ ID NO: 305300 - DNA, 25 bp, Probe Sequence
tttctggttctgagcgtcaactctc

SEQ ID NO: 305301 - DNA, 25 bp, Probe Sequence
tttcgattttggtgtcgtctctcat

SEQ ID NO: 305302 - DNA, 25 bp, Probe Sequence
tagggaggggagtgtcttctctctc

SEQ ID NO: 305303 - DNA, 25 bp, Probe Sequence
tagggaggggagtgtcttctctctc

SEQ ID NO: 305304 - DNA, 25 bp, Probe Sequence
ttggctggggagcacttaattcttc

SEQ ID NO: 305305 - DNA, 25 bp, Probe Sequence
tatggtggatttgacttttgtcttc

SEQ ID NO: 305306 - DNA, 25 bp, Probe Sequence
tagatctggcatgttagcccttcct

SEQ ID NO: 305307 - DNA, 25 bp, Probe Sequence
tagttgatctttcagatctttccat

SEQ ID NO: 305308 - DNA, 25 bp, Probe Sequence
tagttgtctttcagctccatattta

SEQ ID NO: 305309 - DNA, 25 bp, Probe Sequence
tagtcattccaggcaagtccattca

SEQ ID NO: 305310 - DNA, 25 bp, Probe Sequence
tagtattcaggcaaatgttcatttc

SEQ ID NO: 305311 - DNA, 25 bp, Probe Sequence
tagtactgattcatagattctatct

SEQ ID NO: 305312 - DNA, 25 bp, Probe Sequence
tagtcactgggcacaagtttgctga

SEQ ID NO: 305313 - DNA, 25 bp, Probe Sequence
tagtcaattagcacatgttttgcat

SEQ ID NO: 305314 - DNA, 25 bp, Probe Sequence
tagtctttgtgtagcttatttcata

SEQ ID NO: 305315 - DNA, 25 bp, Probe Sequence
tagtcatctgtgtttcaatttctat

SEQ ID NO: 305316 - DNA, 25 bp, Probe Sequence
tagtgcatttgagcacacattttaa

SEQ ID NO: 305317 - DNA, 25 bp, Probe Sequence
tagtgcttaaacctgatttctaaaa

SEQ ID NO: 305318 - DNA, 25 bp, Probe Sequence
taggttaaacctactgttgttagat

SEQ ID NO: 305319 - DNA, 25 bp, Probe Sequence
tagggtagatcttcatattgctgtg

SEQ ID NO: 305320 - DNA, 25 bp, Probe Sequence
taggtgtagactttccactgcagcg

SEQ ID NO: 305321 - DNA, 25 bp, Probe Sequence
tagggcattgattagttactgactt

SEQ ID NO: 305322 - DNA, 25 bp, Probe Sequence
tagtggatgtgtttgtctacaagta

SEQ ID NO: 305323 - DNA, 25 bp, Probe Sequence
tagtgacagatgttgttgatcacaa

SEQ ID NO: 305324 - DNA, 25 bp, Probe Sequence
tagtactctttgtagcaaaattctt

SEQ ID NO: 305325 - DNA, 25 bp, Probe Sequence
tagattttttgaagaagcgcatctt

SEQ ID NO: 305326 - DNA, 25 bp, Probe Sequence
tagtcttgtttgacaaagctaccta

SEQ ID NO: 305327 - DNA, 25 bp, Probe Sequence
tagtcttagctactcttagctactt

SEQ ID NO: 305328 - DNA, 25 bp, Probe Sequence
tagtcatgtacagctcttgagccct

SEQ ID NO: 305329 - DNA, 25 bp, Probe Sequence
tagtagtccatgtattttccgtgag

SEQ ID NO: 305330 - DNA, 25 bp, Probe Sequence
tagtcctccagctaaatttcagtaa

SEQ ID NO: 305331 - DNA, 25 bp, Probe Sequence
tagtgcacactatgaaattctcaaa

SEQ ID NO: 305332 - DNA, 25 bp, Probe Sequence
tagtctacttagaaagaatcagata

SEQ ID NO: 305333 - DNA, 25 bp, Probe Sequence
tagttagcatttcataggattgttg

SEQ ID NO: 305334 - DNA, 25 bp, Probe Sequence
tagtataatgatttttgaggtcttg

SEQ ID NO: 305335 - DNA, 25 bp, Probe Sequence
tatggttaaagttgctgtggttggt

SEQ ID NO: 305336 - DNA, 25 bp, Probe Sequence
tataggattaagtgcattcgattgt

SEQ ID NO: 305337 - DNA, 25 bp, Probe Sequence
tagggttagatgtgtgttatctgta

SEQ ID NO: 305338 - DNA, 25 bp, Probe Sequence
tagtgtcttactctgttttctggat

SEQ ID NO: 305339 - DNA, 25 bp, Probe Sequence
tagtactgtattgggcttcttcgtt

SEQ ID NO: 305340 - DNA, 25 bp, Probe Sequence
tagtactgtattgggcttcttcgtt

SEQ ID NO: 305341 - DNA, 25 bp, Probe Sequence
tagattttgcttgggttttctttct

SEQ ID NO: 305342 - DNA, 25 bp, Probe Sequence
tagtgattttagggctttgttattt

SEQ ID NO: 305343 - DNA, 25 bp, Probe Sequence
tatagttccctcacttgattttttt

SEQ ID NO: 305344 - DNA, 25 bp, Probe Sequence
tatggcttaccctctagaatttcta

SEQ ID NO: 305345 - DNA, 25 bp, Probe Sequence
tagggtacccagaccaattttatgt

SEQ ID NO: 305346 - DNA, 25 bp, Probe Sequence
taggacttcccatccatattatcta

SEQ ID NO: 305347 - DNA, 25 bp, Probe Sequence
tagtatttgctcaacccagttacag

SEQ ID NO: 305348 - DNA, 25 bp, Probe Sequence
tagattattgtaacctttcaacctg

SEQ ID NO: 305349 - DNA, 25 bp, Probe Sequence
tagtcatttgtaaatctcttcatac

SEQ ID NO: 305350 - DNA, 25 bp, Probe Sequence
tagtcacggtagtaatttcattctg

SEQ ID NO: 305351 - DNA, 25 bp, Probe Sequence
tagttccgtagttttgagacctggt

SEQ ID NO: 305352 - DNA, 25 bp, Probe Sequence
tagttcctcttgttttaagcttctt

SEQ ID NO: 305353 - DNA, 25 bp, Probe Sequence
tagtccgtcgtgcttgatttgtttt

SEQ ID NO: 305354 - DNA, 25 bp, Probe Sequence
tagtcagcccgtcatttttggtaca

SEQ ID NO: 305355 - DNA, 25 bp, Probe Sequence
taggaacggtaaatttctgtgggag

SEQ ID NO: 305356 - DNA, 25 bp, Probe Sequence
tagtcaagggtctcttcgtgtggtg

SEQ ID NO: 305357 - DNA, 25 bp, Probe Sequence
tagtcaacggtcagcttgttggtgc

SEQ ID NO: 305358 - DNA, 25 bp, Probe Sequence
tagtcataaaacaccatcattaaga

SEQ ID NO: 305359 - DNA, 25 bp, Probe Sequence
tagttatggaaaacaccagtataga

SEQ ID NO: 305360 - DNA, 25 bp, Probe Sequence
tagtctagtaaaagtcccttgacaa

SEQ ID NO: 305361 - DNA, 25 bp, Probe Sequence
tagtctaggtttaggcccttgtaca

SEQ ID NO: 305362 - DNA, 25 bp, Probe Sequence
tatggtaatattttgaccctttata

SEQ ID NO: 305363 - DNA, 25 bp, Probe Sequence
tagttcacacataaagtccttttaa

SEQ ID NO: 305364 - DNA, 25 bp, Probe Sequence
tagattgctcaaatcaggttttctt

SEQ ID NO: 305365 - DNA, 25 bp, Probe Sequence
tagatttccatgaagatatttgtct

SEQ ID NO: 305366 - DNA, 25 bp, Probe Sequence
tagatttacgctgtcattagtcatg

SEQ ID NO: 305367 - DNA, 25 bp, Probe Sequence
tagtattccactgtactcattcata

SEQ ID NO: 305368 - DNA, 25 bp, Probe Sequence
tatcttatccttttaccaaatcaat

SEQ ID NO: 305369 - DNA, 25 bp, Probe Sequence
tatggtacctgtttcaaaacatatt

SEQ ID NO: 305370 - DNA, 25 bp, Probe Sequence
tagtgataccttctcatttgccatt

SEQ ID NO: 305371 - DNA, 25 bp, Probe Sequence
taggaatccattctcactgtgttcg

SEQ ID NO: 305372 - DNA, 25 bp, Probe Sequence
taggaattgctagatagtgttttga

SEQ ID NO: 305373 - DNA, 25 bp, Probe Sequence
taggtttgctgagaaggcttcatta

SEQ ID NO: 305374 - DNA, 25 bp, Probe Sequence
ttagcattttcaagaagacggatta

SEQ ID NO: 305375 - DNA, 25 bp, Probe Sequence
tatggcttcattgagaaactgggaa

SEQ ID NO: 305376 - DNA, 25 bp, Probe Sequence
tatgctgcattatgaacacaactga

SEQ ID NO: 305377 - DNA, 25 bp, Probe Sequence
tatgatgactcagtggtgccagagt

SEQ ID NO: 305378 - DNA, 25 bp, Probe Sequence
tatgaaccgcatggtgcttgcagtt

SEQ ID NO: 305379 - DNA, 25 bp, Probe Sequence
tatggtcaggatatttggattagcc

SEQ ID NO: 305380 - DNA, 25 bp, Probe Sequence
taggtaggttccacagttactcttc

SEQ ID NO: 305381 - DNA, 25 bp, Probe Sequence
taggtgagggtctccacatttactt

SEQ ID NO: 305382 - DNA, 25 bp, Probe Sequence
tagtgttggaactgcctcttatttt

SEQ ID NO: 305383 - DNA, 25 bp, Probe Sequence
taggttgaaacatatctcttatctt

SEQ ID NO: 305384 - DNA, 25 bp, Probe Sequence
taggttgaaaacctcctgcttctac

SEQ ID NO: 305385 - DNA, 25 bp, Probe Sequence
taggtctacaagacgcttacttccc

SEQ ID NO: 305386 - DNA, 25 bp, Probe Sequence
taggcctcattagagcttggtctcc

SEQ ID NO: 305387 - DNA, 25 bp, Probe Sequence
taggctactaagtgcattttcatca

SEQ ID NO: 305388 - DNA, 25 bp, Probe Sequence
tagttactaaaaattgctgatcatt

SEQ ID NO: 305389 - DNA, 25 bp, Probe Sequence
tagttactaatactttgttgacttt

SEQ ID NO: 305390 - DNA, 25 bp, Probe Sequence
tagttaaacatttcaaattggcttt

SEQ ID NO: 305391 - DNA, 25 bp, Probe Sequence
taggccaaagatttcttcttcgttc

SEQ ID NO: 305392 - DNA, 25 bp, Probe Sequence
tagggcatatattttttttttcttg

SEQ ID NO: 305393 - DNA, 25 bp, Probe Sequence
tagatagttctgcctcttttttttt

SEQ ID NO: 305394 - DNA, 25 bp, Probe Sequence
tagatagcttctgatttcctctctt

SEQ ID NO: 305395 - DNA, 25 bp, Probe Sequence
tagtcacttctgattctgacaatca

SEQ ID NO: 305396 - DNA, 25 bp, Probe Sequence
tagtaattctgtttcatgagatatg

SEQ ID NO: 305397 - DNA, 25 bp, Probe Sequence
tagtgaatgtctgtgctaggcactg

SEQ ID NO: 305398 - DNA, 25 bp, Probe Sequence
taggatcgttcagccgctgcattga

SEQ ID NO: 305399 - DNA, 25 bp, Probe Sequence
tagtgtggttgctcacgcaagtaat

SEQ ID NO: 305400 - DNA, 25 bp, Probe Sequence
taggtgtctgccttcacaaatgtca

SEQ ID NO: 305401 - DNA, 25 bp, Probe Sequence
tatggcgtggccttatcgattgcag

SEQ ID NO: 305402 - DNA, 25 bp, Probe Sequence
tatggctggctcaaggccgattcac

SEQ ID NO: 305403 - DNA, 25 bp, Probe Sequence
tatgtgcgcgtcaacaggtaacact

SEQ ID NO: 305404 - DNA, 25 bp, Probe Sequence
taggggactgcatgggaagcacgga

SEQ ID NO: 305405 - DNA, 25 bp, Probe Sequence
taggggaatctaagcacaatgcatt

SEQ ID NO: 305406 - DNA, 25 bp, Probe Sequence
taggggagatccagcacatgagcca

SEQ ID NO: 305407 - DNA, 25 bp, Probe Sequence
tatggggacatcggtccaagcccaa

SEQ ID NO: 305408 - DNA, 25 bp, Probe Sequence
taggggacacgagagcacgccctat

SEQ ID NO: 305409 - DNA, 25 bp, Probe Sequence
taggtaactcaagtgtcacctcctt

SEQ ID NO: 305410 - DNA, 25 bp, Probe Sequence
tagggaagctgagtgtgtcgctccc

SEQ ID NO: 305411 - DNA, 25 bp, Probe Sequence
taggttaacattgttgctccctgtg

SEQ ID NO: 305412 - DNA, 25 bp, Probe Sequence
tagtgttatactagactacccttta

SEQ ID NO: 305413 - DNA, 25 bp, Probe Sequence
tagtttagactttatacccttagct

SEQ ID NO: 305414 - DNA, 25 bp, Probe Sequence
tagtttctactctttaactccaagt

SEQ ID NO: 305415 - DNA, 25 bp, Probe Sequence
tagttttcaccactgtgatctttaa

SEQ ID NO: 305416 - DNA, 25 bp, Probe Sequence
taggattttccactctatctttgtg

SEQ ID NO: 305417 - DNA, 25 bp, Probe Sequence
tagttttgtctattatgactttggt

SEQ ID NO: 305418 - DNA, 25 bp, Probe Sequence
tagttttgccttttccagtatgtta

SEQ ID NO: 305419 - DNA, 25 bp, Probe Sequence
taggttgaggttttccagtaattct

SEQ ID NO: 305420 - DNA, 25 bp, Probe Sequence
tatggacggggcattccagctgaga

SEQ ID NO: 305421 - DNA, 25 bp, Probe Sequence
tatggattggggatgccccgcctta

SEQ ID NO: 305422 - DNA, 25 bp, Probe Sequence
tatgggaggggttggtccctggtca

SEQ ID NO: 305423 - DNA, 25 bp, Probe Sequence
taggagcagtggaaatggttccttg

SEQ ID NO: 305424 - DNA, 25 bp, Probe Sequence
taggagtgggatccaggctcctctc

SEQ ID NO: 305425 - DNA, 25 bp, Probe Sequence
taggagtctgcgagagcctccttgg

SEQ ID NO: 305426 - DNA, 25 bp, Probe Sequence
tagtggattcagagactccccaggc

SEQ ID NO: 305427 - DNA, 25 bp, Probe Sequence
tagtggttgaagccccagcaaagga

SEQ ID NO: 305428 - DNA, 25 bp, Probe Sequence
tagtggcatctgtatgagcccagag

SEQ ID NO: 305429 - DNA, 25 bp, Probe Sequence
tagtgctgcacaatggcccagaaga

SEQ ID NO: 305430 - DNA, 25 bp, Probe Sequence
tatgatccagcaaggcacaatgagt

SEQ ID NO: 305431 - DNA, 25 bp, Probe Sequence
tatgtgccacaagaaaattaaattt

SEQ ID NO: 305432 - DNA, 25 bp, Probe Sequence
taggcccaaaattagcgtgacactt

SEQ ID NO: 305433 - DNA, 25 bp, Probe Sequence
tatagaccagactttggccagtcct

SEQ ID NO: 305434 - DNA, 25 bp, Probe Sequence
tatataccatcactttgggacttgg

SEQ ID NO: 305435 - DNA, 25 bp, Probe Sequence
tatatgaccctgtctgtgggactga

SEQ ID NO: 305436 - DNA, 25 bp, Probe Sequence
ttgtgagccgtgtcgtatgacctag

SEQ ID NO: 305437 - DNA, 25 bp, Probe Sequence
ttgctacgggccctagacaatacga

SEQ ID NO: 305438 - DNA, 25 bp, Probe Sequence
ttctaccttggcagaacatgtacgt

SEQ ID NO: 305439 - DNA, 25 bp, Probe Sequence
tagtggcctttcaggactgtcacag

SEQ ID NO: 305440 - DNA, 25 bp, Probe Sequence
taggagcatcttcaaggcggtcaca

SEQ ID NO: 305441 - DNA, 25 bp, Probe Sequence
taggaatatctgcactggcctgtcc

SEQ ID NO: 305442 - DNA, 25 bp, Probe Sequence
tagtgaactgtggactcgctttccc

SEQ ID NO: 305443 - DNA, 25 bp, Probe Sequence
taggaatcgggagcttgccatcctg

SEQ ID NO: 305444 - DNA, 25 bp, Probe Sequence
taggacacaggggactccttgacgc

SEQ ID NO: 305445 - DNA, 25 bp, Probe Sequence
taggacactcaagacttttgactgc

SEQ ID NO: 305446 - DNA, 25 bp, Probe Sequence
ttggacccaatccattcttaggccc

SEQ ID NO: 305447 - DNA, 25 bp, Probe Sequence
taggtcaccaattatacattcccca

SEQ ID NO: 305448 - DNA, 25 bp, Probe Sequence
taggtataagttcaatgttcccatc

SEQ ID NO: 305449 - DNA, 25 bp, Probe Sequence
tagggtaacttccaggcatggccct

SEQ ID NO: 305450 - DNA, 25 bp, Probe Sequence
tagggctatctcaggcaatatggcc

SEQ ID NO: 305451 - DNA, 25 bp, Probe Sequence
tatgggttctctcgatgccatggac

SEQ ID NO: 305452 - DNA, 25 bp, Probe Sequence
tatggccaaccttgccatctggcat

SEQ ID NO: 305453 - DNA, 25 bp, Probe Sequence
tatggactaccatgccatgtggaga

SEQ ID NO: 305454 - DNA, 25 bp, Probe Sequence
taggttcctcagtccgatggtgaat

SEQ ID NO: 305455 - DNA, 25 bp, Probe Sequence
tatggttccggaggccagagtccaa

SEQ ID NO: 305456 - DNA, 25 bp, Probe Sequence
taggcttccgagaggagccctgaga

SEQ ID NO: 305457 - DNA, 25 bp, Probe Sequence
tataccaacaagaaggcaccagggg

SEQ ID NO: 305458 - DNA, 25 bp, Probe Sequence
tatgcagcccacaagaaggccctgc

SEQ ID NO: 305459 - DNA, 25 bp, Probe Sequence
tatggcctgcactactgaagcacct

SEQ ID NO: 305460 - DNA, 25 bp, Probe Sequence
taggcttgctcatgctgaagcttaa

SEQ ID NO: 305461 - DNA, 25 bp, Probe Sequence
taggtcatgttccatatatgttata

SEQ ID NO: 305462 - DNA, 25 bp, Probe Sequence
tatgtatctttctgtgatttcatca

SEQ ID NO: 305463 - DNA, 25 bp, Probe Sequence
tagtgcagctttgggtgatcttgaa

SEQ ID NO: 305464 - DNA, 25 bp, Probe Sequence
taggtgacctgcttggatctagaca

SEQ ID NO: 305465 - DNA, 25 bp, Probe Sequence
tagtgtacgatactagcatctggta

SEQ ID NO: 305466 - DNA, 25 bp, Probe Sequence
taggtattgcattgctatccgtgga

SEQ ID NO: 305467 - DNA, 25 bp, Probe Sequence
taggtcattgcttgtaccaggtaat

SEQ ID NO: 305468 - DNA, 25 bp, Probe Sequence
taggttgtgccatgagtgggctaat

SEQ ID NO: 305469 - DNA, 25 bp, Probe Sequence
tagtcttggccccaggaagcgaagg

SEQ ID NO: 305470 - DNA, 25 bp, Probe Sequence
tagtttgtctcctgggactggggga

SEQ ID NO: 305471 - DNA, 25 bp, Probe Sequence
tagtgttggtcacaggtgacctgaa

SEQ ID NO: 305472 - DNA, 25 bp, Probe Sequence
taggttggagcacaggttctgccac

SEQ ID NO: 305473 - DNA, 25 bp, Probe Sequence
tatggtatgaggtcgccacttctcc

SEQ ID NO: 305474 - DNA, 25 bp, Probe Sequence
tatgtgtggagggtgccctcccgtc

SEQ ID NO: 305475 - DNA, 25 bp, Probe Sequence
tatgttgtaggcctgttctgacagc

SEQ ID NO: 305476 - DNA, 25 bp, Probe Sequence
tagtggtcgtgcctgtgtgtatcag

SEQ ID NO: 305477 - DNA, 25 bp, Probe Sequence
tagggcttgtgccctgtttcactta

SEQ ID NO: 305478 - DNA, 25 bp, Probe Sequence
tagggcttgtgccctgtttcactta

SEQ ID NO: 305479 - DNA, 25 bp, Probe Sequence
taggtccgtccggtgtgtcagattt

SEQ ID NO: 305480 - DNA, 25 bp, Probe Sequence
taggacccggcgggtgtgcagcaac

SEQ ID NO: 305481 - DNA, 25 bp, Probe Sequence
taggcacgcgggacggataacaagt

SEQ ID NO: 305482 - DNA, 25 bp, Probe Sequence
taggcccgcggacggatgacgattt

SEQ ID NO: 305483 - DNA, 25 bp, Probe Sequence
taggccgcgggacggatgaacaatg

SEQ ID NO: 305484 - DNA, 25 bp, Probe Sequence
tagtcaagtaggagcagtggaaatg

SEQ ID NO: 305485 - DNA, 25 bp, Probe Sequence
tagtcacagtaataatgggtatggg

SEQ ID NO: 305486 - DNA, 25 bp, Probe Sequence
tatgcccagtacaggaccttagggg

SEQ ID NO: 305487 - DNA, 25 bp, Probe Sequence
tatccacctgacaaagggctgatat

SEQ ID NO: 305488 - DNA, 25 bp, Probe Sequence
tatgtgcacgtacatgggccagaat

SEQ ID NO: 305489 - DNA, 25 bp, Probe Sequence
tatgagcctccatgggttcagatat

SEQ ID NO: 305490 - DNA, 25 bp, Probe Sequence
tatgagccaccattggattacacaa

SEQ ID NO: 305491 - DNA, 25 bp, Probe Sequence
tagtgaaaatagcctatacacagca

SEQ ID NO: 305492 - DNA, 25 bp, Probe Sequence
taggtcaagatctagcgataatgac

SEQ ID NO: 305493 - DNA, 25 bp, Probe Sequence
tagggcagagtaatccaactgacta

SEQ ID NO: 305494 - DNA, 25 bp, Probe Sequence
taggggccatagaccatacatacga

SEQ ID NO: 305495 - DNA, 25 bp, Probe Sequence
taggggactgagccttcactttgag

SEQ ID NO: 305496 - DNA, 25 bp, Probe Sequence
tagggtgagtggcttgcttggtggg

SEQ ID NO: 305497 - DNA, 25 bp, Probe Sequence
tagggtgagtggcttgcttggtggg

SEQ ID NO: 305498 - DNA, 25 bp, Probe Sequence
tagtggatgggtgtgtgtgtgtgtg

SEQ ID NO: 305499 - DNA, 25 bp, Probe Sequence
tagtgtatgagttgttgttgggaaa

SEQ ID NO: 305500 - DNA, 25 bp, Probe Sequence
tagtgaatattaaagtgtgctggac

SEQ ID NO: 305501 - DNA, 25 bp, Probe Sequence
tattagaataacatgcggtggctca

SEQ ID NO: 305502 - DNA, 25 bp, Probe Sequence
tatgtaactaagtgggctgttcaga

SEQ ID NO: 305503 - DNA, 25 bp, Probe Sequence
ttcccagtaagtgcgggtcataagc

SEQ ID NO: 305504 - DNA, 25 bp, Probe Sequence
ttttctaaagactgggagcaaacta

SEQ ID NO: 305505 - DNA, 25 bp, Probe Sequence
ttttcgcaaaatgtcgtaaacactc

SEQ ID NO: 305506 - DNA, 25 bp, Probe Sequence
taggtagaaaacacgaataacacag

SEQ ID NO: 305507 - DNA, 25 bp, Probe Sequence
taggcttaaagatgtcgagtaacta

SEQ ID NO: 305508 - DNA, 25 bp, Probe Sequence
taggcctcaaaaacatacgtaacga

SEQ ID NO: 305509 - DNA, 25 bp, Probe Sequence
tagtgctctgcatagtttactgaaa

SEQ ID NO: 305510 - DNA, 25 bp, Probe Sequence
tatggtgtgaaggttggcctgacaa

SEQ ID NO: 305511 - DNA, 25 bp, Probe Sequence
tatggtcctagaggtggcaagaagg

SEQ ID NO: 305512 - DNA, 25 bp, Probe Sequence
taggtgcctaactggcaaatgcctt

SEQ ID NO: 305513 - DNA, 25 bp, Probe Sequence
taggggctaacaatggacacccaga

SEQ ID NO: 305514 - DNA, 25 bp, Probe Sequence
tagtggaccaacattgcgccacctg

SEQ ID NO: 305515 - DNA, 25 bp, Probe Sequence
tagtggggcaaattcctgccctctc

SEQ ID NO: 305516 - DNA, 25 bp, Probe Sequence
tagggtgggcaattcccaacttcct

SEQ ID NO: 305517 - DNA, 25 bp, Probe Sequence
taggggcggcaatcaacagtcttac

SEQ ID NO: 305518 - DNA, 25 bp, Probe Sequence
tatggggggcaagtctacgcttatg

SEQ ID NO: 305519 - DNA, 25 bp, Probe Sequence
taggtgatggagatgtgtacgtaat

SEQ ID NO: 305520 - DNA, 25 bp, Probe Sequence
tagtgcttgggatcgtacatgttaa

SEQ ID NO: 305521 - DNA, 25 bp, Probe Sequence
tagtcttctttcatgaagcagtgga

SEQ ID NO: 305522 - DNA, 25 bp, Probe Sequence
taggttctgtctgtgccaagggcag

SEQ ID NO: 305523 - DNA, 25 bp, Probe Sequence
taggtgcctgttcattcaagtccac

SEQ ID NO: 305524 - DNA, 25 bp, Probe Sequence
tagtgagccttcccatttagattaa

SEQ ID NO: 305525 - DNA, 25 bp, Probe Sequence
tatgtacctaggaccatctagttag

SEQ ID NO: 305526 - DNA, 25 bp, Probe Sequence
taggtatctcaggtcctttctaagt

SEQ ID NO: 305527 - DNA, 25 bp, Probe Sequence
tatgggatctttacctcttgtaacc

SEQ ID NO: 305528 - DNA, 25 bp, Probe Sequence
tagttttctttcgtcttgtattcct

SEQ ID NO: 305529 - DNA, 25 bp, Probe Sequence
tagttttctctattctttcatttcc

SEQ ID NO: 305530 - DNA, 25 bp, Probe Sequence
tagtttttcttcaacatcaatgttc

SEQ ID NO: 305531 - DNA, 25 bp, Probe Sequence
tagttttaccctactgatgatgtgt

SEQ ID NO: 305532 - DNA, 25 bp, Probe Sequence
tagtctttatcattctatgttatta

SEQ ID NO: 305533 - DNA, 25 bp, Probe Sequence
tagtgctttatatttgtctgatttt

SEQ ID NO: 305534 - DNA, 25 bp, Probe Sequence
tagtcatgtccaaattgtgtcaatt

SEQ ID NO: 305535 - DNA, 25 bp, Probe Sequence
tagtcagcatctccaattttcagca

SEQ ID NO: 305536 - DNA, 25 bp, Probe Sequence
tagtgcacactgcaaatattacacc

SEQ ID NO: 305537 - DNA, 25 bp, Probe Sequence
taggacctccaaggactaagcctcc

SEQ ID NO: 305538 - DNA, 25 bp, Probe Sequence
taggatcccctaggactggggtaag

SEQ ID NO: 305539 - DNA, 25 bp, Probe Sequence
tatgggccccgggccgaggagtacg

SEQ ID NO: 305540 - DNA, 25 bp, Probe Sequence
tatgaacgattccggcctgggatgc

SEQ ID NO: 305541 - DNA, 25 bp, Probe Sequence
tatgaacgattccggcctgggatgc

SEQ ID NO: 305542 - DNA, 25 bp, Probe Sequence
tatgaaaatttgagccagatgaacc

SEQ ID NO: 305543 - DNA, 25 bp, Probe Sequence
tatgaagctgttcgaacccaatccc

SEQ ID NO: 305544 - DNA, 25 bp, Probe Sequence
tatgaagctgttcgaacccaatccc

SEQ ID NO: 305545 - DNA, 25 bp, Probe Sequence
tatgaagctgttcgaacccaatccc

SEQ ID NO: 305546 - DNA, 25 bp, Probe Sequence
taggcttttctaagcctcttgccac

SEQ ID NO: 305547 - DNA, 25 bp, Probe Sequence
tagtgttttttaccatccgtcatta

SEQ ID NO: 305548 - DNA, 25 bp, Probe Sequence
tagtggtatttttggcacccttata

SEQ ID NO: 305549 - DNA, 25 bp, Probe Sequence
tagggggttctttgacccaggatag

SEQ ID NO: 305550 - DNA, 25 bp, Probe Sequence
taggggttctatttattcctgttag

SEQ ID NO: 305551 - DNA, 25 bp, Probe Sequence
tataacgttctcagtcctttgttat

SEQ ID NO: 305552 - DNA, 25 bp, Probe Sequence
tataacgaatagggttctaacatta

SEQ ID NO: 305553 - DNA, 25 bp, Probe Sequence
tattttgagattcttttaaagtaga

SEQ ID NO: 305554 - DNA, 25 bp, Probe Sequence
tagtcgtggtttatcttcacaagaa

SEQ ID NO: 305555 - DNA, 25 bp, Probe Sequence
ttgtcagggaaatccttgcacgagg

SEQ ID NO: 305556 - DNA, 25 bp, Probe Sequence
tagtgcaaggagctccatttccgag

SEQ ID NO: 305557 - DNA, 25 bp, Probe Sequence
tagtgaagtggctatcctaaactgg

SEQ ID NO: 305558 - DNA, 25 bp, Probe Sequence
tagtgatgtggtcattgtaaagctg

SEQ ID NO: 305559 - DNA, 25 bp, Probe Sequence
tagtctgtattatctgtaagatctg

SEQ ID NO: 305560 - DNA, 25 bp, Probe Sequence
tagtgcagttaagctaaagcagtgt

SEQ ID NO: 305561 - DNA, 25 bp, Probe Sequence
taggagattagagaaatatgctatg

SEQ ID NO: 305562 - DNA, 25 bp, Probe Sequence
taggatcaagaagcatatattccat

SEQ ID NO: 305563 - DNA, 25 bp, Probe Sequence
taggaagagaagtcatggtcgatat

SEQ ID NO: 305564 - DNA, 25 bp, Probe Sequence
taggcaataatttgtagctcagtat

SEQ ID NO: 305565 - DNA, 25 bp, Probe Sequence
tagggccagtattgtcagcatttat

SEQ ID NO: 305566 - DNA, 25 bp, Probe Sequence
taggtcatagtagttgccattttgt

SEQ ID NO: 305567 - DNA, 25 bp, Probe Sequence
tagtgtatgcagaccttccactggg

SEQ ID NO: 305568 - DNA, 25 bp, Probe Sequence
tatagtgagcggagtccctggtggg

SEQ ID NO: 305569 - DNA, 25 bp, Probe Sequence
tatcagtgagggcggccgggagggc

SEQ ID NO: 305570 - DNA, 25 bp, Probe Sequence
tatcagtgagggcggccgggagggc

SEQ ID NO: 305571 - DNA, 25 bp, Probe Sequence
tatcagtgagggcggccgggagggc

SEQ ID NO: 305572 - DNA, 25 bp, Probe Sequence
tatgcagaaggggaggccgaggtgg

SEQ ID NO: 305573 - DNA, 25 bp, Probe Sequence
tatcgatagggcaccgcgtgctgat

SEQ ID NO: 305574 - DNA, 25 bp, Probe Sequence
tatggcatgagggacctctcgggat

SEQ ID NO: 305575 - DNA, 25 bp, Probe Sequence
taggagagtgccaaactcagggacc

SEQ ID NO: 305576 - DNA, 25 bp, Probe Sequence
tagggagtccatacacatcagtgag

SEQ ID NO: 305577 - DNA, 25 bp, Probe Sequence
taggtactctcaactctggatgagt

SEQ ID NO: 305578 - DNA, 25 bp, Probe Sequence
tagtgattcctcttatgcggtgtgt

SEQ ID NO: 305579 - DNA, 25 bp, Probe Sequence
tagtatcgcctattaccattgtgat

SEQ ID NO: 305580 - DNA, 25 bp, Probe Sequence
tagtcatcggtatgaccatggtgat

SEQ ID NO: 305581 - DNA, 25 bp, Probe Sequence
tagtcatcgcgtagtagccatggtg

SEQ ID NO: 305582 - DNA, 25 bp, Probe Sequence
tagtcatctgctagttaccatggtg

SEQ ID NO: 305583 - DNA, 25 bp, Probe Sequence
tagtcatcgctattaccactggtga

SEQ ID NO: 305584 - DNA, 25 bp, Probe Sequence
tagtcatcgctattacccatggtga

SEQ ID NO: 305585 - DNA, 25 bp, Probe Sequence
tagtcatcgctattaccaatggtga

SEQ ID NO: 305586 - DNA, 25 bp, Probe Sequence
tagtcatcgctatcaccatgttgat

SEQ ID NO: 305587 - DNA, 25 bp, Probe Sequence
tagtcatcgctattaccatggtgaa

SEQ ID NO: 305588 - DNA, 25 bp, Probe Sequence
tagtcatcgctattaccatggtgat

SEQ ID NO: 305589 - DNA, 25 bp, Probe Sequence
tagtcatcgctattaccatggtgat

SEQ ID NO: 305590 - DNA, 25 bp, Probe Sequence
tagtcatcgctattaccatggtgat

SEQ ID NO: 305591 - DNA, 25 bp, Probe Sequence
tagtcatcgctattaccatggtgat

SEQ ID NO: 305592 - DNA, 25 bp, Probe Sequence
tagtcatcgctattaccatggtgat

SEQ ID NO: 305593 - DNA, 25 bp, Probe Sequence
tagtcatcgctattaccatggtgat

SEQ ID NO: 305594 - DNA, 25 bp, Probe Sequence
tagtcatcgctattaccatggtgat

SEQ ID NO: 305595 - DNA, 25 bp, Probe Sequence
tagtcatcgctattaccatggtgat

SEQ ID NO: 305596 - DNA, 25 bp, Probe Sequence
tagtcatcgctattaccatggtgat

SEQ ID NO: 305597 - DNA, 25 bp, Probe Sequence
tagtcatcgctattaccatggtgat

SEQ ID NO: 305598 - DNA, 25 bp, Probe Sequence
tagtcatcgctattaccatggtgat

SEQ ID NO: 305599 - DNA, 25 bp, Probe Sequence
tagtcatcgctattaccatggtgat

SEQ ID NO: 305600 - DNA, 25 bp, Probe Sequence
tagtcatcgctattaccatggtgat

SEQ ID NO: 305601 - DNA, 25 bp, Probe Sequence
tagtcatcgctattaccatggtgat

SEQ ID NO: 305602 - DNA, 25 bp, Probe Sequence
tagtcatcgctattaccatggtgat

SEQ ID NO: 305603 - DNA, 25 bp, Probe Sequence
tagtcatcgctattaccatggtgat

SEQ ID NO: 305604 - DNA, 25 bp, Probe Sequence
tagtcatcgctattaccatggtgat

SEQ ID NO: 305605 - DNA, 25 bp, Probe Sequence
tagtcatcgctattaccatggtgat

SEQ ID NO: 305606 - DNA, 25 bp, Probe Sequence
tagtcatcgctattaccatggtgat

SEQ ID NO: 305607 - DNA, 25 bp, Probe Sequence
tagtcatcgctattaccatggtgat

SEQ ID NO: 305608 - DNA, 25 bp, Probe Sequence
tagtcatcgctattaccatggtgat

SEQ ID NO: 305609 - DNA, 25 bp, Probe Sequence
tagtcatcgctattaccatggtgat

SEQ ID NO: 305610 - DNA, 25 bp, Probe Sequence
tagtcatcgctattaccatggtgat

SEQ ID NO: 305611 - DNA, 25 bp, Probe Sequence
tagtcatcgctattaccatggtgat

SEQ ID NO: 305612 - DNA, 25 bp, Probe Sequence
tagtcatcgctattaccatggtgat

SEQ ID NO: 305613 - DNA, 25 bp, Probe Sequence
tagtcatcgctattaccatggtgat

SEQ ID NO: 305614 - DNA, 25 bp, Probe Sequence
tagtcatcgctattaccatggtgat

SEQ ID NO: 305615 - DNA, 25 bp, Probe Sequence
tagtcatcgctattaccatggtgat

SEQ ID NO: 305616 - DNA, 25 bp, Probe Sequence
tagtcatcgctattaccatggtgat

SEQ ID NO: 305617 - DNA, 25 bp, Probe Sequence
tagtcatcgctattaccatggtgat

SEQ ID NO: 305618 - DNA, 25 bp, Probe Sequence
tagtcatcgctattaccatggtgat

SEQ ID NO: 305619 - DNA, 25 bp, Probe Sequence
tagtcatcgctattaccatggtgat

SEQ ID NO: 305620 - DNA, 25 bp, Probe Sequence
tagtcatcgctattaccatggtgat

SEQ ID NO: 305621 - DNA, 25 bp, Probe Sequence
tagtcatcgctattaccatggtgat

SEQ ID NO: 305622 - DNA, 25 bp, Probe Sequence
taggctcagcttaccgggtgatagg

SEQ ID NO: 305623 - DNA, 25 bp, Probe Sequence
ttggctgcggtcgcaaaggataccc

SEQ ID NO: 305624 - DNA, 25 bp, Probe Sequence
tatggacggtcggatgcaaagcccc

SEQ ID NO: 305625 - DNA, 25 bp, Probe Sequence
tatgtagagtttgagctgaagcccc

SEQ ID NO: 305626 - DNA, 25 bp, Probe Sequence
tagggaggtcagtgcttcgtgcctc

SEQ ID NO: 305627 - DNA, 25 bp, Probe Sequence
taggagatttagcagctttgtcgtc

SEQ ID NO: 305628 - DNA, 25 bp, Probe Sequence
tatggtgaattactactgttgacag

SEQ ID NO: 305629 - DNA, 25 bp, Probe Sequence
tatgtttttaatacagtgtggctgg

SEQ ID NO: 305630 - DNA, 25 bp, Probe Sequence
tattttctacccagtgttggggttg

SEQ ID NO: 305631 - DNA, 25 bp, Probe Sequence
tttaagctacccagtgtgtggtatt

SEQ ID NO: 305632 - DNA, 25 bp, Probe Sequence
tattaacataccctagttgccgttt

SEQ ID NO: 305633 - DNA, 25 bp, Probe Sequence
taggaatctaccctgcagatattct

SEQ ID NO: 305634 - DNA, 25 bp, Probe Sequence
tagtcattctaacgggtatgattac

SEQ ID NO: 305635 - DNA, 25 bp, Probe Sequence
tatggaactagaaggctgtttgaac

SEQ ID NO: 305636 - DNA, 25 bp, Probe Sequence
tatggaacgaaaactgctttgtaat

SEQ ID NO: 305637 - DNA, 25 bp, Probe Sequence
taggaattacaaacacagttgaaag

SEQ ID NO: 305638 - DNA, 25 bp, Probe Sequence
taggcactataccatttcagtggag

SEQ ID NO: 305639 - DNA, 25 bp, Probe Sequence
taggctttactgtcttatgcttatg

SEQ ID NO: 305640 - DNA, 25 bp, Probe Sequence
taggctttagcagctttgcatttcc

SEQ ID NO: 305641 - DNA, 25 bp, Probe Sequence
taggctttagagcctttcacctaat

SEQ ID NO: 305642 - DNA, 25 bp, Probe Sequence
taggctaaatttctccagcctcaca

SEQ ID NO: 305643 - DNA, 25 bp, Probe Sequence
taggctgaagatgtgtcttctcccc

SEQ ID NO: 305644 - DNA, 25 bp, Probe Sequence
ggagctagcaataattggttctggc

SEQ ID NO: 305645 - DNA, 25 bp, Probe Sequence
tagtctaaggccatggcatcccttt

SEQ ID NO: 305646 - DNA, 25 bp, Probe Sequence
tagtctaggatggtgggccttctct

SEQ ID NO: 305647 - DNA, 25 bp, Probe Sequence
tagtggaggtggatgtccttctctg

SEQ ID NO: 305648 - DNA, 25 bp, Probe Sequence
tagtggagagggggttttgtcatgt

SEQ ID NO: 305649 - DNA, 25 bp, Probe Sequence
tagtgaaggtggcttttgctttata

SEQ ID NO: 305650 - DNA, 25 bp, Probe Sequence
tatggattggggtgtatttttaata

SEQ ID NO: 305651 - DNA, 25 bp, Probe Sequence
tatacttgggagccgttctgtttca

SEQ ID NO: 305652 - DNA, 25 bp, Probe Sequence
tatgactatgtggagctctttgatg

SEQ ID NO: 305653 - DNA, 25 bp, Probe Sequence
tagggatgctgctggctagagatga

SEQ ID NO: 305654 - DNA, 25 bp, Probe Sequence
taggcatgacgatgctgctgcaaaa

SEQ ID NO: 305655 - DNA, 25 bp, Probe Sequence
taggctgcatctggagagcatgctg

SEQ ID NO: 305656 - DNA, 25 bp, Probe Sequence
tatggacatgcgggatatctccccc

SEQ ID NO: 305657 - DNA, 25 bp, Probe Sequence
tatggcgatgcgggcagtgcctttg

SEQ ID NO: 305658 - DNA, 25 bp, Probe Sequence
tatggcgatgcgggcagtgcctttg

SEQ ID NO: 305659 - DNA, 25 bp, Probe Sequence
tatggcgatgcgggcagtgcctttg

SEQ ID NO: 305660 - DNA, 25 bp, Probe Sequence
tagggagcttggctcatgctttcgg

SEQ ID NO: 305661 - DNA, 25 bp, Probe Sequence
tatggctgagttctgtagtttccag

SEQ ID NO: 305662 - DNA, 25 bp, Probe Sequence
taggctgtttcaatattgtgtgtcc

SEQ ID NO: 305663 - DNA, 25 bp, Probe Sequence
tagtgttctttattagtgcctctca

SEQ ID NO: 305664 - DNA, 25 bp, Probe Sequence
taggttcccatagtaaccccaatag

SEQ ID NO: 305665 - DNA, 25 bp, Probe Sequence
taggttcccatagttacgtccaata

SEQ ID NO: 305666 - DNA, 25 bp, Probe Sequence
taggtggcaccaatcttgacttcca

SEQ ID NO: 305667 - DNA, 25 bp, Probe Sequence
tagtgaggcctcatctctatttcaa

SEQ ID NO: 305668 - DNA, 25 bp, Probe Sequence
taggagcactaccatctgttttcaa

SEQ ID NO: 305669 - DNA, 25 bp, Probe Sequence
taggagcactaccatctgttttcaa

SEQ ID NO: 305670 - DNA, 25 bp, Probe Sequence
taggagcactaccatctgttttcaa

SEQ ID NO: 305671 - DNA, 25 bp, Probe Sequence
taggagcactaccatctgttttcaa

SEQ ID NO: 305672 - DNA, 25 bp, Probe Sequence
tagggcagtagctgcttttgtcata

SEQ ID NO: 305673 - DNA, 25 bp, Probe Sequence
taggcctggagttctgttatgtgat

SEQ ID NO: 305674 - DNA, 25 bp, Probe Sequence
taggcctggagttctgttatgtgat

SEQ ID NO: 305675 - DNA, 25 bp, Probe Sequence
taggtccaagatttttatatgttca

SEQ ID NO: 305676 - DNA, 25 bp, Probe Sequence
tagtgtcatcactcttttaagatct

SEQ ID NO: 305677 - DNA, 25 bp, Probe Sequence
tagtccaccttcatttaactctttg

SEQ ID NO: 305678 - DNA, 25 bp, Probe Sequence
tatcctggcgttcttgtgaaccttc

SEQ ID NO: 305679 - DNA, 25 bp, Probe Sequence
tatccatgtggttaactggactgac

SEQ ID NO: 305680 - DNA, 25 bp, Probe Sequence
tatcctggtgcgatgatgggcctgg

SEQ ID NO: 305681 - DNA, 25 bp, Probe Sequence
tatggttggcagctatggacctcgg

SEQ ID NO: 305682 - DNA, 25 bp, Probe Sequence
tatggtgtgaagttggctgacaatt

SEQ ID NO: 305683 - DNA, 25 bp, Probe Sequence
tagggtgaaacagtcagcagcatct

SEQ ID NO: 305684 - DNA, 25 bp, Probe Sequence
taggagaagaacagagcagctctac

SEQ ID NO: 305685 - DNA, 25 bp, Probe Sequence
tatgagacaaattcttaactctgac

SEQ ID NO: 305686 - DNA, 25 bp, Probe Sequence
taggatcaataggctgtaccatata

SEQ ID NO: 305687 - DNA, 25 bp, Probe Sequence
taggtcaggtgcgttatctcagctt

SEQ ID NO: 305688 - DNA, 25 bp, Probe Sequence
taggtcaggtgcgttatctcagctt

SEQ ID NO: 305689 - DNA, 25 bp, Probe Sequence
tagggcgggtgtagactagcctgcc

SEQ ID NO: 305690 - DNA, 25 bp, Probe Sequence
ttgggtacgtgcagcactacggcct

SEQ ID NO: 305691 - DNA, 25 bp, Probe Sequence
tatggagtacttcggcactatcggc

SEQ ID NO: 305692 - DNA, 25 bp, Probe Sequence
ttaagctacttccgggagggcttga

SEQ ID NO: 305693 - DNA, 25 bp, Probe Sequence
tataatctcagcaccctggaaggcc

SEQ ID NO: 305694 - DNA, 25 bp, Probe Sequence
tataattcctacttttggaggctga

SEQ ID NO: 305695 - DNA, 25 bp, Probe Sequence
ttaagtattgaattccaggagcctg

SEQ ID NO: 305696 - DNA, 25 bp, Probe Sequence
ttaagtattgaattccaggagcctg

SEQ ID NO: 305697 - DNA, 25 bp, Probe Sequence
tataaggaattttccggtctcttcg

SEQ ID NO: 305698 - DNA, 25 bp, Probe Sequence
tatcagtcccttatccggtatgtgg

SEQ ID NO: 305699 - DNA, 25 bp, Probe Sequence
tatagatactttcaccgtttgcagg

SEQ ID NO: 305700 - DNA, 25 bp, Probe Sequence
ttagtagctactcccaaattgtcag

SEQ ID NO: 305701 - DNA, 25 bp, Probe Sequence
ttcagttgggctcacaacgttcagg

SEQ ID NO: 305702 - DNA, 25 bp, Probe Sequence
ttcccgggattacaccttgctggga

SEQ ID NO: 305703 - DNA, 25 bp, Probe Sequence
tatccttggaagcacagacctcggg

SEQ ID NO: 305704 - DNA, 25 bp, Probe Sequence
tattttcggggatacattgttgggg

SEQ ID NO: 305705 - DNA, 25 bp, Probe Sequence
taggctgttggttcaaacttttggg

SEQ ID NO: 305706 - DNA, 25 bp, Probe Sequence
taggctgttagatccaagttgattt

SEQ ID NO: 305707 - DNA, 25 bp, Probe Sequence
tagtggtaaatctcaagtagcatca

SEQ ID NO: 305708 - DNA, 25 bp, Probe Sequence
tagggctcaagatcaatctttacag

SEQ ID NO: 305709 - DNA, 25 bp, Probe Sequence
taggaaccagcttctactttgacat

SEQ ID NO: 305710 - DNA, 25 bp, Probe Sequence
taggaagccagactacactgcttac

SEQ ID NO: 305711 - DNA, 25 bp, Probe Sequence
tagggatgacgtcacgcagttctct

SEQ ID NO: 305712 - DNA, 25 bp, Probe Sequence
tagtggctaggatacaatgcatttc

SEQ ID NO: 305713 - DNA, 25 bp, Probe Sequence
tagtgactcataaaataagatttcc

SEQ ID NO: 305714 - DNA, 25 bp, Probe Sequence
tagtgactatttacatccacagtat

SEQ ID NO: 305715 - DNA, 25 bp, Probe Sequence
taggcctatttaggtgacactatag

SEQ ID NO: 305716 - DNA, 25 bp, Probe Sequence
taggcctatttaggtgacactatag

SEQ ID NO: 305717 - DNA, 25 bp, Probe Sequence
taggcctatttaggtgacactatag

SEQ ID NO: 305718 - DNA, 25 bp, Probe Sequence
taggcctatttaggtgacactatag

SEQ ID NO: 305719 - DNA, 25 bp, Probe Sequence
taggcctatttaggtgacactatag

SEQ ID NO: 305720 - DNA, 25 bp, Probe Sequence
taggcctatttaggtgacactatag

SEQ ID NO: 305721 - DNA, 25 bp, Probe Sequence
taggcctatttaggtgacactatag

SEQ ID NO: 305722 - DNA, 25 bp, Probe Sequence
taggcctatttaggtgacactatag

SEQ ID NO: 305723 - DNA, 25 bp, Probe Sequence
taggcctatttaggtgacactatag

SEQ ID NO: 305724 - DNA, 25 bp, Probe Sequence
taggcctatttaggtgacactatag

SEQ ID NO: 305725 - DNA, 25 bp, Probe Sequence
taggcctatttaggtgacactatag

SEQ ID NO: 305726 - DNA, 25 bp, Probe Sequence
taggcctatttaggtgacactatag

SEQ ID NO: 305727 - DNA, 25 bp, Probe Sequence
taggcctatttaggtgacactatag

SEQ ID NO: 305728 - DNA, 25 bp, Probe Sequence
taggcctatttaggtgacactatag

SEQ ID NO: 305729 - DNA, 25 bp, Probe Sequence
taggcctatttaggtgacactatag

SEQ ID NO: 305730 - DNA, 25 bp, Probe Sequence
taggcctatttaggtgacactatag

SEQ ID NO: 305731 - DNA, 25 bp, Probe Sequence
taggcctatttaggtgacactatag

SEQ ID NO: 305732 - DNA, 25 bp, Probe Sequence
taggcctatttaggtgacactatag

SEQ ID NO: 305733 - DNA, 25 bp, Probe Sequence
taggcctatttaggtgacactatag

SEQ ID NO: 305734 - DNA, 25 bp, Probe Sequence
taggcctatttaggtgacactatag

SEQ ID NO: 305735 - DNA, 25 bp, Probe Sequence
taggcctatttaggtgacactatag

SEQ ID NO: 305736 - DNA, 25 bp, Probe Sequence
taggcctatttaggtgacactatag

SEQ ID NO: 305737 - DNA, 25 bp, Probe Sequence
taggcctatttaggtgacactatag

SEQ ID NO: 305738 - DNA, 25 bp, Probe Sequence
taggcctatttaggtgacactatag

SEQ ID NO: 305739 - DNA, 25 bp, Probe Sequence
taggcctatttaggtgacactatag

SEQ ID NO: 305740 - DNA, 25 bp, Probe Sequence
taggcctatttaggtgacactatag

SEQ ID NO: 305741 - DNA, 25 bp, Probe Sequence
taggcctatttaggtgacactatag

SEQ ID NO: 305742 - DNA, 25 bp, Probe Sequence
taggcctatttaggtgacactatag

SEQ ID NO: 305743 - DNA, 25 bp, Probe Sequence
taggcctatttaggtgacactatag

SEQ ID NO: 305744 - DNA, 25 bp, Probe Sequence
taggcctatttaggtgacactatag

SEQ ID NO: 305745 - DNA, 25 bp, Probe Sequence
taggcctatttaggtgacactatag

SEQ ID NO: 305746 - DNA, 25 bp, Probe Sequence
taggcctatttaggtgacactatag

SEQ ID NO: 305747 - DNA, 25 bp, Probe Sequence
taggcctatttaggtgacactatag

SEQ ID NO: 305748 - DNA, 25 bp, Probe Sequence
taggcctatttaggtgacactatag

SEQ ID NO: 305749 - DNA, 25 bp, Probe Sequence
taggcctatttaggtgacactatag

SEQ ID NO: 305750 - DNA, 25 bp, Probe Sequence
taggcctatttaggtgacactatag

SEQ ID NO: 305751 - DNA, 25 bp, Probe Sequence
taggcctatttaggtgacactatag

SEQ ID NO: 305752 - DNA, 25 bp, Probe Sequence
taggcctatttaggtgacactatag

SEQ ID NO: 305753 - DNA, 25 bp, Probe Sequence
taggcctatttaggtgacactatag

SEQ ID NO: 305754 - DNA, 25 bp, Probe Sequence
taggcctatttaggtgacactatag

SEQ ID NO: 305755 - DNA, 25 bp, Probe Sequence
taggcctatttaggtgacactatag

SEQ ID NO: 305756 - DNA, 25 bp, Probe Sequence
taggcctatttaggtgacactatag

SEQ ID NO: 305757 - DNA, 25 bp, Probe Sequence
taggcctatttaggtgacactatag

SEQ ID NO: 305758 - DNA, 25 bp, Probe Sequence
taggcctatttaggtgacactatag

SEQ ID NO: 305759 - DNA, 25 bp, Probe Sequence
taggcctatttaggtgacactatag

SEQ ID NO: 305760 - DNA, 25 bp, Probe Sequence
taggcctatttaggtgacactatag

SEQ ID NO: 305761 - DNA, 25 bp, Probe Sequence
taggcctatttaggtgacactatag

SEQ ID NO: 305762 - DNA, 25 bp, Probe Sequence
taggcctatttaggtgacactatag

SEQ ID NO: 305763 - DNA, 25 bp, Probe Sequence
taggcctatttaggtgacactatag

SEQ ID NO: 305764 - DNA, 25 bp, Probe Sequence
taggcctatttaggtgacactatag

SEQ ID NO: 305765 - DNA, 25 bp, Probe Sequence
taggcctatttaggtgacactatag

SEQ ID NO: 305766 - DNA, 25 bp, Probe Sequence
taggcctatttaggtgacactatag

SEQ ID NO: 305767 - DNA, 25 bp, Probe Sequence
taggcctatttaggtgacactatag

SEQ ID NO: 305768 - DNA, 25 bp, Probe Sequence
taggcctatttaggtgacactatag

SEQ ID NO: 305769 - DNA, 25 bp, Probe Sequence
taggcctatttaggtgacactatag

SEQ ID NO: 305770 - DNA, 25 bp, Probe Sequence
taggcctatttaggtgacactatag

SEQ ID NO: 305771 - DNA, 25 bp, Probe Sequence
taggcctatttaggtgacactatag

SEQ ID NO: 305772 - DNA, 25 bp, Probe Sequence
taggcctatttaggtgacactatag

SEQ ID NO: 305773 - DNA, 25 bp, Probe Sequence
taggcctatttaggtgacactatag

SEQ ID NO: 305774 - DNA, 25 bp, Probe Sequence
taggcctatttaggtgacactatag

SEQ ID NO: 305775 - DNA, 25 bp, Probe Sequence
taggcctatttaggtgacactatag

SEQ ID NO: 305776 - DNA, 25 bp, Probe Sequence
taggcctatttaggtgacactatag

SEQ ID NO: 305777 - DNA, 25 bp, Probe Sequence
taggcctatttaggtgacactatag

SEQ ID NO: 305778 - DNA, 25 bp, Probe Sequence
taggcctatttaggtgacactatag

SEQ ID NO: 305779 - DNA, 25 bp, Probe Sequence
taggcctatttaggtgacactatag

SEQ ID NO: 305780 - DNA, 25 bp, Probe Sequence
taggcctatttaggtgacactatag

SEQ ID NO: 305781 - DNA, 25 bp, Probe Sequence
taggcctatttaggtgacactatag

SEQ ID NO: 305782 - DNA, 25 bp, Probe Sequence
taggcctatttaggtgacactatag

SEQ ID NO: 305783 - DNA, 25 bp, Probe Sequence
taggcctatttaggtgacactatag

SEQ ID NO: 305784 - DNA, 25 bp, Probe Sequence
taggcctatttaggtgacactatag

SEQ ID NO: 305785 - DNA, 25 bp, Probe Sequence
taggcctatttaggtgacactatag

SEQ ID NO: 305786 - DNA, 25 bp, Probe Sequence
taggcctatttaggtgacactatag

SEQ ID NO: 305787 - DNA, 25 bp, Probe Sequence
taggcctatttaggtgacactatag

SEQ ID NO: 305788 - DNA, 25 bp, Probe Sequence
taggcctatttaggtgacactatag

SEQ ID NO: 305789 - DNA, 25 bp, Probe Sequence
taggcctatttaggtgacactatag

SEQ ID NO: 305790 - DNA, 25 bp, Probe Sequence
taggcctatttaggtgacactatag

SEQ ID NO: 305791 - DNA, 25 bp, Probe Sequence
taggcctatttaggtgacactatag

SEQ ID NO: 305792 - DNA, 25 bp, Probe Sequence
taggcctatttaggtgacactatag

SEQ ID NO: 305793 - DNA, 25 bp, Probe Sequence
taggcctatttaggtgacactatag

SEQ ID NO: 305794 - DNA, 25 bp, Probe Sequence
taggcctatttaggtgacactatag

SEQ ID NO: 305795 - DNA, 25 bp, Probe Sequence
taggcctatttaggtgacactatag

SEQ ID NO: 305796 - DNA, 25 bp, Probe Sequence
taggcctatttaggtgacactatag

SEQ ID NO: 305797 - DNA, 25 bp, Probe Sequence
taggcctatttaggtgacactatag

SEQ ID NO: 305798 - DNA, 25 bp, Probe Sequence
taggcctatttaggtgacactatag

SEQ ID NO: 305799 - DNA, 25 bp, Probe Sequence
taggcctatttaggtgacactatag

SEQ ID NO: 305800 - DNA, 25 bp, Probe Sequence
taggcctatttaggtgacactatag

SEQ ID NO: 305801 - DNA, 25 bp, Probe Sequence
taggcctatttaggtgacactatag

SEQ ID NO: 305802 - DNA, 25 bp, Probe Sequence
taggcctatttaggtgacactatag

SEQ ID NO: 305803 - DNA, 25 bp, Probe Sequence
taggcctatttaggtgacactatag

SEQ ID NO: 305804 - DNA, 25 bp, Probe Sequence
taggcctatttaggtgacactatag

SEQ ID NO: 305805 - DNA, 25 bp, Probe Sequence
taggcctatttaggtgacactatag

SEQ ID NO: 305806 - DNA, 25 bp, Probe Sequence
taggcctatttaggtgacactatag

SEQ ID NO: 305807 - DNA, 25 bp, Probe Sequence
taggcctatttaggtgacactatag

SEQ ID NO: 305808 - DNA, 25 bp, Probe Sequence
taggcctatttaggtgacactatag

SEQ ID NO: 305809 - DNA, 25 bp, Probe Sequence
taggcctatttaggtgacactatag

SEQ ID NO: 305810 - DNA, 25 bp, Probe Sequence
taggcctatttaggtgacactatag

SEQ ID NO: 305811 - DNA, 25 bp, Probe Sequence
taggcctatttaggtgacactatag

SEQ ID NO: 305812 - DNA, 25 bp, Probe Sequence
taggcctatttaggtgacactatag

SEQ ID NO: 305813 - DNA, 25 bp, Probe Sequence
taggcctatttaggtgacactatag

SEQ ID NO: 305814 - DNA, 25 bp, Probe Sequence
taggcctatttaggtgacactatag

SEQ ID NO: 305815 - DNA, 25 bp, Probe Sequence
taggcctatttaggtgacactatag

SEQ ID NO: 305816 - DNA, 25 bp, Probe Sequence
taggcctatttaggtgacactatag

SEQ ID NO: 305817 - DNA, 25 bp, Probe Sequence
taggcctatttaggtgacactatag

SEQ ID NO: 305818 - DNA, 25 bp, Probe Sequence
taggcctatttaggtgacactatag

SEQ ID NO: 305819 - DNA, 25 bp, Probe Sequence
taggcctatttaggtgacactatag

SEQ ID NO: 305820 - DNA, 25 bp, Probe Sequence
taggcctatttaggtgacactatag

SEQ ID NO: 305821 - DNA, 25 bp, Probe Sequence
taggcctatttaggtgacactatag

SEQ ID NO: 305822 - DNA, 25 bp, Probe Sequence
taggcctatttaggtgacactatag

SEQ ID NO: 305823 - DNA, 25 bp, Probe Sequence
taggcctatttaggtgacactatag

SEQ ID NO: 305824 - DNA, 25 bp, Probe Sequence
taggcctatttaggtgacactatag

SEQ ID NO: 305825 - DNA, 25 bp, Probe Sequence
taggcctatttaggtgacactatag

SEQ ID NO: 305826 - DNA, 25 bp, Probe Sequence
taggcctatttaggtgacactatag

SEQ ID NO: 305827 - DNA, 25 bp, Probe Sequence
taggcctatttaggtgacactatag

SEQ ID NO: 305828 - DNA, 25 bp, Probe Sequence
taggcctatttaggtgacactatag

SEQ ID NO: 305829 - DNA, 25 bp, Probe Sequence
taggcctatttaggtgacactatag

SEQ ID NO: 305830 - DNA, 25 bp, Probe Sequence
taggcctatttaggtgacactatag

SEQ ID NO: 305831 - DNA, 25 bp, Probe Sequence
taggcctatttaggtgacactatag

SEQ ID NO: 305832 - DNA, 25 bp, Probe Sequence
taggcctatttaggtgacactatag

SEQ ID NO: 305833 - DNA, 25 bp, Probe Sequence
taggccagttcatgcaggaaccaaa

SEQ ID NO: 305834 - DNA, 25 bp, Probe Sequence
taggctcttctaggaaaagccaata

SEQ ID NO: 305835 - DNA, 25 bp, Probe Sequence
taggccttctctgaaaatgtatgaa

SEQ ID NO: 305836 - DNA, 25 bp, Probe Sequence
taggtattcccaaatagaacataat

SEQ ID NO: 305837 - DNA, 25 bp, Probe Sequence
taggttctcccaaaccaagtatact

SEQ ID NO: 305838 - DNA, 25 bp, Probe Sequence
taggtttctccatacgtagtgaaca

SEQ ID NO: 305839 - DNA, 25 bp, Probe Sequence
taggtttctgccattctgggtgacc

SEQ ID NO: 305840 - DNA, 25 bp, Probe Sequence
taggtgtgtggagtttctggcttga

SEQ ID NO: 305841 - DNA, 25 bp, Probe Sequence
tagggaggaccttatctgtgcgtga

SEQ ID NO: 305842 - DNA, 25 bp, Probe Sequence
tagggggtgcctaactgagcagtag

SEQ ID NO: 305843 - DNA, 25 bp, Probe Sequence
tatgggacttcctaactggcagtac

SEQ ID NO: 305844 - DNA, 25 bp, Probe Sequence
tatgggactttcctacttgcagtac

SEQ ID NO: 305845 - DNA, 25 bp, Probe Sequence
tatgggactttcctacttgcagtac

SEQ ID NO: 305846 - DNA, 25 bp, Probe Sequence
taggaagctactgtgtcttcagcaa

SEQ ID NO: 305847 - DNA, 25 bp, Probe Sequence
tagtgacctatgacagtttgtcaaa

SEQ ID NO: 305848 - DNA, 25 bp, Probe Sequence
tagtggccttcatgttattcagaat

SEQ ID NO: 305849 - DNA, 25 bp, Probe Sequence
tagtggactcgactgctttctaaat

SEQ ID NO: 305850 - DNA, 25 bp, Probe Sequence
tagggagccgcaccttgtcatgtac

SEQ ID NO: 305851 - DNA, 25 bp, Probe Sequence
tagggagccgcaccttgtcatgtac

SEQ ID NO: 305852 - DNA, 25 bp, Probe Sequence
taggatcagccctcattttgttgct

SEQ ID NO: 305853 - DNA, 25 bp, Probe Sequence
taggtacaccttagttcatgttgca

SEQ ID NO: 305854 - DNA, 25 bp, Probe Sequence
taggattcacgcaagtttcagtgtc

SEQ ID NO: 305855 - DNA, 25 bp, Probe Sequence
taggtctccagaggatcttcagtaa

SEQ ID NO: 305856 - DNA, 25 bp, Probe Sequence
tagtggttatgggcaattcaggaca

SEQ ID NO: 305857 - DNA, 25 bp, Probe Sequence
tagtggctgtctcagcaatctccag

SEQ ID NO: 305858 - DNA, 25 bp, Probe Sequence
tagtggccgtgaggagcatcttcag

SEQ ID NO: 305859 - DNA, 25 bp, Probe Sequence
tagtggctgctgcatagacactatt

SEQ ID NO: 305860 - DNA, 25 bp, Probe Sequence
tagtgagaatgaaagactctattct

SEQ ID NO: 305861 - DNA, 25 bp, Probe Sequence
tagtgagaagatcaccctctctgtg

SEQ ID NO: 305862 - DNA, 25 bp, Probe Sequence
tagggtttatttagacactgtgtca

SEQ ID NO: 305863 - DNA, 25 bp, Probe Sequence
tagggtttatttagacactgtgtca

SEQ ID NO: 305864 - DNA, 25 bp, Probe Sequence
tagggcttgtattaaaccactgaac

SEQ ID NO: 305865 - DNA, 25 bp, Probe Sequence
tagggccttataagaccacctgttc

SEQ ID NO: 305866 - DNA, 25 bp, Probe Sequence
tagggtatataaatcaccaagtatt

SEQ ID NO: 305867 - DNA, 25 bp, Probe Sequence
taggagactttaatcccggtttcag

SEQ ID NO: 305868 - DNA, 25 bp, Probe Sequence
tagggaagtctaagccctgggcctt

SEQ ID NO: 305869 - DNA, 25 bp, Probe Sequence
tagggaagtcatctcacttggcctt

SEQ ID NO: 305870 - DNA, 25 bp, Probe Sequence
taggagagacctgtcctagatgttg

SEQ ID NO: 305871 - DNA, 25 bp, Probe Sequence
tatggaagaactgatcctggccctc

SEQ ID NO: 305872 - DNA, 25 bp, Probe Sequence
tatggaagagacacctctgacccgt

SEQ ID NO: 305873 - DNA, 25 bp, Probe Sequence
tatggaagagacacctctgacccgt

SEQ ID NO: 305874 - DNA, 25 bp, Probe Sequence
tatggaggctggaccacctgagtca

SEQ ID NO: 305875 - DNA, 25 bp, Probe Sequence
tatccaggctgtgctatccctgtac

SEQ ID NO: 305876 - DNA, 25 bp, Probe Sequence
tatccaggctgtgctatccctgtac

SEQ ID NO: 305877 - DNA, 25 bp, Probe Sequence
tatctgcaggatacgttccaagacc

SEQ ID NO: 305878 - DNA, 25 bp, Probe Sequence
tatagcactgaatgcctacaggaca

SEQ ID NO: 305879 - DNA, 25 bp, Probe Sequence
tatagctgtggctcatgctacccaa

SEQ ID NO: 305880 - DNA, 25 bp, Probe Sequence
tatggctgaatctaatgctccaaaa

SEQ ID NO: 305881 - DNA, 25 bp, Probe Sequence
tatggctacatcgaggaccttaagt

SEQ ID NO: 305882 - DNA, 25 bp, Probe Sequence
tatggctaaagatgacctctctggt

SEQ ID NO: 305883 - DNA, 25 bp, Probe Sequence
tatggctaaagatgacctctctggt

SEQ ID NO: 305884 - DNA, 25 bp, Probe Sequence
tatgtgggaaacccttttgcgtggt

SEQ ID NO: 305885 - DNA, 25 bp, Probe Sequence
tagggaagaaaactatcctgcgggt

SEQ ID NO: 305886 - DNA, 25 bp, Probe Sequence
tatgcaggaaaatagcaccccccgt

SEQ ID NO: 305887 - DNA, 25 bp, Probe Sequence
tatggggaatagtacacccaccaac

SEQ ID NO: 305888 - DNA, 25 bp, Probe Sequence
tatgggcctgagttgtacccaccac

SEQ ID NO: 305889 - DNA, 25 bp, Probe Sequence
tatcagtgcctgcacttcacatcca

SEQ ID NO: 305890 - DNA, 25 bp, Probe Sequence
tatgcaatgccactgcatccatgca

SEQ ID NO: 305891 - DNA, 25 bp, Probe Sequence
tatgaagcccgtccagaaagtgttg

SEQ ID NO: 305892 - DNA, 25 bp, Probe Sequence
tatgaacaccttacaccctgtgttc

SEQ ID NO: 305893 - DNA, 25 bp, Probe Sequence
tatggaacacttaccacacggctga

SEQ ID NO: 305894 - DNA, 25 bp, Probe Sequence
tatgttaaccttccatgcctggtac

SEQ ID NO: 305895 - DNA, 25 bp, Probe Sequence
taggcaaacactggccatggccgtg

SEQ ID NO: 305896 - DNA, 25 bp, Probe Sequence
taggcattcaccccagcaaggtggt

SEQ ID NO: 305897 - DNA, 25 bp, Probe Sequence
tatgtcggaccttctcagagagtgg

SEQ ID NO: 305898 - DNA, 25 bp, Probe Sequence
tatggaggtcctccatgcagagagc

SEQ ID NO: 305899 - DNA, 25 bp, Probe Sequence
tatgtgcaggtcctagcctggggta

SEQ ID NO: 305900 - DNA, 25 bp, Probe Sequence
tatgtgagcgagcaagccggcaagc

SEQ ID NO: 305901 - DNA, 25 bp, Probe Sequence
tatgaacgaaataggcaggcacaga

SEQ ID NO: 305902 - DNA, 25 bp, Probe Sequence
tagggcgcagactgctgcgaacaga

SEQ ID NO: 305903 - DNA, 25 bp, Probe Sequence
tatgggagcaaggagctgcgcagcc

SEQ ID NO: 305904 - DNA, 25 bp, Probe Sequence
tatgggaatgaggttctaccactct

SEQ ID NO: 305905 - DNA, 25 bp, Probe Sequence
tatggctgaaggaatcattcacgac

SEQ ID NO: 305906 - DNA, 25 bp, Probe Sequence
tagtggagaggaatcctacaaatgt

SEQ ID NO: 305907 - DNA, 25 bp, Probe Sequence
tatgggcaaccaatctttggaagct

SEQ ID NO: 305908 - DNA, 25 bp, Probe Sequence
taggcctagcaacgcttgtaggact

SEQ ID NO: 305909 - DNA, 25 bp, Probe Sequence
tatgagttagctttcttgctagccc

SEQ ID NO: 305910 - DNA, 25 bp, Probe Sequence
tatgtctttcattgctttgcaccca

SEQ ID NO: 305911 - DNA, 25 bp, Probe Sequence
tatgtatgctccatgtctagcccat

SEQ ID NO: 305912 - DNA, 25 bp, Probe Sequence
tatgtcttccttcatacggtgaaag

SEQ ID NO: 305913 - DNA, 25 bp, Probe Sequence
tatcccccattcgaacttaacagat

SEQ ID NO: 305914 - DNA, 25 bp, Probe Sequence
tatcccggcctcgaaggtgcataat

SEQ ID NO: 305915 - DNA, 25 bp, Probe Sequence
tatcccggacatcccgttacagatt

SEQ ID NO: 305916 - DNA, 25 bp, Probe Sequence
tatgcccgtgtcaaccacaacaagt

SEQ ID NO: 305917 - DNA, 25 bp, Probe Sequence
taggctttcttgtctcagcaacttt

SEQ ID NO: 305918 - DNA, 25 bp, Probe Sequence
taggctttcttgtctcagcaacttt

SEQ ID NO: 305919 - DNA, 25 bp, Probe Sequence
taggtggcttttcagagcatgcttt

SEQ ID NO: 305920 - DNA, 25 bp, Probe Sequence
taggatgtctttcacagagcttatt

SEQ ID NO: 305921 - DNA, 25 bp, Probe Sequence
taggcttcagtatatcagtgtttat

SEQ ID NO: 305922 - DNA, 25 bp, Probe Sequence
taggctgccgtatatactactatga

SEQ ID NO: 305923 - DNA, 25 bp, Probe Sequence
tatggccccatgaagaactacctga

SEQ ID NO: 305924 - DNA, 25 bp, Probe Sequence
tagggacactcaggaagtgcctctg

SEQ ID NO: 305925 - DNA, 25 bp, Probe Sequence
tagggtactgcattgtagtctccat

SEQ ID NO: 305926 - DNA, 25 bp, Probe Sequence
taggctgtaccatatagctgtcaac

SEQ ID NO: 305927 - DNA, 25 bp, Probe Sequence
tatggttacctaaaattgccacttt

SEQ ID NO: 305928 - DNA, 25 bp, Probe Sequence
tatggtctggttaaagttcctttgt

SEQ ID NO: 305929 - DNA, 25 bp, Probe Sequence
tatgttcgtaatacaaatctttttg

SEQ ID NO: 305930 - DNA, 25 bp, Probe Sequence
tattctccttttgacattataactg

SEQ ID NO: 305931 - DNA, 25 bp, Probe Sequence
tatgttcctgccaagtaattaaaat

SEQ ID NO: 305932 - DNA, 25 bp, Probe Sequence
tattttcccaaccaatagaaactat

SEQ ID NO: 305933 - DNA, 25 bp, Probe Sequence
tattttcctaactccatcttagtgt

SEQ ID NO: 305934 - DNA, 25 bp, Probe Sequence
tttacccaaactgtccattactgga

SEQ ID NO: 305935 - DNA, 25 bp, Probe Sequence
tttccctacaaagatgacctcctgg

SEQ ID NO: 305936 - DNA, 25 bp, Probe Sequence
tattcacgtaactgaacaccacctg

SEQ ID NO: 305937 - DNA, 25 bp, Probe Sequence
tatcaacctaactaaaacattcctt

SEQ ID NO: 305938 - DNA, 25 bp, Probe Sequence
tataagccattttcccaagttccta

SEQ ID NO: 305939 - DNA, 25 bp, Probe Sequence
ttaaaatttaccccagtactgtgat

SEQ ID NO: 305940 - DNA, 25 bp, Probe Sequence
tttagaattgaggccccaactttga

SEQ ID NO: 305941 - DNA, 25 bp, Probe Sequence
ttatgtaatggggtcgaaatctttg

SEQ ID NO: 305942 - DNA, 25 bp, Probe Sequence
ttagggtgggctctaaatccattat

SEQ ID NO: 305943 - DNA, 25 bp, Probe Sequence
tttggggcacctcttaattcatttt

SEQ ID NO: 305944 - DNA, 25 bp, Probe Sequence
tttagggtcctagcgcagagtcctt

SEQ ID NO: 305945 - DNA, 25 bp, Probe Sequence
tttcagtcgtctaagtccaaccaat

SEQ ID NO: 305946 - DNA, 25 bp, Probe Sequence
tttcgtagtctttgtaaaataatat

SEQ ID NO: 305947 - DNA, 25 bp, Probe Sequence
tttctgtagtcaaagtataccaaaa

SEQ ID NO: 305948 - DNA, 25 bp, Probe Sequence
tattatgttgaaaagtgtcggttac

SEQ ID NO: 305949 - DNA, 25 bp, Probe Sequence
tatgtagttcgctgtgtgtcggctc

SEQ ID NO: 305950 - DNA, 25 bp, Probe Sequence
tttactaagcagatggtcgggcact

SEQ ID NO: 305951 - DNA, 25 bp, Probe Sequence
tatctagttaatctggtggggacat

SEQ ID NO: 305952 - DNA, 25 bp, Probe Sequence
tatgtaggtagtggggggaaatgca

SEQ ID NO: 305953 - DNA, 25 bp, Probe Sequence
taggggaatctctgtgatagtaata

SEQ ID NO: 305954 - DNA, 25 bp, Probe Sequence
taggtgggcaccttttaaaatatga

SEQ ID NO: 305955 - DNA, 25 bp, Probe Sequence
tatggtcttcccttactagaaattc

SEQ ID NO: 305956 - DNA, 25 bp, Probe Sequence
tatggtttcccgttctgaaattgac

SEQ ID NO: 305957 - DNA, 25 bp, Probe Sequence
tatgactttctctgagttgggcaaa

SEQ ID NO: 305958 - DNA, 25 bp, Probe Sequence
tatggcatttgactagacttcccaa

SEQ ID NO: 305959 - DNA, 25 bp, Probe Sequence
taggcttcatagtatatctctgtcc

SEQ ID NO: 305960 - DNA, 25 bp, Probe Sequence
taggtctatatttatcttcacagtt

SEQ ID NO: 305961 - DNA, 25 bp, Probe Sequence
taggcacatcatatttgctccaagt

SEQ ID NO: 305962 - DNA, 25 bp, Probe Sequence
tatggactttaatgacacaatgttt

SEQ ID NO: 305963 - DNA, 25 bp, Probe Sequence
tattactttagttacgaattccaat

SEQ ID NO: 305964 - DNA, 25 bp, Probe Sequence
tattcctttcctccaatgaaccaaa

SEQ ID NO: 305965 - DNA, 25 bp, Probe Sequence
tttctggaaacctcatgaactgata

SEQ ID NO: 305966 - DNA, 25 bp, Probe Sequence
taggtgtaaaccttaaactgcattc

SEQ ID NO: 305967 - DNA, 25 bp, Probe Sequence
tatgtattccaacctttaactctgt

SEQ ID NO: 305968 - DNA, 25 bp, Probe Sequence
tattcagtaaacaacttgtacttgt

SEQ ID NO: 305969 - DNA, 25 bp, Probe Sequence
tattcctgaaacatagttacatagt

SEQ ID NO: 305970 - DNA, 25 bp, Probe Sequence
tatgtcttacattcactaggataat

SEQ ID NO: 305971 - DNA, 25 bp, Probe Sequence
ttttaatctcgcctcggaagttcca

SEQ ID NO: 305972 - DNA, 25 bp, Probe Sequence
tatttaattacattgggagcagttc

SEQ ID NO: 305973 - DNA, 25 bp, Probe Sequence
ttttattctacttggtcagctttgg

SEQ ID NO: 305974 - DNA, 25 bp, Probe Sequence
tatagtatttacattctcttttagg

SEQ ID NO: 305975 - DNA, 25 bp, Probe Sequence
tatggctgcttctgttttttcatta

SEQ ID NO: 305976 - DNA, 25 bp, Probe Sequence
tatggctgcttctgttttttcatta

SEQ ID NO: 305977 - DNA, 25 bp, Probe Sequence
tatggacttcttgattccttctggt

SEQ ID NO: 305978 - DNA, 25 bp, Probe Sequence
tatgtattgttttactcctttttat

SEQ ID NO: 305979 - DNA, 25 bp, Probe Sequence
taggttgtttctaattttcattatt

SEQ ID NO: 305980 - DNA, 25 bp, Probe Sequence
taggatttttgcttttgtgattttt

SEQ ID NO: 305981 - DNA, 25 bp, Probe Sequence
tagggtactcaattttatgtttcct

SEQ ID NO: 305982 - DNA, 25 bp, Probe Sequence
taggtttcatactctaattttactt

SEQ ID NO: 305983 - DNA, 25 bp, Probe Sequence
taggtttcatactctaattttactt

SEQ ID NO: 305984 - DNA, 25 bp, Probe Sequence
taggacttgtactctgaattttcag

SEQ ID NO: 305985 - DNA, 25 bp, Probe Sequence
tatggcagcttctacatacgaatta

SEQ ID NO: 305986 - DNA, 25 bp, Probe Sequence
tatgaatttaactactgtcagtacc

SEQ ID NO: 305987 - DNA, 25 bp, Probe Sequence
ttccttcttactgtgtcaattccta

SEQ ID NO: 305988 - DNA, 25 bp, Probe Sequence
tttctcgtataacattaattccttt

SEQ ID NO: 305989 - DNA, 25 bp, Probe Sequence
ttcccgttcctcaactgaaatcttt

SEQ ID NO: 305990 - DNA, 25 bp, Probe Sequence
ttccggtaccttgctgaagttgcgt

SEQ ID NO: 305991 - DNA, 25 bp, Probe Sequence
tatctcggctcagacttttggttgg

SEQ ID NO: 305992 - DNA, 25 bp, Probe Sequence
ttctctggtcacagttttgggttca

SEQ ID NO: 305993 - DNA, 25 bp, Probe Sequence
tttcccctctagttttgggtgtgca

SEQ ID NO: 305994 - DNA, 25 bp, Probe Sequence
tttcgtctgcctgttttgtggactg

SEQ ID NO: 305995 - DNA, 25 bp, Probe Sequence
tattcgtcggttcattttggggatt

SEQ ID NO: 305996 - DNA, 25 bp, Probe Sequence
tattactgggttcctatactgacgg

SEQ ID NO: 305997 - DNA, 25 bp, Probe Sequence
tatccctgggacagaatgtgcatga

SEQ ID NO: 305998 - DNA, 25 bp, Probe Sequence
tatccacggcgaacagacggctggt

SEQ ID NO: 305999 - DNA, 25 bp, Probe Sequence
tatctccaggagggcaagggcgatt

SEQ ID NO: 306000 - DNA, 25 bp, Probe Sequence
tatcccagagtcagtagtcctttaa

SEQ ID NO: 306001 - DNA, 25 bp, Probe Sequence
ttcctagtttacagttcttttacat

SEQ ID NO: 306002 - DNA, 25 bp, Probe Sequence
tttcgaggccaacaaatcattttac

SEQ ID NO: 306003 - DNA, 25 bp, Probe Sequence
tattcagggcctagtattctcttcg

SEQ ID NO: 306004 - DNA, 25 bp, Probe Sequence
tatacaggtttagtatttttgcctg

SEQ ID NO: 306005 - DNA, 25 bp, Probe Sequence
tttagcctacgtttttctcatgcct

SEQ ID NO: 306006 - DNA, 25 bp, Probe Sequence
tttggactgttgttctgcttttcct

SEQ ID NO: 306007 - DNA, 25 bp, Probe Sequence
tatgtggactgtaaatgttttattt

SEQ ID NO: 306008 - DNA, 25 bp, Probe Sequence
tatgctgttatgtaaatgattggtt

SEQ ID NO: 306009 - DNA, 25 bp, Probe Sequence
tatgctgtcatcaaccactatggag

SEQ ID NO: 306010 - DNA, 25 bp, Probe Sequence
taggtgatcaattcacaaggccatc

SEQ ID NO: 306011 - DNA, 25 bp, Probe Sequence
taggctgtactgccacaaagcttca

SEQ ID NO: 306012 - DNA, 25 bp, Probe Sequence
tatgtgttgagtccaaagagctgga

SEQ ID NO: 306013 - DNA, 25 bp, Probe Sequence
tatggtattgtgccagacccttgat

SEQ ID NO: 306014 - DNA, 25 bp, Probe Sequence
tatgccaataggccaaccacggtac

SEQ ID NO: 306015 - DNA, 25 bp, Probe Sequence
tatacacagcagacctagccatggg

SEQ ID NO: 306016 - DNA, 25 bp, Probe Sequence
tatcaccagcagacactgcacgggc

SEQ ID NO: 306017 - DNA, 25 bp, Probe Sequence
taggccggacatggtggctggctca

SEQ ID NO: 306018 - DNA, 25 bp, Probe Sequence
taggtaggtatggttgcaggcacct

SEQ ID NO: 306019 - DNA, 25 bp, Probe Sequence
tagggaggtggtaggcaggacctct

SEQ ID NO: 306020 - DNA, 25 bp, Probe Sequence
tagggatggtggcatcgatgcccct

SEQ ID NO: 306021 - DNA, 25 bp, Probe Sequence
taggtgaggggcctctgagagcccg

SEQ ID NO: 306022 - DNA, 25 bp, Probe Sequence
tagggtgaagaccctagcgtccagc

SEQ ID NO: 306023 - DNA, 25 bp, Probe Sequence
taggtggacagacccttgcagtgat

SEQ ID NO: 306024 - DNA, 25 bp, Probe Sequence
tagggtagagagacgctgggtgacc

SEQ ID NO: 306025 - DNA, 25 bp, Probe Sequence
taggctttcaagagttggtaccttt

SEQ ID NO: 306026 - DNA, 25 bp, Probe Sequence
tatgtttctaaaaattggtacttgt

SEQ ID NO: 306027 - DNA, 25 bp, Probe Sequence
tatcttacgaaaaaatggtagcatt

SEQ ID NO: 306028 - DNA, 25 bp, Probe Sequence
ttcctcaaaataaacaagtccttat

SEQ ID NO: 306029 - DNA, 25 bp, Probe Sequence
tatcccaaaaatcatataatgcagt

SEQ ID NO: 306030 - DNA, 25 bp, Probe Sequence
ttgcccttaagtgcttttgctgcta

SEQ ID NO: 306031 - DNA, 25 bp, Probe Sequence
tatagccttaactcttactgttttg

SEQ ID NO: 306032 - DNA, 25 bp, Probe Sequence
tatgaactttactctgacctgtgat

SEQ ID NO: 306033 - DNA, 25 bp, Probe Sequence
taggaatctttatctgagctgcttg

SEQ ID NO: 306034 - DNA, 25 bp, Probe Sequence
taggaatcagtccagatgtgagttt

SEQ ID NO: 306035 - DNA, 25 bp, Probe Sequence
tatggaatgccccatggggctctct

SEQ ID NO: 306036 - DNA, 25 bp, Probe Sequence
tatggaaggacttgcatccagcttc

SEQ ID NO: 306037 - DNA, 25 bp, Probe Sequence
tatgttagttcttcacctgctatca

SEQ ID NO: 306038 - DNA, 25 bp, Probe Sequence
tatgtgtgtgctcaaacgtgtatca

SEQ ID NO: 306039 - DNA, 25 bp, Probe Sequence
tatgggtctgtcaaagcctatacta

SEQ ID NO: 306040 - DNA, 25 bp, Probe Sequence
taggcctctgctacaagcacttgaa

SEQ ID NO: 306041 - DNA, 25 bp, Probe Sequence
taggcctttgaatggcatatgccat

SEQ ID NO: 306042 - DNA, 25 bp, Probe Sequence
taggcagtaggcaaggagaacccat

SEQ ID NO: 306043 - DNA, 25 bp, Probe Sequence
taggagggagttagaaacagtcttt

SEQ ID NO: 306044 - DNA, 25 bp, Probe Sequence
tatgttttacctaaagacgtctctt

SEQ ID NO: 306045 - DNA, 25 bp, Probe Sequence
tatgcattttaagttaaactgccta

SEQ ID NO: 306046 - DNA, 25 bp, Probe Sequence
tttgttcaacgattaaagtcctacg

SEQ ID NO: 306047 - DNA, 25 bp, Probe Sequence
tttgcaataccgttgtaatcctttc

SEQ ID NO: 306048 - DNA, 25 bp, Probe Sequence
tatgtgcagaaccactttggtccaa

SEQ ID NO: 306049 - DNA, 25 bp, Probe Sequence
tatgtgcaaaaccgagggctccagt

SEQ ID NO: 306050 - DNA, 25 bp, Probe Sequence
taggcagattactcaacctctcagt

SEQ ID NO: 306051 - DNA, 25 bp, Probe Sequence
tatggcgattactaccaacgtcact

SEQ ID NO: 306052 - DNA, 25 bp, Probe Sequence
tatggtatggactacgcgacctcca

SEQ ID NO: 306053 - DNA, 25 bp, Probe Sequence
taggctttggaagtggtcatttcag

SEQ ID NO: 306054 - DNA, 25 bp, Probe Sequence
taggctttggaagtggtcatttcag

SEQ ID NO: 306055 - DNA, 25 bp, Probe Sequence
taggctttggaagtggtcatttcag

SEQ ID NO: 306056 - DNA, 25 bp, Probe Sequence
taggctcttggtgcactgtttttac

SEQ ID NO: 306057 - DNA, 25 bp, Probe Sequence
taggttaggatgcttgtcttttaca

SEQ ID NO: 306058 - DNA, 25 bp, Probe Sequence
tatggcttagagtcttttctttgaa

SEQ ID NO: 306059 - DNA, 25 bp, Probe Sequence
tatgattataagcattcccctctgt

SEQ ID NO: 306060 - DNA, 25 bp, Probe Sequence
tatgttttaggaatcagtccagatg

SEQ ID NO: 306061 - DNA, 25 bp, Probe Sequence
tatggggtatggcatcagcttagat

SEQ ID NO: 306062 - DNA, 25 bp, Probe Sequence
taggtggcgtgtttcagcttggcac

SEQ ID NO: 306063 - DNA, 25 bp, Probe Sequence
taggatggcctggatgttgctatcg

SEQ ID NO: 306064 - DNA, 25 bp, Probe Sequence
tatggtggacgtagtgatgcttctc

SEQ ID NO: 306065 - DNA, 25 bp, Probe Sequence
tatgagggtcagggcagtatctctc

SEQ ID NO: 306066 - DNA, 25 bp, Probe Sequence
taggagtgcgacaagcagttcctcg

SEQ ID NO: 306067 - DNA, 25 bp, Probe Sequence
tatgggcaggatgcagctttcaccg

SEQ ID NO: 306068 - DNA, 25 bp, Probe Sequence
tatgaggaggttggtgtggattctg

SEQ ID NO: 306069 - DNA, 25 bp, Probe Sequence
tatagccaagcttccgtcaataagg

SEQ ID NO: 306070 - DNA, 25 bp, Probe Sequence
tattcccagtacagccagtacctgt

SEQ ID NO: 306071 - DNA, 25 bp, Probe Sequence
ttacaggagtacaggctgcccagtt

SEQ ID NO: 306072 - DNA, 25 bp, Probe Sequence
ttaccagattacacatccccagtgg

SEQ ID NO: 306073 - DNA, 25 bp, Probe Sequence
tataaccttaaagtctcccagtctg

SEQ ID NO: 306074 - DNA, 25 bp, Probe Sequence
tataactcagtaaagcagtcccgcc

SEQ ID NO: 306075 - DNA, 25 bp, Probe Sequence
tttactcaggtgcatggttacagcc

SEQ ID NO: 306076 - DNA, 25 bp, Probe Sequence
ttctaacgggtatgattacagtagc

SEQ ID NO: 306077 - DNA, 25 bp, Probe Sequence
tttgacctggaataatgtccacata

SEQ ID NO: 306078 - DNA, 25 bp, Probe Sequence
ttttcacggccatagcttccaatac

SEQ ID NO: 306079 - DNA, 25 bp, Probe Sequence
tatttcacccgaatgtgtacccttc

SEQ ID NO: 306080 - DNA, 25 bp, Probe Sequence
tattacacagcccaatttaacccct

SEQ ID NO: 306081 - DNA, 25 bp, Probe Sequence
tataaatgcccccatttgagatgcc

SEQ ID NO: 306082 - DNA, 25 bp, Probe Sequence
ttagtgcaggcctgttctgaggcaa

SEQ ID NO: 306083 - DNA, 25 bp, Probe Sequence
tatagccaccagtgctttgttccag

SEQ ID NO: 306084 - DNA, 25 bp, Probe Sequence
tataggcccgcagaatttttaccag

SEQ ID NO: 306085 - DNA, 25 bp, Probe Sequence
tatcaggacccagaattacttacag

SEQ ID NO: 306086 - DNA, 25 bp, Probe Sequence
tataggtcccaggtaatactcccaa

SEQ ID NO: 306087 - DNA, 25 bp, Probe Sequence
taggcttcaaacctaagcctcccaa

SEQ ID NO: 306088 - DNA, 25 bp, Probe Sequence
taggctatttcgatcaaccctgcca

SEQ ID NO: 306089 - DNA, 25 bp, Probe Sequence
tatggtggtttgctacacccgtcaa

SEQ ID NO: 306090 - DNA, 25 bp, Probe Sequence
tatggtttttggttcactggcttaa

SEQ ID NO: 306091 - DNA, 25 bp, Probe Sequence
tatggccctgaatggtgcactggtt

SEQ ID NO: 306092 - DNA, 25 bp, Probe Sequence
taggtctcgtaaagtatatgtgttc

SEQ ID NO: 306093 - DNA, 25 bp, Probe Sequence
taggtctcgtagtcgatctaggtca

SEQ ID NO: 306094 - DNA, 25 bp, Probe Sequence
taggttcagtgagtttcgatgacta

SEQ ID NO: 306095 - DNA, 25 bp, Probe Sequence
taggactcctgagttgcccatgatt

SEQ ID NO: 306096 - DNA, 25 bp, Probe Sequence
tatgaactgccgacatatccacact

SEQ ID NO: 306097 - DNA, 25 bp, Probe Sequence
tatgatggcatccactatgatccac

SEQ ID NO: 306098 - DNA, 25 bp, Probe Sequence
tatgctggcagtaatctggccatgc

SEQ ID NO: 306099 - DNA, 25 bp, Probe Sequence
tatgcgggtccagtgtcaacagtat

SEQ ID NO: 306100 - DNA, 25 bp, Probe Sequence
tatggggactatagtgcaacctatt

SEQ ID NO: 306101 - DNA, 25 bp, Probe Sequence
taggcctatctaggtgacactatag

SEQ ID NO: 306102 - DNA, 25 bp, Probe Sequence
taggccaccatggggacctgagagg

SEQ ID NO: 306103 - DNA, 25 bp, Probe Sequence
tatggtgtccagtggcatccagaga

SEQ ID NO: 306104 - DNA, 25 bp, Probe Sequence
tatgtgtttcattacagctccaaaa

SEQ ID NO: 306105 - DNA, 25 bp, Probe Sequence
tatgctggttgtagaccccaaaagt

SEQ ID NO: 306106 - DNA, 25 bp, Probe Sequence
tatgtggtcgctgaccggaccgaat

SEQ ID NO: 306107 - DNA, 25 bp, Probe Sequence
ttatgttagctccaagcggaccggt

SEQ ID NO: 306108 - DNA, 25 bp, Probe Sequence
ttatgttagctccaagcggaccggt

SEQ ID NO: 306109 - DNA, 25 bp, Probe Sequence
tattcctgtctccaaaggaccggct

SEQ ID NO: 306110 - DNA, 25 bp, Probe Sequence
tatctttgctctcaaggatacccgc

SEQ ID NO: 306111 - DNA, 25 bp, Probe Sequence
tatcctgagccctttggatatcccc

SEQ ID NO: 306112 - DNA, 25 bp, Probe Sequence
tatgatctgcaggtttgggcatatg

SEQ ID NO: 306113 - DNA, 25 bp, Probe Sequence
tatgttctgatgagctgggcaaggt

SEQ ID NO: 306114 - DNA, 25 bp, Probe Sequence
tatggatgcggttgcttgcgtgagg

SEQ ID NO: 306115 - DNA, 25 bp, Probe Sequence
tatgggtttgctttggtgttgtttt

SEQ ID NO: 306116 - DNA, 25 bp, Probe Sequence
taggatcataatgttggttgttttt

SEQ ID NO: 306117 - DNA, 25 bp, Probe Sequence
tatggactccttactggtttttgga

SEQ ID NO: 306118 - DNA, 25 bp, Probe Sequence
tatgaacccttcctgagctttatgg

SEQ ID NO: 306119 - DNA, 25 bp, Probe Sequence
tatgtctccttttatgccttttggt

SEQ ID NO: 306120 - DNA, 25 bp, Probe Sequence
tatgttcccttgcatggatgttttt

SEQ ID NO: 306121 - DNA, 25 bp, Probe Sequence
tatgcgcacctcgtggggtggttgt

SEQ ID NO: 306122 - DNA, 25 bp, Probe Sequence
tatgcagaagtagggcgtgtgggtt

SEQ ID NO: 306123 - DNA, 25 bp, Probe Sequence
tatgccaagaggtgcaatgtggtgt

SEQ ID NO: 306124 - DNA, 25 bp, Probe Sequence
tatccaaggtgctgaatcttggagg

SEQ ID NO: 306125 - DNA, 25 bp, Probe Sequence
tatctccctgtctgtggttggggca

SEQ ID NO: 306126 - DNA, 25 bp, Probe Sequence
tatgtcactggagctttgttgggaa

SEQ ID NO: 306127 - DNA, 25 bp, Probe Sequence
tatggtctggaaatttgtatcgcaa

SEQ ID NO: 306128 - DNA, 25 bp, Probe Sequence
tatgcttcctaaaatctcaagccaa

SEQ ID NO: 306129 - DNA, 25 bp, Probe Sequence
tatgttctcaaaccaatcacacaga

SEQ ID NO: 306130 - DNA, 25 bp, Probe Sequence
tatgttccagattgaccatgaataa

SEQ ID NO: 306131 - DNA, 25 bp, Probe Sequence
tatggacacatgaaacctcctaatg

SEQ ID NO: 306132 - DNA, 25 bp, Probe Sequence
tatggaccaaaagatcaccagtgta

SEQ ID NO: 306133 - DNA, 25 bp, Probe Sequence
tatggatgtcaaacacctgcacctt

SEQ ID NO: 306134 - DNA, 25 bp, Probe Sequence
tatggattcaatgccatccccatca

SEQ ID NO: 306135 - DNA, 25 bp, Probe Sequence
taggctgtgtatggactcccaactg

SEQ ID NO: 306136 - DNA, 25 bp, Probe Sequence
taggcatgttttctgatctaacatg

SEQ ID NO: 306137 - DNA, 25 bp, Probe Sequence
taggatgtgtcttttgttcctagaa

SEQ ID NO: 306138 - DNA, 25 bp, Probe Sequence
taggatgattgttcgtgtaactgac

SEQ ID NO: 306139 - DNA, 25 bp, Probe Sequence
tatggagatattacagtggaactga

SEQ ID NO: 306140 - DNA, 25 bp, Probe Sequence
tatggaaaaccatggattctgaaag

SEQ ID NO: 306141 - DNA, 25 bp, Probe Sequence
tatgccaaaacgtatgagggtagaa

SEQ ID NO: 306142 - DNA, 25 bp, Probe Sequence
ttgcaacgaccgtctggggaagaag

SEQ ID NO: 306143 - DNA, 25 bp, Probe Sequence
ttccctgacccagccaggaacaaac

SEQ ID NO: 306144 - DNA, 25 bp, Probe Sequence
tatcccgataccccacaggtaaatc

SEQ ID NO: 306145 - DNA, 25 bp, Probe Sequence
tataccataacccaaggctgaaaat

SEQ ID NO: 306146 - DNA, 25 bp, Probe Sequence
tatccctaaccctgtctaaactaat

SEQ ID NO: 306147 - DNA, 25 bp, Probe Sequence
ttccctaacactttcttgaaggtca

SEQ ID NO: 306148 - DNA, 25 bp, Probe Sequence
ttcttgtaaacttacggacacctct

SEQ ID NO: 306149 - DNA, 25 bp, Probe Sequence
tattatagaaaccaacgtaaagcct

SEQ ID NO: 306150 - DNA, 25 bp, Probe Sequence
tatgttcaaaacacacagtacagac

SEQ ID NO: 306151 - DNA, 25 bp, Probe Sequence
tattcggcaaacagcacactaatcc

SEQ ID NO: 306152 - DNA, 25 bp, Probe Sequence
tatgtcctgctctctaaactacatc

SEQ ID NO: 306153 - DNA, 25 bp, Probe Sequence
tatgtgacctcacgtgcaaagccac

SEQ ID NO: 306154 - DNA, 25 bp, Probe Sequence
tatgtgccagccattgcacacctca

SEQ ID NO: 306155 - DNA, 25 bp, Probe Sequence
taggccagagtgatggcaccatcat

SEQ ID NO: 306156 - DNA, 25 bp, Probe Sequence
tatcctgaggtgcggcaccactgtc

SEQ ID NO: 306157 - DNA, 25 bp, Probe Sequence
tatccatctgggtggtgccagctga

SEQ ID NO: 306158 - DNA, 25 bp, Probe Sequence
tatgacgctgggcacgttgagtgaa

SEQ ID NO: 306159 - DNA, 25 bp, Probe Sequence
tatgattctgggctggactgtggga

SEQ ID NO: 306160 - DNA, 25 bp, Probe Sequence
tatgatttgcttctaggaatttcaa

SEQ ID NO: 306161 - DNA, 25 bp, Probe Sequence
tatgtgttgcttttgtaataggaaa

SEQ ID NO: 306162 - DNA, 25 bp, Probe Sequence
tatgtgttgcttttgtaataggaaa

SEQ ID NO: 306163 - DNA, 25 bp, Probe Sequence
tatgtacctttgttatgatgggata

SEQ ID NO: 306164 - DNA, 25 bp, Probe Sequence
tatgatgtccctgtcttgtgggaga

SEQ ID NO: 306165 - DNA, 25 bp, Probe Sequence
tatgattcaccctctttggagaaca

SEQ ID NO: 306166 - DNA, 25 bp, Probe Sequence
tatgatttatcctcttggttgcaca

SEQ ID NO: 306167 - DNA, 25 bp, Probe Sequence
tatgtatttcttattggcattcaac

SEQ ID NO: 306168 - DNA, 25 bp, Probe Sequence
tatgacttttgttttgtattgccca

SEQ ID NO: 306169 - DNA, 25 bp, Probe Sequence
tatggtttaatctttccattgtgtc

SEQ ID NO: 306170 - DNA, 25 bp, Probe Sequence
tatccttgataatatacacaatctt

SEQ ID NO: 306171 - DNA, 25 bp, Probe Sequence
tatcctttgtatctgaaataccttt

SEQ ID NO: 306172 - DNA, 25 bp, Probe Sequence
tatccttcctcagctaaaactgcct

SEQ ID NO: 306173 - DNA, 25 bp, Probe Sequence
tatccttatctcatttaaatcccct

SEQ ID NO: 306174 - DNA, 25 bp, Probe Sequence
tatctaaactgtacttgtaccccct

SEQ ID NO: 306175 - DNA, 25 bp, Probe Sequence
tatccaaactgctctggaaggcatc

SEQ ID NO: 306176 - DNA, 25 bp, Probe Sequence
tatcgccaccacagctggatgggag

SEQ ID NO: 306177 - DNA, 25 bp, Probe Sequence
tatcccaccctcgaggcagggaaaa

SEQ ID NO: 306178 - DNA, 25 bp, Probe Sequence
tatgaagcccctggtgtgcgggaag

SEQ ID NO: 306179 - DNA, 25 bp, Probe Sequence
tatggccaactcgggctgcaaggac

SEQ ID NO: 306180 - DNA, 25 bp, Probe Sequence
tatggccaactcgggctgcaaggac

SEQ ID NO: 306181 - DNA, 25 bp, Probe Sequence
tatgccaatactgggaggttggata

SEQ ID NO: 306182 - DNA, 25 bp, Probe Sequence
tatgcaaggagcgggcgcgcttcga

SEQ ID NO: 306183 - DNA, 25 bp, Probe Sequence
tatgcagagctgtcaggaaccttca

SEQ ID NO: 306184 - DNA, 25 bp, Probe Sequence
tatgcagacttataaggttgacctt

SEQ ID NO: 306185 - DNA, 25 bp, Probe Sequence
taggcactctttaatccattacctg

SEQ ID NO: 306186 - DNA, 25 bp, Probe Sequence
taggaacttttcacttatctcatgt

SEQ ID NO: 306187 - DNA, 25 bp, Probe Sequence
taggaagtttattagttaccaacat

SEQ ID NO: 306188 - DNA, 25 bp, Probe Sequence
tatgtagagtccttttttcccaaga

SEQ ID NO: 306189 - DNA, 25 bp, Probe Sequence
tataaatgtacttttccttccagaa

SEQ ID NO: 306190 - DNA, 25 bp, Probe Sequence
tataaatgtactttttcttccagaa

SEQ ID NO: 306191 - DNA, 25 bp, Probe Sequence
tatataataaatccgtaagttaata

SEQ ID NO: 306192 - DNA, 25 bp, Probe Sequence
tattggtagttctgaacgttagata

SEQ ID NO: 306193 - DNA, 25 bp, Probe Sequence
tattaggagtttcccacgttgggat

SEQ ID NO: 306194 - DNA, 25 bp, Probe Sequence
tatggggactttcttacttgggcag

SEQ ID NO: 306195 - DNA, 25 bp, Probe Sequence
tataggggttctcgctatagccggt

SEQ ID NO: 306196 - DNA, 25 bp, Probe Sequence
tatgcagggaaacttccctcctggt

SEQ ID NO: 306197 - DNA, 25 bp, Probe Sequence
tatgtcggtataatggcccgcctgg

SEQ ID NO: 306198 - DNA, 25 bp, Probe Sequence
tatggcacgtaatgtgccccctgtg

SEQ ID NO: 306199 - DNA, 25 bp, Probe Sequence
taggcacgtaacctgcaatgtcgct

SEQ ID NO: 306200 - DNA, 25 bp, Probe Sequence
tatggcagccaacctttatgctcgt

SEQ ID NO: 306201 - DNA, 25 bp, Probe Sequence
tatggagccaagatatgtggactct

SEQ ID NO: 306202 - DNA, 25 bp, Probe Sequence
tatggagcccagaattacaagtatg

SEQ ID NO: 306203 - DNA, 25 bp, Probe Sequence
tatggcacccagattaactgttaaa

SEQ ID NO: 306204 - DNA, 25 bp, Probe Sequence
tatggccctatgatctatcctttac

SEQ ID NO: 306205 - DNA, 25 bp, Probe Sequence
tatggccacactatctacacttgga

SEQ ID NO: 306206 - DNA, 25 bp, Probe Sequence
tatgatccaactcacttcatcctaa

SEQ ID NO: 306207 - DNA, 25 bp, Probe Sequence
ttatcaacgaaacttctcagcatca

SEQ ID NO: 306208 - DNA, 25 bp, Probe Sequence
tatgacaacgaatttggctacagca

SEQ ID NO: 306209 - DNA, 25 bp, Probe Sequence
tatgagaaacatttggtgcccagaa

SEQ ID NO: 306210 - DNA, 25 bp, Probe Sequence
tatgacagggtgttgcagtaacaaa

SEQ ID NO: 306211 - DNA, 25 bp, Probe Sequence
tatggcagtggtttcagtatgacaa

SEQ ID NO: 306212 - DNA, 25 bp, Probe Sequence
tatggagtatgttttgctatgtaat

SEQ ID NO: 306213 - DNA, 25 bp, Probe Sequence
tatgctgatggagcatgctttttaa

SEQ ID NO: 306214 - DNA, 25 bp, Probe Sequence
tatggattgctgcatgattcttaaa

SEQ ID NO: 306215 - DNA, 25 bp, Probe Sequence
tatggtgtctcgtctttgtgaatct

SEQ ID NO: 306216 - DNA, 25 bp, Probe Sequence
tatggatgtctattcttattctgag

SEQ ID NO: 306217 - DNA, 25 bp, Probe Sequence
tatggcttctatttgcttcttggag

SEQ ID NO: 306218 - DNA, 25 bp, Probe Sequence
tatgtgcttcttctgattcttgcta

SEQ ID NO: 306219 - DNA, 25 bp, Probe Sequence
tatgtgttcttttgcaattgtttct

SEQ ID NO: 306220 - DNA, 25 bp, Probe Sequence
taggcttcatacggaaagtgtttga

SEQ ID NO: 306221 - DNA, 25 bp, Probe Sequence
taggcttaacagaaatacttttgta

SEQ ID NO: 306222 - DNA, 25 bp, Probe Sequence
tatggtatacacctccaacttttat

SEQ ID NO: 306223 - DNA, 25 bp, Probe Sequence
tatggattaccacttaacaaggata

SEQ ID NO: 306224 - DNA, 25 bp, Probe Sequence
tatggtgacacctatatgaacacag

SEQ ID NO: 306225 - DNA, 25 bp, Probe Sequence
tatgggagccattagtggaagagcc

SEQ ID NO: 306226 - DNA, 25 bp, Probe Sequence
tatggagacctaggggagacaccgc

SEQ ID NO: 306227 - DNA, 25 bp, Probe Sequence
tatccagcctgttgggaatggaccc

SEQ ID NO: 306228 - DNA, 25 bp, Probe Sequence
tatccagcagtgcttatgaagcccc

SEQ ID NO: 306229 - DNA, 25 bp, Probe Sequence
tatccgagagagtgagagcgctcct

SEQ ID NO: 306230 - DNA, 25 bp, Probe Sequence
tatgccttaggcttcgatggttctt

SEQ ID NO: 306231 - DNA, 25 bp, Probe Sequence
tatgtcctaagctggagttctgatt

SEQ ID NO: 306232 - DNA, 25 bp, Probe Sequence
tatgtttaagccagactttttcttc

SEQ ID NO: 306233 - DNA, 25 bp, Probe Sequence
ttggttttgccatgtactattttac

SEQ ID NO: 306234 - DNA, 25 bp, Probe Sequence
tatggtttcccttgtatctatttgt

SEQ ID NO: 306235 - DNA, 25 bp, Probe Sequence
tatcctgttccgagcaacttttcta

SEQ ID NO: 306236 - DNA, 25 bp, Probe Sequence
tatcacctccccaaaactgttggta

SEQ ID NO: 306237 - DNA, 25 bp, Probe Sequence
tatcacctccccaaaactgttggta

SEQ ID NO: 306238 - DNA, 25 bp, Probe Sequence
tatcccttccaagaatcattataga

SEQ ID NO: 306239 - DNA, 25 bp, Probe Sequence
ttaacttcaaaaaatcaggtagcag

SEQ ID NO: 306240 - DNA, 25 bp, Probe Sequence
tataccttttaaaacacagtggcag

SEQ ID NO: 306241 - DNA, 25 bp, Probe Sequence
tatacctaatgtaaatgacgagtta

SEQ ID NO: 306242 - DNA, 25 bp, Probe Sequence
tatcctcttatgtaaaattgcggta

SEQ ID NO: 306243 - DNA, 25 bp, Probe Sequence
tatcccattggttaaaagcaagtca

SEQ ID NO: 306244 - DNA, 25 bp, Probe Sequence
tatcctctcctacacataagaaacc

SEQ ID NO: 306245 - DNA, 25 bp, Probe Sequence
tatccttctggtccagcgcaaggag

SEQ ID NO: 306246 - DNA, 25 bp, Probe Sequence
tatcagcttttaacgcctggaagta

SEQ ID NO: 306247 - DNA, 25 bp, Probe Sequence
tatgcagttcttaaggacgaaggta

SEQ ID NO: 306248 - DNA, 25 bp, Probe Sequence
tatgagttgttgttgggaaagggct

SEQ ID NO: 306249 - DNA, 25 bp, Probe Sequence
tatggtgttgtgtatgggaatgtaa

SEQ ID NO: 306250 - DNA, 25 bp, Probe Sequence
tatggtgatttgcctacagtgatgt

SEQ ID NO: 306251 - DNA, 25 bp, Probe Sequence
taggaatggcaggccacgctggcat

SEQ ID NO: 306252 - DNA, 25 bp, Probe Sequence
tatgtgaaggcactgcccgggcaac

SEQ ID NO: 306253 - DNA, 25 bp, Probe Sequence
tatctaatgtgatgcccggaatatc

SEQ ID NO: 306254 - DNA, 25 bp, Probe Sequence
tatgccaagtataacctggtttcgt

SEQ ID NO: 306255 - DNA, 25 bp, Probe Sequence
tatggcaggcgcaaactcgattttc

SEQ ID NO: 306256 - DNA, 25 bp, Probe Sequence
tatgaaggtgcctaccatgttctcc

SEQ ID NO: 306257 - DNA, 25 bp, Probe Sequence
tatgattttgactaccttatctggt

SEQ ID NO: 306258 - DNA, 25 bp, Probe Sequence
tatgtctccatattactgtttcatg

SEQ ID NO: 306259 - DNA, 25 bp, Probe Sequence
tatgttgcctgcaatagggctcttg

SEQ ID NO: 306260 - DNA, 25 bp, Probe Sequence
tatgttgtgctgtatcctgtgcttt

SEQ ID NO: 306261 - DNA, 25 bp, Probe Sequence
tatgcttctggatccgaatttgatg

SEQ ID NO: 306262 - DNA, 25 bp, Probe Sequence
tatgccatcggcaccgtactggatc

SEQ ID NO: 306263 - DNA, 25 bp, Probe Sequence
tatgtatcaggcatctgtgctgaat

SEQ ID NO: 306264 - DNA, 25 bp, Probe Sequence
tatgtcacaggcctggactaaattg

SEQ ID NO: 306265 - DNA, 25 bp, Probe Sequence
tattcacgaccgcattttctgctgt

SEQ ID NO: 306266 - DNA, 25 bp, Probe Sequence
tatgtgtcagacagtattttggatg

SEQ ID NO: 306267 - DNA, 25 bp, Probe Sequence
tatcttgtacggtcactgttggtgc

SEQ ID NO: 306268 - DNA, 25 bp, Probe Sequence
tttcaaatcggataggagtgtcagg

SEQ ID NO: 306269 - DNA, 25 bp, Probe Sequence
tttcaaaccaaattgggagaattgt

SEQ ID NO: 306270 - DNA, 25 bp, Probe Sequence
tttgcaacaacatgggtggaactgg

SEQ ID NO: 306271 - DNA, 25 bp, Probe Sequence
tatagaatagacagggagaactcgt

SEQ ID NO: 306272 - DNA, 25 bp, Probe Sequence
tatcctcagaccaggtggaattact

SEQ ID NO: 306273 - DNA, 25 bp, Probe Sequence
ttcctaacccgaatgaaattagcct

SEQ ID NO: 306274 - DNA, 25 bp, Probe Sequence
tatcctaacccaactatttgtaatt

SEQ ID NO: 306275 - DNA, 25 bp, Probe Sequence
tataaccataccactttttaattat

SEQ ID NO: 306276 - DNA, 25 bp, Probe Sequence
tataaagacaccactcctgagataa

SEQ ID NO: 306277 - DNA, 25 bp, Probe Sequence
tatataaagcccagtaaagaataaa

SEQ ID NO: 306278 - DNA, 25 bp, Probe Sequence
ttatataaagcccagtaaagaataa

SEQ ID NO: 306279 - DNA, 25 bp, Probe Sequence
tatgcattttacgcattaaaacatt

SEQ ID NO: 306280 - DNA, 25 bp, Probe Sequence
tatgcagctttatggttccacagaa

SEQ ID NO: 306281 - DNA, 25 bp, Probe Sequence
tatccattgaatcggtagtcccagt

SEQ ID NO: 306282 - DNA, 25 bp, Probe Sequence
tatgcaattagagtcgggtcccatt

SEQ ID NO: 306283 - DNA, 25 bp, Probe Sequence
tatgcaattagagtcgggtcccatt

SEQ ID NO: 306284 - DNA, 25 bp, Probe Sequence
tatcacgcgtgaatcggtgtcccag

SEQ ID NO: 306285 - DNA, 25 bp, Probe Sequence
tatacggtgtcaggtttcagggttt

SEQ ID NO: 306286 - DNA, 25 bp, Probe Sequence
tattcggcgtagcttttgtggctcc

SEQ ID NO: 306287 - DNA, 25 bp, Probe Sequence
tatgggatgtttgtttttggcacca

SEQ ID NO: 306288 - DNA, 25 bp, Probe Sequence
tatgtaaggttttttttgctacgca

SEQ ID NO: 306289 - DNA, 25 bp, Probe Sequence
tatgtaatggtggtcattttttccc

SEQ ID NO: 306290 - DNA, 25 bp, Probe Sequence
tatgtgattgtgccgtcattctgtt

SEQ ID NO: 306291 - DNA, 25 bp, Probe Sequence
tatgtgattgtgccgtcattctgtt

SEQ ID NO: 306292 - DNA, 25 bp, Probe Sequence
taggctatggacctcatgtgcatat

SEQ ID NO: 306293 - DNA, 25 bp, Probe Sequence
taggctcatcatactgtgattgaac

SEQ ID NO: 306294 - DNA, 25 bp, Probe Sequence
tatggccatctgagtacttgacctt

SEQ ID NO: 306295 - DNA, 25 bp, Probe Sequence
tatgcctgcatctaatgtgccttcc

SEQ ID NO: 306296 - DNA, 25 bp, Probe Sequence
tatacatgatcagaagctcttcact

SEQ ID NO: 306297 - DNA, 25 bp, Probe Sequence
tatgacaaagcacttcgcttcctgg

SEQ ID NO: 306298 - DNA, 25 bp, Probe Sequence
ttcagcaatccagaggttccttgac

SEQ ID NO: 306299 - DNA, 25 bp, Probe Sequence
ttgcgcctcttcaggttcttaaggg

SEQ ID NO: 306300 - DNA, 25 bp, Probe Sequence
tatggcttttgctgggttttggggg

SEQ ID NO: 306301 - DNA, 25 bp, Probe Sequence
tatctgttttgctgtggcgttgggg

SEQ ID NO: 306302 - DNA, 25 bp, Probe Sequence
tatgctgatcatcctgatcgtgggg

SEQ ID NO: 306303 - DNA, 25 bp, Probe Sequence
tttgtctgtcgaggctgggagggta

SEQ ID NO: 306304 - DNA, 25 bp, Probe Sequence
tttgactgttactgtccttggcgaa

SEQ ID NO: 306305 - DNA, 25 bp, Probe Sequence
tttgagggtattatcttctggtaat

SEQ ID NO: 306306 - DNA, 25 bp, Probe Sequence
tttgaggagaagtttcttatttgga

SEQ ID NO: 306307 - DNA, 25 bp, Probe Sequence
tatgtggggaagtcttcttaaagga

SEQ ID NO: 306308 - DNA, 25 bp, Probe Sequence
ttggtggtagggcctttgaaatgta

SEQ ID NO: 306309 - DNA, 25 bp, Probe Sequence
tatggatggtaggtgccttttaaaa

SEQ ID NO: 306310 - DNA, 25 bp, Probe Sequence
ttggggatacgtccatctttttaag

SEQ ID NO: 306311 - DNA, 25 bp, Probe Sequence
tatggcaaaaccccatctttaccaa

SEQ ID NO: 306312 - DNA, 25 bp, Probe Sequence
tatgcagaataagctctttattagg

SEQ ID NO: 306313 - DNA, 25 bp, Probe Sequence
tatgaccattaggcctatttaggtg

SEQ ID NO: 306314 - DNA, 25 bp, Probe Sequence
tatgaccattaggcctatttaggtg

SEQ ID NO: 306315 - DNA, 25 bp, Probe Sequence
tatgacacattacctttttagctat

SEQ ID NO: 306316 - DNA, 25 bp, Probe Sequence
tatgtacagtctacttttgaactat

SEQ ID NO: 306317 - DNA, 25 bp, Probe Sequence
tatgtactgttaaaattgaggtcac

SEQ ID NO: 306318 - DNA, 25 bp, Probe Sequence
tattgcacgtggctaatagggcctc

SEQ ID NO: 306319 - DNA, 25 bp, Probe Sequence
tatctgcttggggtttacctgccct

SEQ ID NO: 306320 - DNA, 25 bp, Probe Sequence
tatcctgctagggttttcaattcca

SEQ ID NO: 306321 - DNA, 25 bp, Probe Sequence
tatccccaggaaatcttcagcaacg

SEQ ID NO: 306322 - DNA, 25 bp, Probe Sequence
tatgccccaggctatgacaaagtca

SEQ ID NO: 306323 - DNA, 25 bp, Probe Sequence
tatgatcccaggactgaagacagtt

SEQ ID NO: 306324 - DNA, 25 bp, Probe Sequence
tatgtctccatacccattacaatct

SEQ ID NO: 306325 - DNA, 25 bp, Probe Sequence
tatgtctccatacccattacaatct

SEQ ID NO: 306326 - DNA, 25 bp, Probe Sequence
tatgttcaccagcccagagatcaat

SEQ ID NO: 306327 - DNA, 25 bp, Probe Sequence
tatgctcgagtctccagagtcactc

SEQ ID NO: 306328 - DNA, 25 bp, Probe Sequence
tatgacagattcgtcacatggcccc

SEQ ID NO: 306329 - DNA, 25 bp, Probe Sequence
tatgaagtacccaataccaccactg

SEQ ID NO: 306330 - DNA, 25 bp, Probe Sequence
tataactccaccaaactaaactata

SEQ ID NO: 306331 - DNA, 25 bp, Probe Sequence
tataattcacaataatttagacttc

SEQ ID NO: 306332 - DNA, 25 bp, Probe Sequence
tataaccaaatgaaatttacctgaa

SEQ ID NO: 306333 - DNA, 25 bp, Probe Sequence
tataaccaaataacacccctaacat

SEQ ID NO: 306334 - DNA, 25 bp, Probe Sequence
tatcaataccaaaaccccagttaat

SEQ ID NO: 306335 - DNA, 25 bp, Probe Sequence
tatccaaaaacaacctccttcttat

SEQ ID NO: 306336 - DNA, 25 bp, Probe Sequence
tatacgaacctaacctaccttgttg

SEQ ID NO: 306337 - DNA, 25 bp, Probe Sequence
tatgactaccgttacctactgttgt

SEQ ID NO: 306338 - DNA, 25 bp, Probe Sequence
tatacactgggtaacctgatcgtgg

SEQ ID NO: 306339 - DNA, 25 bp, Probe Sequence
tatagcctggaaagacacctctgtc

SEQ ID NO: 306340 - DNA, 25 bp, Probe Sequence
ttgatccggacacaaaccttctagc

SEQ ID NO: 306341 - DNA, 25 bp, Probe Sequence
tatgacaaggacgggaacctccggc

SEQ ID NO: 306342 - DNA, 25 bp, Probe Sequence
tatgtgccatggcctgggaagcctg

SEQ ID NO: 306343 - DNA, 25 bp, Probe Sequence
tatgtgcacgttgctagacagcctg

SEQ ID NO: 306344 - DNA, 25 bp, Probe Sequence
tatcgcagctttcaacaagatctga

SEQ ID NO: 306345 - DNA, 25 bp, Probe Sequence
tatcatggccacaaaacaagtagaa

SEQ ID NO: 306346 - DNA, 25 bp, Probe Sequence
tatctatgcagactaacccctaaca

SEQ ID NO: 306347 - DNA, 25 bp, Probe Sequence
tatggtcaggccaagcctctctaaa

SEQ ID NO: 306348 - DNA, 25 bp, Probe Sequence
tatggaaggcgcttcaccatcaaga

SEQ ID NO: 306349 - DNA, 25 bp, Probe Sequence
tatgtggaggccctacacagttgcc

SEQ ID NO: 306350 - DNA, 25 bp, Probe Sequence
tatggatgatggtgtaatattttca

SEQ ID NO: 306351 - DNA, 25 bp, Probe Sequence
tatgtgatcttgggatacttattta

SEQ ID NO: 306352 - DNA, 25 bp, Probe Sequence
tatgccactcgagatgacctcatct

SEQ ID NO: 306353 - DNA, 25 bp, Probe Sequence
tatctacctatcctgagtctatctt

SEQ ID NO: 306354 - DNA, 25 bp, Probe Sequence
tatccccaacagctgcctaatttta

SEQ ID NO: 306355 - DNA, 25 bp, Probe Sequence
tatccccaaatcttattttattcat

SEQ ID NO: 306356 - DNA, 25 bp, Probe Sequence
tatccaggggtattttctaattcag

SEQ ID NO: 306357 - DNA, 25 bp, Probe Sequence
tatgctcagaggcaaatatttttta

SEQ ID NO: 306358 - DNA, 25 bp, Probe Sequence
tatcagggaccacattattattatt

SEQ ID NO: 306359 - DNA, 25 bp, Probe Sequence
tatcctggcacaataattttatggt

SEQ ID NO: 306360 - DNA, 25 bp, Probe Sequence
tatgccatggcatttgacagttcat

SEQ ID NO: 306361 - DNA, 25 bp, Probe Sequence
tatgctcatagccttgcactgagca

SEQ ID NO: 306362 - DNA, 25 bp, Probe Sequence
tatgcagcaatgcagtcctgacctt

SEQ ID NO: 306363 - DNA, 25 bp, Probe Sequence
tatgcgactgcgaacactgaactct

SEQ ID NO: 306364 - DNA, 25 bp, Probe Sequence
tatgtgcctgctgatgacttgactg

SEQ ID NO: 306365 - DNA, 25 bp, Probe Sequence
tatgtgcagtgtcagcaccatcctg

SEQ ID NO: 306366 - DNA, 25 bp, Probe Sequence
tatgtgcacttaagccgcagctgct

SEQ ID NO: 306367 - DNA, 25 bp, Probe Sequence
taggccattataatccagcttcttc

SEQ ID NO: 306368 - DNA, 25 bp, Probe Sequence
taggctatatttatatgcatttgtt

SEQ ID NO: 306369 - DNA, 25 bp, Probe Sequence
tatggccatcacctgaaaagttttc

SEQ ID NO: 306370 - DNA, 25 bp, Probe Sequence
tatgggcaaactgaagattttatcc

SEQ ID NO: 306371 - DNA, 25 bp, Probe Sequence
tatggtaccactgaaaccctgaccc

SEQ ID NO: 306372 - DNA, 25 bp, Probe Sequence
tatggttcaatttacgactgcctat

SEQ ID NO: 306373 - DNA, 25 bp, Probe Sequence
tatggtgtcacttagattgacttta

SEQ ID NO: 306374 - DNA, 25 bp, Probe Sequence
tatggtatataatgttgactccaaa

SEQ ID NO: 306375 - DNA, 25 bp, Probe Sequence
tatggtctataatttggtcccagat

SEQ ID NO: 306376 - DNA, 25 bp, Probe Sequence
tatgcggtattcattggtgcctaaa

SEQ ID NO: 306377 - DNA, 25 bp, Probe Sequence
tatgggtattgatgtccggctgaag

SEQ ID NO: 306378 - DNA, 25 bp, Probe Sequence
tatcgggttgattgccgaagtgaag

SEQ ID NO: 306379 - DNA, 25 bp, Probe Sequence
tatcgggggatgtccagagctcgga

SEQ ID NO: 306380 - DNA, 25 bp, Probe Sequence
tttgagttggaatcggtttgcattt

SEQ ID NO: 306381 - DNA, 25 bp, Probe Sequence
tttgggggaaggggtatgtgtcact

SEQ ID NO: 306382 - DNA, 25 bp, Probe Sequence
tttagtggagagggggttttgtcat

SEQ ID NO: 306383 - DNA, 25 bp, Probe Sequence
tttacctaggcgcttgtctaagatc

SEQ ID NO: 306384 - DNA, 25 bp, Probe Sequence
tatgtcccaaacgttctgcttaaga

SEQ ID NO: 306385 - DNA, 25 bp, Probe Sequence
tatgatcccataaaaactgcccaag

SEQ ID NO: 306386 - DNA, 25 bp, Probe Sequence
tatgcatacgtaaaaatggaccaca

SEQ ID NO: 306387 - DNA, 25 bp, Probe Sequence
tatctacgttgaatgtactaccaca

SEQ ID NO: 306388 - DNA, 25 bp, Probe Sequence
tattccgatagtacttttccaccac

SEQ ID NO: 306389 - DNA, 25 bp, Probe Sequence
tatcccagacagtttgtttctatgc

SEQ ID NO: 306390 - DNA, 25 bp, Probe Sequence
tatcaacgacgtctgtgttcttaat

SEQ ID NO: 306391 - DNA, 25 bp, Probe Sequence
tatgacctacctgtgtgttcattta

SEQ ID NO: 306392 - DNA, 25 bp, Probe Sequence
tatgggtacaacgtatgttcattat

SEQ ID NO: 306393 - DNA, 25 bp, Probe Sequence
tatgggtactgcggaaattcttgtg

SEQ ID NO: 306394 - DNA, 25 bp, Probe Sequence
tatcgtgtatccgaaaattgctaag

SEQ ID NO: 306395 - DNA, 25 bp, Probe Sequence
tatccatgtccggaaagattctgtt

SEQ ID NO: 306396 - DNA, 25 bp, Probe Sequence
tatgcacgattcggcaaatccctgg

SEQ ID NO: 306397 - DNA, 25 bp, Probe Sequence
tatgcctttcgtttatccttggggt

SEQ ID NO: 306398 - DNA, 25 bp, Probe Sequence
tatgttgctcatggctactatcctg

SEQ ID NO: 306399 - DNA, 25 bp, Probe Sequence
tatgtatgacatcctgggtcctgat

SEQ ID NO: 306400 - DNA, 25 bp, Probe Sequence
tatgaatgacattgctgtcgttttt

SEQ ID NO: 306401 - DNA, 25 bp, Probe Sequence
tatgccatgatttttggtatttatg

SEQ ID NO: 306402 - DNA, 25 bp, Probe Sequence
tatgccatgatttttggtatttatg

SEQ ID NO: 306403 - DNA, 25 bp, Probe Sequence
tatgtgcatgtatcttgcctcagat

SEQ ID NO: 306404 - DNA, 25 bp, Probe Sequence
tatggatgctgatctctcacaccat

SEQ ID NO: 306405 - DNA, 25 bp, Probe Sequence
tatggagggattaccacaatgcctt

SEQ ID NO: 306406 - DNA, 25 bp, Probe Sequence
tatgacatgaggttactcctagcct

SEQ ID NO: 306407 - DNA, 25 bp, Probe Sequence
tatgacttggtgggtcaccccttag

SEQ ID NO: 306408 - DNA, 25 bp, Probe Sequence
tatcatttgtggggtacaccccttc

SEQ ID NO: 306409 - DNA, 25 bp, Probe Sequence
tatcatttgggtcagagctcccctc

SEQ ID NO: 306410 - DNA, 25 bp, Probe Sequence
tatgatttgggctcacactttaccc

SEQ ID NO: 306411 - DNA, 25 bp, Probe Sequence
tatgattatggcctacaatgttgta

SEQ ID NO: 306412 - DNA, 25 bp, Probe Sequence
tatgttcggcttttcatgtatgtag

SEQ ID NO: 306413 - DNA, 25 bp, Probe Sequence
tatgtctatgttcattctatagaag

SEQ ID NO: 306414 - DNA, 25 bp, Probe Sequence
tatgatcttttcagtgtgatggcaa

SEQ ID NO: 306415 - DNA, 25 bp, Probe Sequence
tatgccttcaagctggcgcaggaga

SEQ ID NO: 306416 - DNA, 25 bp, Probe Sequence
tatgccttcaagctggcgcaggaga

SEQ ID NO: 306417 - DNA, 25 bp, Probe Sequence
tatgtcgtccacaatgtcacaggag

SEQ ID NO: 306418 - DNA, 25 bp, Probe Sequence
tatgatgtgtagccgatgccaagga

SEQ ID NO: 306419 - DNA, 25 bp, Probe Sequence
tatgcatggtttcagcactagccaa

SEQ ID NO: 306420 - DNA, 25 bp, Probe Sequence
tatcagagagtaccacccaacactt

SEQ ID NO: 306421 - DNA, 25 bp, Probe Sequence
tatcatgatagtcacaaacgccgca

SEQ ID NO: 306422 - DNA, 25 bp, Probe Sequence
tatcaatattgccaagtacgccccc

SEQ ID NO: 306423 - DNA, 25 bp, Probe Sequence
tatgcttgttacagtgatccccaca

SEQ ID NO: 306424 - DNA, 25 bp, Probe Sequence
tatgttgaaatgagtgagcccggaa

SEQ ID NO: 306425 - DNA, 25 bp, Probe Sequence
tattgacaaaatggtttccggaaat

SEQ ID NO: 306426 - DNA, 25 bp, Probe Sequence
tatctggaagttcttggggaataat

SEQ ID NO: 306427 - DNA, 25 bp, Probe Sequence
tatctggggcgagtgttgggggtaa

SEQ ID NO: 306428 - DNA, 25 bp, Probe Sequence
tatgtggtgaccgtgttgacctggc

SEQ ID NO: 306429 - DNA, 25 bp, Probe Sequence
tttgagaaccggacagactgctggg

SEQ ID NO: 306430 - DNA, 25 bp, Probe Sequence
tttgcagtacatcaatgggcgtgga

SEQ ID NO: 306431 - DNA, 25 bp, Probe Sequence
tttgcagtacatcaatgggcgtgga

SEQ ID NO: 306432 - DNA, 25 bp, Probe Sequence
tttgcagtacatcaatgggcgtgga

SEQ ID NO: 306433 - DNA, 25 bp, Probe Sequence
tttgcagtacatcaatgggcgtgga

SEQ ID NO: 306434 - DNA, 25 bp, Probe Sequence
tttgcagtacatcaatgggcgtgga

SEQ ID NO: 306435 - DNA, 25 bp, Probe Sequence
tttgcagtacatcaatgggcgtgga

SEQ ID NO: 306436 - DNA, 25 bp, Probe Sequence
ttaagtacagtggatgtgggggaaa

SEQ ID NO: 306437 - DNA, 25 bp, Probe Sequence
ttcacaggaagggttggtgtaaata

SEQ ID NO: 306438 - DNA, 25 bp, Probe Sequence
ttgcaagtctatgtttgggttcatt

SEQ ID NO: 306439 - DNA, 25 bp, Probe Sequence
tatcaaattcttatgggtttgcata

SEQ ID NO: 306440 - DNA, 25 bp, Probe Sequence
tataataggctttagagcctttcac

SEQ ID NO: 306441 - DNA, 25 bp, Probe Sequence
tataatagagtatacccgttactta

SEQ ID NO: 306442 - DNA, 25 bp, Probe Sequence
tataatagagtatacccgttactta

SEQ ID NO: 306443 - DNA, 25 bp, Probe Sequence
tatgaacaggtatcctattgtctaa

SEQ ID NO: 306444 - DNA, 25 bp, Probe Sequence
tatgctaacggatcctacgttcctc

SEQ ID NO: 306445 - DNA, 25 bp, Probe Sequence
tatgtaacggcacccttttttgctg

SEQ ID NO: 306446 - DNA, 25 bp, Probe Sequence
tatgaagaccaacggttattttatc

SEQ ID NO: 306447 - DNA, 25 bp, Probe Sequence
tatgcataaccttagtattttccca

SEQ ID NO: 306448 - DNA, 25 bp, Probe Sequence
tatgctaagtcagcagttatgctat

SEQ ID NO: 306449 - DNA, 25 bp, Probe Sequence
tatgtgccagtccactttgatgctt

SEQ ID NO: 306450 - DNA, 25 bp, Probe Sequence
tatgctctcatgactatgcagtttc

SEQ ID NO: 306451 - DNA, 25 bp, Probe Sequence
tatgcttttgttggcattatgcagt

SEQ ID NO: 306452 - DNA, 25 bp, Probe Sequence
tatgctgtgggtaccaggaagtcct

SEQ ID NO: 306453 - DNA, 25 bp, Probe Sequence
tatctggggtccaagggattggttc

SEQ ID NO: 306454 - DNA, 25 bp, Probe Sequence
tatttggagtccaaggaggatgtgg

SEQ ID NO: 306455 - DNA, 25 bp, Probe Sequence
tatgtgtggcagaccgggaaaatgg

SEQ ID NO: 306456 - DNA, 25 bp, Probe Sequence
tatgggagcataactgggggcctgt

SEQ ID NO: 306457 - DNA, 25 bp, Probe Sequence
tatggacacataactcctgggccag

SEQ ID NO: 306458 - DNA, 25 bp, Probe Sequence
tatggtatcataagtcctccgtcag

SEQ ID NO: 306459 - DNA, 25 bp, Probe Sequence
tatgtgtaattattccaccgtggga

SEQ ID NO: 306460 - DNA, 25 bp, Probe Sequence
tatgggctgataaacccggggtgac

SEQ ID NO: 306461 - DNA, 25 bp, Probe Sequence
ttgctggttgaaatcccgaggtgtc

SEQ ID NO: 306462 - DNA, 25 bp, Probe Sequence
tatgttctggcatttacctgacctg

SEQ ID NO: 306463 - DNA, 25 bp, Probe Sequence
tattgcctgatggagaccacgacct

SEQ ID NO: 306464 - DNA, 25 bp, Probe Sequence
tatcgcaatgatgtaccactgccca

SEQ ID NO: 306465 - DNA, 25 bp, Probe Sequence
tatgcagatattttaccgccttacc

SEQ ID NO: 306466 - DNA, 25 bp, Probe Sequence
tatctatattagttcacgtcttccc

SEQ ID NO: 306467 - DNA, 25 bp, Probe Sequence
tatcttcatgtatccctgttactga

SEQ ID NO: 306468 - DNA, 25 bp, Probe Sequence
tatgttggtctacacttttgccaaa

SEQ ID NO: 306469 - DNA, 25 bp, Probe Sequence
tatgtctgggttgacctaggccaat

SEQ ID NO: 306470 - DNA, 25 bp, Probe Sequence
tattcgggtgtgagtcttttcagca

SEQ ID NO: 306471 - DNA, 25 bp, Probe Sequence
tattccttaatggggttttgcacag

SEQ ID NO: 306472 - DNA, 25 bp, Probe Sequence
tttcctttggactgttcaagcaaaa

SEQ ID NO: 306473 - DNA, 25 bp, Probe Sequence
tttccccttcctgtctaggaaaatg

SEQ ID NO: 306474 - DNA, 25 bp, Probe Sequence
tttttcctccctctatacgaaggat

SEQ ID NO: 306475 - DNA, 25 bp, Probe Sequence
tttgtttttcccagaaaatcagtat

SEQ ID NO: 306476 - DNA, 25 bp, Probe Sequence
tatttctttcccaggaaattagctt

SEQ ID NO: 306477 - DNA, 25 bp, Probe Sequence
ttacttcttccctggcacaggtgac

SEQ ID NO: 306478 - DNA, 25 bp, Probe Sequence
ttacttcttccctggcacaggtgac

SEQ ID NO: 306479 - DNA, 25 bp, Probe Sequence
tatactgtttctgcaatggcgaggt

SEQ ID NO: 306480 - DNA, 25 bp, Probe Sequence
tatcagtacgtcggcaatggaagaa

SEQ ID NO: 306481 - DNA, 25 bp, Probe Sequence
tatcagtacgtcggcaatggaagaa

SEQ ID NO: 306482 - DNA, 25 bp, Probe Sequence
tatagtgatgcgttggaaggttaat

SEQ ID NO: 306483 - DNA, 25 bp, Probe Sequence
tatgtgcgtgtgtttatactataaa

SEQ ID NO: 306484 - DNA, 25 bp, Probe Sequence
tatgctgactgtattaccaaagaca

SEQ ID NO: 306485 - DNA, 25 bp, Probe Sequence
tatgggcttctgcgcaccaaagaaa

SEQ ID NO: 306486 - DNA, 25 bp, Probe Sequence
tatggttctctccgcaagtataaaa

SEQ ID NO: 306487 - DNA, 25 bp, Probe Sequence
tatgtatcttcaactggtgtccaaa

SEQ ID NO: 306488 - DNA, 25 bp, Probe Sequence
tatgtcatactaacttgtgaaaaaa

SEQ ID NO: 306489 - DNA, 25 bp, Probe Sequence
tatgttacttaccttgttattaaat

SEQ ID NO: 306490 - DNA, 25 bp, Probe Sequence
tatgtatactatctttttatctgaa

SEQ ID NO: 306491 - DNA, 25 bp, Probe Sequence
tatggtagtcagttttgtatttaga

SEQ ID NO: 306492 - DNA, 25 bp, Probe Sequence
tatgatttccagtgtttactgtagt

SEQ ID NO: 306493 - DNA, 25 bp, Probe Sequence
tatgtttactattgctcttacttga

SEQ ID NO: 306494 - DNA, 25 bp, Probe Sequence
tatgttgacacttatccttcatgta

SEQ ID NO: 306495 - DNA, 25 bp, Probe Sequence
tatcttcagactgctacattcactg

SEQ ID NO: 306496 - DNA, 25 bp, Probe Sequence
tatgatcacgccgctatattccagc

SEQ ID NO: 306497 - DNA, 25 bp, Probe Sequence
tattcacagctgggcacaacttcag

SEQ ID NO: 306498 - DNA, 25 bp, Probe Sequence
tatggacctgatttcagccttcaga

SEQ ID NO: 306499 - DNA, 25 bp, Probe Sequence
tatctgaactggatcgcctccaaga

SEQ ID NO: 306500 - DNA, 25 bp, Probe Sequence
tatacttctgagctgctaccacatg

SEQ ID NO: 306501 - DNA, 25 bp, Probe Sequence
tatacttcatttctagcccagttgg

SEQ ID NO: 306502 - DNA, 25 bp, Probe Sequence
tattttcttattgaggccctgtacc

SEQ ID NO: 306503 - DNA, 25 bp, Probe Sequence
tatggttgctgttcataaccccttc

SEQ ID NO: 306504 - DNA, 25 bp, Probe Sequence
tattgaattgtatttactccctaaa

SEQ ID NO: 306505 - DNA, 25 bp, Probe Sequence
tatgctggactgttttgacctggtt

SEQ ID NO: 306506 - DNA, 25 bp, Probe Sequence
tatgcgtgagtttcattgccggggt

SEQ ID NO: 306507 - DNA, 25 bp, Probe Sequence
tatgcgggtttgactcacggggatt

SEQ ID NO: 306508 - DNA, 25 bp, Probe Sequence
tatgctgtggtttcctactagaggt

SEQ ID NO: 306509 - DNA, 25 bp, Probe Sequence
tatgcagtacattatccaaaagaga

SEQ ID NO: 306510 - DNA, 25 bp, Probe Sequence
tatcactacatcccctgactaaggg

SEQ ID NO: 306511 - DNA, 25 bp, Probe Sequence
tatgacaacagcctcaagatcatca

SEQ ID NO: 306512 - DNA, 25 bp, Probe Sequence
tatgacgcagctgtgatatgcacca

SEQ ID NO: 306513 - DNA, 25 bp, Probe Sequence
tatgacagcgtcaagactgcccttg

SEQ ID NO: 306514 - DNA, 25 bp, Probe Sequence
tatgacagggaacttgccctgcatc

SEQ ID NO: 306515 - DNA, 25 bp, Probe Sequence
tatgaagggtggtgcccatcttcca

SEQ ID NO: 306516 - DNA, 25 bp, Probe Sequence
tataggtgagggtctccacatttac

SEQ ID NO: 306517 - DNA, 25 bp, Probe Sequence
tatacggaagcgtctcctcattgat

SEQ ID NO: 306518 - DNA, 25 bp, Probe Sequence
tatagctcgaagaacattccatgtt

SEQ ID NO: 306519 - DNA, 25 bp, Probe Sequence
tatggatcaaaccacaatgcacatc

SEQ ID NO: 306520 - DNA, 25 bp, Probe Sequence
tatggaatcagaaccagatgacaca

SEQ ID NO: 306521 - DNA, 25 bp, Probe Sequence
tatgcaaaccaatacatcacatcag

SEQ ID NO: 306522 - DNA, 25 bp, Probe Sequence
tatgcacgacagtactacatgcaat

SEQ ID NO: 306523 - DNA, 25 bp, Probe Sequence
tataggaattacaaacacagttgaa

SEQ ID NO: 306524 - DNA, 25 bp, Probe Sequence
tatgaggcattgatctacacacact

SEQ ID NO: 306525 - DNA, 25 bp, Probe Sequence
tatgggagaattgcacacagatgtg

SEQ ID NO: 306526 - DNA, 25 bp, Probe Sequence
tatgtggacattgccatcccatgca

SEQ ID NO: 306527 - DNA, 25 bp, Probe Sequence
tatgtggacattgccatcccatgca

SEQ ID NO: 306528 - DNA, 25 bp, Probe Sequence
tatgtggacattgccatcccatgca

SEQ ID NO: 306529 - DNA, 25 bp, Probe Sequence
tatggtgccactgggcacccaggca

SEQ ID NO: 306530 - DNA, 25 bp, Probe Sequence
tatggtgccactgggcacccaggca

SEQ ID NO: 306531 - DNA, 25 bp, Probe Sequence
tatgtgtacacgagcccaacgatgc

SEQ ID NO: 306532 - DNA, 25 bp, Probe Sequence
tatgctataaaaaggccgggtgcgg

SEQ ID NO: 306533 - DNA, 25 bp, Probe Sequence
tatcaccaacctaggctgggcgtgg

SEQ ID NO: 306534 - DNA, 25 bp, Probe Sequence
tatcctgctcagaggagggggctgg

SEQ ID NO: 306535 - DNA, 25 bp, Probe Sequence
tatactgccaattggctgggagaag

SEQ ID NO: 306536 - DNA, 25 bp, Probe Sequence
tataatgcagtttccatctggagca

SEQ ID NO: 306537 - DNA, 25 bp, Probe Sequence
tatgatcatcgtacttcttgggcag

SEQ ID NO: 306538 - DNA, 25 bp, Probe Sequence
tatctctagtcagttcagtaggagc

SEQ ID NO: 306539 - DNA, 25 bp, Probe Sequence
tatgttcaacaattcttagagatgc

SEQ ID NO: 306540 - DNA, 25 bp, Probe Sequence
tatgataaactctagctctaaatgc

SEQ ID NO: 306541 - DNA, 25 bp, Probe Sequence
tatgtaacatgcaataccagacatt

SEQ ID NO: 306542 - DNA, 25 bp, Probe Sequence
tatgtaactgctagccctatttctt

SEQ ID NO: 306543 - DNA, 25 bp, Probe Sequence
tatggcaacgttcatgttcatctca

SEQ ID NO: 306544 - DNA, 25 bp, Probe Sequence
tatgatccaagtttttacatcacat

SEQ ID NO: 306545 - DNA, 25 bp, Probe Sequence
tatgtgcgcaagtttgtattgatgc

SEQ ID NO: 306546 - DNA, 25 bp, Probe Sequence
tatggcccagaactgcatttgatta

SEQ ID NO: 306547 - DNA, 25 bp, Probe Sequence
tatgcacccatttttttgagtgcat

SEQ ID NO: 306548 - DNA, 25 bp, Probe Sequence
tatgtgctaatgatattttgagtta

SEQ ID NO: 306549 - DNA, 25 bp, Probe Sequence
tatgtctgacatatgatctagtaat

SEQ ID NO: 306550 - DNA, 25 bp, Probe Sequence
tatgtctccatctattgatgagggt

SEQ ID NO: 306551 - DNA, 25 bp, Probe Sequence
tatgccttccattgtgatgacgtca

SEQ ID NO: 306552 - DNA, 25 bp, Probe Sequence
tatccctgcacatgtagaggcataa

SEQ ID NO: 306553 - DNA, 25 bp, Probe Sequence
tatgccactaccttgactggatcca

SEQ ID NO: 306554 - DNA, 25 bp, Probe Sequence
tatccctgatcctaactgaagagac

SEQ ID NO: 306555 - DNA, 25 bp, Probe Sequence
tatccttgagcctgggcaagtgcac

SEQ ID NO: 306556 - DNA, 25 bp, Probe Sequence
tatcctctggtatcccagagtcgct

SEQ ID NO: 306557 - DNA, 25 bp, Probe Sequence
tatccttgagatttcactaccttta

SEQ ID NO: 306558 - DNA, 25 bp, Probe Sequence
tatccattcctctcctgagatttta

SEQ ID NO: 306559 - DNA, 25 bp, Probe Sequence
tatccattcctctcctgagatttta

SEQ ID NO: 306560 - DNA, 25 bp, Probe Sequence
tatgcccttctaattctgatgtttg

SEQ ID NO: 306561 - DNA, 25 bp, Probe Sequence
tatgcccctatttggcgaacttgcc

SEQ ID NO: 306562 - DNA, 25 bp, Probe Sequence
tatccaacttcaagggaatctccgc

SEQ ID NO: 306563 - DNA, 25 bp, Probe Sequence
tatgccaaattcagtgctactcctc

SEQ ID NO: 306564 - DNA, 25 bp, Probe Sequence
tatccataattgagtttcctaagca

SEQ ID NO: 306565 - DNA, 25 bp, Probe Sequence
tatccagaactgaagttgccctact

SEQ ID NO: 306566 - DNA, 25 bp, Probe Sequence
tatctaatgcctaaatatgggtatt

SEQ ID NO: 306567 - DNA, 25 bp, Probe Sequence
tatcagacatgaccataaatagcgt

SEQ ID NO: 306568 - DNA, 25 bp, Probe Sequence
tatccacatcagtatcatcaaaggt

SEQ ID NO: 306569 - DNA, 25 bp, Probe Sequence
tatgtcacatagcatcctgaatgga

SEQ ID NO: 306570 - DNA, 25 bp, Probe Sequence
tatgtgcctcacacctgaattgaaa

SEQ ID NO: 306571 - DNA, 25 bp, Probe Sequence
tatctcttcagtctctataccaata

SEQ ID NO: 306572 - DNA, 25 bp, Probe Sequence
tatctattgagaaatctagcgccta

SEQ ID NO: 306573 - DNA, 25 bp, Probe Sequence
tatgtatgctgatgaataactgagt

SEQ ID NO: 306574 - DNA, 25 bp, Probe Sequence
tatggcatcatataatttgctagtc

SEQ ID NO: 306575 - DNA, 25 bp, Probe Sequence
tatgctacaataatatctgttactc

SEQ ID NO: 306576 - DNA, 25 bp, Probe Sequence
tatacacagagcttctcctaactcc

SEQ ID NO: 306577 - DNA, 25 bp, Probe Sequence
tataaaagattcgcctgattcccca

SEQ ID NO: 306578 - DNA, 25 bp, Probe Sequence
tatagcctaattcacgctcattcca

SEQ ID NO: 306579 - DNA, 25 bp, Probe Sequence
tatgatgcactgattccatcccagg

SEQ ID NO: 306580 - DNA, 25 bp, Probe Sequence
tatgatgcgtttttggcctcagagt

SEQ ID NO: 306581 - DNA, 25 bp, Probe Sequence
tttggttctttgccctaatgtttca

SEQ ID NO: 306582 - DNA, 25 bp, Probe Sequence
ttgggttacctgccttgaaggaccg

SEQ ID NO: 306583 - DNA, 25 bp, Probe Sequence
ttaggcttccctctagaaaggccca

SEQ ID NO: 306584 - DNA, 25 bp, Probe Sequence
tttgtgttccttctaaaaagctaat

SEQ ID NO: 306585 - DNA, 25 bp, Probe Sequence
ttttgttcttggataaaaagtcata

SEQ ID NO: 306586 - DNA, 25 bp, Probe Sequence
ttcagtttttccataaaggagccaa

SEQ ID NO: 306587 - DNA, 25 bp, Probe Sequence
tttcgttccccagtgaagggagccg

SEQ ID NO: 306588 - DNA, 25 bp, Probe Sequence
tttttggcgccctgaagggagttgt

SEQ ID NO: 306589 - DNA, 25 bp, Probe Sequence
ttttgtaaatcctgcaggggaggtt

SEQ ID NO: 306590 - DNA, 25 bp, Probe Sequence
tttagggaatccaggggccagggct

SEQ ID NO: 306591 - DNA, 25 bp, Probe Sequence
tatgccgggaatggtggtgcgtgcc

SEQ ID NO: 306592 - DNA, 25 bp, Probe Sequence
tatgctcggaaacgcttggtgatac

SEQ ID NO: 306593 - DNA, 25 bp, Probe Sequence
ttcactggaagatcattgtaattca

SEQ ID NO: 306594 - DNA, 25 bp, Probe Sequence
tatcctaatcgcccatattaatata

SEQ ID NO: 306595 - DNA, 25 bp, Probe Sequence
tatccttgtggagtaatagaatcaa

SEQ ID NO: 306596 - DNA, 25 bp, Probe Sequence
tatccttgtgggtcagatttcagag

SEQ ID NO: 306597 - DNA, 25 bp, Probe Sequence
tatgtgtactggatacactgtcagg

SEQ ID NO: 306598 - DNA, 25 bp, Probe Sequence
tatgggaattattacctctcagggc

SEQ ID NO: 306599 - DNA, 25 bp, Probe Sequence
tatggacaatatttcactttgtggg

SEQ ID NO: 306600 - DNA, 25 bp, Probe Sequence
tatggagccagtttcctatctttct

SEQ ID NO: 306601 - DNA, 25 bp, Probe Sequence
tatacagaatgttttttcttacttt

SEQ ID NO: 306602 - DNA, 25 bp, Probe Sequence
tatatcaccttgggtaaattactta

SEQ ID NO: 306603 - DNA, 25 bp, Probe Sequence
tattccagttacctagatattccct

SEQ ID NO: 306604 - DNA, 25 bp, Probe Sequence
tatctggatttacctaagtttactt

SEQ ID NO: 306605 - DNA, 25 bp, Probe Sequence
tatgtgttttagacttagacttttt

SEQ ID NO: 306606 - DNA, 25 bp, Probe Sequence
tatgtctgttcttacgtattttttt

SEQ ID NO: 306607 - DNA, 25 bp, Probe Sequence
tattcgttcgtacatgtttgacatt

SEQ ID NO: 306608 - DNA, 25 bp, Probe Sequence
tattcagctacgacagttttggact

SEQ ID NO: 306609 - DNA, 25 bp, Probe Sequence
tattaatcacgcgatgttgactgca

SEQ ID NO: 306610 - DNA, 25 bp, Probe Sequence
tatgtgatatattctgatgtatggg

SEQ ID NO: 306611 - DNA, 25 bp, Probe Sequence
tatgttataccttgtatgatagtta

SEQ ID NO: 306612 - DNA, 25 bp, Probe Sequence
tatgattattccttgtctgtacttt

SEQ ID NO: 306613 - DNA, 25 bp, Probe Sequence
tatgttattcctctgtgttcacttc

SEQ ID NO: 306614 - DNA, 25 bp, Probe Sequence
tatgttttcttgtttttctcttgtt

SEQ ID NO: 306615 - DNA, 25 bp, Probe Sequence
tatgtttggcttcttgaggtctctg

SEQ ID NO: 306616 - DNA, 25 bp, Probe Sequence
tatgtattgtttatctgggttaggg

SEQ ID NO: 306617 - DNA, 25 bp, Probe Sequence
tatgtttgttttccttatggttggg

SEQ ID NO: 306618 - DNA, 25 bp, Probe Sequence
tatggtcttcttcccaagagagttt

SEQ ID NO: 306619 - DNA, 25 bp, Probe Sequence
tttgtgtaatctccaaaagtgtttt

SEQ ID NO: 306620 - DNA, 25 bp, Probe Sequence
tttgtattttcgtagtagatttaat

SEQ ID NO: 306621 - DNA, 25 bp, Probe Sequence
tatccatttttcccagtatttttat

SEQ ID NO: 306622 - DNA, 25 bp, Probe Sequence
tatcaatttttcccagtatttttat

SEQ ID NO: 306623 - DNA, 25 bp, Probe Sequence
tatacgtttttgacatttattaaat

SEQ ID NO: 306624 - DNA, 25 bp, Probe Sequence
tatacagcctagttaatgtttaaaa

SEQ ID NO: 306625 - DNA, 25 bp, Probe Sequence
tatcgatgccttttagtttttccaa

SEQ ID NO: 306626 - DNA, 25 bp, Probe Sequence
tatccatccctaaagttctcttcta

SEQ ID NO: 306627 - DNA, 25 bp, Probe Sequence
tatctctaattaatatggtccttta

SEQ ID NO: 306628 - DNA, 25 bp, Probe Sequence
tatactagtcacataattatctttg

SEQ ID NO: 306629 - DNA, 25 bp, Probe Sequence
tatcctttacttgaaagcttttgaa

SEQ ID NO: 306630 - DNA, 25 bp, Probe Sequence
tatccttcaggcataaatatttttg

SEQ ID NO: 306631 - DNA, 25 bp, Probe Sequence
tatgtcctcaggttaatttttgtct

SEQ ID NO: 306632 - DNA, 25 bp, Probe Sequence
tattccataggacagttgtttgagt

SEQ ID NO: 306633 - DNA, 25 bp, Probe Sequence
tatctaatagtgtacagttggggag

SEQ ID NO: 306634 - DNA, 25 bp, Probe Sequence
tatgtgactagggtggttggcggtg

SEQ ID NO: 306635 - DNA, 25 bp, Probe Sequence
tatgtacatagtattgtttgctttt

SEQ ID NO: 306636 - DNA, 25 bp, Probe Sequence
tatgtacagaaatttttagtgtttt

SEQ ID NO: 306637 - DNA, 25 bp, Probe Sequence
tatgctaaggaatctctgaaggaag

SEQ ID NO: 306638 - DNA, 25 bp, Probe Sequence
tatgctaagtgaaagtgagaagtga

SEQ ID NO: 306639 - DNA, 25 bp, Probe Sequence
ttcaacgtagtactagaagttttag

SEQ ID NO: 306640 - DNA, 25 bp, Probe Sequence
tttgaatgcggtgtagaaatgttta

SEQ ID NO: 306641 - DNA, 25 bp, Probe Sequence
tatctactcgttgttgaaattttta

SEQ ID NO: 306642 - DNA, 25 bp, Probe Sequence
tatctaattgttctaacactatttg

SEQ ID NO: 306643 - DNA, 25 bp, Probe Sequence
tatgtacatttcccaacaatctttt

SEQ ID NO: 306644 - DNA, 25 bp, Probe Sequence
tatgtacatctatccttcaatctga

SEQ ID NO: 306645 - DNA, 25 bp, Probe Sequence
tatgtacacatttctgcttctgcac

SEQ ID NO: 306646 - DNA, 25 bp, Probe Sequence
tatgtcaaatgatctgtgctgtaga

SEQ ID NO: 306647 - DNA, 25 bp, Probe Sequence
tatgctgaaatattctgtgtgtgag

SEQ ID NO: 306648 - DNA, 25 bp, Probe Sequence
tatccatgccatatcatgtgtgtac

SEQ ID NO: 306649 - DNA, 25 bp, Probe Sequence
tatccagcctatcgttgatggatat

SEQ ID NO: 306650 - DNA, 25 bp, Probe Sequence
tatgtcactcaaagctatatggcta

SEQ ID NO: 306651 - DNA, 25 bp, Probe Sequence
tatgacactacatgtgatctgcctg

SEQ ID NO: 306652 - DNA, 25 bp, Probe Sequence
tatgcatccaaaggctaccgtgctt

SEQ ID NO: 306653 - DNA, 25 bp, Probe Sequence
tatcaccagcattcctcaaggtctt

SEQ ID NO: 306654 - DNA, 25 bp, Probe Sequence
tatcaccagcattcctcaaggtctt

SEQ ID NO: 306655 - DNA, 25 bp, Probe Sequence
tatgcacgctgaatcctgctatggt

SEQ ID NO: 306656 - DNA, 25 bp, Probe Sequence
tatgcaaggactgtgcttgctggtc

SEQ ID NO: 306657 - DNA, 25 bp, Probe Sequence
tatgaaggcaggggctcagtggccg

SEQ ID NO: 306658 - DNA, 25 bp, Probe Sequence
tatgaaggcaggggctcagtggccg

SEQ ID NO: 306659 - DNA, 25 bp, Probe Sequence
tatgggagcaaccaccatggaccag

SEQ ID NO: 306660 - DNA, 25 bp, Probe Sequence
tatgagggagaccccgacagaggac

SEQ ID NO: 306661 - DNA, 25 bp, Probe Sequence
tatgagattaacttcctacaggggc

SEQ ID NO: 306662 - DNA, 25 bp, Probe Sequence
tatatgagtaggtctcccaaggaga

SEQ ID NO: 306663 - DNA, 25 bp, Probe Sequence
ttgatttacggcgctaaggatgact

SEQ ID NO: 306664 - DNA, 25 bp, Probe Sequence
tattttatggggactaagggattag

SEQ ID NO: 306665 - DNA, 25 bp, Probe Sequence
tattttaggagaggccaaattgttt

SEQ ID NO: 306666 - DNA, 25 bp, Probe Sequence
tatccccaggaatcaataatttttt

SEQ ID NO: 306667 - DNA, 25 bp, Probe Sequence
ttccaccagcaacagaaaacttcct

SEQ ID NO: 306668 - DNA, 25 bp, Probe Sequence
ttccccacaggttgtcattacttaa

SEQ ID NO: 306669 - DNA, 25 bp, Probe Sequence
tatccccatggaacgtttcacttta

SEQ ID NO: 306670 - DNA, 25 bp, Probe Sequence
tatcccgtcaaaggattccgtttct

SEQ ID NO: 306671 - DNA, 25 bp, Probe Sequence
ttcacgttgcagttggatatccagt

SEQ ID NO: 306672 - DNA, 25 bp, Probe Sequence
tatctgtatcggtcagggtccagtc

SEQ ID NO: 306673 - DNA, 25 bp, Probe Sequence
tatcgtactctttggagatgcccat

SEQ ID NO: 306674 - DNA, 25 bp, Probe Sequence
tatcgctggcctaagcgtcaggctt

SEQ ID NO: 306675 - DNA, 25 bp, Probe Sequence
tatctatacctagcaccagtgcttg

SEQ ID NO: 306676 - DNA, 25 bp, Probe Sequence
tatgctttcctgccaacatggtttg

SEQ ID NO: 306677 - DNA, 25 bp, Probe Sequence
tatgtgttgcctcacactgtgtgtg

SEQ ID NO: 306678 - DNA, 25 bp, Probe Sequence
tatgtcattccccatatgtgttgga

SEQ ID NO: 306679 - DNA, 25 bp, Probe Sequence
tatgtcatctcccaagaggcttcac

SEQ ID NO: 306680 - DNA, 25 bp, Probe Sequence
tatgtcctgcggtgagtgagcccgc

SEQ ID NO: 306681 - DNA, 25 bp, Probe Sequence
tatacgctgcggtggatataccctg

SEQ ID NO: 306682 - DNA, 25 bp, Probe Sequence
tatttcatggagtcgtatcaacgct

SEQ ID NO: 306683 - DNA, 25 bp, Probe Sequence
tatcatctcatgaaagcattaaaac

SEQ ID NO: 306684 - DNA, 25 bp, Probe Sequence
tatctatcacagaccagtagcaaac

SEQ ID NO: 306685 - DNA, 25 bp, Probe Sequence
tatccacaagccgaatagaaacttt

SEQ ID NO: 306686 - DNA, 25 bp, Probe Sequence
tattgcaaacctatacacaaccaag

SEQ ID NO: 306687 - DNA, 25 bp, Probe Sequence
tatgaaaaactggccgaccccaaca

SEQ ID NO: 306688 - DNA, 25 bp, Probe Sequence
tatgtaataaaggacgccctccctc

SEQ ID NO: 306689 - DNA, 25 bp, Probe Sequence
tatgcaaatcttagggcgctcgctc

SEQ ID NO: 306690 - DNA, 25 bp, Probe Sequence
tataatgactgaaatgacccctcca

SEQ ID NO: 306691 - DNA, 25 bp, Probe Sequence
tataatacttatactaccaccctat

SEQ ID NO: 306692 - DNA, 25 bp, Probe Sequence
tatcaggagttcactgaccacctcg

SEQ ID NO: 306693 - DNA, 25 bp, Probe Sequence
tatgtatgtgttatctggccatccc

SEQ ID NO: 306694 - DNA, 25 bp, Probe Sequence
tatgatatgtctccatacccattac

SEQ ID NO: 306695 - DNA, 25 bp, Probe Sequence
tatgaatttcgtacttattacctta

SEQ ID NO: 306696 - DNA, 25 bp, Probe Sequence
tatgaatttctgtcctttgtacgac

SEQ ID NO: 306697 - DNA, 25 bp, Probe Sequence
tattaagtcatgtcctggtaccgtc

SEQ ID NO: 306698 - DNA, 25 bp, Probe Sequence
tataaagatctggcctgttcctgcg

SEQ ID NO: 306699 - DNA, 25 bp, Probe Sequence
tatgatgatgttcccgatttctctg

SEQ ID NO: 306700 - DNA, 25 bp, Probe Sequence
tatgcatgtgccacatttcgctttc

SEQ ID NO: 306701 - DNA, 25 bp, Probe Sequence
tatgatgtgcctacatgcatatttt

SEQ ID NO: 306702 - DNA, 25 bp, Probe Sequence
tatgagtgccatgcatccaattccc

SEQ ID NO: 306703 - DNA, 25 bp, Probe Sequence
tatgagtgccatgcatccaattccc

SEQ ID NO: 306704 - DNA, 25 bp, Probe Sequence
tatgaggtcactaccagcactttcc

SEQ ID NO: 306705 - DNA, 25 bp, Probe Sequence
tatgagagggatgcagtgcctttcc

SEQ ID NO: 306706 - DNA, 25 bp, Probe Sequence
tatgcagggagtacagttcttttca

SEQ ID NO: 306707 - DNA, 25 bp, Probe Sequence
tatgcgtaatgctcagctttttgta

SEQ ID NO: 306708 - DNA, 25 bp, Probe Sequence
tatgctgtacatttcagttcagtgt

SEQ ID NO: 306709 - DNA, 25 bp, Probe Sequence
tatcctcaagagtcagctggcaggt

SEQ ID NO: 306710 - DNA, 25 bp, Probe Sequence
tatcaccggagactgcatcagcagc

SEQ ID NO: 306711 - DNA, 25 bp, Probe Sequence
tatgaggcagtgcagctgcagctgc

SEQ ID NO: 306712 - DNA, 25 bp, Probe Sequence
tatcaggcatctgtgctgaatgtct

SEQ ID NO: 306713 - DNA, 25 bp, Probe Sequence
tatcagattctattgtgacttcata

SEQ ID NO: 306714 - DNA, 25 bp, Probe Sequence
tatcgaatctaaaagtgactactgt

SEQ ID NO: 306715 - DNA, 25 bp, Probe Sequence
tataaactggaacagactatcttta

SEQ ID NO: 306716 - DNA, 25 bp, Probe Sequence
tatagacctgtgaaaagacgtcaat

SEQ ID NO: 306717 - DNA, 25 bp, Probe Sequence
tatagaccttgatattttgtccaat

SEQ ID NO: 306718 - DNA, 25 bp, Probe Sequence
tatctatccttatatttttctccct

SEQ ID NO: 306719 - DNA, 25 bp, Probe Sequence
tatcttcaggtcagttttgtcccca

SEQ ID NO: 306720 - DNA, 25 bp, Probe Sequence
tatctatagaccaggtctgtgccac

SEQ ID NO: 306721 - DNA, 25 bp, Probe Sequence
tatccaatgccaacaggatattccc

SEQ ID NO: 306722 - DNA, 25 bp, Probe Sequence
tatcacttgcctacagctttgtcac

SEQ ID NO: 306723 - DNA, 25 bp, Probe Sequence
tatactgtccgaaatgttgcccgct

SEQ ID NO: 306724 - DNA, 25 bp, Probe Sequence
tatactgtccgaaatgttgcccgct

SEQ ID NO: 306725 - DNA, 25 bp, Probe Sequence
tatacttcccaaattatgccaccta

SEQ ID NO: 306726 - DNA, 25 bp, Probe Sequence
ttcactaaccagatccaggcagcct

SEQ ID NO: 306727 - DNA, 25 bp, Probe Sequence
ttcaccaaggatgtcaaggccgctg

SEQ ID NO: 306728 - DNA, 25 bp, Probe Sequence
tatacccagttggtcaagtggtgaa

SEQ ID NO: 306729 - DNA, 25 bp, Probe Sequence
tatgagcccgtgttggccattggta

SEQ ID NO: 306730 - DNA, 25 bp, Probe Sequence
tatacccggttcagcctggctcggc

SEQ ID NO: 306731 - DNA, 25 bp, Probe Sequence
tatgtactcggaactgggcttgtct

SEQ ID NO: 306732 - DNA, 25 bp, Probe Sequence
tatgattccgtaactgaccttgtag

SEQ ID NO: 306733 - DNA, 25 bp, Probe Sequence
tatgtgtcctcttttgaccttggaa

SEQ ID NO: 306734 - DNA, 25 bp, Probe Sequence
tatgagtcttctgtaattcattgag

SEQ ID NO: 306735 - DNA, 25 bp, Probe Sequence
tatgctgcctctgtaaattcatgta

SEQ ID NO: 306736 - DNA, 25 bp, Probe Sequence
tatctggcatcttgttggaatagta

SEQ ID NO: 306737 - DNA, 25 bp, Probe Sequence
ttgctggatctggtttggtaatatt

SEQ ID NO: 306738 - DNA, 25 bp, Probe Sequence
ttaggagcaggaatggcagtaataa

SEQ ID NO: 306739 - DNA, 25 bp, Probe Sequence
tatcggagacgagtcatgagaccta

SEQ ID NO: 306740 - DNA, 25 bp, Probe Sequence
tatccgcaacgtggagagactgaag

SEQ ID NO: 306741 - DNA, 25 bp, Probe Sequence
tatcctgccaccaggagtccaagta

SEQ ID NO: 306742 - DNA, 25 bp, Probe Sequence
tatctctgtcctagttggttaaaca

SEQ ID NO: 306743 - DNA, 25 bp, Probe Sequence
tatgcactttgctgtttgattaaga

SEQ ID NO: 306744 - DNA, 25 bp, Probe Sequence
tatgcaaatttctctttcataagaa

SEQ ID NO: 306745 - DNA, 25 bp, Probe Sequence
tatgaaattagctctgttcccactt

SEQ ID NO: 306746 - DNA, 25 bp, Probe Sequence
tatacaataggctggtgacaccaga

SEQ ID NO: 306747 - DNA, 25 bp, Probe Sequence
tatactacttctaaggtagctgcag

SEQ ID NO: 306748 - DNA, 25 bp, Probe Sequence
tataatacaactcagtgctaccaag

SEQ ID NO: 306749 - DNA, 25 bp, Probe Sequence
tataatcccagctttgttcaaagga

SEQ ID NO: 306750 - DNA, 25 bp, Probe Sequence
tatcttcacggctttgcccgatgat

SEQ ID NO: 306751 - DNA, 25 bp, Probe Sequence
ttttgcaggagcgattgaggagaga

SEQ ID NO: 306752 - DNA, 25 bp, Probe Sequence
tatgtatgcaggggtctgctggagg

SEQ ID NO: 306753 - DNA, 25 bp, Probe Sequence
tatgaatcgtaggactgctgtgaag

SEQ ID NO: 306754 - DNA, 25 bp, Probe Sequence
tatgagatcaattccctggtgcggt

SEQ ID NO: 306755 - DNA, 25 bp, Probe Sequence
tatgactgccgagcactgaggggtc

SEQ ID NO: 306756 - DNA, 25 bp, Probe Sequence
tatcactatctctgagtgaggggat

SEQ ID NO: 306757 - DNA, 25 bp, Probe Sequence
tatcagctggctgggcagtggaatt

SEQ ID NO: 306758 - DNA, 25 bp, Probe Sequence
tatgatgatggcagcggaaatgact

SEQ ID NO: 306759 - DNA, 25 bp, Probe Sequence
tatgatgatggcagcggaaatgact

SEQ ID NO: 306760 - DNA, 25 bp, Probe Sequence
tatgatgcctgcaggggtgattctg

SEQ ID NO: 306761 - DNA, 25 bp, Probe Sequence
tatatcttcaggcgcgcggtctggc

SEQ ID NO: 306762 - DNA, 25 bp, Probe Sequence
tatgtctatagtcccagctagttgg

SEQ ID NO: 306763 - DNA, 25 bp, Probe Sequence
tatcattaatgatccagggtgtggg

SEQ ID NO: 306764 - DNA, 25 bp, Probe Sequence
ttgcccggtacctggtggaggaaat

SEQ ID NO: 306765 - DNA, 25 bp, Probe Sequence
tatgcccagcgtttgatgggtagca

SEQ ID NO: 306766 - DNA, 25 bp, Probe Sequence
tatgccctggctatgattcagtgca

SEQ ID NO: 306767 - DNA, 25 bp, Probe Sequence
tatgcggtgtgtagtattactcatt

SEQ ID NO: 306768 - DNA, 25 bp, Probe Sequence
tatgcactgtgccttatatataatt

SEQ ID NO: 306769 - DNA, 25 bp, Probe Sequence
tatgccacccttaaatgaatcattg

SEQ ID NO: 306770 - DNA, 25 bp, Probe Sequence
tatccccctgtagcagcattactga

SEQ ID NO: 306771 - DNA, 25 bp, Probe Sequence
tatccccactgataccatctgattc

SEQ ID NO: 306772 - DNA, 25 bp, Probe Sequence
tatccccagatatcacagtctcact

SEQ ID NO: 306773 - DNA, 25 bp, Probe Sequence
tatgccaaatcttacacgtctactc

SEQ ID NO: 306774 - DNA, 25 bp, Probe Sequence
tatgaagatatctgcccgtcaactc

SEQ ID NO: 306775 - DNA, 25 bp, Probe Sequence
tatcaagtatgctgtcttgtccccg

SEQ ID NO: 306776 - DNA, 25 bp, Probe Sequence
tatacaattgatctttgaacaacga

SEQ ID NO: 306777 - DNA, 25 bp, Probe Sequence
tataaattgcctttctgaatagaac

SEQ ID NO: 306778 - DNA, 25 bp, Probe Sequence
tatagaacaagtttgctacgaacaa

SEQ ID NO: 306779 - DNA, 25 bp, Probe Sequence
tatagaagaatatccttggaagtac

SEQ ID NO: 306780 - DNA, 25 bp, Probe Sequence
tatgctgaagaagaccggcgaaaga

SEQ ID NO: 306781 - DNA, 25 bp, Probe Sequence
tatgtccgacaagcctggcagaagg

SEQ ID NO: 306782 - DNA, 25 bp, Probe Sequence
tatgtccgacaagcctggcagaagg

SEQ ID NO: 306783 - DNA, 25 bp, Probe Sequence
tttgggaccctcctgggaaggcaag

SEQ ID NO: 306784 - DNA, 25 bp, Probe Sequence
tttgggaccctcctgggaaggcaag

SEQ ID NO: 306785 - DNA, 25 bp, Probe Sequence
tttaggaatctctttggaattggga

SEQ ID NO: 306786 - DNA, 25 bp, Probe Sequence
ttctagtagtccatgtattttccgt

SEQ ID NO: 306787 - DNA, 25 bp, Probe Sequence
tatctagtacccagtccatgttcaa

SEQ ID NO: 306788 - DNA, 25 bp, Probe Sequence
tatttctgagcccaaactctgtcca

SEQ ID NO: 306789 - DNA, 25 bp, Probe Sequence
tatacttgagacattgcacctaccc

SEQ ID NO: 306790 - DNA, 25 bp, Probe Sequence
tattcggtgcttttacctacctaca

SEQ ID NO: 306791 - DNA, 25 bp, Probe Sequence
tatgtagtccgttaacactacttaa

SEQ ID NO: 306792 - DNA, 25 bp, Probe Sequence
tattccctcttgaaacaacactaaa

SEQ ID NO: 306793 - DNA, 25 bp, Probe Sequence
tttggctactatggaccactccgaa

SEQ ID NO: 306794 - DNA, 25 bp, Probe Sequence
tatgctggtgactggacacatcgcc

SEQ ID NO: 306795 - DNA, 25 bp, Probe Sequence
tatgccactgaggggaacacctgcc

SEQ ID NO: 306796 - DNA, 25 bp, Probe Sequence
tatccaggagttggactcagctctg

SEQ ID NO: 306797 - DNA, 25 bp, Probe Sequence
tatcttgtgagtggggcatctgttg

SEQ ID NO: 306798 - DNA, 25 bp, Probe Sequence
tatgctttgtatgatgcaagctttg

SEQ ID NO: 306799 - DNA, 25 bp, Probe Sequence
tatgttgttttagagttcttccctg

SEQ ID NO: 306800 - DNA, 25 bp, Probe Sequence
tatgtttgttttgtgtccgtatcca

SEQ ID NO: 306801 - DNA, 25 bp, Probe Sequence
tttttttggccgctcgcaataccaa

SEQ ID NO: 306802 - DNA, 25 bp, Probe Sequence
tttgttttggccaccaaaatccacg

SEQ ID NO: 306803 - DNA, 25 bp, Probe Sequence
ttttcgtaggcacttacaaatacca

SEQ ID NO: 306804 - DNA, 25 bp, Probe Sequence
ttttgcgtggtccttaggcttacaa

SEQ ID NO: 306805 - DNA, 25 bp, Probe Sequence
ttttttggttgatcaggttactgta

SEQ ID NO: 306806 - DNA, 25 bp, Probe Sequence
tatattttttactaaggtgtcacct

SEQ ID NO: 306807 - DNA, 25 bp, Probe Sequence
tattctttaatgattagggtgacct

SEQ ID NO: 306808 - DNA, 25 bp, Probe Sequence
tttctttagacctaactgttaccat

SEQ ID NO: 306809 - DNA, 25 bp, Probe Sequence
tttgttacagacccaagctgtccat

SEQ ID NO: 306810 - DNA, 25 bp, Probe Sequence
tttggtacaagtccagctgtttcag

SEQ ID NO: 306811 - DNA, 25 bp, Probe Sequence
tatctggataatttgccgaacttca

SEQ ID NO: 306812 - DNA, 25 bp, Probe Sequence
tattagatccatttctgcagaactt

SEQ ID NO: 306813 - DNA, 25 bp, Probe Sequence
tataaaggctgaatctgcagaagct

SEQ ID NO: 306814 - DNA, 25 bp, Probe Sequence
tatatatgtactagtcacagcaagt

SEQ ID NO: 306815 - DNA, 25 bp, Probe Sequence
tatcaaggactttcactgcaggcag

SEQ ID NO: 306816 - DNA, 25 bp, Probe Sequence
tatgaaggaccttatttggcatata

SEQ ID NO: 306817 - DNA, 25 bp, Probe Sequence
tatgaacaacctcgtttccaaacca

SEQ ID NO: 306818 - DNA, 25 bp, Probe Sequence
tatagccaaccggactttgaaccca

SEQ ID NO: 306819 - DNA, 25 bp, Probe Sequence
ttaccaaccagagagtgtgaaacta

SEQ ID NO: 306820 - DNA, 25 bp, Probe Sequence
ttaagcaaccaagaggcgggcctaa

SEQ ID NO: 306821 - DNA, 25 bp, Probe Sequence
ttaagaactaactggctccacccaa

SEQ ID NO: 306822 - DNA, 25 bp, Probe Sequence
ttaaatttcaaggcaggtaccctct

SEQ ID NO: 306823 - DNA, 25 bp, Probe Sequence
tataaatattacacagagaagactt

SEQ ID NO: 306824 - DNA, 25 bp, Probe Sequence
tatcaaatatttaccactaagactt

SEQ ID NO: 306825 - DNA, 25 bp, Probe Sequence
tatgctatatttttcaagtaaatct

SEQ ID NO: 306826 - DNA, 25 bp, Probe Sequence
tatgcttatttggtactttcactta

SEQ ID NO: 306827 - DNA, 25 bp, Probe Sequence
tatgttttactttcttggcactgga

SEQ ID NO: 306828 - DNA, 25 bp, Probe Sequence
tatcttttactttttttctgtgaca

SEQ ID NO: 306829 - DNA, 25 bp, Probe Sequence
tatcttttactttttttctgtgaca

SEQ ID NO: 306830 - DNA, 25 bp, Probe Sequence
tattttcctttgttatgtacggata

SEQ ID NO: 306831 - DNA, 25 bp, Probe Sequence
tttgtttctttacaacaggtgtagg

SEQ ID NO: 306832 - DNA, 25 bp, Probe Sequence
ttgggtttttgacaaatgggtaatg

SEQ ID NO: 306833 - DNA, 25 bp, Probe Sequence
tttggattttctgcaaattcggtaa

SEQ ID NO: 306834 - DNA, 25 bp, Probe Sequence
ttccgaagaactgaccattgctggc

SEQ ID NO: 306835 - DNA, 25 bp, Probe Sequence
tattcgggaaatgcctttctgcctg

SEQ ID NO: 306836 - DNA, 25 bp, Probe Sequence
tttcctgggtatgcctggactgttg

SEQ ID NO: 306837 - DNA, 25 bp, Probe Sequence
tatctcattgggaacctgatgggtt

SEQ ID NO: 306838 - DNA, 25 bp, Probe Sequence
tattctggaggatatctaatgtgat

SEQ ID NO: 306839 - DNA, 25 bp, Probe Sequence
tatttgagaggtgtgctaagagcta

SEQ ID NO: 306840 - DNA, 25 bp, Probe Sequence
ttttgcagtggtttcccggattaag

SEQ ID NO: 306841 - DNA, 25 bp, Probe Sequence
tttaactggcgactccggtattaag

SEQ ID NO: 306842 - DNA, 25 bp, Probe Sequence
tatgaacctagcacccgagattcta

SEQ ID NO: 306843 - DNA, 25 bp, Probe Sequence
tatgacaccaagggccgttttgctg

SEQ ID NO: 306844 - DNA, 25 bp, Probe Sequence
tatgatcccaagtagtctttttata

SEQ ID NO: 306845 - DNA, 25 bp, Probe Sequence
tataccccagctatatctgctttaa

SEQ ID NO: 306846 - DNA, 25 bp, Probe Sequence
tatcaaacccagacttgcttccata

SEQ ID NO: 306847 - DNA, 25 bp, Probe Sequence
tatcaagacaaaggtgtccttcata

SEQ ID NO: 306848 - DNA, 25 bp, Probe Sequence
tatatgagatcaaatggctgccttt

SEQ ID NO: 306849 - DNA, 25 bp, Probe Sequence
tatgatcttgacaggtgcactttac

SEQ ID NO: 306850 - DNA, 25 bp, Probe Sequence
tatgactatgcactaaggtcttata

SEQ ID NO: 306851 - DNA, 25 bp, Probe Sequence
tatgaaagactctgcctgcttaatt

SEQ ID NO: 306852 - DNA, 25 bp, Probe Sequence
tatgctaagccttctgttctctaat

SEQ ID NO: 306853 - DNA, 25 bp, Probe Sequence
tatgctaacctgatgcactgctgaa

SEQ ID NO: 306854 - DNA, 25 bp, Probe Sequence
tatgatatacttgtctgcagtgata

SEQ ID NO: 306855 - DNA, 25 bp, Probe Sequence
tatgatatcaaagactcattgctta

SEQ ID NO: 306856 - DNA, 25 bp, Probe Sequence
tatgttctgcaagacgctgtcctca

SEQ ID NO: 306857 - DNA, 25 bp, Probe Sequence
tatgtttgcaactctcgtcttatca

SEQ ID NO: 306858 - DNA, 25 bp, Probe Sequence
tatgctttgacctactaactttctc

SEQ ID NO: 306859 - DNA, 25 bp, Probe Sequence
tatgctttgacctactaactttctc

SEQ ID NO: 306860 - DNA, 25 bp, Probe Sequence
tatgctttgacctactaactttctc

SEQ ID NO: 306861 - DNA, 25 bp, Probe Sequence
tatgctttgacctactaactttctc

SEQ ID NO: 306862 - DNA, 25 bp, Probe Sequence
tatgctttgacctactaactttctc

SEQ ID NO: 306863 - DNA, 25 bp, Probe Sequence
tatgagtatgacagggaacttgccc

SEQ ID NO: 306864 - DNA, 25 bp, Probe Sequence
tatgaatccagaagggaacaagccc

SEQ ID NO: 306865 - DNA, 25 bp, Probe Sequence
tatacttaggagagagagcaaccac

SEQ ID NO: 306866 - DNA, 25 bp, Probe Sequence
tatgcacccaaaataggagcaccca

SEQ ID NO: 306867 - DNA, 25 bp, Probe Sequence
tatgcacctaatgttagagcaccta

SEQ ID NO: 306868 - DNA, 25 bp, Probe Sequence
tatacctacctactgaacagtctga

SEQ ID NO: 306869 - DNA, 25 bp, Probe Sequence
tatacttcacacattgactcagcac

SEQ ID NO: 306870 - DNA, 25 bp, Probe Sequence
tataattactccagactctcctatc

SEQ ID NO: 306871 - DNA, 25 bp, Probe Sequence
tataattacgcagagcagaccctgt

SEQ ID NO: 306872 - DNA, 25 bp, Probe Sequence
tataattaccaaattagctgagtgt

SEQ ID NO: 306873 - DNA, 25 bp, Probe Sequence
tataagtactctctgctggctggta

SEQ ID NO: 306874 - DNA, 25 bp, Probe Sequence
tatcaagcagagacctttgttggga

SEQ ID NO: 306875 - DNA, 25 bp, Probe Sequence
tatcaggcaagcgcatcttacttca

SEQ ID NO: 306876 - DNA, 25 bp, Probe Sequence
tatcatcaacaggttctcaattaaa

SEQ ID NO: 306877 - DNA, 25 bp, Probe Sequence
tatgcatagacccactctagagtaa

SEQ ID NO: 306878 - DNA, 25 bp, Probe Sequence
ttcaagtctctgctttgagtcaagg

SEQ ID NO: 306879 - DNA, 25 bp, Probe Sequence
tataacatcttattgttggtaatag

SEQ ID NO: 306880 - DNA, 25 bp, Probe Sequence
tatgaatgctttgttgtgagataac

SEQ ID NO: 306881 - DNA, 25 bp, Probe Sequence
tatcaactttgtgagtaataatgtc

SEQ ID NO: 306882 - DNA, 25 bp, Probe Sequence
tatgcctgttttgagtgcttaatac

SEQ ID NO: 306883 - DNA, 25 bp, Probe Sequence
tatgccgttggagatgagtgggaac

SEQ ID NO: 306884 - DNA, 25 bp, Probe Sequence
tatcttgttaagaaggtcgtgcaac

SEQ ID NO: 306885 - DNA, 25 bp, Probe Sequence
tatgcacatttatgacagattcgtc

SEQ ID NO: 306886 - DNA, 25 bp, Probe Sequence
tataattttaagattccttttcttg

SEQ ID NO: 306887 - DNA, 25 bp, Probe Sequence
ttcaatttctagaggaactttttct

SEQ ID NO: 306888 - DNA, 25 bp, Probe Sequence
ttactgtttaggccgaattttcgct

SEQ ID NO: 306889 - DNA, 25 bp, Probe Sequence
tatacgtttccatctaatttcaccg

SEQ ID NO: 306890 - DNA, 25 bp, Probe Sequence
tatatgctttgacctactaactttc

SEQ ID NO: 306891 - DNA, 25 bp, Probe Sequence
tatttttggccgttagttatctatt

SEQ ID NO: 306892 - DNA, 25 bp, Probe Sequence
tatccattttcttttatttctctct

SEQ ID NO: 306893 - DNA, 25 bp, Probe Sequence
tatgctctgcagtttatctttttct

SEQ ID NO: 306894 - DNA, 25 bp, Probe Sequence
tatgatgctcggctgatttttgttt

SEQ ID NO: 306895 - DNA, 25 bp, Probe Sequence
tatgcattttgcctttgttaatttt

SEQ ID NO: 306896 - DNA, 25 bp, Probe Sequence
tatgcatttatcacttccaaatcta

SEQ ID NO: 306897 - DNA, 25 bp, Probe Sequence
tatcattggatgtttccccacattg

SEQ ID NO: 306898 - DNA, 25 bp, Probe Sequence
tatcttggatacttcttacctgcag

SEQ ID NO: 306899 - DNA, 25 bp, Probe Sequence
tatcgtggaaggactcatgaccaca

SEQ ID NO: 306900 - DNA, 25 bp, Probe Sequence
tatcggctgagtgccgtagctcaca

SEQ ID NO: 306901 - DNA, 25 bp, Probe Sequence
tatgcggagtgagcctgctcagcca

SEQ ID NO: 306902 - DNA, 25 bp, Probe Sequence
tattccagatgagccctagcctcat

SEQ ID NO: 306903 - DNA, 25 bp, Probe Sequence
tataaatgcagagaccttgcccttc

SEQ ID NO: 306904 - DNA, 25 bp, Probe Sequence
tatagtacatctggaccttccctac

SEQ ID NO: 306905 - DNA, 25 bp, Probe Sequence
tatatgtgaccggaccttaagtttt

SEQ ID NO: 306906 - DNA, 25 bp, Probe Sequence
tttgctcaacccagttacagggtgt

SEQ ID NO: 306907 - DNA, 25 bp, Probe Sequence
ttgtgataaccgtggcgaaagtctt

SEQ ID NO: 306908 - DNA, 25 bp, Probe Sequence
tttgtgataaccgtggcgaaagtct

SEQ ID NO: 306909 - DNA, 25 bp, Probe Sequence
tttgagtaacccacagaacatctgt

SEQ ID NO: 306910 - DNA, 25 bp, Probe Sequence
tttggtggccccacaaacatttcct

SEQ ID NO: 306911 - DNA, 25 bp, Probe Sequence
tttctagaccccagatataaaatcg

SEQ ID NO: 306912 - DNA, 25 bp, Probe Sequence
tatactagactaccctttaaaatca

SEQ ID NO: 306913 - DNA, 25 bp, Probe Sequence
tatgacccagttcactttaaaacat

SEQ ID NO: 306914 - DNA, 25 bp, Probe Sequence
tatagacccccagctttaagaaata

SEQ ID NO: 306915 - DNA, 25 bp, Probe Sequence
tatcaggaccaccaccgttaaggaa

SEQ ID NO: 306916 - DNA, 25 bp, Probe Sequence
tatatggaccaccaggtacgggaaa

SEQ ID NO: 306917 - DNA, 25 bp, Probe Sequence
tataagttacccatgaagtgataaa

SEQ ID NO: 306918 - DNA, 25 bp, Probe Sequence
tatgaatggttcatttccagtgata

SEQ ID NO: 306919 - DNA, 25 bp, Probe Sequence
tatgatatggtgttttttagatgga

SEQ ID NO: 306920 - DNA, 25 bp, Probe Sequence
tatcattggtcgttgagttatggga

SEQ ID NO: 306921 - DNA, 25 bp, Probe Sequence
tatcttgtgacatttggttggttcc

SEQ ID NO: 306922 - DNA, 25 bp, Probe Sequence
tatcatggcggcttccgttgttatc

SEQ ID NO: 306923 - DNA, 25 bp, Probe Sequence
tatcaggacctgacctgttgctggg

SEQ ID NO: 306924 - DNA, 25 bp, Probe Sequence
tatcaagtttgagctttctggctgc

SEQ ID NO: 306925 - DNA, 25 bp, Probe Sequence
tatcaagtttgggtctgtgctgctg

SEQ ID NO: 306926 - DNA, 25 bp, Probe Sequence
tatgcacaggtgggagtcttttgta

SEQ ID NO: 306927 - DNA, 25 bp, Probe Sequence
tatcacaggttaagccttttgttcc

SEQ ID NO: 306928 - DNA, 25 bp, Probe Sequence
tatccgagctttgggagccttttct

SEQ ID NO: 306929 - DNA, 25 bp, Probe Sequence
tatacggctgttgcagcaggctttc

SEQ ID NO: 306930 - DNA, 25 bp, Probe Sequence
tataccatggttgagcggttttggc

SEQ ID NO: 306931 - DNA, 25 bp, Probe Sequence
tatgaccacagttcatggcggctct

SEQ ID NO: 306932 - DNA, 25 bp, Probe Sequence
tatgatgcagcacattgtactggcc

SEQ ID NO: 306933 - DNA, 25 bp, Probe Sequence
tatgctcagaacttgggtgaccgga

SEQ ID NO: 306934 - DNA, 25 bp, Probe Sequence
tatctctgaagctggattgatacgg

SEQ ID NO: 306935 - DNA, 25 bp, Probe Sequence
tatgcactgaagagctcttggcccg

SEQ ID NO: 306936 - DNA, 25 bp, Probe Sequence
tatcagcagacactccagtttgccc

SEQ ID NO: 306937 - DNA, 25 bp, Probe Sequence
ttcaggaattccgttacggcctaga

SEQ ID NO: 306938 - DNA, 25 bp, Probe Sequence
ttcggaatcccgtttttgctgagga

SEQ ID NO: 306939 - DNA, 25 bp, Probe Sequence
ttcgatgacccgcgtcgttggcggg

SEQ ID NO: 306940 - DNA, 25 bp, Probe Sequence
ttaatgacccagcttggggcgctgc

SEQ ID NO: 306941 - DNA, 25 bp, Probe Sequence
tttggactcgatcttggagggtgca

SEQ ID NO: 306942 - DNA, 25 bp, Probe Sequence
tttgtccggctgcttggaagcctgg

SEQ ID NO: 306943 - DNA, 25 bp, Probe Sequence
tatttcgccgtcctataataggctt

SEQ ID NO: 306944 - DNA, 25 bp, Probe Sequence
tattaggccgtgctccaaagtcatc

SEQ ID NO: 306945 - DNA, 25 bp, Probe Sequence
tttgggaaatgactccatttctatt

SEQ ID NO: 306946 - DNA, 25 bp, Probe Sequence
tatctgtgcttttgaggctatttct

SEQ ID NO: 306947 - DNA, 25 bp, Probe Sequence
tatctgagcttcggtgactttgcct

SEQ ID NO: 306948 - DNA, 25 bp, Probe Sequence
tatcgagggcgaaactgcttccttc

SEQ ID NO: 306949 - DNA, 25 bp, Probe Sequence
tatccgggtgatgaccattgcccca

SEQ ID NO: 306950 - DNA, 25 bp, Probe Sequence
tatacgaagtatgatccaactcact

SEQ ID NO: 306951 - DNA, 25 bp, Probe Sequence
tatgaaaaaacttcctaccactcac

SEQ ID NO: 306952 - DNA, 25 bp, Probe Sequence
tatgaaaaaacttcctaccactcac

SEQ ID NO: 306953 - DNA, 25 bp, Probe Sequence
tatgaaaaaacttcctaccactcac

SEQ ID NO: 306954 - DNA, 25 bp, Probe Sequence
tatgcgaatcaacctttctacctta

SEQ ID NO: 306955 - DNA, 25 bp, Probe Sequence
tatgcatgaatacatttttggcctt

SEQ ID NO: 306956 - DNA, 25 bp, Probe Sequence
tatgctgcaactcatgaacttggcc

SEQ ID NO: 306957 - DNA, 25 bp, Probe Sequence
tatccaacacagcactctaggcagc

SEQ ID NO: 306958 - DNA, 25 bp, Probe Sequence
tatccaaccatgcttcattacactc

SEQ ID NO: 306959 - DNA, 25 bp, Probe Sequence
tatccaagcactgtgccatgtcagc

SEQ ID NO: 306960 - DNA, 25 bp, Probe Sequence
tatgccagcgagtgtgccatgaagg

SEQ ID NO: 306961 - DNA, 25 bp, Probe Sequence
tatacactgcgctgtgacatgaagc

SEQ ID NO: 306962 - DNA, 25 bp, Probe Sequence
tatcatcctcagtgggcaaacagaa

SEQ ID NO: 306963 - DNA, 25 bp, Probe Sequence
tatcatgccaaggacccaaacaacc

SEQ ID NO: 306964 - DNA, 25 bp, Probe Sequence
tatcatatccacaagccgaatagaa

SEQ ID NO: 306965 - DNA, 25 bp, Probe Sequence
tatcaacgctatgacgcagctgtga

SEQ ID NO: 306966 - DNA, 25 bp, Probe Sequence
tatacagcaccagacgcgatggcaa

SEQ ID NO: 306967 - DNA, 25 bp, Probe Sequence
tatgacagacccttcactgtgatgc

SEQ ID NO: 306968 - DNA, 25 bp, Probe Sequence
tatgaaacccgctacatctatggcc

SEQ ID NO: 306969 - DNA, 25 bp, Probe Sequence
tatatagggccccaatccattgcca

SEQ ID NO: 306970 - DNA, 25 bp, Probe Sequence
tattatgggcaaccaatctttggaa

SEQ ID NO: 306971 - DNA, 25 bp, Probe Sequence
tattacctaaactatcttgtggagt

SEQ ID NO: 306972 - DNA, 25 bp, Probe Sequence
tatctacctgaatactctcctgaga

SEQ ID NO: 306973 - DNA, 25 bp, Probe Sequence
tatcatccatactaaagccccatta

SEQ ID NO: 306974 - DNA, 25 bp, Probe Sequence
tatatgcagatattttaccgcctta

SEQ ID NO: 306975 - DNA, 25 bp, Probe Sequence
tataatatactaaaccaactctaat

SEQ ID NO: 306976 - DNA, 25 bp, Probe Sequence
tataaaacatatctccaggccaggt

SEQ ID NO: 306977 - DNA, 25 bp, Probe Sequence
tatcaaaagctatatgccactgcca

SEQ ID NO: 306978 - DNA, 25 bp, Probe Sequence
tataaatgtccattaccctgcactc

SEQ ID NO: 306979 - DNA, 25 bp, Probe Sequence
ttatagattacactggccaccagct

SEQ ID NO: 306980 - DNA, 25 bp, Probe Sequence
tatgaaatctacttggatcccatgc

SEQ ID NO: 306981 - DNA, 25 bp, Probe Sequence
tatgcaactctgacgttgatcccag

SEQ ID NO: 306982 - DNA, 25 bp, Probe Sequence
tataacgtgatacctgccaccatga

SEQ ID NO: 306983 - DNA, 25 bp, Probe Sequence
tatcaagggtagctaatgacatgaa

SEQ ID NO: 306984 - DNA, 25 bp, Probe Sequence
tatccggggcatctactcaatgaaa

SEQ ID NO: 306985 - DNA, 25 bp, Probe Sequence
ttggcggtggctgccacgcaagagg

SEQ ID NO: 306986 - DNA, 25 bp, Probe Sequence
ttgaggggcaactccagaagtggag

SEQ ID NO: 306987 - DNA, 25 bp, Probe Sequence
tatagggtaacttccaggcatggcc

SEQ ID NO: 306988 - DNA, 25 bp, Probe Sequence
tataggtatacacttacgacttcac

SEQ ID NO: 306989 - DNA, 25 bp, Probe Sequence
tatatgttataccttgtatgatagt

SEQ ID NO: 306990 - DNA, 25 bp, Probe Sequence
tatagattatacagacagatgatag

SEQ ID NO: 306991 - DNA, 25 bp, Probe Sequence
tatagattttcctacaatgcatatt

SEQ ID NO: 306992 - DNA, 25 bp, Probe Sequence
tatcaatctctgactgcaaccactt

SEQ ID NO: 306993 - DNA, 25 bp, Probe Sequence
tatactgactgactgcaatatttgt

SEQ ID NO: 306994 - DNA, 25 bp, Probe Sequence
tatatagaggagacaagtcgtaaca

SEQ ID NO: 306995 - DNA, 25 bp, Probe Sequence
tatctcaaagtaaagtcattaacat

SEQ ID NO: 306996 - DNA, 25 bp, Probe Sequence
tatctctaaatacaggattataatt

SEQ ID NO: 306997 - DNA, 25 bp, Probe Sequence
tatcctgggattcagctgttgttga

SEQ ID NO: 306998 - DNA, 25 bp, Probe Sequence
tatcctggtgttaacctgactcatc

SEQ ID NO: 306999 - DNA, 25 bp, Probe Sequence
tatccagcggtattttctaattcag

SEQ ID NO: 307000 - DNA, 25 bp, Probe Sequence
tatacctggtttttacagcattgca

SEQ ID NO: 307001 - DNA, 25 bp, Probe Sequence
tataacgtgatcactttgacttgag

SEQ ID NO: 307002 - DNA, 25 bp, Probe Sequence
tataacctacataccttctcttgtg

SEQ ID NO: 307003 - DNA, 25 bp, Probe Sequence
tatgaacttacttgatatttttgtt

SEQ ID NO: 307004 - DNA, 25 bp, Probe Sequence
tatgcaagttaggcttaattttttt

SEQ ID NO: 307005 - DNA, 25 bp, Probe Sequence
tatgcacagtaatttccctttttat

SEQ ID NO: 307006 - DNA, 25 bp, Probe Sequence
tatccagtcaactttcagcttttct

SEQ ID NO: 307007 - DNA, 25 bp, Probe Sequence
tatcaaacacaattctaatctcttc

SEQ ID NO: 307008 - DNA, 25 bp, Probe Sequence
tatcccacagactcagaaccgtgct

SEQ ID NO: 307009 - DNA, 25 bp, Probe Sequence
tatcccacagactcagaaccgtgct

SEQ ID NO: 307010 - DNA, 25 bp, Probe Sequence
tatgcccaaacagaaatcctgatgg

SEQ ID NO: 307011 - DNA, 25 bp, Probe Sequence
tatgccccgtacatgaccttatggg

SEQ ID NO: 307012 - DNA, 25 bp, Probe Sequence
tatgccccagtacatgaccttatgg

SEQ ID NO: 307013 - DNA, 25 bp, Probe Sequence
tatatgcccagtacaggaccttatg

SEQ ID NO: 307014 - DNA, 25 bp, Probe Sequence
tatagggcagttccgagtccatcag

SEQ ID NO: 307015 - DNA, 25 bp, Probe Sequence
tataagaagctgaccggctccaagt

SEQ ID NO: 307016 - DNA, 25 bp, Probe Sequence
ttaagcggagatccggccagcggaa

SEQ ID NO: 307017 - DNA, 25 bp, Probe Sequence
tttgcaggggaggcggctccgagag

SEQ ID NO: 307018 - DNA, 25 bp, Probe Sequence
tttggggaaagggctccttgggctg

SEQ ID NO: 307019 - DNA, 25 bp, Probe Sequence
tttggggaaagggctccttgggctg

SEQ ID NO: 307020 - DNA, 25 bp, Probe Sequence
tttgggttaccgagagcttttgctg

SEQ ID NO: 307021 - DNA, 25 bp, Probe Sequence
tttgggtcggcccatgtggtttgag

SEQ ID NO: 307022 - DNA, 25 bp, Probe Sequence
tttggagtaggctttcagttcttgg

SEQ ID NO: 307023 - DNA, 25 bp, Probe Sequence
tattaggtaggtatggttgcaggca

SEQ ID NO: 307024 - DNA, 25 bp, Probe Sequence
tatctagagtagagttgctagtcat

SEQ ID NO: 307025 - DNA, 25 bp, Probe Sequence
tatccatgattatttgtactttcaa

SEQ ID NO: 307026 - DNA, 25 bp, Probe Sequence
tatctcatgttagctgtaccagtca

SEQ ID NO: 307027 - DNA, 25 bp, Probe Sequence
tatctcagtgatacttgtgaccaat

SEQ ID NO: 307028 - DNA, 25 bp, Probe Sequence
tatctattatctcatcatatctcat

SEQ ID NO: 307029 - DNA, 25 bp, Probe Sequence
tatccatcttcttgtaatcctaaaa

SEQ ID NO: 307030 - DNA, 25 bp, Probe Sequence
tatccctttatgcaatcgtcttcat

SEQ ID NO: 307031 - DNA, 25 bp, Probe Sequence
tatgaagtcttttaacagtctctct

SEQ ID NO: 307032 - DNA, 25 bp, Probe Sequence
tatgcttgtcttttcgacttctcta

SEQ ID NO: 307033 - DNA, 25 bp, Probe Sequence
tatgctttcatcattaaattatctg

SEQ ID NO: 307034 - DNA, 25 bp, Probe Sequence
tatgcattcttcatgaatacttttg

SEQ ID NO: 307035 - DNA, 25 bp, Probe Sequence
tatgcccatagcctagaatttttgg

SEQ ID NO: 307036 - DNA, 25 bp, Probe Sequence
tttgccaacctcaaatcgtgctgtg

SEQ ID NO: 307037 - DNA, 25 bp, Probe Sequence
tttgccaacctcaaatcgtgctgtg

SEQ ID NO: 307038 - DNA, 25 bp, Probe Sequence
tatcaccaagccaaacatcatcatg

SEQ ID NO: 307039 - DNA, 25 bp, Probe Sequence
tatgccagatgagctgaagcacatt

SEQ ID NO: 307040 - DNA, 25 bp, Probe Sequence
tatgccagatgcttaaacacattta

SEQ ID NO: 307041 - DNA, 25 bp, Probe Sequence
tatgaatgtgtgcatagacactatt

SEQ ID NO: 307042 - DNA, 25 bp, Probe Sequence
tataatcagtcattcatagcactat

SEQ ID NO: 307043 - DNA, 25 bp, Probe Sequence
tatcaacaataaccacacttccttt

SEQ ID NO: 307044 - DNA, 25 bp, Probe Sequence
tatacagcaatttagccctatgcct

SEQ ID NO: 307045 - DNA, 25 bp, Probe Sequence
tatacagcattgttgacctccactc

SEQ ID NO: 307046 - DNA, 25 bp, Probe Sequence
tataatgtggcttgtcctcaactcc

SEQ ID NO: 307047 - DNA, 25 bp, Probe Sequence
tatcatatggccaagttacgccccc

SEQ ID NO: 307048 - DNA, 25 bp, Probe Sequence
tttactgccttgtgacgttggtctt

SEQ ID NO: 307049 - DNA, 25 bp, Probe Sequence
ttaacgtcttgaaacttaaactctg

SEQ ID NO: 307050 - DNA, 25 bp, Probe Sequence
tatacctgtttggaatgttaaccca

SEQ ID NO: 307051 - DNA, 25 bp, Probe Sequence
tatacttttgtttatctacaaccca

SEQ ID NO: 307052 - DNA, 25 bp, Probe Sequence
tatgctgcttttcttttctaaccaa

SEQ ID NO: 307053 - DNA, 25 bp, Probe Sequence
tatgctgtttctcagctgttccact

SEQ ID NO: 307054 - DNA, 25 bp, Probe Sequence
tatcagctttctcaggaactagtct

SEQ ID NO: 307055 - DNA, 25 bp, Probe Sequence
tatcgtgtgtccgtggaaccagtcc

SEQ ID NO: 307056 - DNA, 25 bp, Probe Sequence
tatctggaacaggctccaactgcag

SEQ ID NO: 307057 - DNA, 25 bp, Probe Sequence
tatcatgagataataggcctactca

SEQ ID NO: 307058 - DNA, 25 bp, Probe Sequence
tatcaggatgcaatgtgcatgccta

SEQ ID NO: 307059 - DNA, 25 bp, Probe Sequence
tatatgcaatgccactgcatccatg

SEQ ID NO: 307060 - DNA, 25 bp, Probe Sequence
tatatatcctgcatgctgccagtgc

SEQ ID NO: 307061 - DNA, 25 bp, Probe Sequence
tattacccattggtgattcggtttt

SEQ ID NO: 307062 - DNA, 25 bp, Probe Sequence
tattaacccatggtgattccggttt

SEQ ID NO: 307063 - DNA, 25 bp, Probe Sequence
tattacaacaggtgcttccagtgat

SEQ ID NO: 307064 - DNA, 25 bp, Probe Sequence
tatctagaaaggtcgttcccagcag

SEQ ID NO: 307065 - DNA, 25 bp, Probe Sequence
tatcttgaacaggttattggtcagt

SEQ ID NO: 307066 - DNA, 25 bp, Probe Sequence
tatgctcttaaggcttcatcttctc

SEQ ID NO: 307067 - DNA, 25 bp, Probe Sequence
tatcactaagctcgctttcttgctg

SEQ ID NO: 307068 - DNA, 25 bp, Probe Sequence
tatctgtaagctttacctctctgct

SEQ ID NO: 307069 - DNA, 25 bp, Probe Sequence
tatctgtaaccattacagcctaaat

SEQ ID NO: 307070 - DNA, 25 bp, Probe Sequence
tatttttcgatttcctgtaaatcag

SEQ ID NO: 307071 - DNA, 25 bp, Probe Sequence
tatagatttgacatccctctgaaaa

SEQ ID NO: 307072 - DNA, 25 bp, Probe Sequence
tatacctgccaatcacccaaagaaa

SEQ ID NO: 307073 - DNA, 25 bp, Probe Sequence
tatagctaccatttgcctacaataa

SEQ ID NO: 307074 - DNA, 25 bp, Probe Sequence
tatacattccattgggaagtccaca

SEQ ID NO: 307075 - DNA, 25 bp, Probe Sequence
tatacattcaaggtagtggccaaat

SEQ ID NO: 307076 - DNA, 25 bp, Probe Sequence
tatactttaagttctgggatacatg

SEQ ID NO: 307077 - DNA, 25 bp, Probe Sequence
tataccttcacagttcttaatacct

SEQ ID NO: 307078 - DNA, 25 bp, Probe Sequence
tatgcccgacatcttttaatcattc

SEQ ID NO: 307079 - DNA, 25 bp, Probe Sequence
tatcaaagactcattgcttaattct

SEQ ID NO: 307080 - DNA, 25 bp, Probe Sequence
tataataagccatgagcttcgttct

SEQ ID NO: 307081 - DNA, 25 bp, Probe Sequence
tatattaggcccctctattttcagg

SEQ ID NO: 307082 - DNA, 25 bp, Probe Sequence
tatcaaaggccccctttctatgttc

SEQ ID NO: 307083 - DNA, 25 bp, Probe Sequence
tatcaaaggccccctttctatgttc

SEQ ID NO: 307084 - DNA, 25 bp, Probe Sequence
tataaaaccagcccttgttgtatta

SEQ ID NO: 307085 - DNA, 25 bp, Probe Sequence
tataaactcaagcctttttattctt

SEQ ID NO: 307086 - DNA, 25 bp, Probe Sequence
tatcgtattccacgtttttagccct

SEQ ID NO: 307087 - DNA, 25 bp, Probe Sequence
tatctgctattcgggtaatcttcac

SEQ ID NO: 307088 - DNA, 25 bp, Probe Sequence
tatctgctttgctgatgtagacaag

SEQ ID NO: 307089 - DNA, 25 bp, Probe Sequence
tatgctcttttggctgtaatgggtg

SEQ ID NO: 307090 - DNA, 25 bp, Probe Sequence
tatgctgtttattatgtaagatcct

SEQ ID NO: 307091 - DNA, 25 bp, Probe Sequence
tatgcttttctctggtcagtctgtg

SEQ ID NO: 307092 - DNA, 25 bp, Probe Sequence
tatgctttatcctggcaattgtgga

SEQ ID NO: 307093 - DNA, 25 bp, Probe Sequence
tatctatgtgatgccggaatatcgg

SEQ ID NO: 307094 - DNA, 25 bp, Probe Sequence
tatctgatgtgatgcctgttgagtc

SEQ ID NO: 307095 - DNA, 25 bp, Probe Sequence
tatctgatgtgatgcctgttgagtc

SEQ ID NO: 307096 - DNA, 25 bp, Probe Sequence
tatgcctgagtaccatcctggatga

SEQ ID NO: 307097 - DNA, 25 bp, Probe Sequence
tatctgtgacttcatgctctgataa

SEQ ID NO: 307098 - DNA, 25 bp, Probe Sequence
tattttcatatccagcctaaaggtg

SEQ ID NO: 307099 - DNA, 25 bp, Probe Sequence
tatcttttaagccaccagagaggtc

SEQ ID NO: 307100 - DNA, 25 bp, Probe Sequence
tatctacttcatgctgaccagaggc

SEQ ID NO: 307101 - DNA, 25 bp, Probe Sequence
tatctgctgctgatttacagcgaga

SEQ ID NO: 307102 - DNA, 25 bp, Probe Sequence
tatctgcgaacttatgacaccagaa

SEQ ID NO: 307103 - DNA, 25 bp, Probe Sequence
tatccagcaacatttgggccagcta

SEQ ID NO: 307104 - DNA, 25 bp, Probe Sequence
tatccagaccaaagagctgcctctt

SEQ ID NO: 307105 - DNA, 25 bp, Probe Sequence
tatcctcatccaacaggctttatgt

SEQ ID NO: 307106 - DNA, 25 bp, Probe Sequence
tatgcctgccaaagcgacaattttc

SEQ ID NO: 307107 - DNA, 25 bp, Probe Sequence
tatcttgtcaatactacctttctca

SEQ ID NO: 307108 - DNA, 25 bp, Probe Sequence
tatttgcaaatatactttttccatt

SEQ ID NO: 307109 - DNA, 25 bp, Probe Sequence
ttttaaaagatagctcttggccggg

SEQ ID NO: 307110 - DNA, 25 bp, Probe Sequence
tatttaaagcaatgtttacccacag

SEQ ID NO: 307111 - DNA, 25 bp, Probe Sequence
ttttccaacctgcttcttcaaacag

SEQ ID NO: 307112 - DNA, 25 bp, Probe Sequence
tttaacaacccgtgctttgaagaag

SEQ ID NO: 307113 - DNA, 25 bp, Probe Sequence
tatttaacaacccgtgctttgaaga

SEQ ID NO: 307114 - DNA, 25 bp, Probe Sequence
tatctttaaatccttgagcaatctg

SEQ ID NO: 307115 - DNA, 25 bp, Probe Sequence
tatccatttctgacgttgaaccatt

SEQ ID NO: 307116 - DNA, 25 bp, Probe Sequence
tatgccttttggtcttgagtaatta

SEQ ID NO: 307117 - DNA, 25 bp, Probe Sequence
tatctccttttctctagtatttgac

SEQ ID NO: 307118 - DNA, 25 bp, Probe Sequence
tatttatgtttctactcggggaaca

SEQ ID NO: 307119 - DNA, 25 bp, Probe Sequence
tttcgatcttcataacggacaaact

SEQ ID NO: 307120 - DNA, 25 bp, Probe Sequence
ttacgactccatgggtgggataaac

SEQ ID NO: 307121 - DNA, 25 bp, Probe Sequence
tatacgccccttgatgagaaaagcc

SEQ ID NO: 307122 - DNA, 25 bp, Probe Sequence
tatccgcccccaataaaagcaattc

SEQ ID NO: 307123 - DNA, 25 bp, Probe Sequence
tatccccacctcaaaccaaggatca

SEQ ID NO: 307124 - DNA, 25 bp, Probe Sequence
tatccccctctgccaaataagacta

SEQ ID NO: 307125 - DNA, 25 bp, Probe Sequence
tatacaccctccaaatattagatat

SEQ ID NO: 307126 - DNA, 25 bp, Probe Sequence
tataaactgtacacataattatcat

SEQ ID NO: 307127 - DNA, 25 bp, Probe Sequence
tatattccttactgttttactaaat

SEQ ID NO: 307128 - DNA, 25 bp, Probe Sequence
tatttcctaaaagcttaggctaatt

SEQ ID NO: 307129 - DNA, 25 bp, Probe Sequence
tatcctttcaaacagctattggcaa

SEQ ID NO: 307130 - DNA, 25 bp, Probe Sequence
ttgacttaagtactaatattccaga

SEQ ID NO: 307131 - DNA, 25 bp, Probe Sequence
tatcacttaagtacccatatgttgg

SEQ ID NO: 307132 - DNA, 25 bp, Probe Sequence
tatagtccaatgtttcatcatcagg

SEQ ID NO: 307133 - DNA, 25 bp, Probe Sequence
tataattcactggtcctgcatcagg

SEQ ID NO: 307134 - DNA, 25 bp, Probe Sequence
tatcaatcacctgatagcaacaggg

SEQ ID NO: 307135 - DNA, 25 bp, Probe Sequence
tatccatcccctgcaaactgcagag

SEQ ID NO: 307136 - DNA, 25 bp, Probe Sequence
tatccatcccctgcaaactgcagag

SEQ ID NO: 307137 - DNA, 25 bp, Probe Sequence
tatctcccttcttgcattttcagag

SEQ ID NO: 307138 - DNA, 25 bp, Probe Sequence
tatagtatagagtttgcctcaacac

SEQ ID NO: 307139 - DNA, 25 bp, Probe Sequence
tatatttcaaagttcccaggagttg

SEQ ID NO: 307140 - DNA, 25 bp, Probe Sequence
tattatataaagcccagtaaagaat

SEQ ID NO: 307141 - DNA, 25 bp, Probe Sequence
tattatctagtacccagtccatgtt

SEQ ID NO: 307142 - DNA, 25 bp, Probe Sequence
tatatactagatattaatcccttat

SEQ ID NO: 307143 - DNA, 25 bp, Probe Sequence
tataatgctgcaaattttcctccat

SEQ ID NO: 307144 - DNA, 25 bp, Probe Sequence
tatcatagtgccaagtacgccccat

SEQ ID NO: 307145 - DNA, 25 bp, Probe Sequence
tatcatgactgaggtgcctcccaac

SEQ ID NO: 307146 - DNA, 25 bp, Probe Sequence
tatcatgagatgtaatctacctaca

SEQ ID NO: 307147 - DNA, 25 bp, Probe Sequence
tatcagatcattacccaccatatgc

SEQ ID NO: 307148 - DNA, 25 bp, Probe Sequence
tatcattctgcatcccaactatgac

SEQ ID NO: 307149 - DNA, 25 bp, Probe Sequence
tatcatctttacccaaataaattaa

SEQ ID NO: 307150 - DNA, 25 bp, Probe Sequence
tatccttgccacccatacaggaaat

SEQ ID NO: 307151 - DNA, 25 bp, Probe Sequence
ttgactgctgcctccgaaggagtat

SEQ ID NO: 307152 - DNA, 25 bp, Probe Sequence
ttattgcctgaagcatagggccttt

SEQ ID NO: 307153 - DNA, 25 bp, Probe Sequence
tatctagctttaggaagttgccctt

SEQ ID NO: 307154 - DNA, 25 bp, Probe Sequence
tattctttcagagaagtgtcccagg

SEQ ID NO: 307155 - DNA, 25 bp, Probe Sequence
tatacgcccgggacgtggatcagcg

SEQ ID NO: 307156 - DNA, 25 bp, Probe Sequence
tatactggccgtgggggtgatctgc

SEQ ID NO: 307157 - DNA, 25 bp, Probe Sequence
ttacatccggcaagcgggtgactcc

SEQ ID NO: 307158 - DNA, 25 bp, Probe Sequence
tatacagtctggatgcagtggtgca

SEQ ID NO: 307159 - DNA, 25 bp, Probe Sequence
tatacaggcttagtcagctgcccaa

SEQ ID NO: 307160 - DNA, 25 bp, Probe Sequence
tatctcagaaatcctcaagcccaac

SEQ ID NO: 307161 - DNA, 25 bp, Probe Sequence
ttatagaagcaagaaggcgatagct

SEQ ID NO: 307162 - DNA, 25 bp, Probe Sequence
tttggaatcttcaagggcacatact

SEQ ID NO: 307163 - DNA, 25 bp, Probe Sequence
ttcggcaacttccagtgcaaggacg

SEQ ID NO: 307164 - DNA, 25 bp, Probe Sequence
tatgccctcatgtcccagggagaga

SEQ ID NO: 307165 - DNA, 25 bp, Probe Sequence
tatacacttctggctcacaggaaag

SEQ ID NO: 307166 - DNA, 25 bp, Probe Sequence
tatctacatctttccacaggcaaca

SEQ ID NO: 307167 - DNA, 25 bp, Probe Sequence
tatctaagctcatttaaacctcact

SEQ ID NO: 307168 - DNA, 25 bp, Probe Sequence
tatctacctctaaagcaaatctgca

SEQ ID NO: 307169 - DNA, 25 bp, Probe Sequence
tatttcccttaaaacactgcaaaca

SEQ ID NO: 307170 - DNA, 25 bp, Probe Sequence
tattttccaataccaacaggctcta

SEQ ID NO: 307171 - DNA, 25 bp, Probe Sequence
tatattgccccatgccattagttgt

SEQ ID NO: 307172 - DNA, 25 bp, Probe Sequence
tatttgactccaaggtagcagtgtg

SEQ ID NO: 307173 - DNA, 25 bp, Probe Sequence
tatttcctcatatgtgtaaggtgaa

SEQ ID NO: 307174 - DNA, 25 bp, Probe Sequence
tatttcattgaacctgtacagtgga

SEQ ID NO: 307175 - DNA, 25 bp, Probe Sequence
tatttcattgactaacccaggacag

SEQ ID NO: 307176 - DNA, 25 bp, Probe Sequence
tatcattattacctcctagggccag

SEQ ID NO: 307177 - DNA, 25 bp, Probe Sequence
tatatttgagagctcacttcgcccg

SEQ ID NO: 307178 - DNA, 25 bp, Probe Sequence
tatataaagcaccagtctgctcccc

SEQ ID NO: 307179 - DNA, 25 bp, Probe Sequence
tattacagatgtgagccaccgcacc

SEQ ID NO: 307180 - DNA, 25 bp, Probe Sequence
tatagaagagttgcctcctgtctct

SEQ ID NO: 307181 - DNA, 25 bp, Probe Sequence
tatcctgaagttgctatggctatct

SEQ ID NO: 307182 - DNA, 25 bp, Probe Sequence
tatcctcaatttccatatgttactg

SEQ ID NO: 307183 - DNA, 25 bp, Probe Sequence
tatcatgctaatatccattgaatcg

SEQ ID NO: 307184 - DNA, 25 bp, Probe Sequence
tatcgcctattaccattgtgatgcg

SEQ ID NO: 307185 - DNA, 25 bp, Probe Sequence
tatccatgctcttgaccttgtagag

SEQ ID NO: 307186 - DNA, 25 bp, Probe Sequence
tatcgcattaagttcaaggagagct

SEQ ID NO: 307187 - DNA, 25 bp, Probe Sequence
tatacttgcttgtatcatgggatac

SEQ ID NO: 307188 - DNA, 25 bp, Probe Sequence
tatacgtgctcttgatgagcttgaa

SEQ ID NO: 307189 - DNA, 25 bp, Probe Sequence
tatactgcctcttaggtgtactctt

SEQ ID NO: 307190 - DNA, 25 bp, Probe Sequence
tataccccaaattgtgtatatatct

SEQ ID NO: 307191 - DNA, 25 bp, Probe Sequence
tataacccagcaaatctgtacttat

SEQ ID NO: 307192 - DNA, 25 bp, Probe Sequence
tataacttcatgaaactgttttagc

SEQ ID NO: 307193 - DNA, 25 bp, Probe Sequence
tataatactaaggcctgaagtctag

SEQ ID NO: 307194 - DNA, 25 bp, Probe Sequence
tataccacatatacacctgatagtc

SEQ ID NO: 307195 - DNA, 25 bp, Probe Sequence
tatacacaatacacaccacagtcaa

SEQ ID NO: 307196 - DNA, 25 bp, Probe Sequence
tatcacccatacaaccaacattgcc

SEQ ID NO: 307197 - DNA, 25 bp, Probe Sequence
tatctgcccgtcaactcataatatg

SEQ ID NO: 307198 - DNA, 25 bp, Probe Sequence
tatcggggtcattgccaatgatatg

SEQ ID NO: 307199 - DNA, 25 bp, Probe Sequence
tatccctgaatctctaatatgtgtg

SEQ ID NO: 307200 - DNA, 25 bp, Probe Sequence
tatcccatcgctttgattattgttg

SEQ ID NO: 307201 - DNA, 25 bp, Probe Sequence
tatccgcacattatgattatgttct

SEQ ID NO: 307202 - DNA, 25 bp, Probe Sequence
tatccagaatgtatgcataagtgta

SEQ ID NO: 307203 - DNA, 25 bp, Probe Sequence
tatccagaatctacaatgaactcaa

SEQ ID NO: 307204 - DNA, 25 bp, Probe Sequence
tatctcaactttatgtgcactgagc

SEQ ID NO: 307205 - DNA, 25 bp, Probe Sequence
tatacacagctttatgatatcaaag

SEQ ID NO: 307206 - DNA, 25 bp, Probe Sequence
tatcaccattcttatgtcactttag

SEQ ID NO: 307207 - DNA, 25 bp, Probe Sequence
tatccacctccatttcagcatgtgg

SEQ ID NO: 307208 - DNA, 25 bp, Probe Sequence
tatctgccgctcctatctagaggca

SEQ ID NO: 307209 - DNA, 25 bp, Probe Sequence
tatctcttgctcttatccaaataat

SEQ ID NO: 307210 - DNA, 25 bp, Probe Sequence
tatcattttattatcaccatgcaat

SEQ ID NO: 307211 - DNA, 25 bp, Probe Sequence
tataattgtaacatcacattgattt

SEQ ID NO: 307212 - DNA, 25 bp, Probe Sequence
tatcaaattcacattccattgcctc

SEQ ID NO: 307213 - DNA, 25 bp, Probe Sequence
tatcataactacgtattcattgtct

SEQ ID NO: 307214 - DNA, 25 bp, Probe Sequence
tattaaaacctcagcatgtctccct

SEQ ID NO: 307215 - DNA, 25 bp, Probe Sequence
tatatagtaactattgcttctgcca

SEQ ID NO: 307216 - DNA, 25 bp, Probe Sequence
tatcaactaatcatcaagtttgcca

SEQ ID NO: 307217 - DNA, 25 bp, Probe Sequence
tatcatatatcatttaagcagtttg

SEQ ID NO: 307218 - DNA, 25 bp, Probe Sequence
tatctatcttttcatcatgtctata

SEQ ID NO: 307219 - DNA, 25 bp, Probe Sequence
tatcttttcttttgctcatcttaga

SEQ ID NO: 307220 - DNA, 25 bp, Probe Sequence
tatctattgcattttgtgctaagta

SEQ ID NO: 307221 - DNA, 25 bp, Probe Sequence
tatctagagctagtttctggtgaat

SEQ ID NO: 307222 - DNA, 25 bp, Probe Sequence
tatctaggcattttcttggtagcac

SEQ ID NO: 307223 - DNA, 25 bp, Probe Sequence
tatcctgtgctttttctgtgggacc

SEQ ID NO: 307224 - DNA, 25 bp, Probe Sequence
tatctgttttcatcttgaggtggcc

SEQ ID NO: 307225 - DNA, 25 bp, Probe Sequence
tttgtgatttcacctgggcagggac

SEQ ID NO: 307226 - DNA, 25 bp, Probe Sequence
tatttatgctcccttcgtgggtgat

SEQ ID NO: 307227 - DNA, 25 bp, Probe Sequence
tatttatctggcagtctgagggtat

SEQ ID NO: 307228 - DNA, 25 bp, Probe Sequence
tttgaacaggaagcggggccacgtg

SEQ ID NO: 307229 - DNA, 25 bp, Probe Sequence
tttattcgagaagttgggggccagg

SEQ ID NO: 307230 - DNA, 25 bp, Probe Sequence
tatataaaacaatttgggggccagg

SEQ ID NO: 307231 - DNA, 25 bp, Probe Sequence
tatctgctaaactatattgggagac

SEQ ID NO: 307232 - DNA, 25 bp, Probe Sequence
tatccttacccaatctgtacagaaa

SEQ ID NO: 307233 - DNA, 25 bp, Probe Sequence
tatcctgatatctaaagcttgacaa

SEQ ID NO: 307234 - DNA, 25 bp, Probe Sequence
tatcctgcttcataacttgtatgga

SEQ ID NO: 307235 - DNA, 25 bp, Probe Sequence
tatcctcattcaaaaatctgggcct

SEQ ID NO: 307236 - DNA, 25 bp, Probe Sequence
tatcccaatctccagacctggggtc

SEQ ID NO: 307237 - DNA, 25 bp, Probe Sequence
tataccaatctcctgaggcttgtgg

SEQ ID NO: 307238 - DNA, 25 bp, Probe Sequence
tattcacaaccagtgcacagtttga

SEQ ID NO: 307239 - DNA, 25 bp, Probe Sequence
tatacagaaggctatcacacttgtg

SEQ ID NO: 307240 - DNA, 25 bp, Probe Sequence
tataaacagatcttctatcagtagc

SEQ ID NO: 307241 - DNA, 25 bp, Probe Sequence
tattacagcagtccatcttcagtcc

SEQ ID NO: 307242 - DNA, 25 bp, Probe Sequence
tatttagagttcactggttcagtct

SEQ ID NO: 307243 - DNA, 25 bp, Probe Sequence
tatattagacttattgtacctgttc

SEQ ID NO: 307244 - DNA, 25 bp, Probe Sequence
tatcttaactgcctttattcctttt

SEQ ID NO: 307245 - DNA, 25 bp, Probe Sequence
tatctgctgtaaggttctgttctta

SEQ ID NO: 307246 - DNA, 25 bp, Probe Sequence
tatcatctgtaggctcattcatttc

SEQ ID NO: 307247 - DNA, 25 bp, Probe Sequence
tatcatcttcacttcagacaattca

SEQ ID NO: 307248 - DNA, 25 bp, Probe Sequence
tatctgcctcaatttgaaactgacc

SEQ ID NO: 307249 - DNA, 25 bp, Probe Sequence
tatttccacatttaaactacctgtt

SEQ ID NO: 307250 - DNA, 25 bp, Probe Sequence
tatctatcaactataagcccactgt

SEQ ID NO: 307251 - DNA, 25 bp, Probe Sequence
tattacttgtgcatttgcctcacct

SEQ ID NO: 307252 - DNA, 25 bp, Probe Sequence
tattcagcattgcatcttctgtgcc

SEQ ID NO: 307253 - DNA, 25 bp, Probe Sequence
ttgctgcgactgccagtattgctgg

SEQ ID NO: 307254 - DNA, 25 bp, Probe Sequence
tatctgctatgggactattgctgtg

SEQ ID NO: 307255 - DNA, 25 bp, Probe Sequence
tatcttacgctatttctgttggtta

SEQ ID NO: 307256 - DNA, 25 bp, Probe Sequence
tatctgtctactttctcttgtttaa

SEQ ID NO: 307257 - DNA, 25 bp, Probe Sequence
tatctgttactcacataaaattata

SEQ ID NO: 307258 - DNA, 25 bp, Probe Sequence
tatcctgattttcatatcaaatgta

SEQ ID NO: 307259 - DNA, 25 bp, Probe Sequence
ttctatgaatttcgtacttattacc

SEQ ID NO: 307260 - DNA, 25 bp, Probe Sequence
tatcttctattcagtagtatttgca

SEQ ID NO: 307261 - DNA, 25 bp, Probe Sequence
tatcttgctttccctaggagttgaa

SEQ ID NO: 307262 - DNA, 25 bp, Probe Sequence
tatcttgttaactttgctggttaaa

SEQ ID NO: 307263 - DNA, 25 bp, Probe Sequence
tatcatctggtataccattgcttta

SEQ ID NO: 307264 - DNA, 25 bp, Probe Sequence
tatctcttgttatctgcatctcatt

SEQ ID NO: 307265 - DNA, 25 bp, Probe Sequence
tatctttctgtttatgaccagattt

SEQ ID NO: 307266 - DNA, 25 bp, Probe Sequence
tatctgctctctgttagatctcacc

SEQ ID NO: 307267 - DNA, 25 bp, Probe Sequence
tatctctcttatttagtcttccttc

SEQ ID NO: 307268 - DNA, 25 bp, Probe Sequence
tatcttctccattctagatgcttcc

SEQ ID NO: 307269 - DNA, 25 bp, Probe Sequence
tatcttgcatcctatatcatgtcaa

SEQ ID NO: 307270 - DNA, 25 bp, Probe Sequence
tatcttctcctgaactgttgatttt

SEQ ID NO: 307271 - DNA, 25 bp, Probe Sequence
tatctttctaatgcaattttgtatc

SEQ ID NO: 307272 - DNA, 25 bp, Probe Sequence
tatctttggaggggttttggtgtgg

SEQ ID NO: 307273 - DNA, 25 bp, Probe Sequence
tatctttgcgcatgggttgtttttt

SEQ ID NO: 307274 - DNA, 25 bp, Probe Sequence
tatttagagcactgtatttttgtct

SEQ ID NO: 307275 - DNA, 25 bp, Probe Sequence
tatagtagacacactatcatagtta

SEQ ID NO: 307276 - DNA, 25 bp, Probe Sequence
tatcttggacatacagtaattgttc

SEQ ID NO: 307277 - DNA, 25 bp, Probe Sequence
tatcctgttagaagtatttgttgta

SEQ ID NO: 307278 - DNA, 25 bp, Probe Sequence
tatcctgcccagtgttgtttgtaaa

SEQ ID NO: 307279 - DNA, 25 bp, Probe Sequence
tattggtacatgtgggcttttaaaa

SEQ ID NO: 307280 - DNA, 25 bp, Probe Sequence
tattgagctttgtgggactggtgga

SEQ ID NO: 307281 - DNA, 25 bp, Probe Sequence
tataagttttgacccgcagagtgca

SEQ ID NO: 307282 - DNA, 25 bp, Probe Sequence
tataagcgcttctcttcgcatagtc

SEQ ID NO: 307283 - DNA, 25 bp, Probe Sequence
tataagcgcttctcttcgcatagtc

SEQ ID NO: 307284 - DNA, 25 bp, Probe Sequence
tatataccgccatcttcagcaaacc

SEQ ID NO: 307285 - DNA, 25 bp, Probe Sequence
tatagaaagtcatttctcaaaattt

SEQ ID NO: 307286 - DNA, 25 bp, Probe Sequence
tatagcgagattctttctaaatgtt

SEQ ID NO: 307287 - DNA, 25 bp, Probe Sequence
tatactgcaagtcttttgatagatg

SEQ ID NO: 307288 - DNA, 25 bp, Probe Sequence
tatcctgcacctactttaatgatat

SEQ ID NO: 307289 - DNA, 25 bp, Probe Sequence
tatacacaacaggcatttaagcaat

SEQ ID NO: 307290 - DNA, 25 bp, Probe Sequence
tataacccagcgtatatcccatgat

SEQ ID NO: 307291 - DNA, 25 bp, Probe Sequence
tatactctccggacatgaaccataa

SEQ ID NO: 307292 - DNA, 25 bp, Probe Sequence
tatacatctcctccatctgaaacaa

SEQ ID NO: 307293 - DNA, 25 bp, Probe Sequence
tatacacatagttctgtaataaaac

SEQ ID NO: 307294 - DNA, 25 bp, Probe Sequence
tatagaaggctgtcttagtgcaaaa

SEQ ID NO: 307295 - DNA, 25 bp, Probe Sequence
tatcataagtcctccgtcagaaatt

SEQ ID NO: 307296 - DNA, 25 bp, Probe Sequence
tatcacggctggggcacgtcagcaa

SEQ ID NO: 307297 - DNA, 25 bp, Probe Sequence
tatacggcattcaagccttctgcaa

SEQ ID NO: 307298 - DNA, 25 bp, Probe Sequence
tatacatgagaaacagccttcaaca

SEQ ID NO: 307299 - DNA, 25 bp, Probe Sequence
tatacataatcacccttgtcacaaa

SEQ ID NO: 307300 - DNA, 25 bp, Probe Sequence
tatctcatgaatattcgtgcaaaaa

SEQ ID NO: 307301 - DNA, 25 bp, Probe Sequence
tatttctgtttgtcgataagaaatg

SEQ ID NO: 307302 - DNA, 25 bp, Probe Sequence
tatttctggtccccttggaaatgtc

SEQ ID NO: 307303 - DNA, 25 bp, Probe Sequence
tttgtccgtccactctacaaagttt

SEQ ID NO: 307304 - DNA, 25 bp, Probe Sequence
tttcgccgtcctataataggcttta

SEQ ID NO: 307305 - DNA, 25 bp, Probe Sequence
tttccccacttaaaatagtcctgct

SEQ ID NO: 307306 - DNA, 25 bp, Probe Sequence
tttccccacttaaaatagtcctgct

SEQ ID NO: 307307 - DNA, 25 bp, Probe Sequence
tttacccagttttaaagcccatcat

SEQ ID NO: 307308 - DNA, 25 bp, Probe Sequence
tttcccaaatgtcgtaacactccgc

SEQ ID NO: 307309 - DNA, 25 bp, Probe Sequence
ttccgccaaagtggcttcaaggccc

SEQ ID NO: 307310 - DNA, 25 bp, Probe Sequence
ttgcgggccagagtgagttccgggt

SEQ ID NO: 307311 - DNA, 25 bp, Probe Sequence
tatcgtggccaggcggtactgcaga

SEQ ID NO: 307312 - DNA, 25 bp, Probe Sequence
tatcagctccctgcgagatgacgag

SEQ ID NO: 307313 - DNA, 25 bp, Probe Sequence
tatcatgccaactactgcgagggtg

SEQ ID NO: 307314 - DNA, 25 bp, Probe Sequence
tatcattcagtctgtgcaacggatt

SEQ ID NO: 307315 - DNA, 25 bp, Probe Sequence
tattttatcatgagcaaaggatttc

SEQ ID NO: 307316 - DNA, 25 bp, Probe Sequence
tatatcttcatcagtgacgaggtat

SEQ ID NO: 307317 - DNA, 25 bp, Probe Sequence
tatatcctcatccaacaggctttat

SEQ ID NO: 307318 - DNA, 25 bp, Probe Sequence
tatacctggtgttctggcatgatta

SEQ ID NO: 307319 - DNA, 25 bp, Probe Sequence
tataccatggtgatgcgttttgcag

SEQ ID NO: 307320 - DNA, 25 bp, Probe Sequence
tatagcctgggaagttctgttgctg

SEQ ID NO: 307321 - DNA, 25 bp, Probe Sequence
tatacttgtttatcttgttgctgca

SEQ ID NO: 307322 - DNA, 25 bp, Probe Sequence
tatacttttccattgccgaattcag

SEQ ID NO: 307323 - DNA, 25 bp, Probe Sequence
tataaatagcccacctgaactcatg

SEQ ID NO: 307324 - DNA, 25 bp, Probe Sequence
tttgaacaactttccgaatctgcaa

SEQ ID NO: 307325 - DNA, 25 bp, Probe Sequence
tatataagaaatctctctacttgaa

SEQ ID NO: 307326 - DNA, 25 bp, Probe Sequence
tatctagaaaacccatcgactcagc

SEQ ID NO: 307327 - DNA, 25 bp, Probe Sequence
tatctatgacattcgggccagacct

SEQ ID NO: 307328 - DNA, 25 bp, Probe Sequence
tatatatgtcttgtgtgcgtgtcct

SEQ ID NO: 307329 - DNA, 25 bp, Probe Sequence
tatagagtaatatttgagctgtgtt

SEQ ID NO: 307330 - DNA, 25 bp, Probe Sequence
tatcagagttgttagaagctgttct

SEQ ID NO: 307331 - DNA, 25 bp, Probe Sequence
tataatgtttatttagccattctta

SEQ ID NO: 307332 - DNA, 25 bp, Probe Sequence
tatacagtttaataagcctcttgca

SEQ ID NO: 307333 - DNA, 25 bp, Probe Sequence
tataaatttttatcagcacatagta

SEQ ID NO: 307334 - DNA, 25 bp, Probe Sequence
tataaattgtatgcttcagaaataa

SEQ ID NO: 307335 - DNA, 25 bp, Probe Sequence
tataatatttacctcttaccagctc

SEQ ID NO: 307336 - DNA, 25 bp, Probe Sequence
tataataaatcacctcttccgctgt

SEQ ID NO: 307337 - DNA, 25 bp, Probe Sequence
tataattatcaccgtttctgctctg

SEQ ID NO: 307338 - DNA, 25 bp, Probe Sequence
tataagaaagctcttctgctgctct

SEQ ID NO: 307339 - DNA, 25 bp, Probe Sequence
tatcaggggatgtacatctctccct

SEQ ID NO: 307340 - DNA, 25 bp, Probe Sequence
tattggggatctgcattccccgctg

SEQ ID NO: 307341 - DNA, 25 bp, Probe Sequence
tttgatgtggactcaaagcccctga

SEQ ID NO: 307342 - DNA, 25 bp, Probe Sequence
tttgagtgatcctccaacttcattt

SEQ ID NO: 307343 - DNA, 25 bp, Probe Sequence
tatctggtatcctggcacaataatt

SEQ ID NO: 307344 - DNA, 25 bp, Probe Sequence
tatcttgttctctgatcataaacct

SEQ ID NO: 307345 - DNA, 25 bp, Probe Sequence
tatcttttcagcagtatatatgtgc

SEQ ID NO: 307346 - DNA, 25 bp, Probe Sequence
tatcttttcatcatgtctatagttc

SEQ ID NO: 307347 - DNA, 25 bp, Probe Sequence
tatcttctccacatctgaaattcct

SEQ ID NO: 307348 - DNA, 25 bp, Probe Sequence
ttctttggaaactcacactcgctta

SEQ ID NO: 307349 - DNA, 25 bp, Probe Sequence
tttacggaaactggcccacttggca

SEQ ID NO: 307350 - DNA, 25 bp, Probe Sequence
ttggatgtcgggttcgaccacttgg

SEQ ID NO: 307351 - DNA, 25 bp, Probe Sequence
tattgcatgggggtaccccaatctg

SEQ ID NO: 307352 - DNA, 25 bp, Probe Sequence
tattcttcgattatctcctaagtga

SEQ ID NO: 307353 - DNA, 25 bp, Probe Sequence
tattatccagggaatgtcactacgg

SEQ ID NO: 307354 - DNA, 25 bp, Probe Sequence
tatattccagcttgggtgacagagc

SEQ ID NO: 307355 - DNA, 25 bp, Probe Sequence
tatatacataagtgagctgacatgg

SEQ ID NO: 307356 - DNA, 25 bp, Probe Sequence
tataggcaaaatggactacattaaa

SEQ ID NO: 307357 - DNA, 25 bp, Probe Sequence
tatattaaagttgctgcagttaaaa

SEQ ID NO: 307358 - DNA, 25 bp, Probe Sequence
tattaacctggtgtgtgtcaaaaaa

SEQ ID NO: 307359 - DNA, 25 bp, Probe Sequence
tatttactaactgttctaaaaagct

SEQ ID NO: 307360 - DNA, 25 bp, Probe Sequence
tatttgtctgccgcttttaaaaaat

SEQ ID NO: 307361 - DNA, 25 bp, Probe Sequence
tattattgccatcatgctttaggaa

SEQ ID NO: 307362 - DNA, 25 bp, Probe Sequence
tatctttgccagttggagtgctgga

SEQ ID NO: 307363 - DNA, 25 bp, Probe Sequence
tatcttatgttgtcttgaggccaag

SEQ ID NO: 307364 - DNA, 25 bp, Probe Sequence
tatctttgactggttgggccggagc

SEQ ID NO: 307365 - DNA, 25 bp, Probe Sequence
tatctctctgggacctagggggacg

SEQ ID NO: 307366 - DNA, 25 bp, Probe Sequence
tatatactgggtgcttaggtggaaa

SEQ ID NO: 307367 - DNA, 25 bp, Probe Sequence
tatatcacgtggtttgtattggaga

SEQ ID NO: 307368 - DNA, 25 bp, Probe Sequence
tatcaccgaggcctcttggtggacc

SEQ ID NO: 307369 - DNA, 25 bp, Probe Sequence
tatacccggcaaattatgtggaggc

SEQ ID NO: 307370 - DNA, 25 bp, Probe Sequence
tataccatcggagaagtgggcaggg

SEQ ID NO: 307371 - DNA, 25 bp, Probe Sequence
tatatctacggacctacgtctcagg

SEQ ID NO: 307372 - DNA, 25 bp, Probe Sequence
tatattttggccttacaataccgta

SEQ ID NO: 307373 - DNA, 25 bp, Probe Sequence
tattcttactccttaccttcaagta

SEQ ID NO: 307374 - DNA, 25 bp, Probe Sequence
tatatttgttcacttgagtcttaag

SEQ ID NO: 307375 - DNA, 25 bp, Probe Sequence
tatagtgtgtcctttattctaaaca

SEQ ID NO: 307376 - DNA, 25 bp, Probe Sequence
tataggcagctcatagtgttaaaat

SEQ ID NO: 307377 - DNA, 25 bp, Probe Sequence
tatcacagtcctgcctctgtaaaat

SEQ ID NO: 307378 - DNA, 25 bp, Probe Sequence
tatcagctgatcgcccgtgtagaag

SEQ ID NO: 307379 - DNA, 25 bp, Probe Sequence
tatcagctgatcgcccgtgtagaag

SEQ ID NO: 307380 - DNA, 25 bp, Probe Sequence
tatcagctgatcgcccgtgtagaag

SEQ ID NO: 307381 - DNA, 25 bp, Probe Sequence
tatcactgttgacccttgtggaaga

SEQ ID NO: 307382 - DNA, 25 bp, Probe Sequence
tatcaccttagcaacttagaatagt

SEQ ID NO: 307383 - DNA, 25 bp, Probe Sequence
tatacgcttcagatcatgttgctta

SEQ ID NO: 307384 - DNA, 25 bp, Probe Sequence
tataaatatcagcttgttcatccaa

SEQ ID NO: 307385 - DNA, 25 bp, Probe Sequence
tataactcacatcttgttgtccacc

SEQ ID NO: 307386 - DNA, 25 bp, Probe Sequence
tataatcatccatcaagtcttccac

SEQ ID NO: 307387 - DNA, 25 bp, Probe Sequence
tattatcctccaatcagttctacac

SEQ ID NO: 307388 - DNA, 25 bp, Probe Sequence
tatttgagcccaactgcttggacgc

SEQ ID NO: 307389 - DNA, 25 bp, Probe Sequence
tatttgagcccaactgcttggacgc

SEQ ID NO: 307390 - DNA, 25 bp, Probe Sequence
tatttgacaccagctgagcactacc

SEQ ID NO: 307391 - DNA, 25 bp, Probe Sequence
tatatttgacaccagctgagcacta

SEQ ID NO: 307392 - DNA, 25 bp, Probe Sequence
tattatgtgacaaccatgcaggctc

SEQ ID NO: 307393 - DNA, 25 bp, Probe Sequence
tatacgagaacgccatgattgctgc

SEQ ID NO: 307394 - DNA, 25 bp, Probe Sequence
tatactagaatcatggattgctgga

SEQ ID NO: 307395 - DNA, 25 bp, Probe Sequence
tatactagtcatgatgtgtgttgta

SEQ ID NO: 307396 - DNA, 25 bp, Probe Sequence
tatagatcagatggccagtagtggt

SEQ ID NO: 307397 - DNA, 25 bp, Probe Sequence
tatatacagcagtcagagatgagta

SEQ ID NO: 307398 - DNA, 25 bp, Probe Sequence
ttatcaagtgtcaagatcagcaagt

SEQ ID NO: 307399 - DNA, 25 bp, Probe Sequence
ttgcaataattggcagatgcccact

SEQ ID NO: 307400 - DNA, 25 bp, Probe Sequence
tatagatatattccaagccgcctga

SEQ ID NO: 307401 - DNA, 25 bp, Probe Sequence
tataaaatatccaccctctaggaaa

SEQ ID NO: 307402 - DNA, 25 bp, Probe Sequence
ttcttaagacaccccctgtaggaat

SEQ ID NO: 307403 - DNA, 25 bp, Probe Sequence
ttctgaaggtcctccctaagagtct

SEQ ID NO: 307404 - DNA, 25 bp, Probe Sequence
tatttgggctctctcccataagact

SEQ ID NO: 307405 - DNA, 25 bp, Probe Sequence
tatttgtgacttccttcagcaaata

SEQ ID NO: 307406 - DNA, 25 bp, Probe Sequence
tatactggctctatcttgcacaagt

SEQ ID NO: 307407 - DNA, 25 bp, Probe Sequence
tatactgtctctgtttgcatcattc

SEQ ID NO: 307408 - DNA, 25 bp, Probe Sequence
tatactggactctttcaacttctct

SEQ ID NO: 307409 - DNA, 25 bp, Probe Sequence
tatactccagctgcttaacttcatt

SEQ ID NO: 307410 - DNA, 25 bp, Probe Sequence
tataatccagcatcttttattgcat

SEQ ID NO: 307411 - DNA, 25 bp, Probe Sequence
tataactcaggcgtctttgcatttc

SEQ ID NO: 307412 - DNA, 25 bp, Probe Sequence
tattacatctatccacttctgtttc

SEQ ID NO: 307413 - DNA, 25 bp, Probe Sequence
tataatgctcttggcctcttttttg

SEQ ID NO: 307414 - DNA, 25 bp, Probe Sequence
tatactgcttgtgccatctgtgtac

SEQ ID NO: 307415 - DNA, 25 bp, Probe Sequence
tataagcattcccctctgtgtatgc

SEQ ID NO: 307416 - DNA, 25 bp, Probe Sequence
tataggaatcctcttttagccaaaa

SEQ ID NO: 307417 - DNA, 25 bp, Probe Sequence
tataggagtcttcctttttacataa

SEQ ID NO: 307418 - DNA, 25 bp, Probe Sequence
tatagtagtggccttgttttacaaa

SEQ ID NO: 307419 - DNA, 25 bp, Probe Sequence
tatagttgtgtacgtgttattccaa

SEQ ID NO: 307420 - DNA, 25 bp, Probe Sequence
tatctcctgtctacagtttaataaa

SEQ ID NO: 307421 - DNA, 25 bp, Probe Sequence
tataaatgtcccttgttacataaac

SEQ ID NO: 307422 - DNA, 25 bp, Probe Sequence
tattagtgtccctggcccaatgata

SEQ ID NO: 307423 - DNA, 25 bp, Probe Sequence
tttgaggttccttgtacgattgtag

SEQ ID NO: 307424 - DNA, 25 bp, Probe Sequence
tttgtggttcatgaggactttgcct

SEQ ID NO: 307425 - DNA, 25 bp, Probe Sequence
ttgtgggactgctggttttggccat

SEQ ID NO: 307426 - DNA, 25 bp, Probe Sequence
tttgggagtctaaatatttggaatt

SEQ ID NO: 307427 - DNA, 25 bp, Probe Sequence
tatacggactcttcagatttacaga

SEQ ID NO: 307428 - DNA, 25 bp, Probe Sequence
tataaggcacctacagaaaaccatt

SEQ ID NO: 307429 - DNA, 25 bp, Probe Sequence
tatacggacgtgaaaagaacctaga

SEQ ID NO: 307430 - DNA, 25 bp, Probe Sequence
tattccgacggaaagaaccattatg

SEQ ID NO: 307431 - DNA, 25 bp, Probe Sequence
tttgacgacgaaaacacagcccagt

SEQ ID NO: 307432 - DNA, 25 bp, Probe Sequence
ttcgatcggggaaacagacctagat

SEQ ID NO: 307433 - DNA, 25 bp, Probe Sequence
ttttcgggtccaaaatctcatgaat

SEQ ID NO: 307434 - DNA, 25 bp, Probe Sequence
ttagtcctggataaataccttacat

SEQ ID NO: 307435 - DNA, 25 bp, Probe Sequence
tatatgggcttgctacttcctgtaa

SEQ ID NO: 307436 - DNA, 25 bp, Probe Sequence
tatcagggcttccacacacttattt

SEQ ID NO: 307437 - DNA, 25 bp, Probe Sequence
tatagaggctacaaccacatttgtt

SEQ ID NO: 307438 - DNA, 25 bp, Probe Sequence
tatatgtggttcacccatttgtccc

SEQ ID NO: 307439 - DNA, 25 bp, Probe Sequence
tatttagatctttccatttttctcc

SEQ ID NO: 307440 - DNA, 25 bp, Probe Sequence
tatttatgttttcaccctttctact

SEQ ID NO: 307441 - DNA, 25 bp, Probe Sequence
tattaatcttttgtcaacttcctga

SEQ ID NO: 307442 - DNA, 25 bp, Probe Sequence
tattactcttttttataccctctat

SEQ ID NO: 307443 - DNA, 25 bp, Probe Sequence
tattactaagttttacctaatattg

SEQ ID NO: 307444 - DNA, 25 bp, Probe Sequence
tatctattagagttttacattgttg

SEQ ID NO: 307445 - DNA, 25 bp, Probe Sequence
tatcttctcatgattttatatctct

SEQ ID NO: 307446 - DNA, 25 bp, Probe Sequence
tatcttggctattttgaataatgct

SEQ ID NO: 307447 - DNA, 25 bp, Probe Sequence
tatttggttattagtagcatttaca

SEQ ID NO: 307448 - DNA, 25 bp, Probe Sequence
tattaggggagtagagccagttaac

SEQ ID NO: 307449 - DNA, 25 bp, Probe Sequence
tttagtggggttggccccatgaagt

SEQ ID NO: 307450 - DNA, 25 bp, Probe Sequence
tatatatgcatgtgtttaaaccaaa

SEQ ID NO: 307451 - DNA, 25 bp, Probe Sequence
tatatgatgtggctttaatacgtga

SEQ ID NO: 307452 - DNA, 25 bp, Probe Sequence
tattgcagtatcctttaaaagcaaa

SEQ ID NO: 307453 - DNA, 25 bp, Probe Sequence
tatctcatgtattttcacaaccagg

SEQ ID NO: 307454 - DNA, 25 bp, Probe Sequence
tattaggatctctccaactcgagcc

SEQ ID NO: 307455 - DNA, 25 bp, Probe Sequence
tatatgggattctctggaaacagca

SEQ ID NO: 307456 - DNA, 25 bp, Probe Sequence
tatcatgggatactttgctggaaaa

SEQ ID NO: 307457 - DNA, 25 bp, Probe Sequence
tatattgcatatacactggctggaa

SEQ ID NO: 307458 - DNA, 25 bp, Probe Sequence
tatattgcataggacagacttagga

SEQ ID NO: 307459 - DNA, 25 bp, Probe Sequence
tattttaggaacattattgagcccc

SEQ ID NO: 307460 - DNA, 25 bp, Probe Sequence
tattttagctgcacggcattacccc

SEQ ID NO: 307461 - DNA, 25 bp, Probe Sequence
tattattcacgagcgaattcatact

SEQ ID NO: 307462 - DNA, 25 bp, Probe Sequence
tatatttcactagaactgtgtactt

SEQ ID NO: 307463 - DNA, 25 bp, Probe Sequence
tattttcaatatgcaagttaggctt

SEQ ID NO: 307464 - DNA, 25 bp, Probe Sequence
tattactgatttgaccttacctact

SEQ ID NO: 307465 - DNA, 25 bp, Probe Sequence
tattatcctgtacacttatccctac

SEQ ID NO: 307466 - DNA, 25 bp, Probe Sequence
tatacacctgttcatttctacttaa

SEQ ID NO: 307467 - DNA, 25 bp, Probe Sequence
tattacctttaaatgtaactggact

SEQ ID NO: 307468 - DNA, 25 bp, Probe Sequence
tattcctatttcacgttcacatgga

SEQ ID NO: 307469 - DNA, 25 bp, Probe Sequence
tattttatttctaggttcaccagtt

SEQ ID NO: 307470 - DNA, 25 bp, Probe Sequence
ttcaaaattttacactagtcagttc

SEQ ID NO: 307471 - DNA, 25 bp, Probe Sequence
tttagacatttttcgacatcagggt

SEQ ID NO: 307472 - DNA, 25 bp, Probe Sequence
tattagaagagtcccatgaaaggtg

SEQ ID NO: 307473 - DNA, 25 bp, Probe Sequence
tatataggaggccccaaaccgtgca

SEQ ID NO: 307474 - DNA, 25 bp, Probe Sequence
ttataggaattacaaacacagttga

SEQ ID NO: 307475 - DNA, 25 bp, Probe Sequence
ttcttagagggacaagtggcgttca

SEQ ID NO: 307476 - DNA, 25 bp, Probe Sequence
ttttagggttgtgactggctttggt

SEQ ID NO: 307477 - DNA, 25 bp, Probe Sequence
tattttgatggtcagtactggctct

SEQ ID NO: 307478 - DNA, 25 bp, Probe Sequence
tattagtaggtagttcctgttttat

SEQ ID NO: 307479 - DNA, 25 bp, Probe Sequence
ttttccaggctggttcggatttggg

SEQ ID NO: 307480 - DNA, 25 bp, Probe Sequence
tattaccatggtgatcgcggttttg

SEQ ID NO: 307481 - DNA, 25 bp, Probe Sequence
tattaccatggtgatgcggtttggc

SEQ ID NO: 307482 - DNA, 25 bp, Probe Sequence
tataaaatggtgtagcttttctgga

SEQ ID NO: 307483 - DNA, 25 bp, Probe Sequence
tataaattggtatacatgtgtctct

SEQ ID NO: 307484 - DNA, 25 bp, Probe Sequence
tataactactgtttccatgtcccat

SEQ ID NO: 307485 - DNA, 25 bp, Probe Sequence
tatagacagcacatttctagtcaaa

SEQ ID NO: 307486 - DNA, 25 bp, Probe Sequence
tatagaatccatttgtcatcaggaa

SEQ ID NO: 307487 - DNA, 25 bp, Probe Sequence
tatagcatattctttatcttggata

SEQ ID NO: 307488 - DNA, 25 bp, Probe Sequence
tatattgatatgtattacacttaca

SEQ ID NO: 307489 - DNA, 25 bp, Probe Sequence
tataatgatctctttcgcagttaaa

SEQ ID NO: 307490 - DNA, 25 bp, Probe Sequence
tataatgatctcttttgcagttaga

SEQ ID NO: 307491 - DNA, 25 bp, Probe Sequence
ttcttacccgttgttaggggcgcag

SEQ ID NO: 307492 - DNA, 25 bp, Probe Sequence
ttcttccccgtgggttgttggtgag

SEQ ID NO: 307493 - DNA, 25 bp, Probe Sequence
ttcttccccgtgattatggggctag

SEQ ID NO: 307494 - DNA, 25 bp, Probe Sequence
tattcttccgcggagttaagggctc

SEQ ID NO: 307495 - DNA, 25 bp, Probe Sequence
tattcttccaccagttgtggcgtcc

SEQ ID NO: 307496 - DNA, 25 bp, Probe Sequence
tatttacttcctctagtgaatgtcc

SEQ ID NO: 307497 - DNA, 25 bp, Probe Sequence
tattccctaccttatagaagcagac

SEQ ID NO: 307498 - DNA, 25 bp, Probe Sequence
tttccaaacgtattgagcaacaaaa

SEQ ID NO: 307499 - DNA, 25 bp, Probe Sequence
ttacgacaaagattaataaccagaa

SEQ ID NO: 307500 - DNA, 25 bp, Probe Sequence
ttagggaccagaccagacaacctgc

SEQ ID NO: 307501 - DNA, 25 bp, Probe Sequence
ttagtgcgggtatagacacccccaa

SEQ ID NO: 307502 - DNA, 25 bp, Probe Sequence
tataggacaagaaaaaccccaccat

SEQ ID NO: 307503 - DNA, 25 bp, Probe Sequence
ttggttcaaattctacctccaccac

SEQ ID NO: 307504 - DNA, 25 bp, Probe Sequence
ttggtgtacactcaaaacctgtccc

SEQ ID NO: 307505 - DNA, 25 bp, Probe Sequence
ttgagtcagaccagtaagcccgtcc

SEQ ID NO: 307506 - DNA, 25 bp, Probe Sequence
tatagacattctcacataagcccag

SEQ ID NO: 307507 - DNA, 25 bp, Probe Sequence
tatattttgcatcttaacacaatgc

SEQ ID NO: 307508 - DNA, 25 bp, Probe Sequence
tataatttgctagtcatcccctatg

SEQ ID NO: 307509 - DNA, 25 bp, Probe Sequence
tataatctatatgctgcacccactt

SEQ ID NO: 307510 - DNA, 25 bp, Probe Sequence
tataatgcatatttcttctcagttt

SEQ ID NO: 307511 - DNA, 25 bp, Probe Sequence
tataatgcataattgatgttttcgt

SEQ ID NO: 307512 - DNA, 25 bp, Probe Sequence
tatacagcatagtggagttttgtgt

SEQ ID NO: 307513 - DNA, 25 bp, Probe Sequence
tatcagccacagtctctgcatgttt

SEQ ID NO: 307514 - DNA, 25 bp, Probe Sequence
tatcagtagcagtattgttacttct

SEQ ID NO: 307515 - DNA, 25 bp, Probe Sequence
tatagcaaagacattaatgcttctt

SEQ ID NO: 307516 - DNA, 25 bp, Probe Sequence
tatcagaaagtgccttcggctactt

SEQ ID NO: 307517 - DNA, 25 bp, Probe Sequence
tatagaatagtgcatttccttctgt

SEQ ID NO: 307518 - DNA, 25 bp, Probe Sequence
tatacatatttgcatcctgactagg

SEQ ID NO: 307519 - DNA, 25 bp, Probe Sequence
tatagtctgtcttacccaatgaggc

SEQ ID NO: 307520 - DNA, 25 bp, Probe Sequence
tatagtggtctagtgacgcaatata

SEQ ID NO: 307521 - DNA, 25 bp, Probe Sequence
tataggtgtttccacatgaattaat

SEQ ID NO: 307522 - DNA, 25 bp, Probe Sequence
tatatcgtgtatccgaaaattgcta

SEQ ID NO: 307523 - DNA, 25 bp, Probe Sequence
tatatcctcaaggtagaaatgtcta

SEQ ID NO: 307524 - DNA, 25 bp, Probe Sequence
tatcatcctataaagagaacggtat

SEQ ID NO: 307525 - DNA, 25 bp, Probe Sequence
tatcattctttttgagatacgttta

SEQ ID NO: 307526 - DNA, 25 bp, Probe Sequence
tatactatgttaatgtctgactgtt

SEQ ID NO: 307527 - DNA, 25 bp, Probe Sequence
tatcttgttttcactgacgtgatca

SEQ ID NO: 307528 - DNA, 25 bp, Probe Sequence
tatattctttgaatcctagcccatc

SEQ ID NO: 307529 - DNA, 25 bp, Probe Sequence
tatatttttcctggtatgctctact

SEQ ID NO: 307530 - DNA, 25 bp, Probe Sequence
tatcatttgctaccagtttctttct

SEQ ID NO: 307531 - DNA, 25 bp, Probe Sequence
tatcatgtgattttttttttcctcc

SEQ ID NO: 307532 - DNA, 25 bp, Probe Sequence
tatatgctcttagtaggtttttttc

SEQ ID NO: 307533 - DNA, 25 bp, Probe Sequence
tatattgttttatgttttcttgttt

SEQ ID NO: 307534 - DNA, 25 bp, Probe Sequence
tatattcttaactggactgtctcgt

SEQ ID NO: 307535 - DNA, 25 bp, Probe Sequence
tatatctggaaagcggtctgcccct

SEQ ID NO: 307536 - DNA, 25 bp, Probe Sequence
tatatctggaaagcggtctgcccct

SEQ ID NO: 307537 - DNA, 25 bp, Probe Sequence
tattctggaattgctactcctccac

SEQ ID NO: 307538 - DNA, 25 bp, Probe Sequence
tatcatttgaatggaatttccccaa

SEQ ID NO: 307539 - DNA, 25 bp, Probe Sequence
tatcattattaccacattttcaaaa

SEQ ID NO: 307540 - DNA, 25 bp, Probe Sequence
tttgtttcagctgttcccaaaggcc

SEQ ID NO: 307541 - DNA, 25 bp, Probe Sequence
tttgtttagtaaatcccttcagtat

SEQ ID NO: 307542 - DNA, 25 bp, Probe Sequence
tatcagtttagtttaaccctacatt

SEQ ID NO: 307543 - DNA, 25 bp, Probe Sequence
tatagtgttatttgtttcaccttca

SEQ ID NO: 307544 - DNA, 25 bp, Probe Sequence
tatagttttttctttcccatgtatt

SEQ ID NO: 307545 - DNA, 25 bp, Probe Sequence
tatcagattctttcttttcgacttt

SEQ ID NO: 307546 - DNA, 25 bp, Probe Sequence
tatcaatcttttcttcagcggttct

SEQ ID NO: 307547 - DNA, 25 bp, Probe Sequence
tataatattcgtctccctggagtta

SEQ ID NO: 307548 - DNA, 25 bp, Probe Sequence
tttggttcagctctctactggagtt

SEQ ID NO: 307549 - DNA, 25 bp, Probe Sequence
tttcacttgggcactgactgtagga

SEQ ID NO: 307550 - DNA, 25 bp, Probe Sequence
tttttggcacggggactgatcagga

SEQ ID NO: 307551 - DNA, 25 bp, Probe Sequence
tatatattgatgtgactttctgaca

SEQ ID NO: 307552 - DNA, 25 bp, Probe Sequence
tatagaggatggtactgttttcata

SEQ ID NO: 307553 - DNA, 25 bp, Probe Sequence
tatagtggactcgactgctttctaa

SEQ ID NO: 307554 - DNA, 25 bp, Probe Sequence
tatagtggcgcacaagcgctctgcg

SEQ ID NO: 307555 - DNA, 25 bp, Probe Sequence
tatcatgatacccccaggatcttga

SEQ ID NO: 307556 - DNA, 25 bp, Probe Sequence
tatagtcttaatgcaggatctctga

SEQ ID NO: 307557 - DNA, 25 bp, Probe Sequence
tatatttatattgcagtatccttta

SEQ ID NO: 307558 - DNA, 25 bp, Probe Sequence
tatattgctattgtaaattcttgtt

SEQ ID NO: 307559 - DNA, 25 bp, Probe Sequence
tatatatcaagggtaggggactgtt

SEQ ID NO: 307560 - DNA, 25 bp, Probe Sequence
tatttcggggtagtgtgagctttta

SEQ ID NO: 307561 - DNA, 25 bp, Probe Sequence
tatacttcaggttagttagtttttg

SEQ ID NO: 307562 - DNA, 25 bp, Probe Sequence
tatacttttgcttggttcatttttt

SEQ ID NO: 307563 - DNA, 25 bp, Probe Sequence
tataatttctgcttgagtatggtgt

SEQ ID NO: 307564 - DNA, 25 bp, Probe Sequence
tataatttctgtttgcttgtgctgt

SEQ ID NO: 307565 - DNA, 25 bp, Probe Sequence
tataagtattggtttgggtgttcct

SEQ ID NO: 307566 - DNA, 25 bp, Probe Sequence
tatcacagttagcagtggggttttt

SEQ ID NO: 307567 - DNA, 25 bp, Probe Sequence
tatcacagagttttgggtttatttt

SEQ ID NO: 307568 - DNA, 25 bp, Probe Sequence
tataaatgtgtgcctatggtttttt

SEQ ID NO: 307569 - DNA, 25 bp, Probe Sequence
tataaacttgaagtggttgtgttgt

SEQ ID NO: 307570 - DNA, 25 bp, Probe Sequence
tatcatgaagtttccagggcctttg

SEQ ID NO: 307571 - DNA, 25 bp, Probe Sequence
tataagagttatgttagccaggtgc

SEQ ID NO: 307572 - DNA, 25 bp, Probe Sequence
tttccaatttaattaccggctgttg

SEQ ID NO: 307573 - DNA, 25 bp, Probe Sequence
ttgcccaggttggagtgcaccgggc

SEQ ID NO: 307574 - DNA, 25 bp, Probe Sequence
ttcccagagactcttgacaccggtc

SEQ ID NO: 307575 - DNA, 25 bp, Probe Sequence
ttaggggatgccgctgacatccggt

SEQ ID NO: 307576 - DNA, 25 bp, Probe Sequence
ttaggggatgccgctgacatccggt

SEQ ID NO: 307577 - DNA, 25 bp, Probe Sequence
ttaggggatgccgctgacatccggt

SEQ ID NO: 307578 - DNA, 25 bp, Probe Sequence
ttagggtatgatctcggtcacgtgt

SEQ ID NO: 307579 - DNA, 25 bp, Probe Sequence
tttgggttgatgtgggtagggtagt

SEQ ID NO: 307580 - DNA, 25 bp, Probe Sequence
tttggctggccactgagggtagggt

SEQ ID NO: 307581 - DNA, 25 bp, Probe Sequence
tttggggacttgtagggatgccttt

SEQ ID NO: 307582 - DNA, 25 bp, Probe Sequence
tattgggcgcctggtcaccagggct

SEQ ID NO: 307583 - DNA, 25 bp, Probe Sequence
tttggggcattcatcccatctactt

SEQ ID NO: 307584 - DNA, 25 bp, Probe Sequence
tattggttttcctcactaatctttt

SEQ ID NO: 307585 - DNA, 25 bp, Probe Sequence
tattgcttttagtcatgtccaaatt

SEQ ID NO: 307586 - DNA, 25 bp, Probe Sequence
tatatgcatgtgtttaaaccaaatc

SEQ ID NO: 307587 - DNA, 25 bp, Probe Sequence
tatagcgtgtgtgcaaactcttgag

SEQ ID NO: 307588 - DNA, 25 bp, Probe Sequence
tatagcgtgtgtgcaaactcttgag

SEQ ID NO: 307589 - DNA, 25 bp, Probe Sequence
tatagcgtgtgtgcaaactcttgag

SEQ ID NO: 307590 - DNA, 25 bp, Probe Sequence
tatactgggtaatttcctctgagga

SEQ ID NO: 307591 - DNA, 25 bp, Probe Sequence
ttactaggtcaagatctagcgataa

SEQ ID NO: 307592 - DNA, 25 bp, Probe Sequence
ttagtaatacaaaatctggccaaaa

SEQ ID NO: 307593 - DNA, 25 bp, Probe Sequence
tatagggcacaaacaattgaccata

SEQ ID NO: 307594 - DNA, 25 bp, Probe Sequence
tatcagtgcactgaaatcattttca

SEQ ID NO: 307595 - DNA, 25 bp, Probe Sequence
tatattcccaaattcatatttcaga

SEQ ID NO: 307596 - DNA, 25 bp, Probe Sequence
tatatacctcaagttcaagttaatg

SEQ ID NO: 307597 - DNA, 25 bp, Probe Sequence
tattcacagccctatttacttacat

SEQ ID NO: 307598 - DNA, 25 bp, Probe Sequence
tatatcacaaccagtctgaagtatc

SEQ ID NO: 307599 - DNA, 25 bp, Probe Sequence
tatacacaaccaagtgaaaggatta

SEQ ID NO: 307600 - DNA, 25 bp, Probe Sequence
tattcacacacattcaggaacctgt

SEQ ID NO: 307601 - DNA, 25 bp, Probe Sequence
tttctgcacactccagacaaacttc

SEQ ID NO: 307602 - DNA, 25 bp, Probe Sequence
tatattcacagctgggcacaacttc

SEQ ID NO: 307603 - DNA, 25 bp, Probe Sequence
tatattctcagcctctgagcagccc

SEQ ID NO: 307604 - DNA, 25 bp, Probe Sequence
tatatatcccagtctgacagttcaa

SEQ ID NO: 307605 - DNA, 25 bp, Probe Sequence
tattaacgcgttcgcagttgcagcg

SEQ ID NO: 307606 - DNA, 25 bp, Probe Sequence
tttaacgaggatccattggagggca

SEQ ID NO: 307607 - DNA, 25 bp, Probe Sequence
tataaaggcaggtatttcgggccct

SEQ ID NO: 307608 - DNA, 25 bp, Probe Sequence
tatataaggaattttccggtctctt

SEQ ID NO: 307609 - DNA, 25 bp, Probe Sequence
tattagcagcggttattcggtgagc

SEQ ID NO: 307610 - DNA, 25 bp, Probe Sequence
tattcagcctaactatcctgcggca

SEQ ID NO: 307611 - DNA, 25 bp, Probe Sequence
tattacctaaatattgccacactat

SEQ ID NO: 307612 - DNA, 25 bp, Probe Sequence
tattactaactcttacgccaacttc

SEQ ID NO: 307613 - DNA, 25 bp, Probe Sequence
tattttgtcaccaagaccctacttc

SEQ ID NO: 307614 - DNA, 25 bp, Probe Sequence
tattttaaagcatataccatacact

SEQ ID NO: 307615 - DNA, 25 bp, Probe Sequence
tttttcctagagtcaaccaaagatc

SEQ ID NO: 307616 - DNA, 25 bp, Probe Sequence
tttaaactcaagcaggccaaaacca

SEQ ID NO: 307617 - DNA, 25 bp, Probe Sequence
tttgattcctcccgggacagaaaca

SEQ ID NO: 307618 - DNA, 25 bp, Probe Sequence
tttgattcctcccgggacagaaaca

SEQ ID NO: 307619 - DNA, 25 bp, Probe Sequence
ttattacctcctagggccaggaagc

SEQ ID NO: 307620 - DNA, 25 bp, Probe Sequence
ttatggtcctagaggtggcaagaag

SEQ ID NO: 307621 - DNA, 25 bp, Probe Sequence
tattggggggatgggtagagtggga

SEQ ID NO: 307622 - DNA, 25 bp, Probe Sequence
tattcgggagtctgagtatagagag

SEQ ID NO: 307623 - DNA, 25 bp, Probe Sequence
tatacgaggccccacaggaggagaa

SEQ ID NO: 307624 - DNA, 25 bp, Probe Sequence
tatacgagccttcacgcataagagg

SEQ ID NO: 307625 - DNA, 25 bp, Probe Sequence
tattcggccttcacgcataaaggca

SEQ ID NO: 307626 - DNA, 25 bp, Probe Sequence
tttggagctttctcagggtagagca

SEQ ID NO: 307627 - DNA, 25 bp, Probe Sequence
tatttactttgcttcgtgtgtgggc

SEQ ID NO: 307628 - DNA, 25 bp, Probe Sequence
tatttcctgttcacttgtgcatggg

SEQ ID NO: 307629 - DNA, 25 bp, Probe Sequence
tatttgcctttacctcatatgagtc

SEQ ID NO: 307630 - DNA, 25 bp, Probe Sequence
tatttgcctttacctcatatgagtc

SEQ ID NO: 307631 - DNA, 25 bp, Probe Sequence
tatattgcactggctattcatcttg

SEQ ID NO: 307632 - DNA, 25 bp, Probe Sequence
tatatctgaagagtatccttccttc

SEQ ID NO: 307633 - DNA, 25 bp, Probe Sequence
tatacgaatgaatgccagctctgct

SEQ ID NO: 307634 - DNA, 25 bp, Probe Sequence
tataccaaaagggttctgcttattt

SEQ ID NO: 307635 - DNA, 25 bp, Probe Sequence
tataccagtacagagccttgcttat

SEQ ID NO: 307636 - DNA, 25 bp, Probe Sequence
tatacaattactgacctatgctcta

SEQ ID NO: 307637 - DNA, 25 bp, Probe Sequence
tatacagttttctaacatagctata

SEQ ID NO: 307638 - DNA, 25 bp, Probe Sequence
tatacactgtaatgaaccgctgaat

SEQ ID NO: 307639 - DNA, 25 bp, Probe Sequence
tataacatgtaattgatttccttta

SEQ ID NO: 307640 - DNA, 25 bp, Probe Sequence
tataaattaatttgctttcagttca

SEQ ID NO: 307641 - DNA, 25 bp, Probe Sequence
tatataattaatcactattttgtat

SEQ ID NO: 307642 - DNA, 25 bp, Probe Sequence
tatatactttcaaatcgtttctttt

SEQ ID NO: 307643 - DNA, 25 bp, Probe Sequence
tatatagtaaatgcttttttttccg

SEQ ID NO: 307644 - DNA, 25 bp, Probe Sequence
tatacagatcaaatgcttttttctt

SEQ ID NO: 307645 - DNA, 25 bp, Probe Sequence
tataaataaagctatattctgtaaa

SEQ ID NO: 307646 - DNA, 25 bp, Probe Sequence
tattcagtaaacaaattctttcaca

SEQ ID NO: 307647 - DNA, 25 bp, Probe Sequence
tattcaattacatgtgatcctggta

SEQ ID NO: 307648 - DNA, 25 bp, Probe Sequence
tattaaaatcaggcaattcaggtcc

SEQ ID NO: 307649 - DNA, 25 bp, Probe Sequence
tttctactctaggagatcctggtcc

SEQ ID NO: 307650 - DNA, 25 bp, Probe Sequence
tattacacctgaggaggccaagtac

SEQ ID NO: 307651 - DNA, 25 bp, Probe Sequence
tattacctcctagggccaggaagcc
